United States Patent Application Publication US 2022/0090207 A1 - sequence listing, part 26

SEQ ID NO: 340378 - DNA, 329 bp, Homo sapiens
  chr9:135267105-135267434
  hypo
cgggcacgaactgcgtgcctgcctccctcccaacgtgtcccgtgccactgcggggaagtgaccctccgcccaggctctcccaccaccagtttattggggtcctggtccacttggcagttatatttgcacggacagttactgaagtgtggtaaaaaccagcctagtgggtaaaggtcacatggcttcactaaacacacgaggaaaccaaacaaattagtatagagaacagcttaagaaacaaagctcttgcggaagacaggtctacggtgatttccgggcattggatcggttatggctgaaccaggcctgtcagggcttatttcttcagc

SEQ ID NO: 340379 - DNA, 231 bp, Homo sapiens
  chr9:135275329-135275560
  hypo
cgatctataaatctgaatcatccataaaagaaagttaggtgctagctctgcatacaggaagttcaacaaacactaaggccccacaagctcaccttgtgctttaaattccttaaaccgttccaagtcgtcccggtacatccgcttgattgtgctggtggccctgtccttgatgttaggaatgaactcctgaagctgtttcacggcagaacccaaatccgcatctgaatcatc

SEQ ID NO: 340380 - DNA, 672 bp, Homo sapiens; identical to SEQ ID NO: 223712
  chr9:135285314-135285986
  hypo

SEQ ID NO: 340381 - DNA, 755 bp, Homo sapiens; identical to SEQ ID NO: 333821
  chr9:135286199-135286954
  hypo

SEQ ID NO: 340382 - DNA, 1046 bp, Homo sapiens; identical to SEQ ID NO: 333825
  chr9:135461876-135462922
  hypo

SEQ ID NO: 340383 - DNA, 727 bp, Homo sapiens
  chr9:135512940-135513667
  hypo
ggacgcagcacactcgcctctgacgccttcccggcctgccaaaagtcattactgccgtgtgtggaaagccatcagcagggtccaggcccccgttgtccgggtgacagattgggctgcgtaatcagaggaggaaggagagagtgcagaagctgtcagaggcgagagatcttggctggagccgccaaaaaactggcaacatgagttagcgtaactgagtaaacagcaaacaatctccaaatgatctttccattaacgaaacaaaataaaacgaaaaagatacactttacctaaaaagcataccccagagaaaagcacgaaagtctacatttatttgggacacagaactgacattgtgactcttcacagccgtatctcctttgtctcctagcctcctggcacggtggaaattccccaggaggagaggaaattaagaactgcacagacagaacagtatgcttcaagcggaaaaaaatacggagaaggtggaggaaagcagcacaggtgatttaggtgcatcttctgaaaaagaaatgcacgcgccggacagccaaggaggatgccaagggacagttggcgcccagggcgggctgcaggtatctttcctttctgggaaaaaggtgactgcactccatccagggacaatcaaggacagccaccggagaccaacagaaaacctaatgtcagccttaaaatcaggtggcttagaaactccattttccggccattc

SEQ ID NO: 340384 - DNA, 141 bp, Homo sapiens
  chr9:135523845-135523986
  hypo
cgcagccgactaaaatgaatgttctttgtggattttatatgatccaccaggcgtccaggagttgagataaggatatttattcctttgcggagtctgtttaaaattatatatcataaaagaaagtaaatcaaacagggccac

SEQ ID NO: 340385 - DNA, 115 bp, Homo sapiens
  chr9:135548194-135548309
  hypo
cgttgtttaggttttttggaagattaaacacacataatcacttggcccagttcttggcacgctgtaaatgctcaaggtgaaaatataatgagttgggccgggcgcggtggctcac

SEQ ID NO: 340386 - DNA, 155 bp, Homo sapiens
  chr9:135767923-135768078
  hypo
cgcaggaggtgggcggcaccccatctcaccaaggtcctggccgggtcttcgctctgcccaaaccctcctccagcctgtgcaggcctcctcccacctcttagtgctttcagcgagaaaaggtgagtctcattacgcagaacttttgtttgctcttc

SEQ ID NO: 340387 - DNA, 203 bp, Homo sapiens
  chr9:135781263-135781466
  hypo
cgcagggctttcatcagcactgccgcagggcaggtctatgggagtaaaggcttgctttggtgtgtcaggcccaagcttgtccagggaggagtgtaaaggctcagggttcacgctggcgccctgagaactggaggctgccgagtgggtcttccgctgagaacctgggagactgtctcggtaaaagggagagtcaaagcctcctc

SEQ ID NO: 340388 - DNA, 107 bp, Homo sapiens
  chr9:135865156-135865263
  hypo
gcaaggccttcaagcgctcgtccacgctgtccacccacctgctcatccactcagacacgcggccctacccctgccagttctgcggcaagcgtttccaccagaagtcc

SEQ ID NO: 340389 - DNA, 60 bp, Homo sapiens; identical to SEQ ID NO: 261007
  chr9:135898911-135898971
  hypo

SEQ ID NO: 340390 - DNA, 113 bp, Homo sapiens
  chr9:135908551-135908664
  hypo
cgcagctatttgattacaagccttaaattcatcaggtacccctcggggaactccagtggcatctgtataaacacgagggtcaaaggaaccacggggggcatctcttactctac

SEQ ID NO: 340391 - DNA, 258 bp, Homo sapiens
  chr9:135926595-135926853
  hypo
cgtgcgttgttcagatgtgacataaacgtggagctctgggatccactgagctcttattcttccattcactcattgcagccaagccagtggggcacctagtgtgccaggcccagcactttcttaccgttagaactggaaccgtgctgccaggcagccctccttccccgggcttgcgggtgccgtggagtcctgcgtccccactggcatgagcatcaggttcacaggccactgccacctggagcccggcgcttcccttac

SEQ ID NO: 340392 - DNA, 222 bp, Homo sapiens
  chr9:135945862-135946084
  hypo
cgcctacctgttttcccatccctctcggatgcccgtctaccccaaatgggtgggggccgaccatgcagatgacattcagtacgttttcgggaagcccttcgccacccccacgggctaccggccccaagacaggacagtctctaaggccatgatcgcctactggaccaactttgccaaaacagggtaagacgtgggttgagtgcagggcggagggccacagcc

SEQ ID NO: 340393 - DNA, 381 bp, Homo sapiens
  chr9:136372653-136373034
  hypo
cgggtctcccagcagcgcccgcactgggcagcctttctgacccagcgcctcactcccccaatcccccgcgatggctcagttctgggtctgcctcccccatcagtctgtgcaccatcggaaggcagagcccaggtctgctggacttgtgtgactccttggggttgggaaagctgtgcggcacatggagacactcaggaaggggcgacgtttaaactgggccctgggaccgagccccctgtttcctgctgtttcaggtcaagcgttggggcggcacagcaagaccagggcagagctggtgatatgacacagggcacgattcacccgagatggttggaggggaagggtcacccgtcagtactttcacacgcaaggccacgccac

SEQ ID NO: 340394 - DNA, 38 bp, Homo sapiens; identical to SEQ ID NO: 261024
  chr9:136375607-136375645
  hypo

SEQ ID NO: 340395 - DNA, 321 bp, Homo sapiens
  chr9:136380597-136380918
  hypo
cgctgggcttggtacctcaaagaagaagcgtagcatcagggccagcgccccgaagcagaggccggggcctatctgctgggtgtagacgctcttgtctgggtacaggcccttcttctccttcatcttctgtagctgtgaggacaggaggccacagcaaagcttttaggtcacagcactggggaacgcccctccccaaaccagcccgagagctggccctgcacaggctcaccccagccctctcccggcaggagaggaggctcaggagcctcctgccgcacccagcctcagatggcttctgctggacagggcccttcacggtgc

SEQ ID NO: 340396 - DNA, 219 bp, Homo sapiens
  chr9:136383917-136384136
  hypo
cgaggcaggaggagtcagacaggggagaggtgacgggcctcctgggtccccgttcatcgaggctcgcgcagtacgcacccactttgccgcgatgatgaggatggctgtgccgatggggcccgagtacaccccgtagccccatcggtcatggtagatccgcacagcaatggtcaggacgccgaacatcacaaatgttgacctcttgggttcgtcgaagtc

SEQ ID NO: 340397 - DNA, 574 bp, Homo sapiens
  chr9:136385211-136385785
  hypo
cgggactggtttgaggctgggtgtgcggacactggggagccggtccttgtccgcaaggcttgtctgcaggggttgaccactcacccatcagcgagacccacatgctcagggctgtcccgtagacactgaaatactccaggatgtcgtgacgcatgaagcacagcacagacaagccgggtccattgcaggcatggtggagctgccagaaaacccacaggtggtcacagcacaaagaggccagagctggtccccgagccacggcccccagagtgccaggtcacttgctggctgtgagaagtcactttggcgagtcacttaatgactgtgtgcctcagtctccccgtctgaaaaatgggggtactgccgagcactcccgcagagggtcctgtggggattaagtggcacatgccagcgaggtgtttaggggctggggtgtgccaagggttcactcaatgtcacctcagcagaattcgctcatctgcactggcaggactgggcggagactgagtggtcactcaggtgaagcccgcttaggtggggcggtctccgggagggaccctacacggctctcccc

SEQ ID NO: 340398 - DNA, 146 bp, Homo sapiens
  chr9:136393635-136393781
  hypo
cggcagcagccctcctctgcccagcagatggcaggccccagtgggctccagcgggctggtcctgggccacgctggggagcagggccgccctgcactccccttccctcacccccacagccgcaggagcgcccctgctttatagaggc

SEQ ID NO: 340399 - DNA, 313 bp, Homo sapiens
  chr9:136397028-136397341
  hypo
cgacagctcgggccacgtccttaaactcccgagcctgctgtggccactttgctgtgaggacaggccctgctcccactgcggcagcctaacatcctccccagggaacctccaaagtggtcagccacggcccaccagcccctctgcctcaagcctgcttctctatccccgccgtgttttccctggaaccccaccctcccgggcatcccccacacatattcctgctgtcctatttctaagctcctcagatatctggaaaacactggcggagaaaatccccttcttttttttctctctctttttttctttttgagac

SEQ ID NO: 340400 - DNA, 643 bp, Homo sapiens
  chr9:136402186-136402829
  hypo
cggccagggtaggctgtgtcctgcagaacgcagttgggccctgagctgctccggggaaagtgaggacagttagatgcggccccaggagcttgccaagcccccaggccatcctggaccttaaggtcaaggaggacccgtggcccacggttccttgggagttccccccagcgccacccaggagatctgaacccaagctgccgagtgaccctgcaagggggcccagccagggggctgtgtcttctggtcccgctgacggtgataccctcgggcatggggtgggggcaggctggtcctcctgggcacttgagccctctaccatctgggggtccctctcacccaggacaacagcccaacatccaatagcctggaggggggcaccgacgccacggccttctggtggggggagtggaccaagtggacggcgtgttcccgcagttgcgggggtggggtgacatcccaggagcggcactgcctgcagcagaggtgcgaggttgggcacgtggccctgaggggatggcatgagggcagggtagcgggcaggagagggcggttggctcttcagcctggtggcttctccccctgggagggctctcgggttgggggcagcacaggctgagtccccccatcagcctctgctggacgc

SEQ ID NO: 340401 - DNA, 188 bp, Homo sapiens
  chr9:136508536-136508724
  hypo
cgagcccatcgtcaccaagggcaatgaggcccttgtccaccacatggaagtcttccagtgcgcccccgagatggacagcgtcccccacttcagcgggccctgcgactccaagatgaaacccgaccgcctcaactactgccgccacgtgctggccgcctgggccctgggtgccaaggtgcgtgccctgc

SEQ ID NO: 340402 - DNA, 211 bp, Homo sapiens
  chr9:136667535-136667746
  hypo
cgccccactccggctgactcctcccctggagaaagttgttcaggcgcaaatgatttctgtcctgatagaggacatggccccaaaggtctcagtgtggtcaccttgcaaggcacggcccgccgtgtccagcatcctgcccgacctcccctctctgctgacaaggtatgtggttcccttgctcgtgagttgacagacccgtggcccgagctcc

SEQ ID NO: 340403 - DNA, 104 bp, Homo sapiens
  chr9:136698796-136698900
  hypo
cggtcccgatggggccctggtgctgtggccaggcttgggcagcgcctgggtggagcagaggcctctcagagagaggaatgaggtggacacggagaagagcagag

SEQ ID NO: 340404 - DNA, 141 bp, Homo sapiens
  chr9:136728458-136728599
  hypo
gaggcaccagcattcggtcagcgctgacacacaagaacctgtttgtcaacctggagtcagcgcaaaggccccaggtcgggtcgtacagatggaaccgggtcgtacagatggaaccggagacagagaggaggcgtggcgggc

SEQ ID NO: 340405 - DNA, 426 bp, Homo sapiens
  chr9:137017050-137017476
  hypo
cgcgtgagatcataacttgtctgcttacgcttttttgttctctttgcttcgaagtcgcatctgggacaccgcctcaggccagtgcctgaagacgctcatcggtgagtgtggctctgtgtgggggctgggtctgtggggagggcctcccctgctgggttcactgcccctgttcttcaccagctcctcctccctcctctgccctgggtccgcccctgcaggaggaaccttcctccgtgtccgaccgttccgccagctccccctgaccgcccgctggctctgttgctccttctggtgcagttttcctgccatggcctttctcttgggccagcctggggctcctccacctgtgctgtcggcctcactccggctgctcactggagtcctctgggcagccccattgcctcctggcttcgggcccctgctgtc

SEQ ID NO: 340406 - DNA, 351 bp, Homo sapiens
  chr9:137620493-137620844
  hypo
cggggccgcaattcgctttcagtacacggaaggagacggcgagggtgagacctattactacgaatacccctactacgaagaccccgaagacctagggaaggagcccacccccagcaagaagcccgtggaagctgccaaagaaaccacagaggtccccgaggtctgggctgagcgggggactgggttgggctgggcccctcgaggccatggtgcaggggagggcgaggccaggagaggttgtgtcagggtagagggttgggggctgtctggtgaaggttgcgggggcagctcagtgagggagccggctgttgccatccgagctttgctgtcacggggcgtatcgggctttcc

SEQ ID NO: 340407 - DNA, 395 bp, Homo sapiens
  chr9:137623301-137623696
  hypo
cgtttgcgaggcaaccctgcgccttcctctccctctgcagccagctccgcctccaggggaaggtgcggatgacttggagggggagttcactgaggaaacgatccggaaccttgacgagaactactacgacccctactacgaccccaccagctccccgtcggagatcgggccgggaatgccggcgaaccaggataccatctatgaaggggtgagagggtgcaggcccccgttccgggtggggttggggggctggtggggcatcatgggggctcctgcccaagagcctcctcaggggtgggcctctacgggcagctcaagtgttacaccctattcccaaaactttatttttaaagagacctcggtgcctcgaatttgctctgaataacgtgtgtatc

SEQ ID NO: 340408 - DNA, 469 bp, Homo sapiens
  chr9:137642192-137642661
  hypo
cctcagcccacagccgtgcccctcccttctccgggtgggggtttctgaaacattcctgccacggggtctcacagcttctgtgcgtgtccagtgcatttcccgggtgggccgcttctccgacgccctcattctcgctgcagcccagccctggcctggttgcactctgacttgtctctcttggccccttgtcttcagggcccccctggacgcccaggccttcctggggccgatggcctgcccggtcctccaggaaccatgctcatgctgcccgtgagtacccttatcagtcggaggtggggaggcagctggggcaggtgggatccaaaccagaccctctgaggctgcgctgtcactggagaggcctgtgggccccgtctcagtctgtggtcttgcctgggtgccacgtcactgctcccagagtgacccttgtcttacacttgcagttccggtttggaggtggcggcgatgc

SEQ ID NO: 340409 - DNA, 305 bp, Homo sapiens
  chr9:137645508-137645813
  hypo
cggctcctggaaagtcatcgttcttccccccggttctgttcgaggcagacaggtcgcgctttgtgtgctgagcaccgtggccgaagccctgtcccctccccctgcccctcccctgccacccccagcccttcctgtgttctcgagtccccacctcgagcagacattaacacacaccatgtctccctagggtccccctgggagcggaggtttgaagggcgagccgggagacgtggggcctcaggtatgtgggatccttgccttcgctgtctggtgggcgcctcccgttctccggcggcagcgacggc

SEQ ID NO: 340410 - DNA, 163 bp, Homo sapiens
  chr9:137646079-137646242
  hypo
cggactcgccactgaccctttgtctcttacccctggcagggtcctcgaggtgtgcaaggcccgcctggtccggccgggaagcccggaagacgggtgagtggtgcgagtgtgtgtggtttagtgacagcagcttgggcgctggaggagcccaaatctggggtgc

SEQ ID NO: 340411 - DNA, 188 bp, Homo sapiens
  chr9:137648346-137648534
  hypo
cgtgatccccctttgacagtctgggatgacgtggtccggaaagaccagccccgtgtgttccatccgttggtgtgaggcacagaacagccccgcccgggctcctggatctgggtcctcgcagcagcccggccactcgggctgtgaccttgggggtgggcgcggctctggtggaacgctcaacttggttt

SEQ ID NO: 340412 - DNA, 1004 bp, Homo sapiens
  chr9:138011461-138012465
  hypo
cgggcacggggcaggtggtctacaacggttctatctacttcaacaagttccagagccacatcatcatcaggtttgacctgaagacagagaccatcctcaagacccgcagcctggactatgccggttacaacaacatgtaccactacgcctggggtggccactcggacatcgacctcatggtggacgagagcgggctgtgggccgtgtacgccaccaaccagaacgctggcaacatcgtggtcagtaggctggaccccgtgtccctgcagaccctgcagacctggaacacgagctaccccaagcgcagcgccggggaggccttcatcatctgcggcacgctgtacgtcaccaacggctactcagggggtaccaaggtccactatgcataccagaccaatgcctccacctatgaatacatcgacatcccattccagaacaaatactcccacatctccatgctggactacaaccccaaggaccgggccctgtatgcctggaacaacggccaccagatcctctacaacgtgaccctcttccacgtcatccgctccgacgagttgtagctccctcctcctggaagccaagggcccacgtcctcaccacaaagggactcctgtgaaactgctgccaaaaagataccaataacactaacaataccgatcttgaaaaatcatcagcagtgcggattctgacatcgagggatggcattacctccgtgtttctccctttcgagccggcgggccacagacgtcggaagaaactcccgtatttgcagctggaactgcagcccacggcgccccggttttcctccccgccctgtccctctctggtcaaacaacatactaaagaggcgaggcaatgactgttggccagttctcaccggggaaaaacccactgttaggatggcatgaacatttccttagatcgtggtcagctccgaggaatgtggcgtccaggctctttgagagccatgggctgcacccggccgtaggctagtgtaactc

SEQ ID NO: 340413 - DNA, 335 bp, Homo sapiens
  chr9:138143914-138144249
  hypo
cggctgttcacatacccacagcccaggtgcacacacgtgcacacacggaaaatagctcatgcatggacacgcaaatgcgcacccagaacaacacacttcacacgcgttcctagacaccctcacatgcctgcgcacctgcccatgtgcccgtgacatgcatgtgcccgtcttacacacgcacacatacacatttgaacacgcacgctttcacacgtgcagtcacacacctgcctacgcacacctatgtgcccgtgacacagatgcacacgtacgcaacataggcacacgctcacctacgcctccacatggccaaccctggcctcagctccttcacc

SEQ ID NO: 340414 - DNA, 170 bp, Homo sapiens
  chr9:138247974-138248144
  hypo
cgggatggacgctcagacccttgcaaggcagcactgacgggagccacggcggagcaatggcctcgatagtgaccgggcactgacgggagccacggcggagcaacggcctcgatagtgacctggcactgacgggagccacggcggagcaacggcctcgatagtgaccgggc

SEQ ID NO: 340415 - DNA, 158 bp, Homo sapiens
  chr9:138265193-138265351
  hypo
tggaggcagccttgcgatgagctctgctgcaggcctgtggacgcgagccccactgcttcatggtcgcccactccctctgttagagtctgacctgagtccatttgtactggcagcttccacaacacccactgagacccacgccaacgcgccccgcccac

SEQ ID NO: 340416 - DNA, 121 bp, Homo sapiens; identical to SEQ ID NO: 261185
  chr9:138393597-138393718
  hypo

SEQ ID NO: 340417 - DNA, 125 bp, Homo sapiens; identical to SEQ ID NO: 261188
  chr9:138562774-138562899
  hypo

SEQ ID NO: 340418 - DNA, 403 bp, Homo sapiens
  chr9:138562929-138563332
  hypo
ttaccagggaagccggagctaggagcagaggcaggcgaagccccaggaggggaggcatgtccactccccacagcccctcccataccagaggcccttgacaatgcgcctgcaggtcaggcgaccagctaggtgtggggtgagcccccgcctctgtttccccaaatgactggtatgttcctgggcacacatccgatggctgccagcctgcacgtcacgcccagctgccggagctactgcgggattccagaacaaggaacgtgacatgctcggcctggagcggaacaaggcacctggctcccgcaccctcgacggggccctgcccagtggacacgaccacgtggaagcctcttcctcctggcactgcagagcggatggcggatgcagatcccactttggggatggc

SEQ ID NO: 340419 - DNA, 747 bp, Homo sapiens
  chr9:138660497-138661244
  hypo
cgaggtggaccgcacggctgcagtgagtgaggctgaggccctgcccaggcgggaggggcaccgtggggccggggagcgggggtccctgagggaagagacctgccccaggctgccggtgccgcccagcagcccacagaggccagcccgtctgcactgaccaaccacccaccccgccaggaccaccagaccatcctgcgcgcctgggccgtgaaggacttcgcccccaactgccccctctacgtccagatcctcaaacctgaaaacaagtttcacgtcaagtttgctggtgcgtctggggcacacgtgggtgatggtgtatctggggcagggcacgtgtgcacacgtgggtgatggtgcatctggggcagggcgcatgtgcacatgtgtgacggtgcgtctggggcaggacgcgtgtgcacacgtgggtgacggtgcgtctggggcaggatgcgtgtgcacacgtgggtgtcggtgcgtctggggcagggcgcatgtgcacacgtgggtgacggtgcgtctggggcagggcgcgtgtgcacacgtgggtgacagtgcatctggggcagggcacgtgtgcacgtgtgtgtcggtgtgtctggggcagggcgcgtgtgcatgctgttgggtgatggtgcgtctggggcagggcgcgtgtgcacacgtgggtgacggtgtgtctggggcagggcgcatgtgcacgcagttaggcgagctgtgtggggcagcgggaggggctggccctggagc

SEQ ID NO: 340420 - DNA, 481 bp, Homo sapiens
  chr9:138661532-138662013
  hypo
ccagggcctgccccgccctggaactcctcgctgagctgggagagaagcacaggagcgatggaaggtccaccgaggctcagaccaagtagggggttgaggtccacagactctcggggcagagatgctgaagccggacagcagacacgggggtgccaggcaagggtgcatctgcatagcaccttcaggaagtgagcaggtactgtgggggaggagagagccggcagagcggcaggtggaccggcctcccccactgcccgcagaccacgtggtgtgtgaggaggagtgcaagtacgccatgctggcgctgaactgcatctgcccggcgacctccaccctcatcaccctgctggtgcacacgtcccgcggccagtgagtgccccgtgccccgggggaccgacctccatggcggggccggcgcagggagacaacgcagggcctgcttgggggcggggatgggcttcccagaggaggggcacatggc

SEQ ID NO: 340421 - DNA, 355 bp, Homo sapiens
  chr9:138662653-138663008
  hypo
acagggcgggtgagcggcggtacctgaagttgccggtgcctctgcccaggtatggcgtgtgcctcatcgggctgaagcgggaggacaacaagagcatcctgctgaacccggggccccggcacatcctggccgcctctgacacctgcttctacatcaacatcaccaaggaggagaactcggccttcatcttcaagcaggaggagaagcggaagaagagggccttctcggggcaggggctgcacgagggtccggcccgcctgcccgtgcacagcatcatcgcctccatgggtgagccgggacaggcgcgcgggactccctgggcctgctcctttggcgggagaccaggcgggacacc

SEQ ID NO: 340422 - DNA, 132 bp, Homo sapiens
  chr9:138663355-138663487
  hypo
gttggcagctcaaccggaggctcctggtggtcccatcagcccggagggtctgcttcacgtgtgtccctcaaacagtcgggagtcctgacgtccactggggccaggagttggcggaatgaggtcgcagtggcc

SEQ ID NO: 340423 - DNA, 301 bp, Homo sapiens
  chr9:138670510-138670811
  hypo
cgggccctcggtcccgccaccagcctggacagcctgctgcagtgtggcatcatctatgcggacaacctggtggtggtggacaaggagagcaccatgagcgccgaggaggactacatggcggacgccaagaccatcgtcaacgtgcagaccatgttccggtgcgtccagtgtccggggctcggctctaaaccaccccacagccacgaccacgggccctcgccctgagacccccacagccacgaccacgggccctcgccctgagacccccacagccacgaccacgggccctcgccctgagacc

SEQ ID NO: 340424 - DNA, 185 bp, Homo sapiens
  chr9:138719269-138719454
  hypo
cgggtgcaggtagtgcctgtgacagccttccgccggcagctgcacggggggctgcagctcagccagggtccctgcagcagggctgcctaggaaactgcgtttggtcgcgttggagatcggtacaggaggccggctgctcttctggtgtaacactgttttcgctgcagaaatagcgtttttgcatc

SEQ ID NO: 340425 - DNA, 277 bp, Homo sapiens
  chr9:138743599-138743876
  hypo
cggagagatttccgtcactcatcttgaccgctatatggtcctccacgatttctcacaattatgacaaatgctgccatcacaaagcttgcgtgtgctgtctatgcgtgtacagacgggtgttgcccaggcatactctgagaggggactcgctgggccacgagctaggcacgccctcctgtgtcacctggcaacgcccttctgcctggttgtgcctcgctccagtcccacccacagcactccacagcttgctccttcccacctgcaccgcagcatgacc

SEQ ID NO: 340426 - DNA, 142 bp, Homo sapiens
  chr9:138774077-138774219
  hypo
cgccttagtgcagcttcctcattcgacaggaatgacactctcttcaaccaccgcacggcacccgcagtctcaccgggaacgccatgggagcaaccaaacaaaggcagtgcaggaggcaccgagaatggccctgacccagaac

SEQ ID NO: 340427 - DNA, 90 bp, Homo sapiens
  chr9:138774525-138774615
  hypo
cgccagtgtgcaaaagcacgggtctccaccacctcgccgcacaccgtgttcacaccatccatgcaccaggtgcgccacacgagagcccac

SEQ ID NO: 340428 - DNA, 463 bp, Homo sapiens
  chr9:138780573-138781036
  hypo
cggaaataattccaactcaaggtaaaagcgaccagtagtccacgccccagctccatcctggagaggccagacacaagggtaagaaaagctgatgtaatggtccccacagggccaagaccacctgacccccacccagggacaaccagtaacaaactgcaccttgacagcggagcgccaggtgcacagacaagcacacaccccacagggcgctggcccgggcatgccacaccaggctcaggtgcagacttggcttccagccagaaggccagcaagggagaccctcgggaaccctcagagaggggagaggatcccagagaagagggggctggatagggagaccctctaaatctgtgtcacatcctggccactcctgaagcaactacagtggcacagcagccactctgagggccacagcccacagcccagccagagcggcaggacgaagaccgaaaatgaaacctac

SEQ ID NO: 340429 - DNA, 310 bp, Homo sapiens
  chr9:138873235-138873545
  hypo
cgcaggttgtcgcaggacacgtgttcgtgtccaggtgcgctgggaagggtcctggcggtgctcctctcagcgcaggtcccgaggagctacaggcatgacgctgccttcagaactcccccgagcctgctccttcccagccttggctcgtgaggctcctccgaggaccacgggccttccacggcgtagccctgccacgaagcctccccatgtcttgcctccagcatcacctggccgagacggacctagggcgtccttctccagcatcatctggccgagacggacctagggcgtccttctccagcatcacctg

SEQ ID NO: 340430 - DNA, 538 bp, Homo sapiens
  chr9:138877542-138878080
  hypo
cgctctgctcacgtgttggttgggactcgggtgaacacgaggcagcggaggcaatcagaaaggacgcgctgagggctgcgcttacccccatctctctttccctggggtaggccccttcctcctgctcctcctgaatgctggcacctgcgcagccctctgccatgactccagagccaacccatgctcacaacctccacgtgctgcccccagctggcctgggcactcggcctccccctctcctaggtccagagaacgggtctgaaagcctgtgggggccaacagcagcggcctgttccccaacctgcacctccagcccaggctgtcctcctcatcctgcgttcccgggcctggtgtggagctggacacgtcccgaatgtccctgtgtccctgcgcaggcatcaggtctgaaatgccatcggtgcttcaggctctcgtgtccgcgtggccggcaggatgcttcttctgaagtggaccgagagccgttcactcgtgccaaggggtgtttgagaacggagccaagtgcagggcctgcaggggc

SEQ ID NO: 340431 - DNA, 1554 bp, Homo sapiens; identical to SEQ ID NO: 333834
  chr9:138986173-138987727
  hypo

SEQ ID NO: 340432 - DNA, 133 bp, Homo sapiens; identical to SEQ ID NO: 261245
  chr9:139000509-139000642
  hypo

SEQ ID NO: 340433 - DNA, 485 bp, Homo sapiens
  chr9:139028149-139028634
  hypo
cggggttatttatgaattcatctatttcctgggacaagccattctgcatttggttaccatggtagctttaaacccggtatcttattaattctgcatgttatgaaataaatatagatcagacaattgcagtgatggttctatctttttattatgcatttggttcttggtgccggggatgggatgctcccaacacaccaccgtcaacacacatccatcagcctcgggggcctgggcgggctgcaggggcgcactcctgcgcctgagaatggagtggggctgaggaggggacacgaggctgtctcagggaaagggtgaagcttgaagaccccccagggcaccggcagctcctgaaggaattcctacagcccggcagggatggacgcaccggggaaggaggccggtgtcctggggtgcttcggctggaattgcagggccagtgggttggaatggctcccacctgcggactgggacctcgtggcgctgcc

SEQ ID NO: 340434 - DNA, 93 bp, Homo sapiens
  chr9:139079359-139079452
  hypo
cgcaggatgcgctgagaacgatggccccttcgctgcagcgtgagaaactcaacgtcacccaaccaggacagggagggaggaagaccgggggcc

SEQ ID NO: 340435 - DNA, 908 bp, Homo sapiens; identical to SEQ ID NO: 333836
  chr9:139090420-139091328
  hypo

SEQ ID NO: 340436 - DNA, 540 bp, Homo sapiens; identical to SEQ ID NO: 333837
  chr9:139093549-139094089
  hypo

SEQ ID NO: 340437 - DNA, 311 bp, Homo sapiens; identical to SEQ ID NO: 223726
  chr9:139096714-139097025
  hypo

SEQ ID NO: 340438 - DNA, 216 bp, Homo sapiens
  chr9:139106812-139107028
  hypo
cgtgcccccgcagccacagccctgggtgagctgaccgtgtgagaggagtctgaagtgccattcccctgcctcagtggcctggcgacatgctgcctcccatacagcagtacatgcctttgcacacaccggctgggttaacttgttaggcagaccatcggcccctctggcctgtatgggcacagcttacctgtgccaaccagtgcatctgggtgggtc

SEQ ID NO: 340439 - DNA, 568 bp, Homo sapiens
  chr9:139110897-139111465
  hypo
cgatttctgaattttcttctttgtgtggcttttcaggcaagggaagcgattttttcctcacatccggcaatgacttcaaataagacgaaaagaaggcccgcagaggcttcacgctgtgagagaggggagggcaaaggtgagaagagcctcctttataaaatcctaaagtaggagccgtggcattcaggacagctctgggccacccctttcatcctttgggcatttattggggcatgggagtcagtgggaacagctgacaccccgcctgggctccggctgcgcttccacctgggggataagaggagacacaccaaatccacagatttacaaccagttccagttgtaataagtactatgactcatttatgtttgtggggaccttaaggcgttttgtaaagctgggttgagcatctgccaagatgagctttattctgactgcgatttccaacacgcctaagagccttcaccgacgcgcccacaatctgccagccctgagtgaggcatctggaagtcggggcctggggtggacgtcagcccctccctgatgtcaggcccctgagctccctgc

SEQ ID NO: 340440 - DNA, 935 bp, Homo sapiens
  chr9:139268627-139269562
  hypo
cgggggagaaacgtcccttccagaagtgtcgttatcctcgttatccccatcatgaggcatccctgctctccaccaggatgcatgtgaggactgaggccactctcggggtcccccaaaccagcttcagaagagccggtgacagcagggcacagctcggcccccatccagggacaacggacagcagagtctgccctgaactgtgcacttcagcgtgtgggctgccagagcctcatccctgcaggcttgggaacccccaggccccgcctcacccggtaaagctggttgaactgagttgccacccaacaggttcgagaaggggccgccaggctggaaggcaaggaagctggtgtggagcttgcctaaccgttctcagcctccagccctcaggcctctgtgcggacaacgtctgacatcacacattaaggagcggacagttaggggtcctcctgggctctcgggaatgccacattccagggggccgtgcccctgctggacccctcaccatcaacatgagcgagtgtgcaggccggggccatcctgggccctgccagggagcgaaccggagctggcaccaggccctcatgacccagtgtttccccagcgtttaaaacgcggaccttagtgacttccctgtggtgtgtgtccttaggagtgaacacacataccatgttctctaaccatatcggaagctaaaaatcggtaacagatatcggcaaaatctctaaatatttggaaattaaataatataccgctaaataacccacagatcagagtggcccccagactaggcaccagactagagaaccaggcacagcaacacatactcaggagtgaggtcggccatgggaccgtcccgtctgccaggtgcccagggctgaggccccacagtggctccagtgaaggatcgaagcccagatagccaagggcctgggggc

SEQ ID NO: 340441 - DNA, 736 bp, Homo sapiens
  chr9:139317510-139318246
  hypo
cgcgctcgtgtgacacgcgtttgccctctgcactaggcaacgtgaagccggaagatgtgaagagagtcgcttctaagatgctccgagggaagccggcagtggccgccctgggtgacctgactgacctgcccacgtatgagcacatccagaccgccctgtcgagtaaggacgggcgcctgcccaggacgtaccggctcttccggtagaaccgctccccggcctgacagacccagggagctgcagctggagcccgttcccgtgcgtgttagtttggacacgaatttagtctaaaaagctgtctggttgtataaacggtgcaaacaatgtcgccacagcacccacgcggtttgcattcttttggaactcaatgtgccgatcagtggagtcagtatcgagcctgaccaccgcaagccaggaagcaggtgaagtgcccagcgctggagtgcagcgtgccacgaggagggcggtcggtgcttccctcctcgggctgtgggcacatggggccccgcaggttccttggaggagccctgagctgggaggcagcaaaggctgacctatcaaagcctcccggaggccaccgtgctgggtaccaggactcacctctgacaagcaggagaaggtaagggcccggtcagctccaaggagcgcgctccacgcgcgtgcacacagcttccctggtaataaagagctggcatctttcttagcacggtgttttccttctcgcctggggaggggc

SEQ ID NO: 340442 - DNA, 233 bp, Homo sapiens
  chr9:139374838-139375071
  hypo
cgggcctagaggtttattccttggctgctgctgtgagagcaaaactgagtgtccaggtgagtggctcgaggcagccactcctctttctgcaatgtatttttgtctataaaatgcgagaatcgatgtgattattttttcctaaaaaacccgggtttaatcttatgagattctactcacagtggattctgggatgtcctaatcccacctgctgtttaacaggggtggccgggcac

SEQ ID NO: 340443 - DNA, 357 bp, Homo sapiens; identical to SEQ ID NO: 333839
  chr9:139401232-139401589
  hypo

SEQ ID NO: 340444 - DNA, 747 bp, Homo sapiens
  chr9:139421476-139422223
  hypo
cgtgagacgcgctagctggggggaaccgggccgagcctggagaaagttttgagccaggtgtgggggtctgtgtgtggggggcagctttgggcccagtctcccgctgctgctgtgggcagcctccagcctgtgcccgccccagtctgtacctctctcccacatggccacagagctggagcaccctacagacggcgaacacctgccctccgcacagcacccagacgtccctgagaaggtgggagggacctcaggcctgcagcatggccatggccaggaccaccagcctgtgagcaaatccttcacagctttggcgctggccacacccccggtacccgggccactctgtcttcaatgctgtcccggcggccaggtgggtgtgggccgcgaggtgggcgccagggcttggccgagtgaggtggcacccaacagctgccgcgcccacggggatcctcagggcttccatgagtgacccgcaccccaccttccaccgtccccgcatctcctcctatcaggggcggtggggagacccctctggggctaaaaagtgaggcttgagatagggaacgccagtctcccccgactggacgagagagctgccctgtccaccaagccacccagctctcgggctcccacggaggagacccaacccacgccaggtgtgcccccgtggactccccttccgtgcgtccctcttagggtcacccggcacctgcctgtcccatcccccacgctcagtggcctggcggc

SEQ ID NO: 340445 - DNA, 213 bp, Homo sapiens; identical to SEQ ID NO: 333840
  chr9:139440690-139440903
  hypo

SEQ ID NO: 340446 - DNA, 397 bp, Homo sapiens
  chr9:139506149-139506546
  hypo
cgcgtgcccggtccccactcacattgccacctgcctccggtgtggctgcgaagtcggagggaggagagagccagccaggggtgtgggcgccaagatcagagactcgcacgctgctggacggaatgtggaccggcccagctgctgggtcacctgccggcagctcccgaaacaaccagtcaccacgagacccagcaactccacccctaggtgtgcgcccaagataaacggaagctcctgtccgcacaaacacccgtgcggcttccttcactaagggtggaaacggcccgggtgcccatgggtgggtgacggatgaaccgggtagaccgtctgtacaatggaatatttatccttccgccacaaaaacagaagaaattcggacgcaggcttcagtacggac

SEQ ID NO: 340447 - DNA, 82 bp, Homo sapiens
  chr9:139546509-139546591
  hypo
tcaatgcactcatccgtggatgcgcatccgggtctatccacctctcggctcctgtgagcacaacgctgtgtgtacattgcgc

SEQ ID NO: 340448 - DNA, 653 bp, Homo sapiens
  chr9:139586531-139587184
  hypo
cgggggcaggggggcctgggctgcagtcggctcctccttcacccttcccccaaatacctccagagcacctatttccccagtttccccaccggcagtggtgtccaggggcttggctcttgcagggtggccctggctctggccctgcgccctgcccatgatgtggtcggaagggcctttggcagcaccggtccaagccttagcaaacccaactgggggctcagagccgccccccaatttcgggagcgacttcacctttccacaggatcatcctcttggcaagatgaggctgaggccgggggttcggggctcagcatcgaaagccggggcctgggtgccacaggccgtgacctcttccaccaaatgagagaaacggcaagacctccaggaagggccgtcggagcccagacgaggctgcagcttcctttggtgaagcgtccgagggccggctctggcgcctacaggggcttccgacgctgggtccttctcaggctgagcgccgcactcccacggccacccgggtggtgcacacagtttccagggtgtccaggcagcccccagtggacctggtgtccacgtcctcctctgaaccatgccaggcctgggccgtgggcatccgtgctgccgtgtggggcaggggcctgtgtcctggggcc

SEQ ID NO: 340449 - DNA, 252 bp, Homo sapiens
  chr9:139611146-139611398
  hypo
cggcccgcctgcgtctcttaaaggcttccaggatgtggctgcgttgggctcctagggccccgttctccaaacctggttctccttgtgggtctggtccggccggaacttcccaccaatctgcattacggtggacggtgggaaaaataggggcagtgtctctcgcggtgggcgcgctcacctggccttgtgcggaggtgacgatgttatgaaatgagatcaggataggaagggtttgtaaaaatatcttcattc

SEQ ID NO: 340450 - DNA, 45 bp, Homo sapiens
  chr9:139687851-139687896
  hypo
cgctgaaccccagaattagacgttcgcatcagccccgtaggccac

SEQ ID NO: 340451 - DNA, 821 bp, Homo sapiens
  chr9:139698453-139699274
  hypo
cggggtggagaaggggtggccaggagcaacggagctgagaactcctcaagaggcaaccccactaagcgctggcaacgagagtggcgagggtgagagcagtgtctggggtgcgtgagcaggggttagcagatgacggttttagctgcccaagggcacgctggaagaggccaggttttggggaagaggatgaatctgtcttcaggcaggctgaatgcacttccgtgagttctaggtggacctggccaggaggcagctgggggccagcggctggagggcagcagagcgtctgggctggcacatgctctgaggcatgggcaaggagggccgtgagctgaggggccacgggcacaagtggtttaggaaaagggtgtggccattggccggggatgcagttccaaagtctagtaaggtgagcatggccaaccgcccgctggctttactgccattaggggccttgttgagacagctccccaaccctgtgcccacccgcatgtccccagaggaacatgaggcaaagggaggcgtccttcatcgaggagcgccgggcaagggagaaccggctcaaccagcagaagaagctgatcgacaagatccacacgaaggagaccagcgagaagtaccgccgggtaagccccaggccagggcctggctggctgcccatccccatgacagctgggtggacacaggctcagggccaccactcagggcccactccctgccaaggatgtctcatcccttccccgcccccacctcccatcagggccagatggacttggacttcccctcgaacctgatgagcacggagaccctgaaatgtaagc

SEQ ID NO: 340452 - DNA, 326 bp, Homo sapiens
  chr9:139704090-139704416
  hypo
aaagttgatgtccgaaccaagggccgtattggcttttcttatactctagaacatacgacgacaaagaagattttgatgaagttcaaattagagtcagcgtgctcatcagaaagaaagcgcagccaacacgtttaggaacagaaacggattatgttgaagacaaacaatccattgcgtttgtgttcagtaacccaagcatcaaaggaacttgtggctggggagaaggcttgactatttgaaatctcaggactcctctgtccaggagctcccagactcccgtggagtggaagcctgggggctcgctgaagaagtcacgtgactggaac

SEQ ID NO: 340453 - DNA, 174 bp, Homo sapiens
  chr9:139730175-139730349
  hypo
cgtgctccctttctgcagagggagacgctgttgcggcagctggagacgaaccagctggacatggacgccacgctggaggagctgtcggtgcagcaggagacggaggaccagaactacggcatgtatgtggccggacccgcccgtgcgggcggtgtgggggctgcgggcgtggcc

SEQ ID NO: 340454 - DNA, 222 bp, Homo sapiens
  chr9:139793021-139793243
  hypo
cgattctgcttctctgagtcttgaccgcaggtcagtggggacccggcccctcaccatcgcctgctactgatcaccattggtttggttttgtctcgaggactgttctggaattgaggtgtaacgtgctgtgtgttcttccttagggctttgttcgcgggggtcacagctctcatggctgcagctagcgtgaccccccctggctccctggagttgctacagccc

SEQ ID NO: 340455 - DNA, 309 bp, Homo sapiens
  chr9:139803935-139804244
  hypo
cgggcctgaccatagcacatctggggtgccaagccctccgcagcagcatgtcagggtctgtcttggagacgtcccgcatgccgccagccctgcccatccgccaggccctcccaccggcctcgcctcccagcgggagcagcgtttccccatcttcaccggggccgttgtttcacgtggcttccaaatctcctctggtggcttgggtctccctcgcattgccctgagctggcagaacaaacaaagcgttaagatctccgaggctcctgggtggtgctggcaggatcctgcccgggaggagcactgtccttc

SEQ ID NO: 340456 - DNA, 340 bp, Homo sapiens
  chr9:139804287-139804627
  hypo
gcccagcctgagcactgtgtgccgccctccacccgcgcctggcattggcgtccaccctcacactcctgatcccttcttttgaaggcgcaccacgaggtctgccccaagttccccttaacttgtgacggctgcggcaagaagaagatcccccgggagaaggtgagtgtccttcacctccttggaggaccgcagggcggggcccatgtgttggacgtgagggtcccgtgggtgggggtggggcaggttatgacccttgtgcccaaaggaacagcagtgcaaagcccctgtaacgttgggtcatggatgcgttcagggtggcggccgctctcctgagtgggcc

SEQ ID NO: 340457 - DNA, 414 bp, Homo sapiens
  chr9:139809677-139810091
  hypo
cgaaaactacaaaaaaggtgcattctgagacgtcagagggaaatgtgtcaggctccccgtccgcagcgccgtgcggtcgttcagaaatttgcattcccataagcattgtgggagcaccgtctcccgagacttgccagcacagtgtggtgtgaaggttggacgtgccactgtgatgtgtgagaaacacatcagtcctctgtatcgggggtccacgccgtggatccagccaaccgtaggttggaaatgttcaggtaaaaatgcactgaacacgcgcggacattttttattgacacagcgttcacgttgtattggtcatgagtcaccgagagctgatttcaggtatgagggagggtgtgcttaggctctgtgcaaacactctgccatcttccatcagggactcgagcatccttgggt

SEQ ID NO: 340458 - DNA, 315 bp, Homo sapiens
  chr9:139818344-139818659
  hypo
atctacctgaacggcgacggcaccgggcgaggaacacacctgtccctcttctttgtggtgatgaagggcccgaatgacgccctgctgcggtggcccttcaaccagaaggtgaggccgtccctgcaggcttcgctagggccgcacctgggagtccctctgggcagtgcagcttctgtggtgcagggttgtgcgggacaaggtggcttgggctcgctggaccaggtgtctgcagcaggcacgtcaccctgtgatgctgtgtcacgcggtggagagctctggcagtttgttgtttccatgatttctgagcactggtcc

SEQ ID NO: 340459 - DNA, 154 bp, Homo sapiens
  chr9:139833922-139834076
  hypo
cgtccctctgggtggcgcagcctctctcggtggtgctgtccctgatcccgtcggtgctcgagctcagccccagggtctctacctgcggcccacgtggctcaggggaaccatcacctcgacactcactcgtctcctctgcgtcctttctctgtac

SEQ ID NO: 340460 - DNA, 2601 bp, Homo sapiens
  chr9:139834961-139837562
  hypo
cgtgaccggccgctcccaagccccgggcgcacaaccacagccaggagcagcccctgccaccactgggccaccgtccagggccccacaggaccagccgaaggtgccccgggccgaggccagctgggtcaggtgtacccctagcctggggttgagtgaggagcggcacccccagtatcctgtgtaccccaagttgcccaggaggccgagggggccttgggctccatctgcactggccaccccgtgccaagcatcacagctgcgtgagcaggtttgtgtgtgagcgtgtggcggggcctggttgtccccttcctaaggcgtaactgctataagcatctccacctctcccgctcgggaaaaagccacagagcctggcgatgtcctcaaggggtcccggtggctccagtgcacccagcacacctcagcgcctctggctggcaagccaggagaagaaggtgcgaggccgtgggcgaggtgcctggaggacgcgcatggtgcgtggggagcgccaggctttgatggtggcgtcgtcgctggccgtgagcagcagctcctgctcctggggactgaagaccactgagttgaccacatcctcgtgccgcagcctggccagacagatgttgtagtggcggtcccagatgtagccgtgccggtcctccgccccgctgcagaacagcgcctgggtgagccggccgcccgcccgctgctgcccacacccgccctgcaccacgccgcgccctgcacctggccacgaagtccctgctgacgtccaggaagatgaagaagcactcgtcgttgggcgtgtaggcgcggtgcgcacgcagagcccgcctcacctcccgcatggtcttgaggtcgaacaccagcaggtcaatctcctccgcgattggtggcggctgcatggggtcggccaccaccgcaccgttgggccaggcgcggctgttcacgtacaggtacctgggcgaggggcactgtgctaggtgtgggccgcctgcgggcaccccgcctgggacactggcaagaggcccacctgttgtcgggcgacaggcccatgccgatgatgtgtccgtgtatgtctatgacgtggtccagcgcgtcgaagaaggcatcggagccccggccctcacccagcacgggccctgccgtggtcatctggtgtggcaggatctgcttgatgcctgcagggagggctacggtgagggtccctgtccaatgccccaaggacatcactccagggcagcttcctacctcagtggtgtctctggggctgtgagcaccacagaggtccgtgggcactgcctgctccgggggccccagacctgaatcaggcccgtcggttgcttgctggccagcggccctgcctgcgtttgttttcactgctcatcccacaggccccaggtctgggcttgtgaccccaggggcgagtgaacgatcccagctttgcctgtggacttgcttgctgtctgcccctcaggacccctgcccggcctcccccaagctcctaggaccgaggcgggcagcatggcggcaggggtgtaccgatctggtgtggggagtaggtgaggcagccagtggtgaagatgaggtacttgctcttggcgcctgtggcactgcgctcgggtggcttggtgtggccctgggccagcagctcggccaccttggtctctagcatgcgctccgacagctgtggctgcgcccgcccctccagcacgcggtccagaaagtgccgcaagccctccttggcgtgggcgggggccgggccagccaccacctcctcgttgtcgctgcccaggtcaaagatgcggcagggggacgtggccgggtcaccggcttccagcagcaggtcagggctgtcgaagcggctgcagtcggccaccatcaccgtgcggacggtgctggcattgaggttctggatcttgaacagccgcttcaccacgttgacgttctctgactccacatcctgggggcgggggcacgtgccaggtgggcgccgggcgccaggccccaggagggcagccccgcccctagccccgcacgcacctggaaggcattgttgagccacagcaccgagcaggaggtgatatctccgatgcggtgcaggttccccgagatgaggctggtctcggtgagccaacagccaaacacgtcatagggcttgttccgcacgcgggacagcagcgcgaaggagtctgtggggaggccggggctggacaggctgtcggcgtggggcgggggcagggtcaacccgccgcccgtgctcacctaggctgatgacagcaatctcgccggatgaggagttgtgcggccccaggaacacccccgaggccagcagtagcgagtcgtccttgttgaactgggagaactgggtgtagctccagttgtagggccgcatgtccgcgctgtgcagcagcgagatggtcaggtcgttgctccagatctgttcggcaggggcggctgtagtgatcgcctggccaggtcgcggggcgggggcctgctactacacagccatgaggccccagctctgccagccctactcagaggccaccagggagcagggaccccttccagccactgtcatccactcggggggcattggtatagagc

SEQ ID NO: 340461 - DNA, 649 bp, Homo sapiens
  chr9:139846909-139847558
  hypo
ggaaggagaagcagccggctgggtctgagtgcagggagaggctggtggctgagcaggcctggggatgctgcccagagagccaggaccagccgtgcttccaggagcccccaggcgggcccctgacctccagcagaggagggcccagcgcagaccttcctggcacccattccctgccgtcagcccagcccatcgctccctctgtgcgtgaggggaaacaggctcgggaaggccgcacagccactggccagggtcaccatgtccctgccagacccagagtaggctctggttcttgccagtgtccctggcgccggcccagccaggagcactgctctgtgaggggtccagaagctgccagggagggcgggagggggctcctgaccctgcccactgccacccctgcccaccgccgcccctgcccaccaccgcctctgtagttccagggggaatggttcgtcctgggcctggcgggcaacagcttcaggccggagcacagggcgctgctgaacgctttcaccgcaacttttgagctaagtgatgatggccgctttgaggtgtggaatgcgatgactcggtgagtggctgtccctgccgttccaagcgggtgaggaggatcccgggcctgggtcccagccgccagtggctcaggtgc

SEQ ID NO: 340462 - DNA, 349 bp, Homo sapiens; identical to SEQ ID NO: 261349
  chr9:139888786-139889135
  hypo

SEQ ID NO: 340463 - DNA, 213 bp, Homo sapiens
  chr9:139901957-139902170
  hypo
gactgacccagctccgcccacagcccgctctcggcatcagccttcatcgtaagagagaaaagctggttccgaggccgggcaggagaaaggccagcagtgcctggtccagccggcgtcgccttgggcggtgagcagtgccaggcaggggcgaggggccgggcagaccccgaggctttaaggcaaagcagggcaagggtgtacgcagcccgggcc

SEQ ID NO: 340464 - DNA, 738 bp, Homo sapiens
  chr9:139902492-139903230
  hypo
cgccccggccctcctgcaggctgggcctggacgcagggtctccccacgagctccctctgtgtctgggctctcccgggcctccgtctgccgagtctgggggccactgagtctacatcggtcccctgttccccggctctggtcccctctgccccacccttgctctgtgcccctcaaagactctagcaagtctggaccatgcagttacgtctctccaggcctatctgcaagtgtccctcgcccactctgcccccttgacctctggacagcaagcatcctggggccagttctcccccgaccccacccgcggctggagccaccaggcagcctgggtccagtgggcagagccctggacagccatgagagcagcctgctcacccgctcctcctcgaagctgatgaggccctcgtcctccgtgtccaggtcctcgggctcgtctgccacaagtgcccggagctccgtgggggcagaccggggccggagcaggctgagcaagcagccgagaggggactgcagtgcggatggcggctccgtctcctgctgctccaggttgtcactctgcttcttggcaaagttcacgaacacctggtgggtggcgcaggcgtgtggggagggggctggtctggggtgaggaggggcagggcgggtgaggggaggggcaggtgtggtgcgcagtgcccttggggcgctcacattgtccagtgtggtctggctgaccgagtagtcctcgatgcccagcac

SEQ ID NO: 340465 - DNA, 433 bp, Homo sapiens
  chr9:139904258-139904691
  hypo
ccgtggagagcttccgcttgttgccgccgctgtaggtgccagccggcttgtctgcgtacttggtcagctccagcttctccagagcccacttcaccacctggccagggaacgcaggtgtcagtggaggcagggccacccagcgtgctgactccctgccccgccccacagatcctcacccgggcctcgtccttccaggagatcccacgcagccgcgtgtacagctgcaggtgctcccgggccgtgagctcgtcgaacagcgcgtcacactgcgggcagtagccgaggctctgctgcacctggagcagctccttcagcacgctggggacacggcagctgtcagcgcgtgaggacgcggcggccccgcccacccagggctcccgccccacctgtgtccattgacgaaggcctcgccccccgtcgtgctctcgtcgcc

SEQ ID NO: 340466 - DNA, 126 bp, Homo sapiens
  chr9:139909050-139909176
  hypo
cgcccccagacaccaggcaggagtgacagcgcaggcccgagctggggccttgtgggtggggtgggctgagcaagtggtccaggcccctcaccggcctcactgttctccagcgactgatcctcctcc

SEQ ID NO: 340467 - DNA, 393 bp, Homo sapiens
  chr9:139913335-139913728
  hypo
cggaggccccaccgctcaccttggacatgaactggatccagccgcaggccgcgttgtcaatggtatccagctgctgcaggagggccatgccactgggcagcgagaagttgtcctgtctcagggccggcggcagctcatccagtgacaggttcagtgcctcggggtgcagccgcagctctgctacatacttggggtggaggggcggctcagagggggacctgcgcctgccgagccgggcagagaggggctccccacaccacccacagccgcctccctcgcgggcacccttggcacctgctgcagccagcgcaggtgttgctgcagcctgccctgctccaggaagctgcggatctccgccgagatgttgagccagacctgggcatagtgagtcac

SEQ ID NO: 340468 - DNA, 140 bp, Homo sapiens; identical to SEQ ID NO: 261358
  chr9:139915974-139916114
  hypo

SEQ ID NO: 340469 - DNA, 517 bp, Homo sapiens; identical to SEQ ID NO: 333844
  chr9:139948373-139948890
  hypo

SEQ ID NO: 340470 - DNA, 1192 bp, Homo sapiens; identical to SEQ ID NO: 333845
  chr9:140023880-140025072
  hypo

SEQ ID NO: 340471 - DNA, 366 bp, Homo sapiens
  chr9:140030220-140030586
  hypo
gcccggctgggaggtgttctttctagacctcacctgggagtcacgcaccattacctctaccacgttccatttgtaagtgcaggccatgtatgcctggagggaaatcaatcttctgccgaacagggtggtgttcaaagcaccaccggctccaccacactctgccttttattctgcattctgtttcttgagaccacgcgccgctacgtggaatggtctcaggagctcatgtgtttgtgctccatgaagtcagaaagtccagcctttgcactgccacatacccacccttagaacagcgtctggtacacggtaggtgctcagtgaatgtgcctagtggagtaaacgtgcggtgcggtgctgcctgcggtc

SEQ ID NO: 340472 - DNA, 175 bp, Homo sapiens
  chr9:140041698-140041873
  hypo
cgccacacacacacctggacacgtactcaggtgcgctcctcacacacacacctggacacgcacaggtgcgctcctcacacacacacctggacacacgctcaggtgcgctcctcatgtgcatgctcacccttacttgcgccagccagcacagacacacatgcacacacgcacacac

SEQ ID NO: 340473 - DNA, 1487 bp, Homo sapiens
  chr9:140107154-140108641
  hypo
cgcctcagggccctcgcagtggtactggcttctccacaacgctccctggtgggcaccccaggcttcacgctgcggggagggcacagaggggagcaggcagggtggcaaagggctgggctccagccacgctgacgtcacacaggcctacctggcgccggtccccacttttacaaaaaggcgtgctgtgaagtgttgacgactttgagcctggaggaggaccccgtatgctcctgccaccccagaggccacctctgccttttctcctgggcattttcacagtgctcctctgcaccctaagcaaggagtggcatgttcagtgtgcaaatggcatctttagaccccacaacggtgaaaaccccgactgtccacgtagggcccaggtccgctgagcaccgagcatcaaaagccgtttgcatagccaggtgtcagtcatttcagatgaaaaagaacgggaagatcggagacagctccccccggttctgccgggaggttttgttccgtgcgtgacgtaggtccgtgcatgacgttgtttcctgcgtgacgttgttctgtgtgggacacagtgttcgttcaagagagggagggaggccgctgccgacagcgttcccagggaggagcgtgacccagagccagtcatgcctcggaaccagagtgagaagagaaactgacccccgggaagatgcctggctctctccccagcacagagtttctcagctgaggagtgacccacatcttggctgggggcctggaggcctcagctgcctcaagtccctgcccagggatgagggcccatcagtgggacgaggccgcctgctcccacccacacaggctcattctctgcgagcagaggacctgctgcttggcaccctggcagctgccctggtctcggcagcccctggcgtgtggaggccctgccccctcctagggtgcggccagcgtggagtgtgttttccacccgagggaggccctccccaggctccactcttcgcccgggctccactctcccgggttccactctgcctgggcaccactctccgcccgggctccagcccaggaccagcctcactgtctccacaggttcaacttcgtggccaagaagctgcaccgacggctactgcagcttgggggcagcgccctcctgcccgtgtgcctgggcgatgaccagcatgagctggggtgagtctgcgggcgtggtacccgcctccacagtctggtctggccacacgcagggtccgctcaggccagcgcacgtgctccctcccaggcccgacgctgctgtggacccctggctgcgagacttgtgggacagggttctggggctgtacccgccgcctccgggcctcactgagatccctcccggagtcccgtgagtgtgggccccgggtcacccacaggcgcagcagacccaacctggcctggggacctcgccctgggtccctcccgtgtgggtgggcggcccctggggagtgggtcctggtctgaccagc

SEQ ID NO: 340474 - DNA, 613 bp, Homo sapiens
  chr9:140110575-140111188
  hypo
cgggagctggggtcgcttgtgtgggaactgctggaccgccagggtgcatacttctacctggcagggtgagctggcctgcgtgcagcaggagtgggcccagcccctgagtgccaggcctcattgcgccttctgcgacctgcccctctagcaacgccaagtccatgccagcggacgtctcggaagccctgatgtccatcttccaggaggagggtggactctgcagcccggacgcagccgcgtatctagccaggctccagcagacacggcgcttccagacagagacgtgggcctgaggcccgcggctgcccgtgccccctctgacagccatcctcctgggagcccaggaaggcatccacgagggagctcctggccagcagccgtcatcctctcggaccagccagctggtcctctgggaacagccagctcccgagcacagccgcactcctgttgaccctggatcccaccctttgagcctgaccccactgcagcctctgcccagccagccctgcgctcccccaccctgacagtgagctgtgtcctcgtccccccacccccttcccagtcaaggtggtggcctgggccgctccacctcaccggtgcagtgacccaggac

SEQ ID NO: 340475 - DNA, 42 bp, Homo sapiens
  chr9:140166945-140166987
  hypo
cggccttttccaggaaggagaacgtgcaccggcacgcgctgc

SEQ ID NO: 340476 - DNA, 700 bp, Homo sapiens
  chr9:140167035-140167735
  hypo
cgttgcagaaggccctggagcctacaggccaggtgggtgcccgggggggctgcatctgaaggcacctggtccctaccagcccgtgtgtgcttgccaagctgcccttgtggtgcttgtgtgtggtcggtgggcacccacccctgtgccccctgggcctgcccatgcgcctcgcctgccccatggtgtggttccccgcagagcggagaggcagtgaaggagctttactcccagctcggcgagaagctggaacagctggatcaccggaagcccagcccggcacaggctgcggagacgccggccctggagctgcccctccccagcgtgcccgcccctgccccgctctgagggccctccagacctgctcgggtgctggggccatgccgagtcgcggccctgctcagccggaagaggctcccggacctggatgtacagggcagtctctcttcccggggctatggctgggcctgtcctgccgtcatggccccctgcttcctgctccttggagctggctcccggaccttgcccaccatccatgcagtggctcccagggcagagcctctccttgtactttggcagccatagaaagcgtgctcattttctgttttcctgtgttaggaaaaaaccacctgttttccaaggggagagggcggggcctgagggtgggggcggggcctcttcattggcccagcttggcgaaagc

SEQ ID NO: 340477 - DNA, 931 bp, Homo sapiens; identical to SEQ ID NO: 333846
  chr9:140196486-140197417
  hypo

SEQ ID NO: 340478 - DNA, 724 bp, Homo sapiens
  chr9:140265361-140266085
  hypo
cgctgccctcgacatgaaatatcgcagcacattgagtcgtgagtcccagctaatccgagcggacaggcctgaatgcggcctctttcggccgggcgcggcggtgagcagtggagcatgcatcgcctgccgggcggccccgctcggggacaatggctttcttcgcagaaggggcctgtgcgggacaagaccccctttgtgtggggattcctgcctcggagcgcgagggaggcgcattcagccggccccagacagtctttgaaaggctctgtaacagaagacggcccgaaacactagcctgccttctgcctccctgcactctccgcaggcacggccgccattcagcgtcgcgccacatgagggggaccctccatcctgcattgtcctgtgccgggacatggtggcttctcagcgccatgcacccgccgcgagacgacggccccgggcgtggcaggtgacagcgccaggggtggggcccgcgcggcccacacaggggacactcctgtgagggcccggccagggcagcccccgatgcccgtgcccaggttccaatgcacctcctcacggtgaggggtcttgctgggaagaggaacccagggtgccatcgggacggcgtctcagcagcagggtcccacgtgggcaggcagcggggtggtggccttcacgctcggccctgaagtaagggggccctaatggggcggggagtggaccagtgcccctgagtgcc

SEQ ID NO: 340479 - DNA, 420 bp, Homo sapiens
  chr9:140267962-140268382
  hypo
cgctggccccggcagctctccagcatgtccagaagcccggccagggggtcgtccaaggcagcaaacccccgccaggcttcctcccggagctgtggagacacaaaaccacactggcactttgtcttgcactcaaagcctcctggcaaggcctccccaccgcagagaggttttttaaaatttaatccattcagaaggtagctgtggccattcagccgccatctgcgcctccgtgacttttcatgccgccgttctggtccgctgcaccccaggcccccaggggcggtggtcattgtctgcactaattatcccataaagacagagggcctgttctccaggcagacagagggccgctggcctgggaggcaaccgtagcccgagccacaggttcacaagtcactttacctgcggcactcgcgggac

SEQ ID NO: 340480 - DNA, 541 bp, Homo sapiens
  chr9:140332758-140333299
  hypo
tgtggggggacggccgtgggcacccaggctgcacttggtgtccccatcccgccctccagaggcagaggcttcgctccccgtctccctggagacgcacccctggacagccacttgccttagaggcatctccggggctcagacgcctcccgtggccatagaggcatccccggggctcagacggtctcccgtggccttagaggcatctccggggctcaggcggcctcccgtggccatagaggcatctccggggctcagacggcctcccgtggccatagaggcatccccggggctcagacggcctcccgtggccatagaggcatccccggggctcagacggtctcccgtggccatagaggcatccccggggctcagacgcctcccgtggccaaggaccactccccaggagccacgcctgccaggggtgccatgggcatcagagggccctgtgggaggggggcggggggcagcagaggcctcgtctggggacacagccccagcaggatccaagtagccccctcggaccccctcggatgggactcgc

SEQ ID NO: 340481 - DNA, 375 bp, Homo sapiens
  chr9:140379693-140380068
  hypo
cggagcgactgaaaggaatgtgaggctcagagtaaaccagacaaacgctgcaggtgaggcctcatcggagtaaaccagacaaacgctgcaggtaaggcctcactggagtaaaccagacaaacgctgcaggtgaggcctcatcggagtaaaccagacaaacgctgcaggtgaggcctcatcggagtaaaccagacaaacgctgcaggtgaggcctcattggagtaaaccagacacactctccaggtgaggcctcatcggagtaaacaagacatactctccaggtgaggccttatcctctgaaccaatcgtcgcagggctttccaccactcactccaggaacagtaaacaacacacgggctagacatcaataggccc

SEQ ID NO: 340482 - DNA, 465 bp, Homo sapiens
  chr9:140382238-140382703
  hypo
cgagaggccgtcccatccagcctccacctgcctgtcaggggcatctcaggagcctgggccaccaccacaacctggcacgccctgcgaggtgtccccagcatcaccttcaccgcacgcacttcagcccctcactgcagctgagccttggccacacgggaggagcgggggactcaggcccagatgatgtgtctccgcctctaggcgctgagtggaaggcaggtggcttctataatcaggaggaaataactcccagatagcaaacaaacaatgcacacacacaccaaagtgctgctgagcacagaaagacggagaaccgcctcctcatcctgagcttcggcctgaacgctgctctcgtggtctgatgtctcgtcccgagcttcacttgcagtctgatgtctcgtcccgagcttcggcccgaacgcggctctcgcggtctgatgtctcgtcccgagcttcggcccgaac

SEQ ID NO: 340483 - DNA, 656 bp, Homo sapiens
  chr9:140388986-140389642
  hypo
cgcaccaccctcacccgcgccctcacctgctctgcgccctcacctgctccgcaccctcacctgcgccctgccctcacctgctccgtgacctcatccactccgcaccctcacctgctccgcgccctcacctgtgccctgccctcacctgctccatgacctcatccactctgtgccttcacctgctctgcgccctcaccagctccgcaccctcacctgcgccctgccctcacctgctccgtgacctcatccactccgcaccctcacctgcgccctgccctcacctgctccgtgacctcatccactctgcaccctcacctgcgccctgccctcacctgctccgtgacctcatccactccgcgccttcacctgctctgcgctctcacctgctccgcgccctcacctgctctgtgccctcacccgctccgccctcacctgttccatgccctcatccactccacaccctcatccgctccgcatcctcacccacgccatgctcacctgtgggtacctgcgcttgatggacgtgagggctcctgccggcagcttggccaattctgagtcccgaacggcatgcaccgtggtcgcccgggcctggtgggtcagtgtctccacctgaggacaggagccggctgctggggccgcgggcttgggagggc

SEQ ID NO: 340484 - DNA, 616 bp, Homo sapiens
  chr9:140392392-140393008
  hypo
cgaagtgtgtttccgagctaagctggggtggggctggggaaatccagccttccatgtgtggtttccacagtaacttccgtgtgtggtttccacggtaaccgtgctttgcccatccccagctcctgcatgccagggcagcatggatgcggagtgtgtggcacccacggcctcacctgtatattgctcgcccggcctccacctccacccagtccagggcaaagtcgatttgccgcacgaaggacgacatcctcttcaccacagtgtgcgccacacccaggacgacggtcggctgcttccgcatgattctgccgggcagcccagagtcaatcctgccccatccctccaaccctacccttcgcccagggccgcagtgctcgggaatggatgggacccacaacccccaccccacccggaaagtagagagaccactggcaggggctgggacggggcacgcaccagtcagctgcctgccccacggcacagcactgcccaccacgtgcccagtggccagcagctgttggggagcccagagagccccctcctggcaggcccgcgagtgccccttggacacgggccctgtgtcaggctgcggtcctggcaggggactgcacatgcc

SEQ ID NO: 340485 - DNA, 807 bp, Homo sapiens
  chr9:140396597-140397404
  hypo
ctcccagaggtgacccgggagtgcccaacacactggaacccagaaggcagaggttgcagtggacccggagcctgtggagaggccctggggcaaaccaagggtgagggagcgtctgcgggcaccacacccacgaaggtttgaaacatcaggtgtgtaaacccccagtccacagtgatgatgaaataaaaataagaagccccacccagcatctttggaaaatgatcgaaaaacaaaccattaaacttcccaaaccctgacggtgaagggggtgaaggcagctcccccccaaaagagaaatgacatcacatgtcgccaaaagtttgtcaaacaggagggagaaagagatggaggaggatgagaagaatctgagcagccacatatccagctctcaggcagaggacggccgctgacggagaggccgcatcgccccagggcgcgttgtcagcccgaggaggagccgtgggaggttcttcaggagaagaaagcggcctccctgaggaaagcagctgcactaagaaagtcagagccttcgggagatgagggggacgggggggacgcgggggacgcgggggacgcgggggacgggggggacgagagggatgtgggagccggccacggtgacatggacgaggccgctggacaggggggcactgaacgcacggctgaagtcatttggccattttaaggattactgttaagtattcagaaatgataagagtattgtggttagagatgaatcctgaaatatccaccagtgacgtgctatgatgatgggatttgcttcaagggggggcacccgaacggtac

SEQ ID NO: 340486 - DNA, 1347 bp, Homo sapiens; identical to SEQ ID NO: 261407
  chr9:140400244-140401591
  hypo

SEQ ID NO: 340487 - DNA, 248 bp, Homo sapiens
  chr9:140582120-140582368
  hypo
gtcacgcgaggacacggcaagaagatggcaggccatgagcccggaaatgagagcctggccacacgctgaatttgccagcaccttgatcttggatttccgagcctccagaacttaaacaaataaatttctgttgggtctgtgccacccacatgaaggcagtttgttataatagcctgaaaggataaagtcagagcacgtcatcgtgtcaccgtcttcacggtgtggtctctgatccttcaacatggggc

SEQ ID NO: 340488 - DNA, 233 bp, Homo sapiens
  chr9:140623363-140623596
  hypo
cgcccgctccagctgctctgccaccagccacctcgctccaggcgtgctcctcactctcctgggctggctgcttctatggccagttccgggagtggatgaacgtttgattccttaccggggaccttttgtgggaggtgctgggagggcaccgggacctcagagtgagcgctgcgtcagggctccctgggctttcaaacctcctcagcttctgggatgggatgtgtgcgtttggc

SEQ ID NO: 340489 - DNA, 232 bp, Homo sapiens
  chr9:140645189-140645421
  hypo
cggagctcaggacgtggctgccggagggggcgcggctgccggaggggacgcttactcaggagcgctgaggcggttaatgagtgggacagggagcctgtgacatgtataaaggtcgattgtaagactggggtattaaatcagtggtcaaggggtcatgaactttttaataactatggttgggccagttgactaatattttgggaaaaggcagcctgcacttgtgtcagggcac

SEQ ID NO: 340490 - DNA, 98 bp, Homo sapiens
  chr9:140682727-140682825
  hypo
cggtggcagatgaccgagcggctggtaggactggcatgcagcactcagggggcccaggacgttggcgaaggctccacccgcaccgccttctgccagcg

SEQ ID NO: 340491 - DNA, 242 bp, Homo sapiens
  chr9:140682855-140683097
  hypo
aaggaggttgcaggtttagggatcttgtaggtgaaaggaggttgcaggcgtacggaggttgcaggtgtagggagattgcaggtgtagggaagttgcaggtgtaggggtccttgcaggtgcagggatcttgtaggtgaagggaggttgcaggtgtagggggccttgcgggcttagagggcctcacaggtgtaggggattgccgtgctgcaggtgtctcttgtcccctcggggactgggagagc

SEQ ID NO: 340492 - DNA, 306 bp, Homo sapiens
  chr9:140692095-140692401
  hypo
cgtgtgggaaccgggtgtgctggctttccttgaggaaggtgagcatgctgatttagccccaggtaggggagcagtatgtgcagtgatgcctgcgaaactctatgactgctacacggactccaccgagataaggggagaaaggtaatgaaggaacatggttaagtggagacaggaacaggggagcaaagcaaagcaaacacctgaagggagacggtggtggagtgcgtctgcgggcctgtgtgaggagcacaggcaggaagaaccctgtgtaaggcgtgtggatggcacagcggtgtgggcggcacc

SEQ ID NO: 340493 - DNA, 600 bp, Homo sapiens; identical to SEQ ID NO: 333847
  chr9:140703858-140704458
  hypo

SEQ ID NO: 340494 - DNA, 87 bp, Homo sapiens
  chr9:140704676-140704763
  hypo
ttccgatgccgccccgcgtggaccgtcggtgatgggtccggaggcggttccgatgccgccctgcgtgaaaggcgctcctcgcacggc

SEQ ID NO: 340495 - DNA, 581 bp, Homo sapiens
  chr9:140707377-140707958
  hypo
cggacattttataaatctcatctgtatcacattttcaagtcagctttaaatgttttgtggccttacattttcccttttagcctctttctttctcgggattcagatgtcaccttaaagaacaaggaaggagagacgcccctgcagtgtgcgagcctcaactctcaggtgtggagcgctctgcagatgagcaaggctctgcaggactcggcccccgacaggcccagccccgtggagaggatagtgagcaggtgagcccagccccaggacggctttgtggcaaatcagcggtcagcagggctttgggaacttgcggtgaaagctgctcctgaagccgaaacatccccaggctgcagtccaaattgtcagggccaggtgtttgccagccgccccactgcacgctgtgccaccccctgggcagagcacgtcagccaccaggtgacacctgtcctttccatggcagggacatcgctcgaggctacgagcgcatccccatcccctgtgtcaacgccgtggacagcgagccatgccccagcaactacaagtacgtctctcagaactgcgtgacgtcccccatgaacatc

SEQ ID NO: 340496 - DNA, 947 bp, Homo sapiens
  chr9:140708213-140709160
  hypo
cgacccaaagcagtggcaggcatctttgtgccttttttgtaacctcacactcaggggccccggtgtggcttcgtgctgggggcacaggcgagaggagcccttgcgaggcctgcaggacgacctggatccctgcacctcccagcccccggagagatgggtccagcacatgccagctttcccagcctccgagtgcatgcagcctggtgccctcactgcttgcgccttctcgagcactttccttgtggctctgcttgtgggcagctccctcctcttcccaggccgggcactgcccaggcccccccccccccccgccccccgccccacaaggtgtgtcaggctctgtgttcttgcctttcccatcgagcatctggccacaaatgcagccgccgcccagcccttcacccaccccacgtcacccactgccgcgtcgctgccctgcctgccccctgtccctctgtcagggtcctcagccagagctccctcccacaggcactcgacatgtttctgcctgcacagccttctccctaagaggccacacactcacgtggtgcctttgagaagcacttaccagaatcagggttaacagaactggaagacgtagttgtgactgggaggggaaatggaaggcctgtgcctgcacgtctgaccccccggcgcctctcttctcagtactgcgtgtgcatcgacgactgctcctccagcaactgcatgtgcggccagctcagcatgcgctgctggtacgacaaggtgagggcggcctcgtgtgcgtgggctcaggtggtaagtgccgctggtccgggtctgcaaaaacagtgcaggcgtctgtgaccccagcgctgtcgtggcagcgtcgggaaggagttggaggtgagctgggtgtgacaggcaggggaggcacagcgggcaccagcacccgagtcagggtcgtgagccgaggacatggctgc

SEQ ID NO: 340497 - DNA, 497 bp, Homo sapiens
  chr9:140727446-140727943
  hypo
cgcgcctttggctttgggggctgtggctggtcctgtcctgcggccgtgctcgcctggtttactgtcttgtcactgcccgcgccgtgaaggttgacggagagctgctctcgtccacgcctttacccgcttgttggtttgggttttaacctcttgacctctgagcgtccctggctctctggttaatgttcatgctggggcaggttgtggaccaggtgtctctgccggcaggccccgccctctcggaactcggtcctggaaagccccaggtgcctccttccccgtctgcctggctgtcgtctgtggtgttgcctcttcccgtcgctgggtaacaaaccacgccacccacccgcagctcgccatggcggccacccactcggcccagtgtgcgcagcaggggttgggcgtgccgggcctcgggctgcacaggcagggtgctgctgagcccaggtccctgtggttgcgtgggcagcgtctaggttccttgctagctgccggcc

SEQ ID NO: 340498 - DNA, 781 bp, Homo sapiens
  chr9:140937919-140938700
  hypo
cgcatcgaggcccctcagcgcggcagaggggtccacagccacgggtgctgggctcggtgttgttgccaacgttggtgcagcaagaggtgaggaagggtccgttagcgtctctgcggcagatggtggtcctggctgtcgtgcgccacggtcatgtacgtgaagcactgttcttagctgcttgcccatccctggtgggcctgtgaggacctgacgcaagtgccgggggcatgggagctgggagggagccacgcaacgtgggcttcatgtgcactacaccccttactcgggggccctgtgtccttgtaggtggtaacgtggacctggaaagccaagcagaggggaagaaggaggtggaagcggatgacgtgatgaggagcggcccccggcctatcgtcccatacagctccatgttctgtttaagccccaccaacctgtgagtctccttgcctgctggtgtgtgtggccgcccactcacccatgcatcatgacccgtgggatctcagtagccagcgtgcactgattctgcgcacttatgtagagaaacggctctaaatcccatggcagaccccagaggcacgtgcccgtgtgacctcattctgcagaagaggacacgggcacaggaggcagcctcagcggagctggggtgagctccaggcctgggctcctcacctcctctgtggtgtgcgtgtgtctctgcacacagggacgccgtctgccctgtgtcgcaaacacacttccatccatctgccttcccatcacacctggcacctgtgttgcctgc

SEQ ID NO: 340499 - DNA, 258 bp, Homo sapiens
  chr9:140970069-140970327
  hypo
cggcacatgtgtagctacggagagggcgtctatactgggaatgcacactggcctctcccgggtgggagttctctggtgtggggcagtcgcccatctcacgtggggtccttgtacggctcgcacgccctctctggctcggtccacctggcgcggctcctgcagacccagcagggtccgtgccattgctcttctccattgcaggtgtttgggaatattgccctggatgatgacaccagcatcaaccgccacaacaacttc

SEQ ID NO: 340500 - DNA, 113 bp, Homo sapiens; identical to SEQ ID NO: 261453
  chr9:141022614-141022727
  hypo

SEQ ID NO: 340501 - DNA, 171 bp, Homo sapiens
  chr10:373939-374110
  hypo
cgagccgtgaatgtctgcgtcttggagtggaacccagagctgctaagggggcggccaccaaaaccccaaccgtcaggccctgcgaaccctttcaaggcagcctcggcacacggacaaccgacaagggtcctgagcaaggaggacgcacagctcgagctggctttgacattc

SEQ ID NO: 340502 - DNA, 190 bp, Homo sapiens
  chr10:396943-397133
  hypo
cgcgcggcgggcctggcaaggctgtcgggaccggacgctgtgattcagagattggggacagagtgcacagcgagcccgagatggctgtcggggaccagacactgcgattcagagtgaaggcgcagggagagaggcccagaggggcttgcgggtagccgagttagtgcaaccaaaaggacgccgcacggac

SEQ ID NO: 340503 - DNA, 165 bp, Homo sapiens
  chr10:422180-422345
  hypo
cgacctcggcccccgacagagccggcagggagaaggacccaggcccacctcggcccccgacggagccggcagggagaaggacccaggcccacctcggcccccgacggagccggcacagagcaagaatgaggtggtgctcatcccacacacgacgttccctgtgct

SEQ ID NO: 340504 - DNA, 479 bp, Homo sapiens
  chr10:425893-426372
  hypo
cgtgcagaagaggatgtccctagaagatggttaacacgcagaagaggctgtccctggatgatggttaacgcacagaagaggctgtccctggaagatggttaacacgcagaagaggctgtccctggaagacggttaaagcgcagaagaggctgtccctggaagatggttaacgtgcagaagaggctgtccctggatgatggttaacgcacagaagaggctgtccctggaaaatggttaacgtgcagaagaggctctccctggatgatggttaagacgaagaagaggctgtccctggaagatggttaacgtgcagaagaggctgtccctggatgatggttaacacgcagaagaggctgtccctggaagatggttaacgtgcagaagaggctgtccctggaagatggttaacgcgcagaagaggctgtccctggatgatggttaatgcgcagaagaggctgtccctggatgatgtttaacac

SEQ ID NO: 340505 - DNA, 416 bp, Homo sapiens
  chr10:482039-482455
  hypo
cgaattcagttcagaccgggcgcacttcatgtactcagccaccacgtgtggtgagtgacagagatcatcttgcatgtgtgtccacattttactgcctttttcttgaccacagattctacctccggtttctctgtgtatgcagtgattgtttgcttaatattgcacattgtgggtaacgtgttgagcacgctcaggatcccataagcttcttcggaagctttccagctcttgttttagcaggcagcgcaggcactgctgggtcatcgtgaccatgggcaggcttggattgatttgctgctggtgtggatgggtggagagctccagtcctgcacccactccgatctccgcctcctggacttggcagggtggcatgctccgcccacaccagagctctctccgagctccgcctcctggac

SEQ ID NO: 340506 - DNA, 204 bp, Homo sapiens
  chr10:518266-518470
  hypo
gtgctgcaggtccacgcccactgcacttctgcctcgcccagtggctgggcacaggcaccgtcctggcacaggtggcagatggacgtattgtatcaccccaccccgtgcttacctgaccgatagcgctcatctcgtgaccctgaagaccgtcggcggtggtagcgagaggcggaggaaggagtgacaggagcccggcgttcttgc

SEQ ID NO: 340507 - DNA, 386 bp, Homo sapiens
  chr10:524407-524793
  hypo
cgggcatgccgggggtgcagatgcacccaaattcccatcttattctcactcatccagtgtccaggcatgctgggggtgtagacacatccaaattcctgtcttattcccactcatcccgtgtccgggcgtgctggggctgcagacacatccaaattcccatcttattctcaactcatcccgtgtctgggcatgctaggggtgtagacacatccaagttcccgtcttattctcactcatctcgtgtccgggcgtgctgggggtgtagacacatccaaattcccgtcttattctcactcatcgcgtgtccaggcgtgcagatacatccaaattcccatcttattctcactcatcgcgtgtccgggcgtgctgggggtgcagatagcaac

SEQ ID NO: 340508 - DNA, 270 bp, Homo sapiens
  chr10:630309-630579
  hypo
cggagcccacgacctgacacccactcacgcgcatcacctctcaatctcggggcccacaacctgacccccactcacgcgcatcacctctcaatctcggggcccgcaacctggcccccactcacgcgcatcacctctcagataatctcggggcccgcgacctggcccccactcacgggcaccacctctctagtctcggggcccgcgacctgacccccactcacgcgcatcacctctcaatctcggggcccgcgacctgacccccactcacgc

SEQ ID NO: 340509 - DNA, 569 bp, Homo sapiens
  chr10:851108-851677
  hypo
cggctggaggtcgagggcgcgtggggggcctggagggtgcaggggacgccgagggcgcggggcccaacctccggccagccgcctggattctggtctctgctctgagcgaggtgcgtgggtgcctccctgcttttgagcggggatgcaaaggacccccgggctgctgcgcggaaaaaggcggacggggatccagggcgcaagcagggatggagggagaggccgacacagacggcggcaggtgtgcgtggtgaggccgccccacgcagggatgggaggggcgcgcaagccgggacttgaacctgcactggctgagctgtggacgcggcctggcggcctctgcggagcgccctctgcggagctgcctctggcacctgtccacagcgtctggacaccgggcgaggaatggacccggaagcgtcccctgcccagggggtgctgcaggtacccaggggaagagcattcacgggtgccaggcccaaggggctcacgccagaagtagaccaattagacgactacaaacggtgctcagtgctgcagaagcagccggggacaggcggctgtcggagagg

SEQ ID NO: 340510 - DNA, 258 bp, Homo sapiens
  chr10:851928-852186
  hypo
cgacgagatggccgggctggactctcggaaggatctggggaagaaccaagactggcccaggatttgggcttgcctgtctgcgtcggggctgcccgtggagatggggttccggtgaggagcaggaggatccaggccggagggtgggtggtcccatctgaaatgtggactgactgcaggtggccacgccaaggacacagtgagacatgggctggaggctgagcaggctggggctgaggagctcgaatgtactgagtggac

SEQ ID NO: 340511 - DNA, 256 bp, Homo sapiens
  chr10:894796-895052
  hypo
cgccatgacatggacaaacacgtatgctgttttgcttgttacagtttcaatctcttttaaaaataactgacttttaaataaaaataaaaacatatattgtcagtttatagcataagtaactgcaaaaggcatgatgaccaaagcatccgggccacgagagaaacggcggcagactgccctgatgctgtgctctatgtgaagcagcacgcagccacctcaaggtagactgtgttagccggaggaagtggagcaaaac

SEQ ID NO: 340512 - DNA, 349 bp, Homo sapiens
  chr10:978663-979012
  hypo
cgaactcccgccccacacctgagacgaaggtcccggccccgaagtcccaaccccacacccgggaccaaggccccggcactgccccgaacccccgccccacacccctaaccaaggcctcggctcagccccggaatccccaaccccacacctgggatcaaggccccggcccttccccaaacccccaacccacacccgggaccaaaaggccccggccccacgtttcctagaggcgctgggttcgggcccacgttgcaacgagtcagatgctcttggtagctcagggaggtgttcacactcctgccgtttccgtgaggatggtgacgactccgaactatagcagcatactcta

SEQ ID NO: 340513 - DNA, 225 bp, Homo sapiens
  chr10:1053566-1053791
  hypo
cgttacgctgtgtcttcatgttttactgcaaatgtgtctgcacttcaccatgtggtgttgacaacgttcctgtcccacagacgccttcctggtgtgtgctgcactgacgctggaggctgtgtccttccctctgtctttccttgtgtcctcggcgtggtcgggcactgactgtcagtcttgtgtaaagatgattttattgttgtgtgtttatgtaatgctgggtgc

SEQ ID NO: 340514 - DNA, 236 bp, Homo sapiens
  chr10:1120729-1120965
  hypo
cgtgttaggtttaactttatacatctcagatttgccagtctgaagtagtttagaaagccaggttcgcgcaggcgcaggaggtctgtcgttgccgagaactgcgacgtccacgtgcacacagtgctggctgcggcctgaagagctggctgcttcccgcacgtgcgtgcaggtgctttcaggtgtgtgttggtgtcgatgtgatggaagaaattcatttaaaagctttgctgagtcac

SEQ ID NO: 340515 - DNA, 357 bp, Homo sapiens
  chr10:1167479-1167836
  hypo
cgtaacccgtgctgctctcgttacccaggctgggcgtttgcttgtgtcctgccccgtgtgatgccgtggtttccagttgggcagtttccccccaggagacagtgtttgttgtcacccctggggaggggtctgctctagtttctaatgtgcctgggcagggcggctgctacatccacaggccaggatgctgcaccacagggaagggccccgaccagacatcaggtcctagcgggggaataagtgtcagcaatccacaccgcagctgtgggcaccacgaccaggcctttgagaatgcagacgtgaaaacggtcgccgccgcatcatcctgactgtgttccggggtctcggtgtcagagc

SEQ ID NO: 340516 - DNA, 558 bp, Homo sapiens
  chr10:1443319-1443877
  hypo
cggcagccacaaacaccgtcaggcccagcgtcaccctccccacctcccggatgagaaggagcctccggagcagctgagggacccactgtggaggcagccgggtgggggacggcccggtgtgtgtggtctggtcgtgactttcccacaaggcatcacccatgggaaggaggcgtgatgatggtaagcagcacagagccctgcggggaccagggttttggaacaccccggccttcggtcatgctgcgggaagcctgggtcctctccctgtcagagaagacagctgggttctggggtttcacagcacacgggtacccccggttccaggactgaccatggagggcaggtgccagcgctgttcggggcctccggtgatggtcccagctcccttcccacaaaggccaggtgcagccttggaatcctctgacacttggatccccatggattcaatgggagctcgcatgctgtgaagaccgcggtgcattttaaacggcaccagcaaggaggctacactgtgtatcccgtgtccccatttctaccgaagagcggcggcttcacggc

SEQ ID NO: 340517 - DNA, 144 bp, Homo sapiens
  chr10:1506151-1506295
  hypo
cgcaaacgcaaacccccataagacgcctggacacacctgcgagagtggctgcaataaaacaaccacagagaagctgatgacagtgaatgctgacaaggatgtggaggggccaggaccgccacacacatgcgctgggggcagtca

SEQ ID NO: 340518 - DNA, 288 bp, Homo sapiens
  chr10:1506325-1506613
  hypo
acacacactcccccacacacgcgcggggggcagtcacagcgggcagtgcgccggagaagagggtggacacacactcccccacacacgcgctggggacagtcacagcgggcagtgcgccggagaagagggtggacacacactcccccacacacgcgctggggacagtcacagcaggcagcgcgccggagaagagggtggacacacactcccccacacacgcgcgggggccagtcacagcgggcagcgtgctggagaagagggtggacacacactcccccacacacgcgc

SEQ ID NO: 340519 - DNA, 341 bp, Homo sapiens
  chr10:1558541-1558882
  hypo
cggctttccctgctccctttcccgaggtgcagctggattcagagcttcccacctgcttgtgaccagcgtgcattctcgacatacacgcttcagaccaaatgtctgcttgttcacctgtgcgggctttgtgtgggctgctctgtgctatgcgggctgctctgtgcgggctgctctgtgctgtgtgggctgctctgctctgtgcgggctgctgtgtgctgtgcgggctgctctgtgcttgggaaaatgaaggttggcatgatttcctgcggcaatgccctcccgttttatgccttaataagggctagaaagaaaacattttcctcgagctgcatgcgaatatc

SEQ ID NO: 340520 - DNA, 349 bp, Homo sapiens
  chr10:1585145-1585494
  hypo
cgcagttgggaccctggatcacagctgtccgtccgcccgagcagattcttgtccaggtgtttttccacttgcagctccgcgctgggcagcttcaggcctgttacagcgacggtgcggcttccctgcctgggttgttgggacggaagggattccaccctggggcggtgtggggtggcttccctgctctccctgctctctgcgttcccacggtgcaggatggcggcgttgagagccagaaacgaaaccctgagaagcagaagccgggcgtcctgcccgccctcctctaccaggcctcatctggagggctgcgccaggtccttccaacttcaaagagttgcctgtgaagggc

SEQ ID NO: 340521 - DNA, 588 bp, Homo sapiens
  chr10:1708231-1708819
  hypo
cgggcatggaggctccaggctgagaccagcattggatagggtgggtgggcagggattacttaggtgccaataacccaggagtagaggagatggcaccgctataaaatgccacgagaggtgcgcacaagggttcagggctgcatagaaccgggagggagaggaagaccccgctggagcaagtgccagggtgacagagccagaggactttctgagatagcacagccccgagggtcggcagggcactgagggccacctgccctgcctgccccgccagggcgagcatctgaatccacattctcctgggccgcagctcatctgcgagtcggagcctccgaaggggggccagtagcacatgtcccagcctctctcgcccaggtgatcctcatgaccagacgcggctttgctacaagacagctcagactgtgttcccccaatcgtgttcccgcaggaaagctgcccgaggatttttgtcatgcacacgccgctgccagcccattagctctccctgcttcccatggtctgccgcatctggggtatccagcgtcctcctgcagccgagggggaattctgaatgttttgctagaaacc

SEQ ID NO: 340522 - DNA, 126 bp, Homo sapiens
  chr10:1767855-1767981
  hypo
acttccaggacagaaggccacgctgccgcactcgtatccgaagtttgaatgtcctcagccgcagatgcgttttttgttatgagtgacaagaacgctgacacaagacactaacctttctagaggtgc

SEQ ID NO: 340523 - DNA, 225 bp, Homo sapiens
  chr10:1789180-1789405
  hypo
cgcgtgacgtgtatgcgagtgtcacatgaatcgcctgatgtgtacgtgtcacatggattgcgtgacatgaacgtgactgtcacatggatcgcctgatgtgtatgtgtcacatggattgcgtgacgtgtatgcgagtgtcacatggatcgcgtgatgtgtatgcgagtgtcacatggatcgcgtgatgtgtatgcgagtgtcacatggatcgcgtgatgtgtatgc

SEQ ID NO: 340524 - DNA, 264 bp, Homo sapiens
  chr10:1994498-1994762
  hypo
cgcggatggagccggcaggtaaggatcaggcccgctggcggccgcgctcctatccgcaccccttatccgcaccccttatccgcgccccttatccacacccgttatccgcaccccttatctgcactccttatccgcatcccctatccgcaccccctatccgcacccctggcccaacacctccactccgaggcctcttcagggggtcctttcccagcgcgtctcctctccctccctgggactcccagagccataaaatcaggcccc

SEQ ID NO: 340525 - DNA, 166 bp, Homo sapiens
  chr10:2006696-2006862
  hypo
cgcggggcggactggagacccaggaaacgcctgaaaggagggccgtgcaggacgaagcccccaggacacgcgaggagacccggccgcgcgccgcgtggggcttgggagcctccgaggggccatgcccagcctggaataaccatttcggtttttgctagatggctgc

SEQ ID NO: 340526 - DNA, 416 bp, Homo sapiens
  chr10:2932075-2932491
  hypo
cgtacgtggtcaccaagccgcaaaagccaggcgtaagcgaacagcttccagcgtcttaatcagagaaaatgagcaacaaagtttccccgacacatttgatgcatacgtaattgtcaccgtgctgcatgctaattaagcatcattcctacgtcgttttctaaatgactatgattggaacgatggttgcacagccaccggcagcgttcaggggagcagagcagggcggcgggagatggggcggaaggggaaactcctccggagccccctcccacagggagctggtggcccacgaacccgggaggcagcctcacgggcagcgtctcctccagtgaaccctcatggcctggagtccggagggccacctgcccggcgctctggctgaaaaaggtggctgctgcctttggtttcctccgccc

SEQ ID NO: 340527 - DNA, 2345 bp, Homo sapiens; identical to SEQ ID NO: 333851
  chr10:3109010-3111355
  hypo

SEQ ID NO: 340528 - DNA, 542 bp, Homo sapiens
  chr10:3121888-3122430
  hypo
cgccattgggtcttagttgtgctcctgcatcacctgcttcctagtgttggcacgggctgtgtttgatgggtaattcatccattagagtgaccatagcgtaaggtcctggaaccagagctgtgcgtccacccttcgagttgaagagtccaggcactgctgagcccagccatgggagagatgagcgaggaccttccacaggtgtgaggccaagggggcgggaggctctgtcctgccaggaataaatggaatcaggtgggaggctctgtcctgccacgaataaatggaatcaggtgggaggcaagccaggcccttttcctgggaggtgccagagccgaggaggagttggaggaggaagagcgtccgagcaagagcactggtgggactgctaccaaggttcaggaacaggagcctccgagtgctgccagacaggtgggaggtccctggggcatggccgggagctcaggggaacttgggttttcttccagtagccctgggaacctggaggaacgcggtcatattcgtgctttagaagagaacattgc

SEQ ID NO: 340529 - DNA, 442 bp, Homo sapiens; identical to SEQ ID NO: 261577
  chr10:3151597-3152039
  hypo

SEQ ID NO: 340530 - DNA, 469 bp, Homo sapiens
  chr10:3160827-3161296
  hypo
cggcatgagtgaaaaggcagacgtttaccgctccttaattaaaaccacagactggggaaggcggccgggtggggaccggcgtggcgtcctgcggaccgcgtggagtttggggtgtctgacatcgttctccacgtggctattttcagcgttctcccggggaagtacttggaagagatcgccacacagatgcgcacgcacagcatcaacgcgctgctgatcatcggtggattcgaggtacgttaccgtttctctcttgccggtcttgcaggtgtgagccgcgccctgtgttggctaaacattaagctacttgttggctactggccacgatccgagatgataggttcccagacccagcggccactggagaattgtagaacagcaggatagcaggtggtaagacgtggcctacgagtggcccagttccagtaaagcaacttaaccgagaagcaaaagcttgactccttaaccc

SEQ ID NO: 340531 - DNA, 227 bp, Homo sapiens
  chr10:3194438-3194665
  hypo
cgtgctccccgccctgatggccatcagtgaagcggcttcacagtgctacaccgagccaagcaagtatacaaatgcatgattccacgactcccggggagggctgtgcccagttcccactttaactcagtccccgcagacagcactcctggtgtctgctgggctgacctcccccatgttccatttccaccttctgaagttccccgagagcgtgccacgcacttagacac

SEQ ID NO: 340532 - DNA, 517 bp, Homo sapiens
  chr10:3196890-3197407
  hypo
cgtttttcgtatattctgaatacaggcctttatcagacaccatttttgcaaatgttttttcccagaggccaaactacctttgagaatccatttgggtccccttctctcccgtggcctcctcccttccttcgttccacccggctgctcccccagcggctgccaatccccgtctcacttttcttttcactcccaccatcctggcctaggtcgtcatgtcatgcttaggtgtctaattgcctctcagcagttttctccatccaatttctctatttttctgcaaaactatcctgaatgaggctgcagctacactgctcactgacccgacagttctcctgccttaatacatgaagcacccgtgtgctccccatcttccatacaggccctccccagagccacagggcacacctgtctcccccacacacgctgtcctccctccatgcccaccgctccaccatccctgtgtgcctcacgcctgtcccacagaatcctggtgctgctctgtggctggcacacaccc

SEQ ID NO: 340533 - DNA, 450 bp, Homo sapiens; identical to SEQ ID NO: 261598
  chr10:3329666-3330116
  hypo

SEQ ID NO: 340534 - DNA, 428 bp, Homo sapiens
  chr10:3330176-3330604
  hypo
gtgtggggatacgtatttgcacacatgtgtgttcaatctgtggatacggtacctacgtgcacttctgtacctggtttcttcctttttctacacatacattatttatctgttttttaaaattcaacttttattgctccttgtcctgccggtggccctggcaacatgccacgccggactccagcttagtttccttgttgccttgcagccaaacttacgcagtgtgcagacggagctgctcagaggggaggggcagcgagcaggtgccacgtccacaccgggtgaggcgtgaggtgagggctcccccgcgccgccctggcgtccaggtggtgagggctgcacggaaacgtggacttcggcagaacatgtgtgcgccacggagcggctgcgtgcagcccgcaggtgagaccgtctgcataactctgccaacc

SEQ ID NO: 340535 - DNA, 542 bp, Homo sapiens
  chr10:3678617-3679159
  hypo
gacaccgtgcctggtccaaagagatgtttttatgtggttcaccttcgaccttcatcagggtgactcaggaggcacattctgaagccactctccaacacttaagttttttgccaggtatttttcacaaagcaacgatttgaacaatgaaggagaaaatgtagcctcgcaacttcattcgtaaataatccagactaaccgcacggagtataatggatcaaagtgagcagaatcgctcactttggatgagatcagccctagaatgaaagcaaaaccgagatgatggacggcgcaggctccttggagatccgtgttcatgacacctgcaaggactgtgggcaagctgccaaccagacatgaaattagcaattagttgcatattcttccgagtgggtcatgtgctccttgcaatccaggcacatctctttccatctggcaggggtgtggcgtatttccagagggcttcaatgcgcaatccggcagcgcactgctgggagccccggcacaggacgcctgaccacactgacatacacatattcgcgtcc

SEQ ID NO: 340536 - DNA, 188 bp, Homo sapiens
  chr10:3954899-3955087
  hypo
cgcacccggccaatattcattcattctttctcacctcttcctccgctctttaaggttgagcttgcctggcccaaggcacagagttctgggaaggatggaagagaggggaagggagagcaccaacatcacggaccgcctttcacatcagcggcagcagcagtaaaacccccagaaaacctggggtaggc

SEQ ID NO: 340537 - DNA, 70 bp, Homo sapiens
  chr10:5523206-5523276
  hypo
cgggaggagacctgggcagcggcggactcattgcaggtcgctctgcggtgaggacgccacaggcaccagc

SEQ ID NO: 340538 - DNA, 474 bp, Homo sapiens
  chr10:5529540-5530014
  hypo
cgacggcattcggacctctcccttacctcccaggcagcgcgggctccccaaaagacactgacgctcccacttccaaaccgtcactcatgcagtttcctcaccaagaacgccccacccctgttgaaatctgcccccgcctcagtgccacttcctggaagtctgtccccttctctgagcacctcctcgaatgggaatccactgacgagggacctgacccactgtctttgcatggccatttatgttacatctcctgggcccagaggccggcgcagcgtctccctccaagtccctgcagactcacagtaaggagaagcacccaaggaaacacttgtagaatagtgagtgagtgaatgaaagtcaccaacacctcctccatgaagccacgaccacaaggctcccggtgcaggaaaatactgttcatcaaaagcactgagatttgtttttgtttgttttgtttttgtttttgtttgagac

SEQ ID NO: 340539 - DNA, 424 bp, Homo sapiens
  chr10:5538706-5539130
  hypo
cgggcaagaaggaacaggtcgcaatgagtgaccgcaagagatcatggtgactcctgaaaacgcccaggccccgcctcagtgccccgggctacccctggccccccaggctttgtgctgaagccgagataaagtggacaggcgcacctcactcctccacaggtgtgccccacccccccacccgcaggtctgcccgagagcacggcaggtgggaaagagacgaatcctgactccaaggccagggccgccacctccccaaagcccgatttcacccaatgctaccataagttggcctgggctgctcctgtacccacctggggcttcagtttccacatctgccaagcaaggtgcctgggtccgaccatctgagacccaggacaaagggagccctgggaacgccaggctgtgatgagcgagcctgggtctc

SEQ ID NO: 340540 - DNA, 1455 bp, Homo sapiens
  chr10:5540271-5541726
  hypo
cgcatacagacacacagacacacacacagatgcacacacagacgtacacgtatattatttgcagccgaagagaggcaggctgcgtgcagaggctggcagctgggctccgtctgtccatgcgaggcgcccgctcctgtttgtgcgggacacgtgcccaggtcctcaccagcagctcaggcagaacctggagccacagacaccgcccagcaccatcctcacacatcctctgcccacctgccctctgctccgcgtcaggggaggcaggagctgcccctggggcctgctccaggcagttctgccaccgcaggtgagaggggtgggctggaaggaaccctggaagcaggtgggggccctcggaggcagccgccccacaaacaccaagcacacatggaactcggcagtcctttatttagatcaatgcggggctgaggggccctcattccactgcagggcaaagggggaccaggcccaaggaggcctccttctgcccaaggtctggaggcagagaggggctcgcaggcggcccgagggcgccgcatccaggccccggagcgcaaagccttcctcccagggggaggcagtttcccatccaccgaccaggtttccccggagagtcccagcacaaaagcagcagcgggcggtggccctgaaggctcagagcgcagccagggggacacaggcggggagcctcactcctgggcgagcatcctcgcgaactcctcgtagttcacccgcccgtcctggtccacgtcggcctcgcggatcatggcgtccagctcctcctgcggcagcggctgccccagccccgccatggcccgcctgagctcgtccacggtgatgtggccgtcgccatcctggtcgaaggcgcggaaggcgacctgcaggtcctccaggccggccctggccttcttcgccgccgtcaggaactcctggaagctgatttcgccgtcgccgtcgctgtcaacctcggagatgagtttccttagctgggcctccgagaggttcttgcccgtggccttcagcgccgcgcccagctcctgggcattgatggtgccgtttccatccgtgtcaaccgcggagaaagcctttttgtactgggcctcctcctcaggagtcagctcaccggccatgcctgcgtctcctgcacctcgcggagcctccgagctgctgcccaccggccctcaacctgctgctctcagagctcgtggtccagagtgcaggcagccgcagggatccgggcagcgtctgtcccagacagttctgccttggcatgggaaccccctccttttctgcaatcggaacaaagggaggagggaggctccccaccctccaaatgccctggggtgagagcctcctcccagggagggccagatcagctgcagacaggaaatgcaggaatgggagttgggagagctgtcaggtgccaggtgggaactgccatggggtcggggtatc

SEQ ID NO: 340541 - DNA, 214 bp, Homo sapiens
  chr10:5576085-5576299
  hypo
cgctccctcgcaggcgcacaggccctttctcaggaaagccccacacttggcttaaggctctgctgttgctgccttgaactcttaatgagttttgaacaaggcgccccgcattttcattttgcattaagccccccaaattatgtgcctgccctgctcaccacgtcccactgcgctcccagggcagggcccgccccacccagacgcagactgtcgc

SEQ ID NO: 340542 - DNA, 275 bp, Homo sapiens
  chr10:5638918-5639193
  hypo
cggtttcagccacccggagcggccgccccacccgcctcctgcaaagaggtgagctgcccctgcccactgctgctccagctcacacccgtcatccgtgagccattactgactacctacagggtgcgcccgccgtggtctgcatgtcccacagaaattacccagggctggcccagcggctcccagcagacggccaggcatgtgctcccaggggcactggtcctagacagatgaggacacatagggactgacacccctgaaaacgcctggggcagcag

SEQ ID NO: 340543 - DNA, 317 bp, Homo sapiens; identical to SEQ ID NO: 261644
  chr10:5875005-5875322
  hypo

SEQ ID NO: 340544 - DNA, 136 bp, Homo sapiens
  chr10:5898121-5898257
  hypo
cgtgttgggtgcacgtgctgggccaagcatcatgcacgctgtaaggtatatagatgtgatttggtcaaggtagagaccgaggcggatatacaggcctgcacggctcagtgagtttggtgcgcaggcgcacacctcc

SEQ ID NO: 340545 - DNA, 421 bp, Homo sapiens
  chr10:5960358-5960779
  hypo
cgcaccagcagatctataccttccggggtgcggtcaacgccctgttcacagtgccccacacccacgtcttctatctcacgcaggtaagtgcgcactctgcatgggaggcattgcatctctctcccaatgtcttacgtgccaggccctgtgaaaggtggtatgccaggctcaccagatctagcaaatccttgcttctaagccatggttctcaaagtgtggttctcaggggtctgccaagtcacactgttttcataagaggtgtgtgcacagcggtcgtctgaggaagagctgctgcggctgaactgtgaaccgatggctgctgccgccttgtacatttgtgcttagaacagttgttagaccagcgctggttgttcagacttgtgtatttggcactttttcaaagacaagtgaaacaagctgc

SEQ ID NO: 340546 - DNA, 572 bp, Homo sapiens
  chr10:6003417-6003989
  hypo
cgttcagcttgtttactagagaaggcaggcccaacgctggaggctcagctgagagcaggtgaagctgcgctggccgaggacgctcggagcggctgcgtgtgaaacacgggaagcctgggctctggcctgaactctccgggctgtgtgggaggaaagcgtcctgatgagcttgctctcaggaacagaggctgccttgtgttcagcgtcttccctgtcttccttgtccttccctggaaggtggctgcccctgcactgtaagggtgtggcgtaactgtgctgttccctctccatgaaaaatgtgtcttccattgtgacagccacggaatctaggaaacgtgaggccaagcgctgtggctctctggacgcactgttgttgccgcgttcccatggtctcccagccacacaggtcatgagaaggcctcacgccccttaatcctgtgtcaccacctttcatataacttgccctacgctcactgccaatgctccagggctccctgcacaggacgcaccaaggcatcctcagccaagtgcccacggtcgtgccagctcgggtcaaaggctgctgtcacatc

SEQ ID NO: 340547 - DNA, 130 bp, Homo sapiens
  chr10:6023448-6023578
  hypo
cgttcattgaccgatgatgaacaatggcaaaacggttctgaaccaaggtgcttgtgctaacagtgatgacgaacataatgctgttatcacagcagaacacgcacctgcaggcgccatgatgaaagcatgc

SEQ ID NO: 340548 - DNA, 110 bp, Homo sapiens
  chr10:6042324-6042434
  hypo
cgtgccgttaaatattcgtaaaatgaacacatgaagagcctagagtccagaggtcctagcagatggtgttacatcctcatcgtgaggcacgtggacgggggtttccgacc

SEQ ID NO: 340549 - DNA, 218 bp, Homo sapiens
  chr10:6161993-6162211
  hypo
cgcctccacctccttgcttcttactgcctcttccactcagcccacacttgcagaatgaggactgcgtcgactacaaattagacctctgcttccaccaggcctccttgatagttcagctaagagccgtgcggtgagtctcctgacgttttatggcacttgacgctggtaaccactcccttcccgaggacggagaccgcggccctgccagtatcgctcac

SEQ ID NO: 340550 - DNA, 939 bp, Homo sapiens; identical to SEQ ID NO: 333854
  chr10:6621854-6622793
  hypo

SEQ ID NO: 340551 - DNA, 246 bp, Homo sapiens
  chr10:7202899-7203145
  hypo
cggagagatggcacagagacaactttcatggcgacgccaggctgcgccctcctgtgcagtggtcccagccatctcctccctggcacgtgcacagacagtgctcacccatggtgaccgcaactgcacagagaaacgctgaagttaaactgtcagggtgaaggatacggagagtcttgggcgcttggctccacgggaagcaaacactttcccctgcgacagtggctgtatccttcctgagctcctggc

SEQ ID NO: 340552 - DNA, 353 bp, Homo sapiens
  chr10:7212711-7213064
  hypo
cgtccctgccaggcagctctcagcaggggccttggagggagaagggtctcgcacacctgccgagcagcgccgaagaaccccctcgcaggtgtcacgaggaagccggctaggacacgaggttcatttcagatgcagagtctcagcacatcaaacaatcgacacgcggcaaccaccgtacctgctcctgaaatatcttggccaagggggcacagtctgtcagcttaatgaacctcaccacgtcggtgaccgtccactccaacgggttgctctccagaaccagtctctcctcctcctcctgtttcgtgtcctgcagagaaagggcaggaggagctcagctgcggcacagtcagctg

SEQ ID NO: 340553 - DNA, 749 bp, Homo sapiens; identical to SEQ ID NO: 261689
  chr10:7213829-7214578
  hypo

SEQ ID NO: 340554 - DNA, 193 bp, Homo sapiens; identical to SEQ ID NO: 261690
  chr10:7216060-7216253
  hypo

SEQ ID NO: 340555 - DNA, 76 bp, Homo sapiens
  chr10:7288715-7288791
  hypo
cgctaccgctgacaggctatgcacatcaagtctgttgagtttaattgataaataccaggtgaagcgactctgtagc

SEQ ID NO: 340556 - DNA, 260 bp, Homo sapiens
  chr10:7409523-7409783
  hypo
cgcaaggttctctctgctccttgcaaaattacaggcgtcatgaaggatggcggctcgtaaatcgaagcctttgaaacaggggctcaccgtccggcggcatcaacaccttgttgttctgtgtgcaccaccccacggggtgcaaatccgcgatgactacgtcacaccagaagtcggccctgcggtcctccccgtaaccgcagtagcgcagaagcagcagctgcccgcacgtggtaatgatcgtggccacccagtacgtgtcc

SEQ ID NO: 340557 - DNA, 4416 bp, Homo sapiens; identical to SEQ ID NO: 333855
  chr10:7449896-7454312
  hypo

SEQ ID NO: 340558 - DNA, 194 bp, Homo sapiens
  chr10:7608057-7608251
  hypo
cgctggaagggcgccggctttttgtagaggtggatgaggatgacaaaggctatggagccctggatggtgacggtgacattggcgttggcagacacggacacctccagcccccagctccccaccaccacactctggttgcaggggagcaccagtctgtccccaccatccaagatgactctgctcggtgtgatctc

SEQ ID NO: 340559 - DNA, 297 bp, Homo sapiens
  chr10:7618377-7618674
  hypo
cgcgtcccccacacctggctggcacaggtgcctcgtacctggctgcgtgccagctcctcgcacgctctgcaccaccggttcgggtcccatggcagccgacatgccgtgggcctcctccaggccatccatgcgtgggaccggccccctcagcttcatggaggtgaagggagtgaggaagcggtagctcacagccagggcctgggcccgctgccgcagccgctccttctccggttcatcgtcactttgcagccaggagctcagcagctcctttgtggtgaggtagctccagagacgctc

SEQ ID NO: 340560 - DNA, 155 bp, Homo sapiens
  chr10:7871238-7871393
  hypo
cgtgactatggtacgtgtatcacaattaatgaacaatattgacatgttattattaagtgacgcccgcactgtattgacattccttagtttttactggatgtcctttttctgtttctggatcccatccaggatatcatattgtgtttggttgtcac

SEQ ID NO: 340561 - DNA, 259 bp, Homo sapiens
  chr10:7985048-7985307
  hypo
cggttgtgatcctgctcagatcaaaggagtccaatcctgtggttccggttccctgtagctccgtgagactctgagaactccactcggcctccagcgctgcctttgccgttgccttgaatgaaacaggcgctcgatgttggcctcaccttgcttggtttcttggcttctgtcttctgattctggctcctacgcatcacgttctgcttgctccttagcattgcaaactctgacattttagatgatacgtttgtttcctagt

SEQ ID NO: 340562 - DNA, 352 bp, Homo sapiens
  chr10:8055498-8055850
  hypo
cgtttttctgtttcttgattctaaaacagtgatgacgctgatcatggcattaatgaagtgctgatctactatattttttagtttaatatgcctgtttattcggttaacagtataaagtaatcattctgatctggcctctttttgttttttttcccattccctccatttttgccgcttccgctttgcaaacatcagatccgagatgagtggggcaatcagatctggatctgccctgggtgtaacaagcctgacgatgggagtcccatgattgggtgtgacgactgcgatgactggtaccactggtgagtgcccagggcgccctgccggccacactcattaggcagcatcagcc

SEQ ID NO: 340563 - DNA, 128 bp, Homo sapiens; identical to SEQ ID NO: 333858
  chr10:8075813-8075941
  hypo

SEQ ID NO: 340564 - DNA, 1461 bp, Homo sapiens; identical to SEQ ID NO: 333864
  chr10:8096151-8097612
  hypo

SEQ ID NO: 340565 - DNA, 206 bp, Homo sapiens
  chr10:10965173-10965379
  hypo
cgcttacgctgtgacgtctaggaaaaatggaaaaatgcaactcaggcaactgccaactagtgatatgtggctgggaaggaagacggtggcatttgagaacagttttatggtttggttttcattggctatgactgtcttgaaatgttccgaaagaccatttacacgggttgcataagggtggagtatttccaccgtaattaccttac

SEQ ID NO: 340566 - DNA, 1366 bp, Homo sapiens; identical to SEQ ID NO: 333865
  chr10:11059422-11060788
  hypo

SEQ ID NO: 340567 - DNA, 148 bp, Homo sapiens
  chr10:11204060-11204208
  hypo
cggcagtgccaggagagtggtcggtgggacaggaccacccataccacccatttcagcagtgccaggagagaggttggtgggaccggaccacctattgaggcagcgccaggagagtggtcgatgggacaggaccacccattttggcagc

SEQ ID NO: 340568 - DNA, 438 bp, Homo sapiens
  chr10:11846800-11847238
  hypo
cggtgcgcaccttcccgaaagggtggcgtgtggtcaggggtctgtgcggagacctcctggctctccccacacgcggtaggtattcatgcagccgcgtcacgcggaggccccactccgtgcggccaacacagggtcttccagcccctccttccctggctatgtgacttgtagcctcattctgggaaccttccccagctacgtgacttataccttgattctgggaaccacagagttcagaccttggtgctgaaatgggagacgtcccccctgccccccgcaacaccccaccccgttcctcacccaccaccctcgacactgggcttttctcagaatccagaaagcccagggtaccctctgcacgcgatcacctgccctcagtggccgcagcaagctgaagtgtcccttcccccttttcctgcccgacgcctgcagaaccag

SEQ ID NO: 340569 - DNA, 1950 bp, Homo sapiens; identical to SEQ ID NO: 333867
  chr10:12390701-12392651
  hypo

SEQ ID NO: 340570 - DNA, 380 bp, Homo sapiens
  chr10:12827582-12827962
  hypo
cgaggccccggagggactgtgctgggcacctcctgggtctggaaactcgttggtcttctgcaagtttggaagctggacgctgtgattttttggaattacagcagagtccttgccacgcgtcataaaactggtaacacaacactggccggttcggctggttctcaggcaggaaaactggcgtctgacaagatcagagtgagaagtggactctcccagggctatgtacctcaccacagctgaaacaagaaaatggatgggttgggggctatgctagaaaggccgggtgaattcagcaggttggtgaaacagtgcagctgactcccgatcacaggaggcgagcaggagagagaacatcctcgtggatctccacggtttggccc

SEQ ID NO: 340571 - DNA, 155 bp, Homo sapiens
  chr10:13405108-13405263
  hypo
gtctccgtctcaaaaaacaaaaaacaaaaagatctcacaccactgcgcggtggcagaacggaggcaggagacaggacttgaactcagtctagacagcaacgcaagggggcatctatgcgattgaccatggccggaagcacacctccatgcgatgc

SEQ ID NO: 340572 - DNA, 60 bp, Homo sapiens
  chr10:13711305-13711365
  hypo
cgcactctggcctcccaaagtgctgggattttgcagcgaaaggcgtgggccaccacgccc

SEQ ID NO: 340573 - DNA, 443 bp, Homo sapiens
  chr10:13771131-13771574
  hypo
cgcatggaaagcgttcaggtccactcagactgtgctgcgatctgaaagaatgataacatacgagaaggccctttggtcctacactgtgaatgagtaaggggcagctgcaaaatgctaagaatgctgagtgcattaagtgaagtgtttctcccaggtgtgcacagggtgtggcttccaaggggaatgtggatgctggaatgagggaggcagccacctaggccggtcaagtcagaggcccagcaaggagaaagcgagccaaggcaaacgccgacagaagagaacgataaatccgcggcgcactcggcagaacgtacaccgcaccgcataatttagcggggcaatgccgccgggagtccacgccaagttaatggaatatttcctgtaaatattattttcccttcctgtctcatcatctcatttcattcaaaaatctttactaatcc

SEQ ID NO: 340574 - DNA, 1293 bp, Homo sapiens; identical to SEQ ID NO: 333869
  chr10:13933020-13934313
  hypo

SEQ ID NO: 340575 - DNA, 71 bp, Homo sapiens; identical to SEQ ID NO: 223767
  chr10:14646262-14646333
  hypo

SEQ ID NO: 340576 - DNA, 86 bp, Homo sapiens; identical to SEQ ID NO: 333871
  chr10:14646654-14646740
  hypo

SEQ ID NO: 340577 - DNA, 411 bp, Homo sapiens
  chr10:14816098-14816509
  hypo
cggctttaacacacttcttcgcactagtgagaacgcccgcaatgccttattcagtaaggttaaatgagtttgtttgctgaaacattcgccacatgatcccaacgctcctccagctccatcccgtctataatcgcagagcgaacactcactcaccttgggcgtgtcaataattgatggtctggggatggaagcgtgaaacaccactgcttcacagtccgccccatcatccagggacccgggcacatcttcaggcgtctccgcgggctgggccgcagtgcggtgacttgaattccgattcgcactgccatttctctctgcatgggtgctcgaatcttgccttttctctggagctccttctgcgcttgggtgtcttggctgtctgcctgctttggccacaggctgcacacggac

SEQ ID NO: 340578 - DNA, 95 bp, Homo sapiens
  chr10:14966103-14966198
  hypo
cgaagcagagaaagatgtttccacacaaggtactgagctgccgcaggctgtgtgctcacgctaacgggagtgcttgctctctctcactcgcgtgc

SEQ ID NO: 340579 - DNA, 139 bp, Homo sapiens
  chr10:14979037-14979176
  hypo
cggataagaaatgaacacatgttgtatgattccactcatatgaaatatccggaataggtgaacccatggagacagagagtccaatacagtagtggttgccgggggttggggaaggagagaatagggagggattgcgatc

SEQ ID NO: 340580 - DNA, 192 bp, Homo sapiens
  chr10:15254646-15254838
  hypo
cggatacgccgagtcctcggaaggacatctggacaccactttcagccacctccttgcaggggcgacatccgccaaagtcatcctttattccgagtaataactttaattcctttctaacatttacacggcaaacaggaatgcagtaaacgtccacgtccgtcccacggctgggctgccgttccgtttcctcca

SEQ ID NO: 340581 - DNA, 184 bp, Homo sapiens
  chr10:15255054-15255238
  hypo
cgagggggcatccgcagtccgtctggtcgtctcctcctgcaggctgggcagctggccaccacttctccgactcgacccctccaacaagcatcgcagggcactgtcctcgggggtacagaccgtggtcccacattcgctaccactctgttccacgtcatccaggtacacgagctgcgtgtaggcc

SEQ ID NO: 340582 - DNA, 317 bp, Homo sapiens
  chr10:15484072-15484389
  hypo
cgtctcaaaaataaaacgaaacaaaacaaaattctggcttgggaactttccagctcggcctctacttacctttctagcgtcatggctccacactgcgtttccttatctgggaatcccagccttactgaactttcagcttctgcagccagccacgctctttctggcctccggctttgctgtgtgctgtttctccagcctggcgatttgctctgtccccagcccctgcactcctttacctgatctgctccgattgatcctgcagtcctccgcggctgagtcacttccttctgcagggaagccgtcctgggttctcctcc

SEQ ID NO: 340583 - DNA, 1331 bp, Homo sapiens; identical to SEQ ID NO: 333872
  chr10:15760997-15762328
  hypo

SEQ ID NO: 340584 - DNA, 157 bp, Homo sapiens
  chr10:15828305-15828462
  hypo
cgaactgttctctccgtatcattatgtgtatagactggtgtctgcgtcatcttctgctgccctccccatcaaggcactgcgttaccgtattcgaacacacattccctctgtctgggaaggtttccatgtaacggtgttttctcagtctcatatctgc

SEQ ID NO: 340585 - DNA, 313 bp, Homo sapiens
  chr10:16716483-16716796
  hypo
cgaatattcagagagtccactaggtgccaggcaatgtctgaagctcctgaggacagagcagtgtacaaaactacgtctcccgctcttgcaggagactccattctaagcataagagagacgataaaattggaggcaggagtgggtggtgggcgatggggtccactttagatacagtgataatggaaaaaactttgctgagatggcatttgaactgaaacttgaatgagataagacagcaagcctaaggtcatttagaaactgaatataagtgtaaagccggccagaagctgtaatcccagcactgtgggaggcc

SEQ ID NO: 340586 - DNA, 80 bp, Homo sapiens
  chr10:16806491-16806571
  hypo
cgatgttcggtggcaccactatggaaacaaaaatgctgagtgtgaatctgggaatggaactcctagcaagggatggcagc

SEQ ID NO: 340587 - DNA, 90 bp, Homo sapiens
  chr10:17157485-17157575
  hypo
cgcattaaatcctcacagatgccatggacacagcgtgccacagaacccccttcacagtcgtcatatttggatgcacactggggtccgtac

SEQ ID NO: 340588 - DNA, 2530 bp, Homo sapiens; identical to SEQ ID NO: 333874
  chr10:17270086-17272616
  hypo

SEQ ID NO: 340589 - DNA, 353 bp, Homo sapiens
  chr10:17347083-17347436
  hypo
cggtcgtaatattcagagggagatagggtgatagtacccctaatgtcgcaggggatgtgtacaccccccgtgataccggttgcagtatccaaggggggacagaatgatagtaccccccatatcacatgtggcgttttcactcccctgtgattccggatattatttccaggaagggacaggatgatagtgaccccaatgtcgcagagagtttgtactcccctttatgatactggtcaaaaaacccagcggggggaagattcatagtacccccgatatcgcagggcatgtatacacccccctatgatagcggtcgtaatatccaggaagagaaaggatgatagtacccctatgtc

SEQ ID NO: 340590 - DNA, 1697 bp, Homo sapiens; identical to SEQ ID NO: 333875
  chr10:17495133-17496830
  hypo

SEQ ID NO: 340591 - DNA, 1263 bp, Homo sapiens; identical to SEQ ID NO: 333876
  chr10:18429033-18430296
  hypo

SEQ ID NO: 340592 - DNA, 455 bp, Homo sapiens
  chr10:21797635-21798090
  hypo
agcctgctctgccccgcagaccctgcggtctccaggcccggtaggctttttcaggttccgcaggcctggccgaaccggccagatcccgcgttccaagcgtctggagaactggagacaaagcccaagatccaatcccaccgcagagcggctcaagccggcgcccgggacccgcgggcctaggcgcgacccccagcagcctgtgaccgaagaggggagcccgggacccctccgcctctccgcagccctctcgggcggggtcccccaggcccgcccggttccccctgccgcactcagccagctgcttttggaggcctgcgagttccaaacacgccttcccattaattaaaacctggaaagcctggccactttcttctcaggccgaggcagcatctccagaggtccccgcggcactctcggccggcaacggctcccgcgcggggccttggaggccgagc

SEQ ID NO: 340593 - DNA, 872 bp, Homo sapiens; identical to SEQ ID NO: 333880
  chr10:21815648-21816520
  hypo

SEQ ID NO: 340594 - DNA, 127 bp, Homo sapiens
  chr10:21915244-21915371
  hypo
cgtgagaaccagtgcaaggcattttgaaaatgactagaaatctcgcacgcgtgccaccccccaagtctatgattcttatgtttacatggcaaagaagctgaaggggaagcaggtacgtgtgcagaac

SEQ ID NO: 340595 - DNA, 277 bp, Homo sapiens
  chr10:22042735-22043012
  hypo
cgtaaactgaagaggaaagggagaaagtggttgggttggttctcatgagcaagacggcaagaacagaaaagcaagcacgggctacctgtggcggctgggcacggcatggggaggcctcctcagtgggcagggtgaggtggcttgggaggacacgggtctgggagtgggagaggagaaggggcacggtggggctgtcacgtggctggtggatgtgccacgtccccacatgcattcagcacattccctctcgaggatcctcgctctcctgctgtgaccc

SEQ ID NO: 340596 - DNA, 376 bp, Homo sapiens
  chr10:22047245-22047621
  hypo
cgactaacaatctagctacagggaaagaagcctcaagagacactgtgttaggatcacaccctggggctctctgcagcgcctcatggccagatcacaggaaagaggccgcccaagcccggtgggtgggctctccacagggcactcccgccccctcctcccatctgaggaccatctcagaaatatctgagcaggcaccaagagctaccagcagggagaaaggccaactacaaacggccacggccgtggaaagtaagccgaaccctagctgtcgcctggcactgaccacatacggagatggcctcagggcctctggacagccaccaggtgtacctgctgagtccaaagttattcacatggcagaatcgaagatgatcac

SEQ ID NO: 340597 - DNA, 1813 bp, Homo sapiens; identical to SEQ ID NO: 333882
  chr10:22540645-22542458
  hypo

SEQ ID NO: 340598 - DNA, 592 bp, Homo sapiens; identical to SEQ ID NO: 333884
  chr10:22634092-22634684
  hypo

SEQ ID NO: 340599 - DNA, 216 bp, Homo sapiens
  chr10:22833864-22834080
  hypo
cgcacactcctccccagtgacacggggcctcgctgcacattcattttgttggagtatttgagcgacttctctctttcccaagcaaggcagccccaaacggggctctaaggttttggctttcactgcattcccgaatcccggcaggcagagggctcgggaaagtattcggcacttgttggacaagtgaatgggatgcttgttacttcttccctatcc

SEQ ID NO: 340600 - DNA, 268 bp, Homo sapiens
  chr10:22869787-22870055
  hypo
cgatggtaatgtctcgctttacagactcgacaggtgcagtgctctaatgcggcccgggaggctcctttgtagaatggatgagtctgccaactcctgtctgcagacactttgaagtcccaaggcagatgaggctgcaaatggaccaaacactgaacaatgctggccgtcccgtgtgtggctcagaaattaagagcacacaccagataagtgggcttattctcctgtgagagcacaggcagcatgaacacaataccgaagagtgttcctt

SEQ ID NO: 340601 - DNA, 87 bp, Homo sapiens
  chr10:22883126-22883213
  hypo
cgtaaagtctagcgtattaagtacattataattacagacttaccggcactcatgcctttcccattatattctctacacctctagttc

SEQ ID NO: 340602 - DNA, 626 bp, Homo sapiens; identical to SEQ ID NO: 333887
  chr10:23001888-23002514
  hypo

SEQ ID NO: 340603 - DNA, 1193 bp, Homo sapiens; identical to SEQ ID NO: 333889
  chr10:23461904-23463097
  hypo

SEQ ID NO: 340604 - DNA, 1303 bp, Homo sapiens; identical to SEQ ID NO: 333894
  chr10:23982857-23984160
  hypo

SEQ ID NO: 340605 - DNA, 794 bp, Homo sapiens; identical to SEQ ID NO: 333895
  chr10:23984183-23984977
  hypo

SEQ ID NO: 340606 - DNA, 209 bp, Homo sapiens
  chr10:24841855-24842064
  hypo
ttcacattcagagacgagtcgtaccggggactcgaacgctgtgaatggctggtaatgtgacttttcccaaatagcgaatgacttggttgaaagctttgaacaaagcagaatacgactctccctcactttacacgttcctgaaaaattttattgcacattttgaggctgcaaaagtgtttaaatataaaataaaattggcctctacactc

SEQ ID NO: 340607 - DNA, 223 bp, Homo sapiens
  chr10:24863037-24863260
  hypo
cgtttagagattcctgcgtgtttcaaggggatgtggaagccgggctgtgtccagtctgtggtaagaggaaagcatatagaagcccatgccccctgcgtgtgcacgcagtggctagagtttgcgttaaaccacttcatctagtcccgtggccacacctagctgtgaaggaggctgagaagtgtggtctctaagaagcagtactgggaaataaccgggactctgc

SEQ ID NO: 340608 - DNA, 100 bp, Homo sapiens
  chr10:24908428-24908528
  hypo
cgccaggcggactggtactcgaggcttttctttcctccattctttttatgtggacctctcgacgtgcatcattgggcagccagcaggtagtgtctgaccc

SEQ ID NO: 340609 - DNA, 982 bp, Homo sapiens; identical to SEQ ID NO: 333898
  chr10:25463760-25464742
  hypo

SEQ ID NO: 340610 - DNA, 2398 bp, Homo sapiens; identical to SEQ ID NO: 333902
  chr10:26503630-26506028
  hypo

SEQ ID NO: 340611 - DNA, 1187 bp, Homo sapiens; identical to SEQ ID NO: 333904
  chr10:26726986-26728173
  hypo

SEQ ID NO: 340612 - DNA, 56 bp, Homo sapiens
  chr10:27144571-27144627
  hypo
cgcacattgtttttatcccctatgttgccataagaaccctgtttagggccgggtgc

SEQ ID NO: 340613 - DNA, 54 bp, Homo sapiens
  chr10:27825982-27826036
  hypo
cgtttggtccttcggtgaatgagaagggatgggactccaggaacaaaagaaggc

SEQ ID NO: 340614 - DNA, 2897 bp, Homo sapiens; identical to SEQ ID NO: 333906
  chr10:28030732-28033629
  hypo

SEQ ID NO: 340615 - DNA, 683 bp, Homo sapiens; identical to SEQ ID NO: 333907
  chr10:28033689-28034372
  hypo

SEQ ID NO: 340616 - DNA, 839 bp, Homo sapiens; identical to SEQ ID NO: 333908
  chr10:28034906-28035745
  hypo

SEQ ID NO: 340617 - DNA, 111 bp, Homo sapiens
  chr10:29581547-29581658
  hypo
cgcgtggtgcagacgcggaaagctgaaggagaacaaccactgccatgtcgcctgctcaggtgaggctctgactttccagtgatgccatcctcaggactaggcgagaaagcc

SEQ ID NO: 340618 - DNA, 59 bp, Homo sapiens
  chr10:29666997-29667056
  hypo
cggtaaacatacgcgtgtggtgtccttttcatataatgacttctaggaaacgcagtttc

SEQ ID NO: 340619 - DNA, 2153 bp, Homo sapiens; identical to SEQ ID NO: 333911
  chr10:30024003-30026156
  hypo

SEQ ID NO: 340620 - DNA, 137 bp, Homo sapiens
  chr10:30736731-30736868
  hypo
cgttaccaaatagattccgatgttctcctgatcccctggaagctgacttacaggaatattggttctgattttattcctcggggcgcctttggaaaggtatacttggcacaagatataaagacgaagaaaagaatggc

SEQ ID NO: 340621 - DNA, 104 bp, Homo sapiens
  chr10:31134747-31134851
  hypo
gcatctgtcccaggcgagctaactcgtctttggttaccacagggacaggagcaatcacgtggaagagtcacgtaagagcgcgtgaagggcacgggaacaccctc

SEQ ID NO: 340622 - DNA, 2139 bp, Homo sapiens; identical to SEQ ID NO: 333916
  chr10:31607954-31610093
  hypo

SEQ ID NO: 340623 - DNA, 68 bp, Homo sapiens
  chr10:35043989-35044057
  hypo
cgacattttcaatgaggcaaaggatgactgacagcttcaagaagaattgctgggccgaggctgggcgc

SEQ ID NO: 340624 - DNA, 1781 bp, Homo sapiens; identical to SEQ ID NO: 333920
  chr10:35102985-35104766
  hypo

SEQ ID NO: 340625 - DNA, 121 bp, Homo sapiens
  chr10:35152237-35152358
  hypo
cgttatcaaataacaaatacttaatttcttttctttttttttttttgagacggagtcttgccaccatacctggcctatttacaggcatcctgtttaagagatgtttcaggccgggcgcggc

SEQ ID NO: 340626 - DNA, 92 bp, Homo sapiens
  chr10:35503808-35503900
  hypo
cgttgcacatctcgcacacccttgcgcgtgggatccacagcgctcccacacccgtgcgcgtgggatccggagctccccgcacacccgtgcgc

SEQ ID NO: 340627 - DNA, 1230 bp, Homo sapiens; identical to SEQ ID NO: 333921
  chr10:35929169-35930399
  hypo

SEQ ID NO: 340628 - DNA, 1842 bp, Homo sapiens; identical to SEQ ID NO: 333922
  chr10:43248638-43250480
  hypo

SEQ ID NO: 340629 - DNA, 357 bp, Homo sapiens; identical to SEQ ID NO: 333923
  chr10:43571939-43572296
  hypo

SEQ ID NO: 340630 - DNA, 728 bp, Homo sapiens; identical to SEQ ID NO: 333924
  chr10:43572559-43573287
  hypo

SEQ ID NO: 340631 - DNA, 427 bp, Homo sapiens; identical to SEQ ID NO: 333925
  chr10:43600291-43600718
  hypo

SEQ ID NO: 340632 - DNA, 215 bp, Homo sapiens
  chr10:44163388-44163603
  hypo
cgagtggggtgggccgcgagcgggaggaacacgcacgtcccggggcggccggaggggccccgcttgcgcagggggttgtcagaagactcgcacgcggcaggaggcctggccgtgggtgcagagttcccagtaggacgcccacgaaaaaaacctaactcccattatgttctgtaattctagtctagcccctatttcatgcttgatagagagcagtc

SEQ ID NO: 340633 - DNA, 70 bp, Homo sapiens
  chr10:44163720-44163790
  hypo
tcactgcagcctccgcacctccgactccagcgatcagattcgcctgggttgtccagctttcaagtccacc

SEQ ID NO: 340634 - DNA, 413 bp, Homo sapiens
  chr10:44198155-44198568
  hypo
cgcaccgggcgtggcccaaggccaggatcctgagagctggctgcctgcggcccgtggcatatttgctagcgccttccaggcatagaacggtggcagttttttctgtcaaggactcactttctagggaagaaggagggtggtgggcagcgcgaggccaggaggctggcgtgggcttgccggtaggcgcttctgagctgggtgggctcgccttctcgcccttcctcctctttccttccttgtttcccctaatgacccgggcacttattctagcccagctctggcctcgcgtcactacgctctgcaataggaggacggtagggtccttggccatgctggctcgcctggtcacggcgactcccacgcacgcccggactcctggtgctggtgctcgctcagcaggcgcggctgggggc

SEQ ID NO: 340635 - DNA, 269 bp, Homo sapiens
  chr10:44874128-44874397
  hypo
cgggtcaatgcacacttgtctgttgttgttcttcagccgggctctgtgaaaacagaatggcaacagtgtgcggctgcacaggaggaaggcgcggctgcaacgtgtgcatccgctcccccaacacccatctagggccctcgctggcaccccgtgctccacttggtacgctcaggctccagaggtgctcgcggtgtgctggggaaagctcagcgctggcagtgcaggaagttccattgcagagacatggaaatgtgaacagaagtctttcc

SEQ ID NO: 340636 - DNA, 117 bp, Homo sapiens
  chr10:46009817-46009934
  hypo
cgctcagtgcagcgcttccccgcaacatggtccctgtgcttgatgccggggaacaggcgctgcctgcacagcagctgccaccctacagctgccagcagcagcacatggctggctgtc

SEQ ID NO: 340637 - DNA, 116 bp, Homo sapiens; identical to SEQ ID NO: 262010
  chr10:49652964-49653080
  hypo

SEQ ID NO: 340638 - DNA, 1349 bp, Homo sapiens; identical to SEQ ID NO: 333938
  chr10:50605507-50606856
  hypo

SEQ ID NO: 340639 - DNA, 1493 bp, Homo sapiens; identical to SEQ ID NO: 333940
  chr10:50817510-50819003
  hypo

SEQ ID NO: 340640 - DNA, 81 bp, Homo sapiens
  chr10:50948764-50948845
  hypo
cgtactccgagagggagctgttgcacacggtgtacggggcctggtcaggccagagatgattcataggcacacacgtcctgc

SEQ ID NO: 340641 - DNA, 923 bp, Homo sapiens; identical to SEQ ID NO: 333942
  chr10:50969681-50970604
  hypo

SEQ ID NO: 340642 - DNA, 738 bp, Homo sapiens; identical to SEQ ID NO: 333943
  chr10:52177724-52178462
  hypo

SEQ ID NO: 340643 - DNA, 180 bp, Homo sapiens
  chr10:52180055-52180235
  hypo
cgtaacatgaaggcttctttcatatctggaccattttttccattcctggttcaggcattcgtcccctctgcctgagtcactgaggttgagtgtcttctagccgctgttccagcaggcgggcccctccctctatgcctctcaacacatcatcatcatcatcacatgacaaatgtcaaagtc

SEQ ID NO: 340644 - DNA, 877 bp, Homo sapiens; identical to SEQ ID NO: 333944
  chr10:54072982-54073859
  hypo

SEQ ID NO: 340645 - DNA, 1120 bp, Homo sapiens; identical to SEQ ID NO: 333955
  chr10:64574692-64575812
  hypo

SEQ ID NO: 340646 - DNA, 398 bp, Homo sapiens
  chr10:70184294-70184692
  hypo
cgccgctagccggagcatcaccatgaagttcaatcccttcgtgaacttggaccgcagcaaaaaccgcaaacgtcacttccatgcccccttgcacgtgcaccggaagatcatgtcatccccgctctccaaggagctgcggcagaagtacaatgtccgctccacacccatccgcaaggacgacgaggtccaggtagttcaaggacactacaaaggtcagcaaattggcaaggtagtccaggtgtacagaaagaaagatgtcatctacactgagcaggtgcagcgtgagtaggccaacagcacaaccgtccacgtgggtactcacccaaacaaggtggttatcaccaggctaaatctcaacaaggatcggaaaaaaattattgaacacaaagccaagtctc

SEQ ID NO: 340647 - DNA, 139 bp, Homo sapiens
  chr10:70218986-70219125
  hypo
cggtacctgccaaaaatataatagtaaatagacttagacttaagcggtacctgccaaaaatatgatagcgaatatgaaagtataaatatgagaaaagtaaacgaggacaaaaaaatacatataagcaacccaactgttc

SEQ ID NO: 340648 - DNA, 1236 bp, Homo sapiens; identical to SEQ ID NO: 333960
  chr10:71078140-71079376
  hypo

SEQ ID NO: 340649 - DNA, 634 bp, Homo sapiens
  chr10:71133924-71134558
  hypo
cggcagctccggtcctggtttgcttggccatgggcctctgtctcttttctttccttgggcttctacctgaagcagacccagggtgctgagggctcctctttggtgtgcaggtccttgcccatgacttctcgtggttgatgatgctcccctcccccatctcagcccttcctgggcccaccagcaggcagattggttggaacgctgccacgccgcctctcactgcctgtctgtggtcgtaggtgtctgactgccgagacacctgggcattacctgttcagttatcacaaggaaaagggcccgggcgttacccgttcagttatcacaggtggcatgccctgagaggcagatcatgacttgctcgatttcattaatttcacttgagcagatgggaagcacgctgttggaacaggagccggtctccatgagccttggtttgaacagagagaagctcgtgagaggtgctatttgcttgttctgctgctctaacagggcctttagggactgggaaaggacagaccctggccgtgggcctctatctggaaaagggggtatcactatccatgtgtgtaataggccatgtagaaaagggagcagattgttctgggcgtctttagaaggcagagtgaaaagcagc

SEQ ID NO: 340650 - DNA, 203 bp, Homo sapiens
  chr10:71158355-71158558
  hypo
gattagcactgctccaggtccgggctatcctccagcagctaggtctgaatagcacctgcgatgacagtatcctcgtcaagacagtgtgcggggtggtgtccaggagggccgcacagctgtgtggcgcaggcatggctgcggttgtggataagatccgcgagaacagaggactggaccgtctgaatgtgactgtgggagtggac

SEQ ID NO: 340651 - DNA, 891 bp, Homo sapiens; identical to SEQ ID NO: 333962
  chr10:71332340-71333231
  hypo

SEQ ID NO: 340652 - DNA, 233 bp, Homo sapiens
  chr10:71405329-71405562
  hypo
gttttccccactcacggcgaacctgaagccttctccaaagggcttcacacccagggccactgaggcctggaaagcattttatttatacgaggtattcctggtaaccttctccgcctttcatagggtgcgtgagtggtcaccacagagaaacaggccaaagctgacccggtgcccaccttttctgcccacagtgtccttccaggcccctgacttgttccatgccgccaatgcac

SEQ ID NO: 340653 - DNA, 641 bp, Homo sapiens; identical to SEQ ID NO: 333965
  chr10:71892160-71892801
  hypo

SEQ ID NO: 340654 - DNA, 626 bp, Homo sapiens; identical to SEQ ID NO: 333967
  chr10:72238261-72238887
  hypo

SEQ ID NO: 340655 - DNA, 156 bp, Homo sapiens
  chr10:72288415-72288571
  hypo
cgctgtcataaagtaacccagataagatgccttcctcaggacgaagctcatctcttacatgcaagtccacgaggacatccaggctgggatggctgctccgtgatcatccaggccccttctccctcattgctccaacatcatcaacatgtggcttcc

SEQ ID NO: 340656 - DNA, 217 bp, Homo sapiens
  chr10:72765340-72765557
  hypo
cgagccaagcgccagagtgggacagatgcacaggtccgtcctcagcctcccaagctcccgctcactaagtaaacacctgtgcgtgggctcgtcgctcacctccctaatgagctcatcgctcacccggctctccatcgcgctccatccgtcttcaccttgctgccatggctccactgtgcagctatttttgcacttcccagtaagcattccactgggc

SEQ ID NO: 340657 - DNA, 122 bp, Homo sapiens
  chr10:72784980-72785102
  hypo
cgaactgcatgcagcaacttgtatgaatcgcaaaggcttatgctgagcagaagccactatcacaaggttaccttctgcatgattttatctatactaccttctcgaaaagccgagagtatagc

SEQ ID NO: 340658 - DNA, 162 bp, Homo sapiens
  chr10:73445891-73446053
  hypo
cgagccgctgatttagaactaatagcgaatgcagcgccaagatccggggaaatatcaccgctaataagtttctgcctcatgctctgtcactgacattctccacaccgtttcgtgcagccaagcagaagcttaaatgtataagtatatggggcgctcgcaccc

SEQ ID NO: 340659 - DNA, 238 bp, Homo sapiens
  chr10:73514960-73515198
  hypo
cgcccagctcctggcgggaagtgcagctgctcccaactctcaaatgaaaaggaattgtgcctgcatcgtgcctttgcgaatcccaggggctgaactgggggctggagcaggtcactcgcaccgtccacccaccccaggcagggaggaatactcacggcggttggaggctgcctgcctttgcttgtagaccaggagcaggatgagggggaggcagaggattcctacgatgcaggcaccc

SEQ ID NO: 340660 - DNA, 134 bp, Homo sapiens
  chr10:73591528-73591662
  hypo
cggaatcacagctctcttaggaaccagtgcacgtgcccgtggctcaagcaccatccccactcaccgccgctcacctcagtggcattgtccttcagcatatcaccagctgcggtgacaacgtctttgcatatgtc

SEQ ID NO: 340661 - DNA, 400 bp, Homo sapiens
  chr10:73767536-73767936
  hypo
cgccgctgcggccccctcaacgtgacgctggccgcagaggcctgccgccgcaaggagcacatggccctcaaggcggtgcgcatccggcagctggagttcctgcagccgctggccgaggacccccgcctggacctgcgcgtcatccagctggtgcgcgacccccgggccgtgctggcctcgcgcatggtggccttcgccggcaagtataagacctggaagaagtggctggacgacgagggccaggacggcctgagggaagaggaggtgcagcggctgcggggcaactgcgagagcatccgcctgtccgcggagctggggctgcggcagcccgcctggctgcggggccgctacatgctggtgcgctacgaggacgtggcacgcgggccgctgcagaaggccc

SEQ ID NO: 340662 - DNA, 1250 bp, Homo sapiens; identical to SEQ ID NO: 333970
  chr10:73846837-73848087
  hypo

SEQ ID NO: 340663 - DNA, 650 bp, Homo sapiens; identical to SEQ ID NO: 333973
  chr10:74079281-74079931
  hypo

SEQ ID NO: 340664 - DNA, 99 bp, Homo sapiens
  chr10:74100516-74100615
  hypo
cgcgctgtccctggcgccctcctcactcacatcaccctggttgtccctgcggtcctgcctttgctggtaggtatagcgcatgcggccgttgctgtagac

SEQ ID NO: 340665 - DNA, 31 bp, Homo sapiens
  chr10:74451119-74451150
  hypo
cgtgagccaccgcgcccggccttacatgatt

SEQ ID NO: 340666 - DNA, 34 bp, Homo sapiens
  chr10:75384244-75384278
  hypo
cgtgagtcaccgcgcccagccaaaaagccattat

SEQ ID NO: 340667 - DNA, 116 bp, Homo sapiens
  chr10:75574077-75574193
  hypo
cggtacagcagagacagacacgaagggcgggcgggagggctgcatgcaggggcgtgcattggctgctgccgcttttgtaattgaattgttttaaacctcaaacaaacaggactgcc

SEQ ID NO: 340668 - DNA, 102 bp, Homo sapiens
  chr10:76287784-76287886
  hypo
cggcaataaaacccagagtaaactcttaagataaaatgacgacgtccttctggaagaggtgaaactggtatgtccatgatccttatcagaagtgtcatgatc

SEQ ID NO: 340669 - DNA, 168 bp, Homo sapiens
  chr10:76524062-76524230
  hypo
cgaggaaaagaaagatgaaagatcagagaggcgacaccagttgaaacaggctgctgaattattacagcgagtgaccatgggacgatggagccgggggcggccaccccctgctggctcagtaggtcaagtcagtgcggtgtcccagcagaggcggcttgaacttaaggc

SEQ ID NO: 340670 - DNA, 96 bp, Homo sapiens
  chr10:76784656-76784752
  hypo
cgactcaaccatttaatttctcatgagctcttatgtgttatgtttggaattaatttcagaggccttttgtactaaagaagaaaaggggtcgtaaac

SEQ ID NO: 340671 - DNA, 73 bp, Homo sapiens
  chr10:76966489-76966562
  hypo
cgaaagagcgaaactctatctcctctgtctcaaaaaaaaaaaacaaaaagcaaaaaaaaaaaaacctggcgcc

SEQ ID NO: 340672 - DNA, 404 bp, Homo sapiens
  chr10:76998426-76998830
  hypo
cgggggcggctgtgatcttgttcccattttccagagcaggaaagctcagagaccaccgcccagaccctgcagccaacagaggaaacgcgcgtacctctcccttgaaccctgggacccagagggaacaggccttcttggctcctctgctgggacgagggcccagctcgagctggcctgagggccctgcgctcaggtggtgccgctgaccgctctctcccttcagcccgggggtccaggttgcagcaggcccccagctcacactgaaactccctcctacagcctggctttaggccggagcggtggaggttgagggggagcgggtggggaggggaggcatgtcaccatctatccccgtcagattaaaaaactaatttgaaaagattaatgtattccattcttgttac

SEQ ID NO: 340673 - DNA, 4230 bp, Homo sapiens; identical to SEQ ID NO: 333976
  chr10:77159582-77163812
  hypo

SEQ ID NO: 340674 - DNA, 184 bp, Homo sapiens
  chr10:77892406-77892590
  hypo
cgtgtatgtttacatgtgtaggtgagcgcatgagtacgagtatcggagtacgagtatcggaggaacaatgagctggagtccactagagagtgaaacttacagagtcttgaccattcatcattctgattctcagatttcaccagctgacaagcaccttcttttttggcggggggggtcagagttt

SEQ ID NO: 340675 - DNA, 724 bp, Homo sapiens; identical to SEQ ID NO: 333979
  chr10:79396547-79397271
  hypo

SEQ ID NO: 340676 - DNA, 1041 bp, Homo sapiens; identical to SEQ ID NO: 333980
  chr10:79397389-79398430
  hypo

SEQ ID NO: 340677 - DNA, 499 bp, Homo sapiens
  chr10:79601557-79602056
  hypo
cggacaccacgcactctgcagcccctcttcccgggatgctgtaggagaggctgaaagccagccaccggcccacccacctacctgccgcagcgcctccatctcctcattggccgccttcttctcagatgtgctgctcttgagcttggactcggccagctccacttcggtctgcagcttgtccagctcagagatgacctggtcacgctcactcatgatgagcttgtactcgctgtacacagcgtcccgctcctccctgtatttctccgactcctttgctgtcttcacctgcgtggttctcagctcggtcagctctgactgcagcagctccatctcccactgcaggtccttgttctgcgccgtggccttgttcagctcatggtggatcgcctcaaacctggcaagagaggtggcgagatgtgggaagggcgggggccctgcccggtcagtggccggctgcgctgctgcctcccgccagctctactgtgctggacagtcaagc

SEQ ID NO: 340678 - DNA, 433 bp, Homo sapiens
  chr10:79610504-79610937
  hypo
cgcctcatacacacgggcacgcggcgccagtgccttctacgcagtgtcttcatgacagccatacagaccaattctcctacactgagatgtgccaacctcgtgctttctagcaaggctgtggggcttcccttggaccgaggtggagccacatacacctctgaaatgatgattctctcaaggaagtatagaatccaaactaaaccccaaggcaaaaggttacctgagccaagcgtagaccaagaagaacaaactgccggcaggcaaaacagcaagaaaacaaagcacacagcagggtgtaggtaaaggccgggagaggccgcctgccctcaggtgggggaagttaccacgcaccccagggcagagaaggggctcaaacccttagagggccatcccctcgggcagcttcctgggagctttgttttgacacagcacc

SEQ ID NO: 340679 - DNA, 76 bp, Homo sapiens
  chr10:79770259-79770335
  hypo
cggttccccattcctcggggttacaagatttgctttagtctgtaggaaaagtaagcgcagtcagttagctgttctc

SEQ ID NO: 340680 - DNA, 138 bp, Homo sapiens
  chr10:80848861-80848999
  hypo
cgacaggacagcgctgagcaggtacctgggctggtgccacacttggggaggtggacacgtagcctcagagcccgaagcaactggtggggttcattcccatggaggagaggttctccgtggtccacggccggagcctcc

SEQ ID NO: 340681 - DNA, 226 bp, Homo sapiens
  chr10:80855265-80855491
  hypo
cggcctttccgggtgtcaggcaggtctctccggttaggtaagggaggcctcatccttcttacctgactgctctgagtgcagatctatgctgcttcccatcttctccaggcgcctgatctattaccttgggcttggaacgcacctaacaaaggctaccgtgaggaggcccctcggtacctgttcatctggacacatcgtgcagacccccgcaccccgtgtggctccc

SEQ ID NO: 340682 - DNA, 423 bp, Homo sapiens
  chr10:80878255-80878678
  hypo
cggaagcacttgagcagagtctcaaaggccaggggcccttgaaagacagagaagtggggagaagagctctgagcggggcacccagcgtgtgccaaggccggagccaggggctctgggaggccgggctgactggagcctagtggtgggcaggcaggtttggctgctgctgtggtctggctttcagggctgcggggctgctcggccggtgctggggcttcgaatgtgacgttcaggagctgcgacctttatttggcagtggcaggacggtatccagtgtctcgagtagctccacgttggtgggccagttccatcttccaggagatggcagccaggacctagaggtccatgacgtgggtgaggggctgcccgcagggtcagagcttggagctcactgccccctttcttgtctcccataggactcac

SEQ ID NO: 340683 - DNA, 253 bp, Homo sapiens
  chr10:80921761-80922014
  hypo
cgggcctctactgtgggtagacccgctgacctcccactttcattgcagcaggatggagctggagtgaggtggaggggccgcaagctgctgaccggcgtgtggaacactggtggtttgcagatcactgaggtaggtgtgccacggggctggcgggaggtggctgggtcggacgcaggtgagtcctcatgagggcaggtgctagccctagcacgctggacctttgactcgggcctcagccctgaggggcaggagc

SEQ ID NO: 340684 - DNA, 178 bp, Homo sapiens
  chr10:80928401-80928579
  hypo
cggaggctgtgtgcggactccacgagaaataatgctgtgcatcgtgtggcgcatggtcacgctctcagccctgctccctgggtatcaggtctgcttgactgatgtctcagctctgggctgtggccagtgcaggaggagagaagaggcagggacctcagtgtgacccccacaggtgtcc

SEQ ID NO: 340685 - DNA, 137 bp, Homo sapiens; identical to SEQ ID NO: 333981
  chr10:81002952-81003089
  hypo

SEQ ID NO: 340686 - DNA, 176 bp, Homo sapiens
  chr10:81023807-81023983
  hypo
ggaaaaattacatgcggaatggaaagcaggcgctcagggtggctcctgctggaatgagagctggagtgcaggctccgtggttcctgggcatgcgggtgtggctcagttctcaccttgcagatggagtgggactgttgacccaggccagcctggggactgcctcctcacctccctgc

SEQ ID NO: 340687 - DNA, 240 bp, Homo sapiens
  chr10:81032458-81032698
  hypo
cgaggtgagggagtctggtcacaaggatgcagtttggagaggtgaggggagctcagtgggttcactttagacgagttgggtggtgcgtgcttttacgttttacgctgagacatttgaggagtgcttggaagtctggattaaggctcagcattggcagttcgagtctgggatgattccctgctgctgtcccagccccagctgtggtcaccatgaggtgagctggaaggccccaaggtcctc

SEQ ID NO: 340688 - DNA, 197 bp, Homo sapiens
  chr10:81036003-81036200
  hypo
cgcagccagttccccagccctcagcgtcctcatgtacttcaggaggacaggccagctgagacacgatggacagcccaggctgagacacgctggcctgggaggcgcttttggctcctgtggccacgtggggacagtgaacagtgaaagaaaatggaagttttccccagtccccagttcatgtggggctctcttatccc

SEQ ID NO: 340689 - DNA, 261 bp, Homo sapiens
  chr10:81050762-81051023
  hypo
cggcaaccccatggcgtcgggcatgaccaccagcaacccaggcctcaactccccacagtttgcggggcagcagcagcagttctcagccaaggctggccccgctcagccctacatccagcagagcatgtatggccggcccaactaccccggcagcgggggctttggggccaggtgagcagggctgacctgtggcagaagccatggacgccacccctcttcctccttccagtggggagggacccacttaaatcccagctccac

SEQ ID NO: 340690 - DNA, 82 bp, Homo sapiens
  chr10:81060524-81060606
  hypo
cgaggaccggcagatgaacaccaactggcccgcctcggtgcaggtcagcgtgaacgccacgcccctcaccattgagcgcggc

SEQ ID NO: 340691 - DNA, 447 bp, Homo sapiens
  chr10:81063491-81063938
  hypo
cgcgaaggcagggcctgctctgcagagacaggggaactgccacagccacctcgtctggcacacacacaccacacgtgtcccacatggagacagcagcccgggcacccggccctgtgactgccacacagtgccacacactgccctctcagcgtttggtgtgggctgggaggagaaccaggacatgccccagctgcacgaggaagtggggagcacgtgcagaccccctacctctgcaggactgtcttgccatcctcacctgtctgtgcctcctgccccgcagtcaagcggaatttcagcagcgtggctgcctcctcgggcaacacgaccctcaacggggaggatggggtggagcagacggccatcaaggtgtctctgaagtgccccatcacattccggcgcatccagctgcctgctcgaggacacgattgcaagcatgtgcaggtgagc

SEQ ID NO: 340692 - DNA, 366 bp, Homo sapiens
  chr10:81065719-81066085
  hypo
cgcctcgtccacagtgtggtgagagtgggagcaggggcctcaacaaggtcacctgggtgtctgtcggagctggaggtgcttttatgcccaaagccaggcaccccggagcctcagctctgccacccttcctcccccagctccgagtttgaagaggtcaccatcgatcccacgtgcagctggcggccggtgcccatcaagtcggacttacacatcaaggacgaccctgatggcatcccctccaagcggttcaagaccatgagtcccagccagatgatcatgcccaatgtcatggagatgatcgcagccctgggccccggcccgtccccctatcccctcccgcctcccccagggggcaccaactccaac

SEQ ID NO: 340693 - DNA, 137 bp, Homo sapiens
  chr10:81142199-81142336
  hypo
cggagacgtcggagccttctccacgcaccttccgagctgggcccacgggttctgttttgtctttttagctggactcacacgtatggacagacacagacacggacggggtcaccgcatgggggcggaggaggtcggac

SEQ ID NO: 340694 - DNA, 186 bp, Homo sapiens
  chr10:88200334-88200520
  hypo
cgtgagccactgcgcccggccttttttcactgcttttgaggcctgcctcttcctcctttcctgtgtgtgatgggtttctgatttgctcttaaaatcttgtcattggaaataagaaaaagggatataaagatcttgcggggcctccagagccacgatgagaactttggtcttgatcctgaaatcggc

SEQ ID NO: 340695 - DNA, 632 bp, Homo sapiens
  chr10:88441137-88441769
  hypo
gtgtggcctctaaccgctctcttctctctcccctgcatggcctgccctgtgccaggaccccgctctggacacgaacggcagcctggtggcacccagccccagccctgaggcgagggccagcccaggcaccccaggcaccccggagctcaggcccacctttagccctgccttctcccggccctccgccttctcctcactcgccgaggcctctgaccctggccctccgcgggccagcctgagggccaagaccagcccagagggggcccgggacctactcggcccaaaagccctgccgggctcgagccagccgaggcaatataacaaccccattggcctgtactcggcagagaccctgagggagatggctcagatgtaccagatgagcctccgagggaaggcctcgggtgtcggactcccaggagggtaggtaacggacatacagctctccacaggtggcctgggccacctgggtcctcggtgctcggcagagacctggtcaggtggtcagagcgaggcactggccccaatccagccagccccgagcccatgaggtcagcagtgatcctgcggcatttgccatgagccgggcatgctagcgatttatacaaccaaccacgctggggtgacatgtc

SEQ ID NO: 340696 - DNA, 740 bp, Homo sapiens
  chr10:88702294-88703034
  hypo
cgctggtgctgctccaagctgcgctgagtggcgaagagtgcgttgtggaggccgtgaagggaggcgttgagggaggcggccccggccccggcctcggcctcgcagcaccgcccgacattcttgacgtcgttgctcaggctctggagctcccgcgccagcccggccagggcggtggtggcggcctcctcgcggcccgcgtcgtggctgggctccaggtgctctgccggccgcgggggctccgaggcctgctccagggccgtcactcgggcggccagctcgtcccagccgagcgcctgctcctgcagcccgctagcggcgtcctgcagggccacgcggatctgctcgtagctcaggggcagcggtcccggcgtctgctcagacatctcctccagcacctcctccccgaagagcgcggccagcaccgcctcgtgccgcagcgcgtcctccagcagggcggcgaaggcgctgtgcagctggcgcacctcgtggcgggcctcggccgcggccgccttcagcgcgcccacctcgtcatccagcgcctgcacttggctccggagccgcgacgtggccgcccgcgcccgctcgccctccgctttgtgcgcgtccacggccagcgacacggcgtccacggcgttctgcagggcctgcagggaggagccgtccagctgccgccgctcgtccaggctcacctgggtctcctccagggcacgcgtggcgtccctctggccctcccggatgac

SEQ ID NO: 340697 - DNA, 118 bp, Homo sapiens
  chr10:88857179-88857297
  hypo
tggtggggggcctacaaaaattagccaggcgtggtggcggggagggggttgggcagtgcttgtagttccagctacttgggagaaccacttgaaccagggagagaggttgcagtgagcc

SEQ ID NO: 340698 - DNA, 1146 bp, Homo sapiens; identical to SEQ ID NO: 333995
  chr10:92616995-92618141
  hypo

SEQ ID NO: 340699 - DNA, 136 bp, Homo sapiens; identical to SEQ ID NO: 213652
  chr10:93567140-93567276
  hypo

SEQ ID NO: 340700 - DNA, 185 bp, Homo sapiens
  chr10:93572713-93572898
  hypo
cgtgtggacaatttgttttcatctaggttttgggcggaaagacgtagttgaatatttgcttcagaatggtgcaaatgtccaagcacgtgatgatgggggccttattcctcttcataatgcatgctcttttggtcatgctgaagtagtcaatctccttttgcgacatggtgcagaccccaatgctc

SEQ ID NO: 340701 - DNA, 667 bp, Homo sapiens; identical to SEQ ID NO: 333996
  chr10:93647052-93647719
  hypo

SEQ ID NO: 340702 - DNA, 571 bp, Homo sapiens; identical to SEQ ID NO: 333998
  chr10:94448826-94449397
  hypo

SEQ ID NO: 340703 - DNA, 2110 bp, Homo sapiens; identical to SEQ ID NO: 333999
  chr10:94449625-94451735
  hypo

SEQ ID NO: 340704 - DNA, 1939 bp, Homo sapiens; identical to SEQ ID NO: 334002
  chr10:94833094-94835033
  hypo

SEQ ID NO: 340705 - DNA, 892 bp, Homo sapiens; identical to SEQ ID NO: 334003
  chr10:95753372-95754264
  hypo

SEQ ID NO: 340706 - DNA, 173 bp, Homo sapiens; identical to SEQ ID NO: 334004
  chr10:97051022-97051195
  hypo

SEQ ID NO: 340707 - DNA, 51 bp, Homo sapiens
  chr10:97322758-97322809
  hypo
cgtctaggctgctatgcaccgtactatacttgtgctaagagctttacatgc

SEQ ID NO: 340708 - DNA, 411 bp, Homo sapiens; identical to SEQ ID NO: 262255
  chr10:98129736-98130147
  hypo

SEQ ID NO: 340709 - DNA, 66 bp, Homo sapiens
  chr10:98292781-98292847
  hypo
cgcataagatttagcattctctttaccattttttctccggtataggacgaggcacagcattgacac

SEQ ID NO: 340710 - DNA, 78 bp, Homo sapiens
  chr10:98364556-98364634
  hypo
ttgtaataaggggccggaccctttgacacaaaacaaaatgcaaagtacacactcaaaagtataattttttttttcccc

SEQ ID NO: 340711 - DNA, 32 bp, Homo sapiens
  chr10:98983004-98983036
  hypo
cgattcattacctgctcctttttttacggttc

SEQ ID NO: 340712 - DNA, 371 bp, Homo sapiens
  chr10:99206760-99207131
  hypo
cggccttttcccggttttttaaactgcagcttccagtcctgcggtccgatcctcttcgcggcccctcatccccacttcagtaagctttctctggttgaaaaagccgaactctggttgtgtgggcccgtcatcaaaagataagcagccccaaaataaagttgttactctttttcttctcagcgtgttagcccagaagggaggtctgcacatgaataaaatgctactctttattgatgttgggtatctcctacttgagattgcaaacatcctgagagcagcgtctttgtccagatgacattcgccacgactttgatctcagttcacctgacttctgatggctttgccgtctgtccttccctgtcccctcagtc

SEQ ID NO: 340713 - DNA, 246 bp, Homo sapiens; identical to SEQ ID NO: 334008
  chr10:99474283-99474529
  hypo

SEQ ID NO: 340714 - DNA, 1078 bp, Homo sapiens; identical to SEQ ID NO: 334009
  chr10:99530903-99531981
  hypo

SEQ ID NO: 340715 - DNA, 1587 bp, Homo sapiens; identical to SEQ ID NO: 334010
  chr10:99789576-99791163
  hypo

SEQ ID NO: 340716 - DNA, 107 bp, Homo sapiens
  chr10:100171106-100171213
  hypo
cgccaacgtcccgtctcgcatggcagcatcagcatccaggggagtgctggtcatgtaggtagttgctatcaagcgcggcttgttttgtccacgtgtggttcacaatc

SEQ ID NO: 340717 - DNA, 1215 bp, Homo sapiens; identical to SEQ ID NO: 334020
  chr10:101294530-101295745
  hypo

SEQ ID NO: 340718 - DNA, 364 bp, Homo sapiens; identical to SEQ ID NO: 334024
  chr10:102430697-102431061
  hypo

SEQ ID NO: 340719 - DNA, 738 bp, Homo sapiens; identical to SEQ ID NO: 334028
  chr10:102483802-102484540
  hypo

SEQ ID NO: 340720 - DNA, 1052 bp, Homo sapiens; identical to SEQ ID NO: 334033
  chr10:102507766-102508818
  hypo

SEQ ID NO: 340721 - DNA, 4633 bp, Homo sapiens; identical to SEQ ID NO: 334034
  chr10:102585768-102590401
  hypo

SEQ ID NO: 340722 - DNA, 569 bp, Homo sapiens; identical to SEQ ID NO: 334036
  chr10:102822304-102822873
  hypo

SEQ ID NO: 340723 - DNA, 752 bp, Homo sapiens; identical to SEQ ID NO: 334044
  chr10:102988184-102988936
  hypo

SEQ ID NO: 340724 - DNA, 750 bp, Homo sapiens; identical to SEQ ID NO: 334045
  chr10:102989488-102990238
  hypo

SEQ ID NO: 340725 - DNA, 141 bp, Homo sapiens
  chr10:103372842-103372983
  hypo
cggggctagcacgcctccgtgatcacagcccccagcctgtggggctccagcctgctccccccaccctcaccccacccgggggccgagagcagattactgagaacaatttctttgtgactgtgtaattccctccgtgaccgc

SEQ ID NO: 340726 - DNA, 252 bp, Homo sapiens
  chr10:103425908-103426160
  hypo
cgctcccacacacttagcctctccactccctgctggtctttccttccctctttcctacgattgctagaatgatttgttttgaacagcgacaggtttataggttagccgacacctctgctctgtggaattttaattaacttctctcatcgtcaatatgctaaggaatggggtctccattctccggggtcagcaatgtgtttcaggtcctgctatatcagccgtcaaattgaagaattaatgacgtggctaatc

SEQ ID NO: 340727 - DNA, 1031 bp, Homo sapiens; identical to SEQ ID NO: 334050
  chr10:103535381-103536412
  hypo

SEQ ID NO: 340728 - DNA, 168 bp, Homo sapiens
  chr10:103817648-103817816
  hypo
cgccagtgcctgggaaggcacctgttacttagcagacgggcctttccctgaggaagttagagaacactctgcttcaccacctcttgttggaagcctgacatcagccaggcctacccgcagccaaccggaggcttaaacctctccgagatgctgtgcttcagcggtcac

SEQ ID NO: 340729 - DNA, 358 bp, Homo sapiens; identical to SEQ ID NO: 334051
  chr10:103985878-103986236
  hypo

SEQ ID NO: 340730 - DNA, 485 bp, Homo sapiens
  chr10:104416719-104417204
  hypo
cgcagcacttggtggccctgccgggcggcgcccaaccagtgcactcaagccccgtgttccccccatcgcagtatcccaatggctccgccgcccagcagcccatgctcccccagtatggcggccgcaagattctcgtctgttctgtggacaactgttactgttcttccgtggccaaccatggcggccaccagccctacccccgctccggccactttccctggacagtgccctcgcaggagtactcacacccgctcccgcccacaccctccgtcccccagtcccttcccagcctggcggtcagagactggcttgacgcctcccagcagcccggccaccaggatttctacagggtgtatgggcagccgtccaccaaacactacgtgacgagctaacgccacgcaggcggcggggcgctggggaatcttcctccccagcccccgggctcgggagttatgcatccagagacctgcccttctaccttcctc

SEQ ID NO: 340731 - DNA, 806 bp, Homo sapiens; identical to SEQ ID NO: 334054
  chr10:105037277-105038083
  hypo

SEQ ID NO: 340732 - DNA, 124 bp, Homo sapiens
  chr10:105403473-105403597
  hypo
cgagattcaatgccactcaatgctgtgtccgcccagcacatgtttgcacgacccactctcggggaaccactgatcttcttcaggtgaagcttggggtaaagaatctgcagaccaggccaggcgc

SEQ ID NO: 340733 - DNA, 953 bp, Homo sapiens; identical to SEQ ID NO: 334057
  chr10:106097237-106098190
  hypo

SEQ ID NO: 340734 - DNA, 368 bp, Homo sapiens; identical to SEQ ID NO: 334058
  chr10:106113446-106113814
  hypo

SEQ ID NO: 340735 - DNA, 2322 bp, Homo sapiens; identical to SEQ ID NO: 334060
  chr10:106399492-106401814
  hypo

SEQ ID NO: 340736 - DNA, 737 bp, Homo sapiens; identical to SEQ ID NO: 334066
  chr10:111767130-111767867
  hypo

SEQ ID NO: 340737 - DNA, 174 bp, Homo sapiens
  chr10:111987876-111988050
  hypo
cggatttgtgggtcaatggatttgggtactatattcttcttaccgtatctttttttcttgctttcttcagagtgtgaacatggctacgcctcttcattcccgtccatgccgagcccccgactgcagcattcaaagcccccacggaggttgagccgggcacagaaacacagcagc

SEQ ID NO: 340738 - DNA, 1291 bp, Homo sapiens; identical to SEQ ID NO: 334068
  chr10:112402953-112404244
  hypo

SEQ ID NO: 340739 - DNA, 590 bp, Homo sapiens; identical to SEQ ID NO: 334069
  chr10:112431835-112432425
  hypo

SEQ ID NO: 340740 - DNA, 164 bp, Homo sapiens
  chr10:114200406-114200570
  hypo
cgggctgcactcatgtcgatcttcactgtgttccacccaaaggagagctatcgcagcaacaatagcacacgcacaaaatgtttggttatggtaactggtcagactctactgtgacacgtaaaacaacttgatcaaagagataacaacgtggccctgtggccaac

SEQ ID NO: 340741 - DNA, 65 bp, Homo sapiens
  chr10:114252654-114252719
  hypo
cgtaatcgagttttatgacacttcttagaggctccctcacgatcatgtgcagtccgtcctcattc

SEQ ID NO: 340742 - DNA, 45 bp, Homo sapiens
  chr10:114343145-114343190
  hypo
cgctttatcaggaatgcggttgcattcaggtctgttgtcctaagc

SEQ ID NO: 340743 - DNA, 208 bp, Homo sapiens
  chr10:114591706-114591914
  hypo
cggccgctgtacactcagcagccccgcgctcttgccggccgacaccacagtgtgggaatcgagaatatcggcttcggcttggaatttaaggaggaggagagaaaaaggatagctcggctggtcttcaatgattttcttgtaaaacttttacaagggagacttaggctgtttgatgtgttctagacaatcaaatgcccgccgagtctgc

SEQ ID NO: 340744 - DNA, 942 bp, Homo sapiens; identical to SEQ ID NO: 334072
  chr10:114711931-114712873
  hypo

SEQ ID NO: 340745 - DNA, 322 bp, Homo sapiens
  chr10:116045880-116046202
  hypo
cggtgcctgtgggggagtaccaggatgtgcctgacctggtctggagcctcgatggcattcccttccgtggtggccccaccctgacgggcagtgccttgcggcaggcggcagagcgtggcttcgggagcgccaccaggacaggccaggaccggccacgtagagtggtggttttgctcactgagtcacactccgaggatgaggttgcgggcccagcgcgtcacgcaagggcgcgagagctgctcctgctgggtgtaggcagtgaggccgtgcgggcagagctggaggagatcacaggcagcccaaagcatgtgatggtctactc

SEQ ID NO: 340746 - DNA, 115 bp, Homo sapiens
  chr10:116050056-116050171
  hypo
cgtcctgcagaatgggagctaccgctgcaagtgtcgggatggctgggagggcccccactgcgagaaccgtgagtggagctcttgctctgtatgtgtgagccagggatggtattgc

SEQ ID NO: 340747 - DNA, 916 bp, Homo sapiens; identical to SEQ ID NO: 334075
  chr10:116527415-116528331
  hypo

SEQ ID NO: 340748 - DNA, 976 bp, Homo sapiens; identical to SEQ ID NO: 334076
  chr10:116852626-116853602
  hypo

SEQ ID NO: 340749 - DNA, 1348 bp, Homo sapiens; identical to SEQ ID NO: 334083
  chr10:118896284-118897632
  hypo

SEQ ID NO: 340750 - DNA, 835 bp, Homo sapiens; identical to SEQ ID NO: 334086
  chr10:119000780-119001615
  hypo

SEQ ID NO: 340751 - DNA, 1371 bp, Homo sapiens; identical to SEQ ID NO: 334092
  chr10:119302490-119303861
  hypo

SEQ ID NO: 340752 - DNA, 259 bp, Homo sapiens
  chr10:119806965-119807224
  hypo
cggccgcgcctctgccgctatcagtgtgtgtgaccttggccgagtcatttcacctccatgagcctcagtgttttcacgagtaaaaaagccagttctacctcatgtctaagactccatcacgactctatgggctcgacgtcaaaaggacccccgtggggactcacactgtggtggactgtgcaaatcatgtggagaccatgccccaaacacgggtttcgagtttcaggggataatacatgtgcctttcctagcacaatgc

SEQ ID NO: 340753 - DNA, 79 bp, Homo sapiens
  chr10:120601836-120601915
  hypo
cgaaactgcagctgcagacctgggcctcgtgctccatggatcaggcaggagcccagcgcccccgggtgcagctgcagcc

SEQ ID NO: 340754 - DNA, 236 bp, Homo sapiens
  chr10:121265805-121266041
  hypo
cgaagcagctcaagtcagcccttgccccagagcgccaggacgggccacacagaaggctctgtcgccttgcacggctctccagcttcacgacagaccagccagagatggacagtgtgccaggggtgggattggaactccagaaggagtctggacaccagcgggatcagagagacctcgcttggacgatatcccctcccaagctcacgggttcacgcgtgtggcggtcacacgtgtgg

SEQ ID NO: 340755 - DNA, 1305 bp, Homo sapiens; identical to SEQ ID NO: 334094
  chr10:121301366-121302671
  hypo

SEQ ID NO: 340756 - DNA, 273 bp, Homo sapiens
  chr10:121397997-121398270
  hypo
cgccgcaagactggcagcaagagaaagccctacgacaagaagcggaagtatgagttggggcacctggctgccaacaccaagattggcccccaccacatccacacagtccgtgtgcggggaggtaacaataaatacggtgccctgaggcgggacatggggaatttctcctggggttcagagtgttgtactcgcaaaacaaggatcactgatgttgtctacgatgcgcccaatagcaagctggtccgtaccaagaccctggtggagaactgcttc

SEQ ID NO: 340757 - DNA, 43 bp, Homo sapiens
  chr10:121591491-121591534
  hypo
cgaaacagcaataatggacgtgcgccacttaccgagccaccac

SEQ ID NO: 340758 - DNA, 137 bp, Homo sapiens
  chr10:121702253-121702390
  hypo
cgtcagctatgttaacgtgctgtatgacaagaggaacctgctttctaagtctgctggacacgcgtgcttcttgaatccaaccagacaagcatgttttctcaaaaccacagtataagacaaggaaactgcacagattc

SEQ ID NO: 340759 - DNA, 872 bp, Homo sapiens; identical to SEQ ID NO: 334095
  chr10:122216127-122216999
  hypo

SEQ ID NO: 340760 - DNA, 924 bp, Homo sapiens; identical to SEQ ID NO: 334100
  chr10:124133665-124134589
  hypo

SEQ ID NO: 340761 - DNA, 1489 bp, Homo sapiens; identical to SEQ ID NO: 334103
  chr10:124894818-124896307
  hypo

SEQ ID NO: 340762 - DNA, 134 bp, Homo sapiens
  chr10:125017540-125017674
  hypo
cgggaaaacattaaggtatacaaagagttcttaataaatagaaataaatagtgcagggtttgcgccatggtgattttcgatggttatctgccctcgccgctgctgctccagctgcatcttccgcggggctcagc

SEQ ID NO: 340763 - DNA, 270 bp, Homo sapiens
  chr10:125617057-125617327
  hypo
cgatggaaggcggcgtggagatggaaggcggcgtggagatggaaggcggcgtggagatggaaggcggcgtggagatggaaggcggcgtggagatggaaggcggcgtggagatggaaggcggcgtggagatggaaggcggcgtggagctgctgagttgaaggctagggcaaaacggagaagaacctgagcaatgcaccagcacaggccccactgacgccgaggaacaggaggcacagggcaccacgcacgggactccgcagcttccacgct

SEQ ID NO: 340764 - DNA, 1193 bp, Homo sapiens; identical to SEQ ID NO: 334112
  chr10:126106668-126107861
  hypo

SEQ ID NO: 340765 - DNA, 48 bp, Homo sapiens
  chr10:126190228-126190276
  hypo
cgacgttctgaatgtgctcgatgccagtgaattgaatactctggtcac

SEQ ID NO: 340766 - DNA, 229 bp, Homo sapiens
  chr10:126198892-126199121
  hypo
cgcactttggtatgcggagcccacaagctggcctggacaggcatcactgctccaggcagctgtgcacccagccggccctggcgtcccggcccccagcctccgcctccctcgccgacagcttcccggggctctgcctggaggcagcctcgctttatcccgcagaacctccacgctgttcctgcatgagaactcttcctccaagagaccacgttcctctggtcctgtctcc

SEQ ID NO: 340767 - DNA, 358 bp, Homo sapiens
  chr10:126296075-126296433
  hypo
cggacgccattcggctaggtacacgtgcggagtggggctggccggattctcattacaaagcgtcatcttctatggggagacctcttgttccctctcggggctggttgcttttgcctggacaataagcctggccccagggcacctggggaaggtgtccaaggagggggtcctgggggccagtcccccgggggctcggatgatgaatcatgggcggtgtttgctggaagaatttttgttccgcttcgggcaacaaggaacccaaacctctcactgttgtggggagaaaagttggaaatcagatgggaactggctgcggtaccagagaggacgtcagacccgggccgcggcctcagccccc

SEQ ID NO: 340768 - DNA, 150 bp, Homo sapiens; identical to SEQ ID NO: 262471
  chr10:126314040-126314190
  hypo

SEQ ID NO: 340769 - DNA, 278 bp, Homo sapiens
  chr10:126314669-126314947
  hypo
cgcccgaacgcgtgccagcgttttctgcgagctgtcatgtgaggggcctggggcgtggcctgctgcgagtgttttctgtggcctcgcacgtgaacgcagcaggagcgcagcctgcgcaatcggacagacgccgcacagcgcttgtctgtgctcaccctctcggtcctgctcggagcttcccactgacctcctctggcataaggcgcaggtagcgggggtgcctaacttatggccaccatgattgtgtgggtctcggcactaaccgtggtgctacggtc

SEQ ID NO: 340770 - DNA, 368 bp, Homo sapiens
  chr10:126331903-126332271
  hypo
cggctcggcagggccctcagcagttctccctattcacgacgcgcaggtggctgataaatttcccagggtttctcggcgcggtgattgcgcctggctctttcagcgtggctgcaggaatctatacaggtccacttaaatcagtctgaagctgtgaaagcctccatcactcgtcgcccgggcccggccgcccaaacagagccccgggagggccagcgggggggtgcagggctgggaggacagtgccaattaaaaatctgagcctgtgggcctttctctctcttgttttcattcctacagctacattgtgtccactggcagcggattccaaaggcgaagaggctgcattcacggcccggagctttagagcc

SEQ ID NO: 340771 - DNA, 319 bp, Homo sapiens
  chr10:126354246-126354565
  hypo
cgtgggccggtgatatggccctttccacgtttctaagtgatgacttgttggtgctgtgacctccaggaggccagggctaactgtcctctccattgctgcatccctggtgcctacaagggcctgactcacagcaaatgctaggtaaataaatagtggctgaacaaagagattaatctagaattgaatctcgatcctcagaggacaagactagctcatcttactgtgactcggcttatagtcggctacgtagacacagctgtctccaccccagccctgtagcctgcacctaccttgcaggtaaggatggggtcttgtacac

SEQ ID NO: 340772 - DNA, 229 bp, Homo sapiens
  chr10:126696804-126697033
  hypo
cgtgcctggccggctctggcctctttttttaaaacgcactagattttatggaagtttcctgacaccgtagcagtctcaagacaccagtgcctgagtcactccctgttcctgacaggggctacggctgcccaaggacagacactggccacataccccagggttgccccatgaagtccctgcaggttgcagtcttagagctgaccgagctatcacattcatgagaagaacc

SEQ ID NO: 340773 - DNA, 114 bp, Homo sapiens
  chr10:126711488-126711602
  hypo
cgatggcggcgaccctctatacagattctgatagggctaaaattattgatggaggtgctttctacctaggagatcagcgttcacacctccagttgctggaaaccgaggccacac

SEQ ID NO: 340774 - DNA, 1801 bp, Homo sapiens
  chr10:126714633-126716434
  hypo
cggggaggatgtattacttggttctggtgcaagcatggtggacacgatgatgggtgcccctgtgcgccgggccaccttctggtacggtgagtgaggcgtgtggaggctctggctggccggcggcagggtggatggccccaggggtgcacctggcttccgcaagacctgggggctgccgtgagggctgggcagcggagaggcggccacgttgcgctccctctttagcagctccatgggcaccgtgtatgccgtggagtaggctgttctggggcctgggtgaagggggtttgaggggcccgggttagtcaaggccacccctgcctgcagggggtacgtggggctcagacgcgctgtcagggcgcaaggggtgggagagctgtacccggagttggaggggaagtgtggggcatgggtgcccacgccaggggcagaataggtggctgccgtctccaggaggtgctgagatggtgcgctggagggacggcgagccgggtctccagctcggggggatgctgtctgcagaggagccgcagcgcccagagaagccaagtcaccatggagcagttcgcttcggtggctgaagctgctggaccgcgcccggggcagcgggcccccccggtcctgcctccgcagctgcatttcggtcctgcagctattggccaggcggctcagaacacgggcctggcccaggttgggtgcgacagacttgatatccgcgtcctccagggtagccaggacggccggggagtcaaagccctgctgcagtagggctcccagcgtggcctctgccagcccctccgcccgcagaaaggccaggaactcagggagcacggtcctcttgccaccaggaccctggaaggtggacaggtcagcttcgtaagtctcgtaagccatcttggatgggatgctttcccgggcaggcccgtagccacgattcagggcccctggggccacccctgtgctgccttcgggggcagcagctgaactggggtccacaaccaggcacgtcggggccacctgtctggcaggggcagggtcaatgggtctttcgctgatgtcgctgaagacctggctgagggggtaggcaggcacctccgccccatacctggtgtcgggctgctcccgtccataccgcccgggagatgcagccctgctctgtgtctgccgcccctgagggatcattttacctccaggatcccggtacaggtgaccggcgtcctgcagggcaggtgaccggccttgcattggatcccatgacgttctgctgccaagcactccgtagctggggaccggccggctgactcctgggtcccgatagaggggaggctctttgggtaccctagcagctccagacggatcactgtagtactcccgtggcagcagggggctgcgaccagacatcactgcctgtctgctgtcgtagaaggtgaagtcaggagtagacccctttcttgcagccactgagttataaacggcctcccggtacaggtagggctcggcggccacgggcagggcagcgtcctgtggtcggtggtttggctcaaaccaagtcccctctgctgtgccatacgtcagggagcttctcctccccagaggccgcagggactcggcgttctcccaggggccctcgtaccacccagcagcatcccagctctgagaacgaccaatatttatatgcctgctgggaactggcattggaaaaaaaatgactgcggatgaggcagaggagaagcttttctttataaatcttcaattacatacatcaaaaacagacctggctgtgtgctaacccttccgagac

SEQ ID NO: 340775 - DNA, 295 bp, Homo sapiens
  chr10:126721936-126722231
  hypo
cgccctcgagcgcgcacgccaaggtgcctgagctttagtagcaagcgagccaagtggtagaaaccaatcagagaggagtctcatttcacagctttaacactgtacgttctggaaaaggagagagggcaagaagccggcagcaaaatgtatcttggggttctggttcacagtcaccccaaatacctgtcaattaggttgagctgtgtgaagcgcgcagaaggttctccgcattcgtgcgggctgctgtctgctgctgtctggctaccctggggcctcctccaaacacggagactac

SEQ ID NO: 340776 - DNA, 261 bp, Homo sapiens
  chr10:126767714-126767975
  hypo
cgaggaaaaaaaaaaaaaaaaaaaaaaggtggaaaaaccagcccctgatgggccaccaggagctttcgggagcctgcccgggatatcacccggctccaccatgtgtgacgctcctgctctaaagtacacggaggacacagggcacagcgcctttcacagccactggctcacatgccagtccacggttcccagcggtggcggcattcctctccagggaggaaaatgctacagaatattcaccaccggtcaattcatctgccc

SEQ ID NO: 340777 - DNA, 549 bp, Homo sapiens
  chr10:126771776-126772325
  hypo
cgtaagaccaccagggccagcacgcattctcaacatactttccaaagctggaaaaaagcacagccaagtcactcagaaaagcctctcttgatttggcttctggataaaaaagagtctccctgtcgtgccagatggggtcaactactcggtgaaaacagaggcccattccacaggcaccactgctgagcctctgagttcccaggacagggctgtccgaggacacaacactgacagccatgtgcagacccccgacctgggcgaggataccgccctctgagactcagtcgcctgtctacaaaaaaggaaaagataccacattaccgtgaccatctagtctaatgaaaatgccaccaggatcaaagaccataacgcaaagccctctgtttgcaccttagtccgaacaagcacccaggatacactcgctgttgtttgtttgtttgttttaaggcaggatctcactctgcctcccaggctggagtgcagtcttgacctcctggactccagccgtcctgccacgtcagcttctcaagtagctgtgactgtaggcac

SEQ ID NO: 340778 - DNA, 92 bp, Homo sapiens
  chr10:126775448-126775540
  hypo
cgcctctagaacacaagttcagtgggagcgcggccactgcacctgcggatcctgaggaacagtccacgacacacacgtgcgcccacacacac

SEQ ID NO: 340779 - DNA, 409 bp, Homo sapiens
  chr10:126794880-126795289
  hypo
cgggaagccatcttcactgtaaagggaccctgcagtgtatgggaagccaggctcactaccacagtgtttccggaaaggcttccaccagcaagggacgcggggcgacctgagtttggggttgcttcatcggctcctgaatgccagatatacctaaggccacacatgctggcaggtggatctgggcgtcaagttcttcactaacaaaatgggggtcttgggaagggtatgaggatcacggaaagagaagcggacaccacgcctccatttcccagcataacgtcactcagtggcaacagagactcctggccccgccaagagtgagaggcaagtgtgcccaccatcctgcagatgccctgctcggaggtacccctccagcgaaggagcaactcagcaggaacccacccaggcc

SEQ ID NO: 340780 - DNA, 392 bp, Homo sapiens
  chr10:126819324-126819716
  hypo
cgactgtactgccagacaagactagcggaactctaactcccaggttgccttgatctgaacaggttctagaaactgccaagcatcgccccctcattttagagggaggcaccctgccacccagagagggcaaagggctcgctgtccaagctggagaaaatccctgggtatcgcctccgacccactgtatctcaaatacgatgtgtgttggctcggctcttccaaaaaccgaagccaagacacgatcagctctggaagagacttcttggggaggcagacaggcggggaggcagagggagacgcaagtctgacagcagatgcagatgagatggcagggaaggcaggaggctggggaggaggagtcttcacctgctgtccccggctgggagcagccc

SEQ ID NO: 340781 - DNA, 84 bp, Homo sapiens
  chr10:126828919-126829003
  hypo
cgatgactgccgcttaaacctgccctcagcctgactgatgtgatgagggaaggggacaaagaatgagctccgaaaggacatttc

SEQ ID NO: 340782 - DNA, 379 bp, Homo sapiens
  chr10:126830153-126830532
  hypo
cggaacaggaagcagggagacagcacacagtaagcacatggcaagcacacagtaaacacacggcaagtacatggcaaatacacagcaggtacacagcgagcacacagtaagcacacggtaaacactcagcaagtacatggcaaatgcacagcaggtacacagcgagcacacagtaagcacatggcaagcacacagtaaatacacagcaagcacacagcaagtacacagtgagcacgcggcaaacacacgacatgcacacggttagcacactgcccggctccctccaaagccacttcccccacagagaaaggagaaagcggccctggcctggcagtcactcacagtccctctggacctggagccagcggctatggcggac

SEQ ID NO: 340783 - DNA, 143 bp, Homo sapiens
  chr10:127415629-127415772
  hypo
cgtattgtacaaataagtaaactaacgctcatcaaaagatgtttcacatggtcatacagctggcgaaactctcaggctagggcttaaacccagatctttctgcctgcagaggcctgttcctccagcagtactccactgtgtcc

SEQ ID NO: 340784 - DNA, 287 bp, Homo sapiens
  chr10:127451818-127452105
  hypo
cggtaggcattgctggtcccttacctgtctctttttcttttttaaccctagcaataacatcgaagatgacacaattctcaaaaccaacaagcacatttactcccagcttttgagagcaactgcaaataaaaccgcgactcttctggaaagaatcaacgttatcgtccacctgctgggccagcttgccgccggcagtgcagcgagcagcaatgccgttcagtgactgcacagagccgtgtcccagacacgctgtcagtgccttcaacacggagccggtttgttcattc

SEQ ID NO: 340785 - DNA, 218 bp, Homo sapiens
  chr10:127817236-127817454
  hypo
cgcctgtgcgagtgtgtggtgtgtgtgtgggaatgtgtgcaagtgggcgcctgtgcgagtgtgtggtgcgtgtgtgggaatgtgtgcaagtgggcgcctgcccatgtgagtgtgtggtgcgcgtgtcggaatgtgtgcaagtggacgcctgcgcatgtgagtgtgtggtgcgtgtgggaatgtgtgcaagtgggcgcctgtgcgagtgtgtggtgcgc

SEQ ID NO: 340786 - DNA, 213 bp, Homo sapiens
  chr10:128813812-128814025
  hypo
cgagcgggtcttcctatttcaaggaacggtgcccccgggacttgctagtggttgtgcctgcaaggggcaccgtctctgtaagctgcgcctcctcctaccccaactccccgtggttctgctgacttgaccttcacgctggtccctctcccaccctccatagtggcattcacgtcctgccagccagctaggatcatgcggtggcctccctgctgc

SEQ ID NO: 340787 - DNA, 307 bp, Homo sapiens
  chr10:129195296-129195603
  hypo
cgggcggcgactcctatgtgatctgagcatgagttacacgggcagcgactcctatgtgatctgagcatcagttacacgggcggtgtctcctatgtgatctgagcatcagttacacgggcagcgactcctatgtgatctgagcatgagttacacgggcagcgtctcctgtgatctgagcatcagttacacgggcagcgactcctatgtgatctgagcatgagttacacgggcggcgactcctatgtgatctgagcatgagttacacgggcggcaactcctatgtgatctgagcatgagttacacgggc

SEQ ID NO: 340788 - DNA, 413 bp, Homo sapiens
  chr10:129195681-129196094
  hypo
cgactcctatgtgatctgagcatgagttacaagggcagtgtctcctatgtgatctgagcatgagttacacgggcagcaactcctatgtgatctgagcatgagttacacgggcggtgtctcctatgtgatctgagcatgagttacatgggcagtgtgtcctttgtgatctgagcatgagttacacgggcagcgtctcctatgtgatctgagcatgagttacacgggcagcgactcctatgtgatctcagcagcgtctcctgcatgacacaggtagtagctcctctatgacccgggcagcgactcctgtgtgacccgggcagcgactcctgtatgacacgggcagcgactcctgtatgacacgggcagtgactcctgtatgacacgggcagtgactcctgtatgacccgggcagc

SEQ ID NO: 340789 - DNA, 102 bp, Homo sapiens
  chr10:129228001-129228103
  hypo
cgaggtgtgcagggccccagggatgagcccgtgagcacctgccacgttcggcattggcccccgtgccctcaccggcccacagcgccacgttcggcattggcc

SEQ ID NO: 340790 - DNA, 176 bp, Homo sapiens
  chr10:129241072-129241248
  hypo
cgcacggatgttgccccgtgtgtccttgctggctatctgcatgtcttgcaataatactcagccacttttgcatctatattcaggtcacctgcgatgtgctgtccagcccaggctgtgtgaggacagcagtgccagcccctcgtgtgggggaggtctgctgtaaccacatgctgggc

SEQ ID NO: 340791 - DNA, 166 bp, Homo sapiens
  chr10:129242401-129242567
  hypo
cggccccagagaccgaagagccaggtgatgaacgtcattggaagcgaaaggcgcttctcggtgtccccctcgtcaccgtcctcccagcaaacaccccctccagttacaccaagggccaagctcagcttcagcatgcagtcgagtaagtggaacgctccccacatac

SEQ ID NO: 340792 - DNA, 669 bp, Homo sapiens
  chr10:129245272-129245941
  hypo
cgaaagcagtagcagcagcagcggagacggtcctgtggcacccagctgtttaacttccaccgaggcagggggcccgagcagggacagaagaggccggggtgaacatcaccctttctacagtggctcgatgccttgcttcacactccagttttagtgttcgtgtgatacttgctattctctttctagaacattgccgttaggagagggtcccaccctttgtgttcgctccctccctgccctcatctgctctgttgacaaacgttttctgccagatgaagtgtttctgctgtgcctgcctctctgggagggaacgtggagcagctccctgagcattcaggctccgtggggaagtcgggctgattttaaatagatcccggttttccaggcttggagctgaacggcatgacgggggcggacgtggccgatgtcccaccccctctgcctctcaaaggcagcgtggcagattacgggaatttgatggaaaaccaggacttgctgggctcgccaacacctccacctccccctccacaccagagggtaagtcggcaatctgaaacacaggctttcattgcttcgcctccacaaagtaggacgagtccctcattccagatactagcaggtttacttcgggctagtgagcacatgaggaaaaccatgtatgatgggccc

SEQ ID NO: 340793 - DNA, 242 bp, Homo sapiens
  chr10:130203310-130203552
  hypo
cgcacagcggtgtgatgtgtaagctgcacaacatcagggcgggagttgatgtggcccacagtgtgaacggcgccctccaagatgagcagtgtgatgctccgcagagtcgtagacaggaaaagtggaggctgaagtgggaccggacagcactggcacggcttgactttggcaatggacaacagggaaaatggaggcgcaggtgagaaaggaaggcaggtgaagcgcccgactcactccaagcc

SEQ ID NO: 340794 - DNA, 175 bp, Homo sapiens
  chr10:130300191-130300366
  hypo
cgagctgagaggatgggcgtgtcctggaaatcatcacacggacattctccgcgtggatagcgctctttgtccaatcattactgggacgttctccgcgtggatagcgctttctgtccaataatcactcggacgttctccacatggatagcgctttctgtccaatcatcactcggac

SEQ ID NO: 340795 - DNA, 256 bp, Homo sapiens
  chr10:131348408-131348664
  hypo
cgtacagttgagcgacattagttggtgccatctgtgagtgcacagtgcagcaactttagggggttcacaatgttccgcagccatcaccgccgcccagcactggcatgtttcacagtgttccgcagccatcaccgccacccagcaccggcatgtttcacagtgttccgcagccaccaccgccgcccagcaccggcatgtttcacagtgttccgcagccaccaccgccacccagcaccggaatgtttcacagtgttcc

SEQ ID NO: 340796 - DNA, 161 bp, Homo sapiens
  chr10:131566947-131567108
  hypo
cgggtgtgcgagccgcgagtgctttccaacagagggcaccagagccgtgcggtgtgctgtggagaccccagcaccacttcccctgctggaggatggatttgaaggagggtggctgggcggcaccccgatggctccctgtgctccctgagaccctacaggcc

SEQ ID NO: 340797 - DNA, 351 bp, Homo sapiens
  chr10:131638488-131638839
  hypo
cggccccgcaccaccctcaccttgcagtccattcccgttggcgctggtgcaggaaggaggaggagaggcttggggccggaccacgggcgcgaaggcgctcttctgtttcactgcggagatgacattggcaggtgagaatgagaaaatgccgtgtgtgctgctacagtttgaagggagggtgaccgaagaggctgccatggtggggctggacggcactactgcaacaaagcaaacacggtcagcacgcgcggccgcggcacagcgccacggcgagagggcaccaaaggcctcgcctcggacgggggggcaggggcacgaaaacaaaacatgacatgcgtctggctcggccac

SEQ ID NO: 340798 - DNA, 499 bp, Homo sapiens
  chr10:131647424-131647923
  hypo
cggccgggactccgtccgactgcacacactgtgtttaacaagctttataaggagccatcgggctttattatggctctgcctgactccaacaaaaactgagcctggaggcccggggacacgagttaagatgaaaatacttattggagtacattacttcttgatgtagatggcgttttccgtggagtcactccacggtgcgtggcacaacataaatcagaggtttttcggagactaataagacctgccaccatctattcattactctgcctgcaatttgggccatcactcattagtaatttgatgattaacacgccccacctcagcaggtgtgcaaggtgcgggggcggacacaaagactgcggcttccggagaggacggctagggggccgcctttgcaagtgctctccaaaataattggtcaccgttctcgagtgcttgggcgtcggcgcatcttgtaagcaacgcaggaagcctcgcacgtacactcaataatgcgccc

SEQ ID NO: 340799 - DNA, 710 bp, Homo sapiens; identical to SEQ ID NO: 334121
  chr10:131757612-131758322
  hypo

SEQ ID NO: 340800 - DNA, 1461 bp, Homo sapiens; identical to SEQ ID NO: 334123
  chr10:131761993-131763454
  hypo

SEQ ID NO: 340801 - DNA, 825 bp, Homo sapiens; identical to SEQ ID NO: 334125
  chr10:131769491-131770316
  hypo

SEQ ID NO: 340802 - DNA, 1046 bp, Homo sapiens; identical to SEQ ID NO: 262606
  chr10:131844032-131845078
  hypo

SEQ ID NO: 340803 - DNA, 54 bp, Homo sapiens
  chr10:131936598-131936652
  hypo
aggcttgagcccccgtgacctgccctgttgatctaaattgagtgaaattttgcc

SEQ ID NO: 340804 - DNA, 191 bp, Homo sapiens
  chr10:131987142-131987333
  hypo
cgagtggctcagccagggttcattaccaggctccggatcctgcttctcccggatcacagcaagcgctgtgcttaggcctggggtgggggacggattctccctgaaggcaggtctgacgcgggcgggagcacccaccccgctgggttcttacggcggatccgttacctgggtctccagagggtgaggtcgcc

SEQ ID NO: 340805 - DNA, 98 bp, Homo sapiens
  chr10:132869762-132869860
  hypo
cggagatgcatgctgatgacgacgtattcaagggtaaaatgtcgtgatgtcttacactcgctccacgtcttcgtgaaaatgtacgtgtgtgtgcacgc

SEQ ID NO: 340806 - DNA, 932 bp, Homo sapiens; identical to SEQ ID NO: 334126
  chr10:133109173-133110105
  hypo

SEQ ID NO: 340807 - DNA, 956 bp, Homo sapiens; identical to SEQ ID NO: 334127
  chr10:133110114-133111070
  hypo

SEQ ID NO: 340808 - DNA, 382 bp, Homo sapiens
  chr10:133783038-133783420
  hypo
cgcacacgggagggcgaggtggagacacgggcagcgctcaggtcccggcccaggaaactcagtggcttttatcccgtttccttcaaccccagatgtgagccctctggccaacctacctaacccacctgcccccagtggcattccggtctttccagtctgtccaacacacggcagccacagaacactgtctgcacgccaggactagagccctcctccccgctgagaggctgggaccagcccgaggaggagccgttttggcttcccgctctggctcttcaccaccgctgcggcgaacgctcttcagaacccacagcggcgcctgcctggtctctgtgttttctgcagggtgagtgagtataagcagccaggaaaggccaggcgc

SEQ ID NO: 340809 - DNA, 1471 bp, Homo sapiens; identical to SEQ ID NO: 334128
  chr10:133794830-133796301
  hypo

SEQ ID NO: 340810 - DNA, 238 bp, Homo sapiens
  chr10:133834585-133834823
  hypo
cggggtcggctgctcatgaggatgagacggcaaagactggaaggagggagattccctctatgggagtcttccatgattacgcatgaggaggtgcgagaggcgttgctgggaagcttgttccgggtgctcctccaggtgcgcacgcgcagtacccgtccacgcttgttcatacgtcgcctgtctcactagcgtcttcaacgccagggtcggtgtgaggacaggtaagctcacagtgcgc

SEQ ID NO: 340811 - DNA, 541 bp, Homo sapiens
  chr10:133920829-133921370
  hypo
cgccccgagggacacacgctccttgatggtcaacaggccaggcttgcgggctccccaggtgccggcaaggttccagggccggcgtctgagggctgcaacccagacccgctgggcaccctgcggggcatgtttagttgtacctggaggagaggatgtgctctcttggcacaacgtgcagaaggcaccggaggaaaggaatggagaagaagcctgtttgcctcagagctcctcatcctggacgccctcgccagagggttcatgttatggtttcctgcataagcgatctgagccctgcctcctcaagcgtaactgacagcatgctggatgcacaggcagcaactcccttttgccaagtgatcacagcgcctcttggagtcagttccacgtggaacagtgcagctggcacaagctcgtccatgttattcacatgccccaccgtggtgggcctgtcgacggcatccaggctgattcgattctcggctgatactgcagccctgtacctgggtcttggactacatgcaaaagaactcctgcaggagac

SEQ ID NO: 340812 - DNA, 466 bp, Homo sapiens
  chr10:133951545-133952011
  hypo
cacgggcagtaaaccgtggactgaaaccggtggagctgctctaccacttacacaacctcttcaactggcttccgcaggagcgggacaagctgttaagattccggaagcaaagaaagaaaatggcaaaacttcccaaggtaaggaacagcacaccggcacgtgcggagagtacgccgggtgtgtgcggagaggaccacgcccgcgtgtgtggagagcgctggtgtgtgcggagaggggtgcgccggtgtacgtggagggcgctgggtgtgtgtgccgaggaccgcgcccacgtgtgtggagagtatgccgggtgcgtgtggagaggaccgcgcccgcgtgtgtggagagtacgccgggtgtgtgcggagaggggtgcgccggtgtatgtggagggcgctgggtgtgtgtgccgaggaccgcgcccgcgtgtgtggagagcgctggtgtgtgtggagagcgtgctggc

SEQ ID NO: 340813 - DNA, 991 bp, Homo sapiens
  chr10:133982448-133983439
  hypo
cgggcgcaagaagggaaccgcggggacggcctttcccctcccgccctgtgtggggacgctgcacgagccgtggaccaagaggctgacaggtaagggctgccatctgtccgcggggagggcctttgcaccctccctgcgaggtgagctccagcttcttcacacctctgtgtccccgtctgcacatgcgtgacgctgccaccccgtccactgctgacccgtcaagatcacctctcccgccactgacgggacagggcctgggggctggtgtggagcgtggcgtgagctgtcgctggggcagggtctgcagacatggtgctccacggggacctggcgtctggcagagctggtcctcctcccacttgcaggaggaggcttgcgggaaaagggagaaaccccgtaggtgcaatgaggccgctctccgagtgcgcctccctccgctgctcccgtgcacttgaacgtggacgccgccccacactcggccccggcacctgaggtgtccgctctggggaggcgactctgggtgctcccagcagggagggagggaggtcaggactctgggcatgctccaccgtggagctttcctcgccagcggggttccctatgggagggtttgtggatccgttgtgtctgtgggactcagcggggccctggggcagggtgagccggttcttggggaggcagtggcagccccatggggggccgcccagggagcgctccatctcccccacctccgacccacaccgtgtctgagagccacctgtgtctcctgcagtgggcagcggctgtgggccacgggcactgttgttcccgggagatgctccctgcgtagaaaatgggagggggaggaggaggtgcgaccaccaccctggactcaggagagggcggcagctccatcttcacccttgactcaggaggggtccgcagcgaggaggaggtgcgaagggggcggcggctccgtcttgcaggtcccctggggcgcgttcttcaggtg

SEQ ID NO: 340814 - DNA, 993 bp, Homo sapiens; identical to SEQ ID NO: 334129
  chr10:133999531-134000524
  hypo

SEQ ID NO: 340815 - DNA, 429 bp, Homo sapiens
  chr10:134049521-134049950
  hypo
cgcgtcggtccctgatgaggccggacccgggtgcttgtggggggtcacagtgttcctcctctataccatgtgagttgcatcttctaaaaactagaaaaagagaagagttgaggcaatgcttccgtggccccaaagcccacacatgggcctcagtcaggagcacagaaaggacccctggccccttccccaggtggcagagcctgcgcacggcctggtcagcgaagggacgtggtcaatgctgggacctgggctctgggcccacgcggaggcccgactgccccggaaatggccaacaatgtccccgcggtcctggatgccacaacctgtcatgaggttcgcagaagggggtgacccgatggggtggccaggggctcccggtccagatgaggaagctgaggctgggtggcaggtggcagccccaccgtgcac

SEQ ID NO: 340816 - DNA, 137 bp, Homo sapiens; identical to SEQ ID NO: 262661
  chr10:134095686-134095823
  hypo

SEQ ID NO: 340817 - DNA, 405 bp, Homo sapiens
  chr10:134116378-134116783
  hypo
cgaggcaaaaccatcacggggccactagagtcactccaaggcaacgtgacagaccacccagaaagccaacaaaatgaacttcaaagctatagactaacgagaatttagccaagtgcagtcatgtgcaagaggcagcgaagtctcagccacacacaaggtgaaccttgtaaaagtggagcgttccttcacatcagcagcagccagcgtggaaacggtcccactccagtcccacaggccgggagcagcaagggcgcagcctgcctggggctctgcggtgaggggctgcgtgggaggcctcagatccctacagggggaaacatcctaactgcactcatcctgggaaagaggagaactaatgcgagaaggagagagctttctcactctccgtcaagcgatactccctac

SEQ ID NO: 340818 - DNA, 611 bp, Homo sapiens; identical to SEQ ID NO: 334130
  chr10:134121708-134122319
  hypo

SEQ ID NO: 340819 - DNA, 291 bp, Homo sapiens; identical to SEQ ID NO: 334131
  chr10:134209485-134209776
  hypo

SEQ ID NO: 340820 - DNA, 380 bp, Homo sapiens
  chr10:134212591-134212971
  hypo
ggttctctgcccttgtattccgagtcccagggctcctgtttccagccctgcctcggaccgcagggtgctgacctgccttccccaggtgccagtttctcatcagggcgtggtgcccgcccttatcccctgcatgtgacagtggaggcccagtccccaagtgtgggtgctgactcacagggaagagctgctgggagccctatgacaggtgtccgcccacctcagggaacctgtgggtcccagcacaaccggcgctgttgagcgcaggcggcgggcagccaggcacctgttcagagcaatcccacgggaatggcggccccgctcacacaggcgccgggatgcagggctgaggtgggcccagcagccagcgtttgttgtcggcc

SEQ ID NO: 340821 - DNA, 167 bp, Homo sapiens
  chr10:134298551-134298718
  hypo
cgattcacgtcgctgagctagcgtgtcactgccgagagacaggctcgcctgtgaagcggaggaggacattagtgtagaaacgcacagccttggacaggctcgcctgtgaaacggaggaggacttcagcgtagaaatgcacagccttggacaggctcgcctgtgaaac

SEQ ID NO: 340822 - DNA, 363 bp, Homo sapiens
  chr10:134300856-134301219
  hypo
cgcaccaggtgtgggtgcaggaggacgtctggttagaggtcagaggcgtcatccccaaccccggccgatgttatcttacgtgcggggaaaggcaaggactggactcgttcatcttttacggaacgtggtgagtcaggcaagagacccgggccctgtgctccgtcctgttttgtcttcgatgcttctctccggtgagctgcaggtggccacagagtcaggcttgggaagctgtgccgcaagcgggaatgagtggacggggctgctcacgcggctgcttttccgtcacggatgccccacccggtcctgtgcgggaggccctgttgaggtgagctccgccctgccgagtgtagggactttgcctcc

SEQ ID NO: 340823 - DNA, 197 bp, Homo sapiens
  chr10:134477300-134477497
  hypo
ctcctcttctgagccgtgagctgggcagggccgcgctcacatcattcctctccccctgtcgccgggtgggaaatccgtaacaggctctgtggcaaaggctgggccaaggtgcctcgtgggcagccgatccatcaggcggccgacaggcgtgatcgagtgccgtgtcacacgcagcccaggaaacaaacacgccgcgc

SEQ ID NO: 340824 - DNA, 342 bp, Homo sapiens
  chr10:134481140-134481482
  hypo
cgagcattaacaggcttaattactttaaaattgtcattttaatttacactgatatagtattgatcatacaagcagagattaagctgttcagtggagcagatgatggggaattaaacattaaagggtcctcagggggccgtgtgcgctgcccggcgcgagccggaagagggatgatatttctcggtaatgaactggcggcatgcggggacatgaatcttgggctcttggaaaaggggaaataatggggtttgggaggcatttgcaggttattcattcgccgccatgcaccaattctccagtgattcatccgcctcaccaacatttatttatccagcaaattcc

SEQ ID NO: 340825 - DNA, 345 bp, Homo sapiens
  chr10:134491036-134491381
  hypo
cgagaagccaggactgctggtcaccttgccgccctcagatgtaccccctttggagaagcctgccgcaggctgttttacaggccatctcgttccatttcagttgctcctcaccgtggtaatcggaaatgttaacgggcgcactcgtctggtggaatttatcgtggccagcgagggcgattaagcggctggtatgtggcgtgtttaccctcgtgtcagcatgactggtgttccaccctggcagatgaaggcccggtccttcctgggctcctaattggggacactacatccaagagccgtgacagggttcagcaacccgcgtgcagaatgccggcttccacggggcac

SEQ ID NO: 340826 - DNA, 1169 bp, Homo sapiens
  chr10:134527015-134528184
  hypo
cgggtatatggccttggctctcctctgcatctggcccttgctgagggccctgaggcgtggccccttatcccctctgaccgcccctgacctccgtctccagagtgatggagccctggtcccctgccactagcctggtcccggggagggtggcaactgcgaggcctgggtgctgctgtgctcgtggccacacactgaggccggccctcagccctgtgcacggccacaccctctgcaggggacctgtccggcctcccggatatctctggagctggcactgacaccgaggcagggatcggtctgagcctggggactgtgctctcaactgcccaccgtagggaagcagcacaggtgggggatgggggcctggggctttgtcagcgacaaagtgactgatgaccgcctgtgccctgggcgccctccctggacagcatgtcagtcgcccagggagaagggcctcacccacaggagcggcgcggttcttcctgcctgatcagccctcggcttgcaggcaccaagcgtctcggggacctcccacggagcccaggagcagggagggccctgccgtgtctgctgttgggtcttggtgacagcggttaggttgtcagcatggcatggcattaaaatgtgtcattgcccctcgctgccatggctccgcggcctcaagaaagcagcctttgggcttttgggccacttttctgcgtctctgcattcccatgaatggctcctgcggcgcgctcagccagccgcagatccggacctccgcggcgtggggcgggccgcgcaacacaaagggcggctctgtcggagtctggaacaatgggtcgccctttcaccgcggctgctaacctcttggcagccaccagcagaccacattctgctgtgcggatcgggcaggacaatgccgcgcggcctctgaatggacgctgccaccaacggggccccattcacggcgttgggaaccgggcgcacattgtctgccccgcagggagacagcgaggaggctcctgcagcctcttcctggtttaatctccccgcgcggcttcccaggtccatgtcccgtatcagctgcggggccggcagcaccaggcccaggagggagggcaggtcccagccctggaggaggatgcaggccaggttaaaacccagaggcaccgtaggaccttcgcacc

SEQ ID NO: 340827 - DNA, 529 bp, Homo sapiens
  chr10:134529092-134529621
  hypo
cgctcaaagagcccccaacctaaatgtttctctttagacgttcccagaacttgccttgctgtgcagccagtaaagaaaagctgctgcgtctccaggcaaaggcaaactcggcattaaagatctgggtcaccctgagcgctcctggccacagggctggttctcgcgctcctcacactcccgctggcctcggagaacagctcacaggctcttgctggtcgtgggctcgtcccaatcaggctttctcagactcggagacctcagggtggccgaggtcatgtgtctgtggagcccaccaggcaccctgtggtgtccctccgcatgcccgggactcctggcagcacaagcccgtgccctctgccgttccgctgccgtgaagcccgctgcctctgtgtcgccttagcctctccagggcgtggtcggtccactgctgcccggcaggaggggctcctttcgcctgtgcctcagctgatccatggctgcgatcttcattttgttgaacatggagtcaagagccaagaaaggtggtgcc

SEQ ID NO: 340828 - DNA, 640 bp, Homo sapiens
  chr10:134562467-134563107
  hypo
cgccccagggactggtttgagcctgttaacaccacaaagcaggcgtgtgacctcagccatccctcccacgtcagcttcacccagatgagcctgttgagacggttcccggtcaagccgcctgcagcccttgcccgttgtcacagtcgaacagctctcgagggagttcagggacgggagagagcgagcgggaggaggccggccatgtgcccccgcaggcaccctctttgctgttctcagtgctgctgtgccttccgagcctgctggtgtcgcactggcttttgccccaaagcagctctgtgggcggcagcagctccggggtgtcctcacggttgcagccacgctttgttggggagcagccagcctcaggcccttcgcacgtgtgagggtcggctgttgcgggagtggcccctgaccccaggtgcggaaatctgggtgtgacaccagctgctgtctggaaccagccatcctatcccactgactcggggtgtcgggtgacgctgccatgggcaggtgggcccccctgggacttatctccgttgctgtctttctgcagacgctctgcacaaaagccaccatgcagacggtccgggccgccgacaccaatgaagtggtgaagctcatatttcgtgagtcggacaac

SEQ ID NO: 340829 - DNA, 134 bp, Homo sapiens; identical to SEQ ID NO: 262710
  chr10:134566208-134566342
  hypo

SEQ ID NO: 340830 - DNA, 638 bp, Homo sapiens
  chr10:134592912-134593550
  hypo
cgtcggaggtcacgcgagtgcagattggtgagcagcgcccaagggcagaaggctggcagggctgtggcctccccacattgtgctgccgctgccagggctccaccagctcagagcagggcagcgttgcagcccgttttccattcactcacagcctctcgggttctctggatccgggacttgacactttatgctcagggtgggggacagagcctcacaacacacacctggcggcctttgacagcccctgccttctggggctggagtttggacaggctctccccatggggccacccagtgggcagcgggtgtgcaggacaagcagacgggcgccgggcgcgctccgcagcctcatccatcatgacacgcgccgtcacctcgtcaccaagctccgttctgcctccggagccctaaaacaccaaaaggggctcgggacgcgggcggtgctgcttggggagcctcggtgacaagtgttcagtgaggtgtgccgcacgctgcctgtgcccgccgtaatttgtttatctgtccaaagattatgcagttgaaaatccacaattttatgctgcctttgtaaattaccacgctgcgtttgatgaatgtttctccacttctgcggaggcgccgcttcacccgcgagaggc

SEQ ID NO: 340831 - DNA, 540 bp, Homo sapiens; identical to SEQ ID NO: 334134
  chr10:134602002-134602542
  hypo

SEQ ID NO: 340832 - DNA, 456 bp, Homo sapiens
  chr10:134607715-134608171
  hypo
cgccccctgctgatgggcacctcccgacaatggcgcctcccagtgatggacgcctccacaggtcctcggggccccttcccgtccaggtcttcacagaggccccggcactgggtgcccagtggcctcggcagccgtgtctgcgtgacagaagccgagcgtgggacggctccagctcaggactgtctgagccccaccctgcgagggtgctctgagctctcagggcgttgcttctttgcccatttatcccgggtcttgggtgagttccagtggcggacagagctcagacaagagcagtgctcgcagcagcgccagcagggacagtggcaatacgagggtcacaggtgtgatcggaggccgccagcctgtgctgggtcaccgtgcggtgccagtgaaggtgccctctgcccaggagctgtgggggagccgggggtgccgccaggacgcagtgtgggtcgc

SEQ ID NO: 340833 - DNA, 413 bp, Homo sapiens
  chr10:134610534-134610947
  hypo
cgtcaagcatgaacctggatgtgcctggcctggtcccgggccctcagcctcccaacgcccctgcgcccgttctcactggcacggctcagtgtccacaccgggccagcagcgcaggaactggaggctctgcttcgtgatttccgcagtggcagatgacaggaatcaggttcctgcgggtggcagcggatgggggtgcagaactgcctttttgctgtttgcctgtttaccctctttgtgcccgcgccaaggtgggagccgctacacccagggaggcgctggagcgtgtgcggaggtcagagcctgatgccgcctcggtctctgggtgccggggcagccattccttcaaacaatggggtgcttccaaaccggtgcctcgtgaggaattgggaaagacaggagattgtcatcatcac

SEQ ID NO: 340834 - DNA, 192 bp, Homo sapiens
  chr10:134639768-134639960
  hypo
agccaggcaggagccggagccgcagagacccaccacagagccaggcaggagtcggagccacggagccaggcaggaactggagccacagagaccagccacggagccaggcaggagccagagccacagagaccagccatggagccaggcaggagccagagccacagagaccagccacggagccaggcaggagcc

SEQ ID NO: 340835 - DNA, 117 bp, Homo sapiens
  chr10:134659540-134659657
  hypo
cggcatccgtgcccgcttaccttggacacggcggccagcctctgctccacacgggcgcccaggctggtggtggtcctgtcttggcaccggagctggtgctgtagctgcagcagggcc

SEQ ID NO: 340836 - DNA, 480 bp, Homo sapiens; identical to SEQ ID NO: 262730
  chr10:134664777-134665257
  hypo

SEQ ID NO: 340837 - DNA, 116 bp, Homo sapiens
  chr10:134680051-134680167
  hypo
cggctgtgcacccggccttgctagggcgccccgggtgtgggccggtggctgagcccctgcactaggatctgggcctaccccgcatccccccagcctctcctcgctaagcagagccc

SEQ ID NO: 340838 - DNA, 119 bp, Homo sapiens
  chr10:134694283-134694402
  hypo
cggcggtccagatcacggagcaggaagcagagctctggggagcggcgtggggtcggcaccctgccagcggcgtgggctcaccatccggcgtgggctgtggctcagggacatcgccgggc

SEQ ID NO: 340839 - DNA, 671 bp, Homo sapiens
  chr10:134699327-134699998
  hypo
cggtgggccgtccttggcagcacctgcacagcctcgtccagcaccttgaggccgccctcccagtcgtcctggtcggcatggctgtggaagagcaggccgtagagcgcagcacggagcgccaggtcgtcctcagcccctgggagggagaaggaggggtgtccttggagccgcctgatccctcatcaaaggcgccctcggacctcccagactaagctgcccatcacagtgcccctgaggtggaaccgcggctacagaggtgcccaggccagcgcatgccccgcagggctgaagtgagctgtggacctgcatggcccctccagccccacagtggccacccgggatgccctttccgttgcaggaagcagctgtcttgtctccttgctgcctgtcactctccatctccttggagaattctgcgttcacaaacacagacctgtgtttccacgtattaaagattggcgagcaggacttggggtcctttcaggagttgcatggaaagctcccccgcggccgaggacacagcgccacgtgcacgctcgggagtcctcatgcttggtgcccgcagcacgggaacaatccccgagtctccacgcaggcagcggagccatgtgacacgcagaggcaaaggtgcctgccttcagggcacacacaaaaatcgcctgcctgccggg

SEQ ID NO: 340840 - DNA, 223 bp, Homo sapiens
  chr10:134729798-134730021
  hypo
cgtttcctcgtagtaacagcaaactacgcctggggtcttgcgaggaacgacggctaaaaacaggagaggccacgtcaccccattttctctttcatggtctcagtcatttacgtgacgatggacacgtcccccacgcaagaagccggtgtccttacgaatgcaaagggtgtccctccccacgccagcctgagtgcaggggacactctgacccacggccccgggc

SEQ ID NO: 340841 - DNA, 1291 bp, Homo sapiens; identical to SEQ ID NO: 262746
  chr10:134732857-134734148
  hypo

SEQ ID NO: 340842 - DNA, 392 bp, Homo sapiens; identical to SEQ ID NO: 262747
  chr10:134734534-134734926
  hypo

SEQ ID NO: 340843 - DNA, 957 bp, Homo sapiens
  chr10:134738029-134738986
  hypo
cgacgtgcctggcccggagctgggacagagggtggcccttattgagtacagggggagtctgttgcttgtggcactgtcatggcaagggggcttgggccaccttctcctcctctgtctcctcctatgcgccacgccctctgtggaggacacagcacaggtgagcgccccacctgtccagcttctccagcacgtccgcaacgccagccaggggcttccgcaggtggtgccgcaggttgtgctgcagcaggggcaggcaggtgttccactgcgtggcgcacaccacgtggatgacccgggggtcgcccaggcgcacggctcgctgcagcgcgacgtctagcctctgtatgatatccagctgggcctgcggagaagacgtgggggattctagggaggttgctggctcgagctgcggggctggggcggcacctgcgtgcagggcacactgagaacgcaggccctaaattcatcaccctgcgtggcgtcatgctcaaatctgtccgtgaaaatggccagagtgactctttctaggaggaagtggacgtctcacaagatattacatgcaggaggcttggcggtgcccacacatcgtggctgcgcccgcctcccccgtgtggactcagcgggcgctgctcccttcctgatcccgtctctttcctggggcctgtgctcgctacgcttcccacccccagaatgcctcctccggtctgtgctacacgggcccttcccaggacaaaggctttggccaggatttcagtggagcagtctccccacactcccacctcccacaagccctgctggaccgcccaccgtcctgggctcacttggccacgtccccacagcctgtggcttccacgggggcctagccctcacgctgcccctgggctgggtggggcctgaacctcacaactccatcctgccacttggctgctgggtctgaaagcctcgtacgccggtgcc

SEQ ID NO: 340844 - DNA, 152 bp, Homo sapiens
  chr10:134758138-134758290
  hypo
cgcccgctggcgttgccatcacggggcactctcatgggcggcttaaacagcgggaaaggaggcgggaaggccgagaacaaggtgcggccggagttggttccttggagggcaccccgcgtggccgtatgtggtcgtcttcttgtctgtgtctc

SEQ ID NO: 340845 - DNA, 232 bp, Homo sapiens
  chr10:134787917-134788149
  hypo
cgctgcctgtgagatgaggccagatcctcgccgcccgcacctgcctctccccaactcgccctgcgcgggacaggtggacgccgcccacacctacctctcccccactcaccctgcccgggagaggtggacgctgtctgcacctgcctctccccaacgcgccctgcccgggagaggtggatgccgcccgcacctgcctctcccccactctccctgcctgggagagatggacgcc

SEQ ID NO: 340846 - DNA, 285 bp, Homo sapiens
  chr10:134790715-134791000
  hypo
cggaggcgcggtcatcagccagggatgggttggcctcgtgcgcgtgccctgcgcggtgctgagatcagcccagcacgatgtctagcatgttctgcccgaaacacacgcctcagaagaaagcgccaggcaaactgaaggacgcgaagccgtgggccggcctgccgagatcctgaaacgcaggcagagccgagacgctcttcagagcacgggtgtgtggcggccgaacacagcacctgaccctgggcttagtcttggacttctggaagaaaccgcggaactggtgca

SEQ ID NO: 340847 - DNA, 230 bp, Homo sapiens
  chr10:134793882-134794112
  hypo
cgagtgcctggtgagagcccggtgagtgcccggtgagtgcctggtgagtgcccgcaagtgcccagcgagtgcccggcgaatgcccagtgagtgcccagcgagtgcccggtgaatgcccagcgagtgcccagtgagtgcccggtgaatgcccagtgagtgcccagagagtgcccagcgagtgcccggtgaatgcccagcgagtgcccggtgagtgcccgcaagtgcccaac

SEQ ID NO: 340848 - DNA, 286 bp, Homo sapiens
  chr10:134794148-134794434
  hypo
tgcccggcgaatgcccagtgagtgcccagtgagtgcccagcaagtgcccggcgaatgcccagcgagtgcccagcgagtgcccggtgaatgcccagcgagtgcccagcgagtgcccggtgagtgcctgcaagtgcccagcgagtgcctggtgaatgcccagtgagtgcccagcgagtgcccggtgaatgcccagcgagtgcccagcgagtgcccggtgagtgcccagcgaatggaggctcctcgggtaacacgcgtggacccaggcacaatacaaagtcaaccgccc

SEQ ID NO: 340849 - DNA, 279 bp, Homo sapiens
  chr10:134795896-134796175
  hypo
gagcaacacgccagcgccccaaggctggccacgggcaggacgcagagacagacgcgtcattagagcatgggcgcggcgtgtccgtggcacgtgaggccccgggccctgcctttgctttcggtctctgtgcacgctgcctcctgacctgatggtccagttgcctgcggaagtaggtctgtgcacagtggaccttttaaaagagacacgaaacctgggagggcctggccttccctctgtgcgctgctgctgtttgtctttttcctcagcttcccgttgttc

SEQ ID NO: 340850 - DNA, 488 bp, Homo sapiens
  chr10:134829387-134829875
  hypo
cgccgcagagtccgcacccctggaaggaggcgtcggggaaggcactgcacccacgcatggcttcgagggcaggaggcaggttgcacagcgggggtcacaggctcctctgtcccaggtgggactgggcgatcccagacacgtgtgctgtggcctctgggcctcatgcggagagcagatgccagggcctgcaactctgacctctgagcacacaggccggcctcagggaagggttgttctggctgtgggaacctgaactcgaaatggcctccgttcgctgcagacactgcccgcctgcaccggggactcagcccaggcagctctgcacacacctcagcaccacccaccctcaggcctcagccgcgctacccagcaggcgcttttgcccagaacgcctgctcagaacaccgtgagccactgcccggcgctgagccggggcctccggaacgtgaaccaagcggctgcagcccaggcccagagccaccggcatc

SEQ ID NO: 340851 - DNA, 501 bp, Homo sapiens
  chr10:134830248-134830749
  hypo
cgctgggcgagcaggccagggctgcccgtctccacctttgtgctggaccatttacaatcaaagcgcagcatcgagatacccaggaaagagccaggaacaggccaggaagctgctgccccaccactgaccccaccgctctccttccctccttccttcccgctgggctgggcacaggtggagctcaccgtcgtcccccttcatcccttggcccctccaaggctcaaggactggaggccgactgggcagcagacatgtcaccatcaccatgctccccgtcaccacgctccctgtcgccatggtcactgtcaccatgctccctgtcgccatgctccccctcgccacgctccctctcgccacgctccccgtcgccacggtccccgtcgccacgctccccgtcgccacggtccccgtcgccacgctccccgtcgccacggtccccgtcgccacgctccccgtcgccacgctccccgtcgccacgctccccatcgccacagtccctgt

SEQ ID NO: 340852 - DNA, 164 bp, Homo sapiens; identical to SEQ ID NO: 262769
  chr10:134834668-134834832
  hypo

SEQ ID NO: 340853 - DNA, 378 bp, Homo sapiens
  chr10:134836865-134837243
  hypo
cgtgaccacggcaagagcgagctggagcggagcctcgggtagccatgactaacagacatggttcgcaaacccacgcacaccttccaaaaacgccaggctggcctcacatgaccaggggcctcaccaagtgcagtgggtccctgcgtgtcagggaggctgcccagagctgtggctgctcctgtcttagcctcaacctgtgcccggggccctgtggatggatccgcgtggggcggtggtgttccaagtccacgtggggcggtggtgttccaggtccacgtggggcggtggtgttccaggtccacgtggggcggtggtgttccaggtccacgtggggtggtggtgttccaagtccacgtgggacggcggtgttccaggcca

SEQ ID NO: 340854 - DNA, 190 bp, Homo sapiens
  chr10:134875690-134875880
  hypo
cgcatgaaaatagccagttccgggggctccgcacccgcgtagggggcgcgtcggtcctttccattttagctgcgtgggggagggtgttggcggcaccattgtgctttcattccacgtttcctcagtgattcaacacgttaagtaacgtgtcacgtgcctgctggccaccaccgtccgctcctgggaagaa

SEQ ID NO: 340855 - DNA, 66 bp, Homo sapiens
  chr10:134878532-134878598
  hypo
cgttccgctgggtgaacacacacacgcacttgagaaggtggcattccgctgtgtgcagggtccagc

SEQ ID NO: 340856 - DNA, 274 bp, Homo sapiens
  chr10:134913663-134913937
  hypo
cgtgcccccggcctgggcctgggcctgggcccagcatggccccggcggaggagtcgctggcacgcacctgaaggtggctaaggtcagacgtacctcctgcctccttaatcattcctctggtaagctggaaacaaccacagcaagtgcccgggaaacgccattgacgtcccgcctgtaagtgcctgcgagaggccgtcaccatcacgtctgcactttgccaccaagtacgccccacactgggatgaagcctgctggatccgcgggtgaggccccc

SEQ ID NO: 340857 - DNA, 1391 bp, Homo sapiens
  chr10:134941662-134943053
  hypo
cggttcccatccacactctcagcgactctagaaacgcccaaggcccccaagccgcagctgtgcaaagccactcgctaggccgggtgggtgcagggccctttgctctgcagggggcgtcctgagtcctggccgtgctggccccgctgacactgacgtgcgtctccccacagctgctggatggcctgggagcccagcctgggcgccttctacggcccagccgccatcatcaccctggtcacctgtgtgtacttcctgggcacctacgtgcagctgcggcgccacccagggcgcaggtacgagctgcgcacacagcccgaggagcagcggcggctggcgacacccgagggcggccgtgggatccggccaggcaccccacccgcacacgatgcccccggcgcctccgtgctgcagaacgagcactcattccaggcacagctgcgcgccgccgccttcacgctgttcctgttcacggccacgtgggccttcggggcgctggcggtgtcacagggccacttcctggacatggtcttcagctgcctgtacggcgccttctgcgtgaccctgggactcttcgtgctcatccaccactgcgccaagcgtgaggacgtgtggcagtgctggtgggcatgctgcccgccccgcaaggacgcccaccccgcacttgacgccaacggggccgcgctgggccgcgccgcctgcctgcactcgccgggactgggccagccacggggcttcgcgcacccaccgggcccctgcaagatgaccaacctgcaggccgcgcagggccacgccagttgcctgtcaccggccaccccgtgctgcgccaagatgcactgcgagccactgacggcggacgaggcgcacgtgcacctgcaggaggagggcgccttcgggcacgacccccacctgcacgggtgccttcagggcagaactaagccgccctactttagccggcacccagcagaggagcccgagtacgcctaccacatcccatccagcctggatggcagcccccgcagctcgcgcacagacagcccccccagctctctggatggcccggcggggacacacacgctggcctgctgcacccagggcgaccccttccccatggtcacccagcccgagggcagtgatgggagccctgccctctacagctgccccacgcagccgggcagggaggcagcgctcgggcccggccacttggagatgctgcggaggacacagtccctgccctttggtggccccagccagaacgggctgcccaagggtaaattgctagaaggcctgccgtttggcaccgacgggaccggcaacatccgaacgggaccctggaaaaacgaaactactgtgtagatgggggcagaggacacggtgttcctggaggagcttca

SEQ ID NO: 340858 - DNA, 646 bp, Homo sapiens; identical to SEQ ID NO: 262788
  chr10:134996305-134996951
  hypo

SEQ ID NO: 340859 - DNA, 179 bp, Homo sapiens
  chr10:135001623-135001802
  hypo
cgtccgtccgtggatgcctgggtgctccccgtgttggctatttcgagccgtgctgctgggaacatgggtgtgcacgtatgcgtgagccctgccctcggttcctcggggaatgtggccgtgtggaactgctgtcacctgggaggtgtatgttgagcttttcaaggaacggcagcactgtc

SEQ ID NO: 340860 - DNA, 356 bp, Homo sapiens
  chr10:135002064-135002420
  hypo
tgtcccagctgggccggcccttccgggagtacgagctgtgggccctgtgcctggcctgcctccgcgcactgcagacacgccctgagcacccaggtgacgcacgcaccatcccatcccccccgccgtccccaccccccactgctgttccaccccccaccgccgtcccacacccccgccgtcccaccccccacaccgtcccacgcccccccactgtcccatcacccctgccgtcccatgcgtaactggcccccacctgaaccaagggacccaggggcagccaggacagtgtctccggtgaacggaacaggcggctcccgtctggagcaccttgtgggtgcctgctgggttgcagcacc

SEQ ID NO: 340861 - DNA, 739 bp, Homo sapiens
  chr10:135014662-135015401
  hypo
cgtgagggggcagagggacacagtcctgatagcagagccagcgaggacagggcccggccccaccccggggcgagtacgagtttggaagcagtgagggcgcagagtggggctccatctggggagaggcctctctctgtcacccggccccgtgcggcagttcagggtcccagcatctcccctgcactgggaggcggcagccgtgcccggggggcgcccgtggtgggcgggtgcaagagagaagggcgtcgggtgtgcaagcaccaccggcctcccattaacagcctgcccgggctccgcccacaggagccactgtccacgtaacctgcgtctctttctttcaaggaaaagagaagccagccatggccaggaccagcagcagggccccctgctcacccacctcggtgtcggatgtggactcggacgcactgtcacggggaaacttcgaggtggggtttcggcctcagaggtccgtaaaagccgagagagcgcagcagcctgaggctggcgaggacagacggccagctggcggggcctcagacgtggaggcagtgacccgactggccaggtccaaaggggtcggcccagccttgtcccccggcccagccggattccagagctgcagccccggctggtgcagcgccttctacgaggccgactgcttcggggccgacgtccacaactacgtgaaggacctggggcggcagcaggcggacggggccctgcccgacgcccagagccc

SEQ ID NO: 340862 - DNA, 978 bp, Homo sapiens
  chr10:135016995-135017973
  hypo
cgcacacggtgcagcgagggccgttctctggggcggctggagcagccggtgggcatttcctcccttcagcgctgacccccacctactggtgccggccgtgtgtgctgggctcagcactgcgggtgccctggggctgtggagctggcatccgcgtctcctgctgttaaaacaagcgtggctcccagagtcagcgtggacagcactggtgtgggttcctcccccgtctgtctgcaccggtgaagcctggcctcgtgtttccctcctcactgccccacatgtggtgtggattttagttaccgtggatttattaaaatcagtcaagaccgtcctcctcatggagtccgcctgtggttcccgcgtgaggagcgcccccgacggacatcgagtctgactgtgaacggaggccgtggaggtgccggccagagaggagtctgcgtgagctgcactccagccaggcgggcatcgggctcgcaggcacccgcctccaggttcctggatgcgtcagggtacacagacctttcccaggagattttctcgacatcagcacctctgcaaatggatgggggtgagagggctggatggagcctggcgccggtgacctccgggggccggacgagggccccatggtgcaggccatgggggaacgtggccaccaccatcctcagaagccaggaccaggtgccccggcagcagaacacagctccatggggacacctgcgtttaccaacctcaacctgcccagcccggtaggtccttccttgatgatggaatgttctagacgctgtccaccgggtagccaacagccacgtgtggctactgagctctggaaacatggcccacgtgactgaggacctgatgttttaatttcactgcactttaggcagccacggcagcctgcagctcagtgtgggaggcagggtcgcacttggctgggtggcagcggggtccggagggcttggggaacctggcttagtggcc

SEQ ID NO: 340863 - DNA, 626 bp, Homo sapiens
  chr10:135022978-135023604
  hypo
cgcgtgtgtggtgtgcgcgtctggttgtggagttctgtgtggctttgtgcatgtgtgtggtgtgcgcgtctggttgtcgagttctgtgtggctttgtccacgtgtgtggcgtgcgtgtctgtggttgtacagtttgtggcttgcatggcgtgagtgtgagtgctgtgcttccatggaaggagcgtctcctggccgtgatgtggtcacgaggggcttccccgctctgtggacctggtgggcgtcacctttgcagggcagcctggggctggggctgtggccacctgtgtcctcggaccccaggtgagtgggtgaccaggccccttgttccagggccacgccatctcctgcctgagactcctccagggtgggaggaggccttgccaggcctccgcttcctgaccgtggccgtcgggctcccaggacagtcccagacctgcaggcggggccctggtcagtgtctcctgagggtggcgcggtttcacccagtgaagacccagaacctttgagcgtgcagcattgcgcccggtcccgaggcaccagctccctcagcttcccgagctaacgggtcctgcgagtggagacgtcacaaagccctgcatagggctgcgttcagaaaggccctggtg

SEQ ID NO: 340864 - DNA, 333 bp, Homo sapiens
  chr10:135025560-135025893
  hypo
cgtgcacatatgcatgcaccttcacacaatccacacgtgcacatgcgtgcacactcaatccacacgtgcacacgcacgtgcaccttcacacagccatacatgcactcgtgtgcaccctcacacatatccacacctacacgtgtgcaccctcacacatatccacacctacacgtgtgcaccctcacgcaatccacacatgcacacacgtgcacccgcacacgcatccacacacacacgcatgcaccctcacatccacacgtgcacactcacataccccctccatgttcccggtcccaggcagccctgctgcgctggcacctcctgcaccatccc

SEQ ID NO: 340865 - DNA, 565 bp, Homo sapiens
  chr10:135030373-135030938
  hypo
cgcctgcggcagcacgatgaacctcgagggactcaggctcagggaaacgagccagtcgcgaagcacggacagtggacggctccacgtacacgaggcgcctggaggcgcaagattcacggagacaaagtagcagggtgggcgccgggggctgggagtggggcacggggagctcgtgttgaacggggaccgagtttccgtttgggaagatggagagtcgcagacatgctgcacagtgtggatgtagttaacacggctgaaccgtgcactcagaaaaggctacaaaggtaaatcctctattacatactttttacaattaaaaatcaaaaggttaaaacaacagtgaaaaagtgtggcgaaatagttttatctcaaaattacatactttgcatctacttaaaccgatgaagaaacagactgagacgtcagcgtagaaagtgtatccggtaaacacttctcaagctcctctcaaggcgctcaggcaagagggctggggccgcagtcggggtgagcccaggatcacatgaggcgccttcagctgcacaggggccctgcagacaagagttga

SEQ ID NO: 340866 - DNA, 157 bp, Homo sapiens; identical to SEQ ID NO: 262803
  chr10:135035224-135035381
  hypo

SEQ ID NO: 340867 - DNA, 1637 bp, Homo sapiens; identical to SEQ ID NO: 334138
  chr10:135043103-135044740
  hypo

SEQ ID NO: 340868 - DNA, 510 bp, Homo sapiens
  chr10:135087235-135087745
  hypo
ggagccctggcgttcgtccgccacacccacctgaggccggcacaggtgctgaggctggcggctgagtccgggtacccctctacgtggccctggtagaagcagtggtcctgcgggggaagcaggagaggggtccacaggctgtgcccccatggccccacaggctcggggagggccgcccagcccctacctgcccgcccagctgctccgcccgacccatacctgcccgcgaggctgctccgtcacctcggagccattggcagccgtataggtctctgtgtagccggagcccagcaggtccctggaaaagaagtgctgtgactgcctcggccccctcggtgcagagaggctggcccagaggctggacgccggggacaccagtgtgctggagccaggcccgggcaggggggccgacccgagacccactcacctgttcttccgcaggtggagggtgaagttgtgccctgtggccccaaggacgtagctcaccctctctgggtgcaggccctgagc

SEQ ID NO: 340869 - DNA, 171 bp, Homo sapiens
  chr10:135107049-135107220
  hypo
cgcgcccggtgcccacctggtcacagcggagtagctggcggccactgggaggatcctgtgcaccagctccctgatggacaggtccaggttggggtccacgaggaaggtccggctctgcctcccagccaggggctgagcactgacgtacctcccgtccacgcccaccagcac

SEQ ID NO: 340870 - DNA, 514 bp, Homo sapiens
  chr10:135120335-135120849
  hypo
cgtatctcttctagaaatagaagcacagatgcccgcacgtcatgagtgttcatcccatgaggagcctgctgctctccctgaatgtggggaccgggcctccaagagggcagcccgtactcgcacagagtccctccccccagaagacctttggaaaagtcctagggcaactctggggtgtcacggtcatggaagggtgctctcgctacttagagggcaagggcgggggatgctaatcatcaacagagctgtcccgccagaaatgcacagcgtcccactgaaaacacagctctgaggaacatctagccgtggctgcttcttggaggaacgtctagccatggccgctgacttggccttcttgatgctcctgaattcttactattaatcacacaaactgacaggcccagcaactgtgactgggagggactgacgtcctcctcacagaggctgtgagctaccgcagggacgcgtgctgagggaagcaatgcacgcatgtcacactccaccacggacaagc

SEQ ID NO: 340871 - DNA, 134 bp, Homo sapiens
  chr10:135124053-135124187
  hypo
cgggcgcagcgcctccgcactcacacccctctgggccatgcctgtacctcctgcagcagtcggccgtggtcatccgcactcacacccctcggggccgtgtctgtacctcctgcagccgtcggccgtgctcacac

SEQ ID NO: 340872 - DNA, 70 bp, Homo sapiens
  chr10:135125649-135125719
  hypo
cgtctgccttaatagcatcacctgtgccgtctgcgtttctagcgtcacctgtgccgtctgcgtttctagc

SEQ ID NO: 340873 - DNA, 313 bp, Homo sapiens
  chr10:135153722-135154035
  hypo
cgtcccctccgcctttgtgctgggtcagacccagctgggtttggctctcactcaccctgaggatggccctggcgcccgcatggtgcccagcacacagaaggcgctccataggcatttgcctgagtgcggctcccagctgtgggtggtcagcaatgacaggagcatgcgttggtgatgccttcgttttcattgctaaaccgtaacccattgttcccgctgttaactcatggacatgccgcgtttcatccacgctgaacggtaacccgttgttactactgtctttttgttttgttttgttttgtttttttgagac

SEQ ID NO: 340874 - DNA, 107 bp, Homo sapiens
  chr10:135229000-135229107
  hypo
cgtggtgtctgatgagccgtctgcggtcatgtttgtttgttttagtgcttgagaggggttggtctccctttttcacctgcgtggtgtctgatgagccgtctgtggtc

SEQ ID NO: 340875 - DNA, 596 bp, Homo sapiens
  chr10:135269764-135270360
  hypo
cgtacagacacagcacgtgcgacggagtggtgttggtccgacaccacggggcatggggatacgtgtgcaaccaggagtggacgctggcagaggcctctgtcgtgtgcaggcagctgggctgcggccctgccgtgggcgcccccaagtatgtcccgctgcctggagagatggcccagccctggcttcacaacgtgtcctgccggggcaacgagtcctccctctgggagtgcagccttggctcatggtgccagagcccgtgcccccacgcatgggtggtggtcgcgctgtgctccagtaagtagggaggagtgaaggggacggggctgaggaggaggaggagtgggaggacgaggaggaggactgggaggacgcagaggaggactgggaggatggcgggtctcggagacgggcggggaggctgtgggtctggagctctctctgggaggggctcctctctgggcaccggggccatcctgactgtaagattcagctgtggaaaaaccaacgccagggagagtcagagattggaggaaggaagcagagtgcggcccaggcgtgggggaggcagcagccgagcgggggcggggtctgtggac

SEQ ID NO: 340876 - DNA, 368 bp, Homo sapiens
  chr11:232844-233212
  hypo
cgataggttttggccgtccccagaaacaggcacccgagcatcccctgtgagaaacaggcacccgagcctccctgggagaaacaggcacccgagcctccgtgggagaaaaagaatgtgtgcgactcacagagggctcacctctctcaagcccatcgatgttctgcgtgtagagccgcagaagcagccccttgtcatgaagcagccggagaaagtagtgagtgacgttgggcttgtagtttccagggtacagctccttggccaaagtgaaaaagggcttggggttgtgaaagaagaatgggagttcaaaaatggcctcggggtacgggagatcgtactgctggaggttgctgtacaggccactccccggc

SEQ ID NO: 340877 - DNA, 729 bp, Homo sapiens; identical to SEQ ID NO: 224005
  chr11:369470-370199
  hypo

SEQ ID NO: 340878 - DNA, 808 bp, Homo sapiens
  chr11:376596-377404
  hypo
cgggccctgagctgggccgccagggccgcccgccctttgccgctcttcttgggccgagctccgcccccgcgccctgcagtggagcagccgcccccaaaggtgtacgtgaccagggtgcggccgggacagcgggcatccccccgggccccagcgccgcgtgcgccctggccgcccttccctggcgtcttcctgcaccccaggcctctgcccagagtgcagctgcgggcgcccccacgcccaccccggccccacggccgcaggaccggcggcccccaggccacacagccgaggcccccagcccgggcgcaggccacccaagggggccgggagggccaggcgcgcacgctgggacctgcggcgcccacagtggactcaaacttgtcctccgaagcgcggcccgtgacctccttcctgagcttgtcccaggtgtccgggccgcagctgcccggggagggcgaagaggaggaggaaggggaggacgatggggccccgggcgacgaggccgcgtcggaggacagcgaggaggccgcgggcccggcgctcggacgctggcgtgaggacgccatcgactggcagcgcacgttcagcgtgggcgccgtggacttcgagctgctgcgctcggactggaacgacctgcgatgcaacgtttcggggaacctgcagctgccggaggcggaggccgtggacgtgaccgctcagtacatggagcggctgaacgcgcgccacggcgggtatgggggcggccgaacgcgcgccagggcggttttggaggcggggacagccggggagaggaggtcctggccttggc

SEQ ID NO: 340879 - DNA, 175 bp, Homo sapiens
  chr11:380592-380767
  hypo
cgcaccagcacacccagggccatgccaggggccccaggaacctcctccagtatcccgcgtttatgcaccgcgctccagggtcatgacccagtaccaccggacgactcccggaagcccccgtggtgatgggacccggcacctgacccctcccgaggtctcctagcggcgctttgcc

SEQ ID NO: 340880 - DNA, 307 bp, Homo sapiens; identical to SEQ ID NO: 224006
  chr11:406793-407100
  hypo

SEQ ID NO: 340881 - DNA, 75 bp, Homo sapiens; identical to SEQ ID NO: 224007
  chr11:407428-407503
  hypo

SEQ ID NO: 340882 - DNA, 1007 bp, Homo sapiens; identical to SEQ ID NO: 334147
  chr11:416533-417540
  hypo

SEQ ID NO: 340883 - DNA, 252 bp, Homo sapiens; identical to SEQ ID NO: 262848
  chr11:445980-446232
  hypo

SEQ ID NO: 340884 - DNA, 162 bp, Homo sapiens
  chr11:455954-456116
  hypo
cgggccccaccccccgccttgctgcatgaccttcacagtgtcacttaccggccctgacttgcctgcgggcaccacgcacacggcatgaaggtgccctggcccggggcacggacacagccagagccaccgcgctcctggctgtcatcacgtcgttggctttgc

SEQ ID NO: 340885 - DNA, 1645 bp, Homo sapiens
  chr11:487212-488857
  hypo
cgtctggatggtgctcatggtgggcagggggcccctgctctctaggctgtcgtggacgtggtctccacaggccacggcagcacctgtgagtccctggccttcttcccggggtctggcaggtgctgctcaggtgtgggctgatctgccggtgtggggagtgggggtggctgtgccccagggtcaagggtcataccctgtcgcccacaggacaagttggatggctttgttcccgcgcactttcttggctggtacctgaaggtacggcacctcctcttcccggcctccccgccccggttctgaggcctgccgtgggctctggaccgtttctgtccatggagttgagctcagggtgctctgagtgtggtgggagggtgtcgcactgcagccacccagaggttcgagaagccgtggggctcccggacctcccagaagccctgatcctggtcgggtccccgctccgtcctcagggtcggggcggtggaaagaggcggcagggcaggaagtcccgcccctgcctgggcttgggcactgccccatcccacttctgagggaccctgtgctacctatggggctaagagcagtgcctgcttgaccctgcagcccaccctggcagagtttggtgtcaggccccgggcacggggatgctgccttgtttgctgacagtcgtacatcgaggctgctggaggggcagccacccaccccacgctcaccctgagacctcactgggggccctgccagtgctgtcgactccaagaatgctgccagccggggtgggggctgcacgcacccgtgggcagggccgggcgtggcctgcgtcccatactctggctgccagccgggtgggggctgcacgcacccgtgggcagggccgggcgtggccggcgtcccatactctggctgccagccggggtgggggctgcacgcacccgtgggcagggccgggtgtggccggcgtcccatactctggctgaccctggcgcccacagaccctgatgatccgagactggtggatgtgcatgatcatcagcgtgatgttcgagttcctggagtacagcctggagcaccagctgcccaacttcagcgagtgctggtgggatcacgtaggtgccagcacagcccccggggcagtcggtgcaggctgaggggcattctcggaacccctgtgcccagcgcggcccctggaccccctcattctccccggggggcagtgggtgcaggctgaggggcattctcggttcccctgtgctcttccggggtcctcctcggggggctcgttacccctcacccctgcaacgagtgctggcccctccctgcagtggatcatggacgtgctcgtctgcaacgggctgggcatctactgcggcatgaagacccttgagtggctgtccctgaagacgtacaagtggcagggcctctggaacattccgacctacaagtacgtcgtgggggctgcgagggcagggccgggtgggggttacctggaggcagcctcagcgtccgtgctccagcagaccccgagcaccaggcccgtccagtgtgcggctcaggaggggtgaccgtggggctttgcctcctggaacctccctctgacctggtgtcactcaagcccggccgcccctcacagtggccatggcgtctgacccac

SEQ ID NO: 340886 - DNA, 688 bp, Homo sapiens
  chr11:492571-493259
  hypo
cgggagccatttgcacccacacccccgggtctgcctcggggccccgggcgtcaaaaagctttacttttagtatttttccttgactacttttggggaaaatttcaagccctctaagtcaagggctgtaatgtggagcacacacaagagcagcctctggggctcagcaggaagacgtccggtgtggccaccgcgcctagcagtcctctttccagtcacggccactcacagctttggcctccgtggccctgcacggatgagttcttccagctgccctgccctgcgtgctgcaggacacatggggccttagcattctgctctttgcaggtggcagctttgatcgctcaggaggaactgccacctgatctccccactgcaggggcccccactccccccctcacgcgctgcgggtcctgtcactccacccacgctgtccatccccgctgatgctctgagccaggtggtagcaggtgggggtggcgccccgctcacggtctccatctgctcttcccgaggagggcgaggcagggcttgtgattaaagtcctgtgttccggcgcccgtgtcccaaaggcagcccctgggagcccttccggcagcaactcaaccccagacagcgcccaggggctctggttcctcacgcgctgagatgctccggactcaccttgggcatctctcgccccaggcctggc

SEQ ID NO: 340887 - DNA, 1607 bp, Homo sapiens
  chr11:561904-563511
  hypo
ggggtcaggcaggccgggcaggtagagctgaagtgggacctggtggtccagctccatggtctcccccaaggagagtggggctggttgctgatcctttttgttcttcccaactcttcaagccaggtggacagagagtcggggggacataggctgaccttctcctcttcttcccaggccagactggccgctttgtgcttgtgcagcggcttcgggagaaggagcggcagttgctgccacaagagtgtccagtgggcgcccaggccacctgcggacagtttgccagcgatgtccagtttgtcctgaggcgcacagggcccagcctagctgggaggccctcctcagacagctgtccacccccggaacgctgcctaattcgtgccagcctccctgtaaagccacgggctgcgctgggctgtgagccccgcaaaacactgacccccgagccagcccccagcctctcacgccctgggcctgcggcccctgtgacacccacaccaggctgctgcacagacctgcggggcctggagctcagggtgcagaggaatgctgaggagctgggccatgaggccttctgggagcaagagctgcgccgggagcaggcccgggagcgagagggacaggcacgcctgcaggcactaagtgcggccactgctgagcatgccgcccggctgcaggccctggacgctcaggcccgtgccctggaggctgagctgcagctggcagcggaggcccctgggcccccctcacctatggcatctgccactgagcgcctgcaccaggacctggctgttcaggagcggcagagtgcggaggtgcagggcagcctggctctggtgagccgggccctggaggcagcagagcgagccttgcaggtgagcccggggacctgatcccctgtcactcccccacccctgatatgggcagatacggggatcacagggtcccactcgggaggcaggtgagcccggggacctgatcccctgtcactcccccacccctgacgtgggcagatatgggggtcacagggtctgactcgggaggcaggtgagcccgcggacctgatcccctgtcactcccccacccctgacgtgggcagatacgggggtcacagggtcccactcgggaggcaggtgagcccggggacctgatcccctgtcactccccaacccctgacgtgggcagatatgggggtcacagggcccgaccagggaaagtgctccctccggagcacaagggctgtggagcccagtggctgtgcctcctaaggatctcatgtgtccccaggctcaggctcaggagctggaggagctgaaccgagagctccgtcagtgcaacctgcagcagttcatccagcagaccggggctgcgctgccaccgcccccacggcctgacaggggccctcctggcactcaggtcggagtggttctggggggaggctgggaggtgaggacctggcccagccccactccaagctgacttcccaacccacagggccctctgcctccagccagagaggagtccctcctgggcgctccctctgagtcccatgctggtgcccagcctaggccccgagggtatgtctgtgccccacctccccctggggcacc

SEQ ID NO: 340888 - DNA, 115 bp, Homo sapiens
  chr11:567195-567310
  hypo
cgggcagagggcagagccaggctgtatcgaggggcggcgctgggaccctcctcgcccagagttcctactcatccccagcacagaagtgctctgtagggccagctgaggacacccc

SEQ ID NO: 340889 - DNA, 171 bp, Homo sapiens
  chr11:591108-591279
  hypo
cgcccccacgcctgtccttcctccctttattgttcttacttgtcactgagatgctacgcgttcatggagctgctctttcctccccgctagggctggcagctctgcagggaggcaaggctcgctgtgctccctccactgccgtgttgccagcagcttagtggagggcctggc

SEQ ID NO: 340890 - DNA, 137 bp, Homo sapiens
  chr11:688396-688533
  hypo
cgacaatcagtgtcgctttttcggtgttcaggctgtccccgatctgaagggccgtcctaccagactagaaggaaaaaccgctccgtcaggtcacgtccgagagtgacaccaggcgtgtcactgagcccagctgggcc

SEQ ID NO: 340891 - DNA, 672 bp, Homo sapiens; identical to SEQ ID NO: 334150
  chr11:705963-706635
  hypo

SEQ ID NO: 340892 - DNA, 493 bp, Homo sapiens; identical to SEQ ID NO: 262887
  chr11:763193-763686
  hypo

SEQ ID NO: 340893 - DNA, 191 bp, Homo sapiens
  chr11:763889-764080
  hypo
ggagagctgctgcaggacaacgccaagctggtgcctgtgctctcagccaaggcgggtgaggccccactgcccagctgtggctcctgctcgggcaaggccagcactgccgtgccacgctgccctgtgggtgatccctcccacctgtggggcgagctcatcttgggagacatgagggtgaagtagacctcaac

SEQ ID NO: 340894 - DNA, 364 bp, Homo sapiens
  chr11:799220-799584
  hypo
cgtccccacacactggagagacttgaaggtgggggctctgcccatccactggggaatatctgggccagcctaaaagtctgtggggcctaggcctgggcaggctctgggggctgtggagccgaggagccaggcagagcggggtccttgggggccaagcccatgcgtcggatgctgtcctggtacttgcggcggccgagctccaagactgcgcgcacctcttcagccacgtcctgccggtcactctgctccagggcctgcaccaggagccccacagcccctggctgcccagcctggcgctcagcccaggagaagagcatgtgacggatctgctcatccagatcatccctgcaggcagaggatgggc

SEQ ID NO: 340895 - DNA, 301 bp, Homo sapiens
  chr11:799830-800131
  hypo
tgcgctgcacctcccggtaggacacccccaggtgcagggccacggctggccagtccagacccagacgcccagccacactcagcaggttgctctgcgtcagaaagccggtctcggcatctcccagattcaagggtgccaaggagaggccagccccccgccgtggcccctcggaccctcgaagtctctgttggaaggaaaaagtgcattaagccctgggctccacccccaactccaccatgtcaccctggtcacccctgggcctcggtcctgccccgcccctctgctgtccctcagtcccacc

SEQ ID NO: 340896 - DNA, 762 bp, Homo sapiens
  chr11:823426-824188
  hypo
cgggtagtgaagggaggtggctgttgggggtgccagggattccaggggcagaacgggcatccctggctccctccgctccatttaaccctcctcactgcaggtgctgcgagagatgtgcaagcagggataccgggatggcctgcgctttctgcagcggaacggtgcgcggacccgggcgggagagggcggggtgggctcggctctgctaccccctgcgggccgcggccgcgctgatgaactgagaatcccttctctccccaaccccaggcctcctgaaccggcccaaccccttgctggcgttgccccccgcccgcccccacggcccagaggacaaggaccaggcagtggagagcgcccaagcggaggattactcgcagctgcccggagaagatcacatcctggagcacctgcccgcccggctcaatgagggtgcgcacctgggggacgggaggggaggaggggaggcaggagggaaagagagagaggagaggacggtgagcaggggagggaagccgagcgggtcctgggccccgctgcctccactggccgccgacctcccgcccacccgcagccctgctggaggcctgcgtggagcccacggacctgctgaccaccctctccaacatgctgcctgtgcgtctggccacggccatgatggtgccctacacgctgccgctggagagcgctctgtccttcaccatccggtgtgagggctggggggtcgggagaggggcccaggggacggactttgggatcatccgc

SEQ ID NO: 340897 - DNA, 649 bp, Homo sapiens
  chr11:850444-851093
  hypo
cggagtcgctgccccggccaggcgttgggtgcggttgtggggatggtcccgggaggacccaagaccgctgctccggctaggagcctggactgggcgggtggggaaggtttgcaccatcgcggggtccgccccctgcactcagagcggctgccccacgccctggtcccctctcctctcctctcctctcctcacttgatgagacgggacacgttgcacacgtgcgcgccggacagggccacccgggcactgcgcctctcctagggtcggggttcgagtccgggtcgtggccagttttgcgcggggccccggtgcctcctctgcgcccgctccctcctcggtgcagccgttatccttgcctcggccccgcccctccaggcaggcgacctgtcgggcccagggactcacttccgagggtttgagccggctgccgccaaggtcccccagtcgccgggaggcgctgcggaagggaatcctggacactgagcagggccgtgggccatcagtgttcgcgggagacactggctttcccgcgcctccggcagcagaggcttccctaacttttgcggaggtggggtcaggtgtgctcagacctgcagtggtgtccgggggggccctgtgtgctggatggagcagagctgaggtagagggc

SEQ ID NO: 340898 - DNA, 384 bp, Homo sapiens
  chr11:859260-859644
  hypo
acaccctggcccacacgcaccttggctcacgtgcaccccggctcacacgcaccccccctttcacacgcaccccgggctcacacgcaccccgggctcacacgcaccccccctttcacacgcaccccgggctcacatgcaccccggctcacacgcaccccctctcacacgcaccccggctcacacgcacccccctcacacgcaccccgggctcacacgcaccccgggctcacacgcaccccgggctcacacgcaccccctcttacacgcaccccgggcccacatgcactccggctcacacacaccctcactcatgcaccccgggcccacacgcaccccagctcccatgtacccctgctcacatgcaccccagctcccatgcatccc

SEQ ID NO: 340899 - DNA, 408 bp, Homo sapiens; identical to SEQ ID NO: 262899
  chr11:862650-863058
  hypo

SEQ ID NO: 340900 - DNA, 96 bp, Homo sapiens; identical to SEQ ID NO: 262912
  chr11:980553-980649
  hypo

SEQ ID NO: 340901 - DNA, 689 bp, Homo sapiens; identical to SEQ ID NO: 262913
  chr11:985302-985991
  hypo

SEQ ID NO: 340902 - DNA, 513 bp, Homo sapiens
  chr11:993208-993721
  hypo
cgcgccaggacgtgcccgcctcgccttaactctggcacctggctgccaccccggctcattgtttgtgcttcgcaggctcttcaggctcccgcgtgccacgagaacctggtcaaagtgggcggctacatcctgggggagtttggaaacttgatagctggagacccgagatccaggtgagaggccctttgcgagtcggggctgtgtgcgctccggcgggcctctcggtggtcggtggcaagaggcgaggcaccagctggccctgccgtgaggcctcgcagagccgcttctgctccccatcggcgtctttttgttttccttcagttgatagaaaaagcagggattctagtagaaaatggagacgtggggttgatggctgacttagtgaaaggggcgtctttgcggtgggatctggagctggaagagggtcccgaccagcggcctctggtgcaggccagggggtctcgccgccgtcccccccccgcgggggcgtgctgcagcctgcgaggggacgac

SEQ ID NO: 340903 - DNA, 498 bp, Homo sapiens
  chr11:1008033-1008531
  hypo
cgtggacccgaccgtggaggggggcgcgcaggtgcagcaggtggtcaacatagagtgcgtgtccgacttcacggaggcgccagtcctcaacattcagttcaggtaagagccgcctgtgcgccccgggccaaggggtgtgtgggcgcctgagctgtgtgcctgggctccatgactgtgcctccgtgtccttcctgaggggacccggggcgtgcgggtgctcacggtgcatggatgcggcctgagctattgctgcccccggctctgcagagcgcaggaaacaaggggaggcggagccctgggctccgggacggcaggtggcagctcccacatggggccttgctaggatctttctgggcaccatggggcccacctcatggggtggcagacagccagggcccccgcgccacctgcccggcttggtaccagacgacagctgtggggtgcaggcagctggtttccttcggccccctggcctggggggcgcgttttttgctcagt

SEQ ID NO: 340904 - DNA, 184 bp, Homo sapiens
  chr11:1015850-1016034
  hypo
cgtgtggtaggcgacaaggtgggaccagggtgcctggtggtaaggttggtgactggagaggtggggatacccgtcacccccgaggtgagtgacacaaagcctgatgtgggaactcgggtggtgagagaagtggaccgcgaggtggtggactgagaggagaaggcaggggcggtgtgggtgctgg

SEQ ID NO: 340905 - DNA, 469 bp, Homo sapiens
  chr11:1029028-1029497
  hypo
cgcaggaaaggccttacctgcctggagaggtagaccacagccaccagggaggtctcggagtgtgagacgccggacttgtcgtacacagccatgagggcaccgtcctcgggaagctgggggctctgcgagggggcggggctcagacacgggtggggtcaccgggagcgcccctccccacgggccacagggctcgtcctacctggaggaggatgtaggtgcaggtgccgtggaagcggtagggcctggcgtcaaatgtggtaacaaaggagccaccttccagggagcagtgtccggggcacggccgctccgtgcacacccagcggcccagggtgcaccggctgtgggtgggcgtgggggtagcggcatggtgggcagggccgctggagccagacagcacacccctgcctgccctaggccagtggaacccctgccggccggccagagccccctccggcgcctcactcaccag

SEQ ID NO: 340906 - DNA, 332 bp, Homo sapiens
  chr11:1082528-1082860
  hypo
cgccgggccacactctgcctccctgcctcactgcccgtccaccttgctctgtcgcccagaggtgcaaatatgacacgtgtaactgtcagaacaatgaggactgcctgtgcgccgccctgtcctcctacgcgcgcgcctgcaccgccaagggcgtcatgctgtggggctggcgggagcatgtctgcagtgagtgccgtccccgtgggctgcatcctggggatggggtccgggctttgagctcctgggacggggctgggggccctgagcacgggtggtccagggagaggggtcggccccctgcagccacggaccaggctccagcttcgtcagcc

SEQ ID NO: 340907 - DNA, 228 bp, Homo sapiens
  chr11:1095394-1095622
  hypo
cgcagcatgtccgggcagctgaggccccaggcaccacttcctgctggtcgtctgagggccgaggcctccagcaacccttgggtgcagggtctgccgagccctccacattttcaccgtgccccgctgtgcctggcgaggtggctggctgcagtgaggtccgtggaagccacttcggcctccagcctcccggctcagcacccgcccctcctgagcgcagaccaccccatc

SEQ ID NO: 340908 - DNA, 1051 bp, Homo sapiens
  chr11:1103476-1104527
  hypo
cgcccacggcatcgtgggaaggtgctctcatccccaggaatgtccgggggtcccgggctcattctcctttccctctagggctccatcacattcatgcccaatggatgctgcaagacctgtgagtacagggcacagcctggggggtaggcagggtgggggcacaagggctggtgccctcagccccgcctggggtggctggaggctggacaacggcctctgggtgggcagtgagggctgggggctgaggccgagcctggggaggggacgcagcgagggagagcctcctcgaagatgtggaggccctgccctaagccgctgcccgctctccccaggcacccctcgcaatgagaccagggtgccctgctccaccgtccccgtcaccacggaggtttcgtacgccggctgcaccaagaccgtcctcatgaatcattgctccgggtcctgcgggacatttgtcatgtgagtcccaggctgggagtgtgcctggagggggtggtggagaccccagggaggcgagaggccagcgctggccccggaaggtcacccctcactccgccctccccccaggtactcggccaaggcccaggccctggaccacagctgctcctgctgcaaagaggagaaaaccagccagcgtgaggtggtcctgagctgccccaatggcggctcgctgacacacacctacacccacatcgagagctgccagtgccaggacaccgtctgcgggctccccaccggcacctcccgccgggcccggcgctcccctaggcatctggggagcgggtgagcggggtgggcacagcccccttcactgccctcgacagctttacctcccccggaccctctgagcctcctaagctcggcttcctctcttcagatatttattgtctgagtctttgttcagtccttgctttccaataataaactcagggggacatgctgtactgtgtggtttaggttggtgctgcaggggtgcggcttggccactgtgcatggcggaggccaccaggctctgcgtgcaggacacgggggcaccacacacacgccacgc

SEQ ID NO: 340909 - DNA, 874 bp, Homo sapiens
  chr11:1215132-1216006
  hypo
cgctccagccttgtcaagcgcccgctggatggagctctgtgcggacgctggccacgtgtgttctgatgacgtgagggtcttgtgcgccctgtgagatgagacggtggggggtcagggacagatgtgacctgttgggaggaaagccccagggccatggtgccaccacccgagccacccgtaaggctgcccctggggcctggcaggtgtgtgcagcggctggggtgacccccactacatcaccttcgacggcacctactacaccttcctggacaactgcacgtacgtgctggtgcagcagattgtgcccgtgtatggccacttccgcgtgctcgtcgacaactacttctgcggtgcggaggacgggctctcctgcccgaggtccatcatcctggagtaccaccaggaccgcgtggtgctgacccgcaagccagtccacggggtgatgacaaacgaggtgggggcgcgcccggtgtgccgcggagggggtgggggacgcggctttcccggcaagagcctgagcagcggctgaccgcccgcccgcctgccttctgacttcccgtcgaccacgccctgcgtccagatcatcttcaacaacaaggtggtcagccccggcttccggaaaaacggcatcgtggtctcgcgcatcggcgtcaagatgtacgcgaccatcccggagctgggagtccaggtcatgttctccggcctcatcttctccgtggaggtgcccttcagcaagtttgccaacaacaccgagggccagtgcggtgaggccacagggctcccgggcatcgtctggcattcgcgggggcgggggtgccgggcaggggcgaggccaccacgtgccgcgtgtgccggtgtctctgctttctggctg

SEQ ID NO: 340910 - DNA, 228 bp, Homo sapiens
  chr11:1228795-1229023
  hypo
gctcaggaagccaccggtagctccactgagaccagcctcctctcccggggcgtctcagctgtccccggggccacgtccccccctcacttgggtctccacagcagcgccggccgagctggtttgcagactctgcctctggagaatcgtgggcggtggctcctgtttgcctacgtgtgtgctgcatggacagagctgcaaggccccgggcgaacatgcaggcagacggac

SEQ ID NO: 340911 - DNA, 219 bp, Homo sapiens
  chr11:1254274-1254493
  hypo
cgctacgcctacgtggtggatgcctgccagcccacttgccgcggcctgagtgaggccgacgtcacctgcagcgtttccttcgtgcctgtggacggctgcacctgccccgcgggcaccttcctcaatgacgcgggcgcctgtgtgcccgcccaggagtgcccctgctacgctcacggcaccgtgctggctcctggagaggtggtgcacgacgagggcgcc

SEQ ID NO: 340912 - DNA, 1389 bp, Homo sapiens
  chr11:1262498-1263887
  hypo
cgaaaagaccaccctatgggtgaccccgagcatccggtcgacggcggccctcacctcgcagactgggtccagctcaggccccgtgacggtcaccccctcggccccaggtaccaccacctgccagccccggtgtcagtggacagagtggtttgatgaggactaccccaagtctgaacaacttggaggggacgttgagtcctacgataagatcagggccgctggagggcacttatgccagcagcctaaggacatagagtgccaggccgagagcttccccaactggaccctggcacaggtggggcagaaggtgcactgtgacgtccacttcggcctggtgtgcaggaactgggagcaggagggcgtcttcaagatgtgctacaactacaggatccgggtcctctgctgcagtgacgaccactgcaggggacgtgccacaaccccgccaccgaccacagagctggagacggccaccaccaccaccacccaggccctgttctcaacgccgcagcctacgagtagcccggggctgaccagggctcccccggccagcaccacagcagtccccaccctctcagaaggactgacatcccccagatacacaagcacccttggtacagccaccacgggaggccccacgacgcctgcaggctccacagaacccactgtcccaggggtggccacatccacccttccaacacgctcagcccttccagggacgacggggagcttgggcacatggcgcccctcacagccacccacgctggccccaacaacaatggcaacctccagagctcgcccgacaggcacagccagcaccgcttccaaagagccgctgaccacgagcctggcgccaacactcacgagcgagctgtccacctctcaggccgagaccagcacgcccaggacagagacgacaatgagccccttgactaacaccaccaccagccagggcacgacccgctgtcaaccgaagtgtgagtggacagagtggtttgacgtggacttcccaacctcaggggttgcaggcggggacatggaaacttttgaaaacatcagggctgctgggggcaagatgtgctgggcaccaaagagcatagagtgccgggcggagaactaccccgaggtaagcatcgaccaggtcgggcaggtgctgacctgcagcctggagacggggctgacctgcaagaacgaagaccagacaggcaggttcaacatgtgcttcaactacaacgtgcgtgtgctttgctgtgacgactacagccactgccccagtaccccagccaccagctccacggccacgccctcctcaactccggggacgacctggatcctcacaaagccgaccacaacagccactacgactgcgtccactggatccacggccacccc

SEQ ID NO: 340913 - DNA, 99 bp, Homo sapiens; identical to SEQ ID NO: 262959
  chr11:1274056-1274155
  hypo

SEQ ID NO: 340914 - DNA, 973 bp, Homo sapiens
  chr11:1275538-1276511
  hypo
cgtcctcactgtcaccatggtgcatgggaaggaggagggcctggtgagtccaggctgcgggtggcacagtgttggcccagtcccaaccgcacctgggcaggccgactgcaggccggggtgacccaggtgccgcagcgatggcccagtgcccaagacagctcccagggggcagggaaggcctgtggagccgcctaaggccgagcgcaccctgtggcctaaatgcagccagctggagactccaggcccccagggaagatctgggctttggggtgggggatacacaggggggtctctgcacatggaggcagagccccaaagagaagccctgctccccgagcccacctggcactgcctcccagctcagggttcccctggattcccccagatcctgtttgaccaaattccggtgagcagcggtttcagcaagaacggcgtgcttgtgtctgtgctggggaccaccaccatgcgtgtggacattcctgccctgggcgtgagcgtcaccttcaatggccaagtcttccaggcccggctgccctacagcctcttccacaacaacaccgagggccagtgcggtgagtgggcggcgggtcctgccccggccagggctgctgctgggcctgacaacccagtgagcataggggaagcctggggaggggaatgagtgggggaggggggtgggggctgtgaaaggctccccagattccagccccgcggtgacgcccccactcccaggcacctgcaccaacaaccagagggacgactgtctccagcgggacggaaccactgccgccagttgcaaggacatggccaagacgtggctggtccccgacagcagaaaggatggctgctgggccccgactggcacaccccccactgccagccccgcagccccggtgtctagcacacccacccccaccccatgcccaccacagccgctctgtgatctgatgctgagccagtgagtcctcccctc

SEQ ID NO: 340915 - DNA, 86 bp, Homo sapiens
  chr11:1301051-1301137
  hypo
gcatggtaagtcccggccgccggtgggcaggggagcatcagccctgctcaggctgaaggcatgtggccctgggctccagacgtctc

SEQ ID NO: 340916 - DNA, 1317 bp, Homo sapiens; identical to SEQ ID NO: 334152
  chr11:1410711-1412028
  hypo

SEQ ID NO: 340917 - DNA, 301 bp, Homo sapiens
  chr11:1446149-1446450
  hypo
cgggaggggtgttctccccgcctccatgggcaaagaatctggggcccttgtcagagaccgcggggtcagtgggattggcgcccaggccctgctgtgacgccacgtgtttcccactcagcgaggctgttcctgccaggcgtggggactcggaccctggtcctgagtgctgccccgaggcccgtgatgggaagcctgacgtctgcatcgtcctgcgctgcgtggccggtcggtcccggcgctctcagcacttggagtctcagctccccgggtcatcagtccaagccactcagcaggtggcttc

SEQ ID NO: 340918 - DNA, 651 bp, Homo sapiens; identical to SEQ ID NO: 262982
  chr11:1464364-1465015
  hypo

SEQ ID NO: 340919 - DNA, 875 bp, Homo sapiens
  chr11:1466357-1467232
  hypo
gcctgcgctgggtgcggggtgcgggcaggacgcaggaggcctccccgggctgggcacagggagagtggcaggatgaagggccccaggtgagggcgggcgtcccaccctcgcagccgcccaggcccggccggagctgatgagcgggtggcccgtcctgtgtccacagagggggcaagaatgagcccgaaccagagcagcccattcctcgcaaggtgcagatccgctcgctgcccagcctggaggacatcgaccccgacgtgctggacagcatgcactcactgggctgcttccgagaccgcaacaagctgctgcaggacctgctgtccgaggagtgcgtctggggctgctcccgggtggggcacggggcctgaggtgggagcgctgccccggaggagccggcggccccgtgtgccagcgcgtctcgcgcctctcgcccgctgtagggagaaccaggagaagatgatttacttcctcctcctggaccggaaagaaaggtacccgagccaggaggatgaggacctgcccccccggaacgagataggtatgggtccaggggtggcctccagcccggcctgcactgccccaccggggtccgggggctgtctggcctgaccttcgtctgtactcagaccctccccggaagcgtgtggactccccgatgctgaaccggcacggcaagcggcggccagaacgcaaatccatggaggtgctcagcgtgacggacggcggctccccggtgcctgcgcggcgggccattgagatggcccagcacggccagaggtgtgtgtgccccgaggctgctgggcctccctccctgggccctggctgcgcggcactgccgcctggctcatcgctacccattggcctggggtctc

SEQ ID NO: 340920 - DNA, 195 bp, Homo sapiens
  chr11:1471369-1471564
  hypo
gtgccgtgtgcatgcgggggactggggtgcatgtgccgcgcggctgcccccaccccgctcgctccctgcgcctccccgtagcctattaggaagcttgtcctgcccccaccgccccccgagccgcccttcgtggcccgccccctggccacctccacggagcccgaagcttgtgggagcgcctcgaggcctggacac

SEQ ID NO: 340921 - DNA, 762 bp, Homo sapiens
  chr11:1477651-1478413
  hypo
cgtgttccagaagccggtcaagttccaggttgatatcacctacacggagggtggggaggcgcagaaggagaacggcatctactccgtcaccttcaccctgctctcaggtgagctggcgcccccagggcggctccgggcccaggcccgtccagggcataaccccctgtctcccctaggccccagccgtcgcttcaagagggtggtggagaccatccaggcccagctgctgagcacacacgacccgcctgcggcccagcacttgtcaggtgaggcgggctcagctccggccaacctgcggcctgcgagtggggcgtggccagctggtgctgcgcggacgggaggcgtgaggacccgggcgcagcctcctggcccctcttgacggacgcccccacctccctgccccgagctgtggctgcacccctcagggagcagagcccctccctggcctggcgggaccacccgcctcgcctctgcacgccagggacatagggcgcagccgcaccacactgaaaggcgcctcttgtccaccgtagaaccccccccaccagcgccaggactaagctggggtgctgggcttaagggccagaaggtggccaccagctacgagagtagcctctgacgctggcaggtaaggcgcccggcctgtgctggggcggggaggggctgcgggcaggtcctcggcggagccaggctggccctgagcagggccctccatgcccacccacaggtctcggccctggacaggccaagcatgccccgggc

SEQ ID NO: 340922 - DNA, 225 bp, Homo sapiens
  chr11:1521173-1521398
  hypo
cacacgaatgttcacggcagctgcaagtgtgctggtcagaaaggagagaacctgcacacccaccatggggaggtgacacagtgcggcctcagcatccacggaccgcgcctcagccacagacaggagtggcctgggagacacgcggaacacggaagactcctacagcaagtgtgctgagtgacggaggccaggtgaacatcaggttcacactgtgattccgttcac

SEQ ID NO: 340923 - DNA, 836 bp, Homo sapiens
  chr11:1535842-1536678
  hypo
cgggagcacccagggaacacaagtgcaccatgacgcggagcccttcatcaccgcaggccacggcgcttgtccttcccagaggcccccaaccacagctgctgagcgacacccacaccgcttctctcttcacacagcggactgatgaggagtcccgccaagcaggagctctgagccacagcacagagtgtgctggcccaagtccacgcctgcatgcaagctcagccatgcgtctaatggcaataaccgtggaatgagctcgtgaggttcggagagtcccaccccgacggggagagccacagggagccccaatctcggcagtgaccggctccaggtccccacgtaccgtgagagtggggacagcggtggacagcagcccttgagcagggcacaaccttcagagagacctcgacaagtgaacacttaaaccaaggtcgaccctgggggaaacgcagacctcctcccagtgcccccttcagaaaaggtactcaaacactggctcccatcatgagctgggcacggaaccaggcatgggtactacctgcctccagggcttggagctcgggaggggaaccaatcccgggccctcgacctgggaggtgccagaaggccctcacacaagactccagcactagggtggggaggttaaagtaaacaggacagaggggttcaactaagacaatacctttgctcacggtcagaggcgaaggcactgatgccagccggcgccgactcaggtgagcacacaagctctcccgccgcggctgcaccacatgcctgataaagggacagccctggatgtctagttcctcaggcacgtgtgcacacatgtgtgctgc

SEQ ID NO: 340924 - DNA, 167 bp, Homo sapiens
  chr11:1552182-1552349
  hypo
cggccaagccggaggctgctgagccatgcccaagatcagagacgcacgcgtctggagcagcgcctgacacctgaccctggtggctgaccatgcggcctgcctggcagtcctgggcatgggatgcacacccgcaccctggcccacccaggggcagaagaggggaccac

SEQ ID NO: 340925 - DNA, 189 bp, Homo sapiens
  chr11:1795707-1795896
  hypo
cggcgcccaggaagggatgcgaatgtacatggactacccgtgcaaatgcttatggtgaaatgttctgtgtcaacttggctgggccacagtatccagatatttgcaaacgctagtctagatgtttccgtgaaggtgtttttcagaggtgattctcattcccatttaaatccgtagactttgagtaaagcc

SEQ ID NO: 340926 - DNA, 150 bp, Homo sapiens
  chr11:1800836-1800986
  hypo
cgtgggacatgctatagcccctcactcgctcaccccactgagtttgcagggactgcgcccctctctgggcgacacctaacacgggagagtgcaagctgggcagacggaaagggggttctcggggtccgtggctccccctgctccttgtgc

SEQ ID NO: 340927 - DNA, 104 bp, Homo sapiens
  chr11:1824188-1824292
  hypo
tggaaggtggatggcgaggccgggatggagccgctgatccacgcagagtatttgcgctcgggaggagcaatgacgttgatcttcatcgtgccaggcgccagggc

SEQ ID NO: 340928 - DNA, 400 bp, Homo sapiens
  chr11:1824649-1825049
  hypo
cgccgtggccacctcctgcttgaagtccagggcaacatagcacagcttctccttaatgtcacacgtgatcgcccgctcggccgtggtggtgaagccgtagccatgcgcagtgagatctttgtgaggtagtcagtctggtcccggccagccgggtccagacacaggatggcatgggggagggtgtagccctcatagatggacactgtgcaggtgaccccgtcgctggagttcatcatgatgccagtggtatggccaggagtgtacttggacagcacggcctggatggccacgtacatggccgaggtgttgaaggtctcaaacatgatctgggtcatcttctttctattggctttggggctcgggaggcctcggtcagcagcaccgggtgctcccgcagctc

SEQ ID NO: 340929 - DNA, 115 bp, Homo sapiens
  chr11:1825144-1825259
  hypo
cgctctgggcctcgccacccacatagaagtccttctgacccatgcccaccgtcatgccctggtgtctggggcaccccacgatggaggggaagacggcccagggggcatcgtcgtc

SEQ ID NO: 340930 - DNA, 128 bp, Homo sapiens
  chr11:1845553-1845681
  hypo
cggggctgacgtggagagagcgagtacgtgtgtgcgtgggtgagtgtgcacgtgcattgtgtgcacaggtgcgtagcagtgtgcccgtgcctggcgtgtgcgtgtgtgtgaggctgtgtgggtcaagc

SEQ ID NO: 340931 - DNA, 109 bp, Homo sapiens; identical to SEQ ID NO: 263024
  chr11:1868082-1868191
  hypo

SEQ ID NO: 340932 - DNA, 47 bp, Homo sapiens
  chr11:1919487-1919534
  hypo
cgagtctcgctccgtcggctggagtgcagcggcgccagccatgtctc

SEQ ID NO: 340933 - DNA, 813 bp, Homo sapiens
  chr11:1957569-1958382
  hypo
cgctcaggatgctggcggcagggggcctggagccttcctcctgcccccgctctcccctcgtgcctgcagccgggggcttcccagtggccgctgccctgttggcaagcgaggaagggcccccaccttcccaggagctccgcctcaagccagcagcggccacagagtgcccctgggcacaggcacgagggcgggagcggctggcccaggagcagcagggccgttcggagctctgagctcagcggctgaagggagctggagctgagaaggaggggtccgcaggcctcacctgcaacccctccccagccccatccgtgctccgtaccccccgccccacatcctgccgcaggctgaaggtaagtggccagctacgggctgctgtgtgtggcagtccaggccagtacaggctggcgagagtaagtccaggcatgagcccaggggccacgggacggtgtccccctgcacaaggagccaggagacagtaagggagccgaggagccctcatgggggcccagcagccctgggtcgcgcagcccagcccaccctgcggtggagacaggccttcacccagtacacgcaggcctggccctcgggtcgtcgcagtgagtcactcatgttgttcacagatcaccacgctcaggagccgcattgaccaggcccagaagcagtgagtagccctgccgtcctcgctccgcactgggcacaggggcccttggggccagccgctgtagccagtccctaacaagggccggtggtggctggcctcggcagggcagtaacgagactaacccggccaggccacccaggccagcatgc

SEQ ID NO: 340934 - DNA, 253 bp, Homo sapiens; identical to SEQ ID NO: 263033
  chr11:1958920-1959173
  hypo

SEQ ID NO: 340935 - DNA, 101 bp, Homo sapiens; identical to SEQ ID NO: 263036
  chr11:1975932-1976033
  hypo

SEQ ID NO: 340936 - DNA, 282 bp, Homo sapiens
  chr11:2026733-2027015
  hypo
cgggtacggcacgtcacctggatagggacacgggtacggcacgtcacccgggtgggacacgggtacggcacgtcacccgggtgggacacgggtacggcacgtcacccgggtgggacacgggtacggcacgtcacccgggtgggacacgggtacggcacgtcacccgggtgggacacgggtacggcacgtcacccgggtgggacacgggtacggcacgtcacccgggtgggacacgggtacggcacgtcacctggatagggacacgggtacggcacatcatgc

SEQ ID NO: 340937 - DNA, 157 bp, Homo sapiens
  chr11:2108016-2108173
  hypo
cgaggaatgcacgtcagaaccagtaggacagctgccatcccaaagccagaccacggcaagcgctgggcgtgggggagtcggagctgcctgtgctgctggggatgggccgtggtgccaacgctatggggccgtgggctcctcacacatgtaaacctac

SEQ ID NO: 340938 - DNA, 331 bp, Homo sapiens
  chr11:2117541-2117872
  hypo
cgtgcacacagggaccacgcacgtgcacccatgtacacacgcacctgcacacatgcacatacatgcttgcacatacgtacgcacgccagcatgcacatcacacacagggcctcagggtaaccttttccccagtcccggctgtgatattgcgaaaggagctcagggtggggggcgggctgctgggtccaggcccccaccgtcctgcctagcagtcatttggtttctctttgcctcagtttccctttctctgcccctcacacctcccaaagtcctttggagaatccgtgagatgggggggtgacaggccctgtatgtcagcacacacagccac

SEQ ID NO: 340939 - DNA, 135 bp, Homo sapiens
  chr11:2122400-2122535
  hypo
aagggaggaagacccggggcctccagacacagtgtaccagaggagaacccttcccatccagcatggccaagcgggacccgtgtggcacttgaagctgggtccctggactcaccaccttccctcactggacccctc

SEQ ID NO: 340940 - DNA, 450 bp, Homo sapiens
  chr11:2124971-2125421
  hypo
cgagggccgtcctgtgcgtgctccactccaaatcccatctgctcccacactgctggcccagggaaaatctgggtagtgacagtggccgtccctcacgccctccatggccaggtgccagtagcgtgttccacaagcatcaccttcgaaaccctgaaggagtcaggactgtcgctgttccagacaaggagactgaggatgagtctccattaagtggctttcccgcagacacacagtaagtggcacaagagtcaggagtttgagcccgggtcagcccagctccagccatggtcgcaggggctgcctgcaacccctgacgaggggcaccccggggaggcctggacccagcacctgcagcccaacctgggcagaggctgatccagcagctaggaagggcatgggtccaggagatggcagagcagggaacagagcgctgccgctcagggtactccc

SEQ ID NO: 340941 - DNA, 387 bp, Homo sapiens
  chr11:2209823-2210210
  hypo
cgtaaaaaggcaactcccagaacaggagaaaatgccgcaaatcacacacctgatcggggagtagtacccggaacccacagagaacccctaaaacacaaccgccaaacaccagattcaaaagtgggcgaaggacgtagacgggcgcctctccagggaaggtgtatccaggacagcagccgcagggaaaggtgctcaatgccacgaatcattagggcaatgccaatcaaaatcacggcgcgacaggattccacacccgttagggtggccaccgtcaacaaacccaaacaatgcagaacacaaaatagcaagtgctcacgagaatgtggagaaatcagagcccctgcggtgggtcgtgccgcagggcagccgctgcggacagcaccctgg

SEQ ID NO: 340942 - DNA, 58 bp, Homo sapiens
  chr11:2225630-2225688
  hypo
cgtccctagcctggcggcaggtgctctgggccctctccctgggactatctgcctggac

SEQ ID NO: 340943 - DNA, 155 bp, Homo sapiens
  chr11:2236833-2236988
  hypo
cgggggaccgggacgggtgctggagggtacatgagggaggactgggacaggcgctgcgggggtaggtgagaggggacccggaaggccgctggggagtaggtgaaggggactgggacgggtgctgggggggtaggtgaggggggaccgggacgggc

SEQ ID NO: 340944 - DNA, 920 bp, Homo sapiens
  chr11:2278017-2278937
  hypo
cgtgtgcgtttctgcgtgtgtgtgtgtgtgtgtgtccatgcatgtgtctctatgaatatatgtgctgtatttgcatgtgtgtgtgtgtctatgtgtgcatatgtctgtgtctgtgtgtctttctgtgtgtgcggtctgtgtctgtgggtctacacgtgtatatgtgcatgtgtctgtgtgtgtcgcagtgtgttactgtgtctgcgcgtgtgtgcatgcatatgtgcaggagggagggagggctcaggccttagcagagtccctggggctctgggagtggagggcagtgaggctgaggctggtgcaaaggtggtttcaggcgctcaggtgaagtggagcagaaacagaagttggaatccagccccagcgggcgggcggcagcagcagtgccggccctgcccagaacaggttcgacctgagccggcactgcccggctgccctggggctagggaggctgagacagagaagggaagccagagggtgggggtgggggcccggcactggcagagctgcctgccctcaacgaccgcccctgccggagacccccgccccacccgctgtggttctgctggcccaggtttcgctgggcccactcccagggtttggcatcactggagcccagggtcccccccgcaccctccccacagccttggccctgctgctgcctgcctcctccagggtaccccgaggcccacgtcaggagacccgcctcaggcagcagtggcccggtggctgcttctgcctagcccgcagcacgtgccaccctgggcgcactgccttcccgaaggctctcctccctccccggggcgctccctcccactctggaatgcctccctgcctgcacagcaggagtgtttggctgaggtctgcagccccgacacaggtcacctcccacgcctatgggggcttcagaaagtccc

SEQ ID NO: 340945 - DNA, 1868 bp, Homo sapiens; identical to SEQ ID NO: 334153
  chr11:2290847-2292715
  hypo

SEQ ID NO: 340946 - DNA, 336 bp, Homo sapiens
  chr11:2334660-2334996
  hypo
cggccattgtgtgaaggccccatcgttgatgttgggaagcactgtgactggctgcccagggacccaggttccgctttggggagatccacctgctacaaggagggcagtgctgggacgtcactcagcactaagggcccactagcgtttgggatgtcgtggggagggggctgtgtccccggatctcccaccagggccaggacctccctgtggtctctcggtgcaggtggaggacgccatgctggacacctacgacctggtatatgagcaggcgatgaaaggtacgtcccacgtccggcggcaggagctggcggccatccaggacgtggtgagcgtggg

SEQ ID NO: 340947 - DNA, 376 bp, Homo sapiens
  chr11:2337176-2337552
  hypo
tggcccaacatggacgctcaggacagctgggagacggcaccggccgggcccagggcagtgccagagtgcccacagaggccagccctgtcccactgggcttcacctgctcgtgctgcctttccctagagccctgggggcttcctaggaatgtgccgcacccgccgccctgctgccctggcattggcctaggtgggcgctgcagctccatggccccacagaggccgcttgtccaggcagggagggccgctcagggcgggtaccatgcctgctgccctctcacaggactgccttcagggcatccggagcttcctgaggacacaccagcaggtcgcctccagcctgaccagcatcggcctggccctcacggtaccctctc

SEQ ID NO: 340948 - DNA, 174 bp, Homo sapiens
  chr11:2362566-2362740
  hypo
cggttaaaacggattaaatatcccgttcgcactttaagcaaaagtgaccattaagcttgtgggcgcggtaggccagaggctcaggatgcctcctttccactgggacggtcctcaaatcaagcggacatggagtgcgtggtagctcttttcgaagattccaccacctggaataac

SEQ ID NO: 340949 - DNA, 1041 bp, Homo sapiens; identical to SEQ ID NO: 334154
  chr11:2398759-2399800
  hypo

SEQ ID NO: 340950 - DNA, 558 bp, Homo sapiens
  chr11:2412921-2413479
  hypo
cggggccgtggtgccctcacaggtggtgtcaggaaggacgggaaaggctgcttgtcccaggggctcatgtggagaccaccccctgcacgcagctggggcgctcctgcctgtgtcctcagaagcactcggcttagctttgcccatgtgcctgggctgtgggtggcagagcccggccagcatcctccgatctccaagggtgcatctctactggaggcccctcctgggcctcttgctccccgcttcccagatcattaggatatttggggtccagaagggcctcccagccatcctgggccttgtcctccggggccaccagtccagccagtgacaaccacagcatccccggcctggaacgaggctgcccccagcacgttcctcgtactcctgtccagggacaggaggggctgcccctgccaccgagtccccttctccaggacctggggcctgtgggtgtgaggcaggtgttcttggaaggggtcactctccaggcacccggcggccaaggcttgtggctggagcagctcccgctgtggggtcggcgtcgggccccgtgtggcc

SEQ ID NO: 340951 - DNA, 1463 bp, Homo sapiens
  chr11:2435284-2436747
  hypo
actcacctgaacgccgtcgtgggcaaagaaggccttggcgtcagcctcggtggccaggtgcaggcaggtggtcttgctccagcagcggttccggcgcaccagcagggcgaaggcgcgggcctcactgttgctgtagcactcggagaagaggtctgcccccggaggccctggccgctaggacgagacgccgatgcccggcccggcccccgacgcccctcctccatcccctgcccagacctgggctctgcagccgcaccctgcgttcaacacgcagggcccagccaggccttctgccccctccggcctgctccgggcccttcctgaacctccgtccttctccggctctgtccctcccccagcaggacaaagggaacctctgccacgctaaatgtccctcgtcctgcggcagggcccagtgtatgcccggggtgtgaggctgtatcgtcctcaccacgtgcacagcggtcccacactcagggtctggggccgcctccaccccaggcagagccgtctgtcctctcctatggaggaggcccctgagggcacctggagccccacggcggtaacaggcagccctggcgaggcccaggacccttcgtccgacccctccgtcacatcctcccccgcgcgcgggcccggccccagccgccggtcactcaccaagggccagccgctcgtatttcgcctcgcgcgtggctcgggccgcctcggcctccgtctccaggtgcgacatctctttgaggattttgcaggcggccagtgcggctgccacaccttcctggccctacgagacctggtctcaggaggccgcccctcccctgcccccgcgctgggcccgcggcctgggctcaccatggcccagaagtaggtggccatctcgtggcggttctgcagcacggcccacaggaacaggtcccgccaggggttctcgctcttctggttcaggtccagcagccacttctggcccgtgggccgcttggccgggcccttctcctggaggacacgggcgtcggcctcctgctgcggccccagcctcgccctccatccccacggagcccccgctcaccgccctcctgcggtcccctggccggccgtcctggtagaagcctcggcaggcgtcctgcaggaagtccttgagtacgcgggagacctcgtgcagggagaaggccggtggccccgcgggtggctcccgggcctgctgggtgcccaggccggccagcgtcagccgggcctcctcctgcttccgctgcagcaggtcgaagagcaggctcttgcgtgacacggagcggtagagctcctgcagccgcccatacgtcaggaagtcggccacgtctgcgccgttgtccacaaagaggcgcacaaactcgggcttgttgctgaccagggcgtccaccatcacctcctccaggtcacaggacttggcggccatgggcacccgagggaagggggacaagagagtgagc

SEQ ID NO: 340952 - DNA, 312 bp, Homo sapiens
  chr11:2569208-2569520
  hypo
cggtgggggatgaggtcagggaggtggcaggacctggcgtgtgagggcttggggcgactctggggagttagggtttcgctctgcatgacaggagcctggggcctggcatggtgtgactcagacttaacgccgcccctctgactggtagaggccaggcccaggataaggtggcggcaggcaggtctctaagcagtggcagctcagacccgaggtcccagggtcatgcgtgtttgtcctgattgcacgagtcgtgtgagcacagaaacgtaggtggaaagatggtggcttcgtccagggaggtagactgggaac

SEQ ID NO: 340953 - DNA, 196 bp, Homo sapiens
  chr11:2753765-2753961
  hypo
cgggcagtgaggagcgcaggcgaatgttacagcaggcgcgagcgaaggggcccgaggcaccggtgcttccgacggggcccgagggccgtctgacctttccggccacggggcagcagttgcgtgagcaggaacaatcgccccagtgtgcaaggcacaagcggccttttcttcctcaccgggccggcgcacacagctc

SEQ ID NO: 340954 - DNA, 154 bp, Homo sapiens
  chr11:2782417-2782571
  hypo
cggctcagcagcctgggctctcctgcgtccaccccagccaaacccttcatcgttcctccggtcaatggtctgccggcctgtcggtgcctgttggtgcctgtcggtgtgctcctacgctggtgtgttcctctcgacctaccctcaacgtccagcc

SEQ ID NO: 340955 - DNA, 55 bp, Homo sapiens
  chr11:2987095-2987150
  hypo
cgtgtctgagatccaacttgcgggcaccatggaagagtgggcatcatggaagagc

SEQ ID NO: 340956 - DNA, 130 bp, Homo sapiens
  chr11:3035029-3035159
  hypo
cggagattgcgctactgcactccagctgtggaaagaagagtttttgttcgctgagagctgctcacactcctatatccataactgaataatagctcagcggccacgacacagggcagggactggcatgggc

SEQ ID NO: 340957 - DNA, 316 bp, Homo sapiens
  chr11:3110964-3111280
  hypo
atgacaaccccagccgcggcctcctggcctccccacctcccgccctagctctaccaggtctctcgcactctctgacccggagtctggatggacaccctgagtgtggcccacctgtgcagctcctgctgggcctctcggatggagaggatggcctcgtgcagggcctgcagccgccgcgcctccttcctgcaccgagggcatgggctctcaccgcctgggacggccccgagtgagacaaaggaggggaggggaggagtgaggatgagctggaggtccagtggggctggcacgtgggtcacagggtcatatccagctc

SEQ ID NO: 340958 - DNA, 140 bp, Homo sapiens
  chr11:3128538-3128678
  hypo
cgcaccggggccccaggggtctctgactggtcgctgccactctccgtcttccggctatggtcctgggtctcggtatctgactcctcagggttctctctctccgacttgtctgagaatgcatcgttctccagggaagaccc

SEQ ID NO: 340959 - DNA, 253 bp, Homo sapiens
  chr11:3145131-3145384
  hypo
cgttccacggactggcggtcctggcagcactgggcaccaggcttggccttaggcactgaggttagaaagtaaagatgccagtgtcctgctctttcagggagaggcagaccagccaccagcacgcagaggcgggaggagccaggggtcaggtgagcgctgcggttctgcgttctgtgcatggatgtaagcacgttagatcccacagctcaggtcatcgttgttattctcagcattgtacagaggaagagcctac

SEQ ID NO: 340960 - DNA, 311 bp, Homo sapiens; identical to SEQ ID NO: 263155
  chr11:3164463-3164774
  hypo

SEQ ID NO: 340961 - DNA, 69 bp, Homo sapiens; identical to SEQ ID NO: 263156
  chr11:3164804-3164873
  hypo

SEQ ID NO: 340962 - DNA, 149 bp, Homo sapiens
  chr11:3169724-3169873
  hypo
cggaggtgagtgcggagtctctttccagcggctgtccaggtggaggagacggggcgctgtctggaaccggcttccatgacggcagggcgggggcaccgtcctctgcacttttgtacatctttgacattttctatcatacgaagccaaac

SEQ ID NO: 340963 - DNA, 750 bp, Homo sapiens; identical to SEQ ID NO: 334159
  chr11:3186017-3186767
  hypo

SEQ ID NO: 340964 - DNA, 716 bp, Homo sapiens
  chr11:3243313-3244029
  hypo
cgcacagagggagaccggctgcctgggtccctcctggctgcctcaccatcaggggcgggatgaggagctcagcctcagccacagtgcgcaaggtgaagagttttgatccctcgtacatcctcgagccaggcagggcgcccggcttctatcccaggtagcagagtctcctatcccaggtctccgacggcgaccgcaaccctttgcccgtggaggacttcccctgtctaagggccattgggagtgggatggcctaatttctggggtcgctttctattgggcacttcaaacagtgctgggcaagggcagtcgtttgaggcagcttggagtgaagttcttagggaggaggtcctgcgcagctcggccagccccggtcaggcccaggcagccaccaaccctggtttctccatcacccctgacccctcccacagccccttctcgtgtttgcccaccgtctaggccatgcttccactttctcacctggctgggtatcccctatggggcacgggtgtcggccccgccgaggctgggctttggtctgtcttgttctctctgggaggggtctggtgcgggtggaatacgtggagggagcctccgtggggggagcaactgctcccggtgttgcaaggaggacagagccaatgcccgccccatcgtgtcatggccgacggtggcctcagaagatgtgtccacgtccccagtcgctggaagctgtgcac

SEQ ID NO: 340965 - DNA, 232 bp, Homo sapiens
  chr11:3249619-3249851
  hypo
cgtgggcggcggcacgagtaccaggctgggaagagggcggccaggcactgctccacgctgacggccgccaggagactcaggcccacgatgtagcagaagaagcgcagcgttgccaggctggtctgcacgaagcccgggaagtccagccggccttgcagcaagtcggggacgatggccaccatgtggcagccaaggaagatgagatccgcgcaggccacgtccaggaggtaga

SEQ ID NO: 340966 - DNA, 181 bp, Homo sapiens
  chr11:3697413-3697594
  hypo
cgcagataggactgggtaaggctgcgcagttcgtccatggcatagtcctcaggcatgggaagccggccaatgtggggagccaagaggcgcaaagggactcgctgagggtctggtgttgagtcggaggttctatcaggaggatgatgcagactcagcaccacgcgcagcaggttggctacac

SEQ ID NO: 340967 - DNA, 34 bp, Homo sapiens
  chr11:3828816-3828850
  hypo
cgtgagctaccgcgcctggccctcacagggtttt

SEQ ID NO: 340968 - DNA, 318 bp, Homo sapiens
  chr11:3845131-3845449
  hypo
cggtgagctcagccatcggcggggaggtgccccagcgctacgtgtggcgtttctgcatcggcctgcactcggcgcctcgcttcttggtggccttcgcctactggaaccactacctcagctgcacctccccgtgttcctgctatcgcccgctctgccgcctcaacttcggcctcaatgtcgtggagaacctcgcgttgctagtgctcacttatgtctcctcctccgaggacttcagtgggtgcctggatgagggaggagtggggaagtgttccctgaggggacgggcctgcccctaccacattcggaccttcctacttc

SEQ ID NO: 340969 - DNA, 79 bp, Homo sapiens
  chr11:4095798-4095877
  hypo
cgcgatgagatcaaccttgctaagcaggaagcccagcggctgaaggagctgcgggagggtactgagaatgagcggagcc

SEQ ID NO: 340970 - DNA, 155 bp, Homo sapiens
  chr11:5950927-5951082
  hypo
cgcaccgcccacttcctcacgggtccctccttcgccaatcacgccacctcctcctccacctccatcatctcctcctcctccaccactaccctcacctgcccctcccaagtcccctgtggccgcacacacccaggccaggccggcactccttgccc

SEQ ID NO: 340971 - DNA, 534 bp, Homo sapiens; identical to SEQ ID NO: 334161
  chr11:7694738-7695272
  hypo

SEQ ID NO: 340972 - DNA, 1176 bp, Homo sapiens; identical to SEQ ID NO: 334162
  chr11:8040395-8041571
  hypo

SEQ ID NO: 340973 - DNA, 693 bp, Homo sapiens; identical to SEQ ID NO: 334163
  chr11:8190059-8190752
  hypo

SEQ ID NO: 340974 - DNA, 126 bp, Homo sapiens
  chr11:8255472-8255598
  hypo
cgctccttcaggaaaggttttaaagcattacccagtaattactactcacccatgaaaacactgatatttcacaatggatgatgtttgcgccgacacgcacgcctgggcacacactcagatgcatgc

SEQ ID NO: 340975 - DNA, 713 bp, Homo sapiens; identical to SEQ ID NO: 334166
  chr11:8615303-8616016
  hypo

SEQ ID NO: 340976 - DNA, 621 bp, Homo sapiens; identical to SEQ ID NO: 334167
  chr11:9112510-9113131
  hypo

SEQ ID NO: 340977 - DNA, 232 bp, Homo sapiens
  chr11:9405271-9405503
  hypo
cgcgcctggcaggaaggtgtattttaatagggattatgcttttactctgcattaagaggtgatttatatgaagtcccaactaaaatttggatactcaataaaaagccatgatttcagtatttggtaattactaatacgtaatgtgataaaaacctttcacacataaagttcatttaatcttccgtgttattgccttaggataaagtctcataagtggaattactgggtcaga

SEQ ID NO: 340978 - DNA, 68 bp, Homo sapiens
  chr11:9548334-9548402
  hypo
cggcaggctgggagtacaggtgcacgctgccatgcgcagctaatttttgttttttgagacggagtctc

SEQ ID NO: 340979 - DNA, 117 bp, Homo sapiens
  chr11:9552484-9552601
  hypo
cgcccgcccggctgcggtcttgatgtctatctttgtgtgtgttttgtaaatgaagtctcatgcatcaacaaagcatgtgctgggggcttagcgcctgagcttacacacagctccacc

SEQ ID NO: 340980 - DNA, 309 bp, Homo sapiens
  chr11:9554672-9554981
  hypo
tgcccagccaccattctattttctgtctctataaatttgactgttgtaggcgcctcatattatatttgtctttttgtgtctggctttatgtgtacctttaaaagcaagtttttcctgtcttttgaccaagaggttgcgtattttcatttttgcacggagccgcacagattatgtagcctgtcctgctgaggcgtgcgcttctattagcccttctgtttttgctgcagatgtgtgacctgtgttttgggaatatattatctcttgttagattatgggctcctttaagacagctggggatttaaatttccc

SEQ ID NO: 340981 - DNA, 185 bp, Homo sapiens
  chr11:10509608-10509793
  hypo
cgggatcatgtggatttaaagaaaagcctctgatatgctcagatctctgcctctcttctcccaccaaggggatggcagccttgtccggggctcctggcagtctccgcctgcaggggccgcaactgcggtaggagcgaaggttaaatgatcatggccctagcctttccattctcttttgctgaagc

SEQ ID NO: 340982 - DNA, 151 bp, Homo sapiens
  chr11:10519332-10519483
  hypo
cggaaatagctcacactcgtgcgtgcttctgcctggcctggtcagacgccacaacgtgatctcacctaagcctcacaattaccccgttactatcaccattttgttgttaacagtaagcggaattattatgtgcttggtgcgtgttggacac

SEQ ID NO: 340983 - DNA, 350 bp, Homo sapiens
  chr11:11833053-11833403
  hypo
cgctgcggcacctaaagaggccgggcggcccagaggcccgcaagccacgcccccttccaggccccgcctccgtttggccactccccttgctgtcagctcttccaccagttcctgcccctgcccctttcctcccacgcatccgcacccgagcagccccacctgctaagccacgccccctgtcctgtgctgtcctgcactcccaggtgccccacgctttcccaccctcccagtcaaccggcgcagggagcctcatcattattagtgcgtggacaatcacatgtaacaaaatgagctaacgtgcagttatctaccaggtgccaggctctgtcctaagtgttctacacataaac

SEQ ID NO: 340984 - DNA, 83 bp, Homo sapiens
  chr11:11960229-11960312
  hypo
cgtaggcaataagtcgagtttttgttttcgtcatttttaagtgcggcaatgctgcatttagtgtctggtgacactagactagc

SEQ ID NO: 340985 - DNA, 1141 bp, Homo sapiens; identical to SEQ ID NO: 334169
  chr11:12029918-12031059
  hypo

SEQ ID NO: 340986 - DNA, 139 bp, Homo sapiens
  chr11:12073866-12074005
  hypo
cgtaatcacaagggttcttagaagagggaggcaggagagtcagagaaggaggtgcgaggatggacacggggttctaagtgatgtgattcctggcttcttccaagatggaggaagaggccacgacccaaggaaagcaagc

SEQ ID NO: 340987 - DNA, 875 bp, Homo sapiens; identical to SEQ ID NO: 334170
  chr11:12131738-12132613
  hypo

SEQ ID NO: 340988 - DNA, 357 bp, Homo sapiens
  chr11:12182020-12182377
  hypo
cgtgcgctggacatccccaccgcacctcctcacgaatcctgaaccttgaacttgctgtcattccaccactgtcccgctctttccacactcacatccctgtgtgggtatttccatggcctggaatgtccactgcccagtcttctagtaaaataaatctcattcctaaaattgaagctttcttgagatttctctcttgtggcccctctggactcctcgaggctctgttggacaccgcctgctctgggcttccatgcccttggttcatattccacaagcacttgcctgtggtcttgtaatccatctgcccctgtgggcggggcctgagcctacgtattcccggccccttgagtggtgccc

SEQ ID NO: 340989 - DNA, 372 bp, Homo sapiens
  chr11:12183631-12184003
  hypo
cgtttctccagatacttcatgctgttcacctgtgtcctcgccgcaccactgccgcacacgactcctgaaccatgggggaaaacgaggatgagaagcaggcccaggcggggcaggtttttgagaactttgtccaggcatccacgtgcaaaggtaccctccaggccttcaacattctcacacgacacctggacctagaccctctggaccacagaaacttttattccaagctcaagtccaaggtgaccacctggaaagccaaagccctgtggtacaaattggataagcgtggttcccacaaagagtataagcgagggaagtcgtgcacgaacaccaaggtaaggggaaaccctcctagtcttacctttgcagggc

SEQ ID NO: 340990 - DNA, 78 bp, Homo sapiens
  chr11:12225829-12225907
  hypo
cgcactgccattgaacttgcctacctgggagccaaagtggtcgtggtggagaagagggactccttctcccggaacaac

SEQ ID NO: 340991 - DNA, 150 bp, Homo sapiens
  chr11:12230977-12231127
  hypo
cggggggtataatcattctcttcccacctctctctgccaactcatctcatttctctgtcctggtagaaattggctggcgggcagaatttctccctacagaccattctctgtcggagtttgagtttgacgtcatcattggtgccgatggcc

SEQ ID NO: 340992 - DNA, 258 bp, Homo sapiens
  chr11:12240017-12240275
  hypo
cgtccacgccaggcactgtcttcactgtgtaatgtcacccactccatcttagggatgcttgggtcatattttgaagggggggtgtttgagacctctcccttctctcttcccccatctcacctccacgccttcggagagagaagtgatcatgtgaccgcggaaacagggatcagaaaggaaatcaaataacaggaattccatcctggacactggggcctgacaaagagctcttggaccagtgctggatgcaatttgggc

SEQ ID NO: 340993 - DNA, 251 bp, Homo sapiens
  chr11:12247662-12247913
  hypo
cgccacacctctgcctcctctccctgaatttctctgctttgttttgattctctagcaactttgactctttgaatgaagatgatgctgtggagaacaaccagctcgcatttgatgtggccgagcgagagtttgggatccctccagtgaccacgggcaaagagatggcatctgcccaggagcctgacaagctcagcatggtcatgtacctctccaagttctacgagctcttccggggcaccccactgaggccc

SEQ ID NO: 340994 - DNA, 264 bp, Homo sapiens
  chr11:12248553-12248817
  hypo
cgctttatttcccaacagattcttggcgcaaaaactatggagaaaatgctgacctcagcttggccaaatcatccatttctaataactatctcaacctcacatttccaaggaagaggactccacgggtaagttttggcctggtttcggttttatttcccattgcacatggacggggtatgaggaacggagattgtcacattctcagcctgttgaggctagtaagttacatggatcaggcgctcccggaagatgctagtaaaactc

SEQ ID NO: 340995 - DNA, 97 bp, Homo sapiens
  chr11:12262569-12262666
  hypo
cgcctttcttctcccaggaacgccgtgtctcagggataggtaagccggtcctgtgctcttcctccggccctcctgttcactcttgctgccccaagcc

SEQ ID NO: 340996 - DNA, 180 bp, Homo sapiens
  chr11:12267687-12267867
  hypo
cgggcattagatccttctaagagacggcagggagcagcctgctggaaacatgcagagctgctgggtaagacagagatgctgtcagccactaagcgtgtccccatcacatcagcatcacaccggctgaggccctgcctgctgctgtctctggctcttcaggcagccctcccctgaggactc

SEQ ID NO: 340997 - DNA, 352 bp, Homo sapiens
  chr11:12278228-12278580
  hypo
cgaggtccccagcattcagtgtggaatttctaaaagccttggcctggcatttgaaggctcgggataagccataatacacccactcttctctcccgatccccaggaatctatgcgaaagtcatttccccttaacctgggaggcagcgacacgtgttacttctgtaagaaacgtgtgtacgtgatggaacggctgagcgccgagggccacttcttccaccgggagtgtttccgctgcagcatctgtgccaccaccttgcgcctggccgcctacacctttgactgcgatgaaggtaaccccaggggccagggcagcactgggctctggccttggcctcaggtgtgaccttggctc

SEQ ID NO: 340998 - DNA, 141 bp, Homo sapiens
  chr11:12279396-12279537
  hypo
cgcacagtggtcctgggcagtggcagtttcccagtgcgtgccccgtctgggtcttttcctccccatcactgctgccatttgctctcagcatttcccacccgccaggtattccacaaagaaagactgagggtgttcatactc

SEQ ID NO: 340999 - DNA, 301 bp, Homo sapiens
  chr11:12281112-12281413
  hypo
cgatcaaaaggcatgcatatttttgaaggctcgtgactcctatggtcagttggcccctagaaaagtgcccgtgttcagcaccggcttcagcatgagtcggggggctgagattattgtgggggctggttgcagggtctggcgagttcagtttgtattggctgttggctttgttgaagtagtcctctggaagacttacagacaaatgccctcatttccatctctttctcaggaggaggcaacatggcaagagcaggaagcccctcggagagacactcccaccgaaagttcttgcgcagtggcc

SEQ ID NO: 341000 - DNA, 434 bp, Homo sapiens
  chr11:12283321-12283755
  hypo
cgcctctgtccttgttggcactgttctcagtccgatgacttgcattgtgttttctccaatttttgctgggattttaatgttcagcatggtgggaggaacccttgattccttttgtttgagtatagaaagtaaatttttgaggtcatgatgtgaacggccatgttattgtgattatcttcagctcaggataggctgagatgctttgtggagtgttccatgaagcccgagtcggaatctctgactgtcgtgtacagccataaggagactggtttgaattactgtggcgagacagggcgtgcctgtcagaaatctgagatgtttgtacgctctgagatgttgaacctttctggtgggcagcaccgacacccaggggtggacccccgaggatgaatgcctctaggcctccgcaacatattcaagaatgaatgggagac

SEQ ID NO: 341001 - DNA, 366 bp, Homo sapiens
  chr11:12284011-12284377
  hypo
cgccatggccatcagttcatttcagccttccagtgctacacccacttcttggctgacacacttctgctctaaggtgactggttttcttgccaattttcaaagagtggtactaacccccaacccgctttccgcaccccgtcctctccgccagcagtactggttgcactaactgtgagtgtcttgcatactgatggactcatttggtggcatggttggctaacagcatggcggggggtgttcagcttgagacccatgcctgtgttcatttcccatggagctggcagcctggtctaccccaagtgcatgccccgcctctcctctctcccttgggtctgcctgcgtgcatgcttctccagttgcgtctgc

SEQ ID NO: 341002 - DNA, 1566 bp, Homo sapiens; identical to SEQ ID NO: 334172
  chr11:12695414-12696980
  hypo

SEQ ID NO: 341003 - DNA, 469 bp, Homo sapiens; identical to SEQ ID NO: 334175
  chr11:13300232-13300701
  hypo

SEQ ID NO: 341004 - DNA, 156 bp, Homo sapiens
  chr11:13334715-13334871
  hypo
cgctttcttcagctctgctgagcgtgcctctcctgggtcggctcccggttctcctccagctgctgagattccagcctccacagcctgctctgctggttctctgttctttgtccttagcttctggtttggcttggtccctttcacgtcatccttaac

SEQ ID NO: 341005 - DNA, 1248 bp, Homo sapiens; identical to SEQ ID NO: 334176
  chr11:13689464-13690712
  hypo

SEQ ID NO: 341006 - DNA, 1596 bp, Homo sapiens; identical to SEQ ID NO: 334182
  chr11:17034991-17036587
  hypo

SEQ ID NO: 341007 - DNA, 524 bp, Homo sapiens; identical to SEQ ID NO: 334186
  chr11:17742758-17743282
  hypo

SEQ ID NO: 341008 - DNA, 121 bp, Homo sapiens
  chr11:18512388-18512509
  hypo
cgttggagtattcatgcctcgttctgtgactgccttcgtgactacagccatatcatcatagcgctcagcctgctcagtgagttggctttctgtaccagctcacttttatccagtcgttccc

SEQ ID NO: 341009 - DNA, 65 bp, Homo sapiens
  chr11:19247033-19247098
  hypo
cgagagccgggctgttcccgacaggtacggctgccacggaagttggtgagaccattagcttcaac

SEQ ID NO: 341010 - DNA, 200 bp, Homo sapiens
  chr11:19256446-19256646
  hypo
cggcgtacttattctcctccccgatgctcttcaaggtgccaagggttttgttgagattgtgtcgcccgtgccaagtgtacctgtttttggcgaggcggctcaccatatgtaaactctctaggacgttcacgatatcgtaaatgcgtcgacgttcaacatctacaaagaatgtgcaattgtgtgttacagatttttgtaac

SEQ ID NO: 341011 - DNA, 152 bp, Homo sapiens; identical to SEQ ID NO: 334190
  chr11:19367847-19367999
  hypo

SEQ ID NO: 341012 - DNA, 1762 bp, Homo sapiens; identical to SEQ ID NO: 334191
  chr11:19733708-19735470
  hypo

SEQ ID NO: 341013 - DNA, 984 bp, Homo sapiens; identical to SEQ ID NO: 334194
  chr11:20178096-20179080
  hypo

SEQ ID NO: 341014 - DNA, 1267 bp, Homo sapiens; identical to SEQ ID NO: 334201
  chr11:20690403-20691670
  hypo

SEQ ID NO: 341015 - DNA, 864 bp, Homo sapiens; identical to SEQ ID NO: 334206
  chr11:27743487-27744351
  hypo

SEQ ID NO: 341016 - DNA, 302 bp, Homo sapiens
  chr11:30445742-30446044
  hypo
cggttactttgggtccttggaatatttataatagggggtgaagagaggttcaccgaaggaattgacaagctactaattaatgccatcactgctgcctggcacctctattaagcaaaactcagaaaccgggagccaattttcacatacgctttcttttctaaatggtagcccttctgaattgcaaccttcttcacgcctggcactcccagccgccatcggcccctctccgactgcacatcacaccaggtccaagagaagctaatttaaccaccgctggttaaaatcatactgcacttcacagc

SEQ ID NO: 341017 - DNA, 171 bp, Homo sapiens
  chr11:31808842-31809013
  hypo
cgtgcccaagtgcacacatacagaccctccgctcccacgtcactccttttctcccattcccacctcttgcacctggcgtgcgacatccgggtctccaaagtctctgctgtctacacaacagaaccgtgggccggaactggctgcctgaccgtggtggaaattacagccagc

SEQ ID NO: 341018 - DNA, 2204 bp, Homo sapiens; identical to SEQ ID NO: 334208
  chr11:31819804-31822008
  hypo

SEQ ID NO: 341019 - DNA, 1486 bp, Homo sapiens; identical to SEQ ID NO: 334228
  chr11:32455921-32457407
  hypo

SEQ ID NO: 341020 - DNA, 384 bp, Homo sapiens; identical to SEQ ID NO: 334231
  chr11:32851566-32851950
  hypo

SEQ ID NO: 341021 - DNA, 927 bp, Homo sapiens; identical to SEQ ID NO: 334232
  chr11:32915115-32916042
  hypo

SEQ ID NO: 341022 - DNA, 41 bp, Homo sapiens; identical to SEQ ID NO: 263327
  chr11:33181224-33181265
  hypo

SEQ ID NO: 341023 - DNA, 38 bp, Homo sapiens; identical to SEQ ID NO: 263329
  chr11:33202743-33202781
  hypo

SEQ ID NO: 341024 - DNA, 805 bp, Homo sapiens; identical to SEQ ID NO: 334233
  chr11:33397688-33398493
  hypo

SEQ ID NO: 341025 - DNA, 92 bp, Homo sapiens; identical to SEQ ID NO: 263332
  chr11:33874007-33874099
  hypo

SEQ ID NO: 341026 - DNA, 720 bp, Homo sapiens; identical to SEQ ID NO: 334234
  chr11:33890237-33890957
  hypo

SEQ ID NO: 341027 - DNA, 563 bp, Homo sapiens
  chr11:34516985-34517548
  hypo
cgaggcgctacgcgttcttgtcgtctcaagtttctcaggtcccctcaacaatcctatccagtaggtgtaattgggctattccacaaaaaaggaaatagaggctccccttaaaactcaaaggtcttccagagatctcttttaccaccgaagggtgggtggaggggcagttgatttattttatttaaaaattttcagaattttatatgcattaagatcaaagcgtcaatattgtgccagggtgcttgaggctgatgtcgtagcctctacctggcagataggaagagccagggagccggtgagaccgatgactcaggtcttgctcactggccactggctggagctggcttaccaggcccgtgggggctcttcagggcaggcaggggttcctggcagaacaaggggccattcctgagttcggcctgagctttcatctactgatttctggctttagtaaacctgaggggccttttggactttactggcgtcctgtgagagatgtttatgagccttgacatttttcagctgcgggccctgccctagatggccatcggtgtgcggccgtc

SEQ ID NO: 341028 - DNA, 274 bp, Homo sapiens
  chr11:34535022-34535296
  hypo
cggcctgcggaggcaagcaggtctctctgaggcaagccgtcacatccgtgtcaaacagctcccggaggccctgggactgcacccagcgcaggtgccggccctggagctggagatggacgagcagacccaggccccaggccgagcctctgagccctgacaccccttacgattcatccaaaaaagcaaagaaaaggcgcttacgtgagggcagcggtggctaggtccaaagaggaggctttcaaggcaagagaaggcaggcgctcccagcaccagc

SEQ ID NO: 341029 - DNA, 115 bp, Homo sapiens
  chr11:34897239-34897354
  hypo
cgctactggggctggagcccaaaagcactcgccccgccccagctcttgcccccgcccatccgtgtgctcgccctcccgaaaggagttcgagcctgtagtggctgagcacatgagc

SEQ ID NO: 341030 - DNA, 1479 bp, Homo sapiens; identical to SEQ ID NO: 334237
  chr11:35439856-35441335
  hypo

SEQ ID NO: 341031 - DNA, 221 bp, Homo sapiens
  chr11:35684977-35685198
  hypo
tcagaggaagagagcgagacagaggaagagagtgaggatgagagcgatgaggagagtgaagaagacagcgaggaagaaatggaggatgagcaagaaagcgaggccgaagaagacaaccaagaagaaggggaatccgaggcggagggagaaactgaggcagaaagtgaatttgacccagaaatagaaatggaagcagagagagtggccaagaggaagtgtcc

SEQ ID NO: 341032 - DNA, 118 bp, Homo sapiens
  chr11:36245106-36245224
  hypo
cgtctttacaaaatatgcaaacattagctaggttgtgtgacgcacccttgtagtcccagccactgagacgggaaggtggctcgagcccaggaggttgaagctgttgaaccaagatcgc

SEQ ID NO: 341033 - DNA, 155 bp, Homo sapiens
  chr11:36476175-36476330
  hypo
cgcgtaactcattccatcctccaaggtactgttgtgctttcagtctccaggtcacccgcagggtaggtgaccagagccagagaagcggtttattcccggggctccgcactgcacccacgcgcccgcgcctgtgtttgactgcacgaggattctcc

SEQ ID NO: 341034 - DNA, 354 bp, Homo sapiens
  chr11:43543814-43544168
  hypo
cgtgtggatagacagtggcaacgacaacgtggacatcaaggctgccgcgagctcggaattgttgtgtgcaacatcccgtccggagccctggaagagacagccgactccaccgtctgcgacatcctcaatctgtaccggaggaacacgtgggtgtgccaggcactgcgggaagggacgtgggttcagagcatggagcaaatcctcgaggtggccttgggagtggtccgcatccgtgggtagacgctgtgggtctcatgagctttggtcgcacgaggcaggcagttgcatttcaagccaaggcctttggattcagcgtcatattttatgacccctacttgcaggatgggatagaac

SEQ ID NO: 341035 - DNA, 1513 bp, Homo sapiens; identical to SEQ ID NO: 334242
  chr11:43599961-43601474
  hypo

SEQ ID NO: 341036 - DNA, 827 bp, Homo sapiens; identical to SEQ ID NO: 334243
  chr11:43602408-43603235
  hypo

SEQ ID NO: 341037 - DNA, 1714 bp, Homo sapiens; identical to SEQ ID NO: 334247
  chr11:43963646-43965360
  hypo

SEQ ID NO: 341038 - DNA, 739 bp, Homo sapiens; identical to SEQ ID NO: 334248
  chr11:43965463-43966202
  hypo

SEQ ID NO: 341039 - DNA, 142 bp, Homo sapiens
  chr11:44608911-44609053
  hypo
cggggccccgccggccacacggggagcctggatttaaagtgagtatgtcttcagccacattgcctttggagagtcacagacaggagtgacgagatctgggtcgtgtttttcagagtcctccctgctgctgtgtggacgacac

SEQ ID NO: 341040 - DNA, 151 bp, Homo sapiens
  chr11:44621715-44621866
  hypo
cgcagtgatcctgggcttcggggtgtggatcctggccgacaagagcagtttcatctctgtcctgcgtaaggacccctcagcttccccagacccaggcccactgaagaggggagggccagggcgcagatacagctgctcccataagtgcttc

SEQ ID NO: 341041 - DNA, 237 bp, Homo sapiens
  chr11:44625100-44625337
  hypo
cgggttgtaacggactcaagcatctgcatccctaagaggctcctctgatccacactactctccagccttctggagacgccagcaccctcgccctccaggtgcgtcccatgccctgggggtacagtgtacccatgctggtgagttagagatgacatgagctttaccctgtgtgatgggttgggtgtcttaggaaatgttggccaagtgcccctgcaggactcctgacctctacctccc

SEQ ID NO: 341042 - DNA, 457 bp, Homo sapiens
  chr11:44639755-44640212
  hypo
cgctgagctcatgaatcgccctgaggtcacctacccctgttcctgcgaagtcaagggggaagaggacaacagcctttctgtgaggaagggcttctgcgaggcccccggcaacaggacccagagtggcaaccaccctgaggactggcctgtgtaccaggaggtgtgcggggggctgcggatcgggggcggggctccgagggcgttgggggccatctgggctactgctcagcaattccttcctgcatttagttccttcccttaattcatctgtcatttgtaccttcatctacttctttgttaatgtatttattcaaggaacaggcagagccctctgtaggggcttccgggctgggactggggggctctcggtggttctgcatggcggggtgggatggtgcagagcggggtgatgtgaccgcattctgcccttgcagggctgcatggagaaggtgcaggc

SEQ ID NO: 341043 - DNA, 495 bp, Homo sapiens
  chr11:44640545-44641040
  hypo
cgtctgaggccgggacacccagcctccctctgactctccgcctctccccacagctcctggggatggtcctgtccatctgcttgtgccggcacgtccattccgaagactacagcaaggtccccaagtactgaggcagctgctatccccatctccctgcctggcccccaacctcagggctcccaggggtctccctggctccctcctccaggcctgcctcccacttcactgcgaagaccctcttgcccatcctgactgaaagtagggggctttctggggcctagcgatctctcctggcctatccgctgccagccttgagccctggctgttctgtggttcctctgctcaccgcccatcagggttctcttagcaactcagagaaaaatgctccccacagcgtccctggcgcaggtgggctggacttctacctgccctcaagggtgtgtatattgtataggggcaactgtatgaaaaattggggaggagggggccgggcgc

SEQ ID NO: 341044 - DNA, 1661 bp, Homo sapiens; identical to SEQ ID NO: 334251
  chr11:44748073-44749734
  hypo

SEQ ID NO: 341045 - DNA, 128 bp, Homo sapiens
  chr11:44941378-44941506
  hypo
cggggtcaacgggcctgaagactttaagtttgcatctgtgtttcgactcctgaccctggatagtgaagaggtgccggaggcctgctgccggagggaaccccaaagtcgggacggggtcctgctgagcc

SEQ ID NO: 341046 - DNA, 680 bp, Homo sapiens; identical to SEQ ID NO: 334254
  chr11:46299162-46299842
  hypo

SEQ ID NO: 341047 - DNA, 541 bp, Homo sapiens
  chr11:46337908-46338449
  hypo
cgccacccagactgggacctgcctcatggtaggtgtggctccctccaccacagacccacaggaggagagttcttcccaaggctggctttttccagggttgggcagagctttaaggatcggtaacatcgtgggcagcgtcccagggtacaccatcctggcgcctggtgggctggttctagcagactccagactccttctccaagcccatggtgccttctgcctcacaccggtccccgactggttaacacagtgtagatgtgtaggtgactccagtggccccagctaggggacagctgggcaggttccttgaggaggcggcttccacaggccttgtgcagggaagggcttggggagactcagggaagaacggacatggttctttctggaacagatggcagtgaaaaggctgaggaaacccctggaaacccggaaggctcccagggcgtgtttcagacctcttccagtccctcttctatcttcttctggaaatggccagtctcttgccgcctggctcagcatgccccggccctccgagaccctc

SEQ ID NO: 341048 - DNA, 606 bp, Homo sapiens
  chr11:46391523-46392129
  hypo
cgacgccaggacggcaagtgtcggcactgtgggaaggtgagaggccctgcccgaggacatcgccacctgcacctgcggtcctgagcccaggccatgtggccggtgtggcctgccgatcactgaccacaccctggtgtgcagagtccggggctgaccctcagcctggctgcagtgccttcagttctcaagcaccctggcctgctcttggtctctgggcttagtaggagagcagggaggaaagttttcttcccatgtggcacacctggcctgctttgaagctgcaagtggccctttggagaatcgtatagacttactcattcggtgactccatggatacttgtgtgccgagcgccaagctgggcagcggtttcccaccctcctgaggacagtgtggcttgaagccaggctttccaggcgaccgcctaacccagtccacagttgtttggttcactttcttgtttgcttcttgcccgcctccctcagtaagtgcaggctctcaaagatggagaggcttgcttcactgattctcagcgcctggcccactgcaggcctttcataacagcctgtgtgatgaacagggaatgaatgtgataggtactcggaagc

SEQ ID NO: 341049 - DNA, 64 bp, Homo sapiens
  chr11:46777035-46777099
  hypo
cgtgagccaccgcacctggccccatttaaatataaataactagtccttagggattcagtcattc

SEQ ID NO: 341050 - DNA, 151 bp, Homo sapiens
  chr11:46783074-46783225
  hypo
cggaggtccagactcactcaaacgaaataagaggtcagaggcagaacctaatgtgagtgaaaaactggctcacggctgtagcgcaagatgtgatctgacagatactagcatccacactatacacaaataagcactttttaaccaaaaactc

SEQ ID NO: 341051 - DNA, 124 bp, Homo sapiens
  chr11:46920035-46920159
  hypo
cggtagtggcctctttggctccacaagccttctccttagttcaagcccaacctaattccatttccccactcactgcagttgcgctcatcagactggtcatcacagtccgcgtcaccatcgcagc

SEQ ID NO: 341052 - DNA, 607 bp, Homo sapiens; identical to SEQ ID NO: 334257
  chr11:46938441-46939048
  hypo

SEQ ID NO: 341053 - DNA, 433 bp, Homo sapiens
  chr11:47358910-47359343
  hypo
cggggggcaggaccaggccaggcaggctcaccgataggcatgaagggctgggaggcagggctgggcctggacatgccgatggcgttgaccgcgtagacgcgcatctcgtacaccacgccctcgatcatgcgccgcgcttcatgactcagctcctgaatcaggtcgaagttcagccgcatccaccggtagctcttcttcttcttgcgctccaggatgtagcctggctcaggggaggtggcagctctggtctggaacccaggcatccccacaccaccttccctcggatctgtttggcgccctcacacctccatccggtgcccttgcactcacccaggatgggctgcccgccatcgtaggcaggcggctcccactgtactgtgcaggagtcctctcccacgttgctgatcttgggggccgcaggtgcgtctggcac

SEQ ID NO: 341054 - DNA, 117 bp, Homo sapiens
  chr11:47486010-47486127
  hypo
cgacactgggtaaacaatggttgagctggtctcagatctagtgacgtgagagtatggagaggagtgctctttagaagttgcccgtcccccacaggcagcagcgccctgcaggagccc

SEQ ID NO: 341055 - DNA, 197 bp, Homo sapiens; identical to SEQ ID NO: 263429
  chr11:48061635-48061832
  hypo

SEQ ID NO: 341056 - DNA, 239 bp, Homo sapiens
  chr11:57071417-57071656
  hypo
cgccctgtccagcggccactccccaaaatgacacattcacattcatcaccatcacacacactcaggcagagagcttgtgcgctgtttgtcactcccccagatggacctcgcacccaccacatctacaggcacggcacagagccacacctgacacaaacacacgcatccccgcatccccacacccccaccccacacacacacactcatactacgcacagaggtgtgggaaagcctggcac

SEQ ID NO: 341057 - DNA, 365 bp, Homo sapiens
  chr11:57182515-57182880
  hypo
cgccgagagaaagcgtagctccagaaggagcggagttcctgcttctgccctgcccctggggtctctaatggggagaggaggatctgggcgtgaattacgaggaaagtggacaggtaggatggggagtgtggaggcttcaatggaacatttcagatccgggcccaccttctacccttggctcccagaactcacccggcgtgctctgcacctgcctcggactcacacatccccacctccctgctttgtcatgctggccctaccaccttggatgaccctctgtgttcttctctattgaaatccgatctgtctctcacagcctggtcaatgacacttcttgcagtaataccttcctgatctttctcagc

SEQ ID NO: 341058 - DNA, 233 bp, Homo sapiens
  chr11:57188507-57188740
  hypo
cgaacggtgttggccaaataggttcccaatctggggatgataggactagcctggatcacttatttattcatgaaacagatacttcctgagcacccagcatgtggcagaccctccttatacccaaactcaccctccaccgctagagctcccacctcagcttgggccaaccccatctgaggcagccaattatagaaaagggtctctccttccctccaccttcccgccaccctgcc

SEQ ID NO: 341059 - DNA, 179 bp, Homo sapiens
  chr11:57235325-57235504
  hypo
caacctctccaccatctacccgggcactttccgccacttgcaagccctggaggagctggacctcggtgacaaccggcacctgcgctcgctggagcccgacaccttccagggcctggagcggctgcagtcgctgcatttgtaccgctgccagctcagcagcctgcccggcaacatcttcc

SEQ ID NO: 341060 - DNA, 817 bp, Homo sapiens; identical to SEQ ID NO: 334261
  chr11:57243645-57244462
  hypo

SEQ ID NO: 341061 - DNA, 57 bp, Homo sapiens
  chr11:57500997-57501054
  hypo
cgattacaggcgtgagtcaccgcgcccagcctatagtgaggaatttacagatgaaac

SEQ ID NO: 341062 - DNA, 93 bp, Homo sapiens
  chr11:57580261-57580354
  hypo
cggcgctcagccacactagccactttgtttaatggaacactgtttttacttggaaaaaaatgtgtggtagacaaagggattattcagatgtgc

SEQ ID NO: 341063 - DNA, 333 bp, Homo sapiens
  chr11:60282711-60283044
  hypo
cgttcctagaggcaccaaaacgtagttaaccgggtgtctgaccacatggctgccaggagcctagtgagtctgcgcacacgcactacctccgccccggcagttcctgagtgggtgcgcaggcgcaagaggagcacaccgttgccattgcagaccgtcactccctgaggagcctgagagccggccgggtgctgggctcctggctatccctgtgatggtagctcagcgagatctggggacctggcgctgagcgcgttgccagccgggatcttcctcttcatctaggcctgggcgctggcgtgagaactcggactgggtcctggacgagcgcccccc

SEQ ID NO: 341064 - DNA, 172 bp, Homo sapiens
  chr11:60648561-60648733
  hypo
cgctttgtgtcaacagagccttaggtttactaatgcagcagagaaggcagtcagaccatgcctttattcgataggtgtcaagtgtcagggaccaccatgaccttggcgacatgtgtcaatacagttaaatctcaaggacaatgccagtgcaggcagagcacggaagatgcac

SEQ ID NO: 341065 - DNA, 198 bp, Homo sapiens
  chr11:60714083-60714281
  hypo
cgggggcttggtgatgaagacgggggtggcaaagaggaagatgaaaaatgccaggcccacacagcccacagggatgctgtagcccagcaggaagctgatgttctgctgaataaacgccaccaccagcagcgacagcacagcacccaggttgatgctccagtaaaaccagttgaagaagcggcgggtggcgtcgcggcc

SEQ ID NO: 341066 - DNA, 125 bp, Homo sapiens
  chr11:61036523-61036648
  hypo
cggtgacaccggcccctgcctccccgccctgcaaaagaaacagcaacgctgcaaactggccaaggcttgccctgaaaggcaacatgacgcggctggaagatggcaggtctcccctaaagaggatc

SEQ ID NO: 341067 - DNA, 625 bp, Homo sapiens; identical to SEQ ID NO: 334268
  chr11:61062458-61063083
  hypo

SEQ ID NO: 341068 - DNA, 1484 bp, Homo sapiens; identical to SEQ ID NO: 334269
  chr11:61275825-61277309
  hypo

SEQ ID NO: 341069 - DNA, 698 bp, Homo sapiens; identical to SEQ ID NO: 334271
  chr11:61347880-61348578
  hypo

SEQ ID NO: 341070 - DNA, 169 bp, Homo sapiens
  chr11:61490202-61490371
  hypo
cgctgcctctgcctttgctactgagctggctgaaagcccagcgataggaaaggccaggccggggttctaggcccttccctggcatgcaagtggcagccatccttcagccaggcctgctctccttgcagccatcctggtgatcgagttcatctacgccatcgtgggcatc

SEQ ID NO: 341071 - DNA, 172 bp, Homo sapiens
  chr11:61490870-61491042
  hypo
cgcccctacctaatgcctcccactgctgcccgcaggaatggttgtctgcaactgggtagtcatcctcagtgtgtgcatcactgtcctctgcgtcttcgaccccacgggccgcacctttgtcaagctgagagccaccaagaggaggcagcgtaacctgcggacctacaacctg

SEQ ID NO: 341072 - DNA, 591 bp, Homo sapiens
  chr11:61511518-61512109
  hypo
cgctgcacaatgggcgcctgggggactcgcccagtcctcaggtgctggaattcgccgagttcatcgacagcctcttcaacctggacagcaagagcagctccttccaagacctctactgcatggtggtgcccgagagccccaccagtgactacgctgagggccccaagtcccccagccagcaagagatcctgctccgtgcccagttcgagcccaacctggtgcccaagcccccacggctctttgccggctcagccgacccctcctcgggcatctcactctcgccctccttcccgctcagctcctcgggtgagctcatggacctgacgcccacgggcctcagtagccaggaatgcctggcggctgacaagatccggacttctacccccactggccacggagccagccccgccaagcaagatgagctggtcatctcagcacgctagcaccccagttgcgtggccagccgggcccaggcaggagcaggtggccctgtgggcacctggtgcctgccccctgccgggcagctttaaggacagacccccaggggcagtttagcctcaggcacaggcatcgctgctgagctgggggtcc

SEQ ID NO: 341073 - DNA, 1733 bp, Homo sapiens; identical to SEQ ID NO: 334273
  chr11:61594996-61596729
  hypo

SEQ ID NO: 341074 - DNA, 309 bp, Homo sapiens
  chr11:61640585-61640894
  hypo
cgctgcgcggggccctttcaggccccccatcatggagggctgtgggaggccagtgcaggtcaagaggcacaaccgtctttcccagtccatgtccagaagcgtccgcagacatggcccccagccctgggtcctcatctgctgggcccgctcatcccaccatgcagaagcgtcaagtgacttgaagcccagcatgaataggaagtgaataggccctcgggcaggtccgagtccaggcatccctgggctcccaggcccagggcatctagagctaaagggagctccttagcgctccccctcaaccccgccgcc

SEQ ID NO: 341075 - DNA, 176 bp, Homo sapiens; identical to SEQ ID NO: 334274
  chr11:61659371-61659547
  hypo

SEQ ID NO: 341076 - DNA, 139 bp, Homo sapiens
  chr11:61662946-61663085
  hypo
cgactttgcccaggtgcacagccccggcaggagttccatcaggacagtcttggcagactggaaagcatcctgcaggagtgaagcacgccagtgcgcagctggtctcggctcagcgcctccaccctcagaggccagagtc

SEQ ID NO: 341077 - DNA, 225 bp, Homo sapiens; identical to SEQ ID NO: 263532
  chr11:61664739-61664964
  hypo

SEQ ID NO: 341078 - DNA, 200 bp, Homo sapiens
  chr11:61668820-61669020
  hypo
cggcaggggagggtgggagctgggattcctagaggccccttggcactcacggccgacttaaggctggtgcaccagacgcaccgctgaaccttttccaaagcttcggccagcacctgagtctgggcgtcaggagccccgcactctaactggaactctagcatcactcctggattaggtgacattgaatgacagaggggggc

SEQ ID NO: 341079 - DNA, 214 bp, Homo sapiens
  chr11:61672924-61673138
  hypo
cggccaggccggctcgtaggtgaggtgaaccgccttgctggggaccacgcagaggagcagggagagcagcggggccagcccgggctgggccggatggacagacagacagacagacagacaggtagacaggtgcacagagacagaacaggaggaaggggagaagttaatgtacattcagaagctcagagctcaggaggtggatgagggcctgctc

SEQ ID NO: 341080 - DNA, 371 bp, Homo sapiens
  chr11:61673908-61674279
  hypo
cgtgcccagagcccgcttcccaccctcacctccttgccctctctgtctggggtgagggtgtgtcccgcagcgggacacacggcggggcagagggtgctgctggtgctcttgtggcgagagtggccctttcggggcccggccttggtggggctcagcagctgggggtgaagctcgcggttgggagaggctggtgtggacgtgatgaccagcgtcttcaaggctgtcacctctgcctgcagcatgtcgatctgcatgggatgggatggctgtcaaccctcacccagactggatgccatcctggctgccaccgcctatcagcctaactcaggacaatgcacccctgcagtgacaggcacttagtcccacccgac

SEQ ID NO: 341081 - DNA, 425 bp, Homo sapiens
  chr11:61674760-61675185
  hypo
cgggccaggtgagcgtccactcgggcagcaaagctcagtgctcgctgagccgggaggcagggggggtgcctgggctggcctgggcaggcggggatgggcctcaccttgccccgagcctccttcagctgcttttctgatgccgcctgcttcatgttggcttctcgaaccatcttgtgagcttcctaggaagaaggcagtccctgcgtgagtggtgaggagccaacggacgcccagatgacccattccccaagttgttcccgcgcccagccggtgtacctcaaacaggctggccgtcagctcttccagctcctgttctagctgctcccgcaccttggacagccgctcacattcctcgtcctttagcttcagctcctggaggaaaagaggcaggcacttgagcacctcagcatccccaggcctggcac

SEQ ID NO: 341082 - DNA, 208 bp, Homo sapiens; identical to SEQ ID NO: 202570
  chr11:62369474-62369682
  hypo

SEQ ID NO: 341083 - DNA, 137 bp, Homo sapiens
  chr11:63325873-63326010
  hypo
cgggagacgccatagcgcagatggttcacgaagtgctcgcagttgtcactggtcagcgaataaggcaactcctgccccaccaactcctctgcccgcttgacgattttgttggaaggcagtggtgtgtatctgtcatc

SEQ ID NO: 341084 - DNA, 119 bp, Homo sapiens
  chr11:63431997-63432116
  hypo
cgaaactctgtcttttaaaaaaaagcgtactgagcaatgtgaatgtaatgagcaatatcaatgtaatgacacacagcacatacaataagctattgtttttttgttttttttttttgaga

SEQ ID NO: 341085 - DNA, 180 bp, Homo sapiens; identical to SEQ ID NO: 263582
  chr11:63562759-63562939
  hypo

SEQ ID NO: 341086 - DNA, 197 bp, Homo sapiens
  chr11:63675233-63675430
  hypo
cgtagccacggcccctcctcctacagagattcaaagcattgcagcccctttcctccaaaaggactgcagtcctgagaccctagcgtgtggctccaaaaacgcactcacacctgcaacccccagaacagcgcgtgagccctggctgtgggggagcagcctcgtgccgggccgtgtgctcagtgtgctcagtgaagtgc

SEQ ID NO: 341087 - DNA, 95 bp, Homo sapiens
  chr11:63675675-63675770
  hypo
cggcggaaggagcgagagatcccagcactaaactctccctcgctctgttttttgaggaacctgaatgaacctgaaagcaaagaccgagtggagac

SEQ ID NO: 341088 - DNA, 329 bp, Homo sapiens
  chr11:63676319-63676648
  hypo
cgtgacgcccgcctctgccctctccacagacctcacgtggtgggcagtggcggcaacgacaaagaaaaggaagaatttcgggaggccaagccccgctccctccgcttcacgtggagtatgaagaccacgagctccatggagcccaacgagatgatgcgggagatccgcaaggtgctggacgcgaacagctgccagagcgagctgcatgagaagtacatgctgctgtgcatgcacggcacgccgggccacgaggacttcgtgcagtgggagatggaggtgtgcaaactgccgcggctctctctcaacggggttcgatttaagcggatatc

SEQ ID NO: 341089 - DNA, 474 bp, Homo sapiens; identical to SEQ ID NO: 334281
  chr11:63767759-63768233
  hypo

SEQ ID NO: 341090 - DNA, 240 bp, Homo sapiens
  chr11:63779104-63779344
  hypo
cgcaagcagggaatcagggctgcgggacgaagacatggagcagggcagtgcatcagggttctgggcagagtggccagggcaggcaggatggcccttgtgcgtgttcgaacaatgggtggctggtcatgggaggggcgcgggtagaggcctgaactcctgtaggagggatgtccagggaccccacgggaagatgggtgtgtctgggcagagtcagatggggtctaacttgggcaggtaggc

SEQ ID NO: 341091 - DNA, 525 bp, Homo sapiens
  chr11:63849170-63849695
  hypo
cgtgtggctgaagcctgttcctgcttgggggttggccacacagcatcccaactccaggtccagagccgagcctgacagccctcctccactgcctcctggagctgccggagagaggtccgggtccgttctccccaattcacagacatgaagactgaggccgtggttccagtggctgctcggtggtggggctggagcttggcagcatcctgcagccctctggactcccggctctcgagtgccgcgttctacctgctgtgttctaaatggacatgccatccccacagctgtgtcaataaagcagccatttacagagcgggcgccggatcccgtgacaggttgaaaagtgtgtgagctgcagcgtcctgggctggggcagaggggccgtggcgagaacagatggggctgtgcccatctccccaggccctcctgtggctgcgcctggagcctcccgggagggaggccagagccaggagcaggccagagccaggagcaggcgcgaaacatcccttaaatattggtgctctc

SEQ ID NO: 341092 - DNA, 63 bp, Homo sapiens
  chr11:63860763-63860826
  hypo
cgatcgagtcagctgctggtgttgtcactgctgcggacacagtccttacccgtaagagctcac

SEQ ID NO: 341093 - DNA, 80 bp, Homo sapiens
  chr11:63864329-63864409
  hypo
cgagggcctcccccggcagagctgagagccgatgcctgtccctccgtgagctgggtgcgagtggcccttgctggtccccc

SEQ ID NO: 341094 - DNA, 305 bp, Homo sapiens
  chr11:63885581-63885886
  hypo
cgcggccctgggctgcagatgctgcccatcaacccgtaccgcgccaaagaagagtacgtggtccacactatcttcccctccaacggcagcagcctctgcaaggccacacacaccattggctacggcaccacgcggggctaccgggacggcggcatccccgacatagactactcctacacatgatgcccgcccacccgggctgccccgcctcagccccagctgccctggcgtggccatgtggctttgcccagcctgctgcaatccaagagagcaaggaagagaaattccatgggtgactttcctcc

SEQ ID NO: 341095 - DNA, 374 bp, Homo sapiens
  chr11:63908860-63909234
  hypo
cggggagcgggggcactgtggccaccacgtgctgctgcagccagaccccttcatatcctaggcacacagagtacccatccgttaaacgggcaggcaagccacggcctcctggggagccctgaaaccagctcggctgtgccttgccaaggaactggcggatcattccaggagagcgagccaagggctgcagatccagcccttttcatgcttggccaatttaatggtccccattaatttcaaaacacacacattcccacaagctccggcctcctcggctcagtgctcgggtggacagcacaccggggacgcaagcaggggcacaggtgcaggcgctgaggcctcaaggacaggaaggagccacagaggatgtgctc

SEQ ID NO: 341096 - DNA, 203 bp, Homo sapiens; identical to SEQ ID NO: 334283
  chr11:64015094-64015297
  hypo

SEQ ID NO: 341097 - DNA, 103 bp, Homo sapiens
  chr11:64054239-64054342
  hypo
cgagatactccccgcgccaaccgcctggggcccttgcccttctggcttctctactgctgccccgtctgcctgcagttcttcaccttgacgcttatgaacctct

SEQ ID NO: 341098 - DNA, 300 bp, Homo sapiens
  chr11:64088230-64088530
  hypo
cgagtggggccgagcccacaaggcggaaggcaaggtgaggtgaggggcctgcagggagtcaggaccaggtaggatattcttcttgtgacctttactttctctgcaggttcggctcctggctgatcccactggggcctttgggaaggtgagtgttcccctgaccgccacagggacatggcagtgcggggagcagtgggggcccttagcctcttcaaggatttctgacacttttctctgtctcttcttaggagacagacttattactagatgattcgctggtgtccatctttgggaatcgac

SEQ ID NO: 341099 - DNA, 77 bp, Homo sapiens; identical to SEQ ID NO: 263632
  chr11:64105954-64106031
  hypo

SEQ ID NO: 341100 - DNA, 416 bp, Homo sapiens
  chr11:64124362-64124778
  hypo
cgctgagggaacagcaggcgtggtgcagctggaagcggggggtattggcaggtcgggggtgggcagaaggtgctcgagcctgtgggcctcctgggactctgggagtcctcctgagggaagcagatctcagctgagcctttccctctaggccctgaggtacaggaaccggagaaacgtcccctcaccccatccctcagccagtgacaccgtgggaacagcaggcttgggagtgcagccttctcggcactggagtgtcagcggaggccccaggcagcccaagagctcagggagccagggaccccaaggggagtccttggacaaggaggcctgggccctgagatcctccacggtcagcgccggggcccggagatggagctgggacgagtgtgtggacaggggggatggctggcccccac

SEQ ID NO: 341101 - DNA, 335 bp, Homo sapiens
  chr11:64129097-64129432
  hypo
cggctccacccggcaggctgtggactggtggagcctgggcatcttgctcttcgagctgctgacgggggcctcgcccttcaccctggagggcgagaggaacacgcaggctgaggtgtctcggtgagtagggctggacgtggagggcggccagagggctgcagggcctgcctgggcagggctgtgggtggggggcttgctgcccctgacacccccccaatcctcccagacggatcctgaagtgctcccctcccttcccccctcggatcgggcccgtggcgcaggacctgctgcagcggctgctttgtaaggatcctaagaagcgattgggcgcgggg

SEQ ID NO: 341102 - DNA, 631 bp, Homo sapiens
  chr11:64135647-64136278
  hypo
cgcggtgatgaccgatgggctggaagcgcctggtgctggagaccggccaggtcgggcagcggtggccaggagcgctatgatgcaggtgggctgggctgggctgggttggggggaaattggttttaggagaggcctaggcccggggactctaggcctagatccaactggcgcccgcagcgtgagctcagcaaggtcctaagcctctccgacatggggcgtggcggggccgcggggctaccaggtgggacctctgacgcgccgccttcgccttcgccttcgccttcgcctccaggactcgcccttcttccagcagtacgagctggacctgcgggagcctgcgctgggccagggcagcttttctgtgtgtcgccgctgccgccagcgccagagcggccaggagttcgcagtcaagatcctcagtcgcaggtgggagggcccaggcgcgggcaggggtgggggtggcagagcgctgtcccgggggcggggccgaagcgcggcgaccgtaactccttctgctccgtcccccaggctggaggcgaacacgcagcgcgaagtggctgccctgcgcctgtgccagtcacaccccaacgtggtgaatctgcacgaggtgcatcacgaccaggtgatggct

SEQ ID NO: 341103 - DNA, 97 bp, Homo sapiens
  chr11:64310467-64310564
  hypo
cgggcggacagcggaggccccgggcccggggaggcggcagcggccgctcaagtgaacccgggtctggaagctccttacagcacgatgatgcccaagc

SEQ ID NO: 341104 - DNA, 563 bp, Homo sapiens
  chr11:64323500-64324063
  hypo
cggaggcgtgggcctcttccagaccctgcaggtgctcaccttcatcctcccctgcctcatgataccttcccagatgctcctggagaacttctcagccgccatcccaggccaccgatgctggacacacatgctggacaatggctctgcggtttccacaaacatgacccccaaggcccttctgaccatctccatcccgccaggccccaaccaggggccccaccagtgccgccgcttccgccagccacagtggcagctcttggaccccaatgccacggccaccagctggagcgaagctgacacggagccgtgtgtggacggctgggtctatgaccgcagcgtcttcacctccaccatcgtggccaaggtagggcctcccccagagccactcgagtcccgtcaccttggaggtcagagtcatggatcaggttggttggactccaaggtccagtcctgggagggacccgcctcctctcgagcctctcagcccctcgtcagccacacacaggggagtgggcggcagggatcagtctacagatggggccagcccaggctcctggtagtgc

SEQ ID NO: 341105 - DNA, 1460 bp, Homo sapiens; identical to SEQ ID NO: 334289
  chr11:64512349-64513809
  hypo

SEQ ID NO: 341106 - DNA, 379 bp, Homo sapiens
  chr11:64621797-64622176
  hypo
ggcgccatcactcatgtctgcgcttggagggcggcaccaggtgcgggggcaggtcggcaggcagctcgtggccctccagcttgaccttgatgaggtggttggccagcgcgaactcctcgtcgtccagcagcccgtccttgtccacgtcggccagcttccagatcttccctagcacggtgttggggagcttggacttcaccatctccttcttggcgttggcgcccgtgatcttgccgttgacaggggacagcgtgtagaagatctcgtcgtaggtgggcttgtccttgcccaccacccactccacgtcgtcgatgccctcgccggccccctcgccgtagccgtgcccgaacggcccgttcatggtgccgtcaaaggcgcc

SEQ ID NO: 341107 - DNA, 501 bp, Homo sapiens; identical to SEQ ID NO: 334291
  chr11:64739249-64739750
  hypo

SEQ ID NO: 341108 - DNA, 142 bp, Homo sapiens
  chr11:64774064-64774206
  hypo
cggtcaggaggctgctgcagcgatccaggtgagtgggtgggggggtctgtcatgcggagagaagagtggtacctgcctcttaggttccggagtgagggcacagcaggacacgggcaaccaggggcagcagctgcgctcctgc

SEQ ID NO: 341109 - DNA, 921 bp, Homo sapiens
  chr11:64875426-64876347
  hypo
cgcgccatccaggacgactgccaggtcatcacggcccgcctggcccagcagctgcggcagcgctttaggtgtggcccctctgccctgaccccagcgctcccgccagccccgagccccatctgtgcccggctcctgggccctcctggagctgtccccctgccctgtgtgtgctttgctttcctgctcctgccccatccaccggcagccccggccctgcccttcactacctctccctcgtgcagggagggcggctcaggcgccccggagcaggcagagtgcgtggagctgctgctggccctgggcgagcctgcggaggagctgtgcgaggagttcctggcgcacgcccgcggccggctggagaaggagctgagaaacctggaggccgagctggggccctcacctccggctcccgacgtgttagagttcaccgaccatggaggcagtggcttcgtgggcggcctctgccaggtggcggcggcctaccaggagctgtttgcggcccagggcccagcaggtgccgagaagctggcggccttcgcccggcagctgggcagccgctattttgcgctggtggagcggcggctggcgcaggagcagggtggtggtgacaactcactgctggtgcgggcgctggaccgcttccaccggcgcttgcgggctcccggggccctgctggccgctgccgggctcgcagacgctgccacggagatcgtggaacgagtggcccgcgagcgcctgggccaccacctgcagggtctccgggcggccttcctgggctgcctgacagacgtccgccaggcgctggcagcacctcgcgtggctgggaaggagggccctggcctggccgagttgctggccaatgtggccagctccatcctgagccacattaaggcctctctggcagcagtgcaccttttcacc

SEQ ID NO: 341110 - DNA, 160 bp, Homo sapiens
  chr11:64950885-64951045
  hypo
cgcttccccccccggggcaggttggtagagcaggctaatgtgcatccctcctgccccaggggactgctggctcttggcggccatcgcctccctcactctcaacgacaccctcctgcaccgagtggttccgcacggccagagcttccagaatggctatgcc

SEQ ID NO: 341111 - DNA, 738 bp, Homo sapiens
  chr11:64951346-64952084
  hypo
cggaggtcggtctcagttgccccatctgagaaaggagtgttcgctggggaaaacagatcagcacgtgtggccttctccacgtgtcaagcctcctatcccccaactcctcctgcgctttggcaaggtctgactgagcccagcagaaaagaaagactcgggattaagtctacgtaaaccagcttttcctgacggtgtgcccagggcccatttttcaagtcacaccaatcaattctcaatgagctgcctttgggagggacatgcccagcaaccctggatgagactctccagccttggaggccccagccctgcccgaaggactcttgggtgttccctccttctgcctggttagagagccccttaccctactctgtccttgcccgccttgcgcgggtggaggtggccctcggaacccagggtgcggaacccacagtgcggatccactttggcccagcgccacacccacctgctccagtctgcaggggcgcagtctcgcccccttccctcgctcctccaatccgctcctccctggcctccgattggccagttcagtacccgccacccacactctccgcaacctgggctcctagggccgcctccaccccgccccgccccccgttgtcctggccccgacccctcagatggtacctcgagtccttggtcgcttctgaccccagacgccttcggccccgaccctgccctgggaaacgtggcctttgtggcatctcagaaacaaagccc

SEQ ID NO: 341112 - DNA, 421 bp, Homo sapiens
  chr11:64977165-64977586
  hypo
cggctgtgggctgactgtacatggcttttgctgcttctcctcacccagccccaagtcgacttgccggctcggcggccatctccccttctgcacagttgcccactctcccatgactggtctaagtgatggaatttccttcttaacggccacccagcgtgatggcaatgggaagctgggcctggtggagttcaacatcctgtggaaccgcatccggaattacctggtaggttgtccccactcacctcagtcatgcaggtgcgggccgggcaggtgggaagggccgggtgactcagcctggccctcaccctctgccgccacctcagtccatcttccggaagtttgacctggacaagtcgggcagcatgagtgcctacgagatgcggatggccattgagtcggcaggtgagactccaaggctgac

SEQ ID NO: 341113 - DNA, 443 bp, Homo sapiens
  chr11:65123957-65124400
  hypo
cgcagtgaggctctgcctgcctcctaccacccggacctgggcatcccctggttagagtggttggcacagtttgaccgggacatgggacagcagggccgacaggtggctttgctgctggctgcccgagtggtggaggagctggcaggcctgcctgggctctaccacgtgaagctcttgcctctggccgcctctagcaccacgcctcccctgcccagctcagtggtccgggcctttaaggcccattaccgacaccggctgttgggcaaactggctgccatccaaagcgagagggatggcacctcgctggccgaggccggggcaggcatcaccgtgctggacgccctgcacgtggcgtctgccgcctgggccaaggtgcctcctcagctcattttcagcagcttcattcaagaagggctggctcccggcaaaacgcccccgtcctc

SEQ ID NO: 341114 - DNA, 559 bp, Homo sapiens
  chr11:65386927-65387486
  hypo
cggaacaccgtccccaaccttactcccccagccttgtctgagcatctgtcacttacacttgggggcctctctctgggcagcggccgaggagactggcaggcgggaccgctcaagcagtgtgaggcggacccaggccattcggagacgccacaatgcaggcagcaaccccacccctccagcctctgtcatgggctcgccgcccaggtgagcaccttgccagctgtgccgaggggcaccgggggccggggagggcccgcaagctctagctggcgctgacctggggctgaccctctccagcagcctgcaggaagctcagcggggccgggctgcctcccactcccgggcgctgacgctgccctctgcgctgcatttcgcctcttcactgttgctcacccgggccggtgccaatgtgcatgaggcctgcacctttgatgacacttctgagggtgctgtgcactatttctacgatgagagcggtgagcctttcccaagcccggtggcccagtgcctccccgccttcccccaacagcctgagtcctcctagcagtggtgctcgctc

SEQ ID NO: 341115 - DNA, 889 bp, Homo sapiens
  chr11:65397157-65398046
  hypo
gttggcaatggcctcgtcaccttccagctgcgtggccttgagttccggggtgagccgcaggaccaggctcgggtgggcaggcacagctcgggcctgatgtgggagctgtgttcaatagcacgtgcgaaggaggtccagtccagctctgtccaggctggcgggtggccttgggcaaggcactcctcctccctgggcctgcgtttcccagtctgagcaatgaggtggcagggtctcttggccaagccctgtgcctgccccaactttaggtcccagtgactctacaggtcactgcagtgagggcctgggcctggaggtctgagttctcacacccagcctgctctgtggtctcaggcttggcccatgggttgggcgccatgagtgagccagctccttcctctcaggaagacgtgtgtgttggatgcccgagagtgcagaggggccagaccgtgtccctgctccctcccgccctgcccttggatgctgggagttgggaggagaaaggcaggcgctctttcgtgaatcttggcatccaataaggttgactcccctggcgtccaagggggtgaatggcagcaggcctctgatgccatgttggtcactctcccaggacagggcaggtagggattgttctagcagcccctgactgcacacccctcctccacaggcacttactgccagcagcgcgaggtggaggctatcaccgagggtgtggaggaggacgagggctgttgctgctgtgaacctggccacctgccacgggtcctgtccttcaatgctgcctttgggcagcgctggctggcttgggaggtaacagccagcaagtacgtgctggagggctatagcattagtgacaataatgctgcctccatgctgcaggttttcgacctcc

SEQ ID NO: 341116 - DNA, 471 bp, Homo sapiens
  chr11:65413830-65414301
  hypo
cgccacacaccacctacaggtgggcaccggagtggtcccaggtctcccgtgggcatggagtcctgccgcccctcactaacgcctccctccccgcagggtggccgtgagccgcacccaggacacccctgccttcgggccagctctgcctgctggcggaggccccttcgcagccaacgccgacttccgggccttcctgctggccaaagcgctgaatggtgagcaggcggccggccacgcgcgccagttccacgccatggccacgcgcacccgccagcagtacctgcaagacctggccaccaacgaggtgaccactacgtcgctggactcggcttcacgcttcggcctgccctccctgggtgggaggcgccgggcggcccctcggggcccaggcgccgagctgcaggcagcgggctcactggtgtggggagtgcgcgcggcgcccggggcgcgggtcgccgccggggctcaggc

SEQ ID NO: 341117 - DNA, 136 bp, Homo sapiens
  chr11:65511334-65511470
  hypo
cggcagcccgtcgggagctgcagctgccaagatgcaggctgcagcgtgggagtcgcagaggaggaggcacagccggggctgtgtggcccaaggggccagcgggagctgggaacaggtgaaagcctcaccccctgcc

SEQ ID NO: 341118 - DNA, 1970 bp, Homo sapiens; identical to SEQ ID NO: 334295
  chr11:65553781-65555751
  hypo

SEQ ID NO: 341119 - DNA, 262 bp, Homo sapiens; identical to SEQ ID NO: 334296
  chr11:65582723-65582985
  hypo

SEQ ID NO: 341120 - DNA, 354 bp, Homo sapiens
  chr11:65684985-65685339
  hypo
ccccaagctggaaacggctctcatagagagtggggcagaggtgccagcgattggcccggtagatgcccaggtaggtgtagacatcaggcttgtaggtgagcaggcacttaatgcccgctgcacggatggctgaatccgcctccagtacacccaagcggtccgtgaagtcgtccgtgtaaacacagatgacctggcgcccaccctccttggcacgtgggctcaccttggccacctgaagctggccttcaaccacggcccgggcaatgccagcccaggcgtggtccagcttgaagcccggtgccagatgcataagccacttgcccgagagcacgtggtgggtgatggcgagctggc

SEQ ID NO: 341121 - DNA, 168 bp, Homo sapiens
  chr11:65761126-65761294
  hypo
cgggagcagagatgacagagataaatgagagagcctgaggaattcatgctgctggcattggttcatccctgcccgatgcgcaccactcagagacctcaggtcaatgagccttgcttacttctcctaatttgagttcaattttgtcatttataagaaagtcccgcatac

SEQ ID NO: 341122 - DNA, 284 bp, Homo sapiens; identical to SEQ ID NO: 288223
  chr11:66045217-66045501
  hypo

SEQ ID NO: 341123 - DNA, 1099 bp, Homo sapiens; identical to SEQ ID NO: 334299
  chr11:66079395-66080494
  hypo

SEQ ID NO: 341124 - DNA, 383 bp, Homo sapiens; identical to SEQ ID NO: 334300
  chr11:66176338-66176721
  hypo

SEQ ID NO: 341125 - DNA, 682 bp, Homo sapiens
  chr11:66410904-66411586
  hypo
cgtctgtttcttcaaggcaaacgaatgcacgtgcagttgtccaccagccggcttaggactgcgcccgggatgggagaccagagcggctgctatcggtgcgggaaagaggggcactggtccaaagagtgtccgatagatcgttcaggccgcgtggcagacttgaccgagcaatataatgagcaatacggagcagtgcgtacgccttacaccatgagctatggggattcattgtattacaacaacgcgtacggagcgctcgatgcctactacaagcgctgccgtgctgcccggtcctatgaggcagtggcagctgcagctgcctccgtgtataattacgcagagcagaccctgtcccagctgccacaagtccagaatacagccatggccagtcacctcacctccacctctctcgatccctacgatagacacctgttgccgacctcaggagctgctgccacagctgctgctgcagcagcagccgctgctgctgttactgcagcttccacttcatattacgggcgggatcggagccccctgcgtcgcgctacagccccagtccccactgttggagagggctacggttacgggcatgagagtgagttgtcccaagcttcagcagccgcgcggaattctctgtacgacatggcccggtatgagcgggagcagtatgccgatcgggcgc

SEQ ID NO: 341126 - DNA, 242 bp, Homo sapiens
  chr11:66454439-66454681
  hypo
cgagagcactgttccctgttcctaccccagcttgaagacatgtttgcgctttcggtaatcaaaggcgacgctgccctgggccctggccaggctgacaggcacttctccgtggtatggcactcccgcgctggctgccttggcatccttgtaaaagccgaggctcccacgccgcaggacacagtacacgttctgccaggacctgcgagggacgcggtgctgactggccggcctcagtggcgccc

SEQ ID NO: 341127 - DNA, 61 bp, Homo sapiens
  chr11:66475619-66475680
  hypo
cgaggcgctggttctcgctgagccaggtctcccgcatggcagccttgcggtcgaagcgggc

SEQ ID NO: 341128 - DNA, 124 bp, Homo sapiens
  chr11:66511209-66511333
  hypo
cgtggaaaggggcctggatagggaggggtcgactcccaggtcccacctttgcgggggaagctggtccccctggattaggctgggagatgcttggggctggttgtaaggtaaaagacggggggtc

SEQ ID NO: 341129 - DNA, 217 bp, Homo sapiens
  chr11:66513570-66513787
  hypo
gcccggcccgatatgggaatatcgtaacagaggacgtgtgaaggaatagttagactctacacgtacctggaaaccattcttgttaactggtacaaatgaggatcttagttcccagatctccctgcctttaaaaagggggtaataattttccttgtgttgcctccctgtaaaagtgagaatctgtttgcatgaataataatgggagttggccgggcgc

SEQ ID NO: 341130 - DNA, 1338 bp, Homo sapiens; identical to SEQ ID NO: 263762
  chr11:66625240-66626578
  hypo

SEQ ID NO: 341131 - DNA, 329 bp, Homo sapiens
  chr11:66631185-66631514
  hypo
cggtcagggggccctccaagggccgggagcaaaggcaggcgggggctgcagcctctcaccttcacacctcggacgcggaactccgcaagggccctgctcatcttggtggcggccgtggggtggtctttgccgtgggcaatgactttgaccagcagggagtcgtagtggggcgagatgacggctccttggaaggcggaagcattatccaggcggatgcccatgccctctccgctccggaacacctgtgggaagggtgaggcgtgaggacctgcgccagaaactgcggtcaaaagtgccccacccaccccgaggctggccaggtgtgcacc

SEQ ID NO: 341132 - DNA, 563 bp, Homo sapiens
  chr11:66633455-66634018
  hypo
cgcccagcagtctcttcccctgggaggcgccgcccctcctctgggcactgcctgcctccgtgtactctatgtccacttcagagcccacatgcgggtcctccctaactgccgggctgtggcaacttggcactgcagccccaggcaccaggcagaacctgtgcacaggtgagctggcatctccctctgctcgagctccgcccacctcaatgcggccggtgtccggctggaagctgcgcgcggggtcctcggtggtgacccggcactggatggcacacccgttgatgcggatgttctcctgccgcaggcccaggtcgggtaggctcctgccctcagccacgtggatctgagcatggaccaggtctacgctgtagggcattggggggaggggggaaaggacgggagaaagggggaaacatgaggcgggggatagacgaggggcaccgcagccagtggggcgtccacacacagtgcgactcctgcccataggctctgggccagcctgaacagccggttcctcccaaccagtggctccaccagcccctgccctgctcccgccgggagcc

SEQ ID NO: 341133 - DNA, 42 bp, Homo sapiens
  chr11:66637058-66637100
  hypo
cgcgaccctggtcgatgcctcgcattagctgtggctgaggcc

SEQ ID NO: 341134 - DNA, 328 bp, Homo sapiens
  chr11:66655218-66655546
  hypo
cgcctggagtgatgccaaaagtcccactcagaagaaagatcagtttgggatgccaaaagagacctcccactctctttcagtttgggaggtcaaaaatccaacatcactttcacaggccgaaaccaagtgagggcagggctgcgcccctccgagggcctgcaacgaatccctcccgagtcttttccagcctctatggctgccgggctcctttgctcgtggccacatcactcccacctctggctctgtctccacatcgccttctcctcagcataggtctctgtcctctaaggacacttgtgatggcattcggggcccacctggatgatcc

SEQ ID NO: 341135 - DNA, 32 bp, Homo sapiens
  chr11:66658557-66658589
  hypo
cgctctgtcgcccaagcttgagtgcagtggcg

SEQ ID NO: 341136 - DNA, 269 bp, Homo sapiens
  chr11:66677377-66677646
  hypo
cgggtatgagcagaaggggacgcaggggcctgaccactcactgcggcagagcaacacagcatgatccatgctgtcttcaatttacacagaaagcccggtgttgaaaaattcaacaattaaccttccatgcaattgtaaaataccctgaaaccaacaattatgacgactttataggtgttttcttcatctgagaaaaacacaagcggggggagtaagtgtctggcttaaacggtagcaaggttatgcgctgctgccctggcgaacgagtc

SEQ ID NO: 341137 - DNA, 902 bp, Homo sapiens; identical to SEQ ID NO: 334304
  chr11:66885239-66886141
  hypo

SEQ ID NO: 341138 - DNA, 329 bp, Homo sapiens
  chr11:67078663-67078992
  hypo
cggacgcacgcatccacccagcccagctcaggggctggtgccggcacgggtttcacctgccggctgcctacgcaaaggcagagaaagcataggaggggaggagggcagggaggcctgggtctccagggagctgaggagggcttctgggggccagaaggaagctacaagcaggtagggttcaaggagcggggcagcagggctggggtgttgtcctccctcccgaggaagcgtggctgtggacagcttggcttttggcgtgcgtgccacaaacattccggccctcgcctcctcctggctctgtgcttggcacccctgccccagatcttccc

SEQ ID NO: 341139 - DNA, 250 bp, Homo sapiens
  chr11:67432668-67432918
  hypo
cgagtccagactcgtggcccagccgtgggccctccattgagaaagggtcttggcccaggtgggctgcggtagggcagcaggactcaccgatgtagcgatcgctctcgttgctctggcccccaatggccacgcggctgcagcccagcaatgcccgcagccgctggaactgtttctggttgatgatgtggcccaggtttggggagctctgggggtcgtcgccatagaaacgggtgatggtgctctgcagggc

SEQ ID NO: 341140 - DNA, 74 bp, Homo sapiens
  chr11:67450470-67450544
  hypo
cggcacaacgtgtgtgtcttattgcgatgctttccaaacgatgatgctcccttcgtcatctcgcttctgcggcc

SEQ ID NO: 341141 - DNA, 680 bp, Homo sapiens
  chr11:67462547-67463227
  hypo
cgctttgtcctacctggccactttcctcacgggaatttaggcccctcttagcattggcgtgccggtataaaccccaaggcaagatccgccttaagccgtatgaggtagccacggaaccgcaggcaagactcactcgctcggtccagcagtaggacttatcatgatttacacaagcaacaccagctgcagtgaggcttgtgactattcacacacacttttaacctccagaatatcccgaccaccaagcaagtactttgtcgcacccttgcgacgtttctttactttgctctgtgaacagagtttatctggtccccgaggcagtgcaatgcaagcctattcgccgttttccacgttgctgagggtccgggtttattcatcacaacaggtaagtccggattcccagtccctgaggccaccgcagtaaggcagtggggcgcctccccttggtgggggggcgggaatcagagaccccgacccgaaggagactgggtgatcccagacgagcccccaagactgttagaaataaatccttattccccgatgtcacaaagaagaatcagcagacgaaaagcttcctcagcaaggtgatttttaccttctgcagaaagagtgctgcccgtccgcaatcctgccacgatcgcatacaaaataaaaaaggcactagaatatttatcccttac

SEQ ID NO: 341142 - DNA, 243 bp, Homo sapiens
  chr11:67764077-67764320
  hypo
cgataccagtgcaggcaaagagcacctcgaagccgctgtagataaagaaaggcacgaggtggcgcaggcggtagtcacgcacgtgcttgaagggcagctggaagatgttgccccagcccacgctgcgcagatcgatctcctccgtgggccggtaagcggctccgcacaaacccagcacctgcgaacccattacttgaaggggcggccagccaggcccaggcctggcctccaggcttcagcccc

SEQ ID NO: 341143 - DNA, 511 bp, Homo sapiens
  chr11:67781084-67781595
  hypo
cgtgatgtcatttaatcctcacaatgacaccaggtgccattagcatccccatttcacagatgaggaaaccgaggcagagaaggtgagtgatttgcccaaggtcccacaaccagtaagaggcagagcccggagacaggcctgatggtggctcgagaggctcgttcttggctcctgggtctcagtcctgctcccgtgacgagccatcccctatggggaccatggtgcctgtcctgtgtgcgggccactgcccagcttctcccaatcagagcaggaagatggtgggttcagcctggccccacaatcactccagctgagggctggcctggggctcctgaccaggctctcagtagcacactggtccagcagggccatcctgcagaccggagcaggtcccgccctcaaggtggccacttaacaatcacccacagccttgcgctcaccgatgctgggccctgggctcagaaccgactgtgtggtctcatcattagctggcaggtgccatcattacacc

SEQ ID NO: 341144 - DNA, 188 bp, Homo sapiens
  chr11:67850488-67850676
  hypo
cgtggccgcatcgttccttagactctgctttgcgggtcgcctcttccaagcagtctgtaaattcctaatgaatagggactgcgtcttttattgatgttagtcttctcccagagcaccaagcaaatctcgatgcccactacactttttaggctgcatgaataaatgaacactccggagtggtatagcac

SEQ ID NO: 341145 - DNA, 431 bp, Homo sapiens; identical to SEQ ID NO: 334307
  chr11:67895663-67896094
  hypo

SEQ ID NO: 341146 - DNA, 179 bp, Homo sapiens; identical to SEQ ID NO: 334308
  chr11:68080751-68080930
  hypo

SEQ ID NO: 341147 - DNA, 245 bp, Homo sapiens
  chr11:68133046-68133291
  hypo
cgctgtgaggaggacaatggcggctgctcccacctgtgcctgctgtccccaagcgagcctttctacacatgcgcctgccccacgggtgtgcagctgcaggacaacggcaggacgtgtaaggcaggtgaggcggtgggacgggacggggcgggcgggcggggcggggcctggcgggaatgggttgcggccgccgggggtgccccagaaggaacctcggcaaacccgttcgaaatgatccacttggc

SEQ ID NO: 341148 - DNA, 98 bp, Homo sapiens
  chr11:68216755-68216853
  hypo
cgtgccctgtgtgcatttgagttgtgtgtccccgtggagggaatgccgacccccggaccaccatgagagtcctcctgcacccgggcgtccctctgtcc

SEQ ID NO: 341149 - DNA, 86 bp, Homo sapiens; identical to SEQ ID NO: 263891
  chr11:68433120-68433206
  hypo

SEQ ID NO: 341150 - DNA, 274 bp, Homo sapiens
  chr11:68564274-68564548
  hypo
cgccgccccaccgtcctcgtcagacagcagcccgggcgggtggactcaccatggcataatagttgctgttcaccatgagcggccctcgtcctcggaggtagatgtactcctcccaccagtcgctcacctagtgggcgcaaacaccagacaaacccgcaggctcagcaggggccaggcaggctccctggcagcagcccagagccgcggggaagggcaggcagtgcttttggcagacatttcggcgtctaacaggggccattccagaacagggaac

SEQ ID NO: 341151 - DNA, 744 bp, Homo sapiens; identical to SEQ ID NO: 334310
  chr11:68606653-68607397
  hypo

SEQ ID NO: 341152 - DNA, 127 bp, Homo sapiens; identical to SEQ ID NO: 263906
  chr11:68772696-68772823
  hypo

SEQ ID NO: 341153 - DNA, 260 bp, Homo sapiens
  chr11:68822128-68822388
  hypo
cgggtcacggcccaccctgcatgcacccatgtcatgcctcatgtgacttttcgcttgtagtaccgctccatcaaccaccgggtggatgccagctcgatgtggctttaccgacggtattactcgaacgtatgccaacggtgagaacgcacccatgtggaactcagggttcctgccggcttgcgtggcaggggaggctggcccccacctggggatcacctggtctcagggtccaggcaggctccccactacatagatagggc

SEQ ID NO: 341154 - DNA, 286 bp, Homo sapiens; identical to SEQ ID NO: 263919
  chr11:69192498-69192784
  hypo

SEQ ID NO: 341155 - DNA, 499 bp, Homo sapiens
  chr11:69206214-69206713
  hypo
cgggcgagctgaggaaaaggctcaggggctgacagatacagggactgagcgcggctaggatagccctactgagggagccagaggggccctggggagatgcctggcgggcccgtctcctagcgactgacgtcccgccaccccacgggccccttgtgctgggcactgcccacccctgacactggctgcgagcacttttcactgctgttctgcatgaataagcgccaggcctcttgccaattgtccccctcttaaaaggcagccccggcgaaaggccttttcaagtgggatcgcacagtgccacccaggccgggcgggcattgttttggggagccagggtcctgcttggccgccggggtcggggggcccacaaagcatggtgatggcggctccacgcactcagcgcagcagccctgcttattaatctgcaaaactcacaccgatgcctttggaggggagattgagtgaaaacgatgtccttaggggagtggcctttgcaggc

SEQ ID NO: 341156 - DNA, 267 bp, Homo sapiens
  chr11:69931095-69931362
  hypo
cgagatgacatacctgggccgagaaacagcgtcacccttagtcgcggctcctactaaggggggccgcaccttgggcgtgcagatgggacttgaggctgagctcagcctcccgcctgcgctgtaacccgggctctcctgccctgctgggcctcagtttcctccttggcgaattgagaagaatagctctttcgtgcttctcctgcagaaggaatgcaggccccccgtgctggctacagacttgcgatactggggtcttccgtgaacccc

SEQ ID NO: 341157 - DNA, 476 bp, Homo sapiens
  chr11:69946965-69947441
  hypo
cgttcgttcattccataaatatgtgcaaagcggctgctctgagccttccgtgggcagcagggcagcacagaggaggcctgagcggtggtgctggggagaggatggcgtagggcaggcctcgtggacgcagccgggggcctcaccatcagcataagcgaccacggtgggcttcagaaggagcgatgagacaggattcaccccattgccatttgcttttctatcggatcaggaagaagcatgggatgaagctggggtgtcaaggagggtctcccttcctcggtggtcacctgaggtgctggggccccacctttaactctctctgctggacctggaagctttgcccaggtccctgggaccgtcgcgttcacaggcttccaccgaggctctcgctgggtacattgacttgacccacttcagattttgttttcttaaaactcatccccaagtacactttgggaggccgaggcaggcagatc

SEQ ID NO: 341158 - DNA, 422 bp, Homo sapiens
  chr11:69962357-69962779
  hypo
cggccaacagggacgtgcacggcctttctatcataacgggggcacacctgggcaaccctcacactctgtgtgaaatgttgccccaggatgatcttaatttgtgtcaacgagagctgctggggtttatgttttgaaacataatggatgtgagcgcctccaaagctccattggatgataagaacgtccctttcctctttttttaacagggagactacaacggtgaaaacgtcgagttcaacgacagaaaagtaagttgatggagcggagcaggaggtggctctgtcagagcctggaggcgttctggggcggggtgggcctgcagctggaccgaggacttaccggcctccagggcctccccagggcgctcgctgcagggggctgagaagcgggtgtcccctctcaccttttcaggagaaaagtcc

SEQ ID NO: 341159 - DNA, 161 bp, Homo sapiens
  chr11:69970463-69970624
  hypo
cgaagagtgggcacgctatggagttttctataagtaccagcccatcgacctggtcaggtaagaacgcgccacagcctgcgggaatcaagtccctactccgatggcagtcggataacatccctgtgggtttcaaccgctctgaatgttcagtacccgggaac

SEQ ID NO: 341160 - DNA, 109 bp, Homo sapiens
  chr11:69972743-69972852
  hypo
cgcgggaggtgagcatgaatgctaggcttcggtgcaggctggtacttgcgggaggtgagacatggatgccagaggcctcggtgcaggctggtgcttgcgggaggtgagc

SEQ ID NO: 341161 - DNA, 537 bp, Homo sapiens
  chr11:69982805-69983342
  hypo
tcagctccaccacacgagggtgtgggcagagcagtgtgagggacaggtcttgctttcccgggattccagtcacaggtggggacagacacgcacagaaatcagcatagcctcgagataaatgcagttgtttctcttcgtggacaaaggcgttcgattttccagaggaggccaagaatgggagccgtgggtccgtagcttggtgtagggcgtgagttccagtggtgagcagtgagacacgctgagctgggctggccagggagggggtgagcgccccgtgctgggaagcattcaagctgaggttggaggacttcttgctggggcaactgcagagcattgggaggtgatgtctatgtgtgatccaaggccacgtggcttattgggaagattcccaggcctacaacccagctctggtttttaatttggggatcaaaatgtatcgtaaatttagaattataaatgtagggtcagcagcagtctgtcaccgctgaagcacacgtgccagagctcccgttgtttatcacactgtatccgaacagc

SEQ ID NO: 341162 - DNA, 227 bp, Homo sapiens
  chr11:70016958-70017185
  hypo
cggggtgctgactagcactgggctctctctgcagtcatccagtttggcttcgtcaccctgtttgtcgcctccttccccctggccccactgtttgcgctgctgaacaacatcatcgagatccgcctggacgccaaaaagtttgtcactgagctccgaaggccggtagctgtcagagccaaagacatcggtgagtgaccccacgggccggcagaaccggttccgagtgc

SEQ ID NO: 341163 - DNA, 545 bp, Homo sapiens
  chr11:70022862-70023407
  hypo
cgagacgatgaaccccattcaaatggttcgggggacccttagaattttatttttggtttacagagatccttagagcagtgagtgtcaccctggaatgtgcgtcagaataactcggggctcccagccccaccccaggagaggcggatcccgtgggctggggctggggtgccggttcagcatttctctaacacaccccgcggatgtgcagggccacacggagagccatccgcctggacgtagatatcctgcagacctgtcaggacaggctccatcggggcccggaagcgaggaagaccccgctcccggctccatctcatccccgcctcatccctcccatttcctgttgtctctctgggccggttgggcgatcacctgggcggacccccttgcctgcctgagtcctgcacttcgacggccctgaactcaggagccacgtccctcgggagccccaaagacttcaacctccaccccaggcccaccgcacctcagcaccccacttcggaggtctcaaactcagcgccccaagggccaggtgggccacacgc

SEQ ID NO: 341164 - DNA, 196 bp, Homo sapiens
  chr11:70028548-70028744
  hypo
cggccggcccttctgcgcccaggctgggggtccccctcactgccatgtcccctgcacaggccttcgtgatctccttcacgtctgacttcatcccgcgcctggtgtacctctacatgtacagtaagaacgggaccatgcacggcttcgtcaaccacaccctctcctccttcaacgtcagtgacttccagaacggcac

SEQ ID NO: 341165 - DNA, 297 bp, Homo sapiens
  chr11:70031529-70031826
  hypo
cgtgggtgcggggccatgggctgctcgcccaagagagggctgccctcccggaggcagccgcacaccaagctgagcctctcccaggcgtccctcgagctgcctgactccagccagagcctgagccccaccgaagtcccaccctcgactccaccacggtcttttgcaggtataaagactaccgagagccgccgtggtcggaaaacaagtacgacatctccaaggacttctgggccgtcctggcagcccggctggcgtttgtcatcgtcttccaggtgcggtgggtccctctttgtttcc

SEQ ID NO: 341166 - DNA, 255 bp, Homo sapiens
  chr11:70054500-70054755
  hypo
cgtgagccaccgcgcccggccttggacatggatttcttaaagcaacttgaaaaaacaaattctatgttcattttttttacaatcaggtagaatttgtgtttctggaaaaggtacgcacaaatcttgggcttacttgaaagctggaggtaacagccgtctcttgctctctgactcctttttcccctaagacagaagagggaagacaagtccaaacgtctgtgctttgcgggagacttcaggggaatttgatcaagc

SEQ ID NO: 341167 - DNA, 141 bp, Homo sapiens
  chr11:70164164-70164305
  hypo
cgcttacctggcagaaaccaccccattcagtccgttctccatgcccattcacctccactgacccgcagaggccctaagtgccgccagcatctctgttagtgcatcccgccctctttcttctacgcggcatgctgcctaccc

SEQ ID NO: 341168 - DNA, 129 bp, Homo sapiens
  chr11:70189849-70189978
  hypo
gagagtgatgctgacgtgtctgatggtgaagatgacagggacactctcctcagctcagttgacctgctatcgcccagcgggcaggccgacgcgcacacactagccatgatgcttcaggagcagctggac

SEQ ID NO: 341169 - DNA, 302 bp, Homo sapiens
  chr11:71169280-71169582
  hypo
cgctttcagtacggcacatctggctgcggcagtgggtcttatgctggctgctcattggaatcacctggaaggctttgagaaaacacctgagccccggcccccagacacgttcagactggactggcccacaggccctgcccctccccgctcacctgagttgtttctggagctcaccttctcactgtctctgcagcggctacggatgttgggatcattattacgagtcggacaccctcttgcactcgtttcaagtcctagcggcccttgtggagtctcccgtcactcaggacatcatctgcgac

SEQ ID NO: 341170 - DNA, 189 bp, Homo sapiens
  chr11:71185648-71185837
  hypo
cgggtgcttagtgagggcccctgtggagaagcccccgggggtcccgcctgctcctggctctcccctgtaagccgggcgcttagtgagggcccctgtggagaagcccccgggggtcccgcctgctcctggctctcccctgtaagccgggtgcttagtgagggcccctgtggagaagcccccaggggtccc

SEQ ID NO: 341171 - DNA, 195 bp, Homo sapiens
  chr11:71188521-71188716
  hypo
cgcaaggtggccacggccatcctgtgaaccgccgcagtggtgcaggtgctgttcccgctgtcccacactcgtgtttagcaaggcaacactcaggaacacaatttgataaagatattttttcatgaaggaataacccctatgagttaaaacctcatttctgcatataccgcaattggcagaacccctaccatagcc

SEQ ID NO: 341172 - DNA, 931 bp, Homo sapiens
  chr11:71192127-71193058
  hypo
cgtgctgtgaccttgggccccaaggtgctgtccgtccattctgtggttcagtgtccccattttaaaatgaggacgatgataatacccacgtcctgggtctgtcttcagaatcacatgtgtcccttctcacgaggtgcctaaagcagagacgggcgtcctgagagcccagcgttgactctggcactgcagcctcctggggcctgcttgggtgggttgttgggtgctgtgggcaggggccaccgcctccgggctccatgttctgattgccctgcagccttggacctgcctgctggctctgggattttttaagacgaagtcaacaggtaagacttccagtttctagtgagcccactttgcttgttctgctggttggtctggttttattctggggcagggtagggatttttttttttttttttagtgcaaacaacaaaaagcatttcatcactctgcctccatggggagcttagtctgtgctagccagaggcaaggtgggcacagtggctggtgggtcagctccacctttggaggctcagcggaacccagcccatcagcattcagggtcacgctcaccatcttgccagcattgtaatcatgcgtatctgcagttcgtcggtggagtcagcctctgacacgccccgcagtgaagtgtcttttttccctctgaaaaatccattcatcctgccacgtgcgggtatttgtcctgaccccatggaaagtgctaacacccacgtgcatttctgtggacgcctccttgaggtctatgggtggagcttggctgatccatgggcatgctgcttctccgaggctctgctcacgctgtctgattggtccattccaggcagggtttttgctgcccttgagtggcggggtggacagcgcagccaccgcctgcctcatctactccatgtgctgccaggtctgcgaggcc

SEQ ID NO: 341173 - DNA, 835 bp, Homo sapiens
  chr11:71229615-71230450
  hypo
cgcccttgcccgctttacctgcttggcggcgcctcctgcggccagttcctcggagcatccacctgtgcagggcccgcgtcctcccctccccgcgccagcctgaagcccccgggcagcctcggtttctccttttcttctggatctccagggactgcgcggcacctggggtcctctggtggggaatgaatgagtgagtgaatgaatgaatgaggaacagggtggccatctgggtctcagtgtctgtctgggggcggggtggggggcgtcccctgatgggtccggcttgtcagcgccactcctgggggcttcccgtgggggtggcacagggcagggcccccccatctcagggctgcttcctgtggggagggtccccgagaagcggagcgtgggctggtttttagggggtaacccacgaaggttccgccagcccccggtcggttctgggaacccccgggcttgaggaacctgcccggcaccgccctggaacccgggcctgcagcctcctcggggcctcgtctccttcctcccagggaagctgtggggcagggacctggtggacggcgggtgggacccgactccctcccatcccctcacggtggggtcgcggctctgggggctcctggggccgctgccggaccctcagctctgtcgccggggggccgcagtctcggggcggcacagatggggcggctccaaggcttcagccacagacattggtttcctctgttgggggcgcggaggcccaaggtcagggagtctcagggtttgcttccttcccaggcccctcctgggctgggggcgggtgtctcctgcgccccctcgggccgccctctgc

SEQ ID NO: 341174 - DNA, 295 bp, Homo sapiens
  chr11:71507748-71508043
  hypo
cgacaaagacactaggacacacagaggacaagcaacccccgagctcccacagactgctgcccggccacctggctcttgtgcctccactctacacccaagccccccattgccaccagcctttgccccagctccccctgagcacagcccctcctggcagccatgtgcacagatgtacccgcagcagcctctgcctgcacacagagacacggacaagccagtgcctgtccacgtggggcagcccgttaactacagagccaacaaacaagccaggacacgaagacatactgggttccac

SEQ ID NO: 341175 - DNA, 751 bp, Homo sapiens
  chr11:71724337-71725088
  hypo
cgctgggcccgcagcagctctgcccgcagtcccccagcggcctgcttgctctgctccagctcctcacggtggcgtttctcggcagcggcctgctcggcctgcagctgctggcagaggtgcttagctggcagcagctcactcaccagggcctgtgtgctggtgtgctcgagctgcagggtggagagggcctgctctttctggaagaacttctcctgccacgccttcaattcttggcccagctcctccgcacgctcagcctgtgaggtcagctcctgccgcaggttctctgaagccacccgctgtttctcagcctcctcccggaggctctgcacctcctcccgcagagcagagctgcgttctgcagctctggcactgttgctggctgtctctgcctgcagcaggcgcagcctctcctccagcttctggctcttctctgactcggccatcaccagccgcttcaactccttgctctccccctccttctccaggacctggcgattcaggatggacacctcctcctccaagctgctgatgaggctatttttcctctcagcctcttgccggccccgggccacctgggccttccactcatcttcagccttgctgtggtcttgtaccttggtgcggaaggcagccaactcccgttgggccgaggctaaggcactctgactgtgccctagctcctgggccttctcctctaactggccctgcagagtctccagagcactgtcccgctcagcccgggaggccc

SEQ ID NO: 341176 - DNA, 731 bp, Homo sapiens
  chr11:71725587-71726318
  hypo
cgcggcccgcagccgttccagctcattgcccatctgctctgcctcccgctccatagcctgcagcgctgcctgtgtgctgcagaactggcgtccctgttgctcttccagccactcgggctgtctgtctcctgccctcgcaggctccttgactaactcccgggaggctgtttcctgctgctcacctgccttgcgcaccaaggtctccaagcgggccacctctttgctggtggcagccatcttttcctgcagagtggagaggtcatctgcaagcttctgggccctgacttccttctcttggacctgctggagtgctctggccaggttggcatggagctcagctagttcgttctgctgccggcttatctggagctcgctgtgggattctatgcctgccaccttctcctttgcctcctgcagctcctggcgggccttctcacattcctccttcaaagtcatcagctgttcctggaacatggcgccatactgtgcctcctcttgctggctatcctcataccgctcacgccaggcagctacttctttgacgagctgctcacactcactctcagctgtgtgctgggcagccatggcctctgccagctcccgccgcaggacttcagtctcagcctgatgggcctccccaagctgctgtaatcgagcctccagccccttgcgcccagccctctcttcttccagctcctttcgttcccgcttatgctgctccaccaggcttc

SEQ ID NO: 341177 - DNA, 238 bp, Homo sapiens; identical to SEQ ID NO: 334318
  chr11:71955497-71955735
  hypo

SEQ ID NO: 341178 - DNA, 175 bp, Homo sapiens
  chr11:72109417-72109592
  hypo
cgaatcaagtcgcccgagagcggatactcagccattgtgtccagttttaatcctgtgttttcccaagtaattaagccttcttgcttatgaacttgtgactaagtaaagcatcaccgagaggttgtaacatcaaagtgccttccaccgtctgtccgtgtttggtaaaattggattt

SEQ ID NO: 341179 - DNA, 516 bp, Homo sapiens
  chr11:72465692-72466208
  hypo
ttaacaaaattaagggcagacgcaggggaccgcggcagcggccatgaggcaggtgggaagcaggcacagtgatgagccggctgaggctgtgggatcgtttattggggctctgtccagccaggctgcagcacccgcctgggcctggcccggtgccaccaggtgccgggtgggggaggggagaaagtgcaggagcggccgccgccccagggctcgcccggtcctgtctccgtccctgaagcggtgcggcgctcaggtgagcgaggtgtcgtcgtcgctgccctcgccgcccgcgccgcccatccgctcctctctgctctcggccaccgcgctctcgtcgatgttctccagtgagtccgcatgctgcaccgacagctccgacagcgccaggctcggcaacgggctctgctccgggtgcagccacggcttgaagtgaggcaggtgcttctgtttccactcggggtacttgaggcacgccttgtacatcttcttcatggcctgtgggcccgccgccccgcc

SEQ ID NO: 341180 - DNA, 501 bp, Homo sapiens
  chr11:72475539-72476040
  hypo
cgcaggtgaagaaactgaggcaggccgggtcgtgggggtcaggtaagtgtccacaggcctccctagcctggcctggctcgtgccctttccatagcccccagcaggcagcactgctgcgctaagcagaagaaattacacccatctttgttcctgcgggcggcggtggccacgccccaaaggtgtaattctaagaggcttggggagggacaggtggcggggtagggctgagtctctggagagcaccaggtgggcgggccggtaccaggaacccccagctattaggccctggctgagtgagtgtccacaccagatgttgccgtcaggtgttgcctggtaggccatcttggctgcccccggagaaactccccctggaaacaggaacccaaggggtgttgctccaccaaggagccatgctgggcttgagtacgtttaaagcctggtgacagcagggaccccgacatgcagtggtattacatttgagaaaacaggccagccaggtgc

SEQ ID NO: 341181 - DNA, 464 bp, Homo sapiens
  chr11:72532189-72532653
  hypo
cgtgactttgggcaagacacttaaacctctctgtcggtgtccttgtctgtgaagtgagagtggcagtaccagcctcctggtgtggtgaggatggaaggagcgtgtagcctgctgggaacatcatggcgcccgagggccggatgggcatttggcagcctctgcgcgaggagtcctcgcagtggttatgcatggtgctgggagcggagcgctggcttcccactcttcaggcgaggcagtggagcgggttgctcttgccagagaggttcctagtagggtcgcagagaaacgaagcggcacggcgaggattgggacccagggctgactccagagcccgagggccttccactgctccacaaacagcagcgcgtccctgtgcaaggtcccaaacctgtgtggggctcagcttgcttttcaggaagggggcgggcaggtgagcagccgactcccttagcgccttcggcccc

SEQ ID NO: 341182 - DNA, 202 bp, Homo sapiens
  chr11:73063854-73064056
  hypo
cgaccctgtgggtccttcagggctacatgcagccgctgaagcagccagagaactccgtgctctgtgacccttcactggtggacgagatcttcgaccagatccccgagctcctggagcaccacgagcaattcctggagcaggttcggcactgcatgcagacctggcatgcccagcagaaggtgggagccctgctcgtccagtc

SEQ ID NO: 341183 - DNA, 805 bp, Homo sapiens; identical to SEQ ID NO: 264008
  chr11:73072924-73073729
  hypo

SEQ ID NO: 341184 - DNA, 35 bp, Homo sapiens
  chr11:73310307-73310342
  hypo
cgccaaaatattagcaatgattatcttgggggaaa

SEQ ID NO: 341185 - DNA, 55 bp, Homo sapiens
  chr11:73310372-73310427
  hypo
ttttttgagacggagtctggatctatagccaggctggagtaaagtgggggcgatc

SEQ ID NO: 341186 - DNA, 87 bp, Homo sapiens
  chr11:73491527-73491614
  hypo
gagcgaaacaccatttcaaaaataaataaataaataaaaataaaaaataaactttgagtggatagcctcttggagatggggcaggtc

SEQ ID NO: 341187 - DNA, 56 bp, Homo sapiens
  chr11:73492566-73492622
  hypo
cgttaacaatgtacggcagaacaatgaaatctaagaccattataggacccgtgacc

SEQ ID NO: 341188 - DNA, 416 bp, Homo sapiens
  chr11:73685713-73686129
  hypo
cgccaaggttgagcttgctttatggatgacaagtgggctaggctgggctgtcgggggcaggacgaagattctggctgaactttccaagggacgggacgcttgggatcctggctggtacgaggcctcccacactgtcaaatgtcaactccaccagcactgagacaatgagtagatgagaatgtagaaagagggaaggtggtaggtaaaggagcggaaggaagaggtggggaaagagggaaggagagaagggaaggagggaagagaaagaaggaagaaaaggaaagcatggcccggctagagacaaagccagaggtgatcaggtcagcagcaggagaggctcagaagggagcctctcgggaagtgcaggcagccatgagggctcgtttcagctgctcataggtgacgaacatcaccac

SEQ ID NO: 341189 - DNA, 385 bp, Homo sapiens; identical to SEQ ID NO: 334324
  chr11:74022468-74022853
  hypo

SEQ ID NO: 341190 - DNA, 944 bp, Homo sapiens; identical to SEQ ID NO: 334326
  chr11:74441810-74442754
  hypo

SEQ ID NO: 341191 - DNA, 1744 bp, Homo sapiens; identical to SEQ ID NO: 334327
  chr11:74951684-74953428
  hypo

SEQ ID NO: 341192 - DNA, 233 bp, Homo sapiens
  chr11:74994376-74994609
  hypo
cgttcctgcagccgcgtcaggggcttcttgtcctcgggggccggtgggaacgactgtacgttggccacaaacaggtccttgcgaaaggtcaggcccaggacatccaggtcctcccggccatagcggaaggcgcaggtcagcgtcacatagactgtggggagcgaggagcactgaggaggggcctgggagagcagcaagcgagccccccagagtgccggcagcagccctgggac

SEQ ID NO: 341193 - DNA, 952 bp, Homo sapiens; identical to SEQ ID NO: 334328
  chr11:75140896-75141848
  hypo

SEQ ID NO: 341194 - DNA, 632 bp, Homo sapiens
  chr11:75152263-75152895
  hypo
cggatgggacccccgcacaccacagcagggagaagagccacggtgcgttgactgtgtagaggttcacactcaggttccaggacgcgtagtccctgtggggcaggggagaggcaggtcagcatgcggaccctggcagctccaggcccagtgtcggggctggtaaagcacgtcctgttcacgacctcacagccatgcccggggcaaggaacattggctccagagggccaagctccgggacaagcccgggtctgcccgacacgctcaccctcttgtctttgaaccatgtgtgcctgattcctctgtgtgcccatccctctgcccgaccgtgtgtgtgtgtgtgtgtgtgtgtgttggggggtggtggtggcaggactgggagagactcagtcccaccctctcctggaggagcccagggcagggcaggcacctgagctcctggcgggacacctgagtgtagcgcaggttcagccgctggatgtggcctctccgcaggctggcgactgcctccttggagcctgatgtctgttggaagccgggagccaccttccgcaccaggggcctctgcctgctaggcagccacatgacctgcaggcagaagagaggcagcctcagacttctcttctgcacgatgc

SEQ ID NO: 341195 - DNA, 209 bp, Homo sapiens
  chr11:75167782-75167991
  hypo
cggccgaggcggcccttaccttgtgcagccagtgcaggttcatctgctgccccacggcaatgtgacatagtgccaggacctgaggagggacccacagggtgattgtcaggcccgtgtgggcgggaaggctttgccagtttctcagacaccctgctccccactgcggctctgggcctgaccctgggcagaggcagcgaacctccctccag

SEQ ID NO: 341196 - DNA, 1797 bp, Homo sapiens; identical to SEQ ID NO: 334329
  chr11:75378416-75380213
  hypo

SEQ ID NO: 341197 - DNA, 373 bp, Homo sapiens
  chr11:75852075-75852448
  hypo
cggaggccacgcgaatgtgcaccctagccaagaacaaggagaagccctctccgggcaccgggccacagtcaatggcactctcctacccagcgagcaggccgggtccgccagtgtccagcttccaggcgagttccacccagtctcagaagctgagctctgctgtactgtggagcaagcagaagaaatcatcgggctggaagccacaggtttcgcctcaggtgatcagctagaagcatttaactgcatcccagtggacagtgctgtggcagtagagtgtgacgaacaagttctgggagaatttgaagagttctcccgaaggatctatgcactgaatgaaaacgtatccagcttccgccggccgcgcaggagttcc

SEQ ID NO: 341198 - DNA, 148 bp, Homo sapiens
  chr11:75858225-75858373
  hypo
cgcctgaagctaaggagaggacaggagcacttgggaaggaagcggtctggggggcctaactgagcagcaccctgcctcacaggagagcaagtcacagacgtttcagccccaacgctgccgctcactggctatgtgaccccggcgaggc

SEQ ID NO: 341199 - DNA, 40 bp, Homo sapiens
  chr11:76164370-76164410
  hypo
cgccaccgtgctgaagttcggagagcagtaaacgatgaac

SEQ ID NO: 341200 - DNA, 815 bp, Homo sapiens
  chr11:76371492-76372307
  hypo
cgcccagttccagtgtctccagggcattgtggcttaagtcaaggagcatcaggcagggcagggagcctaagcgccgggcctcaaaggtccgcaagcagtttctgctgaggttcaggaagcacagggaggtcaggtgctcaagaaagctgtcggggatgagctcaatctcattgtagctcaaatccagattcaagagctgggaaagggggcggccgctggcattcccgctgggggctgagaggggcagggctgaccagccctcggaaggtgcgtggatgcccttgctgtcctggggtggccctgtggggagccggatgaggttgttggacaagttcaggtagatgagtctcgggagcgcggccaggtcggggaaatggagcagtttgttctcccgcaggtcaagccaggtgagctggaactcagcctggggctgggaggccgtctgaaaggcctcgatgctgttgcagctcaggtctagcacccgcagctgctggaggctgaagtcggagatgcaggtgagggaattcctggagaggttgagatgggtcaggcggggcagaccctcgaaggcgccatcctcgatgtccatcagcacgttgctatgcaggtcaagctgctccagcgcaggcatgtcccggaaggtgtggcgggtgaggcgagtcagactgttctccgccagtgagagggtatgcaggctgggtgcctcccccagcagccgctccagcaggccgctgtacaggctgttcccagacaggtccagggaggtcacgcgtggcagggggcccaggccaccagcactcagcgcagtggccatc

SEQ ID NO: 341201 - DNA, 782 bp, Homo sapiens; identical to SEQ ID NO: 334331
  chr11:76381512-76382294
  hypo

SEQ ID NO: 341202 - DNA, 1273 bp, Homo sapiens; identical to SEQ ID NO: 334332
  chr11:77184261-77185534
  hypo

SEQ ID NO: 341203 - DNA, 118 bp, Homo sapiens
  chr11:77383112-77383230
  hypo
cgcttgtgtactcgccttatttctttaccacgtcgcaaactcttctgggaaccgtcactttctgagtcttctttgtagttaatttgtcttttctgatttctccttgaccgccttcgcc

SEQ ID NO: 341204 - DNA, 366 bp, Homo sapiens
  chr11:78534109-78534475
  hypo
cgtctcccagcggtgccccgtgagcacgtgccagagagatcactgagacacacaccaagtactggggagacagccaagtgccgcgctcttcaagagcactaggcccttctgaggagaggcgagcgctcccgggaaatgcctcgtcttccctccacccttaacccacagcagctccagtgcaatgccccggcctcagcgcctgcccagcggtggcccaggtgcaagagacaacacctcgccccgttcccactgcccacagctgattggacccggctgagcacctgacccaagccaagctcaggcacaggctgaacggtgctctgtgacacagcccactgggcagaggttccgggccaataagagccc

SEQ ID NO: 341205 - DNA, 1140 bp, Homo sapiens; identical to SEQ ID NO: 334335
  chr11:79150741-79151881
  hypo

SEQ ID NO: 341206 - DNA, 787 bp, Homo sapiens; identical to SEQ ID NO: 334337
  chr11:82444299-82445086
  hypo

SEQ ID NO: 341207 - DNA, 304 bp, Homo sapiens
  chr11:85906179-85906483
  hypo
cggccaccgagggggtcggggaggctgcgcaaggcggtgagccccggcagctggagcagcccccgccccagccgcacccaccgctgccccaggagcagcacgaggaagagatggcagcagaggctggggaagccgtggcgtcccccatggacgacgggtttctgagcctggattcgccctcctatgtcccgtacagggacagaacagaatgggctgatacagatccagtgccgcagaatgatggccccaatcccgtggtccagatcatttatagtgacaaatttagagatgtttgattacttcc

SEQ ID NO: 341208 - DNA, 250 bp, Homo sapiens
  chr11:85989397-85989647
  hypo
cgttatgtgtggtctttaacctgttgtcatgttttttccctagatgtacaacactgactcatcataaatgtggtgctgctattcgacaaaccagttttagcagggatagcagcattcttatagctgtttgtgatgatgccagtatttggcgctgggatcgacttcgataaaatacttttgcctaatcaaaattagagtgtgtttgttgtctgtgtaaaatagaattaatgtatcttgctagtaagggcac

SEQ ID NO: 341209 - DNA, 803 bp, Homo sapiens; identical to SEQ ID NO: 334346
  chr11:92930623-92931426
  hypo

SEQ ID NO: 341210 - DNA, 442 bp, Homo sapiens; identical to SEQ ID NO: 334347
  chr11:93063608-93064050
  hypo

SEQ ID NO: 341211 - DNA, 127 bp, Homo sapiens
  chr11:93212118-93212245
  hypo
cgtccccctcccgcgcctcctctccctgccgatggggtccgcagccggctgcggggctcactcggtgatggtggggcgcgtggccacgtacacaaacaccacgatcaagagcacgaccacggccagc

SEQ ID NO: 341212 - DNA, 51 bp, Homo sapiens
  chr11:93425646-93425697
  hypo
cgccctttttttgctccgtcgcccaggctggagtacagtgacacgatcatc

SEQ ID NO: 341213 - DNA, 386 bp, Homo sapiens
  chr11:93476562-93476948
  hypo
cgtgggtcttgcggctgcggtgcctcacttacttagcccacggctctcaactcctcgcgggagggggggcgcgagtgaatgaggcgggaactggagtgctggaagccacgaactccagtcacccaggcctgctgcgctccaccctttatgggagggtgcgtgggggtgagcagatgctggagccggagcgagcgcttttggtcgccggtaggagcgaactccatgcaggccctgcggctgtgtctaggggatgcccgcgacccctgaagacccacagcctgtcttacaacctgtcatggttgtgaaaagttttgagagaacgtctgcacagtgtctaacggtgtctggtatatagtgtgcactcaaatggtaaccagtttagttgc

SEQ ID NO: 341214 - DNA, 319 bp, Homo sapiens
  chr11:93911562-93911881
  hypo
cgatcctcctgtacctgcccccgctgttctggcgtttcgcagctgctcctcatatttgctcagacttgaagtttatcatggaagaacttgacaaagtttacaaccgtgcaattaaggctgcaaagagtgcgcgtgaccttgacatgagagatggagcctgctcagttccaggtgttaccgagaacttagggcaaaggtaacttagccccagcaggcagctcatcgggttttgtaggacaaattctctgcccttctactgccagtctgggcccagagttctcattgctaggaggcggggcaggagtggaagcagggggac

SEQ ID NO: 341215 - DNA, 89 bp, Homo sapiens
  chr11:94895732-94895821
  hypo
aaaaaaaaaaaaaaaaaataggcatcccccaactctgggccacagctggagacctaagtgctgctgcactctggccaggttggacagcc

SEQ ID NO: 341216 - DNA, 886 bp, Homo sapiens; identical to SEQ ID NO: 334351
  chr11:96122370-96123256
  hypo

SEQ ID NO: 341217 - DNA, 174 bp, Homo sapiens
  chr11:97588960-97589134
  hypo
cgaccccatgaagagggaacggtggtccatgcgcgggacccagcctgtaatcaagcccagcaggctccggcctgccgcaccaaggagcccgcccccaccggaacccgcgccggcccaccatcgcggcactcagcctgggctcccgcccacacctctccctccacacctccctgc

SEQ ID NO: 341218 - DNA, 1471 bp, Homo sapiens; identical to SEQ ID NO: 334352
  chr11:100998184-100999655
  hypo

SEQ ID NO: 341219 - DNA, 1109 bp, Homo sapiens; identical to SEQ ID NO: 334357
  chr11:104034057-104035166
  hypo

SEQ ID NO: 341220 - DNA, 1408 bp, Homo sapiens; identical to SEQ ID NO: 334358
  chr11:106888298-106889706
  hypo

SEQ ID NO: 341221 - DNA, 1154 bp, Homo sapiens; identical to SEQ ID NO: 334360
  chr11:107798898-107800052
  hypo

SEQ ID NO: 341222 - DNA, 67 bp, Homo sapiens
  chr11:107931221-107931288
  hypo
cgaaatttgagcgaggtagaaataattatgcaaattgaataccactaaaagaagaatctggctggat

SEQ ID NO: 341223 - DNA, 158 bp, Homo sapiens
  chr11:108031546-108031704
  hypo
cgctaatcactaaagcggaaaaaaaaggtgtggttttgaaattaaaactttcaaacttgccttaattttcttctttttcattggtattgatgaatttgtaagatttttactagaaggacgagagtttcgctcacgttcatctaattcctcaattttcc

SEQ ID NO: 341224 - DNA, 171 bp, Homo sapiens
  chr11:110144196-110144367
  hypo
cgtgcaatcatggcacactgcaaccttgatctcctggacgcaaacctatactcccacctcaatctaccaagtagctaggagcacaggcgtgtgccgccaggcctagctccaaactctattttaaataataattttattgtgtaaatacctaatatctcaaaaacttaacac

SEQ ID NO: 341225 - DNA, 1832 bp, Homo sapiens; identical to SEQ ID NO: 334362
  chr11:110582246-110584078
  hypo

SEQ ID NO: 341226 - DNA, 1575 bp, Homo sapiens; identical to SEQ ID NO: 334365
  chr11:111411097-111412672
  hypo

SEQ ID NO: 341227 - DNA, 45 bp, Homo sapiens
  chr11:112108650-112108695
  hypo
cgaacgatcatttgtattacctcaattgaggtaggaactaccagc

SEQ ID NO: 341228 - DNA, 253 bp, Homo sapiens
  chr11:112370531-112370784
  hypo
cggaggcggccaccgcgtgcaggaagggtctcccaggtggccggagaacccacaggcgtgtacggacaaggtgccctgggtgccctggctgacccctggtcagcccggccaggggtagagaccttcccggaaggcgaagatcgcataggtaactgggaaagtgtgttttttgaggtgggggaaccccatgcagccaggtcagggctgcagggtaggccgcctgccccacaatcagagcactgcctcgttaccc

SEQ ID NO: 341229 - DNA, 203 bp, Homo sapiens
  chr11:113552734-113552937
  hypo
cgtacgggcggcaggcccttctcttcctcctcctgagtgggctcaaccactcgaagccagcacctataacatgctgagcccgcaccgggctctaggaaccagaaatcagagtgaccaggggaaactgggacatcgatatgcatggcttgccggagtaacactacacctgactcaccttcctagcctcccgcaaattgccagag

SEQ ID NO: 341230 - DNA, 215 bp, Homo sapiens
  chr11:113560972-113561187
  hypo
cgtccaggtagccagcgcaaagcatgcggggggtgagggctccgctgtacacgcaagagctgttgcagagctgagtgctgaacaagggcaccaccgtgtcctggagcatatccgagctgtaagctatgagagacaccgagaaaaactgcagggcacaaagcaaggcccaggcaggcagagcagcaagaggggaggtaattcgaagtcccagagac

SEQ ID NO: 341231 - DNA, 655 bp, Homo sapiens
  chr11:114112596-114113251
  hypo
ttttacataccacccgacacagttgcccactacccttgctgctgcgatgtatttgatcaatgtctatcctttagctttagcttccagagctcgggaacgacgtcgattttgcccatcactggggccacatactgggtgctcagtgttgcatagcctgggcccactctggatttgcccctgagcatggggatttggaggtgtgagtcccgacactggctctcactccagatgggtaaagaatgcaccttgtattcccacctttctgaggcaccccctctcctgtctcccacaggcactgacatggccgtcttctgtctgctgtgtgggaagcgcttccaggcgcagagcgcactgcagcagcacatggaggtccacgcgggcgtgcgcagctacatctgcagtgagtgcaaccgcaccttccccagccacacggctctcaaacgccacctgcgctcacatacaggtaggtcagtccagctgatgggtggatctgggtctctgggagccagcgtctatatttacctccaaggacgtaaagtggaggtggtgggctgagtcagccttcagtccttctgctcaaggcttggacgtgcagaggctgcccgtcgtgcaggtaaatgtggacagttctcccagtcccctcctgtggaccgtc

SEQ ID NO: 341232 - DNA, 163 bp, Homo sapiens
  chr11:114115566-114115729
  hypo
cccttcccccccaccgccgccttcacccccacccggctgggtggctgccgatgtacgttttaattaccggctccagctgaagtctcacgtggccttggctttatttatttatttataccttaatgaggatactgaatctttgattaaagtcgtaatcgttgcc

SEQ ID NO: 341233 - DNA, 2832 bp, Homo sapiens; identical to SEQ ID NO: 334370
  chr11:115373363-115376195
  hypo

SEQ ID NO: 341234 - DNA, 951 bp, Homo sapiens; identical to SEQ ID NO: 334371
  chr11:115630443-115631394
  hypo

SEQ ID NO: 341235 - DNA, 317 bp, Homo sapiens
  chr11:116691767-116692084
  hypo
cgtcccccgcatgggggcccagtttctgcctgagctgttccatctgctgcaccagggctttgttgaagttttccccgtagggctccacccggcgtcggaactcctccacctgctggtccaggtgcccacccagctctgccagtgacttctgcagcccctcggtgttgcccctcaggttgccacgcacgtcctcggccaagggcgccagcctctgccgcagctcctcggcactggccgagatcctggccttgagctcctcggcgttcttcttcatctggaaggtcaggccctcaagctggtggttgagcttctcctgc

SEQ ID NO: 341236 - DNA, 121 bp, Homo sapiens
  chr11:116821500-116821621
  hypo
cgttcttggctgcagtagcctggacgggaatttccaccttgctgaccagactttgtttcttaccgaatttgcacagatgttcttgaataatgttccttcattttctgcttactcttaggac

SEQ ID NO: 341237 - DNA, 320 bp, Homo sapiens
  chr11:117073762-117074082
  hypo
cgcgaagtgcagtccaaaatcgagaagaagtatgacgaggagctggaggagcggctggtggagtggatcatagtgcagtgtggccctgatgtgggccgcccagaccgtgggcgcttgggcttccaggtctggctgaagaatggcgtggtgagtggcaccctgggctagggcgctggggggctggggtgtgccaccctgtgagtcctgggccaatccctgagctgactgctaagctgcgtcctatgccctatgcctggtagattctgagcaagctggtgaacagcctgtaccctgatggctccaagccggtgaaggtgccc

SEQ ID NO: 341238 - DNA, 125 bp, Homo sapiens
  chr11:117075033-117075158
  hypo
ggcatgacaggctacggacgacctcggcagatcatcagttagagcggagagggctagccctgagcccggccctcccccagctccttggctgcagccatcccgcttagcctgcctcacccacaccc

SEQ ID NO: 341239 - DNA, 206 bp, Homo sapiens
  chr11:117076092-117076298
  hypo
cgcaggattccctagtgaagcagctcaggcctgggggagccgtgtgtatcccagctgtgccggcagcatcataccaatcgtgggggtggtgaaggagccaggggttcattcatggttggtttctgatcaggcatcttgggaatggataatggaggcagccgctttcaggacaggcatgtccaggggctcctcccagcctctacccc

SEQ ID NO: 341240 - DNA, 59 bp, Homo sapiens
  chr11:117188555-117188614
  hypo
cgtgagccaccgcgcccggccgatcattatctctactcttatcctacacggttcagacc

SEQ ID NO: 341241 - DNA, 157 bp, Homo sapiens; identical to SEQ ID NO: 334373
  chr11:118662851-118663008
  hypo

SEQ ID NO: 341242 - DNA, 66 bp, Homo sapiens; identical to SEQ ID NO: 334374
  chr11:119145611-119145677
  hypo

SEQ ID NO: 341243 - DNA, 121 bp, Homo sapiens; identical to SEQ ID NO: 334375
  chr11:119227108-119227229
  hypo

SEQ ID NO: 341244 - DNA, 257 bp, Homo sapiens
  chr11:119290824-119291081
  hypo
cgtgtaggtgccctcgtccttgctagtgaaggcggataagtagaggaccttcatgttgtatttgctggtgaagttggttcgggagcggtatgtgtgctcaggcacccccacagtgccaaagagcacgtgcttctttgtctcacgggtcaggctgaactcgtactggatgggtgaactgctggtattctcatggcggcagtccagacgaaggctctggtccactaggcaggccgttaggctggtcaccttctgccctc

SEQ ID NO: 341245 - DNA, 199 bp, Homo sapiens
  chr11:119505179-119505378
  hypo
cgcggcagaccgtggcagtgtggacccggacagctgcggagcgtggctggctgcagccccagctgccaccccgctggatccacccagcatttgtgctgagaccgcaattcccctagaccgctctcagccaacaactagacaggctgggaatccagcgcaggccctttcctgtgggacgcaggagtcctctaatagcagc

SEQ ID NO: 341246 - DNA, 261 bp, Homo sapiens
  chr11:119506104-119506365
  hypo
cgccaacgaatccgagttctggggataaatccttttctcgcccggtaattgctctgtaagccaaaaggaattacactttttggcaaccacaacagagcctccccaggacgccagagcttcccttccgctggtgacttccacacaccaccccgcaggccgttcacaagcctctgtccatccagacgccctaaccacggcccctgggctcaggacatagggtgtaggtgctctcttcgccccctcaacctgccgctcctgccc

SEQ ID NO: 341247 - DNA, 130 bp, Homo sapiens
  chr11:119506981-119507111
  hypo
cgctcccctacctcccttgctttcgggcctgggatgatgtgctctctctctcctgaggcaggcgtgagctggtgtctgcaggtgggagattctcgccctgcttggtgcttagaatgccctggcccccgac

SEQ ID NO: 341248 - DNA, 750 bp, Homo sapiens
  chr11:119535401-119536151
  hypo
cgtgcggggaggggctggggaggagcggtcacagacagaggctctggaaggggggctacacgtaccactccttcttggaaatgaaagacccgtcgttctgagaaaccatgttctcagccaagtccagctgctcagggtcgtactggtagcccagagtccggtccccgtagccgtcctgacgggcctcggcctcatccacggtgaagtagggccgcttggcgtcctcgtcatatttggggtgggggccgcccaccttgcgctcgccccctccaccgccctcctcctcctcctcctcctcctcatagctgcttccacccagtgggccggccttcttctcgtcgtctgagtcgtcggggtactgcaggttctgtgccattggtgggtggtgctgggggatgcctgccttgctgtagccgttgccatacacgtgcttcttggtgctgtagtcacccttgaaggtgtgccggcgccgacgcagggcgaccacgatcccgccgaccacaatcaacaccagcaggatgctccccgccacgcccccaatgatggccgtgggcaccggcccggcgcgccgcccatgttcgggaggagacggggtgtaggggaattctgggtgaggaaaagagatggaggggacagcatcagcgtgtgctcctggggtgtagagggggtgggagggaggcagggaaaggagaggccaggaaggacaggctgtctgcaccccaggtttgagcagctccagttcgaggcccc

SEQ ID NO: 341249 - DNA, 286 bp, Homo sapiens
  chr11:119574555-119574841
  hypo
cgcggctcagcctgttcagcctgtcacctccactgcatccaggatgccgggctcggaactggcacacaggtgctcaggaatggcgctcacagggagagagtggcctttatcatgcccatcctttcacactcggagtacgtgttagtgtgcctttttgccacctcttctccaagacaatggttcctcctggcaaatctccccagctttacccaggaacacggttctccgggcaagaagctgcctcaaaaggctcacccaaggtcacacagctgggtgcacccctcac

SEQ ID NO: 341250 - DNA, 471 bp, Homo sapiens
  chr11:119579320-119579791
  hypo
cgggggagggaaaatggggagtgactgctaatgaataccgaggttctttccgaggtgatgaaaatgctgtggattaggcagtggtgacggcctattgtgaatatactaaagccactgactcgtatacttcaggagggcgaattttgtggtttgcgaattatatctcaacaaagacaaaagaagaaaagaggcacatgaagaaggatggatgatggcagggctaggctggagacaagcaggctaccagaagacctctgcaagcctgcagcacccccaagcgtgggggccctggggtcccacggctcagcgcagctgctaagagcaccggtcttctgaagtccaagactcagcttccctcctcaggactgcccaggactgattctgcccaggactgattttgctgggggagggggcaccggagagatcctgagacactctaccccccacgcccgcccacatagccaacatatc

SEQ ID NO: 341251 - DNA, 283 bp, Homo sapiens; identical to SEQ ID NO: 334379
  chr11:119587853-119588136
  hypo

SEQ ID NO: 341252 - DNA, 121 bp, Homo sapiens
  chr11:119589825-119589946
  hypo
gcctccaaaagcttcggattttggattagggatgttcaacctgcgccaagactctctgaagattcagcactaataactccccaaatgcatcaggcatggacaactacaacaccaggttatc

SEQ ID NO: 341253 - DNA, 128 bp, Homo sapiens
  chr11:119590586-119590714
  hypo
cggggggagcgggtcatgaaagcttcacaatagaagtggctcttgacttcagtattcagatttcatatttatgggaaataagcgggaatgggggaacagcatgtgcaaaggcacggaggcaggaaagc

SEQ ID NO: 341254 - DNA, 367 bp, Homo sapiens; identical to SEQ ID NO: 334380
  chr11:119598945-119599312
  hypo

SEQ ID NO: 341255 - DNA, 83 bp, Homo sapiens
  chr11:119606553-119606636
  hypo
cggcactcctgattagggatgggagcacttaaaactcaacggtgatactgagaagagggtttcatccaggatccgcatagacc

SEQ ID NO: 341256 - DNA, 291 bp, Homo sapiens
  chr11:119970240-119970531
  hypo
cgttatcaggcacgaggcaacaaggatggcctggtgggcacacggttggagcagggtcccgtcctatccctgttcacaacgtgtcatttagaaagtcaccaatacacacagcctctctgtttcttcatctgtggaatgggacgtagtaagtaatgctgcttaactacccacagttgaagtgacgacgaaggccggctgagatgaattctggcccccatctgaatgctcaccgtgtgctttcgacacagcttccactttcacgccgcgtaacacggtgagggagaaaccgcc

SEQ ID NO: 341257 - DNA, 79 bp, Homo sapiens
  chr11:119993701-119993780
  hypo
cggtgcactccactcacccccgaagctgttcgtgtagttgttcacatagcgatggtcaccacctaggaagcagagggtc

SEQ ID NO: 341258 - DNA, 685 bp, Homo sapiens
  chr11:120008024-120008709
  hypo
cggtctggcagaagagctccatcgtcttgccatgcacgggacacttgcgggcctcaaagtcccggatgggctcgagcagctggtggtctcggaaggcggcgccctccaggtggggcttgagatgcagctcgcagaaggaggcctggcacaccaggcaggacttgaccgccttctgcttgttgccgatgcaggagtcgcacagcacctcctcggagccggacttggaccgtgaaaaaaggcccgtgtcggcccgggggtagctgttccgccgggtctccccgggctccatgatggacaccgtgggcttccgggactccgagaaaatggacttgcgcagctcgcccttttcggcaaaggtaacgggtggcttcttggcagcccccagctggagccctgcgtacggcgacctcttgccttccatagagtccatgctgaagtagttggagttcttgtcgtccccggactcgacaaactggatgatgggtcgccgccactcattgcccgcgaacagggcgctcctaccttcccctggcttcagggcgctgcccaggctcttgccctcagctgcctccccgccgtgcccgttggtggtcttggcatccttgccgtcagccttggtgccattctccaggctgccactggggcccgacgggctccgggcatccctggcttctgggctcgaccc

SEQ ID NO: 341259 - DNA, 496 bp, Homo sapiens; identical to SEQ ID NO: 334383
  chr11:120110626-120111122
  hypo

SEQ ID NO: 341260 - DNA, 151 bp, Homo sapiens
  chr11:120338518-120338669
  hypo
cggggtatatcaaactatgaatcatagaccaagtcatgctcactgtctgtttttgtaaataaagttttattggagcacagccgtgctcgtctgtttatgtactgtccctgattgcttttacattataacagcagagtcgagtagttttatc

SEQ ID NO: 341261 - DNA, 211 bp, Homo sapiens
  chr11:120367550-120367761
  hypo
cgattaaactccgctttgtttcagagatgatcataatttggccagcttcatttccctctactgtccatcgtgagccctcttccccagtaaggcttaggctcctccaagtctccccacctcacattctaggccgggactccacctttgcttttcccttagtctgaaatgtactttggaaacttccaagatgagtattaaaagtaatagctgg

SEQ ID NO: 341262 - DNA, 61 bp, Homo sapiens; identical to SEQ ID NO: 264249
  chr11:120384060-120384121
  hypo

SEQ ID NO: 341263 - DNA, 591 bp, Homo sapiens
  chr11:120998452-120999043
  hypo
cgcgtcagtgtccacagtgcagtgcccgagcttcagccactactccgtgtgcacaagcagctgccccgacacatgctccgacctgacggcctcgcggaactgcgccacgccgtgcacagagggctgcgagtgcaaccagggcttcgtcctcagcaccagccagtgcgtccctctgcacaagtgcggctgcgacttcgacggccactactacaccatgggggagttcttctgggccacggccaactgcactgtgcaatgcctgtgcgaggagggcggggacgtctactgcttcaacaagacctgcggcagcggggaggtgtgcgccgtggaggacggctaccagggctgcttccccaagcgggagaccgtgtgcctgctcagccagaaccaggtgctgcacacctttgacggcgcctcctacgccttcccctccgagttctcctacaccctcctgaagacctgccctgagcgcccagagtacttggaaatcgacatcaacaagaagaagcccgatgcaggacctgcttggctgcggggacttcggatcctggtggccgaccaggaggtcaagataggaggcatcggggcttc

SEQ ID NO: 341264 - DNA, 346 bp, Homo sapiens
  chr11:121023460-121023806
  hypo
cggcagacctcctggctcctgcctctccccgtgcctttcatctccctgagtaggtgagcaatggccatgagaaaaccctcctcggtgccttgtgatcgtgcgagtcttgacttgtctctcttgttccagctgtcacctgccctccaaacagccattacgagagctgcgtgagtgtctgccagccccgctgcgccgccatccgcctgaagagtgactgcagccactactgcgtggagggctgtcactgcgacgctggctacgtcctcaacggcaagagctgcatcctgccccacagctgcggctgctactccgatggcaaatattacgaggtatgggaggccagccc

SEQ ID NO: 341265 - DNA, 326 bp, Homo sapiens
  chr11:121349234-121349560
  hypo
cgacttgcagatggcaaaaatgtttcccaggtacactgagaataaccttgcaatcaaattcatgttttctaggatactatcagtgtgtctgcttgcgtgcttatgcgtgcttgtatgcgtgtgtgtgcatgtacgtgcttgtgtgcgtgtgagtacctgtgtgcgtgtgggtacctgtgtgtgtgtgcttgtgtgcatgtgggtaactgtgtgtgtgcttgtgtgcgtgtgagtacttgtgtggatgtgcatgcttgtgtgcgcgtgagtacctttgtgtgtgtgcttgtgtgcgtgtagttacttgtgtgcgtatgggtacctgc

SEQ ID NO: 341266 - DNA, 730 bp, Homo sapiens; identical to SEQ ID NO: 334389
  chr11:123228762-123229492
  hypo

SEQ ID NO: 341267 - DNA, 1291 bp, Homo sapiens; identical to SEQ ID NO: 334390
  chr11:123300826-123302117
  hypo

SEQ ID NO: 341268 - DNA, 171 bp, Homo sapiens
  chr11:124071504-124071675
  hypo
cgtctagaaaaaaaaaaaaaatcactaagaccgtaccaggcagacacacaggcggctggacgtcgagaggcgcacaccgacaggcaccagcatgccagcaggccaccgaccggcagaagcagaacgacacagtttggcgggggcagttggaggaaagcccaggccactgag

SEQ ID NO: 341269 - DNA, 67 bp, Homo sapiens
  chr11:124387399-124387466
  hypo
cgccgtggccctccccgctgtgtacttcattccctctacagcccttgatcaagtcggtaaaaccggc

SEQ ID NO: 341270 - DNA, 923 bp, Homo sapiens; identical to SEQ ID NO: 334395
  chr11:124735074-124735997
  hypo

SEQ ID NO: 341271 - DNA, 268 bp, Homo sapiens
  chr11:124794665-124794933
  hypo
cgtcggtgatggagatctcgacctcataggtgccctcatcggccagctgcaggtcgctgagaagcagggagccattttcaaagagtcggatacggtctcgatagtcaggccgcagggtgccgatgacctctgtgccaatggactgcaccacggtcactggcttgtcccgcttcagctgccacttcactacaggcctgtcgctgctggtactgctgtactgcacagaaagcagagccgacttccccacggtgccatggatcaggcgcac

SEQ ID NO: 341272 - DNA, 400 bp, Homo sapiens
  chr11:125817639-125818039
  hypo
cgaggtggctccgtggagctggcctgtggctcagggcctgccccgctgctggtcctctggagcttcacccccctgggctccctggttccccggcctgtggccgtcaccgatggagccatgtccaaggtggaggccatcgcctcggctctgggagtcgtgagtctgaggaacagcagcctggtgctgggggagcttcacgagggtgcccgtggccacttcctatgccaggttctgcacgtggctggcggccagctccacgctgcctactcccacctcacgctggctgtgctgggtgagggcctggccccagctgcagctggtccgcgggctgctttggatttctctggaagtgtgctgcccattccctttgtgtgtgtgcgggacccaggttctaaagggc

SEQ ID NO: 341273 - DNA, 168 bp, Homo sapiens
  chr11:125971144-125971312
  hypo
cgagggccacagcggggcagttgggcacagacagcttggggatgtgcggctcccccaaggcggggctgggatatcaaagttggaagcgcgggggcatgtcagcctggctttgtgagtggggctcccatcagtgcatgaaagccttgctctacaaactgcattcgctgc

SEQ ID NO: 341274 - DNA, 439 bp, Homo sapiens
  chr11:126055123-126055562
  hypo
cgcctctcaaatccagcccacccatttattttccaaaactcctgggagagacgacagagggacagaggcgcagggctctgtggaagccaggcctgcacccctcccccaggcggcctcctctccactctgggaccagccctgccttcccccaggctgcggtgggtcccgtcggagcacagcggctgctcataaagctcccgatgaaaggcacgctggacaggagaggtcaaggttcacacaagcagctccgccttctgtttcatttacaagtggcagtcacctcattaaacccggtccccctccacccctaccccaccctcacccccagcccaccgcacgcatccccacacccggtccctcccgctcagccctggccggcacagagaggctgggttggagatcgagtggtccagagatgggcaggtgacctgctggacac

SEQ ID NO: 341275 - DNA, 65 bp, Homo sapiens
  chr11:126083900-126083965
  hypo
cggtgagtctaggcacttggtgatttaaagtagagttgttctcagtataaagaatttatgtggcc

SEQ ID NO: 341276 - DNA, 394 bp, Homo sapiens
  chr11:126272994-126273388
  hypo
cggaagccctggaatgcctggggccactgagcaatcctcaccctcagccccacaaggggagggcgtggctcgtgaaattcctgattgggtatagcccagcaagccccaagactcgcccagtttgcttagcgcaacactgacgctgttttggaatgaagacaagacaatgtagaactttactggggaagaggtcgaagaagggctaattgtcttgttgttcaagactggttagcgctgctcacctctgacgctgctcacctctgacgccaaaggtttttccctggaaggcagccctggaggatacctgtgtatctgtctttcacaaaaggtgaaatgagctctttgtagtgtttcccgcccaggctgcattttagaatcacagaggaggtacggc

SEQ ID NO: 341277 - DNA, 981 bp, Homo sapiens; identical to SEQ ID NO: 334401
  chr11:128391758-128392739
  hypo

SEQ ID NO: 341278 - DNA, 1200 bp, Homo sapiens; identical to SEQ ID NO: 334402
  chr11:128562635-128563835
  hypo

SEQ ID NO: 341279 - DNA, 1617 bp, Homo sapiens; identical to SEQ ID NO: 334403
  chr11:128563902-128565519
  hypo

SEQ ID NO: 341280 - DNA, 1417 bp, Homo sapiens; identical to SEQ ID NO: 334405
  chr11:129148499-129149916
  hypo

SEQ ID NO: 341281 - DNA, 125 bp, Homo sapiens
  chr11:129803851-129803976
  hypo
cgcgagcatctccagttcaatccttccggtgctttcgtgcagctctgcatcactgccttgatgttctctccccttcttccacagcatacgctccaaggtcatccactggaaccactccctcgtgc

SEQ ID NO: 341282 - DNA, 564 bp, Homo sapiens
  chr11:129993371-129993935
  hypo
cggccaccgggcctccaggctccgtccagtctcaggcctcccccagcccatcccccagctcgccagcctgtagcattttgaagcatttgacgtcactgcctctgtcctgctgacactctgaccattttcacacagctgtctgctcccaggaggcgatgacggggccctgccgggccgtgatgcctcgttggtacttcgacctctccaagggaaagtgcgtgcgctttatatatggtggctgcggcggcaacaggaacaattttgagtctgaggattattgtatggctgtgtgtaaagcgatgagtaagtcctgcctcgcgctggtcccgtgcggcagcaccgtcctgtctggcgtccgtctccctgccgtcttcgtggctgcatctgtgtggtgtccctgcccactcgggtgtttgctgtcggtcgtcttcccctcatctttgtgctttctagatctaggctttgctctcctgccggcagtggtaagctcagttctcgtgtcctgtgctcaccgtgtgtctggtggtgcttggtggtgatggtgcgtacccaccttggtatagc

SEQ ID NO: 341283 - DNA, 256 bp, Homo sapiens
  chr11:130059543-130059799
  hypo
cgagccgcccatgtgtcctggagtcgctctgggcgcacgtgggggaaatggggcccagagctccgcctcaggctcccgctctctccccagcgagggcagcgtcatcgcctactactggtctgagttcagcatcccgcagcacctggtggaggaggccgagcgcgtcatggccgaggagcgcgtagtcatgctgcccccgcgggcgcgctccctgaagtcctttgtggtcacctcagtggtggctttccgtgagtcc

SEQ ID NO: 341284 - DNA, 587 bp, Homo sapiens
  chr11:130060273-130060860
  hypo
cggggtctcagggtcctcccccagctctgcccagccctgcccccacacgtgccctccttcttgtctcctgcgcagacagctgcagctttggcctgcacgcccgcggtgtggagctgatgcgcttcaccacgcccggcttccctgacagcccctaccccgctcatgcccgctgccagtgggccctgcggggggacgccgactcagtgctgagcctcaccttccgcagctttgaccttgcgtcctgcgacgagcgcggcagcgacctggtgacggtgtacaacaccctgagccccatggagccccacgccctggtgcagtgagtaccccggggggcgggtagggctgtgggagcttggcggctgccctgtagggggccagcttcttcaacgattgggatacagtttatgactcttggccgcaggccactgctaaacatccaggcagcaggaggcacgtgtggtgtgatcctcagctgcagctccaggggagtctgggaggtgatttttctcagccttggcaaagcagaggaaggctctatagtccccagataccaaatccagcctgtgcggcctgtgccctgaaccgcc

SEQ ID NO: 341285 - DNA, 619 bp, Homo sapiens
  chr11:130079199-130079818
  hypo
cgcggattacccgtttgtcagccccgggcatctgggctgttccagagttttctagtccaatgacccgtggggagcgtctcgaatgacgctgccctcgaagcagcccggctctcagccccgtcctgccctctccccaggcactggcgcgctgatcctgcaaaagggtgagatccgcgtcatcaaccagaccacctgcgagaacctcctgccgcagcagatcacgccgcgcatgatgtgcgtgggcttcctcagcggcggcgtggactcctgccaggtggcccccggggcaggagggcggcaggtgggccccgggagaggcgggactggggactcacggcagggcttgtctccgcccagggtgattccgggggacccctgtccagcgtggaggcggatgggcggatcttccaggccggtgtggtgagctggggagacggctgcgctcagaggaacaagccaggcgtgtacacaaggctccctctgtttcgggactggatcaaagagaacactggggtataggggccggggccacccaaatgtgtacacctgcggggccacccatcgtccaccccagtgtgcacgcctgcaggctggagactggaccgctgactgcaccagc

SEQ ID NO: 341286 - DNA, 39 bp, Homo sapiens; identical to SEQ ID NO: 334408
  chr11:130083134-130083173
  hypo

SEQ ID NO: 341287 - DNA, 200 bp, Homo sapiens
  chr11:130089793-130089993
  hypo
cgtctgtttgccaggccttgttctaggaaccaggagtaccgctgggatcctccgaataacgcctggagggcagcgaggtgcagggaggggaagggacgcgcatggcaagctcctgcctcgcatccccacgcaccgagagccctcctgcctgcacgtctaccacaggcggaaggagggaaccttccagaggcagagggtac

SEQ ID NO: 341288 - DNA, 340 bp, Homo sapiens
  chr11:130781427-130781767
  hypo
cggcattctcctccccgatccctcccataaaccaacaggccaatcagcgtggctcgacgtgggaagcaagcgggcagtaggggttggggaaactcctgacttttgatgaactttcgtagatctggtttctcctccagacgggtctgcagattcaagaactcccgatagcgacgattcacagtgtggtaggccagctgctgcaggccgctgctgttttcaccgtcaagggctgtctcgtactgttcaacgaacaaattgattgactcaatcagccgggtttcagcaatcttctattctggctttactgactacttggtcaatggccacatagcaagagtac

SEQ ID NO: 341289 - DNA, 249 bp, Homo sapiens
  chr11:130785392-130785641
  hypo
cgctcatccttctccgaagctcctggaccaaccctttcatggctgcctccatttcttcctcaaaggctggctcctggctcacggaacggtaccaagataacacaaaatctcgaataatcatctggatggtgcggttgatctcccgttccagctgcctttctgcctcagggcatggaggacaggtggccaacgggatgaagcgttccagatgcagtcgacctgaagccactccagcgaggctggagccca

SEQ ID NO: 341290 - DNA, 447 bp, Homo sapiens; identical to SEQ ID NO: 334414
  chr11:132952553-132953000
  hypo

SEQ ID NO: 341291 - DNA, 253 bp, Homo sapiens; identical to SEQ ID NO: 334415
  chr11:132953053-132953306
  hypo

SEQ ID NO: 341292 - DNA, 353 bp, Homo sapiens
  chr11:133703500-133703853
  hypo
cgcggccgcgcggcgccctgatcgcgcgtctcaggccccgctggaacccggggcctccctgcccgctccactccttcccgcggcgcacccccgccctccgcctgcccctgccctgctggccccccgccaggcagcctctcccgcatcggagaccacccgcccggttttcatgtcccggtttggctgggtgtctaaactccgcctctcgggatgggacagagccccaccccacctcgcagtggacaccccaggacagtggcttggtcttcacaacactgggtgcggttcatggagcagcacctcgcattgctccctgcagtgacccacgcaggaggccgcctgccctggtggac

SEQ ID NO: 341293 - DNA, 901 bp, Homo sapiens
  chr11:133734501-133735402
  hypo
gcctgatcccacgccgccactcacagacccttcgttgaccggcagcattgaacaggaaaaaaaaaaaaagatgaaaacacagaaaaccccaaaaacccagacggggagacgatgtggggaagagaacgtgctgggagcctcagtagccagtctcctcctcgtagtaagcggaatattcaggggcctctccagggccaggacggtcgcctgcacccgagggagccccatcggccactgggccttgcgggcagtacttggggtcgtatatctgccggcccaggccaaagacctggccgctctggttggcgccctgcgcgtagcccatctgcagggacatgaaagagttgttacacttgtcggttcccagcttggtgtcatagatgtaccgccgggtcccgggagccgtcgtgcccacctggctggcacacttgtttgcacccatctggaggctgatggtcgagcggtccatggggggcaatacgtggttcttggggtcatagagatgcctcctcgtgctgtacgcggtcatgcgggactggctggtgcatttgtgggtgcccatctgcagcccgatgacgcactggcgggcattcatggtggcgtcctcaaagtcccactcctgcttctccgagtgcgtgtcaccgatgtccgcccctctctgcggccccttagtcttggccttccctgccagggcgagaagagacacctgcacctgcatcgtgttcccactctcagacaggtcgttggcctcaaacaggtccacggggttcatgccgtaggttttctagctggtgccagttctgcacggagcggttgatcttggggtctgagcccggctgcagcttgttcatgagtgtgcgtaagataatccaatccttcaggccctaatggaagtcgggac

SEQ ID NO: 341294 - DNA, 720 bp, Homo sapiens
  chr11:133790547-133791267
  hypo
cgtgctgttggatgcattctctccattctcctcggggatggtggggtggccaaagggcccctcggtgggcaggggcggggacgacatgacggagctcagggggctgcccacttctggcacgtagaacgggggcggctccacctccccagggctgctgctgctgaggtacccataatactggccatggtggaagggccggggggcagggggccgggcctggcctgtggcctgaagccgaccttccaggccaccggggccctccagcccgcggggctggaaccgagggctgtatgctggtggtggcaggtaggactcctggctggatgacagaggggtgagctgggacttcagggcggccacagatgtgggcaccagtgggtcctcgttctcctcgtccgactggcggaactcggggtacatgtccgtctcctcggcgaaggggaagccctcgatgcgcctgctcttcagcgagggctccatctcggcagggtccatcacgaagcggccgtcagggcctctgctgatgagctcgatgggcgtggtggcctctgcctcggcctctgccttggccacgctgtacttcttgctgctgatggcccgcttggtcttcttgtacagcgacagctccttctcacgggtggggctcagcatcctcttggccgcgggctggccctggtcgtcggaggattctgacggcgctcggagcgtgcggatgctctc

SEQ ID NO: 341295 - DNA, 2224 bp, Homo sapiens; identical to SEQ ID NO: 334417
  chr11:133825232-133827456
  hypo

SEQ ID NO: 341296 - DNA, 842 bp, Homo sapiens; identical to SEQ ID NO: 334419
  chr11:133938756-133939598
  hypo

SEQ ID NO: 341297 - DNA, 138 bp, Homo sapiens
  chr11:134011321-134011459
  hypo
cggtacatggacagggagagagggaggagaggggggagaggggctggagaggttgcctggccaggcagactgcactgaatgccaggcgagcatgggcggtatctgagggcccgctgtgaggctctcaggggaggtgcc

SEQ ID NO: 341298 - DNA, 149 bp, Homo sapiens
  chr11:134088886-134089035
  hypo
cgcttagaacaaaacctcatacacactctaccaaacatgttcaaactccactgctgaacctcacgtaaagctacccgtgacctacccttactctaccttaccatcccgttccaccacactttttctgtatgcctcttgacacttcctgc

SEQ ID NO: 341299 - DNA, 997 bp, Homo sapiens; identical to SEQ ID NO: 334420
  chr11:134145792-134146789
  hypo

SEQ ID NO: 341300 - DNA, 276 bp, Homo sapiens; identical to SEQ ID NO: 334423
  chr11:134281604-134281880
  hypo

SEQ ID NO: 341301 - DNA, 175 bp, Homo sapiens
  chr11:134317588-134317763
  hypo
cgtgcgagctgacgcagcttactttgggccaggtgcactggatgcgccctcgctccctccgtggggccctggctggtgtcggagccctagcgcagccatctcacaggtagaaacgcccgcgcggggcgctcactgcctcggactcggcccttccgctgcgaggccctgctgtctc

SEQ ID NO: 341302 - DNA, 403 bp, Homo sapiens; identical to SEQ ID NO: 264371
  chr11:134458220-134458623
  hypo

SEQ ID NO: 341303 - DNA, 361 bp, Homo sapiens
  chr11:134608555-134608916
  hypo
cgatggcgtgtgtgtctgtgtgagtctgtgtgtctctctgtgcgtgtctgtgtgagtccgtgtgtctctccatgagtgtctgtgcgagtctgtgtgtctctccgtgcgtgtctgtgcgagtccacgtgtctctccgtgcgtgtctgtgcgagcctgtgtgtctctccgtgcgtgtctgtgtgagtctgtgtgtctctctgtgcgtgtctgtgtgagtccgtgtgtctctccgtgagtgtctgtgcgagcctgtgtgtctctccgtgcatgtctgtgtgagtctgtgtgtctctccgtgcgtgtctgtgtgagtctgtgtgtctctccctgcgtgtctgtgtgaatctatgtctttctgtgc

SEQ ID NO: 341304 - DNA, 157 bp, Homo sapiens
  chr11:134852683-134852840
  hypo
cgtaacattagatccacggacctcaccttgggtgagatgagacatacgtacccctattttaaaaataaaataaaatccatcggtgattctgccgcacagtcaaaattgaaaagcactggagcatcacttggacaactggtcagatcggaggatgtgc

SEQ ID NO: 341305 - DNA, 151 bp, Homo sapiens
  chr12:287260-287411
  hypo
cgtgtcctggaagcctgcctgcctgcctgcccgtctgcacaggtgtcttgatccagccctgcgtcttcgagcccctgtgccaccggtccccacggcccgccaggagtctctttgtacccactaggcttccctgatgaccatctgtctgtcc

SEQ ID NO: 341306 - DNA, 235 bp, Homo sapiens
  chr12:417402-417637
  hypo
cggtacaaagatggcatgccttgaaatcaagcaacctgggtacaaagcctggctcttgtacttttagactgttaatatggggtacaagtttcagaacgtccgttttctgaaaaatgagaatactaccaaccgtattttgctgttttacggattaaataagataacatatgaaagtgcctaacctggtaccttgcacaaggtaaacactcttaaagtattagtttcctatcacctc

SEQ ID NO: 341307 - DNA, 350 bp, Homo sapiens; identical to SEQ ID NO: 334425
  chr12:708894-709244
  hypo

SEQ ID NO: 341308 - DNA, 209 bp, Homo sapiens
  chr12:939108-939317
  hypo
cggtgagtaacgtctgaagcttctgctcgcattgagtctgaatcgttcttttaatttaaggtaccccagagttcatggcccctgagatgtatgaggagaaatatgatgaatccgttgacgtttatgcttttgggatgtgcatgcttgagatggctacatctgaatatccttactcggagtgccaaaatgctgcacagatctaccgtcgc

SEQ ID NO: 341309 - DNA, 782 bp, Homo sapiens; identical to SEQ ID NO: 334426
  chr12:1639108-1639890
  hypo

SEQ ID NO: 341310 - DNA, 851 bp, Homo sapiens; identical to SEQ ID NO: 334427
  chr12:1639898-1640749
  hypo

SEQ ID NO: 341311 - DNA, 120 bp, Homo sapiens
  chr12:1716732-1716852
  hypo
cgggaacaattcaggttgaacgcatctctcctccgacatgccgagcgtctttgagtctcctcacccaggcgcacactcaggattgcagtcatctgctattgttgcctttatttattttga

SEQ ID NO: 341312 - DNA, 454 bp, Homo sapiens
  chr12:1943616-1944070
  hypo
cggggctgagccggagccggagcccagcacagcctgcccacagaagcagaggcaccggccggcgagcgtgaggcgagccatgggcacggtgatcattgcaggggtcgtgtgcggcgtcgtctgcatcatgatggtggtggccgctgcctatggctgcatctacgcctccctcatggccaagtaccaccgggagctcaaaaagcgccagcccctgatgggggaccccgagggcgagcacgaggaccagaagcagatctcttctgtggcctgagcgcccatccccacccggccaggtaggaagggcggggagagcacacggcattgctcagccacagctcccaccttgacccggcgctggccactgcctccccgagtccaccctcctccccgccctccagcagacaagccacaccgggttctctccctgcactttcgaggctccctgaaagccacc

SEQ ID NO: 341313 - DNA, 155 bp, Homo sapiens
  chr12:1992067-1992222
  hypo
cgtggtcgtggttgatgaccatggggcggctgagcacgtgcaggtattccatcacgttctcctgggtgtccgccagcgttgagatctgcgtgtagtagcctgcggtggggaaggccgcgtgggtgtggaaggcagggcttccctgggaacccctc

SEQ ID NO: 341314 - DNA, 476 bp, Homo sapiens
  chr12:2017667-2018143
  hypo
cggcctctcccacgcggtgttggagggcgtgctaggattgcctccggtggagccccggccccgtttcctccacacgaccgggttcacacctgaacaccccccaggactgcgtcacggacatccccacgccaactcccacgccggactgcctcacggacatccccacgccaactcccacgccggactgcgtcacggacatccccacgccaactcccacgccggactgcgtcacggacatccccacgccaactcccacgccggactgcctcacggacatccccacgccaactcccacgccggacagcgttatggacatccccacgccaactcccacgccggactgcgtcacggacatccccacgccaactcccacgccggactgcgtcacggacatccccacgccaactcccacgccaggttcctgcaccccacacccggctcctcctcacgacactgtggcccgcgctggccttcca

SEQ ID NO: 341315 - DNA, 72 bp, Homo sapiens
  chr12:2023599-2023671
  hypo
cgcagaggccacagccctttcaccttctacggcccgagcagcttccagggccctgcacgtgccctccaagtc

SEQ ID NO: 341316 - DNA, 91 bp, Homo sapiens
  chr12:2040494-2040585
  hypo
cgtccatccccgcggagctggtggcagagtggcggatgccgtggtggagcactgcatggagcactgacggatgacacgtgcacatggcgat

SEQ ID NO: 341317 - DNA, 64 bp, Homo sapiens
  chr12:2088760-2088824
  hypo
agccaccgtgcccagcccatttctcttaagtaaataactacgaacggaacttgttggatcatac

SEQ ID NO: 341318 - DNA, 426 bp, Homo sapiens; identical to SEQ ID NO: 334431
  chr12:2144066-2144492
  hypo

SEQ ID NO: 341319 - DNA, 1846 bp, Homo sapiens; identical to SEQ ID NO: 334432
  chr12:2161370-2163216
  hypo

SEQ ID NO: 341320 - DNA, 209 bp, Homo sapiens
  chr12:2602388-2602597
  hypo
cgctggaaacgggccacgggcggcagtgccagaacggcacggtgtgcaagcccggctgggatggtcccaagcacggcatcaccaactttgacaactttgccttcgccatgctcacggtgttccagtgcatcaccatggagggctggacggacgtgctgtactgggtacgtagcatgagtgggcagtcagagggtgggggaacagcggcc

SEQ ID NO: 341321 - DNA, 116 bp, Homo sapiens
  chr12:2613903-2614019
  hypo
cggatcctggcgctgcgtgggtcagtgtctcgggagccggggaccggcactggccgtgctcggttgctgagtgtgcctcactaactatcattccgttcttccaggtcaatgatgcc

SEQ ID NO: 341322 - DNA, 248 bp, Homo sapiens
  chr12:2788614-2788862
  hypo
cggtggcctgttcggcaaccacgtcagctactaccaaagcgacggccggagcgccttcccccagaccttcaccactcagcgcccgctgcacatcaacaaggcgggcagcagccagggcgacactgagtcgccatcccacgagaagctggtggactccaccttcaccccgagcagctactcgtccaccggctccaacgccaacatcaacaacgccaacaacaccgccctgggtcgcctccctcgccccg

SEQ ID NO: 341323 - DNA, 49 bp, Homo sapiens
  chr12:2788892-2788941
  hypo
agggccacgggccccccttgtcccctgccatccgggtgcaggaggtggc

SEQ ID NO: 341324 - DNA, 519 bp, Homo sapiens
  chr12:2964279-2964798
  hypo
cgtgggggggcatctgtgggcattggagtcggtcagccagcgccagacattgctatcgtagggcctgtcaggctgggtggggaaggtggcaggcagacggcacacatcgagccacgtgtgaaagccccaggtgtgctgggcgccacccttccaagggtggatgagccgctgacgcaccttggacttcatatctgtgcagggcggcagcttcagagccagctggtggtaggcttgccgggtgaagccagggaactcccaggactcgctggggaggaagaactcacgctgagcccacgtttgggagggtgggagggactcgctggcctggaccatctagggagagacaaaagggagcctggggaaggttgtgcagacaggggtgcagaaaggtgggtgaggcactccgctctccttcccaggcacgacctctgccagcccaggattctcatgaggacgcagaagtcctggcagggccgcatctccatccctctccttcccggcggaagttatggctgctgc

SEQ ID NO: 341325 - DNA, 194 bp, Homo sapiens
  chr12:2972300-2972494
  hypo
cgcgcctgtggtgggtgctactggcgtctagtggggaaaacaagggatactgctaaacacccttcagtgcacaggacagtccctcccacgcccaacaaagaattctccagctgtcaacgtgaatagtacttgagaaaccctgagttagtctgacccagtcactttactactgccaggtacgaactgcatttccc

SEQ ID NO: 341326 - DNA, 72 bp, Homo sapiens
  chr12:2995019-2995091
  hypo
cgtgaaccaccgcgcccggcctactttgacttttactctgttaggttttccagaatgctgactcttctgccc

SEQ ID NO: 341327 - DNA, 120 bp, Homo sapiens
  chr12:3030601-3030721
  hypo
cggcaagaactgttgttttctagatgccagatgaatgagtttagaatgacctatttgaggagctcttgattgttaaatcgtggcagaggtgaatcatgaagccgggaataggtagagagc

SEQ ID NO: 341328 - DNA, 482 bp, Homo sapiens
  chr12:3103789-3104271
  hypo
cgctttgcttcctgagcaactgattcgggctctggcactccccggagtgccttcatcccgtggcccacgcagttcttccactgctcaccggggctgtggttcctgtccccacaggtccaacgagcgctcctccaagcggagccttggagggcacggccggcaccattacctccaacgagtggagctctcccacctcccctgaggggagcaccgcctctgggggcagtcaggcactggacaagcccatcgacaatgacgcagagggcgtgtggagcccggatattgagcagagtttccaggaggccctcgccatctacccgccctgtggcaggcgcaaaatcatcctgtcggacgagggcaagatgtatggtaaggagcccgtcgggttcagccctgtacctgaggctgaggcaaggggccgacaccagaaccttggggttcctgccgggccacagaaggggatgaccacttggggctttgtc

SEQ ID NO: 341329 - DNA, 1048 bp, Homo sapiens; identical to SEQ ID NO: 334437
  chr12:3186012-3187060
  hypo

SEQ ID NO: 341330 - DNA, 408 bp, Homo sapiens
  chr12:3392272-3392680
  hypo
cgacgcatgagcgggctggccgggagtgcccaccccgccctgctgccctgtggagggaagaggattgagctttgtgtcacctgcctgcgctctccagatatgacccctgcacccaccccccacagcctgccctaccccacctaccctgcctcagcctcggacttctcagtgggtggagtgccagggaggaggaggcacacggagacctggggctcggggcccctggattcctgcatctgcatatgcgtatttgccaaagacgacagggtgggctggggtgcgctccggaggaacccccggcactgatgggcttctgcccctgcccttcctcacactgacactttgtccccacatggggtggggagcagagtgcccgccccgtggagataccgccccagcgggggctgc

SEQ ID NO: 341331 - DNA, 425 bp, Homo sapiens
  chr12:3414073-3414498
  hypo
agggcagggagtcacgcggcctcacacatccctgtgtctctgtctgtgtgtgctggcgccgcacgactgctgggccacttgcttgtaaaatggggccaacaaaaggacctgcgccctgggccatcgtgcggactgaaagaggtgattcatggaaagcaattagaagagagcctggcgcagcacccgcagttaatgagagacacttttgtgatcatcgtcgtgtgaatgcaggtgcgcgtgcccgtgtcatttacatccatggggtgctgctgggaggcctgacgctagccctggctctgcagccactgctttctgggggtcggtctcctgcctgagatgcaggttggggttctaactgttcccggcctgtgtgagggcctgcgttcgcgtgcactggtgccctgcaggtcttggtcggtgacacc

SEQ ID NO: 341332 - DNA, 639 bp, Homo sapiens; identical to SEQ ID NO: 334438
  chr12:3474998-3475637
  hypo

SEQ ID NO: 341333 - DNA, 965 bp, Homo sapiens; identical to SEQ ID NO: 334439
  chr12:3600023-3600988
  hypo

SEQ ID NO: 341334 - DNA, 1426 bp, Homo sapiens; identical to SEQ ID NO: 334440
  chr12:3601576-3603002
  hypo

SEQ ID NO: 341335 - DNA, 74 bp, Homo sapiens
  chr12:3901132-3901206
  hypo
cgctttggtctttgattcttatctttgaaagacgatggcaaggataaaggagttgtgtgtgtgcgcgtgcgcgc

SEQ ID NO: 341336 - DNA, 4797 bp, Homo sapiens; identical to SEQ ID NO: 334443
  chr12:4377809-4382606
  hypo

SEQ ID NO: 341337 - DNA, 665 bp, Homo sapiens
  chr12:4554361-4555026
  hypo
cgtcccgactggctgcagctggcactcactgtaggggttctcctcgtgggtcccgctgatccggccgtcggggagcacctggaggtgaaagccgatgcccacgttgcagtagagcctccgctgccgcttgatccccaccaaatagccactttcccagttcaccccggcaatctctccagctagcccggcgcgagacctggacagcagggtgccccagcccctcgagtccagcagcgtgttgttggcacgggtgcctgcaggcgagggcaccaccatgcccactaggatgcctaggaagacgagagcccacagcgtgccctgcagacgtcctgctccccgggacatagtgatgaacagtttctgtcccagggccatccaccttgcctctcaggcacgtggtcagaattaatggccctaaaaataccgcccttcttgtttttctccctccggcatggcggcaggggcttatttttggaaggcagatgaaggctgctgacatgaaaccaaagcctccatcgggcactcgggttgagagcagagggacccaggctgagccgcggccggtagagaccatggctcggggacgctctctagctcgcccgcttgctccgtccctagttgatgatatttgatttgacctatctttatagttgcttcagcagccc

SEQ ID NO: 341338 - DNA, 182 bp, Homo sapiens
  chr12:4672181-4672363
  hypo
cggacagcatcaccaatattaattcaagcttcactgtccaggcttaagtggagactcggcaaaagcaggaggccatttagtggaaaagttcaaaccgtggaaacaacaaatgaaaatgtcctttgtcttgcttgagcgatttgatcacctacatgtggtcggtatgtaaaacctaggagttc

SEQ ID NO: 341339 - DNA, 128 bp, Homo sapiens
  chr12:4734887-4735015
  hypo
cgagcgagaaggcagagaggagagagaagagaaggttgtagggatggtctttttaattcccgcacttcagtgtgaagcatctggggtaagtgtgcgtgttctccagactcaaaccctccctttggcgc

SEQ ID NO: 341340 - DNA, 557 bp, Homo sapiens; identical to SEQ ID NO: 334445
  chr12:4920230-4920787
  hypo

SEQ ID NO: 341341 - DNA, 2633 bp, Homo sapiens; identical to SEQ ID NO: 334446
  chr12:5018018-5020651
  hypo

SEQ ID NO: 341342 - DNA, 355 bp, Homo sapiens
  chr12:5252233-5252588
  hypo
agaaatccacatcatccgtaatccaatcacctccacatcatccgtaatccgatcacctccacatcatccgtaatccgatcacctccacatcatccgtaatccgatcacctccacatcatccgtaatccgatcacctccacatcatccgtaatccgatcacctccacatcatcggtaatccgatcacctccgcatcatccgtaatccgatcacctccacatcatccgtaatccgatcacctccacatcatccgtaatccgatcacctccacatcatccgtaatccgatcacctccacatcatccgtaatccgatcacctccacatcatccgtaatccgatcacctccacatcatcc

SEQ ID NO: 341343 - DNA, 101 bp, Homo sapiens
  chr12:5323919-5324020
  hypo
ggcctggaaaatataatgtacgggagatgtaatggtgacccaccgacctggccgggatgccttgcttccccttcctcccacacctacacacacgtgcacac

SEQ ID NO: 341344 - DNA, 112 bp, Homo sapiens
  chr12:5335923-5336035
  hypo
cgcctgttaatagcacaagtgacacatcatagatcactcgctgacaggctgaactgggcgccatcttgaagaacgtaggctgcatgctaatgacgcccaggaggagctgcgc

SEQ ID NO: 341345 - DNA, 2063 bp, Homo sapiens; identical to SEQ ID NO: 334447
  chr12:5540947-5543010
  hypo

SEQ ID NO: 341346 - DNA, 466 bp, Homo sapiens
  chr12:5603587-5604053
  hypo
cgagagccggagcggggagggcccgccaagtcagcattccagccggtgattgcaatggacaccgaactgctgcgacaacagagacgctacaactcaccgcgggtcctgctgagcgacagcacccccttggagcccccgcccttgtatctcatggaggattacgtgggcagccccgtggtggcgaacagaacatcacggcggaaacggtacgcggagcataagagtcaccgaggggagtactcggtatgtgacagtgagagtctgtgggtgaccgacaagtcatcggccatcgacattcggggacaccaggtcacggtgctgggggagatcaaaacgggcaactctcccgtcaaacaatatttttatgaaacgcgatgtaaggaagccaggccggtcaaaaacggttgcaggggtattgatgataaacactggaactctcagtgcaaaacatcccaaacctacgtcc

SEQ ID NO: 341347 - DNA, 295 bp, Homo sapiens
  chr12:6334302-6334597
  hypo
tagctagagttactcgttttcactgctgtatagtgttctgttgcctataaaataccccttcagccaatgggcggcaggtaggtcactgtttattcctcgcttgctggtatttttagtacctgcatgaatcaaacacaccccgtaatggcatctacaactaccaggcgtatatgaggggcagagaccaagggtggtcacaaagtcctttgcaagtctcacccttaagcgcgtggggactgtgttgttgctggcagccagaattaatgctgatgtcctgtatgtcttgcagcttgcc

SEQ ID NO: 341348 - DNA, 267 bp, Homo sapiens
  chr12:6344323-6344590
  hypo
cgcataacatttgttcgtggaggaagatgtgaaaatgccgtctctgcccctctctcgtctgcccattgtaggtgattaaggaagtccaggagttttacaaggacacctacaacaagctgaaaaccaaggatgagccccagcgggaaacgctgaaagccatccactatgcggtatgtcgccttggcaaagacaccctcctgcgctttctccggattgtgtctgcacacagggtgctgactgcaccagaccagtgcaaacattctaatc

SEQ ID NO: 341349 - DNA, 218 bp, Homo sapiens
  chr12:6391196-6391414
  hypo
cgggcatcttaaaaagccaaaacgatcacccaaagctccctcctttccacctccccctcactcacgactgcgccccgtttctctgctgtctttcagagcccagcttctccggagctgcctgctcacgaggctgcactccctctggcctctgccactccctcccggctgggctgaaactgctcttgtccaagtcaccaacagcctctgcgctgcctgcc

SEQ ID NO: 341350 - DNA, 398 bp, Homo sapiens
  chr12:6483496-6483894
  hypo
cgcaggcaccagggaaggggcagagggactaaccgacctgtagggattgagggtgcagatggtcactgcggggaagacgagcttgtccgagttgaggttgatgttgaggctgacggggtagctgaagtactctccgaaaagcaggccgaattgccagtacatcatgccaaaggtgcagagccacagcactgcccagaaggccgtcttcatgcggttgtgctgggagcacaccaggcggatggcgccgtggatggtggtgttgttgcagaagaactcgaagagctctcggtaggagcggtggaactcgatcagggcctcctcctccgccgtgggctgctggggcgccgcaggttcggggcccagcccctgctcctcacgcttgttccccttcatgagcc

SEQ ID NO: 341351 - DNA, 669 bp, Homo sapiens; identical to SEQ ID NO: 334451
  chr12:6492950-6493619
  hypo

SEQ ID NO: 341352 - DNA, 193 bp, Homo sapiens
  chr12:6638565-6638758
  hypo
cgtggcagagaacatcagagaagacgagtgctgggggagggtccagggttggtcttagtggatggcagagctggccctgggccatcgaacatcctcatctccccttcctgcagacagctcctctcctacatcaccaaggacaagcagacagagagcctggtggaaaagctgtgtcagcggttccgcacatccc

SEQ ID NO: 341353 - DNA, 96 bp, Homo sapiens
  chr12:6686946-6687042
  hypo
tcaccttaaaccttcgagctagaaatttattcttgatctctaagaaattgccacggttcatttcacccttgaaaggctcattgaggatggcatagc

SEQ ID NO: 341354 - DNA, 265 bp, Homo sapiens; identical to SEQ ID NO: 214767
  chr12:7858583-7858848
  hypo

SEQ ID NO: 341355 - DNA, 418 bp, Homo sapiens; identical to SEQ ID NO: 334457
  chr12:8123165-8123583
  hypo

SEQ ID NO: 341356 - DNA, 501 bp, Homo sapiens; identical to SEQ ID NO: 334458
  chr12:8171309-8171810
  hypo

SEQ ID NO: 341357 - DNA, 448 bp, Homo sapiens
  chr12:8757680-8758128
  hypo
cggctccagaggtgaaccagaatccccgcccacttcttcccctcgagcttccccactaactcattcattccgcatcgcaatcccgaatgcgggctgctgcactgcgcctgcgcggaaggccctttcgcacctttgaaggtcatgatggctatttgcaccccggcgcggtgcagccgccgcagcccctcgggctcagccttgcggtcctcacagaagtagaggcgcgcggtgaagatcctcagactgaggttggggttccctcgcagaaagtcggccacatgtcgggcacagtcgtagcaggggctccaggaggtgaaccaggtgacgcggtagcagcggccagggtctaggtcccagtccgagatgtagcggaggaagagcaattccacgtggcagccgttctggagagacagagaggaccacgctaaaattcactgacttttattgc

SEQ ID NO: 341358 - DNA, 72 bp, Homo sapiens
  chr12:8906544-8906616
  hypo
cgccatgaagcgccatacctgttccagaagtatgttaaagagtctcatggacgggatgtacgtgtcattgtc

SEQ ID NO: 341359 - DNA, 215 bp, Homo sapiens
  chr12:9108820-9109035
  hypo
cggccaccccacgttatgggaagtggtggtggcgccaggccagcccaggagccgtgggctggtgggactgaacaagttgggacatgcccccgttcggcaaagcttgtggacagcaggaatgaatgaactgtaacacaaacgagctgagactcttcggggtgcagacctcgggattccccaagccagagctgtaacatgctgtaacaccccccacc

SEQ ID NO: 341360 - DNA, 291 bp, Homo sapiens; identical to SEQ ID NO: 334460
  chr12:9216953-9217244
  hypo

SEQ ID NO: 341361 - DNA, 565 bp, Homo sapiens; identical to SEQ ID NO: 334461
  chr12:12502899-12503464
  hypo

SEQ ID NO: 341362 - DNA, 156 bp, Homo sapiens
  chr12:12605374-12605530
  hypo
cgcggtttcccatgattgttaagattaggatcgccttgatcgtggctgggtcgggcccaccgggtaggcactgggggccagggtgcgggccggcgcgcaagcctcgcctcgtgatcttgccggcgatccttccccacccactccctcccgcacgcc

SEQ ID NO: 341363 - DNA, 425 bp, Homo sapiens
  chr12:12618418-12618843
  hypo
cggccctgcggagaggacttgattaaacaaggtataatgtacttctctttcccatccacagatggatctgtctgtagaaactctgttcagcttcatgcaggagcgccagaaaagatacgccaagtatgccgagcagatccagaaagtgaacgagatgtccgccatcctccgccgcatacagatgggcatcgaccagactgtgcccctgctggacaggctcaacagcatgctgcccgagggcgagcggctggagcccttcagcatgaagcccgaccgcgagctcaggctgtagctgctgcccggcctgcctggggctgggagccccagacaccgacaccctgaggacgtgtggagctaaggtcatatcatctgaccaggtctggaggctggcgggaggctccctgaaagtgggtgcgaaggagtcc

SEQ ID NO: 341364 - DNA, 186 bp, Homo sapiens; identical to SEQ ID NO: 334462
  chr12:12848356-12848542
  hypo

SEQ ID NO: 341365 - DNA, 165 bp, Homo sapiens
  chr12:13215231-13215396
  hypo
cgtgtgctcacgtggagcggaataaataacatccttcccaggtttagaggttggagtttggtcgcggggtgcttctgagtgaaaaaaactgggatttgagttaactgtagaactgaagccatctggaaaacttcctatgatgctgtggtgcttacttatgtgacc

SEQ ID NO: 341366 - DNA, 2000 bp, Homo sapiens; identical to SEQ ID NO: 334463
  chr12:14133241-14135241
  hypo

SEQ ID NO: 341367 - DNA, 1109 bp, Homo sapiens; identical to SEQ ID NO: 334466
  chr12:15941612-15942721
  hypo

SEQ ID NO: 341368 - DNA, 1749 bp, Homo sapiens; identical to SEQ ID NO: 334469
  chr12:19282260-19284009
  hypo

SEQ ID NO: 341369 - DNA, 758 bp, Homo sapiens; identical to SEQ ID NO: 334470
  chr12:21680379-21681137
  hypo

SEQ ID NO: 341370 - DNA, 1454 bp, Homo sapiens; identical to SEQ ID NO: 334474
  chr12:22486814-22488268
  hypo

SEQ ID NO: 341371 - DNA, 494 bp, Homo sapiens; identical to SEQ ID NO: 334475
  chr12:22488329-22488823
  hypo

SEQ ID NO: 341372 - DNA, 1913 bp, Homo sapiens; identical to SEQ ID NO: 334477
  chr12:24714490-24716403
  hypo

SEQ ID NO: 341373 - DNA, 921 bp, Homo sapiens; identical to SEQ ID NO: 334479
  chr12:25101390-25102311
  hypo

SEQ ID NO: 341374 - DNA, 42 bp, Homo sapiens; identical to SEQ ID NO: 214825
  chr12:25344062-25344104
  hypo

SEQ ID NO: 341375 - DNA, 138 bp, Homo sapiens
  chr12:26398950-26399088
  hypo
cgaccaaatatgcaacttaaagctaacacacattggacgtgggagtccgtaggtacaacagaaataagcaccatcatcggccatgccgccggaacagttagaaacattcttcacctgctcaacctgaaaaaaggaccc

SEQ ID NO: 341376 - DNA, 59 bp, Homo sapiens
  chr12:27742262-27742321
  hypo
cgtgcatcctcttgagccgtgaattttctggtctcaaagtcccaggctcaagcgatcct

SEQ ID NO: 341377 - DNA, 868 bp, Homo sapiens; identical to SEQ ID NO: 334481
  chr12:28122887-28123755
  hypo

SEQ ID NO: 341378 - DNA, 808 bp, Homo sapiens; identical to SEQ ID NO: 334483
  chr12:29301988-29302796
  hypo

SEQ ID NO: 341379 - DNA, 220 bp, Homo sapiens
  chr12:29373882-29374102
  hypo
cgattcttcccttggggcaggctgtccttatccacattgggctgccagcgcttgggaggggctactggcgcagtgtgtttactggagttgtgcgcatgctcacttgaggcatgaagtgagcgtgcgtacaactccaataactggtaacaacactcccttaccaggggcgtattcctgtaaggtcatatacccgtaaaatcagccgctttacctcttagtg

SEQ ID NO: 341380 - DNA, 161 bp, Homo sapiens
  chr12:30861053-30861214
  hypo
cgtgcacaggactgctctcttggtgggtgggggaggggagcgggcatgttaattacccacacgtgtgttgactcaaagcttttgtcattaaatctgtactaaataaatacaaatattgctggcttattggggcttcactctcgctgtactctctcgtcagc

SEQ ID NO: 341381 - DNA, 52 bp, Homo sapiens; identical to SEQ ID NO: 264680
  chr12:31255264-31255316
  hypo

SEQ ID NO: 341382 - DNA, 263 bp, Homo sapiens
  chr12:31255691-31255954
  hypo
cgggatctctcagccgaacaagccctctccaggtggtaggtacagagtggagagaggctgagttttgatcacagtcggagaggctgagggaaggggtagaacggagcagctggtgacgtgggtgatgacccgggaggtcctgacgtccacctgctgggctcttgtctcccccgcccaggtgtgtggtgatggtgggcatgcccttccccaacatcaggtctgcagagctgcaggagaagatggcctacttggatcaaaccctc

SEQ ID NO: 341383 - DNA, 48 bp, Homo sapiens
  chr12:32142934-32142982
  hypo
cgggttggaaggcagaaagccaaaaatgcgaaagatacaaatgggtac

SEQ ID NO: 341384 - DNA, 271 bp, Homo sapiens
  chr12:32831303-32831574
  hypo
cgcgctcggtcctgaacacacattttgtttgtttgtttgtttgtttacaaaacccctggagaacccgcgtattctaacctgggctggtttttgtatttttgcaaaataacaccccacacattctcgtatcagcgtgcagatttttttgcacccagtttggttgtttgcggccataagcttttctttaagcctttccaacccgtccttctagagaaagtgtcttcataaggaagtcacactgctcacgcctgtaatcccaacactttgggag

SEQ ID NO: 341385 - DNA, 164 bp, Homo sapiens
  chr12:32864298-32864462
  hypo
cgtaaggctctgtatattgacggcattcaaatatctccagacttgtatatctagttgctattcgacatatacacttaaatgtctaatagacatttcaaactctaataccgaattcctgacctgttcctcaactagatttggtatttctatagtcttcccccatc

SEQ ID NO: 341386 - DNA, 1183 bp, Homo sapiens; identical to SEQ ID NO: 334488
  chr12:33049138-33050321
  hypo

SEQ ID NO: 341387 - DNA, 678 bp, Homo sapiens; identical to SEQ ID NO: 334489
  chr12:33592378-33593056
  hypo

SEQ ID NO: 341388 - DNA, 352 bp, Homo sapiens
  chr12:34358307-34358659
  hypo
cgtcggaggaaagggggcctcccggaaagctcaaagtctgagcaggggatggaaaactctggcgtccccactcaacagcagggcggtgctgcggcgatccagtgcacgcccttgccgccggcgatggcgggaggctcttggaggccggaaagcgcagcgcagcggcccacagtgctccggcgtggagggggagagcagcccggcagggggcgagtggctgaggggtccctgatccgagccccgcggcctccgagtggggatgaagcctggagtcaggcaggcgtggctgggccaggctcttgtgtcatccaggcatcactgccggtgtctatggccataccaccctgaaggc

SEQ ID NO: 341389 - DNA, 204 bp, Homo sapiens; identical to SEQ ID NO: 264708
  chr12:38595391-38595595
  hypo

SEQ ID NO: 341390 - DNA, 819 bp, Homo sapiens; identical to SEQ ID NO: 334493
  chr12:40618264-40619083
  hypo

SEQ ID NO: 341391 - DNA, 819 bp, Homo sapiens; identical to SEQ ID NO: 334495
  chr12:41582155-41582974
  hypo

SEQ ID NO: 341392 - DNA, 984 bp, Homo sapiens; identical to SEQ ID NO: 334498
  chr12:45444133-45445117
  hypo

SEQ ID NO: 341393 - DNA, 197 bp, Homo sapiens
  chr12:47497161-47497358
  hypo
cgggaaagatgcgcactgcagcagggcctggaatgtggctcccatctgcactgccagaagccatgatgaagtcacgagttgcacaacagtagtaattcgcagctatttatgaccattttaatagcaaaggtctagattagaaggctgtgtttacatgccatgtagcagaatagttcacgaatcattcccacagtaac

SEQ ID NO: 341394 - DNA, 1049 bp, Homo sapiens
  chr12:47628738-47629787
  hypo
cgctccgcccagaggtgagtccctcccagcccttctctccttctgtcctagccatccgcagagccatcctgtgcaaaggaaggagctaggctgtgcgccctgggcgtcatgatccttctgcgggcctccgaagtgcggcagctgcttcacaataagttcgtggtcatcctgggggactctgtgcatagggcagtatacaaggacctggtgcttctgctgcagaaggaccgcctgctcactcccgggcagcttagagcaaggggggagctgaacttcgaacaagatgagctggtggacggaggccagcggggccacatgcacaacggccttaactaccgtgaggtccgcgagttccgctccgaccaccatctggtacgtttttacttcctcacccgcgtgtactccgattacctccagaccatcttgaaagagctgcagtcgggcgagcacgcccccgacctggtcatcatgaattcctgcctctgggacatctccaggtatggtccgaactcctggagaagctacctggagaacctggagaacctgttccagtgcctgggccaggtgctgcccgagtcttgcctcctggtgtggaacacggccatgcctgtgggcgaggaagtcaccgggggttttcttccgcccaagctccggcggcagaaggccaccttcctgaaaaacgaagtggtcaaagccaacttccacagcgccaccgaggcacgtaaacataacttcgatgtactggacttgcatttccacttccgccacgcgagggagaacctgcactgggacggggtgcactggaatggacgtgtgcaccgctgcctctcccagctgctgctggcccacgtggccgacgcctggggtgtggagctgccccaccgccaccccgtgggcgagtggatcaagaagaaaaaacctggcccgagagtcgaagggccgccccaggccaacagaaatcacccggccttacctctgtccccacccttaccttcccccacataccgccccctgcttgggttcccaccccagcgcttgccgctgctccc

SEQ ID NO: 341395 - DNA, 302 bp, Homo sapiens; identical to SEQ ID NO: 334501
  chr12:48299205-48299507
  hypo

SEQ ID NO: 341396 - DNA, 1353 bp, Homo sapiens; identical to SEQ ID NO: 334502
  chr12:48397567-48398920
  hypo

SEQ ID NO: 341397 - DNA, 1481 bp, Homo sapiens; identical to SEQ ID NO: 334504
  chr12:48576835-48578316
  hypo

SEQ ID NO: 341398 - DNA, 97 bp, Homo sapiens
  chr12:49065604-49065701
  hypo
cgattatgtaagtatcggcgcttcttctccttgagcagatgctgaagtcgtttaaactgatcaatatacaacgactgcaaacgaattagcttttcac

SEQ ID NO: 341399 - DNA, 695 bp, Homo sapiens; identical to SEQ ID NO: 224348
  chr12:49363694-49364389
  hypo

SEQ ID NO: 341400 - DNA, 162 bp, Homo sapiens
  chr12:49416383-49416545
  hypo
agattttctcccgccggttggccacctcgttccgaatgatggtgccaatgtactcgataaccattgtgtgcttttctaggtccttggctgcatagagccccaggccctggatacgggagcgagccaggtacacgttgttcttccattcggtgcgcagccgcc

SEQ ID NO: 341401 - DNA, 221 bp, Homo sapiens
  chr12:49422776-49422997
  hypo
cgcctctcccccagcttcggacaacccaggtgaactgggcctggcccacatccagagtagcacatacctgggatgctggcccgaggaatgagggggatgacaggggagagggcccggtcctcttgctcccaccggcctgagcccagatgagggaaacgaggggcctcctcccccaagatgctctcaggggatgaagctggcacaatgctgtcaggagaatc

SEQ ID NO: 341402 - DNA, 215 bp, Homo sapiens; identical to SEQ ID NO: 334510
  chr12:49487994-49488209
  hypo

SEQ ID NO: 341403 - DNA, 419 bp, Homo sapiens; identical to SEQ ID NO: 334517
  chr12:49931623-49932042
  hypo

SEQ ID NO: 341404 - DNA, 58 bp, Homo sapiens
  chr12:49989801-49989859
  hypo
cgaaatgtgacgatcacttagagaaacaggccattaggaatccattctcactgtgttc

SEQ ID NO: 341405 - DNA, 180 bp, Homo sapiens
  chr12:50037818-50037998
  hypo
cgctggtcaagcttccacggcccttagtgcaggctaagggtgaactgtgcctttgctccaacagacaggctgggacacgtcagaaagtgagctgagtgagggtgagctggagaggcggcggcggacactcctacagcagctggatgatcaccagtgacccaatgagctgttctctgcctc

SEQ ID NO: 341406 - DNA, 71 bp, Homo sapiens
  chr12:50322856-50322927
  hypo
cgtacccagctgagtttccaaatatttctgatttcaccagcgggggaagactggcaggctcctatatcctc

SEQ ID NO: 341407 - DNA, 104 bp, Homo sapiens
  chr12:50484317-50484421
  hypo
cggctccatgccttgcttatgccaccagaacctatcatcattaatcatgtcatcaggtaggcctgtgtgtgggaggcagtgctgtgccggagctgccttgtgcc

SEQ ID NO: 341408 - DNA, 522 bp, Homo sapiens
  chr12:51421158-51421680
  hypo
cgcgcccccagagccacatcatagtatctgctgccccaccaagagcaccccacacctgggaggaaccgagaaacatcagctagtgcagccagtttgaccgccttaggtgtcctcccaagcctccgtagtgaattgttttcctcctcgcccagctgactcgattctccccagacttcatcctacctacccaaaagcaatcccactctatcgccagtttcagcctcacaccgtatcttttgctctgaagatgagactgccaaactggtgaagagggaataaatggcctaacaaattaccgtaattttctgcaatgtcgtttacagccaccaaaaacattagatcctcccgccaccctcactccccgacccctcgcactgcttacagcattaaaggtaattgagcttctttattcacgtaaaaacagctaggagaaaatttcattagtaagagagaccaagaaatgaggaaaggagcgtgaactgcaaagagaaaaatccaaataaagtgcgaagtaaaaacaaa

SEQ ID NO: 341409 - DNA, 87 bp, Homo sapiens
  chr12:51565447-51565534
  hypo
accgcacccggccgaaaggagatttttcatctgttatcaacaactggcttgatacataaagatccagaagcatcttaagttttcttc

SEQ ID NO: 341410 - DNA, 69 bp, Homo sapiens
  chr12:51844686-51844755
  hypo
ggatgccgcttggccggcagagccatcggcatcaccgcactcatggccagaagcaccggagacgagggc

SEQ ID NO: 341411 - DNA, 213 bp, Homo sapiens; identical to SEQ ID NO: 334523
  chr12:52294173-52294386
  hypo

SEQ ID NO: 341412 - DNA, 231 bp, Homo sapiens
  chr12:52387815-52388046
  hypo
cggcgcagcccgcctgacggccctgcgcatcaagaagaccctctcccagctcagcgtgcaggaagacgtgaagatctaactgctccctctctccacacggagctcctggcagcgagaactacgcacagctgccgcgttgagcgtacgatggaggcctacctctcgtttctgcccagccctctgtggccaggagccctggcccgcaagagggacagagcccgggagagactc

SEQ ID NO: 341413 - DNA, 96 bp, Homo sapiens
  chr12:52388409-52388505
  hypo
gagacggaatctgccgctttgtctgtccagccgtgtgtgcatgtgccgaggtgcgtcccccgttgtgcctggttcgtgccatgcccttacacgtgc

SEQ ID NO: 341414 - DNA, 1388 bp, Homo sapiens; identical to SEQ ID NO: 334524
  chr12:52400270-52401658
  hypo

SEQ ID NO: 341415 - DNA, 220 bp, Homo sapiens
  chr12:52467443-52467663
  hypo
cgctcggaggtgctggaggtgtcggtggaggggcggcaggtggaggaggccatgctggctgtgctgcacacggtgcttctgcaccgcagcacaggcaagttccactacaagaaggagggcacctactccattggcaccgtgggcacccaggatgttgactgtgacttcatcgacttcacttatgtgcgtgtctcttctgaggaactggatcgtgccctgc

SEQ ID NO: 341416 - DNA, 607 bp, Homo sapiens
  chr12:52913581-52914188
  hypo
cggtcctcaccctctggatgctggggtcgatttgcaggttgaggggagtcaggagactctggttgacagtgacctcttggatacctccaggagggcagacaggaaagccagggccaccgaagccacctccaaagccagctccgccaccgagcccaaagccaccaccagctccaccgccgaaaccaaatccactaccggcaccacctccaaagccatagccgcctccagcaccagcaccaaaccggttcctgaagctgccaccactagtgctgatggatatcctcttggagccccccaggttgtagaggctccggctgccatagccacccactccacaagcacccgcaaggctgaccctgccgaagccaccaccaccgccacccccggaccgggacacggaggtgaagctggtgcgggagacagacggggtgatggcagaggcggtgctgaagctacgactgcccccgctccggaaggacacacttgactggcgagacatggtggcttgttcctggtggagcaagagaaccaggcactagtgggttgggaggtgctggagagaacagagctcagcaggacgcagaaggtggctctgttacccaggaac

SEQ ID NO: 341417 - DNA, 144 bp, Homo sapiens
  chr12:53007462-53007606
  hypo
cggcctcaccttggtctggtacagggcctcggcctcggccttgctcttccgggcgatctcctcatactgggcacggacctcagcaatgatgctgtccaggtccaggttccggttgttgtccatggacaggatgatggacgtgtc

SEQ ID NO: 341418 - DNA, 249 bp, Homo sapiens
  chr12:53045577-53045826
  hypo
cgcctccaccgaaaccaccaccactgaagccgctgccacctccaaagctgctgccgcctccaaaaccacctcctctgccaccaaatccaccagcggcgccaaagccaccacctcctccagccacactaatggagatgctcttggtccctccaaggccaacaagactccgactgccaaagccgcctccaccgaagcccccgccaccaccaccatggcggctcaagcaggagaagctggaagttgatctcc

SEQ ID NO: 341419 - DNA, 154 bp, Homo sapiens
  chr12:53189555-53189709
  hypo
ctgcaaaggcacagctgctccgccctcccccaaagcctccagcccgggagccgccagctgccacgctgatggagatgctcttgttgccgcccaggttgtagaggctgcgactgccaaagccacctgctccgctccggaagccataggcccctcc

SEQ ID NO: 341420 - DNA, 156 bp, Homo sapiens; identical to SEQ ID NO: 334530
  chr12:53272458-53272614
  hypo

SEQ ID NO: 341421 - DNA, 172 bp, Homo sapiens
  chr12:53474309-53474481
  hypo
cgtcttgctttcgttattggagttacttgtgtgtgtagacccgtctctgctagactgtgagctccttcagaccccagactattctattcttatcacactaggtactctaacgtgttgagtgccaggaaagccatcagctcgcataccgtgaatagtgcccactcggcataac

SEQ ID NO: 341422 - DNA, 181 bp, Homo sapiens
  chr12:53662999-53663180
  hypo
cgtcctcccctctacctggaacgaattctctttgtcttactgcggaatgctgctgcacaaggaagcccagaggccacactccgccttgctcagcccctccatgcctgcttggtgcagtgctctcgcgaggctgctccccaggactatgaggccgtggctcggggcagcttttctctgcttt

SEQ ID NO: 341423 - DNA, 293 bp, Homo sapiens
  chr12:53685907-53686200
  hypo
cgactggggaagacgtcaacaaagaagggcagagaaacctgagaagataggagagggtcctaggaatggctcagacatggaaaggggctgagattgttagagcttgggcctcttggtgagacaagcatcctaatcgccagtgtctcctcctcagtatggggcctcgccagtgctgagtcaaggggtggatccacgaagtaccttctatgtcctgaaccctcacaataacctgtcaagcacagaggagcaatttcgagccaatttcagcaggtcaggggcgcgaagacaagaag

SEQ ID NO: 341424 - DNA, 430 bp, Homo sapiens; identical to SEQ ID NO: 334534
  chr12:53719362-53719792
  hypo

SEQ ID NO: 341425 - DNA, 114 bp, Homo sapiens
  chr12:54122178-54122292
  hypo
cgttccggtttttatttaggagaggtgaaagattgacacgtctcccacaccccaagtcacgttatagacttgggcatcctgtcccccctctcgctattctccatccctgtagtc

SEQ ID NO: 341426 - DNA, 1176 bp, Homo sapiens; identical to SEQ ID NO: 334538
  chr12:54144782-54145958
  hypo

SEQ ID NO: 341427 - DNA, 1400 bp, Homo sapiens; identical to SEQ ID NO: 334543
  chr12:54332438-54333838
  hypo

SEQ ID NO: 341428 - DNA, 1380 bp, Homo sapiens; identical to SEQ ID NO: 334556
  chr12:54393256-54394636
  hypo

SEQ ID NO: 341429 - DNA, 293 bp, Homo sapiens; identical to SEQ ID NO: 334557
  chr12:54398724-54399017
  hypo

SEQ ID NO: 341430 - DNA, 399 bp, Homo sapiens; identical to SEQ ID NO: 334558
  chr12:54399254-54399653
  hypo

SEQ ID NO: 341431 - DNA, 432 bp, Homo sapiens; identical to SEQ ID NO: 334559
  chr12:54400009-54400441
  hypo

SEQ ID NO: 341432 - DNA, 2091 bp, Homo sapiens; identical to SEQ ID NO: 334563
  chr12:54426536-54428627
  hypo

SEQ ID NO: 341433 - DNA, 98 bp, Homo sapiens
  chr12:54651346-54651444
  hypo
cgcgcctgtctagcaccttctccacaacatactcctcctcatcctctgaagaagaactgtcagctgtccgcttggttttctttcccatgtcgcacacc

SEQ ID NO: 341434 - DNA, 743 bp, Homo sapiens; identical to SEQ ID NO: 334567
  chr12:54811865-54812608
  hypo

SEQ ID NO: 341435 - DNA, 136 bp, Homo sapiens
  chr12:56183329-56183465
  hypo
cggaagcacctttttcagaagacaacctataactactacccaactcgattctcttccctcctctttcttggaaaccttggtacatggacttgctactattgttaagaattatttagggccaggcgcggtggctcac

SEQ ID NO: 341436 - DNA, 277 bp, Homo sapiens; identical to SEQ ID NO: 334568
  chr12:56472747-56473024
  hypo

SEQ ID NO: 341437 - DNA, 425 bp, Homo sapiens
  chr12:56558022-56558447
  hypo
cgctcaccctccctccaggtggacccctctccctcacccttctcccctcttggccccttctcacctggcagtgggctggcactgggcaggaggttgccctgaacagctgccacaatggcagggctttgggctgcggcggatccgagccccggcccgagaggcaaggaagatggcatggtggtggtcgccggcaggttaggatgtagagggttcgccatggacacaggcaggttaggtggggggagagtgcccggggcgaacgggagatggtggtgatgcccatgcaggttaggaggagcggggaggttaatactgatggagtcagctagactaccaaatgggatgatggatggagcaggaggaggaggaggaggcggcatgccaaaaggcaaacccaaaggagcattacccgccacgcctgggtg

SEQ ID NO: 341438 - DNA, 166 bp, Homo sapiens
  chr12:56604107-56604273
  hypo
cgcttcgggttgtgctcacagtcgctgaggtgagacatgaggttgtcaagccggacaacggcactacagccgaacacagcgttgtcacaggcaatctgcagctttgacaacatgttccgcatgatccgaggtactgggcgcagatgggcgaccgtcacaacactac

SEQ ID NO: 341439 - DNA, 74 bp, Homo sapiens
  chr12:56610588-56610662
  hypo
cggggtccagtagatttgaacatagctgggagggggaaagaaaaggacaagagaggccgggcgtggtggctcac

SEQ ID NO: 341440 - DNA, 172 bp, Homo sapiens
  chr12:57625988-57626160
  hypo
cgcagtctcacccacggctacatgtctgacgtcaagcggatatcagccacgtccatcttcttcgagtctatgccctataagctcaacgtgagtgctctagggtgtggggaggggctcttggccctggtggtggtcctcccctggagaagctgagggcctggagcgccgggcc

SEQ ID NO: 341441 - DNA, 279 bp, Homo sapiens
  chr12:57881047-57881326
  hypo
cgcgcccggcctatgtacatttttgttgttgttgttgataggatggatatgtacactaacttccactttgtcactaattccgcacatggtaactccgaactctaaaactctgaccgttaagagcttgcatcgagagccactgcgagtagctgctgttatgacatggccatttcattctccacaacaagagaagcagccgcggcttcagtcaccgccctccagcagcgtaagaggataaaagtgcgacttgccctaaaacctaaacgtctcttctggatc

SEQ ID NO: 341442 - DNA, 143 bp, Homo sapiens
  chr12:58262604-58262747
  hypo
tcaccacccactggcgatgccccattcacaagggggcccggctggccacgcgacccagcagcatccatttgaaggcagcaagcaacaagctggctccattcacaaaccctgtcctcctttgaaaaccaatcaccgtgcgaagc

SEQ ID NO: 341443 - DNA, 171 bp, Homo sapiens
  chr12:58263143-58263314
  hypo
cgccccagcagtcctgccgctgcctctcccatctcctactggcttcaccgcccaagtgggtgacatcagacttggagagtgcagctcgccttcctctgctgggaacatggatcctccgctcctgtgggcttcggtgtgatctttaagcccactaggtcttcctgcccatcc

SEQ ID NO: 341444 - DNA, 185 bp, Homo sapiens
  chr12:58284105-58284290
  hypo
cgagtgctgtgaacgttatgagagggccttgttgggaacacgtgctcctgggaatcagcccttccctctgtcctgttcccactcctccccgacgatgctcctgctcagaacccactcctcacctcagtgaagcaacgcagcgggcaccctgtggacaaagctggatattggctctgaataaaagc

SEQ ID NO: 341445 - DNA, 768 bp, Homo sapiens; identical to SEQ ID NO: 334579
  chr12:59313762-59314530
  hypo

SEQ ID NO: 341446 - DNA, 950 bp, Homo sapiens; identical to SEQ ID NO: 334580
  chr12:59989999-59990949
  hypo

SEQ ID NO: 341447 - DNA, 1430 bp, Homo sapiens; identical to SEQ ID NO: 334581
  chr12:62584702-62586132
  hypo

SEQ ID NO: 341448 - DNA, 354 bp, Homo sapiens
  chr12:63195619-63195973
  hypo
cgctccgatgaccaggcactcatggggaatcttcttctcggtaaagaagcgtgtggggggcgtgctgggggagcccggggcccccacccctccgcgcagggaggctgcccgggtcagagtccggctgttggcgggcgtgttctcaggctcctcccccaggcaggtagggggcaggacggcggagttcttcaggatgtccacgatgtcctgcagctgctccgtgatgtggtgctgcagcaggcgtgacgccaccaccgcggccccggaccccgcgtgcccgtcaaacagcgaccaatagtggcaggaaacaccctcggattcctgtgggagaggacgacagggaggagtgagaac

SEQ ID NO: 341449 - DNA, 200 bp, Homo sapiens
  chr12:64797272-64797472
  hypo
cggagtggcagtcaagtcgaggcagcctaagcctacactgcctctatgttgcattaataaattaataaatctgtgaccaaataaatgaagtgacatttagtagcatcgaaagatcccgtgagtaggacttcctaagaatgctctccttcttttcatggacaaaattttagtctgtttaaaataaattttggaccggacac

SEQ ID NO: 341450 - DNA, 606 bp, Homo sapiens; identical to SEQ ID NO: 334593
  chr12:66582759-66583365
  hypo

SEQ ID NO: 341451 - DNA, 320 bp, Homo sapiens; identical to SEQ ID NO: 334594
  chr12:66629083-66629403
  hypo

SEQ ID NO: 341452 - DNA, 105 bp, Homo sapiens
  chr12:69964171-69964276
  hypo
cagaactgattttatacacccgcaaacgtgactcagtaaaatggcactacctctgcctgcgacgctatggctatgactcgaatctcttttcttttgaaagtggtc

SEQ ID NO: 341453 - DNA, 133 bp, Homo sapiens
  chr12:69999239-69999372
  hypo
cgaataatagaagtcaacaaaatactctgtacaaaaccctttataaaagtctgctgtgtgccgtattagcatattagatcaatagaagatattaagagaacctttttaaaaatcacaattactggccgggcgc

SEQ ID NO: 341454 - DNA, 179 bp, Homo sapiens
  chr12:70087465-70087644
  hypo
cgtggtccattgtgggaaatcttttgtacacagcagtgctcaccgagcgaaagatgagcagggaggtgagattgacgtagcgcatcagcgtccttctaagcaggcgcccgtgctcgtcgcttccgtgaacactgctagagatgaggaacattagcctgtctggccagggcaaattcaca

SEQ ID NO: 341455 - DNA, 72 bp, Homo sapiens
  chr12:72165419-72165491
  hypo
cgcgttttgcatgaaaagacatagtttaagtattttattaagagaagattgaggccaggcacagtggctcac

SEQ ID NO: 341456 - DNA, 91 bp, Homo sapiens
  chr12:76878986-76879077
  hypo
cgcaccgtgcccggcctctcactacttttcaaacaacttttaacttctcaatatcaacaaaatttggaatagtaaatgactaagaccgggc

SEQ ID NO: 341457 - DNA, 42 bp, Homo sapiens
  chr12:77085836-77085878
  hypo
cgaccactgggtgaggcagaaaaagtgtactgagtgtgtaac

SEQ ID NO: 341458 - DNA, 259 bp, Homo sapiens
  chr12:77216021-77216280
  hypo
cgtaataagaaacatgtaatgatgcaggtgtttttagtaatttacacaatgtcaaaacaacgttaatagggcagtaaattaatttttatagaagttctttaaaggtaactaagatagcctgcttttaaacttttaataggaatttcttctgtttatattatcagggcgaatcagcgcttgatttggcaaaacagagaaaaaatgtgtggatgatcaaccacttacaagaggcaaggcaagcaaaaggatatgacaatcc

SEQ ID NO: 341459 - DNA, 270 bp, Homo sapiens
  chr12:79842622-79842892
  hypo
cgctcaaggacgctttatagtcgggccttatctctagagctagatgattcatattcatttcatggcttctttcagaaagtgcaggtggtggtaactgttttggactatgacaagattggcaagaacgatgccatcggcaaagtctttgtgggctacaacagcaccggcgcggagctgcgacactggtcagacatgctggccaaccccaggcgacctattgcccagtggcacaccctgcaggtagaggaggaagttgatgccatgctggcc

SEQ ID NO: 341460 - DNA, 1555 bp, Homo sapiens; identical to SEQ ID NO: 334606
  chr12:81330305-81331860
  hypo

SEQ ID NO: 341461 - DNA, 435 bp, Homo sapiens; identical to SEQ ID NO: 334613
  chr12:89747142-89747577
  hypo

SEQ ID NO: 341462 - DNA, 122 bp, Homo sapiens
  chr12:90025699-90025821
  hypo
gctcggcctgaaggttatacaactattaaatgtcaaggcaaagattcagtccagctctgtcagaggataaagagtatattcttcttcagttataatgctgataagtctgcttacggttctcc

SEQ ID NO: 341463 - DNA, 214 bp, Homo sapiens
  chr12:90313473-90313687
  hypo
cggtgagaggtactgggcgatgaggaagtacagctccaactccatgagaggcaccgggcctcaggtggacaaggcctcctccttggccgggcgctgggcgggaggcgggagcgagcgtgctagccaagcatgtgggccgcgctgaggcttgacgaggccggcgtcccttttcctgaggcacgtgcgccgccgccgccatcatgccgtgcgcgcc

SEQ ID NO: 341464 - DNA, 141 bp, Homo sapiens
  chr12:93710959-93711100
  hypo
cgacccaggactcccgcttctctttacaccatatactgttctttatgtgccgctgtttttctctttatagtttttctaggacaaaaaccaagctccatcagaaggttaaacctgtgtcaggtttacagtccaatgaccgcc

SEQ ID NO: 341465 - DNA, 1302 bp, Homo sapiens; identical to SEQ ID NO: 334616
  chr12:93966037-93967339
  hypo

SEQ ID NO: 341466 - DNA, 117 bp, Homo sapiens
  chr12:94145777-94145894
  hypo
cgggccggcaagtaactacctgcagtgtacttgagaacctttgaaagcatctgtacttgccaagggtggggcatgtatgcttgagagccctttaaagcgtctttacttgctaagggc

SEQ ID NO: 341467 - DNA, 2345 bp, Homo sapiens; identical to SEQ ID NO: 334617
  chr12:94541793-94544138
  hypo

SEQ ID NO: 341468 - DNA, 124 bp, Homo sapiens
  chr12:95602750-95602874
  hypo
cgtatagccataataaatggcaagttctcgtactctggtatttcctcataatggcgtatattttcatactccggtgcacagaggcttgtaacagacttgtaaggtgcctgagatgatgactccc

SEQ ID NO: 341469 - DNA, 106 bp, Homo sapiens; identical to SEQ ID NO: 334620
  chr12:96183929-96184035
  hypo

SEQ ID NO: 341470 - DNA, 375 bp, Homo sapiens; identical to SEQ ID NO: 334621
  chr12:96184965-96185340
  hypo

SEQ ID NO: 341471 - DNA, 133 bp, Homo sapiens
  chr12:96566303-96566436
  hypo
cggagatgggaagttgggttgcccataaaattcgcccacaatctcatgaccgagacaagagcagttgactaaccctaatagaaactctagaagaagtgttatggtcggaacaaaatgtgctacttttgactgc

SEQ ID NO: 341472 - DNA, 2061 bp, Homo sapiens; identical to SEQ ID NO: 334623
  chr12:99287438-99289499
  hypo

SEQ ID NO: 341473 - DNA, 324 bp, Homo sapiens
  chr12:102301906-102302230
  hypo
cggttcgatgttgacaaacccacccagagtaacacacatttatgactttttctccaggagttagctgtgccagtggttcatgacgggggcgctcttttggcctttgtctgtggtgtcgtgtacacgctcctacagtccatcatctcttacaaatcatgtccccagtggaacagtctctcgacatgccacatacggatggtcatctctgccgtttcttgcgcagctgtcatccccagtatcctttttcacatttgtgccttgttaaaggaataaaacattcagtgacacttgttaaagaagggtaatgaagactttatagggacc

SEQ ID NO: 341474 - DNA, 1633 bp, Homo sapiens; identical to SEQ ID NO: 334629
  chr12:103351149-103352782
  hypo

SEQ ID NO: 341475 - DNA, 774 bp, Homo sapiens; identical to SEQ ID NO: 334633
  chr12:104322593-104323367
  hypo

SEQ ID NO: 341476 - DNA, 2676 bp, Homo sapiens; identical to SEQ ID NO: 334638
  chr12:104850142-104852818
  hypo

SEQ ID NO: 341477 - DNA, 294 bp, Homo sapiens
  chr12:105392597-105392891
  hypo
cgtgtgcttacatgggtagcagtggccactcagggtaagggggcgggctgctggtctccatgcatagtttcacaccactggcagtgttgacacaggggcagggtactggtggctgcgggactggtgccaaatgtgcgcacgtttatgctggctgcagtggctgcacagggcgcagggcaggtccactggtcactgtgcctagttttgcagctggtggcagtgttggtgtcggagtggggtactggtggtctccgtacctgcagatactccagtggcagtggcagcatggtggtc

SEQ ID NO: 341478 - DNA, 211 bp, Homo sapiens
  chr12:105472684-105472895
  hypo
cgtgtccaatactgggagttaaggagtggtgacaagcgacaccgtagcaagagacattatggagcgctttgtgtcaaataattgggaccttattgtgaagacaatgagattcactgagccgctttaagcaggagagttaattgaaaccaggagagtctagtttctatgctaatagactgcttaggtaactctggaggcatgaactagctcc

SEQ ID NO: 341479 - DNA, 404 bp, Homo sapiens; identical to SEQ ID NO: 334643
  chr12:108297338-108297742
  hypo

SEQ ID NO: 341480 - DNA, 496 bp, Homo sapiens
  chr12:108926063-108926559
  hypo
cggcccggtgcagagccttccggcagtgctgggtgtcaccatgagctctaaggcagaaaacaaaaagttgctgccaccaggacacaaagtggaaggcactcgaagggagaggccgtcttctcccaggtagaaactcactcttcagtaactctagcttctgagaagaccttagctttcagatctatccatgatgctttctccttccagagtctctacagtcacctacgaagtatttccctgaagcactctctccctcagccatgtaggggctactggaaagtgtacctgatattgtgatctgcaaccagcattctgcctttacagcattcacatgtgcggcacatggcgggggagtccaacagctctctgtaacctgatacagtccccagggaaattttactatggcgtcctactgacaggagagttatgaatccagggtagtgtcaaatttcatacccagagtcagatcttttttttttttttgaaagggagtctc

SEQ ID NO: 341481 - DNA, 178 bp, Homo sapiens
  chr12:109050967-109051145
  hypo
cgtttagaaaactacactaagaatcccataatctacttactcactggaagacctgctcagaacagagagaaagctcaagtgaaagcaagtggaaagcctggggagggcgtaccggattccagagagccagctgccgctcgctcatgcggctgaacccagtggtgaagacattgccatc

SEQ ID NO: 341482 - DNA, 227 bp, Homo sapiens
  chr12:109208584-109208811
  hypo
cggggtgccgaggggaggcaaagggaggagagggtgggaaggaagagcgccatgggggcggtgcggacgagcgcacgggccagtctcctccagccaggcagcagcggagtgggatgcgcatgtgggcatctaaggcatgcccgtgactgctggcctgtgagctctgtgagactgtaggtgtgtctgccgtgctccctgatgtggccccagcacctggcggggcgccc

SEQ ID NO: 341483 - DNA, 174 bp, Homo sapiens
  chr12:109488367-109488541
  hypo
cggagaaagcgattgaaagggagggaaaaatcttgctggctctaatgctttataaactgtgctgtccaatacggtagctgctggccacttggggctattgagcacatgaaaagtgggtactccaaactgagaggtacttagtaccaaaaaacaaaaaaataatgggccgggcgc

SEQ ID NO: 341484 - DNA, 226 bp, Homo sapiens
  chr12:109507780-109508006
  hypo
cggggagggcggtggaggagaggggctggcgaagttggcagggagcagattgtgcagggactaggaggctgcgggcggcatcagcttctattgtgtttgcagcggggagccactagaggactttgaactggggactggtttgatctgacttgttagaaaaggaaggctggaggggcaagaatgcaagccgagaggaaaggtgggaggccgctgcagttatctggcc

SEQ ID NO: 341485 - DNA, 389 bp, Homo sapiens
  chr12:109873137-109873526
  hypo
cgccgtttcagttctcgtttggatcagattctgttgttcactactagggtgtaaaaccgtgagagaccagccccttgaaattaaagtttacaaaacttcacttgtctgcgtgtctgatgttggaaagtttagcttcaaagcctgcagcctgggtgtttgctgggaatggtcaatgagaaaagttagatggggaaatgcaaaaagtaaaaaatcaaaactgcggggggagggagcgtctcttttgaaatgtaaccggtctgtcaagaactacgcttgagtcatttgagggcctgctgtgcgccaggtgaacactaagtcctttaaaccatggtctcattctgttctgagaacagacctgtaagggaggtgacataggtgctatcgtctcc

SEQ ID NO: 341486 - DNA, 143 bp, Homo sapiens
  chr12:109898449-109898592
  hypo
cgcctggcactcttccaccaggccttggactaggtagtacttggcttctgctagcagctcctcgatctcccggcggctctcgggtaaaggcaccgccccgtctcgaaggtagttgagtatcgtaccaaagtgcttcccacagc

SEQ ID NO: 341487 - DNA, 158 bp, Homo sapiens
  chr12:109970800-109970958
  hypo
gggctccctctgttcgcaccacgtgcagtgggtgccaccagcctccgcctcgccctcaccgtctcccattttctcctcacatggtctctctgtgggagggtgtcagctgctgctctgttcctcttaacaatcccacaggagacctgcctctcggggac

SEQ ID NO: 341488 - DNA, 149 bp, Homo sapiens
  chr12:110019861-110020010
  hypo
cggggccgtctccacggagggcgtgtcacctctctgcgttcctattgaccacgtgagtcagtgaggcctgtccagacaggcttgaccacagaccatttctatcattaggagaatgttccttgagaaaccacccagtgcgcagaggttac

SEQ ID NO: 341489 - DNA, 326 bp, Homo sapiens
  chr12:110258649-110258975
  hypo
cgtaatagggtcgttgtgagaggtatataccttgagtcaagtgcctggcataaagaaagcctcaataaacagcagattgcacaacagatggcttctctctgagaatcccggattcaaaggcggtggaggtctctggctccgtccccatgccccaacttgcggagggtggaaaaaggggcccatcctcggggttacccgcggctttgcctgatctcatggaaaccctggcaaacatttgtcaaatcccatcctcctgattacgtgaccaaggaaagctgcttaaatctgggggcaagtttgggcatgcaaacctgctccgccccagc

SEQ ID NO: 341490 - DNA, 674 bp, Homo sapiens; identical to SEQ ID NO: 265119
  chr12:110352780-110353454
  hypo

SEQ ID NO: 341491 - DNA, 72 bp, Homo sapiens
  chr12:110389844-110389916
  hypo
cggctctcactgagtgaaccaggtggcttccgggaagtctgcgcaggggtgtcccctgcatctgctaatgac

SEQ ID NO: 341492 - DNA, 85 bp, Homo sapiens
  chr12:110518057-110518142
  hypo
cgctcccacccccgagatggagtctcgctctgttgccccggttgcagtgcagcggcgccacatcggctcactgcaaccttcccct

SEQ ID NO: 341493 - DNA, 423 bp, Homo sapiens
  chr12:110778337-110778760
  hypo
cgcctcaaaaaaaaaaaaagaaaaaaaatgcagaaacctgtctcaatgtttaactgggcatttttcaaactaggggacaaaaactagaacttgccacttttatttaaagtgatgctcttattttagaccaatctgaccttcgttggctgcgtgggcatgctggatcctccgagaatcgaggtggcctcctccgtgaagctgtgccggcaagcaggcatccgggtcatcatgatcactggggacaacaagggcactgctgtggccatctgtcgccgcatcggcatcttcgggcaggatgaggacgtgacgtcaaaagctttcacaggccgggagtttgatgaactcaacccctccgcccagcgagacgcctgcctgaacgcccgctgttttgctcgagttgaaccctcccacaagtctaaaatc

SEQ ID NO: 341494 - DNA, 278 bp, Homo sapiens
  chr12:110783979-110784257
  hypo
cgtgacacgtcttccctgtgtgtcagctcatcttccagatcacaccgctgaacgtgacccagtggctgatggtgctgaaaatctccttgcccgtgattctcatggatgagacgctcaagtttgtggcccgcaactacctggaacctggtaaagagtgtgtgcagcctgccaccaaatcctgctcgttctcggcatgcaccgatgggatttcctggccgtttgtgctgctcataatgcccctggtgatctgggtctatagcacagacactaactttagc

SEQ ID NO: 341495 - DNA, 113 bp, Homo sapiens
  chr12:110784858-110784971
  hypo
cgccccgcttggcttcttctttaggattgtgatggttcgttctgtttacatcagttttaacgagaggtatgcctgtactcgcttgtgcagaaaacattgttccagattcaatc

SEQ ID NO: 341496 - DNA, 114 bp, Homo sapiens
  chr12:110915439-110915553
  hypo
cgtgagtcaacgcgcccagtcttgtcatccattcttgactaaatccattatgattaagatggctagaaatatgtgctttttctttttttttgagacagagtctccctctgtcgc

SEQ ID NO: 341497 - DNA, 226 bp, Homo sapiens
  chr12:110983646-110983872
  hypo
cgtcctgctcacacttaatggctgagaggggagattacctgtcgctcaagacgactccctcggcttcagggggagcgattgagagctggaatggagtgttgaagtaatgctgctgctcatctgatcggtgcacgacttcaccacccctgacaaccaggaagcctgaatcgcccaggtttgctgtgtgtaagcggtggctggttctgtccagcaccacaatgcaggc

SEQ ID NO: 341498 - DNA, 534 bp, Homo sapiens; identical to SEQ ID NO: 334646
  chr12:111284508-111285042
  hypo

SEQ ID NO: 341499 - DNA, 280 bp, Homo sapiens
  chr12:111369084-111369364
  hypo
cggatccagcctcaacgacccagatagccctgcagtggctttcttgtccctggtatttttagccctcggtcatctatcttgcctgcactggggacagcggcactcagacaagcccatttttactggtgcccttcagatgcccgcgggctcagctgtctcggtgcctggcattccgggggtattgttcctctctacgagtcccagattccagcaacagctgctgccccaggctcccccgccagcttccccctgcgctccccctgcccgcctgccagagccc

SEQ ID NO: 341500 - DNA, 380 bp, Homo sapiens
  chr12:111402659-111403039
  hypo
cggaccccgagtggaaggtggttggtgtcccaaaggcaaattagggtgctggtatctgagcaggaaaaagagatatcaggaaggccaaacaacagacattccctgtgggcataaagttggtacttgcaaaacagcgccaatacctggatattcctgttaccagaaaaacaaagagctggatcgccttcccagtttctcggaaggacaccgtggtgtttctgagggaaggtcatcagggcccagaaaagtcgttttcttttcagcccccaccccgaccctggttccctgaaaaggttggaagagctccatcccggccctgtggtgatgccaggcgattatgtccagggcaccacgtctggactagttgaccgagagatctc

SEQ ID NO: 341501 - DNA, 2239 bp, Homo sapiens; identical to SEQ ID NO: 334647
  chr12:111471144-111473383
  hypo

SEQ ID NO: 341502 - DNA, 168 bp, Homo sapiens
  chr12:111725459-111725627
  hypo
cgcaggccctgcctaatgacggggcgtgggggctgccggcagatgaaagccaccgccgccttcccgcgcacctgcttacctcggcatggacgcccattgtccaagcccctgccacctaaacaaacaggccacagcagagtaaaacagggaagccgccttgttccagcc

SEQ ID NO: 341503 - DNA, 386 bp, Homo sapiens
  chr12:111800614-111801000
  hypo
ggtggagggggctcgggtccaggcctgaaggtggcctcagtgctccagacagcgcagccattctccttgggcgggagggcactgggccggcggggcaggggcagggctgggaccggggctggggcagaaggcagggatgggactggggccagggcagagggcagggacgggggcaagggcagggactggggctggggctggggcagggccatgccacccccgccacgtacagccgccagctgctgctccagctcgcgcaccaccagccgcaggtagtcgaagctggcacgcgacagggccttgacccagccctccatggcatcctgactctcagcggccagcacgtaggtgcgcgcccgggtccccgcaaagcgcacagcgaaggc

SEQ ID NO: 341504 - DNA, 499 bp, Homo sapiens; identical to SEQ ID NO: 334648
  chr12:111844290-111844789
  hypo

SEQ ID NO: 341505 - DNA, 145 bp, Homo sapiens
  chr12:112196497-112196642
  hypo
cgggcgtgccaaggctgtcactcagagacccctcttgttggtatttctgctgccctccctgctgcgacataggtacagatttctccccttcgtccattttaccaaaatggatgcgcgttgggacaggtgagtcccggactccagc

SEQ ID NO: 341506 - DNA, 101 bp, Homo sapiens
  chr12:112591875-112591976
  hypo
cgggaaccatgcggccagttctttgcagaggcaggtctctgaaaagaattatcctgagagaaaaaagcttcgtctgcatgcactcgcgcacacacacaaac

SEQ ID NO: 341507 - DNA, 253 bp, Homo sapiens
  chr12:112605589-112605842
  hypo
gtggagcctcctcccggcctctgcctaccttgttcttattgacagctgagctggggcacagcagcagcagcgacagcgaggaactctgcagctccttacacacctgccacaggaagtggcggaaagagccgcctgtaggacagacgagacacatgggcacctggggtgtcccggcgggaggcgacaccgttccctccctctcacctgctggctggagcggctactccttccacggcctacctgccgctgtggc

SEQ ID NO: 341508 - DNA, 488 bp, Homo sapiens
  chr12:112610173-112610661
  hypo
cggggcctccaggcagcggcctgggcattccccgcagccgtgcatttctgtatctgctccctggctttgttgtcactggcattaaaaaaggccccagactaattaggccacagtcctggctccctgccttgccctccctgtttcgtcagcccactcttccttgcacacctggcgcatagcaggtgttcataagtgttcgttcgatggacgtctaaatgaatctagcccttgtaaatgccccttgtcatggggcatgcccgcatcaggcagcaggggaggggataggcccagggccacatactcaggagacaggccactctggggtcagcagcatccgcggggtccaggtacacctcatggggatggagccgtgcgggtgtgatggcgaggtggcggcatagctggttgatgtactgcacaagtgccacgtccatctccagggtccactttcttgaggccttctgtgcatgtcggacatcgatgcatgc

SEQ ID NO: 341509 - DNA, 172 bp, Homo sapiens
  chr12:112681203-112681375
  hypo
cactcccccgactcgtacggcagctgtcagcaattcccgcatgtgcaccagtgcctgcttgcgagtgtttccccgccgccaccttgtctgtgcagccaaaaggaaactgctgctggacacctgaaacacacaaggagggacacctgactcctgctaactgccgcaagacccc

SEQ ID NO: 341510 - DNA, 73 bp, Homo sapiens
  chr12:112684738-112684811
  hypo
cgtgaggcccgactgggctgcgatggtgacatgcagcaacagctcggctcggttcattaaactcttcactaac

SEQ ID NO: 341511 - DNA, 233 bp, Homo sapiens
  chr12:112743070-112743303
  hypo
gtgtggatctaaagcgccgtggctcccagctgcttcttgccccaagccctcctcctctctctgcattccagccactctggcccactttttctccctaaaacatgctgcctcctgccacagacactttgcacgtgtggtatcctctttctggaatgttcttccctcacctactccccagcctcttcatctggtacatgactacttttccttcactaattacgattatctcgtgc

SEQ ID NO: 341512 - DNA, 803 bp, Homo sapiens; identical to SEQ ID NO: 334650
  chr12:113494407-113495210
  hypo

SEQ ID NO: 341513 - DNA, 788 bp, Homo sapiens
  chr12:113685206-113685994
  hypo
cgctttctgggcctgaaatgtcctcctcagaaagctgccgagccttcgagcataccttctgcgggaacaacgcagcactcggagtgggagcatatccattgtcccttcagccacttctgcaacctcttaagtggggaagagggttagacagcagacagggcaggggattagcactccacgaggtggcccagccccacccggcccctgccgtgccctcgtcttggctggtacagctgcactgctgcgtgaaggccacgtacaaaaggaacagaatggaactgtggctcctcgccttccatttgcaccctttctataatccctaaatatgtagcccagttgctcgtgccttgatgtgaaggaggccctttgcgatcacctgtggctttcttgaaaagtccctgagtggccagtgtcaccccaggccttccatccctctctccgtgtggagaaatgagcgatcatgctttgccttttgggaccacatgagcactccaagtcctgttttctgaggttgagtggttagaagcacagaacaaagtccgtcctgggagggggagaattcgctgttctttcaccttagctcttgagtcttattctcccctttccctttcaaggttctaccctgaattactcttaacacaaaacagcccctcttccgcagatccttaaaagaaaggtttttacaaatacaaacttaccacatcacaccccttcctaacaccctttggcgctgcccactgcaccccgggtggagcccgccctcttgcccgaggcctgccaggccccac

SEQ ID NO: 341514 - DNA, 58 bp, Homo sapiens
  chr12:113704033-113704091
  hypo
cgctggcggcctacctctttgcacacaatcacctcttctacctgatggagctggccac

SEQ ID NO: 341515 - DNA, 432 bp, Homo sapiens
  chr12:113725566-113725998
  hypo
cgcctccgtcccgccccctgccacccttcttcactggtgagctccattgcccccgctccccggggcacatgggcttctccccgctctttcccaggagcaaggccttgctcctgtctgagcctgcagctctactgcaaggagatgtggcctggccctgctcctcttcgtggaaggaccccgcccagccggtgtcctggggctgccaccatcccttccctcatgcatgaatcacctgagcccagctcagggttggtggcgcccaagggagtggacgcaggtggaggagaggccctcacctgtcttcaccgcatggcgtgtggaaggcggggccggcatgttctgagggcgggggctgaggcgtgcacctgtgtgtggaggtgacgggtgtcctcctcgctcaggttgtttaagttgaaggagcgctaccgcaac

SEQ ID NO: 341516 - DNA, 615 bp, Homo sapiens; identical to SEQ ID NO: 334652
  chr12:113796265-113796880
  hypo

SEQ ID NO: 341517 - DNA, 1155 bp, Homo sapiens; identical to SEQ ID NO: 334654
  chr12:113905322-113906477
  hypo

SEQ ID NO: 341518 - DNA, 874 bp, Homo sapiens; identical to SEQ ID NO: 334655
  chr12:113913737-113914611
  hypo

SEQ ID NO: 341519 - DNA, 471 bp, Homo sapiens; identical to SEQ ID NO: 334658
  chr12:114029373-114029844
  hypo

SEQ ID NO: 341520 - DNA, 229 bp, Homo sapiens; identical to SEQ ID NO: 224457
  chr12:114075830-114076059
  hypo

SEQ ID NO: 341521 - DNA, 772 bp, Homo sapiens
  chr12:114273212-114273984
  hypo
cgtgagcacctgacggcaggctgtggtactcgaggaggaccaggggaggggcatgacaagggaatcacgaaaaggagaggtgtgggggaaaagctgcatctttgacactctggctgggaggcagtgggggccggggtcagtgggggctgccgggaccagggctctagcaagcaggctccttccctgctcctcgcgaggctgggagggtgactgtttgctggaggccggcgacccatggggacagccacccgtctgtgccggaagagcacttctccgggcactctgctcatagatctcccgccccagcccaacctggcttgggcaggcgggggaaggccccactgccagccactcgccatgctggtcatgtctgcgctcccagctctggaggtgaaaggtagagacgctaaccacagcccatcagtcctccccagctggaataagacaacatgggaagcagagccacgctcccagccaaataaaagcctgtttgcccagcctccctggctgtgagtgctgtaaaacacagggttctgcgcacggatttcttccataccattatattctctcggctgcgctcgcaggtactgtggcctgccgcggccctgaaagcttctcgatgccgtgaccctgctggtttgtaacacgctcaggaagaaaaggacacagccagcggcggactttcctctttcttccctccttgctctctcttttcaaactcccacatgcaaggcagtgaagaatagcacttcacctaccacggggctgctgc

SEQ ID NO: 341522 - DNA, 100 bp, Homo sapiens
  chr12:114282481-114282581
  hypo
gagcggccgtcttccgccgcagggcctgcagggtcacctcggagtcggcccactccagcaccagcctccgcccgtacaagtgggtgctgtgacacagggc

SEQ ID NO: 341523 - DNA, 245 bp, Homo sapiens
  chr12:114290596-114290841
  hypo
cgcacagctgcaaagaggccgcttgatgtcacaggccacactaaccagcgtgcagcacgttcctcctctgcactcagtttaaacaaacgtgttgaacgcacgccactgacaatctaatagcgatggtttactgtgcacacaacacggctcagcactgtgctgggtgcgctgggcacccggcgaggaggaaggctgtcccggccttaatgagctttgtccggctcgctcatcattggtcccttcca

SEQ ID NO: 341524 - DNA, 146 bp, Homo sapiens
  chr12:114334084-114334230
  hypo
cgcttgccccagagcagggaaaaccaggcaaattctccggaatgcagcggccccatcacgtgaggtgcttagagctccagggaatttctgggctcgggggcatgtccgccttaaaggttcaggcccaggctgtccccacaggctcc

SEQ ID NO: 341525 - DNA, 504 bp, Homo sapiens
  chr12:114337479-114337983
  hypo
cgacaagttatttcttaactaaaaagcagtgtttgagacctcccttttccgtggaaaactctgcgatgcgtgaggggagagaagctgttcctaaagaggaatcccccaagctgtctggggctccctgctgcctttcaccacccagaatgctggaagacatggcgcgcaattatcagctccaacaatgagccaacggcggccctccgagcaagcccagacaaagcacagagaccttgcagctgaaaaggctctgaatgcagacaggggaggtgtgaaagcaaggttagagtgagctgccgcggctgcttggggcaggaggggaggaatgagggcgcacaatgccacccttcccccggtacaggcacgctctccctggggcaccctgttccactgtctgagcttttgtcgcccactctggaaccagtctaggcgtgcagtgagggaaaacgccagctgcagcggaagcccgagcctgcgaaatctcaaaggaaggacgaaaacaac

SEQ ID NO: 341526 - DNA, 491 bp, Homo sapiens; identical to SEQ ID NO: 334662
  chr12:114881653-114882144
  hypo

SEQ ID NO: 341527 - DNA, 490 bp, Homo sapiens; identical to SEQ ID NO: 334663
  chr12:114885146-114885636
  hypo

SEQ ID NO: 341528 - DNA, 169 bp, Homo sapiens
  chr12:116394813-116394982
  hypo
cgtttaacaccaaaataacacggtaataagtgaaaattgcatcttgataggatttgggcgtgcggtgaattccaaagcacgatttcctttttatactggcttgactgtaaatgacaagcggcaaagactgttttcaatatgtggcttatgcttctgcagtatgtcttac

SEQ ID NO: 341529 - DNA, 230 bp, Homo sapiens
  chr12:116443638-116443868
  hypo
cgaaatttttgtttatgtagctacggcaaactcaccccaagttcgtcgtcatcagaattatcaaagatgttgtctaagtcatgcagggaaggtgccaaatctgttacctgtgtaaggctactggagccagctctgccagcagcattatcctgccggacatctgtaggaaaggaggcaaaagacacagaataaacaactccaccaagcgcaaaggagtagggagaggacac

SEQ ID NO: 341530 - DNA, 218 bp, Homo sapiens; identical to SEQ ID NO: 265222
  chr12:116755982-116756200
  hypo

SEQ ID NO: 341531 - DNA, 154 bp, Homo sapiens
  chr12:116756230-116756384
  hypo
tttcactgttcctgctgaagccaaaggtgccagaaaagcctagacattgagctccgcgctccccagtcgtgactctgtgtctacgacgaactttctaaaggcagtggcttataaacgagcagtactgactccatggcggttccatctacttccc

SEQ ID NO: 341532 - DNA, 463 bp, Homo sapiens
  chr12:117155351-117155814
  hypo
cgtgagcccggcctccggtttcatctttcccgaatgggactggctggaggggccaagctgctttacagaagagttccatctggtaagcccgggtggtgagcgaagccaaagatgacaacacgagaaggggtcaaagccaaggtttcctcacgctgcctttgtcttcttcctgcagcctggcccgatggctgaagctgggtcccaggaggcgagttcttcagcggggcctcctcacccaggctggagcaagtccgctgcacccgtcaagcggggaagagctcgggcgggctttctccatagcaatactttgctatggggtcccggtaggtgttctcatgctgcacgctctgttggcaaaaggaaaataagagcgcagtgagagcgagcacagcttcacacacctccctctcggaagagtgagagtggatcgggactgtcagactctccctgcagggggctggcc

SEQ ID NO: 341533 - DNA, 71 bp, Homo sapiens; identical to SEQ ID NO: 334669
  chr12:117316909-117316980
  hypo

SEQ ID NO: 341534 - DNA, 545 bp, Homo sapiens; identical to SEQ ID NO: 334670
  chr12:117317225-117317770
  hypo

SEQ ID NO: 341535 - DNA, 140 bp, Homo sapiens
  chr12:117392984-117393124
  hypo
cgtgagcgccttctctggccctcgttcttgtctttctctgctgtcacttgaccacttagcaaggatatgcagcagcgcagaaaagacctgcaccagttgttttctttgttggagagataagtggacgtgccttcaactgc

SEQ ID NO: 341536 - DNA, 352 bp, Homo sapiens
  chr12:117407834-117408186
  hypo
cgaaggttctgagtaatgagcagatgctgctaatgcagggacggcggagaccttgccaggactccatctgctccgtgcttgcctgcctttggcctcgtgccacagcattagggaatggcagtgtgcttcgaaacccgctccctggtcaccgagtttgtcttgaaatctcgctctttggtgagaaatgagattacacacttcttaggtgcaaagaagtttttatttgtccccctcagtagagagaggagagacgcgatctggtgcatattagcatgaggaagcctggacgggacagccagcagtcctctttatatggtgccatcaagcacggcaaagtggcttatccacctcc

SEQ ID NO: 341537 - DNA, 129 bp, Homo sapiens
  chr12:117408233-117408362
  hypo
cgggactgtggctgccctgggcggaggtgactatgatttctcatttactgacgtatcaacaatggacgggggtgggtctctccaagctgctttttagcggtgaacagtaggaccatgttttagttagac

SEQ ID NO: 341538 - DNA, 218 bp, Homo sapiens
  chr12:117466159-117466377
  hypo
cgtgtgccagggctcgagtcccacgtgctgccaactcaaacatagcctccttccccacccagctggccaccctggcctcagctccctcaggacgcctcagggatctcgctgcgcggtcctatacggtccctgcttagccagcttctgtgtgtccgccctcccagctccagccctgcaggccgtcttttccgtctccagccccttacctcttttcctcc

SEQ ID NO: 341539 - DNA, 92 bp, Homo sapiens; identical to SEQ ID NO: 265249
  chr12:117474092-117474184
  hypo

SEQ ID NO: 341540 - DNA, 408 bp, Homo sapiens; identical to SEQ ID NO: 265255
  chr12:117529746-117530154
  hypo

SEQ ID NO: 341541 - DNA, 177 bp, Homo sapiens
  chr12:117531044-117531221
  hypo
tgagccgaggccaccgtctgaggccacttaaagactttagaaccaagaagtattacccaggggcgagaacgcagtggagaaaccagcgccacccccaccagccacgcttggctacgccagtcctccctgccatctctagctccttctccaaatgagattagaccaggaatggaatcc

SEQ ID NO: 341542 - DNA, 293 bp, Homo sapiens
  chr12:117599154-117599447
  hypo
cgggaggtggggagcatcaggcaagcagggccagaccgccgagaacctaaaagccacacggaggagagcaagtctggtcttcaaggcaacaggggagccaccctgaggggtttaagcagtgaagggacctaattgatattttgttaagattcctctggcctgcatacagagcgggttcacaggggctcagagtccagagagggaggacaagcaggaggccagggcactgcttcgggctgcagaagtgctggtctcagcgggtcgactttcacccgtctgggagacagagtcac

SEQ ID NO: 341543 - DNA, 328 bp, Homo sapiens
  chr12:117600052-117600380
  hypo
cgaaggtctggcagcaggaaggagaaggtgcctgtgtgctggcttcttcagaagcgctctggccttggcccactgtaccacgggatgccgcatggggtgggctagggcatcagcttgcctgcactgaactcctagtgccgtcacggcatgtgcaggagacctggctaagttatttaacttctccctgcctcagtttcattatttcccatatggcaaaaagaaaaataatatctaccctatagggctgctaagaagatggaaggaggcgttcagtcagtactcccgacttaaaatctcaccatcccgccctctctatgtccatacagcc

SEQ ID NO: 341544 - DNA, 1392 bp, Homo sapiens; identical to SEQ ID NO: 334673
  chr12:117798076-117799468
  hypo

SEQ ID NO: 341545 - DNA, 579 bp, Homo sapiens
  chr12:118198707-118199286
  hypo
cgcaagtctgttcccggtttccttgacctgggcagttcctgggaccaaggggcagcccctcgcaggccgggtttcgaccgccccagggcacccaccgatcgcactcacttgggcgtgtgggcctcgtccacgcggtgccccagctggaactcgtgggatttgctccgatgcagcgcggtgaatcccgggatcaagtgtatcagttttcgggaggagggcggtggggtccccgggggcttcagcttgttcttcttcctcatgggcggcgtgcccggcggggtcacggtggtgacgatgttgggggtgcgcggcggggtgcggaccgcgtgccgctgccggggcgatgggggcagggaacggtggcccgactccagtggcgggggcgggcacaagcccgggtaggcgtccacggtaagcctgtccacgtgggtgtacacaggggccccgggagtggggctggtgtgacaatagtgctggacgcacttggacgggaccctggggctctgggagagatgggtgcggatccacggggtgggctccggggggcacacgggattgttctccttccccgtctctgtc

SEQ ID NO: 341546 - DNA, 79 bp, Homo sapiens
  chr12:118461377-118461456
  hypo
cggcatcttgttctgccgagtgactgtcattctgggcagatccccatgtgagaacattgggtacctacagaatggaacc

SEQ ID NO: 341547 - DNA, 1351 bp, Homo sapiens
  chr12:120147746-120149097
  hypo
cggtggtttcgttgcaatcaggacaaagggtttggctttagatagtcttcgaggcttagcactcttcacttggcctaacagtgggatgttctttgggaatgtcagactgtgctaaactggatactggaagggaactgaatctggacagagggggtccattagctgaggcttgggcatctatggggacacagagataagagctacaacggctcctctctactattttgtgttttacgagcatgaaacgtggcttcaacatattggctcccttgaaagtaaagaaaaaacaccatgtccttggcctcacacctgctatcatgagtagcttctccaggtccttgataatataaatttggaagactgctccaattcctgggacatgggttagggagtttttcaagacattcagggcgtagagcccttcctcggtgcccaccaacaccacctgcaagggcagaagtccgaaggcagaacataagcacggtcacgtcaccagaacaatctctagtaagagcaacaaggcctccacagccctttctttcttgatggggtgtggctgtaaccagacaccagctggccgtgcccatgcaagcattacctggtcactgaagggcagcgtgcagttcatgtctagacggtcatcaccttccagtttcagcagggagtttccaagcagtttcttttcataggtgaaagaaaagaaaaacagaagacatcgtgaggctgatctgtttatgaccaaaccatccagagaaaccaagagaaggttaaggccaagttattcctggaaatgctcagaaacgcacatatgctcttagctcagcccgtattttgatctgagctccaaatgcaaaatgcgagtgctattggtatctctggggcagctgttaattagcatctgagttataatttggctgggatgcagaaataagggagggtagtagacatggaaagctattctgtaataagaaataagctgaagctaaggagatttcacctgcgcagggttaataagacacatgaaagactccttcccccataaggctgcagcagaagtgcaaaggcgccgtgttagcagcgagccagcacgcctctgcatctctttacctgaacccaggcaggcagaagctcgtaagaaacacagtcgcgggcctattgtacacatattaacaaggatttcagtaaaagctcacgtgtgaaacgaccaacaagtcatccaaacaggtctaaccactgagtaaagcccttttcaggaggcttgtggttaagaatctgccaattgctaacacataaagtgtttattaggagtgaagagtctgaaaagagctgtttggtcttcgctggagcaaac

SEQ ID NO: 341548 - DNA, 70 bp, Homo sapiens
  chr12:120165264-120165334
  hypo
cgaggaggggagtgagggatgaaaaattacctatcgggtacgatatacactatttgcgtgacaggtacac

SEQ ID NO: 341549 - DNA, 281 bp, Homo sapiens
  chr12:120172992-120173273
  hypo
cgttccgtgatctcccggcggagatggtccacttcacttcgcagttgtacaatctcgtcgttggcgccagaagcctcatcgagttgtttggacaagtagaagttttggttgttgagttcagcgttgtcctcggtcagctggtttagctgctcctccaggtctgtgattacctaaaagaggaaaggaatccagttacacgccaagcacattcatttcaaataagaaattgcttctagggctatggatttctgaacccacgtgacactggcaatcaacgtgcc

SEQ ID NO: 341550 - DNA, 276 bp, Homo sapiens
  chr12:120186357-120186633
  hypo
cgatttcacatcttggctatcatgccgatggcttactaattaattaaacagagggcttgatatttatgtacgagaatgagaacgtgcactgactcatgattttaacaaatcaaagaggatgactttgggatcccatcatcacgctatgcagggagaaggattcctttcattagtgtctctagctttcaactcttgattattcaacattagtcacttgacagaatcggtaaaagaacagaggagtgaaaacacaaaatgtgttcatgaggcctggcc

SEQ ID NO: 341551 - DNA, 65 bp, Homo sapiens
  chr12:120189911-120189976
  hypo
cgcctggcgaagctggctctccagggccgcccgtgcagcctgcagggctgtcaactgtgactcgc

SEQ ID NO: 341552 - DNA, 96 bp, Homo sapiens
  chr12:120543024-120543120
  hypo
cgacatcccactcaaaagcaaatagctgaggatgatacgcaaccagaacacattcagaaaagcggccagcacccggggtcttccagccaggggaac

SEQ ID NO: 341553 - DNA, 108 bp, Homo sapiens
  chr12:120574331-120574439
  hypo
cgagcagagccgccttcacattccagctgaacctgtcccccaggatgcggatcagagggccagtgatgctgaccacggagggcctcagggcgtcagccgaggtcaggc

SEQ ID NO: 341554 - DNA, 214 bp, Homo sapiens
  chr12:120580310-120580524
  hypo
cgttctcttatctgcacacgtgctggccaggaaacccagcaggagcccaaagagagtgggtaggatctcacgcaaggtgcggggggtattggagacaacaatcttccagacatgcagggacgcctgccgcaccaccagctgggtgtctgagcggcccatgtacagccctgccaacacccggttccgccgctctacccccagggcagtgatgatc

SEQ ID NO: 341555 - DNA, 143 bp, Homo sapiens
  chr12:120613510-120613653
  hypo
cgcctcaaccacccgcatggccaagaaggcttgctcacctccgaggatagcaaataggtgcttggtcagggattccatggccgaagagtcactgcactggcgtgccaggttccgcagtgccagcacagcttcatccatcaggc

SEQ ID NO: 341556 - DNA, 97 bp, Homo sapiens
  chr12:121200066-121200163
  hypo
cggacctaagtgtatcaggcagcggggagcaaacgagcactggaagggaagtctaatgtgtgctttaactgcagccacccactcaaccctccgagac

SEQ ID NO: 341557 - DNA, 206 bp, Homo sapiens
  chr12:121203947-121204153
  hypo
cgagatcacaagctcactcaggggcttaagcagaatcacctccagcgaggagagtgcaaaccgaggcacaggccaatccaagttattgctttcacaggtttataactgctgctctcacctttaaataggccatcgtgaggagtggcaataaagtaaatggcaccaaatagagaagggcgggctgggcggcccggtgaatgcgagac

SEQ ID NO: 341558 - DNA, 200 bp, Homo sapiens
  chr12:121205162-121205362
  hypo
cgaggatcatctgcagtctctctggttctcttacctacaaagtatccgatgagggtgcagtgaaagtaggagaccttctgcatgcgcccggagatgttggcaggtccaggggccccacaggagtccccactggcttgctttttgtagttgtcatagcgaaggacaaagcatagtaggagaccaggcataacgatgtctcc

SEQ ID NO: 341559 - DNA, 81 bp, Homo sapiens
  chr12:121328606-121328687
  hypo
cggagcgaaaagtcaacaggccttattatttgatgagaatcaagaatgtctccgaggtatctagctgtgaagccgaaaccc

SEQ ID NO: 341560 - DNA, 103 bp, Homo sapiens; identical to SEQ ID NO: 265342
  chr12:121622522-121622625
  hypo

SEQ ID NO: 341561 - DNA, 56 bp, Homo sapiens
  chr12:121667875-121667931
  hypo
cgtaccctttgttgcatttttcacagtccttaaaaaggaagcgctccaggccgggc

SEQ ID NO: 341562 - DNA, 972 bp, Homo sapiens
  chr12:121687598-121688570
  hypo
cggcaccacgatcctcgactcggggttcttgtccagcatacgggtgatcaggtccttcaagtcctcagctatgtcgggcctggggatggagaggcgtcagggtggcagacacgggaccgccaagaactcggacaggagagatgcgggacggcgggagatactcactggtctggaaattccagggcctgactcttgatcttactgtgtaaacacatgatccgctcgtccatgaatgggcactgcaaagaggccagggacagagtggcagtcaatggcggccacatctgcccttcgagggccacctgtgctgtgccactccacataggatacagcagagaaatcaacaattgcggcccaggctagggggcaagcagttcccattctccccgagaatggccaagacacaggggtgtggggcctggccgacgcagggcagagccaggaatggccctctcgaagggctagagcctttcccaagcacactgcaggctccctctgtagctgggcctcagtttacctacttacaccaaagcaaacactgctcgtcacctacttgccaggtgaacaacaggaacaacaagaataacacaaaagactttgtgttatttgtggcagcagcagtgattttcaagggcttagcctggatcgcgccacgccctgccctgaggttttcattcactgttccccgtccctggaatgttcttctcaccaacatctacgtggcttggtctctcccaccatgcaggtgtctgactaaagctcaccttctcagggaggacttcctgaagccctgtctaaaacagacaacccccaatgccgccaccgcccacatcactcctcatcgtagcacttatccctgacgttatcgtacagatttgtttattgtttaacccctcccacgggaacgttagctccaagaaggcagggatttctggctgtcttgctcactgcggactctccgtgcctaggagc

SEQ ID NO: 341563 - DNA, 124 bp, Homo sapiens
  chr12:121756071-121756195
  hypo
cggcttacctgcgcaaaagccaagttcagcactgtttcagaggccaagtactgtaaccggtactccttggagagggccagagcctgcaggagcatgggcagcgcgatggtaggggaggaagatc

SEQ ID NO: 341564 - DNA, 124 bp, Homo sapiens
  chr12:122179060-122179184
  hypo
cggcggtggtttacgaatgcctgcttgatagagaaaaagaacacacaggcaggcacacatacatgggggataaagcaaatacagcatgatggaacagctagtgaatctggtgaagaatagaggc

SEQ ID NO: 341565 - DNA, 350 bp, Homo sapiens
  chr12:122192684-122193034
  hypo
cgtgaattttggaaggatgctattcaacccagtacaccttctataggctaaaaacggggcagaggagggggattggacgggccgttcatctctgtgccggtgcccccgggaagcctgccctgctgtttaaccttaggcaaatgacgaacctctcccagcctcagtttcttgacagatacagtgagcgtgacaggagctacttggcagggcagcttggagggcaggagaagctgtgtctggagactggttagactggtgcctgtttaaatattagcaccggttagcatcaccgttgttttgggctaagactgggcatacgggaaaaaggctcacagcttcatagctagtgc

SEQ ID NO: 341566 - DNA, 94 bp, Homo sapiens
  chr12:122206347-122206441
  hypo
cgtcaagggaagagtgatggtttagatccagtctcgttcttacgatgtgcgtatgcgagaccctgcctggaaaaaaaagagaaagcacgtgggc

SEQ ID NO: 341567 - DNA, 553 bp, Homo sapiens
  chr12:122208750-122209303
  hypo
cgagacacatgcctgcgttgctctcccctcctgagcactttccgttctctccctctcccgagaattaaaggctggtgggtgtctcaccactacgtctccacattcctgtccggagtgatgctgacctggtgagtagcccctcgctgggcccctccagcctcccagggagtagagcctggggcccgggaatggggagggggctgatccagacagcggtggggggtgtgctccagggccaacttgggaaagaaagtatgagcctgcagctgcgccgggctgcgcgggccccacccagcccgtgaggggttctccagggaatggtttcgggtgtccctggccagggcagaggtagcggggctgcaaggctggagggagcgagtgaggctgggcactgaaggagactgcggaggacagaggggtcacagggagttagcgcttctgcacggccatgtggacccctgtgcttctagaaaggaagatgggatgacctcgcccagccccagggatagaagggcggaagtctggacctcagtttgactttatacaccttttc

SEQ ID NO: 341568 - DNA, 304 bp, Homo sapiens
  chr12:122212948-122213252
  hypo
cgcctgccttcctctccagttctggcagctctacaatgccgtcacgctgtttgagctctccagccacgaggaatgcagagaatggcaggtatggggggtgggggcatgctcgggggaggttcccgggagggctggggtggcagggatggggtgtatgtgtggcatgctggggtgcggattcctggggagggctgggatggcagatgtgggggtggggtgtgtgcgtgtgtgtggtgtgctgtggggaggttcctggggcgggctgggctggcaggtgtggggtgttgtggggggcctgcttggc

SEQ ID NO: 341569 - DNA, 178 bp, Homo sapiens
  chr12:122213623-122213801
  hypo
cgtgagcctcgggctcctgtgccctcggcccggacttcagactgcagggggctcccgggctccttcccagcagccctctcaggcccgtggcatcgctgggagagggcccaggccctggtcccccagtggaccccagtggtctagaggaatgtgagccccgcctgtccgcacagtgtcc

SEQ ID NO: 341570 - DNA, 185 bp, Homo sapiens; identical to SEQ ID NO: 334680
  chr12:122214111-122214296
  hypo

SEQ ID NO: 341571 - DNA, 751 bp, Homo sapiens; identical to SEQ ID NO: 334681
  chr12:122231543-122232294
  hypo

SEQ ID NO: 341572 - DNA, 140 bp, Homo sapiens
  chr12:122285028-122285168
  hypo
ccaccacaatggatcgcagagagctatattccgtgtgcacctgcgtgtcatccacggaccagaagcggtggaactgcaggtttttcaggtacctgtagggtgggcggtggaacacatatgctctgagcgcctccagggac

SEQ ID NO: 341573 - DNA, 323 bp, Homo sapiens
  chr12:122439464-122439787
  hypo
gagggatggaaatccgagcctgcaacctgctccgtcaaaggtaccccagctggctttgtctgggcatgtagctgtggctcactgatttgttgtagacttcagtacatttatttctcctgatcggtgcaagccactctccctaagactgcacataacaaagcatgtctgttgggaatcccacatgaataagttatgaaaagaacagtgagtggtggcttttgttcccgcgctctgtccgtccttttgtttcttctgggcttattttccctttgttccactgacctgtcatcttgccggcttgggtgggtgaatattggccaccc

SEQ ID NO: 341574 - DNA, 582 bp, Homo sapiens; identical to SEQ ID NO: 334683
  chr12:122460955-122461537
  hypo

SEQ ID NO: 341575 - DNA, 61 bp, Homo sapiens
  chr12:122463078-122463139
  hypo
cgatggtaggagacgaaagcttgggctgcagcgtaagcttggaggcccgctgcggtggctc

SEQ ID NO: 341576 - DNA, 67 bp, Homo sapiens
  chr12:122474899-122474966
  hypo
cgcacccgtccctaaagcttcataaaaattaagttggttttccgtgtttggaaatcaggaaatctcc

SEQ ID NO: 341577 - DNA, 407 bp, Homo sapiens
  chr12:122480960-122481367
  hypo
cgtgtcccgtggaatatgccacctcccgctgtctctctctcccttttatttcctatcaagtggaactcagctccaggctggatgcagtcagacagaacgccttggcaatcccgcctcacggaccatgccgtgtcttctgtatcgcttccctgccagacacacaagacgtctggtttctacacccagaatgaggcctcaaatgtccccccaggattttaaatatgttaggccaccatccccagctggctgcctccagacgcagggtacagttggctcagtgtggggaaggtcaggccagtgccggaattctttgcctctctggacacatgggatggctgtggtgcttgggtgggtgggtgggtgggggtcagggggcgggagtgagctcaggggtcccaggaggaggc

SEQ ID NO: 341578 - DNA, 375 bp, Homo sapiens
  chr12:122481629-122482004
  hypo
gagatccgtctcaaaaaaaaaaaaaacggtaaccagacccctccccgggagagctgccatggggttccgggcattgaggcacagggatgctgagccctctgacctacccgtccttggcagctgtgggatttcatcctgtggttctgttcccaccccctacagacgataacagcaaccagagctccatcgcagatgcctcccccatcaaacaggagaacagcagcaactccagccccgctccagagcccaactcggctgtgcccagcgacggcaccgaggccaaggtggatgaggcccaggctgatgggaaggagcacccaggagctgaaggtatgtggcctctggaggtggggctctgacggcctccctgtaacc

SEQ ID NO: 341579 - DNA, 142 bp, Homo sapiens
  chr12:122602792-122602934
  hypo
cggtttaggatttatagattgtttatttctgcaactttccatgtaatattttcagacagcggttgatcatgggtaaagcacaataccgcagaaaagggaggaatgccgtacattccagtgttatatttcaacaatacaaaac

SEQ ID NO: 341580 - DNA, 458 bp, Homo sapiens
  chr12:122614584-122615042
  hypo
cggaattcagcgacaccctcttctccacactttcttcacaccagccggtggcctggcccaatccccgggaaataggtaacccaaaccagggccttgggctttgaacagccagccgcttccttctctgccaggccccctctgggccagggttccttcagggccatctctgagctgctgcacgtcacggttgggggcaggcagtaaggaagggaaggatggctggcctcatttgacatccaggccgcacgtaccgagtgggtggggtctgcagagtgggcccactgggcagctgccattcccgtagtgccatggtgggaggacagcagcagggtctagtctgagtcattggcacatttcagataccgttctcttcacggggtacgtgtgccgtgcctaagccgaggcggccgggccgtgactcatgctaaagaaaatcagaagcactcccgggtgtgacc

SEQ ID NO: 341581 - DNA, 518 bp, Homo sapiens
  chr12:122622385-122622903
  hypo
ctgctcaggctgcccgcatcagttgcaggaggggtgtggccaccaccagagctgtgctgtggggaggaggcagggctgggtggggaaggcggagcttgcagcacctgggatgcaccggttcagccctgccgttcccagccccagctgtgcaccattctgcagagcgggttttctgtggttcccagtcttgtccctccggctcctcattggagccttcagcttctcgtcgtgccctcctcccacgtagctctctagccctggcccttgggcacccaggatcagcgtagggggtgaggaagggtggacagtgtgcctgcaatgtgcctgtcttagtgaccagcgggttctccagcagaaccggcagatgaagcacatctcagctgagcagaaaaggcgcttcaacatcaagatgtgcttcgacatgctcaacagcctcatctccaacaattccaagctggtgagttgccaagagcgtgggctgtggcagggcaggggagctggcaggacgtgctccctgc

SEQ ID NO: 341582 - DNA, 263 bp, Homo sapiens
  chr12:122623827-122624090
  hypo
cggtcctcgaagccacagggagggtgagtgccacccctgctgtgacaggcggaaaccaggactccctccactgagtggtagagcccaatttgaagcctaatggagcatgtccacctctaggggctctcgtgccaaggccaccttgcactcagccttccaggtggcagcacggctctcacggggagtggttcccgcctggtcactccccaccctgccaccgctctgcctctgagtaaacggtcggcacatgtgttgggttgacc

SEQ ID NO: 341583 - DNA, 598 bp, Homo sapiens; identical to SEQ ID NO: 334685
  chr12:122688584-122689182
  hypo

SEQ ID NO: 341584 - DNA, 123 bp, Homo sapiens
  chr12:122970391-122970514
  hypo
cgacgacattcttactggcactcgggccaaaaacctgagtcactccgatgactcttttgctctcatattctgcgtccaattcatcaacacatttgatcagctctacttccccagtacatccac

SEQ ID NO: 341585 - DNA, 180 bp, Homo sapiens; identical to SEQ ID NO: 265420
  chr12:123128962-123129142
  hypo

SEQ ID NO: 341586 - DNA, 551 bp, Homo sapiens; identical to SEQ ID NO: 334686
  chr12:123258823-123259374
  hypo

SEQ ID NO: 341587 - DNA, 303 bp, Homo sapiens
  chr12:123325625-123325928
  hypo
cggctaacctgagacgccttggctgctctgttggcaatgcccttacccgccccctccccgcccaacttggtaatctgcgatgctaacttgaatatcacctcctctgtgcagccacccgctgccgtcctcctgcccaagcctctctgtgctgcccagtcctcatgacattatttgcgctgcttccacatctgccctgacacgctgtggctggcccagcagagcgggaggaagcagacagacatggggtgggcgcatgtgtagaccaggctcgcctgagaagtgggagtgtgtcatctccttgcc

SEQ ID NO: 341588 - DNA, 473 bp, Homo sapiens; identical to SEQ ID NO: 334688
  chr12:123380333-123380806
  hypo

SEQ ID NO: 341589 - DNA, 255 bp, Homo sapiens
  chr12:123434339-123434594
  hypo
cggttctcatcaaagaagcttgtctcctgggacaccagtgagcggaagagacagtttcgaaggcgaatgttcagtctggcaaatatgagggtaaaaatgccgccccgaatacctgcggcaaatgagctaattgcagataagagatattatagcacgatgtccttccagaccagtgaccacacccggctgccccctcccgctgccggcaggcctgggagccccaccgcagccccactccagggctggcatccctgc

SEQ ID NO: 341590 - DNA, 203 bp, Homo sapiens
  chr12:123434957-123435160
  hypo
cggggtgtgcggggcagggcgtgggggttgagccagctacctgccaatggccagcaggcacacgatgacgacagccgtgctgaactgatccatgcttttctggatgacgatgccatcaatggcgcggcccgtgtagtagggcaggaaggtctctcctgggggaggcagggcagcctcagggacgtctgcagccaggggaaccc

SEQ ID NO: 341591 - DNA, 112 bp, Homo sapiens
  chr12:123986845-123986957
  hypo
cggccactgccgggcagacgtcgtagcagaagtctttttgtgtaaggttacaaaggcctttgtgcaaagctgtcgtttttccagagtcttttttgttatcgggcatgcaagc

SEQ ID NO: 341592 - DNA, 280 bp, Homo sapiens
  chr12:123997867-123998147
  hypo
cgacatgccctgtcctggggcgccaggacccactcactcatttactccttgctggggctgccttggctccccgagaggtgggcgggaggcgagcatgaggagagaggggcggctgggtctatgtggaagcccagcagcctcatcaccttcctgggcggcagccgtaggagctatgagaccgaggcagaagcctggcgcctgactcctatcccagcttcggcctcttagttgctttcccttcaggcctcggtgctctcgagaggcctgtgcacgcttcatc

SEQ ID NO: 341593 - DNA, 158 bp, Homo sapiens
  chr12:124171347-124171505
  hypo
cggtcacagctcctgcctttatgtttgtcttccaggaatgctcatcaaatttaacaacgctgttcagacggtcctgcttcaccggcgtgtttggaggagacgtcaatcctccttttgatcagctctgctctgctgggacgacgacacgtggtgtcccc

SEQ ID NO: 341594 - DNA, 192 bp, Homo sapiens
  chr12:124335343-124335535
  hypo
cgccacgcagctcgccgcaggccccctttccaaggggctggccggccgggccacctaactgcttctttctttcttccttcttgccctccagtttgaagggcaggagatttccctggactcccgcatgggcatcttcatcaccatgaaccccggctacgcaggccgcacggagctgcccgagtcggtgaaggc

SEQ ID NO: 341595 - DNA, 205 bp, Homo sapiens
  chr12:124788624-124788829
  hypo
cgcgagaggcacttcccttgcccactccccaggctggctggagtccacagggcgccacgaccgtttcgatgttcgaatagccctgcagccagaaagacgaagctgcgagcctcaggatgaactggtggctgccaccatcttcccttggtgtccagccctgcagctccgcgggagtgtcctgggccttggcggggacttcccgagc

SEQ ID NO: 341596 - DNA, 84 bp, Homo sapiens
  chr12:124832004-124832088
  hypo
cgcgagaacctgaaagagttctcggagctctccaagcctctcccaatcgcatgtgcctcaccaggatgttctgtaaaacgatac

SEQ ID NO: 341597 - DNA, 929 bp, Homo sapiens
  chr12:124832318-124833247
  hypo
cgtgactgtacacccgttgggggcaacgagggagcagggaacagggcagtaccttgtgtgatggacccgcggatgtggtgctgctctttgaggtggtgggggctgtgtcgctccggcgggatggcacggcccatgagacctgggtaggagagggtgaggccatcattccgtggctccctgagccgacactgggcagtgacaggggtcagtgtttacagccgccagtggtcatccccacgatgatggtggagtaggacccagcacgggaaggtccctgcgctacctccagatggagcctcagaaagcccagcctcggtttccccatctgtaaaacggggtcagccatccccccaccgcccaccagggggcaccgagagatgaagtctcctccctgctatcaccttcgatgctggctgaggagatggctctgcccacgcggccctccatcatgtcataggtgcgcttgggggcggccgtctcatgggggggtcctgagctgcttctgccgtcctccttggagcactgggtcacagacatgccacctggaaaccacacaaagcactcggtgaggagctgggcacgggcccaggaccacggtgggcaggcaggacaggcagagccggtaggcaggagccagcagtgcttccatgctggccccgtcacaaagcctcacagccgaggcctccagagggagctggcagcctgcaggccctgggggcctgccagcaggacccaggagcttttccagggggttgcacggtgggagatgcagggcacgctgcctgcaccctgtaccctagccctccagggtgctctgtctgcaagcaagggtgtgcctgtgaccacatgagcacgtgagtctgtgtccacacccacgggtgccgacatggggcgtgaacaagtgcacacacatgcacgtgagcaaggac

SEQ ID NO: 341598 - DNA, 286 bp, Homo sapiens
  chr12:124843509-124843795
  hypo
cggcttcgaacccaggcactggggctgcagaccatggccttaatccagactgctatgccacatggcctgcggcagagaagcaatgatgggtcctagatttcaggcctggggagatcctgtaaactcagcggggccccggggctcaggcctggcttcatggcatcttcctgctggcctctcgccctttgctgaaatctgtcctcagctctgaacctctccctgaggaccaatcctatggagagataaccggccaagaagttgagcagagacacaacttgggaatgac

SEQ ID NO: 341599 - DNA, 721 bp, Homo sapiens
  chr12:124850157-124850878
  hypo
cggtgatgcctgcttaggctgcccatggcgcacagacgggggccagacgaggaaggtcaccctgacttctgcatgcacctccaccgcccccaccgccagcccactctcctccctcccctccctccacctgtccagaccctgcttgatctcccaggaccacctaaagcctctcctttggccactgccatgcctcactccctggacctgggcccagctgtgctctccccgccatcctcaaggtacagacaaggtaccctgacccaggtccaaacacagatggtatcacctgtcccaacattctccacctgcggcttcaactgccgccacccctatgtccctccccacaggtttacctaccaccatccgtttcaaccagctcgcacttgcaagctgaaatttaaaagagaatgctgcagccactttggaaagcagtcggtgagccctcattgccctaaacccagcactgccactcctaggcacacaccaggcaaatgagagcaaatgtctatgcagaaacctgcacgtgcccaccactgcagcaccgcccagcgcacaacagccagaaggcagagacaacccgacatccaccaagagacgaatgaggagacaaagcgtgccctgtccgcacgatggaacacatggccatcaaaaggcatgaggctctgacacgggctatgacgtgggtggaccctgaagacacgatgcgcgtgaaacaagctag

SEQ ID NO: 341600 - DNA, 772 bp, Homo sapiens
  chr12:124869706-124870478
  hypo
cgctggcgaggcgagcctgcaccttctgtgcttgtggaggagggaagggtctcagcctcccgtggcctgcctcaagccctccaggatgctggggctgagacgtccgcccccgcccccccagacctgtccctccccaaccacggcagccctaaagctgtgaggtcaaatggggcaggggagccactcgctcaggacccatttgcctccgggtcctcattccaacgcgctgacagcccgaattcctggctgagtcagtctggtccaccgcgctccttcccccacaccgtgagacagggctgagggcccccagaggtgtctgtctgagaggagtggggtgcagggtgggggtggagggcagcctggcccggcccgtctccaaggcagggacactcatagcagcattgccgcctgcagccatctcggggtactcccgggcttgaacccccagaagctgagttctaacaaggcggcataatagcccctccctggcccatgcctcctggggtgcagagacatctcctgaggcagtctgggctcctctcccagcttcccagaggcgcggtgcagcgtgactgggggctcaccatcttcagcttgtgctgctgcaagatctcatcgaggttctgcctcttcttgtagttgaagtagaagttcttacactgcgacacagtcttggagcccaccatccgggcgatggccgaccagttgcggccgtgttccaggagacctgtctcaggagaggagggcagtgagaagaggccaggcccggcac

SEQ ID NO: 341601 - DNA, 404 bp, Homo sapiens
  chr12:124879871-124880275
  hypo
cgccccacccccgctccctcctgccatcgcctggaacacacagccattagcagccaccctgagcagtaattgtccagattgctgtaattcacggcagacgaacatgctgctgctcacgacattattacaaatgtcactgagcagggcctccgcgtgcacggcccccaggggacgctcactgccgtctccatgggcaggacccaggatgagctcactgtcatcactgaggacccaaccttgagatggtgggacacgggctcctctccgccggtgagtcatccccagccgtcctcccagcctccggatctgcccttccagaaggcaaacagagggcaggcactgtcttcccagttctcaggcaatgggcggtgggggcgggggtggtcaccggtgaggaggtggta

SEQ ID NO: 341602 - DNA, 220 bp, Homo sapiens
  chr12:124886252-124886472
  hypo
cgggaggctcagattgatcacctctgccttcccattcatcttcctgaaaggcccttgctggaagcgtctgggagacggggtgaggaagccagatgttctctgaagccaaattcctgagcccattacaggtacctggcgctaagtcgtgccgcccccctttctccagctggctgcactcctgcagcccctggcaggcacaggaggctgtcacggcccccgc

SEQ ID NO: 341603 - DNA, 429 bp, Homo sapiens
  chr12:124893329-124893758
  hypo
cgaaggttacaagcactccaagggcattgcttcctgatcatctggctacatggagctacgaagtcatccgtgccgtggaggtgacttccgccaactccatgcacagggtgagaacaggataagacagcctggtgctaggggcatctttccccagttccaagtcagcggcagcacgttgtcacgtggcactgggcacggtgagaggatttatttacaccatggcaaccggcacatgctacaaacgcagcttccccctacagaaagctggttgttaaacatttaccagcactctacggcagaaagatgcgtgtcgacagaacgtgagcaacatttaacacgcacatggaagcctgttccgcctgtacagatgtgtgctgtgccagccgaggctctgttgtaaatcctaattcagatcccgacccgcaactc

SEQ ID NO: 341604 - DNA, 177 bp, Homo sapiens
  chr12:124970986-124971163
  hypo
cgttcattcccgggctggaactcagacagcagggagggcctccgccgctggggctggatgatggagccgggcgacaggtgggaggcatagtcgcgggagtggtgctggtactccaggagcccgacgtcctgcaggaggggacagaggagtggtgagcgtgggcgggcacgggcatgg

SEQ ID NO: 341605 - DNA, 703 bp, Homo sapiens
  chr12:124979300-124980003
  hypo
cggcccccttgccccctggaagccaccccaatcctacccaatactgcggcagcgggggagcagaggtgaggctaggctgcaggaaagtgaatacagcaggagctccacattcgcgtgccaatcccactaccagtccagagagggcagagccccagctcagcctggccccagcctccatcttcccagctttaaaatgggagcaaagagattttatcagatattctggaaaaggcttcagacaccaggggtctctgtggcggcctcccctctgccctgggaggctcagagccacatgagcctggctcccaggagaaaggaaggggtgaagactcagtggaatggaagaagggtctcaaaggtagccccaggcgcacacatgtgcacccccttaccgtgtgcgtccgggcgatctgcactgggtaggaaaggctgtggggcgggtagcggggctcagtggccctccacgtctgtgccacaggctgtgtggatcccgacatggtggtgggggtcggcggggagctgctcccaggccccaataagctttctcttaatcaccaccaaggattaaaagccagtcctcgtcatcagctcacgggccaccccgtcactggcacctgcgggaaaacaagaaaagaaaaacaagatcagccacggggcagctggctcctccgtgcacaggtccccgagtcgttcctgtggtccc

SEQ ID NO: 341606 - DNA, 143 bp, Homo sapiens
  chr12:124989213-124989356
  hypo
cgcagtctgtccatcaatggactacgattcagccacgcaaaggtaagcgctgactcagccacaacgcaggtgagccctgaagacatggcacaaaaggcaaagaagccgctcagaaaggccacgcactgcatgattccattaac

SEQ ID NO: 341607 - DNA, 253 bp, Homo sapiens
  chr12:125062713-125062966
  hypo
cggggccgagacaagcctgggcagggagaagggaagggagcccgtctgtgcctgtagcctgggcagggagaagggaagggagcccgtctgtgcctggaaaccaatttgctctggcagcgctgtggaagaaaaattccacgcatgtccccgcgagcccttcgaagctcttcgtggaaaggcacacactgcagtcttggagtgcatcctgctcttagggcctctgggggccaagtcaagccgatgaagggtgtgc

SEQ ID NO: 341608 - DNA, 177 bp, Homo sapiens
  chr12:125092427-125092604
  hypo
cgaaagccaagctccgtgtccatcgcgaaggcactgggcatgtggctatgcagccgtgacaaaggatgaagccatcccgtggccagggcgcagagtgacctcccagatctacgtttcatgtggcgtttctgccgtgtatttttaaacccggggacaaatgtatgcgtagtaaaggtc

SEQ ID NO: 341609 - DNA, 238 bp, Homo sapiens
  chr12:125102490-125102728
  hypo
ccctcctcagccctcgtgcttgccttccaaagagctgtggctgttttctccgctcccctgcggtggagaaggaagagggcacatcgctggaggcatcttgtctgtgcctatgcagttctgactgcgtttgtgccccttcgattcacgcccattgcacaaatggggacactgaggcaatgagaggcgaggagacttgcccaagacctgcaggctccgtcaggggcagggtcaccggtgc

SEQ ID NO: 341610 - DNA, 147 bp, Homo sapiens
  chr12:125500633-125500780
  hypo
cggcagcggatccacgagccctgaatgcctgcattcatcaggggagcagctggcgcgttctggaggcgaaacgagcttgcttccgtgtcgaagcttttctagttctgtttgatgcgtaagcttcaaggcatccgaagccctttggaa

SEQ ID NO: 341611 - DNA, 286 bp, Homo sapiens
  chr12:125605555-125605841
  hypo
cgcgtacatgtgcaagtgttcacagcatggtggctggttccgtgccgtaatcacgggccctgggttggccagagcgctgaggctgattgaggtgtggtcgtgctgtcgcagggctccctctggatgtggccatcgccccgcctgagagagcctcctgcgccgtttggcgaggcaggtgtgacttggcaccctggcaggggctgcgggtgaggggctttcggaagaatgcaggctttaaaccactacactggtcgccaccagcagtgagagggagcgggtgctgggc

SEQ ID NO: 341612 - DNA, 289 bp, Homo sapiens; identical to SEQ ID NO: 334696
  chr12:126018009-126018298
  hypo

SEQ ID NO: 341613 - DNA, 122 bp, Homo sapiens
  chr12:128247754-128247876
  hypo
cgtgcttaaacggagacagttagggacaaactgggacgatttgcgcaccttaattcgatgagctgatgccgtcatatcaacgcacactttacctagcatgcataagcctagagtcagcagtc

SEQ ID NO: 341614 - DNA, 46 bp, Homo sapiens
  chr12:128489355-128489401
  hypo
cgcggctagtcctgctgcagtgcatctgggctaatgcccgaggttc

SEQ ID NO: 341615 - DNA, 756 bp, Homo sapiens; identical to SEQ ID NO: 334698
  chr12:128750713-128751469
  hypo

SEQ ID NO: 341616 - DNA, 344 bp, Homo sapiens
  chr12:128899673-128900017
  hypo
cggcgccggggagaagctgccatgcctgagggtctttgctttccgagaaaccagagaggtgcggggcagctgccggctgaagggggacctggggctgtgtgtggctgagctggagctcctgtccagctggttcagtgccccgacggtgggtgccgggaggaagaagtccatggaccagccggaggggacccctgtggagctctactacaccgtgcacccaggaaacgagcgaggggactgtgccgggggtgacttcaggaagggcaacgccatccgtccaggaaaggatgggctggaggaaaccacgtcccacctgcagaggatcggcaccgtcggcctttacc

SEQ ID NO: 341617 - DNA, 557 bp, Homo sapiens
  chr12:129189650-129190207
  hypo
cgtggctgcagttcagtgatggctctgtgacgcccctggacatctacgacaccaaggacttctccctggcagccacctcccaggacgaggctgtcgtgtcagtcccccagccccgctctcccaggtggcccgttgtggtggccgaaggggaaggccagggcccactgatccgagtggacatgacgatcgccgaggcctgccagaaatctaaacgcaagagcatcctggctgtgggcgtcggcaacgtcagggtcaagttcggacagaacgatgctgactccagccccggcggggactatgaggaagatgagatcaagaaccacgccagcgaccgccggcagaagggccagcaccatgagcgcacaggccaagatgggcacctctatggcagctctcccgtggagcgtgaggaaggggctctccgaagagccactaccacggccaggtccctgctggacaacaaagtggtgaagaacagtcgggcagacgggggcaggctggcaggagaggggcagctgcagaacatccccattgacttcaccaacttccctgcccac

SEQ ID NO: 341618 - DNA, 949 bp, Homo sapiens; identical to SEQ ID NO: 334700
  chr12:129337895-129338844
  hypo

SEQ ID NO: 341619 - DNA, 257 bp, Homo sapiens
  chr12:130037501-130037758
  hypo
cggtccagatccaacaactacaacatggatgccccaagtccgagtctctggggacaagaaaggtcacgccaccatccgagccccagccttgctggtctgacagcatccaccggagcagcttcggttactcaacctttcaaggccaggctcttccccttttgagactccgagagtgttgcgcgtttgctcccagctgtgtctgagtcactgcttgtggctcatcagtcaggctccctgctggtcgctctcaccactgc

SEQ ID NO: 341620 - DNA, 604 bp, Homo sapiens
  chr12:130184247-130184851
  hypo
cggctctacttcggtgagcgataacacagcttttctggtcaaacagcttctggaaaacaccacctgatcgacgggcgggtacagacagacattgggaaacgacttacctcaacgtgaagcgatcttcagtggaatttctggagatggaaacaggaaaagtcagcacgtctcctttcctcacggtctttggtatatagtggatggccacgctgttgtccagacgcagttctctcagggagggtttcctgtgtgtctgataaaggaagatgctcccgatcctctgcaaggggggcccggactcatcgatgtcactgtggcctgtccggatcccattgcttctcctcgcgtcttccctgacgcagtcccctctctcaccccctgggtgcacggtgtagtagagctccacgggggtcccctccggctggtccacggacttcctcctcccggcaaccaccgtgggggggctgaaccagctggacaggagctccagctcggccacgcacagccccaggtccccctgcagccggcagctgccccgcacctctcgggtctctcggaaagcaaagaccctcaggcacggcagcttctccccggcgctgcggtc

SEQ ID NO: 341621 - DNA, 181 bp, Homo sapiens
  chr12:130493341-130493522
  hypo
ctttttcttaaaaacgtcctaaaggaactaagctccggccagcaccaccacctggagctgcaccgtgtctcccgcggcaggacaggagtccagaactccccttgtccctttgcccagttcccatcacgagaggggctggggtgggcaagcagtgggtatagcagcaggtgcggctaccctc

SEQ ID NO: 341622 - DNA, 868 bp, Homo sapiens; identical to SEQ ID NO: 334702
  chr12:130645201-130646069
  hypo

SEQ ID NO: 341623 - DNA, 1490 bp, Homo sapiens; identical to SEQ ID NO: 334703
  chr12:130646597-130648087
  hypo

SEQ ID NO: 341624 - DNA, 71 bp, Homo sapiens
  chr12:130663584-130663655
  hypo
aaagagcgaaactccacctcaaaaaaaaaaaatggtccagcgatgctgtcaagactggagtttttgtgtac

SEQ ID NO: 341625 - DNA, 91 bp, Homo sapiens; identical to SEQ ID NO: 265576
  chr12:130821453-130821544
  hypo

SEQ ID NO: 341626 - DNA, 160 bp, Homo sapiens
  chr12:130892190-130892350
  hypo
cgtggcctcagtgtggtgtaccacgagggaagggaagggtgtggttgtgtccgtcatgaagtgcagtgtttggctggtacctcgacatcgacgttgggcgagctttctctggggtcgtagtcatacagggccaccattctccgcgtcgataccgaatgac

SEQ ID NO: 341627 - DNA, 701 bp, Homo sapiens
  chr12:130909511-130910212
  hypo
cgaggggggggaagcatgcgtctactcaggccgggggcatgccgtggagggctctgcaatgaaaacagaatgggttacggggctggggcggggtggaggctgaggcagagcacacgcagagccagcgggccgggcaggagccagcgccatgcatccagccaaggagagggcaggtgagatcccggcggcacatcaggccccacagtgcccacggtaccgctgctgtagatggtgggtgtggccacggtgccaggggagactgcccgggggctacatcctcagaaaccctgagggcagctgccactggaggccgtgtgtgactggagacagttcaccagacacggagcctgacccgtccctgtccatccactgggccaacttcccttccagcgctcggcaccctctgcaggactttctagttaggctgacgtgtcacccttctccctaagatacaagctgcgtgaaaccacgccatccccggccccaccaacagcgcccgcacaccatcgtgcagagtctgtgtcagcaaaggactggggtccgcctgtctcctctgcatcctgcatcaagtccctgagagccacacttgagccatcacagtctccagtgggtggcacagagctggccacaccgggagctgcttaaccagaccagtgtccatgacttttatactgcccgtctgcacgccatcactctctgcc

SEQ ID NO: 341628 - DNA, 573 bp, Homo sapiens
  chr12:130933888-130934461
  hypo
cgtccgcctctgcggaagctcccgtggaggacctgagaggtgtgcgggacaaaactggctcattacctctcagcgagcacaaacactgaaggcccctgcacgggaagcccactcagcggctgtcatcgcagcgagatgcagcctgcagcgcccagcagagggtgaggatgcgggagatcagggtgctggacacaccccctttcactctcggtggtggggatcggggctctggacatgtcccctttcactctcggtggcgggatgtcccctggaaagacgcactcatggaccaacccctgcacctgtgaatgggaccttatttggaaacagtctttgcaaatgtgatggagttagtcatactgcagcggggcagattccaatccagggaagggtatccttaaaggaagaggggagaacgcacaaagacagggagggcgaggcggccaggcaggatggaggatggaggcagagactggagccacgcagctacaagccagggccgcctggtctcccggcagccagaagaggaaagaaggacccctccttggagccctcggagggcgagaccctgcc

SEQ ID NO: 341629 - DNA, 174 bp, Homo sapiens
  chr12:131077283-131077457
  hypo
cgggggaccttggccgtggcgggccaatcagcctgcatttgtgagaagagcgtttcgcccagcacgtggatttgtttcccaggcagggaaatcgggagcgggagagatggacagcgagctggtgaggatccgggctgcgatgtcgggagcggtgagagcgagcgcggcttccac

SEQ ID NO: 341630 - DNA, 429 bp, Homo sapiens
  chr12:131095743-131096172
  hypo
cgggaaccgccgcagctcctggaactgcacattcccctcccatcccacgagctctgtccccacgtcccccagaccccacaggggaagcactcagtgcctgcctctccaggagccgccttctcctccctgatgattgacgtccctcccgtaaaggatctctttgagctacagcctccatcagacaatacgttgcaggatattgggggcccttttgtcttccactcccgcagaagccagggcacctggggccgcttcatttacccgcatctctgcccccgatcctccgctggaagacaccggctgccggctaccgggcttcgctgcaggtgtaagtggcagatgccaccatgctggcggcgacgcgtctcctgcggagaggatttacctccgtagcctgggctaggaccttcaggaggcctgcacagcctc

SEQ ID NO: 341631 - DNA, 229 bp, Homo sapiens
  chr12:131110936-131111165
  hypo
cgactaccgccagcatcaccatcagctcctccatcaccatgactaccactggcatcaccaccatcttctccatcacgactaccgccagcatcaccatcagctcctccatcaccatgactaccactggcatcaccaccatcttctccattaccatgactaccgccggcatcaccaccatcttctccatcacgactaccgccggcatcaccaccatctcctccatcaccac

SEQ ID NO: 341632 - DNA, 438 bp, Homo sapiens
  chr12:131159368-131159806
  hypo
gcctgctcgggacgggtcgtatacgtgggatcctgtaacacgtggccttccgggtccggcctcttccacacagcgtgtccgcaaggttcatccgtgtggtggcgtgtgtcaggcttcattccttttcgcggctgaatcagattccatcgtgtggatggaacacattcacgtttcgtttatctgctcatctgtagaggggcgtgcagtgagctttttacagatgttcccacccattcgtgtcaaagagagcatccttgatccaaagacacaaactacaaaagggcacagccgggactaggaccccagttgtcccgaaggacctgttggccgccagatagtggttgaaggaagggacgcaagccctggttgacggagccgcggcctctgctgagacaggcgggtttgtccgcaggccttcgggaacgatgggtgtctcac

SEQ ID NO: 341633 - DNA, 174 bp, Homo sapiens
  chr12:131193281-131193455
  hypo
cgccccagctcactgcaccttctctaagaggctcgcgtgggccctggacacaggcgtgtttcagagctccctgggactgcatctgacccagaaccggctccgccccagcttctctgggatctcacaggtcctgcagcgctgtagtcccaacccagcttcgcggtcaggcagccc

SEQ ID NO: 341634 - DNA, 393 bp, Homo sapiens
  chr12:131265535-131265928
  hypo
cggagcgtccaccgatccccaggacaggttgtggctcagggaggcggcacccacaacaggcttcccaggccgcacctccaggccccgatctctgctctcacctcctgggctcaccctcccgggggaaggaggggctggacatggagcctgtggctgctcggtgtgggtggtgacactcttggtgacgtccctcggtcgtcaggactcatttccccggtgttggatgcagctcgaggacagcagaggggcccagcccataaggatgggaaggtctaactgtagatgctgacaccgaatgccggagacgcggatgcttctaccccagtggcaccaaggctgctgtctgcggaatcccaaaggtgacagctttctctaccacgggccgccccagcc

SEQ ID NO: 341635 - DNA, 279 bp, Homo sapiens
  chr12:131268401-131268680
  hypo
cccctgggaagcagacgtaaaatagaaacaataaatttaaaaactgatgagggacatcaacgcctacgtaccagagacaggtttcacaggttgagcctgggcaagttaccaacgaagaaaggaattaaaaatgaacaatcaaaaacgcagcaacaacaatcatcttcgcggatccaattccaaaattactacattactaaaaacatccagctttaaacaaatgatacatgcaaagaaacatgaaagtggaactcatccatgaaagcataaaaaagcagc

SEQ ID NO: 341636 - DNA, 1687 bp, Homo sapiens
  chr12:131271740-131273427
  hypo
cggccacccgcgcccagggcagggatctacacttgagtgtttccgcgtctgggtcctaattcctagtgggagcacggaaggacacagggaatgttgggagctgcatgggccatgtcttggtcccatgggacctggccctacttgacccgaggccacaccagcttgtagacatgagcttttgggggggctttgagtcctaagagacccagctgcccacgccacacagggggaaaggaagcagctggagagtccgctgcccacaccaccccgggctccacggcctcacccccaggccgtcacagagctccagtctcccgccacttcagtgcaaccctcgctgtctgcccactcctccggacatgacgcttaggaccttaccttgctctccagctcagagcccggcccccatggccgggccagacctgccccggcctctcccctccgcctgagccacgccccggcttcctgctcaccaggcctgcgttagcatctgcagctgtgcttcttcaggccgccgcaacaccagccttcccgcactgctccaagacactgagcctggtgcatgctcaggaaattcaacaatttcaaaacattgtcactctccccgcctgacgaccagccttgtactctactcacagggcaacctgctttagcaaactcaacgacacattaaaaagtacaatttgcaaaggagagctaccacctggctgggtgttctgcgcctagagactgggccccgggagagcgctccacagtgaacttgcgaaggatggaatttacataaagaaggcaccgtctttagtcctggaaaggcaccctgggattctctacctccgtccgtctttttcacaggcagggaactgaggtcccaggaggcccaggtcaccccacccaaggaggcagggcctcccctgcactctctggaacctctccctgccaagaagccagaggccctgttttctcaggcttaggaatctgcactctcttgttcaaagactgtgagtcagaagaggagggccaagtgccgccttgaatttctcttactgctcaaatggaaaacaatgaaacagggctgtccacatcacagcctgccacctgccagtcatttagagcctggcgcgcatttccatagctcctctgacgccaggacaatcagacccgtctccggagggctcctgcctctggatgtctaaatgttcttgccttaaacccggtgtgacgctccacccctcccacaccgcacacatacgaattttaacaaaatcttcaaagcagaacttaacaaaaggttgcgtggtaccaggtccatttggttccatgtgaaaccaactaggaagatccgcattaggctcttcctcagctgcgccgagggcctggtttctattcatttgagaagctgtgtgcgcccctgtatggtctgttctttcctttagggctcgcttttaacagtgagtgttgttgtggcaactaaaataaggagccggccagtgctcctagggaggaaaacctcggcaactccgcaggtgcaggcaccggccacagacccacgcctggggcactcgcgtttgcattagcagagcgcaggagtcagggagcgcgggcaggggcgggaggaggggtctgcgcactggccacggtgtgggggacccagccctaccccttcccggggctgagtgggactcgccac

SEQ ID NO: 341637 - DNA, 322 bp, Homo sapiens
  chr12:131288908-131289230
  hypo
cgtgatgaccgatgctcgactcgtgcatgccaagctgttctgcaatgaggtctgaagacgatgcctccggcacaggcaacctctcatcaagatgctcatccagcctgaccagtggtcccaagtgttgtcaagcaagtcagaagacagggccggctgcacacgttctaccctgaaagcctgctgtataaagaacactttctgagggcaggcggctgtggggtccaccgtctctgtctctcgggggcttctgttcgtacgtccctagccaatgtttccttcgagaaactggatttgttagcctctttctttggcgtctcagctc

SEQ ID NO: 341638 - DNA, 221 bp, Homo sapiens
  chr12:131314814-131315035
  hypo
cgccacgcttccctgtgaaagcaagctgctttcccatggtgaccgtcccatgctgtgtgatgcaccccccacagtggcgtggcgtaaacaaccagaggctcaaccctcctctcccatggtgaccgtcccatgctgcgcgatgcaccccccacagtggcgtggcgtcaatcctcctccactctgaacccacggcacgggcggatttttgttccaagtcattc

SEQ ID NO: 341639 - DNA, 286 bp, Homo sapiens
  chr12:131418203-131418489
  hypo
cggggcgtccccacgtcagatccctggggtcaagcctgtccccaggatgactccccaggttttgacctgatcgctgcacccatgaggctcccggtgtccgggcgctcctcaggtccccgacacggaggcaggcttgggatgactgcaacctgctctcatgagtcacagcaggtgcctgtcgagacccacacggacccgggcgggcaggacctcggatgctgactccctgtggggtcaggacctccttcctccaggttctgccgtctgaggccgcagcctgctcctc

SEQ ID NO: 341640 - DNA, 502 bp, Homo sapiens
  chr12:131478681-131479183
  hypo
cgcttccgggctccgaagggaaggacccgcggggtgttgggtggaaagagcgggtatagacaagctggaaggtccttatgcatgtatgcacaggaccgggcgtgaggccccgagacagggcttggtatgcagtaagtgctttattaatacgaacactcttgtttttgttgagatgggctacaaggggtgactgtggcaggcggtgccttctatgcagttagcacttagtaaacactcacactccgggcactagtgccctgcctgtagctaaggtatgcagtcggggcttcatgcccacttggcactggcaccctcccctctagccgtggtacacagtcggcgctcaataaacacccactctgggcacgggcgccctcccgtctgactagccatgggtaccctgcagcatcctcaggaatgtgcagcagacacttagcaggctccctctgtgtttccgggtgtctagggaaggagggagtccgagtgaggataaattaattag

SEQ ID NO: 341641 - DNA, 321 bp, Homo sapiens
  chr12:131623221-131623542
  hypo
ctcccacccattctcgcactccgcccccgcccgcagctgtgtgattttccatttgcttagggaccacgtctgccctgctccatgggagctggctggctcatgggctgctctagccccacggctacagctgcgccgggtgtgtggcacgctccatgagtcaccgtggaatgaacgcagcgtggacagatgcatgggggtgaaagcgtgggtgccgggcagatgggtgagcagaggagggagtgagcgctcagcacagcacgcctgcagtgcccttaaggggagtcagcgtggagaaccgtgcggctggagacgccacagtgc

SEQ ID NO: 341642 - DNA, 482 bp, Homo sapiens
  chr12:132076273-132076755
  hypo
cgcagcccagtcaccagggccatgcggctccacggcttctacgcttgggcactgaggaccgaggggttcaatcaggtcccagctccagtccaaccttggaagccaagtgttgggaagggagcatccgaggacagacagagccagggcccctgagtcactgcaggaggacgcccccgctgggactcggcgtccgctgcgctgagccgctaaggagccggtctacttgctcccgcagcagcccgggggccggagctgccgacaccagggagacgcgttttctgcactgactcctacgctcccgcgtggacatccccagcatgatttctgtctccacccacttcgcacacaccccgccccggccagacacccccaaacccacacagggtgcagggacaccgccctggccttggctgtggctgtcacactcgcctgtcccgccttggccccaagtcctgccagcccggctccgtccccgccccact

SEQ ID NO: 341643 - DNA, 621 bp, Homo sapiens
  chr12:132218722-132219343
  hypo
cgctggctcctgccgccctcgaggacttgaaggctgacgttgggctgggtgtggctcgtacataggacagggcccacacactggattcacgtttttcctcacaacttagaatagcaaagttacagactttggattcttacgaagacaagaatgaatgtcttggctaaccatgatcttacccaagaggacttaaaatgaatgtgcaggagaaatgagaagaggacttaagatcaaaaagagagtgactaggaggtcagagaggcagccgcccaccccacgcactccctgcttgtaagccggggccgcattgttgtgttaccacacttctgttttagagcctgttacggttttgagttacacagacatgtgtgggcttgtgcatgtttgaatgccctgtggacccggagctctgtgaggcaaaggctgggactgtcttactagccagcgtgctccttgcacctcgatccaaggggccacggggctcccaggaacattcaccgagtaacttcagaaaagtgaagagcagaagttccaaaagcacctggtgcttcctgggagaagtcacctgcacaggtaccttggatccaactgacaggtgagatgaacgagctctccctgcgt

SEQ ID NO: 341644 - DNA, 656 bp, Homo sapiens
  chr12:132221597-132222253
  hypo
gtagtagcaaaagactgaggcgacgcacatcctcggtggaggactaatggagtccctctggtgtgctctcgcggtgggctgcagagctctgggggtgggccagggcccgagcgctgcagggccacccaccggaatggctcttcctgagggtggaggcgaggtgactcaaggggagggcagcacgaggcagtctgttcacgtcagaaggggagggaagtgtctgtagtgcttctgtatcggcacctaaaagggcaggtaagaaggaccagtggccagcacagagaggggaactggaaggacgaggtcgcagacaggagtggctgactcacctgcccgtttgcgctgcttgcattttttcagcgtgactcgtcaccctctcaaaacatgcagattgacgtggtacttattttgagactaaactggtatcctgagttaattccttacaactctgtattttaataatacgtgcttttatcattttgtttcatcagctcagtgtgtttttgtttaggcggaagtggcccccgtaacatctttcccccgtagagacttgcatacccagtactgctgtgtctcgtgggaggctgctgggtcactaagcttttctggctttcatacgctgggtatttaataatcaccttaggatatactcagtc

SEQ ID NO: 341645 - DNA, 267 bp, Homo sapiens
  chr12:132241778-132242045
  hypo
cgttcagctggtgttgcgagaggaacgggaagctctgaggcaggggtgcagccctaggcaggagccccgtggtgcgagctgcccggccccgtgttgagatgcggtaggtggtcagcagtgacttcgggggtggctggtgaaggagccttggccagcttgccccggtgcaccctgtcggggaggggccagcacatctgacaggctttaggtcagcggaataactttatccagtctggtgactttgtgatgcggttaagccactggagc

SEQ ID NO: 341646 - DNA, 325 bp, Homo sapiens
  chr12:132247422-132247747
  hypo
cgtaagccactgcacccggccaattttttttttcttatggaaaatctcaaacatgtacgaaaacagaatatcacataatgaccactcacgccccacacacgtgctcatcatctggcttcagctgccggccctgctgctttttattttgatgttataaaatactgctgtcccggtatcagtatctttgtgtgtgccctgtcccctgaggcagttgttgatgaaaagtggttatatttcagagggtctgggctatcacatgcttaactgtctacttcacatcacacgcgggtttggagccataaaatgctaaagcggaaggacctcc

SEQ ID NO: 341647 - DNA, 234 bp, Homo sapiens
  chr12:132249441-132249675
  hypo
cgctggcagtttgttttcgaagaaactgagttggccgtcttagctctaatgcgccacagtggaatgcattaatggcagctcactttgcacttggctggcagccccagggtaaaaggctcagcctgtcttcccagctcaggaaccaaactaggagatgccctcttgtgaggctgcctacccacagaaccattgggcccttgaaggtggtgtgtccccagctggttttccggctgc

SEQ ID NO: 341648 - DNA, 200 bp, Homo sapiens
  chr12:132250682-132250882
  hypo
cgcctcgcagctgctgcccgggaaaagctggcccaggcgtctaaggagtcaaaagagaaacagcttcaagcagaacgtaaaaggaaagcggcgttatttttacagaccctcaaaaatcctctgccggaagcagaagctgggaaaattgaggagagtcctttcagtgtcgaggtatagtaaaatcccacattggtatctgc

SEQ ID NO: 341649 - DNA, 311 bp, Homo sapiens
  chr12:132270193-132270504
  hypo
cgcgggtctcagggtccttggccgcgtgtggattatgtcaccacaggagagggacgagtcctttccaggcacatgaggaggaggaatcagtgttaatgggtggctttgcatctgtgaaatcgcataaacttaagttagctgaagctgtcgtgagactggcatttccaaattggattgaaggtttcaggcttcatgccagcgcaccacagcctgttcctgagtatctgtgctgagaggctgtaagattagtgtgaacaggagaaatttccaggtaggcctctagcttcattaccgttgggtttcttactgcc

SEQ ID NO: 341650 - DNA, 1454 bp, Homo sapiens; identical to SEQ ID NO: 334705
  chr12:132312451-132313905
  hypo

SEQ ID NO: 341651 - DNA, 161 bp, Homo sapiens
  chr12:132329469-132329630
  hypo
cggcccccgcccgctgaagcggtggacaggcacccccgttttaatttgcctttagcagacctctaggcaaggataggggctccacacaaggatgcctgtcccatgccgctcaggtcaggggctctgccgcaggatgccctgtcccgcgctgcccaggcccc

SEQ ID NO: 341652 - DNA, 208 bp, Homo sapiens; identical to SEQ ID NO: 265696
  chr12:132329848-132330056
  hypo

SEQ ID NO: 341653 - DNA, 94 bp, Homo sapiens; identical to SEQ ID NO: 265697
  chr12:132333034-132333128
  hypo

SEQ ID NO: 341654 - DNA, 178 bp, Homo sapiens
  chr12:132333509-132333687
  hypo
tgacgttttggggagcctatgttctgtctcccgcagcggctgcacaatttcatactccctccccggcagcgcccggctctgccgtccccatatcctcccgacacaggtgactttccacgttcttgacagtgggggcgagggggcgtctcattgtggttttgagggcgtttctagtgac

SEQ ID NO: 341655 - DNA, 214 bp, Homo sapiens
  chr12:132377978-132378192
  hypo
gcactaacttttccccggtcctctctcccagagcaatcgctgttggctgtgtcttctgtgagtgagcccccgggctcttttggctgccggcggtgtgactttggacacattctccaacttttctccgccttgatttcctcatctgtaaaacagggacataacagcaagtgcctcgtggaatcattgaatggatgcactaatcgctggaaagtgc

SEQ ID NO: 341656 - DNA, 99 bp, Homo sapiens
  chr12:132411621-132411720
  hypo
cgtggggagagcgagagcgagagggggagggggagggagagcgagagcgagagcgagagcgagagggagagggagagagatttttgtatttttagagac

SEQ ID NO: 341657 - DNA, 463 bp, Homo sapiens
  chr12:132423564-132424027
  hypo
cgtgagccactatgcccggccctccagatgcatttttaacagctgaattcatgtgtgaaatgacgtaaggtccgcgtagtccttctttctcagagaccagcgtgcgaggcccaagggacccaccttccgtcacccgttctgctttgtttacagggtgtgtccgcagccggccaggtggtatccctgaaggtgtggctgattgacgacattctagaaaagatcaacagccaccttccctctcacattcggattctgggtaagccttgcagtgcaggcggccacacacctggttgtagatggtcttgcagagacacgaggctatgcatgctcctgccttttccaactgtctctgatgcagaagcgtagtcagagttgctttgcagctggttctgaccttcagaaacgggagccactagacaggagtagaaagctgttcatttgcagtgcttgttgctacacgggc

SEQ ID NO: 341658 - DNA, 176 bp, Homo sapiens
  chr12:132504709-132504885
  hypo
cgcttcgaggacggccgcccatcgccacgttctctgccaatccggaggcaaaaggtagacttcacgtagttgtctgctctccgccttatggaggtttttgtgggacaagttcatggcactttcttctcgcgcctctggatgcggtaattgtccctgagtgggaacaggcaccaccc

SEQ ID NO: 341659 - DNA, 816 bp, Homo sapiens
  chr12:132536813-132537629
  hypo
cggatttgggaggcttcctcgttctgtggccccctttccgcacagtagtggagtgatccttgtcagaaggagttggctcagggcccatctccgcaaacccccaggactccctactgcccacgctctgagtcgcctggccctggctttcagccccttggtgctccctgagtgtgctggcagccgcgccccagcccttcacttaactgccctcgtgagatgttttcagagcgcactgttgagaattgcagccccgccctgctgttttcctccatagcagccagtacgtcttcagacccactgcacattttacctgtttgtcgtctgatgtgagtgctgtgatcgctgggactctagcgtctgggagcacagacccatcatttgattgatgttgtcgattaaatgaagagttaattcaccctactaatatttatggaccgcgggcctgcgcggcgtggagcctgggcattctcgggggagcgagagaggcacagtcccgccctccctttacctccctggagaggaactcgagggcatcctcacagaaggaacagacagagattttcccaagtacagtgcagacacatgaggtgggctgtgcgtttgggggctgccacaagtacgctggggacgtgttcggagatacttttcctggagagtgggagagctcggcctcaaggaagaggactcagcgccaggctgaggatgaggtctaggtggctcgatctcctgcagggcacattgggcaccttgctttacgccctcatctcttgggctggagctgccccagcacctggcagcatggtgtttctagggtac

SEQ ID NO: 341660 - DNA, 424 bp, Homo sapiens
  chr12:132592879-132593303
  hypo
cggccacagatcgaggtttcaactggacttcaaacaaagcttcagtgcctagggccagatttgttctttccagccctgtgaggcctgaaattgcatcagcgagccaagtgtccccgtgcccctctgttagtggctgaggccgccagctgcatgggatgtgcaggcggtgatcaactttgcaaagcttaaacattattttcccttcttcctcccttccctttgaatattccctctcaggtaaaggttgtggccagaaagcacgggcagcctgggactcctgttgccatagcaacccagctaccgccgaggacttctgcggcttttccagcccagcagcagccgctccaggtactttctgatggctccacagtgcagctccccagactttcctcactcggatttgaggactcgatgtgctgaggca

SEQ ID NO: 341661 - DNA, 280 bp, Homo sapiens
  chr12:132603391-132603671
  hypo
cgccgcacgccgcgcagctcgctgggcagaggcagaggcagaggcagcagcagtacgacccctccacggggcctcccgtgcagaacgcctccagcttgcacacgccgggaggctgccccagccggggtccgcgctgcagcgtctttgcaggtctcccagcagcaggcgacagagccacaagcacagctctcagtccagggaaggacccagcagccaatcgcagcgccgccacctttcctgccaggccggcgctcgccaccaggcaggctgtttagcttgc

SEQ ID NO: 341662 - DNA, 448 bp, Homo sapiens
  chr12:132617118-132617566
  hypo
cgcaacccccaggccttcctggagtgggcgcctggtgttgcctcccacccctgcccggcgcagcccctgggagcaggagccgtggggagggctggactgcagtaaggacgcctcgtgggatgtgccaaaccgctgcgtggagcctgggctgacttctctggatcttggtgcaactggcgtggcccttccaggaagccgggccacctggctcagagacgccagaccctggccggcaatggggctgccaggggcggggacgctggaggagctaggggtgtgggccactgtgctgcctgccccggcctggcggcctctccgtagcagagctgaggctgggacgcaggtgggggagcctggatgcgcctccttcctcagccacgggaggatgaggtccaggagcgcagcggggcccacgggggagcgccttcgggtgcggctcgtcgctgcc

SEQ ID NO: 341663 - DNA, 803 bp, Homo sapiens
  chr12:132643296-132644099
  hypo
cggatctcacgggggctaacgtgtcccccggaaagagatgtccccgtcctggcccccagcatcggcgagtggaccttatttggaaatagggtctttgcagattaaggagccagctgagatcatcctgcattcagggtgggccatcagtccggtggccggtgtcctagtcagaggcgtgaagaggagggcggaggccggaactatccatcggctccgagggtggagcaggggcctctgggagctggaaaaggcaggaatgggtcctccctgagtctctgagggccccgcctgcccacacctgcccatatttgccccaacctgcccacacctgcctcaggacagcatctcggtctcctggctgccagactgtgatgaagatgcatggttctaggccactggcttgtggtgacttgttgcatcagctgtggggagctcacacggtagcgcctgtcttggggggtgctgggcgggtgaccttcaggagacccctggggccccgctgccctcccaatgcctccagtcccagtgtctctgtggtggcatcctgtgctgaggatggtgcctcgcggagcctccactgcccctgtgtgctccgcaccacgtctgtctcgatggcgcccctcgaagacctcgggaagctccccgttcgctgtggccccccggggtctgtcccctgcagcactgttctctgggggctcgtggtccgagttctgatactgcaggtggcaggtcccctgaaggcatagtcagaggctttgctctgggctggcatggaggtatgggcgtggcggggtgtggctggg

SEQ ID NO: 341664 - DNA, 635 bp, Homo sapiens
  chr12:132665953-132666588
  hypo
cgcacagtacacacacccaacacaactcaaaccacacacacactcagtacacacacccaacacaactcacacagcacacacacacacactcggtacacacacccagcacgcacacatagtacacacacccagcacaactcacactcagtacacacacccagcacatgtacccacccagcacacgttcactcgcaccctgcacagcccagcgcgcacacacccagcagacagcacatgctctcacatgctggcatcagccgtcagcctcagctgctggagggtgtggtggaggcgggcggtgagcgctgggtgctggggtccacgtccttccaagcccctgcatagcggccgccttggctggcgatgactggagggggtgaggggtgaggccaccagcacaggtgtgtcccttcactgtttccacctcgtgtgcccgccacgctgtcttcctgccgctggtgaagtctgtctcccccccccccccccccgagtgatggggcgcctccgactgcccggccacggtgcctgcacctccgctcctcctctccctgcaccctccaggcctgggggccccggggctgaccttgaccttcccacccgcccaggtgtggccgggacagcaccgcagttgtggc

SEQ ID NO: 341665 - DNA, 126 bp, Homo sapiens
  chr12:132675105-132675231
  hypo
cggccgccgtggctttcctctgcagcccccggtgcctgctggcgtcgtgcctttccgtgtgctcgttggccacgcacatgtcgaggggccgttctgacgatggactgaggggctcggggatagcac

SEQ ID NO: 341666 - DNA, 200 bp, Homo sapiens; identical to SEQ ID NO: 265738
  chr12:132688064-132688264
  hypo

SEQ ID NO: 341667 - DNA, 806 bp, Homo sapiens
  chr12:132983184-132983990
  hypo
cgccgccctcgacatccccagcacagacgccgccgtcgacgttcccagtgcagacaccgccctcgacgttttcccagccaggacgccgccctcaacattcccagaggggacgccgccctcgacattcccagcaggcgcagctcaggagcaccttgccatctgcagctccctgggggacgagaagaaacagcagccacccctttctcgggcaccttcagctccgccgagaacgcccgacactcagagaccctgctctttgttaaatgggaatgagacatgacacagacgcggggcagcggccactgcagcacgggttgtccactgcccagctctggggccaaaccctcggcgtcgcgcaaaccatacctcccgcgtgacggccgtgtccggcctgctcacctgtgcgaggcagccctgcagagcaggtcaccaggccacaggagcaccagaagagaagccacgtccactgcgagggccatccggtgtcatgtccctgcctccactcagccccaggcccacagctgcagccacgcagccccgcacagcgtcaccgtctccaggatccatcggcagtggggggggccgtctcccacctccctcctcttacctccccccacctccccagggcacgcactccctggctcctgcgcgatgcccagcagggtccaaaatgcacctggatgcccgggagccgtcgtccgccccacaggcagccccaggagccatcgcccgccccaaaggcccccccgggagccgtcacctgccccacaggcccccccaggagccgtcgtgcgctcagtcgggtc

SEQ ID NO: 341668 - DNA, 695 bp, Homo sapiens
  chr12:132986274-132986969
  hypo
cgcagagagccgcggtgccatctccaccctggctttccaggccctggagggcaaaggtcagtcagatggagggagcccggggtccctggcaggagtgtggccaagtcccagcagcgctgccccgagagaggaggacggcgcagctccattgctccacctgcccggctcagggatggaacccagagctgccaccgtcctgtgggtgacggcagaacatctggctgccgggtggcctccgtaaccgccacacacctgcctctgctggaatcacctgaggctctggtgcctcacacggattggccaaaacagggagcggagccgggaaggccacggacatctgtgtggtgtcacgaacaaggtccggccacgtgtgtgggagacgcgggcgccgaggcaggcgccaaactaagcccggccaccaaggggacgcccacaccccacctccgtggtgacccctgaacccccggagctcaccatccacaccagggtgagaggagaggatgggcaaggaaccgtcaaccagaggggatgctcagctgcgtgcacgtggcgggtggtacatgggggctcggggaggcacccagagaggatgcgtgtgtagtgcagaaaatgaggctttggggcccgcacaccgagcccaggacagcacggaggcgggagacactgccaagcccccctcaccctccttgatggac

SEQ ID NO: 341669 - DNA, 136 bp, Homo sapiens
  chr12:133097814-133097950
  hypo
cgaggaggagggagcgcaggctgtggggctggggcaggggtgcgctgtgtccacactcatttccactcagacacggatggcggcagctccgcctctgcatacctgtgctccatttctgcaggggcgtcgcgttccc

SEQ ID NO: 341670 - DNA, 1202 bp, Homo sapiens
  chr12:133100822-133102024
  hypo
ctagcccaccaccctgcccccggctcccgcccagtaaggctcagactcctcggggctgcatccctgcccggccagggcctcctccagtgtgggtgcctgctactgtgcggcttgatggacctcatgggccgggggcatttgacctcaggggcctgggtgacatcccttaattcgcactggcaccgtctgccttgtgtgcaccctgtcagccacccagggaggcctgttgctgcaggaggtgcacagagcgggcctctggctgagccgaaggtcggcagggagccaggctcatggctgcagcgagccacaccagccagtcctgggacgggtttccccgggctggggcgtgctcctgacttggatgactcaaagtaaagaacctcaccaggggccctggcatgcgaggcctgggggcccagatgtgctggggcgtgtcactacaaggtgcagaattgttccagatccaagttggccagagagggagaccgctgggcttccacgtgagtctgggcgctggctgtgcaggggcgtccctgctgggcgctggccagcaggagctctggcctctcacttccctcagctttgtgcaggtttgaaattatttccaagtaaaaaaagtaaatacatgcagggctcggggtctggtccctgcatggtcacttaacctgtctgcgcctctgttttctcatccgtgaaatgtaaaggaaaatagtttctactcggggccaccgtgtgagcaaatgtgtgagtgtgtgcaaagcgcccgggccaggccctggcacgcatcggcgcccatgttggctggtgtcaggggtggtggcggtgggcgtggggcgtgggggtggggtgaagggagtatgggtgctcccttcagcaggtgatgaaactgaggcacggggaggccgagcagtggcccaagggcccatggccagggtcaggcaggtcccaccaccacctcgctgcttgctctggcatggagccgaccgaaggaggtgctgtgggcacagccaggggacagtgggtggcactgaggctcgacctggaggtcatagccctgtacagccagatggggtggtgcgaaccagccagggtgtgggtggaggccctgcctgtggtccctagcacccccaggatgccttcaaagtcagcggcttgtggaaggggcggctccaagcacgtggcggttctcgtgtcactgagcc

SEQ ID NO: 341671 - DNA, 413 bp, Homo sapiens
  chr12:133111693-133112106
  hypo
cgggctgctgtgacacgggggttaggaattaatgttaacactgtttctggttaagactttttgtgttgataaataattcatgaggcagttagcactttgagcctgacaacacgagaatatattaatacggtcggctccaagaaaggtcagccacgtgcttggggccagggggccatcttttattcattccctgacacaggctcattaattattctggcccagccggagctgtgctcggagggacactaatgagaaaaaggagagtggatttgagatccacacgccatccgctgtggggacgtagagggagagatggaaagaaacactggtgaggcctctgaggcgggatggggcctgcagcctggctccctgacagtgctggttgggtgtgaagaggtgagcggagctgatcc

SEQ ID NO: 341672 - DNA, 498 bp, Homo sapiens
  chr12:133121646-133122144
  hypo
cccagcatggggccgtgcggcacggagctcagggcctcgcccagtgtggggcagtgcggcacagagcgggcgtcttctttggagcctgagtcttggcctcctgaccatgcccagcatgtcccttcggggcctggggtctgtcctctgctcccaggcattcctgcctatcacaaacccacaccagggtgacgttccctgagcccccgagcccagccccggcgccgtgaatggtcgcctcactcgggcagcttccgagaggtggatgtgtctctccttttctcctcgccctgattaattgcctcattcaatgccgactccactgcagttaaacattaattcagtaggacttaataacacgaattcattcacgcccctgcctgcgcctggctgacagtgccgtgctatttggttaatgagaggatccatgcagcgtcctctggtgcgcttgctggaaagcacccctcagtgtctccttgctgttggatgcattaaaccctc

SEQ ID NO: 341673 - DNA, 915 bp, Homo sapiens
  chr12:133147764-133148679
  hypo
cgcacgtggcgagcggccaccccggcttggcctgccgaccccgggagtgccaggtgactatccgcctcgccccgccgggagcccgcggccaacgtgcctctctgtctctctctctttttctcttgtagatcacgagctgctcaggcaagagctgaacacgcggtttctggtgcagagcgccgagcggcctggcgcctccctgggcccgggggctctgctgcgggcggagttccatcagcaccagcacacacaccagcacacgcaccaacacacacaccagcaccaacacacattcgcccccttccccgcagggctgcccccgacgccgcccgccgcacccccgccggtgcgtaggcccgcgtgctggcagggggcgggggcgggcgtggggcggggacacgcagcaggcacacacagacacacgctcgcacacacaccagcccaggaggaggtggggggccggcggcacctctctgtcgtctgtccggtccccaacgtgccttctggtgtccccaccccaagctgtgccatgaggcccccaccctcggcagtggtcctggacttaggcaggcaccccgtgcccacgtgcatgggacaccctcacgcctgcactagatccccagtgccagggctggaggcccagacaggcctgagggcacagggaccatgactcagggtgcctcccgtgttccccgccccggaggcccggtctgaggagggagttgctgggggctggagtcccctccactctctcgagttttattcggaaactggccagtttgtcagtaacccggtgtgtccccagcgcgacccagcagccagggcttcacgccccaggcctcagccaggcacacagactgcctgggggggccgagttcccaccccatgcaaggggacccttagaatggcagggcc

SEQ ID NO: 341674 - DNA, 494 bp, Homo sapiens
  chr12:133199822-133200316
  hypo
cgggcatcggcctcaggtcaccccacggcctgcacatgctgtgtggctcacaaatatccagctcatttttggagaaactggctcttctggttgagccgctgcttgggaaccagggccagagcttcccgtttctgacccctccaccactactcaaatgcccgcagctagcctcacagtgaacccaggctgactggcgcccacggctgcaccgggcgacccctggtcctgctaggtggccttcctgggggacgagcggctgtcccctggccccatcactcctcattcctgagggttctccagattcgcttccaggaatgaagcctagtcagccagcctccctcctcccctgcttgccctaatttgatttgatctccactctggaggcctcagcactcctccatctgagcaggcatcaggtttctccaggcaggcggccccagcagcatccaggggccaaacacgtgcccagtggtacccagtccccgatctgaggc

SEQ ID NO: 341675 - DNA, 175 bp, Homo sapiens
  chr12:133280443-133280618
  hypo
cgggaatttagagaaggaagcagagacaactgagaagacagactggccgggaacacggaggatctgggatggaagaggggagagctgggaagccgcgcctctgagtagcgtgggggcagagtcgccatcctaggtgggtgcaggtgtatgcggaagcagcattcattcagcaagc

SEQ ID NO: 341676 - DNA, 479 bp, Homo sapiens; identical to SEQ ID NO: 334707
  chr12:133286733-133287212
  hypo

SEQ ID NO: 341677 - DNA, 1071 bp, Homo sapiens
  chr12:133353501-133354572
  hypo
cgtgagtccagccctgcaagtccagcccccgtgaaccgtcacctcttggtttcccacgggctgtttgctgagctgctcgtccagctgcttctgcaggagctggagctgtgcccgggcctcggccagctctgcttggaactgtgctatctcctgggaatgtttcccctcccgaatcctagcgtaaaaaaacaagaaagaagggaatcgccacgctcctccagtgtgctgtgccctcccgctgggaaatgctgcctgtggaaggcgttcgtcctggcaggccctctgctgtgcactgcgtgctgcagccatgcttggtgcccacagtgtgcactcgggcagtcctcacgaagcacctgagactcacacttcactggcacccctcacagatcccagagactcactttgccggcacccctcacagatcccagagagtgccggccccgagaccacagtgcatgggacccacagagccacagcatcagccccgcgccgggccgccccttcccgcctctgacctgaagctaagtactcctgctggggcgctttctctcttggggggaggacacggggcagtgagtgaggctcaggattctggagacggaggctgggtgccttctactcctatgattcactcaagtactcggcaatttgcaaaatatagatgaccctcgctgtgctgaaggtgtgaattagaccccgcccattgccaggacagccatgtttgagggctggcggggcccaggcactcactgaaggtcgtcggcctcggcctgcagcttctgcaccaggtgttccttggcctgcagctccttcttcacctcactcagctccaaggaggccgccttgaagtggcggcggttatgcccggcttccaccttggcagcagccacctaggaggaaggaagccacgttgtccatgccctgcgtgacacccacagctttatgacgtgccgggcgcagggggtgaatgcactcccggccccgtgcatgtcctggctgccggcgtgtgcttctccacaggcctgtcaagttccttgtaaagatgaaaccacctgacccggagctcggcac

SEQ ID NO: 341678 - DNA, 243 bp, Homo sapiens
  chr12:133393414-133393657
  hypo
cgctggaccaccatggctttaacaacaaggtgacgtcgcttttcagacatgcagctggagtaggagagaagaggatccagactcatgagcacggcactttctcatcccacaaaggcttcactctgagaggagcagcccatgggccccgtcccacaggcggggtggccaggataaggcccacagcccctctggtgtccacgtccttcctgtaaggtgaacctgccctccacacctccacactct

SEQ ID NO: 341679 - DNA, 127 bp, Homo sapiens; identical to SEQ ID NO: 265798
  chr12:133428295-133428422
  hypo

SEQ ID NO: 341680 - DNA, 358 bp, Homo sapiens
  chr12:133435596-133435954
  hypo
cgggacgaagaacctgcagtgccatgttccgtgagccaagggtgaacacggtcgcacctcacgcagtcgtgcagcaggtcctggcagatgatgcatgtcagcgtctcctccatcttgtctggcttcccagccgctgctctgacgtcctcgtggacggtttgggcatttctacgcggttgtgcgaccaacaactgcccgttcaggtcaaggtccccatctacaggagaaagggatgtgttctgtcgtaaccaagaaggaaatacacgcaggttcaggtcaaggtccccgtccacaggagaaagggatgtgttctaactgtcgtaaccgagaaggaaatacatgcagtcttttttttttc

SEQ ID NO: 341681 - DNA, 1187 bp, Homo sapiens; identical to SEQ ID NO: 334708
  chr12:133463691-133464878
  hypo

SEQ ID NO: 341682 - DNA, 258 bp, Homo sapiens; identical to SEQ ID NO: 334709
  chr12:133481383-133481641
  hypo

SEQ ID NO: 341683 - DNA, 1255 bp, Homo sapiens; identical to SEQ ID NO: 334710
  chr12:133484601-133485856
  hypo

SEQ ID NO: 341684 - DNA, 366 bp, Homo sapiens
  chr13:20392340-20392706
  hypo
cggtgggtgatttggggtagatgacattcatgacgccagctcttctggaagtcatagtaaggcaccgaggggtggctcctctccctgcagcggctgtcgcttaccatcctgtagaccgtgacctcctcacacagcgccaggacgaggatcgcggtgagccagcaggtgactgcgatcctggagctggtcgcagcaggccatcctgcacgcggtggaggcgccccctgcaggccgcagcgcatccccagcttctggacgcactgtgagcggttatgcagcagcacgctcatatgagatgccccgcagggtgctatgcaggcccacgtccccacaaagcccatggcaggcgcccgggtgccggagcac

SEQ ID NO: 341685 - DNA, 837 bp, Homo sapiens; identical to SEQ ID NO: 334712
  chr13:20735267-20736104
  hypo

SEQ ID NO: 341686 - DNA, 506 bp, Homo sapiens
  chr13:20979799-20980305
  hypo
cgctccccacgctcctgctgctccccagccttggagagccatgatttctcagattctaaggagagggccctgggactttggtgaagagatgcaggaagaggcttatcctggagggagagggagggagccgcacgggctaggctgactgtgcgagaatggggtgcgcccaggggaaagcgcaggccagtcacggcccccacccagcactggcctgccccgacccgctgggccccgcagacttactctccctcacattcctcccctccctgctgccgggaggcgaacgggctggtgccggcctgtgcttagcaagtcaagtcagaagccagggccgggatcctggaagaggaggaggaggcgtttctagtcctgggcgccatggaggacataggctgggctactgctgcgaccctgactcatttcccacatctttcaaacccttaaaggctcagcagctggtcagtccgcctacaaaggtaacatggggacaaacgaagctgcagaac

SEQ ID NO: 341687 - DNA, 144 bp, Homo sapiens
  chr13:21407292-21407436
  hypo
cgaaaactgagctaatacttctgaacgggcttctttcaataattaaataataaatatataataataaatatttgctgagcatctgtgctagggctcaacaatgcagtgagcaaaagcatggcccatgctttcacggagcttcgc

SEQ ID NO: 341688 - DNA, 775 bp, Homo sapiens; identical to SEQ ID NO: 334717
  chr13:22243231-22244006
  hypo

SEQ ID NO: 341689 - DNA, 535 bp, Homo sapiens; identical to SEQ ID NO: 334718
  chr13:22244074-22244609
  hypo

SEQ ID NO: 341690 - DNA, 1304 bp, Homo sapiens; identical to SEQ ID NO: 334720
  chr13:23733511-23734815
  hypo

SEQ ID NO: 341691 - DNA, 543 bp, Homo sapiens; identical to SEQ ID NO: 334721
  chr13:24040496-24041039
  hypo

SEQ ID NO: 341692 - DNA, 783 bp, Homo sapiens; identical to SEQ ID NO: 334723
  chr13:24734971-24735754
  hypo

SEQ ID NO: 341693 - DNA, 190 bp, Homo sapiens
  chr13:25026495-25026685
  hypo
cgacctccccgtgggtctggactatgtgaccagctctctgagactcacccgataccgcaggcgaataacctggtgtgcgggcggctcctcttcacgagctgtaatgtcaggctctcatcctggaggtgcccatcagacaccaggaggatgttccgtgaccctcgagcagggtacaataagctaagatatc

SEQ ID NO: 341694 - DNA, 1493 bp, Homo sapiens; identical to SEQ ID NO: 334724
  chr13:25320293-25321786
  hypo

SEQ ID NO: 341695 - DNA, 1443 bp, Homo sapiens; identical to SEQ ID NO: 334727
  chr13:25744683-25746126
  hypo

SEQ ID NO: 341696 - DNA, 687 bp, Homo sapiens; identical to SEQ ID NO: 334728
  chr13:25945988-25946675
  hypo

SEQ ID NO: 341697 - DNA, 1606 bp, Homo sapiens; identical to SEQ ID NO: 334729
  chr13:26624757-26626363
  hypo

SEQ ID NO: 341698 - DNA, 40 bp, Homo sapiens
  chr13:28152529-28152569
  hypo
cgagaagccgcaaacagtcgtagtaatcatattctgcgcc

SEQ ID NO: 341699 - DNA, 226 bp, Homo sapiens
  chr13:28239924-28240150
  hypo
cgataaggaaccagcgaagagccaggcccagaaagaagaaaacccgaagaaacacagaagccatccttacaagcacagcttccgcgctcgaggttccgccagttactccccgccacgaaagcggagcagccaggacaagtacgaaaagcggtccaaccggcggtgaggctggaaccagggccagccagccctgcgggcctccgtgctccttcggggtgcggtgtgc

SEQ ID NO: 341700 - DNA, 1058 bp, Homo sapiens; identical to SEQ ID NO: 334740
  chr13:28551935-28552993
  hypo

SEQ ID NO: 341701 - DNA, 1112 bp, Homo sapiens; identical to SEQ ID NO: 334741
  chr13:28674057-28675169
  hypo

SEQ ID NO: 341702 - DNA, 123 bp, Homo sapiens
  chr13:28745545-28745668
  hypo
cggactccagaggttaagagctcagtcacgcaagactgctctccacttcagataccagtgacatgtagcgggtcctcagattatccacacttctatccgacttggctacaaattgggagttcc

SEQ ID NO: 341703 - DNA, 243 bp, Homo sapiens
  chr13:28745848-28746091
  hypo
cggcccacaaactccttgaaccccacagttaagggatttttatggacgcttcatctcgcaggcaagggaaattattaactcagcctgtagcccctctctcctcactggaagatggttgggtagggctgaaagttccaaactggtaatcagggcttggtctttctggtgaacggctcccatctaggtacctaacaaaagtcacctcattagaacaaacgctactcctatcaccctggaaattcc

SEQ ID NO: 341704 - DNA, 2036 bp, Homo sapiens; identical to SEQ ID NO: 334742
  chr13:29067852-29069888
  hypo

SEQ ID NO: 341705 - DNA, 1093 bp, Homo sapiens; identical to SEQ ID NO: 334744
  chr13:29292491-29293584
  hypo

SEQ ID NO: 341706 - DNA, 859 bp, Homo sapiens; identical to SEQ ID NO: 334746
  chr13:29394053-29394912
  hypo

SEQ ID NO: 341707 - DNA, 202 bp, Homo sapiens
  chr13:29913861-29914063
  hypo
cgggcatagtcccagttgggaggagcggtgaggaggggccgggtgcggacccagcgcttcccattgacgtagacgactttgcagccatccttgacctgggagcggagaaggggcctggaccgcaaggcccggtgtttctgggattggggcggcaccctggcccggggcggcactatggtccggggccagcccaggtaccagc

SEQ ID NO: 341708 - DNA, 160 bp, Homo sapiens
  chr13:29933419-29933579
  hypo
cggcagctcgaaatgggtttccgcccaagccggacccgcaggcccgtgaggctgagcggcagctggtgctgcggctgaaggagcggtgtgagcagcagaccagacagctgggcgttgcgcaaggggagctgaagagggccatctgcggctttgatgccct

SEQ ID NO: 341709 - DNA, 199 bp, Homo sapiens
  chr13:30079657-30079856
  hypo
cgctcccgaaacacatggggcggcagctgctgtgcctccttctcaattcttccacccccccacaccatcagaattcggatttctctccacgtggcgtctgcctctgtccccttccaggctggagcgacgtttccacgttcggatgctgcagcctctgcacctgcctcagacagacccaccagataccacctgtctcttc

SEQ ID NO: 341710 - DNA, 417 bp, Homo sapiens
  chr13:30106987-30107404
  hypo
cgaatatgtcggggttttcagccagcacgccgggggcgttcagagtcatgtgtgtccgtgagaactccccgatgggtctgcctatcagctcgtcgaaggtggcgctccaggccctcgctacgcttgaagtacctgccacaaagcacacacaacagaggagatgtgaggacaactgttagccaggtatttgtagtggagctccatgttgataacatcattgcaggagtcaccgacggtgcactggaatctggcagcagcagccagaccacagtgtatgctgagccagaagtgacggtcgactagtgctaagtgcgagaaggcttctagggcctacagaggaatgcacttcacatcctacccaatatacacaggtgtattctatcaaatatatatatccgaataaaaagttcgcaaaac

SEQ ID NO: 341711 - DNA, 229 bp, Homo sapiens
  chr13:30123252-30123481
  hypo
cgtggagcggacgtgctagtgggcactaagagaatagcctctatcagagaggagaatgcaattcaatttacctgaaattcctttcaggtatctggaaacaaatggccaattgcccgcatgctcacctgaatgatcaaagaccaggagaaaaccgtacccgtggaccaggaggaagccagcgaagaacaaggcagcccaggatgcgggaccagtgccattccttcccacc

SEQ ID NO: 341712 - DNA, 826 bp, Homo sapiens
  chr13:30707253-30708079
  hypo
actgggtgggccgtgctgggagaaggtcccggggatcactcctcctaggccgccggggcagtctctccagccaccctctttccccagagccagcgggctggggttcttggtttagactctcttctctcctgtcctggaggaccagccatttgacgcccttgtccactgggaggatgttttccatgattccacttcttcccttcctcggccacctaaggcaggccggcttatgcgtgactgtcaaccgaggcaggccacagcgctgtgggcaggcggttttgcacgtatccttagtgaccctgaaggcccagcctctgctggctgcctgagccgagggttttacttcttttcatttaatcactttattggtccttgccgggagggagcccatgggtcctggtaaaagtgcatctccctgtggttctggggctgatcctccttctggagcagaagacagagctcagtgaggaccgcctgtgctgcctgcctgggacgccccagccgcagggccgcgcaggcgtgtttctttgagagccctcccctggaagctccctttcactccaccctgttgataaggcccaggacaaaaagcaagcaaccgctggaaacacacctgctggaaacacgcctccagtgccagcccaggaggtggtggccctgtcctgacgccccgtctagccaccgggccagagctgggagccccatagtggagtctgtgtccggcaggtgtctctggacagctgaggttcttgtaaccaaagaggttcgtttacctccttagatcacccagggacaagtgatgtgttttgtggcctcggatcgttcc

SEQ ID NO: 341713 - DNA, 52 bp, Homo sapiens
  chr13:30910073-30910125
  hypo
cgttatcatcatggtagttcgactgatgtactaagatatggatgttcaggtc

SEQ ID NO: 341714 - DNA, 242 bp, Homo sapiens
  chr13:31002082-31002324
  hypo
cgttaccacgatgcattctgggaaagaagcagcaccaaatccaagatggcggccagcaggaggctgatgaaggagcttgaagaaatccgcaaatgtggaatggaaaacttccgtaacatccaggttgatgaagctaatttattgacttggcaagggcttattgttcctgacaaccctccgtataataagggggccttcagaatcgaaatcaactttccagcagagtacccattcaaaccacc

SEQ ID NO: 341715 - DNA, 231 bp, Homo sapiens
  chr13:31742932-31743163
  hypo
cgccggctggtgcctcccaactcccaaagctcctttcgcctgggttctggtgtgccatccatgcttacgcatctctctgtgcccagtgccctgcactaagccaggtgtgtagccggccctcacgctgttagctgctgttaaatgccagcactccgccccacccaactctgttgtggctcctccgactgccagcacggctacgtcatcaaacaggtgctcccaatcattccc

SEQ ID NO: 341716 - DNA, 164 bp, Homo sapiens
  chr13:32526656-32526820
  hypo
cgtcctgcgtcccccgattcctgctccctggttgccgcgtccttggctggcgtcagaaaaatggctacaaactttctagtaggtgagaagatctggttccacaagttcaaatatggcgatgcagaaaggagattctacgaacagatgaacgggcctgtggccgg

SEQ ID NO: 341717 - DNA, 237 bp, Homo sapiens
  chr13:32885424-32885661
  hypo
cggagcggctcggaggcggcgtctccaggcacctgcttgctcttcgtctcctgagggcacggggcgtctttctcccccgattcctccagctgcccgggctcctcctgcctgtcagctcctgacctccgtgatggtggctgcggctggctggcctccgcagggcccgggagcgccttgctctccgcttcgtccccatctctccgcaggcggatcaagcccctgcggccggtggcgggc

SEQ ID NO: 341718 - DNA, 116 bp, Homo sapiens
  chr13:32983242-32983358
  hypo
cgccacagtaataaacacatcggagcgcgcatgtcaagtagtccttgagatactgcggtgaattaagagggagatgaaagacaaaactaaagtaaaatgcttccattttcaaaaac

SEQ ID NO: 341719 - DNA, 538 bp, Homo sapiens; identical to SEQ ID NO: 334748
  chr13:33000891-33001429
  hypo

SEQ ID NO: 341720 - DNA, 578 bp, Homo sapiens
  chr13:36788459-36789037
  hypo
cgcgtcctggaaggggcccttcctgctattcgctccccacagttccccgacaatgagagctccccaggccgggctttgagggccgaggggaccaccgacctagggcccgcccgcgaggttataaacgcagctgcctccccttccacagcctcttacctggcccgagatctggcagtgctcctggcagataattgaggaagccatggccgctgcgcacgtgctgggtcctggggcagcctcccagcaggaggagctccacagccgctgcgtcccgggcccgccccctgcactaatggctcctggccgcagctgagggcgagcacgccccaggcgcccttaaagtggccctgtcgccagttctggcgcgtgggggagcagcaggccgctctgaggggtcaacgcggaacccgggtcgggggcctgcccgcgggggctactcaagctgtcctgggggcccttaggagaccgcgtcactagctgactgcgcactccaagtccccttcccagggcagctctcacgacactaagccccgcgtactcactcccactgcgccgcctggggaggcgggaggcaaggc

SEQ ID NO: 341721 - DNA, 1346 bp, Homo sapiens; identical to SEQ ID NO: 334751
  chr13:37005451-37006797
  hypo

SEQ ID NO: 341722 - DNA, 408 bp, Homo sapiens
  chr13:37643604-37644012
  hypo
cggctgcagtggggaggtgcgaggggtggcagcaggaacggctgtgggagcagcagtggcggtggtgggtcccctgtgccccacgtcccggaagcaacctcctgtgctgcccccaaactcatgcagccaggtgggacccgaccctaggcccggagctttcatcactcgggactctggccccacactgctgctctcacccacgcactgctgctgtggggagggcgtggggaggaggcggagctgggcccggggctgtgccacgcttcacgcttcacggaaccagcgggagccaaggacaagcaggagccgccccgcagccccttgggggccgccgctatgaggccaggccaagtcgcccagcccagagggggagtgatggagccacgcgattgggcacagaggagtggg

SEQ ID NO: 341723 - DNA, 347 bp, Homo sapiens
  chr13:37679456-37679803
  hypo
cggggcccaccggcccgcaaggctgaggatgagggctgctggaaatggccaccgaggcgtttcccggtgttacagggcgtggagtcagcctgatccctgcagcacaccaggatttccgccaggccacagtttgcgagggtttctcaaggttccaggctgggccaccacctctttctcggtggcggtcgctgcctcgctgtcgtggcgatgtcgtgggctgagaaagggggcacagcgagttggggcagcagtactgctgccaccgctaccaacggctgtgggccagagggcccggtcacgccgccggcgccgccattttgttcctccacctcagccaaccacaaatc

SEQ ID NO: 341724 - DNA, 199 bp, Homo sapiens; identical to SEQ ID NO: 334756
  chr13:41364049-41364248
  hypo

SEQ ID NO: 341725 - DNA, 91 bp, Homo sapiens
  chr13:41453098-41453189
  hypo
cggcccttcgggggaactcctctaatagctgcagctagcagataggtgttttgccgggcttggcacttgctttctttgcggctctctctac

SEQ ID NO: 341726 - DNA, 741 bp, Homo sapiens; identical to SEQ ID NO: 334757
  chr13:42032017-42032758
  hypo

SEQ ID NO: 341727 - DNA, 148 bp, Homo sapiens
  chr13:43543191-43543339
  hypo
cgccctccctcattccggcagcggctgtgcttgcttacctagccgtctgggcaccaggtgaaccggtttagctctgttctgctccttccacttctccaggttggccagctcctgctccgcaactaagccaggcgagaaatatcaaatc

SEQ ID NO: 341728 - DNA, 588 bp, Homo sapiens; identical to SEQ ID NO: 334758
  chr13:43566054-43566642
  hypo

SEQ ID NO: 341729 - DNA, 86 bp, Homo sapiens
  chr13:43620991-43621077
  hypo
cgtttctgatccagtgaggtgcacattgccgcacctgatcaggctaaaggctcgcctttgttactgcacggctaagtgccctaatc

SEQ ID NO: 341730 - DNA, 284 bp, Homo sapiens; identical to SEQ ID NO: 334760
  chr13:44544261-44544545
  hypo

SEQ ID NO: 341731 - DNA, 64 bp, Homo sapiens
  chr13:44981967-44982031
  hypo
cggctgagtttgaagcattgagagaatatccaaccgcaagtgggtcacagagacctggcgatgc

SEQ ID NO: 341732 - DNA, 165 bp, Homo sapiens
  chr13:45926327-45926492
  hypo
cgaacgcttccttgtgccagggaaggtggagcagtcatgactcaggcttcgggagcctcaggctcgcagctacaggcttatacacactcacatcaaatgctaatggggcccgagtcagaaagaaattagccagactaagaaaaacaagactttggaaatataaac

SEQ ID NO: 341733 - DNA, 83 bp, Homo sapiens
  chr13:45953018-45953101
  hypo
cgtaggacattggcctcatccagggccccagagtttcggttaaaagtccagctgccatcttttctctatctgacgcgttcaac

SEQ ID NO: 341734 - DNA, 131 bp, Homo sapiens
  chr13:46661315-46661446
  hypo
gagcatgaggctgccgccctgccatcacagaagggggcgggacttttacctcctcctggcttctgctggctccgtggagcacacagccccagccgtgcctcccgcatggcagcagccgctctagatgggcc

SEQ ID NO: 341735 - DNA, 72 bp, Homo sapiens
  chr13:46948519-46948591
  hypo
cgtgttttaacacccagaggggtgcgccgttcctaggggtacagcaataccaagttgatgcatggagtggac

SEQ ID NO: 341736 - DNA, 298 bp, Homo sapiens
  chr13:49879457-49879755
  hypo
cgagttcgcactcgctgttaccagctggcgctcatcatcccaccctccctcattgttccccctccaggcccggctccagagctctcccccaccagacacacaggtgttcaggtcacttcctgaataaaggccagccgccttaatgatggcgtcagacccttagctgggcatttaaggctccctcccggccctctcacatccccacatgccccggacaaagcgcacacgcctcgtcattttccagccatgcttcgtgcccacggccctccctgcagcgggaatctctcgctctggtgac

SEQ ID NO: 341737 - DNA, 123 bp, Homo sapiens
  chr13:50027700-50027823
  hypo
tgggattacaggcatgaaccaccatgtcctgctcagttggctcttgtgtccctttgatataccgtcatcagtgtaggtattttttatttgtctttgttttatagcacttcccttttggcactc

SEQ ID NO: 341738 - DNA, 97 bp, Homo sapiens
  chr13:50050867-50050964
  hypo
cgaaacgtggaggaagtttttcgttacctgcttgagacagagtgtaactttttatttacagataacttttctttcaatacctatgttcagttggctc

SEQ ID NO: 341739 - DNA, 141 bp, Homo sapiens
  chr13:52335934-52336075
  hypo
cggtacatggaagctgtcacttgagccatcagaccggctcagcccatgtgaccggagctctgaagaggcacacacgcatgccccgcacaggctgttagcacttgtcgcctcgctgccctggtccagactacccttgcttgc

SEQ ID NO: 341740 - DNA, 89 bp, Homo sapiens
  chr13:52343302-52343391
  hypo
cggccgctgggctgtgcggctgcggcagaggagagggccagccacagcatggtgtccgcgccctgggcctcggagcgcaggcggtcccc

SEQ ID NO: 341741 - DNA, 82 bp, Homo sapiens
  chr13:52493838-52493920
  hypo
cgtctcggctgtgtcccgagcaaacggtgccatggtgacctgcctttgcaggtctcctgctgcgcacctgcgtgagcatgtc

SEQ ID NO: 341742 - DNA, 923 bp, Homo sapiens; identical to SEQ ID NO: 334775
  chr13:53424677-53425600
  hypo

SEQ ID NO: 341743 - DNA, 73 bp, Homo sapiens
  chr13:60267291-60267364
  hypo
cgtgaaggcctccggtggaaggcgcttatgactggaaagtagtgaccaaagagaagagtgactggactgagac

SEQ ID NO: 341744 - DNA, 392 bp, Homo sapiens
  chr13:68343652-68344044
  hypo
cgctgaccgaccagggttgctctcctcgctcggccctgcaggctgcactcgactcgtgccaccaacccagatcctgtgcctgctgtggctctgcactcagcccacgggctggaccaggcgtgccgccagcggcttccaccttgggcacccgcatctagatgagcggaagttggtggtgcctgaaaacagggatgccagcaaccgtgaagcctggggagtcctgagagctgagcccctaagaaatgttatggctgctgtagttcagcgagcagcagggaatggcgcccagtggctttttctctcctactgcttggcgagcgggagggcgtggtacccgcagcttggcgaatgggcgcgtgttacagctttcctgctcccgctgccccacagct

SEQ ID NO: 341745 - DNA, 54 bp, Homo sapiens
  chr13:73324122-73324176
  hypo
cgtcacgtaatagccgctcattaaatatttgtgtaacaaaaacagaacgaatac

SEQ ID NO: 341746 - DNA, 60 bp, Homo sapiens
  chr13:73809567-73809627
  hypo
cgacggtgcggccggtcacaagcatgcgtccctttggcaggcaatcgctcgtctccacga

SEQ ID NO: 341747 - DNA, 216 bp, Homo sapiens
  chr13:74269514-74269730
  hypo
cgtgggatggtgatgcccttttgtgttaacactgtgaaggggattcagccctgctgaattgggtgccgctaagagatccagctcttacgctcagctggacaggtagcattcctcacaccaacatatgcctccggcggtgcagggccaaatgatctgaccgggaaaagctgcgatcacagtccgcgcacttgaatggcttcactcccgtatgtttgc

SEQ ID NO: 341748 - DNA, 1460 bp, Homo sapiens; identical to SEQ ID NO: 334781
  chr13:74707123-74708583
  hypo

SEQ ID NO: 341749 - DNA, 130 bp, Homo sapiens
  chr13:76352659-76352789
  hypo
gcccggccaatcgagtgccttttaacaatgcgcccttaagcagatgtaagcaccgtaaggcatattgagtttttttgaagtcaacacttgaaaatcattggcagtcgttccaggcgtttcacttaacttc

SEQ ID NO: 341750 - DNA, 1089 bp, Homo sapiens; identical to SEQ ID NO: 334783
  chr13:77459256-77460345
  hypo

SEQ ID NO: 341751 - DNA, 145 bp, Homo sapiens
  chr13:77553618-77553763
  hypo
tttttgtctgaagcccggctgggtcgctggagatccagcggagtgtgcggagggaggcgtgttggataccttttaaaaatgagaagccccaggccgggcgcggtgactcacgactgtaagtcgcggcccaaccctttgggaggcc

SEQ ID NO: 341752 - DNA, 792 bp, Homo sapiens; identical to SEQ ID NO: 334784
  chr13:78271862-78272654
  hypo

SEQ ID NO: 341753 - DNA, 1451 bp, Homo sapiens; identical to SEQ ID NO: 334787
  chr13:79169699-79171150
  hypo

SEQ ID NO: 341754 - DNA, 1783 bp, Homo sapiens; identical to SEQ ID NO: 334788
  chr13:79175610-79177393
  hypo

SEQ ID NO: 341755 - DNA, 1589 bp, Homo sapiens; identical to SEQ ID NO: 334790
  chr13:88323381-88324970
  hypo

SEQ ID NO: 341756 - DNA, 807 bp, Homo sapiens; identical to SEQ ID NO: 334793
  chr13:95201113-95201920
  hypo

SEQ ID NO: 341757 - DNA, 829 bp, Homo sapiens; identical to SEQ ID NO: 334797
  chr13:95359971-95360800
  hypo

SEQ ID NO: 341758 - DNA, 2728 bp, Homo sapiens; identical to SEQ ID NO: 334798
  chr13:95362957-95365685
  hypo

SEQ ID NO: 341759 - DNA, 1256 bp, Homo sapiens; identical to SEQ ID NO: 334799
  chr13:95619804-95621060
  hypo

SEQ ID NO: 341760 - DNA, 35 bp, Homo sapiens
  chr13:95775604-95775639
  hypo
cgctctggagtgttttttgtttttttgcgggggac

SEQ ID NO: 341761 - DNA, 99 bp, Homo sapiens
  chr13:95888756-95888855
  hypo
cgggatcaggatatttacagaagacattcccatccctcagatgggtcatgatattaaatcccaacaagcctgtctcggcatgtgaacgcgcgcgtgcgc

SEQ ID NO: 341762 - DNA, 438 bp, Homo sapiens
  chr13:96085837-96086275
  hypo
cgtctacgaaattttaataaatatccgtgtagaaaatcagaacgactctttcaggccatctttaaaatgtcattggtaaaccatacttgatcctaaattcctgtacttcctcaggccatccgagcatgaaacgctgtcacctacccacatccgctggctgtgacgcttgtcaaagtgttctctatcggctgcatgcctagaccaccaaagcgttctgaccggacagtgtcactggagaaggcggcgcgacatgtccagggcgcagatctgggctctggtgtctggtgtcggagggtttggagctctcgttgctgctaccacgtccaatgagtggaaagtgaccacgcgagcctcctcggtgataacagccacttgggtttaccagggtctgtggatgaactgcgcaggtaacgcgttgggttctttccattgccgacc

SEQ ID NO: 341763 - DNA, 124 bp, Homo sapiens
  chr13:96409593-96409717
  hypo
cgtgctttccttcctccgttcttctctgtcctttcacgtgcctacatgtatttgcttcccggtaagtttttgggacccaggtcttctgagtctagatctgttgttcatgctcatggaccatatc

SEQ ID NO: 341764 - DNA, 601 bp, Homo sapiens; identical to SEQ ID NO: 334802
  chr13:96705328-96705929
  hypo

SEQ ID NO: 341765 - DNA, 149 bp, Homo sapiens
  chr13:98829232-98829381
  hypo
cgccgcctcctcgcccctcctgtcgccgtgagccgccttctgccagctgtggaggccccggggcctcggtgccacccgcgggggctgagccactgtgtcgccctcgtccccgctgctgctgctctctccgtgctcggggtcgcaggccg

SEQ ID NO: 341766 - DNA, 617 bp, Homo sapiens
  chr13:98869701-98870318
  hypo
tctacgaccgtcgtcgcaggaaatgatccttgtaactttctcgtgttgctgtcttgtcactgctgtactcgagcttttgtagctcctgagacttaagtagcattcatcctttgcctgaggatcaagtgtgggcttcgtagctcggggagcctgggagagagcaatgagcctccatggaggggccctgtacaccgggaggtgcctgggcaactcccatggctcatctcaaccacagtcctcggcggtttgttttctgcattagcttctcatgccagaacaccctcttatttgtttacctgcttagtgttggcctcttgcaggtagagtggccactccttggagggcaaggcctcttgttcttgttcgtcatcatatcctacgccgcagcggtgcctgtgcatgaaactgactggtgacagttctgctcggtcgtttaactatacgagagttggtgctgtcctagcataacaagggaaagagcaagtgggaagagcttctgagtcccttcctcgtgttttcacagcgtgaaggtggggctgggattggagtccggcccgccagaccctcaacttacccatcttctgggcactaagagccgcctcctttgtgagattcgc

SEQ ID NO: 341767 - DNA, 231 bp, Homo sapiens
  chr13:99034906-99035137
  hypo
tcatttgtggatggcgaaaatttggagtcacctgatgtgcattcccagtggaggtcaaacgaggcaaagctctgccttctgttttttttttctcgtactgttaataagtatccttttcatggtctatttagtgccacgcttttcgcatttttgtgcatgtttttggtgatttcactgtttaaagcagtccccaggcgttgtgctgaagcgctgtctgtcttgtgtccccgc

SEQ ID NO: 341768 - DNA, 409 bp, Homo sapiens
  chr13:99104169-99104578
  hypo
cggcaaccgctacagcaatcgcacagatcagcaacctccaactgcatcatctcggtgagcaagtgcgcaagcagtccagggcgctgacctgggcactcggcagctccaggcctggggacttctccctggagtcttccaaagtgtctcatcacacacacacagccacgagtacacacgcacggccacacatacacagcaggtgccctgtcctctgaagagtcacatttcaaggagtatgcaaaataagcgtgttataaaatttatttgtgtaagcattcagacatttttaggtgggaaagatgatatgcagaatccactacaaggtgcaacagaaaatcgtattggaaaggacggtacatctggcgcagaccagcagtggcacgattccaaacaaatgtcagacgagagc

SEQ ID NO: 341769 - DNA, 82 bp, Homo sapiens
  chr13:99115936-99116018
  hypo
cgacttacgcgtcggaatcctcggagctcgagtcgtcatggctctgctcggccttccatctcttgtacctgtcgatgagctc

SEQ ID NO: 341770 - DNA, 146 bp, Homo sapiens
  chr13:99851657-99851803
  hypo
aacgaacaaaacaagactgtgaaaatgaactttacgaataaagcctaaagaagcaaataaaagtcatacttttgccttctataatcagtgttaacattttggcccactggaacctctctttgagggtagggactgtgttgatctac

SEQ ID NO: 341771 - DNA, 105 bp, Homo sapiens
  chr13:100068654-100068759
  hypo
cggtagacatgaggacgcagggcactgacagctcccggactgtgctgcgcgggctgtggccccacacctgcccaaaggtgagctcctctgcaccccgtgttctgc

SEQ ID NO: 341772 - DNA, 123 bp, Homo sapiens; identical to SEQ ID NO: 266135
  chr13:100575405-100575528
  hypo

SEQ ID NO: 341773 - DNA, 930 bp, Homo sapiens; identical to SEQ ID NO: 334805
  chr13:100620292-100621222
  hypo

SEQ ID NO: 341774 - DNA, 948 bp, Homo sapiens; identical to SEQ ID NO: 334806
  chr13:100621229-100622177
  hypo

SEQ ID NO: 341775 - DNA, 1676 bp, Homo sapiens; identical to SEQ ID NO: 334809
  chr13:100631544-100633220
  hypo

SEQ ID NO: 341776 - DNA, 1393 bp, Homo sapiens; identical to SEQ ID NO: 334810
  chr13:100634132-100635525
  hypo

SEQ ID NO: 341777 - DNA, 219 bp, Homo sapiens
  chr13:101194483-101194702
  hypo
cgggtgcacaggagaagcagagcagccgctgacccccccagcaagaagacgggtagggtttgtttcatgggacaagatcgtccttcatgacgctgtggaaacgttggggagagcacggtttgtgccctaggacgctggccttactcttaacagatccagtccacgaaagtaaatctaaaaagcgtgttccagcctgccacgctgtcatccctcgtgcac

SEQ ID NO: 341778 - DNA, 775 bp, Homo sapiens; identical to SEQ ID NO: 334815
  chr13:102068457-102069232
  hypo

SEQ ID NO: 341779 - DNA, 1339 bp, Homo sapiens; identical to SEQ ID NO: 334816
  chr13:102568657-102569996
  hypo

SEQ ID NO: 341780 - DNA, 789 bp, Homo sapiens; identical to SEQ ID NO: 334817
  chr13:103046539-103047328
  hypo

SEQ ID NO: 341781 - DNA, 617 bp, Homo sapiens
  chr13:106912373-106912990
  hypo
cgtcatcagaagacgcagaaacccacagagagcggaacagcctgcgaagacacagacgtggggaaggcgccctgcggccatggaggcgcagattgcggtgacaggactgcaggtcaggagcgccagtgtcctccaccgaagctcggagagagagcacggcccgcccccgtcagacttctggcctccagaaccgtgacagaattgattgtgttgatgtaagccacccgttttgtggcagttagctacagcaggcacaggaaaatgatacgggtgtgttaaatttgttacgtctactcccccctgagaagccagttttctgctctgaaccggagatccagaaggaccctccagggatgacctcccaactctttgcctagagatcggcaagcacgttgccggaggctctgtccagaacatccgctctgcggctcacttttcatggtcccacctgaggccacgtctgccgaagctgcctccgatgtcgctcacctgccatcgggagagtatgcagccttcccgcctgtgcctccttcatctccggctgctcgcatcccccaggcaccgcctcaaccccgtgagcacctccctaagtgagaggccctcctaaccggcctttc

SEQ ID NO: 341782 - DNA, 2326 bp, Homo sapiens; identical to SEQ ID NO: 334819
  chr13:107186806-107189132
  hypo

SEQ ID NO: 341783 - DNA, 501 bp, Homo sapiens; identical to SEQ ID NO: 334820
  chr13:108518148-108518649
  hypo

SEQ ID NO: 341784 - DNA, 2348 bp, Homo sapiens; identical to SEQ ID NO: 334821
  chr13:108518714-108521062
  hypo

SEQ ID NO: 341785 - DNA, 1154 bp, Homo sapiens; identical to SEQ ID NO: 334822
  chr13:109147714-109148868
  hypo

SEQ ID NO: 341786 - DNA, 181 bp, Homo sapiens
  chr13:110008382-110008563
  hypo
cgggcatgctggcaccatggcggggcacgggagagcgcacgggagggcacggtactagagaagggtttctgctacattacccaggaagcctgcccttcacgcgtgtccctgccattgtgctgctccgaaaccgcacggctctcgaatgttaatgcctacctaattatatattttggcttcc

SEQ ID NO: 341787 - DNA, 1266 bp, Homo sapiens; identical to SEQ ID NO: 334823
  chr13:110434419-110435685
  hypo

SEQ ID NO: 341788 - DNA, 93 bp, Homo sapiens
  chr13:110486578-110486671
  hypo
gtgtcactctgggaggagctcgtggaagccctgtcggcactgaccatagtaccttgactaggagaagtttctcaggtatgaccaggaagaggc

SEQ ID NO: 341789 - DNA, 1966 bp, Homo sapiens; identical to SEQ ID NO: 334824
  chr13:110958728-110960694
  hypo

SEQ ID NO: 341790 - DNA, 199 bp, Homo sapiens
  chr13:111006048-111006247
  hypo
cgggctcttgtaaatgttggaattcctaagactctctctggaggacaggtaagatgtcagtgggaacacacatacacacatgcacgtgcgtgtgtgcacgcacggctggcatgtccatggaaactgccttggcgtggaatgagcagggctgcctctcaatgaggtattccttccctcacaatatagcactggagccatc

SEQ ID NO: 341791 - DNA, 849 bp, Homo sapiens
  chr13:111277855-111278704
  hypo
cggggcccagctccagaggcagggaggccctgtgggctgtgtgtgacaggtttgcagaaggtggaaacgaagggcctctgagcaataacaagacccttcctgcactcggcacatatgtctggtgccaggccctagcctgtgttccatgggtcagcgtggaactgggcaggcaaaaacctgcccccgtggggctcccccagaccgcctatgctatagagcttgctgtgtggaggtgttctctctgccgtccaggattgtggccactgagggcttgaaatgtggctgggaggtgcgggagcagagcgtttgctcttgtttacttttcattgtgtgtgtttgcaccgactggattgggctgtgctgctctggagacaagggagaggaggatgtcaggtggtgaaggaaccgtagagagcggcagcagggagggggctgtgagagtgggcagaggggcagttggggcggcagcacagtgtgatgacgcctgggtcgagcccggcctctccacaccagagaggagccggcgcggagctccaggtgcggtgctgtgatgtgtcgggtgaccaagaggtgcagggctgggccccacagggtgtggggctgctgtcagggctgtggctctggccctgagtaagcagggcagggccagtgtgggtcataaaggctcctacgcggctgtggggctgggccggaggctgtggtaaggacctgtgggagggaagggtgcagtcagatggtgagaggggccggattctgggtatgtttggaaagtttgggggtggaatttgccgacagattggattggaaaaggcaaggggcacagactccaccaagggttttggtctgagc

SEQ ID NO: 341792 - DNA, 257 bp, Homo sapiens
  chr13:111289028-111289285
  hypo
cggtggaggcctcgctcggtgttgccctgtatggttgagctgtggtttaaggtgaactctggagtgtgggctgcaggtgagggctccgtccctgggagctggtgggaggagctggaggctggcgccgccctgctcagagctgcctgcttgggctcgtctgaggcggttccgagctgcaggtgtctccaccaacctgctgtgctacacagcggggtctggggcagcctcaccactgcgtgtcttggtttcctcttctg

SEQ ID NO: 341793 - DNA, 519 bp, Homo sapiens
  chr13:111330283-111330802
  hypo
cggccaccccggtggaagcccctccagccgccagtgggcagcacgccccaggctgtgtctcttcgaaggagccttggcttctcgttcactcctgtttcacccacgtgagggacaggagcaccggcaacgctttcacctcagatgcaccagcgcacagggagagctgggcggccgggaacccacagaggctcatttctcaggaatgtactgtggaccaggtggggttttcccatttttccttattctgtcttacgagaaatactctgcttatcagtaactgagtttcagggttgttttttccaaaaagatactaatcacacagagtgaaaggcgcgtgatcgtgtcaggtaacgcggcttatggacccgagactctgagcaaggtgcccatcaccgtgcggtgaggctgccagtggcgcatgctcaccaaaacctgctgtcccatctgcccaggacaggcacaccccatgtgcacaacgtcccaatatcaccctttccacccgggagcactgacacaggc

SEQ ID NO: 341794 - DNA, 115 bp, Homo sapiens
  chr13:111363843-111363958
  hypo
agccaccgcgtccggccaagtgttatagtcttttgtgcagaccaagtagtggccaataaatcttgtagaaactaaagtactcatttgcttttaactaggccaagactagaatagc

SEQ ID NO: 341795 - DNA, 687 bp, Homo sapiens
  chr13:111880810-111881497
  hypo
cggcgggagcggatgaggcaggctcgatgctgaggactgctaacactgttaagagtctatacgtggtcattctctgtatgtttatgtatatttttaagtttctaaaagtttgggaaaaagtaatggcacaattataacattttcgaacaaagatcgagcgtcttagcagatcatcccttgaacaactcggaggacgtcacctgacaggagggtgcatgtggttcaggaaagcggcaggcagacactgctgagcacgggcagacacacacagacattgactctgtgaactctgagtgcgtgagtaacagccaacaaaccacgcacagagccccagcacagaaggtcggaagaggacgtgggaattccgagtttttcagggccatgtctgctctggtggttgaagccagcggtgatgattaactctggactttgctgggttggtgacacgtcacaaatgaaagcgtaaccactgaaacagagggaagcggctgggtggcttccagtcaagcggaagaggcaagtgaggactcacagaagtgtgttcttctcaaaagaggcagaaattcccagccctgtgatggtggagctgcctcggagtggggagggcattgcacctggctccccggacctggccctcgcccagctgtgcagcgttcctgtgtgtcttggtggactctggttttgctc

SEQ ID NO: 341796 - DNA, 77 bp, Homo sapiens
  chr13:111911450-111911527
  hypo
cgggctctggctcgcagatggcatctctagacctgcccggagccaaggagaactcaccgtcctgaaggaaaggacac

SEQ ID NO: 341797 - DNA, 94 bp, Homo sapiens
  chr13:111978024-111978118
  hypo
gtgcaggaaaataacggtgggtgtggagggaaaatgggacaccggaggaggcgcgggaggactgccgggattcgacggctgggcggtcagatgc

SEQ ID NO: 341798 - DNA, 195 bp, Homo sapiens
  chr13:112022971-112023166
  hypo
cggccaggagaagccgtgcaggctggttcccgagtctctcgggcacgtcgccatcattctccgaggatgttcctgctttgtgacaccacgcaacatcccacgtccttcccagccctggggttctccgtccctgcagggagccctggttcctgtcagtggtgcctcctttatccccaaatttgagacgctggctcc

SEQ ID NO: 341799 - DNA, 216 bp, Homo sapiens
  chr13:112690683-112690899
  hypo
cgtgacggctccgcaccgacgcacccttctcagggcaagatcgacacagagtgctctccagggccacccggagatgcccagactcagaggcctgcctccagccctgcctgcctggacagcaggcctgagagccggacatgcttccgtgtggccgtcacatccccagagttgcacccgcgcaggccgtgtgtgcacgtgttcttgaatcctagggtg

SEQ ID NO: 341800 - DNA, 204 bp, Homo sapiens
  chr13:112691506-112691710
  hypo
cgcgtctccaccagtggccacggcgcgcagcccttcctcaggcccagctccctccgcgtctccaccagtggccacggcgcgcagcccttcctcaggcccagctccctccgcgtctccaccagccctttcttagacgcaactctctcagcgtctccaggtcagctccccttccctgctgctgaggggagacaacggtgcccaccc

SEQ ID NO: 341801 - DNA, 664 bp, Homo sapiens; identical to SEQ ID NO: 334828
  chr13:112722879-112723543
  hypo

SEQ ID NO: 341802 - DNA, 141 bp, Homo sapiens
  chr13:112786406-112786547
  hypo
cgaacccaagcagtgaggagcgggcagggatagagcctggtgcggaggaagccgaggatgggcaggagcagcccacagagcacccggcgaacggaggcatgtgcccagcgtggatgactccaagagcaacagcactccctc

SEQ ID NO: 341803 - DNA, 593 bp, Homo sapiens
  chr13:113098840-113099433
  hypo
cgggggtctgggaccgtgcctcaccacgggatctgtgtacacagcgatgcacccagcgtacgcgggcccttccctctgagccctcggcccctcatctgcaggatgggtgagccctggagaagcgggcagaagcagaggaggcagcgaacgcagagcatgtggcctgtgactgagcctagaaagtccgctcggcaacagaggctgcaatccagaaagccccctcggtgacagaggctacaatctagaaagctcgctcagcgacagaggctaccacctagaaagcctgctcggcgacagacactacaatctagacagcccatttggcgacagtggctacaacccagacagcccgctcagcaacagtgtctatgatctagaaagctccctcggcaacagcagctgtcatctagaaagcccgctcagcgacagaggccacaatctagaaagcctcctcagcgacagcggctgcgacccagaaagccctctcagtgacagtggctatgatcgctcgcaactctggcccctggctctgttggtcaagcctgccacagcccggaagcctctgcagcctccctgttgctgctgaaaaggac

SEQ ID NO: 341804 - DNA, 283 bp, Homo sapiens
  chr13:113107708-113107991
  hypo
cggagccccgcctgacgccgcggtcgcttgacttcacaatcacaggagcgtgacgcctacagcctaatgttgccgtgtagggcacagacttcttaaaaagaatcttcaggggatgtcgccaggtgatggcgggaatcctcagtgagagggtgaggccaccggggctgctgtgtccgcagatgtggtgccacctccgagggcctccaagggtgcatgtgagccacagtcaccaccacagtgcgccgacgaccgccacagaaacagccacggcaccgcgaggacc

SEQ ID NO: 341805 - DNA, 193 bp, Homo sapiens
  chr13:113233687-113233880
  hypo
cgcggggccacggcatccctggggctctcgcacactgctgagtgccagcggggccacggcatccctgcagctctcccacactgctgagtgcccgcggggccacggcatccccggagctctcgcacactgctgagtgtcagggggccacggcatccctggagctctcccacactgctgagtgccggggggccac

SEQ ID NO: 341806 - DNA, 123 bp, Homo sapiens
  chr13:113244578-113244701
  hypo
cgcgcccggtccagccatctttcttaacgtgcatacacgatgtgactcactggagccctgataagattattgatttcttgaggagaacaatgttgtcggaaaccttctccaactgttgctcac

SEQ ID NO: 341807 - DNA, 191 bp, Homo sapiens
  chr13:113255726-113255917
  hypo
cgcccgggcttgagatgagtgtggattcattctctcggtagcgttaacagcgcttcacagttccccgcggctctggccagggctgctgtgaggactggatgaggtaacgagaagtgtgtgctgagacatctgtgttcgcccaggtggcctgtgacatctggaatgtcgggttctgaggtcagatcactctc

SEQ ID NO: 341808 - DNA, 134 bp, Homo sapiens
  chr13:113274734-113274868
  hypo
cggcctgcactcaggactgggtttatcatcaagaacctggcaggctgcctctaaagagagcgtcacctgcttatggggcccatgtacgtctttccactgcagctagacaagtcccgaattcaaatgacgattac

SEQ ID NO: 341809 - DNA, 282 bp, Homo sapiens
  chr13:113291506-113291788
  hypo
cgtgcttctgtcagtcgacggtttttactccagcgagcagcatcacccttaaaaaggtggcagaaacatgggagatgggtgggaggagggcaacagagccaccgtctgctttcatcgcccaagcgcagcggctctgccacctggcagccgaggccatgcaagatttcgcaggaggagcccatggccgcggggaggaggagtgggcgcaggagcccacggaacaggccaggcaggagggaaggaggagtgggagacccaggccattctccttcccactttggc

SEQ ID NO: 341810 - DNA, 926 bp, Homo sapiens
  chr13:113350364-113351290
  hypo
cgtctcggctgacggctgcgtggccttggcaagttggttgccccctgtacgcttggtgccccatctgcaaggtggggactatgatggtgcccacctggtgggtctgtgcagtgacgggacaggtcacggcgctcgtgcacgctgggtgcccagtgcacggggcgtctttgttgcgcgcatggacctgcggctgcatcaccgtccatgcttctgggcttcttaaggagaccgcctctcaccttgggctttccggaaccttctccccgcactcctcttcacgtggagagtgggtgaccttgccctgctctcccggggagagcggtggtcactggtgggaacgcccctgccacgcccagcagcctttctgcctctgcgcttgcctcctccggttggagcgagtgacccgttctgccgaagtccagtcccgtgtgtgctgcggccccgtctctctccctctctgagtgacactgtctgccctgctgcttgccgtcccgctgttggcaccgctttagaccccatatttcccagcggtcaccgtgctcatttttggcttccagctaccgtttttcttaggttaccccgcgtagctggcccgtccttccttctcctgtctcttctgtgcctaccgcggggggttcccttaccaaggtctccatcacccccaggcccacctccctcgggcccctctctgcccttgccctccacctcagcgactccgtggggcttttgtgatcccagctgcagttagcgagcgcccctgtgtgctcagagacacgccagtgagccgggaaggacagagacccaagtcccatccctctggggcccccttggaatgggggaggcgaacaggaaaccaccacagtgagtgttggggtgccccgcaggcgacggtgctgagaaaaagagagtggggttgggggcagtgc

SEQ ID NO: 341811 - DNA, 137 bp, Homo sapiens
  chr13:113369414-113369551
  hypo
cgccgttcctttgcatggatataccacgttttgctcacacattcacctgttgaaggacacttgggttgtttcctgcggcagcttttcctgaccgaaagcttctcaaaaggactagccccctcaggtgccccaaactc

SEQ ID NO: 341812 - DNA, 251 bp, Homo sapiens
  chr13:113379254-113379505
  hypo
cggccatgcctgtggtcccctgtgtgggctgggctgtggccttggacctggtccccacgtcattttcttctcccttggggtggattgtctgtgggcccggtgtgggaccaacagctgatggccgacgcctcttgccgtaggttgccggccatgcatacctgggggaagacttgaactccatccctctgtcaaccctgttctgagtcacaagagacactgcaaaccccccttgtgggagctgactcaggctc

SEQ ID NO: 341813 - DNA, 315 bp, Homo sapiens
  chr13:113383516-113383831
  hypo
cgtctggttggcggtcagctcatttatgattgagcctgaccttatgacaggccacctcgttaacgattggatgttgtttttatcactctttactacgtttgctttcccacccctgctgtttccatgggtttatccgactctgcccactgaggcagcacagtcccctcgccttagcattgcgggcccagagtatctaacgcgtccgagtgcgaacagtgtcagaaggcactgaggcagcgcggttcccacctcggcattgcaggcccagagtatctaacgcgtctgcgtgtgaacagtgtcggaaggcactgaggc

SEQ ID NO: 341814 - DNA, 667 bp, Homo sapiens
  chr13:113400167-113400834
  hypo
cgtgcagcggaactccagaaattctccgtcttgcaaaactcagcctctgggccgttaaactaggtgtccccacctcccctcccccaggccctggtgaccaccgttctgctttctctgtctgtgattttgaccactttagatacgtcatttcagtggactcatcctgtgtcgttttgtggcggaatcacgttctgttgtgtgtatacaccacgtttttcttgtccgttcacctgtgatggactcttgggcgtctgccgtaggccgctgtgaatgctggcggcggtgatcgtgtgctgacgtctcctccacgtactgagttcgtgtcttttggatgcgcgcccagaggtggcactgctggatcctgtgctgggtcatacctatgtttaattctctgaggaacctccgtgctgtctccatagcagccgtgtcgtttcacacttgcaccaacagtgcacagggctccggttccccacgtcctcaccgggtaactggggttccggctccccacgtcctccccgggtaactggggttccggttccccacgtcctcaccgggtaactggggttccggctccccgcgtcctccccgggtaactggggctctggttccccacgtcctcaccggcacttggcactgtctagtgttttggtagcagccatcctgctcc

SEQ ID NO: 341815 - DNA, 91 bp, Homo sapiens
  chr13:113413685-113413776
  hypo
cggagacttctgaccgtcatgacggtgggggttgctcccaagaccctgctctgaagacttcctaacctgcgtgctctttcaacaatagcgc

SEQ ID NO: 341816 - DNA, 253 bp, Homo sapiens
  chr13:113424750-113425003
  hypo
cgttaccatgagtgtgacgagagtggggagaaccagtggagcttctgatcctgtcccagcagatgccagtggctcggaccaaggaggacagagggatgggcgtgcccacgtgaagcctcaccccagaccccagaccctgcttacatgccgggacgaaggtgggagagaaccgtgcatctcagcacggcggtggaaacgtggtccacctgcggagggcctgtttgcgtttattacacccgagcaaggcccgcac

SEQ ID NO: 341817 - DNA, 183 bp, Homo sapiens
  chr13:113461159-113461342
  hypo
cgtagagtcgcctattctaaacatttcgtactcacggctcataggcggtgttttgtgactggctctttcactcagcatgatgttttcaaggtttctctgcatctgagcaggcgtcagcgcttcattccgtctgatgaatgagtcacggtcccctgcacatacctggcattttgtgtatcacgc

SEQ ID NO: 341818 - DNA, 306 bp, Homo sapiens
  chr13:113477621-113477927
  hypo
cgtgtccgcatcatttctgatcatcgtatctttacaggcccttaggatcggaaaacctgctgcttagaggagctacactgaagaacactgagaaaatctttggtaaatatttaattaattattaaccattgcccctaacattaaggatgcatgaagcaaaagttaaaacccgcagcggaacccgagagcgtttcttggcaccttgaggtgctggaggctttctggccgcgcaagttctgccccactgagatttgatcagtgaataagtgcaatcctgaagcagcagcatcagagaatacggcttac

SEQ ID NO: 341819 - DNA, 535 bp, Homo sapiens
  chr13:113497181-113497716
  hypo
cgcccagcagcccgcacacctgagcctcccactccgtgggtccggctttctgtctttggggctgctgcggtagggggccggcctgagtgtctctcacagcagggcctcccctccccgtcagacgcgctaaagccgggcaacacgtggctggggtggacacgctccctcctgtcagacaccttaactccgggtgatgcgtggctgggtggacatgctccctcctgtgagaggtcctaacgccgagcgacgcatggttgggtggacgtgctctctcccgtcagatgtcctaacgccgagtgacgcacggctgagtgcacatgctccctcctgtgagatgccctaaagctacactgtgcgtggctggggtggacgcactccctcctgtcagacgtcctaaagctgggtgacgcatggccgggtgggcgcgttccctcccatcagatgccctaacgttgggtgatgcgtggctgggtggacgcgctccctctgctccccacgtggctgctttgtcccacggtgtctgcacccttctccc

SEQ ID NO: 341820 - DNA, 162 bp, Homo sapiens
  chr13:113507123-113507285
  hypo
cgtgatgatacttgcttataaattatttccttataatctccagtcagcaagtgcgaaacatctctgagcctcagcttccttttgaatcgaattgtagggccaggcccggtggagcacgcttgtaaacagggccaggcccggtggagcacgcttgtaatcctc

SEQ ID NO: 341821 - DNA, 145 bp, Homo sapiens
  chr13:113508785-113508930
  hypo
gagctgagcaagacggtcctgcgccacagcgggagcctgaccagagacaacctgtccgggtaggcagcgcgtccccgcccccacccccacactcccgcaaaaggggcttcagacccagtggccttcacctgcaagtcggggagcc

SEQ ID NO: 341822 - DNA, 258 bp, Homo sapiens
  chr13:113554079-113554337
  hypo
cggagggatcgctgcatcccttcctccaccatgtcagtgtgacgggccgcgcgtgccatctgcagccttcactgggtaaaagtgaaggtccctcacctggatcttttccaccgtatcttgagatcaagtggttaggaatgcttgcagggtcttgcctcatagtggagagaaacagcggaacagccccttgggttggtttctggatggggaggatgtagccctcatgcctggtgtctacagagtccagcttggggacgc

SEQ ID NO: 341823 - DNA, 190 bp, Homo sapiens
  chr13:113598680-113598870
  hypo
gtgctctggtgtctcggggcagcacagacgttgttactgctccatctggcctgggtgaacacctgggtctctctgtggagttgggggatgccgcctgctcaagggtcgcgttcctagtatgcgttccaggaatgctatgcaccaccagtgctaagccgcagaagagctgtcaatctgtcagtcctgtccc

SEQ ID NO: 341824 - DNA, 319 bp, Homo sapiens
  chr13:113627865-113628184
  hypo
cgccacggctcagtgcttcccaagagctcctgagaacgcagcgctcaggcctcccagctgggtgagtctgacgccctccatgcgaagacggcgcgagcacggcttcacctgtggaaccaggggcagacttatgagctcccgggggtttcagttccggcctgctctgaggacactggggggccggccctgtgtttgcttggagcgcccttcagggagacccgtggctccaggggctggcgctgagtgaccacaggcaaggtctcaggagtgagtgatgccaggcagcacctgagaaggggatgcctgcgaggtgtgttcc

SEQ ID NO: 341825 - DNA, 778 bp, Homo sapiens
  chr13:113648343-113649121
  hypo
cgaccctccgccttcgtctttttcctgattaaaaaaaagcaccttcatgcggggtgcggcgcttgggaccccccaagctgacgtcactgtctgtgccggtgtctcgggcaggggcaggtgtggatgccaagctgacgtcactgtgccagtgtctcgggcaggggcgtggctgccaacggggcacggtgcgtgggatgccaagctgacatcactatgcaggtgtctcgggcaggggctggcgtggctgtcggcgtgacggggcgcggcgcgtgggacgccaagctgacgtcactgtctgtgccggtgtctcgggcgggggccagtgtggctgccaatggggcaaggtgcgtgggacgtcaagctgacgtcactgtctgtgccagtgtctcgggcaggggctggcagggctgcccaggaggctgtcggtggggcagttcctcatgaatctctgagctgagtttgtaaaagtgtgtgagagtggggaaaatatgggtgaaaatattttcagacatttggattcccctttggtgagctgtctcgtttcttcccgctggtcagggatgtggctgcttgaacagctgggcgcggtgaccaatgtgtggagagccgggaagcctgcggtgaggccgcgcgatgtccttcatcccgggcagtaaatccagccccgagggtggggcatcctcccgggcacaggctctcctgcctggggtcgccgctgcgggcaggacatatgggcctcccaagcggtcccatctacacaggtcgggtagagtgagtc

SEQ ID NO: 341826 - DNA, 287 bp, Homo sapiens
  chr13:113667315-113667602
  hypo
ggacggtgcccccacggtctgtgaggcaggcaggggattgaggacagtgcctcctggtttcctctcaggtcacagtcgctcctggtgagagagaaaaacttaccgtaaaatctgaacatccaactgcgcagtctaggctgccgtcggctgcaccagacacacattccagagaggtgtgcaccagtggaagtcaccttgccaggagcatgagatagtatttcatgctttactgattgactgtttctgtctttctcccacaaaagaagccatcgccgagacgtggttgc

SEQ ID NO: 341827 - DNA, 241 bp, Homo sapiens
  chr13:113796043-113796284
  hypo
cgaaggcggggcctaggcgtcacagctgcaccttgcacagcaaccccactcccactcatagctggcccgacccgcagcgttggcctcacccgggggcatattcgaagggcagagttccaggcccgccttttcaagagcctggtgacccagctcaccttccggcttcaggtgcggctcagcccccagaccgtgttctgcccccggctaccatgactgtcccctccagacacaggttactccc

SEQ ID NO: 341828 - DNA, 319 bp, Homo sapiens
  chr13:113797753-113798072
  hypo
cgcacacgcccagcacttgggttctcctgttggcatcctccggccagatgcattcatcccatttcgcccggcccgtttgtctctgtccatccgtcaagctttcttgacttcttggtgcattttcaggcaaaccgcagacgccaacactcccctcgctgcctgggttgctgcctggcgtccattgttcacaggcggtcacctgaggggaggccaacgctcggacagctgcgctcacctgcagatccgacccctgccgacgacgtggggcctcgccctgcaagcccgctgcccctccgggtgcccctgcgctctgcctccc

SEQ ID NO: 341829 - DNA, 323 bp, Homo sapiens
  chr13:113825842-113826165
  hypo
cgtttgagcattatgtccccttgaaaatcagactgtaaagaactgacgattgttcatgatttcagattttaacagaacgagccaagacccgctgatgatcaagataacgcacgtccatgtgcacatgcggtatgacgcggacgcgggggagaatgacctgtcactgctggagctggagtggcccatccagtgcccaggtgcggggctccccgtgtgcacccctgagaaagacttcgctgagcacctcctcatcccacgcaccaggggcctcctcagcggctgggcacgcaatggcactgacctgggcaactcgctgaccacgc

SEQ ID NO: 341830 - DNA, 93 bp, Homo sapiens
  chr13:113887577-113887670
  hypo
cgagcgcgagaggagcggcgaggccgtggaccggagcctgttgcggagcctcctgggcatgctgtctgacctgcaggtgagtgctgcctgtgc

SEQ ID NO: 341831 - DNA, 187 bp, Homo sapiens
  chr13:113984308-113984495
  hypo
cgggtgcgtgcatgggagcccaggtgcgtacatggaaacccaggtgcctgcatggaaacccgggtgcgtgcatggaaacccgggtgcgtgcatggaaacccgggtgtgtgcatggaaacccgggtgtgtgcatggaaacccaggagtgtgcatggaaactcaggtgcgtgcatgggagcccaggtgc

SEQ ID NO: 341832 - DNA, 78 bp, Homo sapiens
  chr13:113985425-113985503
  hypo
cgggtgtgtgcacgaaagcctaggtgtgtgcatgggaacccgggtgtgtgcatggaaaccggtcgcagctctcctgtg

SEQ ID NO: 341833 - DNA, 206 bp, Homo sapiens
  chr13:113985703-113985909
  hypo
gataccaggaggcacgggctgcagcatgggaggcggcccaggaggagatgccaagaaggcacagcaaggacagccagtgcaggagccacccgggtgcccacccagcagctgcgcacccccactgcccgagccagcctctctgcatctcttttcctgagaagacttcggcgtggcacagcccttacagggcgtgagccttctcagac

SEQ ID NO: 341834 - DNA, 685 bp, Homo sapiens; identical to SEQ ID NO: 334832
  chr13:114017783-114018468
  hypo

SEQ ID NO: 341835 - DNA, 847 bp, Homo sapiens
  chr13:114055661-114056508
  hypo
cgtgtgcttcgtgagagaggggaccctgtcctcctagcaggggtccagcggcaccacagcaagacttctgtggccaagtacacgccatgctcagctctgcccccacccgcacccccggaccatcctgtgtgcagctgggctgccccgggacccacacgcgcgaggggcacccggtgctcaggagcctccacacacagcagctcgcacttagaacccacacgccaagcagaaacccctcgaagcgggctgggagcacggacccctgatttatagaggaggccccgggggccctgtcgggggagctgtggggaccggccccccagagctcagcacagcccggccctccttccagacaccagcactcgcatgtcccagcaggtgagggtgggtcaaacctgctggatctgaagttaattgttcgactggaaggaaacctgtgcgctccccggagcatgacgccacgccgcctccttggcgctgcagagccaaagccactggcgtctgccgggatggaccttccctggaaggagagacctcagccccgcgtgggtaggacgcgcctgctgaacgccctctcagggccgacactggaaaacaccttcctctaaaggaacatccgagtcagaaaacaggtgctcgcagcaggcaccaaagcgcctttgcgaacgcttagggctgtttcaggaaaccgctcagtagcaaaggcagaagatgccaagacaccttcaaaaagcaggaattaactttccacagggagggcaccaccaaaaacaagggtgcggggctgtagggcgacaggctgcatcggttcacgctgaaaatccagctgctccggggccactcaggc

SEQ ID NO: 341836 - DNA, 38 bp, Homo sapiens
  chr13:114056538-114056576
  hypo
gaggccaccgagtggcctgggacgatggatcgcgacac

SEQ ID NO: 341837 - DNA, 480 bp, Homo sapiens
  chr13:114059960-114060440
  hypo
cgggtggcgggcgagggtcgcaatgtcctctgggtgctggacgagggccacgcctctcaggaggctcctccctgctgctccactcttgggctccaaggatcccccaggggccaggaggccgtggctgtgagggtctcgagggagagcctctcctctggggtggctttcggacaaggctctgcttccccactggcccagcgtctctggctctcccgctgtgcggtctccagggctctgggtgctgcctggcgctggtgcaggcgtggcgcggctcgcaacgctccctgcagctgccatcgccccacaggctttcatacctggtttgggtggttcatttaatgaggacagtgggttctcgcgaacatcatggctggtgatttcctcggcagccttcaggggctgagaagactctattagcagcggccttctgcattcctccagcgcaccgggcactgtcatgcccatcggggtgacaccctc

SEQ ID NO: 341838 - DNA, 695 bp, Homo sapiens
  chr13:114074589-114075284
  hypo
cgatgcttgtggattttgtgtttgtgtgttttaatctataatcagtttgtaaatagactcactttctgattctcacggaggggtttgatttgcggatggagaccgagtccaccctgtttgaatgcagccgcgccctgctcatgcgagctggccttctcttccatacagcagggtggagagggaagcccactttccggtaagcgggcaaaacaggtactacgaccgtgttacttatgctagcaacagttccgacttaccttaattgggtttcttttcctgaaaggtaattctcagttaatttccccacacccacgggtgctgggaccacactccatggacgtgtgtgacgtgaggcccttcgcccccgtgtgcctgtctctctggttcttctgacttaaagcaccagtagcagcacagttagtccagttattcggaagctcagcacggagccacattgctgcagcatagaaggccacggattcctccatcagcatggactacacttcccacaaaacgaacggggcatctctatggaaaaagcaaagcgtgtccctatccctgggacacctctacccctgggacacacctagccccaggacccgcccacccccgggacccgctcaccccgggacaccactacccctgggacatgcccacccctgggacaaccctaccccccccgacacgccctggga

SEQ ID NO: 341839 - DNA, 758 bp, Homo sapiens
  chr13:114107410-114108168
  hypo
cggtatcaggtaacaccatccgctgaaggaccgcactgccttcaaagctctcggaggcttactgggagaactcgagcagccagtgttccctccagcccgcacaccggagcgcggtgggcccagcctacctgtggtgagggcctcggcggttgcgatgtgcatgatggtgttgtcactcacgggccattctcctggcgagagtacgaggtggtccaggcccccggaacgttgcagctcctcctggatcttcatgcctacagtgctgttctccttgcagacatttctgtagccaagagcatcgccgacgctccccagcaacatcgcagccttaaatttctccatcccaggaggcagctcctcttccccaacagctgcggagcgtcctggcctttgtctcctcctcagcccgcctgacttttatagtggtcactgtgtcactgtcaggagcgtcctctgatggccaggcgctccttgtctatctctgcaggtggcaccaatgagaggacctttctgtcccccacgtgggaggtgtcagttttcttctgcgtctggacaggcaccagctcctcagcagaggagcctgctagcttctgccggcagccgcagcacattcagagcgttgacagagcaggggctcctctcgctgtccctggaaggagtgcgcacacttccccgtgtgtggcgtggggtgatgcgggagcagatgtgtgcaggcgtgcctgtcactgccgcccgctgcggggcgtgccctcacccct

SEQ ID NO: 341840 - DNA, 552 bp, Homo sapiens
  chr13:114122902-114123454
  hypo
cgcgagacgtgccacgctccatcaacctctccttcagacaagcggcctatgaggacgcagcactaaagggggcgggggagggccctggacaggcggggcggaggcagcacagtgtgtaaccttccctgaatctgcgcataaaagcagatgcagcaattagaaagcaaagccaaacacccagaggcaacatttaccataaatttaggtgagaaagtatcaccacaaacccaagttgtaagctaggggatgagccactgccagcaacaggacccgtgtgttgccgtcatgccggggacgtggggggcacagggcctctgacagatgtgagaacaggagggcctcagaggtgcctacacgccgggaccaggtaaggacgagcctgaagtaggctgtggctgagggcagaggccaccaacagggaagtgcctgggagcagaacaggctgggcgggaaagggacaatggagatggaaaagagagaaaagctgaggaggggggaggagcagtgccagacaatctcagacagcaaagccgacatttctgtctactacac

SEQ ID NO: 341841 - DNA, 110 bp, Homo sapiens
  chr13:114188365-114188475
  hypo
cgtggaagttctccgaatcctggttttgattggtcagattcttttttcactagcggcggtttttcttttatgtcttgttataaagaagtatctcattggaccctattatc

SEQ ID NO: 341842 - DNA, 729 bp, Homo sapiens
  chr13:114189691-114190420
  hypo
cgcacctgggcaccgtcaccattgtcccaacagtgcacctgtgcaccgtcactgttcagcccggcaggtgctcttcctgctgtttatcccagagaaatgaagccgtgttcacacagtagcctgtacacaggtgtttatagcagctttattcgtattagccataaacagtccaaaggtacttcagtgggtaaataaatgttcaacaaactgagctatgtccataccacggaacgccacccagcagtaaaaccaccggcacacacctccgagaactgcgcagagtgggcaggcagcccccaaaggctgcgtactgtgtggttctttttatgtcacatttatgaggcgagaagattctgaagttgaggaaaggctcgtggttcccaggaattgaggatgggcagtctggggaggggctggggatggcactcgctgtcttcgctgtgtctgtatcggcacctgagtgggggtctggggaggggatggggatggcattcgctgtgtttgctgtgtctatatcggcacctgagtcggggtctggggagggactggggatggatggcactcgctgtctttgctgtgtccgtatcagcacctgagtgggatcttgtgctgtaatttggcaagatgttaccattggggaaactaaagggtaatgaggactttgtattactcttaaaactgcaggttaatatataattatctcaaaataaaaagtttccggctgggcgc

SEQ ID NO: 341843 - DNA, 187 bp, Homo sapiens
  chr13:114193080-114193267
  hypo
cggtgtcagccgtgcgtcatccggaaggctgccataagcctgcgtttcgcagagctgcgctgaggctcccgtgtcgcggccgtccggccggcgcgctgatgtggctgcaaacctgggtatcagatcagccgccgtggacacgccgatgcttctcgctggcttcgtgccctcccggggctgttgcttg

SEQ ID NO: 341844 - DNA, 223 bp, Homo sapiens
  chr13:114271765-114271988
  hypo
ctcacctgcagaaccgttcacctgcagagcccttcacctgcagaaccgttcacctgcagagcccttcacctgcagaaccattcacctgcagagccgctcacctgcagaacccttcacctgcagagccgctcacctgcagagcccttcacctgcagaacccttcacctgcagagccgctcacctgcagagccgctcacctgcagagccgctcacctgcagagcc

SEQ ID NO: 341845 - DNA, 930 bp, Homo sapiens
  chr13:114283925-114284855
  hypo
actgggctaacatgcgtgatctgagcacgtgtaaggtaggctggctaagctgtgatgtgtggtaggagaggtggatgacgtgcatttcgacttagggtattttcagctcatgcgggtttatcgggatgttccttgtaagttcctcgttgtaagtcagttcctcgttgtaagtccactctttgtgagtaggtttgctcctgcctggaggacagcggcacggtgacggcatctgttttggggccaagatccagtgccttgcgtggtcctgggattcctggggaagggagtggacccatgaggtgggttagaatcgtgtgtgggattctccagccccctgtacctgtgcgtgtggtatgcgcggagccagccagcactgcctggcgtggagctggcgggttctcagtctgacatcaactcccggagaatggcatctgctgaactcaacgtaggaagccgtgcggggccagcgcgctctcaggcagcctgagtggcagggtccttttgtcagctgtttggatctcccacgtggcccagtgccccagcagcacacacacacacacacacacacacacgcgtattgaacaaaacaagtttcacaggacatttatccacgcccaggagatttatcttttgtatggcttcattttgcagaaaattcacttgtttgatttcatggcctggtgatccacagaaggccgcactctgatgagtctctgatcatcggagagatgagtgtcaatgaaaagatcagtccttgaaatgtttttcttctccggagctgacaggtgatctggcctagggataattggaaagtgtccccgtcagctgctcccagggccaccgcaggtgatgcatttatccccgtaagaaggggagctgggggggcccagcttagagtagctcagggcatcggccacatgaagccccccc

SEQ ID NO: 341846 - DNA, 677 bp, Homo sapiens
  chr13:114293940-114294617
  hypo
cgtagtgagctctggttggtggtaggtttttgtggtgctgccagccctctgggttctcagtccccgctgccagattcgacccacgctctggactccatcctgtcctgccccgggctctcttttttcctgttgctggttatgagtgaaagtcccggagggagggatctaatggttttacagtttgttccctctggggcactgctcctgatggaatgatgagtgagggagaggcagcgtgtggctctgctcagcctcctgtttctgtcgttatgggttccaggagacagggccagaagagaaccagacagagatggagtaagtgccagagcgttggcgtgctgtagtgcagacactcagcctccccgttctgtttgtgtgactgacaaaacccacacctgtggggcacagcctgtcatttgaccacaagccctgaggcggggggaggctgggtgggccgcctgcactgacggcgccatccgcctcctgccttgcagtgacctgaccaacggtgcagatgggatgctggccacaagctccaatgggtctcagtacagcggctccagggtggagactccggtgtcctacgtcggggaggacgacgaggaggacgatgacttcaacgagaatgacgaggacgactgacgtcctccccacttcagattcggcttcaggaaaac

SEQ ID NO: 341847 - DNA, 39 bp, Homo sapiens
  chr13:114294965-114295004
  hypo
cgcttatttgccgtgagtttggacggcacccctgctggc

SEQ ID NO: 341848 - DNA, 131 bp, Homo sapiens
  chr13:114295766-114295897
  hypo
cgcgcatgggcattttaaacaagctgtgtttctctaattcaggattattatctagaaatttgtctgtcttgttggttttactttatacttgagtgagaaagtaggttgttaggcccagacgcggtgggccc

SEQ ID NO: 341849 - DNA, 221 bp, Homo sapiens
  chr13:114300515-114300736
  hypo
cgaggatgtggagaaggcagagccctgtacacggtggggatgtaaagagccgcagccactatgaaaaaccaaatggctgtttttcacagaattaaaaacagaattaccctatgcccggcaattctgctcagcgtatacacccagagacatttgtacacccatgtctacacgtaccactattcagggtagctaaacagtggaggcacccgaagtgtccatcc

SEQ ID NO: 341850 - DNA, 252 bp, Homo sapiens
  chr13:114302306-114302558
  hypo
ggtgtcgcacccgccggccaccgccaccctgcgtcttagacgtcccgccgcagctgtgtttccacctcatctccagcttgagtggcagccagcggcgccacctgcacacgagccccctccattcgagaagcacagactatgagtgtggccacgcgtcccatgacgtgaactcacgtctgcgccgagacctttgccggcggttttttactgacggagtaagcactggagatgcttggtacagcgtcttccatc

SEQ ID NO: 341851 - DNA, 115 bp, Homo sapiens
  chr13:114302660-114302775
  hypo
cggacttcgacgcgccagtcgcttgtgcttggggccctttgggtactaacagccacactgctgagcatgtgaaatcaggacccaggctgcacaccgccgtcggggtgagacgccc

SEQ ID NO: 341852 - DNA, 283 bp, Homo sapiens
  chr13:114303512-114303795
  hypo
cgcgagcaggtccttcagatgtgggcgcttctctggagttcgcacactgacaacaccgttgctccaaaccactttggggatgatttggcagggaactgacgggcaaggtaagcccaaccaggagggtgtccttgagcgaccccgcaggcgtgcccaggacccctgcgcaaaccgtttcacttctcaatcttgagtttgaactccactttcccttcatacgggtcgtggggattgttgaaggtcacgtgctccgccatgaccttgcacacgatggcgacctcag

SEQ ID NO: 341853 - DNA, 172 bp, Homo sapiens
  chr13:114304580-114304752
  hypo
cgcagaacgttccagtcaggaccggctaagtcacacctttgtttcatttttctacatgaaggggcttattgctttcctttcgctaagtgtgagaggactcagcagctgtggtgagggaagcgtggaaggaaggaacctacctgggctttcttcccgtaataagggaagtagt

SEQ ID NO: 341854 - DNA, 339 bp, Homo sapiens
  chr13:114304782-114305121
  hypo
acttgacctgcagcggctggccgagctcgcggggctggtcctggggaggagaggccactgcctgagtcaggcgggagctggtgtgtgccggtgtctgtgtgttgcgtttgtgtgcgtgtgtgcacacacgcgctgtgtaggtgcttgcataaacactttattgcatacttagcataaatcagatgcaatctttctaatcagtgctgagatctcagcaaggatatgatttgttagcatgcaaaatgcccagtgacccctccgtgtgcctctaacaacttgaaatgttggaaggatgacgcaggtgggtgaagctgggaggcggcttgcttgtctgtactc

SEQ ID NO: 341855 - DNA, 197 bp, Homo sapiens
  chr13:114305732-114305929
  hypo
cgtgctgctgacacgctactcagatgcttctggaagccaaacaataagaaaaagccccattgtttcccttgctgggttttacccgccatggtggagctcgctgtggtgatggttcggtgtttacgtctggtttactgggccgacggctgacattcctggagagaaccaggtgggccgtgcccagcatgaaccagcac

SEQ ID NO: 341856 - DNA, 482 bp, Homo sapiens
  chr13:114497796-114498278
  hypo
cgtgtgatgagcacacattagggttgggcacacgccctgccgtctggggttgcttctcagaggcgcgtgccgagggcccggggatggcaacgcccttccgtgcagaaggcgcctgggtgggtcttgcggaatagacgcgtgaggacgacccgcagggtggagtccggcctggccagggctggaagtcataggacgaaaggtagaggtgagaagaggcagttctgtgaaagaagccccgacctcgagctgggactttgaattggtttgcgtttgaaaaccggggttggtaaaagctgggcacccacacctctccttctgttgcagctggtggcagcgatcgtgtttatcagttttggcgtggtggccgccttctgctgcgccatcgtggacggcgtatttgcagcacagcacattgtgagtacattgtcattgtgtgcacagtcgctttccggggctgaaagagtcgacgtgaaaaaagtaca

SEQ ID NO: 341857 - DNA, 222 bp, Homo sapiens
  chr13:114502726-114502948
  hypo
cgagaaacttctggatttccctgagccaccgacagcggcagtgtgacctcatttctctttccaggtgagtgagatgcggggagtaatgacccgcgggcggccgccgccttcgccaggaccgtcggagggcacagctctgtgacggcgctctctgtgtgtctcgcacctgccctgtgtggattcctggctttaactaaacgcagcctctcatcctcagcacgc

SEQ ID NO: 341858 - DNA, 165 bp, Homo sapiens
  chr13:114504658-114504823
  hypo
cggcgtcagcggctgccaggacgtgctgcacctgtaccgcctgctctgggcctctgcagttctgaacgtcctgggcctgttcctgggcatcatcaccgccgccgtcctgggggccttcaaggacatggtgaggccccttggtgggacccccgctgctcactggga

SEQ ID NO: 341859 - DNA, 216 bp, Homo sapiens
  chr13:114537027-114537243
  hypo
cggtgtgacaggtcggtgtgacaggcaccagtgtgacaggtaggtcatgctgtgataggccccggtgtgacaggtcggtgtgacaggcaccagtgtgacaggccccggtgtgacaggtaggtcatgctgtgacaggcaccggtgtgacaggccccggtgtgacaggtcggtgtgacaggcaccggtgtgacaggtcggtcacgttggctccctggc

SEQ ID NO: 341860 - DNA, 552 bp, Homo sapiens; identical to SEQ ID NO: 334833
  chr13:114565970-114566522
  hypo

SEQ ID NO: 341861 - DNA, 148 bp, Homo sapiens
  chr13:114616942-114617090
  hypo
ggagatgaatcacacgtgagccgacggtggaggaggcattgatcgggagatgattcacacgtgagccaacggtggaggaggcattgatcaggagagattcacacgtgagccgacggtggaggaggcattgatcaggagagattcacgc

SEQ ID NO: 341862 - DNA, 148 bp, Homo sapiens
  chr13:114617363-114617511
  hypo
cgacggtggaggaggcattgatcaggagtgattcacacgtgagccaacagtggaggaggcgttgatcaggagagattcacgcctgagctgacggtggaggaagcgttcatcaggagagattcgcacgtgagctgacagtggaggaggc

SEQ ID NO: 341863 - DNA, 74 bp, Homo sapiens
  chr13:114747445-114747519
  hypo
cggtacaaggatacgtcgtgctgtgtatttaaacggcgcttcccacacacctgccgtctgcatcccgggaggac

SEQ ID NO: 341864 - DNA, 907 bp, Homo sapiens
  chr13:114748186-114749093
  hypo
cgaacctcgaaagtggaacagggaggccgcctcccatggctgcctggatggcaggcacagtgggagagtaatgctctgaacctcccaatgtgatgaagccgaaagccgaggcggggccagcaggcctcccgggcacagagccacagagcccagcgtcacacgcaccgtgcacgcaagacagacgtgcacgagactgacgcacacacggccggaggtgcatgtcacagtcgactagacgggccgtggctccctgaggctggctgtggtgtggctagggcacagcccacacttcctgatccttcagctgatccccagatccccacaaacaaggagcaaaaagcacagaatcaaatgacgacacgttccacagggccaggtgggctttctgcggagggcgtggcggtggtggcagcggttctgggagagggaaaccccagcgccacttgtctatgggccgggacggcgtgcatctcactttgccggctctgcgctcttccttctcttctccctcccaaaggctgcggctttgcatgggcagcttgctggcgccactgggcgcgtcccgcagactttaaatggaatgagtggaggtctcggactgctgccggatgtagttctggaagctcttgtctccgatggggtgctccctgaaaagggggatgggagagggaatgaggcacagaccccgttgcctggtgctcacccgtggctgcgggagcttttcctgttcctaaatgtgacacactcacactgcaatccacacaaaaaatagaggagccaaaggaaccacagtgcccccggaagcacccacggtgactctgatgtgtgtgcacaggtgggtcaggcgtgcaagtacatgtgcacgtgtgctctccctgtggcacgtgtgtagcgcatatacatgtgc

SEQ ID NO: 341865 - DNA, 390 bp, Homo sapiens
  chr13:114750986-114751376
  hypo
cgggcggccccacccgggagctccctgcagccccacccccactgcaatctcccgcccactacactggccgtccagggcaggcacgggagtggcactcactggcttccatatttcgtcttcttgaacttgtccctcttatactgggcgtgctcctgctccaaagccccaaccccagcgatgacttgctttagcgtcttgtaggtctcctgggggtcgtcaatgacgaacgtcgaatactcctcctgctccgggccgtcatacacagatttgctcccacaggcctctgtggagggcggaggggtcagcgcagggcaggagcccaggccaccggccccgtctccacacagctgcgtcgctgcaggccccacccacagtacacatccttccaac

SEQ ID NO: 341866 - DNA, 209 bp, Homo sapiens
  chr13:114766173-114766382
  hypo
cgcggccccgggctctgcccgcagcactgaatccttcctcccctcagctctccccctgaaaaagcagactcagtcccagggcccagcacgctccagcaagagccagggaaagcgaccttgctccttacctttgcttttgtggtaggtaaattcatggttggtcaagcgaaaccatctcttcttaaaattcttcatcccaaagcgcttcc

SEQ ID NO: 341867 - DNA, 294 bp, Homo sapiens
  chr13:114769900-114770194
  hypo
cgtttttcagaagacaaatggccaacaagcatacgatataaagcccagcgtggctcatcacctgaggaatgagagccagagctgcctgtgaccccacctcacgccaggcagaacgaagccacctgcgaccccagctcacgccaggcagaatggagccgcctgaacccagctcacgccgggcagaatggctgggatcaaataaaacacggaaaaatgacagacgctgcagagctgtggaggacgtgagcgcttgcacgctgtggggaatggaaattagcgcttaaggaaacccac

SEQ ID NO: 341868 - DNA, 226 bp, Homo sapiens; identical to SEQ ID NO: 334834
  chr13:114776260-114776486
  hypo

SEQ ID NO: 341869 - DNA, 248 bp, Homo sapiens; identical to SEQ ID NO: 334835
  chr13:114776788-114777036
  hypo

SEQ ID NO: 341870 - DNA, 130 bp, Homo sapiens
  chr13:114777587-114777717
  hypo
cggatgatacgccgatcatcaatactccatatgtgatgggcaggggaggagagcagggcggtgaccagcagctaaaaccctggacaaaccgtccactgcttttgtgacactgtctcgactcccccagaac

SEQ ID NO: 341871 - DNA, 96 bp, Homo sapiens
  chr13:114778712-114778808
  hypo
cgtccgggtcatctgcgggagagagaagcagggtgaccgttttcctcgggcacaatggcctcgtggggacaccatgccccggccccctgagggtcc

SEQ ID NO: 341872 - DNA, 513 bp, Homo sapiens
  chr13:114780556-114781069
  hypo
ggaactggggttcacgaccccgcagttctagtctagccagggctgcggggggttctgcctgggtgggagtcaccctgcacagcgctatggcagtttctcagcaacatgagggtgttcagggcactcaccctggaagcgcttggccgccgcctcccggagggagaagaagatgtcacacatgacggtcgggcagctcaccccagactcagtgatggcgtggaagacgcggtccacatactgccgtaggttctcctgcaacgggacacggcactgggacccactcccgaggctgcccacaggtgcgtgtagcaccagggcacgcccagggaggggcgcgtggggaggggctgagggcgggcgcagggcagctgcggcagtgagacacgtgtgaacagccactccctggaaatctgtgctgggagctgtggcaattcacgcgtgaaaatcactacacaggcaccacgtcggctccccggctcggccccgacctcgtttactgagtggggaatggac

SEQ ID NO: 341873 - DNA, 137 bp, Homo sapiens
  chr13:114799639-114799776
  hypo
cgtggctatccacgggctaaaggagtggcctgaccaccaaagacaggagaaagtgcctgacccaagaataaccaagaatccccactgcttcatccccgttctcaaatgccgggcgcaaactctctcaggacagaagc

SEQ ID NO: 341874 - DNA, 103 bp, Homo sapiens; identical to SEQ ID NO: 266493
  chr13:114802592-114802695
  hypo

SEQ ID NO: 341875 - DNA, 410 bp, Homo sapiens
  chr13:114807529-114807939
  hypo
atttgtacaatatacgtttacctagtatggatttatatgtgtaaattcgcatctgcaaccattattatctgcttatacgttcacctcattccagaaacattcccgaggcgcggcaaacgtgtgcccatcccatccccggcaggacagggcttgtcaggcgctgggcaccgagccatctcccatcctgcgtcccttcatggcaccaccatgtcaaccctgccagtggcctccgcacactgcggaccacgccacccaccacggtgagcacccacggcagcacatgcacctctgttgaccgatgcacgtgaactcctagggagtcgcacacacatgtgaagtctgagcccatcacagagcacacacgagagcaggagtgaggaaggaaatgttggcagactcctcacgtcttc

SEQ ID NO: 341876 - DNA, 133 bp, Homo sapiens
  chr13:114887185-114887318
  hypo
cgcgggcggccagaccagtccctgagtgcggcaccatggccgtgtgagtttatggcccattgcgctagccctgtacagtgaatgagatactagttgtttacagctgtgagcatacacaggccccccgccacac

SEQ ID NO: 341877 - DNA, 188 bp, Homo sapiens
  chr13:114917508-114917696
  hypo
cgccttgaggaacggcatcgtctgtgctgaagcaggcagcgcccagctgacgactgtcaatgcagccctagcaaacacggccacgctgccctccatccagggtcctgtccagtgctgtgctaagcacttcacgtggtgacagctagctgcacaccaggcacggtcaggtgcttagcgtttattaagtc

SEQ ID NO: 341878 - DNA, 224 bp, Homo sapiens
  chr13:114961716-114961940
  hypo
cggattccaaatctaagcacgagcctctttcagaacttcaggccgtgtgctgacatggaatccctggtgccacgaaagaccccagagcagcacaatctgagctcactctgtttccaatactgcgcccaggtaacgctgcctcctcatgccacaggtccagagcgcccagccgctggtagacacccgcgccccgctgacgttccgccatctccacctgaaactca

SEQ ID NO: 341879 - DNA, 93 bp, Homo sapiens
  chr13:115024217-115024310
  hypo
tttcccctggcagccgcggttcaatatttgctaactcagtgtacacagtgactttatagaacataaatactgtggttgggtgcggtggctccc

SEQ ID NO: 341880 - DNA, 219 bp, Homo sapiens
  chr13:115052309-115052528
  hypo
cgtgatttttttagttaagatcattttaagttatgatgcttccgaatgagcagtgcagaagacacatgaatggtctgttcctgagcgtcagggaaggcatgttgtgtcacatagttgaagtcagtggtcacagacggatgcctcaagagcccataggaatgagatgttttgcttgcggtgaggtcatcttgctgcttcaacacaaatgccaggctcccc

SEQ ID NO: 341881 - DNA, 528 bp, Homo sapiens
  chr14:21560027-21560555
  hypo
cgtggcggtcgatcttgcctgggccccagcagcagaggcagagtgccccggtccctcacccgggcgcgggtgcagggaagccagagagcccagcgacctgccccgggcccaggtttcctcctcggcctccaccacctcctcttcttcctcaggctcctccgcacggtgccggcgagcccgggccgggagagcagaggacagcgggcggaagcctccgaagctgcggccgggaccgggctcagcaccctcgccgttgggccggccctcgccagctcgcaggctcaggtagcccaagaggctcgggggctcacggcgctcggccggggtgggagccggggccaagaggagcgctgggcccaacggctcataggccagcaggccgaggtcaggaggctggggggcgcgggcaggcccggaggcaggccccggggcacgcagtgggcccagcttgctggcgtgcaccttcatgtggttcttaaggaaccagggctccttgaagcagcggccgcacaccggacacgcatgatc

SEQ ID NO: 341882 - DNA, 120 bp, Homo sapiens; identical to SEQ ID NO: 215731
  chr14:21689077-21689197
  hypo

SEQ ID NO: 341883 - DNA, 364 bp, Homo sapiens; identical to SEQ ID NO: 334841
  chr14:21769015-21769379
  hypo

SEQ ID NO: 341884 - DNA, 83 bp, Homo sapiens
  chr14:21943025-21943108
  hypo
cgtatcccagatttgcagtttgatttgttttccatcaatgttgaccatacgagctccaaactccacacctgtcggtaaagacc

SEQ ID NO: 341885 - DNA, 91 bp, Homo sapiens
  chr14:21969884-21969975
  hypo
cgacagggtcgatcagcatcactggctttcatgcactcctccttggttccatagtcacagaattcttgcacttgggcccgacctcgagagc

SEQ ID NO: 341886 - DNA, 237 bp, Homo sapiens
  chr14:23315027-23315264
  hypo
cgggaggccggccggatgaggggactgaggaggagacggaggtgatcatcattgaggtggacgaggagggcggcggggcggtgagcgcggctgccgtggtgctgcccgtgctgctgctgctcctggtgctggcggtgggccttgcagtcttcttcttcagacgccatgggacccccaggcgactgctctactgccagcgttccctgctggacaaggtctgacgcccaccgccggccc

SEQ ID NO: 341887 - DNA, 185 bp, Homo sapiens; identical to SEQ ID NO: 334844
  chr14:23355352-23355537
  hypo

SEQ ID NO: 341888 - DNA, 132 bp, Homo sapiens
  chr14:23707517-23707649
  hypo
gaacaaataggacaacgaagctcgtggcactgtgggatgcgtttgcgttgagctgtttattcagtacattttttatcgtaaatcttacgaagtttgtatccctcagcggttacacacacacacacatcctac

SEQ ID NO: 341889 - DNA, 290 bp, Homo sapiens
  chr14:23776969-23777259
  hypo
cgcccggatggcgaccccagcctcggccccagacacacgggctctggtggcagactttgtaggttataagctgaggcagaagggttatgtctgtggagctggccccggggagggcccagcagctgacccgctgcaccaagccatgcgggcagctggagatgagttcgagacccgcttccggcgcaccttctctgatctggcggctcagctgcatgtgaccccaggctcagcccaacaacgcttcacccaggtctccgatgaactttttcaagggggccccaactggggcc

SEQ ID NO: 341890 - DNA, 1218 bp, Homo sapiens; identical to SEQ ID NO: 334845
  chr14:23834174-23835392
  hypo

SEQ ID NO: 341891 - DNA, 185 bp, Homo sapiens
  chr14:23884191-23884376
  hypo
cgcccgtcgcacctggtaggtgagctccttgatgcgccgctcgctcttcctcatgcccttcaccgactctgcgttgcgcttctgctcggcctccagctcattctccagctcccgcacccgcgcttccagcttctgcagctgcttcttgccgcccttgagggcgatctgctcggcttcgtccagcc

SEQ ID NO: 341892 - DNA, 105 bp, Homo sapiens; identical to SEQ ID NO: 334847
  chr14:24550913-24551018
  hypo

SEQ ID NO: 341893 - DNA, 2266 bp, Homo sapiens; identical to SEQ ID NO: 334855
  chr14:29234550-29236816
  hypo

SEQ ID NO: 341894 - DNA, 97 bp, Homo sapiens
  chr14:31027396-31027493
  hypo
cgtgagccaccgcgcccggccctcaaactgtatttttgacaaaggctaaaggtatgctgtcatggtttggtttgtactgatccgtttaggtaattca

SEQ ID NO: 341895 - DNA, 235 bp, Homo sapiens
  chr14:32597635-32597870
  hypo
cgtggcccgccttgtcaccatgagaccctgagaaagtcccttcacctcgctgggctctggtttcctcattccaaggatggctctgctatctgcgtgtcggctatcggtgctgaggctggcccgcctctgcgtgggcaggatcttggcattccttttgctccatggacgctgcctccctgggctcgccgcgcctggccgcccggcaggcagccccaggccccggctgctccatccc

SEQ ID NO: 341896 - DNA, 322 bp, Homo sapiens
  chr14:35023195-35023517
  hypo
cgtccattcaacaaccgttcactgagcgcatagcctgtgcccagacactgttccaggcctctgggagcaaaaaggcctcggtgcccgtattctagttagacaacgagaagcgcggggaggtggggggcgggggtgggagagagaaaatctacaccgggctgcataggtaaattcgtaggttaggtgctaagtgctttgaaaaagcaaacaaacacagggaaagtgagataaggagttgcggcaaggggcaggtggctgtgttaaatcgagtggttggaagaagctgctatgagaaggtaccgtatgagcaaaggacttgaag

SEQ ID NO: 341897 - DNA, 1837 bp, Homo sapiens; identical to SEQ ID NO: 334862
  chr14:36002437-36004274
  hypo

SEQ ID NO: 341898 - DNA, 2385 bp, Homo sapiens; identical to SEQ ID NO: 334881
  chr14:37130956-37133341
  hypo

SEQ ID NO: 341899 - DNA, 1332 bp, Homo sapiens; identical to SEQ ID NO: 334888
  chr14:38677154-38678486
  hypo

SEQ ID NO: 341900 - DNA, 313 bp, Homo sapiens
  chr14:39648102-39648415
  hypo
ctgttaatttttttgtgtttttagtagagatggtggtgttggcttctgacttcagatgatctacctgcctctaatgtttcacgtaattagtatgtgtaataactttttatcataattgaactgaaatcatatataccttttgttgtaactatttcaacacgtaagtattaaagcaggctacttaacttttagcaaaagcggcgccaggaaattgaacaaaaacttgaagttcaggcagaagaagagagaaagcaggttgaaaatgaaaggagagaactgtttgaagagaggcgtgctaaacagacagaactgc

SEQ ID NO: 341901 - DNA, 2431 bp, Homo sapiens; identical to SEQ ID NO: 334891
  chr14:42075355-42077786
  hypo

SEQ ID NO: 341902 - DNA, 200 bp, Homo sapiens; identical to SEQ ID NO: 334892
  chr14:45431382-45431582
  hypo

SEQ ID NO: 341903 - DNA, 102 bp, Homo sapiens
  chr14:50287112-50287214
  hypo
cgcgttgtcctctggtcactgcatgacttcgctgaagttccttaccctctccgtttcagattctgaaagtattgtatcaagagctaataatcggctgggcgc

SEQ ID NO: 341904 - DNA, 50 bp, Homo sapiens
  chr14:50574258-50574308
  hypo
cgacctcaggagatccgtctgcctcggcatacaggcgtgagccaccgcgc

SEQ ID NO: 341905 - DNA, 1161 bp, Homo sapiens; identical to SEQ ID NO: 334895
  chr14:51026824-51027985
  hypo

SEQ ID NO: 341906 - DNA, 459 bp, Homo sapiens
  chr14:51171654-51172113
  hypo
cggacgtcgctgcagaactcgcactcgaaaggcttctcccccagtgcacgatcatgtgccttttcaagtctgagctgattttgaacttggcgctacagagccagcactggaaggagatatccccagtgtgggatcgcaggtggacggtgagctggctggagttgcggctgacataggggcagagctggcatttgtatggctgctcgtccgagtggatccgtaggtgcttcttgaggctcctgctgtccacggcagcatagtcacacaggtaacactcgtgcggcatcacatgtgcatggtcaggttgtccttccgctgaagcacttgtcacagaactcacacttgagcggttcgtcacccgttgtggattctgagatagcggtccaagtctttcatgccatggagagttttgaagtggcaacctgggtagcaacagtcgaatgtcctctctccaagggc

SEQ ID NO: 341907 - DNA, 865 bp, Homo sapiens; identical to SEQ ID NO: 334896
  chr14:51410199-51411064
  hypo

SEQ ID NO: 341908 - DNA, 2326 bp, Homo sapiens; identical to SEQ ID NO: 334897
  chr14:51560334-51562660
  hypo

SEQ ID NO: 341909 - DNA, 64 bp, Homo sapiens
  chr14:52216051-52216115
  hypo
cggggacgcagtaagccgcgaggaaaagcgcaaagagaatgaacgtcaggcccggcgaaacgcc

SEQ ID NO: 341910 - DNA, 101 bp, Homo sapiens
  chr14:53259056-53259157
  hypo
cgggaatactgcttcacgccttacagtgcgcaggacagcgccgcacaacaaagaattacctggcctgaaatgtctggagtgctgaggtttagaaacctttc

SEQ ID NO: 341911 - DNA, 95 bp, Homo sapiens
  chr14:53564384-53564479
  hypo
cgtgaaccaattccatattattaaatattaaacgagaacgaaatgggaaatgtatggaccatttgaccatgttttaaaattatgtaaacgctttc

SEQ ID NO: 341912 - DNA, 126 bp, Homo sapiens
  chr14:55522633-55522759
  hypo
cgagactccatctcaaaaacaaaacaaaaaacttacgaattatttatttctggaatttttcatttaatatgttcggaccttaggtaattaaaaccacagataaggggggatcaccctaacatgaac

SEQ ID NO: 341913 - DNA, 839 bp, Homo sapiens
  chr14:55765300-55766139
  hypo
cggaggagggcgggcgccggagcccagccggagcgggcgttgaaggctggcgcggcgagcgctgttcggggctggagggggtaaggccggcaagggcggcctgaccctccaggaggccatccagcggctgcgggacacggaggagatgttaagcaagaaacaggagttcctggagaagaaaatcgagcagaggcacggcaccaaaaacaagcccgcggccctccaggcactgaagcgtaagaagaggtatgagaagcagctggcgcagatcgacggtacattatcaaccatcgagttccagcagcaggccctggagaatgccaacaccaataccgaggtgctcaagaacatgggctctgcagccaaggccaagaaggcggcccacgacaacatggacatcgataaagttgatgagttaatgcaggacattgctgaccagcaagaacttggggaggagatttcaacagcaatttcgaaacctgtagggtttggagaaaagtctgacgaggatgagctcatggcggaattagaagaactagaacaggaggaaccagacaagaatttgctggaagtcagtggccccgaaacagtccctctaccaaatgttccctctatagccctaccatcaaaacctgccaagaagaggaagacgacgacatgaaggatttggagaactgggctgggtccagcgcgggcaggatggatgtggtgcaggcaggttccatcgctctcgactctcactccaaagcagtagggccgcattgctgctcgctctctgcatagcatggtctgcacctagtgggatgggtgggggcgggtagaggggggttgcggggcac

SEQ ID NO: 341914 - DNA, 193 bp, Homo sapiens
  chr14:55817984-55818177
  hypo
cggcagggccagcgtgagcctgggagcctctcaaggaataacagcttccgtcgaaatgtgggcagagtattgcttgcaaatagcactcaggctgatgaaggcaaaacaaagaaaggcgtcttggaggcacctgacactcaggtgaatcctgtggggtctgtatctgtggattgtggcccttcaagagctgatc

SEQ ID NO: 341915 - DNA, 166 bp, Homo sapiens
  chr14:55982010-55982176
  hypo
cgagatcgggctcgcagattgttaaacaccgatgtgcgctttgcatggggctcctctgggatacgcgtaatttaaattacgacatgagcatttcattttgtattggctggtacacagtaaatggagcaagcgggagccggctgatttccagagagacagaaaactc

SEQ ID NO: 341916 - DNA, 238 bp, Homo sapiens
  chr14:57045535-57045773
  hypo
cgtcaaggtaggtatatgttactctatagtttagtcactgtgtctctatcaaattgcgcgtaacacgtttgagattgtcactggttttcagtgtgtctttgagatacattttatgcgggttgctctcctccccgcccactccaggataattgctttaataataaaacataagcttaaaaagcttaactgcgctgttatgtagttgtccttattaacggctccgattctttttttttgc

SEQ ID NO: 341917 - DNA, 147 bp, Homo sapiens; identical to SEQ ID NO: 334908
  chr14:57265909-57266056
  hypo

SEQ ID NO: 341918 - DNA, 137 bp, Homo sapiens
  chr14:58599586-58599723
  hypo
gccactgcgcccggccaacccttgtccttttaaggctctgccacacctcttcaaacaggacagagctcacacccctttccaggtaaaggtgtgtgtgtgtgtgtacgtgcacgcacgcgcgcgctgatggcaatgtc

SEQ ID NO: 341919 - DNA, 214 bp, Homo sapiens; identical to SEQ ID NO: 334917
  chr14:58862962-58863176
  hypo

SEQ ID NO: 341920 - DNA, 146 bp, Homo sapiens
  chr14:59014429-59014575
  hypo
cgcaaagcataaagcacgtaaatactcaggttacgcatgttgagctgaatgagcttctcctttgtgcaggtgggaaagcagtgccactctccgcttcacagatgccccctgccaagatgtcagtgatgctgccgtcagtgaacctc

SEQ ID NO: 341921 - DNA, 1180 bp, Homo sapiens; identical to SEQ ID NO: 334918
  chr14:59931109-59932289
  hypo

SEQ ID NO: 341922 - DNA, 459 bp, Homo sapiens; identical to SEQ ID NO: 334920
  chr14:60097114-60097573
  hypo

SEQ ID NO: 341923 - DNA, 893 bp, Homo sapiens; identical to SEQ ID NO: 334922
  chr14:60385935-60386828
  hypo

SEQ ID NO: 341924 - DNA, 767 bp, Homo sapiens; identical to SEQ ID NO: 334927
  chr14:60973758-60974525
  hypo

SEQ ID NO: 341925 - DNA, 1113 bp, Homo sapiens; identical to SEQ ID NO: 334931
  chr14:60981478-60982591
  hypo

SEQ ID NO: 341926 - DNA, 1440 bp, Homo sapiens; identical to SEQ ID NO: 334937
  chr14:61123186-61124626
  hypo

SEQ ID NO: 341927 - DNA, 1084 bp, Homo sapiens; identical to SEQ ID NO: 334939
  chr14:61747077-61748161
  hypo

SEQ ID NO: 341928 - DNA, 196 bp, Homo sapiens; identical to SEQ ID NO: 334941
  chr14:62105869-62106065
  hypo

SEQ ID NO: 341929 - DNA, 73 bp, Homo sapiens; identical to SEQ ID NO: 334942
  chr14:62161828-62161901
  hypo

SEQ ID NO: 341930 - DNA, 897 bp, Homo sapiens; identical to SEQ ID NO: 334943
  chr14:62162333-62163230
  hypo

SEQ ID NO: 341931 - DNA, 928 bp, Homo sapiens; identical to SEQ ID NO: 334945
  chr14:63512269-63513197
  hypo

SEQ ID NO: 341932 - DNA, 101 bp, Homo sapiens
  chr14:63857003-63857104
  hypo
cgcattctcgacacacacacacacacacacacacacacacacacacacacgcttgctctctacaaagcacagtgaatcttgtgaactcagcaccgggtgcc

SEQ ID NO: 341933 - DNA, 119 bp, Homo sapiens
  chr14:64385274-64385393
  hypo
cgtcagatgccggatgaataatttactgtcgttgaaggtctgtgcggtgatgcatgttgggcgagcatgggagggaaaaggcagaaagagtagccacgcgcttttgctgctgtcttgtc

SEQ ID NO: 341934 - DNA, 225 bp, Homo sapiens
  chr14:65207965-65208190
  hypo
cgaggaggaagaagaaatgggaggtgccgcccaggagcctgagagccttctgccaccctctgtgctggaccaggccagcgtcattgcggagcgatttgtcagcagcttctctcggcggagcagcgtggcacaggaggacagcaagtccagtggctttgggagcccgcggctggtcagccggagcagcagcgtgctcagcctggagggcagcgagaagggcctggc

SEQ ID NO: 341935 - DNA, 245 bp, Homo sapiens
  chr14:65209843-65210088
  hypo
cgcctgggggccggccctccgcccggagccccctcagccccacagagaccttcagctggcccgacgtccgtgagctctgctccaagtatgcctcccgcgatgaggcacgccgagcagggggcggccggccccgcggcccacccgtcaacaggagccactcggtgccggagaacatggtagagccacctctgtcgggcagggtgggccgctgccgcagcctgagcaccaagaggggccggggaggc

SEQ ID NO: 341936 - DNA, 435 bp, Homo sapiens
  chr14:65233333-65233768
  hypo
cggggctgcgccagctcatctcgcctccacctgggctgagcctagtaggggtgagagggctctggctgcagtgactcccaggaactagacaaacgagaccagagactgaccggggacgttctctcggtggccgcatggtgggaaactggagcctcccctgctgtctcgccttcctcctcttgaggcctaaggaagacacagtctctctttagaaacaagcacccctctgaggccagtgcctcctgcgaggcctggcttttcacctgcgcccacagggaggagcaccaaatagctccccctccagtcagccggcagcctggatggtgcttggcaaggagccgcccagcgacttcttcggaaaagccaaggcagattcttcagaagggagccaggttccaggcagaacggcctgtggggccccgtgttcaggtggct

SEQ ID NO: 341937 - DNA, 127 bp, Homo sapiens
  chr14:65236155-65236282
  hypo
cgggcctgtgtgtagccccgatctccatgagtgagagcaagacaagctcctcagaaaagctgcagctctcatctccctcccaggaggctgcctggctggcacagtggggacggagacggaggagctc

SEQ ID NO: 341938 - DNA, 542 bp, Homo sapiens
  chr14:65239302-65239844
  hypo
cacccagcaggtggagctcccgctcgaaggctgtgtgcacccggtggaaggactcggccgtgctggcgtccagccccacgtcctcgggcagctcgcggtgcttctcgtcgatgaggcccaggatctcggcacccgtgtagaagtagcggtgcaggtcataggaggcggccagcagctgcatgcgcgtgtcaatgagctccaggaggtctgcccacatctcgttcagcccgtccttccactcggcgatggtggccgcctcgctgtggcccgcgtcgatgagtcgctcgatgaaggcattcacattgtccacccgctcctgcccaatcgccccggtctcccgggcaaagtcccggaacttgtcccgcagaagctaggcatggggcagacagaaatgtggttatggggggcacaggggttacaggtgtcaccagcttagccaaagactttcccaggcagcaactgcagctccgggagctgcgctgtcacaccttccccagggcaggcctgcatcggctggtcccgcctcacactggggaggttac

SEQ ID NO: 341939 - DNA, 185 bp, Homo sapiens
  chr14:65271617-65271802
  hypo
cgatggcagcagccccggggcccacagaagggactttaccagcatctctccagagagcacctccagcagcttgatgagcatgcgcccatcccgcaggtccttgtagagatcggtgatgcggcaggacactcgagccaggtgcgagttcacccatttcgtgaaggtctttttctgaacaacttccc

SEQ ID NO: 341940 - DNA, 179 bp, Homo sapiens
  chr14:65406266-65406445
  hypo
cggctgtagcgtcggaagggctctccctccggccctatgaggaacttctcaaagttccaggccacatctgagcggcgcacagggctccaaatgatgagcttgggatcggtcatgagggaaaatgggtcatcataagggtaggggagcttgtccttcaggtaggcgaagacaggatgctc

SEQ ID NO: 341941 - DNA, 214 bp, Homo sapiens; identical to SEQ ID NO: 266762
  chr14:68067574-68067788
  hypo

SEQ ID NO: 341942 - DNA, 52 bp, Homo sapiens
  chr14:69070536-69070588
  hypo
cggccgcgctggccccctgtccgcatgctgtcaggctacctccgtgccagac

SEQ ID NO: 341943 - DNA, 126 bp, Homo sapiens
  chr14:69245863-69245989
  hypo
cgtgggctcttagaagctatgacacctgtaccaatagaaaaatcatccattcagtaggtaagtgcctgctgagtgccaggcatcagcgttgacatgaaatagaacggtgaacaggaggctgggcgc

SEQ ID NO: 341944 - DNA, 213 bp, Homo sapiens; identical to SEQ ID NO: 334953
  chr14:69259278-69259491
  hypo

SEQ ID NO: 341945 - DNA, 228 bp, Homo sapiens
  chr14:69278051-69278279
  hypo
ggtggagcactggtcgggaaagccaaggacaggcactcgcagccagggcggctgtgtgggtgggaggacgcagggggctgcgctccagtctcccctaattagctcaacctggctacatccttaccattgcatgtgttcatccttatgtgaaacggagcccatattgacctagcacccagtatgtgcaaggcgctggctgaatagggagctgcagcgggagatttcagc

SEQ ID NO: 341946 - DNA, 145 bp, Homo sapiens
  chr14:69345646-69345791
  hypo
cgcattatttcttgccccagacgccacccctgagcgtgctccatgcaggaggcgagtacctgggggtcgttgccaatatcataacccaagctgatgaggcaggctttgaactcctcgggacccagtgtgccggagtgatcctggg

SEQ ID NO: 341947 - DNA, 211 bp, Homo sapiens
  chr14:69354686-69354897
  hypo
cgtttttcggcttcgcttccacttttgcaggaggtttaactgacaaccgcgccgatctcctcttgggcttttccttggcggctccttcagcagagctgaccttccccttgggcatcctggcggcagggagggcgcgtgccaggtgtctgcgggccgcggcatgctgacagcctttgcgaaactgtgctgcctggccgctgccactcctcac

SEQ ID NO: 341948 - DNA, 176 bp, Homo sapiens
  chr14:69470456-69470632
  hypo
cgtcccagtgactcggccctgcctgcccctcactctgttcaccacggcactctgttgtccctccactcaacccctttggcctccttgccacacctcgtgtgtgtcaaggtccttctggcctcagaacctctgtacttgctgttctttctgcctgaaacacccttccccgcagatcc

SEQ ID NO: 341949 - DNA, 241 bp, Homo sapiens
  chr14:69666624-69666865
  hypo
cgtttattgtcgttatcaggtatgtgctatacataattgcatgtgctatacttttatacgactggctgtgctgtaggttcgttaactccagcataattacacacatttgtgagtaacgcattgtgcagcaacgttaggacggttaggatggctatgatgtcactaggcaataggaatttttctgcaccattgtaatcttataattttgtagaactattgtatgtgtcatctgttgttgacc

SEQ ID NO: 341950 - DNA, 475 bp, Homo sapiens
  chr14:70236238-70236713
  hypo
cgttggccttatgacgaggagtgcctgtgggttatcctaatcgttgtcttggtcactcttggttgggcctggttgactttgccagtcagctcctacagtgatcagttggccacctctagatctgtgtttgccggtctagacgttatcggtgcacttccttgaagtgccaggttgcagcgatcccagagcgttgataacgtgatctgatccctaagttgagacctgtcttcctgtaacgcttccgaataagaggtccggtcgaaaagagttgaaagatacgaaattaggtggtcgttggaatcctgatcgcagtaaagtggtccttggtaactgctcgagtagaacatgtctgcatccgccaatagtccgctaatagggagggctgtgcgattaaaggcttccatcgattgggtagtgtccttcaagtgggtggcgaagagccagtcgggcatatgtcatgaaggtttctccgacc

SEQ ID NO: 341951 - DNA, 469 bp, Homo sapiens; identical to SEQ ID NO: 334956
  chr14:70346057-70346526
  hypo

SEQ ID NO: 341952 - DNA, 1758 bp, Homo sapiens; identical to SEQ ID NO: 334958
  chr14:70654358-70656116
  hypo

SEQ ID NO: 341953 - DNA, 181 bp, Homo sapiens
  chr14:73029661-73029842
  hypo
cgccgcctgtcatccctcacgtctctgtggccacccgggtgtcactgccagcaccaggcactgctttcacgtaaaatgtccaaatcacatcttcagcaagaaagcaacctcacggattgccccgcctcaaggtctttccaccctctttgagatcagcgttcggagaggtccccgccagccc

SEQ ID NO: 341954 - DNA, 156 bp, Homo sapiens
  chr14:73146636-73146792
  hypo
cgacgtgccttccctgcagaatcaggagcaagcctcagctggaggccactgccacagcctgctacctcggcctagcctttaatgagggctgcgggaggagggagaggcgggctggggagacaaggcgcctgcgaggagctccggcaggcccagcgt

SEQ ID NO: 341955 - DNA, 180 bp, Homo sapiens
  chr14:73147150-73147330
  hypo
cggggaagcagacagtagggcccgctccccacaggaccctccaatcgtcagagccctcgacggcagagaactcgctctccccacaggccatcttgccaccagctctgaggacaccgtgaatatatgggaaagtaaaggggactacgctggagcggatgcggaaggcgctgaggccagggc

SEQ ID NO: 341956 - DNA, 165 bp, Homo sapiens
  chr14:73167782-73167947
  hypo
aaatatctgtcgtgcggaatcagcctgagccccaggagcgctgaagcagcagagagggtcatgccccatcttcccactccagtctccttccccgggggcaagcgcttttgcaccatgcacctctgaagccaccacccctgggaccagtcagccctgcctgtgcac

SEQ ID NO: 341957 - DNA, 153 bp, Homo sapiens
  chr14:73175070-73175223
  hypo
catgccacaagccccgctccacaaatcaagtttctgggggcaccgagcctttcctcccctccccgatcctacccccatccaaggacctgcaagacaactgagtgatgagcccagcttcccttccgcgacaaaggcagtgagcctgaaggccgc

SEQ ID NO: 341958 - DNA, 80 bp, Homo sapiens; identical to SEQ ID NO: 266806
  chr14:73178785-73178865
  hypo

SEQ ID NO: 341959 - DNA, 147 bp, Homo sapiens
  chr14:73238412-73238559
  hypo
cgcatgtcccaggagtggcgcagctcacctgggcctcggtgcctcttctccatccagatgtagcagttgttctgggccaccccagtctgtgagtccaggaagggaagacgcacgctgcgctctgcacacagccgtgagttgtaactc

SEQ ID NO: 341960 - DNA, 69 bp, Homo sapiens
  chr14:73302675-73302744
  hypo
caagatacacccgccggagaccacattcccagacatcccgagggccagccgtcaccacacgggtgcctc

SEQ ID NO: 341961 - DNA, 457 bp, Homo sapiens
  chr14:73318504-73318961
  hypo
cctaccacgggcaacgggtaggcaaccgatatgcccagaaaggcggccaatgggaggacagctcgcccagcctcccgattggccaggcccgccaccagctggaaccatggcgagctttgaggacagcagagccacttgatgggattctctctctcttcaaagcatagagcaaacatcaattaatcctcaaaagacgctttcaagaagaacattatcccttttggagacgcagaagctaagaggtgccgcaggtaggtgaagggaaggcaggaagttgaagaggagaggagaaagtggagcaccgggctttcagccccagttctggttctcctgagagagtcaagttgcaggagaagaatgaacctgcagaagccgggcagggagaggtggtggagaagccgctgctcttgggtgcgcccctcaaggcttcccactgccccatcccctaggagaccac

SEQ ID NO: 341962 - DNA, 720 bp, Homo sapiens; identical to SEQ ID NO: 334961
  chr14:73358909-73359629
  hypo

SEQ ID NO: 341963 - DNA, 464 bp, Homo sapiens; identical to SEQ ID NO: 334962
  chr14:73359779-73360243
  hypo

SEQ ID NO: 341964 - DNA, 62 bp, Homo sapiens
  chr14:73390972-73391034
  hypo
cgcgggtgcttaaccaatgggcgctgtgcaccaagtcctgggtgaggtactccatcatcagc

SEQ ID NO: 341965 - DNA, 420 bp, Homo sapiens
  chr14:73391900-73392320
  hypo
cgtgagccactgcacccggcctgactactctttccctggcaattgctgcgtcaccaagccccaacccaccctgctgagttttccttccaagactcccctcccatccagccggcttgaaccggcctccagtcacgttgtttgttcagctagaatttttctctgccttctcttcaaggccgctcaagcttcatgaagcggttctttattctgactatgcccacttctctcatttccctcatcacccggccccgctccacatactgcatttatctataaactcctgagagccaggagtttagcctgaaatcctagcttcctggttaagagctgaaatgccttcgcacggcgtgcaatgggtgaaccccaccgcctgctttctaacgggtccaagccgcgggcaggggcctgtgttacggagcc

SEQ ID NO: 341966 - DNA, 103 bp, Homo sapiens
  chr14:73967299-73967402
  hypo
cgccgaactgctgtgaagtcatcagagaagcagtgcaggaagcttgggagaagcttggcggtcataagcttgagctcacctatcaggtagagagcttccacac

SEQ ID NO: 341967 - DNA, 408 bp, Homo sapiens; identical to SEQ ID NO: 334965
  chr14:74100395-74100803
  hypo

SEQ ID NO: 341968 - DNA, 2455 bp, Homo sapiens; identical to SEQ ID NO: 334969
  chr14:74706335-74708790
  hypo

SEQ ID NO: 341969 - DNA, 262 bp, Homo sapiens
  chr14:75567786-75568048
  hypo
cgcttcttgtagttcccaacgcccagctgcccacacttgttgcagccaaaggtcagcagccggcctcgctctgagagagaagcaaaaagaaataacaaggcacaaatgagtcctggaacccagagaagatgcagccaagcagacttcatggattagcttccggttgttagaatatacaaatataaaactagccacatgatcctggacctaggacaaatacagtatctaggcactataaccaattagatccagtcagcgactc

SEQ ID NO: 341970 - DNA, 167 bp, Homo sapiens
  chr14:75749334-75749501
  hypo
cgtggagggttattctacttcaaagatgagcaaattgaagaatggttagaataaacaactttcttgatattccgttatcggcattagaatcttcctgctcgttatcgtatccagcaggctgaactgcctcttgatacttggttaaaaaaaattttcaggccgggcgc

SEQ ID NO: 341971 - DNA, 154 bp, Homo sapiens; identical to SEQ ID NO: 266848
  chr14:75760174-75760328
  hypo

SEQ ID NO: 341972 - DNA, 95 bp, Homo sapiens
  chr14:76446078-76446173
  hypo
cgctctcccgtgacacgcagacacaaagggcgccagcctcctctacgcatccacagccaaaacccgctctccccgtgcccaccggcctggagggc

SEQ ID NO: 341973 - DNA, 805 bp, Homo sapiens; identical to SEQ ID NO: 334978
  chr14:77591041-77591846
  hypo

SEQ ID NO: 341974 - DNA, 818 bp, Homo sapiens; identical to SEQ ID NO: 334981
  chr14:77964834-77965652
  hypo

SEQ ID NO: 341975 - DNA, 274 bp, Homo sapiens
  chr14:81879122-81879396
  hypo
cgcgcaaagcagtcttcgcaaaggggaaaatatgattgctttgtgacctttaaaactttctgtcaaacattaaaagctttcttcttagaggcgccacggcttccatagcgatggcagctccagccgggcgatgcttagcacctccccaggagaccgttgcagtcagccagcccccttctccatgggtaaccatgtgcgaccaaaaggccgtgatcaaaaatgcggacatgtcggaagagacgcagcagaactcggtggagtgcgctcctcaggc

SEQ ID NO: 341976 - DNA, 731 bp, Homo sapiens; identical to SEQ ID NO: 334985
  chr14:88458957-88459688
  hypo

SEQ ID NO: 341977 - DNA, 1118 bp, Homo sapiens; identical to SEQ ID NO: 224744
  chr14:88789388-88790506
  hypo

SEQ ID NO: 341978 - DNA, 82 bp, Homo sapiens
  chr14:89291884-89291966
  hypo
cgtgagcggtacaattctggtgggcaggtggctcctggaataggcaaaaaaggagaaaatgggagaacagaagtagcgctgc

SEQ ID NO: 341979 - DNA, 435 bp, Homo sapiens; identical to SEQ ID NO: 266903
  chr14:89627946-89628381
  hypo

SEQ ID NO: 341980 - DNA, 192 bp, Homo sapiens
  chr14:89657668-89657860
  hypo
cgcagcgtcccagctgccctggggcgaaattcactaatagtgcggtgatgccgcgtgacagaagctgccgcctgtgccctgtccaaataaatgaagtgtgcaattgaagtcgacatcaaaatgccttcccttgcagattactgcctctgtgtccgccaaacccaatgactaatgatgggggacaaggggctc

SEQ ID NO: 341981 - DNA, 141 bp, Homo sapiens
  chr14:89786299-89786440
  hypo
aagctcaaggatgacgctttgcatttcattactaagacaggtaaacatcagatctgctgcagaatcaaacacaattaaaactttaattaactgaaacctaactagcccccaacttcaaataaaaaacatttgcgggcagcc

SEQ ID NO: 341982 - DNA, 111 bp, Homo sapiens
  chr14:89875711-89875822
  hypo
cgggagaacagctcctcccagtgtgcctcaacacagggcatccaacacccacttgtcactcccaaggctgactgatgaataatgttcccaagtctcgctgcacgccttggc

SEQ ID NO: 341983 - DNA, 181 bp, Homo sapiens
  chr14:89895069-89895250
  hypo
cgcagcagacgtcagagagacctcagcgcaggggtccaagcacctggccaaggcaccctgcgcaggcctccacgccccacgagtgcctgcagaggctacctgaggaccaaggtgggcatgccacggtgtcctggacttctggatggaggccagtcccagggagtgaatggcagagctctcc

SEQ ID NO: 341984 - DNA, 54 bp, Homo sapiens
  chr14:89938175-89938229
  hypo
cgtcatttgcacctttccctcggccacggagatgaggaatgacccatcagcttc

SEQ ID NO: 341985 - DNA, 596 bp, Homo sapiens; identical to SEQ ID NO: 334991
  chr14:90085316-90085912
  hypo

SEQ ID NO: 341986 - DNA, 729 bp, Homo sapiens; identical to SEQ ID NO: 334992
  chr14:90526595-90527324
  hypo

SEQ ID NO: 341987 - DNA, 1280 bp, Homo sapiens; identical to SEQ ID NO: 334993
  chr14:90527853-90529133
  hypo

SEQ ID NO: 341988 - DNA, 151 bp, Homo sapiens
  chr14:90754255-90754406
  hypo
cgtgacggcttctcagcattcccgtgatctgacagccaccacccatgcacacagaaacaacattcatactccccagaagcacacccaggcgacagccaccaacccccctcctgagaggcgccgctactttgtgtctcgcttgcctttcaat

SEQ ID NO: 341989 - DNA, 1142 bp, Homo sapiens; identical to SEQ ID NO: 334994
  chr14:90849401-90850543
  hypo

SEQ ID NO: 341990 - DNA, 136 bp, Homo sapiens
  chr14:90871545-90871681
  hypo
cgtgcagaaaaatgggtgaaggataaaccgttgagacgtggccccactggtaggatggtcctcttgtacttcgtgtgctccgacccatggtgacgatgacacaccctggtggcatgcccgtgtatgttggtttagc

SEQ ID NO: 341991 - DNA, 234 bp, Homo sapiens
  chr14:91691066-91691300
  hypo
cggagtggcgtctcgggcatcgtgggcatggaggtggatgggctgcccttccacaacacccacgccgagatgatccagaagctggtggacgtcaccacggcacaggtgtaaccgtccatgttccgtgtgagcagagtccctaccaacgggcaggtctgcatccggggagaatgcagctgcttctggcgacaatcctgctagtaaacactggtcttcggtgagcaacgaacactc

SEQ ID NO: 341992 - DNA, 39 bp, Homo sapiens
  chr14:91731775-91731814
  hypo
ggctggcatagctgcgtacaccttaggacggtcagctcc

SEQ ID NO: 341993 - DNA, 145 bp, Homo sapiens
  chr14:91750824-91750969
  hypo
cgggacaggtcatcctacaggtgaagctaaaatgaggatccacaggggaggcagagatgagtgaacagttagcatgagcagcgaacagagaaagcacaattccaacagcatgcgcggaaggcaggtctggaggacccggcaccac

SEQ ID NO: 341994 - DNA, 267 bp, Homo sapiens; identical to SEQ ID NO: 334997
  chr14:91755357-91755624
  hypo

SEQ ID NO: 341995 - DNA, 259 bp, Homo sapiens
  chr14:91757493-91757752
  hypo
cggcccagcctggaacctggtgtacccggggctggtatttttccaggattgagatgagggtgctcaccaccgtcatggtcactgagtttggaatacgggaatggtggcatgcgccgtgggttcagggagctctatgaccctgagatttactgaagcccctgggacccagctgtgagcgagctcaaggcagcaaacttctaacaatctgaaaactcacgctcggaagacccaaggattctccttccaggttgttcaagac

SEQ ID NO: 341996 - DNA, 323 bp, Homo sapiens
  chr14:91766253-91766576
  hypo
cgggcgccggcgctcacctgtccagctcgccccgcagcctctggttctcgcccatggcgagggcgtttgtcctctgctcctgctgcagcgcctctcgctcagtggtcaagaccttctcccgctcctccagctccgccttgcgcttcagcatgtcaccgtgcctgttggagggaagcacctgccgtgagtctggccagggccttcttttccgacaggtaactcacatcccagaggatctgcgtgcctcccgtgagaaaatgggattcctctggagagtctctctgcagaagtgaggggcatggggcagggaacaggcggggagc

SEQ ID NO: 341997 - DNA, 1282 bp, Homo sapiens
  chr14:91805132-91806414
  hypo
cgccactcaggtctccctccctgtgtgtggggcaggtaaggagaccccagcggcagctgtaccaccccacagccaggctccacaggtgacatccatcagctgcaggaaacctgggagaacaggctcaccagattggagggaaggaggggcacctcatccctccagccaagaaaacacatcaggtgtggtcgtcccggccccaagctggagctgagcgtggactggaggctgcttctgtggacaacttgcaccgtctggacgggaggaaaccctgaagaccgggaagaatccccgcccccatccctgtgcaggcctcagaaggggaggcagctagtccgaggtcaaagagtaagctcagggcagaccccagctgactccggggcacacgtcagagctgtgccattggcagcaccacacatgtgagtcgacaccacaccagaaacatgtctgcaacacacacaaaggtaggagaagcagccggggactcacagctcctgcctgacgcgccgcagcctggccttggtgtcggccagctctacggccaggtgctgcttgtcttcgctagagaggctgctggtggggctgggagtggagtcggcgctggaggacttgatggggctgggtggatgctgtgcctgcaggtagtcccgttcctgagtgaggtccacgatcagctgcagccgggcagagagggggatggaggagaacaaacggggttaaccagcacaacgcctgagcttgaacagggtgaagaaaccgccaaaagacagatatttcagcggagactaagaaacgaggaggaaggtgggaaaaggctggcatgggttttgaaaagaggtgaaatatttagtgaaacaaaagggagtgtacgaaggaggagggccccaagctccgcgtcctgattccctgtatcctcccacaggcccgaggtgaccatgcactgcaggggccgtaaccagggaaagcacgcacgtcccacccccaccagaacctcagcagcaggaccgaggcgtctaggctgaagatgaagggagaggagatgaaggggcctaagccccttcccaggctgaccgggccaccgacccgcggacgcacctcggtgcactcgtcccgctggtcgatgagcctccgcaggtggagcaccatgctcctcgacagggcctccagctcctccggagccacgtcgggcagctccagccactgcaggtcaaacacgttctcttggttgtgagtcacctgtgggcacacatggcagggcactgcaggggcggcagagacgggc

SEQ ID NO: 341998 - DNA, 199 bp, Homo sapiens; identical to SEQ ID NO: 266954
  chr14:91808060-91808259
  hypo

SEQ ID NO: 341999 - DNA, 570 bp, Homo sapiens; identical to SEQ ID NO: 334998
  chr14:91883365-91883935
  hypo

SEQ ID NO: 342000 - DNA, 1442 bp, Homo sapiens; identical to SEQ ID NO: 335003
  chr14:92789370-92790812
  hypo

SEQ ID NO: 342001 - DNA, 1291 bp, Homo sapiens; identical to SEQ ID NO: 224761
  chr14:92979677-92980968
  hypo

SEQ ID NO: 342002 - DNA, 764 bp, Homo sapiens
  chr14:93154446-93155210
  hypo
cgacgcgctgccgcactgcatcaagggctacctgctgcgcagcgagcccaagcgcgacttccactttgtctaccggcccctggacggtggtggcggcggcggcggcgggagcccgccctgcctggtggtgcgggagcccaacttcctgtgaggccctcccggggcgcctcccctcacccccaggcgcacgtctggccccgcctctggctgcgcactcccgaccgcgacgtccacgcagcagagggacatgggccattccatgacgtgcccaggccaacgtcgcaggacagttgtgaaaataacatgacgctcgtccaaggccacttcctgagggcaagtcctaatagccctgagacaccgagacggcatgttcttcattagacggaaagggaaactgaggctcaggagagaggcgctccaggccgctgcagccaacaaaccggcgccctcttcacacgtagctcctcaggccattccccatgagtcccccacacccaccccatcctcggtctttgcaaagaagggcccgagcttagtttccccaggactggcctaggaaggagcaccggccacagctgctccccgtgccactcagggtggacccagcatctcaggagcacctcagggtgtcggttaagagacaggcctccacccctgcaccagagcctgctcttagctcccggtgcccccagaccccgcagctctgtgcccggcaagaagcagctagacacacgccagggcgccaagcacggccagctccgcgg

SEQ ID NO: 342003 - DNA, 108 bp, Homo sapiens
  chr14:93415131-93415239
  hypo
cgcccgggcgccgcccacgctccgagggacccatgcccgggcaccacccacgctccaagtccgggcgccgcccacgctccgagggacccacacccggatatcacccac

SEQ ID NO: 342004 - DNA, 372 bp, Homo sapiens
  chr14:93425284-93425656
  hypo
cgatgaggcgctgagaggttcagtgactgctggacagtgagtgagcccgggatggaactgggtctgcacagcacccagccgcgcccctacacacggagccatgtgatactccgcaaacaacaggcctttgtgctcctggtccccgactcctctggggaaaaaggtccctgacaggaggatctggtaggggctggggtagggagtgcaggggggcagctgccaaaaccctctcagccccggccagcacgggctctgcacagggtctgctctaaggacagaggggtgggccctaggcctagccgatccagctgctggtgccagggtcatggctaatccctcagcccgcagggccccaggaaggagccaccagac

SEQ ID NO: 342005 - DNA, 523 bp, Homo sapiens
  chr14:93454179-93454702
  hypo
cggactgggggagggcactggcttccacacggcagacgccaggacggcagctcacgcagactcagaccagggctagccttggtcccagctgccgcctcatgccggcaacgcacctacccggcctggtctgcagctggcgcttagccgccccagggcaggggagccacaagcacaatcctgctctgcggagcctcccctgcactgaaagggcgggtctcagcctgggtggcagacaacagccgatgtgaaaacaaaaacagtggtgctcccacacatccctgaagtccaagaaagggaaccacaaaccaagcacctcccctgagagaccctacctccctggcaccctgtcctccctcattccagacccttcgatggggcacgctgtcccctcacctcagccctgtggtctgggcaggctgacactgggggaggcatgggcaggtgcacaccaaggggtcgctctgcccgatctggggtggggccaccagctgagacgcccactcagcacgtccgaggcactggc

SEQ ID NO: 342006 - DNA, 381 bp, Homo sapiens
  chr14:93706483-93706864
  hypo
cgaatgcgatgcacagccgacctgcagattagtgttaactctgggagctcgggagcgtgcaccaccaccagtgtcaccgagcgcacccgcacagcagctaaccagtcaggcagcagaacgagtggcggcagtttgccggggcgtgcagacacacgacatgtttcccatcttggagactatctactgttcggcttttctaaaatgtcagattattcctgagtgtatatccacagggtaaaggaggaaaagaccgtaagagaaactatagttttgggagaaatcagcgttgttgacacccaatagaaaacctatttacttcaaagtgcatgtaattcatttacccggtagctcataaacgctccctagccctgcatagttttc

SEQ ID NO: 342007 - DNA, 329 bp, Homo sapiens
  chr14:94209931-94210260
  hypo
cgatgtcggtgaatgtgcttcccaagactccgaggttaagttcagcctttgctgtgggaaaccgaaggcagaagcacctgggctgggagttgtttctctgtcttaaaaccagtgtgggcctggtgactcggccatggggagcagaggtgaaaggagtcacagccctgcttcagggacagtctcatggcaccgctggtcctcagcgtgtgcaggggtcccctttggcaccactccctcccgcccaccaaagtgtcttgaggaaactgtccagaatgtcacggaaaagtgcaaatgcacgggactcggtgcgcgctgaaagggggcgggac

SEQ ID NO: 342008 - DNA, 169 bp, Homo sapiens
  chr14:94404101-94404270
  hypo
cgagcagagctgcacgttgcccacgtagtccaggaggacatcgatgatgggccccgcccagcggctcacctctggggcagatacgaactcacagaactgaaagagaacatgccgggaccaagaagtgagttcatcccacctgcaagagcctgcggccagggacggcagc

SEQ ID NO: 342009 - DNA, 206 bp, Homo sapiens
  chr14:94404864-94405070
  hypo
cgtgagccaccgcgcccggccaagttctgacttttaaagtaacaacatggacgtgtcctgcctctgggtcgctggctttctgcttctgacctgaccctacaccagcctgctcttgacatgcctttccggatcgtgcttgtttcacatcgcattccaggtgtaggtttgctggaggtgacgagcctcttagtttggcagagttctcc

SEQ ID NO: 342010 - DNA, 481 bp, Homo sapiens; identical to SEQ ID NO: 335007
  chr14:94405738-94406219
  hypo

SEQ ID NO: 342011 - DNA, 183 bp, Homo sapiens
  chr14:94603557-94603740
  hypo
cgtcactggaaaattaatcccaagccccaaagccttatttacgcagattagaatagcttctgttcaagtgtttgtgatgtcgccgtgtaagccctcatcgtgatgctttaaaagtcatcgttaagtcgtgttacctgctgtccggccctggcacagtgaggctacactcccacaaataatgac

SEQ ID NO: 342012 - DNA, 81 bp, Homo sapiens
  chr14:96054940-96055021
  hypo
cgtggcgcggaggtgggcatcagaaagcccgggaagggggaatctggctggcatcatcacacaaaggacgaccgagtcacc

SEQ ID NO: 342013 - DNA, 986 bp, Homo sapiens; identical to SEQ ID NO: 335012
  chr14:96342497-96343483
  hypo

SEQ ID NO: 342014 - DNA, 1193 bp, Homo sapiens; identical to SEQ ID NO: 335013
  chr14:96505313-96506506
  hypo

SEQ ID NO: 342015 - DNA, 40 bp, Homo sapiens; identical to SEQ ID NO: 267028
  chr14:97262846-97262886
  hypo

SEQ ID NO: 342016 - DNA, 713 bp, Homo sapiens; identical to SEQ ID NO: 335014
  chr14:97684972-97685685
  hypo

SEQ ID NO: 342017 - DNA, 584 bp, Homo sapiens
  chr14:99849765-99850349
  hypo
gaaggcaggggaagggacgacgcatttggaggaagcaccatccgagccacaccccgcacagaaaaaggacccaggcccacggcaaggcgcttcttggtcctttcggaagggccgctcctaaaccaccagggctgatccgctgcttgggtggagcacaggcgggaagccctgccccgtctctttgtgagctgtgggtgcgcttggcgagtcacaagcctctctgggcccagttctttctatggaagtcatgggttgcagtgttgttgagggagccggtggtgcacgtggtgaagacctggctctgtagccggccagctgggtccccgtcacacactcacacgtgcacacatgcatgcatgcacacatcctcacacacattcatacgtgtgctctcacgctcacatgcacacattcacacacacgttcacacacccatgcgctcacatgcccatgcacgcacacgtttgcacatgtacgcgcacacacactaaacccgttgggcctcagcttactcatctgtcaagcggagaccatggcagtggctccgacaggtgcttggcacatggtaaatgcccaatacatac

SEQ ID NO: 342018 - DNA, 189 bp, Homo sapiens
  chr14:99880392-99880581
  hypo
cggcgtccagccgcgctacagagggatcatcgcgctgttatgctctcatacatcactgtcaacttaatttgttgtgcccagcagccgccataaatctgcttcttcatatttcgatactagcacccacagacaacgcgcaaaacacaatttaaggtggaccgactttacaaaaggcaggcacgcctacgc

SEQ ID NO: 342019 - DNA, 132 bp, Homo sapiens
  chr14:99902515-99902647
  hypo
cgtggtgatcacgggaatgatggagattacaattcaagatgagatgggtggaaacacaaagcctaaccagatcaccaccgtacttccgccttccaagtgactcccgggaaagttcatcaaacagcttgtgtc

SEQ ID NO: 342020 - DNA, 82 bp, Homo sapiens
  chr14:100148281-100148363
  hypo
acgcagacagcccgccccaagggaagaatcaggggcgaagagagatgcaaccccccgggagcatgccaacctacaaaacccc

SEQ ID NO: 342021 - DNA, 1552 bp, Homo sapiens; identical to SEQ ID NO: 335020
  chr14:100437460-100439012
  hypo

SEQ ID NO: 342022 - DNA, 216 bp, Homo sapiens
  chr14:100591084-100591300
  hypo
tacttcatttctctcgaaactgcttcatcacccgcagtgctgaattctgtaccccagggcccaatccaagctgtgtggggtcactggccgtccgggaatgggcataccgcctggcggtcggggtgtgaacagcaggggacacacacacaagcacatacacttgtcccaaggcaggaccacacacatagctgcccccagacgagaccacgtacggac

SEQ ID NO: 342023 - DNA, 170 bp, Homo sapiens; identical to SEQ ID NO: 335021
  chr14:100613205-100613375
  hypo

SEQ ID NO: 342024 - DNA, 206 bp, Homo sapiens
  chr14:100643286-100643492
  hypo
gcaccgagtccctacggtgggaccatgcccgcagcggcagtgtggaagatgggacagacacagcgaaatgcctccagggcgtggtgggaggggccggaacagggagatggcgcgtgagtagcatctgttcttacagcaaaacctgtaaaagtaaaatatacgtaggtttgtcactaaagacgtgtctgcataaatacacccacgcc

SEQ ID NO: 342025 - DNA, 365 bp, Homo sapiens
  chr14:100644271-100644636
  hypo
cgcggttccccccccgggagcattgatacccccgcccctgggagcattgatcctcctgcccctgcagcccggagcccggagcagcccacgttgctcccgctgcggcccagcccagcccagcccagcccagcccagcccagtgccgcgcctgtcctcgaacctggcccaacgctcgccgggagcagggacctgcgtgcagctatggaaccgaggcgcgggctgcgggatcccgccctacctcccataaaccagggcccgagataagggagtcccagagggccaggggagtcgcgggcccagcgtctcagtgggcacgaatttcttactttaacctcttttctgtcgaccccatctgtccccacctg

SEQ ID NO: 342026 - DNA, 243 bp, Homo sapiens
  chr14:100747027-100747270
  hypo
cgcaatacctgtccgtgtttccaagcagagttcaagttcatgtcttcacaagtagatgagagtcacttccagtcgggggaagcccgcctgagcagtgttttgagagtgcgtacattggaggactgccccacgtccgtttgcactctgccttgcaaaacttactgtggagacgtgtcccagactggtctcagaccagagtttgtggcacaggaaaacctggccccctaaaaagaagttttggaa

SEQ ID NO: 342027 - DNA, 208 bp, Homo sapiens
  chr14:100748335-100748543
  hypo
cgttatcacccagtccccttgtaaaatctggaatggagcgtttaagctgagcgttagcatcaggtcagcaggcaaagcaaacctcccacaaactgggtgccgtaaggtgggaggtgacacatggagagcttcgtcctggccgagcaggcacccagccccatgtcccccgccagcattctggatgtcagaggagggtgcgtgtgatggc

SEQ ID NO: 342028 - DNA, 372 bp, Homo sapiens
  chr14:100749240-100749612
  hypo
cggggcagttcttgcggcttgctttctcacacacaggactgggaactcccaggatttggtctcacaccagcaagaaatgcttctgtaacctttcagctccaaggtgggctcaggagcaagagggcgttttaaagagagcctcacccactgttcagaaagcacagcccagtgaaatgcccacgcagccggacctatgagcccatgtcagccctggaagctccggagctaactgggatggactcggaagaacttgaccaaatacactgagagctacttaggatttagccaaaagcaaaatgcagagcagagcttcctccctctggttggggccttggtgtctgatgttctgcagagcaaggttcagagtgaggc

SEQ ID NO: 342029 - DNA, 205 bp, Homo sapiens; identical to SEQ ID NO: 335022
  chr14:100751381-100751586
  hypo

SEQ ID NO: 342030 - DNA, 31 bp, Homo sapiens
  chr14:100843925-100843956
  hypo
cgtgagccaccgcgcccggtcgttttattta

SEQ ID NO: 342031 - DNA, 191 bp, Homo sapiens
  chr14:101096264-101096455
  hypo
cgggagggatgcgctggccgtggggaccagtgcccgccgctgcagctgatcctgccctgtcccgtctccatgtgaataaagccttgttccagccagtgcctcactgcgtgtattccttggcgactcggagaccaagatccaggggtacccggacttctactcccgatagcaggcaacggatgcctcctgct

SEQ ID NO: 342032 - DNA, 150 bp, Homo sapiens
  chr14:101134041-101134191
  hypo
cgaaatgtcctcggtcacccactcacgttccaggaggcaactgggccccgggaagcgaattctccaggcctcctgaggagcattcattagccacgcacacagatggagagcagcggcgcccgggaggccggaagcggcccctcgctgctc

SEQ ID NO: 342033 - DNA, 536 bp, Homo sapiens
  chr14:101200685-101201221
  hypo
acaagacctgcagccgcccggtgaccaactgcgccagcagcccgtgccagaacgggggcacctgcctgcagcacacccaggtgagctacgagtgtctgtgcaagcccgagttcacaggtctcacctgtgtcaagaagcgcgcgctgagcccccagcaggtcacccgtctgcccagcggctatgggctggcctaccgcctgacccctggggtgcacgagctgccggtgcagcagccggagcaccgcatcctgaaggtgtccatgaaagagctcaacaagaaaacccctctcctcaccgagggccaggccatctgcttcaccatcctgggcgtgctcaccagcctggtggtgctgggcactgtgggtatcgtcttcctcaacaagtgcgagacctgggtgtccaacctgcgctacaaccacatgctgcggaagaagaagaacctgctgcttcagtacaacagcggggaggacctggccgtcaacatcatcttccccgagaagatcgacatgaccaccttcagcaaggaggccggcgac

SEQ ID NO: 342034 - DNA, 234 bp, Homo sapiens
  chr14:101250117-101250351
  hypo
attgacccggaggtcgaggcttccagagcgggccagccggcagccccaacgtgtgaggctgtgcacctgctggggagggtttttttgatggcgacggcgtgaggtgagcgggtttgctctgggcggtcgaggattagcgccgactgagagggtcaggtgcaccggggctttgttcagacctgtttgccttttgtcccccgcctgcagaaagcccaggctgcatgatgtcatttc

SEQ ID NO: 342035 - DNA, 710 bp, Homo sapiens
  chr14:101349283-101349993
  hypo
cgcggtggagggacactcgtaaaaggtctcgctgtgatcactgtctccagcctgctgaagctcagagggctctgattcagaaagatcatcggatccgtctgagcttggctggtcggaagtctcatcatctgcttccttcgggttaaacacgtcggccaggtctgagtatgggtgtggcagtccgggtagcaggctcatgccgtgcctctctagggcaatgcatggcgggggcgggcggaagcagttcttcaggcagtagggagagtggaaggtgcagcggcctttgatccagtcgacttcgggggcgtggactcggagccagcggatgcctaggaccacagagaagttcggtgaaggtacgatgtcaaattcgatggactcctggtggttctggtggatacacaccaggggctccgtgtagagccagacaggctcgttgccaatcagcgagccgtccacggattggaccggctgtgggtacggcttctcgtagagctcgacgtagtgctcttgggcgaacttctcatccatgaagttgccgtcagctcccgaatccaccagggcctggaccgcgacgctgtggtaggggttcactctcaccatgagcagcaggaagaggtgggcgcgattgatgtccggatggacttcgctgggcaaccagctgctgaccatccacctctctggagcaggtgagtcgatccaggtcaggt

SEQ ID NO: 342036 - DNA, 415 bp, Homo sapiens
  chr14:101489771-101490186
  hypo
cgctgtcttcggggaggaacggttggacccaccaccacttctccatgacacccgaagagatgattttctgtatggcatgtgtttttctgcatgatgcaaaatggcataatctcgctcctcttaaatcaagttctgccttgggaaatcgcgccatccctggggaggagaccttgattcttcccggaatcagtgccattccatggtgctcaatgacgtggttgactacgctacgcttattcagtagacaccgtgacctgcttcttctcagcgtcaaatgcagcctagaagaagcgccctcaggcaacttcgtggacatgagccttcttccagccaccaccaccaccatcgtgcggtacttgaagaaatggtttaccgtcccacatacattttgaatatgtatgtgggatggtaaacc

SEQ ID NO: 342037 - DNA, 183 bp, Homo sapiens
  chr14:101492091-101492274
  hypo
cgtggcgcgttcgctttatttatggcgcacattacacggtcgacctctttgcagtatctaatcccgccttgcaagctttcctggagctaacatcaactgcgggggtgggggccactaggtctgcgctcagtgtgacccagcggggtttgtgatgtgtttgtcttgtgtgtgacgataactcac

SEQ ID NO: 342038 - DNA, 204 bp, Homo sapiens
  chr14:101970419-101970623
  hypo
cggtcgggcctctgaagagtgagagacagtggtgcttacagctgggtgatgccagagatggagagaagcagagagatcccagacatgttctggatacggacacgacagatgcagaggagcgtgaggaagaccccggggctgagccctaaccttggcttgagcagctggggctgagttggcgccatggacgtggcagcagagaac

SEQ ID NO: 342039 - DNA, 493 bp, Homo sapiens
  chr14:102068308-102068801
  hypo
cgaggagcctggcacgggactggcgcttgtcagcccctcatgtgggtgtgcctgcatctgcgtccccacgtcgcacaggatagggcttatgcatggcctagcttgtcgtgtgaggttgactggcatgtcacaggcactgtcacagattctcagagcccaggagcacatcccctgaaggactcctcagccggggctgggctggaagcagggcctggagaaggtcagagaggccccgccctcctggcactcccagggcaggggacgcagcacagagcgggtgccggtcagccagggaggccgggacgggacgcagcacgaggagaacactgcgcaaggcaggcccgcagtcagtcaggacagctgcccagagtaggtggcgtttgggccaggcttcgcaagctgtgtgggggttcgcccagcagaagacgggagagggcgttccaggcagaaggctcagcatggcccaaagcacagaggcacggcaatgtccggc

SEQ ID NO: 342040 - DNA, 247 bp, Homo sapiens
  chr14:102230139-102230386
  hypo
cgccacttccattgcaagctgccaggcaactcagtggttagttctttttcttccatcaccttgttttccttcaaaccacctctgctactgacgtcctgggctagctccctatttctgttgacggtcccttggcctctttctccaataatgttggtatttgaaaaaatttacctagttttggtattttattattgttcacattgtgtgtgtgtgtgtgtgtgtgtgtgggcgcgcgcacttgcgcgtc

SEQ ID NO: 342041 - DNA, 72 bp, Homo sapiens
  chr14:102331847-102331919
  hypo
cgatagagtcaaggagcaagaattccccagaagggagggagtcgtgtgcttctctgggcagatgaaacggtc

SEQ ID NO: 342042 - DNA, 86 bp, Homo sapiens
  chr14:102335792-102335878
  hypo
cgctaggtgaatggtaagtgtgtgttgagctttctaaggaactgccaaaccgttttccaaagtggctgccccgtgtgattccccca

SEQ ID NO: 342043 - DNA, 463 bp, Homo sapiens
  chr14:102355922-102356385
  hypo
cgtgtcctggggctcccctagaagcaggcgcagtggacagagatgtctcagaggaagggagctgggtctgtcgcagatgggtgcttcagaaagatcgcacctgagacagcacggaggatgcgtgtgggtgtcagtggggaactgggcaggtagaataagaggagttcaggaatcacttctaccctttgcaggaactgtgctaaatattgcgggctttaaaattaagtaagacattggcctatgttgaaatacagcaaaaacgtaagatggattaatgaacgagtaaaagatggatgaacagatgtgcgtgtgatcaagcagatggagcacattgctcgtggtcgaatctggtggttgaaatgggtgttcactgtagaattctttccgttttcctagatgcttgaaattttccaaaataaaatattgagaaaaaaattcgtgcaagaccaagttctctgccctc

SEQ ID NO: 342044 - DNA, 131 bp, Homo sapiens
  chr14:102375780-102375911
  hypo
cgcggaatgagcaggccttgcattttagaccttagggatcctgtgcgatgtgggactgttggaatatggagcagcctgagagtggagaggcgagggctcagcaggaatgcgtgctcccaggctcaccgtgc

SEQ ID NO: 342045 - DNA, 99 bp, Homo sapiens
  chr14:102418541-102418640
  hypo
cgcatgagccaccacgcccagtgtattcagattttcttcgtgtttcttttctcttccgggatcccatgcaggacaccacgtcgcatttagttgtccacc

SEQ ID NO: 342046 - DNA, 300 bp, Homo sapiens
  chr14:102467327-102467627
  hypo
aaagcttccctgcccggttgcgacagtatgcgtcctatgagtttgttcagaggcttctgaaaggttacatgaaggtaggtggccagtatcgcacggtgatgagtgtccattagaaacgcacctgcacagatcactttgtttactttctccacagataaatatgctggtgattgaactgaaatccgaagcacttaaagaccgccattggaaacagctcatgaaaaggcttcacgttaattgggttgtttctgagctaacccttggccaaatctgggatgttgacttgcagaaaaatgaagc

SEQ ID NO: 342047 - DNA, 502 bp, Homo sapiens
  chr14:102493497-102493999
  hypo
cgtaatgtttcagaatattccgtcaacctcaaggccacttgcttctgattggtgttagtggagcaggaaaaactaccctgtctcgtttcgtcgcctggatgaacggtttgagtgtgtaccagattaaggtgcgtctggtcggtggcctcttaatcccagcaacagatgtgtgtgcagagctcagtgagtaggaatggacctaacttgcctctgcttctgtaggtccataggaagtacacaggggaagactttgatgaagatctacggacagtgttgagacgttctggctgtaaaaatgaaaagatagcatttataatggatgaatctaatgtgttagattctggattcctggagcgaatgaatacccttctggccaatggagaggtaattaggtgacgtgttgcgttgcattacgtgttaccgggggaccagtaagtcagcactgtgctgtttcccaggtgcctggtctctttgaaggagacgagtatgccaccttgatgac

SEQ ID NO: 342048 - DNA, 608 bp, Homo sapiens
  chr14:102500434-102501042
  hypo
gttcattgcctacgcgggttactttgaccagcagatgcgtcagaacttgttcactacctggtcccatcacctacagcaagccaacatccaggtgagaatcacggggagttcaaaaaggatgtgcgagcagtgtgaggcaagctggtgtttagtgcacagttagagtcttgagaacagtcccatctgtggctgtgaagaggaggaaaggtaacggccttgcctttcagttccgtacagatattgccaggacggaatacctttccaatgctgatgagcgtcttcgctggcaggccagctccttgcctgctgatgacctttgcacagaaaatgccatcatgctgaaacgattcaataggtatgagctcgggtgccaaggagaggcatgggaggaatgtgggtggtgatcttgaatttttttcaaaatacacccttgtttgaagagaggaatagaaaatggggcgtgggcatacagtgctggcagcttggtgctcctctgatggtggggcgtgtgctgttctcgttattgtcaagtgtctgagttattctgcagtgaatgcttcttgtaaccttctaaaatcgattggcaggggccaggcacagtggatcac

SEQ ID NO: 342049 - DNA, 800 bp, Homo sapiens
  chr14:102516079-102516879
  hypo
cgtgcctgaggcgtacatcactgccaccaggcagtatgtggcccaggccaacagctggtccctggaggagctctgcctggaagtcaacgtcaccacctcacagggcgccacccttgacgcttgcagcttcggagtcacgggtgagtggagtctcacagaaaatactggctctttgcaggtgacctcggtggcctgagaccattgttcccagatacatgcacttagggtgaccggctggcagttgggtggagcctctgggcgccctgtgactggggtttgtgtagctgttgtgttcacctcagcctgggttttggcttccgcctcacaggtttgaaacttcaaggggccacgtgcaacaacaacaagctgtcactgtccaatgccatctcaaccgcccttcccctgacgcagctgcgctgggtcaagcagacaaacaccgagaagaaggccagtgtggtaaggaggcactgcctttcccaggcattctgcagggacccctgcggtaacaagggcagaggcggctcctcttctatgcctgggttccacttggaacgggaaatgaggttcacagaggaaatccatttcgcacctgtccaaacctctccttgccgggccccatcagctgtcccgggcagtcttccagttttcttacttttcccttaagccaccagtaaacccctctgcttctgcaggtaaccttacctgtctacctgaacttcacccgtgcagacctcatcttcaccgtggacttcgaaattgctacaaaggaggatcctcgcagcttctacgagcggggtgtc

SEQ ID NO: 342050 - DNA, 107 bp, Homo sapiens
  chr14:102521617-102521724
  hypo
cgccccacccaacagagccgaccaggctgggaacaccgagaccgagagcgcgtggctgtgtctacaaaggcctcctctttgagggagacacgcgaggcacgggtggg

SEQ ID NO: 342051 - DNA, 360 bp, Homo sapiens
  chr14:102523353-102523713
  hypo
cacaggtgcacacgcgcacacacatgctgcacagttgcacacacgtgcagacacgctgcgcagatgcacacgtgcacacacatgcacacccacacgctgcagttgcacacacgtgcacacgcacacccacatgcacagttgcaaacgtgcacacactgcagatgcacacacgtgcacacacatgcacagccacaagctgcatagttgcacacgtgcacacgctgcgcagatgcacacacgtgcacacatgctgcacagttgcacacacgtgcacactacacagatgcacacacgctgcacagatgcacacacgtgcacacatgcacacccacacgctgcacagttgcacacacacgctgc

SEQ ID NO: 342052 - DNA, 182 bp, Homo sapiens
  chr14:102682061-102682243
  hypo
cgtgaggttgtcctgctgtagacaccaggcccgtcgtcggtgcagagcgcttcctacacagggcagtgggggacgttccatttgggatgagaagaactcatgatttacattgtcttactatgaaataccatccctcactcttgacagacgacgtagctgatctgagcagcgccctggcaccc

SEQ ID NO: 342053 - DNA, 118 bp, Homo sapiens
  chr14:102691861-102691979
  hypo
gagatggcatcactcgagatggttagtcctagctctgcctcagcccagtctgtcacccttcgctggttctggaatgcagtttgcatttggccatcactgtactaacgctgtcagatac

SEQ ID NO: 342054 - DNA, 604 bp, Homo sapiens
  chr14:102939202-102939806
  hypo
cgaggctcccctgggctgaggaaggcgcttctcccgggctgctggcactgacgattgtttgctgagatcagaagtgaagacaagctctgctgccaggcgctcgccttgtgccaggctaatgcctgaagcacatctttccctcagtcctcacaacaacctgggaagtgactgcgtctttccccatttgacagaggagaaaaccctagctcagaggttcagaaagttgcctgaggcctcatagcgggcaggcggcaggggtgggacatagacccaggtgtgtgacacccgcctctgcctctcctgtggctctgaggtccaaggcctgggccaggaccaactgcaggatggcagcaagcaccaggttgtggcgacatgtcataggcttagtggcctcacacgtcgtattttaggacaaagcctacacatgcgaatctttaaatcgcagagggtcctgcaaatgagcccaggagtgaggggagatgggggttcactctgaggactggaacgtcagaagagttggttgaatctgaggattggagaacaagcggggtttatgtattttgattatgttctacatctttccactttgttttatttgttcttc

SEQ ID NO: 342055 - DNA, 251 bp, Homo sapiens; identical to SEQ ID NO: 267173
  chr14:102968260-102968511
  hypo

SEQ ID NO: 342056 - DNA, 479 bp, Homo sapiens
  chr14:102973253-102973732
  hypo
cgcctagggtgctccgggcctagcctttgccagtgaggtccaacggctgcaggaatgggggcagcggcagctcgtccagggcctcggggaagcggcctggagagatggcggtgaccagcacctgcatggcgcgcgcgaagagcgagggcggcgccaggcccgccagccactggaacttgtcctcacccagcagccgctgccagcgcggccggtcgcccagcagctcctggcgggccgagccggcggcacccacgggggtgtacagcgccaggaggtccagcagcagcaggcggcgctggcgcggctccccgggagctgaggcgggggctccggcggcggagggagtggccccggcgtcgcggcccagctggcgcagcagcagctcgagaggcgtgaggccgccgccgtcccgcagaccgggcgaggcgccgtggcccagcagcaggaagaggcactcggggcgcgccagctcacaggcc

SEQ ID NO: 342057 - DNA, 376 bp, Homo sapiens; identical to SEQ ID NO: 335030
  chr14:102975682-102976058
  hypo

SEQ ID NO: 342058 - DNA, 140 bp, Homo sapiens
  chr14:103216371-103216511
  hypo
cggtccccgcggcctcggtccctgcagccgcagtggcgcctgcatggagggggccccctaatcatggtgcctcggctgtggaatgttctgggagctagtcagaacggacatggctgccgcagctgaccctcccgcctggc

SEQ ID NO: 342059 - DNA, 367 bp, Homo sapiens
  chr14:103369461-103369828
  hypo
cgcgggtggcaggcctcatacaggggcctctgactgttctgctcctagcctgtctgtatttgatggaaggtggtgcagcattttccgagtcctaactgtgttttgctttttaacacctttggtttggaagcgagtgatagacagccaagcagagaaactgaaggagcttgacaaggagatccggcccttccggcagaactgggaggaagcagacagcatgaagagcagcgtggagtccctccagaaccgcgtgaccgagctggagagcgtggacaagagcgcggggcaagtggctcggaacacaggtgaggcaggggccggggccgggccagcagtgtgcatctgggccccgggcgagtgctggggc

SEQ ID NO: 342060 - DNA, 959 bp, Homo sapiens; identical to SEQ ID NO: 335033
  chr14:103394622-103395581
  hypo

SEQ ID NO: 342061 - DNA, 365 bp, Homo sapiens
  chr14:103409913-103410278
  hypo
cgccccgttctcggttcgccgagcccttctgcccaggggcctatgcccgccgacggggtcctctgctgaggcctctggaagaaccggccccatgtgctcagggagagaggttgctgagcccgcctactgctggtctgagacgtgagatctgaaccatgctctctgctgcgggctggcatggggcccacctctcccgatgctctgtgactactcaactaagggactggaagacaaaccaaagcaaaatcgaacacatgctgactgtcggtgggaaaagcagcaacagggatatgcaacagaaaacatatacatactacaggcgacaggagccgcaggccacatgagctcctgcgcgcgtgccctcc

SEQ ID NO: 342062 - DNA, 129 bp, Homo sapiens
  chr14:103417432-103417561
  hypo
cgtcttcagcatgcgcacagggaaagggcccatggcagaagcctgcttccatgctgtccctgccagcccgggccgcctcccacacgtgggagtttctacacggcaattcaggccagcggtcatggggac

SEQ ID NO: 342063 - DNA, 279 bp, Homo sapiens
  chr14:103423623-103423902
  hypo
cgcctctgtctccatctctgctgcccactctccacagctgtgactcacacactcatggacagtactggctgtaaactcacttgctaccgggccctctactctgttaatgttacagaaagctaccgctttcctggccgcctccattcagtgatcaagcaccatctctggttctctggaatccacttattcctccccacagcagtgcccggctccgcagcaacgagagaggcaatgacttgtgcagaaacaggcttatcaaagatctggcgggcacttacc

SEQ ID NO: 342064 - DNA, 142 bp, Homo sapiens; identical to SEQ ID NO: 335034
  chr14:103430237-103430379
  hypo

SEQ ID NO: 342065 - DNA, 241 bp, Homo sapiens
  chr14:103433137-103433378
  hypo
cgcaaggggtgtgaacggtttgccccaagtccttcagtgggttggtgggggcgtatctccacctctattccaacagaaccactgccccagacatgagaagttctggggaacagcagtgagacctgcaccccagcctgagaggcacggcctggcgtggagcacaggatcaggcagaagaggcggggcagaccccatggactgagcagggagcggattcacggccgctaatggggccgcgcac

SEQ ID NO: 342066 - DNA, 239 bp, Homo sapiens
  chr14:103433869-103434108
  hypo
cgtgaatgcactcacgcaagcctagacggtgcggctgccgcacaccaggccctgtggtacagcctgtcaattccaggccccaagcctgcataccatgttgctgtgcgggacgctgccggcggctgtagcacaatgctaagtatctgtgtatctcaacacagaagaggtagagtaaagtacagtattatgatcgtacgggacgcctgttgtacacacagtctatcattgatggaagcatc

SEQ ID NO: 342067 - DNA, 343 bp, Homo sapiens
  chr14:103977203-103977546
  hypo
gaggcgagaccctccgagcggagtccggctggttaaagggcctgcacgggtctctcacagaagaaggaaagctggtcctgagggtggagccaggggaatctgggggccacttcagcattctttgttgccattggctttggttcagtaagctttgttgatttattttgttgttgttattgttgttagagtgatggggctgattgcttataagttctgaggttcttatttgcgtttccagctccctgggtattcattcatacctggtttctggctgtggtgaaatgtcttctgaccaagtgggttgataaacagggggcttcgctggagcgggggcagggggcgc

SEQ ID NO: 342068 - DNA, 151 bp, Homo sapiens; identical to SEQ ID NO: 267230
  chr14:103977771-103977922
  hypo

SEQ ID NO: 342069 - DNA, 144 bp, Homo sapiens
  chr14:103986355-103986499
  hypo
ccaccgcagccgtgtccacaccgcctggggagacagcaagtcagggcggaggaaacagggctgcccaaaggccacgggaagccgcagcacctgccctgctcacctgtgcctcgcttctgaagtcgcagccgcttaagcacctcc

SEQ ID NO: 342070 - DNA, 1292 bp, Homo sapiens; identical to SEQ ID NO: 335041
  chr14:103988427-103989719
  hypo

SEQ ID NO: 342071 - DNA, 136 bp, Homo sapiens
  chr14:104000005-104000141
  hypo
tggctcggggaacccgcgcctgcctctgggacctgtccctttccctgcgagctcccccttctgggtccaaaggctcctggctcattcatgggcccggcatctcctgccggccacgggagcccgctggggaggatgc

SEQ ID NO: 342072 - DNA, 733 bp, Homo sapiens
  chr14:104000403-104001136
  hypo
cggcagggaggggctgtcatgctcgggctctgcttcgagtaggcgcctcctgttcccgggagcagcgacagcctctaatttcctgtgacagcagcggcccccgcaccgccccacgctgccgtgctgtcagagctgctccgggcccagagctccagcagccctgtggaaggcaggagagcagtgcccgctgtgggccaagtgagacaatggcagcgcgggcttgacccggtgcctggcacatgggagggcctggcatggctaagctgggtgacatgaacagcggcgccaggccccatggggggctgtcagttgagggccaggcccctctgccctgcagtcccagctcttggagagcttgcagtctgtgttggggctgtcttaggctggcctcagaccctagggtgggagtccagggatgctagggccagacgggccaggctctgccacccctgccctctgaccctcgggtcctgtttcccacaggcgggcgcttctgctccttctcaccgtgcatcgagcaggtgcaacgcacatgccaggcgctggcagcgcgcggcttctcagagctgagcaccctggaggtgctgccacaggtctacaacgtgcgcactgtcagcctgccaccgcccgacctgggcacaggcacagatggccctgccggctccgacaccagccccttccgcagcggcacgcccatgaaggaggccgtgggccacaccggctacctgacctt

SEQ ID NO: 342073 - DNA, 135 bp, Homo sapiens
  chr14:104047694-104047829
  hypo
cgacgacagtggatctgatcaccgagacggctgctgagtaactaacgagtggggcgcgtctacactgtggaggtgctggacagagggaggagtcgcctcctgggctggtcggagtaggaccttgggaggtttcat

SEQ ID NO: 342074 - DNA, 1190 bp, Homo sapiens
  chr14:104047919-104049109
  hypo
cgggtaactgaaaccatggaaagaaaaaccatggatggaggggacagctgtgctgccgccatctcccttacacagttgagtaaaccgaggcacagaagaaaatgaagtagccccagatgacgtaggaaatggcagaactgaagggaaaagcagagcagggggctgtagagttaaactgttcttcattccggtggcactagacctgcccgggcggccagaggacacgtggctcctgtcctgtctgccgtgtggctaggggacagccgtgcttgtgctgtgccgtctgagtgtttgtttctgtctgtgggaataaaggggttgccagacaccctccctgctctgtggagggagggtggaatcatgcctttggccactttgcccactcccccttgggccggagcatcagcattagctgtgccacagggtggtatgcgctctgctgaaggtggcaccttcagggaaaggcagtctgccggggaggctagcgagcaccctgggtaggagctgagcgtggcctccgcgcctcctcatgggaagtgctggagatgcaggagcccctgagccagagcccagcgctcttacaagagacctcacttcctgttcggggactggggctgctaagtcagagtgcgcctcctgcacccgccaccctggatgtggttccattccctggtccctgagccatagctggggggcatgagactgtcccctgggctgctttggggaccctacttcagggcagccctgccactccctgtaacgggctgtgggtcctgccctgtggccttcctacctctcttgcgtgtgggtgagcctgagcgtggccaccgccctgggagtgccacagaggcaagcggcactggtcctcatgtgtaaacagccccaccagcacgcggggctggagtagtcaggccgggacctgtcccaggaatgggcaggctgttaacctaggatgcattcaagttaggacacatttcattcccgtgtagcggtggctcccagttcctccgcagaacctgcaggagtgtgcgtgatgaaacccgtcactcgttgtgtatggtagacatacctgcctgggtcgtaatcacttgtgaagaaaatgaattatgctgtgacctttagatacgattcacataccataaaattcaccctgccttttttttttttttttgagatggagtctccttgtc

SEQ ID NO: 342075 - DNA, 78 bp, Homo sapiens
  chr14:104158805-104158883
  hypo
cgctggcaggtctgctgcagacccgcactcggcccctgctcggcccctgctcctgcagagggctggggacgccgccac

SEQ ID NO: 342076 - DNA, 346 bp, Homo sapiens
  chr14:104159197-104159543
  hypo
cgtgctgtcagtttgacactaaaacctgaagcactcggtgcagttgctcgggcctcacacagacacatcaggtttacatctgaaagtactgcctcccttccccatcacggaggccgtttgagttttcatccactccgccctttggtgtggctgtcagtgggtggccgggtgcctgtggctgctctagaacctgtttctcaggtgcctggggcccacccggcagctcgagctgttgggacttggcagtccctgcccctgtgctggtgctgagagttcgcgacagtggccaggcactgccctcccagttgtccagatccactaatcctcacagacaggccagtgcccc

SEQ ID NO: 342077 - DNA, 365 bp, Homo sapiens
  chr14:104159892-104160257
  hypo
cgaaataattgtctggccgactcgcgagctctgagtgccagccacactgacctggcccactgagagccagcagggctaggtaacctgtcttgggagtgtgagaccgccccgccctgccacgcccctcaccgccctgcccggaggcgccagccgcactccttggcttcctttcctagatagtgacgtccaccaaccttggaggtgccttttcaaaacacccgggaggccgtgcctcagcattctgttactcggcctgcagccccagtgccaggagccaccccgaccgcgacccggccaggctggctcagggaggccgaggtggcgctgaggtggcttcagcacgctggggattggctcctgctcac

SEQ ID NO: 342078 - DNA, 261 bp, Homo sapiens
  chr14:104164990-104165251
  hypo
tgagaaagtggagccgctgccctggaagagctgtgtctgaaccaggctcccagctgtgccacggcccaggcagacgcgttttaaaggcccgagccccgtgtgtcggggcttctcaggcagggctgttgtgcagccgccaccgtgtcagtgggactgggtcccaggtgtccctcgcaccccttcggcactgatcgtgtaggaacaggaggaggggggcaggtggggggcagagagcacccgcagggtccgggctgggcagcc

SEQ ID NO: 342079 - DNA, 665 bp, Homo sapiens
  chr14:104194175-104194840
  hypo
cagtgcgcggagtgcgccctcgtgtccctcaaggaggcggagttctacgacaagcagctcaaagtgctcctgagcggtaaggacgggtgtcctgcacagtcccgcgcgctccgccagccggctcctcgtgtctgtggcgatgctgtgggctgtgcacggggcgttctgcttctctgacgttctctcgccctccctcccttccccgttttcttctggattcgtttagaagcggttatagagccttcccttcttttcagaggcggaatgtcgtctaaaatgttggtgctgactccgctgggcacgtccatcaggtgggaggggaggccctgggcccaggcagcaccttcctccttcccccgggtggaacccggcgccggcgctcgggcgtttgcaaccactgtggctcctcggaggggccggagacctttgcccaatagcacgatgcagacccggttttgagccatctctggggacctggtgtgggagaagggcattctccaggggcatagggtgtgcctccctggaatctgaacaacgagcagcgccttctccccactgtccgtccacctctggccactgccgtcccagcctcctgtcccctgcctgcccgccgtggggtctgggaccacctgccttcctgcccacagctccatcctgtgtgaaac

SEQ ID NO: 342080 - DNA, 457 bp, Homo sapiens
  chr14:104202370-104202827
  hypo
cggtctccaaggcgagcccaccaccactcagtctcgctttcgtccttgcgcctcaggatggtgagggcgtccccttcgtggaaggacagctcgtcactgttctgggcctcgtagtcccacagagcatacgccacacctttgttcatcacacccagcttttcctgcacccctggagccagagagcaatggtcaggcctcagcagagggtggcctgcagcaagggaccctgctcgaggaacaggacacagtcgtgctgctgccgaggctgctctcagcaggccccacagaggccagcgagggagatgagacactattgaagactagggcccccacccgatacctcccctgcccggcccagctgctgctcctgctgccggccctttctaagtcctgcaggacagacaggacaaacgagctcctgagccccagggcaagagtgtgctgttcttaaggtgac

SEQ ID NO: 342081 - DNA, 351 bp, Homo sapiens
  chr14:104395215-104395566
  hypo
cgacgcgcggcccagagcggtgcctgtaaggaagctgagctagaggtttttttttttttttttttttcagttcttaatgtttaacagactagtttttgaggcactcaggttttcaggataacggagcggagggcagaggtcccataggccccttccctcccagagtttcccctgtgagcatctgcgtaaggtgtgggtatttgtgacagtcggcgaacctgcatcgctgcgtcttcgtcacccggaggccatcgttacaggagggttcacgcctcgtactggacgttctgtgggtttggacaaacgcctaacgtcacgcattacagagttcactgacctacagatcttctc

SEQ ID NO: 342082 - DNA, 2453 bp, Homo sapiens; identical to SEQ ID NO: 335043
  chr14:104603142-104605595
  hypo

SEQ ID NO: 342083 - DNA, 46 bp, Homo sapiens; identical to SEQ ID NO: 267267
  chr14:104617752-104617798
  hypo

SEQ ID NO: 342084 - DNA, 789 bp, Homo sapiens; identical to SEQ ID NO: 267268
  chr14:104618014-104618803
  hypo

SEQ ID NO: 342085 - DNA, 820 bp, Homo sapiens
  chr14:104623041-104623861
  hypo
cctgggtcccggggcggcttgttctgctgacgtgccgtgcctggcctctggcctgtgccacttgggacaccctgaggacgctgggccttccagaccagcccacgtcccctcagcacggggaccccagtcctctgctagcctgggtacaaaggacgcctcgggcagtggttatcgactggacacttggggccgaatgacgcttggcacctgggtgaccgtgacctgaccaggccacggtgcccaagggggtccttggagagcttggggcactgggcccttggggaaggggccggggcgaggggtggccaggctgaagcaggctgccttccctgccttgcctggggttgcatccccccacgccgcccaggaccaggtttggcctgagggttcggggtcccacgtgtctgggaatggaacgtgcggaggtggagctcacgtttgctgggctgtcccgggcgtttaattacgtttgtgcttcattatgaggaggcctccctttctgggatttatttgagctaatgagttggaaatgccagggtagtatttcagatgagggagcgccacacatcaccgtacgtggggcaattagtgttcctgccaaatagttatcgtggtttcttctctaattacgccgctgggtgctcccaggaggctcaggggtgagagggtggggggtctgtgtccatcggtcttgaccagtgtggtcgctgcgattctggagtttgatgggggagaggcggaaagtctggcttctggaccaccatctgcctccctctctgcctccaaggagtcctgctggggcagaccgcccacacacccc

SEQ ID NO: 342086 - DNA, 226 bp, Homo sapiens
  chr14:104633637-104633863
  hypo
cgtggggcgggacagccaggtcacggggctcccagggactaaggttgggtttgatccagggaagccccttgcgtaggctccactgagacgcagccctgagggggctgggggcaggaggggactctctgctctccagagtcaccgtgtgcaggcgggcccctgccatgggaaagcgggatgcgtgatgggttgattctggcgccgcgctccacatgggaagactgcc

SEQ ID NO: 342087 - DNA, 600 bp, Homo sapiens; identical to SEQ ID NO: 267273
  chr14:104639202-104639802
  hypo

SEQ ID NO: 342088 - DNA, 636 bp, Homo sapiens
  chr14:104640046-104640682
  hypo
cggaggccgcagccgcctgcacctcatcgacctgggcagctgtgaggcggcggctggcagggccggggaggctgctgggggtcccctgtgtctgtccctgtcggccctgggcagcgtcatcttggccctggtcaacggagccaagcatgtgccgtatcggtgagtgtagggcctgggcaggtgccgaccagggtggccccttggtgacctggtaaatccgtgtctggtgtgcccggtgctgctgtggcccccagctcctcagggctttgctcctccaccacctgacaggcctcgctgcccgtgggctgcctggggccccacgctgggctggtgccggagctgggtgggaaccagactgatcccagggctgcccttggccagcctgtccccgaagctcccttcccaaggccttggcatctgaaccgcctcgacccgcagggaccacaggctcaccatgctgctgcgtgaatccctggccaccgctggctgccgcaccaccatgatcgcccacgtgtcggatgcgccagcccagcacgcagagacactcagcaccgtgcagctcgccgcccgcatccaccgcctgcgcaggaagaaggccaaggtgctccccacctcctgcccgccccatctcggggc

SEQ ID NO: 342089 - DNA, 657 bp, Homo sapiens
  chr14:104641166-104641823
  hypo
cgctcccagcgtttggtgggacatggttggtggtgcctgctgtagttttcatcacagtgaccgcagcattggccctgtgctctggggagggtcggggaagcgggggcgtgtaggggagactgggctcggcagctccacttttcttcccccagtacgcctccagctcctctggcggggagagctcctgtgaggaaggccgggcccgtcggcccccgcacctgcggcccttccacccacgcactgtggccctggaccccgaccgcacgcctccctgcctgcccggtgaccccgattactcctccagcagcgagcagtcctgtgacacggtcatctacgtggggcccggtggggcggcgctgtcagaccgggagctcaccgacaacgaaggtccgcctgacttcgtgcccatcatccctgccctgagccgccaccggccctccaagggtccccgagacgcagaccacttccgctgcagcaccttcgcggagctgcaggagcggctggaatgcatggacggcaacgagggtccctcaggaggtccaggtggcaccgacggagctcaggccagccccgcccgagggggccggaagccctcgccaccagaggctgcatcccccaggaaggccgtgggcaccccgatggctgccagcacccctc

SEQ ID NO: 342090 - DNA, 687 bp, Homo sapiens
  chr14:104642174-104642861
  hypo
cagtgaccctgcagcggccagtggagctcaacggcgaggacgagctggtgttcacggtggtggaggagctgtccctgggggcgcttgccggagctgggcggcccaccagcctggctagcttcgacagtgactgctccctgcgggccctggcctcggggtcccggccagtcagcatcatcagcagcatcaatgatgagtttgacgcctacacctctcaggcccctgagggggggcccctggagggggcagcctgggccggcagcagtcacggctcctccatcagctcctggctcagcgaggtcagcgtctgcactgccgacagccgtgaccccacgccgcagccccgcttcagccccgactcgctggcagggcttgaccctgggggcccccctgccctggatggttccctgggggatggaagctctgggttcctggggccagacagacctgacagtcctgggccaacctggggtccgtgccctggggaagtggctgcagtggccccatcccgacccggcagggagccccaggccgggccctcgcggtgggcatccgcagcccagaccatccactccagcctcccccggaaaccgaggactgcctctgccaccacccgtgtgggctgtgctcgcctgggccagagcccacctggccgtggaggcctgtttgaggacccatggctgctcc

SEQ ID NO: 342091 - DNA, 1070 bp, Homo sapiens; identical to SEQ ID NO: 267277
  chr14:104643153-104644223
  hypo

SEQ ID NO: 342092 - DNA, 221 bp, Homo sapiens; identical to SEQ ID NO: 267278
  chr14:104645048-104645269
  hypo

SEQ ID NO: 342093 - DNA, 1133 bp, Homo sapiens
  chr14:104645553-104646686
  hypo
cgcccgccctgcctcccagggtctggcgtgcgtcagtacaaggctgcggctggcggagcgcaggcagcagcggctgcgggaggtgcaggccaagcacaagcacctgtgtgaggagctggccgagacccagggccggctgatgctggagcctggccgctggctggagcagtgtgagtcccgcccgcccacggacccagcccggcccaccgtgtgccctgacagctgccctcccctcccagagccctgttgctctcctgtacctcgtggtgggaaggctggaaggcagggtcggccgggccaagatgcctttcctggggcctctggggggccaggtggctgcccccagcctcgggcctgacgcaggtgcccctcccctctcctcccctccccagttgaggtggacccggagctggagcccgagtcggccgagtacctggcggccctggagcgagccacggcggccctggagcagtgcgtgaacctgtgcaaggcgcacgtcatgatggtcacctgcttcgacatcagcgttgcagccagtgctgccatcccggggccgcaggaggtggacgtctgaggctgggcgccggacaagaggagggggcgtgcagcgggctggaggacgggacgtgggacggagcgaggatgtggtgggggctgcggggggaggatgcggaggggtttctgtgcaggacgggagtctcagagaggagacggagtgtgggggagggagggccggccacgcggtggacagagcgagggtgccagggtgaccagaagaccgtcaccacccgacagcaacgcaagtgcctttgaccttgatttggacttttctcccttttgcatttggtgctacagacttgagacaccagcagaagttgtgttcagcccggccccgctgcgcctgtccgggccggggctggcgccggttgtgtttgtgtccaccttgccttctttgcagccaagcagtttttgtggagtggagtgggacttacctgcacgccccaggggtctttcaggattcaggatgacttttcttttacaatggtttcctctcggcagagcccgggttgtgggggatctgtgtggggttctcaacgcagatccatcctggggtctcccgggcagggatggct

SEQ ID NO: 342094 - DNA, 563 bp, Homo sapiens
  chr14:104746303-104746866
  hypo
cgcaaccccattcatgagggaggtttagccaggtcagtggtcgggcaggcagcaggcctgggctcctcacgccgcagatacccactgatgacctgtgaggggcctggtgtccgtccaggttccaggacatccacaaaggggtggcgaaggctcctgctcaccttcaagtgtgaaatcgggtcattcacgaggaaacgggatctttgcagaaagctgtttggcgcgtgatctagaaccacaggttccgcgggggagcgggggcctgagtcggaagaggggctgcaggccgggaggcaaggaggagccattcccagggtgggagaagagggctccaagcagaggctggtgggggcgtttgctgtgttcccggaactgcggggggccgctgggacctggcaaatgatgggaagccatgggtgggttttgagcagggaccgctgtggtctgatcagattgaagggaatggcactggccagggaggaagcagggagcggagcagtgggctggggccagacgaggtggtcgcagtggacaagtgtgcacgtgtgtgtacgagtgtgtgc

SEQ ID NO: 342095 - DNA, 258 bp, Homo sapiens
  chr14:104897593-104897851
  hypo
cgtcccactgcgggcgcagcaccatatctgttcattcatctcactgcggaggcagcaccatatccattcactaattccactgcggtggcagcaccctatccattcatcgtcccactgcgggctcatctgggtcttcgtggagccacggtcctgcttcagtagatccaattttccaaagctgctctgtggattttcagcccctcccaccgtgtgtgggggccactgccttctctgtcctaaagcggccctgccatcgcc

SEQ ID NO: 342096 - DNA, 256 bp, Homo sapiens
  chr14:105103493-105103749
  hypo
cgggcaccacccgtcgcccgagacctgtgtcgccacccactgaggaacgggcaccacccgtcgcccgagacctgtgtcgccacccactgaggaacgggcaccacccgtcgcccgagacctgtgtcgccacccactgaggaacgggcaccacccgtcgtccgagacctgtgtcgccacccactgaggaacgggcaccacccgtcgtccgagacctgtgtcgccacccactgaggaacgggtacgacctgtcatccga

SEQ ID NO: 342097 - DNA, 222 bp, Homo sapiens; identical to SEQ ID NO: 335046
  chr14:105189936-105190158
  hypo

SEQ ID NO: 342098 - DNA, 437 bp, Homo sapiens; identical to SEQ ID NO: 335047
  chr14:105196124-105196561
  hypo

SEQ ID NO: 342099 - DNA, 35 bp, Homo sapiens
  chr14:105214103-105214138
  hypo
gtgctgggattacaggtgggaggcaccgcgccagc

SEQ ID NO: 342100 - DNA, 884 bp, Homo sapiens
  chr14:105240771-105241655
  hypo
gagacccaccctcccgccttccaccacaggcgactgtgcttttaaagcaaaggccccatctgcaggagaatcgtccccaaacacagtgacctggaactaaccaagtggctggaccctggcccccttcacagtaaatacctcctgggccaagtccccagaacaggttctgcaggacagagcccgggcctcaacaaaagcctggcaggcagggctgcagggcatggggagctggggcctcctggagcctcggcagagtgcaaggaagaccagggccacctgccccacccacctgcccgcacacgggagcagcgagcacagcccctagcccacactgggcacctccacagcctgaccctccagggcaggcctgtctcaccagcggcggagtccacggtgtgtaaagccctcacgtgcccaagaagacaggacatcgtcccctagagacagccccaggagtcgctacctggccccagcccttcagccccatctgggctcccactcactgtgaggaaggggtgcctggagttctgcaggacgcggttctcggtgagtgtgtgggccacctcgtcctgtaaagcagggctgggtgagctgccaccccgcaccctcatctccaccctgccccaccgccccggccccaccttggccacgatgacttccttcttgaggatcttcatggcgtagtagcggcctgtggccttctccttcaccaggatcaccttgccgaaagtgcccttgcccagcagcttcaggtactcaaactcgttcatggtctatgggcaggcaccagggtcagcaagcggcgctgccaacagtgcccagctggtcggcatgcgtggggtggcatgaggggccccagagtcggaggcagagccaggagaggc

SEQ ID NO: 342101 - DNA, 127 bp, Homo sapiens
  chr14:105244222-105244349
  hypo
cggtgtgaagccccggcacacccacctcccactcgctcctggatggtccgatctgccccagtatgcaatccccagggccagagtctcgagcccactgccccggaaccgttccccggagaaaagcccc

SEQ ID NO: 342102 - DNA, 163 bp, Homo sapiens
  chr14:105247313-105247476
  hypo
cgccgtcggccctgccgcgtcccacccgtgggtcattcaggtacacgggaacattctccctcaagttttgcagcatcagccgtacgcaggcgttcacacttcagaatcagagcagctgtcctcggtgatagcccagcaagtaccatttttcatactgacactc

SEQ ID NO: 342103 - DNA, 193 bp, Homo sapiens
  chr14:105268589-105268782
  hypo
cgagcggacacactcgggtgagaagccctatacgtgtgtgcagtgtggcaaaagttttcagtactcccacaacctgagccggcacaccgtagtgcacactcgagagaagccgcatgcctgccggtggtgtgagcgccgtttcacgcagtccggggacctctaccgccacgtccgcaagtttcactgtggcctc

SEQ ID NO: 342104 - DNA, 1422 bp, Homo sapiens; identical to SEQ ID NO: 335050
  chr14:105330476-105331898
  hypo

SEQ ID NO: 342105 - DNA, 83 bp, Homo sapiens
  chr14:105472077-105472160
  hypo
aggaggaaaatgcacggcccgtgctcctcgcagccgcacccagtgtgagcacggctgagcagctctgcgggagtggtggcccc

SEQ ID NO: 342106 - DNA, 492 bp, Homo sapiens; identical to SEQ ID NO: 335053
  chr14:105511981-105512473
  hypo

SEQ ID NO: 342107 - DNA, 786 bp, Homo sapiens
  chr14:105517526-105518312
  hypo
cgggaatggtccgtggccagcacgtagataatggggtcagccacgccgttcaccgtggacaggcacagaaacaccacagaggctgtgtacagcctttcctccaagccgcacatggcgttcctgtctcctctgtagtaggaaaaggcagcggctttgacgaggagaaccaggtggtacggggcgaagcagactaggaagatgacaaccaccgcgatggccgagtgcttcaccttggccttctgggcagcgcttaagcccatgctctgcttgatgctcctgaaaatccggtggttggtgaaggcgatgatggagagagggatggcaaagccaacggtgaacctggcgtagtagtacccggcaatcctgctgtccatctgcagcatgtcaaagcaggtctccttgtcttccgtctggaacaccgggtagtgaacgatcccgacgaggatgaagatgcaggcggagatgaggatggcggtcctccggcggcggcggccccgactctccagcgcgtacaccacggccacgaagcggtcgcaggagatgcagcacaggaagaggatgctgacgtagatgttgcagaagaagatgtaggcggtcaccttgcaggccagcaggcctagggtccagcggtgctggttgcggatatagatgacccagagtggcagcgtgcctgtgtacagcagctcgcagagtgccaggcagagcaggtagacggccagcacgttgccctgcagtacctgcagcagcgccagccacgcagtcaggcagttggccggcacccccagc

SEQ ID NO: 342108 - DNA, 318 bp, Homo sapiens
  chr14:105546630-105546948
  hypo
cgtgactgtgcgatgggatggcatcgtgctttcaatctgcactcgcctaatgagaaattatgttgagcgtcttctcatgtgcttatctgccatctgtataccttctgtggcgctctgtttgcgtggctgtgcaatgggatggcattgcgtttaatctacactcgcctaacgagaaattacgtggcgcgtcttttcatgttcgtatctgccgtctgtataccttctgtgactctgtttcttcagatctttagcctttttttttcctttccttttctcttcctctctttttcttttttgagacagtctcactctgtctcc

SEQ ID NO: 342109 - DNA, 330 bp, Homo sapiens
  chr14:105611103-105611433
  hypo
cgggtctgcggcatggacagcgaggggccgcagggagacaggcctgcccgcagtccttccgcaccaggactagcctcgccagagcctctgtccagcatagccaggacctgcatagtacgggacccagggcccacccaggtgctgctccccactgggcactcaccacggccacctccacagcactggcccccgaggacgcccggtcgcaaagcaacaccagcaggcggtcccgtgccacagcccttgtggctggcagggagcggatcccggagcaaatggcgcccaccgtggtgccctgggcagagacaggcagtgcgtgggcagggcagg

SEQ ID NO: 342110 - DNA, 640 bp, Homo sapiens
  chr14:105687735-105688375
  hypo
cggtcccagtgagggtgacgagactcactgcattctggcgtcggcacacacccaattcttcacgccaggaccactgacgcccacacagccccattggggggactggtggtgccaccacccaagcccaccgcccgagaccaccacacctcccgacagaggatggcagcatccggctctccccatgagaggcacacgcctgaaagatctcccgatgacctcagcgtcccccagggccccatcagaactcactggggtcgctgctctgagaggagatgcattcgcggatggagtctgagatgcccaggctggctgcagtggggagggggtccagcagggaccccagggccggaggtctgccgccccactcggggcttcctgctgcttccgagctgccgggggcaccaccaaggagctcccggtataagtctttgttcaggtggctggccgcggcttccagctcctcgtcctctgtgtcctcctcgccacacaagctggacgcggtgtcctcggtggagcctaggtgtacacaatccacctgttaaccaggcagagggccagggtgcccgcttttgtgacaaaaaacaatgctaccaagctgccaggtaacccatagaacggctgtcagtgcacggtgcctggc

SEQ ID NO: 342111 - DNA, 421 bp, Homo sapiens
  chr14:105689523-105689944
  hypo
tctcaaaaacaacaaaaaaagacatacacacttgcctttcacataacccagcaatttcactcctcagcaattgacccaaaaggaaatcaacgtccacacaaggacttgtacacgagtgttcacgagcgcatctgaaacagcctcaaacgtgcaatgtcctctaacagatgaatggctacacaccctcagcgtgctgaaggactaccgactgccacacaatacaaacgaacaaaccattgatgcgtgactcaacacacaccctcagcgtgctgaaggactaccgactgccacgccacaacacaaatgagcaaaccattgatgcgtgactcaacataattacactgtgaaaaaagccgaagggaaaaacatatactatgtgatcctactcctacggaattctacagaatacaactaatttatc

SEQ ID NO: 342112 - DNA, 1083 bp, Homo sapiens; identical to SEQ ID NO: 335054
  chr14:105714491-105715574
  hypo

SEQ ID NO: 342113 - DNA, 416 bp, Homo sapiens
  chr14:105723707-105724123
  hypo
cgcaagaacctcgcaagcaatcagatggttaggacgccagcccactcatccacgccctgggctggaggcccctgacctctcttgcaactccatgcagaacagcaaggcctcccaccctaagaaggtgccagggctgggtacaggggcattccgacacagagcagaacccccaggacggctgggacgtgagcggtgaggcccgtgaacaaaggtgcatctgaaggcaggcagtcccagagggccgagacaacgggcaggaccgactgcagcacagccaacagcctcacaagaggcactatgagaagaccggcggcaggggtggggccagtgacatcaaaggaaaccaaaggaaagcagtaagaactacctggggaaacgcccgtgacagccaacacacaccaacgggaaaagtgaac

SEQ ID NO: 342114 - DNA, 396 bp, Homo sapiens
  chr14:105728110-105728506
  hypo
cggacaccagcattcccggccccatgggactggagagggggactgcggcgcccacacggcgtgaggaccaaggagcgaaacccacaccttctggagaatgatgcccagcactgcaccggcccacggctcactgcccctacccagtgccactccccttctgcaggccccccctgctctgagtgctcctcaccggcagccaacaccacctggcacgggaacacacggcccggccgaagctccgtgtagagcagtagtgcccagccccaacccaccaagggcaaggccctggcagcactcagcatacagcactcagcggccgaccaagcacccacacaggagcccggcaggcagactgggcatcctcaggccccgcacatgcctggacggggctatgac

SEQ ID NO: 342115 - DNA, 183 bp, Homo sapiens
  chr14:105739056-105739239
  hypo
cgcggcgtgccctccgtacggcagaccaggtagaggcaggcagcaatcacgtgggccatcttccggccgcgggtcaggtgcctgctcacggccatcttgaagaagttgaaggcggtgtccaggcagtgctggttcagctgcagctggttccccaggtggtggatgtggcgcctccctaggaca

SEQ ID NO: 342116 - DNA, 173 bp, Homo sapiens
  chr14:105739475-105739648
  hypo
cgtgtgcggtgtggctgaatgtgcctctctccagggctctgaggtgcggcgtgtctggcaagggcttggtttgggctggctggcaggtgctatgcccctgactgccctgggctacagtgggaatgccccttttcctacagccacatgccccagcgccaccgccttccccaacc

SEQ ID NO: 342117 - DNA, 416 bp, Homo sapiens
  chr15:22876766-22877182
  hypo
cgcacgagcaccacagcctctggcatggctaaaataaaaagaccggcatgtcaaataattttcaaggatttagagcaactggaaattacaagatggtacaagcacttggggaaactatatggcattttcttacaaaggttaacatgtatctacccctgagaagcagcagttcacccttaggtatttatccaagaggaatttttaaatgcgtccacgcagagatttgtatctgaatattcataagagctaaaagctagaaacatcctgatgacggtgaagaggtagatggatcaacactgaagtatatgcacgcagtggaatgcagttcagctgtgaaaacacagctcatccacataacgacataagagaattccaggaactttatgtcgaaaaaaaagccagacttaaaaggatcc

SEQ ID NO: 342118 - DNA, 418 bp, Homo sapiens
  chr15:22927774-22928192
  hypo
cgggcagggcgtctgccctgagcccttcctctgtgttcctaactgcaggtctcatggccagcaggttgttgagggctgggtggagccaaggtgtaacgcctgtggcacccctcagagatgcctgcgtgtcactgacacccctctcgcctgcagaagccatggggtgttttgggtggtcattgtggcccccagcgccgcacctcagtgtcactagcttctggcagccgtctcttggcacacaggccacagtgcttaggatagtttgtggcgctttgtctggattttagcaactggcatctgcttttcatgctagttcccccgcctgcctttgatttgccctgtgttccattgcagaacgagatgctggaggagggccaagaatatgctgtcatgctgtacacctggaggagctgctccc

SEQ ID NO: 342119 - DNA, 203 bp, Homo sapiens
  chr15:26026151-26026354
  hypo
cgtgggtcacttacaagctccgagaagccgcggaccacctgccgccgcttcaggttggtctctccatccaggttggcggtctcgatgtggcatagcccgtcggggtcactggaggagagcagcagaatgtccgcagggaagatttcgttgcagcgaagacgcacaaagtctcccacgtggatttctttccagaatcggttcac

SEQ ID NO: 342120 - DNA, 141 bp, Homo sapiens
  chr15:26234718-26234859
  hypo
cgcggcaagactccaagtagaagcggaccttgagaggcagccaggccaggcggcagccgcgcccggagggtgcggaatgaggagcgcaaggtgggcagagcgtgaaaccttcaccgactgcacctccgccctcgctgccct

SEQ ID NO: 342121 - DNA, 363 bp, Homo sapiens
  chr15:27128193-27128556
  hypo
cgcactgcaaaagcccccggttgcagagggtgaccctggttactggactgagagcacgagagtgtgccagacgcgcagggtgggtcggtgcagcccagggacctgtgtctgtctttcagagcgcatcactcaggtgaggaccgacatctacgtcaccagcttcggcccggtgtccgacacggaaatggtaggtcccggggcatggctgggcagacaattcttactccgcgccgcaggcccccgcccaggccccgtgccctctgactgcctcgtgccttcctttccactaggagtacaccatagacgtgtttttccgacaaagctggaaagatgaaaggcttcggtttaaggggcccatgcagc

SEQ ID NO: 342122 - DNA, 162 bp, Homo sapiens
  chr15:28360064-28360226
  hypo
cgaggctgcaagtgcatggcacacaccaagatataagaggagcaacgagagagtacttcacccaaggagctgaacgaagaattcacaattcagccaaatgcttaaaactaaccaccgagaaagttacagcaactggctagcaagggttccctccctgcagcc

SEQ ID NO: 342123 - DNA, 413 bp, Homo sapiens
  chr15:28516961-28517374
  hypo
cgcacgcctgctcctccctcagcttgttgtccacacctgttaaggcgggagctggtaccaaacagagtgacagctcaggtgacgtgccctgcacagagcccagtacataggaaggaccaacaaagcaggccgctattttcgttgttcttttctggtatttatttaaaagtgaatgtttcaagcttggttttgtgctgacaaggaagtcagtgctcactgatccgagtcttctccacaaacaagtgacctcccacacctgtctcatctgactcgctgctattaccaccaaacacacacacgccagagaaaaacactgccgttgacatgcatgctagtcttgctttaaaagtaactagactcgagtgccacctaaacacaaagttccatcatgacactcacgtgcatgtcgccct

SEQ ID NO: 342124 - DNA, 1185 bp, Homo sapiens; identical to SEQ ID NO: 335061
  chr15:29130656-29131841
  hypo

SEQ ID NO: 342125 - DNA, 155 bp, Homo sapiens; identical to SEQ ID NO: 267411
  chr15:29133629-29133784
  hypo

SEQ ID NO: 342126 - DNA, 137 bp, Homo sapiens
  chr15:29145339-29145476
  hypo
cgcctggactcaggcttcttcgggctcatcagacctgaacagcctggcagtgtggctgtgtgggaatgggtgacaggtgctgttctccccagtgcaaatcaccaatgctgggcaccgtgcatcagcgtcgtggtgac

SEQ ID NO: 342127 - DNA, 273 bp, Homo sapiens
  chr15:29415573-29415846
  hypo
cggcctcctcctcgaggcgctcctcgttggtgacagccaagcgcatggcacccaccatgtgctgtgcctcggtggggagggcacagtgtgagtgttccaaaaacttggccaccaaaaccctggcatccgcataggccttgctgtccactaaagagcgtggccgctctttggaggtcgctgggaagggctctggtgttggccgttggtcagttttccaggtatctgggtcccccgctggtgaaagctgggcccgacaggcagccgtggcagagc

SEQ ID NO: 342128 - DNA, 245 bp, Homo sapiens
  chr15:29417894-29418139
  hypo
cgccgggggtgcccaagactcccggggagctactgtgaaatgcaaattcctgcgctgctggccacagggacctggtgccaggtcctaggctccagggcactgcccgcagacacagtcgcatggggcgatttttgaaagctctgggctgtgtggagagccaagctgcctgggaaatgctgctgaaaacgcacctgtgtctgcgtggggcggctccagctgatgacacccccatgcccagagctatc

SEQ ID NO: 342129 - DNA, 67 bp, Homo sapiens
  chr15:29418595-29418662
  hypo
cggagggtgctggggcgcccacagggccatcgggggatgggctggaacctggcgtagcagtgccctc

SEQ ID NO: 342130 - DNA, 1677 bp, Homo sapiens; identical to SEQ ID NO: 335065
  chr15:30113537-30115214
  hypo

SEQ ID NO: 342131 - DNA, 100 bp, Homo sapiens
  chr15:31188921-31189021
  hypo
cgcgctctgtcgtccaaagtcctgggatcacaagcctgagcctccatgccaggccgatctattcctttctgattaataaattacgccgggcgcggtggct

SEQ ID NO: 342132 - DNA, 409 bp, Homo sapiens
  chr15:31220905-31221314
  hypo
cgtggctcacgcccacctgggcaccgtgtgtccacagccagcagaaaccatctctgttacggtcctttgggtcatccacaggtcaagatgataacttattttaaaaatctgagtaatagaatttaagatgtaagtatgtgaagttttaaactttaatttagcctccaccttacatttagacctttcgtataaagtaccatcagcatcagccctcccgagcacctgccgtgtcgcaggcactgtgccaaggagctcacagacatgggcacatctgcctgttcagaggtccacccagctaagcgaaaagctgtttttgcaaattattactctaaaaaacaagtttaataaattgcttttatatcaattaacttttacttatcttttgagagaaagaatgtatcggttggcc

SEQ ID NO: 342133 - DNA, 139 bp, Homo sapiens
  chr15:31453201-31453340
  hypo
cgggtggccaggccagtggcacaggggctgccctccctgggtgggcaggagcggagccacacactcggcggcagccccacactcggcggcagccccacgcactgggcgagggggccgagatcctggggcgaggccggcc

SEQ ID NO: 342134 - DNA, 250 bp, Homo sapiens
  chr15:31561317-31561567
  hypo
cgaaagccttcacagttgcaagctttctgaagtggctgctcaacgagagggttcaggggcctatccacctgtcaccaggttgtggctgtgacaaacagtaaattctcctggcagcactgcgctctctcgggcaggcccctgagggtgacttggggcatcatcctagggacacgcctgttaacagctatgctggtatttttataagtctcttagtgatgggtggggggtgcagagggacaaagtcatttgc

SEQ ID NO: 342135 - DNA, 185 bp, Homo sapiens
  chr15:31564302-31564487
  hypo
cggaaaggctctgcgtggcccaaggtttcagtcccagagccagcctttttgtctttggcttcgaaaacctcaatcgtaaaatggagctaataaaaacaccaagcccagattggaggacgaaatggcatatggccctggtggggactccaccgggggggaggcatggcccaaaaggcttgggttgc

SEQ ID NO: 342136 - DNA, 135 bp, Homo sapiens
  chr15:31571220-31571355
  hypo
cggtgccccatccctggcatggtccccactccaccctgccccagcaggaggccagtttgtcctggatgggaagaaggcctcacgggcaggggaggctcccacgcatgccaccccttcggccgtgccctggggttc

SEQ ID NO: 342137 - DNA, 318 bp, Homo sapiens; identical to SEQ ID NO: 335066
  chr15:31620729-31621047
  hypo

SEQ ID NO: 342138 - DNA, 218 bp, Homo sapiens
  chr15:31668823-31669041
  hypo
cggagacctttgtaccagaacttggatgcatagtccaccttactactgatacacgcctgagcaccctttagggcgaggcgccgcctcctgcctgctgtcctgtccctcagcatcagaagagttgaattcagcaggagacgggagcccggtgtccatgagggaagaggggtcgcgcttggtttctactgacccccatgaagatttcagacttgcagtgc

SEQ ID NO: 342139 - DNA, 74 bp, Homo sapiens
  chr15:31731229-31731303
  hypo
cggtaagatactctctcgatgccggacaccagccacgtgatcacgatggtaaacgaccttataggggactgtgc

SEQ ID NO: 342140 - DNA, 503 bp, Homo sapiens; identical to SEQ ID NO: 335068
  chr15:31774610-31775113
  hypo

SEQ ID NO: 342141 - DNA, 1068 bp, Homo sapiens; identical to SEQ ID NO: 335069
  chr15:32162216-32163284
  hypo

SEQ ID NO: 342142 - DNA, 2055 bp, Homo sapiens; identical to SEQ ID NO: 335071
  chr15:33009640-33011695
  hypo

SEQ ID NO: 342143 - DNA, 357 bp, Homo sapiens
  chr15:33445914-33446271
  hypo
cggctggcgactgcgatgacctatccccttgccgctccttgccctgccgcctggagccatgagccccagcctcagctcccgggagggtgagcaagtcggctttgggtacaaactcagcgtgggctgctgggcgaatggcaatcgtctccttacccttagaatgcgttttaactactctttgtacctgggaggacaggtcctgaactttggccaccactttggagacaggtttctgcttgcaagtccgcttagccggcttctccatctcatccttttctgcctctggatgcttctcagggtcctggtgactttcagacaaacctgtttgctgatgctccagcccgctcggcggcctcc

SEQ ID NO: 342144 - DNA, 105 bp, Homo sapiens
  chr15:33954396-33954501
  hypo
cggttccattaccacacgctgaggctctacagcgcggtgtgcgccctgggaaacagccgcgtggcctacgccctgtgcagccacgtggacctctcccagctcttc

SEQ ID NO: 342145 - DNA, 261 bp, Homo sapiens
  chr15:34634211-34634472
  hypo
cgtttcttgatggtgattcggtgtcgagagtatttgtcatctggggagaaccgagcaggatgggctgagcaggtctgttgtcccatcgggtcaaatttctgctccaggaacacagaatgtatgtcagtacaggagtgatgaaatggggtggggccagcgcgaaaaagggcaaacatgaaaatagaagatgcaatggtcaactcaaaaagttgtacaaataaatagagaaatataaaatttaaaaaggccgagcgcggtggc

SEQ ID NO: 342146 - DNA, 374 bp, Homo sapiens
  chr15:34635789-34636163
  hypo
gtaaagcgaaagagcgtaaagttattttatgaaactggtgaagcatgtttcagcggtcgaaccaagatttaaagttaggtccctaccgcaaattcagcgctctttcttatggtggtgagtagctaataataacgtaataaagtgcaccttctaggagtttttacaatttttaaaagaatatagaagttctccttataagactctcgtttaaagaaatgaaaatgagaaccaaaatatcattacaaagatcatcgttacgccattatttacaatgacaaaagcattggaatatatattaactgtgtaaccagaaaaacctgcacttttttttttttttttttaagaatatggtttggcggggcgcggtggctcac

SEQ ID NO: 342147 - DNA, 871 bp, Homo sapiens; identical to SEQ ID NO: 335072
  chr15:34728787-34729658
  hypo

SEQ ID NO: 342148 - DNA, 214 bp, Homo sapiens; identical to SEQ ID NO: 335073
  chr15:34729901-34730115
  hypo

SEQ ID NO: 342149 - DNA, 225 bp, Homo sapiens
  chr15:34873206-34873431
  hypo
cgtttctctaaggaccaggctgaaacgcagggcatgtgatctctgccgaagacattgaagccacccagtgatgtgtgcagggcctcgatccccaccgaccgccagtcctgtcctcccctggacagtaaaggtttctccaagacttcagaccatggtgtcacctgaggcccacacctgttaagtcactggggcaggtatgcgtggcagaggacagcgaggagtgcc

SEQ ID NO: 342150 - DNA, 875 bp, Homo sapiens; identical to SEQ ID NO: 335076
  chr15:35046519-35047394
  hypo

SEQ ID NO: 342151 - DNA, 104 bp, Homo sapiens
  chr15:35310627-35310731
  hypo
cgtgagccactgcacccagcgtttaaagggaattctgatgtttgtttccatagacagtttttttcttagtaaggaatggatgtaggcacggtgcggtagctcac

SEQ ID NO: 342152 - DNA, 111 bp, Homo sapiens; identical to SEQ ID NO: 335080
  chr15:38857279-38857390
  hypo

SEQ ID NO: 342153 - DNA, 113 bp, Homo sapiens
  chr15:39971441-39971554
  hypo
cgctaacggctaaggaataaggaaccctgaatatcttaaaatctagctttacaagccaaagacatcaagacaaatattgtaaggccttgtgcatttgtctgacctgttgcgcc

SEQ ID NO: 342154 - DNA, 296 bp, Homo sapiens
  chr15:40423149-40423445
  hypo
cgattgttaataataattattaatattattcctgatatccagggggtcgaggatgacattgcttcctatacctcagaacacgtacacccccatgtgatgttgttcctaataaccagggggtagaggatgacgttactccaaatatcgccgtgggtgtacatcccttctgcgatcttgttgctaatacccaggcggggagaagacgatattaatcccaatattgcagaaggtgtagacctcccctgatattcaggggaaagagcacgatattgctcccaatatcgcagtctgtgtac

SEQ ID NO: 342155 - DNA, 105 bp, Homo sapiens
  chr15:40532806-40532911
  hypo
cgcttcctgggctagagacaagcaccagcctgcagtggagaacgcaggaccccgctgcccagaaggagcagccacggtaaggtccccactgccgctgcgtgctcc

SEQ ID NO: 342156 - DNA, 366 bp, Homo sapiens; identical to SEQ ID NO: 335083
  chr15:40575352-40575718
  hypo

SEQ ID NO: 342157 - DNA, 518 bp, Homo sapiens
  chr15:40631683-40632201
  hypo
cgagccctgtctcccagggtgaggcttacaccgggaacctggctgatggtaacggtgaggccatcaggctggaggagtgctggtgtggtcacagccatccccccctgctctgcctgccgacggtcctcctggatctcctgtgggagggctgggggtcagcacacgccatggccccccaggtgcacagagacatagatgctgataggcctacacagagagacaccagtgggacaccagggggcagaggcgccacatcacacatccccaggaccctcaccaagcctctaagagggaccatgcccaccctacccctggccccagccccagaggcgcattgctgagcctgcagggagaccaccacgtgtggggcacagggagcggcagccaagtggtttctcctggccctgtggcagcccactcacctggtacctgcggagcaaggcctggttcttcttgcgcagggcaactatcctccgatccagctctgcgtccttctcctgcctgctcatgggggactc

SEQ ID NO: 342158 - DNA, 132 bp, Homo sapiens
  chr15:40676554-40676686
  hypo
acagagcgagactccgtctcaaaaaaaaaaagattgagctctgaagtaaataggcttttctccaaaggcttaatgggttgtttgttgtcttgtgttgccgcagaacacctgaatggtaatcctggcaccagc

SEQ ID NO: 342159 - DNA, 97 bp, Homo sapiens
  chr15:41091052-41091149
  hypo
cgttaactcacgacttaatccttcattctggcagccgtggtgccccgccttgtgagtgtgtgtgtaagaatttggcgcttgctggctgggcgcggtg

SEQ ID NO: 342160 - DNA, 489 bp, Homo sapiens; identical to SEQ ID NO: 224841
  chr15:41136702-41137191
  hypo

SEQ ID NO: 342161 - DNA, 77 bp, Homo sapiens
  chr15:41769434-41769511
  hypo
cgggcagaggccctggaccgccagcggaccaagaacatatccgctatcaggtgtgttatggagcctatttttggccc

SEQ ID NO: 342162 - DNA, 133 bp, Homo sapiens
  chr15:42162038-42162171
  hypo
cgccgtgcggaagcgggccaggaggcgtgcccgctccagctgggccctgcgctgctccatgcgtcgctgcagcactgcccacgcctgcgtcacagcttgctgcctctgctgcaccgcatgggcctgaggcccc

SEQ ID NO: 342163 - DNA, 360 bp, Homo sapiens
  chr15:43020234-43020594
  hypo
cgaaacagaactacagagtcaggggctaggggagggctgggtgcaacaaaggatgccagagtcgagcactgaccccgcccccacacaccctcccgcagcctcagactactccgtgcacctccccacaactgcctggcctgctagctgcaggcctccctcacacgtacggctgccggggtctcctctggaagcagcgcccgcacagccccagggctcttcctttgacagaacctaaaaggggacagatggggtcagtgatctctgggtatttcagcctggctgcagaagtaaatgccccgagtgcaccaagcccctgacctgggaggctgtaccttggaaggaggcaccgtttgccctccc

SEQ ID NO: 342164 - DNA, 104 bp, Homo sapiens; identical to SEQ ID NO: 267584
  chr15:43467795-43467899
  hypo

SEQ ID NO: 342165 - DNA, 89 bp, Homo sapiens
  chr15:45440539-45440628
  hypo
cgggagtcgggattccaggacaaggaggaactgacatgggaagattttcacttcatgctgcgggaccacaatagcgagctccgcttcac

SEQ ID NO: 342166 - DNA, 598 bp, Homo sapiens
  chr15:45444106-45444704
  hypo
cgcaccgagagaagttccaacgcagctgtctccaccagacggtgcaacagttcaagcgcttcattgagaactaccggcgccacatcggctgcgtggccgtgttctacgccatcgctggggggcttttcctggagagggcctactgtgagtgactttacttaccacgagccctgtccctaggcttgcaatgagtgatcgccctgggggtggggcctgcgataagtgccagccctgggtagggtaagtggagcctgtctgagtgaagactgtgcgggggaggcctgttgtgagtggcagccggccagggcctaccgcccctaaccagctctctgtcctctgcactgaccctcgcttgcctgcctgggccccctccacagactacgcctttgccgcacatcacacgggcatcacagacaccacccgcgtgggaatcatcctgtcgcggggcacagcagccagcatctctttcatgttctcctacatcttgctcaccatgtgccgcaacctcatcaccttcctgcgagaaaccttcctcaaccgctacgtgcccttcgacgccgccgtggacttccatcgcctcattgcctccaccgccatc

SEQ ID NO: 342167 - DNA, 261 bp, Homo sapiens
  chr15:45471660-45471921
  hypo
cgctgcccctttctcccacacaagtgggctcacggccactcctctatgcctgctgccattcatcgcacagtgaactgcaaaccacacactccgaagaggcactcaaggtgctcagggcggggcgcagctgaggacaatagaacctttctccaagctgggcttgggcttctcctgatggggcgctggctgaggcagagactgagcccggttcacccagggctgccagcaccccaggagcactgcaccactgggttgacaggc

SEQ ID NO: 342168 - DNA, 496 bp, Homo sapiens; identical to SEQ ID NO: 335102
  chr15:45479541-45480037
  hypo

SEQ ID NO: 342169 - DNA, 1108 bp, Homo sapiens; identical to SEQ ID NO: 335104
  chr15:45669920-45671028
  hypo

SEQ ID NO: 342170 - DNA, 464 bp, Homo sapiens; identical to SEQ ID NO: 335105
  chr15:45722474-45722938
  hypo

SEQ ID NO: 342171 - DNA, 160 bp, Homo sapiens
  chr15:48666272-48666432
  hypo
cgccatgcttgcttttcccccactacctccctcctcctccccatttctccccagacagattgtgaagtctctttgcttggtccactccctgcctgtctccaatcctctgattgcttcaccttcccccggctgccattatctgtcgcgacccaccctttcg

SEQ ID NO: 342172 - DNA, 1927 bp, Homo sapiens; identical to SEQ ID NO: 335109
  chr15:48936649-48938576
  hypo

SEQ ID NO: 342173 - DNA, 234 bp, Homo sapiens
  chr15:49268662-49268896
  hypo
cggtcagtgtttctatcgagagctgagtcctctggccaggacctacgagcagggggacgccagtacaaattactggagccagccgtccggaaggcgcctatgcacacgtgttgtacagcaatgcgaacttgccctggttggggagaagtagcgggtgggaggtgggcaagtttcttcccagcaactatccgctgtccacactccgctactgcctcttccccagagagagaggcc

SEQ ID NO: 342174 - DNA, 290 bp, Homo sapiens
  chr15:49698682-49698972
  hypo
cgtgatcactcagggtgggggagggtctgctgttctccatgcttagcttcactcccacagcagcagctttggcgggagggtggggtgctggccggggtggggctggctagctggctaagtgccggccaaggctccaactgcaatgatggttagtggtggggagtgccgtgggggagcggagtgcacttctgacccagcagtggcagggcagggtgcatacacagagacgtgcacacacacacacactggcagggcaaggaaagcaaaacccacccatacgcatgtgtgcc

SEQ ID NO: 342175 - DNA, 350 bp, Homo sapiens; identical to SEQ ID NO: 335110
  chr15:50474768-50475118
  hypo

SEQ ID NO: 342176 - DNA, 63 bp, Homo sapiens
  chr15:51202497-51202560
  hypo
ttgcacggattgtgtagtataccgattcacagctacaaggagtttatatcttaaaaagagcac

SEQ ID NO: 342177 - DNA, 480 bp, Homo sapiens; identical to SEQ ID NO: 224851
  chr15:52404392-52404872
  hypo

SEQ ID NO: 342178 - DNA, 814 bp, Homo sapiens; identical to SEQ ID NO: 335113
  chr15:52587421-52588235
  hypo

SEQ ID NO: 342179 - DNA, 76 bp, Homo sapiens
  chr15:54191760-54191836
  hypo
cgcttagctgaaaaaccagtctctctactttttttttagacggagtttcactcttgttgcccaggatctcggctca

SEQ ID NO: 342180 - DNA, 55 bp, Homo sapiens
  chr15:55699095-55699150
  hypo
cgccctcagcgtaaaaggttaaaaattatgaattaacgcccgcgcggtgggtcac

SEQ ID NO: 342181 - DNA, 113 bp, Homo sapiens
  chr15:55806773-55806886
  hypo
cgtaagcttataggccgggcagaacagtggggccttgccttgcgttctgctgtctgcaagtaacgcaccgttgtgctactgctttggcaagggctggcaagtgtagaagtacc

SEQ ID NO: 342182 - DNA, 1288 bp, Homo sapiens; identical to SEQ ID NO: 335121
  chr15:55879822-55881110
  hypo

SEQ ID NO: 342183 - DNA, 86 bp, Homo sapiens
  chr15:55965701-55965787
  hypo
cgtggtccccgggagctccagaacttggattgaattctcagtacttaggcggaaagacaagcgatacagcaccacttggccccgcc

SEQ ID NO: 342184 - DNA, 85 bp, Homo sapiens
  chr15:56363533-56363618
  hypo
cgtccttgcccgcgccctcctggagcgagcagttctccaagcacccagcatccagccagacacgctgcacaccgacggaggggac

SEQ ID NO: 342185 - DNA, 378 bp, Homo sapiens; identical to SEQ ID NO: 335122
  chr15:57598802-57599180
  hypo

SEQ ID NO: 342186 - DNA, 227 bp, Homo sapiens
  chr15:57618478-57618705
  hypo
cgtgctgccactctataaactctcacgagggtcgccggtcggtccactaggaggtcgaaggccttcatcaggtagacgacggggttgggcagccaagtctgcgatgacagtgctggcatgtggcgcgggggcgcagggtacacatccttgtctcagctgtcccacatggcagcagtgagcgcggacttcgctcctggatgcgctgccctggcctccacctcggtccc

SEQ ID NO: 342187 - DNA, 94 bp, Homo sapiens
  chr15:58028020-58028114
  hypo
cgtgatgaattgcgtatattacctcccgagagcctaaacgctcacatgttaaaagttagcatctgcggcaggtagtccttaatatttatgatcc

SEQ ID NO: 342188 - DNA, 113 bp, Homo sapiens
  chr15:58839542-58839655
  hypo
cgtcgaaaacagcggcctcaaggagctgcagtgaagatgcaggcagtggaggagcggagggcacgcagcatacacagcctcctagtaggtgcccaaggaatgcagccgctagc

SEQ ID NO: 342189 - DNA, 144 bp, Homo sapiens; identical to SEQ ID NO: 224864
  chr15:60288754-60288898
  hypo

SEQ ID NO: 342190 - DNA, 406 bp, Homo sapiens; identical to SEQ ID NO: 335127
  chr15:60289235-60289641
  hypo

SEQ ID NO: 342191 - DNA, 1564 bp, Homo sapiens; identical to SEQ ID NO: 335130
  chr15:60883785-60885349
  hypo

SEQ ID NO: 342192 - DNA, 129 bp, Homo sapiens
  chr15:61931851-61931980
  hypo
cggatctgccggagactgacaggattcaagaggcagccactcctcatggcgctggctcacctgtgaggcacgaggcaagaataagacagaacattatttcttagcaagtctgggcagccgatcatttcc

SEQ ID NO: 342193 - DNA, 954 bp, Homo sapiens; identical to SEQ ID NO: 335136
  chr15:62456599-62457553
  hypo

SEQ ID NO: 342194 - DNA, 201 bp, Homo sapiens
  chr15:62747468-62747669
  hypo
cgatggaggggacgtgatggggaactcaggaaggggttcctggaggtgcacttcagccgcgccttcagcaatctgcagaatgtcaaaaagccagtgggagagggtgttcgggatgggagagactgaataaaccaagacaaaaagatggtacagcgcagtaggagtcagatagcacaggggttggttaaagactggggcacc

SEQ ID NO: 342195 - DNA, 497 bp, Homo sapiens
  chr15:62753676-62754173
  hypo
cgaataatgttatttatgtcttcaacacggatgggtttatacctagacgtagtatttagatgtgtttgctttgcttttcctagtgcattcatttattgagtaaatagttactgagcatcactgcgggccaggctctggctcaggccctaggggtgagagcagaaataagacaagcaaggtgtgttagagggagaggagcagttgttttggatggtctctaaagagtcgacatttcagcgagggcttgaaggatgagagcaaggccaacaggtaagaggcgcctactccatgcgaggggaagagcatgcacaggagcactcacagaaattgctggtggctcaagagtggcctggtgagcgcagagtgaccagctgttggctagaccctatccaagctgaggaagtcatggcctgggacatttaacttctcattgttggagtcaggaggaagggctgtatctgtctgtacttttaactaggctgggcgtggtggctcac

SEQ ID NO: 342196 - DNA, 66 bp, Homo sapiens
  chr15:62832519-62832585
  hypo
cggagtgagacgccatcttaaaataaataaataaacttttttttttttttttttacatgagtaagc

SEQ ID NO: 342197 - DNA, 132 bp, Homo sapiens
  chr15:62978897-62979029
  hypo
cggtgatgcgcgtggatgagaagaccaaggaagtgctgcaggagtggcccctcaccaccgtcaagcgctgggcagcctcacccaagagcttcacactggtagggactggcagagggcaaggagagcactagc

SEQ ID NO: 342198 - DNA, 310 bp, Homo sapiens
  chr15:62993112-62993422
  hypo
cgccattgagtatctcttgctccttaagaggcctgttaaggatactgtttaggataacttaagggccctgtcggtgctggcctcataagaagaatgtagccaaaatgctggtgtgattttatggcggggcttctccggtctcctgggtaattctgtgctgtgattgtgttgtgccgttgtctggctttgcaggcatctagggtatgggttcagaacaaagtcgacgaatccaaacacgaaatccattctcaagttgatgctatcacggccggaacggcttcagttgttaacctcacagctggtaagtccc

SEQ ID NO: 342199 - DNA, 222 bp, Homo sapiens
  chr15:63000769-63000991
  hypo
cgctcggtggagaactgtgtccgtgcctgccaggcggccactaccgatagtgagctcctgaagcaggtcagcgcagcggccagcgtggtcagccaggccctccatgatctcctgcagcatgtgcggcagtttgccagccgaggcgagcccatcggccgctacgaccaggctactgacaccatcatgtgtgtcaccgagagcatcttcagctccatgggtgac

SEQ ID NO: 342200 - DNA, 220 bp, Homo sapiens
  chr15:63029125-63029345
  hypo
cgcccgtggagtggctgcatcgacaaccgaccccgcggccgcccatgccatgttagattctgctcgagacgtgatggagggctccgccatgctcattcaagaggccaagcaggccctgattgcacctggagatgcagagcgtcaacaaagactggctcaggtgaggctaggaatgagaaattgtggttgtcatggtcatcattaacgtggacatgtggtc

SEQ ID NO: 342201 - DNA, 290 bp, Homo sapiens
  chr15:63030480-63030770
  hypo
cgtggccttgaagagcatcggggagtccagcaagaagctgcttgtggattcggtgagaggttcttagattgagaaaggacactgggggactaggctcgcgttaggtgtgagtgaagtcttcttctctccatgagatctctgagcagctaacccttcctttaggagtcctgtttttcccgccagtctttgttttccatgttttgctgtctgatcaacaaagttcccaggtggagcttttaaagtttactttttctttgagcccatgttgccatttcctctcggatcgtccc

SEQ ID NO: 342202 - DNA, 67 bp, Homo sapiens
  chr15:63059828-63059895
  hypo
cgcccggctggcatatttcatttcttagctgagtttctttatacggcaattagaaaagggcttgtcc

SEQ ID NO: 342203 - DNA, 153 bp, Homo sapiens
  chr15:63066085-63066238
  hypo
cggcagcccagaacctggtgttaatgaattacctgcttaccgaggcgtttgcagtgtagcctctccctcactccattgagctcttctgcggtattctctaccccgcagagctcccttctccactcatccccaccccgcccaattcccttctgc

SEQ ID NO: 342204 - DNA, 127 bp, Homo sapiens
  chr15:63072879-63073006
  hypo
gatagccatggactcgaccattcctcaggaagtgcttcctgatggagagtctgcctcctttcccacctcatcttctggcactttgcgcttccctagaagtgtcaggctggctcccgcctccatgtac

SEQ ID NO: 342205 - DNA, 374 bp, Homo sapiens
  chr15:63075618-63075992
  hypo
cgctggcgaggggctggcacactcacctgccagagggtgggccctgggcactggctccaagctgcacagcccgaacgctgagcatgtgcccactgggcccggccagaatctgtggcctgagcggggccctgcgagggctctggccttttgtgtgcaatgcagcatgggcttggcttgaattgccctctccagcatctagccccaaatgcaaggcctggccttcaccccctcaggagcttaaaagtgaatgaaaccctttggcttccagtgatattaacacatggttctcatgcgtttctctctgtgtgtgtgtgtgtgtgtgtgtgtgtcttgcttgttttctttttccagatgactaagtcggttactaaccc

SEQ ID NO: 342206 - DNA, 620 bp, Homo sapiens
  chr15:63086996-63087616
  hypo
cgggggacagagtgtctcatactccatgcctcttgctggcacggtaacacagtgactcccctgccctggtcagcatgtttgaagaaatctacctacgaaacgttgtcagattcttctttgggtcgtagtcaagggtagtgggtgtgtgcacgcagaggttaatacaaagactcaaagagcctccagccactagcctgacacatgcgatttacattgggtgcattgggccatcctgagggcaagaacggtgtgctgtggcgtcccgggaggcagggctgtctctggaagaggagagcagggggaggtgtccggggctcagctgttttgcaggctgcttgaggcacaggatgatacatccgtgcttggtggcttttccttcttccttcactttggcatctgacggggcaactagttcggtggctgcgggagaggggcaggagtcgttgcaggcagagcgcagacccagggtggagaggtgggagtgtttgggaaagtcaggagctggcgggtgtggtgagagccaggtgaagcggacacatgaccagaaacggagctcagccaggggagatttgtaagcagggtgttagtgtggtcaggtttatgtcataggaaagtacctc

SEQ ID NO: 342207 - DNA, 222 bp, Homo sapiens
  chr15:63088341-63088563
  hypo
cggctctccaggccgggaacaaaggaacccaggcatgcattacagccgccaccgctgtgtctgggatcattgccgacctggacaccaccattatgtttgcaacagcggggacgctgaatgcagagaacagtgagaccttcgcagaccacaggtacgtgggggtcctggacggggagaggttcaggctggcctgcccctgaaactcatgatcgacttggagac

SEQ ID NO: 342208 - DNA, 741 bp, Homo sapiens
  chr15:63089582-63090323
  hypo
cgacgaccccgagacccaggtaccagcagggcctggggagtgcgtcctcccggtcttcccgtgaacgctgcacatcgggcctcagaagaggcctaaggcagaacaggaacttttgaagtagacaatgtgtgtgtgagtgtgtctggtttgaggaaccggtaggaggcagtcatccaagcgagatagtggcacagactgtggtggtggccatggggatggagacaagcggagggatttgagaagagtctagaaggaaggcttggcctggcccggtgaaggctggagcacggcatacctgagggaggggaaggagtgaaaggcggctccttgtgggccagagcagggcacaggagctccctgaagggagagctggtgtgggcagggggaggtggaggagattgaagtgccggagccacacacaggtagaactagtgagtgcgcgtgagcctgcccaggcacggggctgtgggttcagcgactgttgccatagaggtagcgactgcaaccacacgagaggaaaagccagggagtcggggcagagcctggaggaatccagcatttaggaccactttaccgtgcaagtggcacaggagacggagaagcagcagctgctgcagggaggaaagccgcgggcatcatgttgccaggatggagtgtttcaacccaccagagacagagttaagaaagagggaagactgggaactggttattggcctgttccggtaaccatcgagtgccatc

SEQ ID NO: 342209 - DNA, 142 bp, Homo sapiens
  chr15:63115985-63116127
  hypo
cgctggtgcatgtgctgacagtattgttaatggcgccgtttccacatctgcaggcagacttgtgctccaaagacagttatcggagttgctgcaaaagtgaccaccccctgcagccgtaaccttcaatactgtgcctagtctc

SEQ ID NO: 342210 - DNA, 1024 bp, Homo sapiens
  chr15:63132478-63133502
  hypo
cgtgttttcatggctcagctgggtcattagtctcaaaacccaaacagtgacagaggctggtcgccagagctaagaaagctgttccggatgtgctgcagtgtcccacggtcgcgggagccgtggagctcacatgagcagtggggtgggtcggagggttttctacaaagtgttaggtccatccagcttgttgctttctttctagatcatcgccgcccaggaagaaatgctaaagaaagagcgagaactggaagaagcaaggaaaaaactggcccaaatccgccagcagcagtataagtttttacccaccgagctgagggaagatgagggctaaaggtgcgagcccagatggcgagccccaggggatggccctggctgaactggacagacagtgttcctgagaggctgggcacttagctggaaaccgcccacctccctcccgggtgagcctggagccctgcgtgcttgttctcacatctctgtcccgtcggcactggctgcatgatcgtgatgtcacacggtacaatgtcctacccacaactcctctgccgcctcccctcatgcctcaccgtgtctcaggagagaggggtgcacgtttcatggactgttaccaacaaagaaaagtcagtattatgttgttctcagacactttggcttttgttggtccttctcttaggcctgctcctggacctctttatgatattgtgatagggaaaaaaatcattgacgtcatagaatattcttcttcctctcaggagaagacggaagctggagttggacatggttcataaaagccagaaacacaaacccgtgtggactccgggagggtgactcaggtcctccttccatgtcttgagcactggctcacccagggggtgaaaaattcccgcccctgtttgcacgctttcttgcctccgtgtgtaagctccttgtacaacccagacccatcttgtattttgtggcccagaaaactgaacgattattttgttcctccgtagtccaaagggcagagttgcggaaggccgtc

SEQ ID NO: 342211 - DNA, 206 bp, Homo sapiens
  chr15:63597968-63598174
  hypo
cgctccagataacctcagggaaccagcacttcccaaaccgcagactacatctttagaggaagcacaactgtgcctttttctgaaaatccctttttctggtggaattgagaaagaaataaaactatgcagatatgcgttccattcacttggctttcacacaactgctctccgaaaggggtgctcagtggtgtgcgtcctggctgcac

SEQ ID NO: 342212 - DNA, 76 bp, Homo sapiens
  chr15:63695768-63695844
  hypo
cgcagacgcgatcattcccaccattgcagacaatcctgttggaaagcatgggcctgaggctttgtttacctcgctc

SEQ ID NO: 342213 - DNA, 832 bp, Homo sapiens; identical to SEQ ID NO: 335140
  chr15:63795400-63796232
  hypo

SEQ ID NO: 342214 - DNA, 218 bp, Homo sapiens
  chr15:63889834-63890052
  hypo
cgcgtgcaggtgtgcagcattgaggactggctcaagagtgccttccagagaagcatctgcagccggcacgagagcctggtcaatgatttcctcctccgggtgtgcgacaggtaggccaccttgcctcctgagcagtgctggccccgctagctctggcttccctcttggggggcagggaagagcaaattacgagaccaagatggctccaccttcggggc

SEQ ID NO: 342215 - DNA, 389 bp, Homo sapiens
  chr15:64439389-64439778
  hypo
cgctgccgcccgcccagcccgggcccagaaaagaatccagcctctgtgccccgtggcgcccacaagctcgtggcccaggggctgtttgttttcttaacgaggttgaccaaacctcctgagcagcctttgtggcgcagcagaagccttgccggtgaaagggggctttgtgtgactgcaatggaagccagggcctgagctaaggcagggtctgtgggccagcctacccgtgcgcaggaatggggcgagtcggggtacatcttcactccccagcccttcctgccctctgctccttggttctatttccaagtggcaaactgccggctctatgcctgcatagaggagcgagtggagccaggcccccggcggggctgctgcggtaatcaggagac

SEQ ID NO: 342216 - DNA, 203 bp, Homo sapiens; identical to SEQ ID NO: 335142
  chr15:64454743-64454946
  hypo

SEQ ID NO: 342217 - DNA, 179 bp, Homo sapiens
  chr15:64674712-64674891
  hypo
cgaaacgaaacgaaaagaccctgccaaatgtggtaagaccacatcgctgtcacacagtgagcataactctaggataaagggtcataatttttttctatctttatgcttaccttctaattactcacaacacccctggggagtgattttcactctctaaataccatacataaaacagaatc

SEQ ID NO: 342218 - DNA, 64 bp, Homo sapiens
  chr15:64683091-64683155
  hypo
tcaaaaaaaaaaaaaaattatattccgcctgggaaggaggtcagtgcccgtcggcatgtattac

SEQ ID NO: 342219 - DNA, 82 bp, Homo sapiens
  chr15:65242083-65242165
  hypo
cggccaccgaatgctgctcatttggctgcatggcgtggccacggctggtgagaaccccagcaaagcgctgttcgagggcctc

SEQ ID NO: 342220 - DNA, 141 bp, Homo sapiens
  chr15:65862039-65862180
  hypo
cgtctcgataaaaaagaaaagccatggaattattaacacatgatagtagttatttataggggtcccacgtttgtagtgctctatttcttaacttgggttatataaactcaaatgtttatttggcagtattctttagactgc

SEQ ID NO: 342221 - DNA, 421 bp, Homo sapiens
  chr15:66946036-66946457
  hypo
cgaggccctggcatctctctcggggggccctgccacagcctcccagttggtgtccctgcttctgtcctcaccctccagtccattcaccacacaatggccagaggactctgaaaaacacacccgggtcatggcactccccgcctccgaccctctctctacctcctcgccaccacccctgacgtggaccactgaggcccatgccttctggcttctgccctctcctttcacgtcttgggcccctgctctgaacaaggggcctgtttttcgctctcagatctgtgggggtctcctctggcttcagcacctccacccagaagaccctcacggcccacactctcacccttcacctgggtcaacccgccctcagatctgagcaatcagtgtctcccaagggaagcctccccgaacacccgctccctgc

SEQ ID NO: 342222 - DNA, 67 bp, Homo sapiens
  chr15:67545420-67545487
  hypo
cggggataagcacaatcttgcgaaaattatccctattttatagatagaaggtgaaggggccgggcgc

SEQ ID NO: 342223 - DNA, 652 bp, Homo sapiens; identical to SEQ ID NO: 335146
  chr15:68115496-68116148
  hypo

SEQ ID NO: 342224 - DNA, 115 bp, Homo sapiens
  chr15:68888212-68888327
  hypo
cggagcgggcgtctgggaggaggaggtgttggagtgtggctctgaacctaggtgagggaaggagcagcgtgagcagaggccagggcagcgacgccgtggggtgctcccgagccac

SEQ ID NO: 342225 - DNA, 99 bp, Homo sapiens
  chr15:68893753-68893852
  hypo
cgaggataaaacggtaagtgtggcagaggcctcagcctgcacggagcttacagtcaagagtggtgtgaggtggggattgcggccatgagcgtgcagtgc

SEQ ID NO: 342226 - DNA, 100 bp, Homo sapiens
  chr15:68908928-68909028
  hypo
cgcggtcgaatgattctgacaagcggtgagtacggctgtgtcagcgcgtgggccccagcgcaagcaggcaatcccatgtcatctgcgagatctcccatgg

SEQ ID NO: 342227 - DNA, 174 bp, Homo sapiens
  chr15:68937507-68937681
  hypo
cgtccgcaataccgtagctccaagttccggaatgtctacgggaaggtggccaaccgggagcactgcttcgatgggatccccatcaccaagaatgtgcacgacaaccacttctgtgccgtcaacacccgcttcctggccatcgtcaccgagagcgcagggggcggctccttcctc

SEQ ID NO: 342228 - DNA, 410 bp, Homo sapiens
  chr15:70352928-70353338
  hypo
cgcagagccccggtgcttctcactggcccggaggctttccgagggtgacacagagttattctggaaggaaaaagagggttcggggttaaaactttctgctgcgtgtaacaattcacacatccgcacacagctaagtgcaggtgacacggaggtcaggggagggaagagaagctgaactcctctctgccctgcagatcgtggctccatcagagccttgccagggaagccttccccactcccctgagactgagtccccggggagatgccctgggcgcatccccaattctcttttgcagctctgcactgctattaaataattaaccctgcagtaagccgtctgccttctggcctgtgggactacgctctgtgagggcgagggtcacctgggtctcattcaccacccatctcgc

SEQ ID NO: 342229 - DNA, 240 bp, Homo sapiens
  chr15:70354323-70354563
  hypo
cgtggctcaggggcaagggccacttggagggaacggggctgggcagtattcggtgggaatagtgcggcaaccagcctcagaacttaatttcctttcctaagccgggttctgggcagccctacccggccaagtttctgcccgaagcaaattaaaatggcagagttatcaagccttgaagaaaaaatggaggttataatggaactgcagctcaaccttccccacagccgtgcaggagcggtg

SEQ ID NO: 342230 - DNA, 57 bp, Homo sapiens
  chr15:70355607-70355664
  hypo
cgcctatctaggcaaactgcctctccgaaaaaatgccactgttagaggatcagtacc

SEQ ID NO: 342231 - DNA, 212 bp, Homo sapiens; identical to SEQ ID NO: 267861
  chr15:70718602-70718814
  hypo

SEQ ID NO: 342232 - DNA, 35 bp, Homo sapiens; identical to SEQ ID NO: 216340
  chr15:71164699-71164734
  hypo

SEQ ID NO: 342233 - DNA, 1146 bp, Homo sapiens; identical to SEQ ID NO: 335164
  chr15:71184276-71185422
  hypo

SEQ ID NO: 342234 - DNA, 1032 bp, Homo sapiens; identical to SEQ ID NO: 335165
  chr15:71407571-71408603
  hypo

SEQ ID NO: 342235 - DNA, 220 bp, Homo sapiens
  chr15:72412075-72412295
  hypo
gagactccgtccccgcccccagaaaaaaaagatggaggtcatttaactacagagaggcttggagatggaatgagaaacttgagcggcgttatgtttggaataactggtctgggaaatgggagaaggagccactcttgcctttctcttcagcactgttcattcctcagtgtttatcaggtccaaattagttacttgtctctttgctctcccgttcccttcc

SEQ ID NO: 342236 - DNA, 347 bp, Homo sapiens
  chr15:72462436-72462783
  hypo
cgcaggcagaggttctgggatggctgacggagtaggcgggtctcacacagcgtctttcccgaaagccagaagttctgcttatgcctaggctgggaggaaaatcaacctgtctacctcatctccagtgccaggcagctcgtaggccaggctgagtgaggcctctagccccacccttgaggaggcacactgagagggaggaccctgagactcgcttatgccgagaacaaaagtgtccaaagtacccgcgcagcatgactgtaaaccatcaggttccgggaaagtaggctgagcacaggaggccttatcaaagctcaggagctgatgcgctgaaggtgtgggaggtggac

SEQ ID NO: 342237 - DNA, 631 bp, Homo sapiens; identical to SEQ ID NO: 335167
  chr15:72564635-72565266
  hypo

SEQ ID NO: 342238 - DNA, 182 bp, Homo sapiens; identical to SEQ ID NO: 267884
  chr15:72581555-72581737
  hypo

SEQ ID NO: 342239 - DNA, 181 bp, Homo sapiens
  chr15:72992573-72992754
  hypo
cggcctgaacatttatttactggttttttttgtgtgtgcatgtgtgtgcaagttttcacttgaataagtgcctagggagtggaattgcttggtcatatgtgaactgtttgttttaactttataataaactgccgaagtattttccaaagtggttgtacagttttacccgaccgccagcaac

SEQ ID NO: 342240 - DNA, 208 bp, Homo sapiens
  chr15:73615718-73615926
  hypo
ggctatggtggtggcggctacgccagctgatggtgtgggagccgagggggagccacaggccccggggggtggggaggagctggatgagggcaggagtgggctcagtccagcgggggcagagaatccagccagctgttggatgtggaaggaggatgaagacggtgtgtccacctgggacgggctgctggcgggcgaggcggagcccagc

SEQ ID NO: 342241 - DNA, 1095 bp, Homo sapiens; identical to SEQ ID NO: 335175
  chr15:74725128-74726223
  hypo

SEQ ID NO: 342242 - DNA, 536 bp, Homo sapiens; identical to SEQ ID NO: 335178
  chr15:75248554-75249090
  hypo

SEQ ID NO: 342243 - DNA, 191 bp, Homo sapiens; identical to SEQ ID NO: 335181
  chr15:75976190-75976381
  hypo

SEQ ID NO: 342244 - DNA, 127 bp, Homo sapiens
  chr15:76197442-76197569
  hypo
cgtgagccaccgcgcccggcatgttgggccttttaagtatccacattttcactattaacaacaacgctgtgcagaaccttcccttcacctgcttcccttgaagcaactttttgttgtctgttttacc

SEQ ID NO: 342245 - DNA, 96 bp, Homo sapiens
  chr15:76558876-76558972
  hypo
cgataaaatccaaacttctactccctttcaatatcaaggaatgaagttagaacaaagtgctattaagcctcaaaaagttcaaatttggccgggtgc

SEQ ID NO: 342246 - DNA, 384 bp, Homo sapiens
  chr15:77906720-77907104
  hypo
cgggcatggagtcgttgccgcccgcgttggccgcgatgcacaggtacgtgccgttgtcctgtacctgggcgtagcgcacctccagcgtgccatcagggaagactgtgagccgcccattgctcttggctgagaccaggtgctttcggggtgagagccagaggatggcgggcggcgggtcgccatcggcccggcacacaaactgcaccgtgtggccctcgtccacaaacacctgctgggccttgcggtcccggatgcgggcgcggcggcaggtgaagtagttgggcagtagcacatcagggaagtccttgaactccttgccctggacaaactcgggcgtggcgcacgtgggctgctgccggttgaagttgagccgccagcggcgcc

SEQ ID NO: 342247 - DNA, 108 bp, Homo sapiens
  chr15:77908027-77908135
  hypo
cgcgtctcggtggggatgccctcggggactgccacaaagcgcttgcggtggcacagcacagcgcggtcctgggcggagcactcgcagcggggcgggcagcccgtggcc

SEQ ID NO: 342248 - DNA, 274 bp, Homo sapiens
  chr15:78010517-78010791
  hypo
cggaggggtcttgccgtggccctcagcttcacacgcagacctacacaggaagacacgtatgtgtgaacatgcagggacagagctggagaagtgcagcaccccagacacgcgggtttaacagccacatgtatgaatgcacacgctcatgcatacccacgcccatcccatgtatacagaggagcatgcccacgcatggctgtgcatgtgatatgcacacagcgcccacatgtatacacacacgtgtcaacatgcacacctggacgagctcacacac

SEQ ID NO: 342249 - DNA, 210 bp, Homo sapiens
  chr15:78596062-78596272
  hypo
cgcgcccggccactgtttacactattgttgcagtagctgctgccatcaccgggctgcggcagggaggcacagctggggctgcatgctggtggatgcctcccccttctgagttggggagagctccccaggtgctgctgcagccgcccaaacagcagttgcagatccaggcctcctgctttacggagcaggcagggtcgccaccctcctggg

SEQ ID NO: 342250 - DNA, 968 bp, Homo sapiens; identical to SEQ ID NO: 335190
  chr15:78912246-78913214
  hypo

SEQ ID NO: 342251 - DNA, 173 bp, Homo sapiens
  chr15:79081981-79082154
  hypo
cgagggtgaagctcggctctcagtgtagcaatgggggcaggcacagtacctgtgcccgagctcgtgggctacagtgaaggccagcggcaggcccgtgtcctcgttgatgctgcagctgcggtgcggctggcacatgcccgccacatgggacagtcccagggtctcacagggcc

SEQ ID NO: 342252 - DNA, 238 bp, Homo sapiens
  chr15:79163927-79164165
  hypo
cgtaggaggataaaggtttacataggggatgcaggtaggctaagggctgtttgtggaaggatttaaataccaggctaaggactttgagatttatcgtctaaagttcattgagcacttattcattgttgggtaccgcgctaagcccgtatatgtaattctcacaataaactgacggaaatggtgctattttgcagcttagccaacaaagttgtttttgaacagggaacgacataaatcc

SEQ ID NO: 342253 - DNA, 58 bp, Homo sapiens
  chr15:79208280-79208338
  hypo
cgctgagtatttccataaatcatctcaattctgtccacaaaatcgtgaaggcggccaa

SEQ ID NO: 342254 - DNA, 2466 bp, Homo sapiens; identical to SEQ ID NO: 335191
  chr15:79381742-79384208
  hypo

SEQ ID NO: 342255 - DNA, 802 bp, Homo sapiens; identical to SEQ ID NO: 335193
  chr15:79724808-79725610
  hypo

SEQ ID NO: 342256 - DNA, 1218 bp, Homo sapiens; identical to SEQ ID NO: 335194
  chr15:80215312-80216530
  hypo

SEQ ID NO: 342257 - DNA, 152 bp, Homo sapiens
  chr15:80295619-80295771
  hypo
cgtgcgattcgcaagggagggtgggggataggagtggtccctctgctacagcacaaggcgtgttcggacatgtctgggcaagtccgggcacaacaagagcgggagggctgctcacaggctagaaacaagaaagtacaaggaggtgaggctcc

SEQ ID NO: 342258 - DNA, 187 bp, Homo sapiens
  chr15:80471858-80472045
  hypo
cgtgcattgcatctgagcgtctcggtgggcacgtggtgccttggccccctctgcccacagcctgaccgcccacagctctccctcgctccttggcctgccctgacatcgtgtttgaatcgttcagctccattgcccagtgtccatcccaaggcccggcatgggagaatgggagcgagggctttgctca

SEQ ID NO: 342259 - DNA, 194 bp, Homo sapiens; identical to SEQ ID NO: 335197
  chr15:81294107-81294301
  hypo

SEQ ID NO: 342260 - DNA, 530 bp, Homo sapiens; identical to SEQ ID NO: 335198
  chr15:82339684-82340214
  hypo

SEQ ID NO: 342261 - DNA, 1016 bp, Homo sapiens; identical to SEQ ID NO: 335200
  chr15:83316057-83317073
  hypo

SEQ ID NO: 342262 - DNA, 800 bp, Homo sapiens; identical to SEQ ID NO: 335202
  chr15:83377928-83378728
  hypo

SEQ ID NO: 342263 - DNA, 81 bp, Homo sapiens
  chr15:83523581-83523662
  hypo
gggtgggtgctgtcccgtctggctccgcccgcgtggggaaggggactccgccatccctcagcacacccctggggggcccac

SEQ ID NO: 342264 - DNA, 113 bp, Homo sapiens
  chr15:83572358-83572471
  hypo
gaaactcctctaaacacacacacacacacggcaacaagagcgaaactcctctaaacacacacacacacacacgccacaccccacatcaagtaaaaagctgaacaagactgggc

SEQ ID NO: 342265 - DNA, 1025 bp, Homo sapiens; identical to SEQ ID NO: 335204
  chr15:83775916-83776941
  hypo

SEQ ID NO: 342266 - DNA, 2282 bp, Homo sapiens; identical to SEQ ID NO: 335206
  chr15:83951722-83954004
  hypo

SEQ ID NO: 342267 - DNA, 922 bp, Homo sapiens; identical to SEQ ID NO: 335207
  chr15:84322693-84323615
  hypo

SEQ ID NO: 342268 - DNA, 305 bp, Homo sapiens
  chr15:86306299-86306604
  hypo
cgccttaaagggcctggagtacggggtgcccagtgggagagaaagagagagaaggagagaatgttcacagcaagatcacccttagtgggtaagcgggggcctcctgcagccgctggctgctatcccctaggctgtggatccaaccgcaacactggagcaaggggctgccctggaggtcgctcaggttccagctcagcaattccccgccgcttctggacggctgctggccaagcctgtgctctgtgccaggggcgcagacgtgaggatgcccgtggccagctccccagaggcgcctgcaggcaggc

SEQ ID NO: 342269 - DNA, 2446 bp, Homo sapiens; identical to SEQ ID NO: 335208
  chr15:88798893-88801339
  hypo

SEQ ID NO: 342270 - DNA, 876 bp, Homo sapiens; identical to SEQ ID NO: 335210
  chr15:89346018-89346894
  hypo

SEQ ID NO: 342271 - DNA, 121 bp, Homo sapiens
  chr15:89386721-89386842
  hypo
cgccggctggctggccgaccgcagcgtgcgctaccccatctccaaggcccggcccaactgcggtggcaacctcctgggcgtgaggaccgtctacgtgcatgccaaccagacgggctacccc

SEQ ID NO: 342272 - DNA, 478 bp, Homo sapiens
  chr15:89876331-89876809
  hypo
cgagggggatatggccaccgccaatgtggggcaagttccctctgccaagcagacctccacgtcgaacaccagggcccgctcctcggggatggccacgggtacggcctccccctcggggccgtaccgggtccagccctccgcccaggcccaagccgggggcttcgggggcagctgggcctgcaacagcaagttggccgcctccaggtagggcaggctctgcttctgggccaggaggcggaagtgctggtccaggttgtccccgtagaggggcggcaggcgcagctccacgtcgggcaagggcacggctggctgcccccagagcccgtgcttctgcaggtgctcgacgctgcggcgcaccgcggcctcgccaggcatctcccctccttgcccgaagatttgctcgtgcagccctctcgagagcatctggatgtccaatgggttgtgccgcagctgcccgccctccgaggatagcacttgc

SEQ ID NO: 342273 - DNA, 107 bp, Homo sapiens
  chr15:90378787-90378894
  hypo
cgccaatgttgatgttccgaggaatctctggcaggttgatgtttttcacagcagacacagcccgcgcaggggctgctgaaaggccaccctaagaagaaatgagaggc

SEQ ID NO: 342274 - DNA, 161 bp, Homo sapiens
  chr15:90501233-90501394
  hypo
cgactgagcgacgtgcagtaatttgaaggaacgcattactggtgcacactcttctacctgtccggagggcctctctgccccttcctcccacatgctctaagcttggaggaggagttgctaagtgttaattgggtcctgtttggcagcggatggggtcactg

SEQ ID NO: 342275 - DNA, 106 bp, Homo sapiens
  chr15:90501638-90501744
  hypo
cggaggggaggccgtgttagacatggccaggcctgcaagctcagactgcccacggcctcctgacccagaagaaaaatgaaaatgcatatactcattgtcgcagcgc

SEQ ID NO: 342276 - DNA, 505 bp, Homo sapiens; identical to SEQ ID NO: 268065
  chr15:90611268-90611773
  hypo

SEQ ID NO: 342277 - DNA, 98 bp, Homo sapiens
  chr15:90746768-90746866
  hypo
cgaggggaatcgaggggacctgcttcccgaggagcagctagaatacttggttattattaccaatgcagctgcaggacctggtccacttctacaagccc

SEQ ID NO: 342278 - DNA, 545 bp, Homo sapiens
  chr15:90755573-90756118
  hypo
cggggtggagggagagggttcaccctgaatgggaaaaccggccgcagcctcggcgtgccctgctttcttcatactggactaacccactggatagatggatttagaggatgtccgagcagcacaggcagcccaggagagcgagcgagacactctttgacacaagggagagcataaaagcttaagactgaccccaaggtgcgccagcccctcgcaggaagtaaagtgcagaaacacctccacccctgcacaaagagcacctaggagtgagtgcgcaagcgtggacaagccctgcggtaccgtgtacacacacacacacacacacacaccacaggcaagctcaggcagggtccttcacagacgtctgcagtcactctggaggtgacccaagcacctgggcccttagacagtaacaccactcacaccgagcacagaccagctcgcgcccacaacacgagcctgtgacacgcaagtctctgtttctgagctgatgccgtctggctttggccatgagaccctcgtgtgaccaggtgcgtgcctaagttaga

SEQ ID NO: 342279 - DNA, 360 bp, Homo sapiens
  chr15:90903997-90904357
  hypo
cccacacgggagaacggcccttcaaatgcccggagtgcgggaagggcttcagagatagttctcattttgtagctcacatgagcactcattcaggagagaggcctttcagttgtcctgactgccacaaaagcttcagtcagagctcacatttggtcacgcaccaaagaacacacacaggtgagagaccttttaagtgcgaaaactgtgggaaaggattcgccgacagctccgccctcattaagcaccaacgaatccacaccggagaaagaccctacaaatgtggagagtgtgggaagagcttcaatcagagctcccactttattacccatcagcgaatccacttaggagacaggccctatc

SEQ ID NO: 342280 - DNA, 69 bp, Homo sapiens
  chr15:91185750-91185819
  hypo
cgtccgcaccgaaggcgggcccggagtgggaggctcggcctggggcggcggcaccggagagggcacctc

SEQ ID NO: 342281 - DNA, 86 bp, Homo sapiens
  chr15:91423329-91423415
  hypo
cgggaaacggctcgaggtgcggaagaccgtgaccgcgtgcctgggcgagcccaaccacatcactcggctggagcacgctcaggcgc

SEQ ID NO: 342282 - DNA, 696 bp, Homo sapiens; identical to SEQ ID NO: 335225
  chr15:91427360-91428056
  hypo

SEQ ID NO: 342283 - DNA, 387 bp, Homo sapiens
  chr15:91503650-91504037
  hypo
cggcattactggatctccccatgggctcagatgcagtcaaggccagctgtggatcccggcacacagctgtggtgacacgtgagtggggctgggaggcactctgctccactcgagctggtgcctacggaagggggtgtggtcgacggaaaaacttctgtcttaaggcttctgtggctcatacagagcagctaccttgctcagtggataagccccaacccccttgttgtttcacagtagttccccagcctgtcaggcccagaagtttcttccttctggtgggaggctgatgctttctgtcctccctgcacggccacagacacattccctgcccgccgccgcctctgacagcagggactgtccagtctggcatggaagactgcggcgctc

SEQ ID NO: 342284 - DNA, 294 bp, Homo sapiens
  chr15:91840031-91840325
  hypo
cgctccttctgcccgatcgctgggctcacgctccttctgcccgatcttgggcgcacgctccttctgcccgatcgttgggcgcacgctccttctgcccgatcgttgggcgcatgctccttctgcccgatcgttgggagcacgctcattctgcccgattgttgggagcacgctccttctgcccgatcgttgggcgcacgctccttctgcccgatcgttgggcgcacgcttcttctgcctgatcgttgggcgcacgctccttctgcctgatcgttgggcgcacgctccttctgcctg

SEQ ID NO: 342285 - DNA, 423 bp, Homo sapiens; identical to SEQ ID NO: 335227
  chr15:92459227-92459650
  hypo

SEQ ID NO: 342286 - DNA, 907 bp, Homo sapiens; identical to SEQ ID NO: 335228
  chr15:92936677-92937584
  hypo

SEQ ID NO: 342287 - DNA, 235 bp, Homo sapiens
  chr15:93179848-93180083
  hypo
cgcggagataggctgcatggggcttgagagtatagactggaagcaactcgggaaaatcacagggcatagtgagcacatatgacccctgagagggccagggggtgctccagctgagacctccccaacaggtcgccttgagtcatccctggtatgccctgctctgtcacccccactcactcccatccaagagccccactccacgcctcaccggagttcgcagccacttgactttagc

SEQ ID NO: 342288 - DNA, 145 bp, Homo sapiens
  chr15:93433733-93433878
  hypo
cctgctatatttcttgattatgatctgtccgaatgactaaaggaatttagatttgggaagataaacagggacttgctctataatttgaaaattagtcctaaagaagcatttgggtagcatagttttaactaaaatcctaaacttc

SEQ ID NO: 342289 - DNA, 67 bp, Homo sapiens
  chr15:93504252-93504319
  hypo
cgcatttgtgttttttattttaattaggattttagtctatagctttttgttttgttttgatgtttac

SEQ ID NO: 342290 - DNA, 534 bp, Homo sapiens
  chr15:93595095-93595629
  hypo
ctgtgtccccgctccgctccgtcttcccccattcccaggcacccgaggccctctcagcctctcagtgtccacgcagggcagagacaaagggcagggctgtgccctacagccgccccctcccccttaccttgctggtggcagtggccgctgagccgggcagcacaggcgtgttggtgacctgcacgttcaggtaattattgtcgatgagcggccaggcgccctgcaccttgcaggtctggaagcggtcggtgaaagtcctgaggtgtgggtccccgaagaggccacagtgcgtgtagttgggggtggccgagtgcttgtgaaagctcttctcgtaatggcagatctcggggctgtccgagcgctcctggctgtctccggccggtgggagcgtgcgcaggcgtggctgcgaggtggggccatccttggagcagttgtgctggctcatgaggtcctctatgccatggacggccgagtggtaggccaggtcaccccggcaggtgcgggccgtccgccgcgtgcacagggcgtagctgc

SEQ ID NO: 342291 - DNA, 351 bp, Homo sapiens
  chr15:94048797-94049148
  hypo
cgcctccgcctgggttttacttgcgtccactgggcttgttctgcccacttggcccggcaggctgagctgggctcatgctactgcccagatcccacgcctgccaagggcgagccaggtgcggagcagcaaggggtgtgtgagtgagcgagcatggagtctggccactgtgtgtagccatgcgtgctggctgcagcagggtgggccactccaggcgccggcacaagcgccggctccagccctgtgtgaacctgcagctggagcatgtgtaccacaagcggcttctgctgtgggccccagcgtctggtcaaggggaatgcaattgcgcccaaaagcttggagatgccaggaacc

SEQ ID NO: 342292 - DNA, 757 bp, Homo sapiens; identical to SEQ ID NO: 335233
  chr15:94774574-94775331
  hypo

SEQ ID NO: 342293 - DNA, 353 bp, Homo sapiens
  chr15:94881658-94882011
  hypo
cgacgcacatgcatgtaacacacgcacaatacataattcatgtattatgtttgcaggcattttttttttttttttttttacttccattgatctgaaaaatgtggaggagggtctgccatcagcccttctttttgctttgggcggagtgactggagggacattattcatttcttttggcgtctgtttcaaagctcccagggaggagccgggcgggtcagcggtgtcagcactgaggccagctgagggcctggctgatgtggagttcagctgccctggctgagacaatgttggctgctttagtgcaggtgcggggacgcagcaaagaatggcaactttgtcaatttaatctctac

SEQ ID NO: 342294 - DNA, 875 bp, Homo sapiens; identical to SEQ ID NO: 335235
  chr15:96873798-96874673
  hypo

SEQ ID NO: 342295 - DNA, 863 bp, Homo sapiens; identical to SEQ ID NO: 335240
  chr15:99192824-99193687
  hypo

SEQ ID NO: 342296 - DNA, 163 bp, Homo sapiens
  chr15:99250371-99250534
  hypo
atacttggctgctgagctgtcgttcaggccttggcaactgacgctctgcagaacggaccaggagtgtgcggtggtggagtccggctggcctgggttgcagatttaactttcgcctctgcctctgtgtgcctctgggctgtaagctttagtttgcacggttaac

SEQ ID NO: 342297 - DNA, 230 bp, Homo sapiens
  chr15:99254469-99254699
  hypo
cgaaaacattaagcacagaagaatcccattcaggtaatcttctgttggctggctgtagaactacggagaacatctggagaaacacgtcaagggtgtgtgtgaaatcgttgagcctactcgattttgtcgtgctgttgcgcggttttcacttggcactgtcctttaaactccttctgtgccgtgactctgcagtgtctggcagcgtagtagactctactccctctatggac

SEQ ID NO: 342298 - DNA, 223 bp, Homo sapiens
  chr15:99256135-99256358
  hypo
gccatctagtgtgcactttggactgatgagctcccctacctgaaatcctgtagcaagtccctataggataggcatgtggtacagtgtgaagctcctgagtggtcaacagctaccccgtgacaacatgccacactccatgtgccactccctcccgcctgcctgctgtgtccttggccccagtggtgctctcccgtgctgaccagccggcacggctcacctggcc

SEQ ID NO: 342299 - DNA, 182 bp, Homo sapiens
  chr15:99276224-99276406
  hypo
cgcgagcccatttttcaaggatacatgtttgtcttttagattctataaggagtagctgctacacagaaagatgtctacgtgtgggtgaacacctggcgtatcccatgcagggaggcttcagcagaccttggtggcgatggaaccaccacagtgatccgaggattgggtctgaaggctcctcc

SEQ ID NO: 342300 - DNA, 453 bp, Homo sapiens
  chr15:99434503-99434956
  hypo
cggtgcctcccctgcccggtctcatctccgtctctcctctctctccacagtgtgcccaagcacgtgtgggaagcgggcgtgcaccgagaacaatgagtgctgccaccccgagtgcctgggcagctgcagcgcgcctgacaacgacacggcctgtgtagcttgccgccactactactatgccggtgtctgtgtgcctgcctgcccgcccaacacctacaggtttgagggctggcgctgtgtggaccgtgacttctgcgccaacatcctcagcgccgagagcagcgactccgaggggtttgtgatccacgacggcgagtgcatgcaggagtgcccctcgggcttcatccgcaacggcagccagaggtcagtcgcggccacacgtgtggtcactacccgccccacctcacccgccaccctagcacacaaaggtagactctgtcggttgtttcatcc

SEQ ID NO: 342301 - DNA, 191 bp, Homo sapiens
  chr15:99451886-99452077
  hypo
cgctaacatcgatttctgtgcttctaggaattactccttctacgtcctcgacaaccagaacttgcagcaactgtgggactgggaccaccgcaacctgaccatcaaagcagggaaaatgtactttgctttcaatcccaaattatgtgtttccgaaatttaccgcatggaggaagtgacggggactaaagggc

SEQ ID NO: 342302 - DNA, 135 bp, Homo sapiens
  chr15:99453288-99453423
  hypo
cgatgcgtgtttggctttggcttgtttcgctggtgtctggatttacctggcgacacttgttgctctgggggatcttagagggaagcacgctgactgacctagggctgaacagcaggctgacgaccagcgccgcct

SEQ ID NO: 342303 - DNA, 91 bp, Homo sapiens
  chr15:99454579-99454670
  hypo
cgtcgaagaatcgcatcatcataacctggcaccggtaccggccccctgactacagggatctcatcagcttcaccgtttactacaaggaagc

SEQ ID NO: 342304 - DNA, 379 bp, Homo sapiens
  chr15:99459893-99460272
  hypo
cgagaagacaaaatccccatcaggaagtatgccgacggcaccatcgacattgaggaggtcacagagaaccccaagactgaggtgtgtggtggggagaaagggccttgctgcgcctgccccaaaactgaagccgagaagcaggccgagaaggaggaggctgaataccgcaaagtctttgagaatttcctgcacaactccatcttcgtgcccaggtacccagctcatgtgaaatttcagttggcaaaacccactgctcaggccggttctgttgcctttctccccaccaggtagtgtgtaagtcagcagctggggggtacaatacagtagccactgagacggagccgaaaaagatgacaggttcggtgaagtgagtccctgc

SEQ ID NO: 342305 - DNA, 209 bp, Homo sapiens
  chr15:99465447-99465656
  hypo
cggccgcagacacctacaacatcaccgacccggaagagctggagacagagtaccctttctttgagagcagagtggataacaaggagagaactgtcatttctaaccttcggcctttcacattgtaccgcatcgatatccacagctgcaaccacgaggctgagaagctgggctgcagcgcctccaacttcgtctttgcaaggactatgccc

SEQ ID NO: 342306 - DNA, 264 bp, Homo sapiens
  chr15:99482498-99482762
  hypo
atggcatacctcaacgccaataagttcgtccacagagaccttgctgcccggaattgcatggtagccgaagatttcacagtcaaaatcggaggtgtgtccttagctttccaggtctgggcaagaactaaactcaggtgttttgaggactttgttggcattagtctgcccctggagaggttttctagtgtgtcccttgagtgcacggactccttcttgggaatgatgtgattgtctccagttgatggtcacaaacctggcacggtc

SEQ ID NO: 342307 - DNA, 284 bp, Homo sapiens
  chr15:99497074-99497358
  hypo
cgggaatcgagtgcttgagtgggacccagacagacaggaagggcgctcctgctcagttagccccagtaagctcactgaggcacacaggccccatgtccacagccgctcctggctgaggcgtggttcctaagacgacccttactgttgagggctgccaggagggagagacacattcagccccgcaggtcctctgggaatccggtgagcgtcggcaccgggctggggccgtgctgattcccggcagcgtgtgggaatgtgcgggtgcctcgtggcctgctgacatc

SEQ ID NO: 342308 - DNA, 259 bp, Homo sapiens
  chr15:99504099-99504358
  hypo
gcccagtggccggcgccgaggctcgtggcgtcacgccccccccgccagggctgtacctccgtctccctggtcctgctgctcacaggacagacggctcgctcccctcttccagcagctgctcttacaggcactgatgatttcgctgggaagtgtggcgggcagctttgcctaagcgtggatggctcctcggcaattccagcctaagtgaaggcgctcaggagcctcctgctggaacgcgacccatctctcccaggacccc

SEQ ID NO: 342309 - DNA, 130 bp, Homo sapiens
  chr15:99505061-99505191
  hypo
cgtgttcgtggccgacctggcctctcctggcctgtttcttaagatgcggagtcacatttcaatggtacgaaaagtggcttcgtaaaatagaagagcagtcactgtggaactaccaaatggcgagatgctc

SEQ ID NO: 342310 - DNA, 136 bp, Homo sapiens
  chr15:99506062-99506198
  hypo
cggagttaaggcgaattgttcaagaacacaaactacatcgcactcgtcagttgtcagttctggggcatgactttagcgttttgtttctgcgagaacataacgatcactcatttttatgtcccacgtgtgtgtgtcc

SEQ ID NO: 342311 - DNA, 1399 bp, Homo sapiens; identical to SEQ ID NO: 335242
  chr15:100881161-100882560
  hypo

SEQ ID NO: 342312 - DNA, 497 bp, Homo sapiens; identical to SEQ ID NO: 335245
  chr15:101458286-101458783
  hypo

SEQ ID NO: 342313 - DNA, 1300 bp, Homo sapiens; identical to SEQ ID NO: 335246
  chr15:101459085-101460385
  hypo

SEQ ID NO: 342314 - DNA, 148 bp, Homo sapiens
  chr15:101464778-101464926
  hypo
cggcagtggcagtgacaacagcgggacctgcctttgaagatcggctgctgcaagggttgatggctggcatgtcgcaaagaccccccagcatgtactggtgtgtggggccggaggagtcagctgtgtgtccagaacgtgccatggagac

SEQ ID NO: 342315 - DNA, 128 bp, Homo sapiens
  chr15:101785799-101785927
  hypo
cgtgaagctgccggtgcaatggaaacagtcacgcacaatccgctattgacagccacatctatccctggaatcaatccgctattgacagccacagccatccctggaaatccctggaatattgtttgagc

SEQ ID NO: 342316 - DNA, 157 bp, Homo sapiens
  chr15:101845367-101845524
  hypo
cgccgctcctgaaacagactctggccgacagtctggaggaaggtggacggatggatggatgggagtgcctgccctctgtgggcagctaggcacccttacccggccaggaggcacgtgcggcagcagaactgaatgaagagcttccgttcgcacagcc

SEQ ID NO: 342317 - DNA, 409 bp, Homo sapiens
  chr15:101910626-101911035
  hypo
cgaaccaccacgtgctccaagtagaccacccgctggtccgagtgctccgcgcaggcgctggtcagggccgtagtccgcagcacctgcactaaggggatgctcctgggggagaagggagggctcagcacttggcaccggaagcatgaagtctcacccacacagccaggagctccagcgcccgtccactctatccccactgcagcctcagggccctgcgggccccggggagccgcagcagcctctgactgcctcacgtggatgctccactgtgaactttatcacctgtcctgaagacgtttatgcctctggaatttgcttacagagatttgaaagatggttcggctgggcactgtggctcacgcctctgatcccagctctttgggaggccgaggcaccgcctgctgccacc

SEQ ID NO: 342318 - DNA, 247 bp, Homo sapiens
  chr15:101938625-101938872
  hypo
cgaaagcctgcttagccagtcggccgggcccgtccaccgtcttgccgtcgtcgtccggcccccagctggcactgtaaatgtcgatgtagttgggtctgatgcccagcgactttgcctcgaccacatctgtgacatcgccgtccagcatgcggatgcctgaaagcacagaggaggctcggtgtcggcgcccaggctccgggcacacagcgacgggaacccgggcccaggaggctcggatgaggacacc

SEQ ID NO: 342319 - DNA, 216 bp, Homo sapiens
  chr15:102020345-102020561
  hypo
cggtagtctgctccatttgggctgtttctgcccactctcactgagaagatggattttcccaacaaggactctagaagtgatggatgctggccggtggcagaaatacaagagcccccgaggaagattagagaactaacagtgacagcctcttcccagcccaattcagtaaatgggtccatgtgcggctgggcagagccacaggtcgggcgtggctgc

SEQ ID NO: 342320 - DNA, 454 bp, Homo sapiens
  chr15:102043027-102043481
  hypo
ccacctcctgggcctcactccgccctatacacgcgcacacttaatgacatctctgatcatgtcttcaggacgcataccctctttgacttgaaaaagtaacaactgtttgtggccttctcacaggccgaaaagaacaagcggggtccagtggagaaaggtgaggcatgggaaggcctggcccgagcactgtgacttcagcgaggcaccctccacccctctcagctttcctggtctgaaagtagaatttcgccagagggtgagccgacaggtagagctgtttccacctgcgtgtgctgcctgtgagctggggaactgcccacactgggaggggttgggaagcgtaggagggcacctgtcgcagacgttgaggaggggctgcctttcccctccaggggctgacctcccaggtgattcccagagccagaccacaattccagaattcagtgaaaacagc

SEQ ID NO: 342321 - DNA, 544 bp, Homo sapiens
  chr15:102076822-102077366
  hypo
cgtggggacagacccggggaaggtggcagagaaagaaccccagtcgggtggtgggtggtccccagctcagcgctgtcctggggccagtgattcggcctccgggccccagcttcattgtctgggtcttcctggcagggcagtggcgaggagttctacgagctaacgggagtggaatgcctgccctttctcatctccctgacgtgaatcagtttctccaagttcttcacctaacagagcagaaatggtgactcgcggccacacccggggctcttagtcttggaggcctgtccccgccccatctgctgctgcccacagggaaccctcctagagccgtcacggggcataaggcccagggggcctcgcgagctgatctttcctgtgcggagccaaggatgcagcagagggtgtgctcacggcgaggtgtccctctccggaggcagctcttcagggtttggcagaggagaggagcgcagtgaccacccagcactgccctaaggtttgcaggcacccgggagggacaatggctccatggcgggcggaggcc

SEQ ID NO: 342322 - DNA, 124 bp, Homo sapiens
  chr15:102226045-102226169
  hypo
cgaagcgtgctatgtgctctcatgaaaaggtctgcttcgcttttaatactcaccagtgccctggacaattcatgggtttgagggcaaaagtgtccttttcaatctcaaaggtaaacatgttctc

SEQ ID NO: 342323 - DNA, 295 bp, Homo sapiens
  chr16:94400-94695
  hypo
cgtaaggcattttggttgtacactccgtttaaccctgaggctgctgaaaatcagcacatggtgaatacgacatttgtaaggcaggcccaaggagatatcgggcataaattacagaagttggaagctccgcaggcgtgaatgctactcagcttattaaagtggctaccaaggtgtacattaacggagatcaggaggctgatcagaggcttaagaaaggctaatttactagcagcagcgcttacaggaagagaagctagctttgcaagaaggcatggacgcgggcgtgaatgcagtc

SEQ ID NO: 342324 - DNA, 104 bp, Homo sapiens
  chr16:114357-114461
  hypo
cgctgtgggaaggccctgcgggcagcccggggacccaagaggggcagagtgtggacacgcccgaagcgtacttgtcggctgctaagaggcaagagcatccgggc

SEQ ID NO: 342325 - DNA, 322 bp, Homo sapiens
  chr16:142447-142769
  hypo
cgtagcacttgcacggcaagcccccaaaaccaaggagaagcaggtggcagtgctgagggctctcagatcagaaccaacagccaggcaggtagtgcctatccactacacacctgccactctgggctccttgagcttctgtgactcacctcctgcacagcgggggccaggggattcctaaattctgacaaggagaccggcaaggagaacttggcaagaacggacggcaggtcatgagatgggaactggtgggagaactgctcggccagcggggagtacctgcaggcaggtgagcatgccagtgagtgcagcagacccccccacc

SEQ ID NO: 342326 - DNA, 117 bp, Homo sapiens
  chr16:189554-189671
  hypo
aggagatctttgagaccttgggcgaggcagtgacactaaaggcaggagcgactacagaagaataaattaaacttcatcagattaaaaactttactgcggccgggcgcggtggctcac

SEQ ID NO: 342327 - DNA, 100 bp, Homo sapiens; identical to SEQ ID NO: 268265
  chr16:300218-300318
  hypo

SEQ ID NO: 342328 - DNA, 354 bp, Homo sapiens; identical to SEQ ID NO: 216521
  chr16:311206-311560
  hypo

SEQ ID NO: 342329 - DNA, 211 bp, Homo sapiens
  chr16:318615-318826
  hypo
atcgggggggaggccgcggcctcgaggtgggaaagcaggtgccggcgcacctgtggacaaattctggaacgcgtttggcgagggaggaataggcgcagctccggaaggcagtgacctcgaggcagcctcagcacggcactctcttgggtcctcttccaggctcacactgggcgacagcggagaggctcttggacggggcagagctcgcgcc

SEQ ID NO: 342330 - DNA, 187 bp, Homo sapiens
  chr16:323421-323608
  hypo
cgctgacccctgcgctggccagcgacccccaccctcaccgcaggtgggctcaccgggggcctgttcaccagccagtaggtctgctcctggcacgcaatgaccagcctgtcccccttgctgcgctgcttggctgccctgggaggaggaggccgagttgagggcacgccctgcacacagcagcccctcc

SEQ ID NO: 342331 - DNA, 488 bp, Homo sapiens; identical to SEQ ID NO: 335249
  chr16:325111-325599
  hypo

SEQ ID NO: 342332 - DNA, 151 bp, Homo sapiens; identical to SEQ ID NO: 268273
  chr16:337627-337778
  hypo

SEQ ID NO: 342333 - DNA, 367 bp, Homo sapiens
  chr16:350669-351036
  hypo
cggatgctggagcagagccgggggacaggtgggtggtgggcatcccctggcggatgcagctatgctgcctccctttccttggttttgtaggactaaagggcccgggcactctggggagaaatcttaaccgagggtcttcctagggactaaaagtgtttggagttttgatgccgttcactgccttggccgagctccacatcggcaggaattctatcatggggctgtgaaatgttacagattaacttaaccactcggctaatggtttttgttttcttctttgtgctttaatttcccaaatttcacaatgaaaataggttatttaaaaaatctggagttcacgcctgtaatcccagcactttgggaggcc

SEQ ID NO: 342334 - DNA, 1717 bp, Homo sapiens
  chr16:410000-411717
  hypo
cgcctctccgggcgctgccgcccccccgttggtgctcatctgtccttctgcccactatccccagcggccccgatacctgcacaccccagtgcccagcggttccccctcgagctggcaaggggacattaaatgggaggtgaggaagtgcggcccccagcgggcagctgcctttgccccggcccacctgcgcccccgcccacctgtgccctccgccgcctccctctgcttggctgtcccaagatgtctctctccactgcctaggaaccctgaggccgcggccaagttctgagcgtgtgactgtgtgtgctgggccccaggcccctttgtcgccgcggcgtctgtcgtggcaaacaaaagtgaaccggattagccacagtggattaaaagatttacgtctcagagtttacctaataacctaacaatcgtgtcaacgggagctttgaacccccagggcgcgcctgccaggccaactgagagctcaaggcctctgtgggcagcaggacgtggtcggggggaggagacgcagccacggctgtcctcacacccagctcggcccctgcgggctcctctgggcagaacctggggaaggcacggcctctagcaggaggtggaggcctttgaaagggtgcaggtgttgggaccaggtacccggcccaggcccccagccgcgtccacacacgtcgcacacggcagcaaggacgcaagcagtgtggaggtggccgcgtcggcgacgtatgggccccgtggtgctgcggtgcacgacctctgtgctgtcaccccacagtgtccgctcctgcacgtacacgcgtgcacgcgcacacacgtgcacacgcacacacacacaagcacgccccgctttgatctctaaaggagagtccattgacaagctcttaatcgcagctgcccttgcagggcctgtccctgaagtcccgagtaatgggatttggcgcttctgatccatcgggctggccgcttcccgtgtcataggtggacattttttttctttatatcgcttctgtttcttttttttttttctcctcgaaaaaatgctgcttaaacggcaccgacttgacatggcttgtctcctaaccttggagtggcggccgggacgccggcctggatcagtcgggggtctttgatgccgcctccatgtgaaacctgacgtggaagacccaccggggcggttttggggtccgaggtccgtcaggattcatcctgcctcaccctgctccctttgtctcttcccctgacccttcctcgggacacccggagagggtctgagggtgagggtgcgggcgctgcgtgtgggcttgcactcgagggtggggtgggccgagggcagggccgcagccgcgagaacaatgggcagaggaggcgcgtccacctgtccgcccggccgcctgcccggcttacctcacctgcctggctccgtgtgcctgctcacgccccaccgtcccgctgtccgccatgatgggcttggccgtccgtccgagcactttcagccactctgggaagcaggtccctgctcttggccactgtgtggctgggaggcagaagcgtgactctgggctgcagctcgggctcctgccgccgattggctgaggcagggaccagatgacgggcctcagaaccctatggtagccatggcaaccagcccctttagacaccgccacccccgagccactcctgactgctgagggagcaggcggcactgccc

SEQ ID NO: 342335 - DNA, 72 bp, Homo sapiens
  chr16:440413-440485
  hypo
cgggagttcaggcgcgcaccactacacccacctaatttttaaaatttttttgggccgggcgcggtggctctc

SEQ ID NO: 342336 - DNA, 114 bp, Homo sapiens
  chr16:468053-468167
  hypo
cgcactcttttttgtccggcttctctcactgaacctgattgctcccagagtcacctgtgatgtcgtgtgtgtcagtagtgaaatcctcttcagggttgagccgggctccgcgcc

SEQ ID NO: 342337 - DNA, 320 bp, Homo sapiens
  chr16:521819-522139
  hypo
cgtggcgtctcctgtgtctcctgtcactgtgggtcccttgttctcaacatagctggggagagggtcttcgagcacagccgtggtcgacagagcgtaaccatgtccgccggtctggagggttagattccaggagagccacgtggctgcagcagaaaatgcatgaagttgaacttgagcccttgggggccgccgggaaggtggaggtggcagccgccagtcctggtcagcctgctgccgagcaagggtaccagaagtggggctgagctgctggccggtagggcctgggcttctcatgtcagtcctctgagccctgactcctc

SEQ ID NO: 342338 - DNA, 308 bp, Homo sapiens
  chr16:524299-524607
  hypo
cgcagtgctcacaccggggtggtcgggtaaaatgtgcagttagtcatggccgagctagtgggtctgctggctcgcactgttttcccagggatcctttcagcaggcagcttataacgggaaagttgctgctatggtgtctgagtaagtggggagagtagaaggggatggactgtggcgccgctgagttcctgggcatggtgatgtctgaggatctgagcaggtggagcccagggggtggtggggctgtttgtcgggtttctggaagagcgaagggaaagtcagggagtgtaaggcgcatctcacagaat

SEQ ID NO: 342339 - DNA, 127 bp, Homo sapiens
  chr16:533136-533263
  hypo
gagctagttggggccggagtagagggacgggcagagtctgggagaaggtcagatgaaggaggtgtccagtggctcacgtggacctgctttccgtgttgcccctgctactggaaagtccgctcagcac

SEQ ID NO: 342340 - DNA, 142 bp, Homo sapiens
  chr16:537542-537684
  hypo
cgggcggagcagagcgcgcggtcctcctgactctgcccccttctcctgggcacgaggagtcgcctcactctgccaggcccctttctttcctggagtggagcagcgccgggcctgcacagaaggttctcccgaggactcctgc

SEQ ID NO: 342341 - DNA, 502 bp, Homo sapiens
  chr16:571590-572092
  hypo
cgggcaggagcctctggggcctccactccgacatcaggacctgagatgaccgctgtgtggcgctctctccctgggcagggtggatgccacaggcccctctggctcccaggtgctgcttctccacaggtgcggcctggcccggcctcctaaaggccacaccctccccacgcacttcccaggccagaatccaaacatcgggaaccctgttttcttctgggtgtgtctcacttagaaatcgtggttcttccccgagggtgcatgttgcaggagggagagggcagggaagactcacagcagagcaggagggggcctgtgcttctcggggtctgcaccccaggcacagcggtgtcaccccgcaggaccgcgggcctgccccaacccccagcattcccgggtgggcccagaccccatcaccaagactggccacccgctgcgtgtgtgtgcgcgcgcgtgtacgtgtggccccacatccgccgccttccacgctaggatgtaagaggtc

SEQ ID NO: 342342 - DNA, 576 bp, Homo sapiens
  chr16:594129-594705
  hypo
cggcgccgggctgtggccagaccaggagactgcagcccagctcgagggaggcaccacgcctgcccctcagagcactgagcagagccccccatggtatcccccgccctgggcacagcaggaggagctgccgaccaagtctggcaccccggtgtgccccgagagctgtctgggcacaggttgcggggctgccccggccggacggggcatctgtgtttctcggtgtggcctcagggctctggtggctttgaccgaggccccgggggacagaatgcagcttcctgctcctcacttttcctaagaaaggggccgcctcccaggactggggctgcgccagtcacaggcccgcggcctccacgctccgggtgctgctgtcccggctgcttcagggcgggctctgtcttgcacgcagcgagcggcttcatcacctcccttttgaattggagctgagtgtcggcaacgcccagataactggggcgcgcgggtcttttgtgctggatttttctgtacagttgcctcgatcttccatccagcttggcctctgtgcagtaaggagcggcccgtcgcctcccccacgtc

SEQ ID NO: 342343 - DNA, 603 bp, Homo sapiens
  chr16:611800-612403
  hypo
cgtgtgtcctggggagtcggtgtgtagggcctgtgtgagcatgtgagtgccgtgttggagtggtttggaaagcccccccacacctggatgggtggtgagtgtgttatcacggacaagcagccgtgttcaccgtgatggagtgtgaggtgtgtgcagccagggccccgcacttggtggcagactccgttctgagcttaggtggcacagaggtggcttctccgggcactgggtgagggctctgtgtgagcctgtgggctgtgtacacacacccaaagcccgtgtgcgcaggcgtgctgtgcaccccacacaggcgcgtgctggggcggtggacagcccaggtggcggcccagatggagtgtggcgcgcataccagcgccgtgtggggcgtggggaggagcgggtcttggctgagtgtggccgctgcaggctcggccgctgacctgcccgaagccacccagatggagctgggctgagcaggtggctgagccgtggggccatgctgggacgtccactccccacagcctggcctggccccacatgagactgaccccctaagagacccccagtgcccacctgacgccctgctagagcaggctctgtgcc

SEQ ID NO: 342344 - DNA, 855 bp, Homo sapiens
  chr16:666708-667563
  hypo
cgagacttggaaatacattcgccttggagaattcaacttcaaaatgcatacgaagtaggtcagggtggaaataaaggcactgccctttctccaggcacgctggagtccacgccctgcctttgcccaatgccctctgagggagaggccctgtgccttgcacccagcgcgggccacaggcggaggccccattccaggcaagccgtgcccatggagaggctggcctgctaggctgtggggcccgatggcctgacactgtatggaccacgctcctgccctgccctgccccgccctgcccgtggcccgtgtgcagaagtgggcaggcctgggttgctgggccagagccccgagatttccccctgccccactggctgagtgtgggggagctgcttctccacttccgcgtgggtcttggccctgggaggccagtggccgaggctggtctcgcgggcgctcgctccaggagtggcgcgtcccctcagcgccctgtgcttcctcgcagggatcgactacaagaccaccaccatcctgctggacggccggcgcgtgaagctggagctctggtgagttggggctgcggcacttcagttcctgggtgaggacacaaatgccgaagggagaacagaacccttagagaaacaggaaggcgtcctgtttgcatttcacttggaagagccacttacacagcccctgtttaaacatagaatggattttactccaacaggaaaaagacagtctgggacactgtgtccctagagatcgcggctcccctcctgccccggaaaacctgattccgtggtggctgtgagccccttccctccccttctgtcggcttcaccttaaaaagcatttcccagc

SEQ ID NO: 342345 - DNA, 400 bp, Homo sapiens
  chr16:667874-668274
  hypo
cgtcagcgttgatgagacgtgaatgtccacagggttggggttccccagcctggcaggacagtctcctggagctcccaggctcatgtgaggagcttgctcactccccaggtgggcgggggccccttctgctgcctgcctggctcagcggcacggcgccaggctgctgtgacctgtgcagacaaagccgcttagcacagcctcattggcacctgtcctggccgccccgctcccctcaggacatccaggtgggtcggcagaggagggaaggaggtgagcctctcacagggaccacagtcccggcccctcccctccccgtatgtttcagggacacgtcgggccagggccggttctgcaccatcttcaggtcctactccaggggcgctcaggtaagaccagcacc

SEQ ID NO: 342346 - DNA, 80 bp, Homo sapiens
  chr16:672467-672547
  hypo
cgagcgcgcgtcctgactcatcccctagagcactcgctcgttcttttgttttgttttttgagacacggtctggctctgtc

SEQ ID NO: 342347 - DNA, 120 bp, Homo sapiens
  chr16:677367-677487
  hypo
cgggccatcgtctcctgcacccccgtgcacctcatcgacaagcttccactgcccgtcaccatcaagagccacctcaagtccttctcgatggccaacggcatgaacgcggtcatgatgcac

SEQ ID NO: 342348 - DNA, 387 bp, Homo sapiens
  chr16:677803-678190
  hypo
cgggaggagggggcgcggctgggctgctggtgcttccgggaatcttggtcggaaacaagccgggcctccccagctgcctgggcttgaccggcggggagcctggttggcctttcttatttatatagagaacacttcacttttttgtacatttttaaggggccttcagggaagcctgggtgtggcccggtggtggtgcactggtgacttcatggccacgccagctgcggggacgcacttgggactcctcgagaggggactcgcggccgcgatggcaaggcatcctgtgaattcatgcgctgcgagtggcggggctgcccagaggccgggggagcagacagggccggtgctccctctggaagcttgggtgaccggggccctggctcccac

SEQ ID NO: 342349 - DNA, 512 bp, Homo sapiens
  chr16:717202-717714
  hypo
cgggtggcagcgacttttaaggagggaactggcccagctgcaggccgacagcctggcagtgatggaccccctagtcccagtggcacgtggagggcacagccaggagcccttttagcaccagctcccccgaccagcatcatgcccagtggggacagtctgggtgggttgggggagccctctgagtgctgcctggtcctggccctggcccacctgcaccgtctacccacagagtgcatgctgaggctggtagactgtgccatggggactgcccaagactttgccggccacgacaacgcagtgcacctgtgcaggtttacaccgtccgccaggctgctcttcacggccgcccgcaacgagatccttgtgtgggaggtccccggcctctgagatgcagcagggactgtggtggtgggcatcacgcctggtcatgccaggcacctggacacaggcttggcagaggcgccaggttgtcaatggcctcatgctgggacaggccaggattcacgtaaatc

SEQ ID NO: 342350 - DNA, 1074 bp, Homo sapiens
  chr16:734874-735948
  hypo
ggcacacatgctggcgcagcggtggcacctgggggcgggcgggagggagggtgcctcagcgggggctgctgcgctgcctgcaggcccctgccccacctcccgaccccactgccccacctgtcgcagacccagccccggctgctcatgggccgcttgcagtggctgcagttgacgtgcagggtggtggaggcctggttgaggcagctgacggcgcggctggtgctcagcttgaccacctcgttggacacgttccagaggcggaagcgctgcagcaggtcgatgtaggaagtgtaccagtgctcctgggggagggagcgcccggcagtcaggatctgggtgccaggggcggcgctgcaggggggaggccccgcccaccacacacctgggtctgctcgtcgatgtccttgcgcacccgttcacccaggacgatgagcacagacacagccatctgcacgtcgccctgctcagcgtagaagtgcagcatgtcgcgcaccagcacgccgaagaagtcgggcggcaggcggctgtcgtagagcgcgtgtgagacagacaggagcgagaaggaggagtccacgggggccagggaggccacatccgcctcgctgccgctcacgtgcggggagtcggccttgtcctgcaggtgctcgggcccgggaggcgtgtccacgatctcgtggcgcagcggaaaggcctcctgcggcagcacgcactcagggtcctcggctggaaggcagggaccagcggaggctctgagtctgtcctccatccgcctctgaaccccaccctgcccggacccccactcacggtgcgcgtgttccggatccagcaggtacagctcgtcctcctcaccttccacgtcacccagcaggtagtcggcaggtacgtcgctgccctcggtttcctcgttatctgcccgacaatggggcgggcattcagggtcgtctgggacacccccacccctctcccatcagcacccctacccaccccagcctaccctcattggtgatgagtgtggccgaggagtcgagcagaactgtgtcgctccgtgcatctcctttgctgcggtccagccgc

SEQ ID NO: 342351 - DNA, 634 bp, Homo sapiens
  chr16:740897-741531
  hypo
cgcgcctggcctgttttttaagtctcaatttcagtattttaatgccatcacctattttaatccccaggtccatcatgacatctggtcatccctagacaagttccgagtgcccccagtcttcccctccttcctcactcctcgacctcgggagcagcctcccaacggctttcctgggtccgtctttcccctttgatcagaaacccgcacagaagtcaggcaccaggtcttctgcctgaggcctctggcagctcccactatgctgtgaatgaaccccaactcctggcctccgccttcccctgcccacctccagccatggcagcctccacccccattcccagcccaccaagccctttcctgcctcagggacattgtacgtgcgtgcgatgcctcctccacagagcggacctccctgaccactgccctaatgggcttctccatcactgtggcctccacggcacttgtcaccacccattcgtttgtttactggttgttgtcggtcacatacgagtgtgaattccaccaaggcaggaatcacattctggctcaatccccaccgaatgcccagtgcctgacacacctgttcaaccagttgctctcgttcttttttttaaaaaactttttgagacggagtttc

SEQ ID NO: 342352 - DNA, 819 bp, Homo sapiens; identical to SEQ ID NO: 335250
  chr16:745060-745879
  hypo

SEQ ID NO: 342353 - DNA, 699 bp, Homo sapiens
  chr16:809696-810395
  hypo
ttacctgtgagttcccgcccaagccggctgccttctgtcccctccccagagcccttgggtaactggtttgctacaagagtgtctggaatttttcagttgttctctgcggaagggagtttttaaaaggcccttaatcccttcttgacatttgtaagttgacgcttacacctggcagccttgctgaattctgtgtgcgtgaaggtccgattccaccgcgagtcacgatagaaaacccactctgtggagagaccagagatgaccgccgcgcacacctccgttcagcacacaaacctttgcaggtgttcatagcggaggcagattccgtactggggataagagctcacgacatgctgggaggggtttcaggggcagggagggggcttctgtggccccaggtcaggaggagcagctcttccatcagcagcaggcagccagcccagatgcgtagggaagacagctcccacttcgccaggccagagagcgcccgggggcagctctgttccagtcgaccctgcgagaaaggggtgtgcgtgtgcctggagctgggccccgtcctgcctccctgacctgtgtgctcccacagccctgagacggacggctcacagccttgcgaggcccacactgcactgggggtcaggcttgtgctcccgggagtcctgtctgggctgcgtggccaccatccagagcctgctgacctgc

SEQ ID NO: 342354 - DNA, 138 bp, Homo sapiens
  chr16:834385-834523
  hypo
tcggctgagggcacggtggcagctgcctccagtcgggccccggtggggactccgggtctggaacccgcgtctcggctgaggacacggtggcagctgcctccggtctgggccccggtggggactccgggtctggaaccc

SEQ ID NO: 342355 - DNA, 417 bp, Homo sapiens; identical to SEQ ID NO: 268359
  chr16:845726-846143
  hypo

SEQ ID NO: 342356 - DNA, 141 bp, Homo sapiens
  chr16:846349-846490
  hypo
actttccaacactccgtttcccgctgtgggatggccatgggggtggtgggggtgaggcatggggcagtggccccggggtcctgctgccccagcgacggcaccaacttgcaggacgctgagtcactctccgtggcagccatc

SEQ ID NO: 342357 - DNA, 609 bp, Homo sapiens
  chr16:894572-895181
  hypo
cgagctccaacatgtccacgggtgaacatcagcgtggccaccaccaggtccagagcacagtagaccctgtgccgccagtgtccgtcgccttccacacgtggccgcagttctgtgcatggggccgcccgccatcctgccgcctctgacctgggctgtgggctcgtgacacgtgtctgagctttccagtcgtggccgtgacgctctgtgcggaggctccgtccgcgtgctgcctccgtcccctctgccctggacggccactcactacctttgtctctcaccctgggggtttcatgaccccggagcctccacgtcctggtacagagcctgcctctccgggactgggcttcggccgagcagacaccgcctagctgctctttgaccagcgttctctgctctgcgtctggctggcatcggcggcttgctgagtccagcctggcatctcgctggcatcggcggctcgctgggtccagcctggcgctgacacgtttctgtgctcatttcattttacaaatcaactccccaaggtgaggtgggctcgtgccagcaggtgggagccggtcgtgcacgtctgcccagctccgtgctgagtgaggacgtgttgggggcttg

SEQ ID NO: 342358 - DNA, 198 bp, Homo sapiens
  chr16:943474-943672
  hypo
cggagggagcacccagtgcacacgcgtctcagccccgccccctgcggcacaaagggagccgaggcgcaggccccgtgtgtctcccacacactgcagctcgcctgctgtgaggactcctggggcacgggacaggcttccaggggcctgcagagggagccgccagcactggggaaggtgggacttgggcagagaggctgc

SEQ ID NO: 342359 - DNA, 311 bp, Homo sapiens
  chr16:945437-945748
  hypo
cgggagggccttcggggcggccgtgggcccctagccggggccaggcaggacgggagccgccgggttctctggctacatgtgaccgagaaggcagcaggctctgctgctgtctgtgcaggacgacctgggcaggggaggggcgtgtccaattccaacgtgtttggaacatggggctcgcgagactggcgggggagtgggagagccaggagaggctgcaccgcgccctgaaggacggcacgtggctcaagtgaccgatgccgagagggacacgaatgagaaacggcaggggagtgggaccaagagcccagccc

SEQ ID NO: 342360 - DNA, 906 bp, Homo sapiens
  chr16:981471-982377
  hypo
cgcacacgcggctcggatgagctgaggaacgcacgcacaaactgcattctcccaggccgtcccgaacgaggccacaggaaaggagcctccccagaggtctcagatcaggaagcctgaccttccagtgcctttggtctaggtgttctgaggcccagcacccggagtcatacctcagtaactggcagctctatgttctccaagatcagggaagggaagacagttcaaagacgcatggctgctcggaaggcagggagagcactgccgaagctactacgagtcttctgaatttctgcgcgacagtccaaagtgacgtgctgagccgctgcagggtcagacacaacatgaaactcaggctcacgagggctctcaggcggaaaacattaacattaatgagtcaacaattcgcttctgagtccctacaattaccacctgctaccgaagaatcagttagaatgtatgacgctcacctgaaaacacccagggagacacaaacgcagaagactgacttccctgggctgggagcgcaagcgcagcccccgacggcggccacacaggctcacgtcccaccccccatgcagaccccgttgcttttgcttcagcaagtggttggggacgcgggaggctggctccagagtcacccggctcctcgactgcctctgccgctccagcactgcctctgggagtccactgccccaggcacttcccccccaccctacttagagtagagcctgtgttccccaggaggcctcacaggcgggggcacggggagggtgggctccaggccctctcatcctcagcgatgggtcctgtggccctggtgctgagacacggcagcaccgtggcctcgcaggcccatctctcacagggaacacacaagcctcagccgctgccccccgagcctgcccc

SEQ ID NO: 342361 - DNA, 80 bp, Homo sapiens
  chr16:1019655-1019735
  hypo
cgcgtgggcaacgcccggggccagcagctccggagccctctgggacggtgactgcccacgcgccccgctggctgcatctc

SEQ ID NO: 342362 - DNA, 563 bp, Homo sapiens; identical to SEQ ID NO: 335254
  chr16:1035088-1035651
  hypo

SEQ ID NO: 342363 - DNA, 221 bp, Homo sapiens; identical to SEQ ID NO: 268385
  chr16:1036853-1037074
  hypo

SEQ ID NO: 342364 - DNA, 328 bp, Homo sapiens
  chr16:1061204-1061532
  hypo
ggccagggcagagacgtaggacagagacgcagcgcagagcggccagggcagagatgcagggcagagacacagcgtagagcggccagggcagagacgcagggcagagacgcagggcagagacacagggcagagacgcagggcaaagcggcagggcagagacgcagggcaaagcggcagggcagagacgcagggcaaagcggcagggcagagacgcagggcaaagcggcagggcagagacgcagggcaaagcggcagggcagagacgtagggcagagcggcagggcagagacacagggcagagcggcagggcagagatgcagggcagagc

SEQ ID NO: 342365 - DNA, 94 bp, Homo sapiens; identical to SEQ ID NO: 268396
  chr16:1113830-1113924
  hypo

SEQ ID NO: 342366 - DNA, 265 bp, Homo sapiens
  chr16:1154990-1155255
  hypo
cgtctccacgtagtcgcccacgaggtaagggtgccagcattgctcgtggtactgcaggttgttggtggcgatggagaagggcacggtcatggtgtccgaggcatgacacagctgcggctccggggccagcagcaggcgggtctcagcggcggtgctaccacctcccactcaggctccaacttccagccgcgcgtgtcctacggctgccgcccaccctgtgtgtgtggagtccctttgtgtgcactgtgccgcggcctcggtctcc

SEQ ID NO: 342367 - DNA, 141 bp, Homo sapiens; identical to SEQ ID NO: 335255
  chr16:1202445-1202586
  hypo

SEQ ID NO: 342368 - DNA, 1232 bp, Homo sapiens; identical to SEQ ID NO: 335256
  chr16:1203076-1204308
  hypo

SEQ ID NO: 342369 - DNA, 222 bp, Homo sapiens
  chr16:1217939-1218161
  hypo
ccaggcctgttccccggggctgcctggaggcggccgcttgtccccaaggcctggtgaccgcacctctgtctgccctaggccttcgagttgggggacattttgtaaggagccgctgtgcctaggccagagatgttttcggaaggggtgcctgtaccccgagaggtggaccagaattcccctggggcacggtggcgggagaccagggcggcctctggtgccccc

SEQ ID NO: 342370 - DNA, 789 bp, Homo sapiens
  chr16:1248221-1249010
  hypo
cgagcccgagatgccacgtggtcagacctgccgcagccagttccctgcctcggccagtcccctgcctccactcctgcccctccacaccccagccctccaaaagcagcagacctgctgccctgggatggttggaggtggagacctggcgccccgctggatgcacgtcagaccccagggtgtcagtgtccctggaggccggtggtggtaggaggggagtcccgatcacactaggggtgcgggaaaatcaccagggggtggcccgagtcagtgtgcagtgggcgtggacacccactgtgaacagtggacggggctcgggggtcccgggaggggctgcagccccgaggacactcctgcagggcttagcagtgccaatcctggccctgctgcccacaggcatgcggatcctggtcactctgctgctggatacgctgcccatgctcgggaacgtccttctgctgtgcttcttcgtcttcttcattttcggcatcgttggcgtccagctctgggctggcctcctgcggaaccgctgcttcctggacagtgcctttgtcaggtgcccaggccccacccccgtgaggcccctgcccagatggccctgcccaccatgcagataacgcaccatgtggctccaccgccccacgtggctctgcccaccgtgcagtcacccgccccgccactgctgtccccgtcatggctccgtccaccatgctgtctcccgcccccaccccccatcatggctccgcccagctggcagtcaccgccccacatggctccgcccacggtgcagtc

SEQ ID NO: 342371 - DNA, 412 bp, Homo sapiens
  chr16:1250311-1250723
  hypo
acccgttcatctgctcctcacgccgagacaacggcatgcagaagtgctcgcacatccccggccgccgcgagctgcgcatgccctgcaccctgggctgggaggcctacacgcagccgcaggccgagggggtgggcgctgcacgcaacgcctgcatcaactggaaccagtactacaacgtgtgccgctcgggtgactccaacccccacaacggtgccatcaacttcgacaacatcggctacgcctggattgccatcttccaggtgggcggcaagatggtgggacggggaccctggggcacggcaggggagcgggtgcaggactcgccccccccagcccagaccccaggggcacggggaggaggaggaggggtcgtgcgggcccaagtcaagccactgcccccccaggtgatcac

SEQ ID NO: 342372 - DNA, 381 bp, Homo sapiens
  chr16:1251773-1252154
  hypo
tccaacgacagcacgctggccagcttctccgagcctggcagctgctacgaagagctgctgaagtacgtgggccacatattccgcaaggtcaagcggcgcagcttgcgcctctacgcccgctggcagagccgctggcgcaagaaggtggaccccagtgctgtgcaaggccagggtcccgggcaccgccagcgccgggcaggcaggcacacagcctcggtgcaccacctggtctaccaccaccatcaccaccaccaccaccactaccatttcagccatggcagcccccgcaggcccggccccgagccaggcgcctgcgacaccaggctggtccgagctggcgcgcccccctcgccaccttccccaggccgcggaccccccgac

SEQ ID NO: 342373 - DNA, 202 bp, Homo sapiens
  chr16:1253096-1253298
  hypo
gcgagcgagggtgccgagggtgccgggatgctgtgtgccctcatgcgctggtacccagggcgtgcagacgagtgtcgggcgcatgctcctagcccttgaattgtgggagtccagccgctgtgtgttataagaggcacacgggctccaaagacagcacgaaaacatcacaggacggctcgatggtcattttcatgtcagtttc

SEQ ID NO: 342374 - DNA, 496 bp, Homo sapiens
  chr16:1265061-1265557
  hypo
cgtcggttcttcaaggacaggtgtgtgtggtggggccgtcttgggttctgggggcccctcagggctctgggggctgggggcaggtgaggccgcaggctttcccacggaggtctgcagaagcaacgctgctgagccgaggcggggaccccagacgtgtgcgctgagcctccggccacacaggtggaaccagctggacctggccatcgtgctgctgtcactcatgggcatcacgctggaggagatagagatgagcgccgcgctgcccatcaaccccaccatcatccgcatcatgcgcgtgcttcgcattgcccgtggtaggtgcccgcgtgcccgccaggttctctctgcgggtggagggtgggggctcagccatgggtgggagtgaggggcggggcggccagggtccccgcgcagcagggagggtccgcccagccctgctgacgctcagctcccggccctagtgctgaagctgctgaagatggctacgggcatgcgc

SEQ ID NO: 342375 - DNA, 716 bp, Homo sapiens
  chr16:1270065-1270781
  hypo
cggtgaggccggtgacccaggggggctccctgcagtccccaccacgctccccacggcccgccagcgtccgcactcgtaagcataccttcggacagcgctgcgtctccagccggccggcggccccaggcggagaggaggccgaggcctcggacccagccgacgaggaggtcagccacatcaccagctccgcctgcccctggcagcccacagccgagccccatggccccgaagcctctccggtggccggcggcgagcgggacctgcgcaggctctacagcgtggatgctcagggcttcctggacaagccgggccgggcagacgagcagtggcggccctcggcggagctgggcagcggggagcctggggaggcgaaggcctggggccctgaggccgagcccgctctgggtgcgcgcagaaagaagaagatgagccccccctgcatctcggtggaaccccctgcggaggacgagggctctgcgcggccctccgcggcagagggcggcagcaccacactgaggcgcaggaccccgtcctgtgaggccacgcctcacagggactccctggagcccacagagggctcaggcgccgggggggaccctgcagccaagggggagcgctggggccaggcctcctgccgggctgagcacctgaccgtccccagctttgcctttgagccgctggacctcggggtccccagtggagaccctttcttggac

SEQ ID NO: 342376 - DNA, 510 bp, Homo sapiens
  chr16:1271094-1271604
  hypo
cgtcgtgagcagaaaggcccggggaggatgacggcccaggccctggttctctgcccagcgaagcaggagtagctgccgggccccacgagcctccgtccgttctggttcgggtttctccgagttttgctaccagccgaggctgtgcgggcaactgggtcagcctcccgtcaggagagaagccgcgtctgtgggacgaagaccgggcacccgccagagaggggaaggtaccaggttgcgtcctttcaggccccgcgttgttacaggacactcgctgggggccctgtgcccttgccggcggcaggttgcagccaccgcggcccaatgtcaccttcactcacagtctgagttcttgtccgcctgtcacgccctcaccaccctccccttccagccaccaccctttccgttccgctcgggccttcccagaagcgtcctgtgactctgggagaggtgacacctcactaaggggccgaccccatggagtaacgcgcccggccccgatgcgaatcaggc

SEQ ID NO: 342377 - DNA, 807 bp, Homo sapiens
  chr16:1397437-1398244
  hypo
cgggctgtgtccttgagcatgaggtggccccacgggcagtcaggtctccaagtgccagcgctgaccaccagcacccaggggcccctcctgatgcgcttccccctgcagaggctgaaggaggagctgcggctgcacaaatgttccacccgcgagtgcatcgagcagttctacctggacaagctcaaacaggtagggaggcgccagggacagggtgctgcctccgaggctcccagagcccagctgcgctcacccgcctttccgcagaggaccctggagcagaaccggtttggacgcctgagcgtccgttgccattacgaggcggctgagcagcggctggccgtggaggtgctgcacgccgcggacctgctccccctggacgccaacggtgagttgcagcggggacgggtcgggtggtggtgggatgggggcaggggggctcacgactgtgctcctgcaggcttaagtgacccctttgtgatcgtggagctgggcccaccgcatctctttccactggtccgcagccagaggacccaggtgaagacccggacgctgcaccctgtatacgacgaactcttctacttgtgagtgtcctaagccccagccccagccccaggctccaggctgccggagcgagactcccgactggcctctgtccgcagttccgtgcctgccgaggcgtgccgccgccgcgcggcctgtgtgttgttcaccgtcatggaccacgactggctgtccaccaacgacttcgctggggaggcggccctcggcctaggtggcgtcactggtgtcgcccggccccaggtgggc

SEQ ID NO: 342378 - DNA, 77 bp, Homo sapiens
  chr16:1400771-1400848
  hypo
cgccgggtcacactgctgtggggcccctggactcacctacgatgcagaaggtggcagcaaacgcttccacgcaggaa

SEQ ID NO: 342379 - DNA, 197 bp, Homo sapiens
  chr16:1407334-1407531
  hypo
cgggccagcaccccagaggtctcagtggcattagcctctgccctccgggggcgggggccaggctgagggtggccccagtgtggcatctggctcctgggctggccagattcccagggaacagtcacccagcacctcgtgtgtatttcgactttattattattattattattattattagagccgagtgtcgctgtgtc

SEQ ID NO: 342380 - DNA, 267 bp, Homo sapiens
  chr16:1417091-1417358
  hypo
cgccgtccaccgcctccaggtccaggcgcagctgactctgcagcgagtgcagcttcggcaggggaatggtgccgatgtccccacagccccgcagccccggcagtgtggaggctacgcccaggccctccagctcctcctgcagctgcttcacctgtgcctccacctcctccttcttctgcagcgccagctgccggtcgctatcggccacacgggcacgctccttggcctcctgcgcctctcgctgccaggcatcgcagacctgaaacc

SEQ ID NO: 342381 - DNA, 371 bp, Homo sapiens
  chr16:1417690-1418061
  hypo
cggatcttcctcttggcctcgtccagctgccgcctgacccgggccagctcagctccgtttggacttgcactcgaagaggatggggggccggcactcaggatgggggaggggctgggggagaagctgccggaaacaaagtcccagatgctcccggggacaccgttcaaacctgagtgtgaaacggtcgatgacggcccagccctgctgtgctcgcggcctggtgggattggtgggtgctatgccccaggccccaccgctacgtgggcaccctctggggctcacctgccctggcagcaggggtgcagccacgcctgccccttgccccactcctggaccccaccaggctcaggaagaggcgctgacagtgacac

SEQ ID NO: 342382 - DNA, 339 bp, Homo sapiens
  chr16:1424307-1424646
  hypo
cgtccctgctggctgcaagttcttggaccctcactgatgcctggtactggacagtgtgctgctgaggcctgctctgagacaggcaaagccacccctgcctgtccctgaagggccctagacccccttcctcctgtcctcacctgggaccgatggtccctccatggccccaggcaaccgcaccccggggaaacctgtcagacccgaccgtgggggtcggcgcgccgggaacctccacagcctggccagcccctgcctggtgctcggttcagacaagctggggcccagcagaagcaaagaggcggtcactgccccacctacccgacatcgagtcccgccctc

SEQ ID NO: 342383 - DNA, 1163 bp, Homo sapiens
  chr16:1424928-1426091
  hypo
cgctgccctagccgcacatgagatttgtcgggaacacagctgtggggcacgtggcctgcacctcacccctctgcccaggcctccgcttctcctccctggaagcagctggcaccagtcagcgccacggggaccatgggagcaaccacagggtggcgggtggcccctcgcccgaggcctggcgctcggcggtcacaccccccgagccccccagggcagccggagtatcctcgtgccgcggtggtggccccagcggagcacaggcagaggctggcgtggacgtggcgcagctggcaggtccgggcctctgaacttcaccccgaatctggccgcgctcagcagccacactgtgtggagaccgtgctccaccacccagagcggcaggcgggagagaagcctggctcgggagtggacggtggactccagaggccgcaaggcagaggccacccccaccccactccaccgcacagcacgacccagactcaaccctcgtccacacgccagccgtgagggaatttccggggcgtggaggccgggctgtggcgccacctggcaacactgtccttccccatcccgtcacagaggcagcagggcccagggcagagaacctgaacccctggggcgtccgggacggcacacggcgcatgcgggagtggcctccactcccacggagacaccgttccaatgaagcttttagggactttcgaaggtcttatccagaaactagagtaacaggttgggggtcggggcagccaggccaagaccccctggggaccaggaacccacagtagcatccgaaaatgcctcagccctcaaggatgctcatcggcggagccaaaggcaggccttgggccagccgcacccagagccattcactcctctccttcccattcacaggacggtggcgtccctgagcggacatccaccctggcctgcagggtgggccagccctcccggtcgctgtcatccacttgacgttctcaggccatggctgaagagggcaagacctcaaagcctgactgaagtcgtgctgagcagcagagccgagacactgcaggcagtggcagaggaccacgcactgagcggccttggacaggtggctccaaggctgaaagtgagatctgtggcgggcagggcctcttccctcctccctccagggctggggc

SEQ ID NO: 342384 - DNA, 556 bp, Homo sapiens; identical to SEQ ID NO: 268446
  chr16:1428212-1428768
  hypo

SEQ ID NO: 342385 - DNA, 53 bp, Homo sapiens
  chr16:1472227-1472280
  hypo
cgtgcactggatggatcagctggtaccacccagaccggtcatctggcccaacc

SEQ ID NO: 342386 - DNA, 912 bp, Homo sapiens
  chr16:1493342-1494254
  hypo
cgggtctggcacctgcccctggagtccacccagctccggcaccactggcccctgggagctctgggcctgggcagcaggggtgagctgggctccaggcccagaagcagctgcccccaacacccaggaaaggggcagctcgacctgtgggtgggggagccgctcacctccggcgcctccttttcgggggcctgggctgccggccgcgcctcctgctgcaactgcctcagctctgagccctgcagctgcacgcgggcccgcacctggagcagctcccgcagcaggctccgcgtggcgcgctcacagcgctgcttgtgctcccgcaggcaggccacctcggcctgcagctccaccaccctggccggggcgagagtgggcgagtctggcggtgcccgccgtggaggcggaggcggcggcgacgtggtcctcccccgccagcaccccctgcagggctcaccactgctccagctggttccagtgcttggcggtgtcctgctcggggacagaggccgtggatgtcggatggctggactcatacctctccgagagctcctccaggctcaagggctcggggctggccaggcctcctgccaggaggagccccaggtcttccagggtgacggctctcagctgggaaggggccgatgcccctgagggtccactgtcagccaactctacaaggaggcatcttgggagcttgccccttggggcccggcccccactggagcttacgggaacaaggccccaaacccccgcaggaccctcgcccaccacccagagctcaacgcgtctccttgggtcacacaggatccagacgggcttggctcagacaagtccagggccctgcctgaagacacacagcactgggcggcaggaacaagcgagctggagggagcccggggtcagaagcagagc

SEQ ID NO: 342387 - DNA, 365 bp, Homo sapiens
  chr16:1580458-1580823
  hypo
cgattgtgcacaccctctcccgaggcccaggtgtggggctggacagggctgggacctgcctctacctgccccgcgtggctcctttcctctcccttgtcctgaaaacaactggttccttccgtccacatccaattgcggtggaaaatcacaaacaagcacaggaatgtggcagctgacttgggtcccagacgggctcccctgtgctctgaacgccccgtctctcccacgcggaggccacccgtggggagcgggagagagcccgcccgtggggagcgggagagagcccgcaggccggccctggttttgctctggttcctggggcccatgtgtgaccgaggacccagccagcacaccgtcagatgccc

SEQ ID NO: 342388 - DNA, 135 bp, Homo sapiens
  chr16:1651481-1651616
  hypo
cgtctaagcatgtagggctgaagcatcgttatctgtgataaactcacaaatactcaggtaaaatacccacgtagctggagggaaagcagacctggcagtgggaacagcgggcgaatcgacatggagggtggatgc

SEQ ID NO: 342389 - DNA, 301 bp, Homo sapiens
  chr16:1652282-1652583
  hypo
cggttcccatattttgatctttcatactctcgagcatggtcagaaagggtcaaggtctgaaaacagcgtcttgcgcgtgttgactcaccctgtccccagacagcaggcagtttccactggggctccaacggagcacggtgatgtcggctgtgtgtgtcaggggcatcgtgtgctgctccttgtcctgcttgttaaacaccgtcacttctccagtctcccagcccacagccagcaccagccgcgtcgggtgccagcacagggaagcaacccggaacggcctctcgacgtgtgtatctggcac

SEQ ID NO: 342390 - DNA, 90 bp, Homo sapiens
  chr16:1677046-1677136
  hypo
cgtaagtaacgctgtggtgaacatcggtgtgcacgcttcatactttagactgcttctttggcatacagtattagaattaggttcgtgatc

SEQ ID NO: 342391 - DNA, 422 bp, Homo sapiens
  chr16:1682411-1682833
  hypo
cggcttctgctcagagcgcagcttccagcaagcccgccggacctgctttctggcattttctcaccagccgcttggcctggggctcctcgccttgcagcgctttggctgattgtgtgctgtctaactcggtcaaaccaagttgccaggaagtggcccgtatcccatgctccagggttcttaccactgcttttctgagctatggtttgtgtgtttccagtggctctgagtgtgcgtgagttctgggtccctggctcacctgaagcctgtggtctccactgcaaatgatagcaccatggtccagcgaggggcttgggccgcaggcaccgtgcctggcgctggtcttcctgggggacggccagccttcccaggcctctcgccctctacactgggacccaggtctgcgtcggccctcgttcagtcac

SEQ ID NO: 342392 - DNA, 284 bp, Homo sapiens
  chr16:1704554-1704838
  hypo
cgatcacattgttctgtggccaccgtctctgtccagctccagagcattttcatgacgctagaagaggccctgtgcacctcagcactcactcctctattctccattctcaccctcccacggccgccggcacctcccagtccgccttgtgtctcagtggacttgcctgctctgaacgtttcatagaaacggaatcacacgcagaggcctccgggcctggcatctttcactgggcgtgatgcttttgaggttcacccatcatagcgcatcagtacttcattccttcc

SEQ ID NO: 342393 - DNA, 499 bp, Homo sapiens
  chr16:1724905-1725404
  hypo
taatatgattacagcgaagactttcctgataagttctcaaactcgatgtgtgactgtttggcacttgagacaaacctgcctttgcagggaaagtgtctctcacgggcattggtgtgggcgtgcctgacatacgtgttcagtcccttgcatacctttgccttgagacttctgtgtctccttcccatttgggacacccaggtgagggcccagacatctggatgtggtcagacctcaccaaatatatgccttcgtggtggtctccctccttgcgccctcttgggtggccagcgttcctactgcagacggcccaacatccagtctttccccaggacagagctaacaagggcccctttgccttctcatcctcaggagttccaggcacatgagtcaccgtccatccacatccagtgtggcctggagctgctacagaggtgttgggcaggccatgcctgtgccgccatctctcccttcctgcctcatttcatcccccgcagcagcc

SEQ ID NO: 342394 - DNA, 754 bp, Homo sapiens
  chr16:1730112-1730866
  hypo
cgatgtgggaccaggagtttaaactagtgctcagagcgaatccggtttctggttcctggtggccagagttttgcaccacccacatcagtggggggagggactgcatccccagccctgtcccagttgtgtgcatttagtacgtttcctttttgtttgtgctgcctggcactggctgcccggtaaatgatggtgtttattatcaccctgagcgacgccgatgtttttatattgactttcacgctccagaagttagctgcacagggccgcactaaagtcatactcacactaccctgggggactggtttctggacaaggtgttgagaaagggagaaaactcttccttttaggatggtgaggaaggaaagccggtctgaactggatgatgaggtatcactggaagcttctgcttggggtccaccagacgctgcacatttgccactcatctgaacggggtcgagtcgcagggcgggcgccttgtaagcgtcacatttagttttgctgtgaagcgagtcaggtggtggctgtaagattacctagccaggttttcctctcctgagacctcacatctctcctttccttgctgagggattgtcttgtgttaaaggggtttcgtaaaagcgttatgctttagccgcgattaacctgaggtcttccttcaagctggaacatttctatttgtaaggaatttaatccaagtttatttctcactgcttctctctaagcctgaccagtcccctcatcctttctgaaactc

SEQ ID NO: 342395 - DNA, 759 bp, Homo sapiens
  chr16:1737575-1738334
  hypo
cggtaccactttgcccgttccacatggtctcatgcccagtggggagcccggccccttgcggttagtgagccagcctctactcctggtcacagtgtgtggtgccagccatcatggctccccatgccaggttcctgcttctcatggtccttctcacggttgttgggagttttcctatctctccagtgctcttggaagacggtttatggtatattatcaagggaagcctgaaagggaaactgctagttgtgttcaccacccaacgagatctggagtcctgccttctttctacacttagtcacacagacctagccccacagccctctagttgcagggcttgattgagaaaagtatgcagaggccgagagtgtgtgtgaccgaccacatcatagccatcgaatgtttatcaattcccattcagtgtttcagtgaatcttcagtagtctctgtgttctttgttagtcacctggtttagatgttccatgaattgttcttcctcttctagcaatgatgaccaacgtctatgaattgttaatatttaccggggactgtgctaagtgctttgcatgtgtatttttcatttggtgttcgctataactaggagtaggttgttttgctcctttcacagaggaggaaacaggcttggaaaaggtcactggcatgcataaatcccaagctagtcagtagcagagctagtcggtagcagaactagtccgtagcagagctagtcggtagcagacctagccggtagcagtgctagtc

SEQ ID NO: 342396 - DNA, 357 bp, Homo sapiens
  chr16:1741741-1742098
  hypo
cggggttcctatgagaggaggtctccaaagcactgcgggggtggggtggggtggggtccggtggacgtctggttgctcagtgttctgtgatcgtttctgcagggggtaaaggaagtggtatctttgacgaatcaacccccgtgcagactcgacagcacctgaacccacctggagggaagaccagcgacatttttgggtctccggtcactgccacttcacgcttggcacacccaaacaaacccaaggtatggactgcattcagacgtgacagcgcagcagcgggtatgccaggtgctctttccaaaaaggctccaaggcagatgcgacatgtttttagggagaatcatggtgggtgcc

SEQ ID NO: 342397 - DNA, 129 bp, Homo sapiens
  chr16:1753652-1753781
  hypo
taacctttatcgcacgttatttgctggagatggcgccatgctcctttcatggattagctgacattcctaataggctggatattttaggctgttttgcaggcttagaaacagagatttggggccaggcac

SEQ ID NO: 342398 - DNA, 1258 bp, Homo sapiens
  chr16:1796052-1797310
  hypo
cggtgcgccctctgagagaccacgggaacccacccagcggctgcctgggacaggcacaggagccacctgggtgcctctgaggccttgcactttcccacacctcaaggagggccgggggccacgggcaagctctgccatagcgggtgatcaggtcagctaagacgagaacgtttggggctctttttctccagctggttcagtatctttgttaggaaagaccattggaaagaatgtttgtttcgcattccgcattagtcacatagaatgcgctcctccctagcgagcttcctgaggtagacggctggttgcggtttctcgtaatccgggctgcccccaccctccagaatgtcttggtggcgtccctttctgtgagcagggattgtggtttctttgcgcttgctcatgttcaggggtgagctctggtccagtcaagccacagggtcagcaccttctggtcactccctggccctgacctgagcccggggaggaacgtggggcaggcgcgggtgggcccagcctcgagctcttcagcacagtgatggtgacggggcagcggtggcggcacagccagcccttcttgggtccccagtcagagccctctgccctacctgggctggacttgtttctgaacagccacaagctacagggggctgccgctgtgtccctggcgaggcactggcccattacaagcaatcgtctggggagggcaccagtggaaagccccgttccaagccatttcaggagggtggccctgcttccgaggagccggagtcagtggccggataagcagagccactcgggagtggtgaggcccggaagggttagcccggtgggcggcagaggagctctggcccgcagggtgtcgggcgaggcaaagtgcaaagcattggtgcgcggggcctcaggcagccacggcggagccgcaggccagggacctgcagtgactcgctctccctcctccctgtgtttggccttagtgtccacaggatgaaatgtccgagtcaggccagtcctcggcggccgccacacccagcaccacaggcaccaagtccaacacgcccacatcctccgtgccctcggccgccgtcacacccctcaacgagagcctgcagcccctgggggactatggcgtgggctccaagaacagcaagcgtgcccgggagaagcgcgacagccgcaacatggaagtacaggtcacccaggagatgcgcaacgtcagtataggtgggtgcccacctccgggactctgggctccctc

SEQ ID NO: 342399 - DNA, 704 bp, Homo sapiens; identical to SEQ ID NO: 268505
  chr16:1807725-1808429
  hypo

SEQ ID NO: 342400 - DNA, 345 bp, Homo sapiens
  chr16:1812272-1812617
  hypo
cgtgtaggcaccccaggaggaagcaggtgtcacccggcctccgagggctggctgagcctctgtgcccctccctccgcaggacaaaatccccatggcccagcgccgccgcttcacgcgggtggagatggcccgtgtgctcatggagcggaaccagtacaaggagcggctgatggagctgcaggaggctgtgcggtggactgagatgatcaggtgggagttgcggccaccccaggaggggctgcgggatcatccctgacggcaggactgcggctccctcctctgcacctccctgtcttctggggggactgaagtgcgctgggtgcttcctggcgggagccagagagt

SEQ ID NO: 342401 - DNA, 51 bp, Homo sapiens
  chr16:1812931-1812982
  hypo
gcttcagccagcgccgcaaccatgccatgtgcccgatctcggcaggcagcc

SEQ ID NO: 342402 - DNA, 1182 bp, Homo sapiens
  chr16:1813299-1814481
  hypo
cgtttcaggcgtctgtccagcagggagtcgctggtcatgcctgtgccccggcggcactccaggtcccggtctgtggaaccctcagtgactgtggcagcagagcagcctctgggtcgagcaggggccagctgtggcctccaagcccaggggcatagccggtgccaggaaagccacccttcccagctgggcacccagtgccgggaaagccacccttcccagctgggcacccggtggccgggaaaaggcgaggatgggcccaggcgggcctccctgccgtgacctcccccaggacaagcctggggcactgtgggggccgctcaccctggacagagacatcacccatcattcttccactcagcgactgcacgtcctccgcccgtcgagagcagaagcgcgagcagtaccgccaggtgcgtgagcacgtgcgtaacgacgacggccgtctgcaggcctgcggctggagcctgcccgccaagtacaagcaggtgcgggcgggcgctgcggggaccgggcggggccccgcagaggcggggcgggggtaaggggcggggcgctgtggggcggggagagggcggggcagtgctagggggtgggagaggacggcgggtggggcggggcctggcaggttcctagtgagcctcctgggcaggggtctggagggtcggagaaggagccccgcggctcccacgcccccacctgcctccagtcttgaagtggctgtgccgccagaagctggcagccctacctgtctcagatttctggagggatgggtaggagccagggttcgtgcccacggcgcctccctgctccctgcagctgagtcccaacgggggccaggaggacacgcggatgaagaacgtgccggtgccggtgtactgccgccctctggtggagaaggaccccaccatgaaggtgagcccgcgaggaccccgctcaggctggctgggcgagcgggaggctggggagtgccggtgacacccgacctcggccctgcccttgcagctgtggtgtgccgcgggcgtcaacctgagcgggtggaggcccaatgaggacgacgctgggaatggagtcaagccagcgccaggccgcgatcccctgacctgcgaccgcgaaggagacggcgagcccaagagcgcccacacgtctcccgagaagaagaaggtgagcatggccgaggccacc

SEQ ID NO: 342403 - DNA, 859 bp, Homo sapiens; identical to SEQ ID NO: 335258
  chr16:1967780-1968639
  hypo

SEQ ID NO: 342404 - DNA, 43 bp, Homo sapiens
  chr16:1994730-1994773
  hypo
cggttacacagcgctctgagacctcgcaggaagagtcgcctcc

SEQ ID NO: 342405 - DNA, 623 bp, Homo sapiens
  chr16:2028554-2029177
  hypo
cggcactttcagcggctcagcaggaccctccaggccgccgctttcttggacttcctgtggcacaacatgaagctccctgtgccggccgccgcccccaccccctgggaaacccataaaggcgcactgccctagccggtccggcctctctccagtccatcctgaacccctggaaaacccataaaggccgctctcctggccggctctgtctctctggactgcagtccagccccccaccctggccaacaccctacctagccagccagaagggcactggagctgatggtctcggccctgccacgcccatcccgcaccctggcctggcagagatccagcccgcggctccgcacgcttagacggtgggggtcatgcagaacaagctttactcagaggaacagcaaatggccccctcccatccctgctggccagggagatccgccctccccgctcctccccagccctgggatggcgcggtccatcccctcatcgggatcctcgcgctcactgctccgtcgtggggtgcggcacagagtccacgcaccctcgagggcggccctggcgccgtgggcgccgctccagggccctgcgtgtgacggtgcagcagcggctctggatggcgcccggcg

SEQ ID NO: 342406 - DNA, 280 bp, Homo sapiens
  chr16:2035689-2035969
  hypo
cggggagctgcagggtcagccctgttctgggagtgcctgtaccttggagcataagggcactcccaggtgtagttcacagcagtgccccagctctccttccttgacagcagacagggaactggcaggggcagtggagccgctgcgtcctctcattctttacctgctctccctacacaggctgtgcaggaaccacccagacacccgcacccgggcatgcttcacacagtggctgtgccacctgcacaatgaagtgaaccgcaagctgggcaagcctgacttc

SEQ ID NO: 342407 - DNA, 1418 bp, Homo sapiens; identical to SEQ ID NO: 335259
  chr16:2040762-2042180
  hypo

SEQ ID NO: 342408 - DNA, 344 bp, Homo sapiens; identical to SEQ ID NO: 335260
  chr16:2042499-2042843
  hypo

SEQ ID NO: 342409 - DNA, 224 bp, Homo sapiens
  chr16:2043001-2043225
  hypo
acctaccagagcccgcccttcaccgagaccctggacaccagccccaaagggtaccaggtgcccgcctactagcggctggcaggcacagaccagggctccaaggccaccccaccaacgcaggccccagggtctccgggacctcccttgggtccttccagctcagtgccgcggacagagtaggtggccgctttgcgccatccggggccaagagggggtggacccgc

SEQ ID NO: 342410 - DNA, 883 bp, Homo sapiens
  chr16:2104688-2105571
  hypo
cgaacacctctgcaacggcaggagctgggcgagttctgtcactgggaggtggtgctgctgacttggtctcaaccggagcgtactggtcccgtcttcctcctcctttctccactttgtggaccttcctcctgccatcctgtggtgggaggtttccattagtcttgggtctctgtgtcatgattctgggaagtagagaaagaggaggaagagatcggtctgactctggctttgctgttctgtcgcccagaaaagggcctcagtggctgggctgcctgcaggacaggtgccggccaggtgcctaccgtcaggtttcctgtctgaggtgacgtggccggcagccaagtgtgcacacgtctcctccgagccactctctgctgggggtggggaacgcccaggagtctggtgatgtcggcgtctcccagcctcgggttgggccctgagtgtacggcatacacacttctgctgccgcctcggcacagaccctctgtgcagccccaggggcggtagatcctagtgtccgtgcgtagccggcctgccctgggctcccctgagcctcttcgggcccagtgcgtggtctgtctgttgctgccgggggactgatgatggggtttctggcagtgacgggtttggacacactgtcctgcggcgggagggggaggtgagtgggagatgtagattcggcgtcctcgcaaactgccgccgcttctcccccagctgactttgtcctgcagtggatggatgttggcttgtcctcggaattccttctggtgctggtgaacttggtcaaattcaatagctgttacctcgacgagtacatcgcaaggatggttcagtaagaaaagaattgagatcctgttctgataatggtcctaagttcagctcc

SEQ ID NO: 342411 - DNA, 222 bp, Homo sapiens
  chr16:2106533-2106755
  hypo
cggggagaggtggcagcgcaggctgaaggaggtgggaaggaagcctgggtgtcctctcctgtggggaggagctggggtaggacgggcgtgagccgtctccctctccaccaggtctccctgcaggtgctggacgccgtggtctgctacaactgcctgccggctgagagcctcccgctgttcatcgttaccctctgtcgcaccatcaacgtcaaggagctctgc

SEQ ID NO: 342412 - DNA, 495 bp, Homo sapiens
  chr16:2106988-2107483
  hypo
cgagctggccggaccttgggtggctatagggcagcagccaggcggggccagcagcgggactggggctgggggcagggcttatgcctgccagcccctgacacgcattgtgtctcgcagctgatgcggaacctccttggcacccacctgggccacagcgccatctacaacatgtgccacctcatggaggacaggtgagtgtggtgggtggggcgcagggcagtggaggccagcacagccctcggggcagctccagtgtcccttgccaagcacacactggcttagagagtccttgtcctctcgggcagctgttccagaggctgccactagagcgaggcccatgacttctaggatccagcccctgtcctctccttcctctgtcagttcaacagaatatccacacccagctcagtgcctgccccatgctcggacgtcctccagcggtgctccccaactacttagcctgttacaaggcgaggctcggggtcttggcttgac

SEQ ID NO: 342413 - DNA, 440 bp, Homo sapiens
  chr16:2108531-2108971
  hypo
cgtggtcagcagtgatgggctgccgcctgtgcgcaggagtgaacaagagtgttactgctggcctctgttccctgcccttccccagcggtgctcctgccccccccaagcacagggacctctggggctgctgcaggagcctcggcaacctcacacatccatggcggaccctgggacagggccctgctcacattccgtctctctggggaacacttttagagcctacatggaggacgcgcccctgctgagaggagccgtgttttttgtgggcatggctctctggggagcccaccggctctattctctcaggaactcgccgacatctgtgttgccatcattttaccaggtaaggcggtttctgtgtgcagtgagctggcaggaacgggagagctcccctcacgcctgcccacccatcccactgggggtcctgctgcgggggctgc

SEQ ID NO: 342414 - DNA, 1165 bp, Homo sapiens
  chr16:2128599-2129764
  hypo
ctgcctgagggtgacggtggaaggccacatggggatcccagacctctgtgtgcttgccggaggcagcctgcgggcagaatgcaatctgggcctgtctgtgtggcctccgcctctctgcatgactacaccgtttcgccaggaggccgtaacctagtgctcccgtgggcttcggtgagggggatgtcggtctctagcctcctgagtctgctccgaccagtaggcctggtcttccccacccagcgtctccccgttctctgggacaatgtggtccacgtgattctcaagctgaggctcgctgggccgcccacgccctgttggggtctttccgagcgaggtcctcagccgtgcatgcgttgagctttggcccttggtgataggtggctcggcccgccctacctggcaccctgaccctggtcacggcctctccctccagcaggatacagacgtccctcaccagtgccagcttggggtctgcagatgagaactccgtggcccaggctgacgatagcctgaaaaacctccacctggagctcacggaaacctgtctggacatgatggctcgatacgtcttctccaacttcacggctgtcccgaagaggtccaggcggcactacagggctgggcgggcctgcgggagctccacgggcaagctgggtttcacgctccctgtcttctaggtctcctgtgggcgagttcctcctagcgggtggcaggaccaaaacctggctggttgggaacaagcttgtcactgtgacgacaagcgtgggaaccgggacccggtcgttactaggcctggactcgggggagctgcagtccggcccggagtcgaggtgactgcaccttcctttcctccgcgcctgccagcctcgacaccggctgtcccgagcccaggcccacgtggcaccctcgtaccagcctggggactaagtccaccctgtgcgtgggattctcttctcagctccagccccggggtgcatgtgagacagaccaaggaggcgccggccaagctggagtcccaggctgggcagcaggtgtcccgtggggcccgggatcgggtccgttccatgtcgggtgagccttggccccagccacctccacacaggcaccggggctccctcagttgctgctggtcccagtgttcaggaaggccccgagcccaggggcc

SEQ ID NO: 342415 - DNA, 324 bp, Homo sapiens
  chr16:2131440-2131764
  hypo
cgtcagagcagcgctggctccgacatcgtggtcctgaggattgtgggagggagcatgagggcaaaaccagggcccaggccaggaggcccctggggggccagagatgggtaaggggaggtactggcctcaggccaaaggtgctgccgcctccgcagggaacaccagctggctgatgagcctggagaacccgctcagccctttctcctcggacatcaacaacatgcccctgcaggagctgtctaacgccctcatggcggctgagcgcttcaaggagcaccgggacacagccctgtacaagtcactgtcggtgccggcagccagcac

SEQ ID NO: 342416 - DNA, 1159 bp, Homo sapiens
  chr16:2141860-2143019
  hypo
cgtagcccccgctgtcatacacggcacaggagccccaggaccatgccctgccggagaggggtggcgtgggtgccgcaccccagcccttccggcaccccggagccaggctggtcaggaggccgcggcactcctggagaactactcccttgtccttggcgtagacgcccggggccctcgctctgctcaccccagcagatccggcgctgaataggcccacgtccccgagccattgtgaggactctcccagccaacgtcgtaatcgctggtgctgaagcctcctgcggccgagcacgtgtggaccctggggccgggagggtctgggtagagtgctgaaacacacagagccccaggccggggccagggcctcatcaaaacccaacaggagtgtttcctgctggccagctcgcctgagctctggttcggcgccaccccagggaaccctcccagcagccatcaattagacaacgttaccatctctcatatacagagaaggaaacggcggtgttaagagggcaaaggtcacacagctagggagcagggctgatgccagagctccgctaaaggctgctctctcaacaagaggaacgatttaagtcttggggcacgccctgccagctcaccttcctgcagccgcacctgccgcagccgtgggggccccagctctgggctggactggttcccgtggacgtagggcagcagcacgtgggccatccatggccagagctcctcagacctgccacagcatcagtcacacgctccagcccctactgccccatgcccgcctcgagtgagcggccaccagagacccagggaacatggctcccactgccctgctggccacggctagacctgggcttctcagccttatcctggggatgttctggggcagacagttgtctgtcatgggcccgtcctgtgcactgcaagacacggacctgtgtccctcccctctgcctactgatgccagcagcacctacctccagttctagcagccacaaaggtatctacacatgtccacatgtcccctagggtctggctggactaaaggcaaaactaaagcccagaagacagaccagtgcaccggatgcccgtaccgcgtgatggccaggaaggcccggctgtgcagctcctgcttgatggcgctttgcagacggtaggc

SEQ ID NO: 342417 - DNA, 253 bp, Homo sapiens
  chr16:2146195-2146448
  hypo
cgtagttacccaaacccagacaccgcagcccctgtgcatgcaggccctgtggtgtggcctgtggctccggggcaccgcacctgcactgcatgccactgcactgaatcctgcaggcagctgcagtgcaacggcagggccgtgtggacctcagcacacctgagcataggagggcatggcagagcccggggtcacacgcgtgggaacacgccgtgggtgcgctccgccgccggctgccatgtgcgtgactatgtgc

SEQ ID NO: 342418 - DNA, 735 bp, Homo sapiens
  chr16:2213255-2213990
  hypo
cgggttccaggggcgggctcatctctctcctgtgcttttttccgtgcagtgcggtttgtgtggagttgggctccggtgactcaccctgcaggttctttctctggggtgtggctggtgtctccccgctgcagcctggtgctggctgggtcctgaccgcacctgtcgtggcaggaaacacattcgtcgtgccttggctggtccctgtgtgactgcgtcccgccacgtgggccacaccctgggcctacccaccaaggcccagccttggccccagggacattcagcctggaggtgactggctgtgactcaggacccagaggagtagagggagccaggcaggggtccctccacctcggggaagagctggatgggctcttcgggagctcagaaaggctaagccttgagggacggtgacgcagagccgcctgcctgcccgggcctctgcatacctgggatcggggtgaaggacctttgcctcctagaggcctgcctgagccggggctggtggtggaaggctgctgcggcggccccacggtgccccacagcaggtctgcacacttgcagcagcccgtctgactcacaggggcctgggctccatctctcaagcccctcatttgtgctccacccacaggaggtgcttcccaaggaccgtagatgcctctctagagcatgagctcaggcaagagtgcccgctacaaccgcttctccggggggcccagcaatcttcccaccccagac

SEQ ID NO: 342419 - DNA, 371 bp, Homo sapiens
  chr16:2226433-2226804
  hypo
cgggggtggggacgaggagctggcagccccagcacaaagtggtggagggcaggtacgtgtggcaggtgtggctggggcagggcagccggccgcaggacatcctggtgaagcagccctttctctgcaggtttggacttgctaacaggatccaggccaggctgtggtttcccctgaaccagccctggacctttctgagccaggctggccacatggggtggtctcggggtttctgcctgccccgtgggcataggtggacaggctctggcagccgggcagtgccctccccgtcccatgctcggcgagcctccctctactcggcactgtccttgctgcccagcccctctctgggtgccaggtacgacgcttgcccc

SEQ ID NO: 342420 - DNA, 1750 bp, Homo sapiens
  chr16:2229615-2231365
  hypo
cggcaccttcttggaggtgggtgtgggcgagccctggagcttgggcacaggctgcgtcaggacgggcttgggagagacaggcggcttggccggcttccgggcttcgccctcgggcgggggcaatgggggtaggtgcgccaggtcggtgggcgggggttcggcaggcgggggcggtggaggcagctccggaggcccagcctgctccgaggccggtcggcggcgcacggtgccagtgccattatggtacacggacagtggcggtggtggctcaggcccggcctcccgctccttggccttgggcctgcgcttgaccgtgtcagactcggtcaggatgaacttgacgttctcctgctggttctgcttggcccggatgcgcctcttgagtgtggcgctggcttccaccttggccaagggcgggccttcgacacccgcctcgcccttggagggaccccgaggccgctgccggccagtgccatcctccacaaaggggcctgggtctgccgactccccaggcccccggcgggcagtggccagaagtccggtgactggcccgctgagcgtgcggcgccggttcaccacctccccgccaggcccgatggcctctttgtgtttcactgaggccagcacggtggccacccggcccggctctgggctggcagggcggggagtggggtggccctcaggaggcctgcgggcagcccggcccccacccccaatggaggacagctccagcatggccgcgatgctcttcacactgccggcactacccgtgtccacgctgccggccaggtcactggcccgccggcactgtgcccggacccccagcaggccatcctcaggctcggcgtcaggcaccggctcatccgccaggttggcactagccagggccgagctggagcgcttgggtgggggcggcgggggccccttctttcggggccgcacggcaaaggactggctgcggttgacgttcttgtcggcacctgcgggcgccctcactgagtggctgcggcccacgcgccgctggaccgtggcataggggccggcagccgcaggcaccagcagctcgtcccgctccggctcgctgtcggacgccgcatagcgattcaggctgtgggcccgcttcttgggccgccccggctccgcgtcggcctcagggggcaggcacagtgtgggcacagccgtcggcacgggtgggggcgcaggccccggggcagccggccccacctcgccctccacgggctggggcagcacgtaggcaaagccgcggtgcgtcggtgactgaggcagggagcggggtgacatggggcgctctgtcggcggcagcagctgcggggtgggcttcaccttggccgtagctggggctggaccatgaggtcccccaagggcctggggagagcctggtcgggttttggtgggcgtctgggggggcgtgaagtggctagtgcctggtgggaggacctgccgtggcttgccaggcacggggggcacgctggccctcttgatgctgtggccgtggcggccgggccgggcctccctgggcggggtgccgggggcggggccctcatccaggaggtactcctggcttcgagacatggggctgctgggcccagggggcccatctcccagcagctcctgcgagctgctcatgtgccgtgcccgaccacccaggctggagtcctgccgcgtggtggccctcggggtgggtggcaggtggctggagggcttctcagtggtgggccccacctcagcc

SEQ ID NO: 342421 - DNA, 749 bp, Homo sapiens
  chr16:2234442-2235191
  hypo
cgtgcccatgcacacgctgcaccatctcatacccatccccttccacctgtacacagacacgcgtgcccagctcgcagtcccaccatcacacacacacacgcacacacagaggcacaggttggcccacacgcacagcctgcacaatgacgacacccgtacacacaggcagacacacacacaacacacagactgacagacagaggagagggtctggcctggcaatgcccccgaccccgccgctgccaggccaggcaggccgtgtaagcacccatcagcccatcggccttacagcctctccccggagcccacgctgagaacacccccaagccctgtaccttgccctccgatgctggctccagcttcttgggcggctgctccccatagacctgcccggcgtgggccactggaggctgggaccgggccacacctgaggacgagagtgggtgggggacaagggctgtcgggctgctttcctccatcgggctgcgtggcagcacccttgctcttacctgcagagccttccggaggcttggcggggctgtcccccgggccggactcagagacggacttctgggaaagcaccgttgccaggagctgcaacccagaaaccccggcttgtcacctgctcccagccctggccaccctggccctggccactaccccacctaccttgacgccttcagagcccgcgtgtagggcgtgacccccgctgccccggccgccagccatgccgctaatgctgccgcttc

SEQ ID NO: 342422 - DNA, 460 bp, Homo sapiens
  chr16:2278311-2278771
  hypo
cggagccctggctgcccagcctccgccttcccaggccctgctgacagcaggctcgttgcagatgaggacgatgtgcacagatgcggccgctgccaggcagagttcaccgccttggaggattttgttcagcacaagattcagaaggcctgccagcgggcccctccggaggccctgcctgccacccctgccaccacagcgttgctgggccaggaggtgagccctcacccactcccccatcccctcccgggttcacctgacaggtgggggaggtggccgcgcttcaggatggacctgtgcagccggttccgggggccacgtgggcgggcagagggcaggcacctggctgcggtgtgggagggtccgggtgtgtgagcctgtggtgctctggggcgtcctggagggcctgcggtggcccagccttcttggcagcctctggtcgaagcccgtgctgttgggggcc

SEQ ID NO: 342423 - DNA, 948 bp, Homo sapiens
  chr16:2280815-2281763
  hypo
cgggctctggccttgacctggcgtttggtttctgggatggtggcgtcacctgggagcatgaactccttaggttctggcggggtctctgggctgggtctctggccagccaggcccctttccacccacctaaactctagcagcctccagccctaggctcagcacccctccctgtgcttcagcagcccctcttggcacccctgccactctggcacccctgggattttcccctttgcgggcatcctgggtactctgtgtgtgcccttggccagtcagcaggcccggtgggcttagtccagggctgctagctctcctgttggcctctagtggagatggcagagggtcctgcctgctggtggccaagggctggggcgtgccaggtcctgtctttgcgggtgcaggggtgcggtcagctgtgtgggcagttggaacccacctccaggccctcctgccgcttcgcggaaaaagttcgcgtctcctctggcctcgcagcagccatgttcccccaggtcctccccatcagaggcctctgtcctttggaagatcactcctggggcatcgagcgtgtaagggctcgggcaggagaggctcttaattgtttctgagtcaccacgcttttgtcgtgtttcaagagaacagcttgtcaaaacaagacgccagccggactgaggtggtttctaagcagtggcttcacagctgtttcccacttgtcatctttatgagcagaaaacctgaactgtgtttacaacctagctttgcacattgtcagatttttcccagcatcctccagaagtgcaaaagcccagcttcctcgcctcaggctgtcccgggtgtctggagagcgttcactctcccaggccaagcctgccttgggacggggctctggccaggcctgcctgccctgctgcagtggcccagcccatctcctccgatggaagagtggccccggac

SEQ ID NO: 342424 - DNA, 862 bp, Homo sapiens
  chr16:2282274-2283136
  hypo
cgcaggggagggtgagcaggcccaggtgaagctactggtgaacaaggatggccgctatgtgtgtgcgctgtgccacaagaccttcaagacggtgagccggcgtgcggggagccagtgtgtgggtggcaggccccctcctgttcccccaggagggccctgagctgccacgccctcccccacagggcagcatcctcaaggcccacatggtcactcacagcagccgcaaggaccacgagtgcaagctctgtggggcctccttccgcaccaagggctcactcatccggcaccaccggcggcacacgggtgagctggccgcacctcgggctggagcccggtagcaccccgatggttggccctggggtgccccagcctcgcattccccagctttgggggatgaggcgggggcccctgcctgccttcgccttgtcaccttgtcgccagcctgctggggctgcccggggctgactaggttctctctgcagatgagcgcccctacaagtgctccaagtgtggaaagagcttccgggagtcgggtgcactgacccggcacctcaagtctctcaccccctgcacagagaaaatccgcttcagtgtgagcaaggacgtggttgtcagcaaagaggacgcacgtgcaggtcagcatggtgcgggcagctgcctggtcctgggggctggctgtggacgcagccgccactggggtgtgtgagggatcttcactccctcactccaccttgaaggttctggagctggagctgccggcttggggacagccacatcatcggtgacaggcgagcctatagagacttcacccgtgattcacctggtgacagatgccaagggcaccgtcatccacgaagtccac

SEQ ID NO: 342425 - DNA, 512 bp, Homo sapiens
  chr16:2358246-2358758
  hypo
cgtggagctgggcttccctcgcccggggccgtgtccagctatccagcccacactcagcgctgtatgcggatgctgctgccttcagtggtcccaactgcctgccaaccgtcccaggtggagccttgctgctggcggctcttgtggttgggtgctctcgaaggttactgattcggaaagaacaggctggacaaggcaaacactcacctttcgcctcaaatttcccaatgagctgggctcccattgccatggcgacattagacaggaggcaggagcagagcttctggctcagagtcatccagttgtaccgaggggccacgaagaagtaggggatgtaggtgaagaagtagaggaagcctccgaaggctgctgccatgttggctgcaggtgttggaagacccggggggcgtgagcgtcagtgccctcaaaaggggcttgggctccccgaggtacaggcaaccccctactcctggggccgagccacccaacctgctcctggcacttgccatctacac

SEQ ID NO: 342426 - DNA, 198 bp, Homo sapiens
  chr16:2477175-2477373
  hypo
cgggctccatcccgtggcctttctctctctgtggagttcactctgccccttgccacaggcccctcagctcctctctgggaagtgcagatgctggtctctgccccttctcagccaggactcaggaaagggtcatgcacaggccttgcctatggttcctgcaccccttgcccagaacaacggcgttgcacacccatggtc

SEQ ID NO: 342427 - DNA, 482 bp, Homo sapiens
  chr16:2485948-2486430
  hypo
cgtgttagcagttcagttgctgtccttgctctatccgatggcctgcctccccattccctctcaggagctcgtgcccagatgtaccctgctgagggacctgctaatgatactctgactttgcaggttacgaaagtcgcctcttgttttagcaaaccctttaatttcagttggcaaagagtgactgagccagagcctcagcacgggggctgtttgggctccctgccctgtgcgccatgagcacgcagacctgcctgtggatgctggccctctccttggccatcctcttagaactctcgagacagagttcagcgtgccctgtaacacagagccaggcttctaaacgggaagcaggtacaggcaggttagaactggcctggtgcctggatcccttcatccccagaggccaggtgctccttgaaagaaacttgcgcagccttttcttctaccagttaactgcttatctgctcagcaccccaaggaac

SEQ ID NO: 342428 - DNA, 290 bp, Homo sapiens
  chr16:2497839-2498129
  hypo
cgctgggctctcattggccactgacatcttgtctttttggcgtctgcagcccccacgctggcaggtgtagtccctgcgcctcttgtcctcttggtcaagtgaatgacgcatgcaacctgcagagtccccaggacagagcagccaagggacttggcctcagtccaaggggaaggtgccttgcggggggccgctggagcagcgtgttccctgatagttggcgctggttgacaacagagaacagggtgaccatcgcctagagacagtcaggattcctgcggccacacagtgcc

SEQ ID NO: 342429 - DNA, 249 bp, Homo sapiens
  chr16:2531031-2531280
  hypo
cgctgtctctatcccttctgaggctaaggcttcctcacactgcaagatccagccgaggcaggccttggcgctgggaaagcaccgtgtcacagcacctgcaccttgaattggcatcgtcagtacacctgacccgggctggggtggggccatgcctctgtactcctctgcactcaggtacctggcacactggcattcgggaagcatgtcttgaatgcctattaaaatgattaggaccgggcgtggtggctc

SEQ ID NO: 342430 - DNA, 559 bp, Homo sapiens
  chr16:2540434-2540993
  hypo
cgagcagcgattcgctcggaccccagaggccacaggaagatggcttcccccacaggaggcaccctcacagggccctgctggcactgtctgccttgggctgcctgaacccggagagagagtgggatagactgttcatggggtgtcacccttatgtcacctgcaccccaccctgtcagtccagagtgaggctcaacccacaggggttgcttgggaactgttgcccgtgaggagttgggtgttattatcggctccgctctgcagacatggcaaccgcaggttagggaagatgcacggcttgtccgcatttcaagcaaacaagtggcagagctggactttgtggccaggcctgtctaactgcaaagctgccccgtttccacagtagcccctgcctcccctctcactccctccccggccaccgcctccggctctgcacctttgtcaggggttgggggactgcagggaacagaggaggccttgtttgctgcgtaggagcaggtgcggcttatgatgtacagcagcagccagccagcagatagacaacagggaaagccactcggcc

SEQ ID NO: 342431 - DNA, 135 bp, Homo sapiens
  chr16:2544830-2544965
  hypo
cggcttctcaaaagtcacttatcttaagtggaagcccttctaatacttacacaaagattaaggcaaataatgtggctgcgcaacgtgactctcactcgtaattccagcatggtgggaagatcacttgaggcctgc

SEQ ID NO: 342432 - DNA, 905 bp, Homo sapiens
  chr16:2546133-2547038
  hypo
cgagcacagcggcgctatggactctccaggatacaactgcttcgtggacaaagacaagatggacgctgccatccaggacctggggcccaaggagctgagctgcactgaactgcaggaactgaagcagctggcgcgccagggctactgggcccaaagccacgccctgcggggaaaggtgtaccagcgcctgatccgggacattccctgccgcacggtcacgcctgacgccagcgtgtacagcgacatcgtgggcaagatcgtgggcaagcacagcagcagctgcctgccgctgcccgagttcgtggacaacacgcaggtgcccagctactgcctgaatgcacgcggcgagggggccgtgcgcaagatcctcctgtgcctggccaaccagttccccgacatctccttctgccccgccctgccggccgtggtggccctgctgctgcactacagcatcgacgaggccgagtgcttcgagaaggcctgccgcatcctggcctgcaatgaccccggcaggaggctgatcgaccagagcttcctggcctttgagtcgtcctgcatgacgtttggggacctggtgaacaagtactgccaggcggcccacaagctgatggtggccgtgtcggaggatgtcctgcaggtctatgcggactggcagcgctggctgtttggggagctgcccctctgctacttcgcccgggtctttgacgtcttcctggtggagggctacaaggtgctgtaccgcgtggcgctggccatcctcaagttcttccacaaggtgagggccgggcagccgctggagtcggacagcgtgaagcaggacatccgcacgttcgtcagagacatcgcgaagacggtgtcccctgagaagctgctggagaaagcgttcgccatccgcctcttctccc

SEQ ID NO: 342433 - DNA, 380 bp, Homo sapiens
  chr16:2642768-2643148
  hypo
tgtgctctagatgccgccagtggagctttgcccgcagtctctgtccatgcaccctgggccaccggggagtggaattgtccatttcattgtctctctcaggggatgctggcgcgggggtgggtggcgcctgtccgtggggcccttgcctgcctccccgtggtgctggcgtgttctgtcactgagccactctggggcttcagtgtccctggcatgggtgacactgctgggagtgcctctgggctccttgcctgtggcctttttttttctcaggatggatttctggaagcgaggctacttctcagtactatttccgaatcgcttcctcagtgagtcctccccaggctgcaggtgccgagcgggagcaccactcctgcacgccc

SEQ ID NO: 342434 - DNA, 503 bp, Homo sapiens
  chr16:2764192-2764695
  hypo
cagggccacgtcagcgctggaggccgtgccctggtacagggggttgctctccacctgcctcacccgggcatacatagcgtgtggtcccggctgcactagctgccttgcccccagcaggacctggtacagggacgtctcagaggtgctggcgggagaaacagagaggcggcgtgaggcggcccctcgtgtggggacaggcccgggaggggctggggctcctctggccaccaccgtgccccacacctctctctgcacaatgtcttcgagagtcatctctaggacagccaggtgcagcggtgatgcgtgttgacattgaagccagaccgcccgactcagatttccacctccacccctggccgctgtgtggccttgggcaagtcacttaacaagttctctgtgatgcagctttctcacctgtgctgtggggacagtcacagtgcctacctgaaaggctggctcggagagaaccaccctccaggtgcagcagggccagccccacctgc

SEQ ID NO: 342435 - DNA, 456 bp, Homo sapiens
  chr16:2770043-2770499
  hypo
cggagccccaggcagtgcagcggagcctggtgggggactgcaccaccaggaccctgcaccttcacgactcaccaaaacacagcagcagcaggagcggcaccgccgccggccgcctcatgtcctcaggcctggctggggcgcagggccgtggtcggcggtggcagaagcgttggagcacgagcgaggtgcaggctccatgaagtggagttttatgctggagatgagcacaggcccggctatgcggcccaacccgtcggcccggcctgcccagctcctctcctcaggaaggaagcgcccagagccgactcctccgtgacctagccctgaaccccgagaccccagggcagacccctcaccccagcgcagcacggggtgccgttggcctcggttcctggaccctgagctgacccagaccccccagcagaccccgagctgaccgcggtgcacgcgaagtcc

SEQ ID NO: 342436 - DNA, 322 bp, Homo sapiens
  chr16:2806256-2806578
  hypo
gcagggacttgggtgtggggcggtaagtggttagtttggggccaggggcctgacccgtgtctccccgctccccctcaggagcggtggtgccccccccgggcacggggccatgtacaacgggatcgggctgccgacgccccggggcagcggcaccaacggctacgtccagcgcaacctgtccctggtgcggggccgccggggtgagcggcctgactacaagggagaggaggaactgcggcgcctggaggctgccctggtgaagcggcctaatcctgacatcctggaccacgagcgcaagcggcgcgtcgagctgcgatgcctc

SEQ ID NO: 342437 - DNA, 331 bp, Homo sapiens
  chr16:2849309-2849640
  hypo
cggtccagctgggcgagctgacttccaggccaactccttggaacctgcgggcctacagcagtcgttacaaagtgcaggacatcattgtgaaccctgacgcacttggggttttacgcaatgacattgccctgctgagactggcctcttctgtcacctacaatgcgtacatccagcccatttgcatcgagtcttccaccttcaacttcgtgcaccggccggactgctgggtgaccggctgggggttaatcagccccagtggcagtgaggctggggatagaccgggtggggtgatgggggtgcggggtgagcattaccctctacccctgttccc

SEQ ID NO: 342438 - DNA, 188 bp, Homo sapiens
  chr16:2974635-2974823
  hypo
cgctcctgccacgctgtgggtcacgcaacccccccaggctagtcaaggttcaggcaggtggagacaaagcccggttgctgaggggcctgtggactttaacgggcggagtggcggtgggtcagcatctaccatccaagagcctgaacgggcaagagtgggaacgggtcctcagccttccacaagccggc

SEQ ID NO: 342439 - DNA, 345 bp, Homo sapiens
  chr16:3021562-3021907
  hypo
cgcccggctgccctggtgggctacactgtgttgtcgggtgtggccggctggcgtgctctcaccgccccctccaccagtgctcggctccgggcatttggatggcaggctgctgcccgcctactggtatttggggcccggggagtgggtctgggttcaggggctccaggctccctgccctgctacctgcgcatggacgcactggcgctgcttgggggactggtaaatgtagcccgtctgcccgagcgctggggacctggccgctttgactactggggcaactcccaccagatcatgcacctgctgagcgtgggctccatcctgcagctgcacgccggcgtcgtgccc

SEQ ID NO: 342440 - DNA, 942 bp, Homo sapiens
  chr16:3139033-3139975
  hypo
cgctgtggaggaccccgggtaggtggcgcagggcgcggctggcggaaggcgggccaagctagtacagcgtctcgcgggcgtgggtgcgcaggtggcgcagcaggtgggagttgcggctgaagctgcggccacactgcgtgcaggagtagggcctggcgcccgtgtgcaccagcaggtgtcgcagcagattgcagctgcggctgaagctcttcccgcactccacgcactcctgcgggggctcggcctgctcctgcccgggctccgcatgggtagccaggtgccgccgcagatgcgcgttgcgccggaagctgcgaccgcacgtctgacagctgtagggccgctcgcccgtgtggctgcggcgatggcgggccaggttggagctattgcggaaacggtggccgcaggtgtcgcaggcgtggggcttctcccctgtgtggatgcgctggtggcgcgccaggtgggcgctctggctgaagccctcaccgcactcgctgcagcggcagggcttctcgcccgtgtggctgcgctggtggcgggccagatcctgggtctggccgaaactcttcccgcactgggtgcagtggtggggccgagggccaccgtgggtcagcaggtggcgggcaaggctggcccggcgcacaaagcgcttcccgcactgcggacaggcgtagggcttctcgcccgtgtgcacccgttggtggctgaccagctgcgagctctgcgtgaagctgcggccgcaagcctggcaggagaagggccgctcgcccgtgtgcaccctccggtgggccaccaggtgctcgctgcgccggaaggccttgccgcagtcgctgcacacgaagggcctccggtcggagtcccggcggcggctgccggagccttcggaggaccggcggtccttgtccctggcgtggatccgcaggtggcgcttgaggctggagcggc

SEQ ID NO: 342441 - DNA, 313 bp, Homo sapiens
  chr16:3193333-3193646
  hypo
cgacccctccttccacccatgctggttccttctctttcacctgctagtggcctcagggcccctggctgaggggaggcgggggccggtggacaagacgctctggtcccttggtaacaggtgtgcatgtgccagccctctctgcccctaggcctttcttagccaaccttccatgcacacatcatcctgcggtcactgtcatggtctccgtttcccgtaagaagcaagcaaggtctcgctgtggacaaggctgattccagttggtgatttttacctctgggggcctggtgctgtgtgcatgcgtgtggcgggtggc

SEQ ID NO: 342442 - DNA, 640 bp, Homo sapiens; identical to SEQ ID NO: 335266
  chr16:3208795-3209435
  hypo

SEQ ID NO: 342443 - DNA, 106 bp, Homo sapiens
  chr16:3211823-3211929
  hypo
cgtagtgaaaccccacctctgcaaaacaattttaaaagttagcagggcgtggtggtgcgcgcctgtgatccaagctactcctgtgtctgaggcaggaggatcgctt

SEQ ID NO: 342444 - DNA, 853 bp, Homo sapiens; identical to SEQ ID NO: 335268
  chr16:3232599-3233452
  hypo

SEQ ID NO: 342445 - DNA, 877 bp, Homo sapiens; identical to SEQ ID NO: 335269
  chr16:3233501-3234378
  hypo

SEQ ID NO: 342446 - DNA, 96 bp, Homo sapiens
  chr16:3537877-3537973
  hypo
cgctggtgccctgggaggccaggcagctgggcgcgctggacccatgtccaaagccatggggtgagtgaaaccagattaacccgctgagcttgccca

SEQ ID NO: 342447 - DNA, 373 bp, Homo sapiens
  chr16:3696491-3696864
  hypo
cgggtgtaggggttgggtggggagaggatgtcctctgaaaaggtgacatttaagctgaaactggaatgacaagaaggccccagctctgcaggcagagcggaaggctcagagcttagaatcacgtaggtcatggaaagcattggatttcgtgttagggacaatgagaaactggtgacagattttaagtaggggaataaagagatctaattacacatttgcgagatgttctgagagctgtggggacggctgggacatgtacctggaagcagggcagccaaagggagaggcagtgatgacgggtggtatggaggctgcagaatctggaggacgtgcaggctcagggtgcatggtgcgggcggggctgagggggagc

SEQ ID NO: 342448 - DNA, 362 bp, Homo sapiens
  chr16:3741902-3742264
  hypo
cggcagagcccagcgagggaggaaagcagccaatgtgtccccagccgcacgcagttcaccgacgcaggcccagaaaccagacactttcactccaacacaggactggaccgacccaacaccaacacccactgaccccagggaccacataccaggaccctgccttggtcagtagatttgcaatacgtgatggtgtcaaggatatgtggccagccagccacgccgtgtcaaagtctaagcctaaatgaaccgcatctaactgggagcctctcctgttcttcacaaatttgtaacaagtagaaaggaaagacaacagaatatccaggaatcaaggttttaaaaatcagcatatcagccaggggtgc

SEQ ID NO: 342449 - DNA, 269 bp, Homo sapiens
  chr16:3772855-3773124
  hypo
cggcaaagcactgtcatctactcatcaaagctcctcagaatctactttgctagtctgggcattacactcacttaaatttcttcagtatcttataagggacctatgttttcccacctctgcctatttattatgaagtgtatacaagtaattcatgtggaattaacacataaaatccatacgtccatgaggctgcgatgtcttcatggtctgagatgaagttattctcctgcctacatgcccctgcccgtctgttacggcgctgtgggcgc

SEQ ID NO: 342450 - DNA, 179 bp, Homo sapiens
  chr16:3811586-3811765
  hypo
cgcagacaccgcctcctctccagggcacgtggctgcttcagacctctgacagcagcctgaggtccgggcaaccaggtaaaaaccccgacgcagcactccccacgcacacggtccccagcacttgaaggtgcaaaggcctggtccagggtgcagacgtgcccttcacagtgggaagcgtc

SEQ ID NO: 342451 - DNA, 263 bp, Homo sapiens
  chr16:3821348-3821611
  hypo
cgtgagccaccgcgcccagccaaatgtatgggaatttaatcacattttcttgggagtgttctgcttgtgaaaattcatcgagctatacacttgtaatgggcactcctcaataacggtaaaactacacacgtttcttatagtctgatttatataattaaaacaaccattgaaacttatggcttaaacacacacatctacagcagtcccctcatatccactcggatacattccaagacccccagtcttggaacgcctgaaactgc

SEQ ID NO: 342452 - DNA, 146 bp, Homo sapiens
  chr16:3900218-3900364
  hypo
gtggtcccattttacgcattactcggagggaaagcccgcggttaggtaggaagtattgaaagtgcttcagttcacttaccttggccatgcctcctgcctgtgcggtgttcagtcccgcgtgaccagtcatttgcggggaaacctgc

SEQ ID NO: 342453 - DNA, 138 bp, Homo sapiens
  chr16:4092829-4092967
  hypo
cgtttggacgattccggttttggtctgctaacttatcaactgtatgatttgggcaagttcctaaacttctctgtgcttcgtttctcccctttgtaaaacaggactaaaaatattaaaactcggccgggcgcagtggct

SEQ ID NO: 342454 - DNA, 1432 bp, Homo sapiens; identical to SEQ ID NO: 335274
  chr16:4165534-4166966
  hypo

SEQ ID NO: 342455 - DNA, 244 bp, Homo sapiens
  chr16:4203944-4204188
  hypo
actgatcaatgagccgccagatgccgagcaccacaccggcaagggctgcggatcgtgaacactggagattcaaacagcagagagaccacctcacaccattctgtcaacccgtgccaagtgcccaggcctgtgccaacgcttggcacacaatgattcaacagaggcagcctcatgcttcacggcccgatgctcgcttgttgtctatggccgtaggctaacctgcaaataaagaactggactgcac

SEQ ID NO: 342456 - DNA, 540 bp, Homo sapiens; identical to SEQ ID NO: 335275
  chr16:4233245-4233785
  hypo

SEQ ID NO: 342457 - DNA, 187 bp, Homo sapiens; identical to SEQ ID NO: 335276
  chr16:4234090-4234277
  hypo

SEQ ID NO: 342458 - DNA, 465 bp, Homo sapiens
  chr16:4310368-4310833
  hypo
cgtggcctagggagaggcttccgccattcaagatcacctgtccccttcccggtccccagagcccactcccgggcgcctcctgctcacctgggtccgcagctgctgctgttcccgctccagcttctcctggtgcagcagcctcacctgttcctgctgctgctgcagctgcacctgctgcgcaatcaccttgagcttttccgggtacatgtgggcctccagcgagcgcacctggaggcaggacaacctgggctcagggccaaggccgggagcacaccctgccctgtcagtctcacagcagctcattcactcctgctgaaaaccctagcacagggcgggcccctctcaacagaggccagaagcctttccagagcccttcagcccccggctcctctcgcctcccacctcggcctccactggaccatgctccctcctgcccgagtctttgcctatgctattccctctgcc

SEQ ID NO: 342459 - DNA, 70 bp, Homo sapiens; identical to SEQ ID NO: 268687
  chr16:4395410-4395480
  hypo

SEQ ID NO: 342460 - DNA, 831 bp, Homo sapiens
  chr16:4430998-4431829
  hypo
cgccaggggaccacggtgccccgagacgtgccacccgacacggtggggctgtacgtctttgagaacggcatcaccatgctcgacgcaggcagctttgccggcctgccgggcctgcagctcctggacctgtcacagaaccagatcgccagcctgcccagcggggtcttccagccactcgccaacctcagcaacctggacctgacagccaacaggctgcatgaaatcaccaatgagaccttccgtggcctgcggcgcctcgagcgcctctacctgggcaagaaccgcatccgccacatccagcctggtgccttcgacacgctcgaccgcctcctggagctcaagctgcaggacaacgagctgcgggcactgcccccgctgcgcctgccccgcctgctgctgctggacctcagccacaacagcctcctggccctggagcccggcatcctggacactgccaacgtggaggcgctgcggctggctggtctggggctgcagcagctggacgaggggctcttcagccgcttgcgcaacctccacgacctggatgtgtccgacaaccagctggagcgagtgccacctgtgatccgaggcctccggggcctgacgcgcctgcggctggccggcaacacccgcattgcccagctgcggcccgaggacctggccggcctggctgccctgcaggagctggatgtgagcaacctaagcctgcaggccctgcctggcgacctctcgggcctcttcccccgcctgcggctgctggcagctgcccgcaaccccttcaactgcgtgtgccccctgagctggtttggcccctgggtgcgcgagagccac

SEQ ID NO: 342461 - DNA, 847 bp, Homo sapiens
  chr16:4431854-4432701
  hypo
cgcgctgccacttcccgcccaagaacgctggccggctgctcctggagcttgactacgccgactttggctgcccagccaccaccaccacagccacagtgcccaccacgaggcccgtggtgcgggagcccacagccttgtcttctagcttggctcctacctggcttagccccacagagccggccactgaggcccccagcccgccctccactgccccaccgactgtagggcctgtcccccagccccaggactgcccaccgtccacctgcctcaatgggggcacatgccacctggggacacggcaccacctggcgtgcttgtgccccgaaggcttcacgggcctgtactgtgagagccagatggggcaggggacacggcccagccctacaccagtcacgccgaggccaccacggtccctgaccctgggcatcgagccggtgagccccacctccctgcgcgtggggctgcagcgctacctccaggggagctccgtgcagctcaggagcctccgtctcacctatcgcaacctatcgggccctgataagcggctggtgacgctgcgactgcctgcctcgctcgctgagtacacggtcacccagctgcggcccaacgccacttactccgtctgtgtcatgcctttggggcccgggcgggtgccggagggcgaggaggcctgcggggaggcccatacacccccagccgtccactccaaccacgccccagtcacccaggcccgcgagggcaacctgccgctcctcattgcgcccgccctggccgcggtgctcctggccgcgctggctgcggtgggggcagcctactgtgtgcggcgggggcgggccatggcagcagc

SEQ ID NO: 342462 - DNA, 77 bp, Homo sapiens
  chr16:4438405-4438482
  hypo
cggcagcacagccaggccgtatatggacaggcctggaactggccctcagtcccccgcctcccattggtttcgtcccc

SEQ ID NO: 342463 - DNA, 176 bp, Homo sapiens
  chr16:4478626-4478802
  hypo
cggttagctgtcttgttccccaagtgagctcataacctgccatgggcaagttttatatcaggtagtgtacacaggtgagaggtggcatccttcagggtacgtgctgttttcacagatagagtcatcaactggttgggcggggtggctcacgactgtaattccagcgctatgctggc

SEQ ID NO: 342464 - DNA, 226 bp, Homo sapiens
  chr16:4513533-4513759
  hypo
cgttgacgatgaacgaatgaatttagatgtactgcccagaggtgtgggcagccctggacacaccctccctacgggagctagaaagccctgacaaggatgcctgagtcacctggggcgggaggcccaccttggcatcgtgcacgaccttgcgggtgtgcttggtgagcagggcagcgtactcctcggccgtgtgcctgcaagtgctcagcccgatgttctggccgac

SEQ ID NO: 342465 - DNA, 116 bp, Homo sapiens
  chr16:4557910-4558026
  hypo
cgtggagcggatccactacatagggcagaacgagccggagctactggtggcccatgcatacacccgctacatgggggatctctcggggggccaggtgctgaagaaggtggcccagc

SEQ ID NO: 342466 - DNA, 140 bp, Homo sapiens
  chr16:4644993-4645133
  hypo
cgcgggagcgaggatctgctgttcccgagatcaacagctgaccagagagagggccgtggccacaggaccatggcctgtgacgaaggacgatgagctaggaaaggtgctgggctggtgccaagggacgccagtccacggag

SEQ ID NO: 342467 - DNA, 59 bp, Homo sapiens
  chr16:4719497-4719556
  hypo
cgacgggtccctgtcttgggtgagcatatatgttttgcgtgcccgccatgtacagggac

SEQ ID NO: 342468 - DNA, 138 bp, Homo sapiens; identical to SEQ ID NO: 268710
  chr16:4723493-4723631
  hypo

SEQ ID NO: 342469 - DNA, 308 bp, Homo sapiens
  chr16:4779967-4780275
  hypo
cgagatctcttaccgctgcacacactccttcaccacttcatactggccaatggaagcagctgtgtgaagatccagggggacatccagctcctccccgctgacctgtgtcccgagcccgtgccacatggacaagctgcggttcaggagttccggctcgctggcttcatcgctgagctcggacatcactgaggaggaaggcccaagggttagatctttcctggctggttgttccagggcatgaaacaggctggtcctgcccctgctacaccactgcactagcagactgataacccagtgcagtcaacccc

SEQ ID NO: 342470 - DNA, 256 bp, Homo sapiens
  chr16:4787730-4787986
  hypo
cgggggtggctaggccctcagggctctgcctgctgccttgtcctccaaaagccctctcatttgtccacagtcggactatggggaagaggagctgttcatcttccagcgaaaccaaacctccctgattccagacctgtcggaggagctggctgaagatcctgccgatggcgacaagtccagggcctgggtcgctgcagctgaagagtcccttcccgaggtctgtgggacacagaagagtatacgcctgtgtgtgtgc

SEQ ID NO: 342471 - DNA, 568 bp, Homo sapiens
  chr16:4802468-4803036
  hypo
cggtgccccggcggaagccccggccacaggccgggcaggtgtagggcttctcacctgtgtgcgtccggcggtgggcgctgaagtgcgagctgttgttgaagcgcttcccgcactgggtgcaggcatagggccgctccccgctgtgtgtcctgcggtggatgaccaggctggagctctggctgaagcgcttcccacactcggggcacgggtagggcttctcgcctgtgtgcaccctctggtgcgtgctgaagttggagcggtcgctaaagcccttcccacagactaggcacttgtaaggccgctcgcccgtgtgtgtgcgctggtgcttggtcaagtgggacgtcttgctgaagcctttgccacattcggggcaggtgtacggcttgtcagccccatgggaagcccgtcttcctggtggggggccgcctcttggctgatcaggcctgaccaagcccctgactggggctggcctctgacctgggagcgggtggccaggcccctggcatcgtgccgagagcactcggtaccactccattctcaacggggcatcctccctgccatcaccgcc

SEQ ID NO: 342472 - DNA, 409 bp, Homo sapiens
  chr16:4845976-4846385
  hypo
cgtcgcccactgctgctgctgcagctcccccgggccccgcagggaaagccccaggaaggtgagcccctggaaggtgagccctgccggcctctgggacctgcacggaactgtactgggggtggaggcggaaggtgaggggagtggcgggaagggtgctcatccccctagggaacaacgagcgaacctgcttggtcccgctgtgcttctcgtgcaggaaagacccaagggagtggataacttggccctggaaccctgaccctgtgtctcctgcccggtggcagtaacaaagccttctgtctgcccagagcctgagtctgcagtgtcttccagtccccgtctgggtgggtgacgcgggactcgccgccccactcaggtggccacctggcctctccaagccttcagtcagcac

SEQ ID NO: 342473 - DNA, 724 bp, Homo sapiens
  chr16:4920116-4920840
  hypo
cgttggctcctagctttcctctccacgtacggtgagctgatgaagacaggagttgcagtgagctgcagccggtggtgactgtgttttgttcttcagcatagaggcgcagactcgggagctgagcagtcaggtccgctctggggtgtatgcctatcttgcgtcattcctgccctgcagcaaggatgccctgctcaagcgtgctcggaaacttcacctctatgaacaggtgggtgactctagagtgaagccctttggctttggggtcctggcggaggggtgactgagtcttaagcaatgatgcgtctgctgccccactgcctccttgtgatcaccccatcatgcgtcctgagcgtaagagcgatgtgtaaacctgccttgaattgtgtcccgctcttcgcaggggggccgtctgaaggagcctctccagaagctcaaggaagccattggcagggcgatgccagagcagatggccaagtaccaggacgaatgccaggcacacacgcaggcaaaggttgccaagtaagtttgtcctggcgcttgcaggtgcaaccctcccgtcttgcctcttcccctcccgtttctcggtgtgtactgccgtttcccaaggagcctcttggctcttctttggccttttctccttctctgtgaagtcccagtagtgcagagtgaggggagaggcggtgggcaggagcaccttggggccccatgtaattctattcacccc

SEQ ID NO: 342474 - DNA, 322 bp, Homo sapiens
  chr16:4931957-4932279
  hypo
cgtaccattgcgcgtgcagctggagcagaataccctcatttttaggaatctagtgatgcctcttgcctcagggaaacgtttctttgatggggagtttgagatttcttttccttgtttatgctttatttgtggtaatgaaagagcgaatgactgaacagccatggcaaggcagacctacaggcgaggccgcagcagagggtggggcagagcagcctcggggtctgggggctgcaggggtttccctggcgcagcgaaagtctctgagcacttaccgggcgtgaccgtttcttaggtgtgagaggggctgtggcttttgtgcagc

SEQ ID NO: 342475 - DNA, 664 bp, Homo sapiens; identical to SEQ ID NO: 335281
  chr16:5007944-5008608
  hypo

SEQ ID NO: 342476 - DNA, 366 bp, Homo sapiens
  chr16:5703287-5703653
  hypo
cgtgtgctgggcttcagtgcagaaggtggggtgctgagttgtgtgctgggcctttgtgcggaaggtggggtgtggagccatgtgctgggcctatatgcggaaggtggggtgctgagccgtgtgctgggtttctttgaggcaggtggggtgtggagccgtgtgctccacctttgtacggaaggtggggtgctgagccgtgtgctgcgtctttgaggaagttggggtgcggagccgtgtgctgcgcctttgtgcagaaggtggggtgctgagccgtatgcgggcctggggtgattgcctctccctgacctcctttgcctctccctccgctaacagaccagaagcctgttctgccgcatgtgcagctgc

SEQ ID NO: 342477 - DNA, 814 bp, Homo sapiens; identical to SEQ ID NO: 335283
  chr16:8767901-8768715
  hypo

SEQ ID NO: 342478 - DNA, 414 bp, Homo sapiens
  chr16:8995963-8996377
  hypo
cgctccactagcagccagctcgggatcaactgtttccaggaatattgtccaagggttttcattatcactgagctcaatcatctatttccaaaagagacgctgattttagaagagtctaatggcttaggtgacagagcgaaaaactacagtcaagtattgaagaaaacgtccaattctagttaagtggaccaaaagggaaacaagctgcactaagtgcagaggactaacgccttctgcacggttccaaaccagatacgctattaacaatatttactgttttattgccgtcggcttcattatctaacattgctggtcgttttgttccattactccttgcttgcatgggccacaatcgaatttgatcttgtggaaatccctgaaaaaaatattaagagtagattaaaataaaaacac

SEQ ID NO: 342479 - DNA, 513 bp, Homo sapiens
  chr16:9005277-9005790
  hypo
cgagccacatgctgagtgacaagctctcaatccaacacggaattgtatatccagagtgtatggagagctcgtcctgctccggtcatgaaggaaaaacgcaactgcacaacactgaaaacagcgctgtcacgctccggacacatgcggtacaggacagggatccctgaagggacaaatgagagccccgtgatgggcccagctctgctgaaagtttacaggctgcagcccggagaaggcaaacccagacagagccaagaagtgagaatgagaggagctcaagggagcgggaacctgctgggcagagtagcctaaagcagaatgctgcccagaaagcgagatctggggatgtgcagtttcttccgaagctgtcagtgagaactgatcagtgaactcgaggaaattacctggggcaaggaaaagaaccagcaagaggatgaggattggggggaacaaccttcagagctcacgacaggctgggaagtctgtgttcccaccagccaccgtggaaaaacc

SEQ ID NO: 342480 - DNA, 170 bp, Homo sapiens
  chr16:9009875-9010045
  hypo
cgtcttttatcacaactggaagaatgaggatttgctagtgattagtgatggcgcggggagagtaatcaccgcatgctgaggtctgctcaatgagaacctcgctgcacaggaggggtctggacactggagtaacaacagaagtcaccactgtacagtgactcaggaccaac

SEQ ID NO: 342481 - DNA, 110 bp, Homo sapiens
  chr16:9062111-9062221
  hypo
aaccttttctaattctggattcttatcagggaaatgggaaaacagtctacctgaaaccataaaatatcaaacgcttcaaaatccacaggttggccagtgcattcgctcac

SEQ ID NO: 342482 - DNA, 298 bp, Homo sapiens; identical to SEQ ID NO: 335285
  chr16:9186882-9187180
  hypo

SEQ ID NO: 342483 - DNA, 85 bp, Homo sapiens
  chr16:10823594-10823679
  hypo
cgcccaggagcagctacacagcctcactcatccctgttcacccagccccagatccctgcaagcacgggaggcaacgtgatattcc

SEQ ID NO: 342484 - DNA, 42 bp, Homo sapiens
  chr16:11037121-11037163
  hypo
cgcttaatcggaggtatacaaggcagtgtagtatgtatgtgc

SEQ ID NO: 342485 - DNA, 321 bp, Homo sapiens
  chr16:11151051-11151372
  hypo
cggccctcttttaagaatgactgactttcacagctacatggcctcagtgggcttctaacttgagtgactgtcgcctaaactaggcagcttgcacatgcagcaaggaagcaggagggtgaaaaccgagcctttgttccaggccagctcgtgggctcagcacatcaccggtgccatcccgttgtacctgcacggtgggtgccccatttccagaacacaagcctgggcttgggcacgtcacgtgattaccaagccccagcttgagccacagtgtgtctgactacagagccacccaccttcccctgctcattggactgattcccc

SEQ ID NO: 342486 - DNA, 779 bp, Homo sapiens
  chr16:11178526-11179305
  hypo
cgccggctatatgagtcatctccactgtggagggaggcaattttaaactggaaaggtcaatcgacatgtcagaatatctagtaaatcattcgcgttccacctggtgccccttccattcccctgaaaaagcctgcccttgttcagcgcctctcgaagacactgtggagaaagaggtagccggggctgggtggtgatttacctcgaggaaaattaatatggtgccatcaattctgaaggcagaaagggcccatggccagaaggctgcacgcaggctggaataactcacggcccatgagggccctgagtttggggaggcctctccttggccctggatataaatcagcagcccttttgcagagagagagtcggagttttgtcaggcctgggggaagggagccagcaccagaagcccctcttccccaggagcctgtcgttgtctgaagggttgaaaggcacctctgtgccacccttctcggccagcaccaagcactggactcatttacagacgaggccatgaagcccccaccctgggttccaggaggatcacgggaagggggctttcagcctggctgtcagagaagaatgtgacaggcccattttcactccacaggccttaattggatggtcagagggcacatctgtggcttataagaaacagatggcgggatgggttagtgaaggagaaagcacgcttgcttcaggttgagtgcccgtggaggtgctggggcagcacgctggcaagcaggcagactcggccaagacccagctttgtcacgtgc

SEQ ID NO: 342487 - DNA, 310 bp, Homo sapiens
  chr16:11192863-11193173
  hypo
cggagagacagctgtgtgggaatgggctttctgtgtgctctgcagagagcgtggcggctaaggtgaggcatgggagtcataacccccaggctgagtgagccaagagtgcatgtggccagagcgccccattccttccaggtcagggagctccaaggccctgggccaggctgcttcatgccacccgggtttgccaggacaggtcattctcatgcacggctcatcggcagacgtggagcagagctgtttcccacggtcccacacagtggacagggtctcgttttcttccctctaacccttcgctgtccaacac

SEQ ID NO: 342488 - DNA, 587 bp, Homo sapiens
  chr16:11219568-11220155
  hypo
cgaggagcccaggctcaaacccctttctccttggtctcaaccttggcccgaagccctcacttggcttccgcttgtgcgttgagcctcagtgggaactttgatgttccactggtctctgcagcttgaggctgcctgccgcccacttggcgtctcccaagtgatgtgcctggcagggccacagccactacgatgtccccccccccaaattctcaccacccccctctatcccacatgctcagagtgaaccatgctattgtttgaccgtagccctcctggacctcccaatccagcccaccactgaagtcctggggtttggactcggctcctccacctccactcagcacctgcctttccgcttctacgaccaggggcgccggggcagcagcgaccccacagtgcagcgctccgtgtttgcatcggtggacaaggtgccaggtgagccagccccccgccctgcgccacagctcgttcatcatggtgggcgttcaaggtctttctctctgtggagcctgtgtgagctgcccttcctctctcagaagccccgtcggctggcagcaccagcttcttagaatttgtcaaagcacagc

SEQ ID NO: 342489 - DNA, 145 bp, Homo sapiens
  chr16:11770890-11771035
  hypo
cggacctgcctgggagccagtgaagggcgagtcagggcacgcgtcctggaggctgccagcgtccttgtagcagagcagtttcttgccgcttgggtcttcagcacgccaagccccccaccaaccctccaccccgagtgaaggcttc

SEQ ID NO: 342490 - DNA, 74 bp, Homo sapiens
  chr16:11974709-11974783
  hypo
cgtaggttgccaaccccatgaattttttattgtaaaagtctggcctcttttttatttgatatttgagacggagt

SEQ ID NO: 342491 - DNA, 199 bp, Homo sapiens
  chr16:12084484-12084683
  hypo
cgccgggcatcccagatgcccgccagtgtaactgagaatgaattctgcagtgacaacaggttgatgatgtccttgttccctgcaagactctgtatgtggggccttggttagagggcaagggaagatgggagcatgattatgatgcgggcctggtctacagcctgctggggaactctcacgtttaaccatctaaccgcac

SEQ ID NO: 342492 - DNA, 573 bp, Homo sapiens
  chr16:12132253-12132826
  hypo
cggggcagctcttctcaacaccccttcctggcacttgttcttgttggcattcggctttcaggtgtttggagaaccagaagcccttgcccgctttttgacttaaccccatgtttcaaagcagatcagtgtatatccctaaattaaattacggacaccgcaggcgctaattggcaggtgagctgcgctttaaatagaccacattaattctggcagtggaagcggaaccctgctgggataattcttatcatcatcagcatcaccctgactagctttaaaaggattctgtagcagtaagcaatttgcagaattgaaaggtgaaaacacactttaaagcgttcatgtagattcaaggtcggagggaggtgactgcatttttcaagacaggctgcaggtgagagtcacttgactggaaatgtgatggacgtaccgacaatggtctggggtatttcgaaatacgttgttggccagctggcccagggtgttgttgtcgccagattccccgtcctggtttcttgagtgaggcggagaatggaaggaaggctgttttgtacagttgtgtggagtagactgatc

SEQ ID NO: 342493 - DNA, 362 bp, Homo sapiens
  chr16:12210622-12210984
  hypo
cgtggaaacaggcttagtcaatacctgcttcaacgcggacgaaccgtggaaacaggcttagtcaatacgtgcttcaacgaggacgaaccatggaaacaggcttagtcaatacctgcttcaacgcggacgaaccgtggaaacaggcacggtcaatacgtgcttcaacgaggacgaaccatggaaacaggagtggtcaatacgtgcttcaatgcggatgaaccatggaaacaggcgtggtcaatacgtgcttcagtgcggacgaaccatggaaacaggcgtgttcaatacgtgcttcaatgcggacgaaccatggaaacaggcgtggtcaatacgtgcttcagtgcggacgaaccatggaaaca

SEQ ID NO: 342494 - DNA, 136 bp, Homo sapiens; identical to SEQ ID NO: 335290
  chr16:12211191-12211327
  hypo

SEQ ID NO: 342495 - DNA, 96 bp, Homo sapiens
  chr16:12289463-12289559
  hypo
cgcccaagagattctgcagacctgtgctcgttttctcacgcaatttttcaaggccttacgttttcaatgttgccctgttcacttaattcgctaaac

SEQ ID NO: 342496 - DNA, 303 bp, Homo sapiens
  chr16:12530018-12530321
  hypo
cgatgcccgagacccctgctatgctctgctgcagcccccggaacagtattggcacaggtgagggccacgcctcctccctgggcccaggcatcaggcgctggctctccacaggaggccgcagcttaaggagctcacagacgtttctattcggagagaggggaaggaacgaagacaggaacacagcaccgtttttagtaccaggagacagcgacagcttggcgtcagtgcgatgcgtgacatttccgtgtgtaaggtgtgctgctgcctggtggagtggcgcgcgagcacctggctgctttcctc

SEQ ID NO: 342497 - DNA, 243 bp, Homo sapiens
  chr16:12609457-12609700
  hypo
cgaagtcacctcctcccaggtgccttcctgtcctagccacccaagccaagtccatctctgtgccagcactctttatgatgtattcacgtatctgcttgttggctctactggatctaagctccggagggcaggggtcacatctgtttgccaatacgttccttcaaggcacggtgccttggacatatgcaggcatgcggcagatagtcactgagtgaaccatgcaggagccagcacaattaacgc

SEQ ID NO: 342498 - DNA, 523 bp, Homo sapiens; identical to SEQ ID NO: 335291
  chr16:12897365-12897888
  hypo

SEQ ID NO: 342499 - DNA, 881 bp, Homo sapiens; identical to SEQ ID NO: 335292
  chr16:12994419-12995300
  hypo

SEQ ID NO: 342500 - DNA, 1484 bp, Homo sapiens; identical to SEQ ID NO: 335293
  chr16:12995318-12996802
  hypo

SEQ ID NO: 342501 - DNA, 349 bp, Homo sapiens; identical to SEQ ID NO: 335295
  chr16:14396725-14397074
  hypo

SEQ ID NO: 342502 - DNA, 54 bp, Homo sapiens
  chr16:14725786-14725840
  hypo
cgtattaataaatctgtataaataactgtttaatgggggcctggcgccatgact

SEQ ID NO: 342503 - DNA, 108 bp, Homo sapiens
  chr16:15129362-15129470
  hypo
cgctgcctccaacgccctcgggcagtcgcaccaagcagaggcttccaggtaagtgacgcctctgcaccgagttcaggtaacaggtttcccctgttgactgttacttgc

SEQ ID NO: 342504 - DNA, 61 bp, Homo sapiens
  chr16:15604275-15604336
  hypo
cgaggattaaaagaggtgatgggcagagcaggtgcggcggtcataacgagggcaattgcaa

SEQ ID NO: 342505 - DNA, 33 bp, Homo sapiens
  chr16:15738995-15739028
  hypo
cgaactcctagcctcaagtgatcctcccgcctc

SEQ ID NO: 342506 - DNA, 89 bp, Homo sapiens
  chr16:15767635-15767724
  hypo
cggcatgaggcaccgcacctggctctgggtgtttggtgaaggaaagtaatttggaagcagagcaggaatagaatcgagagagcacggga

SEQ ID NO: 342507 - DNA, 302 bp, Homo sapiens
  chr16:15820563-15820865
  hypo
cgcctctcctccaggaacgcaactagaggaaaggacttgccttgcagcaagagagacctcagcgagccgggaagaggctcctccccacagaactgggcaccacccagcactgcccaccacaccaccgcgccacctcctcacctgcagcttgtggactttgtcattgagctccgcccgggcccgctccccatcgctgcacttggactgcagctcctgcacctgcgcctccagcttcttcttcttatgttccacctcctgcttggcctggcccaggacccgcagctccccggccaggtctgcgt

SEQ ID NO: 342508 - DNA, 160 bp, Homo sapiens
  chr16:16103307-16103467
  hypo
cgccggagttgcagctagagatgagctgtgagctgagctcttgagtgttcaggcaccggggagcatggtgaccagacaaacagtcctgttggaggtagtggggcgtagcaggctgattacagaccatcacgtgccggcctggatgccagctcaccatacc

SEQ ID NO: 342509 - DNA, 63 bp, Homo sapiens
  chr16:16188327-16188390
  hypo
cgtgcatacctttgatggcctgggcgctttcaggagtgttctttttctttttcttttttttga

SEQ ID NO: 342510 - DNA, 183 bp, Homo sapiens
  chr16:16227979-16228162
  hypo
cgagtcattccttttgggagcctggcaaagggaagagagtccttcttgaccttcggccgaaacacccttaaaggagtgtctctgggcagcgcgcaagggagagggctgtcgagttgggttgaccagatgactgatgcctgaggtggggccgagatgagggcactttggggcagggacaagtcc

SEQ ID NO: 342511 - DNA, 114 bp, Homo sapiens
  chr16:18802552-18802666
  hypo
cgctagcaaggccctggggtacgaggtgcccacacaggcaccatttagccagttctgtccctgccggttcttccagcttcgtcctctctcacacgtcaatgcccctgctcattc

SEQ ID NO: 342512 - DNA, 208 bp, Homo sapiens
  chr16:18804320-18804528
  hypo
cgctgggtaagaaaagtcaaaacactaatgagttgtccatgaagccaactgctaagaacgcgctcaactatacgcgacatgaagacactatgcacgaagccttacttggcgagtctgaatttctattaactaagggcagagtgagggagaacaaagagctacttccgtaacattttagtatccagatagtacagcagaaacggttccc

SEQ ID NO: 342513 - DNA, 226 bp, Homo sapiens
  chr16:19606532-19606758
  hypo
cgtgggatttaacaggctccgtgttgagactagactgtagggcgggggtagagcccggagcctgtggcagcacttgcggtgagaggcaggggtggcttggccccgggaggcggtggagatggtgaggagagacccaggatggatgagggctttaggttctcaggttagatgtcaaatcatacactgctggtccttgacgtgtccatgcacacagcttaccttcggc

SEQ ID NO: 342514 - DNA, 221 bp, Homo sapiens
  chr16:19708387-19708608
  hypo
cgccagccagtttgcgagtccgtgcccagcaggtgccagcccgcgtgccctgtgccaaagcgcttttctcttgtagcccgcgggcctgggcgcccacagcacaacctgctccctgatgattgggctctttgccgtcggctctgctgcttctgtgactgtcgctgctctaggctgttgccaaggcaggctcaattttgcccggagtggggaggggaggtgcc

SEQ ID NO: 342515 - DNA, 145 bp, Homo sapiens
  chr16:19883198-19883343
  hypo
gtcctcctcgaaggccgtctcccgcatcctgggctgcgacgtgtcgaagtagttgggcgtgttctcctgcagggctggcagaagggtgcagtggatctcagggatggcgtggaagatgacgaagacccagccgctggccgccagc

SEQ ID NO: 342516 - DNA, 41 bp, Homo sapiens
  chr16:21515452-21515493
  hypo
cggagggtagggagggagggagaagaagaaagagaaaacgc

SEQ ID NO: 342517 - DNA, 92 bp, Homo sapiens; identical to SEQ ID NO: 268955
  chr16:21566648-21566740
  hypo

SEQ ID NO: 342518 - DNA, 64 bp, Homo sapiens
  chr16:21567027-21567091
  hypo
cgctggccaggttctggcgtgtcccgggcaccacgcatcctgtccatgagctcacgtcgttgtc

SEQ ID NO: 342519 - DNA, 590 bp, Homo sapiens
  chr16:21569179-21569769
  hypo
cgtcatcatctcactacagcagagatccgcagttccccgaaacaaataccacgagtctcaaggtaagacctgcacgtaaggatgtcgaaagataaatatgtcttaagaacatgtccatgagaaggggctttgccagccatgcaagcataaaagaagaaaagtccctcattcatccaaaaacacccgctgagtttctcccgcgtgccgggcaccacgctcagtacgggggacagagggaggaggctctaggctctgacttgcccttgcagagcttggaatccaggagtgtcagacggtggtagagataaaaagctgtgtgtctgagaggtgagggcgtgggctttggggccctaaacttgcttgggacgcccgggagggcccccgtggaagcggcgtttcagtggagccctgaagatgggtttctatttgtcaggtgaagataatggcagctccaggcagaaagggacgaccagcggaaaggaccctggtgagagcagccaccacgacggaacaggcagaagcaccagctggcaaaggcactgtcaggggcagcgggagatgggattggaagggcaacagggttggcgccc

SEQ ID NO: 342520 - DNA, 394 bp, Homo sapiens; identical to SEQ ID NO: 335299
  chr16:21831549-21831943
  hypo

SEQ ID NO: 342521 - DNA, 728 bp, Homo sapiens
  chr16:22326003-22326731
  hypo
cggggaacacgggcgtaatggacatggaggtggcgcagggagctcatcctgttctctccgtagcttattaggaccttagaaactcccttccgctctggggaacttagaaaaggcatcctgggcctgtctgctttaaggactctgctggctctggcgcctgggactctaatccccctcaagcctctgggctgggcaggcacgagcaagtataagccgttccctggcgtgtgcaggcagctctgggagggacacggttggaacggaatttaaacgacctgtgctaggaaaggaagggagagtggaaaacccctatacggagttctctggtcttctggcaggggctgagacggcagtccagcaagggtcacaggcctgacggtatgacctcttccccttcccaccgcaggtgcggttctcccggccggagtcagagcaggcccgccagcgccgtgtgcagtcctatgagttcctgcagaagaagcacgcagaggagccctgggtccacctgcattactatggcctgagggtgagcggggcttcgtggggtcctgggggaaacacctcggtgcccggaagggtcatggtgtggcctccgtgtctcaccttgaacttaagtcaaattcatgagtcatagccacagatagaggatcgagtcctgtgggcagtttacacttcactccagccgagccacttagcgtgggccccaggagagcaagaggaaaagatgc

SEQ ID NO: 342522 - DNA, 1452 bp, Homo sapiens; identical to SEQ ID NO: 335301
  chr16:22824947-22826399
  hypo

SEQ ID NO: 342523 - DNA, 182 bp, Homo sapiens; identical to SEQ ID NO: 335302
  chr16:23193716-23193898
  hypo

SEQ ID NO: 342524 - DNA, 156 bp, Homo sapiens
  chr16:23402123-23402279
  hypo
cggctgactcaggaagagctgcttcccagcaaaggtgccgccaggcacgtacttactcctttacaagtttatccataaaaccgtgagctccacttgactgtcagccaagagctgcaaagagcgggcccacagtctactaggacatttttgtttggc

SEQ ID NO: 342525 - DNA, 106 bp, Homo sapiens
  chr16:23497832-23497938
  hypo
cggcagcgggatttctggttccaatcaccaccttgctgcccttgagggagactatggctgttccccagagttcagggctaggagccactctttctcccaggcaacc

SEQ ID NO: 342526 - DNA, 239 bp, Homo sapiens
  chr16:23539152-23539391
  hypo
cgtgagtcaccgcgcccagcaaaggatgatcgttcttactgcatcatctctatgttcggaatgtttgtgttcccctaaattcatatgttgaaattttaacccccaaggggacagtattcacaggtgtgggctttgggaggtgaacaggtcatgcaggccgagcccttatgcacagatgagtgcctttataaaagacaccccagagagtccctcgtccctccaccacgtgaggatgcagc

SEQ ID NO: 342527 - DNA, 1694 bp, Homo sapiens; identical to SEQ ID NO: 335304
  chr16:23846783-23848477
  hypo

SEQ ID NO: 342528 - DNA, 148 bp, Homo sapiens
  chr16:24739345-24739493
  hypo
cgttttggtgcatatgtttcatgactttctgtgcattcattcactagcttaacctatcggagaggacaggaacccaacatgtctagggaagttttgtttgtttttaacgggagagattcaagcatgttgtaaagccagttgaagctgg

SEQ ID NO: 342529 - DNA, 713 bp, Homo sapiens
  chr16:24837143-24837856
  hypo
cgagaaacgccacacccggactggccttttcttcccccttcacggccctcgcttctccctgcaggagctcgggggcgaaacctgtgtatggatttcagtgtatgacttcagatcatgctccaacttgccaggtgtgagctaatgttgtcggacaccttactataagcaaatgttattcagtgcgttcaatgtatattgacttccatactggtttttccaaaaaccaaaggtagctttgaaaaaccatgtctggaaatgtttggagcgttaagctgattgaccttctgaccttggggctttgagtagtatataattcataactgcgttaattgtattgttaaagtgtttgggagttttttgcgcttgttatgtggaaataaagtgtttgatttaaaattttttaaagtggtttggatctttgcctagtccttaaataaatacagctctattccctaagccacccttacttctcggtcttaatcccgactgccagtgcctggatgctgccctttgtctggcacagacctgcagctgaccatgctgggcccatggctcggggctttctagtcacgcagagccaccaagagtcagggtaaactttttaacacaggcacttaacacgttttttctttgttttcttttttccttttctctttctactttcttcctttttcttttttctttctttttctttctttttttttttttctttc

SEQ ID NO: 342530 - DNA, 219 bp, Homo sapiens
  chr16:24849506-24849725
  hypo
cggaagatggtcattaaaatagtagcacacagttatttagcacttacggaagaaagctcaacagtttacaggtgttacctcattgaaggctcgccactattctgtgaaggaggtgttgttatttctccctcgtttagcggataatgaagcagatttgcagaggtgaagtaacttgcccacgtcacacacctactgagccgtgaagtctaaagacaaagc

SEQ ID NO: 342531 - DNA, 989 bp, Homo sapiens; identical to SEQ ID NO: 335307
  chr16:25703066-25704055
  hypo

SEQ ID NO: 342532 - DNA, 748 bp, Homo sapiens; identical to SEQ ID NO: 335308
  chr16:25704061-25704809
  hypo

SEQ ID NO: 342533 - DNA, 241 bp, Homo sapiens
  chr16:27523030-27523271
  hypo
cgggatccatatccaagctggcatgggaacaagacttactgaggtcgtaggtctgtgtgagcatatcccgctcgaacacaatgtccactggaggcactgtcttggagatgacctcctcgtcctcgtcatcatcatggtcattccgtttaaattccttcagcagcttgaggcaccgaaccatgacgtcggtccctggcaacacaagcacgggtttgccagcaatgagtgaaagcagtgctgc

SEQ ID NO: 342534 - DNA, 41 bp, Homo sapiens
  chr16:27539990-27540031
  hypo
cggcgttcagcatatactggtacagacgcttaaacgtcctt

SEQ ID NO: 342535 - DNA, 197 bp, Homo sapiens
  chr16:27750004-27750201
  hypo
gtgaagaaatcatccggagaacttgttctgagtccagaagttacctacaggctgccttgaggcagtggtcctcacacggcatcctcctggctcccttccaactgcagctgccgtgaacatgggacagtccccgcatgtggacagtgccctgcctcaggtgctcgtggggtgctctgccgtgggagcacactcagctc

SEQ ID NO: 342536 - DNA, 594 bp, Homo sapiens
  chr16:27780854-27781448
  hypo
cgcctgagtccatgcccttgacctccatctcatgccgccccaggccgctgcagctgttgaggtgggcgaggccttggccaagtcacgtgccacccctgaaagccgtggaccagtgtccgctgtagcagggggctcgcctgtcttgtcctctgctacctgcccagcgcccacacagcacctgatatgggaaatggacctcggtcaggtggctctgcgaaaggctccccatggtgagcacagctgccagcagctccggtcacgtcagcaccgcttctgtccccacatggcctgcctcccttcagtcatgttatttcttttgtttgccaggccaagattgtccacgtctccctggatggcctgtgcgtctccccgccagagggctttctcatccggaaggggccaggcaactgccactttgattttgctcaagaaatcctcttcgtggactacctacgggctcagctgctgccccagccggccaggaggtgaggagaaagtgggcgccacacacagcccctcccggcccctgggcccgcttgctttgcaagttgctctgatgtacattccgaaagggttttgaaacgatgatcaaac

SEQ ID NO: 342537 - DNA, 211 bp, Homo sapiens
  chr16:27791003-27791214
  hypo
cgagttggaaatgtgccttgcacccccagccgagtgaagcccagaacgcatctatatgcatcgatgtaacaagctcggatcagggacctaattggtttcccagtagtgggtaatttctcgttgcaaatattaatccgttgtttttctggcgcccagcccggcccgccgcagtactgtactcgaggtacgttcctatgcaaccgagagcccc

SEQ ID NO: 342538 - DNA, 793 bp, Homo sapiens; identical to SEQ ID NO: 335309
  chr16:28074461-28075254
  hypo

SEQ ID NO: 342539 - DNA, 64 bp, Homo sapiens
  chr16:28183893-28183957
  hypo
cggtcggtttcaatttcgattacttctccaggagcctagaaagggtataaccaacccaccgcac

SEQ ID NO: 342540 - DNA, 177 bp, Homo sapiens
  chr16:28878657-28878834
  hypo
cggccccgactcagcatcccctgctcttctatcacagacgtccggacaaccacagccctggagatgcctgaccgggagaacacgtttgtggttaaggtaggaattcaacttcccagccgccggcagtgcttgtgttaaggagaaagccctcagcgcatttaagcaagtggcgtcgcc

SEQ ID NO: 342541 - DNA, 58 bp, Homo sapiens; identical to SEQ ID NO: 269049
  chr16:28887787-28887845
  hypo

SEQ ID NO: 342542 - DNA, 100 bp, Homo sapiens
  chr16:28925777-28925877
  hypo
cgaaggcctcagcggctggacccccatctccgctcagctcctccagaggctccagcgggggcgatggatcccgggacaggggcagcaactccgtggagcc

SEQ ID NO: 342543 - DNA, 264 bp, Homo sapiens; identical to SEQ ID NO: 269059
  chr16:29153227-29153491
  hypo

SEQ ID NO: 342544 - DNA, 420 bp, Homo sapiens
  chr16:29169952-29170372
  hypo
cggagatggcgcgccccacctgggagaacacaggcagctggaggacgtcggcggtgttactgtcacggtcacctggactgggcggttgcaggcggccggatgctggacccgcagcgtgagctccacggccgcagcagggaggcgagagccctcaaccagggacggagccgccctgtccacggagcctccagacccaccagaacgcctgggtcaccgcggctcccgggcgggcctcactgcgctgggacacgtcaggacacgtggcagctcccagcgcggtggaaggcctgagccctgggaacactggctggaaaatggaactcggaggacagagcttgtcgacggcgtctcgtatgaatcctggaggagacgcccgtgtcgagggcaattagaatccaggcgtgagccccggctggctgc

SEQ ID NO: 342545 - DNA, 163 bp, Homo sapiens
  chr16:29231876-29232039
  hypo
cgtgccgggagctgatcttggcaggtcgcgtcctcccgaagcctgcacttcagccccagggttttccgaccgcctctgctcccagaggggaccctcaggggcgaagaggccgaagacagcaccgagacctcagtgtcgggcgcgggtgctcccaaagcgcagc

SEQ ID NO: 342546 - DNA, 530 bp, Homo sapiens; identical to SEQ ID NO: 335312
  chr16:29624654-29625184
  hypo

SEQ ID NO: 342547 - DNA, 199 bp, Homo sapiens
  chr16:29830886-29831085
  hypo
cggagccagaaacgggaggcccgcctggacaaggtgctgtcggacatgaagagacacaagaagctggaggagcagatccttcgtaccgggagggacctcttcagcctggactcggaggaccccagccccgccagccccccactccgatcctccgggagtagtctcttccctcggcagcggaaatactgattcccactgc

SEQ ID NO: 342548 - DNA, 173 bp, Homo sapiens
  chr16:29857096-29857269
  hypo
cggtttggttggtggccgctgcccttggcgctcctgttcctgctctggccccatgccagcctctcacctgcgctccgtctcctccaggcatgaggctcagagactggagcaggaagcccgcggccggcttgagcggcagaagatcctggaccagtcagaagccgagaaagctc

SEQ ID NO: 342549 - DNA, 76 bp, Homo sapiens; identical to SEQ ID NO: 335313
  chr16:29938107-29938183
  hypo

SEQ ID NO: 342550 - DNA, 732 bp, Homo sapiens
  chr16:30017168-30017900
  hypo
cgacctcctccctgttgggggagagggacggggcagcgtggagaggcaggagtgaggagcgcgggggcctggggccgggctctgagcactgcccgggtgtgcagatgatggggggtttgcatatttgcagggactagcgagtcaggcaggaggtttgcatatgtgaatatagaactccgcagcccctcatgagcagacagacccgggtcacggagactcacaaaaataggtagtgcagggtgggggcagcccaccctgtgtaaacgtgcaacacactcgtgcgaaggttgggtactggacccggctcgatgggcctgtgccgggacactgctgtccactcaggctgaggacagagccccggccgcagggggcagctcactggtcagggtgtgccagcgctccagggctgcgtccggctgctgcaggcagtcactccagtgcttccgagcctcgcctcgggcacctggccccagggacacgccacctggggagcaggtgggcagggtcagggccacctccctgccacttgcccgccctcaacacccgcagccagctcctccctcaccaatgaagtcattggatttgccaatgtcatagtcccagacggtgacttccagggtcttggtggccagagtggagagctctatctcgtagaaaaactcctagggacaaggccggccacccgttcgtgagccagctccccagcccctccctggcctccctccatgtccc

SEQ ID NO: 342551 - DNA, 189 bp, Homo sapiens
  chr16:30061428-30061617
  hypo
cggacgtgtccaggggccttgccaaggctgaagtctctctgttggcagaatatgcagaatatgtgttcctggaggccttttgtagggctgaggtgagaactggcctcaacttggtcctcaggattccatcagacaataagaccgcccaaggccgggcacagtggttcacgcttgtaatcccagcaattc

SEQ ID NO: 342552 - DNA, 176 bp, Homo sapiens
  chr16:30116125-30116301
  hypo
cgatgtgatcgaaaggcaaatatttatttttcaggaagagaaacaggagacctcgaggcttctggacttaggaggtccgggcagctggtccatggttgtccaggtagtgccgcagggctgtgggataatccgttatgacgccagtggctcccacgctgaaggctgcttcaaaatcc

SEQ ID NO: 342553 - DNA, 346 bp, Homo sapiens
  chr16:30124534-30124880
  hypo
cacaccctgccctgccacttcgctctccttctctcttggtccctgccccgtttctagcatgcccccttggacctacccctctgtgctgtccactttggcacctgttctcacccctacccggctcacctcctcggtgggcccccaggcggatgcggaaggtgggagccctgggcgtgtgcagcagatgaggccggcgcaggaagaagatggagagcatggcatagctgcccagggcagggagggcatagtacagcaaaaggctcatgaccgtactcccacagaagctcctgcagccacacgctcagccgtccgcgggactgtgctgcctgcctagccagtgtgggcc

SEQ ID NO: 342554 - DNA, 135 bp, Homo sapiens
  chr16:30169940-30170075
  hypo
cgtgaaacttctgtgattcaaagaacaccgtcaagaaagtgaaaaaacgcctgcctgcccgcctttctttctctctctctctctctttctttctttcaacagtctccctctgttgccgaggctggactatactgc

SEQ ID NO: 342555 - DNA, 175 bp, Homo sapiens
  chr16:30354637-30354812
  hypo
cgatgccaccaaggcatcaggtgagtgccagctggggctcgaggactttctcctctccgctccctgttctgggagcagggtcaggggcttcgcggagaaggcggaggagagctggaaggtgctgctttccttgtgctgctggcgcgccactgcacttcagcctgggagacagagc

SEQ ID NO: 342556 - DNA, 836 bp, Homo sapiens
  chr16:30566778-30567614
  hypo
cccgcagtccgggcacgggtagggcttctcgccggtgtgggtgcgcacgtggcgccgcaggtccgaggggtaggcgaaggcgcggccacagtccgggcaggggaagggggtctcgccgctgtgcacgcgccggtgctggtagagggcagagctctggctgaagcggcggccacagtcggcgcagccatagggtttctcgccggtgtggacgcgcaggtgcgaagtcagcgccgagcgctgcgtgaaggcccggccacactccagacagcggtggggccgctccccacgatggatggcccggtgtttgctcagggaggaagcgtggccgaagcccttgccgcagtcagtgcagtggaagggcttctcgccagtgtgactgtagacgtgctccaccagtgtggagcgccaggcaaagctcttcccgcacacgtagcagccatgacgctggtcagctcgggggacaggggggtgggcacagagggaggggcgtccccggtgcggtgccttggacagctgctcccaaccataagggggcccggccgagggggcttggggagacttcagcccaggagacccggcggccacagggtcgggcttctccagggctcccgtcccttccctttgtctttcctttttcttgtttctggaatctgctgagagataaagaggggagagttcaggctcggctcatcctggtccttgaatcccacagcccgcgtggacagggacaggcctgctggatccccggctgctcctgggagatggaggagtgacacctgttcctcggctgcagagccagacagagccgggagggagagaacagcccattccgcctc

SEQ ID NO: 342557 - DNA, 184 bp, Homo sapiens
  chr16:30826379-30826563
  hypo
gggattttggttggttggttggatggagccttacagtttggatgtggtgagcatgaaatgcatacgttcaagaagctgagccgacaaagggcttactctaggtggactgaaaattcgatgtttccaattcaaaacatctgctctccgaggtgtgggtgaaggtatggggggtccaaaaatgtcc

SEQ ID NO: 342558 - DNA, 104 bp, Homo sapiens
  chr16:30833291-30833395
  hypo
cgtggcctgccgcaaagcagatactcctccggactctgggcttgttgccgttgttggctgcagccatggatgccctccctgccacacagcgcctgctggacacc

SEQ ID NO: 342559 - DNA, 269 bp, Homo sapiens
  chr16:30907001-30907270
  hypo
cggcaatacacacacccactcacacgaacacacgcacacacatgcacgcgcacatgcacacacgcgcacacctgcacactcacacgcacacaaatccactcgcacacacgcatgctcacacgcacacacgtccgcatgcacgcacacacgcagacacacgcaagcgcacacacacacgggcctcctcgtcttcattcacaaaccccattagcttctgttgtctatgggcttcctcgacagaccgcgagcccctcgcgggggccagaaac

SEQ ID NO: 342560 - DNA, 548 bp, Homo sapiens; identical to SEQ ID NO: 335315
  chr16:30959765-30960313
  hypo

SEQ ID NO: 342561 - DNA, 240 bp, Homo sapiens
  chr16:30991726-30991966
  hypo
cggcgtgggccccgccctctcctttggctgggacgcaggtggccagagaggagccgttctcttccttaacaccctgcactcaccaacctgaccaccccaaaacgcaagcggcggccccaggatgggccccgggagcaccagacaggctcagcccgcagcgaaggctactaccccatcagcaagaaggagaaggacaagtacctggacgtgtgcccagtctcggcccggcagctggagggc

SEQ ID NO: 342562 - DNA, 284 bp, Homo sapiens
  chr16:31131573-31131857
  hypo
cgtgggctgtgagtggcttggcacatctgggcgtgggtgcagggagttggctgccctggcagcactcttatggcccatacttacagttaaccggcggctggacgagtgggtagacaagaaccggctggcgctgaccaagacagtgaaggatgctgtacagaagaactcagagaagtacctgagcgagctcgcagagcagcctgagcgcaagatcactcgcaaccaaaagcgcaagcatgatgagatcaaccatgtgcagaaggtccggatcccttcccatccac

SEQ ID NO: 342563 - DNA, 384 bp, Homo sapiens
  chr16:31138407-31138791
  hypo
cggtaagtggggctgggaagctgcctgcaggtcccccgtctccccttgccgaggagcccctgctgagccgtgcactgtgcctcactcccaccctgcctgcagatcaccaaggtgaagtatgtggacaagatccacatcgggaactacgaaattgatgcctggtatttctcaccattccccgaagactatgggaaacagcccaagctctggctctgcgagtactgcctcaagtacatgaaatatgagaagagctaccgcttccacttggtgaggctgggccggccgggccgagctgggcaggggcccggtgagaggcagaggcaggcatggagactgagggcggctgcgccggcagctccagggaggagacaggcccaaaggagc

SEQ ID NO: 342564 - DNA, 276 bp, Homo sapiens
  chr16:31142715-31142991
  hypo
cggatgttcttcatttcacttcacacatgcacggcaagttgtgctcaaacattttaatcatttctgccctgttactcccaccccagatccaagcgccagcccagttccggtgggggctcagtcctccggagtccaggagtcagggctcgggggcgctcagcggccagtgggcaagattggggcctttcctgtcctcgaagctgcacaaaggtggccccagcccagaacacagggagagggcagagagatgtgctcatcagtctgggcaggcgggcc

SEQ ID NO: 342565 - DNA, 548 bp, Homo sapiens
  chr16:31446861-31447409
  hypo
cggtctcttaaagcgctgggattacaggtgtgagtcaccgcccgcagccgcacctgcctaaatcccttaatgtataagggaaaggagcgagaattcaggggaaaaaaaacaaacaaaatagcccccagcacttctgagaaagatctgccatacagaaaagccgtcctgagcgggtctgtgtggagggaggggactgcatctcagatccacagtccaccggcggctgcaacaattccacccagggctgcagcacgctggttcttcagtgtcgggccaggttggacctccggctggaggccttccacaccggaaacactggtagggctcctctccagtgtgggttcgagggcggtggaggagctcggcactgtcgctgaagcctggccctggcctcgccgagcggtccggccgctctgtgctgcgaggccttccgggctggctcagggtagcctggggcctgaaccgcctcccgcgagtcccgtcccgcgctcgcacagcttctgggccccatcgccccctcctgctgagctgccggctgggtggctggc

SEQ ID NO: 342566 - DNA, 201 bp, Homo sapiens
  chr16:31487152-31487353
  hypo
cgcagctggaagacggaacacgggagctagatctccatcgcttacaggctgcgtgatctcgaacactggattctttattctgatcgctcagagaggactcgaaaaacgccgcgtaaatcttgcctcactgggcatgtggttgtcagagccgctctgacccgcctcacctcccactcgcaggtggtgacggctctgggccgc

SEQ ID NO: 342567 - DNA, 495 bp, Homo sapiens
  chr16:31500256-31500751
  hypo
cggcacagggcgggcagctcttcgattacatccaggcagtctctagctacctggcaccgcccgtgtccgccgtcttcgtgctggcgctcttcgtgccgcgcgttaatgagcaggtgagcggcacgcgcgtggtgacggcagggctgggcttgcacatcctcagcaggctgacctgtttccttcgcagggcgccttctggggactcatcgggggcctgctgatgggcctggcacgcctgattcccgagttctccttcggctcgggcagctgtgtgcagccctcggcgtgcccagctttcctctgcggcgtgcactacctctacttcgccattgtgctgttcttctgctctggcctcctcaccctcacggtctccctgtgcaccgcgcccatccccagaaagcacgtgagtggccaggtgccccaggcaagcactgtgggacacagcacctaccctctgcttcctggagtgcccagctgggaggacctgaatttctc

SEQ ID NO: 342568 - DNA, 396 bp, Homo sapiens; identical to SEQ ID NO: 335321
  chr16:31712179-31712575
  hypo

SEQ ID NO: 342569 - DNA, 507 bp, Homo sapiens
  chr16:46683305-46683812
  hypo
cgagactgcgcagagatgaacttcaggggagaaaaaagaaacacatgtcacagtttttcttaaaccgtgagagaggaggagcaggaggagaagagaccagagcccctctcccaggcaccggggctttccttggatgtcctgagactcaagatttctcacctctgcaggtggacctgataatcctacgcagaagaaccgctacagggcagcgagaacgcctgcaatggcagcagacagccgagcctccccagcacggcgtctcccgggacaaatgagcgtccacgtcgcttgacgtcatggtgtgtgcatttgtcctgtgctgggctccctacactgctcgtgatcatcggagctgcctgccacgggtcacatgtccagcactttctctatgagacacgcttctggctccactggctgaattcggctatcagccctcttccgtactcattctgccacgagtttcagaaaagcattccatcaaaccgctgtgtcctggaaaggctgagc

SEQ ID NO: 342570 - DNA, 277 bp, Homo sapiens
  chr16:46934659-46934936
  hypo
cgtgcccggcggatcctgcaggcttgtggcgggaacagcctgggtgaggccccaacttgccaggcccctaggcgtgaaatgaatgagtgttcccaggcggccccagcctcaagcggagggtcctgcatgcgaatgggtgtgtgaacgtgtgtgggtggctgacagcacacagagtaaacaaaaaatagcgtcctcttcccactcacaccttgctggcctcgtttattaagcaggcggtgccggtgccacctttaggtgcaagtgcctgcatcatgcc

SEQ ID NO: 342571 - DNA, 1278 bp, Homo sapiens; identical to SEQ ID NO: 335322
  chr16:47176468-47177746
  hypo

SEQ ID NO: 342572 - DNA, 623 bp, Homo sapiens; identical to SEQ ID NO: 335323
  chr16:47177806-47178429
  hypo

SEQ ID NO: 342573 - DNA, 91 bp, Homo sapiens
  chr16:48642057-48642148
  hypo
cgagcgttttattactattaatggtttttttccgattctcaagaacacggttttcaccgtgtgacacaggacagtctcaatctcctgatct

SEQ ID NO: 342574 - DNA, 121 bp, Homo sapiens
  chr16:48663537-48663658
  hypo
cggaaccgcagcacagacctcactcaagagcttgttagaaatgcacagtgctggctgggcgcggtggctcacacctgtaatgggaggccgaggcgggcggatctcctgagctcagaagttc

SEQ ID NO: 342575 - DNA, 1995 bp, Homo sapiens; identical to SEQ ID NO: 335325
  chr16:49315005-49317000
  hypo

SEQ ID NO: 342576 - DNA, 332 bp, Homo sapiens
  chr16:49766770-49767102
  hypo
cggggaacgttgcacgacacgccgcctggaactgcgcggaggcagtaaaaatcaatgtttccatttgtggcccatcaaaacatctctcttcttaccaattaagggatgtacagtttttaggttcttttattatcagaacgcgccaactcctggcaatacagaaatcccattaaaagtcaggcagcatatttatctcagggaatctgatctgccgctgcagtgagggtaagaaatagaaagcaaagaaatgagaaatatcatttggagccttcgatattgtaagtcatcatacaaccatggttacacagtcaagtgcccgtctccgaaattcc

SEQ ID NO: 342577 - DNA, 640 bp, Homo sapiens
  chr16:50335368-50336008
  hypo
cgagcgaggccttcacagtgcgcctggcacgtcacagcattctatgtattctcgtcactcttggtttattttccatgaggtggttattaatctcccagatttccgagagacacactttcaaaacaagctttggatgaaactcaggaaagcagggagtggcctgggagccactgggcaggagcctctgagtgtcctgggtgctgactgcaggtcccctggtggctccaggaccccacggtggaggaggcagttccactgccctggccaggtggggcccgccttggcctgtctgctgcccgaccctggcctgcttcagggagtccggcacgtctggccacttctctgtgaatcatccatgaggcttgctcaagaatgtcggcccagccagcgagtggctcctttcactctggtcctcgctatgccttggggctggcccgactgccagaccctgggggaccaagggctggcctgtgagcctccctacacatctgctggcctcactctgcccccagcacccccagtgctgcaccatccatactgagccagcatctgggaaaacccctgccggtacctgtgtcccattccaccaccctcctagaatagggccctgatcctcgccctgtaccccggccctggcccc

SEQ ID NO: 342578 - DNA, 2791 bp, Homo sapiens; identical to SEQ ID NO: 335326
  chr16:51184597-51187388
  hypo

SEQ ID NO: 342579 - DNA, 163 bp, Homo sapiens
  chr16:53337696-53337859
  hypo
cgcattgaacttctaaggaaagtacgggaacaggcccttcgacatccacagttgtttgaacgcttgaagctttgccatccaaatccagatttaccagtctggtgggaatgtggccctcatgatagggatttgcttattggtgctgccaaacacggggtgagcc

SEQ ID NO: 342580 - DNA, 442 bp, Homo sapiens
  chr16:53563469-53563911
  hypo
cggctcctcttatcccccaggcaactggctgcctttcacctccgcggcacagcaattatgtggtgtaatggaggcagcgcaaataagcagaaagattttattaaaccaaatgagcaaatcatctgcgtattattgcgatttgattgacactgacaagtgtcgagcagacgcggatgtgaatatgatacagaagcttgcagcaaagctcttgataatgttactcttgataaagttgcctggccaccctctctaagtaaataaaggggagaggaatatgacgcatattaattcacccagtttgcagcctactggaggacgagaggggaaaaaaaagttgcaatgggttcagcgcgtggcattttatatgaataccaaaattgcattcatgattcacatagactttacgataatatattaatattaaaactaaaggtcattccac

SEQ ID NO: 342581 - DNA, 169 bp, Homo sapiens
  chr16:54128660-54128829
  hypo
cgccaccgaagaggcgtaagatattttgcttcatcaaacgaatactgtgtgtaggtagagcatagaagtttagtctcatgagatgactccattcctaagggaatctagaggctttctgcggagcaccgtgacatagatcatatcatcctcctgcttaaaaccctccggc

SEQ ID NO: 342582 - DNA, 1738 bp, Homo sapiens; identical to SEQ ID NO: 335335
  chr16:55357501-55359239
  hypo

SEQ ID NO: 342583 - DNA, 658 bp, Homo sapiens; identical to SEQ ID NO: 335338
  chr16:55512752-55513410
  hypo

SEQ ID NO: 342584 - DNA, 493 bp, Homo sapiens; identical to SEQ ID NO: 335339
  chr16:55513960-55514453
  hypo

SEQ ID NO: 342585 - DNA, 1867 bp, Homo sapiens; identical to SEQ ID NO: 335341
  chr16:56224483-56226350
  hypo

SEQ ID NO: 342586 - DNA, 364 bp, Homo sapiens; identical to SEQ ID NO: 335342
  chr16:56228284-56228648
  hypo

SEQ ID NO: 342587 - DNA, 41 bp, Homo sapiens
  chr16:56368405-56368446
  hypo
cgggagctgcatgcgtagcccttttggctgtgaatgagtgc

SEQ ID NO: 342588 - DNA, 345 bp, Homo sapiens
  chr16:56398009-56398354
  hypo
cgctcggtctggacacggggcaggaagcaaggaggcagctgtgagcacaggcctccctcctaagcaggttcctcacctacagggcaccccagacacggctgttctggacgcaaagagaaggctgctgccaagcagggaggcagaaactaggaaccacaagctacggataatggagcagcagcttccctgagggcaggcctgctgcctatggcttgagtagtactaagaacaggacctgactcacacagaatgttcggcatcagagggtaagtaaatgattaccagcatgaaaaacgtaagcaccttcaagctgcactcttagaatacgctaccaacacgacaacc

SEQ ID NO: 342589 - DNA, 612 bp, Homo sapiens; identical to SEQ ID NO: 335345
  chr16:56666028-56666640
  hypo

SEQ ID NO: 342590 - DNA, 107 bp, Homo sapiens
  chr16:56782274-56782381
  hypo
cgggagagcgcctgcgttcccgtaccctaacacgcacgtcccaggagacggcagatgtcaaggcgtgagtactggtagggagacagcattagtactgggtggcttgc

SEQ ID NO: 342591 - DNA, 100 bp, Homo sapiens
  chr16:56857042-56857142
  hypo
cgctcctttcctgggaggcgtcttttgaagggagtgagtgggaaggaaaatgggaggctgtgacgctcaccaagtaacgtaagagcggtggcccctggag

SEQ ID NO: 342592 - DNA, 467 bp, Homo sapiens; identical to SEQ ID NO: 335351
  chr16:57318149-57318616
  hypo

SEQ ID NO: 342593 - DNA, 246 bp, Homo sapiens
  chr16:57559728-57559974
  hypo
cgtgagtctaatgttctgtgattctgagggcgttgtagcacggcctggccctggccctgccccctcccgcctcccacgactcactctcgctccttgagcagcaccttctgggactcatccagccgtagccgcagggcggtcaacttggaggcctcctcctccgtggcagctgtgtcctcccagggtagccggctgcgctcctggcggcctgagctgccccgcgggcccccagcccccaggctgcgc

SEQ ID NO: 342594 - DNA, 56 bp, Homo sapiens; identical to SEQ ID NO: 269256
  chr16:57937697-57937753
  hypo

SEQ ID NO: 342595 - DNA, 1300 bp, Homo sapiens
  chr16:58030214-58031514
  hypo
cgcccgcactgcccgctggtgccaggagtacgagcggcacaccctctccctgcctcatacccctgcgtcctcactcccgaggtctcagaacaccgagctgggtggggcccttggtgcaaggcagctgtgaggagctaggctgcgcgaggcctgctgggcccacggcgccgactcaggtcaggctggtaggggccacagccgcagagtcagggcaggcaggcggctacctggtaggcgccctccgctgccgcggcggcggcactgtgctgcgcgctgtgctcctgcaacaaggccacgtctaggaagcgctccccgcaccatacacacttgaactgctgctcgcgggcgtgcacgccctggtgcttgttgagatgctcccgctgcttgaaggccttgtcgcagttggggcacttgtagggcttctcgcctgtgtgtacccgccggtgccgctgcaggtctgacgcgtacttgaagcgtttctcgcagtctgggcacttgagtggcttctcgcgggccggatcgcagcggtgctgcacgaactcggaagaggagaagaagcggcgttcgcaaagcgtgcagcgcaggggcttctctgccgccgcacagtgggccagctggtgcttctgcagggccgacgcgcgcttgtaggccttgttgcacacagggcacttgaagggccgctcggccgcgccgggcaggcacttgtgccgcagcagctcggcagattggtcaaagcctttctggcacacggggcacttgaagagagtctcgagggtgtgcacgtgctggtggtagagcaggtggctgggctgcccaaagcccttctcacataggccgcatttgaagggctcctcggtcttgtgtgtgcgccggtggcgcatcagtgcgtactgctgcttgaagcccatggggcacaggtcgcacttgaagggccgctcggcgctgtgtgtgcgctcatgctgccgcaggtccgagggccgcttgaaggccttctggcactcgccgcagcggaagggccgctccccacttggcgtgcacgggtgctgcagcagctccgacgactccttgaaatgcaactcgcacacgttgcagcggaacaggtggtgctcgcccgagtgcgcgtacatgtggcgcaccaggtgagagcggtgcttgaaggtcttctcgcagactgcgcacttgtagggccgctcggagctgtgcgtgcgcttgtggtgcaccaggtgcgacgactggctgaagcttttgtcacacagcgtgcacttgtagggcttctcaccggtgtggatccgctcatgcc

SEQ ID NO: 342596 - DNA, 157 bp, Homo sapiens
  chr16:58078950-58079107
  hypo
cgacaatgagcgcctgcggatggagcccggctaccccaagtccatcctgcgggacttcatgggctgccaggagcacgtggagccaggcccccgatggcccgacgtggcccggccgcccttcaacccccacgggggtgcagagcccggggcggacagc

SEQ ID NO: 342597 - DNA, 292 bp, Homo sapiens
  chr16:58120772-58121064
  hypo
cgaaggttgctatgagagcaattggtagctaagagaaccgagacatgttcctgcccctttccacgttggcttctctgtgacacatcagccctagggaagcagggccagtgccaccccacatgcaggtggcaacactgaggctccagggggtcgattcaggccggtttctttccccgtttatacaccctgcttctctccagcatccacgactacaggtgatggccacgctactcccatgtcctcacatgcacctgggttacgtcagcggcagccatgcgtgcacatgcacact

SEQ ID NO: 342598 - DNA, 141 bp, Homo sapiens; identical to SEQ ID NO: 269264
  chr16:58192179-58192320
  hypo

SEQ ID NO: 342599 - DNA, 1525 bp, Homo sapiens; identical to SEQ ID NO: 335353
  chr16:58497229-58498754
  hypo

SEQ ID NO: 342600 - DNA, 72 bp, Homo sapiens
  chr16:58558309-58558381
  hypo
cgtgtttgtgagtctgtcacagtgacacgtttctctaaaggctgccgtccttttattgccgagctcttggac

SEQ ID NO: 342601 - DNA, 57 bp, Homo sapiens
  chr16:58633220-58633277
  hypo
cgagagcgagtcaagattcattgctggttggggcggaagcaggcggccgagcccggc

SEQ ID NO: 342602 - DNA, 376 bp, Homo sapiens; identical to SEQ ID NO: 335355
  chr16:65157302-65157678
  hypo

SEQ ID NO: 342603 - DNA, 988 bp, Homo sapiens; identical to SEQ ID NO: 335357
  chr16:66638030-66639018
  hypo

SEQ ID NO: 342604 - DNA, 161 bp, Homo sapiens
  chr16:67006210-67006371
  hypo
cgaatcaggccatgagtgcctaactcccatcccatcctttctctgtagattctggaagccctgtctttttctatgagttccagcatcgacccagttcttttgcgaagatcaaacctgcctgggtgaaggctgatcatggggccgagggtgcttttgtgttc

SEQ ID NO: 342605 - DNA, 109 bp, Homo sapiens
  chr16:67175573-67175682
  hypo
cgccagcataggcaccagctccacgtaagggtgaggctagatcacgtgtaccgcaagcggcttccattgcgggcacccatgtctggacaaggagaatgcggtggcaccc

SEQ ID NO: 342606 - DNA, 129 bp, Homo sapiens; identical to SEQ ID NO: 335358
  chr16:67184512-67184641
  hypo

SEQ ID NO: 342607 - DNA, 595 bp, Homo sapiens; identical to SEQ ID NO: 335359
  chr16:67189038-67189633
  hypo

SEQ ID NO: 342608 - DNA, 177 bp, Homo sapiens
  chr16:67221106-67221283
  hypo
cgctgccccaaaggcactgaccccaggtacacatgcagtgcccagtgcagcaaggcgaaggcatccgcagcttctagctcaggccctgcaaggaggttctgcaggctgcggcgcaaaccactatgcagcgtgtgggcccatagctggaccacgttgtactgtggcgggcagcaaggc

SEQ ID NO: 342609 - DNA, 238 bp, Homo sapiens
  chr16:67241539-67241777
  hypo
cgaagcgggactggacacaggacacctggggcagctgggcttggaagcgtctgacggcggccatgttgatgccagggcacgtggccacatccaacacccggagctgcctgcacgcctgcccaatagcatccagtgtcctgtggggaggccacctgatgagtgcctggcccggtgtgggacccagcccagcccctgcaccgtggctccatctgcctggtgtcatcggacacacttactg

SEQ ID NO: 342610 - DNA, 314 bp, Homo sapiens
  chr16:67313759-67314073
  hypo
cgttattccctcttcccaggcctgaattgcagttcctgtgccctggcactaagactggcacctcctgcggcccatgcccttcgcctgcattgcccactgagtcccactcgactgtcttcagcgcggttcacactgagacccagccctctcccgctggccccgagcaggcccacctttaggagggcgtgatggaaaggcccctggagaatggggatgagtccccagactctcagggccatgccaccgactggagatttgctgtgtgcagtttcagggatgcctgggaagaggaggaacctgcttcccagatgcac

SEQ ID NO: 342611 - DNA, 62 bp, Homo sapiens
  chr16:67472428-67472490
  hypo
cgctagaagatagggatgtagttgtcgattttggcgcggtggcgctgggcgatacattcagc

SEQ ID NO: 342612 - DNA, 173 bp, Homo sapiens
  chr16:67578540-67578713
  hypo
cgatcctcccgagccctaccctgaggcctgagctacttggccacccatgttctccagaaactgggcacatttgggcccctgcgctgccaggaggcatgggccctggagcggctgctgcgggaagcccgagtactggaggcagtatgcgagttcagcaggcggtgggagatccc

SEQ ID NO: 342613 - DNA, 402 bp, Homo sapiens; identical to SEQ ID NO: 335365
  chr16:67678724-67679126
  hypo

SEQ ID NO: 342614 - DNA, 185 bp, Homo sapiens
  chr16:67681427-67681612
  hypo
tggcccaggcgctggcgggacactcaagctctgggctgcgggagctcagcctcgcggggaacctgctggatgaccgaggtatgactgagcctggggaccgcaggggtgggcagcaggaggaggtgagacccacgtggctgttcccaccccccaaggcatgactgcactcagcagacacctcgagc

SEQ ID NO: 342615 - DNA, 260 bp, Homo sapiens
  chr16:67709104-67709364
  hypo
cgggctcctccgtcagcacctccacagcctcccactccccggatcggctcgacctcttgatggcatccaccacgctctgcatgtacagcccatcctcgaaggaggcggccatggagacaggggtgcggtcccaggtgcggcggtcgccctgcccctggaaggactggcgcaaggcctgcaccatgtagaccatgcccttcaggtacagcagcgggacatcctggggcccctgctcaggcagtcctgcgcccactgccagc

SEQ ID NO: 342616 - DNA, 279 bp, Homo sapiens
  chr16:67981981-67982260
  hypo
cggggccgccagttgggggtcctcaggagtgtctgcaccgcacaggcgaggttcacgaacaggtagcacatcagaaagaacctgcggcacagagggcggttggcgaagagcagcctcctcggcagctggggacctgatgtcaggctgggcctggcccagaaacggggcgtggcccggccctgccctgcatggctcagcaaggtcttctcaacctcattgctgccacctccatggcctgaggcaatgagactactgtggaggagtcctcggagccagatc

SEQ ID NO: 342617 - DNA, 751 bp, Homo sapiens; identical to SEQ ID NO: 335366
  chr16:68118298-68119049
  hypo

SEQ ID NO: 342618 - DNA, 462 bp, Homo sapiens; identical to SEQ ID NO: 335367
  chr16:68269820-68270282
  hypo

SEQ ID NO: 342619 - DNA, 636 bp, Homo sapiens; identical to SEQ ID NO: 335368
  chr16:68270868-68271504
  hypo

SEQ ID NO: 342620 - DNA, 274 bp, Homo sapiens
  chr16:68386080-68386354
  hypo
cgtgttcctgttaacactcctggaccgagccctactgacacctgggccctgcttctcgcccattcaccaggtctctctcctcctgggcgagccgttcttcactaccagcctgctgccgtggcacaacctctacttctggtacgtgcggaccgctgtggaccagcacctggggccaggtgccatggtgatgccccaggcagcctcgctgcacgctgtggttgtggagttcagggtaggccacccaggggatgttggagaaaaaagcagaggaggc

SEQ ID NO: 342621 - DNA, 782 bp, Homo sapiens
  chr16:69143292-69144074
  hypo
cgccagatgccggtgcagctgacgacagccctgcgtgtggtgggcaccagcctgtttgccctggcagtgctgggtggcatcctggcagcctatgtgacgggctaccagttcatccacacggaaaagcactacctgtccttcggcctgtacggcgccatcctgggcctgcacctgctcattcagagcctttttgccttcctggagcaccggcgcatgcgacgtgccggccaggccctgaagctgccctccccgcggcggggctcggtggcactgtgcattgccgcataccaggaggaccctgactacttgcgcaagtgcctgcgctcggcccagcgcatctccttccctgacctcaaggtggtcatggtggtggatggcaaccgccaggaggacgcctacatgctggacatcttccacgaggtgctgggcggcaccgagcaggccggcttctttgtgtggcgcagcaacttccatgaggcaggcgagggtgagacggaggccagcctgcaggagggcatggaccgtgtgcgggatgtggtgcgggccagcaccttctcgtgcatcatgcagaagtggggaggcaagcgcgaggtcatgtacacggccttcaaggccctcggcgattcggtggactacatccaggtaagggcgcctccctaggagcgtgtgtacatggggataagtctggacagcctggcaaactctccgccaagaatctgaggtctggtctaggtcccttgggttgtgcacacacctgtgcacttaagaaggcaacaaggtgg

SEQ ID NO: 342622 - DNA, 37 bp, Homo sapiens
  chr16:69334756-69334793
  hypo
cgaagccgattgtatttgtgttgcacacgtttttatc

SEQ ID NO: 342623 - DNA, 746 bp, Homo sapiens
  chr16:69352228-69352974
  hypo
cgcacctggcctgggctgctctttaagtccagctgaagcacatttcccttacggccttcaggagagggccgacccggattcccatctgctccgcgaagaaacagggcgggttataggagtgtttgctgggggggtcctgaagtgagctgctgagagcattggcccaaatgtccctgaagtacttgcttgagtcacacggcactgttaagccaggaaggcttcgttccttaaccagtgtgcaggcagcggagcctggacttgctgggagcacctctgtgctccaggctgaagggccagcttgtgactttccgtctcccttcccagcagtgacagtgacagtgaaggggataatccggagaaaaagaaactgcaagaacagctgatgggtaagtggctcgcggccctgtggcagcggcaggggatgagagtgggtccgctgctgggttggctcatgccccttggccgggcccgggcccgggccggcctccctctcgcaggtgccgtcgtgatggagaagcccaacatacggtggaacgacgtggccgggctggagggggccaaggaggccctcaaagaagctgtcattttgccaatcaaattcccacacttgttcacaggtgagagttgagccatttcaaaccccaatgtaaaaattccaggcttccgcagggctggcactccgaggcacccgggagtcagtggcgactcagcccccggggcctgcagagggccaggcctggctgctc

SEQ ID NO: 342624 - DNA, 570 bp, Homo sapiens
  chr16:69354734-69355304
  hypo
tgctgctggcagcccgggtgcagcctggccccttttccctggagtcttcccgtctgcctgccaagcagagccctttgtgaggctggcttgttgaggatgtgccgccagcatcactggcccatgaaatgcgtccgtttcactcaaatcttcgtgcctccccttccgtgaataccattccatcatccgctgtcaactcctgccgtgtgctgggctctctaggtttgaaaaacgaatttatatccccttgccggaggaagctgcccgcgcccagatgttccggttgcatctcgggagcactccccacaacctcacggatgcaaacatccacgagctggcccggaagacggaaggctactcgggcgcggacatcagcatcatcgtgcgggactctctcatgcagcccgtgaggaaggtgcagtcggccacacacttcaaaaaggtgagtgcccgcggccactgctgagaaaaatctcatagtaagagcgggatgttcggttttttttttcccagctcctggtcctgctccccggctgctcaggtgacacagtctctgaggcctcctggagagcc

SEQ ID NO: 342625 - DNA, 144 bp, Homo sapiens
  chr16:69383506-69383650
  hypo
cgtggcagcaacatgccggtcatgtgacatccccactgtccgctgaacctgccaagacacattaaataggtagcagaacccctgctacatcacgaggaagccagctgagtggtaagattgacgtcccacggtcatcagcacagc

SEQ ID NO: 342626 - DNA, 411 bp, Homo sapiens
  chr16:69833676-69834087
  hypo
cggcactcagtaaacatttactggatgttggaacgtgatggacgcgccatctgaattagccaacgtgcctctacgtcacggacatataaatcctcatctatttattgctgtttgtggtcagtggcatggcccatggcggtggtattggaccctccttcataaggcctctattcagagcagtaccatatgtggcgaatgaatggcatggaaagaaaggctcctttttctcttgatatctggaaagtattttctgaaagtggatgtagcttaagagagaggtgggggcggggagagttgcgtcccagcgagcgtgttacatgatttaagagtctttcttttctctccaagcctgtccttttaagcgatgggccacttgaaaggtctttgagcctcctctggtcttttcttttc

SEQ ID NO: 342627 - DNA, 96 bp, Homo sapiens
  chr16:69906932-69907028
  hypo
cgcttggatgaattgtaggtagaggaatgcaggtgttgaaatttggtaagtgacgctgagatagttttctagtgctcgtgacagcagaggtgtggc

SEQ ID NO: 342628 - DNA, 166 bp, Homo sapiens
  chr16:69921972-69922138
  hypo
cgaagaaccttccgttgttggtgtgacgtccccacctgctgcacccttgagtgtgaccccgaatcccaacacgacttctctccctgccccagccacaccggctgaaggagaggaacccagcacttcgggtacacagcagctcccagcggctgcccaggcccccgac

SEQ ID NO: 342629 - DNA, 111 bp, Homo sapiens
  chr16:69922460-69922571
  hypo
cgcctagatcctgcctagaaaacagcttttctctcttgaattttatcgtatcagcccacggaggagttgggttttaggctgtgaatattgctgtatgttattctcataatc

SEQ ID NO: 342630 - DNA, 395 bp, Homo sapiens
  chr16:70433888-70434283
  hypo
cgcccctcttctctcgactgtggattatcgatgaggtattgctgggtccactcaatgaaccatgaacagtcctgtcagctccgccgttgggggagaacctggctgtgtcaggaggtgtggttgctgggcttggtcctgcccccggacagccctgagggcagttgtctacatccatctgtacattatggacaaagtgaatgccagcgtccctggtagcactgacagcctgaggccccatgctgcccttgcaggcaagaacagggagaaaaggccacttgtaggcagtttgggtctcagccataaggaaaggagctcagatccatgccaagcgtgagggagccacaccaggtgagaggaacgctgagaagggaacccctgagcactggctgtgtgcc

SEQ ID NO: 342631 - DNA, 364 bp, Homo sapiens
  chr16:70754664-70755028
  hypo
cgatggccccatgttggggctatccgcccatgtggtctggagctggagctcaagactggggccggggcaggtcacaccccttctgagggaataaagagacacaaaacttagcacttaaggaagcagcttgcgaaaaaggaaagtgagagacggggctcaaaacagactggtggaggaccagaaaaaatgagcgctgacttgagtgcacttgaatcatctcagcttggcttcaaagaggccaaagtggatgatgcgagccactgcgataagccaggggaaaaacacatccctgagaagagggggtgacacatgtcctattgagcaagagtcaaaagggagattcagacctggagagatgttcacc

SEQ ID NO: 342632 - DNA, 112 bp, Homo sapiens
  chr16:70794507-70794619
  hypo
cgtgccccaaaaccctgacaacatttggcacttcagcaaatcgagtttccacagccacagcctgaacagcgctgtttaatggactgcatctccgcctgctccctttcaatgc

SEQ ID NO: 342633 - DNA, 352 bp, Homo sapiens
  chr16:70808012-70808364
  hypo
cgatacactaccattaactaaatgattaccctaatttgaacatcacgagtttttccattcctggccttttgttccaggatctcacactgcatttagctaaactgtcttctttgtctcctccaatctgttgcagcccctcaatctgtgtgtctttcataaacttgacacttttgaagcgctggtcactctgcagaatgtctccccgtttgggttggtctcacgttttctcacgagtagggagttgcgcatcattggagggatgtcacggaagtgctgcgcctcagtgcaccctatcgggggaacgtgttgtctgttagcctcattactggtgacgttaacctcatcgcctgac

SEQ ID NO: 342634 - DNA, 307 bp, Homo sapiens
  chr16:70811523-70811830
  hypo
cggagcaagtgaagaggcacagatgaggggctgccctgactggaggtcctgtggttagaggaggagggagaagatgcggaggtggggcaggggtgcaaatatgcacacacacaaaggttcttgcccggaggtgtgccatgaggaacgtggtgctgtcggcggatcagcacaagtaaacaaagaaggccaggcatgaggtcctgtctccagccaggtggaccagagtgggaacagagggagcagagagggaagagtgagcaggagaggctgtgatgaacttgtccctgaccagcgaagctatctgtcc

SEQ ID NO: 342635 - DNA, 706 bp, Homo sapiens; identical to SEQ ID NO: 335374
  chr16:71459795-71460501
  hypo

SEQ ID NO: 342636 - DNA, 150 bp, Homo sapiens
  chr16:71715666-71715816
  hypo
cgaggcctccgggtctttctaactgcatgaagttgtgtcgcaagttgaggtaggtaatatcttgactatagaagagatgctcaggaacctcctcgaggctgtaacacgagagatccacggtactgattcgctgggacaccacctgaataa

SEQ ID NO: 342637 - DNA, 116 bp, Homo sapiens
  chr16:71754757-71754873
  hypo
cggaaaaaaaaacaaaagacgaaaaaaaaaaaaacaatgtgaaatactcttaggtagaagatgtttctgcattcaaaactttaaaacaatatagactcatatctgggaatacacac

SEQ ID NO: 342638 - DNA, 116 bp, Homo sapiens
  chr16:72038658-72038774
  hypo
cgcaggcagatgaattaacgctgctgctggtgaagtagaacaccatgatgctggcgggggtgcggtgactccaccgtggagcagcagcgttcaactgtggcggttgcctggtcccc

SEQ ID NO: 342639 - DNA, 529 bp, Homo sapiens
  chr16:72459594-72460123
  hypo
cggctggcgtctgtaccctgtgggaaaagttaactgtaattcttcggcttttaaaatcaattaacccgagtgttaattaacgtcaagtcgacgggaggaggagaagaagaaggggagggagggagaaaagaaaaaagctgcaagggcggatggcagaagagttggcaccgtgccatccattcaggggcaacgccacagtttcgtgtgatagcagcagcgggtatatgatacggggccctgtatgcgggccagacagtgcggtaaagccaagggagattatccagacccccaggagcgaacagcaagcagcaaccgaaggcgcaagtgccaggattacagcctaggctgctccaactatgagcccttcctcggaccctgggactcggctacttggggtttgggggtcttccacaccacagaggcacaaagctgactttaatcactttttttcctttaaacttgattctgccgcagtggagccagcacagcggatgttttcacacccagcaagacaaaggccgtcgtctcc

SEQ ID NO: 342640 - DNA, 474 bp, Homo sapiens
  chr16:72991953-72992427
  hypo
cggctccgggtgcttctccttcatgtgtgcctccagggtctgctggtacttatagtgccagttgcacttggggcacttgagtgtcttacacgagttacgagaatgcatcatggtcatgtggccgcccagcgagcgggaggagcccaggaccgtgtcgcatttggggcactccacgccactccccgaggggcactccccaaccccaagctcgcagagggagccagcgtgctggtgatggggaacgaagcccccatcgtcaccctctgtgctttcatttggttctggtgctgtggcattgtctttattggcactttcgtcagcgaagtccagcctcctgccgccctctgccacattggccctgacgccctcactgttaaagcttaaacgattcctcctgttcgcaccatcaaagacaacaaaggaagaagcagaattagaactagtagaagctgtgcccctcgacagggtctggag

SEQ ID NO: 342641 - DNA, 174 bp, Homo sapiens; identical to SEQ ID NO: 335377
  chr16:74659437-74659611
  hypo

SEQ ID NO: 342642 - DNA, 419 bp, Homo sapiens
  chr16:74782393-74782812
  hypo
cgggcggggggagcacacagcagcccactccgagggctgttcccgggaaggttcctcacagtagcctcctttctcccctcgtggaggactctctgggaggtccccaagcccccagcttcctccagggtcccagaccctgtcctccctagagagggtttgcttggacggcgcacgggggagagaacagagaagaacaacagaaagtctgcgctctgcaccacaaacaaacaagtccaccatagaggccgcgtgaaaggaggcagtgtgcggcgggcgggggctgggggcgggggcgccggcataaaggcatgttgttcgggaaagctggggctgggcaccgcgggacggacagatggccttttatcccatagcctggattttgcctgaaaaccctttttctgaaagggaatggttgcctc

SEQ ID NO: 342643 - DNA, 234 bp, Homo sapiens
  chr16:74908874-74909108
  hypo
cgcatggaaacccagtgccctacagcagggggcagctgcgtctgatgcctcttcccaccccgacggctggcagggcctggcacgcaggaggtgttgaacaggtatcagctgaaagaactgaatgactcagcagtaacacttcagcagagggcagactggctttaccaacgcctgctactgcccactcgccactggcccaagtcaggacaccgggatgccgctccaccgccgggc

SEQ ID NO: 342644 - DNA, 86 bp, Homo sapiens
  chr16:74984568-74984654
  hypo
cgaaaccaactggaagcctcgactgggaggcggctgtgcccttgggtaatgaactgtgacgcaggagctctgtaaccgctgctgcc

SEQ ID NO: 342645 - DNA, 349 bp, Homo sapiens; identical to SEQ ID NO: 335378
  chr16:75033799-75034148
  hypo

SEQ ID NO: 342646 - DNA, 166 bp, Homo sapiens
  chr16:75127929-75128095
  hypo
cggcttagcagaggggcccagagcaagcacccgccctccttggggaggtgggggctgtgtgctggtggcatgcatagagtgctgggaagctggtcgtctccttgtcacgttcgaactcggacgaacacctgatttagtcctatgagtccacaccagagagcttgac

SEQ ID NO: 342647 - DNA, 350 bp, Homo sapiens
  chr16:75136341-75136691
  hypo
cgggacagttaagttcctttagtgacggagaagggatcctgccacaagctctgccttcttcacagctgagacactgctctcctgatatttctcctgtggcttggaggacttctgggtcgccttttgttcacgtcgcctcttttcacctgcccttcaaatattcatgtcggcctgggtttgtcttctgccttctttggattttggtctgaactttctccctggactgcctctttatcccacatccatgcctggcacccatgtctctgttccaaacctcagctctaggcttcagcagcctcctggaggtctccatcagctggccgggcctcctcccacccaactcagaatcc

SEQ ID NO: 342648 - DNA, 790 bp, Homo sapiens
  chr16:75148497-75149287
  hypo
gtcccgcatggtgccgtagcggaccgcgttggtccccgacgccccggtggccgccatgccacagagagaggcgtccgcgcctgggtctggagggcggcgtacagaaggcagcctcagggaccggaggtcctttccctcgggctgggggaggaaggtcccctgaaccccagacacagccctgctcccacggtgccctcagggtcccaggaaaggttcgcgagtcctacccacgggaaaccagaggccgctgtcccgcaggtgggcgttgagggctttgcgggtgacacctggctccaccaccacagagaagtcctcctggttcagctccaggattcggtccatatgcgtcaggttaacgcagacgccgccctggttggggcaggtgctaagaccactgcagacctgggtctctgacctggccacgtccccggaccacaccccgcgggtgtccccccagcagccagaccagacccccagaggcaggcagcccacgggcgggagcagacccaaggtgccgtgtgtggcgggggaggcagccacaggtgtgccaaggtgtgctgggaccatcctcgggccgggcgagggagccccactgtacctgcacagcacagacgccaccctcaagcccggtgccggtgccgaatgggatgatgggcacaccttggcgatagcacagggctgccagccggctgacctgctccacgttctggggccacaccacagcatcaggaggttcgcacctagaaccagaccctcagcgatttagcggggcgtgacaccctctggtccc

SEQ ID NO: 342649 - DNA, 220 bp, Homo sapiens; identical to SEQ ID NO: 269447
  chr16:75222815-75223035
  hypo

SEQ ID NO: 342650 - DNA, 263 bp, Homo sapiens; identical to SEQ ID NO: 335379
  chr16:75263542-75263805
  hypo

SEQ ID NO: 342651 - DNA, 149 bp, Homo sapiens
  chr16:75469090-75469239
  hypo
gtgagccaccgcgccgggcaccttcaaggttttgttaattttggataatgctacaatccattgctgcaaagaactcgaaaatgcacacgccaacataggagttctttttatgcccccaaacactaagtctctcatccaacccctcaatc

SEQ ID NO: 342652 - DNA, 284 bp, Homo sapiens
  chr16:77227386-77227670
  hypo
cgccccagtcagaggccctgtcaagcacctctcggctctggagtcctgcagcccctgagaatagtcccacatgtagccctgagagtagctctggaggccagggcggggaccccagtgatgaggagtggcgcagccagcggaagcatgtgtttgtgctgagtgaggctggcaagcccatctactcgcggtatggtagtgtggaggcgctgtcggctaccatgggtgtaatgaccgccctggtgtcctttgtgcagagtgcgggagatgccatccgtgccatctac

SEQ ID NO: 342653 - DNA, 1028 bp, Homo sapiens; identical to SEQ ID NO: 335381
  chr16:77245984-77247012
  hypo

SEQ ID NO: 342654 - DNA, 371 bp, Homo sapiens; identical to SEQ ID NO: 335382
  chr16:77247397-77247768
  hypo

SEQ ID NO: 342655 - DNA, 925 bp, Homo sapiens; identical to SEQ ID NO: 335383
  chr16:77468276-77469201
  hypo

SEQ ID NO: 342656 - DNA, 262 bp, Homo sapiens
  chr16:77752668-77752930
  hypo
cggatattataaatattagagcgatatttctttaatatcacagcatgtaagccctgtgtgtaaacactggatattataaatatcacagcgatatttcgctgatatcacagtgtgtaaccactgggtattgtaaatatcacagtgatgtttcaccaatatcacaacgtgttactagtggatattggaaatatcacagcgatgttttgccaatatcacagtgtgtaaccactggaaattgtaaatatcacagtgatatttcgcc

SEQ ID NO: 342657 - DNA, 739 bp, Homo sapiens
  chr16:77753318-77754057
  hypo
cgatatttccttaatatcatgatgtgtaaacactagatattataaatattgcatcgatatttcattaatatcatggcgtgtaaacactatgtgtgaacactggatattagaaatatcacaacatttcattaatatcacggtgtgcaaacactgtgtgtaaacaatggatattatgaaaatcacagcgatatttcattaatgtcacagtgtgtaagcactgtgtgcaaacactggatattatgaatatcatagcgatattttattaatatcgcagtgtgtaagcactgtgtggaaacactggatattatgaatatcacagcgatatttcgttaatgtcacagtgcgtaagcactgtgtgtaaatactggatattatgaatatcacagtgatatttcattaacgtaacagcgtgtaagcactgtgtaaacactggatattatgagtgtcacagtgatatttcattaatttcacacgggatattataaaaatcacaacgatatttaacatcatagtgtgtaaacactttgtgtaaacatcgggtattataaatatcacagcgatgtttcatcggtatcacagtttgtaaaccttggatattataaacatcacagcgatatttcatttatatcacgatgtgtaaacactggatactataaatatcacagcgatgtttgcttaatatcacggtgtgtaaacactgtatattacaaatatcacagccatattttattaatatcac

SEQ ID NO: 342658 - DNA, 1237 bp, Homo sapiens; identical to SEQ ID NO: 335385
  chr16:77822069-77823306
  hypo

SEQ ID NO: 342659 - DNA, 315 bp, Homo sapiens; identical to SEQ ID NO: 335387
  chr16:78322882-78323197
  hypo

SEQ ID NO: 342660 - DNA, 133 bp, Homo sapiens
  chr16:78409056-78409189
  hypo
cgattcatctgtaaagtaaaaataaccgtcgtcgtcatttctcaagcgtgacgatactgttacacgtttactgcatattctgcataccaagcacatatccgtcacacgcagtgtggccaacttccgagaggcc

SEQ ID NO: 342661 - DNA, 536 bp, Homo sapiens; identical to SEQ ID NO: 335389
  chr16:79804157-79804693
  hypo

SEQ ID NO: 342662 - DNA, 368 bp, Homo sapiens
  chr16:80646305-80646673
  hypo
cgccatgcagagtgcatggtccatacactgacatcatcgccatcttctcaggccgggctactccatctggcactgaaggtgtgaaggacatgaggcagccaagccaatctgcaggctgacaacaccctcaggtttctagccccatgaagagcccctaaacccaaggcagaggaaggatcctgctgggacccgaatccaggtatcacaggaggcttaccagcgcgacgcccaggatctgggggaaggtgtaggaggagcagccagcaggcgtgaggcggatggtggcgtagggcgtctggaaccaggccttctcactggcccacacgatgtcacagaggggcaggatggaggcacccaggcccagggcc

SEQ ID NO: 342663 - DNA, 1630 bp, Homo sapiens; identical to SEQ ID NO: 335391
  chr16:80837325-80838955
  hypo

SEQ ID NO: 342664 - DNA, 107 bp, Homo sapiens
  chr16:81361640-81361747
  hypo
cgtcatcgttttaatcgtctttgaactcttaaaattttaacatgcattttcaaaccttgtcttttaagagagaaattttattgactgctttactttcaaaatgacgc

SEQ ID NO: 342665 - DNA, 213 bp, Homo sapiens
  chr16:81533335-81533548
  hypo
cgtccagtcctttacccctcctttacccagcagcgccctctgaatctgaaacagttttgggggcggcagctccggtcctgcccagcaactcgcagttgttgcctgtggcattcagattcaagtctgggcttgtcagcccgggcgagactctcctattttggccctatgggaggcatccaaactcctctgcccttgccttccggggcgccccac

SEQ ID NO: 342666 - DNA, 842 bp, Homo sapiens
  chr16:81563939-81564781
  hypo
cggatccctcagggacctaggtgcagttcctgttcctcccgtctcgcctctgttgcgctgcaaggtggggtgtgtagtgagtatcactgtaacctgtacttttctaaagtcaaacagatttctcttggtgggaggacgtgtcttttgtgggatcggtgtagcccgtctgagtcagtgactcacctggcacccctggcagctgactttcctggcagttcactcgagtctcttgcctctgctcacaaaagcctgcgcctttattcagctttcctcaccgcttcccaaggcagagcagagcctctcccgcccgcctcccacatctctcccttagctgggtgcccgcgtggctgctacctccgaggcttctgtgtcaccgggtagtggaaatgtcaccgagtgtcagagcttcgagcctcctccagatccatccaaggtggcatcactaagtggcatttgtgtgctaggcacgtaccctcttttacatacattatcttcgatcagttcagcttcttctgcataaaaaagaaatttctctaccgtcccagggagaataattggaaaagcgagccctgagtactcagcccacccgcccttctcctgctgaactgtcgaacgtagccaccagctagcctgagcttgttctgatgtcttctgggatcgtcattgttatgggttgaactgtagccttcaaaaggcacgtttacgctgtagtctctgtacctgtgagcatgaccttctttggaaatagggactttgcagatgcgaccaagttaagatcatgctggaggtcatgcgggaggtcatgctggaggagagtgggcccaaatccagtgactgtgtcc

SEQ ID NO: 342667 - DNA, 606 bp, Homo sapiens
  chr16:81565589-81566195
  hypo
cgatttgatagcttccatttcatggcgcttcttctggatgtcaggcactaagtcgggcgctttattctgtagttctcctagcaatctggtgagctccactctacagataaggaaatcgaggccaaggacagctaaagaagcgaggtgcgcaaggtgcccaggtccgaagtgtttccgctgctttcagactgcagtcccagggctcaggagtccatgctttctgcgtatcttcacgctggccacggatcacctcatcattagatgtcgaagttgaacaagtggtgttcacattcggacgtgtgttaggtagaagtgtgtgtgcacctgcgtgtgcgtgtatgttccacacgctgatgcaggaggtatacgcacagatataattgtcttttagaagattgactatcactaattttgaaaaatttcctgaatgacctttcctgccaggccaatacattgagcccaacagataaatccctgaacttattcgcagtctctaagtacctttagaatcccgggggtcgccctgagcctccccagggactagcgctgttgccctcgctcagtctcgccaccacaggaggcctcggcttgcccagcagctgagtc

SEQ ID NO: 342668 - DNA, 140 bp, Homo sapiens
  chr16:81580491-81580631
  hypo
cgtagccacgcgtggcgaacagctcttgtactggagagtgccgatgtagaacattccctgcatcgcgagagctccctggatggtgctgggctgcaaaggccactcccccgggagtgcacagccttgcggtattaaagacc

SEQ ID NO: 342669 - DNA, 377 bp, Homo sapiens
  chr16:81626951-81627328
  hypo
cgagaggtggtgttgtgcctagcctggggggttggagggcggggggagtttctgctctgcagccctgtgatgcgcaggtgccatcgggtctctgaccccaggccatcaagagctgtgcgacctgcttgccatccatcatgtggagctggtcggtcaccccatgcaccaggccgactccaagccggagctttcctctccgctcttttcggagtaatccgtggatgatggaggagcttggcaagcatttcagcaaagctcttttttcttgttgaggcttgaaagtaatcgcctccgtgtattgagtgcccgccgaccacctggcgcgtctgggcattgagctcattggccgctggcacaaatggatcctcgcctcaccc

SEQ ID NO: 342670 - DNA, 206 bp, Homo sapiens
  chr16:81632835-81633041
  hypo
cggggcaaggagaggtcatattacctgagggaaaccaggggagggagagtgtgaacggcatttgagatttcttctgggaccaaggcccaaaccggcccttctaggatcatatcgttacctgccactttgcgtttgctgtatgactttccgtttgtgagattaaaaagaacatgaaatattttgacgggccttccccaaatgagcat

SEQ ID NO: 342671 - DNA, 108 bp, Homo sapiens
  chr16:81688971-81689079
  hypo
cgcaaaacagttccgagaaagaactgtccgtccaccagcaaagcaaagctggctgtccccaccctcccaggcctttgttgagttgcgtgtaaagtggccgcttagctc

SEQ ID NO: 342672 - DNA, 505 bp, Homo sapiens
  chr16:81694554-81695059
  hypo
cgggattgctgagctggggctgtggctgcaggaagtaacctccctctgtgcgcataccagggattgggtttgcacagaaaggccaaaaacctgggccccaccgtcttgggtcacggtcccagacacaggcggagagggcatgcccggcacccattcttagggctacacccacgtctctgccagacaggtgacaaagagtcacaaggggaacatcttgcttttccttggaatcacttcccggctgtcttaggagacaggttgctgcagatttcctgggctcatgacgtcagagctgggttattattagccaaggttcctctgcgcagtggctggcccacggtggggtgcggctgtggggctttccctgaacacgggaggcagcacggtgctccaggttagcttagaggagctgtggagcagggcatccgctgccgggcacccggcgccagccttgcagtgggattcacataggacatgtccagggcacatctttgtggctcaggcc

SEQ ID NO: 342673 - DNA, 110 bp, Homo sapiens
  chr16:81700929-81701039
  hypo
cgccaaactgcgttctgaagaatgaccatgtatctctgtgcccccacgccactcggagtgttcttgtggcaaaggaggcgagaagacacggctgtggtccccagtggacc

SEQ ID NO: 342674 - DNA, 385 bp, Homo sapiens
  chr16:81703552-81703937
  hypo
cgcgggtgtcgcagtgctattctttgaagtagacgccacctgtgctttccagagggttggtgtctccccattgccttccacatcaacagctccaggcagagctcggtcccgcccttctttctggtgtcctggctgccctgggctcctgccctgcctagcaccgtcccgactcctgtcctctgctgtctccacaggactttgggaagtgcccgcgactgaggctgtttactcaggagtacatccttgccttgaacgagctcaacgcggggatggaagtggtgaagaagttcattcagaggtgggtctccggcgcgacgtccctctgtggcctaggagccactttcctctcggatcctgtttactcagatatccacggggggctgtc

SEQ ID NO: 342675 - DNA, 45 bp, Homo sapiens
  chr16:81765482-81765527
  hypo
gtcagtgccgaagccgttgtgatgaagcctgcgttagtgagaccc

SEQ ID NO: 342676 - DNA, 83 bp, Homo sapiens; identical to SEQ ID NO: 335393
  chr16:81813415-81813498
  hypo

SEQ ID NO: 342677 - DNA, 189 bp, Homo sapiens
  chr16:83934496-83934685
  hypo
cgaaaagctcttgctgatcacccaccctaatccagggttatttgcactacgctttatatcactgtcttaccgttaatcagatgtttattagaaactttcttttttggctacttagatgcataaaattgggcataattaagtatgggattaatgtcaagagtgacaacagtggccatgatttgattcccc

SEQ ID NO: 342678 - DNA, 543 bp, Homo sapiens
  chr16:84132267-84132810
  hypo
cgaaatgcaaggaagaagcagacacaaggacgcgtctttcagcacgagaaggcggccgcagccttgaagtctgaaggctttgagatgaagctggcgaaaatcgcttccaacagaaacaaagatcactaccatctactactgcaaaccctcagattttcttctaccagaacagtacgaagtctctttttaaaaaataattctgcccccccaacaccgaccctgcgcactaaacaaaactaaactaaaaaattcctaccaggaaaatgttcacaattagcaaactagatggaaggatgcggatactcactgtactatttttcaactactctgcagtttgagattttcaaagtaaacagcagagagaaatttgcctacagtcacaatactcacattcagcatacttgagggaacgaaagacttttcgttggggcgtgacccgtttgatgtttggatgatcttcaagtgttagcagccccgctttctgtttttcttttatctgaatcacctcaaaatcactagggtagtcactggatggattgtttc

SEQ ID NO: 342679 - DNA, 109 bp, Homo sapiens
  chr16:84170884-84170993
  hypo
cggcaccgtcaagggtctggcctactcgggaaacattaggaagtcccccgcatgcacagcacaggctgtgctgtcctgtgtgacgccccatgtgtgcaggcgcacaggc

SEQ ID NO: 342680 - DNA, 377 bp, Homo sapiens
  chr16:84483346-84483723
  hypo
cgtgggtggcagctgcttttgtcatggttgatacgaccaagccattcagtagctccctgttcttgtcacatcacgcctctgctgacgaaatggctcacttaagagtggacacgttagtaagtaaacatcccacgtggcactggcctctaaatctgcacctggcacttgggccccacttgtgtgctgggcaccaggttaagtgcctgtgtgaggccacgccctgaatccccaccgggcagaggagccggcccaggtgacacagccctgcctagtgcagccagcgccttcgcccggatgtctgctgcggagcgtaatgacgcgttccagggacttgctccaggccttgcgggagagcgtaatgagaacgggtcagtggc

SEQ ID NO: 342681 - DNA, 849 bp, Homo sapiens; identical to SEQ ID NO: 335396
  chr16:84650982-84651831
  hypo

SEQ ID NO: 342682 - DNA, 102 bp, Homo sapiens
  chr16:84780638-84780740
  hypo
cgccactaggcggcaggacgtttcagttccactagaatcttgtgggaccatcatacgtgcggctcattgttgaccgaaatgttacgccgcgcgtgactgtac

SEQ ID NO: 342683 - DNA, 45 bp, Homo sapiens
  chr16:84812709-84812754
  hypo
cgcccagtgcccgcttcgtaggacaccacctcacactcacttccc

SEQ ID NO: 342684 - DNA, 346 bp, Homo sapiens
  chr16:84813536-84813882
  hypo
cgtgtttctttgaatgcgaatgccttttcgggtaactgaaattcatgggggcatgagtttgcctgcagaattaaaatctgcccttcgatcagctcgacgtgtttgtggaagctgaaccaccactcaggttatgcttgtttagtattttcaaatggattagtgatttgggtacacgaagtttttgactcttcgattggcagaaaggaggaggttttctccccttcccctcctcatcccttgtttctatagcccaccgttttcagtatcaccaaaatagttgctgtaggtcaaggctaaatgctcttcagttgagtgccactggggcggctgagcggtgcctccagac

SEQ ID NO: 342685 - DNA, 591 bp, Homo sapiens
  chr16:84822987-84823578
  hypo
cgcgggaggtgatggaacacaaaaccatgagccatggctttgctggggaatgctgtggatctggtgtgtgatagagagagagtgtgtgtgcgtgtgtgtgtgtgtatggcaaagtgcacaaatcgcacgtgtacacctcagtggctttttacacatttagacgtgtgtaagtgtatagagcatttccacaccccagaggccccgagctcactccctcccgctctccccatccctgacgctaacctgatgcctgttgtcgtacatcagcttctcaacctcggcactattgattgccatttggggccaataattctagggggtggtggctgtggtgggcactgtaggatgtttcctgtgtccctggccctgacctactagatactagatgcacccaccctctccatcgtgacaaccaaacgtctccagacattgctaaatacaccctggggacacagtcaccctggctgagaaccagagcgtgggtcactgtgacttccgcgcttcctctccatggcatcgcacggtgccatgtgtcctgccctccgtgttcttctctctacgctgcttctctgaaatccctccagcggtggc

SEQ ID NO: 342686 - DNA, 280 bp, Homo sapiens
  chr16:84998400-84998680
  hypo
cggtgagggacaggaaaggatggagctccgtgactgttgatagggacagatctccaagacatgttgtgacgtgcaaaacagcaaagtgaatgtttgctaccattcgtgcacaaacacatccgtgagcaaacgtgtgtatgcacgcacacacacctgttggcttcaaacgtgtgtgtgcacgcacacgcacctgtcagcttgaaatgtgtgtatgcatgcacaggcacctgtcagcttgaacatgctcagagaccgtctaggccccgcgtgggtaccaccc

SEQ ID NO: 342687 - DNA, 545 bp, Homo sapiens
  chr16:85007507-85008052
  hypo
ccggctcaggtgtgcgcctccgtgttcgagtctccttctcatttccgcgtgtctggaatgccaccaggagccccaaggcacagcacgtgcgaggcagggctgcggcacacactgaccatctggcctctgaaaggtaagcgaggcagggctgcggcacacactgaccatctggcctctggaaggtaagtgggcattttggttccctcagtgcaaatgttagacaaatttgttgaatgaattaaaatcaaattgtaggtacttgagattctgaactgtggagattttgaaacattgtttttatttcaacgtgcactaaaaaaaggactaagtaaaacgatgggagtcgaattaaacattcaacaagcaacagtactcactgggcaacatttgtgagtcgcgcttgagtgcccaggtcacttgtcatgggcacaaaagcatttagagtttctggaaactgtttgggagtgaccttaacagcctggggctgggcccacgaagcacggaaaggcaccccctgaaaacaccaccatccaggaagaacgggc

SEQ ID NO: 342688 - DNA, 439 bp, Homo sapiens
  chr16:85009963-85010402
  hypo
cgggccaccttttctgggtctcgtgggcagtcgcctaaatcggaagcccacaaagggattcatccagaggagtgaggggggccccccaaagacggacttcatcccttcccatcgcagcctccgctcccatgtgggcttctcacttttcaatcgctcgatctcctggaagcagaaagaaaagcaagtggcagcggctccaggaagctcggcagaccccaccaagcctcagaatcacaccgtgctcaagcacagtgtgggctcgatggagggtaggtgagtgaactctccttcccagctctgccccgatccagaccccgtggcctctgtgagcccagcccggctgcagccacgtggccagcccagactaccacaatggccctcccagccaggcaccaacatttgtcgctcgttagttactgtgtacagacatttactgagc

SEQ ID NO: 342689 - DNA, 144 bp, Homo sapiens
  chr16:85028179-85028323
  hypo
cgccttcctggttcaggtcctggtaagacctccacggagtgcaggatgctgctgtggctccatgcctgacctgggggtgcggatggcaggcacagctgtgtaaggagagcgcccacagacaccaaacactggccatggcaggac

SEQ ID NO: 342690 - DNA, 152 bp, Homo sapiens
  chr16:85033842-85033994
  hypo
cggccggtgtgatagtgcaagggtgcggcacaaggcaagtcccagcgagcagtggagtcacttttcttcctggataacccgcgttcctgagtccagaccctgtcttggatttacttgtatctgtaacttcaagcaagtgtcttaagctcttc

SEQ ID NO: 342691 - DNA, 214 bp, Homo sapiens
  chr16:85083563-85083777
  hypo
cggtctctgtccgagttgaattcagctgtcccggagtcagccgctgtgtccttttgtgaaagaagtacagcccgtcacccagggagggcgcgccttatggcgggttctaacacgcagttgcaatggaaccaactcagtcaatggtgatcgctgatggtaaacaacccctcaccctgcactgtctcggtgcctgaaactcaagggcccagccctc

SEQ ID NO: 342692 - DNA, 1143 bp, Homo sapiens; identical to SEQ ID NO: 335398
  chr16:85202563-85203706
  hypo

SEQ ID NO: 342693 - DNA, 317 bp, Homo sapiens
  chr16:85328798-85329115
  hypo
cttcccagggcctccgcacacaccggtccaccttctgcctgaggatggcctgtgctgggcatttcctgggaatggaatcctgcagtacaagctcttttgtggcttctctcactcgggaccagcctggggcgaaaccctgtctctactaaaaatacaaacaaatcagttttcaaggttcacgcgtgctgcagcgcgggtcagcacatcagcccttttatggctgagtgattattccaccgtgcgcgtagaccgcgtcctttttgcccatccaccgccgatggccgtttgggctgtctccacctttcggctgctgtcac

SEQ ID NO: 342694 - DNA, 257 bp, Homo sapiens
  chr16:85407706-85407963
  hypo
cgcgtggccctcagtgtgtagtgtgtgtcagtgtgcatgtgcgtggttgcatgtggccctcggtgtgcagtgtgtgtcagtgtgcctctgtgtgttcacgcgtggccctcggtgtgcagtgtgtgtcattgtgcctgtgcatggtcgtgcgtggtcctcggtgtgcagtgtgtgtcagtgtgtatgtgcgtggttgtgtgtggccctcggtgtgcagtgtgtgtcagtgtgcctctgtgtggtcgcgcgtggccctc

SEQ ID NO: 342695 - DNA, 87 bp, Homo sapiens
  chr16:85453282-85453369
  hypo
cgggtgcagtcgtgtgcaacggtgaatgcacgttggaatcagctggggatctctaaaaacccctctgatgcctgcctcccccgcccc

SEQ ID NO: 342696 - DNA, 132 bp, Homo sapiens
  chr16:85464235-85464367
  hypo
cggggacgcctggtgccacccccagaggctctggcttgatagtccccaggtacgggctgggcacagggcggcggcagtctagggcattcgtctgaagggcaccgctggggaaatcctgacgtaggcacacac

SEQ ID NO: 342697 - DNA, 175 bp, Homo sapiens
  chr16:85465108-85465283
  hypo
cgcgtctctgatccaacgcctgctgtccccagatctgatcctttgagcatcagggctggaaagtcgcctccggggtggtggccgtggcagcctcagaggtttctgcccgtgctccccgagacacttggccatggcacctgcctcccgccattggccttccgtcctccttcggagc

SEQ ID NO: 342698 - DNA, 250 bp, Homo sapiens
  chr16:85485696-85485946
  hypo
cgccagagagacccgtgtccggcgcgaataattggattttaatgaaacgaatgggagtgctgaagccgtttgccaccctggcctgcatcggggccccgcaattaagccgattatgttttgagagtcaagctgtctgactcctcgcgtccctaatgtgatgatgtttgatggccctgccagcgcggttatttatttatttacccaaccctcatgagctgggacgtgccagtgggccccggtaattaacagc

SEQ ID NO: 342699 - DNA, 588 bp, Homo sapiens
  chr16:85517169-85517757
  hypo
cgatgcccaggcccccggccactgtctccgccctcttggtaggccctgtgggatcaagtgtctccgaggcggcgggctgagacggatgggcctcctggccgcacacctgagaacatgctggcaaaagcgtttgcttaattaattgactttgagcgagggagcccgtccccgtgtaaacctagcagcaggctcggtgcttgccgccgggatgctgcgaatgcaaggctagactttaaataagggtgtgattattgtgtgaataattgaagaatgttggggagcttgcagtcctcggtgtaccgtcccctgccagcaggcctctgggccctgcccgtcacgggtacaactctgctgccatcctctcagctgggacagtgggggactttcagacctaagcgttggaggaaacctcctcagcgaccctccccgagaggtgcgtccctgttttccagatggggaaactgaggcagagctggggttaccccagaagaccctcagattcgcggtaggatgacgtcccacacttggtgactttatgtggctcccggaccagttatgccgtgcaggaatatgccccttcatagaacc

SEQ ID NO: 342700 - DNA, 772 bp, Homo sapiens; identical to SEQ ID NO: 335399
  chr16:85590112-85590884
  hypo

SEQ ID NO: 342701 - DNA, 122 bp, Homo sapiens
  chr16:85617682-85617804
  hypo
cgcatggggacggggacacaggctcgccagctgcacagcccgcagactggccttgggtctttgtgtgcgtgcgtgccggtgcgtgggcccctgtctgtttggagaccttcctccccctctgc

SEQ ID NO: 342702 - DNA, 143 bp, Homo sapiens
  chr16:85618063-85618206
  hypo
cgggtactgatccatcaatagtgaatgtattacctgtctccgtgaggtttgggagatccaggatgctgctttgagaacgcctgcgaagcagtaggatcggggaggtggagcagtttcccccacccctccctctccccgcacgc

SEQ ID NO: 342703 - DNA, 248 bp, Homo sapiens
  chr16:85671083-85671331
  hypo
gcagtggctatgtatcgagtccccccttgatcgcggcagtggctatgtattgagtccccccttgatcgcggcagtggctgtgtatcgagcgcctgctgtgcccctggcgggctcgctgtgcttctcacacacccttcgcctctggtggatgagaactgagcctccggcttgcccgggtcccacgttgtaagtggcatggggaattccaatccccagcttgtgcctgagactccatagacccctgcccc

SEQ ID NO: 342704 - DNA, 428 bp, Homo sapiens
  chr16:85671747-85672175
  hypo
cgccatctgactgcgattgcctccgcgtctctcctctcattgtgtctcaagggtgtagtttaaaaattcaattcagacgaagctgtggcatgcgctgccctgggagaaaggctgggaaggagaggaagaggaggccctcgctgggatttatttttctggaggcgctgagacgtcttctcttcttcaaagctcagtcacccgcccaccagcgcgggccagacacccttccccagggccagcctgaccctttaacctactcacctactcactgccgaggctggggcgctttgggcaagggcagacgcttgcgaatcgccgatgcatgccccagcactttccttccttgctgtgtgatccgggcaggccgctttgcctctctgagcttccactttttcttgggtgaggagcaggtctctacctcatgaatc

SEQ ID NO: 342705 - DNA, 988 bp, Homo sapiens
  chr16:85673486-85674474
  hypo
cgggggcggaggtacggggagccttgcgtgtcctcagctgctccaggaggcacaggcagcacctgggaccaggcaccccctccctgggaaacagttgggggcgatcgtgctgcgggcctttgctctgggaggccggcgctttgggaacagggtggctccagagccttcccaggtgggctggagagccgccgtctggaggacagttctgagcaggtgctcctggctggcgaggaagccccacctcaccccagcaccacccatggtgcagggagctggggttgggcgcacaagagtctgagcccgttcccaccccgcctccttgtcaccagcccggtggccgggactcatggcttccctgcccacacttcgctcccttaacaccggccgggggctcatggtacctgccctggaagctgccagaggcctctccaagcaggtgttggccgctgtgttacctgcggcaggggtggcccagccacccatagcccggcttgggccacagggacggggccgacaggtggtggcagtggggctggaactgctctcttgtcatcgaggcccgcggggccctgtgccgccttcccctggtggtgtctgctggctgcctgcctcgtcttgtcactggctttgcaggcaagaggggaggcagatccggttactgtcctgtccctggtgccacctgaaaccgagatcccagctgagtgagtggggactacgtgtgcggggaccacggagcagggaccacagacccatcctcatgagctgccgtgggaatgcttccaccgtggagccggcctgggcgggggagaggctccccctttctgccgctgcctcggaaatctgcctctcaaagaaaacagcaaaacaaacacggaggaaggatcccgcctggcaggcgcgcctcgcgtgggtgtcagtctgcggcggcggcggctctgcaggcgtctggagcccgtctgtctcccgcgcaggtgtgagcgccgcgggc

SEQ ID NO: 342706 - DNA, 408 bp, Homo sapiens
  chr16:85679161-85679569
  hypo
cgggatgcctgtggggcctctgcctcctggtcacgccactaaggccactttggctgcctgaggcctctgggcaccccctgtgagcagcagttttctttggtgaatgtgcgcgtgcccactccggacacagtgaaggggagatgaggctgcttctgcccccggaaccaaggccaggtctgaacagaagtcgggcaggatgccgggagctgatgggctggggtcctccttctggaaagggcatctacctgcttctaccacgcattctacctgcttctaccacgcttcctatgcatgcattctacctgcttctaccatgcttcctatgcatgcattctaccatgcttctaccatgctttctatgcatgcattctgcctgcttctaccacgcattctacctgcttctaccac

SEQ ID NO: 342707 - DNA, 622 bp, Homo sapiens
  chr16:85683926-85684548
  hypo
cgactcaaacagctgaggctccttgcgccccactggtggggcctggctgctggtgccagcgcccgcagctcatgggaggccacttccctgccccagcctggaccaggagcttctaccagccaggaccctgcacccagccactgccttgaccccgaccagagctcctggcctagacccaggacgcctcgaggggattccagcgccttttccggcgactcctccgctctgagctggtccctcctcggagggtccttaccgcctcgggaacattgagctaccccagagcagagcaggggcgcgacaggcccgccccagcagtgtaccaccgcggcgcttaatggaacacggtgccgccagggaaggcgcggggccggcagctggattagcaggtgatgtacggctcctcgctcgggcacagaggctcagcggggcatttaatcctctcggagtggggaggcagagagaggattcccctcccacccggcccaaagctgtggccatgagtctccgaggctgcggacgtgggtggcagttgccgggccggaggcttctcggccccttctcggggtcacccctctctcccaggtgtagtgggagctgcgagaggagaaatgagatgaaa

SEQ ID NO: 342708 - DNA, 423 bp, Homo sapiens
  chr16:85699441-85699864
  hypo
tacttaaatgttccccgggtcttggttctttgcgctaggtctttgttaagtgtaagctctagagaccaggatctgcgtgctggacactcagcctgttaacttgcatttcttaatattttccttcactttgtctctaaaagaaccagccacgcagcaagcctctctggatgtggagaagccggttggtgttgctgcttccttgtctgacatcccaaaggccgcggagcctgggaagctggaacaggtccggccccaggagctgtcgagagtccaggagctagctcctgccagcggggagaaggccaggctgagcgaggcccctggaggcaaaaagagtctgagcatgcttcactatatccggggcgctgcacccaaggacattcctgtgccgctgtcccacagcaccaatgggaagagcaagcc

SEQ ID NO: 342709 - DNA, 218 bp, Homo sapiens
  chr16:85731408-85731626
  hypo
cgggagcgtcacctgaggttggatccccaaacaggatccaagtggaagtggtttattcggaatgcagtcccaggaagggaggttgagaccgggaacttgagaaggagctggttcaggttagcgagaaggtttctatggccggcaaccagggctcagttccaccgggaacctctgggcagctatgacgcctcgctcctcagtgtggcccgtggaccatc

SEQ ID NO: 342710 - DNA, 186 bp, Homo sapiens
  chr16:85741387-85741573
  hypo
aggtgtcagaggtccggtccactcagcggggcctgggaaacactgttctggaagtggacaggctggattcctcgctggtcctgccacgtctctctgagcggaggcccgggttcgctcagttcccatccagggtattcagcacacctgctccaggcagccacgcccccggacacctgaagccgggcc

SEQ ID NO: 342711 - DNA, 859 bp, Homo sapiens; identical to SEQ ID NO: 335400
  chr16:85932121-85932980
  hypo

SEQ ID NO: 342712 - DNA, 890 bp, Homo sapiens; identical to SEQ ID NO: 335404
  chr16:86542053-86542943
  hypo

SEQ ID NO: 342713 - DNA, 1367 bp, Homo sapiens; identical to SEQ ID NO: 335405
  chr16:86543378-86544745
  hypo

SEQ ID NO: 342714 - DNA, 389 bp, Homo sapiens; identical to SEQ ID NO: 335407
  chr16:86609636-86610025
  hypo

SEQ ID NO: 342715 - DNA, 303 bp, Homo sapiens
  chr16:86665890-86666193
  hypo
cgcacaagcccatgactgtgacgttagccacgcagtgacggctaaggctaagccatcaaagacctccaaccggacatgttgcgatgctcacttttggaaagtagccaccgtgctgtgaggagggcacgctgccacacggaaaggccacctacaggtgtcctgatgcacgggaggtcccggccaacacgaaccagtagccaggagagtgaggggaccttcggatgattccagcttccagccttgaggagtccttgggtgacactgagtcaggcagagatgagctgtccctgcccggccccgccc

SEQ ID NO: 342716 - DNA, 69 bp, Homo sapiens
  chr16:86903437-86903506
  hypo
cgtagaggtgacggcggcgcaggcgcagtttagaactgcggagaggtgatggccgcgcaggcgcagttt

SEQ ID NO: 342717 - DNA, 378 bp, Homo sapiens
  chr16:87157402-87157780
  hypo
cgcagcgtccgcagcagccctgagagcctggcgagtgtgagtcccagccaggcctgccaggcttgctgcgtgatctcaggctgcttggccccataagcccctggttccctgtcggttagacagccaggatgcaaacttccatgcaccttacagagttgtcatgaaggtggaatgagatgccatggggatgtttcatttcaccagcatcgctactgtcgctagtcagcacatggggcaaaacccattgaaagccaattaaatcacgccccaaaccaagccctgggaccttcccagcaagccagagcagctggttctcactatcacgtggggatagaccgttccttcctcacataagcacaagcagtggccagaaaaggc

SEQ ID NO: 342718 - DNA, 184 bp, Homo sapiens
  chr16:87311873-87312057
  hypo
cgaagcaggggtgtcccaggcagcaggccaggaccacgccgcatgttcacaggctcagttatagccgtcgaccacgccacggcgcccaaccacgccacggagcccgaccacgcctcgaccatgccacggcgcctgaacttttatctccatttctcaggtgaggacctgaggctcgggtggcccc

SEQ ID NO: 342719 - DNA, 355 bp, Homo sapiens
  chr16:87356538-87356893
  hypo
cggggcagccccaagagcacgtatcccgggacatgatgtgttgtggtctgtgtggggtcagagccgtcagtgttcactgccgcgtgcccagtgcttagcactgtttgccgcatgggagatgcaggtcacaacccggtagcgcctagtggcccgggggacacctggcttgtctgggcctgttggctgacaggtaggagggactgccatccattgttggggcaaaggatgctgctcaacctcccacaacgcatggagcggcccggcgcacgactcacccggccccaaacaccaactgtgccgaggtgatgccctgccctgaggcgagcgtacaaggcttgagcgtcgagaacactgc

SEQ ID NO: 342720 - DNA, 546 bp, Homo sapiens; identical to SEQ ID NO: 335408
  chr16:87417704-87418250
  hypo

SEQ ID NO: 342721 - DNA, 274 bp, Homo sapiens
  chr16:87444932-87445206
  hypo
cgttttagacccaacagcagtccttctggggacctcacggcctatcatgaagatttccacgcgctttcaaagagcattcgaaaaattatttgctttacaaagaaagaagtttactcttcataaaaaccaagcatttgtgtgcactggtcctgcgggagcctggtgggcgcggccatggcgcgcgcttacctggccggttgaagtccatggacggctgtttgcagtcctgggcgcggtgaccagtggccccgcagttgtaacaagataggttccc

SEQ ID NO: 342722 - DNA, 105 bp, Homo sapiens
  chr16:87471750-87471855
  hypo
cgggcacgcgctccaatgctgtggtaccgcagcactgcgtggcacacagagcccactgcacaggaggaatgcacgccccgacccagccggctggacggcgtgcac

SEQ ID NO: 342723 - DNA, 868 bp, Homo sapiens; identical to SEQ ID NO: 335409
  chr16:87525633-87526501
  hypo

SEQ ID NO: 342724 - DNA, 505 bp, Homo sapiens; identical to SEQ ID NO: 335410
  chr16:87526565-87527070
  hypo

SEQ ID NO: 342725 - DNA, 198 bp, Homo sapiens
  chr16:87594891-87595089
  hypo
cgccttcatctttcgtcaacatctgtccaaatagtacctttaaaaatcattgccaaagcgtttgctcctaaggattggaaacgaccatcggcaggggacgggttaaaccgattaaggtgactgacaccgcgcagtgatgcgcagccagtgtaacggccctgtggaggacatctaggtgcatcgtctggtagaaggtac

SEQ ID NO: 342726 - DNA, 1491 bp, Homo sapiens; identical to SEQ ID NO: 335411
  chr16:87635912-87637403
  hypo

SEQ ID NO: 342727 - DNA, 496 bp, Homo sapiens
  chr16:87738520-87739016
  hypo
cgcgcatgggcggcagggggagcatggagaacaagacgattcatcctttaaaatcccacaaagccctgcgaggaggagctgtggccctgctgccaagcgggccggccagagtgcctcccctggtacgcccgcccaccctgcagtcaggggtctgggggccgtgtgggagggccgcagccgagggaaaggcttcctaacagccagcagctcaccacagcgaggaactgggcaagaacgtggcaccgagtacggcgtgtcccagccgcgccgcgccagcagctcccgggagacagaggccctgggctttcgtgccggccgctcacgccctacggtggctatctggccaccaagtagttcggtaaactgggccccggcagacagagcagaccacaggcccgtggggcaggcagagctccgcccaggaatccaccaccctgtgttgtgttccgcgtctcccacggttccacactgaaggggccctgttttcatcacggcc

SEQ ID NO: 342728 - DNA, 728 bp, Homo sapiens
  chr16:87739334-87740062
  hypo
cggccacacaatggcgtccatcttctggacaagggctggagccgcagagccgggcagggcctgggcgggggcgggggcgggggcgctgctgcctgcgctctggcttctcaaccctgtccgagcctcttccaaccagcttagctgagagtgtgaggaaaggaccttgattgcccagcactcagacaaagtgcccagaccggccgccaaagccggcgcaacgcaacacaagctgcagccctgtgcggggtcggtgcaacacaaacacaagctgcagctctcagggggttggcacaaggcaacacaacctgcagcctgaggggaggaggggtcggcggaacgcaaacacaagctgtagcccttgcggggggcgggcgggctgccggcgcaaaagcaaacacaagctgcagccctcgcgggggggtcagcgtaatgcaaacacaagctgcagccctcgggggggggtcagcgtaatgcaaacacaagctgcagccctcgggggggggtcagcgcaatgcaaacacaagctgcagcccttgagggggtcggtggcggggaggggggtgagctggcacaacccaaacacaagctgcagccctcggagagggggaagttggcgcaatgcaaacacaagctgcagcccttgggggggtcggcgtgggggggttggtcggcacaacacaacacaagctgcagcctccaggggggtcggcggagggggccggcacaac

SEQ ID NO: 342729 - DNA, 426 bp, Homo sapiens
  chr16:87744572-87744998
  hypo
cggggaggtcccgggcacctcagcccagggcaactggcttctgaggtagcagccccgccagcatccaggacagactaaggggaccgtgaccaagggctctccaagcctagtcacccaggacagtcagagacggaaccctcgcccctcttgagagagctcatgggctttgggggccccaataccaaaaggtgctggaggaaggcagtggtggcagggacccaagttagggctgcgcaccacggcgcatgctactcagaggttgcactaccttcagctgtccctcaaaccaacggttcctggtggcgtcgtagaagtacagatcgttgaagaactcgcccgacaggctctcctcctcttcctcgtcacagacacccccgaagaacagtgtctggtgattcggggccatggccacggaaaagccagacc

SEQ ID NO: 342730 - DNA, 199 bp, Homo sapiens
  chr16:87776441-87776640
  hypo
cggcccctccagacgagttgccctaacgccttcctatcagggaagggaagactcattctgcaaggcgccgcagctgtagtccagtgtctgccacaggtatgaagtgacgacgagcacggagaacacttgaggaaaactgtgaaacaggagcacctgcacaggcatcacgccaagagtcagccctccacacgccagcacc

SEQ ID NO: 342731 - DNA, 181 bp, Homo sapiens
  chr16:87864425-87864606
  hypo
cgtgccgtcgagaggccgccggctccctgtatccttgaggcatgtccacgtcccagagcaggaggttggaacagaacggcatcccgaggacccctagccgaggcgggaaggtaagaggctgacgtcgtgcgtgggccccgccggccccagtgggaagcagtggtgcgtgcctccagggagc

SEQ ID NO: 342732 - DNA, 490 bp, Homo sapiens; identical to SEQ ID NO: 225160
  chr16:87902836-87903326
  hypo

SEQ ID NO: 342733 - DNA, 126 bp, Homo sapiens
  chr16:87934247-87934373
  hypo
cgacactgttgtccccaccatcttttcgagctgcgctggatacagggaagcctatggatcgctgggcggagagctgcggtttgggcaggtttctctccgcccttgggcttggggtcggacagggac

SEQ ID NO: 342734 - DNA, 350 bp, Homo sapiens
  chr16:88037900-88038250
  hypo
cgtcgtcccccagactacagtaatactcaacaatgatcggcagaacgccattgtagccaagatggaagaccccttgagcaacagggcaccggattccctggaaaatgtcattagcaagtcagtagcacggcaccaaccccacctttccctgccactgtgcggagtcccatgagaataagtcaacgtccctaagccagggcacagtccagcacacgcttcatctctgtggtcacagggttgagcctggcaggcaccgccccagctctctgaggtcggggagggcaggctgggcgatgctgaatgctgagtccagccacaccaggggcagctgccgccggggacttctgtgt

SEQ ID NO: 342735 - DNA, 136 bp, Homo sapiens
  chr16:88048979-88049115
  hypo
cggaccacgctgggcgtgggcgcctgctttctgcccaggtgactgggccctgcttggttctccaccctctcctgtccctcgtctgccctatgttccctgctctggccacgctggttcccttaccttcctggagcac

SEQ ID NO: 342736 - DNA, 453 bp, Homo sapiens
  chr16:88091522-88091975
  hypo
cgacaagccaggcgccgaggctcggtgtgggcccgtgggcctgattgaagtcacactcctgcccccttaaactatgaaacggcggagttacacgggaagaaagggttcaagcgtaatataatttcctacctttttttcactctgagagtgaaccgctgagtggctgttaaattcattgtgtatttacgaggaatctttcatctagagactgtagatgcaggactgtgcccgtgcctggttaaaacgttgaagctggtgctaaagtgtgttgaggtgcctgaaagagaagcttttgttttttgactcactggcctttgggaaactgaaggacagtgcgaacaaagatccctttcttcctcaaatgggagcttgggatttgttgggtttcacgcaggtgggcccgaggaggacggcaggcagggccgggacgtgctgatgtcaggcgccttcgtc

SEQ ID NO: 342737 - DNA, 332 bp, Homo sapiens
  chr16:88096563-88096895
  hypo
cgtgacctcatttttgctgcttcacgtttaagatctgactgctgagttgtcctcatcaccaatttcaaatcaagcccaaatccacaaactatatctcagcctcctgtgtgttttaagaggctgcgccgtgcatggaggtgccctcagcctgcagcagcgcagccaagcggagggcgcaccgcggccttctgtgtgactgttctcagagcacgctgtgccttcatttctgcgtgtttcacggcgttgcccttgtggtatctgctgaccccggttcccttatttctaggcccagtgcctcggctttcgcctctcagccctcccctcccctcccc

SEQ ID NO: 342738 - DNA, 811 bp, Homo sapiens
  chr16:88101501-88102312
  hypo
cgcagttacacgttgcacggggcctccccgtagcatccactgtgtcaatgccccctccgtccccaacagacccgccctccccccactgtctgcctccttgtgtcgtcagtccgtgacacgccacgtgtgtgatgaggaggtgcttggagtggcactgctctgcgtgtggccacgcacttcgtttccattttcacacgtagttcagagctgggtgtccgacagaggtgcccgaggtggaaagcgtcgtgcactcgtcccacctgtggcccctgcagagctccggctgtgtggcacgggctcctgagagctggggatggaggaggtgcgggcttaccgtgtgctcctctgctgctcgccccaggcttgggtttcctggcggtcacctggttggcgtgaaccttgggcgtgcgccagggtccctgtgctgtcgtggagtgcaggcaggtgggcaggcgcttgggagttaccagtcaagtccctgcaccgcgcagaccattgcctggtgttcaggagttttcaaggcctcggcctggtgggaatagttgagaaacgctggttcaggcagcttgctttattcacagccctgagacacctctgggacagcccctgaggatatttttcccggaactttctcggggccaggagtgtgcctgtgctgtgatgagtgggaaacgcagtttgtgcagggcctcacagaagagcccactggtgcgggtgctggctgcctcctccagtgggcgccagctcggggtctgtggcaggaacgtgggtggctgcggatccacccaggacagagtgactgcctgggcgc

SEQ ID NO: 342739 - DNA, 342 bp, Homo sapiens
  chr16:88106152-88106494
  hypo
cggagagctccctgccccactcgttgaaggtctcagctcggggcagagccagtacctcgggctgctgtggccctagcgtccacgaaaacaaagcgcagggctgctgtgctctgtggatggcccagcgggcccaggccagcatctccatacctcgcaggcagaagcccccgagggtgaggccgtgccgaaatctccagcgtggccgaggcccagacaagagccccgtgatgccgtgggctgtttgctctgaacactggaggcagaaggtggccctgcatccgggagcagtcttggccccgcagcctccgtgccacctgctttgggaacgtgcccagcggggac

SEQ ID NO: 342740 - DNA, 328 bp, Homo sapiens
  chr16:88111298-88111626
  hypo
cgggcctggactgcttcacctacaccgttgtggcagttgcgttaggggcttgggaagggcctacgtgaagccgtgttcgctgacttagagcggggcctctctgggctttctctgggaggagttccgcgttgccatccagacggtcgtagctccagcctgctccaccccgtcaggatcctgggctgggtccccttgggggtgagggtctgggatgagctgctctcgaaagggggatggcgctcatgggttctgcgtctccatcgtggtggggccgcctctgaagatggccaccacaaggagccgggccgaggcctcccaggaggtcacc

SEQ ID NO: 342741 - DNA, 225 bp, Homo sapiens
  chr16:88368380-88368605
  hypo
cgacgggaggacacacatgtgatggatacagatgagggagccgtgtgggaagatgccgacgggaggacacatgtgacagagacggacgtgggagccgtgaaggaagatgccgacggaacgacacatgtgtgacagagatggatgtgggagccgtgaaggaagatgccaacggaaggacacatgtgtgatggagatggagggggagccgtgtgggaagatgccaac

SEQ ID NO: 342742 - DNA, 88 bp, Homo sapiens
  chr16:88458615-88458703
  hypo
cgcgtgcgctctgcgcttgtaccgtgtcttgattctggccagcgatgtgcaaacgctccgtggccacgtatgcccgcagctgctgcac

SEQ ID NO: 342743 - DNA, 474 bp, Homo sapiens; identical to SEQ ID NO: 225163
  chr16:88496876-88497350
  hypo

SEQ ID NO: 342744 - DNA, 242 bp, Homo sapiens; identical to SEQ ID NO: 269773
  chr16:88504073-88504315
  hypo

SEQ ID NO: 342745 - DNA, 394 bp, Homo sapiens
  chr16:88512481-88512875
  hypo
ccaggtgtggctgaggccatcgagtcattcctccggtgaagtatgcccgtgcgtcggggtgcagggcacggggtgtaggacaaatgctaccaatgcccctgtcgggaactgggaggagggtggcacatgtccgtcactgccacaggcggttccgaagcccgggccctgccccgtacagtgactgtgctgttagcccggccacctggggcctggctctgcactggcgtgtcctctcctcgaggcggctgagtctgccgttcggggacctccctcgctcccctgcctggtgtcctctcctcgaggcggccgagtctgccgttcagggacctccctcgctcccctgcctggtgaaggtcatggggtcccgggcctcttcaccctctgtgttgtctcc

SEQ ID NO: 342746 - DNA, 259 bp, Homo sapiens; identical to SEQ ID NO: 335415
  chr16:88519038-88519297
  hypo

SEQ ID NO: 342747 - DNA, 122 bp, Homo sapiens
  chr16:88699839-88699961
  hypo
cggccaggagcggacaggtgagcccaccacagctcaacggccaggagcagacaggtgaacccaccacagctcacctgtggactgggaccaggcgaggtcccctctgcggctgctcagccccc

SEQ ID NO: 342748 - DNA, 369 bp, Homo sapiens; identical to SEQ ID NO: 335416
  chr16:88700843-88701212
  hypo

SEQ ID NO: 342749 - DNA, 236 bp, Homo sapiens
  chr16:88757481-88757717
  hypo
cggtgctgaggggagcccttgggcctgcggcagatgaggtgagacttgagccatcaagcagcgaggcagcgtgcgtgtgagtctgcaggccacaggcgtgttcgtgcgtgtgtccatgggcgtatgcgtgtgggaagtcgcagtagctgctctgaggtgacatggaggctgggcatcagcgggtaagtcccgggcaccaggagagggatctgtggggtccccggcatcgtcctgcc

SEQ ID NO: 342750 - DNA, 746 bp, Homo sapiens; identical to SEQ ID NO: 269814
  chr16:88791425-88792171
  hypo

SEQ ID NO: 342751 - DNA, 1383 bp, Homo sapiens
  chr16:88792758-88794141
  hypo
cgcggcgctgcagcagcaggaagaagaagcagacgctgtcccagatgatgccagcctcctccacaggcagcaggcagtcctggtctctgtccatcatctccttggctgcaaggcaggcaccggcaagggtcaggcccagggcccaggagcagggggcttccccacgccctcccccgccaccgtcctggccactcacggtcatagtagcccttgacggtgcatacaaggctgaagagctggatgacccagcagaagccggtctgcatctgctccacgaagacgcaggccaggagctgggggagagcagggtcagcggggccagcggggccccagggcggtgggtgcgggggggccggaggctcaccgacagcatgttcttggagatgatgacggtgacgttgtacagaatgaggcagtcccacagcacgaggcgggcccgtgtgtccctctgcagcagggccgtgccgaagagcagcaggtagaagcaggccagcaggtagcccagcccgaagatgctgatgcgggtggcccccgtgacaaacaccaccaccagcaccagccagaacaggtatcggaagacggccaccttcagcatgtcaaggtaggacctgccaggccggagcgtcagggcgggcgccccggccacccctcccagaaggttccccgtggagggtgacgtggaacccacctgcagtggataaagttgggcacggggttgggctccccccgcagcggctccaggcggtcggtgttgacgccagccatgcgctgccactcctctgtgcgctcagctgagaacacctgccactgctgggaggcgcacagcagcaggagaaagtcgcctgcaggacacaggagccgccgctgtgccacacggggacccacacgaggtgggcacggcgcataaatcccacctcccaccccaggcctgtcggcgtgcagccgctgggagcggacacacgtctgcctgggtgagtggccgggtgtccctgggggagccccggtgtgagggcatctgcacaagggctgccgtgcacacaggctgaggtctgcgtgcgtgcgtgcgaggtcagggcctgcaggccgccatgtgcctgaccacacctccgcccgtgcacgcctgtgtgcacacttgtgagcagatttgggggcgtgaatgtactctgagggtcctctgcagaggcgggggtggtggggggcactcactgatgaggttggtggagttgggggcccggaagaaatcaggcaggtacagccacttgatgagtgcggagttcatggggacggcccggctccagcgccagggataatctgggggaaggggtgtcatgtcaggaagggccgggcctgcctggggcctgagacacccggtccccacccgtt

SEQ ID NO: 342752 - DNA, 423 bp, Homo sapiens
  chr16:88797397-88797820
  hypo
ccctgagccggccacgtgcacaaatgtgactccccatctcagaccgcagggtgctgtgtgccttgagcagacctgcagcaccaggacagccacgcaaatccagtctcacggcgtcagcaacgctaccggcctccctccggaacttcccaagagacaggagaggcgggggcggcttagacccaagacaagagactagagcaaacatcagaccagatcccgtctgaaaaccaaatggccacaaagaagggtgctgaggccggggctgtttgaatgcagaggacacgtttgacgatggcactgccaggagacgggaccacgggtgtggggctgtgggctcagacaccctcacccaggagacgcatgctcgaggcagcacttgggtgtgaggcatcacggccgacccgcacggggcccggagaggac

SEQ ID NO: 342753 - DNA, 303 bp, Homo sapiens
  chr16:88800059-88800362
  hypo
cgccgcaggaacacctgcacgcgtgagaggacgtccgagaagccggctgccagctccagcagccgctcagccaccaggccccacttggctgcccctgtgatggtgtgagggtcagtgcggggcacaaacggggattcccgggtcccctgtgaggaagaggctctggagcccagaggggactctgccaacgccccccgagctgggacatggcacagcagactgggtggcagctgtgctctgcccgcccaacccaccttcaggcacctgcgtggcctggtggggagtggccacgcccagcccctc

SEQ ID NO: 342754 - DNA, 978 bp, Homo sapiens
  chr16:88802345-88803323
  hypo
cgtgccaacacaaggttgtctgtttattcagtcaacaaacgctcactgagaagctactctgggctggctctgggtgggcagaaggggacagacagacacatctgccttcttggcgctgccactcccccgggcaagtggacattgaacaggacgacaaccctgatgggtctgcgcacccaggcacccccggatgtggtggtgcacactcaccatggcaccaaggtccagacaggggtagcgggtgtgctccagccccagctggcgcaggctgacggggcccagggtggtgggcagctcagggcgcaggtccatggcccacacgtagcgtaggcagcacagcgtcatcccatacagcaggatgcagggcgagcacagcatggccagttggtggcggctgcgcaccgtccagatgaggcaggcccagagcagcagtacgaaggtcagccagctgtggtaggtgatgctccatacctgcgcggcagagagggctgcacagctgcccagcgcaccccacccaggcgatgccccacacctgcgcggcagagggggctgcacagctgcccagcgcaccccacccaggcgatgccccacacctgcgcggcagagggggctgcacagctgcccagcgcaccccacccaggcgatgccccacacctgcgcggcagagggggccgcccaccccaacccccacagccgcctaccatcatggcaatgagcgcgcacacatagctctggtccatgatgaggtggcccaggctgtggagcggagacgcctccctgggctcagcccgcttgggccgcactgcaggtggggacagcggtcagcttcggcaggttgatctgcaggcctccccaccctgactatgccctaaaatctgggccctgggcaagcacacagcaggagagacaggcccccggtgggctatgggcagaacacgagggctccggcaattgggctgacaccgtccctgagcgtca

SEQ ID NO: 342755 - DNA, 844 bp, Homo sapiens
  chr16:88805817-88806661
  hypo
cggctgtcgtcagatgccctggctctggcctggctgccaccggcccagtgtccccatctgtgactcgggggctctcctggtggctgaggcgccaggtgcccgggctgagaccgcaggctgtggggctggacgataggccccaccccagctctgacagtctccgtgctctgcaggccgaggcaagtcacagcctctcggagcctattccccttctgtcaaatgggatgggggcttgacgggacagatgaaccagaccagtcctgtcctcacaggcctccagggctgcaggggctgctgggaggctccgaggccagggtaacagggagatcagggcaggagaggcccaggccctgagcccacccctctcagagaccacacagcagctgggggcgaggctggatcagaacgcagggcgccatcgctcaccccacccacagcctggccctggccctggccctgggaaatcttctgagcagagccgtgaaaaatgagcatttctgggagtggaaagaacagaggcagctgctgtgagagaacaggtgtgaggccaccgaggggcaggcccggccctgacttggggtatgaggccaccgaggggcaggcccggccctgacttggggtgtgaggccaccgaggggcaggcccggccctgacttgggccccacgtgccgcagccatgctgcagacgcccctcaccctcctctagcggccagcacccctcgggctggctggcacactccgtcgcatgcctgcaaacacgtgtgtgtgttgcccatatgtgggagtgagggtcgcccgggggccctgccaggccgggtcatggggcttctagatctttcggaac

SEQ ID NO: 342756 - DNA, 486 bp, Homo sapiens; identical to SEQ ID NO: 269830
  chr16:88826974-88827460
  hypo

SEQ ID NO: 342757 - DNA, 496 bp, Homo sapiens
  chr16:88883069-88883565
  hypo
tctcctgttacatccgccggcccacgctgtggctccctggctgttcagagccaccaccttccttcccacggcacggcgggcacccagcggctcccacgctgcagccgggtctggccctggaaagaggcttcagctgggccttttcgcccgcacagcaggagcccaggctgaagtctgcagctgccgaggggccttcttcccgaatcctgcgcggcagatccaggggctgtgggcagccacgcccagcccgtgtaaacaggtgagcgacggcccaggggcctcgaggctgggctcggccatctccactgtgctcggtgggctctgggcacccaggagcgacaccgcagacctgtgtgtggctcgtttttgccgactagagcgagggccgcacgtgtcccatctgaaggagctgtgaagacctgccctgctgggacccacatcagctgtgctgggaaacaggcctttgcggccactgcacacgcgggatggctgggcc

SEQ ID NO: 342758 - DNA, 219 bp, Homo sapiens
  chr16:88892602-88892821
  hypo
cgggcaggggcggcgtgtgcccaggtacaggcaggcaacaggggtggggcaggcaggggtggcatgtgcccgggctgcaggcagggaacaggggtggggcggacaggggcggcgtgtgtctgggtacaggcagggaacaggggtgcggcggacaggggtggcgtgtgtctgggtacaggcagggaacaggggtggggcgggcaggggcggcatgtgccc

SEQ ID NO: 342759 - DNA, 662 bp, Homo sapiens
  chr16:88898125-88898787
  hypo
cggtgaggccgagcacggggtgcgtggggaggagagcggtgaggccgagcacggggtgcgtggggaggagagcggtgaggccgagcacggggagcgtggggaggagggtggtgaggctgagcatggggtgcgtggaggctgagcacagggtgcgtggggaggagagcggtgaggatgagcacggggtgcatgggggaggtggccagtgaggggcgcacacaccctgggatggctgcaggcctggacctgctgcccggcagaccggtggacgctgactcacctggcctgcagtgacgtgccctggccaccatgcgagggcaggctccctcatccctccttcaaacgtggtctgcttcccacacagaaaggggccgttgctgccacctgggagagaggggcccttgtcaggccactgggaccagatgtccccaggccctccccctccctccccactgagtcactgagactggtcatagggacaaagggcccggccaaggcactctggctggagtgcatgatccgagcctcggggtggctctccaggggctcatctgagatgccgcggctgcaaagtctcctggagaaagtggggacatcatgcccactgaggaaatggaaacacaaccatacggtgtcagcaagactcagagaggtacactccc

SEQ ID NO: 342760 - DNA, 235 bp, Homo sapiens
  chr16:88910584-88910819
  hypo
cgggtgagcacagggcaggaagcacggaggctggggtgatgccaggaggccggggtgatgccaggtgtgatggcaccagcacagcaaatgcccacggcaaactccggaggtgagtggcagcggcggtgttcactgaaaacttcttcaaattttacagtgtgtattgttggaaaaaagtgcttttaaacaggcagtgggccaggactttgctctagaaggagaaggggagggcacc

SEQ ID NO: 342761 - DNA, 527 bp, Homo sapiens; identical to SEQ ID NO: 269846
  chr16:88943135-88943662
  hypo

SEQ ID NO: 342762 - DNA, 842 bp, Homo sapiens
  chr16:88945516-88946358
  hypo
ctgataaagcacagtgtgggcggggatggcgtgcctgctgcaggatgcccgtgacaactgtgctgatgccacgtggaggctcagaatcctcatgggggtggcgtgggaccgcacgggagccgaggcaggggatgggtgtcagcgtggccgggtggccctacctcgctggagtcctcctgctggttgatgaccgtcagggcgtcctcggaggcctgccgcttcgcctcggccagggcccgctccatcttggcacgctccgtggtgatgagctcgtgcgctttgcgctccgcgtccgacacggctttctgcagctccgacatggcctgccgcttcacctcattcacggcctcttctgcaaaggacatgggcagggctggcggtcacatgggccatcccagatgggtctctggacttcctacgcgtggccacaacctggggacaggggctgtgtgcagctgaacacacgtaccatctgtgcacacaaaggcacatgttgatggggctgtaggcagctgaacacacgtagcatctgtgcacacacagacacacgttgatggccctcatgcctgtgcagacaagtgcatgcaaataaacacaggcatcccaggcatgtgtgtgcaaagctgggtcacgtggtgtcacaagtcaaagcttgcactctaccgcagcggctccccaggcactgcacccctgcagggcaagggcgaggcccaccccagggcctggtcagccaggggcgcacccggaatctgcattcctaacgcgagccgggggagctgctgctgacctgaagcacttggataactctgccgttccgccttcacctctggccccacccagac

SEQ ID NO: 342763 - DNA, 292 bp, Homo sapiens
  chr16:88948339-88948631
  hypo
cgggccgtccccgaacacgtcctgcctcaaagaggcctcggcactgcttttgcccacacttcttgcaagactcaggatagactctgggaagagccagtgagcagaaagtaagtggagggaagcaaggcccgccatgagggttttaggaatcctcctccctgggcctctcgagatgcctgggctgcgctgacagctgggaggaggggggctcaggtgaaggacccagccgctgcgcagggacggcgcaggccacacaggagggcactgagctcaggggcgcccacacagccct

SEQ ID NO: 342764 - DNA, 436 bp, Homo sapiens
  chr16:88952189-88952625
  hypo
cgcccgtgcagccaccaagcctgctggccctagtacacctcgccacgctccctcagcccgagagagccggccgggctggctgcagccccagaggaggttccctctcttacccagaggggagcagggtgagccgcgtgtccacggcacccccagcccagatccccggagcccacaggtacctgtcgggcgtcctcctcttgccgttctcgttgacttccagtagcagctctgaggagtcgatgggggaggaggcgctggcgtccagcaggagctgctcatgctgggccaagtactgggcgggcgtctgcttggccaggcgtgcacagtgcaggagctcccgctgcagcaagggcaggtttgcctgtggggtggggaaggagggcctgggtagcatgcaggggtgcacagccctgctcaggtccgagcagagggggcc

SEQ ID NO: 342765 - DNA, 967 bp, Homo sapiens
  chr16:88956108-88957075
  hypo
cgacaccccgcgattcctcctcctccagggacacttcaaatccctggacgacgccccgcgattcctcctcctccagggacgacgccacgcgattcctcctcctccagggacacttcaaatccctggacgatgccccgcgattcctcctcctccagggacacttcaaatccctggacgacgccccgcgattcctcctccttcagggacgacgccccgcgattcctcctcctccagggacgacgccgtgcgattcctcctcctccagggacgacgccccgtgattcctcctcctccaggggacgtttcaaatccctggacgatgccccgcgattcctcctcctccaggggacgtttcaaatccctggacgatgccccgcgattcctcctcctccaggggacgtttcaaatccctggacgatgccccgcgtgaatctagaacatgcctcacctccctgtagtccccgctacctgggaggctgaggtggaagattcccctgagcccgggagtgaggccccgttctttccgcgtgtccctccacgctgtctcctcaacagcctgaggatgattccattttgcagatacagaaaccgaagcacagaggaactggcctcacccaggggccaacagctgctaagtggcaggctcgggctcaagccagggagcatctggtctggtctgtcctctggacccccgaggggaggcctggcccagcagagatggagcccacagcagtacgggcagtgctcaggctgggcccgaaggtgtggccaggctggcagctcccaactaagctccacggaaccctgaccccaacacgtgctcggcagagaaggtcacatggtcagacacatttggggaacctttcctcagctcctgctagagatgtgcagccgtcttggggaaatggagacccgcagagatggcagtctgactccacggcactcccgtgcccgtcccgtctgtgtg

SEQ ID NO: 342766 - DNA, 619 bp, Homo sapiens; identical to SEQ ID NO: 269854
  chr16:88957369-88957988
  hypo

SEQ ID NO: 342767 - DNA, 274 bp, Homo sapiens
  chr16:88959987-88960261
  hypo
cgcagatgcccgtgcacacaggccagtgcatgttgaggacaagcaggtgacataaggaacagctgatgagcgcgctgcagggccgcctgttggccactgagacgtgactgcctggctggccctgctattggggtcagtgttccaggggcctggcagacatggggctgctatggaaagtcccagggccgggcctcaccccttttctcaggtgacagagctaaggccaagcctcttgcaaggcggccagcgcacccctcctgcgcctgggacaccc

SEQ ID NO: 342768 - DNA, 629 bp, Homo sapiens; identical to SEQ ID NO: 269861
  chr16:88966223-88966852
  hypo

SEQ ID NO: 342769 - DNA, 155 bp, Homo sapiens
  chr16:88970443-88970598
  hypo
ggccgtcatgccacggcgcaaggagtcaccacagccgtcacccaacaagggctcatggccaccacctgcgtgctcacggccaccacctgcgtgctcgtgacactctggatcccgaagctagagcagacagtgccctgccggcgccctgagcagtc

SEQ ID NO: 342770 - DNA, 199 bp, Homo sapiens; identical to SEQ ID NO: 269867
  chr16:88993193-88993392
  hypo

SEQ ID NO: 342771 - DNA, 559 bp, Homo sapiens
  chr16:88994153-88994712
  hypo
cgtccgcccgtgcggacacccgggagccaacactgacccgaagacaggtcagccagacttcccacctgctccctcaggaggtgggatccggtcccctcctgctgggctgcacgggccacgatggaaaggcgcctcgtgacacgctgcggtcagctcagaaaagccgcagatgctgacacgggcaaccctgcccagtgtggggcgtcctctgaagtgggagccgcagggagggcctcacggaggcctctgtccacaggcagcggctcccggcacccaccgctgctgaccgagcccctggcacccccaagccgagcctttgaaccccagcagggaaggccacctggccgagaccctggccaccacggggccatcactgtcccacggggctctgttccgactccttggcccgagggtctctgagcaccaccagggttgcctcacgcctctgagtttggggtggtttgttcggcagcactggggcccggggcagcttcttgcccggcgtgtggcacagctgtccttgttgggggcgtttctgggatcctgtggtttcggggac

SEQ ID NO: 342772 - DNA, 1701 bp, Homo sapiens; identical to SEQ ID NO: 335417
  chr16:89006898-89008599
  hypo

SEQ ID NO: 342773 - DNA, 152 bp, Homo sapiens
  chr16:89028925-89029077
  hypo
cgtgagtcccgaaggagaggcccagggcccaggccactctgcaccctgagggcacgtggtggggccagatcaccaaagggcacatttgggaggactgaacacagatgccgagtcccctggaccacgtttcggggggagacagccacgtagcc

SEQ ID NO: 342774 - DNA, 263 bp, Homo sapiens
  chr16:89072550-89072813
  hypo
aggcaggagtccaccgccagtgccaaccaggggcctcggggcaccgctccaggagcaaccccagagtgcatccacctcctcccgggtgggccacgccttgaggtgctgacggcgccccaaactccactccccggaatcggcccaggctcagccacatcggcccgggctcctacagaagccgacctggagacgaggaactgacctggagacgaggaactgacctggagacaaggaactgactgcaagtggaccatttgcagggc

SEQ ID NO: 342775 - DNA, 380 bp, Homo sapiens
  chr16:89109400-89109780
  hypo
cgtcttggaactcatctaacccaggtggcaaacaggggccgcccgactgccagggagaattgacgagcagtggcgtcctggaattcccgtgaggtggcgggagaagattctatgattgatccgtcatgcctgccgtggctcaggatgggaccggcctctcaagctacagatcaagaaactgagaagggagtagcctaaagtcaccatgagagtggccaggtctgggccggcctggcctccaccccgcagagaccatctcagctctgctcgctcagcctcgtccccgcctctgacatccttccattcccgctcatggccctctctgtctgccaccaccctccccgccatgggtgcttaaagcccccggcagctgccctccc

SEQ ID NO: 342776 - DNA, 32 bp, Homo sapiens; identical to SEQ ID NO: 269887
  chr16:89119942-89119974
  hypo

SEQ ID NO: 342777 - DNA, 669 bp, Homo sapiens
  chr16:89120181-89120850
  hypo
tgcagagagaaggccgggcgggtgctggggggcccatctccccgagccttgcaaatagtgcagtgcagggagaaggccgggcgggtgctggggggcccgtctccctgtgactcgtggacggtgcggtgcagggagaagggcgggcaggtgctggaggactgagtgaggcccctccaggatggctccctgcccctccatgcgctgggtcctcgggccaggacaggttgcatctgggtcaccagccccctcacacccgctcgcctgaaggcggccgaccctggccactggtcgcctggtggcagaagcctcttctgggcattttcaggcaccgcaatgctcttcacagcgttaactttttttttatccaaccaaggacaacctcagcttcagaaagccctggaatgccccacaatggacaagcaaggaacaccctccgggacggaccgcgagactcggccctgagatgcctcaataccctggacaccccagaacctcagattgcgtggctggggctcctgcggccaccctgctccccagaacctcgtcgtcttcccggtgccctgcggcaggaacacagggctggagccgacccccagggcatggctgggagctgcgggagtgaacggggagttaacccccagggcatggctgggagctgcgggagtgaac

SEQ ID NO: 342778 - DNA, 391 bp, Homo sapiens
  chr16:89141710-89142101
  hypo
cgggtacctgccgtagctatgtccagcccaggtcactgagtgtgtaaacacacctcacgtccgcgtcgagaaggcgtcaccagtgcctgctgaacaaagaaggtctggcccagtgtggctgcagccaggaggccaaggagaccagtgagagcaccgccctcgccactgacgctcttgctgggctcattgttgtgctgggcccagtggagcaaaagacaggcctccagccggggcacctcccaacaactctgcacccttgattgaaatgcaatgtctgcggctgacggccacgtgactgcaacccaccctcccggctgccgattaattttaccttttgtgctgccagctgcagtgggttcatggtgagagctgagttgatgcatgcgagtgc

SEQ ID NO: 342779 - DNA, 315 bp, Homo sapiens
  chr16:89169100-89169415
  hypo
cgcgctgctctgtcctctctgggtgggagccacctgtgtgatgatgcctgagttcagccctcagcaggtgagttggggtcagggctctcggttgcaccctcagactaggcgcctttcccctgtcggggccagggctctcagccgcgccctcagcctaagcgcctttcgctggttggggtcagggctctcggccgcgccctcagactaggcatcttttcctggtgtgcagtcgcccctatccacaggggacgtgccaatgccgagaccctgggtagcatggaaccctgtacctacgatgctttttgctatacatac

SEQ ID NO: 342780 - DNA, 542 bp, Homo sapiens
  chr16:89169538-89170080
  hypo
cggtactgtgctcgtctgttgtgagactgcagtgggccacgcgtcattgaaaccgtgaatagtgagactggatgagcggaggtgactgtacaggccctgctgcccgcgagctcctgcggctgcggcgaatgctcacgcgcttggtttaaaataatgcgagtttgttcttacatgcttggaggccaggattctgagacgagtcttgcggagctgatgctgggtgtggtagggctgctccgtcaggaggctccagggcaaagtccgttcctgcctcttgcagctctggaggccgcctgtgcccttggctccagctgcttcacgtccagctctgcttctgcaggcacacggccttctctccgtagtcagggctccctcggcttccctttgtgcagcctatgcggatattccaagatcatctcccatcttgaggtccttcgcttcatccacctgcagttcccaccactgcgagaggtgacacattcggggtgtagggcgtagggcgtgaccctttgagctatgatgtggccactgtggcagccctc

SEQ ID NO: 342781 - DNA, 396 bp, Homo sapiens; identical to SEQ ID NO: 335418
  chr16:89189500-89189896
  hypo

SEQ ID NO: 342782 - DNA, 43 bp, Homo sapiens
  chr16:89189926-89189969
  hypo
ccgatccactcttgtctgtgccgaggcgtgggtcccggccagc

SEQ ID NO: 342783 - DNA, 808 bp, Homo sapiens
  chr16:89202519-89203327
  hypo
cgttttcttctttgaaagcacaggaaccacagccctgtggattttgcgagtcgcggggctcccggagccgctgggagggcagccgtgtgagatgcggggctgcgagcgtggaaacactcgcagtcgccagtgctgaggcatgtttcagccggggcggaatcacatgcattaattattgtacagagatgtctttagtagaaaatgattttgaaattcagtttaatttcattgtaatgtgctgcaaacaggaagggagtatgtgtgtttaattggctctcgggggtaaggcctggaagccgcatgtctttgtcacaggccattagcgatgctgctgcataatgagagcctgcaatcagctcacagctgccgctcctgccgggagagcatgatattaaatagaaatcaggagaaattaaacttaaccctttccctggccagcccctcctgccacacggattctggcataagccggcgggcacaggggacagccagggatggctggacacagctgaggatggccgaggccggcctgcagctccccaacggcctcctccgggtcaggatgagaggagaggttgccagctttgatgccagccgctcctgcctcccccacctgcctctgtgcctacagcccgcttctgcctcaagatcacacagcgggcttgtgaggccaggggtctccgctgctgctcaaggagatggcaaaggtctgtttcaggtaactcctctgacggccacaacgatgtcttcagacgtcaaaggtctgtctcaggtaactcctctgacggccacaacgatgtcttcagac

SEQ ID NO: 342784 - DNA, 459 bp, Homo sapiens
  chr16:89216581-89217040
  hypo
cgcaccctcctgcctccaccctgacttgccgtctcctgagcactgaagatatttttggcttgtccgatgtgactccacagacagcagaaacgcttgcttgatcagggcagcatcagggcaccacacatgcctgggcttgcacaacacagcgggagcactgccactcagcagcagctgctgctttcattaaacagttaccttgagaagaaaagataggtgtcgagggctgagagctgtgctagagtttcagggtccgagttggcaggaactgaagtcccgatgctcctcagcccttggctgtcctcagggctgccctctgcgtggggacaccaggccgcccctgcccagggacaccaggccgcctgctcctgctctgtgcatctctcacatcaggctcctcacccagcattgtttgggctatgacagtggctgtgacaagaccctaagacgggaagctgc

SEQ ID NO: 342785 - DNA, 364 bp, Homo sapiens
  chr16:89219313-89219677
  hypo
cgatttggaaatgtggaggtcgaggttgacagcgacaccgaggtcgaagccagttgcccctggagagcgagagactgggctgggccgactcccacctctgtcgcgagaggcctacgggcaggggcaggtgggcagggggactgtgctgggtctctggccgcgtctggacggcaggcgacactttctccacaaaaagcgtcaagaaaccacgacacttggtttctggacttttccgcggaacagtaaccagaacaatcgccatgaaggttcgtttctgtcatggctcagtgcagcctggacgccctggaccagcccctcctgcgcctgggccacggccgctgccttcagggcatcactggtgggc

SEQ ID NO: 342786 - DNA, 766 bp, Homo sapiens; identical to SEQ ID NO: 269912
  chr16:89220238-89221004
  hypo

SEQ ID NO: 342787 - DNA, 378 bp, Homo sapiens
  chr16:89254530-89254908
  hypo
cgtcagcggagtggatgtgggacgcctggaagtggaggacagggacctgccaggctccccaaactgggtggccaggttcaccatcctggaaggcgaccccgatgggcagttcaccatccgcacggaccccaagaccaacgagggtgttctgtccattgtgaaggtgagcggcccccggctggcacacagatgccggcagacgcagatgccgacacacacagatgcccacacacagatgccggcacacacagatgcccacacacagatgccggcacacacacatgccggcacacacagatgcccacacacagatgccggcacacacacatgccggcacacacagatgcccacacacagatgccggcacacacagatgcc

SEQ ID NO: 342788 - DNA, 336 bp, Homo sapiens
  chr16:89260413-89260749
  hypo
cggcgcctgcatgcacttatgggccgtcccagagcaccgcagaggaagatggtgtgcgggcgggagtgtggaagccccgctgccaccgtccaaactgggccctcagcctccacccgcgacgcgggtctttgcacagatggagtggcgatggccacagacccatccactgccccgtgtccaccatggagggggtgggggagccccgggagcatcccctgggcttcggtggctgtcagcggaatcagggcctccatagaagaccctctggacacagcgttaatgattccctgccatccacaggatgaatgtgcacacggggaatctggggtgtggggc

SEQ ID NO: 342789 - DNA, 102 bp, Homo sapiens; identical to SEQ ID NO: 225175
  chr16:89268346-89268448
  hypo

SEQ ID NO: 342790 - DNA, 210 bp, Homo sapiens
  chr16:89354795-89355005
  hypo
cggccttgagggtgggcaaggcgaaaactcgctttcctgtgccccacatcatggaaccggctagctacggggaaacaaagctacagaaccacccagatgccaggacaggccggatgtgtgaagaacggggggatgccaaccttgtagtgcccgttgttggcagcgtcgtgcaaaggcgtgtcgtcatctaggcccttggtgttcacctcc

SEQ ID NO: 342791 - DNA, 265 bp, Homo sapiens
  chr16:89357476-89357741
  hypo
cgctcggagagggggtagccggctcggattccagacagccccatgccaaacagcagcccggccttccgggtgacaggctccttcttaatcctcttccgctcagggccctgcttctctgtgaggcgggcgagggagagagggaggagagatttcatgccatggtgtcctccaaagctaggtccttacctaatgttacggagccccctgcgtccacctgacagctgacagagcagaaaggaaggtctgtgtatggggaaagcacagc

SEQ ID NO: 342792 - DNA, 485 bp, Homo sapiens
  chr16:89409913-89410398
  hypo
cgagcaaatgagacagagctcgaggtgggctggaggcatgtgagggtgcacgcgaaacacagtgcctcctcttggagttgccagaattcacctcgttcagaacctcaccccagtcagaaaacacaaggcagcaactggccggaacttggtcagtcacatccataaaccaccaattaccttcacagaccacgactaacaggtttattacagatgagtcacagctcatgttttcaaggaagggtctccaactgagcagtcaccagtgcagcctgcgtcagggcgcgcctccctccagcggtccccgcgtcgcccatgtctgacacagtttatgcttcgcaggcggtaaggctccgctcctcactcccatggaccaacagagtagggaaaacgaaggcacgttggaaactacggatcacgggctgttttgggtgtgggaaatccacccacccacactcacggccagctctgaccgactgaacccaggg

SEQ ID NO: 342793 - DNA, 107 bp, Homo sapiens
  chr16:89442354-89442461
  hypo
cgtgacacgccgcagcctgtgctctgctgtggatgcttttcaaaatcgataaatccagcagaagggccatcacaaaaaaagaacaggacatccgtgaagccatcacc

SEQ ID NO: 342794 - DNA, 254 bp, Homo sapiens
  chr16:89445385-89445639
  hypo
cggcacactggggagcgtcaagacgcctcctgcagtcgtagacaagccgggctgaggcattcactgtcgcttagaactgaaaacttagggtcgtccatgcccagaacgtcggcagtgcggaccagccccaggaaggcctttctcactggcttctagaaggtggggccggcccccatgcctgccccggcacacggccattctgggagctgctggcagccggcgggctagaaggggtgcacaccgtctgtatgtgc

SEQ ID NO: 342795 - DNA, 58 bp, Homo sapiens
  chr16:89446081-89446139
  hypo
cgcgagcgccccaagcagcacggaagagctccgtgcagtgcacggatttgcgaagaac

SEQ ID NO: 342796 - DNA, 494 bp, Homo sapiens
  chr16:89468462-89468956
  hypo
cggcagccccgaaagacccccacaccaagtttcactctctgtccatggacctctttaatggaaatcctgacttttccataaggcactgaatctgtgtaacttttagagtaaggaggacgacctacagttcactgcatgaaagcacagcccttccaacaaaggcaggcgaaatgtggaaccaattatatctgggtgcctacacgtgacgtacgccagttctttgtagaaagaacgaggcttgtctcagcgatactaatgtacagttcacatgaactcctaaccttagccagccacaataaggtatctgggattgagcgcttatttaaatcggtaggcacatcaatttaaatttaggtagtagctcagcctgtacctaacacatgaggaagccgaggcgggaagatcggttgactccaagagttcaagagcatcctgggaatgacagggagaccccgcctctagaaaaacatttaaaaattgctgcgtatggtgcc

SEQ ID NO: 342797 - DNA, 66 bp, Homo sapiens
  chr16:89504486-89504552
  hypo
ggccaggagggcaccgcaagcttggacacagcaggggcactggagatgggtccacgaaccgcgtgc

SEQ ID NO: 342798 - DNA, 149 bp, Homo sapiens
  chr16:89558602-89558751
  hypo
cgggctccacccacaactagtcacgccattggatgaggggtgagcgcctgataaaaacagccggcgtatgcgctgatgtgcgttcacgaagaggtgatccaagtgtttccatatttgcctcactggacgaagtatttggtaaaattgac

SEQ ID NO: 342799 - DNA, 132 bp, Homo sapiens
  chr16:89575952-89576084
  hypo
cggccataaaacatatttaaatgggaaaatgtttatcttgaaaggagaactctgaaagtatatacttgttaactggtttggtacctggaaatgttctacaaggagccactctctggtgacagcaggagcccc

SEQ ID NO: 342800 - DNA, 64 bp, Homo sapiens
  chr16:89577046-89577110
  hypo
cgcctcagctacttgggaggctgatctttttttattttagagacgggatctcgccctgttgcac

SEQ ID NO: 342801 - DNA, 97 bp, Homo sapiens
  chr16:89647563-89647660
  hypo
cgtcacccgtcacacggaacattccgtctcccgctgacacggaatatctgatcacccatcacatggaacatcccatcacccactcacacggaacatc

SEQ ID NO: 342802 - DNA, 560 bp, Homo sapiens
  chr16:89650291-89650851
  hypo
cggcagctacacagccccgggggtacacagacacctcctctcaggccccgctgggtggggtcagccagcctggggcctctggtcccccacggtggggtcaggccccacctggccaagcctggagcccgggcgtccccctgccaggtgatcgccgaggacatctcggggaacaacggctacgtggagctctccttccgggccaggaagctggacgacaaggtgagtgcaggtgccgggcacgcctggctcaggctgaggtccgggaaccggttcgaaaacccggtccctgcccagcgctgacctcgcgtggctatgtcccgtgtgagacgtgtgcggagtgtgcctggggctgggcgtgctgccgtcacggtcgccatcatcactgtcaccgccattagctctcccgcccctcctggcagctgggctggggctggggcagctccctcctgtggggaccactcatgaccctgctcagggatggggaaataggcccagcacccccgaggccactgtcgtgacaggaggaactggaacagcgcgcggttctgcgggctcgtcac

SEQ ID NO: 342803 - DNA, 310 bp, Homo sapiens
  chr16:89713336-89713646
  hypo
cgcgggtggacatctttccacacctctgcatgcttgtctgccatccgagcctccccacaaggagccaggtgcctgcaggaggcccccgccgccctgcccaccctacctgtcagggtcctggcagggacccagcacagaggatgcttggtgacgtcagggagcaaccacaggtatgcagagacagcacgtcagcctgtgagccacccctcccgatgagctgcccacacacgctccttgtccccaggccacagccccaagggtaggggccacataccgatgtatggacgtccaggttctgcacctgctgctc

SEQ ID NO: 342804 - DNA, 905 bp, Homo sapiens
  chr16:89763790-89764695
  hypo
cgctgtagccacaagcgccgctgggcgtcgccaagcagcacacgcagcgagtggcctggacggcaggcgggcagggctgcacagtgggcagcatgcagctggcgacaggtgtcgcagcagagggtgggcagggcgccaggggacaggcagctgtgtgcctggtagcctgggggctccgagacagacctataggctgaggctggtaccccctctgcccgaatacgcctcgggctggccgctgcagagctttcaggggtggccaggtccccaggcctactcagctcacggcgcagagagaggaaggagaaggcggaaggttcaggttccagcccctcctccaaggccccatatggtgggctgctggcctgcggcagctcctcagctgggggctcccaggcccggcccccagtgccccacagtttggcactctgctcccagagtggtggcctgtaggccagctccgccgggggcgagtcagggcctggtgacggctccccatacaggctggcgtcctccgacccctcgtcttcctgcaagtcccggtataagtccagtggggccctgtaagcagcaggggagcctcgggggggcaggggtggcggctcctcatcctgggccagccgctgctgcagccaggccacacaggaggccacgtccccgctggcacgccgtgcctgcagcagctcctcagctggcagcacactggtgcccagctgggccagcacctcacccaggatctcacactccagccggagggcgaagcagcccagggccacctgcaccagctggcaggcggggggcagggcggtcaccatgagccgatggctgtctctgcgtacgtagcccatcttctggaagctcttcaggaggaggtcgtctgagagcacacccttcagcacgtgcac

SEQ ID NO: 342805 - DNA, 170 bp, Homo sapiens
  chr16:89770184-89770354
  hypo
cggactaacacaccctcagaacccagccactagagtgagaaggccacggccgtgtgcagagcttttggcctgcaacttcgacctgcgactcacattcacctgcagcctattcttgggacttttttggaaatagtttttccagacaaaaatcaagatgagtttgttctggg

SEQ ID NO: 342806 - DNA, 311 bp, Homo sapiens
  chr16:89871398-89871709
  hypo
gcgccactgtactccagcctgggcgacagaaggaagcagctgcggtcactctatgggaaaggtgaatggaaacacttaaactcatgtcaaggccgacttactagtatttccacatcagtcaagtaaaatgcaaccccacaacaggctgagactgggagtctgtcatgccaggttcccacggccacggagagacaggctgttctgcctcgcagagctcttgagagcagaaggcattatcacagatcaaaatgagttttacccaagaacccgcatcttgtcatgaacgcaccagaaagcatggccctggcgac

SEQ ID NO: 342807 - DNA, 317 bp, Homo sapiens; identical to SEQ ID NO: 269984
  chr16:89884022-89884339
  hypo

SEQ ID NO: 342808 - DNA, 1732 bp, Homo sapiens
  chr16:89899939-89901671
  hypo
cgccctgctgggctcaggggcaggttcagctcaggcctacggcctgctgggcttgagaagcttcgcctttgtgcctcggtttccttctccgtgaaatgggaggtgcagcgtggtgctaacgtctgtgcagccctgggcacgcctggctccggaagcactggccagtggaggtggcagcaagggatctgcacctgtgcactcgctggacctgccttggggagcagcacgtgtgggtccaggctgcgaatcccgaccggattctcagggaggggttctgcaaggtgcacccggtgggggctgggagctcctccggggcgtgtttccctgtgacgtaaaatgacctctatccctgagccctcccatgtagaaagcgggaaggaggctggccgctgtgtgtgggtgtgggtgtgagctgggtgtgtctctgtgtgagctggggtttgtttgtagatggcattcccgatatagtctcacctctgagcaagggttacctcacaggaaggcagtcctgcagcaagactcttctctttacggagacatctgtgaacctgcctgcgctcgcggttggccgtcgtagaagcatggataagcatagcccgtgtgaatctgtgaacctgcctgcgctcgcggttggccgtcgtagaagcctggataagcatagcccgtgtgaatctgtgaacctgcctgtgctcacggttggccgtcgtagaagcatggataagcatagcccgtgtgaatctgtgaacctgcccgcgctcgcggttggccgtcgtagaaggccccataagcatagcccgtgtgaatctgtgaacctgcctgtgctcacggttggccgtcgtagaagcctggataagcatagcccgtgtgaatctgtgaacctgcccgcactcgcggttggccatcgtagaagcctggataagcatagcccgtgtgaatctgtgaacctgcccgcactcgcggttggccatcgtagaagtgtggataagcatagcccatgtgaatctgtgaacctgcccgcattcgcggttggccgtcgtagaaggccccataagcatagcccgtgtgaatctgtgaacctgcccgcactcgcggttggccgttgtagaagcctggataagcatagcccgtgtgaatctgtgaacctgcccgcactcgcggttggccgtcgtagaagcctggataagcatagcccgtgtgaatctgtgaacctgcccgcactcgcggttggccatcgtagaagtgtggataagcatagcccatgtgaatctgtgaacctgcccgcattcgcggttggccgtcgtagaaggccccataagcatagcccgtgtgaatctgtgaacctgcccgcactcgcagctggccgtcgtagaaggccccacaagcatagcccgtgtgaatctgtgaacctgcccgcactcgcggctggccgtcgtagaaggccccataagcatagcccgggtgaatctgtgaacctgcccgcactcgcggttggccgtcgtagaagcgtggataagcatagcccgtgtgaatctgtgaacctgcccgcactcgcagttggccgtcgtagaagcctagataagcatagcccgtgtgaatctgtgaacctgcccgcactcacggttggccgtcgtagaagcgtggataagcatagcccgtgtgaatctgtgaacctgcctgcgctcgcggttggccgtcttagaagcgtggataagcatagcccgtgtgatttttc

SEQ ID NO: 342809 - DNA, 179 bp, Homo sapiens
  chr16:89947451-89947630
  hypo
cgtctatactgccatggattttctcaacgggcgtaagttgctcctgacttgtctcagcgggcgtttaagatgctcctgaatcgtatccttgtcatgtgggagcctccattggagagaaagccgactgaccggcaagcacagacctgccctgtgctttcttctcttcagcaaccgcagcc

SEQ ID NO: 342810 - DNA, 1553 bp, Homo sapiens
  chr16:89971731-89973284
  hypo
cgggtgcctcgggctggagtggtgccttcgggtcttgcagtgtttccacatgagctgtgagatgatgacgagtctctcacagcagcatcttgggagtaaagaaatctggcagagacgagaaagagtctcctgtcctgtgtgtgaacacttcggaggctcatgccctaatatgctgcaactgacaggcatccccttgctgttcttgtctcgtttgtctgcgcccttggccctgtgctagttctgtgcatcagcaccgtggctctgtgcagtggtgtggccaggctcaggaccgcctgggagtggtgcccatttgcatctccacagtgaagtctgtgtgccgcggacatgaggtgtgcccgggggtgcccaagaggcgctggtgcccccagccgctggcagtcatgggcccgtccgcgtgtctgctgtccccactggactggacattctcatggacaggagcattttgttccctgtactgctctccaagagcgatttccagcagggaccagtgcctgtgcctgtagccgtagcagtgacgatggtgacacacccaggtgtcccttcatggagatgaactcagtgacttcccacaagaagccactggctacggctctcatcgttcttgttctttggatgaagaggctgagtcactggccatgtggctgggattggtccccagaggctccccagccgcaggccagggaccagccatggtgcctctgctcgagagtaaagtgtacagtttttgcagccaccagagatgcagcgagatgcctcgtgctgggtgggggtgggggccgaggctccatggcggttaccatttcatttgctgtgctttatctgctgtgccttgtttctccccggccctaggcggaaggtgctctaccagcgtgcacccaggaatatccaccgccatgtgatcctctctgagatcaaggaagccgtcgctgccctgcccccggtaagggagaaaggctgaaatgggagctctgtgtaagccggtcacatgcacgtcccttctgctccgggcggtccacatgcaggcgtgcgtggtgcgggctccctcagcagcccagccccgccacggcaggggcagggtctagtgcagagggctcctcctttcctggcagcccgggttcggatgcttgttgttttgagagagaaatcctttggggctcagagcacaagctgagtcgtcaccgtggtgagctgctccatccgtggtcttgtgagcgcgtggtgcggctgctgggggattctctgtagtcgtggggtgtagtcctgctctgacgcctcctgtgctggaggtgccgtttctgtctcaaaacctaaggagtttgtactgttgttaagggataagatagaacgagtgagaaaaccagcaagtcagagggtcgcaggaccgtggaccgtccactggggacagcttagtgcctcctggtttaacttcagctgctctgcgggcccttatgaccggcatggctggctttgtctggggctgtgagcttctgactctcctcagtagagtggcagcacgtggcactgtgcaaccc

SEQ ID NO: 342811 - DNA, 470 bp, Homo sapiens
  chr16:90066554-90067024
  hypo
cgacttttcccgacacggcaagaccctggtggagaagctgtacggcgaggcaagcgcccagctccttgatgacgaggtccggcacctcgtcagtgccacctacaggtgcaccctggacctgctgacacggtgccgggagcatgtggagaaggtgagtgtggcctctgcccagacaggtcgtgggtcccatgttgagtcacggtcatgccacacccgaaggccacacccgtccttcagcttgcttaggtttgggctgtgatcatgtcctcagagccgtctgacaggtgggccgttgtttccaggtgggccagcggctcctggagaaggaagtactggagaaggcagacatggtggagctgctgggcccccggcccttctcggagaagtctacctatgaggagtttgtagagggcgtgggcagcctggaggaggacacatcccttcccgaggggctgaagggttggaaccgc

SEQ ID NO: 342812 - DNA, 307 bp, Homo sapiens; identical to SEQ ID NO: 335424
  chr17:523549-523856
  hypo

SEQ ID NO: 342813 - DNA, 483 bp, Homo sapiens; identical to SEQ ID NO: 335425
  chr17:576352-576835
  hypo

SEQ ID NO: 342814 - DNA, 138 bp, Homo sapiens
  chr17:597509-597647
  hypo
gacctgctctgctgcggcaacctgtaacctattaatacgggatgggggagaacgccgacattcctgcagactgtcgaattctgggtctgactctgtaataccgctagtttgcaagagtccagaaccacaggttgaaac

SEQ ID NO: 342815 - DNA, 400 bp, Homo sapiens
  chr17:692558-692958
  hypo
cgtcagcagctctgaatcctaatgtcattgtgatccgtttcccttagattcccttagcctcagcgtgggtcacatgccccgcacacaaattcgcctcattacatttctgtctcttctcatcagaaatagggattaataggcttggctctaaacagactttcctcacagttggagcacgcctaaaatgtctcttacaccttgggaggtggaggggacagagagtaccattcatcagaaacaccccagccaccattaaaagtaaactaatagtggcacccgttgttgagacttgcctaaattgctgctcgcagctctttctcagtcacgccttgctagaatacgtttctgtgccagtgtgagagctacgtgctggggttctgtgatcagtacccgcttactc

SEQ ID NO: 342816 - DNA, 145 bp, Homo sapiens; identical to SEQ ID NO: 335426
  chr17:850237-850382
  hypo

SEQ ID NO: 342817 - DNA, 539 bp, Homo sapiens
  chr17:951725-952264
  hypo
cgttcagctccctgttgtagacggagccatcgcagcctgcgcctggatcacctcttgggccacggtcaagaagctcggcgcccagctgcgcctggatcacgtccggggccacggtcaagaagctcggcgcccagctgcgcctggatcacgtccggggccacggtcaagaagctcggcgcccagctgccgcctggatcacctccggggccacggtcaagaagctcggcgcccagctgcgcctggatcacgtccggggccacggtcaagaagctcggcgcccagctgcgcctggatcacgtccggggccacggtcaagaagctcggcgcccagctgtgcctggatcacgtctgcggccactgtcaagaagctcagcacgcccaacgcccgaggctcaacctcagtacgggtcagttaccgtctcccttcatttcatggtcacagaatctacccccaaaccagaccacttgcggcacagcacgaggccacacgaggtaccagacgggagtgtgagcggctccaccacgtcacgccttttccc

SEQ ID NO: 342818 - DNA, 310 bp, Homo sapiens
  chr17:1028640-1028950
  hypo
cgggggccccttctgctcctcattcccctctccgtcgtactcgtccgtcccgtagctgaagtctgagacaaggaacaagaaaggccactgagaatcctccaccagagctgccagggactggtagcgtagtgggcgccggcggcggcccccggcagccatggccccggccgcaccatccacgcctggcccgggcgggggctgtgcgggggcctgggcctggtgaggggcgggggagagccagcaggcaccgggccctgcccgctccggggctgctgggaggcggggaggagcggctctgctgttgctaccc

SEQ ID NO: 342819 - DNA, 155 bp, Homo sapiens
  chr17:1241096-1241251
  hypo
cgatttatagatttaataaaatcataagcaaaatcccagcaggtttctgttgttgctggtctgttactgaaatcgacaaactgattcttaaatgtatgcggaaatgcaaaaaccaataaaatcttgaacagcaaacctggaggcctcacgttacc

SEQ ID NO: 342820 - DNA, 65 bp, Homo sapiens
  chr17:1244981-1245046
  hypo
cgcttacgtgtgagattccagacattgcttagtaacgagcacagtgcctggtgcaaagctggtac

SEQ ID NO: 342821 - DNA, 270 bp, Homo sapiens
  chr17:1407895-1408165
  hypo
cgtgcgatgaagaagcctgttactccttacttatatattctttgagactcagttgctttccttgtaaacaggcaataataacactgtttacctaacgaggacatggtaggaactgatacaggcaaagccttggcgcacacctgcacgccaatcacaatgagctgttatttggaaataggtgcgtgcctcctccttagcgggagtctgccttcctcaccgtgccatcctttttcctcttgctggcaaggatgaccatgaatcctgaggtac

SEQ ID NO: 342822 - DNA, 298 bp, Homo sapiens
  chr17:1412249-1412547
  hypo
cgtggggcagagggcggggaacagtctgcagacccaggctcactcgtggcggtcagcgtggggcagagggcggggaacagtctgcagacccaggctcactcgtgggggtcagcgtggggcagagggcggggagcggtctgcagacccaggctcactcgtgggggttagtgggggttagcgtggggcagagggcggggaacggtctgccagacccaggctcactcgtggtccaggatgtttgggatgtctcgcccctcacaattctgcatctccaggatccggtcaaagtgctccagcc

SEQ ID NO: 342823 - DNA, 50 bp, Homo sapiens
  chr17:1451516-1451566
  hypo
cggaacacgcaggtgggacccacagctctgctgcccgcccctgcctggcc

SEQ ID NO: 342824 - DNA, 299 bp, Homo sapiens
  chr17:1454071-1454370
  hypo
cggacttcgtcctgaaggcaaagggaagccgtcagcagttttggcgctgggagtgacagaccatccagactgaacacttgaagcggtgcggagaactgaaaggcagggagactcgttagaagctgctgtagtaatccaggcaagaggtggcaaggaagggacatgttggagacgctgaggagatggagtcagcaggacctgatgggacacgaagggcaagtgagagtgttgcggggcggagtcagcgggacctgatgggacacgaagggcgagtgagagtattgcggggcggagtcagc

SEQ ID NO: 342825 - DNA, 194 bp, Homo sapiens
  chr17:1462644-1462838
  hypo
cgtggccggcaaagtctccgccagggccagaaccccacagaggtgccagggctagcagcacttctccaggtgccgtgcatgtgaaatgcagaccaagagccacccccagttcaaagctgtgaggcgggagagctaagacaaaaactcttggttttacccatacaagtccagccagtttccaagcttagacgttc

SEQ ID NO: 342826 - DNA, 131 bp, Homo sapiens
  chr17:1546311-1546442
  hypo
cgttcctctgctttgtatgttttttgagaggagcaccgcgaagccctgacccctcctcccggcgccccgccgcggccacctgtctccgctccgccccgcccgctcacaggtctccgcgcagcctcgctcac

SEQ ID NO: 342827 - DNA, 170 bp, Homo sapiens
  chr17:1756146-1756316
  hypo
cggttggctccttgaagatacggtgcgtagcgagaacactgcattttaattaaggaactagttgggaactgaaaaccctgcaatcacttgataatgatgcggcgaaagatgaagagaaatatttatgtaaacagatgacaaatggaaaatagttcatcacaatgatcatc

SEQ ID NO: 342828 - DNA, 272 bp, Homo sapiens
  chr17:1775571-1775843
  hypo
cgagtgccatggaatgcctcagcacgaattctaatccatgggagtctttgacaaaataaaaaatttacactttcccagagcattccttctacccaagtttaaatctcttaacccaaatcctttgcactaaaacggggtttcccttttgatcttcaggactcgggcagccgcaagtagctcctccagcgccagcagccagcccagcagcaagcagcaggccccagccgcagaatggaagctcgggaatgggtgagatgcctcacggggcgtgc

SEQ ID NO: 342829 - DNA, 402 bp, Homo sapiens; identical to SEQ ID NO: 217450
  chr17:1783887-1784289
  hypo

SEQ ID NO: 342830 - DNA, 105 bp, Homo sapiens
  chr17:1784821-1784926
  hypo
ccacacgtatctgccgaactgcagggcccgttcatagtctgaccagaactagccacagatttgcttttttcttattgcttgattttcttttaggctctggagttc

SEQ ID NO: 342831 - DNA, 324 bp, Homo sapiens; identical to SEQ ID NO: 335431
  chr17:1954662-1954986
  hypo

SEQ ID NO: 342832 - DNA, 704 bp, Homo sapiens; identical to SEQ ID NO: 335433
  chr17:1958916-1959620
  hypo

SEQ ID NO: 342833 - DNA, 101 bp, Homo sapiens
  chr17:2207862-2207963
  hypo
cgatatagttggaatcgtgtggaaggaagtacatcaggaggcatataagtccatttgggacctgtaatcccggcgactcggaacgctgagacgggcggatc

SEQ ID NO: 342834 - DNA, 62 bp, Homo sapiens
  chr17:2220983-2221045
  hypo
ggagactccatctcaaaaaaataaaaaataaagatgcacatgagatatttaagaggtaaatc

SEQ ID NO: 342835 - DNA, 108 bp, Homo sapiens
  chr17:2289841-2289949
  hypo
aaggcggggcagggcgggggagaagtcagggagcgtgacgtccacatcgcactgatttccgagggtagggaggggaagcaggagcggcactggagctggcactgggcc

SEQ ID NO: 342836 - DNA, 366 bp, Homo sapiens
  chr17:2291792-2292158
  hypo
cgccctcgccccatctcatctccaggactcgcctccctcctggctgctggtctgcacctgctccccgaccccctaggcgactctccactgtgcccgcctgtgacgcttctcgacgaggctccatttacatgctgctccccatcaccctgcccactcccctccagactccctgggctgaacaacccccaagcctaggaacgtgccccctgtacttgggctaaaccgatccatgagaaatggctgttgcgtcccatgacccagctcccctccacactcagtctttcccgtgctccaacccgacacttcatcaatcccaccctttcaagtctcacagacctccctgctggcagcttttcgcccaggcac

SEQ ID NO: 342837 - DNA, 115 bp, Homo sapiens
  chr17:2326357-2326472
  hypo
cgactgctactgatcattccagtcgtacctggccacactgacagcgcacacgcacacatgcagacaccacaggttctgattactgggggacgtcttctaataagaactaaccagc

SEQ ID NO: 342838 - DNA, 714 bp, Homo sapiens; identical to SEQ ID NO: 335435
  chr17:2756327-2757041
  hypo

SEQ ID NO: 342839 - DNA, 170 bp, Homo sapiens
  chr17:2805383-2805553
  hypo
cgcctcttctagcctctggcggggtcggcaagcctcagcatgcgttggcttgcagccgcatcactcctgtgtctgcctgagaacacggggcattctcactgtgtgtttcttcacattgttgccttcccttcttttttttttttttgagatggagtcttgctctgtcaccc

SEQ ID NO: 342840 - DNA, 621 bp, Homo sapiens; identical to SEQ ID NO: 335436
  chr17:3599052-3599673
  hypo

SEQ ID NO: 342841 - DNA, 593 bp, Homo sapiens
  chr17:3716199-3716792
  hypo
cgaagtagcaagagcggagggtgactgtgtgagcaggagcgagagggcgccagctcctgcgggggaggttcctactgcgcgccccaccctgtgcaagaatgtcaggctttagggcagctgccataggccccaggggcatcaggactctgcctctgaaccagagctgctttcccgactaacttcaatctggagagatggtaagttatctaaccggctcttcttttggcgagactgctctttctccttaatcagagccccccatgccctttgcagctcagagtcgtcttcctcagcgccaggcgccctgtgatccactttcttcgtattcttttctttggtcttgggtgcagatcctaggcgagtccataaattacctgtttggatgagatggcatttcactttcgcagtcagcgctaagaaccagggtagcactgagggggcagcagcactgccaacacctgctgtgcaggaaacgccagcagtctgtggagcctgccaccacagtgcagccttgggcaggcaaaatctcatttcccgggccgcagcccctgcccgcaaacggaagggtctggacccagcacgggattctcacc

SEQ ID NO: 342842 - DNA, 138 bp, Homo sapiens
  chr17:3860438-3860576
  hypo
cgccagacaccctgctaactccttgcgtgccttattctcatgatccgcaaacaagctgggaaggaggatgccattgttatgcccattttacagagtacacaacagagaggttgagtgactagttcaccgtcacacagc

SEQ ID NO: 342843 - DNA, 667 bp, Homo sapiens; identical to SEQ ID NO: 225198
  chr17:3867000-3867667
  hypo

SEQ ID NO: 342844 - DNA, 201 bp, Homo sapiens; identical to SEQ ID NO: 335438
  chr17:3867893-3868094
  hypo

SEQ ID NO: 342845 - DNA, 87 bp, Homo sapiens
  chr17:3985702-3985789
  hypo
cgacaattaaaaagaacgatcagcttacctaaaatacgtgcacagtgaacggaaagtgagctgcagggactgcttgtgctcctgctc

SEQ ID NO: 342846 - DNA, 322 bp, Homo sapiens
  chr17:4048756-4049078
  hypo
cgttgcgctgccctgctgcgtgctgtgggagctgtcgttggatgtttgcacaagtgtgggcataaaaccttcgatgtctggagtgctttttatttttcagtgtgctctgctgtttactgagctcccgtgttctggtattcattgaccatctttatttaccactacctaccttgtgtcaggggctgtggaatccaagatgtctgcaacatgctccccaccgcccacacagtctagttgggaagcagttatgtccacgtattcgttcattcagtattttatttctcattgagatgtaattcacgtgatgtaaagtccttttaac

SEQ ID NO: 342847 - DNA, 123 bp, Homo sapiens
  chr17:4137086-4137209
  hypo
cgggctccgtatggcagggactgtgttataatcatctcagtgttcctggcactgcgcatggaaaacagtaccttctcaactgacaaaccttctgaacaaagatataattcacacaatcacttc

SEQ ID NO: 342848 - DNA, 134 bp, Homo sapiens
  chr17:4144975-4145109
  hypo
cggacctttgccctctgaattcctagacaggtaagtcaattcctgcttgattagcaatgctatcaccatgactcccgcactctttgctgaagataagcagtgaacgagagacacaaatcttgcctcgggcccgg

SEQ ID NO: 342849 - DNA, 128 bp, Homo sapiens
  chr17:4236565-4236693
  hypo
cgttcacatcaaaagtaatgtaaagaatgtgtgtatctcagccatcattttaaaagaagagaagaaaaaaacttacgggcgaagctgttccctaaacagctaaaatatgtaaaatgtaaaagacgggc

SEQ ID NO: 342850 - DNA, 336 bp, Homo sapiens
  chr17:4392128-4392464
  hypo
cgcagaggaacccacgcctatacagacacgggcgcagcggccccagaaccctgctgaggacttgagtggccgtgcagggatcctcctggcctgcccagttctgtagccccggtcttccctgggtccacgctctgaccccagcacagcgtatggggagggctggctctgcggggcccacgcttgccactgggttcagagcagctgggctcagcgggccctgtgggagatcgacagcttccaggcgggcagcagtggggaggcttgttctcatgttctttccgcctcccctggtgcccagccaggcgatcacttgctcactcaccgatggccaccttc

SEQ ID NO: 342851 - DNA, 269 bp, Homo sapiens
  chr17:4436345-4436614
  hypo
cgctctacctgcaccgcgcccaagttgtgcagaagacagcagagacgtgcaacagcccgccctgtggggccaaggacaggtggggccccgcggggtgggcccagggctggtgagggacctcggacaggagagcccctcagccttagccctgagccgcctcaactcgtgcgccaccatcctctgtccccacagcctcatctttggggccatcacctgctttacgggatttctgggcgtggtcacgggggcaggagccacgcgctggtgcc

SEQ ID NO: 342852 - DNA, 241 bp, Homo sapiens
  chr17:4446272-4446513
  hypo
cgcagccctcagcagtgttgcccttcaagacccggagcaggtagagagaggcgttgaagtggtagagggcggtgggggagtcgggctggcggccagcctgctgcaccaaccgctccacctgggcgtgcagggcccctgcgcgctcacccaagtcgtggcagtagcgccgggcacggcacaggtggtgcctgtgggtggtgaggacgagagctggtcagaacattctcggtccaccctgctc

SEQ ID NO: 342853 - DNA, 520 bp, Homo sapiens
  chr17:4500096-4500616
  hypo
cgcactgggagatggcagctggaggggcccccgcagcaggcctgccgtctctccgcagggggaaaggcgaggcccgggccaggctgaagcggtcgcagagcttcggcgtggccagcgccagcagcatcaagcagatcctgctcgagtggtgccgcagcaagacgctgggctaccaggtgagccccggctcccctccggctgctgggacgccccagctaaaagcttgaccaagcgtcgcccctgtccttgttctcccgcctgggcaggagcccgctgaggctggggttaaggggtaggaaccacggtaattatgccttccgagtgggtgcccagctgccctcccgcactgaccccactcaccctgttgcagcacgtggacctgcagaacttctcctccagctggagcgacggcatggccttctgcgccctggtacactccttcttccccgatgcctttgactacaactccctgagccccacgcagaggcagaagaacttcgagctggctttcaccatggcc

SEQ ID NO: 342854 - DNA, 238 bp, Homo sapiens
  chr17:4685696-4685934
  hypo
cgactggagcagatttcgataatgcgtgggggctggcgctgagcgtcgtcacccacaggtggggagattgggccttacctccccttccacaccacatccagatgctgcgctcggtcttctcctcggcgttcggggtgcttggtgccatctactgcctctcggtgtctggagctgggctccgaaatggacccagatgcttaatgaacggcgagtggggctaccacttcgaagacaccgc

SEQ ID NO: 342855 - DNA, 507 bp, Homo sapiens
  chr17:4795549-4796056
  hypo
cgcctgggtgaggtctgagggcagcctagggagtagggggggcacagggactttaccagcctacccgcctgggggtgggaaagccccagccccatcacctcagcgcccccccgccgccccctcggcacccctgtgctcccttcacagacctcgcagcaactccgcctggcaaatctatctgcaaaggcgggcagagcggggcaccccaaagcctccagggccccctgctcagccccctggcccgcccaacgcctctaggtaatagagttgtcccccaactcactctcacctctcacttctgccacccgcttccctggtgatggctccctctgcagtgcagctcagcaccccagagaagggagcaccgtgcctccctgaccctgactctgcccccccaacagtaaccccgacctcaggaggagcgaccctggctgggaacgctcggacagcgtccttccagcctctcacgggcacctcccccaggctggctcactggagcggaaccgc

SEQ ID NO: 342856 - DNA, 513 bp, Homo sapiens; identical to SEQ ID NO: 335441
  chr17:4853393-4853906
  hypo

SEQ ID NO: 342857 - DNA, 341 bp, Homo sapiens; identical to SEQ ID NO: 335442
  chr17:4890368-4890709
  hypo

SEQ ID NO: 342858 - DNA, 634 bp, Homo sapiens; identical to SEQ ID NO: 335443
  chr17:4981385-4982019
  hypo

SEQ ID NO: 342859 - DNA, 213 bp, Homo sapiens
  chr17:5269074-5269287
  hypo
cgttctgtgttcttttgcgtctgtgttcctccgttcaacagtgtactattcctactcgtgatgcacggagtgtttgttcattttcattgttgaatagtcatatcattatacggatataccgcaatttatccagactaatgttgatggatatttcagttgtttccagttctgggatattatgaataatgttcctttgaaatttttgtatagggc

SEQ ID NO: 342860 - DNA, 704 bp, Homo sapiens
  chr17:6474321-6475025
  hypo
cgaggccccagcccggaatggggagcccactacgtgcccctccagaggctacaccacgatcaacatggagagaaagagcccaggcccccaggccctgcccagattgtcctcgcaaagacccagccaccctgttggccccgcgtctgtttcaaatcccatgcctgggatttctttttgacattaaagtaaatgttggccagagagccacctacaagggtgacgaaggctgccggcttctcattggagggctgggaggagactctgcaggtctctgaggactgccaagactccttcatcacactgagcagatataaaatccattaccaagggctaataaatgcggggaggccggcagaggacatgcccgccttgctgggagggcacacactcaggccaagaacagcaggctctccaggcacagccactcgccctccgatatttgcccctcctgcacgcacctctctcggagtcccattgttctccattcaatcatttgggcaccaattctgtttctctttgactataaaagcccatgcctgcagacctctctacacatttattgtgcggctggaatttatgacggattggatttcagaggagggattgattaaatacagatggagcacttgacaagggcctgggggtcccggtagactcccccatttagaaacagaataaagattagaaagcgtgagcaagggcaa

SEQ ID NO: 342861 - DNA, 57 bp, Homo sapiens
  chr17:7187872-7187929
  hypo
agctggagcgtgagcggccactgtccctgctccagctcctgggcagccgtacccacc

SEQ ID NO: 342862 - DNA, 93 bp, Homo sapiens
  chr17:7188345-7188438
  hypo
cgcggcccctcctacttcccgtgcccaaaaggctggggtcaagctccgactctccccgcaggtgttgttggtggagcgggcggggcgccggac

SEQ ID NO: 342863 - DNA, 568 bp, Homo sapiens
  chr17:7224753-7225321
  hypo
gacgaacacccacacggctccccacctaggaccgaggtaggacaaggacggacgatgttcagcccacctctccctgccacctccactcccaacccctcccctgtccctggagccagccacttcacccccagcctctctaggttccggccatagttcatcctctggagctgcccatcacgcctcacttcacagctggataccatccaagtggtcttcgtccggagctctggcagggaaggaggcagccctgggccaccaccgcctgccccgggtcccatctcccccggtgctagtgtggtcagccccagccgcagggaacctgcccacttctcatctagctcttccactttcacctacgagacagagaaaacataagctggccctgtcgtgatgggcctcgcagcccctctgtcacatcactacggcctacctcaaagacttcctcagccctcagctccttggtactgaagacaaggccatgagcatagccagcggcacgcactgccctcgtgccatcctcctctagagtgacgttcttgccgcaagtactgtggaatcggtgagccac

SEQ ID NO: 342864 - DNA, 1343 bp, Homo sapiens; identical to SEQ ID NO: 335448
  chr17:7254485-7255828
  hypo

SEQ ID NO: 342865 - DNA, 282 bp, Homo sapiens
  chr17:7320371-7320653
  hypo
cgcgtgcgtgacaactaccgcgccaacaaggtggccttctggctggagctcgtgccccacctgcacaacctgcacacggagctcttcaccaccaccacgcgcctgcctccctacgccacgcgctggccgcctcgtccccccgctggcgccccgggcacacgccggcccccgccgcctgccaccctgcctcccgagcccgagcccgagcccggcccaagggcctatgaccgcttccccggggactcacgggactactccacggagctgagcgtcaccgtggcc

SEQ ID NO: 342866 - DNA, 416 bp, Homo sapiens
  chr17:7368962-7369378
  hypo
cgcccttgttcctatgaccgctgagtgccagcctccagccgctcccccgccagcctggatcactcacctgcgctcccccgtgtgccacacttcatgcttcgtgcggtactccgccagagcaaacactttctcacaatagcggcaggggtacttcctccgccacgagtgtacattgctgtgtctcttcagactggacagggtcacgtaggaacgctcgcaggccgcgcacacatacagcacgtggccgcccaccaccttcaccacgtgctcggggccccctcggaagcccactggtggaggcagggctgaggcgtccacccctgcaggaccaccagggccagcgcccccagctcccagccctgtagacccccgcgtgctggcccctcgtcggcactgggcctcatgggtctgcagcc

SEQ ID NO: 342867 - DNA, 64 bp, Homo sapiens; identical to SEQ ID NO: 270223
  chr17:7466807-7466871
  hypo

SEQ ID NO: 342868 - DNA, 73 bp, Homo sapiens
  chr17:7493149-7493222
  hypo
cggagcctttgcttccaacctgttcggcacactttggggagagtcgaatgcaaaatccgctgtctggtgcccc

SEQ ID NO: 342869 - DNA, 442 bp, Homo sapiens
  chr17:7493709-7494151
  hypo
cgagttgtgctgagaggagcttgggagcatcccggaccaccaccccaacccctttcctggtgcctgttgctcctcaaatcccagaactgcccctggggcaagaaaggccgaggagggagaccatttttgtttcctgagtcattccagcaggtgcttgggccgtgattcaacccctttcccaagtgagaaaacttaagccctcccaactccagtccctaaacctatatttctccactgctattgaattatggcaagttttagcttcagtcgtccaagtcatgaggggggagccaggaaacccaggacaactccccaagttaagaggtctgtgatgcgcatgccggagaaaaagcctggagccagaacagaacaccaccaagaaggccggaccccgggctccagaggctgctgtgagggaaccctgctccccactctgcccaac

SEQ ID NO: 342870 - DNA, 197 bp, Homo sapiens; identical to SEQ ID NO: 217534
  chr17:7690145-7690342
  hypo

SEQ ID NO: 342871 - DNA, 178 bp, Homo sapiens
  chr17:7806544-7806722
  hypo
cggccactcccctgacccacccgccactttctcttgcccctgcaggcctttagccgggctcatcggattggccaggccaacaaagtgatgatttaccggtttgtgactcgcgcgtcagtggaagagcgaatcacacaagtggccaagagaaagatgatgctgacacacctggttgtgc

SEQ ID NO: 342872 - DNA, 101 bp, Homo sapiens
  chr17:7807194-7807295
  hypo
cgctcggctgttggaccggaaccaggatgcaactgaggacactgacgtgcagaacatgaatgagtatctcagctccttcaaggtggcacagtacgtcgtgc

SEQ ID NO: 342873 - DNA, 206 bp, Homo sapiens
  chr17:7951722-7951928
  hypo
cggatgagcacttcacagaggaggcccctcggcggagcatcgccaccttccagagccgcctggcccagatctcgaggggcatccaggagcggaaccagggcctggtgctgccctacacctacctagaccctcccctcatcgagaacagcgtctccatctaaatcccaggggaacacaggcccagatgacatccctttgaccacatc

SEQ ID NO: 342874 - DNA, 261 bp, Homo sapiens
  chr17:8012317-8012578
  hypo
cggcagctacctgccatttcagaagggaccccaaactcaattcataccctcaagaattccctatgctagggtgtgaaaacacctgaaatccccaggcgccatgagcgcagggaccacaatgtcccaggccaggagaccctggtgggactgctggtcccgccccgcacctcgcacctctcaatggccgcccagatcttcaggccgtcgtctcggtagtggtagttggggatagccaggacgccgcgggcccgcaggctgtcc

SEQ ID NO: 342875 - DNA, 510 bp, Homo sapiens
  chr17:8104433-8104943
  hypo
cgtcttgagaaaaagcaaaaaccttgcctttatctcgtttgaattcttgccctcgagaaaacagaggagagaggttgctgcagagttgcaactccggagtttcccggatagctgcaggcttacccgcaggtaacagtagaagtaggagtcagcgttaaggctgtgggaaaataggtgtccttcattattgccggtgggagtgtaaactgtccaccacttagaggggcatttttggtgatatctatagaccgtttacctgcgtgtacccagcattaccacgtctttctctagatgctggtactctccattgccatgtctttcttcagatgtcccctagaggacaactagagaccatcacaaaggtgcacaggaggcactcaaaagacactggccacagtgcaaagcattggaaataatctgcatgtgcatccagtagaagagctttaaaaaaaaccctagggatatccttattaaaaattataggctgaaaggccgggcgcggtggctcac

SEQ ID NO: 342876 - DNA, 439 bp, Homo sapiens
  chr17:8197565-8198004
  hypo
cgtgtccatcagatgggtgtgtatagggcagatcagaagactccgaagcctaccagcactttcctgatgcctttccctgcttgcagtggggcagcactctgccacctatgcccttgggaaagaacagctcctatcctacaacgaggatctgccctgaaggtcccaggcaagagccctcttcttaccatgtagatggggctccccaagtaggctcccatgaccccagccatggccccagctgctgcgctgcgggcaggactgtgggtgccttcggctgtgtgcaggtagcccccagcctcagccagcccataggtgcccagtcggatgccattcatcaggaactggtacaagagggcgggggccaggcctttctgcagggcagcaaggccatccaccttgccgatggtgatgaaggcatggaagacatttcggtagtgcc

SEQ ID NO: 342877 - DNA, 67 bp, Homo sapiens
  chr17:8380284-8380351
  hypo
atgcgttggcacgcgtcgcttcttcttctgcttcctccagctggcgtttaagctgcttcatccgagc

SEQ ID NO: 342878 - DNA, 208 bp, Homo sapiens; identical to SEQ ID NO: 270265
  chr17:8383607-8383815
  hypo

SEQ ID NO: 342879 - DNA, 453 bp, Homo sapiens
  chr17:8384370-8384823
  hypo
cgttggcgcaccccacggctcccccctgcggtgtgcagggctcagcaggactggcacgggtgcagtgcccgttagtgcacaccacggctcccacctgcggtgtgcagggctcggcaggactggcacggggtaccatggctgaggcagcccaggcccagcgagggaggagcaaaccacccgctgatgccaggtgtgtggacacctccagccttctcagcagtgcgcgtgcctgagggcgaagaacccacccccggccgtgggagactcacttgccagaggcgctgttggtgatctcgtccgccagctcatctctctcctgctcggcgtgtcggcgggctcgctcagatgaggcaagttcctaagcagtggagactgcgttaagctctggctgtgaatagtttcctcacctgtggaatctgacagtgcctggagctacagcgaccttgctcctgt

SEQ ID NO: 342880 - DNA, 220 bp, Homo sapiens
  chr17:8731961-8732181
  hypo
cgggacacgccgggcagcatttccccatccccactgggccggcctgtcctccggtgcagccctgggggcccgtcccagctgccaggcatcaagaagtccaggggccatgcacgcttcttgatgccccctttgcgctgcagcccggctcgctccatctcagggctgccgggtgcaggcagctcatcagcccccgtgggaaggtcccgctcaatgccgctgt

SEQ ID NO: 342881 - DNA, 870 bp, Homo sapiens; identical to SEQ ID NO: 335457
  chr17:8868587-8869457
  hypo

SEQ ID NO: 342882 - DNA, 900 bp, Homo sapiens; identical to SEQ ID NO: 335459
  chr17:8906203-8907103
  hypo

SEQ ID NO: 342883 - DNA, 186 bp, Homo sapiens
  chr17:8977478-8977664
  hypo
cggctctcgcgaaccagtgcgggagggaagcctgacaggggcgaggtggcttcctgcaagacggcgtgtaagctcagcaactgcatttttctgaggaattagggatgggacgcggccagcccgctctggttggagcttggtgctgtgactcattctcatcaagggtcactgagcgtctctctgcgc

SEQ ID NO: 342884 - DNA, 186 bp, Homo sapiens
  chr17:9233928-9234114
  hypo
cgtgcactggcttcggctttctgtttgggacgtgggttcacgtttacgaacaacaagggatggcccctggcagagcctcgttcgcactcgctcctgcctccagtttggcaacacaacacaaaggcggtatggcttgtatacactttccaggctgagcccctattcagagggggctgcagcttgcgc

SEQ ID NO: 342885 - DNA, 1219 bp, Homo sapiens; identical to SEQ ID NO: 335461
  chr17:9548277-9549496
  hypo

SEQ ID NO: 342886 - DNA, 196 bp, Homo sapiens
  chr17:9631380-9631576
  hypo
cggtggtcctttggatccaaggagaaaccaccaggtgcctccgtcgagttggtggagtacttggaatccagacgaagacctcggtccacgagccagtccattgtgtcgctgttgacgggcactgcgggtgaggatgagaagtcagcatcgccgaggtccaacgtcgcccttcctgctaacagcgaagatggtgggc

SEQ ID NO: 342887 - DNA, 33 bp, Homo sapiens
  chr17:9719665-9719698
  hypo
cgtgcacgcgtatgcgtgtgtctgtgtgtgtgc

SEQ ID NO: 342888 - DNA, 1500 bp, Homo sapiens; identical to SEQ ID NO: 225232
  chr17:10101106-10102606
  hypo

SEQ ID NO: 342889 - DNA, 881 bp, Homo sapiens; identical to SEQ ID NO: 335463
  chr17:10632714-10633595
  hypo

SEQ ID NO: 342890 - DNA, 119 bp, Homo sapiens
  chr17:12032523-12032642
  hypo
cgtgaaaggagatcctccgcagctgagtaattctgaggaaagggaattctccccgagtttcatcaactttgtcaacttgtggtgagtacctgatttatgaatggtcgaacacgcatggc

SEQ ID NO: 342891 - DNA, 239 bp, Homo sapiens
  chr17:12890262-12890501
  hypo
cgttcaggtctctgagccagtgtagaatccatcatggtttgatgtggcccgtctgggactgtgatattggcatagctttttttttttttttttgtgacgttcatgttttgtcgtgttgattcctttctccgaatcctatcattgtgttcttgcagctgtgtgacatgagtggcgcagttttggatacgtgtgagggggattttcagggtaagctggccccggcctcgcccctccacccc

SEQ ID NO: 342892 - DNA, 1251 bp, Homo sapiens; identical to SEQ ID NO: 335466
  chr17:14203859-14205110
  hypo

SEQ ID NO: 342893 - DNA, 313 bp, Homo sapiens; identical to SEQ ID NO: 335467
  chr17:14212398-14212711
  hypo

SEQ ID NO: 342894 - DNA, 232 bp, Homo sapiens; identical to SEQ ID NO: 335470
  chr17:16256915-16257147
  hypo

SEQ ID NO: 342895 - DNA, 376 bp, Homo sapiens
  chr17:16282251-16282627
  hypo
ttgtaggtgaattcccgtttttgaagtggggtttcggctccctaatctgcacttttttttttcctaccagtttggagaaacagctgggaagaactggatttgcaggtattgctggagccagagcgaagcccggccactgtcaccatgggctccagcctcgcctctctgggcctggtggtgagcggcttcagcaacaggtttccggtccccgcagagggtcccactctgaactcccgatttacagactgttctcgggccgtgatgaggattaagacaatgcaactaagagcactctgactacagaagcatgatttaaagctccacaaccctgcaataaccacgaagaaaaataaaaagcggctagtccgccaggcac

SEQ ID NO: 342896 - DNA, 1225 bp, Homo sapiens; identical to SEQ ID NO: 335471
  chr17:16283879-16285104
  hypo

SEQ ID NO: 342897 - DNA, 256 bp, Homo sapiens; identical to SEQ ID NO: 225242
  chr17:16310308-16310564
  hypo

SEQ ID NO: 342898 - DNA, 745 bp, Homo sapiens; identical to SEQ ID NO: 335474
  chr17:16472054-16472799
  hypo

SEQ ID NO: 342899 - DNA, 209 bp, Homo sapiens
  chr17:16923475-16923684
  hypo
cgctctgacctcacctcctcccagctccctgactccttcggcggggggcctggccagcttgttcggccactctgggctccaggctcttcaactggaaagagatgcttgtggagttcctcatggcaagtctgggcaagccagcctgacggccagcctgcgactccttgtccagaactctgtcaactccaccagtgcctgtcacggaaacc

SEQ ID NO: 342900 - DNA, 203 bp, Homo sapiens
  chr17:17031200-17031403
  hypo
cgtccaggagccagtgctgggtcccgggggcgctctctgcgggggtgtgctctcccctagagtcctcccctggagagaggcaggtttgcatttctgagcacctggagccgagctggaggagcacttctgtctcccacaatcttaatccagaaccatatgatcaagaatgtcaagggcctctgaagaaccctcgtggtacagtc

SEQ ID NO: 342901 - DNA, 430 bp, Homo sapiens
  chr17:17045715-17046145
  hypo
cgcgggggcagagggtaggggcaagcgcaggcctgatgggagggagggccgtggaggggtgcaggcagagctcgggtcagctgagcacgtgtctagacaacctcggtgctgtgcaagcctgaggggaatcaggcccgggccaggccgggcatgggaggagtcggctcactgccacctcacagctcacctcactgccacctcagggcctcgtgtcctctcttgcaggaggtcccaggtgattgaaaagtttgaggccttggacattgagaaggcagagcacatggagaccaatgcagtggggccctcaccatccagcgacacacgccagggccgcagcgagaagagggcgttccctaggaagcgggtgagctcctggggctgggcagcacctcaggggtggctcgggggcgggtcagcatgcaccccatgc

SEQ ID NO: 342902 - DNA, 771 bp, Homo sapiens
  chr17:17062274-17063045
  hypo
cggctctccacacacgagctgacctctctgctcgagaaggaggtaatagcctgggaccagatccccaccctgctcccagcagcctttccagagcatcagctgtgcccagctgtggcctgaggggttcatctagacagtcctacccgcgagggacttgcagacccctaggggagacagacgcatagatgagtcctcatagttgaggcagacctgagagctgtgggagcgtgccagtgcatgcagggcagggaaaggggccttccaggcacagaggaattcttccgatggtgggggcccctgccattgagaggcaagcggcgttgcagggcctagatggtttcctcgttctgactcccgatggcaggaggggcgcgagcagggcaaggcttttgcattacgcagccctggcttggacaggtcaaagctgtaggcagagaccagccccaggtgctcttacagtggcttggggacggccgatcagatctgaagccaggggcatccagcaggagatgacagctgggtcctaggtcatgaggatatgaagcagaagacagtggtgaggcagggtaggctgtggatgaaggctgccctgtgactgtcactcctccacgaggccttcagtgcacctaggtacatagatgaacaagctggcccccgaactataaaataagatgttctttcatggaaatgtatgcagaaatccagtctgcagaacttcagtggtagattgacatgtctgggcagggagtctcgtagctggggaggtgtagc

SEQ ID NO: 342903 - DNA, 210 bp, Homo sapiens
  chr17:17104713-17104923
  hypo
cggagctatctgtatatgacacacacattataaacaaataacctggaacatttcacagtgtacgacacctgttctacctgggaatgcaaaccctgagctgcaaataagaacacagacgtgggagacaccacggcctgaagctgctctcctcttccccgctctcctctcctccggtcccgtgatgggttacgctgagccagcaatgtgcac

SEQ ID NO: 342904 - DNA, 224 bp, Homo sapiens
  chr17:17120250-17120474
  hypo
cccccagtggagaccgtgtggtgcacagcggttctgtgctgggcagtcggtgcaccttggcatccccacctgacgccaggcaccaggccaatactgccctgcgccgcacacctaaggaaaagatgttctcacccgaagtacttcaaaagctgactggacgaggtccacgtctctgcttttccagatcacctggttccccatgagaacgtgccaggccagcatgc

SEQ ID NO: 342905 - DNA, 208 bp, Homo sapiens
  chr17:17224346-17224554
  hypo
cggggacattctgcttcgaagggagcagctggaatgtgggggtcaaggctgtgtgtgtatatatctaaggcgggaggtgccagcacacgtttgaatgaggagtcatggaggaggatagcaagcgggcattcgggaggtgccagcacgtgtttgaatgaggagtcatggagaaggatagcaagcgggcattcgggaggtgccagcatgc

SEQ ID NO: 342906 - DNA, 95 bp, Homo sapiens; identical to SEQ ID NO: 335476
  chr17:17287173-17287268
  hypo

SEQ ID NO: 342907 - DNA, 1358 bp, Homo sapiens; identical to SEQ ID NO: 335477
  chr17:17398686-17400044
  hypo

SEQ ID NO: 342908 - DNA, 121 bp, Homo sapiens
  chr17:17488209-17488330
  hypo
cgccaggaggattaaatgagaaagtgcaaggaaagcactcagcgcagtgcctggcggggggcatggctagacagacgctggctgtgacaactgtgtcatcgagtcctggtgacaaccctgc

SEQ ID NO: 342909 - DNA, 199 bp, Homo sapiens
  chr17:17637969-17638168
  hypo
cggacctggtgcagaccagtgggcccacacctgctttcctatgtgcgggtcagagcgtgtaggtgtattacatgcctgcctgtgtgtctgcgtgtgagctccttggacacacacaggggcacatatctgtgcttgcatgtttgtacatctaagtgtgtgcgtatctgtgtgttctgacaccagctcgcgacaccagctc

SEQ ID NO: 342910 - DNA, 89 bp, Homo sapiens
  chr17:17717893-17717982
  hypo
cgggaccaggcaggaggaacctgccgtgcactcactcagactcctgcagcacccggggcaggtgctccaccagcgggcacagccgctca

SEQ ID NO: 342911 - DNA, 245 bp, Homo sapiens
  chr17:18024622-18024867
  hypo
ggctcgccgctgccgggctcacccaggccgccctcgccgcccctggggctctgccacagcccgcggcgcagctccctgaatctgccctcgcgcctcccgcacacgtggcggcgcctcagcgagccacccactcgggctgtgaagccgcaagtgcgcctgcccttccaccgaccgcccagggccggggcctggcgggcgcccctggaacaccgggagagcccgcgagaacccgaggactcagagac

SEQ ID NO: 342912 - DNA, 142 bp, Homo sapiens
  chr17:18083378-18083520
  hypo
cgcaggggccctgaggtgcgcattacttgtagcaggatctgagactgaagaggccggcaaagatggtttcgatagggcttctgggctacattaagaatttaggatttctgggccaggcgcagtggctcatgactgtaatccc

SEQ ID NO: 342913 - DNA, 168 bp, Homo sapiens
  chr17:18163172-18163340
  hypo
atacagcaggcgctcagtgagtggcaggttattattccgttttgttttgttttgtgcgccaggttattattcccacttagtgtcagcacccctgtgctcgtacccccctacaaagggaggctccagaagagaagcatccgtcttggtccttgctgttcaagggggctc

SEQ ID NO: 342914 - DNA, 601 bp, Homo sapiens
  chr17:18854648-18855249
  hypo
gccttcaatggctgcgtaatggcggatggccatttccttgactaggatgagacattgcctactctgcgtggctgctgtgagcgtgaaatgggatcatgtgcggaacagccacgcatggtccgtgaaatgggatcatgtgcagaacagccacgcatggtccttggtgtgtgacagatattgggtccctctgtggtcccaggcagacattgcccggggtgggggccgaatgcatggtcaagttgaggggcctgggactgtttcacgggtctagaaaaagaaagcagaaacgctggaagcaggactttattgtccgacatggggctgcctctgagcctgggctgtgttggctggacgtgagccataatgcaggtgtccccctcccaagccctgctcagtccactcacagcccgatggccaagggaggacatggctgcccgccacggcagtatcttcagaggtgaggcggttgtccctacgctctatgcttcttatacaaattagatataggtgaagccacccattaagcaacccagcctttctgggactatttgggctgcctccgggtccactaaatgcggttcattttccccaagccccctcc

SEQ ID NO: 342915 - DNA, 60 bp, Homo sapiens
  chr17:18855509-18855569
  hypo
aggacagccatggccgccaactccaccagcgacctccacactcccgggacgcagctgagc

SEQ ID NO: 342916 - DNA, 300 bp, Homo sapiens; identical to SEQ ID NO: 335481
  chr17:19140744-19141044
  hypo

SEQ ID NO: 342917 - DNA, 410 bp, Homo sapiens; identical to SEQ ID NO: 335482
  chr17:19282076-19282486
  hypo

SEQ ID NO: 342918 - DNA, 112 bp, Homo sapiens
  chr17:19513145-19513257
  hypo
cgttttatagcaaatagtacaatgaacaaattgacatatataaaaaggaacaaacgatacatgtcataacatgtgaatctcaaacttttttttttttttgtgacggagtctc

SEQ ID NO: 342919 - DNA, 130 bp, Homo sapiens
  chr17:19623347-19623477
  hypo
cgatctccccgcgcaccacaggcatctcagtatagagtgacctccccacgcaccacgggcatctcagcatagagtgacctccccatgcaccacgggtatctcagcatggagcgacctccccgtgcaccac

SEQ ID NO: 342920 - DNA, 338 bp, Homo sapiens
  chr17:19646495-19646833
  hypo
cgctgggggacggtgctcccccagcttcccttcccacagggccatgcacctgcagcgatggcgcccaccatgggctggatggtgaggttgaaggggtagttccaggtgccaatgacgaggaccacgcccagtggctccgagtggatgtagagctcgtcctgctgagtctggggcgtcttctccacgggctcatccgcggcccactcagggagcttctggatcatgtactcgatctcctctaggacgtacaccacctcctcatagtaggcgttccattcattctgcagcgacagagccggagtgagcttccagggccagggcccgcctgcagctggggc

SEQ ID NO: 342921 - DNA, 195 bp, Homo sapiens
  chr17:19771618-19771813
  hypo
gaaaaccagagttcacgctgccaaactgccagccttcggacgcctctcggggtttactcgcttaggatccctagagggacggtgacaggcgggattctgcaccttttgggggtcccttgactgcgagaagctggtgacagctcagggccctcttcgcagagaatcgtttctgcacaccgactcagaatcgcacac

SEQ ID NO: 342922 - DNA, 64 bp, Homo sapiens
  chr17:19842333-19842397
  hypo
cgtgcccgaccacgaattactttttttacagagtaagaaaagttaaatgaaaagaataccatac

SEQ ID NO: 342923 - DNA, 226 bp, Homo sapiens
  chr17:20903670-20903896
  hypo
cgccgccgcctcctgtgagcagctcttcagcagcaggcatcaggtaactgcttagaacggcaatgccacagtggaataagggggactaacttggatacgaaagtttagaataatgcccaccaaaaatccatgtgactccatctctcttcccagttctaatgttctcagaacagcagccacccctgaatgcaagtggagacaggaaggggactaggggttggccggc

SEQ ID NO: 342924 - DNA, 331 bp, Homo sapiens
  chr17:21104016-21104347
  hypo
cgaatgtgcctgacaggaactagcttcctttcatggctaacgagaagcacagccctcagtgtgcacagacgcgaaggtcccgtccgcccagcctgtcctggcaggcacacctggctgcggtgcagaggagagtcatggggagctgagccacctggccattggccgtaatatgggagtgacgagtgaagacattcataacaagccaccccagaacctcagcccagcatgaaggtaactccctccagcctccttcaaagatgggagcaattccaagtgaaggatggtggaaatcggactgtcgggaaacttcaaggaaaaagaacaggcaatc

SEQ ID NO: 342925 - DNA, 117 bp, Homo sapiens
  chr17:25619839-25619956
  hypo
cgatgttttattaaacatttcgctatttgaagaattaatacactcatgcaaagaaaagatgaagtaaacatgccctacagtgttatcatttgagatctcttaaaagcggctatgcag

SEQ ID NO: 342926 - DNA, 421 bp, Homo sapiens
  chr17:25620264-25620685
  hypo
cggctatgcaacactctactctgtcccatgaatatctgccacatatttgaattcccagtcttatacgccccaggcctttgcaatgtttagggtccacacgagaagccattaaaatgcaaatacgtcatctgtgaccgggaaccaagctggcatctagcagatactgacacatttatcagtctgatgtgtggacaactaggtgcctcccagaggccttcaggtaaggtggaggaagggccaattctgagctgacacagtgggatccatcttggccaggacagtgggatccatcttggccaggacaaaggcagtccagagaggccccgcggcgcggtgcggcgcgatcacgcccgagtctccttctcgttcccctcggcccttcctaaaacctgctggctcaggtctgaacaatcgcagctgg

SEQ ID NO: 342927 - DNA, 166 bp, Homo sapiens
  chr17:25676867-25677033
  hypo
cgagggctgtcacacccccgcctggtgtgcgcatgctaggggcagtgctgacacgctccactggtttcagatcaactttggagaatttggcgatagctagttaaagccgaagatgtgcatgcactgtgatctagcaaccatatgcctcgcaaaacaggccgggcgc

SEQ ID NO: 342928 - DNA, 125 bp, Homo sapiens
  chr17:25842444-25842569
  hypo
cgtatttctgtcgttacacgccgcatgactgtagtttgagaagacacattttcttctaaacaacttaatgactttttcggtgtggctgggagtctcagtaggctctactgaggtgtggtttgaac

SEQ ID NO: 342929 - DNA, 248 bp, Homo sapiens
  chr17:25931573-25931821
  hypo
cgcggcctttcccctagccaggtgtgagtcagagtaagtacctttgtctcagatctctcccgggagtccccgctagctgagagcagagcggtgttcctcaaggtctccttgacaaaccttgtttactcttaggctcgatgaccagccgaaagcagatgtgttggaagctcacgaagcggaggtgagggtgacacacacgtgtccacagatggccccccctcttttttcccttccccatctcagaatgc

SEQ ID NO: 342930 - DNA, 200 bp, Homo sapiens
  chr17:25934818-25935018
  hypo
cgaggggctggagagagtccttgcaggcagacgggcacagttctccccatgggctccaccagggttggggtcaggccgcaccagccccagacttgtgcttgacccccaccaccctcgacagcttctgcaaggggcggacgttgcactcgtttgtgagggaccccaagacgtctctggacatcaacaagacgaggcaaatc

SEQ ID NO: 342931 - DNA, 314 bp, Homo sapiens
  chr17:25936178-25936492
  hypo
cgtcatcgttgcacatcttcactcctcctgatgtgtcctccagggcatgggatatcttcatgccaagggcatcgtacacaaagatctcaaatctaagaacgtcttctatgacaacggcaaggtggtcatcacagacttcgggctgtttgggatctcaggcgtggtccgagagggacggtgagttggtcttgagtgtctgggtgggttgtgggtgctggatggggaagagcagggctgaggtctgggcactttcactgtttgttgctgagctgcagccctccctgcagggaagcccaggtcgctttggtcctgcc

SEQ ID NO: 342932 - DNA, 107 bp, Homo sapiens
  chr17:26594094-26594201
  hypo
cactctcaggaaaacgaaacctaactaacgccgcccttgccccaccccgactccgcccctacatcacctagtgtccatataagcgtgctgcaactacaacacagtgc

SEQ ID NO: 342933 - DNA, 300 bp, Homo sapiens
  chr17:26851601-26851901
  hypo
cgcattgcgtcaccagggcccgagcaagtccagggccactgcccagccggccccggccctgggcccttcaggctctcaccctcagacaagtatcctggctttggctttgaggaggccgcagcaagcagccctgggcgattcctcaagggcagccacgcgcccttccacccgtacaagcggcctttccatgaggacgtcttcccagaggccgagaccaccctggccctcaaaggacactcctttaagaccccagggccgctggaggccttcgaggagatcccagtggacgtggcggaggcc

SEQ ID NO: 342934 - DNA, 155 bp, Homo sapiens
  chr17:26961722-26961877
  hypo
cggcgcatgggtgtgttgccatagagacgacgggaacgctggatgtagatttcaatgtttttgcgttccaaagaggcatagagctcctcaattttgcgggcaggcaacaactccccatgctgcttccgaagggcggccactttagcatccagtag

SEQ ID NO: 342935 - DNA, 250 bp, Homo sapiens
  chr17:27085337-27085587
  hypo
cgggggctcggttgccaggggctcggtgggccttgctcagcatggccaggctctgttctcggaagcaggcctgttggaaatccccacttaggtaatccactgtttgcatcaagctgttctggcttgccactggaccgcccccggtccctgctcggtagtgggccccgggagctgccgcacagtcgaggggtgcacctgtgggctgcccaccgtggaacggcatggcaaggtcctgagaccccgagctgtc

SEQ ID NO: 342936 - DNA, 181 bp, Homo sapiens
  chr17:27207684-27207865
  hypo
cgacgggctacctgggcaaccccaccgcagctaggcaggcacataccttagacaggtccacgcctgtgagggcatgcacagaggcaggcagctcggccagcagtcggttcacttctgatgtgaccttactgttgtctccactgaggaccacaatctcatcgaccttggtaagtggggcagc

SEQ ID NO: 342937 - DNA, 548 bp, Homo sapiens; identical to SEQ ID NO: 335491
  chr17:27332307-27332855
  hypo

SEQ ID NO: 342938 - DNA, 439 bp, Homo sapiens
  chr17:27411553-27411992
  hypo
cgtcaaatacaatttatgtccgggctcatgtgctattagttaacggggagccgaatcacgggggaacaaacaaacggagacagaacggcgggggatattaattgtgtgtgacaaccaggctccagcggccctctatcactgttacacactattacatttatcattagctctcactgagtcctgtgcgctgccaccagcccatcctggccaggggagggggtccatcaggcgagagagagtgggggaagaaacccaatgccatgctaaaaaaaaaagacctctaaaaaacaaccctgtcgaacttgatggaggatcagcccgctctgcctgaaggcctgcgcatctgcatccgctgtccagctcccacccagaaagcgggaaaagagagggctggatttcctgggcttcctgccacctgacagtaccagcacaagcgccc

SEQ ID NO: 342939 - DNA, 193 bp, Homo sapiens; identical to SEQ ID NO: 270511
  chr17:27419314-27419507
  hypo

SEQ ID NO: 342940 - DNA, 74 bp, Homo sapiens
  chr17:27716189-27716263
  hypo
cgtgagccaccgggcccggcccagagttaatttttattcatgaaactcatataacaggtttatttatttcagtc

SEQ ID NO: 342941 - DNA, 590 bp, Homo sapiens; identical to SEQ ID NO: 335492
  chr17:27893141-27893731
  hypo

SEQ ID NO: 342942 - DNA, 312 bp, Homo sapiens
  chr17:27909050-27909362
  hypo
cgtgcagaggtgtggtgcccttctctgggtggaagaagttggcctgggcacccagggagagcaggcgcagacatgtctccaggttgcctgtccgcacgctcgagtgtagttgctaagaggagcagagtgtgcagtgaatacgcatgtgcgtgaggcgcacctccccacccacaagctgcaccctggctgcccctgggacacctagcagctccaaggaggcctgcccaaaccagactatgtcgggaggacagaggcttcccgctaggggttaatgccaattaataaacgctgccgtcagtcaccatctaccac

SEQ ID NO: 342943 - DNA, 244 bp, Homo sapiens
  chr17:28299360-28299604
  hypo
ccggcccaggcattttttaaatggattcctggctccttttaaaatggggatcactcacttgtgagctaggagtgctcataaatattgtgtagtcattgtttctaggcccttcaggactaaaacatataatttttagagtcaatgacccgtgaccagacatcacctgcagcctcttcaggcgtgccaccgctgccgggcctgctgtacgacccgcgggctctgggccatgcctgctcttgcgccc

SEQ ID NO: 342944 - DNA, 167 bp, Homo sapiens
  chr17:29232077-29232244
  hypo
cgagagatgtctcccgatatttatggatcagtccgaagttttactacctagaaaattgtattttatacccatcaggaagcaagtagttgaaataattattccaactgcttaaagtttctgatatttttaatttagaggaatctttttgtaactaatatttcctgtta

SEQ ID NO: 342945 - DNA, 913 bp, Homo sapiens; identical to SEQ ID NO: 335497
  chr17:29248950-29249863
  hypo

SEQ ID NO: 342946 - DNA, 311 bp, Homo sapiens; identical to SEQ ID NO: 225316
  chr17:29718210-29718521
  hypo

SEQ ID NO: 342947 - DNA, 514 bp, Homo sapiens; identical to SEQ ID NO: 335501
  chr17:29718750-29719264
  hypo

SEQ ID NO: 342948 - DNA, 121 bp, Homo sapiens
  chr17:29773391-29773512
  hypo
cggccgagcgtccacccttggcatctctcaaattgtggggaggcagccggccttggtactttctggctccaggaacacgccatgggccattgaacgtctgtgcgatgggtaacgtctgtgc

SEQ ID NO: 342949 - DNA, 190 bp, Homo sapiens
  chr17:30243769-30243959
  hypo
cgatgtaactaaaacgccactctacagttaactccctctattccttagatttcattcccggggtcacctctttggcctaggtgcacacaccgcgggctccgctctaggtggggcacaggccttcgcccgccgcatgcaccctgggctgcgcagccccagccagcccgacccgggctcagcgacccctgcc

SEQ ID NO: 342950 - DNA, 76 bp, Homo sapiens
  chr17:30333052-30333128
  hypo
cgcgcccggccaagtatttttgtttaaattactttttggttgtcacttatctcaataaatattaacatatgtttac

SEQ ID NO: 342951 - DNA, 280 bp, Homo sapiens
  chr17:30347571-30347851
  hypo
cgcttattccctggcagcccctacctaatagggtggtgaattaattatcaaacatgcgacagtttagcgaaaacggcaacattttggaataaatgactgtaacgcgcgtcctgcctgccaccctaactggcgcccattttgcaggtcagttgctctcccctgaaggaagagtattctcggatttcacctcagaggaggaagaattcaggctgccagaactggactagcacttctgaagatcccaaggccaggtcccgtgacttccttgggaagctctgcc

SEQ ID NO: 342952 - DNA, 126 bp, Homo sapiens
  chr17:30804383-30804509
  hypo
cggctcttcttcccgggcgtctgaagaagaacgatggtggggcgggttcttccttttggcagaagttgtgtggacacagcatactgcttatgagacttgggtaaatgttagtgtgcagaataaatc

SEQ ID NO: 342953 - DNA, 33 bp, Homo sapiens
  chr17:31099662-31099695
  hypo
cgtgcgtgcgtgcgtgcatgcgtgacatgttac

SEQ ID NO: 342954 - DNA, 2007 bp, Homo sapiens; identical to SEQ ID NO: 335504
  chr17:31618426-31620433
  hypo

SEQ ID NO: 342955 - DNA, 2406 bp, Homo sapiens; identical to SEQ ID NO: 335506
  chr17:32906886-32909292
  hypo

SEQ ID NO: 342956 - DNA, 260 bp, Homo sapiens
  chr17:33344328-33344588
  hypo
cgtctccactgtgacctcacaactccttataaatacactgaccgcttcactagttaacctggaacactaacactaaaccctaccccaaaaatataatttcggaagcactatcatcacacatttattctctctccactcgactctgctaagaggttccgaagaacaccagtgaaagaggaaaggtgaagacacagacccaagcagaggccccacctgggtctcatcctcagcaggtactctggccacgctctccaggtaga

SEQ ID NO: 342957 - DNA, 38 bp, Homo sapiens
  chr17:33351154-33351192
  hypo
cgtggcgcctcaggccgacaccacccttcaaggatgcc

SEQ ID NO: 342958 - DNA, 717 bp, Homo sapiens; identical to SEQ ID NO: 335510
  chr17:33814248-33814965
  hypo

SEQ ID NO: 342959 - DNA, 2478 bp, Homo sapiens; identical to SEQ ID NO: 335515
  chr17:35290220-35292698
  hypo

SEQ ID NO: 342960 - DNA, 130 bp, Homo sapiens
  chr17:35545278-35545408
  hypo
cgtttgtcaggaagaggcggatgggaattgcttttccagttggcgtcaggcgaatgttgattttcagttctgcctggaggacgcgcaatttccacaggcgacttccataccgcattaccatgctccgcac

SEQ ID NO: 342961 - DNA, 3706 bp, Homo sapiens; identical to SEQ ID NO: 335520
  chr17:36101946-36105652
  hypo

SEQ ID NO: 342962 - DNA, 93 bp, Homo sapiens
  chr17:36864049-36864142
  hypo
cgaggtgcaatttgccaacgtgctcaccatggagcccatcgtgctgcagtacgtgcctcatgatcgcttcaacaaggtcagcggccccccgcc

SEQ ID NO: 342963 - DNA, 900 bp, Homo sapiens
  chr17:36875885-36876785
  hypo
cgagggaggagggacggagagaccggcgtgggctggaacccctgggggatacgggagaagggccagaggagcctggagtggtcgggtcgactgaacccaggttccctctggccgcaggtcccccatcagcagcctccccgcactcttcgaccagacagcctctgcaccctgtgggggcggccagttagacccggcggccccagggacgactaacatggagcagcttctggagaagcagggcgacggggaggccggcgtcaacagtgaggaggggtggcgccggtcgggacgcctgccctagggccctaacagtcacctttctccccgaggtccccaagcttctttaaggttccgcccttaggccccgccccagccttgactctcggccaccccgggcctcacctcccatccctgccaggccacacgaccggccctggtccctcagcgccccacctttggccttcgtggcctccgggccccgaccttaccaaaccgcaacttccgcccttctctcctgacccgtgtggcctcgaccccagcctcaggctccgccccaggtcttcacacctgtggctccccaagtcccgcctctcttctcagagctcacctgtgtccctccttaggatggcgccgccttttcaagggctgagcactggctcccctccaggccccgcccccggtcccctggccccgcctccgccccctcgcccctccctcaggttcctcgctctctccgcagtcgtggagatgctgaaggcgctgcacgcgctgcagaaggagaaccagcggctgcaagagcagatcctgagcctgacggccaaaaaggagcggctgcagattctcaacgtgcagctctctgtgcccttccctgccctgcctgctgccctgcctgccgccaac

SEQ ID NO: 342964 - DNA, 222 bp, Homo sapiens; identical to SEQ ID NO: 204568
  chr17:36886754-36886976
  hypo

SEQ ID NO: 342965 - DNA, 192 bp, Homo sapiens
  chr17:37074888-37075080
  hypo
ccgccgacgaggacgaggtctccttccaggacggggacaccatcgtcaacgtgcagcagatcgacgacggctggatgtacgggacggtggagcgcaccggcgacacggggatgctgccggccaactacgtggaggccatctgaacccgcagcgcccccatctgtcttcagcacattccacggcatcgcatcc

SEQ ID NO: 342966 - DNA, 1556 bp, Homo sapiens; identical to SEQ ID NO: 335529
  chr17:37380887-37382443
  hypo

SEQ ID NO: 342967 - DNA, 123 bp, Homo sapiens
  chr17:37583075-37583198
  hypo
cgcgcccggcagtctatctctctttatcttttcttgtatcaagggcaaacagaaaataatgtccattaccatagttctttaatttagaaaacttcactttttttttgatcagtaactcactac

SEQ ID NO: 342968 - DNA, 897 bp, Homo sapiens; identical to SEQ ID NO: 335534
  chr17:37761159-37762056
  hypo

SEQ ID NO: 342969 - DNA, 756 bp, Homo sapiens; identical to SEQ ID NO: 335535
  chr17:37782857-37783613
  hypo

SEQ ID NO: 342970 - DNA, 179 bp, Homo sapiens
  chr17:37819059-37819238
  hypo
cgcctgccccggtacctcatccaccagagcctcgcggccaccatgtttgaatttgcctttcacctgcgacagcgcatcagcgagctgggggcccgggcgtgactgtgccccctcccaccctgcgggccagggtcctgtcgccaccacttccagagccagaaagggtgccagttgggctc

SEQ ID NO: 342971 - DNA, 92 bp, Homo sapiens
  chr17:37879800-37879892
  hypo
cgctgacacctagcggagcgatgcccaaccaggcgcagatgcggatcctgaaagagacggagctgaggaaggtgaaggtgcttggatctggc

SEQ ID NO: 342972 - DNA, 156 bp, Homo sapiens
  chr17:37880961-37881117
  hypo
cgtacccttgtccccaggaagcatacgtgatggctggtgtgggctccccatatgtctcccgccttctgggcatctgcctgacatccacggtgcagctggtgacacagcttatgccctatggctgcctcttagaccatgtccgggaaaaccgcggac

SEQ ID NO: 342973 - DNA, 444 bp, Homo sapiens
  chr17:38179119-38179563
  hypo
cgggatctggggctcctacaccctgccaccccagcatggctgtccagtaaggcccgcagagggggccccagatgttgctccgcccctcaggctgaatcccagtctctggccagagctccccaaggaggcaactctgaggcgaggcattccggggaggccacctggctcacggcagcctctcagggaagcctggcagaccaggccaggtgtggggagccaggggacaggacccatgtcggcccacagccactccagcccaagtaccttaatcaggttgttgcagaaccagtagacgccgcccatgtgcagcagggtgtcaaagatgtggatggagcggctgtccacccagcccttctccagcaccttggcaaaaatgtccgtcagcacctctttgatgggccgcttggggggcagcaggttccagtagggcattgtgtccacccc

SEQ ID NO: 342974 - DNA, 1069 bp, Homo sapiens; identical to SEQ ID NO: 335539
  chr17:38498097-38499166
  hypo

SEQ ID NO: 342975 - DNA, 508 bp, Homo sapiens
  chr17:39658629-39659137
  hypo
cgtcctggccctcgagcaggctgcggtaggtggcgatctcctgctccagacgtgtcttgatgtccagcagcatcttgtactcttggttctggcactccatctcactgcggagctcgctcagctgggcctcgatgctgctgatgagtccctggatctgctgcagctgcagggcatagcggcactccgtctctgccaccgtgttctccagccccgctttctggtggagcgacagacaagaagttacagagggagccaggccagagggaaacctagaggtggtcgccaccgggcaggaggctgcaggcataccatgctcagctgggactgcagctcaatctccaggccttggagcgtgcgcctgagctccgtgatctctgtcttgctggtctgaatcatggcagtgttggtagacacctccttgttcagctctgcactctgaaatgcaagcaggaagaaggtggtggggaagctcagctcgagcagcctgaccaagaggctgtgtccgccc

SEQ ID NO: 342976 - DNA, 104 bp, Homo sapiens
  chr17:39659216-39659320
  hypo
cggcggttcctctctgccatggcctcgtactgctccctcatctctgccagcacgcgggtcaggtcaatgcctggggtggcatccatctccacgttgacctggcc

SEQ ID NO: 342977 - DNA, 215 bp, Homo sapiens
  chr17:39682514-39682729
  hypo
cgcgcccggccgattgtgtagttttttaatgcaacagaataggctacaaaatatcagaggggatttctcttagtatggtgagaattgtgtcacccatttgtgtgtgtgcatgtgcacgcacacacacacacagaggtgagaaaaagaatgcgtaagggtgcgtagtaaaatgtacttattgtcgcaatttttttttttttttgatacagggtctc

SEQ ID NO: 342978 - DNA, 1103 bp, Homo sapiens; identical to SEQ ID NO: 335540
  chr17:39683530-39684633
  hypo

SEQ ID NO: 342979 - DNA, 206 bp, Homo sapiens
  chr17:39788221-39788427
  hypo
cggcagagacccacccagcccccatctccttgctcgggaggctttgggggcacagcgagggtcggctgtgaaaacacggagagaatgcgtgtagggtgactcgaggcacagccctggtgcgtgctgcgcggcggggttggtgatgaggtgctggctgatcccgaagatcaggagcactgactcaccagggctcccctgggttcccc

SEQ ID NO: 342980 - DNA, 439 bp, Homo sapiens; identical to SEQ ID NO: 335541
  chr17:40332770-40333209
  hypo

SEQ ID NO: 342981 - DNA, 647 bp, Homo sapiens
  chr17:40371760-40372407
  hypo
cgctgcaaccaggcctccagagacacctgcttctgctggagggccgtctcccggctcagacgctcctgggggctcagctgggccagcgggccaaactgagctagaggaggggagaggaaaccatgaccatcacctcccagtgtccaacaggaggcccagagaagcccactcacccgttctggagcgagaccctcctgggctcagatactgcattaagggcaagtcggggttcctgacagccaggggggccaagatgaatgggtgccccaggaggcgcctctgggccctgctcgccagcctcctgactctgagccgtcccctctgggggcacacgggtgctggggcagctggggaggaggcctgcctgcctcctgcccgcctgcctcacagggctgccagccctcttctcgcggcccagcatgggtccaggctgtctggggtgtaagtgtgcccatgcccttgactgcaggtgaacctgggcaaatcgctttcctttcctgtgccttggcttccccacgtgtaaaacgggagattctcggcacctgcctcagtggggtgcattaagattaaatacatgaggacatggaagatgccagaaagctgcctgacatgggtgagctctgtgtgaggttcgtgcttcttggtta

SEQ ID NO: 342982 - DNA, 139 bp, Homo sapiens
  chr17:40372634-40372773
  hypo
cggacagacagacagaccgcagagggagagcatgtccagggccactggggatgcagagccaccaagattctctcaggaaagggaggccgaagggaggcggcttccctccacaccatctgtgaggagtctcattgatggc

SEQ ID NO: 342983 - DNA, 418 bp, Homo sapiens
  chr17:40375292-40375710
  hypo
cgctgcctccgaatggaaagtgtgctttctcccaaccccaccagagctgctttccagtccccaggcccaatcctcaagttgcacaatgtgcctccaccgcgcctcaccttggatcctcaggctctcctggtactggatgatgaagtactcctgagtctgctgcagcttttttaactcattctctgtgtcctgcgtgaccagtcgcagctcctcaaacgtctggttgatctggaggtgtttctgggacatggcatcagcaaggcttccagctggagagctaccctgggaacatatggggggcagtgcaaggcagtgcgaatgggaggaagactgaggccttaatccccaggaaaagccagctcctacaaccagggtaagaccccaaaaggtaaattttgagtcgggaggaaaagcaaac

SEQ ID NO: 342984 - DNA, 42 bp, Homo sapiens; identical to SEQ ID NO: 335542
  chr17:40427473-40427515
  hypo

SEQ ID NO: 342985 - DNA, 197 bp, Homo sapiens
  chr17:40436565-40436762
  hypo
tgagccaccatgcccggccctttgggataattctcttaatccataaactcaaacccaccttcatgtaagtgtgcacagagcacactgtcccattcaatagagcaggggtgtaggctgggcgagaatggagatgccatgctccgcaccgcagaaaaatggtgggctagcccagcccagggaggcctcttcactccgcc

SEQ ID NO: 342986 - DNA, 841 bp, Homo sapiens; identical to SEQ ID NO: 335546
  chr17:41245464-41246305
  hypo

SEQ ID NO: 342987 - DNA, 81 bp, Homo sapiens
  chr17:41278616-41278697
  hypo
cccttcgtgttctgagggaccgagtgggcgaaaagcgccggagagttggagagtctgtggttcagaatgcgaggtgacaac

SEQ ID NO: 342988 - DNA, 100 bp, Homo sapiens
  chr17:41672281-41672381
  hypo
cgtctcaaaaaaaaaaaaaagaaactaaatgaataaagaatggatactgcataggcagagcggcggcatgagttgcttgactgagtatgcttattgttcc

SEQ ID NO: 342989 - DNA, 627 bp, Homo sapiens; identical to SEQ ID NO: 335550
  chr17:42030245-42030872
  hypo

SEQ ID NO: 342990 - DNA, 815 bp, Homo sapiens; identical to SEQ ID NO: 335553
  chr17:42091712-42092527
  hypo

SEQ ID NO: 342991 - DNA, 324 bp, Homo sapiens; identical to SEQ ID NO: 270689
  chr17:42097491-42097815
  hypo

SEQ ID NO: 342992 - DNA, 340 bp, Homo sapiens
  chr17:42254322-42254662
  hypo
caccaggctgcggcgcgccggctcctggaggctggagctgatgcccgggcggccgggcgcaagcgccacacgccgctgcacaacgcttgtgccaacggctgcgggggcctggccgagctgctgctgcgttacggggcccgcgctgaggtccccaatggggcgggccacacgcccatggactgtgcgctgcaggccgtccaggactcccccaactgggagcctgaagtccttttcgccgcactgctggactacggggcgcagccagtgcgccctgaggtgcgctgggaggccctgacataggaggctcctgtgtgggggagcccgcggctggaactgctcc

SEQ ID NO: 342993 - DNA, 248 bp, Homo sapiens
  chr17:42334648-42334896
  hypo
cgcacccggccactgtctcagtcttatacacaacctcccgtgtgcattaacatccccataggcccccaccttgatcagcttggagaaagtctcatagatgaagatgagggaaatgaggaaggagaagatctcctgggtatagcgggagatgaagcggaccaggaagctaccctcgaaggccaccaccaacaccaccagcaggatgagccagaagccgatccacacgcggcccacgatgtactctagac

SEQ ID NO: 342994 - DNA, 124 bp, Homo sapiens; identical to SEQ ID NO: 270702
  chr17:42335363-42335487
  hypo

SEQ ID NO: 342995 - DNA, 99 bp, Homo sapiens
  chr17:42338019-42338118
  hypo
cgcagctctaggaggctccagaaggtgaggtgagagaggtgcgggcggccccaggccccattctcccccaggttctcctccagttgcacccagcgcgcc

SEQ ID NO: 342996 - DNA, 399 bp, Homo sapiens; identical to SEQ ID NO: 335554
  chr17:42402710-42403109
  hypo

SEQ ID NO: 342997 - DNA, 74 bp, Homo sapiens
  chr17:42787528-42787602
  hypo
agactccgtctcaaaaaaaagaaaaaaaaaataccgtctacttttacttctggattgttaacagatatgccatc

SEQ ID NO: 342998 - DNA, 1685 bp, Homo sapiens; identical to SEQ ID NO: 335555
  chr17:42906461-42908146
  hypo

SEQ ID NO: 342999 - DNA, 841 bp, Homo sapiens; identical to SEQ ID NO: 335557
  chr17:43044728-43045569
  hypo

SEQ ID NO: 343000 - DNA, 111 bp, Homo sapiens
  chr17:43121686-43121797
  hypo
cgtccccccatcagagactgtcaggtcctgtcccgctgaacccaacccccgtctggaactggctggaatcaccttaaaagctgtggcaagcggatgggtgcggtggctgac

SEQ ID NO: 343001 - DNA, 230 bp, Homo sapiens
  chr17:43180339-43180569
  hypo
cgaccaatggaaacaaaggacattccagtagtgcaccagctcctcaccaggtacttgaagcaatttcaccttacgcccgtcatgagccaggaggaggtggagcactggttctacccccaggagaatatcatcgacactttcgtggtggaggtgagtcagggagtggtgttccaggtctctaacacgttcccagagaggcacccccctgagtggccgggttcccagggctc

SEQ ID NO: 343002 - DNA, 421 bp, Homo sapiens
  chr17:43246869-43247290
  hypo
cggtgagttccagcggaaggacttctctgagacttacgaacgcttccacaccgagagcctgcagggccgcagcaagcaggagctggtgcgagactacctggagctggagaagcggctgtcgcaggcggaggaggagactaggaggctgcagcagctgcaggcgtgcaccggccagcagtcctgccgccaggtggaggagctggctgccgaggtccagaggctccggaccgaaaaccagcggcttcgtcaggagaaccagatgtggaaccgagagggctgccgctgtgatgaggagccgggtacctaggggtgcctcccagcctggtggacccaaggagaaggtcccatttcgtgcacactcaggccagctgggtctcaaggaggcaggtggcagatgaaaaccaccgtcaacaccctgtgc

SEQ ID NO: 343003 - DNA, 309 bp, Homo sapiens; identical to SEQ ID NO: 335559
  chr17:43298587-43298896
  hypo

SEQ ID NO: 343004 - DNA, 883 bp, Homo sapiens; identical to SEQ ID NO: 335560
  chr17:43324788-43325671
  hypo

SEQ ID NO: 343005 - DNA, 59 bp, Homo sapiens
  chr17:45689891-45689950
  hypo
cgttagaagaagcccgtcgtcggtttaaggaccacgtggaaggaaaacagattctctcc

SEQ ID NO: 343006 - DNA, 938 bp, Homo sapiens; identical to SEQ ID NO: 225395
  chr17:45810488-45811426
  hypo

SEQ ID NO: 343007 - DNA, 618 bp, Homo sapiens; identical to SEQ ID NO: 335568
  chr17:45928211-45928829
  hypo

SEQ ID NO: 343008 - DNA, 107 bp, Homo sapiens
  chr17:46006406-46006513
  hypo
cgatccacactgggaccaaggtaggaccttgccctcctgaccctcggcaaacccaagccacatgcccaaaaggggccgcggccacatatacctcatgacactggcac

SEQ ID NO: 343009 - DNA, 790 bp, Homo sapiens; identical to SEQ ID NO: 335569
  chr17:46089217-46090007
  hypo

SEQ ID NO: 343010 - DNA, 629 bp, Homo sapiens; identical to SEQ ID NO: 335570
  chr17:46124683-46125312
  hypo

SEQ ID NO: 343011 - DNA, 773 bp, Homo sapiens; identical to SEQ ID NO: 335574
  chr17:46659093-46659866
  hypo

SEQ ID NO: 343012 - DNA, 1600 bp, Homo sapiens; identical to SEQ ID NO: 335578
  chr17:46687527-46689127
  hypo

SEQ ID NO: 343013 - DNA, 1023 bp, Homo sapiens; identical to SEQ ID NO: 335579
  chr17:46690031-46691054
  hypo

SEQ ID NO: 343014 - DNA, 1155 bp, Homo sapiens; identical to SEQ ID NO: 335580
  chr17:46691437-46692592
  hypo

SEQ ID NO: 343015 - DNA, 531 bp, Homo sapiens; identical to SEQ ID NO: 335583
  chr17:46723839-46724370
  hypo

SEQ ID NO: 343016 - DNA, 2217 bp, Homo sapiens; identical to SEQ ID NO: 335601
  chr17:47072749-47074966
  hypo

SEQ ID NO: 343017 - DNA, 2329 bp, Homo sapiens; identical to SEQ ID NO: 335604
  chr17:47572986-47575315
  hypo

SEQ ID NO: 343018 - DNA, 844 bp, Homo sapiens; identical to SEQ ID NO: 335606
  chr17:47653244-47654088
  hypo

SEQ ID NO: 343019 - DNA, 161 bp, Homo sapiens
  chr17:47657789-47657950
  hypo
cgcaggacatttgcttgagacccaagtggcagggatccaaccgcccttggcgctgatgtttgctgagggctcagggcttccctctccagccccggttccaagctgtctgatcccccacgaggaaacttgagcaaacaccctgggctcggtgctggaggagg

SEQ ID NO: 343020 - DNA, 891 bp, Homo sapiens; identical to SEQ ID NO: 335608
  chr17:48049697-48050588
  hypo

SEQ ID NO: 343021 - DNA, 284 bp, Homo sapiens
  chr17:48565138-48565422
  hypo
cgtgctgctcggggagctgtttcctgagacttcccctgatcttgacattcaagaagcgagcacggggccgaggcaggtgcgccatcagataacctgggaccactcaggtttctcccagctgccagggctcgtgccacttgagacatccgggcgctccctgccaggacacctcataaggcccgtgcagaggagctgggtaggagccagggccaagtcggggtggcacagatcaccttctgtgactcagtctggtctttccttcaccagatgaatcagaagctccc

SEQ ID NO: 343022 - DNA, 807 bp, Homo sapiens; identical to SEQ ID NO: 335610
  chr17:48619126-48619933
  hypo

SEQ ID NO: 343023 - DNA, 310 bp, Homo sapiens
  chr17:48687014-48687324
  hypo
gtgcctccctgccccgtgaccctgaccagctagccacattgcttgtcttcctcaagtgccctgtgcccccagcttcgggctggacattcagagccagccacccaatgggctcagcgcaccccacccataggcagagtgaggtgggagctgaggggaagccgcccctgaggggccctgcccagcgcacctggtccggccagtgaccaatgtcgtgtttcgttcttttagatctaatgctggacgatgtaattgcttccggcagctcagccagcgctgcgtcaggtactgcgtctggggtgtgggctcatgc

SEQ ID NO: 343024 - DNA, 197 bp, Homo sapiens
  chr17:48776811-48777008
  hypo
cgctggtcctgcatacgtcccattttgaggctccagagacattggtggcttggacgggacagaagaaaacagggagcggctctgactcactggtggctgacaaacaggacccggttttgtgctttctggtgttctgagtatggcagagggggccgacacatcaccattctgaactagtgccaaagaggtgtggtccc

SEQ ID NO: 343025 - DNA, 120 bp, Homo sapiens
  chr17:48845008-48845128
  hypo
cgggtaacgctcacatttcatttaaccctccaatgacaaaagacgggcaaacagacggggcatcagggtgggcctcagcatcaaaaaactggagggagctggctgggtgcggtggctcac

SEQ ID NO: 343026 - DNA, 382 bp, Homo sapiens; identical to SEQ ID NO: 225429
  chr17:49008769-49009151
  hypo

SEQ ID NO: 343027 - DNA, 102 bp, Homo sapiens
  chr17:49229459-49229561
  hypo
cgggaagctgagtcacgagaatcgcttgaacccggatggcggagtttgcaatgaaccgacatcgtgcaactgcgctccggcctgggcgccaaagcgatactc

SEQ ID NO: 343028 - DNA, 134 bp, Homo sapiens
  chr17:49281042-49281176
  hypo
cggccatgcccggcctttaatttccatattactctaacattactatgtgtaaaatagcattaaagtacacatataaaaaaattacggtaagggtaaataaactacttacttctaggaggaacaagaggttttcc

SEQ ID NO: 343029 - DNA, 892 bp, Homo sapiens; identical to SEQ ID NO: 335615
  chr17:50235175-50236067
  hypo

SEQ ID NO: 343030 - DNA, 1568 bp, Homo sapiens; identical to SEQ ID NO: 335618
  chr17:53342198-53343766
  hypo

SEQ ID NO: 343031 - DNA, 905 bp, Homo sapiens; identical to SEQ ID NO: 335622
  chr17:54911484-54912389
  hypo

SEQ ID NO: 343032 - DNA, 446 bp, Homo sapiens
  chr17:55644506-55644952
  hypo
cgtttaaaacattgctatcaaccagttggaatataggcccggagtatcgcagggagtaatctaattagtatgaagtcaattcagtcgctccttttgtatctcgtgattaaataagtggggaaaatggcttgaaaattaggtgctagaacgacccaattacatttctgtagctttttgtattcaatttcataaacaattttgctcttcgctggttaatcagtgaatgcctttttccagtttgaaaagcacttttgaaattataatgcaattaaattgtgtgtggatgttctggcatagcgagtgtgaaagccaggggcttggcaggccgccatgttgtaccttgactgtaatgagtccctgggctggcagcttgcgagtgtcattcataatattgtccatgctgggttactgtaaagtgcagctgccttaaccggcagttaaccggc

SEQ ID NO: 343033 - DNA, 132 bp, Homo sapiens
  chr17:55664904-55665036
  hypo
cgccccccacccaactccccccagccccaaaggtggctgcagaggcgcaggtgtgagctggctcactaagtcgctttccccctcctgattaagcgtgtgggggaataaagaagacccgtgtcgactcacgcc

SEQ ID NO: 343034 - DNA, 348 bp, Homo sapiens
  chr17:55753412-55753760
  hypo
cgtctgcagtcccaggccacgttcctgtcagactccgcttctgagtgacagctggcaagccctgacttgggggccacgctgcggagaacaaaacatgtgcagacagtctagggcaccaaggtggcctcattcatgccccctggcattgggagctcctccctcatacacacactcacacgcacgcatgcatgcacacacgcacacagacatgcacgcacacgcacgcacacacgcacacacaggcgcacacacgcctgccagccctacttgtgcaggatgggtccttgttcagctccgctcccaagccagtatcacttaagtcagtagtctgatgaatctaatcccttc

SEQ ID NO: 343035 - DNA, 266 bp, Homo sapiens
  chr17:55917220-55917486
  hypo
cgttttcttccaacgcagtctgtggtctgacactcaagtgttcggatttccgggaaacgtgactacctccgtgttgcttaaaagaccagatttaagtatcacagagatgttatcattttcactcaattaattcgctaaagatatataactaggcacattctgtcactgagtgaaaaatttagcactaatatcttagatccaattctactataacaaatagtaaacatgattttaaaaagtctatagggccgggcgtggtggctcac

SEQ ID NO: 343036 - DNA, 414 bp, Homo sapiens; identical to SEQ ID NO: 335623
  chr17:56326873-56327287
  hypo

SEQ ID NO: 343037 - DNA, 787 bp, Homo sapiens; identical to SEQ ID NO: 335625
  chr17:56429059-56429846
  hypo

SEQ ID NO: 343038 - DNA, 294 bp, Homo sapiens
  chr17:56435251-56435545
  hypo
cgtcaactgggccaggggctggctcagggagggccctggggcactgtgggttagagagccgccccgaaggggctgctgagttggatctggtgacttgctgatcaggagaaggtggctctggctggggctgtgtccgaggaataggaggcctggactgggggactccggtttctgggccaggcttcctgccatgccactggaaccgctttttgtagtggtggtgccggtggcggtggtagtggacatggctggaaacctgggtttcccctgtgggcaccaccgagtccaaggaac

SEQ ID NO: 343039 - DNA, 80 bp, Homo sapiens
  chr17:56439864-56439944
  hypo
cgcacacgttcaccgccgccaaagaccccacactgctcaccggcctgctgtggcgggggcggcaccggatgcgcagcacc

SEQ ID NO: 343040 - DNA, 151 bp, Homo sapiens
  chr17:56742993-56743144
  hypo
cgtttacctcactaaagttcctaagcattaaatgatagcaaggtacagctttaaacagtaagcaacggtaacaaccctgcaaccccaaagcattcttaagaaccaaaagaaacaatgaaaaaaaaaaataaggctgggcgcggtggctcac

SEQ ID NO: 343041 - DNA, 1294 bp, Homo sapiens; identical to SEQ ID NO: 335626
  chr17:56833016-56834310
  hypo

SEQ ID NO: 343042 - DNA, 135 bp, Homo sapiens
  chr17:57297042-57297177
  hypo
ccgcgcccggctgaatcaggattttaaatattcactctgcttttctagtcctgtgggagatatggtcttctccgtaaaatttctccctcagtcctgggtgatttatttcttttgcattgaagtgtgtggcttttc

SEQ ID NO: 343043 - DNA, 145 bp, Homo sapiens
  chr17:57787150-57787295
  hypo
cgtcatgtattgtcacttcagaacttccaagtgcagaaaaagctgaagttttttgcctacgtatagttaactaaagagtagaagtagtcctatcttacttacattaaataagaaaccttattattgggccgggcgcggtggttca

SEQ ID NO: 343044 - DNA, 40 bp, Homo sapiens
  chr17:57948205-57948245
  hypo
cggagcaactaactcagcaaataatcactgagcgtttacc

SEQ ID NO: 343045 - DNA, 411 bp, Homo sapiens; identical to SEQ ID NO: 335629
  chr17:58216773-58217184
  hypo

SEQ ID NO: 343046 - DNA, 235 bp, Homo sapiens
  chr17:59239030-59239265
  hypo
cggagggtagggtggttgctggtggaggggagtagccagcgcccctcccctcagcacacataccagcccccgcaattccagtttcatggtgcctgagttgctgtctggttggttgaactcattctcctcagcttatatttaactcgtcgcttgttctggaaaagtagtagtactgccttctctggcctttataaacatgattgctggacaaagatgagcagcacggatttgctgc

SEQ ID NO: 343047 - DNA, 942 bp, Homo sapiens; identical to SEQ ID NO: 335635
  chr17:59475276-59476218
  hypo

SEQ ID NO: 343048 - DNA, 971 bp, Homo sapiens; identical to SEQ ID NO: 335636
  chr17:59477745-59478716
  hypo

SEQ ID NO: 343049 - DNA, 246 bp, Homo sapiens
  chr17:60744592-60744838
  hypo
ccgtggtctggggcggagctggagctgagcaccaggcttcccgaactggctcaggcttccgagggagcagagggaggtaggaggttctgagcagggccccgggagccacggtgtgagcttctctctccgggggtgctggcgccctgccctccccacagaccagccggacaaccccagtgaggagaactgtggagtgatccgcactgagtcctcgggcggctggcagaaccgtgactgcagcatcgc

SEQ ID NO: 343050 - DNA, 229 bp, Homo sapiens
  chr17:60754637-60754866
  hypo
cgtgggggctgcgtggcgctggccactggcagcgccatggggctgtgggaggtgaagaactgtacctcgttccgggcccgctacatctgccggcagagcctgggcactccagtgacgccggagctgccggggccagatcccacgcccagcctcactggctcctgtccccagggctgggcctcggacaccaaactccggtattgctataaggtagggcagcctgttggcc

SEQ ID NO: 343051 - DNA, 207 bp, Homo sapiens
  chr17:60766578-60766785
  hypo
cgtgtggcgtcaaggaccctgaggttccaggtccaagacacctccagctccatgcgtaggtggcctctgcgccgggttccttgggtaggaggaggtcaaggccctcacctccctgtccatttgttagcaaacatgtattattaataacaacagggctgacacctaccaagccttggtctgggccaagcgccgagtctggtggagacc

SEQ ID NO: 343052 - DNA, 166 bp, Homo sapiens
  chr17:60766832-60766998
  hypo
cggggtgagggaagcagagcccagcctgaaccctgaccccttccctgtagacccctccctgagcccgtccccagcagcgctgccccccgccccgggcactgagctctcctacctcaacggcaccttccggctgcttcagaagccgctgcgctggcacgatgccctc

SEQ ID NO: 343053 - DNA, 303 bp, Homo sapiens
  chr17:60767028-60767331
  hypo
gcctacgtgcccgacccctacacccaggccttcctcacgcaggctgcccgagggctgcgcacgccgctctggattgggctggctggcgaggaggtgggctcccgacacttttgccctgggccccagccttgcccgggttcccctccctgccccttcctgcccccgccttatccgcaccctatcctgactattcccttcctcccaccccatggccccccatgcccagggctctcggcggtactcctgggtctcagaggagccgctgaactacgtgggctggcaggacggggagccgcagcagcc

SEQ ID NO: 343054 - DNA, 448 bp, Homo sapiens; identical to SEQ ID NO: 335642
  chr17:60885408-60885856
  hypo

SEQ ID NO: 343055 - DNA, 582 bp, Homo sapiens; identical to SEQ ID NO: 335643
  chr17:61553834-61554416
  hypo

SEQ ID NO: 343056 - DNA, 733 bp, Homo sapiens; identical to SEQ ID NO: 335644
  chr17:61777763-61778496
  hypo

SEQ ID NO: 343057 - DNA, 128 bp, Homo sapiens
  chr17:61817226-61817354
  hypo
cgggacggctgctccgacgaaggcccgggcctggggagatggaatcggtggcagagcgaggagtgactggctccggcagtgcaccaggcaccccgccaggcaggtacctgttcctggtttcaaactcc

SEQ ID NO: 343058 - DNA, 541 bp, Homo sapiens
  chr17:62782519-62783060
  hypo
cgtgggctgccctgaacaactgcaccgccccttggcacggcacaaagcagatgttcaatacattcctgcccatagagcgaagcctgctgccctgcgtgcttgggccaggctgtgggtgtggcgaagggtagggctgggaggcagctggctgggtgtcccgcatacctgattgtggtgtcaaactcagaggggaagatgatgtcgtggtgctggcagatctggcagatgaagctgcgctgggtgcacaggtcgcagtggtagacatgctgggaggcaaattcaatcagggccttgaggaatccttcatatacctcatctgcgatctgcggagggtaagtaggaatccttcatacaccccgtctgcgatctgcggagggctggtaaactgaggccccaggcctttcaagcagctgcactgagtcgccatggcaccctgcctagagaacttctacccccagtttccatgcgggcaagaaaagaaaacctccctgaatcaggctgagtagtggcagcatccagcccgtgggtactgaggtcactc

SEQ ID NO: 343059 - DNA, 243 bp, Homo sapiens
  chr17:62783342-62783585
  hypo
cggggtaggcatgacactctcacctgccggaggtcagcaacacggaacctatgcggagactccaagagataattccggtggttgagccttcaaacaaaacacaagcgattctttagaaaagtttcgaagacccaggccagcccgtgttgtttattttcattcccctggcgctgctcaccaggcagacacctcccgcctgggcggggcagggcctaggagcacaattcagcctgcttgggaccc

SEQ ID NO: 343060 - DNA, 220 bp, Homo sapiens
  chr17:63152527-63152747
  hypo
cgaggtcgcccatcctgccatggcttccttgttcctcctgcacaggtgaattccagctgctgtagaaacaacacagggagaagccctggtcctgcaacaacagcaccgataaaaaaaaattatttaacttcttggacggcaggcgtcccagggcttcctcgggacaaaggtggctgatgcgggaggctgagcagcctgccaggctgtcaacgtagaccgc

SEQ ID NO: 343061 - DNA, 848 bp, Homo sapiens; identical to SEQ ID NO: 335648
  chr17:63555681-63556529
  hypo

SEQ ID NO: 343062 - DNA, 669 bp, Homo sapiens; identical to SEQ ID NO: 335649
  chr17:64187889-64188558
  hypo

SEQ ID NO: 343063 - DNA, 671 bp, Homo sapiens; identical to SEQ ID NO: 335650
  chr17:64298989-64299660
  hypo

SEQ ID NO: 343064 - DNA, 716 bp, Homo sapiens
  chr17:64671940-64672656
  hypo
cgatgccagttctggttcctccgcggggtcccacgccagctgacccagcagtacctgtaacgtgtcccacccttgccagggtttgtgtgcctgcatggttttagaggttccaagtcagagcccctaaaccccttgccttattgctagacagcttgaccgcccccggaacatcacgtgggaagggcgctcggtaaatcctgttctggaggcaatctgtcactccaccagtttcccaatcaacatttgccgaggagttctggctcccggtgcagaactgacttgtggcgacgtgagggaactggcagcttcttagacccaagttctccctcgcagcatcgtcagaagaggcccaaagtagagacgcaaacaaaccctgagaacagcgtgttcttcccagtaacgtgaccgggaaaatgtgagccagaggaaacttgagagctccgtggtgcggctgagctggtggggtgagggttttttccctttttctatctggtccagcccatcggccacttgagatgctcctgaactgagtaaccaagctgttcggagggtactttctcagcaggacaagccctgagctctggaaaaacgcagctagaataacgaggaagcagaggggcctctcccacaccaggcttgccccgacaggtcagcttgcttgtggcccagcgctactgcgcacatgttcctttaagatccctatttccgaggcagcc

SEQ ID NO: 343065 - DNA, 367 bp, Homo sapiens
  chr17:64716166-64716533
  hypo
cgagccgtgcgtgctcatcccagtggccgaagaaagtaacaaacaagtagagaaatacaggattggtaatgagaagagagggagggagtatgcaccacagaaaccggtgcagggacaatgtcagaaggagtagggagcctcggggctaaagcatcctttgagcagagatagaagggagtcccgtgcctatctgggtcagaggaagtgcccaactgcaaaggccctcaggcggcagcgtgcttggcgtgtcccagcagatgaagtattgagccagagaacagcggacattttatttactctaactgtgctacccaggaggctgtcatgcccattaagtagcatcattttaacctgttgccccgttacc

SEQ ID NO: 343066 - DNA, 450 bp, Homo sapiens
  chr17:64751169-64751619
  hypo
cgctccacagtcaccttcccgatttctgccaggatcagctagccttaccgaagagctaaaaagagattcatcccaaacaagagcttccttggaagcattccatgaagacttgaaacggtgctgcctcccaccacctgacccagtattgtcagtgcctcctctgaggatcgcagaaaatcgcaccccacgcccccccagtgcacattccagacttggagaagcgcggcatggggtggcggtggggagaacacctttctgccagatcaaaagcccagcactttattcagagttttatttatggctccttcagaaggttagtccagtcacgcctccttaataaccgcctcatcacacatgattcaggtgtcctggggccacttcacgctcctggcttcctggcccaaagcccaggagaccgctgaaccccactgcctggcattatttgcgggc

SEQ ID NO: 343067 - DNA, 269 bp, Homo sapiens
  chr17:65040729-65040998
  hypo
cgcagccgccggaccctgcccagggcacccacgcctcggcgaccaccatgtcccagaccaaaatgctgaaggtccgcgtgaccctcttctgcatcctggcaggcatcgtgctggccatgacagccgtggtaaccgaccactgggctgtgctgagcccccacatggagcaccacaacactacctgcgaggcggcccacttcggcctctggcggatttgtaccaagcgcatccccatggacgacagcaagacctgcgggcccatcaccctg

SEQ ID NO: 343068 - DNA, 203 bp, Homo sapiens
  chr17:66416586-66416789
  hypo
cgctgtcaagccgcataacagaccaatttttattccacgaggaggagtacctggaaattaggcaagtttgcttccaaatttcatttttaccctctttacaaacacacgctttagtttagtcttggagtttagttttggagttagccttgcatatcccttctgtatcctgtccctcctccacgccgacccgagagcagctgagc

SEQ ID NO: 343069 - DNA, 317 bp, Homo sapiens
  chr17:66420425-66420742
  hypo
cgctgcgaccgacccgcagagccgatgtgggaaatcacaaaacaacagccccagccctgcatgcagggccccaccgcagctttgttttctaagccaaatgtgctcactagagggttccacggatctgcgggagaaagaagccagacctgcactccatccttttacaattggaagctcaatggacacaaaacaatgatcaggagaagtttccataacaaagcctaatggacattgtttcagtgcccaagtggcagctcctctctggctctaggagctgatgctccaagtcttggcccaaacactacttccggccgggt

SEQ ID NO: 343070 - DNA, 93 bp, Homo sapiens
  chr17:66426284-66426377
  hypo
aaggctcttctggtcgactagggagtaatgcacaggcaacgatgggactgggctgcaggccccacacgcacccaggaatctccacacccaagc

SEQ ID NO: 343071 - DNA, 110 bp, Homo sapiens; identical to SEQ ID NO: 335654
  chr17:66434339-66434449
  hypo

SEQ ID NO: 343072 - DNA, 425 bp, Homo sapiens
  chr17:66440125-66440550
  hypo
cgagaattcagtaaggtttaatatcctagcatatcgtcgaagtagagagatttctttgtcatgtaataaaacatattctttatggttcagattgtctttttgctggccatgcagacacgccaagttgaaacctgcttctaattatcacgcctactctgtactgaacgaaccacaaaaaacaattaggggtaaacacttttcaacagcagatgcttgaaatcttttacatgtctaccttacgtgccttgacacatttgctgatatgggtcccagacaaagggtgttgttattcttggactgcaatgaagggcacacagcccccctgcaggacacacagcctgacataatttgaatctgccgccattaagacaaagcttcgagataaacctcactaagactcaaaaagcaaacactgcttcacgttc

SEQ ID NO: 343073 - DNA, 57 bp, Homo sapiens
  chr17:66913081-66913138
  hypo
cgtgtacatgtttgtacaaacacctgtgtataataatacaaattcttggccgggcgc

SEQ ID NO: 343074 - DNA, 1724 bp, Homo sapiens; identical to SEQ ID NO: 335655
  chr17:68164458-68166182
  hypo

SEQ ID NO: 343075 - DNA, 133 bp, Homo sapiens
  chr17:70220156-70220289
  hypo
cgacggcaaagagaggttgccggaaggaaacaaaagtccatcaagggctggcaaaatattaatccggagctcacggatgggcagtgatgcgcaccctctgatggcgagcattcccttcatgttcatgctgccc

SEQ ID NO: 343076 - DNA, 546 bp, Homo sapiens
  chr17:70657377-70657923
  hypo
cgccccctggagttgtgcagtgggacactcctgcttgagcgcagattgctgctcagcctggggtgtagttctggggttcgaggtgcacgctctcaggagaggtagtggagagagtcatgggtttctctgagaattggcaagcgaagggacggcaacctgcagccttgctctccaggctatattccctggccggttgattatgaaaggagaatggcatatccctgacaagccctgcttcaccccggctttcagatcctcccatgtgcgatgagcgtgtgtgttcttgtgtggcaggcccttacatactgttttgattgttatcatcttgccgtgaaaggcctgattgttcaggcctggagatgacatcaccggcttcccactagggcagcctgtcgaggtgtttgatgagcctgcaggtgggaaggggctgggtactccccgcagggctgcccggccctacctgctcagaggagctggcttagcacgcaagggatcttcccccaccctcttggtgcagttctcggaaacttcttggtgcaggctggc

SEQ ID NO: 343077 - DNA, 331 bp, Homo sapiens
  chr17:70713693-70714024
  hypo
tccctgtgtggccacggggcactgtcctctccgcatgtgtcatccctccttgttttataagggtacccagtcatgttggacttaggcccaccctaatccagtacgagctgatcttaactaattacatctgcaaagatcctaccgccaaataaggttacagtcacaggtcctggggattaagacttccatacctttctggggtgcatgacttcagcatcgctccttattctggaacttacaggacaggtcactcttgctctgtagctctccctcggagtgaccctgcacatcggctgtctaggaggtgaggctggagaagtgagtcatgacc

SEQ ID NO: 343078 - DNA, 681 bp, Homo sapiens; identical to SEQ ID NO: 335659
  chr17:71160734-71161415
  hypo

SEQ ID NO: 343079 - DNA, 938 bp, Homo sapiens; identical to SEQ ID NO: 335660
  chr17:71161494-71162432
  hypo

SEQ ID NO: 343080 - DNA, 216 bp, Homo sapiens
  chr17:71201635-71201851
  hypo
cgctcacataccaagtcctctctcttcatgggtggggactgggaattcatttgcagaaagaaggtgcatttccagtcacccagaaccgggcgctgcagctgctttatgatctgcgttacctcaacattgttctgacagccaagggtgacgaggtgaagagtggccggagcaagccagactccaggtgtcgtatcctctagggagctatgtcaaggc

SEQ ID NO: 343081 - DNA, 181 bp, Homo sapiens
  chr17:71202346-71202527
  hypo
cgttttcacgccacacctcaacagcaaccttcatcgcctggtgcagcgaacttctgtgagtcaaatcaaaaacatgcttagtgcgaacgaagcgatacaggctcaaataacaaaattaacctgctcaagcacgtaatactccaggatgcagcatagggaggggaataagacacaaatagcc

SEQ ID NO: 343082 - DNA, 509 bp, Homo sapiens
  chr17:71281749-71282258
  hypo
cgggctgagccggggctgggggccgctgctgcccacccctcatcctccagagcatgggaggggagggagggcaagtctgggccagccttgccttcctgccttgccaggggaggggccgccacggcgtacgggggagcctgggtgatggtgccagcggcgccctcatcgccatggtaaccaccctccccctcctcggggtcccactcctccttgtccatgatgctgaggacgtcacccagcatggagggccccaggtcgatgtggaaggacatgatggactccgcatgcttcagcccgtacgtggccttgggcacgacaggcagatctgtcagatccccaaaggcctgctcatcgaggagggggtcaggggaatgtggacccgcggccccattccgacggggcactgcctcctccgtgcccgcctcctcatcgccgccctccccgtcattggccttcttcacggggctggatgacaggctcttgggcagcttactggtgcccttctccgc

SEQ ID NO: 343083 - DNA, 256 bp, Homo sapiens
  chr17:71431621-71431877
  hypo
cgccggctgcattgcgggcgaagcactggaacatgccggtatcatcgggcaccaggccgctgatctgcaggcccccgtcgttgcgctgccggaagcgggtcaacttctccacctccaccacggctgcgtccttgtaccaggtgatggagggcggcggcacacctgtgggcaagacgtgggcccaccgtcaacctgcctcctgcctcctctccgcctaggaggggtgcttgggaggaggccgggcccggaaatctgc

SEQ ID NO: 343084 - DNA, 308 bp, Homo sapiens
  chr17:71548553-71548861
  hypo
cgaggacgcatgacatctgtgtcacgcattgaaactggagtggcgcaggggaccctcctgagggggtggccgtccacattgccagctgatggccgagcggtcagtggtcgaggcgcaggtctgagtgtactcggccggagtacccatcatgagccacttagattagcttctcggcactcaagaagtacgtacgagcatcacgcccacttgagctatgagaaactgaggcataaatgggttaagtcacttggcaggatacgggggaacaggatttgagcccggccaggctgactgcagagcttgaggac

SEQ ID NO: 343085 - DNA, 398 bp, Homo sapiens
  chr17:71744668-71745066
  hypo
cgtggaagatggctctgccgggacagctgtaaactctttaaccttgtgtggggcttcgtccttcagcagcccggtgagggatcagtggcaggtgtgatggcgggggaggtggaggtggcggcggaggcggccctgcactcactcactcacggcagaacagactctggataaacaattatagtctatttacctcagaccatatggtgttggggaacaggtgtgcgggtaatgaagagcccagctccaattaagcgtcggggaacccggccggattcccactgaatcttgcgcttgggttgaggcccacttacaaatgagagctaaaaggactgaggctcggggaggcaggagcgggagcctgaggggtgcgtggcagggccagccagcggcccccaccc

SEQ ID NO: 343086 - DNA, 887 bp, Homo sapiens; identical to SEQ ID NO: 225487
  chr17:71948434-71949321
  hypo

SEQ ID NO: 343087 - DNA, 205 bp, Homo sapiens
  chr17:72220057-72220262
  hypo
cgcaggcgagacgctaaagcagccttgtggggcggacaaagctctgagcacaaggaaggggaccaaggctgctgcaatacatggccggggctgaaataagagactcagaggacagagttctggacaggccgggaggtcacagtcgagtgcggttcccagtacagtggaagagctttgagaagtgactggtgttaaaaatcctcct

SEQ ID NO: 343088 - DNA, 215 bp, Homo sapiens; identical to SEQ ID NO: 225489
  chr17:72270296-72270511
  hypo

SEQ ID NO: 343089 - DNA, 441 bp, Homo sapiens
  chr17:72277763-72278204
  hypo
cggcactcaggatttttttttaatgcggatgcagcttctggacaaattcctaggatctccccaccaccccttgcttcctgccccaaccagattgagaacctggagctgtcctggcaggacctgtggagatagggaaggggccggtggggtccctcaccccacaccctccctctgccccccagcagccggcaccatggagattgtgtacgtgtacgtcaagaagcgcagcgagttcgggaagcagtgcaatttctcggaccgccaggccgagctgaacatcgacatcatgcccaaccctgagctggccgagcagttcgtggagcggaacccagtggacacgggcatccagtgctcgatcagcatgtcggaacacgaggtgggtccctgccccaagggccctggcctgtcaggtgtggccaggcagggcggccagctggggcc

SEQ ID NO: 343090 - DNA, 593 bp, Homo sapiens
  chr17:72367882-72368475
  hypo
cagtggccctggcgcgccttgccaccaggaccaggaggccctcctactactaccttctggcgctcacagcctcggatatcatcatccaggtggtcatcgtgttcgcgggcttcctcctgcagggagcagtgctggcccgccaggtgccccaggctgtggtgcgcacggccaacatcctggagtttgctgccaaccacgcctcagtctggatcgccatcctgctcacggttgaccgctacactgccctgtgccaccccctgcaccatcgggccgcctcgtccccaggccggacccgccgggccattgctgctgtcctgagtgctgccctgttgaccggcatccccttctactggtggctggacatgtggagagacaccgactcacccagaacactggacgaggtcctcaagtgggctcactgtctcactgtctatttcatcccttgtggcgtgttcctggtcaccaactcggccatcatccaccggctacggaggaggggccggagtgggctgcagccccgggtgggcaagagcacagccatcctcctgggcatcaccacactgttcaccctcctgtgggcgccccgggtcttc

SEQ ID NO: 343091 - DNA, 712 bp, Homo sapiens; identical to SEQ ID NO: 335667
  chr17:72449954-72450666
  hypo

SEQ ID NO: 343092 - DNA, 207 bp, Homo sapiens
  chr17:72811689-72811896
  hypo
cgctccgtggtgcggttaaaggacataacacattgccagtcctgggctccttttgcatatgacacagaagcacgcagagtcggagcctttcttctgtaagtgccatgtgctgtagggttagaactggagaggagggaggcaggtggtggacacggcacagcctcagcaggcgtgagttgagcgttcttggtttaaagatccattctc

SEQ ID NO: 343093 - DNA, 79 bp, Homo sapiens
  chr17:72823386-72823465
  hypo
cggcactgccctgtctcactccaacccttcagcgtccctacagtcatctccttttttttttttttttagacagagtctc

SEQ ID NO: 343094 - DNA, 507 bp, Homo sapiens
  chr17:72824033-72824540
  hypo
gcacccaccccttccgaggcccagctaaagccaagagagccctgcagcccggcaccttccaagggctaagtggtggtgaaggagggagctggcgccaagtcctcccctagtcctgttccccgcctggagtgccggtgcctgagctggtgatgggcacactgccggccatttgttatcattagccctggcatgttgattctctgcttggaaaagagagtgccgctcccagacagccaccgtgacggatggcctccacctcacagtgtcagagccagagccacacatggggagcagggaatggcacggggcttggggcgccctgacctcagggacatctggagccaggttcagaggtcagagagttgtgggagcagctctccaggaagcagccctgccaaggcacagctcagcactggcgtgtggaaaaggcctgggggcccatgcctggaggaagacccttcacccttggccctcagggtcatggctctgagtgtgtgtgcacaactc

SEQ ID NO: 343095 - DNA, 226 bp, Homo sapiens
  chr17:72875512-72875738
  hypo
cccagcccagccctcgactaccttcaggcacatgttatcagagagcctggggaatagatggtgttccacatggcagctgatgatcgagtggccgaacgcccagtccagcacgggcagccgggccaggttaagcacccccaggctcatcatgtgaatccgacggggcttgttgtcccgggagaacatgggcagtccgatgtgctgtgacagacacgtgggtcacgcc

SEQ ID NO: 343096 - DNA, 571 bp, Homo sapiens; identical to SEQ ID NO: 335673
  chr17:73073461-73074032
  hypo

SEQ ID NO: 343097 - DNA, 144 bp, Homo sapiens
  chr17:73090991-73091135
  hypo
cgttgggagcagggcagagggagggttctctgcagtcgccgtggacacagggacctgccctcagctcctgggagctctccagggagactgcagagaccccggcctcggaggggcccggtggacagcagcccgagctgatggccc

SEQ ID NO: 343098 - DNA, 275 bp, Homo sapiens; identical to SEQ ID NO: 271058
  chr17:73091165-73091440
  hypo

SEQ ID NO: 343099 - DNA, 127 bp, Homo sapiens
  chr17:73100161-73100288
  hypo
cgccctgcagaagaaggagcaaggcaagcaggctgtcgcggcggatgccctggagcgggatcttttcttggaagccaaagacggtcctgggaagcaacggtcccctgagatcatgtatgtaaccagc

SEQ ID NO: 343100 - DNA, 255 bp, Homo sapiens
  chr17:73124823-73125078
  hypo
cgcaggaggtgtcccactcatcatcaactgcctatccagccccaatgaggagacggtgctgtctgccatcaccacgctcatgcacctgagcccgccgggccgcagctttctcccagagctgaccgccacgcccgtggtgcagtgcatgcttcgcttctccctctcggccagcgccaggctccggaacctggcacagatcttcctggaggacttctgctccccccgccaggtggccgaggcccgcagccggcaggc

SEQ ID NO: 343101 - DNA, 130 bp, Homo sapiens
  chr17:73215304-73215434
  hypo
cggcccggcacggtggctcacaggaagtagtgggccaaatgtttgagtctctgattgattcgctaaggtttgttgttgtcgtttagagacagggtttcgctttgcggcctgggcgggagtgcagtgatgc

SEQ ID NO: 343102 - DNA, 230 bp, Homo sapiens
  chr17:73236176-73236406
  hypo
cggactgttccctctatgaacaacagaaagggtggtgagccgagggcgggtggggagggcctgccgctggaacggggcgcagccctccaaggactgcacggaagacagccccggaggcactcattgttccccgctgcagctggcacgctctggagggaaggacagctaactgcagcccaggagacatgacgctggaaagtggaggtccttggcacagtagtgctgtcacc

SEQ ID NO: 343103 - DNA, 141 bp, Homo sapiens
  chr17:73242514-73242655
  hypo
cgctatggggacacgaggaatggcgtgggcaggtgaagggctgcggtttccacctccggagagtgaaggacctaccgtcagggcctggagcgcctcccattcctgtggggactggatcttgtgggccagcagtcggacggc

SEQ ID NO: 343104 - DNA, 968 bp, Homo sapiens; identical to SEQ ID NO: 335674
  chr17:73584153-73585121
  hypo

SEQ ID NO: 343105 - DNA, 392 bp, Homo sapiens; identical to SEQ ID NO: 335675
  chr17:73585949-73586341
  hypo

SEQ ID NO: 343106 - DNA, 128 bp, Homo sapiens
  chr17:73586371-73586499
  hypo
catatccaccctgccctcatctttatgaattgcgtgtagacccttattgaatccttagaaggatgggcttgaaccctcctggcaggaaggggcaggtaaggggcaacaggtgctacgtccccaggacc

SEQ ID NO: 343107 - DNA, 300 bp, Homo sapiens
  chr17:73607997-73608297
  hypo
cgagtgcctgccgcctgaggttcctgcccggcccagcctgactctcccagcagacattgacctgttccctttctccagcttcgtcgccatcggctttcaggtgggcgcccaggcctaagctcttcccgctggcctcaccgctctgagttagcacctgcctgacagatgctgcgtttttttccccgctgtcagctcttgccctccttcctccccagcctttggggctgtgagtagcgctgaattgctctgaaaataaccgttgaatgtaattgtctcaccatagagcgttactggagataa

SEQ ID NO: 343108 - DNA, 1124 bp, Homo sapiens
  chr17:73612827-73613951
  hypo
cgcccgggccccgtgcctgtgcccgtgcagccatccaggtgggcccccacggggaggtggccagggctgtcccgctcctcggggaatcaccctatgaacttagtgacctcttgcttctcccacgaggcctcccaaagctttcctgaggaaaatcgaccccaaggacgaggctctggccaagctgggtatcaacggtgcccactcgtccccgccggtgagcaccccagcctgtctcccccagagtgtgtgctgctgcactggggagctcaaggctctctggggcgaacttggccttgtgctgtgactcagcccgtgtactttctccgtatccccccagatgctgtcccccagcccaggaaagggccccccgccagctgtggctcctcgacccaaggccccgctacagcttgggccctctagctccatcaaggaaaagcaggggccccttctggacctgtttggccagaagctgcctattgcccacacacccccacctccaccagcgccaccactgcctctgcccgaggacccagggaccctttcagcagagcgtcgttgtaaggaaccacatttctcctgcgccgtgggcttcactggggcagaggcagggttcgcacagactctcggtgcccagggctgaaggcatttctgcgtggctgaggccagctgttcgggcttctggactttggagccatacgtagctggggagtcccagcttccgcgttcccacccagggcagggcctgggcatctttggggctgtcatcgagaggctgtcacacacagggtgttgtccctgacacatacccgacagctctgtgaggaagttagtggccctggctgacatggtcatagaagacccacgagcctcacggacgccagggaaagtttagggcccaaaatggaggcaggagatggtgccatggaaggagtaaggcagctggaggttgggagagccgggcccttggaaggctcgtggggatgaaggtcttccctcccgtgcccccatcactctggctctgcagcccctcactgaggctcctcaccccctcctctctgccaggcttgacacagcccgtggaggaccagggggtctccacccagctactcgcgccctctggcagc

SEQ ID NO: 343109 - DNA, 959 bp, Homo sapiens
  chr17:73615737-73616696
  hypo
cgagacccaccaccttcctgtagggcgagagtggcagcgacgtgcagctgttagccgtgtcccaccgtgggctgcgactgctcaaggtgacccaaggccccggcctccgccccgaccagctgaagattctctgctcatacaggtgcgctagcccacgaccctgggctagaggtgggggcaggtggcaaggtgacctcagttcatgcccgatccctgcgcagctttgcggaggtgctgggtgtggagtgccggggcggctccaccctggagctgtcactgaagagcgagcagctggtgctgcacacagcccgggcaagggccatcgaggcgctggttgagctattcctgaatgagcttaagaaggtaagtgtggggcacgggttgagaggccgggcagacagccctcaccgatgctgcatctccctgtccgtcttccctgtgggggcaggggctgggagtttgggccaaatccctggaagtctggggtgctaggtggaggggcaggccagcagggggagcaggtgggcaggcaggacagggaggcacaggcagacttgctgctccaggccctcgcctgcttgcccacaggactccggctatgtcatcgccctgcgcagctacatcactgacaactgcagcctcctcagcttccaccgtggggacctcatcaagctgctgccggtggccaccctggagccaggtatcgccagaggccggcaggggctcacacagggagggcatccacttggcagaggctgcccgggggcagagggtccagtgggtgagccacatccctgggtgccttccaggctggcagtttggctctgccgggggccgttccggactctttcctgccgacatagtgcagccggctgccgctcccgacttttccttctccaaggagcagaggagtggctggcacaagggtcagctgtccaacggggaaccagggctggctc

SEQ ID NO: 343110 - DNA, 149 bp, Homo sapiens
  chr17:73635145-73635294
  hypo
cgcaggccaattgcagggtggagggccccgttcgatgaccttcacggtggttctaaaccagctctgccaaggcagcggcaccgggagtgactggcctcactgacgtagccatctcagcgagaaccggctgagacctgggacaaggcaac

SEQ ID NO: 343111 - DNA, 383 bp, Homo sapiens
  chr17:73635994-73636377
  hypo
cgccgccttggccggcagcccccgaagcaagcccttggtctcactgtcctcaccggcttcctccaccctgagctgtgtcagctgggtggggactgagggccaccactaggtggaagtcaccaggggtgcaatgtgtgagacctgacaaacttgttctgcgggctgcggatgggtgcgagggtggaatctcggtgctgcgacgagtgtggggccagccgtggaggctccaggtgttctctctgccccagcagagcccggcaggagccccaacaggaagccagcgcggcatggctgccaccgacttcgtgcaggagatgcgcgccgtgggcgagaggctgctgctcaagctgcagagactgccccaggctgagcccgtggagatc

SEQ ID NO: 343112 - DNA, 178 bp, Homo sapiens
  chr17:73808646-73808824
  hypo
cgaggagcctcggtggcaaggtacaggcatccacacctcggccgcgccctccctataatcctgctcatagctgccctggggatttggctcaccaccacctactgcctgctctagccgaggccccgacctggcccgcatcccaccctacacccaccattcaaaaggcgcctctaggggc

SEQ ID NO: 343113 - DNA, 240 bp, Homo sapiens
  chr17:73811168-73811408
  hypo
cgcactcatgctggaggaaggggagcctgcccggccttccctcagggcctgagcctgacttgcctgtgctctgccctccagatctacaagtccaccaagtgcaacgacatgcagcagtcgggcagctgtccccgaggacccttctgcgcctttgcccacgtagaacgtatgctgttcccattgccccggggcagtgccctctcccacccctccctcgcctggctagctcaggcttaggcc

SEQ ID NO: 343114 - DNA, 220 bp, Homo sapiens
  chr17:73821496-73821716
  hypo
cggaggggctccgtttgcattccttggtgctctctgagtgcagctggtgtcccgccctgttctgggcggacgcctgtgtgcgtgtgtgtgtgcctgtccagtgtatattgtgtcttagcttccattttaaaaattgttctgtacagagagagatgcagcaggggcgggagggcagagtgggcggaggggagcagccgcacccccagcaccgggtgtctgc

SEQ ID NO: 343115 - DNA, 88 bp, Homo sapiens
  chr17:73910336-73910424
  hypo
cggcccggagctcgctggccctgatcttcagctcagcctgctcctggagacagcggaggccctgctgcattctcctcccaggaattgc

SEQ ID NO: 343116 - DNA, 349 bp, Homo sapiens
  chr17:74003316-74003665
  hypo
cgttccttggagatggggtctgtcaaatccttctcgtagctggactcgtcctgcaggagctgggccagctcttcactgatcatcccggagaggagggcctgctggatggggatgcggcctgtcctcttggggtcgatgagccccccggtcaggtgctgcacctgcaggtgtgggagcacgctctcccggggcatccagcccttctggacggcctcgcccaccgagagcctcttcttggtgacggggtcctcgatgccggtgaaggccttctgggcgttaagcagcctctgtgtggaggtgttctcgatcaggcccctctccatcgccttgtgcacagagtagcgctcac

SEQ ID NO: 343117 - DNA, 506 bp, Homo sapiens
  chr17:74003908-74004414
  hypo
cgatggagagtgaggagcttggcttggtctccccagctacaagcagcgcaaactcggagatgggcaggtggccgtccttgtacagatggtactcctccttagagatgcgccggcagcggagggcggcctcgatggagtactgcttcccgctcttgcggtccaggagcacagactcctccccacagggccccgaggtggtgacctcctcccagtcacactcgagctcctgcagctgcaagtactggcccctgtcgatgatgcccctcttgtaggcctcgtatggggacatgtccttccccgtctcgggttccaggatggagatcttggtggaaaggttggtctctcgcgtctgggtctcctggctgagctcctcccggctcaccttggcgtggaggtcccggagcgtccgctccttctcgtagatctggtccttctcgcggaggatggccgcctccagccgcgagagctcctggccccgctgggccgccttctgtcgctcgctctcc

SEQ ID NO: 343118 - DNA, 465 bp, Homo sapiens
  chr17:74005186-74005651
  hypo
cgggcttcctcctctccagcagcaggcgcttgctctgcagctcgtacaccgcgtcctccgcggcccgcctcttctgggccgcctcccgcacctcctggcggagccgctctgcttctttctccagcaccgggtccttctcgtggcgcaccacctccttgctcaccgtcttggtctccaccttggcccgctcgcgcctccactcgtcgcgctcaccctgcaggcggatgagctgctcctgggagcgcccgtggctgttgacgagctcgttgagctgagccttcaggcggtcgatctcacgcagcacctcggggctcctctcatgcctcaccacctcctgggtcacctccttgtactccaccgtgggcttctgggcccgcaggacctccaggtcgggcagcagcttctccacctccttctccacaccgctcctcttgcccgccatctcctgcagcttggccttgagcc

SEQ ID NO: 343119 - DNA, 194 bp, Homo sapiens
  chr17:74013689-74013883
  hypo
cgggtctgtccacacccttctccatctccatcccagccaccgctcctgcacttgcctcacctccctcaagtgtgagcaccagggccgggccgcttctcatcccagccgccccttcccgctgctcacccacctcatggctgtggatgcggccctccaagtcctccaagggtgtggggcggctcagcggggcccgc

SEQ ID NO: 343120 - DNA, 127 bp, Homo sapiens
  chr17:74019389-74019516
  hypo
cgcgtgcccagtcgaccctgggtcccacgtcggggggcagcaccatcttctcgtacagggcacggtactccgcacactcctgggtcacccgctcgtgcagctgcttgatgctgtcaagaaggtggcc

SEQ ID NO: 343121 - DNA, 185 bp, Homo sapiens
  chr17:74042063-74042248
  hypo
cgacacaggcaaaggaaaaccacaggcccttgccttcccggtcctcaagggtcacctgtaagatgatgtcatagagtcggatcaggtcctggggccggggtgagcgcttgctgtcatcctctggctgctgctgcagcagagccctctgcagacctttggccatgttctcattacgcttgattgcc

SEQ ID NO: 343122 - DNA, 149 bp, Homo sapiens
  chr17:74047812-74047961
  hypo
cgaactggggctcattcatgctataaatctagtaaagcaaacacggccaccattcactcctggaaccaccagagcagcaccatccaatagaactctctgccacgggcaatgtcctctacgtgcaccgtccaatgaacacctgagcactc

SEQ ID NO: 343123 - DNA, 104 bp, Homo sapiens; identical to SEQ ID NO: 335678
  chr17:74072105-74072209
  hypo

SEQ ID NO: 343124 - DNA, 386 bp, Homo sapiens
  chr17:74086716-74087102
  hypo
cgagcctggaggcccagggaaagcggagaaggaccaaggaggggctgaagagctgatgcttggccccaggggggttccccacctcgctgtatttggggaaagccccagtttgcctgtcctctgctgcacacactcccctttctaaagatgggaaggccgggaggcctcggccagctggggcctgccactgctggtctgagcgtgaaagggctgccccaagacaaataactttttctgagttcacacaggagacaaggacagagacagggaagggaggagggaagcctcagggagggcagagctgccatcagccagagaggaccaggccgagggctgcgaaactgtccctgtgcccgctgaagcccgagtggcatcggggacctgcc

SEQ ID NO: 343125 - DNA, 810 bp, Homo sapiens; identical to SEQ ID NO: 335679
  chr17:74236139-74236949
  hypo

SEQ ID NO: 343126 - DNA, 377 bp, Homo sapiens
  chr17:74269555-74269932
  hypo
cggctgtctctgcagcagcccactcaagggagagaagcggagggcggcaaacagaaacctgcccagccggctgcaggggttcgcctccagccattggcactgcttccccggaatcccacgccaggggtcaggaaccaccctgagccagcagcaagagcgcagcaggcagctgccaccctcacccccagagtgctggacactgacagcacgggccccagcaccccaggctagaaggcaggtctagagccagaaggcagggcacccccaatctagctgaggccaggagagagctggtggggtgagcaccggcccagctggtcccggggccaggagtctccctgtccccagtgcagtgtccagccctccgaagccccggc

SEQ ID NO: 343127 - DNA, 264 bp, Homo sapiens
  chr17:74387398-74387662
  hypo
cgagctgctggccttgggcaccccgttgggcagtgcctgggccttctccagcagggcatgggtttccagccaggactcgatacggttcaccagccgccagccaccagtgctaaagtgttgcctgatctcctgctcaaagacctcggggggccgccgcaccagctgggtcatggactgcaccacgcggatcagcgccatctcattgtaacagcgactgttttcatagccttcctgcaggcctcggtcactgtcgaagccggcttc

SEQ ID NO: 343128 - DNA, 81 bp, Homo sapiens
  chr17:74388687-74388768
  hypo
cgaagtgagtttttatcttatcaggtgtttttcctcataaatcattactttaagactgtattccagctgggcgcggtggtt

SEQ ID NO: 343129 - DNA, 396 bp, Homo sapiens
  chr17:74390245-74390641
  hypo
cgcttggctgctctcaggatcgcttggctgctctcaggatccctgctctttcttttcttactcccttccttccaggacagggccagaactggggcctcagactcagattcagagtctagcatagtgcttggctcgatgcacaggcccagtaagggactgcggagtcaacaaggtggcaggcaaacgggcttgcctgttccggaaggatgcactcagcgctgcctcagtaaacatgactcagagacactaggccccgtccacgaacagaggagtgggaaaatggaatgtggtgtggccacatgctgtcatcctattttgcaggtaaaaaggaagaaactagatcattatgaatcaacacaggttggtcttaagcaaattagagatgatgtgtacgac

SEQ ID NO: 343130 - DNA, 149 bp, Homo sapiens
  chr17:74391568-74391717
  hypo
ggccgagaaagtaattttttaaaggagggaggaaagaaagaaccatctggcctggacacacggctgagtcagccctcacctgactgagcctgtgaccgcccctgtaaaaggtgggtgggtgagtgtcctcgcaggtgccagtcagcccc

SEQ ID NO: 343131 - DNA, 346 bp, Homo sapiens
  chr17:74392164-74392510
  hypo
cgagaaggcgggggaaggcgaagaccaggcaagggctgactcacagggtgcaaactccagtacggagaagacctcgcccttggcgctggtgaaggtgacgccaggcttgccgccacactgctggcacagcaccggggtttcgctgggccactcagccttcacaggtgactgcccctcgggcttgtcctccttgcgctctacgtcgggcactgcttccatcttctcctcctctacaatggccacattgtccagggtcttcttgaggttttcctgtagcttcttgatgtcatccagaaacttcttctcccgagttggcttctcaggctccacagtcggagaggtgggc

SEQ ID NO: 343132 - DNA, 127 bp, Homo sapiens
  chr17:74435202-74435329
  hypo
cggcgtggtttggaggcgcttgcctggctttagcccaagcctttctgctcactgccttaacctctcctcctctgtgaagtaagaacacctacttcacggggttctccagtgactgtgcctagaacgc

SEQ ID NO: 343133 - DNA, 48 bp, Homo sapiens
  chr17:74475354-74475402
  hypo
cgcccctgcggaagcagacaagggacaggtgggcatacgcttgtctac

SEQ ID NO: 343134 - DNA, 788 bp, Homo sapiens; identical to SEQ ID NO: 335680
  chr17:74533662-74534450
  hypo

SEQ ID NO: 343135 - DNA, 162 bp, Homo sapiens
  chr17:74571597-74571759
  hypo
cgccagagctgggaaaaggcaggggaggctttcttcgagccttcggagggagcgtggccctgccagcaccttgattctgggcttctgggctccagaactgtgacgattcaatttctgtggatcgaagccccccaggctgtgatcatttgttccagcagccac

SEQ ID NO: 343136 - DNA, 269 bp, Homo sapiens
  chr17:74621445-74621714
  hypo
cgctggtacagccggattatcccttcatcgtgtagccgcttccagacttctctctccagcttgaagtcatggtttatgtaaaagatcagccgcttccatgatgtatcatagtagtgatcagaaaagcgctcatggccctcagtgatgaagccataagcactcacctacatcacggttggaggagaaacacggcctgtagttgctgttgcccaggcttcttctcatggctaattctgtgttgaggggtgggggttcttttccctggctcc

SEQ ID NO: 343137 - DNA, 119 bp, Homo sapiens
  chr17:74625074-74625193
  hypo
cgtggtggcaaaaactcaccgtctgaaggcctcctatttcgaagctgtatttttcctcaaaatcccaccgaggctcagatttgaagttggcggccttcagtctttggtttctctgcgtc

SEQ ID NO: 343138 - DNA, 175 bp, Homo sapiens
  chr17:74858668-74858843
  hypo
gtggcctctgcactcgaggtggctagtgtgtgagggccagttgtccccgcgcagtgccactgttgctgatttgtacgcggtgtcagtaaatgctgttatgacattattaatgctgcacactacggcaaaggacaatggcctattgcctcgtaatgtgctgtgtgctgctgcagtc

SEQ ID NO: 343139 - DNA, 855 bp, Homo sapiens; identical to SEQ ID NO: 335682
  chr17:74864603-74865458
  hypo

SEQ ID NO: 343140 - DNA, 318 bp, Homo sapiens
  chr17:74908627-74908945
  hypo
cgcagatgttcacggcagatgtcctggccactgatggagcaacaaggctggacggatgagccggtcccgctctgctcctcgggtctcggtgtttcaattaactggctcactggagtgacgtttggggcaatgtgcaggatctacatctggctttgctgctgcaagatgcttccggggtgagggaggtggcacgagggagccgtgcgctctgtgatgagactgcagcaaggtgatgtcagccagtccccgcccgcgccccgccgtgtgcggagggaagaagccaaaccctagtgcctgcccagccgctgcatcctgaga

SEQ ID NO: 343141 - DNA, 122 bp, Homo sapiens
  chr17:75132773-75132895
  hypo
cgtcgttcggggagcaggtttgctcttcttcaccctttcctccgacttgctggctggagggggaagacacactgtggtaatggcaaagtagcaacacagaaggggcccgtgttaggccattc

SEQ ID NO: 343142 - DNA, 1458 bp, Homo sapiens
  chr17:75206857-75208315
  hypo
cgctcttgtccatgtttcaagaacttggggtgcagtgtgtttcgtgtgaatcgggggcatctgtagacatccacatggtaaaaacctccgttctgctttgggtattaaataaagcacagatccgagatggcaacaaactgaaaggaaggctgaagcggaggcccccactgtgaatgcaggaaagaggttccgtcagcacagggggccgaggcctcaggatggagctgcctggggagccactttgctgaagagggggccgtgccacgtggtgccgcctgctgttcttagacaggacccttgtacctcactgaatctgctgtggaaggacattctgaagtggcgtttcagtggtgaggtggcagtggtgggattaaaggggcccggctcgtagagcagccacgcgctgaagggcacagcagacagcgtgcatgggctgagaggggccgtgggcctggctctgctgcttccttaggtggagttttcagtgactgcagaactctgcacagctgcttttcattctcacgtccgcccccgcccaatctttgaaactaactttgattattccctcctgggtagctctgtcggtgctgtgtaagtttggttttcaattggttctcagcacccagggggtgaccacctcaaccccatctctactatgccaggggctcatcccgctcacccagcctcgccactgttctctcgtgtgagcctcacacggcaggcccggttccatgcccctgcttcccccttgctgggaacgctgtcctcaggctcccctgcctgctctttctttagctttcaccttctccagggccttctgttctgtccagcccagggcagtcctctgaaccactcatgtacgagctcacagtgtttggtgtttctaagacctggcctcttagagtgtgtgtgaagatggtgtatgggagatcttggacctctaggtgcaggtcacaaagaacacagagcttggtgcatgacatgtagcaggatccagcggttgaatggatggtggtgtgtgactctggggaaagagatccgtccatacgcattcagcgtttccctccccagcttcagcacctgcaccctggatcccctggagagcacgatgcgctcgcagcatgccggcctggtgctcgtggatcgtggctgcctaacgctgcctctttttcagattctcattcagattgtggatgcctcgtcagtcatcacttgggatttcgacgtgtgcaaaggggacattgtgtttaacatctatcactccaagaggtcgccacaaccacccaaaaaggactccctgggagcccacagcatcacctctccgggtgggaacaatgtgcagctcatagacaaagtctggcagctgggccgcgactacagcatggtggagtcgcctctgatctgcaaagaaggagaaagcgtgcaggtaaaatcacacacaggtcaaatcgcgcatcc

SEQ ID NO: 343143 - DNA, 689 bp, Homo sapiens
  chr17:75213347-75214036
  hypo
cggtccggcctcagaagagctttagctcatgtgggagtgtttcacaggtgagtggtcgttcaagaagagctttagctcctgtgggattgtttcacaggtgagcggtccggcctcaggtcacagccgtatgtttgctgatgcagaagcgaacccagtgtttgtcctcgcttctgtaagaagacatgatgtggtttttcttaaacgcagccagatctaacatcactgtgatggggcgatccctgctgtgatgtttccgttgtgataaaaaggattgctttcatcaggcgcctccaagaaaataaaagaggcaggtgtggacctttagaagcctggattaccttatctccactcccctgccaatcagtgggtcttcggggggtcataaaccagtgggcagagcaggctgctggctcggtgaagctcagggcaggccagaaggcggctcagggcagcgtgccagggtgcagaagccagtgcctccctaactgggaaccgcaggatcattggcattcctagtagtccgtatctgtccttggtgggacacagccaaggggtctggctggcacctgggtgggaagcaggggagaccgagggtgccctgcacgtccatgctgggcctgggccgtcagtgtgtccacaggcagtcaggaccttagccgtgccaaaatctgatgatttagtcaacctgc

SEQ ID NO: 343144 - DNA, 1804 bp, Homo sapiens; identical to SEQ ID NO: 335687
  chr17:75368688-75370492
  hypo

SEQ ID NO: 343145 - DNA, 181 bp, Homo sapiens
  chr17:75411761-75411942
  hypo
cggcaccgaagccgagggaaggcagcattagtatgagctcccagcccaccgggctcctgtctggagctgacgtgcgaccaaggcacacgagggaagcatggcgaggtggacggtgcggaggcataaggagcaaaataaggcagatgcagtggctcagtggctcctggtggctgcgaggagc

SEQ ID NO: 343146 - DNA, 248 bp, Homo sapiens
  chr17:75733982-75734230
  hypo
cgcggcccgtacgcagagctgaagtggctctctgttatttgcagatggaaattggaatctctacagcatgacagacacttgagcagaaattctaagcttttatgggttgccacaggtccctttcaggaggatggcgaaggctatagtcatgagccgtctaaggtggaggtcacgagcggcaggtggctcttaataagcacttgacataccacttctcccaactgagatgtgctgtacgcgtcaaatcc

SEQ ID NO: 343147 - DNA, 281 bp, Homo sapiens
  chr17:75848787-75849068
  hypo
cgcagccctgcagtgaccccgtcgcatatgcttgaacaatattctagagcaccatgaaagactcaggagggtaaagcactagcgcatgtgccgactgagctcccggctggtggaggcagagaggcggcagggcagagccgcggcgtgggcaggagctggggtggaggggggccctgcaccgcgggcagcctggctcctgccctggtcacacagagggagtgcctcacctccgtgcccccaagcccagagtgctgctgccaaggcgaggcgaggaggagggc

SEQ ID NO: 343148 - DNA, 148 bp, Homo sapiens
  chr17:76034983-76035131
  hypo
cgcaggcgaccagcgagagtgtgggaaaaggcgacgctggtgtgctgttggtcggaatgtaaggaggcatgtggcaggatttatcaaaatgttgggtaatatgacgtagtacatcctgcagacacctagagcacagctctttactgac

SEQ ID NO: 343149 - DNA, 160 bp, Homo sapiens
  chr17:76100954-76101114
  hypo
cgacccctcccgggacccctcccggctgggcggccccacagacccgctggaacccagcagcggccgcccttttgagtacctctgtccaggactgaagacgaaccttggccgcagtccttgcgaactgttcgcaaaacagtgcgggctgcggtgggtcagc

SEQ ID NO: 343150 - DNA, 304 bp, Homo sapiens
  chr17:76137872-76138176
  hypo
cgggaatcctctccgtccagtcttctaacctagcagcctcacgtccacagagctgccttgtgaaactcagcagagccctggcttcctgcagagccgtgttctcccagcctgcttcatggctccctggttgagccaagcttgcggatccgtggggtgaaggtacccgcaccgcctgggccttagtggtatgtacgggcctgcatcgtgagcagcgggcgggggcccaggcaggtgaggcagctggccacaagggcagggcccggcccccctcccaaggctgtgtctgatattcttgagcctgttc

SEQ ID NO: 343151 - DNA, 282 bp, Homo sapiens
  chr17:76167747-76168029
  hypo
cggttcttgggtcaagggtggtggagggtggggtcccccacccacctgtaccctgctgtgctccccctgcagggtgtgctggcctccctggcctaccagcgctacaaggctggcgtggacgacttcatccagaattacgttgaccccactccggaccccaacactgcctacgcctcctacccaggtgcatctgtggacaactaccaacagccacccttcacccagaacgcggagaccaccgagggctaccagccgccccctgtgtactgagcggcggttagc

SEQ ID NO: 343152 - DNA, 417 bp, Homo sapiens
  chr17:76187077-76187494
  hypo
cgatgggttgtccgactgggagcagaggaagccttgaggacctactcacagataggaattgaaggtactagtgtgacctctccgtggccgcattgggtgtccttaagcatgtggcagtgattcagaatgctgggggttgggggggctgtgctgcaccacctgggcctcgaggggcatttcccaaacaccaggcactttataaacctccctgctcaggggcaggtgcccaggaccccttgctgcagggactactggaggcaggagaggtccgggggaggtccacggctcagtcgaccatgcctggcctttcttgctcagccatccatacccaggcccgtaaggctgcgggctgtggttggcatagggaggtgaagtgaacagaggaacgttccccatccgctgctgaatgtggaatgc

SEQ ID NO: 343153 - DNA, 478 bp, Homo sapiens
  chr17:76215753-76216231
  hypo
cgtgccatagaccatctcttagccctcgtgggtcagagtctctgttgcatattgtcttttgttgtttttcacaaccttttagaaacataaaaagcattcttagcccgtgggctggacaaaaaaaggccatgacgggctgtatggatttggcccagcaggcccttgcttgccaagccctgttttagacaaggagcagcttgtgtgcctggaaccatcatgggcacaggggaggagcagagtggatgtggaggtgtgagctggaaaccaggtcccagagcgctgagaaagacagagggtttttgcccttgcaaatagagcaactgaaatctgacaccatccagttccagaaagccctgaagtgctggtggacgctgcggggtgctccgctctagggttacagggatgaagatgcagtctggtagggggagtccactcacctgttggaagatgtgattaagaaaagtagactttcagggcc

SEQ ID NO: 343154 - DNA, 533 bp, Homo sapiens; identical to SEQ ID NO: 335690
  chr17:76227788-76228321
  hypo

SEQ ID NO: 343155 - DNA, 164 bp, Homo sapiens; identical to SEQ ID NO: 225518
  chr17:76337744-76337908
  hypo

SEQ ID NO: 343156 - DNA, 663 bp, Homo sapiens
  chr17:76395100-76395763
  hypo
cgtcttcacccagagcagaaatgctgcgagtgggtggggtagtgccccaggagaaggttgggtgcagttaccaggagaagggtgaatgggtgctgtgtggcaagaagagcaggcgtctgccacgctgaggacttcaggcctgagacatggccagcatgcaggacagaggttggcctggaagtcctctggctaggagtagccccagctggtgtgactgattcaggtggacggcacaggtgaaggcgaggccacgtggaggtggctcctcattgggggcaggacgccttcctgttgtgagtcaggtgccgttttctctgtccgtgttcaggccggaagaactcccgcacaatgctgctcccactcctgcggaggttcccagagcaggtccgagtctccctctttcacacgccgcacctccgtgggctgcttcggctcctcatccctgagcgcttcaacgagaccatcggcctccagcacattaaggtgtacctcttcgacaacagcgtcatcttgagcgggtgagtgcttcccaccgtcagtgcttttgccctcctgctctgcaggctggagggcagtggaataggaacagtgggaaacccgttcccctcagtcttggagaacctgcttgtaggtctggctgctgtgcacccgcggcacctcccc

SEQ ID NO: 343157 - DNA, 514 bp, Homo sapiens
  chr17:76425233-76425747
  hypo
cgggggccagcaggacgtctccctccagcatctccgtccggatgtattcagccaggtaggtcctgcacagccgacggtcccagtcatctgtgatgtggccgccatacatgatttcaccaaaaaggtagcggagatcgtcccagggcacctgaggaaggatgacagcgggtaggggaaagtgcccctgtgccccttctctgccatgagagggtcaggctcaggcaggcagggcgtgggaacccagccattggtgctgtgtccttctcgccctccaggtcagcctcctggccatttaccttcagggtcaccaggccccagggccacctttctttccattccgcgccaccagacgccaatgtccggcccctttggcttctctcacaaggggctgtgtggcacctccctccaccttggacagcgcttccacagccggcatgctctgcacctcccgtggggcaggtgtttctgctgtgcctcactgtgcctcagaggccacagggctgaatcggaactc

SEQ ID NO: 343158 - DNA, 187 bp, Homo sapiens
  chr17:76482434-76482621
  hypo
cgtttggatcaccgtgatctccggcactggcgtgatcttcttgaacccaaagcgcaacttgtccaggcacgtgggcaggtacttgtcaaagaggatcatcaggttggccttctccgactgcaccttgcgcctctcgatccagctgctcaccaccctgggggtgacaggaggcgccgatgacacagcc

SEQ ID NO: 343159 - DNA, 443 bp, Homo sapiens
  chr17:76818622-76819065
  hypo
cggagtcagacgtgggcttcggggtcaggagccctgccctcattcatgtcccccgcaccgctcactaactgggatctgaggcactctgagctctggggcctcttctcacccggacccggggctgcctggcgcctcccacgcctacgtatccatatggtagctactcacgctggaaggttctgaaacaatacaccacatccagtctctgctcctggttctacttgcaacccactgcatctggtcctgactcactgctctggaactgccttcctcagagtcgcctaaggcctccaggcatgaggccagctgggtctgcaggccctttactaggaggctgcgcagtgcgccggtgcacccactccctccagaagagcttcccctctccccaggctctccagccccgtctccccagctgcttccccgactcctcactggcacaaagc

SEQ ID NO: 343160 - DNA, 244 bp, Homo sapiens
  chr17:76851787-76852031
  hypo
cgccgcgccgcggtaccacgcacaggagccgtcacttctcttgatgcaggcgaagaacttggcctggtgcccgttgatgttcttctctgtgacccagtccatccagaggcactcgtccggggaggagatgtagcacgggatcatggggcagcgcgtgatctggggaggggcacacggagggggacggagtcagggacccaggaaggggtgggcagaggctgctctgggggcatgtccagaaccc

SEQ ID NO: 343161 - DNA, 687 bp, Homo sapiens
  chr17:76991011-76991698
  hypo
cggttttggaggcaaatgcaggaggaagcaggttcccagcgactgggctgtggaagccacactgtgggctggggcaggcgtctcttacctggcggctggatgccggcagcagcccgcagggcgttgtagttggacacccagttctcgtggtccacgctgcccttgtagcccaccaccttcacccactccgggttctcgttcaccacatcacccgtagtggtcgtccactccttgcccaggccgcccacgtacagacgctcgtccttcactgccagccattcggccttgaagcctggccaagcagagtgtccttaggccccgcacccagctcccgccgcacccctgcacctggctcccacccggccccgcacctgtccttagaccccgcacctgactcccgcccggctccacacctgcctcccctccggcccgcacctggctcccgcccagggccggccggctgccctcccctcagctcctgaaggttcagtgaccactctcaagtctcctctgatccccaactccccgctcctcaagctgtaaccccaaccttaggattatccttaaaggctagaaaagctgaaaagtgacagcactctgaaggggcacgtgtgtcccaggggagtgcgggtgctgccctcggccacacctgaggtctcaccgagcatcactctaactccagtggcc

SEQ ID NO: 343162 - DNA, 1170 bp, Homo sapiens
  chr17:76992727-76993897
  hypo
cgtggtcttgagaacctttgaaggtgtaaaaagggcgtgttcccagaggctccgagagcagcagcggatacagccgaaaacatcttggagagattccccacgtctcccacaggcctctagcgataagctcttcctcctagaaactgctcagtgtgaagtgacagtaggctatgctcctggctaagggtaagggggccgcaggtcagagcaagagggagacgtgctccctcaccacatccctggcttctaggtgtgtgaattctttaccatgtgcctgtgtttgccagccaggccctgagctcccactccccacccacacctccataaaacctcagggtccagttacctttctccacggtgccgtcgccgtcggacagaatcacccagggcacggctttgctgccttcgatctggtagacgacccccgtccggtcatccacggagtagagtttcccattgaaaacaatcaggtcggatagctccatgcctctccccttctccgccaggtgggactccaggaccccatggtctttgtcccattccacggccaccttgtccccactgtctgacagggtcaggtagccctttttcaggtaactgaaccaggtgttttcctcttgggcccttgactctgtgtccaggtctgcgataactgcgattcgataccgaatcccagccggtgtcctttgtgggggagacagggggtaggtgtcattgtaccagttggcgggcgcctggccgagcctccagttgtgtgcattgtgggtggggggcctgccgggggccgggcggtgggagcagagcagccagaggatggcagcacccacaaagaacgtcaggatcaccttccagcgggggcggaagcgggggtccgcggccttggtcatggacgccagcacaggaaggccccccacactgatccggagggagtgcatagactcattccattccgggtgctcagacagctgcacgggcatcagcgtgacagacaggcgggacctgcacagccagggagggaggagaggagtcagcgcctccgcaagcccagtcacatcttagttccggaagctgcaggcgctggaggctgacttttccagaagaaacagtatttcactactctgtggccattcttactcccttggcttaatgaattcccgactctagattccc

SEQ ID NO: 343163 - DNA, 1428 bp, Homo sapiens
  chr17:76996197-76997625
  hypo
cgtcttagacatttcaagacacgagtcctgtgcagcttttccctcaagcctacttgctcctcgtctccccttgggaagggtagtggtgacgggtggccaccgtgtccacagtggtctggttcaagctctctcaggatcctgggagatgtgcttttctgtgtgaatatacacttcgataaaaacataaggcactgccaccacgaaaaacctgactggcctcatcctccgtcttccttcctcagcattgactccgtggacaggttctgtcctcttccatggcccttcctcaccatgccatgccggctgcctccctccacccctcctgcctctccgcccctgacactcccataccccccgccatgaagttgccctgccagctgccccccaccaacatcccctgacactccctcgccacctgccatgaagtagcatccatcagatggcacactcccagcttcagcggcttcctcaggtcctggggtgaacccactctgctcccgctcagccctcacactgtaccatctcctctgcctgccggctggctacatagacctccttctgtcccctgaccacactggccctggcagagcctgcagttccccctgcctggaacagtcgggcctgctcttcgcaccagcagctcggtctctcctacggggcatcagctccctgggaagacttgcccactcgccctccctcccatgccgctccggctctcccaccgtccctgcctggctaggtgattatttctgctcctggggcagggatctggccactgtcacagccccagcacctgacgcactgccaggcagggagcagacagtctgcacgcattggctgaagggaaagagatgccaggtgagccattagccacttcttcaacagcccctctgcactctaccgggggccccaccttaggcatattatgaacccacaacctggatcaagcaccccaaagatcgagctgctcagctgccacatctgagctgcaggcccgggaagacggtgcttgccagcacagaacaacggtgcctgcatagactgctgtcagacatcgtgaggtgtcgtcgtcaccagcccctggaacccccatgttcttccctgttcaactccctcagcactccggagagccactgtcctcaccttcaccattcctgtcaaatctccggcccacttctcccaggagaccactctgtggccaacttcagcagccgaggcccctgggtggggctcacacctgccactcaggtcagtccccccagccgccgggcacctgctcttctggttcctcccttccatccacaggctgccccaagtcgcccaccttgtcaccattttacctccagaccccacactcccacagacactcaactgctgctgaataaatggcgaatctgttaatgaaggaaaacccttccctgagtcccc

SEQ ID NO: 343164 - DNA, 261 bp, Homo sapiens
  chr17:76998502-76998763
  hypo
cgtgggccaaatgcagtctcccgcctagtgtgtagatgcggcctgtgtggcctggtatgtggttgcagcttggtgtgtagactctgcctggtgtgtagacgcggcctgcgtagacgcggcctgctgtgtagtcacgtcctggtgtgtagatgtggctgattaaagccagctaggactcctccctggcatgctgagtctggctgcaccgttgagtggtcgcaacagactgtggaggctgaaaatactgactccctgtccctc

SEQ ID NO: 343165 - DNA, 507 bp, Homo sapiens
  chr17:77002655-77003162
  hypo
cgcacagcttcagaaccctctacggtttgcagttactgccttgtaaagaggctgtgtctgcttaatttgtatcatcgatgttacacctggaggaattttagccaaaaggcgaccttctcagttgaaaggcacattccaaatggcaccacacatctgggaaggtgtccttttccagagtgtgtgaaaataacgggatgggatcatcgccccatggacctggatcagggctgccttccacaccgcggtggcacctgcacgagcccacctgcttactgccaccttctctcctcacgctttcctccaggctcggctcccgggacacaaaggccgaatcgccaggactttcactcaacccggcaacaccctcagagccattctggggggtcccagtctcacctctgccccactcccacatggtggcatcacgcactgtcttaagtcttaagccagacttcaacgccttcttcacttcccataaaaccatcccagaggaacgcggggagcagc

SEQ ID NO: 343166 - DNA, 116 bp, Homo sapiens
  chr17:77070114-77070230
  hypo
cgcttaggggtagagcaactactactgttgggcacaggcgtggggctgtagaaagaaatccgtgtttcactggaaaactatgcatcctacataggacaccagcttccacatggccc

SEQ ID NO: 343167 - DNA, 256 bp, Homo sapiens; identical to SEQ ID NO: 335696
  chr17:77071245-77071501
  hypo

SEQ ID NO: 343168 - DNA, 377 bp, Homo sapiens
  chr17:77073688-77074065
  hypo
cgattaatcctataatagtttccattaattgctcaatgtttctgtcctcggaccagttagatattatgacaaggacaccaccaaaccaatcagcttttacttgtcttcgctggaggagctcttggcgtggaagccccgcttggaggatggctttaatgtggccctggagcccctggcgtgtcgccagccccctctgagcagccagaggccccggactttgttgtgtcatgacatgatgggcgggtacctggatgacaggtgaggacctggccttacattgatgttgcttacattgttctcctttgctggggtgggggctggaggggcgggagagagtgccatgtgtagaaagagcactgggcggggagtcaggagac

SEQ ID NO: 343169 - DNA, 375 bp, Homo sapiens
  chr17:77074650-77075025
  hypo
cgctgggctctggctttcatgcacagagatgttacatgccccacccaccccaggtgcagacgtcccatccaaagttgccgtggagtccgcgcggcgcttttaaatgtccataaaacaatcttggaccctgtgattgatgggaaggcttgagtcagagccaaccatcaaggtagagatagaagcaggtggtgaaaccttgggcgcagctcacagggctttcaaccccgaccttcgagttccgggagactctgttctgagggactgcctacccctccaaatagagtgggaagccagagacgggactttgacacgagacttcctgcttcccctcctttctctcccttgttcattggctcacagggggtagcagtgctc

SEQ ID NO: 343170 - DNA, 195 bp, Homo sapiens
  chr17:77084533-77084728
  hypo
cgtggcgtgtggcagaatcgcaccgccccggctccccagcccaccgccatgcagggctcgcgtgcgggaaaactaatatgccggcgtttaagcctgtgcccctctgctgggtgtaactgcgctgaaataaatgatctgacaatgtgaagcgtgcagtcgagtcctggtgtgatggggcgcgggcagcaccagccc

SEQ ID NO: 343171 - DNA, 283 bp, Homo sapiens
  chr17:77113252-77113535
  hypo
cccccaggagtctgcggtgaggaggccccactgcctggaaggacagatgccgcctctgcctggagcagcccagtgtgttaggacccctgctcagatgtggatgggtctgacgctcagccaccctggcagggacaggcaggagtccgcgtccttgctgaaggtgggctttgcggtggggaggaggagcgcccagcagggaagtggctgctcacctccctcacctgcgcctccaccccacgctcccatcacccggggccacgcacgctttgttcacaccacacac

SEQ ID NO: 343172 - DNA, 667 bp, Homo sapiens
  chr17:77126804-77127471
  hypo
cgataccgagcagtcttctgacacagtccctggaacgagtggagtgccctgtccttcagcccgggcttggtgcgggatggggcctgccatgctctaagctctggcctccctgcctggaggcgggacctggcccaagcctcaaagccgaagcacaaattcctcatcagtgaagatccagagccgccgtggtgctaggacacggtgcgcgggaatcagccccgcacctgcaaggcagcgtgctctgcgtgccctgcgtgtgccccatgtgtactgtgtgccccgtgtgtgagcatgtgtgccccatgtgtgctgtgcccccatgtacttgtgtgtaccgtgagccatgtgctgcgtgtcccgtgtgtgctgtgtgccccgtgtgtgcacatgtgcgccccgtgtgtgctgtgtgacccgtgtgcttgtgtgtaccgtgtgtgagccatgtgctgcgtgtgctgtatgctgtgtgctccgtgtgttctgtgcactgtgtgtgccctgcgtgtactgtgtgctctgtgcccatgtgtgctccgctcagtctccatgtgccctccgtgtgtattccatgtgccctccgtgtgctgtgctctgtgcacgctgggaacagcgctagagcgtctgtgcttctggacaggaaaacaagcccctcgtctaccttcac

SEQ ID NO: 343173 - DNA, 786 bp, Homo sapiens; identical to SEQ ID NO: 335697
  chr17:77178616-77179402
  hypo

SEQ ID NO: 343174 - DNA, 181 bp, Homo sapiens
  chr17:77769064-77769245
  hypo
cgctctcgttccctctcacgttcccgctccctctctcgctccctctccctttctcgatcccgctcccggtccctatcccggtctcggtcccggtcccgaggggcctctgcgcggcaggtgctgctggtgctggtgctgctcgctggcggggacaaacccatgtttcgaaggccctcccggg

SEQ ID NO: 343175 - DNA, 63 bp, Homo sapiens; identical to SEQ ID NO: 335701
  chr17:77774710-77774773
  hypo

SEQ ID NO: 343176 - DNA, 922 bp, Homo sapiens; identical to SEQ ID NO: 335702
  chr17:77776572-77777494
  hypo

SEQ ID NO: 343177 - DNA, 753 bp, Homo sapiens; identical to SEQ ID NO: 225530
  chr17:77777713-77778466
  hypo

SEQ ID NO: 343178 - DNA, 1366 bp, Homo sapiens; identical to SEQ ID NO: 335706
  chr17:77788305-77789671
  hypo

SEQ ID NO: 343179 - DNA, 604 bp, Homo sapiens
  chr17:77807474-77808078
  hypo
cgggcgcagagctgccctgtccgttccgggggtccatctccagcggggaagggcaggagagggcgagccccgccggcaccgcgtggaaggggcctccgcccaggtctgacagccgccgcagggggaacatggttacctccgctccgggcgtcctcaccctgggggccagcctgggtctctcgcggttggcgggttggcgagaggggagcccgccccgaggccccaggtgctcagctccccgcccccccgcgggaatggcgcttccccttccgacgccctccggctacaccgtcacgtactccttgaaagtaacggtgaggcagttcgcggtgacgtcggtgataattatattcccaaagaagggcttgaactcgctcagcgactctgcaggttcgtcctgggcctcggctggaggcttctccgccgtcgtggtgggtgccgctgccgccgccaccgccaccgccgccgacgccggtgtctcgggcttcacctggagggagctgggcggctccccggcctcgctgcgcgtcttgacgcagcgcaagtctatgggttcatccaggtctgagtctagcaggatgacctcgggctgcgggagggcggc

SEQ ID NO: 343180 - DNA, 618 bp, Homo sapiens
  chr17:77825382-77826000
  hypo
tgcaagcgtcggggcgtgtccacacccttgtccgacgtgtccctggcatctggcacagtgcccagcacgtacctgtcagatgaatgttgaattaataggatttgtgtgaggaccgagtgagctcacacagccagatgaagctggtccacccgtacgggctggcaagagccgttggccacattctcagacattttgtgaacccgttgttgaacccagccatgattacaaattaaatgattggcatttacaattaaattatgtaaagaacaacaataataaatgctcactactgactccttcctagtgatttcctcagattcacatgttcccgggttctttgtgtcccctgtgtgtggtggaaaacgccacgcaggggcagctgctgctgcacatctcggcccaattctgccttcagcgctgtcctaatggtagcttgaagccagctatggctggagcttttactcaacagaaattggtaaacacgacaaatcgtgacttgattttttcttttgttgattgtctatactttagaaagtgatagaaaaaaaaaaaagaaagtgatgaaaaagtgttaatcatgcagattaaacttaaaagtgtgtcctgttggctgggcac

SEQ ID NO: 343181 - DNA, 121 bp, Homo sapiens
  chr17:77899566-77899687
  hypo
cagctctggtcccccggccccaggtcctggacgctggctccgcgcagcagcaggcggcctccggaggacacgatgtgactggctgccgctacgtcgcactcagatgagtctgcgccggatc

SEQ ID NO: 343182 - DNA, 741 bp, Homo sapiens
  chr17:77914408-77915149
  hypo
cggtggctgcgcgttccactgcagcgtttcaggagctgactttcctctgggtggctgtagatctgacttctgtcacttccagactctaattttgtcattaatatgaaaaggttcctctcatgttgcccaaaagcattttccttaggtttctaccgtcccctgtccccttcacgcccagccccaccccctcccgtgcccagggcctctgaggaggtcccctcaacccctgtccggtgtcgggggcccgacctatctgcggaagccgaagccgtcctgcggcgtctttgggcccttcttgccttccctcagggacttgggggaaggcatctccaccgtgcccccgtagggacagctctccgagccgggatggtggccggtgcactccaccgcgggcatggagccgctgtcccacatgcctgacccgcacagcttacacagatcgtgcaggctgcaggggatccggggcaggaggcggaactggtacagcaaactcctcgcctgcagacagaggacggggggtgaggaggggccgggggacagcctggcagcctagggtccccatgggagtggccaaagacagcaacagcagcaacaacggcctgcacctcgggggctcaccgagtcctggactgagggctctgcctgcatctcccaccatcaccggcaccacggggccctgggtcttaggtggctgcagtgatgggacccacaaggcactcgggctgtgctcacaggtggctc

SEQ ID NO: 343183 - DNA, 188 bp, Homo sapiens; identical to SEQ ID NO: 218160
  chr17:77917679-77917867
  hypo

SEQ ID NO: 343184 - DNA, 811 bp, Homo sapiens
  chr17:77918873-77919684
  hypo
cgcgcaggtacagctgggggtgaggccgtcacgcgttagttagctccggtcccatgcggcctgctgcccaggaagcccactcccactggggcccttccctgggccaccccagcctggaaaagcacacccaggggcctctacctgctgcatgtgcctgcccccccaacgctccattccgccgctggaatcggctcacacctgcctctgccagttcctcccagatctgactgttccggaggctgtggtgtggtccagggtgaggcagagtgttgtgcccgggcgtggcaggacgctggcagccgctccatggccaggaaggctccccaccctcagtgcacacttgggggctgtttcccacgtccactcctcctggtgaggtgagtggatcatccagggagcccccccacccctcttcggctacgctcacccagatctatcatcttccagagctgttttagggcaggaaggggacgtatctgagccccaggatgctcgattcctgccattaaggtcatctcccaatgatgtgggacaagatcggggctatttctggcagcactcgggcccaggccgctgacttcatcaatgccgctggaaaatcaatctccagcattcagtgagtcacccagccatgcgctgccatgagccgtcagaggcgaatggcgttggacactgtaactgcctccccaagcaatgtggacacccgacgtcacacacacccgttgatgcagagtgagcaggcttggctgggttcagccccccggcccaggtggagttagatcacagctggggggatcctggggcagagctc

SEQ ID NO: 343185 - DNA, 580 bp, Homo sapiens
  chr17:77921147-77921727
  hypo
cgtcttccttgccagccagggagcttgggccaggttgtcacgtgcaggggtggaaggccaccagagcggcccacacaacgcggcctctggacctgcagggagtcagagggccatccccggaggccgagataggctaagccgcccatatcccacgggcaagtcctatcctggcgttcccactgcccactgacctacagcagccaagccacgcatcaccacggcaaccccggctacaacgggagaggcaacacgggccctcacatgcccttggacgcacccatccccctgagcctcaccagttgtttctccatgtcctcgtcccggggtgagctgacgaagatcgtgttctgcatcaaacccacaaagcaccagaaggtgtctgactcatccaggacctcggccaagatgggcgccaccaggtccgacatcccttgggaatagccgacggcagggttgtacacggcgtagttcagcaggatcctcctgggaggcggtggagacagcagtgggtggggatgaccctcaccgcggcacactgcccagcctgcagaaccctgggccgtggaccctgccttccctc

SEQ ID NO: 343186 - DNA, 369 bp, Homo sapiens
  chr17:77923306-77923675
  hypo
cgagccccgcagctccgaggcccgagtgcttggtttaatgactgcacttatcccaccctatcactcacgttcctgggagacccatttttgaaagaaactatgggtcacgaaacatattatcaatgctgaattgcacctcaaattgccttttcaaatgacattttcctccgcggctcggcggggtgggccgggctggccccggcggttaccttttctgctggatctcagagtactcctttcgcttctgcagccgcagcgcctcccgctcctccgacgtggactcgtggctgtaatagcgcagcaggaagggccagacctccccgcggattgacacatcaataccgccaaagaaaatggcctggaggaagc

SEQ ID NO: 343187 - DNA, 452 bp, Homo sapiens
  chr17:77923970-77924422
  hypo
cggtatccccccaaaccctcgagggaggtgttgtgttttgtttttttttttcaacgcagcagctttgattgctttatcggtgtgttcacagagagcctcacacaagaaaacggggccctcacgaggaggtggcccgtgggtgcgggcgggcggccaggccccggccctccttccctctcgctcgttcccggttcccggccggctctccgcggggccagctgggcggacccggacctcaccttccgcagcttgtactcctcctccacctggcccagctcattcaggtggttgagccaggcggagacgccgagcctcttgtacatgctctcctcggggtgcgtctcggaggacggcagcttggggcggcggatggagaactgcatgcatgtcttatcgggggcgacctgctggacgggaggaaaactgggcaaaggtcaggatctcagccgcgc

SEQ ID NO: 343188 - DNA, 445 bp, Homo sapiens
  chr17:77928738-77929183
  hypo
cgctttggcagtcacggatggagggccccctccctgctgccgtggccacagaagactggtcccctggagggccggagccgatttcaaaccaggcaagagtccaggacacaggggccaccacacacctcccccagcaacgtgcctccaggcaggagttggcttaaaccctctcgcaaccccttaggggcaaattatttgcattaattaatggattgattcattaattcaagatactgtgcttgggacctacagctggggttccataagctcaaactagagcgaaggtgatggagacctcagttcgctttcattggggtacgtctggcaggtaccccaggccctgtgtggtcatggaggacgaggtctggtgcccctcgaggccggctgctgtggggtgggggttgcatcgtgtctcttcatcttcagctcccagccctggcttggc

SEQ ID NO: 343189 - DNA, 73 bp, Homo sapiens
  chr17:77930345-77930418
  hypo
ctgggcccggtggtcgctttaagttgctgagtttgagggcggtttgtttcacagcaacggatcactgacacac

SEQ ID NO: 343190 - DNA, 140 bp, Homo sapiens
  chr17:77976585-77976725
  hypo
cgtggtggccacacacagtggggcacaggcacaggaccgcgtgcactgcaggacgctctgctgacggcgctggcccaggcactgggaggaccctgtgaggaagcacccgggaacggtggcgcacgtagggaacaccacgc

SEQ ID NO: 343191 - DNA, 582 bp, Homo sapiens
  chr17:78041114-78041696
  hypo
cggcccgcagtcactagaaccccctcccaagacaagcaaaggcacctggttttctgggatcccctgcctaacttgtgtgcaattgcaagaaagcatatgcgttcacccggagtcttccttccctctcttgctccgtgggagcacaccacactcactgttctgcacctctttgctttttccatttaacagcgtgtccctagagcgcttcccaagtcaaaatataaacaccgctcgttcccgcctttctaccacatggcattccgctgggatacttctacggggaagcttcctgcccggggcatcgagggcgttcgcgtccgtctgttatggcggtgctgctgtagataaccggatccgcgaatgctaacgctcaccaggatgctatatagccttttttatattgcctatcaagcccggaatgtctgggtctagcgggtattgctaagtaggattgtgacagtcacgcccccggcagcggtgtttcaaagtcccctgacagctcagcatgttgtcacacttcaggactgtgccaatccgattgatgaagaaaatagataatcttgttttataaaacgtgcatgc

SEQ ID NO: 343192 - DNA, 120 bp, Homo sapiens; identical to SEQ ID NO: 271389
  chr17:78078981-78079101
  hypo

SEQ ID NO: 343193 - DNA, 183 bp, Homo sapiens
  chr17:78143796-78143979
  hypo
cgttcagttcagccagagattgggccacattcagtcctcgcttccctgggagggggaaggtaagtgcgcgcagtccatccggcgaagagcaggtcagcctacggagggctcagcctacggaggggctcagccgacacaggtctgatggggcccgagagtggtcccaggggagtgggaggggcc

SEQ ID NO: 343194 - DNA, 396 bp, Homo sapiens
  chr17:78163403-78163799
  hypo
ggcttctctcctgcccggtgtagagtggcaagactgcatccgtccacacacctgaccgtgcagttgccgccatcttctcgggattctgcttgcctagggcaggcctctggggaagccagcaccccaggctgacctctctctgccccaggcggagaaggacattctggagcagagcctggacgaggcgcgggggagccgacaggagctggtggagcgcatccactcgctgcgggagcgggccgtggctgccgagaggcagcgagagcaggtgccgtgtgagcccttcctcccttgtgactctcctggggcttgtctcaggggtgcggacaggtctgtggggaagccagattccttcatccacgccgagctcacataattttgctgaacgaatctgtc

SEQ ID NO: 343195 - DNA, 673 bp, Homo sapiens
  chr17:78271717-78272390
  hypo
gccttgatgacagagtgagactctgtctctaaacaatgaaaataaattttacaagttgctttatatttagatttactgttgccagatggcctgggttcaaaccccagctctgtcagtcaggaccctgcgttgactacttagccaggacccctgcttctgagatccctcccctgtcctgggagtttgttgtggggattcggtgagggcctgcaaaggagctgacgccctaggctgggggctgagggaagccctgtctcctgcgtgagttaaactctgctcagccacgcgcggtgctcctcttgctctgtgtgcacggtgcttgcttcctgttgggactccagactcccagggagatgactccctggccagctcagctcactgcgggatctttattcccttccagctggcggctgtacctggtgaacctgtgccaaagatgcatggacacaaggacgtacacctggctgggcgccctgcctgtcctgcactgctgtatggagctggccccgcggcacaaggatgcctggagacagcctgaggacacctgggccgctctggagggactctccttctcaccgttccgggaacaaatgctagatacgtaagtcgtagagttgtgcttatctacatgaatctgggaagactgactcctacattgtgcacccggagtccc

SEQ ID NO: 343196 - DNA, 138 bp, Homo sapiens
  chr17:78338197-78338335
  hypo
cgagtgagtgagtgagtggcgccctcttttgacagagcccagtggagtcggattttctccaccgcactcttcgtggagcacgtgctcctaggaaccgagagccgcgtccccgagttacaggggctggtgaccgagcac

SEQ ID NO: 343197 - DNA, 164 bp, Homo sapiens
  chr17:78587649-78587813
  hypo
cgggctgggccgcgtgttctggataagtggctgtggagcacgatgaagcgtctatcgcagcatcatctctgcacccagatgtggccgtgctgagtggattcctgccccagatcttgggaagaaggttggctttcctcctggtgttggtggaaggcctccccggc

SEQ ID NO: 343198 - DNA, 162 bp, Homo sapiens
  chr17:78590602-78590764
  hypo
cgaagaccaattatttgttggtttttaaggaccagagttcccaggagtaagtgaaacacgactcgatctcttaagtgtgcccaatactgccagcacaacattcctcacaccggtccagcttgctagttaccttggatactcgcccaagcttcagctgactgc

SEQ ID NO: 343199 - DNA, 310 bp, Homo sapiens
  chr17:78598720-78599030
  hypo
cgcagcgttccccagctggctccaccccgatggggagtgtggaaggtgtgttgaggggtatccagagaaggcctccccaagaaattgatctttaaactgagatctgaagagagagtcagagccggccaggtgacccgggggaggggaactcccagcagagggaactgtggatttgagggccgagaggtgagtgtggccaggccgcagtgtaagtacgaggaatgagtagtgagtagatggtccacggagagtgaacaacgcaggcagtgaaggcactctaggagaaccaggcagcatcactgatgtgaac

SEQ ID NO: 343200 - DNA, 232 bp, Homo sapiens
  chr17:78599526-78599758
  hypo
aatgttggtgtggaccctcccgatgtggtgaagaccacgccctgtgcacgcttggaatgctggatcggtgagtatgcctccctcacgcgctgccacaaaggccgtctggccggctctggcctgggcggggctcgccaagcctgtggtctggtccaggggcccgtctccagctgtgcaaatctgaggggtttttctttctggagtcacatcacctttgagtaatttccgatgc

SEQ ID NO: 343201 - DNA, 557 bp, Homo sapiens
  chr17:78611023-78611580
  hypo
cgtcatgtctgtgagcaaacaaggggcccatgcccagcgtggctctgggtgtcatggcctccctgctaggtcatccggatgaagcctggggctgtggagtcagctcgtgagaaatgggatccaggtcctgagcgtgctggaactggcgagacggggtcacagcacacacctgcgtttccagccctgcccctgctgacggccaagacctcttttcccacccctgctccgcccccctctggataataagttgctgttctagttcatagaagtgacacttgtcccttttcagagaagcaggggagaggctgttttgttttatggcccgacattaaatactacaacagtaatactaaaaacaatcctgctgaagagctgcgcgtgccccactcttggggaactctgctgtggcagcagagtgcggatgagctgcatgctgagcagggagtgtcatttagcggaaatggttttgtgtgccagctaatggtagctgtgtatcagaagaggtgagaatgcaaaggtttgtcagatgtgtggaaattctgtcatcccaagggaac

SEQ ID NO: 343202 - DNA, 194 bp, Homo sapiens
  chr17:78649377-78649571
  hypo
cgggccttgggcgttgcctcctgcccctcaggccgcccatgactgcaacgccccactccagttcatgggctcaggcccgcggaacccggctgctctgctcaccgggctcgggcccgcagaacccggctgctctgctcaccgggctggccccagcttcactgctctcacaccagcacatccgtgaatttcagaac

SEQ ID NO: 343203 - DNA, 509 bp, Homo sapiens
  chr17:78668007-78668516
  hypo
cgaggcagttgccccgtgctcacgaatccctgacacagctggtgacctctccaggtgacctcttcaagcctggtcccaggggcaggcatgcccgggcatggccctcgcagatggctttgctggcctggtctggcaaccgttgaataaatactgatttcccacccaggtgaggcgcatggtagatgtttgttctgtgcattgcgttggtcggcctccacagtcgcacaatctctcagtggagtgagagtgtcttccatatgtggggccgtggtgctgaaggcttgtgcgttgagtgcctcctttcccgtgaatgtgttggttctggtgaccagggtggagcctccctgcgccccttccttccatccagcatcaggttcccagttctctgcctgccaggcaggcgtgcacatatggagtgtctgggaacctgcagctgttgatcacggctggtggtagctccgcacttaagtaaggaggagtgattttcccgaggagatgtggtattggtc

SEQ ID NO: 343204 - DNA, 77 bp, Homo sapiens
  chr17:78774705-78774782
  hypo
cgctaacaatccattgtcgtgaataagtgagtctctgtgtgctgctgcttccgaggctctggtagcacggctgcccc

SEQ ID NO: 343205 - DNA, 522 bp, Homo sapiens
  chr17:78775515-78776037
  hypo
cgtctgccagtcactgctgagatgagtaacgaggcactagacgctgatttagaaatgaagaggtggaagcaaaacccgagagatcgccgagcgagggggaggtgagtgattggcggaaacgggggaccgccgccacctagcagatcacccctgcctgcccgagcacagccacctcagcgttcccgtgcgcgccacgccagggcgcacggtgctgcacgggggtccttatgcccgggcgcctctcattaaggtccccccacgggcagagggaagacgggcaccgggtccccttcgtgttcgatgtgcaccccagcaaggcctccttagctcatccggattggtaggggtggaggaggcttggttctgagatgaaattgcagacgtgcagccaagggggaatgtgagaggttcagaggccaccccagggaacctgcacacagcacggagatcttccgtttccttcacagtggtacccaaaccctggtatttgtcatcaaaacaaaggcctgcgccacagagcac

SEQ ID NO: 343206 - DNA, 212 bp, Homo sapiens
  chr17:78791780-78791992
  hypo
cgcatgccacaggtgagcccggaagtgtgggggaaggtggagataaaccctcctgccaatggcagtgaaggagagtttgaggaggcgcgggccctgttggggggccaccccggcatctgccacatctgttgttggagtgtcatctgttttattttagtcgccattttgcatcagggtcagctgtgttgactcagcagagaaacaggtaccac

SEQ ID NO: 343207 - DNA, 517 bp, Homo sapiens
  chr17:78872485-78873002
  hypo
gccccgactccccccgccccggctccccccgcacctgctcacccaacccctgctcaccccgcccctgctcaccccgccgtctccgtctagtgagttttgatgatgggcttttcacttgtgttcagcttcaagctttctttctacttccattgtggttcctggggatggcggtccagccacaatgacagcagcgcatgacaggagcccaaagacccgaaacagacgcagggcatccgccaaggcagttcccaccgggcaaccctgtgggtgtgctcccagccttggccagctgctgccttgagcacctctggatagaacgagtccagagcttgcaccatgccctccagggtatggagaactgaaaggttcactacacaacaacccagacacgccagcttagcccagacacgccaacttgttaattttcattgagaaataacgttgcagctttgtgcatttggctgtccactaaaatatgccaagtgcccagaaagcgcagagttgactccgtatattc

SEQ ID NO: 343208 - DNA, 122 bp, Homo sapiens
  chr17:78874437-78874559
  hypo
cgacagcagcatcacccctcggtgctcacctggtgaccgtctgccaagggcctggtggccccgccaccctacctggcccatgctccatggggttctcggttcactctcgtccctccactcac

SEQ ID NO: 343209 - DNA, 445 bp, Homo sapiens
  chr17:78935167-78935612
  hypo
cgctgagcgtgccccctcccctacagccgcgtcatgacgtaccgggagcacacagcctgggtggtgaaggcctccctgcagaagcgtcccgacggccacatcgtgagtgtgaggtgaggagcgccgatatttagcagccgttctgctgtaaaaacattattttcccctccatttaaaatacgtccttggtatttaaacagctggaaggggatggcatttcgggcagtaattaactcctgccctggaactggccagaaagatcaggcgcagcccgtaggggcccaggggccacagctgctcccctgctgggggacacctgacctgcaggcgctttgggaactttcctgggctgccaactgcggagggttccggggggagttgggcagctgctctccctccacgggcaggggtggcagggtggcaggggcggcgcgtctgccaggca

SEQ ID NO: 343210 - DNA, 1019 bp, Homo sapiens; identical to SEQ ID NO: 335709
  chr17:79007528-79008547
  hypo

SEQ ID NO: 343211 - DNA, 892 bp, Homo sapiens; identical to SEQ ID NO: 335710
  chr17:79008842-79009734
  hypo

SEQ ID NO: 343212 - DNA, 195 bp, Homo sapiens
  chr17:79045500-79045695
  hypo
cgtccagctcccggcagactcagcgcgggggtcggatgccttctccgcaccatcccgcaccgccacgagctgctgtggctcacattctgccatccgagctctgtccaggaggcagccgagaattggagcagttcccacgccaagtagggccttgtgggtggccggtcccctcctccagcgtggcacggaggcgcc

SEQ ID NO: 343213 - DNA, 472 bp, Homo sapiens
  chr17:79046033-79046505
  hypo
cgttgggagacctgcgcaggccccacctcagtccacaacaatgttccttgattccctccggcttcctgctccttcacctcctcctgcgcagcccggcctgacccatgtaatcagggaacaggaggggctctcctcagtgtccctatgtccatgccttgtggccacctgagcacttctcagggtccagtggaaaactctcctgccctgtttgacgcccacactcgtcagtttcaccttggtgccaagagcagacgatctgctccaggccccacttgggccacagcctcacagccgtctccacgtccccacccgaacctggcatttcctgaattcctggcccctgtccgagaaggaggctaaccctcctgggagagctctggcaggtgctgacccaagtccgtggggtcttcaacctttgcagacacctgcgcccagaggccacgcctcccactctgagcacaggcgggcggac

SEQ ID NO: 343214 - DNA, 431 bp, Homo sapiens
  chr17:79048174-79048605
  hypo
cgtgcacggatacgtgagtgctggtgtgcgtgcatggatgcgtgtgagtacgtgtgtgtatgcacaaatacatgtgagtgccagtgtgtgtgcatgcacggatacatgtgaatgcctgtgtctgtgcgtgcatggatgcgtacgagttgcctgtgtgtgtgcacgtgcacagatgtgtgagtgcctgttcgtgtgcgtgcatggatgtgtgagtgcctgtgtgtgcgtgcacggatgcgtgagtgcctgtgtgcgtgcacggatgcgttgagtgcctctgtgtctgcgtgcacggatgcgtatgagtgcctgtgtgtgtgcatgcacggatgcgtgtctgtgcgtctgtgtgcgtgcacagatgcgtgtgagtgcctgtgtgtgtgcacggatgcataagtgcctgtgtgtctgtgtgcatgtacggatgc

SEQ ID NO: 343215 - DNA, 403 bp, Homo sapiens
  chr17:79053502-79053905
  hypo
cgacggctctgccggtctgttctggctcatgtgctgtgtgccctggcccgctggcactcagcttacatttgaacctcgtctttagagttaaggtcccacctgtgctgtggaccagacgtgggcctcccagtgagtggggggcatctgataggtgaggctgcttaggaagcctggcacaccctgtccctcagcagggtgggcctgggtaagtctgcccgccgcatgggagggagtgtggagagatgaagagatgagggagcccgagaacgcatggcctcacgtctcaccccaagggaggctctcaacggctgtggagccctcgctactccgtcttcaggcccctgaaggacacaggcaaccgcggacaagacttagttgctcagcggaactcactgcccctacc

SEQ ID NO: 343216 - DNA, 60 bp, Homo sapiens
  chr17:79060187-79060247
  hypo
cgcgctgcgttgggttcatgggccttggttttgtgttttattgtttgaatctcaggctgc

SEQ ID NO: 343217 - DNA, 196 bp, Homo sapiens
  chr17:79060680-79060876
  hypo
cgggagtccggtcccagtttgttcctctaagcggtcgtggcctccgcctgcagggctggccactcgagggaaggtggtacttcaggttcctcgagggagcggcttcggtgttgtttctctcaccgtcccgccggcgtcaccggtgctgcgtgctgagtgggctgggacgtaggaaggcctggccgatgacaggcac

SEQ ID NO: 343218 - DNA, 264 bp, Homo sapiens
  chr17:79072884-79073148
  hypo
cgtgctggcccctcacctgggcacaccctgttccgaaaggcgtgacctgtggatctgatcttgctgtccccgtggacgctggtcttgctttctgggctcccagtctccgctcggtgacctcttgtctgatcctccccacgaacttccttctcacgttctcccttggtgcacgcttatccggaaaccaggcagccaggtgtcttagcgtcccgctccccgtcattcagagccggagccgggtgggagaggagatgaggtgcgccc

SEQ ID NO: 343219 - DNA, 257 bp, Homo sapiens
  chr17:79074754-79075011
  hypo
cgtgacctctgagagacccctctgcccgtcatctgttgagggcccctccttgggccggtagactcttggccctgtgtttcccgctaggcgtcccccggcacagtcctgcggccctgtgtctcccgctaggtgtcccccggcacagtcctgcggccctgtgtctcccgctaggcgtcccccagcacagtcctgcagccctgtgtttccggcatccccagccttgtcgttccttgtgggggaatcccgccctgggatcc

SEQ ID NO: 343220 - DNA, 659 bp, Homo sapiens
  chr17:79077368-79078027
  hypo
cggagcgcgcggtgcagctcatgcagcaggtggccagcaacggcgccaccctccccagcgccctgtcggcctccaagtccaacctggtcatttccgaccccattccgggggccaagcccctgccggtgccccccgagctggcaccgttcgtgggggtgagtctgtggcctctggaaagcttcacgggtgtgggtgggagggcagcttgttgtcagggcggggggccgccagggtgcagagtccaggggcccctgctgagggggcggagggttctctttccccctggtcttgcccggggtgggctccagcaacagcctgctctgcctgcttccctgcagcggatgtctgcccaggagagcacacccatcatgaacggcgtcacaggcccggatggcgaggactacagcccgtgggctgaccgcaaggctgcccagcccaaatccctgtctcctccgcagtctcagagcaagctcagcgactcctactccaacacactccccgtgcgcaagagcgtgaccccaaaaaacagctatgccaccagtaagggctccgctggggtgttgggctggggtccctggacgtgcctcctcagaccctacagtcatgccacaaccctcaataggggcctgggagaccctgaggctcacaattatgtgacc

SEQ ID NO: 343221 - DNA, 508 bp, Homo sapiens
  chr17:79082625-79083133
  hypo
cgcccttgtcctgggtcttcctggagggtcaggaggccaacgggagctgctgaaaggggcattgctcggtgctggcggactcgccgcctgtggctgggcagcgtcgtgcagccaggcagccgtcctgtgctttgtttcacagtggcagcggcacgctggtgtccacagtgtgaggacgctgaccccgggcagccgctgctctgaagagcttccgcgccttccccctggtctcgtccgttttcctcctcagctctcgctggtttgttcttgggttgtttttcttttccacctgccccatgccttttggttggtgaccccagactctgtgatcccccagggtccatggtgctgctccatccgccccccctcccctgtgtttacgcgccccatcctgtgtgtcccagccttttgagcagaaactgccaggcaggacctgctgggccgtgcggggcaccctcggcctcaccctgcagtgtctgtggcactcactgcttttctaaggctcgcc

SEQ ID NO: 343222 - DNA, 239 bp, Homo sapiens
  chr17:79084478-79084717
  hypo
ggctctgcggggggccgtctgcagctgaggcaggctcctggctccctccaggcccgcaagtgaggcaggctccgcaggcgccgtccagggagagccagagccccagctgtgtgccgactccgagtgctccagggttctaggtctcctggcagctcgcccgtggtcccccctcctctgcacccccgagtcctcagaccccatgctgcctccaactgagccttgtgtttccttgcagcgcc

SEQ ID NO: 343223 - DNA, 163 bp, Homo sapiens; identical to SEQ ID NO: 218233
  chr17:79086357-79086520
  hypo

SEQ ID NO: 343224 - DNA, 158 bp, Homo sapiens
  chr17:79086890-79087048
  hypo
cggtctcccctgcggccttgcttaggggcctctgaggggaggctctctgtgaggagacagagcccaggcctctgcattctgaggccagcgccctgcccgcccaacagctcccccacacatgacgcaggccctcctcagggtcctccgctcttggacac

SEQ ID NO: 343225 - DNA, 516 bp, Homo sapiens; identical to SEQ ID NO: 271516
  chr17:79093914-79094430
  hypo

SEQ ID NO: 343226 - DNA, 576 bp, Homo sapiens
  chr17:79099762-79100338
  hypo
gcgtctggggctgacggggccacgtgtccttcgccacttcttccagcatgtccccccggggtccccaggggctgggcatcctggcccaagcaggacagaaccctccctccagggtccttcgaagcagggtctgtctccctcaagccccaaagcgagggcttagcagagtgtggggttggcgcggggctgcagggtgctggctgactgcctcggggacagagaacaggccagcttgacagtacgcatctcttcgtctaaacctgcaaagtgggtgtcaaaccattgtcttcccaatttttcaaaaacgtcataaaatccctctgcatagtggttgtctgatgctgcatgagatgaacctggccggtcctcgcaagccccctgaggcaggacccgccctatgcccttccttcaggggaggggcctggcctagggcttcccggccgctggcccgcgcccgccctcacctgtgcacgaaattgttgcgatgaaggtgcaggacgccacaggccacctcacaggccatgcgctgcagggtccgggggtcgggagccatggactccgccacccggcagctcc

SEQ ID NO: 343227 - DNA, 757 bp, Homo sapiens
  chr17:79166330-79167087
  hypo
cgggtcagtgcagagctgctctcctccagctgctgcctcagctcttccagctccgcccgctgcctgcggccagggaggagtcagcaggtgaggggtcatcgagtaaggagtcagggatgggagaggtcagcgggtgagggggcgggggggaggggtcagccagcgaggggtccctgggagagggcgtggtgcccccgggcggcacctggctgcctgctggcccagccgctccctctcctcagccacctcactgtacagccgctgccgttgctgctgcagcgcccactgctcctgctccaggtgctgctggaacctgcgggacggtcaggactggctctcgggggccgggacgggcggtcccaggacccacccaccgcaggggcacgggccgaccacaggcctgactcacagctggagagcagccctccggggccctgcccctccccctcggcagtcaaggcccctcaaagccaccgcccgggggcaggcaaggccacgaggaacttgcccatcagccaagcgcagcaattccctgagctccaggccctcgtggcactttgggaagtggctgtggagccgcgtccaggcccccttttccctcagcccgtgtgccggcctcaccctgttcagcattgccccacgggcatggagggcgggaggcaggtgcctcgtggggccttatccacctcccctgcctccggcctgagggtgccaggtgcctggctccgtgacctgagcaagctcgcgccagggcctc

SEQ ID NO: 343228 - DNA, 415 bp, Homo sapiens
  chr17:79175952-79176367
  hypo
cggaggtgtgagccccccagaccctgatgcctgcccacctctgtgttctaggctcaggcccccccccaccgccccaagatcggtcacctctcagcctcctcctccgtcacctccttccgcctgggcaagcccgtgctgcccccagtattgttccgggctgagtgggtggcactggagacattcttcggcagcttcccaaagccgctgctctcactgccctcacaggtggctgccttgatgatgttgctgacaggtaagaagaaaacaccctcgtctcaccgcccaggggaacagctctgcccacaggcagcaggtgcccactcccggaagtcccaggactgagcctggaagtggtgctggcaggctggcagccggggcagagggggacagcggcaggtgcgaggccggctctccc

SEQ ID NO: 343229 - DNA, 169 bp, Homo sapiens
  chr17:79253772-79253941
  hypo
cgctacaggggccgctctgccagccccccgcatgccgatggtcttttcccgtctgcgccggatttacgcctctcttttcagccggttaccatgttccaaccgggcacgaatcactcgctcttgtcattttggtggagaaggtaatgctgctggaattatggaagagccc

SEQ ID NO: 343230 - DNA, 421 bp, Homo sapiens
  chr17:79542407-79542828
  hypo
tgagccacagcgcccagctgacacttggtttcttaaaagcaccacttagaaaatagtccagtccgtgtgcaacgactggatgcacacagaactggcagctggcatttctcaggggccagctgtgtgcacagagccacttcgtcctcacaaacacactggtcacaggcactactgctgtccaagacaggaagggttacaaagatgagtgaacctcctaaagcaatcggcaaggacagctggacagctgtgtagagactgggccccccacactacgtgcgcaggctccccgcctcccaagtcagtgccggtgctgcagggccagggcacacgcaggcctccctcctgcctttggggaaccttgaagttgaggctcggaccccaacagccgtctcacactgagtaagactctcccacctccacc

SEQ ID NO: 343231 - DNA, 462 bp, Homo sapiens
  chr17:79612376-79612838
  hypo
cgcagtgagcctggctggctacctgggcgccctctgtgagaacacctgcctgttacgtggcttctctgggggcatccttgccttcctggtgcttgaggccgtggcgggggccctggtggtggccctctggggcccgctgcaagacagcctggagcacaccctgcgtgtggccatcgcccactaccaggacgacccagacctgcgcttcctcctcgaccaagtccagctcgggctgaggtgctgcggagctgcctcctaccaggactggcagcagaacctgtgagtcttggagtgggcgagggacagggccaccacagggtcgcagaggccacacacccttgtgcgtgtacacacagtcactcacacgtacatactcattcgtgcatgcccacatgcatgcacacgtatacccacatgtacacgcatatccacactggcacgtctcgtgctcacaggtttcac

SEQ ID NO: 343232 - DNA, 189 bp, Homo sapiens
  chr17:79619077-79619266
  hypo
tgtggaggtgtgagcgtgtttgtgcataagagtgtcatgcccgtgtgtgcgcacacgtgtgagtggacactcctcggtgcgttgatgggagcgcggtgcctgtgtgcgcacacgagtgagtggacactcctcggtgcactgatgggagcgagatgcccgtgtgtgcgcatgtgtgagtggacactcctc

SEQ ID NO: 343233 - DNA, 253 bp, Homo sapiens
  chr17:79648960-79649213
  hypo
cggacccccagctgcaccacctccctaccgagccatgcttccggctgtaacccgagggagcccccgcccccgctgtgctccctctcagctcagggacgcgtacattttattgaagagtatcagcaccgatgcttctgcaagttgttctgcagaaaggagacctaagagctgcacacaggatgcagagagctgggtggggtcagaggcgtccatcacaaactggggaaaaagaaaaagacagcagcaatgcccc

SEQ ID NO: 343234 - DNA, 1194 bp, Homo sapiens
  chr17:79655135-79656329
  hypo
cggagcctgcttgcagcagcctctgatcgcacgccgtcctgcacgtcacaccgggacggcgtccccgagagggccgtagacgcgaggccaggctgcgctctaaccgggggagaggatggctgcagggggtctggagcccgctctgaatttggaggcatttctggagcggctgccccccgcgtctccccggctgtgactggaaggaggggcgtggccagagccccgcagtacccctgtgttctcagccccaacaccacgctgccaccgtcaggcctgccgggtcctgcctgttggaggctgacgggaaccggggatcctggggtgggcaggtcccgtggggaaagggagagacagatggtcaggggcacagagacgcggcgttgtttggctccagcaagtagaggcaggcgtgaggtttgaactcagggtctgggaacaggttggtgcatggcccccacgccccactcggggggccctccctggcctctgtgtcagccccatctgctcagaggctgaggtctgccagctgcttcctcacaccgaggcctctggcgcctggagtgtcctgcgaccctcacccccttctccctgcctgcagagacaagtggaggtaaacgtccgtaacaagatcctgtacctgatccaggcctgggcgcatgccttccggaacgagcccaagtacaaggtggtccaggacacctaccagatcatgaaggtggagggtgagtcaggactgaggttgggaccaggttgaggcttggaactgctgggcagtcaggctcaacgggcacagtggcgaggggcctgggaagatgggttgttccctgtgttgggagggaggagggcggtggcctggagccagggaagaccgtgcatgtgagggcgggttcagaccggctcctgcctttctggacccacggcccacgggcaggggcaggcagtgatggcagacaacacacaggtgaaaaggcagcagacagcctgtttcagagtggcaggactcctgggggccgggttgggctgtgcagtcagggaaggcctctgaaggagctgtcccaagtgtcgagactggaacagaagccagagccggcgtgagcaggcaggcagcacccgtgggcagacactcagggttgaggccccagggcagaaaggtggccagcgtgccagaggagagtgcagccgggcctgtgcgcc

SEQ ID NO: 343235 - DNA, 365 bp, Homo sapiens; identical to SEQ ID NO: 271570
  chr17:79769295-79769660
  hypo

SEQ ID NO: 343236 - DNA, 73 bp, Homo sapiens
  chr17:79803018-79803091
  hypo
cgtcatcatcccctgccccatcctggccaccgctctccaggaatttcttaaaaccatccagcgtgcgttcccc

SEQ ID NO: 343237 - DNA, 287 bp, Homo sapiens
  chr17:79826882-79827169
  hypo
cgggggtcaggaactcgtactcctcggcccggggcccatagctgcctaccatgtagtcagtcttgtcaactgcggcacaaggaagagggcggtcagcggccccgcttccccgcctggcagcacgcacccaagcggccccctctgccctgcccggggccccactcactcttgacgcctttcctgtacgtatgctggatgtacttcatgccggacactatctctcggttaacctgcaggacccgaagcgaggatcagggaaggtcggtccggaccccagccccagcccc

SEQ ID NO: 343238 - DNA, 422 bp, Homo sapiens
  chr17:79870436-79870858
  hypo
ccttcttcaccagcacgcaggggagtcgccagtgagaaaatgggatcctgccacctgccaaaaagggaaagcggcatcaggcgggcctgggagcctctcgcagtcacacctgccccagctcgggaaagctgtctgcggtccctgccttcccatccccttccctcccgtgtcaactgcggcggggctctggttggcggcagcttcattgttaccaagctgcagaacggatgtgggagaggtcacctcttaggtggtgactcaaaggtcggcacccacactagctcggtctcctcaaaactccgtgtccttgtccaccactgagcggcgtgcacacacagggtggggcagcagtggccccagggctgcctccgtctccagggatgagtcactagcaactctgggccccaccttccacttgtacc

SEQ ID NO: 343239 - DNA, 398 bp, Homo sapiens
  chr17:79873436-79873834
  hypo
cgtgctgccgctgcccagcctatgtgggaggccatgcctggcccgcttacctaacgcttctccctttctgaagcagtgtccacactccattagggccccggtagtctgggatagacgctgcctgcatgtcgagaaaaaaggtaagccaagtcaaaaggcaccactgtaggtactggcagaattcccagaaacggaaagccactgtcactcctgccgcattccgggctggcctgcatgttggcctctattcattccacaggctgacctgcctgagcccatatggagtgtaccccaattcggctcctcccttctacctggacttccgtttcccgcctggcctggctcatccttccaggctgcacgcagccctgcctgcctccggaagcctctctggcacc

SEQ ID NO: 343240 - DNA, 483 bp, Homo sapiens
  chr17:79887422-79887905
  hypo
cggctcctggccagctccccacggagagcccaggacacttgtccctggacacagtggtgcagccatgcttgggccaaaccatgaggccaccagaaccgcgaaaggctactgtactgagagggatactgcgagagaggcccacaggtttccaagcatccctctcactccgcacactcatctccacgaccggctttaagtgcggccttgaggcctggctccctgtttggacttctctgcacctccaggagctcacttcccgtcacagctggatgcctcctcccgcaggcacctcccgggcatcctcccgccccaggctgcaccttctgtgggactggcccccgcaggcacctcccgggcaccctcccgccccaggctgcagcttctgtgggactgagccccgcaggcacctccccggcatcctcccgccccaggctgcaccttctgtgggactgagccccgcaggcacttccccggcatcctccc

SEQ ID NO: 343241 - DNA, 276 bp, Homo sapiens; identical to SEQ ID NO: 271592
  chr17:79913170-79913446
  hypo

SEQ ID NO: 343242 - DNA, 1254 bp, Homo sapiens; identical to SEQ ID NO: 335712
  chr17:79988364-79989618
  hypo

SEQ ID NO: 343243 - DNA, 764 bp, Homo sapiens
  chr17:80019114-80019878
  hypo
cggacgtaggacagggggcaggggtgctcccgcacgatgtccagatactcctcggccagctcccacacggcagggctccggccctcgaacagggcggggttgtgcaggttgccctctgtgggaggaggagcggggaaggacacctcgtgggttgctccaggtggacggcacaggaaagcctgggacactcaggacacccttctgtgccacctcacaagggacaaggccagctcaggcccatcagagcagactgggattgatgaacaccatctgtgaacagcaccatggggagggcagtaggcagtgggaggcaccgacctgggcggtggtatcaggccgtgtgcatggggccctggctgctgtcctgggccctgcccacctgcgctcatgacgccctgcacacccgtgtcccggaggcagcgctccacgtcctgcaggcactggatgttcccgttagcaaacacagggatggccacagccttcctgttggcagagaaatgcctgtttccacccgcccggaacagcacccaggtgatgctgcccccagccacggccccctgggtggtcacgggcgtcaggcgtgccgagcaccctgaggtgtggagctgggacccccagcaaagccccaaggactgagggctgtgtcacccacacccactcaccgcacagccttgatatgctcccaggacgctgcacccgacaggggccccttctgctccttggtgcgtccgtgcaccgtcagcaactaggacagagcagtggtc

SEQ ID NO: 343244 - DNA, 861 bp, Homo sapiens
  chr17:80045801-80046662
  hypo
cagctcccgtgccaccggccctgcttaccactcactaccaggttgccgttctctgacacctcgaaggcacgggaggcctccaggagccgtacctccagggacactgtccctgcagagcgggagagttggagatcagagggcagcacccgccccccagctacccccgccttggtcctggggtacccctcaccagtcttgggcaggatggtggcctggtgcagcaccacatcctcaaacaccacaggcagctgctcgacgcccaggcccagggcgcgggccagcgtcttccacactatgctcaggtagccagtggcggggaagaggacgcgaccgtcgagggtgtggtccaccaggtagtggtcaggagactcggagctggtgtctgcgggagggcacaggcctcagcacagagcgggcgtctgtggggagggaagagtctgcccacccgccgggcccctgctcaccgatgttgtagatggcggctgagggggaacctgaaccgttggggaagtcctcggcggccggcacgtcccaggccaggctgtggtcccacttgatgagtggggagatgaggggagttcctcggggagctgggaactccacaggtgggaacaaggcattggggttggcgtcgatgctacggagaagggaggcatgggtagcacacccgtcaccggggtccaggggctctgggttcagcccacccactgcctgcggtggaccatccagggctgctgccaccggcctgggtcagtgaggggcccgcagccccgctcacccaccccacgccgtccccgactccgggagacgagacccgggctgggaagggacccaccctgagaggtgcagcctgccgatgcc

SEQ ID NO: 343245 - DNA, 158 bp, Homo sapiens
  chr17:80049202-80049360
  hypo
tggcggggacagccgcgatgtcgttcagcatgctcaggaaagccaggtcctggctgtgccggaggccctgctccagcagcttctgcacggcctcaggggtgcgtccgctggcccgcagcagacggggcagggtggcatgtggggcgggtgcggggggc

SEQ ID NO: 343246 - DNA, 940 bp, Homo sapiens
  chr17:80050751-80051691
  hypo
cggaaccccggcagagcccaccttgctccttgaagccatctgtattggtgccggcgttcaggatggtggcgtacacccgccgggccagggacttcttggtcagcaggacggccaccacaccctccgagcggcagtacccattccctgggtagagcagcacctcaggcccggggctcagccccacgccggcccccaccccaccaggaggagctctggggtgtggggtgggtgcttgggtgggggatccccggagctggcaggatcctgctcagcgtggggactgtgcggggggccgtcctgtgccactgtcccgcctgccctggccgcgcagccgcacactcacccgctgtgtcgaaggccttgcaggtgccctcggggctgagcatccccagcctcaagaactgcacggaggtgttgggcttcagcaggacattgatgccccccacgatggcggcagggcactgcccgctgtggatggcctggtaggcgttctgcagggccatcaggctggaggagcaggctgtgtccagtgcgatgctgggccctgcaaggaagggtgctgcggctcaggtggggctgtgagcacacgagacccctgagcacacctcctgccaccaggctggacacacactgcacggagtgagcccacgccacgtggtttctgctcagcatgtggggacctgaaggccacccacctccgcaggaggctgggcaggacccacctctgaagtcgaagaagaaggagagccggttggccatcatcgctcgctggcagcccaccatgctgtagcccacgagtgtctcggggtctcggctcagggcctccgaggtctcagagccgctcacgcccacccagacgccagtgtgtgttcctcggagtgaatctgggttgatgcctgccacaaacagtggtcaaggtgccacggccgggccccacagc

SEQ ID NO: 343247 - DNA, 1101 bp, Homo sapiens; identical to SEQ ID NO: 335713
  chr17:80186335-80187436
  hypo

SEQ ID NO: 343248 - DNA, 635 bp, Homo sapiens
  chr17:80201427-80202062
  hypo
cgcgcccaacagaaggtcacagcgcagactctactttctggccgtgaaggttctgggtccggttgggagagtcacctgctccttggcacctcagggtgggtccttctggcctgccggcttttctgagctagtcttggcacgtggcaaggacagccccgctcctggttttaagcacaggcattcatacagacggagtgccaatccgcacaggagcattgagtgctgagaaaatggactgagtgcaaaggcagcaaggcaacaaacactacagtaaccacctctcggttcacagtcctctcccaagggaccagaaacgcatcttccaccttgaatcctgggactcccaattgtcctgctagggtctcaaagcctctgcttccaagctctcagctgcctgcccacctcctggggaagaagcgcgcagtgctttgcctggtaacacccactgcacccctgccccgcggcagcctgcggtccctaactgctctccgagggcctcaagagttcctgacagcaggcatgtcaattacgggaggagggagggtgagacgccaaaatcaggttgaagaggtcccaccacacacgggcacacacacacaccacggacttttgatgagaaatctcctctccaaagc

SEQ ID NO: 343249 - DNA, 98 bp, Homo sapiens; identical to SEQ ID NO: 335714
  chr17:80277699-80277797
  hypo

SEQ ID NO: 343250 - DNA, 552 bp, Homo sapiens
  chr17:80294441-80294993
  hypo
gtgagccactgtgctggcggcatttgcttttctttgtaacttgattctctgggttcccttgcctttcatccttgcccacccacgtgactgcagcctgtggggcttcctcctaatgtcccgaagataactcgtcatccttgaccccgccgccacctcgggttctagtggaggatgtggcccgcctgccacccccacaggcaccgggtcctccaggcctccttgacccacttccaacccacctgggatgtctgcgcgttaccagcccagatgcctcttggagccttccacctgcaccccatctcctgtcccaacaggctgggcccctcctcccgggctggccaagccagtacctccgcaggggccgcaggtgcagcaccctctgtgggggagctagggggatcgctcctctgctctgcgcacttttatgaaagggcctctgaccctcccactgtcctgctcactctgcccgcgcacccccggccacctgggggccgccccccaaagccctcggcccgtggacagactcgcagcctcctgggagccgagccaacc

SEQ ID NO: 343251 - DNA, 514 bp, Homo sapiens; identical to SEQ ID NO: 335715
  chr17:80332182-80332696
  hypo

SEQ ID NO: 343252 - DNA, 355 bp, Homo sapiens
  chr17:80394873-80395228
  hypo
actgggacccgggccggccgcatacactctggagtctcctacactgagacccgggcctggctgtctcaggcggctcccatgttggctctgggtacagccccgggaggcgtgtccagggccgtgttggccgcctcccctggagccactcacctgtttgctttctcacccagtcctcctcatgcagaagtaccggcggtgcggctttccgcagctgtgggcagccagtgccttcaagggtgccacggggcccagccaggccgtgccccctgttgagcaccacctcaggaaccacgtgcagtggctgcaggtggcgggcagcgggcccacggactcactgcagggcatcatcctgacc

SEQ ID NO: 343253 - DNA, 522 bp, Homo sapiens
  chr17:80445750-80446272
  hypo
cgcctgagcccaggataaacttacctgtgtttatctttcaggatgcttaaatggcagaggccaagcccagactccagacggacatgcggataaggccctgctgcggcagatggaaggcatttacgctgacatccctgtgcggcgtccggagtccagtgcacacgtgcaggagctgtaccaggagtggctggaggggatcaactcccccaaggcccgagaggtgctgcataccacgtaccagagccaggagcgtggcacacacagcctggacatcaagtggtgaagtcaggccagggccttccagctgctcttggggccagagccaagagcctctcagtagagggaggggctgccctgagtggagtattaaagacacttaagaaaaccgctcaatggattactttggtttctccgagttccctgctaccccgtttattggaggcccctcaggcagtttcatgtggtgctatcttcataataggtgtgggattggaactttttttttctttttttttttttgag

SEQ ID NO: 343254 - DNA, 172 bp, Homo sapiens
  chr17:80479373-80479545
  hypo
ggttgttggagatgctggtaagagctgttgcttttcttcttgacttgcgtgttgtgtgtgtgtgcatgcgctgttctgtttcttagcatggaaaggtgcaccagcatattccttaaactttggtagtagcattttaaagaatgttattttcaggccgggcgcggtggctcac

SEQ ID NO: 343255 - DNA, 221 bp, Homo sapiens
  chr17:80491467-80491688
  hypo
cggctgttcgcgtagtaggttcgttgacaccagcatcaccccagactcatgagtaattcattgcactatgacatcacaatggctaggaataggaatttttcagctccatcataatcttaacgggaccctcatatatgcggcccatcattgacttgaaacgacgtgaattttgttagccgggcatggtggtgcccagctgtaggttagccgggcgtggtgac

SEQ ID NO: 343256 - DNA, 223 bp, Homo sapiens
  chr17:80517124-80517347
  hypo
cggttttccactgagcttcagtctgaggttgcgcggttggtgctcgctgttcttcccatctctgctactggctggcgaccgtgcggactccacagctgcgctcagctcagagccagcttcgtgtgcagagcccagcagagatggcggagccacttggcatccaagcaccttgccctgtttgtgtccacctggttctgccgtgagaacccctgggttttaagcc

SEQ ID NO: 343257 - DNA, 175 bp, Homo sapiens
  chr17:80519712-80519887
  hypo
cgtagcctccgacctccacaggctggaggtgcccctagggcagggtggtggacagagtcttcctctgttggggggggggggtgcccgcactgggcgcacagatgtgagccgggctgagtcccgcgccgggtgcgcggatgtgtgctgggctgagtgtggccggccacttgtttgc

SEQ ID NO: 343258 - DNA, 191 bp, Homo sapiens
  chr17:80535282-80535473
  hypo
gcaggctcctaccccgcctgtggcccaacctgcatgcagggcgtggcgggcggccgggttaaggtctcgcagccaaagctgcggcgtgctcactgcccagtcagggcagcacctgcgtgccaggcccagccctgggttagggccccgccgggccctctgtgcataccgccgacactgcgggccaaggtctc

SEQ ID NO: 343259 - DNA, 478 bp, Homo sapiens
  chr17:80554494-80554972
  hypo
cgctcctccaactttgttctttttaaaaatcgcttcagccattctaggtccttggcatttccgcgtgaactgtaggattcctacaccaagcctgctggcgtcttgattgggacggtgttgaatccagagtgtgtggcagagctggcggagcccctctttctttgatctctgccgatctccttgatttcacgtttgttttattccacagaccaccccctccccatcttctcacctacttcaggttccatttcatggtaggaaattcctgtagtcctcccgggcttgctgaagtgctgctccaagttacagtccccgggttgtcaggcgtggcgagagccccttgtgctcagagctctcacggaacacagagcaagcctgtctacgagttcagccggtgaggggcaggggctggtgaaggcggcggcgcctctgggtgtgcccaggggcagggtcgcctccaggccccacgcgctaagcc

SEQ ID NO: 343260 - DNA, 295 bp, Homo sapiens
  chr17:80563218-80563513
  hypo
cgctaatgtctggaatcgtgatgacattatcagtactcaccccagggtagcagagggaagaaaccgtgctgaaaatgacacagaggcctttgggagctaaatgatgttcacggacagagagttcataacggagtgtttgttttattccttacactgatcccctaatttaaaacagttcatactggcataaaagaactgtttatcacgccctgcgagactgcctcttccagcaaagtgaagcagtcatttgtaatttgtttctgccaggtctgcgtctgcagtgcacccgggctgc

SEQ ID NO: 343261 - DNA, 910 bp, Homo sapiens
  chr17:80571137-80572047
  hypo
cgcccccgactacagtggtgggagcgggaggtggccaggggttcacacaggcatcaacgccaaacacagggtgggtatgggtcagggctgcgttccacagggcacaagccgcctgtccccgcaagacatcccagggccacaggggagggaggacagaccagaaacgcagccggagtcatccatgcccacgcacctgtacgatcagacaggaaagctgctgagtaggcaccgtctgaggcagtcactctggagtcccttcgcacccacgtccggggcacaggaggttcgtgggggaggcagcagcccggccttgtttcccatacactgcgcttcccatcagttccacttgaaaagcagctgcgctcccgagtccgccggcctagggacaccgtgtccttgccgctctacagtgatttttaaaaagcacatgcctggggagggccggtgccgccagggcctcacatgaggcacgtccgtgcaggccctcgccacgttcctggtgaacgggcctgtgacacagccccgccgtccgcatcagttctgaggctgttcacgtgcactgcgagaaaacccacccttcttgcatgcatttcccccagattcatgtttatcaactggtaattacgctcctactcccccacccagagtcagatctcaagtgttagacaagccagggtgacgccggctcacttgaagctgccacttcaacatgcagggacattgctgctgccagccaccctccacctccacaggccagcaggagcctcagacctcccagagccacacaggcctcctacagatgcatttcctccctccctcctccagaggtgcccttggggcacagggagagaggagggcaggccgccccgtcccgacacagggagagaggagggcaggccgtcccatcccc

SEQ ID NO: 343262 - DNA, 82 bp, Homo sapiens
  chr17:80600131-80600213
  hypo
cgacagatcagcggcagcatacgattctcacagaagcatgaaccccactgtgaacggcacacgcgagggatggaggctgcac

SEQ ID NO: 343263 - DNA, 164 bp, Homo sapiens
  chr17:80654614-80654778
  hypo
cgctcaatctccagccctgtcctccaggcgctcaatctccagccctgtcctccaggcgctcaatctccagggcagcgctggccctcggactttgccacagcgacatccgaactatctagaaatgtgacgaatggaagctttttgttttctttccttctaattac

SEQ ID NO: 343264 - DNA, 282 bp, Homo sapiens; identical to SEQ ID NO: 271688
  chr17:80654808-80655090
  hypo

SEQ ID NO: 343265 - DNA, 1325 bp, Homo sapiens; identical to SEQ ID NO: 335718
  chr17:80655520-80656845
  hypo

SEQ ID NO: 343266 - DNA, 857 bp, Homo sapiens; identical to SEQ ID NO: 335719
  chr17:80692982-80693839
  hypo

SEQ ID NO: 343267 - DNA, 329 bp, Homo sapiens
  chr17:80712025-80712354
  hypo
gcccggctggagttttattattactcagatcagtctccctgagaatttgagggccagggttttttagaggtaatctgggggaaagggtgggggtggctgattggttaggggtatacaatcataggggagtcggaaatgatcctccgtgatgtgctgaatcgcgtctgcgtggggccccaggagcagtgggcgggtccaggtggagctatcatgggtccgtggatcctagtgtaggtgtcagacatggaaacaatctgaaaagatatctttaaaggccagtctcaggttctgcaatagtgacatggtctgcaggagtaactggggaactc

SEQ ID NO: 343268 - DNA, 223 bp, Homo sapiens
  chr17:80744615-80744838
  hypo
cgagtccttctcggcttgggagggtcttgtggccacatgtgtctagttctgcagtttctttgttgtgggttcggttctttactttttttttttttttttttgatgatcttgttggttttctctagattgttcccaagttttctgttcttccatcccaagtgggagacacgtgttgcacagcctgcatttggaatacccagagggtgggtgggcgggacggctc

SEQ ID NO: 343269 - DNA, 272 bp, Homo sapiens
  chr17:80747040-80747312
  hypo
ggtaccccaggccacgctggttcggtctcctcgtggcgttaaggaaagacctggagcagccagctcctaacactcatttcccatcactcagcattttatgtggggcgggcacagtgccgtgagtcttacagaaacctgcatggtgagccgcacgcctttgagtccccatcagccctggcccatccctgctgaggtggcgcgacctgctcacagacgtgtgctcacaggcagcccgtcgcggggtcatgtgctagacggggagggggcttggc

SEQ ID NO: 343270 - DNA, 231 bp, Homo sapiens
  chr17:80747754-80747985
  hypo
cgggagcccagcaacaaatgggagcttctgtgctgctgtccgtgcatacggcccaggagccgggctcatccccgagacgccgtgttccctcccgctgtccgctcacacctgcctgtgtggacgtggctctgacatgtctccttcctggttcattgctcatctgttctcatgtggctgcgccgccaccctgtcctgggggtccttgtcccagcacgtggctctgtgcttcac

SEQ ID NO: 343271 - DNA, 121 bp, Homo sapiens
  chr17:80749629-80749750
  hypo
cgtcccctaacaatgagggtagtcctgagaactgcgtcgttgggcagtgtcgtcgtgtgaacaccgtagcgtgcacttaaacatagatggtgtggcctgctgctcccaggccaggtggtgc

SEQ ID NO: 343272 - DNA, 94 bp, Homo sapiens
  chr17:80762951-80763045
  hypo
cggcccgccctgcactcacccttggcaggagcagctgtgtacgcgggggccttgctcagcgcagggctgggctgcacgccgagcgcagactctg

SEQ ID NO: 343273 - DNA, 139 bp, Homo sapiens
  chr17:80763321-80763460
  hypo
cggtgagacgcagcacctggtgatgaaggggcggtgtgtggcctgggcggtggcagtggtggccgttcaggaaggggctgccaggaggcagagggtcccgaaggccgggtgcttccccagggaaggcgctggtcctgtc

SEQ ID NO: 343274 - DNA, 719 bp, Homo sapiens
  chr17:80772735-80773454
  hypo
cgtggcatgggggatgtctggcgctggcagagctgggcaggagaggcctgttgctgccgtctcgactcgtggatggtgagtagctgaggcacggtcaggggggatgtctggcgctggcggagctgggcaggagaggcctgttgctgccatctcgactcgtggatggtgagtagctgaagcacggtcagctgcgtcaccaggctgtccgtggcaggctgcagcccttcgtctgaacccatctccgcggtgtggccctgccgcgggcacgcccagaagagcttgagaacaaggtctgtctacctttttctcgcattggcctttgtaatttcctaattgcctcttttgtctgctgtggaattttaatgccacagattaccctgtgtagctggttttggagggccacgaatccttgtaatgtctgattttcttactccccaaaaccggttttcattcttgagggacattgtcgccccttaaggacacatgcagtggcacctgcttcagttgtagaaccaggtacccctggcagcatcctgggtcacctggagtgacgtggtgctccctggagatgaggctcacgccagcgtgaaaccagggtgggaactggggtggagggccaggggagctctgcagtggccagcagtggggtggggacagagggcacagcatggcagatgcaggggcactgccccagaccagctcttgtgccgtggccacac

SEQ ID NO: 343275 - DNA, 52 bp, Homo sapiens
  chr17:80794418-80794470
  hypo
cgaagccgcattatttcacattgctgatacctctagcgcctgaaacacaagc

SEQ ID NO: 343276 - DNA, 1173 bp, Homo sapiens
  chr17:80797632-80798805
  hypo
cgtggtctgcatcccagccatgcacctgctgggtcctgagtaatcctcggagcccagagcaaggcagagcagacacggagcaaacgctgcgttcagctgggtattttagatacgtctgagaagagttttaaaataaaacttgaatttgaaaagaaatagtgagtacttaccagaggtgggcagtgctgggatgtggccggtcttggtgccggtggctggcggtgctcaggaagcagtacctgttctcacgcttgctgggtgaaactggagcctgctgttccagtgggagggatttaagtgtaggagttgagccctcggggcgtagagatgcacctgatattcctcctgcccgcagctacgattcatgtgtttgcacccaccgagctgctgcgggcagcctccccagcactggacccagcaagcaagttatctcgccgactcccagcgctgtctccagactcaactgtctgtgagtgcggcgtcggtgctgcctggacggccatatgtcagagggctttcgatgtgtccgcagttagaatagagattactatattcatcagaatcacacccgatgaatatttggcgtcatgataaagacatgtgagactttcctttagaacttgagcatgtgtacgcaggaggcaaacacttggattgattctcaagcgcgcataccctgggaggcacagtattcatggcgtccttgccatgaggtccagtgaggcctttgaggatctgtggaccttccaccctctaccctgctcctgagagtctctgtccctggtcctcctcaggagctgagccggcagggagggagcttatcccagagcctggctgcagggacctgccggagcttgcccgacaccaggcaccgcaagagctgcggagcagggtgtgtgggtgcgggggagggggccagctgtgcactcccgcaaaccaccctccccccactttaaattgcagaggcacttaacttgggggccagtttttacctccacacccccccaccaaaactgcttgcttgcttaatcggaggccgcaccccagttgtagcgaaggctggcatgtggtgtcggtttgaggactgggaaaggaggtgggatgagctggtgtcaggcccttggatgagcctgaggctgcagggcagaggctgcagggctgtggcatagggac

SEQ ID NO: 343277 - DNA, 748 bp, Homo sapiens
  chr17:80832134-80832882
  hypo
cgcactgtgggctgcaggcttgaagaaggatgtgagtttctggagtagcctggactgcacagccagggcctccccggcatgtggcggggccagcgttggcctgggtcccacttggctttgatctcgtggggctttggtttttggaggtcctgggtgcgtctccaccatggctcccgggttcccttgcgcacaccgagccagcagctgctggggcctcagggctcgcagctcacaggcttctgacgcctcagcctggagctggcgttgtgcccctcgcccctttacctgtgccatcccggccgcagacccaagggtgcccttggagccgtgcccgccggcctgggtgtcaggcttgtccaacgggttcttagagaacctgggccccatccctccttggcccacgcagactccaggcatccggccgggcgggctgtgagtcaggctgcaccaggtgagcgtgtgggatgctgctggtgcgagcctccctgcccaggagccctgcgcacccgggtatcggttggggtgtgcccttccagatctccctcccttggtttgtcataggtgaccacattttaattaccagcttttatgcccgtcaatttgggaacgtgatacaatcttgatttctctaactttcacaagttcttcggtgggtcctgtaacagtgggtgcttgggatcagagcatcagagtggaattttcgcagggaaatggaaatgcctgatcgagctgggcggtggcagcagcc

SEQ ID NO: 343278 - DNA, 177 bp, Homo sapiens
  chr17:80859381-80859558
  hypo
cggcccggctgcctactgtggtcctgctgcctactattggtcctgcttcctggggagcggcccggctacctgcggtggtcctgctgcctggggagcggcccagctgcctactgtggtcctgcttcctggggagcggcccggctacctgccgtggtcctgctgcctggggagcggccc

SEQ ID NO: 343279 - DNA, 178 bp, Homo sapiens
  chr17:80860241-80860419
  hypo
cgtccttacgcgaagaggcctcgggctgggcttgcggctgcagactgcattgcctccgcttctcaggtgctttgtcttttctgttccctcagagttgcaggcgatggtcttctagacagcatgcagttgggtgtcgctcagggtgtggagtcctggcacatgagacgccacctgcctc

SEQ ID NO: 343280 - DNA, 99 bp, Homo sapiens
  chr17:80867234-80867333
  hypo
cgctgtcaggagcaggcggggcgggtgtgttcgcttccctctctgcctatgtgtgtttgggttgagcgggtgggtgtcacccggcccgctgtgggaggc

SEQ ID NO: 343281 - DNA, 308 bp, Homo sapiens
  chr17:80879354-80879662
  hypo
cgctaacttgattttttgacagatggttggcaatggctgataaatgacactttgagacatctccatctcatctcaagtcactcccgccagcagatgaaggtacagtgagcatgggcgttcccggccggcgctgtggcggtgttagtgtgttagtcacggatggtgtttgtgttggcgactgtgcatcatgaggctgtccctgcagtagcctgataactgacaaatgggggcataattctatttggaatcccggatggtagcgtctacacggtttataaccagaaaatccaatacagccattggaatcc

SEQ ID NO: 343282 - DNA, 365 bp, Homo sapiens
  chr17:80965857-80966222
  hypo
acagcgcccagccgcgatgctgccggcaccttcctctgcaggagacctcgcgctctcaagaggaggcgcagggaagaggcacgctctcaagaggaggaggaggcgcagggaagaggtgcgctatgcgcttaatcctgcaccgagacgtcagattctcagggcaggagcttttgtgggcaccgcacctagcacagggcctggacccagtgagcagatgtgaatgagaggcctgtgcgctggcctgagaggctggctaactttctccaggttcctagaagaagccactttcaaggctttcgagaagtgttgtgagctaattcatttgaaagcctctgtgccaacaggcggagcagaaagcgcaggcc

SEQ ID NO: 343283 - DNA, 169 bp, Homo sapiens
  chr17:80968060-80968229
  hypo
cggctcttctccagcactgctgctgctgagccacgccccagggtccagagtcaccagcaccgggggcttcggccgccactcctgagcagcgatgttgaaggcgaaggtgaaggaggagcacccaggcctgacagcccgaactacagcccagcagagcccggaggcagcc

SEQ ID NO: 343284 - DNA, 327 bp, Homo sapiens
  chr17:80995234-80995561
  hypo
cgttctccaacccggagcagtgcccctcttcataccaggtagcagtttaatttctagcattaatccctaaagtttagccagctcaacccagttagccagaggatcccagatgtcaaaaagccaggggcataaacaggcgcagggaggaaatgcacccggggaggcgagcgcctgttctgccctgggatggatggtgggccgtgtctccagggccgctgcagccaagcctccatcatcgctgcagggccaggtgagtgccctgaagctcctcacgagaaacacaggcggaggcacctgtgaggacgaagggccggaaggggccttcca

SEQ ID NO: 343285 - DNA, 293 bp, Homo sapiens
  chr17:81008592-81008885
  hypo
cggggaaggtgttcggggcttaagggcaggtttttagggcacgtgtttggggtaagtgtgctgggcacacaggcaggtgtgtgggcacggaggaggtgtgcaggtaggtgtgtgggatgcgcaggcaggtgtgcacggcaggtgcacgggcaggtatggggcacgggcatgtatgcaggacgcagagcaggtgtgtgaagcaggtgtgcaggcacaagacgtgtgtgtggggcatgggcaagtgtgccgggaatgtgtgacggcagacgtgtggggtgcgaggttgtgtgggg

SEQ ID NO: 343286 - DNA, 441 bp, Homo sapiens; identical to SEQ ID NO: 335720
  chr17:81036717-81037158
  hypo

SEQ ID NO: 343287 - DNA, 806 bp, Homo sapiens; identical to SEQ ID NO: 335721
  chr17:81038567-81039373
  hypo

SEQ ID NO: 343288 - DNA, 798 bp, Homo sapiens
  chr17:81048458-81049256
  hypo
cgggtggactggggtcaccacgcttctgtcgttgaccagctctctctcagccgaggccacctccactcacatgaggcgccctgggctgggacctctggccctgtggtacggggcaggtgctggcgtgcagtctcacctgtggaggataaaagtgctgcctgaaatttgagatcccccagtgctccctccttgttgcttccggacgtgagtggtggtctgtgctgctggcctctgtccagcacgtgcctgcatcaggcccagcatggtctgcagacccccagccggcgagtgggatgggggtccacataggtgaactaagtgtcaagggtgggccacaccccggggcccccataggagagcgcaccgggcggcttccagcttgggggtcaggaggcccccgtggtgggggctgcagtgtgagtctgtacacatcagcaggaaggggatttggccagaagctcccattctggagggttgctgggatggcagaggtgcccccccagtgccaggctggaccggcctcaaggtgctcagcagtgccaggctggaccggcctcgaggcgcccccagtgccaggctggaccgggcctcgaggcgctcagcaggctgtgcagtttctttttcctgataccttaatggaagcaaatgcaggaggaggtgggtgggccggtgagtcaggcactgagcccggctgggaggcgccctcacccctgcctggcggaaagtgctggccttgtctctgggtccctcctacctccaccctgcggggtccacaaagacctgcgcttgcccagtgca

SEQ ID NO: 343289 - DNA, 390 bp, Homo sapiens
  chr17:81049931-81050321
  hypo
cgcagggttcaggggcttcagagggggttctgtgagcagggcttggcttgaaagccatttggggcatgcacctcatcccgcggccaggtggcatccggggaaggggccgggccgatggccctgactggaactcactgccctgctgggtgaggccccacgccggtggcaggtggacgcgtcgctgcctgcttagggatccccttcctggaatcttggcctcgctggcccttccagccacatggggggtcccgcgggatgggatcctccttttgggtgccgctgccgtcgcgacccagggaagtgggcagcagagctgtggggagtgtctgcccttcgaggaagctgggaaatgagggtggtcccggcgccgtgggccgtggaggtgggttg

SEQ ID NO: 343290 - DNA, 360 bp, Homo sapiens
  chr17:81050575-81050935
  hypo
cgaaggccctgggacatggccggactgagggtcttgctctcggacatgtgcccatcatggccgaggtgcaggtgcctttggtccaggtggggccgaggggtcccctgggtgagaccccgtcgtggtcgaggttgtgttttctgtctcccgtgctgccggcccctccagcacgtgccgccaactcacatttgaagtggcgttggtcacaaaggtgccttgacgtggacaccctccctgacttggctttgctgagtgtgagatcctttgacggtggtgggcggcgttccagagcctgtcccgtccaggctgcttcctgactctgcctttcttctccagcgccgtgccgtccctgcagtgaca

SEQ ID NO: 343291 - DNA, 467 bp, Homo sapiens; identical to SEQ ID NO: 271766
  chr17:81062114-81062581
  hypo

SEQ ID NO: 343292 - DNA, 134 bp, Homo sapiens
  chr17:81080737-81080871
  hypo
cgcagagccgtgggctcggaagaagcacagcccaccatgccgtggatctccacgcgtggctcctctccacgcctgtgggttgctccaaagctgcagcgtcacgcgcagatgccaggtagccgtgatggaggctc

SEQ ID NO: 343293 - DNA, 216 bp, Homo sapiens
  chr18:196827-197043
  hypo
cgtacttactggaacatagttcgaaatataaacatcagtcttctctagttcatgccacggctgtctcttgcctggagccgcacagtagtcttaactgatatctggcttctgcctttgcccctttgcagtttctctacacagcccgcaatgtcctttttaaaatgacgataggattatgttggccccttgttcagtactccctagtgattttctacc

SEQ ID NO: 343294 - DNA, 992 bp, Homo sapiens; identical to SEQ ID NO: 335722
  chr18:499804-500796
  hypo

SEQ ID NO: 343295 - DNA, 74 bp, Homo sapiens
  chr18:635725-635799
  hypo
cgcgccgttcagagaaaagggaggatggaattgttacaaccgtttctgtcgcccaggctggagtgcagtggcgc

SEQ ID NO: 343296 - DNA, 1556 bp, Homo sapiens; identical to SEQ ID NO: 335723
  chr18:811503-813059
  hypo

SEQ ID NO: 343297 - DNA, 1859 bp, Homo sapiens; identical to SEQ ID NO: 335727
  chr18:2846545-2848404
  hypo

SEQ ID NO: 343298 - DNA, 768 bp, Homo sapiens; identical to SEQ ID NO: 225574
  chr18:2906028-2906796
  hypo

SEQ ID NO: 343299 - DNA, 120 bp, Homo sapiens
  chr18:3051295-3051415
  hypo
cgtgaagcagggaagatgctcactgcgtgaagttgggagcagcatcggtcctgcccagtgctgtgcatgggtgacttgatcgcatgagactttgggccgagaggggctttattcatactc

SEQ ID NO: 343300 - DNA, 94 bp, Homo sapiens
  chr18:3119830-3119924
  hypo
cgaggtgcggtgtggaggcaggtgtctgtggtttacctgggacggcgatggtccactcttcacatttgaagcattcgcttactgcggagggcgc

SEQ ID NO: 343301 - DNA, 556 bp, Homo sapiens
  chr18:3214837-3215393
  hypo
cgaaccgaaacaaagcgagaagtaactgggagggttactcagagcacacgcctcttcctgaggttggaaggttggaggagggcgtccgacatacccatgggaggagccataatcgtaggctgaggctgccttccgactgacttcagagctcagggcgtgctgcgaggcctgctgctgggaggaggaggcggacgcccgacggaaggcctcggactcccggcggtgcgcggcggaggagcggctgctgtaggccgtggagccctgggtgtagacggcggagcgtttcttctcccgctggtagtgactcacggtgctgcgcacgtccttgttgcggtagctgagatcatagtgctggtggcacctctgataaaaaggcaaagacatcctgtgccccttgaaggaaccgggccacctgaaggaaaacaacactttttgagtgacttattaaggaacaaattccatagaccaagtcatctaaatcaatgtgtaaaaatcaatactcttggctgggtgcggtggttcatgcttgaaatcccaacgaggatctctcgaggcc

SEQ ID NO: 343302 - DNA, 186 bp, Homo sapiens
  chr18:3330588-3330774
  hypo
cggcagctgtgccaatagaaaaggaaaaggactacctgggggcggccatgtccaacatggaggctccatcttctctttttttgttatcacgtgtacagtaataaagaaatgggcaacatggtgcacctcaggcagagacgcgcctggataataaaaaaaggttaggatgggggataccagagattc

SEQ ID NO: 343303 - DNA, 309 bp, Homo sapiens
  chr18:3360395-3360704
  hypo
cgacccctgctgtggaagagccctgcgtccttcagcagcaaagtagggccacgcccctcgggcccggcctctggcctccgtcacgctcccttctcactgccgctccaggcctcccggacccaggtcaccttcgcttggattataagaaccaatgccccttttaggcttccggggcaggctgacttccattgctctttatccccggaaatgaccgcacatcagccttcccagctctaagctgggaaagaaaatccttaagtgatttccccagtagaggctcttagccgggactgccgatctacagctggc

SEQ ID NO: 343304 - DNA, 2276 bp, Homo sapiens; identical to SEQ ID NO: 335731
  chr18:3449180-3451456
  hypo

SEQ ID NO: 343305 - DNA, 69 bp, Homo sapiens
  chr18:3580264-3580333
  hypo
cgctccaggcaccagcaatggcgcaactgtctcttccaccaaaaggcacaagtccctttttcagtgcgc

SEQ ID NO: 343306 - DNA, 185 bp, Homo sapiens
  chr18:3580794-3580979
  hypo
cgaagcgtcttccacctgccgtgcggaccgtggaaaataaaaggctctgcccccggggtgagtgtggccggttgtaccctgcagtagcgtctgccctgagctgccagtgctgggtatcccccagccccaggaaatgtggggtcggccgggaccctcacagctctgaatttgcttctgttatttac

SEQ ID NO: 343307 - DNA, 241 bp, Homo sapiens
  chr18:3581880-3582121
  hypo
cgatagacaggcatcgatttttcttaaagtggtccttcttcctgtcctccgtggtgacggtggctatggtagtcgtggtggtgacggtggcagtgttattgcccatgtgttgactggcagggccatggatctgggcgtttgcagcttcgatggcggctgtcagagccttcatactgtccaggctctcggtggagttgctgagtccagactggctgataatatctcctcgctggccctgtcc

SEQ ID NO: 343308 - DNA, 995 bp, Homo sapiens; identical to SEQ ID NO: 335733
  chr18:3879130-3880125
  hypo

SEQ ID NO: 343309 - DNA, 166 bp, Homo sapiens
  chr18:3986877-3987043
  hypo
cggatactggacccttcaatggtgacaccctgcctcccacaaaaatgtcctatgatttagcaactgaaaagttaatgctcgacacaggacgaggctctgactacgcagagccattttgattggacactggtttaataacttgactatcaccctgcaaatagcgctc

SEQ ID NO: 343310 - DNA, 975 bp, Homo sapiens; identical to SEQ ID NO: 335734
  chr18:4454471-4455446
  hypo

SEQ ID NO: 343311 - DNA, 230 bp, Homo sapiens
  chr18:5133043-5133273
  hypo
cgcctcgggttttggtaagctggtttggtgtccatgggggcctggctcttgagctgctccaggctgagagcagcgagctgcgggttcccgggaggcagcgaggcgggttgatggggccgccctcccgcctaagcctggccagctccaccaccaccgaccacgatggctgcgccccgggccgcgaggaagatggaacacagcttcttctccaggaccgagagcccagaatg

SEQ ID NO: 343312 - DNA, 1838 bp, Homo sapiens; identical to SEQ ID NO: 335738
  chr18:5628946-5630784
  hypo

SEQ ID NO: 343313 - DNA, 1581 bp, Homo sapiens; identical to SEQ ID NO: 335740
  chr18:5894664-5896245
  hypo

SEQ ID NO: 343314 - DNA, 915 bp, Homo sapiens; identical to SEQ ID NO: 335742
  chr18:7116852-7117767
  hypo

SEQ ID NO: 343315 - DNA, 2334 bp, Homo sapiens; identical to SEQ ID NO: 335743
  chr18:7566557-7568891
  hypo

SEQ ID NO: 343316 - DNA, 217 bp, Homo sapiens
  chr18:8612051-8612268
  hypo
cgtttgttgagcacctactgtgtgttgggtgttatgctacccagtggggattcagtggtaaacaggacatcgactctgtccagaagtggatcggagcttctgggagctgcgtgaccgcttgtcagggcagtgacagatgtgtatgggtatttgggagcacagtgaaagcgcctccagtcgaggctagtgatgaggcctggtcagagaaggcttcctc

SEQ ID NO: 343317 - DNA, 489 bp, Homo sapiens
  chr18:8625474-8625963
  hypo
cggctgtactgctgattccacgggatgtgagcccccactaatgcctactagaaatgaatccaggcccctttctcaaatcacaattggaatgagagactcaaccagctgtgttataactgcactcagcactaagagctttctgttagctattaacctgttaacagcccgcaggtgctagcgacctgtctgtggaagaagggataagatctggtctggtggtctggcggtggcttaaaagtagccccattgaggtgctctgagaatgccgttttgttttgaatgctacagctgcggtgtactcagcttactaactcctcttggcaggtcaccctcagctctgattgtttgtccaccatgtgtgtgtttgctttcatctgcgttaattgctgcttcatctgtggcatcatcggtcacctaatgcttgaatgttagtgccatgtcttcattcttcatccgtgtccctgtctgggccgcagctgcagccaagcc

SEQ ID NO: 343318 - DNA, 801 bp, Homo sapiens
  chr18:8659285-8660086
  hypo
gaggcagcgccccgcgcagaacgcccgtgcctgggaagaggcctgcactccagcagacttccatgttcgctggaagcctcccttcctgactgtgaattgggacaatgcgcagacttccatgttcgttggaagcctcccttcctgactgtgaattgggacgatgcgcgggattttctgaaacctcagttcctccgtctgtaagatgagattgtggggaggagggcggacctgtaagtgcccagccacgagggctgagagattcgaactcctttgctgccgcgaagaagggcctgttccccggaggccaggtgggctccaggccaagctcgcagaggggccaggtgtgctctggcggtgagagggccgcgcgtcccggcacacaccccgcccatttcagcaccctctccaccctcctcagatgaccagagaaatccaagcaggcccttggctttcaagattcagcttcagccatgcataagtccttcactgaagtggcagaggaaggacgagcggctttgttggattggggctggagccccgtgcccggctgtgggtgctcgtgggagagcctcgcccggccctgcgcttcccgagagttcgccgggagcacaagccctggagagcccatgggcagagctcaccagccccacctcacagagagggaaactccgaagtggccgtggatttgcccagggtcacccagtgacagacagctcagactcctttcccagctccggccaccgaagcttgcaggcgcgtccgttccagctcagataagcacctccgccacgctttcctcac

SEQ ID NO: 343319 - DNA, 533 bp, Homo sapiens
  chr18:8799980-8800513
  hypo
cgtggcggggtggggtccagacactcagacccaggtctgccaagtgggccagtgttcacagtagtgagtaaggagctcactaacgcatgcacaaccctctgtctgtccaaggacggaagatggacgagctctactgtaacgacagctggttctctgggagggaacattcccggttagaggatttgcctctctgtgactggcatgagtattagccaggcagctgggatgcaagagccagggtacgtgtctcacagagctgcacagagccgggccgttcccgaaacgccgagcacctcgcaaggcgattagtagcatgggaaacctagccaagccgttttcccaaggacaagttctcagtcacagtattcctcaggccttggtctttgctttgtgacatatggaacgttctcacaattgaactcaagtagatggcaacatttatcacgtccacagaggtttaaaaaaaactgcatataccgatcaaccttgggatggctcataacaaatcatcaggttggcaaacatttggctcc

SEQ ID NO: 343320 - DNA, 118 bp, Homo sapiens
  chr18:8800570-8800688
  hypo
cgctttagagccacagtgaatgctttcagtttccccagccatcctgaagagcagaggctgcgcacacgcaagagggaatcttacagttttccttgagctccaagactcacgccactgc

SEQ ID NO: 343321 - DNA, 113 bp, Homo sapiens
  chr18:9196896-9197009
  hypo
cgcttacctgagaagagggtgcttatgtgcctttgggatagctatttcagattgaactcttctcgcatattgttaaaagtttctttgctagtcatttttaaattacattactc

SEQ ID NO: 343322 - DNA, 148 bp, Homo sapiens
  chr18:9333469-9333617
  hypo
aggtgccccgcggacggtctggtctagcgggctctaacttaatcaccctggaatcttctttaaaaagcaaattccggccgggcactatggttcacacctgtcatcccaacgatttaggagaccgcggtgggaggatcgcttgagcccc

SEQ ID NO: 343323 - DNA, 388 bp, Homo sapiens; identical to SEQ ID NO: 271885
  chr18:9417389-9417777
  hypo

SEQ ID NO: 343324 - DNA, 467 bp, Homo sapiens
  chr18:9478452-9478919
  hypo
cgaacaccacatgcctcgcgcccaaaaggacagcagaccgcgcttcagaacggaaccgccttctccatgtaaacttttgacgtaaactgtgtgcttcagggtggcctcttcttctccgagatcctctcctgcgtcccgagtttgggaatggcccggccgtgctcaggcccaggcggtggaggcctcggtgtagtagtgccgtgcttgtcgacgttcccaggagtccgggttcagaagccccctctccggtggattggcagcttcgcggtagctgggctagtcttcctctggaaactcagtaaaaagagtcggcgctgtccgcctgagcgcgggtttcctaccgagctagaggccagcctgcctcaggcgcagaagggtttgccgccggccttggtcagggcgagcagctccctggtggcgcccagagctggggtgtcctggggcgcggcaggcggaaaggcacgcgc

SEQ ID NO: 343325 - DNA, 81 bp, Homo sapiens
  chr18:9514129-9514210
  hypo
cgctgacgccccacccaaaaaaaggtagatactggaattttccccttaaggcatcttacttttcttgggtaggtcgtgttc

SEQ ID NO: 343326 - DNA, 225 bp, Homo sapiens
  chr18:9539475-9539700
  hypo
cgtgacttagtcatcatgttattaacattaaactttatagtgcagagatgagtcggggaagaaagaacgtagcattctttaagatgcaggtttcatttctcagcctcaaggctcagctacagaataagctgtggcccgactgcctgcctaccattttacagacgggagactgaggctcagagcagtgacatggcctgcatgggtcactattgcccccactgtcgc

SEQ ID NO: 343327 - DNA, 271 bp, Homo sapiens
  chr18:9547721-9547992
  hypo
cgtggcgaatgcccactgaacctcggctctcatggaagcaggaaagacaccgagattcaagccttctagtaggttgaggacgctgtgctcatggcatcttcggagattttggtactggcagggtggatgcttgcaaaatacttgacatcgctgtcacggtccatctgaagagccatgatggtctgctccacagcctcctggtggcagctggcagaggccaagaaatagtctggaaatgacatgtgcataggacagatgaaaccagtccaac

SEQ ID NO: 343328 - DNA, 196 bp, Homo sapiens
  chr18:9569216-9569412
  hypo
cggagtcattgaagttggataaacttaataaacttaagttggtaaataataacatttaaacagaaagctggaagctgtaaagacgttaaacatttatcaaaagttgactatgcttgctgtgaacattctatagtcttttcctcccccacgcccgagacagagtcttgctgtcgcccaggctgcagtgcagtagtgc

SEQ ID NO: 343329 - DNA, 131 bp, Homo sapiens
  chr18:9688396-9688527
  hypo
cgcatgcgccatcgctcatgcgggatgtgggtgtggtcatcacagaccttcccacctctatgaaatggggaaatggaagcgacactgagctctcctggattgacttggatatatcaattctttctctcctc

SEQ ID NO: 343330 - DNA, 649 bp, Homo sapiens; identical to SEQ ID NO: 335745
  chr18:9707862-9708511
  hypo

SEQ ID NO: 343331 - DNA, 824 bp, Homo sapiens; identical to SEQ ID NO: 335746
  chr18:9708784-9709608
  hypo

SEQ ID NO: 343332 - DNA, 224 bp, Homo sapiens
  chr18:9912782-9913006
  hypo
cgcacatgaaaacttggatttggtgcctacttctagactgctgtttcgtctcgtttattttctagacaaactgtgctgctccatggcagtagcatcaatatgtcttttgtttcgtggcgctacctagggatttaaattcaaaccgtatcacaaaatacaataaaggtttatttacagcacattggtttcatttgacgttcctgtaccggactaccctggcaatc

SEQ ID NO: 343333 - DNA, 477 bp, Homo sapiens
  chr18:10165791-10166268
  hypo
cgagattgtctccacggacggccgggggattcctgtccctcacagaggccttttttcttctctgaatcggtgtctctaagggccgggtttctgtgcactgggtggtacctgccagatgagtttaattctgccccgcacataccggcgaggacccatcccgctcaagctctctgctggggacttcaggcccaaggtgaatgcgcgcagggcctgtggcaggggatgagggctagtgcaggccgaggggagcagctacagaggtagggtttccatacccagagacgggcatggacactagaaagggaggatcccctagctgggagggaagccaggacagtgaagacgtagtgggtctaacggggggtaccgcatgagccgaggtgcagaggctggacccagcggggacgccgaggggactgctcctgcagcctggggaaaagaagggggcgtcagaaggtctccgagccagcggggatc

SEQ ID NO: 343334 - DNA, 257 bp, Homo sapiens
  chr18:10485485-10485742
  hypo
cggatcatctatcggtcagacgagcaccaccctcccatcctgcccccaaaggcagacctgaccatcggcctgcacggggagtgggtgagccagcgctgtgaggtgcgccccgaagtcctcttcctcacccgccacttcatcttccatgacaacaacaacacctgggagggccactactaccactactcagacccggtgtgcaagcaccccaccttctccatctacgcccggggccgctacagccgcggcgtcctctc

SEQ ID NO: 343335 - DNA, 376 bp, Homo sapiens; identical to SEQ ID NO: 271920
  chr18:10589091-10589467
  hypo

SEQ ID NO: 343336 - DNA, 498 bp, Homo sapiens
  chr18:10725385-10725883
  hypo
cggcccacattggcggtcaacctgaccagagcccgccagtactggttggagggcatgctgtggcatgaaataggtcagggtgtgggtatccgggtggatgggtaggcatgaaaggggcctgggagctgggagtcgtgggaaggaggggccccactaactcccccttttgtttctcccctgtccctcctgaggtcggggctttcccttcctgagcagccgcctccgccctctggctcacagaggtaggccagaacatgcctgcccacgctctgggctcgccttcatctcttggtcctttcgggtatatttttctctctccacttcctctccgacttctctccacagtggcggcagggctggtgaggccctgacaggccagagggagaacgctcagggtcccaccaggccaaccaccacgcgggccctccagggtggatggaaggccagatcctgggaatggacttggcttgaggacacacggcgcctggtttaggaggc

SEQ ID NO: 343337 - DNA, 192 bp, Homo sapiens
  chr18:11992166-11992358
  hypo
cgctccacgtagctcagtcaagttgacacataaaattaaccatcacaacacattcacttgtgttgcagtaaatctggaagcataaacatggggcgtgtcgtcaggtgcacacctccagtggccacatcttcctgacctgacagagggaaagacacatctcctattgaaactgcactctggcaaggctccggc

SEQ ID NO: 343338 - DNA, 160 bp, Homo sapiens
  chr18:11992771-11992931
  hypo
cgtggtaaaggggttcagcgggaccttacctggcaaccccatgtgctccctcgccctgtggacgtgatcctggctaaagggcagggctgtttgagtctcgcttactgattttagaaatacagcacttttcctcactttttctcttagcataggacaattc

SEQ ID NO: 343339 - DNA, 747 bp, Homo sapiens; identical to SEQ ID NO: 335751
  chr18:12253867-12254614
  hypo

SEQ ID NO: 343340 - DNA, 187 bp, Homo sapiens
  chr18:12277197-12277384
  hypo
cgggtgctggatgacaaggaagagcggccatccctccggtcacaagccaagggcaggttcacgtgtggatagggatgcaggctgtcgccggctcttgagccaaacactgtgtttcgtttggctcaatgacgaatgttgaagatgcttttatgttctgagccacatgcacttggaggccgctggtcac

SEQ ID NO: 343341 - DNA, 826 bp, Homo sapiens; identical to SEQ ID NO: 335752
  chr18:12307275-12308101
  hypo

SEQ ID NO: 343342 - DNA, 240 bp, Homo sapiens
  chr18:12375127-12375367
  hypo
cgaaaaaggacctaccacacggcagcgtggcgtgaccatggcgaagaaattgatttaagactggcaagggagcctcaaggagtaaaaatcatgaatgcaggcactattattccccctccccacccccgctctttttttttttaggagacagagtccgtcacccacgctggagtacagcaatgcaatcaaaactcactggagcctcaacctcccgcgccaagcaacccgccttggcccccc

SEQ ID NO: 343343 - DNA, 115 bp, Homo sapiens
  chr18:12375778-12375893
  hypo
cgtgatccacccgcctgctgggattacagccgtgagctaccgcgcctggcctctccagaaactttttaaaaatcaaccacggtgctgtagtcccagatactccggaggctgaggc

SEQ ID NO: 343344 - DNA, 652 bp, Homo sapiens; identical to SEQ ID NO: 335753
  chr18:12407715-12408367
  hypo

SEQ ID NO: 343345 - DNA, 423 bp, Homo sapiens
  chr18:12433995-12434418
  hypo
cgggtccccggccggccgacgtcttcctcctgccttttctctcggggctgtttggacatggcaccttcctccagcatctaggctgagttctgggtttccccgccccgttctgctctgcgtactcgtccctggcgttgccactctgtgaccttgcctgcgtgtcgcgtgcccgctgcggaagccgggccgcggggcttgggagctgaggggaggccgagtccggagatgcgcggcgcgagcccggccggcccgcacatggtcactccgccaggcttggaggaccctggaggggccctcagagtggccactgcggacgccatcctccagcccgggtgcagcccccggaggctgcgggtcccgctgccatctccactgccacctcgtgcgaggcccaggccgggatcccccgccagagctgctccc

SEQ ID NO: 343346 - DNA, 165 bp, Homo sapiens
  chr18:13033480-13033645
  hypo
cgcgtctacctataatgacattgcagcatctagcaaagttacgcatgtactatcctgtaaccgagcagttctgcttctgggaatttattcttcagatacacttgcataaatgatacatggtgtatgtgcaggctcattacttgcagcattgtctgtgataacaac

SEQ ID NO: 343347 - DNA, 92 bp, Homo sapiens
  chr18:13036746-13036838
  hypo
cggcagcagccttgagggcagacattaggggactcccagtctttgtccggaccggggtttcctgggatggggggcaagcggtcctggggcac

SEQ ID NO: 343348 - DNA, 433 bp, Homo sapiens
  chr18:13131747-13132180
  hypo
cgacggtgcctaattgatacatacaaatcaatagtcttcctatacataaggaaataatgaacgaccagaaaacagcggaagacaaaacagcagaaataagtttagaaatgtgtgaagtgtatacaaaggaaactgtcaggttcctctggagcacatcggagacttgagtaggagtaacttaccggactgcactgggggccttcttccgtagcatgaacagcacccatgagtggggatggggctggggccgcaccagtccaggcagcatttcccccagtggagggggagctctgcaggtgcccagcctcccacgctgtttcagtagcttgttaggaactctcccagacacggatagtggcccagctgcccatccctgccgtcactgggtctgagcgtggcctgtcctttgtttaaatcctacatttagctggcc

SEQ ID NO: 343349 - DNA, 133 bp, Homo sapiens
  chr18:13135171-13135304
  hypo
cgaggaggcgccaagagtgagcgagggctgccagcaccctgtcatctctcaggttttagctcagggctgctgtccagcacccgctcttgcttggatactttcggtggtgtggctgctggttactgtattgcac

SEQ ID NO: 343350 - DNA, 147 bp, Homo sapiens
  chr18:13195829-13195976
  hypo
cccggccaagaagtacatagacatttttaaaaagagataagaggaaaaagataagcagacatgggagacacacggctcctacgtgtacagagaatcaggctgtttgtttacttcacctccgttggtctttggggctccacgctgccc

SEQ ID NO: 343351 - DNA, 928 bp, Homo sapiens; identical to SEQ ID NO: 335756
  chr18:13217150-13218078
  hypo

SEQ ID NO: 343352 - DNA, 180 bp, Homo sapiens
  chr18:13233060-13233240
  hypo
cgatggcagaggatctgcttgtcgccacacacagtgcgttagggatggagcttgccaccagtggcgccacctctttgcaggcgcctgtcctgaaggacgtgagcgggcgaagtgctcttgggtctgcttggacacgggtcactggccgctaagaaggcaaatgccatgccgttcagatac

SEQ ID NO: 343353 - DNA, 148 bp, Homo sapiens
  chr18:13425955-13426103
  hypo
cgagggcaggacggtggaccacagtgaccctgtgggaagaggtctggggacggatggcccatggcggcagggtgcgcagagctcctgggtgctgggccatcaggccacactgcacaggtgaaaccggctctcaacaggacatgccctc

SEQ ID NO: 343354 - DNA, 340 bp, Homo sapiens
  chr18:13442504-13442844
  hypo
cgcgtggggcacggctgagaaagtgggttgggcctagagagacagaagccaatgtataaggctgcacctcctgccctggtcctaggacgggccacctgctggccggccggctgcggggagcctgaggctggcatcccacttggtggacctgccacctcattgttcctgcccagccaagcacgtcctgtggtgctgtgtttccaaagccccttggccacatcttagtgggggacagcagcgttccttcgaccgtccagaagcgataattgagtggtctgtgcagcctggcaagtgccacgccctccgaaagccttggtgagcacagacccccgaagccagc

SEQ ID NO: 343355 - DNA, 199 bp, Homo sapiens
  chr18:13491241-13491440
  hypo
cgatgaaagcatcccaagacctcccttttccatctgtggctgatcacctctggaacccacagctagccggctgctcctccactatcagatggcggctgtcagtcatgggcttgtcaccgagtgcatccgtcatgctcgggccatgggccggcacctgtgtgtgtgtgtccagcttaacgacagagatttttggaaagac

SEQ ID NO: 343356 - DNA, 56 bp, Homo sapiens
  chr18:13499663-13499719
  hypo
cgccgcacacgtcctgccatggacaccggagaatccatctccacacatgtcccgcc

SEQ ID NO: 343357 - DNA, 337 bp, Homo sapiens; identical to SEQ ID NO: 335757
  chr18:13823935-13824272
  hypo

SEQ ID NO: 343358 - DNA, 418 bp, Homo sapiens
  chr18:13826252-13826670
  hypo
cgccggcatctgggctttctgcacgggctgcggcattgtcttcatcctgtactcagaatccacctacgtcatcctgtgcctcatctccatgttcttcgctatgctgttcctcctggtgtctctgtacatacacatgttcctcctggcgcggactcacgtcaagcggatcgcggctctgcccggggccagctctgcgcggcagaggaccagcatgcagggcgcggtcaccgtcaccatgctgctgggcgtgtttaccgtgtgctgggccccgttcttccttcatctcactttaatgctttcttgccctcagaacctctactgctctcgcttcatgtctcacttcaatatgtacctcatactcatcatgtgtaattccgtgatggaccctctcatatatgccttccgcagccaagagatg

SEQ ID NO: 343359 - DNA, 120 bp, Homo sapiens; identical to SEQ ID NO: 335761
  chr18:15197984-15198104
  hypo

SEQ ID NO: 343360 - DNA, 1491 bp, Homo sapiens; identical to SEQ ID NO: 335767
  chr18:20512643-20514134
  hypo

SEQ ID NO: 343361 - DNA, 1025 bp, Homo sapiens; identical to SEQ ID NO: 335768
  chr18:20715851-20716876
  hypo

SEQ ID NO: 343362 - DNA, 632 bp, Homo sapiens
  chr18:20911034-20911666
  hypo
cgttcagcgagaggcagagccccggaacagcggtgttcactcagttaaacctcatggtctgagagagtggcaggtgtgccgttttccataattagtcacagcccctgaaggaaaagcgcgcccgtgtggggcaggaccaaaggaagaaacgcttctgcaatgctaccgggaagtctgagctcaccttctttaccttggcaccgagctgaagatctgttagaaaccctctccaaccaggactttcaggagaaacggtggccaccgcccagaataacaaggccccagcagcaaggtgtccttttcccagcaagtgaaacctgccccccgccaccacctgtagtacaggagacaccacaaagcaagaggccccagggctctgctcgggaagctgccgggcctgtttttcctcccagtggccaacaaacaggagggcaggttcagcacgttgggctctgctttctgagcgccgcaccattacagcatccacatccgatttttaaaactgaagtataacataaataccgtgtagtgtaggaggcacaggaatctcaagtacatggcttgctgagcatttatacccattagcacccacacagctgccacctggacagagacaccggcccttcccagca

SEQ ID NO: 343363 - DNA, 150 bp, Homo sapiens
  chr18:22804909-22805059
  hypo
cggcagtttccagtatcaagactcttactatgcgtgactttgtgttcagtaagagttaaaagggagggaaaccgctctccgcaaatagggcacatgtagtgtttgacagggcctaggtgggtctgcatatgttcccggaggccattttcg

SEQ ID NO: 343364 - DNA, 2243 bp, Homo sapiens; identical to SEQ ID NO: 335771
  chr18:22929097-22931340
  hypo

SEQ ID NO: 343365 - DNA, 1111 bp, Homo sapiens; identical to SEQ ID NO: 335772
  chr18:23806188-23807299
  hypo

SEQ ID NO: 343366 - DNA, 503 bp, Homo sapiens; identical to SEQ ID NO: 335773
  chr18:24127691-24128194
  hypo

SEQ ID NO: 343367 - DNA, 2849 bp, Homo sapiens; identical to SEQ ID NO: 335778
  chr18:25755624-25758473
  hypo

SEQ ID NO: 343368 - DNA, 142 bp, Homo sapiens; identical to SEQ ID NO: 335782
  chr18:29598295-29598437
  hypo

SEQ ID NO: 343369 - DNA, 1929 bp, Homo sapiens; identical to SEQ ID NO: 335784
  chr18:30349741-30351670
  hypo

SEQ ID NO: 343370 - DNA, 1378 bp, Homo sapiens; identical to SEQ ID NO: 335787
  chr18:31802067-31803445
  hypo

SEQ ID NO: 343371 - DNA, 1823 bp, Homo sapiens; identical to SEQ ID NO: 335790
  chr18:32556625-32558448
  hypo

SEQ ID NO: 343372 - DNA, 936 bp, Homo sapiens; identical to SEQ ID NO: 335794
  chr18:35145982-35146918
  hypo

SEQ ID NO: 343373 - DNA, 414 bp, Homo sapiens
  chr18:35249615-35250029
  hypo
cggcttaacctcagcaaagcgtcagcaggcctttgcaggggtagggaatgcaggaccccgcagtacctacagacggagaggcaggcgctactcctggcacgtttcccgtgtgcgcaggtggcccaggggaaggggtgactgctcgccgttgctccgagcttgtctctgggccccggagggcagtgggaatgccaccctgagcagacgtgagactcacagggcatccccaggcgcactctaggcttcagtcgtgcacacgtacacatttactgagcctgtaccgtgtgccaagtgctggggattccgcaagcaagaaaacattcggagtctctgacttcacagagctaaaattcacacgggaggaggcggtcggcacataacagacaactagagaatgacgcgagttgagatggc

SEQ ID NO: 343374 - DNA, 84 bp, Homo sapiens
  chr18:37198447-37198531
  hypo
cgcgcagcgctcatgggccagcacaagttccaggtgggtgtgggctcggcgggaccgcaatcagagcgtccggtctgagctgcc

SEQ ID NO: 343375 - DNA, 2264 bp, Homo sapiens; identical to SEQ ID NO: 335796
  chr18:42258983-42261247
  hypo

SEQ ID NO: 343376 - DNA, 1433 bp, Homo sapiens; identical to SEQ ID NO: 335797
  chr18:43913838-43915271
  hypo

SEQ ID NO: 343377 - DNA, 105 bp, Homo sapiens
  chr18:44260345-44260450
  hypo
cgtacttgacgcggatggacacgtcggtgttgcgcgtgttgtagaaggcaggcagcagcaccgacgcgttctcgtacacctgcagcacgcgatagaacggccgcc

SEQ ID NO: 343378 - DNA, 1197 bp, Homo sapiens; identical to SEQ ID NO: 335798
  chr18:44335955-44337152
  hypo

SEQ ID NO: 343379 - DNA, 83 bp, Homo sapiens
  chr18:44701015-44701098
  hypo
ggggacagggtgagactccgtctcaaaaaaaaaaaaaaatgggtcttcccacatccactgctttcccttccaatctttcctcc

SEQ ID NO: 343380 - DNA, 1311 bp, Homo sapiens; identical to SEQ ID NO: 335800
  chr18:44773070-44774381
  hypo

SEQ ID NO: 343381 - DNA, 58 bp, Homo sapiens
  chr18:45353804-45353862
  hypo
cggttagaaaaaaagcacatccctctccctctcccgtctccccccgtctcccactttc

SEQ ID NO: 343382 - DNA, 796 bp, Homo sapiens; identical to SEQ ID NO: 335809
  chr18:45687770-45688566
  hypo

SEQ ID NO: 343383 - DNA, 2659 bp, Homo sapiens; identical to SEQ ID NO: 335810
  chr18:45934527-45937186
  hypo

SEQ ID NO: 343384 - DNA, 382 bp, Homo sapiens
  chr18:46142413-46142795
  hypo
cgggcatgtttgggagagccccgcagagccggccagaggctgctgctgcaggcagagcctggcactcaatcctcctggaaacggctccgtgtagagttcctgcaaaacccggttctccgactgcacctgttaggtgtgccagggagcccttgataagatctgacgtcttccaggaataatgggcgtggccttgtgtattgacttctcctgcaggtggctccttttcagccctctctggacatcggcggttttattcccatccagcggaggccagcttcccggggccaggcacggagcctgcttggggccagctctccggaacctgtgcccagctggggaataagcacatgctcagcacttgaagaattcactgctcactggc

SEQ ID NO: 343385 - DNA, 323 bp, Homo sapiens
  chr18:46287816-46288139
  hypo
cgagatcctgaacagcatgcggaacaacagcagcgacgtggacaccaagctcaccaccttcatggaggaggcccagaactccaccaactccgaggagatgctgggcgagatcgtgcgcacaatctaccagaaggctgtgtccgaccgcagcttcgccttcaccgctgccaagctctgcgacaagatggcgctctttatggtggaggggaccaagttccggagcctgctcctcaacatgctgcaggtaactggacgccggccaccaccgccccgcgccccctgcccctctgcgttcggtgagttattcctagcgagaaggctgc

SEQ ID NO: 343386 - DNA, 284 bp, Homo sapiens
  chr18:46418923-46419207
  hypo
cgcccgtgaggaggtgggccctgatttggcaggtgtgcatgaggccccctccacacatgcatgctggtgcgggtgccagcacggccacagtggagggtaagaacacacttccaggcggcactgccagccctcgccgtgttccagcttgttgacaccgtgatggcataattacagtttcaatcgcagattaataataagtcatttttgcaaacgaggaggcaggtctgcactggaaagggccccaaagggcctgtcgcctctgctatctgaggctgctggccgcc

SEQ ID NO: 343387 - DNA, 556 bp, Homo sapiens; identical to SEQ ID NO: 335811
  chr18:46502500-46503056
  hypo

SEQ ID NO: 343388 - DNA, 137 bp, Homo sapiens
  chr18:47285297-47285434
  hypo
cggccagtggtatttgtttttaatcaccacacagagctattgtgaggaccaaataaagaaatggatgtgaaggcgtgctgcgaactgcgccatgtggggtgttttctcattgttcaggtagcattcagcgtgaggcc

SEQ ID NO: 343389 - DNA, 1772 bp, Homo sapiens; identical to SEQ ID NO: 335814
  chr18:47719964-47721736
  hypo

SEQ ID NO: 343390 - DNA, 396 bp, Homo sapiens; identical to SEQ ID NO: 335815
  chr18:47792569-47792965
  hypo

SEQ ID NO: 343391 - DNA, 204 bp, Homo sapiens; identical to SEQ ID NO: 335816
  chr18:47813485-47813689
  hypo

SEQ ID NO: 343392 - DNA, 1837 bp, Homo sapiens; identical to SEQ ID NO: 335821
  chr18:53254628-53256465
  hypo

SEQ ID NO: 343393 - DNA, 377 bp, Homo sapiens; identical to SEQ ID NO: 335822
  chr18:53256998-53257375
  hypo

SEQ ID NO: 343394 - DNA, 116 bp, Homo sapiens
  chr18:54483280-54483396
  hypo
cgcgcagactatcaccacggctcctgatgcctcagggcctgaagcaaaagtccaggaggaagagcatgaccttgttgacgatgacatcaccactggtaagcacagacatctttaac

SEQ ID NO: 343395 - DNA, 249 bp, Homo sapiens
  chr18:54694241-54694490
  hypo
cgtcactgctgggaagcatcggcatgctgaactcggcacctcagctgcgctgcattaaaacctaccaggtgccccctgtgcagcccgcgtcccccggctcccacaatgccctcaagctggcccggctcatctggacttccaaccgcaacgtcatcctcatggcccatgacgggaaggagcaccgcttcatggtctaatgctgctgcctgccgccgtgactgcgttttagttctctaaattatccaagcc

SEQ ID NO: 343396 - DNA, 264 bp, Homo sapiens
  chr18:55850838-55851102
  hypo
cgagttgattgagtattcacttcgaagctccatgctgcacgcatgggcctgtaaatagctttttcgtgcacttgtgggtgtcatttcagatcgcttcatcggatttcagttacccaagtttttacttggttcaccgtaagtttgcaaaaaagactttttgttatcctgaacattgcaggtggaaacatgattaattttgaattatttttgtttaacttctaccctctttcctatttacagcctattttgtttattttaacttcc

SEQ ID NO: 343397 - DNA, 168 bp, Homo sapiens
  chr18:56008830-56008998
  hypo
gttgtttgggttcgcgctcctaatcacacacaccgggagatcctcctatgaagctaacttgtttttgcctccaaaatagcttgcagaagatggtgcgtccggatcagccacaaacagtaacaaccatctaatcgagcctcagatccgccggcctcgtagcctcagctc

SEQ ID NO: 343398 - DNA, 712 bp, Homo sapiens; identical to SEQ ID NO: 335832
  chr18:56936005-56936717
  hypo

SEQ ID NO: 343399 - DNA, 1477 bp, Homo sapiens; identical to SEQ ID NO: 335836
  chr18:57363523-57365000
  hypo

SEQ ID NO: 343400 - DNA, 830 bp, Homo sapiens; identical to SEQ ID NO: 335838
  chr18:59001027-59001857
  hypo

SEQ ID NO: 343401 - DNA, 484 bp, Homo sapiens
  chr18:59483218-59483702
  hypo
cgccccgcctgtcctgctcctcctccaccgcctcctggggagccccaccttgcagaggctgctgttcagcagggatggtcaccacggtgacggacttctgctggctcccgggcagcaggcggcagcccatgtctccgggcagcagcgcacgctccttggagatgggcaggggcagcatgtagcacccattgctgggaagtttgatgaagaccggggtgtgttcggaagtgtgtggaatggcgatgacagccaggacctccgggtcgtccgggagctgcgacacggagaagccgggaggcagcttggtgacaccgcggcaccaggggcaccgcacatccttctggctggtcctcatctgctgcaggcacactgaacagcaggtgtgcttgcagtccagcaacttgggcctgcgccgggggctgtagtaattgaaacagatctgacattccagcagagagtcctgggacagcgtctccatggtgga

SEQ ID NO: 343402 - DNA, 142 bp, Homo sapiens
  chr18:59728812-59728954
  hypo
cgtgaataaaaagcatggaatggctgaaatcgctaattatactattaacacaaaggagtttaggaataaaattcgtcatgaaggggaaccagtgcaggagcacaattccaataaccccggcacctgtgaagggagctctgcc

SEQ ID NO: 343403 - DNA, 98 bp, Homo sapiens
  chr18:60110139-60110237
  hypo
cggcaccaccgtgtaccctggcatcgccgacaggatgcaggagatcaccggcctggctccaagcacgatgaagatcaagatcattgctccttctgagc

SEQ ID NO: 343404 - DNA, 164 bp, Homo sapiens
  chr18:60120657-60120821
  hypo
cgagaaaatagatggcatccgaaaagaacttgcctgtcccacctccccgtctactatcctcctgtgtctgtcccgaaatactgtctgtttgctccatcactgtagtgaactgttcctcctccatgtacaaatggtgcatcccttcccacttactcaaaaatgtc

SEQ ID NO: 343405 - DNA, 66 bp, Homo sapiens
  chr18:60229150-60229216
  hypo
cgcttttctcttgctccgtcttccaagactccaaatccttgtatgttagatttttcaccatgtccc

SEQ ID NO: 343406 - DNA, 66 bp, Homo sapiens
  chr18:60430703-60430769
  hypo
tgcagcaagtcatgcgaacacctcattcagccttttgcagcctgtactgaactgctgtcgctcatc

SEQ ID NO: 343407 - DNA, 128 bp, Homo sapiens
  chr18:60609821-60609949
  hypo
cggtgagcggtgacattatatctagctttgagtgaatctgcgtgctgagcctgccgtgaggatttaccgtgtttccatttcattggcttttatccatctaacaagttagggcttgaacacacacccac

SEQ ID NO: 343408 - DNA, 333 bp, Homo sapiens
  chr18:61143917-61144250
  hypo
cggtcctgcgtgggccgagaggattgccgtacgcatgtctgtacgtatgcatgtaactcacagccccttcctgcccgaacatgttggaggccttttggaagctgtgcagacaacagtaacttcagcctgaatcatttctttcaattgtggacaagctgccaagaggcttgagtaggagaggagtgccgccgaggcggggcggggcggggcgtggagctgggctggcagtgggcgtggcggtgctgcccaggtgagccaccgctgcttctgcccagacacggtcgcctccacatccaggtctttgtgctcctcgcttgcctgttccttttccac

SEQ ID NO: 343409 - DNA, 979 bp, Homo sapiens; identical to SEQ ID NO: 335844
  chr18:63417693-63418672
  hypo

SEQ ID NO: 343410 - DNA, 1444 bp, Homo sapiens; identical to SEQ ID NO: 335845
  chr18:67067910-67069354
  hypo

SEQ ID NO: 343411 - DNA, 1313 bp, Homo sapiens; identical to SEQ ID NO: 335848
  chr18:70535426-70536739
  hypo

SEQ ID NO: 343412 - DNA, 211 bp, Homo sapiens
  chr18:72226558-72226769
  hypo
cgctgaaggagtgggtggccatcgagagcgactctgtccagcctgtgcctcgcttcagacaagagctcttcagaatgatggccgtggctgcggacacgctgcagcgcctgggggcccgtgtggcctcggtggacatgggtcctcagcaggtgctgtacgattccctcccactgagggaggtgctacttctagacgtcagtcatgccttccc

SEQ ID NO: 343413 - DNA, 278 bp, Homo sapiens
  chr18:72347372-72347650
  hypo
cggccacatgagaaatgagcaggccagtgtggaggagcttccggagggaggggccacctttaaatgtgtcaagtgcacagagccctttgattctgaacagaatttatttttacatattaaaggacagcatgaggaattgctgcgggaggtgaataagtatatagtggaagacactgagcaaatcaaccgcgagagggaggaaaaccagggaaacgtctgcaagtattgtgggaagatgtgtcgaagcagcaactcgatggccttcctggcacacattc

SEQ ID NO: 343414 - DNA, 73 bp, Homo sapiens
  chr18:72632559-72632632
  hypo
cgggaccaacgtcccggtggagttccggaaccatttgaaggaacagcatcctgacatcgaaaacccggacctc

SEQ ID NO: 343415 - DNA, 183 bp, Homo sapiens
  chr18:72670022-72670205
  hypo
cgtctcacttacactgtgaagtggtctaaaaatgttcgtcttcacctacgagactctggacgtctttgagtattcattccttcattctttcattatgtattaaggtccttattatagatgaggctgatgtaagtgcctgcgataaaacagtggaaaagatcagcaaaagagaacactgtcgtc

SEQ ID NO: 343416 - DNA, 227 bp, Homo sapiens
  chr18:72764607-72764834
  hypo
cgtcagccgcctgatagagctcgtttcttaggtacctgagtttggattacacataatgaattcagttttccacttgttcacgtcaccattcccacacaaagtgccttctgggggtgcctgtgcggcacccggtacacagctttgctactgctttcctgcacgtgcacccgggtggaaggacacatgtgcgtggatgtcactccctgatcagcgttcggacccatacc

SEQ ID NO: 343417 - DNA, 115 bp, Homo sapiens
  chr18:74068664-74068779
  hypo
cgatgaatgcagccattcgtggtaaggttttacattgttgggggtggggggcgtcatgatacccagcttccgcacctagcacgacatgggcaaactgcagacacggagaccccgc

SEQ ID NO: 343418 - DNA, 153 bp, Homo sapiens
  chr18:74069268-74069421
  hypo
cgcagagtggcgcacccagcgcagagtggcgtccccagcgcagagtggcgtccccagcgcagagtggcgcacccagcgcagagtggcgtacccagcggagagtggcgtacccagcggagagtggcgtacccagcggagagtggcgtacccagc

SEQ ID NO: 343419 - DNA, 163 bp, Homo sapiens
  chr18:74073695-74073858
  hypo
cgctagctctcttccgaggcggaatctacgcattcccacagacgtgtctcctttgccagattcgctcagttcgaatggtgggaagaatggaacaggcacacggccccagggaggagtgcgatggagccagtgaacaatgagggtctcatcatcatacccctcc

SEQ ID NO: 343420 - DNA, 684 bp, Homo sapiens
  chr18:74083302-74083986
  hypo
cgccgcctggtaggggctgaaatctcagtatctccctcgctgcggatggtcaagccactgacagaagagacccctcttcctctgctccccttggggatagctgggcgggagggcgatacctgagtgtgcccgcatgtgggccctgaggtggccgggctggtggaagctctttccgcactcgatgcagacgaactctcctggccgggcctgcgtccggagtgtccctgcggtggcgaggtggtggtggtggcagggccgtggtggggttggcgtggaggtgaggaggcaggagagcgagggggaagcgagaggaaaacatcattagtctgtctaatgtgtcatcatgtgaggctcccttcaggccctggtgacaactgtcagccttcatctcggctctgctgacaggccaggcactctcaggactgcaaggatgcataaattacagcgaattaaaaaccactccctgggacaggaggtgcccgccaggcagcacgtcgggctgtgcagctccgagcaactgcaggctgggcacagccatcacccggctctgtcaagcagcacatccagcaaatcagagtgacaccggcgtgacagagacgaggctcatggaaaataggaagtgagcgggaccagagcccaccgtgacccggccgcgatcctgggagacccacgcagagtgagtgc

SEQ ID NO: 343421 - DNA, 1404 bp, Homo sapiens
  chr18:74090923-74092327
  hypo
cggccaccggctcctgtttgatggagtgtaggacgggggggcgccccagccacgccgggctgggcctgcaaggccgcgtcgcccctggaccccgcagcacaggtggccagagtcctcagctcctgggctgccttcgaggggggctcgcggggaggtagaggaggagcgcccccttcgccctttgcaggaggtggaccctgaggctgagcactgaatttggctttcagggagtccggggcactgtgcttatttgtgggggcaaagccagcccccgctggggggaccccaaacttctccacaggcttgctattggccgagggctgcgcgccagcccgggcgatgacggtgggcgtaggggtggcgctcctgctgaagcccccgccacccggggcaggcaccggtttggagctagcctcctgcctgggcttggccaggggcccctgtgtggccgcgccatgtggctcctggccgtgacaaggtttggtctgtcgatacccgtcagggccgggcgcccacagagcgcagggacctccggaatggctctccttattcttaggcatgctagcggcttttgtgaccactcccaggggagaagagccacttttggaccccggcatcccccctggcacctgagtgcgggtgaaccgagcaaggagcaaaggctggcattctttgccaccgagggcaggcggggggcccgtgcgtccgctccgggaaaggaaaaccaaattgcttctgatgcttttgtaaccattgggctgaatccacgggggagccacggagttgcagctgacgcggtgccagatgcgtttgtgcatccacaggacctcggggtagtaggtcttgtggctgcagtaaggacacgggtgaacgactaaagccgcctgcagggaggaggccgtctccttattgctggggtcatcccgcgtcgacctcgcacttaaatctagcggcatgaggtctggggccagcgcccgcttccctcccccagagtgttccttgttgtgcaaatcggacagcttttctgcagggtgacccgtctggccctccgctcccgtactggaagggaactccacaccatcaccagggacgggcacctcctgcttggggtgaaatgctggcatctttaagtccatagaaaatctgtgctgctcttgccttctagaagtctctctgctactgttttcaagtatggacacagaagctgcgatccctgccttggactcgccggtgtctctttccgaggcgttatctcccatcttgtgactctggtctccactggagagctcggtcgaagtcacctcttcggaaaagcagcagcggcgcggctgtccccctagaggaggcaaaatatgaaacgggaagttaccatttctcatcagaacacagcaagacacacggtgc

SEQ ID NO: 343422 - DNA, 874 bp, Homo sapiens
  chr18:74096607-74097481
  hypo
cggtggccctgatcctgaaacggaagaactcggctagagaagtgtccggggagggggctccagctccctggttgaggaaatgcctggttccgtggctcccatgccacacagggagaaagtctgcaagaaaaagcacttctgctcctcagtccccaccaatctgacagcccctgggtggcagtgctcaccgggcactttattagaattgaaggaaagagaacggtgctgatttgagcatggcgtggccctgcatagatggctgcctctaaccctgaccgcagtgccgagggcacacaccagagagggaaggctggctcagaaaggcctggcagcggccctgtgcagagggagcaggatctccaacactcaccccatgctctccgggtgcacggaagcacgtgccaggaggaggcagccgggtccgagcagccctagagaaggcgcacgtcgctcccaaccccacgagtgtgcacacgcgtgccacagacggtgactatggctgctctgtcctcggctcaaacacaccaggggctcccgggttcctttctaagcaggaccttcctagatgtgtcttggaaacacaaacatggattaggtcttgggtgacttcactgcgtcccaagctggccctggcctggctggtgccgcacaccgccgacaagcatgtttcacacggggcccagggagtggcagacttgcactgtctgaagtccctgaggcaacatcttcaacacacacaaccgccctcaaaagcacagaaatgcggtgagggcactttgtataaagttactcccctttcacttaaaatattttttattactgtagtaaaatatacataacaaaaaagtctgcagccacgcagccacgctgaggc

SEQ ID NO: 343423 - DNA, 340 bp, Homo sapiens
  chr18:74113780-74114120
  hypo
cgcgctccatctctccaccaaccacacccccgcgccgcacccctccactactgtttataggctctcaagagggacagggaaaaccagtattgtttgagtgccaactctgcataaacaatttccacagaatgactgcacatgcatgtgcgtgcctatgtgcatgtgtgtacgcgcgtgtgtacacgtttgtgtgtacacgtgcgcgcatgtgtgcacgtgaacgtgaccagtggtctctgcatcccacagggaggggagggcttctctgaaaagaaattgtatatgcacaagccttagccccgcgccttctatttgctgaagacatcgcctcggtcaacac

SEQ ID NO: 343424 - DNA, 451 bp, Homo sapiens
  chr18:74120305-74120756
  hypo
cgaggggctgcggcgtgcgtctctcctgacagcgacacacttgagaccctccgggagttccagccggggtgaaaccagtcacaagggaaaatagcaaaaattaagaagaagtgcatggctctggtatagctcggaaagtacactgtgaggtttaagggatggtttaaaaggaaccaggaggtgaaaaacgtctaaaggcggaaggtgtcaatgtttgtcatccaactaggaaactgagggcacatggctcccaagactgtgtgagacactggcaccctaacaccaagaagaacatgaccgctaacgacagaaagaggcgtaaaaagaggcctttccaaactgacccacgtgaatgtttgcatagtgacacgtttgtgttcgctcgctaattcacagaaaacaacttccacaaagctgtccttagatttccagtaatgtatcaccctcagtc

SEQ ID NO: 343425 - DNA, 168 bp, Homo sapiens
  chr18:74134219-74134387
  hypo
cgcagaagagcctgcggagagcgggccggtccctcggcactccctgcactgcggcagtaagaagcagaccacggtctccaggggcctgacggatgatgaccatgtactcatacactcaggctatggagcagagctgcacctgcaaacacgtgactgccctaactttcc

SEQ ID NO: 343426 - DNA, 158 bp, Homo sapiens
  chr18:74134955-74135113
  hypo
cgtctggccacctggagtttgcatggagaccctgggctgtgcacaccgcaggactctcacctggaacactcggagaccccaggattcaagcactctgcagctggcagcacaatctaacagagacccattaaaacggatgtccacaacacaatttacac

SEQ ID NO: 343427 - DNA, 1161 bp, Homo sapiens
  chr18:74144952-74146113
  hypo
cgagacctggccgcacatcctgagtccacacatcctgagtggcaacgacactgaaatccacacatgcggcactttccattgaagactctgtaggcttctgagatgctcccattaaatactaactgtaaggccagcctctgctgcgactgctgttcatcgctgtttctgttatcagacaggaagatctctagagtctagacatccagtaaaaagcaccactgaccgctgagtactcccgtgcaaaactacccactcccgaatacaacatttctccatggagttcgctgtcaactctgaagaacagaattcatcaaggtgcagctccagccactgttctcagcgtgagtcctgcggggccctcaagaaaaagcaggtctggcccctgtcttcaatgagatggcaatttgaggatgcctgacgcaaggcggatgctggggacagagagggtcatcctgcctgaaaagaatgtgtccacgcaacagggaggaatggggccagcctgaggcccaggtttgcattccaccctgggtgccgtaccgcggctgcacgctcaggccttgtggaggagacatgggagccttgagtctgggcatagcatccgggtcacagcaaggtggagaggggagaagacgggcaggtgccagagctgaaatgcatatggagctgggagccacctcagcttgcaaggaggaacaccaaagggctgggcagaagggtgggaatccgtgcgttaagcaaacgcctagtgaagaatcgagaaaggatgggcttagtcgcagcacatcacggatacaggagggcgacaacacaaccaacacaggcaggtgcagaatcatcagtcggaatgactagaatctcccaaaaagctcagcagcaaggcatcatctcacagtgccacgtccccagctccacaggggtgcacaccgctccatggcatcacacctctcctggccgggaaaccccaccgcgaccgccagcaccttttctcacaggtgcaccaagccctcggcaacgccttacccaacccagcacctgctgctctggccgttgctgtccgttcttccagctggtcaggaactgacggctcggagtggaatcagacctccctctttaccaggagcgatcctgcctggtccatgagatgccctatctcacgggaac

SEQ ID NO: 343428 - DNA, 266 bp, Homo sapiens
  chr18:74148373-74148639
  hypo
cgttttgagcctctcgtgggacccatgatgaacactgtgtgaggacaagcgctcctcccaacccatgacttggcttcagagagagctttgcccgtgttgcgtccaagccaggacaccgctgagtccccgagagactcagcatcgcgagtggattcagctgcaaggtcagtgcgcgaaggtattgtgagagctcctcctgctctaccttgaagaaacgcttagaagaagtaccatataaaggttgcccacacccagcaggcttggcc

SEQ ID NO: 343429 - DNA, 1785 bp, Homo sapiens
  chr18:74153253-74155038
  hypo
gccaggccagagcccggggagtcagcagcggcacaggcggagccagggctgctgggctgggaggccgagtcaccctcactgagtgatccgcagcgggcccgcgccgccctgtccccgtcactgtccctctcgcggcgcgcgcggcgatgcacgcgtgagtgcagcaccatctgatgataggtgcggaagatcttgccgcactcgaagcactcggaggacttgccctggccggtggtggctgcggccctgcggttggggcgcgcggccgagcggggatcgaggtggccggcgggcgcggggtccccaggcccgctcgcgcgcttccgcgggggcccctgcgcggctggtgcatcctgctcacgcttgcgcttctcctggctcaccaggacgtactcgcgcctgtccttgtcgaaggccacgtccccggccagcgcctcgtcccaggccccgtacttgaggtactcggccggctcggccaccttaccccgcgtggccagctgccaggcctggtagctgttgaccgggtccagctcagccacccgccgtccggcctgcgtgccagggcacgagtcgccggccgccgacggcctcaggttcaggcactggaggaagaactgcttggtgtccgagggcccctccgccccctcctcggccggggcgcgcgtgcggctggcctcgactctgcggtggatggcattgtgggcgttcaagctgtccaggtttgtaaacaggttcccgcacttggcgcagacctcgtagaggctcaggccggcgacgatcacctcctcctggaccacgttgttgatggtggcgatggggtccagctcactcttgggcctgttcttgctgcccgtcttggggccgtgcgccttcatgtggttcttgaggaaccagggctccttgaacctacggccgcagatgtggcagccgtggtcgaaggagccccggtgcttcttcatgtgcgccttcaggaaccaggtctggctgaaggcctggccacacacctcgcacgggaactccccggggctcagctcgggcttgccgttctccacgcaggcctcgccgctgccgggcccctgcgcggtgatgtggtccctctcgatgtggctcagcagcgactcctcccgcagcgtcgcgtagctgcacagcctgcacttgaacggcttgtgcgcctggtgcacgtgcagctccaggtccttcttacgctcgaactggctcttgcagaaggagcactggaccgctgccttggcctcccccggggcgcatgcggacccctctgcccccttcttgctgctccgcagcaggactctgccgctgtcggcctgcgaggccccgttcaggaccctggcgccgtcggcctgcgaggccccgttcagcagccggttgcaggccgaggcgctcttggtggggctggcgcaggcgtccaggccctcggaggcgcgcatctcacccagcggcgcctcgcccgcctccggctcgtgtccctgaatcagagtccccgtgcggtggctccggatgtgaatcttcaggttgcccttctgggaagcccggtggtcgcagtagggacacttgtagggcttctcgcccgtgtgcttgcgcatgtgctgcgaaagcgagctctggaaggggaagctcttgccgcagatgcagcaggtgtggcaggtagccttgtccccatccacctcgtggccccggccggccctggtggggctggggcctcgcctcagctccatctcggcctctctgttgcgatccatccgaaggacgggcgcggccggtggtggc

SEQ ID NO: 343430 - DNA, 460 bp, Homo sapiens
  chr18:74159178-74159638
  hypo
cgccatgggcggccgccccaattaggaggattattgggacgtcagcggccctgctggcacgacgggctgtgctttaaatcccgccaacccctgtaagccaggagggtttcgatgggatgcctcctccacctttatcctggtccctagtggggcgtgcctcacgtaggagcagcgccgtgtgataaagtgctacctacctcagttccagccgcagacatttccgtcctgggctgctctattccactttctcaaacgcacgccaaatacaagttgttccaactctccctgtaacacacgggcctggagataaccagccttataaaacttgtgcatgtgagcctgccacccaaaccacagggaatacggaaaggttctgcaacaacacagatgctcagagccaaggtggagggtacagcatgtgtccagctgacatgcaatatggcgcccacgcacctcggac

SEQ ID NO: 343431 - DNA, 306 bp, Homo sapiens
  chr18:74170482-74170788
  hypo
cgaagggaatcccgtccctgagaggaccaagggcacaggagtagtgctcgggaccctcaggacggggcatgcactgtgggcaacgccaggcctcaccgtcgtgcgtgtgcatgcctcaccgtcgtgcgtgtgcgtgcctcaccgtcgtgtgtgcgtgcctcaccgtcgtgtgtgcgtgcctcaccgtcgtgcgtgtgcatgcctgtaggcaatgccaggcctcaccgtcgtgcgtgtgtgtgcctcgtgtgcgtgcctcaccgtcgtgcgtgtgcgtgcctcaccgtcgtgcgtgtgcgtgcctca

SEQ ID NO: 343432 - DNA, 510 bp, Homo sapiens
  chr18:74171117-74171627
  hypo
cgctgcagcagtaacggggcgccgggcccacctgctgcccctctcctgtgcatagggcgctctctccctgccccgagcttcggcttctcctccatgcacggtcactgctggaggcacactggacccagtgccagctcgggaaatcctgggccggtgacagccctgacccgtggccaccatccactcaacatcattgagccctcccacaggcacccaagctctctgaggacagccgtcctagcttccttcgtgggagaaaactctggccctccactgccggccagggaggcctcgcgtgccaagctggccctgagctcagcccaggatttgtgccattcaggacgtggcggccgtgtgcaccccatcgggcaccgcgtcgcctccctcggaatgtattccagcactgtctgccatgatgccaacagcaacacttctcaacaccaagcctttaaatgtccagcagctccacagcccgagtcagagtggcccagcctcccctggacctgatgc

SEQ ID NO: 343433 - DNA, 177 bp, Homo sapiens
  chr18:74175495-74175672
  hypo
cgcatcacactgccgaccgccagaaatgccaggcccctgggtggctctcgctcttcttggggatgggtctgtggggcgccacctactcacctcctccgcagcatctgcgtttacaaaacacactagggtactagggagccagtctgtgaccgcaacgcagacgtgcccactgaaatc

SEQ ID NO: 343434 - DNA, 120 bp, Homo sapiens
  chr18:74176911-74177031
  hypo
cccagggatacagccgtgcatccgatgagggcagctgcaccctcctcaccttcaggcaacctcgaggggagccgccagaggagagaggctccagaggtgccagggcccagggctcgccac

SEQ ID NO: 343435 - DNA, 147 bp, Homo sapiens
  chr18:74183568-74183715
  hypo
cgacagctgggcctcagccaggcaccagtcggggcctcactagatcccgtcacgctagatcctgtcacatcgctgaacgggagatcccagaattggagccgacttcccccaggagccgggtccagcatgcagtcatgctgccagtcc

SEQ ID NO: 343436 - DNA, 427 bp, Homo sapiens
  chr18:74194245-74194672
  hypo
cgcgacctattattccattgcccgttctttatttttgtttgtattttactgtagatggtccccaacttaggaaagtttgacttacactttttcaactttaccaggtgaggaagccacaggcagtcagcagaaagcagtgagctgctccctccacaggcccggcagcggcagccccgcgatctccagggtggacgtcggtacttcatggcaacctgcactgccaggtgctcctgcccaactgtcggctaacatttacccattccaagcgcacttaaggtaggtgaggctatgttaccatgttcagtagactgaagggtattaaacgcatttccgacttaaaagtatcttcaacttaggatgggtttctgggaaggcagccctgtcgtaaattagagagtatctgtctgtatcaaacgtgtgaccttac

SEQ ID NO: 343437 - DNA, 226 bp, Homo sapiens
  chr18:74195379-74195605
  hypo
cgcctccctgcccactcctgtgggaagctccctctcggcatctgtccgtcatcagcatctgtccgtcatcggcatctgtctgtcacgggtcatctgccgcaccacactgagaacccatgagtgccaaatgtcccccgtcagctggcccacccgcatttcatcttcctggcttaagaaggtgagtctcagggcccagccgtctatcagaactgacctggtcttctcc

SEQ ID NO: 343438 - DNA, 640 bp, Homo sapiens
  chr18:74323522-74324162
  hypo
cggtggagggggcgatgtgcctgcgtgtgtgcctgcgtgtgtgtgtgtgcctgcgtgtgtacctgcgtgtctgcctgcgtgtgtgcttgcggtggcgggggcggtgtgcctgcgtgtgtgtgtgtgtgcctgcgtgtgtacctgcgtgtctgcctgcgtgtgtgcctgcggtggcgggggcggtgtgcctgcgtgtgtgcctgcgtgtgtgtgtgcgtgcgtgtctgcctgcgtgtgtgcctgcggtggagggggcgatgtgcctgcgtgtgtgcgtgtgtgcgtgtctgcctgcgtgtgtgcctgcggtggagggggcgatgtgcctgcgtgtgtacctgcgtgtctgcctgcgtgtgtgcctgcggtggagggggcgatgtgcctgcgtgtgtacctgcgtgtgtgtgtgtgcctgcgtgtgtgcctgcggtggagggggcgatgtgcctgcgtgtgtacctgcgtgtctgcctgcgtgtgtgcctgcggtggcgggggcggtgtgcctgcgtggtgggctccctggagtgatgggcattagccttctcatgactgccgcctgggagactggttattccaaaggacctggcgcccaacgccagcacgaccgaagccttgaaggcgagcaggcaccctc

SEQ ID NO: 343439 - DNA, 605 bp, Homo sapiens
  chr18:74325506-74326111
  hypo
tctcgtgcaagccccgcctctcccttactagcaaagttgtgaggacagcgcctgcacgcaacacttgcttactaacttgtaactgttattacagaaagcgtggagccaaacagatggcagaggcccaaggaagagcgcgctaaacccgaagtagatctgatttcacatcttgacttggcgattgtttagctgggtcagggtaaatgcctcactgttcctcgtctgtaaatgaacacgggtgctgaggttggggtgagcgcctcaccgagcctcagtttctcatctgtaaaatggacacctgtgcgcgcctcgcggcaggggctgctgagcacgcggatgggtcctctggaggctgggccgccaagaggcggcggctgcaccatctgatgctagagaacgagaaccgcagtgcgtgcccgacacaaagggaaggacaggggacactggaacaggggagacgacatggaagaaatctgggggagccaaaagccgccatgccgagaagggggtcggaggaggcgcgggagagaaaagcccagggctgtacactcgcatccctctgctgccggcccttcgggtacattcaaatactgggcatgagtccc

SEQ ID NO: 343440 - DNA, 280 bp, Homo sapiens
  chr18:74396249-74396529
  hypo
cgagtcgattctgtgcccagctcagactgtggctgatgcgcagaggcacgtgggctcttggagggtggggatgagctgggcagccccacggctcctcctggcagggcccccatgctgcgcgtctgtgggctcttggagggtggggatgagctgggcagccgcacggctcctcctggcagatcccccatgctgcgcgtctgtgggttccacggcagccagttccaggcacagggcattcttggtgcacttgtcaggtgattgactccgtgcagcgatctcc

SEQ ID NO: 343441 - DNA, 99 bp, Homo sapiens
  chr18:74419745-74419844
  hypo
tcttgcagaaatctcggtctcccttttaaggcattgttttcaatgtaagatggcaaaggcaaatccagtaaaaggttgtggctaataccggacatttac

SEQ ID NO: 343442 - DNA, 176 bp, Homo sapiens
  chr18:74426512-74426688
  hypo
cgtgacgaggtcagggccactaggcaacacttttcaggtaagggaaggctgggtatgtgctgggcacctgcatgctggtggtgggggttaaaccgcgtgaagctgaaggagccaccctcctgagtctgtctctgtcagggagaggagtgggctggagtcactatcttaggacatac

SEQ ID NO: 343443 - DNA, 533 bp, Homo sapiens; identical to SEQ ID NO: 272332
  chr18:74503932-74504465
  hypo

SEQ ID NO: 343444 - DNA, 79 bp, Homo sapiens
  chr18:74518710-74518789
  hypo
cgctggtctttacgatgaccggttgtgacatgtgagcctcagtcctcgctatatcagggagtagcttcctccgactatc

SEQ ID NO: 343445 - DNA, 297 bp, Homo sapiens
  chr18:74569886-74570183
  hypo
cgatgtttggttactatggattcagtacactttttacgtttcttaagtattttaagattctaatgatattgtgtagggaggtcttttggccatatgttgtgttacgtgcctgtaggaaagcgatgcatttgtgtgtgttagttttccctgccatcctccctgattctctatgcagcctcatctacacataataatcgggtagtaagtttttggttctgtgttgttgcaactagcatatgcgcagtttttaaaaaaaaatcacccttatatcatttattcgttttcatagtatgtagc

SEQ ID NO: 343446 - DNA, 430 bp, Homo sapiens
  chr18:74696524-74696954
  hypo
cggcttcacatgcatctcggaggaaatccacgcgtaaatgcgggtgggcaatgccacctgagcccctgcacgcctgctgggacagagcacgtccagggtacagtgcggctgagccagaggcggcagccacccttgtactcagcttagttggggattctgggagcccttagtccccgctcagtggagctgagcagagggtaccttaccagcttaaaaattttggaaagcgtgccctgggcatcgactcccttgaatcccttgtgagccgatttatagtcggacgctctgcctccgtagccaaatcctggtctctggccttcggccccctgcaagagaagaccacggagctcaacctccacccgcggtgctgggcacgctgcttgagccactgggagctgccaccagggccccggggaagggcccaggcccc

SEQ ID NO: 343447 - DNA, 154 bp, Homo sapiens
  chr18:74721776-74721930
  hypo
gatgggtgaggacccgccggcgtcttaccttgtacatgttgcacagcccaggctggctgcgggcatgagagggcagagggctccggcccggctttagccagggtacctgccgggggacacagagtgggctgcgtgagtccgggtgggcgccgcc

SEQ ID NO: 343448 - DNA, 704 bp, Homo sapiens
  chr18:74728317-74729021
  hypo
cgacctcaatcctatgattgtcgcagagcaacatgaagctagcagcactgactccaggaaaaaacgagcataacccagtgttgaaccccagcgtgtgggctgcagaggcaacatcagtcatcaagtccgcaagcacacaccaccagagaccctgagaatgtggctctctttctgcaacgcccatgtccaggcacccttagagatccagaattcagcatgtccttacattcctgagccacaccccggccaccatcccttgtgaggaaaagagggggtgagttaaacgaaaacgtcctaagcagccactcaggcccacactcttgggctcatatgcattctccagcacggaacgagaccttagacagcaagaggctacgtgccagttcttcctctaatggctgagttcacctactgatttctcctttgctttttccatttaaactaaaactcctctactcctcagagctcaccttgccagagccccgcttgggcgcacccctgtcaccgccaaagaagcgcccgatggagtcaaggatgcccgtgtctctgtgccttgggaggaagccatgcctggcatggtccatggtacttgctgtggccaggtacttggatccgtgcctctgggagggtctcttctgtgacgccatcacatccaggctctcggaggtggctgcactgtcttcttggatggtctggagctcgtc

SEQ ID NO: 343449 - DNA, 1775 bp, Homo sapiens
  chr18:74736601-74738376
  hypo
cgacggagaatcggccgtcgtggcagcgccagggcctgcagtcgccagggtggggctgaggccagggccggaggtctgggcagaaccacagggaaggaccttggaggccgacctcagtcccaacactgaccagccgatgtgctccagcaagtcgctgagcccagatgtgcctgtttctgtgtttatgagatgggagcattcatttctattcttacctgaaataaccccaggctcctttccgcagcagcacactgacctgggtgacgtgtcctccccatgccaccctcccacaaacgctgccttccacccacagcacccgcagagagtggcagagagggcattcctgagcagattgcaggagttttgggaggtgcatgtgtgcattctcgtaactctccgaggcgggtggttttagtagcccttttattcataccagaaactgagacttagcaaagttaaggtgggattgatggaggagctgccgttcactcctgcctaaactccctccgtatgttctagaaacgcaggcgatcccccacctctagctgtctgacaccagcccttctccagcccaaagtggctttcactgcagccaggcttttcctctcagggtaaaattgaactgcagataatcgatggctgacgcatctgtggctagcagctgcttcacggagggctgaccaggagagacccagaggctttctgatctgtcgggagccaagagctgagccagggcccccgcctgcagccacagggacctcgagtgcactcagcggtcttggtgcaccatagccacctggacatcgatacgttaatgactgttaaacatgaacaaaagccgagtcccacactccaggacattcaacacccacccgacagtctgtccgagtgttacctccaacagtatgaagctcaccgtgcaacggctccaggcttgtttaggaaactgtcccactctcatcttgctctaatcagaacatggcaggaatcaaatatccatacctgactgtctccagtagaatggtgatgacagagcggacactgtcctctattgaaatacttttttttttttttttttttacctagagcatgtttctcgtgctccattcccctgcatccgtggaaatcacatcgcacaagtaacttccatcaaaaccagcacgtgtgagagacaaacatctgggttcccaggcacaccccacaccctgagtaaaccaggacggacaggccgaggttccgctgctgcctttctggcacacgcaggggagcagtgggcagcgggttactccctctccgaaaaaccgtccttctccccatgccctgcggcaccgtgagtgcatcgctcatcccgctcgctgtgctcccagcctgtgccatggaacctgctcaactgcggagcctgggatgaggctgagcctgttgctcttcctgttgagtttggtttcgaccaccctgcatgaatctttgtgcttccaatgcttctggtcagggggccctgccgcctcgtttcagggacggtgcctgcaggccgctgtctgtgcctgaactcagcgcttttcacgctggcttgacccacggagggcggctgtcagccgcaaccggaggcagagcgcgggcgttctgaggctattggatgaggctcgctggtgataccttctgggtttgcaactttgttctaaagccaggggttttcaggccaacagaaatgcatttagttagtaatccagagcatgccataggaaaacataacgaataaaactagaataaaacataac

SEQ ID NO: 343450 - DNA, 533 bp, Homo sapiens
  chr18:74755425-74755958
  hypo
cgtggcatctgaaaatgtaaataagtgatgtaccctgtggggtagctctgctgcaggcaccccggggacctgctggtgaccctgcccttctcctgctgcgatcatcccaggccagcgtgacactcagcagcgtggacgtctctctgcaaacgcccaaatgcagtgtatgaaatgtcatccctagaaatggcttcatttgggataaagctttgaacttgcgtgcgtgccccgcaccccgtggcggactgagtcactgctttgctgttgcggcgtggtgagtaaaactttcccaggggagccggagttgagtgagaaagggatgcaggacacgcaggagctgacacatctctatggatttaagtcgctgtttccacaaatgctactcacatgcccacacgtgtagggcaggactgtcacgcgtccactctgctcagctttccaggccggatctggtcccagccattctacctgacccagactccccgcacccctgccattcccccagctgccgtcctgtgtctcctgatttctgc

SEQ ID NO: 343451 - DNA, 337 bp, Homo sapiens
  chr18:74759077-74759414
  hypo
cgaccacggctgggtgcctgcccaagagaaccgcagacctatgtccacgggaaaccctgaacgccaaggctccggcagtaggattcacgacagccaaagggtggcagccacctgaacatccgtgagctgatgcgtggatgaactgacggtgatgtgcacacacgatagaatatcctcctgtcgtaaggaggaatgcagcactagcgtgcgctactccatgatgaacctcaccagcattgtgtgaagtgaaagaagccagccataaaacaccacgcatttacaggaagaatccaggacacgcaaatccacaggcatggaaagtagattcgcagtggcc

SEQ ID NO: 343452 - DNA, 634 bp, Homo sapiens
  chr18:74763734-74764368
  hypo
cgtgaagaccaggggtaggagcgtgagtgggggtgcactttgctaaacctgcatgtaacagtgggcttaattttccctttttttaacaccttgtttcttcaaattacacaatgttgatgctaaaatgttctttgtagaagcgaggcccagctcctgaaggattcatctgagaaacccagggacatgcccttctctcattggaacaagtgggaaaaaaggcatcttaaaaaaaggttatggtgaagccgtgcggcagcactggaagaggatgaggaggctggagaaggcgtgtgagtgcaagctgccctcccgagactgtgccctctgagccagagtcttcctccgatgtgcccaagtccacccgaccaggaacgggggaaggagcggggcgatccaacagccacacaacagagtcccaagttccaatcacaaattcaggctgtgaggtgaaatcacaaatgtgaactttacttatggaaaccaaatagaagtgctttcaaattggggatccaagacccaacagacataagtgatcagcagcatcccgatcgggggggtaagacaaaggggtccttggatgggggcacctgtgagcagggacccctttgtctgagctccccgggtcccgagctgg

SEQ ID NO: 343453 - DNA, 428 bp, Homo sapiens
  chr18:74770092-74770520
  hypo
cggcagaggacacccagggctgcaccggctcttcagggaccctccggggagaagaggcatcccctccccagccctggacgtccacctcaggggcggtggggatgcggggatgcggggatgccgagcgctcccaggctgggtcacagcaggcagtggctccgctctggcttcgactctcaggacccacctgggacccctgctccacgctgcggggaggccaaacctggagaacccagggcaccagttcaggctgacagcccggccggacccagccaacgccccgcacagctcgccagccacgggagggagcggcctccggcagaccccagccccaggcacgaccccaggcccgggcacgaccccagcccccaccggctgatgcgacgcccacaggggacgagctgttccagcaccacccccgcccccgc

SEQ ID NO: 343454 - DNA, 73 bp, Homo sapiens
  chr18:74806378-74806451
  hypo
ttgctcataagtgccggttcccggactctgcaggaggcacaccttaacggggacactttactgcgggtgccac

SEQ ID NO: 343455 - DNA, 814 bp, Homo sapiens; identical to SEQ ID NO: 335850
  chr18:74844288-74845102
  hypo

SEQ ID NO: 343456 - DNA, 934 bp, Homo sapiens; identical to SEQ ID NO: 335851
  chr18:74962671-74963605
  hypo

SEQ ID NO: 343457 - DNA, 174 bp, Homo sapiens
  chr18:75229788-75229962
  hypo
tgcttcccagtgagaaacttcggagagaagacaggaggagacgtggaatgtttcggggctagaaatgtccatttcttgaggtgtgtcgcgtgcgcgttttgacctcggactgcacatgtgcgcctccacccagggctggtcttcaacgggcaggacctggagacggggcgcacc

SEQ ID NO: 343458 - DNA, 581 bp, Homo sapiens; identical to SEQ ID NO: 272380
  chr18:75230327-75230908
  hypo

SEQ ID NO: 343459 - DNA, 212 bp, Homo sapiens
  chr18:75339282-75339494
  hypo
ctttccagctctctgaaaatcgccgggaaagttgggattgccccgcagcgtgggggtgatgccgctgcagcgcaggctgggacagagagcagcccggatgcgcggagcagacttggacttcagagcaccttcgctgaagccgagtgctgctgtgccaggtttgtggcggtcatggtggaaagtggtgagtgcctcgggatgggtgctcctgc

SEQ ID NO: 343460 - DNA, 520 bp, Homo sapiens; identical to SEQ ID NO: 335853
  chr18:75612005-75612525
  hypo

SEQ ID NO: 343461 - DNA, 241 bp, Homo sapiens
  chr18:75873544-75873785
  hypo
cgtacatgtggaagtctccgattctctgacagcgctgtctaccagggatcagctgccgagcttgagtgacatggtgctgtcaccacggcagccatcccaccggcaggcgccagccttaccgtaccgtgtattgaagtgacacacaaatatgtatctggacgtgggtatgtggtgaggccgcagttgtgggaaaggtggagaagtccgatgagctggaggatctggcaggggagggatgtac

SEQ ID NO: 343462 - DNA, 333 bp, Homo sapiens; identical to SEQ ID NO: 272387
  chr18:75998625-75998958
  hypo

SEQ ID NO: 343463 - DNA, 682 bp, Homo sapiens
  chr18:75998988-75999670
  hypo
agaagaaggaaggaggccgaggcgccgcagggaccctggcacctgcccctgacgcaggagtggacgcgaagggtgggcctggggcggaggctcgggagcggcgcggaggtgggagttggcagctccaggccggcgcatgtggaggagaggagggggcccttccacgtgactccgaggttggagcccccctgactggggggcggacagcaggtgttcacagaaggcaggaagagctggaagctggggtgagccagctcatgcgggtttccgggggctgtgcaggtggaaccatctagatagctggggagtctcacacccagagcgttttagacccaaggtggccttcatggctcccacgaatcccttcacggtttagaagagatcagctcagcaacgacgaatgccttccctcagttgtgccaagggggcagcgccaggtctcctgggtcagaaccacgggacagccacgggcattcttaaggctgccagcctgtgggtgtcacctggttcagccactttcggaggaagtcggtgggggacaagacccacttttgcagatttagaaaaggaaggcagaagtgtctgggcacgcggggaaacgcaaagacctgctgaaccagttcatttctaatcaaaaggagcgctggtgtggggtatgaagggcacgtcttcatgccgtgtc

SEQ ID NO: 343464 - DNA, 337 bp, Homo sapiens
  chr18:76123588-76123925
  hypo
cgtgatccacagaaatgattgctacgttccctgcagaacggacggcagtcgctggacagggccccagagcgcctgggtgcggtcagctccgcggactccccccgggacacctgcccagctgcggccgaccccggggcgcacaccctccgggatgaagacggcacgcctgctgcgcacggtggctgtgctgtgctttccagagacaccaaagatccagcaagccccggtttgtgtcgagtgtcacgggaatggagatgccttaaggctccggcttggacggcctgttgttcgcgtgctgagtgcactctgtgggcccgagcgccgagggtcccatttc

SEQ ID NO: 343465 - DNA, 353 bp, Homo sapiens
  chr18:76129277-76129630
  hypo
cgcagtaacacacggcacagaccgcgtgcctttcctccatctgcttaccgagtcggcgcggccacttaccacccatggcagcacattgcaaggtttgtccgtataaaagaaagtgccggcagatcgtgacgtggaggcctcggacctgtacactctcccgtgactctgccacaggccaggctttgctgcgatcactaaaacctggttcgaaatgagccactttagccctccgcatggtggcctcctaggcatccaggcagagggaccctccccgacagcgctctgggggcagcccaggaaggctcagtgctgcggtaattcggggcctccaggtccaccttacgctcatccac

SEQ ID NO: 343466 - DNA, 441 bp, Homo sapiens
  chr18:76151089-76151530
  hypo
cgtccacacagtgcgcaggtcaacactaggagtcggtggcttctgcggcctggcacggtccacggtgctgcgggttccaaaacgccaggcgagccccacggcctgcgggtgcccgggaggtgcagactgaagggcaagaccttgtcagagagagaaagaagcaataacgcatccgatttcacctgctcgcggagagagctacacagcccaccccgacacttttacacgacgaaaggggcttcgcggtccggcaagcctgagctgaaacgcaggtccatcgcttaccctgcagcagttcttcaagcttcggggcttcggtttcttcctccaccccagggggacggctgtgcagggccgtggtgtggcctgagccgggctgcgtttgtggcttccttcccggcacctgctgtgtcctcggggtcttcggtggccgctcccatc

SEQ ID NO: 343467 - DNA, 466 bp, Homo sapiens
  chr18:76189679-76190145
  hypo
cgtgggacccatgacgcagagaggcaggtccctacccaccgggccgtgggccgctgagcacagagcgtggagccctgcggcggggtcgttcctgggccccgcgtgccatcctggggttgtgcatggtggcggcgaaggcacccagcgctgggaccccagcgaggcgacccggggccaccgggcaggcccaagagctccctgtctgcgggccccttgctttccgcagcagccggcctgtcggtcctcggcgggagcctctcgttccccagccacggggccttcccggggtgcggccgagtcaggcggagaccccctggggtgggtggcgggagcggggccgcagcaacagggcggcgtggagggggagaaacaccttacccagccggcggccccctccagcgtgcagctggaacgggaagctgtctgctcagccgtcagaaggatgcgagaaattacctagctcccc

SEQ ID NO: 343468 - DNA, 523 bp, Homo sapiens
  chr18:76435961-76436484
  hypo
gttcactcaggaagccgaagcccagaagagtgaggtctcaaagttcacagcacgtggcctagaattcaggggtgcagagctcctgcttggtaactcatcccctgtgcggtgatgcttctgatcccacagcaatgcctgcttctgcgaggctggtccagggctggaacggagccctgtgccgtgatgcttccgatcccacagcaatgccacgctcctccagagctggagcagattccgatcccacagcaatgccacgctcctccagggctggagcagattctgatcccacagcaaggccgcgcttctccaaggctggagcagattctgatcccaccgcaatgccgcgcttctccaagactggagcacattctgatcccaccgcaatgccgcatttctccaaggctggagcagattccgatcccaccgcaatgccgcatttctccagggctggagcagattccaatcccacagcaaggccgcgcttctctaagactggagcagattctgatcccaccgcaatgcc

SEQ ID NO: 343469 - DNA, 148 bp, Homo sapiens
  chr18:76480528-76480676
  hypo
cgcttggggaggaagggaagaccaaggcttgagggaaaccatcgaaggatgaggccattgtttgaaatgattctcctcagctgcaaggatggataagggtgtcgctgatctgaggctggccaggccgtgctgggccgacgtccttgcc

SEQ ID NO: 343470 - DNA, 586 bp, Homo sapiens
  chr18:76486313-76486899
  hypo
cgagtgatggcgcaaagcaggccggtgaagcctcggcgctgggcccggcctggcactgcgcatccttggccttcgggacccgggctcccgcccccgtgcccagcctcacggagcccgcccaggcctgctgtcccccgagctccaggcccactgcccgccagaaccttctggtcttgcctcgcttcccgcctgcacttttctttcccggcctggcagagacatctataccagtgggaaaggcgagccactccggcagcgctgccaggttgcactccagcacctcacactcgcttctcccgggacttaaatttaaactcctcgagcgtcatgtccccatggctgtctggggccatcattgccacctcgtactcctctcttcactgccacaagaccaagagacagatgcgtcccggggtccttccacagcgttcccaggggaggaggagggcgcctggagccctggggaaggcgagcccgagccagcgcacgtggagactccctcggagacctctgcgcacatggagacccgcgcgcacgtggagactcgcgcgcaaaaggagaccccagtgcacatggagacttccac

SEQ ID NO: 343471 - DNA, 432 bp, Homo sapiens
  chr18:76495838-76496270
  hypo
cgccacaaggaaacatttttatcctcggtgtgagcccggcctcgcctccctggtcacaagcaaagccagagggaagcagcgaatatctgtggacacctgctctgcgccgggccgcccgcacggctccagggcaagctcggacctactctgtgagccgtcattttgccccattgtagacaaggaagccgaggcctccgggcagccgtcgtgggtaaatattcgatcccagctctgagtcctgatgtgcggtggtttccagtttccaaggggtccccgtcacggccgattccaaggtagcaagcagacagcactgacggggttaggaagagacggagtgggaacaacacggcggcgttccctccccgtgagcgtgaagcgcggtcgatgccccgcaacggtgcgaggtgagcagtttccatgtttatcaccgtc

SEQ ID NO: 343472 - DNA, 284 bp, Homo sapiens
  chr18:76534718-76535002
  hypo
cgcctgcagactgagcccagctcttaaccccaccgatgtttccaggttccctggcacccgctctctcccgaggctcagagtgggcgttggtgtggaacagcccctaagaggcacctcggccttcccggagccccggaacgtggaggctaacccaggacagagacggtcactgcaggagaaaagacgacaccgtcagtccttcccccggtgcacaaccgaggacctcctccgcatttgcccctgcgtctgaggcagcatctcgggaatctgcagtctccaagtgc

SEQ ID NO: 343473 - DNA, 178 bp, Homo sapiens
  chr18:76552775-76552953
  hypo
cgggtggcgtgagactggcgggtggtgtgagattggcgggtggcttgaggatggcgagtggtgtgaggacagcgggtggcatgtggatggtgcgtggcctgtggacggcgggtggcatgaggacggcaagtggcgtgaagatggtgggtggcctgtggatggtgcatggcctgtggac

SEQ ID NO: 343474 - DNA, 209 bp, Homo sapiens
  chr18:76626259-76626468
  hypo
cgcggctgaacatgccaagctggctagagggagggtgacagccgcagccgaacctcagagctggctagagggagggtgacagccgcggacaaacctgcagacctggctagagggagggtgacagccgcggccgaacctgcagtgctggctagagggagggtgacagccgcagccgaacctcagagctggctagagggagggtgacagcc

SEQ ID NO: 343475 - DNA, 274 bp, Homo sapiens
  chr18:76653387-76653661
  hypo
cgcaccacatgactctatctacgggaaacacccagcagccagtcaccgaaggctacacaccgcacaactccgtctacgtgaaacgcccagcgcaggcgtgccggcacatggggtgatgagcgtgctctaaaggtgatcgcggtgacagactgcataaatctaggattctgccaataccctgaattgtatactttcagtgggtgggccgtacggtgtgctaatttcgtctcaataaagctgttataaaaaacaaggaaggcgccctgctcctttt

SEQ ID NO: 343476 - DNA, 1028 bp, Homo sapiens
  chr18:76685353-76686381
  hypo
cgcaagagggcgtgaagccacgcggtcgcacacctggtaccgcgcacagtgagaaaggagggcaagtgcgctgagacccaggagggagggcagccctcccctgcgctgctgaggctcgtttctttcaatgtgtccctggctctgtgctgtatcgtgcgtttcagtgtgcatgaaatatcttgtgcaatcatttacgtgaaattagagctagtaggaaaatgtatcgtcaggcgtggaagagcgcactgcaccttctttttacttgcgcgcacctgaggattgtctaaaatccaggcctcacgggactcccagagcccgtgctcgtcacagctgctggctacagaaacacagcctgcaaagtcggcctcaccgccagccagacgagcccagccagtttccacgagcaggggagggcacacccggaggccaccgtggaaagcagcctggctgccctcgggaagccacacgcggagccgccgcggcccagcactcccacccctcgatgtgtgcccaggtcgaaggaaggcttgccacccgaaggcctgcacgggaaagctcacagcagcgttctccaaacagccaaaacgcggaagcaaccccgatgtgcgtgggctggtgaatgcaggcccagcgcggagtgcgcacagcccggaacggcattcagccaagaaaagacccacagccgggaacagcatattcagccaagaaaagaaagggcggcctggggcgctctgcaccgcgggtgagccgtgagaacacggcgctccgggagagaagccagcacgagacgctgcctcgggcgcgactccatttacttgaagtccagagcccgtaaatccgcgagacagacatggaggagcggcttaccaggtctggaagcagggaggggagtgagggactgctgaggggtgcgggtttcatgtggggccatgagaaggttctagaattagatggtggcgatggttgctccacgctgccatgggggcagctgagggaaaggaggtgggatcggggctcggccagctctc

SEQ ID NO: 343477 - DNA, 271 bp, Homo sapiens
  chr18:76999776-77000047
  hypo
cgagagcattgttttgtgagggcggttgatcatcagttaattattacacggaggcgttactgaagaggcatctgaatgtggctgggagagcatggttcctgagggctaagcgttcccaaaggatgagcggagaggcttgctctgcctgcgtccccatcagcggtgaccagcagatcaccacgcctcaggggccccacacccgcggtctcttcctagagctgcagtcccaagcttgcctgcgctctctggaaccctccagagtgttctcagc

SEQ ID NO: 343478 - DNA, 162 bp, Homo sapiens
  chr18:77076178-77076340
  hypo
cggaaacaggattattagagagctcctgactgagtaaagaaaaatctaaatgacaaatggccggtcgtgcaggtggagattgcgttctgtggttgcctgcgccatccctgagagcatccagagaaaacagggaaaaatgtccactgcaaccttccacccgcc

SEQ ID NO: 343479 - DNA, 232 bp, Homo sapiens
  chr18:77083049-77083281
  hypo
cggtaattgggatacccgtcacctcaagcatttatcgttgcttcgcgttagtaatcctccgtttatcgttgcttcgcgttagtaatcctccgtttatcgttgcttcgcgttagtaatcctccgtttatcgttgcttcgcgttagtaatcctccgtttatcgttgcttcgcgttagtaatcctccgtttatcgttgcttcgtgttagtaatcctctgtttatcgttgcttcgc

SEQ ID NO: 343480 - DNA, 284 bp, Homo sapiens
  chr18:77126115-77126399
  hypo
cggacacctgggaggtgcagaactgtagggaagagacccgtccgtggtcgctaaaggtttgagtgtagagggtgaccggagaggcatcccgagggggtgtgggtgtggaagctgctctgtctggcgcggtggtggcggacacctgaccgtgcctctctcagagcccgctggacggcaccagcatggagctaagggaggaggaatgcagacagcggcccatgaaccgcagaaccacactgtgggctgggaagaaaggagctcttttcagtggccttgggaaaggc

SEQ ID NO: 343481 - DNA, 843 bp, Homo sapiens; identical to SEQ ID NO: 335856
  chr18:77159885-77160728
  hypo

SEQ ID NO: 343482 - DNA, 143 bp, Homo sapiens
  chr18:77198679-77198822
  hypo
cgggtggtctgggatcctgcctcagccgcgcgggtgagaggggcgggcgggtcaggcgaagactcagagtcaggaggccagactggccccagggagggctcctggccataccccaagctcaggacgcagggtggggcgggccc

SEQ ID NO: 343483 - DNA, 575 bp, Homo sapiens
  chr18:77270852-77271427
  hypo
ggggcatcctctgccggggcatcttccgccggggcatcctccgccgggacatcctccaccgggggctcctccgccggggcatcctgctccggggcatcgttcgccggtcttgtcgctgcggtggaagtgtcgtgttcccagccaggctgggagtggtcgctggcgaggcctggcgtgggcccgcggtgtctgtcagggtgccctgggccagccccgctgattcgatttagagctaacgagagtccaccaacggcaattacaggaacctaatggccttcctgccgcaccgctccgtggcacccggctcgctgtgatgaattgctcattatgtgcagtgttggaatagcctccacaagattaataattggataatcaatacagaaattcaatcttggggtgtttttttcactccggggtcaatatgtcctgaagattacaaggcccgactctgcctcccccctccccgctgcttccgcgttgggagtttggccagcacctcgccacacgatgggtcatggtgcgttgtctccgtacctccgtgacttttctattctttgcaaacagcaggttctgcc

SEQ ID NO: 343484 - DNA, 799 bp, Homo sapiens
  chr18:77307943-77308742
  hypo
cgaaggcctccagggccctctgttggctgctgacccagggccttctctagagcacctgactcgggcacacggaggctgctggaggagtgagagagtgagtggggggaggaattgcaaccaaattcagaatccgcccggccctgaggccgccccttgcctgccacccacccgggtgggggctttatttcgactcaggcacaggcgcacctgccggacccccggtgtctctgcgactccttctccgcactggcctgggcccgggctcccagccctccgctctgtctcgctggggcaaggcgtccctcactggccagttctgacattggtcccgggggagccgccttccacctgctggccctgctggccctgagtgtgactcagccgtgcccggcaggaccacgagacgtccgctgagcacgatgtctacctggcattcaaggtaagtcatcaagcgccccccggttaggctggacgtgtctgtgagggttccggatgagcctggcattgggatgagccaggccggctgcggtttgactcagtgagggaagaggcctggcttgggacaggaggaagctgcgttccagcctcaggggagcctccttcccctggccgcctccttccgcaccctcaacgcaacaaaaaggtgatttcagaattgtaattactaaagaaaacattaccaagaacgactctgcagcacccctcgttcacgtccccactcagcatctccacgcgggggccacgcgtccgtgtttgctgccggcagccatcagcatccgcaggggtcccccgtctccgc

SEQ ID NO: 343485 - DNA, 273 bp, Homo sapiens
  chr18:77313826-77314099
  hypo
cgggacttcagcagcacgcggagcctgaggctaaatgctgcaaaacacagcaccggcctcccgctcccgttcccgcaccctgaggacgcgctggctgattgtggcacgcgtgccttccgagcccagatgtcccttcctgacacgccggcagcagccaccgcggattgttggcctctttgccgttctgccttaagctgacgttttggcgatgttggtgctggaacttcaaacctcggtgtggaaggaagggacgccgaggcccctggcctgccc

SEQ ID NO: 343486 - DNA, 240 bp, Homo sapiens
  chr18:77329763-77330003
  hypo
ggtacagcaagacacgccctcacctttaccgtctcagtacagcaggacacactctcaccttcaccgtctcagcgcagcgggacacgccatcaccttcaccgtctgagtgcagcaggacacgccctcaccttcaccgtctcagtacagcaggacacactctcaccttcactgtctcagtatagcggtccacgccctcaccttcaccgtctcagtacagccaaacacgccctcaccttcacc

SEQ ID NO: 343487 - DNA, 122 bp, Homo sapiens
  chr18:77334284-77334406
  hypo
cgcattctgcgtgtgtcccaggaggaccctgtgcggtgactgttccacactttccacatttgcttctcctgcgagtcgcaatgggactgcgtgtgccgctggcccctggcattgcacattgc

SEQ ID NO: 343488 - DNA, 202 bp, Homo sapiens
  chr18:77336028-77336230
  hypo
cgggggaagcgctttcagatgaactgcagggaacaggtgaagagtgtggacaccggagcatggggcggtgagaagacacaatacgaggcctgccgtccgaacgcggaccctgcagcccctgcggcgggaagccgtgaacacaaggctgagtttgcgcctctgatttgcgccacgtgatgggacttgccggggcctccctgcc

SEQ ID NO: 343489 - DNA, 403 bp, Homo sapiens
  chr18:77338977-77339380
  hypo
cgcgccgagtgtcctaacacagttgccacacggctccatgtcctgtgcacaggccaggggttcgagtgggcatcagcaatgctcacttcagagcccctccgccacgacgtggccatgtgcacacagctccgtggccagcgctggaaactgcgtctcctgcctccagctgcgttacttggagaagcaggaacctctccatcctcactttccatccgcacatccagggccgcccacgtgcacccacaccgtgcgctcactgtgtggcctgtcgagaacacagtgtcctctgcccctgatttcccaggagagtcgcacgtctgtgatggtggtctcccaggcacgcatggccatggagcacgggaacgtgtgcgcctgctgggagcacatgggaagactgcacgcc

SEQ ID NO: 343490 - DNA, 770 bp, Homo sapiens
  chr18:77358223-77358993
  hypo
cggccctggtttgggatgacaccgcggctgtgatctcggcagccacaggcttccccgtccgactcggccgagaagcctctcctgccacctctgagctctaggcttggactctggagtggttgctggagtcacttcccaccgtgccgggcaagggctgcaggagggcacagcgtgcgggacgctggcaactcacagctgcctcccagccacaccccccacctcctgcaggctccagggccctttgtctctgagaacgagagctgcatcttgtccagtgggtttcacaggtctcaggactgggaatggcgctgggcgcgtggacaggtgaagtccattgttcctgctgctgccggtgtgagccgcagcccacgcccaccaccaaggaggcagaacggcggtgtgaatggagaaccactcatttgccaaatcatttaaatcagacttttcacagctgagaatgccaccgcaaagcacaaatgactttgttccagagagaaaagggagagcagggcaccgaggcagaccacgggaacacgagcagcgccttccacgctgtccgggcagggcaccgaggcagatcagactgcagcacagtgtctggggagccctctcgaccagtaaggaaagtggcacttgaggctgagaggaagagagcgattccaggtgaaaggactatttttaaagactccccagctagccggtctgtttcttcattaattttccttaaaagctccacttgtgagacaggcaaatgctcgccacctgccccc

SEQ ID NO: 343491 - DNA, 49 bp, Homo sapiens
  chr18:77456042-77456091
  hypo
cgtgccggagttgatggtgagctccgaggtgagccgggcatcagtggcg

SEQ ID NO: 343492 - DNA, 710 bp, Homo sapiens
  chr18:77474501-77475211
  hypo
cgaggcactgaggtctcagagccatctccgcccgtgagagaccctgagggggtaacgcaggcccctggagtggagcccagcaatggcctggagaagcctgcacgggagctgaacggcagcgaggccgccaccccgcgggactcaccccgccccgggaagccagacgagagggacatctggccccctgcccaggcccccaccagcagccaagagctggcaggcgctcctgagccccagggatcctgtgcgcagggtggccgggtggcaccgggacagcggcctgcccagggtgccacgggcactgacctggactttgacttatccagcgacagcgagagcagcagtgagtccgagggcacgaagtcctcctcctccgcctctgatggcgaaagcgaggggaaaagaggccggcagaagccgaaggctgccccagagggagccggggcgctggcacagggcagttccctggagccggggcggcctgcagcaccgagtctccccggagaggccgagcctggcgcgcatgccccggacaaggagcctgagctgggtgggcaggaggagggcgagcgggatggcctctgcggcctgggcaacggctgtgccgacaggaaggaggcggagaccgagtcacagaacagcgagctgtcgggggtcactgcgggtgagtccctggaccagagcatggaggaggaggaggaggaggacac

SEQ ID NO: 343493 - DNA, 411 bp, Homo sapiens
  chr18:77497998-77498409
  hypo
cggcctcccccgcaggtccccgcctccccccgcccgccctgctcaccgcccccgggagttgccttccccactctctggggtgttctctgtctctgcattttggtggagtacatctcccagaagcttcctgagaaagcgtctgtcctgtccatacgtccgcagtcagcgggctgcgtaaccccaggtggcagcatctccttgaggatttagaagcacggctcccgtcttcagctccggggctgctccgaggccgtccgaggtaacctcggaggctttgtcttgcccgcctgttagacaggatgtggccctccaggtcctgccgacatcctcagtacagacttgtgtcccgaggatttgccctgagaacttggtctccagagccttcttgcatctgctgcggggccgtgggcc

SEQ ID NO: 343494 - DNA, 1056 bp, Homo sapiens
  chr18:77508739-77509795
  hypo
cgacagagtcatgatcagaggcctttagagtcatcattatcatgtctgtgtgtgagccgtgactgcctgggagccgtgtctgcctgggagccgtgactgcacatgagccgtgtctgtgtgtgagccgttctgtgtgtttgccgtgtctgtgtgtttgccgtgtctgtgtgtgagccgtgtctgtgtgtgagccgtgttggtgcatgtgcacagggctctccagcgggagctgaggtggtcccttccgtgggctcggttcaggtcctgtggcaccctgccaagttatgctggcgtttctgaaggtgtgtcctgctgtcaacagcactctgggtgtttttgtcggccttgtgaggggaacatatttctaaacctcaaacagagagtcacagctggcatttcccattctttgccatcctcttgctgccattagaactctgccacggatggcttcctcgcttgattttagaaagaaaagaattgttggaactggttcttgcacctctcgccctccccctcctctccctgcttgccccagggtcccgcctggctctcgtctgccccgtcttcactttcggtcggggcccctgcccctgcccctgctctgctcagtgcccctgatacgtccaacccagcgtcgctgtgagggagtcaaccacacctgccagcacccccgagtctggccccactaggaggggccagggctcccttgagcaaggcatcagcacacaggcagggagccgggcaccagactgtgagggtcgcgccccgtgcacacgagatccaggcccgccccctcctggacttggtgaccgtcccgagctcgacctgagagggcacttcggctctcctgttcacagtcatgactgccccctccccgaggtcagcgccatgcactgctctgggggcctgaaacaccgcctctgttcgcaagggtctcctgtcccgtccacctgccagtgggttgagctcttccaggggttcgggacacccctcacggcagcaccttcacgtttacgagaactgtctctgtcttgttttgtttcaagttctcaaaac

SEQ ID NO: 343495 - DNA, 42 bp, Homo sapiens
  chr18:77510442-77510484
  hypo
cgtttaaaacttggacggcaggtattagggcgtgcacttccc

SEQ ID NO: 343496 - DNA, 187 bp, Homo sapiens
  chr18:77512029-77512216
  hypo
cgcagtgggacgtcccagcacggcaccaggagggagggtgtctggcaggacatcaggtggttggaatttcagggctctggggatctcctgggtgtgccccgatcaagtcggctcacgtcacagaaaccaggtgcacctgcagcggctcctaaggaaaacctagtggcactggctggttatgcagagg

SEQ ID NO: 343497 - DNA, 268 bp, Homo sapiens
  chr18:77535504-77535772
  hypo
cgatgggcgggtcccgtcctgggtggggcagagcgggatggattctatcgcctgctcagaacgctgcacgatgtaaaactggtacttgccagggacaagaaggaccattcagctttgggacgtgaccaggaggtctcagagagaagcaaacagctgcgtccctgtgctgaggccgctggcgtgggcgcctgtcctggagcccggggtattggcagcgcccagggggagcccagcgacccattgtggctccacatcccacaggttcacc

SEQ ID NO: 343498 - DNA, 736 bp, Homo sapiens
  chr18:77542642-77543378
  hypo
ccgactctgcagcccggcgactgcttcccaggtgactgtttccagagtcaggtgttggccgtggtcaggttgacctgcctgtttgttttctataagctgtgtgtgttgtgcccgggtgtagatgccctgaggtttcacggccccccagcaagcagccccaggcccggcaccggatgggcccttcatacccattcactgtaacagacaagcagacggatgaggccatcgtggtccctctgaataaacgatgcttcacagaagtctcccctttcaaaacacgtacagcgaatgactcgggcttcagagccaccctggggtgccgtcggctggtgggtgatggagcggctctgcctggctcctctcggctctggcgcggcaggtcttcctgctttccaagcccgtgtccctggtgccagcacagaactgaactccgcccttgagtcgtgcgggacgagaccccgtgctgcgggcgcagtgccctctgtgggcggcgcgtggtggctgtcctccgtttcccacccggcgtctactgggccttgtccagtatcactgggagctgcaggctcggctagcaggtggctcccgtgccatccccgtgagctccgcctggccctgctgctcccgcccggaaagctcagacccataacccagcccacttggcagcagcgtgccgcctgatcggcaaggtttactccctttgaaaatctctgttgggtggccgggcgcggtggctcac

SEQ ID NO: 343499 - DNA, 587 bp, Homo sapiens; identical to SEQ ID NO: 225689
  chr18:77547934-77548521
  hypo

SEQ ID NO: 343500 - DNA, 231 bp, Homo sapiens
  chr18:77549975-77550206
  hypo
cgtccgtgcccctccttgtcccggggagcacggctccatggcgcccgctgtggagctgcggttctcaccatgggcaggtgcgaggccgtagactggtgtggtcagaccaggggactcctgcgttcaccctgggccccggagactagtgatcccgctccccagcagagcaccgccaaaagccccgggtgccggagctgtcctgcaagaatgaacgggcaggagacacaagag

SEQ ID NO: 343501 - DNA, 138 bp, Homo sapiens; identical to SEQ ID NO: 272505
  chr18:77550236-77550374
  hypo

SEQ ID NO: 343502 - DNA, 1455 bp, Homo sapiens; identical to SEQ ID NO: 335858
  chr18:77557780-77559235
  hypo

SEQ ID NO: 343503 - DNA, 576 bp, Homo sapiens
  chr18:77608097-77608673
  hypo
cggtgaaggcagaatgtctgaaaccctagcgtgggctcagcagctgccaggggccagtgatgaacgccaacctcatctgtcctcgatccctgaggctaatggtgacgcatatgcttctaagtagggtttgccttttgcttggaaggaaatgttataattatttcaccctaacccgctgcattcgttgcttagagctgcgcagcctaaaacaccagaaatgtattctctcaaccccgggagtcccaagtacagagtaggggtccgcaggcctgtgctgtctctgaaccgctggggaggggcctgcgttgccgctcgggctcctgcagcaccggccatcgtcagccctccttggctgtgacctcggcctctgcatcccacggcctcagtgtcggcctctcccctcttatggggacatccgtccctggactcaggcccaccctaggggccttgtcttagccacacgcgaaaagaccctgtttccccatgaagtccgtctcacaggtcccggggctgagactcgcacacacttccggggacgcagtggaacccacagctctgcctttgggcagcagccgc

SEQ ID NO: 343504 - DNA, 701 bp, Homo sapiens
  chr18:77609451-77610152
  hypo
cgtccgacctcatccggggcaaggtcgtccgcgtgcaggagccgcatctggacaggccgcacctgccttccctccccgccttgctctgcgtcagcctaggagcctcctgtcctggccgcgggttacaccaagcgcggcggtaaagacaaccgttgtttcttagctgtcgtggtttctgagggcccagcgcggacgcttgcctttctctgctgcgtgaagtctgggcctcggctggaggcagagcggaggctggggccaccggaagccttgttcttgcgtggctgggggctgatgctggctgccggccgccctgggtggcgtgggagcaggagcgcgtggaagacccagcctctctgagagccccccacgtaatcacacagtgagaggtccgctgtggtttagtgggaggaacccgagactccacccaggctgagtgggagggaggcgagaccccacctggccgtgggaggaacccgagaccccacccaggctcagtgggagggaacggagaccccacctggccgtaggaggagtgtcccgcgcacctaaagggctgacagggccgtgtgaaaacccgccggggtcgctggtcctggctctcctgaccttctgcctccccgctaccctcatccatgtacccagcacacacgtgcacacatacgtggataaatggaataaacataaacttcacccagacagcc

SEQ ID NO: 343505 - DNA, 113 bp, Homo sapiens
  chr18:77616298-77616411
  hypo
cgtcagagccacgatgctccgcagtaataacgcaggtgactctctgtcccttagggtgaaactggatgttcattttccaggtcgaagccgctggtctcagctgtgttttcacc

SEQ ID NO: 343506 - DNA, 620 bp, Homo sapiens
  chr18:77627972-77628592
  hypo
cggctgctgcctgcagtctgggtgtctggcggccaggctgccttcccccgtcgtccccatgaggtccaggtcctgatcgtgcttccaaaaggtgctggagtgtttggctgtcctcggtcgaatatccaggagggaaaattcatttgtgtcacgttagagaataggagaagtttgggctgccccagctacagaagtcaccccaggaacaccagccctaacccttactgtggaccccaaaaccccagatcctctcagggacaaccctgggctccgtggcacccagcccttcacactcctggcacgcacccctaaattgcttgtccagttaagaagcagtcgccctccgcgtggggcctggtgacccgtgtccgagcgtccggttaagaagcagtcgccctccgcgtggggcctggtgacccgtgtccaagcgtccggttaagaagcagtcgccctctgcatggggcctggtgacccgtgtccgagcgttgcagctgctgctgactgaccgaaggtctttttcggaagcgattcagttgtgtgggtgaagagccaagaaaaggtggttctcactcctgtcctaagagaatatttcaaagcatgagaattggcgtgttggtgac

SEQ ID NO: 343507 - DNA, 796 bp, Homo sapiens
  chr18:77635961-77636757
  hypo
cgatgtccggcacgcagtccccaggcgggcacactgcccagcagcccagtggcaggagctcagagctgacttgcttcttgcccaggtctggggttggtgcagcgcccgcagctcacgggccacagcagcggaaggtctgcggcattttggaccttgctgttgccggggcagtgggtgttggcgccacatccaggacccatctcccgcctggtgccgctgccatcacagtgaagctggactgaaacccacagacaggtccagccctgccgggcaggcgtgatcaggctgacactgcggaaaagccccactaggcaggtatgattgagctggcgtctccgaagggccccagccaggcagggatgatcgggctggcgctgtggaaagttgcaagcacactgtgtgggcacttggtggggctgggctgggtgcagagcacctaatggagaggagtcacctgcggcgtggccactgctgtgggctgcagttcccgggaaacagcagtggaaaccagcggcccagggacaggacaggggctgcaggtgctgagccgttgttcgacccagttgaattctaactcgtgacttggaacgattctgtcccgggaaggatgccctcttctgcatccacaggcagtggtgccctctgcgagcagcttgctcacctgtgtctgtgacgctggtgccctgagggcagggccagccccctctctcggcacagctgggtgaatcatcaacgacacccttggcaccgtgagcacttgcacctgcagaccgcctggtctcgctcttgggcacca

SEQ ID NO: 343508 - DNA, 235 bp, Homo sapiens
  chr18:77642685-77642920
  hypo
cgcggccggcaaggctcaggacctgcaggccatggagtggcgaggctgccatggagtggcgaggctgccgtggagcgcggaggccgggtacacctgcgcgtggagcgcggaggccgggtacacctgcgcgtggagcgcggaggccgggtacacctgcgcgtggagcgcggaggccgggtacacctgcgcgtggagcgcggaggccgggtacatctgcgcgtggcacgcggaggcc

SEQ ID NO: 343509 - DNA, 400 bp, Homo sapiens
  chr18:77644520-77644920
  hypo
cgatgcagtggaggagcagggctgggtctgggcctgggcctgggcgtggcagctccccaggcccacggggcaggaattctagattctgggattcctttcatcgttgctttttgtgttttctacctagagcggagaaatgtttgtggtttccaaagagaccggacacgcccaaggcccacagacacgtggcttcgtgatggggagccacgggggcaggggtccgcccggctctgtgttcctcgggggggctcatcctggggcccaggaactcgggagcggtttacccacaggttcctgtgcgtgggagcaaacttgcttttcccattcacagaaacacagtagcgtgcgcgggtcggtgatgcagccaagacaccatccctgaaactgtgataatgagagc

SEQ ID NO: 343510 - DNA, 675 bp, Homo sapiens
  chr18:77808879-77809554
  hypo
cgtcggctcagtgcctcctagaaagtggagtgtgggcacgtttgcaggggatccaaccaggcgtctgctcagtgcctcctagaaagtggagtgtgggcacgtttgtaggggatcccaccaggcatcagctcagtgcctcctagaaagaggagtgtgggcacgtttcagagaaaactggcttaggcctccctgtttctggcgtggccttccctgggagcgagttagggacacggaagctcacccgcttctgaatgggtccactcctggggatttccgcggccttccctgggagcgggttagggacacggaagctcacccccttctgaatgggtccactcctggggatttccgcggccttccctgggagcgggttagggacatggaagctcaccctcttctgaatgggtccactcctggggatttccacggcctttcctgggagcaggttagggacatggaagctcacgcccttctgaatgggtccactcccggggatttccatggccttccctggatgatccactcctggggattttccgcagctctccagatgacgtgcacgcacactaaacacccagaagttagggaggcactgatccagtgaagtcctcagatcaaccttgtgagctttttacaagtacctgtcactgttaaactgctgatgaaatgtgaaac

SEQ ID NO: 343511 - DNA, 912 bp, Homo sapiens
  chr18:77943609-77944521
  hypo
cgcatatacactcagacatgctcgcacaccctcacacatgcatataccctgacatgctcgcacaccctcacacacgcatataccctgacatgctcgcacaccctcacacacgcatgcacccacacaggcaccctctcgcatatactgtcacatatgcttgcacaccctcacacacgcacccacacatgcatacaccctcacgcgggcttgcacaccctcacgcacgcatgcacccacacatgcaccctcacacacgcatataccctcagacatgctcgcacaccctcacacacgcatataccctgacatgctcgcacaccctcacacgcatgcacccacacaggcaccctcacactcgcatatacagtcacatatgcttgcacaccctcacacgcacccacacatgcgtataccctcacgcgggcttgcacaccctcacgcacgcatgcacccacacatgcaccctcacacacgcatataccctcacatatgcttgcacaccctcacgcatgcatgcatcctcacacacatgcacccacacatgcatacaccctcacaaggctcacacaccgtcatgcacacatgcaccctcacatgcttgcacaccctcacatgtgcatgcaccctcacacatgctcgcacacccacacatgctcgcacaccctcacacatgcatgcaccctcacacacgcatatgccctcacatatgcttgcacacccacacacgcatacaccctcaaggctcgcacaccctcacatgcaccctcacacatgctcgcacaccctcacacatgcatgcatcctcacacacgcgcacaccctcacacacatgcacacacagcccttgcacacccccccaaaggatgcacacacacatccctgtgcacacgtgcactcatagctgctgctctc

SEQ ID NO: 343512 - DNA, 153 bp, Homo sapiens
  chr19:379979-380132
  hypo
cggcaggcggtttcgggcgctggcctgtgacgccgtcctgggcaggcgcgtgcatctgaatgctttttacctggtctctcgactgttgcgttgggtaactcccatccatatcaccagtttcacaccaggttccagggacgaggatgtggacac

SEQ ID NO: 343513 - DNA, 481 bp, Homo sapiens
  chr19:403382-403863
  hypo
cgagacaccacgcaggcgcagaatccctggatgacgcccacttggaagtggaggggggagggcatgggcagctgcagctcccagacaccagcacacacaaacgcacacacaagtgcacaccagcagcgacacaggcacacacaagcgcacacagggtcacacatgcatacacggctcacgtgcttacacgtgcacacgccagcacacaggcagctatactcgagtgcctgcaggcgctcacctggcactgtcacatacgcccaacagatgagcacggtaacggcacacgcagtcacactgcacacacatgcggaagcacatggcgacgtgtgtgcacctacctggcacgcacacgcacacacccgtgcagcctagcgatgagtggctggggctgaagaggctacaaggcgcccgtagccctgtcaacccgtcccaggccctgactggggctcaccaggccgcggtcaggaggccgggctac

SEQ ID NO: 343514 - DNA, 899 bp, Homo sapiens
  chr19:407244-408143
  hypo
cgttgaagacggggcggcggctgttcttcacgatggtgctgcgctgcttctgcagcttgcccggcaccaggcacaggcccacgcagcagttgatgctgcgggcgtcgcacaggcggtcgtagaggccctcggcggccagcaggtgcacccgcaggcgggcctggccggcctcgtactcggccagcagccgcacgctgccccgagggcccacgtggaccgtgtgctccccacgcgcctggcccgactcggggccaggttccgggggtgcccggcgggtcaggcggcgccggctcccggggctggcgtccggggtgctgtcgtccgcagacagggagccgtggcggcccacggagtgccggagctggctcaccttggcctggctgtcctgggcgaaacctttgagcagagacacggagcgggacagcagaggggacccgaagggggaggactcggccgaggaccctgtgtcgctctccccgccactgaagtagcggccggggctcatgagggccccgccagcctccctggggcccccatcacccccgttggccttggcagctgcccggcggcgcccggcccctggggagcccacctgggccagagccccgtgctcactgtggaacagagactccttgcgcctcgtgtgggggctctcagccagcatggcgaagccgtaggacgtctgggccttgggcaccgagggcagggacatggcaccctgggcctgggggtcggcgtcagtggcctcctcggacagccagtcctcggcactctcgatctggatcacgtgccgggtggctgccttcagcaggctcttgctctcggctgccagcttggcaggcagccgggggctccgtggggtctggcggggggccgcagaggccaggttctgttccgac

SEQ ID NO: 343515 - DNA, 829 bp, Homo sapiens
  chr19:418231-419060
  hypo
cgtcctctccggcagtgcccacccctcctctgggaaggaggcctggacacccagcacgccgcaggggtccacaaagaccaggtgacgcccaccacagccgaccgcagtgtcacggtcatggctgcacgctgccaccctcgggcacatatccacccacgggcagtgacgcgtgtccacacacaacctgcacacaaaggctcacggcggccaaaaggcggaagcagccccagcgtccatcagcggatgaacacacaaaacgtggtcccctcacacagcgggacattatccagccgagaacaggagccaggctctggcccgggccacggcgcaatgcccctggaggacgtcacgctcagtgagagacgccagacacagaaggacacacagcgtggaatcccattgctatgaaatgtccaggacaggcccatccacagagacaggaggcggatgtgtggggttggagctggggaggggacagggagtgacggctggtggggacagggcttctttcggggctgacagaatgttctggaattcgacagagatggttgcacggctcggatgctgaacacccctgagtcgtgccctctagagggaaaggcacggcacgtgaaccgggtctcaattttcaaatcagaaaagaatctggcaaaggaggcaaggccagcgacccacggcggcagccacacacctggctcagggctcccgtgagaccacgccacgcaggtgcagctcactctcggcggccacgatgggctgcccgttctgcaggtggtggtcgatcaggtggctgatgctctcaaacagcacgtccttcgtccgtacctgc

SEQ ID NO: 343516 - DNA, 246 bp, Homo sapiens
  chr19:485134-485380
  hypo
cggaggaccctgctgacctgcttagttgtttatggagggtcattgccgtgctctaccacgtaacacacgtacacacacacacacaggtgcacgtttacaccacgtgggtgcgcacgatgaggcacacacaggcaggcgcgcacacacacgcgtgctcacataggaacacgaagaggcaggagccgggcgtgcccgagccccgtggcgccctgggcatcccaaacaccgcctgcccagaacaggtgc

SEQ ID NO: 343517 - DNA, 280 bp, Homo sapiens
  chr19:491326-491606
  hypo
cgacgtcgtgtaaacaccagctctctagtctcaaacccggcgagggcggttcatagacaatttcagtctctcgacgcgacgccgtgtggcttgtgcccttctagccacctagaccctcgggagaggcctgtgcggctcctggctgggcccccgtcttcaaagcagcttttgagtggccctttgacccgtgagacagggccgtggaagctggggtgagcctggagatgcccccgggagcaccaaggcgtcagagcagctgaccagggccccaggcctcgcc

SEQ ID NO: 343518 - DNA, 325 bp, Homo sapiens
  chr19:530225-530550
  hypo
cgtgagccaccgtgcccggcctgtatgttgatgcagctgtgtgtacccagggcatagcaacaatgccactggcacagtccgagggcagggccacccgtcacgggcacgactcaggggaggctgggctgccccgtcctcaccacggccagttctcccgaccaagcttcacagcaaggagcatgtgggtgtctgggcagccactgagccaggtcagaagtcaggtggggtcacagtgatgcccggaatcagctggggtcaagactcaggtgggctgggcgcggtggctcatgcctataatcccagcatttgggaggccgacgcagac

SEQ ID NO: 343519 - DNA, 793 bp, Homo sapiens
  chr19:549193-549986
  hypo
cgcccgggtggggctgggggaatgaggctggcgggagggccggggccagggcagccgccgggcaggttcctggctctcccgttctctggggagtcctgtcaggggctggggggcggggaagcactggcaggggtcccgtttctcaggtgcagaaactgaggctcagacaggtttagcaacctgcgcaagaccacacagccgggaagcggcagagctgtgacttctgctccagccaagacggtccggcgggggaagaaggagcagggttcacagggccagcgggagatggggaggggacacgcgtgggccgggagcagcccctgtgtctccttgagcctggggataacaggcctggccctgctcccctcggcgggccctgctcccctcgtcccctcagcaggtgcagaggctgagctgcggtgtgtcgtccctgcagggtgactcgggcgggcccctggtgtgtggcaaaggccgggtgttggccagagtcctgtccttcagctccagggtctgcactgacatcttcaagcctcccgtggccaccgctgtggcgccttacgtgtcctggatcaggaaggtcaccggccgatcggcctgatgccctggggtgatggggaccccctcgctgtctccacaggacccttcccctccaggggtgcagtggggtgggtgaggacgggtgggagggacagggagggaccaataaatcataatgaagaaacgctcagagcccgcctgagtcccagcccacctctgtccatgctggctgtggggcttccgacaaacctgtttc

SEQ ID NO: 343520 - DNA, 112 bp, Homo sapiens
  chr19:557942-558054
  hypo
cgtgagccaccacgcctggccccttattgaacttgatggtttctccttcgtatctcagaagtcacaagctggaggatttaggtttgaagaatcacgatgccaaggtcaggcg

SEQ ID NO: 343521 - DNA, 834 bp, Homo sapiens
  chr19:581325-582159
  hypo
cggctccgagagcaggttcttcgtgagttcctcgcagggccggtcagagctacacattgagaacctgaacatggaggccgaccccggccagtaccggtgcaacggcaccagctccaagggctccgaccaggccatcatcacgctccgcgtgcgcagccacctggccgccctctggcccttcctgggcatcgtggctgaggtgctggtgctggtcaccatcatcttcatctacgagaagcgccggaagcccgaggacgtcctggatggtgagccgtctgccctcctgcccacatgccctgctctcggggtggcccagggccactcctggtccgtccctgccagccccaccgctgacccagagcttggaactgaggagccccaggcagggagttgatgggaccccgaaagaaagtgtgggatggagggtctagccccgggcagctgcggctcagtgggcagcgggaccccgggaggaggaggcggcacctccgccccacagcctcacccggcccttccctcccgctcacttggctgcaagccagtgtcctccgtggtgagccggcccttgctgctctgcatgatcaggctcgggaacctgaggtcagccatgctgtgctccggcagcccctgcctgcctcctcgcggagcccttctgccccttgggctgcgtgtgccggggcgaggcctgtgtggggcctgtgatggcagctcctggaaaacgctgtggggcaggggtgaggcccacgaggccatggggacagctcaccatggggagcacacctgcaggtggggagggctgcctttccccacagcactcagaagatgcacgtggcc

SEQ ID NO: 343522 - DNA, 200 bp, Homo sapiens
  chr19:601344-601544
  hypo
cgtgacgtcctcaaggggcatctgcgccgtggcctgggtcagagcctcactccttttcgtggctgagtcgtgttccatggtggacgggtcgcgccgtgtttgtccctccgtttggtgatgggcacctgggctgcctctgcctttttgctactgtggatcgagctggtgtgaacacagcggagtggtcgtcgtccgcagtc

SEQ ID NO: 343523 - DNA, 594 bp, Homo sapiens; identical to SEQ ID NO: 335865
  chr19:603411-604005
  hypo

SEQ ID NO: 343524 - DNA, 894 bp, Homo sapiens
  chr19:617561-618455
  hypo
cgccttactcagagcagaaccgcttgaccaggaatctggacaggtcctgcaggatgggctcgctgtgcaagcggacaaactgctcccggcacacctgggcaggagtcagaggatccccaggggtgatcaggcaggctctgggcaccacccctacccaacgccccagtgtgggggccccacccatgggtggactgaggctcagactacgggggcacctggttcatgacggagacatcagctgcgtgagtccagtaacagtcgtgcacagagacgaaggtcaggcccttcctgtggcagagcggaggactcctgaagggaggggagctcacagggccacccagtgaccagcatcctggccctgcgctcagccccctccacttgaggtccagggaagcccaccctcctgcaggcctcgccccacccctcgccccgcccctccccaaacatcctgggttaggtatcagtacagggggaggaaatgttcccagaagcctcctcgccccacccctgccgccccccacgctgctgtgggagcctcagctccgagggcggctacgaggtcccctcctgccagggccaccaccccgcatcctgagcattcccagctcccgtggccggtagattctgctggaacgacctccacgtgctccagatctaaccacacatcgcggtgccaagaaatgcccagcaggaaggggcagcgcccatgctcggctctccctgtcgggccacaggaggggagctgccaggaccacctacattcggggcacacagcctcagggcctctacacaggccccacagacacagcagatccactctgcccagtccctgcccccagctagacccagccttgccagctgtgccctgctagccagaagacgcccctgggaggc

SEQ ID NO: 343525 - DNA, 296 bp, Homo sapiens
  chr19:629529-629825
  hypo
ctgcactcacctgccgcgcccagccaagcatcacggcgttgtacatgtccagcgtgagcagcttccgcttctgccgctggccgtggtggacgaccagcaggtggtgggcgaggggcagctggtcagtgagcaggcagcacttgaagaaggccaggagcctctgctgctgacctgagagctgggcctgcgagtgctgccccgacggggcctgctccacatcgaggctcagcttcccaggggcctcctgcagcagccgggccagctgctcctcccaggggctctcgggggcctggcgc

SEQ ID NO: 343526 - DNA, 240 bp, Homo sapiens
  chr19:638348-638588
  hypo
cgaggtgtcattaaagaaactcagacgcctggggtggggccagtctcaccgctgtgggtcccatccccatcatttctcacaaggccctcagatcacccttccgcggtggggggcggacactctaagaagggaagacctgggctcctgctggcgagaaggcggtggacatttcttcagtgtctggtgccgcgccctctgcccagcgtgctccgtggagggtctcattgtcttcctccagac

SEQ ID NO: 343527 - DNA, 297 bp, Homo sapiens
  chr19:640789-641086
  hypo
cggtgtccccgccgggcggggggcactgggaagggggcccgggcccgctggctgccgcctgaatcaccaccatcagggcaggtaatcaccccctgtccttcccaccgctttcatctgggcgccaaggccctcattaggccgcacgtgacgagggcggacaggggactggctgggccggtccatccatggcgggcatggccaggcggggtggcctcgggccggggcagaggcctggctccgctgcctgacctggaacagtctctgcctctctccaagcctcggtttccccagctggac

SEQ ID NO: 343528 - DNA, 739 bp, Homo sapiens
  chr19:736036-736775
  hypo
cgcccctgaggacggttgacggctcccccatgatgaaggcaggtgggttggcccccaggctctgggccccagatccagccgctgtcagggaccaagtctcggtccggggggccgggtggggcgggggcgacaccgacctgctctccgcagcgtctgacggggccgtggttatgggggtggcagctggaccgaggccgaggctccgagcctggggtgggggccccctctgctttgttgccctggtcccacgccggcccacgcttccccgagaagacgggccccacgcatggcggctctaaccgacgcgacctcacggctttcattccaccctaatctcacggctccctcctggggcccgctgggggtggcgctcacgcctgaacatgctcgctgcaaatcttacctgctccagtcctcgggcagtaggactggctgccccgggagaaagtgggtgccccgtccctggaggcaaccaagccaggtccccagcaccgctgcgcttccgagaagcaggggaaggtgggggttgacgctgagtgccacacggtgctcaagtcaggctcgaacccctggtctgccgccttgaatttctccgcctgccagaggggtgggacctcagtacgccatcctggggcccggcacaggacaggagcccaataatgagaaatcgtcgcagtgggcaaaaccactgctatgtgagtgagctggaacagcacagaaagaaggcagagggccgggc

SEQ ID NO: 343529 - DNA, 182 bp, Homo sapiens
  chr19:739235-739417
  hypo
cggcgtgtccaaccgttggctggaaggaggcgtcaagtcctgggagcttggatggtcggggcgggggctgtgggtctgcagactgagccccagtctccgccgtgaccccgggcaaggcaggatctctctgggattcacctgctcctctgagaaaccaggaatggtggggctcgagggctcac

SEQ ID NO: 343530 - DNA, 240 bp, Homo sapiens
  chr19:752096-752336
  hypo
cgctgtgtgacctcagatgagcaggttctcctctctgggtcccagctccctctctcgaaaaccggagtcgaaaacggttccaaggtgttgcaggaagagtctcaggacgccgaggtccttagccaccgccgggccttgcaggggccatcttccgtcctggggctcttcccccgagggcagcgccgctgcccaagaatgccggccatgagagccgccgtggatccaggggtttttttggcc

SEQ ID NO: 343531 - DNA, 346 bp, Homo sapiens
  chr19:804907-805253
  hypo
cggaccccgtgagcgcccagcacgccaagctggtgagtggggctcccgggacggcgcccgccctggccctggcccggcgacgtctcacggtccctctcccctcagtcgctggacgggcagaacatctacaacgcctgctgcacgctgcgcatcgacttttccaagctcaccagcctcaacgtcaagtacaacaatgacaagagccgtgactacacacgcccagacctgccttccggggacagccagccctcgctggaccagaccatggccgcggccttcggtaagaggctgcccgacgcggcgccagtgtgcagagtggtctattagggccgctcagtccggagcc

SEQ ID NO: 343532 - DNA, 743 bp, Homo sapiens; identical to SEQ ID NO: 335868
  chr19:813409-814152
  hypo

SEQ ID NO: 343533 - DNA, 437 bp, Homo sapiens; identical to SEQ ID NO: 335869
  chr19:814406-814843
  hypo

SEQ ID NO: 343534 - DNA, 454 bp, Homo sapiens
  chr19:870962-871416
  hypo
ggattcgggggtcccggggcaggacacggaggaaggagtcctgtgtttggggaccaatgcagggacacacgcacctggcgaggccgtcgagctgcagggtggcagcactgccaggcagcgtgggcgcccggccaaactgcagacgaaggggctgcttgggctgcaggcggctaaccaggccgtcgctggctggcagccagtccaggctggggataagcagctggctgggcagcaggcagcattcatccaccagcgcctcgtccggctcgctcgctgggccctcatcgcgacctgcggagagaggtggcggaagtctcagcacccctgactggggcaccgcccggccacccgggacgtgctgggagcccctccagttcaggagcaccaggtcagggccccagctctgtctgcctggctgggtgaccccggggttctctcaccaggtcggggcccc

SEQ ID NO: 343535 - DNA, 119 bp, Homo sapiens
  chr19:874809-874928
  hypo
cgctgagctgggactgcgtcaccgtgctgcaacctggatgacacagtgagaccgtctctaaaagcctgggtgtggtgtaatcccagcctttaggctatatcccagcactttaggaggcc

SEQ ID NO: 343536 - DNA, 1431 bp, Homo sapiens
  chr19:883424-884855
  hypo
cgtggggcggtgcgtgaagagctgggcatggcggggaccaaagcctggcatggtgggcacgtggggcggtagggggagagatgggggagagatgggtgcggtggggactgtcccagtgacccccagctgccagggatgtgagacctgagaaaggctgtggcatgtgtgtgagacgtggctctcgggcgggtaacagctgggccagcaggtgaggacggctgcaggagacgaggaggagtgtcggagcccaggactgcccagtggcttggctgtgggcagatggtagacacagacgtgcccagcgggggcaccgggcagtgaaggtgcaggtctgtgcagccacacggggtggcgccaggtgctgctgcaggagccagcgcagcccaaactgcctggtgactcaccacgaggcccaggggaaggaatgaggcccaacaaggccctggggaccgggcgaaggaacgagccctgggagaaggaatggcagcagccctcttcacctgcctggtgactcactacaagccctgggggaaggaatggcagtggccctcttcacctttactgcctctgcggccacaatgggcagttgacataaccacctgcaggccccgggagccatcggggcctcttgacacgtgctcattagtggcttctgaggagcgcctgccccacctgccccacgtgcccccacgtctggccactccagggtccattagcgctaatcggcaaatgcctgtgctctcatctaccgggaaaacatctcccttctccagagcggaggccagcctaaaaaccaggcccgcagcctccgaggctctgaaaaccaagcggctgttctggtccccggtcatagcaggcgggcgtccctgcttcgctccagccccaggattttgtgccggaggtggggatgacgggcttggctccgtgggtgcggggggcccatcgggcggatagagatgggaatgggggccccagaagaggctgctggagaggtggggtggggtggggggcgtgttctcagcagcctcagctgacccgctgagccttggcttcctctccctgaaccaggttccggaggattccgtgcaccgcccctgcccggtctggcctgtcccctgctgcccgacggccccacccacagacccacgctccacagccgcccacacgcctgcagcccctcacggtgtccccgctggctgagcaacgacacctctcagcctcggcctcgcacagaatggtggcagccgccgcagcgggcgtggaaggatggaggagtctatacgcctaacacactcagaatgctggcaggcgcgcggtcacacccgagatcctagcactactggagatcgaggcgagacgatcgcttagggccggggttcaggaccaccctgggtgacacagcaagacctgcctccaaaataaaaaccaacc

SEQ ID NO: 343537 - DNA, 916 bp, Homo sapiens
  chr19:885374-886290
  hypo
cggtggctgggccgcctctcacagagaagggacctgcgggtgggattcggttcgggacactgagacgggagagcacgttggggggggtccgggggccccagtgtcctcacagggtcctcaggagagaatgtgggaggttgagattcagagacaggaagaggctgcgctgtggccacgaagcgggaggaaggcgccccgaaccgagggattgggcgcctccagatgctgggaaaggcagaaaatgggttctcccctggagcccccgggagggaccggccctgcccacaccacggtttagcccgtggaggcccgcgcgggtctccacccccaggaccctgagaagcagtgcttcattccaagcctgccagcccacgtgatggcctgcgcccgttcacctgctccgacatgtcccgggccaggaacttgaggtgggtgatggcgggaaacttgtccttgcggttgaggtcggtggtgcagcgcatgaacagggagggcaggatctccgtgtcgatacggcacttctcgctcaccacgctcacgcacaccttgtagaactgcacgggcgacgcgctgctgccgtccgccgtggccaccacgatgttgccgccgccggtgaaggcgatgtcggccagggccacgcggccgcgcagccggcacaggctctcggtggacgtcagcacctgcccgctgggcttcagcagggacacggtgaccaggccgctgaccgtcaccgcgatccagccctccatgggcttgccgccgaacagcgtgagcgacggtgagaacttgactcgggagaacttctccccgaagctggaggcgcccgactgtggagaagggagggagggaggaggggccgctcaggctcatgggggctgccccatgacccccagaaacacgcgcacagaagaaccac

SEQ ID NO: 343538 - DNA, 145 bp, Homo sapiens
  chr19:891455-891600
  hypo
cgggagacgcagcggagggtctgcgctggcccaggtgagtgatgatgggggcagcaagtggacactagctctctcccgaaggaagagcccgcagacaggcaagcggtggggcggctccctgtagccgaggcggggctgagtgaca

SEQ ID NO: 343539 - DNA, 511 bp, Homo sapiens
  chr19:899627-900138
  hypo
gcctggggggacacggagaagaaccgaagcagccgctcctcccaggtctccagcgtttcctggggagagcggcccggtggtcagggaactgcgggacctgtgggtggggggccagggaggtccagggcccccaggagcccacagcgctgggctcaaacatgacctctgacccaccacgtgaggctgcttaagtgtctctgaggccaccatgccacctcctgcctgtgccttccgtggaggaaactcctacacaccctgcagtgcccgccttcgttgcccccgccctcctactcagggccctggtgccgctgtctgtatcctgccctgtttcccctgacacgacctgcaccgggtgagaacctgtgcctgggaaacgggccttcaaaaaagaccaggcaggtagaaaagggaggcccggcaatcccccactcaccatggggatgcggctgcgcttgaggacggctcgcagacgccggctgatgcgctggaagcactcgcggggtgtataggc

SEQ ID NO: 343540 - DNA, 370 bp, Homo sapiens
  chr19:900863-901233
  hypo
ctccgcgccttgctcctgccctcatcctccaggtagcgaagaacccgctcctgctcctccccggagcggttcatgaaatcgttccagacctggaagagaggcagggaggcaggcttgccatgaaacactggggctgcgctgacatccccgggcaaatgggcacggtaaggccgccaagcacgtggacgcgctcctgcggtcacctctgtccactgaggggccgctgcttgtgtcgggccctgagctgagcgcagggaagcggggaaccggggtgggcccagctgtctcggggtgggggggattgaggtgaaacactcctgcaatcgttggagggttcccaaacgtgttgggcaggtgaatccaggagctc

SEQ ID NO: 343541 - DNA, 270 bp, Homo sapiens
  chr19:939405-939675
  hypo
cgcgcccggcctctcgatacacttttggttccagaagtaacacttgacactcttcttgcagagaggaagaaaatggaacgtttacagggagccccgagtccctcccttgacctctagggcatgagccgcatgttctccaggcctttctctgcccactcacacccaggaatgtgacctgggaggtatctaacgtgtgatcttccgggcaggtcgggaggttcctcccgccgctgccttcgaggagctgtttatcttgggtgcgttcgcgtc

SEQ ID NO: 343542 - DNA, 743 bp, Homo sapiens; identical to SEQ ID NO: 335871
  chr19:941824-942567
  hypo

SEQ ID NO: 343543 - DNA, 430 bp, Homo sapiens
  chr19:945745-946175
  hypo
cggcgtcgacatggccggggcaggcgtgttctggccccttgcactgcccggctcctgctgctggtgctgggctgcgtttctgttcagagaacctgggctgggagtgatgggaccgcagtctcccaccaggtgcctctttccaaatggacactcctgctgggcatgacacttctgaggctttctgggaccgtccaggtcccgtctgcagggaaccccaggacggagttaattgctgagtgcccagctctgggcaaagtgcttggaccctgcggttactccgagcccatttctcagcagggaaaaatgaggctcgcggaggcaggggcccggcgtccaggtgggagcatgagggcgtattgtgggtgggctggccggtctggggggcggggaccctgtacagaacgccccggccgcgtggagtggcaggttc

SEQ ID NO: 343544 - DNA, 972 bp, Homo sapiens
  chr19:955734-956706
  hypo
cgtaataccgggtcagaatctcagaggagaggaccttccgctcgccctggaagggcccaaggtgtgctggcctctacgtgcggttcttagccggggggctgcgtaacgaaggacctcaaaccgcgggcgtaaaacaaacgaaacctgttctccctccgtcctggagcccagagtccaaaatcgaggcgtccgcagggctgcgctccctccaggggctgcaggaggagccttccgcctctcccagctcctgggggctccaggagtcccttgacatgtggccggcctctgtctctgtgcgaccgtctccagtgcccaccggccttcactgtgactttttctcaatttgatcacgtctgcaaaggccctttttccaaataacgtctcgttctgaggttctgggccgatgtgaatttgggtgggggatggcgttcaccccaggacagccccagcggtgaagtcctccccattccagtacctgctgcctcaggcgtttccctggcaagctcgtcctgtccccctctccgccctgtccccctctccgccctgcccggctcacttttgcagctgagaaaatcaaggttcaagtaacgagcatttattaggcaactgctgtgtgctcggctgattccagactctgggaacaaaacagactaaaccccagatacactcctagatccgtgactcggtgatggacggggtctcggaggaagaacgtggaggggagggggcggcagccgggccggggtcagaggacgaggccgggcgtgtggccatgtgtgcgtgcctgtgctcatgggacccaccggcccggccagccgggtctacctgagggccccacacccctcaggcagctgaaggggaaagggcctccccggccaccataaatcagcgcaggaatgcaggctggccagtctggcgctggccgggttggggcggagacaaagaccaggcagctggacctcgggcagcctc

SEQ ID NO: 343545 - DNA, 212 bp, Homo sapiens
  chr19:957156-957368
  hypo
cggagcctctttcccctctggaagacgttccggggcctggtgatcttcttcctccccagccaccaccctggcaggcagaggcggtcggtggctcatttcatagctggaggctgagactccaggctccaggtgcggggaagccagcaggagacaggaggaccgggatgggaagcagggcggggctctgggccaagtccccagcagcccccagg

SEQ ID NO: 343546 - DNA, 53 bp, Homo sapiens
  chr19:957398-957451
  hypo
gtttcctcacctgcaaagcagagccagttctcggaacaaatgcgctcccgtcc

SEQ ID NO: 343547 - DNA, 573 bp, Homo sapiens; identical to SEQ ID NO: 272652
  chr19:1003209-1003782
  hypo

SEQ ID NO: 343548 - DNA, 1172 bp, Homo sapiens; identical to SEQ ID NO: 272655
  chr19:1004548-1005720
  hypo

SEQ ID NO: 343549 - DNA, 330 bp, Homo sapiens
  chr19:1030023-1030353
  hypo
cgtttatctcccgctcccgctacacgacctgcccccatgcttatggccccctatacactttgccgtctgcctcagtgctgtctccgcggtcactagtggctggatagggacactcgaggtccccactggtgcacacccactgcccaggagcacacagcccattccccacggcggtgtctcagagcaccgaaggccaagaaagctggaatggccgggtgcagaaaggtggcagggaatcggtggcaaggagccaggtgcgtgactagaggcggtcagcctcgggggcagctccttcgggagttgctaagaagcaggatgggggccgggcgc

SEQ ID NO: 343550 - DNA, 140 bp, Homo sapiens
  chr19:1048876-1049016
  hypo
cgcgcccctccccgcaggccagtacgggatccctgaaccatggaattttccttttcggaggagctactggtgcggacctcggccccccaagagtccagccccttgccccaccccgctggacccaaagggtgaggcactac

SEQ ID NO: 343551 - DNA, 1035 bp, Homo sapiens
  chr19:1079728-1080763
  hypo
acctgcgtggccgacgcgaagacgcagaagcaggagctggaggataccaaggtgacggcgctgcggcagatccaggaggtcatccggcagagcgaccaaaccatcaagtcggtgcgtggggtgctccggccgcccgggcggggatggtggaccgggcggcctcctcctgacccctccgctctccggtgccgcccgcaggccacgatctcctactaccagatgatgcatatgcagacggcgccgctgcccgtgcacttccagatgctgtgtgagagcagcaagctgtatgacccaggccagcagtacgcctcccacgtgcgccagctgcagcgggaccaggagcccgatgtgcactacgactttgagccccacgtctccgccaacgcctggtaccgccacccagctgccctgtccccggcgcacaaggccctgcctgggagccgggcttccctctgtcgggggcatgaagatgaagctgtcttgccccccatcacctcccctccttttcccggtttcttccactaggtcccccgtcatgcgtgcccggaagagcagcttcaacgtgagtgatgtggcgcggccggaggctgccgggagccccccagaagaaggcgggtgcactgagggcacacctgccaaggaccacaggggtgagtgtccggcggggcccaggggcggacgctggctccctgcgacccaccctggcccttcaccagagacgcctctttctccagccgggcgaggacaccaggttcacaagtcatggccgctctcgatctcagactcggacagtgggctggaccccggccctggcgcaggtgagggaggctctctggcgggctggggtgtggagctgcctcctctcctgagcctcagggtttcatcacccaccggggtgatggagggggcccccctggctgggggagtctgaacagtcctgattcccgcccaggggactttaagaagttcgagcggacgtcatccagtggtaccatgtcgtccacggaggagctggtggacccagacggtggagcc

SEQ ID NO: 343552 - DNA, 985 bp, Homo sapiens
  chr19:1108654-1109639
  hypo
cgcagctcctgcagcacccggcgcacgcagccctcggggatcttgatgcctgcgggcagagcgtcggggtcagggccggcgctgggggctcgggccttcccggggcgcccgccgcccactcacccacttgcttcttcctgtccttggtcttcagccgcacgatctgcaggtagctgctgctgctgacgtcggccatgacggcggcgatgcggccccacacgcgcagcagcgcgccgcacagcatgtagtggtgccgcagccgcagcccctgcaggcagtccttaccctcctgcgccagccggcagtgccggttcctgcggacgagacgggtcgtctcggctcaggcgggtcccaggggcccgcaggctccccaggtgccctgagatctcccgcctcctctcagggtctcgggagcccccgatccccgcctgggtcgccgccatctgccggtttccccctggtccccggcccgccctcaccaggcgctgtggctgcagtgcgtcagcgacaaagcgtagccactctcccagggctccttggcctcctccgcggtgacctagggacacagggccgcatgagcctgggcggggtcagggccggcaacccgagcgaaagctgcgcccggcggccgcctacccggtggaacttgcggcggaggctgtccagggcctccagctggctctgccggccgatgttgggcttgtacaccgtgaagaactggccgcggttctgctccgccagcaggcagctgggcttgttaccgcggacctgcggaggggggcgttgaggccgcgccccggtccgccccccgcgggccctcctctgggggggtaaccccgcccgaccccaccttgtaggagaggtagaagccgtcataggggcccgtcagcgccagcgacttggcaaaggcgtcctcccacttcaggccgcggtccacgctgatctgccacggcacggggtgggggggtgtgagtgtggtgggggc

SEQ ID NO: 343553 - DNA, 319 bp, Homo sapiens
  chr19:1128115-1128434
  hypo
cgagagagtgagactccgtctcaaaaaagaaaaaaataaacaagcaatgggtgagaaacaccaaccctcagggccacgcaggacggcgtctgacttctgcagcacctgaagggcagcaatgctgcaggaactctgagcagctcgggtctggggtgagcctggtgccatgccctgtgccggaggcaggggcgggggcagccacgcccagaggtggggctcgccatggggatgacacacacacacgcgctgcccagtgaaggagatgtatgtacatcatttcatttttttttttttgagacggattcttacactgtcgccc

SEQ ID NO: 343554 - DNA, 595 bp, Homo sapiens
  chr19:1156143-1156738
  hypo
cgcctgtgtccgagtcccctaggccagcacggtgctcctggcagctcctccctccctacggtctctgagccccccacgtctgtggacgccccttccaggcggcaaccccaggaggctcaggggaccgggttcttcaaggggagggcttcacacatggcatgtgacctggagtccatgccttggggacctggcagggtgtggagacctggaccgggaggggatgggggcaggagaacaatgcggacaccaggcacaaccaaccaagagtcagggcccaaaaccaggaggcggaggcggaggcggatcctcacacacggctgcttggcagtctgggattcctcaagaggctaacgctggagtcaccacaccaccgagcaattccacaccacacagaaacgtggccatgcacgtccacagcagcaccactcacaacagccacccgaggaagcagcccagtgtccacggataggcgagtggaccagcatgtggcgtggcccatccacgtgccagaacacgacacagccatgaacagcagcgaggccgacctaggccacagcgcagacgcaccttgaggacgtcacgctctgtgagagac

SEQ ID NO: 343555 - DNA, 375 bp, Homo sapiens
  chr19:1166870-1167245
  hypo
cggcctcaggccacaaggtctccccacctggctccttggggagtgccaagcgttgccagcagccgggctatgctgatcccagacaagtggctcgaccggtcaccactgtccttgagcttaagtccagccttggtgacaaaaatgtcacaaggacctgcatccgagccctgagggcatcaggtcctggaggaggaggaagagtcccttctggcttcgggctgggcttgaggacggcagctccaagaccgcttagagcgagacttcagcgctgactgctggagctacgcaccctgtcctgacaatggccgcacagttaggcgctgctccacgcctggaggagggaactgagggcccgaaatcacagaagcaggaact

SEQ ID NO: 343556 - DNA, 865 bp, Homo sapiens
  chr19:1170985-1171850
  hypo
cgaggacaggcacacaggcacgggcaacacacaaaatacagacacacataaccgactcatgaacatgggtacacacaggcacacacacaacacaaacacgggtgcacaggcacacacaacacacaaacacggatgcacagacacgcacacaatgtgcacccataaaacacacgcgtatgaaacacacgagcaacacacacatgcacaggagcacacagccacaggcacgcacattcacacacacacaacgcacccacatccgtacaacacacacacagaacgcgcacacgtccgtacgacgcacacacagaatgcacgtgcgtacgtacaatgcacacaaagaatacacacatccatacaacacacaggcacacaacacacatgtgcatgcacatggcgcaacatacagatacacaaagacacgtgtacacacacatgcagagtccccagggcagcgctggcgtcatggggggctgcctccacaccgcctccaggagtgtttacagctgtggattacatgataccgcccccttcccagagctgatcccaccccccagcatgggggccccctgggagggggcctctgggagccggactggttctgtcgacacagtcgcctctttgttcggggcagagctcactctggcggtgttggcgtttccgcatgggccctgccggaggggcatccgtgactccgctggagccgggttgggccaagcccaagctggtcacacccctcacacccctggggttgggggaggccttaggcagcaagtgggtggggggtctaggggtggctggcgcaacctctctccacctcggtttccccgccaggtgagagggcagtgactgcccatggtcacgc

SEQ ID NO: 343557 - DNA, 68 bp, Homo sapiens
  chr19:1179335-1179403
  hypo
cgtgacgagtactttttgttgctgctgctgttgttgttcttgttgtttttgagacggagtctcgctcc

SEQ ID NO: 343558 - DNA, 268 bp, Homo sapiens
  chr19:1223581-1223849
  hypo
cgtcgtccctgaggcctgcccgctggccctgatgccggccgcccttcttccctaggtggcgaggaggcgtctgaggcagggcttagagcggagcgcggcttgcagaagagcgagggctcagacctttcaggagaggaagcctctcggccggcgccgcagtagtgcctgaggaggagctcagggccttagcgtaggggcggcccacattggcagccagcccctccccgccatgctcccggcttggctgtgttcggcccagggctgggcc

SEQ ID NO: 343559 - DNA, 655 bp, Homo sapiens
  chr19:1226490-1227145
  hypo
cgccggggcctccccaaggccgtgtgtatgaacggcacagaggcggcgcagctgagcaccaaatccagggcggagggccgggcccccaaccctgcccgcaaggcctgctccgccagcagcaagatccgccggctgtcggcctgcaagcagcagtgaggctggccgcctgcaggtggggcgcggcggggcccgggtggggcatgtggggacaacgcctggatgccacagccagccgtgagcatagcccgcgctagtcagtcatggtgaccgtcacgtggctgcgcgtggttgccatgtggcctttgggtggcttggccacgtagcgatccccgtggagggtgccgtctcggggcctggtgtctggccagcgtgctggtcatggaggcctacgtgtggcggggctctgggggggcgtgccgtcctcacagccacctctcagagtgggtgcattccgaggaccctgccctgggcctggcgccccctccccatgcccgcgccgcttccaggaaaggcttatgctgggctcagcccagaggcttttgagcaccagtgggtggtgggtggtggggaggggccgcggcctccatggctctgccggggtgccgcaggctctgagccagctgccaagtatggctgaggctgagtcgtgccggac

SEQ ID NO: 343560 - DNA, 790 bp, Homo sapiens
  chr19:1254919-1255709
  hypo
cggccagcagcagtgccagtcctggtgccagcaccacgtctaccccaggggccagccctgccccccgctcccgaaaacccggcgccgtcatcgagagctttgtgaatcacgccccgggggtcttctcagggaccttctctggtaggtgtcacagcacatgtgtgagctcacgtgtgtcccgtgaccctgtgcatttggggtctacatccacccacaggcgactccacatattctgggcatacacaggctgtgtccgtctgctcacttcacatgtcccccaggaatcccccacacacacgcctggccctgcccggggggccgcgggtcaccaggcgcctgcatactggggacgtgtcccgctcccgccccgtggtccctcgtgcacatcagcccacatgtccacgccattgcctgagctcatgagctcacacccgtggacgcccgtcctggacatgcgggactgtgcccgtgccgggcactcacggccacctctgcccgcaggcacgctacaccccaactgccaagacagcagcgggcggccgcggcgtgacatcggcaccatcctgcagatcctgaacgacctcctgagcgccacccggcactaccagggcatgcccccttcgctggcccagctccgctgccacgcccagtgctccccggcctcaccggcccccgacctggcccccagaactacctcctgcgagaagctcacggctgccccctcagcctccctgctgcagggccagagccagatccgcatgtgcaagcccccgggtgagtggccaccctc

SEQ ID NO: 343561 - DNA, 287 bp, Homo sapiens
  chr19:1288529-1288816
  hypo
cggggacagccgcgatggggggcagacagcagcgtgggcaccaggggaccgtgtgctcgatggggcctgcaggcccgggcagtgccgcagcgtcgccggccgccccttccgcccattggcctggcacctgtgcccaggcgatgactgtgtggtctgtctccacatcacaccctctctgctgtgagaggcgatgcctgcacccaggggaccccgcacccacctccttgggccgctataaggtggggccccgttgggtggtctggctggccggccccgccactcccacc

SEQ ID NO: 343562 - DNA, 197 bp, Homo sapiens
  chr19:1297611-1297808
  hypo
cgattgtccacacgtgtgcacaccccagcggccccggcttcaggcgtccttttcctcctctcttgatccttgcagacgcccccactgcactccaggatgcttctgggggcccgaaagcaggggcggtgatgctggaattttgggcgtaagaaccagttggaaataatctttcccagccaggcgtggcggtggctcac

SEQ ID NO: 343563 - DNA, 269 bp, Homo sapiens
  chr19:1308062-1308331
  hypo
cggtcgcctggtggagcagaaaccaccgccagcggctccccgtctatttgtctgtgcacattcctgggctcagacggtggcttccgaggccggaacttcggagtcacctgctccgcacttgagtctggaacgtctcagaccggacccctccctttacagcctgagagagggagagaccctgcccaggcctcccaggggcctgcccacccgacagctcctgactcccccaccctcattggtccagaaatggaaggcttcggcccaggagc

SEQ ID NO: 343564 - DNA, 393 bp, Homo sapiens
  chr19:1312701-1313094
  hypo
cgtgtcatcagcaacggccaaatgccgttcccagcactggatgggggtggagggcctgaggggtgtgggtgggggggagctccaggcgcccctgccccccgcccagccgtcagtcaggctggccgggcccccttcaagtcgtcacggcccagcagcggccacgggagggattattccggcctgtccagggtggactgaagtggaaccaaggctgacgagcggaacgcgcccccatggacccagcccgcccgcctttgtccgccgccagccccccacccgcctgccgtcacagaccccgcctcccgtgcctgagccccatttctctgggggccgggctgcctcgcgtggcccccgcctgactaaagccatgcagcttctcggccggctccatcc

SEQ ID NO: 343565 - DNA, 576 bp, Homo sapiens
  chr19:1333769-1334345
  hypo
cgctttgcacgttgtgcctgttggcctcggtttccccggtaaaacttgtgatggttgcatgaagcccagatccatgaataaaacacgaggtctggagttagtgcttcctctcctacagcgaatgcataatcagcccacaactgcggcgacgaggcgtccgaggcggccgcaccccagcagcgatcggtgattcatggctcgatctgctaattgcctctcgggccggcttcgggctgatgcgtttgacaaggcgaggaggctgagacgtgcattaggcactcagccgcccccgccgcccatggagggcgcgactgctgctccctcttgggggtgatccgtcatttcatccacgggggagttggggacctggggggcaagagagaggctggatgcctgggccctgtttgtaaacagcgttgatttctgagctgagatgtggcgaccaggcccggagcagggctgtattcacagtcgtcgaggggtctgccggccgtggccctgctatggaaccttgggtggggctggggaacaggacctcctgcctcacctcagacagcccctcctgggccaggcacc

SEQ ID NO: 343566 - DNA, 109 bp, Homo sapiens
  chr19:1357664-1357773
  hypo
cgacgccccagtcagtcctgcgtgattgtggcgagggcgcgtctggcaccgggaaggtgtagatcatctagaatgacggcgattccgacgccccggtcagtcctgcgtg

SEQ ID NO: 343567 - DNA, 716 bp, Homo sapiens
  chr19:1370778-1371494
  hypo
gctcgcgggccgcccgggaccgggccaaccagaagctggtggagtacattgtgaaggccaagggcgcggagagccacctgcgggccatcctaaagagcaggaagccatctcgctggctgcagaccttcctgagctccagccagtacgtgacctgtgtggagacctacctggaggatgaggggcagctggacctggtggtgaagtacctgcagggcgtctaccaggaggtgggggccaaggtgctccagcgcaccaacggcgaccggatccggttcattctggacgtgcttctgcccgaggtgagccgcggaccggcgtgtcacgtgggcagggaggggcctgcgctgggattttgcaactccgcacgaggaggctgccacggtcctcgcccctgctccctggccgttcggcggccaacggagcgtggaggcctcctgtgtttacatcctgtcagtgctgggaaatgcgagtgcgtgcgcttgaccctgtgcggagacggagccgcttacttgacccctgtgcagagatggagctgcttagaagctgtcagcaccagggggtgcgaactccctccctactgcgggcgcacagatgcttcccagcctcggtgggtcagtcctgggaaacccactgcgagttggaaattcccaagtcagaatcgcatttagtacccagataaacccactgtaagttgaaaaactgtaagtggataatgc

SEQ ID NO: 343568 - DNA, 303 bp, Homo sapiens
  chr19:1393952-1394255
  hypo
cgtggtcccacgagggccatccccccgggcgttcaccttgacagtggtccacggtaggcaggcttggaggtggcgctcatgtgggacaggggacagagtcctgttcttggccaccctgtgctgcgtgcggcattagctcatgcgcagagagcccagccctgagtcccgagtctgggggtttgggcaagcgagaggcacatcctggtgcctctcaaaagtggaggaacaggctctgactttggattccgcttccctggaaagggcgttgatttgttcagcgttctgcacggttcaggtcacccc

SEQ ID NO: 343569 - DNA, 250 bp, Homo sapiens; identical to SEQ ID NO: 272731
  chr19:1423980-1424230
  hypo

SEQ ID NO: 343570 - DNA, 462 bp, Homo sapiens; identical to SEQ ID NO: 335873
  chr19:1449921-1450383
  hypo

SEQ ID NO: 343571 - DNA, 884 bp, Homo sapiens; identical to SEQ ID NO: 335875
  chr19:1467200-1468084
  hypo

SEQ ID NO: 343572 - DNA, 880 bp, Homo sapiens
  chr19:1482000-1482880
  hypo
cgtggaggatgggggacaggaggtgcagtccctcggggagccgccgcggcaggtgtagcaggaggcatggcagctggagcagaccctcagcgcgggcgccgccgtgtgcccaggcccagcggtcaccagccttgtgtggttgaagaaccgcggggggcagtaggccaggcagagctgtcccaggatgtaggcggggccgtcacacgctgctcggggacacgcacgcaaaggcccgtcagcttgccacccgcagcctgttactcgccacccgcccgcctggggccacatgcacgctgcccacggtggccgccaccgcctcccagcagtgggccctgccccgccggcactcaccctggcacagcccctctgtgtcccgctgcacacacgcgctgctggtcacctgggggcctgtaggccgcgctgtcatgtcctcggccgtcccatagagcagcagcgtgtagcggtacaacgtccctggacaggggtcgcgggtgggcacaggaggaaaaggaggctctcggcagcctggtcctggtagtccccgggctccctccccttcagctcccacgcggggccctggactggttcacatctctcagggaattgcacacctactgtgcgcctgtcactggacaccgacatctcccgggtgactgcacacctactgtgcgcctgtcactgggcacctacatctcccgtgttaccgcacacctactgtgtgcctgtcattgcacaccatctcccgggtgactgcacgcctactgtgtgcatgttctcttggagaaggccactgggaaccccttttgcagtgcggtcaccaaggctagctccagagcccctggggggaggttggagagccaagccccgcccaccacagccc

SEQ ID NO: 343573 - DNA, 594 bp, Homo sapiens; identical to SEQ ID NO: 335876
  chr19:1491131-1491725
  hypo

SEQ ID NO: 343574 - DNA, 593 bp, Homo sapiens
  chr19:1494971-1495564
  hypo
cgcgcccggctgcaaacacttcactgggcagctattccgcacccacccccactgcccagcgtcgagctcctgcctgcccttggggagctctcaaccccggtgggggacatggacacgttgaccagttacaggcacaaggctcagggcctagaggcacgatgggggatgtacaggcacatcaggggcagtggacatatcctggaggcggctcctgggaggaggtgacggttgcagtcttcgtcgactgaaaggcggcctgggtaccgtcgtgggggctcagcgggtccccagccctggcacaccaccgcctctctccggcaggagccgtcactctgctaagcctgtatctgctgttcggctacggagcgtctctgctgtgcaatctcatcggatttgtgtaccccgcatatgcctcgtgagtgcacggctggctgcccacgcggggggttctgggggctccctggcagcccctgaccctgctgcaccctccctgcagaatcaaagctatcgagagcccaagcaaggacgacgacactgtgtggctcacctactgggtggtgtacgccctgtttgggctggccgagttcttcagc

SEQ ID NO: 343575 - DNA, 495 bp, Homo sapiens
  chr19:1496401-1496896
  hypo
acgacctcagcgggcgagccctggacgcggcggccggaataaccaggaacggtgggtgctcgcaggcgcctggctgcctcaggccatctcccgggtctggacctgtctctctccaccttgcctccctttctgactttggccgccccctctcactgtccgcctctctctctcacgcttccgggaaccagtcttgcaggtcctggcccgtagccgggcaggcatcaccccggtggctgtggccgggccctccactcccctggaagctgaccgtacgtaaccgctgtggggagataggagctgtgtgtgtgtgtgtgtgcgcgcgcgcgcgcgtgtgtttgagcgtatgtttgctgtgtgcacatgtattattgtgtgtgcatgttttgtcatgtgcaagagggtgcgtgtgcatgggctcaagtgtatgtttggtgtgtgagtgagcaagggagtgagcatgttttctcacgtgtgcatatgtgtgtgtgtgcccac

SEQ ID NO: 343576 - DNA, 240 bp, Homo sapiens
  chr19:1506027-1506267
  hypo
gccgggcagtcaggcgtatgcggctgtcctccgcagggctccagggccgggcgtagccggcgtggggcagcagcagctggtcctgtgtgccgtcggggctgacaagacgctggacagccatcaggtagtcccggtggggtgccagcatcgggcaggggcagtggcctggcgcccacacgtactcgcgtgcccgcagtggcgagcggttcttgtagacgagctggatgcgcacctcatagc

SEQ ID NO: 343577 - DNA, 205 bp, Homo sapiens
  chr19:1565869-1566074
  hypo
cgctgattcctgccagctccccatgtggccatagcctcgctcaaaggcccttgggtgccaggacaagcgcgttcacaaagaacacagccacagcctccaccacctggaggctcaggctcgtgcctttggtcacttggtccccaggcctcggcttggacgcctgtctccacaggctcccagacactccgcacagggcagctgtccc

SEQ ID NO: 343578 - DNA, 941 bp, Homo sapiens
  chr19:1577427-1578368
  hypo
cgaggcaggggggccggctggcagtggagcattctggcagcgccgggcgaccaagtcccgactggcagcggctggagtttggttttcagaagcgaaggctggcgttggcacacagggaaggctgcccgatgacgtgcctcgactgtgttacatttactgaaggagagcggcctcctgggcatgccactcaggcacggtgaggctctgtggcaccaccagccgcatggcagggcagagagtggcgccgtcctgcatgccccccacagcagaccagagtcccgtcctcacgctgcacagtgggtgatgtgagtttcaaaactacgcctccagaccgagaaaccctcccagctgtcagcaagccgtggcgccgagctgccgggcacctgctggctgctctccagtctcaaggagctgggacagcgggcatggggaggagctggcctcgagcccaaaggtcgtagggagccaggcagggcccaggagcacccggcacttcccgaagccggactctgtagaggacgagcgtggagggtctttcgggtgggggcagccccagctgtgtgccccgaggccccgggaagtggggacgggccgaggagggagccaggagcacggccttcctcctgggtgtctccaaggctgggcttcgccgccgagcctggttcacgtggggccgaggaccgcgtctgcaggcggctccagcaggcagcacgggctctcggcagggcctctggaaaggacagggagggctggctttagcgactccacgggacggggacgcttgggctcttctagggagatgggaagctcttgggaggcacccgtcatcccaagcacatctgtgttcaccaggcagtccccactgccaggacccgactccagggagcccccgtggccccgcagcacctgccctagacgtgctccatctccgggtccgggtc

SEQ ID NO: 343579 - DNA, 131 bp, Homo sapiens
  chr19:1673002-1673133
  hypo
cttatgcgtgttctcgcatgctcgtgtgcattctagcatgtgtgctcactcctatacacaggtttgcatgcgtgtgctggcatgtccgtgtgggtgcacacagaggctgtgacatgttcgctcgttgccac

SEQ ID NO: 343580 - DNA, 1577 bp, Homo sapiens; identical to SEQ ID NO: 335880
  chr19:1748599-1750176
  hypo

SEQ ID NO: 343581 - DNA, 2389 bp, Homo sapiens; identical to SEQ ID NO: 335882
  chr19:1753216-1755605
  hypo

SEQ ID NO: 343582 - DNA, 367 bp, Homo sapiens
  chr19:1785308-1785675
  hypo
cggtggggtaaatccggggcctagcggggcttgcaccaggacaccagcccctggggtccaggaagggcacctggcaatgcccccaaagcaggggtccccaggggaggaggcctccataggccatgtccaaggccccggggaggtgaggaccttgcccacctccatggtgatggacagcaggcaagacagggccaccacgaccgcaaaggactggtggtcgctgaagctggcgggtcccgccgtgtcgcggctgatccacagtgtcatgaagaagttgaccagagaggtggtcacaccatgggcgatggcttggacgaagacccagtagttgaagagctcgtccttctgccccaccacgtacagctcc

SEQ ID NO: 343583 - DNA, 537 bp, Homo sapiens
  chr19:1799819-1800356
  hypo
cggttccctggttcagattcgggcggaggtgctgggcatggggccagacgtggctctggttctcaggcaccctgagccccttgaagatcgaggacccagctgggagctcaggtgtcggggccgcaccatagacgcggccgctgatgcagcacttgttgaaggtcaagatgttctgcgtgagcgtgcccgtcttgtccgagaagatgtattccacctggcccaggtggtcgttgaggctggtgctgcgggccttggcaggcacgtcctgcggcttgtagtacatctgcacgtcccagtcgatgaagacgctgttccccaggtagatgaactcggacctgcagaggcactcagggtcacggtcagccccgcctgctgtgtgccatccccatgcctccccgttccgcgtttgcaccggggacgcagccggcggagactcacaggatgaacatggacatcgggatggtgacgctgagcaggatgaggaagctccagaagacgaagaaggactctgcggccacgctgctcccatgcaccccc

SEQ ID NO: 343584 - DNA, 608 bp, Homo sapiens
  chr19:1807818-1808426
  hypo
cgggaagtggctccacaggtcctgagaacatgctctgggctcctccttccccctcgcctctgaggtcagctgggagggcgggggccaggggagctgcgtggccgaggccgtttaggctggggaacagctatgcctcccgatgcccagccctgcccagcaggaaccagcggggcgtggagagggtgccgtcatcagacctggagggtgcatccatccacctttgtcattcaacatgtactgagcgcctcttgtgtgccaggccctgggcagggtagtagggactcagcgctgagggtcccagtctgtggggagtgggacgtgaacccacccatcacacagacaaacacatcgatgctgccaggtggctaggggggacttcctggaggaggcaacacgcctcacctgcaggatgatgatgatgaggaagaacaggttggacacgcggtggaactgctcgtacaggttcagcggcaggaacgagtagaagttgtacttggccgtgcggatgacattggtctggaacgagagccgcgggctgcctggcagaggggtgccatccaggccaggggatgggggtgcccgaggccagacctgcctcacttggcctc

SEQ ID NO: 343585 - DNA, 1260 bp, Homo sapiens
  chr19:1911845-1913105
  hypo
cgtttttaaaaaccaatggctgtttaaactctgtgcacaccaggggttagcaggacatgagggagtgtagctctgatgcggtgacctgggccggagccctcggactagcctcagctttggtggcagcacgccctgccttgtggagccacggcctcccgggacggactccccggctctcccccagccgcccgcagccgccggatgatcctctgctcccgtctctgtctcccacagtcggcctcgctgaggatggagcccgccccgggcctcgtggagcagcccaagtgcttggaggccgggagcccggagcctgagccggcgccgtggcaggccctccctgtcctgtccgagaagcagtcaggggacgtggagctggtgctggcctacgccgcgcccgtcctggacaagcgccagacctcacgcctcctgaaggaggtgtcggccctgcacccgctccccgcccagcctcacctcaagcgggtgcggcccagccgcgatgccggcagcccccacgccctggagatgctgctttgcctggctgggccggcctcgggcccgcgctcgctggctgagctcctgccacggccggctgtggacccccgcggcctggggcaacccttcctggtgcccgtgcccgcccggccgcctctgaccaggggccagttcgaggaggcccgggcccactggcccacgtccttccacgaggacaagcaggtgaccagcgccctggctgggcggctcttctccacgcaggagcgcgccgccatgcagagccacatggagcgggcggtgtgggcggcccggcgggcagcagcgcggggcttgcgggccgtgggggccgtggtagtggacccggcctcggaccgcgtgctggccaccggccacgactgcagctgcgcggacaaccccctcctgcacgccgtcatggtgtgcgtggacctcgtggcgcgcggccagggccgcggcacctacgacttcagacccttccccgcctgctccttcgccccggccgctgccccccaggccgtccgcgcaggcgccgtgcgtaaactggacgcagacgaggacggcctcccctacctgtgcactggctacgacctgtacgtgacccgcgagccctgcgccatgtgcgccatggccctggtgcacgcacgcatcctgcgcgtcttctacggtgcgccctcgcccgacggcgccctgggcacccgcttccgcatccacgcacggcccgacctcaaccaccgcttccaggtgttccgc

SEQ ID NO: 343586 - DNA, 713 bp, Homo sapiens
  chr19:1960909-1961622
  hypo
cggacgtttcagccccctcttcctgtggatgctgagagggtttccagaagaaggagaatgtccccgtgctggtggctcatccaggtgtgggccggtgtgcggcggggcgtgggcagaggagaggcttcgggctccggtttcctctcctgtggatgcgtcgcccccgcatggtggtcctctgcggaagtccccctgtccgtcccgttggcagccgcagtggaaagacggatggacgggctgtgacagggacagcccagtgtgaccccagccctggccgtcgcggttgtggcattctcgctgtcagggggctgttcccgtggctctcatggctgtggaggggcgtggagggggcggtccccatggccagaacctggccgtggcgggtggaggacttgaggccggctcagtggtcagcgctgctgcttgttcccctacacagaggcgttgggtggagctgcctcaggtatccctcctggctggggtgtgtgcgtcaccctgagtctccagcccatgctgaggagcctcgcaggcagggcccagcagcctatactccaggccattgctgtccgtttctccagaaggccctgctggtgggtggtcccaggagctgggcctcagtgggggatcccaggacagtggagcctgggaggggccccagtgttgaggcgtgaggtactgtctggaactagggggtgcccccaaagcggcacggc

SEQ ID NO: 343587 - DNA, 902 bp, Homo sapiens; identical to SEQ ID NO: 272778
  chr19:1969652-1970554
  hypo

SEQ ID NO: 343588 - DNA, 304 bp, Homo sapiens
  chr19:1977028-1977332
  hypo
tgcccggccacagaggcctcattctgcagcgtatgctactcgggcaaaggcagctgactgcagacccaacacggtgacccagctggatggtgcctgagagacggggctgccccacatggtgccctgtcatgccgcgggacaggtcgcccagcagatggtagctatggccccagtgccatcctgggctggagacacatgggtgccagacacgttcatgcctgtcgtctggcccagctgccgtggggagccctccagggccgtgtgcctgcagggaccggcctgttcacctctaggctcacccctc

SEQ ID NO: 343589 - DNA, 1111 bp, Homo sapiens; identical to SEQ ID NO: 335894
  chr19:1978023-1979134
  hypo

SEQ ID NO: 343590 - DNA, 67 bp, Homo sapiens; identical to SEQ ID NO: 272785
  chr19:1992864-1992931
  hypo

SEQ ID NO: 343591 - DNA, 506 bp, Homo sapiens
  chr19:1992961-1993467
  hypo
cggccccgcctccagccaggcctggccccgcccccgcctcgtaccggccccgcccacctgcgtgagcagcatgaaggcgttgtcggctcgcaggttcttcttcaggaactccacgcaatgggcctcgagcgctggcaccgcgtacttcttggcggtgtatagcgtggtcatcaccgtctccgggccaatctgcacctcgtccgagtagagaaacctgcagaagcaacgcgggtggccgtgaggtgggaccgccatgcccgcccccaggggagagcgtcaggggaccactcagaccgttagactcggccaccggcccttgagctggcaggacccaaacacccacatcaggttccccgaggaaccttccagaattagcccctgtccgttgccctctgacatagggacacgacttggcaaggtggtcacccatgaaaacgagcaagaggctgaacccatctacacagcacacacccggaagcgtctatatggcctgtcttgttctgccc

SEQ ID NO: 343592 - DNA, 343 bp, Homo sapiens
  chr19:2000558-2000901
  hypo
cgagcccctccctggagacacctgcatgggccttcaggattcgacccctgggcaccgctactgcctcctctgcccaccgtgagtccccagccccactcccggctgttccccccttcatgtatctgtaaccccttccccttccaaacaaatcgagaacacacggccacacaaaaacacatccacaattgctcacagcagcacgattcccaactccgaacgggggaaacaaccagcgtccattgacagacacggtgcgaccacccacgcactggaacacgacccagccacaaacaggaacgaggctctgatgcaggacccggtgcagatgcgccttgaagacgtc

SEQ ID NO: 343593 - DNA, 151 bp, Homo sapiens
  chr19:2041016-2041167
  hypo
cgcccgtgcggctggtactcaccccctgaacccaggggtgctgcaggacttgggcggcactcagcctctgcttggcgtcacggaccagcagcttggagatgaggtctttggcagcgcaggagatgtgggcccagtccttgtcggggaactc

SEQ ID NO: 343594 - DNA, 728 bp, Homo sapiens; identical to SEQ ID NO: 335895
  chr19:2164931-2165659
  hypo

SEQ ID NO: 343595 - DNA, 337 bp, Homo sapiens
  chr19:2182571-2182908
  hypo
cggggctgtgactgtgcaggttctgccagtgctgcccagacgtggtctctctgggttaggatctcggtgcagcaggggtggaagcccctctctgaccaggcgcttgctagtgtgtctggaggtgctcagcagcaggggagctgcacctgctccccatgggaaggggcctgcacagacttctggggtcagaggagaccccaggcccccggatctcaggcagtggcggtgagagtgcctctctggctgcatgctcgccttctgcagggctcggagctgactgtcttgtttgaaccttgtgtgttttctggggagcgcatctggagtctggagcttaagc

SEQ ID NO: 343596 - DNA, 89 bp, Homo sapiens
  chr19:2204172-2204261
  hypo
cgtgtctctgtgtgcgtgcctgtgcgtgcctgtgtctgcatgtctgtgcctgtgtgcatgcctgtgtgtgtgcgtgcccgtgtgcctcc

SEQ ID NO: 343597 - DNA, 95 bp, Homo sapiens
  chr19:2224728-2224823
  hypo
cgtgcgccatcacagccggccctaagtgtgcttttggtggtgttctgtgttagttcgttctgctccttgcccacgtgtgcgtgcacgtgttacac

SEQ ID NO: 343598 - DNA, 763 bp, Homo sapiens
  chr19:2244085-2244848
  hypo
cggctgccccagcttagggcctgcagatgggcgggtctttgggtcttcagtgtagcccatttgcttttcttgtgcctgtgtctgccttgtgcctactgctggcgtggtggcgtgggcagtggacggctccctgcctcgggagtgaccggcggtgctgtcctggctgtgcctccctctgactcagaaccaccaggaaggtggtgtcgggggctccctgggaacccccactgctcgaagcctggcccacagccccaggtggtgacacccgtgctcacgaaggcctcccgctggatcccccgttttcagaaatgcttgaccactgtcagcggtagccatgcctctacagaaggggggttctgcctccatgcctctacagaaaggggatcccgcctctgagggccttgacggcagcaggccgcgatcttctgtctaacgggcccctgttcttcccctccaggacccgtacttcatgaagaaccacctgggctcctatgaatgcaaactctgcctgacacttcacaacaatgaggtgcggcctctgcctggctccgggcggctcgcggcgggctgagtggctgacgtcagggggacctgcctgtgtctgtccgcccggcctcgagtcatgcgtgtttcctttccactccaggggagctacctggcacatacgcaggggaagaagcaccagaccaacctgtgagtacctcatgtccctttgatgcctggtgctccagcagccgttggctcaagtctctgtgagcctcgc

SEQ ID NO: 343599 - DNA, 266 bp, Homo sapiens; identical to SEQ ID NO: 335897
  chr19:2273764-2274030
  hypo

SEQ ID NO: 343600 - DNA, 1227 bp, Homo sapiens; identical to SEQ ID NO: 335898
  chr19:2289763-2290990
  hypo

SEQ ID NO: 343601 - DNA, 239 bp, Homo sapiens
  chr19:2339508-2339747
  hypo
cgcctgggtctggggaggccccatgtccagggctctttatgcagatccaagctgcggttgctgcccacacgccagcctctggcccggcctagtggccaccccagctcaacccagggacgcgggccctgccaccctctgctgtgtggtctcctctgccctggggacgttcggggcggttccttgcacttcagtcccccccgggtcccctcctgctcccgggttttctgccccgttccccc

SEQ ID NO: 343602 - DNA, 104 bp, Homo sapiens
  chr19:2360648-2360752
  hypo
cgcaggtgcggcgtgtagatgcggcaggggttgtgtggacgcaggtgtggtgtgtagatgcggcgggggttatgtggacgcaggtgtggcgtgtggatgcggcc

SEQ ID NO: 343603 - DNA, 156 bp, Homo sapiens
  chr19:2363024-2363180
  hypo
cgctcaggctggcctgaccgtggggtaattgggccctgcagagcctcacgccgcctgcttgtcctgccacgcggaatgggagtccgtgtgtgccccgctgcccacagcgtgtgaacgtgagttggggaccatgtggcccactgcgcgctgggtccc

SEQ ID NO: 343604 - DNA, 301 bp, Homo sapiens
  chr19:2413723-2414024
  hypo
cgaggagccctctggccggttctttctggctggcatcgtgagctggggaatcgggtgtgcggaagcccggcgtccaggggtctatgcccgagtcaccaggctacgtgactggatcctggaggccaccaccaaagccagcatgcctctggcccccaccatggctcctgcccctgccgcccccagcacagcctggcccaccagtcctgagagccctgtggtcagcacccccaccaaatcgatgcaggccctcagtaccgtgcctcttgactgggtcaccgttcctaagctacaaggtattttc

SEQ ID NO: 343605 - DNA, 690 bp, Homo sapiens; identical to SEQ ID NO: 335901
  chr19:2488431-2489121
  hypo

SEQ ID NO: 343606 - DNA, 221 bp, Homo sapiens
  chr19:2511254-2511475
  hypo
cgtggtatcgacaactccacacaatattaaaacactgcgagaaagtgggtgcggcacacctggaattttaaaaaagtcagaaataaaaacaaccagacatcccaatgcagatggcatagaacctgctagaaccacaggcggcggctggaaacaggagacaggtctttacgaaggttagatgggcagcggttccgtggacagaggaggaggcgcggctggcc

SEQ ID NO: 343607 - DNA, 273 bp, Homo sapiens
  chr19:2524648-2524921
  hypo
cgtgtgtgcgtctgcatatgagtgtgtgcataggtgcatttgcatacgtgcatgtgtgtggacatgcatgccagtgtgcacgtgtgtatgtgcacgtgtgtggacacggcactgcatgtgcgtgtgcgcacacgtgtgtgggcatgcatgtcactatgggtgtgtgcatgcgtgttggcgtgtgtgtacgtcactgtaggtgcgtggatatgtgcgtgcgtgggtgtgtacatgtgtctgcatgtgtacatgcgtgtgcgtgtgtgtgcgcac

SEQ ID NO: 343608 - DNA, 313 bp, Homo sapiens
  chr19:2573883-2574196
  hypo
cgtggtcatatgcgaacgggtgaattaaattctttctggaagaggctggaaaggcactgcatgaatgggacataccgtgggtgccacggaccagctgctgcgaggtacggccggagttctgccgcctcggggaggcctgggtatcccgagaccagagatgctgccttctcaccttgggtgcctgggtctggcccagagcccgtcacacctgggctggtgcagtccaggtgaaacccgccctgccagccacccccaccatctcccggggtgtccctgctgggcctgcattctgacatcacgccttcaaactcaa

SEQ ID NO: 343609 - DNA, 561 bp, Homo sapiens; identical to SEQ ID NO: 335903
  chr19:2702445-2703006
  hypo

SEQ ID NO: 343610 - DNA, 322 bp, Homo sapiens
  chr19:2795325-2795647
  hypo
cgtgagctggcagggcctggcggcatggctgcgtgggctcctgctcccccggatgctcctcgcagtatgcagtggggcctttgctgttgatgtcacatgatcaggagagacccagagaccctcctgctgctgttcatcctcttaggcgaggacccctgggaatgtgctgatgtgtcccacagtctcaggatcatgcagccctagtgctttggtaaatccagatcagggtgacccatgatagccgtggattgttatttctttttatttaaatacagacagggtctcacaacgttgcccacgcttgtctcgaactcctgggccc

SEQ ID NO: 343611 - DNA, 577 bp, Homo sapiens
  chr19:2796376-2796953
  hypo
cgtcccggggagtgctggactcagggagtgcttgggcacagggagtgctgggtgccgggagtgctgggtgtgaggagtgctcggtcccagggagcactgggcatggggagtactgagctcagggagtgcttgggcttggggagtgctgggtggggggagtgctcggtcccagggagtactgggtgtggggagtgctcagtctggggagtactcggcatggggagtactgggcacggggagtgctcagtcctggggagtgctcagttgcggggagtgctgggctcagggagtactgggtgcggggagtgctgggcgtggccagtggagcttctgtggccccctgcccctgcctcctcgggagcgtccccccttcagggctgacccccggcctgatgtccatctttcttctgcctgaggacctgaactctggcaaggcaggtccacacagacatggggcgcagaggctcggtaacgaggggagcccctccacccactgcccggtgtgcctgatgtgggcgtctcaggggtgacatgagttagttggtgcagagctgggagcgcagcgctgaagtcaagc

SEQ ID NO: 343612 - DNA, 183 bp, Homo sapiens
  chr19:2997586-2997769
  hypo
cgtgcccaagaggaacaatgatcaccggttccccagcccgagagagaagtgcggatgtgatagatacattttatttccaccgaggtcccctgcccatcggcccccacatgcagcaggggaaggtgtgaagccgttggccagagagcagatgggatgtacggttcctaggcagggctgggaggc

SEQ ID NO: 343613 - DNA, 783 bp, Homo sapiens
  chr19:3105574-3106357
  hypo
cgtggcggaagaagctgatcccgcctcccaacaccactgtcttaggggtgagaattttaacataggaatttggggggatcacagacattcattgctatgggtgggaccacttggtgcgttgcccttggggtggcggtgtggtcagtggtccattcctgcccagcgccgagcagcggtctgtgcgtggggtctttgcacccgtgcacctgctgaagggtctctggagctttggctttttggcttttacgagtaaagctgccgtggtgcttggtgtgcggtgaggagtggacagaaggctctgtcctggcaggtgccctgcagtggcctgagaccgggagatgagggccggcaaggggctgtggacgagtccagagtgaggcggcatctcggaggggctcacacattgtctcaggaggagtgggctggcatttctttccagtgggcagctgttgaagattttggagccaaaagagcgttccagctcagatgtctttcaggtggagtgtggctgcaggtggggcaggctgggtcagggtggagccatgtgggctgaggcccgagttggggctgtggctttggggccacatggctgccggtcgggtgggagcgagtctctgctgaccagggccctggatgttgagccccagccgcggggtgtgaggtctcaggcaggacccaggcattcagacattgggtccactgtgtgtggacccctgcgtcccagctccaagacgctgtgtgacgggaggcggcagcagctgagttggcgcggggagacagggc

SEQ ID NO: 343614 - DNA, 341 bp, Homo sapiens
  chr19:3114752-3115093
  hypo
cgtatcccgaccccagggtctccattggcccgagccctccgggctgcttcagacactgccgtaggtggcgcagtgcgcggtccaccccctcctggtggctttccgtcctcccgctggtttgggtgctgtgtccctgtcctgcccccccacccccggcagccggcctgagcacccaccgctgtgttgcagctacctgaccgacgttgaccgcatcgccaccttgggctacctgcccacccagcaggacgtgctgcgggtccgcgtgcccaccaccggcatcatcgagtaccctttcgacctggagaacatcatcttccggtaccgcccgggccacagcaggc

SEQ ID NO: 343615 - DNA, 199 bp, Homo sapiens
  chr19:3219527-3219726
  hypo
cgccgcgccctgccactcccacgcgctttacttcctcagtaacatccatggcacgggcatcctgcagtgaccgatgcccaccagactgcatccgctaacaagacagggagaccggcctgtggtacccagatgtgcccaagctcacagcctcactattctccgtgctcacagcctcgctattctccaggctcacagcctc

SEQ ID NO: 343616 - DNA, 688 bp, Homo sapiens; identical to SEQ ID NO: 335904
  chr19:3360723-3361411
  hypo

SEQ ID NO: 343617 - DNA, 1016 bp, Homo sapiens
  chr19:3490855-3491871
  hypo
cgctctgaggtctgcttgtccctccctggcccctgtgccctacctgacccactcagggaccaccaccctgtccctacccaggcctcggggtgggggagtcagaggcccccagaccctgtgtcccattcctagtgaagctgaagccaccataacgtcagcctcttcccagagccccagctctgcccctggcttccctcgcgatcctcccctggctcccctcgcgatcctcccttggcttccctcgcgatcctcccctggcttccctcgcgatcctcccctggcttccctcgcgatcctcccctggcttccctcgcgatcctcccctggcttccctcgcaatcctcccctgtcctgagccgggcatcccagagcctcccgcagagtcccaccccaagcctggaaacttccacgctacagccctgcgccaggccccgaggagcagtcaggggactcagggagtcacagcacaacggcagctcctcggtcccagacggaggagggggacagcaaccatgcgcccagcaagacacaagcgatgacaccgatttacacacacccggtttagacgccaaagctctgcgggggaggagcggccctcaagagtcctccgggagctccgggtgagggtggggccctaggagggggccccgcgcagctgctccaggccgtccgcgtactggaaggcccgcccggtctcgtgctcatacatgtccagagccacctcgcagctctcacgcaccacgcgctctgggtcgtccgcgtgagcctgcagcgcggccaggcaggcgggccgggcaatggcgcccagggcctccgcgcactcgtgccgcaccatggggttctcggtgcatcgggccagggcggccgccagctggggcaccgccgcctcgtgctgcagctgtcccaggacgtagccgacctcgtggcggaagagggcgctcccacagtgcagacctgcaggggagagggacactcgctggggccaggaggggtgggaaggggagctctgtcttttc

SEQ ID NO: 343618 - DNA, 83 bp, Homo sapiens; identical to SEQ ID NO: 272906
  chr19:3494540-3494623
  hypo

SEQ ID NO: 343619 - DNA, 190 bp, Homo sapiens
  chr19:3548059-3548249
  hypo
cgggcccagcccccgcccctggctcgaggacttcaggcgacccacccggactccagctcacccggaacacgggcacgtcctggccccccagctggtcgctgatgctgatgtcttgggtgggctccacccgcgacgagccctgcaggtgcagcaggagccaggcggcgccgtagacggtgatgttggccac

SEQ ID NO: 343620 - DNA, 240 bp, Homo sapiens; identical to SEQ ID NO: 272914
  chr19:3565326-3565566
  hypo

SEQ ID NO: 343621 - DNA, 146 bp, Homo sapiens
  chr19:3571360-3571506
  hypo
cgtgagccactgcgcccggcccatggcggataatattctgttgtaaggatatatcccgtcatcgatccatgcatcattagcagacgtttgagttgttttcactttttggctattatgaatcacgctgctaccgacgcttgtgtaca

SEQ ID NO: 343622 - DNA, 482 bp, Homo sapiens
  chr19:3576061-3576543
  hypo
tcccgtgggttgggcgggggaaagatacatagccagacaggagtgaagggggctcactcggtacagcgatgggggatgcccagacgcggggcactcaagtggggagctggagccggctgagcagcgctgacctagggtgcagggcgtggtccctggaggcctgggaggctgaccctgcccttcccctcccccgccagaagactcgagctctgggctcatgaacactctcctgaatggacacaaggtaagcgaccttcttcctctcaaagcacctgggggagaaaggtctggaggcttctagaaccctgagtcagagccagtgctcgcccagatgtgtgcaagcaggggcggtgccactgcaccgtgggatcgctgttgattgtactcccaccggggtgtcccaggagaccctcctaggcttggggcacacccagagagcgtggctgcctcctaccaccagtaaattgccaccttgtcccttc

SEQ ID NO: 343623 - DNA, 739 bp, Homo sapiens
  chr19:3577759-3578498
  hypo
cgcccgccgctctagccccgcgtccccaccctgtccccgtcctcgccatcctcctgccccggcttaccttagcccaccctgcgccgctcctgcgctggcggtgtccggacctctgagcgcccgcgcgacccgccctgagtcaccccctaccgctgcccctggagcccccgccccgcgactccccggcaccctcgcctgaccttcccgcctgtcccccaggcacgggcgaaacgcccacgctgggcactctggacttctacatggcccggcttcacggagccatcgagcgcgaccccgcccagcacgagaagctcatcgtccgcatcaaggaaatcctggcccaggtcgccaggtgtgtgccgggcgaggcggggcggggccggggttcaaggcccggatgtgcccgccctggggttccccaggtccgcgagggctgctgggtgggactccgcagcttactagagatcacctcccggaggggcctacctgcggtcgcccctgatgcaccagtgctaggatggccatggagaaccccgggccggcgggacccactcgggggcaccagaacttccctaaagcttctcagggtggatcccagcgcccgggttagataggttcaacgcctgtcccccaaccctggcatctgttggagcagctgatgggccatggtctctggggttccccagggccggggtgggggccagagatgatgagggcctcatcccgggccctcctctct

SEQ ID NO: 343624 - DNA, 205 bp, Homo sapiens
  chr19:3669713-3669918
  hypo
cgcccctcggcccccatgggcactgtgctgctctcggtgggtgcacgggagacccacgtgtgtcccatccagaggctgcaccccggtgaccgccctgccgtctgaaaacacgtccaccgcgggcactgaaggcaactgaatgcgacttggtggagcagcccatagctttgctctgctgccgggtcagaactgccggagacaagac

SEQ ID NO: 343625 - DNA, 286 bp, Homo sapiens
  chr19:3747832-3748118
  hypo
cggcctggccgacagctccgctgacctcagctgcgacagccgcgttaacagcgactacgagacggacggcgagggcggcgcgtacacggatggcgagggctacacagacggcgagggggggccctacacggatgtggatgatgagcccccggctccagccctggcccggtcctcggagcccgtgcaggcagatgagtcccagagcccgagggatcgtgggagaatctcggctcatcagggggcccaggtgcgtcggacatggggggcaggcctgggaagggtctcc

SEQ ID NO: 343626 - DNA, 401 bp, Homo sapiens; identical to SEQ ID NO: 272940
  chr19:3770613-3771014
  hypo

SEQ ID NO: 343627 - DNA, 544 bp, Homo sapiens
  chr19:3777982-3778526
  hypo
cgtctttatcgggcgatcatccttcgcaggtctggggtgtccacgggccgcccagagccccctacgtgggccagcccctgctgtgggcaccaggaggatgacttgcccgcctggaccctccttgggcctggtcagtgcccccacgccgcactctccactctctcggtcctctggggccaagggccccaccgggtggggtcagggctcctggcttcggggcgaggtggagccgtcggcgtcctgccctgagacggaggctggggcacctgcactgcgtagctcccgggccagcttctcggccagtttgcggaagggtggccggcgggcgggctctgcctcccagcagctgctcatgaggacgtgcacggggcctggacagccctcggggggttccatgcggtaccccttctccacggcctccgacacctctttcagtgactgcggacagcaggcgtgggcaggggtcagggccacagcctctggacctgcccggaacccagtgcctccctgggacccccgctcaccattttagggtacggagccc

SEQ ID NO: 343628 - DNA, 482 bp, Homo sapiens
  chr19:3778991-3779473
  hypo
cgtgtttgagagcctcgggcgccgtccacttgacgggcagccggcttgagtctagccccttccgctcggctttggccaggccaaagtcgctgaccttggccaccaggtcctctgagaccaggatgttgcgggcggccaggtcgcggtgcacaagcttcttgctctccaggtactccatgccctcggccacgtgcctgggggtagtagggggcagtgggggctcaggtgccaggatgcccacattcagggctcagaaagctcggggtgcctggggccacaagctcacaaagcctccctgccccgtgcctcagtttccccttgatggatcttggaatctgcgccccgacgaccccagtgccgcagcaccctgagagtcccacttacagagaaaactgcaggagctgagcggtgttcacgagggctcgaccccgggtccgcagaaagttcaccaggttgccctgttgggggtgggagatggccgc

SEQ ID NO: 343629 - DNA, 1100 bp, Homo sapiens; identical to SEQ ID NO: 335906
  chr19:3785511-3786611
  hypo

SEQ ID NO: 343630 - DNA, 229 bp, Homo sapiens; identical to SEQ ID NO: 225741
  chr19:3821974-3822203
  hypo

SEQ ID NO: 343631 - DNA, 581 bp, Homo sapiens
  chr19:3907689-3908270
  hypo
cggactctggcgtccatgcgactctccgccacctgcttctagacgacacccccgtggccaccgccaagaacatgcccggggacagcgcggatctatttggggacggcacgacggaggacggcagcgccgccaacgggcgcctgtggcggacagtgatcatcggggagcaagagcaccgtatagacctgcacatgatccggccttacatgaaagtggtcacccacggaggtgagacccgccccccggtgcccccttggggctccagcccggcccactgggcaacagggggttcgtcagtgcccctctctgatgcacggggatgttaagccgtcaactcgcttcgggtggacggactgtgggcaaggcgtgcatggtcagggaggcgcactgggggcccctgatggtcgctgtcactcctcagcgaaggcagagactggctaaggggtcgccggctgctgtggctcggagccatgccctcccgagcgtgtgggcaccgggacgtggtgggtggtgcgcgggaggcagctcagggctgggagaggactctgacgttgccgatcggctgcctctcctcagggtac

SEQ ID NO: 343632 - DNA, 417 bp, Homo sapiens
  chr19:3966086-3966503
  hypo
cgcattttaaagaaaccaaggctgagaaaaggaaagcaactagcccaaggtcatgcagtcagtcagtggcgggaggattcaaaccttcaaaccaggtgctgcaggctccagagcccaggtgctctaacaggaagcagacagctgctgctgggtaccgggttcctgcgtgcctacctcccggctccacgctgtctcctgctaacagacccagctgtcccagggcagcctttgccgctcactctcagtctgtgggactcagtggcccaggaaaggggtggaaggggacacgactggacctgggcaagcagaaaaccacgccttccagcccaaagagaccggtccagtccacagggctctgaacgcctgctgggaagagaggatctctctctccctctgctgggcttggatccaggctcg

SEQ ID NO: 343633 - DNA, 351 bp, Homo sapiens
  chr19:3966587-3966938
  hypo
cgggtggcacataagccccgtcattcactctgccagggcgcctcctccatgctggagtggacttcggccccggggacacagggcaccatatgcaccagcacccagtcacacctgcggccgctgcacacctggacaacctggttctgtaaaccacgcctttccctgttttgctattgccaaccagatttcaggttctgccactgagtcctcctacagcaacagcagaccacagccgcccacctccagacagcccccggtctcactggccacagacttgctccttagaggcaaggccactggcaggctctcagttcctctacggaatgtgaaacgtgcctcatctccccagcc

SEQ ID NO: 343634 - DNA, 134 bp, Homo sapiens
  chr19:3978025-3978159
  hypo
ctttatcgatgtcctcggccaggccgtcggggaagggccgcgccttcatgtacagccggttgtgcttgttgggggacttggagaggcagagcacgttcgactcttcactgaccgtctcgcggtacgagacgacc

SEQ ID NO: 343635 - DNA, 765 bp, Homo sapiens
  chr19:4042909-4043674
  hypo
cgcgccaggggctatgggtcaccttccccgcaagaggggcctctggacctgggtactcctcggacactcacccccaccccggtgctctgggtcaccatccacacccagcctctctgccacgcgacagacggaccccagagagatgggcctggcttccaaggccgggcaggaagagcaggaagggtcggggacctggggcttctctccttgggacccaggatccggtcaccctgggcccaaaggtgtggtgtggacgaggtgctcaacccacccagtctcttcagggccaaaaggggaaaagggggaccccccccaagccccccatccccgctccccagcctcccccgaacaaaacacagagaacatcaaatgaggcgactgaggcggcagcggtcgtaacaggctgcgtttagtggttctttttttttttttatgtacaagaaaaatgaatttttttgttttttcatcttttgtgtttttgtttgttttttattacttttaaagcttctccctccccactcccaaaaagtgcatttttatcagttttttttttttttaaatctcccacactttataaagactctcaatacagtctctggaatgtctatctgtctgtgctctgtaccctgagggcgccgccccgccccccattcaccaggcctggcccctccaaagtccaaggcacctcgattctgggcctggggtggggtggggggcgggacctgggcatcggatcctggtccacagcctccaggcagccccggc

SEQ ID NO: 343636 - DNA, 1632 bp, Homo sapiens; identical to SEQ ID NO: 335908
  chr19:4053805-4055437
  hypo

SEQ ID NO: 343637 - DNA, 97 bp, Homo sapiens; identical to SEQ ID NO: 205124
  chr19:4064872-4064969
  hypo

SEQ ID NO: 343638 - DNA, 571 bp, Homo sapiens
  chr19:4094519-4095090
  hypo
cgggaggcggtggaggagacaagacagggcagtcagctggtggccccggggcacccgcgtgtgggccgtggtcggagggggcctggatctctccgaccagagagagtggcacagagtggctgctctgttctgcctcctggcagaggacgagggatccacctctgcactttggtgccaggggcaggacaccccccagcgggagggtgagagggaaagagggtgggaaaccccgcctggtgggtcagaagcctggacgcaaccccagctaactgtctaataaaaccccaggcccggggcaacatcgccggagcgcacgccaagggcccggggcaactccggcaccaggagtgcggtgccgttccacggcgtcccgagctcacacacatggaccggccctgtgggcagcggggtgtccgcagctccttccccgtggtctgcggcacatgcctgtgaagcccacgccacaggtgctgctgggtgcttgggggcaggagaatggagtggggctggcgaccctcccagaacctgcgggcggatcccggggagcccacagtcagcacaccaggggtcc

SEQ ID NO: 343639 - DNA, 625 bp, Homo sapiens
  chr19:4096065-4096690
  hypo
cccggccaaactgggtccacagttttaagcccaagcactggggagcctggcctgacacacgtccccggagcgggagtggccgtgtaagcggtgccagcagggcaggggcaggcctttcccgcgcaggggcaggggcgggaagaggcgggggagaggtcgggggatgtgctcactgggcatgggtgtggctgctaggtgcagggagagctgggtcaccagggccaccccacctggctccgtcatcatctcgccacccaaccccaggcctagcccagtctgcaggcagctcaaatgcccgtttctctgccccagctccaaagggccaccaaagacacagaaacccacagaaggcccagggaggtggcccggcctggtcacgtggccaacaggaccttggggtgcagtcctgtgcctccctgacagctgcaggcctggaaggaggccgcgtccctccttgtgccttgttttactcatctgggcggtggaaaccctcatactgtggctcactgggttgttatggggactgacggagcaggagccaccccgggacctacaggtccttctaggctctctgggcctccttccaagaggcaagggccattcctgtacctttctccgtggaagc

SEQ ID NO: 343640 - DNA, 112 bp, Homo sapiens
  chr19:4290473-4290585
  hypo
cgcgcggacccgtgagaaccaggtggtgctgggccaacacagcgggcccttccccagcgtgcccgagctcgtcctccactacagttcacgcccactgccggtgcagggtgcc

SEQ ID NO: 343641 - DNA, 235 bp, Homo sapiens; identical to SEQ ID NO: 335911
  chr19:4304482-4304717
  hypo

SEQ ID NO: 343642 - DNA, 712 bp, Homo sapiens
  chr19:4361167-4361879
  hypo
cgatcccatcctgttaaggctgcgggactcgagggtaggcagtgggccgggcccccgtcgggtcaggacggaggtgggggctgccccagaggaacattagtgtttctaagagcaccttagtgttgccccgcctcggccagctgggcgagaagttggggagcgggggaggaggctggcgccatggagtggggaagggagccgtcaccgttgggagtcagcgctagtgtaaacaggcatccccacccacccagataagcccccccacccaagtgtggggtcctgctcagggagtacctcaagggccggggcccaggtggcgccggcaggctcagacaccgccctggcagcaggggctccgtggaatgcaggagacccagcagggggtgccggccagtgtggacggaggggcggggcggggacacgggtgagtcactgcggcaggggcacaagcacctccacgtagctgagcgggaagaagcccgactggccgtccagcatgccctcgtaccagttctcatcgatctggttggtcagcgtgatgacgtcgccctcatggaagcccagctccccgtcgttctcgggctcgaagtcgtacagcgccttgcagctcggctggtccaggggcgctgggggcgggagcgggctgtggggctggggctgctacgcctcaccccgcccagtctggggtctcagacctgctgtgacctggagc

SEQ ID NO: 343643 - DNA, 107 bp, Homo sapiens; identical to SEQ ID NO: 335912
  chr19:4432865-4432972
  hypo

SEQ ID NO: 343644 - DNA, 238 bp, Homo sapiens; identical to SEQ ID NO: 335913
  chr19:4523781-4524019
  hypo

SEQ ID NO: 343645 - DNA, 179 bp, Homo sapiens
  chr19:4548007-4548186
  hypo
cgcccacggctggcctggggtggacactcacttcatacaccccgagtactgctggcagcgagccacaggcactcggaccacgcagcgggggaaggcagccagcaggccccccgaagctgcgtccagctccaagctcagcagccgctgccctgtctcgccaccgccgggccgtccacacc

SEQ ID NO: 343646 - DNA, 144 bp, Homo sapiens
  chr19:4550229-4550373
  hypo
cggcaaggcgctggaggcattgtactgcatcccgggggctgcgcagcacccgggcctgggggtgacaagggtgtggtcaggacgaacgtaaaggttctcataaaggggcctgattcaccagaggtacccattgctttgcccaac

SEQ ID NO: 343647 - DNA, 273 bp, Homo sapiens
  chr19:4550735-4551008
  hypo
cggaagccccagccctcggccctggggatcaggacctcatccgggcatgtgactcaggatggagggggttctcaccggggtcgaggcacctgatcctccggcaccggcgtccagatggactcgggggacttctgctctcggaagcggccttcaaacacagctgccacctgtgtcaggtcaaaggcgcagacagccgagccagggatgctgaggggttgggatgaaagagtttggtgagcccggtgggaggccccatctcggacaagtgcgtgc

SEQ ID NO: 343648 - DNA, 196 bp, Homo sapiens; identical to SEQ ID NO: 273002
  chr19:4555921-4556117
  hypo

SEQ ID NO: 343649 - DNA, 443 bp, Homo sapiens
  chr19:4556928-4557371
  hypo
cgcaggggccgggaccgagccagggccaactcacctcctgtttgcccttcatccgacacacgtttatgtcgctggggttagatctccaggtcagcttctgcagacagagagagctggtgagggggtaacgggtcccagcagccctgagtgaccccgccgtgctgggccgaatccacccagctccccggcgcagtgccgcgtccccctggccctacccctccactcccacctgcaccccttcctcaccctctggtaccgcagctccgtggacgtggggggctccagctctacgcggtagaggttgtccctgggggaggggcatagttagtgagaactgggggctccgccaccctctcccgttccatccttcccactgccaatgtggtgtgcacacgggggcatgcagggccatgccaatgcctctgacacgagcaactctagcg

SEQ ID NO: 343650 - DNA, 130 bp, Homo sapiens
  chr19:4675518-4675648
  hypo
cggctgggctggggaggggacagccgccactgaccagcagagcgtggaagttcggtgcgtttcagtgcctgcctgaaagcttggggacaggagggctgtccacaggtggtgccccccgcgggccctggcc

SEQ ID NO: 343651 - DNA, 638 bp, Homo sapiens
  chr19:4676079-4676717
  hypo
cggcctgtcttttaaataattatgaaaaatatccccccaaacaaaacacaaacatcaagttggggaggctggccgggggggacaggcaattgcatgcttgggtgctggggacggtggctggccgggccaggggactgagaggtcacagggagccccaggcggaaggcagcccgctcctctgagtctcttctggcctctccagtgcccatcagcgtgtgacctcctcctcccagaaggcggggagaggaggggctggcccgagaccaccatctctctgtctcggcaaccaagaagcagcggacataaaacccaagagcgtttaaaaaaggataaaaggcgtcggggcggtgaaggcagcggctcctcggggctggccagcgctgggcgggacaaagtgcctcactggggcccgcgggccactcagtccctcccgcctggttccccgcggaggctgcagccacttgtgctgtgatgtggcggctcccggtgggcaggctcagaggtattcctgtagaaagtgcagcaacgtgacttcatagtgctcgcccgactcggggcagcgaatactgtgtctctcgttggggtagatctgcggggagacaggaggcagggctggggggcgtggccggaccaccccc

SEQ ID NO: 343652 - DNA, 181 bp, Homo sapiens
  chr19:4679454-4679635
  hypo
cgccttaggaaggagcctgctagggccttcagcactcagcggtttcttctacgcaatttctcagtttcaaataaagcccgtctgcggggcaatttcggtaagggttcctccctccattaggcccggagcaggggtgggtgtggcagcccccgatcccgtgcttccagcaccgaaggcaggc

SEQ ID NO: 343653 - DNA, 80 bp, Homo sapiens
  chr19:4697654-4697734
  hypo
cgagacgatctgaagggaaacaaacaggtgtgggtcatgccctggcctgcccggcgctgctcggaggagaaggccactgc

SEQ ID NO: 343654 - DNA, 262 bp, Homo sapiens
  chr19:4714200-4714462
  hypo
cgtggatgatgctccggagcccgtcccacgagtgcttctgcacctggaagcgggcggccgggtcatctgtggcggctgcgtcgcctcggtcggccgttggggtcccggtggtggccatcctctcagccccctcggaattcagcgagaagctgcggggaggaagcaaagactatgagaaaggagaactgttttacctacgagctgccccaatgctgccccttgcgaggcactcaggttcttccagacgagccccacccctgcc

SEQ ID NO: 343655 - DNA, 461 bp, Homo sapiens
  chr19:4795062-4795523
  hypo
cgataaatccactagctaagacgtcgagtgccaagaccagccttccagccgaggtttggacaaagtctcaggttcccgtgactcagggtaaggtgctggggctgccagaggacctgccccagcaagatttttgtcaagagcgagactccatcagcccaggcagacgggagcaggttcttggccagcgtagacagcagcaaacagcagcagggaagccattctcactgcatcctccctgcagtagccacggccaggcccttaggaggagcagtgaccgggggtgtccagaaatatcctgtccctggatggaaactaggtctcgtttggatttttttttttttttgccgtgttaggaaattatttattaatttacaagacaggttttaactcagccgaggtgggaaatggtgtccctgtccctcccaaagcacagagcacagaaatgaggccgtttacatggc

SEQ ID NO: 343656 - DNA, 705 bp, Homo sapiens
  chr19:4816460-4817165
  hypo
cggtgggggggtgccagcctgccatgcgtgcaggggtggcggctgcgggcaccccggccaagtgggaaagggtggcggggctcccaggggcacctggcccccaaagggcattcgagccccatagggcgccccagtcccaaatgacatgtggctcccaaaagccacctggagctgctccatctgtgcctggtaggacaagtagctctggaggtaggctgagtaggctgcgttcagtgccgccgcctgcatccgctcaccgtccaggtgttggctctgttcccgcagggctcgggtgtcctgttccttcctccacatggcctttcgggcctgaagcctgtggggcttgaaggtgttggccaccttcctggcgaagatctgggagtgttcgtccagccgcaccagcccggagagcaggctggccgtgtcggagctgagctgggccggggagctctccaggggcaggaaggggatgacacagtctggcgacccctgtcgcgtgaggttgctcatcatggcttggttcacctggtgcaggctcaggcgacagtcgaagttggaggtgagaagtaggatgatgaaagctgagtggtctatggcgtcctgcaggcagctcagctccccgcgccccggcacctggaaatcctcgcagaaggtggccccgtcgggcacgccaagggcctccagcttctcccgaacccgcagggc

SEQ ID NO: 343657 - DNA, 586 bp, Homo sapiens
  chr19:4817473-4818059
  hypo
cggtgcactccactgggtagttggtgctggtttctggagctgcgggggtatcagggaggccagtggaggttgcatctggggccacttcgggaagcccaggaggtgggctgcttggcagctctggtgggctggcaatctcccccgatggcggccagctcatctcctcaggctcctggcagccaccggggacaggctcgggcaccaagctggcctgggggtcgtcacagagcttgctgggcccatgtgggctgcggtgcaggctgaggaagggcatggtaggggactggctgatttccaagttgctggccagggaggcagggctgccagtggatcgcagggagcacccttggctccagtccgaaacaccgtcaatggggcgtgggaggctcctggtcccagagggcaaagccgaggatggtgggaggcagcccagattggactggagcgtccggatgctccctggatccccagcaatgtcccacccacaccggtttcgggcctcatcctgaagttcccccagccggtggtcgtccctggagctgagggtgcggacggcttcctggtaggccacgtcccgcagcgaggc

SEQ ID NO: 343658 - DNA, 122 bp, Homo sapiens
  chr19:4934661-4934783
  hypo
cgagtgatagtacgtgacgtgttgtctataaacacgagcatcttggcaacggcgttccaagtacaggtacagcaagcacgcagaggtcctgggctgggacatttatggtgcatctgtggccc

SEQ ID NO: 343659 - DNA, 460 bp, Homo sapiens
  chr19:4986364-4986824
  hypo
gatggcggagtaaacgggtgatggccactgagcgctggccgtggggactcttggtcctggctgccaagtagaagcttcaggggtgctcttcacagtcagctgactctgctgtccctgatagcagaagacagcgaaggcacctgccccctgccatggcaggtcggcgggcacagaggagggctcgggaggctgtgtcctccagcgtctccatgtttactgtgccaggccaggtgctgaggggccggcgaggaagacgtgaggactggagagagcctggattagggccctcgaggggcggcgctgctttagccgggggaacagggagggcctctcccagcaggtgacattcagtcagagacctctgagcgactcacacctgcccacctttgcaggatttgggacaagagtgctccaaagaagtgcaggcagcacgtgcggaggccccaaggcggaacgaggc

SEQ ID NO: 343660 - DNA, 648 bp, Homo sapiens
  chr19:5023047-5023695
  hypo
cgcgggtgggactgagtgaaggaccctgagctgggagatgaccctggatgatctggggagcccgatgtcctcaccgggtcctcatgagaggaggcaggagggtgagagtcagagagaggctggaagaggctgtgctgtggctgcggaggtggaggaagggccttgagctgagggaacctggcacgcgctggtgctctctggagtaggacgaagcagagaacgttctcgtgccaaggttttctctttcctgcctgagggccctttatgtagatcagaccagagacaagtgaatcccggtcttgccaggggaggcatttggagctgctcgtgggacgtggtgatgcggtgccaggccacatgcccggggctggggccgagtggcgttctcgtgctgcctctgtggccaggtttcacttgggaacctggctgcatcgcgggttcctcctgggccttctggtggcttggggctcctctgtcctcggtccctgctgggaaccgtgctttggcagcaggaaccagcgagatggcagcacaggggctggaggccggctgggactcactggggccgcatggggcttcacctgatgcccagccctcctgggacagggaccagtgggagcaggaggtgggacaagaggacgagggctc

SEQ ID NO: 343661 - DNA, 419 bp, Homo sapiens
  chr19:5037576-5037995
  hypo
cggcgctaagctggactgtcctttccttgggaccggcctcatcttggtttaactctaaattagtgtttctcttcgcttggcactgtggacttggggccgcatcgttctctggggtggcgccatcctgggcattgcagggtgctgagcagcttccctggcctccatctacctcatgccaggagcaccctcagtcgtgaaagccacagacatccccagacatggccaggtgtcccctgggggacaagaccccccctcagttgagagccacctgctcgctgcggctgctgctgctgttactgcttttgctaaagaaacctgtgcatgccggccacggaggcagcaccttcctgtcgttaacaggcacctggaggataagtgttttcattgccaagcaaaacagtttcttcactgatgtgatc

SEQ ID NO: 343662 - DNA, 305 bp, Homo sapiens
  chr19:5038238-5038543
  hypo
cggagcggctgggagggcctgcacagaagggtgcctggcacccagaaggcccgtggtgcccaccggcagtctagaatctggtcttgtcggcccataggctcacccccaccagaggagggaacatgaggctggggacaaggccaggagcccagggtgaggcgtgtactccggatagccctggtccctcagctcctggatgtctccagaaagagccggcgctaacctggactgtcctttccttgggaccagccttgtctcggtttaactctaaattagtgaaggcaccgggttccggctgcagtgcc

SEQ ID NO: 343663 - DNA, 517 bp, Homo sapiens
  chr19:5064018-5064535
  hypo
cggcttgctctccttcccggcctgtgccagccacagggcagtgcgccagagccatcttgctgggtcacaggccggggccaccatagggctttgttgcgagggtggcggtcaccatggcttttccgttctgtttgcaacttggggtcccgggggcgccactggcgtttggatctgccgtggccctcctgggcttgcgtgggtggctcactctgccaggtggcctctgtccaacctgacacctggtctcgggtacttccagcgtgacgtgcacgggctctgcctccctcattctgtgtctgcgatgatagcgcattaaatggcgaaggcccgtctgcccaggcctgtgcagacactgtgaaattaactttctcaccctccagcacgcattgggctgtgccgacatctctgaagggctcttggtcggacctctgctcttggcacacattcctcggcggcgggggtggggggtagggaggagagcgttttcatccctggcacctaattgccgagagcttcc

SEQ ID NO: 343664 - DNA, 298 bp, Homo sapiens
  chr19:5102582-5102880
  hypo
cggggccggggtggcatctggggccactcccggtctcttgctgttggcgttgggagggatctcgcaccacagcagggaatcgaggccccggctcccctcaggctctcccttcaccggcaatgggcggcgggcgacgggtgacgggtgacgggtgatgggtgcagcacccgccccgcccataggagagccctggtccactgtggcctgtggatgccgcccctgacgtcagcatctctctctggcctccctgggagcagtctcagagcagtgaagagctcttcacgtccggtgctgtggc

SEQ ID NO: 343665 - DNA, 303 bp, Homo sapiens
  chr19:5132575-5132878
  hypo
cgcgtgggatcacagggcgggagctcccaggagtggaggaatcggcacggggacagaggaatgaccaggggcccccgcgggctggcttgggaaggggtcttgccttctacccaggtatccttccagaaggcatctctggggcctccgtggactcccccactccccacaccccactgtgaccctttggtgagaccggagcatttgcctgtgagaccatcacggccccagaaccccaggcattctggggttgtgagtgacagacgcagccagtggctctgttctcatccccagggcctcggggcc

SEQ ID NO: 343666 - DNA, 412 bp, Homo sapiens
  chr19:5269159-5269571
  hypo
gggtacatgtgtgccgcatgtatgtgctcacgcttgcccgtgcccacgtgtccacacgtgagcaattcccgtgtgtatgtggccccgcaggggtccccataagcgtgtgtggacagcagccagccagggtgcagggggaggtctcggccgcctgacgctaccgagaacacctaattaaacaaaaacgtacatcgcgaaccacactctgcccagttcctcggagtttaattaaaacaacagtgcaggaggcgtgtgtggggtccacaatcagatggcagaggaggaggaaggcagggagtggccctggcagtccagatggtcccccaccaactgccagggactggccggaggtgcccggagctcagggctggtggcaaggtgggtgggatcgggtcagggtatccaaggcccc

SEQ ID NO: 343667 - DNA, 765 bp, Homo sapiens
  chr19:5587454-5588219
  hypo
cgttttcatcgtaacatgggttcagtaacggtcccgcagcctttagagcgcttgggttttttttccaggtgagaaaaatcatcatcgcacattgtattccaggtaactcaagagcgttatttgcataaattgcaaagagctgctttttgctttgttttcataacatccaacccagccagctgatcaaacatgcaaaaaagggagaggaagtgaggagcaggagtgaaccaccgtcctccacggacgacacaccttaccccgccactccaccgcggcttgccatgtgccccggccccgagggcccagacaggcccctctcgccacctagaagagaagaagggtctgcaaacactccgttcctggggaagcccctggacacatgtgggggccacagccaccctcgtccctggagccagccccgtaccttgccacctggcgtgctcccggctagccgcgcctgcgtccatggcaccctgccaggcgcgtgcctggtgctcctctagccgctggttgtgctctccccagtcacggccacccctttgccaaaagaaaaagacatgcagccatctaatgagcctccagggttgtgtcggcagcaggcgcacccaccctgacctcagctgcatggtgggtcatgccacacaacaagggctgcatgtcaagtgggcaaatcaagggaagggacatttccccaaagacagatgtgctagtaagcacgtgagaaggtgctcaacgccacccagaaatgccaatccgagccacacc

SEQ ID NO: 343668 - DNA, 717 bp, Homo sapiens; identical to SEQ ID NO: 335918
  chr19:5608081-5608798
  hypo

SEQ ID NO: 343669 - DNA, 84 bp, Homo sapiens
  chr19:5630448-5630532
  hypo
cgctttaaaaggacttctttgcttttaaattattaaaaatatgactgtaaggccaggtgcggtggcacacgtccgtaatcccac

SEQ ID NO: 343670 - DNA, 181 bp, Homo sapiens
  chr19:5759620-5759801
  hypo
cgggcgcctataatcccagctactcagggagatatttgcacacctgtgctcacagcagcgtgattcacaacagtcaaaaggcaaaaatcaacccaccggtccatcaccagatgaaaggatgaacacagcgtggtccatccgcacatcgcaatatgactcagacttaagaaggaagggagtc

SEQ ID NO: 343671 - DNA, 1102 bp, Homo sapiens
  chr19:5789249-5790351
  hypo
cgtcctcatccgtcaggggcccgcaggtccgcacggggctgctgggaggggtgctagtgcccggccctgcggggacctgctgggcaccacagttttcctgcctgggagcgccctcggctgccgtgccctcggggacagcggcagcgggtgtggggccctggctgaaccggcgcagggcctgctcagctcgctcgaagcggacctcgcgcttccgcagctgctgctgcagggctttgtccaggccgttgcggatggacgggggctgggtcccgcgggccgccaactcctcctgcaccaggttctgtccctcgggcctcaggtgggccccagcgaagcggcaggtcacgccgtaggggcaccggccgaaggtctcgaagagcacgcagcgggggcccaggtcggccggcttggtctccaggtagcgccccacgtcgtgcagaaagcggcagcgatcaccgaagaaacacttagcagccgactcctgcgaggaaacagggaagcagtgagggaggacagggagaccccggggcagcccagcagccagggttcaaactctagatcacccctcctggctcttgtgtccctgagcaagtcaggcacctcaccgtgcctctgcatctccatttatacaatgagaacaatgacaagccctacaatgtatcccgaggagaatgaagacggaatggcatcagagcaagctcactgctcgttgctgaaggcccaggagctttctaacaattacccgctgccaggaaacacaccctgctcctgcctgccccggcaggaatgctcacgtggccgcacttgcctggattagggagggacacagcctgttcttgtcgtagttcgtgggcttcacatggggccggcccttgttttgtccccgggccctcttctgagtctgtagctgctccccgggctctgctgcctcctccgtctgcccgtccgccgtctgtccatcctccagtcggatccgcttagcctcaggctcagccagctcattgccagcagggtctcctacctcggtttcccggcaagtcttctcctgccctttggcttccaggaattggtgaaactgctccttggtggtgaggtatctgcc

SEQ ID NO: 343672 - DNA, 124 bp, Homo sapiens
  chr19:5797848-5797972
  hypo
cgcgcgtggcctgggctctgcagctttctgaatggccccccatcagggccccggcaggactggggatgcctggccacatgcccgtctttcccactggacgatgagcccagagagggtgggaaac

SEQ ID NO: 343673 - DNA, 605 bp, Homo sapiens
  chr19:5825278-5825883
  hypo
cgcaggtgctgtggggtgagggtggtgcgtgggccctgacccctgtgcccacgcacatgtccatgcgtgcgcctgcgcgggcatctgaggcgtggatgccggcagggtgcgtgtgcagcgcctttgggtgtgggccacgagtacgcccatgtgcgcgtctgcgcccgcccctgccagcccacacaatcctcttttcttgtccttacaatgcacaagggtggcctccagcacgagctccacttctgtcctcccaccacttccctctctgcaagcggcgtgaagtccttcctaggactctgggacagagacccgggcgggacccccaaaatccagtgctccaggacttggggtgcggggggcaaagcacgaatggaggaatttcaggcactgcggagggtcagggcccatgggcgggtgcctgtctgccctactgcaaaaagcgagtggccactgactccccaagtccccatgttctaggctcctggtggaatttcaggctggggaccttgtgttctagcccctgtgcaagcagccagccccgctgcagggaggcagggacagacatcctaaaagatgattcattgttgccaggtgcggtggctcac

SEQ ID NO: 343674 - DNA, 396 bp, Homo sapiens
  chr19:5896616-5897012
  hypo
cgagacgggcacagcaggagcctcttgggcgctcactgccagtgtctggatggagagagatgccacgagtcggctgctcgctgtgcatggcagcctcctggccccagtcctggagctgttctcctgggcctccccaccctacatgtattcctgataaaggaacaccccactttctccggatggccagcactgtggacacgggctggggagtcagagagaagaggcagccgtcaaatgtgctctgagagctggggctgtgccaggagagggcccagccatgcccagcccagcgtgctcacctgcagtgaacgtgtattgtccaaccttagccactccttcaaggaaggtgcccggaggattgagtgtgactctgtaggcagcggcggtcaggcctgc

SEQ ID NO: 343675 - DNA, 396 bp, Homo sapiens
  chr19:5897319-5897715
  hypo
cggccggcagacggagactcatccacgtggtggacacaagaacaggcctgagacctcagttctgcggctgcttccagcctcacaccgccagctcagcggcgccccccacgggccctggcaccagggccccagctccaggttcccatcaatggctctattctcctgtggggcccggggctcctgggcctaatcccccttggcagtggctctgcttccctgcctggctgccaacgcctcctccttgccactctcgaccccctcctgctggcagctcgggcctgggctcgtcctgcacacctggctgtctggctgccgcccccgccacccagcctcgccactccggtcagcttttccatctctgccatttcccaggccgcctggcccctgacattggct

SEQ ID NO: 343676 - DNA, 1275 bp, Homo sapiens
  chr19:5915018-5916293
  hypo
cggcgtcgtgacggtggacgacctccgcggggtgtacagtggccgtgcccaccccaaggtgcgcagtggggagtggaccgaggacgaggtgctgcgccgcttcctggacaacttcgactcctctgagaaggacgggcaggtgggtggctgcgcggggggccccctccccaggcagttcctcggccgtgccccctcacggccctctgttcccaggtcacactggcggaattccaggactactacagcggcgtgagtgcctccatgaacacggatgaggagttcgtggccatgatgaccagtgcctggcagctgtgagcagctccggctcagccctgctgccctggcctgtcactccccacccctgccggagacctcccttccctgggccccttctctcctgggcagccacaccacagagcggggaggggcaggtgggggaatggaggctgcaggactggctagaccaggtccctgccggtccaccaggcggaggtgggacaaaggtcctaacaggagtcactggctcaggaccccagggagaaacgctctccccacccacgccatgctgaccagagatcttgcagcccctgtggatgcccccgccgaggtcccccgatccccgcacccggactgctgctccctgcccctcccttgcgggtcccccaggaagccaggtgaccccaggtgggaggctgtgtgtggaggccatcctggaaggaagtttagacctgcccaggtgtggagcgaggggcacaggggcatcctaacctcagaaactgaaataaagcctttgaaaaaaaaatctgtaaaacatcaacccccaatcagaagatggcaaatggggaataaaaatagcaggtaacatgtccagcgggcccagtatctacattctggtgagcggcccgaggctgggagctctgggcgggggcagaccggcggggccttgcagcaggggtgggggtaaagtgcgggtggtggtggagagaacagggctgtggctggaccccagcactggtgacacgctgggtgggagcatgaggccccaggctgctggaggtcctcgcccggggaggtggaggccgttcctggtcaggggcttcctgaggcccctggggcatgcagaggccagggttttagttaaaagtttaatgtagttcccaaatacatttcatatgacaatcttacataaatgttccaaaacacatgggcgttatctcgttgtactcgtcactagctggctaaggcttaaagcagagacgtgtgactgggtctctc

SEQ ID NO: 343677 - DNA, 311 bp, Homo sapiens
  chr19:5938115-5938426
  hypo
cggggccatcaactcaatgctgagagttataagaacccacctcttcccttgacacggacatcacgccagcagctaacttatctcacaatgcttttgaagtcggcaatgaatttatatatggtaggttgggttacagaattcaggttgttaaactcgcttgttaaatcttttatgaggaatttcagccacgtgggagaaactttcaggaaaccttggagttggttctccagtgaaagaccaaaaaggcaggctccatattcttcagaaagggggagcggctttccttaaaattttaaagctgggggccagac

SEQ ID NO: 343678 - DNA, 137 bp, Homo sapiens; identical to SEQ ID NO: 273121
  chr19:5960699-5960836
  hypo

SEQ ID NO: 343679 - DNA, 922 bp, Homo sapiens
  chr19:5994773-5995695
  hypo
cggtgaaatccaggttcccagagtgaccaggcggcatcttttggaacctcgaggaggcgccggccggggctgctagatgccctgcagggagtggttggggtcactgcgctcccgctttaccaggggctcacccaggctgcgggcgtctgggcccgcctcgctgccacgctgctcatcgcccatgtcatctgcggagggaggggtagggtcagtgtccatcatcaggagggcacgagagggagagaaggaagtgcacgttccgagaactgctccggcacgccaggcagggcaccgaggatacatggcagcctgtggaccccacctcggcctctgctccaggctgacctgtcctccccacctgccgttacccagaggtgcccccagctcgggccaggcgaaagagcctctgccctgtgcctccctttcccagcgccgacgggcctggggcctgctccccacagggctggggcctctggggtcctcccacccgcatgggacagagacggggcccgggggtccctctggcctgcctgtcccactctcctgctgggcgtgggcgcaggagaccaggggctgcctagtctgggcctggtgctgaggtccctgggcagcggctacccagaggccagcggcagtctgagccccagccgagccagtctgcagtgtcacctgctgctcaggcatcacccactgtccggatgacagatcccagggccctcaccccccaaggggctgcccgcatttccacctgttcatcatgagatggggcagacaggccacggccaggagtaccaccctcctgggagggtcgtggtgggaaagccgcagacgcacctacctttgtcgagcagcgtcagcgacagagaggcgagatcgttgaactgaaagagaaacctggagtcaggggcgcctgcagaggggc

SEQ ID NO: 343680 - DNA, 514 bp, Homo sapiens
  chr19:5995930-5996444
  hypo
cggctgctccgggttttaaggtggcatggaagagccgtgggccaaattatctttgctccctgaagtctgtacacagcaggaaaaccactccttggctgccccaaagcccggcgttcacgccaatgtgcagagaacaggcggcttccacagtttctgtacacgttgcggggccctggccaccgactcttagagtgctgtggcttctgggtagtaagagtgcagggaccccgccattcatcaagcatcatctcgtttcttcctggaggccatcccacgcagcccagcaagtccactccaaggtgtggaccccgaagaactgaacacaggagtgcacacaaacacccgcccacacacgcccacgcagccccgttcacgacggccacagagagggagcgaccgtgcagcacggagggacgagcggtcagcacagcgcggccagccacgcaccggaacacaactcagccaggagaggaaccaggctttgacccgggccgcagcgcggatgtcatgttcc

SEQ ID NO: 343681 - DNA, 487 bp, Homo sapiens
  chr19:6001747-6002234
  hypo
cgagccccctaccctctagaagtttctctcagagccccccacccgccagaattctctcggaggtctggtgggactaacctgtaaaaggaccatttcagcaagaactgccgggcggccttggggaagctggggctgccggcatgctgcttcaggacctgggtgaccacactgtccagccagctggcccactggtccagggagctctgctgctgcagggtcagcttgaaatcctgctccagccgctgcaccacactctcctcgcactggcacacccacgaggcctgctcctgtgggcagggcagaggccagtgtcagcaatgtggacccccagccacggcagccctccctggacctagccatgctcagggcgggacatcgtgctgtgcttgagccttctcgcccttgaccttgacagctgcaagccaagtcctgtgtctcccgtcacaggggcagaatagagagctgagggggatcgtacccggcttcc

SEQ ID NO: 343682 - DNA, 449 bp, Homo sapiens
  chr19:6004120-6004569
  hypo
cgctctctgggacacagtggtcctcatgctgtcctggactggagcccctcccagccatcgttggggagcccaggccccaccccggacgcaccttggtctggatgacctgttgtgggaagtcactcatggcatttgtcaaccagccttccaagctcttggcaaagttacggatggcctgtgtcaaggtacctgggggatacagaccatgatattaccagggagaaaggcagtgactggaccctggaaatcagcattcagtgtaagagctggcccaagtgcgatgaaaatgaccaccatgaagaacgagccacacaggcgacggggaaccgaggacacttagaaacgggaagaaccaggcatggcccagcgctgctggtcaccacccactgcctatgcgggtctcacaggggcgattctgccccaggggacactgggcaatgtctggggac

SEQ ID NO: 343683 - DNA, 328 bp, Homo sapiens
  chr19:6005196-6005524
  hypo
cgaggcattgccctgaacagttttcaggcagacaggcaaggccaggccaaatgagaaatgcaatacttttgctgtttcccatcttccagcaaagggagcatagagtttactcaacaggacggagagctgcctggtactaacgggcatgcatatttgtggatggcctgaggggcacggtccatgggcccggatgtttgtggatggactgcggggcatggcctgtggtcctgatgctgtgatttatgaagagaggcctctgtgcccagcttccttgacgacccccagggttttggggagcttggcacgggcctggcccgagggctccctc

SEQ ID NO: 343684 - DNA, 462 bp, Homo sapiens
  chr19:6006891-6007353
  hypo
cgcgcccggccacttttgggttttctgtgaaagcgatggtctgaggtggctgaagacgtacatgtaagaaaggacagaggaggcaggaagagaggatggagcagcgccgggcggggccgtgggtcacttactggggaccggcctcagcacgtcggggatgagaatctccaccagcgcctggtagaggatgtggtcgcagctcctcatccacctgaggatggggtcgcactgacacagggagataagcttgtccttgggcaggacggcgccctcggggtcttcgtcactgtggagggaggggggacaggtgagctgtggcctggcccaggtgggctcactcagccacgggagcgagcagagagccgggctgcgggacttttgcccaacagtggggctggggttttgctccccatccctgagcctcgatgggtcccctccctccatgttgctcccggcgcctcc

SEQ ID NO: 343685 - DNA, 476 bp, Homo sapiens
  chr19:6007829-6008305
  hypo
cggtgagacagacgggtgcgtgcgcccatcacgtgcactcagcacacgtcaagtgagcagccgtgatccgggctacagcggggtgccctggaatcccaagggaggccacagagaggagaggagcaggcgatggacatggatgcggaggggctgctgcttcagagaggatgcttgttggggggctcggggctccagctcctcagcgtcacccggggacgcctggcctgagcgctggcggttcccgggagggacacgcaggagctgcctgcctgggctggggcggtcacctcgcagtgccgtctgtacaccagctgcagggccttgacgtcgtgcagtgtgacgccgtcctgcagcaggaagctgcccaggtcgggcgctgggaactcggggaagacgtgggagacatctgggggaggaacacgggaacatcagaaatggcgaggctcttaggacaccgtggacaactggaaggccac

SEQ ID NO: 343686 - DNA, 384 bp, Homo sapiens
  chr19:6017220-6017604
  hypo
gacagggcaagacttcgtctctttcaaaaaacgaaacaaaacaaaaagatgggctaaatgagtcccgagccaaggactatgcctcgagaggtgaacatccagttagaagggctgcgagaactgtccacacgaagagctcagtccccacactgggcatggacgcaaaggtggcctgcccaccaactgatgccctcacccaggtgccttaaagactgcggcttaattctggtttccacctctccctctgctatcgtctgtcccctgatccagagaggtctgctatgtgaatacaaaaggcttgcactgatgcctgcgatttgcagaaagacaggaattccacgcacagaagcgaggcccgagtccagatcccatgtcaagagcgtc

SEQ ID NO: 343687 - DNA, 126 bp, Homo sapiens
  chr19:6020529-6020655
  hypo
cgcctcaccagcaggctgggagccacttatgcaccgggccttcccatccctcggtgctggagcccacacctggcggcacgtcagactgcggcaagcatcacaggtcagttccgtgaaaccgaccac

SEQ ID NO: 343688 - DNA, 111 bp, Homo sapiens
  chr19:6024069-6024180
  hypo
cgtgagccaccgtgcccagcccattttcccatagacattttaactctcccgtggacttgctgcctgtccaggctctgcacccccatcctgcctgggtcacgcagccctctc

SEQ ID NO: 343689 - DNA, 507 bp, Homo sapiens
  chr19:6024682-6025189
  hypo
ctcattttacacatcggccagcacagaagtcaggatggaatcacagtgaggacgggagtgaggacgggatcacggtgaggacgggagtgaggacgggatcacggtgaggacgggagtgaggacgggatcacggtgaggacgggagtgaggacgggatcacggtgaggacgggagtgaggacgggatcacggtgaggacgggagtgaggacgggatcacggtgaggacgggagtcaggacgggatcacggtgaggacgggagtcaggacgggatcacggtgaggacgggagtcaggacgggatcacggtgatgactggggtccactgaaggggacttcttctctgatgtctgaattctcaagagaatgtcagagcccagtttaagtgctagagagcaactactagaaggacattctgacttcgatggcccgtcccagtgttaagatgccgaacacatttccagctatgtgcaaaaccgaatcaagagcgtttggggagaagtgaaagc

SEQ ID NO: 343690 - DNA, 127 bp, Homo sapiens
  chr19:6033089-6033216
  hypo
cgcgcccagcaggaccgattcttagagccactgggatgacaggcatcagccaccacactcagcaggaccgattcttacagagccactgcgcactcttaacttcaacactcttaactaatccacggac

SEQ ID NO: 343691 - DNA, 313 bp, Homo sapiens
  chr19:6044422-6044735
  hypo
cgacggcggggtgatggtcagacttgcacactcacaccgacctgggcagacacacggcaggtacgtgcaggcacacaaacaatgcacatacatacacaagtgtgcacatacactcagcccatgcaccacacatatgcacgaattgtgggcacacacacacgtatgcacacacacatacacggaagcacatgcaccttcacccgcccaggcagctttgcctctgtgggtctgtagtctgcagcaaggtgacactgatcgtccctagtacagaggggactgctggggccctctggatagccatccgcaccactgc

SEQ ID NO: 343692 - DNA, 653 bp, Homo sapiens
  chr19:6045007-6045660
  hypo
cgagtcgagggaggaacaggagtgttttgtgtgtttattgagagctggggctttcggagtcattggctgcagtgctgtgatttcccggcatgaaccctgaatgtcacaggtagcagtgactgccatatatacatcacgaggggtgatgggtgaggacacgccatcccctgtgttgcaggagtggagctaaggatgaagatggtgctaataaggatgccagcgcaagggcattctgattccaggtgagctgggcgccgtgtgcttggagaattcacagggtcctggcaagtcctcagagagggaccacagtgatgaaacctgggacacacatggtggccgtgagtggcactgagacctgtccatggtggctgctgcagaggaaggcagagtccacctaggcctgggagagcctgagagaggggcttggcaggaagacctgagggctgactcctcttggacaatttcaagtgggcacggaaacatatcaattaggccacaactgctggcagggcgacggcgtctgatcctcacctcagatgggcttccaagacgccctccccactgccatatgtgcaagaaataaaagctaaagatgtctgaccatacacactacatcaaataaaccgcttcactgtctgcctttttgtttttgc

SEQ ID NO: 343693 - DNA, 124 bp, Homo sapiens
  chr19:6064123-6064247
  hypo
cgtagcacattgcctgcaaagatgctcaagacgtgttttgcaatgaacaagagaatgagcagcccgcctgctccgggctgctcacctgttctagccaccttcaccatgttggcctccagctccc

SEQ ID NO: 343694 - DNA, 257 bp, Homo sapiens
  chr19:6105459-6105716
  hypo
cgatgaggtcaaagaggtattaggcttggcggggagtggagttaggggtgactttggcttttgctgcagatgagatgggagccatcggagggtttcgagctgaggggtatgaagtagaacttaacatgacgccgcctctcccagggttaacaggccccgtctggctgctgggctgagagactgccgagcaccagtggtggaatcatccgggctagatgctggtggctgggaccagaggggctggcagtggaggtggc

SEQ ID NO: 343695 - DNA, 199 bp, Homo sapiens
  chr19:6226077-6226276
  hypo
cggttcttctcccgcatggctgacggtgagtctgtgaggcagctggagagccctgcctgtcctgcctgggatggctgggcccacacgcagggcctggcagacaagtgaggtgaggagaaaggagaggaccggtggagagatgtgtgggtggcaggcaccgggcagctgccccgagggcccgtgccgctcagcctccagg

SEQ ID NO: 343696 - DNA, 125 bp, Homo sapiens
  chr19:6425753-6425878
  hypo
cgtccagttctcttgcaggactcaaggaaccagccccactcacgagtccagaaccgttccaacaaccgggatcgagggatcacagcctcgatcacacccctcacttcacacccctcactcccttc

SEQ ID NO: 343697 - DNA, 944 bp, Homo sapiens; identical to SEQ ID NO: 335922
  chr19:6590260-6591204
  hypo

SEQ ID NO: 343698 - DNA, 313 bp, Homo sapiens
  chr19:6664841-6665154
  hypo
cgcccagcctctgcttcgtgagttttctttcccctgaggcaccctctgagttctccacgtgtcagacccatgtccaatgcaccacgctccttccttcacaccatgaaagccccgaagtaagaccgggtaccatcacgcagtcgaaccaggcgttcatccagcacacggacgaccaccttctccccagcctccaggtgtaccacaccacccaggaagctgctgtcccaccagacccgggagctgctggtggcccgtccgcagggtgactgctggctgaccaacagctccagctcctcggggtagcggggtgtgc

SEQ ID NO: 343699 - DNA, 352 bp, Homo sapiens
  chr19:6744359-6744711
  hypo
cgcgtccccctctgagatccccctggccctgtgtctcttccccaaccacagtgggctggagtctctcttcccgactctgtcttcccctccagactggcttggggctggggccagcgtggagcgcgatcatatttgcagagtgaatcactgtgcttctagtccctctgttagcacccctgagccacccttgtccctgtccttacagaagctccaagacatggatgaacgcagggccacccgcctgggtgccgggtatgggctcctgtcggaggccgagctggaggtggtgcccataatagccaagtgcttggagggcatgaaggtggctgcaaatgctgtggatcccaagaac

SEQ ID NO: 343700 - DNA, 634 bp, Homo sapiens
  chr19:7267319-7267953
  hypo
cgagacactgcttagaaccctgtatccccggcgtacctttctggcagtgactatgagtccaacatcgttcgacaaactgcccgttgatgacggtggcggggcagttggtcttgcccttcgcggtacccggacagatgtctccacactcctcgttgtcatctttgttcaacacgatgtaattatcctccacggaatccaggatacgggaccagtcgatagtggccaagtaacagagctcattgttcttctcgatgcggacagaaccccgggtgatgttcatcaggttgtagaggccgagttccttgaggtgaaccatctcgaagatgaccagcgcgtagttaaagaacagtcgtgatccccggatgaccgtgaggttggggaacaggtccttcaggctctcgagcccatagacccggaagagcagcaagtaatcagtgatcatgatgagtttggggaaactgaggtctcggaaatcttcgggcctcgttttgaacatcaagagtatctgcaagtgtccttcgatgacagagcaattctccagctcatgcaacctagtgaggttgttccggatatccatgccgggacacactacaagagaaaatgaacagaaagcaagacaggtgagcagacgcac

SEQ ID NO: 343701 - DNA, 1037 bp, Homo sapiens; identical to SEQ ID NO: 335924
  chr19:7459644-7460681
  hypo

SEQ ID NO: 343702 - DNA, 250 bp, Homo sapiens
  chr19:7493749-7493999
  hypo
cgtgccgcaatgggctgagcacgtagatctgatgtgacaccagtgcctggagatgaacagcacctgacccttgctcccagggaggtcaaggtgcagcgaggctgtgcaataaagtcgggagtgtggtgagctgtaaaggaagcccgcaggcctaggccacgggcccgagggcaggggcacgccatgcagaaggactctgacccggccccacagctggccagataagagagacgccttgagtcgaggggcc

SEQ ID NO: 343703 - DNA, 183 bp, Homo sapiens; identical to SEQ ID NO: 273208
  chr19:7543282-7543465
  hypo

SEQ ID NO: 343704 - DNA, 92 bp, Homo sapiens
  chr19:7682222-7682314
  hypo
cgtcaggtctcatgtccccaagccgcctgcctggaagccgcgaacgggactgggaaaatggcagcaatgcctcctccccagcgtcagtgccc

SEQ ID NO: 343705 - DNA, 270 bp, Homo sapiens
  chr19:7685308-7685578
  hypo
cgtctgccagaacgcgccggtcgtctgcgtggggggcagggcaggggtgggtgtgtgtgcccgtgagctggctgactccgccgcagcccccaaccctgatacccgtccctccccacagccctacccgggggtcacagatctgggagcagaagctgtagatggcccgggcgcggtcaatctccccgagcttgcactccatgtctgcaaaccgcaggcacatctcacgcgcgtgctcgtccgacagcacctggacaccggggttggggaggc

SEQ ID NO: 343706 - DNA, 86 bp, Homo sapiens
  chr19:7838387-7838473
  hypo
cgcagtagcctgccagcacttgcggggggccacgtgaacagtgtatttactgaagttgtgcacatgcttatttcaggtgtttttcc

SEQ ID NO: 343707 - DNA, 337 bp, Homo sapiens
  chr19:7972050-7972387
  hypo
cgtcttgaaggagttggggggggagagaagacagggccgccagggctctgagcgcagcgccagcctgtgtggggcatgcaggctgtgccccacgcctgtgttgggagagagagtagatggggtgcctggccctgtgagtggttgtgagtatgtgtgtccgagggcaagggggactctgtcccggctgcatgggtgttaggtccacggcatgccccgggtgtgtgttgtgcgtgcgtgcacttgcacggcatgtgcgtgcatgttgacatggcagccggtgcacctgtggctcctgtcggcagacacgtgccctccagcctctcgctctctctcatcc

SEQ ID NO: 343708 - DNA, 354 bp, Homo sapiens
  chr19:7991824-7992178
  hypo
cgccgggacccctgcagggcagagcaacagggcaggggttggccctgcgggggagtgtctccagctgccgcgcacccgcaacagcccgttgtcccctcccgggccagctggtcttgcagccgtcctggcagagctgggggcagagcccgcagtcttgttcccagaggtctggagttgccgcaggtggtgttgcggtgcctctgtgcctgatgacccaggccggggctacctggctccggcaccacactcagagaatctgctcggtgctggaggccgagatgtccaggagccgccaggccgcgtaggggttgagctcgtcctggtctcggcagagcgcccacacgtacagcatcc

SEQ ID NO: 343709 - DNA, 117 bp, Homo sapiens
  chr19:7992986-7993103
  hypo
cgagaatggaactggagacccagtgccttggcctgctggatggggtgggccagctggctgtaagtctgcaatgagaggccgacacgcctgcgtgatgccacccagggtgggcaccac

SEQ ID NO: 343710 - DNA, 120 bp, Homo sapiens
  chr19:7997652-7997772
  hypo
cgggagttcggggggaaggccggggaccccgccccaccaccagcctgcgaggtccagggatgactcactcacccagcaagtcggtgaccttgtccgtaagggcccgggatgcccggatga

SEQ ID NO: 343711 - DNA, 83 bp, Homo sapiens
  chr19:8004778-8004861
  hypo
agagtgagactctgtttcaaaaaaacaacagagaaacagtttaatgaatgatcatacaataatccaatcaggcggaaggggcc

SEQ ID NO: 343712 - DNA, 424 bp, Homo sapiens; identical to SEQ ID NO: 335929
  chr19:8115163-8115587
  hypo

SEQ ID NO: 343713 - DNA, 685 bp, Homo sapiens; identical to SEQ ID NO: 335930
  chr19:8274278-8274963
  hypo

SEQ ID NO: 343714 - DNA, 67 bp, Homo sapiens
  chr19:8463148-8463215
  hypo
tgggctcaggcccccgtccctgggtgctgttgcccacaaaccctcatctctgttctgtccacgctgc

SEQ ID NO: 343715 - DNA, 131 bp, Homo sapiens
  chr19:8526882-8527013
  hypo
cggggctctgtacaattgcacgagttgctcacctgtgaagctggccctgcggccgtgtgtgcctgtgagcttataccttcgcatacgtgcgtccttgtatttatagcatgtgagctcagcccgatggcatc

SEQ ID NO: 343716 - DNA, 62 bp, Homo sapiens
  chr19:8535026-8535088
  hypo
cggccatttcggaggcttgacttcaaagccttcagtgctttgggagagtaagtcaccgtggc

SEQ ID NO: 343717 - DNA, 77 bp, Homo sapiens
  chr19:8546631-8546708
  hypo
cgtgttggacaagcttggtctaggtgctggaaagccagcctcggctcaggcatgccgggcaggatcgcaggcgtccc

SEQ ID NO: 343718 - DNA, 252 bp, Homo sapiens
  chr19:8554998-8555250
  hypo
cgcgccgggatccagggctcctgggtgagcgggcgctgggctggctggctgtcctggccccacgcctaccggtcttaccgtcccagggggagtggttggttttccaggggatctgccgaggaagcgtgacttccatggacccctctccccagaagcccaatagtgagcagcgcccccggggaatcgccagggtccctccagccctcccagagtgtccacgtaccgcagaagtcgacatcatcgtacacctcc

SEQ ID NO: 343719 - DNA, 798 bp, Homo sapiens
  chr19:8576026-8576824
  hypo
cgggcgcctagttcagtttctcccgggtctgtctgcccctagagttgggggcacccaacttggcttctccgcgtcccctactatcatccccagattcactgttggggagaagcccgctccgaggtgaacggtgaaaggggcgcaaggtttatacgggaacgccggcgcagatgaaggcgcaggtgccagtcatttttaaggcaaaaatcctgtatttcgggacggtggcatttgtgccccctgggaaggggatgagcactgctgcctcctggtatccaccagaccccgcagggcgcaggaaagaaagcccctccacccctccctggtggtcacctgcacgcacctgagggcgcgtcggagccgccctggggtcttcgggggctgctgccagcacctgcggtaaaggggcgggtcaagttcagagtcagggcgagcccagccagccctcctggaggcccccgaccccacactcaccttggctctttttccagacggcggcgctggaagccggcggcccgggtgcagcggccaggaaggggcgcaggcgcggggggcttaggccaaagggcgcagggttcaagtagggcaggaacggtccggtgggggcaggggcgggggtcgtgaagggttccagcagcgggaacggcaggcccggcgctgatgcggggtcaacctccggggggcgctccggcgcgggcggctctcggtccagggccgggggtggcggcggggctgggctctgcgcatgctccgcgcaaacatgcaggtgcttgaagagcgagcggtgcgtgcggaagc

SEQ ID NO: 343720 - DNA, 184 bp, Homo sapiens
  chr19:8606663-8606847
  hypo
cgcacagccactcccctcgagtttgtggcgagatggcagttctgggtaagatggagtggggcccggtcctccctccatccccttggggggttgtagccggaggtccccatgcctgggaccactcactgctcactggtctgcatcagctctatgaggtcggagaagagaacgtctcggttcctct

SEQ ID NO: 343721 - DNA, 314 bp, Homo sapiens
  chr19:9129007-9129321
  hypo
cgcccgcccagccaacagagtgacctttcaaaaatgcaacaccggccatgccccgccccggtccgaattcttcagtgccttctcaccgccctcgggaccaagtccaaacgctgcagcctggcgttgaaggcccaccttgagccgggacccggcctgcattggactaacgtatgacttcgcttctcaccccgaagcctttgcctcggccgttccctgtgccggaattaccctccttccctttacctgattctgtgtcccctaattctctccaggcctcccctacctccctccccagacagaaagcagagctcccc

SEQ ID NO: 343722 - DNA, 146 bp, Homo sapiens
  chr19:9937371-9937517
  hypo
cggccggggaaatcaggaccaaaccagtaaggagcagctctttaggcataagcacgcgcattaaagacaaaaagtatccttaacatgataaggataaccagctcattagcgctcatgcatatggacggcatatcatgaatggaggc

SEQ ID NO: 343723 - DNA, 215 bp, Homo sapiens
  chr19:9960959-9961174
  hypo
cggccccaggggacctcccctcccccaagcgctgagtttctaataaaggccaagcctcataaacaatcacctgtgcccgctcccatctggctggcttcgggagcaatcgctcattcgcctgctgcctgcctgccggagcatttgtcattaggaaggtttaatgggtttcctctcagctccagagggctggggagagccggctgcatggatacacc

SEQ ID NO: 343724 - DNA, 362 bp, Homo sapiens; identical to SEQ ID NO: 335935
  chr19:10197461-10197823
  hypo

SEQ ID NO: 343725 - DNA, 411 bp, Homo sapiens
  chr19:10370252-10370663
  hypo
gcctgaccggccccccgccccgcccccaccccgcccccaggcctaaatgtgcacagcatgctcaagcaccagacgctggtcctgacgctgcccaccgtcgccttcctggaggacaagctgctctggcaggactcacgttacagacccctctaccccttcagcctgccctacagcgacttcccccgacccctaccccacgctacccagggcccagcggccaccccgtaccactgttgatgtgaagcacctcttctgagccaggccgagcccctggccgacttgggagcctcaggcccacgcccacccttcgaggaaggtgtcacctggaccccttcattccacggaggaagctgaggccacagggagcggccatcgccattgggaaggggcgactccacggaaagcccagac

SEQ ID NO: 343726 - DNA, 992 bp, Homo sapiens; identical to SEQ ID NO: 335937
  chr19:10381056-10382048
  hypo

SEQ ID NO: 343727 - DNA, 479 bp, Homo sapiens
  chr19:10395600-10396079
  hypo
cggggaatcagtgactgtcactcgagatcttgagggcacctacctctgtcgggccaggagcactcaaggggaggtcacccgcaaggtgaccgtgaatgtgctctgtgagtgagccggcgggcagagctgggtgggggcaggggccatggacctaatgcaatcctcaccgcctgttgtatcctccccacagccccccggtatgagattgtcatcatcactgtggtagcagccgcagtcataatgggcactgcaggcctcagcacgtacctctataaccgccagcggaagatcaagaaatacagactacaacaggcccaaaaagggacccccatgaaaccgaacacacaagccacgcctccctgaacctatcccgggacagggcctcttcctcggccttcccatattggtggcagtggtgccacactgaacagagtggaagacatatgccatgcagctacacctaccggccctgggacgcc

SEQ ID NO: 343728 - DNA, 1317 bp, Homo sapiens; identical to SEQ ID NO: 335939
  chr19:10400300-10401617
  hypo

SEQ ID NO: 343729 - DNA, 96 bp, Homo sapiens
  chr19:10464757-10464853
  hypo
gtggtagagcgtgcgcagaatgtcaatctcctgcttccagcccgagcggtgctgggggccgcagtctgccttgagggctttcaccgccaccatctc

SEQ ID NO: 343730 - DNA, 988 bp, Homo sapiens; identical to SEQ ID NO: 335945
  chr19:10529649-10530637
  hypo

SEQ ID NO: 343731 - DNA, 1295 bp, Homo sapiens; identical to SEQ ID NO: 335946
  chr19:10530654-10531949
  hypo

SEQ ID NO: 343732 - DNA, 295 bp, Homo sapiens; identical to SEQ ID NO: 335947
  chr19:10616223-10616518
  hypo

SEQ ID NO: 343733 - DNA, 1068 bp, Homo sapiens; identical to SEQ ID NO: 335948
  chr19:10624638-10625706
  hypo

SEQ ID NO: 343734 - DNA, 312 bp, Homo sapiens
  chr19:10665638-10665950
  hypo
cccaggtctcagagcggggggcgctgcattcccaaagtcatgcaacaagaggttgacggagccaagactcaagcctgggcctgacaggctccccacccacgcttccccagccagcactgcttactcttctcggcagagtgacttgaagacctgccgctttttccatgagttctgggccttctggctgtacgcccgcttgtcccgcagctcctcctgctctgacctgcagacagatgcccctgtgttgggtgctctgggaagtgcccgaggctgcccgccctgccccctgcgcatgtggccccgccgcgcccc

SEQ ID NO: 343735 - DNA, 56 bp, Homo sapiens
  chr19:10687570-10687626
  hypo
cggatgttagccgtctctatgttagccaggctgggatttcaggcgtgagccactgc

SEQ ID NO: 343736 - DNA, 74 bp, Homo sapiens
  chr19:10687853-10687927
  hypo
cgccagtccctggtacttaccgggaaagacttaatactccaaatcacgacgtttctctccggcacatacttggc

SEQ ID NO: 343737 - DNA, 292 bp, Homo sapiens; identical to SEQ ID NO: 335949
  chr19:10691764-10692056
  hypo

SEQ ID NO: 343738 - DNA, 136 bp, Homo sapiens; identical to SEQ ID NO: 335950
  chr19:10762085-10762221
  hypo

SEQ ID NO: 343739 - DNA, 67 bp, Homo sapiens
  chr19:10817637-10817704
  hypo
cgtagtcactgcgcccagtcagcagagccctgctgatggacgtttggtttcccggtcttgctgtggc

SEQ ID NO: 343740 - DNA, 637 bp, Homo sapiens
  chr19:10823276-10823913
  hypo
cgactgcgtcttccccacacggacagcggtgaggctctggcagaaggaggtcagggcgggagacgggtgggggactagggaggcaaggttaggggtggggggtggggagaatgaagccctgggtgacgcccctttccctgcccttcctctcccacagcgctttggctctgccctggtgcccactgggaacctgcagttgaggaagaaggtgtttgagaaggacttcggccccatagacccggagtgcacctgccccacgtgccaaaagtaggcaggatggcactgggagctggggcagggcatggaggggacagggcctggccgtgctgagctgtcccctgccgctctacaggcacagccgcgccttcctgcacgcactgctgcacagtgacaacacggccgcgctgcaccacctcacggtccacaacatcgcctaccaggtgagccagtgcccggggcaaggtgggcgggggtgtcctaggtgcgtatgccccacgctgacctcccctccccgcagctgcagctcatgagcgccgtccgcaccagcatcgtggagaagcgcttcccggacttcgtgcgggacttcatgggcgccatgtacggggatcccaccctctgtcccacctgggccactgac

SEQ ID NO: 343741 - DNA, 183 bp, Homo sapiens
  chr19:10872413-10872596
  hypo
cgccagctctcagcttggcctcccaagactcctcactttcgtcctctggccccgcccaacctggcaagaaggcgtgtctccagtgagagacagcagccgatgggcccaccacctcttctttatgagctctgctatttcgtacgccaccgatgggccaatgggctgccacctctgggttcaggc

SEQ ID NO: 343742 - DNA, 372 bp, Homo sapiens
  chr19:10874575-10874947
  hypo
cgccaggcaagaggcaatgggggcctggccctggtggtgcgggcagatgccaggcagtctagactgtcttccaggcaaggcattaagcagcataggcacccttgctgggggaggtgggtgggaggtaggacgccttactaagaggagaggaaaatgaacacattgcgggcatcagtgattgctggggccggcggggccttgtggggtatacaccagaccacgtggctcctagggattggcagctggctctctgtgaccaaactcagaaccaggctgccaccctttactggcccgggacttgttaaagtgacttccctctctgtgccttggtagcttcatctgtaaaatgggggtgatggtggcgctgccatc

SEQ ID NO: 343743 - DNA, 83 bp, Homo sapiens
  chr19:10875524-10875607
  hypo
cgccctgttccctacctgccactgtctgctgctcacccgcacctggtcacttgccgccttcgttccccggtccccggcagcac

SEQ ID NO: 343744 - DNA, 134 bp, Homo sapiens
  chr19:10875959-10876093
  hypo
cgccagcacacgagaacaggcatgcagatcggctctgcccagcacagggcctggcgccgagcaggtgctccgcatgcacggccgagtgaacgagctcaaagggctggtgctgtgccccttcttgcctactgggc

SEQ ID NO: 343745 - DNA, 52 bp, Homo sapiens
  chr19:10941853-10941905
  hypo
cgctggccccggtccagggccggcccctgtgcctggctggacaccgcactgc

SEQ ID NO: 343746 - DNA, 109 bp, Homo sapiens
  chr19:10949233-10949342
  hypo
cggcctcgttgtcttgagtaacacccggggtcgttgtctcacagccacgaagaacaaggaccaggacacacaaaagaatgaggttgagaacgaacgtttaataggcaac

SEQ ID NO: 343747 - DNA, 522 bp, Homo sapiens
  chr19:11001603-11002125
  hypo
cgggccattgcactccagcctgggtgacagagggagaccaaaactgagtcagtgttcccaagcagtgtgtgaagctgattctctgtcagccacgtgccagatgggttgggtcccaggggtggccacctgggggacagggccagacacttgttctgggcccaatatggccttgtgtccagaactctctcggtggctccttctctcgaccctttgccttgagccggagcactgtggggacacaggaaccaagactggtgttttgtgccaatgccacactactgtgtgcccgtgggtcttgggccgggcatgggtgggttcgtcctcatggctacacagtgaaccatgtgttattttatttttctagacactaaagctgaggtgtcgggaggtgatggtcccttgcttgcaggtggcagagctcaggttcaaacctggatcttactgcacctggctcgtttgggaggcctcccttgctggaatgcaggtcagggagccccgatgcccttgggctgactgccccac

SEQ ID NO: 343748 - DNA, 257 bp, Homo sapiens
  chr19:11003007-11003264
  hypo
cgttcagggccatggctgcagggctcctggacacccagctccggtgctggagtggggttgggattcgcccagaggccagggctgcgccagaggagcccagggtgacctcatggtcctcagatacccggggctgggcagcacagtggaacagctgctccagagcttctccgaggacgacatcggaggatccgactcaggttacggcaggagagggaggccaggccgggttagggttctggggtttgggattctcttcc

SEQ ID NO: 343749 - DNA, 442 bp, Homo sapiens
  chr19:11004773-11005215
  hypo
cgcctcctcccgagtctgcctggaatctgaattgggcctggtccgcatgcatcagcttccgtgctttccctcctctcagcgcttactgccagttcctgttgtccgtctcctcactgccctgctgggtgctgtctgcctcccactgtggactcccagcatgggagggccgggggtggctctctggttcaccgccaggtcctctgtgcctgcatgtggtccgggcagagcaggctgagcagagatgccagctgagtgggcttcagaaagcgtgtttttttttccgtgcctgtgggatgggagttggccacggggggtcggggtgtctccctctttttacctaactctcctcctttgatcgggaatattttcctctggaaggtgaagagcccatgttgtctttggcagcaggaggcgatttaatacaagacgtaccatttggaca

SEQ ID NO: 343750 - DNA, 175 bp, Homo sapiens
  chr19:11008216-11008391
  hypo
cgactgcagtgtggcaggccagcgagtagccccaggctgggtccaggggtggccaaagcgtaacactcagtccgggtttgtgttctttacgttccccgttggagactccacctggagatcccagtccctttccttttactgcagggtaaagaaatgctagctctgggccgggcac

SEQ ID NO: 343751 - DNA, 666 bp, Homo sapiens
  chr19:11029968-11030634
  hypo
cgctaccacggacaatctaattatacatgtaagtttgttgatgtgttcatgtatctggaggttaaactcctgtagtgccaaatcttttatgtggataaacacttgtcatttggagagctgtcacctgattgccctcggtggcgttgtgccggtcccctcctcacggcgtgtctgggaagagcaagctcgttttagctgcacagcctagaagccgtgggcagacctgggggaaggggcagggctctcccctcccatgctggccctggcgtcagatgccacgtcacacctgtggtctctcccaggacacatttgacatccggatcctgatggccaagtctgtcaagtacacggtgaacttcttagaagccaaagaaggagatttgcacaggtactggcacccacactccatcctcccaggcctggctcaggccgaaggtcagggccacccctggctcccgccggcatcctgccgtcccagggcagatggtgggcgggggccccaggcctctgcacctggcaccccctcttctctctcggcagcgcctgtctggcttccccagcagccactgccctttgccttccaggatagaaatcccattcaaattccacatgctgcattcagggctggtccacggcctggctttctggtttgacgttgctttcatc

SEQ ID NO: 343752 - DNA, 573 bp, Homo sapiens
  chr19:11128636-11129209
  hypo
cgcaaggctgctgagcctctgctccccacgcttcttcaggaactctccccagccttcaccacagccatgcgtccttctgtctattggctgtgccgcctggttggctgtggcttccagcggggctggagatgggttcatggtggacacagcacctccctcgtggagctgcttgggggcaaaccacgagtagtccctgggactccagcttcgagccctgtctttacggaccaccccgtctagactttctgagtggcttccctcccccactgaaaactccctgccccagagttcctcccagagcccgtcccctttgggactcagctttattaccgcctccaccctctcctcagtctctaggctgtcggtctcaggtgactcacccctccccactgcattctgcctgcccccatgtcctccctcattccagccctggtcatcccacaggggaacagccacgagttgccgctccctcccatccctgtcctcccgcctgccacctgagccaggccccgcctcgcccctcactgtcctcgttctctctcacagtcaggaaccttccgtggctggagggtg

SEQ ID NO: 343753 - DNA, 404 bp, Homo sapiens
  chr19:11129453-11129857
  hypo
cgtcctcgccagtctctcttcctccctccctccctcagctgccctaaacacagtttctctgcccactcggagggctgtggccatgttggcctcgcccctgacagccagtggctatgggtttgcacagtgagccattgatgagagaccggcacttgactctcatttccttgttccatcagaacgctgtccaactgggcgtacgagtttgacaagtgggccccctccgtggtgaaggtgtcttacaaggtaggtcacagccactgaggtttcctctcttgctacggaggtgcaggcggtggtgggcaggacgtccacacatacctctggacagtgaacctgagaatgctgggtctccagtcgcatggagtctccaggacagcctggaactccagtcacatggatcc

SEQ ID NO: 343754 - DNA, 508 bp, Homo sapiens; identical to SEQ ID NO: 335951
  chr19:11144009-11144517
  hypo

SEQ ID NO: 343755 - DNA, 143 bp, Homo sapiens
  chr19:11152817-11152960
  hypo
cgctgtcctcacagacatgtcctatatacgaggcagcatgcggttccagctgtggccacggcccagcggcggatcataacgtgttggtggatcatgagtgccatttatatgtttttcatttactaatatccttttccgtgagc

SEQ ID NO: 343756 - DNA, 98 bp, Homo sapiens
  chr19:11172428-11172526
  hypo
cgcacactctctcctcctgtcccctctccaggaccgctcaggaagtggcagcgaagaagactgagccccgacattccagtctcgaccccgagcccctc

SEQ ID NO: 343757 - DNA, 125 bp, Homo sapiens
  chr19:11172767-11172892
  hypo
cgttgctggcagtactgttgcgccgcagtttggagtcactgtagttaagtgtggatgcatgtgcgtcaccgtccactcctcctactgtattttattggacaggtcagactcgccgggggcccggc

SEQ ID NO: 343758 - DNA, 177 bp, Homo sapiens; identical to SEQ ID NO: 335952
  chr19:11199850-11200027
  hypo

SEQ ID NO: 343759 - DNA, 87 bp, Homo sapiens
  chr19:11285244-11285331
  hypo
agtccagcagccgcgcagacatggcccggaacgtgaccaggtgccgccgcaccagctcggggtgtgcgtcgctgcggcaggccaggc

SEQ ID NO: 343760 - DNA, 1111 bp, Homo sapiens
  chr19:11303560-11304671
  hypo
cgttgctggtagctgcagcgggcactgggcacattgtctccaccacctcctggctgcggaacacaggtgggctctcaggcctaccaggcattgccagggccctcagccctgtgccgtaaggctccaggctctgggcccgctgtgcgggggcgccagcggctgtgctggccaccacctccacctcccgtggcccttctaccacccggactgtatccacgcggaccgggctgtccggcggtggccaggcctggggctgggggtcagcctgccgggcctgagctgcctgcagctcctgcagcgccttcttgagctgggtctccagcacagcgaccttggcggcgagggcagcctccccatcaggcatgcccaagtcccgttctcgaacccaggtgcccacactccgggtctccagtgccactgggtcctctgggggatcggggaggtccaggcagagctcgctgcgaccccggcccgctgtggggtggcccaggaacttctggctcttaagttgtactgtgagctgccgcttttcctcctggagcaccgagagcttcacctggagcacagggatcagcttcacctgctcctccagctgccgcagcttccgcagggcacccgccatctgctcccgcacgtgggccaggtgcccggcactgggaggcaccggtgtggacagtcctgaactccgtggtgtcgggggtggcaaccccacgcccaccagggaggctgtcgagccggccgcactgggggtcagggagcccaggccggtgggtgtggccgcctggtcctcgagacggcgacgggcatccagcagcgtgcgctccacccgcggattgaagccaccgcgggtctccagagcaccatactgagggtagaagccacggccgcagtaggaataggctgagtggcggctgtccccactggcattggagcacagcgactcagtggacgtccaccaggagccagggccacggggcagcgagctcaggcgggggcggcgctgcactgccacgcgtcgcagcgtgtggcccttctcgatgtcatccacgtacttgaggaagtccaggtccaggcggtagccatagggggtctccacggagtagggtggatc

SEQ ID NO: 343761 - DNA, 146 bp, Homo sapiens; identical to SEQ ID NO: 335953
  chr19:11466008-11466154
  hypo

SEQ ID NO: 343762 - DNA, 850 bp, Homo sapiens; identical to SEQ ID NO: 335955
  chr19:11529251-11530101
  hypo

SEQ ID NO: 343763 - DNA, 795 bp, Homo sapiens; identical to SEQ ID NO: 335958
  chr19:11590395-11591190
  hypo

SEQ ID NO: 343764 - DNA, 745 bp, Homo sapiens; identical to SEQ ID NO: 335959
  chr19:11591231-11591976
  hypo

SEQ ID NO: 343765 - DNA, 1038 bp, Homo sapiens; identical to SEQ ID NO: 335960
  chr19:11592604-11593642
  hypo

SEQ ID NO: 343766 - DNA, 118 bp, Homo sapiens; identical to SEQ ID NO: 273380
  chr19:11658623-11658741
  hypo

SEQ ID NO: 343767 - DNA, 432 bp, Homo sapiens
  chr19:11662248-11662680
  hypo
cgggactctaaaaggctgtgtccagggcctcaacctcctcacatttcagaggggaccctgttatccccgggaggagggagaggtccccaaccatcaggattccaaggaggagaggaggcagagaagcgaggagcgcggcacggagctgtcttctccccagggagggcaggagttgaggctggaacgtggagacctgcggaggcagacaccagaagacccgcgcacagacgcacgcagcccctggggcctcgtaaaccggattccaggcgcttttggcctggctaccgcaagtcctgctccccctgggccggcgcggggaagctatgctgaggaggatccgggcctggcccagggccctgcctcctcgggaaaacagcaccatattagcacttagcctgtgaggctggggtgggcgggcggcaggaagggcct

SEQ ID NO: 343768 - DNA, 820 bp, Homo sapiens; identical to SEQ ID NO: 335965
  chr19:11959378-11960198
  hypo

SEQ ID NO: 343769 - DNA, 887 bp, Homo sapiens; identical to SEQ ID NO: 335969
  chr19:12146030-12146917
  hypo

SEQ ID NO: 343770 - DNA, 905 bp, Homo sapiens; identical to SEQ ID NO: 335974
  chr19:12266891-12267796
  hypo

SEQ ID NO: 343771 - DNA, 1081 bp, Homo sapiens; identical to SEQ ID NO: 335977
  chr19:12595013-12596094
  hypo

SEQ ID NO: 343772 - DNA, 55 bp, Homo sapiens
  chr19:12749512-12749567
  hypo
cgccaacaaacaggtaattcccaatcaccggcaagaccccgccggattggacccc

SEQ ID NO: 343773 - DNA, 261 bp, Homo sapiens; identical to SEQ ID NO: 335980
  chr19:12807005-12807266
  hypo

SEQ ID NO: 343774 - DNA, 610 bp, Homo sapiens; identical to SEQ ID NO: 335981
  chr19:12900128-12900738
  hypo

SEQ ID NO: 343775 - DNA, 298 bp, Homo sapiens
  chr19:12977267-12977565
  hypo
cggggctagacggtgccactgagaatggggcaaggaccttgcctgggagcggagcctaaattaaatacactaatgaggcaggggcgtggcctgacctgaagacttgtaaacccgtcttgaaccaggactgggctcctgtggggatgtgatatgaggaggaaccccgtaccctcagtcacagcccatacccgctccccagcccgctcagacaggtatcaccacgtgaactcctatgacgaggatgacacgacggaggaggagcccgtggaaatccgccagttctcttcctgctctccgc

SEQ ID NO: 343776 - DNA, 976 bp, Homo sapiens; identical to SEQ ID NO: 335985
  chr19:12995814-12996790
  hypo

SEQ ID NO: 343777 - DNA, 645 bp, Homo sapiens
  chr19:13108022-13108667
  hypo
cgaggggtttgtcggggtgtgtgtcagctgtggctacaccacactcctgtatgcacaggtgagagtgtatgcaagtgtgaatcaatctagagtctgtgtgtagcccctgtgggccggccatgggcaggcctgcgtggcatggccgtgtgtgtggcccagggagcgggttttcctgtagaaagcaggcccaagtacgtgttggcgagggcgcaccggcatgcatacatgttgcagtgtgcatgcaggtgtgagcaggcaccctgagcaccatggcagtgtggggaacccccacatctgcacctccagttccacggccactccatgttgggcgcccctcacaacaactgcctacccagcggtgtctgagctgggcctctttggtgctacacttggctgggctgtgtggccgatgtttggggcctagtggaaccaagaccccacgctcaagcagccccttgcccaccaggctgccagcccggcctcccatgccaagcacgccagacatctgagcctgctcccccatggcttgggtgagacaccagcccctcagatttcacagcaccctgggagagaaaatgcctgtggatacgccggtgacatggctaggaaggggctggggcggctgcgagacccagggcgatggcc

SEQ ID NO: 343778 - DNA, 749 bp, Homo sapiens
  chr19:13109260-13110009
  hypo
cgagggggaagggcggggggaaaaatctccttctagaaaaagcatcgaaattcagggcggccgggtggggcggttcctggagctgctggagtccattgtagccacagtcctgagtctcaggcggagagaggggtggggggtggatggatggacccccatccccatcccaaccctgccaagaaacagagacacaaccaggatgtgaactcacgtacaccaccatcaccgccaagatggggatgtaagtgtcctgttcacaccgatgtccagacccacgaccatcgacgagcctacagacctacggacacaggaaaccgacgacttgtgttcacactgtcacacacacccattaacacacacgcacctcttgaaatgggacacgtatattggtgtaggcttagcgacacagcagtacctctttgacgcacgtatggacacaggaaactgtggacttgtgttcacaaccacccccagcgcacacataaacactcacaaacccctcgagatgatacagatagcgacgaaggcacatggagaccacgacacctcccagactcatggagccctgagcacatgcttggatacaggtagacacaaatgtgtgttcacccccacacatgctcacatggacccaaggacggacaggcggatggatggatacacatctttacacagagacataatgcagttggctcgctcaggtgtgtacacaaataacttttctttttctattttttttttttttgaga

SEQ ID NO: 343779 - DNA, 154 bp, Homo sapiens
  chr19:13110344-13110498
  hypo
cgtgcttccccctccttgccacagggataaaaaggcaaacatgccgacatttgctgacacacacaaagacatacatggccgcacacacggatacacccgctctcagacacgcagcgacctacgcccattttcctggccatacaagcagccgaac

SEQ ID NO: 343780 - DNA, 171 bp, Homo sapiens
  chr19:13110794-13110965
  hypo
cgtgagatgttttgatgctgggccgagctcagagccgagggctctgccgggaacagggtgctccagtctctctagggcctggaatgtcttgtgtagcctcaagagctcccagacggaggctgcgggagcggagtcaagggctaggctttgccgtcagacagaaatgggttc

SEQ ID NO: 343781 - DNA, 360 bp, Homo sapiens
  chr19:13112089-13112449
  hypo
cgtgtgtctgcccgggtccctctccatgcctctccatgtctcccagcgtccatcactgggtgctacctgcatgtgactccacggatcatcgcacgccctgtctcttgtgtatttggtagtgggggtcggggagcgtgccaccatgcgtgtcagtgtgccggatgtagtctctgtgtcacggtggcgctgcgcacgtcaacgggtattggtgtaccggtcaccatctttgtatctgcgctttgtatctggggtgacagtgtcccagcgacatgcgtcacatctacagcagtgtttttctgggtgtctgtgcgtcacggcaaagagtgtatccgtgtgtctcacacacgtgttggcctgtcc

SEQ ID NO: 343782 - DNA, 182 bp, Homo sapiens
  chr19:13114040-13114222
  hypo
cgtccccatacaaagaatcttgccctcactcacagacaccttgaggcacccggccacacccgaacacatcgatgcggcattacacactcagggacgtgcatgtgggtgcagacacacgggacacgcgcagtcacacgatcacatgccatgaagcacacagcacagacacaggctctgccacc

SEQ ID NO: 343783 - DNA, 266 bp, Homo sapiens
  chr19:13119777-13120043
  hypo
cgctgtagccaggtcctcaccgaggtagatttgcgggggtctcccagtcccagtcccacacactgcctcatccccactcacagtcaacgcccgcaacaccccgccacccgcagtctgtcgcgcagtgacagcctgtcacaagcaccgccgcacaccggcacaatctgtcgtccacgcacagtctcacacacaacctgtcacacacgcacacacacacacagcggcacagtcgcacacacagccagcctcacgcgatcacaccaagc

SEQ ID NO: 343784 - DNA, 229 bp, Homo sapiens
  chr19:13156427-13156656
  hypo
cggtgctcagcagtctgttgccagggaggtaggagagaggggcagcaggcacactgggttgacaactgcactgtgttgaccccatggcgggcatcaggggaccacaggctgtggttgcgcctgtccgttctccctcccttttctcgtaggcttcttcctcctccagtgcaagagctggatccaggattggagaatttgctcttgcccacctctccatgtcctcgttgcc

SEQ ID NO: 343785 - DNA, 71 bp, Homo sapiens
  chr19:13181444-13181515
  hypo
cggctgaggccgccagccgtaagatggctgccaaggtctaaaatggctgccagcagcgcccggagcagcgc

SEQ ID NO: 343786 - DNA, 420 bp, Homo sapiens
  chr19:13186075-13186495
  hypo
cgacttctctgatgtgggcagcttggaggaccgtggcatcacagattgggaaggggcttgaggaagaggagcaggttgaagctgatggcttgaggggccctagggctgatcttggggttgggcacgcagtgagtgcccagaaatgctgctgtcggccggcaccactccccacccagagggccatctatgcacagttctttagcctggactcttggtcactccctggagcctcagcccatccttggcccatgtgaccctttctttcttccccagcaccaccaagcgccccaagtccatcgatgacagtgagatggagagccctgttgatgacgtgttctatcccgggacaggccgttccccagcagctggcagcagccagtccagcgggtggcccaacgatgtggatgcaggtatgggtgc

SEQ ID NO: 343787 - DNA, 119 bp, Homo sapiens
  chr19:13194593-13194712
  hypo
cgcccggcttctgggaggaggctagagacagcactgtgctacacaagaggctgatgcatagctgcagagagccagagggcccggctccgccactgatccagtgggtagggagtggcagc

SEQ ID NO: 343788 - DNA, 55 bp, Homo sapiens
  chr19:13201116-13201171
  hypo
cgcaacgacaggcgcctcctctgccaaccggtttgtcagcatcggaccccgggac

SEQ ID NO: 343789 - DNA, 519 bp, Homo sapiens; identical to SEQ ID NO: 335988
  chr19:13213427-13213946
  hypo

SEQ ID NO: 343790 - DNA, 1254 bp, Homo sapiens; identical to SEQ ID NO: 335989
  chr19:13265775-13267029
  hypo

SEQ ID NO: 343791 - DNA, 203 bp, Homo sapiens
  chr19:13879644-13879847
  hypo
cgtgggagctgaccgcgtggttgccaacggcgacacagccaacaaggtgggcacctaccagctggccattgtcgccaagcaccatggcattcccttctacgtggctgcccccagctcttcatgtgacctccgtctggagaccggcaaggagatcattattgaagagcgaccgggccaggagctgaccgatgttaatggggtcc

SEQ ID NO: 343792 - DNA, 263 bp, Homo sapiens
  chr19:14000130-14000393
  hypo
cgctgccctgccagctctgaggtggtgtctggaatgccctgctgagccccgggctcctggagagggtcgtctgctatttctctgtgttccagcacaacagaggcttgcggggacacacggaacccctcgaggtctcgttcgaggttctggccacctaactcggcttcctcttgagcaggacctggctcctgcttctgattgacacatggacctgtgtccggggatgcatgaccggaatctccagcacccatcatggactctcc

SEQ ID NO: 343793 - DNA, 148 bp, Homo sapiens
  chr19:14073146-14073294
  hypo
cgcacgggagggggcctgcctgcctgccccctggggtggtgggaggacggggctggggagaagacgctggggcctgggaggggggcggccaaggggccgagctggatgccccgcggggcacctgggcacgcggcgggttccttaaggc

SEQ ID NO: 343794 - DNA, 1302 bp, Homo sapiens; identical to SEQ ID NO: 335994
  chr19:14073521-14074823
  hypo

SEQ ID NO: 343795 - DNA, 871 bp, Homo sapiens
  chr19:14181154-14182025
  hypo
cgcgtccgccgattcctcctccttggtcgccgcgtccttggctggcgtcagaaaaatggctacaaacttcctagcacatgagaagatctggtttgacaagttcaaatatgacgacgcagaaaggagattctatcagcagatgaacaggcctgtggcaggtgcctcccgccaggagaacggcgccagcgtgatcctccatgacattgtgagagccagagagaacatccagaaatccctggctggaagctcaggccccggggcctccagtggccccagcggagaccacagcgagctcgttgtccggatcgccagtctggaagtggagaaccagagcctgcgtggcgtggtacaggagctgcagcaggccatctccaagctggaggcccagctgaacgtgctggagaagagctcgcctggccaccgggccacggccccgcagacccagcacgtgtctcctatgcgccaagtggagtccccggccaagaagccagcctcaccagcagaggatgacgaggatgatgacatcgacctgtttggcagcgacaatgaggaggaggacaaggaggcggcacagctgcgggaggagcggctacggcagtacgcggagaaggccaagaagcctgcattagtggccaagtcctccatcctgctggatgtcaagccttgggacgatgagacggacatggcccagctggaggcctgtgtgcgctctatcgagctggacgggctggtctgggggacctccaagctgatgcccgtgggctacggtatccggaagctacagattcagtgtgtggtggaggacgacaaggtggggacttacttgctggaggaggagatcactaaatttgaggagcacgtgcagagtgtc

SEQ ID NO: 343796 - DNA, 461 bp, Homo sapiens
  chr19:14263414-14263875
  hypo
cgaattcggctctgggaacacaacccaaatgtgaggggatccttgggccacccaccctctggcgtctttctgagactgctcacctgatcatcacgatcagaaacctaggccaagccactccccacctctcaggctccaggttccaacactcagccccagggagtcctgtctggcccgatacctgggtccctgtgtagtagcgggtgttgcttcgcatggctgaggtcttgagggatccgtgagtgcccccgggtggggagcggatgcagcagtaggagtgacgcaggcacttgctgtactccttgtgcacctgggaggtggaggacagtcagctggctgggacactggcctcctctgtgatccagtctcccacagggctggtcacaagacaggcagccttgggaggccggagaccgagcttccaatgactgtgttcccctgttcagcgacttgcaggccac

SEQ ID NO: 343797 - DNA, 155 bp, Homo sapiens
  chr19:14522737-14522892
  hypo
cggcactcgggcggccccggtcttcccacccgtgccatcagacactggaccacaccacagccctccacagcaccttcatccttcaggatgtgctctgagataacgagggcacgggcgccaatatgaagcccaaagatgtgcacctggcctgactc

SEQ ID NO: 343798 - DNA, 61 bp, Homo sapiens
  chr19:14630505-14630566
  hypo
cgcagtgagaacctcataaatattccccgttcttacacacgtgcttctttttcttccccaa

SEQ ID NO: 343799 - DNA, 422 bp, Homo sapiens
  chr19:14663747-14664169
  hypo
cgggcgagatcagcgtcgctctgggtgggccagtgctcctcggaggccctgagggcacaaccgcagggatgggtgtaggctgtgggtaccactgagaatggggggcaggcccagggctgagacccaggttctccaacttcccactgtgtttgtcttgtgccatattcatcctctatgaatggctgtggctgctcgcccaagccaggagctcgtgcgtccgatgaccatcttccaaggctggattgctacctgctcgctcggggctctgctggatgggaacagcagctccagcttctccgggtcccgggctaccgctgcctctgcacctggccctggcctcggatccgagagcccagagacattggcattgagaccctggcacctctcgtcttgccagcacaggtagaagacaggagcagagc

SEQ ID NO: 343800 - DNA, 376 bp, Homo sapiens
  chr19:14664452-14664828
  hypo
cgagagggctgagccgctgagccggagtccagatgaatgtgccggagtctctgcatttgtgatgggggcgaggtgatgggggcgaggtggccggcgtggctctgggcatgatcgggccaggcctccgacctctatgctgggcattggctggacagggagctcaggcgatgagtgcagcagcgcttgtgcccggcgcggggatggtgagtgcctggctggccagctgcaggacctgtcaggccctttgtgtctttacctggggccctggttgcactgaccagggctcgcacccccagccaggcctcttgtgccccagactcgggagatgcttcctaccaggaagtgcagtcccctgcggggtccgagagagcctgcc

SEQ ID NO: 343801 - DNA, 112 bp, Homo sapiens
  chr19:14815869-14815981
  hypo
cggggctgttcctgaggatgcagctggtgccctccatagaagagagggagacaccattgactcgagaggaccggccagctctccaggagccgccttggtctctgggatgcac

SEQ ID NO: 343802 - DNA, 345 bp, Homo sapiens
  chr19:15073023-15073368
  hypo
cgagtgacattttccaggaagctggttccgttctccactgagaatggaggaggcatggaggcacccggctcagacccgttctctgtcctcaccatggtcctggttaccaccctcgtgctgtactgcgtcttgaactgaaatagagagagattgcgcccagattcaattcagcggatgcattagaatcgcctggagaaattccttgagaccactgattcccagttcccacaccctggaagatcgataagatcttcattatcgattatcactcattatcgactatcactcattcagcagatctgaatgagtgaatgaatgacttgaatagtgcatggaagaatgagc

SEQ ID NO: 343803 - DNA, 324 bp, Homo sapiens; identical to SEQ ID NO: 335997
  chr19:15235629-15235953
  hypo

SEQ ID NO: 343804 - DNA, 477 bp, Homo sapiens
  chr19:15271811-15272288
  hypo
cgggggccgctcctgcggggagacgggggtccctgggttgagcagctggggtcccggcgccagtggcagcaggaacgaggggcctggaggggcaggtgggggcagccgggcccaatcgaggggcacagccacagggttcagcaggcccaggctgagtacacatcctccagggggctggcgccctagacccgcccggcctgggccaccaagctgtgccagagacactgcagtggcagtggcagctgcatagggcccctcaagggggaagccaccaggggaagcagggggcccaccgaaaggccgcggggagtccagcgagtccacgggcgacagcgtgaccgagctgtcagccagggggcccgggcaggccagcgtcagcttcttgccccgcccccggggcccctgcggccccagccccgccttcccggggggcctcctgctcttcttggaccccgactgtgccgctttgaggccagg

SEQ ID NO: 343805 - DNA, 601 bp, Homo sapiens; identical to SEQ ID NO: 225834
  chr19:15288255-15288856
  hypo

SEQ ID NO: 343806 - DNA, 272 bp, Homo sapiens
  chr19:15292359-15292631
  hypo
tgctctccaagcagaggccccgcccacctggggctgcagtcgggcaggtcctgttcgcagtggaagcctccgtagcctggcgggcaggtgcaggtgaaggaggccacgtggtcggtacaggtgcccgggccgcaggggttgctcaggcactcatccacatcgcgggcgcatcgtgggccggcgaaaccagggaggcaggagcaggaaaaggagcccacgccgtcttggcacgagccaccgttcaggcatgggtctgcggacaggaggaaggc

SEQ ID NO: 343807 - DNA, 366 bp, Homo sapiens
  chr19:15302345-15302711
  hypo
cgcctgtccagccattgacacacacgcagctgtggccacccagcgtgttgaagcaggtacccccattgtggcaggcgttgggctgcagctgacactcatccacgtcctccgtgcagaactggcctgtggcacacagatgcagcagtccagccacctggcgcatgtccacccgaggcctgcctccccgctccctctggccgcagtgcccacctgtccactcaggagggcactggcagttataggtgttgacgccatccacgcatgtccccccattgagacatcggtgtcctggacagtcgtccacgttcacttcacaattctgaccctcaaaccctagcagggaagggggcaaggatggtcaccgcc

SEQ ID NO: 343808 - DNA, 705 bp, Homo sapiens; identical to SEQ ID NO: 336000
  chr19:15342707-15343412
  hypo

SEQ ID NO: 343809 - DNA, 127 bp, Homo sapiens
  chr19:15364865-15364992
  hypo
cgtctctgggctctagcatcctggacacaggaccgagctagtgccaggcacaggtgggaagagtttggtaagacacgtagaacacaagtcacctaacctgtttcggagtcttcgctgtcagaggagc

SEQ ID NO: 343810 - DNA, 97 bp, Homo sapiens
  chr19:15382528-15382625
  hypo
cgtggcgcctcttctgcctccatacctttcctgagccatttcaagacccagacacgtactgccctgttctgattatcttcccccgagtgcttgacac

SEQ ID NO: 343811 - DNA, 127 bp, Homo sapiens
  chr19:15421598-15421725
  hypo
cctggccttaaacagtcctttaggcagtcctgaaagacacctggctgcaccactgtttgaaccatctcccgtacctttgtgcctactcttcaccgatgcccaatatccatccccaaaatcagtttcc

SEQ ID NO: 343812 - DNA, 244 bp, Homo sapiens
  chr19:15512036-15512280
  hypo
cgggagccgcccgggaaggcgcccccacctcgcatgccctggaacatgccgtactcggggatgatgttctgggagaagagggagggcagccgagaggcaccagacatgcactggccccgggcccccatggggtcttcccacatgcgcccatagcctgaggccattggccggccgctccgggcatcccgggcccagccctgtgccctgggaccgaaggtgtcgttgccacgcatgcggaactggt

SEQ ID NO: 343813 - DNA, 99 bp, Homo sapiens
  chr19:15531296-15531395
  hypo
cgtcttctgcgccctgcaggttcgttccttcatcgcacttgccacagtcatcattgtaccgatttgatttcgttcacatccaacaccctcagagaccac

SEQ ID NO: 343814 - DNA, 477 bp, Homo sapiens; identical to SEQ ID NO: 336003
  chr19:15695298-15695775
  hypo

SEQ ID NO: 343815 - DNA, 1472 bp, Homo sapiens; identical to SEQ ID NO: 336004
  chr19:16186802-16188274
  hypo

SEQ ID NO: 343816 - DNA, 882 bp, Homo sapiens
  chr19:16232459-16233341
  hypo
cggtgagaaagccaggcatcccgggtagatgctccttgtctcctactgaggacagttattttcctttaatgttgctaatatcccttctcttcatgtttagggacacagccggtcaggaacggtttcggacgatcacaacggcctactacaggggtgcaatggtagggactttttgtttggttgtttttatctgctttttaagtcaacatgggagcgtcactgtgcattggttaccgaagcctagatgtttctgtggagcccgtgccccaactcctcagggctccttggtcccaagttagtcttaggaacaggctttgtgccccggcctacccccatgtacatacctccccttctggctgcagagacaatgcaaggtttaaataaagtggaaacataattctttgggaatgaagaaagacacaggaagccggttcttccaggtgagctcagtgcagttaaagccggcatgccccgacttttaggagctgtcacatgacctgcatctgtctctgaaatttgctaccaaaagcttgaagatcttccaggagctgacctgccctgggctgtcggccgttatatccgtcacccaggcctgaggcgggatgacgtgatgggaagactcagtcatcatccctcaaaacatttctcaagcaccttctctgggccaggccttaactagatgcagaaggcggccagggatgggacgaggtcctgtgtcaggggccctgtgtgtacatggcagggcattcaggggtagagggagcaggaggtggagcccctggacctgacctgagaccctggcttgcccactgagctccatctcctgacttggaaaagggaacggagcacagcactgtgtctcgggctgtgctgaggataaac

SEQ ID NO: 343817 - DNA, 577 bp, Homo sapiens
  chr19:16238432-16239009
  hypo
cgagttggtcaccccagtggggcacgtgccatgggatgacagaagcacacacccagccggggcttcttgggtgcactctgcgggcatctcatcaaaacctaccatggccccgctccagactttcaagaccacaggagcggggaacagagccatagtttgatcccagcaggtccccgccaccctcccatctcagctgccatccccagcaactccatgccctgtgaggccctgtggaggggcattcactatagaattgagggagtgatccaggaagtcacgcccacagccccagccctgttgctgctccctcttggcgccggccctgccttcagctcctgttttaggcaagctcagatgcgcccggcggctggtgtgctcatgcgtgtgcctccctctctcacagctggccctcgactatggaatcaagttcatggagaccagcgcgaaggccaacatcaatgtggaaaatgtgagtcccgggccctgctgggagacatggggcctgcaggatcggccccttcaggctaaagggggagctggcgtcctccgaggaggtcctgccagacggaccagcctc

SEQ ID NO: 343818 - DNA, 343 bp, Homo sapiens
  chr19:16472546-16472889
  hypo
cggaagggagtggggtggcccggaggcggaggactcaacttacagaggtgaagtctgcaaagcccgaggcagaggccttagaaggtttagctgcagaggaggggacaaatgggtcttttccactaaacgggtccccaaacccctttttactttggaacgggtcgccgctgtcagccccgagtggctggaatggatcgggggcctcgggaaagtctgcggaaccaagctggcttacaggtgtacttttacctggaaagtttaggagaaaaaaaaaaggagaaagaaagaaatatgagttactcacccggacagagcagaatgctggtgggcacaagcccggggc

SEQ ID NO: 343819 - DNA, 120 bp, Homo sapiens
  chr19:16638602-16638722
  hypo
cgtgccttgcagcgttaaactcccctgcactcgcaggacaatggtgatctatactacagagaagcccaaaccatcaaagctcggggaagggacgtgaagacctgtcacttgacctgtccc

SEQ ID NO: 343820 - DNA, 168 bp, Homo sapiens
  chr19:16661967-16662135
  hypo
cggtgaaggcacacggcaagttcttctgacaaataacaccctttgggattgactcttcacgttttacacagcaattgtctcagcttgggaccaaagtatttacaaagcaagcgaacaagagacgaagcaagagggacacttctgaggccggtggtgcggaaactcacc

SEQ ID NO: 343821 - DNA, 266 bp, Homo sapiens
  chr19:16681299-16681565
  hypo
gctgagacaacaagcgcccaacttccacttaagaatacgggataaagctgtctccggctaaagccatggctattcttgccccaagccaggaaataccctggcttggcatcttgaacagaatttggactgtgcccaaagcatcctccttatgcagccctgagtcctgtgtgccactttcgcttccgttcccagaccatcacaacttctggctgttttaatttctaagactttgctggattttgccaagatcgaactccttggatcgc

SEQ ID NO: 343822 - DNA, 115 bp, Homo sapiens
  chr19:16756122-16756237
  hypo
ctcattgagacctccgcgccagtctgaataaggcaggaaggtttcttcacaccattcatctggcctgtgagggacccagccaagatcttggcgtgcctgttctgacagcgacacc

SEQ ID NO: 343823 - DNA, 172 bp, Homo sapiens
  chr19:16763531-16763703
  hypo
cgcagactggacagcaaccccacattcggagtctcaatcactcaggacagacaactttttgtcctctctctttctgggggaagcatacagggatggacccacagaggccaagaacaccagattctcccgtcgtgtcttttcctaaatccatttacagcaaatctcacaattc

SEQ ID NO: 343824 - DNA, 195 bp, Homo sapiens
  chr19:16766722-16766917
  hypo
cgacaggattagtcacgtgcagcacaacctgtatacagggctgatccagcacagactagaaacattaaatgcttggtctgtttccaggaagttttgagaggcgctgctcagcaagacccttcccctagcgaaggatcgtgaaaacaggacctcccaccatcaacagatgccaatcaaacgttactcattccaggc

SEQ ID NO: 343825 - DNA, 279 bp, Homo sapiens; identical to SEQ ID NO: 336008
  chr19:17137102-17137381
  hypo

SEQ ID NO: 343826 - DNA, 376 bp, Homo sapiens
  chr19:17172577-17172953
  hypo
cgttccctgggggtcagaatcgcccttgagtaagaactggttttaaggtgtggcaggcccagtctgatcccctggccacaccagcattcccagcttcatgcatggccttcaacccaattagatggggaaagactagcaggctggctctagtgtgcctgcttctcaaccacgcctgggaagggcatagcgcgaattctcacaaacatctacaccaggagtggcaaattgtagctcataggccaaatccagcccgcttcctttgcttgtaaatagttttattggcacacagctatacctgttcctctatgtctggtctggggttgtttttaatgttacaaacagcagagctgagtcttcttgttgatgttgttgagac

SEQ ID NO: 343827 - DNA, 289 bp, Homo sapiens
  chr19:17264714-17265003
  hypo
cgcagagtagctattacttggcctccaaaaacaactattttcctcccaattttgacctgtaggaactaccatgtgttttattatttgttacttggggtcagcgaggaagagcgccaagaatttcagctcaagcagcctgaagattatttctacctcaaccaggtaaacagcctcaagcccgagccacaaacgccacctctgttcccggcctcaagctgtttatgtatagccgggaagtcagaggcagcctgccctggcccccgaacccgctcccagaaggcagcattaa

SEQ ID NO: 343828 - DNA, 159 bp, Homo sapiens
  chr19:17362463-17362622
  hypo
gttccagctccctgcgcagagactgcagctgctcctgcaggtccagtgtcctgttgcgaaggagaagagagggggctcacagccccagccgatcctgtttcccaggtctcctcctacccacctgcccacagtattgtcatgtaaacacacctgtacacc

SEQ ID NO: 343829 - DNA, 717 bp, Homo sapiens; identical to SEQ ID NO: 336009
  chr19:17392399-17393116
  hypo

SEQ ID NO: 343830 - DNA, 67 bp, Homo sapiens
  chr19:17397256-17397323
  hypo
cgtcgccggcgcttgggggtgcacctgctgcaccgtgccctccttgtcttcctggctgaaggcgagc

SEQ ID NO: 343831 - DNA, 323 bp, Homo sapiens; identical to SEQ ID NO: 336010
  chr19:17501236-17501559
  hypo

SEQ ID NO: 343832 - DNA, 1006 bp, Homo sapiens; identical to SEQ ID NO: 336011
  chr19:17716524-17717530
  hypo

SEQ ID NO: 343833 - DNA, 301 bp, Homo sapiens
  chr19:17757928-17758229
  hypo
cgtgcacacacggagatgagatggaatgcacccgaccgagtgagtgcgcgctgcaaaggagagggaccaggccatgggacagggcatgagacaggtctcagagggtggagaaggaggggccctatggcggcccacgccccctcaccggtgatgctgatcttggcggaccacttggacgtgccgtccagcacgctctgcttgaccgccttcatctgctgcgtgtgcgccgtcttggtcaccgcgaagatctcctggatgagctcgaagatctcgggcttgttgcgctcccggatcttcatgc

SEQ ID NO: 343834 - DNA, 459 bp, Homo sapiens
  chr19:17759152-17759611
  hypo
cgccttgcccttcagcctttccccgccatgcaagccccggggctccccacgccaacccgtggccctgcgctcaggccctgcgctcacgctgcaggcagtcggcgttgagcaggtcctggcacttctcgtggcacttgacaccgcactcggtgcagcgcatgccctgcctcgcgatgccccacagcagcccctcgcactcgtagcagtaggtgggcgtggtggccgtccacacttcgaagttgtgtggcgtcgtgcacgagatggggtagattaaggcttgcagggtcttcttgtaaacgtggtttttctgcagggagggatggggtgcggtttgggggcgcctaacctggcgctgtccctgtcctgccccattccgccccatcactgagcgcggtaaagtcccaggccctcccctgcctccacgctgtcggaatccacgctgccttctgccagtctgtg

SEQ ID NO: 343835 - DNA, 1191 bp, Homo sapiens
  chr19:17837853-17839044
  hypo
cgaatgcccaggcggcacccaagccccgcaaagcgcccagcacgtcccactctggcttcccgccggtggcaaatggaccccgcagcccgcccagcctccgatgtggagaagccagcccccccagtgcagcctgcggctctccggcctcccagctggtggccacgcccagcctggagctggggccgatcccagccggggaggagaaggcactggagctgcctttggccgccagctcaatcccaaggccacgcacaccctcccctgagtcccaccggagccccgcagagggcagcgagcggctgtcgctgagcccactgcggggcggggaggccgggccagacgcctcacccacagtgaccacacccacggtgaccacgccctcactacccgcagaggtgggctccccgcactcgaccgaggtggacgagtccctgtcggtgtcctttgagcaggtgctgccgccatccgcccccaccagtgaggctgggctgagcctcccgctgcgtggcccccgggcgcggcgctcggcttccccacacgatgtggacctgtgcctggtgtcaccctgtgaatttgagcatcgcaaggcggtgccaatggcaccggcacctgcgtcccccggcagctcgaatgacagcagtgcccggtcacaggaacgggcaggtgggctgggggccgaggagacgccacccacatcggtcagcgagtccctgcccaccctgtctgactcggatcccgtgcccctggcccccggtgcggcagactcagacgaagacacagagggctttggagtccctcgccacgaccctttgcctgaccccctcaaggtccccccaccactgcctgacccatccagcatctgcatggtggaccccgagatgctgccccccaagacagcacggcaaacggagaacgtcagccgcacccggaagcccctggcccgccccaactcacgcgctgccgcccccaaagccactccagtggctgctgccaaaaccaaggggcttgctggtggggaccgtgccagccgaccactcagtgcccggagtgagcccagtgagaagggaggccgggcacccctgtccagaaagtcctcaacccccaagactgccactcgaggcccgtcgggtgagtactggagctggggccctgggctgggttagcagctgcttaggctggagagcatagctc

SEQ ID NO: 343836 - DNA, 744 bp, Homo sapiens
  chr19:18052925-18053669
  hypo
cggcagggaaacgtggacagtgctgcccgactcataagggcagagcccctgccctagcctgaaacgggtccaggcctcccacggctcttagaatccaacatgaacccctccctggcccccagaggctccgcatggcccagccgtctccctcccggcctcttccccctcccgcttcactcccactccagcctccaagctgttcctgttacaacaaatggctcctgcctcggcgcctttgcactggtagccctgctgctaaggacgctcctgttccccagctctcccccttggccggcgctcttcgcacctaggagcgtcacttcttcaagagccacccacccgccctgtccaaggttcccctgttggcctcacatcccccgcccagggcagcaccgggacctatcttgttcctggtatgtcccctgcacccagcacagagcctaaatcctcgttggctgagatgaaaactcgaaccccaggctagtgggtggcgcgggggtgtggggtcttctgcctgaccatgcacgccgcccccgcaggaggagaaggagaagcggcgcctcgaccagctggaacgtaagaaggagacgcagcgcctactggaggaggaggactccaagctcaagggcggcaaggcgccgcgggtggccacgtccagcaaggtcacccgggcccagatcgaggacacgctgcgccgagaccatcagctcagggaggccccggacacaggtcgggcggcatccc

SEQ ID NO: 343837 - DNA, 790 bp, Homo sapiens
  chr19:18054252-18055042
  hypo
cggggccgggcttttcggggcaaggctgcgcccaaggccccctgacgctcatgtccacccccagcgtggcggaggaggcggccgaccggcacccagaaagacgcatgcgggcagccttcacagcctttgaggaagcccagctgccgcggctcaaacaagagaaccccaacatgcggctgtcgcagctgaaacagctgctcaagaaggagtggctccgctctcctgacaaccccatgaaccagcgggccgtgcccttcaatgcccccaagtgagcccagaacttggggagccagttcacccacgggtggtccaggtcacgactctgcacgcccttaggccaggtcagctgcgagggtcacagagcgttccgggggccaaggcgccgggccccggggccatgctcttatcaccagccacccgtcctcccgccagagggtccctgccccgagtgacaccccatcccctcccatcccccggcgcgtgtgtgtagagcctcagggctgagtgcccaataaaggtggcggcaaggctgcggtgaggcacttgaagcctaagtgagtgggtggggagaggcgggcgaagaatggggagaaggaacagctttggggacctgctgtgaaccgcactgggatcatagctagaaaagacaagagcccccaacagcgcgctccttcctgctgccagctgtgcttcatcggctcctgccagcacccctccttggctgtgccacttgtccagtgaggcacctgctccactgtctcctgcacacgcttagagaggtggaggtgga

SEQ ID NO: 343838 - DNA, 542 bp, Homo sapiens
  chr19:18092405-18092947
  hypo
cctgtggggtttcaggccaggctgacgtcactctctgggggcgcggtggggctgggcagggagcgcggcgcgtgtctgacacccatggctggttccctcccgccctccacagctgttcatggtggacaacggggctgatgactggcgcatcgccatgacctgcgagcgcgtgttcctcatctcgctagagctggcagtgtgcgccattcacccggtgcccggccactaccgcttcacgtggacggcgcggctggccttcacgtacgcgccctcggtggccgaggccgacgtggacgtgctgctgtccatccccatgttcctgcgcctctacctgctgggccgggtgatgctactgcacagcaaaatcttcacggacgcctcgagccgcagcatcggggccctcaacaagatcaccttcaacacgcgcttcgtcatgaagacactcatgaccatctgccccggcaccgtgctgctggtcttcagcatctcctcctggatcatcgcagcctggaccgtgcgcgtctgcgagaggtgcgaccgcc

SEQ ID NO: 343839 - DNA, 368 bp, Homo sapiens
  chr19:18103606-18103974
  hypo
cggcatagttttctgaatgaaacaccgcctccggtggtggtgagaggacaggtgtgcccctgaggggctggcacagaaccctcagaggctgggcacctccccagagcaacggcagcccctcggccatctgggaaccccgcgcggggccctagggtggcatccccgggaggtgggcagggttgggtacatgccgaacaactgtgctgaggttaaaattgccttgtgatttttctcctgctctgcccggtcctgccagggctcagaagtaagtgttctcccaggggcttggtggggctgggaaatcgggggtgcatggtggtcacagacagggggtacacccggggcatgccaaccccagcctcagaggc

SEQ ID NO: 343840 - DNA, 500 bp, Homo sapiens; identical to SEQ ID NO: 336016
  chr19:18117804-18118304
  hypo

SEQ ID NO: 343841 - DNA, 605 bp, Homo sapiens; identical to SEQ ID NO: 336017
  chr19:18118537-18119142
  hypo

SEQ ID NO: 343842 - DNA, 287 bp, Homo sapiens
  chr19:18123660-18123947
  hypo
cggtatttctgaatttctgtttccagtgttctctgaggcttaatgggaacatttctcttaggaggatccaaacccactcttgggggacatgaggccgcgctgcatgacttgctgaacggcacagggacccctcgaggaacaaggttgcacaccagctttcagccaccatgactgtggggagtggctggaccaagggctgacctccccgactgcatcaaagttggggaaccaagtctcagagtgaggcgggggcctttcggatatcacatgggacagaggaagagccc

SEQ ID NO: 343843 - DNA, 118 bp, Homo sapiens
  chr19:18126529-18126647
  hypo
cgcggatggacatctgggttgtttccacggcttggctatagtgaatcttgctgctaagaacacgtgtgttcaaggattactttgaaaacccacggagctgttaggtggccctagtggc

SEQ ID NO: 343844 - DNA, 215 bp, Homo sapiens
  chr19:18241264-18241479
  hypo
cgatctccggtcccagcaagcctggccctctgtccccagggccgtctacctggtgcggcaccgtgacacacggcagcgctttgccatcaagaagatcaacaaacagaacttgatcctgcgtaaccagatccagcaggtctttgtggagcgtgacattctcacctttgccgagaacccctttgtggtcagcatgttctgctcctttgagacccggc

SEQ ID NO: 343845 - DNA, 101 bp, Homo sapiens
  chr19:18255890-18255991
  hypo
cgccgagccgagacccgtcccccgtgtgtggcagcctgcggccccccatcgttatccacagctctggcaagaagtacggcttcagcctgcgggcgatccgc

SEQ ID NO: 343846 - DNA, 120 bp, Homo sapiens
  chr19:18331075-18331195
  hypo
ggagcggctggtttcggacaggtgggtcaactcccggttcaggatccgcttgaactggggcggagagaaggtgaagaccgtgatgatggggcaccgtgggccgaggcaggtgagctcagc

SEQ ID NO: 343847 - DNA, 612 bp, Homo sapiens
  chr19:18368482-18369094
  hypo
cggtcagacatgaccccggcccggctgcccagctccacccacgtgacggggtggagcatctgccagtgccgggcttggtcccggcgggtgctgtagccgcgccaggcagactggatggtcgtggtggctctgcagaggtgtgccaggttccgccgcacacggtagccgcgccaagtagcttggatgaccatggccccccggtgccacagccggatcctgcgacgcgccaggtagccacggacgcccgcctggatagtgatcactgcgaggatgcggatctcctctgcagcctgcatggacaccattggctccccggaccgcctgggaggcaccaccgccttgttgcgccaggtgtcccaggacgcagcacccctggctggctcccatgcgcggttccacgattggccaccaaccacaccagcgtccgcggggccctggagtatagtggagttcagggatgccttgtgactaacggcaggattctgggggctataggagtcctgccgtctccacggtgactcctggttaaaaaggggtggcagggaaccacttggggaagactcatagcctagagacaccctccgaactcccggggccagcggaggaatgacc

SEQ ID NO: 343848 - DNA, 554 bp, Homo sapiens; identical to SEQ ID NO: 336020
  chr19:18548582-18549136
  hypo

SEQ ID NO: 343849 - DNA, 956 bp, Homo sapiens; identical to SEQ ID NO: 336024
  chr19:18722000-18722956
  hypo

SEQ ID NO: 343850 - DNA, 207 bp, Homo sapiens
  chr19:18757941-18758148
  hypo
cggcaggtcccaagagctctgggagtggaattgctctgaaagcactcacttcaacctgaatcgtgcagtgcgatcgtcacagctggactgtttccacctggtagctgtgacccccgggacggcctccttgtcgttgtccgtagttaccggggaagaaaggctttattaccctccgccataatcgcaccatctccagggagcccctgc

SEQ ID NO: 343851 - DNA, 372 bp, Homo sapiens
  chr19:18782970-18783342
  hypo
gtcagatgcaggcccgcaagagggaggccaagtgcgacttctggggcctctcagcaagtgagggccaagggggcctctggggagccgtgtgaggtgggaatccgccccggacctggccagcttggaaacctgcccctggctctgtctccgaggaagcagctccagctcgtccgttctcacgggccctggagattcactttgcacggtgcagcctcggaccctgctcttcctcggggcgcctgaccgtggatctcagcggcctggcgcctaacacagagcctggcaccgacggagcatagctcgaatgtttgctgcacaaaggagaggtgctggggcgggaaggtgagggcagccttcttcacactagtggcc

SEQ ID NO: 343852 - DNA, 200 bp, Homo sapiens
  chr19:18807984-18808184
  hypo
ttgccaactggaaacgaagcatggccggggcctcctccttggggttcttgcacggagggattcagaagcacttggcaccggggggagcagcctcatcggtgtccagccagggccacacagtcagcctcagcccccacctcgcttccttctgggcgagcttagacctgggaggcctctttttttttggagtgccgtggtgc

SEQ ID NO: 343853 - DNA, 301 bp, Homo sapiens
  chr19:18836823-18837124
  hypo
cgactcatgtaccgcgccctcgatcttctctggagttgaggccgggccctggaacaggctccagctccttgttctcccagctggtgatgcaggaacatctttgcgcataaatctgcgttctggatgatttccctcaggagagcttcccagaagtgggattaccaggttagagggcaggaacgttgctcaggcactcggcggacgctgccaaatggctcagccggcgctcccagccacctgcctctcagagccccatgcatttccagcaccgctgacgtgtgccggcctcgcttcacccctc

SEQ ID NO: 343854 - DNA, 725 bp, Homo sapiens
  chr19:18856011-18856736
  hypo
cggaaggcgcctgtacttggctctggtggtgcctggagtgcctggaggaggctgcgggggagggtgtgtgggggccgcgtctcaatcaagagcagccctgggctccacaaggaagcctcccaggaactcgcgcttggccaggtgggccccgaaacagtcctgggctggaagcccctgggctgtctcttggcaggcccctccagggatgacgtaggtgggggtaggaggccgtccaggcccggagagagagggcggaggcctgtctgcacctggtgagactggggaggagggctgcctaggccggctacatccctggcacccggcgggcgctggccccgagcttgtgccgctctgcctggcctgtgcatgccagctgcactgcacgcccctgccaccctggctcccgggaccccagctcacaccccctccctaccccccagtgcttggagagccagggagctggggctgaaggaagaagcccatcccaggctgtggagcgatggccgagggtgctccagagtggggggccctgcgatcagactctggggccagcgctggggccacagctggtaaccattgtttggatttctctctctctgtttccatctcctcctcccccagacccccttccaatcctcgggcctggacaccagccggaccacccggcaccatgggctggtggacagggtgtaccgggagcgtggccggctcggctccccacaccg

SEQ ID NO: 343855 - DNA, 276 bp, Homo sapiens
  chr19:18867553-18867829
  hypo
cgacagtcaccttgcagagggagacacaccccgatagtggagtggggtggtgggtgaatttttaatactgctcagaaatccattaatgtctccataatgttggtggaatgcttttcaaagtattcttgagaacgtgatcgccggtgtgctttgcagaaatccggtaatgaagcgaatgtttactctcagaatgaaggaggctctggccaagcagaaacccattcagccggcgttctccacagaggcttaacacccgccggtcgcacgccacccctc

SEQ ID NO: 343856 - DNA, 354 bp, Homo sapiens
  chr19:18872680-18873034
  hypo
cgagcgcattgaggctgcattctgactcccacacctgggccctgggccctgggcccgcggggctctgccactggacagagggcaccagagaaggcccagaaaacacagccgattcggaggagccctcttcattgtctccagatagacagggccaggcaggcggcatccacacgcacctgcgcagaaccagaaagctgaaggtcagcgctggggctgcaggtacccctgccccgcatagaagccaccatctcccagcccctgcttttcccctcacatctcttcacggccaccagagcacatggcccccttcccgctggagggtccttggcaggtccccagcgcccgcccgggagc

SEQ ID NO: 343857 - DNA, 341 bp, Homo sapiens
  chr19:18879380-18879721
  hypo
gccccagcccccgccgcctcctccacccgcgtcccagcagccaccacccccgccacccccacaggcgcccgtccgcctgccccctggtggccccctgttgcccagcgccagcctgactcgtgggccacagccgcccccgcttgcagtcacggtaccgtcctctctcccccagtcccccccagagaaccctggccagccatcgatggggatcgacatcgcctcggtaagcccagggtggggtccctcggggcctgactgggggtcttgtagaggacagcccgggggctgcagaacagtcgggttacctgctgcatgggccaggggtcagaaccccagcgaac

SEQ ID NO: 343858 - DNA, 160 bp, Homo sapiens; identical to SEQ ID NO: 336026
  chr19:18880025-18880185
  hypo

SEQ ID NO: 343859 - DNA, 165 bp, Homo sapiens
  chr19:18963604-18963769
  hypo
cggggactcctaatggcttctctttcagatgtgcccttggtggcatttggggctgcaggtgccactcacggcgcctgctctcacggcagaggcttgctgtagggcccgcctcatggggcctcgggcatgtggaggccaggcccgggcctgtgctggaggctaacc

SEQ ID NO: 343860 - DNA, 314 bp, Homo sapiens
  chr19:18988706-18989020
  hypo
cgagccaaaagtcttgagtcgtctttgattcttttatttctgtttcatctacacccaaggcgaatctgatgggttctcccttccaaacagggtggggggtctgacgctcctctgcctggctacagccccggatgtgttaaatgtctgcatctcgcacctcccgttccaaaaaacgtcacggagctctgagccactgcttccctgaaaccatcgttcccacgtcaccgatggcccccaccggccaaatcagagggcctggctggtcggcaccttccagggccttccacaacctcctgccccggctcctgctcaaa

SEQ ID NO: 343861 - DNA, 541 bp, Homo sapiens
  chr19:18989674-18990215
  hypo
cgaacacgcttggacgggtgacactaaaggagggaacgcggggtgcgggcccctccacactcactcggctttgctgggcttcaggctctgggcctcggctgtgtcatactcccgcaggtccttcagctcgtgcacctggcctgtcaacaccttggctgcaaacgccacgatgtactgcgagaggggaggggaggtgccagtgagaagaaagcccccacgccactgccctgctgacagccatgtgctcctgtcccgggccctccacacgggctgtctgccacctaacgtgcccctccccgggactgcctgaggaggggacagggattgggacgaggacgggaccgccactgtggaggagagccggggccgactcaccaggaaccagtagaggttcataagggtgagcagcagcaggagcgcattgaagaagaagtagaaggggatgtcaggcaccgtgcgcagactgcagtgactggtggcatacaggaccttgagcgggaaccagtagaggcggaaccagaacctgcggtgggaggagtca

SEQ ID NO: 343862 - DNA, 433 bp, Homo sapiens; identical to SEQ ID NO: 273688
  chr19:18994722-18995155
  hypo

SEQ ID NO: 343863 - DNA, 152 bp, Homo sapiens
  chr19:19042719-19042871
  hypo
cgaggcgcggtctccacagttgcccgggccaggtgggggtctctcggagggaggggtgccctcacccgctgccgcagccgctcggcctctgcacgctgagcctccagctgctgcctccactgggctgcggcggcgttggcctctcgcagggc

SEQ ID NO: 343864 - DNA, 233 bp, Homo sapiens
  chr19:19156742-19156975
  hypo
agccactatgcccggcctattatgctaaattcttaaaatatgttctcttaatctgtgctcagcccatcttgctggtgaggtatctgaggcttcccaaggatcagtgaccacgcccctgcaccccgaaaggtcagctggtgagaggcagagctggtacccggatccaggaagcaaagcactgaaaggccgttctaccagcagtacaggaaactccgtgtttgtttataacattc

SEQ ID NO: 343865 - DNA, 461 bp, Homo sapiens
  chr19:19391471-19391932
  hypo
ggcgcacgcacaaacgggctctcagaaggcagctccgttgctaacagacaccaggtgtaagcgcgcacagattcagagtctggcgtaagactcagctgtgcgactcccttagctccttcaggggaggcagccaaccatcctcagagcagctgacatttaatttggcatcagctgtggaacttggcaggctccagtaacactgacacatagaaagatgctgcaacagccccatccgggtggcagaaaccaccacccctcgggcggtgcggtgcttcccgggggagaaggtgagcaaaggggtgcagcgggccctctgggaagggaaaagatttgggtccttccagctcatcaacactcgggctttgccgctaagaatggcccacatttgcactcttagtccttccttggtttacagggcactgagggatgtgggggagccctgttggggagacgcaggagcc

SEQ ID NO: 343866 - DNA, 180 bp, Homo sapiens
  chr19:19447926-19448106
  hypo
cgccttgttttttttttttcttacattcccaaacgtgactatttcctttcagaattccgttgatgcagcaaagccgctgctgcggaaggcgatccagatctcacagcagaccccatattggcactgccgcctgctcttccagctcgctgtgagtaccgcggcccgggaacgagggtgccc

SEQ ID NO: 343867 - DNA, 270 bp, Homo sapiens
  chr19:19576172-19576442
  hypo
cgaacacggagtcagaaacgagcgcttgaacgggacccaacagaggacgatgtggagagcaagaaaataaaaatggagagaggattgttggcttcagatttaaacactgacggagacatgagggtgacacctgagccgggagcaggtccaacccaaggattgctgagggcaacagaggccacggccatggccatgggcagaggcgaagggctggtgggcgatgggcccgtggacatgcgcacctcacacaggtgagtgggaggagccagc

SEQ ID NO: 343868 - DNA, 118 bp, Homo sapiens
  chr19:19612766-19612884
  hypo
cgtttgtgtaggtcataaaaccccggcgtaagttggcgttccgctcaggagaggcccgcgactggagtaacggggctgtgctacaggtcagaaccgcactgggcgccgggagcctcgc

SEQ ID NO: 343869 - DNA, 714 bp, Homo sapiens
  chr19:19616896-19617610
  hypo
cggctcatggtgccacagcccctggcagggacggccggcccgcccccgtgactgactgacagatgcagggatggccgaggcagccctcgctccagctgaacgcctccattgctgcttgttctggagacccccgcccccgcaccttccagacttagcagaagaacaaactgaagaacagacccagccagagaagcagggattccagaagctgcccattaagggagaaggagaggatccggtcggcagcagccctgagcagaaagctggaggggggactgtcgcggggtttttctgttgtggtttattttattaaattttttccttttttctattcatttcgatggacgcaatcttaagccaccctggccttgctcctgggaggtgagcgtgcacaggtgtgtgcaggtcaggaggtgccgtccaggtgtgcggcgagccgctgcgcacagatgtcaggatttccgtttgggtctagtttagaacctgtccttaaacctaggggttgctgtcaggatttgctttcagactttttttttttttgtaattccctttagagtctacaaaaatgtttttaaaaggatcaggtctgcttttagtttcatttttgtttctttcccgtcccactctttaaaaactggttccgtgaggaaaggcagaagccgttccgtgtctcttgcaggctgggccggcttcatgccagtgcgagggcgtccc

SEQ ID NO: 343870 - DNA, 274 bp, Homo sapiens
  chr19:19636892-19637166
  hypo
cgccagtgtcccctgattgcagagtgggcagcgcctggagctgtggaggagggtgtctgggggcgggctggcccgctgagcagcgcctctcttcacaggctacagcatgctggccatagggattggaaccctgatctacgggcactggagcataatgaagtggaaccgtgagcgcaggtagggcccctggtgggcgttgtctgaaagtgcccccccggcgagttgtcggggtcctgtagcattccgctgttgtctgtgctggcgaggggtgaac

SEQ ID NO: 343871 - DNA, 106 bp, Homo sapiens
  chr19:19680307-19680413
  hypo
cgctggggtaagggttgttcagatgggagtaaaaatactcattcagcacttccgtcgcctgcttgctgaaattccgccgcttgcgcctgcaaaaacagccgccttc

SEQ ID NO: 343872 - DNA, 149 bp, Homo sapiens
  chr19:19719325-19719474
  hypo
cgcgtgctcactccttacctggcaaggagttcaaggccatgcttggtcggacagcagctgaggcaggcagtcacccccgagtctcccttccaaggtcacgcccaccactcatgcccgatgggaccacaatgcatgccttcatgctccac

SEQ ID NO: 343873 - DNA, 571 bp, Homo sapiens; identical to SEQ ID NO: 336031
  chr19:19729161-19729732
  hypo

SEQ ID NO: 343874 - DNA, 430 bp, Homo sapiens; identical to SEQ ID NO: 273729
  chr19:19737450-19737880
  hypo

SEQ ID NO: 343875 - DNA, 1103 bp, Homo sapiens; identical to SEQ ID NO: 225866
  chr19:19738572-19739675
  hypo

SEQ ID NO: 343876 - DNA, 150 bp, Homo sapiens
  chr19:19769454-19769604
  hypo
cggctcccagccacgtgtcagcatttgcagttttggtgaagatgaagggagagggtgtgcaccgcacattggccattgtactcagtacaaaagggcagacatggtcacggtcttccatcaccattctgaagcgctgagatgcgtagactc

SEQ ID NO: 343877 - DNA, 776 bp, Homo sapiens; identical to SEQ ID NO: 336033
  chr19:19843315-19844091
  hypo

SEQ ID NO: 343878 - DNA, 116 bp, Homo sapiens
  chr19:19974498-19974614
  hypo
cggccactcatttctgcacagatgaggacaggtctcatgaagctttggcgcagtctggtaccctcagttttttgtaacgagttgtttggcaggaggtccagtcacgagggccttcc

SEQ ID NO: 343879 - DNA, 949 bp, Homo sapiens; identical to SEQ ID NO: 336042
  chr19:20162601-20163550
  hypo

SEQ ID NO: 343880 - DNA, 196 bp, Homo sapiens
  chr19:22799568-22799764
  hypo
cgtttgaccgtgtcctgggagttcataggtaaaataactgccgcgacctgcactgacccggaccggagtgcctgaaaggggccagctgcctattccgccagtccgcctggagggctgggacaggcttggtcctgtggacgaggttccatctcccctgcctgcggaaggaagaacgtgaagcacagagaaaggaagc

SEQ ID NO: 343881 - DNA, 775 bp, Homo sapiens; identical to SEQ ID NO: 336053
  chr19:23257806-23258581
  hypo

SEQ ID NO: 343882 - DNA, 101 bp, Homo sapiens
  chr19:28296843-28296944
  hypo
cggcctcggccacgctagctcactggccgcaccgctgcccgccttgctgttcaccagtccctgggcatcccgcatctggttgctgaggaacgcctgacgcc

SEQ ID NO: 343883 - DNA, 452 bp, Homo sapiens
  chr19:28341898-28342350
  hypo
cggcctgctggccgctcctctgtcaggtctccgggtcaactagatgtcggccacgaacgccagacttagcctccggctcgccatgtttgaggtcgaccagcaggccctctcaccggagtgagctgtaaggagggatgctcagtgaaccaatcaagacgtgggccacggaggtcagcagggctctgggcaattcatggtcctgacctggcaagcaccactctgggacctgagcgttgcaaacccatctacacccgtccaacctgtgttggccggcgctcctcgctcgctcaggcctccgggttgacaagagttcagccgtgagcgcctggtttagccgccagcttacagtgtcggaggtcaaacagcaagccctcccccggagtaagcagtgagaagggaagcccggcggaccgagtgcaacacgggctgcagcggggagctgggttcgggac

SEQ ID NO: 343884 - DNA, 196 bp, Homo sapiens
  chr19:29993099-29993295
  hypo
cgcaggacacatctcagagctgggccacataagacgggaggaagctgcggcatttatccatccactccattcatccgtcactggctggagccactcctgggatgccgatgcccacacgcctccgtggctatagggagcccacaggctgagtcacaggaaccgagggtaaggtggctggtgtgcagggtggccgtgc

SEQ ID NO: 343885 - DNA, 2972 bp, Homo sapiens; identical to SEQ ID NO: 336064
  chr19:30015761-30018733
  hypo

SEQ ID NO: 343886 - DNA, 1249 bp, Homo sapiens; identical to SEQ ID NO: 336065
  chr19:30019101-30020350
  hypo

SEQ ID NO: 343887 - DNA, 187 bp, Homo sapiens
  chr19:30155060-30155247
  hypo
cgctgcccgttctcagcactcggtatgcaggggtgaaccagaagaaagtcctgtctgaacacgagaagaaattactgtctagcccgtggggctcacagcctgggtgggaggcaagccaccagcatgacttgtttatgagcattccacagaagccacagcctggtaggcagccctgaatcccacgagc

SEQ ID NO: 343888 - DNA, 259 bp, Homo sapiens; identical to SEQ ID NO: 336066
  chr19:30165123-30165382
  hypo

SEQ ID NO: 343889 - DNA, 305 bp, Homo sapiens
  chr19:30186010-30186315
  hypo
cgccacccagacaccgaacacccagacacctaacacacagacacctgacacccagacacctggacacctgacacccggacacccagactacctgacacccggacacctggacacccgatcacccagacacctgatacccagatacccggacacccagacacctgacacccagatactgagacacctgacacccagacacctgacacccagacatccagacacccggacacctgacacccagacacctgacacccggacacctggacacccggacaccgagacacctgacacccagacactgagac

SEQ ID NO: 343890 - DNA, 40 bp, Homo sapiens; identical to SEQ ID NO: 273789
  chr19:30252252-30252292
  hypo

SEQ ID NO: 343891 - DNA, 62 bp, Homo sapiens
  chr19:30502063-30502125
  hypo
cgtaaacgaaagaacagcactggcagtggccactctgcccaggagctgccgaccatcaggac

SEQ ID NO: 343892 - DNA, 3850 bp, Homo sapiens; identical to SEQ ID NO: 336069
  chr19:30716181-30720031
  hypo

SEQ ID NO: 343893 - DNA, 296 bp, Homo sapiens
  chr19:30936361-30936657
  hypo
cgagtgccccgactgcggccgggtgttccgcacttaccaccaggtggtcgtgcactcccgtgtccacaagcgggaccgcaagggcgaggaggatgggctgcacgtgggcctggatgagcggcgtggctcgggcagtgaccaggagtcccagtcggtgagccgctccaccacgccgggctcctctaacgtcaccgaggagagcggggtcggaggcggcctctcccagaccgggagtgcccaggaggacagcccgcacccctcctcgccatcctcctcaggtaggttagctgagaagc

SEQ ID NO: 343894 - DNA, 219 bp, Homo sapiens
  chr19:31217770-31217989
  hypo
cgctgctgagcgcttaacgacaaccagccttctccccagaaccggctgtgagcacagctaagaatagacctgggccaggacggtggagtctctctgtgcgagagttctctgcgggaatattctaaactccgcagtggagccggctctgcctcagccttgccgagcagggggccaagcgtgtctgagtcagttcagctgctgtaacaaagcaccgtgatc

SEQ ID NO: 343895 - DNA, 184 bp, Homo sapiens
  chr19:31640397-31640581
  hypo
cggcgtgtggaggcgggaggggcacagccaggtgcgagggaaggctggcatctggcgcccactgcctgcccacccgcccgcccgcccgcccaagtaggtctgggcttccctgcctttaataaccatccccaccgcagaggaacggaagctagaaacacaccggctttggcatttcaggcgagtc

SEQ ID NO: 343896 - DNA, 1142 bp, Homo sapiens
  chr19:31767664-31768806
  hypo
cggtggacagtttggataagtcccgtagccggaagcctaagtgtgactctaggtgactgatgtacgtggaaggagtcctgatttgggacgcacaatcgttacaaaagaagacggggtggccagtgtccaagtttttgaggaactttgttccacctgtccttcgaagctggtatttcacgttggccagccagtggctgatggtggtcatggacagcccggtgaacctggagatatgcatccgctcctgggggctcaggtctgacatgatgtacttcccttctgaggtctgccggaggctggcggcaaactgggcctggaggatcaggaggtgctgggggttccagtttgactggcggcccttcctcttctgggcgggcgtcgactcctcagcctcctccagagtggccccgtcaatgtcagacttctcggagatgctggaaggagtggaggattttgacgtgtggctctctgtcaagttcttcagcatatcggatatatctgacaaggcattctcgcgtagcggcgagtttgacatgaatgatacgacggcagatgtctttgccgttgtcaccgtggatgaggaggttgccggggctgtggacgtgggtgacagaagcactgaacccaaggagcagcctttgtcactcttcccttttgtcaagtctatgggctggtcgttgttgacgtggtagaaatagcggtcgaggtggtctgccttcttggactgcaggggcggcggggtggccacagcagccttctccgccaggctgttgctcatcttgaaaagcatgctcatggggtccagggcaggcagggagggcttggcggccttgcccaggtgaatgttcatgactgactgcagggcgctcaaagggttaacaaaaggctgttcaggcgggtggtcggtgatgatggccgtgctgccactcaaactgctggctaggggcttcaccagctccttgccattctccaccggctcagcgagggggctcccatccttgcacccatcccgcggggggctggggctgttctcctggctgcggaagcccccatcgctggatgcctccatcttgatgggttccccgacttcgctgctacatggggagggagtggcccgcttgggcggggaaagcttcccatcc

SEQ ID NO: 343897 - DNA, 760 bp, Homo sapiens
  chr19:31769887-31770647
  hypo
cgtcttccttcccttccatttccagcaaggagcgtttgcgaggcttggaccagcgcttggggttgttgttatcggtctcatggttgtcgtcgcggtaatgccccgtctcgttcatgtgcaccgtcaactccaccagggtgtcgtaggcagcgctgcagtccttacagcggaacttgctggcccccgtgaagatggagccatagagcttgctgctctgccggtacagctgcacggtgctgaagaggctgggctccgggagcatgcggctctgtgacacctgctgcagcgtcttagccatggcgctctggtgccagtcgaagctcccgctgccacagctgctgctgctgctactgctgctgctgctgctgccgttgttcttctccgaggagggctggtgcaggttgaggttgaggttggaccagtaggagttggagaggaagttgttgtacacggccttcatctgctccaggctatccgacacagtcgtgtcttccagtgggaccgtgacctccttggtctcctcttcgttcttgatggagccgctttcaaagtcagccattcggtcactggtctcactgatgtgtgactcgctgtccatttcatggcaggaaaactcggcggccggggagttctggtagctggggcaggccctggcgagctccttctccgggcacatgtacttggccgagggctctccatctgccgtatgctcctctgggtctaaaccttcgtccaccagggcagcagcctttaactcttc

SEQ ID NO: 343898 - DNA, 3365 bp, Homo sapiens; identical to SEQ ID NO: 336071
  chr19:31839508-31842873
  hypo

SEQ ID NO: 343899 - DNA, 328 bp, Homo sapiens
  chr19:32083463-32083791
  hypo
cgcttgccggggagtcctgctgccttccgaggtgtgaagggaaggcatgcactgtgcatatgctgtaccatacagttttgcctacaactgcttgtagcttcattgtagctgtgaatgctccgttcctctccttttcacccctgaagattcgcgaacatgcaggattgagctgtgcgaggcatagcattccccacatggtagacgaaggcggatgtgggtctgatggctctactgccgtccacccgggaggatggacgtgtgttccgggatatcagagcttgcggctgaccagcccacatgtccatgcagccctcccgctggctgtgtc

SEQ ID NO: 343900 - DNA, 93 bp, Homo sapiens
  chr19:32198266-32198359
  hypo
cgagctggctggcacttcgaattaccctcaagagtccatgggcatcacgtcacatttgcgtgcccaatatcatacgtgacgagtcgtgccacc

SEQ ID NO: 343901 - DNA, 164 bp, Homo sapiens
  chr19:32374316-32374480
  hypo
cgatgttttttcagtgattccgcaagagtcaaaaacccaacaaagcgcatcgccggcgctgtaaagggagcatgctgccggtgtctgtgaccactgtatgcaaagcttggcattagtcacagccgggccggctgtgacaggcctgaagtgagggagattaatgc

SEQ ID NO: 343902 - DNA, 114 bp, Homo sapiens
  chr19:32835126-32835240
  hypo
cgaaaaaaaaattactcaacattttattttttcacagctatttggtctaattggcaaaggattctgtggaatagcagaattctaactttgcagccgggcgcggtggctcacgcc

SEQ ID NO: 343903 - DNA, 267 bp, Homo sapiens
  chr19:32845502-32845769
  hypo
cgtcattgaaaaattgagagaaaggacagaccaaaacgcttcagacgatgacattttgaaagagttgcaggacaacgcccagtgccaacccaacagcgatacaagtttgtccggaaacaatgtggtggaatacatcccgaatgctgaacgaccctaccgttgccgcctgtgtcactacacaagtggcaacaagggctacatcaagcagcacttacgagtccatcgacagagacagccttatcagtgtcctatctgcgagcacatagc

SEQ ID NO: 343904 - DNA, 38 bp, Homo sapiens
  chr19:32849484-32849522
  hypo
cgcaggagctcaaatagagccgcaagcaaagccctttc

SEQ ID NO: 343905 - DNA, 158 bp, Homo sapiens
  chr19:32850587-32850745
  hypo
cgttggatccatgtctcctgcgtttcggagagctgcatattcatgtcagtcataacctttgtccctgtaacctgtcagttaactagaaagaattatacattgcatagcacttaaaaatttgcggccgcttttcctttcttgttgcgttggtagctgac

SEQ ID NO: 343906 - DNA, 517 bp, Homo sapiens
  chr19:32898192-32898709
  hypo
cgacgctccctgggatagcagctgccctgattggcacacccccgcagtcatcaccactgaggcgtattcctgaagctgccagtgtgaattgttttatagaacactggtgttaaaattcaggtacctgagacaaaacaatattttaattcttcaaaatccggttgtcaacacatttactatggagtatctcccacgtggccacttctgtgggaggtactgaagacctactaccgcctatggaagtagaaaataatatacaactgtgtagttacgtgacgcattgcgtggtaactgctatggctcagggagggagaagatcagccggaactggaatgtcccaagatgttctggaagaaaagcagtggctcgtttgtgttgcttacctgtattcctgactcctggcagggcctgctgtagagcacatgcttcatgaataaatatgattgagttgaataaatatttgaattgtgttttgagtgtagctttgaaggccagcaacgatttagatggcaagatc

SEQ ID NO: 343907 - DNA, 75 bp, Homo sapiens
  chr19:33209600-33209675
  hypo
aactttacttcaccgtcttcatttacatcgggcgtaccccaagcagaaggtatttaaattcacagaaattctgcc

SEQ ID NO: 343908 - DNA, 84 bp, Homo sapiens
  chr19:33557659-33557743
  hypo
cgccctcagcggtcgcgatagatgccacaggtggaacagaatgcaatgtgctgcaaaaccagcccagcgttaacatatctttaa

SEQ ID NO: 343909 - DNA, 74 bp, Homo sapiens
  chr19:33585141-33585215
  hypo
cgagtaaagagacggccacgccgacagaaacctggtgtgtatgttaattgattaactgttatcactgctgcagc

SEQ ID NO: 343910 - DNA, 2468 bp, Homo sapiens; identical to SEQ ID NO: 336076
  chr19:33791861-33794329
  hypo

SEQ ID NO: 343911 - DNA, 302 bp, Homo sapiens
  chr19:33996103-33996405
  hypo
cgcggcccggcctgccttcagctacaaacaatgctgcctcgccgactctcactctgctctccacagaaggcagcggcatttgctctgcggtggaagccggcagccatctgaggatgttagctggtcagagacaaaagcagacctcgccacagtgacgcaggtgcctatgcccaaagaccactcccggagcaagcttcctcacaggggccacagagggaacagcgctgcccgggaggctggagaccaggtccagtgaccaggcctgcccagggtcagtgcctcaaaccacccgggcagcagcc

SEQ ID NO: 343912 - DNA, 2040 bp, Homo sapiens; identical to SEQ ID NO: 336077
  chr19:34112312-34114352
  hypo

SEQ ID NO: 343913 - DNA, 247 bp, Homo sapiens
  chr19:34177611-34177858
  hypo
cggtgtctgactcaggaggctgcaggaagcgcacccacaccgtggccagcttactcaggggctcgcgacagttgctttccagctggggccttgctggggaccatcgatggtatgtgtgcaggcactggccggcatgcacccgggcatgtatgcatatgtgtgttattgaacccgcgtctgcttaggtccgtgggtgcggtgcacatgtgaacaccgtccccatgaccgtgcaatagcagctgctccc

SEQ ID NO: 343914 - DNA, 476 bp, Homo sapiens
  chr19:34303771-34304247
  hypo
cgagtatgtgctttgccgggaggagcggcggccgcagcccacccccactgctgttcgaatcaagcaggaacccctggactaggccctgcttcagtgcccacctgggcccccccagggacctggaaacagtgctggggagttctgcctgtgtatacttggccgtgggcatgagaccgagggtgaggctggagggtccaaagctggcccagcgagcaccagggtcccaggtgtcatggcaacagaacgtgggatgctggaggcatgcctgcagaaggactgttgatgcgacccaaagatacagcggtgggatctctgctgccagctctcccagcccctcagcttcgcagcctggcgcagcatcctctgaggccccggggcctgttggggcggggttggaagagccgtctgcagctacttcagaggagctgtttatccctctccacgcggggcagactctggcgggtctcctagcgtcc

SEQ ID NO: 343915 - DNA, 75 bp, Homo sapiens
  chr19:34949560-34949635
  hypo
cgggaatttttaagtcattttttattggatatctggtaaacgagattttagattgtatggcgtataaaattacag

SEQ ID NO: 343916 - DNA, 52 bp, Homo sapiens
  chr19:34963061-34963113
  hypo
cgcgtgccctgtcctcaccctgctttgtagacacagttaacaatgtgttccc

SEQ ID NO: 343917 - DNA, 217 bp, Homo sapiens; identical to SEQ ID NO: 336080
  chr19:35168869-35169086
  hypo

SEQ ID NO: 343918 - DNA, 68 bp, Homo sapiens; identical to SEQ ID NO: 336081
  chr19:35169531-35169599
  hypo

SEQ ID NO: 343919 - DNA, 547 bp, Homo sapiens; identical to SEQ ID NO: 336082
  chr19:35454464-35455011
  hypo

SEQ ID NO: 343920 - DNA, 447 bp, Homo sapiens
  chr19:35551123-35551570
  hypo
cgtcccctcaagctccccaggatggggccatgtactttcagaccccctagggcagggccaagcctgggctctggggacctgggctccagtcccctgtcgccgccccctgctgacccttgtcccacagactgtggccgcaggaagctgcccgtggaccgcatcgtgggaggccgggacaccagcttgggccggtggccgtggcaagtcagccttcgctatgatggagcacacctctgtgggggatccctgctctccggggactgggtgctgacagccgcccactgcttcccggagtgagtgccccccaatggcgctgatgatggggaggcagaggagcggagagacagtggggaggagggcggattgtgcccaggcaggtggccaccctccacccctttccctggtaggcggaaccgggtcctgtcccgatggcgagtgtttgccggt

SEQ ID NO: 343921 - DNA, 104 bp, Homo sapiens
  chr19:35589864-35589968
  hypo
cgccctgcgctgcgcgttgcctgcccgcgtggcgagccagcctgggatgcagttacgtgctccttccctttcaccgcccccagctccaacgatggcctccccac

SEQ ID NO: 343922 - DNA, 73 bp, Homo sapiens
  chr19:35613703-35613776
  hypo
gctggggttctgtgcgccatgggcatcatcatcgtcatgagtgagtggaggagctcgggggagcaggcgggcc

SEQ ID NO: 343923 - DNA, 100 bp, Homo sapiens
  chr19:35615970-35616070
  hypo
cgtgtggctgatgaacgtggcccacggtcagcagctcacaggcgggccatcaccccaagtagggccaggagccagccaaggggccgtccaggggccccag

SEQ ID NO: 343924 - DNA, 392 bp, Homo sapiens
  chr19:35616100-35616492
  hypo
gcactgaggtcgatctcgtgatgctggtagatctgtgtggggcccttaaagcaagcagcaaagaggaagcgtctgccggccatagtgatgtgggcaaaggcacggggggccaccagggccggaggccccagctcctgcagtggctccaggagccccttgtcaggctcaaggcggaggacctggctgaaggcgaagtcgctgcctaggatggccagctggtccctggcgatgagcagtggctggaagacgtgggcaccgcgcgagggaagttgctgcagcagacgaaacatggagccgtcccagcgcatgacctgtgggggtgtggccagtgagggcctggggtcccgggggtctctgggggccgtggaacagcttggaagcagaagcctgtc

SEQ ID NO: 343925 - DNA, 402 bp, Homo sapiens
  chr19:35617152-35617554
  hypo
cgcccccaggcccagcctcaccatggagtccccaatgtagcgtgtgaggcacaggaacacgtccccaccagcctggaagtggcgtgtggcatagacatcctcggcctcggggatgtctgtgcgtctctcgaagcggccaccggtccagtggaagagcacgggccgctgggaagccgaggccagcagcaggtggggccggccgtccagctccagggcctcagcgtccgtgtcccggtgccaggcgtgcaggctctggtgcgggtaaaagccgggcccgtcgcggcacagcagcgtggtgctgcccgccttggaggcatcggccaccacgaagcagggttgcccttccagccacaggagctcggcgtcattgggccgcagcagccgccgcggggccagggtctg

SEQ ID NO: 343926 - DNA, 234 bp, Homo sapiens; identical to SEQ ID NO: 336085
  chr19:35738737-35738971
  hypo

SEQ ID NO: 343927 - DNA, 478 bp, Homo sapiens
  chr19:36042055-36042533
  hypo
cgtgatggaaatcaggatactgtgggtcaaagtaggtcagatgtcagcagcagcagggaggtgttctacacactgaacactggagtggcccgggcctctcagcaccacccctttagtgaaatgtggagggggccgtggggggagttattggccagttagaaaggtttttttggcatgtcaccatctggcactggcacccgctggcatttgccggctgttctaaaccacagtcaggatctgatgggagttgggaccaggggttggagggcaggaagagggccagccagggacacctgaagaagccttgctggaaggcagagagacggcgcgtcttgcggatgaggacatcggcgatctggcacacctcaatgctgatgaagaacacggtgtagcaggtgtactgctggtacaggcgctgcccgaatgtctgcaggccaggggcaaacggaaacagcctgagtccagcctgagtcccggc

SEQ ID NO: 343928 - DNA, 537 bp, Homo sapiens
  chr19:36221473-36222010
  hypo
gatctctcggactgcgagggacggctcttccccattggctaccagtgagcggtcggggtgatccatggggccaggggactccatagctggatcccatttcccaagcatcctaaccgtcttatcccacatgccaggtgctcccgtctgtactggagcacagtggatgctcggaggcgctgctggtatcggtgccgaattctggagtatcggccatgggggccgagggaagagccagctcacctggaggctgcagaggagaaccagaccattgtgcacagccccgccccttcctcaggtgtggctttggctctgtcttcttcctgaataccgctctccctaaacaaacctacagatctctgttccccgctcccttttggaaagtccaggaggcttgcttttgcttcagttgctgtaatgtaacggcagctcgcttactgccatgccttgtgtgccaggggctgtgcccggcttttcatgggaagtgaggtggggagagcggcacgctgcctacttgaggtggggtactggcttttggac

SEQ ID NO: 343929 - DNA, 226 bp, Homo sapiens
  chr19:36222366-36222592
  hypo
cgtctggaaaccagggagttttgggtggaggagggagatcagtttgcagaggttgggtggagccaggtaatggagagcctccgggccggggcgggcgggagcgtctgatgtggcttggatgcaccaggcaagtaagaaagtggtaggactggccgtgctggagggagggcagttccccatggcgtgcaaagcctgcagcagaggcagagaggagatggcaaggagc

SEQ ID NO: 343930 - DNA, 416 bp, Homo sapiens; identical to SEQ ID NO: 336088
  chr19:36347684-36348100
  hypo

SEQ ID NO: 343931 - DNA, 235 bp, Homo sapiens; identical to SEQ ID NO: 336091
  chr19:36478131-36478366
  hypo

SEQ ID NO: 343932 - DNA, 566 bp, Homo sapiens
  chr19:36592549-36593115
  hypo
cgactctgtccttcagactcgggggagtcagaggccgacctggagtgcagcttcgcagccatccactccccagctccgcctcctgaccctgcccctcggtttgccacgtcgctgccccatttcccaggtaagcaggggccagacacgcaggggactcgctgctcgggcctggcttagggccagtcacaatgtctaagcacaggccctgcacttggagcccactgagcctggaagacggggatccctgcttctcagcctgcgggcaacagggcagggatgggtggggcccgctttctccatttcaggtggcgtctgctgtgactcatggtgttggctcctcttgtccctcccctccttccctgtcaggatgcgcaggtcccacagaagatgagctgtccctgcccgagggacccagcgtccccagcagctccctaccccagactccggagcaggagaagttcctccgccaccactttgagacactgactgagtccccctgcagaggtagggccctgcctcacccacacctgccgaggccgtctgtgcagcctgggcacagcattggc

SEQ ID NO: 343933 - DNA, 842 bp, Homo sapiens; identical to SEQ ID NO: 336094
  chr19:36909079-36909921
  hypo

SEQ ID NO: 343934 - DNA, 1071 bp, Homo sapiens; identical to SEQ ID NO: 336099
  chr19:37263336-37264407
  hypo

SEQ ID NO: 343935 - DNA, 739 bp, Homo sapiens; identical to SEQ ID NO: 336107
  chr19:37568997-37569736
  hypo

SEQ ID NO: 343936 - DNA, 72 bp, Homo sapiens
  chr19:37702078-37702150
  hypo
cgtgagccaccgcctccggctgttatatttacaatacctaagttaccccttggttacggcacactgcagaaa

SEQ ID NO: 343937 - DNA, 989 bp, Homo sapiens; identical to SEQ ID NO: 336111
  chr19:37959780-37960769
  hypo

SEQ ID NO: 343938 - DNA, 740 bp, Homo sapiens; identical to SEQ ID NO: 336116
  chr19:38182720-38183460
  hypo

SEQ ID NO: 343939 - DNA, 852 bp, Homo sapiens; identical to SEQ ID NO: 336117
  chr19:38210087-38210939
  hypo

SEQ ID NO: 343940 - DNA, 298 bp, Homo sapiens
  chr19:38481053-38481351
  hypo
cggggtcgtggggtgaatacctgtggaactttggcggaagccaggtccgatgggatctggagtaccagctttgacttcagagcgctctcttctggctgggcatggagacaaggaatagatacagcaatagccacataactgcaggtggacgatgagtacagctcttgctcagctagtcagcccacagcgagaaccccgccccagtctgggctaacgtgtcctctgctgccagcagcccagtagggttctttgctggagtctggtttttccttgacttgtagctggcaagtgcttacac

SEQ ID NO: 343941 - DNA, 792 bp, Homo sapiens; identical to SEQ ID NO: 336120
  chr19:38719834-38720626
  hypo

SEQ ID NO: 343942 - DNA, 636 bp, Homo sapiens; identical to SEQ ID NO: 336122
  chr19:38754883-38755519
  hypo

SEQ ID NO: 343943 - DNA, 321 bp, Homo sapiens
  chr19:38781936-38782257
  hypo
cgagactgcagtggggcagacactattaaatttgctggcacagctctgagtaccccctcgcttccaccctgacttcatcccgcagtagctctcagccctcccagcccctgcagggccacgtctttctctattgccggtcagcgtgtgtgtgcacaaagcccctaaggtttcatgtgtacacaccggtgctaagtgttttttacacccttgtgcatctctcggcctggggctcctgtgcaggttgccctgagagttgggtttttagttcaaaaagaaggaacacagatgactactctgctggcgacacggccactctgctgg

SEQ ID NO: 343944 - DNA, 147 bp, Homo sapiens; identical to SEQ ID NO: 274036
  chr19:38828045-38828192
  hypo

SEQ ID NO: 343945 - DNA, 81 bp, Homo sapiens
  chr19:38828222-38828303
  hypo
ctctttgcagaaatacctgggcttcccttactacctgaagatcaactactcctgcgaggaaaaggtgagtgggtgcagcac

SEQ ID NO: 343946 - DNA, 698 bp, Homo sapiens; identical to SEQ ID NO: 336123
  chr19:38852786-38853484
  hypo

SEQ ID NO: 343947 - DNA, 384 bp, Homo sapiens
  chr19:38873767-38874151
  hypo
cgttgggcagagtacgattggtgagaaaagagagcataggacacgtgggcaagtgctggccccatagggtggggatggagcctttgtgatcactctactcgtctctaatccctcctttcctgcagcgagggtgggtcctgggccccaacaactactacagttttgccagccagcagcagaagccggaagacaccaccattccctccacagaactggccaaacaggtcatcgagtatgcccggcagctggagatgatcgtctgagccccccgggcactgggtggggcagggcacgagttatttaaaacagttacactgcagggtttcgcccaataaaggtggactgacattccctcttccaggcccttgtctccccagttgggac

SEQ ID NO: 343948 - DNA, 132 bp, Homo sapiens; identical to SEQ ID NO: 274046
  chr19:38901797-38901929
  hypo

SEQ ID NO: 343949 - DNA, 169 bp, Homo sapiens
  chr19:38905549-38905718
  hypo
ccagctcctgcagccgcaggtagaggttgttcagcttgggtaggtgcaggcggccgtcaggcaacctgtcgggctgtgcctcatgcagggacaccaggtccttgaggtgcacgcccagtacaggcagccggaaacccgcgcagccagcccaggtgcggcggtagcgggc

SEQ ID NO: 343950 - DNA, 336 bp, Homo sapiens
  chr19:38964030-38964366
  hypo
cggcactgtggacacgcccccctgcctgcgcctgacccaccgcacctggggctcccagaacagcctggtggagatgcttttcctgcggctgagcctcccagtccagttccaccagcacttccgctgcactgcaggggccaccccgctggcacctcctggcctgcagccccccgccgaggacgaggcccgggcggcggaacccgaccctgactacgaaaacctgcgccgctcagctgggggctggagcgaggcagagaacggcaaagaagggactgcgaaggagggcgcccccgggggcaccccgcaggcggggggagaggcgcagcccgccagggc

SEQ ID NO: 343951 - DNA, 575 bp, Homo sapiens; identical to SEQ ID NO: 336124
  chr19:38976252-38976827
  hypo

SEQ ID NO: 343952 - DNA, 257 bp, Homo sapiens
  chr19:39015907-39016164
  hypo
cgcgggttggggctgaggcatgggattggggcttgggctggtgctgagccctgtgtccccacagtccggtggctcggaccaggaacgcaccaagaagaagcgccggggggaccggtactctgtgcagacgtcactgatcgtggccacactgaagaagatgctgcccatcggcctgaatatgtgtgcgcccaccgaccaagacctcatcacgctggccaagacccgttacgccctggtgcctgcccagccccgtcctc

SEQ ID NO: 343953 - DNA, 116 bp, Homo sapiens
  chr19:39026990-39027106
  hypo
cgtgccccaaatgtcacgccctggttgctgttctcttattaatgtccctaatccgggttaatcgcgtctcctctttgccgtgttgtgacgtgtctaacctttctacccggatcctc

SEQ ID NO: 343954 - DNA, 72 bp, Homo sapiens
  chr19:39094650-39094722
  hypo
cgctactagggagggtgaggtgcatggattgcttgagtctccgaggtcaaggctgcagtgagccatgatcgc

SEQ ID NO: 343955 - DNA, 485 bp, Homo sapiens
  chr19:39151314-39151799
  hypo
cgcgagccaccatgcccgacccatggactcacttgtataatcttgtgaagcaggtgttgttacccttacatgcagaaatggatccatgggcctttaagccacttgcccctgtgacagtgccaggatttgaatgtagaagttgaggctttcaagtttatgctgttatttctacactacactgaagtctagtgattgggaatggctttgcgagcgggtggtgaggggaggagtgtgcagtgcaggtacttcagatggagaggaaggtctcaaagaggtggcatttcagctgttccttaacggatgagaaagagagaaccaagagagcaccagaggaacgcgcttccaacagagaaaaccaagcaagggggcccccgaggagcagaaaggcccgagtggtcagagcggagcccgtggaagagatgggcacagccagattgcttagagctgtgttgttagaagtgctgatgagtctacattcaacttgc

SEQ ID NO: 343956 - DNA, 87 bp, Homo sapiens
  chr19:39210557-39210644
  hypo
cggccagggcccagctggttcagcggcctccacacgtccctgccccacccctacctgactgggcatccacgcgggtctgcccatggc

SEQ ID NO: 343957 - DNA, 203 bp, Homo sapiens
  chr19:39212200-39212403
  hypo
cgggactacgagacggccacactatcggacatcaaagccctcattcgcaagcacgaggccttcgagagcgacctggctgcgcaccaggaccgcgtggagcagatcgccgccattgcccaggagctcaagtacgtgcgggctcaggacactatcatcacctggctctcaccacagcctgcccagactggtggcggcagcacgcc

SEQ ID NO: 343958 - DNA, 270 bp, Homo sapiens
  chr19:39221989-39222259
  hypo
cggcagggtgagtacaggctgatcccttcaatcctctgggcctgtttcctcatccatcaaacggactaagacagccccgaccccatagggtgtgtgaagacagaacgctcaggacagcgtctgacacgtgactcgatgtgtgggtactgttactccttaaatcctgtggggctttctccttgccagtgggcactggaggatatttctgtgcagcaaaaaatatagtcaatcccatatggagtcagtttccttacagtctacctcagaggc

SEQ ID NO: 343959 - DNA, 246 bp, Homo sapiens
  chr19:39277459-39277705
  hypo
cgatcactaaaaagttgagttcctgggaaacacggtacacagcatgaggcgtcagtaatgtgaggagtgtgttctttagaatggtcaataatgttagaatgatggagttcaccattcaagggaacattctcgggaactaactgagctgcgctggtggtgtgatcaccggacaccctgctgtcctctctgtccgtgcccatgacatgtccttggcacagacacccctgtggagcccagggcctggcc

SEQ ID NO: 343960 - DNA, 84 bp, Homo sapiens
  chr19:39289891-39289975
  hypo
cggaaagattctttgtttatattggtgaaatgcacaaatctaaaatgtacagttggctgggcacagcgactcacgccggtaatc

SEQ ID NO: 343961 - DNA, 121 bp, Homo sapiens
  chr19:39305794-39305915
  hypo
cgaacgccaccctcaaccccagggcaggcagggagaccaggaagccttgcaacccagagggaccccagcgacttttgctcactccctccgccccggaattccttgtgcccctcgcctgccc

SEQ ID NO: 343962 - DNA, 404 bp, Homo sapiens
  chr19:39306241-39306645
  hypo
cgcgagggctctcagagcttggagaaggtgacggttttcagttccttgttctcagtcgtggcctggaccgacttcacgaggtcttgggtctgcagcatgctcatgttccaggacgcctggtaccgagggtgttgagagagaacgaggagagagattagcaggggccaatcaggataaagcatgagagcaccctgcaccctggttggtcgcctggggttagaggagggctgtgattggtcggagcgtgcaccttaccacgtagttgaggctctcggccaccgaatggtcgcgggaatacagcaggttgaccttggtgctctgcaccgccacggggctcttgctggaaatctcggccgccagcgctaaggcagcatccagcatgacctctttgtctgggaacaccc

SEQ ID NO: 343963 - DNA, 116 bp, Homo sapiens
  chr19:39329516-39329632
  hypo
cgagcctgagcacctaccagacattcagcttctgcccaaacatgaagttgttgttgaggtgggtaatggcccggtctacagcgtagccatcagccatctccaccatggcggccccc

SEQ ID NO: 343964 - DNA, 31 bp, Homo sapiens; identical to SEQ ID NO: 274094
  chr19:39330090-39330121
  hypo

SEQ ID NO: 343965 - DNA, 369 bp, Homo sapiens
  chr19:39435437-39435806
  hypo
cgatatgtaagcgtcttgacacagggcttgggatgtaagaagggctcgatacttcttagctgttatgattatagatatccaggagtgacagaagggaaaccgagcagacgagaggctgggcgtgtgtgcctttagcgggtcggggggagctggaagctagtctggacccacctgtcggcagcccctctcagtccactgaaggaccgggtcaggtgaggctgagaacttgaccacttccttttcatacacatccagaaggcggacccggagctggtagacgcagccgcagttctctcgagcgccccacctgccaggcagcagtcagcctctatgcccccgtcacccagccagctctctgggtttcggggc

SEQ ID NO: 343966 - DNA, 967 bp, Homo sapiens; identical to SEQ ID NO: 336126
  chr19:39574122-39575089
  hypo

SEQ ID NO: 343967 - DNA, 136 bp, Homo sapiens
  chr19:39642874-39643010
  hypo
tgatgaaatcttgagccatcccactctgtcccgcccgggacgtgaatcacctttcttaccccacatatccatggtgtatgtgctacccatctgtggctactcagtagctttctcggttctcacatccactgttgcc

SEQ ID NO: 343968 - DNA, 564 bp, Homo sapiens
  chr19:39646164-39646728
  hypo
cggaggcctcgaggggaacagacagtgttcacaggagaaacagttacacctgcgagctctgcctcgggccagcctttgcactggaggtgggatttgaaggggagggaggggtgctgtggagcatctttttcttctgttcctgaacgggggttctgatcacatcagcctcatgcttggagcagctggttaagggcacagacaccgggacagacatccagcctgggagtcccagcgcctgacctcccctcgggcatcaagtcactccgcctctccgcgcctcagtttcctccatgatgaaaggggcctgctgaaggacctgtctcatttagggcagcagtgaggcaaagccccggagcccatgcctgtgccaagagcagggcctggcccagaatatggccttgtcacgttgagctgccttttttcagcagggttagtttcatcctggtgaggcggcgccagcatggcgttccaccttcttggcctcctctccctcctccctttcctgccatccacacctcccggccctattctcacacctcaggatggcgatatgggggcttcacc

SEQ ID NO: 343969 - DNA, 184 bp, Homo sapiens
  chr19:39650806-39650990
  hypo
cgtcaaggtcagacttccagggagtgagtgtacgaggcccagggacttgtgtctgtctcggccccatccccgtgccctgcgcctcctcagggaccaggctcattactttggtaatggcatcacccatttgttccacagatatgtctcgagcacctactgtgttccagccactgctctagatgcc

SEQ ID NO: 343970 - DNA, 268 bp, Homo sapiens
  chr19:39663617-39663885
  hypo
tttgagaacatgtcggtgacacgctccaactccctgcggagagacagcccgccgccgcccgcccgtgcccgccaggaaaatgggatgccagaggagccggccaccacggccagagggggcccagggaaggcaggcagccgaggccggttcgccggtcacagcgaggcgggtggcggcagtggtgacaggcgacgggcggggccagagaagaggcccaagtcttccagggagggctcagggggtccccaggagtcctcccgggacaaac

SEQ ID NO: 343971 - DNA, 862 bp, Homo sapiens; identical to SEQ ID NO: 336127
  chr19:39754820-39755682
  hypo

SEQ ID NO: 343972 - DNA, 274 bp, Homo sapiens; identical to SEQ ID NO: 336129
  chr19:39993472-39993746
  hypo

SEQ ID NO: 343973 - DNA, 513 bp, Homo sapiens; identical to SEQ ID NO: 336130
  chr19:39997624-39998137
  hypo

SEQ ID NO: 343974 - DNA, 1039 bp, Homo sapiens; identical to SEQ ID NO: 336131
  chr19:40005601-40006640
  hypo

SEQ ID NO: 343975 - DNA, 470 bp, Homo sapiens
  chr19:40362772-40363242
  hypo
cgccgtgtaggctgccaggctgcggcacaggaaggctttgtcacccttttgcgcgcacaggtcgtatacgcattggcggaagtactcagagggactcagcaccgcctggcaggtcgcgaaggggccctgggggttccggagctgcccgcaggcctcgttgctctcatagggtgcagtctcctctgccaagcacactgggcagccttggggcccgcagccctcgccacagcccttggaggagccgggcgcccgccatgcagccccgaaggtctccacactggacgctgctgagccattgggcaggacaaagtcgtcactccagttgccattgaagttcccacagaggccacagagccgtccacggaaggggctggggatggacatgaggaggtgggcatcgccatcaaagagaagccgcagccccttggtcgtctgcagaaccatgtttcggccctcggcggtcacccgca

SEQ ID NO: 343976 - DNA, 109 bp, Homo sapiens
  chr19:40474764-40474873
  hypo
cgctgctgtctgctgccatggcagctgtggcagacctgccgctgacttccacccctccggatccgggtgtccactgcacttctgatccagcgaggcggcacccattgcc

SEQ ID NO: 343977 - DNA, 301 bp, Homo sapiens
  chr19:40753417-40753718
  hypo
cgctgaaagctacacgagactcaggagggtaaagcagggaccctctctagggaaggctcatgggacacccagccagggagcccacgggaaaagcaaaggaagaactctcctcgtaagccatgatctgcacccgcttttcagagaggggcccccacccctgccactcaacagcagtcccaagaacaccttccacttgcagaggctggtaccactgtgcgttatggtggaggactcctgtcgccctcccagcaaccctgtgtagtaggtactgccattcacttcatgctaaaatgacaagacc

SEQ ID NO: 343978 - DNA, 411 bp, Homo sapiens
  chr19:40829094-40829505
  hypo
cgagttgctgcaccctgcagagcaggacactggcaggcaggaaacgcagctgggaggctctgcaatagttcaccaacaggcgccgcacaccccagcaccatgcggggatgatcttaactctacagccatccttggaggtgggtctatacagatgaggaggctgaagtacaaaggacttaagtgacatggccaaagccacgcagtcaggcccctgtgggcttcagggtgtactctgagctacacaccaggcctggggcctgtgggactgcgggccgcggcaggaagtacaggctgcatcatgggcacagtgaagagcctctgcagggcttccagtgaggggacgggccctgtcctgtgggccgcacacactgctgctgtggggataggggctggggtccatggtaactgtgc

SEQ ID NO: 343979 - DNA, 227 bp, Homo sapiens
  chr19:40829764-40829991
  hypo
cgccagtgcaaagccaggaactgaggctggaaaggcaggttagacggccctgggccgagtgaggttgagatgtgttaaagagtcaggagcaccgctcagggaagacaacagctcgcacgcccagaatcgctcccccatccccactcactttactccctgtcgtggtgtctgccttggtctcggcgccgaggcggtcaaacacagacgtcctatggagacctgggagg

SEQ ID NO: 343980 - DNA, 155 bp, Homo sapiens; identical to SEQ ID NO: 336135
  chr19:40972636-40972791
  hypo

SEQ ID NO: 343981 - DNA, 153 bp, Homo sapiens; identical to SEQ ID NO: 225933
  chr19:40973006-40973159
  hypo

SEQ ID NO: 343982 - DNA, 359 bp, Homo sapiens; identical to SEQ ID NO: 336145
  chr19:41190162-41190521
  hypo

SEQ ID NO: 343983 - DNA, 160 bp, Homo sapiens
  chr19:41643155-41643315
  hypo
cgcagtgctgctggagatccagcgcttcatcagcgtggtgccgcgcaccctcaccctcgacacccacctgcacagccactgtctggccaaaggtgcccactgagtctggagatcctgtgtggggccccgatgcatgagcgtattccgagatcagccagaa

SEQ ID NO: 343984 - DNA, 120 bp, Homo sapiens; identical to SEQ ID NO: 274197
  chr19:41881465-41881585
  hypo

SEQ ID NO: 343985 - DNA, 207 bp, Homo sapiens
  chr19:41921100-41921307
  hypo
cgccctgtggtgtttgtctaaggtctagtgtcatccgtgcggaaaaagatttccagacaccaggcagcaagctgggcccccgccagctgtgctgagcactgcacctgtttttgctgaagggttctcttgtgagggcaccaggcaggaccgagcaagcctcatgggaatcatgggagccgctgagctctccacatgggagagctggcc

SEQ ID NO: 343986 - DNA, 441 bp, Homo sapiens; identical to SEQ ID NO: 336148
  chr19:42028298-42028739
  hypo

SEQ ID NO: 343987 - DNA, 468 bp, Homo sapiens; identical to SEQ ID NO: 274201
  chr19:42348888-42349356
  hypo

SEQ ID NO: 343988 - DNA, 337 bp, Homo sapiens
  chr19:42408218-42408555
  hypo
cgagggcccactgacgtggcgggtgactaaggacaaggcagtgggtgagtgccagagcagctgcctagtgcagggtgttggggcagtgagccaagggcggggagggggtcgcgcgggggcacgccgtgtgagcactgctcgccccgtagaggtgcatgtgctgctgctggacgacctgctgctgctgctccagcgccaggacgagcggctgctgctcaagtcccatagccggacactgacgcccacgcccgatggcaagaccatgctgcggcccgtgctgcggctcacctccgccatgacccgcgaggtggccaccggtgagtgcagccactgcatg

SEQ ID NO: 343989 - DNA, 289 bp, Homo sapiens
  chr19:42408828-42409117
  hypo
cacaaacactggaagcggctggagggtgggagtggctggaggggtttcgttaggtaagccagggtacatgcccgattccataaggaggtgtgagaggtggggctcaggaggacacatcgggccctggatattagcagacagtgagtggtgagttgagccatgggagccctgagagcgccaccactgtgggtgacttctccagcttgtgcttagggaggggcaggcactggggggacctgggctctgagccccatctccccctctccctgcagatcacaaagccttctac

SEQ ID NO: 343990 - DNA, 575 bp, Homo sapiens
  chr19:42424093-42424668
  hypo
cgcccagacgtgacgaactcacagacatgacacgcccacagacgtgacacacccagacatgacgaactcacagacatgacgcgctcacagacatgatacgctcacagacatgacacacccagatgtgacacactcacagacatgacacgctcacagacatacactcacagacatgacacgctcacacatgcgctcacagacatgacacgcccagacatgatgcactcagacatgacacgctcacagacatgcgctcacagacatgacatgcccagacgtgacactcagacgtgacgtgctcagacgtgaggcacagacatgacatgctcacagacatgataacgctcacagacatgcgctcacagacatgacatgcccagacgtgacacactcagacgtgatgcactcagacgtgacgcacagacatgacatgttcacagacatgacatgcccagatgtgacacactcacagacatgacacactcacagacatgacacgctcacagacatgacacgcccagacatgatgaactcacagacgtgacacacagacatgacgcactcagacatgacac

SEQ ID NO: 343991 - DNA, 504 bp, Homo sapiens
  chr19:42460873-42461377
  hypo
cgggatccctccccgggcttgtgatgggacggcgctgtgggcccgagcagcagagccgtgcaggacaggcatgggcaggggtggggcagctggcccgggaggccggcaggtcccagaagacacctcacacgggttccatctgcagctcctccccgtccacagcctcaatctggtggaaggcagcgtgggagccgatgaccaccagggtggctcctgcaggaaagccggcagctcagggccacactcctgcacctggctcccaccatccaccccagctgctcagaccctgtactcacccagcacccagaagacggccgagcccgcaccagccagccagaagaaggggaaggagatgcctccagccagagcatactgatgcgctgggctcacctctcggcctgggggcagatggcattggggtgctgttccgactctccatgccctctcccagagtaacccctgctgccccccaacaatccgtacaagctccaggttctcgggatc

SEQ ID NO: 343992 - DNA, 166 bp, Homo sapiens
  chr19:42813649-42813815
  hypo
cgcgcccagccctccctattcactttgctactccccttgacttatctgcatgctgatggccaccctatctttatattccaggacaccatggatacccagggaccagtctcccagccttttcagcagcctgagaaacctggtcgtgtccgtcgtcggaagactaggc

SEQ ID NO: 343993 - DNA, 274 bp, Homo sapiens
  chr19:42906796-42907070
  hypo
cgggtgccagcagcggcgacatgaaggggttcttgactatgggtgaggagtagaggggcatctgtgtggcaccctggctggagcgtcgggggtggaaaccctcggggaaggcggcacggacgcccaggcctctgtccatggggctcagctcatttttggcctcagcctcttcccctgcatcctcaggtggtaataagaagttgacatcggagggtgtggaggggctaagtgtctcagctgacagcgacatctcgggggtgtccgacgacgtctc

SEQ ID NO: 343994 - DNA, 1088 bp, Homo sapiens; identical to SEQ ID NO: 336150
  chr19:42927304-42928392
  hypo

SEQ ID NO: 343995 - DNA, 242 bp, Homo sapiens; identical to SEQ ID NO: 336151
  chr19:43967267-43967509
  hypo

SEQ ID NO: 343996 - DNA, 420 bp, Homo sapiens; identical to SEQ ID NO: 336152
  chr19:43967734-43968154
  hypo

SEQ ID NO: 343997 - DNA, 743 bp, Homo sapiens
  chr19:44222791-44223534
  hypo
cgcacagcctttgagtcgggtgacctcccccaggccgcctctcacctccaggagctgctggcctccacggaaagcatccgcctggaggtgggcgtcacgggcgagtcgggcgcgggcaagtcctccctcatcaatgccctgcgtggcctggaggccgaggaccctggcgcggctctcacgggcgtcatggagaccacgatgcaaccgtcgccctatccacacccacagttccctgacgtgaccctctgggacctgccaggagccggctctccaggctgcccggctgacaagtacctaaagcaggtagacttcagccgctatgacttcttcctgctggtctccccccgccgctgcggggccgtcgagacccgcctggccgctgagatcctgtgccagggcaagaagttctactttgtgcgcaccaaggtggacgaggacctggcggccacgcgcacccagcggccgtcgggcttcagagaggccgctgtcctgcaggagatccgagaccactgtgccgagcggctgcgggaggccggcgtggctgaccctcgcatcttcctggtgtccaacctctcgccggcccgctacgactttcccacgctggtgtccacctgggagcacgacctgccctcccaccggcgccacgctggcctgctgtcgctccccgacatctcgctggaggccttgcagaagaagaaggccatgcttcaagagcaagtcctcaagaccgccctggtgttggg

SEQ ID NO: 343998 - DNA, 225 bp, Homo sapiens
  chr19:44273529-44273754
  hypo
cgtgcagagaggtgacttggacatgggtgcacatggacacgtgtgcatacaaagcggccctcacgcgttgatggcggccagcagcttgcgctgatgcctgcgggcagcatgagactccttcctgcgagtatgtttgtagaacatccaggcttcttgtagcactcgggcagcggactccttcatctgggggtgggtggcacagtgtccgtggagatagacccttac

SEQ ID NO: 343999 - DNA, 782 bp, Homo sapiens; identical to SEQ ID NO: 336161
  chr19:45004129-45004911
  hypo

SEQ ID NO: 344000 - DNA, 371 bp, Homo sapiens
  chr19:45314500-45314871
  hypo
cttgtctgtacccccgctggtggaggtgatgcgaggaaagtctgtcattctggactgcacccctacgggaacccacgaccattatatgctggaatggttccttgtgagtgcttggggctggggggcctggagtcagggcacagcagggcagcaaaggttcattctctcatcagtgcctaaggcctgtagagatccaccaagccacactccttgttacagatggggtcactgagtcccactgaggggaagggatctgcaaggtgccccgtgtctaggcacagccaagtctagaatgacattgacctgctctggactgcgggctcttgagagagagaacagagacagacatcaagaaagcagaagccaggcac

SEQ ID NO: 344001 - DNA, 300 bp, Homo sapiens
  chr19:45315421-45315721
  hypo
cgaccgctcgggagctcgcccccgcctagcctcggctgagatgcagggctctgagctccaggtcacaatgcacgacacccggggccgcagtcccccataccagctggactcccaggggcgcctggtgctggctgaggcccaggtgggcgacgagcgagactacgtgtgcgtggtgagggcaggggcggcaggcactgctgaggccactgcgcggctcaacgtgtttggtaagtgtcctcgggcatcccccgaagggaggcaggcagggaggggcgcagggcaggggctcctgacgtgaac

SEQ ID NO: 344002 - DNA, 289 bp, Homo sapiens
  chr19:45322448-45322737
  hypo
cgtaagggaccttcctctccaccctgagccccctctcactcatccaagtatcacaccctcctttccacttcctgggagactggacgtcgttcacctctgcccttgaccccaccccttgaccccaccagccggggcctgatcggagcctccatagcccgcagagccaatccccggacggcagggttgggtgagcagctctctgaccctgaaagtgaccagcgccctgagccgcgatggcatctcctgtgaagcctccaacccccacgggaacaagcgccatgtcttccac

SEQ ID NO: 344003 - DNA, 999 bp, Homo sapiens; identical to SEQ ID NO: 336164
  chr19:45349505-45350504
  hypo

SEQ ID NO: 344004 - DNA, 362 bp, Homo sapiens
  chr19:45377472-45377834
  hypo
cgggagtacttaggtccctggagcttggctcctggtgggtgtatctttagggatgaggcctgtgctcccctctcgaccttggtatccctctcacctgaccccacacccctccaggacctcaggcaccttcccgacctccgcagtggcccagggctcccagctggtcatccacgcagtggacagtctgttcaataccaccttcgtctgcacagtcaccaatgccgtgggcatgggccgcgctgagcaggtcatctttgtccgaggtgagtgggtcttgggggccgtgtgtggagacctgggtccgctcccctggagttctgcccttcaggacttggggctgcactgggggaggctgcgccgcc

SEQ ID NO: 344005 - DNA, 233 bp, Homo sapiens
  chr19:45567166-45567399
  hypo
tcgctgtggcccgcgctggcgctgctgttgatctgctgtgtgtgctgttcccgaagaggctccgggagcctgagctagtgagcctcctcctccctacccgcaggtcaccctcggagtccagctcagagtcccgctcccgctcccgctccccgaccccgggccgcgaggagaagatcacgttcatcaccagttttgggggcagcgatgaggaggcagccgcagccgctgctgcc

SEQ ID NO: 344006 - DNA, 410 bp, Homo sapiens
  chr19:45570303-45570713
  hypo
cgggaagttagcaagcgggtgtctagtgagggagaggtgacgtgggccaggcagggctcatgatggcaggactgcccttaggctgagtgtatctagagcgccatctctgtagccggagggaggccggaatgccgctctgggacattttggagggagagtagcaggagaggagagtcgagcctgtcaccctgggccttgcaggaaggaggactgtggatccggacccagggtggggtgcggttggggtccctggagcctcacagtcctcctcccgccctgctgcatccccaggagccgctcccactcaggggaccgctacaggcggggcggccggggcctcaggcaccacagcagtagccgcagccgcagcagctggtccctcagcccgtcccgcagtcgcagcctgactc

SEQ ID NO: 344007 - DNA, 1123 bp, Homo sapiens; identical to SEQ ID NO: 274277
  chr19:45574505-45575628
  hypo

SEQ ID NO: 344008 - DNA, 499 bp, Homo sapiens
  chr19:45603745-45604244
  hypo
cgtttgccccaatttgtagatgaggaaatggagcccatagaggtaaagtaattttcctgaggtcacacagtgggtaagtggtggagctgggattcaaatccaggcagccagcctggcgccgaagcctgcgcagtaataacccctgtgcggcggctgagtgcttggacgcattcggtgcaacgtgccatacggtctcttcatctataacccagaatcgtttataaaatagaggcaacagtgctggctttgcggtgttgtggcagggaggagaaacagaaacaggtggggtaagggcccagccttggtgggcacgcaggagggggtcactgtggttcgtggacagcttgagtccctggagatttgtgctgctcctctgtcctcagcattgcctgctgttctgacccttggcctctgggacgtgttcttcctgtgctactcagtgtctggtatgtgataggcgctcaatatattcttgctgcgtgagtgacttggtgacccc

SEQ ID NO: 344009 - DNA, 525 bp, Homo sapiens
  chr19:45626602-45627127
  hypo
ccaggaagaaacctacgagcgcatccttgctgagggcaggacccgctctccacatcctggaaacccaacagagaaagacagtctctctggcagcctccctgtcttgaagttcgagaaggctgcatttctaggctcccacaacctgtctgtccggtttgaagccggggcctgagggcttcagggtactgatgcaggacagacagctctggttcaaacctccctctgtccgctcccacaggtgtggcctcagaagaccattccctctgtagcgtggtagaggctggaaattctactctgcaggattatgatgcggattaaatgcagtaatcgagtgtttggcagagtgcctggtagggaaggggttcagtaaagagctgctcgcaccattctgtgcagggaatgctttagggcatgttttagaattttagaacgtgtttcactacatgagtagcttcttgcagctttgaggccctggcatccctctcccctgcctgcaggcttccttgttcactgggccaagtcccc

SEQ ID NO: 344010 - DNA, 1117 bp, Homo sapiens; identical to SEQ ID NO: 336166
  chr19:45647694-45648811
  hypo

SEQ ID NO: 344011 - DNA, 240 bp, Homo sapiens
  chr19:45810102-45810342
  hypo
gcacctgttctacttcggacgagcccagccgatcagcgttggacacgtcaaatactgagcccacggcagctgtgtccacgccacctgtgggagcaagggacaggggcgtgaagaggcagcgaaggtgcagaggggctgggacgtggcccccgtgccaaatgcaacagccgcatgtagtgagtgcctactgtgtaacaggttacctgcacacaggtaatgcctgttcattcgtgagctcac

SEQ ID NO: 344012 - DNA, 210 bp, Homo sapiens
  chr19:45851245-45851455
  hypo
atccctgcccgccttcggaccctgcataacctcgtgatccagtacgcggggcagggccgctatgaggtggcggtgcctctgtgccgccaggccttggaggacctggagcgcagctcgggccactgccaccctgacgtggccaccatgctcaacatcctggcgctggtgtaccggtgagcactgcggccagccatggctgggggcaggaac

SEQ ID NO: 344013 - DNA, 84 bp, Homo sapiens
  chr19:45903713-45903797
  hypo
cgcctctgtctgggaagtcgaaggaacagaacctgttcaggctggcggctcatttggatgaacagggagtgtgtgaccttgggc

SEQ ID NO: 344014 - DNA, 951 bp, Homo sapiens; identical to SEQ ID NO: 336173
  chr19:46001734-46002685
  hypo

SEQ ID NO: 344015 - DNA, 211 bp, Homo sapiens
  chr19:46236693-46236904
  hypo
cgcactcttgctctgctcctcacgcctcgcgcaggatcctcgcgccgggaggattcgcacccaaccccaagcccggttgggaacgtggtgtccgagaccgtctgggatccccgcgcgcacggccggcttcccgggacccgcgcgagacgctgtctgatcgggctccctagagtggggcccggagaaaccagaacggcgggggcagcctcac

SEQ ID NO: 344016 - DNA, 579 bp, Homo sapiens
  chr19:46307556-46308135
  hypo
cgaccagctccagcacggggatgccctcgaagtccgggttctcctcgtaggagtcgcgcccagcaccaccttcctcctcctcgtcgccctcctcctcactaaactggtagaagcccagcgggctgacctgcgtggcggccgagatgcgggctatctgggcccgcaggtagttggcctcgttgcccgggaagggtgggtagctgacgactggcgtgtccaggtagcctgtgaagaacttcttgatctttcgggcgttcacgatctgggctggagtgacgtggggcagccgcgtccatggcaggcccggctcgttgcacacaaagtacaggtacttgttggcgcctgagcggctctcctccttggggatcacgggcggcggcttccatacggacttagggacgatgtccacggccttctcctcgtcctcctcgccctcctcctcgccgtgcgcctccatgacctcgccaccttccgtcatctcctccacctcctcctcctctgcctcctcctcgccctcccggaattccacctcggccaccaggtagctgcgtttgattcccaggatcttgccccagaagc

SEQ ID NO: 344017 - DNA, 412 bp, Homo sapiens
  chr19:46321120-46321532
  hypo
cgggctccctccggggtcagacgggggaaggggagggcaagcaggctagaagctgctgtctgcagcctggaggcggggtggccggggatgggttacctgcttcatgatgaggcgggacaggatgttcatgacgaagccccccaggcgggggtacatggtcagggactggatgacggtcctcatgagcagcatgggcagggggctctgctccatcagctgctgcatcaccacggccagcacctctgacgtgtacacgttccgctccgcaaagcacaggttggtggctgcgaggaggcggagagtgggcctgtcctctctgcccagctgccccctgggaggtgggagtcccggcctctgctgtctgcccatgtgaggggaagacttctaaagccctgacttctaaagcccctgc

SEQ ID NO: 344018 - DNA, 510 bp, Homo sapiens
  chr19:46330394-46330904
  hypo
cggctcccctgctgggctgggcaatgccctcaggccccggcacaggactgggctgcacgaggagcctgtgctggccaccacgggtggactaagagcgagagtgggactgcccttcccaggagggcaagcgcacgtgtgtgtgtgtacacactacaggcagactcaggcacggtaaccctggtttctaggcagcttgatgccactgaaaatgaaaataaaacagacagaaatagccaaaaaaccactgaaagaagggaatgggcccagagaaacttgcaagggagtgtggaagacgtgggctggttactcaggatagaggcggcctctgcaagctgcaggctgagggcagccaggaagtggaggaggggatcaccttgtccttctcatgggagctgaggtcgaggaggacatgcaggtactggaactggcgggacgggcgcttgaagatcaggtctcgaagtgtggacatgcccagataggtgcgactctgcagcaaaaggaaagggaccc

SEQ ID NO: 344019 - DNA, 158 bp, Homo sapiens
  chr19:46404499-46404657
  hypo
cgcaggcacacagcctactctgaagacactcacctgcacgtcggtcctcccggcggtcttccgacaacacgtagcgctgagggcaggcgcttgggggcggcggctgtgaagagggggccgcagggggctcctccgccccagcacctgcccccggcgcc

SEQ ID NO: 344020 - DNA, 835 bp, Homo sapiens; identical to SEQ ID NO: 336178
  chr19:46519167-46520002
  hypo

SEQ ID NO: 344021 - DNA, 369 bp, Homo sapiens
  chr19:46885301-46885670
  hypo
cgctctccagtctcgcccccacttctgtacctcaggaggtttctctgcacctcactccctcgcgcccaaccttccatgaagcccgtgtgagggagttggcagggggcagaggcgggctgtgctggggctccctggagtcctcatctgtcacgccagtccccacacggtcatgaacttccactcatttcccctcacgcagggcatcccgccctgctgcctcgcaccagggtgaaagctgtgggctccttccccaaggaagggctcgtcctgtctgcattttgattaatttaggtccctttgcattgccagctctcagatggctttacctttgattttgttgcttgtttggcttgttttcatctttagggc

SEQ ID NO: 344022 - DNA, 434 bp, Homo sapiens; identical to SEQ ID NO: 336182
  chr19:46931914-46932348
  hypo

SEQ ID NO: 344023 - DNA, 277 bp, Homo sapiens
  chr19:47116867-47117144
  hypo
cgtgagccaccgcgcccggccgtgccaaactttatagacatcatttcacttagttcatacccaggctggatggactgattaaaacgcagcacccgctcaaggtgtgcggaccctgcccaggcttgccggcaggagtcactagagaaatctggcagtagaggagtggaggccgggcaggtgaagcctcttgcaccacacttactggaagcagctgagcggggtctcaaagcccagcgcactcggatcccaacgcccacgccttctcccaccgcatccc

SEQ ID NO: 344024 - DNA, 453 bp, Homo sapiens
  chr19:47223627-47224080
  hypo
cgccgcctctagggcgcctctaaggcctcaacccctcccctgcatgcccagggctcccccagtgattctcacaggacgcccctgactggactgcggggctcagcacacctggcagtactaggcatgggcgtgcagagactcagaatgcggggtttctgccctcacctcagccccacctgcccggccctacaccccagccagcgtggcggccagggcagggccaggtgggcatcatacgaagaccttggccagggcatcagcgccagcactggcaatgagggccttgctggggtggcaggcaacagcgtggatggcctcctcgtgcttcttgcggtgggccgtgatctcctgcacgcacgttttgttgtccaggctccagagacgcagggagcagtcatggcctgcacatgtgtcggggacagaaggggtggtcactgggctcctcgctcagac

SEQ ID NO: 344025 - DNA, 126 bp, Homo sapiens
  chr19:47335926-47336052
  hypo
cgttgtttttctgtttacaactacaaggtaaatgtcattcattcaggtgttttgtaacatctttgttgacatatatttacataccattcaattcacttatttaaaatgtatacttcggccaagcgc

SEQ ID NO: 344026 - DNA, 168 bp, Homo sapiens
  chr19:47482472-47482640
  hypo
cggagtcacactgccatcactccagtgccactgggcctgcgtgggcatgccagcaaagtcacacttcagagcatgaagacgtctcacgttcttggcaggacggctctcccagctgctcctggctttgaatgttcactcccgttttgcagagcgcagtcggctcacctc

SEQ ID NO: 344027 - DNA, 363 bp, Homo sapiens
  chr19:47501985-47502348
  hypo
cgttgggggaaaagggggtgcgtagttcctttggtgaagtgcataagaattcccccactgtttccatcagcccctccaacggggatgtgtggacggtccctgtgtctctaggaaaaggacagagccttggtctcatgaccgactgactccctccctcgaaggcctgttggcgtgggtgggtggcagcggccgcccgtctccatctggtcaggaagcaagcaggctttctgcgtagggatgcctgtctccaggggcaaccggatgagcaaagaatggtgttctttatggcggagtgtctccagattgttctgtcttgggtggtgggggccaggaagccccaggcacacagtgccgcccttcagc

SEQ ID NO: 344028 - DNA, 347 bp, Homo sapiens; identical to SEQ ID NO: 336189
  chr19:47523636-47523983
  hypo

SEQ ID NO: 344029 - DNA, 41 bp, Homo sapiens
  chr19:47592724-47592765
  hypo
cgccggcagagatgtgttctaagaggccagtcagggctacc

SEQ ID NO: 344030 - DNA, 306 bp, Homo sapiens
  chr19:47593053-47593359
  hypo
cgggtgatctctccggtctcctgtgccatgcacatgcagagcctggcccttctttgtacacttatcccaaccctaagtgaccaaacttgaggttctgtgagaccaggccaccggggttggcccgggtggctccgatgccccagaggagaaactgtaagggcagggctcacctcggccgcggctgctgccctccttggcacgccggtactggttcagctctttggtgaagtcgtcatagtcctccttgcccatgtcctcctcctcgtcgccctcatattccccatactgctcattctcgtagtcctc

SEQ ID NO: 344031 - DNA, 112 bp, Homo sapiens
  chr19:47646754-47646866
  hypo
cgggcctctcgggtgcttcttgtcggcttgaaaggacttggggctgaaattgccaagaatctcatcttggcaggagtgaaaggactgaccatgctggatcacgaacaggtgc

SEQ ID NO: 344032 - DNA, 83 bp, Homo sapiens; identical to SEQ ID NO: 336190
  chr19:47676020-47676103
  hypo

SEQ ID NO: 344033 - DNA, 990 bp, Homo sapiens; identical to SEQ ID NO: 336191
  chr19:47729541-47730531
  hypo

SEQ ID NO: 344034 - DNA, 287 bp, Homo sapiens; identical to SEQ ID NO: 336192
  chr19:47731303-47731590
  hypo

SEQ ID NO: 344035 - DNA, 536 bp, Homo sapiens; identical to SEQ ID NO: 336193
  chr19:47742713-47743249
  hypo

SEQ ID NO: 344036 - DNA, 205 bp, Homo sapiens
  chr19:47881084-47881289
  hypo
cggtggaggctgaggccgaactcagatcatggatgcccttgcatgggcaccggcagcagagccatgggccccatggcagccactgccctgcccctagtgctcctcgagcgtctttgtgatcctaggcctggcctcggagtcctcacgcagccctgtgggtctccctttatagaggggactgaagctcaggcaggggcggggatac

SEQ ID NO: 344037 - DNA, 60 bp, Homo sapiens
  chr19:47881715-47881775
  hypo
ggacagaggattggcgaccagccgggccgcaggaagcggaacagacctgctacctgaggc

SEQ ID NO: 344038 - DNA, 725 bp, Homo sapiens
  chr19:48003383-48004108
  hypo
gttctctggcaactacatctcgggctctgttctctctaattcctccccaggatgtagggaagccaggttgggctaatttccgctcctttttcggcagcaactcctacctggctggtctcagaatcctccccgccccccacaccgctcccttctgcatgttaattctgacaacagaacagattttcctctctccccggcaggcggtgggtctgcaatggaactcccactcccaaatgctccgggattgggaaggggtgatcagctgcaccgacaccaccgacacggtagataggggggcggagacttgagcagggcgcgaatgccaactggaaggaagagagccagttctaaagtcaacgctcactctgcctcaggcacgcccctgccagcctatcacatgtcggccactggaaaaaccagagccgccaggaaacctgaggaatcaatgcagggtgctaggatggcgctccggacagccagcccgtgtggcccgcagaggccctcaccttgggggtcggctttcttgaatgcgttgccagcgtccacaaagcaggtggctgcgtcgtgcttgctctggagctgcaggtgcagctgtgcagcctggcagaacgcgtttccagcagctggaacagaagagaagggcagtcctggcctcagtggggctccacactttatgaagccacagagacactgccctgggaggtgggtcgggctctcgagaatgc

SEQ ID NO: 344039 - DNA, 202 bp, Homo sapiens
  chr19:48012665-48012867
  hypo
cgccagctcatcgtgtgccagcctgcgtttccttatgtgtaactaggcataagactccacaccttgcagggctgctgaagcacgagcaatcttgcaggcagcaccccacggcgtgcccagcagagagctggccacaccacgggcgttcagtaaacgagagcatccctctcatcaggccccgcagaggaccgattccaggcac

SEQ ID NO: 344040 - DNA, 476 bp, Homo sapiens
  chr19:48150921-48151397
  hypo
cgggtgaggattggaagccatgatcgcctgcctctgttgctggttttagtctttaacccttgctctgtggacttgagaaatgtgcttttccatggtgcctgtgaccaagatgtccgcatcgttagtgaagaccctgctatgtccttgaccacactgcacggggatcctgtccacgatggggggtgtcctgttgggcttgagtgtctagatatggagaccgtagttcgcggggggagtggggggccgtttggcatatttgccctggcatttggggttgtttattgggggtgggagtgctcctggcatttcctgggcgggaactactggtgtagacctactggattaacttgctcctgggtcggtgtgcgggatagggggagggtgcatcagtctttgtggagcgtctgccttctctccgtctccctgttttcctgttaccgtctccccgtccctctctctgtctctctgaactgctc

SEQ ID NO: 344041 - DNA, 242 bp, Homo sapiens; identical to SEQ ID NO: 336199
  chr19:48229040-48229282
  hypo

SEQ ID NO: 344042 - DNA, 350 bp, Homo sapiens
  chr19:48857800-48858150
  hypo
cgtgagtcactgtgcccggccaaatttcacttctgtaccttgttgctggtctcttcctcagtagaacagagcctgtgaggtacatctctcatgctgtccactgtctcccagagcctcaagccattccagagacacagtaggtgctcaataaatatttactgagcgaactcaatgaatgaatgaatcagcgaaaaaagatcagagagaggtcacccgccaaggtcacccgcaccactagtgaacaaccaagctattgtttgaaccgaggctatgctgcttctttccctgcccaggccacatcttcaaaggacttaagtcatcagcaaatggtcacccagcgggcctcaccc

SEQ ID NO: 344043 - DNA, 632 bp, Homo sapiens; identical to SEQ ID NO: 336200
  chr19:48901504-48902136
  hypo

SEQ ID NO: 344044 - DNA, 102 bp, Homo sapiens
  chr19:49012390-49012492
  hypo
cgggcccagaatccgatggacgcagggacggatggaaggatggacagacggacggacgcgtggagagccgggtggcgcggcggagtggtcaatggagtgagg

SEQ ID NO: 344045 - DNA, 193 bp, Homo sapiens; identical to SEQ ID NO: 336202
  chr19:49014628-49014821
  hypo

SEQ ID NO: 344046 - DNA, 312 bp, Homo sapiens
  chr19:49179997-49180309
  hypo
cgacggcgagcgaggctgggaaatggggccttcccgtactgctggtggaaacggaaactggggcagccacctggcagctcccaaaacgattcaacgtagagttcaccctgtgacccagcacacaggttcgtggcagcactatttgcaacagccgaaaactggaaacaactccagtgcctatcacctgatgagtgaatacattgtggtctacctggacaatgggactttcagtcttgaaaggagtgaggcaattatctgggcgtggtggctgtacctgtagtcctacctgtagtcccagctactcgggaggct

SEQ ID NO: 344047 - DNA, 570 bp, Homo sapiens; identical to SEQ ID NO: 336206
  chr19:49242360-49242930
  hypo

SEQ ID NO: 344048 - DNA, 550 bp, Homo sapiens; identical to SEQ ID NO: 336209
  chr19:49467064-49467614
  hypo

SEQ ID NO: 344049 - DNA, 224 bp, Homo sapiens
  chr19:49600463-49600687
  hypo
cgagggttcggggaaggagcctggtagttcaagtgcccggggtgagaggtgaagtctgccttggcccttcgccactttaacacctccctttttctgtgtctcgagtttgttctgttttacttccatttgcaaaatagtaataaataaatatcagtgtccagcactgtgtctgggccatagtacgtgttcagtaaattatatgtctaatgttccattattggaac

SEQ ID NO: 344050 - DNA, 435 bp, Homo sapiens; identical to SEQ ID NO: 336213
  chr19:49660929-49661364
  hypo

SEQ ID NO: 344051 - DNA, 89 bp, Homo sapiens
  chr19:49703628-49703717
  hypo
gcttcacatcttcacggtcaacaaacagctggggcccaagatcgtcatcgtgagcaagatggtgaggcaggggcggggccaaagtgggc

SEQ ID NO: 344052 - DNA, 132 bp, Homo sapiens
  chr19:49703923-49704055
  hypo
cgtggccacggaggggctcctgaggccacgggacagtgacttcccaagtatcctgcgccgcgtcttctaccgtccctacctgcagatcttcgggcagattccccaggaggacatggacggtaggggggatga

SEQ ID NO: 344053 - DNA, 497 bp, Homo sapiens
  chr19:49971410-49971907
  hypo
cgtctcaaaaaaaaaaaaaaagaaaggcggttatgcaggatgtttctcaccgcccgaacccccgtggaatgattcactttgaccagcgtctgcgaaatggcaggggcttccacaatggtgcggtttgggccaacaccaagtgttggggagaatgtagaggaactggatctctcatttactgcgggcggggctcccctgccccacacgtgacccacctgtccctgcaggtagccgggctgagaggccctgtgctgcgcctgcgggagccgctgggtgtgctggctgtggtgtgtccggacgagtggcccctgcttgccttcgtgtccctgctggctcccgccctggcctacggcaacactgtggtcatggtgcccagtgcggcctgtcctctgctggccctggaggtctgccaggtatagccccctgccttcctgcctctcctccccgtagcctcagggcagcagaaaaaggcgccccaaagtcggcaggagcttgtc

SEQ ID NO: 344054 - DNA, 175 bp, Homo sapiens
  chr19:49997367-49997542
  hypo
cgtgagccatcgcgcccggccaattttttttttttttttattaagatgttctatagctgcactaactgatacacaatacacaagccactaaccccacttgtggctcctgagcacttaaatatgaatagagtgaggctgggtgcagtctcacctgttcccggaactttgggaggcc

SEQ ID NO: 344055 - DNA, 450 bp, Homo sapiens
  chr19:50028330-50028780
  hypo
cgggtcttcctggaatctgaccattcgttgtctgctatgcccgtcctcaccaagactgactgcctgctgctttgctactgcccgggcccatgagactgacttcccactgctctgcctgcctctccccactgcactggcacagccccgccttgccgctgctgatccattgccggtgtgaccgcggccgctcgtgctgtagctggttcttacgtccaacctgggggcagtctgcccagatcgcctgcctggcctcgcctctgcccatcagacacttggtgctggaatctccgaggctgggagggactgggagcgccccagttctgtgtcctgactgggtggggtggaggggctgctccacatctcacagcgttctctggctgcagaatctccagccaagtcctccgtgctcgtggtgggaatcgtcatcggtgtcttgctactcacggcagc

SEQ ID NO: 344056 - DNA, 210 bp, Homo sapiens
  chr19:50129561-50129771
  hypo
cgttctcgcccccgccccaccccctgctcccactaccctttgtctcttgctctttcttgggcttctgtacaactcaacttgtatacactgtgtacacacaaccagccaaacgaaaacccaacggcaaacactttaccggcaggctggagtgcctctgtcctgcggcgctggagtgggtggcagtggtagcaggggcagaggttctggaac

SEQ ID NO: 344057 - DNA, 57 bp, Homo sapiens
  chr19:50130742-50130799
  hypo
cgtgttctagaacaagaatgttaaaaatgtgcaggttggctgggcacggtggctcac

SEQ ID NO: 344058 - DNA, 36 bp, Homo sapiens; identical to SEQ ID NO: 274467
  chr19:50292282-50292318
  hypo

SEQ ID NO: 344059 - DNA, 110 bp, Homo sapiens
  chr19:50297025-50297135
  hypo
cttcctgggggcggcgatcccagaattgagacttagaatacacatgcgcatctcctgggcagtcaggaagaggcctggattcgcaggcaaagagaagaacacaccagctc

SEQ ID NO: 344060 - DNA, 253 bp, Homo sapiens
  chr19:50306223-50306476
  hypo
cggccctcccattccggaagccgatgagttgctgaataagtgagtcctgggagtggtgggggaggggaacgggacaggtgcggagcccaggccaggtgcagacaggcacccccgtcatcttgcgccccctgccccctcaggtttgtgtgtaagaacaacggggtcctgttcgagaaccagctgctgcagatcggagtcaagtcagagttccgacagaacctgggtgtgtcccgggggactgtgggaatgggtc

SEQ ID NO: 344061 - DNA, 149 bp, Homo sapiens
  chr19:50320054-50320203
  hypo
tctttctattaaaacaaatataaagtggcagggcacgatggctaacacctgggatcgctttagccgaggagtttgagacacgccagagcaacacagtgagaccccatctctacaaaaaatttaaaaattagctggaagtggtagtgcgc

SEQ ID NO: 344062 - DNA, 400 bp, Homo sapiens
  chr19:50352994-50353394
  hypo
cgggagcccctgggcaggaaaacatggacaggcctacgggttcttctgccatttcactggccactcctccgtgtcctttgctggttgcttctcattgtcgtgactgctaaagggatgagtgtcccagtctctttgtgagctcatccagtctccattcaaacactgatgactcccgaatttctctctccaggctatgacatcaatatctatctacattgtttagtcaacatccgaaacagaagtagggactccgtctctaacctcctacagctgtgtctatttctcctctctaccttcactcgactccgcccacactggctcccttttattccttctactttcaggatttgtctttgctgttctgtcctctttgcacacttttccagccatctggaatggc

SEQ ID NO: 344063 - DNA, 124 bp, Homo sapiens; identical to SEQ ID NO: 274483
  chr19:50353424-50353548
  hypo

SEQ ID NO: 344064 - DNA, 187 bp, Homo sapiens; identical to SEQ ID NO: 336216
  chr19:50353790-50353977
  hypo

SEQ ID NO: 344065 - DNA, 441 bp, Homo sapiens
  chr19:50364788-50365229
  hypo
cggcaggcccaggggtcaggggaggaggggggtcagggggtgcagcccggggggtgtccgggctgagcgggctcacccggttgttgtggcgcgcctgctccagagtggcggtgaagaggaagcagcggcaggggacgcccgcggctcgggcacactggacgtacctgtgggggaaggagctggatgtgcaggccccgcccaccccgccgcaggccacctacggccccgcggtcacgctacctggcgcggctcgcggcgtctgggtttgtgttgtcgatggcgacccgtttcccttgcttcagggctgtctcacacgtggtcacacagcgctgccaggagcctagcgtgtcctggggacacgagaggtcacaaacagatcggcagacccagggggagagaagaccccgagcggggacggggaggcaatgatggaggaaagcc

SEQ ID NO: 344066 - DNA, 712 bp, Homo sapiens; identical to SEQ ID NO: 336218
  chr19:50553779-50554491
  hypo

SEQ ID NO: 344067 - DNA, 109 bp, Homo sapiens
  chr19:50774482-50774591
  hypo
cgctaatgaatgaaatgggaaagccaataagagtttgatccttcccggcctcacccagggcatggacatctctgaaccacaagccgcggggatccgtgggccagccatc

SEQ ID NO: 344068 - DNA, 230 bp, Homo sapiens
  chr19:50784855-50785085
  hypo
cgagtggcggcggcgccaggaggaggaggcaggggcactggaggcaggggaggaggcacggcgccgggcagcccgggaggccgaggccctgacccagcgcctggcagaaaagacagagaccgtggatcggctggagcggggccgccgccggctgcagcaggagctggacgacgccaccatggacctggagcagcagcggcagcttgtgagcaccctggagaagaagcagc

SEQ ID NO: 344069 - DNA, 231 bp, Homo sapiens
  chr19:50789768-50789999
  hypo
cgggcagtggaggaacgtgagcgggccgaggcagagggccgggagcgtgaggctcgggccctgtcactgacacgggcactggaggaggagcaggaggcacgtgaggagctggagcggcagaaccgggccctgcgggctgagctggaggcactgctgagcagcaaggatgacgtcggcaagagcgtgagcagggcccccgctccccgggacacactgggtgaggggagacac

SEQ ID NO: 344070 - DNA, 330 bp, Homo sapiens; identical to SEQ ID NO: 336223
  chr19:50828897-50829227
  hypo

SEQ ID NO: 344071 - DNA, 564 bp, Homo sapiens; identical to SEQ ID NO: 225992
  chr19:50831535-50832099
  hypo

SEQ ID NO: 344072 - DNA, 603 bp, Homo sapiens; identical to SEQ ID NO: 336226
  chr19:50833813-50834416
  hypo

SEQ ID NO: 344073 - DNA, 468 bp, Homo sapiens
  chr19:50919593-50920061
  hypo
cgtgtccaccccggtgccctttccctggctgcccgggtgtgactgccatgtggccgcaggacccgctgttcgtgctggagcacagcctgcccattgacacgcagtactacctggagcagcagctggccaagcccctcctgcgcatcttcgagcccatcctgggcgagggccgtgccgaggctgtgctactgcgtacgggggcaccaggggactgggggcaccctgggggggcagaggagatcaccggcccaccacctgcctcctctcctgcagggggggaccacacgcgctgcaagacggtgctcacgggcaaggtgggcggcctcctggccttcgccaaacgccgcaactgctgcattggctgccgcacagtgctcagccaccagggtgagcggccctggccactgggcccccactggccctcaacctgctctgccgtcaccccagatcctagacacccaccccatc

SEQ ID NO: 344074 - DNA, 152 bp, Homo sapiens; identical to SEQ ID NO: 336228
  chr19:50979534-50979686
  hypo

SEQ ID NO: 344075 - DNA, 1262 bp, Homo sapiens
  chr19:51020756-51022018
  hypo
cggtcaggctgcgcccgggctgggacctgggtggggggctccacgcccctcgcccgcccggccccgccgcctcagatctgcgtctcttgcacgttctccttggagccgctcttgaagagcagaggttcgtggatggagttgaggccaggcgggcctttgcccccgcagcccccgccgctggggttgctgctgtagtgcgccttgaaggcggcagccacgtagtggtggtggttgaggtggtctcgctccagggcgggcagggccaggtggctgtccccgcccacaccacccccactggccacggcggccgcggcggccacggacacggccgaggcggcgggcagctcgtcctccacgttgatgatctccacggtgcgcgtgggcccgtggtgcttgtggagctggtgctgcttgcgcagcttgtagaaggccacgagcatcaccgcggccatgaacgtgatggccacgaagcagccgatgatgattttggtggtcttcatgacgtcgtccaggtccttgagggcgttctccgtcacatccgtgatgggcaccgtgaacgccttctccgtgggccgcgaggagcgcggggcgggtgccgtggtagaagacgaggcagggccggccgcgtccccaggccggcccccaccccagacaccgtctgtcgtgggccctggcggttccttctccgtcccccgcggctgcagggcctcctctccgggctgcgtctccagggtctccacggtcaccgtggtgaagtaggtgtagccgccactgccccctccaacaccaccactgcccccagggccgcccccgccgctgccggtgcccccggccgccacggggtccacggccgagacgttgagcgtggccgaggcggtggtgttgccggctgagttcgtcaccatgcacgtgtactggcccgtgtcctgcacggtgacgttggtgaagttaagcgtgccgtcatgcaggacggagatgcgcacgcggtaggagccgtgggtcatgagggtgccgttgggcgtcagccagttgacggaggtcatggaggtgcccgtgcggcatttgagctcggcagccatgccctcggtgacgttgaggtccgtgggcggctccacgatgacgggcgcatagcaggtgaaatgcgactggtccagctccccaatgtagcgccccttgaggccggcgggcgcatgacagcgggcgcagcacgtcgtgttgctgggcaccgtctccttgagccaccagctcagccagagcacgtc

SEQ ID NO: 344076 - DNA, 77 bp, Homo sapiens; identical to SEQ ID NO: 336229
  chr19:51111319-51111396
  hypo

SEQ ID NO: 344077 - DNA, 1241 bp, Homo sapiens; identical to SEQ ID NO: 336234
  chr19:51227641-51228882
  hypo

SEQ ID NO: 344078 - DNA, 676 bp, Homo sapiens
  chr19:51303021-51303697
  hypo
cgggactagagatgcctgcagacaggcacatctgtggggttcagtgagaggacggggccaaacccttctgcttgggcctcccatgcctaacgggatacccctcaatcgcctctgctgcccccggcccagctcttctaagctgctctgacttcaccagaaccttctgtgacatggggaaggggcagctgcctctcactgggaccctggcaggataagttcagtttattctccgcaaaagcactaacactgtgggtgctcgctcagtgggtgctgctgtttaacaacctcagaaacaccaaaagccccattttgcatagaaatatgctttgtaggaagaggggggtccttgtttaaactaatcaaggaaaattaaaaacccagcccccagccacaaactagccacattccaggtgtccaagagccacccgtggccagtggctgccagactggacaaggcgaggaacatttctatctggacagtcgtaaggaaggcgccggcccagaatccacaaatgctacgtgtcccttctgtctccctatcccgcatcagctctgtcgtctcacctctcacacatccctacccaactggcaccgacaccactcatgtccccaagaatcccctctaagccagccatgacaaacgctcagctccattcactaccccacagaggatctc

SEQ ID NO: 344079 - DNA, 195 bp, Homo sapiens
  chr19:51535218-51535413
  hypo
cgctgctggttacgcggacgggcaggcgcagccgcagcagccggaggtcgtgctcgtggctcgtcgaggctcccaggtagccgggatgggtcacagagaagccgctgtgccggatctgctcggtccagtcgagctggctgaggctgtgttcccccaggcgcacccagtacctgctgccggtggcgacggctgagc

SEQ ID NO: 344080 - DNA, 286 bp, Homo sapiens
  chr19:51597236-51597522
  hypo
cgccctttcctgtgctcattcttactcatctccagctcccggtttacacattacctctttcaggaagcgttccatgacgcaccgcactgagttagaagccccacctcaggcctcccctgtgtccctcctaagccccacggtggcacatatccctccggatcttgacttgccagtatccctgcccgcctccgctggcagacagggagcccattgagggcagggactggggctgactcagctgcattgccccaccgccctgcgcagggcccgccagctccaaggaggc

SEQ ID NO: 344081 - DNA, 107 bp, Homo sapiens; identical to SEQ ID NO: 274520
  chr19:51684622-51684729
  hypo

SEQ ID NO: 344082 - DNA, 501 bp, Homo sapiens; identical to SEQ ID NO: 226003
  chr19:51830799-51831300
  hypo

SEQ ID NO: 344083 - DNA, 261 bp, Homo sapiens
  chr19:52058107-52058368
  hypo
cgacatcagtgaaggcctctctgggcaacttccggttcacattggcgtccaggcgtgatttcttcagcatgtccattgacgcgcatgttcaatatcacttttggagctatgctctgcagatagttatcatggtgtaacgcggtggagggcgtgtccgttatttccattgtaaacttttcttcagcggctttgtcaggagaacaacatggtcgtgcccagatagagttggtcactggaggacgccatcttcaaaagatggtc

SEQ ID NO: 344084 - DNA, 692 bp, Homo sapiens; identical to SEQ ID NO: 336245
  chr19:52207100-52207792
  hypo

SEQ ID NO: 344085 - DNA, 521 bp, Homo sapiens; identical to SEQ ID NO: 336246
  chr19:52222530-52223051
  hypo

SEQ ID NO: 344086 - DNA, 566 bp, Homo sapiens
  chr19:52342906-52343472
  hypo
cgatagccataatggcccccaactccgcatcgcttgctcgcttttcctggttccccagacaccgacttccactcgacgctgaggatgctccaatccagaccacagaagccctcagtggctaacccccagcttcagattccactgaccattccctgaagccttcttacaccgcaaacctccacaagtaccccatgctggtcgcatccggtcaaggaccccaacagcgctgggaaactcaccctacagctggagtcgcacaaacattcgcttgaggactagcaggtttccgtaacctcttcactcactgccgtagtcacgctcttgtgcagactcagtagcaccttcgcggaacacaagatgtctacagactttgaaaccaggcgtgcacatggaagcagcagtcttggaagatgcttcttacagatagcgagatggccattttctggcgactaaattccatcgtgctagaaaggaaagaggcaatgcagctgatcttctactgtccttttcaccacttccccagctgctaccagcagcgttgtgcattctcaggaacaacattcagc

SEQ ID NO: 344087 - DNA, 136 bp, Homo sapiens
  chr19:52406169-52406305
  hypo
cgacctactagagcgatgtgaaaataataaaagtgagatcgttcatggcaaagttatctcggggtaaatgctccagctgcaagcaccaaaggtgagtattctcagggcaaatgggaaaaggaataaaggatattac

SEQ ID NO: 344088 - DNA, 98 bp, Homo sapiens
  chr19:52479250-52479348
  hypo
cggctgatgaaggtttgctggaggcaatcactccctggcgccgttatctactgcgacatctagagaatgcagtcttgcaagactactctggacccctg

SEQ ID NO: 344089 - DNA, 807 bp, Homo sapiens; identical to SEQ ID NO: 336249
  chr19:52531285-52532092
  hypo

SEQ ID NO: 344090 - DNA, 119 bp, Homo sapiens; identical to SEQ ID NO: 336251
  chr19:52715152-52715271
  hypo

SEQ ID NO: 344091 - DNA, 807 bp, Homo sapiens; identical to SEQ ID NO: 336256
  chr19:53030704-53031511
  hypo

SEQ ID NO: 344092 - DNA, 833 bp, Homo sapiens; identical to SEQ ID NO: 336261
  chr19:53237625-53238458
  hypo

SEQ ID NO: 344093 - DNA, 691 bp, Homo sapiens; identical to SEQ ID NO: 336264
  chr19:53445362-53446053
  hypo

SEQ ID NO: 344094 - DNA, 74 bp, Homo sapiens
  chr19:53463668-53463742
  hypo
cgaatcagctcggataacgggctggagtttgtggctgacttagtacagacgacagcaaaggtattaaagatcac

SEQ ID NO: 344095 - DNA, 262 bp, Homo sapiens
  chr19:53507240-53507502
  hypo
cgtccggacttccccgatcccagccttctctcctttgaaaacactaagaatgacatcactgcatcagtttttactagagccaatcacctgtcgtgcctggaacagggatcgtacccagattgccctcagtcctgataatcaggaagcgcacatctataagaagcatgggagccagcgagtgaaagctcgtgaactcagtgagcacaatggacatatcacaggcattcactgggctcccaagagcgaccgcatcgtcacttgc

SEQ ID NO: 344096 - DNA, 1149 bp, Homo sapiens; identical to SEQ ID NO: 336268
  chr19:53606073-53607222
  hypo

SEQ ID NO: 344097 - DNA, 635 bp, Homo sapiens; identical to SEQ ID NO: 12600
  chr19:53696029-53696664
  hypo

SEQ ID NO: 344098 - DNA, 143 bp, Homo sapiens
  chr19:53806012-53806155
  hypo
cgacgctgacacatatgtgcgtgttcacgccaggcttcgcacacatcactggccgtgtcatggggggacacgcaagacggaagcctccaggcgtgttcagcagaaacctcgagcccacactgtgcttcagagtctcccatgcc

SEQ ID NO: 344099 - DNA, 422 bp, Homo sapiens
  chr19:54109766-54110188
  hypo
cggcaaggggttctcgggacatatcaggtagtaggggcactatgagggtgagcgccgctgagacaccaaaataggccaagaagcagatgaagatcgaggtcacagtgcccaaggggatggagcggtgagggtggaggcggtgagggtggagggcttcttctcctgcgggacaggtatatgcaccgggcggtgagggtggagggcttcttctcctgcgggacaggtatatgcaccgggcggtgagggtggagggcttcttctcctgcaggacaggtatacgcactgggccaggaaaatgcacggaagtgaaggtacaaaaccctcttccctcttccccatctgagaacagggtagcctttaatgaaacctgtgcccagcggcagcccaaacagtgcccaaacccccgatgagacagaatgacc

SEQ ID NO: 344100 - DNA, 372 bp, Homo sapiens
  chr19:54313999-54314371
  hypo
cgtggaaagaaggcttgagctcatcgaagccgtcgatgatgaaaaggaggcgctcgggaactcggatgagctcctggagaggcgcgctgggctcaggccagcagctgaagatgaggtcttgcatgctgcattccgtggcactctggttcatctccctgcagttgatgtagaagagataatcaaatctgccttggaagagcttcccgtccgcccagtccagcatcaccttgtgtgccagcatggacttgcctatccctgccgcgccttgcatgaccacggtgcgcggtggctcggggcgctcctcgtctggctcaaagagggtctctatcttgatggggctagcctggtgtcccacggtcctcgcgtgtcccc

SEQ ID NO: 344101 - DNA, 578 bp, Homo sapiens; identical to SEQ ID NO: 336278
  chr19:54385484-54386062
  hypo

SEQ ID NO: 344102 - DNA, 727 bp, Homo sapiens; identical to SEQ ID NO: 336280
  chr19:54411189-54411916
  hypo

SEQ ID NO: 344103 - DNA, 543 bp, Homo sapiens; identical to SEQ ID NO: 336281
  chr19:54412564-54413107
  hypo

SEQ ID NO: 344104 - DNA, 53 bp, Homo sapiens; identical to SEQ ID NO: 226026
  chr19:54413510-54413563
  hypo

SEQ ID NO: 344105 - DNA, 641 bp, Homo sapiens; identical to SEQ ID NO: 336287
  chr19:55865817-55866458
  hypo

SEQ ID NO: 344106 - DNA, 108 bp, Homo sapiens
  chr19:55976235-55976343
  hypo
cgtgcgtcggcggggggcagagaatggtgcctggagatggccaattaagggaacaaaggcctcgttcgggaggcgaggccgccagtaagtcaaatgcagcgattgagc

SEQ ID NO: 344107 - DNA, 486 bp, Homo sapiens
  chr19:55986223-55986709
  hypo
cgtgggcaggtaaatgaggggggctgagctgagggcccctttcactactgcagagaccaaaatggcccgaggcaagggggacggaagtgggatccgcacctctgggctttcctagcctggcagccagctgggcagtgcattcccatccacgtctccaccctgcatggcagccgctttgtgtggttaatgctgacgtgaaaggaatgttgggctgagctggatgccaagggtttttacacgcacgaatgcacggagacatcagcaccaagaccctgtaaggtaggggtgggtccacaccaccgcagatcagccctgagttccagcctgcttgtggacttgggaaacggtgtgggaggctggaaaaatccactcattcaacaaacaagtaccgtctgcttctccatcagggcccatgctggttgtttggaatacctgggcagcaaagacacgaaaggtcctcgctgtcatgggacatagataaatgtc

SEQ ID NO: 344108 - DNA, 382 bp, Homo sapiens
  chr19:55990560-55990942
  hypo
gggcagtgagggagcgaggtatcccggaggccagggggaggcgggccacggacccagtgacaagtgggccattgcgggccacgcgccgcccaggccatggagtgggggcacccgcgtgggactgaaggggtttgcgctgggaaagagcgggctgacacttgagctgctctgctgtgaaggaatggagaaacgagtctgcagctggacagggaagtggagtgaagagctttttggtttttaaagatgggagacatagattgttggttctgcagatgggaacgtccaggagaggaggaaaagtggaggatgtgggtgggaaggcacagtccacgggcactgggtcaggcctgtggggaaggattgcgcagggtttctggacctc

SEQ ID NO: 344109 - DNA, 70 bp, Homo sapiens
  chr19:56104277-56104347
  hypo
cgcggccgacgcaaagaaggtcccgcagtcgcactggtacagggtgtcttccgagggctcggcggccgcc

SEQ ID NO: 344110 - DNA, 75 bp, Homo sapiens
  chr19:56104962-56105037
  hypo
cggagctcgcagaccaggcagcagtagggtttctcaccagtgtggacgacctaggggtgcgggaggaagggcaca

SEQ ID NO: 344111 - DNA, 134 bp, Homo sapiens; identical to SEQ ID NO: 336290
  chr19:56112791-56112925
  hypo

SEQ ID NO: 344112 - DNA, 761 bp, Homo sapiens; identical to SEQ ID NO: 336292
  chr19:56159257-56160018
  hypo

SEQ ID NO: 344113 - DNA, 746 bp, Homo sapiens
  chr19:56199006-56199752
  hypo
cgctggcctcacctgtgccccacgctgcccttccatctgcccatcccctcagaaggccgcttacccacccaagtccgtcaatccctgctggttctctcgtcctttcctcactcataaccccagatggtcacccttcggccccgctctgccacccacatgctccctggagcatcccatgcacccagccctgctgggcacaccacacgggggccagcctgggggcccctggacccggtgcaggtggggccgccagacagctgcctgctgcggctccgggcaaggggagccagggcctgctcgtcagggagaggcctgggcctggggagtgggttgggtggggacacaagtacaggacacaggtgcaaggcggcgtcttggagctggagcagacagaacttgctgaccagtgcacagtggttgggagggcggggcaggagaggcagggtccgccctggggctttggaggctggggcaatggccctgtgctcggcgggcctagggcctggttggagcctgtcctctgcactgtggaggggggcaagggtccacaggccttgggggtggagagaacagtgtcaggacagagtttgagggtaggcggggttgctgagaggatgctgcagtggaggccggggatatctcagcagcctcctggagggtccggccctgccttcctgtgtcctctctctcccttcccctcctgctcttggaaccaagggctcctcgctagcccactccctaacccc

SEQ ID NO: 344114 - DNA, 404 bp, Homo sapiens
  chr19:56200285-56200689
  hypo
tggccgcagagcagcggggaggaggagctgcagctccagctggccctggccatgagcaaggaggaggccgaccaggtactgggcgtgcagctggggctgtctgtccgccacccgcctccacgcctcacttcaggctccctcccagccaggcgtgggcctggccctcactgtcgctgctccacatgctgtcactcgtctcctccccagtcctgcctcatcctcaccccgccgtccctctgcgtgtcactctctgcctgtccctcactggttcagggacccccagccctctctttcttcggctctatctgaccctggctctgcctctgactctgcctctggcccctcccgtcatgcccctcacactctctctcccccagcccccgtcctgcggccccgaggacgac

SEQ ID NO: 344115 - DNA, 430 bp, Homo sapiens
  chr19:56201494-56201924
  hypo
cggtgactgaccaggctgccctgcggccacctcctgtggtcagcgctggccatcccccttcgggctgagcaccgtgagggccaccaccggccgccacagctgaatggggaggcccagaataggccaacagcctggcatggccacagggaggagggtgcagggctcgccccatctgtcacactttgtcgggcacctccttggtgccaggccgtgtgctgcacacccagggcctgttggtgagcgaggaggcatggtcccgccctcgcgaacactgtttctgtggcgtccccatgctctgcagctgagtagcaaaccctcccacaaccttgtgcttccaggtcacgcttcagtacttccctgtgacgggcccgctggctggttgtttcgtgtcatggctgaggtcactcatgcctctgggcccggggtgtcc

SEQ ID NO: 344116 - DNA, 778 bp, Homo sapiens
  chr19:56538418-56539196
  hypo
cggtggggcttccggcctcgcacggtggttctgcacggaaagtcaggaattgggaaatcggctctagccagaaggatcgtgctgtgctgggcgcaaggtggactctaccagggaatgttctcctacgtcttcttcctccccgttagagagatgcagcggaagaaggagagcagtgtcacagagttcatctccagggagtggccagactcccaggctccggtgacggagatcatgtcccgaccagaaaggctgttgttcatcattgacggtttcgatgacctgggctctgtcctcaacaatgacacaaagctctgcaaagactgggctgagaagcagcctccgttcaccctcatacgcagtctgctgaggaaggtcctgctccctgagtccttcctgatcgtcaccgtcagagacgtgggcacagagaagctcaagtcagaggtcgtgtctccccgttacctgttagttagaggaatctccggggaacaaagaatccacttgctccttgagcgcgggattggtgagcatcagaagacacaagggttgcgtgcgatcatgaacaaccgtgagctgctcgaccagtgccaggtgcccgccgtgggctctctcatctgcgtggccctgcagctgcaggacgtggtgggggagagcgtcgcccccttcaaccaaacgctcacaggcctgcacgccgcttttgtgtttcatcagctcacccctcgaggcgtggtccggcgctgtctcaatctggaggaaagagttgtcctgaagcgcttctgcc

SEQ ID NO: 344117 - DNA, 156 bp, Homo sapiens
  chr19:56602205-56602361
  hypo
cgcttatgctcaggcctccctccagacgcactgtatgagaaagtgccgggccgggcctgtgcttcagcaagccccccaggtgattctgatgccagctccagtgtgagaatcactattccaaggcagagagtattcgaatatggctcttgaacctgc

SEQ ID NO: 344118 - DNA, 269 bp, Homo sapiens
  chr19:56688223-56688492
  hypo
cgctgggggaccaggtcggcctgatccgatgatgggggaaggagaggcttaattgcttgcacacgtccaaactcctcaagatgtgtacattaaatgtgcgccatttttgtatctcgatgatgcctccataaagctaaaaaataaattcctctgtccttatcggaaatgcacctggcccccgcttcggaaaatgactggccgctctctccttgcagcgtgttccgcagctgtaggcacctgtcgtcctgccttcgatggctcctccctcc

SEQ ID NO: 344119 - DNA, 225 bp, Homo sapiens
  chr19:56727708-56727933
  hypo
cgccctccgctcgttatcgtgttgagaatgaaatgagaggacatgcttggcacctggagatgattggatattacagctgtgcgccataagggcaaatggttccattgtttgatgagccgtcctggcggtgggtgggtcggtcacttctaaacagataaggaatggctagaaagctcttgtaccaaaccagcttgaagcaacctcacccacaccgaatccctccac

SEQ ID NO: 344120 - DNA, 509 bp, Homo sapiens; identical to SEQ ID NO: 336293
  chr19:56728568-56729077
  hypo

SEQ ID NO: 344121 - DNA, 171 bp, Homo sapiens
  chr19:56807013-56807184
  hypo
cgtggcggcttccttcccagcctaaccttgctgcggtgcaaatcctgcaagtcactgcacgtccctccaacccacacgaagcagcctctgactgttctgcgctgttcactgtggcatgtcctgactactcagcacgacccacccagggctccgctctcctgtgctcccatc

SEQ ID NO: 344122 - DNA, 597 bp, Homo sapiens; identical to SEQ ID NO: 336294
  chr19:56879397-56879994
  hypo

SEQ ID NO: 344123 - DNA, 802 bp, Homo sapiens; identical to SEQ ID NO: 336295
  chr19:56904526-56905328
  hypo

SEQ ID NO: 344124 - DNA, 806 bp, Homo sapiens; identical to SEQ ID NO: 336296
  chr19:56915147-56915953
  hypo

SEQ ID NO: 344125 - DNA, 193 bp, Homo sapiens
  chr19:56981677-56981870
  hypo
cgtgctcaggtgtgtgtgctgaatgtgctccatgcctgggcagcagcgtcacctcctcagttaatgacgatgagaatgaaagctgtgctggctcctttctatgcatcacaccatctcctttaaccttgaatggcaaatcaaccacccagggtcctcatcttccatcgcggggatgagagagggacgatgaccc

SEQ ID NO: 344126 - DNA, 885 bp, Homo sapiens; identical to SEQ ID NO: 336297
  chr19:56988132-56989017
  hypo

SEQ ID NO: 344127 - DNA, 461 bp, Homo sapiens
  chr19:57181884-57182345
  hypo
cgggcacacgtagctacacacacacccagccccacacgtagctccctgtgtgaagaggtgcacagagacgcacaaggtcacacatgccacctgctccacacaggccggccattactgggacacacccacaggggatggctggacacatgtgcagtcacactcggtggatagagctccagcatagccaaagcccacatgtgcagcgtctccatcatgtgcagatgcacacacttcagacagcacggcactctacaggctcgcacagccaggtcacccatcattgtgctggcaggcacacgggccgagccagcctacacggcggcacacccagacatgcacacgtggggtcacacacctcacatccaggagaactttcagacttgcccaaaggcagccacacgtgtatgtgacatgctgtgatatgcagacaccgcttcacatgaacgagcacataacacacc

SEQ ID NO: 344128 - DNA, 869 bp, Homo sapiens; identical to SEQ ID NO: 336306
  chr19:57831543-57832412
  hypo

SEQ ID NO: 344129 - DNA, 706 bp, Homo sapiens; identical to SEQ ID NO: 336311
  chr19:58038572-58039278
  hypo

SEQ ID NO: 344130 - DNA, 793 bp, Homo sapiens; identical to SEQ ID NO: 336312
  chr19:58070535-58071328
  hypo

SEQ ID NO: 344131 - DNA, 790 bp, Homo sapiens; identical to SEQ ID NO: 336316
  chr19:58125385-58126175
  hypo

SEQ ID NO: 344132 - DNA, 881 bp, Homo sapiens; identical to SEQ ID NO: 336320
  chr19:58238341-58239222
  hypo

SEQ ID NO: 344133 - DNA, 309 bp, Homo sapiens
  chr19:58556364-58556673
  hypo
cggccctgtgtacagcgcccccgcagagatggtggtgaagtcccgggggcagagagggtgctgggcgagctgaggcactactaccatggcttccgcctgctacggatccacaccaagatcgcagcacgcatgctctggcgcatcctcaactgccacaccctgacccgccaggcgcgcaggcagttgctccggttctgtgccgacctcttccgcctggtgccgttcctcctgttcgtggtggtgccgttcgtggagtttctgctgcctgttgctgtgaaactcttccccaacatgttgccatccacatcc

SEQ ID NO: 344134 - DNA, 121 bp, Homo sapiens
  chr19:58556965-58557086
  hypo
cgcttccagctcacgatgcggctgcgctccataaaggcagaggacaagctgtttgctgaggaaggggtggacagcctgaacgtcaaggagctgcaggcggcatgtcgggcacgaggcatgc

SEQ ID NO: 344135 - DNA, 886 bp, Homo sapiens; identical to SEQ ID NO: 336326
  chr19:58609245-58610131
  hypo

SEQ ID NO: 344136 - DNA, 652 bp, Homo sapiens; identical to SEQ ID NO: 226051
  chr19:58661655-58662307
  hypo

SEQ ID NO: 344137 - DNA, 984 bp, Homo sapiens; identical to SEQ ID NO: 336328
  chr19:58665973-58666957
  hypo

SEQ ID NO: 344138 - DNA, 1023 bp, Homo sapiens; identical to SEQ ID NO: 336329
  chr19:58694209-58695232
  hypo

SEQ ID NO: 344139 - DNA, 788 bp, Homo sapiens
  chr19:58830548-58831336
  hypo
cgctggggagggtgtactgccatgtagtgggtgggaagatacctttggcaagaacacgtgccttgtgagctatcagcagattcccaacaaaaggagaccctgtacgtgcgaagagtgtggcaaggcctttggacagagaagtcaccttgttcagcacaccagtgagaagctgtatgcatgccaggaatgtgggtgtaccttcagcaacaattcatctctagtcaagcactggcacgtccacacaggcgagaagccctacatgtgtggccactgtggcaagtgcttccgagagagctcatcccttgccaagcaccagcgtgtgcacacaggtgagaagccatacgtgtgtggtgagtgtggacgcaccttcagcgagagcacacaccttgtacagcactggtgattccacaccggggaaaagccatttgcctgccaagagcagcaaagcctttgctgacttctcggccctccttgcatgccacggaacctacacgggtgagaggccctacgagtgccgggtatgctgcaaggcattcagccccagcttgtccctggctgagcacatacgctgccacacgggagagaagctgtatgcgtgtcaggaatgtgggaaagctttcagccacagctcatccctcagcaagcaccagcaggtacacacaggtgagtggccctatgtgtgtgcagaatgtggaaaggccttcagccaggggtcctacctgacccagcacctcaagatccacagcggtgagaagccgtacatacgtggtgagtaaaggaagccattc

SEQ ID NO: 344140 - DNA, 102 bp, Homo sapiens
  chr19:58874823-58874925
  hypo
cgagactccgtctcaaaaaaaaaaaaaaaaaattgagtcgggatctcagaagctaagcagggtcgggcctggttagtacttgggagaccgtctgggaacacc

SEQ ID NO: 344141 - DNA, 91 bp, Homo sapiens
  chr19:58878569-58878660
  hypo
cgcgactaccgagctgccagggccgggacaggcagaagcctgccccgaggtctcacctctggagggttacgagctgtgccaggccggctac

SEQ ID NO: 344142 - DNA, 926 bp, Homo sapiens; identical to SEQ ID NO: 336331
  chr19:58951200-58952126
  hypo

SEQ ID NO: 344143 - DNA, 134 bp, Homo sapiens
  chr19:58964127-58964261
  hypo
cgtgcggagttacagcttgagggtaaagaaaaccggctggggtgcctgaggctatcaggggaggagttcggcaggtggctgaataggagagggtggcagcaatgtgggaaagaaattgcgggagcgctgagatc

SEQ ID NO: 344144 - DNA, 158 bp, Homo sapiens
  chr19:59003735-59003893
  hypo
accatctgagccatcgctacagcatctgcctgtatttctcacatgcttacatgaaaggcattatttattcacttggacaacaaaggctgcttttcgtgagagtcactggtcctcccatgagggcatccaccgatacttcaagaatccttcctggggcc

SEQ ID NO: 344145 - DNA, 523 bp, Homo sapiens; identical to SEQ ID NO: 336332
  chr19:59010487-59011010
  hypo

SEQ ID NO: 344146 - DNA, 236 bp, Homo sapiens
  chr20:371973-372209
  hypo
cgcggctgcccccgcacaagcatgtggctcggcccactgaggtcctggctggtacccagctcctctacgcctttttcactcggacccatggggacatgcacagcctggtgcgaagccgccaccgtatccctgagcctgaggctgccgtgctcttccgccagatggccaccgccctggcgcactgtcaccagcacggtctggtcctgcgtgatctcaagctgtgtcgctttgtcttc

SEQ ID NO: 344147 - DNA, 291 bp, Homo sapiens
  chr20:399991-400282
  hypo
tctgggcttcaaggacctcacgctgcagccgcggggccctctggagccaggccccccaaagcccggggtcccccaggaacccggacgggggcagccagatgcagtgcctgagcccccaccggtaagctgtccttggcctcagtatcctcttctgtgcccctcccttgcctcaccctgcccagtcgggctcacagcaccctctgctcccaggtgggctggcagtgccccgggtgcaccttcatcaacaagcccacgcggcctggctgtgagatgtgctgccgggcgcgcccc

SEQ ID NO: 344148 - DNA, 266 bp, Homo sapiens; identical to SEQ ID NO: 274819
  chr20:400917-401183
  hypo

SEQ ID NO: 344149 - DNA, 469 bp, Homo sapiens; identical to SEQ ID NO: 274820
  chr20:401567-402036
  hypo

SEQ ID NO: 344150 - DNA, 55 bp, Homo sapiens; identical to SEQ ID NO: 274821
  chr20:402066-402121
  hypo

SEQ ID NO: 344151 - DNA, 703 bp, Homo sapiens; identical to SEQ ID NO: 336335
  chr20:644483-645186
  hypo

SEQ ID NO: 344152 - DNA, 53 bp, Homo sapiens
  chr20:688357-688410
  hypo
ggcattgccgaacacgcgtcctttttttcttttcttctttcattattatgatc

SEQ ID NO: 344153 - DNA, 850 bp, Homo sapiens; identical to SEQ ID NO: 336337
  chr20:708554-709404
  hypo

SEQ ID NO: 344154 - DNA, 172 bp, Homo sapiens
  chr20:926459-926631
  hypo
cgtccattcactcacggctctgctcccacgcatggctgcgctatgcacactgccctgcagcttcctttgtctgctgcacaatgggctctggacggagccctgttggcgcaatgagtgagccctacatcaagcttcgtcatcgctgcatcgctttgcaccgtgtggctgggcc

SEQ ID NO: 344155 - DNA, 1208 bp, Homo sapiens; identical to SEQ ID NO: 336339
  chr20:1783336-1784544
  hypo

SEQ ID NO: 344156 - DNA, 271 bp, Homo sapiens
  chr20:2820455-2820726
  hypo
cgaacttgttgtgtagcagctgctggacttccgaggcctggaagtggaccatgtcgcttcgcagcgggcggcgcggctcctcgctcgacagacagaagaccatgccgccaccagcaacgacaggctgcagggagaggccactaagcagcgcgatggtggggactctgggcaggtcagcctcagggctagcccctccggggctgctcaatgctaaagggaggaggtgacggcagcagagccatggtggcgccagccttggtcacacttggta

SEQ ID NO: 344157 - DNA, 257 bp, Homo sapiens; identical to SEQ ID NO: 226067
  chr20:2820747-2821004
  hypo

SEQ ID NO: 344158 - DNA, 633 bp, Homo sapiens; identical to SEQ ID NO: 226069
  chr20:3073286-3073919
  hypo

SEQ ID NO: 344159 - DNA, 409 bp, Homo sapiens
  chr20:3202086-3202495
  hypo
catctggcttgtccacggagttcagggtacttagcttcctattaggagaaaacgttttctgtctatctttctttctgtctatctttcaaagtagcctcattgttcttcagtgatgtcccaatttgtcccgggtgtggctggcgagggcgcgtggccccggaggtgctggtggtcctgtgggtccatgcctcctccctgtgtgtgagggaagagctgccccgctctgctttttattgtattcagcaaacatttgcaggtgctgtaggggccttgcaactacattttgcgtaagttgggtcaaatcaaattcacagactcaccaaactcatactggccactgccctcctcgtgcttgtcctctggacccagttacacacctgtcccccctttcctgtggcagggccggatc

SEQ ID NO: 344160 - DNA, 684 bp, Homo sapiens; identical to SEQ ID NO: 336351
  chr20:3220266-3220950
  hypo

SEQ ID NO: 344161 - DNA, 675 bp, Homo sapiens; identical to SEQ ID NO: 336352
  chr20:3229128-3229803
  hypo

SEQ ID NO: 344162 - DNA, 34 bp, Homo sapiens
  chr20:3820920-3820954
  hypo
cgtcccactgcactccagtcgctgcactctcgcc

SEQ ID NO: 344163 - DNA, 1405 bp, Homo sapiens; identical to SEQ ID NO: 336356
  chr20:4803016-4804421
  hypo

SEQ ID NO: 344164 - DNA, 1627 bp, Homo sapiens; identical to SEQ ID NO: 336358
  chr20:5296192-5297819
  hypo

SEQ ID NO: 344165 - DNA, 721 bp, Homo sapiens; identical to SEQ ID NO: 336359
  chr20:5891878-5892599
  hypo

SEQ ID NO: 344166 - DNA, 264 bp, Homo sapiens
  chr20:6022708-6022972
  hypo
ggctgcgctgggcgcgacggtggtaccctgtgcgtaggtggagcggttgaagcaaggtgggtgtgaagccccgagagtggtgctttggtcggactggcacactccgggcagctgggagagtgacagggaggctgagaaggggccgctggatcccgcagctggcgcgcacatagtgtctgctgccctggaggggaggccaaccagttagaagacgtctggcttcagggacacttctgcgcagagctttgaatcctcattgccgac

SEQ ID NO: 344167 - DNA, 1654 bp, Homo sapiens; identical to SEQ ID NO: 336360
  chr20:6747996-6749650
  hypo

SEQ ID NO: 344168 - DNA, 1412 bp, Homo sapiens; identical to SEQ ID NO: 336362
  chr20:9048369-9049781
  hypo

SEQ ID NO: 344169 - DNA, 857 bp, Homo sapiens; identical to SEQ ID NO: 336363
  chr20:9487140-9487997
  hypo

SEQ ID NO: 344170 - DNA, 164 bp, Homo sapiens
  chr20:10687213-10687377
  hypo
cggaaggagcctgaggcctggagggggattcggaggccccgacggaccgcactgtggaggagctttctgtagagcgcaggatccacttaagctccgcgtgtgtgtagggattgtgtgtagggatacggcaaatatcctgcagttgattgccagacgtacagatc

SEQ ID NO: 344171 - DNA, 127 bp, Homo sapiens
  chr20:13417399-13417526
  hypo
cgcagccaactcaagactaacgacctacttgagagacacccccaagaaaacgtgtcctcgacttagggtaagagcttcaagatgacaagtatgactcatacactaaaggtttttagttcggcttagc

SEQ ID NO: 344172 - DNA, 459 bp, Homo sapiens; identical to SEQ ID NO: 336372
  chr20:18039568-18040027
  hypo

SEQ ID NO: 344173 - DNA, 144 bp, Homo sapiens
  chr20:18489643-18489787
  hypo
cgtgagccaccgcgcccggccgccagtgccttttaataaagaacgttttgagagagagacggttatttaatgaaatctgctgacatacttgctgagagttgtgatagaacttgctttcattccgactttagttatccctttgct

SEQ ID NO: 344174 - DNA, 1388 bp, Homo sapiens; identical to SEQ ID NO: 336374
  chr20:19192506-19193894
  hypo

SEQ ID NO: 344175 - DNA, 143 bp, Homo sapiens
  chr20:19497049-19497192
  hypo
cgctgtgaagcgagctccccacattcagtggcatgcctggtcaccatgttgttttgttcttgggttgtttgtgttgagtgctcagaaggagcacagtgggaatgctgctccacggaatccagggcctcagatggaccgactcc

SEQ ID NO: 344176 - DNA, 3285 bp, Homo sapiens; identical to SEQ ID NO: 336379
  chr20:20347544-20350829
  hypo

SEQ ID NO: 344177 - DNA, 684 bp, Homo sapiens
  chr20:20376606-20377290
  hypo
cgccttccgcctgtgagcctgggaggtggtgcagcccaggccacacgggacagggttttcagacagccttgccaaggcggctgccatccatcagagcgctctgggcagggcctggaccccagacccaggacagaaaggcaggctggggaggtcacacctgccatggccagcctatcctctgggtcctagaccgcagcccattcctaggtctccaccctctgcgctcccgcagcttttgtccgcttttccttccccagctgttccattcagcagcccccgccacaacctgccctccccgcatggaggtctcagaggcctccattaaggctggcggtcaaaggccggcccagcacgtgccgtgtcttatcggcccatctcaagaccctgctccttcaggcctgggcaacaaaaaagggggcggccccagcgcccgctggctccctgcagccccacacacaaaagggcaggcgacaaagacattttccgggatggcaggtgttggtgtcggattcctccccgagtgcacgggcagaagaaaggcaaggctgggcttccccgggcagcgcagacatgcaggggcaggagtgtgggcagggcccccggggaggggaaggcccaggagggcgaggagcactgatgcagggtccgctaccgagggcagccgattagaaaagtcccaccccc

SEQ ID NO: 344178 - DNA, 1612 bp, Homo sapiens; identical to SEQ ID NO: 336382
  chr20:21085683-21087295
  hypo

SEQ ID NO: 344179 - DNA, 981 bp, Homo sapiens; identical to SEQ ID NO: 336396
  chr20:21502102-21503083
  hypo

SEQ ID NO: 344180 - DNA, 1284 bp, Homo sapiens; identical to SEQ ID NO: 336397
  chr20:21686207-21687491
  hypo

SEQ ID NO: 344181 - DNA, 1884 bp, Homo sapiens; identical to SEQ ID NO: 336401
  chr20:22563363-22565247
  hypo

SEQ ID NO: 344182 - DNA, 264 bp, Homo sapiens
  chr20:23015064-23015328
  hypo
cggaacccctttctttcccgacctctcgaccacagtcctccccaggcacattttagtggccagggatggagacccgcggataatgactgaaccaggtcacagggtgaaggttctgagatgtccggctcccgtagcttctgccagttcccgagggagctagcacaggcttggccttctttggtggcatctctgcctccacctgtccgtctccattccttgtgcccatagcacctcagctgctcggacacagaagttaaaaggtcc

SEQ ID NO: 344183 - DNA, 233 bp, Homo sapiens
  chr20:23092311-23092544
  hypo
cggggcgaaccaaagatgggagaggagcatcagtgcccccctccccatcaccacattagaatcctgcgggaactggctgggttctcgaaggcgttgttatcgccctgtgctcacacataaggaccctgagacccagggccactagggtgaggcgacagggcagggcctgatgcacctgtcgaaatccacttctagctcccaccctgcccccagagacatgcgccccatgggcc

SEQ ID NO: 344184 - DNA, 729 bp, Homo sapiens; identical to SEQ ID NO: 336406
  chr20:23617984-23618713
  hypo

SEQ ID NO: 344185 - DNA, 120 bp, Homo sapiens; identical to SEQ ID NO: 274973
  chr20:23969312-23969432
  hypo

SEQ ID NO: 344186 - DNA, 195 bp, Homo sapiens
  chr20:24523924-24524119
  hypo
cagcaggagtgagccgatgcagcagctgctggaccccaacaccctgcagcagtcagtggagtcccgctaccggcccaacatcatcctctattcagagggcgtgctgcgctcctggggggacggtgtggccgccgactgctgcgagaccaccttcatcgaggaccggtcgcccaccaaagacagcctcgagtaccc

SEQ ID NO: 344187 - DNA, 189 bp, Homo sapiens
  chr20:24570974-24571163
  hypo
cggggccaacaggggcagaccccgagactctttaggctgtgaccgagcggggcttccactttgggataagaagcctcgggggtttgagcggaggagaagcccctgtggccacatgctcccgggagccttcagagaacagggcggagggggaggcgcagggcgacgacggcagtggtcaaacgcagaacc

SEQ ID NO: 344188 - DNA, 439 bp, Homo sapiens
  chr20:25012790-25013229
  hypo
cgtccaccacgttgcctatgtctatggtgtgcgcatgcccttcctctctggccactctggggcctatcaccaggttcacccaccactcagggcgcatcatctctctgggcaagctgattggctcagggccgacacgtgacccaacctggtccagtcagagtcaaccatactcaactccgggaaaactgggagcaggcgagagccgccaacttgccggccatgcggtgcgaagtggaggaagtggaagcgatcccaaggttgtctttcctttcggcgcctcatccctctgaatctggacctggcaattgcattaaccactttcccactcttgctgtactgactttaattaattatttgcaataaaaagagctaacacagaacgaagaatgaggggaagccaaggccctttctctctgggcggggcagaccaccagcccgc

SEQ ID NO: 344189 - DNA, 189 bp, Homo sapiens
  chr20:25223074-25223263
  hypo
cgaaattgaccagcacagatctgccagtggcgttgctgggatcccagagagattttccctccgcacctgcggtctcaagggccggcggtgcttctgagtcactcatttcaccagcgatcaatgagacactcttcaggtcctcaagaagcttaagcctagccgaccaaaaatgtctgttttccacacccc

SEQ ID NO: 344190 - DNA, 297 bp, Homo sapiens
  chr20:25231684-25231981
  hypo
cgaaagagtagaagttggggtgttcagaggaagatttgtcaagctttgccatgcttggcaaatcagcacgtcaaaacatctggctaacatggagagctttgtgcttggcaagaggtggcggttggtcatgaagacatttaatggattctctgaagtggtggcaaggtggcaaggagagtccaacctgaagctgcagagcctgggattgcgctgcatggagaagaaagggtgtgcgtgattccacgctccttttcatcctggcctttccattcggtctgtgcaactgtgggcttgggc

SEQ ID NO: 344191 - DNA, 253 bp, Homo sapiens
  chr20:25320332-25320585
  hypo
cgtatcaggaaagagcggcctcctcaggcctcccgatccgtcttctgtgagacaactgcaggcaggcgtaggttacttattagctcctggtaggaagcacgtagaccaaggacatcaacagaacctgcctgaccaggtcctcagagagcaggaggctaagaactggcacggtgtgtccttgcatttacgcgtgggcgagcccctctgtacccacccaacagaggacccttttccaggcccgtcaagccaggtc

SEQ ID NO: 344192 - DNA, 131 bp, Homo sapiens
  chr20:29873920-29874051
  hypo
cgtacaccgttgagtttccccgcttctgcacgaaccacagcattggcaacacctgctctgtggggctatcacacacaaaccccacagaggcctggtacacttcgatggcttcccccagggactgctgcgcc

SEQ ID NO: 344193 - DNA, 113 bp, Homo sapiens
  chr20:30139516-30139629
  hypo
cgtggcgacaggcagtcgttgggggagactgggggagattccactcaggggatcaagaaacagctgtctttctcgtgactcactctaccactgcggacagcctttctccctgc

SEQ ID NO: 344194 - DNA, 110 bp, Homo sapiens
  chr20:30153955-30154065
  hypo
cggccctgaggcagtgccgtgcccagcatggcttcaccagcctgtgtcctctcatagcctgccctcctatacctggtccccgcctgcatcggttttcctgtcctggtggc

SEQ ID NO: 344195 - DNA, 1327 bp, Homo sapiens; identical to SEQ ID NO: 336414
  chr20:30192854-30194181
  hypo

SEQ ID NO: 344196 - DNA, 40 bp, Homo sapiens
  chr20:30297105-30297145
  hypo
cgtctggcctgctcgtgtgtgtgtgtgcgcgcgtgcacgc

SEQ ID NO: 344197 - DNA, 1247 bp, Homo sapiens; identical to SEQ ID NO: 336416
  chr20:30555404-30556651
  hypo

SEQ ID NO: 344198 - DNA, 758 bp, Homo sapiens
  chr20:30584452-30585210
  hypo
cgcccgcggcctggccttcgcgctcttcgccagcgtctacaagctctattttggcatcttcatcgtggcccactggtgcgtcatgaccttctgggtcatccaaggggagacggacttctgcatgtccaagtgggaggagatcatctacaacatggtcgtgggcatcatctacatcttctgctggttcaacgtcaaggagggccgcagccgccgccgcatgaccctctaccactgcatcgtcctgctggagaacgccgcgctcaccggcttctggtactccagccgcaacttctcaaccgacttctactcgctcatcatggtctgcgtagtggcctccagctttgcgctgggcatattcttcatgtgtgtctactactgtctcctgcaccccaatgggcccatgctgggtccccaggcacctggttgcatcttccgtaaggcctcagagccctgtggcccacccgctgacgccatcacgagtccccccaggtccctgccaaggactacaggtgctgagcgggatggggcctcggcgggagagcgtgcagggacccccaccccacctgtcttccaggtgcggcctggcttgcctcccacaccagtggcccgcaccttgcggacagaggggcctgtcatccggattgacttgcctcgcaagaagtacccggcctgggatgctcattttattgaccgccggctccggaagaccatcctggcactggagtactcctcacctgccacgccccggttgcagtacc

SEQ ID NO: 344199 - DNA, 1671 bp, Homo sapiens; identical to SEQ ID NO: 336417
  chr20:30639046-30640717
  hypo

SEQ ID NO: 344200 - DNA, 302 bp, Homo sapiens
  chr20:30770391-30770693
  hypo
cgggaatgggctccgggacatttattgcctcaattccaagactgcctggaaaagggcggtactgccttgggcagtagagagttcctatcgctagagatacaaaccccagaagggccttcagcaggcatctgatgccttcatacatgctgtcgcctcgcccaccaggaagaccctcctgaacctcaaagatgtgacacatgcattcattcatttcacaaagaactacttgtgccaggtgctgctctaggtaagggggatttagcaatgaataaaacaaagtgcctctgggtgtggcggctcac

SEQ ID NO: 344201 - DNA, 268 bp, Homo sapiens
  chr20:30772699-30772967
  hypo
cgttaaccacgccgcacattttcccatccagtgccttcgctcatgttgttcgctctgccaggaattcccttctctggctccactttccaaactactgcctattctttaacacccagctcgtgacccaacttcagagaagtctccgccctctggtcccacatcatcacatacctggtgaactataagccacgttgaacacagttgggttttgtctccttggatgaccgttggataccagttacacctcttgccccggtgtaattattag

SEQ ID NO: 344202 - DNA, 147 bp, Homo sapiens; identical to SEQ ID NO: 275038
  chr20:30864850-30864997
  hypo

SEQ ID NO: 344203 - DNA, 570 bp, Homo sapiens; identical to SEQ ID NO: 336419
  chr20:30946060-30946630
  hypo

SEQ ID NO: 344204 - DNA, 35 bp, Homo sapiens
  chr20:30996055-30996090
  hypo
cggttcgaggtagtcattcaggtttgcgtttttac

SEQ ID NO: 344205 - DNA, 132 bp, Homo sapiens
  chr20:31115684-31115816
  hypo
atgccctctggctccgacaggccatctgccccctgcgacagggtggacaagctgtgttagtgtcaggaatgatggcggggtgagaactgggccctgaggccggggcaaggggtcaggacgggcaatgcctcc

SEQ ID NO: 344206 - DNA, 155 bp, Homo sapiens
  chr20:31334709-31334864
  hypo
cgcgcccggcctttttccagtctttttccacatcgcaggtcactggggttgtgtgatttgttttcgttttacatacacaggactctcgcatttcaccaagttatttaataatccctcatactccacgtgtggttccttggaccagcagtgcaggc

SEQ ID NO: 344207 - DNA, 145 bp, Homo sapiens
  chr20:32250068-32250213
  hypo
cgtgaggtcacaatgttgccagggcccagggggcagagcagacggagtgtgggccatcgtccccagtggtgaccagccctgccatgggaaactatagttcccacaaaaggaccaaagcacccaagcaggcccgcaaggagaggcc

SEQ ID NO: 344208 - DNA, 287 bp, Homo sapiens
  chr20:32301652-32301939
  hypo
cgcaacccgttttctgagaagtgccttgagggaagagctacgggagatgacaggaaggtgaagatgcttcagcgagagacaagagatcagggagctttgaggaggaagtgatcctcagagaactggtctggattgccaggagggaagtaaaggtggagtgcgagccaaaggcactcctggcgggggtgctgcgtgagcagatgtgtgcaggtggagctatacacatggcatgtgcatggaatggcagcgagttctgtgtgccaagggcacgccagggtggacacaac

SEQ ID NO: 344209 - DNA, 207 bp, Homo sapiens
  chr20:32332893-32333100
  hypo
cgggtatgaccccagatgacgaggatgtatttctctgcgggaagtgtaagaagcaattcaactcgctgccagcgtttatgacccacaagcgggaacagtgccaggggaatgcccccgccctggccacagtctcactggccaccaacagcatctacccaccttcggcagcacccacagcggtccagcaggccccaactcctgccaatc

SEQ ID NO: 344210 - DNA, 947 bp, Homo sapiens
  chr20:32378478-32379425
  hypo
cgtcacggcccctccctgagcctgagatgacctggcaaagcgagccaaggtgcagagagtgagcagctgttccaggcagaggagaatggcaagtacaaaggcgcagagggaggagccagcgtggcatctctgaggagagcgagtgtggctggcgcagagagtggctggaagaaggcagacgacgagggtggagagagctggggccagatcacacaggtgctggtggggaaagagcctggattttattcccagcgcagggcactgttgcggggtgaaggtctggatgcttctcactgactttcccttgccctccaggcatgaagctccacaaatgcgccctgtgcagcaagtccttcagccgccgtgcccacctcgccgagcatcagcgcgcccacacgggcaactacaagttccgctgtgctggctgcgccaagggcttttcccgccacaaatacctcaaagatcaccgctgtcgtctcggcccccaaaaggacaaggacctgcaaacccggcggcccccccagaggagggcagccccccgcagttgcggcagtggtgggcgcaaggtgctgacccccttgcctgacccgctggggctggaggagctgaaggacacaggggctgggctggtgcccgaggctgtccccggcaagccgcccttcgcagagccggacgcggtgctgtccatcgttgtgggtggtgcggtgggcgcggaaactgagctggtggtacctggacacgctgaggggctgggctccaacctggctctggcggagctgcaggctggggccgagggcccatgtgccatgctcgctgtgcccgtctacatccaggcctccgagtgacggacctgaggtgtctgtttcctgggcaggcctgatgctcctgtttgggtccagggcccctgggggcagaccggtgatccttaccagtggaagcgagccatc

SEQ ID NO: 344211 - DNA, 237 bp, Homo sapiens
  chr20:32436267-32436504
  hypo
cgcagcggccctccaggcactgaagcgtaagaagaggtatgagaagcagctggcgcagatcgacggcacattatcaaccatcgagttccagcgggaggccctggagaatgccaacaccaacaccgaggtgctcaagaacatgggctatgccgccaaggccatgaaggcggcccatgacaacatgtacgtgtccacccgcccctgcgccacagggcagtgctagtcccggaatgcctc

SEQ ID NO: 344212 - DNA, 110 bp, Homo sapiens; identical to SEQ ID NO: 275077
  chr20:32450378-32450488
  hypo

SEQ ID NO: 344213 - DNA, 71 bp, Homo sapiens
  chr20:32669113-32669184
  hypo
cgtactcctcctgctcctactttctctacctgggaaatagccgctcaggacgaagctgctgctgtggtgtc

SEQ ID NO: 344214 - DNA, 266 bp, Homo sapiens
  chr20:32677630-32677896
  hypo
cgcactgtaggaaatagagtcgtgtgtccttctgcaggattgtgtccggtgatcggcatgtgtgacaagtgacatattcctctgcaaataaagcaacacacagaattacctggtggctgcagtgaggtagagaagtttctgccttcttaaatacatctacaaagaactccacaagcccaggctgagaatttagctgggcacccagaccagggaagcgcagctattcgaggggtaagaaaacacaagctgtctgctgtggcgcttcc

SEQ ID NO: 344215 - DNA, 229 bp, Homo sapiens
  chr20:33131628-33131857
  hypo
gtgagcagggccggcgtttcagggaagtggcagcttctcgggaggtgccgcagctgccatctcccgtcagcactcatgcctccgcctcagccctggccacggctccctggaattctgatcctcctctgtgagctggtattgctgtttctccaaaaattaaaaatgctcaaaggattataggttttctcctctttcgtatgtttggctctgagacactgcatgttggcac

SEQ ID NO: 344216 - DNA, 229 bp, Homo sapiens
  chr20:33134796-33135025
  hypo
gggctggcgtcctgcgcacagtggaaggactggccttaggaacagggacagtgattccactcagcatagccagggagcggcccagatggcagggcaaggtctctgtggagtgagggcagcagggaaggtgcctcgcaggagaggagagaaaacatacacttccctggggacgcgggcggggagtttgacgggttcggcaggtggcccttttgcagcatctttttcagcc

SEQ ID NO: 344217 - DNA, 134 bp, Homo sapiens
  chr20:33183817-33183951
  hypo
ggagcgagaccctgtctcaaaaacaaaacaaaacaaaaaaagttacagtggagaaacctggcagacactaacgtcaccaagtgatcaaggtaaacattagcattgagaagatatggcaatatcatgaacccctc

SEQ ID NO: 344218 - DNA, 86 bp, Homo sapiens
  chr20:33876250-33876336
  hypo
cgtgcctgctcacctgtaactgcccgccaccacttgctcacagtcaatgaggacgaacttctccagggcctgccccgtgaagcggc

SEQ ID NO: 344219 - DNA, 615 bp, Homo sapiens
  chr20:33879796-33880411
  hypo
cggtctggcccggaggcctcctgcccctgagcctcgctgagctcagggcccccgcgcacatggctggtcatgtagtccacatccagggcgctcaggaagggcagctcccgctcctcggagatgacccgcaggtaggcagcctcaccccgctccaggagggcgtcggccgccagccgagccgcctcgctgtgccgcagcaccagcggtgagctctcccgccaccacggcagcttcagctcttccacccggccccgcaggggtcccgccatgccctgggctcccaggaccccaggccccgggcctccgaacatgcctgccacgcggctgcctcacccgccggcagggcccatggcccgcacgctgggctggctgcagcaggaagaggagaccagcagaaccgccttctgcccgcccgctcgctgtgtgtgtggcagggcccccaaactgttgccaccctaaatcagagccacgctccaccctattgcccctggcctctggaacctgtcaggtcagccccacctgtctgcctgtgttgggactcgcctgcccagggaagcggcagtgccaggccctcggtgcacactcctgcctccctctcttcctcccagcaacgcc

SEQ ID NO: 344220 - DNA, 259 bp, Homo sapiens
  chr20:34147099-34147358
  hypo
cgggcacccaccgtgaggatgtacacattgccacccatgtctgtgaactccaggtcttctggccggcccttcctcctcctctgctttcgcttcttcttgccagcctgagcctcctgcgcctcccgctccacgtcctctgcctccttcagcttcactaccggccaccagcccctcaggcggcggcagcgaaacagattgcacctcggcccggccccattgcgggccagctgcacagagcagagctcggggccccgggccc

SEQ ID NO: 344221 - DNA, 534 bp, Homo sapiens; identical to SEQ ID NO: 336423
  chr20:34652354-34652888
  hypo

SEQ ID NO: 344222 - DNA, 157 bp, Homo sapiens
  chr20:35089017-35089174
  hypo
cgtctggcagacctaccacaggtgcggcctggagagatgaggcccacaaggcagcgacaggacctggattcagtgaggagaggggactcgcggggtagaagccaggaactgggaaggcgaggaggcgtgaaggcaccacctactgccaacccggctc

SEQ ID NO: 344223 - DNA, 429 bp, Homo sapiens
  chr20:35155297-35155726
  hypo
ccagcgacaagcagcgccaggaggcccgcaagagactcctggcggccaagcgggcagcttctgtgcggcagaactcagccaccgagagcgcagacagcatcgagatttatgtcccggaggcccagaccaggctctgagaccatgcaggaggaaagaaacgattttaaatcattaaaaacacaaaaactaagtgcgaacggaacagagttttctcaacctttgctatggttattctgtctagagaccctgagccaactttcaaattgacgcatacaagggctcacaatttggcttttttgggtccctcccagctttaggttatgaagattttactcacaaaaaaaatcaacaaaaatcacgaaactagaaaactttttttttcctcttgctggccgtggtggactagatagatggacgtcggcaactccc

SEQ ID NO: 344224 - DNA, 87 bp, Homo sapiens
  chr20:35441137-35441224
  hypo
cggtaaggcctgaagctccggctggggtcgggcttagagtccaagtcaccagtgcggaaagcctctcggatcctgggctcccattcc

SEQ ID NO: 344225 - DNA, 846 bp, Homo sapiens
  chr20:35443740-35444586
  hypo
cgctgttgtcgggggcctcatgcagccggaagtcagcacactcgttgtccagacacagccggaggccagccgtgaagccattggcatcagccaccaggacatcgatggccttactgaccagggcggcctgctctctcagcccaggcagcacctcggcctccctggctctgcagagtcggaccgcatgggactcgtgtgtctcgcccaggggagcaggcacacactgggcagagtccccggcctcggcgtccgtctccagcatgggccgcgtactctggcaggaggcgaggtcacagcgctggaggttggagaggagcacgcggttctcgtactgcagcttcttgaccttgccgctgagctcgccgatctgcagcttggcggccgccagctcctcctgtgaaggttcgctgagcacagaacaactgtcctccgacagcgccacgtccagctcgtgctccgagcggaacttggccagctcgttcagcagcagcttgttctggtcctcgagctcggcagaggagcgccgcagcagctcggcctcctcttcgacaaactgcaggtgtcgccgcagctctgccaagctctccccgcactctccgccacccagcgcggagaaggccaggcgtgcctcaggacccccacagccacctccatgatccttcatgtcgtccatctcagcccgcaggcctcggttctccacctccagctccacgatgcggcggctcagcaggttggcttcctcctccaccagcttcaggtgcaccttcagctcggtctcccgcgagtggggggcatcggccagctcctcggctgacagcgcgctgtccaggtccccatagagcgagc

SEQ ID NO: 344226 - DNA, 64 bp, Homo sapiens
  chr20:35929641-35929705
  hypo
cgtcaggcagcaagcgacttgggccatggcctctgacctagacttctcacctccggaggtgccc

SEQ ID NO: 344227 - DNA, 564 bp, Homo sapiens
  chr20:36760815-36761379
  hypo
cgaggagggcccgcaccttgatgaggttggactccgtaaggcagtcacggtatttctcatagaggatgcaaagaggaacgctcttctctgcagaaggggagaaaggagggtgctcatgatgcagaatcacccctcccaactctcttgcaactccaagaggcacagagaggggaaggaatgtgcttggggtcacacagcgggggaatggctgggcggatccctgaactccccactgtggctccagggttcccagcgaggagctggagagtggacactgagcagcgggtagaggacgcacttggactcccacgggccttggttctaatcctgcctttgcctcttctaatgggtgaccccgcgtgagccactccacctcccaggtcctcgatgtttggatctgcgtggcacaggcactcctaaggctgtgggaggatgagctgagcgagtgtcccggaagagcctggtgcgctcgggactcagggtgtgtgagccgcgggcccttcatcctggggaggatcagagccgacatctgcttgctgcaccaggcactgcacttcccacggc

SEQ ID NO: 344228 - DNA, 270 bp, Homo sapiens
  chr20:36764040-36764310
  hypo
cggactctcggggcctggatgagcagcgagggccgggtcctttctacaccaccgaggtgtcagggacacaggaacccccgagcccagggctgacaccactgcctgggacagaaggtgttcaggaaaggtcccgggcttctcgcctccccacgcctcttagcactcgcactcagggaggagtgagggccccaccgtgtgctggtgctgctgtgccctttccagatacctcctgagcacgcatcctctccctcagtcctcacggctgcgggc

SEQ ID NO: 344229 - DNA, 186 bp, Homo sapiens
  chr20:36765901-36766087
  hypo
cggttgcaccagccacatttcaagcgcttagcagccacgtgcagctggtggcagccatgctggataggcggtgcagactcagcacgtctccatcactgtggaaagtgcaacaggcactttccaaggcgctgggttagagacttttctttgaggccgagagcaaccagaggcacaggagaggttctc

SEQ ID NO: 344230 - DNA, 278 bp, Homo sapiens
  chr20:36766589-36766867
  hypo
cggtgcgggcacagagcaggaggcggcagacgtactcctcagcggtgttgttggtgatgtgggcaaagacgtcaaagtcactgcccatgttcatgctctggcccacacggatccgcatggccatccctgtctcctccttctcggccagtttgttcaggtggttcgcccttgtgaaggcctccctctcctctgaggaccctgtaggggttgagaagagagcctcaatcacagctggaatagatcacaggaagggggctgcaacagggcgagctgtcttc

SEQ ID NO: 344231 - DNA, 333 bp, Homo sapiens
  chr20:36767690-36768023
  hypo
cggggccattgctgtacgtaggctaccaattaaaacacacgcacacacatacacgagcctgccgggctgggaaaactggatgcttatcttcaaggctgcattaaagactctgagggcacataccctctgggtatttgtaggtgtgggtgatatcctcccgctcgtctcggcccacgctcttagtgctgatcttcagcccaacgatcagggaacggttgatggatttgtgcacagacccatcgtcctgctggatccagtctaccacgtcggcattgacctccgcaaagacaaagggcgcatcgtacttggtgctcaggtcgccctccttgatgg

SEQ ID NO: 344232 - DNA, 161 bp, Homo sapiens
  chr20:36802873-36803034
  hypo
cgccgatggttttgtctttccagaatgtcataggcatgaaatcacgcagtatacagccttttgtgtctggcttccttcgcttaccgtaatgtatttgattcatccctgttgttgcaggtatcagcggttcattcctttttattactgagtactattctgtc

SEQ ID NO: 344233 - DNA, 148 bp, Homo sapiens
  chr20:37145099-37145247
  hypo
cgaaggaaaagatgaacagatttgatgacaaataacaagcgaggaaaaattatttgcaacaaataaaatagccagagggttatcgtttctatgtaaatatttagattggtgcaaaagtaattgcggtttttgccattaaaagtaatgc

SEQ ID NO: 344234 - DNA, 638 bp, Homo sapiens; identical to SEQ ID NO: 336428
  chr20:37274639-37275277
  hypo

SEQ ID NO: 344235 - DNA, 1019 bp, Homo sapiens; identical to SEQ ID NO: 336429
  chr20:37302482-37303501
  hypo

SEQ ID NO: 344236 - DNA, 1794 bp, Homo sapiens; identical to SEQ ID NO: 336430
  chr20:37351555-37353349
  hypo

SEQ ID NO: 344237 - DNA, 2193 bp, Homo sapiens; identical to SEQ ID NO: 336434
  chr20:37433723-37435916
  hypo

SEQ ID NO: 344238 - DNA, 106 bp, Homo sapiens
  chr20:37596775-37596881
  hypo
cgtgacatggagtgggcccttggtccatccttgctggtccttgctggaccacgatgaatgattggtagaggagttgtaagcgtgaaccctggcactgccggcagcc

SEQ ID NO: 344239 - DNA, 110 bp, Homo sapiens
  chr20:37657005-37657115
  hypo
cggagcctagggcaggcaagggtttcacccgcctctctgttggctgcctatgtaggtgacccggatctggttctgaggtgcattgtctccggcttcttcgccaatgcagc

SEQ ID NO: 344240 - DNA, 138 bp, Homo sapiens
  chr20:37673303-37673441
  hypo
cggatggagatgcggcggcctctgtgcgcagctggtacggcagtcctggagagccacctgggactactcatgtgtgttcctgccccacagcccagaaactctgcttctgggggtgtgttcccaacaaaattctcaccc

SEQ ID NO: 344241 - DNA, 2847 bp, Homo sapiens; identical to SEQ ID NO: 336435
  chr20:39316787-39319634
  hypo

SEQ ID NO: 344242 - DNA, 523 bp, Homo sapiens
  chr20:39990769-39991292
  hypo
cgctcctcgaggctctgcacgcgctcttccagcatggtcccaaagccgcccactccccacccccccatgtccaacctcagacagcatccccttgctccaccctctgtcccattgagcgtctccagaccctcaagcagcccgtccacacctccctcgagcatggcagcagagagcctcgtaagctcatccccggccggggcaccggggcccctttgggtctcggtgactgcctgcagggccctctcaaggccatccatacgggcattgatcaaggctagttgcccacagcagctgcccctgccagacacgctcaggccctgcagctggctgcccagctgtgacagctcctggcgcagggccagctcccggccatcaaggctctggtgcagcctccggctggcggcctgaccctcctcacattgccgccgtacctcctgcacccgcaggtcacactcactctggacgccttgcagcttctgctcaaagccatccagcaggctcccccagagtcggtgcagccgtc

SEQ ID NO: 344243 - DNA, 1158 bp, Homo sapiens; identical to SEQ ID NO: 226148
  chr20:39994655-39995813
  hypo

SEQ ID NO: 344244 - DNA, 249 bp, Homo sapiens
  chr20:40020340-40020589
  hypo
cggggcagagagagagagcgcgcctcaatggctttcaatagttcaagtgcattcacaccaggcgcattcctgcgcttgagattcctagcatcagccaggagcggcttagtgggagaaagagctgcgacggtgatgatagtgacattccaaagttttgtggcaacatgaaggaggaggtgtgtctgcgcttgcacagtgactgcagcccttgggcagatgtggagaatgtgtgaggctaaaggctcccac

SEQ ID NO: 344245 - DNA, 252 bp, Homo sapiens; identical to SEQ ID NO: 336437
  chr20:40321474-40321726
  hypo

SEQ ID NO: 344246 - DNA, 2177 bp, Homo sapiens; identical to SEQ ID NO: 336438
  chr20:41817010-41819187
  hypo

SEQ ID NO: 344247 - DNA, 313 bp, Homo sapiens
  chr20:42088459-42088772
  hypo
cggaccacctgttcgtacagaatacaggcttattgtagaaaatctttctagtcggtgcagttggcaagatttaaaggtatgttttgtaattcaagatagaaatgatatgactaatgctttaaagtaaactccttttatattcttatttctgggaatttattatggtatatagatgttttaagatttccgagtctgaccaatcttgtctttcaggattttatgcgacaagcaggtgaagtaacctatgcggatgcccacaaggaacgaacaaatgagggtgtaattgagtttcgctcctactctgacatgaagc

SEQ ID NO: 344248 - DNA, 44 bp, Homo sapiens; identical to SEQ ID NO: 275207
  chr20:42218620-42218664
  hypo

SEQ ID NO: 344249 - DNA, 180 bp, Homo sapiens
  chr20:42804039-42804219
  hypo
gagcatttagactgcgttacatttttcccgtaacaatcccaaggccttgctctctggctcgcctgcaaggctggcaccaaagtcccttcccatggcttccaaatgccgctgtccatcaaatctccatagtctctggtttcctgggatcaccaacagacaacccgaagcggaggagctggc

SEQ ID NO: 344250 - DNA, 52 bp, Homo sapiens
  chr20:42833284-42833336
  hypo
tcctgccctccccacgccagtagtcagcggtgtctattgttcccatgtccac

SEQ ID NO: 344251 - DNA, 110 bp, Homo sapiens
  chr20:42931324-42931434
  hypo
cggggaaaaacaggagcaactctagccataaaataacccgtatatgacaagttaaattgagaaagaattacctactttcacgaagtgcgctgaggtttattgggctctgc

SEQ ID NO: 344252 - DNA, 690 bp, Homo sapiens; identical to SEQ ID NO: 336445
  chr20:43438095-43438785
  hypo

SEQ ID NO: 344253 - DNA, 746 bp, Homo sapiens; identical to SEQ ID NO: 336446
  chr20:43438799-43439545
  hypo

SEQ ID NO: 344254 - DNA, 171 bp, Homo sapiens
  chr20:43926539-43926710
  hypo
cgagagagatgcgctcacctggacagatgctgcctctgaggttctccagcaggtgcgtcatggtgccgaagtccggggcataggacacgtgcagttccgctggctccgaggcgatctcgcgcagctccgcctccaccgccttgcccacgcccacggcgtacatgacgatgc

SEQ ID NO: 344255 - DNA, 213 bp, Homo sapiens; identical to SEQ ID NO: 336450
  chr20:43976986-43977199
  hypo

SEQ ID NO: 344256 - DNA, 1360 bp, Homo sapiens; identical to SEQ ID NO: 336451
  chr20:44098345-44099705
  hypo

SEQ ID NO: 344257 - DNA, 78 bp, Homo sapiens
  chr20:44602349-44602427
  hypo
cggaaactcttgtctcaaacaaacaaacaaaaagtcctaaggagaagacctattaataaggagaaaaggtccgggctc

SEQ ID NO: 344258 - DNA, 911 bp, Homo sapiens; identical to SEQ ID NO: 336453
  chr20:44642199-44643110
  hypo

SEQ ID NO: 344259 - DNA, 1407 bp, Homo sapiens; identical to SEQ ID NO: 336456
  chr20:44936302-44937709
  hypo

SEQ ID NO: 344260 - DNA, 141 bp, Homo sapiens; identical to SEQ ID NO: 275253
  chr20:45337750-45337891
  hypo

SEQ ID NO: 344261 - DNA, 243 bp, Homo sapiens
  chr20:45833348-45833591
  hypo
cgaaggattacagcatggaaagcctcagcacagagccccacgtggggcaggcccacatcagcgacacttggaggaatataggtgacctttgcttctctagactaaagaaaataaataagaatatagatggggtcctgatgtaccctgatatgaaggtggcagctaaatgctgacctttggaaaactcaactctgattatcgccactcgactgtatagtttaaaatggacggtcggccgggcgc

SEQ ID NO: 344262 - DNA, 455 bp, Homo sapiens
  chr20:46234984-46235439
  hypo
cgtgtggtgcgtggactcccggtagtctctgagaaccttttaagggttctacatggttaagactattctcataataatgctaatgtgttatttgctattttcatcccgttggtgtttgcaccgatggtggaaatgcggtgatgcataaaattgctgacaccttaccatgaattaaggcagtggcgccagactccgctcctaggtagacattgcattcttcactgccaggagctcataaagaaaaaaaaaaatcagttttccactgaggattgtccatgatgaagcagcaacactacacctggccctcattcccttttttccttaagtacctttcactgtacccttaagtactgtcgttttaatgttctgtgtgatgagaatggaaaatgtgcacaaagacttctgcctgccaaagtatgatggctgtctccgggaaaagcacttgcgcagtttgc

SEQ ID NO: 344263 - DNA, 323 bp, Homo sapiens
  chr20:46365437-46365760
  hypo
cctgctcacctgtccggtagccagtgctattgaggtacacggcaaaggtgcggctctcgtgctgtgcctgccaggagggcgaggagcagttctcattgttggtgtaggtgttgtggttgtggacgtacttgccagtgaggatggaggagcgtgaggggcagcacatgggtgtggtcacgaaggcgttgatgaagtgcgccccgccctgctccatgatgcgccgggtcttgttcatcacctgcatggaacctgcaagtcaagggtggaagtaaggcgcagggcaggagacccgggcggcaccggcaccagggggctctcagcac

SEQ ID NO: 344264 - DNA, 311 bp, Homo sapiens; identical to SEQ ID NO: 275279
  chr20:46823364-46823675
  hypo

SEQ ID NO: 344265 - DNA, 234 bp, Homo sapiens
  chr20:47252934-47253168
  hypo
cgacccggcctgggcgggcaccagtgggtgggccagcggggccgccctcccgccccactcactcaccactgtggctggcgagagcagggactggcagtgcagcaggacgcccgtggccgccacctgctccagccacttgcggctggcgtcgcggctgctctcctcgtactcgccattgttgttgtagcggtagcccagggccgccagcagctgcttggagaaggtgcacacggc

SEQ ID NO: 344266 - DNA, 170 bp, Homo sapiens; identical to SEQ ID NO: 275289
  chr20:47296131-47296301
  hypo

SEQ ID NO: 344267 - DNA, 1468 bp, Homo sapiens; identical to SEQ ID NO: 336459
  chr20:47443693-47445161
  hypo

SEQ ID NO: 344268 - DNA, 129 bp, Homo sapiens
  chr20:47688836-47688965
  hypo
cggcttattggagctcttaaaatcccagatttgtgataatgccgcactctatgcacaaaagtacgatgaagaattccagcgatacctgcctcgttttgttacagccatctggaatttactagttacaac

SEQ ID NO: 344269 - DNA, 51 bp, Homo sapiens
  chr20:47713222-47713273
  hypo
cgttggtttgtgttgagcgtttgcacggtttggataatcttaaattttgac

SEQ ID NO: 344270 - DNA, 67 bp, Homo sapiens
  chr20:47765244-47765311
  hypo
cggtgaaaactcagcccagaagaacatgtctacaacagccgctgccctcaggactgtgccaaccaac

SEQ ID NO: 344271 - DNA, 46 bp, Homo sapiens
  chr20:47766303-47766349
  hypo
aaatggaaatgcagcgtaacaaaagaaaaacaaatcgctcctgtgc

SEQ ID NO: 344272 - DNA, 260 bp, Homo sapiens
  chr20:47836982-47837242
  hypo
cgcttagcagcagagggatctctgcgatacagtcacgttagagacctcccttgcttaaaactctccagcctgctggtagagacccccgggcctgtccaccttgcaaagactcctcaggcagcgtctgggtcccgtacactgtcgccatttccccgatgtcccctgtgggcgcgggcggccacccaggcctgctggctgcggccccctctcggacaggccttggctcagcccgctgcgtgggaggtcatgggccagtcccc

SEQ ID NO: 344273 - DNA, 224 bp, Homo sapiens
  chr20:47905365-47905589
  hypo
cgcaggtacaatatgggattcaataaaagtacagaattaaagttgtcttattagagattgggaagtttcccagctccgtttatcggtacttggccgtaccgataaaggggatggacttggagtgaccaggtcttagtcacatgtattttcataccctaaacaagaagcggtatagaccagaatggagcactgattgtaatccaccttctttcttagaaactggc

SEQ ID NO: 344274 - DNA, 876 bp, Homo sapiens; identical to SEQ ID NO: 336460
  chr20:47934774-47935650
  hypo

SEQ ID NO: 344275 - DNA, 742 bp, Homo sapiens; identical to SEQ ID NO: 336462
  chr20:48100303-48101045
  hypo

SEQ ID NO: 344276 - DNA, 72 bp, Homo sapiens
  chr20:48350345-48350417
  hypo
ccgtttacaatactttctaaaacaatgtaggtagagaagagggctaattataatcaaacaaacaaaggtaac

SEQ ID NO: 344277 - DNA, 521 bp, Homo sapiens
  chr20:48498753-48499274
  hypo
gagtgagccgtgctcgctcattttctccacttcttcaccgcctgtccacggggctggaattggccttggcaggtcaccagtgacctcccgcagccagacctggaggggaggcgtccgcccccgtcctagcctacctccttcccactgcccctaccttctggcgaggaccacttcactctcttccccggcctctgggccatgctcctcctttctctcctttgacgtctccttgggctcgtcccccttcgctgacccctcaaatagtggcttcttcaggacttggccccagccccacttctgttcacgtgttctgcacttcactgagtgcgctcacccgtccactggccttcacttccacctagtcccaaagctgttcccgcgaacccagacctccctctgggatccgtactcctgtttccagctgcctgtttggatgccgtggggatgctgtcatccctatgcctttgcatcccccttgcccaagaaatcctactttgaattgcccggtggcctggctagcc

SEQ ID NO: 344278 - DNA, 339 bp, Homo sapiens
  chr20:48504343-48504682
  hypo
ttggttgtgtctctcgacccaggacctgcaccacgggcgcatccagatgaaaactctcaccaacaagtggtacgaggaggtacgccagggcccctccggctccgaggacgacgagcaggagctgctctgacgccaggtgccaaggcttcaggcaggcaggcccaggatgggcgtttgctgcgcacagacactcagcaggggcctcgcagagatgcgtgcatccagcagccccttcaagacataagagggcggggcgaggtactggctgcagagtcgccttagtccagaacctgacaggcctctggagccaggcgacttcttgggaaactgtcatctccc

SEQ ID NO: 344279 - DNA, 670 bp, Homo sapiens
  chr20:48524519-48525189
  hypo
cgggccagaaacggttcagaggtgatgctggagagacggggaaggttcggagcccggaaggatctgagagcacaggatggatgggatcagactggcatagcctctcaggagggactgccaggggcaggaagagagaaggagggcctgtatggaggctgctccaggacctcaccttgatgcttctgaattccttcttccacgggtagaggaagaggttgatgcccaccgtctccagcatgctgaaggcgccgtgcagagcccgcaggctagaggagctgagcgagcgcaaggagctctccaccacctcatagaactggatcagccggaatcgataaaagggatccaccttgtgcaggctgagcagggttgaggctgccacccgcaggcactcatcgctgccaggccgctgcctgctggtggtggtatccactttgctctcatggaactgcacgtacttccgaaataagtcatccttgaatttagtatccattgaactgggcttccccatccgatcgaggggggctaccttatctcctccatggcttctggattagaggcagggacatcactaaaagcatggacatgttgccgcctggaccagcggagtgctctggaaggaggggaacaagaagcatgtcattcctcgatacggtcgcgcttcggcttcagg

SEQ ID NO: 344280 - DNA, 982 bp, Homo sapiens; identical to SEQ ID NO: 336464
  chr20:48598700-48599682
  hypo

SEQ ID NO: 344281 - DNA, 183 bp, Homo sapiens; identical to SEQ ID NO: 336465
  chr20:48771177-48771360
  hypo

SEQ ID NO: 344282 - DNA, 158 bp, Homo sapiens
  chr20:49178954-49179112
  hypo
cgtgtgcctcttggcctgccaccatggttccctgcctggttttgtgtgtcagctctgccgcttaagaactgagtggcttcgggcaagttgttctctctcataggagtgtgtgaagatgaagcaacataagctgcttagcccagcgcccagtacctcac

SEQ ID NO: 344283 - DNA, 175 bp, Homo sapiens
  chr20:49197887-49198062
  hypo
cgtcactgcccgagaaggacgaggaccatgcactgagttactggaagcccttcctggtcaacatgtgcgtggctacggtcctcacggccggcgcttacctctgctacagggtatgtttccactgacagacgcgctggcgagatgctcgtgtgcagagagcactggccgctagccc

SEQ ID NO: 344284 - DNA, 241 bp, Homo sapiens
  chr20:49206899-49207140
  hypo
gcagtggagtccagcgtctgcggctgcaaagggaaacccaggagtgggtttgccctcactcagtcgagtggctgcaccttcaactgcacgggtggggcgatggaggggcccaggtgtagagttggctccagggacctgggcccagagccaaaagagaatggccgcctttccatctgcaggtggctctccaaagtgtctgctgctttgggaagacagactgggagtaggatcgggtcctccc

SEQ ID NO: 344285 - DNA, 299 bp, Homo sapiens
  chr20:49218571-49218870
  hypo
caaagcagggccaccgcccggggcggggtggccataccttcagccggtcccggaagccgaggacctggtactccagctcccggagctggggctgggtggagtccgtgggcctcagcaactccaggacctcctgcagaggcccctcgagggccacgccaggcccgtcctctctgtccccggttgccccttcctcgtggccgttctggctactcgaggctgtgccgctgtggaacagggagccctgtggcaggctggggctctcccctcctaagttcctccagccaggctgctctgcaaac

SEQ ID NO: 344286 - DNA, 475 bp, Homo sapiens
  chr20:49223746-49224221
  hypo
cgatgagcaggggacactcggttcagaccccttgtctgtaaaaggggtgcgcttacagaagaacccccatgtggaacatgcacagggaagggtgggaatccaggcgagcgcatgggagcaccgaggcaagtgatgctcagcctggcccgtgatgctcagcctggcctgtgtccagccttgcactcggagtaggtaggtccccatagatccatttgcctcgaagaaacttgcttataattatttgcacaaaggcctggctcgtggcacctgggcctggcctgaccagaaggcctagagctcagaggctctgcaagtgcccacttctctgcccagggtgtctgcagacccgcaggcaccctgggtcctaggcttggatggcactgagctgcccgccaccctgtacacttcaggggcccctgggcgaggggtattctcagccctaccagacaggtgaggaccccgagggtgcaggtgg

SEQ ID NO: 344287 - DNA, 578 bp, Homo sapiens; identical to SEQ ID NO: 336467
  chr20:49224900-49225478
  hypo

SEQ ID NO: 344288 - DNA, 305 bp, Homo sapiens; identical to SEQ ID NO: 336468
  chr20:49225991-49226296
  hypo

SEQ ID NO: 344289 - DNA, 158 bp, Homo sapiens
  chr20:49236444-49236602
  hypo
cgcttccccaggaagagacagagaggaggcgaggtagaggaatgcacttcttaaaggcagcacacagcccagccttacttgaggcctcttttcaatgcttcgaagatcttcttcacctgctggggcttcgggtctgcacagaccgaccccttccgcag

SEQ ID NO: 344290 - DNA, 146 bp, Homo sapiens
  chr20:49240816-49240962
  hypo
cggtcagggctgcagactcgggaaaaggcaggtttctgagaggttagggaccccggcaggtgggcagcaggcagtggggcaggagctcgctcactcccagctcctgcctccagcccccaacaggtgtgcaccgttggcccagcccc

SEQ ID NO: 344291 - DNA, 141 bp, Homo sapiens
  chr20:49247308-49247449
  hypo
cgaaggaggcgctccggcccacgacccccacggcccctgtgtccccaggggacaggaaccgcaacctcaccgacatggtggtcacctgcaaggagaggacaggagagtcagcctggcatcaccatccagcgagtgccgtcc

SEQ ID NO: 344292 - DNA, 238 bp, Homo sapiens; identical to SEQ ID NO: 275357
  chr20:49261866-49262104
  hypo

SEQ ID NO: 344293 - DNA, 70 bp, Homo sapiens
  chr20:49284107-49284177
  hypo
cgtgagccaccgcgcccggccgctgctttaagttcttaacacgtcctcaccgcggctcagctcactgtac

SEQ ID NO: 344294 - DNA, 138 bp, Homo sapiens
  chr20:49286725-49286863
  hypo
cgctctgagccaaggtagagccaagtcaaccaggcaggcggaggcccagagcatgagttttacctactgccggtttcggccaaaatgccagaaagccaagcagcaatcttgggcatcggacttggctagaaatccctc

SEQ ID NO: 344295 - DNA, 795 bp, Homo sapiens; identical to SEQ ID NO: 336470
  chr20:49639051-49639846
  hypo

SEQ ID NO: 344296 - DNA, 77 bp, Homo sapiens
  chr20:49969391-49969468
  hypo
cgtcctaatttttctataatatacatacattatttgagtaagaaaaataaacatgtttgtagcgggatcagatttac

SEQ ID NO: 344297 - DNA, 295 bp, Homo sapiens
  chr20:50208595-50208890
  hypo
cgtttattctttctttcttccggaggaatttgaacacagcctgggctcccgcagttcatgactgcaaaaggcttcgccttcgaaatctgacccaagtgggcatattcgggaaatgtggcagcttcgaagaacatgagccagttaagttttctctacctattcttcctccgcactcacctcccagttctaggcagctggtttatgcagcctgctttccaggactgtcgaaggaaaaggcacctctgccaaaagcaccccaggctacagggctgaacagagacccatcgtatcattc

SEQ ID NO: 344298 - DNA, 1642 bp, Homo sapiens; identical to SEQ ID NO: 336474
  chr20:50383675-50385317
  hypo

SEQ ID NO: 344299 - DNA, 932 bp, Homo sapiens; identical to SEQ ID NO: 336478
  chr20:51589126-51590058
  hypo

SEQ ID NO: 344300 - DNA, 162 bp, Homo sapiens
  chr20:52214819-52214981
  hypo
cgtgaacgcggagtctgctgttggaaatgtgttgggaagggagagttcccggtaagaattatgtatttaggagctttccaaatactgatggcatgttgagccatcagactggataaaatcacacgaaagaggtgctagtattgggcccttgggtggttcagc

SEQ ID NO: 344301 - DNA, 209 bp, Homo sapiens
  chr20:52234410-52234619
  hypo
cgaagatgccgaatcagctaaacgggaggtggcttgagtaggatttgctgccagctaaagcgtgagatgctattgcatgtgcaaggcaaggctttcttcagcggcatcatcttccaaaatagcccaggtatatctcaccagaattaaaccgggctgcaggtggcctttcctcatacttgaccaatgacgtgattaatttagatctgttc

SEQ ID NO: 344302 - DNA, 174 bp, Homo sapiens
  chr20:52374073-52374247
  hypo
cgcgcccggccttaagtttgttttcaaagtgcgtttcaaacttaaataaacccaggctcagcaatgaaaggattcaggttattacattctgattgtccagggagcaggcagtgcggctggctccccgggagaatgctggatcgttcattcagcgagtgcgcatgcctagaagac

SEQ ID NO: 344303 - DNA, 62 bp, Homo sapiens
  chr20:55026786-55026848
  hypo
cggcggagtgacgatgagatttaaacaacgcactcgcgccctctttggaaagctactaaccc

SEQ ID NO: 344304 - DNA, 1973 bp, Homo sapiens; identical to SEQ ID NO: 336485
  chr20:55204896-55206869
  hypo

SEQ ID NO: 344305 - DNA, 46 bp, Homo sapiens
  chr20:55936567-55936613
  hypo
cggatttattcggaaatagttcttgaaattgagcatacgtgcatgc

SEQ ID NO: 344306 - DNA, 61 bp, Homo sapiens
  chr20:55959114-55959175
  hypo
tgacaatccccagcatcctacgggcccgaatccacactgcggattccgtcagctcactggc

SEQ ID NO: 344307 - DNA, 160 bp, Homo sapiens
  chr20:55959404-55959564
  hypo
cgtcagcatgataggtttcttcctcctcttatgaatcccagtgtcaagatacagcctgatcgccccttaatacggtgccgccattactccagacccctctgcaagcattggtcattcatcagctttcacgaggtgaactggggacgaggcaggggcttgg

SEQ ID NO: 344308 - DNA, 226 bp, Homo sapiens
  chr20:56001391-56001617
  hypo
cgcttcgagcacaggccatttgctctgcacggcacctgtctctttcccactaaatgcatcttgaccaggccccttagcacacacggggcttgctctttctttgccgtcagctgcgtgctatctgtggcgtgcatggggcaggtggggtgggcgttcccatccccagcgatggaggcaggagctctttcaggctcacctggaacacagtcacatgtgctggtctgtc

SEQ ID NO: 344309 - DNA, 363 bp, Homo sapiens
  chr20:56126192-56126555
  hypo
cgattggaatgagtcgggccaggtggaaaacgaatctggccattcatcagagctgtcaggacgggtctctcaccagaagtgtttaccagtgttcaccatgagcttccgagttctgctaacgggagcttcgactgtaactcagaggacttggaaaacgacttgggtgacttagcgtacctatgttattgaattcgcctaagtgttgcgactcttgatgctgacacttacgagaatgcacagtgggacttccagaaaatttaacagtgcagttcagaaaaatgcctccgtgggggtggggggctttgaggaagtccaggtggcatgggactggggaggggaagaagcaaggagcacagcggcgtc

SEQ ID NO: 344310 - DNA, 301 bp, Homo sapiens
  chr20:56772089-56772390
  hypo
tcttaccaccaccccgtcaccggggccacctctcctgggcctcctcctctcccactccaccccgtcaccggggccacctctcctgggcctcctcctctcccactctgccccgtcaccggggccacctcttctggccctcctctcccactccgccccgtcaccggggccacctctcctggccctccgcctctccctcgcttcttttctccttgctaggtcagcagatctttgaggacggagccaggctcacacttctgtggcactgatgctgtcccaccagcacaccgtcgtaagcattcac

SEQ ID NO: 344311 - DNA, 990 bp, Homo sapiens
  chr20:56780210-56781200
  hypo
cggcctctgtgggattaagacgtcggttccaattcttcagcctctctgcctctgcccctcgccgtggcctcatcggagggaggcatcgctccctgaccctcgactttcagcttggccactcgactcgcttggcttcccacctacagccaggagtgacggcataacaggtctgcgcccgcccctgaagacgcctcccacgtccccgctccccacgtccgcgcccacacctgaagacgcctcccacgtccccacgtctgcgtccgcacctgaagacgcctcccacgtccccgcaccccacgtctgcacccacacctgaagacacctcccacgtccccgcaccccacgtccccacgtctgcgcccgcacctgaagacgcctcccacgtccccgcaccccaagtccccacgtctgcgcccacacctgaagacgcctcccacgtcccgtctgcgtccgcacctgaagacgcctcccacgtccccactccccacatctgcgcccacacctgaagacgcctcccacgtctgcacccacacctgaagacacctcccacgtccccgcaccccacgtctgcgcccacacctgaagacgcctcccacgtcccgtctgcgccgcacctgaagacgcctcccacgtccccactccccacatctgcgcccacacctgaagacgcctcccacgtctgcacccacacctgaagacacctcccacgtccccgcaccccacgtccccacgtctgcgcccgcacctgaagacgcctcccacgtccccacgtctgcgcccgcacctgaagacgcctcccacgtccccgctccccacgtctgcacccacacctgaagacgcctcccacatccccgcaccccacatccccgcgtctgtgcccgcacctgaagacgcctcccacgtcgacgcctcctaggtctccacttcccacgtccctgcttgtggagcctgtgccccggccgacctgctggtgccaggacagtgagagac

SEQ ID NO: 344312 - DNA, 431 bp, Homo sapiens; identical to SEQ ID NO: 336494
  chr20:56784811-56785242
  hypo

SEQ ID NO: 344313 - DNA, 307 bp, Homo sapiens
  chr20:56941603-56941910
  hypo
cgatacaggtatcaaaatatcataggcacctcaaagacatgtacaactcttaatttaacatttttgaaagaaaaaaaaaccggccagagcattaaaacaaataaaataagaaacacagaggccagtgttaggtgaagaactccgctgcttcagaaagagaatagcagcgctcgcttaccgtgggaacacggccagttaacaaaatgggttttggttttttgttttgttttgttttaccattggtaataagatagttaacataagtggtcagaacttcgctgaatttgtaataaagcatttgttaagc

SEQ ID NO: 344314 - DNA, 64 bp, Homo sapiens
  chr20:56999390-56999454
  hypo
cgttgaaagcggcccatgtgacagtgcatagcagacagtggacgggctgggcaagaacaccacc

SEQ ID NO: 344315 - DNA, 183 bp, Homo sapiens
  chr20:57009378-57009561
  hypo
cggtaggcttgcagtagtgaaagatccatggactaggaatcagaagactgggtcctcggccttattcccagctctgtcatgcgtgattttgtggctcttaggttggtgacctgcaaaatggagatgttggtcatccttgcttacttcaccaggggcgtccatcctaagacataagagaatgcc

SEQ ID NO: 344316 - DNA, 198 bp, Homo sapiens
  chr20:57154976-57155174
  hypo
tgagaattcagaggcgccaagccccctgcccgtccccatggagccttctgagggctgcaacgtggatattttccaggcaggaattaatcacggcttcgttggcgctccaagccagaccctacataataccttctataaagagccttattacaccggaaggttgtatattatattcttcactgcacaccagctacgtgc

SEQ ID NO: 344317 - DNA, 982 bp, Homo sapiens; identical to SEQ ID NO: 336496
  chr20:57224597-57225579
  hypo

SEQ ID NO: 344318 - DNA, 119 bp, Homo sapiens
  chr20:57240808-57240927
  hypo
cgtgccacgcttgagcaccgttgggcttaatcacggctcctggacgtgctgggattagtgaatggggcctagtccttccagcgtggtcattgcctaagatgcgttccctgagtggacac

SEQ ID NO: 344319 - DNA, 280 bp, Homo sapiens
  chr20:57268860-57269140
  hypo
cgccaccgtggctgccctgccctgcagggtgagccggcacaacagcccctcggccgcccacttcatcacgcggctggtgcggacctgcctgccgcccggagcgcatcgctgcattgtggtgagtgcttcgagaggaggcagccacggtgctcctagtcgggcagcggtgagctcgggcctggggagctcacagccctgctcagactgcagcgcacgcccagagggctgtggacgttatcatccctgctctgtagacagggaaacaggtccagagagacgc

SEQ ID NO: 344320 - DNA, 301 bp, Homo sapiens; identical to SEQ ID NO: 336498
  chr20:57415539-57415840
  hypo

SEQ ID NO: 344321 - DNA, 430 bp, Homo sapiens
  chr20:57571504-57571934
  hypo
cggcagccgcgcatgtcagagaagggtctggccccaaaagccactcgcgcggtggctgagacagctggagcaaggaaccctctgtcaaggccccagtttttagctaaacgtaaacagaaccattcaagcgagaggagtaccaggacgtttttttctaggaatgaccttaagaaaatgaaaacatcttacccatggttcaccccatgaattccggacaatccagtactcagtcccatcactgatgccccacccagccacagaaacgacatggtttatatatgtggtgtcctggtattcggcatagatgcctccggtgtagttagccagtctttctgttgccattattccacagctgagagcaagcagttaaagaattaccacttttaaattgagagaatttaccgtcattagaaataatctgatatggctg

SEQ ID NO: 344322 - DNA, 105 bp, Homo sapiens
  chr20:57615397-57615502
  hypo
cgccaaagtagaatcaggaggacctggctatggctcactgaccggtccaacttcttcacctttgaaacgaggtgaggacattattaactccactggcgcagcatc

SEQ ID NO: 344323 - DNA, 380 bp, Homo sapiens; identical to SEQ ID NO: 275504
  chr20:57767483-57767863
  hypo

SEQ ID NO: 344324 - DNA, 327 bp, Homo sapiens; identical to SEQ ID NO: 336499
  chr20:57797949-57798276
  hypo

SEQ ID NO: 344325 - DNA, 748 bp, Homo sapiens; identical to SEQ ID NO: 336500
  chr20:57875361-57876109
  hypo

SEQ ID NO: 344326 - DNA, 273 bp, Homo sapiens; identical to SEQ ID NO: 336501
  chr20:57978801-57979074
  hypo

SEQ ID NO: 344327 - DNA, 778 bp, Homo sapiens; identical to SEQ ID NO: 336502
  chr20:58180008-58180786
  hypo

SEQ ID NO: 344328 - DNA, 354 bp, Homo sapiens
  chr20:58507061-58507415
  hypo
cgacttcggaaaccgagaacagaataataatgtttcaagagaagcgtggatttacctgacaagtaagcaggctctgggctccagtctactgaactgggggactggttagcgagcaacacagagaactagtaagatgatgattgtgtatctgcaggcagataaaagcgttacggataaaaacaacaacaaagaaaacaatttggcagatgggggaggcaaagattttcccccaaaggaaaaactgctgaatgaatgcaagcagcagtagataattcaaagtcccctctgccctggtaactaacatagctaaggtgtccaaaaagacattaaaggtgaatgaaggggagggaaggc

SEQ ID NO: 344329 - DNA, 580 bp, Homo sapiens; identical to SEQ ID NO: 275510
  chr20:58507741-58508321
  hypo

SEQ ID NO: 344330 - DNA, 474 bp, Homo sapiens; identical to SEQ ID NO: 336503
  chr20:58514041-58514515
  hypo

SEQ ID NO: 344331 - DNA, 107 bp, Homo sapiens; identical to SEQ ID NO: 336504
  chr20:58515465-58515572
  hypo

SEQ ID NO: 344332 - DNA, 2254 bp, Homo sapiens; identical to SEQ ID NO: 336505
  chr20:59826957-59829211
  hypo

SEQ ID NO: 344333 - DNA, 433 bp, Homo sapiens
  chr20:59872770-59873203
  hypo
cgcactttcctgccctctcgcgtgtatgatagagacattagcgcgtgtcagcccctttaccggggcttcccattgtcttagcgtgctcctttcatctaatgagcaggcgcccttggctgaacttttcaggaatccgtggggaaccagagtgaatatattatggcgctgtggagcgaatgacaatcgggcagtgctcgcctgtggccgtggaggtatctgcgccaccgcaaaatgcctcacccttcttttgggttttggggtttcaggtcagctctgggggcccgttatcccgtgtcaaggaggcccacgcaggcacccgaggaaggctttggctatcacgaggtggcctttgtgcaggcgggttcagcaactttggcattcattggggcagcctgttactggtgcttggagtaagtgaagagtgcgattgggc

SEQ ID NO: 344334 - DNA, 211 bp, Homo sapiens
  chr20:60094644-60094855
  hypo
cgaccccgaggagggctcatagcactggccaggcagcgctgcctctcgggctgctgcgccagcatcgcagggcgattaccctgtgctgctctctagatgggtgtctattctttcgttgttccttaatcgaatgccactagttcctgggcgcaggacgccagtgtgtcttcacaggcagactgcgtggtggtggtataatccccattaccac

SEQ ID NO: 344335 - DNA, 146 bp, Homo sapiens
  chr20:60173821-60173967
  hypo
cgagggactggctgcggggcaccccacatggcggggtcctccatggaagtgtggtcggagtacccgaggccccttccctactgcaggcactgcccgccaagcttccctggatggctcctccagggctgacactgcgcagcctgggc

SEQ ID NO: 344336 - DNA, 425 bp, Homo sapiens
  chr20:60226081-60226506
  hypo
cgtgcttggccgtgcactggtgtgcttgtgtgagtgagttagcgccgtgcttggccgtgcactggtgtgctcgtgtcagtgagttagcaccgtgcttggccgtgcactggtgtgctcgtgtgagtgagttagcctcgtgcttggtcacgcactggtgtgcttgtgtgagttagcgtcatgcttggccgtgcactggtgtgcttgtgtgagtgagttagcatcgtgcttggccatggcagtgagttctgattgcagggtctcaacgctcagggaaggacgagtgccccttctgtgccattttccaaaactctagggatattgagtcttgctcaggtcacccaaaggcacatgtcccagccccgagtcaagcgtacaggggcctcccgggagcacccttgtgcctgtcgcggcgttcctctccttct

SEQ ID NO: 344337 - DNA, 720 bp, Homo sapiens
  chr20:60238324-60239044
  hypo
gacaaatgagtccacgcaggaaaggagtggcacccgcaggaggcctgtgctgcggagctcctgggagggtgacgctggggcaggggctgctgcggacaagcgttgggaggcctctctgaggaggcagtgtttgcgctgaaacctagaaaaagagctgcgtaaaagacaataattctgaaggctctgggtcgggggcatttcaggcgagggtcctagaaatgccaatgctggggatgccgccgagtgggtcagaggggccggaggaaggtgaacagggcagggggcagtggggctggattttatcccaagtgagtcgggagctgctgggacggcaggaccgggtgtgtgtgtccaagagaccatcttggctgcccaggggaagcggggactcgaggagagcagggagtgctgtcttcccggcgggagctggcggtactgaggaaggacgtgcagaaccaggcagggctgacagacgcggggtcgggggaagatcaggagctcccggtgtccaggctgcacaatgtgggcaccactgaacacggggtaaaccaatcaccagtcactcccacgctgggtcttccagctccctcgaggccgccctggccctccacactcccaccgctggcgccagcatctgtgcccgcggcagtttagagtgacactgtcctctgtccagcaccggtccacgttgaggtgtctgtgtgccaccgggacccttcc

SEQ ID NO: 344338 - DNA, 366 bp, Homo sapiens
  chr20:60273115-60273481
  hypo
tctcacactgccacactgcccgagacagcagccattagccgcacgttgctggacagcacagacctggcacgtgtcgtccaccctcggaggggtccccttgcacgggctccactccggacggtccctgagactctcccgccctcacgcctgctctctaagccaagcacaaagccaagtgcagcccccactgaccattccagcccatgccggcgtctgccccaggccccagatccgtcctgctggtgcgattgagggcacagagtcgagccttcaagtaggtcttctaatatggctccattcatgcagaaacctcccagtggggctgtgccaggcacttggaaagtgggagccgcagccctgccgtcc

SEQ ID NO: 344339 - DNA, 546 bp, Homo sapiens
  chr20:60275663-60276209
  hypo
cgtacggcctcactgtggggccacacatcaccccatacagcctcactgtggggccacacgtcaccccatacggcctccctgtggggccacacatcaccctatacggcctcactgtggggccatgtctgtcttcatgggtgtcttcttcatgtcttcttcatgtctgtcttcatggcccaggcctggggcagagccggggttgccggctcagcgggtgagtgccacatgagtcttgccttcaaagctggagtgcctgatcttgacagcggaccgacatcttcaagggaacggcggctccccccttttttgcagaacactttcaaaggtgtattcgtgttccagggccgccataacagagcgccacagaggggcggtgtaaacagcagaggtgtatgctctcgctgctctggaggatggaagcttaaagccgaggcatcggcaggggtggtttgacgaaagccgtcagagagctcggagggaagactctgttccaggcctctctcctcggcttgcaggtgccatcttcttcccgcatctcttcacatc

SEQ ID NO: 344340 - DNA, 333 bp, Homo sapiens; identical to SEQ ID NO: 275534
  chr20:60281572-60281905
  hypo

SEQ ID NO: 344341 - DNA, 246 bp, Homo sapiens
  chr20:60313850-60314096
  hypo
tcctcctctcaccaccttcacggcaatcccgctcctcctctcaccaccttgacgaaggcgtgaaacgtccctgaggctcagcttcctatctgcgagatgggccagttctactcgccagcgctgccttcccgtgcctggcagtgcacccgccgcgtggaggctgcaggggctgggacaggacgtgtgatctgcattggggtcgcagaggcggcttttcagggcattgtaggtgtttgctggtacatc

SEQ ID NO: 344342 - DNA, 178 bp, Homo sapiens
  chr20:60316318-60316496
  hypo
cggtcccccgggcatcacttccccaagccacccacggagctgcctttgagggcgctgtcatcagtttcatccagggtctctccggcagggaacgcctttcacctgcaaagtccttggttcatatggctgacgccaccgctgtttcctgcctggtcattcagacgttggtggcccattc

SEQ ID NO: 344343 - DNA, 383 bp, Homo sapiens
  chr20:60352666-60353049
  hypo
cgcacacacgtgcatacaaaaacacacgtctacacacgcacacacgtgcatacaaagacacacacccatacgcgcacacacgtgcatacaaaaacacacacccacatgcgtgcacacgtgcatacaaaaacacacacccacatgcgcacacacgtgcatacaaaaacacacatccacatgcgcacacacgtgcatacaaaaacacacatccacatgcgcacgcacttgcatacaaaaacacatccacatgcgcacgcacgtgcatactatacacacatgcacacacgtgcatgcaatacacacatccacatgtgcatacacgtgcatactatacacacatgcacacacgtgcatactatacacacatccacatgcacacacac

SEQ ID NO: 344344 - DNA, 349 bp, Homo sapiens
  chr20:60373189-60373538
  hypo
gccctctcaccctgcgcctctcctgagccagcagccataacccccgccccgcccggccctgccccgggctctgtggcagcacctcctgccaggagcaccctcagctccctgcgggagcacgcagcaacagaggggagggggtgtggtcccgcctcgcacgcatccccgctgtgggcggcccctcgctgcgcctcagcctctccctggccccacgggcctccacactcctcacatacagaatgggctgtgggtcctcagcccgtccggaccctccgctcctttcctgctacctccgtgcgcagcaggccttgtggggtgtggtccagagcgtggccccggggtgcatcgc

SEQ ID NO: 344345 - DNA, 307 bp, Homo sapiens
  chr20:60448755-60449062
  hypo
cccatctgagctgctgtctccgttccaggcacctacgtgatgaccgtcacggccaacgatgctgacgacagcaccacggccaacgggatggtgcggtaccggatcgtgacccagaccccacagagcccgtcccagaatatgttcaccatcaacagcgagactggagatatcgtcacagtggcggctggcctggaccgagaggtgaggcggggtggggtctgcgtgcaggcgggtgagctcctggtccccgcaggacacccacaggaccctcggggagcctctccagtggcgccgtcggggagtgatc

SEQ ID NO: 344346 - DNA, 205 bp, Homo sapiens
  chr20:60470129-60470334
  hypo
cgcatggcccgtgcagggcaggaatgcactggcgtgcggcacagcctcctctctctctgcggctctgcctgacgggcacttggcagatagcgtgtaagaaaggccctgggcagcggaggctgctgtgtggagtggctcgattcctgatgtgcgcagtaggagagaggccggggctcagtcagggaggggaccggcggcggaggtc

SEQ ID NO: 344347 - DNA, 244 bp, Homo sapiens
  chr20:60477321-60477565
  hypo
cggggcctctgaaaccaggacccccggggcctccattccaggagaagcagcctcactctgcccttcaccagccacggagacccggggtctatgggcagtgccctaaatgccagccatgccctggggcacgcggtcaccaccccgcagaaccgctcccgtgctcgttgcaggagtgcaagggcagatccacagaggagcgtgcggggccccaccttcccagggatttgcaggcaaatgagcggcc

SEQ ID NO: 344348 - DNA, 285 bp, Homo sapiens; identical to SEQ ID NO: 275548
  chr20:60485026-60485311
  hypo

SEQ ID NO: 344349 - DNA, 326 bp, Homo sapiens
  chr20:60485341-60485667
  hypo
gtgaacactcgagctgggctgacacggtgtgttctgtttgtgaacactcgttgagctgcacatatgctacgtgcacttctctgtgcatatttacacttaacacgggtttgtgacattctttccttccattttgcagtttgcaggggaggtccccgaaaaccgcgtggagaccgtggtcgcaaacctcacggtgatggaccgagatcagccccactctccaaactggaatgccgtttaccgcatcatcagtggggatccatccgggcacttcagcgtccgcacagaccccgtaaccaacgagggcatggtcaccgtggtgaaggtgc

SEQ ID NO: 344350 - DNA, 203 bp, Homo sapiens
  chr20:60494919-60495122
  hypo
cgcggtgattgcatggaagcttgtgattgtgtggaagcatggtatcgtgattatgtggaagcgtggtgtcacggtgattgcgtggaagcgtgttgtgattgtgtggaagcgtggtatcgcggtgattgcatggaagtgtggtgtcacagtgattgcgtggaagcgtgtcgtgattgtgtggaagcatggtatcgtgattgtgt

SEQ ID NO: 344351 - DNA, 114 bp, Homo sapiens
  chr20:60495152-60495266
  hypo
agcatgttgtgattggaagcgtgtcacggtgattgcgtggaagcgtggttttgtgattgcatggaagcatggcgtcacagtgactgcgtggaagcgtggtgtcatggtgactgc

SEQ ID NO: 344352 - DNA, 406 bp, Homo sapiens
  chr20:60495300-60495706
  hypo
cgtggtgtcacagtgattgcatggaagcgtgtcatgattgtgtggaagcatggtatcgtgattgtgtggaagcgtggtgtgattgtgtggaagcgtggtgtcatagtgattgcatggaagcgtgtcgtgattggaagcgtggtgtcgcggtgattgtgtggaagtgtggtgtgattgcgtggaagcgtgtcttggtgattgcatggaaatgtgtgattgcatggaagcgcagtgtcacggtgattgtgtggaagcgtgtcatggtgattatgtggaagtgtggtgtcgtgatgattgcatggaagcaccgtgtcatggtgattgtgtggaaatgtggtgtgattgcgtggaagcgtggtgtcacagtgattgcatggaagtgtggtgtcacagtgattgcatggaa

SEQ ID NO: 344353 - DNA, 496 bp, Homo sapiens
  chr20:60502550-60503046
  hypo
cggccgcgcctgcttttctcacagacacttccaaaagcagcagttcttccacgcgatcatgcgtctgggctcagggcttccagcaccctggggctctgctgggcagggccagcaaaactcagggaggcaaggaaaggttttgccctaagaagtcccagatgggggcaagatgtggtgggcggatcccagccctcaggggccagtgcagagcccagcacccgcagaacccctccctggctccccagtgggagtgagtccccggtgcgtggctgtgacctccgtggctgtgagtttccacgtgaatgccacaccccgctgtgtgcgtgtgtgcaggtgtgggtgtggccgtgtgctctgccgtgtctgttgaggtgccgtgcgcagtggctgtgtgcgtgtgtgcagctgcgggtgtgggtgtggccgtgtgctttgccgtgtctgttgaggtgccgtacgcagtggtgtggctgcccatggcgtgtggcagggtgtc

SEQ ID NO: 344354 - DNA, 350 bp, Homo sapiens
  chr20:60511744-60512094
  hypo
gggctgagacaacgcgtcctgcaccctaactctgtgtctgtgacccccagggactccgcgctgctgacaacgaccccacggcacccccctatgactccctgctggtcttcgactacgaggggagcggctccaccgcaggctccgtcagctccctgaactcatccagttccggggaccaagactacgattacctcaacgactgggggcccagattcaagaagctggcggacatgtatggaggtggtgaagaggattgactgacctcgcatcttcggaccgaagtgagagccgtgctcggacgccggaggagcaggactgagcagaggcggccggtcttcccgactccctgc

SEQ ID NO: 344355 - DNA, 868 bp, Homo sapiens
  chr20:60544922-60545790
  hypo
cggaacactcggccccctcatcggggcactcggccccccgtcggagcactcgcccccccgtcggggcactcggccccccgtcggaacactcggccccccgtcggggcactcggcccaccatcggggccattacatgccacgagtcctttggtgtcagatccctagtgcggggccaggtgacccacctgggtggggcccaagcctttcccggttgcttaactgaggtgcccttacactggctcaaatgcacagatattacctgtcagcttagtgtttcacattggcacgcgcctgtgtgacacccatgatgatcaaaacagaacattttcatcaccccagagggccctggcgccccttcccgacagtctcctcaccggagccccacaccctgcttctacccacccatgaacttccatcaggcggaatcagaatgcataggcttctgtgtccggcctcttccagtcagcgtagctcctctgagattcagctacctggtggagcatatcagtagttcgttcctttttattcctggggggcgtttcactgactaaatatgcatctgtttgactctccattcacctgctgaagggcatttgggctgcttccatcttgagcatcaatacggccattgtgaacattcttgtatgacttttccgcggacaaaggaactcattctcaagtagatgcttaggactggaactgctggtcacaggatagatgtgcattcggcttcgtcgctgtgtcacacactgaagagatgcccattcagcttcatcactgcatcatcacacaccgggtagacatgcattcaacactgggtagacgggcattcagcttcatcactgcatcacacaccgggcagacgtgc

SEQ ID NO: 344356 - DNA, 331 bp, Homo sapiens
  chr20:60563069-60563400
  hypo
cgaaactaggagacaataagatccgtggaccagggactgacaggaggggagggatgaacgggcagagcacagaggaattcagggctgtggaacgactccacatgatacggtactggtggaaacacgtcattctacagctgtcaaaacccacagaatgtacacaccaagagtgcaccctgatgggaactatggaagctgggtgagaaggacgtgttgacgtgggttcatggattctaacaaacgcaccacccggccaagcgggggaggctgtgcacctgcagggaggagggtatgggaagtctctgtactaaaaaagtcccctcctttttcc

SEQ ID NO: 344357 - DNA, 368 bp, Homo sapiens
  chr20:60620137-60620505
  hypo
cgccgacatgaaaacacaggtgagtaggtaaataacctcaggtagggagagacagtctagccacactgcaggaagagaactcgcaaagccatgccgctcaaacggaatcccatcgggatgctccccgctcaggactgtcacagggacaaccgtcccgcacctcctggcccatgcaccctccccaccggccacacaaggtctggaatgttcttccctgcccttcctgggaaagccctgcctgccgtgcctgcccgctcctctctacccttgactcgcttcaggtgcttggtggagacgatggcggtgaaactttcaacagcgcgcctgtttgggtttaagcttcagagaacaggcgcagaatccctgca

SEQ ID NO: 344358 - DNA, 381 bp, Homo sapiens
  chr20:60662693-60663074
  hypo
cgcactcacacatgctcctatacgctcacctgcacacgcacacgctcctgtacacccacctgcacacgcactcacacgcactcctgtacactcacctgcacgcttacccacacatgctctgtacactcacctgcatgcactcacacgcgctcctatacactcacctgcacacgcactcacacaagctcttgtacactcacctgcacacgcactcacacaagctcttgtacactcactgcagactcacccacacacgctcctgtacactcacctgcatgcactcacatgtactcctgtacactcacctgcacactcacctgcacacgcacgcacacgtgctcctgtacactcacctgcatgcacacacatgcgctcctgtac

SEQ ID NO: 344359 - DNA, 409 bp, Homo sapiens
  chr20:60725146-60725555
  hypo
cgtcaagcatacagcggtggggccgtgaggcagcagccagctcctctcaaggagactgcacatgtgtaaattgagacgctcttctgaaacctacacaccgacttcacggattccacagttgggtgaatgttcagaggggtcccactggcttccatcagtggagtctgtagtatcggcttgctgacctcgggggcagggacggagcagctcaggctgggctcagagggaaggactgctgatgggtcagcgatgtctgccccgagaacaggagtggcaggcgctagcgcaggtgccatcgctggcttagccacctgctgatgctcgaccagctctccggttagccaggctggtccccctcacaccttgatgactcctaggaattgattctgcgtctgtgtccacgccatgc

SEQ ID NO: 344360 - DNA, 152 bp, Homo sapiens
  chr20:60756194-60756346
  hypo
cggatgtcacgcacaaatggggagagaagtgtttattttgtaggcactaagggtttctaaaacccttaacactggtaagggctcaaaaataaacgtatgtgttcatattcgatcaccgaaatgagagttcttaattgctaattgacaaacgc

SEQ ID NO: 344361 - DNA, 1380 bp, Homo sapiens
  chr20:60772868-60774248
  hypo
cgtaacacaaagggactgagattcttgttcttgctttagttgaccagcaagtcaagtccctgtcgtcggtcctgtcgcggtaccagggtttcagtggagaagatggagggagtaaaaactgcttcgggcgcagtggcgccgtcctctacatccgggtgagccgagactgccggacctggccctgtccccgttgttctggatcatccagctcctgggggccaccgtgtgacccacggggcccctgtggcttgatgcccacagctaggaaacagcacaatggaaacggaggctggcagacagcgggaaagcagccccacccctcaaagcaaacccagacgggcatttgtaccagggtctcacaccatgtgcatgtctagtgaaaaagtcatgaaacgattctcttttaaaaagagggagcccacggcacggacgcttcctccgtctctgaccccatgagccgacctctgactgagggaggccactggcacccagcgggcctgcgtctccttcgcgagctgaattcactcgtctcttagatgttttttctggtgcttcagttcacactaacgttttagaaacactatttgaaaaagccctttgtgcagtcagaagggtgtgtacgcagccccgtgaaagccctggagcactgggaccttttccttgtgctccggagctgttggcagaggtgagtggggcgggcagctgcccggggcacagtccgctcttgtcttctttccttagcgcttgcttcaggaatgggttaaggcctcctttcctcactgctggtagagctcagctgatgagtgcctgctgttccccaggtccccgtgggcacgctggtgaaggagggaggcagagttgtggccgacctgtcttgcgtgggagatgagtacattgccgcgctgggcggggcaggagggaaaggcaaccgcttcttcctggccaacaacaaccgtgcccctgtgacctgtacccctggacagccaggacagcagcgagttctccacctggagctcaagacggtggcccacgccggaatggtaggtgtccccactgccaacagcatctgcacacactcagctctagaaaatccacttttctcaatggggatttgccagtggcctggaagagaacagctttgcgactcacctttttcccatcagtacactgctgacttggtcgtgagcatgagcccttgtgactcccccagccctgaaatcctccctccaatcccagttagttacagactctgcgctaacaaaggtgctgccgcgggccgtgccaccgtcttccctctttcccccaggtgggattccccaacgccgggaagtcctcactgctccgggccatttcaaacgccagacccgccgtggcttccta

SEQ ID NO: 344362 - DNA, 709 bp, Homo sapiens
  chr20:60781114-60781823
  hypo
cgtgaaatgccctctagtcaaaaagccaaagacagccacacgcgcccaggctctgcacagttgggcccaccaccctctcgtgcacgcactttccacacttcacgttagccgccgtcgcccccccgccctaagctcctggagaacagagacctcgtttgtctgtatgcagtgcccgggtcggcgctggccccgggatggaggcctgaagggcagacatgctgaggcaaccggagcgtctcatcagtgaacacacgtgccggggacctgtcctggtgccgctaaagaggctgcagagccgcggggtgcggcagtgcttggcgggggcggggtgcagctctgcgtgcatggcgtccacctggggaccgcaggtgtcaagccggggagagccagtgccaggaggtcacacacgatggttccctctacagagtgttccagaaacgatgaggagaatggattggcggtcctcgggctgaggagggcgggagggtggaggtagccgtggacacaaaagggccatgccagggtcctcagaccatcaccctgtgtgttggcggtggggccacgagtctgcacgtgcgaaagaatcctgttggcttagtgtttcaggctgggaagatgaccggctctgaaggtggagggtggtgatgggagagccactgaaccgcacacttcagatagctcaagtggtgaactttatgtttatcaccac

SEQ ID NO: 344363 - DNA, 64 bp, Homo sapiens
  chr20:60842033-60842097
  hypo
cgtgcgacggctcacgcctataatcactgtcagaggctgaggcgagaggatcgctcgaggctac

SEQ ID NO: 344364 - DNA, 368 bp, Homo sapiens
  chr20:60842477-60842845
  hypo
cggagtcctttacaaaaggagcttcaggcctatcctgtgcgtttactgtttggggtctggcatcatctacttgtccagggagagaaggagaattcaggaccacagccgggctctcaggaggccaccggggtagtcttatttcgaggtctgttcctacagctaggaactgtgtttttgtttgtttcagtgatgcttcaaatttgggccaacaggctccacctaacctctgcggcctcatgtctgcgtctcttttctccctcactgacagtcccagttttctgcagccctggcgaggacagatttagaccggcacgcagttgtgactcactcactttgccccacatacctgtgggaccagctctgctgcc

SEQ ID NO: 344365 - DNA, 1247 bp, Homo sapiens
  chr20:60855793-60857040
  hypo
cgtgtgtgtttcgtgaggtggcctttcttttgacgacttcacaggaaagccatttgtctttgttcagtcttctttgattgcttattaacttgtcttgacatttaagtagaaagctttgtagatgctacaaaggaaagaagaagtacatttcaaacgcatgctaaatacacagcctccgtcgcaggggcttcaaagcagcgtgctgctctcccgcgggtgccggttgctgtgacccagccccgcctggtcgttgcgtcttgggtcacgtcgtgtcttggcttttctggactctcactgcttgttttctggtgtcttcacagacataatgaagcctacacctggaccaaccccacctgctgcgtccacaacgtcatcatcgggaagctgtggatagagcagtatgggacagtggagattttaaaccacaggtgacagcaccccaccgttgggtgagagcgcgaggctccgggtggggatgggcgagccggggagcgtgagcatccgtgctcctggtgggttttagctcagcctcacgagctgctgccgtgtccccgccagcccaggcatagcagctgcctagacttgactctgaccggtgttggccatgaatgctcctcgttcaagacctcgtttttcgtcacggttgttactttaaggctttgagctatgctgaagagctgtgtcattgccaggtgcagcgcagtggccgtccacggccgttggccactgtctaggcttgaatgccctattcctggaagctcatgactggtgggctttgccttttcaccactttagtgaggtataatcgatgcatcataagactcgcccattctgaatggacacttaagtgatttttagtaaattgaccgaatcatggagccgtccccacagcccatttcaaacacttccatcgccccaaaggcccaccacacccatttgcagtcaccccccgcctgccccaggggcctccaccgcgcttctcctgttacagagttaccctttccggctgtttgctgtcttgcagcagaaacctgtgtttgtttttctcacagaactggacataagtgtgtgcttcactttaaaccgtgtggattatttggaaaagaacttcacaaggtggaaggacacattcaagacaaaaagtaggtccttgccaagtgttcatggggcaccactacagcctgtgtgtccacgttagaagggctcaggtgctcctgggcctgcgtgtgcctacgtgcatgagacgc

SEQ ID NO: 344366 - DNA, 187 bp, Homo sapiens
  chr20:60868207-60868394
  hypo
cgcgcccggcctgttcattgtttttttaaagtgttaaaaaaaatatactgtgaaaataatgatcttttgtccttcgaagaaaatgtcttctcctttgtgagcgctgcccccaccccacccccaacactaaggacacccctcgggccctgagtgccagccgggggctgtggacggcggctgaaccagc

SEQ ID NO: 344367 - DNA, 252 bp, Homo sapiens
  chr20:60912922-60913174
  hypo
cggggcggcagcggcacaaacctcccgccccacagagctggtccagggctccccgagggtcgcaggtgcatgctgcagagggacaatggggtcaggccctggcgccatgtgggtggcagaaccccttcctgccctgaccctctgctcaccttggcagttggggaaaccatggtagccagggcggcaccggtcacaatgaggtccagcaaactcaggctggcataggcagcggccggcctcatcgcagccctc

SEQ ID NO: 344368 - DNA, 669 bp, Homo sapiens
  chr20:60925491-60926160
  hypo
ggggcccagggctcccgcctctgctcggcactggccgtgagaatgggagtgaacctttgtcctgtctgagctccacccgcctccccacctcccctgtaaactggagcgtggacagagcagtaaggccccacagaaggcaagggcgggtcccaaatccaagcgcatgaaagttgggctgctcggttgcaggcactagatgagccctgccagctccctgctgggggtccaggagcctcgtcacacactcagcctcagctgcaccactctgagtggcttctgtccagccccatgcctgcactgccaccctagggtgttacaccctccgggcaccacgctgagtactggtttgcgtgtttcccagctgcctcccccggaacaggtgctcctgaggccgggctggggtcccaccctgtgttcccattcccaggaaaacggcccagcgtgtgttaggcgctcaacatacagctgctggctgaaagaaccaacgaagggagggaggaaaggacggacgtgccctggggttgcttctccgcagaatgagcccggccctaccttactgaggactctgggtgaggcccaggaatgtgccggtgccagcaccagggctgctgcccatcctgtgaggggctcccgggaggtggatgctctgcagtgccctcggctgccccc

SEQ ID NO: 344369 - DNA, 270 bp, Homo sapiens
  chr20:60952110-60952380
  hypo
cgtcctaggctgcgagctccctgggcacagggctgtctgttccacgcaccaaggagcgcctgtacccagcacggggcttggaaatggcgggtggacatgacgggtgttctgtgctctacggttcccggcttctgatttgcaattgttcggtagaaaccgtacttccagtgcccacacaaccaatctgtttttctccttcttatagcattggacaaattacgtgaggcatttgatgcattattataaaggaggcttcgtgggggatgactt

SEQ ID NO: 344370 - DNA, 680 bp, Homo sapiens
  chr20:60953036-60953716
  hypo
cgcagtggccggcccgggggtgcaaccccatcccctctctggggtccctttgcagggcagccttaggatccattcactgtggccccagggcccagggcgacctgtgaccctgcggagccacctgcaggagtcccagcagatgagggcctctggctgcccctcaggggcttgttgggtcccacaagaacttccagggcctcggagctccagccgggccacagagctgggaaccttgagtggctgggaaccctgaggagctgggagagccaggctgagcaagacaagcctgggcgactcacctggggcaggaatgtggattccatcactccgcagaggctttcaagcaaaacacagcctcgtctctgggcctgtttctgccgtgcgggcacgtccagcccgacgctctcagaagcagctgggatgggctcggggaggtgggggtggagcaggagtcccagccgccttcctctggggcccatcccaggctcccggctgggcgccagcagggctccagaaatgagggggcctcacaccgttgcctctggacgtgccgtgcccgaaatcccgccattcccactgggcatgccgggccctcgaatcctccatgactccagggaagcgactccgtcccgcttggcctcagtcactgctctgtcaatgggatgataactgcccttccc

SEQ ID NO: 344371 - DNA, 331 bp, Homo sapiens
  chr20:60976568-60976899
  hypo
cgccccgggccccacagagaggtgtcggtgtgtccggcagacatggagaggatcacgcatgtgcagatgtaccaccttacgcctagctggaagcagcacacacgccggtcagcaggaggcgggacatgcgcaatcaggggacggcatgcacagcatgctgcaggtgcacacagacgccacacgggttgagaggctcgtcatgtggtgacacaggtcccctcagtgtgggggaggggctgaggaggggcaccagggagctgggggattggcctgtgtctccgcaggggagtggctccgtggggtgtgcccaggcaaatgcactgagctgcac

SEQ ID NO: 344372 - DNA, 468 bp, Homo sapiens
  chr20:60983920-60984388
  hypo
cgtgctggctgcagcgccgggtcctggggatcggctgtgcagtaggggggcccctagccagttcttctttgctggcgctaagctagactttgagggacaaggaggaatgctgaggaaggaacggggtctcttcctgggtctggtgaacccccttgctaggctcccgctgccagtcttctcccctccccagggtgtcgatgggtggccaaaagccaacctggcctgcgggcagtgtgtagggaacacacggcttttgtttcgtgtgattctggagaaattaaagcaacctttaacacacctggacttccctcttgggagttcagtccctctggcctctcaggacaacaggcagacatgtcacaggctgcaggtgggaggcagtgccccctgagtcaggcccgcaccccagtctggcccaggcctcacccagcccagtcgttggcccgtgtcctgccatccctgtgatgc

SEQ ID NO: 344373 - DNA, 441 bp, Homo sapiens
  chr20:60992543-60992984
  hypo
gtctgtcccgtccacgcagcccccccagtcatctgcacgctcctctgtgacgtctgtcccgtccacgcaacgcccccccagtcatctgcacgctcctctgtgacgtctgttccgtccacgcaccaccccccccagtcatctgcacgctcctctgtgacgtctgtcccgtccacgcaccccccccagtcatctgcacgctcctctgtgatgtctgtcctgtccacgcaacgcccccccagtcatctgcacgctcctctgtgacgtctgtcctgtccacacaccacccccccggtcatctgcacgctcctctgtgacgtctgtcctgtccacgcaacgcccccccagtcatctgcacgctcctctgtcacgtctgtcctgtccacgcaacgcccccccagtcatctgcacgctcctctgtgacgtctgtcctgtccacgcaac

SEQ ID NO: 344374 - DNA, 597 bp, Homo sapiens
  chr20:61000254-61000851
  hypo
cgattcacctgcgcctccctcatgacctgcgcctccctcatgtgggaccccaggtgtccagcagtgctgacggcaggaccctctgtgcttggacaaggtcaagtctcattgccacaaaggccttgtgcaggaggacgcagccctccccacgctcagggcagaggtccggcttctgacggtgatgacactcatccttggacggctgctcactacggactccaatgggctcacggcatctctgtggctacacccaggggagatgccacctgcctcccacacacaggccagggaatcacaggcccagctgtggccctggcaggactggacattgtccggccgagtgccaaaacccacagtgatgcctgttcttaccctgtcctctgggaggccgggccccctgagctcctctgctgtctgagcaggaggcatccggggcatcactgggctccccgcctctccgagggcactcaaccagagaagccgcctgggcaccagtgctccaaggacgtctgccaggccggctgctctccaccccagccaccgacccccagcaggctctttggggcaggagtgcggagctggacactggtaccctcc

SEQ ID NO: 344375 - DNA, 351 bp, Homo sapiens
  chr20:61013047-61013398
  hypo
cgactgcccggggctcagcgggcaggcagggagatgcctcaggactcacgggtgaggggtgttgggcgggggccatatgggcttgtgagcattgctagctgccgggccctggccagctgcccgcctcagagctacagctggcgccggggagctggcagctgagtgccatccttccaaagacgtggtgctccagggcgcatggcccgtgaccaccaccggggtgtggagacacctgaatggagtcctcactgccggcccggcctgcgctgcctgctctcggcctccctgtgtgtcgcgtgatgttgtgtgccagggttgggcggtggctgtgtgaggcctgtgaggacacac

SEQ ID NO: 344376 - DNA, 871 bp, Homo sapiens
  chr20:61287746-61288617
  hypo
cgctgaggccactcccactgcgtggctgaagcctcgaggtcaccaggcggaggcgcggagatgcccctgcatcagctgggggacaagccgctcaccttccccagccccaactcagccatggaaaacgggcttgaccacaccccacccagcaggagggcatccccgggcacacccctgagccccggctccctccgctccgctgcccatagccccctggacaccagcaagcagcccctctgccagctctgggccgagaagcatggcgcccgggggacccatgaggtgcggtacgtctcggccgggcagagcgtggcgtgcggctggtgggccttcgcaccgccgtgcctgcaggtcctcaacacgcccaagggcatcctgttcttcctgtgtgcggccgcattcctgcaggggatgactgtgaatggcttcatcaacacagtcatcacctccctggagcgccgctatgacctgcacagctaccagagcgggctcatcgccagctcctacgacattgccgcctgcctctgcctcaccttcgtcagctacttcgggggctcagggcacaagccgcgctggctgggctggggcgtgctgcttatgggcacggggtcgctggtgttcgcgctgccccacttcacggctggccgctatgaggtggagttggacgcgggtgtcaggacgtgccctgccaaccccggcgcggtgtgtgcggacagcacctcgggcctgtcccgctaccagctggtcttcatgctgggccagttcctgcatggcgtgggtgccacacccctctacacgctgggcgtcacctacctggatgagaacgtcaagtccagctgctcgcccgtctacattggtgagtggggctggc

SEQ ID NO: 344377 - DNA, 267 bp, Homo sapiens
  chr20:61314589-61314856
  hypo
cttgatcatttattccaagtcgtgttgggcttggacctcgggctctcgggagcggccgtgacggagctcagacccagcacttctcctgcagagccagccgctcgctgctggccatgcctggaggtggcgaggacgggcttttccatcactctcggtgggggcacctgctccaggggcagctccatgggcgcttggcgggacggaagctgcgggaatagttgatgttgaggttgacggcgacagtgaggactgcaagaatacagtcac

SEQ ID NO: 344378 - DNA, 463 bp, Homo sapiens
  chr20:61318673-61319136
  hypo
tggccaccctggggcgtctacactgaaggccaagggcatgtggaggaagagccatctgagccgaggcccggggaggagccagcaggccaaggaggcggaagaaaccacgcagtggcgtccagggcagggcaggtgcgtcatccgggcgggatgcagagacacgtccttccaccaaccatctgaggagcacttggcacccacacaatgagcccggcaagggccacgccaggaggcagcgcacggggcagagcctctgagccagagagggggaggtcccttgggaggcccctgccatcccccgctctgggtgggcctctccagccagactctgcgccccaagggcagggctgggcctaagccacacctcggggtgcacgggctgtggggggccgctcctggacacggaaggacgacaccggcttccctgtacctctgctggggccgcgggtcccatgtcgtcagc

SEQ ID NO: 344379 - DNA, 290 bp, Homo sapiens
  chr20:61330805-61331095
  hypo
cgcccagcctctggtgttgtgtgtcagcaccccgagtggaccgggacaggctcccaagtggactgagacaggctcccgagtggaccgggacaggctcccgagtggactggagacaggctcccaagtggaccgggaaaggctcccgagtggaccgggacaggctcccgagtggaccgggacaggctccctctctcttgctgctgggatgtctccccgggagcttgcgtctctcgccaccctcacctcccagccagagggaagccaggaagccagggagatgcggcctgacc

SEQ ID NO: 344380 - DNA, 429 bp, Homo sapiens
  chr20:61471928-61472357
  hypo
caggacggtgctcccggcgagcctgggcctcccggagatcctgggcttccaggtgccattggggcccaggggacaccggggatctgcgacacctcagcctgccaaggagccgtgttaggaggggtcggggagaaatcaggctctcgaagctcataaaattcaacgtgaggaagcaagtgacaaggacgcccgaagcacagtggacggtcatgaaggagcgggggtgtggcaggcgggtgacgtccaggagagggagcgcccctggctgcccctcggccgccgactggacgcgcgggccttgccagcgagcaccctcatcgggctgtcgcctgacagcatacctcaaaaggccctagctaataaacctgtaagcccagcatttgagagaaggtagggtgtgtatatataaaaggttgtgtacaactccac

SEQ ID NO: 344381 - DNA, 566 bp, Homo sapiens
  chr20:61488430-61488996
  hypo
cgcgctcttagaagcttgcacctcagctcctgccttctccccacgcgcctttgctgatcgcacctggcatcctttctccatagtaagtcacagcctgagagtgactgcatgcggagtcccgggagtcctcctagtgagccagcgagcctgggcatagtctgggggatccttgatccatctgggaaagctaacgatgctcctacctgctttattccctctgaacgcagaaacggctaaggatcactcatctgtgataaccatgtatgactaaggtaatcatatatgagtcagcctgacaagcagtcacacgtattaccttctatctctttccattcggttatgcctctccctacgttgagaccttcctccctggggcccactctgggcctgctcccccaggtttgcctgtgaggactccgaggactgccaagcgccttgtgtggcggtggcaccttcgcccacattctgaatctctccaagggctcttcgctctacatttgtgtccaactgacgcattctactccgattcctcttcagtgcttgtttgcatagcgctgcttctttgc

SEQ ID NO: 344382 - DNA, 615 bp, Homo sapiens
  chr20:61505942-61506557
  hypo
ccattgggatctgccggtgaactccgcaggtcgtctttgaaggcacatgtggctcttctgccactgcctggggagctgagacccctttgcccaaagaccctcaagtgccttccctagggagctgccctgtaaggtgccgccgtcctgcccgggactcaccaccacctctgtgttccttctagacctagatccagactggagttccagcaggccccaaaagagaaagtgtgaggtgtggcctacaaatatgtttccctacgaaaacctgcggaaaatgtgtggaaatcgatgttgagagtgcgggatctgggtgggaggaatataagcttgcgtaagtggacagggactcagatacgagattctggatttgatgcgttggagggaacggctgggagtgacccaccccccacccccattttcttcatcagtcaccgaaactttcgccccacaggtagctgaccctaaattcagtgaaatccagaactttcctggcacactggagaggacggcagaacgctgggatggatttatcgtgcaagaccagcttgatgtccttagggcttggaggtcaccccttcacgaggattgtgaggagtgaattcatcggggagcccc

SEQ ID NO: 344383 - DNA, 143 bp, Homo sapiens
  chr20:61527425-61527568
  hypo
ccagtgcaacaatacgtgggcggcagaaggatcacagaggagaaagaaacgtcttagctttcctggaaaggacacgaacatctcaaaatattggttgatccctttagcacccagcgaacagaacaggaatactccaatgcacc

SEQ ID NO: 344384 - DNA, 299 bp, Homo sapiens
  chr20:61527972-61528271
  hypo
cgtcctggggctggcgaggccattggaacagaaggtaccactggcttccttacggctcccaccaaagcagcggagccagggaacttcttggaggcagccgttgccgctgcaggtgccggtccggcctgcctggcagctgaagcaccactcgatggggtagcggagagccatggcctcttggggatggtgcccttgaaacctgagggtggctttttaatggctggtgtggctgctgccacattagcaaaagaagacttctttggcacgaggtttctaggtgcaggctgcttgcccaccgc

SEQ ID NO: 344385 - DNA, 48 bp, Homo sapiens
  chr20:61567413-61567461
  hypo
cgccttaaggcgctagcactcaagctttctgctcgtgcatccccttgc

SEQ ID NO: 344386 - DNA, 166 bp, Homo sapiens
  chr20:61591490-61591656
  hypo
cggtgaacacgtgcgtgtgcaggcgcatgtgtgtgtgttggtgcgaggactctagagcacagctggaggccggtggtgagagtgtgcacatgtgcatgtgcgtgttcgcggggtgggagggctagcttggaagcaggggtgtttccctcagccgtgcgggtggcac

SEQ ID NO: 344387 - DNA, 1892 bp, Homo sapiens; identical to SEQ ID NO: 336510
  chr20:61636766-61638658
  hypo

SEQ ID NO: 344388 - DNA, 109 bp, Homo sapiens
  chr20:61665935-61666044
  hypo
atcaataagccacagaagagaaatccggaaacaagggacgcgcagcgtgattccgtgccacggcgtcaggagcggcatgtagcatcttttggtttgagagtaaaattcc

SEQ ID NO: 344389 - DNA, 891 bp, Homo sapiens
  chr20:61674884-61675775
  hypo
cgatgcgcatcatggtcggggctgttttggggccgtttccaacaccagcagcgtcgtggctccacagcagcaaggcttcctgaaggaagaagggggcttcgcagtatagttcgagtcgggctctgtttctttccatcccaaacacatagagacgaccaaggccctgatcccaaaagaagaacccaggctgccggcgatcctggggacaacgatgttaactcagggacaggcgcagtctctggaccaggccaggtcgtggtgcacacactcgatctctgcagcgtttcccacatgggcactgcggaccgggaatgtcaggggaacgcgggcaccgtggaccgggaatgccaggggatcgtgggcaccgccgaccgggaatgtcaggggaacacgggcactgccgaccgggaatgtcaggggaacgggggcactgcagaccgggaatgtcaggggaacgtgggcactgcggaccgggaatgtcaggggaacgtgggcacggctgaccgggaatgtcaggggaacgcgggcacggccgaccgggaatgtcaggggaacgtgggcactgtggaccgggaatgtcaggggaacgcgggcacggctgaccgggaatgccaggggaacgcgggcactgcggaccgggaatgccaggggaacacgggcactgccgaccgggaatgtcaggggaacgtgggcacggccgaccgggaatgccaggggaacacgggcactgtggaccgggaatgtcaggggatcatgggcactgtggactgggaatgccaggggaacacgggcacggcggaccgggaatgtcaggggaacgcaggcacggctgaccgggaatgtcaggggatcgcgggcactgccgaccgggaatgtcgggaacgcaggcac

SEQ ID NO: 344390 - DNA, 264 bp, Homo sapiens; identical to SEQ ID NO: 275679
  chr20:61695623-61695887
  hypo

SEQ ID NO: 344391 - DNA, 342 bp, Homo sapiens
  chr20:61749643-61749985
  hypo
cgctgtgtcctgctgcattgctgggcagtgtccactgcacgtcgctcgctgcattgctgggcagtgtccgcggcatgtcgctctctgcattgctgggcagtgtctactgcacgccgcttgctgcattgctgggcagtgtctactgcacgccgctcgctgcattgctggggagtgtccgctgcatgtcgctcgctgcattgctgggcagtgtccgctgcacgccgctcgttgcattgctgggcagtgtctactgcacggtggacgctcctgcactcatggatgctcaggctgcttcccgttggacgcgattgtgagtgacgctgctgtgagcctccaggtacc

SEQ ID NO: 344392 - DNA, 737 bp, Homo sapiens; identical to SEQ ID NO: 336512
  chr20:61806216-61806953
  hypo

SEQ ID NO: 344393 - DNA, 2790 bp, Homo sapiens; identical to SEQ ID NO: 336513
  chr20:61808112-61810902
  hypo

SEQ ID NO: 344394 - DNA, 247 bp, Homo sapiens
  chr20:61838301-61838548
  hypo
cgtgggagacaactggaaacgcacagttcgggctgcctggaaaacacatgcagcctcctttcagggcctttgatctccctttgtctcccgcacagccaggcacaggttcagcgctcactcgctgccaagtgctggaggcgagctgtgctgctccctcaacattccttagtgccacggctccatgggcactgagttatgagtgtgaaagtttacttctcagggatacagctgcattaaccccgggcac

SEQ ID NO: 344395 - DNA, 560 bp, Homo sapiens
  chr20:61973895-61974455
  hypo
gcagctcattgagccgaccacgcacccttccttcccacggcagagcgggagctcctgggtcagcctccctgccaaagtctgttcacagcagccccgagctggcgacgggtaaataagatggtggagccacgcggcggagcccgcagcacagtggccgcgcagcgagcaatgacccgggatcgggagccgacagaagggcacgcctggcgcggccacgcacagaacccagggccaggcaacgcggggcagaggtgttgggtgacctcgggcgggtcgtggccggccgggctgggcaggggattcctgggtgccggctctatgcgaatattcttcagtctgtgaaagaaaatgccttgtcatgccgctgaggattcatacgcacgctgtgtaccttaccccgcgaggcaggcaaatgccaagaaatgccagctcggattagcgcagcgggagcgcctgtctgcagacagggagtgtaaacggcacagtcacgtggaagacacgttggcattatctcctaaaacccagtgcaaacccctgacaatcccactaccaggtgttcc

SEQ ID NO: 344396 - DNA, 131 bp, Homo sapiens
  chr20:61974565-61974696
  hypo
cggcacacgtggtgacggtgcgttttattcattgaagtctgtgcacacactgggagcacattccagggcttggcagacattgcctgcagaagccgggcggccgcacctgggctcggcgggccacacggtcg

SEQ ID NO: 344397 - DNA, 242 bp, Homo sapiens
  chr20:61990858-61991100
  hypo
cgacctcagtcacagtgcacgatggccacgccctcacctaccacgtcaatgagctgagcgatggacaggccgaagcggacgaggaccacgtccgagatgttggccacgggtcgggaccacttgttgtaaccggagaagagtttcttcaggagccgctcctcggcgtgggcccgggtctccacatggctgctggctgcggggagaggcaggccagtggctcaggtgcaggcgggacaggagcc

SEQ ID NO: 344398 - DNA, 93 bp, Homo sapiens; identical to SEQ ID NO: 275718
  chr20:62028718-62028811
  hypo

SEQ ID NO: 344399 - DNA, 534 bp, Homo sapiens
  chr20:62031205-62031739
  hypo
cacaggtgccccagcggcaggcccaggccccagcatctttctgggtggctgcaggcctcagaggggagggagagctcggcgccccaagagagagcccagggaccacagcagccccacagcggcccctcctctggccagagccctaggacccagccgcccctgctcctcactcactgtggcccccagccccactgtttcacaacaccccagctcgttcgtgccctgaggagagggaccatccgtccccacacccggtccacagcaccgcacccgactcagccccagcatcgaccagaagtccccggccctcagaccggccgcccagagacagtgggagtgaggaggccacacaccgtccaggttgaatcactgcgttttactgagtgcacaggtccacctggcgtccgaactcgtccccgtggcagcagggatccccagaaccttccacggccatcgcggccgcaggaccccacacccgaagtcccccgcaaacccgcactggcgcattcttacggctctggcatcaacctgtcc

SEQ ID NO: 344400 - DNA, 351 bp, Homo sapiens; identical to SEQ ID NO: 275720
  chr20:62032042-62032393
  hypo

SEQ ID NO: 344401 - DNA, 387 bp, Homo sapiens
  chr20:62046195-62046582
  hypo
cgtggccaccacatccatccccggagaggatggaccaggagaggatgcggccacacccaccttctgagttctgccgtgacgcggcacccttgatgcggaaagcctggcgtgcccggctgcggtccccgaagctccagctcttgggcaccttgctggggctgtcctcgaggctctggtcggcgctgggtgaccgcctcacagtctgggcctgcggggaccccttccccttggcagccacgcctcgggggctggagaagacacgatctttcaaactgaccttctggctgctcccacgggaaccgacagacagacagaaaaacagggagagaagtcactctgcaaagaacacaggccgtgtctgctcatggccgacgccgcccatgcgcc

SEQ ID NO: 344402 - DNA, 834 bp, Homo sapiens; identical to SEQ ID NO: 336515
  chr20:62103142-62103976
  hypo

SEQ ID NO: 344403 - DNA, 316 bp, Homo sapiens; identical to SEQ ID NO: 275737
  chr20:62126119-62126435
  hypo

SEQ ID NO: 344404 - DNA, 154 bp, Homo sapiens
  chr20:62137323-62137477
  hypo
cgggagtgtgggcgcctccaagcaccctctcggtcttgtgctgtcctcaccccactgcctgaagagagcagcgcacgaattttgtctggtctcagagtcgtttctggagggagacgtacctggcagcagctactcccccgcaactggaagcagc

SEQ ID NO: 344405 - DNA, 492 bp, Homo sapiens
  chr20:62153098-62153590
  hypo
tgttggagtccgcagagcactcggaacctccccaggcctccagcagcatgaccgcctgtggcctggctcgggacgccccgaggaagcagcccggcggtcagtccagcacagccagcgctgggcccccgtcctgacctgagcggttaccaccagccccaggcctgcggaggcgctagtccaccagagcccctccccgcccctctccccactccgcatccctcgcccccctccccacctcccaccccccaccctgtaaactaggcggctgcagcaagcagaccttcgcatcaacacagcagacaccaaaaaccagtgagagccccgctctctaccgcccggccccagcactcgctagctttcctgacacctggaactgtgcacctggcaccaagcggaaaataaactccaagcagccagtagccccgatggtgtgtgcctgagctgtgtggcccgaggttccatttgagtgtgagaaatggctgaatccctccc

SEQ ID NO: 344406 - DNA, 545 bp, Homo sapiens
  chr20:62197207-62197752
  hypo
cgcctgctcctcggccaggtcccctactggctctggggcagcctcccagttccccgctgccccagcctgtgtgcctcggggaggccagcgccgtctctgcgccacaccctgctcgacctgctccatggacaggccctcggggcagacactgtgccgctccacgcactcacggatgaagctctcccagagcttgccgcaggccccgaaggagcagagggccacggcgtcccccactaccaccagctgggactgggcgcgggtcaggacggtgttgagcacgcgggcgtcggtgaagaactcaggggccagtgccccagggctgagcaggctctggcaggtgtgcacagtgctgagcaccacgacccggaactgccgccctgcagggggcacgcagtcaggtcaggctgggtgcgcaagacggtgggaccagccccacccctgccgatgccaggctgaggagtgggccgagccacccggggtatcctggggcagctggcagcacctggccccgctggtcacccacctggcaggatctcaaaactgcc

SEQ ID NO: 344407 - DNA, 343 bp, Homo sapiens
  chr20:62204139-62204482
  hypo
cgcgactgcgggcaaaggtgcaccggtttcggtggcgccggcagccgagcccagggctgtagtagtggcagacttggtagcacaggggccttgggaaggtgggccggcagcccaccacgcgccagaccttgctcttggtggcctgcttaaagcgggccagcaggatctcgcgggagcagtcatgctccaccctacggaggacgtaggtgctttcattgagccgctgggtgcagcgggagcagcccagacacaggtccaccagggcacacagccgggccagggacggccctctggtggccgcggggctgttgggcagcagggtggaccctggaggcgccacctc

SEQ ID NO: 344408 - DNA, 764 bp, Homo sapiens
  chr20:62221291-62222055
  hypo
cgtgatttgttttggcgattcctctctttggttctgcagaccacgtgacccacctgcccgagccagccctgcggcctctgcccgctccctgctgccgcggctgagagacagccagccctgtccgtcccaggggcctcgccctcctgtcggctacttccgctcgtggtcctctgccatggcagccacctcaatggtggccgtgtgctcctcaggcccgggggcagcccctgcgggcactgtcacaattgtgctggagccaggcgaggcctgggccacgttctgcagggtggggcccaggccaggcaacgtgagcagctgtagcgggctgaccaccttgaacaccgtgctaccgtcctgcacggcggccgtgctcaggaccgtgaggctggacgcgtccgggtggatctccactgtgctggggtaggtggagccggaagaggccaagactgtgtatcccccgagcagcggggaggccggggagctggcggggggcgcctgaagggaacccttgcccaggacggtggacggcagggtggacaccactttaccaaggggcacgctggtcagctgggggacgggcacgcccgggccaagcgccagctgggcagactgggtgagcacctgcgaggccatggcggccggtcctgatgtggcacgtgcaagccggggccgcttcacaggcggtggcagggagaccggcgtcagcgtcatgagcacgttgctgaggtgctgggacttgtgcttcagctccttggctcggcgac

SEQ ID NO: 344409 - DNA, 227 bp, Homo sapiens
  chr20:62242319-62242546
  hypo
cggccagcccaccaatgcccggatatgcaagtgagcccagcctggaccccccggcgaggcccagcagcaccagcccaggcccgaaaaccttaagaaatgaccagtgtctgctgctttaagccaccaagctctgcggtggtttgttaggctgcaagcatggctaattcagaaactgccagaaacaagcactgctgtccccagcctgggacacacagcaccgcctctgc

SEQ ID NO: 344410 - DNA, 492 bp, Homo sapiens
  chr20:62248630-62249122
  hypo
ccgtgaccttctaagaagtgaaagagaaagatctttctctctccctccctctccatcatgaggacacagcaagaagtcggccatctgcaaggtagaaagcgagtcctcccaacagctgaacctggcagaccctgatcttggacttcagccttcagagctgtaagaaaataactctctgctgttcaggccacgcggtctacggcagcccgagcagactaagacacacgccatctggggagtcagaccagatcaggaagaaaggcctagagctcaggatactgaaggtcccaacccggtgctggaccagaccaccccggcagccgcggccacggagtcacggctcgggtgaggtgacctggacaccatcccggcagccgcggccacggagtcacggctcgggtgaggtgacctggacaccatcccggcagccgcggccacggtgtcacggctcggatgagatgactcggacaccaccccggcagccgcggccac

SEQ ID NO: 344411 - DNA, 357 bp, Homo sapiens
  chr20:62252093-62252450
  hypo
cgatttcttgctatgaaaaaaaaaagtctacattctctgtgaaacttaaaacaagacctagagtccatagcacagtagtcaaagcatccagaacacgatcaaacttcctggcaaagggtagtctggttgattctcaaaggaacaaatacacaagagaagctggctcttgaacgcagaatccagagactttcaggtgctatcggaccagctccaagaggaaagcaaacattgtcaaccaagtggaaagaaaatcttggtatagaaacaggagttataaccaaacagaaatgtgaaaattaaaaacgacaaccaaaagaaaatacacaaagctgggatagtctcagctactcggaaggc

SEQ ID NO: 344412 - DNA, 389 bp, Homo sapiens; identical to SEQ ID NO: 336518
  chr20:62273400-62273789
  hypo

SEQ ID NO: 344413 - DNA, 130 bp, Homo sapiens
  chr20:62309958-62310088
  hypo
cgaacagcacacacactcccacgaacagcacacacactcccacggaacagcacacacacccacggaacggcacacacacccacggaacagcacacacactcccacggaacagcacacacacccacggaac

SEQ ID NO: 344414 - DNA, 103 bp, Homo sapiens
  chr20:62310122-62310225
  hypo
cggaacagcacactctcccacggaacagcacacacactcccacggaacagcacacacacccacggaacggcacacactcccacggaacagcagactctcccac

SEQ ID NO: 344415 - DNA, 286 bp, Homo sapiens
  chr20:62314830-62315116
  hypo
cgtacccaggcacgtgcacatgcatgcagagtacgcacacacgcacgcacgcctgcacaaatccacgcatgttgccaagtctctgtgttccagccgtggtgtctgccccccggtgttctctagttcggcttctccgcatttctgtgaatgattccggcttcttggtgttcccagcagaactccctcaagtctgcggcggggctctgacggcggtggcttggctgacatggccacattgctgagcctgttgggggctttgcgttcctgttctggccgtttttggctc

SEQ ID NO: 344416 - DNA, 746 bp, Homo sapiens; identical to SEQ ID NO: 275769
  chr20:62320892-62321638
  hypo

SEQ ID NO: 344417 - DNA, 623 bp, Homo sapiens
  chr20:62321668-62322291
  hypo
ctacagcacccagtgtgcgtggagaagatgctgtcagcgaggccaagtcgcctggccccttcttctccaccaggaaagctaagagtctggacctgcatgtccccagcctgaagcagaggtcctcaggtgcggacgggcagcgctgggtgggcggtgtgggggtggcggagcgggcggcgtggggcgggcagcaccaggcgcccagggcggaggcgactcacctggctttgtgcgcttcccctcccacctccaaaggctgcctctccctcctagggcagggcccccacgggctgcaaccctcccctacaggcagagaacgccccaggcaaggatgccccccgaggctgagactccccccaatagcagggaggacacccacaggcaggaccccaagtgctgggactctcccccaagaggggctttgccacaggcagggaccccagctggggccccccgtgggcttcactgcgcactcgggtgcccctgcagggtcaccagctgccggggaccccgagagtagcctgtgtgtggagtatgagcaggagccagttcctgcccggcagaggcccagggggctgctggccgccctggagcacagcgaacagcgggcggggagccctggc

SEQ ID NO: 344418 - DNA, 713 bp, Homo sapiens
  chr20:62326157-62326870
  hypo
cgccgtgagcgcctacctggctgatgcccgcagggccctggggtccgcgggctgtagccaactcttggcagcgctgacagcctataagcaagacgacgacctcgacaaggtgctggctgtgttggccgccctgaccactgcaaagccagaggacttccccctgctgcacagcaagtggccctggcgtggggaacagccggtggggtggggggcaggggacaaaatgggggctgtgccgggtctgattgaagctccccgcagggttcagcatgtttgtgcgtccacaccacaagcagcgcttctcacagacgtgcacagacctgaccggccggccctacccgggcatggagccaccgggaccccaggaggagaggcttgccgtgcctcctgtgcttacccacagggctccccaaccaggtagggcacctgcctggctgctcctggcagcgccccaaccgcacgcagccctgggagtgagcagcaaagccccaggcccccctcagactcaagtctctgtctccaggcccctcacggtccgagaagaccgggaagacccagagcaagatctcgtccttccttagacagaggccagcagggactgtgggggcgggcggtgaggatgcaggtcccagccagtcctcaggacctccccacgggcctgcagcatctgagtggggtgagcctcatgggagagacatcgctgggcagcaggc

SEQ ID NO: 344419 - DNA, 131 bp, Homo sapiens; identical to SEQ ID NO: 275773
  chr20:62331799-62331930
  hypo

SEQ ID NO: 344420 - DNA, 1004 bp, Homo sapiens; identical to SEQ ID NO: 336521
  chr20:62383197-62384201
  hypo

SEQ ID NO: 344421 - DNA, 376 bp, Homo sapiens; identical to SEQ ID NO: 336522
  chr20:62384603-62384979
  hypo

SEQ ID NO: 344422 - DNA, 655 bp, Homo sapiens; identical to SEQ ID NO: 336523
  chr20:62461248-62461903
  hypo

SEQ ID NO: 344423 - DNA, 339 bp, Homo sapiens; identical to SEQ ID NO: 205912
  chr20:62495239-62495578
  hypo

SEQ ID NO: 344424 - DNA, 424 bp, Homo sapiens
  chr20:62513518-62513942
  hypo
cgctcgttccccacagacgtggttgagcttgcattttctcccctcagcacagtctcatttgggaagaggaaagggaaacttgcacgcatgggccggtcagggcactgagaggcctttctgctctggcactgcctgccaggcgtgcacctcagggggcccgtccgctctagcaggcaaatggggcgtgttctctgtagtcagaggggctgtgagaagacaggaaagcgagcttagtgggtatcaggcaagggggtgaaattgggttgtgagatgagaaagcagcgtcattgcagggctggggggccgagactcggcagggtcgccgagagctcagtgagcgagcaatgcacaggcggctcctcgccgcaggggcctctgggggccgaggggctctgggcctgcaccccctctgtagacacctggc

SEQ ID NO: 344425 - DNA, 507 bp, Homo sapiens
  chr20:62550652-62551159
  hypo
cgaggcatgtgatcgatgcatcgtaactgttgagcaaatgaatgctgagctgtgatggcaccgacgtgtccggggagaggacgcacccggctgtgtggacatgtgcccagggcccaggacagcgccacggaagaggacacacccggctgtgtggacatgtgcccagggcccgggacagcgccacggaagaggacgcacccggctgtgtgcacatgtgcccagggcccgggacagcgccacggaagaggacgcacccggctgtgtgcacatgtgcccagggcccgggacagcgccacggaagaggacgcacccggctgtgtgcacatgtgcccagggcccgggacagcgccacggaagaggacgcacccggctgtgtggacatgtgcccagggcccgggacagcgccacggaagaggacgcacaggacagcgccacggaagaggacgcacccggctgtgtgcacatgtgcccagggcccgggacagcgccacggaagaggacgcaccc

SEQ ID NO: 344426 - DNA, 583 bp, Homo sapiens
  chr20:62551409-62551992
  hypo
cgggacagcgccacggaagaggacgcacccggctgtgtggacatgtgcccagggcccgggacagcgccacggaagaggacgcacaggacagcgccacggaagaggacgcacccggctgtgtggcaggggaggttcccaagagcaggctcagggctctggggtctgagtgagggctctccagccagcagggagcagggcagggtgttgaagagacggcaggtgcgtcaggggctgacgtgggacccggcactctgtgctctgtgtctgcccgggaacaggtagtcctgcgtcggaccgggaagtgtggtgggtgtggtgggggaaggggctggcgtcagcagggctctcgtccgccaacgtctggtggggatgcccgccatgcgggggcctcaggctacagccagggctgtgaaggagccgaggtcatagagtggctgccctggcgtagggagggaggacacgggtccccgccatttcagaagctcagcgtccctgcacgtgtgcggtcttgtctgcctaggcatgtgtgcgggccctggggctgctgccagcagaacggactgggatacgctggatttgtaaa

SEQ ID NO: 344427 - DNA, 1158 bp, Homo sapiens
  chr20:62562220-62563378
  hypo
cggcctcctcacgtgctgctactgctgctgctgtctgtgctgctgcttcaactgctgctgcgggaagtgtaagcccaaggcgcctgaaggcgaggagacggagttctacgtgtcccccgaggatctggaggcacagctgcagtctgacgagaggggtgagtgcccgccccagggcccgtgtgtgtgtgtggggcagagccagaatgggccctgaatggtgtcaacctgtcttgtcaaacaggagggcactgacactgtgccgcgagtgtttgtggtggcagctgggactgttgaggtgtgaacgtggaccctgaggtaaagcaggcgcatagagctgtccccgccgtgacctgcggtagccgtagatcccagggactgcgaggcggggcagggcggcaggcagttggggcggggctgagggccgagggctggcggtgacccaaggcgacggaggaaagccgtgtggggtggaggtcagcgagtagcctctcccggtggagagtttgtccaggtgcccgaaagtcgctccacaggaccagcgttgggtgcgcgccaggctgtggccctcgtgcagtgccctgtgtgcttgcttttcagaggccacagacacgccgatcgtcatacagccggcatccgccaccgagaccacccagctcacagccgactcccaccccagctaccacactgacgggttcaactaaatccaggaggagctgtggtcagaggaggagccggcgcctggccacgccaaccttagaatcatgaactgtagtcacagagatgggaaggcagcctcctgcctgccctggccttgctggggcccctcctgcctccacgcccacccagcgtcgacccttgacccacgaagtgcgtagcatgcagtatttaaagcagtgtagctacggtcttctgtttttttcccttttttaatagcatgtatggggttctgttccatgtctgtgttgtggacattccgcggcatgaccgcgtgaactgcacggtggagctgcctcagggctgtcggtcaggttggtccagtgaggggtgactgcagccggtcaggtgggcgaggagaaggggggctgcccctttcctacctgtgcttgaggggccggaggcaggtgctgcctggcagagctgtgttaccgtcttggcctc

SEQ ID NO: 344428 - DNA, 284 bp, Homo sapiens
  chr20:62578699-62578983
  hypo
cgttcccttgcaacccggcacactctctgggcagccaaatcgctgccatgctgaaggctgggtgcccaaggagacgtgagggcggcgtgtgggtggaggcgagaccagaccaggttgtgcgcacacaccgagggtgaggtccccagacaggaccaggctgaagggctcagggagagaggcagagggctcagccaggacctgattctcctgcagtgacagcaggcccagcacagtgcctcggcctggcctctctggctgtcagagtgccggatgggggaccctgc

SEQ ID NO: 344429 - DNA, 98 bp, Homo sapiens
  chr20:62581888-62581986
  hypo
cggagggttccaagccgtaaccaacacaagagagacgcgcccagaccaacagcctcaagcaaaatggcaccttcgaccctgggctctgcccggtgccc

SEQ ID NO: 344430 - DNA, 981 bp, Homo sapiens; identical to SEQ ID NO: 336526
  chr20:62600653-62601634
  hypo

SEQ ID NO: 344431 - DNA, 142 bp, Homo sapiens
  chr20:62630932-62631074
  hypo
cgtgtgcactctccctctcatagtgatatcaagaaggcgcgactgctcctcaagtctgttcgggagacgaaccctcatcacccgccagcctggattgcatcagcccgcctggaagaagtcactgggaagctacaagtagctc

SEQ ID NO: 344432 - DNA, 104 bp, Homo sapiens
  chr20:62631475-62631579
  hypo
cgcctgaatccaccactggtttgacggcaggctaagcttcattataaagagctcagttggtcagctcttcacccgcctaatggtggccagtcacggtggctcac

SEQ ID NO: 344433 - DNA, 73 bp, Homo sapiens
  chr20:62639433-62639506
  hypo
cggcctaatttcttaacatcattaaatgtctactgcattcatatttttccagctgtcatgtcagtacctgcac

SEQ ID NO: 344434 - DNA, 341 bp, Homo sapiens
  chr20:62662125-62662466
  hypo
cgggcaattaagaataccacaaggcttaaaaaacaatcaggttatcagagtgtgaaattattccgtttggcaactgagacgaacccgaacagctgcccggagtggaggctcctcgtgttgtctcttgactacggtgcctctggctccagggggaggtgaccctgaggagagggtggcagcaacgcagagtcccgggcctgccagcatgctcagcagccagcgcccgccatcccttctccagcagcgggtgggggtgccatgcacacccttacctggcctctcatagcatggacctcttcgggcccggtttttcaggtgtgcatgtgtctggcaggcacggc

SEQ ID NO: 344435 - DNA, 877 bp, Homo sapiens; identical to SEQ ID NO: 336527
  chr20:62680286-62681163
  hypo

SEQ ID NO: 344436 - DNA, 1015 bp, Homo sapiens; identical to SEQ ID NO: 336528
  chr20:62694230-62695245
  hypo

SEQ ID NO: 344437 - DNA, 877 bp, Homo sapiens; identical to SEQ ID NO: 336529
  chr20:62733396-62734273
  hypo

SEQ ID NO: 344438 - DNA, 171 bp, Homo sapiens
  chr20:62839587-62839758
  hypo
cgctcggatgatgacaaggacgaggacacccactcccggaagtcaacagtcactgacgagtcggagatgcaggacatgatgacccggggaaacctgggcctcctggagcaggccatcgccctgaaggctgaacaggtgcgcacagtctgcgagccgggctgcccgcctgcc

SEQ ID NO: 344439 - DNA, 367 bp, Homo sapiens
  chr20:62863342-62863709
  hypo
cggaagggccagttcttccctgaggctccaggacctcagcggccctccctgcctcactcagaagccctttaacggctctgagttgggctccccttgtgtctggcttgagagagtctccaggcttctcctcccaacccttcgcccctgtactcaccccggcctctctgtacccaggtgcccagttccaggctgtgtggggctcggtcacatcagcgggaaatacgcctctcacaggagcgcatccggctgcccactggccgcccgcaggcagaaggaagggtccctcaatggctcgtcattctcctggaagtccctgaagaatgaaggaccgacctgccccaccccgggctgtgacggctctggccac

SEQ ID NO: 344440 - DNA, 219 bp, Homo sapiens
  chr20:62868754-62868973
  hypo
cgccccccgctcctgggctctttgcccacccaacccaaacattcgtcttggggacagtgaggcatccgtcggcactcatcaaggttgctgtcagggctgagctgacggacagcgcagtggctggcacacaggcacacttaggacgtgctggccgctcacaatgcggagtccgtgaagtcacactgtgagtgccagtgggccgccggagctggttgtccc

SEQ ID NO: 344441 - DNA, 668 bp, Homo sapiens; identical to SEQ ID NO: 336530
  chr21:15588309-15588977
  hypo

SEQ ID NO: 344442 - DNA, 138 bp, Homo sapiens
  chr21:19274772-19274910
  hypo
gtgagccaccgcgcccagcctggagtgtttaattttatgtgtcaacttgtctgggctgtagtactcagttacgtaaccaaacaccaatccaggtgtcactgtgaaggtatttcgtagatgcaattaacatctacggtc

SEQ ID NO: 344443 - DNA, 1443 bp, Homo sapiens; identical to SEQ ID NO: 336535
  chr21:27011435-27012878
  hypo

SEQ ID NO: 344444 - DNA, 55 bp, Homo sapiens
  chr21:30294975-30295030
  hypo
cgacttaaaagaatgcaaccttttgcgtcttacctacttctaacggggccacttc

SEQ ID NO: 344445 - DNA, 161 bp, Homo sapiens
  chr21:30357072-30357233
  hypo
cgcttcaaatgcatcttttgctgcaaacgcagctggtgtgtaagtatcacactgagccattagccaatatcccattaaactttttaagtagggagccaactgtttctttactttaaggataagtttttcaaaagcttgttgtgtggcttctcggacgcgac

SEQ ID NO: 344446 - DNA, 233 bp, Homo sapiens; identical to SEQ ID NO: 336538
  chr21:30670777-30671010
  hypo

SEQ ID NO: 344447 - DNA, 436 bp, Homo sapiens; identical to SEQ ID NO: 336539
  chr21:32716048-32716484
  hypo

SEQ ID NO: 344448 - DNA, 415 bp, Homo sapiens
  chr21:33370941-33371356
  hypo
gattgtgaagaaaccggagccccatcagccagggcccggaagcactggcatcccccacaaggaagaccccctgatgctggacatggtgcgctccttcgagtctgtggatcgcgacgaccacgtagaagtgctgtctccctctcatcactacaggattctgaactccccggtcagcttggctcgcagaaattccagcgagaggacgctgtccccgggtctgccatccggaagcatgtcgcctctccatactcctttgcatccaactctggtctcttttgctcacgaagataagaacagccccccaaaagaggagggcctgtgttgcccacctccggttcccagcaatggccccatgcagcctctggggagccccaattgtgtgaaaagccgaggccggttccctatgatgggcatc

SEQ ID NO: 344449 - DNA, 154 bp, Homo sapiens
  chr21:33711064-33711218
  hypo
cggcagaaacagcgagtgctgcatgagcatcacgtagaccaccgggagctggatgagcttcgtgcgcacggagctttctgggctgtacaggagctgtacggcggtgaggagcatctttaaaaatgtgtggtcctggtaccgaaatctaggcggc

SEQ ID NO: 344450 - DNA, 270 bp, Homo sapiens
  chr21:33781936-33782206
  hypo
cgcaagattccaaaattcttaaagagatcagattaggaccaaaatcttctgatttaacagtgaggggctaagggacaaaacagagggaagccagggagacgtccttcagaccctctcatagcccacgactgcccggtcgcattgtgctgtccatctgccttctaaacatccttccattgtggccgcttctcctcttctttctgggtgtacagcgagcacatcagcccaagcacagccataaacccctgactgcactctctccctcaccac

SEQ ID NO: 344451 - DNA, 389 bp, Homo sapiens
  chr21:33954154-33954543
  hypo
cgtcatagagagtaagaccgtaaagctccgtacctagcccatgtaaagtccacagtaagggtttgctgctgttgtcctgagacatcatgagatgtcttagaattctggacttgagacacacggcctgggggcggcaatgcttctgtctgctggagtgccaggtgagaggcctgatgtatccagttcttattaatcattacttacgggaaatggagttgatggaaagatagcaacccctcccaccacccggagcgtgagtgataccgcgtcattcagcaataaagcccacatctttatggggacgctatttttacataacgcaaacggtacaaaaacataaatgcgcttttggtaccagagtgtgcgattcttgccccgcgtgtggggac

SEQ ID NO: 344452 - DNA, 53 bp, Homo sapiens
  chr21:34033597-34033650
  hypo
cgcaatgtgaggcaaggccccacggttccacccagcatacaagcttatggagc

SEQ ID NO: 344453 - DNA, 156 bp, Homo sapiens
  chr21:34350778-34350934
  hypo
gctgttccccggcccgggcttgtgttttacaacaggggaggggcgggcgtgaatggtctgatgattggaacaatccccccgattcaggcctacaaacgcatcttctgttccacaccgaggggacagaaaggagaaaagtgacaaagaacgcggggc

SEQ ID NO: 344454 - DNA, 646 bp, Homo sapiens; identical to SEQ ID NO: 336541
  chr21:34392428-34393074
  hypo

SEQ ID NO: 344455 - DNA, 927 bp, Homo sapiens; identical to SEQ ID NO: 336546
  chr21:34442192-34443119
  hypo

SEQ ID NO: 344456 - DNA, 872 bp, Homo sapiens; identical to SEQ ID NO: 336547
  chr21:34443630-34444502
  hypo

SEQ ID NO: 344457 - DNA, 67 bp, Homo sapiens
  chr21:34508477-34508544
  hypo
tgcaggcgaggggccgtgccgattcattatgacaaaatgacatatcaaaaaggttttgctggcctgc

SEQ ID NO: 344458 - DNA, 255 bp, Homo sapiens
  chr21:35258647-35258902
  hypo
cgatccaggacactctgaaccccaagtggaattccaactgccagttcttcatccgagacctggagcaggaagtcctctgcatcactgtgttcgagagggaccagttctcaccagatggtgagtggaacgcggccctgtggttattcctccttccctggcactcgtttgcgtgggttaatgttttcttacctggggacttggtgccaggattccttcggtttccctcctgagagatgaggctggctggcacaagac

SEQ ID NO: 344459 - DNA, 42 bp, Homo sapiens
  chr21:35286360-35286402
  hypo
cgtgagccaccgcgcccagcccggtaccttgattttaatatc

SEQ ID NO: 344460 - DNA, 1901 bp, Homo sapiens; identical to SEQ ID NO: 336550
  chr21:36041404-36043305
  hypo

SEQ ID NO: 344461 - DNA, 881 bp, Homo sapiens; identical to SEQ ID NO: 336551
  chr21:36163875-36164756
  hypo

SEQ ID NO: 344462 - DNA, 130 bp, Homo sapiens; identical to SEQ ID NO: 336552
  chr21:36206762-36206892
  hypo

SEQ ID NO: 344463 - DNA, 176 bp, Homo sapiens
  chr21:36437239-36437415
  hypo
cgggtccaggcgaactcgctgtggtattgttcttctctgctcggtttccaaaggagagcccaggcgcgttaattgctgggtggcagctacactaaatgcaagtggacgacagctgggtgccgggctcgctctgcaagagaaggtttgggtttccattgtagtccgcatcataatcc

SEQ ID NO: 344464 - DNA, 316 bp, Homo sapiens
  chr21:37405019-37405335
  hypo
cgctgatgtgtgtgggggtcgctgttctattgtgggggccgctgatgtgtgtgggggtcgctgtcctattgtgggggccgctgatgtgtgtgggggttgctgtcctgttgtgagggccgctgatgtgtgggggtcgctgtcctgttgtggggcgctaatatgtgggggtcgctgtcctgttgtggggcgctgatgtgaggagtcgctgtcctgttgtggggcgctgatgtgtgtgggggtcgctgatctattgtgggggctgatgtgtgtgggggttgctgtcctattgtaggggccgctgatgtgtgggggtcac

SEQ ID NO: 344465 - DNA, 353 bp, Homo sapiens; identical to SEQ ID NO: 336553
  chr21:37528267-37528620
  hypo

SEQ ID NO: 344466 - DNA, 246 bp, Homo sapiens
  chr21:37582287-37582533
  hypo
cgcctcgcacaatgatcaggacacaggcgaccccgatgaacacgtccctttcctgccccgtcagtatcccctttgtctctttctctccatcgtctcagccctgctctggcttcttgtctcttactcttggatctgactggtttcttcccatcccaaatctgctaagagatttgggatggggagaaagcctagctttgctcatatgtatcctgtgctttaaaaatgtctgacttcccggctgggtgc

SEQ ID NO: 344467 - DNA, 299 bp, Homo sapiens
  chr21:37617467-37617766
  hypo
cgtgaagccatttgggccgaagtggagaaggagcccgagaagtacccgctgcgaggcgagctgagcgaggaagagctgccctactacgtggagcttccagacaggacggcccacggcgccccggacagcagcgagcacaccgagtctgcagatacaagctcctgccacacggacagcgagaacacgtcctccttctcctccccttcccacgacctgcaggagctgagcaacgaagagaactgctgtgcacccatccccatggggggcagggcgtaccccaagcgctcggccctgctggc

SEQ ID NO: 344468 - DNA, 48 bp, Homo sapiens
  chr21:37718564-37718612
  hypo
cgtcggcttctcagcgtgctcagattacaggcctgaggcaatgcgctc

SEQ ID NO: 344469 - DNA, 165 bp, Homo sapiens
  chr21:37775049-37775214
  hypo
cgacaggcaagaagctaccggatgtttcacgacgacagcatgaagtctttcttccgtagactgagtttcactcccgacggatctttgcttctcacgccaggtgtgtttcgtagctttggacttaaaggaatgatggccgagtggggatgtctgctcccgttttac

SEQ ID NO: 344470 - DNA, 130 bp, Homo sapiens
  chr21:38175745-38175875
  hypo
cgctcgcacagggcgaccttgtgtgcagaagtttattgccaaggttccagtttatgcccacgaggcgcacagcgaggcttctggaggcagcagcttgcttttggcattcccttacagagctcagagcccc

SEQ ID NO: 344471 - DNA, 174 bp, Homo sapiens
  chr21:38176483-38176657
  hypo
cggggtccattagttcctcttggctggtccctgggttcaatgcaacgctcccagcaggtacggtaactgccactcatctgaaactcccaagttacactctgcctcactgacaagggcatggggcgctgcctcctattctgttttgtgggttctttgatcaccagaaggaatttc

SEQ ID NO: 344472 - DNA, 191 bp, Homo sapiens; identical to SEQ ID NO: 275972
  chr21:38362969-38363160
  hypo

SEQ ID NO: 344473 - DNA, 246 bp, Homo sapiens
  chr21:38603108-38603354
  hypo
cgggcgggggcctgcgaagggcagtaggcaggtatcacaggtgagctcaccagatgggggaagctgccacagactggcaccacagcttcctgcaaaggggatctcccacccggaaaagcagactcggggcaaggtaggacaagtgtcccacgtcattcacagccacaatgcagacagcgagcctctggactcaggagacaagctgcctacaaacaccccggccacgtgccacacccagggcagagc

SEQ ID NO: 344474 - DNA, 32 bp, Homo sapiens; identical to SEQ ID NO: 275982
  chr21:38638501-38638533
  hypo

SEQ ID NO: 344475 - DNA, 348 bp, Homo sapiens
  chr21:38918382-38918730
  hypo
gtggatatgatgagcggttatgcgggctctgcttcttgccacctacttgcaggttgaaggatgtgcctattccacatcgctgatggggcatccgagctttccttggaggtgggcagctctttcggggttggtacccatcaggtgctgtggccagaactcagattcggagtctaaattcatactcacactctatacacctggattgagatcacagtattattattttcacaatcgaactgagcaaagatacggcagccactgaagactcactgtgaggtgcgtctaagggagaaaccatgggctgttgccgaagatctgggagaaaaagtgtggaaaaggcaaaaccgc

SEQ ID NO: 344476 - DNA, 113 bp, Homo sapiens
  chr21:38935395-38935508
  hypo
cgcctggccggctctgtgcttaagtggccccatcgcagccagagtagcctcattacagctgaagtccctggtaggtctcctccttcctctgagcccagcgcagtgccaaggcc

SEQ ID NO: 344477 - DNA, 1188 bp, Homo sapiens; identical to SEQ ID NO: 336567
  chr21:39288093-39289281
  hypo

SEQ ID NO: 344478 - DNA, 627 bp, Homo sapiens; identical to SEQ ID NO: 336568
  chr21:40032286-40032913
  hypo

SEQ ID NO: 344479 - DNA, 616 bp, Homo sapiens; identical to SEQ ID NO: 336569
  chr21:40032974-40033590
  hypo

SEQ ID NO: 344480 - DNA, 749 bp, Homo sapiens
  chr21:40316188-40316937
  hypo
cgcactcggggtcccaattccacaccctctgcaaaggccctcgcagcctgcccgtgtctccgcctcctccccaaggtctcccctcccgcctgctcctccaacagatgggcccctggctttgcactactcctcttttcccttcctcaggactttatttttattttattttatttatttttattccggtaccacctctcagtgagacccactgtcaccccatcagcgccctctccaccctcccctgctttacttctccttatcatccagcatgcatctattcaccaatatattatttatcgcctggcttttctactaggcaaatgattctcaactggcggtgacatcgctcctcacttctcccgggggacagtgggcagtgcccggggtcacttttgattgtcacaattggaggaggcccctgacatctggtgagtggaggccagggatgctgcttaacatccttcaatgcacaggaaggcccagccacaaagcacgatccagcccaaaacgccggcagtgcctcggcagaaatgtcacctcctacaccatcaactctgtgagagcggggatttgtttgtcacgactgcgtcctggtgcccagaccaaagcctgcacatcacggtgctccgtggatgggtttgaaggagcggacctggaccagagcgtgctgtaggccacagtcagtgccggcccacccagaactggccactcagcggttacccatctctatcgctttctttcccagagtc

SEQ ID NO: 344481 - DNA, 91 bp, Homo sapiens
  chr21:40331586-40331677
  hypo
cggcagcacgggaaatgcatacagcctccaaaagagaacgaagcccttctgagagcttgattccagacatgcaagaccctgagcccaccgc

SEQ ID NO: 344482 - DNA, 168 bp, Homo sapiens
  chr21:40348667-40348835
  hypo
cgtggcaaccccaacctgaaaacaacgtaggcatgccaatggtgcagtgggggttcaagggcgtgattgggaaagtgttatggaagtgtctcagctagactttgatgaacgcatgggattcgtgcaggtagagatggctggaagtgctctccgggtaaaggaaccagc

SEQ ID NO: 344483 - DNA, 334 bp, Homo sapiens
  chr21:40506196-40506530
  hypo
acagcgcccacctccgctaagggggctccgctttcctgcctagctccttcagtttcttgccgcgaaaatggtctttgtattgcactttgtggctgacagacaccgtccgttacctctcagcattgtttcaatacacacacattaacacacactcgcgcacacacacacgtacacactcgcacacactcccacatgtacacatatacacgcacacccacacatgtacacagtcacacacaaactcactaacacaaacatgtatacattcactaacacacacaaactcacgaacacgtgctaacatgtacacactaatacactcatacatacacac

SEQ ID NO: 344484 - DNA, 51 bp, Homo sapiens
  chr21:40580603-40580654
  hypo
cggttctcatgcctcgtgcctataggtgggattacaggcaagcgccaacac

SEQ ID NO: 344485 - DNA, 497 bp, Homo sapiens
  chr21:40762272-40762769
  hypo
cggcagtcccgggacagccagtgagagaaagggacatttacctagggctgtctgccacccgggggttggggtatggagtgtatgtgggagtttaaggactttgtcatggtggggctagtttgtaggtgtttctcagcaggatgaatctcccagtgttctccagcaacagcctttgctctttatcagtcctgggaacgttcacggccgcagtttgcattcagtcctgcagggacgcacacaactggctgggtcacagagtggtcagggcatagacagaaagtagcgggggactggggaaccctcctgtgacccgtgttggaaggtgctgatccccgttgtccgccctgccagatgtccagggtgctgcagaaggacgcggagcaggagtcacagatgagagcggagatccaggacatgaagcaggagctctccacagtcaacatgatggacgagtttgccagatatgccaggctggaaagaaagatcaacaagatgac

SEQ ID NO: 344486 - DNA, 212 bp, Homo sapiens
  chr21:40891441-40891653
  hypo
cggcaatggctgaaccgaagctgagatatacctgtgtcccactccaaagccacgaacagccttcccaacaagccctttcctctcggtcctggaccacagtacggttcctctacggtgcctggctggccgtgggcagtgtgcgccttggccccagagcgcctcctccgcctggctttggtcctcgcattctgtcttcagactcgatgccgttc

SEQ ID NO: 344487 - DNA, 238 bp, Homo sapiens
  chr21:42572234-42572472
  hypo
cgtttagtttatgagtctgtccaaatatttcgatcatttaaattcagatgttagtttacctcggtttgtggagaatggactgggctgtagaaacttagaagccaagcgaatgtggactccgctgtcttcattgctgtcttgttactatggatgtcggattaggtgcacccgtgaggtcttggattgtaaccccatgttctgcaggtctcaggacctcttccctgcactgtgctagccc

SEQ ID NO: 344488 - DNA, 151 bp, Homo sapiens
  chr21:42593821-42593972
  hypo
cggcagacagagcagcaaacagcaaaaatccctgtcagagggaggcttcacgctggtggggcggaggcagcaggagctgtcgggaccccgtgaatggcatgattgcgcacggggcccaggcagtggctgagttggttacaagaatgcgctc

SEQ ID NO: 344489 - DNA, 235 bp, Homo sapiens
  chr21:42613666-42613901
  hypo
cgcgtggcgtctacactgggtgacccatgtctacactgtgagtcctaagcgggtgcccctctctgtcgccctcccgcagccatcaagttctctggagaccttcttcgactccctggtgacacaagcaaacatccccaacgttttctccatgcagatgtgtggagccggcttgcccgttgctggatctgggaccaacggaggtagtcttgtgggtatcttttagtcttaaaggggc

SEQ ID NO: 344490 - DNA, 270 bp, Homo sapiens
  chr21:42617817-42618087
  hypo
cggctagagccacgtggggcggggagcgccactgtcactcacgcacctttccctttctctcccggttcaagtataacgcagacaaggccatcgtggacagtggcaccacgctgctgcgcctgccccagaaggtgtttgatgcggtggtggaagctgtggcccgcgcatctctggtgagtcctcgggacactcacgggtccccgagttgctgagttacagtcacctgctgaggagcagcactgcgtgttctgagcatctctgaactattgc

SEQ ID NO: 344491 - DNA, 211 bp, Homo sapiens
  chr21:42629074-42629285
  hypo
cgacaaacagctttacattcagcccatgatgggggccggcctgaattatgaatgttaccgattcggcatttccccatccacaaatgcgctggtgatcggtgccacggtgatggagggcttctacgtcatcttcgacagagcccagaagagggtgggcttcgcagcgagcccctgtgcaggtgagcgattctggcatcgaacagggatcccc

SEQ ID NO: 344492 - DNA, 129 bp, Homo sapiens
  chr21:42649187-42649316
  hypo
cgtggaggccacgtcggcttgtcatggtgtcctggaagactctccagcagccagaagaaccttctgtgctgttttcactagagaagatttgagttgcagcctcttggaaagaacatgacggcacggaac

SEQ ID NO: 344493 - DNA, 165 bp, Homo sapiens
  chr21:42780066-42780231
  hypo
cgctaccaagagaagaatccttaaggagagaatttaccggctcactcaggcgcgacacgcactctgtcaattctccagcaaagagatccactgaagggcggcgatgcctgtggttgttttcttgtgcgtactcattcattctaaggggagtcggtgcaggatgcc

SEQ ID NO: 344494 - DNA, 821 bp, Homo sapiens
  chr21:43160967-43161788
  hypo
cgtggacccccggtctccgcaggcagccagctaggtcttgcttcgccgcaggagcgtggcggcggggccatggccgccctggaacttgaggctctgcaggttgatgtgggccccatgcctgagcagagtctccaccgtctgtgcgtgccggccctgggcggccaggtgcagcgcgctgagcccctgctcgtcgaacaggtcaatgacatcggcgctgaccaactcctccaccacctccgagtgcccgtgggcggcagccaggtgcagcgccgtctggttcaggggtccccgggccagcacatcggccttctcctcgacaagcagcttgacagtggccaggtgtccgttgcgggcagccaggtgcagagcggtgtagccgtctgaggtcatggcctccttgccagcgccccgatgcaggagcagcctggcagtgctcgtgtgccccgtctccgcggccacgtgcaggggtgtctgtgccagcaggctgcagacgttgacgtcggagcacaggtcgatgaggatgcgggccacgcggtagtgcccgcgctgtgcggccaggtgcaatggcgtcctcccatccagcgtctgggcgttcacactcacccccggctgcttggccagcagcttgacgatgggcaggtggccctgccaggcagcgtagtgcagtggcagccaggcatccttgccctgcaggctcacgtccacgcctcggcgcagcaggatgcgcacgatattctcctgcccgtgctggcaggccacgtgcatgggcgtccggccctcaaagtccacctcgttgaccgaggcgttcttctccaacagca

SEQ ID NO: 344495 - DNA, 283 bp, Homo sapiens
  chr21:43161857-43162140
  hypo
cgttgacactgatcttccgcgccagcaggagctccacgacaccccgcaccctcctctccacggccatgtgcaacggggtggagcccctacggttgctcaggttggggttggcattgttgagcagcagccacttggcgcactcctcttgcccggcctccaccgccaggtgcagcaggctggcaccgctgtccagtgccaggtccacgtcctgcggctgcaggatcttcatcagtttgctggtgtccccggacacgatggcatccacaagcttcttcttctggac

SEQ ID NO: 344496 - DNA, 317 bp, Homo sapiens
  chr21:43162557-43162874
  hypo
cggacgccccaggcctagcagcctgcagagatggtgactagagctggaaggggctgctccagctcttgccccacctcgaagtggcacctcctgacctggggaggttaagtcggaagttttctatgataatcctgaagggaccgagcttctcgtttcaggaggacgttagtccagcactcaggatgaaaagttgtatttaccacaaaaatcctaccgtagtgcctggaatgctgaaaccctgcaacgagactctcctccgccctcatgtgaaacgcgtggggacttggaagtcggcggtgggaaggtgttaagaaaac

SEQ ID NO: 344497 - DNA, 364 bp, Homo sapiens
  chr21:43165727-43166091
  hypo
cggggatgcagtcgggcaggtggacctgagcccccatgggacctacacttctaatggagttgggtgcgggatgggctcagaagagagggagagtggtccgggcggcgggggactctgcaaagaggagtggtttggaaactcctgcctggaagccgaggagacaaaagacccctgtgggaaggactcgttacctcgctcctgggctccggggggcttttcacgtccagatcatgagcagtttctttcacttcgtcatcaggcttttcacacaggtcctcggtttcagaagtaatttcttgtggggaagaaaggggacatgtcactcggatgatgacttctgcgtacacacgcgttccatataaac

SEQ ID NO: 344498 - DNA, 297 bp, Homo sapiens
  chr21:43166652-43166949
  hypo
cggcccacctgttacacgccttgtttctcacccaggcctggtccctcaccctgtcctgtctgtcacctctgtctcctgtgacacccacagaatgtggcggggagaccccggggtgctcaccttggaaggtgggcctaactcgcggatccccctgccagcaccgctgcatgaggcgtatcaggtggctgcaggcgcgcggccgggctctgcacacgggcggcagctcggggcggtggcccttcaccaccttcaccatgatgtgcaggatgttcttctcatctgccaagggaaggatgc

SEQ ID NO: 344499 - DNA, 157 bp, Homo sapiens
  chr21:43168170-43168327
  hypo
cgcctagcttcgggtgtcacatctatcagacactgcctcatttcacaagccttcgggctgtaggccactgtgcgggagaacgtacagaaggcaagaaaggcgacaggcggtcagacaacacagacggacaccggccagcagaggcctggcaggacgc

SEQ ID NO: 344500 - DNA, 648 bp, Homo sapiens
  chr21:43239707-43240355
  hypo
cgctcacatcccctcccagcgccctgcagcagctgagcggcctggctgagcctggcccgtggccctggcgcctgtacccacctttcccacactcggcccgtggccccggcccccgcccccgccacacccaccttccccacactcccagttctcgctcatgtccccttccagcaccctgcagcagggtggcctggctgagcctggcccatgtccccagcacccgtacccacctttcccacactcggcacacaggtactcgcggacattgtcgtgcacacgcatgtgctccttcagcatgtccttcctggcaaaggacttcccacactgctcgcaggcgtggctcttcacacctgagaacacaggcatctgccactcagagccgagcagctccgacctgcagtggctgcaaagaggatgcaccaaggagaggggcccagcctccccagcagctagaagcgcagtaacaggggtggggtcgcctcttcagcggcctccacagagccctcccggggatcctgtgactccagtagatccctgaggacctggaggggtgagggggctgggggcgctgggctgtgagtggcagggctgataaggacgggaaaagctggagaaacagaggaaggcatgggggaggcaaggtgcgac

SEQ ID NO: 344501 - DNA, 528 bp, Homo sapiens
  chr21:43248413-43248941
  hypo
cggcaccgaactgctccccaaaggccctgctgactgctccatgccgccctgccccaccccgcaggagctgcctctccccgcccgcagcaggtgcgcaggcggcctcaccttccaggtgccggcgctggtggtccagcatgacgtccttgcggtagaacatcttgctgcagacctcacaggcaaacttcttgtcgccgtgcttcttcttgtgcttggagaggttgctgttggtggagaagaatctgaaacacatctcacattggaacgtcttgtcatctgtccagagagcaaacaaacacacaacgattttgaggtaaataacatctcacgcaggcacgcacgtgtggcctgaacgtcaataaagcgcgggtgacgggcatgagagtcacggggatgcgtggccaggaagaaaacagcacctgtgtgtcatacactgtctaccccaggaactcacgatgcagagacgggaaccccggtgcttgaaaagcagacacggagctcacctttcatcaccaagcaacgccagcc

SEQ ID NO: 344502 - DNA, 219 bp, Homo sapiens
  chr21:43273205-43273424
  hypo
cgtgggcgtgtggcctccagcactgcgggaggcacatttctgacgtgaaggcactgggttgctggtgttttatgggggcagcgcagcgccgggacactcccacacagcccattgtggacctgggattagggacaaccaggggcattttacaaagcctcaatcatactgacaaacaggacagaccagaaccttccaataagttaagaatcttaagctacc

SEQ ID NO: 344503 - DNA, 219 bp, Homo sapiens
  chr21:43290534-43290753
  hypo
cgctgggcacacggcctcgtgacaatattaaaagcactcagggaaaacccactaacggaaaaagcaaacgtattttcaaaaatatgcgccgcagaaccatcctgaaaaatgctgtgggtgggcttcagggggctagcgggtgggtggagacggactctgactaagtcagtttgtgacaccctgcagattcccactctggagtcacgacacacacaggca

SEQ ID NO: 344504 - DNA, 213 bp, Homo sapiens
  chr21:43546441-43546654
  hypo
gctttgtgctcagaacatgacgaacaccgtggtgaggaccacgctgaggaacgacctgtcccaggagggcatcatccaccacctgaagatcctgagccccatctactgcgccttccagaatgacctgctgacatcctccggcttcaccctggagtgggggtaagggagaaatgccccggctgccccacagccacgtgcctccagaccacctgc

SEQ ID NO: 344505 - DNA, 390 bp, Homo sapiens; identical to SEQ ID NO: 220415
  chr21:43547671-43548061
  hypo

SEQ ID NO: 344506 - DNA, 413 bp, Homo sapiens
  chr21:43725841-43726254
  hypo
cgcccacactccatgcagctctctttccctggctcggaatcgctgcaggcgccacagaccagacgcgcactgttccccactcctgcttatcggccgcgcggcatccccttgtcgcagcactccagcatccatgcagccgcgcggcaccccgtcttcggagcactccagaatccatgcagagcgcagcaccccacatccagagcgctccagaatccatgaagcacgcggcaccccctcgtcagagtgctccagaatccatgaagtgcgcagcaccccttaatcggagcgctctagaacccgtgcagcgagcagcaccccacacccggagcgctccagaatccatgaagccagcagcaccccacacccggagtgctccagaatccacgcagcacgtggcatctcctcgtcatagc

SEQ ID NO: 344507 - DNA, 516 bp, Homo sapiens
  chr21:43791392-43791908
  hypo
cggccacacccttcgggtgccactcaaaacctccggccatggctcacaccgtccagccaccgctcataccatccagtcaccacttatgctctctggccaccgtgcactccctctgaccaccactcacactctccggccactgctcacacactactgccaccactgagaccctccatccaggtctcacaccctccagccaccactcacttcctccggacaccactcacacactgtggccaccactcagaccctccatccaggtctcacaccctccggccactgctaactccctctgtacagggctcactccctccggccaccactcacaccctctggccaccactcactccctccggccaccgctcactccctccggccactgctcactccctccggccaccgctcacacccactactttgcctggccttgctctacttttgagttctgtgtatgacacgagctgatgctgatctgctgagcaacctgttccgacagaagaatgccaagtccacaac

SEQ ID NO: 344508 - DNA, 637 bp, Homo sapiens
  chr21:43991061-43991698
  hypo
cgcggagctgccgcgcccaccttgatggctgctgcgttacaccagaggcaggaccaggacctgactcctccaggctccactgcccatcagtgcctgctgcctgctcagtgaatggtcaccatggaaacggcgctcaggcctacccacccccaccaccacgccttggtcattgttccttccatgagtgagtgctgcccagcaagacaaagtacaggctccagtgggaaggccaccatgtcagccaagtcccttcccgaaggaggtgcccgcatgcttattcagtgtcactgtccactccttggcagtgactcgggtggaggcgaaacatgactaatcgtaaatcacccctgccttctcccaagtgccacacggtttgttgacacggtgtgcgcctggggcgttcacagtgcttagaatcgcagaggttgccgtttctgtacatttcatgcagagcaattaaatagggcactgcatttttcttcaagttaatttttatttattaaagtaaaacataatgtaccttagaagctagacagtcctacaagcttattatgttgtacagcggcgttccgtccccctccccagccctctctttctagaggcagccaatttcagctgcctctctctgcttacctac

SEQ ID NO: 344509 - DNA, 110 bp, Homo sapiens
  chr21:44110038-44110148
  hypo
gatgaggatacaggcgaagaagatggagacacacgcggatgaggatacaggtgaagaagatggagacacacgcggatgaggatacaggtgaagaaggtggagacagacgc

SEQ ID NO: 344510 - DNA, 558 bp, Homo sapiens
  chr21:44112761-44113319
  hypo
gctggcccgggacacgccactgatgctcttctgacccaggggcttttctctcccgcttccgtccctcttccctcgccggcaggtgacgttactggccttttcttttttggccctgcctcccccttggcttctcccctcttcctctcctccactcggtgcctggtgacatgcggccatcctcagagatgtgcttcggggcccgcacgccttgctcctcgcactcttcctgcaccggagccgcggtgcgaggcctcgggaatgctcaccgtttctctcccgccccccggccgcatgctgcagccattccctcaccacatgtccaggagggagccggcatcctttgctgactttcttgctgtgactatggtgctgcgtggaaaaggggccgtgggaaggctgggcaggtggctgctcagagccccacctgacacggtgacccacggggcctggaaattcactgccccgatttccacacaggtgcctgagctcctgcagagaatgcctgagagcgagacgcatgcccgtcaatttgtgctttcaggcgtcctaagcacacac

SEQ ID NO: 344511 - DNA, 466 bp, Homo sapiens
  chr21:44180227-44180693
  hypo
cgggtgccgtggtgtggcccgctggacgttctcagggtccctgtgtcacctcattggtacctgtggtaaacctggaacactgttgacctctggttgggatgagggtttggcagagaatgttcaaaccagcgcacagccttctgggtggctttgggaggagaggtgggcgggcccaggcacagggtgactcggaccccctgcctcccgcagttctgcgtccacgacaactacagaaacaaccccttccacaacttccggcactgcttctgcgtggcccagatgatgtacagcatggtctggctctgcagtctccaggtgggtcctgcccgctgcacacccagacctctactctcgggggtcagacggaggcccccttccagggagcggcagccccatcccaccaagagagccacaggcgtggggtccccagccgctccgcccctcctagggacgcacccctgcccac

SEQ ID NO: 344512 - DNA, 401 bp, Homo sapiens
  chr21:44190679-44191080
  hypo
cggcacgagggtgtccaggagctgggactggcccagaggtttccgcacggagcacctgacacctgtttttctccgacgtttcccattgccttaagaacgagggactctgaataaatccgtgtgtctctcccagctcttccccatggttgaggagatcatgctgcagccactttgggaatcccgagatcgctacgaggagctgaagcggatagatgacgccatgaaagaggtaaaacacactgagaagagcctgccttccttgcggcaagcaggcacgctgccctccgcactcccgactccagaagcttggacgtgccaagcagggcaccactgaaggccccgtggacaggcacacgtgtaccttccatcagaaagcctggctcagtaaaattagggaatgc

SEQ ID NO: 344513 - DNA, 321 bp, Homo sapiens
  chr21:44205103-44205424
  hypo
cggccccatgcgcgccacatggctggcttgttctgtctgtcattcccctactccttgttctgtccggggttcctccagccccacacctcagcatgcctgtgatgccaccctcagacagccgcaggccccgccctgtggtggtccccaaaattccaagtccgactccaatggcccgagaccggccaggctggcagtttcatctggttagggatgcgtgggctcctccacattccaccttttgagatgtgctgtaaccttctacctggaccccagacagacagggtcagccgaagccccaggcactcctggactcaggcaccc

SEQ ID NO: 344514 - DNA, 509 bp, Homo sapiens
  chr21:44338162-44338671
  hypo
cgcatagtacacttaggcggaggtatgcggcataagggttagtggtgttcgtacagtaccaggccttttttgacaagacacaattgaggtagcttaagttagaaggagaccaggctccagggggtaaccttggccaccactcagctatggaggcattgactgttagggtttggtgacgggttttcacctacggcgcgatgggttttatcagtccacttgcgggatatgcacaccgtccctcatactgggttggtaagtgtccaggactgcgggcattcctgaggagtgaaagtgagtctggggttttgggatgcctgtaagtaagggggaatgtctatcccgtcccacagccactgttcactcataaagctcccccgcatacccaacaattggacacattcatggtaagcacaatggttctcctagatctacaaacagattttttcctggcttaggaagggatgcatctgcttatagtttttgtataaaggaatggaaatgccgcgggc

SEQ ID NO: 344515 - DNA, 265 bp, Homo sapiens
  chr21:44441284-44441549
  hypo
cgtgcatgggcctcgactacaatcatttccctgtccgatccttggctgttttctccacctgcagttgtaagtacttggatatgtgagaatttcctatgctttctaatgttatttttcaactttaaaagcttcagttacagttaaaccaagatctcagcatcttgcatcaagatgatggttcatctaagaacaagaggggcgtcctgccaaagcatgccacgaacgtgatgcggtcctggctcttccagcacatcggggtaaggac

SEQ ID NO: 344516 - DNA, 209 bp, Homo sapiens
  chr21:44444714-44444923
  hypo
cgctgctgttatcgtcaccgctgaaccgttaaacgtggggggcggtctgccttggcctatgcactaaccagccactgcagcactaggacattcctgggacgaggagaaacactttgttcgtgagactacagttaggttttggctagaagcactgttgacgtgaccattattttctaatgattatgtaatgctcacattttgcctaaatc

SEQ ID NO: 344517 - DNA, 330 bp, Homo sapiens
  chr21:44448081-44448411
  hypo
cgttctctgtggagtcttatcacaggcgtgagtgcctggtctgacagagtcgccagcgtctgtcggggatttcatcactgctggtgcctacgtgctgtgctggccacatgtctaggaccactggaggacttacgcctccagtcatctaagaaacagctcatcattgggaatggtttttgaaaagatgcagctcttgccttagatcgtgctttgtggtgaaacaagaggaggtggcagtcccattctctgatggctcagacacgttgccacccagaggctcggccccgttggtgatctggtgacgtccagacgagtgcagactgcccgatc

SEQ ID NO: 344518 - DNA, 128 bp, Homo sapiens
  chr21:44451419-44451547
  hypo
cgagggcacctcggcagcccccacgggttggctcctacgtttgcgtttgtggctggtctcctggtgtcagtgttctcttgtacgttgttgctttcgacttttcagagccctcctgctcacttgaccac

SEQ ID NO: 344519 - DNA, 576 bp, Homo sapiens
  chr21:44482537-44483113
  hypo
gggagccgctcccacgtgaccaagagggtgaacagcctcatggtggaccccgtgtctaggcggtaggaccccagaggtctcaccccagcctctccccctgggatcggcacgtctgcagactttccagttccaacacgttttgcagacagcaaaactgcccgccagccccactgagcatccgtgtgacccacaccggcccttcggtctctgctctccctcaggccaaagtcagctttttggctcttaacagacttttccggggccttaattttcacacgttttccctgctccctgcctgtgccacctgggctacatcccttggtgaggtcaggccacgtgtgcggacatcgtcccccagtctactttgtctcgaccttcgagaccagcttctcaccatgcgtgcggggcttgcccttctgtttcagtggagaagctggttggggcccagggtcagccaggctccccagtgtgagggtgagttacaggctgcaccggcactgtggccgggctctggactcgacctaccgtcctgtccagcaccgtggggatgaagtcgtagccgatcccttccacctc

SEQ ID NO: 344520 - DNA, 1401 bp, Homo sapiens; identical to SEQ ID NO: 336577
  chr21:44494624-44496025
  hypo

SEQ ID NO: 344521 - DNA, 303 bp, Homo sapiens
  chr21:44830969-44831272
  hypo
ataagcaggcggtcaggtcgccaacaatccggtcaaccacggtgcttcttccctggtgggtgtctggccccgttcttgctggggatggcgctcggggatgccaccgtgtttccccagggcccactgtgcaccctgcatgtcgcgcccttgtcacgggagcggcctgctgacccggagcacgcgtggccgtcacaaagggctgcaaagctgcagcaccagaacgcaaactcaggcgtgcggcaacggaggccacgttctcagccaccgtgccactctgcatgtcagctggctgggcgtgcctcc

SEQ ID NO: 344522 - DNA, 724 bp, Homo sapiens; identical to SEQ ID NO: 276191
  chr21:44836810-44837534
  hypo

SEQ ID NO: 344523 - DNA, 320 bp, Homo sapiens
  chr21:44840079-44840399
  hypo
cgggtgaggccagggcaagtgtggccaggctcacctccaccgtcctctgccggtccacgcccagggtctgcatgatacccagcgcctgctcatcgtagtcgcccaggttggaggtgtagctgtgtgcggagaaggcggggcaggcgggtcccggcaagcagggctcagcccgcatccaccggtgctgccggatctgggcgatggtgatgcgcctggcggggtccaccaccagcatgcggcggatcaggctctcacagtctgtggaggggccaggaggctgagccagggcggccgggacctcggctgcgctcccacccacc

SEQ ID NO: 344524 - DNA, 930 bp, Homo sapiens
  chr21:44840677-44841607
  hypo
cggggacggcaggcgcaaggcacaagcctgtgcagcaagggcacccgtccaccctcgaaatagggcactgagaaggcatccatgggctgggtttctcccgcagcccacagtaacctgggcctgattcccagactcaacaaggactcagaagccagccacgaaggggctgcaggagacacaggcccctgcccaggcgagaccacacgactcaccttgagacatgaagaaggggatgcggaagcggccctccagcacccgctgtctcagcgtcggcaggttaggcccatcgaaggggagagaaccgcagaccaggacgtacagcaccacgcccaggctctgttgaggaccacagagccacatcagcgccagggcggtgcccccgggaacacggcgccctcggggaacgcggcctcgggaagggggtctgcgcgcacagggctcctacccagatgtccagctgggggccttcatactccttcccctcaaagacttccggggcggcatacggggggctcccacaccacgtggacagaggctctcctgacttgtagaaattcccaaatccaaaatctgagcggcaaagaaacagatggatgaggttaaacggcaaatggcaaggggctgcggtttcggcacaggggctgtggtttcggcacatgccgggaagctggggctgcttgcgggcacactcccaccccggggcctccgtgcctgccagcttgatgtccctgctcccaccccggaccctccgtgcctgccagcttgatgtccctgctcccaccccagaccctccgtgcctgccagcttgatgtccctgctcccaccccggaccctccgtgcctgccagcttgatgtccatgttgccatccagcaggaggttctcggtcttgaggtcccggtggacgatgtgatggtcgtgacagtactcca

SEQ ID NO: 344525 - DNA, 442 bp, Homo sapiens; identical to SEQ ID NO: 336578
  chr21:44847478-44847920
  hypo

SEQ ID NO: 344526 - DNA, 342 bp, Homo sapiens
  chr21:44866603-44866945
  hypo
cttccctgccacagccggcccagcgggagccaggtcagggcctggagacacagcgccccccaccggagccactgcccggcccagcagcacctgcggagaatcccaccagctcccacgcctcccgccgcgccaccgccccggctttctgcaaatccaccttatggaagccggataaggtgaagtccacatataactaaaagcgagttactgagggttactttctttgcagagtggttcccctaaaggattcctttaaacatgatccggtcagccagtgctcacttacgttcaccaagtcacgtcggtttgtggcggcaggagcccagcgtgccaggcacctgc

SEQ ID NO: 344527 - DNA, 443 bp, Homo sapiens
  chr21:45114160-45114603
  hypo
catctggagcctgcgctccggctcagcgacctttcctctcaaatgcggaagcgtgcacttacagttcagaccgttctcctgtaagttcattacaaacacgggcggaaggcactcaggctttcgttggagaaacagaaataaggccttcttttgagcagcgattgctggatcattgatctgtttgaggaagtgtctgacctgggcctgagagctggagaaggtgcagattcaaagtgagcggctcctgaggagagccgccaaggctgctcgccttctccgtggcttccgcagctaccgtctgcacggtgagagggcacgggcacacggttcgggctggcgtgcagctctcccagccagccacgctctgctcaggcctggaagtgaaagccgcctccttcccgttatgccccccatacaggagcctcggtttttcagcaaaacgc

SEQ ID NO: 344528 - DNA, 259 bp, Homo sapiens
  chr21:45140801-45141060
  hypo
cgggatcccccagcaatgtcctttgttctcgaactcccagtgactcgaggggtgtcctctgattgctcacctcaggtggagcctcgaaaggatggcgctgctgttcctacctcgggtctccccagtgcacggcatccttacctgtgggctccacagggttccatgcaggcattttgctcccataccccgatgtccaagcccggctggacaaggagaagcaatgtgatgaccgaggggctgagatggctggagacccagc

SEQ ID NO: 344529 - DNA, 402 bp, Homo sapiens
  chr21:45167210-45167612
  hypo
cgcccaggcgatttcagtatctgccttctttgtcgttgtgtctagggtgtctgtttgcttgctgtatattcactgagcacagcgggcttctccactggcacagggcacgcctgggcctgtgccctccctgccccgctgggtcagtggttgaagtcaggatatctgtcactgggcatctaactgggtggggcgggctggtgtgctcagcgtctgtctgtccactttctcccatgcttgttctctggaaggttccctgtcctgcgcccagcctgcaggaccccagcttgcagctccctgccttcccttcatggtgctccctggtgtgggctctgctgaccctcggcagacacttgcgtttggatcacgaagagttggggccactgtccagttcagtgcggctac

SEQ ID NO: 344530 - DNA, 932 bp, Homo sapiens
  chr21:45175388-45176320
  hypo
cgggctctccgtggtgggcagtccgcagcctgtcctccagggttcagcacgtgcattggcggagccggctccccggtggctcggagagcaggacggcccttgtgttccctggaaatcccctcctggcagcagtgggcacgtcgggtgttgtgagtgggccaggggcacagcaagtctgtcctccctgcaggtggcctgtgagaagaccgtgtctaccttgcaccacgttctgcagaggaccatccagtgtgcaaaaggtacggcggccgggctgcatgggctgcgtgggctcctggctcccgaagtgggtgggagagaagagctggcacgtgctggttttgaaggtgtgatcggtgtctcctgctgacctcacctctgggagtgggggcaacagcgggagcccctctgagatgggaactcagtgctctctgcctgccccgcagcccaggccggggaaggagtgaggcccagccccatgcagctggagctgcggatggtgcagagcaaaagggacatcgaggacccagagatcgtcgtccaggccacggtgctgtgagggccccgccgcttgcccgtgacacgcagcgcgttggtgtctccgtgtttgtccctgtgaaaacatgtaacgtctgccttagagccatgaccgaaacttgatatttttttctttcatgagtgtccggcatctgctggtcttcattgtgaaacgtgccagtcgtgctttgtgaaaaataacaaagtggtcacagaaatttgtgatctgaaaacccggctcccttccccacaaggctcctgggcctccgggaagacgggcccctgtttgccatctcgggggtgttccctgtgggagggtgagtgggtgaggccgagcctgctgcgtgtggagcctcgagtgggccctggctgccactaccgtacagaggccgtgtcgc

SEQ ID NO: 344531 - DNA, 194 bp, Homo sapiens
  chr21:45195134-45195328
  hypo
cgcctggacctgttcttgcttggggcatcccgtcggtcaccaaccatgacagcgaggcgggcctggcctgtgctccaccggagggggcttcttgcacagatgacctgctcatttcagcccctccagaatcttctggcaggcgcagagcaacaggacgtccattttacagacgaggaaaccgagacacagggaag

SEQ ID NO: 344532 - DNA, 211 bp, Homo sapiens
  chr21:45232938-45233149
  hypo
cgcactcgggcaggcacagcagggcgcaccccatgacgcacccagaacccgcccccacagccccggagtcctggccgctgtccccagccctacgcccctctcagagcttgagccaggggcagcgcaatgggcagctccttccctctcctgtccctggaaaactgctctgggtgatttggcggagagtgagaggattcgaaaacgctggtac

SEQ ID NO: 344533 - DNA, 169 bp, Homo sapiens
  chr21:45268743-45268912
  hypo
cggcacctcgccctgcattctagcgggatcagctgggctccgctaggcagttcttcctctggttttgtctgaagtcagctggaggccggtggcctcactctcgtgcccggtggctggctggcagtcacctggtcacagggtaggctgtgcctctcgtcacccagcaggt

SEQ ID NO: 344534 - DNA, 155 bp, Homo sapiens
  chr21:45289958-45290113
  hypo
cggcacgggcgggcgggattttggattagttttaggaagcgaaccacagccgtcctccttggactccctgccgtggctggcagtgagctggtgcagggaggcgaagtgctggtgttctgggaattttcaaatgcactacagcgatcaggacacac

SEQ ID NO: 344535 - DNA, 703 bp, Homo sapiens
  chr21:45345807-45346510
  hypo
cgccggcgccatgtagctgcctgcccaggagaagcggcgaggcccacgtgtgaggccctgagagctggaaataggtactggatttcagtgtccgatggagaagtctgtgatattttggatatgttggattaggtaaaacacatcgttaaagttaattccacttttctctgtgttttactgtggccactggagcattcagtggtacggtggctgcggcttgccttctcccgctgggtcagcaccagggtacaggtcatctgtagacttttgcctgagacacagacgcctgcttgggacatggactccagctcctcagccctgtcctccagcagcggtgaaatctggagtgttcttgagtaacgcactggcgccaagggggtgctgagccttcgctctgccgtccttggctgaacaagctgtttctctggggaccacgtcaggtaacacgtaggacagcggggtggtccagcagggagggcatgcgcatctgtgtggcaggactgggggtgattttatccgggatcccctggggtggcccagcgttggctcgggtgtttcattctcacagagaacaggcagcttcaggggccacgcgtgcacgagaggagcccccagcccccacggcgcgttcctgggtttccatgctgcggcatttaagaaaagagctctgtgtcgtgctgctggggtagcttccgtgagctac

SEQ ID NO: 344536 - DNA, 754 bp, Homo sapiens
  chr21:45352895-45353649
  hypo
cgctctctctccctcacagcgtgccaggtgccttttctctgcgttctcgtcaacacctgttacattcgtctttttgataatagccaactgaacggcatgaaatgacacctccctgtggcttcgatttgcttctccctgatggttaataatgccgaacagctcttcgttaacctgctggctgtcggtgtggctccttctgaggcacagccgttcgggtcctttgctgtttgctttcttgctattgagtctgagcccctttaccctgtggatgctgggcctgcatcgggcatgtggtctgcagggttttctctcccttgcgggtcgtctctttaccctgtcgttccctttgtcatgcagaagctgtttagtttgccgtaatcccagtggtctatgtttgcttttgtcgtgtatcttttttaaagctctgccatctgttttctccatggggaaaggtttgggaatatcgatgatgtcatcatactcctggctgcttcttgacattttccatgcccagcattgttctcagtgcgccccgggggtctttggttctccatagcctgctggcgtccatgtgtttttattctttctttatggttgaggaaactgaggcacagcttggaagcggttggcactggggttaggctccagtagtctcggcatgtagcagcaaatgtgggaggggcagcacaggggaaaggtgaggggagagtcaggagagaaggacgccgcataccagatgcccagaggccccggc

SEQ ID NO: 344537 - DNA, 169 bp, Homo sapiens
  chr21:45374905-45375074
  hypo
cgtgaatgtgcatcacggctctatctgtggcccccaaaggctgggtgccagctgcctgtcggcagggagcgtatcaccgtggcacgtccatgccgtgggggtcactcagcagccacggatgcgccctgggtgctgtcccggggccgtctcagaagcaccgcgctggacc

SEQ ID NO: 344538 - DNA, 950 bp, Homo sapiens
  chr21:45400182-45401132
  hypo
cgagagagttgatggtgcccttcactacttcccaagcatcctagagtcccacgggctgccccgcccacgggcagtggctgcggagtgtctgctctatcaggcatggtgatttcctgccagcctgtgcctttgacattcccaccagaggcagaaccttctgcaggtggccctggccaggctcctctctcctcccagctcctcattagcctcctttgccaggctaggaaaccgaggtatgcgaggttaaggaactttccttgggccgtgcagctgagagtgcgctttgcagggatttgcatccaggccgcgggactcacacaggccacacctgccacccccactgcctctggctcgtgggaggtgtgggatgtggcgggtggccggggcagtgctgggcaggcaggtgttggtattcacaacgttgctttcttgaccgattattttcctgggagacttcctcagtcaaagggttgatatgcttgcgagctctcgatgcacgctatcagattctccaaaaacgtacagccagcttcgcctgcacctgcagcttctgtgatttgtgctcttaattgacgtggcgctttttttaggttgagtcgtttttcattgccaacaatcttctcctgcattgaaataatagcttgtaaagaagcctcacgcttcctttttctctgttgactcttctaggacgcgctccaggagatatataatcagaagggcatgtttccaggggagcagtttaagcctgcccggaggccgtggaccctcctgaacttcctgtcctgggccaccattctcctgtctcccctcttcagttttgtcttgggcgtctttgccagcggatcacctctcctgatcctgactttcttggggtttgtgggagcaggtaatggacactgtcgctaacagctcacactctgacgggcctcacagtatcagccacagggtcc

SEQ ID NO: 344539 - DNA, 105 bp, Homo sapiens
  chr21:45499846-45499951
  hypo
cgcactcctaagtatgagcctctccacgctccttacctctccgctccagctacctgcagaccagcagcctcttagccagtgaccaccacctcactgaagaggagc

SEQ ID NO: 344540 - DNA, 342 bp, Homo sapiens
  chr21:45508577-45508919
  hypo
cgcgcagcactggtggcacctgtgctatgtgccgtgttatcccgctcttccctggcgctggtggcacctgtgctgtgtgccgtgttatcccactcttccctggcgctggcggcacctgtgctgtgtgccatgttatcccactcttccctgacactggcggcacctgtgctatgtgccgtgttatcctctcttccctggcgctggcggcacctgtgctgtgtgccgtgttatcccactcttctctggcgctggcggcacctgtgctgtgtgccgtgttatcctcttttccctggcactggcggcacctgtgctgtgtgccgtgttaccccgctcttccctggc

SEQ ID NO: 344541 - DNA, 162 bp, Homo sapiens
  chr21:45513811-45513973
  hypo
cgtgctgtgaggcggggcctgcccatggtgtctgctcagcacccttcgcatggcgtgtgtttcgctgcagtgtctgtgtcctctttgcggttatggtgctgtgtgagcagtgacccccaactctctttccagcccatctacagcaagcagtcggtgttcttc

SEQ ID NO: 344542 - DNA, 96 bp, Homo sapiens
  chr21:45516516-45516612
  hypo
tggccgtcagtgctcgcgtgtctctctgaagaggctctgcggttctggtccctgtgcctgagctccaggtgccgccaggtgaggcccctgctgctc

SEQ ID NO: 344543 - DNA, 326 bp, Homo sapiens
  chr21:45518831-45519157
  hypo
cgtctaccaaatacccaacactgaataactagcttccccagcgctcttgcaagtgaaaagggcgttctgtgaaaacagcggctatttcagctcgcagcaccgagcgctccccgtgtgctttccctgagccagctgtcattctgcagcagagacccagagaatgtcaagaacacaagcactcaagaatggaaataactcaaacgtccttcagctcgagagcggttaaactggcacatctgattcctcctcagcagtgaaacagaagggactgttgacacacgcagtgctgtggttggatctcaagggcattatactaagagaaaaac

SEQ ID NO: 344544 - DNA, 89 bp, Homo sapiens
  chr21:45583689-45583778
  hypo
cgcgttcccgagcgtgcactgaaggtgttagcgcgtggcaccggagacaccaggctggatgaggctggacaagcgcctccgccagaagc

SEQ ID NO: 344545 - DNA, 98 bp, Homo sapiens
  chr21:45617247-45617345
  hypo
cgcccagggatggccggtccaggcgcagggccgattgtccacttctggcccctgaggtaccgggagggctggtgagcagcatgtctcgctctgagacc

SEQ ID NO: 344546 - DNA, 53 bp, Homo sapiens
  chr21:45621745-45621798
  hypo
cgcggccggccaggcttggaacgcttgaggcacattctcagagacacgatttc

SEQ ID NO: 344547 - DNA, 236 bp, Homo sapiens
  chr21:45628864-45629100
  hypo
cgcctgcacagatgtccacctgcatgaatgcccacctgtgtccacatgcacgaatacccacctgcacagatgcccacctgcacggatgcccacctgtacaaaggcctacctgcgtgaatgtccacctgcatggatgcccacccgcacggatgcccacctgcacagttatccatctgaacagccctctggtgcctccttttgcttgcacatgttcaaatcctcccagtcctacagtc

SEQ ID NO: 344548 - DNA, 202 bp, Homo sapiens
  chr21:45656873-45657075
  hypo
gccccgcagcatgccggccggtgacatcagggctcggttccggtagcggctgtccacgttttccaaggagctgttctgtgggatgtggtaggtcaccacggttttcgactcactggtttgccaatatacgtaaacatcatttaaatcaaaacggcttccttcagggcaagcgcagctgagctccacgtcgctgcctaccatc

SEQ ID NO: 344549 - DNA, 66 bp, Homo sapiens
  chr21:45736431-45736497
  hypo
cgtacgtgcgtgggtaagcgtggtgtgtgggtgtgggtgtgggcagtgtgcacgcgagcatggcac

SEQ ID NO: 344550 - DNA, 502 bp, Homo sapiens; identical to SEQ ID NO: 276284
  chr21:45750033-45750535
  hypo

SEQ ID NO: 344551 - DNA, 604 bp, Homo sapiens
  chr21:45790621-45791225
  hypo
cggcggggtcggactggaccagctgttgggctttgtttgctctttttacgaattgaaaaactgaagccaggagcggctgggtgacgtcccaggtcactccttactttcctccccacgctgagctcagacgacttcccgtgacaccactgttggtggcggaatgggactgtggctgcttccgctcagccacgctccctctctgtggacggcggagggtgtgtgtcccagcccggctgccgccctcccttaggtctgtctcccggggctgctgtaacccaggctcacaaacctggtggcttaaagcagcagaaacttagtctatcagatctggaatccgcgtcgattggccatcatccagccatcggtgttggcggggccacctccctctagggcctaggggaagagcattccttgctgcctccagcgtctgggtgctgatggcattccctggccagtggccacctccctccagtcgctgcctccgtgtcccatggccgcctccctccagtctctgcctccgtgtcccgtggccgcctccctccagtgtctgcctccgtgtcccgtggccgcctccctccagtgtctgcctccgtgtcccgtggcc

SEQ ID NO: 344552 - DNA, 226 bp, Homo sapiens
  chr21:45834132-45834358
  hypo
cgtctcttgagctggcgtgagtctgtctcttgagctggcgtgggtctgtccttgtggctgctggggacccgcggtgctgtggatccacaagggccctgctcacggtgctgctgcggaggcagcctcctcccgcagggcagggatgttggtgtcagcctcgttccttctgcgcaggcgcagcattattcatgggctcactgctctacccggggagcgtgctggggcc

SEQ ID NO: 344553 - DNA, 468 bp, Homo sapiens
  chr21:45941802-45942270
  hypo
cggatgtagaggtgcgagtgcaccttggtggaggtgccgttgaaggtgttggccaccaccaggaacgagtagggccccacactgaagaactcccagtcgtaggcgccggaggtggcgatggtctggttggcctcgaagagccgggttgccgggttccacttgtagatgacactgtcgatgttgtggttgtcgcctggaaccaagggactgtgctgggggcagggaggcagattccacagccccatggcagccccgacggaggcagagcccagtccaagtccctccccgaggaccgaagacccacgaggacaaggccaaccgctggggacatcctttcttaccttgagcctcccgccctcagccccttgctgactgcacctctgggccatcacaggtgctattcccatatggaaatgcttggtggcccccaccgcccttgggacaggtgtacatctccatggcctcccc

SEQ ID NO: 344554 - DNA, 209 bp, Homo sapiens
  chr21:46035068-46035277
  hypo
cggcgcatgtacgtaagcggcactgtttgttaccatgaaaaattagaaacaacctaaatatccatccacgagggaatggaggcgaatggagccagcgccgcaccacggggaggccctgcacgagggccgtgcgctcacccgacccgcacacacgcaggagcgcgagtgcccaggctgcggaagagagtccaggccgcacaggtgccaag

SEQ ID NO: 344555 - DNA, 63 bp, Homo sapiens
  chr21:46036558-46036621
  hypo
cgagaccctgccctggtcagcacccaattcgagagctctgctcagcagtgagaatgagacacc

SEQ ID NO: 344556 - DNA, 162 bp, Homo sapiens
  chr21:46036651-46036813
  hypo
gctcagcgcaggcagcgcacggacagagtctgcggtgtgaccacaccaagcagccctaaggcagcacgtgcccgcacaagcctcagcctctgctccggtcacgcctgcccacttgggtgtattttttgtctgacttttgcttctggggccgaacaacccagc

SEQ ID NO: 344557 - DNA, 282 bp, Homo sapiens
  chr21:46155048-46155330
  hypo
cggcggcaagtcacgagcagggcgtcactgtcccagcgcggcttcccagcctcctgcaggggccagggttggggtgcattctctgtcttctcagtgaggacgcgcaaatgttccaggatggaagataaatgttcaggaaaacgaggacccagaaattcttcatgggctgcatgagccctgaggcccgactggcaggccactgaggtcacctgaaaaactggtgacaacgggcgggctcagcggctacccggggacaatcacggcaggcggaagagcggcact

SEQ ID NO: 344558 - DNA, 271 bp, Homo sapiens
  chr21:46206052-46206323
  hypo
cgccactctgggcccctgcagcaggcgtgctgccccgctggcatgagtgcaggtgcgcctgcattaacacatgaaacaagcaggttacacatcagttcatgtatatgatctcctgcttctacagaaataaaaagagctgccccgatacaagtatacagccgcacagtccactaatgaggacagcccagactgtgggactcgccatccatctcataactgccttgggggccacattacacacaaacacagattccagaaaccttcagacacc

SEQ ID NO: 344559 - DNA, 326 bp, Homo sapiens; identical to SEQ ID NO: 276321
  chr21:46256956-46257282
  hypo

SEQ ID NO: 344560 - DNA, 173 bp, Homo sapiens
  chr21:46270497-46270670
  hypo
cggggcacgtggcccagagccgggcctgtggacgggcctttctttcttcttggggtggaccccgtccccacgatccctaaatggccaccccccagacagcccaacaggcagcgagaggcctgcaggcactgaggatgccaacagggctggagagagctgcagcgtcctgcccc

SEQ ID NO: 344561 - DNA, 184 bp, Homo sapiens
  chr21:46277475-46277659
  hypo
cgcatgattcactgtttttaactacagttaatagctgtgccaccaccacaggtgacaccgtctcacctccaggggctgggagttgaacacttgctgcatgcctgggccctggcaaggaggccgacggccaggcctctggggctcccgcagcctcacccctctgctgccccggacgctgagatcc

SEQ ID NO: 344562 - DNA, 651 bp, Homo sapiens
  chr21:46308527-46309178
  hypo
ttccgcaccaccctcgcctctgcggagaccccgcagccggagctctggagccggtccccgctgcaccccagcggcctcacctcggctctcatccacatagatgaggtagcggtccatcccgtcctgctgctccagcgtgtaggccacccagcagccctctgagtccctctccttgcaggtcctgcccttcacggggttgttcgacagctgcaggcccggacacgccgcgctgcagttcttcccaaaggggcccttttcgaacttcaggcactcggcgcaggagctgcggggagccaggtgtgagcatcggtgccagggtgtgcgggggctccggcaacgggggctcgggcttgggtgtgtgtccaccagggggggcaggtggggttggggcgccctcaggccaaggagggggcccaagtggggcagatgcgggtgcagcgggtgaactggaagcctgatcccagggcccgcggcaggtgcgcacaggagggaggagggacacaggggcacggcggccgcggagggcccctcagtccagacgcacccgcagagaaccccgcggtgcagaggtgctcactggggtccccgagtgagcccggctgctgggtaggtggccggggagtggggatccctgcccgccctgcctgctcc

SEQ ID NO: 344563 - DNA, 164 bp, Homo sapiens
  chr21:46311711-46311875
  hypo
cgcccgcctcacctgcagatgccgcactccaagaagcccttgccatggcagaggctgcggtctctgctctggtcccggcaccggcactcacactggggaagaacctgcacggtcactatgtccgtgaagcccagcgcccggatgacaaacgactgctcctggat

SEQ ID NO: 344564 - DNA, 85 bp, Homo sapiens
  chr21:46315941-46316026
  hypo
cgcctgcggtgtgagtgctcccgcctgcggtgtgagtgatcccgcctgcagtgtgagtgatcctgcctgcggtgtgactgctccc

SEQ ID NO: 344565 - DNA, 557 bp, Homo sapiens
  chr21:46316870-46317427
  hypo
cgtcatggccacctacagatgggacacagggctgtgacatcctgaccagcaggtggtctctgtggatgtccggccccagccctgccctgcgctgacccactgtcccggcagcctgaccagctctgggtgcccactcggagggtcccccagacacctgcccccatcccgtgtctcccgcagggtcctgctcccactccagagcccggggaacctatggcaggaaccgctggtctcgctgtcggccccaacacaccacgaggttgagcttgtagctgggatacgggcctgacaatggatccctgtagttcagcaaatgttcactttacaaaagcagcggccctcccgggcactttccttccccaaaccccgagtatgtctcctcagcctaagcagcagggcaggggctgtgaggctgcccagctgggcagagccccaggcagggggaagagggggccctggtttcctgcgtgccattttgaagaagatggcggtgatggccctggaatggccagcaggtcggtcactgtccggatgaggataatcgggccctttagggc

SEQ ID NO: 344566 - DNA, 776 bp, Homo sapiens
  chr21:46318789-46319565
  hypo
cgacacgcaggcgtcctgtccccgacgggaagcctcgggctcctcacctagggggatccaggacctgggccggctggttgctcacgtgcccagcatgcagaggtggcgctcagacctgcagtggcgctgggtctggcctgtggctgaaacatgcccccacccaatggatgctcgggacccaacagcactcacctcgtaggtcttcaccatcctactggtcaccgcgaagatgggctggatgttgttttcagccagcttgtgcgccagctggcccaccgatgggtagtcctggagagaggaggtcctgctcagttggccccgagtccaggacaaggcttccaggtacccgcccctgtctgccccgctcagcgtcagccctgcccgtgcttcgaaccctctctggggaaggctggagaggcagaggctgccacgcaggagtgcagggcagagagctgccacgccctctgggcaatgtgtgcatagactcgggctttcagagtccaggcatgagcagcatttgaggcgtctcaccgtgggactggggatgtccacgggggcagaatcccagccttccccacacggtggacctgctttcgcactgagggacactcagtttcggtagaggccatgagtgtcaggtgcggctctccctacccgagttccgggacccgagggccgtccctcccgtctgtggctcccggcggaggacctgagtcttgtatctctaaagtcctttgcggcccccagagcctacaacgtcaggctgcaagagcgtc

SEQ ID NO: 344567 - DNA, 640 bp, Homo sapiens
  chr21:46320233-46320873
  hypo
cgaattcgttgctcctcttgtacaagttgtcctccaggtgacagcggccgtcgttgggggtcaggatggcgcccagcttcccgtcgcccgcgaaatggaagccgtcatcagtggcaaacaccagcagccgcgtgacgttgcgccagccgatttcctcctgagaagaaggcgtggggggcagggttacctgcctcagtttcccagacccggccctctggagcagaggagacgatgcagagctggtggggtggcccggaggctggtgtgggtccccctttcccctgggtctcagggacccagctgtgttcccccagacgccacgcccaggaggagacaacggccctcaaacaccccgtgcacatgtgaggcgcagggagtggaggcacgtgtggaaaggcaaggagagagacacggctgcggtccctgcacttcagagctgggaacaaaccctcaggaaaccatccccaaggggaaaaaccctcgcagacgtgtgggccacacgcagaacgagtgcaacatggaggaaaacgagcctgaggggcccagcaggccttgagtccaccattgacagcccctggcaggcgcatgtgggggccgtgcgtgtcctaggctgtgacctcacactcgtgagcagtgtgtc

SEQ ID NO: 344568 - DNA, 659 bp, Homo sapiens; identical to SEQ ID NO: 276335
  chr21:46323289-46323948
  hypo

SEQ ID NO: 344569 - DNA, 218 bp, Homo sapiens
  chr21:46324938-46325156
  hypo
cgtgcggcgtctgcagcgacatggaggaggcagccaagaccatgtccccacgagcaatgtggccatgctgcagtcaaagggcacagacataggcctttggtggctgaccaaggggccccgtcccttcccttccagagtagaggctcagcgaagggccagcaggctgcgggggtagggccaggaccccgcgagaggacagtcccttcccagatcctgcc

SEQ ID NO: 344570 - DNA, 422 bp, Homo sapiens
  chr21:46326574-46326996
  hypo
cgtcgggctgcgagagagtgcagacactgggcaccgatggtaagggctggggcagctccacctggggacagagcggaagggcactgaggagctcagctttccagcagccttggggcttcactggcccacacacccgtccgacccggacacatgccttctgggcagccctgacaccccagagcagggccggactcccagccagagccaataaccagcacagacggtgcctggcaccaccaccgaggccaagcctacctggtcgcaggtaaagcgtcactttttgtggggacagctgcttctggcccccattgtggtcttcctgggtttcagcgaggcttgtggggtccatgatgtcgtcagccgcacagcccctcatgagcagctgtggccgggtgtcgcagcgaatggagtcaggatccccc

SEQ ID NO: 344571 - DNA, 1563 bp, Homo sapiens; identical to SEQ ID NO: 336584
  chr21:46351328-46352891
  hypo

SEQ ID NO: 344572 - DNA, 140 bp, Homo sapiens; identical to SEQ ID NO: 276343
  chr21:46359115-46359255
  hypo

SEQ ID NO: 344573 - DNA, 277 bp, Homo sapiens
  chr21:46397987-46398264
  hypo
gccaaggatgcctggcgagtgggtggccgaggcaagttggagcctgtgtccctgctgttcagtgtcctggcccttccctgacacgagcagacacggcatccacagagacagcccggacaccctccaaggccccggccgatgggacagacgggcgtacaggagccataggcagcagatcccacgctccctcggccggggccagcttggctgcccagccccagctccttagagaacgggcttctcgcttcagaggagctggtcacaaaccagtggtcgc

SEQ ID NO: 344574 - DNA, 477 bp, Homo sapiens
  chr21:46424403-46424880
  hypo
gtccacccccactgcggtgcagtgccagggtgagccagccacccccggcgggagaaacaccatccccacagccggcgctcctgtgccccctcctcccagccccgggcaggcctcgcctctgtgcgtttcccatggatgaggtcatagagcgcgtggccttccgtgcctgcctcttccgggcagcagcatggtgggtgtttctgaggctcctccgtgtcgctccacccgtcagcacttcatgcctctcggggctgggccacatttcgttgcagggatgggccacgtttttaacctgtccatcagcggacggacgtttgggctgattttatcttttggctatgatgaataacgcggtgatcaacattgattcacaagttttgtgcggacccgttttcagttgtcctgagtatcagcccgggcctagacttcccgggttatatggtgatacagtttaaacgcatgtccttgccaagcctc

SEQ ID NO: 344575 - DNA, 811 bp, Homo sapiens
  chr21:46492399-46493210
  hypo
cggtgcctcacgtccactcaggccccggccatctcaccctcctggggagatggagggaagcaccatggggatttgctttttcttgctgccgacggagcccagccaccacgggagggaggcccggccagcctgcggtgggtgggtgacatgtggcccggatctgcccggggcgcctgcctgtaagtgggcccagcagacaccccatggagccgaggcaagccgtcccagctgaaccggcttaagctgcaggcccacagagtcatgagcagtgaagagaggttttcgccctctgaggtttggggtggcctgttacacagaaatacacacaacgtcctcaggcacgtatctctttaagaatgtgtcccgagaaggcgtcccaggagtcttgatttttatttagccgtccacggttgcccctttgggtgcttcgccttcagatggggtgaagggctcacttgttagctggctggccccaaagacaggcttgttttccaccaggcagtgactgaagccggcagcctgctgcataccgcgggccttcccctgacctgtccgggactgcgggctggcggctgacacctgcggagtgcttaccgcataccaggctcccaaacttccatctgtgttcgtcttttaagttttgttgttttccagagtcggagtctcagtgttgcccgggccagagcgcagcggccatttataggcgcggacctcggcctcgcacaccacagctccagctctgagacacaagcgacccgcacccccccaccgcccagccccagcctccagactggctgagatcacagtgtgc

SEQ ID NO: 344576 - DNA, 151 bp, Homo sapiens
  chr21:46645777-46645928
  hypo
tctctgccccctagcgtgttttgtgacaatctccctgggtgaggagtgggtgcacccagccccgaggccagtggttgctcggggccttccgtgtgagttctagtgttcacttgatgccggggaatagaattagagaaaactctgacctgcc

SEQ ID NO: 344577 - DNA, 98 bp, Homo sapiens; identical to SEQ ID NO: 336586
  chr21:46686353-46686451
  hypo

SEQ ID NO: 344578 - DNA, 262 bp, Homo sapiens
  chr21:46748053-46748315
  hypo
cgccccggggtcggggtctcacagcaggagcttagctggtgtcggcatctcctggacccgtcctcagctccgagcgcccagtcctgccacctgtgtccaagtctgcactgtgcccacgaggccctcaaggccgcagacagccccacacttctcggacgccgccccagcacggtccttgtgtgaggtggacactccttctggacgccgccccagcacggtccttgtgtgaggtggacactccttctggacgccgccccagtac

SEQ ID NO: 344579 - DNA, 634 bp, Homo sapiens
  chr21:46779388-46780022
  hypo
cgcgtccatccctctgtcctcatgggcaccgggtgaggcctcggggacagggaaactggacgggccccactgctgtcctgggccttcctcccgtgcaggtgataaggaggtgagagcatcgtgacggctggcacaggcctgagagggaggggatgggggctgctctaggtggggtcgggaggccccactggggagattcctccaggagacccagaaagctggaagccgccagcctatgcagagggcgctccctcctcatggatacagtccccagagaacccccccgcaagggccttaaagcgaaggcttgttctgaggttcaccaggacaagcaagtgtggctttgccctcttgccatccacacccctgggacatccaatcaggaccagcgatcgtccactgcctagaccagacccagtcatccccgaattcattatgtgggaactgaggagggggctccaggcagggggatcgtgcaggtggtcttggtgtccaggaggcctcacagtatccactcaccgccgtctccaccccctcaggcacaggtccctgtcctcatcctcatcagtgcggtcccacaactcaggtgcggcccccactccccttcccgccaacccccttccccggccctgcc

SEQ ID NO: 344580 - DNA, 184 bp, Homo sapiens
  chr21:46799934-46800118
  hypo
cgcacccagagtccgtccgtgcacacactcaccttgcacccagagtccatccatgcacacacgctcatctctcacccagcgttggtccgtgcacacacgctcacttcgcacccagcatccgtccgtgcacacacgctcacctcgcacccagtgtccatgcacacacactcacctcgcaaccagc

SEQ ID NO: 344581 - DNA, 678 bp, Homo sapiens; identical to SEQ ID NO: 336587
  chr21:46800406-46801084
  hypo

SEQ ID NO: 344582 - DNA, 214 bp, Homo sapiens; identical to SEQ ID NO: 336588
  chr21:46801338-46801552
  hypo

SEQ ID NO: 344583 - DNA, 568 bp, Homo sapiens
  chr21:46801820-46802388
  hypo
agtcctgtccaggccgaaaggtggtgggtgggtgctttaggggccagtggggagcgaggccgaagctatctctgtgcagctgccccctcacgctgctgtggccccagggtttggttcagatgctgagtgtccggtgacttccagacacttcctttccagtctcagggaacccaccccacaaagcgcctgccccaggacctgggtggcgcgtctgtgtcttctcagcatatccggttcttggagcagggagacgacccagatcctgctctctggctcctggcccgctgcccccaagctgtcaccaaggcaggtcatggatgttccgtgtcatggctgcgtgggccgttcgaccacggccacacacgcatagactgaggaagacagagcaaggggctgatcgctgccaagcagtggatgccagtgcaccgtgacaaggagcccagagcctttggtgggcgcctgactgtgtcttcaagttcccgggatctgtgtggacagctgccatcccagtcggccctttcttggttttcttggttttcagagaaggggcgaagaataagggggcagc

SEQ ID NO: 344584 - DNA, 177 bp, Homo sapiens
  chr21:46802668-46802845
  hypo
cgggatgggggtgatcaactggggtcatccgggtgggccccaggtggcattgcaaggttcgcacaagacggagacttgacatggaggaaaccatggaccacggaggcagagagcaccatgaagaggctgtccacgaaggtcagagcgatgtggccgcaagccaaggagtgcacggcc

SEQ ID NO: 344585 - DNA, 70 bp, Homo sapiens; identical to SEQ ID NO: 276376
  chr21:46805775-46805845
  hypo

SEQ ID NO: 344586 - DNA, 156 bp, Homo sapiens
  chr21:46808694-46808850
  hypo
cgcagggcgaggtcgggggaatggactcccctgggtttctccctgccgatcgctgtagtggttgagtcctccactgagcacagccactcctgtaggcttaccccgctgcagctcgctctcggatcctaataaacaagtgagtcctccactgagcac

SEQ ID NO: 344587 - DNA, 339 bp, Homo sapiens
  chr21:46811012-46811351
  hypo
cgtgtccccttcaccggcacctgaaggcagagcaggggagttgggtctggacgagcctcttcactgagaacatccccagaaagctcaacttcatcgtaaaaattcatccacatttgtagtcctggtcttaaggttttttattgactttgcttaccgtaagatacaccacgcatccacaagtgtgtgtgtgatgtgtttgcgtggtttacagaataacataaaaaccatccgaaacacaccactgtccacaagctgagtctgaggccaggctcccaggcaaggaggtggtccctggtggcacgggcagggtgcgtggagacggggacccagaggatgcac

SEQ ID NO: 344588 - DNA, 331 bp, Homo sapiens
  chr21:46812000-46812331
  hypo
tgggagaggagctccgggctggctgatacactcgcctcctgacaggagcttgctttgcctccagtttgcagccctcacaaacaaggccgctatgaacatgtggcttcaggtcttgatgcggatgactgaggacctgaatatctggatcacgagacaggtgtgtgtttaactttttagcaagcggcaaaactgtttttcagaagggtcgtcctactgcggaagtgagtggccttccctgagtttccagtcggtgctgggagttccctgagtttccgcactcagggccgggagttctagctgctccacacctttgacgactcttgctacagtc

SEQ ID NO: 344589 - DNA, 303 bp, Homo sapiens
  chr21:46812995-46813298
  hypo
cggcacgaggccgcccgcctgcagcaggcccgcaggggcacggtgggtccccgcccgctcctcatgccttgagcgcgtcatccttcccggggttcacggcctctgacagccagacctcaacacggccagcacggtgtgcatggtgtgcacgcctcctgcgccggggccaccagagtgggctctcaccggaggagaaagacagtcggggagagcagcgctgtctgtcacgctttgtcacgctttgccggtgtcatctgagaagtggtgcaggggacaaggggggcgtgacaggactggtcctgc

SEQ ID NO: 344590 - DNA, 265 bp, Homo sapiens
  chr21:46813682-46813947
  hypo
cggctgtggggccgggggctgagcctgggtgtcagccggctgtggggccgggggctgagcctgggtggcagccggctgtggggccgggggctgagcctgggtgtcagccggctgtggggccgggggctgagcctgggtggcagccggctgtggggccgggggctgagcctgggtggcagccggctgtggggccgggggctgagcctgggtcgcagtcggctgtggggtcgggggctgagcaggcactcttaggccgtctacctcc

SEQ ID NO: 344591 - DNA, 391 bp, Homo sapiens
  chr21:46834432-46834823
  hypo
cgtctggcattttaacagacctgggcggcctcctgcagacaaggctcggaccctgcggccgactctgccccaggcctggcccctgctgatggccatgctccgggcatgtggcctgagggcctcacggacagccagcctcccagaccagaaaacagccctgcccgccagtgagagggcagacagatggacactaatgtccccgaacctaagaaacaaaacccaaaaccctcatttatgcttccacttccgatcacacgcatagaaggccgaatactgaccccgagctgaccaccccggcctgtgggacccgtgagtatggcctgtgtgtgggatgaggctcaggatcaggtgcagatgaccctggattatcaggtgggccccacgtcattac

SEQ ID NO: 344592 - DNA, 499 bp, Homo sapiens
  chr21:46835379-46835878
  hypo
cggctgccacgggtggggcaggaggaggggcaggaccatgcgcaggggcggcggagcggggctgtgaatggagccccccttccggaagatggatgcaggtgggaaccagcgtggtgtggagttgagagcgggggtgcggcaggcggccggggcaggccccggacgggaaagtgcaggcggtgccattgatcagaccctggctgggggcctggggttcacgccttgcctggccttcagagaggtgcgagctctacttttggagaatgaggcaaaggcgcagaagcactcccggaaagtgccatccagcccagtgcctggcgctgcagccgggtggagccccaggtggtgctcacgcagccaggcgggcatggtgtgttgggggttttcataaagaaaagctgaccaggcacgtgccaagcaggccctcagccctgagggtacttgccgggggccgggagagtgtgggcccccgcttatccagaacactgcgtgggccctc

SEQ ID NO: 344593 - DNA, 192 bp, Homo sapiens
  chr21:46837296-46837488
  hypo
cgaacgtgcctgcctgctgtgcagggatccctgggttccccggggcttggggccctttcacctgcaggttccctgtcctgcggtctgtggcttgctcagtgtcctcaggtgtcctcttccgactcgagggtctcacgggtgcccccgccctgcctggcccagctgccctctctgtggcatttctaggaccgc

SEQ ID NO: 344594 - DNA, 165 bp, Homo sapiens
  chr21:46838494-46838659
  hypo
cggttcccacctgctctgcacagcccgcctcgtgcacctgctgaccccaccgtgtccacagcccgccctccttggctcacatctcttcctggggtctcagggaagcggcacctcctcaggggcctcccagccacctcacgtcacttcctggggtctcagggcagc

SEQ ID NO: 344595 - DNA, 456 bp, Homo sapiens
  chr21:46839054-46839510
  hypo
cgatgccgtgtgtagtgacatgcaattccatgtagtgacgtgattccgtgtagtaaggcgatgccgtgtgtggtgacgtgcagttccgtgtagtgacgtgatgccgtgtgtggtgacatgcagttccgtgtagtgacgtgatgccgggtagtgacgtgatgccgtgtagtgacgcaatgccgtgtagttacatgatgctgtgtgtagtgatgcgcgatgccgtgtgtggtgacacgatgccgtgtgtggtgacacttaatgtcatgtagtgacacgctcgcaggatcgccaaggccaggctggctccaaaggcttgggtctggcttcctggggccactgggtgctctctgaggccgcccatcactgttcgggccctggggtgggagctgggctgcaaagtggcctggactttatgtcctgccaggtacagtgtttccctcagcagatttatcaggc

SEQ ID NO: 344596 - DNA, 410 bp, Homo sapiens
  chr21:46841015-46841425
  hypo
cggtaccgggtcagctggtgcctgcctgtcctgccctgcactcctcaggctcctcaaggacagacggacagacaggcactctagagaagggaccttggccagacggctttgccgcccccacccccataggtgcttgctttgagccccttgcaaaggtgaagccagatctgggatcccagggcctggtgcggctggacatgggaggagggccacggtcacgcttgcacggggcagagactcccagaaccacaggcctcaggagagctgggaagggaaggagagggcactgcggtgcctggagagccagagtccgcccgtgtggaagtgttgggggctgtgttgcagtgacagccctggcgtctcaggagcggagcaggacaccgcgtttctggctgtgcaaggctccacgc

SEQ ID NO: 344597 - DNA, 136 bp, Homo sapiens
  chr21:46842404-46842540
  hypo
cggggcctttgcgtggctgcctggcctgacgcacctcgcgccgtgccaggacccgggcagggcagcaaaaggcatctgtgagtcgccgtcctgtgcgggtctcagggcacagtgggtggcacgggctctcccagcc

SEQ ID NO: 344598 - DNA, 947 bp, Homo sapiens
  chr21:46844304-46845251
  hypo
cgcctggagcgcagctctgctgtgggttagccgtgggtctctgggcgagggttcccgggatacagacacctgccccaaggtgccccacagaggatgacccccagggcagccgtgcctgagcctgcgtggtcacctcccacagtgccaaggcgctcccccaaggcccctgcggcccacctgaccagtggagaactcgcgagcactcggccagtggtgcctccaatttgcagcctccaatccctggtcagaggtgtgacctgaccctggaccagagcgctgggccaggtcctggtggcttctgcccttcagcttggaagctcctgaaaaccggctcccttccggggcagcccttggcccccactgaccctccctcagtcctaggtgtgcagtggcgtggggaccctgggaggcccgtggcgcagccccttcccgcctcctgcccgtcggtttccattgctcaggcactgcctcgcccgcgcctctttctcccagacctgagccaccgctgccaggatccttccccagctggttttccttctctttgatgtgtttccactgagggtccaaaccggtccaggcgcgggttccagaactttcttcagatctctcgcacctgaaaatttcctctgtagccattcgcaggaggtttctcagatgccccgggctcgggggccagtcagtctcatgaggacggggtgggtctgacttgtggcatcgcggcctctccatcggtgctgctgggcctgtgagccaatgggtgggcagcaccacccaccgcctccttcctcacaccagtcttgggctgcgcagagccccagccatgtgtgtgctgagtgcagtgtgaccgcgtccgcccgtctccccggacacgcctgttggagccccggccgtgtgtgtgtgtgtgctgtgagtgcagtgtgaccgcgtccacctgtctccctggacac

SEQ ID NO: 344599 - DNA, 232 bp, Homo sapiens
  chr21:46847366-46847598
  hypo
cgcctggcactgaccagactgtgtgcccgggtgccgtgcccatgggctccgcctcccccaggcaggccccctcttgctccgcggccacccctgctcttgacctcacacctctgcggtgtgtctggacacaccagcaccacggcgggcggggagcggaattctccaggtggggtgggcaggccggcgggtgttgaggtctctgtgcatgcttgtgcgtaccctggactttgcc

SEQ ID NO: 344600 - DNA, 160 bp, Homo sapiens
  chr21:46848031-46848191
  hypo
cgagtgtgcatcttgagtgctgtgcaggttggggtccggcgctcctgcaggcaggcggcgtctgggcctgggggctctcagagtttgaggagcgtgtggtgagggtggcctcgggcctcaaagacgcagcgctgtgggaaccgggagactggctgagccc

SEQ ID NO: 344601 - DNA, 285 bp, Homo sapiens
  chr21:46848505-46848790
  hypo
cgccggagagagggagccctgggccatcacgcagccaccgcccggccccaagaacctgcgagtccactttccacctctggatcggcggttctggacgttcatgcaggtggttcccgcagtgcgaggccttttgtttcgggctcctctcacaagcctcacgtttccaggtacgtcgtggtgttgtgcagacccacaattcatcccttttcatgggtgtgtaatagtccaccatagattctctacgttttaaagcatgttttatgtgcctgaaatgtctctgcactc

SEQ ID NO: 344602 - DNA, 670 bp, Homo sapiens
  chr21:46849594-46850264
  hypo
cgggtgacggacaggctctggcagcccctgtcagcatcctctccagggcatgtgaaagccagtgtgtcctcagctgccagtgccccctccccacctcctctgggcccatgtgcacgggacctgggctcccccaaccaagcctgcccgccttggttcagcagaacggctcctgtctctacagcggtgccaggccaggagtgctgtgtctgtgaagcggggtcatggttttggggccctcatctccctcgcgccctctcattggggaccccccgtctccctagcgccctctcgtcctctcctgcatgtgctgtgtctgtgaagcggggtcatggttttggggccccccgtctccctagcgttctctcgccctctccagcatgtgaagtggggtcatggtttgggggcccccatctccctagcgccctctcgttggggaccccccgtctccctagcgccctctcgccctcgcctgcatgtgctgtgtccatgaagtggggtcatggtttgggggccccctatctttctagcaccctctcgccctctcctgtatgtgaagtggggtcatggtttgggggccgccatctttctagcgccctctcgccttctcctgagcgtgtggaactctgtggtggtcagagctaaggttctgaataggtcgaagcacctcccc

SEQ ID NO: 344603 - DNA, 786 bp, Homo sapiens
  chr21:46861383-46862169
  hypo
cgggacgcttgaacccacctcgagggctgccagctcctggcctggaggtgcccccaccgggtcctccagtcctgctgcccggtggctctggccatggttcccgtcccgggctgttcatgttccccctgctcctctccgtgatctgccatctctgcttcaccagccggcgccttctacagaacacggccgtgagcttcccatgttctgccgctggctcttcacgccaacaggtctcctctgagcagggccagcttatggcatggcgccgggtcagctctcacctgtccccctcagacgcccacctctgatatgcaactatttccagcagaaaatgtcccatgtccttaaaggatggagcacgctgctgggaacacggctctctccataaaggagggactccccatgccactcccaaggccacgggaggccgccctcagcacagggtccatggggtctcggggtctccctgccaaagcacaggcctggtgaccccctgggaccctcactccagggagaggactgtgcatcttgtgtgcttctcacagtcactgtgtggggttcagcccaggggaggtcacctcgccctcatccacgcagtcctgcggggaggcccatttgccctgactgcacagtcctgcagctcggctgtgcccttgagtgggtggcgctgccctgttgcccaccgtagctgctgtggggccacagccttgagcctggacactggccatgactggataccaccggtgcacagggtgcacgtgaggaaaccctgcccgttctgtgccc

SEQ ID NO: 344604 - DNA, 106 bp, Homo sapiens
  chr21:46862421-46862527
  hypo
gtagtctctgtcgccgggtagtagcagggccggaccccttcggatgagcacgcccaggcccaagagtggcagtcctggtgtgggcggtggtgctggtgtgggcggc

SEQ ID NO: 344605 - DNA, 418 bp, Homo sapiens
  chr21:46863364-46863782
  hypo
cggcatcgcagcagagtcccggtggtggagatgctttgccactggccacccagagctaggagcctcggccaagggctccctccttgcactgtggtctctcgggacctaggaggtcccggggtgtggactgtgctgaactgttctccgacaggcggccctttttctcccacgtgggcgaaaagtgaagcctctgggtggtcctgtacctgtctgtcacatcccgggctgcagccgggtccccagggaggcctccgtgaaaacacaaatcaagtgccaatttcctggtgaagagtctttatgagagcaatgcggccccgtgcccctttacgcggctctgctggtggagaggaatagctgagctgcagcactaaggagagatgcctgctgcatgatcccctagatgcgtccgagggacact

SEQ ID NO: 344606 - DNA, 361 bp, Homo sapiens
  chr21:46864076-46864437
  hypo
cgctccatggtacctcctgcctcccgaaatcacctctaagttcactttgtgccaggttttgttctccagcgcatcttcagtgctgcgagcaggctgggcttgcagcaggagcacgggtgtgcgtgtggagtgaatgaagggccgtgtgcccgagtaggtggcgtgcaggggtgtagtgaggtgcgtgcaggggtgtagtgaggtgtgggatgtgcagagtgaatgaaggacgttgtgctcgtgtgggtgatgtgcggggttgtggtgaggcgtagggctggggtcagctggtcgtccggacttttggttttctggctgtaaaatgcacatgccaggatagttgtgaggtgcacgctcactc

SEQ ID NO: 344607 - DNA, 297 bp, Homo sapiens
  chr21:46870768-46871065
  hypo
cgtggctggcgtggcagtggtgagccctcgatggctgtgcggacaccagaggctgagggaggacacacactccatggtgggacagcacccccgggtccaccaaggccaggtggacgcttaggctccagggccctcgtggctgctccggcggtgccatcacctctggagacagggcccgactctgcaggacggcaccagtgggggacagcaggtcctctggggggtgtgaggttctgagctgttagcctcaggctcctcaggagcgggcaggtcatgataacaagagtggctgcgtgc

SEQ ID NO: 344608 - DNA, 307 bp, Homo sapiens
  chr21:46885721-46886028
  hypo
cgggcgtccgtggagtgcacgtgtctgagggtctctgaggggtttgcccttttcttcggagccacggtggccgtgagggatgcaggacattgggtgtggccctcgaggactggcctgtctggagcccactcccccgtgggtgaacgcggctcttggtggagagcccagtttggggagaagggacggtcttgtcctgggaggtgtcagacaaagccgagcatgggactcacaggagacccccagtcaggccgtgtcagggtgaggctgggagtgagggtcctggaaagtccggcttctgggagagggc

SEQ ID NO: 344609 - DNA, 274 bp, Homo sapiens
  chr21:46886377-46886651
  hypo
cgcacccgggaaggctgagctctcgcacccgggaaggctgagctctcgaaatggggttcaggcatttgctgtttgattccaggacatctgagacagctgggcctgtacctcggggagtggaggctgcgccattctctgcccatccagcatcttagggccgggcatttggaagctggcttctgaagggagcccccaggagcttcgtggagaggagacgggacagctttggaaagggcgttgctgtcactggggtccctggggccgccggtgtagc

SEQ ID NO: 344610 - DNA, 222 bp, Homo sapiens
  chr21:46893658-46893880
  hypo
cgcacccccagggaggctgcccgagaccccttccctctccgagactctcctgccctttgtgggccccccgaaatctggagctcaagcagcaccggggttgccactgccacctcaggaccgctggtgacccctttctctgtctgcatttagggggtgatcgctgagctgaaggtgcgcagggacccccaggtgagccccatgcactgcctggacgaggaaggc

SEQ ID NO: 344611 - DNA, 1817 bp, Homo sapiens
  chr21:46894494-46896311
  hypo
cgtgtgtgttggtggggtgtgtggaatcacgtggtacccaaggggagaatcccccagccccaggtgtgaggaacagcagggaattctcactcaggggcccagatcacaacatgccccacgtgaacatggacccacagcctcgctcctgggggcgtgggcaggagacgccgtggacgtggacccacagcctcgctcctgggggcgtgggcaggagacaccgtggctggactgtgggcagtgtgtgaacatccatgttactttcatgctttttctttattttgcccaataagcccgttgtttttgcctggaacatgccagaagacgccagatcgttcacatggcggccatgacaaggctgcgccctgggacagcttgctgggtgcggggggtcgccgaggcgccgcacccctcccctggcctgtcttgccctcaggggtcagtagcggtccctgaggatgtttctcctccgggttttcctgaagtttaaaacatccagccgccttggcgcgtgttcggcccagccgggcgtgcgctggggaaacctgtgcggggagcatctgcggtgcggcctcctccagggcagggctctggccagaagagaggagcgcgttccccctcccgcctccgcatgtctgaccaccggccgaggcaggttcagaagcgtcactgtcctcgacccgattggacacgacttactgaagctcagatggtgcctgggcagggaaggccagcgtgcccaccccagcggccccccggagagcaccagagagggctggacgaggcgagagggggcctggaggaggcgagagcagcgtcctttgcttcccaggcctgccgggctcggggcctggcctggctgccatctctccagcctttcccttttcaaactcctcaggcatccggagactctggcagcgggctcggggacgcccgggagcttctcagggaggagacggtgagtagccggacggggcccagcccacgctgcagggtcccgggagagcccctcccagcagtggggtgacacatgtgcacacgcaggtgtggctccaagagctccctctatgccacgaagacatattcctggctggggacagggatgctgggctgggcagacgctcggagcctgggcacaggccccgctccggccctgcctggccgccgcgtgtctctggtgagaggatattcctttaaaacgaggtcctgccctgcacactccttggtcttcgaggcaaccttggccttcccttcgccccatccctccgttagctcgtgcgtggccatcagggaatgaacgcgtgtgtgagcctgacgaccaggaggagaaggcggcgcagggagcgcgcggaaggctttccccagctcgggccacctgagaaaacacaggaggggcggggagtggggaggccccagccgcgggactgaggcgcggtgctgtccgtgagagacgggtgcgggaacgtgttccctgcggggaccctctgcagattcacatcagcttcccagcatggcctgtcgggcgccgggaggcctctgtggtgacggcaggcgcggtcctgggtcctggggagccggggagcccacaggcggccacacccctgcggcccacggaaggaagcccctcgcgcacggccctggagcaccctcctgtttcagaggatttttctttatctttcttgcgatcttaagtatttcatttcacaaaccaagcaagtctccaccgggcatctgccggccgaataacaggccacctcccctctcgtcctccagggcgcggccctaaaacccaggctccccgcgccaccccccgtcaccac

SEQ ID NO: 344612 - DNA, 866 bp, Homo sapiens
  chr21:46900291-46901157
  hypo
cgatatgcagcttgcggggcaggggccaggagtaggccaggcggggggccgagctcagggcaacgtgtctctccggctcttttcctcagaccttcattgacatggagggatctggcttcgggggcgatctggaggccctgcgggtgagtggcccttaaactgcagcgctgcccgatgtctgtgcccatgaggaacaggccatggacccccaagattcagctggggtcctgtggggggtggggatgaggcccgttctgggggtggtggtcatccctggtgggtgccacatgggctgtgactatctgtgttcgcccacgtccagggtcctcgaggcttccctggacctcccggaccccccggtgtcccaggcctgcccggcgagccaggccgctttggggtgaacagctccgacgtcccaggacccgccggccttcctggtgtgcctgggcgcgagggtccccccgggtttcctggcctcccggtaagtcctgcctccaccgtcagtgtcgggagccctgtctgctgggagtgaggggtgaacaccccacatgggagcccctgccccgcctcaggcctccccagtccccgcctcctcacctcatctcctctaggagctggcgggcagttgctgactcggggccaccctggggtgtgcggaagcacctgagtggccaccccatggttctaggggtgctgaccagtgggggtgaccgcaagcaaggcctccgacctctctggccctgtgggtccacggactgcacagagagcgtctccatgagcaattcccatgggtgggtgtgggagggccgaggtcagcattgctggagggccaggggagggaggagcctgcttggccaacgcggctc

SEQ ID NO: 344613 - DNA, 250 bp, Homo sapiens
  chr21:46901458-46901708
  hypo
cgatgggcattcaccgtcaccatcggctctgaggcctctctgggtgccgcatggcaagtgctccccagaatccattctgaggggaatttgggcttaaagaacatgcctaatccatattcacgcatgtggccagactgcctctcagagggagcagcggctaccccagccctggtgtgcaagcatcttcccgccgtggtgctgtcggctctgccatctcatcctgccaatgtggccgcgaaactgcgggcta

SEQ ID NO: 344614 - DNA, 1234 bp, Homo sapiens
  chr21:46906455-46907689
  hypo
cgggagccagggctggaggtaacgagggtgccctgtgcacctcccgctgtgcatgtgggcctccccctgtgcatgtgggcccaaccccgaccaagttcgggctccgtggctctctcctcagttgtgtttctgtgtggctgaaatcgtgtcgtaaagttagaagaaaggctgctgtggggcctgcgttgcttggcagaatgttccttaccttttgatttgcagggtttagaaagcatcataagaaaacgtgtctacgctggggttgcagggccagcgggggctgggctgggtcctgacacgctctcctcaccccacgcaggggagcaagggagcccccggtcctgctggtgctcgtggggagagcggcctggcaggagcccccggacctgctggaccaccaggcccccctgggccccctgggcccccaggaccaggactccccgctggatttgtgagtaccgcctacacctgaccccctggagagccgggggctgccgttgccccagccctactacccctggcatctcactcacagagcagcacgtcctgggcggtggccttgctggcactgcctcatcctgggattccatattccgcatggtggggctcgagtctctcgcccgtcgcccgtgccccacggtgctgatggggatcttggcccagccatgccccagcacccgtgccctgaccaagagcgaatgagctgacccgagacgggctgccccgggggggctccacccaggccctgccaccaggtagacagtccccatctgagaacggcggctccccaggccaccgtggccccaaagcatgtcccaccctcctctcgggcagtgccaccccagggaggggtccttccctaagaagggacacaggcccctacgtgtctcgtgtgtctcttccaggatgacatggaaggctccggggggcccttctggtcaacagcccgaagcgctgatgggccacaggtagtgttgtgagctgggcgtggccggctctgaggggtaagggggtgttgcctggggcaggagagtgtccctgagagccaccggccttgcatgggatcggaagccgccctgcagagccgtgaggaccacgtgtggcgggcgctgtgccccgcgggccacccttgttcttcggagatgccccttcattgaactaaagtcacggggtgagggcctggtctgcaaagtgggagacactgtgagtggtcaagacaaaggaacacggggcc

SEQ ID NO: 344615 - DNA, 309 bp, Homo sapiens
  chr21:46910338-46910647
  hypo
gagatgtgccctcccgggtccctgggtctccatgtgccctcgtgggtccctgggcctccgtgtgccctcccgggtctctgggcctccgtgtgcccactcccgggtctctgggcctccgtgtgccctcctgggtctccgtgtgccctctcaggtccctgggcctccgtgtgccctcccgggtccctgggccttcgtgtgccctcccaggtctctgggcctccgtgtgcccactcccggagcgccaggagttaagtataagtctccgtcagggctcttggtggctgcctccctcccaggccccagccggtc

SEQ ID NO: 344616 - DNA, 616 bp, Homo sapiens
  chr21:46911022-46911638
  hypo
cgggcgcctcctcacccaccgtgggctctgggcaccccctccagggctgggtggactctggggtcctggccagagcggttgagatgaaatgccggacgcgtggcctcctcttccagggagatccagggaaggacggagtcgggcagccgggcctccctggcccccccggacccccgggacctgtggtctacgtgtcggagcaggacgtaaggacgctgcgtgggtgggcacccaatctgtccagaccccccacggggtgcagagatccctccccgagccccccccacacccccacatcccccaggtcaggacaggccctgactgccagtctacactccacctcctcggtgggggctgcagacgccctcggtcagagacgcctggggagcccagctccatgtggtgttggagacaccgaggagaggggagggcctgcacaggggccagtgtttttacgtcaaaggctcccattgggctcactccctgtgtccttgacactgtggccccaaagctgcatgtagtcacccagctgccccgtcagaagaagcagatgcacccttggcccctctggtgaaggttgtgttggttccggaaccttcctcccccactgcggccc

SEQ ID NO: 344617 - DNA, 1584 bp, Homo sapiens
  chr21:46912095-46913679
  hypo
ggccacagggacctcggcgtgacggtcaagacatcagaacatcagaaaagcctcccgtaggccgagccacctccgccggcaagcaagggagcgtctagcagaggcaggagcattttaaaacaaaatggaagtaaaaaccatggcccttagggcgtctggagtctgcatccagctgctctgagctgaggggcgtctgtgctgcaggagggatgccccaggcccaggaagactggaaagcaacattttccttgaatttcctggtttggtgttttgttgatctgtaagtcgctcgagtccagttgaattttaaacgcggctctttgtttccgatttttccttttgctcgtggacagggatccgtcctgagcgtgccgggacctgaggtatgtgcctgcccagcttctaagagacgggcctgcggggacctgggtacaaggctgggtggggtccgggcaggcgcgagggtgcgtgatgaccccagctgacgccgtccctctttccccagggccggccgggtttcgcaggctttcccgtgagtaacctggtgccagagctgcatgctgcccggctggggaggggtctccacctggtagcacagagcagcccggtcgagctggggtgggccttgtcaggcccgagggatagcgacagtcactgcccccaaggaaatgatgggagtgggatgtgggcgagagccgctggcaggccctgtgctgggtgggcacccgtgagggtgaggcagctccttgcacctgcagaggcctgcagtgtccagagtgaggctggggccgggaggtgtcctggtgggggtcacctgcggaggcctgcagtgtccagagtgaggctggggccgcgaggggccctggtcgggctgtcgaggcaggcatattgcggggggcagctgtcgggggagatggagcagccgtcggggatgggggagatgccagccgctcgggcctcacggcctggcctccattccagggacctgcaggacccaagggcaacctgggctctaagggcgaacgaggctccccgggacccaaggtaaggggctcaggtgctgtccctcaaccccctttgtgacccaggggtggctccagcctgcccagatgaccactgttgggagggacctgggaccccccggctgctgctgtgacacgtgaggggtacatccctgctcgggccgtccctgtggtcacctcccgtgaaaggacccagcctgcgaggcccagtcacagcggccctgccttcggggctctgggtgaggctttgtggggaaggagctggccctgactctgctggacctcctgccattccagggtgagaagggtgaaccgggcagcatcttcagccccgacggcggtgccctgggccctgcccagaaaggagccaaggtgagggccgggcagcctccttccggcaggcgtgggggctcctggggctgtggagacagcctggggagggtcttcctgagggtctggctcctgatgcacgagcctctcccaagcagggctctaccatccaggcctggccctggtggcccctcctttctcgcacccatgtcggcggttccgccggcccctc

SEQ ID NO: 344618 - DNA, 465 bp, Homo sapiens
  chr21:46914469-46914934
  hypo
cttccgaggacccccggtaagtcggtccctggctttctctgcactgagctcgggcatgacggcccccaaggacacggtcgcccgcggctgctgagcttgtgctgtgcggcccagggctcatctccctagtgcagttttaaagcgtgtggggcaggtgtcggcgtgaggctgcagtgggctcctccgagctgatgggtggcccagggtgctgtgctctgcatggcccctccccttccccaggaccccccaactcgtggtcaagggccagggtctgccccactaagcctggcccccttcctcttgcagggtccatacggacggccggggtacaagggagagattggctttcctggacggccggtgaggacctggggtctccagtgggggcggcagatggggtctggcaggtggggagcagcccaggcccacgggggtgacatgcccagaggggagtggacggccgcc

SEQ ID NO: 344619 - DNA, 395 bp, Homo sapiens
  chr21:46918218-46918613
  hypo
cgccgccacggtcccctctcgccgccagggtcccctctcaccgccagggttccctctcgccaccacggtcccctctcgccgccagggtcccctctcgccgccagggtcccctctcgccgccacggtcccctctcgccgccagggtcccctctcgccgccacggtccccgctcgccgccagggtcccctctcgctgccagggtcctctgcagaggaggccgccatacctgctcttgctggggctgcactctggggtgggaagggaccaggcaggcagaggccgagtctgggccgggacatccttaaggcctgtggaggcaaaggcaggcagaaagcaagcgggaagatggaagatgtgcccatgccagccttggatctctcagcgtcacacacgac

SEQ ID NO: 344620 - DNA, 481 bp, Homo sapiens
  chr21:46918891-46919372
  hypo
cgagggctccgagggctctagagggaacagtgtttgcaggcggaatggctgatgctcttccaaagccaaggaaggctcagagcattcccctcattcgaaggatcaacaattagagtgacgagatttctcaacaaaacgggagaagccagaagaccataaatggtttccaaaatatccaagaaagtcaattgccagtgtagactccgacagccagtggtactcccgtggccttcagaacgaggatgacatgcaggccagccactccagacccgagctgtgtcggcagtggagggtatttcagggggaagacaaggccaagggaaaggagtgcagagatggggagagacaacgctggcaggaaccggcgtcccagcgacagggaggtcagaggctccctcgggaaccagcgtgggctgccccacatggcatcccaggaacagtggggtcagaggctcccgcgggaacccgtgtgggctgcccc

SEQ ID NO: 344621 - DNA, 300 bp, Homo sapiens
  chr21:46924382-46924682
  hypo
cgggggcggcggtttcttcggctccagcctgcccggcccccccggccccccaggccccccaggcccacgtggctaccctgggattccagtaagtcccagcctgtgcaggcagagcccatgtcccaggggtctgggtgcaggagccgagggcaggtccagcccggccttcgacacccgcgaaggccggagctgcccctgcaagctcagcagccccgacatgtccctgtccccgtgtggggacgcagcaggccacatgggtgtgggtgcactgaccccggacaccccccgtccccctgcagc

SEQ ID NO: 344622 - DNA, 598 bp, Homo sapiens; identical to SEQ ID NO: 276435
  chr21:46925367-46925965
  hypo

SEQ ID NO: 344623 - DNA, 134 bp, Homo sapiens
  chr21:46934012-46934146
  hypo
cggagggagcaggccctcaggttggggaggcgctgggaggaggattctgatggcggtgtgggcctccccagtgacgctctagcccatggcacaggcccagcccacctccacccatcacatcctgctagatctac

SEQ ID NO: 344624 - DNA, 632 bp, Homo sapiens
  chr21:46935349-46935981
  hypo
cgcggggcacagtgcagggacagcatggccaggcagctgccctgagtgtcgccagcacgctgtggccaccgccagagtgcggcacagggcagggggaatcctagggggcctgctagcaggataagcggaggcccccattgctaaggcaggcggccctcgaggcaggggtcgtggggatgcactgagggccgcctgcaaagttaccacaggggcgcccgagagtcactggttcacattctgaacaccgtcgcttggaagacactgcaaacccagcttgctgacaccaggaggatggacagccagctggggacaagtctcatctgcagcctcagggcctgaggcttgggcggagcacagagtgcagggggaaggggttgtcactgggctcaggaattcagctgcctgcggggccggggcctgggccaggtatgggtcgctctgtctctgctccagggaggctggccccacagcccccaggctgtcttctggggaaagcggcgggctctgggctggctgcaggcctccgaggcccttgtcctgcacgctcagtgcctgtgctgccttctcctccgcggcactcctcaggccctgggccgggggctgccgcgggtggtggccccgctggcagtgcc

SEQ ID NO: 344625 - DNA, 132 bp, Homo sapiens
  chr21:46958789-46958921
  hypo
cgccagcacccccgccccacacggccagggcacgtggtggagcagcagcagcacgaagcacactcgagggcgtgtctctttcagtcctgattctgcccaggagaaaggctcctccggtgcgggcaagggcac

SEQ ID NO: 344626 - DNA, 409 bp, Homo sapiens
  chr21:47026394-47026803
  hypo
cgctgcacgggcgtctggctacacaaatgccaccgcgttacagtcgcctgcagtattcagtgcagtcacacgctgcacgggtgtttagatacacaaatgccaccccgttacagtcgcctggagtattcagtgcagtcacactctgcacgggcgtttagctacacaaatgccacggcgtcacagtcgcctgcagtattcagtgcagtcacgctctgcacgggcatttagctacacaaatgccaccccgttacagtcgcctggagtattcagtgcagtcacactctgcacgggcgtttagctacacaaatgccatggcgtcacagtcgcctgcagtattcagtgcagtcacatgctgcacgggcgtttacacaaatgccaccgcgttacagttgcctgcagtattcagtgc

SEQ ID NO: 344627 - DNA, 804 bp, Homo sapiens; identical to SEQ ID NO: 336590
  chr21:47062148-47062952
  hypo

SEQ ID NO: 344628 - DNA, 1138 bp, Homo sapiens; identical to SEQ ID NO: 336591
  chr21:47063293-47064431
  hypo

SEQ ID NO: 344629 - DNA, 387 bp, Homo sapiens
  chr21:47285233-47285620
  hypo
cgtagcccacccccagtcgcctttaggggagaatgcgtaccgctatctccaggaacaaagcatgccctgcgcggccggtgctactggatggatattccttcgcttctatcagtggaagatatcgctgttcctgcagaaataacgaaatggaacaatgcagaagcaacaaggtgatgtcccctttgtacttctcagaagaacctccgtgcctcccgccccatccgccactgagtatctcatgcagcggcgtgtcctctggcaccaggcagggactgatgttctccctcacattggcctcattcctctgggtcctgactcatttgggaactgaaagggctgctcggtggagctgggtttgaggatggtcttccacaaggccctgcagac

SEQ ID NO: 344630 - DNA, 86 bp, Homo sapiens; identical to SEQ ID NO: 276456
  chr21:47328512-47328598
  hypo

SEQ ID NO: 344631 - DNA, 539 bp, Homo sapiens
  chr21:47369859-47370398
  hypo
cgaaggcagcaccacccctgagcagacccgtctgcccctccgaccgtcatgcaccagcccctcccggtgccctgtgtcgtcacatgatgcttgttgaggagcccaggcgtccacccccgcgcctcctggcatgacgccgacctcactccttggcccccggaattcccacaggtgggaggtggtcacagaagctttgtcgattccgttctctttttggcaaggacacttccaggtgcctctgcacgggcactgacccacaggtgggcacagggccatgctcccagcctgggcctgacgggccggggtgcaaccaccgccagcatctaccatgctgtgagtgggcggcggtgacgcacccacctgggaatggcagcgagtgcccggagtgccggattccccccgagctttcacgtctaaggattacgaggaagacctggactacgtgcctttatgagatgcctcctgtgggtccctgaggccgtcaggtgccacctcacccctgcgtgtcctgcggaaactgtgacctgtgactccggggc

SEQ ID NO: 344632 - DNA, 580 bp, Homo sapiens
  chr21:47413791-47414371
  hypo
cgggtccacggagcttgctggagaagcagggatgcacgcagggacgcctctggggccccaggaggagctgccggcctcctgaatgaagatagccatagccagccacgccgatggccacgcacgtgggccgaggaaacgcttggcgaggccaggaaggggctgtgcggggagggaaggccggaacagcccagtgaccacctggacagcatgctgtggctcccagcgtgcccgggcagccatcctccccaaggatggcccagctccacactcacggctcgtttctcttcagggtgaagctggcccgcagggtgatcagggaagagaaggccccgttggtgtccctggagacccggtaggaagcgctgtggggttggggggcgttggccaatttgggttttgggggtagaagtgctccagcagctcacgcactgggggtctgttcatttccgtttgagggcctctgtgtttccgtagatctcgggggtgtccctgcgtgggagccggctgcagggggtgaggcgcggcctgggccgggctggtgtggattgttgagagcaggcccagcgcccgggggcctgac

SEQ ID NO: 344633 - DNA, 207 bp, Homo sapiens
  chr21:47414718-47414925
  hypo
cgcaggctgggctgggccgttgcatcctcccggagctcacctgccccacggggacaggaaggcctccacacggtcacgcccggagacagcaagtctgtgctcccgagcttgtctgcttctgtggacaaatcgaccttacggctccatgtgcgcagctgcccacacaccgagcacaaggccagaccctgggcacggcagctgtctcag

SEQ ID NO: 344634 - DNA, 260 bp, Homo sapiens
  chr21:47421137-47421397
  hypo
tgctctgctgacaccgcccccgcctgcagaatgcaagtgcggccccatcgacctcctgttcgtgctggacagctcagagagcattggcctgcagaacttcgagattgccaaggacttcgtcgtcaaggtcatcgaccggctgagccgggacgagctggtcaaggtgaggcctcgccccgcccggctttctcaagcccaggtgcaccccgaccctgccggccgcccctgcccgcgccagacctcagcctcccgaggccacc

SEQ ID NO: 344635 - DNA, 323 bp, Homo sapiens
  chr21:47425511-47425834
  hypo
cggggtgcacggctgttctgggggccgctaggggactaagaggatcggccgagggctgggctggaggagggcagcagggatgggcggcgagggtgagggtggggcttcctgaaggccttcacctgcggggaccccggcgagcccctcaggtgccacaggcagggacacgcctcgctcgatgcgtcacaccatgtggccaccagagctgcgggaaaatgctggggaccctgcatttccgtttcaggtggcgaacaagcgcccctcacagaactgcaggtagagacgggcccggggcagacgcagtgaggcggtgggcggggccc

SEQ ID NO: 344636 - DNA, 304 bp, Homo sapiens
  chr21:47475686-47475990
  hypo
ggtgggagctgggccgagggtcaggcctggaggtggtgcccatcactgggtcccgctcaagagagaagaggctgggaagccaggtgcagctgtgtgcccacaggcgggtgagacaggactgggcctggatcccgcacccgctcgccgcgcagctcagcgcaagcggcctccgggggcctcctctctgcaaggggagcgcgcgcccggccctgaccctgcctgctgattctctggaaggttcatgtccgggactcctcggtgaccctgggcagagccacccacatgcgctgcctcccctcccacc

SEQ ID NO: 344637 - DNA, 191 bp, Homo sapiens
  chr21:47484113-47484304
  hypo
gatttcatcggactcgagagaaaggggggccacagcagcgttttcacaatagctaaaaggtggaagcaatccacgtgtccccagtggatgaatggataaagaaaacgtgtctatccatgcaacggagtatcattcagacgtgaaaaaggacgaagtcctgacgcgtgctacaacgtggatgagcccgagac

SEQ ID NO: 344638 - DNA, 174 bp, Homo sapiens
  chr21:47489821-47489995
  hypo
cgatggcactttctgtaggccgcagaggtaggggccgcagagccaagcttgctagcatccatgggacgctgaggccccaaataatagagaccagatggcagcgcttacccccagggccgagctgagggggcggccagaggcgcttggcctgcagggagccgtggaggctggcgg

SEQ ID NO: 344639 - DNA, 171 bp, Homo sapiens
  chr21:47497764-47497935
  hypo
ggtctggatgcccccgtgaagtcgtaaaggcccccaggtggacccaaggaaagcggggaggagagggcttcctcgtggggctccagaaaccaggcactcgggcccctgcctctgcgagacgtgttcactcattttgcggggtccccagtctctgcaaagcacagcaccgac

SEQ ID NO: 344640 - DNA, 251 bp, Homo sapiens; identical to SEQ ID NO: 276485
  chr21:47531931-47532182
  hypo

SEQ ID NO: 344641 - DNA, 526 bp, Homo sapiens
  chr21:47565081-47565607
  hypo
cggctgccatggcctgtgaatgtggggtcaccctggccgaaccctcaaaccctgctgggcccaagcacttgccggggtgagggcggtgctggtggtcaaggtccagacagcggccagtggtgacgccctcaggcccctcctggtccccagcccctccccagccggaggctgacccgcttctcactggggccccagctgggggttcgctgttggtggggcccggggagccctgctgtggccgccactcaccaggtaggcggtgaaggcctcggcgtcggcatccaccagcgtggttagcttggccgaagcctcgcggaagggcgggatcaggcgccgcatcgtcgtgtccagggactggaattggcgccgcccgtaggtcatgaggcccaccatggagcccagcgccgcaccctgcgagaggggtggatgtgggggtcgcagggaccccagacggcccgggaccgaccccaggaagagccaggggcccgggtgatccctgcgggggtcccacccgtgtggcccccac

SEQ ID NO: 344642 - DNA, 645 bp, Homo sapiens
  chr21:47602444-47603089
  hypo
atcagggagctggccgccaccctcgactcccggggagcaggcgtcccgcgaccccctcatctaccaggccatctgagctgggcggcgcctcacctccgctcccgggggagccggcctcagggtaggcatgcgccctgggtgggagcaggtcgtggccgccgccctcctggcagctctggctgagcagccgccgcagcatctgattctccttcaggaggcgcacctgcttcttcaggtccgcgttctcgctcaggagccggctcatcagctcgccgccttcagccatggcgggtgcgtccctccttgtccctcacggctcctgcagccccatggaggtgggagcccagagcccgcaggcaccacagaaacagcccaggcacggagttccgtagccaccaccgccttccacgccttgtgatgtcactgccctagtgatgaggtgcccagcaccctgcctgcccccgcgatggctcatggccccgttgaggcagtgaagctggaggcccgtggcgtgcacaggcagccactcccacattatgaccagggcccgagaatgccaaggacattaggcagctacgggatgtagcgactgtactccaagaggggcgtccaagccactccccattgagcggcccagccagggtc

SEQ ID NO: 344643 - DNA, 276 bp, Homo sapiens
  chr21:47640150-47640426
  hypo
cgttccttcaccaggcaggcgccaggagtgtggtgggaaccggacagcagccttggggacgcagcatcaacgacaccaaaggctgacagtgaactgaggacaatagtgacaagctcaccaagaaagaaggcaggatctcatgagaatgcgtaacaggacactccacctggcacggtaggtcaggaagaggtcctcaaagaaggaacacgtaaagtgtgagccagcggggcaggagtggaaggtaagaggctccaggcgaaggaggcagtgcatggc

SEQ ID NO: 344644 - DNA, 271 bp, Homo sapiens; identical to SEQ ID NO: 336593
  chr21:47649462-47649733
  hypo

SEQ ID NO: 344645 - DNA, 258 bp, Homo sapiens
  chr21:47689571-47689829
  hypo
cgctgtggccactacgggcttgtggcaaggaatcctggcagcctccttggagccgctgccagaatgggcagcagagtgtgtgcgaggtgaggtggcgctctgtgcggtgggccgcggtcctggtcacattgcactgaacggaatcatgcagggcctagaacagcaggtgctacaggggctgctctgtcctcatccccaagttccgtggaagtggaacaaaataaccgactggaaaccccaagacacagtttactctgc

SEQ ID NO: 344646 - DNA, 199 bp, Homo sapiens
  chr21:47746265-47746464
  hypo
actacttatctacatttttgcgcagcttgctcacttccgacagagaaaaacaaaaggtgacagttcgcattcggagaaaaagacggcgaagaggaagggctcggctgtcgatgcgtctgtccaggaggagagtccggtaaccaaggaggacagcgcactctgtggaggaggggacatttgcaaaagcacatcatgtgac

SEQ ID NO: 344647 - DNA, 100 bp, Homo sapiens
  chr21:47797837-47797937
  hypo
cgtctgcttgccgtacctgtgggcgtcctacgtacatagactcagcgtgtgccctcggtgtccgcggctttcactttgtgtgtttcccaggttggcgcac

SEQ ID NO: 344648 - DNA, 218 bp, Homo sapiens
  chr21:47799620-47799838
  hypo
cgagtctgctgccgaacccctctctagtgaatttttttttctgtgattgtatttttcagctccagatgtcaagggagctctatttcagtctttctctctgctgagggccctgcgtgcattgtgccctcagggctctggcgggcggtggacagcctggccctggccttcacccctgctgtgccaagccacatggtcactgcagccggcccaggacctct

SEQ ID NO: 344649 - DNA, 731 bp, Homo sapiens
  chr21:47832850-47833581
  hypo
cggagctgctcttggtgaaaaatgaaatgcgcctgagtctggaggacggcggcaaggtgtggggaggggggaaggcgcgaggtccccccgggagaggctggacacgcggcagcaaggtgtggggagcggggaaggcacgaggcccacccgggagaggctggacacgcggcagcaaggtgtggggagcggggaaggcacgaggcccacccgggagaggctggacacgcggcagcaaggtgtggggagcggggaaggcacgaggcccacccgggagaggctggacacgcagcagcaaggtgtggggagggggaaggcgtgaggcccccctgggagaggctggacacgcggcagcaaggtgtggggaacggggaaggcacgaggcccacccgggagaggctggacacgcggcagcaaggtgtggggaggggggaaggcgtgaggcccccctgggagaggctgggtgcagaacatgtgggtcttgccctgggcagaggcgggtattctgctgaggtgaggagcacagtccgtgcctgcagtgacatgttctctgaatcctttctgttctgtaacgagctgtccataactgttgtgaaatttcgtacgtgcttcatttaagccactctgtagaaacaatcagttgggtttttttcttgtaattgatccaaatggatttaactgtgctcgagggttagtcctggtttgtcttttcatgggaggaccacatcgccccc

SEQ ID NO: 344650 - DNA, 209 bp, Homo sapiens
  chr21:47856006-47856215
  hypo
ggctgctctctgccgcccggcttctcaccagcttcaccagccaggccgtggacaggtgtgcacccacgccacctggcgctcactggtcccttgcagccacccctctgtcccagacccggcccgagggctggggcgcgtctggtgtgaggcccctgctcctttgcacttaacgctctagtcctctttctgagactttgctgagggattcc

SEQ ID NO: 344651 - DNA, 221 bp, Homo sapiens
  chr21:47872870-47873091
  hypo
cggtcaggcgttccatctctgtcagagacaagtggcataccagaagacagatctacacccgcccgccccccaaatgcatacaattctctgctccaggtggcatgacagaatctctacattgcatcattctgcaccattaataacaccaaaaaaacacctgttggactatatggcccaggcaatagcattacttcatcacaacccggatctactgtacagac

SEQ ID NO: 344652 - DNA, 66 bp, Homo sapiens
  chr21:47918529-47918595
  hypo
cggcgacccgggcgactcacctccactccgctccagagccattccagcgtcgagccctggctcgac

SEQ ID NO: 344653 - DNA, 1094 bp, Homo sapiens; identical to SEQ ID NO: 336594
  chr21:48087109-48088203
  hypo

SEQ ID NO: 344654 - DNA, 1539 bp, Homo sapiens; identical to SEQ ID NO: 336596
  chr22:17849492-17851031
  hypo

SEQ ID NO: 344655 - DNA, 106 bp, Homo sapiens
  chr22:18084157-18084263
  hypo
cggcctagcagagaatagctcaggtaaccatcagttcagaaaccgacacaagtgactgacatggaaagatgcgcgcgatgtaactttgaaaagcaagctattaaac

SEQ ID NO: 344656 - DNA, 361 bp, Homo sapiens
  chr22:18265358-18265719
  hypo
cgatctgaccccgtggcatccttcctttcctacaaactgcactgagacccaggtgtcatcgtgaagttcatgccagccagaggagccactgtggcgtttccggccataggcctgggcaggagccgctcccaggcgtgccgtgggcagggccgggtcagccttcagggaagagatgcctgtatgggaccaactcaggcagccacagagggatggcccagcaccccacaaaacccaaagtgctcagcgtctaggatctgtttacggggcagagaagtggatgttcttttcctggttcaaaggtagaaacaggcttggagagccgcacccggcatcagccagccaggcagacgcctggtctagc

SEQ ID NO: 344657 - DNA, 143 bp, Homo sapiens
  chr22:18287373-18287516
  hypo
ctatgtaatttccacgcctgagatgcagactgggcactgccgagaggctgggcttgagcaggcggtcctcatctccccagaatcataaagacacacagagcacagcactcggccgccatggtgttgccctctctccaaacccc

SEQ ID NO: 344658 - DNA, 226 bp, Homo sapiens
  chr22:18328049-18328275
  hypo
cgaaacttgggaaggaaaacatccaagaggcgtctgtttgacgtgggtaacgtggggaacgcatactgtctggcaagaattctactaggaccacgggaaacaaagcagattaaaacactctctactctaaaagagcttcagtagcacctgggagagggccctgcaggaatcctttcggtacgacgtgtcaagtaccatgagccacgtatgcactcatgggagaaca

SEQ ID NO: 344659 - DNA, 568 bp, Homo sapiens
  chr22:18340837-18341405
  hypo
cgtggctggtagaacccggaagtaattgatggagagtcccatccacctggaggcccgcatcccctcccgggcaatgaaacgtgtttctgcgtacaagcctaccaccccctcccgccaaggtaagcggtgaggagacaaggagcaattataaagaaagaggtgttggcagccaacagggtgctgagaattccgggcggtggtgagaggagcccacagtgccatgacctgacctgggcaggagtgccaatgggcctcaccaccccttgtttcattatgactaatctacttgctggcacttgtgaggcgcttggctgggtgagctgcaaggtaagggctggtttttgagtctaaaggaggtttcagggcttcgtgaaaggggctggaattcggaaagacttctcctgaaatctctgcctggctgctgccgttcagagctccacatgggtgtttttatctcggggagcacttgtgggaccgggtcctatacggcatcatcctgccctattttttagcatgaaaataagagtggcccattttcacagccgctctccttccatgtgtgtgccac

SEQ ID NO: 344660 - DNA, 285 bp, Homo sapiens
  chr22:18348548-18348833
  hypo
ctgccactgcatttcgggccctccccgttcccaggagaggcaaggacgcaggggcatttgcaggttggccgcccccggcccatagccacactgctgcaacacccactgcttctcccccacttacaggagagtcaccattacctttccagacaggggagccactgccggtctcttcctttgtgcgtagccagagagtcgatagcagtagtgtggcttacagtagaatttacctgcagacagcaagaggcagggacagaggcgatgagccaggcacggatcctgaac

SEQ ID NO: 344661 - DNA, 542 bp, Homo sapiens
  chr22:18443260-18443802
  hypo
cgaacccagcatatgggaaggaaacatgcaccctggaacaccccgcccaggagtgtgtgtgggaaggagactccaggagctctgcgaactgttctggaactggacctgttcaggattggcaaggggctccgggaacagatcctgtgggtgtgagactgtgtccccgtccgcttagggaaggaccatgggggtgagagggtggggggaaggaggcagatttggaaacagacacccgccccggggtcagatttgacccaggggggcccgcaaagtggggaaggaggagaggaagcactaagctgtgccagggagattctgaggcgagcaggagcagagcaaggaccgaaggagccagcacggggtcactgggagtcctccaggcatggaaagagcacgagctcagcaggaggtgctgggtcatgaggtgagcagggcaacgagacggtgcgggacctggtaggccacctggcagctttggcattgactggggtgcgaggggaaccactgcaggagtctgagcagggaagaatgacatcgctacc

SEQ ID NO: 344662 - DNA, 425 bp, Homo sapiens
  chr22:18619428-18619853
  hypo
cgaacacatgttctgatccacctgaggcaaaaggcgcccctgtggagcccagcacgtctgtgtgggaggaaccgcctggaggagcagagagcaaagcaaaggggcttggggcggaacacgacgggagtggcaggagcagccagcgggaagccagggagagggtttggagatcagccagtcgcgggcaggggtaggcaaaacctgtaggttcctgtggacgccctggaattgtgcagttacttctgagtgaggcatgaaaccagtgagttctgaggagacaactaacgctgcaatttaatttccagttaacctgtggagcttcagaagctctcactcacaactgggatattaacaaggtcggatccggagggaagtccctcagcacatagagcatgaagtgtgcacccccccgtgcagcaagtcca

SEQ ID NO: 344663 - DNA, 650 bp, Homo sapiens; identical to SEQ ID NO: 336598
  chr22:19706043-19706693
  hypo

SEQ ID NO: 344664 - DNA, 612 bp, Homo sapiens
  chr22:19771495-19772107
  hypo
cgaggagaggcaggcctgggggaccgtgcagcagctgtgcccacctaggaccacagggctggtggggctggcagcttggtagagggcaggtgcacagcaaagttttcaccggtgccggcttgttgtcttccacgctgggatttcacatgaagttctagctaattgagtataagcatttctaaagaacccccggagggttgtttttctttgtgcaaacactccttttgtgcagagggtgttctgtggcttcttggcagagacacaggtgggaaacacctgattgaacatcattgcctggggagtggagacacgcacagcacgtcaacatggagcgcccagcagcggcggcgggtcctgggctgtgctccggagcccttcccgggatcatctcccggcatcggctgacccctcggtgtctacgtgccaagcccaatctgcctgcagggacacccactgccagaggcggaggcaggttctcctggtcccagacccagggccgtctgttggcctgcaggtaacacgcagggaggaaggaaaaggctctaggcacagctgcttgtctaagagggaccctgttggcggcgcaacgctgggtgagtgctgcccgcccgc

SEQ ID NO: 344665 - DNA, 205 bp, Homo sapiens
  chr22:19799727-19799932
  hypo
cgcaggcgcctcctaatcaaatgcagaggatgagcacaactgtttggagaacatggggcctcaggcaggctggctctcacctcgtcgctgcccctccctggcacggcaagcgtccagcgtggctggcccccggccaggatgctgctccggcagaagcccacactctccaagcacacggagtccacgacagcgctcctgccctccg

SEQ ID NO: 344666 - DNA, 406 bp, Homo sapiens
  chr22:19830509-19830915
  hypo
cgtttggcgattcggagtcaaaggcgcacttcatagctcctttccaaatcccgtgcattgtcaggccctgttcccctttgaagcctcgctgagtgattgaagcgtctactttctgaggggcagatagcaccgggctggtaatctgactctaagccacgggataaaggtagtttgtttcctctcagcccgtctgtcaacacctcctcagtaattagccctaattattacagagggccagcctcccattcggttattaaatcagaaatagtatcacggctgggcatctgtcaacgccccgactggcgaccttcgattcattgaatcctctgtcagtatccgcctttggaagcgcccaggcgggcagggaggcagcggcttcaaagatgcagatcccaggaagaattcc

SEQ ID NO: 344667 - DNA, 397 bp, Homo sapiens
  chr22:19839604-19840001
  hypo
cgttcgcacacacacggtgtccccacagcagggccgctcaatccagggatccacaaggggggtgtatgccaccccaggagacgccttgtccatctgctgccatggatgtgcgttggcataattggcggctgcccagatgggaatgcgagggccctgctgacggcaccggccacgaggcatgctgggagcacaggggagaagagaggagagccagcactggtgggtggtgggggtgtggacagatgtggcttgcacgacacaacaggacagggatggctgaacagggcgtggcagacccgcactggtccaggcaagtgctgaggatcagggagctgacagctgcagcctcaggagagctgagaagagctgagagactgtcagtcgcaggccatcatcc

SEQ ID NO: 344668 - DNA, 353 bp, Homo sapiens
  chr22:19899693-19900046
  hypo
cgtccccttagcggccatgagaacaagatgtgctggtggaggaagcggatctcaaacagtttatgcttccaactggcaaaaaaaaataaagtcaggaatttctcaggtttactcaaggaaaaccgaaaggtctggcaatcaaagggactaaaacgcaagcaagccttggcagacaccctgggagggcgtggcagggagagcgaagcagccctgagctgcctgcctcctaaggaccaggagcgcctgctggatcccctgtgagcccaaagagccgtcagcagctgcccgtgaggtgcagagcagggccgggccaggccagggcccctgtgcagtgctccctggtgcggatgcac

SEQ ID NO: 344669 - DNA, 88 bp, Homo sapiens
  chr22:19924393-19924481
  hypo
cgccaaaacaaacaagtagattagaggcgtgggcttattcggtcatgctggaacctcctaatgctcaaggggtacaagtgtgtcgata

SEQ ID NO: 344670 - DNA, 85 bp, Homo sapiens
  chr22:19964975-19965060
  hypo
cgcctccggcgctgggagcctacagcactgcccaggggcccgggctcggcctcctggtacctgtcggccccgggcacctccttgt

SEQ ID NO: 344671 - DNA, 388 bp, Homo sapiens
  chr22:19968748-19969136
  hypo
cgcccacactcaggcctcctccttgtggccgtgccatagtcaggctccagctcagggccaccctcgtcatcagcggccaggctgcgcgtgtcatcctccaagccatacggctctgcctggaagcgctcgggcagggagcggccacctggtggcccaggctcaggacccaccgggaaggcttcccggtggccaggcagtgtgaagcagccatcaccagggcctgggccaagggggccagcacgtgggggccgcatgcccagccctcgggacaggctgccatagctggggctgtcccggggctcggggccttcgggaaagccacccccactgctgaggtaggctcgagagagtgtggccactgggccaccaccacgcagcaggaaatgcc

SEQ ID NO: 344672 - DNA, 232 bp, Homo sapiens
  chr22:20050754-20050986
  hypo
cggccactccccagagccagttaggccaccaggtgggctggggctagacccggctgcgggcgggccacagagggactaatggccaccacttctctccatcctgcaggcagctgccagacccggccatcgaggaccagggtggggagtacgtgcagcccatgctgagcaagtacgcggctgtgtgcgtgcgctgccctggctacggcaccaggtattgcagcaccgtgggtgc

SEQ ID NO: 344673 - DNA, 432 bp, Homo sapiens
  chr22:20228961-20229393
  hypo
cgtcgtccgatatttttacacaagtaaaataaaatgcatatctctatataccgcgatctgggtgggaggcggcgttctggaacaaacgctgccgccgaaccctgtaaacatgatggggtggagatgggggtggcgggcggcaggcgtccatcagggaggacctggcctggcctgccccacgggtcggccgcccggctggcttggcggcgtggagagagaccccgtatgtacacacacctggctgctgagcacgctcttgtgtccgctgggggtcagcagggcccaagcactgtccacagcaccagcgccaggcccaggggggtgaggctgcaggtgaggctgggtagggcacctgagccttctgagtcaccagtcccgccacccccgctgcctgcctggcccagacggcagtggctgcgggtgcggttcttg

SEQ ID NO: 344674 - DNA, 776 bp, Homo sapiens; identical to SEQ ID NO: 336600
  chr22:20791329-20792105
  hypo

SEQ ID NO: 344675 - DNA, 208 bp, Homo sapiens
  chr22:20929364-20929572
  hypo
cgatcaccttgtctgttgtccctctgtcctcaaagatgatcacggaagccttggcccaaggtgggatgcacataagagcccggttcccgcctaccaccgctgtgtccgccatcccgtcaagctccatccctttgggcagacagcccatggcacaggtatttacggggcagcgcccagggcacggctgggagctcggggcgtcctctga

SEQ ID NO: 344676 - DNA, 187 bp, Homo sapiens
  chr22:21011052-21011239
  hypo
cgctctccccgctgcagtctccatggccaccaccaacctcagctaagcgaaacacgttgccacacgctcaagcctaccgcatccagcaggcgtcttacccttctccttctctaagctgggcaccgaacatcagggtatgcagacacaggagagcccggtaatggcctgattccttgccccctcagcc

SEQ ID NO: 344677 - DNA, 151 bp, Homo sapiens
  chr22:21153882-21154033
  hypo
cgcacaatgccaggtgccccacacgagcctgctgagaacaatgggctgcctctgagagacaggaataggggcgtacttgtcgctctcctgagagatgtagagccggttggacaggctggccaagaacgcctccacaatcactgggtccacc

SEQ ID NO: 344678 - DNA, 489 bp, Homo sapiens; identical to SEQ ID NO: 336603
  chr22:21386510-21386999
  hypo

SEQ ID NO: 344679 - DNA, 201 bp, Homo sapiens
  chr22:21977477-21977678
  hypo
cggggcctacaggcgtgtaagacagcttggtctggtctgtgcagaagtggggagtgatgggcaggttcggcagcctaacattgttcaggcgcatggcccctgcggtgtgtacacgaactcggcttcttttgtcctaggtacgccaagggcaggtttctggagactcccttgtgcccgggatggcaagggcaccgggctggc

SEQ ID NO: 344680 - DNA, 301 bp, Homo sapiens
  chr22:21982786-21983087
  hypo
cgtcgagggcgcaaagctgcacgccatcctgggcaagctgggcccgcagcgtgggcgcggtgaggacgcgcagctcatgcagccgctcccaagagcaagagaaagcgtcggggccttcaccgcagccgccggtgggaggcacactggggtagccggggtgcgccatcagctcggctgtcagggtgtggcccgctagggtaccttccaggacccgcgccagggccccggacacgcggtgagcggacatgtgccggccgcaagtgctcaggcccacgaaggcgtctgtccacctgtggggggc

SEQ ID NO: 344681 - DNA, 1145 bp, Homo sapiens; identical to SEQ ID NO: 336605
  chr22:22005779-22006924
  hypo

SEQ ID NO: 344682 - DNA, 66 bp, Homo sapiens
  chr22:22029114-22029180
  hypo
cggggtcacccgtgacggctcttctcagagcgtggtgggggtgccacataaacacaactgcccgac

SEQ ID NO: 344683 - DNA, 261 bp, Homo sapiens
  chr22:22036124-22036385
  hypo
cgtgttcacacatgggtcctcctcttgggtgaggcggggcaggccccacatggcgggaaagccgacctttgcgccgttgtcaatcctgcacctggacgtttgtggggtgtaggtggccagcgctgctccaggggccttgggagccacttcttgccagaagcctgcacaaactggcatggtcagtcctcgttagtggagtgagggctctgctagaccgcaccgcaggagtgcaggcatcttgtgtgcacagcccctgcccac

SEQ ID NO: 344684 - DNA, 170 bp, Homo sapiens
  chr22:22037104-22037274
  hypo
cgtggcctgctgagtcaatcacctctgtggcttgtcccattctaaccagaggtcggcccacggctgcccacgttccggtccgatagctccctaacagcaatgaatgctcgttagccatgtgcctggaggaaggtcacagctcagccagcagctagcgaggctgcgtcccc

SEQ ID NO: 344685 - DNA, 380 bp, Homo sapiens
  chr22:22057979-22058359
  hypo
cgcgtttcagaaactcccggcggggggatggtgggttctttcaggacccctaaagacccaggtgattctacacagggcactgtgtaggtgccatccaggccgtcccagggcccgtgccgctccccccgggctgaaccagggtactcacacggaattgaagaggtaggcgcgtccctggctcccctgaaaggactgaaagaagaaggtcccgtgagattggctgcgagtgctttctggaacgaagcggtgctgcccagaaccaggggagtccagccccgcggctgttagctgcgccgggacgcgtcaccgggagcagacaccggcgtcccccctccagaactccacttctaataacagccacttaacggagctgcaagctg

SEQ ID NO: 344686 - DNA, 279 bp, Homo sapiens
  chr22:22068426-22068705
  hypo
cgcaggcacgcctgcattagagggtcaccttctcacatctgggactgaagatgtgtgtgggcagaacgcagcgtttgtaatcgtgtgaacggaagacacaaacggccggtggcggccacccaggatggtactgggacccggtcaccacggcgctgctgtgcccttccttggtgccccggcctgagatgctgcctaacttggacttggtgcttcttggtctttgcttgtcctgatggctgtgccccgtgtgtggccctgagccacactgctgcgtgttcc

SEQ ID NO: 344687 - DNA, 354 bp, Homo sapiens; identical to SEQ ID NO: 336607
  chr22:22292773-22293127
  hypo

SEQ ID NO: 344688 - DNA, 192 bp, Homo sapiens
  chr22:22324565-22324757
  hypo
cgggtgtggccagcacctggtgaatgcacagccgattcgcaggtccagctcctggcgagcatccactgagagcgcctcgttgtggtcaggctcgcctaggcaggccatggcattacagatgtctgtgtccgtgatggagctaaacctggcccggaacacggtcttctcgccaccatgggccttgttcatgac

SEQ ID NO: 344689 - DNA, 821 bp, Homo sapiens; identical to SEQ ID NO: 336608
  chr22:22862472-22863293
  hypo

SEQ ID NO: 344690 - DNA, 530 bp, Homo sapiens
  chr22:22899582-22900112
  hypo
cggtcttgcagcgacatttctgcctctgctcccgccttcctaggacgcctacgccactgcctgggccgtccccaacccccagcaccttcagaggggccgagtcccagagcatccaccgcattacaaatgcgcacccaccctggagagctccaaccacgagcaccgccgcctcggttcaaggcatccttacagccacaactcctcaactggggccaattttccggggcaggcggcccggggtgacccaagtggcgcacattattttctttggtcttcaacccatttccagagagaaaacagggacccgggacaggggtggtgccgggggcacaagcccaaggtcaccctgcggggaagcggaggaatcagggctcgaacttacgtttttcctcagagagttcaccacaccgcgaagttgctggaaggaaagaacgagacaatggctcagctaagcgccctagccgctgcgtggggcggggggggcggcggtgggggccggggggctgggcagcctggtctgaccaatcccc

SEQ ID NO: 344691 - DNA, 245 bp, Homo sapiens
  chr22:23437460-23437705
  hypo
cggaggcggggggctgcagggagcacaccagcgaccggccctccaaccctccagccactcagcaacatcgccacagcaaccagcaaccagacggcagcagccgaggcaaacacaagcggacggcttcccaccgtcgccgaggacagggaatgactacggcaaatcaggccactttgccaactagggaggtggagtgtcactagtggggaggggcggccaccgcccgctgcacagagcgccatgcc

SEQ ID NO: 344692 - DNA, 87 bp, Homo sapiens
  chr22:23453480-23453567
  hypo
ggctggctctgtaccgagcagggggtgcggccacaaatctccaagcccaggccaggggagagaggcaagcgcactggactcggttcc

SEQ ID NO: 344693 - DNA, 675 bp, Homo sapiens
  chr22:23800963-23801638
  hypo
gagggttcccagagggctgccgggcgaagggagtcctttccaaaacggtttcctgagctctgatgcacacacatgcagctcacccccaagtctagcgttccattagtctaccgttccgttcttcccagcacattcggtgcgcagccgcgaccagtctaaccgtggcacctttccaccggccctgagccctggcgtgcccctccacgacatcccctgggcacggagttgtgtcgacaggtctctgtgactggctgggcatgttttcggggtttgcccgcggggcagcgtgtctcagagtttggctgtacgaagcggtgttgacgggtaaacccggttttgtctctccctccggcggttgagggctggttccgcgttccatctgttagtgatgggatcgtgttgccgtggacgtccgtgccgaggtctgtgtgtggacagcgctcagaccccctggctgcgcgcccgggcgtgtgctgggcccatggactctgcgttcagctctttgaggagccgccggctgtttgcagtggccgcatcacacacgctcccgccagcgacgcggagggtctgattcccctcgacccagcagctcatggtgtttgctctcagtggccgtcggcgcgaggcgggtccgtgtctcgctcagttgaggttcacgtttccccggtgcccggc

SEQ ID NO: 344694 - DNA, 419 bp, Homo sapiens
  chr22:24179789-24180208
  hypo
cgtgtcctgaggggagtggccagcctggggcggactagatgtaccgggaggctcacccagcaggtccacgaggatggagttgcccagcagcagcgagaagcccatgagcgcccaaggcaggaacggtgcctggaaagtgagcaggccgaagaagttgaccctcacccgagggctgcggcggctccacacgtacaccagcatggccatgagggcctggcccaggaagaacaggctgcccaggagtcccagcagctgggccagagtcaaggtgctccggtgcaggcctcagcccaagcccagggcccctctgacttcccaagaccctggaattcttcccctcatctcccctatgtgctattccctcatcaagatgagccagtccaataaaggcgacacactccacgggcttcaggtcccac

SEQ ID NO: 344695 - DNA, 179 bp, Homo sapiens
  chr22:24205105-24205284
  hypo
ggtctcatcaatgttatttataaagtagccagtggagattaagtttccgtgttcagcggtgaagccttgagctatcacggcctcagcttcatggaaaaaggaagaagaaattttaaaaagcaagcagggcaggcagacctgaccaaatgaacccctcggtttcactgtctcacaccttc

SEQ ID NO: 344696 - DNA, 1396 bp, Homo sapiens; identical to SEQ ID NO: 336610
  chr22:24551715-24553111
  hypo

SEQ ID NO: 344697 - DNA, 136 bp, Homo sapiens
  chr22:24560376-24560512
  hypo
cggatccccgtggacgagattgaccggccgggcagctttgcctggcacatgaaccgctccatcgtgctgctgctcaaggtgctggcccagctgcgggaccacagcaccctgctgaaggtgtcctccatgcttcagc

SEQ ID NO: 344698 - DNA, 646 bp, Homo sapiens; identical to SEQ ID NO: 226342
  chr22:24819901-24820547
  hypo

SEQ ID NO: 344699 - DNA, 1541 bp, Homo sapiens; identical to SEQ ID NO: 336612
  chr22:25348202-25349743
  hypo

SEQ ID NO: 344700 - DNA, 305 bp, Homo sapiens
  chr22:25561932-25562237
  hypo
cgcaggccgtaaccctttccctaaccccagcccttacccggagggacgtggggggctgtggaagggctttgagcagggacctattcagttttggaaagtagaatgagaagcacatacagggcgaaggatgccaggggaggtccctcggaagctgccgccgtgggtgaacagatagctggtcatagctggaaggaatgttgttcgagaaagagactttgaaggactgaggatcgatgcagtatggcagtgaaggagagagaggagggagcagcgctggcctcaggaccctcagtctggcattaggc

SEQ ID NO: 344701 - DNA, 122 bp, Homo sapiens
  chr22:25570292-25570414
  hypo
cggagcccacctcggcaggggaccagtatgactgctccagggaccagcggagcaccagcgtggaccactccagcactgacctggaatccaccgatgggatggaggggccgcctccaccggac

SEQ ID NO: 344702 - DNA, 352 bp, Homo sapiens
  chr22:25602982-25603334
  hypo
cgtccacatctcaaccttggtctcccggcaggtgggttggctatgagttccccggctaccgtgggcgccagtacgtgtttgagcggggcgagtaccgccactggaatgagtgggacgccagccagccgcagctgcagtctgtgcgccgcatccgtgaccagaagtggcacaagcggggccgcttccccagcagctgaaaggcacccagacttcaaggacccagacccaccctggggggctgcaagggcaagaagaggaggctccagggttggggcgagggccgacctgtccacccttccctggaatctgctcaataaagcctggggttggtcccccacccgccacgttcctc

SEQ ID NO: 344703 - DNA, 1251 bp, Homo sapiens; identical to SEQ ID NO: 336613
  chr22:25678186-25679437
  hypo

SEQ ID NO: 344704 - DNA, 661 bp, Homo sapiens; identical to SEQ ID NO: 336614
  chr22:25816892-25817553
  hypo

SEQ ID NO: 344705 - DNA, 1160 bp, Homo sapiens; identical to SEQ ID NO: 336616
  chr22:26565123-26566283
  hypo

SEQ ID NO: 344706 - DNA, 62 bp, Homo sapiens
  chr22:26999530-26999592
  hypo
cgtgggattgtcatggctactcaactcacggttcagtccaactataaaacaggcctggccgg

SEQ ID NO: 344707 - DNA, 286 bp, Homo sapiens
  chr22:27007834-27008120
  hypo
cgagcctcagtttcctcatccgtaaaatgagattgagaacaattcctccctcttcagtttgatatgaggattggacataatgtatgtgccaggagtacgaacggccgcaggcacagagcagatgctggagaaatggcagctactgttgtgtggtcattttactgtggcagagagtgtgcccctccgccgcccagtactcacggtcccgcggagacaatgatgctgcgcacacggtcgaagccacggtctgccagatttgagcactcccccgagaattctgctcgac

SEQ ID NO: 344708 - DNA, 164 bp, Homo sapiens
  chr22:27019127-27019291
  hypo
cgagcccccaacctctcacccttcacgggactctgatgcggatctccaccttttttttttcctggcacagatggtggtgtgggatgaggacggcttccagggccggcggcacgagttcacggccgagtgccccagcgtgctggagcttggcttcgagactgtgc

SEQ ID NO: 344709 - DNA, 617 bp, Homo sapiens; identical to SEQ ID NO: 336618
  chr22:27068622-27069239
  hypo

SEQ ID NO: 344710 - DNA, 679 bp, Homo sapiens; identical to SEQ ID NO: 336620
  chr22:28197306-28197985
  hypo

SEQ ID NO: 344711 - DNA, 869 bp, Homo sapiens; identical to SEQ ID NO: 336624
  chr22:29075313-29076182
  hypo

SEQ ID NO: 344712 - DNA, 67 bp, Homo sapiens
  chr22:29076607-29076674
  hypo
cgcgcacggcctgtttctcctaaatataaggactcaatataataataagagaaagcctcagcaccgc

SEQ ID NO: 344713 - DNA, 1019 bp, Homo sapiens; identical to SEQ ID NO: 276748
  chr22:29445631-29446650
  hypo

SEQ ID NO: 344714 - DNA, 86 bp, Homo sapiens
  chr22:29587127-29587213
  hypo
cgcttcattccttccaaacaatattccattgcgtggatggaccacatgttgtctgttcaattcatctgtcgacgcgcatttgggtc

SEQ ID NO: 344715 - DNA, 139 bp, Homo sapiens
  chr22:29686357-29686496
  hypo
cgtggaaactttttaacatgctttgtcgcatttatatgctacaggttacaaagtgagagccttgtatacacttcaatacttaaaaagtacccgtactcagtactcagccggcagcataatgaaaagtgggactagacac

SEQ ID NO: 344716 - DNA, 177 bp, Homo sapiens
  chr22:29733772-29733949
  hypo
cgctgtttccacccacaagagcccccgtggtccagctgccccagcactcctcctccctgccacggaatcccccggggccggtgcttctgccccaccccttccctgcagacgcagccatctttctcaagtgcaaatcagactggttcatctctttgcttaaaactttccaatggctcc

SEQ ID NO: 344717 - DNA, 120 bp, Homo sapiens
  chr22:29758124-29758244
  hypo
cgctcccacaggggaagcatgagccaaggtgcggcagccgctctacacacaaccggctttagccatcaggtgcgacagaggctgcacaccggtgacaaattagagaaatccaatctgcac

SEQ ID NO: 344718 - DNA, 196 bp, Homo sapiens; identical to SEQ ID NO: 336628
  chr22:29876679-29876875
  hypo

SEQ ID NO: 344719 - DNA, 66 bp, Homo sapiens
  chr22:29977676-29977742
  hypo
cgggatgtgcagcagagggtcagtgtaaccaccccatgggttcattttgcccgtttcccagacagc

SEQ ID NO: 344720 - DNA, 229 bp, Homo sapiens
  chr22:30084279-30084508
  hypo
cggcccctcggcactgaagatgtgtttcagtgcagctctcctcggcaccggattcgttgctgcaacagtgggagggaagagccagatgcaaactcgttctgcgagcccgaggttctgttctcatgatccttgctgtgatttctcttttgatgttggcaattttaaaatgacatcagtctatctggacctttttcctaaggctcttgctcagaccactcagtagatagcc

SEQ ID NO: 344721 - DNA, 561 bp, Homo sapiens
  chr22:30090282-30090843
  hypo
cgtcaccttaccccagccatgttgccagggcatgaggactaagatgcttgccctgccaagcccggaggggatgagcagcctcagctggtgccgccacagacagcacaccacagaggtggctcagggaccttggtagatgggaatgtgagaatctattaaaataggcagggatctccggtcctctgtcaagaggcaatgctgacggctttttcctgctggcgtgcctctgcccaccagccttccccttgcacatcctcatttgtcacctcctaatttgaattattgggcaaatctggccgcttatttgggactgacagccaacttcttgagcatctatttgaacagccttccctttcgctcccagccacctttgaggtgagtccaagtggcaggacaggaccctgtgtgacagagcggaggtcttgtgccctctcagcttcttctctgctttcttacagctcaccttgcagagcgccaagtcccgagtggccttctttgaagagctctagcaggtgacccagccaccccaggacctgccacttctcctgctaccgggaccgc

SEQ ID NO: 344722 - DNA, 674 bp, Homo sapiens
  chr22:30091074-30091748
  hypo
cgtccaaggcaccggtgtgtgtgtgtcttgcactccagagctgacctccaccgcccagcctgggaagtcattgtagggagtgagacactgaagccctgagaagccagtgccatcatccccaccccgcccagggttccggaacattcattcccccaccggtgaggacctggcatgcagcgaagcagcccagcccggcggatcccaggccagcacgcctgccggcttctcatcgtcagggagcccgcccagagctcgtgacgagcaagtgctgggtccccgccaggcaccccgaggcggcgctctggctggcagctggtggggaataggcagggcagctgtggctggggagagactttaggcagaagctgtgatgcaggctgactgccagccgaggggctgggtagtgccgtgcgggagctgatggtacagggcactcgctgtccccctccggccaccctagaccagggtccgagaggcaggcaggagccactcatgtcttccccattgcccgacgcccatagacgctccttcctgtgtggggctggggtactccctggtcgtactgcagtcagcacccgtaacccggctatgaccagggatctgtaagccctgtggctccacaggtgctgcttctcactggcccagactctgagctccaccggcccagtctgcac

SEQ ID NO: 344723 - DNA, 51 bp, Homo sapiens
  chr22:30141139-30141190
  hypo
cggggtaaacatctagcgtgtagccaaacgacctgacccgttctaggggtc

SEQ ID NO: 344724 - DNA, 254 bp, Homo sapiens
  chr22:30190745-30190999
  hypo
cggaaagaattctcacttattcccaaggaaaacaagcaagctacagaaaaatgcgtacagtatgatcccaaaagcaaactacgctaactctgtttctatggccacacgcctatgcatgacaatgcagacagaaggctaggaagccccacgccaaatgacagtggttactgcttggaagcacctggagttgtctaaatcttttttttttttttttgttacaggctagagtgcagtgatatgatcttgcaacctcc

SEQ ID NO: 344725 - DNA, 318 bp, Homo sapiens; identical to SEQ ID NO: 276799
  chr22:30857341-30857659
  hypo

SEQ ID NO: 344726 - DNA, 496 bp, Homo sapiens
  chr22:30939634-30940130
  hypo
cgccgctgagaacactggacctaatgaacagaacatctatattgtggtgggcgtggtgtgcaccttgctggtggccctactgatggaggctctctacctcgtccgaatcagacagaagaaagcccagggctccacttcttctacaaggttgcatgaacccgagaagaatgccagaaaaataacccaggacacaaatgatatcacatatgcggacctgaacctgcccaaggggaagaagcctgctccccgggccgcggagcccaacaaccacacagagtatgccagcattcagaccagcctgcagcctgcgtcggaggacaccctcacctatgctgacctggacatggtgcacctcaaccggacccccaagcagctggcccccaagcccgagctgtccttctcagagtatgccagcatccaggtcccgaggaagtgaatgggaccgtggtttgctctagcacccatctccatgctcttccttgtcccacaaggagcc

SEQ ID NO: 344727 - DNA, 127 bp, Homo sapiens
  chr22:30940937-30941064
  hypo
ctccagcgcccggtcgccacccttctttgccccgggaaccccatcccggcacctcccaccccgcatacaccacctaccccatgcaaaaccctatgatggcaggaatcgagacctccaaggacccgtc

SEQ ID NO: 344728 - DNA, 821 bp, Homo sapiens
  chr22:30950922-30951743
  hypo
cgctgggcggtgggacgtcaccaccgcaggaaatcgcgaatgaacttccagagcttggtgacccacaggttggcgccgaggtccatcaggtactggatctcgggcgtgagcatgcgccggcagagctgcgcgtgccgctgcccgatgctcttcttgaggttgtagcccaggatggacttggtgcccagcggctgccagggctgcatggcctcgtcctggatggcggcggcgtccacggcgtggcccccgtcgatgcagatggtccgcatgcgctcgttggcatggcgcagggcggccacctcgcgggccatgcgctcccgcccgaaggcctccaccttgcgccagaagctggcgttgaagtggcggtagaggtgggagtccagcatgttccaggcggtggcgcgcccatacagctcccccgagagccgcggcacgggcgagtcgcggcgggcgttgagcttgaagtagagcacgtcctccagctcccagcacagcaggtccttcagcagcaccagcgactcgtcgaagtactcttgaaggagcaccaggtggaagcgacgctccacctccaggatgtgctcctgcacctgcgggctgctggggtccaggctgttgtcatagcccaggtcgaagaagagcaggtttcggaggtagtgggcattgaagccgttggggtcgtagtagcgatccgggtcttgcaggaactcggtcagcttgtcgccggccgagagcttccacgtgaggggcaccaccggcccgaagtagtggaaggaggactcgaacaagcgggcggggtcgcggagcaccgtgatgaagatggc

SEQ ID NO: 344729 - DNA, 703 bp, Homo sapiens; identical to SEQ ID NO: 336631
  chr22:31198444-31199147
  hypo

SEQ ID NO: 344730 - DNA, 99 bp, Homo sapiens
  chr22:31260817-31260916
  hypo
cgggtccctgctggacatctatgccttaaccctggaggagctcacgggcagtgagggcaaagttagtttccccgaaacaagcaagcaagtggggtggcc

SEQ ID NO: 344731 - DNA, 688 bp, Homo sapiens
  chr22:31266269-31266957
  hypo
cggccaggaacaggaacgggcaccatctcggggactgatgttttttgaatggcgctatccaccctgccctgctcggcctggctgtgcaggcctcttggtaccacgtctgttcgtaatgaccgtaacaactctattttcttccacagatgactctggggacgacgacgaggctaccaccccagccgacaagagcgagctgcaccacaccctgaagaatctttccctgaagttagatgacctcagcacgtgcaatgacctcatcgccaagcacggcgctgcactccagcgctccctgacagagctggacggcctcaagatcccatctgagagtggggagaagctgaaggtggtgaatgagcgggccaccctcttccgcatcacatccaatgctatgatcaacgtgagtacccacccccaccgccctggcacggggctccctggctccagccccggggtccctcggtgggtgaccagggtcagcttgaagggtcagcgttccatttcctgtggttccacggtgtttcccaaagccagcgccccccagctagcttccgagttcttaaatcatctccttcactcggccgtcgttgggcaaggacattcttcctaattgtctggaggaaacgagttggttgtggactctggtgcagtctgcagttatttacttcatgcctcgataaggaaggtc

SEQ ID NO: 344732 - DNA, 163 bp, Homo sapiens
  chr22:31475566-31475729
  hypo
cgcgtgaattttgaagtattcagaattggtcttagagggcgcctgaccctcgttctggataataacatggcatctcgcccaggtagagaaagcctaggaccttgaaatatgtcctccgaagtgagctctgtttgcctctcctgctgtgtagcattgacaagtc

SEQ ID NO: 344733 - DNA, 410 bp, Homo sapiens
  chr22:31483882-31484292
  hypo
cgtgggcagctggtgccagccctccgcccctggcagccaaaatgacctgcctctcgcacccactgcagctggaggtcacagcagatctggcagagcggcggcgcatccgctcagccatccgggaactgcagcggcaggagctggagcgcgaggaggaggccctggcatccaagcgtttccgtgccgagcggcaggacaacaaggagaactggctgcagtgagtagcggggggtggaacatgcgggtgagaaggtgagtgtgagccctggctcagctcatgtgtgcaggcaggcgtgagcacaagtgtatctgtggattgcatgtgctaatggcagtacgtccacacacgcttctggaaaaacagagatgtttgtgggcatggagcatgtactgattgtggcgtcgcggcc

SEQ ID NO: 344734 - DNA, 212 bp, Homo sapiens
  chr22:31486794-31487006
  hypo
cgtggctggaccccgaccctgccaacgctccctgtcggtgctcagcccccgccaaccagcccagaaccgaggtactacctattctcaccctgcctaggatctgtgcagaccctgtcccacccagttgctgacagccctcctgttccttctagagtccaccccccttgccagcggaccttcctcattccagcgggctggctctgtgcgggatc

SEQ ID NO: 344735 - DNA, 425 bp, Homo sapiens
  chr22:31487263-31487688
  hypo
cggggcttggctgctaggccccttgaaaacagagcaggggggcctgtggcacgttcagaggagcctggtgccccgctgcccgtggccgtcggcactgccgagccagggggcagtatgaagaccacattcaccatcgagatcaaggacggccgtggccaggcctccacaggccgggtgctgctgcccacaggcaaccagagggcaggtaggcgccccccactgcctccccaatggggatgagtgcctgcaaccgcacttctgcatgcaggacaggtgctgcggccaggactcagggtgtctccaaagggtgtgctgggagcgagggcattatcaaccttgtctggcactgccctcactccacctgatcctcctgacagccacctttctccccactcagaactgacactggggctgcgggcgccccc

SEQ ID NO: 344736 - DNA, 341 bp, Homo sapiens; identical to SEQ ID NO: 276825
  chr22:31489497-31489838
  hypo

SEQ ID NO: 344737 - DNA, 197 bp, Homo sapiens
  chr22:31494668-31494865
  hypo
gaccaggccagcccacgggccggcagcctggcggcgctcgagaaacggcaggccgagaagaagaaagagctgatgaaggcgcagagtctgcccaagacctcagcctcccaggcgcgcaaggccatgattgagaagctggagaaggagggcgcggccgggtgagctgcagaagtgggctgggcagtggggggcggggc

SEQ ID NO: 344738 - DNA, 95 bp, Homo sapiens
  chr22:31495079-31495174
  hypo
gatccaccagcttcggggtccccaacgccaacagcatcaagcagatgctgctggactggtgtcgagccaagactcgcggctacgaggtgagcccc

SEQ ID NO: 344739 - DNA, 563 bp, Homo sapiens
  chr22:31522437-31523000
  hypo
ggtgacgacagcgacggcgcagacatgatcgccatagggtgaggtggcagggcatgtggaccccctcctgagcccctcgggccttccgggccctccacccatggcaggggcttccagggcacctctccaatcccatggccaccctgcccccacccctccaggttgcaggaagtgaactccatgctcaacaagcgactcaaggacgccctcttcacggaccagtggagtgagctgttcatggatgcgctagggcccttcaacttcgtgctggtaacgcacccctcaccccctggacagccagagaccctgctgaattcctggctccagctgtaccctggctcactgtggggcccgctgggcctctgtggctgggtccgtgacatgggtgggtggaggagcagacctgaaggtgggcgcgagggcgggggagttgtgttctgtcccccagccacgtggcctcccgctgcaggtgagttcggtgaggatgcagggtgtcatcctgctgctgttcgccaagtactaccacctgcccttcctgcgagacgtgcagaccgactgcacgc

SEQ ID NO: 344740 - DNA, 69 bp, Homo sapiens
  chr22:32019702-32019771
  hypo
cggtctgagggcgccgaagggcaggaggtagtagaggacggtcaagggccaggagcgcagtttcagagc

SEQ ID NO: 344741 - DNA, 363 bp, Homo sapiens
  chr22:32078028-32078391
  hypo
cgcagatcttaatgtacatggcattgattatgagacggaattccagcctggagacggagcgacggccgtgcattcattggctgcaccgcggccttggatctgctgctcccgtcctgtacgctccctgctgctcttggctcagtgggcaaggaaggagccacgggggaggtctcacgcccagatagtgggatctggaatggacctcaggttggctctggagcccgtgccaaagaccctttcaggcaaaattgtgacaaagtatcatgattttcacagctcttgaggagcgctgagttttgggattcacagcatgggtttctgggctcctcaggctccgaataaggcaaacgctacatgtcttca

SEQ ID NO: 344742 - DNA, 441 bp, Homo sapiens; identical to SEQ ID NO: 336633
  chr22:32571858-32572299
  hypo

SEQ ID NO: 344743 - DNA, 389 bp, Homo sapiens
  chr22:32665378-32665767
  hypo
cgatgtgcaggccctggatgagaagctgctcatcatcatcgccctgcagttcctgcacggctactacaagcccatcctgttcgagcccaaccagacctggcccgggcacgtggctgtgtggcaggacacgtgctccatcgtggccatcttgctaacatcacgcagaaggtgcaccccgtcatctgatctctcaccagctaccctttgactgcacccaggctctggccgtacccaagcccataggtggggtggtggtctttgtcgtcagctcgctgttatacctgaaccagagcattcccccgtacggtgtggctctcagcagcctcaccacaggcaccgcagctttcccgctgtgcacccagctgggtgtgtgaatccccctggactgc

SEQ ID NO: 344744 - DNA, 132 bp, Homo sapiens
  chr22:32804860-32804992
  hypo
cgcggcaagtgtaggcactggacagaatgcactgtatgcaatatttactgtgctttactctttaccaaacactttcacgttaccttaagcacacagaaaacttcctatcaaagactacgagctgctcccatc

SEQ ID NO: 344745 - DNA, 607 bp, Homo sapiens; identical to SEQ ID NO: 336636
  chr22:33453892-33454499
  hypo

SEQ ID NO: 344746 - DNA, 789 bp, Homo sapiens; identical to SEQ ID NO: 336637
  chr22:34316250-34317039
  hypo

SEQ ID NO: 344747 - DNA, 102 bp, Homo sapiens
  chr22:35821646-35821748
  hypo
cgcgctgtgggttttgcatccaaggctgcatctccggttcctgctagcctttcatcttgctcaggtggggactcgcgtgcatctcaggcccaaggtcctccc

SEQ ID NO: 344748 - DNA, 600 bp, Homo sapiens
  chr22:35848339-35848939
  hypo
cgtgtggtgtttctgttgtctgcctacagtaggacgtaggctccacgccacagggactctggcttcctggtcggccactttgtgtctggagcatggagccgggcaggtgcccggcagatgtgtgttgaataaacaggtgggtggccgcctcacgttcctccacggtaaagtgacgctaaggatcatagtcacctctgggctacatgaaataccatgcggaaacgtctggcagcgggcagggcagggcagggcacttcactttctgtactagctgtaaagtgagaaagaagcccttggcactggaagcctggcttttcgttgactctgcagctcctggttagccctgtgtgtgagtttgtgttaaataatcagtccgactcctccgctggggtggtggtgccagtgtggccagttcttgtgcaaatagaacattttcaagatagttctgccacttgtacagcactctacgtgctgtagagttcagccctgagagagagggacaggatcctgtgtgtcccgtccgccttgcatgtgggtctcaccagcggcttccttcatgtcactctggagcactctcacccaccccgagaggaaagtgcc

SEQ ID NO: 344749 - DNA, 127 bp, Homo sapiens
  chr22:36519474-36519601
  hypo
cgcctttctcatctggacccagacccagacagaccccggggccattccgttctgcaggcaaacaagccagtcccgctagaatgtggcagtcacaggctttcaacatggaaggtggagctgcctggac

SEQ ID NO: 344750 - DNA, 184 bp, Homo sapiens; identical to SEQ ID NO: 276887
  chr22:36684242-36684426
  hypo

SEQ ID NO: 344751 - DNA, 850 bp, Homo sapiens; identical to SEQ ID NO: 336640
  chr22:36901811-36902661
  hypo

SEQ ID NO: 344752 - DNA, 110 bp, Homo sapiens
  chr22:36907702-36907812
  hypo
cgcagcgtaaaatgccccaggcattctccacgctcaggttgatctggctggcaaactcattaggcttgaactgctgggtgcctaggatgacgtggcgtgaggagtctttc

SEQ ID NO: 344753 - DNA, 290 bp, Homo sapiens
  chr22:38061005-38061295
  hypo
cgccagccgcgtgaattcctgcagcagtaaccacaactgctatttgttaagtgctgttccatttacaaagcacttgcccctgtgttgcccagcgcccgtttggaggtaggcattacttggattccgctttctcaggagtccggagaaacttggggtggttgagtggtttgtccaaaggtccacggctgtcagggtgaaatcgcgaacctcaggcaggactgaccgagccaggccctgtttacctgcagtagctccacgcatcctcacagtacccacatgagataagtgcc

SEQ ID NO: 344754 - DNA, 208 bp, Homo sapiens
  chr22:38146528-38146736
  hypo
cgccctgggcagcctccgtctcaggtggaagacggggtgggcagaatacagagcagcgggacaaacgcagccccaggggttctcggccgtgagcagagcctgtgtctctcccttagacaggtatacagggaggggctgggatgccaacctactgggtcccccgactgtggctgtggaaggttctggatcttcagctgtcccaagcccc

SEQ ID NO: 344755 - DNA, 103 bp, Homo sapiens; identical to SEQ ID NO: 276948
  chr22:38199826-38199929
  hypo

SEQ ID NO: 344756 - DNA, 237 bp, Homo sapiens
  chr22:38363635-38363872
  hypo
cgaaagatccccatcatcattcgccgttacctgccagatgggagctatgaagactggggggtggacgagctcatcatcaccgactgagctggagtcatcttcctgcccttgccccatgcccaattttcattctcactttatatgtgtaaataataaaatattcaactttccaacccccttcccctctgcttatctgcaatgtcaccacctgttgcttccccgttaccgccatgctgc

SEQ ID NO: 344757 - DNA, 53 bp, Homo sapiens
  chr22:38365003-38365056
  hypo
cgcctttgtgctggcatccaggcagccgccccagagtgcgggggtcactttct

SEQ ID NO: 344758 - DNA, 316 bp, Homo sapiens
  chr22:38369819-38370135
  hypo
cgcggtctctgtcttcacctgggctttggcatccacaccaggtggtgagaccgtgggcagagccacgcctggtggcttggagatccaggcggagtgtccactggccacggccagggcactgcccagcccatagccggctgctgagtagctgctcacatggcctgggtgcccattgggcggcaggtactggtccaactcagccacatcaaaggtctccatgttggacattacctcgtggctgatctcaccaatgtccacgttgccgaagtcgatgtgaggcttcccgccctcccccatggagcgcccgtcccgcttc

SEQ ID NO: 344759 - DNA, 271 bp, Homo sapiens
  chr22:38378835-38379106
  hypo
cgcagcagcagatttgtcccgcagttcttcatccctcactcttccaaagactctcatctgaattccgttttctttaaacctcccctgagttctccatctgactgcctcagtttccctgaatctccagccaaccctttggttctttccaagcgtttccctcgtatcctcctgaccacagcagctggtggcatagtgtgcgtatctgtgggcaggagttagtgaaggcctccttccctccctccaaagccccaggccccacggtctgccaccc

SEQ ID NO: 344760 - DNA, 798 bp, Homo sapiens
  chr22:38379141-38379939
  hypo
cgccgccccgtagggagacccggcctaggccgctggagttccgagttccagggtccttgtgatggaagggcgggcgcggcccccacacctggtcttccagccctatccaaggaggactgccagacagtcccgctctgaggtgcaggaggccgggccgcctcggctaccctgaatccacccgaagctagagggcccgagcccggggggcggtcgggtgctcacctccagagcttgcccagcgtcttgctgagctcagcgttgtgcaggtgcgggtactggtccgcgagcttcctgcgcgctgcctgagcccacaccatgaaggcgttcatgggccgcttgacgtgcggcttgcttttgctggcgccgttgacgcgcacgggcatgggcaccagcgtccagtcgtagccgctgagcacctggctgacggcctcgcggatgcacacggggaacttgtcatcgtccgcctcgccgtcctgctgctccttcttgaccttgcccagctcgcctggccccgggctggctcgcaggcccgatccgccgccgccgccgtcgggccctagcgagggcgcgctccccggggacaggcagcggggctcctccgagcccacggggctcagctccacctccgataggtcctgctcctccgccatgtcgcccccggccgccgccgccgccgcctcggccgcctcccccgggccagccgccggggtcctcgcaaagagtccaacgcccacctggatggaaggagggcgcgatggagcggccgcgcgcgcagccccgagggcggcccgagacagg

SEQ ID NO: 344761 - DNA, 304 bp, Homo sapiens
  chr22:38380268-38380572
  hypo
cggggtgtcgcctctctccacctcacagcagggtcccaggcctgggcgggccagggaggagcaggctgcgcactcacctcctcggacctctcctccagtctggggctcgtccttaggaagtggaaaaccgtgtcccaaggtgtgcggtccagctcggggctgggaggtgacgctggtgggctgggagggaggggcggggggccctgagcctcaggccacggcctcgttaggacggagcctgaatccttaccaccaaccaccctggccggacagcccgagactgactgagcgactgagcctgagc

SEQ ID NO: 344762 - DNA, 230 bp, Homo sapiens
  chr22:38381994-38382224
  hypo
cgacgccacccccggcgctgccaaccctcctccccccgcctcccttctcttccctgtgcccagactcttgttcggggccttgaaacagtgagctgtctttgttcgaaatacaggtgaacggcaatcatgtgattaacacacacacacataaaaagctttttaacagcgcccgctcggcctcagaaccgcccggagaggagccgccctggatggacagagggacgagggac

SEQ ID NO: 344763 - DNA, 767 bp, Homo sapiens
  chr22:38434385-38435152
  hypo
cgggcccaggcaggtggaagccatggctctggccgggtcacagggcggctggggtttgacctggcggccatgatgggctctggacccaggagccacccgggcacaggatgggacgggttgagagattggtcgtccaggcgttgagtgtgccctcgctcctccccaccttccgccgtggccttgagccccttgcgcccgcgcccatggggttaaatctctccctgtctctctctgctccaagttgttttccaagtgaggcagagaatggttctcttgttaccaacatggcttctgggcattgggtaatgcgctccctcttctcccgcagcgccacaaagggaccttttgttcccctccctgcccctctcgctggctcttcccggccccccacccacccaaactccctcctccccccgccggcgcccgcaccccggggctgcgcgctgaccgtggcggccgcggcgccctccctctcccagcgcctgcactggcggccgccatcttgcgagcggccctcagggcggcctgggctttcccagggttctcggggccggggcagtcgtagggggcggctggggctccacaggacgttcgtgacccaccttgcgccccccagggagtggcaggaccctcccgtccccagcctccgcgccaggcctcgtccctgcatgggacaagaggcagccctccgccatttcccgcggcccttgcctcccgggagcggctcccctctgacgactgagtggactgcgcttgagggggccgcc

SEQ ID NO: 344764 - DNA, 292 bp, Homo sapiens
  chr22:38506297-38506589
  hypo
cgctgtatggctgagtgctctcggggatccttacccccgtacccacccctggcccagcctggctccaggcttccctttccaggacatctgtagccccggctggccctccgtcctccagagcgggcctgatttctgtgccctgggaggaggggctcaggcctggcttggccacccatgtgctcaccttgtagatggccatggtggacctgtaaaactggtccatctcgggggccatggaggggctgtcccgggtctgagcaggaggctgggagctggtggcgatggcacagcc

SEQ ID NO: 344765 - DNA, 185 bp, Homo sapiens
  chr22:38516844-38517029
  hypo
agggcctggagccccggaacacctcatccttcatgcgaaagtacatgccgcgcatgtaggccatggacttacctaggaacaaaggggtcagaggcggggagatgcagcggccacacgcagggctcccgtagaacagcctgcagagcgcctgaacgcaggaggtggcaggaggaagcgggtttacc

SEQ ID NO: 344766 - DNA, 75 bp, Homo sapiens
  chr22:38520291-38520366
  hypo
cgcctactctctgtgcatatttttgagtgacggagggagtgtagctcagaggttaggtgacgggaaccaagtcat

SEQ ID NO: 344767 - DNA, 228 bp, Homo sapiens
  chr22:38528855-38529083
  hypo
cggggtgttgccgtgctctccgcgggcatccgcgttggccccgtgggtcagcagcactatggcacagtcgaagcggttgcgcatcaccgccacgtgcagggccgtgttccccgcggagctggtgctgttcacgttgcagccccgtttcagcagcatgcgggccatctgcgggagacggtcaggctgagttagcacaggcactcggggagctgccgcaccccgggacac

SEQ ID NO: 344768 - DNA, 107 bp, Homo sapiens
  chr22:38687274-38687381
  hypo
cgggaattcgggctggcaggcggggcgggccgtggcacctgctgtcttgggaaacacaggtcaatacatccacacacacacacacacacacacacgcaggggacgcc

SEQ ID NO: 344769 - DNA, 524 bp, Homo sapiens
  chr22:38694460-38694984
  hypo
cggtgtaggcagcaatcagggcagcagggggcgccgccagcaccacccatgccctgctgcgggcacccaggagggaccccaggtgaagccagatcctccttgttccgacgggagacagcgccctgcctggccctgctgcccatggtggcacaagctgtcagcacggatgaggctggagggctctgggaccccagtgaggtcaaccacactgtccagctcgtacctcccgtctgtcgggagcccctcccgccaccagctcactctggccctctgagtcagggccttccccatccagtcccccaagcccgccttggcctccaggtgactcacgaatttcagcatgttccagtcaaagacgtagtcataggagaagccctgccggtggaagaggttgcggaagagctgacgtaggtaagagtagtcgggcttgtcgtcaaaccgcagggagcggcagaagttgaggtatgttgagaattcggctggagggtgttgcagaggatagagaaggccactgtgaggcccac

SEQ ID NO: 344770 - DNA, 122 bp, Homo sapiens
  chr22:38874156-38874278
  hypo
cgaggaaataactccaaataggagtacaaataggagtgctctaggccagtgtggtcctgctccggcagtatcagcgtcacttgggaaacttgttagaaatacaaacttttaaggctgggctc

SEQ ID NO: 344771 - DNA, 163 bp, Homo sapiens; identical to SEQ ID NO: 336645
  chr22:38966006-38966169
  hypo

SEQ ID NO: 344772 - DNA, 55 bp, Homo sapiens
  chr22:39144766-39144821
  hypo
cgtcttcagggacgagaagcgcctggaccacgcgggagggcaggacgggggaggc

SEQ ID NO: 344773 - DNA, 542 bp, Homo sapiens; identical to SEQ ID NO: 336646
  chr22:39549067-39549609
  hypo

SEQ ID NO: 344774 - DNA, 219 bp, Homo sapiens
  chr22:39756401-39756620
  hypo
cgcactccccacgggctctctcgcccctcctcgccatcttctcaggctcattcctgaccttcacattgccaatctcatggccaactgtcattgatggatctctcagcagcgtctggcagccgtgaggggtttatgcatcctcccttgaatccaaacggctgcagaatgtggacgccctcaccccgctcgccgcagaatgtggacaccctcaccccgctc

SEQ ID NO: 344775 - DNA, 1120 bp, Homo sapiens; identical to SEQ ID NO: 336647
  chr22:39852944-39854064
  hypo

SEQ ID NO: 344776 - DNA, 181 bp, Homo sapiens
  chr22:39877241-39877422
  hypo
cgccctctcctgcgtggagtctgctcacgtcgcctcctcggtgagcctgccctgcccactccattcatcactggacataatgacgcactcgctcctgcccgttacccgctttgtctttctccagagcacagcctctttgggcgcgcagttttctgagctgactagtgtgtttgtagtttac

SEQ ID NO: 344777 - DNA, 120 bp, Homo sapiens
  chr22:40024720-40024840
  hypo
cgccggcaatggcaggagcagcagacggcctctcccagccgcccagcccctttactgacctggccagtccagggagagtggcccccagtggccaggccacagcctcggctcccctcgccc

SEQ ID NO: 344778 - DNA, 730 bp, Homo sapiens
  chr22:40045208-40045938
  hypo
cggtcagcacggatgcgcgccctgcaccgtgctgggcccatcatgtgccttaagggagagaatcctcctacagcctgcatggtgggcgttcctgccccaacttctacaacaggggcagacaaagctcagagagctgcagccgcttccccaggcacccctgaccgcctttccaggctgggtcggctggttccaggcagacctgtgggcctgggagccaagcgcactcagggatgtgtcccagggtggattgggcctggtgtgggcaacgactctatgcccctctcatttgcttttcagagctgtgcccgcaacatagccccctggatgcgacgccccacaccctggtgcagcccatccccgccacgctggcttccgatcccgccagctgcccttgctgccagcatgaggacggccggcggccctcgggcctgggcagcaccgactcgggccaggagggctcgggctccgggagctccgctggtggcgaggacgaggcggatggggacggggcccggagcagcgaggacggagcctcctcagaactggggaaggaggaggaggaggaggagcaggcggatggggcggtctggctgtgcggggatgtgtggcgggagacgcgagccaagctgcgcggcatcgtggacagcaagtacttcaaccggggcatcatgatggccatcctggtcaacaccgtcagcatgggcatcgagcaccacgagcaggccagtgc

SEQ ID NO: 344779 - DNA, 53 bp, Homo sapiens
  chr22:40061917-40061970
  hypo
cgtggacacccgcaacatcaccaaccgctcggactgcatggccgccaactacc

SEQ ID NO: 344780 - DNA, 511 bp, Homo sapiens
  chr22:40074986-40075497
  hypo
cggggccatctcgggggttgaatctcggtcttgctgcctccgagcgtggccctgggctggcctctgcctccagcagcctctgggatgtctccgtcctcatcctcaccgccctccctgccacgcaggacacgctgcgggactgcacccacgacgagcgcagctgcctgagcagcctgcagtttgtgtcgccgctgtacttcgtgagcttcgtgctcaccgcgcagttcgtgctcatcaacgtggtggtggctgtgctcatgaagcacctggacgacagcaacaaggaggcgcaggaggacgccgagatggatgccgagctcgagctggagatggcccatggcctgggccctggcccgaggctgcctaccggctccccgggcgcccctggccgagggccgggaggggcgggcggcgggggcgacaccgagggcggcttgtgccggcgctgctactcgcctgcccaggtgggcaggggctggagaggtgtgagggtcgccagagggggggcacc

SEQ ID NO: 344781 - DNA, 317 bp, Homo sapiens
  chr22:40804031-40804348
  hypo
cggccctcgtggttgctccttacagggcctgtttttcccacaggctggtttccagccaagttcgtggaagtcctggatgagcgcagcaaagaggtgaggggggtgggcgggctaggcacggctggcacccttctagccagggcctgcgtgcctagcgagtcctggcctgtagcatggcagagaggacagaggagggtgactggctgcaggcgtcaggcagggctttctcagacccatccctcccatcagtactccatcgcgggggatgactcggtgacggagggggtcacagacctcgtgcgagggaccctctgccc

SEQ ID NO: 344782 - DNA, 192 bp, Homo sapiens
  chr22:40812801-40812993
  hypo
cggcaccttccctggtcctctcgcccaggccttggagacgggagggctcacagccaccactgcatccacagtgcttgcccaagactggtcacgcacggaagcattcaataaaaacaaaccaacccagggctagagacacctatgaacagagaaggccgtcagggaggcagcaggggacctggggttacctcc

SEQ ID NO: 344783 - DNA, 190 bp, Homo sapiens
  chr22:41536192-41536382
  hypo
cggatggaaaacctagttgcatatgctcggaaagttgaaggggacatgtatgaatctgcaaacaatcgagtgagtgtctggtttttttctattaatagccaagattgaacctgttgtggttattttattcctctttagcatgtacaagtagtacatatgcttcagacgggggacacgctgtagctatccc

SEQ ID NO: 344784 - DNA, 520 bp, Homo sapiens
  chr22:41634441-41634961
  hypo
tgagccgtctcagggcgggcaggccagccagggcctcgggggccagcacgctgagcgcgttgtgcgacagccgcagccagcggacgcgcagtagcccctggaaggccatggcgggcaggtaaaccagggcgttgtgggccaggtttagcgtggccagcgcacccagtgccccgaacgtccccggccgcagctcctccagtgcgttcccctccagctccagccgccgcaacgagcccagcccgtccagcgcctcctggggcagctcacgcaggtggttggaggccaggttgagcaggagcaggcggcccaggccacggaaggcgccctcggccaccagctccacctcgcagtggcgcaggtccaggtgtgtgaggtgaggcacgccctggaaggcggctgcggggatcaccttcagcaaattgccctgcaggtccagccgctgggtcagctggggacagcgaggagaaagtggggctgagccaggcagggaccccgcctttgcaagtgctgcttcttcccc

SEQ ID NO: 344785 - DNA, 366 bp, Homo sapiens
  chr22:41639303-41639669
  hypo
cgcacccggcttcatctattttaattttttttttaaattcagcattccagccttccattctataaatatatgacaacagtggcatggggcaggggcgggaggcagtctgcccacaatgcaggcagtaagcgggtgtgctgtcagtggagaagtgagacacaatggaactgacttaaagttggtctctgctttttattatcatgtgctgacaagtctaaacaatgtcaatgctaaaatatttcttcttgggcagaccattcctaccttctcggtaccacaccgtaccacaagtagcttacccattcctctagtgatagacatttgggttgtttccagcatgggtttattagaaagagcactgtagcc

SEQ ID NO: 344786 - DNA, 773 bp, Homo sapiens
  chr22:41656931-41657704
  hypo
cgatcggggactcagcaatgtcctgcggggatggggagaggagagtggaagaggagtggggataaggtcacctgagagcacgtcatttggcacctgagccctgcggctgcccctgcctatctccctgtcttggaggtctggtatgttccttctctgtgccccacaccagtggctgggccaggctactgtcagcactcgcaccatctcacttcaccacttctgagcctggcagatgacactccttggtcagagtggcctgcctggcctgaagccccataggggctggctcaccagtgggagccagtcacacacctttccggaaagtcacacacctttccagaaatgcacgacaggaattctggctcattttcggatgggttaacaggcttggagagggcacgtgacgccccaggtctcttggttgagtgccagccctgggattagcatccagaactgtcagcctactatgccgagtgcacctcaaggctgcaggggcaggatggacagaaaccactcaccctaaaagcttctgccaaggcagtggcgccatcattctccagacggtttctgccagccacaaagaccttcagggccagaggcttgccttgggcactggatttccggtgacattcggtcagagctgcagccaggatctgtggggaaaggcaaggggccctggtcatgggcaggagccccttctcccagcggggtggccactgctgctgaactgctcttcaacatcccacgccacccatcggtgcaggtcaggggac

SEQ ID NO: 344787 - DNA, 69 bp, Homo sapiens
  chr22:41658279-41658348
  hypo
cggagactgaccgatgggaatcagagcccatggtaaatgcgacataaaagaatcacgagcgagtgcacc

SEQ ID NO: 344788 - DNA, 449 bp, Homo sapiens
  chr22:41667782-41668231
  hypo
cgcccgtcaagacctcactcctcacttgcacactgctgcagcagcagagagaacccctctggcatcagcactacgcccggaacactgggccatcaagggcagatcccaccctgcccctgccctgggctgcttcctgcacagaggagggcctaggaggtggtgtgcagtgattcactcgagccactgcatctgtagcaggcgggaaggtgcatgcagcactcctaccggccaggctctcccaggacaacctctgaggaagaaggaagggctctatctcctatttcatataagagcccagcctcagagctgcacgcagggcaaggccacgtacggcaaacaaggtggtgctgttagggcttgatcccatgtgccgaaagcaagctcagctcctgctgagtcctgtagccttcaggcccatggctccttcattcctgttcttcacaggtctc

SEQ ID NO: 344789 - DNA, 143 bp, Homo sapiens
  chr22:41669366-41669509
  hypo
cgtatcagaagactggtgtttaggagaacctgtttggggaacacggggctagaataacctgacttgccctttgcgttggccaaaaagggcaccacttggatctaaccttcaggagaacttgccagccgcacgcagtggctcac

SEQ ID NO: 344790 - DNA, 84 bp, Homo sapiens
  chr22:41839279-41839363
  hypo
cgcgcgcgcatgtgtctgcctgctctaatgtcagaagcgaaggaagatttttttccccccctcgagacagtcttgctctgtagc

SEQ ID NO: 344791 - DNA, 546 bp, Homo sapiens
  chr22:41970755-41971301
  hypo
ccagtggagggcgacgaggtgacctacaagatgtgccctatccctcccaagaaccagaagttccaggccgtggaggtggtgctcactcagctggccccccacactccccacgagacgtggtctggccaggtcgtgggctcctaggctgagtggttcacaggccagctggccgggggttggggagccacacagggtgaacgggcagcagccggctccatgccccactgccctggctgatgagtccttcggtggcctcagtgtgcacgtctgtctgtccgtctgtgcttgtggctatgagcgtgtgcctccacccaccccacgacccgtgactactgtgcaagctggccaggaggtaggtggagggcaaggccaccagacctggcttcgcgctgtccactgcctctctcctcccctccctgccgcagacacgcaggacccgctcgccctcctgcttacccgtccccacggtgactgagctgcgagagcctgcgctgggctcactccctggcctccgcccctgagctgtcccgtgtcagtccctggccc

SEQ ID NO: 344792 - DNA, 137 bp, Homo sapiens
  chr22:41973298-41973435
  hypo
cgacacacagatgtgggccccggtcacgcctcatgagctgtctctgggaagaaaatctcccggcatcgctgcaccgtgtcctgaggagacaccacgctgtggccaacagtccgggggtcggcaaagatctcaaagtc

SEQ ID NO: 344793 - DNA, 59 bp, Homo sapiens
  chr22:42033751-42033810
  hypo
cggaaggttcgcgccaaggagaccaggaagcgagcactcagcaggtgtgcactcagccc

SEQ ID NO: 344794 - DNA, 528 bp, Homo sapiens
  chr22:42095795-42096323
  hypo
cgctccggtgaacccgacgcgaaaccgggcccccgcgctgtgttcactctcctccctgtcagcccgtcccggacccggccgcagcggcctctcgggcccctcagccccaggccggcctgcgggcctccgtggagcccggtccactggctctgcgcctgaaaggacggaaatccggatcccccgggacctcacccagtctcagggacacaccttcccgccttccgccttctggctccttccctttgctgcccctgcctccatttcccggggattcggccttagctcaggctcccgccatttcagcctcccgccatttcagcctccactcacctgcgggccaggggcgcatgcggcggccgctcctcattcccttcagctgtcggggtgtgaatcggaggaggggcagtctgggctccgaggggacaggagtgacaggttacagccgggcagaagtgggggtgaacgggaagactgttccttgggcagagctggccaaagcgggctgcctgggtcctcattgcctaccgc

SEQ ID NO: 344795 - DNA, 197 bp, Homo sapiens
  chr22:42395143-42395340
  hypo
cgcatgtctcctcagggcggggcggggagggggtgcgagacgcgtgtgtccttcgaagagaggccggagctgaccggcggttgtgagcagccgggggccttcggtggcagcgtggctgcccttgggtgcctgcgactttgttggatgaggacaggtactgggtgtgtatctcctcctacttccacgaacaaggtgtc

SEQ ID NO: 344796 - DNA, 277 bp, Homo sapiens
  chr22:42667141-42667418
  hypo
aagagccctctgggccgggggcagcccaagacctagctggtcccgcctgggtccctggcagcccccgcccatgggttccaggtgtccgtggaggaacgacttgggtcctctcagagcctcagtttccaccgcggaaaacgcgaggagggaggcccacctacctcacctgtaaaacggacgctccagctgccttctgctgcggcattaagaagctgcaatgccaggctgactgcgcccagggtcccgaattaatttgccgataaggcggaggatttgc

SEQ ID NO: 344797 - DNA, 112 bp, Homo sapiens
  chr22:42995235-42995347
  hypo
cgtttataaaactaagggaatggactagttccagctctgaaaatcttacggcccaaacaaagaaatatttctgcattgaaaggctctattcacgccgggcgcagtggcttac

SEQ ID NO: 344798 - DNA, 122 bp, Homo sapiens
  chr22:42995599-42995721
  hypo
cgagatgtcgtctcaaaacaaaaaaaacaacaggttctattcaacacgacctctcccacctgcctgatcagacacgcagtgtaagaaaacatgaaatgccataccatgtggtggagaaagcc

SEQ ID NO: 344799 - DNA, 151 bp, Homo sapiens
  chr22:43000061-43000212
  hypo
cgctggagatcctccccaaggtctttgggcttcttctgtcgcctcccaccctcaggcctctctacaatagctaccctcaacggccactcatgcggcagacgctctgcctgcggactcctatgtcaaggggtgctctttgggaaaccctccc

SEQ ID NO: 344800 - DNA, 141 bp, Homo sapiens
  chr22:43351254-43351395
  hypo
cgtggacaagagaccaagaaggtaaactgaatgaatgaatgaatgaatgaacaaacaaacgaacgaacgaacgaaaaaacaaatcaactgatccagccagccagcatccaggtgaactgtccctccaggcagtgatctaac

SEQ ID NO: 344801 - DNA, 193 bp, Homo sapiens
  chr22:43434424-43434617
  hypo
cgggctaccgggagactgcatgggaacaaccacgctcgcgcagcctgtcccgcagccatcgctcctcccacagctcctggctgcccacggcgcttccctgtagcaaacccagctgctgacgtcataaaaggcacacagccggacctgtctgtgctcatctagttccatttacaacagactcatccacaaaacc

SEQ ID NO: 344802 - DNA, 173 bp, Homo sapiens
  chr22:43529312-43529485
  hypo
cgcgtggacgttggagtagacagaaaccagaggcttcttaatgtcgactgcctttaaagcttgcgtcaggggctccacggctggctccatgaggcgggtgtggaatgcgccactaaccggcaacatcctggtgcgtctgaaatgaaacttagaggaattcttctggagaaacc

SEQ ID NO: 344803 - DNA, 551 bp, Homo sapiens
  chr22:43570061-43570612
  hypo
cggtccgtgaagacggccgtgacgttcggggcccacagctcggctcctgcaccacggtttccacagtgggtgctcatggaggagcaggcggacacagacgctgggccggggaaaagggccatggagcacaccgatgccgtgtctgggacttaccacctttcccgctgctggaagtagctgacaaactggggcagctcagtgcgcaggttgaaggttcggggcagccagggtgggccctcggggccacctgcccggcgcgcgatggaggccaggcagtccttgacagtcagcaggttctcgcaggggaactggttcagcagcacgcctggcctctcctggctgagtttcctgcagggcggaggcaggtgcgccagctcaaggggaggccggcagtgcctagaagccctgactgggagggcccctgcggccagaggtgccctcacctgtagtccttgaagtgtgagaagttgaagaggatgtcggcgtccgcctcactctgggtgagggtgaagcgcgggtgggtgaggctgctggccacctgctgcacgtcc

SEQ ID NO: 344804 - DNA, 950 bp, Homo sapiens; identical to SEQ ID NO: 336660
  chr22:44419839-44420789
  hypo

SEQ ID NO: 344805 - DNA, 145 bp, Homo sapiens
  chr22:44500148-44500293
  hypo
cgtctcaaagcaggctggcagacattttccactcttgatcaatcattttccaaaataagcatagacacagcaacccggagagcagcttcggtttggctgtcggtggcgtgttagttactgtagtggtggcacagaggcgatatac

SEQ ID NO: 344806 - DNA, 220 bp, Homo sapiens
  chr22:44564263-44564483
  hypo
gcagggtgtcagcccgcgccaggagctctcacaaaacctgtgtgtctggggaggcactgcccagagcgtcctggacatggtggtggccagtctttaaggggaagcgctgtgtgtggatgcggcagctggtgtcatgctggagacgtggcttctgagagtacctaccgcaatgacaggaggatggcacgcctctgaagtttctctgtttccttctgcagac

SEQ ID NO: 344807 - DNA, 915 bp, Homo sapiens; identical to SEQ ID NO: 336663
  chr22:45064150-45065065
  hypo

SEQ ID NO: 344808 - DNA, 324 bp, Homo sapiens
  chr22:45074487-45074811
  hypo
ccctgcctgctagttctttaagccgctgctggaaggcatccttctctagaaagtcttcctggctgcctcctgttcaccgcaggccaggcggacccacggccccctcagtgccatctcaccctgggctctgctcatgcctttgggccagcgcttgtcatacagagcttctctgccctgttcccaggtctccccgacagcctggggctgctctgtgtgattcatctctgggtcccagggctcagctgggggctggcacagagtgggaccccagcagcattcgatgaattgagagcacgagtgagcgacagacatcagggcacctgc

SEQ ID NO: 344809 - DNA, 247 bp, Homo sapiens
  chr22:45075627-45075874
  hypo
cgctctgggacactcagtctgatggggcaggctggtcagaagacatagagccatggtgtgtttggaactttcacagagggaagcctggggctcgggaagcccggaaaagatgccggcgcagcctgagggcttgtacaggtgccactgtgccgaagggtggctacgagggaggcaggtgtatgggtgagggtgagtgcagtgtggctggaggcttagggaaaggtgagtaggacggcgagagacccac

SEQ ID NO: 344810 - DNA, 135 bp, Homo sapiens
  chr22:45088617-45088752
  hypo
cgggagtccgtcccgctctgccgcctgccctgaggagcctcagtctgcaggtctgcagagcggggatgttccccgggcctgcctggcagggcggctgcaaacacgaaggttcggaagtgcacgagctctcagcac

SEQ ID NO: 344811 - DNA, 1220 bp, Homo sapiens; identical to SEQ ID NO: 336664
  chr22:45097777-45098997
  hypo

SEQ ID NO: 344812 - DNA, 234 bp, Homo sapiens
  chr22:45120602-45120836
  hypo
cgagcctctcttgcctcccctgtaataaaaggggaaccccggtgaatgcctgcggctgggttggtgaagactgaatgagcttctctggaataaagagtaaacacttgggaagaagctctgcaggcggagagaggaggagcccgtggcatccgggatttggacaggtggaaggcaggagcaaaccaagtgttgcaggcccagccctgccaggtgtctctccagaaggtgtgagac

SEQ ID NO: 344813 - DNA, 115 bp, Homo sapiens
  chr22:45123857-45123972
  hypo
gcccctcgcttgatgcggcacattctggcggtgcctgtacctcccaccagatctggcctaggggagccggggctctcggagaagggagttttgtgtggcttgaaaggagctctgc

SEQ ID NO: 344814 - DNA, 334 bp, Homo sapiens
  chr22:45277448-45277782
  hypo
tcatacagcacagtttctcccggagtcgtgagaatgacaggagggaccgtggcagctgcgggatttgccggcctcctcgctctgcacctctgcgtgtgtgcatgcgtgtctgtggtcgtggccgcgtgcgatgcacacacgcgtgttcagtgcaattcggcaccatgtgatatgctcggggtgggagcccgtggctcctggacgcttatcctgttgtgctgagtccctcaggactgggatgtgggaatcgggcaagggtgacaagctgccactgcccaccctggatgcagaagcccttggcagcaagtctggtccccgaaggccggaacctccc

SEQ ID NO: 344815 - DNA, 2874 bp, Homo sapiens; identical to SEQ ID NO: 336667
  chr22:45403686-45406560
  hypo

SEQ ID NO: 344816 - DNA, 123 bp, Homo sapiens
  chr22:45581821-45581944
  hypo
cgcgtgtgtgttctgatcttcagtgcgtagcacattctccatttagaaaagagtggtcagaataattgtggacggtacagtggctttttaaaactacagtctttaggtgtaaggtttggcgcc

SEQ ID NO: 344817 - DNA, 1063 bp, Homo sapiens
  chr22:45592910-45593973
  hypo
cggccccgggagtcgagtggcctcgcctggctgcggctccagcactggcgtgccatcgcagaccccggtggcggtggacaggtaggcacttggcagcactccgagggctgggcccggccggggctctgcgcaggctccgcacgcggctaggtcatcaggatgggcttctgccgaacttccaggatgtctagggccggcaggagggaagcaggtgaaacagtaaccctcaacagcggtgagtgctatggtcacggcagtgccacttctgaaggaagcccgcctcagccactcatgcatctcctctccaggcctcacagactgcagaggagacgtgtctccaccatcctcaccctgcagactgggaaatgggctcgcagcaacggcacaccctgcagggcctcaggtgcaagctggtgtgggggccagagccactgcctgtcacagctgctgcaggcctgggtcagcgaggtggcctgagagcctcccctcgcccgtgagtaacacacacctgggcatctgtggccactcaagaggggacagcaggtgcgccagaaaggtgaacaaagggaggacttcagctctgggaaagctacggctccacccaaagtctgagacaaagaggccaagagccctgcaaagaaacccaaccaaccgacaggacagggcgggatgactccgggtggctcacaagtaccaaggccctggaggcagagctggctgtgagaaggtgcggctgcttccccacatccgccagcattacctgttaaaatccgatgcagcggcaacgtgacgtaggttaagtgtgcatagagaaggaagtttccatctgctctgttcagcttcagccaggacccgaccagggaccgtcctgtgcccgacagggaccgagaccgcaggttggttgcattgtgcagatcggctggaggaaagaaggccaggtcaaggcccccacagcatgggacgcggcgggagcagcaggaggccagctcccagtccaggctgaggccaaactctgctgaggccaggacgctccttaccaacacccccacaccagcacccacac

SEQ ID NO: 344818 - DNA, 551 bp, Homo sapiens
  chr22:45603891-45604442
  hypo
atcacacggctgttcggggcagcaccacagcacaggcaggcgaaagagcaggttccccatcagaaaggtgtccgtgtgcgcaccaaagccaggcccaagaggacactgggagctgcccggtacccactgacaggagggtggccaggccgccatggtacactctgcaggcattacacagcagtgagaccagattacaaccacctgtgtcaacaggcatgactcacaaacatgacatgcggagaaagaagcctgaaacaacatatactgcccgattccaatgtatgagctgtgagaacaggcagaaccaccgactccacacacatgagctgtgagaacaggcagaaccaccgactccacatgcacgagctgtaagaacaggtagaacccgccaactccacacacacgagctgtgagaacaggcagaacccaactccacacgcaggagctgtgagaacaggcagaaccaccgactccacacgcacgagctgtaagaacaggcagaacccaccgactccacatgcaggagctgtgagaacaggcagaacccgccc

SEQ ID NO: 344819 - DNA, 340 bp, Homo sapiens
  chr22:45607771-45608111
  hypo
cgagagcagacaccacagggatgcttggggcacagacgcaggggcaggggccgggggtcactcaccttcctcccgtctgcaccgctttcgctgccggagtacgccagcttccggcgcacatagaaaagcatgtcgtcctgccggggagcccatttctccatgaagtaggtggagaacatccaagtccagaagacgatgcggtcatccttgaagcaccctgcagagggaggccagacaggagtgaggaaggacggccaccctggcccttgcagcatggccttggccaagctgcgcccatacccccacatttctggccagaaatttgcgagggctctgagat

SEQ ID NO: 344820 - DNA, 176 bp, Homo sapiens
  chr22:45613836-45614012
  hypo
cgcgtgggaagtgagcactaagcctgggccgtccacaccccagtgcggtgtctgccacctctgaattgccactaactctcctcctggttctgcacgacgctggactggtggcatgacagcaccaagagctcaacagtgctggtttcaggagcgaggaacgtgatgacagctcgcgc

SEQ ID NO: 344821 - DNA, 567 bp, Homo sapiens
  chr22:45808579-45809146
  hypo
cgcaggtcctctggcctctccagacctcagtttccccaactataaaatggggagagcagccatgcgccatggctaaccaaagacggtgtcgccaggaacttaggaaaagctcagtaaactgggtcatcatcactacattcctgggtcaaagctcccttggatccaaatggtggttctggctgcttggaacccattacctcctcgacagctccctctcacttcaacttcggatgagaagggaaaagggacgcgagtgaccagggccaagggccagagcagtccccgaagcaggagtgagggcagagaacagggcccatggcgggaccggggcggagaggaagcgtcaggacccccagggtggggggcgagggttgggagcccctgagatgaagggcgagggccggagctgaggtggggtggggtccctcagggtgtcggaggagggtcgggagccaggaggtggagggcgagagcggggcccgaggcggggccgagtggaagggtcaggacctccgaggtggggcggagggacaagggtcgggacccctgaggtggacggcgaggacc

SEQ ID NO: 344822 - DNA, 392 bp, Homo sapiens
  chr22:45959040-45959432
  hypo
cgagcccagggacttgctcctgaccgtcaagatggatctctctcgccacggcaccgtcagctcctttgtggccaagcttttcatctttgtgtctgcagagctctgagcactcgcttcgcgtcgcggggtctccctcctgttgctttcctaaccctgccctccggggcgttaataaagtcttagcaagcgtcccacacagtgagcctcgcgtgccttggttttatttggcatggttgggagtctgtgccgcttgttacccgggggtgagctgggcactggccaccgcctggtacccccgagggctgactgaggagcgctccccactagagggtgtgtgctcgggggtccctgttcacagagcccactgtctgtgccgacagggaggccaggcc

SEQ ID NO: 344823 - DNA, 154 bp, Homo sapiens
  chr22:45975280-45975434
  hypo
cgtcccggcagcgggcttctgggaacggaatgtggatgaggccacaaggacccagcggcttcccccggcacagttggtcacgggtgccctggtctttggaattctgggctggggctgcgtgggggagggccccagcctggcccttggaattgtc

SEQ ID NO: 344824 - DNA, 463 bp, Homo sapiens
  chr22:46255154-46255617
  hypo
cggccgtttgctcagcatcttctaagagcaaggcaccttatagaaagcactggatggaatccgcccctcaattcgggtttgctggagaagatgtagaccttggtgctcagagacgctgaatcgctgggctcacccaggcgggtgcggagccccagtctgccccttccactcggccaggctgcctcccgcctctgccctgcagtgccagctttgtgttgcccaattcatctgcagccactagaggtatcttccttgagaatctcctgttggaggctcccgctgccctcaggacatggcccagactccttagagaggcacatgaggtgcgtcccgagccctcctccagccctccctctctggcaggtgaccatgcagcagccgcaaagcacttggcggtctcttctggctcgaggctgacgcccacgcgagcccccacctagaacctccccaacctgtgtccacc

SEQ ID NO: 344825 - DNA, 447 bp, Homo sapiens
  chr22:46261704-46262151
  hypo
cgacacctctgcagcttcgaccacacagggcttgtggcttggcatggccgcagacgcactgccaggccggcagccttcgccaagaactggattcctcccggcctggcccggctcggctggcattctcgccagtttcattgggttgagttccagagcgatggcagcgattgataatgctgtaattggagtgacttgggtattttctgaggtgttgccacgatgactcatactagggcaagttgagggcccgcactgtccagccggagtcggttagagaccctcaggaggctcacaggctccagggcctggatgttaggatgtgaggcctggggttaccgagatcccacacccaggagatgctcgcgtggagccttcgctcacagcggcctgcgcgaatggggcttgctccgagaggttcagctggcaccgagagctggcaccgagagc

SEQ ID NO: 344826 - DNA, 127 bp, Homo sapiens
  chr22:46339131-46339258
  hypo
cgggctgagtcagcgtctccacactaagctcttccctgccgttgtcataaacagatcattggaaaaagtcatgccaggtccaaacacgccggcgcccgtgcgcccgaggcctttgttccgacccagc

SEQ ID NO: 344827 - DNA, 351 bp, Homo sapiens
  chr22:46597084-46597435
  hypo
cgggcctggaccccgcctctcagcttgctctagagggctattctctgcatgctggcatgatcgcgccttgtaaaaggtggcagtgttctcagcttagtcaatcaggaattgcaagaggcaagtgagcccctgaggactctggggggcctttgtgaccgagcagctttgggagtgaccctgacagacctttacaggtggtgcaagttttgactccctttctcctggcgcgttaagcagaggataagcgctgtggaaggagtgaaggtgtagggagatcatggcccccagagcagtggggaaggggacagggaggctggaggagagcaaggaaaaggctccgtgtcaggtggc

SEQ ID NO: 344828 - DNA, 190 bp, Homo sapiens
  chr22:46599521-46599711
  hypo
cgaaaaggaaaaaagaaaaaaactctcagcaaagctagaggggatcctgccaatgagttcccagctcacagactgattagcaggccaccacacatgagctggaggccaggctcctcccgctgcgcaaggtgagaacttcccgtggctccaccccattctcccaatgcccaggtgggtccccgtcccttgc

SEQ ID NO: 344829 - DNA, 485 bp, Homo sapiens; identical to SEQ ID NO: 336671
  chr22:46658634-46659119
  hypo

SEQ ID NO: 344830 - DNA, 629 bp, Homo sapiens
  chr22:46704066-46704695
  hypo
gaaaaatttgacttcgatctttcattgtcttcttcgaggtaaacaaatgagttttcttcccttgccttgggcataaccacattcagtaaagtctttcctttaaatgccagtgttatgagttattaatcattctttttttaaacaaatagtgcaaatgaagatgatgaagtcttcttcggaccctttggacataaagaaagatgtattgctgccagcttggaattaaataatccggttcccgaacagcctccgttgcccacatctgagagtccctttgcctggagccctctggccggggagaagttcgtggaggtgtacaaagaagctcacttactggctttacacattgagagcagcagccggaaccaggcagcccaagctgccaagcctgaagaccctcggagccagggcgtggaaagattcatacaggagtcaaaattaaaaataaacctctttgagaaagaaaaggaaatgaagaaaagccccacgtctcttaaaagggagacatactacctgtcagacagccccttgctggggccccctgtgggtgagcctcggctcttggcctcctccccggccctgcccagctctggtgcccaggcccgcctcacccgggcgccggggcctcc

SEQ ID NO: 344831 - DNA, 710 bp, Homo sapiens
  chr22:46815686-46816396
  hypo
cgccctcacccatgcacatgcactcatactcgtgcacatttacccacgctcacgtgcatacccgcattcacacccacatgtgcactcccacacgtgccttctcacattcatgtgcatttattcatacgctcacacgtacacttacccaaactcatgcacactcacccacgcacacgtgcactcacccttatgtacactcacccacaatcatgtgcatactcaaaacccacgtgcacttaccgacactcacactcaaatgtgcactcacccacacgtgcgctcatactcacatgtgcacacctacccacactcgtgcatactcatccacattcacactcacatatacactcacccactcaaatgtgccctcacccacacgtgcactcattcatactcacatgtgcacacctacccacactcgtacatacccacattcacacccacatatgctcacccacactcaaatgcactcgcccacacacgtgcactcatatatgcacactcagccactcatgtgcactcacgtatgcactcacccactcgtgcactcatgtgcacatttacccacatgtgcatgctcacccactcaaatgtgcactcacccacacatttacacgtgtgcttcttcacacacgtgcacacacccacacacatgcatactcacccaggtgcactcacccactcacgtatgcactcacacgtgtgcacac

SEQ ID NO: 344832 - DNA, 1004 bp, Homo sapiens
  chr22:46929258-46930262
  hypo
cgctgatccccggtcttgaacttgggagaaccgcaggcctgctcccaggaaaatgctgacggaagcggcgcggtgcctctccccctcgctgggcctaggccgggcgcccacccccagcatccaaccggcggcaacaaatccttgcagagttgcccgggcccggcccaattgcgccccggcatgccaggcggagcccttggcgggttcctgaggctctccaggaggcccatcaggagctactcctcccaccccgacggccactcaccagacacagacacctccatgagcgcctccagcggccggttgttgtccaggtcgcggctgagctgcagttcgcccgtggcggggtccagcagcaacaggcgcagctcgttgccctgcacgaaggtgtagttgaggctgtctgacacgtcggggtcatgggccgggatgcagccgatcacgccggtggggaaactgttggacttgttggtgacatagttgttgaagaggatctggaagtcgggcagcacaggcgggttgtcattctggtccacgagaaggatgtgcaccgtggctcggctcaccagcggagccgacgtggcctgcaccaccagcacatactcccgccggacctcaaagtccagctccaccatggcacgcaggtccccgttgagcaggtccagctggaagaaatgccgcatgtccccttccacaatctgatacatgatctgggcattagggccttcatcagggtcgttagcacgaatctttgccaccaccgaccccactgggttgttctcctcaacaaacagctccagttcgtccttctcaaacatgggggcattgtcattaatgtccaagatggtcacctggatttctaccgaggcgctaaggggagtgggactgccccgatccacagccagagcccaaaggttgtacacggccacattctcccggtccagccggcgctgggtgcgaatcacaccggacgtgggctcgatgtagaagtccccatcgccgtc

SEQ ID NO: 344833 - DNA, 756 bp, Homo sapiens
  chr22:46931438-46932194
  hypo
cgggggccggcccccatcctgggccttaatgctcagcgagtatttctggacatcctcgaaatccaaggggttgatcacatccaggatcccgctcagcgagtgcaggtagaactggccggccacgttcccgctgaggatgctgtagtgaatggccgcgttctggccctggtcccggtccgtggcctgcactcgcagcacagccgtgttgagccccacgtcctcgggcacctggaccacgtagttctgctcgctgaactgggggtagttgtcgttctcgtcctccacctcgatgtacacggtggccgtggcactgagcgggcccggattgcgcccctggtcgttggcctccaccaggagctggtactcggccgcctcctcccggtccagcaccgcccgtgtgctcaccacgccagagctctcgttgagctggaagacgtcccacgcgccccccaacacgcggtaacgcaagttggcgttgatgggcgagtcgcggtcgctggcgcggatggtcagcacctcgtagcccacctccaggttctcccgcacgcgctcgcggtactccgactgctcgaagaccgggctgtggtcgttggtgtctttgaccaagacagtgatgtaggtggtggccgagcgcggcggcgtactgtagtccacggctttcaccctgaggacgtgcgtctccttggtctcgcggtccagtacgctgtccgtgctcacggcgcccgtggcagagtcgattcggaagtagccccggga

SEQ ID NO: 344834 - DNA, 358 bp, Homo sapiens
  chr22:46979973-46980331
  hypo
gttccagtgctggccgtcgggttccctggatgcaccccttcacggtgggtggtgtgagtccttcctcactttctggccctgtgagatgctccaggctcagcttgtccattccctgcccaggcctagagtcagccccttctgcagggagcccgggttccttttgttggagggcagaatcggaaaccaagatccaggtggcgggtacgctcatcactaccggggtgtcattgcttctgggccctcttagctgacagcaaggaaatgcacgtgtgagctgacgcgcacatatgtacgtgtctctgcctgtgtccgcgtgtagcctcctgtacctgtattgagcaaagtgtgagttcgcgcc

SEQ ID NO: 344835 - DNA, 832 bp, Homo sapiens
  chr22:47022417-47023249
  hypo
cgggggtctctgggtcggggttttctttggaaagctggaccggccgtgccctgcgtgtgggagctggctcgtggggcttggaggtgtgtgtgggagggacggtggcagggcggggtctctgggtcggggttttctttggaaagctggaccggctgtgccctgtgtgtgggagctggctcgtggggcttggaggtggcgagcgggagagtgaccacgcccctctcttgcagggaacccgagcgtcatgttagggtgaagcagaggacctcagtgctgaacatgctaaggaggttggacaaaatcaggttcagaggtcacaagagagatgacttcctcgatctagcggagtctccaaatgcctcggacaccgaatgcagcgacgaaatccccctgaaggtaccgcggacctcgccccgggacagcgaggagctgagggaccctgtgagtacctgtcctcgtcccccggtgtgggctggggtgtcgtccccgtcctctgtggccgggccaagcgtggactcaggcagattcgtgtcctgcccatgctggtcagagatggactgggcctgactctctgtctcacctgctcccgacccctgcagaccttgtggggccggggtgctgccacgccgagccttctgtgttcgcaggtctgattagcggctggattggttttcctcactggcttttctgggtgggtggcagacttctcacgcacatgtgacgcggaagcctcggcctggccctgggagcgttgacatgcggatggagcagggcgggcgttgtctggaagccgctggtgcctggcttgtcttctattcaagccaaggtgcac

SEQ ID NO: 344836 - DNA, 263 bp, Homo sapiens
  chr22:47054031-47054294
  hypo
cggggtcgcgtggacatgagcgatggtcacctggccgttctctcccccatagaggaggagctccggaagctgcgagaagaaaccaacgcggagatgctgcggcaggagctggaccgcgagcggcagcggcggatggagctggagcagaaggtgcaggaggtgctgaaggccaggtaccgcgccttcctcggggccctggcctgtgtgcggctgccccaaccccccaccccacccgccccgccgtcctctgctgcacccatagc

SEQ ID NO: 344837 - DNA, 209 bp, Homo sapiens
  chr22:47075172-47075381
  hypo
cgtcgggtggtttagttcgagtcccttttgtggagaaagggagatgaaaactgaccacgtgccaggtgtggccgaagcccccagggagggccacattcggggagcggggggtcgggggagggccaccgactggctctgctgccagcacaggcccctccctggaagtcctcgggagcggagcgcggatcggcacgggctctgggctcccc

SEQ ID NO: 344838 - DNA, 850 bp, Homo sapiens
  chr22:47197347-47198197
  hypo
cgctctgttatgagcctggggatgaaagtagcaaatagaacttaatagctcattttactcttagcattggctcaatatttactcacacaaagactgcctgctttgaagccccggaaaatgacactcaagttggtcacatgtatctggtgaatggtagtgcgatttggtaacatgtagaacacgcagtttcctgaggaccgtctagggcctgcctcgcagcagtggggcctcggagggcaaactgtgtgtggagctcagctctggccctcaaggctttcgaacggtaggacagaaggcacgacgacccgtccgtcaaggagtggggccaggccacggctgtgttccacttcccctgaggggtgaccatccagtctaggctttatgagagcgtgctgatagatggaggtcagcgggagagggtgttttgggggttgggagggcatgaacagaagtttggagccgtacaccttggcagcactaatacgagtagatgcccccttggtgtccgtggctctagggcagccgtgaaggggcctgggcccttggtgacaggaggaagcaggtgcggccttggagtaggccctcagtgtgatggctggccgtgtccttactcatgaagtggctcaacctacctgtttcgtcagctgtagagggagcatgagacctgccctgcagggtcctcgtgaaggtcagtgggaatttatgtagagtcactcatccaggctctgttgagcacctgctgtggttgtaggcactggggaggaatcggcggcgaggcttgcgagggccctgccctcaaggagctgacattctcgtgtgaggagacagagggagctcgctcagtaccccc

SEQ ID NO: 344839 - DNA, 976 bp, Homo sapiens
  chr22:47298509-47299485
  hypo
cgctgtgtccgctaaaccagcccttccactgagctgactcttcgcctccactcagagtcccgttcaagtgggcacgttgttttcacctttcctgcgataactgcaagcaacacacctgcatttttgacacacaaagttgtaatggttgtgattcccgaagaacaccagcagacagacacccggtgggcacgtggggacacgaagactcagatgtctctgtcctcagcagcgcacagttgaagtgagggatgaagacagatgtgcgtgaaacccagagagatcatatacagttgtcaatgaaaccacagtttgtatcctgccgactgcattccagggtggctgaaagaattggagaagacagcccgaggaggggcagcgtatggggcagtccactctggagggtcatgcccaattgctggggccgcctcacgtctctgctctgtgatttcttctatttcctggcccggttgggccgtggatctctccctggtgcacctggagtctctgtggatctctttcctcaggggactctgcaacccagcctcacgccctgcagggggtcacagacctcagcctggtgggcgttcgggaccgagggctgagggccgagggttgaggtgaagtgcagtggcacagccatcccaggctgcaggcgaaggggctccccttcgagaacccacaggatggtagcagagcgaagttcagcctgcgggggcgtctgtactcggggaagctgtggaccaggcatggagccagcctgtttgccctccccgccctgatggctgctccggctggctaggcctcttctctgagattcttggcttagtacctctggcttttgccgcttgaatttggggacctgtcggctcttcctgtttcgcttcagtggacttccaccctagctctcgcctctggttgctgctctgagcgtgagtctagagggaccagcaaggtcctgagggagttgcgaggaatc

SEQ ID NO: 344840 - DNA, 272 bp, Homo sapiens
  chr22:47327916-47328188
  hypo
cgaggaatgccttattctgatgttacgcggtttctttcctggctcatgcatgcccccatttgtgcgtttatagaaagtgtaagtcctgtgctagtcagagcaagactctgtcagtgaagacgatggtgactagtggcgggttcaccgtgtcagacactgcgctaagcaggtcattacatgatcacctggaattcttaaatgccctctggcgacaccaccatacatgactgttgtgactcccccaggttgcccgtcaaggccgtgctgtgacc

SEQ ID NO: 344841 - DNA, 350 bp, Homo sapiens
  chr22:47436589-47436939
  hypo
cgtgcgggacgtgactcagcagcagaggagcagctggggtaggccgtggaatgaaaaagaacaacaggttctgacaggacattcaaagccaggttcttttctctaaatcccggtgacttcttcctcttggggaacattcagggctctgagtatggtgagtgagcagcagccaagccggcctcctgggcctgggaggttccatttccagtttggtgaaggccacctctcgtttgagatcctcggctgccttcagggctgcgggtacacctgaaacggttacttacgctgctttagaatggctcctcacacacatcctgtgcaggtggcgggggactcgctggtaaacgggc

SEQ ID NO: 344842 - DNA, 60 bp, Homo sapiens
  chr22:47441113-47441173
  hypo
cgtggcacctggctgcacacgcggctgtgtgttcactgtccctcggactctgcgggaaaa

SEQ ID NO: 344843 - DNA, 96 bp, Homo sapiens
  chr22:47441203-47441299
  hypo
tcctccgcggtttggaagtcccattaatgcgacttctctctgagaagtcaacctgggcctcctcactctgcagacgtccagctccctcccggaagc

SEQ ID NO: 344844 - DNA, 72 bp, Homo sapiens
  chr22:47465521-47465593
  hypo
cgctgttccctgtttggatggagtggagctgacttgacggttcccggctgttccctgttgtttggttggagc

SEQ ID NO: 344845 - DNA, 117 bp, Homo sapiens
  chr22:47465782-47465899
  hypo
cggagctgacttgacggttccagcgctgtcccctgttgtttggttggagcagagctgacctgacggtcccagcgctgtcccctgtttggttggagcggagctgacctgacggtccca

SEQ ID NO: 344846 - DNA, 89 bp, Homo sapiens
  chr22:47465973-47466062
  hypo
cgctgtcccctgttgtttggttggagcggagctgacttgatggttcgagactgttccctgttgtttggttggagcagggctgacctgac

SEQ ID NO: 344847 - DNA, 266 bp, Homo sapiens
  chr22:47525841-47526107
  hypo
ctccccaccagacaggttaccggagcgggcgtgtctggaggagcaggcagagcaggtgctgtacacctcgtgtcctctgggacccatcccttctaggcccctcctcaggacaccccctcctgccgggctccccccaagcgcagcccccttcccaaacccacgtttgcctcactgtcttccttgtccggtagagcacacccctcagcacttctctgtgtgaatgagcctggcagggacctaccttgagatctacatgtctggatacc

SEQ ID NO: 344848 - DNA, 397 bp, Homo sapiens
  chr22:47534596-47534993
  hypo
gtgaggattttaaccgatggattgggggaaacacaaacgttccagccgtagcacgttatttggccgaaacccagaataccaggaggccagccctcgctctgcagccgtctcccctgagggcccagcctggattcaggccttttggcttggccaaagcccttctgagtcccaccctgagcctttgcgggagggtgacgtcatgtgctttattgctttgtttatgtgcttcagtcaccgttccgctcctgcagcgaccagtcaggcacagaacactgaggccgccaaagactggcccttggttccagttgcccgcacggaactgtgtgtctggggcccagttgctgaggaagtacctcagaggacaccgctgacacaagccacaggtgctgacgtggcc

SEQ ID NO: 344849 - DNA, 435 bp, Homo sapiens
  chr22:48027392-48027827
  hypo
cggcttccacagattggacgaggcccacccaccttggggaggggccagctgctgtgttcagtccgccattgcaaacacgaagctcttccagaaacgccctcacagacaccccggaagtcacgtacccactctgtaggtgccccggggcacaggcaagcggacgagccagttatccctcagagctcctgctgcctcgcccgctttctctcggaaacgtgaagtgtggcctcagctgaaagtgaggtgagcgtgagtgtggacatgtgtcagtgtgcgtgtgcatgggaggagtgtgtgtgcgcttgatgacgatgatggagcccagtgagccaccgtccgtggagtgtcagagcctcctaggatggccacgccgaaggtgcggaaggaggcggctggcccagcgtcagacgtttccagcatccgcgggagtgaaac

SEQ ID NO: 344850 - DNA, 110 bp, Homo sapiens
  chr22:48280063-48280173
  hypo
cggggaagccgccgttcaaggtcacgtgtctagtaagtgatgacgcagatctccgttttctagtaactgtgcaacccgatgtttgttgatttaatacaattcgaatcatc

SEQ ID NO: 344851 - DNA, 994 bp, Homo sapiens; identical to SEQ ID NO: 336674
  chr22:48885701-48886695
  hypo

SEQ ID NO: 344852 - DNA, 1448 bp, Homo sapiens; identical to SEQ ID NO: 336675
  chr22:48970901-48972349
  hypo

SEQ ID NO: 344853 - DNA, 236 bp, Homo sapiens
  chr22:48996174-48996410
  hypo
cgcaggtccagcggggatcagagtggaggcctcgcaccagctctgggacatgaaggggcccgaggcagcccttgtggccacacgggccttgtcatggttcggcctttccactctgtgttccgaactgtgcagtgtgtatgtgtaggcacagatgtgtgcccgtgcccatgcctaggactttgcgtgtgtctgtacgtgtgatttcgtgtgtgtgtgcatcttcgttggcgacacac

SEQ ID NO: 344854 - DNA, 302 bp, Homo sapiens
  chr22:49042371-49042673
  hypo
cgtgtggccgctcagtcgcttctgctcctctctgcaggtcagctggccgccggcacctgtgagattgtgaccttggaccgggacagcagccagcctcggaggacgatcgcccggcagaccgcccgctgtgcgtgtagaaaggggcagatcgccggcaccacgagagcccggcccgcctgtgtggacggtaagcacccgtggccccaggacccctccgggtgctgagcgcggcgtcaccaaaggtgcctcttccctgacgcggccccttacctgaaggtccccctaggcctcagcgcatcctc

SEQ ID NO: 344855 - DNA, 823 bp, Homo sapiens
  chr22:49138251-49139074
  hypo
cgggtggagcgggtggtgctgtgtggcggagctggcggcgcagtggagcgggcgttgtggtggacccggtggcgtggcagaccaggcgacgtggtggacccggccgcatggtggaccaggcaacgtggtagactgggcagcgtgatggaccaggcgacatggtggaccgggccgcatggtggaccaggcaacgtggtagaccgggccgcatggtggaccaggcaacgtggtagaccgggcagtgtgatggaccaggcgacgtggtgggccgggtggtgtggtgaagccggcagcacagtggagcaggcattatggtggactgggcagcatggtgtattagaagaggagagatggcctggggtgctcagcggggctgagtccccagctgggagctcaggtgcgatgaagcccaagggactgacggtgtgaggagggccctctgctgcctccatgcagcccacacgcggggcccccacagtgcggacatgttggggcaatgctgcctggccccgccctcagcccagccctgggacgcaggctcagcagcccccggattccagtcaacatccccaggactcactcgggtcaggcacagtgtccaagctgtgtgagtctccgggagccgctggaacaaaatgccacacacccggtggcttcaaaccatgaaacccgttctcactgttctgggtccagacgtctgtggtcacagtgtctgctgggccgtgctcccgcaggaggcagcagcagagggtcctccctgcctcctcctgccattcttccggttcgggggtccagacgtctgtggtcacggtgtctgctgggc

SEQ ID NO: 344856 - DNA, 274 bp, Homo sapiens
  chr22:49146962-49147236
  hypo
cgtacaatatcttgaacatgcttcttccaatgggttttgtttcccatttcctgcccctttcgccactcacggaccttgaggccagttgacggcccttctccccacgcctgtgtccccgcgttctgagaagtcctctgtcttcgtgtcactaggtccagaaagtcgcgccgggcagaggcgcaggcggggccggcagggccgaggaataagcgacaattctggtttttctcccctggccgtcgttcgccagcctccttcattttcctgagttccc

SEQ ID NO: 344857 - DNA, 465 bp, Homo sapiens
  chr22:49637423-49637888
  hypo
cgcgactccagctccttccgaggaggtcactgagctttgcacgatgccggctccttctcaggaggtcaccagagcttctcgtgactccagccccttcccaggaggtcactgagcttcacacgacgctagctctgtccaagtcggggtccctgtgcccctaggtttccggtcaccgggagagctgtctgtcgcgccataagctggaggtgcgcaggaggatagaaatagaaactcctcatccagccgggccagggcactgacagccacagcgatgtccacggtgtaatggtcacggactccgtccccaaattagcccattttttacaaagacgataatggggggcggttctctgtgaaatggagccctccatttcggccgctcccgcgtcaggcccaaaataggtgcctgctggtcatcacttctgcgatcatgctttcatctccactcaattacgtcgcctccgc

SEQ ID NO: 344858 - DNA, 275 bp, Homo sapiens
  chr22:49693559-49693834
  hypo
aaaccaacccaatcccagaacgccgaagacaccaggctccccggacgggcttccagggagccacttctagcttcacaacgtgaactgttttctcaacacatgacttcgcaagagtaaaagtccgtattctccctaaggcctcctgcgaacgctgtgtccaggccccgctgggggatccaggctctgagatgccccggccccatgccaggctgtggatggggagtgaccgtgcactcaccgtggtggcaacgcctgtatgcggcctgtagatgaac

SEQ ID NO: 344859 - DNA, 178 bp, Homo sapiens
  chr22:49698417-49698595
  hypo
cgtgtttatcatccggcacacgggagacccacgcgtgtttactgtcgggcacaggggagacccacgcgtgtttactgttcggcacacgagagacccacgcgtgtttaccgtttggcacagggagacccacgcgtgtttactgtccggcacaggggagacccacgcgtgtttactgtcc

SEQ ID NO: 344860 - DNA, 171 bp, Homo sapiens
  chr22:49698626-49698797
  hypo
cggcacaggggagacccacgtgtgtttactgtccggcacagggaagacccacgtgtgtttactgtccggcacacaggagacccacacggggcctgtttaccatccggcacacaggaggcccatgcatctttaccgtcaggcacacgggaaacccacgcgtgtttaccgtcc

SEQ ID NO: 344861 - DNA, 298 bp, Homo sapiens
  chr22:49729101-49729399
  hypo
cgccagcggccgctctgtagcaataattcatcgcttgggtccagcgttagaagcaggtctcggctctggtgctcagaagggacagcgtgtgcgggaagctttgctgccctggacgcggcgccaccacccaaccccggcccctgcggtcccagagtatcagccacgacttggtgcctcctgcctgggtttctctgtgcactttcaggcatgttgaagtcagaccattcacagttttgccgcaggtcgacacggagtgccccgtggcttagcaggtgtgagctctctctggggctggccc

SEQ ID NO: 344862 - DNA, 108 bp, Homo sapiens
  chr22:49857262-49857370
  hypo
cgtgaaccaccgcgcccggctattattcaaaattcttatagatggaatgttggtggactctccactattcgtttacttatgaaatcatgtgttgacatcagtgtagac

SEQ ID NO: 344863 - DNA, 741 bp, Homo sapiens
  chr22:49911038-49911779
  hypo
cgccatctgagggacaaagtccccgagccccgatgcctgggcgcagagctggagactcggcttcttcttcgacctccccggccacttcccaacaccacatcacctcaacgcaggtataaggcacgtcccgtcattgcccccgttttagagctgagaaacatgaggaccagagaatcaaggctgtctgagccagagggcgcctcgctggcccctaccccaaaacagcacccgccctgccctggtcattactgccccccaaccttaaccaccctccccactgccctacagaagacccttagaagggggctgactgatggaccatggtgaaggccagcctggcctccttcagccacagtgtgaagcgcagttcaccaaaactggaaactgccatgcatcccggtgtcatcaaacaccacagcaaaagagccaggtgaacgcacggaacatcaagccgcaaccctccacacctctctgtataaccttcgcggccactgcccccgtgcctgcagagcgggtttgcaggagacgtcatccgaatggataaatgtccgtcggagctggggatcatcctcccagagtttcagcagctcagagaaggccagcaactcaccgagccatgccacagcgtgcaagcacagcggcccggccctcctgcattctgtcatgcactgcgtgtcatcttattaaaggatccaacgcaggctcataaaatacttaatgaaaacatgccaccaggtgcac

SEQ ID NO: 344864 - DNA, 311 bp, Homo sapiens
  chr22:49943122-49943433
  hypo
cgcataggcagaggtggcttcacagcagcgggcaagtgggggaccctgcctgatgcagagtcgggggcggcttcctgcagaccgggcttccttggcccattccccctctccctttttcaaatctcagaactccagagcggtgctctcctccaaaaagagggctgctccccttaaggcactcgctctgactttgccatcctccagctgacctgagtgagctcagcagccggagttcgtgtggctctgtcaccagccagcatgtctgaaatcactgcagagatgctgctgagggaacacggacagcgttctga

SEQ ID NO: 344865 - DNA, 155 bp, Homo sapiens; identical to SEQ ID NO: 277470
  chr22:49967872-49968027
  hypo

SEQ ID NO: 344866 - DNA, 275 bp, Homo sapiens
  chr22:49980101-49980376
  hypo
cgcaggctctcgtgtcagggcgcacagccatgtgatgactccacattcactcagtgctcagcacagagtcactgcgaggcggcgtgagtctgtgtgacatcagcgtgtttagtgcatgacatcagcatgtttagcacagagtcactgggagacagtgtgagtctgtgtgacatcagcgtgcttagtgtatgacatcagcgtgtttagtgcatgacatcagcgtgcttggcacagagtcactggaaggtggcatgagtctgcgtgacgtcagcatg

SEQ ID NO: 344867 - DNA, 167 bp, Homo sapiens
  chr22:50001649-50001816
  hypo
cgtgattattgttaccatgattaatgtcgtgcgcaggcctctcctgggtgccggggattcagctgcgatgaacaggacaaagtccagatctcatgggaccggcatgggggtgatctcagggaggacaacagagaaaatggaagccaagaaccgggaacagggattcc

SEQ ID NO: 344868 - DNA, 705 bp, Homo sapiens; identical to SEQ ID NO: 277480
  chr22:50002541-50003246
  hypo

SEQ ID NO: 344869 - DNA, 773 bp, Homo sapiens
  chr22:50008938-50009711
  hypo
agacaccatcttcatggacacggacatgacacgcgctctgggcagcctggctagagctctgcccacggcacgtcagcccctccacttccgtctgaaaggtgccggccgcgtgtgtcacgcgagaccagtcctgcacgtggatctggacggggcaactgcgcgaagggtcatgaatcccgccggccagggaggatcgtctcctgtgcagaatgaggtgcggtcagaacacggcagaagctgggagctcccacccggctgcccgagacacctcccctcaagattcaccaaacaccacgacgtgcaaagaagaaagtccacgcctccgcggaaaacactgcggctcggcaggtcaatccaaacctggaaacacctcggcgcggcctgtcagtctgaacccggaaacacctcgacgcggccggtcaatctgaatccccagaaaacaccgcggcgcggcaggtcagtccgaacccggaaacaccgcggcgcggcctgtcaatctgaacccggaaacaccgcagcgtggcctgtcagtctgaacccggaaacacctcgacgcggccggtcaatctgaatccccggaaaacactgcggcgcggcaggtcaatccaaacccgggacatcattgctaccagggcggaggagaatacacgcaaaatataccagggcggaggggaatacacggaaaatataccagggcggaggggaatacacggaaaatataccagggcggaggggaatacacgcaaaatataccagggcggaggggaatacac

SEQ ID NO: 344870 - DNA, 369 bp, Homo sapiens; identical to SEQ ID NO: 277482
  chr22:50010154-50010523
  hypo

SEQ ID NO: 344871 - DNA, 425 bp, Homo sapiens; identical to SEQ ID NO: 336676
  chr22:50170525-50170950
  hypo

SEQ ID NO: 344872 - DNA, 210 bp, Homo sapiens
  chr22:50177139-50177349
  hypo
cgcgcctgggcatggccgtcacacccaaaccaccagtcactatgggacggctccgcacatgctcaggacagcctcagaatgctgtccactgtgtcgtcagctgcagcaggctcccagtcggtgccgggctctcctctgcgtccttcgtgactgtccagagggaaggctgaggtgccacgacatcccgccagctccaggcgtgcaccgggc

SEQ ID NO: 344873 - DNA, 351 bp, Homo sapiens
  chr22:50191356-50191707
  hypo
cggaccatgctgatagggagctggcaacacagagcaggacagagtctgctagaaagagcgtcttccacctcctccggacacggcgccagttcttaccgtcttcccaggagaaaggccgccgcggtgccgcagcaggccgctcaggcaggtgcatccccgaggcctcttccaagccgatgctgtccacctcgcgccgggcctgcctcagaacaacacctccctgatcgcgcagcctcaccgcggctctatagaacacggtgtccctggcattgtacttcatgcagttatctataatgagatcaaaatcctcctcaaactcatggaggtttttatacccttgagcttctaacc

SEQ ID NO: 344874 - DNA, 112 bp, Homo sapiens
  chr22:50192076-50192188
  hypo
cgttaaataaaaacgagaattaagaacacaagggatgtactctagccaatcacacgtttcccggtcaaacggcagcacaaatccacagtcacacatgcggcaggacagacga

SEQ ID NO: 344875 - DNA, 385 bp, Homo sapiens
  chr22:50316625-50317010
  hypo
cgccatcctcatggggcgcctgccccggttggcactgagtgtctaaggacagggcctggccatcgcctcatcccctcccctgccgcgtggggcctccgaggatggcatttgagatgattcctcctcaggggctgccctcctccctgcccttccccagccggccctggccacgggctgtgtcaggccatgatcggtccttccccgctccctggccgggctgtcctgggccgctcacagctgtgccgctctgttccagatgtggacgagtgtgcggccgagccgcctccctgcagcgctgcgcagttctgtaagaacgccaacggctcctacacgtgcgaaggtgggccaggcgggcgggtctgcactccggggcctgccgggtttc

SEQ ID NO: 344876 - DNA, 397 bp, Homo sapiens; identical to SEQ ID NO: 336677
  chr22:50453240-50453637
  hypo

SEQ ID NO: 344877 - DNA, 79 bp, Homo sapiens
  chr22:50466962-50467041
  hypo
tgggaatcagggaggcggcaacacctgcgtgccgtcataaagacccccaccatgccctcgtaaagacccccatcacacc

SEQ ID NO: 344878 - DNA, 683 bp, Homo sapiens; identical to SEQ ID NO: 336678
  chr22:50496696-50497379
  hypo

SEQ ID NO: 344879 - DNA, 400 bp, Homo sapiens
  chr22:50529596-50529996
  hypo
tggagcacttgctccgtggatctcttcggtagaacacgcgctcagcggtagctggagctccagctcttggcagcgctcagatcctatgcctgtactgtaaccgtcgccccaggttcctcccgtggctgggaagctgcagtaaaggcacgttcaggactcaggaccgtggctgcagcagtggccagacggctgagggcgtgcgctgctcctgggccagacttgtctgcccagccccgaaccttttccagcaccgtgtttgttgagattctccagtcttccgaggctgctgctgatggtaataaaaagataatcgatagtactaataaaaccgtgcatgctaatgactcccagatgctgatataagtggccatttacatagcacttaacgcgtgtcagccac

SEQ ID NO: 344880 - DNA, 774 bp, Homo sapiens; identical to SEQ ID NO: 336679
  chr22:50623263-50624037
  hypo

SEQ ID NO: 344881 - DNA, 1272 bp, Homo sapiens
  chr22:50718718-50719990
  hypo
cgctggacaggaagggctagagtccggctttgagtttgtggccggggacaccacccctagaccgccccccaccaccagcgctggctggcacctgccggctcctgggggcccaacaggccgctgtgccacccgccaccagccccagagcccctgcggccgccccgcccgtggccccgctcgtggccccgcccatgtgcacctgcgcagcatcagcttggggttcttggccaccacgtactgctccaggagctccaggaagagcgtgtgcatgatgtccgtgtagtactccagtttcccgtgcagcgccaccgtcagcagggacgcgaagtagaccttggcgcgggccgagaactcccgctggttctccagggtgtggatgaactgtaggggccggcggtcaaagcctgcccggcgccacctgtgtgccctcccgcccgcccgacgcctggctcacattgatgaggaaagacttgctgttcagcaggttggagaactggtagagggcctgctccaccaccggccgccgcggctcagggatgtccagcttgccggtgatcatcacgtccttgtcgccgtccttggagggcaggaagaagacgcggtcggtgtaggtcttgtagtccagcacggggatgccggcctcgtgcacgtcgttggtctggtcctccatctcgatcatcaggtctggggggaggctggcgtgagacgtccctggccacgtggggccctgacccccacgctacacacagcatccccgccccaggaggcgccccagcaccagcccccaagcggtccctacctgtgaattccttcttgcagcggtcccgcacgctctcctccaggccctccagctgggacttgatcttctcatactctcgttcggcctgctggctcttcctcctgcaaggcacagcgggcctcctaggttctgccggggctggccgctcagctgcccggatgaggaggtggatctacacgcctgcctgtgcagggcggcggatgaggccagaggggccgaggcgggagggccgagggctcagggtgttggcacagccggggggcgggctcaccagtagcagtagacagacaccgcgatgacgaccaccatgggcacgatgaccagcggcaagatgaggctgagcggcacgtcgctcacccgtgtgtcgtactccacgcggcccagcacccactcgcgagagccgaacttcacctgtgtggggggccgggttcagcgcggtcccgtgggggcaccccccgccagtccccgctcac

SEQ ID NO: 344882 - DNA, 109 bp, Homo sapiens
  chr22:50864117-50864226
  hypo
cgtcatctgatgtgcgtgtggaacggtgtctccgtgtggctgatgctcgtcatctgatgtgcgtgtggaacagtgtctccgtgtgacaagtgatgtcgagcatcttctc

SEQ ID NO: 344883 - DNA, 148 bp, Homo sapiens
  chr22:50873266-50873414
  hypo
cactgggcaggggccgggcacttgctctccgaagtgaacctggaggcctctgccacttggctctctgggtcgtgggtctggcaaggtcggggccaggaggccgccccgatggtgcctgttgctttcagggcagcgggtggcatgagac

SEQ ID NO: 344884 - DNA, 517 bp, Homo sapiens
  chr22:50885403-50885920
  hypo
cggccgggcggggcggggcggggacgggggctgtacacacaagtgctgggggctcggggcctcaatactgtcgagggccggggctgtaaacatggccggggcggccctgcccacccctagtggtcggtaacgaccggaagcagagcagccgggcagggctgggaggctcaggcgtccgacaggcagctctggatccggtccacccactgctgggccgagggcacgtcctgggcacagaagttgtaaacgcgacgcgttgtcttcacctggggaagggcgggttactgactccgcagcccccacaccgcagagcccctcccctctcccaagccccggccaaggctcacgtcaaagaaggccttctcgtccacagtcttaggggcacccatagtgggcgtgccaggtgccacagcctccacctccgccaagtcgatgacacccttgcactctgtgtccacacggtggtcgtagtagcgcagctggaggaggccacagagtcagcggagccccctccccc

SEQ ID NO: 344885 - DNA, 778 bp, Homo sapiens
  chr22:50894573-50895351
  hypo
cgtccacttggctctacccaaggggagggcccagcaccaaggcgggcagagggacggggcagtgcagagacctggatcagccactctgagtcctccagtgagcgcaggaaggaggctgggctgggctcagcagcggggcagcctgggacacatgctttcagcagcttcttgaagctagccttcacctgccgtgcctcgaatacctcaatgggcaccagctcccactgctgcagggggtctgaccgcacaccctgaaaagaatccggacaagtcccgtgagacacatgaggccccaagccccctgccgagcccccaccctcaccccccaccccccgcaccccagtcaccttgagctgggctttgtccccaaggatatagagggctgctcgctgcggacgcaggaagcccgggtcgggagggcccccgttggcctggggtggggccagcgcgtctctgccagctagccgggagcccacatcggtgccaaggccactgctgcgtccactggtccggacactgccccacttacctgtgaaggagatgccaggtaagcacccaaagggggccagggcaccacttacctggggctggctgggcccggcctccagggagggggctgagctcccagggcaggggtggttggcaggaccccagcagggccgtgcgagaggagggctggaacacacagattctgagacgtggggtggcagccagtgttagtttctagggcaggactcacgggtcagggaggtaaggactggggctcgggagacgggtc

SEQ ID NO: 344886 - DNA, 1228 bp, Homo sapiens
  chr22:50899050-50900278
  hypo
tgtccggcgggtaccgcagcttatgcagctgcttacggaagagctcggcgctgtcagaccccacctcctcgtcaaaggccattttcagcagctgtgtcagtaaaagcagcccttaggggtgtgggtggccccccagcccctcccccaactctgacactgccaggctccccttcccctcgcagccatgacagagagagaagcaggccccaggcaaaggcctgtatctgtgtcacacgaaggcaagcgcttgtgtaaactcgaaatctcagtggctgtgagctgaggcctgggtttgcaaggcacacccaagacacggacttgagggccggcgccccaaggaaaggacaaggacccaaagaccgcacatcaaacagtggacatcaactcaagagccacagtgagggccccagacatgcaagcgtaacaacagggccactgctggagactggcctaaaaatggttcatacaagaaagaccggtttgcaggagaaagaccagggcgggggatgagagccccacccgcgcaccgcgccccacctggaatgtgcaggagcgcagctggagcccgtcctgcaggagctggtccacaggggtctggacgctgatgcgcttctccttggtcagcgcagccaccgggaaggagcggaccaccacctgctccccaacttaggacaggccaggcagagtcagaagcaaggaaggtaagggggggggggtcccagaatctcagggtaccacagttatggggaatcccaagtgggtggggaaggagcagacaaaggcccgtttcccacgggcacccagaacccccgagaaaagggagagggaggcagggaaagcccatccatcccaaagacctgggggagagggggcgacagggccagagagtctgcaggctcacccagggggtccgtgggcatccccgtgaagatgacccggtacgtggtgaggaagacggcgccctcagctgggagcaatgctggtcccccagcactgccccccgcgccctcctcacgcccatccggcagcaggtagacgcgcaggccgtccagcacacactcctcacccggcagcaggcgcggccgcagcagcttgggctgctcgaaaacaagagcaggagctcaggatgcagcccgggccttgggcccccgcagccccaacggcccccgcaaaccttctggatgggcggcagcctccggctctcccgctgcacggcctccagggtctc

SEQ ID NO: 344887 - DNA, 1001 bp, Homo sapiens
  chr22:50942719-50943720
  hypo
cttacccctgcaccccgggctccacaccccacccggtgcccagccttacccctgctccccaggctgggagaaccagtacttgtagcgctgggctcggacgtaggtgggcggctgcttgtggaagggatacctggccacttggctctggacaaggcggatcactgcagcgagaggcatcagcgtggcccccacagtacccgccctgcccctcccctccccaccccgctccaccccagcccactccacaccccccaagcccgctccgcacctggctccttgccctgcagcaggcgcaagaccaggcttgtgaaccacgggctgtgcgtgtgtgggcccagggctgcaaaccacatctgccagtccaggcgtggctggtggggcaccacaaccgggggcggccggctcaggttcccaggcttgtacatgaactcgatctcctgccaggcaggccgaggtcagctgggcccgctgacctgggccccaccaccctgcccgccctgggagggctcaccgtccagtggtggccgtcgtaactgccctccagcaccacctcaggccgtccaccaagcccagtcatgcggcggaagaggccgtaggagttggccagctgtaggtgctccacggcaccaaacaggcggtgggccccggtccagaggcgcccgtgggtcccgggctccacgtaggagtacggcacctggagacaggtgggaggttctcagggctgccctgcccccagcccatcccccagccctgcagcgctacccaccaggctaatcaggaacaaggccacggtcgcagtgcccacaagggacagttggactacagcactgagcttccgtagccagccccgcacctgggtccacctgtgggcaaggacccaaggtcgtcaggccggccctgcacacctgtgccccctccctgcttcctgggccatgtacctccacagggcactcagcagctcccagaccagggaggccacacccagccacacagtgggcagc

SEQ ID NO: 344888 - DNA, 663 bp, Homo sapiens
  chr22:50944156-50944819
  hypo
cgtccagcagcgcagtggtaagcaccagcgtcatcaggttgaagaagttgtagttgccggtgatgataatcaggacctgcagcagcacctgggggcggcccgctctcagtgctcccggagactgacgcctggccccgtggcaggcacccacctccaccctgcagggtgcatccctctgctacaaggccttcccaacagcggttgccagctgtccccgggagccacgctgtccccaacagggcacgctgagcagcgctgaaggccgagccctgtctgcctctctctgacagctgcggccctcacccacctgcgagtagaaagcagccaagcgcaggcgtcgaatgggggcgaagaacaggggcggcacagcgatctcaattaggaaggtggccaccacgctgagcttgtgcagccagaccggcaggtggtgtgcgaaccaggcggcgggcgtgggcaggcactgggtctcgtagtggtaggtgagggctgcaggcgagggcaggagtcagggctggccgagcccccagactaccccaggtccagaccgggcccctcaccagtgagcccccaccacgcagggcagcggctggtcagcttgaccacgcctgaggcgaacatgaggcggaacagcagccatcgcaccagccagaaggggaggtcttc

SEQ ID NO: 344889 - DNA, 209 bp, Homo sapiens
  chr22:50954823-50955032
  hypo
cgagtgcagactgggccttggattccccctgtctttgtgttgtttcttgcagctggatcagatctgcatttcttttgacgaaggcaagaccacaatgaacttcattgaggcagcgttgttgatccagggctctgcctgcgtctacagtaagaaggtgggccctgcttgacgctggtcttggcattttggtggccagtgggaccacagtc

SEQ ID NO: 344890 - DNA, 555 bp, Homo sapiens; identical to SEQ ID NO: 336683
  chr22:51111996-51112551
  hypo

SEQ ID NO: 344891 - DNA, 831 bp, Homo sapiens; identical to SEQ ID NO: 336685
  chrX:2846679-2847510
  hypo

SEQ ID NO: 344892 - DNA, 44 bp, Homo sapiens; identical to SEQ ID NO: 277574
  chrX:3746572-3746616
  hypo

SEQ ID NO: 344893 - DNA, 1793 bp, Homo sapiens; identical to SEQ ID NO: 336687
  chrX:8698837-8700630
  hypo

SEQ ID NO: 344894 - DNA, 1591 bp, Homo sapiens; identical to SEQ ID NO: 336688
  chrX:9432830-9434421
  hypo

SEQ ID NO: 344895 - DNA, 980 bp, Homo sapiens; identical to SEQ ID NO: 336696
  chrX:16729957-16730937
  hypo

SEQ ID NO: 344896 - DNA, 187 bp, Homo sapiens; identical to SEQ ID NO: 336699
  chrX:23801086-23801273
  hypo

SEQ ID NO: 344897 - DNA, 257 bp, Homo sapiens
  chrX:34149228-34149485
  hypo
cgggctgagatgggacactccagtcttggaaggctccgcgtggagactggacccccgacgagtcttgggaggcgctaggcggagacgggacactccagtctcggaaggctccgagcggagactggacccccgacgagtcttggaatgctctaggcggagatgggactctccagtctccggaggctccgggcggagactggacaccggagtcttgggaggctcctggcggagatgggacagtggagtctcgaaaggcc

SEQ ID NO: 344898 - DNA, 223 bp, Homo sapiens; identical to SEQ ID NO: 336704
  chrX:39921413-39921636
  hypo

SEQ ID NO: 344899 - DNA, 301 bp, Homo sapiens; identical to SEQ ID NO: 336705
  chrX:39922006-39922307
  hypo

SEQ ID NO: 344900 - DNA, 863 bp, Homo sapiens; identical to SEQ ID NO: 336706
  chrX:39931611-39932474
  hypo

SEQ ID NO: 344901 - DNA, 892 bp, Homo sapiens; identical to SEQ ID NO: 336707
  chrX:39933533-39934425
  hypo

SEQ ID NO: 344902 - DNA, 3660 bp, Homo sapiens; identical to SEQ ID NO: 336709
  chrX:39954918-39958578
  hypo

SEQ ID NO: 344903 - DNA, 3141 bp, Homo sapiens; identical to SEQ ID NO: 336714
  chrX:40012149-40015290
  hypo

SEQ ID NO: 344904 - DNA, 2334 bp, Homo sapiens; identical to SEQ ID NO: 336718
  chrX:40034239-40036573
  hypo

SEQ ID NO: 344905 - DNA, 264 bp, Homo sapiens; identical to SEQ ID NO: 336722
  chrX:41112874-41113138
  hypo

SEQ ID NO: 344906 - DNA, 417 bp, Homo sapiens
  chrX:41331620-41332037
  hypo
cggtggctccaaagtgggtggccacacgcacaccctcgtgcaatgtgaagctcacctgatgactcaccatggccagcaggccgcggaggtaacgatcccgaagggcggctcgggcccgctgcttctgggattccaaggattcttgagctatggaacactcctggatttcaagaacctctgactacaggggggctctgcgtccatcaggggcaaagccacggctgagaccatcagggcctcggggcagccggagcacaggcacaggaaaggtcactggagcctgcattgtcttggcgaggtccgtggctactgtgcgcgcccccacttccgccggcaccccgcagtagaggccagggcaggccccgagccgcggagcctgggttccgcctgcgccaccgccaccaacccacgtgtcac

SEQ ID NO: 344907 - DNA, 81 bp, Homo sapiens
  chrX:44729941-44730022
  hypo
ctgctattacatagtaatagcgggaagaaaagtgttgaggtgtggagagtgggtagccttttttttctgagacggagtctc

SEQ ID NO: 344908 - DNA, 142 bp, Homo sapiens
  chrX:44922889-44923031
  hypo
cgctgggaagtacagacactattttgataggcaataatcatataacaggaagtggaagtaatggaaacgtgccttacctgcagcgaaacgcactcactctacctcataaccgcacaaacctgaccagcagcgcagaggagcc

SEQ ID NO: 344909 - DNA, 329 bp, Homo sapiens; identical to SEQ ID NO: 336729
  chrX:123094093-123094422
  hypo

SEQ ID NO: 344910 - DNA, 198 bp, Homo sapiens; identical to SEQ ID NO: 336730
  chrX:123094505-123094703
  hypo

SEQ ID NO: 344911 - DNA, 856 bp, Homo sapiens; identical to SEQ ID NO: 336731
  chrX:129146935-129147791
  hypo

SEQ ID NO: 344912 - DNA, 116 bp, Homo sapiens; identical to SEQ ID NO: 336732
  chrX:129171389-129171505
  hypo

SEQ ID NO: 344913 - DNA, 155 bp, Homo sapiens; identical to SEQ ID NO: 336733
  chrX:133507341-133507496
  hypo

SEQ ID NO: 344914 - DNA, 81 bp, Homo sapiens
  chrY:14532158-14532239
  hypo
gacctgcgcccaggcgcagtgggtggaaataaatcctcgtcacgaacccgcagaacagaggcgccgtctttgggaagccgc

SEQ ID NO: 344915 - DNA, 431 bp, Homo sapiens
  chrY:14776368-14776799
  hypo
cgttaaactttaaaaatatacaccataaacttctacatttttcttagtttgctgctttaatcactgccattttcgtctctgcaaatgcgcaattgtttaaaagtgtaaggatttgtttttcaattagaaaactcattgatatgcttttaactttctcgcttcacatgcttttaacttctcgcttcaaactttattcttacagtttgggaagaaagaaaacctaaagtatttgccgttggtgattcaagggtgagttgggagtattttttatttcactgacttgaaaataagattgtgggattttaattatttcttgttgccgttttctgttaacggtgattgcgtgaatgtttactcttgtcaatcttgtcttactgttacaatatttctttttgtcggttggctttagtaatatatatgactgtgggtcc

SEQ ID NO: 344916 - DNA, 1398 bp, Homo sapiens; identical to SEQ ID NO: 336741
  chrY:16635744-16637142
  hypo

SEQ ID NO: 344917 - DNA, 451 bp, Homo sapiens
  chrY:21204870-21205321
  hypo
cgtgtttgcgtctccgggtgcacagagctatcacttctcactccctcctcactgggaagtccctcccattgtctagcctcagtacctcttgatactctcacagcgccccgctgccatccacagcgcctcccagcccgcggctctgggacgctaccctcgggaccccagctgcactcacctaggtcgggccggcacttgcccttgtccttttgcagctacagctcggcgcgtaaatcaccgacatcctcgcagcctccactggaacaatagtttcccttgttgaggctgctaccctggaagcgaggagaggcggggacgaaggaggagccgagtgtccatcttgcgcatctggcctcccgcatctaggcacatgtttaagatgcttacacagcaggtgccatgctaactgctggcagaaggaatcccgccttcttgcatgcaggcactcgcc

SEQ ID NO: 344918 - DNA, 323 bp, Homo sapiens
  chrY:21208492-21208815
  hypo
cgccttggagcagggggcggcgctcgttggggaggctcaggccgcgctggagcggggagtggggggaactcaggcatggcgggttgcaggtgtggagccctgccctggggtaggcaactaaggcctggcgataaatcaagcgcagcgcggatgggccagcgctgctggggtagccggcgcacactccgcagttgctggcctgggtgctaagctcctcactgcccggggctggcagggccagccgctcccagtgcgggccctccaagcccaagtccactcggaactctagctcgccggcaagcgccgcgcgcagcccgggttcc

SEQ ID NO: 344919 - DNA, 267 bp, Homo sapiens
  chrY:22918437-22918704
  hypo
acgccagagagactcgtgaggttgtcaaaggtctgggagttttgcggggtttgttctggagtctggcaggaagtaatatttgctcaaaactgggcgtgaaatagcctggactgtcctttctcctccgatccggtattacccgttagcagttgttacagctgaagataaagacattttactgttaactgagacgagtttctctgaaaaagtttggtgtctttttcaggcccggggccccaagaagcacttgaagcgtgttgcagcgcc

SEQ ID NO: 344920 - DNA, 205 bp, Homo sapiens
  AEKP01149809.1_1-6354:1345-1550
  hypo
cgtcccgggtacaacaccgtcctgcgtacagagccgtcccggatacagagccgtcctgggtacagagccttcacgggtacagaactgtcctggacacagagccgtcccaggtacagagccgtcccgggtacagagccgtcccgggtacaacaccatcctgcgtacagagccgtcctggatacagagccatcccggatacagagcc

SEQ ID NO: 344921 - DNA, 129 bp, Homo sapiens
  AEKP01153556.1_1-5252:392-521
  hypo
cgtcatcaccgtcatcaccattatctccaccactgttgctgtgaacgcatactgcactattatcacctgaggtacagtgacaacgttgtgtgatgctaaaatgtgagcttttctatctgccgatgattc

SEQ ID NO: 344922 - DNA, 122 bp, Homo sapiens
  AEKP01184864.1_3582-5885:491-613
  hypo
cgtacgtatacatatacacgtaactatatgctgtgcaggtttttctagctaaggagtcatgggctgtcccagagagccgaagtgtggaggaggccattccatctaggtttgtgtaggtgcac

SEQ ID NO: 344923 - DNA, 273 bp, Homo sapiens
  NW_001838014.1_249000-295694:3973-4246
  hypo
cgtgtggatcccacagacagacacccttgggtggccccgaggacgcgggagaaagtcccccttcccagaccggtctcgatctcatgggatcaagttacctggccctaaatccgactgctggagccagagccagagccgtgcggagacacggagccggccgaagccactcagggttggagccgcctcgccacacccaggaccctgggcgctacattgagggtggctgggtgcaggggtgatggcggcggttcctagttggcagccaggagacac

SEQ ID NO: 344924 - DNA, 191 bp, Homo sapiens
  NW_001838286.2_1380778-1470498:80846-81037
  hypo
cgggggcaaaaagccatggcagcgggaggcaaaaagccgcaaaaacagcggcagccagaacaaacaccaaggcggcaaaaagcctcagtggcgggggctaaaagccaaggcggcggggagtaaaatgcctcaaaaagccgtggtggcgagggcagaaagctgtggcttcggggacaagaagccatagcggc

SEQ ID NO: 344925 - DNA, 1228 bp, Homo sapiens
  NW_001838286.2_1380778-1470498:81101-82329
  hypo
cggggcaaaaagccacggcggcaagggcaaaaagttgtggcttcgggggcaaaaaaccatagcagcggggcaaaaagcagtggtggcggcggggccagaaaaaccacaaaatcccgcggcgatggggggaaaagctgcaggggcaaaaagccgcagcagcagggggaaaaaagccgtaaaaagcagcagcggcgggggggcaaaaaccgtggcggcaaaaagcctcagcggcaggagcaaaaagccatggcggcaggggcaaaaaccgcagtggaaagaagactcagtggcaggagcaaaaacgatggctgtggggggcaaaaagccatgactgcaaaaactgcggagtgtgagcccaaaaagccatggcggtggggataaaaagccacagctgcaaaaagcagcggtggtggggataaaaagccgtggcggcaaaaacccgcagcagcacaggcaaaaagccgtggcagcaggggcaaaaagccacggtggcaggggcaaaaagccgcggcggtgagggcagaaagctgtggcttcgggggcaaataaacacggcggccaaaagccgtagtggcagggcaaaaagctgcagcagtgggggcaaaaagcagcgggagcgggtgcaaaaacccacaaaaacccatggcaacgggaggaaaaagccatggtggcaaaaagccacagtggcggggggtaaaaagccatggcggtgagggggcaaaaagccacaaaaagcagcgtcggcggggacaaaaaccacggcggcaaaaagcctcagtggcaggagcaaaaagccatggcggcggaggcaaaaagccgtggcagcaaaaacccgtggtggcaaaaacccgtggtggcaggggcaaaaagccgtggctttggaggcaaagagccgtggctgtaaaaagccatagtggcgggagcaaaaagccacaaaaagccacggtggcgggggcaaaagccacggcgccgagggcaaaaagccgtggcttcgggggcaaagagccgcagtggcaaaaagctgcaaaaagccaaggtgacggggcaaaatgccacggcggcggggttaagaagccacggcggcggggcaaaaagccgtggcgggagaaacccgcagcagcgagggcaaaaatccatggcagcagtgacgaaaagccacagcagcggtggcagaaagccgtgaggcgggggaaaaatccgcagcagcggggtcaaaatggcactgcag

SEQ ID NO: 344926 - DNA, 62 bp, Homo sapiens
  NW_001839407.1_18933-24809:4240-4302
  hypo
cgccgcaggccttgacaccctgggacccttcagtggtggtgcgggctgtccgagggctcacc

SEQ ID NO: 344927 - DNA, 123 bp, Homo sapiens
  NW_001839646.1_1-5206:1404-1527
  hypo
tccatggtggcagctgggaggctgcaggggcacgggcgtgccagcgagggtggcgcggaggcgcagaggatgcaagccaccgaagggatgtcaggaatggacgttgcacgggcccagtgtttc

SEQ ID NO: 344928 - DNA, 188 bp, Homo sapiens
  NW_001840306.1_6328-82586:33382-33570
  hypo
cgcaacgaaaccccagacaacatcctccgttttcacaagagcggtgcctcccctggtcaccactgcgacccctgcttccagctggcacgagccacacacactgctcatttttctcagcgcctgattgtctgtctcacacttctgccccggccacccccgcaccgcacgcagactgaataaaatatgcc

SEQ ID NO: 344929 - DNA, 280 bp, Homo sapiens
  NW_001842432.1_1-179261:102996-103276
  hypo
cgttcctgatggaggccgtgggcctctttgtcctcgcttaccaggcagcagctccagccattctcagccccaccggtgggtgccgccttccatcaggccaaagactttccgaaactgcccttcttggggccgggaggccgcatcctaggcctccctggggcctgcggcgctggcagcagctccatgttgaggtcacctacagccggcaccacggcacgctggaggtccctgagccgggggttgggaggccaatccatcggtgcagtgccgggtgcaggcc

SEQ ID NO: 344930 - DNA, 431 bp, Homo sapiens
  chr1:1713574-1714005
  hyper
cgaggaaagggagctggggggtgggggtaggggacagggcgaggccagagagtagtgggaggggccgaggcggcctttcccgggagcgctcggttcccggccggcccttctattggccccagtcactcaggctcccaggtccggctcgggggggagcggggggccgcgccaggccgctgaagtgtccccgtttcgcgtgggcagagcgcgcctccccacgcatcctgctgagggccagcctctgctaggtgcgtgacacggaggggacagaacggaaaccttgtcctgctcaagtgtggacgtgcgtgccacgtgctagagtaaaattgaggtggggaacctccatccctgggacatggagcacaggggcgaccccgcgccgcttggtcaaaggaggtccgaggccctgcaggaacagcccacagccggag

SEQ ID NO: 344931 - DNA, 232 bp, Homo sapiens
  chr1:1714067-1714299
  hyper
cggagccaggtgacccggacacaggaagcgcgccaggggcccccacaccgcggagctgctggcgacaaagggcgctgctcctgcataggccaggctaatgcaatctacaaactagatttctgtgcctacagtttgaaaatgattgcagttcactcagccagtgtggaattatcctcctctttccacactgccttagtcagtgccgctgtccaagtgcacgttgttggcgccc

SEQ ID NO: 344932 - DNA, 194 bp, Homo sapiens
  chr1:2460612-2460806
  hyper
cgggcggccggggacttcccagaagtcacttgcttaaatgcaaacacagaacaaccccatggggtcagacacttggcagaagatgggccctgattgtcctaaaacggcagggactctgcacacacattctctgagaatggggctcctgcgggccggccagcttggggccagagccttccggagaagggcgcgtc

SEQ ID NO: 344933 - DNA, 413 bp, Homo sapiens; identical to SEQ ID NO: 197254
  chr1:2460898-2461311
  hyper

SEQ ID NO: 344934 - DNA, 443 bp, Homo sapiens
  chr1:2461988-2462431
  hyper
ccttttcccaggccgccaaacgggaggggggcaggaaggagggccccctcccccgccctcccctccgctcccctcccctgcctctccccagcggcttcccactgctggctggcagaggccgtaggagcagataagggaaaaactgtagaatgaacaagtgccacggcttcctgggggatgggcaccttccctgactgggacctgctgcccctccaggggagggggacagagggggcgacgctcttaggatcagtcctacgtgcctatattacaagccccctgactgtcacctgggactcctgacttctccagacctagaaaatgggccttgtgccttcctggctgggctccgggcagctccaggaagctggggcccgtgctccacgtggagcccggcacccggcagctctccccgcggagccgggcacccggcagctctcccc

SEQ ID NO: 344935 - DNA, 695 bp, Homo sapiens; identical to SEQ ID NO: 197277
  chr1:6265789-6266484
  hyper

SEQ ID NO: 344936 - DNA, 64 bp, Homo sapiens
  chr1:6266713-6266777
  hyper
gtttccacgacttctgtgccggctgcctgcgtggccgcgcgaccgacggccgcctcacctgccc

SEQ ID NO: 344937 - DNA, 227 bp, Homo sapiens; identical to SEQ ID NO: 330672
  chr1:6474528-6474755
  hyper

SEQ ID NO: 344938 - DNA, 53 bp, Homo sapiens
  chr1:6507073-6507126
  hyper
cgctgagttcccaacgcagactgttggccccgcccaaatccacaggacaggtg

SEQ ID NO: 344939 - DNA, 425 bp, Homo sapiens
  chr1:9711649-9712074
  hyper
cggcgggggaaggcgaggccctggaggacctgttgtttttcctgttgcaagtgaaaaggaaacaaagtgggaagtggagtgtgcgggttggcggcaggcggggcgccccggcgcgccccgcctccctccctcgaggctcactcgcgcccagcgcagtcgctccgagcggccgcgagcagagccgcccagccctgccagctgcgccgggacggtaagcgatcgccgctggctgcgtcaggggaggtgggaagaggaccgcggccaggggctttgggagctgcggctgcgctcgggggcgcggggctggctggcgggcgtctctccggcacacacagcccgtgcgccctggccctgggcgcctccccgagtctagcgagccgggtcctgggagccccgggggccgggctgctgggacctgggcgggg

SEQ ID NO: 344940 - DNA, 125 bp, Homo sapiens; identical to SEQ ID NO: 330686
  chr1:9747572-9747697
  hyper

SEQ ID NO: 344941 - DNA, 122 bp, Homo sapiens; identical to SEQ ID NO: 330687
  chr1:9749342-9749464
  hyper

SEQ ID NO: 344942 - DNA, 201 bp, Homo sapiens
  chr1:20512799-20513000
  hyper
gagcctggagaaaagtctgctcccgaggcaaagcaagcctggccagagctcacctttaccaaaatagggtgactcccgggctctgcagaaaccgagggacctatgcaaccgctgggccatgccctccaggctgggatgtagcgacggggacacagacccagggagagaaaaggatgtcccagtctccggcagggcagagac

SEQ ID NO: 344943 - DNA, 490 bp, Homo sapiens; identical to SEQ ID NO: 197394
  chr1:24648342-24648832
  hyper

SEQ ID NO: 344944 - DNA, 32 bp, Homo sapiens
  chr1:25255579-25255611
  hyper
cgatcccggcctagcgccgtccggtaaaattt

SEQ ID NO: 344945 - DNA, 807 bp, Homo sapiens; identical to SEQ ID NO: 330733
  chr1:26662538-26663345
  hyper

SEQ ID NO: 344946 - DNA, 148 bp, Homo sapiens
  chr1:29585852-29586000
  hyper
cggtgagtcccagcccactgggggcgcaggggtaaggggtgtgggcggccgcggctcctgcctgcagggggtgcaggcccagctcacgatgcagctctaaccccgcagcaaaggccccacacttctcccgcctgggcgacgtggaggt

SEQ ID NO: 344947 - DNA, 261 bp, Homo sapiens; identical to SEQ ID NO: 197432
  chr1:32180427-32180688
  hyper

SEQ ID NO: 344948 - DNA, 129 bp, Homo sapiens; identical to SEQ ID NO: 278204
  chr1:32410105-32410234
  hyper

SEQ ID NO: 344949 - DNA, 178 bp, Homo sapiens
  chr1:33219389-33219567
  hyper
cgcctgccccacctggactggccaggccttcccctgtgcgccctaggctgggcggctcagccggtctcccaggtcccgggaggggcggagccgacgggatgcgcgccaggccccgcccctcctccgggcccgcccccggcctggccattggccgcagagctcgggggcgtggtcgagc

SEQ ID NO: 344950 - DNA, 307 bp, Homo sapiens
  chr1:33219596-33219903
  hyper
cgcgagtctcgctgcctccctcccggggctgcgggcccggcggccgggctggctgggccgcgcttgggttcccgcgccggctcccgcacccgcaatggggaactcacaccacaagaggaaggcccccagcggtccccgggtccgcagcttctggcggttcgggcggtcggcgaagcggccggcaggtaggggccggggtgggggcggggcaggcagggaggagggtccctactgcggtcgtcgccaccgctgctgccccctcccggggcttggagggtgtgagtgtgggggggtcgggaatccccgc

SEQ ID NO: 344951 - DNA, 393 bp, Homo sapiens; identical to SEQ ID NO: 330757
  chr1:33937934-33938327
  hyper

SEQ ID NO: 344952 - DNA, 383 bp, Homo sapiens
  chr1:39956953-39957336
  hyper
cgtgtcgggcccggtggcgaccacggcacaccacggcgaggcagccgggtggcaccactggcgggaccgggacggcgccgcggccttaggatctctgcgccgaggcccgcggcgggagccacgacggccctgaccacgctgacgcccaggctgcgggctcctcgcccggaccaaccgccagccacgccgaggtcgcacctcggggtcgccccacccgcaacacctgccgccgcccggggctcctagcgggcgcggcctccgcgcccaggccccgcccccgcgcccccattggtcagtcccgggggtgggcgggcggcacagacggctgagccggggcaaggactcgcgggaatcgcgccgcccgggtcgctgccggagctcgc

SEQ ID NO: 344953 - DNA, 87 bp, Homo sapiens; identical to SEQ ID NO: 401
  chr1:45097717-45097804
  hyper

SEQ ID NO: 344954 - DNA, 1865 bp, Homo sapiens; identical to SEQ ID NO: 330798
  chr1:46767970-46769835
  hyper

SEQ ID NO: 344955 - DNA, 114 bp, Homo sapiens
  chr1:50893877-50893991
  hyper
tgcttggcacgcagtccttgggggaagatgcgatgttccacatttcagacacgaggtagccaaagttcaacaaggcgacataacttgcctggggccagagtgctgccgaacttc

SEQ ID NO: 344956 - DNA, 31 bp, Homo sapiens
  chr1:52194847-52194878
  hyper
cgatgtctcaccggattaataaaaatatagg

SEQ ID NO: 344957 - DNA, 322 bp, Homo sapiens; identical to SEQ ID NO: 197534
  chr1:52194968-52195290
  hyper

SEQ ID NO: 344958 - DNA, 778 bp, Homo sapiens
  chr1:52195348-52196126
  hyper
cgccaatcgtctgcctctcacctcctacagcaggtgacccatggccaatcgccaggggtctctttgccaggagccgccagggccagccaatcggggcgacccctccgccggggaggggacgggaaaggggtggggggtgaagggggtgaagggggtgtcccgggggacgggctgaacctcagtcaggaccgcctgcaccgcagtccggggatcgggtcgaggggagaagaaaaaggggtgctcgggagcagcccccggctacctcccctggaggcacagagggcgggggccttggcgaatggctttcttgctggccacttgcggagtgagtagaccccgagggtctgggagaggggccggcccctacccctgagtccccggggtcccggccgccaggccggagcgcgaatgtcgtgctcaccctgcctccttcccgccgccccctggggtgagtaggacgacgtggctgcccgggcccctcttccttgggagttctcagttcctcagcctagatggggtggaggctgaggtcagggcctccagttccaccgagagggcattcgcccccaaatgagactttggaggaggtctctttttttctattcatttttgtggaactctgttttccttttgaaagctgtctcagaatatgattttaagcagaaaagttaagctttctcttatgtgaaagcttaattttgaccagttgcccattaatagaatctccagttgcaggccaagtgttttttggtggtggtttatttttggcacggtgttc

SEQ ID NO: 344959 - DNA, 535 bp, Homo sapiens
  chr1:85462747-85463282
  hyper
cgtggagtgcggcgggcagttctcgggcggctgaaaggcggctctgtgtgcaccctgcaggatgcggcgcgtggccaggcgctcccgccccgcccccaaggggctgccccgccccgccccgccccgccgcctcctaccggggaccggagcttccccagttggggtcctaggggacttattccacgcttcagcggaccagcctccccgcgctcccggagaagggggtcggcgacgcggaggcggggtgggggccgtaggggatggaaccgaggcgcgcgcgagaagagccgaggaagtaagcagtcccaaaagggggcggcggtggggcccccagggaggcgtggggcacgccaagggcgccgtggggcactgacctgtggtgcggcccccaggacaggcccgaggcgcggttgcacaccggcaggtccagcacctccatgcctcgaggcatggcgcggccagggagcggcaggaggacacctagcgtgggacggctacacctgtctgggcgcaggcccgccgcccttgcactctc

SEQ ID NO: 344960 - DNA, 437 bp, Homo sapiens
  chr1:90308855-90309292
  hyper
cggcggaggaagcgtggagtccattgatctaggtacttgtggggaggggagaacccgagcagcagctgcaaacggaagggctgtgagcgagcgggcgggcgggtggctggcagcgaggccaccagcagggggggcccgggccgaggccgcgccacctcggcaccacgcgggcagccggtgcggcggggtcgccacggccaggggagcgctgggtgcccaccatggcagttatgcaagcggtgaccccctggtcttgcctccccgccgccctgcactccttcctccccgctgccgacacttggatctctctagctctttctctcccctgtgttttcaaacaggaagtgcacggctgtctataacgtgctgccgggtctcaggatggaggagtgaagtctcctgtcgccgtggttccagcctccggagctcgcccaagc

SEQ ID NO: 344961 - DNA, 115 bp, Homo sapiens
  chr1:90309490-90309605
  hyper
actctggctgctgccgccctgggttcgggccggcggaaggccctgggcgtgcgctgcggagccgcctgcgaggactccactagggcgctttccaggctggactgccccgggctgc

SEQ ID NO: 344962 - DNA, 142 bp, Homo sapiens
  chr1:92949466-92949608
  hyper
ctggagagctgtagttcccatcgggtgggttaccccaactcagctactcatcgcctgcctggctgtgctttacggctggcgagggagggcggggacacgcggatcggtttaggggccggggatgcccagtggtcgaggaccc

SEQ ID NO: 344963 - DNA, 227 bp, Homo sapiens; identical to SEQ ID NO: 197642
  chr1:92950207-92950434
  hyper

SEQ ID NO: 344964 - DNA, 442 bp, Homo sapiens
  chr1:99127189-99127631
  hyper
cggccggggaggtgcaggagacgtgggagccaatgggcacgctcgggggagccgggctggcggcggcggtggcggccggctgggcgcgcactctcgggatggagggcgagcgccgggcatcgcaggcgccctcctcgggcctcccggccgggggcgccaacggggagagcccggggggcggcgccccctttccgggcagcagtggctcttccgccctgctgcaggcggaggtgctggatctggacgaggacgaggacgacctggaggtgttcagcaaggtgagggcggcggcggcgagtcccgggaaacttccaaggcaactccgggcgttgccagcattgcgccgacggctgcctctggcgcgcttgccctcccggggcggtggctctgagctggggacgagtgaggtcccccgggctgctggaccccgcctgccagctct

SEQ ID NO: 344965 - DNA, 325 bp, Homo sapiens
  chr1:99127671-99127996
  hyper
cagccgctccctcctccgcactttgaccttccgttcggcggggctgtggcttagtggagtctgcaaagttgtgatttgttttccctttctgcttctctgacacagacatcttcctcgcggcagctcccgaacctgggaggctggtggctcaaaaccgctcccgccagctgcttttcgggcgaggccagccctgaactctgggagagcagccaagtttagagaaattattcttaatttagtgttgttgcttgtggatttgagacttgggtgagtctcgggtcttgtgggaataggttctaggaaatctccctgaacaggagaaaac

SEQ ID NO: 344966 - DNA, 119 bp, Homo sapiens; identical to SEQ ID NO: 278710
  chr1:109656101-109656220
  hyper

SEQ ID NO: 344967 - DNA, 203 bp, Homo sapiens; identical to SEQ ID NO: 197688
  chr1:109656291-109656494
  hyper

SEQ ID NO: 344968 - DNA, 116 bp, Homo sapiens
  chr1:109657070-109657186
  hyper
tttggggatgaggcgtggggggagggaagaggagccagtctggcgtcatgaggaggccagcacattggaggactcacggatagatcatcctcacagattgggatgctgagctcagc

SEQ ID NO: 344969 - DNA, 65 bp, Homo sapiens
  chr1:110672768-110672833
  hyper
cggctcccacgcctcttgctggggagggtggctcatttttcacgggtgccgcgtgactttccaga

SEQ ID NO: 344970 - DNA, 360 bp, Homo sapiens
  chr1:111506646-111507006
  hyper
cttggtggcaccacccccaacagagcctggtcagtgctgaagactgcgtcagtctggctctgccgccccgcccactgaagccgatagctggagcaaagctcggtcgggcgtcttccggggtcgtcacgtccggttgccaaggtgactggctcgctaaagcccaacccttatgatgcaatccaatggcaagtgatatttgctatcttttcttccggatcaaggaacaaatcgcaaaagaaagctctcccgacacctacgcaaaataaaatgtttccggggtcaatcataaattttctgcttctgtgctcgccgctagcgtacgtttttctctcccgtcagtgcattaaaagacatcggcgc

SEQ ID NO: 344971 - DNA, 736 bp, Homo sapiens
  chr1:111746588-111747324
  hyper
cgctttcaggcacactgcggttgcaccacaagcttcctggatggaaggacacgtggccccggggccccacaacggcttcctgtgtcccgccgcctccccctcgccccctcaggcctggcctcgccgtccccgcccccacctgaccctcttcccctctccgcgcgctccttcccgctcacctgcccccgcgcagcctcctgagtccccttccaactgctcccggatctcgacgccccgtgccgccctccaccgggccccagccgccagccctagccccggctccccggtgcccacgccgtccccccgcgctctccccggccggcactaacccccatggccgcgcttcagtctcaggctggctcgaaggcggcggccgagcccatccatggcccctggagtgcccggctcccgctcccagctccgcgctggccccgcccccctatccttgacctccgcgggtccgacactttcactttcacgcggggggaggcctaggggacaggttcggggcggcgcggcgcaccttccggactccggcccaacccccgggcgcacctgggcgggcccgctctgccctcgccctgggcagggcagcgtggggtggaagagggcgctcgacgcgcgtccgggactgggcggcgccacctcgttcccaccctccgtggggctcccggggaggcttgacttagcgaacaccctgcagtccgcaaaagcgcatgtcctggctgaaatcacc

SEQ ID NO: 344972 - DNA, 79 bp, Homo sapiens; identical to SEQ ID NO: 197752
  chr1:151694406-151694485
  hyper

SEQ ID NO: 344973 - DNA, 155 bp, Homo sapiens
  chr1:155043706-155043861
  hyper
acttaggcccgcccagccacaggcgctcaggcccagccggccttccctatacaactttcctcatagcatgcgcgggcggctgattcagtcccggggcgcgtccccatggaaagccagggctgagtccactcatggggccgagacgggctgcaggc

SEQ ID NO: 344974 - DNA, 103 bp, Homo sapiens
  chr1:158083079-158083182
  hyper
cgggcaaaggcaccgagctcttggtgtggttctcctgggataagcccacagtcacaaacttgtgcaggaatgggggtaccgggaagcagcccggtgttccaag

SEQ ID NO: 344975 - DNA, 935 bp, Homo sapiens
  chr1:160990384-160991319
  hyper
cggctgcgcagcggggttcgtggatgctgggtggccgttggaggggcaggctggcccttcccaggtgcgtgtggagcgcgcgctgggtagatgagtgtggaagggtccttggcccgacggccctctccagtgaggacgaggagtgtacctctggtgtgtgcagatgggtcagctccctcctggtggccgtgaggggtgcggtcacaactcaccagtgtgggggaggggagccagccactcacccagctgtgagagtggtgaaagagggaccagccaggggtggaaaagataattcgcagaacgatataggaaggtttctgagctcctcccctcccgcgggctaggggcgtggggagagccttcctccaacctctgacccgaccaaccgattcctcccgaaactctgggaacttacacaacaggatcgccaatatgaagaggcacaacagtttcctctcgacttgcgcctttgtccccatcgcgatcaggctcccgacacaacagccgccgaaggactcctgggaacagacacagctccgcgactacagcgaggggactgagagccagccgccaggtggaaccccgcccggccccgccctccgcgcctgattggccagctccccacccctgcacgttccgattggtgtaaggaaccgctgctcttcagaacgagtcacctcggccaggtgttaccccgccgccactccccgcctcggcgcactggcgcctttccccacaggagctgcctcagattggcccaggagactgtcgcgtcaggagacgaattccgcaccttcagcaggtgacggccccctgattggttggtgttcccgaagtagcgacttcctgactggctgggttctcagttggagctagagggctgagaagtacctctaaggaggaagtaggaaaggcagtcgtggtgtgggatttac

SEQ ID NO: 344976 - DNA, 64 bp, Homo sapiens
  chr1:161368929-161368993
  hyper
cggcaatcagcgcaaagcgagataatcaccagcgcactcttggatctgtatacaggtttgtaaa

SEQ ID NO: 344977 - DNA, 95 bp, Homo sapiens
  chr1:161369405-161369500
  hyper
gggatctcactgcgatctgggcgaattcttacgtagaattcgaaaggatatggggaaggaaaaaaacaaaaacgggaaccactttgtttccgccc

SEQ ID NO: 344978 - DNA, 293 bp, Homo sapiens
  chr1:161369566-161369859
  hyper
cggtggcaggttttccacaaatgactctgaaaagtcagaggctcaccactgtgtctctgacccacgagaaaagtacccgggcgggccacccacagcttcgggatcggggcgcgcagggaagtagccagcaaagcaggtaagtcccgggctgctcgcggcggggtcatgactgagggcacaggggtgaactccatggtgcttcctcaggaaacttccggcgcagtcagggctgcagccagagcccggagatagttgggcagggctccaggcgtccccgaatgctcgtcgtggag

SEQ ID NO: 344979 - DNA, 299 bp, Homo sapiens
  chr1:161369945-161370244
  hyper
acccccccggaaactggagaaaaacggagtagaagagacctaggggacagacttggccgggtcaagggaaaccagctcatatttggaacaaaatacgccttatgtttgcccagcactgaatttagaagcattttcacattctcgagtttaactagttttgcaacagtgccacgagcaaattattaaacgtgttttaaagatgaagagactgaagctaggtaaattggacttgggtaagatggaagcgctacttaacgttaaggagagtctgcgaccctgatgttctcaggctgtatctc

SEQ ID NO: 344980 - DNA, 805 bp, Homo sapiens; identical to SEQ ID NO: 331017
  chr1:165737832-165738637
  hyper

SEQ ID NO: 344981 - DNA, 263 bp, Homo sapiens; identical to SEQ ID NO: 331021
  chr1:168311912-168312175
  hyper

SEQ ID NO: 344982 - DNA, 249 bp, Homo sapiens
  chr1:182583799-182584048
  hyper
cgtctccaaaaaaaaaataaaataaaataaaaggaaagtgtttgaaaagtgcttaagtgctctgaaaagtctgagatgctgtgcaaatagtgcggcattatccttatttttgttattaaaatgagcgagacttgccctgaccagcgacgaattgactcactcagttttgggggagggggcggaggagtgggaggagcgggaggagaggggccacgcttgtcttctccgagggatgggaatttccaccca

SEQ ID NO: 344983 - DNA, 40 bp, Homo sapiens
  chr1:182584613-182584653
  hyper
cttgaagactgggcccttggctctgtgacccagcagaccc

SEQ ID NO: 344984 - DNA, 137 bp, Homo sapiens
  chr1:200271204-200271341
  hyper
cgcgtaccaaacaacgaagctcctgcccttgggagtttatacacaggctatgttaatatttgcaaagggccccgagtgtctaagcggctaatgaacgtcttgggtcggtttcctcaaaatccagcccattgtttccc

SEQ ID NO: 344985 - DNA, 528 bp, Homo sapiens
  chr1:200271373-200271901
  hyper
cgcactgtagcccgaatctttctgccaacaaccgctgaaactaccagaggttaaagcaattaacatgagatgcaacctcaccgtggcgcagctccgcgcgcccccggctgctgcgacccgggaggggggagccccggagcggctgcgcccggccccgcacccccggcagagcaggttagctccccctgggtggcaagcctttgcaaaacaaaaccgaaaatgagcgttcgctctcctgacagtcttgcctaaaagaacctcgtctatactgcaaaatcccattaggtacacaagtccggtcggcattgtcacttttagcgtgacttcaatttacacattcaaagaatacctgtccggagcatgggacctggtagaaaggttaggctctctccgaaggaagttcaactcaggatttccctcccccggtgctgcacacaccatcaacggcaaaacctcccctcccagttgcagatctagacttgctgagaaaggtgctggagatgtttccaaggtcatccccagcaccgc

SEQ ID NO: 344986 - DNA, 578 bp, Homo sapiens
  chr1:201449645-201450223
  hyper
cgttcagaggcagccccagctgcggggcggggcggggcggggcggggcggggcggggcgcggagctgttggcagctaagtggttgaggttgagcggccgggtggaggccggcacctactaggaggctgggctggtccgcaggttctcaagcccggctgagcccgggcaagcgtcagagaatcaccagagcagcttgtcgaatacagattcccaggccccacccaggccaaccgaatcagaatctctaggggtggggctgggaatccatttttaaaggcttccccaatgattctcagaataaaggttgggcttggaggcggggccggggctgggcgtggcacggaggcgaggcgcggggagggccggaccttccagttgttaatccctgtgttcctcactccgccacactcacctccactgatctaagtcgggggatcgttcctcgctgggtgcccccctcacttgatcttagccaaaaggtcgagaagcgattgggagcccctctcgaataatttctgtggcccttgattcagggatcactcccacacttaatagcagctctaacgccccccaacccc

SEQ ID NO: 344987 - DNA, 252 bp, Homo sapiens; identical to SEQ ID NO: 331077
  chr1:202936089-202936341
  hyper

SEQ ID NO: 344988 - DNA, 58 bp, Homo sapiens; identical to SEQ ID NO: 331079
  chr1:203242491-203242549
  hyper

SEQ ID NO: 344989 - DNA, 151 bp, Homo sapiens; identical to SEQ ID NO: 197959
  chr1:219347035-219347186
  hyper

SEQ ID NO: 344990 - DNA, 55 bp, Homo sapiens
  chr1:219347516-219347571
  hyper
ttctatcgggcggtcactggtccaccaccctcgctttggggccttgtgtcccgcc

SEQ ID NO: 344991 - DNA, 37 bp, Homo sapiens; identical to SEQ ID NO: 331122
  chr1:223936543-223936580
  hyper

SEQ ID NO: 344992 - DNA, 34 bp, Homo sapiens
  chr1:226924738-226924772
  hyper
cgttctgcaactcgcgctgcaagatccgcagctt

SEQ ID NO: 344993 - DNA, 452 bp, Homo sapiens
  chr1:226925659-226926111
  hyper
cgaggtccaagtccttggctcctaagtatgctgtgtgcggggcgcggctgactcagctctcccgggctgaggacaccccagccaccgtctccgggtctccccagcctgagcaaacattggctatccagggcaacccggcagccctcgccctgggcttcagggtctccctgctccaccctctcggggcatcagagaccgaccggctcggagggaacctaagcgggacctgccttgcccgagccgctgccagcgcccggatctgggagggcgcccgcgtgcccgccgtttaccttcctgaccctagccttggggctgtgtctctcggcctacgaaggcctgggcgggcagcggggccgcagccgaagcatttttcagggctagccttgtcgcctatccctagacaagtgttttgtgagtgtgggcgcaccgaggttctacacgttctctttacc

SEQ ID NO: 344994 - DNA, 728 bp, Homo sapiens
  chr1:226926137-226926865
  hyper
cgtcgtcccctatgggggggtgtctgtgagtgtgtgtgtatacacgcgtgtgtgtatacgccgcacgcgcgcggagcgagtccgctctcagcgcgccctgttgccgaggacgcgactgcccctgcgggctcccggacccgcgcccactcggaggaacttaggggcgtgcatggctgcagccgggcagcagccctaggtgcacagagcctctagctctgcaaacctcccaggagccggcgctctaacaccccagggcagcgccgcggagcgcagggcttctccgcatcccgggcagcctcgcccggcgccagcagagccgccccgagaccccagcctggggactcctggagcgcgctgagggaggcggcgcggagtgagcggcccggaaggcgggtaggagaaatgcggagacctcgtctctccctattttctccccaccgccactccatgtcaccctccaaaatcaaacccccttccctgcctccccagcccacccctttgccctgtttcggaaccaggaacgccgagattcgctccagagcagaaagtgagggaaaagagggttgttcagaggcgagagccattaaaaggccgccaaacttacctgcagtttctcagattctcaggtcctgtgtagactacatgcccagaggcgcaaacctcgtagggacgagatggctttaaaagtaaaaatgctcagaaattattttctcacaagctatggaaga

SEQ ID NO: 344995 - DNA, 49 bp, Homo sapiens
  chr1:226926951-226927000
  hyper
gcacgcccttttcgaccgtggagatactgcccctgtcagtgtctgctcc

SEQ ID NO: 344996 - DNA, 244 bp, Homo sapiens
  chr1:228870983-228871227
  hyper
cgggtgcgcggggtcccccggaacgtgtgttccaggtcctcccgcgccagtgttcgcagtccccgcctggtcgcggcggcgcctcgggcgcgggtgcaggcgcgcggcgcgcaggcggggggcgctgtggtcttggcgcggggaccgagccgctcggccagacccgcctcttttccctccccgccagcccgcccgcctgcccgccccccacgcgtcgtgtcgccgggaagccgggcggagacag

SEQ ID NO: 344997 - DNA, 269 bp, Homo sapiens; identical to SEQ ID NO: 198005
  chr1:228871596-228871865
  hyper

SEQ ID NO: 344998 - DNA, 291 bp, Homo sapiens
  chr2:7057762-7058053
  hyper
cgcgcgtcccctttgtgtccgcatcgcccgggccggccgcggagcggggagggcgggacgcggcgctgcgcggccggccttggggctcggggcttgcggccgcgcctgccccgctgggtcctgccccggcgcccggtggcagcgggcggggggcagcgtcccgggcggggactcgcgggctccgttcagaggacgcccgccctgccctgcccgtgtccctgacctcgtccctgctctgctcctgccctgccctgcctctcgcaggcggcgcccgcgccccagggcagtggg

SEQ ID NO: 344999 - DNA, 41 bp, Homo sapiens
  chr2:7058391-7058432
  hyper
gagttccctgcgggtcttacccaccccagcctccggccgcc

SEQ ID NO: 345000 - DNA, 178 bp, Homo sapiens
  chr2:10588876-10589054
  hyper
cgttcagtacctcgtgcccgagagcggaaaagggaaatcgcgagcggaggaccgatgtgctggccacgtgggccccgccgggccgactccggaccctgctgccgcccattcctccggtgcaagggacctggaagtgatcccggtgccgctctgctcccaccagctagggagcagaggc

SEQ ID NO: 345001 - DNA, 117 bp, Homo sapiens; identical to SEQ ID NO: 198078
  chr2:10589055-10589172
  hyper

SEQ ID NO: 345002 - DNA, 197 bp, Homo sapiens
  chr2:10589298-10589495
  hyper
agtaactaggtatctttaagggcggctccctggcgcgctctgagagttacggaagtcccaaaatgctttgaccgaaaacgtctaaacagtgaatacataaagcaaaaagccgcgtgggaaattcgagtccctaggagcgcccaggggacgcctctggaggtggactgccactcactccaggccacgctggaatgccc

SEQ ID NO: 345003 - DNA, 431 bp, Homo sapiens
  chr2:20425309-20425740
  hyper
cggggacccgggggcgatggggccttcaaccgacgggcaaacacacacagacacaccccggctgtcctccagctgcgatgcggctcgctgcgccccgccggcccagattctcccgtacgctcgcgttcttcctgcactccacaaagtgctggagacttggggccttagtttaaacagctgcacccgcacggaagggctgcaagaaaaagggggacgggggcggagttcgcagcgtttttctgtggaagacaacgccctctctcttcatctgagctaaaaggaaaaataagtaacttctttgttccccggtgacctcgggcacgcggatctgaggagcaccgtgcagttgctgctccttcgagatcccctgcgaggccctgggcctcagttcaaaaagctgtggaaggcctgcgggtgtaggggaaacggcc

SEQ ID NO: 345004 - DNA, 508 bp, Homo sapiens; identical to SEQ ID NO: 198113
  chr2:21022199-21022707
  hyper

SEQ ID NO: 345005 - DNA, 37 bp, Homo sapiens
  chr2:30453530-30453567
  hyper
cgttcggctaaagctctttgtttctgctgtcatgagc

SEQ ID NO: 345006 - DNA, 68 bp, Homo sapiens; identical to SEQ ID NO: 198154
  chr2:31361021-31361089
  hyper

SEQ ID NO: 345007 - DNA, 178 bp, Homo sapiens; identical to SEQ ID NO: 198155
  chr2:31361118-31361296
  hyper

SEQ ID NO: 345008 - DNA, 105 bp, Homo sapiens; identical to SEQ ID NO: 198157
  chr2:31457427-31457532
  hyper

SEQ ID NO: 345009 - DNA, 63 bp, Homo sapiens
  chr2:43019535-43019598
  hyper
cgcagatggaggagggggaggaggcgagggcagggggcggccatgggggtgctggactcacat

SEQ ID NO: 345010 - DNA, 395 bp, Homo sapiens
  chr2:43452443-43452838
  hyper
tgccgctctcctcgaagggccggcacagctcggtcttgtagcgcgtggagttgatctgggagccgccgccccccttctgctgctgctgcaggtgcaggaggtgctggctgcgatcgccgttctcgctaaacgagcggtcccggaatttgttctccttgttgagcagggctgtgccgccgccccccgacggctccttaagggtgccgtaggaggtcggaccgccggccgccgcgctgccgcagctgctgccgttagcggcgcccgggaacttgggcgagcagctgccggggctgggcgcggggtgggcgagtgcatgcaggttgctggccgagtgccgtcggaggaatcccggcgcgaagcccgagctgggggcggcggccacaggcgtccccacc

SEQ ID NO: 345011 - DNA, 462 bp, Homo sapiens
  chr2:47499350-47499812
  hyper
cgggttccgggcccacgtcctccagaccatgcccctcacccccggccaccaccctccccgactgaccacacctggaagggaaggaagggtgggggtggcctgcagagggtgtggcgagatctggacggcctgggggcgggggactaagttgaccggaaatggggctaggccgcggccagggacggcagcagatgatggttgaggagtggcctaggaaggcctccctgacggcgcccacacacgccccgcggcaccgcgaacacggctgacagggcagttgggcagcgaggtagtcgggaaagagcagggggagcccagcggctccgttgcgccctctgtcggccgccagcctccattgcacgcggcgccgcccacctgcgcactgggaccccggccctgggccgaccaggaaccccttgcgcccgcgccagctcgagccctgttgcacctgtcgtggtcacc

SEQ ID NO: 345012 - DNA, 448 bp, Homo sapiens; identical to SEQ ID NO: 198207
  chr2:54784958-54785406
  hyper

SEQ ID NO: 345013 - DNA, 322 bp, Homo sapiens
  chr2:54785407-54785729
  hyper
tggtatagcctgcatttctaatacaatgctgttatgctaatcaggtgacatcaccgcccagcacacggcgagtggctcctgataaaattacaaaccggcggccgccgcgggcagctgggaggaggtgtgcgcgctgcgcccgcgagctcccgggctcggcaaccgtggcatgcttaggattggccatatttaaaagttctgaagtagaacctgcgcctcctctctgcttctccctcctcctcagtaatttatttcgagcttccaggcaagggccacggaagaagggaaagcaagaaattagatgcctgtgtggtaactcctc

SEQ ID NO: 345014 - DNA, 127 bp, Homo sapiens
  chr2:72374248-72374375
  hyper
cgctgccgacggcgccgcaggaacacagttttaaatcggcaattcaagctgccaccagccccctcctctcccgactcaattttcggctcccagcgacacagccaaccccagaaagccgagggcgact

SEQ ID NO: 345015 - DNA, 259 bp, Homo sapiens
  chr2:72374932-72375191
  hyper
ccgacaccagatccaagccctcaaagagcatgttggcggccgctcgggggattggctgtgccggccgcggcgggggaggggagggcccgacgggaggggaccggagcggcgggggaggggaggctgcggccgggggtcctggcacctccagccgaaacagagaaggaggaaggggccaagggaaagggagtggaggctgcgaggggagcggagagagggaggaaaaaaattgcctaaaagaagagaggaaacacgaggc

SEQ ID NO: 345016 - DNA, 275 bp, Homo sapiens
  chr2:74425444-74425719
  hyper
cggccttcggtgacactagcggcgtcaggcaggagtttgacttcctcagcctatcatggcacgttgccgaggcttcagcgccttacaggacctcgctccaggctcttctggctccaatcaaaagcagggctctttcggacttcgcttacgtttaataaagaaaaccggttggccccttcggctccacctggctcaacagacagccagtggcatgcggcagggaccaatgggtggcggagggaggcggggcctgccacgaggccgcagtataaccg

SEQ ID NO: 345017 - DNA, 395 bp, Homo sapiens; identical to SEQ ID NO: 198298
  chr2:74425790-74426185
  hyper

SEQ ID NO: 345018 - DNA, 228 bp, Homo sapiens
  chr2:74426214-74426442
  hyper
gcgccggccgcctctggctgggatgctgagagtcgtctgggggagaacaggcgagggttccaaaagagcagccctcggcgagttgtccttgcggggaccctagcggcggagggcgctgctgcagctgatgaaatcgcggagccgacttgctcggggtccccgcgccgccctcctccctccgccggtgggagtggcccgcgctgcctccgctctgccaggaacatgaac

SEQ ID NO: 345019 - DNA, 412 bp, Homo sapiens
  chr2:74729488-74729900
  hyper
cggattgccggcccggacattccactgaattctgtgaatgtgtagcagggttggaggaccctcggaataacccccttggggaggtggacaaggacaatctcagcgaagagcttgctcccctcctccccacccttaggaaacgtccgtgaaccggagtgagagggcagtgggagttcagggagcaaagtccaggcggaggagcgtgaggcggggcttccgtccgtcccgcacacttctgggattgttttctctttcagaaagcgctactgcggagtgaaccggtccttatatcttagtttcgtgactttgggggcggcaggcctgtgagttgttttccgccctggacgctgttttgcaaagatctctgcgcgcccaccgccaccctcccgggcgtgcgggccgggaagcagcc

SEQ ID NO: 345020 - DNA, 238 bp, Homo sapiens; identical to SEQ ID NO: 198302
  chr2:74729933-74730171
  hyper

SEQ ID NO: 345021 - DNA, 79 bp, Homo sapiens
  chr2:74730644-74730723
  hyper
gcagggccttccagggagtcccagtcagactgctccccagctcccgcagctgctcggtccctgcaaagcccccgggagc

SEQ ID NO: 345022 - DNA, 235 bp, Homo sapiens
  chr2:74781700-74781935
  hyper
cggctaatccgggggtctccaccattccttctcgctcctctccctcaccccaccgcgacccccccagcggctgccggcgggggccggggaggggcggaaactcctccagggaacccggccccgcctcccgccccgcctcccgccgcagggccaggaagcgcggaaggaaccgccgggggccatggacggagcagtgatggaagggccgctttttttgcagagtcagcgctttggg

SEQ ID NO: 345023 - DNA, 122 bp, Homo sapiens; identical to SEQ ID NO: 198308
  chr2:74782349-74782471
  hyper

SEQ ID NO: 345024 - DNA, 1432 bp, Homo sapiens
  chr2:75060920-75062352
  hyper
cgccccacaccccgggtccgcgatcacgctccccccacccatagccgagcctgacgcggcggtggctcatgcgcctttccgtcccagcctttagccacggaccacacgtcccatctcaggcgccccgcccctcccccgccccccgcccccggcgcgcctccccaggctgccggctccggtgtctgagcggccgcgcccgcgagccgtgagcgatgattggctgcgccacggcggcgggcggtccgtgggcgcacacaccctccccgcgcagccaatgggcgtgcgcacgtcactgatccggaggcccgcgggccggcagcccctcaataagccacattgttgcatgaaactccggcgcaggagtcccgggctgccgctggcaacatcgtgtcacccagctaagaaaatccgcgggcccgagccacgcgcctgtgaatcggagaggtcccactgcccgagtggagccgggctgagattcttctcaagttgagcctcagtgatcctgtggccgaagttagcgccttgacgtgggacaaccggacacgtcgccaggagagaactgaggcgccttctagcagttgtgacgccaaaatcacgtctccggagacccgcgccctccgccagccgggcgcaccctcgccggtagccttctttgtgcgccgtccggactcccagctcccggcccggcagccgagccccagcacaaagcagtcggaccgcgccgcccgcctcccctctcgcgtctccgcctcggtttcccaactctgcgccgtcgggccgcggcaggatgattgcctcgcatctgcttgcctacttcttcacggagctcaaccatgaccaagtgcagaaggtaagtcagcgcgggcggggcggcaggctgggctctggcaaagtggtctggcctccatcagtctcttcctcgaccctgcggggacccgcttcctccctactccgggcctgggagcggaaaaagtttgggcagccgggacactcctgggcgccaggagccacgtccgctaagcacagccggcgagtgcgcgcgggcggggagccgaggtcgcgctccgccgggcgccctccctccctgagctccggcacgcgctcacgctctctcccccagtccctttttccctgttactggaggggcgggtcaccccgcaggtagtcagggattgctgcgcccacgtgggagggagcccccttctgcagcgcgagttccggcgagagcacgtggagagaatcgtggctgcgggaggctgctccgctgccgcgtggggccgccgggggccgtccgcgctcgcggaccgcgtgtaggagacgagcggttcccttctccttccccgcggccctgcgggggtgggctcgaggagaagctgacccgggaaggagtaggaaaggggcagaggaactccgcccgccgcgccccctcccc

SEQ ID NO: 345025 - DNA, 895 bp, Homo sapiens; identical to SEQ ID NO: 331365
  chr2:88315911-88316806
  hyper

SEQ ID NO: 345026 - DNA, 59 bp, Homo sapiens
  chr2:96991316-96991375
  hyper
ccctgggtcccgggagacatcccgaggtaggatgggcccttggcctcctacggataggc

SEQ ID NO: 345027 - DNA, 212 bp, Homo sapiens
  chr2:98703022-98703234
  hyper
cgcccacgtccagtggctgagctacaacgaactgccccacctcttttaaagcgtctttctctgaactgtgcaaggaagagagcatcgcctgacagtggtgaggtgaaaattaaaactacacaggggtcaatgctctgctgaaaagtatgaaaagaagttcgtttgtagcgtttcccgcagtctcctcgcctctcctcggcctctggcgcctt

SEQ ID NO: 345028 - DNA, 200 bp, Homo sapiens; identical to SEQ ID NO: 198335
  chr2:98703475-98703675
  hyper

SEQ ID NO: 345029 - DNA, 77 bp, Homo sapiens
  chr2:98703736-98703813
  hyper
gcccgccctctcgggtcaggcgggcccgggaggatgggagggtggctgctgagcgggagccgccacgtcttccaccc

SEQ ID NO: 345030 - DNA, 146 bp, Homo sapiens
  chr2:101033445-101033591
  hyper
cgcaccgaagctgcacatgctccttcttccctgccttcctctgcatgctccttggacccaagctgaaccctttcttcctctctccatctacaattacaaacgcaaattctcagccaaggatgaaagaagtaaattgtaggctcgca

SEQ ID NO: 345031 - DNA, 144 bp, Homo sapiens
  chr2:105471069-105471213
  hyper
aggactcttgtttcagaggcaaccaagagctccggcaatagcaacttcagagaaatgcaccatcgcaagaagttttcctaggacagaacaaaacttgaaacgagaggaccagagggggagagcaggagccagcctcccctctcc

SEQ ID NO: 345032 - DNA, 337 bp, Homo sapiens; identical to SEQ ID NO: 198369
  chr2:105489278-105489615
  hyper

SEQ ID NO: 345033 - DNA, 112 bp, Homo sapiens
  chr2:105490035-105490147
  hyper
cgggccaggagcactttcacaagtggttagaaagtcttgggcgccatctaacgggagcagcaaaaagttgacgctgggtggaggttaggcccgacaggagcccaggatgggc

SEQ ID NO: 345034 - DNA, 264 bp, Homo sapiens
  chr2:111874622-111874886
  hyper
cgccgtctcactgtactgaatttcaagaatcatggcctactgccagccaggtcaggaccgaaggcgctagtctggggagactggagcaggtctctagtggttcacctgttcggaggctcttcctgttcagttccctctgcgcgccagagggtggcaccccaggcactccagaggtggagaggaggggacgacaggggaggcaaagagagaggagcggagggaaggaccagggaggaaggaccaaggagggagctttaataaatt

SEQ ID NO: 345035 - DNA, 204 bp, Homo sapiens; identical to SEQ ID NO: 198386
  chr2:111874987-111875191
  hyper

SEQ ID NO: 345036 - DNA, 138 bp, Homo sapiens
  chr2:111875611-111875749
  hyper
ccctttccctgaaacccagcctggcctgactgcaacctctcccaacttcagtgccggatcccctagacaatcagggtgggctccccgctgcgagcgcgccccacagccgggtgccgccaaaggtctcctgctgttagc

SEQ ID NO: 345037 - DNA, 554 bp, Homo sapiens
  chr2:113341898-113342452
  hyper
cattctctttggacccgaggcaccaccatactttccattgcttacttccgttaaaccccgagcgctgccatggcaagccggaaatagggatgaagcaatttagccagaagagggcggaagtggctactcagggcgccgccatgacgagccgggccggaagaagaggtagggcgccgccgtgacagattagtcctaaagggaacggggttgttagttcaattggctaccggaaaaaaccaggctgggctgggcgccgccatgacaaccgataccggaaaaggcgggtcgttccccccggacagccctacgccggcaaaggtctcgagatgtgagtagtgagagcgcctaccccatacgtgctgccgctccccttcttttacccagtgatctagacctagtctaggacctcgggaactaggaccagcctccctccttcttggagatctgaccctcaggattcagcgccttcgctcacgagctccaaccctccgcatgcccaagccccgccctctaagcgtttaggcctcgccccctctcgcgctgcttaggacttc

SEQ ID NO: 345038 - DNA, 48 bp, Homo sapiens
  chr2:127782995-127783043
  hyper
cgaactccacgacatgggaggcaggggcgggccttttgcaggggaagg

SEQ ID NO: 345039 - DNA, 128 bp, Homo sapiens
  chr2:136873862-136873990
  hyper
cggcgtggggggtggggtgggtgctgctaggaggggcagtgattaactttttgtaagaagtttttcgcccagggagggaagaggggagaagggaggatcacggggggagggcgggggcgttgcaaaga

SEQ ID NO: 345040 - DNA, 792 bp, Homo sapiens
  chr2:136874020-136874812
  hyper
ttcccacgcctgcctaaatacaaaccattctgggcttcaagcaacttgtagtgggtaaagagaatgcggtcttaaaacgaaggcccttcggtgcttggggtatattgggcgggagtgtcagaaaatgaacaaacggcacctcctcccccaagcgggcgctcctccggtgtgtgggtctcttgccatcctcgtgtttatcacttggcgcgtttgggacgttagggagcggggcattttcctgggtggagaaggtaacggggtctgcacccgtggtcctcgccccaagtttcatttcctcactctcccgggtggcttcccattaccccgccactgatccagttaacccggccggaggtgggcagctggaagcctccaggcggtgggcacgcggggggccgggtcgtccagccccgggccgccgcggctgcccactacacccacgccaaccgcccgcaagcagcgctgcaggggctccgctgggcgacacgccaggctctgtcccacagggtgctggggagcgactgggcggctccgccgcgagcgtctttgaattgcgcgccgctgcaggaaaccaaaaactccctagcaagagggtttcaaaaggtttctggaaaccaccgacggttaaacatcacaactggactcggagagagccaaacggtttccccacttgcacctgccagtcttcgcggcggcgacctggcagcccaggtgcggtcttaaccgcccccgcccctcaccccgtacccgctcctatccccggagcgcaaatctcagggctggcagctgcgc

SEQ ID NO: 345041 - DNA, 93 bp, Homo sapiens
  chr2:136874839-136874932
  hyper
cgctgacctctgcacgaccccaaactctcgaactgcaggacccactcgcggccgtggggaagaggcgcgcttcggacggcgggaaggttttcc

SEQ ID NO: 345042 - DNA, 482 bp, Homo sapiens; identical to SEQ ID NO: 198449
  chr2:136875399-136875881
  hyper

SEQ ID NO: 345043 - DNA, 217 bp, Homo sapiens; identical to SEQ ID NO: 198450
  chr2:136876145-136876362
  hyper

SEQ ID NO: 345044 - DNA, 50 bp, Homo sapiens
  chr2:149632592-149632642
  hyper
cggttccggcttgggcagccagaccggacttgcaggctcttggaggtcgc

SEQ ID NO: 345045 - DNA, 238 bp, Homo sapiens
  chr2:149634146-149634384
  hyper
cccctccctctctatctcccttccccaccttttctcccccaccccctccccctacttagctccctctctgcagctggggctgctggtagggggagggaacaccaatggattgtagttcttaaaggaatctgtcagatgaaacaaaccagctcggtcccccgccccttccccgcccgctgtccgtagcgtgtgtggctgatggtgccccctttgtatgcgagccgcgtggggagggacc

SEQ ID NO: 345046 - DNA, 904 bp, Homo sapiens
  chr2:159313976-159314880
  hyper
cggcgattcctctccccggtctcccgtacgcgcagcgcacgacctctgcccacgctgggctgttcggattcagagctcccagccccgaacttgagcgccgcgctgagccctgctggacgccctcgcggcggcttccccgctgcctgccgccgcgcgccccaagtcgccctcgacaccactgggcgcccgccctcctcagcactcggggccggctgtctgtccttctagccccagatcctgcaccttggtcccctccccgtcttcccacgcccctgctgcccgcgcggtcttgcgtttgtccccgaagtcctgtactccttgccggtcctgcccacccctctgcctagtgcgcccctctctaccggccgcggatcctcacgctccacccctcccggctccccagcgccgagcctcgccgctgccctcctgcgccgccgcttcctcctctccctgccaggagttgaagcggagctgcggcacctccctggcggatctggtatccccgcccgctgccgaggctgccggccctctcccctggaccgctacccggagagcgagcggcggggccgggatttggctgcgtgttggctgagtgcgacacaccgcgagcgcgggcagtggaggtgccgcggcggccgtggccgctcggggcgcagcggtagtcaggtgtgtgtgtacagcgggggacgcgcgctgccggctcctgggctggcgacagattgtgcaggaatgcgaggaatgcaccaggggcagagtccacacagcccgccgcggctgccctagcgccttccctccccagctctcgccgcgcagccagaggtcaccggagcatcttcggagctggtgagcctcattccactcctctcctcccatagcttccctccatgcggcagaggggaagcgc

SEQ ID NO: 345047 - DNA, 137 bp, Homo sapiens
  chr2:166649931-166650068
  hyper
cgaaacagagagagaggggtgtccgcgtcccggccacagagccctttccaaaccactcggaaaccatttaaatggctcggcggccgcggtttgcagcctagaactgtttggggtccccggctaggaaagttgcctgg

SEQ ID NO: 345048 - DNA, 37 bp, Homo sapiens; identical to SEQ ID NO: 198509
  chr2:166650106-166650143
  hyper

SEQ ID NO: 345049 - DNA, 723 bp, Homo sapiens
  chr2:166650508-166651231
  hyper
cctgccgccggcttacctggcgggtgggcagggcagggtggcgggaagcggcggccgggcaggcgctggacgtgggctaggcgccaggtgcaggtggcggcggctgcgactccggttgctgtcgccacagttgcggctcagtagagctcctcctccgccgccgcctcctgccttcccgctgggcctcccgcgttgcctggagaggcagaaccgaggctcggcttccacttggagtctcccaggtgagctccagcctgcgacgtcggcaggggcgaggccccacttccgcgcctgcgcgccagcctcccgccccgccccagccctacctgagcgctccaggtgagaaccttggatcgcgcgcgcagggtgggggcgccgtccgggccaagcctggctgtcgcgcggcttctctctgagtggtcggcgaggctgctgctccgcgcaagttgtggctcccggcccatctacattggaggaatcctgcactgacctggtggcagtgatcaccttgtagccagaacacagtctgctgggtccttggggaaccagaagttctagatttcccccacacggttcctcccttcctcctcggttcgccaaaatgaaggggtgcgctgcctccgaggaccacttcgggagggcagcaactgctggctcatgtggtttcttcgggcagggttcagcagcttctgtcaccagttaggtttcgtgagcttccttccc

SEQ ID NO: 345050 - DNA, 85 bp, Homo sapiens
  chr2:173099596-173099681
  hyper
cgggggacactggggggagcagcggcgggcatctggaggcatcgggggacagcgggggacattgaggggcagtgagggcggccga

SEQ ID NO: 345051 - DNA, 1041 bp, Homo sapiens
  chr2:174219326-174220367
  hyper
cgcgccactcgctcaggaccgcgcagctgcacaaggagagtggtccccgtagcccctaaagcccccctttctcaaaggggattttaggagtgcccaaggctatcctttgaggtcagaatatataggggggtcgtgttttttccagggggccacctagtcttgcgccatgtctggccgttaccacagcttgcaggacctgtgtcccaacgcgggaaagacagcccgagccccgcccctccgggcccgggtcggcgcgcccagcctgccagccgcgctgctgctgctcctcctgctgtgggaccgctgaccgcgcggctgctccgctctccccgctccaagcgccgatctgggcacccgccaccagcatggacgctcgccgcgtgccggtgagggctgggcgggcgaacccgaggggcgggcgcggtgggtgctggacgcaggcgggcgcgggccgaccctctccaactccgcagcctagcgctgccttaactggtggcctgcctaggcgttgcccgcttgggcaagcccctgattttgtgcacctgggataactgagggccatggggacgttcctgcgtggcgtgcgcacccgaagtgcgggcggcgtggagacttgagtcgtttgcaggatggctagcagcgctggaaagccctaggcacgtgcgtccgccaaaggccggacagcggccgggagcgctggccggtcccgattttgcctgccaggcagagccagcctgcctgccccctgggaggttgtcccgcagcggcccagccctttcccgcacacaactcggagccagtgcgtggctcgccgcgtctatacccgcgctcagtgggtggcccttgggcgcgcaccccgcccggcaagagacgcgtccgcttctaaccgctgagggccagcgcgtctgaggtttaaggtcttgcgaaccggtctcctagaacttgggctgcgcacgcagtgtgaagcgaccgtagtcccgggcggtggttaagtgcatttaaagggcttggtgggtcaaagcgttcgccgaccatttgctc

SEQ ID NO: 345052 - DNA, 75 bp, Homo sapiens
  chr2:175546713-175546788
  hyper
cgactgggtcagctgctttcccttacactcacaacgctaacagttctttctttaaaaagaaaagtatgtatagta

SEQ ID NO: 345053 - DNA, 34 bp, Homo sapiens
  chr2:182323095-182323129
  hyper
accccaccatagggcaagtcctggaaagattcac

SEQ ID NO: 345054 - DNA, 71 bp, Homo sapiens
  chr2:182818959-182819030
  hyper
cgcgccccactacccgctaaccgcctcccgccacacacacacacacacacacacacacacacaccccgcgc

SEQ ID NO: 345055 - DNA, 90 bp, Homo sapiens
  chr2:183902312-183902402
  hyper
cgtaagaatatggaacactcaagttttcctacccacctagaatttcgcccacccaccaccctccctttcctatgggccccatcatggggg

SEQ ID NO: 345056 - DNA, 568 bp, Homo sapiens; identical to SEQ ID NO: 198600
  chr2:183902442-183903010
  hyper

SEQ ID NO: 345057 - DNA, 176 bp, Homo sapiens
  chr2:183903037-183903213
  hyper
cgccccggcagcctcctgccttccgcccgccgcccttccgcccccacccccggcgctctccgccccagcccccaacgagccgccttccccggctgctccactaggtgtggcggcggcggcggcggcggcggcgtctccggcggctgagaacgaggccgcttcccgcagccccggac

SEQ ID NO: 345058 - DNA, 86 bp, Homo sapiens
  chr2:191044988-191045074
  hyper
cgcagaacccttagctgggaaggccgcggccaggctgcggggccccctgcaggcgggctcagtgccccggcccagcacctgttgtc

SEQ ID NO: 345059 - DNA, 513 bp, Homo sapiens
  chr2:191045505-191046018
  hyper
cgaggagcgcgcggcgggcgcggcggcgacggcaggaggaggggccgggagcccgggcgccgccgaaggacgccccgtcctccacatgctgccacttggctgagccgggcgccggcgagaaggcggcgccgctgccctggcagctggactgcactttgcccccgcccggcctcagctgccgcccgcccagacgccagcaagcccccctcccacgacagggctgctccgggagcttcggagacccgccccgggcctgagcgcaggctgcctccgggaccccacggctgtccggacgtgccatgggcgcgcagctgccgggcaacgtgttgtgtaagtgaacatctgggaggtgggtgactggtgaagggcgggtgtctgtcggtctttgcttgtcagctgtgccttttagatttttcaatggcagaaacccatgagttacaggaggctttaattaaacgagaccgttctcagccagctgccgtggatagagcctcacatctccgtcccctaatc

SEQ ID NO: 345060 - DNA, 447 bp, Homo sapiens
  chr2:192109730-192110177
  hyper
cggaatgtgaccccaggctggcttcgagttgtcaaatgttgtatttctcattttatgtcagtgagtctggaagcaaaaaaggtagaaagactgccttccgtgggggccgcgacgatcgcccctccttccctcaagcctcgtcccatccaggctcgccccgggtgcggagggtcgggccgcaaacccgcaaggcgcggaggccgccgcgacgctcaccggggggcgctgtgaagccggcaccgggcggacagaggtgagtcggctcggaggcggtggctcccgttcctgcccgcgcgccgaggggcgaatcccaggcagcgaggtcgccgcccccgcccctcggccggcccctccgccagcgggcgagaggggagtggccgggctcctcccgccgccgctgagcactccgcagctgggtgcgcacgggagcctcaaccgcggcgcgtg

SEQ ID NO: 345061 - DNA, 253 bp, Homo sapiens; identical to SEQ ID NO: 198625
  chr2:192110303-192110556
  hyper

SEQ ID NO: 345062 - DNA, 439 bp, Homo sapiens
  chr2:192110584-192111023
  hyper
cgggagggaagaagggcttgtaaactaagttgctcttactttgccccatgcctctcgtacctgtgggcagagtcgaatctcggctgtcctcgtgttcacccacagcccctccattcctctggcccacagctgtttcctggccccctggaaagacacggtgtggcttcctccgggcaggaaagcggagggagaacaatggggcgtcctggggagtggggttcaggtgcggtgtgccccggcggcggcgggggaggaggggcccgggacgctgtgggcctccctgcgcgtgcagctgcgctcgcctcctttgttccgccgcagcggagggggttgccctgggtctcgtttcctgcccgggatgggattgattcacggtcccagagagggaaggggaagggggcggggctggaatggaaaccagattagagacgggagctac

SEQ ID NO: 345063 - DNA, 426 bp, Homo sapiens; identical to SEQ ID NO: 331594
  chr2:216946200-216946626
  hyper

SEQ ID NO: 345064 - DNA, 369 bp, Homo sapiens
  chr2:219922768-219923137
  hyper
cgcccggtccctctgtgcctccaaggcaggagggccagccagcggccgggagggaggagtggcagcagagccgactgcctgcggccggcctgcgaggcgtgcaaggcccgaggtgcccagtaggtgtcaccgcagcctcagggctgaggcctggggacgacaggctctggaggcgcggcaggtgcagagcgtctcggtagcttcagggggtgtgttggaggggaatcgccggcctgcctggatccctcgagcaccaccgaggattcccgccgggaccctcttataatcttaaaccggcccacaaccccgccagagatgacagggccagggaaccagaaaccggcggattagcgccagggccgcccaatg

SEQ ID NO: 345065 - DNA, 406 bp, Homo sapiens; identical to SEQ ID NO: 198725
  chr2:222436961-222437367
  hyper

SEQ ID NO: 345066 - DNA, 415 bp, Homo sapiens
  chr2:222437421-222437836
  hyper
ataaaagaagtctaagctgacctgcggttgcttctttaggagagtcgacgtgtctgcgtccagcgcgcccgggctgagctgcagactcgcgcctgccaccgccaccctctgccaccttgccctgttttgtctttatggcgcttccccctctgaaatactctttgcggggagttttgtggctctatcactcgcttcttccctggctccccagatgcctggagagcggggacctacttggtccccaacgtccagtccgcagcagggctccgtcactgtctccagagactgaacgaatgactttctagcagtaaggaagtccccgctggccccgtccccctgcacacgccgtggacctcgcccagggcccaggacgccccgagatggccttgggcagggaaccagttgtggatttccc

SEQ ID NO: 345067 - DNA, 163 bp, Homo sapiens; identical to SEQ ID NO: 331637
  chr2:224702626-224702789
  hyper

SEQ ID NO: 345068 - DNA, 236 bp, Homo sapiens; identical to SEQ ID NO: 198740
  chr2:225906168-225906404
  hyper

SEQ ID NO: 345069 - DNA, 352 bp, Homo sapiens
  chr2:230932495-230932847
  hyper
cgaaatggccgtccccggtctctcaccccatttcagcctctcttgaggagcctcaatcggaagcgctaagggggcccagcctctgcgcgccctgggtgcgggatcgtgcccgcggggtccggcctcgcgccccacccttcgagcgcccgcccccacccgcgctcggtgctcccgctcccttggcaccccgagaccacatccccacttcgggcaccccgcatccctcggcgcgttcggaagccagcagcccaccggggaagctgggccggctgcagcaccacagcctgtgcagagaggcatccgcaccccgcgaagtccctaggcgcagccccgggtcccccgctctgcgcct

SEQ ID NO: 345070 - DNA, 146 bp, Homo sapiens; identical to SEQ ID NO: 280732
  chr2:230933064-230933210
  hyper

SEQ ID NO: 345071 - DNA, 297 bp, Homo sapiens; identical to SEQ ID NO: 198767
  chr2:236402404-236402701
  hyper

SEQ ID NO: 345072 - DNA, 138 bp, Homo sapiens; identical to SEQ ID NO: 198768
  chr2:236403013-236403151
  hyper

SEQ ID NO: 345073 - DNA, 374 bp, Homo sapiens
  chr2:237087637-237088011
  hyper
cgagcaatctcctggctttaaattccgaataaaagtctcaaatattcccgggtcatgggggcactgtctcattaaaaccactctcgtcctgaaactgcaatgcagacattaaagtgcagtatttttcaattagagctgacgaattcaatcaaaattccatagattaggatgaaatgaggcatgggtcatttacaggggaatttaattgccgagccattagacaaatagtatatttgccattcccgcgttatccatcattttcgacatcaataccggggccgcatctccccgtcccgcggccgcccggcgtcggctgtaaacactcccttccctgtatcttctgattatatctgatttcatttagggccatgggg

SEQ ID NO: 345074 - DNA, 223 bp, Homo sapiens
  chr2:237088239-237088462
  hyper
gaacccctcttgctgccagcgggtctggggagggtggggctgggctccgcaggctgtcggaaccccctcccacgccgcgcagccgcggggcgctcgtgtccctgaagcctgagctgggcgtggaggacaggccccgcgtgttcgcggatcgcgagtgggggccagccccgcacctcccgtcccggccgggcgctgcgggtagggggagcggagcggagggggc

SEQ ID NO: 345075 - DNA, 205 bp, Homo sapiens; identical to SEQ ID NO: 198794
  chr2:241771771-241771976
  hyper

SEQ ID NO: 345076 - DNA, 231 bp, Homo sapiens
  chr3:5018754-5018985
  hyper
cgtggttttgacgcagccgtgacagcccttcatccttattaaaatcacacaatgaagcaggtcgcccaagattgaaagcgcgtttccagggcggaccccggtccccgcctttggccagcaaaagtacattctggcagggagggatctctgagccccgaagtgaggtcatgccagttagcagttagaaaaggaggcatttctcacacttgctaaagagtttgacgcttgtga

SEQ ID NO: 345077 - DNA, 143 bp, Homo sapiens
  chr3:5019132-5019275
  hyper
tcgcccagtctcggcagtgaccccatttttttttcaatccttcccacagccaggtcactcagcagtggggtgactgacccgaagcgcagtgggaagggcttacagtcatctctcaactccccgaacttgcagggcaggggagc

SEQ ID NO: 345078 - DNA, 205 bp, Homo sapiens
  chr3:5137574-5137779
  hyper
cgttttatttggacgctctgaatccgttttcccctagcacatcggcagagcagaccgcctgcctcggccttgtcaacgccaagggtgttttggacggatgtgtctatcctgaaagcttccagcctggctttgaacttgacttggcaacggatgaaaacctcggcgagcatccccagacaaccccgctgcgcgtcagagcgctgct

SEQ ID NO: 345079 - DNA, 412 bp, Homo sapiens
  chr3:10206343-10206755
  hyper
cgcatgatgcatggtgtagtgccgatggaagtggggtcagaaggcctcctgccgctgcggcagaattcccgtgtggccttctcccaccagggcctcagtttcccctcgcagttccgattctctggccggcgctggggtggagccggcggggccgtcgtgccgcccgtggccgctggggacgctggtgccctcccgccccgcccacttccccgccggtccgcccctggctagagaagccgcagcccgcagtgtccgacccagtcgtcccgcgccggagccggccccgtagcgtgccatggcctgctacatctaccagctgccctcctgggtgctggacgacctgtgccgcaacatggacgcgctcagcgagtgggactggatggagttcggtgagtgcggcccggggagggga

SEQ ID NO: 345080 - DNA, 369 bp, Homo sapiens
  chr3:16553609-16553978
  hyper
cgtaacccctctctggggtttggtgacatctggggtcacttgaacttcgttgggattcagctgttcagagatacaaattaggaatcccggcagcagagaggccctacccacaggcccagaggtcgctcacattacacccggcttccttcctggcaaggccttaacttatcctgagatgacacacgatggcaggggttggaagatgcctagtctagttgagcgcccagctcctgaaacagctgtaccgactacaagggttccagcacatgagttgctggaaactggggtgaccactgacagagattgagccagactttttttttaaaaaagtacttcttgtttgtttgttttaagcccccgaagaaactc

SEQ ID NO: 345081 - DNA, 78 bp, Homo sapiens
  chr3:16555426-16555504
  hyper
cagaacccaggggtcaggggctcatcgatcctccctcccagcccctcctaatcaaggttgtgtgctgtcaggaagagc

SEQ ID NO: 345082 - DNA, 221 bp, Homo sapiens; identical to SEQ ID NO: 198852
  chr3:25469458-25469679
  hyper

SEQ ID NO: 345083 - DNA, 130 bp, Homo sapiens
  chr3:25469874-25470004
  hyper
tccgagcagggtttgtctgggcaccgtcggggtaggatccggaacgcattcggaaggctttttgcaagcatttacttggaaggagaacttgggatctttctgggaaccccccgccccggctggattggcc

SEQ ID NO: 345084 - DNA, 558 bp, Homo sapiens
  chr3:32433054-32433612
  hyper
cgcagccgcacccacacaaaatcccaggaggctcagtaccagctgtggtccgggccttgcccacctcggagaggccacgacccaaggcatccggtttcctctcgctccagtctaacttccgcgcatctacgagggccgggactgccgctacctttctggaaggcgccggccggccagtcaccggagggatcccgccagaggcggctccgcgtctccagcagcggggcagggacccgggcgccccgccctcgccagcgcccgcccccgcccgcccccggcccgccctctgtatctggcccctgggcagctgcccggggaggcggccagcgagctggggccgcgcaatgtcgcacggagccgggctcgtccgcaccacgtgcagcagcggcagcgcgctcggacccggggccggcgcggcccagcccagcgcgagccccttggaggggctgctggacctcagctacccccgcacccacgcggccctgctgaaagtggcgcaaatggtaagtgagcgcggggcgcgaggccgaggttctacagggcgtcccgggaaagcag

SEQ ID NO: 345085 - DNA, 200 bp, Homo sapiens; identical to SEQ ID NO: 198867
  chr3:32433665-32433865
  hyper

SEQ ID NO: 345086 - DNA, 81 bp, Homo sapiens
  chr3:32434068-32434149
  hyper
gagggtcttgtgttccatagtggggaaaaagaactgggaccgttgagacggccgtcctggtcccctgcgccctcaagttcc

SEQ ID NO: 345087 - DNA, 1420 bp, Homo sapiens; identical to SEQ ID NO: 331732
  chr3:37033979-37035399
  hyper

SEQ ID NO: 345088 - DNA, 243 bp, Homo sapiens
  chr3:43147038-43147281
  hyper
cgttgcccaggtccccggcccccggcccccgacccccaatccccggcccccgaccctgagggtccacccccgccccgcccacctcccgcgcctccctcagctcgcttcacacgtcacccctcagttctgcaaactctcctggatcccgaaggcgtcctagaacctccccctcaccccggggcccagcaccgcgtcgtcccctccagggggccgagggttcgacacctccacttcaagtcccag

SEQ ID NO: 345089 - DNA, 105 bp, Homo sapiens
  chr3:43147607-43147712
  hyper
cggccacaaccttggctcgcggaatcctgggaggtgtagttttgcgtacgaggacagcccgcgccgccaccagcctgcggaatgttgggagtgataatttgcgcc

SEQ ID NO: 345090 - DNA, 426 bp, Homo sapiens; identical to SEQ ID NO: 198906
  chr3:44038922-44039348
  hyper

SEQ ID NO: 345091 - DNA, 41 bp, Homo sapiens
  chr3:44063232-44063273
  hyper
cgtaatgccacttgcaggttacagctttcaaagcaaagcca

SEQ ID NO: 345092 - DNA, 1570 bp, Homo sapiens; identical to SEQ ID NO: 331800
  chr3:66550318-66551888
  hyper

SEQ ID NO: 345093 - DNA, 827 bp, Homo sapiens
  chr3:71113993-71114820
  hyper
cgccaggcgcgcggagccgggctcggggcgcccgcgcgggccgggcgtggggtccggcggcctcggcgtgcaggcggactgcacgcgcgcaggggcgctccggctcgcgggctgacaagacgcgccgcgccgcgcccacccgccccgccctgctccaccaatcacaacccgcctctaaacaccccgcgccgcgccgcgccgcgccgcgccccacacaatgggctccgcggcccgcgccccgcgcccgcgcgccccggccccctccgcgcggcaggtgaaatcacgctcgggtgccaccctgcttttgtctggagagcaactccacttaatagctgttaacccggtgacccgcctccggctgacgtctgggtcggccgggctcggcgcgcaccgctccctctggccggggctctgcggggccggggctgccggcggggcggcgtgtttgtttcgtctttgagactgacaaagagttgtcctaacctttccgagaaacccgggaggccgaagaggggcacccggcgctcgcggcgccaagccgactgctccgagcaactgttcggcttcgggagggtacgcaggtctcctaggcagcgcagaaaagcgcttttcctcgaaaacctccctgggaggagaactttcgcttcacgtcgggggtttcacagagccttggcctccccacacccctttctttcccagagtcggtctcgccaaagtgtgccagtgcgcaccgaggaaaactaagccgacgcggggtggaaataaataacaaccaaacgtgcctcgtcgctgaaccaggcgacttcccctctagaacgacagctgcc

SEQ ID NO: 345094 - DNA, 913 bp, Homo sapiens
  chr3:71630573-71631486
  hyper
cgctcccggtgccttatcgctaggctcgcgccaccccggctggctctttggggacggagaacccctagtgccgcctggggctctccggtgtccctggaccccgcgcccgcggccgcctcgacttacccgcggagtccggggagggagtaggagcgccgccttcacgcccgcggaggaggcgccggcagcaccatggtccccggcgccgctgccgctgcccccggcccgctcgctcgctcgccgcgcgctctcttcctcttacaaactttcgggttctgcagtcgacaagaaaccggggcgaccctcagcaagtcttccccgtgcaggctggggggaactgaaggggacgggacgggtgagtaggccgaggggccaggacagagagggcagcgggctccgaggacccgcgagtgcgcgtggagggaagagaggatgcggctcagggaatccctgcaaggatccagagaccgggaaatcggcccgagccaaagtctcagcaccttccccaggatctcacaaagttgcaacaacaaaaaggaggggggaggaatagggagaagggggtgggatggggatacgatcacgggcgcaaggtttggagttacaactgtttatttagtccttattctcacagggggcgggagctgcgcgggaatggggggctgcaggcagcgatttcgaagcaaacacatgggaggggggcatgcgactttgtttccgggagcggagctccccagagcccgtgtgtgtcactgccagtctcccgggaccaaggcggagctcacaacaggtggggaggggggctcgtcgagggccaaaaagaagaaggaatctaagtttccgagcgcgacgttgtctgaaaaggagggaggcgggaggcgggggcgagggaaggcggaggcagcaaatgacc

SEQ ID NO: 345095 - DNA, 280 bp, Homo sapiens
  chr3:98619774-98620054
  hyper
cgcgccaacttgggggacagacgggcaagaccttgcctttgcaactcaaccccgtgagtacccagccaggtccggccacgcacgaaagcgcaccgcgcctccctgcagcgtctgcagatttgttcaggggccaagagacccgcagccccgacggaggttcccccgccgctcactcccctgggaccactcaccttgctgggctccagcgtcctcgagcagcaggagcaggacaagtaagagcaggaggaacagaggcatggagaaggaggaggagttggag

SEQ ID NO: 345096 - DNA, 58 bp, Homo sapiens
  chr3:98621126-98621184
  hyper
gatgcagtgttcagtttttaatatatgtgttccctgttttctctgctctttttatggc

SEQ ID NO: 345097 - DNA, 832 bp, Homo sapiens
  chr3:113251180-113252012
  hyper
cgtgatgacgtgagactctccatggagagtaggaggtaataaagaaataaaacaggtgtctgaggagaggttctattagagaggggagaatagagagtaattatcgttcagacaggcaagagttctctgcaggtagcagcctgggaaagcgaactcgcgcaccctcttgggggacgggctcttttgctttctatttcttctcctgcagccagggtgcacacgtatttgaaacagaccgaatttcctcctcgatgtggcgtcaggttgacttttcgagactagcgggtatttctttttaatgactccaatgcctttttattattgctgttattgaggttgagggagaagagatcggtctaaattctggctgggtaagtggggggattctcggcgatgagaaacgggggacttagaagccggaggaaaatcagcagccccacatctccacttctccagtccgccctactctccacccgtgacctccagtggagaccccaggcggcagcatcagtatttgatcggcccttcgtcagcacgctgccagccctggccggctgggttcgccaggcatcacccgctcggctctgaagcggacgcctggccctgcaccgggctttggaaggaccctctctgcgctcgccccctccccagggtggctccgctttcgagcccgggcgcggtgcccaccatgcgcggctgcctgcggctcgcgctgctctgcgcgctgccctggctcctgctggcggcgtcgcccgggcacccggcgaaatcccccaggcagcccccggcaccgcgccgcgaccccttcgacgctgccaggggcgccgatttc

SEQ ID NO: 345098 - DNA, 48 bp, Homo sapiens
  chr3:115231437-115231485
  hyper
cgcagctcctctggaccgagccacacctctgcctgggaatcctgggct

SEQ ID NO: 345099 - DNA, 438 bp, Homo sapiens
  chr3:124773932-124774370
  hyper
ttttgtttcaaactacgtacatcctttgtcctttacaatatcccgtcctagaaccccttaaaaatcagttatttagatgagaaagtcgagccctgtacctggagaggccagttctgtatagcggaaaaaatgaaactggggaccggctggccagatatcggaggtgggagagatgctttgcagtctttttccctttcctttccattttttttaaagtggggtggaagagatacagggtaccccataggaaataagttttcttccaaagggttggaggagaacgggatagtcacacccctcagtccagccaactgcgaaagcgtccctccctacccgccgaccctcagggtcccgcacacgccgggcgaggagcccccaccctgggtcgcgccgcgcggaggggcctacggctggggatgcagcccggggcgcgcccac

SEQ ID NO: 345100 - DNA, 122 bp, Homo sapiens
  chr3:127794271-127794393
  hyper
cggtacacgcctttggcaattttgcatcaaaaaactaagtgtatgcacattttttttaattgaaagcccaactcagccttcccccactgctccttccccgcatgcacggggggacacacgcc

SEQ ID NO: 345101 - DNA, 288 bp, Homo sapiens; identical to SEQ ID NO: 199083
  chr3:127794860-127795148
  hyper

SEQ ID NO: 345102 - DNA, 44 bp, Homo sapiens
  chr3:127795229-127795273
  hyper
cggccggcatggagaggcggggccggcattcctgcgggcctgcc

SEQ ID NO: 345103 - DNA, 333 bp, Homo sapiens
  chr3:128216313-128216646
  hyper
cgtgtgccagcgtgggtggactccgggctggggaagcgacagggaatggtgtgtgccggtgtgacagacgccagagcggcggggtggaacgtgctgtgtcacgggagactttcttgaccaaaacggaatgtgcgagtgtggaaggaagaggggccgtccgcggagtttggggacacccgggcgtccgagccccagagcctctgcagctgggacaaggaagcccgagcccgccgcctgaggtccccgcgccgttagtgacacgcgccgccgacaaaggctgtatttttccaggctcgcgccccgcccgcgcgcgcgcgatggtccccatggcga

SEQ ID NO: 345104 - DNA, 378 bp, Homo sapiens
  chr3:128216713-128217091
  hyper
tccaggcaggtcaaacccaaagtcacacaacctgcgacgcgggccccgcccccactccccggccgcccctcccctgccccggccccggccccggccccagcccggcgacccccggctgctgcccaagcgcaggcgcagagcgccacctggcggcggcggggtctcgggtggggtccgcggagccggtgcccgtgcagaagaggtggggtgagggtctctacctccagaaggcgggctctctgggagcaggggctttgctttgtcactgctgttccccagggccagactaacacacagtaggtgctccataagtgtttcttgaaaggatgtttggagggatggatggatggatggatggatgggcaggaaattatagac

SEQ ID NO: 345105 - DNA, 603 bp, Homo sapiens
  chr3:131753369-131753972
  hyper
cgccccaggaacacaggaatgaagagttggcatttacttacctgggtgtgccaatctcgaagagtggagagagaattcagcccgggacgaggtctgtcccgcccccaggatgcaaaatccggctttgaagtggaggtggttggtgtggtagttttgtactgatgtaaggggcgtcgcacctccttcccctctcgtcctccgaggtcagtttagcaacagcggctgggaaaggtgctgagagcagagttcggtctctccggaaaccctgactccattctcggtgatgggggtgggggaagagggtgaaaatgttggagatgtcaggtcggctctcagttaactcggagagtaaagaggagggtactgagaaaagagggagggagtggagtggagcgagggaggaaggaaaggagggtggcagaaagagaaggggacgagcgggtggcggggagatggcagcttctcacagagagatttccaccttctgacgaatcccatgcacccagcaacccggcaagagactggttccgaaacctccgcgcgagcgccccctgggggttgctgacggagacgagcattgccccgggaacccgagctcaggcc

SEQ ID NO: 345106 - DNA, 295 bp, Homo sapiens
  chr3:135684609-135684904
  hyper
cgagagtccgcgccgcggggaggcttggaggcaagcgctgcccgcgagctgagccgccggaggaggagccgcgggcaacgaggtaggcaaaggaacactggccgcacggcctggagccttcagctccctcgtcccggcccgagggggtggcgaggctcggggcggcgcgcggaggccggggcgggcggggccgggacctgggggcggggaccggcctggccagaggggccacacggagctgattgggctgtggaagtcggaattccagtcggtgcggtgcggtgcggtgcgttgc

SEQ ID NO: 345107 - DNA, 556 bp, Homo sapiens
  chr3:149375440-149375996
  hyper
cgaaagaagttcagcccgagccaactccaccacgtctcgactccggaagcccgaggagcctggagccctggagtggtgccggatgagcgcgcgagctccagcgggcactacctgggcgggcagcgaagctgagcctgagcgcgcggcggccgccgtcccgcccgaacttgccgtcgggcctgggtcgctcgggtgagtcccgagattgcggagctggagccgaggcttggctgacaaatcccgacccgactctgtgcctggcagtctaagggcttcggctctcacatcccccgagctggcctaaggcgctagtgctgggcgaaaaggaggcgcaggagaagcagacagcgcggccgcagcagctcccggactgtcccataaacaaagtttggagcaaactcccacccccaggaaagaggcgggcccgaaagttgagctgttgaattatgtatgacctcctagtccctagccggccagcccccgctcgcccctcctcttcctcctcctcctcctcccacctcggctccagaaaaccctgggcgtgatgggtacttta

SEQ ID NO: 345108 - DNA, 122 bp, Homo sapiens
  chr3:156533976-156534098
  hyper
cgacggctgtggttactcaaactgatctcatcgcaggtcgtcacgacacgcgcttcccctcgcctgcacgcggcgtggcgtgagaggggccctggcagccggcgcgcccacccctgatcctt

SEQ ID NO: 345109 - DNA, 142 bp, Homo sapiens
  chr3:156534539-156534681
  hyper
cgccaaggaggccgagaggggcccaggggcgaggtcgactctcagcccgctgtccccttatcccacgtttcgcagcctgaggtgtttgttgtatatcgggaactgacacttttcggcgttaaaatgagggcgtcacctgctc

SEQ ID NO: 345110 - DNA, 523 bp, Homo sapiens
  chr3:157217201-157217724
  hyper
aggcgcccttgcagttactcagctgcatggtttgagactgggcgggagattcaggcaggctccgagggcacagcgagtggaatccgctcagctcagtgaacctgaagttgttcattgcggagccggtgccgggtggaagaattcaaggaatgcagcctgatgccaccggcagccccagagaccggtcaggtgacaggctgcacctcacccagcggagttacctcccagtgcaacgctctgtttcctgaggtgaaacacaaagcctgctccagtaaaggagagttgtttttaacagagaaaacagaactccctgtgttcgtgaaaatctatactttcccagggaagaatggggggcgggggcgagccacgcaggaaacaattttcaacagaactcaagcaggtgaacggaatggctgtagggagccacctctcagagctccaggggaggagaagagaactgcagcttcattaacacttccctctccctgagatctcacaaacgttttggaaacactgagtgttc

SEQ ID NO: 345111 - DNA, 258 bp, Homo sapiens
  chr3:157815399-157815657
  hyper
cgtttgtctttcgatttttttgtttgctcattttttcattgttaacaagatttttttttctatgcaagagtccatcgttgcagctttgcggtgagccaaactccgcggttccagcactcccctgtccagtctctctccagactcccccaaacccgctcctacaaaacccaattctaggccctcgagtaggaaaacgggcaggagccacggagcctgcgtgcctcgtgagatccctggtcctgcgtggagtctggcttt

SEQ ID NO: 345112 - DNA, 67 bp, Homo sapiens; identical to SEQ ID NO: 199159
  chr3:157815822-157815889
  hyper

SEQ ID NO: 345113 - DNA, 568 bp, Homo sapiens
  chr3:157815923-157816491
  hyper
ggcggaagccgaatccgcggccagcgtggcgagcggcagtccgaagggcggtgctgggaacatcatgtagggcgcgtgcgcggccaggtgcggatgcaggtggtggtgcgcgtgcgccacagcgctgtccagctgcagctgcgcctgaacctgaaaggacaagggcgtcacgttgcaatgactatcctagggtgacaacagaatagaaacagagcattaacggcgtccagcttggccagagagagagttgggttgtgtttgggcacggggagagggcatttggctgtgcatcttgttccgacagtgaccttctcagcctgttgctgaatctggggttccacatggatactccagtgtcccctgggtctccgaaactcgcttagggtaggcttatttccccggaccccgggaacccccttctgcaggaatgtggccgtctcccctgggaactgggctgaaatggtatattggaaagactgcgggtgaggacccttaccctcttctcttgatgctgccatgcatctcttaccccactaccaaaacaacggagtatcaacaagcaaactac

SEQ ID NO: 345114 - DNA, 79 bp, Homo sapiens
  chr3:159480852-159480931
  hyper
cgctgaggtcatcctcagcgtgcagcccggaggggaagggaaacgtgagctaaagcaacaggttccacccacagcctga

SEQ ID NO: 345115 - DNA, 660 bp, Homo sapiens
  chr3:159480975-159481635
  hyper
ggtggagggagaggaagcggcgaggaggaaggtggaagggaaatgatggtgcatgaccaccgagcacacgtcactcgggctcccacatgggcttgtgtatgtgcgtgtgtgaggggagggaggtccttcacagggtcactcgggcacttccgcgtggaataggaggcgccaggctcgtgctttgggatgccgggtggcttcggcggggtaacgagtcacgcagagacggcttgaggcaagccaagaaaatacgggtgtcggcgtgaaaatacaccactcttcccagcgcgccgcccttgctaactggctggacctgcgcccctaacgcccagtgcccccttcttttgggcctatcttggcccctccaaccccatcccagcctgcctcctgctccagcctgccgccgcgaaaaccgggactgcggactgcgccgcgcccggcagcctctgggcatgctcggtggcgggaccggctccaccgccaggagggcgcgtcctccctcccctagggcggtgacggcgcctgcagcgacttgccgccgcgccccggccaggcacaccttttggggaggcgggggaccaccctgcccggcgtgggccgagagcgccccccaccccgagccttccggcgggtgggaggaggggccggccagggagacgc

SEQ ID NO: 345116 - DNA, 80 bp, Homo sapiens
  chr3:167098187-167098267
  hyper
aggagcctgcgaaatgagagagaatggtgatcacaggaaggaaaagggcggaaaaactcaacaggctctggaagctttcc

SEQ ID NO: 345117 - DNA, 227 bp, Homo sapiens
  chr3:169482182-169482409
  hyper
cggaagacgggagaacccacgcaggaacggctccaggcaaccccggctcactgcccattcattttggccgactttggaggtgccttcacgtctcctgccaatttgcagcacactggcccagtcagtcaggtttgggggttcacaagcccccattgccggcgaggggtgacggatgcgcacgatcggcgttccccccaccaacaggaaagcgaactgcatgtgtgagc

SEQ ID NO: 345118 - DNA, 241 bp, Homo sapiens; identical to SEQ ID NO: 199188
  chr3:169482439-169482680
  hyper

SEQ ID NO: 345119 - DNA, 138 bp, Homo sapiens
  chr3:179169640-179169778
  hyper
gaagaccccaaaggccccatttaggtttcccattctggaattctaaatgtcagaaagtaaactgaagcccagagttgcacaaccttgcgttgcagtccccgctcttccatcactagttgtaggaccgtgtaccgtctc

SEQ ID NO: 345120 - DNA, 809 bp, Homo sapiens
  chr3:183165024-183165833
  hyper
cgacagtctcccgccccgtttcttcacctcagttctctaaagattgaaggtcaagaggagggtttcttgccctggagcctgcgatagggtgggcccttgcggttcttgggcggaaacggcgatagggacacccagggcctaaggaggctggggacagagcagatcctcccagcccccaacatcaccccggagtagatgcagacccccagggtcccggaggccgagaccacaccccgcgggcacgagcccgattggcagattgtagccgagtggtttcaacggtgacgccccccacccgaatgcctcgctgggattggctcatttcttggttcagacctggacggtggccagaggaggacaagaggcttttacaccgaacggaggtgatgtggacgacaacggagacgcagccgcacttcaccaagcggccggtccgaggggacatggcggcaacctctgcagcgtcagtgctgctggcgggtgcaagaaactggtggcgacactgcctgagcccgctgctgttgccaaggtgacgaggcataaagccgcggtggatcggtgcgtgggggcgcggggtgggtggtgaagggagaacgaagctcgagcggaaagacaggaccgcgaccgcttgtcaggggattcggcttccagtcccccttccagagggcgtccttctgcagccaggcctctgtcttcccccgcccccacacggtacgagctacagaatgcttttctgttttctctttttctatagtaaggaagcgctttcctttctcccccgtttattcatttgcttacttctggttccc

SEQ ID NO: 345121 - DNA, 570 bp, Homo sapiens
  chr3:183542795-183543365
  hyper
cgccggcagctccgaggtcgcgtgggatccgggctccaggcgcctccgctctgccgcccaccccatccctctggctccgggcctccgcgtcctcccaccacagggtggggactcgttgcggtccctacccagcccatacctgtacgacgtggtcactgctgcagccgcgtccgcgtcgccgatgggcagcacgtagaccccgcgggcgccgggcgcaggtggcgcggaggactgcgcggaggatttgcccctgcggccgcccgcccccggtccgcgccccggcggcggatccttgggcccggcgggcgtggtccacaagccgaagtcccgctggtactgagtgagcggcacgtcccggccggaatcccgggcgcccgcgggaggctggcccctgcgcgaggcggcgccgcccgtgcccggctcctcgctgtcgaggtccgagtagccgtgcagagtgagcggcaccgccacgtcggagcggtccagctggttccagcgccgcgccaggcagcacaggcggctgatacagggccacgccatgccagccccggcgcccgccgccccgctccc

SEQ ID NO: 345122 - DNA, 290 bp, Homo sapiens; identical to SEQ ID NO: 199253
  chr3:186079331-186079621
  hyper

SEQ ID NO: 345123 - DNA, 45 bp, Homo sapiens
  chr3:187455297-187455342
  hyper
cgctcacacataagagcacaaacaccagccctgcgcgccggggca

SEQ ID NO: 345124 - DNA, 446 bp, Homo sapiens; identical to SEQ ID NO: 199256
  chr3:187456666-187457112
  hyper

SEQ ID NO: 345125 - DNA, 509 bp, Homo sapiens
  chr3:187457654-187458163
  hyper
tcagccaaggtccttattcacgttaatgaagatggaaggcactaactgtccttggaaagcgatgagtcaaacttgaccgcgcttcaaactcgttcccagattcgtttccagtccgaacagaggcgcgtttctccgacgcggcctccgacggctcccgcagtgggaggggccgaactcgatccccgccgacccgggcgggggcgacggcgctgtctccccctgcagagcgcgcctgctgccgctaggggccgccagcatgcggacgcgcgtttgccatcttaagtcacgagctcggagaaagaaaactttacggaggaactgttgtggcacaaattctggcctatccacatgacccccaccccctcacacacacacacccggtttctcgccaggctactatgcagaggatgttaggaaggggaagagagcgatttcagaatcgaggctcgccctgcaagtctttggtccaggccttaacccccctcttaacacgcaaacccccgagctcc

SEQ ID NO: 345126 - DNA, 111 bp, Homo sapiens
  chr3:193775965-193776076
  hyper
cgctgaaggacccacccagggaggaggctgagccgcgctccctctagcctccccagaggtgcattcgttaggttcccgccccggccccagccccagccccagcatcagctc

SEQ ID NO: 345127 - DNA, 146 bp, Homo sapiens
  chr3:194407289-194407435
  hyper
cgcgcgtgtctcccccgcaccaaccttttttgcacactcgaagctgaatattttcttttttagagaatttacccgcacctcctgcggggttcctaagcactctctctgctcccctccccccaactccctaccacagggccgctccc

SEQ ID NO: 345128 - DNA, 153 bp, Homo sapiens; identical to SEQ ID NO: 199276
  chr3:194407836-194407989
  hyper

SEQ ID NO: 345129 - DNA, 101 bp, Homo sapiens; identical to SEQ ID NO: 199277
  chr3:194408028-194408129
  hyper

SEQ ID NO: 345130 - DNA, 582 bp, Homo sapiens
  chr3:195599104-195599686
  hyper
cgagcggggccaggtcagcatccatccccgcccagtactcactcgtcaatcctgtccgggaagccccagcagtggcgggggtcactgtcgccatgccctgtgtggatgaagctgttctgcaggggctggctgatgtcctgggccgacaggccggccacggaggtcaccacgttgcgagggaagggccccacacacagcgtccgtgtgttctggccacgccaccagtagttctcggccctgcgcgacagagatggcacggtgaacgccaggcgtggcggggcagccccggcactgggaccctcctcacaccctggccactgtggcagaagggggatggagctcaggcctcaggaccaggctgtgtgccaccggccctcctccccaacagcccccgtgacccaccatgccccgtacaggcctgtttgcacacggccttacccacaactctctaggtgggtcaggcagctttccctatggtttgcaaataaggaggcacgctggaagctgctgcagcaggcaacatgacctgtccacggttaccagaaagatcccagcagacctgggacccaacgccagctttca

SEQ ID NO: 345131 - DNA, 643 bp, Homo sapiens; identical to SEQ ID NO: 331998
  chr3:197025639-197026282
  hyper

SEQ ID NO: 345132 - DNA, 88 bp, Homo sapiens; identical to SEQ ID NO: 199339
  chr4:8201024-8201112
  hyper

SEQ ID NO: 345133 - DNA, 38 bp, Homo sapiens; identical to SEQ ID NO: 282004
  chr4:8201450-8201488
  hyper

SEQ ID NO: 345134 - DNA, 43 bp, Homo sapiens
  chr4:10458329-10458372
  hyper
cgcgtcccgctcgccgcgagggaaggccggggttcttccaacc

SEQ ID NO: 345135 - DNA, 609 bp, Homo sapiens; identical to SEQ ID NO: 332064
  chr4:25863681-25864290
  hyper

SEQ ID NO: 345136 - DNA, 133 bp, Homo sapiens; identical to SEQ ID NO: 199452
  chr4:76555905-76556038
  hyper

SEQ ID NO: 345137 - DNA, 134 bp, Homo sapiens
  chr4:100729543-100729677
  hyper
cgatggatctaatcttgacttcaggtaaaacagctcccccgcgcccaccaacgcggtattactgccacctagtgatagcatatcctcatcacagaggtcctgcctgtggaagtggaggggaagaggtgtagtaa

SEQ ID NO: 345138 - DNA, 258 bp, Homo sapiens
  chr4:100867945-100868203
  hyper
cgcgatccgcatccgtcccggcccaggaccaacctcctgggccggggcgtccgagctgactcggtggtccgcgcacggcgccagcaggctcgaagcggacctgcccgggaggcggacgatagcagccgggctgcccatcgcggggaggggttccgcccgggacccgattgccggcattggtagcgccgtgccctgtgacctccaggcgaggccctcgcagctcaggccaggaggacagggtccgggaaggggacactc

SEQ ID NO: 345139 - DNA, 299 bp, Homo sapiens; identical to SEQ ID NO: 199559
  chr4:113435475-113435774
  hyper

SEQ ID NO: 345140 - DNA, 242 bp, Homo sapiens; identical to SEQ ID NO: 199560
  chr4:113436585-113436827
  hyper

SEQ ID NO: 345141 - DNA, 352 bp, Homo sapiens
  chr4:141293964-141294316
  hyper
cgaatattaaagcaggatgccgctttgtgtcaagtactagattacgatgaacggtgtcacgaagaacactccactcttgataccgtatatgtgaccttgagcaagaaatgtgttcacgctcaggcttcagttcctttctgtgggttgctgtgaggctccacaggggtaaggtaagcacaagtgctatgcctcagtaccactagggtattttctcaattctaaaatattaaatggccacgcactacagatttaataatagtttcggaggaggggcgtgaggagaggaacattccactagctcaactataagctttccgatttcggaaataagaaaaatatgaaaaagtctgct

SEQ ID NO: 345142 - DNA, 103 bp, Homo sapiens; identical to SEQ ID NO: 199607
  chr4:141294418-141294521
  hyper

SEQ ID NO: 345143 - DNA, 88 bp, Homo sapiens; identical to SEQ ID NO: 199608
  chr4:141294545-141294633
  hyper

SEQ ID NO: 345144 - DNA, 40 bp, Homo sapiens
  chr4:141295287-141295327
  hyper
tgggaggggaggctgaggtggggagggagcctagagagcc

SEQ ID NO: 345145 - DNA, 177 bp, Homo sapiens; identical to SEQ ID NO: 332215
  chr4:153856957-153857134
  hyper

SEQ ID NO: 345146 - DNA, 45 bp, Homo sapiens
  chr4:154143770-154143815
  hyper
cgcggttgatggaaaacagatgtcttactgctctgggcctgagca

SEQ ID NO: 345147 - DNA, 213 bp, Homo sapiens; identical to SEQ ID NO: 199648
  chr4:154144184-154144397
  hyper

SEQ ID NO: 345148 - DNA, 42 bp, Homo sapiens
  chr4:176986744-176986786
  hyper
cgctataaaatgtgttaggtggtgagaacgctgatggttcac

SEQ ID NO: 345149 - DNA, 268 bp, Homo sapiens; identical to SEQ ID NO: 332264
  chr4:183839058-183839326
  hyper

SEQ ID NO: 345150 - DNA, 206 bp, Homo sapiens; identical to SEQ ID NO: 199699
  chr4:184019900-184020106
  hyper

SEQ ID NO: 345151 - DNA, 860 bp, Homo sapiens; identical to SEQ ID NO: 332282
  chr5:1064412-1065272
  hyper

SEQ ID NO: 345152 - DNA, 315 bp, Homo sapiens
  chr5:1645162-1645477
  hyper
cggcccacagcgccaccgtgtggtctccgcgtccccagttcggagccgcagcttacgcgctgctggccctgagcctgttcccttcctgcagtccccaggagctgacgctattcggtttgtttttaaacactccagctgagcaagcgtcttctcaggacgtcctgcgtgctgcccacactctcttgtggatggtcccccgggtccggcggaatcccgcctgggaaggcttccccgaagccttcctccatcctgggcagtggcggggcttgcaggaggcctcagagctctgtcggggccggacggaccgctgtcgtc

SEQ ID NO: 345153 - DNA, 286 bp, Homo sapiens
  chr5:1874606-1874892
  hyper
cggtgagggactgggagaccgggatggggagagagagggaggccgggctgtctcgtcagcagcaggcgtgcccagggaaacgcaggtggcatacatcgcatgcataatctcaggagacggccactttaaatcttaattggttgccttttaaatatcatttaagggctggcttccctgcctctctctctagttaagaaggtgtcgtgtcaaactctattaccttgctggacgtctctcccttaagttaaaaaaaaaaaaaaaaaaagaaaagaaaaaagaaaaaaaa

SEQ ID NO: 345154 - DNA, 170 bp, Homo sapiens
  chr5:10564301-10564471
  hyper
cgcgaggggaaggccccgggggaaggcgtgtccccgcgccccgccccgccccgcctcggaaagcccccgcggtcccgcccaccccaggggctcgctcagcctccggagacttttttctttgagcgcagccgcctggtgccggtttccgccgagctggagcgcgcgggcca

SEQ ID NO: 345155 - DNA, 69 bp, Homo sapiens
  chr5:31854871-31854940
  hyper
cggtttccttttcccggcgaggggagtgaccggggaggggatcttggaatgccgtggggttttgacaag

SEQ ID NO: 345156 - DNA, 336 bp, Homo sapiens; identical to SEQ ID NO: 199807
  chr5:40680627-40680963
  hyper

SEQ ID NO: 345157 - DNA, 98 bp, Homo sapiens
  chr5:42950747-42950845
  hyper
cgcattcgctggtacccagatttctacaggagttaaacgtctcctgagcagctaaagcagagcttactagtaagaaacttgcaatgactaaggaactt

SEQ ID NO: 345158 - DNA, 337 bp, Homo sapiens
  chr5:43007481-43007818
  hyper
cgaacctaggcaggcagcgtggggtggagttggcaaacgtcctgcaacccatgaagagccgctatggtaccactagcggttctaggacccaaaaactaacgaaactgctcaggagaagctgcaggcttgacccaccagaggtgctgccaccgagatcaattctgctcggacgaatgagcggtgctatgactcagaaagtgccagtccgaggaaccagggatactgggacatagtgaaaggagttagccagctttagggagactgtaagggaagggtccccagagaacctccgactggtgttttgtgcagataagggaacttgcacaagggacttgcc

SEQ ID NO: 345159 - DNA, 387 bp, Homo sapiens; identical to SEQ ID NO: 199819
  chr5:43017314-43017701
  hyper

SEQ ID NO: 345160 - DNA, 303 bp, Homo sapiens; identical to SEQ ID NO: 199820
  chr5:43019347-43019650
  hyper

SEQ ID NO: 345161 - DNA, 328 bp, Homo sapiens; identical to SEQ ID NO: 332354
  chr5:43557434-43557762
  hyper

SEQ ID NO: 345162 - DNA, 50 bp, Homo sapiens
  chr5:49737299-49737349
  hyper
gggagagagcttgggcaggtgatgtctagccaatctcgtggggagaggtc

SEQ ID NO: 345163 - DNA, 75 bp, Homo sapiens
  chr5:54518558-54518633
  hyper
cgatcccagataaagcgctatgtagatccagcggttcgacttctccacgggggagagaaatgtcctaaatatgga

SEQ ID NO: 345164 - DNA, 209 bp, Homo sapiens
  chr5:54526958-54527167
  hyper
cgcagacagacacttgcaggatttagacaaaccacaactgtttattggtgaaagactcagcttcctcatgtgctcgctgcaaaataaataaaataccagatgctagtatcgtacactatttacaacctgcagctgaccaagcaggtcctgaagccttctctgtggaccagtactgcactcttctgaggctacgggagaggtccagcagc

SEQ ID NO: 345165 - DNA, 308 bp, Homo sapiens; identical to SEQ ID NO: 332365
  chr5:56110226-56110534
  hyper

SEQ ID NO: 345166 - DNA, 37 bp, Homo sapiens; identical to SEQ ID NO: 199857
  chr5:57878673-57878710
  hyper

SEQ ID NO: 345167 - DNA, 158 bp, Homo sapiens; identical to SEQ ID NO: 199858
  chr5:57878752-57878910
  hyper

SEQ ID NO: 345168 - DNA, 227 bp, Homo sapiens
  chr5:57879190-57879417
  hyper
accctgggaacagagttgggtttctttacgctctgtgtggctgtgattggggctgtcttgatgagggatcgggctattcgcaatctttctaggctctgtaaagaggataagagtgtctgtctaaaatgaaaacccaagcaaacaaaagtcagaggagcatgcaatctcgtgttggcattgatctcctctcttggcatccggggtttgagatcgcggtgaaaactcac

SEQ ID NO: 345169 - DNA, 128 bp, Homo sapiens
  chr5:58334886-58335014
  hyper
cgccatgctcggatgcccggtgccggcacatgagggctgctccttcatattgcccagcccggcagtgcaacgggggcggaggctgtgctcgcggggcggccggcctcggggaggcacggtctctccag

SEQ ID NO: 345170 - DNA, 210 bp, Homo sapiens; identical to SEQ ID NO: 199861
  chr5:58335353-58335563
  hyper

SEQ ID NO: 345171 - DNA, 73 bp, Homo sapiens
  chr5:58335881-58335954
  hyper
aagtttcacaaacaaggttatttaggaccctcaaggtttctgagggtttaagttttagggtttctgggggttc

SEQ ID NO: 345172 - DNA, 1043 bp, Homo sapiens; identical to SEQ ID NO: 332373
  chr5:66299591-66300634
  hyper

SEQ ID NO: 345173 - DNA, 50 bp, Homo sapiens; identical to SEQ ID NO: 283051
  chr5:75698194-75698244
  hyper

SEQ ID NO: 345174 - DNA, 1185 bp, Homo sapiens; identical to SEQ ID NO: 199902
  chr5:75698274-75699459
  hyper

SEQ ID NO: 345175 - DNA, 345 bp, Homo sapiens
  chr5:76926856-76927201
  hyper
gtgccccgaagagtttacgcactgtgcaaacacaccaaatgtgtgcagtcttcaccacgcccctgcacattctgtgcactgcacagattcacaggtctgcagtcaggcatgtgtcaaagttcgacccacaggtgtacaaatgaagataaacgtgtacccatgtagcttaatagcatgccttataacactgatgtgctatagaattttcagaaacgctggaaatttggaaattgatgacaggctgtggatgacatagtttcaaaatcgaaagacaaaggaaaacccctaacgctacggttgacagagcggagaggttaatacagtgatctgcgtgggaaagtgaac

SEQ ID NO: 345176 - DNA, 191 bp, Homo sapiens; identical to SEQ ID NO: 199915
  chr5:77148195-77148386
  hyper

SEQ ID NO: 345177 - DNA, 314 bp, Homo sapiens
  chr5:82769369-82769683
  hyper
agctgacaaatgaatggctagtgtgaaatccctgcctttcccgtgctccaaggcagcagggagggaggagcgagggaggcggtgcgctccttcggatctgcccccagttcagctcacaagacttgcagaacctagatgtctaggaattgggagttttgcggcgggtgtgggcgccccctgatggagaagtcccgcacaggcggagaaaaacaagccccccagaccaagcgagcatctttcacaaccttgtgttcaaggatggaaggccctagttttcccttaagtcattcattttgcactccacaatctgcggc

SEQ ID NO: 345178 - DNA, 45 bp, Homo sapiens
  chr5:87436549-87436594
  hyper
cggatcttgttttttcttttcttttcatgggtccccgtttgcgct

SEQ ID NO: 345179 - DNA, 735 bp, Homo sapiens
  chr5:87436769-87437504
  hyper
gccttgatatacaagacaaatgcacactttactctgggcttaaaaaaccatctatcatcatcctttgggcatgacaaatacattgtgtgtttcagagaaattaatctggtatttagggggagaaaggcatttccaaccagtctccgtgcagaaccttcccgcaaaccctgtagcggcatttttcgacacttttctcctcctttcggcaagcctcaaacttgaccttcgagaggattttaagggtagagccttcctccctttccctcgtctgctccaagagctcacgtaggccttcttctgggaaacagcggctcaggaccagagctcggagaactgcgcgtccaggagcgcgggcgcggccggggaaaagggaggaggcggcaggagggggcaggaggtggagggaggaggaggatcggtctgaatatgcatgaggcacccagcactgccctcttccccggcagctgctcgggcgggggcgaaggagggaaggggaggggaggggaggaaatgaggctggggcggggtggccagagcagccgcagaggctgacgcgggtttggagaacggaagagatgatttgcatggcgcctggtgattggctgatggccgggggctgggtctgagaggcggcccctgaatggtttaacggaggaaattacaagattcattcgactaaagaaagccggggcgggcctggtcggcgcaatatgcagcctgtccgcaagggggcgc

SEQ ID NO: 345180 - DNA, 80 bp, Homo sapiens
  chr5:87957200-87957280
  hyper
aagtcaaaccatcaagcacagtgatgtgctgctttttgaacaaatatggctcaaaactccgtatttccctgaataaagtc

SEQ ID NO: 345181 - DNA, 156 bp, Homo sapiens
  chr5:87969885-87970041
  hyper
cgcgccataggggtcatctatttgaggaggaagaaaaagcgggtgtgtgtgtgtgtgtgtgtgtgtgtgtgtgtgcgcgcgcgcgcgcgcgtctgccttccacggaaagagagacggagagatgtgggagggtgggggtggaagtatgcagacaga

SEQ ID NO: 345182 - DNA, 599 bp, Homo sapiens; identical to SEQ ID NO: 199937
  chr5:87970918-87971517
  hyper

SEQ ID NO: 345183 - DNA, 37 bp, Homo sapiens
  chr5:87975991-87976028
  hyper
cgaagctgggattttcaacctcttgtttattcgtaaa

SEQ ID NO: 345184 - DNA, 243 bp, Homo sapiens
  chr5:87976663-87976906
  hyper
atgcagttgcccaccgtcccttggttttatgagagagacccaagcagaggtcggagccttgacctcctcaggttcatgacccaggcctcttcaccgcctttcccagttcagcactgactaaagaagatatctttacaaattaggaaaagaaaagagttcattatcctccctgaagcggggaaatgagtgagtcaaagacacagactcacaggcagcggttggcgccgggcacacgaaccggcc

SEQ ID NO: 345185 - DNA, 311 bp, Homo sapiens
  chr5:88179540-88179851
  hyper
cgagctggagaaatcatcagtttcactcttgcaaaaggggggcgggactagacctcggagcattttaataaaacaaacatacagcagctccctcctcacccctccagtctcaactagattgataaattactccactacactactttaattatgtatatggtatgcagaataaatcactgaacatcagtacctcaatcaagcacttttaaatgataattgcatcttggtgaatcaatctttccattcctgacattttgctaattttagttttacggtggggtaatagcacatgccatacgcaaacctaatga

SEQ ID NO: 345186 - DNA, 42 bp, Homo sapiens
  chr5:88180346-88180388
  hyper
tctaatcagtttggaaatatttaccgaggaagcagcttcctc

SEQ ID NO: 345187 - DNA, 114 bp, Homo sapiens
  chr5:100236036-100236150
  hyper
cgggatctggagccgaacctccattccagtttactcaaaactcaaaactggcctctccacgtggcttgggtagaaagacagtcaatgagatgatttgatggttttatgagtcaa

SEQ ID NO: 345188 - DNA, 344 bp, Homo sapiens; identical to SEQ ID NO: 199962
  chr5:100239724-100240068
  hyper

SEQ ID NO: 345189 - DNA, 469 bp, Homo sapiens; identical to SEQ ID NO: 199981
  chr5:112629778-112630247
  hyper

SEQ ID NO: 345190 - DNA, 113 bp, Homo sapiens
  chr5:112630698-112630811
  hyper
gctagagggagaaaagggtgggggcgagtagcctggaggccgagcagaggagaccgtgctgggagagcagagcaggcatccttccagttctctgcaatagtaattaaggaccc

SEQ ID NO: 345191 - DNA, 741 bp, Homo sapiens
  chr5:124082625-124083366
  hyper
cgctcggggcggggggcggggggcttggggcggtggggtggggaaaataacggcgtttaaaatgggctcagtcttcgaaacctaaaggatgtgatgttttcctgtcttatgttgttttaagaaaaaggaactgagttcctagtatagctcccgaggggagtggaatcctctgtcgctcaggtcagccagtcatgtggtaattcgataattagagtcaaaataaggtttttgttttctttttttttttttttaaggcgacccttttcgggagtttttccctcttatactcgcagcaaacggtgtgtctcccttttatttattttttctctcctctcccttcgcccagcccctcctgtgtttagtcagatggccccggagcttggcttagtatttttaattagctggcgtttggaagctaaaagcagtaatgaattgttgatggattggaagtggagagtcgctttgctggaaatgtcggggctgggagagggggatgggcgagttagtaacaaccaaccatctaaaaggagcgattttgttacagtgcaagcctttcacatcacgtgaggatcaagggctcaattggttgtcgtgagaacaaaaatggtgacaagcgtatcaagaaaatactgatctggtctttaaaaaaaaaaaagctgaaagtctctcccctccccctgcacacactcccccaacctcctccccccgcccccccgcagtgggcgaagctacaagttatga

SEQ ID NO: 345192 - DNA, 111 bp, Homo sapiens
  chr5:124084660-124084771
  hyper
cgtataaaacacacactgagagcgggtgggggtgctgtggggggtggttgtggagacaaagcgttttattttccaaccagattggggttgaggaacctcccgcagtaagaa

SEQ ID NO: 345193 - DNA, 64 bp, Homo sapiens
  chr5:124084977-124085041
  hyper
ggctggctgtgtggaactgactgcgagcattttgccggcttcccttccttgttccaaggacttc

SEQ ID NO: 345194 - DNA, 73 bp, Homo sapiens
  chr5:134880614-134880687
  hyper
ttaccgctgcctggcctggaaggataggaggggcaaggagagaaatgcgaagtaagattcgattttaaaagtc

SEQ ID NO: 345195 - DNA, 282 bp, Homo sapiens
  chr5:142782217-142782499
  hyper
cggccgcagtctccaagttgcgggctgtcagccccccgcgtgtgcaccctcacgcgccccgcacgccctcctcaagccaggcgccgccggggcctccccggagcccgggctcgcgctcgggcgcgccggggtggcgtgcaaatattcgggcgagtaaaattcagacgcggcttagcgttcaccacgaaaacgggtgtcgggcgacccccttggagggaaaggggacactagggggagaaaagaggccaggattcccgcgaggaatgagaggctcgaagcccc

SEQ ID NO: 345196 - DNA, 124 bp, Homo sapiens; identical to SEQ ID NO: 283412
  chr5:142782625-142782749
  hyper

SEQ ID NO: 345197 - DNA, 410 bp, Homo sapiens
  chr5:142782794-142783204
  hyper
cgcccgccaccgtccgcagttcccgccgcagccgagataaacaacttagcttgtgaacgcagaaggagcaggagggaaatatattttttttttctaaaaaaaggaagtaaacagccgcccctttctccatgggtggggggagagcccctatttaagaaagtctcccattgcccagctgacaagccagccctccgccccgcgccgggctccgcgggtcgaggttccgggcgcgcgtgccccgtcccggtcccagctgcttcggccgctccggctgcggcgtctccttccacccacagaatccgtccccgacgggcaggcggtgactcgggctcccgtcacagacacgagctcgcaaaatggaggaggcggcggcggagggaagagagcgcggacacgcgaaagggcagccc

SEQ ID NO: 345198 - DNA, 717 bp, Homo sapiens
  chr5:142783958-142784675
  hyper
cgcgtgccggcaggtcccccaccaccgcatcatctgggcggccgggtcttcagctgccgccgccgcgctctcgcactgggagagaagttgcaaagcagaacccaccctcccccgcgccccgaccgtcccccaccctcttccccgagtctgcgaggcggcggcggcggcagaaggaggcgccgcctgccaagttcaacccccacccctcccgcccaatgtgctcacactcgaaggaagttgcacgccaaatgcaaaacctccagcgagctggatttctttgcactttttttttattattatgattaaggaaagcagggggcggcaggcttaaaagcaagttgcaggcgaaatagtaagttgctggcgaaatatagccccccttccgaaactcctgacctcttcttccaccccggccagggcccgcgtccaagttcccggtgcaggccccacccccgaatcttgacatttgctgccctcgactctgtgcgttgctcaccctatcacgttcataggacccctgcccctacaaataaaacaaaatacaggcagctttaaaatgccagcgttcaactccctacagatgttcctgttaggagcttccccctcagtccaaggggaagggaactcgtggtccgtcctgagaaaggagagggccgtggggcgaggggtgcccgtgcgggaagcccccgccccagctcccttccccagctcgccgcg

SEQ ID NO: 345199 - DNA, 32 bp, Homo sapiens
  chr5:142785272-142785304
  hyper
aaccctcagccagaagaatttttatgaagggc

SEQ ID NO: 345200 - DNA, 434 bp, Homo sapiens; identical to SEQ ID NO: 332544
  chr5:150004280-150004714
  hyper

SEQ ID NO: 345201 - DNA, 94 bp, Homo sapiens
  chr5:153862577-153862671
  hyper
ctgggagctccaaggttctgtttgcagacgggaaactagcccagagaggggaaggaactttcctaagggcacacggccgatgagtggcagacgc

SEQ ID NO: 345202 - DNA, 248 bp, Homo sapiens; identical to SEQ ID NO: 283604
  chr5:176560001-176560249
  hyper

SEQ ID NO: 345203 - DNA, 290 bp, Homo sapiens
  chr5:176560318-176560608
  hyper
cgcgccaggtgccgcctgggttggggttcgagacgcgtagggtgcgggagccgtgtgcggcccgaggccagcgccgtgccccgaggtaggtgaggggatcggaatgccacccacgacgcccgcaggccccgacactccaaggaggcgcgcgaggcccctggggagcccgcctcaggccccgcccgggcagccgggccggcccgtaggccccggccgcgagcgggcgcgcagggggaggggagggggcggcagcggcagctccgctgattgggcggcgctctcacaagccc

SEQ ID NO: 345204 - DNA, 60 bp, Homo sapiens
  chr6:391113-391173
  hyper
cgcagagacagtatttgaatcaagcttaatagctcaagggagctgggccatttcctattt

SEQ ID NO: 345205 - DNA, 123 bp, Homo sapiens
  chr6:2841503-2841626
  hyper
cgatctccactctcagagccctgatttcccccgaggacaggcaaagaagaaccgtgctggctgctcggcatgtaagcacaaagctgatttctccttgttgtgaaatcgtctctagaatcgcac

SEQ ID NO: 345206 - DNA, 732 bp, Homo sapiens
  chr6:2841627-2842359
  hyper
gggttcctcctctctctccctgcagctgcagataggagccgcggcctggccctgggctgcctggaaaccgtcacaaacagctctgggaggaagggaattcagggagaagggacaacattctgatctcaggtttcagtcttgccttccgcctgcatctgtcgtcctccctccctccctccctcgcgggctggcccggcctgtacccaggcgggggcgggggatcagaggtcgtctgtctccgtcggggcgcccggaagggatgggggcgcgaagctggcggggagggcgagcgcagggagctgcgggtctgaggggcctgagcctggggggtggggggtgccgggctggaagctgagcgagggagcctggcctctccccgcgcccgcccccgcgccaccgctccgaggcccggccttacccgacaggccgccgaggcacgctccgggctccgagctgggtgcgaggtcaggaaggaggcaccgagggccgctgctcttatagcaggcggaagcgtcacccgggccagcagccgcgggcggggcggcggcccttcccggtgactgcgtaggagtccgagctcccgaggtcgcctaagtgcaagcagaagtgagcgtggcttccgggcagcgccctcctcaggggcgcggcttctttctcagttcaaagcctttccccgaatctctggcaaggacctgaaaagctttttcttactaaggtgtgaatgactgagac

SEQ ID NO: 345207 - DNA, 227 bp, Homo sapiens
  chr6:10417842-10418069
  hyper
gggaagagggagtatttgtgtgagagacagagtcacaaagagaaagagacagtgaggggccagaacgactctcttttctccgattgtcaatgcccagtgggagccgggagcccaacaggcccagcccatcagattcggcccctccgggccccaaatccgctcgccccacccgagatccaggcctccagccacttgcctaactgtgagcccgcaagagccaggcccgc

SEQ ID NO: 345208 - DNA, 268 bp, Homo sapiens; identical to SEQ ID NO: 200312
  chr6:21666189-21666457
  hyper

SEQ ID NO: 345209 - DNA, 351 bp, Homo sapiens; identical to SEQ ID NO: 200313
  chr6:21666588-21666939
  hyper

SEQ ID NO: 345210 - DNA, 873 bp, Homo sapiens
  chr6:24910930-24911803
  hyper
cggctgcttagcattcaacgctcattcaagtcgaggacacccctccccacacagacctcaccgcgttgtacgcaaaatcagaagcaaaaaaggagaaatgaaaaggtgaacctacctaacgacgacggctccttgtcatgtcaggggcacactcagggttctctggcatataaaagcctccgcaccaatgcaatgcccggagctgcccgcacctccggctttgcagacagcctgagctggctcacttgggtgaaggggaccccgggaggaagtcgggtggacgcgagctgtccccagcgccggctgccctgccgcgtccgctcgcagcagctgcggcgcgcggggtgaagttgcggggctggcgggcgcgagggtggcggagcgcggagctagagcggcggagcgggcggaggggcgggagccgtgaggagggggaggcgcggcgcgggggccggcggcgtcacttgtgctgggaggggagggcgggtggagacagctgcttgacagctacttcagcccaactccaggaggctgcgcttcggtgcctgcttccagctgatcgccggcacgccaggctcctttgcaagagctggcgcggcagctttggagtgacccgtggaatcgcgccggggagcgagcccggtggatccagcgcgctggagggagagggcagaggaaaggagccgaggcaaggaaaggccctttcagctaaccttttgggatctttcatacaagctgggctgtgcattgaaaaaaatgaggcggtggtgtatggggtgggggcggtgtgagggtgaggttggctgcccacggcaagggttgtgctggaaagccccgctgaagagggctgctttgtagggcactctctctacc

SEQ ID NO: 345211 - DNA, 213 bp, Homo sapiens; identical to SEQ ID NO: 200330
  chr6:26198924-26199137
  hyper

SEQ ID NO: 345212 - DNA, 367 bp, Homo sapiens; identical to SEQ ID NO: 283855
  chr6:26204318-26204685
  hyper

SEQ ID NO: 345213 - DNA, 204 bp, Homo sapiens; identical to SEQ ID NO: 200332
  chr6:26205298-26205502
  hyper

SEQ ID NO: 345214 - DNA, 55 bp, Homo sapiens
  chr6:26205712-26205767
  hyper
agaagttcctggggtagataagctcacgcaaggagaggttgcaagcattcatttc

SEQ ID NO: 345215 - DNA, 209 bp, Homo sapiens; identical to SEQ ID NO: 200336
  chr6:26217156-26217365
  hyper

SEQ ID NO: 345216 - DNA, 312 bp, Homo sapiens
  chr6:26217578-26217890
  hyper
aggccaagggcaagtgaaatgattactagtcaaatccgtcagtgatcccgagtcccagaaaccaaaggctcttttcagagccacccaccttttctgtaaagtgctggaatacacatacgatgcctgaaatctcaatgttcactgtcctaatttttaacgaacgcttctgacgttactggtcagttctttattgaaatccttgctcacatttcatgcactaatttatcttactggtgtttctttgcagtaaaaatgcgtttataaaggtatacaagaatagaaaccgaggttgtgacaccaaggtttcactgc

SEQ ID NO: 345217 - DNA, 114 bp, Homo sapiens
  chr6:26233864-26233978
  hyper
cgtcacgcagtgcagcccccacactatttacaaatacagtacctgagggccgatatcccaaagctaaggcttatcaaaggcctgcgaaaagacagacaccgggcaccaccagca

SEQ ID NO: 345218 - DNA, 129 bp, Homo sapiens
  chr6:26271217-26271346
  hyper
cgaatgcggcgagcgagctgaatgtccttgggcatgatagtcactcgcttagcatggatggcacacaggttggtatcctcaaagagccccaccaagtaggcctcgcaggcctcctgcagggccatcacc

SEQ ID NO: 345219 - DNA, 326 bp, Homo sapiens; identical to SEQ ID NO: 283871
  chr6:26272105-26272431
  hyper

SEQ ID NO: 345220 - DNA, 70 bp, Homo sapiens
  chr6:26331633-26331703
  hyper
cgccatacagttatctgagccagcgagctaaaaactgttgaccccgacgtgatttgaacacgcaaccttc

SEQ ID NO: 345221 - DNA, 323 bp, Homo sapiens; identical to SEQ ID NO: 200349
  chr6:26331811-26332134
  hyper

SEQ ID NO: 345222 - DNA, 243 bp, Homo sapiens
  chr6:26332283-26332526
  hyper
agagagttgatttcacaccccgataattcttcaaaatcagatcgctggacctgaaactgaccctaaaaagaacaagaaatcctgtcatcaggagtaagtgggttattctggcactgtgctttgtttggctggttaaagaacctgccttgggtaaccagagatcggagttttctaaagtcagcggggtttgtctggggaccccgaatttacatacagacgatctccgcaaatagtgcaggggcc

SEQ ID NO: 345223 - DNA, 278 bp, Homo sapiens
  chr6:26522013-26522291
  hyper
cggccccgggtcggcgggtgagctagggggcgccccgggacaggccgcgccctctgccctgcagataccggaggcctctgctgtggctgcccactggctgggcccaggccttgaagcggtggcgaacgtctcttccctaccctacctcggtgactgatggcggcggcggcctctcccagtccggaccctgccggccgtcgggtctcccggcccaagcctgccgggcctggacgaaacccccgccgagcagcctggacgcagcgcctttgggtggcggc

SEQ ID NO: 345224 - DNA, 60 bp, Homo sapiens; identical to SEQ ID NO: 200363
  chr6:27100389-27100449
  hyper

SEQ ID NO: 345225 - DNA, 60 bp, Homo sapiens; identical to SEQ ID NO: 200364
  chr6:27101049-27101109
  hyper

SEQ ID NO: 345226 - DNA, 87 bp, Homo sapiens
  chr6:27101206-27101293
  hyper
aaagactgagagccaccacaaggcgaagggcaagtaactatctgtactagtttgtggcagctcaagtaaaatcgagtccaaaccaac

SEQ ID NO: 345227 - DNA, 190 bp, Homo sapiens
  chr6:28303261-28303451
  hyper
cggcaggcgctctactttcctttattaggactataagcccagcttctgtgaatcatcacctcagcccctgattggtccggggccaaactttcacttcggcttctgataggtcctgggccaagctaagcagcagctatgaatcatcatttcagctcctgattggtcccggaccaagctgagtcaagcgttc

SEQ ID NO: 345228 - DNA, 73 bp, Homo sapiens; identical to SEQ ID NO: 200404
  chr6:28303489-28303562
  hyper

SEQ ID NO: 345229 - DNA, 208 bp, Homo sapiens; identical to SEQ ID NO: 200405
  chr6:28303607-28303815
  hyper

SEQ ID NO: 345230 - DNA, 150 bp, Homo sapiens
  chr6:28304301-28304451
  hyper
gcttttataataaagtttctgttggggaggggttggggaagtgctggctagttggaactgtttggacactttccaactggggacagatgtggttagggccgttaggctctgttgcggttagagctgttatgctctgttgaagctatggac

SEQ ID NO: 345231 - DNA, 463 bp, Homo sapiens
  chr6:36098070-36098533
  hyper
cggggtcccgctgggcagccccgaccccgtgcctgggccgcacctgccgcagtggctccgtcgggccgggcggaagcgcgggagcgcagggctggacaggcccgggcgtggcggccccggcgcacctgggcgagccggcaggtgggagcgtagcagcccggggcccccgccctcgcgcgggggaggagcgggcggcgcggggcgggcgcagcgggggtcggggcgctgggagcccgttgggccgcgaacgcagccgccacgctggggccgccgagatcgggtgcccgggatgagcctcatccggaaaaagggcttctacaagcaggacgtcaacaagacagcctgggagctgcccaagacctacgtgtccccgacgcacgtcggcagcggggcctatggctccgtgtggtgagacccctgggccgctggggggcggggggcgggcgccaggctctcccctttc

SEQ ID NO: 345232 - DNA, 369 bp, Homo sapiens
  chr6:37666475-37666844
  hyper
cgcgcgagacgggccgcggctgtgggtctgcaaggctgtctgcccggctcgagaggcccccgcccctttccaggcgtctggtgctggggccgggccggagcagctggcggagaggtcgcgctgagagctcctgcccttgccgcggcccacaggttgccaacaggtttgctcgcacgacccctccgccagagcttccctaagtcaccccacattttcctcggctagccactcttcccatcttgcctcccctcgggacctcaggcgcccccaagcgccccgggggcacacctccttccggctgccgaacccgagccccgctccagcggcgggagtccggcactcgggtctcagccgcctcgaaggggccct

SEQ ID NO: 345233 - DNA, 218 bp, Homo sapiens
  chr6:37666866-37667084
  hyper
cgctcctcccaaacgcccgcggggaggggcgtaggctggcaagcgaggctggtggcctcccccgcgcctccgatcccgccccgcgcccaacccgggtcctgctaatctcacctgctccacctgtcgccgttatttatctcagcgtgtgcgcaagaattgttttaggtcggcccgtgggagcgcagacaatcgcagcagctaacaagcggggagactac

SEQ ID NO: 345234 - DNA, 62 bp, Homo sapiens
  chr6:42928259-42928321
  hyper
cgagggtcctctcccgccgtgggattgcacagagggctgggtccgcaggctggctaaaagga

SEQ ID NO: 345235 - DNA, 76 bp, Homo sapiens
  chr6:42928454-42928530
  hyper
cttatgctttaagtgcggagcgggtggctgcggagccaggcgcggcgcaggatggtggacagcgtgtaccggaccc

SEQ ID NO: 345236 - DNA, 372 bp, Homo sapiens
  chr6:46097250-46097622
  hyper
cggtaaaggtgctcgcttatccagtaagacggacagacgtctatggtagatccacgtttcatttatcccaactcactggaactggctgaagcttctccagacttgtgccggaccttggtgcagccaaagttgctttctccgcggccacctaagctgccaggtgcacattaactaagtggcagaaggccatcggcttggcaattgcctgaggcctttccgggactcgctggtttttaggttccatgaagggcatccagatctaggatgatacgaaaagtgcgtggtgggagagtggaatcaacctctactcttaggtccgatacaacccctccaagcacctgtctaaccaatcggaaagaaagttacattcaa

SEQ ID NO: 345237 - DNA, 521 bp, Homo sapiens
  chr6:46097694-46098215
  hyper
cgccttagacgctcgcctggcagctgcgcacactcggagcgccccgagcggcgcagatagggacgttggggctgtgccccgcggcgcggcgcctgccactgcgcaggcgcctcaggaagagctcggcatcgcccctcttcctccaggtcccccttccccgcaacttcccacgagtgccaggtgccgcgagcgccgagttccgcgcattggaaagaagcgaccgcggcggctggtgagtacgcgcctcgcgcgctcggcgttctggggggcaatgtcaccccctctccagtcccctaggggctttgaaaatagagatggtgagaccagaccctatgacccactctcccccactacacgcacatcccctggggcgcggcggggacgtccacgaagggactcaaagagccagggaggtggcgggccgaggcggaggccaggaagggaagaggaaagaaaaattagcaggtgctggggaaggcaacctgtggtgttaagtgtgaagggagggaagtcagccgaac

SEQ ID NO: 345238 - DNA, 119 bp, Homo sapiens
  chr6:53212372-53212491
  hyper
cgtacaattctatgaagcacttcctgccacgggtcccgctatttaaaacaaattaggctgctcgctccccacaaatcccatctagcacctctcggttcctcagtctagctaataaacca

SEQ ID NO: 345239 - DNA, 215 bp, Homo sapiens; identical to SEQ ID NO: 200479
  chr6:53213970-53214185
  hyper

SEQ ID NO: 345240 - DNA, 248 bp, Homo sapiens
  chr6:56818408-56818656
  hyper
cgttcgctgggcactaatatgaaatcacttaaaaggaaacatgccactttcggctaggggacagcatgttcgtcattcagtgtcctactggtttcttaacacgcatataattaatattggtactcaggaaagagaacttcttctgaccttgagcgtgcgcgctaaataaattacctcagaacgaaagtggtgcgatctcaaaacagcatctggggagaaaagagataaatgagacttcatttaactcc

SEQ ID NO: 345241 - DNA, 226 bp, Homo sapiens; identical to SEQ ID NO: 200502
  chr6:72596315-72596541
  hyper

SEQ ID NO: 345242 - DNA, 705 bp, Homo sapiens
  chr6:90121688-90122393
  hyper
cggcttccccagcacctggctcatcgtgcccaccggccggccggcccggggacggcgggggtcccggggtgggggccaagcctcctagccggccgcccgcagcctatttctgaagcggaggtttgtctagagctcagcggggcccggcggaagcgggggccgcgcgtcccccggcgggcggcgcccaggtccgggtcccgcggttcccagcgcgcccgaagccccctcccccgccccgcccgccggcggaggagtcagccggagcgcggcagttcctcccggaggagggagagagagagagactgcgtgacccgagtcacctgacacacactgtcacatactcacatacacaccccgcacgggcgcgcgcgcgctcgcccggccgcgggcaccactcggcggggcgctgggccgaggacacacatgcacacgcacacgcacacgcacgaggagaccggggaggcgcggggcccctgcaccctcccagactcacaccgacacacgccccgtacacggggcccccgggacgccggccgtcacccaccgcggctgcgcgccaggggcccccacgcgcctctccttcacgtggtccccgcacaggcaggggagggggcgccgcacaccctcaatgtcccccccgccgtcccactcccacacgcccgcagagcgtctaccgtgggcggatgcctcctgcttacagtcctg

SEQ ID NO: 345243 - DNA, 74 bp, Homo sapiens
  chr6:90122423-90122497
  hyper
cactgtggcgcccagatcccccaccccagagcagcgtgcccaggacaccctgtggacgctcaagagccccaggc

SEQ ID NO: 345244 - DNA, 61 bp, Homo sapiens
  chr6:106443120-106443181
  hyper
caatgatctttcataactaggctgggcatgttcgtgcagccctctgggcactctgggggac

SEQ ID NO: 345245 - DNA, 104 bp, Homo sapiens
  chr6:106958136-106958240
  hyper
cgccgcccctgctcccccgctttcccaggctcgcctcctcctcttcctgcccacctctatgccccgcacctacccagtccccactctggcaaaccccggagcgc

SEQ ID NO: 345246 - DNA, 404 bp, Homo sapiens
  chr6:106958337-106958741
  hyper
gatataagaagcccaggttttcccccttcctgggagcgctgcggatcattcgcaggcggcccggcaccctcgcataggtgggccggcccctggggctccagccgtgcgaccccggaaccacacgtgtggcgaggaacgggtcccggggcggagtaggcagagtcccaagcgcatccttcagccacacctcctcggctctagggggcggtgagcaaaggcggtcacccctgcaacctcgcccgctacccccacgcactcctccgtgttcacatggtaggaactcccacaggcaaaagcctttccgatgcgctctgcagccgcgggatcactcgggtgtttgaacgctcgcgcgctcctcccattggagctccggctaaggcggggcccaggtgcttgcttcctcc

SEQ ID NO: 345247 - DNA, 333 bp, Homo sapiens; identical to SEQ ID NO: 200605
  chr6:106959606-106959939
  hyper

SEQ ID NO: 345248 - DNA, 262 bp, Homo sapiens; identical to SEQ ID NO: 200606
  chr6:106960046-106960308
  hyper

SEQ ID NO: 345249 - DNA, 155 bp, Homo sapiens
  chr6:106961023-106961178
  hyper
ctttcccctccatgctgaacttaagatagtgaagggccagtttacacagtcaagatttaagatgacacctgtggcagcctcctcagttaattccctttttaacacaagatttaagtttaacgaatgtaaaaataggatatccgttgaagctcaac

SEQ ID NO: 345250 - DNA, 155 bp, Homo sapiens
  chr6:126069942-126070097
  hyper
atgcccgcgtcattgatctagtctttcctaccatcagagctgacacagctccagtccacgggcttctccgcggggtctaggatccacagtccctgggggctgaagacccaatggaagtaactgatggatcgcaaattggaaatcgtaacgtggcc

SEQ ID NO: 345251 - DNA, 330 bp, Homo sapiens
  chr6:137112609-137112939
  hyper
cgctgggcggtgggtggatccataggtctatcgcacaagtacacacagactcttgcacaagcacacacgctctctccggagcggcgagcgacaggagcagtcacgcagcggcgctcgctgcccccaaagtggggcaagaagtaaatgcttcccgcccagaaaaatgaaatgccccgaagaccgccagattaaacgcgggtcccgaccgcgcgggatgggaaaggggtcacacacgcacctgcattgtaaaagcggtccagcacggtggtttctccaaagtcgagtttcccaaaatgcagggtttccagggtggcgcccactgtctcgcac

SEQ ID NO: 345252 - DNA, 61 bp, Homo sapiens
  chr6:137112940-137113001
  hyper
cctcccgcaagctctgcagggcctcgctctcggccaccaccagttgcccttggctcgcttc

SEQ ID NO: 345253 - DNA, 368 bp, Homo sapiens; identical to SEQ ID NO: 200679
  chr6:143247975-143248343
  hyper

SEQ ID NO: 345254 - DNA, 181 bp, Homo sapiens
  chr6:152622733-152622914
  hyper
cgaaattataaacaaatacagggtagacctctgacatgttaagtaattcagctgtctcgagcacatagtttcattttaactgtcattgtttacagtgtcaaagattggcccggcccaacggtagtcaaagagacttaaggaatctgttcctccctctgaatctgcaagatcgaaggctggt

SEQ ID NO: 345255 - DNA, 96 bp, Homo sapiens; identical to SEQ ID NO: 200737
  chr6:163834987-163835083
  hyper

SEQ ID NO: 345256 - DNA, 666 bp, Homo sapiens; identical to SEQ ID NO: 284617
  chr6:163835131-163835797
  hyper

SEQ ID NO: 345257 - DNA, 291 bp, Homo sapiens; identical to SEQ ID NO: 200740
  chr6:163835906-163836197
  hyper

SEQ ID NO: 345258 - DNA, 238 bp, Homo sapiens; identical to SEQ ID NO: 200741
  chr6:163837231-163837469
  hyper

SEQ ID NO: 345259 - DNA, 506 bp, Homo sapiens
  chr6:170124879-170125385
  hyper
cggtcgccgctcctctcccgcctttgttctcgggtcgcccctctcgctggtggcgctccgagagagcagcggagccacctgcccaggccacgcttccccgagcatccgcagctgcacccgggggctgtcggcgcccgccccggagcgtgcgggaggcacagcgggaagaagtcgctgagattcggccctcgtggctttgcgtgcccgcgtggttgatgcctccgccgagaacgcggtcggccgggagccggggaggagcgtggacgccggcctggcaggtacccccgcgagaacgtgggagccggtgtatttcagctgcatttattactgatctcgggctgcaccagggcacttgtaggaccgcactaaaaacagcggaaagtgaggagccaagcctgggtccggggcggcccgccgtacagctggcctcacggattccactgcctgcgcctgcagatgacttgttctggagagtagagaatgttctcggatttaaagtacaatcc

SEQ ID NO: 345260 - DNA, 322 bp, Homo sapiens
  chr7:8476750-8477072
  hyper
ttggggtaaacaggtgaaagccagggcagccaatccaaaagaacagcctttctgactctgtcaccgaagtctgtgcctttacccgctggaacgcaggcggaatgcaaaaagtgtccttcccatttcccatcttcaatcattttcacccccacctgtgttcagtaagcccactgacattgagagaccatggatggagggcagaaagtttggccagaagaaatatagaatttttttattgagagatggggggagggaatgcaaagtgaaagcgacgggggcgggggggaggtaattttaaggattcccttgaccatcgtaaccc

SEQ ID NO: 345261 - DNA, 59 bp, Homo sapiens; identical to SEQ ID NO: 200840
  chr7:19156644-19156703
  hyper

SEQ ID NO: 345262 - DNA, 140 bp, Homo sapiens
  chr7:22893437-22893577
  hyper
cgggagccagtcttctgctacgtaattagacgagtcttgaaagaagcacccaggggcgtggctgaagactttaagaaacaccaggcaagggaggggagtgggtaccagagacacctaacattatttgagtggcaggagct

SEQ ID NO: 345263 - DNA, 1088 bp, Homo sapiens
  chr7:22893607-22894695
  hyper
tcacagccagcgagagtttggggcagactccccagactcggaggccggggcaaagtgggagccggggccaagtgggagccggggccgtgtggggtgggggggggggcccaaggcggggaaggcccgggccgccgacagggggcgcgcgagggcctccgggccccgcgggcggggcgggtgctggacccggaggggccttccggcaactttttggttggtgccgccccgcccaggccccttttaaacttgatctccgcagtgccctcccttttcggccgcggcgcgtgactgggtaagtgggctcggaccttctggacgcaggagccgaccacgtggctccggggctaccccgtgcgcttcctaggcgcgcctctcgctgcccccacgccgaggcctcggctcggcgccgcggggaagcctccgttagggcccctcgggggtgggggcgtcctcgtggcgcttgggcccttcgtcccgggttaggacggcccgtgtccttgtgcgcttgaaggggccgccccctttcctcgaggatcccacccccactcagcagaagccgccaggcgcccgtcacctcccgtgcctgagtccctgccgtccacgcattcggcctacaggcagcttttagtcctttttcaattaaatgattgcattttgaggatcaaattccaaccgcaggcggaggcgccgagccccggacggtctctgggttcttggtgcactcggggctcctgcctgcccaggggctgtgaccgcgcggacggaagcctatttgggaagcgagtgagatctgatgtctgaagcgctttaagtttctaagcggggcagtataatagcggggttagcaaacacacggaggtcatttcactcgcgcagccatcccccaccgccaccagtgccgttcatttgctactggcccgcagtcagataatttaaaggcttggagggacgagtcttgctggagccgacgcctacagtaagttgagcggagtgctgtgagccctaataagggagcctgctttcctcccgaagattcgcttttttgggagtggccagagcgttattacagcacagggcccgcttccaac

SEQ ID NO: 345264 - DNA, 53 bp, Homo sapiens
  chr7:23514425-23514478
  hyper
ctggagtcacatcttcgtttccctgcccatttccaacatcttagagttgatgc

SEQ ID NO: 345265 - DNA, 195 bp, Homo sapiens; identical to SEQ ID NO: 284882
  chr7:25896938-25897133
  hyper

SEQ ID NO: 345266 - DNA, 109 bp, Homo sapiens
  chr7:25897246-25897355
  hyper
ctcaggaaggtgttgcaacctttggttgtaccagaaggaaataagcaaactcccatcacccccacccccattccccgccctaacacggagtaaacttcggcctttttcc

SEQ ID NO: 345267 - DNA, 224 bp, Homo sapiens
  chr7:26192423-26192647
  hyper
cgtccctcgcaccagcgtggatgcatggctggtgcacagcgtggctgccgggagcgcggacgaggcccacgggctgctcggcgccgccgccgcctcgtccaccggaggagccggcgccagcgtggacggcggcagccaggctgtgcaggggggcggcggggacccccgagcggctcggagtggccccttggacgccggggaagaggagaaggcacccgcggaac

SEQ ID NO: 345268 - DNA, 111 bp, Homo sapiens; identical to SEQ ID NO: 200885
  chr7:26192748-26192859
  hyper

SEQ ID NO: 345269 - DNA, 90 bp, Homo sapiens
  chr7:27135176-27135266
  hyper
cgtctgcttcctgatttaacgcgtaggggctgtaaggcgcactgaagttctgtgagccatagcttggaccacaacttgagtgggagtagg

SEQ ID NO: 345270 - DNA, 142 bp, Homo sapiens
  chr7:27136790-27136932
  hyper
ggaggggaatgttagaagagagagagagcttccttttataaccttcctcattctgctgcacgtctagagtgggtgtgggggctggcaggtgggaggggcggtggacaaatggctgatggtggacgggacactttaccccaac

SEQ ID NO: 345271 - DNA, 496 bp, Homo sapiens; identical to SEQ ID NO: 200916
  chr7:29234008-29234504
  hyper

SEQ ID NO: 345272 - DNA, 159 bp, Homo sapiens
  chr7:29234886-29235045
  hyper
aggagcgggcaggctcgcactttctggcgcagctggagcgggggctggcggggcggagaaggttggggtgaagcagagcgccccgacctgtttgccgtgccgcgcccgctaccctggacacccaaatccggagcagaggggagcaaaccctcgctcctc

SEQ ID NO: 345273 - DNA, 168 bp, Homo sapiens
  chr7:37960958-37961126
  hyper
ggggatagcatggtccgggactgggaggggcgctgcgcccaccgagggcggcctgctggcgggggactcagtaacacccagcgaggcggtggcaggtaaagaagggacccatccagggcgggatcaagctgcagagtgccccatgcccaggttcgcccctgttctcac

SEQ ID NO: 345274 - DNA, 102 bp, Homo sapiens
  chr7:50344738-50344840
  hyper
ctgagcagccccgctgtcaccaggagaggagttctagctcccaaccatatttaaatttatgtagacctacatatacccacggaagtcagcctttataaagtc

SEQ ID NO: 345275 - DNA, 79 bp, Homo sapiens
  chr7:99155672-99155751
  hyper
cgcaactgtcagtttcctccgtctctctcggttctattccaatctgctcatctcccctcccgtccccgctttccccaag

SEQ ID NO: 345276 - DNA, 215 bp, Homo sapiens; identical to SEQ ID NO: 201064
  chr7:99156600-99156815
  hyper

SEQ ID NO: 345277 - DNA, 77 bp, Homo sapiens
  chr7:99156982-99157059
  hyper
atttcctagggggcctgctgttttatttatttaaatgagtttatttacgtaaacgcgggcctgtcacggtggttcac

SEQ ID NO: 345278 - DNA, 154 bp, Homo sapiens; identical to SEQ ID NO: 333194
  chr7:99680237-99680391
  hyper

SEQ ID NO: 345279 - DNA, 243 bp, Homo sapiens
  chr7:100167136-100167379
  hyper
cgagcggggcgtggcaggagccagcagggtgcatggaggccccgttccaaagccctctaatcgccagcgccaccaccgctgccacaagtccgatcactggcctcacaccgaggctttctcggttgccccgacgacgtgtccggaccgcagtcagctgatcggtagagacgcccccacgctctctgcccctataaaggctcagtcttggggtcgaggccgcctctcttggacttccctactcaa

SEQ ID NO: 345280 - DNA, 239 bp, Homo sapiens; identical to SEQ ID NO: 285218
  chr7:100167621-100167860
  hyper

SEQ ID NO: 345281 - DNA, 984 bp, Homo sapiens
  chr7:100806337-100807321
  hyper
cggcgctcctccgcctccgcctcctcctgcgcgcgccgcgcctgggcctcccggccgggatagtggcgcgaaggcggcaaggcgtggtggtagtggcggcggcgcaaggccgagggcggctgcagtgtccgcggccggatgtagttggggaaagggtggtacggccctggcgggtacacctcgtcctcctcccgatcccagggcgggagcacctcgttccagtccggcagctcgtctcgtgcgggagcgggggcggggggcgggggctgcggggagcggacgtgggtgggggcgggggcggcacgggggggcggcacgggctcgggaggggcgttcttcttccgcttccgcttctcctccacctcctcgatgatgctgaccacgtcgtccgctggcaggtggagtttggtggacagctcaatgaggctgtcgatcgtctgcggatccatctcctcgtcgtcctcctcctccccgccctcctctgtcccctcggcctccttccgccggtggcccggcgtctcctcctgggagcgcttgtcctcggcgccggcttccccgtcctcctcctccgcgaacaggagcgcgttctgccgcgccctctccgcctcctccgcctctgcctccgcctcggccgcctcctcatcctcttcccccaccctctcctccccgccgcgtctctcctgctccgcctcctcctcctcccttgcactctctcgctcctccgccgcctcctgcagcccccgacccccgaggccgcgctgccgggccccgccctgcagcaaatactggagcagcaggtccgaggcgaggtcggccagccgctcttcctgcgccgcggcctgccgcgtggcctccgcctgccgccgcccggcctccacctgcgccagcccttgctggagaaggcgctcgcccgcctcggagccgcccaggagtgcgctctccggccggcgcgccttggggaacggggcggccacgccttggtac

SEQ ID NO: 345282 - DNA, 81 bp, Homo sapiens
  chr7:129421203-129421284
  hyper
cgttaacaccttgtcttgggctcgagcaaaagaagggggtgaggcagtggaagcggggcccgggaaatctatagtttcccc

SEQ ID NO: 345283 - DNA, 281 bp, Homo sapiens; identical to SEQ ID NO: 201185
  chr7:129421349-129421630
  hyper

SEQ ID NO: 345284 - DNA, 197 bp, Homo sapiens
  chr7:139929854-139930051
  hyper
cggctgttttgactcctgggcttccgccctttagtttacacatttgatgattccgtttgaaaatcgcaacctgaaatactcctcttctaggctggaggcggggttgggggcgggggcggtgggtggcggaaggagggccctcaaacaaagatccgctttctcctgaacaggtgtcaggagaccaagctttgacctcc

SEQ ID NO: 345285 - DNA, 362 bp, Homo sapiens
  chr7:139930346-139930708
  hyper
ccggggtccgaagcaccgcgcactccaccccgcgacgcgcgcatccctcgaccctcgcgcgtccacaccgccgctgcgcctcgcgcccccgcacccccgcaaccccacaccacgccggccgggcggggccggatgcgcagacgtgcagcacgtgcgctgcgcagcgattggcagcgccgcccccacgccgccccgccagggaaagggtgtcccgtgccctgccgcggctgctggtcccgcgggcgggggctgtcggggcgcgcgggccgggccgtgggggtcgccgcccgaagtgaccggggaacaatgacagcccgatggggaagggcggcggcttccctagagggccggttctctggctc

SEQ ID NO: 345286 - DNA, 82 bp, Homo sapiens
  chr7:140771242-140771324
  hyper
cgcctcgttcgcgcttttcaaaatgcaggaagggcgggggagagagagagagagagagagggaaaaaaaaaaagacaaaaag

SEQ ID NO: 345287 - DNA, 219 bp, Homo sapiens; identical to SEQ ID NO: 285467
  chr7:140771550-140771769
  hyper

SEQ ID NO: 345288 - DNA, 203 bp, Homo sapiens
  chr7:140771841-140772044
  hyper
ggtggaggtgggtgtgtgtcggggtgcctggctctggcttgggactggactggggctggccggataactccgcagccgctctcagctcagtcctaggtggaaacgcctgtagcttgcaaggtagcgcctgtggctttctggggaaaaaaagatcaaatgcctcccaagacaccagcgacccaaaccggggatgcagggagctc

SEQ ID NO: 345289 - DNA, 93 bp, Homo sapiens
  chr7:143105734-143105827
  hyper
cggcttctgcaggggggtgctggccgggccccgggaaggggcggggcgcgggggttgggggcgcgggggcgggggtcggtaccttccttggcg

SEQ ID NO: 345290 - DNA, 454 bp, Homo sapiens
  chr7:143105844-143106298
  hyper
cggggcgcagagcagcagcaccagccctagccccaggggccagcgccgctccatagctccgggccgggacctgggacagtggcccggatggcagcgccaggttgcaagggactaggagagccgggcgggccgggcgggggcggggggcggggccagcgccgggggcggagtcccggcctcacctggttcacctccttaaagggacagtagggcaggaaagaaacttgctagactggtaatcaaattcaagaaccggaggcgtcttgacccgaatgagactgcgggcgccgcctagtaggtgggattaagaattgacgaaccttttcccaattctaatcctaaactcaacccaatcttgatccagcttttaacctaattctacctctgacttgaattacactcctatattcctctttctgtctttgtgcaggccccagagctgggtaatagggcc

SEQ ID NO: 345291 - DNA, 312 bp, Homo sapiens
  chr7:156433208-156433520
  hyper
cgagcctcgacgggaacgcacctgcgtctagacgctgacgccgtgcgcggggcgggggccggcgagcatgcgcagtgtggtgtggacagggcgtggttggcaagcatgcgcaatgtgggccgggcggggctggcgagcatgcgcagtatggggcggggcggggcagggctggtgagcaagcccgcggggagcgagcgcggaggcgggcgttgctacggcaacggtgggcggccagggagttgcctgagggaaaaggggcagacgtccctgggttccggtgttcgcggaggagtcgaggcacggagaggcttc

SEQ ID NO: 345292 - DNA, 459 bp, Homo sapiens; identical to SEQ ID NO: 201262
  chr7:156433521-156433980
  hyper

SEQ ID NO: 345293 - DNA, 335 bp, Homo sapiens
  chr8:4851007-4851342
  hyper
cgcagcctgtaggctacttagaagaaaacattccccaactcattcagggagaaaaccaagctcacagagccccaagcccaggagccacccagagaaactccttcccctgaccagcgtagaaggaggatacccgtgcgcccacagtgaatgtatctgacttggaagccggtccagaactcctagcctgtttcacgcaccttgccaacaccttacaacttgcaaggagcgaagtccgggggagaggaaagcgggggcgaccttctagaggcagctactcctcgccggctgaggacgttggagagggaaggaggagaggaggaatggggtgtatgggt

SEQ ID NO: 345294 - DNA, 117 bp, Homo sapiens; identical to SEQ ID NO: 201281
  chr8:4851375-4851492
  hyper

SEQ ID NO: 345295 - DNA, 73 bp, Homo sapiens; identical to SEQ ID NO: 201282
  chr8:4851508-4851581
  hyper

SEQ ID NO: 345296 - DNA, 125 bp, Homo sapiens; identical to SEQ ID NO: 201283
  chr8:4851611-4851736
  hyper

SEQ ID NO: 345297 - DNA, 34 bp, Homo sapiens; identical to SEQ ID NO: 201284
  chr8:4851780-4851814
  hyper

SEQ ID NO: 345298 - DNA, 108 bp, Homo sapiens; identical to SEQ ID NO: 333357
  chr8:6673921-6674029
  hyper

SEQ ID NO: 345299 - DNA, 127 bp, Homo sapiens
  chr8:23021590-23021717
  hyper
gtcagttgtactcccttcccgcagtcacttccaggcactcaggctgggtctcccccagcacctccaggagggcccaggttgtgtgggtgggtgcatggacggacaggaactggctctttccggcagc

SEQ ID NO: 345300 - DNA, 226 bp, Homo sapiens; identical to SEQ ID NO: 201396
  chr8:38326050-38326276
  hyper

SEQ ID NO: 345301 - DNA, 148 bp, Homo sapiens
  chr8:58906804-58906952
  hyper
cgtgcggacataggtgggagtgggggatagggaggaaatggaggcgccgaccgagtggaatggggggtgggtcagggatggggtgggatgggcatcagtagcggggtggagatgttgagagagaggcagggcttggagtggaggtgcg

SEQ ID NO: 345302 - DNA, 212 bp, Homo sapiens
  chr8:61193765-61193977
  hyper
cggggctggagccggagcggagcgcgcgtgggggagtgtgagcacgcgtgagcggcagtgtgagtgcgagagcgcctccgggtgtgaaccgcagtgtgagtgcaagcaggcgtgcgttcggaccgagtgttccagagacccgcgtgggaagcgcgtccggaggccccagcagagcgagggagcggctgtggcctggggagcgagcgcctggc

SEQ ID NO: 345303 - DNA, 119 bp, Homo sapiens
  chr8:61822259-61822378
  hyper
cgaaacagagtggaggctcctttaatcttgacagcccgaatgctacaggggtcacagcacatctgctccggaggaaagacaaagggcaaggtggggccacggtagcccgcgcggggctc

SEQ ID NO: 345304 - DNA, 144 bp, Homo sapiens; identical to SEQ ID NO: 201426
  chr8:61822883-61823027
  hyper

SEQ ID NO: 345305 - DNA, 280 bp, Homo sapiens; identical to SEQ ID NO: 201437
  chr8:67025640-67025920
  hyper

SEQ ID NO: 345306 - DNA, 234 bp, Homo sapiens; identical to SEQ ID NO: 201438
  chr8:67026578-67026812
  hyper

SEQ ID NO: 345307 - DNA, 208 bp, Homo sapiens; identical to SEQ ID NO: 201482
  chr8:80803900-80804108
  hyper

SEQ ID NO: 345308 - DNA, 99 bp, Homo sapiens
  chr8:82193698-82193797
  hyper
aggagcgcaatgaggcctgggggtggccgtgtgttgccatcctggcctctgccacttgagggtgaggaggaaggaggcagtgggctttgctggaaaacc

SEQ ID NO: 345309 - DNA, 419 bp, Homo sapiens
  chr8:99956867-99957286
  hyper
cgaagacgtggatctgctctcgctttagctgctcgcggtcctccagatcatgtccgcgactcctgcgactccgcgcggaaaaaaaagtttgccaggcgtggactcaatgacctttccaagctgtgcgcctcgctgcctggaccgggtctgagcgcggctgcccaggttgacctttctgcgggaggtgagtgttcgctctgggaaggggctgtagctgccctttggaaggaagggtttgggggtgtaagaggcgttcagattctcggtctggtgtgccccaaattcagatgtgaaaatagatcatggggatgcaatcccagggcactgtatttctcacttccttgggtccctggcacgcgactcccagctaacacccaaccacacacatttctacatactgtttcttaattttgttttgg

SEQ ID NO: 345310 - DNA, 51 bp, Homo sapiens
  chr8:99957709-99957760
  hyper
acctgttagccgagaacaaaagggggctggcgtttcccgaagcgaaagggc

SEQ ID NO: 345311 - DNA, 429 bp, Homo sapiens; identical to SEQ ID NO: 201548
  chr8:104511554-104511983
  hyper

SEQ ID NO: 345312 - DNA, 270 bp, Homo sapiens
  chr8:107669733-107670003
  hyper
cgggaggctgggtgtccaccctttcccctgcagtcctgaaagtccggtccgagcgcggacggggcggggaggggctgggcgggccaggccagctccattggcgccaggcgggtgggggaatgcgctgagaggacccgtccagcttgcttaaaagccatcagttttctgaccccgcatcggttccaggaagaatacacctatgtgacaagctaagttctgcctcattttgcatttagaagccacaagaaaaacttttcgaaaacttttgtc

SEQ ID NO: 345313 - DNA, 633 bp, Homo sapiens; identical to SEQ ID NO: 201557
  chr8:107670289-107670922
  hyper

SEQ ID NO: 345314 - DNA, 105 bp, Homo sapiens
  chr8:107670978-107671083
  hyper
gcagaacctagaaactttctcagttcctgtttattttgtgttgtgttggccgatttttttcaccacagtggctttgtaccattctttaaaacagtcatttgtagc

SEQ ID NO: 345315 - DNA, 818 bp, Homo sapiens
  chr8:114449602-114450420
  hyper
tgtgttactactgtagttgcagtatatttcaggcaggcttctcccatttattatcctgtgatttaattgaaaaaggaaatcacagagaattttctcaataaattctgccttcacacggaaaagaatgtatttgaacacatgtatttacatactcaaataactacgtgtaaacccttcaccgggtttttatgattcgggaaacggatttcatccgtggcctgggcgggggtggggtggggagggaagtcaatgtcgtttcctcaaatagttctccctttcatcctcccaacccccttttcagtttgtgtgtgccgcagttaaactactttatctgtggtagttatctagaacaaacccatttgtcttaattctgaatcggtaccaaatatgtaaataggaggtttctttcaaaacgaaaaatgtatgtatctatacatctggatctgcttcccccatgcaccacgcaagggttaagattgcacaagggaagagttcttgcgccatctactggccgtctccgagccgcccgttcttccttcgcatgtataagggaccctgtttttgccatcccttggtgtcaggggagctgtgtccccgggaccagtatgtcgtgctccttgatttttttcgaccacggtcctggcccaaatctttcaatgaacaagttccttagattaggcaactgattggtgatctgaccttttcgggaatctggtcccctctcagcagtggggagtgccacagcgctagttctgaaacaggatattgctgttgcgtgtggctccatttaactgcctcaggctatcatgggcgtgagc

SEQ ID NO: 345316 - DNA, 449 bp, Homo sapiens
  chr8:142317706-142318155
  hyper
cgcgagtggtgtatcgctggttgaattctcataagttagagatagcaggcaggggttagaaggacaagacagggtcaggaccaggagttagaggcgccaggctcctctctgggtagagaaaccgaggaactgggggcggggaggactgatgggtgcgaaagcgggccgggtccaaatgaaggcgcgcgccccggggtgggggccggggtggggggaatgagggaggctgcagggctggggaccagggcaggtgcaatccggaaagaggaggcgggaaggaattggggggccctgaggagccagcgcaagccgggtgggggcacgtcccctcccccggagaaggtgcggggctggggctgcggcgcggacccgacctggaggccgaggctgtgcgggaggtgggggtggggaggctgcaggtgcccggcgcccaggtgcgaggtgcaggg

SEQ ID NO: 345317 - DNA, 415 bp, Homo sapiens
  chr8:142318184-142318599
  hyper
ggccactcacctgtctcctccggccggggccgcgggggcggcggggcggccgggccgggccgggcaggggctacgggggcgcggagccccgggcgcaccggggtcgggaggcggctgcgggtccgggcgggggctgctccctcggccggccggccgggcggtcagtcagcgacgcgggcgcggagagagcgctgcgaggctgcggccggcgcgcggagacaacgccgctttatcgggtcggaaacagccgctccgcgccgcttccgctgacgcagcgccggcccctgcgcctcatgactatgcagcacccgccgccgcgggacggggattcggggggcggggtctgcgccgcgcgcgctcattggcctccgctgccgcccaccccgcccccgaacggccgccccgcccccgccgc

SEQ ID NO: 345318 - DNA, 77 bp, Homo sapiens
  chr8:145698674-145698751
  hyper
cctgcacccctacgccgtcccctggcagtcctccatgccccagtcccgacaacggctcgggctcggctctcgcgccc

SEQ ID NO: 345319 - DNA, 1382 bp, Homo sapiens
  chr9:14314414-14315796
  hyper
cgatctcctgaaaaattccaaacgataaatcccgctctcccgctcggctccaaactcctctcttttctgctctaggctcttttttttccctccctctcttgctttctttcgttgcaaaacttggaagttgaaaaattcaccggttccaccctctggaccccgctcgagctctctccaaatcagacttaaggattgttttattatttaattacacaatcatcgctttactcctcctcctgcaaacgcgcattccttttgcaccagcctctccacaccccccgcccccccaccttcctcctcctcctccttctccttctctccccccacctctccctcatttgttaaaggtatcctaccggtgctacagaaccatgactttttttttttttccaaaatagctcttctttccgctgccctccccacaccagcacacacatacacacccccgaaaacccgccctggaagaggtatttcggtgctcgctgcggactcttttaagccgcgggaacatccgagtgggagaagcaccgaaaccgtctgagcccgagaaaggaacgagtggaaaattccctcacacccaggccgcccccaggccggggctggggcgcggacactcgcacccggggcgggctcagtccgcggagcctgcggctgccgggaaaagggggaggccgagcaggcggggacctgagcgaacttgggctcaagtagttggggcgcgccggcgtggaccaggggggtgcggcgcccagcccccgacggccccgcccggagcccgggttcgcggatagggagggggtgcgggttcgtcccgggtctgcccaccaggggcccgcacccgaggcagtcgcggcgcgcggcgcttcgccgcggtttgccgccctccccgggggtgccccgtgcacgtggcctcgctctgagcgggaggaccgggccgagccgccgccgccgcctcttgctccctccacctcctccccgcgcccggcttcgctctcctcctcctcctcctgcagccccgctggctggctcccaatccccaccccccggggcccggggcgccggcggaaagcgtctccctacccgcccgggtgcaggcggggcggggccgcggcgcgcccggggctgcggggcgggccggcgggcgcgcgcgcgccgctgcagccctccagaggctgcgggccctgagccgctcggcgcccgcgccggctccccaccgcggcgctgccccgcccccaccccgtcgcccgtgcaggctccgagtgaatgaacttgattccagggattttgaagaaggcggttcgccttgcaccctttctgcaccccccgcccacatacacacaccgccccccaaatccagttttctgcttggggtggatggggac

SEQ ID NO: 345320 - DNA, 96 bp, Homo sapiens
  chr9:19127135-19127231
  hyper
cgatagcaatcgccctaaatctgttggcaggaaagaagcctcaacgcacaaaggcaagggtcgaaagcgcgggttcagcagaccgcccctacccag

SEQ ID NO: 345321 - DNA, 71 bp, Homo sapiens
  chr9:21395928-21395999
  hyper
cgcttcctgattgttcatgattttcccctttctccgaattcgggtctttctccgcagaaatggccctgaat

SEQ ID NO: 345322 - DNA, 36 bp, Homo sapiens
  chr9:21396327-21396363
  hyper
gcaaaggcagctttgtgcgctgttagcagtggtcgc

SEQ ID NO: 345323 - DNA, 568 bp, Homo sapiens
  chr9:27528536-27529104
  hyper
cggcctcgctggggtcgggctcctccactttcccagctgggatcccctgccggagctggcgtgggggccggggagggggaccagaggggcttccttctctccccaagccccgccagatgttggaaaggcaaacaataggggaaacgcggagaaacaaaaggccattcgccacgatctcagtcggctgcgtagagagatctctgtggggagggttaggggagagggtcaggaaagagcgcgaggggggggatcccgagagatttagagtctctggtacttgccaggcaccaggggtcggcgctttaccctcccagcaggggtctgaaggtgggaaggggcaatcaaagaaaacttgaagggttttcaccttcttccccagttcagggaaagggaggggctgggattccagatgtttgacagttgttggccccaaagttaagcgcgatttgtacggcctttacacgctccccacctccgtgaggcatcgtcagccccgggggcgacctggctgacggtgcggacttcccctacgctgccccaagccgagactcctccctcaggatcagga

SEQ ID NO: 345324 - DNA, 182 bp, Homo sapiens; identical to SEQ ID NO: 201692
  chr9:27529157-27529339
  hyper

SEQ ID NO: 345325 - DNA, 567 bp, Homo sapiens
  chr9:27529340-27529907
  hyper
gccagaaacccaggcgccggcaggggtctgaagaggactccagccccggaagcccgtggccggcgggcagaagaccggtccgccgcctcccgcaccttcttgcacccgcgcccaggtgcgccccaaacctcgccgcccgcccgggcgagatcgggagcgagcagccaccgggctgcgccgcctcccctagcttggagcgggttcttactcaccgtggggttttacctccagcccagggcccggtcggctcccttcgccgggtcagctgcagccagcgcgaaagaaaatggtgagctcggggcaggtggggcgtcgcttgccaatccacgcaagggactctgccgccggtgcgcgaggtcccggcgagccaaccggcggacgggcgagcgcctggctccagctgcagccgccgtcgctccggagcagccccctcatgcacccagcgcgccgcgcagccggccggggctcgactgtctcgcggggacgccgagcggggacccctggcggccgcctgcggtatggcagcaccgtggagagaaaagtcgtctttgggatcatcttccctcc

SEQ ID NO: 345326 - DNA, 62 bp, Homo sapiens
  chr9:37034135-37034197
  hyper
cgctcacaggtcggaataattcaagccttccgctcccccgccgagctggggtagctgatcac

SEQ ID NO: 345327 - DNA, 131 bp, Homo sapiens
  chr9:117880425-117880556
  hyper
aggctgtggccggtgcagccaactttggctggcttatatagcgagctccttcctctgtaatgggacgcctcgcctccagacatcctttcccactttttcagttggcgaattaaaggaacagccctcccagc

SEQ ID NO: 345328 - DNA, 82 bp, Homo sapiens
  chr9:124990438-124990520
  hyper
cggattcaggcgcctttcgagggccagtcggagggaaacccggagcaaaaagagagcgagatcggggcgaaacgggaccaaa

SEQ ID NO: 345329 - DNA, 142 bp, Homo sapiens
  chr9:124991012-124991154
  hyper
agtacatgggccggggaacctcgggctcagcgggcgcgcagcgcggagagctgcgccgagggggaccacagccgcagtgggagcagaggctgctgcaggagcaggaggagagccgaggcgccggccccgccgccccgggccc

SEQ ID NO: 345330 - DNA, 135 bp, Homo sapiens
  chr9:129400713-129400848
  hyper
cgcagccctgccaccctggggagctgaccccgaccccacccggccccccacgtcccagctcgggggctcacaaagggagaggagggaagagcaaaatcgcagagatttgtcttgtctggggctgacagcggagcg

SEQ ID NO: 345331 - DNA, 112 bp, Homo sapiens
  chr9:132804293-132804405
  hyper
cgggccgccgcactgcccatcccctgcccagtgatttccccaggaatccggggacggcaggaaaagagctccatccacagccagcccctcgcctttccggggacggccctca

SEQ ID NO: 345332 - DNA, 207 bp, Homo sapiens; identical to SEQ ID NO: 201905
  chr9:132804455-132804662
  hyper

SEQ ID NO: 345333 - DNA, 103 bp, Homo sapiens; identical to SEQ ID NO: 201906
  chr9:132804693-132804796
  hyper

SEQ ID NO: 345334 - DNA, 290 bp, Homo sapiens; identical to SEQ ID NO: 201907
  chr9:132805028-132805318
  hyper

SEQ ID NO: 345335 - DNA, 292 bp, Homo sapiens; identical to SEQ ID NO: 201908
  chr9:132805445-132805737
  hyper

SEQ ID NO: 345336 - DNA, 55 bp, Homo sapiens; identical to SEQ ID NO: 201909
  chr9:132805893-132805948
  hyper

SEQ ID NO: 345337 - DNA, 1351 bp, Homo sapiens; identical to SEQ ID NO: 333814
  chr9:133710055-133711406
  hyper

SEQ ID NO: 345338 - DNA, 630 bp, Homo sapiens
  chr9:135286324-135286954
  hyper
agcatcacgtcgaatgttcatttccgttcgatcatactaatttcttacccaaattacaaccctaagagaaaaaaagcataatctttggcctaggaggctccgcagacaagaatgagggagctgcggtttcgggctggatcactttcccttccattacacttccctcctccccacctttagcctcgcttcccgctgatgggaaaccaacactgctgtggcggccacaccttcccgggggccactggagaagtcaggctgaggcttgggggtcagggagcaagcctcgaggcgaatttatcttgcgccgctggagggcagtgcgcctttaaaaatgcgccccgcgtcccaggtgcgggagtggaaggcgcaggtggtaaccgtggattcaacaacaattatttgtgtgaccgccaggcgctgagtagagcccagaggtggtggtggcggtttgtttttgttttggggaaaagggaacccgtgctagaattaactgagttaattggctcctggcaaaacattgactccctcctcttgccttccctaaactcggtcctgagaggaggaaggatactgcctaggcgcaggctgcacctgggggaggctggcttcccacactcgtgcctttccatc

SEQ ID NO: 345339 - DNA, 188 bp, Homo sapiens
  chr9:140703858-140704046
  hyper
cggcggccctgcgccctcggagggaggcggggcagagctcaaatggaagcagagcctgcggggtggagaccgcacccctgcaggggtctgccttgggccccgagcctcctcagccgccgcagcaaagcggtcagtcaggcggggcttggtttatggcatctgggaagatcgctgaccattcccgaggg

SEQ ID NO: 345340 - DNA, 327 bp, Homo sapiens
  chr9:140704131-140704458
  hyper
gcaatcctgcctctgaggatgcatccttgagaaataatgtagaaaatgaaaagcactaaaatatttgctggcattgtattccagaaatataccaacagacataaaccaagtgttcagtaaaggaaaggtccggaagctgagtgactgtgggggaagggtccggaggcggttccgatgccgccctgtgtggaccgtcggtgatgggtccggaggcggttccgatgccgccctgtgtggaccgtcggtgatgggtccggaggtggttccgatgccgccctgtgtggaccgtcggtgatgggtccggaggcggttccgatgctgcccctc

SEQ ID NO: 345341 - DNA, 96 bp, Homo sapiens
  chr10:1780056-1780152
  hyper
aacagtttttaactagtcaattcattaccatgctccttgtgtcaagggggggaaatacctctttcagaaatgcagagaccgcacttcctcagaaac

SEQ ID NO: 345342 - DNA, 60 bp, Homo sapiens; identical to SEQ ID NO: 201967
  chr10:7453036-7453096
  hyper

SEQ ID NO: 345343 - DNA, 165 bp, Homo sapiens
  chr10:12391705-12391870
  hyper
cgccgcagcccgagccgcccggcatccccgccgcctctgcgcccgcgccgcgcccccggcgccccctccccagcgcgcccccggccgctcctccgcgccgcgctcgtcggccatggcccgggagaacggcgagagcagctcctcctggaaaaagcaagctgaaga

SEQ ID NO: 345344 - DNA, 324 bp, Homo sapiens
  chr10:12392327-12392651
  hyper
ccagtcgttcccatttctgtccttacatcatgtatttctatggaattggcatctgcacgtacgaggtgtaggcaagactttgggtggccacgcgaggatggaagggaagggcttcgcagtgctcagggtcacacgtgggcagagcctcaccggagggtctgtgcatttcacgcgggctcggccgcacgcgccggggagcgcgtctccaagggagggtctgtgcgcgtcgctgcgcgggcggtgctctctccgggctgcatcgagtcccatgctgatggctgtgtctcaagaaagcagaaataatccgaagtcgatggcaggaac

SEQ ID NO: 345345 - DNA, 208 bp, Homo sapiens; identical to SEQ ID NO: 201993
  chr10:17270445-17270653
  hyper

SEQ ID NO: 345346 - DNA, 116 bp, Homo sapiens
  chr10:17272233-17272349
  hyper
atttcttaaaactaccactttgtgtgcagttgaaggcccttgggcacaatgagagccagtcctccaaactttcagaaagtttcctgccccttctggcaggctgccaatcaccgggc

SEQ ID NO: 345347 - DNA, 102 bp, Homo sapiens
  chr10:22517909-22518011
  hyper
cgcaaacggagatgtttacgctgacagggaacagacaaaagggcggccatgcttcaacaaaatgtaggagttttcagtttgcagcttgaacttgacactgtt

SEQ ID NO: 345348 - DNA, 60 bp, Homo sapiens
  chr10:22518450-22518510
  hyper
gctcgaaccaccaacctttcggttaacagccgaacgcgctaaccgattgcgccacagaga

SEQ ID NO: 345349 - DNA, 32 bp, Homo sapiens
  chr10:22626103-22626135
  hyper
ttttgcatgaaatccagaatgtaaccatttgc

SEQ ID NO: 345350 - DNA, 78 bp, Homo sapiens
  chr10:30024003-30024081
  hyper
cgccttctggagctccactcggggtgccagggactgctggctgtcacccggggactaaaccactcccttcggggagcc

SEQ ID NO: 345351 - DNA, 508 bp, Homo sapiens
  chr10:30024793-30025301
  hyper
cgcggggagcgggtccccgctcgggatgattcacttcgctccttacctggaggctcgcgcgtccccaccccttgcgacccgcgcggcggccgggagctggcgccctctgctgggccaccaggcgggagcaccctcggactgggcaaggatcgggcggagagggtggggacacagaggggggccaagcacaagcacccctgcctctctcaacgcgggcaccccttcccaaaacaggggccagtgcgcggggaccacgctgggacgactctcgggggaagcaccagagctgtccccacgccccaggacacgaactcgcgcccggagccgaccccctccacggccagcgggtccagccgcgtcctcggaggtggcccaaggaaaccgcgatgaatcggcataagcacgtcctatcttaaaacaccggaaaggcagattttactttgtttggaaactaagtttgtgtcctgtgtctcagtagctctcagggtggtggcagtcacgccccccc

SEQ ID NO: 345352 - DNA, 790 bp, Homo sapiens
  chr10:31607954-31608744
  hyper
cggttgccgcaaaccgcccggtccctagcaacaaggttccggccgtagagcgagagcctctaggtgtaaggaaggtgatgtcgtaaagccgggagtgtcgtaaaccaggtgcggtggggaggggggaggggtggaggcggaggggtgggggggaagggggagggagggggaggaggtgactcgagcatttagacacaagcgagaggatcatggcggatggccccaggtgtaagcgcagaaagcaggcgaacccgcggcgcaataacggtgagtggcggaggggaccggggagcggcggagtcagggggagctgggcagccggggcgcccccgggggtgaggggggcgagccgggctgggggcagccggggcagggacggcaaagtggagtgggaaagtagaaagtagtgctctctgcccccctccgctgccgccgctgccggagccgcgccgcggccgctcgctctccctgaaccgttatgtctcttacctggtctctctccgcctagcggctcccgccgcccctgccgcctccctggaccgttagccggcgccgacgccgccgcatccccggcgcagggcgggcggccgggacgcactggccacttttctggtcccgggtggagcggctgttgcttctttccgcacttttccccactcttgtgcccttcggcgcctccctctccccctcctcctggccccctcagcgcgattctccctcagcgcccaggcccccgggagccgcggaacaaacttgtgcccggcgctgaccgtgcaaagtggcttccgcg

SEQ ID NO: 345353 - DNA, 252 bp, Homo sapiens; identical to SEQ ID NO: 202037
  chr10:31609416-31609668
  hyper

SEQ ID NO: 345354 - DNA, 107 bp, Homo sapiens
  chr10:44806674-44806781
  hyper
tccaccacaggagggggagcacgcgccctgctgaccgcacgcccacgtgatatcgccttctgccatcgcagaaagcagcggttcagcctctctgcctgcacacttgc

SEQ ID NO: 345355 - DNA, 197 bp, Homo sapiens
  chr10:44882100-44882297
  hyper
cgtcgggcgtccccaggcctttgctgggctgggccggggagcctggccgctcaccggccgcagcgctggggctccggcgccctctggtggcggcgcctccctccccgctcccagagctctggccagctccattcctgcgcagctgatgaaacccgggagggcgaaggggtccgcgggaaatctacacccgggtggag

SEQ ID NO: 345356 - DNA, 412 bp, Homo sapiens
  chr10:74079281-74079693
  hyper
cgtttgtccgctcagaccagacggggcaaagggcagccatcaaaggtgtctgggacgagcccggcggggtaatgggccgctagggactcagtctggcccgggtctcagccggggcagaaggcagccgggcgagggccgcgggtggggggcagggggccggggacaagcagccccgcccaggccggcgcgctgtgtgcacaacgtgcagggctgcgaaagcggatgcggcctgatggggcaatcgctggcaacgcgccgcgggttgtcagcgggcgctggggggtgggagcccggcgccggcgggccctgcctccagcattggccccgcccccagttccgcagtcgtggctgggtttcggggagggcgcccggtgcggggggcgcccagggcctgcgcacacgggtaggcccg

SEQ ID NO: 345357 - DNA, 179 bp, Homo sapiens
  chr10:74079752-74079931
  hyper
cgttcggttccgctcctgtcgcaccaccccctcactgctctgacagataccaggagctggtgccaacccgcagacacacctgggcagccccacgtgggtatcgcacgcgcaggggcacatctgccctgccgggtttggagagcagttgcaagtcagcccctggaatgtggtcccgtgcc

SEQ ID NO: 345358 - DNA, 417 bp, Homo sapiens
  chr10:89621342-89621759
  hyper
cgaatcagctctctcacggtgacaggtcagcccaatcggggctgtaaacagacttgacaggtttgttctgggctgacggccattgactaggttctcagaccagataagtcacttggctgagtccacagtaggtggggcgcgctcaccagctcaggggtagtgactggacgtttgttgcaacatcggagaatgcacgctctgggctgcagcaggagataccctcaagcacagaaccaaaagggttcaccctaagcggcagggcatcagcgatggagaggcccgagagccctagcgcccagctccttttcccacgtttgggaaggcgcagaataggtcgatgtagagcaaggagtgagtctcaggtctcagtcctttggcttgctcttagggtagcaggcgaggagtggcaccagtttg

SEQ ID NO: 345359 - DNA, 148 bp, Homo sapiens; identical to SEQ ID NO: 202167
  chr10:89621836-89621984
  hyper

SEQ ID NO: 345360 - DNA, 853 bp, Homo sapiens
  chr10:89621985-89622838
  hyper
acttgcctccggagctatcactggggagtgggaatttggaaagttccccaactagggacacacgtgacctccttcggaaagtagttccgactgtggcccgtgtatccttccacctccttttgaaccctcctaggtctcctcgccccgcccactcgctgggctgcagcttcctaccgttccgtactttccactcaacccggtaaccccaaacgtgcacggtccggccggggcgcgcggagcctggccccgggcgatccatcctgccgggttttcacggcggccaagggggggcggggctaggtggtctctgagaaccgagcttgactccgacgccgcgaaccgacctggagcccgaggggaaagatgctcgactctcttgggggcaccggagcgggcgcaggagaggcctgcggggtgcgtcccactcacagggatcctctttcagttcatttagataggtgccctttgggcccttgaaattcaacggctatgtgttcacgttcagcacgctcggctgagagctttcatttttagggcaaacgagccgagttaccggggaagcgagaggtggggcgctgcaagggagccggatgaggtgatacacgctggcgacacaatagcaggttgctctttgtgctaagactgacaccatgaggacacagatttgggggaagggggaatctctaggcaaaggctgttacagtcaaatctctgcgaacgattgtgatccgacagcggtgcaaaaggaaagagcgaatgcagtccacgccgcggaaatctaggggtagaggcaaggggggagggtattccccttgcagggaccgtccctgcatttccctctacactgagcagc

SEQ ID NO: 345361 - DNA, 53 bp, Homo sapiens
  chr10:90342577-90342630
  hyper
cgcggggtactcctgccgggcccccaccctcgcccccaccctcgccccttctt

SEQ ID NO: 345362 - DNA, 57 bp, Homo sapiens
  chr10:93647662-93647719
  hyper
tctctttcacttttcttcccttcgctaagacttttttatatttgtaagtggaggcgc

SEQ ID NO: 345363 - DNA, 761 bp, Homo sapiens
  chr10:98479725-98480486
  hyper
cgccccctgtgggtccacggagcccaggagacgcgtttggccctgtagaccatccacatcgcccgccctccgcttctctcaactcgcctctcgcttcagagtcggagggacaggggaagcgacgctcagacactcctagggccagaggtggagggagcgaaggagaccctgaagaagtgggagggggtcgggccaggcaggggctgaagagaatcgcgccacaggctgggacgggaaacgtgggaaagttggagtgggaagtttgcgacagggaacatagaaaagagcagaaagagggcaagatccccgcacagaggacgcaaacagaagcaagcgggggagcgcgcctcaagggatgcggggtacgagagaggggccgggagcccggggacccgcggcgcctgcctacccacctgaggctgccatgccgcggggcgccgctcacatccctggctcgctgcgtgcccggggccgggaccggggccggcggcgtcctggctcgggctggaggggcgccgggctccgcgcgggaccggccgccgctctggcgcttcctccctcagggcagcccggcctcgccacgagggcgtgtccacagagtccgccccgcctgcgggactcggcccgcggcacctgcacccgcggccgttggggaggggaagtgagaaccccatgccggccgccggccagctccccccacggccccctgctcaggggcagcgagaaggcgggggcttcgcgccacgtgcgccccactcctc

SEQ ID NO: 345364 - DNA, 124 bp, Homo sapiens
  chr10:100994695-100994819
  hyper
aaaaaattttaactccgatccaacttgcccaccactcaagcctctgcttaaattcgttttctgagagtgggagagaactgacgaaacgatctttccgtggaaaattccagtttcgtgcaatccc

SEQ ID NO: 345365 - DNA, 109 bp, Homo sapiens; identical to SEQ ID NO: 202224
  chr10:102587493-102587602
  hyper

SEQ ID NO: 345366 - DNA, 163 bp, Homo sapiens; identical to SEQ ID NO: 202225
  chr10:102587906-102588069
  hyper

SEQ ID NO: 345367 - DNA, 33 bp, Homo sapiens
  chr10:102995986-102996019
  hyper
cgttaatggtagtcagctccctccctttcacag

SEQ ID NO: 345368 - DNA, 737 bp, Homo sapiens; identical to SEQ ID NO: 334066
  chr10:111767130-111767867
  hyper

SEQ ID NO: 345369 - DNA, 239 bp, Homo sapiens; identical to SEQ ID NO: 202308
  chr10:118891774-118892013
  hyper

SEQ ID NO: 345370 - DNA, 760 bp, Homo sapiens
  chr10:121301911-121302671
  hyper
agctctgcgctcccgtcgcggctgggaccgcgaaggtgcggtacccagcggggagaggtggtgcggtcggccggggctccagtctgggaggtaccaccgagccgcgcccgagcacaagagggagggcaggaggccgggcgggcgaaacggcgccccgaccccgagcccgcgggcccccgaagccgcttacctgacggcggccgcttcctgctcagccggctcacggcgcggttgaacatcgccgcgggcgcccgaggaggaagaaggagcagcccggcggcgcggcggctgagccggaggaaggcgaggaggaggaggagggcgaggaggaggaggaggagggcaaggaggaggagcgggctcagcaccgccccggagctctaggtccccgcccgccgccctcctcctagccaggcgccgcgtggcgcgctcagtgcgccctgcccgcccccgctggtgaggactcgcggttccgctccggggtgcccgggcggggcagggcagggcagccccgggtgacccccgatcgcccagagtgtgccccgcgcctgggataaggtgcactggcccagagggagcccgcgccgccgggaacttagtagccccgcggaggcggttagcgcgtcccggggtccctggccctcgcctgagatgccgccccggcccgccccgcccagcttcaagctcccgggcccatcgcggtctcccgccttctccctgtagccccggagaaactggcacggcgccgcgggcgcaccgc

SEQ ID NO: 345371 - DNA, 138 bp, Homo sapiens
  chr10:122708760-122708898
  hyper
aggttaatcaatcagcagccgctcagtcacccatcccttccgcatcagttgcgtggggctggggatcatgcctagggcgggaggcgtgggagcgcagggcgccccgggtccggatccggctacaggggcgaacagagc

SEQ ID NO: 345372 - DNA, 119 bp, Homo sapiens
  chr10:123357495-123357614
  hyper
cgcgacctgtgttgtccccgcgccccgcgtgggtcgggatggagaaagcgacgagcccggggttgcggggagcaactccaaacgcagaagagtggtccttgggtcttcgccggcgccaa

SEQ ID NO: 345373 - DNA, 106 bp, Homo sapiens; identical to SEQ ID NO: 202340
  chr10:123357660-123357766
  hyper

SEQ ID NO: 345374 - DNA, 375 bp, Homo sapiens; identical to SEQ ID NO: 202341
  chr10:123357893-123358268
  hyper

SEQ ID NO: 345375 - DNA, 203 bp, Homo sapiens; identical to SEQ ID NO: 202353
  chr10:125851929-125852132
  hyper

SEQ ID NO: 345376 - DNA, 124 bp, Homo sapiens
  chr11:12131738-12131862
  hyper
cgtacacagtcggtactagaagtgccatgctgctcccccatgtccaaaaggggatgccgtgtcttgctttccagccgcctagaccaagaagcgtgaggcccaggccctcgccgctcccttgata

SEQ ID NO: 345377 - DNA, 287 bp, Homo sapiens; identical to SEQ ID NO: 202443
  chr11:12132212-12132499
  hyper

SEQ ID NO: 345378 - DNA, 796 bp, Homo sapiens
  chr11:17035791-17036587
  hyper
cgggtgcccgcccggcccccgcccccgcgcccccacccgcgtccccgcgtccccgggtcctcgcgccgcacttgatgaagaagacgcggccatcccggcacaccccgtaggaccaatgctcaggtaaagtgtcccgcccgaccgtcgccgccgccatgttcgccgagcgcggagccgccgcggggtgggggggagggggcgggggcgcgggcaggggcggaggcgggggcggtggcgggggctcggcctgcgcgtggcccggcggcgccgcgaggcgctccatccaggcgcgggctcctgagggagcgaccgcccggccgggtcctggcgcccggagttcgcagccgctccggccaacccagcgcagtgcccgcggcctttgtccccgagccttccccgcccccagcctgctggcaccggcgctcccctttgcccccgaggccgggagacccgggcggcgcggggggccgctggcgggggccgctggcgggcgcgcctgggcagcttcggggcgcgcggttggacccgaccaactccgaaaacggcgagcgcccgaacgctcagtaaaccccagccgacccgcaccacagaacttcccgacccgggaactccgcttgtgtgtgaaccaagttaacactcaggttcctgccatattcccagcctccttctcttcccctgtaaggttaatcgagtccacacgggattgttgtgtagattaaatgaagtaacaatcgcataaagtgcttaaccggaccatggcatgtagtaggtgctctatcaacggcaggccgagcgc

SEQ ID NO: 345379 - DNA, 982 bp, Homo sapiens
  chr11:19733991-19734973
  hyper
cgaggctgcgggcgtgactccggaagactcaaaccgttaaggtgaccggagcaatttgaaaaaggaaacaaacttccctcgagccgtgcccgcgtggctctggggcggacggttgcgttcgaaagggcatttttcaaaagaagggtttcaggaacgcaggggtgtgggccccccgggaggcgcgcggccggggcagtgccgcaaagcggccaccagcccgctttgtactcgcggccaagcgcggccccagagtttcggcggcggccagagtttaggccacaccctctttgcagtgagacccgcggccgctgattggcgcaccgtggaccaatgggcgcgccggggcggccccggctgtcagcgcgcgccgcagcagcgccggcagcagcctgtcctcccctgcgctgagccccgcagccagcgcagccttcccgggaagcgcggcggccgctcccgagcgcagccctgcccggcccgccagccgcgcgtcccggcgcccgcgccccacggccacagccttgcctctatctagctcacggagcatgtgcagacccgcaggcgctaaggtgctctcagtccgggggccttctgggcagcggtgactgtcaccccaagagagacctttcgggggctcttgccgcacctctgctgcgtcgcgggtgacactgcggtgctcgcgagcagggtggcagctgcctctcggtggagacgtcttgggacccttgcgcccttcttctctccttccttcgctgctgtctcctttccttccttggctgctcgctctttctctcgccggctcagacccgtagcctccggaacgggactcgtgggtcgccgccgcctctgtctcttccaaaggggcctcctcacttcggagatgcagtgacaagttaatatgggcgtccaagcctctgtttcccaggaggaaatttgcaagaggcggcagcccctgagcgcccagagctcttgaaaggccacccag

SEQ ID NO: 345380 - DNA, 338 bp, Homo sapiens; identical to SEQ ID NO: 202485
  chr11:19735066-19735404
  hyper

SEQ ID NO: 345381 - DNA, 917 bp, Homo sapiens
  chr11:19798519-19799436
  hyper
cgaccatctttcccccttcgcgcccaccggcggcagtggcgaagggcccactgaagcgccgggtgccacgcggggcggcccgcgggccagctagggggcggggaactcaccagccgccgacccccccccccaccccgccctcggccgccgcggccccagcggcctccgcgctgcgaggagcgggcgcttggacacagggcgagttgtttgatttggcggaggcggggaggccggcggggagcgagcgagggaggcacgagagctgggcagcgcgggcgccggtctccagggtagggtccccgcgcgcagcagcggccccggggcgggggcgaggcgaccgcgggcgccggggatgcctggaggggccgcggccgagaggagacccgggactggacggccagacctgccgggcgcgcgggcaggtgcttcggctttttttttttttcccctcctcctttttcctctgccccttccttcctcgccctgaagtaagatgagcgtgatgctgtggcgctgggaacagaataacaccaccatgaagctggtaagggtggattgcagaccgcaccccctgggcgctgctctactttttaaccccccaccccgccccccatcccctttaggaactggcccgggtggtggaaagcccctgaaatgcattccgcacttggtatttcccttattgttttgaagctagatctcaggggaggtgtgtgtgtttaaaccaggaaagtcgatgtgtgtatgtctctggttgtgagtcattgaaggggggtgggactgggctgcattatctctccgtcccttccacctacgaattcctggagctctcttggattgcacacgctgggattgtctcctacgagcatgtctgcgccctcacagcctgtcccgggacagcgtggtccgcgtccccc

SEQ ID NO: 345382 - DNA, 224 bp, Homo sapiens; identical to SEQ ID NO: 202495
  chr11:31821778-31822002
  hyper

SEQ ID NO: 345383 - DNA, 76 bp, Homo sapiens
  chr11:32449104-32449180
  hyper
cgcgccttcgaggtagtctggccggtgtggccattggatgggtttgaggtctcagaaccgagtgggagtggactcc

SEQ ID NO: 345384 - DNA, 929 bp, Homo sapiens
  chr11:32915113-32916042
  hyper
cgggagtcgtggggctccgtcacctcttgggtcctgggctctcacatggtgaagtttgggctcgtggctgaactcgggatctgtgagacccaggattggcgccgggggtccgaagggggcgccggagagtttggggcagtggcgatccattgtattggaacctgggtggccgacaatgcggtcttggggactccggcgtgtgagggttgcggaggcgggagaggaagagtcgcggaaccgcgtcccggagacactggggggcccgggagggctgggctacgggagaatccccggggcgcagggcagaagagggggcccggcagggcgcgaacgcggctccagggccgggtgacatatgtttgcgctggtggccaagatttaggcgatttttcttccacgcgttcaaagttgctcttaggtttcctccccttttaacaacagcaggaagtaaggaatctttctttgccttctatgcctcggggtgactgagagttgggaagaaatggggcgggggttggggtgggggtagtgaaggccgtaaaggttgaagaaccaaagcatgcttctccatctcggcctttaaggtccgggtgcattatgtagcgtggggttcaagagttcatcttgcatgaccaagggaatctaaaattttgactcctacttgatatttaagctcgcgggaaatgtgtagtagtgccacactgtgaaacggtcccatttgaatgataactggaaggcgtggtctggtttggagaattggtgagcggggtgttttaaagccacctctcccgaacaatacagaatctggtaggtgcagcttctgattacatggaccagggaatcctgggttgctaatgacttcatcctcagctaccaacaggaagcttcgtggctttatgatctcatcagatttcttcattatttttcac

SEQ ID NO: 345385 - DNA, 56 bp, Homo sapiens
  chr11:35547041-35547097
  hyper
cggacgctactcacagtacctcttggcaaggacgagatgagaaggagctgaagaaa

SEQ ID NO: 345386 - DNA, 208 bp, Homo sapiens; identical to SEQ ID NO: 202515
  chr11:35547127-35547335
  hyper

SEQ ID NO: 345387 - DNA, 173 bp, Homo sapiens
  chr11:43600280-43600453
  hyper
cgccaataaagcacttgcaacacgtggagcggtggttggggggaggtgtccaagagtcaagaagggggcggagggacaccccatggcctcatttccacctccccattcttccccaccccttctcattgcttggcacaatgcacaagtttaccccccgaactggatcctattaa

SEQ ID NO: 345388 - DNA, 51 bp, Homo sapiens
  chr11:44337578-44337629
  hyper
cgctgcgcgagttatcagaaatccctggagccaaacactacgggggaccgg

SEQ ID NO: 345389 - DNA, 86 bp, Homo sapiens
  chr11:47208495-47208581
  hyper
cgtgccctaccgttccacagctgccctgctaatctggggcgccttctaaggcctgagacgaacacgcggtgggggtgggacaaaaa

SEQ ID NO: 345390 - DNA, 188 bp, Homo sapiens
  chr11:58940419-58940607
  hyper
cgattcactccgctgaatcctcgcaggatcctccctcccccttaaacatccatgcaaatagtatcagtgttgtggttttgcaaacccagcttcaacctagtcggtaacaatccactccccacccctttcatgcccccgcttttcagcagttggtggccctaagtctttctatgtagaaattctagggc

SEQ ID NO: 345391 - DNA, 200 bp, Homo sapiens; identical to SEQ ID NO: 202554
  chr11:58940666-58940866
  hyper

SEQ ID NO: 345392 - DNA, 55 bp, Homo sapiens
  chr11:58940867-58940922
  hyper
ggctccctgggaggagagactagggctggggtaccctggacgccgcggcattggc

SEQ ID NO: 345393 - DNA, 549 bp, Homo sapiens
  chr11:64512349-64512898
  hyper
cgcccccgcgccaggctgccccctcccccctccgcccctgcgcggagctccgcaccgccggctgcgccacccccaccgggggctccctctcgccccgcacgcggcggtccctgcggcagcttaacccctcccctgccgcgccgcccgggaggccagggccgcgggcggggggctgcgccactagctgccccgagggcgggcgaccggaggccccgccgcccgggacgcggaggggggaccgaaacgaagagcccctcccccaaccgcggacgccccagtgccccccgccctgcctgggtgtcgggcggaggaagccgggaggggcaggaagcggactgcggtggggaaggggcgccccgcccagcccccagctcgggttcctgttttcgagacaaaccgttcccatggggctaacccggcccgggaccgggcgtcttcctgcaggcagcgggtggcacaggcctagtggaggtcgggggcgtggggacagctggtccttgagatagtctgggggatgggctaggacaagatgggaatattttggggaga

SEQ ID NO: 345394 - DNA, 61 bp, Homo sapiens
  chr11:64513748-64513809
  hyper
ccatcaccgtcccgccgtgggacgcacctgccgagggtggaggataagggggtgactgcgc

SEQ ID NO: 345395 - DNA, 801 bp, Homo sapiens
  chr11:66079395-66080196
  hyper
cgaggcctcgcggtggctgtaagtccgtggggccgaggccaggtggcgccaaaggcccatcgacgccatctgcccggctgtccgggcccagtctccgggctcgcccagagaacccgaaatctggacaaacggaaaccgtaggtggaggaagaagagggctccagggccaggttcaagggcatcgtggtgagagatgaggggttcggaggactggtggatctgggcatatcgcgaaggtggtaagggacccaggggtggagtgggcggtgcttgcgccaagagggtgagcctgagtgtgggcggggcgtgcgataagaggctcgctcggtagcgctcttcgcagagccgtatttgtgcgctacgccgcagccagggcgctctgggtgggcgggactccagggcccccaggggcgtggcttgcatctttcgtgggcggccccgggggcggggctccgtgtaggtgaaccgctacctccgctcgatgtgtgaggtgtgacagtcctacgagggcgcagttcttccacttttgtgagcttgagagggggcggagcttgtagctggggacggagcctgaagaggaggttgaggggaacttcacacgtttccctggagggcggagtttacatcatcccccaacagagttaagacctctgagggattccctgcagtgtccagggctctgtgaggcgaagcttgcagttgtgttgggcggggcctgtagcgccgcgtgaagagaatgtgtaaactcggggcgaagttcatacctcctagaagccgagactaatagttccgccaatctgc

SEQ ID NO: 345396 - DNA, 119 bp, Homo sapiens; identical to SEQ ID NO: 202630
  chr11:67232283-67232402
  hyper

SEQ ID NO: 345397 - DNA, 127 bp, Homo sapiens
  chr11:67232464-67232591
  hyper
cgtggacccgtggacacaagacaggggtgtcctctgcctgtgggggcgggagggtcgctcacctggagagggggtcgcctccagtcccacgccgaccaggatcagcactgcacacagacggagccgc

SEQ ID NO: 345398 - DNA, 844 bp, Homo sapiens
  chr11:73693765-73694609
  hyper
cgagccgcagggagaacacggcagtgcgtgcggctgtgtctgtcggctggcggagggcgcgtcggacgagccgggcgagcgtggacagtcaatcccaaggcgcgcgcagctgggcttcgcagtggggctccgcgcaggcggcggcgcggcttaagcctcgggggcggggcccggggtggggcctgcggggcggggccgggcctgccagctcctacttgggtgcggagaccctggagcagccgcctttccgcggggaccgccccgcctagggttctctccatgactttctccactcccgtttccgtgcgtcccatcaccgcgtttactccttcgttccccgagatggtcactcccttgccactccccgcctctgcctcacactctctcgggccgccaacctctgtgaggatggcaagactgaccgccagaaacaagtcttgtccagtcacacacctcttgccttcccagccaggacggtttctaacagcgtccagcggggccgtgtcttaagtgcacttcctcttttatgggcccagcccccctacgctgggcaaactacccaccctcctgcgagcgagcgcgcggctggctcctgcagggcgggactggggcctcgcgaccggcctcgctgtcgattggttacagccgccgcgttgtcgggggaaggaaccaatcagaactgcagcaacaggtggcccggcaaccgacaacagccgttgggctcggctggggttcgcgccttctcccccggtggagcggcctggcgtttagggaccaggacactaaaggccccggcggggcgggagcacccagcgtgacctcacgctcctacacacagacaagc

SEQ ID NO: 345399 - DNA, 509 bp, Homo sapiens
  chr11:76381512-76382021
  hyper
cggctccacgcgcgcagtggggatggcgggaggggagtgtttggggggcgtcccttgggaccagcccccgccttgcgctcgctagaggcgcgcgacagtgcgccccccgagggccggccagcctcgcctgcccggcggctcctacctggctcagcgcggccgcagctcctctcccgggcagtctcggcacattttgcgcaaacccgcccccgggtcccaccccgcgccagaccccggggtcacggcccgaggaggagcaggccgctcagctgccccaccggagcccccgcgctccggctgcaatttaaatacctctcccgccggcccgccccgccacgcccccctctggcgaggccgtggggtcctagcgcctggccccgtgcctcggtttatccggagccggcgggggcggagtggggtggggcggcgaagcatcttcaccaccctgggacctcggccgggaaggggcgggggcccagtgtggggggatgagagggcgggagggagag

SEQ ID NO: 345400 - DNA, 166 bp, Homo sapiens
  chr11:120894634-120894800
  hyper
cgagaaagagcagatgaggtgtttgtggtaaagcctaagccagtgcagccatccccgtcgccatggcaaccccagcgcggttggggaggacccgctcctccggcgccccctcccattcacgcagcggacgtgacacgtgcggcggggtcacgtgttgttgttgggc

SEQ ID NO: 345401 - DNA, 85 bp, Homo sapiens
  chr11:120895026-120895111
  hyper
tgccgggctctcgaggcccgaggcgttcccctctggagccgaggcgcggagggtcgctcctgcagggtgctgggataggacactc

SEQ ID NO: 345402 - DNA, 191 bp, Homo sapiens; identical to SEQ ID NO: 334392
  chr11:124616924-124617115
  hyper

SEQ ID NO: 345403 - DNA, 135 bp, Homo sapiens
  chr11:128391758-128391893
  hyper
cggcctctggccgagagcttgggtgggggcctcggccgtcgccactcacccggggaggggaaaagctccagatcgactttttccgtcttgatgatggtgagagtcggcttgagatcgacggccgccttcatggtg

SEQ ID NO: 345404 - DNA, 623 bp, Homo sapiens
  chr11:128392116-128392739
  hyper
gcctcgcccgcgccgcgcccgctcctcctgcccggccctcgcccgctccctcctctccgccggcggctgcctcgttcgctctcgatctcccggccgctctccctccctctcgccctcccgcgctctcccctcctctttagggcgtttctcgcggcgccgcgtctcggccgctgggtccgcgcgccctgggccgggcgatgtccgcttgggggagcgaggggcggggcgtcggggcagggcggggagccgggggcggggccgagcaccgcggccaatctccgcccgcggcccaaagcgaaaggaagggctggcgagcgcggggccgggccgcgaccgcggaggagcagtgcgtggagccccgggcctcggagcccaggcaggggcgggaagggccgggagcgggtgtgcaggctgggtgcacaggccgcctccaccgtttcgggaaagtccgtctgattctccacgcattcttgagggcttggtcacccgctctcgccccctcccagtagcagcatagttttccaagtgcgtgtacatcattcattcacaaagactgacacacaggacgtgaggcatgtggatgaaggcgagcgtgcaggcaggcgcaggggattcgtgagccc

SEQ ID NO: 345405 - DNA, 543 bp, Homo sapiens
  chr11:129148497-129149040
  hyper
cgtcgtccaacatgcagcggcaacttcagtcaatcggaaagacgaggggggaactccacgggagcctaagggagcagagacctctggccccgcggggcccacgcacacctgggggcgggacccgcgatgtcgcccgcgggcagcggagggaaacgctcccgcggctcctccgggagcgccggtgtccctggagcccccactcggccgctcccaggagtcgcggctgccgcccgccttgggcccggggcggagagcgctgcggcaggccagaacgccgtccgaacgcccggctcgcggaggccgcggggagcgcggggcgcgggcgcgggaggcggtgggcccgcagcgccgtccgccccgggaggccggggagatggggccgggggcggggggacaaccgagaggctcctccgggagcatgcgatccggaaccctcactctaaaaagaatattttaagaaggaaagagaggccccccgcagccttccccgcggggcctgcccacgtcaccggcgcccccggccctcccgcgcgcccgccttac

SEQ ID NO: 345406 - DNA, 820 bp, Homo sapiens
  chr11:129149096-129149916
  hyper
cgtgtctgccctccgcgggccgggcccgacgccctccgcccgccgccgccgccgccgagcgccgcccgcgccgccgagcctagcgcctggccgccgagggcagccgcgggggctcggccgggcgtcccccgcgccagcgcctcatcccgcctcgcgccccgtcaggctcgggggcgggggcgccgggccgcggcctccaagtccccacctccggcacgcaccgcgctcgccctcccgcggcggagtcggcccccggggacgcgggtcctcgggctccagagcctctcaccctgacgccttcgggccgcccccgcagcgcccccgcccagctggccggcgcgtgcccccgccggagcccgccgcccgcccagcctccgcctcctccgctccgcctcctcctgcacccgcgacgcccgcagcggggagaagaggcgcgccgccgcggccgcgggcacgagcacgcgcgaggagggcgggcggcgggcggagcgcgcgcgcggccgagggggcgggggcgcgccgaagcctcgcctgctgttgtcccgggagcgcacgtgcgctgcggtggggcgccgaggggcgttcggcgggtgcccctaggggactgggggacagggaacgcgaagtgggtagagacgctgcctgagaggtcccgacgtaggctgttgcctcggccccggcattgtgctgcggtgcaaaaataaaaaaccggccgccgccgcagcagcagcagtagcaccgggaagaggcatcctccgagactacggcagtggctcctctctactcccagctgacccccagaacactgtcaccgcgccgc

SEQ ID NO: 345407 - DNA, 161 bp, Homo sapiens
  chr11:133939437-133939598
  hyper
ggcggtgggctcatcccccgggtgggctcctcccaggcggggtcctgtgctgggcggtgggctcgtccccggggtggacccctcccgggcggtgggcacggccctctggagggagcgcggcagctgcggcgtgggcgctggaacttgctggaagaccctgc

SEQ ID NO: 345408 - DNA, 241 bp, Homo sapiens; identical to SEQ ID NO: 202804
  chr11:134201549-134201790
  hyper

SEQ ID NO: 345409 - DNA, 236 bp, Homo sapiens
  chr11:134202154-134202390
  hyper
cagctgcttctttctgggagctccccaatacccccgagttcccctgcggctgcaggcactctactcctgccgcgcgatccaggcctctgggcgacacccggcgtgccctcgggagccggcgtctgtgccccgagccgcccaccccgccgcgcctgtgacgccgggctctgccccccgtggacgcccgcagccctccagccgtcagagccctctcagacgcaccccatcgcggcccc

SEQ ID NO: 345410 - DNA, 85 bp, Homo sapiens
  chr12:4377809-4377894
  hyper
cgtgggctcactctgcagctgcagttttcagcccttgcagtttagaagattctgcatgagcacggatgccacgagggtatccagc

SEQ ID NO: 345411 - DNA, 244 bp, Homo sapiens; identical to SEQ ID NO: 202837
  chr12:4378558-4378802
  hyper

SEQ ID NO: 345412 - DNA, 201 bp, Homo sapiens
  chr12:4381232-4381433
  hyper
cggtaacaatcagcgcgcagtagcaggagccccagagctattggctatgcaaatagagggaggggagacggcgccccaaactcttcctcacccttttaaagcgatatcccctcctttcccccccaccaccccttccgccccaccctcgtttaaagaggctggctccggggcctgagttaatcgcttgcacctctagtttat

SEQ ID NO: 345413 - DNA, 50 bp, Homo sapiens
  chr12:4382915-4382965
  hyper
cgtcaccgcttcagagcggagaagagcgagcaggggagagcgagaccagt

SEQ ID NO: 345414 - DNA, 209 bp, Homo sapiens; identical to SEQ ID NO: 202843
  chr12:4382999-4383208
  hyper

SEQ ID NO: 345415 - DNA, 155 bp, Homo sapiens
  chr12:4384059-4384214
  hyper
ttgctttgcaaactccctttggaaaggctgggaaacgtcgcccgcttaccctcgcaccccattatcccggccaccccacttctaatcgtgccctctcccccaccccccacctcacgaagattacttacagtttggttttccagcttcctcggtgc

SEQ ID NO: 345416 - DNA, 55 bp, Homo sapiens
  chr12:8123528-8123583
  hyper
ttttcaggaatcggcgtcttctctggaaagccgccaaaggttttaagagggtttc

SEQ ID NO: 345417 - DNA, 107 bp, Homo sapiens
  chr12:14928211-14928318
  hyper
ttccctttcacagagccttcgctctcctgccagtttgtgagcactcaggaccaagttctgggaagataccgtcggatcgagctgagctcggggcaggaagtgtctgc

SEQ ID NO: 345418 - DNA, 73 bp, Homo sapiens
  chr12:19282260-19282333
  hyper
cgctgtgtttttgttgtttgaaagagagaaatcaggggcttgggcattattaggctccctttgatcgcgccct

SEQ ID NO: 345419 - DNA, 772 bp, Homo sapiens
  chr12:19282363-19283135
  hyper
gggcaggacgcgtttttttttttttttttttttttttttaatcgatcccggaaccttcgcgcggcggagggggcgggcgcgccgcaggggcccgagggaggggtctggggcgcggcgccgcttgcccatcccccgagcgcgcggcggggcggccggccggcggccgccgggatgcggaggggcggcgacgggggccggaccctgccggggcggcggggcgggcaccgcccgagggggtagggcgcgcgcgggggcgcgccgggccggggaggcgcgctcgctccgcgctcccttcgctcgctcgttccctcctccctcggcagccgcggcggcagcaggagaaggcggcggcggcggctagggatcagacatggcggcggatctgaacctggagtggatctccctgccccggtcctggacttacgggatcaccaggggcggccgagtcttcttcatcaagtaaagagccggggacggcacgggggcccgcgggggcgggagggcaggaggcgggcggctggcgacacgggggagagcccgggtctgtgctcctgcagcccctcggctcgcccccgcgtcccctctcacgctccgtgtctgccccttctctcacccctgcagcgaggaggccaagagcaccacctggctgcaccccgtcaccggcgaggcggtggtcaccggacaccggcggcagagcacaggtaacgccgggcccaaacggagttgggctccgcctggaggaggcggcagagcccgggccgcccggctcccc

SEQ ID NO: 345420 - DNA, 252 bp, Homo sapiens; identical to SEQ ID NO: 202912
  chr12:24715505-24715757
  hyper

SEQ ID NO: 345421 - DNA, 292 bp, Homo sapiens; identical to SEQ ID NO: 288859
  chr12:45270086-45270378
  hyper

SEQ ID NO: 345422 - DNA, 334 bp, Homo sapiens
  chr12:46766939-46767273
  hyper
cgggggacacatcaaggcttttgggggacaccaccctcccaccaaacactttcttgattgttatttttgtgatttacagtgaagttttgtctcacaaacttgggccaaggcagcaaggttgtcctgatggtttgttgttctttcttttccacctagacctgctttcactcttcaaaactagccggaggtcggcgagcagctccttttcgggatgtgctttttgtacggccatggaaactggactagcggaaaggctaccttttggccagcaagccaggccccttagaaagaggccccagtggggagcccggcgctcctaaggccgtttgggagt

SEQ ID NO: 345423 - DNA, 493 bp, Homo sapiens; identical to SEQ ID NO: 202958
  chr12:48576976-48577469
  hyper

SEQ ID NO: 345424 - DNA, 539 bp, Homo sapiens
  chr12:49736253-49736792
  hyper
cgaagggtgggggattatggccccgggcactccccgaagggaaactggggctagcggcttggggcctcccagtggggaagagggaacaaaagctgcggagaccggaggcccggggtccagggcgccccctgctgggaagctgggaaccaagccttagaggtccggcaggtacagatggaaccaggcccagggcgacccctcctagggaaaccaagggtttctagcctggcgcgcctcctgccggctttgaatgacactgcgcttctatgcccgctccgttcagtgaaatccaaccaatccgcatccgctcaaaaaaggctccaagtcctggcgaacccgaggggagccgagagggagttcaaggagtccaggttttactgcagattctttggcgctagctcccagctgacaaatcaacatctcaatctgacaattagtggtcaagatgcggggtgaggggctcttacagccccggccgcttagccctcccggcgggaggcagaggggtgggcggtgctggcagtgatgaacgactccag

SEQ ID NO: 345425 - DNA, 336 bp, Homo sapiens
  chr12:49736828-49737164
  hyper
actgacaggcgggtggcgggccgggcgggctgcgagtggacgtgccgggaaagaggccagtagcaggaggggactaaggcaagcgtttaacagtcccactgctccatctgctcccggtccttcgccttgaccctgggacttgacttccttgagctcggcctcccagttgttggagctggccctggctgggaagcaagggcggggacctaagccctcttctggggttaggtgatttaaggtctgagatgtcaaggaagggtattaggcaggtctcaagactaggcgattcggcctgacctctgagagattgtgcgtgactgtgcactcagagatggc

SEQ ID NO: 345426 - DNA, 660 bp, Homo sapiens; identical to SEQ ID NO: 334522
  chr12:51785160-51785820
  hyper

SEQ ID NO: 345427 - DNA, 194 bp, Homo sapiens
  chr12:54150983-54151177
  hyper
cgatgatttcattatcgacgtgctgtctgtctcgggctcagcccggttgccagggcgactctgatcgattgccttccggtcttcttggcttggccggctgcttcctttctggagcctggctgttggcgagcactccctagcggccctctctggtactgcagagcttcccggttgcaggcttgagagactcaggc

SEQ ID NO: 345428 - DNA, 184 bp, Homo sapiens
  chr12:63026256-63026440
  hyper
gctgtcccctccgtctaaaaccctaagtaaatacccagtcctcccccagactcttctccacctgtggttcaggtgtctgggaagaaggccctgcacgcccgtccgcgcctcccctgcccgggggagccccgggtaggcagtggccaaagactctgtagaacaactcccgggagggcaggctcgc

SEQ ID NO: 345429 - DNA, 126 bp, Homo sapiens
  chr12:69326527-69326653
  hyper
cgcttccatcccttcctggcggtggtagttgaaatccagcgcagctaccaaaggcagcaacagccctagccagaggcacgggaagtccatgttctagagatgaataaaaataagaagaacctgaga

SEQ ID NO: 345430 - DNA, 86 bp, Homo sapiens
  chr12:94544052-94544138
  hyper
ttagactcaaaactctagtggctgcatcccattgccatccttccctgtccaaacggggacgcttgtttggggctgagtctcctcgc

SEQ ID NO: 345431 - DNA, 348 bp, Homo sapiens; identical to SEQ ID NO: 203159
  chr12:104851545-104851893
  hyper

SEQ ID NO: 345432 - DNA, 507 bp, Homo sapiens; identical to SEQ ID NO: 289355
  chr12:112204412-112204919
  hyper

SEQ ID NO: 345433 - DNA, 186 bp, Homo sapiens
  chr12:112204992-112205178
  hyper
actcatctggggctcgaggggtttgcagaggctgacctggaagcacatctgccccctcctctcctgcaagcattttagccccttcgccgcctctgacagtccccgtcccatttccccgtgacttgggccccctctccgtcttcgcccagcctcggtctgttttccagggccaactctcggggttcc

SEQ ID NO: 345434 - DNA, 83 bp, Homo sapiens
  chr12:113495127-113495210
  hyper
cgtacgccccccttgctgtcccccttcggttccccattgttctcagccgaatgctctcctgggaaggggggagggggtgctgc

SEQ ID NO: 345435 - DNA, 58 bp, Homo sapiens
  chr12:116946548-116946606
  hyper
cgttccccctgccctgggacgtgcagggtccccgctgattcccgccccggggctcccc

SEQ ID NO: 345436 - DNA, 173 bp, Homo sapiens; identical to SEQ ID NO: 334693
  chr12:125093646-125093819
  hyper

SEQ ID NO: 345437 - DNA, 435 bp, Homo sapiens; identical to SEQ ID NO: 334695
  chr12:125815555-125815990
  hyper

SEQ ID NO: 345438 - DNA, 167 bp, Homo sapiens
  chr13:20735265-20735432
  hyper
cgcgcgcttcccagcacgcacacctaccgcccccgcatccctaccctgtacgcgcagccacagcactcgcccgcgtccgcattccacaccctaccccgcgcgcacgtccatgcctagcgcctgcatccccatcccgcacctgcgcgggccctggggatgtggacgcg

SEQ ID NO: 345439 - DNA, 70 bp, Homo sapiens
  chr13:27131483-27131553
  hyper
cgcaaactcaaaggtactgtaatgggcacctagcaatcagaggtgatacaagggtctcttggcccgaagt

SEQ ID NO: 345440 - DNA, 37 bp, Homo sapiens
  chr13:29069851-29069888
  hyper
caaggcactgaacctggagcgcctgaggggaactgac

SEQ ID NO: 345441 - DNA, 200 bp, Homo sapiens
  chr13:29292491-29292691
  hyper
cgtaagttcaacaatgaggttccttttgggaagcgacagttgcacaattgttattgttattttgctgcgtattaaaaacggacagggagggggcgttttaaaaagcagctcccaatcgaaagggccttatttttaactcaccccacgattacagtcttcctgccaggctgggtacaggtcgggccgtgccaggggctgtc

SEQ ID NO: 345442 - DNA, 242 bp, Homo sapiens
  chr13:29293342-29293584
  hyper
tctggagttgcaaagcatttctgaatccgaatatcctttctcatagaaacacataaaacaacagttggaaaagtaacatgtttgggctgtagcccccagcaggatcccggtcggcccgcagaagaggggaatgggcgcaggtggagggcataggaaagagagtgctcaatgcagagttagcggagggttggaatgtggtcgctggcttttcctggggaggggaggggggacttgggcaaatc

SEQ ID NO: 345443 - DNA, 132 bp, Homo sapiens
  chr13:46960952-46961084
  hyper
cgccctgcgtaaaagtgtcctgaggtcccgcttctgcgcccttcccggcccaagccgaacacagggtcaacctcactctacaaagtcaaccggatagaaatccgccaccccgcgaggagccccttcctactg

SEQ ID NO: 345444 - DNA, 135 bp, Homo sapiens
  chr13:46961683-46961818
  hyper
aagacctggcagaaatgacttcccaaccccagatgcccccagcagcagtatttagcagtcatacaattgcctgaaatgaagaatgagtaatctggatgagtcggccctgaaatcgacctgcaacttacccggaac

SEQ ID NO: 345445 - DNA, 161 bp, Homo sapiens; identical to SEQ ID NO: 203406
  chr13:92050814-92050975
  hyper

SEQ ID NO: 345446 - DNA, 147 bp, Homo sapiens
  chr13:95201113-95201260
  hyper
cgtctagacccgtggcttgtttaaacacccgctgctaggccccactgccagagctgcctatccagggccgagaatgtgcatttctaagtagttctcaggcggtgctgatgctgcggatctggggactgtactttgagaaccaccggt

SEQ ID NO: 345447 - DNA, 287 bp, Homo sapiens; identical to SEQ ID NO: 203409
  chr13:95201339-95201626
  hyper

SEQ ID NO: 345448 - DNA, 229 bp, Homo sapiens; identical to SEQ ID NO: 203410
  chr13:95201662-95201891
  hyper

SEQ ID NO: 345449 - DNA, 301 bp, Homo sapiens; identical to SEQ ID NO: 203411
  chr13:95202013-95202314
  hyper

SEQ ID NO: 345450 - DNA, 267 bp, Homo sapiens
  chr13:95202344-95202611
  hyper
tgtgactatccacattcgtcaccttgctccccgaaaagttccaggccccaggtgaggagccgtgtaggcccaatacgattggatgaaggagtgtacggggcaggaatcgtcagactggcctctggagaggagtttgcagcctctccgtgctccgggcccgggaaatgtccaccttaatcatcacctctttgcatggagcctgactggcaaataaatgctgggtgagctcactaacgatgattattcagtcaatgctatttcccacac

SEQ ID NO: 345451 - DNA, 403 bp, Homo sapiens
  chr13:113622881-113623284
  hyper
cggccagccacggacccacgcatggacccagcgacccacggacctgcttacctgggcgcggcgcgggtggcatgcggccacacggaaggggcgcgctgggctgctgcggcctctgcagcttctacacctgccacggggcggccggaggtaaagggaggcggcggccaggcgcggccccgcggaggcagctgcactcgctcggtccactcgcggcttcgcggctgcccgcaaaccaggagggcgtggagacccggaaccggggggaagggcgggggcacttgtgcggcacccgcggggctcccaggggacctcggcggtgacacgaatttctaggtgaccttggcggtgacacgaatttctaggtgacctgtgtgatacactaggtgacctagtgacacaggtg

SEQ ID NO: 345452 - DNA, 634 bp, Homo sapiens
  chr13:113623348-113623982
  hyper
gggctccccgacgaccgcggcggtgacacgcggggctcccaggtgaccccggcggtgcactcacaggactcccaggtgacccgcggtggtgacacaccggggcgggcgcgcgccgcttccgcttccgccgagccgccccccgccccccgcggcgcagcgcgcgcccccctcccggtggcgcggaaccaatcctgggcagggaggcggcggctggaggctgaaagcgctgccgtggccccctccccgcctccgccgcgccccctccgcactcgcacggccccacccgcaggcgccccccgtgcggaggaagcggatctgccaggatcatttttgttgtgtcggaggatgaggttttggctgaggactgaagagatggccttggaagaaatggtgcagagattaaatgcggtttccaagcacacgggtaggaggagctgctggccgtcagtgatctgtgcttaagcttgacatcatgggctgaaatgtggggaaatgcgtctgatttttgtaagccgccctcgtgttcctttctagccgtggtagctgtgacatggggggcactggttggcagctggtgtgttttcagaggctgtcggcgatcgtatgctgcccgggatagtcaaaatgactgcac

SEQ ID NO: 345453 - DNA, 113 bp, Homo sapiens
  chr14:21101056-21101169
  hyper
agtctggagaaaatcactagattctaaaggaatcaaaactgttcaagtgttgtgctacaactaaaaaaataaatgaacactcttaaagaatagaatctctccagttctggctc

SEQ ID NO: 345454 - DNA, 111 bp, Homo sapiens
  chr14:21439074-21439185
  hyper
cgcaatggaaagctcgtggcatacagcaggcgctcattatttgaagcctcttcattctcctgcttcctcggtggttaaggaggcttttggaagttcaagtccgtctcagct

SEQ ID NO: 345455 - DNA, 590 bp, Homo sapiens
  chr14:21439317-21439907
  hyper
cacctccaggcagctctttccagagcagtgagggcaagtctggggattatctccataaaggaagcgaggtggctcggtggaggggcttcagatccccttcccaggaccctgtgacccgccatcggaagagagtggacctcattctatttcaatgtctgcatagtacagacatttgctgtgggcaaatcggacccatgagcccagagagcatcatcccgggaaagctttcccgaagcacaggcttccctgcaccaccatacacgcgcacacccgcacgcgctcactcccccagccctcctcccctccctcactcccgccctggaagaagcggggagctgaggggagaggtggaaccagcagagaaacgggccgggcaggagcccgcaccagcccggcttgggacaccgcagccgctcctgccctctgctggctggaaggcgcacttacacattgcggtcatcgcggatcgccgagggccgctggtgccgctctgccgccaaggacgctcagccattggagtagaagtgagagaggccgcgggctgagtagagaggggtgaggattccggaaaggaagcatcgtcaggaagc

SEQ ID NO: 345456 - DNA, 223 bp, Homo sapiens; identical to SEQ ID NO: 203572
  chr14:51562012-51562235
  hyper

SEQ ID NO: 345457 - DNA, 260 bp, Homo sapiens; identical to SEQ ID NO: 334898
  chr14:52327346-52327606
  hyper

SEQ ID NO: 345458 - DNA, 61 bp, Homo sapiens
  chr14:60794412-60794473
  hyper
cgctcaagactcagacccggactgatgagctaagactgcttgcaagagggagtgggagtcg

SEQ ID NO: 345459 - DNA, 167 bp, Homo sapiens
  chr14:61104864-61105031
  hyper
ttcctgaaatgtttgagggaacatccagggtttttatccccacatcaggccgggcgatgggctcgagtttcaggccttgtcactcagctgtcaccaaacaaacgaagctctcagagcccaggagagggagagctacctgctattcatgacccctggagcaggtgatc

SEQ ID NO: 345460 - DNA, 655 bp, Homo sapiens
  chr14:61188627-61189282
  hyper
tttggttaccgcgagggccggatagggcaccaagcctccctcccagccttgggcgaggaacgccggagcccgagccgtcggacccccacaggggcccagaagcggcaagggcgggctgagaccggctctggaatgcgctggtgatcaccttcacctggcgcaggcgggctggatccccggctcccagtttgcttccccgagaagaaccttcgagctgcttttggattctttctctcctatccccgcggggctggagacaccaggtctttaggcgaccttctccttactttgtttcgtccaacaaaacacacagacgcacacaccaagtgtctgactcgggaggacgcacaaaagaggtggaaaatccggtattttttttaccagagggggaaagcagtctgccaggcaaaaagctcaaacccagtggggtgggagcgcccccactcctttgctgccgcccgccgtaagccggcctgccccccacccataactaccgtaccaggagggagccaagcagcgttcgggggccgagggaggaagcagcccttcagccctgctaccccggctgcgctgaaacccgatcctaaggagttcagaatcaggtttcaaaacatgacagagccgagctgcaccagcaccccacgttgccgcggcc

SEQ ID NO: 345461 - DNA, 182 bp, Homo sapiens
  chr14:94406037-94406219
  hyper
gcgcgggtgaggggagggtcggggtgtggacgggtagggccggccccgccagcaggagagctcgggcgccaggctcggctggtcgccctgaccgcgggctgcgacgcggatcccaccggcagggggcgccgcgggtcaaccattctcaccccactgggcagggtgggtcggctgccgtctcc

SEQ ID NO: 345462 - DNA, 198 bp, Homo sapiens
  chr14:105189960-105190158
  hyper
cgcgcccgggcgggacgcggggcccctgccgtggggcagaagtgcgggcagttgcggggacacaaagtcctcggagaggacgcgctgcgcggctcttcgcggccgccagggggcgcgcccgcgcccagggcactcggggttccacggggggcaggtgcgctcctcgagagtgcggaccctctaggtggggtgcaggac

SEQ ID NO: 345463 - DNA, 78 bp, Homo sapiens
  chr14:105512395-105512473
  hyper
ggctcatcttaggtgtgggacgtgtactatctgaattaataccccaccaggcctgtgggacagtcactgtcaccattc

SEQ ID NO: 345464 - DNA, 37 bp, Homo sapiens
  chr14:105715538-105715575
  hyper
cgtcgtggggcccccgggggcgaccaggacggtgccc

SEQ ID NO: 345465 - DNA, 339 bp, Homo sapiens
  chr15:31621317-31621656
  hyper
cgctccaaaccacgtggcaggtgatggggtagagggtgagagcggggccatttctaggcattcggggtcagttaagggtgtgggggctcaggttgggggtgggagtcagtgtgggctcagagttcagctcgggacgcggctgcagggtgggtgtggccctgggggaggggccaggctaggctcagctcggctccaggtggatcctgagtatcgggtgggggcagcgattggggcgtggctggggttgagatccgctttgggggatgatgcccgtgctgggcaggatacttaatgtttgggaaatttttctacggcctctgtcagggtggcctgccactc

SEQ ID NO: 345466 - DNA, 209 bp, Homo sapiens; identical to SEQ ID NO: 290663
  chr15:32162282-32162491
  hyper

SEQ ID NO: 345467 - DNA, 761 bp, Homo sapiens
  chr15:32162523-32163284
  hyper
ccggggcccgcgccccccgcgtccccgcgccccggccccgcggtcgcccggcctcaacgcccacctgcctcgccacggagctcgggaaggagacggcgccggccccgcgcccggagagcgcacctgcctggtccgcgggcccggccccgccgcccgccggcagcaccgcggccagcgccgtcttacctgccgcgccgcgccgctccgctccgccagcccgcagcgccgcagtcgccgctacccgacttccattttctctcgctttaaaggaaaaccagatcagctgttttgctcccgctcgggctccgcggccccctccccagctgccgctcgcggtcccggtggcctctcctcccccgcctcctcccgcgctccgctccgcccctcgcgcccctccgctccgcccgcggccgcgcacaacgcccgcctcccggctccgcctgctgcctccgggcgcgcgccctcctctgacgtcaccggtcgcgttcgcgccccgcccccgccccgcgcggacgtgcgcgcgccgcgcctgtgccccgcccccgcccctccggggccgggcacggagagcgcgtgctcgcggccgcgagccgaggaggggacgtacagcgcccgcgcgcccgcgagcccgctccggctctcccatgcttgcccctcggggtgctccttctgcgctctccgcctggactgcaggaaaaggctgcttaaacagcctgccttttcctgctgcctgactcgcgccatctgcggccacctgtctc

SEQ ID NO: 345468 - DNA, 384 bp, Homo sapiens
  chr15:41786420-41786804
  hyper
cggagcgggagagggactgcctcccggcagcgggctcttcgcacctgcagcagccgcgccgcctttccacctcgtcggtctcctccactggctcctcgtcgctgctcgaggactcggaggacgacctgctgagcgacagtgagagccggagccgcggcaacgtgcagctggaagcgggcgaggacgtgggtcaggtacgggccgcgggggcggggccagcgccgggcgcgggggctgcacgggggacctggctgggtgctcccggaggacccgctcctgtccatgctccctccagcggaaggtcctgttctcgcggtttaggaggaatctgggggtcagagggaggcgcctggccgacctctcgcctgggcaactttcacctcg

SEQ ID NO: 345469 - DNA, 135 bp, Homo sapiens
  chr15:41953174-41953309
  hyper
ccaagggaaacggtgtcggcgtcgcttttctgagaacttggcgcagcgttttgacacctgtgcaaacgtcttttctaacaagtaatttccggccaaattgtttgaggcaggacgtcaagtttaataaaggagggc

SEQ ID NO: 345470 - DNA, 124 bp, Homo sapiens
  chr15:45722474-45722598
  hyper
cggctatctgcgctcccctcttagggggttccacctcctactccccaaacctccaaactcctcacaagcacctaggggggccaagagcgaccggggtcggcaggtaaggaagaccgcggcgagc

SEQ ID NO: 345471 - DNA, 339 bp, Homo sapiens
  chr15:45722599-45722938
  hyper
gcagggggcgccagcgcccgcgttcgggcgcttcacgtcagccgcagaatgtcctgcagggggcgcccgggagtcgcgtgcccaacggggaaagcgagtcaggtccctcgcgctccccgccccacgcgcgtgaccagagcgcgctggcccggcccacccggggcggttgtggtcgctatatataaggtggggaggccgccggcccgttcggttccgggcgttaccatcgtccgtgcgcaccgcccggcgtccaggtgagtctcccatctgcagagacgcggacgcgccggcccgcagttggcctgcggagcgcggtggacggtttggcgcccaccaggc

SEQ ID NO: 345472 - DNA, 118 bp, Homo sapiens
  chr15:48469946-48470064
  hyper
cgtggcggtcgctgagctttgctcaaagattctttaaccaaagtcagggaagaggggtgttcgctgtctcgggctagaaatcagggaagagcgctggtccccgggcccccagccccgg

SEQ ID NO: 345473 - DNA, 52 bp, Homo sapiens; identical to SEQ ID NO: 203870
  chr15:48470094-48470146
  hyper

SEQ ID NO: 345474 - DNA, 158 bp, Homo sapiens; identical to SEQ ID NO: 203871
  chr15:48470215-48470373
  hyper

SEQ ID NO: 345475 - DNA, 77 bp, Homo sapiens
  chr15:48936649-48936726
  hyper
cgaacggggtggggactaaacaaccctagcacctctaaggtgcccccaggaggtcttgccaaggagtcttccacagg

SEQ ID NO: 345476 - DNA, 263 bp, Homo sapiens; identical to SEQ ID NO: 335159
  chr15:69114222-69114485
  hyper

SEQ ID NO: 345477 - DNA, 587 bp, Homo sapiens
  chr15:71407569-71408156
  hyper
cgccccctcccgccctcgtggcctctgtctagaccgtactccctcctactgggtgatgtctcttcccctgggacccagggaccatcccgttgttgacctccggggtcaggggtgcggatgggggccggcccttcccgcggtcgccgccagggggcggcaggagcggctccagatgacagcgggaggccgcaagaggggagggaggaaggaccgagggagcgcggatcccgctctcggatcgcaaactctgagccagagctctccgcgcgcgcctgaaccgctggccgcccgcgcagcccgacgcggaatcggggcacagcgggagcccgtgcagggcgggcgcggggcggctgggcggcggtggcggccgtccatgcggcggcgctcggggctgcccggcgccgggaaccacgcgggggcgaggcgaggcgaggcggccgccggtcgctccgggacgcggaccgccaggtgagcagagccgcgcgccccgcgtcccctgcgcgccgcccgcgcggccccgacccggcttccgctgcccaggctccggctcccgctctctggccggcggggcgggctggcgcgggcta

SEQ ID NO: 345478 - DNA, 194 bp, Homo sapiens
  chr15:82339684-82339878
  hyper
cgggccggggcggtgcgcgctggtcctctccgcgcgcatccccctccgccgcccactagggcggacgccccttcgggccccgcgcgctctgctgtcctttgttccgggagccgccgggctcgccgcgccctttgcgtcccgctgcggatcgttccgcagagcggctgggcccgcggttcatagagtcgcccaag

SEQ ID NO: 345479 - DNA, 278 bp, Homo sapiens
  chr15:89438052-89438330
  hyper
cgccatctcccacccagggctctgccctccaccctccctacccttctggcctcgctgtccctggggcaagaaccccggtgagcgaggtctggaacccataggcatcagttgcctttgccccaggcgcccagagccggccagctgcggtccagaggcgcaggtccgccagccgcctcgcaggttgccctcagcccctcccaggactcccggggcccccggagcatccaacagatacccaggggcagggcctggggcgccgcggacggcactggaggcag

SEQ ID NO: 345480 - DNA, 250 bp, Homo sapiens; identical to SEQ ID NO: 204020
  chr15:89438421-89438671
  hyper

SEQ ID NO: 345481 - DNA, 107 bp, Homo sapiens; identical to SEQ ID NO: 204021
  chr15:89438672-89438779
  hyper

SEQ ID NO: 345482 - DNA, 101 bp, Homo sapiens
  chr15:89438863-89438964
  hyper
caagggctgggctcgaagggaggagctgctgcaggcttgagcggtctccagactcgctgggaaccaccgcaaagagggtgtgcaagagttgaggccctcac

SEQ ID NO: 345483 - DNA, 468 bp, Homo sapiens
  chr15:100882092-100882560
  hyper
gccgtcacacatggtacccgggaccggcagcccccccggaccgtggcggcgaagcaggagcgcgctaggcggcggcgccagccggagtgaagccctccagcctttggaaaaagtaattagcgctgcggacaaacccaacgtggtaaaccccaagccccgccttcccctcggaaggcgggaggggattgggccctcgctttcctccgccccgcctcctccttccctactggttgggatgggtcgaaaccacagtgcgtagttaggttgtcagcgctttcttacacgtggtttctgggcagtggcggggacacggcaccaggtggcgcgcgggagccgaccggagccgtgggaccctggaagagctggaggatgcggggctggtcttcagagcttgtcctcattttggaactctctcagcctgctgcccagtttcccgggaaggtagggcggaaatcgccccggccaagc

SEQ ID NO: 345484 - DNA, 48 bp, Homo sapiens
  chr16:2042503-2042551
  hyper
cgggacctcgcgccacgcggcgagcccaggcgaggcgccccaagcctc

SEQ ID NO: 345485 - DNA, 212 bp, Homo sapiens
  chr16:3222239-3222451
  hyper
cctcagctacaagggacaaggatgctcctgaggctggcctggtcggcacttgcctcagcctcgagggagtcccgcgcccttctccttcccaaccccagaccagagaagctgtaccctctgcagcccgggtcgctcagctccacatgggctccgggtatggtggaggccggtggttgggttctgagtgatcgagtagtgtgcacggtctgggc

SEQ ID NO: 345486 - DNA, 543 bp, Homo sapiens
  chr16:4233245-4233788
  hyper
cgctaagggctgcccttcggttttcaattactggcggagagggcggttcgtttctggcggggaagggaggtgacattccggtaggagaatctcctaaaactcgcatttcctgtttgccctgggcgccggcctcaggtggaaacctcaccccgataactgagggcagcagtcggccttgggcgttcttccgtcacccaggtctccagaacctcccggactcaatggcaagtcactgcacaagttcagggccttttcggtcccgatcgaggatctggagatctcggggcttcccggtcgtctgccccacagcccacgaggcggaccgacctgcggggtgaggcaccgggagcgcatggcagccccggcctcggcctcctggcgccctcccagccacgcggtgaatgcctgagaggacagaggttcgcggccctccccatcccaccggcagcgaccgcaaagcccgggagctgagtccgcggcgtgaagcggcggaggtcagcagcgagggggcagggccggcgctggcggccacggagcttgcgc

SEQ ID NO: 345487 - DNA, 48 bp, Homo sapiens
  chr16:4363872-4363920
  hyper
cgtctcctgtaccttttttctacacacctcgaccccagggctgcagtt

SEQ ID NO: 345488 - DNA, 158 bp, Homo sapiens
  chr16:4364080-4364238
  hyper
ccctcctggaagcgctaggtcccgaaactggccttcccccggggcccatctcccggctaatgtttaacccggccacactccacattatccacactcaggagaccggggtgaggtgagggtggaggctgggggaggtcacctccaaatcgccaacttcc

SEQ ID NO: 345489 - DNA, 890 bp, Homo sapiens
  chr16:4986642-4987532
  hyper
cgaccctctgcgcaagagcgaccctgggacacgggggtgccctgtacccccagctcagctgcccgtgccctaggccctcaaggcaatgctccctgggctcccggagtcccctgtgttatgctccccctcggggaccccagccagtcccttcccacctggcggcgcttcccagcttcagggtggcctcggtcccgcgttcccgagagtcccgcactccgggttcagttcccggttcctggacccccgtaccccccattcctacactgcccgggaggtcttccaggtcctgtgcgcccacaggggcaagagcgtcccggagcggagctgtgggcgcctcctcacctccgggtctgcacagtggggctgtatttgcctttgtttctcttcctgaagagcgagttcatggtggcgctcggggtgcgggcggcggcggctggcgggccgggcgcgcaccgaggggcgggcgggagcgcaggtgagcgagcggcggcgcggggagcccggactgcggcgcggcagtggctccgggtccctactcgctgggggcggggcgcccgccggccactggctctgcgggccgctccccgagaaggtggtgcttaccttcccgaggaggggccaccgcgcgggcggggcttggacgcgggggtggggacactgggtcttggccggacgccgcccacccccagccgggggactccggaggccgggcaggcactggggcgcaaaggccgccggggcgagcgctcgcagccccaccctcctcgggcccggcgcgcctctggccgaggccttcacctggttctgcgctaccgcggaactcggcgctcctggtgctttggcggacacccagctgggccccgcaagacaggtgcggcagagacccgcac

SEQ ID NO: 345490 - DNA, 429 bp, Homo sapiens
  chr16:12897365-12897794
  hyper
cgctctctcggcctcgcctctcaactgcgcccctggaatccctaagagcaggctttgatgcagctatggcggctcccaggccccggtgcagccccggatggtgtccgactggcggagcgcacacctgaacaaaaggttcccccggcggaaggttccgcagccccagagtcccctccccgggtgaggggcgggcagtacctgcgggaaacgcggccagggtcctgcccctggctctgtggaaaacaccccccgcctctgcagccgacatggcgagcgagtttctggccttcacttagaacactgcgtgggtggaagccgcgcgacttcacacagaacaaccgctggacctgtcccgctttgggcgacgccctttgatctcggggcgggactggggcgggacggggaggggcccggtggctcggggcgcca

SEQ ID NO: 345491 - DNA, 88 bp, Homo sapiens; identical to SEQ ID NO: 335311
  chr16:29607025-29607113
  hyper

SEQ ID NO: 345492 - DNA, 304 bp, Homo sapiens
  chr16:47176468-47176772
  hyper
cgtaccctcgaaatttttaaaaaaagaacatgttacgacattacaaacacgtcagctttcaatttaaatcagcagggggaaaaagggaagtcctttactgagtggtggtgctgttttccctctggaaattgaaaagacgatttattcagtccgagtttcaggagcaactttgtatcccaatcctaattatctatgtatataaattttcatctaaattaccacctcctgggaaatgcaaagccggtggagtaggttttagagctctgtgctctggacaagccaactgttttaattcccagtacaa

SEQ ID NO: 345493 - DNA, 130 bp, Homo sapiens
  chr16:67189038-67189168
  hyper
cggcggcggcggcggcttcacctccgacagagagggcaccgggggctgcaagggggccgaagcgacctccccgtcgccaccccgggcccccgagccgcacttcagatttcgcagcgcatcctccagctca

SEQ ID NO: 345494 - DNA, 377 bp, Homo sapiens
  chr16:67189259-67189636
  hyper
tgaccctagcccggccgcacctgctgggctaggatgcaactcaaacagcgctcctcgtccgccagcaaagcgtccagccgctcggcgccggcgcgcagctccagttgcagcggcaccgagtgctgggcgagcgcggccgccaggctcctctgcagcgcggcgcgcagcgccccctcgcggtaggcgcggaggaagcggccacagggctgccgcccgcagaatcgcagctgcacgatcagctgcgggtcgctgcggtggatcttcagcatctgcagcacgtccgggctcccgccgctctctgcggaggcgggcggtcaggcgccgggcggtccccaagctcggccgttctccaaacggccggaggaggggcgaagccc

SEQ ID NO: 345495 - DNA, 134 bp, Homo sapiens
  chr16:68118915-68119049
  hyper
agtgcttcagcaccccttcctcgacatgagctccgcccaatgaggagaagggtcttctgcattggccggtggtggtcccctatccaattagagaggctaacggccttctctcgtctggtttagaaggaatcgcc

SEQ ID NO: 345496 - DNA, 102 bp, Homo sapiens
  chr16:68504292-68504394
  hyper
atgtgacctttgtttaatacacgttcttatttgatcttcacaaccatgccacttggcaggtggggaaactgaggtgcagggcagggtagtcatttggccatc

SEQ ID NO: 345497 - DNA, 82 bp, Homo sapiens; identical to SEQ ID NO: 204296
  chr16:77246930-77247012
  hyper

SEQ ID NO: 345498 - DNA, 67 bp, Homo sapiens
  chr16:80574541-80574608
  hyper
cggtactgtttcgtgcattttgtttggtgcattttgtccgtctccctggcacctggtgggtggtgaa

SEQ ID NO: 345499 - DNA, 72 bp, Homo sapiens
  chr16:80575052-80575124
  hyper
gggcccacccaggcacgggcggtccaggggccgcggcggaggctggtggctccaggatcttcctggaggggc

SEQ ID NO: 345500 - DNA, 177 bp, Homo sapiens
  chr16:85932121-85932298
  hyper
cgcctagcaccttcgatgctcctgtttcagtcgcggtctcagcgggcagtggcctcctttgaagctgggattctcctgcccctcccgggcagcgcaggccaccggtgacccgggacggtctgtaaacgaccttcgcgtccccgtccccgtggaataacgcgcggcgggcatcactgc

SEQ ID NO: 345501 - DNA, 802 bp, Homo sapiens
  chr16:87525701-87526503
  hyper
aggcacgagccgaggaagcgaagctcgagcgggatgcacaggtccagcaggccgcacaggaactccacgcgctgcggcgacggcagctccgagaaccagcggtacacgccgtccctctgcagcgggcagcgcttctccaccatgctgccgcccgcgccgcgccgcgacccggggccggggaccgcgcgggggcggccggggggcgccgggggccgcggccggggcgcgccgggaccggggacgcgcgggccggggccgggtccgggcgagggcgcgcgggcgccgcgggccgggcgggcgccggggcgggggcggggaccggggccgggcaaggctcccgtcaggggccggcgggcgggcgcgcgcggggcgccgggggggcccggggcggccggggcggccgggggcggcgagcggcctcgggccccccgctcacggggaggcgccttccccgcgcccgtgcccagcggcggccggtgcgcggcggcggcggcggctgctcctcgtcgtcgtcgtcgtcgtcgcccgggaggcggccgcccccatctccccccgcgccgcagggtctgtcactgcgggccgccccccgacggagccgccccggccatgccgtcgccgccgcccgcgcctccgcccaggccggccgttaccccgggccgcgggcgcggcgtcgccgcctggggagcgctgggggccgcggccgcgaaacggacgctggagggggagggacgcgcggcgggaggcgcggagggatccggccgggacttgccggccttgctgctcccgcgcggcggacggatcc

SEQ ID NO: 345502 - DNA, 505 bp, Homo sapiens; identical to SEQ ID NO: 335410
  chr16:87526565-87527070
  hyper

SEQ ID NO: 345503 - DNA, 34 bp, Homo sapiens
  chr17:4981985-4982019
  hyper
gaccttgaagtttatgcctccctccattcccccc

SEQ ID NO: 345504 - DNA, 1345 bp, Homo sapiens
  chr17:7254483-7255828
  hyper
cgcagtgcccgcggcgcgcacgttcccacccaggctcggagcgcgaggtccccaggtgggccccaaccgccggatcctgcccttctgcactggggcccagccgcctcccggcctttcctccctcccccaggagatgagacgtatcttgacatcttccgcgacttctccctcatggcgtcagacgacccggagaagctgagccgtcgcagtcatgacctccacacgctgtgacccgaggcccacggggcccgcgcctgcctcccttccccgccaccgggccctctgccattaaagcctccgtgcttcgctcttcccttctggttcacttcttgggcgccaccttcgggcccgtagggtgttgggcgctgcggctcccgaggtgcggggagcagctgggggtttgcgagctccagtccagcaaggtgcgactccggggagcgaggcggcagcttcggccgcggcctgagcgcagggcgctgcggggcgggggctctcgggctggggcgacgtggccagcccagtcctgccgaggggtggggctggccctggggctcgctggccccgcgccgccgcggagagagcgcgcccgggccaccccggctggaaggcatccccggaatgcggcggctcagcacccgccccctcgggaattccccgggggagccgctgggagggactcggctcccgggctgggccggccgggcctcgggctctgagcggtgggattagaggctccagccccgccgacttgcagacgtgagatcgggcacacctgagcggcggcggggcggtcgtggccacatccggggcgacgtgcctgagtcaccccgtcccgccagcgtctgccagtccagccagtccgcccagtctctcgcgtccgagactcgcctccagcctcccacctccgcccgggccgcgcgagcctcgcgggggcgggggcggggcgccaaggggcggggctgtctcttaaagggccccgggccgctgcccttaggccacttcctgggggcggagaggacctcagcggctgcggcgacacccagggaaggcggcgcggccgggtcccgaaactcctggctgtttccatcagagccctcggacactcccagcccgggctgagcacgcatcgtcgctccccggcggatacaagggggctccgccatccgctcccgtcagttcggcctccatctcctgggacccgcgccggcagccaggccaggcctctgagtggccccagagccctggctggactcgtccacggcggcagcgatctgcccggggtctcggaggccatcccttcagagtcggccctgtgctcgccaccgtcacctgctggttggattcc

SEQ ID NO: 345505 - DNA, 69 bp, Homo sapiens
  chr17:8055823-8055892
  hyper
ctcttcccggcgcctgattggctagtggtctccactaaggtcagggctgtgtcacacacacgggcgcac

SEQ ID NO: 345506 - DNA, 531 bp, Homo sapiens
  chr17:12692672-12693203
  hyper
cgctgccttctcccacctccgcactccactgtccttgcaaactttggacagaggaaaggtgggcacggggcgcgaaactacaagtcccggcatgcacggcgttctccgcacaggcgcacggggaccgccgggccagccggccagccagcctgcggagactcccgggtccccgcgccggactgggactgggagcaggcagcccgggcggagcgggccggtgccgaggacggccccaggcattgctctgccccgggcattgcgcggcgcgcgtgagggggatgcggcaggaggcggcgcggcgggaggagtaggcggcggcgccctcgggagggagctgcgcgcgggccagacggcgcccggaggctccgcagtgccgccgccgtcgcccgggaggctccgcgcgggagccatgtaaccctgcggcgggctccgggctgctccgtccttccccagctcccgggctagcgcggcagcggggccacgatgaagaagcagttcaatcgcatgcgccagctggccaaccagacggtg

SEQ ID NO: 345507 - DNA, 126 bp, Homo sapiens
  chr17:12693500-12693626
  hyper
tccccgggactcccttctccctctggccgcctgtcttcctggaaacaggtgtttgctctgattgtgctggaggcagccgaaccgcagtcggtctccggagatctcttccctcccctcccctgcgcc

SEQ ID NO: 345508 - DNA, 48 bp, Homo sapiens
  chr17:16283879-16283927
  hyper
cgaaactccgtctcaagaaaaaaaaggaaagaccccccctccttctcc

SEQ ID NO: 345509 - DNA, 674 bp, Homo sapiens; identical to SEQ ID NO: 204447
  chr17:16283956-16284630
  hyper

SEQ ID NO: 345510 - DNA, 1754 bp, Homo sapiens
  chr17:17685255-17687009
  hyper
cggggccccgggccggccgccccctttttgcggggggagagcaggagccgcctctcgcagccactctgcgcgcggggtgggagggagagagggaggcgaagggacgacagcgccgggctccccgcccccatcccacccggttccaatatttcgcagaaaggcacgcggctcctaatcggtcttttccaggctgagatttagccgtgcgatgcccgcgcaggggcgggggccgcgggccaggggaggcgctcagagtccggagccgccgagcgaggtgaggagcccgcgtcctcggctggtggagcgggcgggcgggcgcgcaaacccgagaggcagatatagaaaggggggcaggttaaaaataaccctctccggctgggaagctcgcgcgcgctctctcgcctcgttcggtgccagaggactccaggggaggtggcgttggggagggcagagcgggattccccctcctccgccgggcggggtgcccgcctgcgcgccgcggttgcacgtgtgcggggccgcgcgcccgggccccctctgcacccggtcggtgggtgccccctccccaggaccgggcgcatctggcagtggccccccgcccgcagccttgcgcggctggagggaagcgctccattattcattatttacgagcgttaataggtttgagccacgggggcggggggttgggggggcgacgaggacccagtggggaccgaagcattagaagaagggatagggagggagggggaagggcgggggcggggctgtgccgcggcctggaggaagaggtctcggcctggggcccggcgagccgggcgcacctctccgtcaggtttctccacaccgccggccgtcgaggctgctcagggcgccaagagggcagcacgggccttagattttgctctcggcctctgtccttcgcgtcctcgcccttaccgaggcgtggggagggagctgcggaggccgtacgccccgccctgcgcgccccttgccgccgccgcgtccccgcggcagccccggcctcatttatcatcatctttggtcaagtggagtgtgcaaggaacagctgcttcactcggctgacttcgagggcggctacgggagaatcagggagatgaatgatgggggctggtggcagccccccgcggtccccgcgcaggcgagagggaggcggggacgtccagggccgcctccgcctcatggcgagtgcagcgcccccttcctctctcctggcgcctgcagcgaccggggaccgggggaccggggcaccgaggaccgggcccgccccgggaggggactgggcgcggggacgggggggcgcccttcgccggcggagaactggcgggcgcgctgccggcagagcccgaggttgccgtgaccttgctggggtcagcgggctgggctgcggaggcggcggcgcggcgtctttggtgcgctttccggattggcgcagaggccgggaaacaaggcgggggcgggcgggggaacacaaatagaaggtgaaattttacctgcccctgagggagtcctgcggattttctccggcagcagcaggcgctctgcctttgtcttacacggctgaaacatctgttgcagaggggcggagaggccgcaacaacccccacacaccctgcgctgctccccgtccccctctgccccagccgggctgcaggactccaggcgccgcgttaaccctgctcgcgctggggcgcgcgcccgcactcgctgccgcagtccagcgcctcgcgtggggc

SEQ ID NO: 345511 - DNA, 367 bp, Homo sapiens
  chr17:17687055-17687422
  hyper
cccccctccacctcgatggggtgctgaggtgtaggcggggggcgggggcggaaagggttaatggcctagtcgcagaccctaattgtcagagccggccccgcttcgtttcaattaccctaagtagagactgaatgcgcaattaacgaagtcagcttgccaactggaaagccggccccgctttcacgttgagcagaatactccaccagctgacttggacgaagcaatttcctcctctctctctccccttttttctctccttctctcttccaatccccctccctctttttctctctccttaataataaaattataccaagcagtttgcggtgtggcaggcggccagaaaagcgtttctttaaacgccgcc

SEQ ID NO: 345512 - DNA, 811 bp, Homo sapiens; identical to SEQ ID NO: 335480
  chr17:18907431-18908242
  hyper

SEQ ID NO: 345513 - DNA, 355 bp, Homo sapiens
  chr17:27038294-27038649
  hyper
cgatagccgagcgttccagctctggctggaaccagacttcccgcccatcccgcgggcgacccagcagggcctcaggaccccagtcctcaatcattggcccgcggctcgacgcgagcccgcccccggccctagctccgccccggccctagctccgccccggcccagcactgggccccgcctctctcgttggtttgcccgtctccctcgtcggtttgccggcttcccgcgtgcgccgctcggggtctgcgagccgggccgcgccctctgcccagcccctgccccgcccctcttaccgcggcatctgctctcatcccacgagcgggccttgggctcggtcttttccttagtccatctt

SEQ ID NO: 345514 - DNA, 255 bp, Homo sapiens
  chr17:29297825-29298080
  hyper
cgggtttctagcagctcgcggcatgttggtttcccagggcaagaggccgccactgaaggtcagctctgtctttccagctgggcactggaggctctaagtctgttttcagcaggatcggaggaaggagacggggtggcgccaaggaaggaggagaaaaggcggccgagaaaaggaggagggcaaggggaagaggaagggcgagggaggagcctgaggagactcgcccggctcaaccccgacgtccgcgccccggcc

SEQ ID NO: 345515 - DNA, 206 bp, Homo sapiens; identical to SEQ ID NO: 204553
  chr17:33701376-33701582
  hyper

SEQ ID NO: 345516 - DNA, 168 bp, Homo sapiens
  chr17:33701612-33701780
  hyper
cactgatgcggagtggcccgagggtgggagcagcggttaatgccgcactgattaatacaggctccagtgaaagcgaaagtaagaaaataaaacggatttcattatacatatacaatgtgtgtatggatacatgtacatacatattacacttatgtgtatgttacgcac

SEQ ID NO: 345517 - DNA, 84 bp, Homo sapiens
  chr17:40558083-40558167
  hyper
cgggtcggagatggggttgcgtaataattgcacttgggctaaaatctctgtggtcgtccaaccctgtcctgatccctttccacc

SEQ ID NO: 345518 - DNA, 47 bp, Homo sapiens
  chr17:40558226-40558273
  hyper
cggagcgccctctggtgccgcaaatcgcacactgcccgagccaggcc

SEQ ID NO: 345519 - DNA, 267 bp, Homo sapiens; identical to SEQ ID NO: 204625
  chr17:42091861-42092128
  hyper

SEQ ID NO: 345520 - DNA, 170 bp, Homo sapiens
  chr17:42092357-42092527
  hyper
cagagaagcaggcgcggggatgggacacgcagcttccgggtcaagcgctttttctttttcctcccggaaacaacggtgtcattctctagttccggatctaaggtgacccagttgcgaagtccagccttctcgtctgctcatggagccttcagggccatatttgtccctgc

SEQ ID NO: 345521 - DNA, 197 bp, Homo sapiens; identical to SEQ ID NO: 204637
  chr17:42988798-42988995
  hyper

SEQ ID NO: 345522 - DNA, 89 bp, Homo sapiens
  chr17:42989016-42989105
  hyper
cgtcctgccctggccgcgctcaccgtgccgcgcagagactccaggtcgcaggtcaaggactgcaactggcgccggtagtcgttggcttc

SEQ ID NO: 345523 - DNA, 117 bp, Homo sapiens
  chr17:44849684-44849801
  hyper
cggtggtgacttaaaacgttcaacgcggagtgaatgggtagcgctcccagagccgctttcccctggctcttggccggagacgggaagagcgatcagaggtgactcgcttttggggag

SEQ ID NO: 345524 - DNA, 80 bp, Homo sapiens
  chr17:44849831-44849911
  hyper
cgctacctggcccgaggaggggcaccggaaagcgctgagaccaacacaccgacaagaacgagtttgaaatgcaaaccgcc

SEQ ID NO: 345525 - DNA, 63 bp, Homo sapiens
  chr17:45330951-45331014
  hyper
cgctgacgacccggctggcaggcgggtcctcgtgggcgaggcgagggaggcggcgagagagga

SEQ ID NO: 345526 - DNA, 119 bp, Homo sapiens; identical to SEQ ID NO: 204649
  chr17:45331313-45331432
  hyper

SEQ ID NO: 345527 - DNA, 90 bp, Homo sapiens
  chr17:45331675-45331765
  hyper
ccaaggcgaggtggggcttccgggggttgttcccgcgccttggcagagggatgccgctgtagcttcctgggtgagagcgtgcgcgcgcgc

SEQ ID NO: 345528 - DNA, 218 bp, Homo sapiens
  chr17:46124683-46124901
  hyper
cgcatcagctgcgttaaaatcaccccagcaggcaggttatccggccgccactccagggtcattaaatcagactctccagtgggacctcggaattcgtagcttagcaagctccccaagtgatgctgggagtaaactaacgtttgagagtcacaaacatgttttggcaatataaccagatgggactggagaaattaaaaaatgagaaacatccctaaaaa

SEQ ID NO: 345529 - DNA, 164 bp, Homo sapiens
  chr17:46125148-46125312
  hyper
ttggggtaccggtttccgccgccagcacccaagatggcggcacgagcgtcgcaaccacaagaaccacatgcttcgtgtcccgcctcagcattctcgggtctcactagacttttgcaagtcactgtgggaaccctcaaggcgagggtgttccgcactctggcggc

SEQ ID NO: 345530 - DNA, 260 bp, Homo sapiens
  chr17:46621458-46621718
  hyper
ttgttcttcacccctcttcctccctagctctgaattcttcctcttctcctagagttggggcagaaaggaccgaatcttttctgcttctagggtctatcccagcaacaacatactcattcccctacacagatacgggtgaaaacctcaatcaaatcattttcttctagcagaaaaaaaggcgtttccccaaccagcttccaaaatcagccatagggagagaaagagagagagagacagaaaaaaaaaaagacgctgttagc

SEQ ID NO: 345531 - DNA, 63 bp, Homo sapiens
  chr17:46687527-46687590
  hyper
cggccttcctccgcaagacaaacggcctcgtctccagcccgtgccggcgctgctgataaatat

SEQ ID NO: 345532 - DNA, 197 bp, Homo sapiens
  chr17:48619736-48619933
  hyper
ccaagtggactttttgcggggtgtggcggccgggtctcgaccacagcgtggatcaccggctgtttaggaaactgcagctgcacaacgtggggtgcaaaactgccccgcttcctttacagctcttctcaaccctcacctccatcccccgtcacccaggcaccttcgcttccagatgctgccaggctgtcactcaattc

SEQ ID NO: 345533 - DNA, 297 bp, Homo sapiens
  chr17:54911482-54911779
  hyper
cggatcggcgtgcgtgcggctggagccttaagcgtttcccccgcccggcttcatccctgctggcggcccagcgtcgttctcctcctgcgcgaggcggccaaggcctgctggcccggagccgcgcctccacccgcgcgaggtagggcttcgaggaccggcgcggcgcaggtctccggaggcctcccgagaggggctagggtcgccgggccgcgcgtgggagcgggtggggcccgggaggagacggcgccccggaggggagtgcgaggcctgggccgacggttacgggcgccgaccggc

SEQ ID NO: 345534 - DNA, 515 bp, Homo sapiens
  chr17:54911874-54912389
  hyper
gcggcggcagcagcagccgccttgggctcctggacgcgctcccgaggtggggcgggttggggagtggggattggagcgtgatggctggacgtcgccttctcggcgcggcaggtcccgggagacggggggacgaggcgcagtcccgccctcgggagagcggagccaccttcactgagggcgcccggtttggccccggaaaggcaggaagggggcggggaagggatggcgagctcggggtgcaccgcctgtttcttttctggttaggtatcgtccttggagaagatggaagcggagaggcggccggcgccgggctcgccctccgagggcctgtttgcggacgggcacctgatcttgtggacgctgtgctcggtcctgctgccggtgttcatcaccttctggtgtagcctccagcggtcgcgccggcagctgcaccgcagggacatcttccgcaagagcaagcacgggtggcgcgacacggacctgttcagccagcccacctactgctgcgtgtgcgc

SEQ ID NO: 345535 - DNA, 79 bp, Homo sapiens
  chr17:58498618-58498697
  hyper
cgacaacaataacaacaagacgtttgctgaacatgctggcatagaggacaagttaaaaagtttctggactcaaagggtg

SEQ ID NO: 345536 - DNA, 111 bp, Homo sapiens
  chr17:61777761-61777872
  hyper
cggcgtggggaagcaacggtggcagggacaggatggaagggccgcgctccgcatcctactgggaggggacgagttcaggctgcggcggctgcggtcgcgggacactgggcg

SEQ ID NO: 345537 - DNA, 76 bp, Homo sapiens
  chr17:61778423-61778499
  hyper
cgcacagcaggccggaggcacagccggcgagagacggccactcgctttggagcggcggcgaggccggcgccttccc

SEQ ID NO: 345538 - DNA, 238 bp, Homo sapiens
  chr18:2848166-2848404
  hyper
gcgggggcgtaggagaggatgaacaaagctcccactcccacttctgttttctccctttcaatgtttgtttgtaacataaggcagctgaatctaattggatccatattgtgtgttctggggcacacagaagattccaaaatgtatactgctaaagactattccgtataggattcgctgagaggtttggctaagtagtgttctaaaacgagtgagttctgtccgtatgtccccataaaac

SEQ ID NO: 345539 - DNA, 584 bp, Homo sapiens
  chr18:5237294-5237878
  hyper
cgggcctttcccgcctaccgagcctgcccaccacccgaagtttaagctcatcttggaggacctgacactcaggaagccgtctcccgttgttccaccggctttgtggccccaatgtctgtataagctgctgatttgccttgggaaaacaaaccagcatcgatttcagagaaattactggataatttgcgctgtgaggcgcctagatcgcaaggcgcactccgcaaatgacagccgctcccgtgcacttgtccagtcattcgggtggcatactgtccgggtggaagcccgccaaaataatccatttggaagggacggagggcttcgtcagaaattgccttcttgtagctatgagacattgagcaaaacagataagaactggggcaatggaggcataaacattaaggctaggatgtatttttggggagaaagcggcggctagcagggacgaagctcaacttcatgcgccgcgccccggaatgctttgcctttagccactagcggagccgcccgcctgagggagccctccgggagtgagcgcacgcaaccgtgcagtcagattcctccgccgaccgcggccctctctc

SEQ ID NO: 345540 - DNA, 537 bp, Homo sapiens
  chr18:5238247-5238784
  hyper
gctggcccgggagcgttcgccggcccacctggtggctttccctggacgtttaacggcgactccgcccggcctcccgactttttgatgcaggcgttctcttacatgactttcttcgaggctagattctcgaaagacatcctgaaggtggctttcttaattagctgcctcaccggctggcggagcagttcgtagtcgcctacatcgagagggagagccccgtcctggctcagtactggggcttcgtggacgcgctgtagcgggtcttcgccgtcgtgggtaggaaacagtcgggccggatccccggtgtctggggagcggctgccggccgggcccgcgcgagccgcttcactcctacaagcccggctcactagttccaagctgctggactttgaccctcgctgggaagcttgatcgccgcctgttctcgccaatctctatgcctttgcactgcccagcaacccggtcactgcccaggacctgttaaaagttgaatggacctcccagaatcacgccgctgccaccgccgtttctagagac

SEQ ID NO: 345541 - DNA, 563 bp, Homo sapiens
  chr18:11947488-11948051
  hyper
tttttaaaatcactcttcctggagatcttcaaaccagaagcaccgcgggccctccccaacgggcttctgcttacctccactacgtgatgcagtatggcccccgggaggccgcccccagattctagaggggcttaccccagacacacccgaaggaccacctcgtgacctcagaggaacagccctagacccaggagagactgccagacacccccgtggcagcccgccagggcccagctctacttgtcgcctggaggtgctgcctcccttccacgccgccccagggaatggccgcccctctggggctcctcccaatcccccttcccaggactgacaatggcccggcgccctgctttgggccaggatcggcctcgagccttcctcactagcggccaagagccggaaaccttgcgtctcagattccccgggtctgtgcacccccaccccaaccggtcttcccacccaggccccccctgatgccagctgcgggcctggacctagcccggggccctgcccctccgcccctctcgctggacagcccaggccggcgcccgagggataggctc

SEQ ID NO: 345542 - DNA, 242 bp, Homo sapiens
  chr18:19750066-19750308
  hyper
cgctccgagtctccctgtcattcttcctgctctcccatttggggtcgcctcggctctggggcggtctcacgctcccccctccccagcccgttgcgttccccctccttttctctgctctccgctccaccccgctacgtccgattccggaacggtccggcgtttctgctgctggagatgaccgcggggtgggccgggtggcccggccggcgtgagcgcgcacgctggtggctgcaggcgcgggc

SEQ ID NO: 345543 - DNA, 349 bp, Homo sapiens; identical to SEQ ID NO: 204911
  chr18:19750390-19750739
  hyper

SEQ ID NO: 345544 - DNA, 224 bp, Homo sapiens
  chr18:19750806-19751030
  hyper
gaccggagcggtgcctttgagggagggctggtatcccagcccttccagggccctgtggcggctgcgcaggctcccttcccctcccttattgatctccacgcccggggcagaaataggatctttgagaagtctcaaatgggatctttgagaagtcagatcccatttgaactagaaaaaggagtggaggcgaggtagcgtgcagcctacgctcttgttaacccgtc

SEQ ID NO: 345545 - DNA, 195 bp, Homo sapiens
  chr18:20512643-20512838
  hyper
cgattcttttacaaatcaggagaaataggaatacctactatcggtttgaatctcaaacgaacagccacaagaaaaatggactttttaaaaaaaattatctaacagcatgttgtcccaataaataatgctgaaggagattccttctcgtttcaaatttgccagaaacttcccgtttaacctcagcaaaatacagat

SEQ ID NO: 345546 - DNA, 1232 bp, Homo sapiens
  chr18:20512902-20514134
  hyper
cgacaaggccgaaaactatgttagacggatccgcgtccataccccccatcagttaattttaactcttcattcggtacaggtcactctacacatgcttccctgcaaaatgcttaagctagacacagtgtacagataactttcacagaaccgcaagggcttgatgctcccccaacagaacggcttgagctttccccagcgcaattcagaaatgctgtggcggtcgccagactcttcgggtagctcccggcagctccgaggtagcgctcccctccccaaccatcgccctccgggatgggccgcaccgaagagcccgctcctcagctagggcacgaagtgcgccgccgcgatgggcagctggaggaaggggcgtgacgcaagtggaactcccgcgtgacgtcgcgcgggctcccgggcggggcgggtccggccgcctccgagcccggccggcagcccccggccttaaagcgcgggctgtccggaggggtcggctttcccaccgaggatttggcactctggtgagggaaaagggcgaaagagaaaagcgagcagccgtcctttcacagcctcagaaagtgctcgcttcccttcgggggctttcgcgaatcccgaggcaatctcggaggcggtgagtaaaagcaatctctttaccccacccggagctctgggtcggagcgactgcttctggtctggagctgcgtgcttggcgaagggctcccggggtaggggtggctcccggctctggggttgtgtctgatgaaataggccgggcccgggctacactcggtggtggtggaccggcgggaggacgagcgctacctcagtactacttctgggtctcccgcgcgggctgaggaagcgcctttcgccgccaagcccgccccgcgcatgcgccgactgcggctcgcgcgcgcgcttcggaggttttttggccagacccgcacgcggaaccggcgcgggcacctggggagaaatggatggagaagggacctggctggaaagcctttgccccgctgctctgctccgcccataagaggacccctgaaatgtcccgtgcagtttgttcaagtcccctgtgtgatgaaatgtgcctctcgccttacccgtgtgagaatacctgtggtgtggcagcgagtattttggtgagcacctgcagtgtagtggtttatactaaggaatacacacaaattacaggcctttgagcccagaatgcaacttgggaggtaagacgtgac

SEQ ID NO: 345547 - DNA, 287 bp, Homo sapiens
  chr18:31804522-31804809
  hyper
cgaggcccgcgcccgtcccggggagcggctctgccaggaaaacggcccgaccagtgcccggcgcctgggctgcgtccgagcccaccttcttccctcgtcgtcgtctcccagactaaatcccggaaagggaaagcgggatgtttgcgcccaccgcgctgtagctggtcctgacacttgcaaaatggtcagtggctcctgctcggccaggctgagtgtgtgcgtgtgtgtgagcaagggagcgagggtgtgcggtgtgcagggggtgcgctgtgtgtgcgcgcgtctcc

SEQ ID NO: 345548 - DNA, 1207 bp, Homo sapiens
  chr18:32556625-32557832
  hyper
cgtttgcaggtaattaattcacagtgtggcggcgccttttcaagccccctctgcaagccgcgccggcctcctccctctcgagcggggtcaaaccacttagtttatttcacccgctggcactttcttccctgtcacgaattcagcctggcttcctttggcctgagacagcgtcttcaggcgggtcggctcggacctgcccagtggggcgcccacctgcacccgcacccgcacccgcacccgcgggaaggggcggcgctggccggactctctcgggtggactcccggagcggcggcggcggcggcggtggcagactgcgagtcacgtgcgacagaggaggcggagcacggcggccgggtgggtggagaaaacaaagcccccagctgtcagcagaggaaggaggcgacagcgccggagcaggtgagtcaagtgcatttaaagcggtaccgccctggcgcaccccgacaccccctgcactgaagcagtccctcccaggccaggggctggctgcgcctcctcctgccgctgaggtctgcagcccgcggggctcggagcaaccggaaccgggggtccagagtctagcaagaagttgtgcaagggtcggctaggcggtctccgggtgtgcaccccgccgctctcccgcgggccacatctctggttcggtgccccagctctgtgcaccccaggaaagtggagggagggagttggggctgccacgctggcagaagcgaagtggactggttctgaggggtgaggctggggctgtccagggtaggaacacggcgttggtgaaggaggggggctcgcgactgcgcgaccgcggcgcacgaccctccaggctctagctggggcgccggcactgagagagctgggggctctggcaggggctgcgcgcttgggggcagatcaggaagtgcagcgcgctggcgctcgcgcgcttgggagcatcccctggaccccgggcacttccccttcggcagccaccactctcccactccgacgccggccaccatccgcgctcccgggactcaggagccgggtgggtgcaaaaggaagcgggttgttattctgcgcccaagcatctcttctgcagggagccccgggagcgcagggcgagggctactcagcgacttcgcactcggcttagtgggaaattcttcggtctacccttagaagggctatgcggaagccagaaatcccacaaagagc

SEQ ID NO: 345549 - DNA, 45 bp, Homo sapiens; identical to SEQ ID NO: 204955
  chr18:32557883-32557928
  hyper

SEQ ID NO: 345550 - DNA, 445 bp, Homo sapiens
  chr18:32558003-32558448
  hyper
atcaggagaagcctttgtcttaacccccaagcccctcctgctagtcctcgctgggtcagtagcgctgggagtaattaatattacgaacattagcctttccttcacctccgcaccagccaacactgctgtcccctccctgattgtcttctctatcacttgttcacatctccttttccaaaaaaagaagaacaaaaggaaaatagtgtagacccgctaggcaggaagaggtcactaaaaatactatcgtgctgtcaatgtagaatgaagggttaagcgctcaaacccgcgcccgcgcgcaccgaaacggaagaacttccttgattagcatagtatcgaccctggggccgcgctgcgaggcggaggttcggtcccagctggggtgaagtgtgcagaccggttgcgattgtggtcagacgcagcacctacttctaatctgaggacccgc

SEQ ID NO: 345551 - DNA, 593 bp, Homo sapiens; identical to SEQ ID NO: 335791
  chr18:32621215-32621808
  hyper

SEQ ID NO: 345552 - DNA, 755 bp, Homo sapiens
  chr18:42258983-42259738
  hyper
cgcccagtttcgagagcctatcacagctcacgtctgggcgcgcagtacccccccgacactgctcctgttgtgtcagatagtggcagtgttgagcccaggaatacgcgcggagcccgcggcgatccccgcggccgctcagtcttcgcggcggactccggcgcgcaggagccactgggccgcaagggcgccggggagcgggaggggcgctgggggcggcaaggggtcccagatcccaggccacgaactgttttccttttccccgggcaagagccccgctcccttcaactgacagaaattcactggggcaggggggcgagtggggagagaggtcgctcagggctcgctactggctgcgcctcccccggctctggtctgggaagcggctctgggccctccgggcgagcagcttgggcgccggcgccccctgcgaggaagatcgcggggtgacggtcggtacccgttcggctgggccgcgctgccgctccgatccacctcccttccgcgcccgcgccctcccccttcctttcactaggagtccgggattcggagagggcgcgggaggcaggcacacgggcccgaccccactccagcgctcaccggggacgcgggcgggcggcgacgggacgcggcgggggcgcggggcgggcgcggccatggagcagcagcggcggcggcggcggcggcggcggcaacactagcgaccgcgggcggacgagcgggcgggcagggccgccgggctcagcggaccgaactgc

SEQ ID NO: 345553 - DNA, 79 bp, Homo sapiens
  chr18:44335955-44336034
  hyper
cgatacgattttgagccctccgaccccggagtccaaacaaatggccatagaactgtgggtctggaggacaccgctccga

SEQ ID NO: 345554 - DNA, 195 bp, Homo sapiens
  chr18:47339411-47339606
  hyper
cgattcacccggggagccctgaccaccgaggccgagcggcgggctcctgtgcgcagctgccccgcagcaggcgcccgcggcctatggcgccgccccattttttctaatacttggactcgaactagtggggtcactgttaggcgaagaaaggaatgacctccaaggtcacatgcaagcaaactttggtctcaacta

SEQ ID NO: 345555 - DNA, 400 bp, Homo sapiens; identical to SEQ ID NO: 204991
  chr18:47339758-47340158
  hyper

SEQ ID NO: 345556 - DNA, 98 bp, Homo sapiens
  chr19:1725428-1725526
  hyper
cgggtggtgggaacgggattggaatcccgactgtggggcccctgcggccacctccaggatacagcggaccccgatgaagccctggcctgggtgctggg

SEQ ID NO: 345557 - DNA, 93 bp, Homo sapiens
  chr19:1762079-1762172
  hyper
cgccctctggcagtcttgagccagcaactcccctaagtggggtgcggggacatctggaagacgccccatctccccctggacgcagtggctgcg

SEQ ID NO: 345558 - DNA, 47 bp, Homo sapiens
  chr19:1762820-1762867
  hyper
gccgtcctgggtgcgctcagctccagcgcagtgggaggacaagacac

SEQ ID NO: 345559 - DNA, 109 bp, Homo sapiens
  chr19:1857456-1857565
  hyper
tctgactcaggctgggcccgggtgagctcaggacagcctcggaaacaggcaggctcagaaaaatggagtccaggaagtcctggaaacctggcccggccccgtctgagcc

SEQ ID NO: 345560 - DNA, 116 bp, Homo sapiens
  chr19:1979018-1979134
  hyper
catcccgtaccgcgagcacaagagcctgacgggcacggcgcgctacatgagcatcaacacgcacctgggcaagggtgagctgcgcgcgcgcggcggggggcgggcgcccggacccc

SEQ ID NO: 345561 - DNA, 601 bp, Homo sapiens; identical to SEQ ID NO: 335900
  chr19:2461998-2462599
  hyper

SEQ ID NO: 345562 - DNA, 766 bp, Homo sapiens
  chr19:7459915-7460681
  hyper
cgccccgccctcgagggcacgcctccttccgggtcacgccctctgccccgcctccgaggcgggatcgcgcatgcgctgctctcctcgcgcggcttcccgcttccggctcccagctgctagctactgtggatctgggggggccggacggaggcatcggaggcggctgcgagagtggcagaggagctggcggagagcggcctgcgggcgatcgggccgaggtgaggacggcggcggggcggtcccgaggaaaacggggctcaggagggggccctcggtctcttcagggggtggcctggggcgcgggacccccggggctgcctcgggcctcccgccggctcctgggggacttctccaggcaggcgaacgggtgctggggtgcaggctgctccttcaatgcatggaggctctaggcggcgattgcagggtgcagaggtgcagacgatgcccgcccgctccgtccgagccccagccagtcctggggtgctacggcttactctcctccaggagaggagaggaggggtcacttgggccccagcctctgctcctcgttcaggagcgcccggggcaggaccagggatggaatggaacccaccacaatacccagcaccgtcgtatttcaggcctcccgggagaaccctcacaccccggagcagacagccctccctggcagggagcgtttgggtgcaaaaccgtgagaactatctgtgccatgggttttagtttcttgtataagaactcagttggtgctttcattgcggacgggaac

SEQ ID NO: 345563 - DNA, 214 bp, Homo sapiens; identical to SEQ ID NO: 205174
  chr19:10400761-10400975
  hyper

SEQ ID NO: 345564 - DNA, 160 bp, Homo sapiens
  chr19:11909173-11909333
  hyper
cgaccagggcgcagggagtgagcttagccttagaaaggctgtagctaggattaatcagccgggctctgcagggctccgttacccagggcttaccctgtcactcagggctgaggggcggagcctggaaccccatccaatcaggggccctgggacggggccc

SEQ ID NO: 345565 - DNA, 60 bp, Homo sapiens; identical to SEQ ID NO: 205194
  chr19:11909732-11909792
  hyper

SEQ ID NO: 345566 - DNA, 49 bp, Homo sapiens
  chr19:11959378-11959427
  hyper
cgagtgcaggaagcagctcgtgtaagcttagagaagctgttgctagaat

SEQ ID NO: 345567 - DNA, 254 bp, Homo sapiens; identical to SEQ ID NO: 205198
  chr19:12075818-12076072
  hyper

SEQ ID NO: 345568 - DNA, 60 bp, Homo sapiens
  chr19:13208370-13208430
  hyper
cggctggactgctccggccgcgggtctccccgggcgcccctccctggggcccagcacccc

SEQ ID NO: 345569 - DNA, 205 bp, Homo sapiens; identical to SEQ ID NO: 293612
  chr19:13208478-13208683
  hyper

SEQ ID NO: 345570 - DNA, 284 bp, Homo sapiens; identical to SEQ ID NO: 205227
  chr19:13208945-13209229
  hyper

SEQ ID NO: 345571 - DNA, 446 bp, Homo sapiens; identical to SEQ ID NO: 293614
  chr19:13209259-13209705
  hyper

SEQ ID NO: 345572 - DNA, 189 bp, Homo sapiens
  chr19:13213427-13213616
  hyper
cgtcaggccaggctctgctgtctcgcgagggtccggcctcaatgctccaggccccggcgttgggccgcgcctcctcgtgggcctcggaaggccaggatagccgaggtctccgcgtaggtcccccccagggaaagtgagcggctcccgggccggcccgccttctccccgcccccggcggcccggtttcct

SEQ ID NO: 345573 - DNA, 112 bp, Homo sapiens
  chr19:13213834-13213946
  hyper
tgtagggaccccgggcctctggggacccgggccccagggcagccggggagggaggtgcctggatgcacgcagggggtaaactgaggcagggaagctgcctcctcttatgtcc

SEQ ID NO: 345574 - DNA, 1257 bp, Homo sapiens
  chr19:13265772-13267029
  hyper
cgtcaggggctggcagccgctcgctggggccccaagaaccggtctgaccggttaccacgtgggcgagagagggttgggcccccttttccttgcccgggcattccctaactggtggagccccgcctcccccagatttgggggttcccttgaaattgtcctacaactccgggacagggagatcggggctttctgagttgagacaatagtgctaaacacactgccccaagcggagctggggatcgattgcacgcactttgaagccttgaaaggtggtagatctcgcccccaccccctagaccaaactgaatcagctgtggccggggccctacagtatcaggtggagctgagcgggtgagctttgaagggctctttagtccccagttcccgtatcttcctcgaggaatcgttgtgtgtctcaggcagggacgtgcagcctcagtttcctcatctgtgaaatgggcctctaagcagcttctccacccggcattaggtttttaaaaatgcccattagagccctagttattttcttgggtcactccccagctctagaataaccaccccgaaacgagaaagccctttcaatataccccacgtaggtttaagagtggggttgtgggcgttgccccagggcgaagggagggggcctgtcgggaagacaaaggagtcgcaggtgcggggagtggtggcggcggcaggcgccgggaaagcgctcgccccgccccgccgacggctggctctgccgccgcaggcttcccatgaccccaggggaactgaccccgtggccacagggtagaaggaggggcaagccggcctcagaacgtctgctggtggaatctgggagctttggctcccctcccgcccaacccacaccccctttcctctcctgtgtggattgtgaaggagagcttctcaccgttctccagccaagctcgcccccacggctgcctgattccttcctgggaacacgtggggggacttttaaaaggcgccacctactccgagtcctgacccacccaactctcccaggggacgtgggggcactggagccccacaccgcaggcggtagctcaatgcacccgcgtcggagttcctcccccgcgagcgtggcaaggctcagggaagtcccgggcccctggggagggggccttgccgcgcatcctgtcgcaggaaccgccgggcccttccttccgcgggaagcggcttggccgacccccgcccccgcccgggcctcttgggggtttccggtgcccggccacc

SEQ ID NO: 345575 - DNA, 324 bp, Homo sapiens; identical to SEQ ID NO: 335997
  chr19:15235629-15235953
  hyper

SEQ ID NO: 345576 - DNA, 161 bp, Homo sapiens
  chr19:16186802-16186963
  hyper
cggggacgtgaccccccccccaggctgacccgttcctcgctctgtcgtccccaggtggaggaggagctgacgcacctccagaagaaactaaaagggacagaggacgagctggataaatattccgaggacctgaaggacgcgcaggagaagctggagctcac

SEQ ID NO: 345577 - DNA, 102 bp, Homo sapiens; identical to SEQ ID NO: 205249
  chr19:16187000-16187102
  hyper

SEQ ID NO: 345578 - DNA, 517 bp, Homo sapiens; identical to SEQ ID NO: 205250
  chr19:16187103-16187620
  hyper

SEQ ID NO: 345579 - DNA, 634 bp, Homo sapiens
  chr19:16187640-16188274
  hyper
cgacccacatccctgcgcccgcagccaggaccccctacttcctccgccgtcctccttcctgggcctgggacaggggagggggcgccgcctccgggtcgggcggggccggccaagcgggaaatggggggatggggcggagggggtgagcgatctccgggtggagaagtggagcggcgggagggggcgtatcgtgcaggctccgactccggggctggcgccggggtcccgggccgaggggaacccgcgaccggacttgtgggggagaatgaggatgaaaacgtggagcttccattgtctagggtttgaccggccgacagggatttcgacgggggaccggggatctggggagggggtcgcactttctcgcctctttcgcggcttcccggcttctgcttgcttccctgaccgttcccaggggcgcggcggcgacgtgtctgctccaggcggcgggggggatggggggtggaggaagttcagccccaagccgcccgcctttctccagctgattcctgcgggaaccggggcggcgggaccctgcctctctccagaaggccccgggaacgctggcgcggggccctgaacccacgatcgtttgagcgcctgctgtgcgcctccgccgcgagtcgcagggccc

SEQ ID NO: 345580 - DNA, 214 bp, Homo sapiens
  chr19:17008145-17008359
  hyper
cgccgctcgaccccgccctcaccacactgaccaccctcaacccattgcgcccagtccccaccacagtgaccacaccctcactggctcggccctgcccccagtatactgaccattccccagccacttcccttccgcacttaccactcccccagccacgcccctccccgctgaccgctcctccagccccgcctcccccgtacaggcagagcgcccg

SEQ ID NO: 345581 - DNA, 31 bp, Homo sapiens; identical to SEQ ID NO: 55797
  chr19:17008820-17008851
  hyper

SEQ ID NO: 345582 - DNA, 129 bp, Homo sapiens; identical to SEQ ID NO: 205270
  chr19:17958346-17958475
  hyper

SEQ ID NO: 345583 - DNA, 693 bp, Homo sapiens
  chr19:19976556-19977249
  hyper
cggctggggaggcggggccttaggcattatccaatgagggacgctgggccggaaaccgtccaatcaggcacgcagctggagcgaaccacatggtttctgggggcctttgtttctcgctgcagcgggagctccaggtttatcctcagtgttctgtgtcctgtgcttatagaggcccgtcctctgtggccgtgtgacctgcaagtattgggagagccacagctaaaccccgggacccctggaagcctagaaatggtgagtgccgggtccaacgtcccgagagaggggagaggctgtttggaacggtgggaagtggctctggcgggactctgcttcctcacagtcagctccacaatctgccgccggagttctccctgcccagctcggcctcagtccccttcagccataagatggcggctgcggtgacatccggggcccggcacagtgattgtgccctggcctggagccctctttcagcagctctgcacccgcagcaccgcgtctctcccagatcatgcaaggaccacgggagggtcgtcaggggagaatcctgactcggttccctgcgggttcatgaatgggaagagctttggtccgtgaggttgttagaaacaagcgcttggtgccgcaaaacaacacaaaacaaaaaactacccagcacttagaaaatttcacaggaaggcatatttacttctg

SEQ ID NO: 345584 - DNA, 35 bp, Homo sapiens
  chr19:19977294-19977329
  hyper
aagaaaggaaggaaggttttttttttttttgaggc

SEQ ID NO: 345585 - DNA, 60 bp, Homo sapiens; identical to SEQ ID NO: 205321
  chr19:22019028-22019088
  hyper

SEQ ID NO: 345586 - DNA, 68 bp, Homo sapiens; identical to SEQ ID NO: 336059
  chr19:23578240-23578308
  hyper

SEQ ID NO: 345587 - DNA, 701 bp, Homo sapiens; identical to SEQ ID NO: 12224
  chr19:24216103-24216804
  hyper

SEQ ID NO: 345588 - DNA, 60 bp, Homo sapiens; identical to SEQ ID NO: 205342
  chr19:30718934-30718994
  hyper

SEQ ID NO: 345589 - DNA, 209 bp, Homo sapiens
  chr19:36980725-36980934
  hyper
cggacccgtcctactgcccccaggcgctggacagcctcagaaagaggacaagtctgcatggaaagataatcgcacaactgagccttctgggagatgtagttcggagctgggaaggcggttggaccctccgaaagtcatcttaattgctctcacagataagccggtgctgggctgccggcctgagtactgtgcgcccagagtgcgcaggc

SEQ ID NO: 345590 - DNA, 295 bp, Homo sapiens
  chr19:37568994-37569289
  hyper
cgcacctgcctggccggcgggtcccaccctctctcctgccaggggtagaccctgggaccactcagctcgctctcgcaggccctgagcgtctgacgcctgcgcactgagcgcgggcgggcgggcactcccagaaacctccggggcgctgcaggcgggacaagcaggttccacaggccgagcccacgagcccctcgaggggtgagcggcccgggcctcctggcgttctggccggctagccaagcgctggactacatttcccagaggcacggcgtccggagcgctggactacatttcc

SEQ ID NO: 345591 - DNA, 182 bp, Homo sapiens
  chr19:37569554-37569736
  hyper
gtgtgcaggctacagcctgcctggtattggcgactgcctgtgcatacacgactggacgtgtgtggctgtggttttgtgtatgagcatttgtatgagtgtgagttgtgactctgagggtgtttgtgactgtttgcttacctggctgggatatacttatgtgactgtgattttatgtgtgccgc

SEQ ID NO: 345592 - DNA, 83 bp, Homo sapiens
  chr19:37957588-37957671
  hyper
cgctggcacaaacgccaagtctcacacatctacacccacaagcacaccctaccttgtatccacagtttttcattcattcaaga

SEQ ID NO: 345593 - DNA, 37 bp, Homo sapiens
  chr19:38182720-38182757
  hyper
cgagtaaactgacgtcctggaagaagcacccttattt

SEQ ID NO: 345594 - DNA, 69 bp, Homo sapiens
  chr19:41115811-41115880
  hyper
cccagggtctcgctcctgctctcactccagagcctctccagccctcccacgcttcccctctcgggtccc

SEQ ID NO: 345595 - DNA, 68 bp, Homo sapiens
  chr19:44711963-44712031
  hyper
tctcctggcgttccgcagccagcctctcccacctacttgccagctctgccacttactagtgttataac

SEQ ID NO: 345596 - DNA, 200 bp, Homo sapiens; identical to SEQ ID NO: 205477
  chr19:45656461-45656661
  hyper

SEQ ID NO: 345597 - DNA, 139 bp, Homo sapiens
  chr19:46931914-46932053
  hyper
cgtggctcccgggtcctgggcaaggctgcaccaaggagggtctaaagatgatgcttcccctttcttggcgtggcctccgaaggtctcacaggccccaacggtctctccggatctgggactgctgatctccctgggacaa

SEQ ID NO: 345598 - DNA, 93 bp, Homo sapiens
  chr19:49127280-49127373
  hyper
cgcgtgttagagtctctgtctttgcagctaaagacctcctccctcacgccccttttcttttgtgaattcaatggatgagacaggcccactctc

SEQ ID NO: 345599 - DNA, 484 bp, Homo sapiens
  chr19:49217005-49217489
  hyper
cgatgccccggttaggaagcaactgcggatggagaaatttggcgtgaactcgggactgcgacctggacctgactggagaaccctagccggattcaacccacaccctcttacctgcgccctccggatcgcttcctgcagctcctcctccagagtcagagccgctgagcccggccctgaggaaggggtcagggctggagctgcagcaggagccggagtgggagttggagccggagccgtccccggggtatccgcggcacgtggaagaggtggcctgtgagatgctgcgctgggcttgacctagagcagccaagagggcgagcgcccataagccatgcccacagggcgcaaccccacccactcgcaacgtgtggctccaccccttgatcctctcgcgacccctcgctcatcaacccctttggcctcgccccctattctttcattggctcctcttctctaaagatccgccccctgttagtctgaacca

SEQ ID NO: 345600 - DNA, 43 bp, Homo sapiens
  chr19:49217526-49217569
  hyper
cgcccccacacttcattggctagttttttcgacaccccgcccc

SEQ ID NO: 345601 - DNA, 550 bp, Homo sapiens; identical to SEQ ID NO: 336209
  chr19:49467064-49467614
  hyper

SEQ ID NO: 345602 - DNA, 88 bp, Homo sapiens
  chr19:50836203-50836291
  hyper
cggttccattcggagccttggtctctggacaccaaaggtgaaaatgtgaggactctctgcctacgatccttcgtcccctaaaaccctc

SEQ ID NO: 345603 - DNA, 588 bp, Homo sapiens; identical to SEQ ID NO: 205542
  chr19:50836451-50837039
  hyper

SEQ ID NO: 345604 - DNA, 88 bp, Homo sapiens
  chr19:50837389-50837477
  hyper
caggccgcaggaaccaccatttccctgggagtccgtgctctctccgcccccaaccccggggacaagaaatgtttctgtggccccttcc

SEQ ID NO: 345605 - DNA, 73 bp, Homo sapiens
  chr19:51228809-51228882
  hyper
cttcctggccacgaatggcagcgtcctccccgacccccagtctgggcgcttctgggagggctcttgcggtgcc

SEQ ID NO: 345606 - DNA, 96 bp, Homo sapiens
  chr19:51416002-51416098
  hyper
cgctctacggatcttgtggagacgcataggtgcgggaaggggggtggggggtgagagggtgccgtagaccgcggagggtgcacggaggggcaggcc

SEQ ID NO: 345607 - DNA, 242 bp, Homo sapiens
  chr19:51416099-51416341
  hyper
aggtcaggactgccgagaaacagcggggactcatcaggggagaggtggtgtttacagccacgaggccgggtgagatcatccaaggagtgggtgggtgtagaccgcggagccggcgcgggtgagggatagtgcccgcaggtgaccgcgacgaggcaggaatgtctctgtgtctctctgtctctcctgggtctctaacactctttccttctccttccttacttctttcccccacagcccacccc

SEQ ID NO: 345608 - DNA, 74 bp, Homo sapiens; identical to SEQ ID NO: 205557
  chr19:52531285-52531359
  hyper

SEQ ID NO: 345609 - DNA, 208 bp, Homo sapiens
  chr19:52531884-52532092
  hyper
ttatagctgagagtggagccttagctggagcaccatgggcacggccatcttagaggaaggcagcagccgtacggcagagaagatgctcatatccaggacaatttggaaaaataaacaaggtttgaagaagtcacggtgctggccaggaagcggtcacagagttgccaaaaccagtggtcactgaaagtgttagatttggggatagggc

SEQ ID NO: 345610 - DNA, 263 bp, Homo sapiens
  chr19:53104083-53104346
  hyper
cgctcctccctggcctgagcactccgtcccgcatcccaggcggtggccctagggaagtctctgaagctgagcacagggtggactctgcccccaccgccgacccgccctccccgaccccgagtgaatggagaatagaaagggagaggatttctgttctgtcctgtgggccctcagtatgaaatcgtagttctgcccaggcaggactttgcatttcacattctagtttgcatccccgttccagacaattccagggcttttgactc

SEQ ID NO: 345611 - DNA, 60 bp, Homo sapiens; identical to SEQ ID NO: 205570
  chr19:53141353-53141413
  hyper

SEQ ID NO: 345612 - DNA, 132 bp, Homo sapiens
  chr19:55952964-55953096
  hyper
aatccagcgccctctctctcaacactttccgctgattttcttcacagcagtcatctaaaattacactgcacatgcttacggactgggccactgatagttaatgagcccttaccgtgtgccaggaccctgcac

SEQ ID NO: 345613 - DNA, 70 bp, Homo sapiens
  chr19:57831543-57831613
  hyper
cggggcgaatatccccgcctcctgacctcaattttcctaagctagaaaggacctttcgaccctccgactt

SEQ ID NO: 345614 - DNA, 460 bp, Homo sapiens
  chr19:57874412-57874872
  hyper
cggtgtagccgttgagaacttgctgtgcttcacaatccgatatcataggtccctcacatttctgtgagtatcctagaccttacttcaagaaaatctggttatgtcgcctttaagagcaacccaagccccgtcctgtccgtggagtccggcactctgtttaccagctcccctgacggtgccactgagcctctatccgccatataaggactgaccaacgctctaaggcaagtccagaagcggtgtcgaaacttcataacccagaagacactgcggttctcggcagcgcgactgacccaatgaatgtgcaggaaggaacctttgcgtgcgtgcgtgcgtgcgtgcgtccgtcctcgtgctcgcgcatcgtaggagggcgggacttccggcgtcctcttgccgtggttgatttgattttctctggtgttttcactagttccggcctttggcgctctatgacgtc

SEQ ID NO: 345615 - DNA, 217 bp, Homo sapiens; identical to SEQ ID NO: 205623
  chr19:57875005-57875222
  hyper

SEQ ID NO: 345616 - DNA, 43 bp, Homo sapiens
  chr19:57875252-57875295
  hyper
cagagcatggaggtgctgccaagtgggccgcgtcggggagccc

SEQ ID NO: 345617 - DNA, 169 bp, Homo sapiens
  chr19:58144201-58144370
  hyper
cggggagctggaagaggcaggaaaaggagcacactcgaagtaacgtttattggggaaaaaaaacgcctacgtgtaaatggacccgcacagctcaaacctgtgttgttcaagtgtcaacctacttaagacctcaaacaccgaagcccctcagtcgccctggaaggcagca

SEQ ID NO: 345618 - DNA, 209 bp, Homo sapiens; identical to SEQ ID NO: 205633
  chr19:58144745-58144954
  hyper

SEQ ID NO: 345619 - DNA, 627 bp, Homo sapiens; identical to SEQ ID NO: 336321
  chr19:58258088-58258715
  hyper

SEQ ID NO: 345620 - DNA, 130 bp, Homo sapiens
  chr19:58610001-58610131
  hyper
cagctcacggttaagaaaggagggagaccagcccaggatcaagaaagggaaagaccagcatgggctcaagaaaagaaagagaccagctcaggctcaggaaaagagagagacccagagaaaaggagcactc

SEQ ID NO: 345621 - DNA, 88 bp, Homo sapiens
  chr20:2731528-2731616
  hyper
cgatccccagaagtgagtgctttctctttgccgggaaactaaaggaaatccactaagtcaggatcagaggtgaaggtagggctctgag

SEQ ID NO: 345622 - DNA, 744 bp, Homo sapiens
  chr20:2731675-2732419
  hyper
ggggaaggaggaggagaagggcgtggggagctgggtcagacgcgcatacacacacacaccccttgcacaacgccagggtaagcagtgaacacaacacacgtggagatgcaatgtagaatctggccgctggccggatcttctctacttccatcctcccgccccagcccaagccacccacttctccagttgcttccctggggtgcatgcaaacctctagccttcagatgctgcagagagtccacttgagccgtgataaatggagattgttaagttttttcttttttataataaactcctgatttgaccagatgaaaagagaaaactctccatcgagtcctgcccttaggactataactcatatgtgtatacggtttcccttttttctaatcacaaatgggtgcatgtgtgttcataccaagcgcctagggccgaggacagaggctggctcagtaaatatttgttgagtaaacaaacgaaagaactgaaacttccctgaatctcgctgccgggggtgcctggagttttccgggggacttgggctgggcctggtggagggggctgcagcgaggctctcggactgggcgctggcctgcttttggcgccctgcgtctcaccctgggagtggggggctgcgggggagacgtcctccaaacgccgcccccttccccagctctgaacgagcccaccattgactacggattccagaggctacagaaagtcattcccagacaccccggagacccc

SEQ ID NO: 345623 - DNA, 143 bp, Homo sapiens; identical to SEQ ID NO: 294514
  chr20:2820861-2821004
  hyper

SEQ ID NO: 345624 - DNA, 843 bp, Homo sapiens
  chr20:4981674-4982517
  hyper
cgggaggaggcggcggcagccagtggggttctgggggcgccccatttgcctccccgctgcgcggcctgagggcccgagcgcgctgtggctcccgtggcgggaaggggtgggtaccccgggggcccggcccggccggcagaacggcaggagctgagggccgccgggcatcttgggccccggggccagggtggccggcgggcgcggggtcccgggagatgggtcggggtgggggcgcgcaggccgcgccgcggggccggtgggtgacagcgcgcgggggccgtgccaggccggcctcgtgggcgcggcgagcacctcgcggccccgccggcaggtgcggcccgcaggccgggcagggggcgcggcggccgggctctcacctggctgcagctcgcgtggttcccgtcctgccgccgcgcctcggcgccgcagtgcccgctgcagcctccgcctccggtccccgcgacagccgcctgcaaaatggcgccgcggaggggcgggccgggggcggggtgcagcggagccgcccgcccccgcgccggtctggggcccacctccctccccgcccccgacccctgccctcgggcctccccccggggaggggctgctccctggcacccggcagcgctccccggaacatcccgggcctcgcacccagccgtccccttcccgttcctttcatttccctcccctgcgcagaaagatcgccccccttcgcgacccttcccaccagtcacacctgttcctggggacccacctggcaagcagagcgctggtccctgagtgtcctggtccaggtcccccctttttaccccgcctgccaccgagccctgtcattgctcgagc

SEQ ID NO: 345625 - DNA, 79 bp, Homo sapiens
  chr20:20350750-20350829
  hyper
ccccttggcggggagaagctttttttcttgctagtattcgctgtgttcatggtctagaaatgcggtctggtctcgcctc

SEQ ID NO: 345626 - DNA, 205 bp, Homo sapiens
  chr20:21080357-21080562
  hyper
cgttgtcgtctgctgatgtttaaaagataagaagacatttgtcagggcgggtgcttgaggctctcagaggactccgggagacactgccaaaacgtttccaaactgaatagtcattgggctgccagataattcagaaactatctgtatgagctgtttatcaaattattaaccgcacagatgttgtttggctgaagagcagctgaat

SEQ ID NO: 345627 - DNA, 184 bp, Homo sapiens; identical to SEQ ID NO: 294634
  chr20:21086682-21086866
  hyper

SEQ ID NO: 345628 - DNA, 1002 bp, Homo sapiens
  chr20:30192854-30193856
  hyper
cggccctcgcctctacccgctgccctgcccggtgccctgccaccgacccacccttgctgttctgaaacccgggtcgtctttccacactgcgagcaggcactagacgagcaggaggctggacctaggagcgcgggtcacgcccccatgccgcccattggctgcttttgaacgttctgagcccgcccctccgggggccgtggcgtgtttataaaagacaagctgtggctccgcactctcattccacgttcttaactgttccattttccgtatctgcttcgggcttccacctcatttttttcgctttgcccattctgtttcagccagtcgccaagaatcatgaaagtcgccagtggcagcaccgccaccgccgccgcgggccccagctgcgcgctgaaggccggcaagacagcgagcggtgcgggcgaggtggtgcgctgtctgtctgagcagagcgtggccatctcgcgctgcgccgggggcgccggggcgcgcctgcctgccctgctggacgagcagcaggtaaacgtgctgctctacgacatgaacggctgttactcacgcctcaaggagctggtgcccaccctgccccagaaccgcaaggtgagcaaggtggagattctccagcacgtcatcgactacatcagggaccttcagttggagctgaactcggaatccgaagttggaacccccgggggccgagggctgccggtccgggctccgctcagcaccctcaacggcgagatcagcgccctgacggccgaggtgagatccagatccgaccactagatcatccttataccgacggggaaacggaggccagagagggcgtgggcgcttgcaccacttccgtcccatccttgcgggtacctggctatgcgggggtgcctaaggagcctggaaaaagcgctcccccgtcgtgcttcctggggaagggggcgttcgctgcgctcggagcggcgtcccttccaacccgccggtctcatttcttctcgttttcacagg

SEQ ID NO: 345629 - DNA, 189 bp, Homo sapiens
  chr20:30193992-30194181
  hyper
gagggagaacaagaccgatcggcggccactgcgcccttaactgcatccagcctggggctgaggctgaggcactggcgaggagagggcgctcctctctgcacacctactagtcaccagagactttagggggtgggattccactcgtgtgtttctattttttgaaaagcagacattttaaaaaatggtcac

SEQ ID NO: 345630 - DNA, 138 bp, Homo sapiens; identical to SEQ ID NO: 294696
  chr20:30639494-30639632
  hyper

SEQ ID NO: 345631 - DNA, 109 bp, Homo sapiens
  chr20:32899337-32899446
  hyper
cggagagggggcggagggcgcacaagcctgccctttggccgcggggctttagcctgccctagcttcagcatccccgctcgcctcccggcggtcctgcgtctcactctgg

SEQ ID NO: 345632 - DNA, 339 bp, Homo sapiens; identical to SEQ ID NO: 294726
  chr20:32899515-32899854
  hyper

SEQ ID NO: 345633 - DNA, 59 bp, Homo sapiens; identical to SEQ ID NO: 205789
  chr20:34190072-34190131
  hyper

SEQ ID NO: 345634 - DNA, 62 bp, Homo sapiens
  chr20:37274639-37274701
  hyper
cgcccccagaagtcctatccccctgccaaaacttgatcctttctggccaggtcgcctctttc

SEQ ID NO: 345635 - DNA, 546 bp, Homo sapiens; identical to SEQ ID NO: 205802
  chr20:37274731-37275277
  hyper

SEQ ID NO: 345636 - DNA, 389 bp, Homo sapiens
  chr20:37433723-37434112
  hyper
cgtcagacgtcagcagaggtacgaccacttccttcctccagcgcttcacctcccttctttccagaaagaggaaatgatgcgagtccacaccgcaggccacagcccccatgtctcggccccagcagctgggggacctggccccacagatctgtccccagcgcaaggccagggccggcccctggacctcctgggaagccttcagactcaggccgcgcaggccttcaagctaggaaccctgagttcctggccctggcattcattctgtgtgaccttgagcaggttaccactcctctctgggcttcaggattcccgtctgtcaaatgggagcagggataccgtccttggcttccctctttccatggtcggggtgggggttaggaaaactattt

SEQ ID NO: 345637 - DNA, 71 bp, Homo sapiens
  chr20:44453063-44453134
  hyper
agactgagcctgagcccagccgctgccgcctctccccaccatcccctgcctccgagggacacccgctcacc

SEQ ID NO: 345638 - DNA, 32 bp, Homo sapiens
  chr20:44879699-44879731
  hyper
cgtgcccgtgtactcctctaccacgaagaact

SEQ ID NO: 345639 - DNA, 164 bp, Homo sapiens
  chr20:48771177-48771341
  hyper
cgtgccaggatcggggctggaacatggtagaagctcaataaatgcttgatgaatgaattaaggctcagccagatgcgtctaatacttcggcagataaatgacagcagcagggatttaccccaggtctaaccgacaacaaagtatgcaataatttctcatagaaa

SEQ ID NO: 345640 - DNA, 952 bp, Homo sapiens; identical to SEQ ID NO: 336473
  chr20:50158723-50159675
  hyper

SEQ ID NO: 345641 - DNA, 570 bp, Homo sapiens
  chr20:50383675-50384245
  hyper
cgccgcgtctcctgttccgagcaactgacgctgcaataagcggccgccaccgggaaatgcccagagaggaccagacgcccgaggaagggcggagcagagcggccgcaggccccgcccaacaccgcgctcagcctcccgcgggctccagcctcacctgcgcggcctgtggagctgcacatctccaggccccgccccccagaactctgattggcgggtctaggcgggggccgggaaatctgcatttgcaccagcgcccacccccgtccttcccacccccgcccctcacgcccaggtaagtctatggcaggcgatacgagagccccgcaaacctcaacgcgtcacgctgccatcctccgaacaggaagacggcgaggcgcaaaataccaacccgtcccctcttcccaaatgcagaaaaacccttgcctgttccgcgcctaagctgccctcggggtctcctactgcgggaagggcacagcaggtggcagcccctgtcccagccgtgggattccttccccgaaattgtggggggagaacacaaggggtagtgtcaccaagcggccagtaggagac

SEQ ID NO: 345642 - DNA, 85 bp, Homo sapiens
  chr20:50384400-50384485
  hyper
tgagcatatctgggctcccgagtaatgctccaagcgcagagctcggtgtgacactgaccaaattgttacctcagatattaattac

SEQ ID NO: 345643 - DNA, 113 bp, Homo sapiens
  chr20:57225466-57225579
  hyper
cctgcacgaaccccgccgacctggcccggggcggcaagtcgaggtgcttagggcgccctgggcccggccaaccgtggaaaacccggcccggggcacgggggggcgcgggggtc

SEQ ID NO: 345644 - DNA, 115 bp, Homo sapiens
  chr20:58514400-58514515
  hyper
acacgcgcaccgtaccgctgatgccaaggtccgagcaagtgacacgctccaggcacacgagctgccgctgcaggcgctcgccaaagtcggcggcctcgacgggcggcgggaaatc

SEQ ID NO: 345645 - DNA, 33 bp, Homo sapiens; identical to SEQ ID NO: 336506
  chr20:60639846-60639879
  hyper

SEQ ID NO: 345646 - DNA, 345 bp, Homo sapiens
  chr20:62495236-62495581
  hyper
cgagagcaggctaaggccgtggtggtaagggactcgggcctgtgcaagagtaccaggaagacacctgtgggaggaggtggccgggtgaaggaaggggcagtgggaggagcttccatgcctagggaccagtaccaccccaggctggaagcccagagtggagtcctaggacatcagatcctaaagggcttgaataccgtttaaggcttttcttccgggagcaagtaggagccaaagaagggaagttgcgggacttgttttcgtggggccagttgcctggtggttacgcgcctctcctctgaagtcaggcatcctgttccagagtatcctggttgcgcttcaacttgc

SEQ ID NO: 345647 - DNA, 122 bp, Homo sapiens; identical to SEQ ID NO: 205931
  chr21:27011487-27011609
  hyper

SEQ ID NO: 345648 - DNA, 133 bp, Homo sapiens; identical to SEQ ID NO: 205932
  chr21:27011639-27011772
  hyper

SEQ ID NO: 345649 - DNA, 153 bp, Homo sapiens
  chr21:27012725-27012878
  hyper
agaattacttttatcctctccacctgcacatctacattcacttagagaagtctggtctggggactctagccagctgctctgtcctcaggggacatccaacgggacgattgttagaaagattcagaagccacatgatccagtagctggggagac

SEQ ID NO: 345650 - DNA, 293 bp, Homo sapiens; identical to SEQ ID NO: 336563
  chr21:38382182-38382475
  hyper

SEQ ID NO: 345651 - DNA, 142 bp, Homo sapiens
  chr21:47063290-47063432
  hyper
cgcccactactagtgaccggcccgcccgttcgaggccccgcctcctccccgcccaatgctcggccccgccccgcgcgtcattgggccaggtccccgccccgcccccagccccacccccgcccctttgactggagttggcttt

SEQ ID NO: 345652 - DNA, 166 bp, Homo sapiens
  chr22:22006759-22006925
  hyper
ctctgctccactctgggcctccaggcagaagaatatgttagaaaagaatccagagtgtatctagtgcagggcaaggggccagggatggagtcgtcagctagaaggggcgcgtcgtcccggggtggggccgccctttttctcctggagccgcgggccgagtcagggc

SEQ ID NO: 345653 - DNA, 136 bp, Homo sapiens
  chr22:22862472-22862608
  hyper
cgacagcgacgcagtaaatgagacaagacgctgcggtaggggagagagacccatacattcaaatgccttaaggggtctgggcctacaggtctccagaactggggagggcctggggttacaaagcagttttcagatt

SEQ ID NO: 345654 - DNA, 240 bp, Homo sapiens
  chr22:25348202-25348442
  hyper
cgcgaggaggcgccagcaccgcgcacagaccttgcccgcccccgggccggcaccagcagcccaggcaagtcagtgggcccacatttatggagcgcctcctgaaatcctgggttgcattaggctctcggggtcgccggctgggcagcgggtcggtgccggtggcgggggatcctggctggtgactggggaacatccagggaacgcgggagggtacccggagcaaagttcccaattggacag

SEQ ID NO: 345655 - DNA, 787 bp, Homo sapiens; identical to SEQ ID NO: 206075
  chr22:25348485-25349272
  hyper

SEQ ID NO: 345656 - DNA, 125 bp, Homo sapiens
  chr22:25349348-25349473
  hyper
gtcgaggggagcccggaggacagcgcggtggttcggggggcgtgagaggggcggcgcgcggggcccctcggacgcggaggctccggacacgtcctctcggcctggcctgcgccccccctccgctc

SEQ ID NO: 345657 - DNA, 148 bp, Homo sapiens
  chr22:39852943-39853091
  hyper
cgcccccgcgcaggccgccccgggccgtgggccggcgcacgcacggtcacaggaggggcgcgcgcacactcgcactcacacacactcgctcgcacacgcacacactcgatccagcacgcgcgggcggcgcggggcggcggcggccgga

SEQ ID NO: 345658 - DNA, 225 bp, Homo sapiens; identical to SEQ ID NO: 295455
  chr22:39853157-39853382
  hyper

SEQ ID NO: 345659 - DNA, 31 bp, Homo sapiens; identical to SEQ ID NO: 295456
  chr22:39853626-39853657
  hyper

SEQ ID NO: 345660 - DNA, 209 bp, Homo sapiens; identical to SEQ ID NO: 295457
  chr22:39853690-39853899
  hyper

SEQ ID NO: 345661 - DNA, 130 bp, Homo sapiens
  chr22:39853934-39854064
  hyper
ctccggcgcggcgcggggctggggtgggaggcctccgcgcccgccttccccacccccgaccccagactgcggcggcggcagccgaggcccaagcgcagtcgggggctgggcgggtgcgggggctgcggcc

SEQ ID NO: 345662 - DNA, 553 bp, Homo sapiens
  chr22:45097777-45098330
  hyper
cgtgtgggcgcgaccgcagtgctgggcggggggcgggcgcttgggcttgggccctgcgtcctgtgcgtgttggtttcctgtgggcacgtggggccctcggaagaggggaggagggtgagcacgtcctcagagggcagacccagcgaggcgtcgtggcagctgcggccgcggagacgccggctccgcctcttgcacacgccccctcgcctgaggccccgccccgcccgcgatgcccccgcccccttccccgccccgccccccggggcgccgagacccgcccctgggcccgcccccgggtccgcccccggcctccgtttgcgccgggtctgtgctggccgcgcgcctggcgctccacgctgagcctctccgtgcaatgattaacccggcggggcggccggcgcgggacccgagacggaggcgcggggccggggcgggaccccgcaggaccgctcggcttcctgctctcgccggagtttccgcgtagagggcgcatcgccggcccggggcccttggtgcggcgtggcgcagggcgcggcgtggggcgcgcgtgggc

SEQ ID NO: 345663 - DNA, 470 bp, Homo sapiens; identical to SEQ ID NO: 206166
  chr22:45098381-45098851
  hyper

SEQ ID NO: 345664 - DNA, 97 bp, Homo sapiens
  chr22:45098900-45098997
  hyper
gggtcgcgcaggcttcctgtgtctctttaagctcccttcggctttcccttgagaggccccctgtcctccagctgtcagcagggggtgcggcagctgc

SEQ ID NO: 345665 - DNA, 236 bp, Homo sapiens; identical to SEQ ID NO: 206176
  chr22:46367124-46367360
  hyper

SEQ ID NO: 345666 - DNA, 120 bp, Homo sapiens; identical to SEQ ID NO: 295551
  chr22:46367867-46367987
  hyper

SEQ ID NO: 345667 - DNA, 221 bp, Homo sapiens
  chr22:47199299-47199520
  hyper
cggttttctctcctgtgggccttgttggagatctcgcttctgctgtgggagctggggcccggcccccaggagctgaggcggggagggcggttggttcttgcgacccggccgtcagcgttcagcgtcgccctctagtggccaggtgctgtctttgcagcctgggcttcatgaccacagcagggcacgttggccttgtgggtggggggtgcttacacttgcgc

SEQ ID NO: 345668 - DNA, 224 bp, Homo sapiens; identical to SEQ ID NO: 206224
  chrX:16730628-16730852
  hyper

SEQ ID NO: 345669 - DNA, 35 bp, Homo sapiens
  chrX:16730902-16730937
  hyper
tcctggcaagccgagaccctcgctcgggtcctccc

SEQ ID NO: 345670 - DNA, 621 bp, Homo sapiens
  chrX:39968299-39968920
  hyper
cgcacgattcgctcggcggagcgctgcgctgctgggctgggagggcggcggggaggaggagagacgagggggcgggaggcgaacccgggctgcgcgccaagaggcccggagccgcagattagtcaccgctcggctctgcgctcccgggtgcgcccgggaaccgggagggcaggcgtcggccccgctcagccgggctccccggtcctcggcgcgggtgcccccacccccacccccgcgcgctcctggcgcggctggctcgactctcggggacccgcgcagccgagatccacttgtcaggtcaagggcaggacagaaactctgcaagcggagtcttgcttgcgaacaggaaatttctccttgatgaggtgctgcccctcccccacgccgggcttcaaaacaaaactccagagcgggcggccaggtacccagcctcgctcgccatggccggcgacctccgctcctcggccccggccccgggcggcggagccaagccaacagagccggcggacggactcggcgccggccccgcggagggcgccaggctgccaccctccggggcccggacggggtcggcgggggtgcggagccccggagcccccgcgcctccccaggttctacagc

SEQ ID NO: 345671 - DNA, 247 bp, Homo sapiens
  chrX:39968950-39969197
  hyper
ccgccgggtcagcggctccccggagggcgtggggggcggggaggccgcgcggcgccgccgactcggcgaatcccgctgcgggagcccgggagggctgcgagctcggcctggcaaagttcctgtggaaactccatgttttgaaactcctgcggcgtcgcagaaggagggggagaggggagcgcgggaagcgcgcgggggcggtctgcacccgcctctccccgccggggagtgggttccgcggcccccc

SEQ ID NO: 345672 - DNA, 203 bp, Homo sapiens; identical to SEQ ID NO: 336721
  chrX:40595088-40595291
  hyper

SEQ ID NO: 345673 - DNA, 264 bp, Homo sapiens; identical to SEQ ID NO: 336722
  chrX:41112874-41113138
  hyper

SEQ ID NO: 345674 - DNA, 89 bp, Homo sapiens
  chrY:2655227-2655316
  hyper
cggcagcatcttcgccttccgacgaggtcgatacttataattcgggtatttctctctgtgcatggcctgtaatttctgtgcctcctgga

SEQ ID NO: 345675 - DNA, 596 bp, Homo sapiens
  chrY:2655346-2655942
  hyper
ttttccactggtatcccagctgcttgctgatctctgagtttcgcattctgggattctctagagccatcttgcgcctctgatcgcgagaccacacgatgaatgcgttcatgggtcgcttcactctatcctggacgttgcctttactgttttctcccgtttcacactgatacttagagttacagctttcagtgcaaaggaaggaagagcttctccggagagcgggaatattctcttgcacagctggactgtaatcatcgctgttgaatacgcttaacatagcagaagcatatgattgcattgtcaaaaacaaggagagtgcgacaaaattgaaaggtgccagagttcgaaacttattttactatccaaaactcacttctaccagattctttgttacgttaacttttgtaatgaaacttgcatttctccgccctcaacaccccctcaaccccgcccaaccagcctaccccctagtaccctgacaatgtattcattctcaagcaaaacatggtaattcagtaacgttgactacttgccctgctgatctgcctccctgactgctctactgctgtcctgaaaaatgcgaatttgacttaatc

SEQ ID NO: 345676 - DNA, 246 bp, Homo sapiens
  chrY:7140850-7141096
  hyper
cggttagctgtgcaaggatggctcggcctggtccccctaaaaatgtgtccgttctaacttagaggccgctttggctctcagaaagcccccctgacctgaggactgagggactggagaccgctttcagtcgcagaatcgctgagatccctcaaaacaaaggcgtttccagtttgaccccttgctgctcaatgtgtggttggccaaccgacagcctggggcgccctggttgcgggtcaggggagcagc

SEQ ID NO: 345677 - DNA, 461 bp, Homo sapiens
  chrY:15863654-15864115
  hyper
cgccctcgcatccgatcggcagccatggtgcccgaggtgcccggcgcggtcctgaccctctgcctctggctggaggcctcggagggctgcctggcggccggccccggagcagctgctgctcagctgctggacgagtcgctgtctgccgggagcgtcctgcgcgcccgctgcgcctccaggtgcctaagcttgccaatcatacgcatctctgccttcttccagcacttccaggttagtggagactcccgcccgccccgggttctttctggtgctgcggccgcggcgggagtgcacccgggcgcgagagtgcacccgggcgcgcgccgaccagcctaggcgcgaaaagttttcggccagcgcagcgagctgacctggcttctcctgggcgtggatcttacagtcggggtgcttaaatcgtgttttccagcctcctcccggctcccgatacgaaaaagaagccc

SEQ ID NO: 345678 - DNA, 73 bp, Homo sapiens; identical to SEQ ID NO: 295805
  chrY:16635744-16635817
  hyper

SEQ ID NO: 345679 - DNA, 1082 bp, Homo sapiens
  chrY:16636060-16637142
  hyper
ggtatcaggtgatccggagccctagtcggtgcccactaagaacaccccttctcccatcgggggttcggaggagtgttaagcctgcgggtctgccagtccctaaggtagggatgggggaggggtctgaggaatccgttccaataggcacaccatccccacagccctagaaaaggcaaccaccacccgctccttcctcccgcaccatcccatctcaaggctctctgctgacccgggccgatttcatctggtctcttctcccccgcttcccacctcccaattcccgcgcagctcggctccgttccctcccactcccctaggcggaactgaaagcgaagatcagccaagagcacagtcggaggcggcagagacggtggcgggtgagctaggggctgtgagacgaagcagggagagagtgaacttcagccccgtcccctccccactgccacggctggggcaacccaacccgcgcctgaagcggcttggcttgacctgcggaagcgcgggccgggatggcgtggggagagggaggtaggtgccactgggctgcagatgacgagtgggttgggggcttgctgtgggacaagaggttcaggttccggcctgcgccttccactccgcggtggcgctctctgcctgcggttttccaggaggccgatctaccccagggacactctcatccttcaggcggtctcctggacgccctttcctccccttgcctcccagcctgacctggctctttcgcccctcggagaaccggtaggttggggtccctcggcgggggtctagtgagccgagtcgcgagctttgcgcccccggtatctaggccccgtgccgcgcgcaaatccgggcccaggcgtacagttctggagcctagtcgccgccagacacagggccctttgtacccggaggagcgggagcgggagcgggggcgtcagggcaacccttgcaccccagaggcctgcctaggaccaccctgggaacaaatgtctcgctcggaaaacgaggtgaacccggaggatgtcctacgcatcatacccctccccttcttgagaaggctttttctttttttctttttttttccc

SEQ ID NO: 345680 - DNA, 111 bp, Homo sapiens; identical to SEQ ID NO: 336746
  JH636052.4:789300-789411
  hyper

SEQ ID NO: 345681 - DNA, 75 bp, Homo sapiens
  chr1:1168275-1168350
  hypo
cgactactacctgccctacgcgctgggcggcggctacgtgctctcggccgacctggtgcactacctgcgcctcag

SEQ ID NO: 345682 - DNA, 462 bp, Homo sapiens
  chr1:1168984-1169446
  hypo
gtggtttcacatcaatccgctttcatgggattttggtctctgtccagtgacttcgtggtaaatgtaactcagtgtttgcttgcgacttatttataaatattgtaagtttgtgtcgatgagtgtaagttggcagtgcgcacgtctcggtttttttacatgatttaaggaaagacttttatgtcagaacttggtgcctgtaccgtcaaccccgctgctgcccgtgtttaaacgcaggagaactttaaaactggccatctatcttttcagtgtacaagtcactgaacccattgtttctttctgaagagactttcctttcaaggcttcccatgggtccgcgccacacagggccggtgctgctttatttcagactctgccccaggttccaggaatccgaaccccggagtgctgacgcggttccccaacttccgccttaagaaaacaggaccagccggcaccaggccc

SEQ ID NO: 345683 - DNA, 575 bp, Homo sapiens
  chr1:1562211-1562786
  hypo
cgcaggccctgggccgcgtcgggaaggtggtgaaagtgtttggagacgggaacctgcgtgtagcagtcgctggtcagcggtggaccttcagcccctcctgcctggtggcctaccggcccgaggaggatgccaacctggacgtggccgagcgcgcccgggagaacaaaagtgcggcacagctcaggcggccagtgggaggtggggctgcccctggccaccactaacctcagccctgcccccaggctcactgagcgtggccctggacaagcttcgggcccagaagagtgacccagagcacccgggaaggctggtggtggaggtggcgctgggtaacgcagcccgggctctggacctgctgcggaggcgcccagagcaggcaagctcctgaccccgtcctcccatactggccagtctgagagtgaggggcagagggccagggactcacctgctggcactcttggcaggtggacaccaagaaccaaggcaggaccgctctgcaagtggctgcctacctgggccaggtggagttgatacggctgctgctacaagccagggcgggcgtggacctgccggac

SEQ ID NO: 345684 - DNA, 431 bp, Homo sapiens; identical to SEQ ID NO: 344930
  chr1:1713574-1714005
  hypo

SEQ ID NO: 345685 - DNA, 232 bp, Homo sapiens; identical to SEQ ID NO: 344931
  chr1:1714067-1714299
  hypo

SEQ ID NO: 345686 - DNA, 47 bp, Homo sapiens
  chr1:2331316-2331363
  hypo
cgaggttaccttttcccgtagccagagggttccacaggcagctcact

SEQ ID NO: 345687 - DNA, 183 bp, Homo sapiens
  chr1:2331437-2331620
  hypo
tctgaggagctgtgagctgaagtgttcctggtgcttcgtgctccactattggaagacttacgcagctcctgggcctgcctgggccaggtaggggccctgagttcatgcctgactggccagccccaggcgaggaacaaacaactgcattccaggacgtggtggccattgagggaaaacccacac

SEQ ID NO: 345688 - DNA, 443 bp, Homo sapiens; identical to SEQ ID NO: 344934
  chr1:2461988-2462431
  hypo

SEQ ID NO: 345689 - DNA, 303 bp, Homo sapiens
  chr1:3052594-3052897
  hypo
cgctttgtccgggagccacaggacaccaggctggggcggggctgggggcagaacgctcctccagcagcctaggagccacccctgggaagaaagggggtctcgggcagcctcgccatgggaccaccagctttgggccttcgttacaggggtgatgctgccccgctgatagggttgggggcctggggctgcagcgtagctgaagtggaacctgcccagcctgcacttcccagctggccagccccgcgcgatgctccggggtctcggcgaggcacgccaggcactgagtcctcagacccgctgtcc

SEQ ID NO: 345690 - DNA, 40 bp, Homo sapiens
  chr1:3052927-3052967
  hypo
cgaggcagtggaggcccagaaagatggaccgacagtcccc

SEQ ID NO: 345691 - DNA, 125 bp, Homo sapiens; identical to SEQ ID NO: 336862
  chr1:3697578-3697703
  hypo

SEQ ID NO: 345692 - DNA, 35 bp, Homo sapiens; identical to SEQ ID NO: 336888
  chr1:6707164-6707199
  hypo

SEQ ID NO: 345693 - DNA, 106 bp, Homo sapiens
  chr1:6713808-6713914
  hypo
cggctgggaatgaagcgctttcttttttaagtggctaattgcatcctttcataaataaagatgagaaaaaccctgggcagactctcattccagctgcttggtgtgc

SEQ ID NO: 345694 - DNA, 307 bp, Homo sapiens; identical to SEQ ID NO: 206600
  chr1:6714041-6714348
  hypo

SEQ ID NO: 345695 - DNA, 425 bp, Homo sapiens; identical to SEQ ID NO: 344939
  chr1:9711649-9712074
  hypo

SEQ ID NO: 345696 - DNA, 863 bp, Homo sapiens
  chr1:10719750-10720613
  hypo
cgccttacttgacagtggagacggtccccgtggtgatggagtctgttttggagaaggttgacttcaggtactcgggagtgttgaaggacagggaggcaggaggctctggccctggcccgggggcgctgggggcactgggcacgctggcgaggggtgcgggagccaggctgggggtgggcggaaccttggcggggcctggcttctggatgccccggacgtcgtacttggaagggcgccccaccttgcctgtcttgaaggcgatggccccgcccatgtcggggctgccctccccgggtttgaagaggtgcaggtacttgacattctccaggtcgtacttggatggcttcttgtaggtgctcccgttctggggccgcagattctcgccggtcttcagtttttggatgaagaagtcgtacttggaggcccgggctaccaggttctgcatctggacactgctgtgcgacggcaggggcaggatggtggccttggtctccaggtgggccgtgctgctgggcagccgcaggccgggcagggtgcccaccacctccttgcccacccgctcctcggtcttggtgctgggggccggccaggagagctgctcgccagccttgagcttgcggatgtactcctcatacttagagaaccgcgcccgcttgctgagggtatcctcggaggtgggcagcatggaggaggtggctgcctccggggtggagcccgcgtgcagcttctcaaagctgatcttcctggccagctcgtcccgcgtgttctggtcatcatagccaaacatgccgaggaactcggtcatggtggaggccgcgtagtcccgcagcgaggaggcctctcctgcagaggaggatgggggc

SEQ ID NO: 345697 - DNA, 152 bp, Homo sapiens
  chr1:12460147-12460299
  hypo
cgcattatgaggccccactcaagcgtaaaaatgaaaactgagccactggtctgtttttgtttttgctttgctacctttccatggccgtaggtggacaatcagctcattggtaccacgcagcccttcatgctctatgtgactcccctgagcaa

SEQ ID NO: 345698 - DNA, 189 bp, Homo sapiens; identical to SEQ ID NO: 336973
  chr1:22023693-22023882
  hypo

SEQ ID NO: 345699 - DNA, 32 bp, Homo sapiens; identical to SEQ ID NO: 344944
  chr1:25255579-25255611
  hypo

SEQ ID NO: 345700 - DNA, 807 bp, Homo sapiens; identical to SEQ ID NO: 330733
  chr1:26662538-26663345
  hypo

SEQ ID NO: 345701 - DNA, 383 bp, Homo sapiens; identical to SEQ ID NO: 344952
  chr1:39956953-39957336
  hypo

SEQ ID NO: 345702 - DNA, 99 bp, Homo sapiens
  chr1:41485949-41486048
  hypo
cgggctgccagctccttgaggattaggtgctcctccagggccgtctgcaggcgccaggggagggaggccagggtgtccctgtggacagtcacctgcacc

SEQ ID NO: 345703 - DNA, 91 bp, Homo sapiens
  chr1:41486164-41486255
  hypo
ggggttcagatggcccacatagagagtgtgcgccgagggagcctcctcgaggtcagagtactccgtcagggactgctctgcgggtagctcc

SEQ ID NO: 345704 - DNA, 209 bp, Homo sapiens; identical to SEQ ID NO: 337062
  chr1:46963465-46963674
  hypo

SEQ ID NO: 345705 - DNA, 430 bp, Homo sapiens
  chr1:47685395-47685825
  hypo
cgagggccggctccatcggcggcaggcagcatggcaggatggaggctgcgggccgtgtgtttgggcgcgggctcctccgtgtagctgtccgggctggctgccccatccagggagctgccgcagctggagttgggggaaagcacgtcttgcaggaggtcatctgggggcgcgccgccccctcccccacctccacccccaccagcccccaccacagggtccttgccagtcttggcccgctgggtgccctcctcctcctggtcattgagcagcttggccaagaagttgatatacttcatggccaggcggaggatctcattcttgctgagcttcttgtccgggggatgtgtggggatcagcttgcggagctcggcaaaggccccgttcacattctgctgccgccatcgctcccggctgttggtgaagatacgcc

SEQ ID NO: 345706 - DNA, 196 bp, Homo sapiens
  chr1:51763389-51763585
  hypo
ctgtcctggtacacattgtctcctatctccctgctcccactcctgtcccctgcaagccatttcgcacactgacctttttaagtcagatcatgtcagttccttctggaaatctggttatattccatcacactcaggagacatctcctacaatttccttgacacctgcagcactccagccacacgacggcctcagggc

SEQ ID NO: 345707 - DNA, 322 bp, Homo sapiens; identical to SEQ ID NO: 197534
  chr1:52194968-52195290
  hypo

SEQ ID NO: 345708 - DNA, 535 bp, Homo sapiens; identical to SEQ ID NO: 344959
  chr1:85462747-85463282
  hypo

SEQ ID NO: 345709 - DNA, 437 bp, Homo sapiens; identical to SEQ ID NO: 344960
  chr1:90308855-90309292
  hypo

SEQ ID NO: 345710 - DNA, 442 bp, Homo sapiens; identical to SEQ ID NO: 344964
  chr1:99127189-99127631
  hypo

SEQ ID NO: 345711 - DNA, 325 bp, Homo sapiens; identical to SEQ ID NO: 344965
  chr1:99127671-99127996
  hypo

SEQ ID NO: 345712 - DNA, 229 bp, Homo sapiens; identical to SEQ ID NO: 337133
  chr1:110170726-110170955
  hypo

SEQ ID NO: 345713 - DNA, 243 bp, Homo sapiens; identical to SEQ ID NO: 337139
  chr1:110771992-110772235
  hypo

SEQ ID NO: 345714 - DNA, 204 bp, Homo sapiens; identical to SEQ ID NO: 337155
  chr1:118163688-118163892
  hypo

SEQ ID NO: 345715 - DNA, 223 bp, Homo sapiens; identical to SEQ ID NO: 337176
  chr1:154931252-154931475
  hypo

SEQ ID NO: 345716 - DNA, 293 bp, Homo sapiens; identical to SEQ ID NO: 344978
  chr1:161369566-161369859
  hypo

SEQ ID NO: 345717 - DNA, 299 bp, Homo sapiens; identical to SEQ ID NO: 344979
  chr1:161369945-161370244
  hypo

SEQ ID NO: 345718 - DNA, 249 bp, Homo sapiens; identical to SEQ ID NO: 344982
  chr1:182583799-182584048
  hypo

SEQ ID NO: 345719 - DNA, 40 bp, Homo sapiens; identical to SEQ ID NO: 344983
  chr1:182584613-182584653
  hypo

SEQ ID NO: 345720 - DNA, 44 bp, Homo sapiens; identical to SEQ ID NO: 337271
  chr1:202009839-202009883
  hypo

SEQ ID NO: 345721 - DNA, 383 bp, Homo sapiens; identical to SEQ ID NO: 337283
  chr1:204226544-204226927
  hypo

SEQ ID NO: 345722 - DNA, 279 bp, Homo sapiens
  chr1:204530924-204531203
  hypo
cgtgatgaagatgaacatggttcctgttctcctgtctagggaaactggttaagcatgtaaatattagcatagtgaatgttttgttgtgagactacatgctgctatgagaaatacagaagggggacgtaatgtagccaagagcttctgaacaacctccgggaagagatgagctgagattaaaggaaggttaggagttaggagaggaagggaaaagtgccgtagttaggaggaaacatgccaaggtcttgaggtgagaaaacagtggcatctgggaagaac

SEQ ID NO: 345723 - DNA, 79 bp, Homo sapiens
  chr1:204531757-204531836
  hypo
tgagctgctcgcctgcggtcggactgctctccccttctacgcccaagcaccgccggtctgccctgctgcgccttccacc

SEQ ID NO: 345724 - DNA, 315 bp, Homo sapiens
  chr1:204955352-204955667
  hypo
cgaggcctccaggagcggatgacctgcaagccgagccactacagccattcccagaccaccatcgccaaggtgacctgccctgcgaggaggttgtatctcaagagaagacctgtgaggtctgctgacataattccagacgggttatgcagactgatccccgagggcacggcgggcacctgggccaccccaccaccttccgaggcagaaggcagcacgtccatcctgactgcctggaaccatctgatttgtttgccagcacccaacaccttcacggttctccccccacgttctcaagaagccgtcactgaaatagtc

SEQ ID NO: 345725 - DNA, 55 bp, Homo sapiens; identical to SEQ ID NO: 344990
  chr1:219347516-219347571
  hypo

SEQ ID NO: 345726 - DNA, 728 bp, Homo sapiens; identical to SEQ ID NO: 344994
  chr1:226926137-226926865
  hypo

SEQ ID NO: 345727 - DNA, 49 bp, Homo sapiens; identical to SEQ ID NO: 344995
  chr1:226926951-226927000
  hypo

SEQ ID NO: 345728 - DNA, 244 bp, Homo sapiens; identical to SEQ ID NO: 344996
  chr1:228870983-228871227
  hypo

SEQ ID NO: 345729 - DNA, 273 bp, Homo sapiens; identical to SEQ ID NO: 337366
  chr1:230256241-230256514
  hypo

SEQ ID NO: 345730 - DNA, 262 bp, Homo sapiens; identical to SEQ ID NO: 337367
  chr1:230266303-230266565
  hypo

SEQ ID NO: 345731 - DNA, 42 bp, Homo sapiens; identical to SEQ ID NO: 337491
  chr2:3349551-3349593
  hypo

SEQ ID NO: 345732 - DNA, 488 bp, Homo sapiens
  chr2:3418350-3418838
  hypo
cgtgctctgccgtgtgtcggcccgtttcctgaatcctcaggcatcagtgcctcacagagctgtgtgccagcagtgtcctcacagagctgtcaagcgtgtccatgccgtgccgcttgtgcctctgccccgcgagggacaccattccccgtcgttgacgtgcattcctcttgttcatcgtgcgagactccccacccctgtgccaccggtctcggtgtctcccacactggagtgtccgtatttcataaacacacgtatgtgtgcatgtatgtatttcttatggacatcacgtacgttggcccttcatatctacaggttccgcatccacagattccaccacccgcagttgggaaacacagtgaggtatgcacagcaacctttcagctgtggttggttgaatccacgcgtgtggaacctgcagatacggaggaccaaccaaggacttgagcagtcatggatttggtatcccaggagtcctggaaccggtcccc

SEQ ID NO: 345733 - DNA, 291 bp, Homo sapiens; identical to SEQ ID NO: 344998
  chr2:7057762-7058053
  hypo

SEQ ID NO: 345734 - DNA, 41 bp, Homo sapiens; identical to SEQ ID NO: 344999
  chr2:7058391-7058432
  hypo

SEQ ID NO: 345735 - DNA, 146 bp, Homo sapiens
  chr2:8870193-8870339
  hypo
cgcatctactctcctaacagctcaggacagccccgtcacactactgccagccctggtgactcactttgttggcaatttttaaagccctcttcattatgtacttcctactcttcagaacctctgtgataagcaatacccctgccata

SEQ ID NO: 345736 - DNA, 178 bp, Homo sapiens; identical to SEQ ID NO: 345000
  chr2:10588876-10589054
  hypo

SEQ ID NO: 345737 - DNA, 117 bp, Homo sapiens; identical to SEQ ID NO: 198078
  chr2:10589055-10589172
  hypo

SEQ ID NO: 345738 - DNA, 115 bp, Homo sapiens
  chr2:27433190-27433305
  hypo
cgctatggtctcgcatctctccagaaagagggcggccaaaagcaagagctagctgttgtttcactacaactataacatgccaaggcacaaacagcagattgtgggaccccccccc

SEQ ID NO: 345739 - DNA, 37 bp, Homo sapiens; identical to SEQ ID NO: 345005
  chr2:30453530-30453567
  hypo

SEQ ID NO: 345740 - DNA, 68 bp, Homo sapiens; identical to SEQ ID NO: 198154
  chr2:31361021-31361089
  hypo

SEQ ID NO: 345741 - DNA, 178 bp, Homo sapiens; identical to SEQ ID NO: 198155
  chr2:31361118-31361296
  hypo

SEQ ID NO: 345742 - DNA, 226 bp, Homo sapiens
  chr2:39186687-39186913
  hypo
cgcaggtggtgaggagggtcagggcttccacgcggggtgatgacagtccctggcccgcaggccatttcccagaagctcagacaataccttcgggcctccgctcgacggactgccttgtccactctccgcctgggaacgggggttcgtgggagcgccttagtggaagtttgtggagctcgggaggtggcatgcacaggcgcctcggagcgcggccccgaggggcgcc

SEQ ID NO: 345743 - DNA, 395 bp, Homo sapiens; identical to SEQ ID NO: 345010
  chr2:43452443-43452838
  hypo

SEQ ID NO: 345744 - DNA, 41 bp, Homo sapiens
  chr2:55289053-55289094
  hypo
cgagaccctagcaaggcaaacacacaaaaacggctggacgt

SEQ ID NO: 345745 - DNA, 127 bp, Homo sapiens; identical to SEQ ID NO: 345014
  chr2:72374248-72374375
  hypo

SEQ ID NO: 345746 - DNA, 259 bp, Homo sapiens; identical to SEQ ID NO: 345015
  chr2:72374932-72375191
  hypo

SEQ ID NO: 345747 - DNA, 218 bp, Homo sapiens; identical to SEQ ID NO: 337654
  chr2:74327579-74327797
  hypo

SEQ ID NO: 345748 - DNA, 275 bp, Homo sapiens; identical to SEQ ID NO: 345016
  chr2:74425444-74425719
  hypo

SEQ ID NO: 345749 - DNA, 395 bp, Homo sapiens; identical to SEQ ID NO: 198298
  chr2:74425790-74426185
  hypo

SEQ ID NO: 345750 - DNA, 228 bp, Homo sapiens; identical to SEQ ID NO: 345018
  chr2:74426214-74426442
  hypo

SEQ ID NO: 345751 - DNA, 235 bp, Homo sapiens; identical to SEQ ID NO: 345022
  chr2:74781700-74781935
  hypo

SEQ ID NO: 345752 - DNA, 1432 bp, Homo sapiens; identical to SEQ ID NO: 345024
  chr2:75060920-75062352
  hypo

SEQ ID NO: 345753 - DNA, 104 bp, Homo sapiens; identical to SEQ ID NO: 337662
  chr2:85356682-85356786
  hypo

SEQ ID NO: 345754 - DNA, 146 bp, Homo sapiens; identical to SEQ ID NO: 345030
  chr2:101033445-101033591
  hypo

SEQ ID NO: 345755 - DNA, 144 bp, Homo sapiens; identical to SEQ ID NO: 345031
  chr2:105471069-105471213
  hypo

SEQ ID NO: 345756 - DNA, 124 bp, Homo sapiens; identical to SEQ ID NO: 337724
  chr2:110028510-110028634
  hypo

SEQ ID NO: 345757 - DNA, 143 bp, Homo sapiens
  chr2:120005222-120005365
  hypo
cgccgtctgactgccccacttttctcccgcaggtgcccatctgcggtgaccagccagaagccaagcgtgctgtctcggagatggcgctcgccatgggcttcatgcccgtggacatgggatccctggcgtcagcctgggaggtg

SEQ ID NO: 345758 - DNA, 792 bp, Homo sapiens; identical to SEQ ID NO: 345040
  chr2:136874020-136874812
  hypo

SEQ ID NO: 345759 - DNA, 93 bp, Homo sapiens; identical to SEQ ID NO: 345041
  chr2:136874839-136874932
  hypo

SEQ ID NO: 345760 - DNA, 482 bp, Homo sapiens; identical to SEQ ID NO: 198449
  chr2:136875399-136875881
  hypo

SEQ ID NO: 345761 - DNA, 50 bp, Homo sapiens; identical to SEQ ID NO: 345044
  chr2:149632592-149632642
  hypo

SEQ ID NO: 345762 - DNA, 904 bp, Homo sapiens; identical to SEQ ID NO: 345046
  chr2:159313976-159314880
  hypo

SEQ ID NO: 345763 - DNA, 37 bp, Homo sapiens; identical to SEQ ID NO: 198509
  chr2:166650106-166650143
  hypo

SEQ ID NO: 345764 - DNA, 723 bp, Homo sapiens; identical to SEQ ID NO: 345049
  chr2:166650508-166651231
  hypo

SEQ ID NO: 345765 - DNA, 90 bp, Homo sapiens; identical to SEQ ID NO: 345055
  chr2:183902312-183902402
  hypo

SEQ ID NO: 345766 - DNA, 568 bp, Homo sapiens; identical to SEQ ID NO: 198600
  chr2:183902442-183903010
  hypo

SEQ ID NO: 345767 - DNA, 176 bp, Homo sapiens; identical to SEQ ID NO: 345057
  chr2:183903037-183903213
  hypo

SEQ ID NO: 345768 - DNA, 86 bp, Homo sapiens; identical to SEQ ID NO: 345058
  chr2:191044988-191045074
  hypo

SEQ ID NO: 345769 - DNA, 513 bp, Homo sapiens; identical to SEQ ID NO: 345059
  chr2:191045505-191046018
  hypo

SEQ ID NO: 345770 - DNA, 447 bp, Homo sapiens; identical to SEQ ID NO: 345060
  chr2:192109730-192110177
  hypo

SEQ ID NO: 345771 - DNA, 253 bp, Homo sapiens; identical to SEQ ID NO: 198625
  chr2:192110303-192110556
  hypo

SEQ ID NO: 345772 - DNA, 439 bp, Homo sapiens; identical to SEQ ID NO: 345062
  chr2:192110584-192111023
  hypo

SEQ ID NO: 345773 - DNA, 86 bp, Homo sapiens; identical to SEQ ID NO: 337831
  chr2:198276053-198276139
  hypo

SEQ ID NO: 345774 - DNA, 93 bp, Homo sapiens; identical to SEQ ID NO: 337852
  chr2:218678441-218678534
  hypo

SEQ ID NO: 345775 - DNA, 839 bp, Homo sapiens; identical to SEQ ID NO: 337853
  chr2:218682490-218683329
  hypo

SEQ ID NO: 345776 - DNA, 267 bp, Homo sapiens; identical to SEQ ID NO: 337855
  chr2:218694781-218695048
  hypo

SEQ ID NO: 345777 - DNA, 771 bp, Homo sapiens
  chr2:218712965-218713736
  hypo
cggagctgggggcagctggggttcagcttccgaaaaggattgagagcggaacataccgctggggtcatgggcatagtgggaggtggtcactggctgtggccaggctgggtggggcccctccctctggtagccagctaaaccctcctgtgcagagtaggagggccgcatgggggccgtgtggccagcatgggcaggccccgcccggctggcagactcgtaggggtagcctcctccattgaccataggctccatggggtaggacttgtccagaccgttggtcagtggggacagggcctctgggtagcccccctcactggtgttggtgaccccgtccagagaagagagtgtgcccatgctgcccgcactgtgaccatcctggtttggcaattcatcgtccaggatgtctgtctcccgctcagatgctaacgccccaccattgacatgaacctgggctgggacaacgtggcgtccagaggagggcacagccgagccccctgctgggcgggacctgaggtgctgggtgtggtacatggcgccttgcttctctcgctctaagccaaagccactcagcaggcggtccagctcccgcttctcctggggactcaaggcagcagtggcactggaggccccggggacaggctcgtcggtcttgtcggtcttggtggaggctgtggagttgcccgagtcgctgctcacagaaagcgtgtgttccacgtggttgggggtggccgacagtgtaggacgtgtggcattaacagccccggtgctgcc

SEQ ID NO: 345778 - DNA, 406 bp, Homo sapiens; identical to SEQ ID NO: 198725
  chr2:222436961-222437367
  hypo

SEQ ID NO: 345779 - DNA, 415 bp, Homo sapiens; identical to SEQ ID NO: 345066
  chr2:222437421-222437836
  hypo

SEQ ID NO: 345780 - DNA, 236 bp, Homo sapiens; identical to SEQ ID NO: 198740
  chr2:225906168-225906404
  hypo

SEQ ID NO: 345781 - DNA, 297 bp, Homo sapiens; identical to SEQ ID NO: 198767
  chr2:236402404-236402701
  hypo

SEQ ID NO: 345782 - DNA, 270 bp, Homo sapiens
  chr2:239074309-239074579
  hypo
cgtcctgtacctgcaggtgagtgcggcaggcttgggcatcgaggggcaccgcctgggcatggccacgggtggctgggtgcagaagggtgctgttagatgctcaggatcactgggtcgggtgcagcaccctcagactccaggcctgggagagggtccaggacatgccaagttctcactttggtctgggcgcagccaggcttcaagtcctgatctccttcctccaaacacagcccttccccgagggcacctgcccgcttgagcagctgctcc

SEQ ID NO: 345783 - DNA, 42 bp, Homo sapiens
  chr2:239083093-239083135
  hypo
cgtgtgagagagcactccgcaaatgccacggctgcgcatggg

SEQ ID NO: 345784 - DNA, 462 bp, Homo sapiens
  chr2:242004407-242004869
  hypo
cgagggggtcccctctccctagagggcccaacggtctccaagggcagagcgtctggccgctgcttgcccaggccccttccctgaggaacagggaggggataaaatcccccggtgggcttgaaacacggtcacacattcaaaagtgtgaccctcctggaggtacgtggccagggacaaagaaggactctgccagcgatggctgtgtcaggcccaagagccagacccggctgagccgccgacgggagccaggcatgcatagctaacggctgaccagtcccctccccttgttttgacccaaaccctgaagagctcttcccaccgacggccctcaagatggagagagtggaggagagtggggtctctatctcctggaacccgcccaatggtccagccgccaggcagatgcttgatggctacgcggtcacctacgtctcctccgacggctcctaccgccgcacagac

SEQ ID NO: 345785 - DNA, 241 bp, Homo sapiens
  chr2:242436503-242436744
  hypo
gccgtcctcaggcaggccctgccttcaccacctctcacccacatcctccatcctccctccccaggctccaggtggggctcctggagggcacacctgggcccaagcccgctggccacgccctgggcacacagatcctggctgtatcacatttctgaggacggtgctgactgcccatcagcaggtgacgttgatgcagggtcacgtgactaaccagggcggcacctgcccggggatggacccc

SEQ ID NO: 345786 - DNA, 326 bp, Homo sapiens; identical to SEQ ID NO: 337992
  chr2:242440848-242441174
  hypo

SEQ ID NO: 345787 - DNA, 231 bp, Homo sapiens; identical to SEQ ID NO: 345076
  chr3:5018754-5018985
  hypo

SEQ ID NO: 345788 - DNA, 143 bp, Homo sapiens; identical to SEQ ID NO: 345077
  chr3:5019132-5019275
  hypo

SEQ ID NO: 345789 - DNA, 78 bp, Homo sapiens
  chr3:15123770-15123848
  hypo
cgaacaacttcccaaagcattctccagaatctgcaggagtgtacataacaaacagccaaatctgcctaagaaattaga

SEQ ID NO: 345790 - DNA, 42 bp, Homo sapiens
  chr3:15123992-15124034
  hypo
ggaccgagctgacactgctcatgctgctgatgctgcctcggc

SEQ ID NO: 345791 - DNA, 78 bp, Homo sapiens; identical to SEQ ID NO: 345081
  chr3:16555426-16555504
  hypo

SEQ ID NO: 345792 - DNA, 558 bp, Homo sapiens; identical to SEQ ID NO: 345084
  chr3:32433054-32433612
  hypo

SEQ ID NO: 345793 - DNA, 200 bp, Homo sapiens; identical to SEQ ID NO: 198867
  chr3:32433665-32433865
  hypo

SEQ ID NO: 345794 - DNA, 81 bp, Homo sapiens; identical to SEQ ID NO: 345086
  chr3:32434068-32434149
  hypo

SEQ ID NO: 345795 - DNA, 1420 bp, Homo sapiens; identical to SEQ ID NO: 331732
  chr3:37033979-37035399
  hypo

SEQ ID NO: 345796 - DNA, 243 bp, Homo sapiens; identical to SEQ ID NO: 345088
  chr3:43147038-43147281
  hypo

SEQ ID NO: 345797 - DNA, 105 bp, Homo sapiens; identical to SEQ ID NO: 345089
  chr3:43147607-43147712
  hypo

SEQ ID NO: 345798 - DNA, 149 bp, Homo sapiens
  chr3:43655492-43655641
  hypo
agatacacagaaaaccccaaggtttccaatcttggatatgggaagaataactatgcgtgaaaaaaatagcaaagttggaaagaatgtctagtttaagggaacaataaagtgttccgcagagtatctggggacacgcatcaaaggtcaac

SEQ ID NO: 345799 - DNA, 329 bp, Homo sapiens; identical to SEQ ID NO: 208908
  chr3:53032404-53032733
  hypo

SEQ ID NO: 345800 - DNA, 148 bp, Homo sapiens
  chr3:56718095-56718243
  hypo
cgttcatcaacgttttcctatagtaaatgtatattaaagaaaaaataaacttgcggtcacattaaaaaatacacagcaggtcgtcgctctcccataaagggaacaacttcatagttaagagccctttacatagtggtttctaccttat

SEQ ID NO: 345801 - DNA, 170 bp, Homo sapiens
  chr3:56718281-56718451
  hypo
tatttactgagtgctttctacgtgctagacacggactggacaagtgatttacgtgcattgtctccatttaatcctcacagcaacagacatgaggtagatactagtttgcagaatttgaaagaagcgttgcaagacactggacaaattatggtaaccgaagatttgaaacc

SEQ ID NO: 345802 - DNA, 261 bp, Homo sapiens; identical to SEQ ID NO: 338120
  chr3:57679351-57679612
  hypo

SEQ ID NO: 345803 - DNA, 1570 bp, Homo sapiens; identical to SEQ ID NO: 331800
  chr3:66550318-66551888
  hypo

SEQ ID NO: 345804 - DNA, 827 bp, Homo sapiens; identical to SEQ ID NO: 345093
  chr3:71113993-71114820
  hypo

SEQ ID NO: 345805 - DNA, 913 bp, Homo sapiens; identical to SEQ ID NO: 345094
  chr3:71630573-71631486
  hypo

SEQ ID NO: 345806 - DNA, 280 bp, Homo sapiens; identical to SEQ ID NO: 345095
  chr3:98619774-98620054
  hypo

SEQ ID NO: 345807 - DNA, 58 bp, Homo sapiens; identical to SEQ ID NO: 345096
  chr3:98621126-98621184
  hypo

SEQ ID NO: 345808 - DNA, 832 bp, Homo sapiens; identical to SEQ ID NO: 345097
  chr3:113251180-113252012
  hypo

SEQ ID NO: 345809 - DNA, 84 bp, Homo sapiens
  chr3:121500635-121500719
  hypo
cggcgtgcatcagtgagttcttggagtcctcgccaaggagcaaatagtttctttttcttacggcacttcgctaggaatttaagc

SEQ ID NO: 345810 - DNA, 438 bp, Homo sapiens; identical to SEQ ID NO: 345099
  chr3:124773932-124774370
  hypo

SEQ ID NO: 345811 - DNA, 122 bp, Homo sapiens; identical to SEQ ID NO: 345100
  chr3:127794271-127794393
  hypo

SEQ ID NO: 345812 - DNA, 295 bp, Homo sapiens; identical to SEQ ID NO: 345106
  chr3:135684609-135684904
  hypo

SEQ ID NO: 345813 - DNA, 77 bp, Homo sapiens; identical to SEQ ID NO: 338228
  chr3:150187009-150187086
  hypo

SEQ ID NO: 345814 - DNA, 241 bp, Homo sapiens; identical to SEQ ID NO: 199188
  chr3:169482439-169482680
  hypo

SEQ ID NO: 345815 - DNA, 54 bp, Homo sapiens
  chr3:169540679-169540733
  hypo
cactgaagaaccttgaagtcctgggactggatgacaataaaataggacaggtac

SEQ ID NO: 345816 - DNA, 809 bp, Homo sapiens; identical to SEQ ID NO: 345120
  chr3:183165024-183165833
  hypo

SEQ ID NO: 345817 - DNA, 217 bp, Homo sapiens; identical to SEQ ID NO: 338261
  chr3:183217407-183217624
  hypo

SEQ ID NO: 345818 - DNA, 52 bp, Homo sapiens; identical to SEQ ID NO: 338270
  chr3:184042674-184042726
  hypo

SEQ ID NO: 345819 - DNA, 196 bp, Homo sapiens
  chr3:185445861-185446057
  hypo
cgttacgtatacctgaactatgtttgcgattcacacaaaataaagaattgaccaggaccaaccccagcctatgagaggcaaagttactgctgcccgctttaccccaccctagagcgccctctgatccacactctcacactgccttccagctttcccacggcgccagacccttgctgctcctgggccccttcccctt

SEQ ID NO: 345820 - DNA, 290 bp, Homo sapiens; identical to SEQ ID NO: 199253
  chr3:186079331-186079621
  hypo

SEQ ID NO: 345821 - DNA, 45 bp, Homo sapiens; identical to SEQ ID NO: 345123
  chr3:187455297-187455342
  hypo

SEQ ID NO: 345822 - DNA, 446 bp, Homo sapiens; identical to SEQ ID NO: 199256
  chr3:187456666-187457112
  hypo

SEQ ID NO: 345823 - DNA, 134 bp, Homo sapiens; identical to SEQ ID NO: 338297
  chr3:193391768-193391902
  hypo

SEQ ID NO: 345824 - DNA, 61 bp, Homo sapiens; identical to SEQ ID NO: 209288
  chr3:193419641-193419702
  hypo

SEQ ID NO: 345825 - DNA, 275 bp, Homo sapiens
  chr3:193419732-193420007
  hypo
ctatgattggctggccttttgatgtgcaggtactacaagttggtcacaaacttgtgtacaatgggcctgttctggttcatgtgaaaatcaacatccttttttgtgttaccgggtgacaggatgctacaatactattagcatttgcaaagagtgtgctctgtccaagggtgtaaccacaggtcgtgtgctgctcactttgtgtttctctattatgtgagagacacaaagaagctgagggctcgcaaaggcctgtcaaatcttgtaatgtggcgctc

SEQ ID NO: 345826 - DNA, 582 bp, Homo sapiens; identical to SEQ ID NO: 345130
  chr3:195599104-195599686
  hypo

SEQ ID NO: 345827 - DNA, 246 bp, Homo sapiens; identical to SEQ ID NO: 209343
  chr3:195599840-195600086
  hypo

SEQ ID NO: 345828 - DNA, 49 bp, Homo sapiens
  chr3:195601363-195601412
  hypo
cctcgggatggcgcccacgcacactccgaggcacaagaaactccccctc

SEQ ID NO: 345829 - DNA, 188 bp, Homo sapiens
  chr4:905682-905870
  hypo
cgaacccttacaattttagacgtcagagcggaagatgagggagagagcagtggacgaccgagagaaaggcagacagaggcaggaggagctgcaggagagggcggggacaaaggcaggcacaccggccacacacacctgaccacagcgacaccaaagtccatcccgcgcgtggcaggaggaggcagggc

SEQ ID NO: 345830 - DNA, 136 bp, Homo sapiens
  chr4:1336902-1337038
  hypo
aagaccacggactagcgggtttaaacaatggacatttatttcttcacggttctagaggagatgctggcagggttggctcccggtgaggcctctcttcccggcttgcagacggcccccttctcactgtgtacctctc

SEQ ID NO: 345831 - DNA, 102 bp, Homo sapiens
  chr4:3217005-3217107
  hypo
cgtgcaccgcggtgagtgtggactcctggaagcgcaccgtagctccgctgtgtcctgctgctcctccctagctgtcagggaggctgtagtccattgctttgc

SEQ ID NO: 345832 - DNA, 56 bp, Homo sapiens
  chr4:3217154-3217210
  hypo
gtctctgaccctacagaccagctgggatgccactgggggagcgctcccttcccccc

SEQ ID NO: 345833 - DNA, 609 bp, Homo sapiens; identical to SEQ ID NO: 332064
  chr4:25863681-25864290
  hypo

SEQ ID NO: 345834 - DNA, 145 bp, Homo sapiens; identical to SEQ ID NO: 338485
  chr4:48572780-48572925
  hypo

SEQ ID NO: 345835 - DNA, 258 bp, Homo sapiens; identical to SEQ ID NO: 345138
  chr4:100867945-100868203
  hypo

SEQ ID NO: 345836 - DNA, 168 bp, Homo sapiens; identical to SEQ ID NO: 338523
  chr4:103421142-103421310
  hypo

SEQ ID NO: 345837 - DNA, 242 bp, Homo sapiens; identical to SEQ ID NO: 199560
  chr4:113436585-113436827
  hypo

SEQ ID NO: 345838 - DNA, 206 bp, Homo sapiens; identical to SEQ ID NO: 199699
  chr4:184019900-184020106
  hypo

SEQ ID NO: 345839 - DNA, 970 bp, Homo sapiens
  chr5:1053723-1054693
  hypo
cggattctctgaccctgaaggatgcagaagtggcggctccgagcgaaaggcgctgactgcagccagggcgggcgttcagcagcgggatgctttggcctccagggacctagaactcagcccactaaggctgccaagcttctaagggctacagtcacacaacacaaaccgcaagcgctttcctaactacatctacatctgcaaagcaggcagaacagtggaagccgtctgggtggcccatgtgcctgacgccttcaaggctgacacgcttctcttgacatctacatcatcgcccctaaaccccacgtcagacactgccaaacacagacccgtcaggctgggcacacatggcctcctctccgagggtcctgatacaactgggtccaaggggccggaagctcaggaaggaaaggcccagagtcccccacaccggcctgtgcagccgttgctgctgaagctcccaggcctgacaaggacagggtatgccgaggactcagctggaggcacaggccctcagtggccactactgggtcccctcctacggcccaccctgcccctgtctggccaagggctaaaggacaagcacttccaccgtgtggccgtccagcccccgccttccgtcctcacaacgcagctctgctccacgaccctccctgtctgctctctgaagctgctgtggccggtccatgtctcaaagcgtccctggcggcctgggcccggccacagccccacaggaggctccccaaccaagtaggtttggggacactgcagaatcatgctgtgaggtgctcaggcccttgcgggacagagcttatctccctcctctaccccacggtcccctcctaggcaggcccctaaactgcagcagaactggcgttccaggaggccacctggggaaacgctgggcggaggggagcacttgcgtttctgtgttggaaaaacccggcccgtgtgtggacttgaaagtcggagc

SEQ ID NO: 345840 - DNA, 904 bp, Homo sapiens
  chr5:1057027-1057931
  hypo
cgacagcagcctgaactacccacagggtgaaggccaggaattctgtgcccagcggcacaagcctcctcgcctccatggaacagacccatctgcctgctgcagtgaggcttgcctgagtaaagcaggcctggccgcagggctgacttcagggctggcccaggtaccaggaggactgctcgtcacccagctgtggggttaacatcaggacccaccctaggtcctacaaggacccctcagcgcttggcactagaaggacccctcagcgcttggcactagaaggacccctcagcacttggcacccaggtcttacaaggactcccggccttggcactagaaggatccctcagcgcccggccacagggctgaactcagggcccggccttggcaccaaaaggacccctcagtgcccactcaggcggctccctgttctctaacgggcccactggcctgcagggttgccccgaagctcttcagtggtcagggaagggactctgtcctcactgccgggccagcactgccaggatctgttccccccaggccacacgcacggacactcacggcttcatgctgaagaggtctttgaaaccagataggctggtgtctctgctcctgtacttctcagcgatcagcttctccctggtccaggtcatctgcaccttgtctggcgtaggcggcgcttgggtcctggctgccgccgcggtgtgggacgcggtgttcctgtcgtggatcagctgggcctggcgggcccgggacttggtgagaccagccggtctcaaaactcctctgggcgagagcgacccgggatgccaggccggaggtgagggcagctcacagaacctgaagggccctgtgtgcctgacccgggacccagcctggcgtcccacactggtcctgcgccgccccc

SEQ ID NO: 345841 - DNA, 327 bp, Homo sapiens
  chr5:1058847-1059174
  hypo
cgcccggcccagcctaaatttcccatggccttgaacgtgaaaccagagcccaagggctgcccgctctcggcagagccagcgccgcccacctggcccgagggccaccgtgtaagtcactagagggtgtccacccagcgtctgcacagcagctcatccaaacccttctgcagagcggtgacacctccaacccccacctggcccaggaggggcccttcgagctcgagcttgctgttcccgctcccggtccctcctcggtcagcatttgctgactctccacactgaacttcccatgaagccatgggtggattcttgttcctagctggaccc

SEQ ID NO: 345842 - DNA, 98 bp, Homo sapiens; identical to SEQ ID NO: 209967
  chr5:1059425-1059523
  hypo

SEQ ID NO: 345843 - DNA, 317 bp, Homo sapiens
  chr5:1059556-1059873
  hypo
agaaaaccaacacctgcacctggtctgcagacacacgtgtgtgataccagcctggtgggacccacgaagaccccatgaggccgtgacctcacagagctgagcatcccgctaccaggtgacccccgtgctgtcctccagtgcgaagtgaccacaaagacacctgcccttggggtctcacagtggccatggggcccaggccagtataactcaggtggatacacccagacgtcctcagcagcctacagttacccacggagccaaagccgctgcagccaggcggccagcttccacgcacggaggctgcacaggtctgtgtc

SEQ ID NO: 345844 - DNA, 811 bp, Homo sapiens; identical to SEQ ID NO: 338625
  chr5:1062902-1063713
  hypo

SEQ ID NO: 345845 - DNA, 860 bp, Homo sapiens; identical to SEQ ID NO: 332282
  chr5:1064412-1065272
  hypo

SEQ ID NO: 345846 - DNA, 1417 bp, Homo sapiens
  chr5:1068627-1070044
  hypo
cgatggaggagaatacggctccccagggcagtgcagccccaaaggcagccaagggaaggcggggcctgcggctggctccagccctcgcaaccaatgcagctaagtcacagccaaaggctcgctgagagcagcgggggcagggtgcgctcgtcctcccgtccgcaagagcgggctcctgtctgaggctgccccagaccccccagccgaagggctgtcggacggagaggatctgcctgtgagctccgttaacgtgagagtataagtgagcgcagctcttcccatggccgtgaagactgtggcagagcgtggcagggggtcccgtcatcccccagtcactgcaatccctgccctgtccctcgtgcgcacagacgcgccctcacacacctccagggaggccaggcagtgccaggattcttagaatccacgccagcagggcagttccaactccgggattcctcctaagagcattccagcatgggataaggaacacggaaagggacatatggggaccaggaccgtgaacatccccccgaaaaccacgatacctaaatccacgggttcacagtcaatagcagctaacgcctgaacccgtggtgagccatgacgccgccgtcagggaaagggaaggcccagagcatctcctgtcttccctgggaaggcgaacctgtgcaacagcctgagaaggtggccatccacgtggccaacgtggcgggagcggcgggggccattttttacctccatgggatcctggccctaggccacaccacctgaggctgctaccatccacgtgcccacagccctcttgagcagggttcccacccctaggctgaccggcccagacctggacgggcctcagtgcggctgtggttgtgcagagaaacggaccggggaggcggtggggggcggctgcagatgcctggacacacccacaaggtcccagtgggggcctggcagcagggagctggctcccaacccacagcaaggacagagggggcacccgcatgggagggacctcggacacacaccactgcaacaggcacgtggtataggccccacagactcccacacacatgagggggaaggaggaggctcgaggcgcccacggcagccagccctgcctgggaatgaggtgcccttggcatgaaaatcacgcaggtgggcactcaaaagctccctgctttagcaagaaatacagaagtaactccaggtgacgtgacgtgacgtgacgtgatgggaccccacaggctttcatcgtgtcatcattccgtttctggatagtgtgaagcttcccataagaagtttgaaaatcagagaaatgaagacacaaagtctcagaccccgatgtcctggggcagccgactgcagcagcagggctcagagctggcaccagcatgctacacgcccggggcactcaccc

SEQ ID NO: 345847 - DNA, 843 bp, Homo sapiens
  chr5:1088432-1089275
  hypo
cgttggtagcgatcgcactcatggaaatggcggtcagcattgtctgcaaaaagacaggcagccatctgaggagagttttccaacagcctgccggcatcgcaacactcccaagtcagggtctatgacccggctcccgccgaatgccagcccccaactccagggctctccatctcaatggagtggctaggaaacaggacctggaggctcccgggcaccaggcatgcgtgtcctggttcccaccccttcccctatgacagcgacccctgaaagtgcccaaggtccttccaaactggaggtgatgtcatcaaaacacagggtgtcccttcccttggaagcctcagcccccgggtgccgccccatgacacccaccactggctgagatgcctgtccgcagacacgggtaaatgaggtgccagcacgccagtcaacacgccagcactaaccccggacagtgtggcatctcatccccgcagctgcccggctctcgtggaggagacggcgctgaacgacgtctacacgggcgtctggggagggccctactgtccggctgccaccgcccgaaggcacaaccacagcggccaggggagacggcatctggggagagccctactgtccagctgccaccgcccgaaggcacagccacacctggccgggggagactcacacatgtgcagcacatggccacgatgaggaaggactccaggacaccagccacccccacgatccacgtcaggcgcaggaagaggatgacgcccaggatgttctgcaggcacggcaggtagacgccgatgaaggtgcccatgcgcggagcctgcgacagagcatagcgtgtcccaggggctc

SEQ ID NO: 345848 - DNA, 277 bp, Homo sapiens; identical to SEQ ID NO: 338660
  chr5:1702104-1702381
  hypo

SEQ ID NO: 345849 - DNA, 170 bp, Homo sapiens; identical to SEQ ID NO: 345154
  chr5:10564301-10564471
  hypo

SEQ ID NO: 345850 - DNA, 69 bp, Homo sapiens; identical to SEQ ID NO: 345155
  chr5:31854871-31854940
  hypo

SEQ ID NO: 345851 - DNA, 328 bp, Homo sapiens; identical to SEQ ID NO: 332354
  chr5:43557434-43557762
  hypo

SEQ ID NO: 345852 - DNA, 50 bp, Homo sapiens; identical to SEQ ID NO: 345162
  chr5:49737299-49737349
  hypo

SEQ ID NO: 345853 - DNA, 111 bp, Homo sapiens
  chr5:67590957-67591068
  hypo
cgtttcttttgcctgcaggattatgcataattatgataagttgaagtctcgaatcagtgaaattattgacagtagaagaagattggaagaagacttgaagaagcaggcagc

SEQ ID NO: 345854 - DNA, 114 bp, Homo sapiens; identical to SEQ ID NO: 304477
  chr5:67591157-67591271
  hypo

SEQ ID NO: 345855 - DNA, 62 bp, Homo sapiens; identical to SEQ ID NO: 338743
  chr5:74753672-74753734
  hypo

SEQ ID NO: 345856 - DNA, 50 bp, Homo sapiens; identical to SEQ ID NO: 283051
  chr5:75698194-75698244
  hypo

SEQ ID NO: 345857 - DNA, 1185 bp, Homo sapiens; identical to SEQ ID NO: 199902
  chr5:75698274-75699459
  hypo

SEQ ID NO: 345858 - DNA, 735 bp, Homo sapiens; identical to SEQ ID NO: 345179
  chr5:87436769-87437504
  hypo

SEQ ID NO: 345859 - DNA, 111 bp, Homo sapiens; identical to SEQ ID NO: 345192
  chr5:124084660-124084771
  hypo

SEQ ID NO: 345860 - DNA, 64 bp, Homo sapiens; identical to SEQ ID NO: 345193
  chr5:124084977-124085041
  hypo

SEQ ID NO: 345861 - DNA, 269 bp, Homo sapiens; identical to SEQ ID NO: 338783
  chr5:126250520-126250789
  hypo

SEQ ID NO: 345862 - DNA, 282 bp, Homo sapiens; identical to SEQ ID NO: 345195
  chr5:142782217-142782499
  hypo

SEQ ID NO: 345863 - DNA, 124 bp, Homo sapiens; identical to SEQ ID NO: 283412
  chr5:142782625-142782749
  hypo

SEQ ID NO: 345864 - DNA, 410 bp, Homo sapiens; identical to SEQ ID NO: 345197
  chr5:142782794-142783204
  hypo

SEQ ID NO: 345865 - DNA, 717 bp, Homo sapiens; identical to SEQ ID NO: 345198
  chr5:142783958-142784675
  hypo

SEQ ID NO: 345866 - DNA, 196 bp, Homo sapiens; identical to SEQ ID NO: 338845
  chr5:168112681-168112877
  hypo

SEQ ID NO: 345867 - DNA, 214 bp, Homo sapiens; identical to SEQ ID NO: 338846
  chr5:168189525-168189739
  hypo

SEQ ID NO: 345868 - DNA, 108 bp, Homo sapiens; identical to SEQ ID NO: 338860
  chr5:172191069-172191177
  hypo

SEQ ID NO: 345869 - DNA, 211 bp, Homo sapiens; identical to SEQ ID NO: 338871
  chr5:175777496-175777707
  hypo

SEQ ID NO: 345870 - DNA, 194 bp, Homo sapiens
  chr5:176558657-176558851
  hypo
cgccaaaaatggcctttctcccaggtgggctcaaagttaacagaaggcagtgagtaaacagtccactggggcaataactatgcacatttactaagccatgggaagaatagtagtcacgtggccctcgagggcggtgccctcagcttgagatggagttaactccaaatctaatcacagaaggctttctggaggag

SEQ ID NO: 345871 - DNA, 144 bp, Homo sapiens
  chr5:176558908-176559052
  hypo
cgccctagggaccaggtaactcctgaggtgagcttcttggtggggatcaagcccagggggcgacggagtccgggctgggggaagggcccgaggggctggagtcgcaagttcaggcccagcttgggctccctgtcccgcccttcc

SEQ ID NO: 345872 - DNA, 248 bp, Homo sapiens; identical to SEQ ID NO: 283604
  chr5:176560001-176560249
  hypo

SEQ ID NO: 345873 - DNA, 290 bp, Homo sapiens; identical to SEQ ID NO: 345203
  chr5:176560318-176560608
  hypo

SEQ ID NO: 345874 - DNA, 192 bp, Homo sapiens
  chr5:176764238-176764430
  hypo
ggtcggtcatcacctgcagggcccagcacgctaagcacctcgcaggacagcagcctgccctcctgagcctctgtgggaccagcacagggccaccagctgccacccccaccgcctagcctgctcaccgtcagacggccccgggagtagcgcacagccaggaaggtgtcgtgatcgcggttgcggaagtcagcc

SEQ ID NO: 345875 - DNA, 266 bp, Homo sapiens
  chr6:3285535-3285801
  hypo
tttttgttaggaagacaggagtgagaccctgctggcctcagagcctgaggagaaaatggaaccttcacagtgagaccccagcaggtgcaaagggtgagcttccttgcatgtaaagtcacccacaggtcactgccgcctgcattcaagctgcgtcaagtgctgtggggtgcccctgccagccccagctctgctcctcacggctgcttggtgttcgcctggggctcctgtgcattcctgctcagggccaaaggggcaccacaacaccc

SEQ ID NO: 345876 - DNA, 37 bp, Homo sapiens
  chr6:4910947-4910984
  hypo
attagtcgggtttttataaagcagcagtgttggaagc

SEQ ID NO: 345877 - DNA, 327 bp, Homo sapiens; identical to SEQ ID NO: 338973
  chr6:7887548-7887875
  hypo

SEQ ID NO: 345878 - DNA, 242 bp, Homo sapiens; identical to SEQ ID NO: 338978
  chr6:7893721-7893963
  hypo

SEQ ID NO: 345879 - DNA, 394 bp, Homo sapiens
  chr6:15513386-15513780
  hypo
cggtgtggggtgcgtgtgtcccctctgctggtgagcatggcaggccgtcactaaaggtgcgggccgtctcccgtgtctggcagggatacagagctgcggcagcgcaggcagctgttcgaggctggcctccactcctccgcacgctatggcagccacgatggcagcagcacggtggcggacgggaagaaaaagcctcgaaagtggctgcagttggagacgtcagagaggaggtgtcagatctgccagcacctgtgctacctgtccatggtgagcccgcctggccctgccggcgccctcgcatgtagtgcttggcctgagagctccggggttgcccccagaagagggagggcgctctctgcccaggagacctgctgtgctcccatctctggagccg

SEQ ID NO: 345880 - DNA, 48 bp, Homo sapiens
  chr6:15513981-15514029
  hypo
cccattctttctgaggcagtgaggggcgggtttccagtactgggcagc

SEQ ID NO: 345881 - DNA, 213 bp, Homo sapiens; identical to SEQ ID NO: 200330
  chr6:26198924-26199137
  hypo

SEQ ID NO: 345882 - DNA, 369 bp, Homo sapiens; identical to SEQ ID NO: 345232
  chr6:37666475-37666844
  hypo

SEQ ID NO: 345883 - DNA, 218 bp, Homo sapiens; identical to SEQ ID NO: 345233
  chr6:37666866-37667084
  hypo

SEQ ID NO: 345884 - DNA, 171 bp, Homo sapiens; identical to SEQ ID NO: 339051
  chr6:41827211-41827382
  hypo

SEQ ID NO: 345885 - DNA, 173 bp, Homo sapiens
  chr6:43748290-43748463
  hypo
cgcctgtgtgcgcccgcgcatgcctccccagagaccacctgcctcctgacacttcctccgggaagcggccctgtgtggctttgctttggtcgttcccccatccctgcccaccttaccacttcttttactccccccaccgcccccgctctctctctgtctctgtttttttattt

SEQ ID NO: 345886 - DNA, 372 bp, Homo sapiens; identical to SEQ ID NO: 345236
  chr6:46097250-46097622
  hypo

SEQ ID NO: 345887 - DNA, 521 bp, Homo sapiens; identical to SEQ ID NO: 345237
  chr6:46097694-46098215
  hypo

SEQ ID NO: 345888 - DNA, 155 bp, Homo sapiens; identical to SEQ ID NO: 345249
  chr6:106961023-106961178
  hypo

SEQ ID NO: 345889 - DNA, 238 bp, Homo sapiens; identical to SEQ ID NO: 200741
  chr6:163837231-163837469
  hypo

SEQ ID NO: 345890 - DNA, 506 bp, Homo sapiens; identical to SEQ ID NO: 345259
  chr6:170124879-170125385
  hypo

SEQ ID NO: 345891 - DNA, 326 bp, Homo sapiens
  chr7:2208344-2208670
  hypo
cgcgtggagggcgccacgaggtcaaggtcctgaggccggaacaccaaggagctctgggagggtggaggaagaacacaagcctggagcagggggcagacacacggggcgtggggcccagaggccaccgggaggactcaggttttattccgagtgtgctaaggagccagggattgtggctgaagcgggaggaacacgctaaggagccagggatggcggctgaagcgggaggaacacgcgctcggacttgctgatgggctcttacgtgggcttttccccagctgaagaatgagttactaaatgtgttttaaaatgcaaaaatgtgtacc

SEQ ID NO: 345892 - DNA, 91 bp, Homo sapiens
  chr7:2208844-2208935
  hypo
accttttaaagtccgcatgtagacagtgaaaatctacaaaggtaaaccggaatctcctaagagcgggtagggatgcgactggtgggattac

SEQ ID NO: 345893 - DNA, 236 bp, Homo sapiens; identical to SEQ ID NO: 211252
  chr7:2233056-2233292
  hypo

SEQ ID NO: 345894 - DNA, 136 bp, Homo sapiens
  chr7:2237982-2238118
  hypo
cgcctttgcttctgccagccactcacgctctccacaggctgcagccaggtacacaccccccttcaagcaacaaaaccactgcctgagcacctggcctgctctaagcccagggctgagacaagggggagccagccac

SEQ ID NO: 345895 - DNA, 59 bp, Homo sapiens
  chr7:2473220-2473279
  hypo
cgcccttcaacgagcactggcggcaggtgtaccgcctctgccacccgtgccagatcgac

SEQ ID NO: 345896 - DNA, 328 bp, Homo sapiens
  chr7:2473779-2474107
  hypo
tgtggtttttctgagcgtgcgggcgccgggaggggatgctgaggctgatggagctgcctccagggctagggccactcaccggaggagggcggggcctgcacttgaagtcaggccgcacctgtctgtttttggaagggtagccgacaaatccttccagagggaaagttctttgtttaagtgttgtacttgaaaaggtcaatcttcagggcttcctgtttgaagtcaagtcagaggtaaaccggtcagttacagaagcaggatttctaggatttctaactccagctgttcccatactgtctagtttaaattatggctgttaaggccgggc

SEQ ID NO: 345897 - DNA, 224 bp, Homo sapiens
  chr7:4856619-4856843
  hypo
cgtttcaaggcgagggaaagggagctgggatggttctagggcttctgtgcgacctgaggaggagcgggtgtggggggtgcagctgggcctgtgcagaacctgcagccactgctccctgatgaagtggagcttgtcacggtcccctccctcagccccccagaaggctccttaggagagccacaggcacaagcttgagccccacttgatcccaggagctgcctgag

SEQ ID NO: 345898 - DNA, 100 bp, Homo sapiens
  chr7:4857296-4857396
  hypo
ccaactgcacccaacatagcaggtcctaactgcctccccacaggtcacctctcactcgcgacacgggtcacaggactctggcagcagcccctgagtggcc

SEQ ID NO: 345899 - DNA, 237 bp, Homo sapiens; identical to SEQ ID NO: 339373
  chr7:5230941-5231178
  hypo

SEQ ID NO: 345900 - DNA, 162 bp, Homo sapiens; identical to SEQ ID NO: 339401
  chr7:6694972-6695134
  hypo

SEQ ID NO: 345901 - DNA, 59 bp, Homo sapiens; identical to SEQ ID NO: 200840
  chr7:19156644-19156703
  hypo

SEQ ID NO: 345902 - DNA, 140 bp, Homo sapiens; identical to SEQ ID NO: 345262
  chr7:22893437-22893577
  hypo

SEQ ID NO: 345903 - DNA, 1088 bp, Homo sapiens; identical to SEQ ID NO: 345263
  chr7:22893607-22894695
  hypo

SEQ ID NO: 345904 - DNA, 142 bp, Homo sapiens; identical to SEQ ID NO: 345270
  chr7:27136790-27136932
  hypo

SEQ ID NO: 345905 - DNA, 126 bp, Homo sapiens; identical to SEQ ID NO: 339438
  chr7:27831654-27831780
  hypo

SEQ ID NO: 345906 - DNA, 496 bp, Homo sapiens; identical to SEQ ID NO: 200916
  chr7:29234008-29234504
  hypo

SEQ ID NO: 345907 - DNA, 159 bp, Homo sapiens; identical to SEQ ID NO: 345272
  chr7:29234886-29235045
  hypo

SEQ ID NO: 345908 - DNA, 168 bp, Homo sapiens; identical to SEQ ID NO: 345273
  chr7:37960958-37961126
  hypo

SEQ ID NO: 345909 - DNA, 102 bp, Homo sapiens; identical to SEQ ID NO: 345274
  chr7:50344738-50344840
  hypo

SEQ ID NO: 345910 - DNA, 56 bp, Homo sapiens
  chr7:50560501-50560557
  hypo
cgagcgccggggaagagttgtccgggagagatgagcgcacagccgccaacttgctg

SEQ ID NO: 345911 - DNA, 220 bp, Homo sapiens
  chr7:50560663-50560883
  hypo
ggttttcttcagccttaacatacgcactggttgtctggacctgagggcaggacgccgcattcattacactccttcttatcgtgtgtcaatatttgcctccaagattagggacccaaaatatttctggtccctgaccgcttcagtttcctcatctgtaaagagagcgtggcaatgtctgtgtccctcaacacagggctgtcgtgggggtccagagagctac

SEQ ID NO: 345912 - DNA, 215 bp, Homo sapiens; identical to SEQ ID NO: 201064
  chr7:99156600-99156815
  hypo

SEQ ID NO: 345913 - DNA, 77 bp, Homo sapiens; identical to SEQ ID NO: 345277
  chr7:99156982-99157059
  hypo

SEQ ID NO: 345914 - DNA, 236 bp, Homo sapiens; identical to SEQ ID NO: 339571
  chr7:100064586-100064822
  hypo

SEQ ID NO: 345915 - DNA, 196 bp, Homo sapiens
  chr7:101603073-101603269
  hypo
cggaggatttcaccgcgtacatattctctgtttggacatggtacaacctgtggacccttttaaacatagttacatgtttgactctttatagggtaataactcgattaattttgcaaggctttttagaataccattgttctcttgaaaagaacaggtttgctgttttaacaagactttaatgccatcgagatgcctc

SEQ ID NO: 345916 - DNA, 242 bp, Homo sapiens
  chr7:101603308-101603550
  hypo
aatgaaattgagagagctttttccggcgcctggttggttggggcggcctccgttcggtgcttttttcatcctcgacccagtgaccaactgtgtttgccctgatgtttctttcaattccaccattccgaaatgtctccggaatctgtcgttttagcttttgcagcaaggttcgttgtgtttgtcttgcccgcttcaggtttctctaatgagattcacgtgtaaaggaggattggcaattaatc

SEQ ID NO: 345917 - DNA, 118 bp, Homo sapiens
  chr7:107483576-107483694
  hypo
cgagaaaaagctgaagaccgtgatcagtgaagcacacaaacggggcatggtgatagagaaaaacagtgggcacgcaatctagcttgggaaaatgaggtagcacccctttcaggaggtg

SEQ ID NO: 345918 - DNA, 31 bp, Homo sapiens
  chr7:131041484-131041515
  hypo
cgaggattacctggagcttaatggccactag

SEQ ID NO: 345919 - DNA, 61 bp, Homo sapiens
  chr7:132418888-132418949
  hypo
cgcccccacctgagcctataaaaaccggataccctagcaaggcagagacagaagctgttgg

SEQ ID NO: 345920 - DNA, 42 bp, Homo sapiens
  chr7:132419066-132419108
  hypo
ctcacaacccgcaggacaaggcagagtttggctggggcaatc

SEQ ID NO: 345921 - DNA, 85 bp, Homo sapiens
  chr7:134918319-134918404
  hypo
cgagctgattactgacgcgagggtcccctccctgacccctcgcgaccctgcgaggtgagtcagccccgcccctccctcttctctc

SEQ ID NO: 345922 - DNA, 132 bp, Homo sapiens
  chr7:134918661-134918793
  hypo
atcctttgaacgctcctctccagaaaggtgcccttgggcatatgagtgtttgtgtagacttgaaagaattcagtgcagcggagcctaacaggtgaacttttagcgcggggttcacaggagccttttgtatcc

SEQ ID NO: 345923 - DNA, 362 bp, Homo sapiens; identical to SEQ ID NO: 345285
  chr7:139930346-139930708
  hypo

SEQ ID NO: 345924 - DNA, 31 bp, Homo sapiens
  chr7:140156493-140156524
  hypo
cgaatgcacttgagacagtaggtgtggttgc

SEQ ID NO: 345925 - DNA, 503 bp, Homo sapiens; identical to SEQ ID NO: 339660
  chr7:148480954-148481457
  hypo

SEQ ID NO: 345926 - DNA, 163 bp, Homo sapiens
  chr7:148851234-148851397
  hypo
gagaagaaactagccagctgtgaaaagacagttaccgagcttgggaaccagctggagggcaagtgggccgtgctgggaaccctgctgcaggagtacgggctgctgcagaggcggctggagaacttggagaacctgctgcgcaacaggaacttctggatcctgc

SEQ ID NO: 345927 - DNA, 340 bp, Homo sapiens
  chr7:150758626-150758966
  hypo
cgaggctccgttgtctgcctgggccttcactcccctctttccccagctcattatcactccctccctcatctttgttgctttctctccgggcctgggccttgactcctttctccctcatttttcttgcggcctttcccacctcctctctcctcctccctctactcagcctctcggcccttttcggcccccctcgcctcagtcctctcctgtctccttgttcttctcttttcttcctataaataactctcctctgtgctgtggctgccgctaagggccactctgaggcccttcatactccaggaggatccccagcagcgcagcctgcgcgtggtggctcctg

SEQ ID NO: 345928 - DNA, 39 bp, Homo sapiens
  chr7:155581980-155582019
  hypo
tccaacaggcctttctggggcctgtcctgcttgccttgc

SEQ ID NO: 345929 - DNA, 458 bp, Homo sapiens; identical to SEQ ID NO: 339722
  chr7:157052694-157053152
  hypo

SEQ ID NO: 345930 - DNA, 203 bp, Homo sapiens; identical to SEQ ID NO: 339758
  chr7:157642963-157643166
  hypo

SEQ ID NO: 345931 - DNA, 410 bp, Homo sapiens; identical to SEQ ID NO: 339766
  chr7:157853839-157854249
  hypo

SEQ ID NO: 345932 - DNA, 224 bp, Homo sapiens; identical to SEQ ID NO: 339777
  chr7:157949173-157949397
  hypo

SEQ ID NO: 345933 - DNA, 127 bp, Homo sapiens; identical to SEQ ID NO: 345299
  chr8:23021590-23021717
  hypo

SEQ ID NO: 345934 - DNA, 196 bp, Homo sapiens
  chr8:23423722-23423918
  hypo
cgaggcgtcaacgtcatgatcatgggtgcagggccggcccatgccatgtattttgcctgctatgaaaacatgaaaaggactttaaatgacgttttccaccaccaaggaaacagccacctagccaacggtattttgaaagcgtttgtctggagttagaaagttctcttcttcaacacgtccctccccagggtgttcc

SEQ ID NO: 345935 - DNA, 226 bp, Homo sapiens; identical to SEQ ID NO: 201396
  chr8:38326050-38326276
  hypo

SEQ ID NO: 345936 - DNA, 68 bp, Homo sapiens
  chr8:49334914-49334982
  hypo
cggagtctgctctgagacccagggaccgtgcgttctgcagggaagctggcgcatgcccttaggttctg

SEQ ID NO: 345937 - DNA, 212 bp, Homo sapiens; identical to SEQ ID NO: 345302
  chr8:61193765-61193977
  hypo

SEQ ID NO: 345938 - DNA, 144 bp, Homo sapiens; identical to SEQ ID NO: 201426
  chr8:61822883-61823027
  hypo

SEQ ID NO: 345939 - DNA, 208 bp, Homo sapiens; identical to SEQ ID NO: 201482
  chr8:80803900-80804108
  hypo

SEQ ID NO: 345940 - DNA, 99 bp, Homo sapiens; identical to SEQ ID NO: 345308
  chr8:82193698-82193797
  hypo

SEQ ID NO: 345941 - DNA, 419 bp, Homo sapiens; identical to SEQ ID NO: 345309
  chr8:99956867-99957286
  hypo

SEQ ID NO: 345942 - DNA, 429 bp, Homo sapiens; identical to SEQ ID NO: 201548
  chr8:104511554-104511983
  hypo

SEQ ID NO: 345943 - DNA, 270 bp, Homo sapiens; identical to SEQ ID NO: 345312
  chr8:107669733-107670003
  hypo

SEQ ID NO: 345944 - DNA, 221 bp, Homo sapiens; identical to SEQ ID NO: 340002
  chr8:118531602-118531823
  hypo

SEQ ID NO: 345945 - DNA, 630 bp, Homo sapiens
  chr8:128871653-128872283
  hypo
cgccgtggctgactccaaacttgaactctggtctctgtttttggagcttgcttccttcctacgaccctagactgctcctcctaaataattaagtggcaaacatggcacagacagtaacctcacataagaagctatgaggttaggacagaaatatccactgctggcctgcgaactattcacacaggtctgactccccgccagagtcctggctgccctggtcctgtggaatcccgtcatggcttctgtctaaacggagcaggctcagggccatgctgaacttggagaaatctgtgcaggagtcagatttgggctttagagtcacctggggttgaatctcgggcctgctatttattgaacctgtcctagcctcaatcgccttatctgtaccatggggatgataccatctaggtcgaaggtagttgcaggagattctcatgcacggaggcccttggccgtcatttgtttctttgtctctacaagcagagaggctgagtcatacagatcctgaggggagatcactttctcttccctcctttcgtgtgtcatctccacctgggtgtggtgagccccaggaataatgctgtgacatcaagccccgtgaacacctcctttcacacggaccccgtgact

SEQ ID NO: 345946 - DNA, 191 bp, Homo sapiens
  chr8:128872459-128872650
  hypo
aggaggccggctcctggcagaatcggcttccagctctgggcactggggtgcggtgtgggaccagcaacaggctgctcctctgccaggaaccgccagaaccaaagtcttctcgaaggcatcttcagaaggcaagcacagggctgagcactccggagaggagcctttgggggaaaactttttctcggagcttc

SEQ ID NO: 345947 - DNA, 61 bp, Homo sapiens
  chr8:128888848-128888909
  hypo
cgtacactcttcccatctcctggcccctccagttctgaagggatggggactaagtgggatc

SEQ ID NO: 345948 - DNA, 43 bp, Homo sapiens
  chr8:128889422-128889465
  hypo
cagattctaaagtgaagcaggctgtggtgtgatgatggccccc

SEQ ID NO: 345949 - DNA, 159 bp, Homo sapiens; identical to SEQ ID NO: 340032
  chr8:131064030-131064189
  hypo

SEQ ID NO: 345950 - DNA, 392 bp, Homo sapiens; identical to SEQ ID NO: 340057
  chr8:141147354-141147746
  hypo

SEQ ID NO: 345951 - DNA, 107 bp, Homo sapiens
  chr8:141534525-141534632
  hypo
cgcaatgagaccgagtgcgtcccccgcggctccagactgcatggcatcacagtttacaagtcaggggctgaggagcggaaagaaagcttccaaggctggaggtccac

SEQ ID NO: 345952 - DNA, 296 bp, Homo sapiens
  chr8:141599879-141600175
  hypo
cgagatccgtgccatcagcacgagccgcagaacaggacggagtgatggctcagtgagtacagaccagagagtagatgctatcaagctgtactctcctgctaaaatcaggacacgagggtgacaactcacctgttgtctacacaagcaagcctcccttatggccacccaagttgacgctaaacacagtcatggcagcttttttggtgaaatggacagagacggtctcagaatgtgtgctgggaatgcagtcggaacatctgctcctgtcagccggagtgcagacaactgtatgctgt

SEQ ID NO: 345953 - DNA, 50 bp, Homo sapiens
  chr8:141600284-141600334
  hypo
gggatggctggagctgggtccccagctgatgcgttctaccccctcccccc

SEQ ID NO: 345954 - DNA, 449 bp, Homo sapiens; identical to SEQ ID NO: 345316
  chr8:142317706-142318155
  hypo

SEQ ID NO: 345955 - DNA, 415 bp, Homo sapiens; identical to SEQ ID NO: 345317
  chr8:142318184-142318599
  hypo

SEQ ID NO: 345956 - DNA, 192 bp, Homo sapiens
  chr8:142367176-142367368
  hypo
cggccacgtggtagaccacgaggctcgtgtggtgtggcatgtcgggccacagcgccacggccacttggcgggcgtggaagggcgtgaagcagacgagaaagatgatgagcaccgtgagcaggagctgcatggcccgcacgcggcgctggcgaccctggtggagcagacccggccgcgacagtgcacacatga

SEQ ID NO: 345957 - DNA, 287 bp, Homo sapiens; identical to SEQ ID NO: 212577
  chr8:142367824-142368111
  hypo

SEQ ID NO: 345958 - DNA, 68 bp, Homo sapiens
  chr8:143558643-143558711
  hypo
gtgggaccttgggctggggcagcggacagccagggcagcggggggccagggcagcgggggcggtggcc

SEQ ID NO: 345959 - DNA, 283 bp, Homo sapiens
  chr8:144359694-144359977
  hypo
cgaagctctgggagagctcagctgggggtggctccaagtgctgagtgccagtgattctgccagtgccttctccctgccctgcctgtgccctccgggacagctggcagaccccggaccccagcctggctcctccgaggctgtccctctccaggtctcacctcccctcctactgtgactcatccagaaccccgggcctggcccccagatgtgcctgtggcgggcctctgaggtcactgtcctggtgaagacgaaggctaccgtccccgctttctggcagtgtctg

SEQ ID NO: 345960 - DNA, 91 bp, Homo sapiens
  chr8:144360545-144360636
  hypo
actaggggattcatctggtgccgtcactgatcgtgtgacctcgagcaagccacgagtcacctcggagcctccgggttcttctctggaaaac

SEQ ID NO: 345961 - DNA, 88 bp, Homo sapiens
  chr8:144676118-144676206
  hypo
cgtgcaagcctctcctctccagcaggagagcccggagcaggacacagcgactctttcaactgcgtcccgacaaacggtcagccccttc

SEQ ID NO: 345962 - DNA, 1382 bp, Homo sapiens; identical to SEQ ID NO: 345319
  chr9:14314414-14315796
  hypo

SEQ ID NO: 345963 - DNA, 568 bp, Homo sapiens; identical to SEQ ID NO: 345323
  chr9:27528536-27529104
  hypo

SEQ ID NO: 345964 - DNA, 182 bp, Homo sapiens; identical to SEQ ID NO: 201692
  chr9:27529157-27529339
  hypo

SEQ ID NO: 345965 - DNA, 567 bp, Homo sapiens; identical to SEQ ID NO: 345325
  chr9:27529340-27529907
  hypo

SEQ ID NO: 345966 - DNA, 273 bp, Homo sapiens
  chr9:116059825-116060098
  hypo
cgtagtcaccatacccagcagcaaccgaaaaaggtttggtttcttgtctgggaacagcactcaccccacaccccaaaggaactgcttggtccaaaagatggagaatatgagcaacagagtgacactgaggatgacggccatcaggtaggcaaagatgcggaactgagggttgcggaaacactccctcaaagagtggtggctggggatgaggatgggcgtagacacggtggcagaggccgtgtctgggggcggcccagtctggcccccaggctg

SEQ ID NO: 345967 - DNA, 631 bp, Homo sapiens
  chr9:116060128-116060759
  hypo
ctggcgcaggaagtagcggctcttgggctggtccttgaggcacagctgatggccttccaggatgacatggtggggctccaggcggagcagggcgagcatggcagtgtccgtgggcaagtcagtgacaggctgccctgaggccagcactgtgggctggcgacagagtgggcacagcaggcggcgccgggctggagtcacaaggctgaggtgggccagacattccacgcagaaggagtggcagcaatccagcattttgggggtatggaacgtgttgttgaaggggttccagcagacggggcactcagcctcaagctcccggccctgctgctcagccatcctcagccacacacggggaggcttcgcgggagacgtcctggcagaagggggaaaggagcaaaggaacagccatgaagtcccatccttgtgcttggcctggggcaaagtgttctgtgggtgttgaaaggtgtaatcaccacgttttacttaggttcaaaagcgttttgttcttgatcaccagttcctaacccatcgagttgagtcaaatgctcctacagcctcccctctgtcaaggtgaaggcctgggccacccctaccaagagcccccaagagagccggcattggagcagatgtc

SEQ ID NO: 345968 - DNA, 280 bp, Homo sapiens; identical to SEQ ID NO: 340286
  chr9:116750660-116750940
  hypo

SEQ ID NO: 345969 - DNA, 299 bp, Homo sapiens; identical to SEQ ID NO: 340289
  chr9:116790949-116791248
  hypo

SEQ ID NO: 345970 - DNA, 946 bp, Homo sapiens
  chr9:116810967-116811913
  hypo
cgaaaaggagcggcagaacatcgcagagcggctgttgagggtcatgtgtgccgacctgggtgcactgagcgtggtcagcgggaaggagttcctgaagttggcccagaccttagtagacagtggtgcccgctatggggccttctcggtcactgaaatcctgggcaacttcaacacgctggcgctgaagcacctgccacgcatgtacaaccaggtgaaggtgaaagtgacctgtgccttgggcagcaatgcctgcctaggcatcggtgtcacctgccactcccagagtgttggccctgactcctgctacatcctcacagcctaccaggccgagggcaaccacatcaagagctatgtgcttggtgtgaagggtgcggacattcgcgacagcggtgaccttgtgcaccactgggtgcagaacgtgctgtcggagttcgtgatgtcggagatcaggacagtgtacgtgacggattgccgggtgagcacgtccgccttctccaaggccggcatgtgccttcgctgctcagcctgtgccttgaactcggtggtgcagagcgtgctgagcaagcggacactgcaggcccgcagcatgcacgaggtcatcgagctgctcaacgtgtgcgaggacctggcgggctccacgggcctggccaaggagaccttcgggtcgctggaggagacgtctccaccaccctgctggaactcggtgacggactcactgttgctggtgcatgagcgctatgagcagatctgcgagttctacagccgggccaagaagatgaacctcatccagagcctcaacaagcacctgctcagcaacctggcggccatcctgacgccggtgaagcaggcagtcatcgagctgagcaacgagagccagcccaccctgcagctggtgctgcccacctacgtcaggctggagaagctgttcacggccaaggccaacgac

SEQ ID NO: 345971 - DNA, 82 bp, Homo sapiens; identical to SEQ ID NO: 345328
  chr9:124990438-124990520
  hypo

SEQ ID NO: 345972 - DNA, 142 bp, Homo sapiens; identical to SEQ ID NO: 345329
  chr9:124991012-124991154
  hypo

SEQ ID NO: 345973 - DNA, 277 bp, Homo sapiens; identical to SEQ ID NO: 340350
  chr9:132633604-132633881
  hypo

SEQ ID NO: 345974 - DNA, 112 bp, Homo sapiens; identical to SEQ ID NO: 345331
  chr9:132804293-132804405
  hypo

SEQ ID NO: 345975 - DNA, 207 bp, Homo sapiens; identical to SEQ ID NO: 201905
  chr9:132804455-132804662
  hypo

SEQ ID NO: 345976 - DNA, 292 bp, Homo sapiens; identical to SEQ ID NO: 201908
  chr9:132805445-132805737
  hypo

SEQ ID NO: 345977 - DNA, 477 bp, Homo sapiens; identical to SEQ ID NO: 340353
  chr9:132874127-132874604
  hypo

SEQ ID NO: 345978 - DNA, 1351 bp, Homo sapiens; identical to SEQ ID NO: 333814
  chr9:133710055-133711406
  hypo

SEQ ID NO: 345979 - DNA, 630 bp, Homo sapiens; identical to SEQ ID NO: 345338
  chr9:135286324-135286954
  hypo

SEQ ID NO: 345980 - DNA, 115 bp, Homo sapiens
  chr9:136384021-136384136
  hypo
ctgtgccgatggggcccgagtacaccccgtagccccatcggtcatggtagatccgcacagcaatggtcaggacgccgaacatcacaaatgttgacctcttgggttcgtcgaagtc

SEQ ID NO: 345981 - DNA, 50 bp, Homo sapiens
  chr9:137623301-137623351
  hypo
cgtttgcgaggcaaccctgcgccttcctctccctctgcagccagctccgc

SEQ ID NO: 345982 - DNA, 153 bp, Homo sapiens
  chr9:137623543-137623696
  hypo
tggggggctggtggggcatcatgggggctcctgcccaagagcctcctcaggggtgggcctctacgggcagctcaagtgttacaccctattcccaaaactttatttttaaagagacctcggtgcctcgaatttgctctgaataacgtgtgtatc

SEQ ID NO: 345983 - DNA, 185 bp, Homo sapiens; identical to SEQ ID NO: 340424
  chr9:138719269-138719454
  hypo

SEQ ID NO: 345984 - DNA, 264 bp, Homo sapiens
  chr9:139110897-139111161
  hypo
cgatttctgaattttcttctttgtgtggcttttcaggcaagggaagcgattttttcctcacatccggcaatgacttcaaataagacgaaaagaaggcccgcagaggcttcacgctgtgagagaggggagggcaaaggtgagaagagcctcctttataaaatcctaaagtaggagccgtggcattcaggacagctctgggccacccctttcatcctttgggcatttattggggcatgggagtcagtgggaacagctgacaccccg

SEQ ID NO: 345985 - DNA, 81 bp, Homo sapiens
  chr9:139111384-139111465
  hypo
agccctgagtgaggcatctggaagtcggggcctggggtggacgtcagcccctccctgatgtcaggcccctgagctccctgc

SEQ ID NO: 345986 - DNA, 144 bp, Homo sapiens; identical to SEQ ID NO: 213214
  chr9:139317510-139317654
  hypo

SEQ ID NO: 345987 - DNA, 380 bp, Homo sapiens
  chr9:139317866-139318246
  hypo
tttggaactcaatgtgccgatcagtggagtcagtatcgagcctgaccaccgcaagccaggaagcaggtgaagtgcccagcgctggagtgcagcgtgccacgaggagggcggtcggtgcttccctcctcgggctgtgggcacatggggccccgcaggttccttggaggagccctgagctgggaggcagcaaaggctgacctatcaaagcctcccggaggccaccgtgctgggtaccaggactcacctctgacaagcaggagaaggtaagggcccggtcagctccaaggagcgcgctccacgcgcgtgcacacagcttccctggtaataaagagctggcatctttcttagcacggtgttttccttctcgcctggggaggggc

SEQ ID NO: 345988 - DNA, 205 bp, Homo sapiens
  chr9:139698453-139698658
  hypo
cggggtggagaaggggtggccaggagcaacggagctgagaactcctcaagaggcaaccccactaagcgctggcaacgagagtggcgagggtgagagcagtgtctggggtgcgtgagcaggggttagcagatgacggttttagctgcccaagggcacgctggaagaggccaggttttggggaagaggatgaatctgtcttcaggca

SEQ ID NO: 345989 - DNA, 970 bp, Homo sapiens
  chr9:139835276-139836246
  hypo
cgtaactgctataagcatctccacctctcccgctcgggaaaaagccacagagcctggcgatgtcctcaaggggtcccggtggctccagtgcacccagcacacctcagcgcctctggctggcaagccaggagaagaaggtgcgaggccgtgggcgaggtgcctggaggacgcgcatggtgcgtggggagcgccaggctttgatggtggcgtcgtcgctggccgtgagcagcagctcctgctcctggggactgaagaccactgagttgaccacatcctcgtgccgcagcctggccagacagatgttgtagtggcggtcccagatgtagccgtgccggtcctccgccccgctgcagaacagcgcctgggtgagccggccgcccgcccgctgctgcccacacccgccctgcaccacgccgcgccctgcacctggccacgaagtccctgctgacgtccaggaagatgaagaagcactcgtcgttgggcgtgtaggcgcggtgcgcacgcagagcccgcctcacctcccgcatggtcttgaggtcgaacaccagcaggtcaatctcctccgcgattggtggcggctgcatggggtcggccaccaccgcaccgttgggccaggcgcggctgttcacgtacaggtacctgggcgaggggcactgtgctaggtgtgggccgcctgcgggcaccccgcctgggacactggcaagaggcccacctgttgtcgggcgacaggcccatgccgatgatgtgtccgtgtatgtctatgacgtggtccagcgcgtcgaagaaggcatcggagccccggccctcacccagcacgggccctgccgtggtcatctggtgtggcaggatctgcttgatgcctgcagggagggctacggtgagggtccctgtccaatgccccaaggacatcactccagggcagcttcctacctcagtggtgtctctggggctgtgagcaccacagaggtcc

SEQ ID NO: 345990 - DNA, 233 bp, Homo sapiens; identical to SEQ ID NO: 340488
  chr9:140623363-140623596
  hypo

SEQ ID NO: 345991 - DNA, 188 bp, Homo sapiens; identical to SEQ ID NO: 345339
  chr9:140703858-140704046
  hypo

SEQ ID NO: 345992 - DNA, 327 bp, Homo sapiens; identical to SEQ ID NO: 345340
  chr9:140704131-140704458
  hypo

SEQ ID NO: 345993 - DNA, 479 bp, Homo sapiens
  chr9:140708213-140708692
  hypo
cgacccaaagcagtggcaggcatctttgtgccttttttgtaacctcacactcaggggccccggtgtggcttcgtgctgggggcacaggcgagaggagcccttgcgaggcctgcaggacgacctggatccctgcacctcccagcccccggagagatgggtccagcacatgccagctttcccagcctccgagtgcatgcagcctggtgccctcactgcttgcgccttctcgagcactttccttgtggctctgcttgtgggcagctccctcctcttcccaggccgggcactgcccaggcccccccccccccccgccccccgccccacaaggtgtgtcaggctctgtgttcttgcctttcccatcgagcatctggccacaaatgcagccgccgcccagcccttcacccaccccacgtcacccactgccgcgtcgctgccctgcctgccccctgtccctctgtcagggtcctcagccagagctc

SEQ ID NO: 345994 - DNA, 215 bp, Homo sapiens; identical to SEQ ID NO: 213315
  chr9:140708771-140708986
  hypo

SEQ ID NO: 345995 - DNA, 60 bp, Homo sapiens; identical to SEQ ID NO: 201967
  chr10:7453036-7453096
  hypo

SEQ ID NO: 345996 - DNA, 165 bp, Homo sapiens; identical to SEQ ID NO: 345343
  chr10:12391705-12391870
  hypo

SEQ ID NO: 345997 - DNA, 324 bp, Homo sapiens; identical to SEQ ID NO: 345344
  chr10:12392327-12392651
  hypo

SEQ ID NO: 345998 - DNA, 208 bp, Homo sapiens; identical to SEQ ID NO: 201993
  chr10:17270445-17270653
  hypo

SEQ ID NO: 345999 - DNA, 508 bp, Homo sapiens; identical to SEQ ID NO: 345351
  chr10:30024793-30025301
  hypo

SEQ ID NO: 346000 - DNA, 790 bp, Homo sapiens; identical to SEQ ID NO: 345352
  chr10:31607954-31608744
  hypo

SEQ ID NO: 346001 - DNA, 252 bp, Homo sapiens; identical to SEQ ID NO: 202037
  chr10:31609416-31609668
  hypo

SEQ ID NO: 346002 - DNA, 412 bp, Homo sapiens; identical to SEQ ID NO: 345356
  chr10:74079281-74079693
  hypo

SEQ ID NO: 346003 - DNA, 179 bp, Homo sapiens; identical to SEQ ID NO: 345357
  chr10:74079752-74079931
  hypo

SEQ ID NO: 346004 - DNA, 253 bp, Homo sapiens; identical to SEQ ID NO: 340683
  chr10:80921761-80922014
  hypo

SEQ ID NO: 346005 - DNA, 57 bp, Homo sapiens; identical to SEQ ID NO: 345362
  chr10:93647662-93647719
  hypo

SEQ ID NO: 346006 - DNA, 737 bp, Homo sapiens; identical to SEQ ID NO: 334066
  chr10:111767130-111767867
  hypo

SEQ ID NO: 346007 - DNA, 760 bp, Homo sapiens; identical to SEQ ID NO: 345370
  chr10:121301911-121302671
  hypo

SEQ ID NO: 346008 - DNA, 392 bp, Homo sapiens; identical to SEQ ID NO: 340780
  chr10:126819324-126819716
  hypo

SEQ ID NO: 346009 - DNA, 141 bp, Homo sapiens
  chr10:127451818-127451959
  hypo
cggtaggcattgctggtcccttacctgtctctttttcttttttaaccctagcaataacatcgaagatgacacaattctcaaaaccaacaagcacatttactcccagcttttgagagcaactgcaaataaaaccgcgactct

SEQ ID NO: 346010 - DNA, 38 bp, Homo sapiens
  chr10:127452067-127452105
  hypo
ctgtcagtgccttcaacacggagccggtttgttcattc

SEQ ID NO: 346011 - DNA, 50 bp, Homo sapiens
  chr10:134793882-134793932
  hypo
cgagtgcctggtgagagcccggtgagtgcccggtgagtgcctggtgagtg

SEQ ID NO: 346012 - DNA, 144 bp, Homo sapiens
  chr10:134793968-134794112
  hypo
gtgagtgcccagcgagtgcccggtgaatgcccagcgagtgcccagtgagtgcccggtgaatgcccagtgagtgcccagagagtgcccagcgagtgcccggtgaatgcccagcgagtgcccggtgagtgcccgcaagtgcccaac

SEQ ID NO: 346013 - DNA, 514 bp, Homo sapiens; identical to SEQ ID NO: 340870
  chr10:135120335-135120849
  hypo

SEQ ID NO: 346014 - DNA, 150 bp, Homo sapiens
  chr11:233062-233212
  hypo
gtgacgttgggcttgtagtttccagggtacagctccttggccaaagtgaaaaagggcttggggttgtgaaagaagaatgggagttcaaaaatggcctcggggtacgggagatcgtactgctggaggttgctgtacaggccactccccggc

SEQ ID NO: 346015 - DNA, 171 bp, Homo sapiens; identical to SEQ ID NO: 340889
  chr11:591108-591279
  hypo

SEQ ID NO: 346016 - DNA, 716 bp, Homo sapiens; identical to SEQ ID NO: 340964
  chr11:3243313-3244029
  hypo

SEQ ID NO: 346017 - DNA, 287 bp, Homo sapiens; identical to SEQ ID NO: 202443
  chr11:12132212-12132499
  hypo

SEQ ID NO: 346018 - DNA, 352 bp, Homo sapiens; identical to SEQ ID NO: 340997
  chr11:12278228-12278580
  hypo

SEQ ID NO: 346019 - DNA, 434 bp, Homo sapiens; identical to SEQ ID NO: 341000
  chr11:12283321-12283755
  hypo

SEQ ID NO: 346020 - DNA, 796 bp, Homo sapiens; identical to SEQ ID NO: 345378
  chr11:17035791-17036587
  hypo

SEQ ID NO: 346021 - DNA, 200 bp, Homo sapiens; identical to SEQ ID NO: 341010
  chr11:19256446-19256646
  hypo

SEQ ID NO: 346022 - DNA, 982 bp, Homo sapiens; identical to SEQ ID NO: 345379
  chr11:19733991-19734973
  hypo

SEQ ID NO: 346023 - DNA, 338 bp, Homo sapiens; identical to SEQ ID NO: 202485
  chr11:19735066-19735404
  hypo

SEQ ID NO: 346024 - DNA, 929 bp, Homo sapiens; identical to SEQ ID NO: 345384
  chr11:32915113-32916042
  hypo

SEQ ID NO: 346025 - DNA, 151 bp, Homo sapiens; identical to SEQ ID NO: 341040
  chr11:44621715-44621866
  hypo

SEQ ID NO: 346026 - DNA, 495 bp, Homo sapiens; identical to SEQ ID NO: 341043
  chr11:44640545-44641040
  hypo

SEQ ID NO: 346027 - DNA, 139 bp, Homo sapiens; identical to SEQ ID NO: 341076
  chr11:61662946-61663085
  hypo

SEQ ID NO: 346028 - DNA, 214 bp, Homo sapiens; identical to SEQ ID NO: 341079
  chr11:61672924-61673138
  hypo

SEQ ID NO: 346029 - DNA, 549 bp, Homo sapiens; identical to SEQ ID NO: 345393
  chr11:64512349-64512898
  hypo

SEQ ID NO: 346030 - DNA, 167 bp, Homo sapiens
  chr11:65685172-65685339
  hypo
gacctggcgcccaccctccttggcacgtgggctcaccttggccacctgaagctggccttcaaccacggcccgggcaatgccagcccaggcgtggtccagcttgaagcccggtgccagatgcataagccacttgcccgagagcacgtggtgggtgatggcgagctggc

SEQ ID NO: 346031 - DNA, 801 bp, Homo sapiens; identical to SEQ ID NO: 345395
  chr11:66079395-66080196
  hypo

SEQ ID NO: 346032 - DNA, 509 bp, Homo sapiens; identical to SEQ ID NO: 345399
  chr11:76381512-76382021
  hypo

SEQ ID NO: 346033 - DNA, 750 bp, Homo sapiens; identical to SEQ ID NO: 341248
  chr11:119535401-119536151
  hypo

SEQ ID NO: 346034 - DNA, 135 bp, Homo sapiens; identical to SEQ ID NO: 345403
  chr11:128391758-128391893
  hypo

SEQ ID NO: 346035 - DNA, 623 bp, Homo sapiens; identical to SEQ ID NO: 345404
  chr11:128392116-128392739
  hypo

SEQ ID NO: 346036 - DNA, 543 bp, Homo sapiens; identical to SEQ ID NO: 345405
  chr11:129148497-129149040
  hypo

SEQ ID NO: 346037 - DNA, 820 bp, Homo sapiens; identical to SEQ ID NO: 345406
  chr11:129149096-129149916
  hypo

SEQ ID NO: 346038 - DNA, 123 bp, Homo sapiens
  chr11:130781427-130781550
  hypo
cggcattctcctccccgatccctcccataaaccaacaggccaatcagcgtggctcgacgtgggaagcaagcgggcagtaggggttggggaaactcctgacttttgatgaactttcgtagatct

SEQ ID NO: 346039 - DNA, 161 bp, Homo sapiens; identical to SEQ ID NO: 345407
  chr11:133939437-133939598
  hypo

SEQ ID NO: 346040 - DNA, 94 bp, Homo sapiens
  chr12:2017667-2017761
  hypo
cggcctctcccacgcggtgttggagggcgtgctaggattgcctccggtggagccccggccccgtttcctccacacgaccgggttcacacctgaa

SEQ ID NO: 346041 - DNA, 213 bp, Homo sapiens; identical to SEQ ID NO: 214702
  chr12:2017874-2018087
  hypo

SEQ ID NO: 346042 - DNA, 248 bp, Homo sapiens; identical to SEQ ID NO: 341322
  chr12:2788614-2788862
  hypo

SEQ ID NO: 346043 - DNA, 85 bp, Homo sapiens; identical to SEQ ID NO: 345410
  chr12:4377809-4377894
  hypo

SEQ ID NO: 346044 - DNA, 244 bp, Homo sapiens; identical to SEQ ID NO: 202837
  chr12:4378558-4378802
  hypo

SEQ ID NO: 346045 - DNA, 55 bp, Homo sapiens; identical to SEQ ID NO: 345416
  chr12:8123528-8123583
  hypo

SEQ ID NO: 346046 - DNA, 73 bp, Homo sapiens; identical to SEQ ID NO: 345418
  chr12:19282260-19282333
  hypo

SEQ ID NO: 346047 - DNA, 772 bp, Homo sapiens; identical to SEQ ID NO: 345419
  chr12:19282363-19283135
  hypo

SEQ ID NO: 346048 - DNA, 252 bp, Homo sapiens; identical to SEQ ID NO: 202912
  chr12:24715505-24715757
  hypo

SEQ ID NO: 346049 - DNA, 83 bp, Homo sapiens
  chr12:29373882-29373965
  hypo
cgattcttcccttggggcaggctgtccttatccacattgggctgccagcgcttgggaggggctactggcgcagtgtgtttact

SEQ ID NO: 346050 - DNA, 237 bp, Homo sapiens; identical to SEQ ID NO: 214866
  chr12:47628809-47629046
  hypo

SEQ ID NO: 346051 - DNA, 141 bp, Homo sapiens; identical to SEQ ID NO: 214867
  chr12:47629208-47629349
  hypo

SEQ ID NO: 346052 - DNA, 111 bp, Homo sapiens; identical to SEQ ID NO: 214868
  chr12:47629379-47629490
  hypo

SEQ ID NO: 346053 - DNA, 493 bp, Homo sapiens; identical to SEQ ID NO: 202958
  chr12:48576976-48577469
  hypo

SEQ ID NO: 346054 - DNA, 144 bp, Homo sapiens; identical to SEQ ID NO: 341417
  chr12:53007462-53007606
  hypo

SEQ ID NO: 346055 - DNA, 359 bp, Homo sapiens
  chr12:56558022-56558381
  hypo
cgctcaccctccctccaggtggacccctctccctcacccttctcccctcttggccccttctcacctggcagtgggctggcactgggcaggaggttgccctgaacagctgccacaatggcagggctttgggctgcggcggatccgagccccggcccgagaggcaaggaagatggcatggtggtggtcgccggcaggttaggatgtagagggttcgccatggacacaggcaggttaggtggggggagagtgcccggggcgaacgggagatggtggtgatgcccatgcaggttaggaggagcggggaggttaatactgatggagtcagctagactaccaaatgggatgatggatggagcagg

SEQ ID NO: 346056 - DNA, 86 bp, Homo sapiens; identical to SEQ ID NO: 345430
  chr12:94544052-94544138
  hypo

SEQ ID NO: 346057 - DNA, 348 bp, Homo sapiens; identical to SEQ ID NO: 203159
  chr12:104851545-104851893
  hypo

SEQ ID NO: 346058 - DNA, 83 bp, Homo sapiens; identical to SEQ ID NO: 345434
  chr12:113495127-113495210
  hypo

SEQ ID NO: 346059 - DNA, 64 bp, Homo sapiens
  chr12:120172992-120173056
  hypo
cgttccgtgatctcccggcggagatggtccacttcacttcgcagttgtacaatctcgtcgttgg

SEQ ID NO: 346060 - DNA, 136 bp, Homo sapiens
  chr12:120173137-120173273
  hypo
gctgctcctccaggtctgtgattacctaaaagaggaaaggaatccagttacacgccaagcacattcatttcaaataagaaattgcttctagggctatggatttctgaacccacgtgacactggcaatcaacgtgcc

SEQ ID NO: 346061 - DNA, 39 bp, Homo sapiens
  chr12:122192684-122192723
  hypo
cgtgaattttggaaggatgctattcaacccagtacacct

SEQ ID NO: 346062 - DNA, 116 bp, Homo sapiens; identical to SEQ ID NO: 215161
  chr12:122192843-122192959
  hypo

SEQ ID NO: 346063 - DNA, 45 bp, Homo sapiens
  chr12:122192989-122193034
  hypo
agactgggcatacgggaaaaaggctcacagcttcatagctagtgc

SEQ ID NO: 346064 - DNA, 407 bp, Homo sapiens; identical to SEQ ID NO: 341577
  chr12:122480960-122481367
  hypo

SEQ ID NO: 346065 - DNA, 123 bp, Homo sapiens; identical to SEQ ID NO: 341584
  chr12:122970391-122970514
  hypo

SEQ ID NO: 346066 - DNA, 236 bp, Homo sapiens
  chr12:131271740-131271976
  hypo
cggccacccgcgcccagggcagggatctacacttgagtgtttccgcgtctgggtcctaattcctagtgggagcacggaaggacacagggaatgttgggagctgcatgggccatgtcttggtcccatgggacctggccctacttgacccgaggccacaccagcttgtagacatgagcttttgggggggctttgagtcctaagagacccagctgcccacgccacacagggggaaagga

SEQ ID NO: 346067 - DNA, 298 bp, Homo sapiens; identical to SEQ ID NO: 316760
  chr12:131272032-131272330
  hypo

SEQ ID NO: 346068 - DNA, 714 bp, Homo sapiens
  chr12:131272367-131273081
  hypo
tctactcacagggcaacctgctttagcaaactcaacgacacattaaaaagtacaatttgcaaaggagagctaccacctggctgggtgttctgcgcctagagactgggccccgggagagcgctccacagtgaacttgcgaaggatggaatttacataaagaaggcaccgtctttagtcctggaaaggcaccctgggattctctacctccgtccgtctttttcacaggcagggaactgaggtcccaggaggcccaggtcaccccacccaaggaggcagggcctcccctgcactctctggaacctctccctgccaagaagccagaggccctgttttctcaggcttaggaatctgcactctcttgttcaaagactgtgagtcagaagaggagggccaagtgccgccttgaatttctcttactgctcaaatggaaaacaatgaaacagggctgtccacatcacagcctgccacctgccagtcatttagagcctggcgcgcatttccatagctcctctgacgccaggacaatcagacccgtctccggagggctcctgcctctggatgtctaaatgttcttgccttaaacccggtgtgacgctccacccctcccacaccgcacacatacgaattttaacaaaatcttcaaagcagaacttaacaaaaggttgcgtggtaccaggtccatttggttccatgtgaaaccaactaggaagatcc

SEQ ID NO: 346069 - DNA, 109 bp, Homo sapiens
  chr12:132378083-132378192
  hypo
cacattctccaacttttctccgccttgatttcctcatctgtaaaacagggacataacagcaagtgcctcgtggaatcattgaatggatgcactaatcgctggaaagtgc

SEQ ID NO: 346070 - DNA, 816 bp, Homo sapiens; identical to SEQ ID NO: 341659
  chr12:132536813-132537629
  hypo

SEQ ID NO: 346071 - DNA, 167 bp, Homo sapiens; identical to SEQ ID NO: 345438
  chr13:20735265-20735432
  hypo

SEQ ID NO: 346072 - DNA, 123 bp, Homo sapiens; identical to SEQ ID NO: 341702
  chr13:28745545-28745668
  hypo

SEQ ID NO: 346073 - DNA, 200 bp, Homo sapiens; identical to SEQ ID NO: 345441
  chr13:29292491-29292691
  hypo

SEQ ID NO: 346074 - DNA, 242 bp, Homo sapiens; identical to SEQ ID NO: 345442
  chr13:29293342-29293584
  hypo

SEQ ID NO: 346075 - DNA, 100 bp, Homo sapiens
  chr13:30123381-30123481
  hypo
atgatcaaagaccaggagaaaaccgtacccgtggaccaggaggaagccagcgaagaacaaggcagcccaggatgcgggaccagtgccattccttcccacc

SEQ ID NO: 346076 - DNA, 287 bp, Homo sapiens; identical to SEQ ID NO: 203409
  chr13:95201339-95201626
  hypo

SEQ ID NO: 346077 - DNA, 229 bp, Homo sapiens; identical to SEQ ID NO: 203410
  chr13:95201662-95201891
  hypo

SEQ ID NO: 346078 - DNA, 438 bp, Homo sapiens; identical to SEQ ID NO: 341762
  chr13:96085837-96086275
  hypo

SEQ ID NO: 346079 - DNA, 82 bp, Homo sapiens; identical to SEQ ID NO: 341769
  chr13:99115936-99116018
  hypo

SEQ ID NO: 346080 - DNA, 38 bp, Homo sapiens
  chr13:114188365-114188403
  hypo
cgtggaagttctccgaatcctggttttgattggtcaga

SEQ ID NO: 346081 - DNA, 161 bp, Homo sapiens
  chr13:114271763-114271924
  hypo
cgctcacctgcagaaccgttcacctgcagagcccttcacctgcagaaccgttcacctgcagagcccttcacctgcagaaccattcacctgcagagccgctcacctgcagaacccttcacctgcagagccgctcacctgcagagcccttcacctgcagaacc

SEQ ID NO: 346082 - DNA, 92 bp, Homo sapiens
  chr13:114807847-114807939
  hypo
agtcgcacacacatgtgaagtctgagcccatcacagagcacacacgagagcaggagtgaggaaggaaatgttggcagactcctcacgtcttc

SEQ ID NO: 346083 - DNA, 223 bp, Homo sapiens; identical to SEQ ID NO: 203572
  chr14:51562012-51562235
  hypo

SEQ ID NO: 346084 - DNA, 296 bp, Homo sapiens; identical to SEQ ID NO: 215787
  chr14:55765714-55766010
  hypo

SEQ ID NO: 346085 - DNA, 55 bp, Homo sapiens
  chr14:55766084-55766139
  hypo
atggtctgcacctagtgggatgggtgggggcgggtagaggggggttgcggggcac

SEQ ID NO: 346086 - DNA, 182 bp, Homo sapiens; identical to SEQ ID NO: 345461
  chr14:94406037-94406219
  hypo

SEQ ID NO: 346087 - DNA, 208 bp, Homo sapiens; identical to SEQ ID NO: 342027
  chr14:100748335-100748543
  hypo

SEQ ID NO: 346088 - DNA, 598 bp, Homo sapiens
  chr14:104048314-104048912
  hypo
cggagcatcagcattagctgtgccacagggtggtatgcgctctgctgaaggtggcaccttcagggaaaggcagtctgccggggaggctagcgagcaccctgggtaggagctgagcgtggcctccgcgcctcctcatgggaagtgctggagatgcaggagcccctgagccagagcccagcgctcttacaagagacctcacttcctgttcggggactggggctgctaagtcagagtgcgcctcctgcacccgccaccctggatgtggttccattccctggtccctgagccatagctggggggcatgagactgtcccctgggctgctttggggaccctacttcagggcagccctgccactccctgtaacgggctgtgggtcctgccctgtggccttcctacctctcttgcgtgtgggtgagcctgagcgtggccaccgccctgggagtgccacagaggcaagcggcactggtcctcatgtgtaaacagccccaccagcacgcggggctggagtagtcaggccgggacctgtcccaggaatgggcaggctgttaacctaggatgcattcaagttaggacacatttcattcccgtgtagcggt

SEQ ID NO: 346089 - DNA, 127 bp, Homo sapiens
  chr14:104048982-104049109
  hypo
acatacctgcctgggtcgtaatcacttgtgaagaaaatgaattatgctgtgacctttagatacgattcacataccataaaattcaccctgccttttttttttttttttgagatggagtctccttgtc

SEQ ID NO: 346090 - DNA, 236 bp, Homo sapiens; identical to SEQ ID NO: 216079
  chr14:104618440-104618676
  hypo

SEQ ID NO: 346091 - DNA, 139 bp, Homo sapiens
  chr14:104641166-104641305
  hypo
cgctcccagcgtttggtgggacatggttggtggtgcctgctgtagttttcatcacagtgaccgcagcattggccctgtgctctggggagggtcggggaagcgggggcgtgtaggggagactgggctcggcagctccact

SEQ ID NO: 346092 - DNA, 163 bp, Homo sapiens
  chr14:104645553-104645716
  hypo
cgcccgccctgcctcccagggtctggcgtgcgtcagtacaaggctgcggctggcggagcgcaggcagcagcggctgcgggaggtgcaggccaagcacaagcacctgtgtgaggagctggccgagacccagggccggctgatgctggagcctggccgctggctg

SEQ ID NO: 346093 - DNA, 198 bp, Homo sapiens; identical to SEQ ID NO: 345462
  chr14:105189960-105190158
  hypo

SEQ ID NO: 346094 - DNA, 640 bp, Homo sapiens; identical to SEQ ID NO: 342110
  chr14:105687735-105688375
  hypo

SEQ ID NO: 346095 - DNA, 115 bp, Homo sapiens
  chr15:28516961-28517076
  hypo
cgcacgcctgctcctccctcagcttgttgtccacacctgttaaggcgggagctggtaccaaacagagtgacagctcaggtgacgtgccctgcacagagcccagtacataggaagg

SEQ ID NO: 346096 - DNA, 177 bp, Homo sapiens
  chr15:28517198-28517375
  hypo
aacaagtgacctcccacacctgtctcatctgactcgctgctattaccaccaaacacacacacgccagagaaaaacactgccgttgacatgcatgctagtcttgctttaaaagtaactagactcgagtgccacctaaacacaaagttccatcatgacactcacgtgcatgtcgccctc

SEQ ID NO: 346097 - DNA, 209 bp, Homo sapiens; identical to SEQ ID NO: 290663
  chr15:32162282-32162491
  hypo

SEQ ID NO: 346098 - DNA, 761 bp, Homo sapiens; identical to SEQ ID NO: 345467
  chr15:32162523-32163284
  hypo

SEQ ID NO: 346099 - DNA, 339 bp, Homo sapiens; identical to SEQ ID NO: 345471
  chr15:45722599-45722938
  hypo

SEQ ID NO: 346100 - DNA, 77 bp, Homo sapiens; identical to SEQ ID NO: 345475
  chr15:48936649-48936726
  hypo

SEQ ID NO: 346101 - DNA, 153 bp, Homo sapiens; identical to SEQ ID NO: 342203
  chr15:63066085-63066238
  hypo

SEQ ID NO: 346102 - DNA, 421 bp, Homo sapiens; identical to SEQ ID NO: 342221
  chr15:66946036-66946457
  hypo

SEQ ID NO: 346103 - DNA, 587 bp, Homo sapiens; identical to SEQ ID NO: 345477
  chr15:71407569-71408156
  hypo

SEQ ID NO: 346104 - DNA, 194 bp, Homo sapiens; identical to SEQ ID NO: 345478
  chr15:82339684-82339878
  hypo

SEQ ID NO: 346105 - DNA, 85 bp, Homo sapiens
  chr15:99506062-99506147
  hypo
cggagttaaggcgaattgttcaagaacacaaactacatcgcactcgtcagttgtcagttctggggcatgactttagcgttttgtt

SEQ ID NO: 346106 - DNA, 468 bp, Homo sapiens; identical to SEQ ID NO: 345483
  chr15:100882092-100882560
  hypo

SEQ ID NO: 346107 - DNA, 247 bp, Homo sapiens; identical to SEQ ID NO: 342318
  chr15:101938625-101938872
  hypo

SEQ ID NO: 346108 - DNA, 100 bp, Homo sapiens
  chr16:410895-410995
  hypo
cgcagctgcccttgcagggcctgtccctgaagtcccgagtaatgggatttggcgcttctgatccatcgggctggccgcttcccgtgtcataggtggacat

SEQ ID NO: 346109 - DNA, 111 bp, Homo sapiens
  chr16:411606-411717
  hypo
gggaccagatgacgggcctcagaaccctatggtagccatggcaaccagcccctttagacaccgccacccccgagccactcctgactgctgagggagcaggcggcactgccc

SEQ ID NO: 346110 - DNA, 72 bp, Homo sapiens; identical to SEQ ID NO: 342335
  chr16:440413-440485
  hypo

SEQ ID NO: 346111 - DNA, 77 bp, Homo sapiens; identical to SEQ ID NO: 216551
  chr16:667407-667484
  hypo

SEQ ID NO: 346112 - DNA, 200 bp, Homo sapiens
  chr16:668074-668274
  hypo
cattggcacctgtcctggccgccccgctcccctcaggacatccaggtgggtcggcagaggagggaaggaggtgagcctctcacagggaccacagtcccggcccctcccctccccgtatgtttcagggacacgtcgggccagggccggttctgcaccatcttcaggtcctactccaggggcgctcaggtaagaccagcacc

SEQ ID NO: 346113 - DNA, 116 bp, Homo sapiens
  chr16:1425284-1425400
  hypo
cgtgctccaccacccagagcggcaggcgggagagaagcctggctcgggagtggacggtggactccagaggccgcaaggcagaggccacccccaccccactccaccgcacagcacga

SEQ ID NO: 346114 - DNA, 407 bp, Homo sapiens
  chr16:1425684-1426091
  hypo
aagaccccctggggaccaggaacccacagtagcatccgaaaatgcctcagccctcaaggatgctcatcggcggagccaaaggcaggccttgggccagccgcacccagagccattcactcctctccttcccattcacaggacggtggcgtccctgagcggacatccaccctggcctgcagggtgggccagccctcccggtcgctgtcatccacttgacgttctcaggccatggctgaagagggcaagacctcaaagcctgactgaagtcgtgctgagcagcagagccgagacactgcaggcagtggcagaggaccacgcactgagcggccttggacaggtggctccaaggctgaaagtgagatctgtggcgggcagggcctcttccctcctccctccagggctggggc

SEQ ID NO: 346115 - DNA, 194 bp, Homo sapiens
  chr16:1730112-1730306
  hypo
cgatgtgggaccaggagtttaaactagtgctcagagcgaatccggtttctggttcctggtggccagagttttgcaccacccacatcagtggggggagggactgcatccccagccctgtcccagttgtgtgcatttagtacgtttcctttttgtttgtgctgcctggcactggctgcccggtaaatgatggtgtt

SEQ ID NO: 346116 - DNA, 105 bp, Homo sapiens
  chr16:1730761-1730866
  hypo
cttccttcaagctggaacatttctatttgtaaggaatttaatccaagtttatttctcactgcttctctctaagcctgaccagtcccctcatcctttctgaaactc

SEQ ID NO: 346117 - DNA, 183 bp, Homo sapiens
  chr16:1813299-1813482
  hypo
cgtttcaggcgtctgtccagcagggagtcgctggtcatgcctgtgccccggcggcactccaggtcccggtctgtggaaccctcagtgactgtggcagcagagcagcctctgggtcgagcaggggccagctgtggcctccaagcccaggggcatagccggtgccaggaaagccacccttcccag

SEQ ID NO: 346118 - DNA, 90 bp, Homo sapiens
  chr16:1814037-1814127
  hypo
gccctacctgtctcagatttctggagggatgggtaggagccagggttcgtgcccacggcgcctccctgctccctgcagctgagtcccaac

SEQ ID NO: 346119 - DNA, 48 bp, Homo sapiens; identical to SEQ ID NO: 345484
  chr16:2042503-2042551
  hypo

SEQ ID NO: 346120 - DNA, 67 bp, Homo sapiens
  chr16:2106533-2106600
  hypo
cggggagaggtggcagcgcaggctgaaggaggtgggaaggaagcctgggtgtcctctcctgtgggga

SEQ ID NO: 346121 - DNA, 62 bp, Homo sapiens; identical to SEQ ID NO: 216652
  chr16:2106641-2106703
  hypo

SEQ ID NO: 346122 - DNA, 426 bp, Homo sapiens
  chr16:2107057-2107483
  hypo
gggcagggcttatgcctgccagcccctgacacgcattgtgtctcgcagctgatgcggaacctccttggcacccacctgggccacagcgccatctacaacatgtgccacctcatggaggacaggtgagtgtggtgggtggggcgcagggcagtggaggccagcacagccctcggggcagctccagtgtcccttgccaagcacacactggcttagagagtccttgtcctctcgggcagctgttccagaggctgccactagagcgaggcccatgacttctaggatccagcccctgtcctctccttcctctgtcagttcaacagaatatccacacccagctcagtgcctgccccatgctcggacgtcctccagcggtgctccccaactacttagcctgttacaaggcgaggctcggggtcttggcttgac

SEQ ID NO: 346123 - DNA, 75 bp, Homo sapiens
  chr16:2229615-2229690
  hypo
cggcaccttcttggaggtgggtgtgggcgagccctggagcttgggcacaggctgcgtcaggacgggcttgggaga

SEQ ID NO: 346124 - DNA, 265 bp, Homo sapiens; identical to SEQ ID NO: 216670
  chr16:2230223-2230488
  hypo

SEQ ID NO: 346125 - DNA, 72 bp, Homo sapiens
  chr16:2278311-2278383
  hypo
cggagccctggctgcccagcctccgccttcccaggccctgctgacagcaggctcgttgcagatgaggacgat

SEQ ID NO: 346126 - DNA, 388 bp, Homo sapiens
  chr16:2280815-2281203
  hypo
cgggctctggccttgacctggcgtttggtttctgggatggtggcgtcacctgggagcatgaactccttaggttctggcggggtctctgggctgggtctctggccagccaggcccctttccacccacctaaactctagcagcctccagccctaggctcagcacccctccctgtgcttcagcagcccctcttggcacccctgccactctggcacccctgggattttcccctttgcgggcatcctgggtactctgtgtgtgcccttggccagtcagcaggcccggtgggcttagtccagggctgctagctctcctgttggcctctagtggagatggcagagggtcctgcctgctggtggccaagggctggggcgtgccaggtcctgtcttt

SEQ ID NO: 346127 - DNA, 237 bp, Homo sapiens; identical to SEQ ID NO: 216674
  chr16:2281402-2281639
  hypo

SEQ ID NO: 346128 - DNA, 61 bp, Homo sapiens
  chr16:2281702-2281763
  hypo
gcctgcctgccctgctgcagtggcccagcccatctcctccgatggaagagtggccccggac

SEQ ID NO: 346129 - DNA, 810 bp, Homo sapiens
  chr16:2282326-2283136
  hypo
cgctatgtgtgtgcgctgtgccacaagaccttcaagacggtgagccggcgtgcggggagccagtgtgtgggtggcaggccccctcctgttcccccaggagggccctgagctgccacgccctcccccacagggcagcatcctcaaggcccacatggtcactcacagcagccgcaaggaccacgagtgcaagctctgtggggcctccttccgcaccaagggctcactcatccggcaccaccggcggcacacgggtgagctggccgcacctcgggctggagcccggtagcaccccgatggttggccctggggtgccccagcctcgcattccccagctttgggggatgaggcgggggcccctgcctgccttcgccttgtcaccttgtcgccagcctgctggggctgcccggggctgactaggttctctctgcagatgagcgcccctacaagtgctccaagtgtggaaagagcttccgggagtcgggtgcactgacccggcacctcaagtctctcaccccctgcacagagaaaatccgcttcagtgtgagcaaggacgtggttgtcagcaaagaggacgcacgtgcaggtcagcatggtgcgggcagctgcctggtcctgggggctggctgtggacgcagccgccactggggtgtgtgagggatcttcactccctcactccaccttgaaggttctggagctggagctgccggcttggggacagccacatcatcggtgacaggcgagcctatagagacttcacccgtgattcacctggtgacagatgccaagggcaccgtcatccacgaagtccac

SEQ ID NO: 346130 - DNA, 394 bp, Homo sapiens
  chr16:2540434-2540828
  hypo
cgagcagcgattcgctcggaccccagaggccacaggaagatggcttcccccacaggaggcaccctcacagggccctgctggcactgtctgccttgggctgcctgaacccggagagagagtgggatagactgttcatggggtgtcacccttatgtcacctgcaccccaccctgtcagtccagagtgaggctcaacccacaggggttgcttgggaactgttgcccgtgaggagttgggtgttattatcggctccgctctgcagacatggcaaccgcaggttagggaagatgcacggcttgtccgcatttcaagcaaacaagtggcagagctggactttgtggccaggcctgtctaactgcaaagctgccccgtttccacagtagcccctgcctccc

SEQ ID NO: 346131 - DNA, 60 bp, Homo sapiens
  chr16:2540933-2540993
  hypo
ggcttatgatgtacagcagcagccagccagcagatagacaacagggaaagccactcggcc

SEQ ID NO: 346132 - DNA, 49 bp, Homo sapiens
  chr16:2770043-2770092
  hypo
cggagccccaggcagtgcagcggagcctggtgggggactgcaccaccag

SEQ ID NO: 346133 - DNA, 173 bp, Homo sapiens
  chr16:2806405-2806578
  hypo
gcaccaacggctacgtccagcgcaacctgtccctggtgcggggccgccggggtgagcggcctgactacaagggagaggaggaactgcggcgcctggaggctgccctggtgaagcggcctaatcctgacatcctggaccacgagcgcaagcggcgcgtcgagctgcgatgcctc

SEQ ID NO: 346134 - DNA, 326 bp, Homo sapiens
  chr16:3021581-3021907
  hypo
gctacactgtgttgtcgggtgtggccggctggcgtgctctcaccgccccctccaccagtgctcggctccgggcatttggatggcaggctgctgcccgcctactggtatttggggcccggggagtgggtctgggttcaggggctccaggctccctgccctgctacctgcgcatggacgcactggcgctgcttgggggactggtaaatgtagcccgtctgcccgagcgctggggacctggccgctttgactactggggcaactcccaccagatcatgcacctgctgagcgtgggctccatcctgcagctgcacgccggcgtcgtgccc

SEQ ID NO: 346135 - DNA, 543 bp, Homo sapiens; identical to SEQ ID NO: 345486
  chr16:4233245-4233788
  hypo

SEQ ID NO: 346136 - DNA, 429 bp, Homo sapiens; identical to SEQ ID NO: 345490
  chr16:12897365-12897794
  hypo

SEQ ID NO: 346137 - DNA, 284 bp, Homo sapiens; identical to SEQ ID NO: 342562
  chr16:31131573-31131857
  hypo

SEQ ID NO: 346138 - DNA, 304 bp, Homo sapiens; identical to SEQ ID NO: 345492
  chr16:47176468-47176772
  hypo

SEQ ID NO: 346139 - DNA, 1300 bp, Homo sapiens; identical to SEQ ID NO: 342595
  chr16:58030214-58031514
  hypo

SEQ ID NO: 346140 - DNA, 130 bp, Homo sapiens; identical to SEQ ID NO: 345493
  chr16:67189038-67189168
  hypo

SEQ ID NO: 346141 - DNA, 377 bp, Homo sapiens; identical to SEQ ID NO: 345494
  chr16:67189259-67189636
  hypo

SEQ ID NO: 346142 - DNA, 134 bp, Homo sapiens; identical to SEQ ID NO: 345495
  chr16:68118915-68119049
  hypo

SEQ ID NO: 346143 - DNA, 86 bp, Homo sapiens; identical to SEQ ID NO: 342644
  chr16:74984568-74984654
  hypo

SEQ ID NO: 346144 - DNA, 82 bp, Homo sapiens; identical to SEQ ID NO: 204296
  chr16:77246930-77247012
  hypo

SEQ ID NO: 346145 - DNA, 606 bp, Homo sapiens; identical to SEQ ID NO: 342667
  chr16:81565589-81566195
  hypo

SEQ ID NO: 346146 - DNA, 346 bp, Homo sapiens; identical to SEQ ID NO: 342684
  chr16:84813536-84813882
  hypo

SEQ ID NO: 346147 - DNA, 177 bp, Homo sapiens; identical to SEQ ID NO: 345500
  chr16:85932121-85932298
  hypo

SEQ ID NO: 346148 - DNA, 802 bp, Homo sapiens; identical to SEQ ID NO: 345501
  chr16:87525701-87526503
  hypo

SEQ ID NO: 346149 - DNA, 505 bp, Homo sapiens; identical to SEQ ID NO: 335410
  chr16:87526565-87527070
  hypo

SEQ ID NO: 346150 - DNA, 170 bp, Homo sapiens
  chr16:88106152-88106322
  hypo
cggagagctccctgccccactcgttgaaggtctcagctcggggcagagccagtacctcgggctgctgtggccctagcgtccacgaaaacaaagcgcagggctgctgtgctctgtggatggcccagcgggcccaggccagcatctccatacctcgcaggcagaagcccccg

SEQ ID NO: 346151 - DNA, 96 bp, Homo sapiens
  chr16:88106398-88106494
  hypo
ctgaacactggaggcagaaggtggccctgcatccgggagcagtcttggccccgcagcctccgtgccacctgctttgggaacgtgcccagcggggac

SEQ ID NO: 346152 - DNA, 270 bp, Homo sapiens; identical to SEQ ID NO: 342821
  chr17:1407895-1408165
  hypo

SEQ ID NO: 346153 - DNA, 141 bp, Homo sapiens
  chr17:1412249-1412390
  hypo
cgtggggcagagggcggggaacagtctgcagacccaggctcactcgtggcggtcagcgtggggcagagggcggggaacagtctgcagacccaggctcactcgtgggggtcagcgtggggcagagggcggggagcggtctgc

SEQ ID NO: 346154 - DNA, 84 bp, Homo sapiens
  chr17:1412463-1412547
  hypo
aggctcactcgtggtccaggatgtttgggatgtctcgcccctcacaattctgcatctccaggatccggtcaaagtgctccagcc

SEQ ID NO: 346155 - DNA, 34 bp, Homo sapiens; identical to SEQ ID NO: 345503
  chr17:4981985-4982019
  hypo

SEQ ID NO: 346156 - DNA, 1345 bp, Homo sapiens; identical to SEQ ID NO: 345504
  chr17:7254483-7255828
  hypo

SEQ ID NO: 346157 - DNA, 156 bp, Homo sapiens
  chr17:7369222-7369378
  hypo
ccacgtgctcggggccccctcggaagcccactggtggaggcagggctgaggcgtccacccctgcaggaccaccagggccagcgcccccagctcccagccctgtagacccccgcgtgctggcccctcgtcggcactgggcctcatgggtctgcagcc

SEQ ID NO: 346158 - DNA, 674 bp, Homo sapiens; identical to SEQ ID NO: 204447
  chr17:16283956-16284630
  hypo

SEQ ID NO: 346159 - DNA, 208 bp, Homo sapiens; identical to SEQ ID NO: 342905
  chr17:17224346-17224554
  hypo

SEQ ID NO: 346160 - DNA, 261 bp, Homo sapiens
  chr17:33344328-33344589
  hypo
cgtctccactgtgacctcacaactccttataaatacactgaccgcttcactagttaacctggaacactaacactaaaccctaccccaaaaatataatttcggaagcactatcatcacacatttattctctctccactcgactctgctaagaggttccgaagaacaccagtgaaagaggaaaggtgaagacacagacccaagcagaggccccacctgggtctcatcctcagcaggtactctggccacgctctccaggtagac

SEQ ID NO: 346161 - DNA, 170 bp, Homo sapiens; identical to SEQ ID NO: 345520
  chr17:42092357-42092527
  hypo

SEQ ID NO: 346162 - DNA, 218 bp, Homo sapiens; identical to SEQ ID NO: 345528
  chr17:46124683-46124901
  hypo

SEQ ID NO: 346163 - DNA, 164 bp, Homo sapiens; identical to SEQ ID NO: 345529
  chr17:46125148-46125312
  hypo

SEQ ID NO: 346164 - DNA, 63 bp, Homo sapiens; identical to SEQ ID NO: 345531
  chr17:46687527-46687590
  hypo

SEQ ID NO: 346165 - DNA, 297 bp, Homo sapiens; identical to SEQ ID NO: 345533
  chr17:54911482-54911779
  hypo

SEQ ID NO: 346166 - DNA, 515 bp, Homo sapiens; identical to SEQ ID NO: 345534
  chr17:54911874-54912389
  hypo

SEQ ID NO: 346167 - DNA, 111 bp, Homo sapiens; identical to SEQ ID NO: 345536
  chr17:61777761-61777872
  hypo

SEQ ID NO: 346168 - DNA, 76 bp, Homo sapiens; identical to SEQ ID NO: 345537
  chr17:61778423-61778499
  hypo

SEQ ID NO: 346169 - DNA, 48 bp, Homo sapiens
  chr17:73215386-73215434
  hypo
ttagagacagggtttcgctttgcggcctgggcgggagtgcagtgatgc

SEQ ID NO: 346170 - DNA, 657 bp, Homo sapiens
  chr17:75206857-75207514
  hypo
cgctcttgtccatgtttcaagaacttggggtgcagtgtgtttcgtgtgaatcgggggcatctgtagacatccacatggtaaaaacctccgttctgctttgggtattaaataaagcacagatccgagatggcaacaaactgaaaggaaggctgaagcggaggcccccactgtgaatgcaggaaagaggttccgtcagcacagggggccgaggcctcaggatggagctgcctggggagccactttgctgaagagggggccgtgccacgtggtgccgcctgctgttcttagacaggacccttgtacctcactgaatctgctgtggaaggacattctgaagtggcgtttcagtggtgaggtggcagtggtgggattaaaggggcccggctcgtagagcagccacgcgctgaagggcacagcagacagcgtgcatgggctgagaggggccgtgggcctggctctgctgcttccttaggtggagttttcagtgactgcagaactctgcacagctgcttttcattctcacgtccgcccccgcccaatctttgaaactaactttgattattccctcctgggtagctctgtcggtgctgtgtaagtttggttttcaattggttctcagcacccagggggtgaccacctcaaccccatctctactat

SEQ ID NO: 346171 - DNA, 209 bp, Homo sapiens; identical to SEQ ID NO: 323128
  chr17:75207630-75207839
  hypo

SEQ ID NO: 346172 - DNA, 328 bp, Homo sapiens
  chr17:75207987-75208315
  hypo
tggtgctcgtggatcgtggctgcctaacgctgcctctttttcagattctcattcagattgtggatgcctcgtcagtcatcacttgggatttcgacgtgtgcaaaggggacattgtgtttaacatctatcactccaagaggtcgccacaaccacccaaaaaggactccctgggagcccacagcatcacctctccgggtgggaacaatgtgcagctcatagacaaagtctggcagctgggccgcgactacagcatggtggagtcgcctctgatctgcaaagaaggagaaagcgtgcaggtaaaatcacacacaggtcaaatcgcgcatcc

SEQ ID NO: 346173 - DNA, 282 bp, Homo sapiens; identical to SEQ ID NO: 343151
  chr17:76167747-76168029
  hypo

SEQ ID NO: 346174 - DNA, 105 bp, Homo sapiens
  chr17:77899559-77899664
  hypo
cctgtcccagctctggtcccccggccccaggtcctggacgctggctccgcgcagcagcaggcggcctccggaggacacgatgtgactggctgccgctacgtcgca

SEQ ID NO: 346175 - DNA, 238 bp, Homo sapiens; identical to SEQ ID NO: 345538
  chr18:2848166-2848404
  hypo

SEQ ID NO: 346176 - DNA, 205 bp, Homo sapiens
  chr18:3214837-3215042
  hypo
cgaaccgaaacaaagcgagaagtaactgggagggttactcagagcacacgcctcttcctgaggttggaaggttggaggagggcgtccgacatacccatgggaggagccataatcgtaggctgaggctgccttccgactgacttcagagctcagggcgtgctgcgaggcctgctgctgggaggaggaggcggacgcccgacggaag

SEQ ID NO: 346177 - DNA, 137 bp, Homo sapiens
  chr18:3215256-3215393
  hypo
aaaacaacactttttgagtgacttattaaggaacaaattccatagaccaagtcatctaaatcaatgtgtaaaaatcaatactcttggctgggtgcggtggttcatgcttgaaatcccaacgaggatctctcgaggcc

SEQ ID NO: 346178 - DNA, 195 bp, Homo sapiens; identical to SEQ ID NO: 345545
  chr18:20512643-20512838
  hypo

SEQ ID NO: 346179 - DNA, 1232 bp, Homo sapiens; identical to SEQ ID NO: 345546
  chr18:20512902-20514134
  hypo

SEQ ID NO: 346180 - DNA, 1207 bp, Homo sapiens; identical to SEQ ID NO: 345548
  chr18:32556625-32557832
  hypo

SEQ ID NO: 346181 - DNA, 45 bp, Homo sapiens; identical to SEQ ID NO: 204955
  chr18:32557883-32557928
  hypo

SEQ ID NO: 346182 - DNA, 755 bp, Homo sapiens; identical to SEQ ID NO: 345552
  chr18:42258983-42259738
  hypo

SEQ ID NO: 346183 - DNA, 115 bp, Homo sapiens
  chr18:55850987-55851102
  hypo
aagactttttgttatcctgaacattgcaggtggaaacatgattaattttgaattatttttgtttaacttctaccctctttcctatttacagcctattttgtttattttaacttcc

SEQ ID NO: 346184 - DNA, 227 bp, Homo sapiens; identical to SEQ ID NO: 343416
  chr18:72764607-72764834
  hypo

SEQ ID NO: 346185 - DNA, 874 bp, Homo sapiens; identical to SEQ ID NO: 343422
  chr18:74096607-74097481
  hypo

SEQ ID NO: 346186 - DNA, 859 bp, Homo sapiens
  chr18:74737517-74738376
  hypo
cgtgcaacggctccaggcttgtttaggaaactgtcccactctcatcttgctctaatcagaacatggcaggaatcaaatatccatacctgactgtctccagtagaatggtgatgacagagcggacactgtcctctattgaaatacttttttttttttttttttttacctagagcatgtttctcgtgctccattcccctgcatccgtggaaatcacatcgcacaagtaacttccatcaaaaccagcacgtgtgagagacaaacatctgggttcccaggcacaccccacaccctgagtaaaccaggacggacaggccgaggttccgctgctgcctttctggcacacgcaggggagcagtgggcagcgggttactccctctccgaaaaaccgtccttctccccatgccctgcggcaccgtgagtgcatcgctcatcccgctcgctgtgctcccagcctgtgccatggaacctgctcaactgcggagcctgggatgaggctgagcctgttgctcttcctgttgagtttggtttcgaccaccctgcatgaatctttgtgcttccaatgcttctggtcagggggccctgccgcctcgtttcagggacggtgcctgcaggccgctgtctgtgcctgaactcagcgcttttcacgctggcttgacccacggagggcggctgtcagccgcaaccggaggcagagcgcgggcgttctgaggctattggatgaggctcgctggtgataccttctgggtttgcaactttgttctaaagccaggggttttcaggccaacagaaatgcatttagttagtaatccagagcatgccataggaaaacataacgaataaaactagaataaaacataac

SEQ ID NO: 346187 - DNA, 160 bp, Homo sapiens
  chr18:77508739-77508899
  hypo
cgacagagtcatgatcagaggcctttagagtcatcattatcatgtctgtgtgtgagccgtgactgcctgggagccgtgtctgcctgggagccgtgactgcacatgagccgtgtctgtgtgtgagccgttctgtgtgtttgccgtgtctgtgtgtttgccg

SEQ ID NO: 346188 - DNA, 398 bp, Homo sapiens; identical to SEQ ID NO: 324585
  chr18:77508946-77509344
  hypo

SEQ ID NO: 346189 - DNA, 116 bp, Homo sapiens
  chr18:77509679-77509795
  hypo
tcccgtccacctgccagtgggttgagctcttccaggggttcgggacacccctcacggcagcaccttcacgtttacgagaactgtctctgtcttgttttgtttcaagttctcaaaac

SEQ ID NO: 346190 - DNA, 158 bp, Homo sapiens
  chr19:883424-883582
  hypo
cgtggggcggtgcgtgaagagctgggcatggcggggaccaaagcctggcatggtgggcacgtggggcggtagggggagagatgggggagagatgggtgcggtggggactgtcccagtgacccccagctgccagggatgtgagacctgagaaaggctgt

SEQ ID NO: 346191 - DNA, 544 bp, Homo sapiens
  chr19:884311-884855
  hypo
attttgtgccggaggtggggatgacgggcttggctccgtgggtgcggggggcccatcgggcggatagagatgggaatgggggccccagaagaggctgctggagaggtggggtggggtggggggcgtgttctcagcagcctcagctgacccgctgagccttggcttcctctccctgaaccaggttccggaggattccgtgcaccgcccctgcccggtctggcctgtcccctgctgcccgacggccccacccacagacccacgctccacagccgcccacacgcctgcagcccctcacggtgtccccgctggctgagcaacgacacctctcagcctcggcctcgcacagaatggtggcagccgccgcagcgggcgtggaaggatggaggagtctatacgcctaacacactcagaatgctggcaggcgcgcggtcacacccgagatcctagcactactggagatcgaggcgagacgatcgcttagggccggggttcaggaccaccctgggtgacacagcaagacctgcctccaaaataaaaaccaacc

SEQ ID NO: 346192 - DNA, 232 bp, Homo sapiens
  chr19:1978023-1978255
  hypo
cgcttctgtcctgggctagggaggtgggggggcgggggaggaggagtggcagacactgaggcggtgaccacacgggcagggtgcaggtgtcgggatgacttggcaggccatggtgcagtgctctggcaggctgggcccaggccctgctgctgggcagtggtgtcatttggagggtggtccttcagggaccccctcctgcctcctgcctcgggggtgggctggggaggtcggg

SEQ ID NO: 346193 - DNA, 116 bp, Homo sapiens; identical to SEQ ID NO: 345560
  chr19:1979018-1979134
  hypo

SEQ ID NO: 346194 - DNA, 638 bp, Homo sapiens; identical to SEQ ID NO: 343651
  chr19:4676079-4676717
  hypo

SEQ ID NO: 346195 - DNA, 766 bp, Homo sapiens; identical to SEQ ID NO: 345562
  chr19:7459915-7460681
  hypo

SEQ ID NO: 346196 - DNA, 354 bp, Homo sapiens; identical to SEQ ID NO: 343708
  chr19:7991824-7992178
  hypo

SEQ ID NO: 346197 - DNA, 214 bp, Homo sapiens; identical to SEQ ID NO: 205174
  chr19:10400761-10400975
  hypo

SEQ ID NO: 346198 - DNA, 73 bp, Homo sapiens
  chr19:13181444-13181517
  hypo
cggctgaggccgccagccgtaagatggctgccaaggtctaaaatggctgccagcagcgcccggagcagcgccc

SEQ ID NO: 346199 - DNA, 189 bp, Homo sapiens; identical to SEQ ID NO: 345572
  chr19:13213427-13213616
  hypo

SEQ ID NO: 346200 - DNA, 112 bp, Homo sapiens; identical to SEQ ID NO: 345573
  chr19:13213834-13213946
  hypo

SEQ ID NO: 346201 - DNA, 1257 bp, Homo sapiens; identical to SEQ ID NO: 345574
  chr19:13265772-13267029
  hypo

SEQ ID NO: 346202 - DNA, 267 bp, Homo sapiens
  chr19:14664561-14664828
  hypo
gatcgggccaggcctccgacctctatgctgggcattggctggacagggagctcaggcgatgagtgcagcagcgcttgtgcccggcgcggggatggtgagtgcctggctggccagctgcaggacctgtcaggccctttgtgtctttacctggggccctggttgcactgaccagggctcgcacccccagccaggcctcttgtgccccagactcgggagatgcttcctaccaggaagtgcagtcccctgcggggtccgagagagcctgcc

SEQ ID NO: 346203 - DNA, 324 bp, Homo sapiens; identical to SEQ ID NO: 335997
  chr19:15235629-15235953
  hypo

SEQ ID NO: 346204 - DNA, 102 bp, Homo sapiens; identical to SEQ ID NO: 205249
  chr19:16187000-16187102
  hypo

SEQ ID NO: 346205 - DNA, 517 bp, Homo sapiens; identical to SEQ ID NO: 205250
  chr19:16187103-16187620
  hypo

SEQ ID NO: 346206 - DNA, 634 bp, Homo sapiens; identical to SEQ ID NO: 345579
  chr19:16187640-16188274
  hypo

SEQ ID NO: 346207 - DNA, 825 bp, Homo sapiens
  chr19:17838219-17839044
  hypo
cggtgaccacgccctcactacccgcagaggtgggctccccgcactcgaccgaggtggacgagtccctgtcggtgtcctttgagcaggtgctgccgccatccgcccccaccagtgaggctgggctgagcctcccgctgcgtggcccccgggcgcggcgctcggcttccccacacgatgtggacctgtgcctggtgtcaccctgtgaatttgagcatcgcaaggcggtgccaatggcaccggcacctgcgtcccccggcagctcgaatgacagcagtgcccggtcacaggaacgggcaggtgggctgggggccgaggagacgccacccacatcggtcagcgagtccctgcccaccctgtctgactcggatcccgtgcccctggcccccggtgcggcagactcagacgaagacacagagggctttggagtccctcgccacgaccctttgcctgaccccctcaaggtccccccaccactgcctgacccatccagcatctgcatggtggaccccgagatgctgccccccaagacagcacggcaaacggagaacgtcagccgcacccggaagcccctggcccgccccaactcacgcgctgccgcccccaaagccactccagtggctgctgccaaaaccaaggggcttgctggtggggaccgtgccagccgaccactcagtgcccggagtgagcccagtgagaagggaggccgggcacccctgtccagaaagtcctcaacccccaagactgccactcgaggcccgtcgggtgagtactggagctggggccctgggctgggttagcagctgcttaggctggagagcatagctc

SEQ ID NO: 346208 - DNA, 60 bp, Homo sapiens; identical to SEQ ID NO: 205342
  chr19:30718934-30718994
  hypo

SEQ ID NO: 346209 - DNA, 78 bp, Homo sapiens
  chr19:34949560-34949638
  hypo
cgggaatttttaagtcattttttattggatatctggtaaacgagattttagattgtatggcgtataaaattacagcac

SEQ ID NO: 346210 - DNA, 295 bp, Homo sapiens; identical to SEQ ID NO: 345590
  chr19:37568994-37569289
  hypo

SEQ ID NO: 346211 - DNA, 182 bp, Homo sapiens; identical to SEQ ID NO: 345591
  chr19:37569554-37569736
  hypo

SEQ ID NO: 346212 - DNA, 132 bp, Homo sapiens
  chr19:45603745-45603877
  hypo
cgtttgccccaatttgtagatgaggaaatggagcccatagaggtaaagtaattttcctgaggtcacacagtgggtaagtggtggagctgggattcaaatccaggcagccagcctggcgccgaagcctgcgca

SEQ ID NO: 346213 - DNA, 334 bp, Homo sapiens
  chr19:45603910-45604244
  hypo
acgcattcggtgcaacgtgccatacggtctcttcatctataacccagaatcgtttataaaatagaggcaacagtgctggctttgcggtgttgtggcagggaggagaaacagaaacaggtggggtaagggcccagccttggtgggcacgcaggagggggtcactgtggttcgtggacagcttgagtccctggagatttgtgctgctcctctgtcctcagcattgcctgctgttctgacccttggcctctgggacgtgttcttcctgtgctactcagtgtctggtatgtgataggcgctcaatatattcttgctgcgtgagtgacttggtgacccc

SEQ ID NO: 346214 - DNA, 139 bp, Homo sapiens; identical to SEQ ID NO: 345597
  chr19:46931914-46932053
  hypo

SEQ ID NO: 346215 - DNA, 550 bp, Homo sapiens; identical to SEQ ID NO: 336209
  chr19:49467064-49467614
  hypo

SEQ ID NO: 346216 - DNA, 224 bp, Homo sapiens; identical to SEQ ID NO: 344049
  chr19:49600463-49600687
  hypo

SEQ ID NO: 346217 - DNA, 176 bp, Homo sapiens
  chr19:50919593-50919769
  hypo
cgtgtccaccccggtgccctttccctggctgcccgggtgtgactgccatgtggccgcaggacccgctgttcgtgctggagcacagcctgcccattgacacgcagtactacctggagcagcagctggccaagcccctcctgcgcatcttcgagcccatcctgggcgagggccgtgcc

SEQ ID NO: 346218 - DNA, 73 bp, Homo sapiens; identical to SEQ ID NO: 345605
  chr19:51228809-51228882
  hypo

SEQ ID NO: 346219 - DNA, 74 bp, Homo sapiens; identical to SEQ ID NO: 205557
  chr19:52531285-52531359
  hypo

SEQ ID NO: 346220 - DNA, 208 bp, Homo sapiens; identical to SEQ ID NO: 345609
  chr19:52531884-52532092
  hypo

SEQ ID NO: 346221 - DNA, 149 bp, Homo sapiens
  chr19:56201494-56201643
  hypo
cggtgactgaccaggctgccctgcggccacctcctgtggtcagcgctggccatcccccttcgggctgagcaccgtgagggccaccaccggccgccacagctgaatggggaggcccagaataggccaacagcctggcatggccacaggga

SEQ ID NO: 346222 - DNA, 171 bp, Homo sapiens; identical to SEQ ID NO: 344121
  chr19:56807013-56807184
  hypo

SEQ ID NO: 346223 - DNA, 236 bp, Homo sapiens; identical to SEQ ID NO: 344146
  chr20:371973-372209
  hypo

SEQ ID NO: 346224 - DNA, 139 bp, Homo sapiens; identical to SEQ ID NO: 219814
  chr20:2820587-2820726
  hypo

SEQ ID NO: 346225 - DNA, 143 bp, Homo sapiens; identical to SEQ ID NO: 294514
  chr20:2820861-2821004
  hypo

SEQ ID NO: 346226 - DNA, 1002 bp, Homo sapiens; identical to SEQ ID NO: 345628
  chr20:30192854-30193856
  hypo

SEQ ID NO: 346227 - DNA, 189 bp, Homo sapiens; identical to SEQ ID NO: 345629
  chr20:30193992-30194181
  hypo

SEQ ID NO: 346228 - DNA, 237 bp, Homo sapiens; identical to SEQ ID NO: 344211
  chr20:32436267-32436504
  hypo

SEQ ID NO: 346229 - DNA, 435 bp, Homo sapiens
  chr20:35443740-35444175
  hypo
cgctgttgtcgggggcctcatgcagccggaagtcagcacactcgttgtccagacacagccggaggccagccgtgaagccattggcatcagccaccaggacatcgatggccttactgaccagggcggcctgctctctcagcccaggcagcacctcggcctccctggctctgcagagtcggaccgcatgggactcgtgtgtctcgcccaggggagcaggcacacactgggcagagtccccggcctcggcgtccgtctccagcatgggccgcgtactctggcaggaggcgaggtcacagcgctggaggttggagaggagcacgcggttctcgtactgcagcttcttgaccttgccgctgagctcgccgatctgcagcttggcggccgccagctcctcctgtgaaggttcgctgagcacagaacaactgtcctccgaca

SEQ ID NO: 346230 - DNA, 381 bp, Homo sapiens
  chr20:35444205-35444586
  hypo
acttggccagctcgttcagcagcagcttgttctggtcctcgagctcggcagaggagcgccgcagcagctcggcctcctcttcgacaaactgcaggtgtcgccgcagctctgccaagctctccccgcactctccgccacccagcgcggagaaggccaggcgtgcctcaggacccccacagccacctccatgatccttcatgtcgtccatctcagcccgcaggcctcggttctccacctccagctccacgatgcggcggctcagcaggttggcttcctcctccaccagcttcaggtgcaccttcagctcggtctcccgcgagtggggggcatcggccagctcctcggctgacagcgcgctgtccaggtccccatagagcgagc

SEQ ID NO: 346231 - DNA, 62 bp, Homo sapiens; identical to SEQ ID NO: 345634
  chr20:37274639-37274701
  hypo

SEQ ID NO: 346232 - DNA, 546 bp, Homo sapiens; identical to SEQ ID NO: 205802
  chr20:37274731-37275277
  hypo

SEQ ID NO: 346233 - DNA, 389 bp, Homo sapiens; identical to SEQ ID NO: 345636
  chr20:37433723-37434112
  hypo

SEQ ID NO: 346234 - DNA, 172 bp, Homo sapiens
  chr20:42088459-42088631
  hypo
cggaccacctgttcgtacagaatacaggcttattgtagaaaatctttctagtcggtgcagttggcaagatttaaaggtatgttttgtaattcaagatagaaatgatatgactaatgctttaaagtaaactccttttatattcttatttctgggaatttattatggtatatag

SEQ ID NO: 346235 - DNA, 522 bp, Homo sapiens
  chr20:48498752-48499274
  hypo
cgagtgagccgtgctcgctcattttctccacttcttcaccgcctgtccacggggctggaattggccttggcaggtcaccagtgacctcccgcagccagacctggaggggaggcgtccgcccccgtcctagcctacctccttcccactgcccctaccttctggcgaggaccacttcactctcttccccggcctctgggccatgctcctcctttctctcctttgacgtctccttgggctcgtcccccttcgctgacccctcaaatagtggcttcttcaggacttggccccagccccacttctgttcacgtgttctgcacttcactgagtgcgctcacccgtccactggccttcacttccacctagtcccaaagctgttcccgcgaacccagacctccctctgggatccgtactcctgtttccagctgcctgtttggatgccgtggggatgctgtcatccctatgcctttgcatcccccttgcccaagaaatcctactttgaattgcccggtggcctggctagcc

SEQ ID NO: 346236 - DNA, 164 bp, Homo sapiens; identical to SEQ ID NO: 345639
  chr20:48771177-48771341
  hypo

SEQ ID NO: 346237 - DNA, 570 bp, Homo sapiens; identical to SEQ ID NO: 345641
  chr20:50383675-50384245
  hypo

SEQ ID NO: 346238 - DNA, 113 bp, Homo sapiens; identical to SEQ ID NO: 345643
  chr20:57225466-57225579
  hypo

SEQ ID NO: 346239 - DNA, 164 bp, Homo sapiens
  chr20:57268976-57269140
  hypo
tggtgagtgcttcgagaggaggcagccacggtgctcctagtcgggcagcggtgagctcgggcctggggagctcacagccctgctcagactgcagcgcacgcccagagggctgtggacgttatcatccctgctctgtagacagggaaacaggtccagagagacgc

SEQ ID NO: 346240 - DNA, 56 bp, Homo sapiens
  chr20:58514041-58514097
  hypo
cgcagcttaggtgtggaggctccaggtggccggtccccgcgcggctcagatgaagt

SEQ ID NO: 346241 - DNA, 115 bp, Homo sapiens; identical to SEQ ID NO: 345644
  chr20:58514400-58514515
  hypo

SEQ ID NO: 346242 - DNA, 83 bp, Homo sapiens
  chr20:60544922-60545005
  hypo
cggaacactcggccccctcatcggggcactcggccccccgtcggagcactcgcccccccgtcggggcactcggccccccgtcg

SEQ ID NO: 346243 - DNA, 208 bp, Homo sapiens; identical to SEQ ID NO: 220146
  chr20:60545058-60545266
  hypo

SEQ ID NO: 346244 - DNA, 265 bp, Homo sapiens; identical to SEQ ID NO: 220147
  chr20:60545296-60545561
  hypo

SEQ ID NO: 346245 - DNA, 123 bp, Homo sapiens
  chr20:61838301-61838424
  hypo
cgtgggagacaactggaaacgcacagttcgggctgcctggaaaacacatgcagcctcctttcagggcctttgatctccctttgtctcccgcacagccaggcacaggttcagcgctcactcgct

SEQ ID NO: 346246 - DNA, 345 bp, Homo sapiens; identical to SEQ ID NO: 345646
  chr20:62495236-62495581
  hypo

SEQ ID NO: 346247 - DNA, 122 bp, Homo sapiens; identical to SEQ ID NO: 205931
  chr21:27011487-27011609
  hypo

SEQ ID NO: 346248 - DNA, 133 bp, Homo sapiens; identical to SEQ ID NO: 205932
  chr21:27011639-27011772
  hypo

SEQ ID NO: 346249 - DNA, 146 bp, Homo sapiens
  chr21:42617817-42617963
  hypo
cggctagagccacgtggggcggggagcgccactgtcactcacgcacctttccctttctctcccggttcaagtataacgcagacaaggccatcgtggacagtggcaccacgctgctgcgcctgccccagaaggtgtttgatgcggtg

SEQ ID NO: 346250 - DNA, 92 bp, Homo sapiens
  chr21:42617995-42618087
  hypo
tcctcgggacactcacgggtccccgagttgctgagttacagtcacctgctgaggagcagcactgcgtgttctgagcatctctgaactattgc

SEQ ID NO: 346251 - DNA, 375 bp, Homo sapiens
  chr21:43239707-43240082
  hypo
cgctcacatcccctcccagcgccctgcagcagctgagcggcctggctgagcctggcccgtggccctggcgcctgtacccacctttcccacactcggcccgtggccccggcccccgcccccgccacacccaccttccccacactcccagttctcgctcatgtccccttccagcaccctgcagcagggtggcctggctgagcctggcccatgtccccagcacccgtacccacctttcccacactcggcacacaggtactcgcggacattgtcgtgcacacgcatgtgctccttcagcatgtccttcctggcaaaggacttcccacactgctcgcaggcgtggctcttcacacctgagaacacaggcatctgccactc

SEQ ID NO: 346252 - DNA, 243 bp, Homo sapiens
  chr21:43240112-43240355
  hypo
gcaaagaggatgcaccaaggagaggggcccagcctccccagcagctagaagcgcagtaacaggggtggggtcgcctcttcagcggcctccacagagccctcccggggatcctgtgactccagtagatccctgaggacctggaggggtgagggggctgggggcgctgggctgtgagtggcagggctgataaggacgggaaaagctggagaaacagaggaaggcatgggggaggcaaggtgcgac

SEQ ID NO: 346253 - DNA, 516 bp, Homo sapiens; identical to SEQ ID NO: 344507
  chr21:43791392-43791908
  hypo

SEQ ID NO: 346254 - DNA, 119 bp, Homo sapiens
  chr21:44338552-44338671
  hypo
tggacacattcatggtaagcacaatggttctcctagatctacaaacagattttttcctggcttaggaagggatgcatctgcttatagtttttgtataaaggaatggaaatgccgcgggc

SEQ ID NO: 346255 - DNA, 209 bp, Homo sapiens; identical to SEQ ID NO: 344516
  chr21:44444714-44444923
  hypo

SEQ ID NO: 346256 - DNA, 333 bp, Homo sapiens
  chr21:46811998-46812331
  hypo
cgtgggagaggagctccgggctggctgatacactcgcctcctgacaggagcttgctttgcctccagtttgcagccctcacaaacaaggccgctatgaacatgtggcttcaggtcttgatgcggatgactgaggacctgaatatctggatcacgagacaggtgtgtgtttaactttttagcaagcggcaaaactgtttttcagaagggtcgtcctactgcggaagtgagtggccttccctgagtttccagtcggtgctgggagttccctgagtttccgcactcagggccgggagttctagctgctccacacctttgacgactcttgctacagtc

SEQ ID NO: 346257 - DNA, 81 bp, Homo sapiens
  chr21:46812995-46813076
  hypo
cggcacgaggccgcccgcctgcagcaggcccgcaggggcacggtgggtccccgcccgctcctcatgccttgagcgcgtcat

SEQ ID NO: 346258 - DNA, 192 bp, Homo sapiens
  chr21:46813106-46813298
  hypo
agacctcaacacggccagcacggtgtgcatggtgtgcacgcctcctgcgccggggccaccagagtgggctctcaccggaggagaaagacagtcggggagagcagcgctgtctgtcacgctttgtcacgctttgccggtgtcatctgagaagtggtgcaggggacaaggggggcgtgacaggactggtcctgc

SEQ ID NO: 346259 - DNA, 261 bp, Homo sapiens
  chr21:46839249-46839510
  hypo
tgctgtgtgtagtgatgcgcgatgccgtgtgtggtgacacgatgccgtgtgtggtgacacttaatgtcatgtagtgacacgctcgcaggatcgccaaggccaggctggctccaaaggcttgggtctggcttcctggggccactgggtgctctctgaggccgcccatcactgttcgggccctggggtgggagctgggctgcaaagtggcctggactttatgtcctgccaggtacagtgtttccctcagcagatttatcaggc

SEQ ID NO: 346260 - DNA, 786 bp, Homo sapiens; identical to SEQ ID NO: 344603
  chr21:46861383-46862169
  hypo

SEQ ID NO: 346261 - DNA, 54 bp, Homo sapiens
  chr21:46864076-46864130
  hypo
cgctccatggtacctcctgcctcccgaaatcacctctaagttcactttgtgcca

SEQ ID NO: 346262 - DNA, 297 bp, Homo sapiens; identical to SEQ ID NO: 344607
  chr21:46870768-46871065
  hypo

SEQ ID NO: 346263 - DNA, 277 bp, Homo sapiens
  chr21:46894494-46894771
  hypo
cgtgtgtgttggtggggtgtgtggaatcacgtggtacccaaggggagaatcccccagccccaggtgtgaggaacagcagggaattctcactcaggggcccagatcacaacatgccccacgtgaacatggacccacagcctcgctcctgggggcgtgggcaggagacgccgtggacgtggacccacagcctcgctcctgggggcgtgggcaggagacaccgtggctggactgtgggcagtgtgtgaacatccatgttactttcatgctttttctttat

SEQ ID NO: 346264 - DNA, 257 bp, Homo sapiens; identical to SEQ ID NO: 220538
  chr21:46894910-46895167
  hypo

SEQ ID NO: 346265 - DNA, 215 bp, Homo sapiens; identical to SEQ ID NO: 220539
  chr21:46895491-46895706
  hypo

SEQ ID NO: 346266 - DNA, 575 bp, Homo sapiens
  chr21:46895736-46896311
  hypo
cttcccttcgccccatccctccgttagctcgtgcgtggccatcagggaatgaacgcgtgtgtgagcctgacgaccaggaggagaaggcggcgcagggagcgcgcggaaggctttccccagctcgggccacctgagaaaacacaggaggggcggggagtggggaggccccagccgcgggactgaggcgcggtgctgtccgtgagagacgggtgcgggaacgtgttccctgcggggaccctctgcagattcacatcagcttcccagcatggcctgtcgggcgccgggaggcctctgtggtgacggcaggcgcggtcctgggtcctggggagccggggagcccacaggcggccacacccctgcggcccacggaaggaagcccctcgcgcacggccctggagcaccctcctgtttcagaggatttttctttatctttcttgcgatcttaagtatttcatttcacaaaccaagcaagtctccaccgggcatctgccggccgaataacaggccacctcccctctcgtcctccagggcgcggccctaaaacccaggctccccgcgccaccccccgtcaccac

SEQ ID NO: 346267 - DNA, 1234 bp, Homo sapiens; identical to SEQ ID NO: 344614
  chr21:46906455-46907689
  hypo

SEQ ID NO: 346268 - DNA, 616 bp, Homo sapiens; identical to SEQ ID NO: 344616
  chr21:46911022-46911638
  hypo

SEQ ID NO: 346269 - DNA, 755 bp, Homo sapiens; identical to SEQ ID NO: 220545
  chr21:46912528-46913283
  hypo

SEQ ID NO: 346270 - DNA, 319 bp, Homo sapiens
  chr21:46913360-46913679
  hypo
ggctttgtggggaaggagctggccctgactctgctggacctcctgccattccagggtgagaagggtgaaccgggcagcatcttcagccccgacggcggtgccctgggccctgcccagaaaggagccaaggtgagggccgggcagcctccttccggcaggcgtgggggctcctggggctgtggagacagcctggggagggtcttcctgagggtctggctcctgatgcacgagcctctcccaagcagggctctaccatccaggcctggccctggtggcccctcctttctcgcacccatgtcggcggttccgccggcccctc

SEQ ID NO: 346271 - DNA, 395 bp, Homo sapiens; identical to SEQ ID NO: 344619
  chr21:46918218-46918613
  hypo

SEQ ID NO: 346272 - DNA, 390 bp, Homo sapiens
  chr21:46935349-46935739
  hypo
cgcggggcacagtgcagggacagcatggccaggcagctgccctgagtgtcgccagcacgctgtggccaccgccagagtgcggcacagggcagggggaatcctagggggcctgctagcaggataagcggaggcccccattgctaaggcaggcggccctcgaggcaggggtcgtggggatgcactgagggccgcctgcaaagttaccacaggggcgcccgagagtcactggttcacattctgaacaccgtcgcttggaagacactgcaaacccagcttgctgacaccaggaggatggacagccagctggggacaagtctcatctgcagcctcagggcctgaggcttgggcggagcacagagtgcagggggaaggggttgtcactgggctcag

SEQ ID NO: 346273 - DNA, 142 bp, Homo sapiens; identical to SEQ ID NO: 345651
  chr21:47063290-47063432
  hypo

SEQ ID NO: 346274 - DNA, 67 bp, Homo sapiens
  chr21:47689571-47689638
  hypo
cgctgtggccactacgggcttgtggcaaggaatcctggcagcctccttggagccgctgccagaatgg

SEQ ID NO: 346275 - DNA, 129 bp, Homo sapiens
  chr21:47689700-47689829
  hypo
tgcactgaacggaatcatgcagggcctagaacagcaggtgctacaggggctgctctgtcctcatccccaagttccgtggaagtggaacaaaataaccgactggaaaccccaagacacagtttactctgc

SEQ ID NO: 346276 - DNA, 136 bp, Homo sapiens; identical to SEQ ID NO: 345653
  chr22:22862472-22862608
  hypo

SEQ ID NO: 346277 - DNA, 240 bp, Homo sapiens; identical to SEQ ID NO: 345654
  chr22:25348202-25348442
  hypo

SEQ ID NO: 346278 - DNA, 787 bp, Homo sapiens; identical to SEQ ID NO: 206075
  chr22:25348485-25349272
  hypo

SEQ ID NO: 346279 - DNA, 125 bp, Homo sapiens; identical to SEQ ID NO: 345656
  chr22:25349348-25349473
  hypo

SEQ ID NO: 346280 - DNA, 96 bp, Homo sapiens
  chr22:36902565-36902661
  hypo
caatctgggtcacggccaggcccagaagccgtcctcagagctcatttgcccggactccaccgtttcaagctgggacttggggctccccggaatccc

SEQ ID NO: 346281 - DNA, 31 bp, Homo sapiens; identical to SEQ ID NO: 295456
  chr22:39853626-39853657
  hypo

SEQ ID NO: 346282 - DNA, 209 bp, Homo sapiens; identical to SEQ ID NO: 295457
  chr22:39853690-39853899
  hypo

SEQ ID NO: 346283 - DNA, 130 bp, Homo sapiens; identical to SEQ ID NO: 345661
  chr22:39853934-39854064
  hypo

SEQ ID NO: 346284 - DNA, 69 bp, Homo sapiens; identical to SEQ ID NO: 344787
  chr22:41658279-41658348
  hypo

SEQ ID NO: 346285 - DNA, 553 bp, Homo sapiens; identical to SEQ ID NO: 345662
  chr22:45097777-45098330
  hypo

SEQ ID NO: 346286 - DNA, 470 bp, Homo sapiens; identical to SEQ ID NO: 206166
  chr22:45098381-45098851
  hypo

SEQ ID NO: 346287 - DNA, 403 bp, Homo sapiens
  chr22:45593240-45593643
  hypo
cgtgtctccaccatcctcaccctgcagactgggaaatgggctcgcagcaacggcacaccctgcagggcctcaggtgcaagctggtgtgggggccagagccactgcctgtcacagctgctgcaggcctgggtcagcgaggtggcctgagagcctcccctcgcccgtgagtaacacacacctgggcatctgtggccactcaagaggggacagcaggtgcgccagaaaggtgaacaaagggaggacttcagctctgggaaagctacggctccacccaaagtctgagacaaagaggccaagagccctgcaaagaaacccaaccaaccgacaggacagggcgggatgactccgggtggctcacaagtaccaaggccctggaggcagagctggctgtgagaaggtgcgg

SEQ ID NO: 346288 - DNA, 258 bp, Homo sapiens
  chr22:45593715-45593973
  hypo
catagagaaggaagtttccatctgctctgttcagcttcagccaggacccgaccagggaccgtcctgtgcccgacagggaccgagaccgcaggttggttgcattgtgcagatcggctggaggaaagaaggccaggtcaaggcccccacagcatgggacgcggcgggagcagcaggaggccagctcccagtccaggctgaggccaaactctgctgaggccaggacgctccttaccaacacccccacaccagcacccacac

SEQ ID NO: 346289 - DNA, 210 bp, Homo sapiens; identical to SEQ ID NO: 220970
  chr22:50008973-50009183
  hypo

SEQ ID NO: 346290 - DNA, 289 bp, Homo sapiens; identical to SEQ ID NO: 220971
  chr22:50009330-50009619
  hypo

SEQ ID NO: 346291 - DNA, 48 bp, Homo sapiens
  chr22:50009663-50009711
  hypo
ggcggaggggaatacacgcaaaatataccagggcggaggggaatacac

SEQ ID NO: 346292 - DNA, 225 bp, Homo sapiens
  chr22:50191356-50191581
  hypo
cggaccatgctgatagggagctggcaacacagagcaggacagagtctgctagaaagagcgtcttccacctcctccggacacggcgccagttcttaccgtcttcccaggagaaaggccgccgcggtgccgcagcaggccgctcaggcaggtgcatccccgaggcctcttccaagccgatgctgtccacctcgcgccgggcctgcctcagaacaacacctccctgat

SEQ ID NO: 346293 - DNA, 81 bp, Homo sapiens
  chr22:50191626-50191707
  hypo
tgtacttcatgcagttatctataatgagatcaaaatcctcctcaaactcatggaggtttttatacccttgagcttctaacc

SEQ ID NO: 346294 - DNA, 154 bp, Homo sapiens
  chr22:50954823-50954977
  hypo
cgagtgcagactgggccttggattccccctgtctttgtgttgtttcttgcagctggatcagatctgcatttcttttgacgaaggcaagaccacaatgaacttcattgaggcagcgttgttgatccagggctctgcctgcgtctacagtaagaag

SEQ ID NO: 346295 - DNA, 224 bp, Homo sapiens; identical to SEQ ID NO: 206224
  chrX:16730628-16730852
  hypo

SEQ ID NO: 346296 - DNA, 35 bp, Homo sapiens; identical to SEQ ID NO: 345669
  chrX:16730902-16730937
  hypo

SEQ ID NO: 346297 - DNA, 264 bp, Homo sapiens; identical to SEQ ID NO: 336722
  chrX:41112874-41113138
  hypo

SEQ ID NO: 346298 - DNA, 1082 bp, Homo sapiens; identical to SEQ ID NO: 345679
  chrY:16636060-16637142
  hypo

SEQ ID NO: 346299 - DNA, 122 bp, Homo sapiens
  chrY:22918582-22918704
  hypo
gcagttgttacagctgaagataaagacattttactgttaactgagacgagtttctctgaaaaagtttggtgtctttttcaggcccggggccccaagaagcacttgaagcgtgttgcagcgcc

SEQ ID NO: 346300 - DNA, 431 bp, Homo sapiens; identical to SEQ ID NO: 344930
  chr1:1713574-1714005
  hyper

SEQ ID NO: 346301 - DNA, 232 bp, Homo sapiens; identical to SEQ ID NO: 344931
  chr1:1714067-1714299
  hyper

SEQ ID NO: 346302 - DNA, 194 bp, Homo sapiens; identical to SEQ ID NO: 344932
  chr1:2460612-2460806
  hyper

SEQ ID NO: 346303 - DNA, 413 bp, Homo sapiens; identical to SEQ ID NO: 197254
  chr1:2460898-2461311
  hyper

SEQ ID NO: 346304 - DNA, 443 bp, Homo sapiens; identical to SEQ ID NO: 344934
  chr1:2461988-2462431
  hyper

SEQ ID NO: 346305 - DNA, 178 bp, Homo sapiens
  chr1:3663338-3663516
  hyper
cgacccccgaccgagggacccgtgggatctgcgctcaccgccctgcgagcagaggcgttcgtgtcggagcccccacacctggggagcggggagctgcggtccctggttgtcccacaggagaagggggagggaacggggcaggcggggaggatgagcgcttccgcgtgcagcgggggct

SEQ ID NO: 346306 - DNA, 101 bp, Homo sapiens
  chr1:3663983-3664084
  hyper
ggccttcggtgcagacccagggccaagtcgagggaggctccgggcgcggggcggggtcttgggcgtgggggcggagcctgcgcggggcgtagagatctgac

SEQ ID NO: 346307 - DNA, 695 bp, Homo sapiens; identical to SEQ ID NO: 197277
  chr1:6265789-6266484
  hyper

SEQ ID NO: 346308 - DNA, 64 bp, Homo sapiens; identical to SEQ ID NO: 344936
  chr1:6266713-6266777
  hyper

SEQ ID NO: 346309 - DNA, 227 bp, Homo sapiens; identical to SEQ ID NO: 330672
  chr1:6474528-6474755
  hyper

SEQ ID NO: 346310 - DNA, 219 bp, Homo sapiens
  chr1:6479997-6480216
  hyper
cgagctttaagggagcggctcgcccgccccgccccgccccgcggagtccggccgcccgctggtcccacctcctgcctttgttcctgcgcagggtggagccgggaggggagaccgcgacgcccccggggatcccgctccccgcctttgcgtcctgtctaccgcggggtggcggcccccagttttccccgagcacctgcgggagagtggtaaaggcgccat

SEQ ID NO: 346311 - DNA, 53 bp, Homo sapiens; identical to SEQ ID NO: 344938
  chr1:6507073-6507126
  hyper

SEQ ID NO: 346312 - DNA, 344 bp, Homo sapiens; identical to SEQ ID NO: 330677
  chr1:6546495-6546839
  hyper

SEQ ID NO: 346313 - DNA, 108 bp, Homo sapiens; identical to SEQ ID NO: 330679
  chr1:7843510-7843618
  hyper

SEQ ID NO: 346314 - DNA, 425 bp, Homo sapiens; identical to SEQ ID NO: 344939
  chr1:9711649-9712074
  hyper

SEQ ID NO: 346315 - DNA, 125 bp, Homo sapiens; identical to SEQ ID NO: 330686
  chr1:9747572-9747697
  hyper

SEQ ID NO: 346316 - DNA, 122 bp, Homo sapiens; identical to SEQ ID NO: 330687
  chr1:9749342-9749464
  hyper

SEQ ID NO: 346317 - DNA, 52 bp, Homo sapiens; identical to SEQ ID NO: 197314
  chr1:11538821-11538873
  hyper

SEQ ID NO: 346318 - DNA, 64 bp, Homo sapiens
  chr1:12123950-12124014
  hyper
attcattcattcagtgtgaattggactgagagcactgccatacgcgggaggcgctctttagccc

SEQ ID NO: 346319 - DNA, 839 bp, Homo sapiens
  chr1:12677922-12678761
  hyper
cgcgaaagtctcccgactcattgctattcttgggctcaggaaattgcttaaacgcgatctgattgccagcaacgtgcaggagaagtggggggtccgggtgtcagtttctttacgtgcagcgctcgccctcgcgcgcgctcgctcgctccggctccctccctccctctctgttccagcagaggctgggagttgccgctcgatccagctccccttctctccctttttagcatttattgccttctttttgtcctttccaacttggagagggtccgggtgtggagcgcgcgtggatcggacgccttggtctgcgcggccctattcattcgctccccgggcagccgcgtcgcggagagggcggcccctttttcccccattttttcaataccccattaagtctgattgacagttaaagttgttgggaggcttcactaccgttcctctgagtggctgctgcggcctcccctccccctgcgccgtcgcggggagcgcgcataaggcgcgcactcgggctcgccgggactcgcgctctcccgggactggctcccctctctgcaagccgggacttgccgccggtgtccctgagggctcgcagctgtaactcgaacacgctggaaccgactccggcgagccggctgccttctcgagacgttcctccttgcccgggccgcccgcgggccaggtgatcaccccgagtgtggagcaggcccgggggagcttgcgtatgccttgatccaaccaggtcacccagggttttatttcaggtcatttggtcatcctcggcctccaggtaggatcaggaagccactcctcacctttgctcggacctcttctgtgttcac

SEQ ID NO: 346320 - DNA, 201 bp, Homo sapiens; identical to SEQ ID NO: 344942
  chr1:20512799-20513000
  hyper

SEQ ID NO: 346321 - DNA, 490 bp, Homo sapiens; identical to SEQ ID NO: 197394
  chr1:24648342-24648832
  hyper

SEQ ID NO: 346322 - DNA, 795 bp, Homo sapiens
  chr1:24882115-24882910
  hyper
cgacagcctggggaggaaggagcctttgatcctacagcggcaagagttcttgacacttgccggctgccaagcctgtttcctcccggtctaacgttctgtggttgtctgaatctccagctgcccctcaaaaccttcaatcagattagcgccgtgctcctttaaagaccctactcaaagtgcctggagctcacctgggtgtgtttgtgaggccctttccctctctttaccccgcggaggagtccgacctggaagcctcctgctggacttctctactggactgagtgcccgggagtgccagagccagtcccaaaaaggacccaggagcggggacaccacggggaggcgccgccactccagtgtgcgggaccctggcacccccggcgcgttctccggcctccccaggatcacctgcacggggcggggccgggggcgggacgccccgggcgggggcgggatcccagggtggcagcgccgggcggcggcggggaccctggctgggagcgcggcggtgccggcgggaggccgagcggggctcgacagagcaggtaggaggcgcctggtcgccggggttgcccggggctgcggggagcgaggagcggtccggcccaggtgcggtggcttcctgtccacctgccggccgcgctgggcgaaggagggcccgggggtggggacgaggggtccccagtctcacccccacatctgttggaggaagtgcctggggtctgcgcgggagggcgttggtccggggtggtgggagggaggctgatcatctccagtgggtcttggagacgaggt

SEQ ID NO: 346323 - DNA, 32 bp, Homo sapiens; identical to SEQ ID NO: 344944
  chr1:25255579-25255611
  hyper

SEQ ID NO: 346324 - DNA, 807 bp, Homo sapiens; identical to SEQ ID NO: 330733
  chr1:26662538-26663345
  hyper

SEQ ID NO: 346325 - DNA, 738 bp, Homo sapiens; identical to SEQ ID NO: 330739
  chr1:28286184-28286922
  hyper

SEQ ID NO: 346326 - DNA, 148 bp, Homo sapiens; identical to SEQ ID NO: 344946
  chr1:29585852-29586000
  hyper

SEQ ID NO: 346327 - DNA, 261 bp, Homo sapiens; identical to SEQ ID NO: 197432
  chr1:32180427-32180688
  hyper

SEQ ID NO: 346328 - DNA, 129 bp, Homo sapiens; identical to SEQ ID NO: 278204
  chr1:32410105-32410234
  hyper

SEQ ID NO: 346329 - DNA, 178 bp, Homo sapiens; identical to SEQ ID NO: 344949
  chr1:33219389-33219567
  hyper

SEQ ID NO: 346330 - DNA, 307 bp, Homo sapiens; identical to SEQ ID NO: 344950
  chr1:33219596-33219903
  hyper

SEQ ID NO: 346331 - DNA, 393 bp, Homo sapiens; identical to SEQ ID NO: 330757
  chr1:33937934-33938327
  hyper

SEQ ID NO: 346332 - DNA, 120 bp, Homo sapiens
  chr1:35394922-35395042
  hyper
cggggccgggagccgagcgccggagcccggggcgtgggcggcgccggggccgcagccgggccgtgcctggggggcgctgcagagggagccgcgagcgcggccccgtccccactcctcccc

SEQ ID NO: 346333 - DNA, 113 bp, Homo sapiens
  chr1:35396131-35396244
  hyper
ggggagggggccacggtggggaagccgcagggggaggggctgaagacgtgggggaaggggtggctccggattccggctttccagggtaggtgtgaggaaacactgcctccggc

SEQ ID NO: 346334 - DNA, 383 bp, Homo sapiens; identical to SEQ ID NO: 344952
  chr1:39956953-39957336
  hyper

SEQ ID NO: 346335 - DNA, 101 bp, Homo sapiens
  chr1:40781107-40781208
  hyper
cggcgtccttgtggtgcgggccggcgccgcctattggcgacgaggggcactacatctccgggcaccccgaagtccccacccccaccacagcgctcacaaag

SEQ ID NO: 346336 - DNA, 462 bp, Homo sapiens; identical to SEQ ID NO: 330784
  chr1:41832027-41832489
  hyper

SEQ ID NO: 346337 - DNA, 87 bp, Homo sapiens; identical to SEQ ID NO: 401
  chr1:45097717-45097804
  hyper

SEQ ID NO: 346338 - DNA, 1865 bp, Homo sapiens; identical to SEQ ID NO: 330798
  chr1:46767970-46769835
  hyper

SEQ ID NO: 346339 - DNA, 255 bp, Homo sapiens
  chr1:46957171-46957426
  hyper
agggctttattgacttgatggaccttggaggaaaggggctgtctgtaccgcaagggttgtgtgctccacagccgaggaaattgtgcaagttcctacctggctgtggcgatggcagggcgaccagagtcctttcccctctctagtgctagggattctgtgcgctgcaggcgggtcagctctgtccaacccctttctagaaagttctatggtctgttagttttaggtgggtgtagtgggggttgttttcaatttttc

SEQ ID NO: 346340 - DNA, 114 bp, Homo sapiens; identical to SEQ ID NO: 344955
  chr1:50893877-50893991
  hyper

SEQ ID NO: 346341 - DNA, 31 bp, Homo sapiens; identical to SEQ ID NO: 344956
  chr1:52194847-52194878
  hyper

SEQ ID NO: 346342 - DNA, 322 bp, Homo sapiens; identical to SEQ ID NO: 197534
  chr1:52194968-52195290
  hyper

SEQ ID NO: 346343 - DNA, 778 bp, Homo sapiens; identical to SEQ ID NO: 344958
  chr1:52195348-52196126
  hyper

SEQ ID NO: 346344 - DNA, 435 bp, Homo sapiens
  chr1:59281487-59281922
  hyper
cgtcaccgagattgtaaaacttctaaccgggaagaatcaaatacatgcacaacgggttacaggttaacagacagatgggagcggaaagggacattccagcgcttccctgggcgtgtcgcacagggcaactccaaccacaggcgaattttcctgggtgacagttaaactcctttttgcatgaaaaaatacagattcttattaaaacaataatcgattagactataaaactctcaaagttatttcggatcaaaattattttcggctgtttccacacctttttttctcgattgtgcagaaattcttcacaccgtctgcacagatgggcaaactgagacccggacgagtcccattgagagagagaggcagagccggggttgggagaagactgagatttctgggatccggcttggggtgtttccgctgggtgggggcgcc

SEQ ID NO: 346345 - DNA, 535 bp, Homo sapiens; identical to SEQ ID NO: 344959
  chr1:85462747-85463282
  hyper

SEQ ID NO: 346346 - DNA, 77 bp, Homo sapiens
  chr1:85773944-85774021
  hyper
cgccctttactcagtaaggagggcccaggcgtccaaagcccaccagggggcagcggcggcattcttagccccacttc

SEQ ID NO: 346347 - DNA, 112 bp, Homo sapiens
  chr1:85774083-85774195
  hyper
atttttctgcaaaagctaaggtcggcaaacatggatattcggatttccattgtttttgaggctaaatcaaaagatgcctctggggaaaaggggcaacatgcactgtcggatc

SEQ ID NO: 346348 - DNA, 437 bp, Homo sapiens; identical to SEQ ID NO: 344960
  chr1:90308855-90309292
  hyper

SEQ ID NO: 346349 - DNA, 115 bp, Homo sapiens; identical to SEQ ID NO: 344961
  chr1:90309490-90309605
  hyper

SEQ ID NO: 346350 - DNA, 60 bp, Homo sapiens; identical to SEQ ID NO: 278617
  chr1:91185065-91185125
  hyper

SEQ ID NO: 346351 - DNA, 170 bp, Homo sapiens
  chr1:92948154-92948324
  hyper
cgtcactggccagctccgcgcaaacgaatctaagcgacaagcagctagggtcctgccgcctgggatggaggcagcagccccagcgggcaagctgtccaagtcccagagaagccggatgcctccttcccctacgaatcagctcccttctcccggaaagactctccaactcc

SEQ ID NO: 346352 - DNA, 225 bp, Homo sapiens; identical to SEQ ID NO: 197641
  chr1:92949466-92949691
  hyper

SEQ ID NO: 346353 - DNA, 227 bp, Homo sapiens; identical to SEQ ID NO: 197642
  chr1:92950207-92950434
  hyper

SEQ ID NO: 346354 - DNA, 501 bp, Homo sapiens
  chr1:94702434-94702935
  hyper
cgggaatagaatccaggcaagaacacagacccatagtgatcaggagcacggattccggagcaaaagcgcctgggtttaggtcctgacgctgccaaccactagtctgtgtgcttgggcaggtttttaacctcggtttccccgtgtgaaccgagtcgaacaatcatggagtgttctgaacattaaaagagttaaaatgtgcaaaggcttcagaacagcaggcggacccgttgtacgcgctgtgtgctaactttaattacgatcgtcaccgtctgctcccggccaccgctggcgtcctccccagctcgtccgcgcctccctcgccgggcgcgcccctagccccggccggacccttcccgtggactccagtcctggctcgaggacacccgtccctagcgcagcctgccaccgcttccactcggggccgccccgcgggcctcccggaccctggacggcaattcgcgggcgctcgcgcgggcaaccccagcccggagccacgaccgc

SEQ ID NO: 346355 - DNA, 88 bp, Homo sapiens; identical to SEQ ID NO: 197650
  chr1:94702990-94703078
  hyper

SEQ ID NO: 346356 - DNA, 95 bp, Homo sapiens
  chr1:94703103-94703198
  hyper
cgcagccgcagccacagccacaggcaccaccaccactgcagccgccaccgcccctgcagctaccgccacggccgcaccgcccgcccgccagcccc

SEQ ID NO: 346357 - DNA, 442 bp, Homo sapiens; identical to SEQ ID NO: 344964
  chr1:99127189-99127631
  hyper

SEQ ID NO: 346358 - DNA, 325 bp, Homo sapiens; identical to SEQ ID NO: 344965
  chr1:99127671-99127996
  hyper

SEQ ID NO: 346359 - DNA, 244 bp, Homo sapiens
  chr1:103574168-103574412
  hyper
ggctgagggtcagacccaatcacacgactctggggcggccccaagcccgcccccgcctccctcagcccaagaatgaggactccgagcaggcccagcccaccaaccaccccccatctccccactcctctcctccctcctcgcctaccaaatccccgagaaaaaatgggagggagttacgggggacgcgtgcttggctccagcactttgggaatgaaaggaattgcaggagagccccggagcacac

SEQ ID NO: 346360 - DNA, 119 bp, Homo sapiens; identical to SEQ ID NO: 278710
  chr1:109656101-109656220
  hyper

SEQ ID NO: 346361 - DNA, 203 bp, Homo sapiens; identical to SEQ ID NO: 197688
  chr1:109656291-109656494
  hyper

SEQ ID NO: 346362 - DNA, 116 bp, Homo sapiens; identical to SEQ ID NO: 344968
  chr1:109657070-109657186
  hyper

SEQ ID NO: 346363 - DNA, 65 bp, Homo sapiens; identical to SEQ ID NO: 344969
  chr1:110672768-110672833
  hyper

SEQ ID NO: 346364 - DNA, 360 bp, Homo sapiens; identical to SEQ ID NO: 344970
  chr1:111506646-111507006
  hyper

SEQ ID NO: 346365 - DNA, 736 bp, Homo sapiens; identical to SEQ ID NO: 344971
  chr1:111746588-111747324
  hyper

SEQ ID NO: 346366 - DNA, 795 bp, Homo sapiens
  chr1:116184428-116185223
  hyper
cgaggtgagggggacgccggccgagccccgccctccgctgcaggtgggccggccccgcggcggggccggcagcgctagctgttcttggctcgcggccgcgccgggctcgcagggctgggctcgggctgcggggcggcgccgggacaggaagcggaaagcagcagtgcagcggcggcggcggcggggctctgcctctccaggagcccagcgcaggccgcagagccggggccgctgtgagccgagaccgcgggccgcggagctcgggcggccggcgcggaggtgagtcccgcgagaggccgagcgctgcgcggcggcggtccccggggcagaccgttggctgggagacgcccccacctcggaccccgcgtgcccctgcgccctcctcccgcattcgccccgccggacttcgaccccgggtggccggctcccgcctcgggccgggggctccctcccctcctccggagcgctccgggtagtgcttcctctgactccactcttctccccatgcgttgcgcccctcctggccctgccgtgcgatctccgccgcaccccactccttggggtcccggggttccctgctcacacctcggacgtccctttctccccgggctggcctttggagtgcgccccttcggtgcgcgtgccggggcggcgggcaggccggcagggagtggccgagcgttggaggcaccgggcggctgcagcagccgtgcagggcgggagccgggcgcgcaccggggttcccacccctggcggggctcgacccgggcgccgcctggcccttcgccaggaacc

SEQ ID NO: 346367 - DNA, 154 bp, Homo sapiens; identical to SEQ ID NO: 330960
  chr1:151566699-151566853
  hyper

SEQ ID NO: 346368 - DNA, 79 bp, Homo sapiens; identical to SEQ ID NO: 197752
  chr1:151694406-151694485
  hyper

SEQ ID NO: 346369 - DNA, 447 bp, Homo sapiens
  chr1:154297543-154297990
  hyper
cggtgctgtgtcgttcattcaaggagagttgagatacagtgaaatgagccagggcgaggagggagggtgaaggaacggagggcgggcggctccgaggagcgagagtcgggctgagggcaacctggcgccagggaaaattctggttattcaccacttctacagctctcctgccgctccctgcagaggatgctcgttttgcagagaaggcagtgttcctctattcccttcttccgaattaaaaataccccctcagagcgatctagcctcccgaattgttttttcttttaagatgcggatggacgtacgtgtgggggcatcccagcccagccacgccgaggctcggaagggctaagaccctcccactgccccgcacaaagatggctgctccctcctccccgctccttctcccctccccaaaaccccctcccgccccccggcccccgccgc

SEQ ID NO: 346370 - DNA, 72 bp, Homo sapiens; identical to SEQ ID NO: 278861
  chr1:154298038-154298110
  hyper

SEQ ID NO: 346371 - DNA, 155 bp, Homo sapiens; identical to SEQ ID NO: 344973
  chr1:155043706-155043861
  hyper

SEQ ID NO: 346372 - DNA, 42 bp, Homo sapiens
  chr1:156390054-156390096
  hyper
cgcggctctagcccctcgctcaagcctctccctcccgcccgt

SEQ ID NO: 346373 - DNA, 103 bp, Homo sapiens; identical to SEQ ID NO: 344974
  chr1:158083079-158083182
  hyper

SEQ ID NO: 346374 - DNA, 396 bp, Homo sapiens; identical to SEQ ID NO: 330996
  chr1:160983499-160983895
  hyper

SEQ ID NO: 346375 - DNA, 935 bp, Homo sapiens; identical to SEQ ID NO: 344975
  chr1:160990384-160991319
  hyper

SEQ ID NO: 346376 - DNA, 93 bp, Homo sapiens
  chr1:161276123-161276216
  hyper
cctcctctgcagggccgcctgcctgcgtagccagcagtaccgaaccacgtagaaaagcagcagcagcaacagcaccaccccgaggacaccccc

SEQ ID NO: 346377 - DNA, 64 bp, Homo sapiens; identical to SEQ ID NO: 344976
  chr1:161368929-161368993
  hyper

SEQ ID NO: 346378 - DNA, 95 bp, Homo sapiens; identical to SEQ ID NO: 344977
  chr1:161369405-161369500
  hyper

SEQ ID NO: 346379 - DNA, 293 bp, Homo sapiens; identical to SEQ ID NO: 344978
  chr1:161369566-161369859
  hyper

SEQ ID NO: 346380 - DNA, 299 bp, Homo sapiens; identical to SEQ ID NO: 344979
  chr1:161369945-161370244
  hyper

SEQ ID NO: 346381 - DNA, 60 bp, Homo sapiens
  chr1:162792553-162792613
  hyper
actcacaactctgacgccccgtgactgcatcccctagctgggcagagacgcatttggctc

SEQ ID NO: 346382 - DNA, 805 bp, Homo sapiens; identical to SEQ ID NO: 331017
  chr1:165737832-165738637
  hyper

SEQ ID NO: 346383 - DNA, 263 bp, Homo sapiens; identical to SEQ ID NO: 331021
  chr1:168311912-168312175
  hyper

SEQ ID NO: 346384 - DNA, 328 bp, Homo sapiens; identical to SEQ ID NO: 331022
  chr1:169074766-169075094
  hyper

SEQ ID NO: 346385 - DNA, 249 bp, Homo sapiens; identical to SEQ ID NO: 344982
  chr1:182583799-182584048
  hyper

SEQ ID NO: 346386 - DNA, 40 bp, Homo sapiens; identical to SEQ ID NO: 344983
  chr1:182584613-182584653
  hyper

SEQ ID NO: 346387 - DNA, 137 bp, Homo sapiens; identical to SEQ ID NO: 344984
  chr1:200271204-200271341
  hyper

SEQ ID NO: 346388 - DNA, 528 bp, Homo sapiens; identical to SEQ ID NO: 344985
  chr1:200271373-200271901
  hyper

SEQ ID NO: 346389 - DNA, 578 bp, Homo sapiens; identical to SEQ ID NO: 344986
  chr1:201449645-201450223
  hyper

SEQ ID NO: 346390 - DNA, 252 bp, Homo sapiens; identical to SEQ ID NO: 331077
  chr1:202936089-202936341
  hyper

SEQ ID NO: 346391 - DNA, 58 bp, Homo sapiens; identical to SEQ ID NO: 331079
  chr1:203242491-203242549
  hyper

SEQ ID NO: 346392 - DNA, 179 bp, Homo sapiens; identical to SEQ ID NO: 331096
  chr1:212838662-212838841
  hyper

SEQ ID NO: 346393 - DNA, 116 bp, Homo sapiens
  chr1:214156950-214157066
  hyper
tgtggatttgaaccaaagatggtgggcaagagtgttgtaaattgtgtaaattccactcgcgggaacccccagatacgtagggagagcacccctttctcgccgaaggcatcccctcc

SEQ ID NO: 346394 - DNA, 233 bp, Homo sapiens
  chr1:214724215-214724448
  hyper
cgttcccaaaacgcagaagggaatggagagaggggaccagggtgtgggtttaaccacaaactccccagactgcgctcaccttccagctcgctcccgggaccagctttgcgcctcaccgcgggcagctcccaccgcgagataacacccctgcggcccggccaccccgcgccccaggctgccctgccaggcgtcccggggcgccaatcgcaagttggcgttgccagcgtctgccc

SEQ ID NO: 346395 - DNA, 44 bp, Homo sapiens; identical to SEQ ID NO: 197950
  chr1:214724487-214724531
  hyper

SEQ ID NO: 346396 - DNA, 182 bp, Homo sapiens; identical to SEQ ID NO: 197951
  chr1:214724561-214724743
  hyper

SEQ ID NO: 346397 - DNA, 207 bp, Homo sapiens
  chr1:214724786-214724993
  hyper
agctgggaggggaaggagcgccagtggccacttgatgtctgtctagggctccccgaggacctgagccaggagagcaggcggctgagcccggagaagcacagcaacctgcccccgagtctgcgcccgctgcgctcactccgccgagaaaaagttggaaagaactttgaggggccgggagagccagagcggcaggaaatgcgagcggcc

SEQ ID NO: 346398 - DNA, 151 bp, Homo sapiens; identical to SEQ ID NO: 197959
  chr1:219347035-219347186
  hyper

SEQ ID NO: 346399 - DNA, 55 bp, Homo sapiens; identical to SEQ ID NO: 344990
  chr1:219347516-219347571
  hyper

SEQ ID NO: 346400 - DNA, 133 bp, Homo sapiens
  chr1:220863507-220863640
  hyper
cgcgccgtagtctgcacagtttggccggcaggtgggatgaagggcggggctggcggagcgcgcccgccgcctggtaggccagttcggagcggagccaacgctatcccgggccccacggccagggggcgctgcg

SEQ ID NO: 346401 - DNA, 37 bp, Homo sapiens; identical to SEQ ID NO: 331122
  chr1:223936543-223936580
  hyper

SEQ ID NO: 346402 - DNA, 99 bp, Homo sapiens; identical to SEQ ID NO: 197977
  chr1:225117651-225117750
  hyper

SEQ ID NO: 346403 - DNA, 66 bp, Homo sapiens
  chr1:225117751-225117817
  hyper
gtagccccgaccgcaggagctctcaacgcgaggttcttcttagttgctctccctcaggcaggccgc

SEQ ID NO: 346404 - DNA, 34 bp, Homo sapiens; identical to SEQ ID NO: 344992
  chr1:226924738-226924772
  hyper

SEQ ID NO: 346405 - DNA, 1206 bp, Homo sapiens; identical to SEQ ID NO: 197984
  chr1:226925659-226926865
  hyper

SEQ ID NO: 346406 - DNA, 49 bp, Homo sapiens; identical to SEQ ID NO: 344995
  chr1:226926951-226927000
  hyper

SEQ ID NO: 346407 - DNA, 97 bp, Homo sapiens
  chr1:228870708-228870805
  hyper
cgatcagctgcagttagacttaaggaaaaaagctgtctgttaattcaatctcattcgcaggacaggcctccaggacacttcatttttccccctgggt

SEQ ID NO: 346408 - DNA, 328 bp, Homo sapiens; identical to SEQ ID NO: 198004
  chr1:228870899-228871227
  hyper

SEQ ID NO: 346409 - DNA, 269 bp, Homo sapiens; identical to SEQ ID NO: 198005
  chr1:228871596-228871865
  hyper

SEQ ID NO: 346410 - DNA, 165 bp, Homo sapiens
  chr1:230561973-230562138
  hyper
ccgccgccaccgccgccaccaccgccaccaccgccgccgctgcgtctcctcggcgcccgccgcctccctgcccgccctctccacggcctccggcgctcggctgccgaccttcccgggcgcgagccgccagaggcgggccctgccgcccctcacctcccgcccgcc

SEQ ID NO: 346411 - DNA, 162 bp, Homo sapiens; identical to SEQ ID NO: 331158
  chr1:234812061-234812223
  hyper

SEQ ID NO: 346412 - DNA, 291 bp, Homo sapiens; identical to SEQ ID NO: 344998
  chr2:7057762-7058053
  hyper

SEQ ID NO: 346413 - DNA, 41 bp, Homo sapiens; identical to SEQ ID NO: 344999
  chr2:7058391-7058432
  hyper

SEQ ID NO: 346414 - DNA, 178 bp, Homo sapiens; identical to SEQ ID NO: 345000
  chr2:10588876-10589054
  hyper

SEQ ID NO: 346415 - DNA, 117 bp, Homo sapiens; identical to SEQ ID NO: 198078
  chr2:10589055-10589172
  hyper

SEQ ID NO: 346416 - DNA, 197 bp, Homo sapiens; identical to SEQ ID NO: 345002
  chr2:10589298-10589495
  hyper

SEQ ID NO: 346417 - DNA, 70 bp, Homo sapiens
  chr2:12856411-12856481
  hyper
cgggggcaagcggtgacaccaactaaaaggaagcaatggatttccttttaaatggagaggaggatgtcgg

SEQ ID NO: 346418 - DNA, 849 bp, Homo sapiens
  chr2:12856549-12857398
  hyper
cagagctcctcattcagggccacatctgagcctgggggcccaatgctcagagcgtgcctggctttctggggaaaagcgccaggaacatgaacgagctacgaagagctggagcgggcgctgcgggagcagcgtgtggggaacggctcgggagtcgctgctggtaaccccggcccagccgcccgcagctgggctcgcagccggctcgcagccgacacccagggtgctgcgcccggggccccgggccgcggaaggatatttcactttgtttacctccccggccgggcgagggagctgcgaggccggtgctggcgcccccggcacggagctgcaatggcagcggcgcggggagccgcccgaggactggcagcggcggggctgattgatgggcgcccggcgcaatgaggggggcccgggcgggggcggggcggggccggctctgggctgagccagtcgcgggggcggcggggggggggcggaggctccgtggaaatgtgtcggtgacattgaatggggagaccgagcgcgagcgaggcgcgcgcgcgcacacgcgcactcacggccccgctcgctccgagatccccggccacgtaagtaactattaataccgcctcgccgggggatgcgggcgtgctgagcgcggggattggcctcgggcaccgtcggccgtcccctttaatttttaaatacacggtcccctcttttctctggggggggcaagcaagaaatcaaagaaggaggagacaagccgtcaattttctccaaaacaaaccccaccgggcaatttggtctcggggtagggggagacggggtgattgcaaattattccaggacgagatccagttctccagc

SEQ ID NO: 346419 - DNA, 460 bp, Homo sapiens; identical to SEQ ID NO: 331212
  chr2:17699502-17699962
  hyper

SEQ ID NO: 346420 - DNA, 137 bp, Homo sapiens; identical to SEQ ID NO: 198097
  chr2:19550409-19550546
  hyper

SEQ ID NO: 346421 - DNA, 274 bp, Homo sapiens
  chr2:19550611-19550885
  hyper
cgggtgcagagcctcgatcctaggaggggacaagtcccaagcagagaattgtgtctgagggaccctaagggagggagtgatgttggtttggggttccggggaggcagcggtcattgtgtatttgcacccgagtgttgagacccggggaacgggaaatattacagctctgaggctctgtgagggcgggtccttcccaccccaaagccagaggccaggagggaggccttcggttagggtggggaaagacattctcttctcttcttgcaccctaagc

SEQ ID NO: 346422 - DNA, 431 bp, Homo sapiens; identical to SEQ ID NO: 345003
  chr2:20425309-20425740
  hyper

SEQ ID NO: 346423 - DNA, 174 bp, Homo sapiens
  chr2:20865462-20865636
  hyper
cgccgcgtctccgcggtggccgagagggcaatggctgaggagttcgtttgggacgaagcagtggagcaggggaactggggagcctgggccgggcctctctgtgggtcccagcgcagcgcagccaggcaggcgtcgggacctaggcggctttggattcggcgggcgacctcgctt

SEQ ID NO: 346424 - DNA, 508 bp, Homo sapiens; identical to SEQ ID NO: 198113
  chr2:21022199-21022707
  hyper

SEQ ID NO: 346425 - DNA, 58 bp, Homo sapiens
  chr2:27938267-27938325
  hyper
cgtgctggactctttcaccctgcacgggggagaagccctcctcccgggagcctgtttg

SEQ ID NO: 346426 - DNA, 37 bp, Homo sapiens; identical to SEQ ID NO: 345005
  chr2:30453530-30453567
  hyper

SEQ ID NO: 346427 - DNA, 68 bp, Homo sapiens; identical to SEQ ID NO: 198154
  chr2:31361021-31361089
  hyper

SEQ ID NO: 346428 - DNA, 178 bp, Homo sapiens; identical to SEQ ID NO: 198155
  chr2:31361118-31361296
  hyper

SEQ ID NO: 346429 - DNA, 70 bp, Homo sapiens
  chr2:31361690-31361760
  hyper
gcgctgaagccggggtcccacccccaatgtgctcgtcctaccacagccaaggctgggattccagggcgcc

SEQ ID NO: 346430 - DNA, 105 bp, Homo sapiens; identical to SEQ ID NO: 198157
  chr2:31457427-31457532
  hyper

SEQ ID NO: 346431 - DNA, 63 bp, Homo sapiens; identical to SEQ ID NO: 345009
  chr2:43019535-43019598
  hyper

SEQ ID NO: 346432 - DNA, 70 bp, Homo sapiens
  chr2:43020503-43020573
  hyper
cgcacgcagctatgggaggaatttggcagatgtggacaccggcctcagtgtcctagccctcgggaatctc

SEQ ID NO: 346433 - DNA, 395 bp, Homo sapiens; identical to SEQ ID NO: 345010
  chr2:43452443-43452838
  hyper

SEQ ID NO: 346434 - DNA, 462 bp, Homo sapiens; identical to SEQ ID NO: 345011
  chr2:47499350-47499812
  hyper

SEQ ID NO: 346435 - DNA, 448 bp, Homo sapiens; identical to SEQ ID NO: 198207
  chr2:54784958-54785406
  hyper

SEQ ID NO: 346436 - DNA, 716 bp, Homo sapiens
  chr2:54785407-54786123
  hyper
tggtatagcctgcatttctaatacaatgctgttatgctaatcaggtgacatcaccgcccagcacacggcgagtggctcctgataaaattacaaaccggcggccgccgcgggcagctgggaggaggtgtgcgcgctgcgcccgcgagctcccgggctcggcaaccgtggcatgcttaggattggccatatttaaaagttctgaagtagaacctgcgcctcctctctgcttctccctcctcctcagtaatttatttcgagcttccaggcaagggccacggaagaagggaaagcaagaaattagatgcctgtgtggtaactcctcgcggagctaaggtggactctcttgcagccaacttcccatcagatcaccctgctggacttgcagaccggaatggggctcgcctaaggagccgagcgctgcggaggctgctgcgtgttggatgggagtgggagggggctggagcgagatttccagggcgcagtcctccggggcgttacgccgggcataatggaattgcagaggacgtctagtatctccgggccgctgtcgccggcgtacacggggcaggtgccttacaactacaaccagctggaaggcagattcaagcagctgcaaggtaagccccctcccaaaggccgggcctgtcctgggtgccaacgggggttcttggaggctttatttgtgaccctaatgaagacgggcggcttcacagctc

SEQ ID NO: 346437 - DNA, 541 bp, Homo sapiens
  chr2:60783811-60784352
  hyper
cgacgattccccgacatatatttaatttcaccatcataatatgcccagggtgaaatgggaagtgccctccgctcccgcccctcccccagccagatttcacccagtccagaaaaccacggctgtgtgtcggcatttgatccctcctggtcgtcgacccccctccccggcccctggtgccctcccctagggcgacaacccctccctcagcactgctggatgctcgctaaagagcccgaaagtgggggaggggagggtttgtatgtgtgtttaaagaaagatgtgtcgttttaagagattttaaaatattacgtaagtattgattaatgatgcaggtggttttgtagagggggtgaaaggtcactttaaatgcgcacacttggatacacaataagtatatttacctttccagaagtggcttttagaaagtaataaattatgacaacgttaaaattattttctggccgttcagttaacttcgtttggggctgtagagctgttgctgctcccattgaaagggtaattacgttccgtgggctctttc

SEQ ID NO: 346438 - DNA, 77 bp, Homo sapiens
  chr2:60784505-60784582
  hyper
agtcctagtttatgctttataatgtgttgacaagttttctaacagactttctgaaataatgcacatatattcacgtc

SEQ ID NO: 346439 - DNA, 54 bp, Homo sapiens
  chr2:63287368-63287422
  hyper
ccttgtattctctgcttatactgtaggggcaaaaaagtctactcttagacaaac

SEQ ID NO: 346440 - DNA, 79 bp, Homo sapiens
  chr2:68547270-68547349
  hyper
ggatgcaagaggaagaaaataaccatattcaaggagctacatcttcttgtgggtgtacatttccattatacgtatgctc

SEQ ID NO: 346441 - DNA, 317 bp, Homo sapiens
  chr2:70351179-70351496
  hyper
cggctctttttttcatcaggatgtggagagtgggcgccttgggaagacgaaattgagtatgtgcgggggaggggtcatatgaaacaaggtcgggaagggggcggggagagctggggctctggaggagcttggggctcgcgctgcgggggaggaagcgccttccgcggtcgctggggggaagtggttaggaggaagcacgggcagtggaggggactgctggagggtcccatctgggaaagcaggcacggatgcggggacatttccgcccgtcaccctggcaaagcgctcgcagggctggagggacagagttctcagat

SEQ ID NO: 346442 - DNA, 236 bp, Homo sapiens
  chr2:70351563-70351799
  hyper
gcaaaacagaggaaacaaaggaatgatgaaatgaactgagctgccttcatgccccggatgaatgttcagccattagaaaagagtgaatcccagctgggatttggggttccacggtgtactagaaaagcaaaacaaagagaagcgcctactagatgccatcttggaaaacaaaagcaaacgtgtgtgtgtgtgtgtgtgtgtgtgtgtgtgatgttacatgggcatggggaaattac

SEQ ID NO: 346443 - DNA, 280 bp, Homo sapiens; identical to SEQ ID NO: 331330
  chr2:70369049-70369329
  hyper

SEQ ID NO: 346444 - DNA, 127 bp, Homo sapiens; identical to SEQ ID NO: 345014
  chr2:72374248-72374375
  hyper

SEQ ID NO: 346445 - DNA, 259 bp, Homo sapiens; identical to SEQ ID NO: 345015
  chr2:72374932-72375191
  hyper

SEQ ID NO: 346446 - DNA, 120 bp, Homo sapiens
  chr2:73147029-73147149
  hyper
cgtgggctcgatccgaagcctgggtctcgaaacctggcgcccaggggccgagttgtagttggggcggtgtgtgagcccgcgggccgccgcggccgaggggctggcgggttggaggcttgt

SEQ ID NO: 346447 - DNA, 189 bp, Homo sapiens
  chr2:73150996-73151185
  hyper
cgaccagttaactgaaagcaaatcgttggggctggcggccagggcagcgcccctgggaaagggcggagaaagagcgccatggacttttcttccccaccccttggcctcttccgctgccccaggcattgtgaatgtgggtccacgcctcgtccggcctgccccatctcttggcttaacagagggatctgg

SEQ ID NO: 346448 - DNA, 35 bp, Homo sapiens; identical to SEQ ID NO: 198289
  chr2:73151849-73151884
  hyper

SEQ ID NO: 346449 - DNA, 275 bp, Homo sapiens; identical to SEQ ID NO: 345016
  chr2:74425444-74425719
  hyper

SEQ ID NO: 346450 - DNA, 395 bp, Homo sapiens; identical to SEQ ID NO: 198298
  chr2:74425790-74426185
  hyper

SEQ ID NO: 346451 - DNA, 228 bp, Homo sapiens; identical to SEQ ID NO: 345018
  chr2:74426214-74426442
  hyper

SEQ ID NO: 346452 - DNA, 412 bp, Homo sapiens; identical to SEQ ID NO: 345019
  chr2:74729488-74729900
  hyper

SEQ ID NO: 346453 - DNA, 238 bp, Homo sapiens; identical to SEQ ID NO: 198302
  chr2:74729933-74730171
  hyper

SEQ ID NO: 346454 - DNA, 79 bp, Homo sapiens; identical to SEQ ID NO: 345021
  chr2:74730644-74730723
  hyper

SEQ ID NO: 346455 - DNA, 235 bp, Homo sapiens; identical to SEQ ID NO: 345022
  chr2:74781700-74781935
  hyper

SEQ ID NO: 346456 - DNA, 122 bp, Homo sapiens; identical to SEQ ID NO: 198308
  chr2:74782349-74782471
  hyper

SEQ ID NO: 346457 - DNA, 1432 bp, Homo sapiens; identical to SEQ ID NO: 345024
  chr2:75060920-75062352
  hyper

SEQ ID NO: 346458 - DNA, 895 bp, Homo sapiens; identical to SEQ ID NO: 331365
  chr2:88315911-88316806
  hyper

SEQ ID NO: 346459 - DNA, 578 bp, Homo sapiens; identical to SEQ ID NO: 280006
  chr2:96011863-96012441
  hyper

SEQ ID NO: 346460 - DNA, 48 bp, Homo sapiens
  chr2:96012683-96012731
  hyper
gctgcaggggccccggtgcctccgaggcagcgcgtgggcgaggggtgc

SEQ ID NO: 346461 - DNA, 250 bp, Homo sapiens
  chr2:96192254-96192504
  hyper
cgccgctccccgagaggccgcaaaagcccgagggctccaagaactgcctgcagaggctcagggactgcgagctgtccgcgctgacgccgcgctccatgcggggcccagaggaccggggcgccctggaccacatggtcaggatgaccacgagcctctaacagccccgccggggccctcgcgtgccagactatgtgccccgagagcaccttgtgctgggggaagaggcggctggcggtgcaggaaatcctgg

SEQ ID NO: 346462 - DNA, 193 bp, Homo sapiens
  chr2:96192624-96192817
  hyper
ggcctccccaagagccggcctcccacctgcccggctgccggggtcctggggctccgccgcccccgccccgcggacggccagcctcctgcccctgcagtgcctgcagcagagcagcttggggcccagcgtggtggtgcccaggtccgcctcagcaaggtgcccgcgcccaccttccaacccaaaaggccggcgc

SEQ ID NO: 346463 - DNA, 59 bp, Homo sapiens; identical to SEQ ID NO: 345026
  chr2:96991316-96991375
  hyper

SEQ ID NO: 346464 - DNA, 42 bp, Homo sapiens
  chr2:97203334-97203376
  hyper
cggtctgcagaagggacggggtggcggctggggagcgtcagg

SEQ ID NO: 346465 - DNA, 39 bp, Homo sapiens
  chr2:97203545-97203584
  hyper
gcggtgcaggacccccgagggcccagggggtcccaaggc

SEQ ID NO: 346466 - DNA, 212 bp, Homo sapiens; identical to SEQ ID NO: 345027
  chr2:98703022-98703234
  hyper

SEQ ID NO: 346467 - DNA, 200 bp, Homo sapiens; identical to SEQ ID NO: 198335
  chr2:98703475-98703675
  hyper

SEQ ID NO: 346468 - DNA, 77 bp, Homo sapiens; identical to SEQ ID NO: 345029
  chr2:98703736-98703813
  hyper

SEQ ID NO: 346469 - DNA, 146 bp, Homo sapiens; identical to SEQ ID NO: 345030
  chr2:101033445-101033591
  hyper

SEQ ID NO: 346470 - DNA, 144 bp, Homo sapiens; identical to SEQ ID NO: 345031
  chr2:105471069-105471213
  hyper

SEQ ID NO: 346471 - DNA, 337 bp, Homo sapiens; identical to SEQ ID NO: 198369
  chr2:105489278-105489615
  hyper

SEQ ID NO: 346472 - DNA, 112 bp, Homo sapiens; identical to SEQ ID NO: 345033
  chr2:105490035-105490147
  hyper

SEQ ID NO: 346473 - DNA, 264 bp, Homo sapiens; identical to SEQ ID NO: 345034
  chr2:111874622-111874886
  hyper

SEQ ID NO: 346474 - DNA, 204 bp, Homo sapiens; identical to SEQ ID NO: 198386
  chr2:111874987-111875191
  hyper

SEQ ID NO: 346475 - DNA, 138 bp, Homo sapiens; identical to SEQ ID NO: 345036
  chr2:111875611-111875749
  hyper

SEQ ID NO: 346476 - DNA, 554 bp, Homo sapiens; identical to SEQ ID NO: 345037
  chr2:113341898-113342452
  hyper

SEQ ID NO: 346477 - DNA, 48 bp, Homo sapiens; identical to SEQ ID NO: 345038
  chr2:127782995-127783043
  hyper

SEQ ID NO: 346478 - DNA, 184 bp, Homo sapiens
  chr2:135476396-135476580
  hyper
tcagcggggccgggccgggggcggcagccggtggcgcgtggccccggggcggcggcgggacggtgggcccctgggagctgcggcgctggatgcccgcggccggctccatggcgcggggctgcggatcccggcggcggcgacgacaagcgcggcggggactcgagtcagaagtgcgaggcgccgc

SEQ ID NO: 346479 - DNA, 128 bp, Homo sapiens; identical to SEQ ID NO: 345039
  chr2:136873862-136873990
  hyper

SEQ ID NO: 346480 - DNA, 912 bp, Homo sapiens; identical to SEQ ID NO: 198448
  chr2:136874020-136874932
  hyper

SEQ ID NO: 346481 - DNA, 482 bp, Homo sapiens; identical to SEQ ID NO: 198449
  chr2:136875399-136875881
  hyper

SEQ ID NO: 346482 - DNA, 217 bp, Homo sapiens; identical to SEQ ID NO: 198450
  chr2:136876145-136876362
  hyper

SEQ ID NO: 346483 - DNA, 50 bp, Homo sapiens; identical to SEQ ID NO: 345044
  chr2:149632592-149632642
  hyper

SEQ ID NO: 346484 - DNA, 238 bp, Homo sapiens; identical to SEQ ID NO: 345045
  chr2:149634146-149634384
  hyper

SEQ ID NO: 346485 - DNA, 1811 bp, Homo sapiens; identical to SEQ ID NO: 331475
  chr2:159313069-159314880
  hyper

SEQ ID NO: 346486 - DNA, 137 bp, Homo sapiens; identical to SEQ ID NO: 345047
  chr2:166649931-166650068
  hyper

SEQ ID NO: 346487 - DNA, 37 bp, Homo sapiens; identical to SEQ ID NO: 198509
  chr2:166650106-166650143
  hyper

SEQ ID NO: 346488 - DNA, 723 bp, Homo sapiens; identical to SEQ ID NO: 345049
  chr2:166650508-166651231
  hyper

SEQ ID NO: 346489 - DNA, 76 bp, Homo sapiens
  chr2:172950233-172950309
  hyper
cagcagcatcatgcttagacttttcaaagagacaaactccattttcttatgaatggaaagtgaaaacccctgttcc

SEQ ID NO: 346490 - DNA, 112 bp, Homo sapiens
  chr2:172955255-172955367
  hyper
cgcttgctcagattagtttcctccagaggaacacgggcttcaagggactagaaccagattggttcccttctcgtggccctgcgtcccagcccagccccaacccccaccccag

SEQ ID NO: 346491 - DNA, 57 bp, Homo sapiens
  chr2:172955887-172955944
  hyper
tcctaggttcaatttcccctaggagatgtgactttgctagtgcgaagatttctgtcc

SEQ ID NO: 346492 - DNA, 163 bp, Homo sapiens
  chr2:172967062-172967225
  hyper
ggtgtagtagctgctgtcggtggcggtggacaccggaagggtgggcgactcctggggcttgtggaggctgctgctgctgctgctgttgccacccgggccggcgccgccgccgctcgggggctgctggtgctggtggtacgtgctggaggcggcgatctgggtc

SEQ ID NO: 346493 - DNA, 85 bp, Homo sapiens; identical to SEQ ID NO: 345050
  chr2:173099596-173099681
  hyper

SEQ ID NO: 346494 - DNA, 1041 bp, Homo sapiens; identical to SEQ ID NO: 345051
  chr2:174219326-174220367
  hyper

SEQ ID NO: 346495 - DNA, 149 bp, Homo sapiens
  chr2:175198369-175198518
  hyper
cgcccacgtgtggcctggtcctccgccctcccgggtgaaagtcctggagagatttctcgggcgcgtccgtgaaagcagggcactaatggggagcctacctcttaaaacagcgcacttgccctacggacgagcctctaggccctggtggt

SEQ ID NO: 346496 - DNA, 297 bp, Homo sapiens
  chr2:175199018-175199315
  hyper
gtacagagaggcctatttcgctcctctcggaggagctgtcccttcgcgccccctccccagtataactgtgagagtgaaattgaatctagtggaataaggaattgggtagaagacacacgaaaatgataaaaatcacaagcaagaatgatagatacaagctgaagttgtgttctgtaggcaaaagcctggacacacaaagtgagggctcacatttccgtctccacttgggccctgctggtgcgggctgtgtctgggtgtctcctcccctcctgcctcctttcctacaagtggggagtc

SEQ ID NO: 346497 - DNA, 205 bp, Homo sapiens; identical to SEQ ID NO: 198560
  chr2:175199935-175200140
  hyper

SEQ ID NO: 346498 - DNA, 75 bp, Homo sapiens; identical to SEQ ID NO: 345052
  chr2:175546713-175546788
  hyper

SEQ ID NO: 346499 - DNA, 84 bp, Homo sapiens
  chr2:176975945-176976029
  hyper
cggttaaaatgtcagtgccctaatagtgtgatcgttccatgagcttaaaactgttttttttctttctgtttccatctatttttt

SEQ ID NO: 346500 - DNA, 40 bp, Homo sapiens
  chr2:177005679-177005719
  hyper
caacttgaatcctgtgtggggcaagctgggcccaatccgc

SEQ ID NO: 346501 - DNA, 794 bp, Homo sapiens; identical to SEQ ID NO: 331546
  chr2:178257227-178258021
  hyper

SEQ ID NO: 346502 - DNA, 353 bp, Homo sapiens; identical to SEQ ID NO: 331547
  chr2:178483339-178483692
  hyper

SEQ ID NO: 346503 - DNA, 34 bp, Homo sapiens; identical to SEQ ID NO: 345053
  chr2:182323095-182323129
  hyper

SEQ ID NO: 346504 - DNA, 71 bp, Homo sapiens; identical to SEQ ID NO: 345054
  chr2:182818959-182819030
  hyper

SEQ ID NO: 346505 - DNA, 90 bp, Homo sapiens; identical to SEQ ID NO: 345055
  chr2:183902312-183902402
  hyper

SEQ ID NO: 346506 - DNA, 568 bp, Homo sapiens; identical to SEQ ID NO: 198600
  chr2:183902442-183903010
  hyper

SEQ ID NO: 346507 - DNA, 587 bp, Homo sapiens
  chr2:183903037-183903624
  hyper
cgccccggcagcctcctgccttccgcccgccgcccttccgcccccacccccggcgctctccgccccagcccccaacgagccgccttccccggctgctccactaggtgtggcggcggcggcggcggcggcggcgtctccggcggctgagaacgaggccgcttcccgcagccccggacgggccctcggtcacctgatcggcagcgccggcgcccccgcgaggccggacggggaactgcggccgacgggccctcggcatggcctcgccgccgccgctctggccctggccctggcccggaccgcccactacgcctgatgccgggatgggagtcccaagcggggactgagtggggtcgcgttgtgtgctctttccacttcgccccacaccccactccttcaagttcccaaaagttgcttttccgcaccacccttctaaagaaaccggcagaaactctgctgggaggcggggtgttttccaggcgagtttcgcttaagagtgggctggtggctccaagcgctttttcctcccactgcttgacaggcgctcgccgcagaacacagcagatgttgtgctccgcgaggtggggatc

SEQ ID NO: 346508 - DNA, 86 bp, Homo sapiens; identical to SEQ ID NO: 345058
  chr2:191044988-191045074
  hyper

SEQ ID NO: 346509 - DNA, 513 bp, Homo sapiens; identical to SEQ ID NO: 345059
  chr2:191045505-191046018
  hyper

SEQ ID NO: 346510 - DNA, 361 bp, Homo sapiens; identical to SEQ ID NO: 331567
  chr2:191514839-191515200
  hyper

SEQ ID NO: 346511 - DNA, 447 bp, Homo sapiens; identical to SEQ ID NO: 345060
  chr2:192109730-192110177
  hyper

SEQ ID NO: 346512 - DNA, 253 bp, Homo sapiens; identical to SEQ ID NO: 198625
  chr2:192110303-192110556
  hyper

SEQ ID NO: 346513 - DNA, 439 bp, Homo sapiens; identical to SEQ ID NO: 345062
  chr2:192110584-192111023
  hyper

SEQ ID NO: 346514 - DNA, 173 bp, Homo sapiens; identical to SEQ ID NO: 331583
  chr2:206750391-206750564
  hyper

SEQ ID NO: 346515 - DNA, 239 bp, Homo sapiens; identical to SEQ ID NO: 198669
  chr2:207308960-207309199
  hyper

SEQ ID NO: 346516 - DNA, 426 bp, Homo sapiens; identical to SEQ ID NO: 331594
  chr2:216946200-216946626
  hyper

SEQ ID NO: 346517 - DNA, 594 bp, Homo sapiens
  chr2:219757371-219757965
  hyper
cgctcccggcctcagcgtttgcctctgtataatgggagtgggtttcagaagcaggccaggctaagcgctgggaggggagtggggctgcgcgccgtgtcacccctcacggtgcctccctccgcaggcagtgatggagaacatgcggcggaagtgcaagtgccacggcacgtcaggcagctgccagctcaagacgtgctggcaggtgacgcccgagttccgcaccgtgggggcgctgctgcgcagccgcttccaccgcgccacgctcatccggccgcacaaccgcaacggcggccagctggagccgggcccagcgggggcaccctcgccggctccgggcgctcccgggccgcgccgacgggccagccccgccgacctggtctacttcgaaaagtctcccgacttctgcgagcgcgagccgcgcctggactcggcgggcaccgtgggccgcctgtgcaacaagagcagcgccggctcggatggctgcggcagcatgtgctgcggccgcggccacaacatcctgcgccagacgcgcagcgagcgctgccactgccgcttccactggtgctgtttcgtggtctgcgaagagtgccgcat

SEQ ID NO: 346518 - DNA, 64 bp, Homo sapiens
  chr2:219758014-219758078
  hyper
cctgatcgaggtcccctcctggagcctggccctctgaggcttacggtcttggcaaggcagcatc

SEQ ID NO: 346519 - DNA, 369 bp, Homo sapiens; identical to SEQ ID NO: 345064
  chr2:219922768-219923137
  hyper

SEQ ID NO: 346520 - DNA, 393 bp, Homo sapiens
  chr2:220348591-220348984
  hyper
cggagccccggggccggcaccgccgagcgggggcgcccctcgagatccccgtggccaggcttggggcccgtaggctacaggagtctccttccctgtctgccctcagcgaggcccagccatccagccctgcacggcccagcgcccccaaacccagtacccctaagtctgcagaaccttctgccaccacacctagtgatgctccgcagccccccgcaccccagcctgcccaagacaaggctccagagcccaggccagaaccagtccgagcctccaagcctgcaccacccccccaggccctgcaaaccctagcgctgcccctcacaccctatgctcagatcattcagtccctccagctgtcaggccacgcccagggcccctcgcagggccctgccg

SEQ ID NO: 346521 - DNA, 406 bp, Homo sapiens; identical to SEQ ID NO: 198725
  chr2:222436961-222437367
  hyper

SEQ ID NO: 346522 - DNA, 806 bp, Homo sapiens
  chr2:222437421-222438227
  hyper
ataaaagaagtctaagctgacctgcggttgcttctttaggagagtcgacgtgtctgcgtccagcgcgcccgggctgagctgcagactcgcgcctgccaccgccaccctctgccaccttgccctgttttgtctttatggcgcttccccctctgaaatactctttgcggggagttttgtggctctatcactcgcttcttccctggctccccagatgcctggagagcggggacctacttggtccccaacgtccagtccgcagcagggctccgtcactgtctccagagactgaacgaatgactttctagcagtaaggaagtccccgctggccccgtccccctgcacacgccgtggacctcgcccagggcccaggacgccccgagatggccttgggcagggaaccagttgtggatttcccgggggcagggttgggggcagtccctggaaccgggcctagcccgtctgggagcggtggggtagaagtgaaaggcttaagtgtgggtgcggggacttgcagccgcacagacaaggcagaccgggactgggaagctgcccggagcggctgctgcgactctccgctccgacctagccggggcagccctccctgccccgggagaagacggcgagcaggaggacccgcagagccccgcccggctgctccggccccgggggcactggcaccatcgggctgtggtcttttcccgatgcccgagccgtggacgcggccacctaagagcggtccggcgaaggcagcgcagccggtgtcccagggaccggtccccaacgccactcggtgcatttccccaggc

SEQ ID NO: 346523 - DNA, 163 bp, Homo sapiens; identical to SEQ ID NO: 331637
  chr2:224702626-224702789
  hyper

SEQ ID NO: 346524 - DNA, 236 bp, Homo sapiens; identical to SEQ ID NO: 198740
  chr2:225906168-225906404
  hyper

SEQ ID NO: 346525 - DNA, 352 bp, Homo sapiens; identical to SEQ ID NO: 345069
  chr2:230932495-230932847
  hyper

SEQ ID NO: 346526 - DNA, 146 bp, Homo sapiens; identical to SEQ ID NO: 280732
  chr2:230933064-230933210
  hyper

SEQ ID NO: 346527 - DNA, 623 bp, Homo sapiens
  chr2:232790030-232790653
  hyper
cggctcgcgcgcctccgaaggccggctgggcggcgggcggtcccgggccgggctggggctgggcgtcgggtgggccgtactcaccgccgccagggggcgccgcactaacatcccaggccgctcatggagccgattcggtccagcttgaggccgaagcagcccttggacaagcccttcttgttggctcctttgtatttgcgcgcgttggggtgctcttgcagaaggcgagcccacgctgcccgcgacttggtgtccacgcgcaggtcccggagcagtcgcgaccggtcgcccttgagattggcgcccccgcccccgggagccttgtcgcccttcttctgaccgccgcccgcagcctgcggctcggccagctcctctgccggcggggttcgcgggacctgtccgaggaaagagcgggcaggtgaagggacacgcggctgcagcacgggggactctgatgctccagccccacgcgcccgccggcgcggggtgtccctcccaagcccagagccgcccccaccgatgccggccagcttggccccgcatccacctgccacgcggccgccttcgccgctccctccggaagccccctgccctccctttgctgctcgccgggcaggccacac

SEQ ID NO: 346528 - DNA, 438 bp, Homo sapiens
  chr2:235860308-235860746
  hyper
cgggccagcacccagacctgctcggtaccggggacccagacccgaggatgccgggcggccaaggccccgctaccctggccggctccgggcggaggaagaagaggaggcgcccagactggatacccgcctggacccggagccgcggcaccacccccagcccgccccacgctcgccagcctcagacggccgcgccccgccccgcccctctcccgaagccccgccccggcgcgggaccaccccctccgcggcctcagctccggtcctggccccgccccccgcgcccccgcccccgcccccgcccccgcccccgcccaggcgcgggaccaccctccgcccgccgaggcgggggcccagcgcgcccggcactctcggcggtccgggcccctcgccactaccgccgccgccgccgccgtgagtcccgcggagccgcgcgcgccc

SEQ ID NO: 346529 - DNA, 84 bp, Homo sapiens; identical to SEQ ID NO: 198765
  chr2:235860808-235860892
  hyper

SEQ ID NO: 346530 - DNA, 356 bp, Homo sapiens
  chr2:235860951-235861307
  hyper
tgagttcggggctgcgcgggtgcctgggcgtggggcggcttcggggaagcctcgcgcgcccctcgccgctcccccgggcgctcgggtctccctggtgctggtgggcagggacccggcccggggttccgggcgccgagccgcagccctccgcgtgcgctcgggccgccccccaaccccggctctggccacttcccggcgggcggccctgcggggtggcctccctgggcaaccggacgcgtcctcgggcgcaaatcggggggcgcgctcggctcacgggggccgtgggggccacgggagggcgtggaggggtcggggcgcccccctcgagcggcgctggggaggagggaaggacgcgc

SEQ ID NO: 346531 - DNA, 297 bp, Homo sapiens; identical to SEQ ID NO: 198767
  chr2:236402404-236402701
  hyper

SEQ ID NO: 346532 - DNA, 138 bp, Homo sapiens; identical to SEQ ID NO: 198768
  chr2:236403013-236403151
  hyper

SEQ ID NO: 346533 - DNA, 68 bp, Homo sapiens
  chr2:236403736-236403804
  hyper
ctctcctgcgggaaagtggctcggtgcctccgcgtcctgggctgccggagcgtcccggcccagcagac

SEQ ID NO: 346534 - DNA, 307 bp, Homo sapiens; identical to SEQ ID NO: 198771
  chr2:236578055-236578362
  hyper

SEQ ID NO: 346535 - DNA, 44 bp, Homo sapiens
  chr2:236578677-236578721
  hyper
cttggcccggcgccctcccggcccgcgggctcgctggatgcggc

SEQ ID NO: 346536 - DNA, 374 bp, Homo sapiens; identical to SEQ ID NO: 345073
  chr2:237087637-237088011
  hyper

SEQ ID NO: 346537 - DNA, 223 bp, Homo sapiens; identical to SEQ ID NO: 345074
  chr2:237088239-237088462
  hyper

SEQ ID NO: 346538 - DNA, 205 bp, Homo sapiens; identical to SEQ ID NO: 198794
  chr2:241771771-241771976
  hyper

SEQ ID NO: 346539 - DNA, 231 bp, Homo sapiens; identical to SEQ ID NO: 345076
  chr3:5018754-5018985
  hyper

SEQ ID NO: 346540 - DNA, 143 bp, Homo sapiens; identical to SEQ ID NO: 345077
  chr3:5019132-5019275
  hyper

SEQ ID NO: 346541 - DNA, 205 bp, Homo sapiens; identical to SEQ ID NO: 345078
  chr3:5137574-5137779
  hyper

SEQ ID NO: 346542 - DNA, 412 bp, Homo sapiens; identical to SEQ ID NO: 345079
  chr3:10206343-10206755
  hyper

SEQ ID NO: 346543 - DNA, 427 bp, Homo sapiens
  chr3:12329055-12329482
  hyper
cggtctccccagaccggccctggccgggggcatccccctaaacttcggatccctcctcggaaatgggaccctctctgggccgcctcccagcggtggtggcgaggagcaaacgacaccaggtagcctgccgcggggcagagagtggacgcgggaaagccggtggctcccgccgtgggccctactgtgcgcgggcggcggccgagcccgggccgctccctcccagtcgcgcgccgccgcccccgcccccgcccccgcccccgcccccacccccacccccacccccacccccagccggcgcccgcgcccgcccccgcgccgggcccggctcggcccgacccggctccgccgcgggcaggcggggcccagcgcactcggagcccgagcccgagccgcagccgccgcctggggcgcttgggtcggcctcgag

SEQ ID NO: 346544 - DNA, 369 bp, Homo sapiens; identical to SEQ ID NO: 345080
  chr3:16553609-16553978
  hyper

SEQ ID NO: 346545 - DNA, 78 bp, Homo sapiens; identical to SEQ ID NO: 345081
  chr3:16555426-16555504
  hyper

SEQ ID NO: 346546 - DNA, 989 bp, Homo sapiens; identical to SEQ ID NO: 331712
  chr3:24536360-24537349
  hyper

SEQ ID NO: 346547 - DNA, 221 bp, Homo sapiens; identical to SEQ ID NO: 198852
  chr3:25469458-25469679
  hyper

SEQ ID NO: 346548 - DNA, 130 bp, Homo sapiens; identical to SEQ ID NO: 345083
  chr3:25469874-25470004
  hyper

SEQ ID NO: 346549 - DNA, 214 bp, Homo sapiens
  chr3:27410391-27410605
  hyper
cgtcggagcagattggaagagacacattcaggctccatttaaccagaataattccgttatcaaaatggaagcgccaagaagcatcgttgatggcgctttcccaccatccatccgtccaacacaaacccacctgctttgaaaagactgcctcacgcagtgactcacttacccaccacagccgcattctctacctctgcctcttgtctagtgaagc

SEQ ID NO: 346550 - DNA, 61 bp, Homo sapiens
  chr3:27411079-27411140
  hyper
caagcttgcaagcagaagaggcagcaagtgatgctgaaggctgtgctgcagccacttcacc

SEQ ID NO: 346551 - DNA, 558 bp, Homo sapiens; identical to SEQ ID NO: 345084
  chr3:32433054-32433612
  hyper

SEQ ID NO: 346552 - DNA, 200 bp, Homo sapiens; identical to SEQ ID NO: 198867
  chr3:32433665-32433865
  hyper

SEQ ID NO: 346553 - DNA, 81 bp, Homo sapiens; identical to SEQ ID NO: 345086
  chr3:32434068-32434149
  hyper

SEQ ID NO: 346554 - DNA, 1420 bp, Homo sapiens; identical to SEQ ID NO: 331732
  chr3:37033979-37035399
  hyper

SEQ ID NO: 346555 - DNA, 493 bp, Homo sapiens
  chr3:39850742-39851235
  hyper
cggggaaggacctggagtcgcacatgggggctcccgaaccgcggccccaatactgcactgcgccgcagggaagagccccgggaggggcgcgggtccccgccccgggcgcgcgcagccctgccccgcctcctcccggtgcgccccgcccctcccggcgcgtgccgcccgcgcgcccgaggtgctctggaggaaccggcccggcgggcaccccctgccccggcgcaggcgcgatcgcgggccgcccctcccgccgggcgccctgcacgcgcccccgccccgcctccgcaggctcccccgctccgggcgcctctgattggctctcggccgggccagcaggtgtcggcggtggctgcggccaggctggccctggctgcctgcggcgcgggcgcctccctcgcagccgctgctgccgacgccgctgcgctcccgcctcctgtcggttcccgggttcccgctgcggctgcggttctggcagccgagcccccgcggtgct

SEQ ID NO: 346556 - DNA, 243 bp, Homo sapiens; identical to SEQ ID NO: 345088
  chr3:43147038-43147281
  hyper

SEQ ID NO: 346557 - DNA, 105 bp, Homo sapiens; identical to SEQ ID NO: 345089
  chr3:43147607-43147712
  hyper

SEQ ID NO: 346558 - DNA, 426 bp, Homo sapiens; identical to SEQ ID NO: 198906
  chr3:44038922-44039348
  hyper

SEQ ID NO: 346559 - DNA, 41 bp, Homo sapiens; identical to SEQ ID NO: 345091
  chr3:44063232-44063273
  hyper

SEQ ID NO: 346560 - DNA, 71 bp, Homo sapiens
  chr3:44597031-44597102
  hyper
tcttgcagtaggaaactgtatgaactgtcatatttgggtcagacccaggctcagaatcgcaaacgtggagc

SEQ ID NO: 346561 - DNA, 395 bp, Homo sapiens
  chr3:49027805-49028200
  hyper
cgacggcgaggacgcaccggtgcgtccgctgtgcaagccccgcggcatctgctcgcgcgcctacttcctggtgctgatggtgttcgtgcacctgtacctgggtaacgtgctggcgctgctgctcttcgtgcactacagcaacggcgacgaaagcagcgatcccgggccccaacaccgtgcccagggccccgggcccgagcccaccttaggtcccctcacccggctggagggcatcaaggtgaggacctccctgccccgccgcgctccaggccctgcacggctgagcccgagaggaccggcgctcagcccgggtccccacgctgcccccggcgctgctctgcgtcggtcccgcgcgctcccactcactcgcctgctgtcgctctccgggccggggc

SEQ ID NO: 346562 - DNA, 356 bp, Homo sapiens
  chr3:50374299-50374655
  hyper
cggtcggctttagtcatagctggataatgcccggctcaggtctaccacaagccatacagctgctttttccgtgttcaacctgtctgtgacagaaaccaagggggccccggcacccagcatctaggcggtggaatcggggtcttacgcacggttccgcgggcaggtccccggccaggacccgcggggagccacgtagccaggagggtggggctgcccaccgacccaggacgcggcaacggaccggggagggcggagctccagcgaccgcttcccctcccgcccgccggcaccccctggctcccacctggtcccggcgcggcctgcgagctagcgaggttcgcgcggtgaagtactgc

SEQ ID NO: 346563 - DNA, 233 bp, Homo sapiens; identical to SEQ ID NO: 281171
  chr3:50374684-50374917
  hyper

SEQ ID NO: 346564 - DNA, 34 bp, Homo sapiens
  chr3:50374946-50374980
  hyper
cacgcttcgcccccaggaatgacctcatcgctcc

SEQ ID NO: 346565 - DNA, 81 bp, Homo sapiens
  chr3:50377892-50377973
  hyper
cgccgaccccctctgccgcgacttgacccgcggcgactgcgctgccccttggctgccccttccgctctcgtaggcgcgcgg

SEQ ID NO: 346566 - DNA, 167 bp, Homo sapiens
  chr3:50378002-50378169
  hyper
tttgcgcacgacgccccagatgaagtcgccacagaggtcgcaccacgtgtgcgtggcgggccccgcgggctggaagcggtggccacggccagggaccagctgccgtgtggggttgcacgcggtgccccgcgcgatgcgcagcgcgttggcacgctccagccgggtgc

SEQ ID NO: 346567 - DNA, 247 bp, Homo sapiens; identical to SEQ ID NO: 198957
  chr3:53879786-53880033
  hyper

SEQ ID NO: 346568 - DNA, 346 bp, Homo sapiens; identical to SEQ ID NO: 198961
  chr3:55521390-55521736
  hyper

SEQ ID NO: 346569 - DNA, 970 bp, Homo sapiens
  chr3:66024122-66025092
  hyper
cgctcccctgcacacgctcgcgcactcaagccatcataaaacaaactttctgggcttccccgcgagccccgcacaggcgcccgcgagctttgtttgcattccggtgcctctgggtccacgttccggcgcccgcccgtgctctcccggaccagagtccactctgcgccgctcgggttatttttttttccttccttcctttctctcttgccttttacaaatgcggtgcctcctctttgcctcccgcccggctcgcctctcctcgctggcaggctgttactgagggtgagggaagcccttccagccagttgccgggagccctgaagacgcggtggcggggcggcggggagcagggcgggaggtaagtgctcgcggcccctttaagcagatacaaaggctcggcttgttttgttacagttcattctattccgcgccgcggagcgcagcggccggcgacaggagacgcgcgcgcatgcgccccgcggccgccagccggccggcccacccctcccctcctccccgaagggagagattccaacgtgcttcccgatgggtcctaaaaccgacctgccgggagaaggcaactcccccccaacccttcctgaacccctatcctctctccttttctttcagtgccctggactccgcggattcctttggggctggagggccgcacacgtgttttactccaactgtttgcaacttttgaaacccgggcaatctggctttggcatttgaaaaccatttcaaacaggtgggggttggggaggctgccacactcaccctggcgctcacactcacgcacacgcgcacgcactcgcgccggccctaagcctcctaaccgccctcggccagtggctggccaggctgtcggtcacccagcccggctggttcgccgccccccttgccgcaggtcccactgaaacccccgagacccgccccggggcgctcgccgcctccctgcctgccctgc

SEQ ID NO: 346570 - DNA, 1570 bp, Homo sapiens; identical to SEQ ID NO: 331800
  chr3:66550318-66551888
  hyper

SEQ ID NO: 346571 - DNA, 1332 bp, Homo sapiens
  chr3:71113488-71114820
  hyper
cgctctgaaagtgacagaaatcacaccccagatacgtcccccgaacggagtgatggcgagggcttcaccaaagtggctgcgtgaaggccagaccggcagaaaatgaatcgcaaacgaaaaagagagagagagaaacacacaagcaggacttcctccaactctcaactacaccccacccatgaacatttaaaaaaagagagcgagagtgtgagccaaagagcaaggggggtgggggggtatctctctccaggacccacaggcctgcagctcctttttcttgcccctccactccctccccgcctccacttccagagcgcaactcctacccaacttggtaaacagcgaggatgaggatgattttttaaaagactcaacttcagaaccctcgggctctcctgccttccccagcgaggcccccaggaagcgggcgccgcggagccgggggaaggagagcgaaaccggcaaagatcaatcagaaggaccaacctgacactctccatgtagccgccaggcgcgcggagccgggctcggggcgcccgcgcgggccgggcgtggggtccggcggcctcggcgtgcaggcggactgcacgcgcgcaggggcgctccggctcgcgggctgacaagacgcgccgcgccgcgcccacccgccccgccctgctccaccaatcacaacccgcctctaaacaccccgcgccgcgccgcgccgcgccgcgccccacacaatgggctccgcggcccgcgccccgcgcccgcgcgccccggccccctccgcgcggcaggtgaaatcacgctcgggtgccaccctgcttttgtctggagagcaactccacttaatagctgttaacccggtgacccgcctccggctgacgtctgggtcggccgggctcggcgcgcaccgctccctctggccggggctctgcggggccggggctgccggcggggcggcgtgtttgtttcgtctttgagactgacaaagagttgtcctaacctttccgagaaacccgggaggccgaagaggggcacccggcgctcgcggcgccaagccgactgctccgagcaactgttcggcttcgggagggtacgcaggtctcctaggcagcgcagaaaagcgcttttcctcgaaaacctccctgggaggagaactttcgcttcacgtcgggggtttcacagagccttggcctccccacacccctttctttcccagagtcggtctcgccaaagtgtgccagtgcgcaccgaggaaaactaagccgacgcggggtggaaataaataacaaccaaacgtgcctcgtcgctgaaccaggcgacttcccctctagaacgacagctgcc

SEQ ID NO: 346572 - DNA, 913 bp, Homo sapiens; identical to SEQ ID NO: 345094
  chr3:71630573-71631486
  hyper

SEQ ID NO: 346573 - DNA, 280 bp, Homo sapiens; identical to SEQ ID NO: 345095
  chr3:98619774-98620054
  hyper

SEQ ID NO: 346574 - DNA, 58 bp, Homo sapiens; identical to SEQ ID NO: 345096
  chr3:98621126-98621184
  hyper

SEQ ID NO: 346575 - DNA, 101 bp, Homo sapiens
  chr3:99594790-99594891
  hyper
cgctttgcgaaacctgtctgcagtttgtgatgctgagacagctttaacagccacccacagacttgctacctggctgtctgacagcagtgccccttggtgga

SEQ ID NO: 346576 - DNA, 566 bp, Homo sapiens
  chr3:105087465-105088031
  hyper
cggcaagctcaggtcacagaagaggtttgaaagcctctgaatctctcccaggaactggcggggagaggggtttgggggccagagcctgaggaagagattacaagtgtttgcgagctgctgctgctgctgccgttgctgtgtgtgtgggcgggaggagtgccctctccagatctctttattaaagttacatttctgggtgaggtaatgagctcacctgatgtttctgaggctgagggaaaaaaaaggcgtctgcgttctctgacaaatctcgggctctggggcggggactgtgaaaccatagttcaaccggatttaaagcaggtgtcctagtgtaacaacgctggggaggtaggtggaaaggcgagacccccttgggcctggcacagtgtggatttcactttttcgagattccactgtccgatggaggaaaggacactttggagccagggaatgagccaagaagggaggacaagggtgatgtcggtttgtaacatgcaaacgtccacacgcccacagttggttttccgattaaccccctcgagacttggagaatgtaatctcaccct

SEQ ID NO: 346577 - DNA, 459 bp, Homo sapiens
  chr3:105088087-105088546
  hyper
cgggccacgtcgcaggataggtttttctacacatttaactgctaaaagggggaaagttccgctttcagacctccttcacggtggttcttttggcgccacaggctcgtgtgtccagggggcaccgagctgcgcgctttcggcgagcggctagccccggctcaccgcaaccagccaccgtgaatctgaggatccgatatcggccctggaccctcagatccgtggtttcggtgaattaccgagctggcattgccgaaattctcattgcagtatcagtgtgttttgaaaggaaaggttacagcactaaaggcgccgtgtctacactgaggaagcaagtcttggacagtaagtgcgccttcttcggagccctctgcatagcagagcccggtgggggcgcggtgccaaaggccggcttcatttgagcggggtaactgccttccctgccggccactcttcatttcc

SEQ ID NO: 346578 - DNA, 1176 bp, Homo sapiens; identical to SEQ ID NO: 331832
  chr3:113251180-113252356
  hyper

SEQ ID NO: 346579 - DNA, 48 bp, Homo sapiens; identical to SEQ ID NO: 345098
  chr3:115231437-115231485
  hyper

SEQ ID NO: 346580 - DNA, 731 bp, Homo sapiens
  chr3:123751654-123752385
  hyper
cggaggaggtggccgcggggccgggaggagcaccggcggcgcgagcggagaagctgagcgcgcagcgcccgggccgcagagccccctggacaagcctggcgtgtgccctgcagccccgggctcgcccggcggccccgccccctccctggcccgggcttttcctgcggagctcaggaagccggcctagcacagcctcgaacaatagctcgggactcgggctccgctccccgggaggccggcgcggggccgctgggactgggggcgtaggcgccgccgggggcccgcagcgagccctcggccccggccggagcttcaattcagctcggcgctcccggggtcattgttggccgggactgagggagcgggagccgggggaggagctggggaggcggctgctgcggcggcggcggcggcgggagccagagggggagctagagagcgagcgagcgaaggagggaggtagcgagtgagcgagtgagcgagggagggaggaggtagggagacagggagggtgggagggaggaggaaaaataaagaggagagagcggagcagggctgaacaatagagacaggcagacgggcgagcaggagagccagctgccgctgctgggggacagcgggcgcccaggcagcccgcaccccggccccgggccccggccccagccagacagcaggcggccagcgccctggggaaggggtaccatgggggagctggcggcaggcacccccag

SEQ ID NO: 346581 - DNA, 438 bp, Homo sapiens; identical to SEQ ID NO: 345099
  chr3:124773932-124774370
  hyper

SEQ ID NO: 346582 - DNA, 122 bp, Homo sapiens; identical to SEQ ID NO: 345100
  chr3:127794271-127794393
  hyper

SEQ ID NO: 346583 - DNA, 288 bp, Homo sapiens; identical to SEQ ID NO: 199083
  chr3:127794860-127795148
  hyper

SEQ ID NO: 346584 - DNA, 44 bp, Homo sapiens; identical to SEQ ID NO: 345102
  chr3:127795229-127795273
  hyper

SEQ ID NO: 346585 - DNA, 333 bp, Homo sapiens; identical to SEQ ID NO: 345103
  chr3:128216313-128216646
  hyper

SEQ ID NO: 346586 - DNA, 378 bp, Homo sapiens; identical to SEQ ID NO: 345104
  chr3:128216713-128217091
  hyper

SEQ ID NO: 346587 - DNA, 57 bp, Homo sapiens
  chr3:128713000-128713057
  hyper
cgtgcggcctgggggcggggctccgcggggcggggctttccccctcagccactgcgc

SEQ ID NO: 346588 - DNA, 48 bp, Homo sapiens; identical to SEQ ID NO: 199094
  chr3:129694299-129694347
  hyper

SEQ ID NO: 346589 - DNA, 603 bp, Homo sapiens; identical to SEQ ID NO: 345105
  chr3:131753369-131753972
  hyper

SEQ ID NO: 346590 - DNA, 196 bp, Homo sapiens
  chr3:132756116-132756312
  hyper
cgctgaacgacaaaggttctagctggccagtccgaaaacactgagtccttaggtcaaatttgagaaatgacagggccagtgggagtcctaacttctagactctggaattactgacagaagaatatttggacagtttttaagaccctcaaggcatattattttacaacctctttagcttatgcctgaatttgtgctg

SEQ ID NO: 346591 - DNA, 39 bp, Homo sapiens
  chr3:132756477-132756516
  hyper
gattaacgtagacacagtgttctcttccatggccattcc

SEQ ID NO: 346592 - DNA, 295 bp, Homo sapiens; identical to SEQ ID NO: 345106
  chr3:135684609-135684904
  hyper

SEQ ID NO: 346593 - DNA, 35 bp, Homo sapiens
  chr3:136751341-136751376
  hyper
cgtcctcttcccggatacttggagacagcagcgtc

SEQ ID NO: 346594 - DNA, 703 bp, Homo sapiens; identical to SEQ ID NO: 199114
  chr3:138067014-138067717
  hyper

SEQ ID NO: 346595 - DNA, 106 bp, Homo sapiens
  chr3:138067747-138067853
  hyper
gaccggctgtgcgtggcgttttgcccccatcgcgggctcccgcgtaacggtgtgcgttcgtgaaatcggccacgaccaagaccccagtggggagggcctgcgcgcc

SEQ ID NO: 346596 - DNA, 79 bp, Homo sapiens
  chr3:139655101-139655180
  hyper
gcctgggagcgtcgggagctctggggtggggggccgggtctgaaacaggaggtcacgtgcttgcagggggtggggaggc

SEQ ID NO: 346597 - DNA, 986 bp, Homo sapiens
  chr3:140660747-140661733
  hyper
cggttgctttctgcagccgcatctcggccagctctcctcgccgtccccggggcgctgtgcgtctccagtccgggaccgaagccgcctgccgtagcgggcggccagatccgcgtcccgcctcagcggccggaggacatgcgggagagagaatgagccagagggacacgctggtgcatctgtttgccggagggtaaggtcctggcggggcgtgcgcactggggctgagggtgctggggccgaagacgcaggcgaggggggcgaggggggccgaggggggtgggggggtgggggggcgggagtgaggcctgggcggggagctgccacgggcctgcgggtgaggggagcgacccagcccgtgggtggtgaggggggctccggttcggggaagcaagggggtgaggcccgggcccgagggcgagagagtgaggcccgggcaaagagggttgaggcatgaaacccgggccgggagtgaggttttgggcccgcggggccggggtgaggcggaggccgaatccatgcgtctgaggagacgcgggcaagagctggggtcggcgcttgattacccggacgccgctggacctggccgcacgccgcaatctagcaggcgtcggggatccagggccgctttgaggagcctggcttcggatttcgcgtaggttgcatggcccaaggggacggggcggaaagtgcggaggctgaggacaaaatgggcgccggagactcctttagccctcgctccttgcagcgctcgcttgggcctctgcacgtcactcacgccccacctcggacctcgggccgctcatttccgggctcggctttgcaaggtgggtggtaagggggctacgggatcgagcggggaaggctttggtattctcccgtggttgctgtagggtgtttctagcccttggaaaatttcttgcccgaggttttccaggtggtgaatggggtgcaaagctttccagtacctttggggtcagattcctttc

SEQ ID NO: 346598 - DNA, 604 bp, Homo sapiens
  chr3:145968403-145969007
  hyper
agaaacccaatcaagcgagacctgtcacgcagagcgaaacgaaagggccgcccccgtgaagtgcagccaggacccccatccctgggcaggaaactgctcgctcccaaaccctctgcgtctgcagtgcagacgcgcgcccgacaccacggaacttctgcaaccacctgaggatgcgacgcgagcgcagtgtccgggaactgctagcgcaggacgccgcgcaacctccgcgcctgcccgcaggcaccgcggcctcgggcctcccctgacgacgccctcggccccgcagcccgggcgcccgcgccaccctgtcctgctctgcgcccgcctgtccagccccactcaccgcctgccccgcagaatgctgggcaccggggacgccagacgccgggtctagttgtactggcagaggaaagggaaaggaaaggaggcagggaagggagacggagaggatttttcaagttataaacaaagtaagcgcgcggaagggagggctaggcgcgggttctgggggcgggtccggcacgcctggaccctccttccccgcgcgcggcttccccgtctcggaccccgccccgcgctgggagagccgccagcccgggggagc

SEQ ID NO: 346599 - DNA, 556 bp, Homo sapiens; identical to SEQ ID NO: 345107
  chr3:149375440-149375996
  hyper

SEQ ID NO: 346600 - DNA, 122 bp, Homo sapiens; identical to SEQ ID NO: 345108
  chr3:156533976-156534098
  hyper

SEQ ID NO: 346601 - DNA, 142 bp, Homo sapiens; identical to SEQ ID NO: 345109
  chr3:156534539-156534681
  hyper

SEQ ID NO: 346602 - DNA, 523 bp, Homo sapiens; identical to SEQ ID NO: 345110
  chr3:157217201-157217724
  hyper

SEQ ID NO: 346603 - DNA, 258 bp, Homo sapiens; identical to SEQ ID NO: 345111
  chr3:157815399-157815657
  hyper

SEQ ID NO: 346604 - DNA, 67 bp, Homo sapiens; identical to SEQ ID NO: 199159
  chr3:157815822-157815889
  hyper

SEQ ID NO: 346605 - DNA, 568 bp, Homo sapiens; identical to SEQ ID NO: 345113
  chr3:157815923-157816491
  hyper

SEQ ID NO: 346606 - DNA, 32 bp, Homo sapiens
  chr3:157824101-157824133
  hyper
cgggggctgccggagggaaatgggaactgatg

SEQ ID NO: 346607 - DNA, 79 bp, Homo sapiens; identical to SEQ ID NO: 345114
  chr3:159480852-159480931
  hyper

SEQ ID NO: 346608 - DNA, 943 bp, Homo sapiens
  chr3:159480975-159481918
  hyper
ggtggagggagaggaagcggcgaggaggaaggtggaagggaaatgatggtgcatgaccaccgagcacacgtcactcgggctcccacatgggcttgtgtatgtgcgtgtgtgaggggagggaggtccttcacagggtcactcgggcacttccgcgtggaataggaggcgccaggctcgtgctttgggatgccgggtggcttcggcggggtaacgagtcacgcagagacggcttgaggcaagccaagaaaatacgggtgtcggcgtgaaaatacaccactcttcccagcgcgccgcccttgctaactggctggacctgcgcccctaacgcccagtgcccccttcttttgggcctatcttggcccctccaaccccatcccagcctgcctcctgctccagcctgccgccgcgaaaaccgggactgcggactgcgccgcgcccggcagcctctgggcatgctcggtggcgggaccggctccaccgccaggagggcgcgtcctccctcccctagggcggtgacggcgcctgcagcgacttgccgccgcgccccggccaggcacaccttttggggaggcgggggaccaccctgcccggcgtgggccgagagcgccccccaccccgagccttccggcgggtgggaggaggggccggccagggagacgcggaggcgggagtgagacctccgactgccagcggttccttacaaagtaaagctcagctcgcgcgcggacccgggctcccagccgcgggcggggaaggggcggggcggggcggggccgggccgggccgggccggggcggggggtggtctcagcgcctagagcgagatgcgaaattagtagccgcccacccccttctcagttcccgcccccagggaattataatttcctgggaaagtgtctggttctcggagaatccttggggcggggtaaaggggcgcgcctggc

SEQ ID NO: 346609 - DNA, 80 bp, Homo sapiens; identical to SEQ ID NO: 345116
  chr3:167098187-167098267
  hyper

SEQ ID NO: 346610 - DNA, 227 bp, Homo sapiens; identical to SEQ ID NO: 345117
  chr3:169482182-169482409
  hyper

SEQ ID NO: 346611 - DNA, 241 bp, Homo sapiens; identical to SEQ ID NO: 199188
  chr3:169482439-169482680
  hyper

SEQ ID NO: 346612 - DNA, 282 bp, Homo sapiens; identical to SEQ ID NO: 281698
  chr3:170626174-170626456
  hyper

SEQ ID NO: 346613 - DNA, 138 bp, Homo sapiens; identical to SEQ ID NO: 345119
  chr3:179169640-179169778
  hyper

SEQ ID NO: 346614 - DNA, 206 bp, Homo sapiens
  chr3:180397104-180397310
  hyper
cgttcgccaccgggatggcgaacccatcctcccagtgcagctcagccaggaattcgctactcatgactgcaaacggatagagaagatacagagcaaagatccgccttcttgtacagcgggtgagcagcacccgcgtcaagcccaggcacctgcacagtgccgcggcaattgccgggggagccctagcaaccttcccgcgtccttag

SEQ ID NO: 346615 - DNA, 47 bp, Homo sapiens; identical to SEQ ID NO: 199223
  chr3:181444767-181444814
  hyper

SEQ ID NO: 346616 - DNA, 809 bp, Homo sapiens; identical to SEQ ID NO: 345120
  chr3:183165024-183165833
  hyper

SEQ ID NO: 346617 - DNA, 570 bp, Homo sapiens; identical to SEQ ID NO: 345121
  chr3:183542795-183543365
  hyper

SEQ ID NO: 346618 - DNA, 43 bp, Homo sapiens; identical to SEQ ID NO: 331974
  chr3:185977478-185977521
  hyper

SEQ ID NO: 346619 - DNA, 290 bp, Homo sapiens; identical to SEQ ID NO: 199253
  chr3:186079331-186079621
  hyper

SEQ ID NO: 346620 - DNA, 45 bp, Homo sapiens; identical to SEQ ID NO: 345123
  chr3:187455297-187455342
  hyper

SEQ ID NO: 346621 - DNA, 446 bp, Homo sapiens; identical to SEQ ID NO: 199256
  chr3:187456666-187457112
  hyper

SEQ ID NO: 346622 - DNA, 509 bp, Homo sapiens; identical to SEQ ID NO: 345125
  chr3:187457654-187458163
  hyper

SEQ ID NO: 346623 - DNA, 111 bp, Homo sapiens; identical to SEQ ID NO: 345126
  chr3:193775965-193776076
  hyper

SEQ ID NO: 346624 - DNA, 146 bp, Homo sapiens; identical to SEQ ID NO: 345127
  chr3:194407289-194407435
  hyper

SEQ ID NO: 346625 - DNA, 153 bp, Homo sapiens; identical to SEQ ID NO: 199276
  chr3:194407836-194407989
  hyper

SEQ ID NO: 346626 - DNA, 101 bp, Homo sapiens; identical to SEQ ID NO: 199277
  chr3:194408028-194408129
  hyper

SEQ ID NO: 346627 - DNA, 582 bp, Homo sapiens; identical to SEQ ID NO: 345130
  chr3:195599104-195599686
  hyper

SEQ ID NO: 346628 - DNA, 643 bp, Homo sapiens; identical to SEQ ID NO: 331998
  chr3:197025639-197026282
  hyper

SEQ ID NO: 346629 - DNA, 79 bp, Homo sapiens
  chr4:6201800-6201879
  hyper
cgagagtggaagggggacccagagggggcgcgatggccggaggagggggagatggacgatggggcggggcggcaccggt

SEQ ID NO: 346630 - DNA, 65 bp, Homo sapiens
  chr4:6202658-6202723
  hyper
gcttgcaggtaaagcggggctggggccgtcctggccgtcagtggtcaggaagacgcagcgacccc

SEQ ID NO: 346631 - DNA, 204 bp, Homo sapiens
  chr4:7940888-7941092
  hyper
cgtcatgcggggccaagaaagagcccccatccagagtcacggaccccctcgtccgagggtccgcgcagtcccctcggtaagtcggacgaagcagtctcgctacgggggagggcggcggagcctcccactcttggtgacccggaccccgccccacgagtgggtcttcgcagggccccctctgacgcacacggggaccagccacgc

SEQ ID NO: 346632 - DNA, 32 bp, Homo sapiens; identical to SEQ ID NO: 199335
  chr4:7941129-7941161
  hyper

SEQ ID NO: 346633 - DNA, 522 bp, Homo sapiens; identical to SEQ ID NO: 199336
  chr4:7941191-7941713
  hyper

SEQ ID NO: 346634 - DNA, 88 bp, Homo sapiens; identical to SEQ ID NO: 199339
  chr4:8201024-8201112
  hyper

SEQ ID NO: 346635 - DNA, 38 bp, Homo sapiens; identical to SEQ ID NO: 282004
  chr4:8201450-8201488
  hyper

SEQ ID NO: 346636 - DNA, 43 bp, Homo sapiens; identical to SEQ ID NO: 345134
  chr4:10458329-10458372
  hyper

SEQ ID NO: 346637 - DNA, 609 bp, Homo sapiens; identical to SEQ ID NO: 332064
  chr4:25863681-25864290
  hyper

SEQ ID NO: 346638 - DNA, 1067 bp, Homo sapiens
  chr4:42657902-42658969
  hyper
cgatgatggcaagatagatttctgaaaaacatgttattccaccctctgcaggattcaagtacaggtttatgggagaggacaaacaaaccttgggatatttacagtcttggctttgacgcgagcaaaatcaaataatatttacagagtgcctgccacatggcaggcaggatgttgagggctcctcggagacgatgaagagtctgggccctcggaaagcttacttgcttctaccccggagcatctgttgctcagtgttgacaaccatggccattcaagagctggccccaggtggagcaaagaaaacagcttccacctggctgaaaagtcagctcagctggccgaagtgagggtttcgggcaaaagggaaacacaaaaacgaaacctcagacgcgagccggtgggactccgctgcaggaggcagaattgcagaagctgtaatgcagggaacccactcggcacccgaccccgatgaaggctccccgcgcttcgagagccaagggactacggatcaaaggatcctgcagccggggaaaagcaaactcgcttcgctgggagctcagatagggggttgcaaaacggtgggcgccggaggcaggggcggcgggctggggatctgctgagtggaaatcgaactggtggggagggaggtgggcagggcgagtgagctcagtgactgggacctaatggtcacactgcggtgcaaagcacgcctcggggctcccgcggagaacacccattcgagggtactggagcctggaaagggtctgcgagtacactgggggcagcgcggggggaagggtcccctaggggccgggcgcgacagtcggactgccgccggggaagaggtaggatgcggtctcttccaggataaacacacacgctcacacacacactcgcttcccgaccccgggctagccccgagcctcggcggccccttaccttcggcgcgcgagcggatctccgacacggtcctccgcatggtgggcatcgcggcggcggctgcaggtgggtcctcagcccggactctgcacctgtcacggcgtggtacacgcgggagacccggctgc

SEQ ID NO: 346639 - DNA, 34 bp, Homo sapiens; identical to SEQ ID NO: 199402
  chr4:44449403-44449437
  hyper

SEQ ID NO: 346640 - DNA, 260 bp, Homo sapiens
  chr4:48271822-48272082
  hyper
cgccgcggagtccggagcctagcgccccagagtccagagcaaagcgccccgccccgccctctgatctccccgtcccgcccccaatcaccccgccccgccccgattgctggccccgtggacgccctaccccgcctctgatcctgcaggcccgcccagtcctcgatcgccccgccccggtcgcttgggccctgggtggcaggtttgcgcagccctgcggcgatttcaaggcaagtgaccggaatgggtcggaagcgcgtccc

SEQ ID NO: 346641 - DNA, 190 bp, Homo sapiens
  chr4:48272083-48272273
  hyper
gtgagtttcagggagcgtcccttaggtttccgggggcggcgttgaacctccctagccccagtcttcccatcccaggagacccgcccctagtggctcgaacgcccctagccaggagagccccgagtagtgccacttgtggaagactacgtgcctgtcggaattaggaaccgcacctccccttccgctaagc

SEQ ID NO: 346642 - DNA, 93 bp, Homo sapiens
  chr4:57687545-57687638
  hyper
cgaagcccaagcaagaactaaagagggtggctgactccacaaagccacccccacaacccccagttcgcgttcctccacctggcaggtcctctg

SEQ ID NO: 346643 - DNA, 205 bp, Homo sapiens
  chr4:57687887-57688092
  hyper
gcgctcgtgcgacggggcgcggggagggcgggggaaggggcggggcgagaatgggaggaaaagcagcggtaggtggcgagggaagaggggcggcgggaagaggagcggcgggaagaggagccgtgaagggtcgggggagaaccggaaagggctgggaaggagaaaggtagaaggacgggggagggggccatggggaaggaggggc

SEQ ID NO: 346644 - DNA, 427 bp, Homo sapiens
  chr4:58029764-58030191
  hyper
cgtgagtcagtgattcccagtgttgctgtgcctgaaaacccaccactaatgtcagcgccttgtgctgttgagttgcacgcggcgcccctgcagtccagggctggggctagcccggcgagcgcgcggcaggcagagcattcccggacgagtccggtagatggtagcattgtgcagccgatgcgtcctctcccagcttgcgtctcatttttccctctccccctttcctgggctcagcggtgaggctcaggtaccggcgccgccctgatgcctactatgccgcgccatctccagatggtccgcacctggcgggtcacgacgagtctcaatccacagcatggggctgactcggactcaggagtttttgtggctccaggcgtaaccgttgctttggataaaattggtccagttcacttgaccaaggagaagt

SEQ ID NO: 346645 - DNA, 133 bp, Homo sapiens; identical to SEQ ID NO: 199452
  chr4:76555905-76556038
  hyper

SEQ ID NO: 346646 - DNA, 448 bp, Homo sapiens; identical to SEQ ID NO: 332121
  chr4:77610260-77610708
  hyper

SEQ ID NO: 346647 - DNA, 215 bp, Homo sapiens
  chr4:84457821-84458036
  hyper
cgctggttctcggcttcatccttttaccttcggtcttcggagtgtctctgggcatctccgagatctacatgaagatcctagtgaaaactttagaggtgagtgccgggagggatgcagccagccccacaccgctgcgggctgagaacccgggggtccagttctcaaggtcagtggtcgcgagtcaggggtgtgtgtgcgcgcgtgtgcatgcgtgc

SEQ ID NO: 346648 - DNA, 134 bp, Homo sapiens; identical to SEQ ID NO: 345137
  chr4:100729543-100729677
  hyper

SEQ ID NO: 346649 - DNA, 258 bp, Homo sapiens; identical to SEQ ID NO: 345138
  chr4:100867945-100868203
  hyper

SEQ ID NO: 346650 - DNA, 299 bp, Homo sapiens; identical to SEQ ID NO: 199559
  chr4:113435475-113435774
  hyper

SEQ ID NO: 346651 - DNA, 242 bp, Homo sapiens; identical to SEQ ID NO: 199560
  chr4:113436585-113436827
  hyper

SEQ ID NO: 346652 - DNA, 761 bp, Homo sapiens
  chr4:124317751-124318512
  hyper
cgaagttttaagaggatgtttattacacgagtctgtagggcaacatttccaagttggtacacataaacgaaagaggaaacgatagttaaggaaatcctgttccaggttttcgggcagcccgagtgattgacacatgatatcaccggaggcgtgtcctggagtggaggtggaggtggaggcaaggagctgaaattctgcgtagccggagtgagaccgctctgcaaaccactgcgtgctttgcagagtgattatcagcacagttccctgccctggataaggaacagctacagtcgctgttaaatgtgcctgaaaagcaatttgcaatctttgcattaggtaagtaccgtttccttccgtagacattttaggaaagataaggtgagaaatgttgacttttgcaaggaactgaacatttatttatttgaacttgctttccagctaaggttactggttgcatttcaaaacaccggtagcattcccactgctaaaactaatgctcttaaagtaaatgctaccgctaaaagaaaaagcagggtccctttcacctttccttaaccgaacagtagacgtttaaagtctgaaacgatcgaatttgtgaaacacagagccgttaatgcctttatgcgaagaggggctagcactcggtgtgtggaccaaatgcgtgtttgtttaggcattgttggcgaccgaatcccgagtgaagcattggtttaaaacctgaatttcccgtctctgtgtattgattcctaacgcgcagaggc

SEQ ID NO: 346653 - DNA, 352 bp, Homo sapiens; identical to SEQ ID NO: 345141
  chr4:141293964-141294316
  hyper

SEQ ID NO: 346654 - DNA, 103 bp, Homo sapiens; identical to SEQ ID NO: 199607
  chr4:141294418-141294521
  hyper

SEQ ID NO: 346655 - DNA, 88 bp, Homo sapiens; identical to SEQ ID NO: 199608
  chr4:141294545-141294633
  hyper

SEQ ID NO: 346656 - DNA, 40 bp, Homo sapiens; identical to SEQ ID NO: 345144
  chr4:141295287-141295327
  hyper

SEQ ID NO: 346657 - DNA, 223 bp, Homo sapiens
  chr4:149364661-149364884
  hyper
cggtttccctccaaccgccccctcctcgattctcctcccgcccacccaaatgctgcagttactaagcaaaaggatggggttcctaactttgatttctaaggacttttaggcttctcatgtaaggccccgttttaggctccccgctggcccggagtcagcatcagtgacgtatacacctaaatctggtcccccggccctcggcgacccgcagcccggcggcggc

SEQ ID NO: 346658 - DNA, 438 bp, Homo sapiens; identical to SEQ ID NO: 282569
  chr4:149365430-149365868
  hyper

SEQ ID NO: 346659 - DNA, 42 bp, Homo sapiens
  chr4:149365911-149365953
  hyper
gggcacccgcccgcccccagcggcggcggccgggcctctggc

SEQ ID NO: 346660 - DNA, 410 bp, Homo sapiens
  chr4:150999731-151000141
  hyper
cgccccacccttccttccttcctcccctcggcgctcccgggagcgctcggcagacgcccgagctttgtgggcgcccgcgggcccagcgcgagcctcgggcggcccaactttgcctctcccggtcggctcccgagcgggacttgtgaggcgtggccgggtggaggaggcgcttgcgggggcgtggggctccccggcaggcgggaggcacggagcaagtcgcactggacaatgacctgggcagctcggcgctgcggacacttttagctgagggcgcgggcgggtcggctcctccgcggctcctcggccccacctgcgcggagagggcgggatgccagagccaggtgtcccggcgcgttaagggccctcgcagtcagacgtccctgcaccggcgctcgcacccttagtcggcc

SEQ ID NO: 346661 - DNA, 124 bp, Homo sapiens
  chr4:151000581-151000705
  hyper
ctggacgagctgctggaaggtaggaggggagggcgccgcacggcaggtgcggcggagcgccggcaggtgcagtgggcgtgagccggcgcagcggggagcccgcggggtgctttccaagccgcac

SEQ ID NO: 346662 - DNA, 177 bp, Homo sapiens; identical to SEQ ID NO: 332215
  chr4:153856957-153857134
  hyper

SEQ ID NO: 346663 - DNA, 45 bp, Homo sapiens; identical to SEQ ID NO: 345146
  chr4:154143770-154143815
  hyper

SEQ ID NO: 346664 - DNA, 213 bp, Homo sapiens; identical to SEQ ID NO: 199648
  chr4:154144184-154144397
  hyper

SEQ ID NO: 346665 - DNA, 102 bp, Homo sapiens; identical to SEQ ID NO: 199680
  chr4:170947173-170947275
  hyper

SEQ ID NO: 346666 - DNA, 171 bp, Homo sapiens; identical to SEQ ID NO: 199681
  chr4:170947867-170948038
  hyper

SEQ ID NO: 346667 - DNA, 426 bp, Homo sapiens; identical to SEQ ID NO: 199682
  chr4:170948089-170948515
  hyper

SEQ ID NO: 346668 - DNA, 42 bp, Homo sapiens; identical to SEQ ID NO: 345148
  chr4:176986744-176986786
  hyper

SEQ ID NO: 346669 - DNA, 268 bp, Homo sapiens; identical to SEQ ID NO: 332264
  chr4:183839058-183839326
  hyper

SEQ ID NO: 346670 - DNA, 206 bp, Homo sapiens; identical to SEQ ID NO: 199699
  chr4:184019900-184020106
  hyper

SEQ ID NO: 346671 - DNA, 829 bp, Homo sapiens
  chr5:472600-473429
  hyper
cgggcgacctccgcgccaggtgcgacagctcaggccggagacctcgtctgtggggacgggccgtgtccggggccgccaccctgagaccgggcgcgggcaggacggaacctgggggggaaacggggcaggtactggctttaggagtctaaatccccaaacgctgagcagacggaagacgttcctgccactttacctgcagttcaaagacctggcgagggcctggaaacggcgctcggcccaggccgcttgcgggcgctgggcctgcagccgctgcaggtcgggccctgagtcctggcgctcgggaggtccctgagtcggtccccgagtcagtccccgggcgcggggctcggttgggggggcccggaaccttgggctggtttcacgcaaatccgtttggggcgagcctcggtttcccggcagcggtgggaaagggcgcgagcggccagccatggcgcgcggacccttcccgccggcggcgtcacagcggcgtctcctcctgctccagcgcgtgcggcggtgcgtggcacgagggcggcagcgacgccagcttcagcagcgcggggcggcggcgcgcgcgaggccgctggaacgagcgccggctgtgcacgcggcgcgccgccgccgaacgcgcgtgcgcactcggcagccctcggcgctccggccccgcccccggcgcaggccccgcccccggctcgccctcgggcggctctgcgggcgcaggcgcggcactctcggagttctgcgcaggcgctggcgtgggcgaggcggggctcggggctcgcggtcgctgtagccgcgcggggatctggggtttctctgggacagcggc

SEQ ID NO: 346672 - DNA, 860 bp, Homo sapiens; identical to SEQ ID NO: 332282
  chr5:1064412-1065272
  hyper

SEQ ID NO: 346673 - DNA, 315 bp, Homo sapiens; identical to SEQ ID NO: 345152
  chr5:1645162-1645477
  hyper

SEQ ID NO: 346674 - DNA, 286 bp, Homo sapiens; identical to SEQ ID NO: 345153
  chr5:1874606-1874892
  hyper

SEQ ID NO: 346675 - DNA, 96 bp, Homo sapiens
  chr5:3121996-3122092
  hyper
cgaggatggccaggaaacagttaatttgatttgcgaggcgaaaaggtcgcatgttttgttcagccctttctcagccccttcctccctcgctcggcc

SEQ ID NO: 346676 - DNA, 83 bp, Homo sapiens
  chr5:3122204-3122287
  hyper
ccagctcagggggttcctttgccggcgtcccttccccttggaatgcgctttcttgcacctcctgtttacaaacaaaataaaac

SEQ ID NO: 346677 - DNA, 468 bp, Homo sapiens; identical to SEQ ID NO: 332309
  chr5:10354870-10355338
  hyper

SEQ ID NO: 346678 - DNA, 170 bp, Homo sapiens; identical to SEQ ID NO: 345154
  chr5:10564301-10564471
  hyper

SEQ ID NO: 346679 - DNA, 478 bp, Homo sapiens
  chr5:31854462-31854940
  hyper
cgggagaaggtataaaggaaatgcttcagtcgtgcagtcaccggcgattgtaattcagcggtgttaactttggttactccagccgaaaggctctgaccggggatttctggaaagttccctgacatcctgccccatacgatggttgtgattttagctgggggctccacccctgtaagaactcaggctgccgcggattatgaaacggagtggtcatgaagtgaattgatgtgggaaggtggagcttcttgcaatggctcggagggagaacttttggtgcaaacgagggtctagggtagggcgctttttcctctaacctgctccaggtttgccccaggaagctcctgagccctcggtgtaaacaaaggtgtctggatgagaagccccaaactccctgaaatcctccccagggcggtttccttttcccggcgaggggagtgaccggggaggggatcttggaatgccgtggggttttgacaag

SEQ ID NO: 346680 - DNA, 336 bp, Homo sapiens; identical to SEQ ID NO: 199807
  chr5:40680627-40680963
  hyper

SEQ ID NO: 346681 - DNA, 98 bp, Homo sapiens; identical to SEQ ID NO: 345157
  chr5:42950747-42950845
  hyper

SEQ ID NO: 346682 - DNA, 175 bp, Homo sapiens
  chr5:42995428-42995603
  hyper
ctatgtgctctctagaattttaccggttttcatttgtctactaattttcgtgcattcgttactattgagtttcataatatctgggtgccctctgcccacgagctccggagagcataaatacccaggctgatggtagtgctaaaggttctgcttcatctcgtcaatcagcgcaaac

SEQ ID NO: 346683 - DNA, 337 bp, Homo sapiens; identical to SEQ ID NO: 345158
  chr5:43007481-43007818
  hyper

SEQ ID NO: 346684 - DNA, 387 bp, Homo sapiens; identical to SEQ ID NO: 199819
  chr5:43017314-43017701
  hyper

SEQ ID NO: 346685 - DNA, 303 bp, Homo sapiens; identical to SEQ ID NO: 199820
  chr5:43019347-43019650
  hyper

SEQ ID NO: 346686 - DNA, 259 bp, Homo sapiens; identical to SEQ ID NO: 199821
  chr5:43019887-43020146
  hyper

SEQ ID NO: 346687 - DNA, 328 bp, Homo sapiens; identical to SEQ ID NO: 332354
  chr5:43557434-43557762
  hyper

SEQ ID NO: 346688 - DNA, 50 bp, Homo sapiens; identical to SEQ ID NO: 345162
  chr5:49737299-49737349
  hyper

SEQ ID NO: 346689 - DNA, 75 bp, Homo sapiens; identical to SEQ ID NO: 345163
  chr5:54518558-54518633
  hyper

SEQ ID NO: 346690 - DNA, 209 bp, Homo sapiens; identical to SEQ ID NO: 345164
  chr5:54526958-54527167
  hyper

SEQ ID NO: 346691 - DNA, 308 bp, Homo sapiens; identical to SEQ ID NO: 332365
  chr5:56110226-56110534
  hyper

SEQ ID NO: 346692 - DNA, 37 bp, Homo sapiens; identical to SEQ ID NO: 199857
  chr5:57878673-57878710
  hyper

SEQ ID NO: 346693 - DNA, 158 bp, Homo sapiens; identical to SEQ ID NO: 199858
  chr5:57878752-57878910
  hyper

SEQ ID NO: 346694 - DNA, 227 bp, Homo sapiens; identical to SEQ ID NO: 345168
  chr5:57879190-57879417
  hyper

SEQ ID NO: 346695 - DNA, 128 bp, Homo sapiens; identical to SEQ ID NO: 345169
  chr5:58334886-58335014
  hyper

SEQ ID NO: 346696 - DNA, 210 bp, Homo sapiens; identical to SEQ ID NO: 199861
  chr5:58335353-58335563
  hyper

SEQ ID NO: 346697 - DNA, 73 bp, Homo sapiens; identical to SEQ ID NO: 345171
  chr5:58335881-58335954
  hyper

SEQ ID NO: 346698 - DNA, 348 bp, Homo sapiens
  chr5:65220847-65221195
  hyper
cctgcgtcgcatcggagcgtacccatgtttcttctaacaaaggcacgatcttgaggccatttcgcgggcccttttcccactcccagcgccagctttgtctccccgccggtatgaggctgagacttggaggaggctgagctgcgccgctggggaacaagctcgaagggcgggcgtgggaagctgcaccgcgctgccgctgtggtttcctgcgacctgaccgtgccattagaggaagttggagtgctgcagctgcaagagatacctgctgccttcaaatcagggctggactccaacaacccctgtgcaccgattactgtcgtacaaagaaactccatcggccggcgcggc

SEQ ID NO: 346699 - DNA, 1043 bp, Homo sapiens; identical to SEQ ID NO: 332373
  chr5:66299591-66300634
  hyper

SEQ ID NO: 346700 - DNA, 50 bp, Homo sapiens; identical to SEQ ID NO: 283051
  chr5:75698194-75698244
  hyper

SEQ ID NO: 346701 - DNA, 1185 bp, Homo sapiens; identical to SEQ ID NO: 199902
  chr5:75698274-75699459
  hyper

SEQ ID NO: 346702 - DNA, 345 bp, Homo sapiens; identical to SEQ ID NO: 345175
  chr5:76926856-76927201
  hyper

SEQ ID NO: 346703 - DNA, 191 bp, Homo sapiens; identical to SEQ ID NO: 199915
  chr5:77148195-77148386
  hyper

SEQ ID NO: 346704 - DNA, 37 bp, Homo sapiens
  chr5:77268330-77268367
  hyper
cgagttcacagatggtaaatcgcgtggagagaaatga

SEQ ID NO: 346705 - DNA, 541 bp, Homo sapiens; identical to SEQ ID NO: 283098
  chr5:82769369-82769910
  hyper

SEQ ID NO: 346706 - DNA, 245 bp, Homo sapiens; identical to SEQ ID NO: 283099
  chr5:82770318-82770563
  hyper

SEQ ID NO: 346707 - DNA, 45 bp, Homo sapiens; identical to SEQ ID NO: 345178
  chr5:87436549-87436594
  hyper

SEQ ID NO: 346708 - DNA, 735 bp, Homo sapiens; identical to SEQ ID NO: 345179
  chr5:87436769-87437504
  hyper

SEQ ID NO: 346709 - DNA, 80 bp, Homo sapiens; identical to SEQ ID NO: 345180
  chr5:87957200-87957280
  hyper

SEQ ID NO: 346710 - DNA, 156 bp, Homo sapiens; identical to SEQ ID NO: 345181
  chr5:87969885-87970041
  hyper

SEQ ID NO: 346711 - DNA, 599 bp, Homo sapiens; identical to SEQ ID NO: 199937
  chr5:87970918-87971517
  hyper

SEQ ID NO: 346712 - DNA, 37 bp, Homo sapiens; identical to SEQ ID NO: 345183
  chr5:87975991-87976028
  hyper

SEQ ID NO: 346713 - DNA, 243 bp, Homo sapiens; identical to SEQ ID NO: 345184
  chr5:87976663-87976906
  hyper

SEQ ID NO: 346714 - DNA, 262 bp, Homo sapiens; identical to SEQ ID NO: 283129
  chr5:87986873-87987135
  hyper

SEQ ID NO: 346715 - DNA, 139 bp, Homo sapiens
  chr5:87987165-87987304
  hyper
cgtgcacacacacattgttacttatcagtttttccagcgagagaagaacatatggaaagggtttgagaagtgagcgtgaataactttggtttctgaacctagagaaaagcagggctttcaaagctccggaggcaccagc

SEQ ID NO: 346716 - DNA, 453 bp, Homo sapiens
  chr5:88178399-88178852
  hyper
cgtctacttcaaggtcacagaacatgctgtgaaatattaaaatccaccaggctccacacgctccaccatatcaaacatgctaatgacgtgaactaacttcatgaaactttaaatacactggtgtgacaggaacgagtcaggagtgatttcaatagctgatggcaaacggatacgactatctaaaaagttacttttagcaacaaacaaggaaatcatggaatctaacgaaaaagaatgcacaacgagcctcaacttcagccttcaaaaaaggcacagggatagatagacacagtgccgtggaatatattgatgcagattttagagacaatacccgggttttctatttcctcgagaaatatcaggggtacttacatgaaggaagacccgatcagattagtccttgggatattttcctttcttaagagagagagagagagaaaaaaaaaataacaa

SEQ ID NO: 346717 - DNA, 422 bp, Homo sapiens; identical to SEQ ID NO: 283136
  chr5:88179429-88179851
  hyper

SEQ ID NO: 346718 - DNA, 42 bp, Homo sapiens; identical to SEQ ID NO: 345186
  chr5:88180346-88180388
  hyper

SEQ ID NO: 346719 - DNA, 114 bp, Homo sapiens; identical to SEQ ID NO: 345187
  chr5:100236036-100236150
  hyper

SEQ ID NO: 346720 - DNA, 86 bp, Homo sapiens
  chr5:100238197-100238283
  hyper
cgtttggtgaataaagacatttctcttgagttctgcccacagattaaaaggacaaggacacacgttctttgttgacacttctgcag

SEQ ID NO: 346721 - DNA, 344 bp, Homo sapiens; identical to SEQ ID NO: 199962
  chr5:100239724-100240068
  hyper

SEQ ID NO: 346722 - DNA, 137 bp, Homo sapiens
  chr5:107005846-107005983
  hyper
cgcgccgggaaccggatgccagccagatgccggggctgggaagcagagaagtccctactccccggctcccgcccttttccgagtctcccggcgccccgcagaagcagttggtctaggcagccccggggactcccagg

SEQ ID NO: 346723 - DNA, 449 bp, Homo sapiens; identical to SEQ ID NO: 199970
  chr5:107006260-107006709
  hyper

SEQ ID NO: 346724 - DNA, 469 bp, Homo sapiens; identical to SEQ ID NO: 199981
  chr5:112629778-112630247
  hyper

SEQ ID NO: 346725 - DNA, 113 bp, Homo sapiens; identical to SEQ ID NO: 345190
  chr5:112630698-112630811
  hyper

SEQ ID NO: 346726 - DNA, 57 bp, Homo sapiens; identical to SEQ ID NO: 199990
  chr5:114515671-114515728
  hyper

SEQ ID NO: 346727 - DNA, 131 bp, Homo sapiens; identical to SEQ ID NO: 199991
  chr5:114515769-114515900
  hyper

SEQ ID NO: 346728 - DNA, 44 bp, Homo sapiens
  chr5:114516274-114516318
  hyper
acgaatacagaggaggcgcaacaaaggggctggctgccagcgcc

SEQ ID NO: 346729 - DNA, 105 bp, Homo sapiens
  chr5:115911590-115911695
  hyper
aagtaacatcgggcggcccagcagttctcggagagatatttactagtcatggagttggctgagaaaagcaagtgcggagatcggggtctcagtcccacttaggcc

SEQ ID NO: 346730 - DNA, 35 bp, Homo sapiens
  chr5:119799821-119799856
  hyper
cgaagggcaacgtcgaggggactgcaagcgtcaac

SEQ ID NO: 346731 - DNA, 94 bp, Homo sapiens
  chr5:124082318-124082412
  hyper
cgtccgctagtaacgagacagaatgtgctaacatcgggataaattagtgaaagggaagaaagaataagaagaaaggactgaaaatctgggctgg

SEQ ID NO: 346732 - DNA, 924 bp, Homo sapiens; identical to SEQ ID NO: 283263
  chr5:124082442-124083366
  hyper

SEQ ID NO: 346733 - DNA, 37 bp, Homo sapiens
  chr5:124084158-124084195
  hyper
cgcacattcccctgcatgaagtccccgctaagtgcta

SEQ ID NO: 346734 - DNA, 60 bp, Homo sapiens
  chr5:124084302-124084362
  hyper
attataatctcttcaacaaatttattattaaagaagatggaccatcaaatgtcacagacc

SEQ ID NO: 346735 - DNA, 111 bp, Homo sapiens; identical to SEQ ID NO: 345192
  chr5:124084660-124084771
  hyper

SEQ ID NO: 346736 - DNA, 64 bp, Homo sapiens; identical to SEQ ID NO: 345193
  chr5:124084977-124085041
  hyper

SEQ ID NO: 346737 - DNA, 55 bp, Homo sapiens
  chr5:129239969-129240024
  hyper
cgcggacggggggcgtccaagggcgggtgacggggaaataccgcggcccgcgctt

SEQ ID NO: 346738 - DNA, 34 bp, Homo sapiens; identical to SEQ ID NO: 200020
  chr5:129240901-129240935
  hyper

SEQ ID NO: 346739 - DNA, 805 bp, Homo sapiens; identical to SEQ ID NO: 332483
  chr5:132386973-132387778
  hyper

SEQ ID NO: 346740 - DNA, 185 bp, Homo sapiens
  chr5:134366533-134366718
  hyper
cgaggcagccagacaggacctgcctttccctttcgttttcgggataaggccaacagctcccgaggtccccagcggcagggaatccactgcccagtctctggcccagggtatcctgctaacatctgagtgggtcctgggccccatagggcatgggggagtcccctgggggcacaggtctttgggct

SEQ ID NO: 346741 - DNA, 124 bp, Homo sapiens; identical to SEQ ID NO: 200036
  chr5:134367305-134367429
  hyper

SEQ ID NO: 346742 - DNA, 70 bp, Homo sapiens
  chr5:134802366-134802436
  hyper
gtggtgctcaagaaatgaatgggagtagatgagggcattctggagactgcatggagagccagggcctgcc

SEQ ID NO: 346743 - DNA, 226 bp, Homo sapiens
  chr5:134824599-134824825
  hyper
cggcggagggcagaagcgtcttcttggctggctagagaagctccgccggagtggcctcctcccctcccccaggccggggaggaggccgccgagggctctccaattggagagcctttcatctctttgtttttacagtgattaacccgtccgagcgcgctccgagcgtggctccaggcagcgcagggggaggggagaggacggctgggcaagggaagggagggaggag

SEQ ID NO: 346744 - DNA, 73 bp, Homo sapiens; identical to SEQ ID NO: 345194
  chr5:134880614-134880687
  hyper

SEQ ID NO: 346745 - DNA, 601 bp, Homo sapiens; identical to SEQ ID NO: 332514
  chr5:139487921-139488522
  hyper

SEQ ID NO: 346746 - DNA, 155 bp, Homo sapiens
  chr5:141931151-141931306
  hyper
cgcagctcattgcagccccgaggaaatcaccgggggagggctcgggagtgcggcgcggcagccccataatttccagggcccttctcctacactgacacgtaattgtcagattgttttatgagagcagcttcctgcccgcttcctgcctggcttcc

SEQ ID NO: 346747 - DNA, 624 bp, Homo sapiens; identical to SEQ ID NO: 283411
  chr5:142781875-142782499
  hyper

SEQ ID NO: 346748 - DNA, 124 bp, Homo sapiens; identical to SEQ ID NO: 283412
  chr5:142782625-142782749
  hyper

SEQ ID NO: 346749 - DNA, 410 bp, Homo sapiens; identical to SEQ ID NO: 345197
  chr5:142782794-142783204
  hyper

SEQ ID NO: 346750 - DNA, 717 bp, Homo sapiens; identical to SEQ ID NO: 345198
  chr5:142783958-142784675
  hyper

SEQ ID NO: 346751 - DNA, 32 bp, Homo sapiens; identical to SEQ ID NO: 345199
  chr5:142785272-142785304
  hyper

SEQ ID NO: 346752 - DNA, 126 bp, Homo sapiens
  chr5:148520933-148521059
  hyper
cgtccatctcacaaggcctcgtccatctcccatcacaccctagggcccaggcagaagcccggcggggcggggcctcggacacgcgccggtgcgtccagcaggtggcagcagcgagcggccgcgccc

SEQ ID NO: 346753 - DNA, 45 bp, Homo sapiens
  chr5:148521331-148521376
  hyper
gtccggggtgcgcgcgagcaggcgctgccaaccccacttctgccc

SEQ ID NO: 346754 - DNA, 252 bp, Homo sapiens
  chr5:148650971-148651223
  hyper
cgcggcgaatggagaagacaagcccaaagccaggaaatgggtggcggctgcagggaagggggttttgattccctaggataaaaacgcgctccaacagtctccgcattccggcatggagccggctgaggggtgcggtggtaagaccccatcgctagcggagtgcaagcaaagccgcacacctcctgggtccgggctggggcaggccgcgcgggcgcgggaacgaacgcgtgcggacggggaaaagggtcctcc

SEQ ID NO: 346755 - DNA, 87 bp, Homo sapiens; identical to SEQ ID NO: 332540
  chr5:148724812-148724899
  hyper

SEQ ID NO: 346756 - DNA, 434 bp, Homo sapiens; identical to SEQ ID NO: 332544
  chr5:150004280-150004714
  hyper

SEQ ID NO: 346757 - DNA, 293 bp, Homo sapiens; identical to SEQ ID NO: 200114
  chr5:151150270-151150563
  hyper

SEQ ID NO: 346758 - DNA, 229 bp, Homo sapiens
  chr5:151150681-151150910
  hyper
tcaggccttccaccggcgaccttccggcgggagcctgcgggcggcgcaggaacgaccctccttcctctgccccgcagcagtgctgagtaatggtgagagcagcaaggcccttggccgccgcacgtaagaaaaaagttgtaataaaaagaaaacaacccgggaaactttactagttggttcgccaggtacaaacctatgcggaaaaggcggggtacaggcctcggaggcc

SEQ ID NO: 346759 - DNA, 94 bp, Homo sapiens; identical to SEQ ID NO: 345201
  chr5:153862577-153862671
  hyper

SEQ ID NO: 346760 - DNA, 243 bp, Homo sapiens; identical to SEQ ID NO: 200125
  chr5:157002204-157002447
  hyper

SEQ ID NO: 346761 - DNA, 290 bp, Homo sapiens
  chr5:157002817-157003107
  hyper
ggctcccagccctctgccgagacgctccgcctccagccccgcgggcctccgccaggggatggaggaggggaggctccagcccggagggggctggagggaggggccggggaggagctggcgagactcgggggagcggggctggctcaggtgagggagaccgcggggaagggagaatccgagccccccaggaggagggatttgtggtggacgcggcctgtagagggtcggggactcgggcttctaggagttaaactggacccctctccgcacagcggcccgtttactgtccc

SEQ ID NO: 346762 - DNA, 248 bp, Homo sapiens; identical to SEQ ID NO: 283604
  chr5:176560001-176560249
  hyper

SEQ ID NO: 346763 - DNA, 290 bp, Homo sapiens; identical to SEQ ID NO: 345203
  chr5:176560318-176560608
  hyper

SEQ ID NO: 346764 - DNA, 96 bp, Homo sapiens
  chr5:180480142-180480238
  hyper
cgcctctcggtgctcagcggcgcctggaccgacacggcccccgcgggtgttttccagacgtgttcgtacccggagcctctgcgtggaagagcgcgt

SEQ ID NO: 346765 - DNA, 829 bp, Homo sapiens
  chr5:180480302-180481131
  hyper
gcggagaagccgaggtaccggcgcgggcggcggggcggggaggggcaccggccggtgctgaaccccggggccgcggaggcgcctccccccaggacgcggcgcgggaaggcggcctggaaggggcgggggcgcgcactcagccctctccgctcccgtttcccttcagaaaagctgaggaagcaggcggagaagagacaaggtgagcggggacagggcgttctgcacgcacctgcccaagtgccaaaacccgccgtcatctaaaggctgtgggtcccgttacgagggtttattccagcgcgaggtgtcagggcggccaccggggaacggggatcggtgaccccggtggggaagggggaagatcgttcatatggacaaaagcggaggtgcggaacggctgcattttccacggaggctagtgcacagatgtcagggttgaccggctgctgtcgttacgccctcggagcttcacatcacactgtacagagggagcggtgaccagggtctctgctgccagcgccacctcgtccaggttttcatagcgcacagggagtcgggcggatgcgcaacatctccgcacagggtcaggaagcggcggtcaggcaccgagaaaacagcccagttacgtgaggcagtgtccggggcttaacgtttccgccgagctaatagatttgggaggctccgaccctgattttcacactagcaggagggagggcgctgggtcaccctcctatgcagaagggcagccaagggtgcgcacttccccatcccctgcctggagcctcacttccagcccagcctgggcccgcagaccaccgcgggtgggagtgcc

SEQ ID NO: 346766 - DNA, 60 bp, Homo sapiens; identical to SEQ ID NO: 345204
  chr6:391113-391173
  hyper

SEQ ID NO: 346767 - DNA, 55 bp, Homo sapiens
  chr6:393764-393819
  hyper
cgcgcctgtgccggcggctgttttcgtctctcaccgcgtctctgtttctcttttc

SEQ ID NO: 346768 - DNA, 393 bp, Homo sapiens
  chr6:710660-711053
  hyper
cgtgctgacggggactggcttttcttcttcttcttgtagtttgaaatggaaacgctgcactgctgagaaaataccacggaaatagaacccactgcattccaggaaaataaataagcaaggccacccaaattttcaatgagtgctcctgcagaatgcaggaaatggcaggagatccgtccgaggcaccccaggccgggtcgtgggtagagagcagggacgagggctgggaggggacgcaggcacagggtgagggtggcccgtctccagggagaactgcgcgctcacaggcggggccggcttcccgcatcagcccggccgggctgcaggttctgagcgagggggcggccgtgcctcactctgggcgggacgcggcctggtgcagggacgctcact

SEQ ID NO: 346769 - DNA, 141 bp, Homo sapiens
  chr6:711310-711451
  hyper
cccagagtgagtgtcagggaggaagccaggtcttccagggcgctgacaaggcagggccgggctccttccctccgttgtgtttctctgaaatgttcgaatcactggtgtgacgggagcacttaaagccgaaaaaggaaagac

SEQ ID NO: 346770 - DNA, 373 bp, Homo sapiens
  chr6:1312894-1313267
  hyper
cgaaggaagagggtacgacgccggggagggactgggtgcgcgggcatgaagttggaggtgttcgtccctcgcgcggcccacggggacaagcagggcagtgacctggagggcgcgggcggcagcgacgcgccgtccccgctgtcggcggcgggagacgactccctgggctcagatggggactgcgcggccaacagcccggccgcgggcggcggcgccagagatacgcagggcgacggcgaacagagtgcgggaggcgggccgggcgcggaggaggcgatcccggcagcagctgctgcagcggtggtggcggagggcgcggaggccggggcggcggggccaggcgcgggcggcgcggggagcggcgagggtgcac

SEQ ID NO: 346771 - DNA, 581 bp, Homo sapiens
  chr6:1313302-1313883
  hyper
tactcgtacatcgcgctcatcgccatggccatccgcgactcggcgggcgggcgcttgacgctggcggagatcaacgagtacctcatgggcaagttcccctttttccgcggcagctacacgggctggcgcaactccgtgcgccacaacctttcgctcaacgactgcttcgtcaaggtgctgcgcgacccctcgcggccctggggcaaggacaactactggatgctcaaccccaacagcgagtacaccttcgccgacggggtcttccgccgccgccgcaagcgcctcagccaccgcgcgccggtccccgcgcccgggctgcggcccgaggaggccccgggcctccccgccgccccgccgcccgcgcccgccgccccggcctcgccccgcatgcgctcgcccgcccgccaggaggagcgcgccagccccgcgggcaagttctccagctccttcgccatcgacagcatcctgcgcaagcccttccgcagccgccgcctcagggacacggcccccgggacgacgcttcagtggggcgccgcgccctgcccgccgctgcccgcgttccccgcgctcctccccgcggc

SEQ ID NO: 346772 - DNA, 123 bp, Homo sapiens; identical to SEQ ID NO: 345205
  chr6:2841503-2841626
  hyper

SEQ ID NO: 346773 - DNA, 732 bp, Homo sapiens; identical to SEQ ID NO: 345206
  chr6:2841627-2842359
  hyper

SEQ ID NO: 346774 - DNA, 229 bp, Homo sapiens
  chr6:5084683-5084912
  hyper
cgtgccgcgtgggcgccggccccacggggccccctctccgccctccctgcgggatcccggggcgcggactcgcgggcgcgtcgggcgggacagggggaggggcgggacgtgctcccgggcctggcgcgaatggcctccggccgctctcggctgcgggccatggccgctccccggcgcgtccccacacggtccccgccccagtctggccgcagcccaccccgcgccgcca

SEQ ID NO: 346775 - DNA, 665 bp, Homo sapiens
  chr6:5084942-5085607
  hyper
cccggctttcggaagagcagagcggagcgcgcctgaccgagtcaggcttccgagtgggattggaacccggggcgccctgaagtttggggaaagcaggagcagaagggaagggatgcgctccccgctctccggcggcgcggaatgggcctccttccagcctctgcgtaggcaagatttccccagttgcgcgctgcaccggggactccccagcccgtgaggcagccaagaggagagcgctcagtgaccctctgggggcagagccgtcaggccaagttcatgggcaggaagactttgtgcacgtgggggtctctgaaggttgagcgcgagctctgcacccccacttcgaggcactcaagaagcggaacagacgcgagccccgccgggggtgcgggtgagggctgcagggagcccgcgaacgacagaaagtcgccccccgcattccaccggagcactcgggaacacggcttccaggtgtcccagcggccgcgcctccccgcccccggccctcccccgtcgcgggcaggttcaaccgggaggcggcgtggccccggagccggccccaggcccgcatcctcctcccacttcgccctgggcagccgcagctaaaagccggaggctccaaagtggaactacgttgtcttgtcgagcctggggcgactcgcctc

SEQ ID NO: 346776 - DNA, 227 bp, Homo sapiens; identical to SEQ ID NO: 345207
  chr6:10417842-10418069
  hyper

SEQ ID NO: 346777 - DNA, 77 bp, Homo sapiens
  chr6:11043624-11043701
  hyper
cggacacgggtgaacacacacacacacacacacacacacacagcttactgtcaggcagttcatcggacacgggtgaa

SEQ ID NO: 346778 - DNA, 79 bp, Homo sapiens
  chr6:21665543-21665622
  hyper
cgaagttgggatcagggtcgaggggtgggggaccatgtggatggggtcccaattctggaggttgagaatgactggaagg

SEQ ID NO: 346779 - DNA, 268 bp, Homo sapiens; identical to SEQ ID NO: 200312
  chr6:21666189-21666457
  hyper

SEQ ID NO: 346780 - DNA, 351 bp, Homo sapiens; identical to SEQ ID NO: 200313
  chr6:21666588-21666939
  hyper

SEQ ID NO: 346781 - DNA, 873 bp, Homo sapiens; identical to SEQ ID NO: 345210
  chr6:24910930-24911803
  hyper

SEQ ID NO: 346782 - DNA, 213 bp, Homo sapiens; identical to SEQ ID NO: 200330
  chr6:26198924-26199137
  hyper

SEQ ID NO: 346783 - DNA, 367 bp, Homo sapiens; identical to SEQ ID NO: 283855
  chr6:26204318-26204685
  hyper

SEQ ID NO: 346784 - DNA, 204 bp, Homo sapiens; identical to SEQ ID NO: 200332
  chr6:26205298-26205502
  hyper

SEQ ID NO: 346785 - DNA, 55 bp, Homo sapiens; identical to SEQ ID NO: 345214
  chr6:26205712-26205767
  hyper

SEQ ID NO: 346786 - DNA, 223 bp, Homo sapiens; identical to SEQ ID NO: 200335
  chr6:26216853-26217076
  hyper

SEQ ID NO: 346787 - DNA, 209 bp, Homo sapiens; identical to SEQ ID NO: 200336
  chr6:26217156-26217365
  hyper

SEQ ID NO: 346788 - DNA, 312 bp, Homo sapiens; identical to SEQ ID NO: 345216
  chr6:26217578-26217890
  hyper

SEQ ID NO: 346789 - DNA, 114 bp, Homo sapiens; identical to SEQ ID NO: 345217
  chr6:26233864-26233978
  hyper

SEQ ID NO: 346790 - DNA, 113 bp, Homo sapiens
  chr6:26250001-26250114
  hyper
gcctcccaggtccaagcgattctccttcctcagcccccgatatagctgggactgcaggagggcgccaccacacccgtatttttgttttttggttttgtacttttagtgaagac

SEQ ID NO: 346791 - DNA, 129 bp, Homo sapiens; identical to SEQ ID NO: 345218
  chr6:26271217-26271346
  hyper

SEQ ID NO: 346792 - DNA, 326 bp, Homo sapiens; identical to SEQ ID NO: 283871
  chr6:26272105-26272431
  hyper

SEQ ID NO: 346793 - DNA, 70 bp, Homo sapiens; identical to SEQ ID NO: 345220
  chr6:26331633-26331703
  hyper

SEQ ID NO: 346794 - DNA, 323 bp, Homo sapiens; identical to SEQ ID NO: 200349
  chr6:26331811-26332134
  hyper

SEQ ID NO: 346795 - DNA, 243 bp, Homo sapiens; identical to SEQ ID NO: 345222
  chr6:26332283-26332526
  hyper

SEQ ID NO: 346796 - DNA, 278 bp, Homo sapiens; identical to SEQ ID NO: 345223
  chr6:26522013-26522291
  hyper

SEQ ID NO: 346797 - DNA, 247 bp, Homo sapiens; identical to SEQ ID NO: 200355
  chr6:26577475-26577722
  hyper

SEQ ID NO: 346798 - DNA, 60 bp, Homo sapiens; identical to SEQ ID NO: 200363
  chr6:27100389-27100449
  hyper

SEQ ID NO: 346799 - DNA, 60 bp, Homo sapiens; identical to SEQ ID NO: 200364
  chr6:27101049-27101109
  hyper

SEQ ID NO: 346800 - DNA, 87 bp, Homo sapiens; identical to SEQ ID NO: 345226
  chr6:27101206-27101293
  hyper

SEQ ID NO: 346801 - DNA, 204 bp, Homo sapiens
  chr6:27560506-27560710
  hyper
cggtcactgtaggtcttcagtcattcatgagaggtgttaaagcacctctaacaagtgcaagatgcagtgttttggaggaaaaaaacaggcacctagcagaggatggtttcgatccatcgacctctgggttatgggcccagcacgcttccgctgcgccactctgctgtccccttcagctgttgtgccttatctccaagtaactta

SEQ ID NO: 346802 - DNA, 351 bp, Homo sapiens
  chr6:27798705-27799056
  hyper
cgggaggctacagtgagccatgatgacactgcactacagtctgcgcgacggcccatgtcagtaagctctggagcacctgaaacaagttgtgttgggtattttatttactggagagcgattagtgactgatgcctacttacagcgactagagacgcatgctccgatagcagcacaaactcagcaggcgcgaacaaatggtaaagagaaactgggcaaacaagcatcacggctcctcagctgagaaagtgggggccctaaaaagggccttttgttgatagaaagggacgctcaaccaccgaaaccgtagagggtgcggccctggcgcttgagcgcgtagaccacatccatggc

SEQ ID NO: 346803 - DNA, 304 bp, Homo sapiens
  chr6:28249105-28249409
  hyper
cgaagacagacatttaccactgtgttggttttcaatcgaaatgatgtacataaatttggggcgtgcttgcaccgtccgaatgggcctggggtccggcggcggagagtgacctgggcggggcaggaggtggcagcgggggtcctcccggctcaccagagagacgagcggccgtgctcctagagaggcagggaacccgccagactccgccactccgctgcgggcgcggcgcagggagaagcttttgtacccgcccagctgctggaggcgccggcagcgcccgccagacccgccagcccagcggccc

SEQ ID NO: 346804 - DNA, 125 bp, Homo sapiens
  chr6:28249579-28249704
  hyper
tgggtgtaatctcagaaaaatacattcaggggcgcgcctgagggtgctggctgctggcatctcaggtgctttacgtgcattcgtgaagaagcccatcagtatttcttgaataccaggtacgtgcc

SEQ ID NO: 346805 - DNA, 190 bp, Homo sapiens; identical to SEQ ID NO: 345227
  chr6:28303261-28303451
  hyper

SEQ ID NO: 346806 - DNA, 73 bp, Homo sapiens; identical to SEQ ID NO: 200404
  chr6:28303489-28303562
  hyper

SEQ ID NO: 346807 - DNA, 208 bp, Homo sapiens; identical to SEQ ID NO: 200405
  chr6:28303607-28303815
  hyper

SEQ ID NO: 346808 - DNA, 150 bp, Homo sapiens; identical to SEQ ID NO: 345230
  chr6:28304301-28304451
  hyper

SEQ ID NO: 346809 - DNA, 248 bp, Homo sapiens; identical to SEQ ID NO: 332760
  chr6:33538968-33539216
  hyper

SEQ ID NO: 346810 - DNA, 463 bp, Homo sapiens; identical to SEQ ID NO: 345231
  chr6:36098070-36098533
  hyper

SEQ ID NO: 346811 - DNA, 369 bp, Homo sapiens; identical to SEQ ID NO: 345232
  chr6:37666475-37666844
  hyper

SEQ ID NO: 346812 - DNA, 218 bp, Homo sapiens; identical to SEQ ID NO: 345233
  chr6:37666866-37667084
  hyper

SEQ ID NO: 346813 - DNA, 85 bp, Homo sapiens
  chr6:41605681-41605766
  hyper
cgctgtgggcgggtggcctgggagcccagatccctgtccctggcttaggaccccgggaggagaccgagggggtgggtaaaacgtg

SEQ ID NO: 346814 - DNA, 62 bp, Homo sapiens; identical to SEQ ID NO: 345234
  chr6:42928259-42928321
  hyper

SEQ ID NO: 346815 - DNA, 76 bp, Homo sapiens; identical to SEQ ID NO: 345235
  chr6:42928454-42928530
  hyper

SEQ ID NO: 346816 - DNA, 176 bp, Homo sapiens
  chr6:44044201-44044377
  hyper
cggggcctgaaggctaacttctggccttcctgcttcgggaaatcattccaataaccgggaaaaaagggggcccgaggacagagcccctgccgggccccagggggagtgtcgtcggctcctttgcgtcgccggccggcggcgtggcggggactctggccggcagcctcccgcgccgt

SEQ ID NO: 346817 - DNA, 97 bp, Homo sapiens
  chr6:44044450-44044547
  hyper
gtcgcgggcgccgcggcagggaaatgtgggggcgggccggcgcgccccctcccccccgcctacgctggcccattcataaaacctgcaggcgctgccc

SEQ ID NO: 346818 - DNA, 372 bp, Homo sapiens; identical to SEQ ID NO: 345236
  chr6:46097250-46097622
  hyper

SEQ ID NO: 346819 - DNA, 521 bp, Homo sapiens; identical to SEQ ID NO: 345237
  chr6:46097694-46098215
  hyper

SEQ ID NO: 346820 - DNA, 99 bp, Homo sapiens; identical to SEQ ID NO: 332801
  chr6:47382546-47382645
  hyper

SEQ ID NO: 346821 - DNA, 43 bp, Homo sapiens
  chr6:50805695-50805738
  hyper
cgaaaaatggggggagatctttgcgagaaaggctagaaaaaat

SEQ ID NO: 346822 - DNA, 636 bp, Homo sapiens
  chr6:52227115-52227751
  hyper
cggggcccgagctcgggaggcggggacgtcaggatcgcggcgttggggagtcctcgcaccccgagctcagaggggaggtccagagtcgcagcgttgggaacctgaggccaggggccggagtttagggccccgatgttgagtctccgaatccaagcccggaaggggggacgacgggttaggatgctggggagccctggagctctgaacggctgtagtggggtggccaggactgcgatgctggggagtcatggagcctgagcctggagagctggcgggggtgtggggaccgcgatgttgggaaggctgagcccggagggcgggagattcaggaccaagacgtgggggagtccgacagggcagaacgaggggcgtcctgtccgcatttgtggggcgccctccgcagggcggaggggaacggaacctgggaggggagtgcggaggagaggaagcccggggcggtagggagagcccgaggaagggcagcccgaggtaggggaaccccggaaagagtagggtgggtctaggcatgtgctttcgccggggaaagatggagggggcttctctgagagggtgggcgcgaggagcggagttgtgatgggaaccgccggcagctggctaatgggcggatgctggggc

SEQ ID NO: 346823 - DNA, 132 bp, Homo sapiens; identical to SEQ ID NO: 200475
  chr6:52227876-52228008
  hyper

SEQ ID NO: 346824 - DNA, 119 bp, Homo sapiens; identical to SEQ ID NO: 345238
  chr6:53212372-53212491
  hyper

SEQ ID NO: 346825 - DNA, 215 bp, Homo sapiens; identical to SEQ ID NO: 200479
  chr6:53213970-53214185
  hyper

SEQ ID NO: 346826 - DNA, 189 bp, Homo sapiens
  chr6:56716695-56716884
  hyper
aaatgactggcccaacaatgaagccagaatcaacagccttcctgttacaaacctatagtatttggctcccccaccaggacagtagaaatattttccattactagcctgctgcttaattcatcaatgcaactaactcgaagtttcgaaaacaaagcacaaatgcaggatgttgagtcccaactcctttcc

SEQ ID NO: 346827 - DNA, 248 bp, Homo sapiens; identical to SEQ ID NO: 345240
  chr6:56818408-56818656
  hyper

SEQ ID NO: 346828 - DNA, 294 bp, Homo sapiens; identical to SEQ ID NO: 200490
  chr6:69344649-69344943
  hyper

SEQ ID NO: 346829 - DNA, 173 bp, Homo sapiens
  chr6:70576786-70576959
  hyper
cgtgttcctatgttcacatgatgcaggcttcatgcgttacacctaagttctaggtggtttttctggctatgtgtgtctgtgaagcggaactatggagcactgctgatgcgggtagggacagacatcaaatacattacaaaaaaaatggggggttaaaggagtaaaacaaactc

SEQ ID NO: 346830 - DNA, 298 bp, Homo sapiens; identical to SEQ ID NO: 200494
  chr6:70576997-70577295
  hyper

SEQ ID NO: 346831 - DNA, 226 bp, Homo sapiens; identical to SEQ ID NO: 200502
  chr6:72596315-72596541
  hyper

SEQ ID NO: 346832 - DNA, 163 bp, Homo sapiens
  chr6:73329621-73329784
  hyper
cgtgtccctgtgtcctgccttcctgagacttcttgcctgcacgcggggcccagccgcgccagagagatggaagtgactttacctacccagcgaaagtagcagtctgcaacaaggaaaacagctaagttaagaggaagtggttttcattttactgcttgcagaa

SEQ ID NO: 346833 - DNA, 82 bp, Homo sapiens
  chr6:73330126-73330208
  hyper
gctcccagctagcttctgctgcccagaggcttggggggaaggagggagggaagcaggctcctgctggtgaccaggagcaggc

SEQ ID NO: 346834 - DNA, 40 bp, Homo sapiens
  chr6:74019373-74019413
  hyper
cgtattctgagactgtttcaatcacaaataagactcggaa

SEQ ID NO: 346835 - DNA, 102 bp, Homo sapiens
  chr6:74020094-74020196
  hyper
gaacactccccagggctgccaggccagcgctttccaggggctccagcctacagcgccgccacctggggctggagccagaaacgcaggggccgggggctcacc

SEQ ID NO: 346836 - DNA, 280 bp, Homo sapiens; identical to SEQ ID NO: 332855
  chr6:88678327-88678607
  hyper

SEQ ID NO: 346837 - DNA, 705 bp, Homo sapiens; identical to SEQ ID NO: 345242
  chr6:90121688-90122393
  hyper

SEQ ID NO: 346838 - DNA, 74 bp, Homo sapiens; identical to SEQ ID NO: 345243
  chr6:90122423-90122497
  hyper

SEQ ID NO: 346839 - DNA, 255 bp, Homo sapiens
  chr6:90142647-90142902
  hyper
cgcggaaaacctcaccctactataggcccccttcctcccactcttcagaaggcggtggccccacccaggagagggctgcagatcggggccagccccagggcctccgcggtgccacctctctctcgcgagggtccctgccgtgccccggctcgccgctgggaggcgctgcggcaccggcgtaggagccgccggcaggggtggggcggggccggcgggacggggcagagggccctgcggcggcggacgcggcgggct

SEQ ID NO: 346840 - DNA, 372 bp, Homo sapiens
  chr6:91005702-91006074
  hyper
gagggttaaggaggaggccgcccggcctggagctgggatcgcaggctgggggccgggacacccgggcctcgccgggccgggggcagggccgcgggtctgacagctgctgcggctcgcgcggacgcgcgcctcctgcagcccgccctccccatgcctgacttattactctctgctcctcctccctctgctgttccaaaacacccttcgacgccagcaaaatacaatgcgcctcggccgccgtaaacagccgggagggagagcacacattcggcgcggcgcggccgccggctcggctcccacccccttcccgttcctagaaaatgccataaaagcgggcagggcgcggggagggcggctgcgcgcccggcggcc

SEQ ID NO: 346841 - DNA, 61 bp, Homo sapiens; identical to SEQ ID NO: 345244
  chr6:106443120-106443181
  hyper

SEQ ID NO: 346842 - DNA, 352 bp, Homo sapiens
  chr6:106533693-106534045
  hyper
cgttagcaggagaaacggaatgttacaacttttggggcggggggcggggaaacgtgcgttacatacacaacagcttgaggaccagacagctccactgtattacactagctgcaaaaacaatttaacttgctcttttgaagtaagatttgtgtcttttgtacctggggatttgagctgagaaatcagaaactgtgtaggtaaattttaagtttccttaatttaaggaacgtgcgccccctaattctgccgcgccaggaaggagggcgatctggagtgtttagaatacaatagagcccaagtaagcgttgaggttaagtgccttcaaagggaagtaagaagattccaagtcaat

SEQ ID NO: 346843 - DNA, 388 bp, Homo sapiens
  chr6:106534075-106534463
  hyper
ctcggcggctgtgctagcaatctgggggaaagccctgggctcggccaggtggtgttggccacgttggccacgcccccacttcgcgcagccgagtggctaaggaaatcttaagcagggaggggaagccagacggttaacacagacaaagtgctgccgtgacactcggccctccagtgttgcggagaggcaagagcagcgaccgcggcacctgtccgcccggagctgggacgcgggcgcccgggcggccggacgaagcgaggagggaccgccgaggtgcgcgtctgtgcggctcagcctggcgggggacgcggggagaatgtggactgggtagagatgaacgagacttttctcagatgttggatatttgcttggaaaaacgtgtgggtac

SEQ ID NO: 346844 - DNA, 104 bp, Homo sapiens; identical to SEQ ID NO: 345245
  chr6:106958136-106958240
  hyper

SEQ ID NO: 346845 - DNA, 404 bp, Homo sapiens; identical to SEQ ID NO: 345246
  chr6:106958337-106958741
  hyper

SEQ ID NO: 346846 - DNA, 333 bp, Homo sapiens; identical to SEQ ID NO: 200605
  chr6:106959606-106959939
  hyper

SEQ ID NO: 346847 - DNA, 262 bp, Homo sapiens; identical to SEQ ID NO: 200606
  chr6:106960046-106960308
  hyper

SEQ ID NO: 346848 - DNA, 155 bp, Homo sapiens; identical to SEQ ID NO: 345249
  chr6:106961023-106961178
  hyper

SEQ ID NO: 346849 - DNA, 314 bp, Homo sapiens; identical to SEQ ID NO: 200609
  chr6:107810308-107810622
  hyper

SEQ ID NO: 346850 - DNA, 128 bp, Homo sapiens
  chr6:107810665-107810793
  hyper
gggcggggcgcggggacctctccaaggggtctccagcctccgcgcactctgcggtggcccccggagggggaaactattctggcagctcagtggggggaagctcgtccgggctgtggtttcctttcccc

SEQ ID NO: 346851 - DNA, 264 bp, Homo sapiens
  chr6:111409052-111409316
  hyper
cgggaccctcggacagccccgaggcggctgtcgagaaggtggaggtggagctggcggggccggcgaccgcggagccccatgagccccccgaaccccccgagggcggctggggctggctggtgatgctggcggccatgtggtgcaacgggtcggtgttcggcatccagaacgcttgcggggtgctcttcgtgtccatgctggaaaccttcggctccaaagacgatgacaagatggtctttaagacaggtgaggcgcggcgcccgc

SEQ ID NO: 346852 - DNA, 273 bp, Homo sapiens; identical to SEQ ID NO: 200623
  chr6:111409368-111409641
  hyper

SEQ ID NO: 346853 - DNA, 945 bp, Homo sapiens
  chr6:112193858-112194803
  hyper
cgggggcggagtctgggccagcctcgcccccaagccaattcccattttcacccggcgcccgcttgcgggcgaggaaatggggtccccatccccgcgctgcctcggggccgcaccccgcaggggtgtcctccggtgcaaccgcgggaagaccccaagcaccgactccccggcagccccgcggagcgccctggcggccaagggaccgcagcaccgggccctgcggcgggggcggcgtgcgcgggggcgccggcggccgggcttctccgcagcatccccgaggcctcccgcgacgcatccccgccgcctgcttacctgcgcggcgctgaggctccggagcccactcacatggtcctctccccgccctcctccggcgcggccgaggcggctccggggggtccccggcgggcccgggagccggtgggccttccgagagcaccgagggggcggcgccggggtgtccccggcccggcggccgaatccctccctggcgcgggcggcggccgccgggcggtgcggcgcgggcggcggctttgtgtgcgcccgggcggtcctcggtgcgctgggagaagcgcggcgcgcccgggcgggagaggacgcgccgctcgcacaacaacctcgcctctactctcgccgccgggcggcgggcgggtctcgaaggccttcggctcgcggcgacccctcctcctcgcccgcggcagccccctcctcgccggctccgctcctgacagatggcgcaactgcaacgacgcgccgccgccaccagcgcggctgctcgctgctactcttgctgatgctctgcccctccagctccggaggggagcgaggagggggcggggcgcgcctcgagagtgacaggcccggctgccctatcaaagagccccttgggagctgcgagccgcaaccattggcgcctggggcgtgggcgggacggcagtaggtggggcc

SEQ ID NO: 346854 - DNA, 58 bp, Homo sapiens
  chr6:126068722-126068780
  hyper
cgtttggacgcgcccgctaattgcccgtgtggcaaacatgagttgcacctgcaggcat

SEQ ID NO: 346855 - DNA, 155 bp, Homo sapiens; identical to SEQ ID NO: 345250
  chr6:126069942-126070097
  hyper

SEQ ID NO: 346856 - DNA, 160 bp, Homo sapiens
  chr6:134639003-134639163
  hyper
gatgcgctcctggaggcggcttgagagaggagagttgtttttgattgtgcaagttccagtgggagctgtagttaagcagctgagagaaggagtaagaaagagcagaagccagagggagggagggagaacagcgccagaaaggcagagggagcgagaaggc

SEQ ID NO: 346857 - DNA, 330 bp, Homo sapiens; identical to SEQ ID NO: 345251
  chr6:137112609-137112939
  hyper

SEQ ID NO: 346858 - DNA, 61 bp, Homo sapiens; identical to SEQ ID NO: 345252
  chr6:137112940-137113001
  hyper

SEQ ID NO: 346859 - DNA, 368 bp, Homo sapiens; identical to SEQ ID NO: 200679
  chr6:143247975-143248343
  hyper

SEQ ID NO: 346860 - DNA, 528 bp, Homo sapiens
  chr6:146136035-146136563
  hyper
cgcagcgtcgtggctagagtagggtctggagagagctcccactgtggcgagtcctgtcgttggattcccgcggcgccccgtaaggctccgccccggcggtgctaccaaaccctgttcgattttagaatcgtacattcccagagggaatcctagacccctcattttacagttgaggaaacaggcccaagtagcatgacttgttcgcgccgctagtcgaaggagcagcagccccgatcccttgactctggggcactgctttccctttagctcatttttggaggaaatgggtgcgcccttgctcgacctttggtgattgccgccacaggccttcccgccggctaactcagcgtgcccaagtcccgtgacttagtgccaggacggtgctgtgacccgttatcccctgtcgggttttacctccccccgggagagctcagccctggatcccggcgggcggcggagcctctctggagcccggacgggacagcccaccagggtctgcttctgtgaggggccgaggcgtcattccgc

SEQ ID NO: 346861 - DNA, 232 bp, Homo sapiens
  chr6:146136564-146136796
  hyper
aaggtaattagctggggaggggacttgaagccgcttttgcagtgtaccttacatatgactggggagtaaagaaatcccacagggctgtatcaaagaatggatggatgtccacgcccccgctaccaccaccaagccttggtctacggccgagggacagtgattccgagctctgggtgttgggagccgctcacccgcccccacccctctgtcggggactcctgcccaccccgtc

SEQ ID NO: 346862 - DNA, 258 bp, Homo sapiens; identical to SEQ ID NO: 200697
  chr6:149068930-149069188
  hyper

SEQ ID NO: 346863 - DNA, 42 bp, Homo sapiens; identical to SEQ ID NO: 332956
  chr6:150962790-150962832
  hyper

SEQ ID NO: 346864 - DNA, 181 bp, Homo sapiens; identical to SEQ ID NO: 345254
  chr6:152622733-152622914
  hyper

SEQ ID NO: 346865 - DNA, 520 bp, Homo sapiens
  chr6:158402113-158402633
  hyper
cgtacacgcgcggacacgtgccggtgtccagagccggtgggagaggcgctgtcaccatctgacaggagaggaaggtggagcgcagagaagtcagggtcacgtggtaagtgggggtcgtggtctggggatcacggctccaggtctcttcgcgacaacgcaccgttgacccccaacacctctccctggcggggtcggtgaccgcaacagcctccgggatagaacgctagtgaaaggtaacctttctccagcccgctccacgcgctccgcacccgctaagcgcctccgcgaattaactcaggcctccgcgccgaagtaggcgcagttatgaccccgcttccccgcagggagaccgaggcacgcagggtcgaaaggactcgtccagggtcgcaggagccgaccacacagggaggcgcagcgcccccggcgggaacagtcagcgggtccagcctggcggactcccgggccgggctgcccatataaggctgcgggcggccggcatcgcagccaggctcccggggtc

SEQ ID NO: 346866 - DNA, 41 bp, Homo sapiens
  chr6:159591277-159591318
  hyper
tcggctccaggcggcaggaggcccgcgcgcccggggggaac

SEQ ID NO: 346867 - DNA, 108 bp, Homo sapiens
  chr6:163834157-163834265
  hyper
cgtagatttagggactgccgacttctatagatcaaggacttcattggtgcagctgaggaaattcttccaaacaagtctaaatgttggaaatccaccaaactgcagaga

SEQ ID NO: 346868 - DNA, 96 bp, Homo sapiens; identical to SEQ ID NO: 200737
  chr6:163834987-163835083
  hyper

SEQ ID NO: 346869 - DNA, 666 bp, Homo sapiens; identical to SEQ ID NO: 284617
  chr6:163835131-163835797
  hyper

SEQ ID NO: 346870 - DNA, 291 bp, Homo sapiens; identical to SEQ ID NO: 200740
  chr6:163835906-163836197
  hyper

SEQ ID NO: 346871 - DNA, 238 bp, Homo sapiens; identical to SEQ ID NO: 200741
  chr6:163837231-163837469
  hyper

SEQ ID NO: 346872 - DNA, 506 bp, Homo sapiens; identical to SEQ ID NO: 345259
  chr6:170124879-170125385
  hyper

SEQ ID NO: 346873 - DNA, 95 bp, Homo sapiens
  chr7:1705153-1705248
  hyper
agcggggcgggccaggaggagggggcgaggccgccactcggcttcccacgccgcccccgcggctggctccaacttcccctccggagcccccctcc

SEQ ID NO: 346874 - DNA, 132 bp, Homo sapiens; identical to SEQ ID NO: 284748
  chr7:4784755-4784887
  hyper

SEQ ID NO: 346875 - DNA, 635 bp, Homo sapiens
  chr7:5632268-5632903
  hyper
cggcgaggacaccggtggggtgagagcaccggcggggcagcagcgggggccgcagcgccgggtccctcggcccggggcccctcccgcgcggagccaggggcgggacaggggggcgtggcctggtggcgctgacgtcacctcgcctataaaatgtccggggcgccgctagctgggctttgtggagcgctgcggagggtgcgtgcgggccgcggcagccgaacaaaggagcaggggcgccgccgcagggacccgccacccacctcccggggccgcgcagcggcctctcgtctactgccaccatgaccgccaacggcacagccgaggcggtgcagatccagttcggcctcatcaactgcggcaacaagtacctgacggccgaggcgttcgggttcaaggtgaacgcgtccgccagcagcctgaagaagaagcagatctggacgctggagcagccccctgacgaggcgggcagcgcggccgtgtgcctgcgcagccacctgggccgctacctggcggcggacaaggacggcaacgtgacctgcgagcgcgaggtgcccggtcccgactgccgtttcctcatcgtggcgcacgacgacggtcgctggtcgctgcagtccgaggcgcaccggcgctacttc

SEQ ID NO: 346876 - DNA, 322 bp, Homo sapiens; identical to SEQ ID NO: 345260
  chr7:8476750-8477072
  hyper

SEQ ID NO: 346877 - DNA, 104 bp, Homo sapiens
  chr7:18125868-18125972
  hyper
cgttccaggtaccgccccacaatgctacctcctctttaaaagaagtcgttcagctggggcgggctggcgctgcgtggcgcgcacctgagcggccggggctcccc

SEQ ID NO: 346878 - DNA, 218 bp, Homo sapiens; identical to SEQ ID NO: 200838
  chr7:18126225-18126443
  hyper

SEQ ID NO: 346879 - DNA, 59 bp, Homo sapiens; identical to SEQ ID NO: 200840
  chr7:19156644-19156703
  hyper

SEQ ID NO: 346880 - DNA, 140 bp, Homo sapiens; identical to SEQ ID NO: 345262
  chr7:22893437-22893577
  hyper

SEQ ID NO: 346881 - DNA, 1088 bp, Homo sapiens; identical to SEQ ID NO: 345263
  chr7:22893607-22894695
  hyper

SEQ ID NO: 346882 - DNA, 209 bp, Homo sapiens
  chr7:23052818-23053027
  hyper
cgaggattcccgagtatgttaaaatgagcctcaggagaggaataactcatagaaagaaggggcaagggctcaagaagagatcttcagcgaaataaccaaggaaggaagcgtggctgctgtctgaacctctccgccctgcaggggaccaaagaccgactcgggccaacgctgctctccagggggcgagggcggggggtcgacagtgacca

SEQ ID NO: 346883 - DNA, 595 bp, Homo sapiens
  chr7:23053080-23053675
  hyper
gagtgggagaggaggcagaggccagagcatccgccgcggcagggaggggacggggggctcccgccccaggcccacccggcagaggggcggccggtggggccgaggcggcggcacccgggtcacagcaggaggctggactgctcctcgccgggaaggaaagacccgagtcgcgcgcacaaagctgccgccctccaggcagcgggcaggctgcgcccaacttcggggcgagcagcgccggccgcagcccacccgcccgccagccgcccccagcgccccgcgccgcctcgcacccacccatggcgcctcgcgcgggagccgttacccccagtggagccgcggccccagggacaaagtcccggtcctgtcctcgccgccgcctcgccccggctcctccctgacaaaaaaaagttatccgttgccggacgccctgggggcccggcgtgggtctctcggctggactcaccagggcggctgccggagctccacctgcaggacctcgactcgtgaggctctcagcgacagcgacggaggctgctctgcttcctcccgagtagcagcaccacctgctccccttcttcctagcagaacgggtccc

SEQ ID NO: 346884 - DNA, 107 bp, Homo sapiens
  chr7:23287654-23287761
  hyper
ctgcccgggtttggggttggacaggctcgggctccccgccagcctaggggctgggtctccagtggctttgctccatttcctcatttccttcaaaacgaggagttttc

SEQ ID NO: 346885 - DNA, 228 bp, Homo sapiens
  chr7:23513246-23513474
  hyper
cgcccggcttgggaccagcctggagtctcaagccgaaacccctcacgcgggtgggcacacaatgcccggcgtgtcgcctgggcctcctcggaggtgctttaacaggctcttgcgcttttgaacggccctcctggactctgatctgtttaaactagaggcgttaataagtgataacctggatctgccctccttggaagctgcctgcctatattttattgtttaaaataa

SEQ ID NO: 346886 - DNA, 53 bp, Homo sapiens; identical to SEQ ID NO: 345264
  chr7:23514425-23514478
  hyper

SEQ ID NO: 346887 - DNA, 221 bp, Homo sapiens; identical to SEQ ID NO: 333064
  chr7:23570157-23570378
  hyper

SEQ ID NO: 346888 - DNA, 195 bp, Homo sapiens; identical to SEQ ID NO: 284882
  chr7:25896938-25897133
  hyper

SEQ ID NO: 346889 - DNA, 109 bp, Homo sapiens; identical to SEQ ID NO: 345266
  chr7:25897246-25897355
  hyper

SEQ ID NO: 346890 - DNA, 295 bp, Homo sapiens
  chr7:25901811-25902106
  hyper
cgtttccggaagacactctacacctctccgcctcttcataaatatttaaaccgcttctttctagatttgtcatttaaatctactagggaatgtgcctcaagggctcatctttcactgggtcgctcacacagaggtggggcgagagggaggaggcgcattagccctgcgctctcatttgcttaaacggccttcttacgtcatcgtaagcctaagccaatccgtgaagtgcactttgacaagctacccgcccctaatttgtcctttcaccgccagcctaagccaatagtgtggctgc

SEQ ID NO: 346891 - DNA, 207 bp, Homo sapiens; identical to SEQ ID NO: 200882
  chr7:25902138-25902345
  hyper

SEQ ID NO: 346892 - DNA, 224 bp, Homo sapiens; identical to SEQ ID NO: 345267
  chr7:26192423-26192647
  hyper

SEQ ID NO: 346893 - DNA, 111 bp, Homo sapiens; identical to SEQ ID NO: 200885
  chr7:26192748-26192859
  hyper

SEQ ID NO: 346894 - DNA, 90 bp, Homo sapiens; identical to SEQ ID NO: 345269
  chr7:27135176-27135266
  hyper

SEQ ID NO: 346895 - DNA, 142 bp, Homo sapiens; identical to SEQ ID NO: 345270
  chr7:27136790-27136932
  hyper

SEQ ID NO: 346896 - DNA, 371 bp, Homo sapiens; identical to SEQ ID NO: 284934
  chr7:28450240-28450611
  hyper

SEQ ID NO: 346897 - DNA, 496 bp, Homo sapiens; identical to SEQ ID NO: 200916
  chr7:29234008-29234504
  hyper

SEQ ID NO: 346898 - DNA, 159 bp, Homo sapiens; identical to SEQ ID NO: 345272
  chr7:29234886-29235045
  hyper

SEQ ID NO: 346899 - DNA, 292 bp, Homo sapiens
  chr7:29602717-29603009
  hyper
cggttcacttcctgcagtggctcagggctggatttacactgccctcgttgggtggctgtccatggacttccaggcctgaaagaaggaaattcacatcctcactgagtcgtgttaagagtctcagactggcaggttgtggtggttaagaccgtagaagctagagtcaggccccctgggttccaaccctgctctgccacgtaccagacaggcaaacctgagcaaccattttcccgtgctagggtttcctcgcctgtcgagtgagaataataataataacaatacctacctccta

SEQ ID NO: 346900 - DNA, 168 bp, Homo sapiens; identical to SEQ ID NO: 345273
  chr7:37960958-37961126
  hyper

SEQ ID NO: 346901 - DNA, 408 bp, Homo sapiens; identical to SEQ ID NO: 200954
  chr7:42276904-42277312
  hyper

SEQ ID NO: 346902 - DNA, 51 bp, Homo sapiens
  chr7:42927739-42927790
  hyper
cgcttaaactttcacactgcggttgtgtcactgaagcagtgcctgaaatct

SEQ ID NO: 346903 - DNA, 412 bp, Homo sapiens
  chr7:42928175-42928587
  hyper
agtggtaggaggatgtgttccctttgcagaatcagaccccctcctgggactgtggggaccctctgtcgccggcctccattggaggatgcgttgtccctggagctgggtgcgctgttgcgtgacctggggcctgggtggtgggcgggcctgtccatggcaaagggcacggctgcgcgctacttcccgagaacccgccagcaggctcttgggaagcagcgatttctccttagtcacagtcagagagggtgatgcgacacactgggcttcactgtgctcgtgaagcggagccagggtgaaaggatcatatggcctaaccctaaccctaatgggagtaacttcacctgcgtcccacaggccccgcaagagtgacgctgccaggcaggcgccgccctgttcggttcctgctgctgtc

SEQ ID NO: 346904 - DNA, 369 bp, Homo sapiens
  chr7:44365258-44365627
  hyper
caccgccgccgccgccgcgcccgccccgcccgccgccccctgcacgcgccttccccgcgccctgcacacgctgctcctgcacccgcacccgcagggcaccggcgccctgcatctgcacacgcgccctgcacacacacccttgccccgcacccgcaacgcacctgcacctgcacctgcactcacacgcgcgcccgcccccgcccgcccccgcaccccacacacacacccgcgccctgtactgacgccttcatcctctacccgcaccacgcccgcacctcgcgcacgcaggccacttgctgctgccgacccctcgctctcacataacacagaagagtgcacataatgaacgcagcctcctctctctctctc

SEQ ID NO: 346905 - DNA, 102 bp, Homo sapiens; identical to SEQ ID NO: 345274
  chr7:50344738-50344840
  hyper

SEQ ID NO: 346906 - DNA, 294 bp, Homo sapiens; identical to SEQ ID NO: 200980
  chr7:55086689-55086983
  hyper

SEQ ID NO: 346907 - DNA, 56 bp, Homo sapiens
  chr7:64734140-64734196
  hyper
cgcactaatgctggggacggtgggtgtgggggagggtcctggagccttattcaatc

SEQ ID NO: 346908 - DNA, 60 bp, Homo sapiens; identical to SEQ ID NO: 200992
  chr7:64974448-64974508
  hyper

SEQ ID NO: 346909 - DNA, 51 bp, Homo sapiens
  chr7:65037711-65037762
  hyper
caaaaaggcgcggcggcgggggcaaaaagccgcggcggcggggaccaaaac

SEQ ID NO: 346910 - DNA, 181 bp, Homo sapiens
  chr7:70060834-70061015
  hyper
cggcaccgacaccgtccctttcacacggtactgagccgcgggctgcttcggggcggccctccccgccccgtgccttgccgggatggcagagcggatcagaagctgcgcgcgctctgcctgcgcgctttgcctgcgcgctttgccgccgcaacccgcgcagcagccaatccgctggtgcact

SEQ ID NO: 346911 - DNA, 238 bp, Homo sapiens
  chr7:70061149-70061387
  hyper
cgcgggccggggcggggctggggcgggcggcgcgcagctcctgggccgaggcatccgcgagccgcgggtagatcgctcgcgtctgatcgccgcccgggagctcccgcggagccggctgccaggactcgttccagctccagtgcggggctgcccgggcgtccagaggcggcggacggcgtgccggcaagtttccccggcacctgccagtgcccgcgaacccacctcggaagccagaccc

SEQ ID NO: 346912 - DNA, 106 bp, Homo sapiens
  chr7:76751570-76751676
  hyper
cggttggcttgactaggcgatgtaaacatcagctgcgtaatccccaggggcaagttgggatttgaaagctctgaactctgacctggaccccttgcctaagtccacc

SEQ ID NO: 346913 - DNA, 230 bp, Homo sapiens
  chr7:76751716-76751946
  hyper
gtggaaagtcgcagagctccgcctcttagaaaccacatatcccaggaggcaatgcgcaggggagcacgggtaagagggcaggtgttagaatcgctggaaaggcgggcgccctttgtttcaagaccattggctattggaggggcggtacatgggaggccactggccaatgggaagcacggaagggggcaacgagggtaaagctgcatggtcaccttggataccaaggacgc

SEQ ID NO: 346914 - DNA, 45 bp, Homo sapiens
  chr7:87258398-87258443
  hyper
tgagcgcgcagctccttggacaggggcccgggtctggacaccgtc

SEQ ID NO: 346915 - DNA, 77 bp, Homo sapiens; identical to SEQ ID NO: 201060
  chr7:98971600-98971677
  hyper

SEQ ID NO: 346916 - DNA, 396 bp, Homo sapiens
  chr7:98971810-98972206
  hyper
ggagggccaagggggcggggccgggctgccctggccacgcccggaccgcctgctccccgcccagggcctgcacagttggcgcccaccggcatcagcgtgaagggagctcctcgctggctgccgacggggctgcagggctcgctagccgctcacctgcgtgtgagcgcggagcccgcagtacccgccgtccgggctcagaggacgtgactccccgaccctgcgcccggcagtccccgggggccgtgcgcccggcccaggctcggaggtccagcccagcggcggctcaggctgcgcgcctggctcccagcctcagtttccccattggtaaagcattgacggtggttgcggacggcttctgcggacagagccttgggctccgacgtctgcgcgggtacc

SEQ ID NO: 346917 - DNA, 79 bp, Homo sapiens; identical to SEQ ID NO: 345275
  chr7:99155672-99155751
  hyper

SEQ ID NO: 346918 - DNA, 215 bp, Homo sapiens; identical to SEQ ID NO: 201064
  chr7:99156600-99156815
  hyper

SEQ ID NO: 346919 - DNA, 77 bp, Homo sapiens; identical to SEQ ID NO: 345277
  chr7:99156982-99157059
  hyper

SEQ ID NO: 346920 - DNA, 154 bp, Homo sapiens; identical to SEQ ID NO: 333194
  chr7:99680237-99680391
  hyper

SEQ ID NO: 346921 - DNA, 243 bp, Homo sapiens; identical to SEQ ID NO: 345279
  chr7:100167136-100167379
  hyper

SEQ ID NO: 346922 - DNA, 239 bp, Homo sapiens; identical to SEQ ID NO: 285218
  chr7:100167621-100167860
  hyper

SEQ ID NO: 346923 - DNA, 984 bp, Homo sapiens; identical to SEQ ID NO: 345281
  chr7:100806337-100807321
  hyper

SEQ ID NO: 346924 - DNA, 168 bp, Homo sapiens
  chr7:100815484-100815652
  hyper
cgttgaggccaacgaggcgcggggcctggcgctgcaggtgccacagcagctggctctgcacctgcgcgccgtcgctaccgaaggcgtcgatgttgagatagcgccaagtgccgtcccctccgtgcgggatggggaaggggcgcgtgcacagcgtgagcacgcgcgggc

SEQ ID NO: 346925 - DNA, 101 bp, Homo sapiens
  chr7:100815930-100816031
  hyper
ccctgcggggggcacgagtgagcgcggggagggggggcgcagcagggctggcgagcccggcgcctctcggcaggcatcttcactcccacgttcacgcccac

SEQ ID NO: 346926 - DNA, 251 bp, Homo sapiens; identical to SEQ ID NO: 201131
  chr7:106684920-106685171
  hyper

SEQ ID NO: 346927 - DNA, 221 bp, Homo sapiens
  chr7:106685920-106686141
  hyper
ctttgccccctctgcctgggccggttggggtgggcatctgctagaaagacaactttcgctgtggttggaggtatttcgcttagaggataccattgtgcataaagaaactggcccgcttggcgtcttctttcagcccttgtatttattaatggaatgtcgaaagagaaaaggagaaccgtgtttaatatgattggctttactgttgttaggacggtagattc

SEQ ID NO: 346928 - DNA, 229 bp, Homo sapiens; identical to SEQ ID NO: 201145
  chr7:113725472-113725701
  hyper

SEQ ID NO: 346929 - DNA, 68 bp, Homo sapiens
  chr7:113725858-113725926
  hyper
ggagcaggaggtggggagaagggtgggggtgggggaaggtctggcgtagcacaaacaagttctccagc

SEQ ID NO: 346930 - DNA, 277 bp, Homo sapiens; identical to SEQ ID NO: 333248
  chr7:127291492-127291769
  hyper

SEQ ID NO: 346931 - DNA, 81 bp, Homo sapiens; identical to SEQ ID NO: 345282
  chr7:129421203-129421284
  hyper

SEQ ID NO: 346932 - DNA, 281 bp, Homo sapiens; identical to SEQ ID NO: 201185
  chr7:129421349-129421630
  hyper

SEQ ID NO: 346933 - DNA, 169 bp, Homo sapiens
  chr7:129424378-129424547
  hyper
cgggatgctgaagcctgcaggagttgaatcagagggcgagctgcagagcggaggcactggggcggcgggccttgcccgggctcttggctcccatgaatcctcgatgagtagagaatcgtcgctcggagcaaaggcgagaggagagagaagcgtgcgggtgcggcccttg

SEQ ID NO: 346934 - DNA, 197 bp, Homo sapiens; identical to SEQ ID NO: 345284
  chr7:139929854-139930051
  hyper

SEQ ID NO: 346935 - DNA, 362 bp, Homo sapiens; identical to SEQ ID NO: 345285
  chr7:139930346-139930708
  hyper

SEQ ID NO: 346936 - DNA, 82 bp, Homo sapiens; identical to SEQ ID NO: 345286
  chr7:140771242-140771324
  hyper

SEQ ID NO: 346937 - DNA, 219 bp, Homo sapiens; identical to SEQ ID NO: 285467
  chr7:140771550-140771769
  hyper

SEQ ID NO: 346938 - DNA, 203 bp, Homo sapiens; identical to SEQ ID NO: 345288
  chr7:140771841-140772044
  hyper

SEQ ID NO: 346939 - DNA, 93 bp, Homo sapiens; identical to SEQ ID NO: 345289
  chr7:143105734-143105827
  hyper

SEQ ID NO: 346940 - DNA, 454 bp, Homo sapiens; identical to SEQ ID NO: 345290
  chr7:143105844-143106298
  hyper

SEQ ID NO: 346941 - DNA, 777 bp, Homo sapiens
  chr7:149570652-149571429
  hyper
cgaggccgttcctcccgcgtccgacccccgcggggccgtcaggttcggggcggcccaggctgcgggtccgcagggcgcttcgggccgagccggcgcggcgcgtgaagggcaggggacgccccgaaagaccgctggggtgggaccccaagctccaggggtctttggaaataagaatgcggcgtgacgttggctgtgcgggcgcggggctgacgcggaccctataacccatcgccgaaaccgggcggccgcgcccctattcctcggcatttctctctgtccgcggccctgctcagccaatcagcgagtgggctcctaggcaggtcctgagtgacagcgcggcgggctggatcaggagatgcgcgtgcgcggcccggcccggctgatcgcttcgggtgctcgactcctgttgcgcatgctcagcgcgctgcccggctggggacccgcgcacctgcagcgcccgctgctcggccctgcatcctgcctgggcatcctgcgcccggccatgacggcgcactcattcgccctcccggtcatcatcttcaccacgttctggggcctcgtcggcatcgccgggccctggttcgtgccgaagggacccaaccgcgggtaaggaaagcgcgcaggccctgcagacctctccaccccggccccctggcccggctcgcccctccgccccggggcggcggcttcctgctctgcagcgagcgtccgcaggagggacgccaggaccccggacgccacctctgaggtctctctgcacctgggtctctgacagcc

SEQ ID NO: 346942 - DNA, 846 bp, Homo sapiens; identical to SEQ ID NO: 333298
  chr7:150671471-150672317
  hyper

SEQ ID NO: 346943 - DNA, 112 bp, Homo sapiens
  chr7:150714968-150715080
  hyper
cgtggcgcttcacatccataagggcaaaggaacagatgtccccaaccccagccacatccacagtgaagtgatgaaaaaagtcgataatctccagggcacgagggcggaacca

SEQ ID NO: 346944 - DNA, 295 bp, Homo sapiens; identical to SEQ ID NO: 285522
  chr7:150715323-150715618
  hyper

SEQ ID NO: 346945 - DNA, 370 bp, Homo sapiens; identical to SEQ ID NO: 333305
  chr7:151038589-151038959
  hyper

SEQ ID NO: 346946 - DNA, 697 bp, Homo sapiens
  chr7:151722447-151723144
  hyper
cggaacacagatgcgtgtcgccgcgcaatgggcacagcgcatacagcgcagagctcccgggctcaagcgctgctcccgcctcagcctccggagtagccggggccacaggcagggcatttgtcattaatggggtcttttgagaccgcgggtgacagacaacaggagccaggccacgcgcggcgcctctgcgcgaacgctagggaggactcagcgcgcggcggccggtgacgtcagggcagcgagaggtttcgtcaccgcggcgcgggggcggggccgcctgtcacgcggcgccggcggacgcgcggcgctgggcggaggcagcggctcggggactgggcgagggccctgggcctgaggaggcgcggccgccactgcgcccagcgcctgcgcgacgcctggctgctgggccccggggcagttcagcccgcgccgctcctgcgggtcggactggggctgtggcgggagagaagatgccgcagcccgagtcccagaaggcggcgatcctgggctgcgggcaaggcggtgagtaccctctaggcggcggcctcccggcgtccctcagcacctcgagagctgcggcggcggcggcgcgcggggcctgggcaggctgggggcggcggcggggcagcgcctggctccccgcgggtcctgggctcccgcacgccccctgggcgaggctcgtgtctccgggagacgc

SEQ ID NO: 346947 - DNA, 34 bp, Homo sapiens
  chr7:151723206-151723240
  hyper
cagggcgctggcctcgttttcgcgtatttaggac

SEQ ID NO: 346948 - DNA, 312 bp, Homo sapiens; identical to SEQ ID NO: 345291
  chr7:156433208-156433520
  hyper

SEQ ID NO: 346949 - DNA, 459 bp, Homo sapiens; identical to SEQ ID NO: 201262
  chr7:156433521-156433980
  hyper

SEQ ID NO: 346950 - DNA, 63 bp, Homo sapiens
  chr7:156796431-156796494
  hyper
cgcccagcagctgcttctgcccggactcccagcagccgcgccccggccttggatgaggttgat

SEQ ID NO: 346951 - DNA, 96 bp, Homo sapiens
  chr7:156799510-156799606
  hyper
caagtggaaatggatagtttggagttaatgagaccaatttttttttttttttttgtctaggagacgtctgagtgtccctgttaaacagggcccatc

SEQ ID NO: 346952 - DNA, 216 bp, Homo sapiens; identical to SEQ ID NO: 285596
  chr7:157476655-157476871
  hyper

SEQ ID NO: 346953 - DNA, 93 bp, Homo sapiens; identical to SEQ ID NO: 285601
  chr7:158380396-158380489
  hyper

SEQ ID NO: 346954 - DNA, 126 bp, Homo sapiens
  chr7:158380510-158380636
  hyper
cggacagcgcccggccccgccccggccccgcccccggcggcagggccccgcccccggacgcgcgtccgccctcaggccacgcccccggccagccccgctcgccccggccacgccccccgcccgccc

SEQ ID NO: 346955 - DNA, 335 bp, Homo sapiens; identical to SEQ ID NO: 345293
  chr8:4851007-4851342
  hyper

SEQ ID NO: 346956 - DNA, 117 bp, Homo sapiens; identical to SEQ ID NO: 201281
  chr8:4851375-4851492
  hyper

SEQ ID NO: 346957 - DNA, 73 bp, Homo sapiens; identical to SEQ ID NO: 201282
  chr8:4851508-4851581
  hyper

SEQ ID NO: 346958 - DNA, 125 bp, Homo sapiens; identical to SEQ ID NO: 201283
  chr8:4851611-4851736
  hyper

SEQ ID NO: 346959 - DNA, 34 bp, Homo sapiens; identical to SEQ ID NO: 201284
  chr8:4851780-4851814
  hyper

SEQ ID NO: 346960 - DNA, 108 bp, Homo sapiens; identical to SEQ ID NO: 333357
  chr8:6673921-6674029
  hyper

SEQ ID NO: 346961 - DNA, 202 bp, Homo sapiens
  chr8:6691849-6692051
  hyper
cgcggggtccgggctcaggcagcccttagcgcccaggctgggtccggctgtcaccaccccgagcgtcctgcggcagcctcccttgcacgaaaagccttcggtgctgcagggctggggaatgctgacacccagtccgtgcccagctggagggcaagggaggacacctggggtgggtgccgacccccgcaggtcctgtctcagc

SEQ ID NO: 346962 - DNA, 152 bp, Homo sapiens
  chr8:6692462-6692614
  hyper
ctccccccgccaccccttctgcgagcggcctccaagtcgcagggtccccctggacggccgggggtcgggggagagcccgggcgcccccagacttgcgctcagcacatcttggcatcgcagcactttgcaaagcttgtgatggaaggaagggc

SEQ ID NO: 346963 - DNA, 185 bp, Homo sapiens; identical to SEQ ID NO: 285668
  chr8:12809462-12809647
  hyper

SEQ ID NO: 346964 - DNA, 62 bp, Homo sapiens
  chr8:12809799-12809861
  hyper
gggaggagggggcgcgacaggtcgtctagcgcgtgccccggagcccgcgcccgggtctggcc

SEQ ID NO: 346965 - DNA, 767 bp, Homo sapiens
  chr8:18870226-18870993
  hyper
cgaacgcattgaggcatttgttgccagaatcccacttacagtaattttccagatctccgtcttccctacaccaacacctggacccactcaagagttattctggagcggaaatcctggatcccgctatcgggagaaccagtgtctagaaaatgaaatcgtggtgcccattccatcctctgcctagtgggcgtttaacatcctttgacatcgaggggaatggcaaaacgaaacatttattatttaggtcaccaacaacattctaaacccacgtcctctaatcggtgttaatgtgtttaaaaaaaaaattcagaacatcattcgccagaacggaaagctgaaaacggcggataaagttaaatgcatgtaaaacagaatgacttaaacatctgtaaaagctcctgggaattgcaccgaataatcttcccttgtccgtttgctcgctcaattcaagtttgtttagtttagtctttttttctttctttctgacagaaacgtgatagtccctaaatacaagctgaccgggcaaagaaagatcggcatacgaggtcctctttcatgttgccttcttttgatagcttttctccaaagtctgaggttttcaaagccgaggtatgaactaaaacccctaaaccttaacaccacaaagttgaccctgctgggctcctaaaaaacacaaagcaagcaagcgcgaagagaaaaatcgcaccctgcacctatccagacagcacaaacccaggtggccccgggatcctgggggacagagcggc

SEQ ID NO: 346966 - DNA, 878 bp, Homo sapiens
  chr8:22436855-22437733
  hyper
cgcatcagcgggggcgcccccgcgagctgcgctctccccggccggagcgctcctcctccagcccccagcccgcagggtactttgccctcggagcgaaggaggctccagaactggtagagccgggccatcgggctgggcacctccccgcggcgcccgcagcgcggagtccactgaccggctcaaaggtctgggaatctcggggcggccgcgagccggcctcggggactggggtgggggcggtgctgggaacagaggctaggcctgggcccaaggggaaggcagccggggatggagcggacagaccgctggtgctcttgatagattctcgcagcacttgcgtccccagggcagccccaggatgggtgctgggcagggtggtgcccagcctggcaccgcggcttcctgcctggattggctcctggctccagagctagaggctcaggaaatcccacaggggtctgtctgcaagggcacttccttgcccagcggaggggctgtggatgggaggcctgtcaccccggctgtctgtcgggcagcatcaggaatctgggggtgggtgtgtccagcttgacagatgaaccctggcctccttgccctggcagccggcccctgggggaggtggggagcccggtcttgcccgtgtgatccactttgccaagaacgaggtgggcagctaggaggcccatgtgaagactcggcctcaccccaccagtccttcacctggccagtgacttacacagtctgtactggtgccagcctgttccttgacccgtcactcctgcttcctgagccctgctctccctaggccactcaccagccctcccccagagtggagaggaagtaccgtgtgctgtgggttttggggacaggaagcaagc

SEQ ID NO: 346967 - DNA, 127 bp, Homo sapiens; identical to SEQ ID NO: 345299
  chr8:23021590-23021717
  hyper

SEQ ID NO: 346968 - DNA, 302 bp, Homo sapiens; identical to SEQ ID NO: 201346
  chr8:25041946-25042248
  hyper

SEQ ID NO: 346969 - DNA, 250 bp, Homo sapiens; identical to SEQ ID NO: 201347
  chr8:25042284-25042534
  hyper

SEQ ID NO: 346970 - DNA, 63 bp, Homo sapiens; identical to SEQ ID NO: 201348
  chr8:25042567-25042630
  hyper

SEQ ID NO: 346971 - DNA, 106 bp, Homo sapiens; identical to SEQ ID NO: 201349
  chr8:25042631-25042737
  hyper

SEQ ID NO: 346972 - DNA, 73 bp, Homo sapiens
  chr8:25042833-25042906
  hyper
ggagtaggtgaccagcccgggtcggcacatggactggtgctcattgtcccagtgctttctgccccccgctttc

SEQ ID NO: 346973 - DNA, 372 bp, Homo sapiens
  chr8:28347825-28348197
  hyper
cgtctataaatcccgtcgctggcatccggggtctcttaggcaacaatgtgtgggctcctgattggccgcgagatccaggagggctggctacaaaattgggcacggggataaaattaacaagtgtggcggccaagagcgtgggagggactgcaatgtctcaatataaccctagaatgaagacgcgtcgaatcctgaaacaagtagcgttgaaaaccttcattcaagacgtagtgtgtcccaaatcagccctacctacggagcacgcccagtcacattgtcctggtcactccggagctgcgaaatgcaggctccactgtgccaggttttaagagtggccaacaggtaaacagagggttggaggaaaaagaattc

SEQ ID NO: 346974 - DNA, 153 bp, Homo sapiens; identical to SEQ ID NO: 201395
  chr8:38324508-38324661
  hyper

SEQ ID NO: 346975 - DNA, 215 bp, Homo sapiens; identical to SEQ ID NO: 285835
  chr8:38324861-38325076
  hyper

SEQ ID NO: 346976 - DNA, 226 bp, Homo sapiens; identical to SEQ ID NO: 201396
  chr8:38326050-38326276
  hyper

SEQ ID NO: 346977 - DNA, 539 bp, Homo sapiens
  chr8:41685769-41686308
  hyper
cgctccgccccgctccgcccgtgctgggctgtggcctccacaccaagcagccgccctgggccgccttccttcgtctgtgcgtgcagcgccgcctccttcagcttaggcccgacactccatgaactctcattttccaccttctccgtctccagcttccaagctgcacagggccaggccgaggtacgtgatggcgggcactgaattacagatcccgtctgtggccgccagcctctgtgtcctgccacctcctccgagaggacatcaccgccaccaggtggagcgagtctcctcctcggcgctccaaccacgtgctgtttattactctgtggggattcccataccgaggcctcttcagttcctggaacagtagcactaaaaggctcctgagtgcctctgttaatttgattgttctggttcgcactacaatgaccgggctggagagggggcgctcgtaatgaaacaggaactgctcctcgcgcccgctccagagtcctttacatctttggggagagggcatacggggagctacatttcatttt

SEQ ID NO: 346978 - DNA, 112 bp, Homo sapiens
  chr8:49834207-49834319
  hyper
cgctcggtgagccccgcccgcgatccacgctctctgggagctaggaggggcgcaggagccggggtctctgccctgcccgcctggcttccagatgtggtgcagcgccagcgcg

SEQ ID NO: 346979 - DNA, 116 bp, Homo sapiens; identical to SEQ ID NO: 201413
  chr8:56014011-56014127
  hyper

SEQ ID NO: 346980 - DNA, 148 bp, Homo sapiens; identical to SEQ ID NO: 345301
  chr8:58906804-58906952
  hyper

SEQ ID NO: 346981 - DNA, 102 bp, Homo sapiens
  chr8:60030067-60030169
  hyper
cgaggagcttctccacggggaagtgtgtgtgtgagagcctgcctgtgtgtcaacactgtccaagactcggagctgcgactcggtcgcgtggtgcggagtcca

SEQ ID NO: 346982 - DNA, 199 bp, Homo sapiens
  chr8:60030947-60031146
  hyper
cgcctcccaggtccctgcaccccgactcccggctgctcccctggcaactaatccggagaagggaagtggtgccacgagcccccactgcccggggagggagggagagagaagggggaactgggaaataaactgaattctcttactctgcctccgttcctggaccccagacacacccccaaagtattccacggttttctct

SEQ ID NO: 346983 - DNA, 115 bp, Homo sapiens
  chr8:60031791-60031906
  hyper
ctccaccgccgcctcttggtcccgccgccgccgctgccgccgccgccgggcaggtaacttcatgcgctcattgtcccccccgcccgcccccccatccccgcctcccgcgcccctc

SEQ ID NO: 346984 - DNA, 292 bp, Homo sapiens; identical to SEQ ID NO: 201424
  chr8:61193765-61194057
  hyper

SEQ ID NO: 346985 - DNA, 119 bp, Homo sapiens; identical to SEQ ID NO: 345303
  chr8:61822259-61822378
  hyper

SEQ ID NO: 346986 - DNA, 144 bp, Homo sapiens; identical to SEQ ID NO: 201426
  chr8:61822883-61823027
  hyper

SEQ ID NO: 346987 - DNA, 260 bp, Homo sapiens; identical to SEQ ID NO: 201435
  chr8:65492407-65492667
  hyper

SEQ ID NO: 346988 - DNA, 280 bp, Homo sapiens; identical to SEQ ID NO: 201437
  chr8:67025640-67025920
  hyper

SEQ ID NO: 346989 - DNA, 234 bp, Homo sapiens; identical to SEQ ID NO: 201438
  chr8:67026578-67026812
  hyper

SEQ ID NO: 346990 - DNA, 55 bp, Homo sapiens
  chr8:72756949-72757004
  hyper
caggtaatcttagcagtggcaaagattaccagacacttagaaacgacgggattcc

SEQ ID NO: 346991 - DNA, 77 bp, Homo sapiens
  chr8:75897394-75897471
  hyper
ttcagagaaagaacagtgtgtgccttcacacttgagaggaaaagctctcaagttgccggggagctgctggcttcttc

SEQ ID NO: 346992 - DNA, 208 bp, Homo sapiens; identical to SEQ ID NO: 201482
  chr8:80803900-80804108
  hyper

SEQ ID NO: 346993 - DNA, 99 bp, Homo sapiens; identical to SEQ ID NO: 345308
  chr8:82193698-82193797
  hyper

SEQ ID NO: 346994 - DNA, 248 bp, Homo sapiens; identical to SEQ ID NO: 286033
  chr8:94712881-94713129
  hyper

SEQ ID NO: 346995 - DNA, 71 bp, Homo sapiens; identical to SEQ ID NO: 201508
  chr8:95651655-95651726
  hyper

SEQ ID NO: 346996 - DNA, 176 bp, Homo sapiens
  chr8:95651845-95652021
  hyper
ccggatttgtacccggagtgggttctgcagggataggtgcatggttgcccgtttcacatcatgaatatgaacggggctggacacctagagccgaattattaatacttcagacagaattctgttcccaagaacaaatcgctttgagatataaaacccgagaaaacttcacctctggc

SEQ ID NO: 346997 - DNA, 54 bp, Homo sapiens
  chr8:97156910-97156964
  hyper
cggggtggagccggggtccatggagttcatcagcgtctggatgatggcgtggtt

SEQ ID NO: 346998 - DNA, 355 bp, Homo sapiens; identical to SEQ ID NO: 201523
  chr8:98788437-98788792
  hyper

SEQ ID NO: 346999 - DNA, 826 bp, Homo sapiens
  chr8:99956460-99957286
  hyper
cggctgcgtctctataacagggaaacctcgagcaaacctgtgcctttaagactcagttgctatccaaacagaagtaaacagagtggaccattagcagacgccgggcgcggaggcggagccagggcgctgagggccccgcgcggcggcgggacgcccgcccgaaggggaggcggggccgctactaaagcccaagactcccggcctggggcagcctggggagggacgcgggcggggacggagctcggcgtgcttgctgctggagggtgatggccctgcaaggctgtgggctccgacctcaccgggagtcgacagcgagaggttcgccgaagagcgaggttctgggcgagcgctgaacgccggccccaagcaccccgggtctttacacagtccgcgtccacagactctgacgaagacgtggatctgctctcgctttagctgctcgcggtcctccagatcatgtccgcgactcctgcgactccgcgcggaaaaaaaagtttgccaggcgtggactcaatgacctttccaagctgtgcgcctcgctgcctggaccgggtctgagcgcggctgcccaggttgacctttctgcgggaggtgagtgttcgctctgggaaggggctgtagctgccctttggaaggaagggtttgggggtgtaagaggcgttcagattctcggtctggtgtgccccaaattcagatgtgaaaatagatcatggggatgcaatcccagggcactgtatttctcacttccttgggtccctggcacgcgactcccagctaacacccaaccacacacatttctacatactgtttcttaattttgttttgg

SEQ ID NO: 347000 - DNA, 51 bp, Homo sapiens; identical to SEQ ID NO: 345310
  chr8:99957709-99957760
  hyper

SEQ ID NO: 347001 - DNA, 429 bp, Homo sapiens; identical to SEQ ID NO: 201548
  chr8:104511554-104511983
  hyper

SEQ ID NO: 347002 - DNA, 48 bp, Homo sapiens
  chr8:105236123-105236171
  hyper
gcccctctgctctccgggactgtgccgggggcgacagccctagagcac

SEQ ID NO: 347003 - DNA, 622 bp, Homo sapiens
  chr8:107669381-107670003
  hyper
cgcaaactaaatccctcaataacgttgcctaaacaggactgggatcatagaatgtccaacactaacatgagttcataatggcacaacgaacttaaaatgttactattcatgttttaattatgattgcagtcttacgttgaaggtatctccgccgtccttaaacataaaaaaaaaaaaaggaaatacaagctgcaaaagttttatgtaatgcactccaccctcttttttccccaagccaacacacacccttcaaactttttgacagttattttcagacccctcctaggctcccgaactccatgcaactccagcagtctcccctgggccatttttagcctctgctctgacctggcgggaggctgggtgtccaccctttcccctgcagtcctgaaagtccggtccgagcgcggacggggcggggaggggctgggcgggccaggccagctccattggcgccaggcgggtgggggaatgcgctgagaggacccgtccagcttgcttaaaagccatcagttttctgaccccgcatcggttccaggaagaatacacctatgtgacaagctaagttctgcctcattttgcatttagaagccacaagaaaaacttttcgaaaacttttgtc

SEQ ID NO: 347004 - DNA, 633 bp, Homo sapiens; identical to SEQ ID NO: 201557
  chr8:107670289-107670922
  hyper

SEQ ID NO: 347005 - DNA, 105 bp, Homo sapiens; identical to SEQ ID NO: 345314
  chr8:107670978-107671083
  hyper

SEQ ID NO: 347006 - DNA, 818 bp, Homo sapiens; identical to SEQ ID NO: 345315
  chr8:114449602-114450420
  hyper

SEQ ID NO: 347007 - DNA, 540 bp, Homo sapiens
  chr8:121823361-121823901
  hyper
cgccacccttcccccccccccaacacacacacacccggccccctggggtgtgtccgcatgtggccgagtgagtgtgagtgtgagcgtgcgggtgggaagccgagcaggtgtgtgcgcgcccggcgcggcccgcgcgctgttaaccccttaccttccagcagcacttccttgcccgcgcgcttcaacgcctgcaccgcctcgtcgtgggtggcgtcccgcaggtcggctccgttcacggacaggatggcgtcgcccacgtacagggcttgggtctggtccgccgccagccccttgaagatcttgctgatgaggatgggcatcttgttctccttgccccccttgatgctgatccccagcccgcccagctcctgcttcagcaccttcacgccacgcttctggttcgagatggactcgggcacctgctcgggcaggtcggtgaaagcggtgcggaccccggcgggcgagtccgggggctgcgcgccgcccgcgcccgggtgcccagccccggcgcccctgcagaacgagccattggtggcggtc

SEQ ID NO: 347008 - DNA, 211 bp, Homo sapiens
  chr8:121824481-121824692
  hyper
tccagccgccgcagcctcggcggtcacacgccacccgcccgcccagacctcccctcctctgtccccagagcgcacgacgccgcggggacagcttcccgagcgccttccccgtcccgcttctctccagcccaccgcagccccctttcttcccagctcccccactccgtgggcgcccacactgcaccttcgccgggtgcgtgcgtcccgcctc

SEQ ID NO: 347009 - DNA, 79 bp, Homo sapiens; identical to SEQ ID NO: 333566
  chr8:124778505-124778584
  hyper

SEQ ID NO: 347010 - DNA, 449 bp, Homo sapiens; identical to SEQ ID NO: 345316
  chr8:142317706-142318155
  hyper

SEQ ID NO: 347011 - DNA, 415 bp, Homo sapiens; identical to SEQ ID NO: 345317
  chr8:142318184-142318599
  hyper

SEQ ID NO: 347012 - DNA, 120 bp, Homo sapiens
  chr8:143531858-143531978
  hyper
cgctggcgggggtctaagggagccccccatggcccccaacagccacacatagacgcagcaggctccggagagcccccgagcgtgtccccctcctgctaatcacgtccagggccccctaca

SEQ ID NO: 347013 - DNA, 77 bp, Homo sapiens; identical to SEQ ID NO: 345318
  chr8:145698674-145698751
  hyper

SEQ ID NO: 347014 - DNA, 113 bp, Homo sapiens
  chr9:6644756-6644869
  hyper
cgactacaaagccttgtgggaacctcattgaaatcgcctaattagggttctttttaaaagaaaaggaaaactctgagcaagccagaatgatttggaggaaagaaaatcgtgaa

SEQ ID NO: 347015 - DNA, 1853 bp, Homo sapiens
  chr9:14313943-14315796
  hyper
cggggaggggggcgcgggagggcgcaggagggcgagcgggcgggcgggagggagagcggggagaatgtgtcaccgcgctgggaaagttcaaggttacagccccaagcactgcggcaggatcccggagtggtgatcgcaggcgaaactttgccgcgagccgaccatgtgtgtgcgcgaggggcagcgtgagcgagtgcgcgcgggtggcggggcgcgcgcgggagagggccggggtgggggcggggtgggatgggggagaagggagaggccggggtgagggagggggcgcgagcgctgatctctggggcggaagaggctcgcggcgcgtggtccccggcagcagcagccgccgccgcccgcgccgggtcttcggcgcccggccgcccgcccgcccgcctcgccccgcgtctgacccggccgagcgtggaggctgctgttgccgccgctgcccagagcccaggggtatcaaaacgatctcctgaaaaattccaaacgataaatcccgctctcccgctcggctccaaactcctctcttttctgctctaggctcttttttttccctccctctcttgctttctttcgttgcaaaacttggaagttgaaaaattcaccggttccaccctctggaccccgctcgagctctctccaaatcagacttaaggattgttttattatttaattacacaatcatcgctttactcctcctcctgcaaacgcgcattccttttgcaccagcctctccacaccccccgcccccccaccttcctcctcctcctccttctccttctctccccccacctctccctcatttgttaaaggtatcctaccggtgctacagaaccatgactttttttttttttccaaaatagctcttctttccgctgccctccccacaccagcacacacatacacacccccgaaaacccgccctggaagaggtatttcggtgctcgctgcggactcttttaagccgcgggaacatccgagtgggagaagcaccgaaaccgtctgagcccgagaaaggaacgagtggaaaattccctcacacccaggccgcccccaggccggggctggggcgcggacactcgcacccggggcgggctcagtccgcggagcctgcggctgccgggaaaagggggaggccgagcaggcggggacctgagcgaacttgggctcaagtagttggggcgcgccggcgtggaccaggggggtgcggcgcccagcccccgacggccccgcccggagcccgggttcgcggatagggagggggtgcgggttcgtcccgggtctgcccaccaggggcccgcacccgaggcagtcgcggcgcgcggcgcttcgccgcggtttgccgccctccccgggggtgccccgtgcacgtggcctcgctctgagcgggaggaccgggccgagccgccgccgccgcctcttgctccctccacctcctccccgcgcccggcttcgctctcctcctcctcctcctgcagccccgctggctggctcccaatccccaccccccggggcccggggcgccggcggaaagcgtctccctacccgcccgggtgcaggcggggcggggccgcggcgcgcccggggctgcggggcgggccggcgggcgcgcgcgcgccgctgcagccctccagaggctgcgggccctgagccgctcggcgcccgcgccggctccccaccgcggcgctgccccgcccccaccccgtcgcccgtgcaggctccgagtgaatgaacttgattccagggattttgaagaaggcggttcgccttgcaccctttctgcaccccccgcccacatacacacaccgccccccaaatccagttttctgcttggggtggatggggac

SEQ ID NO: 347016 - DNA, 96 bp, Homo sapiens; identical to SEQ ID NO: 345320
  chr9:19127135-19127231
  hyper

SEQ ID NO: 347017 - DNA, 71 bp, Homo sapiens; identical to SEQ ID NO: 345321
  chr9:21395928-21395999
  hyper

SEQ ID NO: 347018 - DNA, 36 bp, Homo sapiens; identical to SEQ ID NO: 345322
  chr9:21396327-21396363
  hyper

SEQ ID NO: 347019 - DNA, 568 bp, Homo sapiens; identical to SEQ ID NO: 345323
  chr9:27528536-27529104
  hyper

SEQ ID NO: 347020 - DNA, 182 bp, Homo sapiens; identical to SEQ ID NO: 201692
  chr9:27529157-27529339
  hyper

SEQ ID NO: 347021 - DNA, 567 bp, Homo sapiens; identical to SEQ ID NO: 345325
  chr9:27529340-27529907
  hyper

SEQ ID NO: 347022 - DNA, 894 bp, Homo sapiens; identical to SEQ ID NO: 333655
  chr9:35756575-35757469
  hyper

SEQ ID NO: 347023 - DNA, 62 bp, Homo sapiens; identical to SEQ ID NO: 345326
  chr9:37034135-37034197
  hyper

SEQ ID NO: 347024 - DNA, 241 bp, Homo sapiens; identical to SEQ ID NO: 286422
  chr9:37035886-37036127
  hyper

SEQ ID NO: 347025 - DNA, 349 bp, Homo sapiens; identical to SEQ ID NO: 333667
  chr9:71320587-71320936
  hyper

SEQ ID NO: 347026 - DNA, 472 bp, Homo sapiens; identical to SEQ ID NO: 201742
  chr9:79630544-79631016
  hyper

SEQ ID NO: 347027 - DNA, 321 bp, Homo sapiens; identical to SEQ ID NO: 286488
  chr9:80645546-80645867
  hyper

SEQ ID NO: 347028 - DNA, 419 bp, Homo sapiens
  chr9:80645902-80646321
  hyper
aggggcgaaccgcgggcgccggggggcgggggcgccgaaggcagctgccccgcagggccaaggatggtgggctgggggcgcagaggcccggcggggccccggacggtactcaccgagcagcagcagcttgagctcccggcgggcgtcccgcttgtccctgcggagctgccgctcgatctcgtcgttgatccgccgggcttccttggcctcctcgctcaggcagcacgccatgatggactccagagtcattcttccaaagtgcctccgctgcagccccgccggcaccccctgctcacagcgcgcacacacaccctcccgccctcgctcccccgaggcagcggtggccgccgagcccccgccgcccgggcgcgcgtccgggacgagctccgggaaccgccgcgggggcggcggccagggcc

SEQ ID NO: 347029 - DNA, 340 bp, Homo sapiens
  chr9:80646831-80647171
  hyper
cgccacacacacacattttcttctttctctgaactggagcacagatccgggagggaggaggcggcggcgaaaggaggaggaggaagaggcggaggggatgggcgcgggaggagggagccgggaggcggtgccgcccggcccctcctggaaggctttcctgggctcgcggccgccgcggcgcgcctcccagtgcggctctcgcctcgcccgcgcggctcccgggctgggccggcccccgcgggctctgcggacgcctactgctcccgcaccctcggcagagtccgcgggcgcagcagtcacggccgcccccggccgaagtcggggccagacccggccgccg

SEQ ID NO: 347030 - DNA, 382 bp, Homo sapiens
  chr9:80647247-80647629
  hyper
ggtgagacaggaatatggcggcctctgcctgcctcagcccaccggcccgggagcgcggccgcggcccctgctgaagtcgcgggaggcggccccgcggagccccgcacgcgctccctgcggcgccggcgctggcgtccgccgctcccgggctgtgcctgtctgctccacggggtcgctcctcagccgtttctgtgtttcccgttcctatttctaaaacgccattcggttagaaactctcacgtcacctctgacaccggtgcagtcttagaaaataagctcctctatactgtgtggggctactggggaagggaagggaaggaattggcaccggtgcccagaggtgtagggggagattcacaggcgaagctgttcgcaaagtaac

SEQ ID NO: 347031 - DNA, 166 bp, Homo sapiens; identical to SEQ ID NO: 286494
  chr9:82185179-82185345
  hyper

SEQ ID NO: 347032 - DNA, 260 bp, Homo sapiens; identical to SEQ ID NO: 286495
  chr9:82185383-82185643
  hyper

SEQ ID NO: 347033 - DNA, 469 bp, Homo sapiens
  chr9:82185703-82186172
  hyper
ggaggtccagcgtctctgattcccggatcttcagccccacccggagcccccacggttactgccccccgcgacccccgatggagcgtcgggatgcgctttctctccgagtgcctccgggggtggagggagggaggcctgtttcggaactaaatggcaatcacagcccccgcggggcttggagggacgagctccccgcccaccccgcggccccggccccagccagcatctcgcgactccatttctggctctaaacaagaacggggaccgagtcgcgttcacacggaaaattatgccggctccagcggcgcgtaaaattgatgtgaaccgaacgaagtaagatcagcgtgatcctccccctcttgtctcaacaggggtttcggcgcgttacacaaggccgagcttgtctctttaaggagacattggaccctaattagtccgcattcctggcgcggctgcggagcgaggggcc

SEQ ID NO: 347034 - DNA, 431 bp, Homo sapiens; identical to SEQ ID NO: 201763
  chr9:89561318-89561749
  hyper

SEQ ID NO: 347035 - DNA, 77 bp, Homo sapiens
  chr9:91149647-91149724
  hyper
cgaggcgcagttggagaagagtgcggggatgtgggcggggcgcagtgaggggaaactgtggaatgtgggcgaggcgc

SEQ ID NO: 347036 - DNA, 222 bp, Homo sapiens; identical to SEQ ID NO: 286534
  chr9:91149754-91149976
  hyper

SEQ ID NO: 347037 - DNA, 236 bp, Homo sapiens; identical to SEQ ID NO: 201776
  chr9:91150385-91150621
  hyper

SEQ ID NO: 347038 - DNA, 544 bp, Homo sapiens
  chr9:93955385-93955929
  hyper
cgtgaaacacaacgtgagaatgggaatctgacatatgagtaacccggccgagaggcacctcttggaaatgacactgggccttggctagaattacgcacaggccctgggagggctgcggctcgtaggcccgtagggggcagggtgagggcggaggtcctggcgcccccaggcctgacccgcccgcaccgctgggctatttttagcgtccactaaacttagccgactccaccctcttgaataacccacatcttaaaatgctatttttctccaacaggtcaaaagaattctgcgagttagagcgcagattaagttgctagcgacgggcattgaaggttttagaaccgagaaaatgagccggtggcggggagcgcgtcctcagcggccaggcccggcacggggctcgggcactcggggacacacggtggtcgtcgctgtgtctcagcaggaccctgtgcgctggagagcttggggccgcgagtcgcgcagcaaggaggcttctggcttctctatttttagcctctgaacgttttccaaaataattacc

SEQ ID NO: 347039 - DNA, 267 bp, Homo sapiens; identical to SEQ ID NO: 201780
  chr9:93956177-93956444
  hyper

SEQ ID NO: 347040 - DNA, 218 bp, Homo sapiens
  chr9:95820744-95820962
  hyper
cgcgtgcaacgccccggagtagcaacactttccgctcagccggctgccttggcccgctgggtatttggtctccccaagggcccccgcccacagcccccggccggacctcggccccagtccaacgtgtgggcgtggtctgtaagttgcatggaaccgcccctgggcgggcgtggagggcggggcctccccgcccctcacccaggcccaggcccaggccc

SEQ ID NO: 347041 - DNA, 214 bp, Homo sapiens; identical to SEQ ID NO: 286552
  chr9:95821006-95821220
  hyper

SEQ ID NO: 347042 - DNA, 174 bp, Homo sapiens; identical to SEQ ID NO: 201793
  chr9:96717633-96717807
  hyper

SEQ ID NO: 347043 - DNA, 429 bp, Homo sapiens
  chr9:97767434-97767863
  hyper
cgcagccgctgcagagggagcgtcgcgccggggcggagtgcgggcttgcgcggcaagtgcgcgccgaggtgagtgcgggcggcgcggtccctgcgccccggtggcgccggcgcgagaccgcggctggcgagaggccctggctctgcgctgcggcgcgcgggtgcggggactacccgccaggctccggctcgggcgcggggagcggccgtgacgaaggtcgcggcccctgcggtgaggcgcccggcgagttccgcgggcgggcgcgggtggcctcccgaggtgcggggaagaccaggtcgcgaggccgggggtctctgctttctcgcgctgggggatggccgtcaggaccctgtcgccttctttgaaatgctgtggtttttgaacctcaggtcacgaaatggattggagtgaaccggagaccccgaaaac

SEQ ID NO: 347044 - DNA, 201 bp, Homo sapiens; identical to SEQ ID NO: 201812
  chr9:100610480-100610681
  hyper

SEQ ID NO: 347045 - DNA, 182 bp, Homo sapiens
  chr9:102586462-102586644
  hyper
cggcggggcgctgggctgggctggaggaaaggctgtgtgggtccctcccgcgaacgctgggcgctcgaggggaactccttcgttggggagaggcggtccccgcccacccgagttctgaggcctcctctcagagaacgactccgcttgaaaggccctcagggaatgcgggacgggaatgcggg

SEQ ID NO: 347046 - DNA, 227 bp, Homo sapiens
  chr9:102586985-102587212
  hyper
ctcttcgagctgcgcccaccccgggcaaagggggcgctataggccggagtttgggcacccagttccttccctgaggcctgctgagctgcgctttcagctacaaagtttcgctgaggctgtgggctgagacgctggtcccggagctgcgctcggcgccctcaggaatgtgcccccgctaggccgctgggtggccaggagcctccaagccgcccaccctcgaagacacc

SEQ ID NO: 347047 - DNA, 148 bp, Homo sapiens; identical to SEQ ID NO: 201823
  chr9:104248697-104248845
  hyper

SEQ ID NO: 347048 - DNA, 186 bp, Homo sapiens
  chr9:104248975-104249161
  hyper
ctggggacccctgcggggtcctcgcaatcctccggcaggaagcggtcggagctgcgggcagggccgctaggcaacccgcctgcccgaggcgcactgcccggggcacaggccctctgcgatgactctccccaacccccagctgccctgcttgtgccagctgtggccacccctaatccttgtcccctc

SEQ ID NO: 347049 - DNA, 216 bp, Homo sapiens; identical to SEQ ID NO: 201839
  chr9:112260252-112260468
  hyper

SEQ ID NO: 347050 - DNA, 162 bp, Homo sapiens
  chr9:112260523-112260685
  hyper
cccaggtaggtcgcgcgtgcgggcggcgcggaagctcgctcgcggcgcgacctggccgccgtctgagcatgcccagtgccgcccgcgggcggttcccgccggccgggctggccgcgacgggcccgcgcgccgggcggggggcgggcgtccgggctggcctgc

SEQ ID NO: 347051 - DNA, 395 bp, Homo sapiens; identical to SEQ ID NO: 333758
  chr9:116111663-116112058
  hyper

SEQ ID NO: 347052 - DNA, 131 bp, Homo sapiens; identical to SEQ ID NO: 345327
  chr9:117880425-117880556
  hyper

SEQ ID NO: 347053 - DNA, 82 bp, Homo sapiens; identical to SEQ ID NO: 345328
  chr9:124990438-124990520
  hyper

SEQ ID NO: 347054 - DNA, 142 bp, Homo sapiens; identical to SEQ ID NO: 345329
  chr9:124991012-124991154
  hyper

SEQ ID NO: 347055 - DNA, 135 bp, Homo sapiens; identical to SEQ ID NO: 345330
  chr9:129400713-129400848
  hyper

SEQ ID NO: 347056 - DNA, 167 bp, Homo sapiens
  chr9:129485513-129485680
  hyper
cggtgtccatggtgggtctggttcccaccgctccctccctccccgcacagtctgagacccccttccccgggccgccccgtcgatcccaggtgatggatggagccttcagggagcccgcgcgggcgggctaggctcgggcggaaatgaagaggataagatctgcgagc

SEQ ID NO: 347057 - DNA, 112 bp, Homo sapiens; identical to SEQ ID NO: 345331
  chr9:132804293-132804405
  hyper

SEQ ID NO: 347058 - DNA, 207 bp, Homo sapiens; identical to SEQ ID NO: 201905
  chr9:132804455-132804662
  hyper

SEQ ID NO: 347059 - DNA, 103 bp, Homo sapiens; identical to SEQ ID NO: 201906
  chr9:132804693-132804796
  hyper

SEQ ID NO: 347060 - DNA, 290 bp, Homo sapiens; identical to SEQ ID NO: 201907
  chr9:132805028-132805318
  hyper

SEQ ID NO: 347061 - DNA, 292 bp, Homo sapiens; identical to SEQ ID NO: 201908
  chr9:132805445-132805737
  hyper

SEQ ID NO: 347062 - DNA, 55 bp, Homo sapiens; identical to SEQ ID NO: 201909
  chr9:132805893-132805948
  hyper

SEQ ID NO: 347063 - DNA, 1351 bp, Homo sapiens; identical to SEQ ID NO: 333814
  chr9:133710055-133711406
  hyper

SEQ ID NO: 347064 - DNA, 101 bp, Homo sapiens; identical to SEQ ID NO: 286815
  chr9:134131797-134131898
  hyper

SEQ ID NO: 347065 - DNA, 630 bp, Homo sapiens; identical to SEQ ID NO: 345338
  chr9:135286324-135286954
  hyper

SEQ ID NO: 347066 - DNA, 636 bp, Homo sapiens
  chr9:140196486-140197122
  hyper
cggcgtccccgggccccgcacgccgcctctgggcgctccgggcgctcggggccgggggtcgccgccgcggggaccccgccgcatccagccgcgcccgggtgggcgacgggggcgcgcgctcggctcgcgggggccgggcccggccggggacggcggcgccgcgcggtcccggtccctactcggttcggctgcggctcccacgcggtcccaaggcgcctccccacgcgccgcagcactagctcgcccgccgcgccggggcgccttttaccttctttatatttgcataacaatggcagcccgtgacgcgcgcgccggcggccccgggattgggccgcgcccacatgggggcggggcgtgggcggtgccgtgcgcaggggtccgggggcgggtcccggcggcggcgcgcttcgcggcagggggcgctggtcgccggcagcgcctgggcgggggaggccaggtggccgccgggggggtccagctccgtcgccgccgccgtccgcgcgccccccgggcgctccgcgtctctttgcggtcgtcccgccccttctccctccggccacccggggaattccaagctccctcagcagccagacccaggccttgcccggtacccgagcgcgaccgccaggtggcccc

SEQ ID NO: 347067 - DNA, 155 bp, Homo sapiens
  chr9:140197263-140197418
  hyper
ggccctgacgtggggccttcagccacgcgggtccttcccgcgcgcgggcagcctcatggccgccggctcagcctatgtgtgccccaaccgtactgatgcgaggggcctccggccggccaccgcggcttctatcgcctggcggtgaagggggttcc

SEQ ID NO: 347068 - DNA, 188 bp, Homo sapiens; identical to SEQ ID NO: 345339
  chr9:140703858-140704046
  hyper

SEQ ID NO: 347069 - DNA, 327 bp, Homo sapiens; identical to SEQ ID NO: 345340
  chr9:140704131-140704458
  hyper

SEQ ID NO: 347070 - DNA, 96 bp, Homo sapiens; identical to SEQ ID NO: 345341
  chr10:1780056-1780152
  hyper

SEQ ID NO: 347071 - DNA, 60 bp, Homo sapiens; identical to SEQ ID NO: 201967
  chr10:7453036-7453096
  hyper

SEQ ID NO: 347072 - DNA, 165 bp, Homo sapiens; identical to SEQ ID NO: 345343
  chr10:12391705-12391870
  hyper

SEQ ID NO: 347073 - DNA, 324 bp, Homo sapiens; identical to SEQ ID NO: 345344
  chr10:12392327-12392651
  hyper

SEQ ID NO: 347074 - DNA, 208 bp, Homo sapiens; identical to SEQ ID NO: 201993
  chr10:17270445-17270653
  hyper

SEQ ID NO: 347075 - DNA, 116 bp, Homo sapiens; identical to SEQ ID NO: 345346
  chr10:17272233-17272349
  hyper

SEQ ID NO: 347076 - DNA, 873 bp, Homo sapiens
  chr10:21815648-21816521
  hyper
cgtaagataaaacctctgatttgctgcgtgctgccgggcacattctctgccctctcgtccgaaggacgagtttaaaatggagagtttaaaataatagcatttacaggaggaaataaagagcgaggagatggttctttggccggttttaagacatacatgctttttttttcttttaatacaagatgtcttaagggttaaaagcgttctagggtttgctgtatttccttctagatttggggtttcctgaggaaatcttttccggagggaaatagcaaatcaacattaagatggaagcgagacttctcagccacttttggaaatgaagggggaaattgtaaaaatacattcagaaaagggcgcgaaggcggcggctgaggggaagaagctggagtcttgggaggaagcgcagtgggttggaatcgggggaaggagggcccgctaggtccgggcggggaagaaggcgtgcgggcggcggggcgtgcgccgggccgggcagctggaggaaggcgcggcgggactggcgagcgcgaagaggcaggcggggaaggcctcggggggcgggggccgggcgcggggccggcgcgccggaggaagcgggacctggctcctcgcgcccgccgggccgcccccattgttctgccctagcaccgctgttagccgagcacgtcctgaccgagggaggggccccgcgggccaacccgacccccgtcggcgcctccccgggctcctgagctccggccgggtcgggtcgggccggcgcggcaagttttgatggtcagactcagccagcgaggggttcccagctgaagacctcggaggaaggagcctttacagcgtgctgcgaaattgaaggaagccgggcgagcctgcaac

SEQ ID NO: 347077 - DNA, 102 bp, Homo sapiens; identical to SEQ ID NO: 345347
  chr10:22517909-22518011
  hyper

SEQ ID NO: 347078 - DNA, 60 bp, Homo sapiens; identical to SEQ ID NO: 345348
  chr10:22518450-22518510
  hyper

SEQ ID NO: 347079 - DNA, 32 bp, Homo sapiens; identical to SEQ ID NO: 345349
  chr10:22626103-22626135
  hyper

SEQ ID NO: 347080 - DNA, 78 bp, Homo sapiens; identical to SEQ ID NO: 345350
  chr10:30024003-30024081
  hyper

SEQ ID NO: 347081 - DNA, 734 bp, Homo sapiens; identical to SEQ ID NO: 202032
  chr10:30024793-30025527
  hyper

SEQ ID NO: 347082 - DNA, 790 bp, Homo sapiens; identical to SEQ ID NO: 345352
  chr10:31607954-31608744
  hyper

SEQ ID NO: 347083 - DNA, 252 bp, Homo sapiens; identical to SEQ ID NO: 202037
  chr10:31609416-31609668
  hyper

SEQ ID NO: 347084 - DNA, 210 bp, Homo sapiens
  chr10:35103272-35103482
  hyper
cgccgctgttccgcccccgcccgagtaagggagaggaggcagaaggctcgcaacccgcctctgtcggaagggcagtcacgaaactctcctcacaccaaaagttcccagtccccggcctgtgcccccggggcctgggagccgggaaaggcctggggctggatttcccggcctgcgccccccgcgcgctggctcggggcttggctgggtctg

SEQ ID NO: 347085 - DNA, 544 bp, Homo sapiens; identical to SEQ ID NO: 202046
  chr10:35103534-35104078
  hyper

SEQ ID NO: 347086 - DNA, 649 bp, Homo sapiens
  chr10:35104117-35104766
  hyper
tcgcttcgcccggggcttgcctcgcctctccccgccgcggcgcccgcagcctccggccacctgttcggcgtcgcggcgcgctcgccggcggctgcccggggctgtgtggcgctggcgctcgctcggggccgctgggggaggggacggcgggaggggaggggaggggaggggaggggagggggaggagcagggcagggcacacaacaccgcgcacatgcggcagggggaggcgcggccggctacccgcgcggggcggagcgcaggaccgcagctcgcgcccccgccaccgccctcgggggccgacctccttccctccttccctccctccctccctccctccgggggcgcgggacccctcgccccagtgccagcacgggcaggcggccgtctgcccccaccagccctggcccaggcgccccccagcccccttcaccccgcccgcccagcaccctgcagggctgcgtcgcccctcctcggggacgccccttccacgcctccagaagtctccacggagccccccttcccctttctttgtcacttttaatcccattcctcgaactggagggttttgggtgcaggcgctcccggggaaagcagtttgtgctcagtgcggtgagtcccctcctcaccgccccggaggctccagccc

SEQ ID NO: 347087 - DNA, 397 bp, Homo sapiens
  chr10:43892377-43892774
  hyper
cgggcttccggggccctgagggcgagagcgagggcgacggcaaggtggggtgggggctgctccccggcccgccaagctagcgctgcctaggcgggagctcggggacccgcgggccgagcgcggctgaagggagggaagggaagaggcgctcgtaggtctgcgtccgtctccgagcgaccggggcggcggaaagggacctggggggggcggccgggactggagtggcggggccggggcgcccgcgcggcggctcaccacgccagggactggcccgtcggccccgaggaggcgcggggtccggagtccgggaagcggaggcctcgtgatccaagaccggcagccggacgtgggtcacggggtgcagaggaggaagtgccattgccgggcccgccaagat

SEQ ID NO: 347088 - DNA, 171 bp, Homo sapiens
  chr10:43892970-43893141
  hyper
ggaagagaagccagcaagttagacacagcccctctctgggaggccgcctctaaaatggaactagcggacgtaccttggtttgtacatttgaccatggacacacgtaaagattttgaaaaaaaatctttgaaaaaaaatttttttaacgcaattcctaaacttttaactaac

SEQ ID NO: 347089 - DNA, 216 bp, Homo sapiens
  chr10:44185124-44185340
  hyper
cggcgaggtccactgggccagaccctggcccgaggtggccccggagctgtgagcgggaggaagagggaagggcggagtctggagccctcacgccttccgccttgtgcgcggtgcaggctgccgagagcccggccgggcaagcctttccgccgtggtcagtgactcgtttgcacaaggactttttagggaagagagaagccaggccttcgctgtggg

SEQ ID NO: 347090 - DNA, 78 bp, Homo sapiens
  chr10:44186043-44186121
  hyper
accggtgaggaccctgcacccagagtcgggggtccaggctgttgctggaacaggaggcagctcggtgtccacggttcc

SEQ ID NO: 347091 - DNA, 107 bp, Homo sapiens; identical to SEQ ID NO: 345354
  chr10:44806674-44806781
  hyper

SEQ ID NO: 347092 - DNA, 197 bp, Homo sapiens; identical to SEQ ID NO: 345355
  chr10:44882100-44882297
  hyper

SEQ ID NO: 347093 - DNA, 73 bp, Homo sapiens
  chr10:64578688-64578761
  hyper
cagggcgcggagggcaggaccggggctgggggcggggcggggtgcctgagcgagggaaaaccgcgaggtcttc

SEQ ID NO: 347094 - DNA, 85 bp, Homo sapiens
  chr10:72015065-72015150
  hyper
cgaaggggaaggcgtagacggtgaccaggtgcagctgcggcgcgctgagctgcccgtagtcgatgagcagcagcagcgcccagag

SEQ ID NO: 347095 - DNA, 323 bp, Homo sapiens
  chr10:72238261-72238584
  hyper
cgcactagcgacgagggaagaggaactggcttcccgggcagtctcccccgccccaaacttttcctcctcgcggagggtgggcgggcggagggaggaagcgcagccggggaacgtggcgcccgcgttcctcccgcccgggggctgcggctgggctgagtgtgtctttaaatctgagccccccgcccctcgcggtggggccgggactcgcggtccgggcgggggcgggcgcggtgattggcggccgggtcgggtccgcccctcggcgttgggtagcggggcgctggggagcagcgcggcgcgcacgggccggggcgcgcaggtcc

SEQ ID NO: 347096 - DNA, 249 bp, Homo sapiens
  chr10:74057413-74057662
  hyper
cgccgctcccctccctccttcccgctcccccgggcaggaaggctcgcgtgcgcgaggccacagcgcaagcgggtgcagagcaggattcgaacagggttccatgcaactccgtgcccagggtcctaccaccgcctgagctcagcggtcttcagccagcggggcccttccacccccttccttaatagttttcctcctccgcctcctgcacggcctccgcctccgcctgaccgtcctcggaaacctcccagc

SEQ ID NO: 347097 - DNA, 295 bp, Homo sapiens
  chr10:74057707-74058002
  hyper
cgccccccagctccgcacctccccagccccgcccgaggcgcgcccagcgagcgtgaccccgacccagggccacggctgcgcccgtaggatcgcgggcgcgcgggtctccatgagggactgggagagatgcgtcacccgctaatccctcaactgggtcgcacccggtctgccttggttggtcccttctgatggcggaggcgggacctcgacttggtggccaatgaggagcctcgtgggggtgctctcggctgccatggcaacggaggggccgcccgcttccccgcggggcgaggcc

SEQ ID NO: 347098 - DNA, 412 bp, Homo sapiens; identical to SEQ ID NO: 345356
  chr10:74079281-74079693
  hyper

SEQ ID NO: 347099 - DNA, 179 bp, Homo sapiens; identical to SEQ ID NO: 345357
  chr10:74079752-74079931
  hyper

SEQ ID NO: 347100 - DNA, 174 bp, Homo sapiens
  chr10:77161449-77161623
  hyper
cgctgcgttctcgcggccccgcgccggcgctgcgctctgcgatgcgagccgctgcgtgtccagccggggctctggcgaggaaactcacttcaaaagcagctgcaccaagggggagattaaagcctttgccgccttccaatcaaatgggagcccgaggtgattggagggtcaagg

SEQ ID NO: 347101 - DNA, 742 bp, Homo sapiens
  chr10:77161691-77162433
  hyper
gctccctcttcgccgcccccctgtgtgtcccctccctcgatttcgctgggaggacgagatggacatttattctacgtttgccatccgccgcctccctcttttttcctcctcgtcgttcttcctttccccagctcgaaaataaactgaaaccttcttttgaaggggggtgcgcgtgaggaacagactgcggggggtgtccagaaggagcaccggtgggagtgtggacaccggccggactgtcaactccaggggcgaagggaacctgcacacccagtgttttttccttcgcagtaatcgagatcccgcgcggcgcagcgcagccaccagggtaagaaggcaaggtggggagccggagctggaagaagcccgcccgcccgctctaatttcctcagattccgcggcggagaaaccagaagctagatgggcagtcgcagcggcggcggctcaacaccgcgaggagcgctgggctctccgcccttcccggccacgtgacgcccggggacgcgtagattggggcagcagcgggggtcacatgtttcctctgtttcaccctcagtctgtcccccaaccccccattcttactctcccaccctgttttcctccctcccccccttctttgggcatctccacccctccatcaattgtcaatgttcctcgaccgcaatcaatcagttatttgtcagctcttgtcaatcctcccgtgatttatgtcagcttttgttgctgattacaaggcgggtgc

SEQ ID NO: 347102 - DNA, 417 bp, Homo sapiens; identical to SEQ ID NO: 345358
  chr10:89621342-89621759
  hyper

SEQ ID NO: 347103 - DNA, 148 bp, Homo sapiens; identical to SEQ ID NO: 202167
  chr10:89621836-89621984
  hyper

SEQ ID NO: 347104 - DNA, 853 bp, Homo sapiens; identical to SEQ ID NO: 345360
  chr10:89621985-89622838
  hyper

SEQ ID NO: 347105 - DNA, 53 bp, Homo sapiens; identical to SEQ ID NO: 345361
  chr10:90342577-90342630
  hyper

SEQ ID NO: 347106 - DNA, 57 bp, Homo sapiens; identical to SEQ ID NO: 345362
  chr10:93647662-93647719
  hyper

SEQ ID NO: 347107 - DNA, 384 bp, Homo sapiens; identical to SEQ ID NO: 287332
  chr10:94833649-94834033
  hyper

SEQ ID NO: 347108 - DNA, 761 bp, Homo sapiens; identical to SEQ ID NO: 345363
  chr10:98479725-98480486
  hyper

SEQ ID NO: 347109 - DNA, 124 bp, Homo sapiens; identical to SEQ ID NO: 345364
  chr10:100994695-100994819
  hyper

SEQ ID NO: 347110 - DNA, 257 bp, Homo sapiens; identical to SEQ ID NO: 202223
  chr10:102585797-102586054
  hyper

SEQ ID NO: 347111 - DNA, 109 bp, Homo sapiens; identical to SEQ ID NO: 202224
  chr10:102587493-102587602
  hyper

SEQ ID NO: 347112 - DNA, 163 bp, Homo sapiens; identical to SEQ ID NO: 202225
  chr10:102587906-102588069
  hyper

SEQ ID NO: 347113 - DNA, 77 bp, Homo sapiens; identical to SEQ ID NO: 202226
  chr10:102588175-102588252
  hyper

SEQ ID NO: 347114 - DNA, 160 bp, Homo sapiens; identical to SEQ ID NO: 202227
  chr10:102588941-102589101
  hyper

SEQ ID NO: 347115 - DNA, 653 bp, Homo sapiens
  chr10:102791390-102792043
  hyper
cgcagggtggggcagctggtcccaggaccggaagaatcctaagaatccttctgatgcacttgctcggatgcagaccgcgaggttcctggggtcgtctgcccctccacatctcaggggtggggctacggtctggggtgcagggctaggggttgggagcgtaaggagaccagggacacagtggagctaggggttacagagggggagcagggagagggctggggacatagaagaggcacaggcacgacaggaacggggctgtgaagtgatgcgaatgccgcgctgctacaagaggagcttgtggatactggggtaggagcccagggggacaagcaagccaaaggccattgccaaggcagccatcaagtaaacaagccaggcggtaacccgagtccctcccggcgcgccagcagaggaccgcccctccacaccgcccacctgcgcccggggctttctctctgggcacctagaccgcttgctgcagggctgggggtctgctgaggcccgccaggggactgtaaaccaagggagcagcgcccgcggctccagcccctcctccctttggctggggagggggccagaactgatccccgaggtgggattggctctgggaagcagcttagggcctggtccaggtggcccaggctgggggcatc

SEQ ID NO: 347116 - DNA, 114 bp, Homo sapiens
  chr10:102792044-102792158
  hyper
cctcgaatgacacccaccgccctcaggttctgccaatccccgtgcccaccgggtgggcgcggccgggaagctcctgcccctccctgctggtcggcgtcacgcgtgacgtcccgc

SEQ ID NO: 347117 - DNA, 33 bp, Homo sapiens; identical to SEQ ID NO: 345367
  chr10:102995986-102996019
  hyper

SEQ ID NO: 347118 - DNA, 737 bp, Homo sapiens; identical to SEQ ID NO: 334066
  chr10:111767130-111767867
  hyper

SEQ ID NO: 347119 - DNA, 587 bp, Homo sapiens; identical to SEQ ID NO: 287577
  chr10:118608718-118609305
  hyper

SEQ ID NO: 347120 - DNA, 239 bp, Homo sapiens; identical to SEQ ID NO: 202308
  chr10:118891774-118892013
  hyper

SEQ ID NO: 347121 - DNA, 131 bp, Homo sapiens
  chr10:121301363-121301494
  hyper
cgcacccaaaggcctgcacaggtcgtagctattgtgatgagcaaaagggtggaaggaccggaatcaagggcacggctccaccttcaccgtggggtctttggcctatcaagttgcccgagatcgtggctcag

SEQ ID NO: 347122 - DNA, 760 bp, Homo sapiens; identical to SEQ ID NO: 345370
  chr10:121301911-121302671
  hyper

SEQ ID NO: 347123 - DNA, 138 bp, Homo sapiens; identical to SEQ ID NO: 345371
  chr10:122708760-122708898
  hyper

SEQ ID NO: 347124 - DNA, 119 bp, Homo sapiens; identical to SEQ ID NO: 345372
  chr10:123357495-123357614
  hyper

SEQ ID NO: 347125 - DNA, 106 bp, Homo sapiens; identical to SEQ ID NO: 202340
  chr10:123357660-123357766
  hyper

SEQ ID NO: 347126 - DNA, 375 bp, Homo sapiens; identical to SEQ ID NO: 202341
  chr10:123357893-123358268
  hyper

SEQ ID NO: 347127 - DNA, 203 bp, Homo sapiens; identical to SEQ ID NO: 202353
  chr10:125851929-125852132
  hyper

SEQ ID NO: 347128 - DNA, 96 bp, Homo sapiens; identical to SEQ ID NO: 287649
  chr10:125853277-125853373
  hyper

SEQ ID NO: 347129 - DNA, 1193 bp, Homo sapiens; identical to SEQ ID NO: 334112
  chr10:126106668-126107861
  hyper

SEQ ID NO: 347130 - DNA, 66 bp, Homo sapiens
  chr10:134676272-134676338
  hyper
cgccggcctcggggagcaggttcaggagaggctggagggggacggggcggccgggctgcactggct

SEQ ID NO: 347131 - DNA, 41 bp, Homo sapiens
  chr10:134676653-134676694
  hyper
ttcactccccaagtcccagagctcaggaccacggaggcccc

SEQ ID NO: 347132 - DNA, 123 bp, Homo sapiens
  chr10:135075001-135075124
  hyper
cgcgccagcctggcaccacggggacgctcccagggggtgcccagagggaacgtgcgcatcgggcggggtactgcggcgcgtgtgggccgtgagccccgccctgtagtcggacactggagtccc

SEQ ID NO: 347133 - DNA, 731 bp, Homo sapiens
  chr11:1410711-1411442
  hyper
cggacgtggcagccggcgggctggaggctcccaggtcccggcctcgccctggcctcgcctcgccccctagagtctccccgagcgctcgtagcggcggggcggggtggggaggcgctgattggccggcgcgggcaccgcttgccgccgccacggcatcccgctgcgttcgtacaggctcgtgtcgactcggctccgttgcgcggcccggctcggctcccctcagctgcgctcgactccgctgttcggctcggctgttcggcttggctacagggctcggctgttcggcttggctacatggctcggctgcgcggctcggctctgttcggctcggctcggctgctgggctcggctgttcggctcagctgcgcggctcggctcgtctcggctctgttcggctcggctcggctgctgggctcggctgttcggctcagctgcacggctcggctcggctcggctcggctcggctgcgcggccgctgacgggcgtgcgctgggggcgcggggcgcggggcgcgggcctcggcggcggcggcggcggcggcggcggaagccaggtgcccccgcccgccctgtcctctcgacgaggcggaggcgtcgccgcgggccaggcctcggactgccgcgtcggagtggacgcggggggcggcggcgcgggcggacgcgggcggcgcgaagcagcggggcccgcgggggcgccccggccgggtcggcgcggacggcactcggcggacg

SEQ ID NO: 347134 - DNA, 93 bp, Homo sapiens
  chr11:2290844-2290937
  hyper
cgctcgggcctggcgctcggctccgcgggctcctgggggcgcgacccgccgggcctgcccaccccgtccctccaccccggcccccggccctcc

SEQ ID NO: 347135 - DNA, 124 bp, Homo sapiens; identical to SEQ ID NO: 345376
  chr11:12131738-12131862
  hyper

SEQ ID NO: 347136 - DNA, 287 bp, Homo sapiens; identical to SEQ ID NO: 202443
  chr11:12132212-12132499
  hyper

SEQ ID NO: 347137 - DNA, 234 bp, Homo sapiens
  chr11:12696746-12696980
  hyper
agccagaagttcggagcgagcgcgggcgggcagagccgccgcctcggagcccggagccggcctgcacccccctgctttcgccgccgccccccggcgccgggtacccccgaggccggcccgggtctgcgcagacttgtgccgctggcggggggttcgctccttcttctcaaagatgaaaaagggcacggtcgtctttgccgcttctccaggactgttgctgccgctgccgccgcc

SEQ ID NO: 347138 - DNA, 798 bp, Homo sapiens
  chr11:17034991-17035789
  hyper
cgcaggcccgcgcagtggatggaggccgggggcgaggttccgactctccaagaccatcccagagcctgcggcgggagagggggcgtcctcctaagcgagattcccctagtctctccctctccccactccaaccccgcaggcccacaccaggacagaacttctcgttctactcctcccacccgagcccatccaggtcccggcactcgcctctcccggcggggcgcagccccagaccctagaggggaggcgtgcccagcccgcacaccagcacccgaatccagccggattgcaaggtccagggcgcagagtctgcggcctcttcccccccggcccaggtccccagcgtaggtgcggcccccaccgccttcctctcggaggccgccaaacaacttgggcacacaaaacgttgagtgtggccgcggcgcagcgcgcgccaacgagcccgggccggcgggagcagaggaagggcggggcgcccggcgggaacggggagggaccccccccccgcggcacaggtgcgagcgcggcggccccactcactcactcgatgaagtagctggcgccctcctccgtgaagccctcctcccagccgcggggcaggtctgcggaaacgccagaaaagtcgggtcaaacttgggccgccgctgcgcgcgccccccacccgccggcccggcgcccacctgagcggatcatgtggcccgagttgacgggctccccggtgcgcggatgcagccaggtcgtgcagcggagctggtcactgcgggcagagaggtgcacctgttagcgccgccacagccc

SEQ ID NO: 347139 - DNA, 796 bp, Homo sapiens; identical to SEQ ID NO: 345378
  chr11:17035791-17036587
  hyper

SEQ ID NO: 347140 - DNA, 982 bp, Homo sapiens; identical to SEQ ID NO: 345379
  chr11:19733991-19734973
  hyper

SEQ ID NO: 347141 - DNA, 338 bp, Homo sapiens; identical to SEQ ID NO: 202485
  chr11:19735066-19735404
  hyper

SEQ ID NO: 347142 - DNA, 917 bp, Homo sapiens; identical to SEQ ID NO: 345381
  chr11:19798519-19799436
  hyper

SEQ ID NO: 347143 - DNA, 66 bp, Homo sapiens; identical to SEQ ID NO: 287911
  chr11:20153468-20153534
  hyper

SEQ ID NO: 347144 - DNA, 224 bp, Homo sapiens; identical to SEQ ID NO: 202495
  chr11:31821778-31822002
  hyper

SEQ ID NO: 347145 - DNA, 76 bp, Homo sapiens; identical to SEQ ID NO: 345383
  chr11:32449104-32449180
  hyper

SEQ ID NO: 347146 - DNA, 929 bp, Homo sapiens; identical to SEQ ID NO: 345384
  chr11:32915113-32916042
  hyper

SEQ ID NO: 347147 - DNA, 250 bp, Homo sapiens
  chr11:33891709-33891959
  hyper
cggggacggggagagccgctcagcgaacacctctccttggaaaggaggctgggcaaccactaaatcattcttcagggcttcccctcttccgcctttcccttttggtttaactaaggcagaaagtaacccacgaacagctcgagcaagcaagaaaagacaagaatgtgaaataagcacctacagaaatgcaagtgttcccagtggattttccgcccgtcccaggttcgaggtcccaggtccacggacgccg

SEQ ID NO: 347148 - DNA, 119 bp, Homo sapiens
  chr11:33892127-33892246
  hyper
cagggcagctaatcccagagggagggtggctgggagggaccacgcggggccggggctcctctcagtcggctggtggcggaatcccctccctctgcacctttcagaaagcggactcctgc

SEQ ID NO: 347149 - DNA, 56 bp, Homo sapiens; identical to SEQ ID NO: 345385
  chr11:35547041-35547097
  hyper

SEQ ID NO: 347150 - DNA, 208 bp, Homo sapiens; identical to SEQ ID NO: 202515
  chr11:35547127-35547335
  hyper

SEQ ID NO: 347151 - DNA, 55 bp, Homo sapiens
  chr11:43599961-43600016
  hyper
cgtccctctctcggaaggttccctgactgagactgaatattcaactcataatagt

SEQ ID NO: 347152 - DNA, 238 bp, Homo sapiens; identical to SEQ ID NO: 202528
  chr11:43600215-43600453
  hyper

SEQ ID NO: 347153 - DNA, 51 bp, Homo sapiens; identical to SEQ ID NO: 345388
  chr11:44337578-44337629
  hyper

SEQ ID NO: 347154 - DNA, 86 bp, Homo sapiens; identical to SEQ ID NO: 345389
  chr11:47208495-47208581
  hyper

SEQ ID NO: 347155 - DNA, 188 bp, Homo sapiens; identical to SEQ ID NO: 345390
  chr11:58940419-58940607
  hyper

SEQ ID NO: 347156 - DNA, 200 bp, Homo sapiens; identical to SEQ ID NO: 202554
  chr11:58940666-58940866
  hyper

SEQ ID NO: 347157 - DNA, 55 bp, Homo sapiens; identical to SEQ ID NO: 345392
  chr11:58940867-58940922
  hyper

SEQ ID NO: 347158 - DNA, 190 bp, Homo sapiens
  chr11:59333673-59333863
  hyper
aaaaggtaagacatatgtccccagtatcctccctcccaggggaaaatgacgataaggtttcccttaactgccccagcccgcgtgagaacccacagggtgttgaccctgttaactgcagaaagaccctgttaactgcagaaatcacatgtagtgatgactaacgcctaaaacggaagcgctgccgaaaccc

SEQ ID NO: 347159 - DNA, 315 bp, Homo sapiens; identical to SEQ ID NO: 202562
  chr11:61276101-61276416
  hyper

SEQ ID NO: 347160 - DNA, 604 bp, Homo sapiens
  chr11:61347974-61348578
  hyper
ccacacacgttgtccttgggctgttgaggggtgggggagaggtccttgtggggacactgcgaagccggtcccagacatccagcctggcagtgtccagactgcgggggaccggggtccgagccgctgccgctcgatcccgcgcccccggggctgggatgacccctgggggagcccgtgcggctccgggcggacaacagccccaggctggggctccgagacggcgtccggcgctgccgctgtcctgcccgccggtgcggggcgccccagcccgccggggccgcgcttacctgggctggccgcctccgggtcccggtacatggtcccctcgtcgccggttccctccgggctcctcagagccgcccgcggccgcgcgctgctccgccgccgccgctgggcatggggccgggcgacccccgggggcgggtccgagggcgggggccgagcgggctgcacctagccgcggagccggggagcgggggccgcccgccagccctcccgcccgcccgcggagcacgctgccgccgccgccgaacagcgccgagccgcctccctccggcctgcgcgccgcgtgtgcgcgccggagcgtgtgtgtgtgtacgaggcc

SEQ ID NO: 347161 - DNA, 203 bp, Homo sapiens; identical to SEQ ID NO: 334283
  chr11:64015094-64015297
  hyper

SEQ ID NO: 347162 - DNA, 549 bp, Homo sapiens; identical to SEQ ID NO: 345393
  chr11:64512349-64512898
  hyper

SEQ ID NO: 347163 - DNA, 61 bp, Homo sapiens; identical to SEQ ID NO: 345394
  chr11:64513748-64513809
  hyper

SEQ ID NO: 347164 - DNA, 35 bp, Homo sapiens
  chr11:65553778-65553813
  hyper
cgcgcagttgaagccacttcctccgtgaagccctc

SEQ ID NO: 347165 - DNA, 227 bp, Homo sapiens; identical to SEQ ID NO: 202605
  chr11:65554410-65554637
  hyper

SEQ ID NO: 347166 - DNA, 39 bp, Homo sapiens
  chr11:65554723-65554762
  hyper
ccttagcgactccttccctgttgtgcccccgttcccggc

SEQ ID NO: 347167 - DNA, 1101 bp, Homo sapiens
  chr11:66079395-66080496
  hyper
cgaggcctcgcggtggctgtaagtccgtggggccgaggccaggtggcgccaaaggcccatcgacgccatctgcccggctgtccgggcccagtctccgggctcgcccagagaacccgaaatctggacaaacggaaaccgtaggtggaggaagaagagggctccagggccaggttcaagggcatcgtggtgagagatgaggggttcggaggactggtggatctgggcatatcgcgaaggtggtaagggacccaggggtggagtgggcggtgcttgcgccaagagggtgagcctgagtgtgggcggggcgtgcgataagaggctcgctcggtagcgctcttcgcagagccgtatttgtgcgctacgccgcagccagggcgctctgggtgggcgggactccagggcccccaggggcgtggcttgcatctttcgtgggcggccccgggggcggggctccgtgtaggtgaaccgctacctccgctcgatgtgtgaggtgtgacagtcctacgagggcgcagttcttccacttttgtgagcttgagagggggcggagcttgtagctggggacggagcctgaagaggaggttgaggggaacttcacacgtttccctggagggcggagtttacatcatcccccaacagagttaagacctctgagggattccctgcagtgtccagggctctgtgaggcgaagcttgcagttgtgttgggcggggcctgtagcgccgcgtgaagagaatgtgtaaactcggggcgaagttcatacctcctagaagccgagactaatagttccgccaatctgcgcgcgccgagcggaggaggtggggcttgtaggttgtgggcgggggactgggcggggccaagagggcagggggcgggcacaatcgctgctggaatctttgagttggcaggggcggggcttgtggctttgtgggcggggcctctggagagctcccgggggctctcttctgttctgcagcgagtaggcgtggctcgtagctcccaggtccgggctgataccgctggagtatgcagttcgccgccgcgcccgaatgaggcggggcctgcgagtaagtgggctgagcccgggctgggcgcaggcc

SEQ ID NO: 347168 - DNA, 329 bp, Homo sapiens; identical to SEQ ID NO: 202615
  chr11:66187467-66187796
  hyper

SEQ ID NO: 347169 - DNA, 269 bp, Homo sapiens; identical to SEQ ID NO: 202616
  chr11:66187826-66188095
  hyper

SEQ ID NO: 347170 - DNA, 223 bp, Homo sapiens
  chr11:66725377-66725600
  hyper
cgatggggacaacttgggctcccgatcctgacagacttgggttcgaaccctcagggacctcgcgcgaggcgctttagtcagtttctccatctgcaaaatgggcccgagagcaagaatgaggcagcccgcaggcggacgctgcggaggggcgctcgggggctgcagccgggggcgggtccgggggcgggtccagccggccgagcccccgcgcgagggggagggg

SEQ ID NO: 347171 - DNA, 308 bp, Homo sapiens; identical to SEQ ID NO: 288243
  chr11:66725637-66725945
  hyper

SEQ ID NO: 347172 - DNA, 119 bp, Homo sapiens; identical to SEQ ID NO: 202630
  chr11:67232283-67232402
  hyper

SEQ ID NO: 347173 - DNA, 127 bp, Homo sapiens; identical to SEQ ID NO: 345397
  chr11:67232464-67232591
  hyper

SEQ ID NO: 347174 - DNA, 844 bp, Homo sapiens; identical to SEQ ID NO: 345398
  chr11:73693765-73694609
  hyper

SEQ ID NO: 347175 - DNA, 324 bp, Homo sapiens; identical to SEQ ID NO: 202663
  chr11:74951799-74952123
  hyper

SEQ ID NO: 347176 - DNA, 509 bp, Homo sapiens; identical to SEQ ID NO: 345399
  chr11:76381512-76382021
  hyper

SEQ ID NO: 347177 - DNA, 675 bp, Homo sapiens; identical to SEQ ID NO: 288384
  chr11:92930674-92931349
  hyper

SEQ ID NO: 347178 - DNA, 47 bp, Homo sapiens
  chr11:92931379-92931426
  hyper
aaggcgttagcgttctgtaagtcaccttggagaatgcgaagaaggac

SEQ ID NO: 347179 - DNA, 131 bp, Homo sapiens
  chr11:106889091-106889222
  hyper
ccgtgcgccgcgctcccgctcacggggaggctccgagagtgtgtgaccgcggtcggcggggcggggagggctgcggcccaagcagaaggggaggcagaggcagaggcttctgccgcctgcgcgcctatctc

SEQ ID NO: 347180 - DNA, 398 bp, Homo sapiens; identical to SEQ ID NO: 202729
  chr11:115375434-115375832
  hyper

SEQ ID NO: 347181 - DNA, 301 bp, Homo sapiens
  chr11:115375894-115376195
  hyper
tggttttaatatataggtgtgtgttgaatatatgtgtgaaatatttgtaatattagatatttaagattacacaacaacggaaaaaattagtcaaggcttcaggtgaagagcgggggtggtgggagttggggagagggagtgtggtgaaggcagggtctgccgtgttcctccttcggggctcaaaccctctcactcctcctctgcgcccccagcccttcctaaggaagctggggaccaacaggtgctccgagcttcccctgtctctgggagagcctctcctgctaaagcgacttgcatctcc

SEQ ID NO: 347182 - DNA, 166 bp, Homo sapiens; identical to SEQ ID NO: 345400
  chr11:120894634-120894800
  hyper

SEQ ID NO: 347183 - DNA, 85 bp, Homo sapiens; identical to SEQ ID NO: 345401
  chr11:120895026-120895111
  hyper

SEQ ID NO: 347184 - DNA, 191 bp, Homo sapiens; identical to SEQ ID NO: 334392
  chr11:124616924-124617115
  hyper

SEQ ID NO: 347185 - DNA, 135 bp, Homo sapiens; identical to SEQ ID NO: 345403
  chr11:128391758-128391893
  hyper

SEQ ID NO: 347186 - DNA, 623 bp, Homo sapiens; identical to SEQ ID NO: 345404
  chr11:128392116-128392739
  hyper

SEQ ID NO: 347187 - DNA, 543 bp, Homo sapiens; identical to SEQ ID NO: 345405
  chr11:129148497-129149040
  hyper

SEQ ID NO: 347188 - DNA, 820 bp, Homo sapiens; identical to SEQ ID NO: 345406
  chr11:129149096-129149916
  hyper

SEQ ID NO: 347189 - DNA, 161 bp, Homo sapiens; identical to SEQ ID NO: 345407
  chr11:133939437-133939598
  hyper

SEQ ID NO: 347190 - DNA, 241 bp, Homo sapiens; identical to SEQ ID NO: 202804
  chr11:134201549-134201790
  hyper

SEQ ID NO: 347191 - DNA, 236 bp, Homo sapiens; identical to SEQ ID NO: 345409
  chr11:134202154-134202390
  hyper

SEQ ID NO: 347192 - DNA, 145 bp, Homo sapiens
  chr12:1905625-1905770
  hyper
cggtcataagcgggggagcgcagagccagttttcaattcaggagtgtctactctgaagccctcgcttcactccggagcccgctggctctatcctcgcaccgagcctttgcgacaagtgcacagggaacgctaaccccagccctca

SEQ ID NO: 347193 - DNA, 204 bp, Homo sapiens; identical to SEQ ID NO: 202815
  chr12:1905826-1906030
  hyper

SEQ ID NO: 347194 - DNA, 114 bp, Homo sapiens; identical to SEQ ID NO: 202816
  chr12:1906322-1906436
  hyper

SEQ ID NO: 347195 - DNA, 99 bp, Homo sapiens
  chr12:1906476-1906575
  hyper
cggctgtggagccgtttcccgggggttccggggccctgcccgcacttccgccttgccgagggcgggaggagtgtggcgggacgggcggcgccgccctgc

SEQ ID NO: 347196 - DNA, 238 bp, Homo sapiens; identical to SEQ ID NO: 202823
  chr12:2800603-2800841
  hyper

SEQ ID NO: 347197 - DNA, 245 bp, Homo sapiens
  chr12:2801019-2801264
  hyper
gccggctccgcccaaccaggtggtgctgagcttccgctgagcgctcttttgttttgtggtttgacacttttcttgacagcatgttgcagtttcttttcggttttggttttttttaaatgttttattttgctttcccagcgggaggggaggaagaagagtgtttacaaagtcctgtagccccctcacctttctgttttcacttttgccaatgtacatcgggtttggttttcttgtattatttaaac

SEQ ID NO: 347198 - DNA, 198 bp, Homo sapiens
  chr12:3600534-3600732
  hyper
ggggagggggtcgggggcacgagaagaacttgaaaccgtgtgaaggaatccggagcagatgagaagggaggaaaataaaagaaagtggagactgcagaacagactccgctgtggctgactgtgccggccgacgctccagctgaggggctgggttggatttttttttttctcccatcctctcgctctctcttttaaagc

SEQ ID NO: 347199 - DNA, 396 bp, Homo sapiens; identical to SEQ ID NO: 288660
  chr12:3601625-3602021
  hyper

SEQ ID NO: 347200 - DNA, 125 bp, Homo sapiens
  chr12:4273746-4273871
  hyper
cgtgagccgtccccttcgctaacccccaaccccgccttctcctgctcctcctctcttcactcttcctgcctctcggctccggggtctcctcgcttccccgcagtccccgccccccagttcccaaa

SEQ ID NO: 347201 - DNA, 85 bp, Homo sapiens; identical to SEQ ID NO: 345410
  chr12:4377809-4377894
  hyper

SEQ ID NO: 347202 - DNA, 244 bp, Homo sapiens; identical to SEQ ID NO: 202837
  chr12:4378558-4378802
  hyper

SEQ ID NO: 347203 - DNA, 246 bp, Homo sapiens; identical to SEQ ID NO: 202838
  chr12:4379920-4380166
  hyper

SEQ ID NO: 347204 - DNA, 201 bp, Homo sapiens; identical to SEQ ID NO: 345412
  chr12:4381232-4381433
  hyper

SEQ ID NO: 347205 - DNA, 167 bp, Homo sapiens
  chr12:4382439-4382606
  hyper
ctaaaatcaccccctcccttatttttcacttaagggacctatttctaaattgtctgaggtcaccccatcttcagataatctaccctacattcctggatcttaaatacaagggcaggaggattaggatccgttttgaagaagccaaagttggagggtcgtattttggc

SEQ ID NO: 347206 - DNA, 50 bp, Homo sapiens; identical to SEQ ID NO: 345413
  chr12:4382915-4382965
  hyper

SEQ ID NO: 347207 - DNA, 209 bp, Homo sapiens; identical to SEQ ID NO: 202843
  chr12:4382999-4383208
  hyper

SEQ ID NO: 347208 - DNA, 155 bp, Homo sapiens; identical to SEQ ID NO: 345415
  chr12:4384059-4384214
  hyper

SEQ ID NO: 347209 - DNA, 95 bp, Homo sapiens
  chr12:6445038-6445133
  hyper
ccacacacagaaacacaacagcagcccccgcaggtggaggcgtgtgcccctgctcagaggacaacaaccttcccctgcccgcaccagccaacacc

SEQ ID NO: 347210 - DNA, 55 bp, Homo sapiens; identical to SEQ ID NO: 345416
  chr12:8123528-8123583
  hyper

SEQ ID NO: 347211 - DNA, 428 bp, Homo sapiens
  chr12:8850073-8850501
  hyper
cgtgtcggggttccaggcgcagattgatggggcctaagcagggaatgtgagggcggggagggcgtacaacggaagggactaatctcgcggtttcgagttgggagcaaacctcgccccccaccccccccatccgtttccctttctcagtgaagacggtttgggggcgggtggggaggcgcgtcctcggagcgccctcgcgctcccttttcgctccccgcgcgcgatccatcgcctctcttcccccgaggccagcgatggctcgggtgcgggcgaggagctgggagggcggctctcgacgcaggtgtcagatccgctcggcagtgctcggcgcgctggcccggcccccagctcctccggccgccgccccccgcccgccgcgccgcggcgccaggagggcggggccggggcgcgcgccgctcctcagcaag

SEQ ID NO: 347212 - DNA, 310 bp, Homo sapiens; identical to SEQ ID NO: 202867
  chr12:8850744-8851054
  hyper

SEQ ID NO: 347213 - DNA, 113 bp, Homo sapiens
  chr12:8851275-8851388
  hyper
tcctcgggattgcggcgacactccccctccccccccttcccacaaattctatggagcgaccgcgggaggaggatcacgtggtgcggtcccgcagctactgtattcgattccac

SEQ ID NO: 347214 - DNA, 107 bp, Homo sapiens; identical to SEQ ID NO: 345417
  chr12:14928211-14928318
  hyper

SEQ ID NO: 347215 - DNA, 81 bp, Homo sapiens
  chr12:16500402-16500483
  hyper
cgccaaatagaagggctcaaagggaatcagcaggcgatggttactgtgggcgggtaaatcaggtgatttagaggaggggtt

SEQ ID NO: 347216 - DNA, 393 bp, Homo sapiens
  chr12:16500621-16501014
  hyper
gcttcctcctcctcggcctcaccgtgcgtactgggaggggagaaggggaccgcatgcaaagggtggcaggcagggagggccagggtgggtggcagatggaagacttgggggggtctctgccagctggaagtgcttggctccacttagcagctaaacttagcttttcaatcgatcgcttttgaaagggaattgtatttctgtccccgtgcgggtaagttttcccatttctcaaactccaggaatgaaacgagagagtcttttcatgcttgagtgatgatttccaaacttagccttttcaagtcaaagtaacctcctgtttgaaagggtcccttgaactctggggaaggaggaaaaggcacgtgtagtaatggaggaaatgcctgtagtttgaac

SEQ ID NO: 347217 - DNA, 73 bp, Homo sapiens; identical to SEQ ID NO: 345418
  chr12:19282260-19282333
  hyper

SEQ ID NO: 347218 - DNA, 840 bp, Homo sapiens; identical to SEQ ID NO: 202900
  chr12:19282363-19283203
  hyper

SEQ ID NO: 347219 - DNA, 144 bp, Homo sapiens
  chr12:19283425-19283569
  hyper
ggtgacccccagctgccgtcttgccccccagcaatcttcaggcagtccttacccactcccctccctgcagccccggaccccgatcgcccgccgggataacgtaaccacatcctccccctcctcccaggagcgctgcctcctgcc

SEQ ID NO: 347220 - DNA, 117 bp, Homo sapiens
  chr12:21681020-21681137
  hyper
ccctctggctgccagggtgtgcagaggtccccagggagttaggacctgaggtgcagctcagaggggtaaggcgagataggaagaactatgcaaatgcttctagaaatgtatctgcgc

SEQ ID NO: 347221 - DNA, 118 bp, Homo sapiens
  chr12:22488705-22488823
  hyper
gtgcaaggacaaagaagaaacctggtcagcttagtcatcacgaaaacaaaatctaaggctataactccatttgttcagccgaccaggctgcggtgtctggtacctttgtctagcatcc

SEQ ID NO: 347222 - DNA, 252 bp, Homo sapiens; identical to SEQ ID NO: 202912
  chr12:24715505-24715757
  hyper

SEQ ID NO: 347223 - DNA, 292 bp, Homo sapiens; identical to SEQ ID NO: 288859
  chr12:45270086-45270378
  hyper

SEQ ID NO: 347224 - DNA, 334 bp, Homo sapiens; identical to SEQ ID NO: 345422
  chr12:46766939-46767273
  hyper

SEQ ID NO: 347225 - DNA, 493 bp, Homo sapiens; identical to SEQ ID NO: 202958
  chr12:48576976-48577469
  hyper

SEQ ID NO: 347226 - DNA, 60 bp, Homo sapiens; identical to SEQ ID NO: 202967
  chr12:49392537-49392597
  hyper

SEQ ID NO: 347227 - DNA, 539 bp, Homo sapiens; identical to SEQ ID NO: 345424
  chr12:49736253-49736792
  hyper

SEQ ID NO: 347228 - DNA, 336 bp, Homo sapiens; identical to SEQ ID NO: 345425
  chr12:49736828-49737164
  hyper

SEQ ID NO: 347229 - DNA, 1388 bp, Homo sapiens
  chr12:49738834-49740222
  hyper
cgagccttagagggatcgatgcggcccgggggccccgcccggggtcgatattcctgattgggaagcggccgcttcgcggagcccgcgtgtaaatcacctgggctgggggagggggcgtggggagcctaccacgtcccaggctcgcgaagccaggaggggtcgggacccgggcggtaccggagggcgacggaatgagaacgacaggccttagagaaccagagagaagcccgcccagggcctccccctcccccgctcagccctgccaactcccccagcaggctccagtctcgcttcagcggccgccacccttcgttgcccctggagccgccggggaggccagtgtcggagccagccatgcggcggctcctctctggccgctcccgcggggccggggcttcggcggctgctgtcacggagccgacaggccgggccggccgggaaggggcgggtggcgggggggagaggcggcggggtgaggctggctcagcgctggcactcagtgggcgcgcaacgtatgtttgccgaattgaaaggctgggacaccgagcggcgcagggcagagggtcggagggcacaggcggggtaggagatggcccagaccgggtgagggcagaagcctcactcacgggggaagaaggcactcgaggtcgctctgaggaccgctgggctgggatagaccacccatcccccgccggggagacccgggtagtaaagaacaagacagaatgggacaggcaggacggtttggaccccacctacaagcgcctccaccaccccagcctccgatccttgtcacgctctgctggggaaaccgaggcagccgatgctgagaatagccaaaaagttaaaagcggggtcagcgacgaagctggggcagcaaccagaattcctgcgtgggttttttggattcctccgcccacgcggggccagtttgcgggtaaatgcaccaccgcgccccgcaccacagctcagaccctttcctctcgctgcagtttgtcagatccccccacctcccactctgcaccagtttatagaacaacaatttggggaaaacaatccgggcggagtgacggccccgtaattgtgacaaagtgagtgcgggcggctggagagagcgctaggccgggagcgctgcagggcgaggcggaggcaggggcgcctccccccgccctgccgccccctcgttcttattccggtcacctcccatccctctccttgactcttcaattcctcttctcccggccccttgcgccttccttcgcttgttcctccatcgctcttccctttcctcccggtaacagctcttctcccgctcccccgaccccgtcgcccctcccccggtgcgctttttcctcgctcacttctcccctctcctctgccctccactc

SEQ ID NO: 347230 - DNA, 660 bp, Homo sapiens; identical to SEQ ID NO: 334522
  chr12:51785160-51785820
  hyper

SEQ ID NO: 347231 - DNA, 54 bp, Homo sapiens
  chr12:52401605-52401659
  hyper
cgagggccactgctccctggacttctgtcggaaccggacgcagtgggaggggtc

SEQ ID NO: 347232 - DNA, 194 bp, Homo sapiens; identical to SEQ ID NO: 345427
  chr12:54150983-54151177
  hyper

SEQ ID NO: 347233 - DNA, 333 bp, Homo sapiens; identical to SEQ ID NO: 334550
  chr12:54371976-54372309
  hyper

SEQ ID NO: 347234 - DNA, 278 bp, Homo sapiens
  chr12:54427358-54427636
  hyper
cggtaaactttaggacttcattttgcgctctcgggtccgcctgggttttataggccatgcggggcaaataaagaaaaaaaacctgcggccataaattttacgatccaggcatcaatggctcgtaaaactgtccactaaaaggcttagaggctgtgtgcgcccaaatttacgacgacataattggatcataggaacaaaacgtgtataaaaggcaatattcaatttttgggggagagggagggagttaaaaaaatagagggatctgaagggtgaggagc

SEQ ID NO: 347235 - DNA, 91 bp, Homo sapiens; identical to SEQ ID NO: 203023
  chr12:54427974-54428065
  hyper

SEQ ID NO: 347236 - DNA, 56 bp, Homo sapiens; identical to SEQ ID NO: 203024
  chr12:54428083-54428139
  hyper

SEQ ID NO: 347237 - DNA, 43 bp, Homo sapiens; identical to SEQ ID NO: 289037
  chr12:54428224-54428267
  hyper

SEQ ID NO: 347238 - DNA, 300 bp, Homo sapiens
  chr12:58026315-58026615
  hyper
agcatcacctgggccggggtgggctgcggagggcggctccacacctagcctgtcaggaaaaaatgcagaatcatgcccgtgctggcgggcgcccccggcggaggtgacccgatgagtggcctcggcaagcggcgcgggggacagagtggaccgggaagcgcgcctcctcccgcctcctcccgcctcctcctcctcccctcaccaaccaatcccacccccacccacccccgggcactgacctgtctaacgctctaaggcagcggcaaaatttcggtccgggctgtgccgggctctcgcccc

SEQ ID NO: 347239 - DNA, 184 bp, Homo sapiens; identical to SEQ ID NO: 345428
  chr12:63026256-63026440
  hyper

SEQ ID NO: 347240 - DNA, 203 bp, Homo sapiens; identical to SEQ ID NO: 203080
  chr12:66122570-66122773
  hyper

SEQ ID NO: 347241 - DNA, 126 bp, Homo sapiens; identical to SEQ ID NO: 345429
  chr12:69326527-69326653
  hyper

SEQ ID NO: 347242 - DNA, 264 bp, Homo sapiens
  chr12:93966037-93966301
  hyper
cgggctgcgccaggtgtgagaccggaatgccaatttggggaatctctcctgttctttcctttttaattttttctacttgtccttgacaagggcctattcccactggatctgcaggtgactatttgctcttcctaggtcgccagtctttgatttcagctagtgaccctgggcgggaagacaccctgttcaccctcctcctgacctccgccccccacctcttcagccaactttatcttggatctctgctctctttatcttttctct

SEQ ID NO: 347243 - DNA, 850 bp, Homo sapiens
  chr12:94542238-94543088
  hyper
cgaatcaagaggggaggggagatgggcgtggagggagggcgggcgggcgggcaggaggcggagggcggaggaggaagagaggatgaggaagggggccagttgcatcccactttcacaatgggaaagtgaaacgcacaagcgcacccaacctctccagccctccccgcccgcctcgctcctctccgcccgtcccctcccttcccctccgcgcctccccgcgagcgccagcgctgcacacaggaactctccggcgaaggagggcgaggaggaaacggtgccggagcgcgcagggcttgctgccgccaccgccgctgcacaggctgccggagcgagcctgccgcgcgccgccctccccgctctccttcctgggcgagctgcggggatggggcggccgcgggagcccgagcgcgcgcaggaaccgccgccgccgccgcccgcgtctccgttgccgcgcgcctgagccgccgtcgccgccgcgcgccctgcccgggggcggcccccccagccccatggaggtctcccggaggaaggcgccgccgcgccccccgcgccccgcagcgccactgcccctgctcgcctatctgctggcactggcggctcccggccggggcgcggacgagcccgtgtggcggtcggagcaagccatcggagccatcgcggcgagccaggaggacggcgtgtttgtggcgagcggcagctgcctggaccagctggactacagcctggagcacagcctctcgcgcctgtaccgggaccaagcgggcaactgcacagagccggtctcgctggcgccccccgcgcggccccggcccgggagcagcttcagcaagctgctgctgccctaccgcga

SEQ ID NO: 347244 - DNA, 86 bp, Homo sapiens; identical to SEQ ID NO: 345430
  chr12:94544052-94544138
  hyper

SEQ ID NO: 347245 - DNA, 267 bp, Homo sapiens
  chr12:103351149-103351416
  hyper
cgccccgagcgcgccgcctgtttattcagccgggagtccggcacgcgccaggcgcacgcactgcaacaacaaacccagctgaatggagagtttgcaaggagcgggagaaaggaacgggagggggggagaggagaggaggagggggagtttagggagtgggtgggaggaagaggtaagaggaggggggggagtgggggctgcagccgctcgctgcagcagcggggagtggggggcgaggcggggccagggctgcgcgtggggctgggt

SEQ ID NO: 347246 - DNA, 105 bp, Homo sapiens
  chr12:104850139-104850244
  hyper
cgggaaagctcagctgtcgcctgacccgagggtcgtgcagtttccttaaccctgactttaagtcagccctctttaaccccgactcccaagctgggctgtcctttg

SEQ ID NO: 347247 - DNA, 348 bp, Homo sapiens; identical to SEQ ID NO: 203159
  chr12:104851545-104851893
  hyper

SEQ ID NO: 347248 - DNA, 507 bp, Homo sapiens; identical to SEQ ID NO: 289355
  chr12:112204412-112204919
  hyper

SEQ ID NO: 347249 - DNA, 186 bp, Homo sapiens; identical to SEQ ID NO: 345433
  chr12:112204992-112205178
  hyper

SEQ ID NO: 347250 - DNA, 83 bp, Homo sapiens; identical to SEQ ID NO: 345434
  chr12:113495127-113495210
  hyper

SEQ ID NO: 347251 - DNA, 58 bp, Homo sapiens; identical to SEQ ID NO: 345435
  chr12:116946548-116946606
  hyper

SEQ ID NO: 347252 - DNA, 1016 bp, Homo sapiens
  chr12:117536372-117537388
  hyper
cgggccgatgcggggcgcgcagcctttgctggtcccgggagactcagcgaactcaggggaggacgctgggctccgggcaaagtgctctgcggccgctgcctcgctaagtctcccagccacccgcggggatgaggctgcctgaacccattttacagatgcgaggacgaaagcaggcgccgggcgccggctctcccgactaaggtcacccggccggggagcgtcggagacctgttcccacccaggtccgccgacttcaaaactttccgctctcgcgctcacgaatgcaaacgactctcaggtgtggggcgcgcgcgccagcgggggtgcctgagggacttgcccgcccggcctgaggcacctgccctgcgcttgggaagcctgggccccgctccctccccggtccgcagtcccccggccagggagttcccgggccagtccgaagctgagcggctgcggcactgagcatcgccgcggagctcctcgccgcagcccgcgaggtggccagcggggacccatttgaaagaggaggagactgaggcgcagagagggcccgccactggcccaaggtcacacagcgcggcggcgggccggggtccccaacagtggccgttcggaggtcccgccccggtccccgcgccgccccccgcgggtactcacagccggtcttgccctcgagctcccgcacctcctcagacgcggagtgggcagcgcccatggtgcccgcggcgggggccccggggcgcgcgtccctctcaggccccgcactggcttcggctgcgcagcggcgggactggcctcgggtccggcctcgggtcgggacgccggcgaaggctcggagccgcgggttccgcgtggggccggagcggggcctcatataacggcggagggcggcgcgccgcggtcctagcgcacgccggtttcgcgcactgcgcggctaggggagcgccccgccccgccccggcccggaaaccgccgggaaggggaccccggagcccaccgctctggagtccccgttc

SEQ ID NO: 347253 - DNA, 473 bp, Homo sapiens; identical to SEQ ID NO: 334688
  chr12:123380333-123380806
  hyper

SEQ ID NO: 347254 - DNA, 173 bp, Homo sapiens; identical to SEQ ID NO: 334693
  chr12:125093646-125093819
  hyper

SEQ ID NO: 347255 - DNA, 133 bp, Homo sapiens; identical to SEQ ID NO: 334694
  chr12:125477548-125477681
  hyper

SEQ ID NO: 347256 - DNA, 435 bp, Homo sapiens; identical to SEQ ID NO: 334695
  chr12:125815555-125815990
  hyper

SEQ ID NO: 347257 - DNA, 167 bp, Homo sapiens; identical to SEQ ID NO: 345438
  chr13:20735265-20735432
  hyper

SEQ ID NO: 347258 - DNA, 70 bp, Homo sapiens; identical to SEQ ID NO: 345439
  chr13:27131483-27131553
  hyper

SEQ ID NO: 347259 - DNA, 196 bp, Homo sapiens
  chr13:28527649-28527845
  hyper
cgctccagctgccactaatcatggaagcccagaggcgaaatcagcttcccggggacccagaaaattgctggagtctggcgaggggcaaatcaggaagtgtctttgtcggagatgggacggaacccggcttcggggcgcaaccgggctctgggggagaccgcgtttgtccaggtggcaggccgcgccttctgatggc

SEQ ID NO: 347260 - DNA, 37 bp, Homo sapiens; identical to SEQ ID NO: 345440
  chr13:29069851-29069888
  hyper

SEQ ID NO: 347261 - DNA, 200 bp, Homo sapiens; identical to SEQ ID NO: 345441
  chr13:29292491-29292691
  hyper

SEQ ID NO: 347262 - DNA, 242 bp, Homo sapiens; identical to SEQ ID NO: 345442
  chr13:29293342-29293584
  hyper

SEQ ID NO: 347263 - DNA, 97 bp, Homo sapiens
  chr13:29393559-29393656
  hyper
cgcctgccttttgcgcaaatcttttcagagactggctttgggctcctatgaatcaggcaccctagcgtcctccaaagttcttcccgatgctgaaccc

SEQ ID NO: 347264 - DNA, 479 bp, Homo sapiens
  chr13:42032017-42032496
  hyper
cggtcttcccgcgcgggcggctgcagcctcctttccggcccgggctggcccccatgtcccaccttccctccaccaccagctccgcgcgcgcccggggttggggggagcggcggggacaggtaaccggcagcgcctggggaggaatctggccgcgccaagtcgctgggtgaccctgggcctggcgaaggctcagttttcttgtctgtaaaacggacttggtaatagaacgcacttcgggggtggtggagaagattacaaggtaacagcgactgcgtggctgtcacttggcagaggcgccaagtgtcagttatcttcgggaaccgtggcggcccctcctggccctgggaggtggtcccgctgcccccctgacttccgtgcactgagcccctggccctgcccgcagccccggccctggactcggcggccgcggaggacctgtcggacgcgctgtgcgagtttgacgcggtgctggccgactt

SEQ ID NO: 347265 - DNA, 109 bp, Homo sapiens
  chr13:42032649-42032758
  hyper
cccaggacctgccccgcgaaggctgcggcctcagttttcttatcagtaaactgaggaatggtttcctgaagctcaacgcagtaggccgagtggtggcggggcccctgac

SEQ ID NO: 347266 - DNA, 132 bp, Homo sapiens; identical to SEQ ID NO: 345443
  chr13:46960952-46961084
  hyper

SEQ ID NO: 347267 - DNA, 135 bp, Homo sapiens; identical to SEQ ID NO: 345444
  chr13:46961683-46961818
  hyper

SEQ ID NO: 347268 - DNA, 718 bp, Homo sapiens
  chr13:77459628-77460346
  hyper
tgtaggagccgcggtagccgatggtgatgtagcccgagcgccggctgccgtccagcgactgggacggcgtgagcagcgggcccgccgcgcccccggacggactgcggctagccagctccagcgtgggcgacggcgccccggcagaggcgccctcctgctgttcgggctccgagtagccaagcggcagcagctcgtcacccagcgagccctccttgtgcaccccgcgccgcgagggcggcggccccgggccgggctgctggggcgccccgaggcggcgcacgagctctggcagctcgaagtactcggcctcgcgctgcagccggctgcgctcggggaagtagtcgggcagcacgagctgcaagtcccgcaggtaatccaggatgtagcggaagaggaagccgtcccggtccagaaagaagcggcctttgctgtcccgggccagctcctgcggctgctgctgcgtgaacatgcgccagagcagcgagtcgggcaccgacaccaccgtgcagcgccgggtcacgtacacctggccccccacgttcagctccacgatgtcggggaagagcggtggctccgcggaggacgacgaggagccactgccgcccccgccgccgcccccgttgggtaatccacgtgtgctgtccgccagagccatgacagagaggtggccgggccgggacagtggcaggaagccgcgctgcactcaggagctgcaacc

SEQ ID NO: 347269 - DNA, 161 bp, Homo sapiens; identical to SEQ ID NO: 203406
  chr13:92050814-92050975
  hyper

SEQ ID NO: 347270 - DNA, 147 bp, Homo sapiens; identical to SEQ ID NO: 345446
  chr13:95201113-95201260
  hyper

SEQ ID NO: 347271 - DNA, 287 bp, Homo sapiens; identical to SEQ ID NO: 203409
  chr13:95201339-95201626
  hyper

SEQ ID NO: 347272 - DNA, 229 bp, Homo sapiens; identical to SEQ ID NO: 203410
  chr13:95201662-95201891
  hyper

SEQ ID NO: 347273 - DNA, 301 bp, Homo sapiens; identical to SEQ ID NO: 203411
  chr13:95202013-95202314
  hyper

SEQ ID NO: 347274 - DNA, 267 bp, Homo sapiens; identical to SEQ ID NO: 345450
  chr13:95202344-95202611
  hyper

SEQ ID NO: 347275 - DNA, 403 bp, Homo sapiens; identical to SEQ ID NO: 345451
  chr13:113622881-113623284
  hyper

SEQ ID NO: 347276 - DNA, 634 bp, Homo sapiens; identical to SEQ ID NO: 345452
  chr13:113623348-113623982
  hyper

SEQ ID NO: 347277 - DNA, 302 bp, Homo sapiens
  chr13:114565969-114566271
  hyper
cggggccagcaccgtcgggctcctgaaagcacccgctgcctccaggagagcacctggcagaacggggccgcggagccgccctcccctcccgcatgcggccccgctcgattcctggaatcttatttttggacctgctgccgcaagcagttcccgccctcggccctttcaattcctctttcgggaggggactgctctccacccctctcaggaggacgaggcgcggcccgggggttcctcacctccagcccagcagagggagggccgcggggaagcggtttgggttttaaccattgtgtttctct

SEQ ID NO: 347278 - DNA, 114 bp, Homo sapiens
  chr13:114566409-114566523
  hyper
cgggccggggctcctgggaccctgaggccaggcctcgccgcgcggagctggggggcggcagcagcgctgcctctcgggagcggttggaggcgcgcgggcgccaggggttccccc

SEQ ID NO: 347279 - DNA, 686 bp, Homo sapiens; identical to SEQ ID NO: 334837
  chr14:21099793-21100479
  hyper

SEQ ID NO: 347280 - DNA, 113 bp, Homo sapiens; identical to SEQ ID NO: 345453
  chr14:21101056-21101169
  hyper

SEQ ID NO: 347281 - DNA, 111 bp, Homo sapiens; identical to SEQ ID NO: 345454
  chr14:21439074-21439185
  hyper

SEQ ID NO: 347282 - DNA, 590 bp, Homo sapiens; identical to SEQ ID NO: 345455
  chr14:21439317-21439907
  hyper

SEQ ID NO: 347283 - DNA, 377 bp, Homo sapiens
  chr14:23291965-23292342
  hyper
acgggaagccccttgttgggggggcgggggcgggaggcggggcgaggaatgtgcctcctcggagccggaggaggggtctcccgaaggccgtctcttccaccccgggttcccgactccccgccccctcggggtagctgttgcatcagcttccagattccaaaccaaagaaagtgggctccactaagctgggaaggcgtcgggcagcaaagccgccgccaggaggcagcgcttaatcaaaaatgtccgggccgagggggcccaggataccggagtccccggagcgtctttcatctgaagtcttagcagcagcgcggacctaacaaaaaagggagttgctgaattagttcaagaaaaggcaactggaaatgcttcatcac

SEQ ID NO: 347284 - DNA, 163 bp, Homo sapiens
  chr14:36002437-36002600
  hyper
cgccggcatttctcactcaatctactccatgctaaacaggccggttaggaattaagtcatactctgggtagtacaagtggaaagtgtgaacagagaaaccactttatgcgaggacagtggaaaatgagatcctcctttcctctccctactcctgctcctatcg

SEQ ID NO: 347285 - DNA, 270 bp, Homo sapiens
  chr14:36003004-36003274
  hyper
gcggagggcgtcgtgaggtggccttttcgcccggctccccagtgggacgctccgcggaggcagccaaggcggggagtgtcgagctccctcacactctggaccttaccttctggcgtcttcgcccgggaggctgcagggggaggcggacccagccggccacaggggcaggttcgcggcgctgtgaggcggggctgggcgtgcgccgccgccgccgccagattcgtctactccagtgaatcggcacgggagaaagccccgcccccggcgccc

SEQ ID NO: 347286 - DNA, 119 bp, Homo sapiens
  chr14:37130817-37130936
  hyper
attcagcattttaccagcctgattttgctgtctttttgtgccgcttctgggaagatgtcaaacacccattttcattgtatttagtcacccaggtggggagctagcctgaaagagacagc

SEQ ID NO: 347287 - DNA, 202 bp, Homo sapiens
  chr14:37135434-37135636
  hyper
cgtgggtcagagaatttggaaaggcctactctgaggggagtaaaacttcaccaggccctgggctggaagcacaggaggtcgcggctgggcccagcgccctcgggaggccaagggcagggagccgacccaaggtctaagccctccagctctccgtcgcgggtttgggtcccgtctcaagagtggggcgcgcgggctgggcctc

SEQ ID NO: 347288 - DNA, 225 bp, Homo sapiens
  chr14:38052540-38052765
  hyper
cgaggtcaagacccgcagtgtcttagtgggttttcacctccacctccgtacaatcaagagggcagagaaggcgggggctggaggtggctgaaagggcagggatggcggtgaaacccgggaggaggcgacattcgtgtcaggtggcggtcccaggcagtgtccacaggcccggaagccgaggggaccaggcatcaagccccgcgtccagatccctgcacccggggg

SEQ ID NO: 347289 - DNA, 175 bp, Homo sapiens
  chr14:38053203-38053378
  hyper
gggccaggactgcgcctgtgtgcgggtccccaggagcactgctcgcctgccagccccgcccggccgggcccctccggcgggatagagccctgctttgctcttttcgttggccaagcacaattgtgttattggagataatgaattcaatccccatcaaagggcattaggctcgccc

SEQ ID NO: 347290 - DNA, 54 bp, Homo sapiens
  chr14:38072497-38072551
  hyper
cggattctggcaatcgtcagttgtaggaacaaagtctggagtagtggctggcat

SEQ ID NO: 347291 - DNA, 586 bp, Homo sapiens; identical to SEQ ID NO: 334893
  chr14:50469917-50470503
  hyper

SEQ ID NO: 347292 - DNA, 77 bp, Homo sapiens; identical to SEQ ID NO: 334894
  chr14:50511831-50511908
  hyper

SEQ ID NO: 347293 - DNA, 223 bp, Homo sapiens; identical to SEQ ID NO: 203572
  chr14:51562012-51562235
  hyper

SEQ ID NO: 347294 - DNA, 260 bp, Homo sapiens; identical to SEQ ID NO: 334898
  chr14:52327346-52327606
  hyper

SEQ ID NO: 347295 - DNA, 314 bp, Homo sapiens
  chr14:52781114-52781428
  hyper
cgccgtcggcgcgctgggtgcgggaagggggctctggatttcggtccctcccctttttcctctgagtctcggaacgctccggctctcagaccctcttcctcccaggtaaaggccgggagaggagggcgcatctcttttccaggcaccccaccatgggcaatgcctccaatgactcccagtctgaggactgcgagacgcgacagtggcttcccccaggcgaaagcccagccatcagctccgtcatgttctcggccggggtgctggggaacctcatagcactggcgctgctggcgcgccgctggcggggggacgtg

SEQ ID NO: 347296 - DNA, 128 bp, Homo sapiens; identical to SEQ ID NO: 203595
  chr14:55595810-55595938
  hyper

SEQ ID NO: 347297 - DNA, 133 bp, Homo sapiens; identical to SEQ ID NO: 203596
  chr14:55595968-55596101
  hyper

SEQ ID NO: 347298 - DNA, 437 bp, Homo sapiens
  chr14:55596153-55596590
  hyper
cctgtgctctgccctccaggagcggggcggcgggcagcgatctgggcccggggcagtcgcctttgattatcgagggcgctggcgttcggggaaggttggcagcaccttacgagacccacacacgtccccggggcggcacgggccaccttctgcggagcctcgtgggcttcgccgccgtcgcacctccgccgcctgcgctctgcggccccagagtaagccccatccggtgacgagccgcagtctggtcaccccagtcccaccaggtcccgctgcgaggggaggcggaggggctcgctcagcaaaccagacggccgctccagtttctctaattggggttggagccccgtcacccttccccagatcacggccgcgggggagcgaagggacttcccaggactgcatagggcgcctcccgggacccacagcttggctggccc

SEQ ID NO: 347299 - DNA, 79 bp, Homo sapiens
  chr14:60097114-60097193
  hyper
cgggtttcccgtgcgcctcaggcatgcactactgaaataaagagaataccctgacttttccagttgctccacacacagt

SEQ ID NO: 347300 - DNA, 61 bp, Homo sapiens; identical to SEQ ID NO: 345458
  chr14:60794412-60794473
  hyper

SEQ ID NO: 347301 - DNA, 167 bp, Homo sapiens; identical to SEQ ID NO: 345459
  chr14:61104864-61105031
  hyper

SEQ ID NO: 347302 - DNA, 181 bp, Homo sapiens
  chr14:61113933-61114114
  hyper
cggccctcgggcctggcttataggacggccgttttgtaactaaaggctaactgcaaccatacaatccctgttcctgtgttacttgctaactcttcagcccctcgtgtccccctctcaaacttcctaccaacacccaccccaacccatcctttctgggcaggggaaacttcgccgccccgca

SEQ ID NO: 347303 - DNA, 33 bp, Homo sapiens
  chr14:61114722-61114755
  hyper
tcttaatttggggcgccggggagtaaatgcagc

SEQ ID NO: 347304 - DNA, 655 bp, Homo sapiens; identical to SEQ ID NO: 345460
  chr14:61188627-61189282
  hyper

SEQ ID NO: 347305 - DNA, 64 bp, Homo sapiens; identical to SEQ ID NO: 203621
  chr14:61748033-61748097
  hyper

SEQ ID NO: 347306 - DNA, 130 bp, Homo sapiens; identical to SEQ ID NO: 334940
  chr14:61943723-61943853
  hyper

SEQ ID NO: 347307 - DNA, 114 bp, Homo sapiens
  chr14:62584399-62584513
  hyper
caccccgcccccaaccactgaagagtagccagctgctggtcccaaatgacctgattcgattttttaaatgtaaaccttaggattggttcttgggtgaagagtccgctgctcttc

SEQ ID NO: 347308 - DNA, 92 bp, Homo sapiens
  chr14:65016816-65016908
  hyper
gctgggcgcaaggcgggccctgctgcccccaaccggcgccgcgcccctcgccctcctccagaggcgggtcgtcgccttcgccccgggctggc

SEQ ID NO: 347309 - DNA, 219 bp, Homo sapiens
  chr14:69261392-69261611
  hyper
cgtttctttggaaaggacggggcgggccgaagagagcgcattctcaccacccccaacacacacttttttttaaaactgcatttcttatttattcgtaaacatctgggcaaacccagcgaaaccttccaaatcacaattgtttgagaaaccggctgtttttcaactttgtgaaacccaacttttgctgcagccacgaacctacgtgatcccagcggggtc

SEQ ID NO: 347310 - DNA, 464 bp, Homo sapiens; identical to SEQ ID NO: 334962
  chr14:73359779-73360243
  hyper

SEQ ID NO: 347311 - DNA, 227 bp, Homo sapiens; identical to SEQ ID NO: 334963
  chr14:73360763-73360990
  hyper

SEQ ID NO: 347312 - DNA, 618 bp, Homo sapiens
  chr14:73957523-73958141
  hyper
cgctgccgctacagcttgaagccaaacatttaatgaaagagagcgggaggggccgaatagaagaatgatgggcgtggccaaccccgaggtggctggaggccgcgcccccttcccagagtgcaccgcagccgctgcattcaggaaccgctttagcttcgcccccggccggccgggcggggaagactggtgtggtctggccatggatgggctccaggccagtgcagggccgttgaggcgcgggcggccgaagcgccggcgcaagccccagccacacagcgggtcggtcctggccctgcccttgaggtccaggaagatacgaaagcagctgcgaagtgttgtatcccgcatggcagcgctgaggacgcagacgctgcctagcgagaactcggaggaatcgagggtggagtcgacggccgacgacctgggggacgcgctacccggtggggcggcggtggcggcgtcccggacgcagcccggcgagagccatacggccacctggggcccgcagagctgctggaggcctcgcccgccgcgcgctccctgcagaccccgtcggcgcgcctggtgcccgcttccgcgccgcccgcgcgcctggtggaggtgcccgccgcgccggtc

SEQ ID NO: 347313 - DNA, 168 bp, Homo sapiens
  chr14:76597725-76597893
  hyper
gaagacagcgtgactgcggtctgatctacagtgacgagtaccaatgttaactgtcacctctcatctccaaactaaatcacacctggaattggaggagccgaggagctgatagagtcagcctcgcagaggcgacaagtcaatcagcgcggagatgcccgcggagacacc

SEQ ID NO: 347314 - DNA, 333 bp, Homo sapiens; identical to SEQ ID NO: 334977
  chr14:77428133-77428466
  hyper

SEQ ID NO: 347315 - DNA, 216 bp, Homo sapiens; identical to SEQ ID NO: 334989
  chr14:89884061-89884277
  hyper

SEQ ID NO: 347316 - DNA, 182 bp, Homo sapiens; identical to SEQ ID NO: 345461
  chr14:94406037-94406219
  hyper

SEQ ID NO: 347317 - DNA, 102 bp, Homo sapiens
  chr14:94889915-94890017
  hyper
cggaccttaccctcacaatgggccacaggaatttatatgtcccttgaaagacctgaaatgacacggcagtgtctgaacacacgggggcgcgctaatcacctc

SEQ ID NO: 347318 - DNA, 198 bp, Homo sapiens; identical to SEQ ID NO: 345462
  chr14:105189960-105190158
  hyper

SEQ ID NO: 347319 - DNA, 78 bp, Homo sapiens; identical to SEQ ID NO: 345463
  chr14:105512395-105512473
  hyper

SEQ ID NO: 347320 - DNA, 37 bp, Homo sapiens; identical to SEQ ID NO: 345464
  chr14:105715538-105715575
  hyper

SEQ ID NO: 347321 - DNA, 53 bp, Homo sapiens
  chr15:29130654-29130707
  hyper
cggaggccgcgatccccgagagttcttcgctcgagggttcttcgctctagggt

SEQ ID NO: 347322 - DNA, 60 bp, Homo sapiens; identical to SEQ ID NO: 290645
  chr15:29561185-29561245
  hyper

SEQ ID NO: 347323 - DNA, 700 bp, Homo sapiens
  chr15:29561316-29562016
  hyper
gcttcagtttccttgatggtgttgcccttcataaagatgagccctaagacgatcatcaggaggcccgtagtgggcgtgccttggtcacccctcatctcggcatcctcctccacaggctccagggtgttgatgaggatgtaagtgttgctcttgggttcaagttccaccagcttatacccgaagacgtactggaggcgctcggcggcccgtttgaagaggtcggggaagatgtccttgtagtccccgatgacgtgcttcagtatgtcggcccgcttgatcggaatcttcttctggtctttaatcagcaagaactgcaccagctcggacactttcagctccagctgcttctggctcctgggccccacggcgggggcggcctgggcccggcgggcgccctgaggcgaggggccctgcgacccctgcgagccgcccggcccgcgggacgtgctcggggcctcctcggcaaagccgtctctgagaacccgggcgtcttccccggcccgcgaagccccggggtttccgctatggctccagtctctgtccctctcggcctggccgccagagcggccccggttcctcggtttttgcaacatgtctccggcggcaggtgccggcgcacactccggtaggcaagcagccgcggcggggattgcgggtcggcgacccgctaacgccggtgcctggaggcgcgcgcagtgtc

SEQ ID NO: 347324 - DNA, 386 bp, Homo sapiens
  chr15:30114394-30114780
  hyper
cggacaaaagtccgggaagcgcccgccccgcccgggtcttctccacggggcgcgcccgaccggcacctccctccgagcgcggccacccactcggcctcccgcagctttcgcagcccggccacgtcggcctcgcccggtcgcccgcccgtcagcagcacccgtggcctcccggcgtctcctcggaagccggcttcgccacgtaacttcccgggaaccggcggccgccaaggaacgcggcgtccgctggctcagccggcgccggcaactcagcggccacgcaaacctgccggcccggcccactgagcatgcccggcccggcgggggcggggctggacgaggcgaggcgaggcgaggcggggagggggcggggccgcggcgggggaggg

SEQ ID NO: 347325 - DNA, 375 bp, Homo sapiens; identical to SEQ ID NO: 290655
  chr15:30114810-30115185
  hyper

SEQ ID NO: 347326 - DNA, 339 bp, Homo sapiens; identical to SEQ ID NO: 345465
  chr15:31621317-31621656
  hyper

SEQ ID NO: 347327 - DNA, 209 bp, Homo sapiens; identical to SEQ ID NO: 290663
  chr15:32162282-32162491
  hyper

SEQ ID NO: 347328 - DNA, 761 bp, Homo sapiens; identical to SEQ ID NO: 345467
  chr15:32162523-32163284
  hyper

SEQ ID NO: 347329 - DNA, 384 bp, Homo sapiens; identical to SEQ ID NO: 345468
  chr15:41786420-41786804
  hyper

SEQ ID NO: 347330 - DNA, 205 bp, Homo sapiens; identical to SEQ ID NO: 290725
  chr15:41805869-41806074
  hyper

SEQ ID NO: 347331 - DNA, 135 bp, Homo sapiens; identical to SEQ ID NO: 345469
  chr15:41953174-41953309
  hyper

SEQ ID NO: 347332 - DNA, 41 bp, Homo sapiens
  chr15:43415157-43415198
  hyper
cgtaaatccttccagtttttggcgcccgggtatttgacttg

SEQ ID NO: 347333 - DNA, 279 bp, Homo sapiens
  chr15:43415273-43415552
  hyper
cggctcctcacactcagtgtttaggaggtatcatcatatcatgggctgacaggaatgacgggagagaaaccttaacgcagagtgagtccccatggaaaccgcgccaaccccgaccgggggcgtcgccagcgggaaggggtgggtcccctctcgaataccccgcccggctccgggaacgtcaccgacgctctggggcttttgctaagaagcgctcgcccaggaggaggcagggcaaattggtgaacagggcggcgtgtccttatacgggcacgaactcgc

SEQ ID NO: 347334 - DNA, 226 bp, Homo sapiens
  chr15:45670236-45670462
  hyper
cgagcgggaagcttggtgcagcgcaccaaggtccggtagaggggggcggcgccccctgcgccgtgggccagcaggccgcggacgcgcagacagcaagtggaccccaagggctggagccgcaacgcaagttccccctgactgggggacgccgcccagctcctggagcctgcgaaggctcttgaagctgagcttcccagggataccagaagggacactctcgtgcaat

SEQ ID NO: 347335 - DNA, 124 bp, Homo sapiens; identical to SEQ ID NO: 345470
  chr15:45722474-45722598
  hyper

SEQ ID NO: 347336 - DNA, 339 bp, Homo sapiens; identical to SEQ ID NO: 345471
  chr15:45722599-45722938
  hyper

SEQ ID NO: 347337 - DNA, 118 bp, Homo sapiens; identical to SEQ ID NO: 345472
  chr15:48469946-48470064
  hyper

SEQ ID NO: 347338 - DNA, 52 bp, Homo sapiens; identical to SEQ ID NO: 203870
  chr15:48470094-48470146
  hyper

SEQ ID NO: 347339 - DNA, 158 bp, Homo sapiens; identical to SEQ ID NO: 203871
  chr15:48470215-48470373
  hyper

SEQ ID NO: 347340 - DNA, 77 bp, Homo sapiens; identical to SEQ ID NO: 345475
  chr15:48936649-48936726
  hyper

SEQ ID NO: 347341 - DNA, 159 bp, Homo sapiens; identical to SEQ ID NO: 203882
  chr15:53082144-53082303
  hyper

SEQ ID NO: 347342 - DNA, 102 bp, Homo sapiens; identical to SEQ ID NO: 203896
  chr15:59729554-59729656
  hyper

SEQ ID NO: 347343 - DNA, 91 bp, Homo sapiens
  chr15:59729815-59729906
  hyper
cacatggcagccccggagggttcgttcacctgcacaggtggggcgtcaccgtggcctaatcaaataacttctccccaatttgaggtggggc

SEQ ID NO: 347344 - DNA, 114 bp, Homo sapiens
  chr15:62359741-62359855
  hyper
cgggactcgctctgacgatccttgtgcctttgtgcactgcaggtagacaagctccagcagagagtggccagatgtggtgcctggagcgactccgcttgggtcctgagtgccttc

SEQ ID NO: 347345 - DNA, 34 bp, Homo sapiens
  chr15:63779725-63779759
  hyper
agctctgcgcggaaggcccgagagaattggtccc

SEQ ID NO: 347346 - DNA, 71 bp, Homo sapiens
  chr15:63795400-63795471
  hyper
cggtgggtggataccattaggcagaggtctatgcggaagaggccgacttgtggcgtgggaggtagggagga

SEQ ID NO: 347347 - DNA, 350 bp, Homo sapiens; identical to SEQ ID NO: 203920
  chr15:63795501-63795851
  hyper

SEQ ID NO: 347348 - DNA, 338 bp, Homo sapiens
  chr15:63795894-63796232
  hyper
ggtaacagctggtagggtgttgcgaggcttaaatgcggtatgggaagtgcctggctgggagaccttaggtatctaacaaatgctagatcccttcccttcttatcgcctggtaatggggagtttagcttgcccagcaatcccaggctacgtttatctcacttgaacttcctggcttgaaagtcctacgatgtgctggaggtaacgcagatggtgagtcacagtgacaggatttgaacgtgggttcatgggcgcccctgcgggcccacccacgcagcatctaggtggctggctaacgccacgtgttcagaacctagaaagggctacggatcgcacctgcc

SEQ ID NO: 347349 - DNA, 263 bp, Homo sapiens; identical to SEQ ID NO: 335159
  chr15:69114222-69114485
  hyper

SEQ ID NO: 347350 - DNA, 587 bp, Homo sapiens; identical to SEQ ID NO: 345477
  chr15:71407569-71408156
  hyper

SEQ ID NO: 347351 - DNA, 79 bp, Homo sapiens
  chr15:72612906-72612985
  hyper
attcctcttctctattcccactatcgagccagtccctcggagccaatcccaccccgccccatcacacatctctgtcttc

SEQ ID NO: 347352 - DNA, 847 bp, Homo sapiens
  chr15:80215312-80216159
  hyper
cgaacccccaactccaactgacctcccctctgccagagcaagaccacgagtacccgccgagagcggacctggctggctacacaaagccaggcgcccgaccagagggatcctccgggacgtcctccgccaccggggcgtccccgcccagccccgcccggcgcccggcgctcaccagctctcctccccctcctcctagcctgacagacgctccaggtcgtctagcaagccgccctcccccgccgccagcaagaaggtggcgtctcgcagctcctcgttattcgtccgcctcgggtccatccggccccgccgcccgactttgcgctgagacccaaggggaagccccgaggggaccccgcgccgtaggagggagtggaggagccggcgaaccgcgatggagccggggcccagcacagcgcgagcggctcctcggctgttcgtgctgcttccccagcttcttcaccggcacctgcagcttccgcacctcctggtccgcgttcacgttagagttaacgtcctccatcccggccccgctgcctccgccgcccgcggccctctcgctctcgcagcaacaagggaagagccggaggaaagaggcgtccacgccgctcactccagccgaggcccccgcatatagcagggccaggccccgtcgccagggttcccccagcgcgggtcccgaagcaccgctggccacagatgaaccgcctcctcagcgcaggtccgggattcggggaggcagcgccaatatccggtctctgcagccatcttccctccgtccctccgcccaccgagggtcggccctgtaggtgacctcagagcgtcggggatgggcgtggccccgtcgggc

SEQ ID NO: 347353 - DNA, 196 bp, Homo sapiens
  chr15:81294105-81294301
  hyper
cgcctgagctgcctcccgcgctcctccccgaggaaaggattttgatttcaaagaaaggaaggaaggaaggacaactcccagcttccccgtcccgccctccccgctccgagggccgcgccaggccatgcccaagaaggcggcggcggcggcgaaccagcagaagggactttcctggcagcccggcgacgaggagcgc

SEQ ID NO: 347354 - DNA, 194 bp, Homo sapiens; identical to SEQ ID NO: 345478
  chr15:82339684-82339878
  hyper

SEQ ID NO: 347355 - DNA, 59 bp, Homo sapiens
  chr15:83951722-83951781
  hyper
cgtctgggccgctttaaatgccctggccttcagaggactgaggcgagcacagccataaa

SEQ ID NO: 347356 - DNA, 278 bp, Homo sapiens; identical to SEQ ID NO: 345479
  chr15:89438052-89438330
  hyper

SEQ ID NO: 347357 - DNA, 250 bp, Homo sapiens; identical to SEQ ID NO: 204020
  chr15:89438421-89438671
  hyper

SEQ ID NO: 347358 - DNA, 107 bp, Homo sapiens; identical to SEQ ID NO: 204021
  chr15:89438672-89438779
  hyper

SEQ ID NO: 347359 - DNA, 101 bp, Homo sapiens; identical to SEQ ID NO: 345482
  chr15:89438863-89438964
  hyper

SEQ ID NO: 347360 - DNA, 103 bp, Homo sapiens
  chr15:92459227-92459330
  hyper
cgtcctgaccaccctggagcgtaggttcaacctgcagagcgctgacgtgggtgtgatcgctagcagcttcgagatcgggaacctggcgctcatcctcttcgtg

SEQ ID NO: 347361 - DNA, 200 bp, Homo sapiens
  chr15:93199039-93199239
  hyper
caccgccgccgccaccaccaacacgttgcaaggagtcattcgacgggccgcggccccacgtgggcggggcaggccacccggcctgggtcccggctgcgctccgctcgcccgcgaccccaattcctcgggacttgagaccccgtggtgaagcagcaactgccacgatgacacttgggctggccctgtgttacacgtttcac

SEQ ID NO: 347362 - DNA, 468 bp, Homo sapiens; identical to SEQ ID NO: 345483
  chr15:100882092-100882560
  hyper

SEQ ID NO: 347363 - DNA, 547 bp, Homo sapiens; identical to SEQ ID NO: 335243
  chr15:100889946-100890493
  hyper

SEQ ID NO: 347364 - DNA, 143 bp, Homo sapiens; identical to SEQ ID NO: 291213
  chr15:101513869-101514012
  hyper

SEQ ID NO: 347365 - DNA, 48 bp, Homo sapiens; identical to SEQ ID NO: 345484
  chr16:2042503-2042551
  hyper

SEQ ID NO: 347366 - DNA, 208 bp, Homo sapiens; identical to SEQ ID NO: 335262
  chr16:2301873-2302081
  hyper

SEQ ID NO: 347367 - DNA, 212 bp, Homo sapiens; identical to SEQ ID NO: 345485
  chr16:3222239-3222451
  hyper

SEQ ID NO: 347368 - DNA, 48 bp, Homo sapiens; identical to SEQ ID NO: 204097
  chr16:3238043-3238091
  hyper

SEQ ID NO: 347369 - DNA, 543 bp, Homo sapiens; identical to SEQ ID NO: 345486
  chr16:4233245-4233788
  hyper

SEQ ID NO: 347370 - DNA, 48 bp, Homo sapiens; identical to SEQ ID NO: 345487
  chr16:4363872-4363920
  hyper

SEQ ID NO: 347371 - DNA, 158 bp, Homo sapiens; identical to SEQ ID NO: 345488
  chr16:4364080-4364238
  hyper

SEQ ID NO: 347372 - DNA, 890 bp, Homo sapiens; identical to SEQ ID NO: 345489
  chr16:4986642-4987532
  hyper

SEQ ID NO: 347373 - DNA, 298 bp, Homo sapiens; identical to SEQ ID NO: 335285
  chr16:9186882-9187180
  hyper

SEQ ID NO: 347374 - DNA, 429 bp, Homo sapiens; identical to SEQ ID NO: 345490
  chr16:12897365-12897794
  hyper

SEQ ID NO: 347375 - DNA, 88 bp, Homo sapiens; identical to SEQ ID NO: 335311
  chr16:29607025-29607113
  hyper

SEQ ID NO: 347376 - DNA, 533 bp, Homo sapiens
  chr16:29624651-29625184
  hyper
cgtagcagagcgcgcccacgatggagaagacgccgcacgcggcccacatcaccagcgccagccccggcgagcctgcctccttaagcacgcccgtgggcgtcacgaagatgcccgagccgatgatggcgcccacgatgatggccacgccgttgagtagcgtgatgttccgctgcagggtcacgccctcgccctcgcctgccggcgccgcgccgtccgcgcgcttggaggccagcatcttctcccgcgcctcttccttctcctcggccaccggggccgctagcgcccgccgcttcgggcccgcacccgccatgctctgcttaccggccgggcctgggacacccgagagccgcagccgagcgaggattgtgcgcgccgctcgccgcccgcagctgcgtcaagaaccccgcccgcgccgccttttaggccccggcccgctggccccgcccaccgtccgcggctcctccccgccccgtggcccggccgcggctctcagccccgccccctcgacccagctcggagcacgtgcgtcctcc

SEQ ID NO: 347377 - DNA, 816 bp, Homo sapiens
  chr16:30621198-30622014
  hyper
cggtacagggccctctgcgcgggccgcaggcagccccactcctccggggagaagtacacggccacgtccacgaacttcagagccctcggcctcctgccccttttccgactgggtctggcctttcctggtccctgcgcagggagcggagccgaaggtggcgccatgggacccgagaagccggcgccacggccttccgtgtccaggcctcggccctcgggcgctggcggcccctgggatcgaggagcccctgccggaccagggctgagcgtggccggggaggcccggagggaatcggaattggtcgcccgcggggctaacggaaaccttttgctgttattcaggaaactcctgcccgaacttgggtgaaaggcaccggaagatgccttcggggaaaatggcggcgctgctaccgcaccgcctttgcctggaacacaggcagcttccagctatcgattttattgaccggagcgccatgccggcttcctaacctctttgccctcaagtgtaatggcgctgcgattgggcttcacgccgtcttttttcccctccccaatacgcgcgttcattggacgagagccgaagatcgagcgttctgattgggtgctagcaaaggcggtccgtttgaacgaagccaagagctgcataagggcaggaagctggactgctaggatcaggcgactacaaggagttgtgaagcgacttgcaccgacctgggggcagcaagaggccccggggctgctttccgctgttcgactctggcaggctcagccaatcactgaaggagggaacgatttgagcgatggagccactctggcc

SEQ ID NO: 347378 - DNA, 549 bp, Homo sapiens
  chr16:30959765-30960314
  hyper
cgagcgcggggtggggcttcgggaccccggggatgagccgggccaggtcccgcccctccgcgcaggcctccggggggccggggcttaccatgtaggggaggggagatctatccacatacctcaggtaacagggaggtgcgcgggtggggggagggctgggcggaccaaaggccggaggggtggggcctggggatagcgagaggcttgagaatggggccgcttgggggagggaagaggcagcccggcgaggggcaagcgggggacccagccgggctgggcccctgggccccgggtctgtacaatacggtttgctataaaactcaaaatcttccagccggggctgcggagttcgtgtgtgtatctgcggggtccctacctacagatgagtgggctcacctctcctggactcattttgggagggatttggaagtgtggacacctggggtgtccagctgtaccttggagggggctggggttggcgtgcacctcggtggggtccgggcgcttggataacgttcttggtgggtaggggtcgcggggaatctctgc

SEQ ID NO: 347379 - DNA, 304 bp, Homo sapiens; identical to SEQ ID NO: 345492
  chr16:47176468-47176772
  hyper

SEQ ID NO: 347380 - DNA, 130 bp, Homo sapiens; identical to SEQ ID NO: 345493
  chr16:67189038-67189168
  hyper

SEQ ID NO: 347381 - DNA, 377 bp, Homo sapiens; identical to SEQ ID NO: 345494
  chr16:67189259-67189636
  hyper

SEQ ID NO: 347382 - DNA, 292 bp, Homo sapiens
  chr16:67204024-67204316
  hyper
cgcggggccgctgcaatctctgggaagcgggggcttctgggtcgcgctcagctctgcaatgcatgcgttctgtgatcctggtgagttggtatccttctctgaacttcctctgtgacaggcagagaagaggggtcgatgacaagatagatggaaagcacctggaaattggcaggccctgagtgggcgctggacgtgtggggccgcgggccgaactgccccctcctggcctcatctcctggtgcgccccgggtggggagggaaagctgactacatgcacgtccccagccagcgc

SEQ ID NO: 347383 - DNA, 490 bp, Homo sapiens
  chr16:67204317-67204807
  hyper
cggcctccgcggtgtggctcctagtgcccggggaagaaccctcaccctccctattcccagcagccctggccgccccgcccccgccgcagctgctgcacccacccccaccctgcccggccctttctgcaccgtcatctcctgccccgccgaggcttgacccgtgagtggggacgcccaaaacgggccagaccgggagccccactcccggctgtgggagggaagggaaaccgagattgggcagaatcagcgccccaccacccgctgcggcgctcgggggtcgggggggcggggtgggtaggactgtgggccccgccctgccgcaggactctcaagctctgggactgggtggagggaggtaaggggcggggggggaaaatccgtgcagtcgcacatgcgcaaaggctcttcactgtcccaagaccctggcttcctggccaaagagcccgcgcagcgaggtggggttgggggctgggacccagctccgtgcccc

SEQ ID NO: 347384 - DNA, 134 bp, Homo sapiens; identical to SEQ ID NO: 345495
  chr16:68118915-68119049
  hyper

SEQ ID NO: 347385 - DNA, 65 bp, Homo sapiens
  chr16:68269820-68269885
  hyper
cgtcccagcgcacccgccgtagccccgaagaggacgaccagtgatccgggccaggggcaggggtc

SEQ ID NO: 347386 - DNA, 112 bp, Homo sapiens; identical to SEQ ID NO: 204263
  chr16:68269896-68270008
  hyper

SEQ ID NO: 347387 - DNA, 105 bp, Homo sapiens; identical to SEQ ID NO: 204264
  chr16:68270022-68270127
  hyper

SEQ ID NO: 347388 - DNA, 125 bp, Homo sapiens
  chr16:68270157-68270282
  hyper
agttacctgccggccccgccggccacgtgaccggggcggctccgggaaccttgggggagggccgccagaactcaacccaggacgcaagagctcacgctcccggcctgggcgcacgcttaggatcc

SEQ ID NO: 347389 - DNA, 637 bp, Homo sapiens
  chr16:68270868-68271505
  hyper
cgagcgctctggccgatggggggctagcgttgagcgtgtgtgcgcgcatgcgggctgcagatcctcccttttccatcccgcacctacaacccaattgacagccccgcatttggggctcccattcctccctttgcccagtggagcttggtgaggctcctttatggcgcgtttcccggccgttccttactttcccaaactctcccagggaggtgactgagaaactgaataagtgactgagaaactgaataatccagcaggaaggagggggctccagcgtggcgggaactgagtcacgcggttgcctagcccgactcgagactgagacgggagccgcaccacgcgctttcggacaaggagggtgctgcggcccggcccctggacaatggagagagcggggcacccgggcgcatcaccagagctcatgcccgggaaaggggcgaggcccggggggagagagctcagcgtagctccacttggcagctaaagaaacaggcgcccgggacggaaatgactcgcgcccggacacggcgacagggagagcatgggaagtgcttccttcgcccggcgggttcgagcgagtagcactttactttccctacaggtggaggcgggccttggtgcgcggctgtccatctcc

SEQ ID NO: 347390 - DNA, 102 bp, Homo sapiens; identical to SEQ ID NO: 345496
  chr16:68504292-68504394
  hyper

SEQ ID NO: 347391 - DNA, 82 bp, Homo sapiens; identical to SEQ ID NO: 204296
  chr16:77246930-77247012
  hyper

SEQ ID NO: 347392 - DNA, 204 bp, Homo sapiens; identical to SEQ ID NO: 204297
  chr16:77247511-77247715
  hyper

SEQ ID NO: 347393 - DNA, 67 bp, Homo sapiens; identical to SEQ ID NO: 345498
  chr16:80574541-80574608
  hyper

SEQ ID NO: 347394 - DNA, 72 bp, Homo sapiens; identical to SEQ ID NO: 345499
  chr16:80575052-80575124
  hyper

SEQ ID NO: 347395 - DNA, 811 bp, Homo sapiens
  chr16:84650982-84651793
  hyper
cgccatgcgccaggggcaccccatgtggccaccggttcctcccgggttcgctctggccggggctccccgggtgcagacaacctcccaacgaccgcgcatccgcccggcaggcgcgcctccctacctgtgcactgctggatgaagtgctggtactccgctccctgctcgccggggacgatggtggagccgtcatatttaaaagtcaccctttgggttgggagaagaaaaaaacacacacacacatcagcgctggtggccgcgcgacgcggcgcttgcagaggacaatctaacagacgcgctggccacggagaagcccgcgggggcctggcacgccgtcccggaataaggcgaggaagacagcgcgggaggcccgaatccgtcccgcctggaggccggctcggtgcacgaggccccgcgcgagcccggggagcggggcgtggagacgaatgaaaagttcctaccagatgacggccgagccgtcgtcgcgcaccaggttgtacgccgcccggcaagcctctttgtcgatcttggtggccatcgccgcggagccgcagcgggacactgtccggggcggccgagcgcgcccctggccggcggcggggatgggagcgcggcgggtacgcgccgagggcgcacgggctggcggcggtggcgacggctacgcggcgcctgcaagctgcgagcgcggcggcggcttccactgcggacggagagcgcgcggggaccccaggccgtggcccgccccgcccccccgcgcccattggccgcccaggcggcggcccgcctcttcattggccgtcgggctgcgggg

SEQ ID NO: 347396 - DNA, 177 bp, Homo sapiens; identical to SEQ ID NO: 345500
  chr16:85932121-85932298
  hyper

SEQ ID NO: 347397 - DNA, 802 bp, Homo sapiens; identical to SEQ ID NO: 345501
  chr16:87525701-87526503
  hyper

SEQ ID NO: 347398 - DNA, 505 bp, Homo sapiens; identical to SEQ ID NO: 335410
  chr16:87526565-87527070
  hyper

SEQ ID NO: 347399 - DNA, 83 bp, Homo sapiens
  chr16:89007225-89007308
  hyper
cgcaggtcaggctctgctcacggggggctgcgctcagcccggatgggtgggcgctgggcgggttggctccaccctgccgtggg

SEQ ID NO: 347400 - DNA, 91 bp, Homo sapiens; identical to SEQ ID NO: 204343
  chr16:89007789-89007880
  hyper

SEQ ID NO: 347401 - DNA, 211 bp, Homo sapiens
  chr16:89007995-89008206
  hyper
gggagaggggcgcggggagggggcgacgggcgcgccgcctcctgcggggggcggcgcggggaggcgcaggcgggggcgagcgaagaggttgaggggtgcgggcgccgtggagggggcgcggctctggggggcggcccccgcctgcgcccaccctctccccctccgcaggccgcgcacacccacctcgcagcagtcggcggccgcgggcctc

SEQ ID NO: 347402 - DNA, 259 bp, Homo sapiens
  chr16:89189500-89189759
  hyper
cgggaacatttccagttcagccaaggagtcggtgcagcaggtggagtacagctgccctgcggggcctggctccaccaggggccaagacccttcgtggggaggagcacagcctgagggcctcagggtttgtgccctccgacacctgagattcagggctcccagaggggtgggtgggcgccccaggacaaccaggtgatgatgggcgctgtgaactctgaaaagccccagcatcagagacctgctgctctctcatgtgaag

SEQ ID NO: 347403 - DNA, 34 bp, Homo sapiens; identical to SEQ ID NO: 345503
  chr17:4981985-4982019
  hyper

SEQ ID NO: 347404 - DNA, 1345 bp, Homo sapiens; identical to SEQ ID NO: 345504
  chr17:7254483-7255828
  hyper

SEQ ID NO: 347405 - DNA, 69 bp, Homo sapiens; identical to SEQ ID NO: 345505
  chr17:8055823-8055892
  hyper

SEQ ID NO: 347406 - DNA, 107 bp, Homo sapiens; identical to SEQ ID NO: 335458
  chr17:8901441-8901548
  hyper

SEQ ID NO: 347407 - DNA, 531 bp, Homo sapiens; identical to SEQ ID NO: 345506
  chr17:12692672-12693203
  hyper

SEQ ID NO: 347408 - DNA, 126 bp, Homo sapiens; identical to SEQ ID NO: 345507
  chr17:12693500-12693626
  hyper

SEQ ID NO: 347409 - DNA, 48 bp, Homo sapiens; identical to SEQ ID NO: 345508
  chr17:16283879-16283927
  hyper

SEQ ID NO: 347410 - DNA, 674 bp, Homo sapiens; identical to SEQ ID NO: 204447
  chr17:16283956-16284630
  hyper

SEQ ID NO: 347411 - DNA, 39 bp, Homo sapiens
  chr17:16285065-16285104
  hyper
agccttgtaaaattgaggggaggcttgcggaatattaac

SEQ ID NO: 347412 - DNA, 1754 bp, Homo sapiens; identical to SEQ ID NO: 345510
  chr17:17685255-17687009
  hyper

SEQ ID NO: 347413 - DNA, 367 bp, Homo sapiens; identical to SEQ ID NO: 345511
  chr17:17687055-17687422
  hyper

SEQ ID NO: 347414 - DNA, 811 bp, Homo sapiens; identical to SEQ ID NO: 335480
  chr17:18907431-18908242
  hyper

SEQ ID NO: 347415 - DNA, 355 bp, Homo sapiens; identical to SEQ ID NO: 345513
  chr17:27038294-27038649
  hyper

SEQ ID NO: 347416 - DNA, 53 bp, Homo sapiens
  chr17:27940911-27940964
  hyper
gatgaatccttagaggagcgctgtccctatcccttgctccttctggccggtcc

SEQ ID NO: 347417 - DNA, 73 bp, Homo sapiens; identical to SEQ ID NO: 204479
  chr17:28088056-28088129
  hyper

SEQ ID NO: 347418 - DNA, 255 bp, Homo sapiens; identical to SEQ ID NO: 345514
  chr17:29297825-29298080
  hyper

SEQ ID NO: 347419 - DNA, 32 bp, Homo sapiens
  chr17:29718746-29718778
  hyper
cgggcggaggctgcgcggcgcagacccagacg

SEQ ID NO: 347420 - DNA, 307 bp, Homo sapiens; identical to SEQ ID NO: 204552
  chr17:33700165-33700472
  hyper

SEQ ID NO: 347421 - DNA, 206 bp, Homo sapiens; identical to SEQ ID NO: 204553
  chr17:33701376-33701582
  hyper

SEQ ID NO: 347422 - DNA, 168 bp, Homo sapiens; identical to SEQ ID NO: 345516
  chr17:33701612-33701780
  hyper

SEQ ID NO: 347423 - DNA, 33 bp, Homo sapiens
  chr17:33775294-33775327
  hyper
cgcaacgggggaagcctccaggacgcacttggc

SEQ ID NO: 347424 - DNA, 80 bp, Homo sapiens
  chr17:35291240-35291320
  hyper
cgctgaacggaactggcttaaatgcagagctgagctgagcggcttcggagaaggcgaatttagaaagcctggtcaatttt

SEQ ID NO: 347425 - DNA, 226 bp, Homo sapiens
  chr17:36886750-36886976
  hyper
cggagctcccggcccgtcccgccggtgtctggcttgcctcagctcacaggcttttcccgagcgccagtccctgccaggacctccgcagccagcaccttctcttgcgacctttttcttaccctctcattcctccctcgccccttcagccctgtcacctcctccttcctagatggcctcccgtgtccttccctttccactgattttatttttccgtttccaaaccacc

SEQ ID NO: 347426 - DNA, 54 bp, Homo sapiens
  chr17:37365986-37366040
  hyper
cgggggctgtaaaccggaaccggtggaggagggggcgctcatcaggaaaggcag

SEQ ID NO: 347427 - DNA, 129 bp, Homo sapiens
  chr17:38478466-38478595
  hyper
cgtctgggcgggcaccttggagcagtgagggggattcctcaagcacaaaaggcaggggagaagtggcagggaagaggtggcaggggagaggtggcaggggctaggcacagttgggaccttgcttgcctg

SEQ ID NO: 347428 - DNA, 36 bp, Homo sapiens
  chr17:40332770-40332806
  hyper
cgcacctccattctctcccctcgcctcgggtctcac

SEQ ID NO: 347429 - DNA, 84 bp, Homo sapiens; identical to SEQ ID NO: 345517
  chr17:40558083-40558167
  hyper

SEQ ID NO: 347430 - DNA, 47 bp, Homo sapiens; identical to SEQ ID NO: 345518
  chr17:40558226-40558273
  hyper

SEQ ID NO: 347431 - DNA, 321 bp, Homo sapiens
  chr17:42083719-42084040
  hyper
gcctaagggagtataggggaggagttcagccctgggtgcccagatctgcgccctccctggctaaggactccgggcggaagtaaggataaaggggtcagagaaaagagaggtccgtgggggtaggggggcagtccgtgccggctgtgggccaggctcacccgctgactccggacacaggtcctgagtaacgtgaacctgcccgccgacctggacctggtgtgcaacgccgagtgggtgagcacaaaagaacggcagcagatgcggctcatcgtggacgtgctcagccgcctgccccaccactcctcggccgtcatcaccgcc

SEQ ID NO: 347432 - DNA, 267 bp, Homo sapiens; identical to SEQ ID NO: 204625
  chr17:42091861-42092128
  hyper

SEQ ID NO: 347433 - DNA, 170 bp, Homo sapiens; identical to SEQ ID NO: 345520
  chr17:42092357-42092527
  hyper

SEQ ID NO: 347434 - DNA, 62 bp, Homo sapiens; identical to SEQ ID NO: 204629
  chr17:42402710-42402772
  hyper

SEQ ID NO: 347435 - DNA, 192 bp, Homo sapiens
  chr17:42402917-42403109
  hyper
ggctacccgccgagacttgaaaacttcgcggcgacttctctcgccggccttagcatcgcccccatttttcaggttacaggacaggcctgcaactgcaaaacgctttgtaaaccacagggccccgcgcgggtgtgcgccactgggttagctgagctgcagcccgggccgggcgggctgggacgtgagcaagcc

SEQ ID NO: 347436 - DNA, 197 bp, Homo sapiens; identical to SEQ ID NO: 204637
  chr17:42988798-42988995
  hyper

SEQ ID NO: 347437 - DNA, 89 bp, Homo sapiens; identical to SEQ ID NO: 345522
  chr17:42989016-42989105
  hyper

SEQ ID NO: 347438 - DNA, 38 bp, Homo sapiens
  chr17:43298587-43298625
  hyper
cgtccgcgccccccaccctgtttaggagttcctgtttg

SEQ ID NO: 347439 - DNA, 230 bp, Homo sapiens
  chr17:43298666-43298896
  hyper
caggggaggagagaaataaaaggtggggggcctggaagggggttcccaccttctcagtccgggacgcgagacgggaacgcagccctggcgccccaacgctgcaccaccgtgggtctccgagccgtgctcgcagtcgctgagatcctcggtgcggagaagatgtgcccctccaatccccaggccgtgatccccttcacccagacccggccaatccctcgcccgaggcgagc

SEQ ID NO: 347440 - DNA, 117 bp, Homo sapiens; identical to SEQ ID NO: 345523
  chr17:44849684-44849801
  hyper

SEQ ID NO: 347441 - DNA, 80 bp, Homo sapiens; identical to SEQ ID NO: 345524
  chr17:44849831-44849911
  hyper

SEQ ID NO: 347442 - DNA, 63 bp, Homo sapiens; identical to SEQ ID NO: 345525
  chr17:45330951-45331014
  hyper

SEQ ID NO: 347443 - DNA, 119 bp, Homo sapiens; identical to SEQ ID NO: 204649
  chr17:45331313-45331432
  hyper

SEQ ID NO: 347444 - DNA, 90 bp, Homo sapiens; identical to SEQ ID NO: 345527
  chr17:45331675-45331765
  hyper

SEQ ID NO: 347445 - DNA, 298 bp, Homo sapiens; identical to SEQ ID NO: 292442
  chr17:46089283-46089581
  hyper

SEQ ID NO: 347446 - DNA, 218 bp, Homo sapiens; identical to SEQ ID NO: 345528
  chr17:46124683-46124901
  hyper

SEQ ID NO: 347447 - DNA, 164 bp, Homo sapiens; identical to SEQ ID NO: 345529
  chr17:46125148-46125312
  hyper

SEQ ID NO: 347448 - DNA, 53 bp, Homo sapiens
  chr17:46620299-46620352
  hyper
cgctaattcagtaatacctgaattttagcaaaacacataagtctatgcgactg

SEQ ID NO: 347449 - DNA, 321 bp, Homo sapiens; identical to SEQ ID NO: 204659
  chr17:46621458-46621779
  hyper

SEQ ID NO: 347450 - DNA, 63 bp, Homo sapiens; identical to SEQ ID NO: 345531
  chr17:46687527-46687590
  hyper

SEQ ID NO: 347451 - DNA, 149 bp, Homo sapiens
  chr17:46690905-46691054
  hyper
gggagggtgggggagggggcagggacggagaaggttggaagattcgtgaacgagcctgggagaccattataataagggcaggggaccttctaccccgtgcgggggcggggggggcgcaagaaggccgcggtcggcggaggaggaggggc

SEQ ID NO: 347452 - DNA, 197 bp, Homo sapiens; identical to SEQ ID NO: 345532
  chr17:48619736-48619933
  hyper

SEQ ID NO: 347453 - DNA, 169 bp, Homo sapiens; identical to SEQ ID NO: 292548
  chr17:53341536-53341705
  hyper

SEQ ID NO: 347454 - DNA, 297 bp, Homo sapiens; identical to SEQ ID NO: 345533
  chr17:54911482-54911779
  hyper

SEQ ID NO: 347455 - DNA, 515 bp, Homo sapiens; identical to SEQ ID NO: 345534
  chr17:54911874-54912389
  hyper

SEQ ID NO: 347456 - DNA, 85 bp, Homo sapiens
  chr17:58228397-58228482
  hyper
tcctctaggtgggaggtggcaggaaaggcatgttaatatttgataagaagctaaaggcgcttcaagcggctgggcacagggatcc

SEQ ID NO: 347457 - DNA, 79 bp, Homo sapiens; identical to SEQ ID NO: 345535
  chr17:58498618-58498697
  hyper

SEQ ID NO: 347458 - DNA, 38 bp, Homo sapiens
  chr17:59478678-59478716
  hyper
tttcccctgaacgaatttcggggagattaaggagaagc

SEQ ID NO: 347459 - DNA, 40 bp, Homo sapiens
  chr17:60885408-60885448
  hyper
cggagcggcgggggcgagggggccgttacctgtgggtctg

SEQ ID NO: 347460 - DNA, 308 bp, Homo sapiens
  chr17:60885548-60885856
  hyper
gctcctcttcctcctcctctttttgcttcttcactccctacacctgcccctcttcctcctccttccccgaggctgctttccgcggcgccggccggccttgcctggggcggaggcggtgggggcggctaccgggcgtcctccggtttccctagcaaccgcgcctccccgcccccgcgcgaccaggtgcagccgccgagagcacggggcggggcggggcggggctgtggccccggggtcccaagccagtcgtgggcgcccgccggttgccgtgggaacgaggcgggctgcagtcggggagtcagagccac

SEQ ID NO: 347461 - DNA, 111 bp, Homo sapiens; identical to SEQ ID NO: 345536
  chr17:61777761-61777872
  hyper

SEQ ID NO: 347462 - DNA, 76 bp, Homo sapiens; identical to SEQ ID NO: 345537
  chr17:61778423-61778499
  hyper

SEQ ID NO: 347463 - DNA, 60 bp, Homo sapiens; identical to SEQ ID NO: 204756
  chr17:64961305-64961365
  hyper

SEQ ID NO: 347464 - DNA, 202 bp, Homo sapiens; identical to SEQ ID NO: 292637
  chr17:64961625-64961827
  hyper

SEQ ID NO: 347465 - DNA, 83 bp, Homo sapiens
  chr17:64962141-64962224
  hyper
cgacccccaaatgcgactggaggctgagtagtaggtgtcatgaggctggaatgctaggggaccaggatttcagccccgggacc

SEQ ID NO: 347466 - DNA, 359 bp, Homo sapiens
  chr17:72449954-72450313
  hyper
cggtggcttgcctcacccccaactccaccgacggcaggagagggtccgcgggggcccgggcccagggaaggttttacgctccgtccttaacccagcgtcctaacctgacccggctgggagagggggcggggccccggaaccccacccgcagacagcccactcccccgcacgcacctgggttgggggaggtggggggcggtggggggcagtgaaggtggggggaggtgggggtgggcccgagcagccggcgcgcccacgtgcctctcccgcgagggcccggccaccccagctccagccaacccgaggccgcctctcgtgccccaccccaagccccgccccggcccctgcaacccgatcct

SEQ ID NO: 347467 - DNA, 336 bp, Homo sapiens
  chr17:72450330-72450666
  hyper
cgaagccagctgtcccagctcctgctgtagcctgggggccgggccgccgcgctccgcccatccccgccctcagagctgggcctcgcagccgctagggattgcgggggccgcatttatccctgtgtctctcaggccccgcagagacgggggtggggtgggtgacgccagggaagcaggccccttttcccaagggaagaatccccttccggaggcccgccgggccatggagtttccgcgggtggaggtagtgaggccaagggcacggggagccctgtcgctgccttacgtctggctctaggccggggttcctcggctccaccagcgacatttgtggcc

SEQ ID NO: 347468 - DNA, 65 bp, Homo sapiens
  chr17:73073967-73074032
  hyper
ggctagagttcccccaggcactggggacagtcccgtggccttgtgggtgggggattcctgactgc

SEQ ID NO: 347469 - DNA, 91 bp, Homo sapiens
  chr17:74965156-74965247
  hyper
cgcagccggcctcggctgtttaccaggcacccgttacgctaattgaaatgtgccaaatagctgcccggggcggggccgagcggagcagcgg

SEQ ID NO: 347470 - DNA, 257 bp, Homo sapiens; identical to SEQ ID NO: 204828
  chr17:77814493-77814750
  hyper

SEQ ID NO: 347471 - DNA, 221 bp, Homo sapiens; identical to SEQ ID NO: 204829
  chr17:77814929-77815150
  hyper

SEQ ID NO: 347472 - DNA, 220 bp, Homo sapiens
  chr17:80186335-80186555
  hyper
cgcaggccgcgggccgctcccctagccaggaagagccgccgtccgcaccgggaccggagaggaagcggaggtctgaagggggacaggtcggacgtggcctcagagagggaggatgtgggccccggagctgagccaggcggccggaaccccacgggacccgcgcgcacctccccaccaaaggggccccggcgttggggggcgaggggtcgctgccctggag

SEQ ID NO: 347473 - DNA, 517 bp, Homo sapiens
  chr17:80186618-80187135
  hyper
gcgaagcgagcctggactccgggggaggcgaggccgggaagacccagtcccgaggagcagagggggcgggccagctccgggccgggggcgccgacggggccggttccggttgggggggtccctgggcccggcggggttgcgggacgcgccgtcggggagctgcggcccgggagcccgtccggaggcggcgcggggtccgggcggggcgcgcaggggcggcgccaggcggtgacgtgcgcgggggacgtgccgcgccagcgacccgagcacttaaagtcgcccccggcgcggagcggaccggcagaggcgggcagaggcggcgagaggcggcgagaggcgggctgaggcggcccagcggcggcaggtaggcgcggccgcgatgctcgcgcgcgggccggggcccaggagctcccccgtgccgggcaagggggcgacctcggggtccgcgctctcacccccaccccgcccactttgtccatcaggtccgggggcgcccggggcatggactagccttctc

SEQ ID NO: 347474 - DNA, 1315 bp, Homo sapiens
  chr18:811501-812816
  hyper
cgaacgcaacgggaggcggagtggcatgattccgtaaaagtggacgctgaatggtaaatttcccaacccccaacccaaaacaaaggaaaactttaaacatgttgcggttttcaatcaaaccaagtaaagccagaaaggctcatccactcgccccacacacccgctcctctccccgcacagctgctaccggcgtcggccgatacacagacccccagcctttaggacccaaaggggccgcttccctcgcccctacttcggccgtaggggcaaaaataaacctctcctccccgtcgccgggcggtccacacgaccccaaagacaaggggtggggagtgtccccacgcccctggaacctcaggtcggacttgggcgggacccggcaggtctggacagggcagagaccgagtcaggggcgagcaggtagcgcggggaacgagacaagcccgccgggcgatccgggggaggggagaagtttcttcccaacttcccgactcgggcccgcgggggcggggaaccgcggcggcggcggcggcggcggctccgggcgctggggcctagccctgtccgggcagaggtggaaccctccgcccgcggggccccaccgggtccttacctgtcctccggccgcgctctcatgagtcgctgctaccgcagctcgaggtggcggagggcggaggcgaggcccgcgggccctctccctcctccacctcctcgtcccggggcgcccggcggcagcaacgacggcagagccggcccgggacgcgttacttcaggaggagggagttcccgggctccccacgcctcggcctcactctccacctcctccgccccccccccccggccccgccccctgacttctagcgggggcgggggctgcgggtacctgcgcgcgccgccgtccgctcaccggaactcgggccacgccggcccggctccggggcccccagccttccggcgcctacgcccccgtcaggtcccctccgcgggctccgggccgctttgctgtggtcaggataggcgaccggtccgtgtcacttctcccgacccaacatggcggcggggtccggggcggattcccgggggcggtgcaggccgagggggcgtgaggaggaggtgcttccctgcccggagagcaggcccgcggcgtcccttcccacccgcgaacccaccgacgctcggctgccgcggagattgaatggagcgctccgattctgcccctctgcctttctctgttccttggcccagctctcagtagtggccagggctttggggcttgcttttgtgggggaggacggggttgagtttttttggttgg

SEQ ID NO: 347475 - DNA, 190 bp, Homo sapiens
  chr18:812869-813059
  hyper
ctcaagcccaaccgcgtgagccgggggcgttactcacaccctcatcaccatcctgatcgccgtccaaaaaacgttcacgtcttgcctccttccgaggcagggatcctgtccctgcccccaggagcttcctgttgactgtaggtcgaaccagccttgccgggaggggaaccgaagctgagttctgtttggc

SEQ ID NO: 347476 - DNA, 238 bp, Homo sapiens; identical to SEQ ID NO: 345538
  chr18:2848166-2848404
  hyper

SEQ ID NO: 347477 - DNA, 985 bp, Homo sapiens
  chr18:3449983-3450968
  hyper
cggccaccccccgcgtccgcaccgccgcccccgagggacgagtgacagcggccgccgcgctcggtccagtcttcccggctggaaggtgcgggggaggggcggaggagcggcggggcgggagggggacggggcgggcggctgggggcggaggcaggacctcctgtaccttccctcctcgcctctctcactctgacagcgccgaggtgcgccgagcaggagcagggaacaaaggagcggagaggggaggggagagagttgggcgagggagagcccccggccggctgccagaagatcccggcgggaggaagcccaagtgtcacttgaattccacccaaggagcgggcgcctgggatcagagcgtcctgtttagcaataacggctggagcacgtcctacaagttacgggagagtcggctgtgaaggagacgttcgcttatcccctgtgtccccgctcctggcccctccagacccccgccttgcctcgcgctgggaggggagatccagaatgaaaggcaagaaaggtaaggcggccgcgggctgcgcgcaccagaagacgcgagtccggggaaacgtgctggccgggccgcgccgcgcggagtcacttggtggacttttccgcccaggggctctcatgctggagtggcggccgtgctctttgttgaggctgcgtctgaaacggcagcggctgttttcctgctagacacaacacgaggggctgttgtggggcgagcctctccacgctgctggcacgttgtcaagaaacacgctcagcgccttgtttgtgcgcctgcaagtttcattgtctccgccgacaccccacgctcggcccagccgccgcgtggcttctcgctctttctcgcgtgctggggatatggggtccgagtagggaggacccagcccctcgtttttcccgatccggacccaggcggccggggccgcgggaccgccgcggctttgtctgaaagttccactcctaggctcccccc

SEQ ID NO: 347478 - DNA, 584 bp, Homo sapiens; identical to SEQ ID NO: 345539
  chr18:5237294-5237878
  hyper

SEQ ID NO: 347479 - DNA, 537 bp, Homo sapiens; identical to SEQ ID NO: 345540
  chr18:5238247-5238784
  hyper

SEQ ID NO: 347480 - DNA, 216 bp, Homo sapiens; identical to SEQ ID NO: 292892
  chr18:7566793-7567009
  hyper

SEQ ID NO: 347481 - DNA, 415 bp, Homo sapiens; identical to SEQ ID NO: 204882
  chr18:7567335-7567750
  hyper

SEQ ID NO: 347482 - DNA, 59 bp, Homo sapiens
  chr18:9707859-9707918
  hyper
cgtgggacccagaatgtcgcttgaggatgggacccccgcagacctccacgcgctgccac

SEQ ID NO: 347483 - DNA, 275 bp, Homo sapiens; identical to SEQ ID NO: 292905
  chr18:9708063-9708338
  hyper

SEQ ID NO: 347484 - DNA, 563 bp, Homo sapiens; identical to SEQ ID NO: 345541
  chr18:11947488-11948051
  hyper

SEQ ID NO: 347485 - DNA, 435 bp, Homo sapiens
  chr18:12658128-12658563
  hyper
cgcctcgcgccgtccagcgccgcccagcgcccgccccttagggggccgcacgggccgggggatgcacgctctggaggtgaggaccaggcaggagggcctcgcctcgaggcgagatggccgcacggtctctagcccgcagggctctcagagtcgcaggcggtgacgcccggtcggggggcccggtcgcaagggacacacagctgggggcgcaatggtgagggcggcgacgcacggtccggaggggatgcgcggccgggtagggcgtgcagggttgtggggcgtgggggacacgcggggccgggcgcgcggtcggggggcgcaggggcaagagggtgtcgcatttatcagggaagtccccggccgactctggcggggaactgggcgcgccaacccgggtcaccgccctgcacagcgggagaagtcacccgcattgac

SEQ ID NO: 347486 - DNA, 48 bp, Homo sapiens; identical to SEQ ID NO: 335763
  chr18:19577719-19577767
  hyper

SEQ ID NO: 347487 - DNA, 242 bp, Homo sapiens; identical to SEQ ID NO: 345542
  chr18:19750066-19750308
  hyper

SEQ ID NO: 347488 - DNA, 349 bp, Homo sapiens; identical to SEQ ID NO: 204911
  chr18:19750390-19750739
  hyper

SEQ ID NO: 347489 - DNA, 224 bp, Homo sapiens; identical to SEQ ID NO: 345544
  chr18:19750806-19751030
  hyper

SEQ ID NO: 347490 - DNA, 195 bp, Homo sapiens; identical to SEQ ID NO: 345545
  chr18:20512643-20512838
  hyper

SEQ ID NO: 347491 - DNA, 1232 bp, Homo sapiens; identical to SEQ ID NO: 345546
  chr18:20512902-20514134
  hyper

SEQ ID NO: 347492 - DNA, 121 bp, Homo sapiens
  chr18:24130266-24130387
  hyper
cgcatcaattgaaacccatccatcaatttgcattttttttttttaagaaagaatgaaagaccaggtctcagggcagtgtgggcttctgagtgggagttgacgatgtctttttctgcagcga

SEQ ID NO: 347493 - DNA, 287 bp, Homo sapiens; identical to SEQ ID NO: 345547
  chr18:31804522-31804809
  hyper

SEQ ID NO: 347494 - DNA, 1207 bp, Homo sapiens; identical to SEQ ID NO: 345548
  chr18:32556625-32557832
  hyper

SEQ ID NO: 347495 - DNA, 45 bp, Homo sapiens; identical to SEQ ID NO: 204955
  chr18:32557883-32557928
  hyper

SEQ ID NO: 347496 - DNA, 445 bp, Homo sapiens; identical to SEQ ID NO: 345550
  chr18:32558003-32558448
  hyper

SEQ ID NO: 347497 - DNA, 593 bp, Homo sapiens; identical to SEQ ID NO: 335791
  chr18:32621215-32621808
  hyper

SEQ ID NO: 347498 - DNA, 755 bp, Homo sapiens; identical to SEQ ID NO: 345552
  chr18:42258983-42259738
  hyper

SEQ ID NO: 347499 - DNA, 120 bp, Homo sapiens; identical to SEQ ID NO: 204967
  chr18:42259821-42259941
  hyper

SEQ ID NO: 347500 - DNA, 711 bp, Homo sapiens
  chr18:42260083-42260794
  hyper
tgatatctctctccataaatcggtggcgcggcggaggcggcagagtcgggcgggaagcgcggggccggccggggcgcccgccgctcgccgccgcctccgcgcgcccgggggccccggcgccccccgagctagggcggccagctcgcggctcgccgtttgacagatgctcatcgccatggagttgccgcagcagcacctttgggggctcgggcgagcgacgggagccgggatctgagcgagcgccggggccagcggagccggagccgccgggacatgggtgagcacgcgcggcgaccttggcccgggagcccgggcgcccagcctccctccgcgccgcgggcccccgcactcccggaaccgggggcgacgtgtgtgccctgcatgcaaaagttcacgtcgccttgctgggtctttgactttgcacccggcgggaagggggagaccgggccgagggggcgggatgccggtccgggcgaggttgcaggagatgggcgcgattccggcgggccggcgggtgggcggcgatgctggctcaattggagtggctcgttggtggcggcgatggtggaagctttgggctggagggctgggagcttattgagtttcgcctaatctgatctaccccccctccgccccccgccttttgcaccctccctcggtcctgcagccggctggcggggctggcgggtttggcgttggtggagtggactc

SEQ ID NO: 347501 - DNA, 79 bp, Homo sapiens; identical to SEQ ID NO: 345553
  chr18:44335955-44336034
  hyper

SEQ ID NO: 347502 - DNA, 724 bp, Homo sapiens
  chr18:45936357-45937081
  hyper
cggcagagatgggctctgccgacccggggcagcggtgcggcagagatgggctctgccgccccggcgcacggctatttttacagagtccgatgggggaggaaataaaacaactcggcaactgcttttctacccgaaagtcgggagcaaggagtgggggcgagaagttaagtttcccaaatgctctcggcactccagcgagcgcaccaagacgcctagccagcacctgaaaccgcaagcttgccgcaccccggggcgccgaatctcagcgggcaatcgcgctcggcggcgctgcggcccggagtccccacccctctggagccttgggccccgcactccgcaccccacacgccggggagcagccgctggccgcccgtcactccccgggtcggcctggaaggcggccttccgaagcgtccaatcaccgcgcaacaatgccaacgggcgggcccggggagggcttgtccccgccccgtcccgccgggccccgccccctcggagtctgtcggggcaggagaatctcgctgggacgccgagtgctcagcggtgctggaagccacgaagggccagtgcgaggggaggaggaagggtcctggccctggagagggcgtgagcgttctcgggcgaggcgacacttgggcagatgttccctccagctacgggccggggaaactcgagctggctttgcctcctacctttttgcagtccacccctctgcgctccagac

SEQ ID NO: 347503 - DNA, 75 bp, Homo sapiens
  chr18:45937111-45937186
  hyper
tacatcggaggcagcaccctcgcacgtcagcgggtcctctccggggctcctccctcagaagcgggaaagtttgtc

SEQ ID NO: 347504 - DNA, 556 bp, Homo sapiens; identical to SEQ ID NO: 335811
  chr18:46502500-46503056
  hyper

SEQ ID NO: 347505 - DNA, 143 bp, Homo sapiens
  chr18:47087918-47088061
  hyper
cggccctcgctaggcgggaagggagggagaagaggaggacaaaggggatgaccaggtggctctcccccgacggactcccggcccagggagcggatagaccactcccagagagagtgtggctttgagccttggagaggatgctc

SEQ ID NO: 347506 - DNA, 242 bp, Homo sapiens
  chr18:47088502-47088744
  hyper
cctgccaccgcccgggctccgtgccgccaagttttcattttccaccttctctgcctccagtcccccagcccctggccgagagaagggtcttaccggccgggattgctggaaacaccaagaggtggtttttgttttttaaaacttctgtttcttgggagggggtgtggcggggcaggatgagcaactccgttcctctgctctgtttctggagcctctgctattgctttgctgcggggagcccc

SEQ ID NO: 347507 - DNA, 195 bp, Homo sapiens; identical to SEQ ID NO: 345554
  chr18:47339411-47339606
  hyper

SEQ ID NO: 347508 - DNA, 400 bp, Homo sapiens; identical to SEQ ID NO: 204991
  chr18:47339758-47340158
  hyper

SEQ ID NO: 347509 - DNA, 101 bp, Homo sapiens
  chr18:47720391-47720492
  hyper
cggttcgactttactccaaccccctccccgcagtcactgaagccctctttgtaccaaagaggccgcgtcaaaacatccatccccagcaaattcacaatgct

SEQ ID NO: 347510 - DNA, 279 bp, Homo sapiens; identical to SEQ ID NO: 293092
  chr18:47720522-47720801
  hyper

SEQ ID NO: 347511 - DNA, 436 bp, Homo sapiens
  chr18:47720908-47721344
  hyper
cctctaggagccgggtggccggtcagtgcgggcgttcccggaaccgccaaactttctccgccaaccgaagttagggactccgaggacagtgacgaggaggacaccgcggaggggggtctcccgtcacctcccgcctccagtagccgagggagaaggcgaccctgagtactaggtggccccgagcgcgccaccccggccccggggcgcctccctcgcggccgcgctcacctggctgtagagctcgcccaccgacatggcccgggccgggcggggctcgggccccggctcctggctgccccgcggctctcagtccgcggctggcccgcctggcgccatgttcccgggctggcctggagtttctcgatcttctcgctcttctccgacctgccccgccggcttcccgcaggcgccgcggccggctcgctcccggcggcgc

SEQ ID NO: 347512 - DNA, 34 bp, Homo sapiens
  chr18:54789287-54789321
  hyper
tcctacagttttgcagagaagtctatgagtgatc

SEQ ID NO: 347513 - DNA, 254 bp, Homo sapiens
  chr18:55105210-55105464
  hyper
cgcgggttacattgttctggagccggctcggctctttgtgcctcctctagcggccaagctgcgaggtacagccctctattgttctaggagcacagaaacctcctgtgtgggcggcgggtgcgcgagctagagggaaagatgcagtagttactgcgactggcacgcagttgcgcgcttttgtgcgcacggaccccgcgcggtgtgcgtggcgactgcgctgcccctaggagcaagccacgggcccagaggggcaa

SEQ ID NO: 347514 - DNA, 57 bp, Homo sapiens
  chr18:55106090-55106147
  hyper
cgggaaatgaactggagactggctgacagttcttaacattttgtcatagatcccccc

SEQ ID NO: 347515 - DNA, 100 bp, Homo sapiens
  chr18:60985398-60985498
  hyper
cgacatctcccggttgacgctctccacacacatgaccccaccgaactcaaagaaggccacaatcctcccccagttcaccccgtccctgaagagctcctcc

SEQ ID NO: 347516 - DNA, 75 bp, Homo sapiens
  chr18:60985973-60986048
  hyper
gaagaggagttataatccagctattttattggatgtgctttgcattcttggacgagggggtgtcttcaatcacgc

SEQ ID NO: 347517 - DNA, 122 bp, Homo sapiens; identical to SEQ ID NO: 335849
  chr18:74163260-74163382
  hyper

SEQ ID NO: 347518 - DNA, 817 bp, Homo sapiens
  chr18:74844285-74845102
  hyper
cgggtcagggaggccgccggctgctacctgctcggccacctgctccgctgcctaggttctccctgcgcgtccccagccaagaaagggacccggagtccgggcgtcgggatagctcctgtccccgatcttgcgcccccggctcccgcggggctccggtccggggtcccgcccaggtctccgcggtccccactcggaggggcacagagacaaaggcggcagagcagcccgcccgtccccgagggtcacccaccggcgctgcgctcgttgctccgaggccgaggggcgccgcggggtccaaggccctgctccgcctgcccaggcccgggcaggctggtctcggcttcaagcgcccacgcgcggggtccccgggcagcctgcttcgccttccggggtcgggagacaggggccgccggggccggaggctgcttctctctggcgcgcggcggcggtgactgacggcggcggctccgagggacgggcgcgcacccagctccccggccccgcctccccgggcttcctgcgagccaggtaaacacaggccgatcccgccgggcccgccccacctggacgcggccgccggcgccgccccgggagctcggaggaccccgggcccgctctgcccacgcggaacttggggggcgcacggggcccacgcgcagggtcagacctcggaggggcggcctggagcctcgcccgctgccgaactgggctccgaactgcggcccgtcgacccttcccgttcggaggcttggcctccgaacccaccccgaccccgacctcgacctcgcgggaggggtgccaggccgcatctccccgc

SEQ ID NO: 347519 - DNA, 743 bp, Homo sapiens; identical to SEQ ID NO: 335871
  chr19:941824-942567
  hyper

SEQ ID NO: 347520 - DNA, 98 bp, Homo sapiens; identical to SEQ ID NO: 345556
  chr19:1725428-1725526
  hyper

SEQ ID NO: 347521 - DNA, 74 bp, Homo sapiens
  chr19:1761779-1761853
  hyper
cggcctcagttttccctctgccaagtaggtgctaatgtgagaggggctgagaaaccggcacccctcctgagtcc

SEQ ID NO: 347522 - DNA, 189 bp, Homo sapiens; identical to SEQ ID NO: 205090
  chr19:1761983-1762172
  hyper

SEQ ID NO: 347523 - DNA, 47 bp, Homo sapiens; identical to SEQ ID NO: 345558
  chr19:1762820-1762867
  hyper

SEQ ID NO: 347524 - DNA, 109 bp, Homo sapiens; identical to SEQ ID NO: 345559
  chr19:1857456-1857565
  hyper

SEQ ID NO: 347525 - DNA, 116 bp, Homo sapiens; identical to SEQ ID NO: 345560
  chr19:1979018-1979134
  hyper

SEQ ID NO: 347526 - DNA, 601 bp, Homo sapiens; identical to SEQ ID NO: 335900
  chr19:2461998-2462599
  hyper

SEQ ID NO: 347527 - DNA, 598 bp, Homo sapiens
  chr19:2579147-2579745
  hyper
cgggatgggtgcccccggccgggcaggtccagacgccaaggtctgcacaggggtcacccggacacacctgactcggaccatgtggctaagtttgttttgaaatttcactgccccagcgtaacccagagtccaggccacgcccagcacggctggctcccgtccgggtctctgtgtcctgcagctcagggtggccagggcgggcgggcaggagggcaggcacctggcacccacccagacctgcgccctggccatcaggctgccccgggaagccgggcgaccgggaagatagcagagtcaacagggcgggtgcaggaaagggcgctccccatgcgagcctctgaagccctcggcacacagccctggaggctgggaatccttgagcgttttcctctgaggtctccaagtgtttatggtaacaagaggagggaggagggcgaggggacggccgccgctgggcagcagctccgcctgctggtcaccttcctcggggacatgcaaggacaagctgccgacggaaggggctttggcagaaatgcggggagcaggggacgcacccccacggacaggggcttttctggttgccaaacgtgcagacgac

SEQ ID NO: 347528 - DNA, 72 bp, Homo sapiens
  chr19:2702445-2702517
  hyper
cgaccccctaagcgcagccccgtccccaattccaaccccagcctccagttgcagcccgggtccccagaccca

SEQ ID NO: 347529 - DNA, 453 bp, Homo sapiens
  chr19:2702553-2703006
  hyper
tccgcagccgaatccgagctgtcccagtcccctctccgggacgccggccgcgccctcacttcccctggcccggttcgcgggcgcccttacctgcgctcgggccccgcggccgcctcagccccgccgcgcagccgaaccctccgccccggcccgcgagcgctcgctcccctctgcgggggcggggccgacactcggggggcgggccctggcgtcccggcaaggccaatcgcgagccccggctgcgggaggccggagcgggggcggggcgcggggcaggcagcggggtaggctgcgcccaggagagtggggcggggctccgggcgcgggcggggccgggggcggggcgaagagcggctttccagggtgacttcgtgacgtcaggaaggcgcgagtagtttcgcgagttcgaatcccgcgctaggtgagctggttcgaatcctgcatgccagctcc

SEQ ID NO: 347530 - DNA, 46 bp, Homo sapiens
  chr19:3785511-3785557
  hyper
cgaccgctagtggctgggaagtgggcggtgctggggggtgagtctc

SEQ ID NO: 347531 - DNA, 438 bp, Homo sapiens
  chr19:5608081-5608519
  hyper
cgccctggaggctctgcatacttcagtcaagtagctgagtggtgtcctgcccctctggccttcctacgtccttctgtttttgtccagagctgagccccacaggtaaggccaactctgtcactcacgcctcagctgaatgtcacttcttcagcgagctctgctgaagctgcctcccaaatctaaacacggcctccccaacacactgacggcgtgctctaatattccttaatacgctcatcacaacacatcatatgtgtttatttcttaaatggtctttttcccgccagactaaaaaatctgtgatgacagtgaccacgtatgtttacctctgcttaatcatcagtgtccgagtgaagtcaacaaagtaactgaataaacaggttattcatggctataagaatttcctaagcccttgctgaacacacagactgttcagag

SEQ ID NO: 347532 - DNA, 766 bp, Homo sapiens; identical to SEQ ID NO: 345562
  chr19:7459915-7460681
  hyper

SEQ ID NO: 347533 - DNA, 211 bp, Homo sapiens
  chr19:10197461-10197672
  hyper
cgtaaagggatgaaaggcggggggggggcggcggaggccaaaaccaagggtcaagttcgggccgggagaacggtgcctagagatgggggagggatgatcccgtttccccttcccccaccggaacccccctgtctccatcccagctggagaagagcgtccggcgcctccgggagaagtttcatgggaaggtatcctccaagaaggcgggggc

SEQ ID NO: 347534 - DNA, 169 bp, Homo sapiens; identical to SEQ ID NO: 335936
  chr19:10207022-10207191
  hyper

SEQ ID NO: 347535 - DNA, 214 bp, Homo sapiens; identical to SEQ ID NO: 205174
  chr19:10400761-10400975
  hyper

SEQ ID NO: 347536 - DNA, 278 bp, Homo sapiens; identical to SEQ ID NO: 293499
  chr19:10401208-10401486
  hyper

SEQ ID NO: 347537 - DNA, 189 bp, Homo sapiens
  chr19:11593453-11593642
  hyper
actggtgaggaaccggcggggccaatctgcgcgtggcgccacagggctcccccgggcacgtgcctgagctcgcggctgcggtccccagggtcacgtggctgcggccaccagggcctacgcgcctcgcacgccacctagcggccgcgcctcgctccccgcccctctctctagcggcccgcaggaggcggc

SEQ ID NO: 347538 - DNA, 165 bp, Homo sapiens
  chr19:11805261-11805426
  hyper
cggaccgtagctccttccacgcatgaaccccgcacacgagtcgggattccccccatgaccctcccgtggcccccgcacaatctggagagacgcggggctgcgggcgcggagctgcccagagaggactcctgcccgggcccgcagtcgccgcgaagggacgggaca

SEQ ID NO: 347539 - DNA, 369 bp, Homo sapiens
  chr19:11805597-11805966
  hyper
ggcccctcacgctcaccattttccgaattcctccgtgtcccgggggcctctctgcggctcccacgaccagtgcaggtccctgtgtgacagaggctgccgcagactctccagagtgcctctcagcgacagagacaggagcccagcgaagtggcgtgtagaagacgccgcgggctttttcaatctcgcaccctcttagctgaagtgcgcctgattgacagttcccacgaccccgccccacggccctgattggatagtgcgacagatcccgccccctgacgactgagttacagaagcgatctcacgctggggagtggagactgatgaacgagttcttgacacagcccttggcagggcgggcttcttccctgc

SEQ ID NO: 347540 - DNA, 160 bp, Homo sapiens; identical to SEQ ID NO: 345564
  chr19:11909173-11909333
  hyper

SEQ ID NO: 347541 - DNA, 60 bp, Homo sapiens; identical to SEQ ID NO: 205194
  chr19:11909732-11909792
  hyper

SEQ ID NO: 347542 - DNA, 49 bp, Homo sapiens; identical to SEQ ID NO: 345566
  chr19:11959378-11959427
  hyper

SEQ ID NO: 347543 - DNA, 254 bp, Homo sapiens; identical to SEQ ID NO: 205198
  chr19:12075818-12076072
  hyper

SEQ ID NO: 347544 - DNA, 332 bp, Homo sapiens
  chr19:12098300-12098632
  hyper
cggctggaatagcagcgaccggctctgcagcgccctgttacccggggcttctgctgtcactcagggctgagggggcggggtaggatgccctatccaatcggggtgctggggcggggccctgccaactgtttaatccgccggaaggagggcgcagcattgccggtcttctcattgcctggctgctagaggaaacccgaagtcgggattctttctttcctgctctgagagggaccaggtccctcctccgtagcttttgtctctctattgcctgcgccgtgtcctggactgctcacgggagttctgcaggagacgccggaatatctggaagctga

SEQ ID NO: 347545 - DNA, 117 bp, Homo sapiens; identical to SEQ ID NO: 205202
  chr19:12163331-12163448
  hyper

SEQ ID NO: 347546 - DNA, 96 bp, Homo sapiens
  chr19:12595013-12595109
  hyper
cggtcgtgggtttgagatctggcttcccatacacttggaaaccttgagaaacgagtcctcccttgggaagaaaagagggactgaggaccccacaca

SEQ ID NO: 347547 - DNA, 485 bp, Homo sapiens
  chr19:12595307-12595792
  hyper
ctgcggccaaagagaccgagggccgagctgcgccaggaggactcgggtccacagacccgggagacaacggcggggaggcctgggtcccaccacagccagatccggccggtttcaacccgcccctctctcccatctcaagacccccagccccgcacacttaccatttcccagactctgggatgtcctggtgttctgtttacctctcccgcggccagcacaggtcctacctccacctgaggcccttcctccacctgagggccttctggggtgaggagaccccagagcggagcgcagcggctggtagccacgccctcgccgtttgcgcagcgcccctccgcccgccttcccggcggcgcccctgattggacattgcactcttggacccgccttcgttgcctgagtgacagctagtagggaagtcgcgtctctaagcaacctgcattcgtccggggtcaggaatctgttcccctgccacggatatttgc

SEQ ID NO: 347548 - DNA, 60 bp, Homo sapiens; identical to SEQ ID NO: 345568
  chr19:13208370-13208430
  hyper

SEQ ID NO: 347549 - DNA, 205 bp, Homo sapiens; identical to SEQ ID NO: 293612
  chr19:13208478-13208683
  hyper

SEQ ID NO: 347550 - DNA, 284 bp, Homo sapiens; identical to SEQ ID NO: 205227
  chr19:13208945-13209229
  hyper

SEQ ID NO: 347551 - DNA, 446 bp, Homo sapiens; identical to SEQ ID NO: 293614
  chr19:13209259-13209705
  hyper

SEQ ID NO: 347552 - DNA, 189 bp, Homo sapiens; identical to SEQ ID NO: 345572
  chr19:13213427-13213616
  hyper

SEQ ID NO: 347553 - DNA, 112 bp, Homo sapiens; identical to SEQ ID NO: 345573
  chr19:13213834-13213946
  hyper

SEQ ID NO: 347554 - DNA, 1257 bp, Homo sapiens; identical to SEQ ID NO: 345574
  chr19:13265772-13267029
  hyper

SEQ ID NO: 347555 - DNA, 881 bp, Homo sapiens
  chr19:14073521-14074402
  hyper
cgcctgcacgaagaggccgcgcgcgtcagtccgcgccagcttggccggcggctccagggtctccgggcccagcgcgggtgactcgccgccagccgccagtgagatgtcctgcggcagctcgtcctcgctctcctcctcctcttcttcctcctcgtctggaacacagggaccaagtccggctcggggcggggtggcaacgcccccgggctcctcctcctcccgagcccctccgttgtccgccacccccgggacccgcgccctgggtgggaacacgcctcgcctacctttgtcggggtccagggggttcagggaggtggccagattggcgaactggaggaagaagagaagaaaatgggtgagggtcccgccgcctggcgccccgcccgcgcccccagtggcccgcctcgcgcacctcgcccatgacggcgatgggggtctcgcccttggcctgggctacgcggtgctcgatcaggtagtacatgtactcgtcgtagagcagccggatgaggtggaaggaaccgaagctggcggcgctgcgcagggtcaggtcccggatcaccatggagctggggatggagacggagaggagaccgtcaggccccgtccggcccgaccccctctccccctccccgctgcgatgcgcccgggcctcgcgccagcccagtgactcaggctggatcccgcacagccttcccggcacatgagcccagggccccagcctgcccgcccagcctgcaggctcgggtcgtcgtagaagagcacctgagacccccagggacgcggggccttccctggtgccgcccggacccgatcccgccgcgcgcgcacctgtagaaggaccacttgaggaggaagagcttggcggccttggggaagccggc

SEQ ID NO: 347556 - DNA, 324 bp, Homo sapiens; identical to SEQ ID NO: 335997
  chr19:15235629-15235953
  hyper

SEQ ID NO: 347557 - DNA, 161 bp, Homo sapiens; identical to SEQ ID NO: 345576
  chr19:16186802-16186963
  hyper

SEQ ID NO: 347558 - DNA, 102 bp, Homo sapiens; identical to SEQ ID NO: 205249
  chr19:16187000-16187102
  hyper

SEQ ID NO: 347559 - DNA, 517 bp, Homo sapiens; identical to SEQ ID NO: 205250
  chr19:16187103-16187620
  hyper

SEQ ID NO: 347560 - DNA, 634 bp, Homo sapiens; identical to SEQ ID NO: 345579
  chr19:16187640-16188274
  hyper

SEQ ID NO: 347561 - DNA, 214 bp, Homo sapiens; identical to SEQ ID NO: 345580
  chr19:17008145-17008359
  hyper

SEQ ID NO: 347562 - DNA, 31 bp, Homo sapiens; identical to SEQ ID NO: 55797
  chr19:17008820-17008851
  hyper

SEQ ID NO: 347563 - DNA, 129 bp, Homo sapiens; identical to SEQ ID NO: 205270
  chr19:17958346-17958475
  hyper

SEQ ID NO: 347564 - DNA, 353 bp, Homo sapiens
  chr19:18117804-18118157
  hyper
cgatccccatcacgggctgagggtgaccgtgtttgtttatgaccgccccctccacccacacacctcactgaggtggtggaagtctcctgagccaggctcagaggcggacagtcacggcaggggatgggttcagcggcagcgcattacgctgccacgagagggcgccagcgtcccgcagacgacgcagaggcaactcccgctggagaaactccatgcgacttttctttggggaaactgaagcccagagagaggtcacgccgtcccgtggccacaccgcagctgtggacctgggggtgcccgagcgtcccctgcattcagctctgtggcgggacgggggctgaggatgactggag

SEQ ID NO: 347565 - DNA, 262 bp, Homo sapiens
  chr19:18335414-18335676
  hyper
cgctcggtctgcttcgaacaagtccgggtgacgctcgggccgggtcgggcatgttcggtcacgtccggctacatgagggctagttcgggcatctccgactaagaccggccgcgctcggcctgttccgtccgactccagcgggtttagcagcaccgggatgaaccccacggccagccgaaggggcggggcttcttaacccttccctggcccgtctggggtgcgccgtgggcgctgtggtgcaatgggagacgctcttaggggc

SEQ ID NO: 347566 - DNA, 74 bp, Homo sapiens
  chr19:19932106-19932180
  hyper
cgaccttcccgtggcccctgaacaatctgggaaagacctgtgggtgcagagctgcccggagagggttccacgcc

SEQ ID NO: 347567 - DNA, 693 bp, Homo sapiens; identical to SEQ ID NO: 345583
  chr19:19976556-19977249
  hyper

SEQ ID NO: 347568 - DNA, 35 bp, Homo sapiens; identical to SEQ ID NO: 345584
  chr19:19977294-19977329
  hyper

SEQ ID NO: 347569 - DNA, 69 bp, Homo sapiens
  chr19:20011652-20011721
  hyper
cgggaccttaagaattatccaatcagggacgctgggctggaaacgtccaatcaggcaagcagccggacc

SEQ ID NO: 347570 - DNA, 48 bp, Homo sapiens
  chr19:20011722-20011770
  hyper
aacagggcggcttctggtttggcgggtcctttgtctctcggtgcagcc

SEQ ID NO: 347571 - DNA, 53 bp, Homo sapiens
  chr19:20162601-20162654
  hyper
cgatcccagacccttgagggtctgtgagaaatcaaactttcggcactttggaa

SEQ ID NO: 347572 - DNA, 159 bp, Homo sapiens; identical to SEQ ID NO: 336048
  chr19:21688303-21688462
  hyper

SEQ ID NO: 347573 - DNA, 73 bp, Homo sapiens; identical to SEQ ID NO: 293780
  chr19:21688741-21688814
  hyper

SEQ ID NO: 347574 - DNA, 60 bp, Homo sapiens; identical to SEQ ID NO: 205321
  chr19:22019028-22019088
  hyper

SEQ ID NO: 347575 - DNA, 129 bp, Homo sapiens
  chr19:23432833-23432962
  hyper
cggggaagagacaagacgcccgggggccggctgtcagcgaagccgccatcttatggctgaaggggactgaggcccagctgggcaaggagaactcagggcgcagtttgtggagatgactgcggggaggcc

SEQ ID NO: 347576 - DNA, 120 bp, Homo sapiens; identical to SEQ ID NO: 205325
  chr19:23433023-23433143
  hyper

SEQ ID NO: 347577 - DNA, 118 bp, Homo sapiens
  chr19:23433296-23433414
  hyper
cccttcaggccttaagtgacagaagacctgaccaaacgctggactgaatgaagaaagagtgacagcctaagctgcagcgttttcaggcagggcttcctccctgagcttagcccacccc

SEQ ID NO: 347578 - DNA, 105 bp, Homo sapiens
  chr19:23456510-23456615
  hyper
cgtctcaaacaaacaaacatgtttaacaagagactgggagtctcacctgccacagctccttctacgcacacacgagtcggaattctgccctaatgacccgcctgg

SEQ ID NO: 347579 - DNA, 216 bp, Homo sapiens
  chr19:23456881-23457097
  hyper
tcccagcttccaggatgtcctggcatcttagctgtgcgtctcccagaacctgcagatcacagggcaagaggctgtgacagtcaccgggggctcccgaggtggaggacgtaaaacagcagagaccgatcccaagctgtggcgggagtgagatacaaaggccccaccaaatgccggaagccacgccctcctctccaactgggcggttcctgcgctagc

SEQ ID NO: 347580 - DNA, 68 bp, Homo sapiens; identical to SEQ ID NO: 336059
  chr19:23578240-23578308
  hyper

SEQ ID NO: 347581 - DNA, 68 bp, Homo sapiens
  chr19:23598868-23598936
  hyper
ccgccaaatgccggatgccacgccctcctctccaactgtgccactgattcgataaagcaccagcactc

SEQ ID NO: 347582 - DNA, 701 bp, Homo sapiens; identical to SEQ ID NO: 12224
  chr19:24216103-24216804
  hyper

SEQ ID NO: 347583 - DNA, 60 bp, Homo sapiens; identical to SEQ ID NO: 205342
  chr19:30718934-30718994
  hyper

SEQ ID NO: 347584 - DNA, 233 bp, Homo sapiens; identical to SEQ ID NO: 293818
  chr19:31841177-31841410
  hyper

SEQ ID NO: 347585 - DNA, 325 bp, Homo sapiens; identical to SEQ ID NO: 293819
  chr19:31841583-31841908
  hyper

SEQ ID NO: 347586 - DNA, 159 bp, Homo sapiens
  chr19:36822892-36823051
  hyper
ctgccgcgccaaatcaaaatttacaatcacccttggtgctgtttcctgcactttcttggagatttgcaccaggcgctggagaccctcccacctggcccatgcctgccacccggtgaacaccaagacccaaccttctgcaccaccagtcttgttgtcagc

SEQ ID NO: 347587 - DNA, 209 bp, Homo sapiens; identical to SEQ ID NO: 345589
  chr19:36980725-36980934
  hyper

SEQ ID NO: 347588 - DNA, 31 bp, Homo sapiens
  chr19:37095634-37095665
  hyper
cgctgtcacaggatcactgataacagcatga

SEQ ID NO: 347589 - DNA, 105 bp, Homo sapiens
  chr19:37096594-37096699
  hyper
taggggtggcctcctgcgcccaacctgctgcattttaggtgcttgcctctctttgggatgttgtggccgattgtgtgtgaaaagtgaacggagtagtgttgctgc

SEQ ID NO: 347590 - DNA, 142 bp, Homo sapiens
  chr19:37342189-37342331
  hyper
atgccttaattttgaggtttgtggctgcttccgtgtgtgtgtgtgcgcgcgcgttggtgatattgttgatggagggtgcgtgtgaatttgttgtcattgtgaccccaaggtgtatgtcactgggaatttgagagatgcccac

SEQ ID NO: 347591 - DNA, 295 bp, Homo sapiens; identical to SEQ ID NO: 345590
  chr19:37568994-37569289
  hyper

SEQ ID NO: 347592 - DNA, 182 bp, Homo sapiens; identical to SEQ ID NO: 345591
  chr19:37569554-37569736
  hyper

SEQ ID NO: 347593 - DNA, 187 bp, Homo sapiens; identical to SEQ ID NO: 336109
  chr19:37708883-37709070
  hyper

SEQ ID NO: 347594 - DNA, 83 bp, Homo sapiens; identical to SEQ ID NO: 345592
  chr19:37957588-37957671
  hyper

SEQ ID NO: 347595 - DNA, 424 bp, Homo sapiens; identical to SEQ ID NO: 205389
  chr19:38145586-38146010
  hyper

SEQ ID NO: 347596 - DNA, 37 bp, Homo sapiens; identical to SEQ ID NO: 345593
  chr19:38182720-38182757
  hyper

SEQ ID NO: 347597 - DNA, 389 bp, Homo sapiens
  chr19:38754883-38755272
  hyper
cgcgtgtctgccgccccctcctcccaccctgaggccagtcctagagcgaaggccctcctccgacgtcgtcaccaagcccaagggaagggtggcaggtgctcagcgggcagacgccccgccccgccccgccaggttctgttgggggcgaggcccgcgcaagccccgcctcttccccggcaccaggggcgggcccaggtgcgcccagggccggggagcggccgcgcaggtgcctgccctttgcgcctgcgcccagctcgccctgcctagccaggtgcgccccgccccctgcctgcccggccaccttcgggagccgcttccaataggcgttcgccattggctctggcgacctccgcgcgttgggaggtgtagcgcggctctgaacgcgctga

SEQ ID NO: 347598 - DNA, 175 bp, Homo sapiens
  chr19:38755344-38755519
  hyper
gggcgtccccacactgaaggtccggaaaggcgacttccgggggctttggcacctggcggaccctcccggagcgtcggcacctgaacgcgaggcgctccattgcgcgtgcgcgttgaggggcttcccgcacctgatcgcgagaccccaacggctggtggcgtcgcctgcgcgtctc

SEQ ID NO: 347599 - DNA, 32 bp, Homo sapiens; identical to SEQ ID NO: 205405
  chr19:39754842-39754874
  hyper

SEQ ID NO: 347600 - DNA, 48 bp, Homo sapiens
  chr19:41105938-41105986
  hyper
cggtgacagcagcttttccgtcctctcccacccaggctccaggaggcc

SEQ ID NO: 347601 - DNA, 86 bp, Homo sapiens
  chr19:41106420-41106506
  hyper
ctgggcaccaaatgctcaagattgtggggcggctgggggccaaaggcctcctcctgtttcccgaatcttccccctgccctcctccc

SEQ ID NO: 347602 - DNA, 69 bp, Homo sapiens; identical to SEQ ID NO: 345594
  chr19:41115811-41115880
  hyper

SEQ ID NO: 347603 - DNA, 359 bp, Homo sapiens; identical to SEQ ID NO: 336145
  chr19:41190162-41190521
  hyper

SEQ ID NO: 347604 - DNA, 269 bp, Homo sapiens; identical to SEQ ID NO: 294061
  chr19:44529438-44529707
  hyper

SEQ ID NO: 347605 - DNA, 48 bp, Homo sapiens
  chr19:44529774-44529822
  hyper
tacgtgtgcagcccctttcagtgtggtgtggagtgtcacttaatgtcc

SEQ ID NO: 347606 - DNA, 68 bp, Homo sapiens; identical to SEQ ID NO: 345595
  chr19:44711963-44712031
  hyper

SEQ ID NO: 347607 - DNA, 555 bp, Homo sapiens; identical to SEQ ID NO: 336165
  chr19:45579321-45579876
  hyper

SEQ ID NO: 347608 - DNA, 802 bp, Homo sapiens
  chr19:45648009-45648811
  hyper
cgcccgggcctggctctcttcccggcttctttcctgacttggcctcctgggtctcctccgccatcacggcctcctcctcaccctcacaccccctccctccagccgcacactcagagcctggagacgctgaacctgggccacaaccccatcgggaacgagggtgtgcggcacctcaagaacgggctcatcagcaaccgcagcgtgctgcgcctcgggctggcctccaccaagctcacgtgcgagggtagggtacggggccgggccagggtgcgggctggtgggctcagccgggcggccagccgggtgtggggcccgtggccagcccctgcggtgcccccccaggcgcggtggcggtggcggagttcatcgctgagagcccccgcctcctgagactggaccttcgggagaacgagatcaagacaggcgggctcatggcactgtcgttggccctcaaggtgaaccactcactgctgcgcctggacctcgaccgtgaacccaagaaagaggcggtgagcaggggacggtcctgcagccctggggcgggcggaaggccgggtggtggggccggcctgagagccctagccaggcgctcccgccacaggtgaagagcttcatcgagacgcagaaggcgctgctggccgagatccagaacggctgcaagcgcaacttggtgctggcgcgggagagggaggagaaggagcagccgccacagctgtcggcctccatgcctgagaccaccgccaccgagccccagcccgacgacgagcccgccgctggggtgcagaacggggcccccagcccc

SEQ ID NO: 347609 - DNA, 200 bp, Homo sapiens; identical to SEQ ID NO: 205477
  chr19:45656461-45656661
  hyper

SEQ ID NO: 347610 - DNA, 56 bp, Homo sapiens
  chr19:46929939-46929995
  hyper
cgttcctcctgggtctgcgtgagttttcttcaactccagtaagagatctgcaaaac

SEQ ID NO: 347611 - DNA, 139 bp, Homo sapiens; identical to SEQ ID NO: 345597
  chr19:46931914-46932053
  hyper

SEQ ID NO: 347612 - DNA, 311 bp, Homo sapiens
  chr19:48901504-48901815
  hyper
cggcgcctgtccctcgctgcatctcctcctctgtgcgtctctttatctcgtctccctgtccctgcgtctcccgtctgtgcctccctctcctccccgtctctcccggcccgggcgctcagaggccgcccggcggggcccgcaggcgatgcgcggcgccggtggcccccgcggccctcggggccccgctaagatgctgctgctgctggcgctggcctgcgccagcccgttcccggaggaggcgccggggccgggcggggccggtgggcccggcggcggcctcggcggggcgcggccgctcaacgtggcgctcg

SEQ ID NO: 347613 - DNA, 93 bp, Homo sapiens; identical to SEQ ID NO: 345598
  chr19:49127280-49127373
  hyper

SEQ ID NO: 347614 - DNA, 484 bp, Homo sapiens; identical to SEQ ID NO: 345599
  chr19:49217005-49217489
  hyper

SEQ ID NO: 347615 - DNA, 43 bp, Homo sapiens; identical to SEQ ID NO: 345600
  chr19:49217526-49217569
  hyper

SEQ ID NO: 347616 - DNA, 550 bp, Homo sapiens; identical to SEQ ID NO: 336209
  chr19:49467064-49467614
  hyper

SEQ ID NO: 347617 - DNA, 218 bp, Homo sapiens
  chr19:50553779-50553997
  hyper
cggctcctggccacgccctaaccccacccccgctgcctctaaacccgtccccacccctgcagcctcacaggctgccgtcagattctcaagcccctattcctctcggtggcctaaatccccaactgctcggggccacttttcaggccaaaatgggcccaaaatggggagggcaagtgatgaatgtcactagacagtggggccctcaaggacctggcaaa

SEQ ID NO: 347618 - DNA, 88 bp, Homo sapiens; identical to SEQ ID NO: 345602
  chr19:50836203-50836291
  hyper

SEQ ID NO: 347619 - DNA, 588 bp, Homo sapiens; identical to SEQ ID NO: 205542
  chr19:50836451-50837039
  hyper

SEQ ID NO: 347620 - DNA, 88 bp, Homo sapiens; identical to SEQ ID NO: 345604
  chr19:50837389-50837477
  hyper

SEQ ID NO: 347621 - DNA, 70 bp, Homo sapiens
  chr19:51161615-51161685
  hyper
cggggcgacagtggagtgacagcttgggggggcggggccaggagggactagataagagcgagattggtgc

SEQ ID NO: 347622 - DNA, 73 bp, Homo sapiens; identical to SEQ ID NO: 345605
  chr19:51228809-51228882
  hyper

SEQ ID NO: 347623 - DNA, 96 bp, Homo sapiens; identical to SEQ ID NO: 345606
  chr19:51416002-51416098
  hyper

SEQ ID NO: 347624 - DNA, 242 bp, Homo sapiens; identical to SEQ ID NO: 345607
  chr19:51416099-51416341
  hyper

SEQ ID NO: 347625 - DNA, 74 bp, Homo sapiens; identical to SEQ ID NO: 205557
  chr19:52531285-52531359
  hyper

SEQ ID NO: 347626 - DNA, 208 bp, Homo sapiens; identical to SEQ ID NO: 345609
  chr19:52531884-52532092
  hyper

SEQ ID NO: 347627 - DNA, 105 bp, Homo sapiens
  chr19:52800214-52800319
  hyper
gctccagtctccttgacaggtctccccggcaaaacccggaaaacagaggcactggaagcgaggcggagggaagcgcaagccccactccgccccgcccccgccccc

SEQ ID NO: 347628 - DNA, 263 bp, Homo sapiens; identical to SEQ ID NO: 345610
  chr19:53104083-53104346
  hyper

SEQ ID NO: 347629 - DNA, 60 bp, Homo sapiens; identical to SEQ ID NO: 205570
  chr19:53141353-53141413
  hyper

SEQ ID NO: 347630 - DNA, 56 bp, Homo sapiens
  chr19:53193139-53193195
  hyper
cgggcacctccccaacgcgggctcaggagaagcggtgactgcggaggagagacctg

SEQ ID NO: 347631 - DNA, 139 bp, Homo sapiens
  chr19:53606073-53606212
  hyper
cgggccccgggcacctccccaacgagggctcaagggaagcggtgactgcgaaggggaggcctggggagcagcagggcccggcacgaggaggagggaggtggggggcgacggcgccttaggacaggggtgggatgtgcag

SEQ ID NO: 347632 - DNA, 221 bp, Homo sapiens; identical to SEQ ID NO: 205580
  chr19:53606354-53606575
  hyper

SEQ ID NO: 347633 - DNA, 427 bp, Homo sapiens; identical to SEQ ID NO: 205581
  chr19:53606605-53607032
  hyper

SEQ ID NO: 347634 - DNA, 111 bp, Homo sapiens
  chr19:53607111-53607222
  hyper
agcacagttgtgtaggttattttggaaaccaaactgctttcctcttagaatggaggcggtttatgttgaaagcattttttgctagcgcgtttacccagtaatgttattgac

SEQ ID NO: 347635 - DNA, 84 bp, Homo sapiens
  chr19:54412564-54412648
  hyper
cggctccgtccgccgagtgaggccgcggccgcggggggtggggggtgggaggccgggagggggccgggacgccgggctccgggg

SEQ ID NO: 347636 - DNA, 182 bp, Homo sapiens
  chr19:55691158-55691340
  hyper
accgcctcggtctccacgctgcctcttgaccccacataggcgtcttccctgtgtctgcctccccaacccgcctgtctctcttccctatcgcctggcctctgtctccagggtctctccctctcccctccgcctgcgccccactccccgccctcggctctttgtcttctccatacctgtctcgc

SEQ ID NO: 347637 - DNA, 132 bp, Homo sapiens; identical to SEQ ID NO: 345612
  chr19:55952964-55953096
  hyper

SEQ ID NO: 347638 - DNA, 139 bp, Homo sapiens
  chr19:57049638-57049777
  hyper
cggactccggaggcccccaagattgcctttcccttcccggtcggcagtgacgctcccgcaaggagctgacgcccaggcccttagcacctgtcacagccaagcacccttttactccggccctgcggtcccacccctcgcc

SEQ ID NO: 347639 - DNA, 34 bp, Homo sapiens; identical to SEQ ID NO: 205611
  chr19:57049807-57049841
  hyper

SEQ ID NO: 347640 - DNA, 70 bp, Homo sapiens; identical to SEQ ID NO: 345613
  chr19:57831543-57831613
  hyper

SEQ ID NO: 347641 - DNA, 460 bp, Homo sapiens; identical to SEQ ID NO: 345614
  chr19:57874412-57874872
  hyper

SEQ ID NO: 347642 - DNA, 217 bp, Homo sapiens; identical to SEQ ID NO: 205623
  chr19:57875005-57875222
  hyper

SEQ ID NO: 347643 - DNA, 43 bp, Homo sapiens; identical to SEQ ID NO: 345616
  chr19:57875252-57875295
  hyper

SEQ ID NO: 347644 - DNA, 169 bp, Homo sapiens; identical to SEQ ID NO: 345617
  chr19:58144201-58144370
  hyper

SEQ ID NO: 347645 - DNA, 209 bp, Homo sapiens; identical to SEQ ID NO: 205633
  chr19:58144745-58144954
  hyper

SEQ ID NO: 347646 - DNA, 627 bp, Homo sapiens; identical to SEQ ID NO: 336321
  chr19:58258088-58258715
  hyper

SEQ ID NO: 347647 - DNA, 130 bp, Homo sapiens; identical to SEQ ID NO: 345620
  chr19:58610001-58610131
  hyper

SEQ ID NO: 347648 - DNA, 120 bp, Homo sapiens
  chr20:2731109-2731229
  hyper
cgagcagtgaacacacgtggagaggcagtgtagaaccccccagcctggctctatttggccgctggccgagtcttctccatttccatcctcccgccccgccccagctgagccacccacttc

SEQ ID NO: 347649 - DNA, 225 bp, Homo sapiens; identical to SEQ ID NO: 205669
  chr20:2731391-2731616
  hyper

SEQ ID NO: 347650 - DNA, 744 bp, Homo sapiens; identical to SEQ ID NO: 345622
  chr20:2731675-2732419
  hyper

SEQ ID NO: 347651 - DNA, 143 bp, Homo sapiens; identical to SEQ ID NO: 294514
  chr20:2820861-2821004
  hyper

SEQ ID NO: 347652 - DNA, 414 bp, Homo sapiens
  chr20:4804008-4804422
  hyper
gttggaaagtgggggcgccgcggctggggggctgcttcagctgcgcctcggccagcgatcggcgggccgggctcaaatccagccaggctgggcaggcggtggccgcgcgactggggaccgggcgccccgccctcctcgctcccctcctccttcctctccctccctccagccccttggcctttttcagcccctaccggatctgctcgtccgctgtcctctcttttctctcgctcttcatatcactctccaccccttcgccttgccttcgcctttcttcctccccttgtctcctgccccctcctcttctcccctcccctctaggggcggagcttctcccctccctcccagacaatgctgtggctgcgtccccttccccgccagctcgtccaggctcccgccgccagcgattcttcc

SEQ ID NO: 347653 - DNA, 1116 bp, Homo sapiens
  chr20:4981401-4982517
  hyper
acactcgaaatgtcattttttccccccgaaaggtggcaaggagggggactcgcgaccccccagggaacaggccagaaaggccccggggtcggaggagctgcttctaaaattacttcgcgcagtctttgtagaagggaagaaagcaagaatgtaaaaggcaccctcttgccgcccctcctgatgcccctgaattccagggggcgagacgatgcccgtgcgcaccaccgggggaggggcgagggaagcgaccccaggacgcgcgggcgcagagcccgggaggaggcggcggcagccagtggggttctgggggcgccccatttgcctccccgctgcgcggcctgagggcccgagcgcgctgtggctcccgtggcgggaaggggtgggtaccccgggggcccggcccggccggcagaacggcaggagctgagggccgccgggcatcttgggccccggggccagggtggccggcgggcgcggggtcccgggagatgggtcggggtgggggcgcgcaggccgcgccgcggggccggtgggtgacagcgcgcgggggccgtgccaggccggcctcgtgggcgcggcgagcacctcgcggccccgccggcaggtgcggcccgcaggccgggcagggggcgcggcggccgggctctcacctggctgcagctcgcgtggttcccgtcctgccgccgcgcctcggcgccgcagtgcccgctgcagcctccgcctccggtccccgcgacagccgcctgcaaaatggcgccgcggaggggcgggccgggggcggggtgcagcggagccgcccgcccccgcgccggtctggggcccacctccctccccgcccccgacccctgccctcgggcctccccccggggaggggctgctccctggcacccggcagcgctccccggaacatcccgggcctcgcacccagccgtccccttcccgttcctttcatttccctcccctgcgcagaaagatcgccccccttcgcgacccttcccaccagtcacacctgttcctggggacccacctggcaagcagagcgctggtccctgagtgtcctggtccaggtcccccctttttaccccgcctgccaccgagccctgtcattgctcgagc

SEQ ID NO: 347654 - DNA, 736 bp, Homo sapiens
  chr20:10415352-10416088
  hyper
cggagtttcgcagctcgtactcttcacagattagataattcacccggcatttccccatcctgcttctgggttccaggacaaaacttttattctcttttaacattaaaaaacatataggaagttatgttcaaacatggctatttttattaaaatttatccggcactgtgaaagctacctttcctttctcacaatctttcgcaccgaatatatgttccattcttgagctagtcattttccaatgttaagaaaacacaccacagaaaagcgtttttttttctctcggtcagttcaactgcctagcaccgtgagttaccatgatacgttatttgctaatgagagtcattggggtcccagcctttaaaaatagcctgcgtccggcgccatttttgttttgggcccactttgaaagccgcgatattctgaacagaggccatttttcttttgggcagattccacgggccatcgaagtgtttcgctgccatcttaaatcctggctgtggcctcaatcctgcagcgaagctgcccagatcattttgtgtttgggcggcggctgagttcccaaacgcgcgcggagaccctgggaaggaggaagtaagcgcgaaagtgcttcccttaagcttctgaaggttggctgcagttccggctacctgtgtagtccgagtttccacagccaggtactactccgccagtgaccctggacagtaacaaaacatataaagcccgagcccaaacccc

SEQ ID NO: 347655 - DNA, 95 bp, Homo sapiens
  chr20:17919868-17919963
  hyper
agcggatggtgcaaggtttccttccaaacggaaatcgcccttcacagagctgagcctgggaattaccacaaagaaacctcacaaagaaaaggtgc

SEQ ID NO: 347656 - DNA, 78 bp, Homo sapiens; identical to SEQ ID NO: 336375
  chr20:19673407-19673485
  hyper

SEQ ID NO: 347657 - DNA, 148 bp, Homo sapiens; identical to SEQ ID NO: 336377
  chr20:20343543-20343691
  hyper

SEQ ID NO: 347658 - DNA, 79 bp, Homo sapiens; identical to SEQ ID NO: 345625
  chr20:20350750-20350829
  hyper

SEQ ID NO: 347659 - DNA, 205 bp, Homo sapiens; identical to SEQ ID NO: 345626
  chr20:21080357-21080562
  hyper

SEQ ID NO: 347660 - DNA, 184 bp, Homo sapiens; identical to SEQ ID NO: 294634
  chr20:21086682-21086866
  hyper

SEQ ID NO: 347661 - DNA, 923 bp, Homo sapiens
  chr20:22564324-22565247
  hyper
cggagtgcgggggcggctggaggcactgaacggggcaatagggaaagaaccgagacctgaaccacacgcggctgagctttgcaggcaaaaactttctttctctttgtccactagtctttgactctgcctccacttcagcccccaactcctacccatcttctcctcctcagctccccaccccctcgccggccgacctcccacccctccccagccgcgcgctgccaaacataactctgttaggatagtgcgtggctcggccacgaagaggatttggaggcgccgcaagtcaatatttgatcacaaagttaatattatctcaaggctaacagtgtgtcgtataaaaaagagacccatttgattccaaggagggcggaaaaggcggctgcccagaaaggctggggttgtggggcggggtgggggggtgccagcgagggaagcggtcctgaggttggggaaggagcgagcgccgccgctccacttccccctggaaaagacgagcgcttacctcgggctctgcatagtagctgctccagtcggacggctcgtgcccttccatcttcaccgctcccagcatactggaagccgagtgcatggcagtttaaaatttaacagccacaacaaacgaccagcaatcaccccccacccccaccctcttttaaaaaaaagtcagccaaagcaccgtcccctcctccctccctctctcgcgctccctctccctgggctccactccctctctctccctgggcaggccggaggcggtagttggaagtgggcgggaggtgggggggggcgaggagcggaggaggcccaggccagcgccccgcggtagggagcacccgccgccgccgcgctcacgggctgccgggtggcggctgaggttggcagtgccgagctgccccgaggcggcgggaagcgcgcggcgc

SEQ ID NO: 347662 - DNA, 1002 bp, Homo sapiens; identical to SEQ ID NO: 345628
  chr20:30192854-30193856
  hyper

SEQ ID NO: 347663 - DNA, 189 bp, Homo sapiens; identical to SEQ ID NO: 345629
  chr20:30193992-30194181
  hyper

SEQ ID NO: 347664 - DNA, 262 bp, Homo sapiens; identical to SEQ ID NO: 336415
  chr20:30196349-30196611
  hyper

SEQ ID NO: 347665 - DNA, 61 bp, Homo sapiens
  chr20:30639044-30639105
  hyper
cgactcctcccctcccccgaccacctcccccagcttgggagtcctctgagctgccaggaag

SEQ ID NO: 347666 - DNA, 138 bp, Homo sapiens; identical to SEQ ID NO: 294696
  chr20:30639494-30639632
  hyper

SEQ ID NO: 347667 - DNA, 109 bp, Homo sapiens; identical to SEQ ID NO: 345631
  chr20:32899337-32899446
  hyper

SEQ ID NO: 347668 - DNA, 339 bp, Homo sapiens; identical to SEQ ID NO: 294726
  chr20:32899515-32899854
  hyper

SEQ ID NO: 347669 - DNA, 59 bp, Homo sapiens; identical to SEQ ID NO: 205789
  chr20:34190072-34190131
  hyper

SEQ ID NO: 347670 - DNA, 141 bp, Homo sapiens
  chr20:35201323-35201464
  hyper
cgaggatgagacgggatgacacacacgaagtgccccgcacagcgtcgttgtaaagcgttggctgttttcacctctggccgccccctgtgagcccgatcatgtgctttttgggcttaggtcggaggcggcctcccagattct

SEQ ID NO: 347671 - DNA, 37 bp, Homo sapiens; identical to SEQ ID NO: 205795
  chr20:35201548-35201585
  hyper

SEQ ID NO: 347672 - DNA, 120 bp, Homo sapiens
  chr20:35201647-35201767
  hyper
cggtaacgacccccaccccggcaaggagcacagtaggcgctccggaaacgccctccacgaggagggccgggccacttcctgcccccgagcgggctctccccggcggaggctcccaccgcc

SEQ ID NO: 347673 - DNA, 62 bp, Homo sapiens; identical to SEQ ID NO: 345634
  chr20:37274639-37274701
  hyper

SEQ ID NO: 347674 - DNA, 546 bp, Homo sapiens; identical to SEQ ID NO: 205802
  chr20:37274731-37275277
  hyper

SEQ ID NO: 347675 - DNA, 37 bp, Homo sapiens
  chr20:37358242-37358279
  hyper
ccaggtcgaggtttgttcgaatctctcccctgggggc

SEQ ID NO: 347676 - DNA, 389 bp, Homo sapiens; identical to SEQ ID NO: 345636
  chr20:37433723-37434112
  hyper

SEQ ID NO: 347677 - DNA, 215 bp, Homo sapiens
  chr20:43976984-43977199
  hyper
cgaagaacagcagcagcgcgaacagacgggcgggggccatggcaccgcggactggagaaggcgcgcaggctgcggcgagtggccccgggcgggcgcgccacccatcttataggcggcctaccggccccgccccggcccgcccccgccccgccgcccgcaccccgcccggaattccccagtggaagcgaggcctgcggggcactgcgcccgcccgc

SEQ ID NO: 347678 - DNA, 71 bp, Homo sapiens; identical to SEQ ID NO: 345637
  chr20:44453063-44453134
  hyper

SEQ ID NO: 347679 - DNA, 32 bp, Homo sapiens; identical to SEQ ID NO: 345638
  chr20:44879699-44879731
  hyper

SEQ ID NO: 347680 - DNA, 982 bp, Homo sapiens; identical to SEQ ID NO: 336464
  chr20:48598700-48599682
  hyper

SEQ ID NO: 347681 - DNA, 164 bp, Homo sapiens; identical to SEQ ID NO: 345639
  chr20:48771177-48771341
  hyper

SEQ ID NO: 347682 - DNA, 581 bp, Homo sapiens
  chr20:49224897-49225478
  hyper
cgctctccccaggctggacgggactcacttccactgcacctccagctgcagcttgatggtacccaactccgtgatgtccaccacgatgacctgcggccgcgtcgtgaagaagtcggcgatgtcacacgtcactgcacccacagccagcgagcccaggccccgcaactccgtcacctgggggtgggggctggagggtggtgtctgagccgaacacccaggcaccccagccctgcccccgggccccatccccaccttgatgtccaggttctcatgcagcgtggggatgaaggccttctcctcttcgtcccaggtctggctgtcatctgactcgatccgacccttgagcttccaacgctggcggcccagacgcatgagcacctgtgaaccagcccgagaggggccgcgtcagcccaggtgggtgtccccttgctgtccgcccagggccctccctgccaggcagagccccagctgcaaccctggttcccagcagctcccgtcccccaaagacctggcggggagccctgaggattgaccccagagagtggccgtacctcatagtggtctccgggacagaggcgtgc

SEQ ID NO: 347683 - DNA, 952 bp, Homo sapiens; identical to SEQ ID NO: 336473
  chr20:50158723-50159675
  hyper

SEQ ID NO: 347684 - DNA, 570 bp, Homo sapiens; identical to SEQ ID NO: 345641
  chr20:50383675-50384245
  hyper

SEQ ID NO: 347685 - DNA, 85 bp, Homo sapiens; identical to SEQ ID NO: 345642
  chr20:50384400-50384485
  hyper

SEQ ID NO: 347686 - DNA, 148 bp, Homo sapiens
  chr20:50384501-50384649
  hyper
cggaacaataaaacggtgagaaagcacggctgatccgaattccgcgagtgtgtaaacagcactggggcgggcccggcttctcggggtttctaaaggaaggtgggcaaggaggcccaggcaaccgggcgctcgaaccccaaagggccgg

SEQ ID NO: 347687 - DNA, 243 bp, Homo sapiens; identical to SEQ ID NO: 205849
  chr20:50384928-50385171
  hyper

SEQ ID NO: 347688 - DNA, 87 bp, Homo sapiens
  chr20:50385230-50385317
  hyper
gcccccggcccgcgcccgcgccccccacgcgcgcccacccggccacgcgccccccgcccacgcccgccgtgcgcgcaccctgccacc

SEQ ID NO: 347689 - DNA, 113 bp, Homo sapiens; identical to SEQ ID NO: 345643
  chr20:57225466-57225579
  hyper

SEQ ID NO: 347690 - DNA, 233 bp, Homo sapiens
  chr20:57978841-57979074
  hyper
gctgcacccccactctggcgcagcgaagtctgcagatctctgggccccggcgctgccgaagcctcccccacgcgccgcgctcactcgctgcacaacagcgccaccacgaggccgcgggcggaactgccggcagcacagcggtcgcaccccccgggccccccgccggctgtgcggatcccgaatccctgcttggctcggagctgccaggtctaagccgaccctcagagacgcac

SEQ ID NO: 347691 - DNA, 115 bp, Homo sapiens; identical to SEQ ID NO: 345644
  chr20:58514400-58514515
  hyper

SEQ ID NO: 347692 - DNA, 33 bp, Homo sapiens; identical to SEQ ID NO: 336506
  chr20:60639846-60639879
  hyper

SEQ ID NO: 347693 - DNA, 84 bp, Homo sapiens
  chr20:61664570-61664654
  hyper
gcaggaacaagatgcacatcgtgcaggagccgcagagcacgcgtgcagaggtttcggtggctttgccccgcagctaacgtgtgc

SEQ ID NO: 347694 - DNA, 390 bp, Homo sapiens
  chr20:62273399-62273789
  hyper
cgccccggccccgccccggcccctgcccgctccgagctccgccccggccccgcccccgcaccttctcgcgcagccgctcgcgcagtgcggccaggtgtgcctcgcggatctccttgctgagctccatcttgtagttgagcttctcctccgcctggcggctgaagttgttattctcctccagcgccttgtgcagcacctcgcgctcgtgctcgcgccgctccgccagctgcttcagcacctgcgcctcctgcgtctgtgcggggccggcgggcgcgcgtgagcggcaaccccgggccctgcccggccggactcctccctgctctccgcctcccgcccagcgcccgctcgcctcacctggcgcctccacctgcccaggcctcggtgggcgcc

SEQ ID NO: 347695 - DNA, 290 bp, Homo sapiens
  chr20:62368779-62369069
  hyper
cgggagacgcaggagccccgcagccgcgggaggtgcagatttggggctgccaggtggcgccaggtccccttggccagcccccagcgcccctttcttctgtccccagggcctcggcttcacaggatggggctgccagtgtcctgggcccctcctgccctctgggttctagggtgctgcgccctgctcctctcgctgtgggcgctgtgcacagcctgccgcaggtaggtccctcagccgcgttctgtctggggcctcgctgcggctgccattcacagcccagcgcgggaagg

SEQ ID NO: 347696 - DNA, 345 bp, Homo sapiens; identical to SEQ ID NO: 345646
  chr20:62495236-62495581
  hyper

SEQ ID NO: 347697 - DNA, 122 bp, Homo sapiens; identical to SEQ ID NO: 205931
  chr21:27011487-27011609
  hyper

SEQ ID NO: 347698 - DNA, 133 bp, Homo sapiens; identical to SEQ ID NO: 205932
  chr21:27011639-27011772
  hyper

SEQ ID NO: 347699 - DNA, 153 bp, Homo sapiens; identical to SEQ ID NO: 345649
  chr21:27012725-27012878
  hyper

SEQ ID NO: 347700 - DNA, 466 bp, Homo sapiens
  chr21:30374936-30375402
  hyper
cgccccaaagcagcatctggctggcctgcgagatgcccactggggaggcgagtccgcagcttaggactcaagcccggggtcggaagctattgccgaaatccgaaacgcagcgctcgcagctgcagtgacgcgacctgctcataagtccccgtgctcacagcatcccggcaacttacgagctagtgcttccgggtcaccccggcccaggaaggcgcacgcgcgaagcatagcgagcttcactccgcactcttaggctgcgtgtgaggcctgcgagtgctcgggagctgccgcggtcacaagagaaagcctagctgtcaatgacagccccagagcatctgggcgccttgcgatacccgggtgtctgtaggcagccaggagacacttccaagctgatctggaatctttcctcgcccagctctgtccctcgcagggatggcaaaggacattacgacctacatcccttccc

SEQ ID NO: 347701 - DNA, 237 bp, Homo sapiens; identical to SEQ ID NO: 336554
  chr21:37757666-37757903
  hyper

SEQ ID NO: 347702 - DNA, 293 bp, Homo sapiens; identical to SEQ ID NO: 336563
  chr21:38382182-38382475
  hyper

SEQ ID NO: 347703 - DNA, 140 bp, Homo sapiens
  chr21:38936049-38936189
  hyper
cgggggccgcgagccgccggcgtaggccgctccagctggaagaccccaccgctagggttccagggggctgcggacgcttccgaggggcccaaggcgaaagaacgcagcccgcttgtcggccacgtgaccgtccccgtccg

SEQ ID NO: 347704 - DNA, 144 bp, Homo sapiens
  chr21:38936266-38936410
  hyper
ccccgggcttcggggggcggtgctgctgcggttgccatggcgtcttccgagcgcgcaggcgtgggcccagagtagcttttcgggtatttgctaccggctctcggtagggctggtcacctttgcttgctgagcttcgcgccctgc

SEQ ID NO: 347705 - DNA, 44 bp, Homo sapiens
  chr21:39047626-39047670
  hyper
cggggatttttccgcgagtggctgcattggctttaagaaactgc

SEQ ID NO: 347706 - DNA, 91 bp, Homo sapiens
  chr21:43186607-43186698
  hyper
cgggcgggccggacgcgcctcccaagggcgcgggtccgaggcgcaaggcgagctggagaccccgaaaaccagggccactcggggagtgtca

SEQ ID NO: 347707 - DNA, 493 bp, Homo sapiens
  chr21:43186889-43187382
  hyper
ttggtttcccccccgaagctgctccgggggtgagttcgggagagagaggcaggaccccgggaccagagcaccccgaccccgaccccagcccgggccccagccgccccagcgccccgcccgggccgctcacctgtcgtcgacgtgcaggctgggcgagcacttgatggccagccaggtcttccagtggacatggcgcaccttgtacacctgcccgaagccgcccgagcccaccttctcccagcccgtgaactcgcccgcgtcgaaggtgcgcagcagcgccagggcccatggggtcccgccgtcgccctccatcgcgcacgtctagccagcgccgcggcggctgcccaggtgcccaggtgcgcgctccgccctgttacgtcacttccgtaggtcgtcccgcccccaggccccgcccacttacccgccccccgggcgccctctctgccagcgcccggtgactgcggacggatgaatagacgctgcgggtcactgc

SEQ ID NO: 347708 - DNA, 603 bp, Homo sapiens; identical to SEQ ID NO: 336575
  chr21:43188777-43189380
  hyper

SEQ ID NO: 347709 - DNA, 142 bp, Homo sapiens; identical to SEQ ID NO: 345651
  chr21:47063290-47063432
  hyper

SEQ ID NO: 347710 - DNA, 166 bp, Homo sapiens; identical to SEQ ID NO: 345652
  chr22:22006759-22006925
  hyper

SEQ ID NO: 347711 - DNA, 136 bp, Homo sapiens; identical to SEQ ID NO: 345653
  chr22:22862472-22862608
  hyper

SEQ ID NO: 347712 - DNA, 187 bp, Homo sapiens; identical to SEQ ID NO: 295268
  chr22:24552924-24553111
  hyper

SEQ ID NO: 347713 - DNA, 240 bp, Homo sapiens; identical to SEQ ID NO: 345654
  chr22:25348202-25348442
  hyper

SEQ ID NO: 347714 - DNA, 787 bp, Homo sapiens; identical to SEQ ID NO: 206075
  chr22:25348485-25349272
  hyper

SEQ ID NO: 347715 - DNA, 125 bp, Homo sapiens; identical to SEQ ID NO: 345656
  chr22:25349348-25349473
  hyper

SEQ ID NO: 347716 - DNA, 123 bp, Homo sapiens
  chr22:28838056-28838179
  hyper
cgttatttctgggaccaatagcaatttattttgatagaaccgctggatttttttttttcttgagttctcaacaaaggagccatattaggaaataatctcgcaaaaagcaaagtgccccctccc

SEQ ID NO: 347717 - DNA, 60 bp, Homo sapiens; identical to SEQ ID NO: 206092
  chr22:28838449-28838509
  hyper

SEQ ID NO: 347718 - DNA, 243 bp, Homo sapiens; identical to SEQ ID NO: 206093
  chr22:28838551-28838794
  hyper

SEQ ID NO: 347719 - DNA, 278 bp, Homo sapiens; identical to SEQ ID NO: 295309
  chr22:28838844-28839122
  hyper

SEQ ID NO: 347720 - DNA, 129 bp, Homo sapiens
  chr22:28839263-28839392
  hyper
aatcccagccgggcttctaccatccaaaccccttttggcgaattctcctcttctcaaaaaagattagacaagcaatcaaaccctcacgcgcagcctggagcaattcccacaattctgggtgtatttctc

SEQ ID NO: 347721 - DNA, 63 bp, Homo sapiens; identical to SEQ ID NO: 295312
  chr22:29075343-29075406
  hyper

SEQ ID NO: 347722 - DNA, 170 bp, Homo sapiens
  chr22:29550509-29550679
  hyper
cgcccgcccagctcccgctgcggcagagcccccagccgccgcctcctgccgccctcgcctttcctgcaggagccgtcccagcgcaggcttgctcaccagcgccgccccgtggtaagactgcagatctgcggaagaaggccagccctgaaccgcaactgctctcaagccct

SEQ ID NO: 347723 - DNA, 148 bp, Homo sapiens; identical to SEQ ID NO: 345657
  chr22:39852943-39853091
  hyper

SEQ ID NO: 347724 - DNA, 225 bp, Homo sapiens; identical to SEQ ID NO: 295455
  chr22:39853157-39853382
  hyper

SEQ ID NO: 347725 - DNA, 31 bp, Homo sapiens; identical to SEQ ID NO: 295456
  chr22:39853626-39853657
  hyper

SEQ ID NO: 347726 - DNA, 209 bp, Homo sapiens; identical to SEQ ID NO: 295457
  chr22:39853690-39853899
  hyper

SEQ ID NO: 347727 - DNA, 130 bp, Homo sapiens; identical to SEQ ID NO: 345661
  chr22:39853934-39854064
  hyper

SEQ ID NO: 347728 - DNA, 332 bp, Homo sapiens; identical to SEQ ID NO: 336651
  chr22:41418641-41418973
  hyper

SEQ ID NO: 347729 - DNA, 553 bp, Homo sapiens; identical to SEQ ID NO: 345662
  chr22:45097777-45098330
  hyper

SEQ ID NO: 347730 - DNA, 470 bp, Homo sapiens; identical to SEQ ID NO: 206166
  chr22:45098381-45098851
  hyper

SEQ ID NO: 347731 - DNA, 97 bp, Homo sapiens; identical to SEQ ID NO: 345664
  chr22:45098900-45098997
  hyper

SEQ ID NO: 347732 - DNA, 236 bp, Homo sapiens; identical to SEQ ID NO: 206176
  chr22:46367124-46367360
  hyper

SEQ ID NO: 347733 - DNA, 120 bp, Homo sapiens; identical to SEQ ID NO: 295551
  chr22:46367867-46367987
  hyper

SEQ ID NO: 347734 - DNA, 221 bp, Homo sapiens; identical to SEQ ID NO: 345667
  chr22:47199299-47199520
  hyper

SEQ ID NO: 347735 - DNA, 166 bp, Homo sapiens
  chr22:50982557-50982723
  hyper
cggcctcccacctcgaggcgatccgacacctcggcccaggtcgcacttttttgcccgttttgatcccatcctccaactgcggccacagccggaaatgtagagaaattcgcgctcctggggccggcggggctggcgctggctcacccgctccccgggccctcccagt

SEQ ID NO: 347736 - DNA, 295 bp, Homo sapiens
  chrX:9433131-9433426
  hyper
cgtgccagtccctcccgctgtcccgccctctcccgctgccgccgccgccgccgccgcgcccgcctcagcgcccccactccgcgcttgggagcgaggagccgccagcgcccccgccccgccgccgccgcagcgccctcaggccgccattcgccaccgaaactttccagcgcccgcgctctctccgggactcggcggcggcggggcgggggcggcccgggggcggcgcgcggctgctccggggcgccgggccctcttcggccgccgcacggccgggactcggaggctgccggctgga

SEQ ID NO: 347737 - DNA, 241 bp, Homo sapiens; identical to SEQ ID NO: 206206
  chrX:9433471-9433712
  hyper

SEQ ID NO: 347738 - DNA, 284 bp, Homo sapiens
  chrX:9433838-9434122
  hyper
tgccgattcaggggcttgctgggcaaacctgcgccaccgcgggctccggggaccggggtggagggcggtggcgggatttccccgctgttggggagaagagccccattcatacccgggacgcgggccggccctcccggacccgggtggaagcgcagcctcgcggagtggggcaagcggcgggcgaggtggcgcgggccccgtgtctgctcagtttctgacgcgcagaaactgtcaaggaagtcgggagccccagtcctccgcccatctccccggcctgagcgcac

SEQ ID NO: 347739 - DNA, 562 bp, Homo sapiens
  chrX:13707434-13707996
  hyper
accgggcggagtgcgcgggtgtcggggtctgagggggcggctcgggcctcgggcagctggggcggggtgcggtgcgcgcggggctagcgcgggtcacaaggccgccccgggagagaggacggctggttgtctccctgcctcctctctgacgcaggaggaaagacggtccccacacccttggggagagggactcacagaaacacacacaaacactggagaaagggagatacaaaagcccggacacccgtgcacatacacacggagaaatacacccggtcacctgggaacacacgtacacgccagcctttcccccaaccactccgggacacacatccacagaccccaaaccaaatcctacacccgaatgattaatgtagggaaaacaaaggcgctcccatgacttgattttggcgacctctgaagttccacctagcagaacgtgtttgctcgatgtcttacgaccactcgggtgaggaattcggaaagtaaagccaatcttagaggctgcaggcgttttgggggcattatctgattcagacgctggctaacgtttcacaatcgc

SEQ ID NO: 347740 - DNA, 131 bp, Homo sapiens
  chrX:15511311-15511442
  hyper
cgctgcggtagcggcacctggagccttagcggcgggggtgacgcgaagagccgccgggagcgagtgcagggagggcaggttaagagagtgtgggtccagtagcctcaccgtgactcagcgcttcgcggccg

SEQ ID NO: 347741 - DNA, 140 bp, Homo sapiens
  chrX:15511544-15511684
  hyper
ccaggccagcttggcggccctttggcctccctgcctctcgtgccgggaagagatgctcactcgggtaatttaggcggcacttgctgtgctccaggaggaaatgtgtggcccgggcaggtgctctgatcggcgctccggtc

SEQ ID NO: 347742 - DNA, 224 bp, Homo sapiens; identical to SEQ ID NO: 206224
  chrX:16730628-16730852
  hyper

SEQ ID NO: 347743 - DNA, 35 bp, Homo sapiens; identical to SEQ ID NO: 345669
  chrX:16730902-16730937
  hyper

SEQ ID NO: 347744 - DNA, 633 bp, Homo sapiens
  chrX:39963967-39964600
  hyper
cgcggacggattgtccctggggagctgaaaccgcccagcggggaaacccctcctctcgcccttccccgaaaagcttggccgcggtctaagctccgagcaagcgggtatccgctgacagccgggcctcacgtaaggcccacacgcgtcccattagtcagcccgagttcccctcgggcgagccgcctggcgcggccccaaggccgggctcaggcggggagagggtgcggggccgcagcgagctgcgggcggaggtgcgggctccgcggagcccggccaggctcggttccgcgttcctgggcccgcgggtaagctgagtcggcggggcaggccgctccctggctggcgccggggcgccaagctgcgcttcacgtgcccgccatatcagcagcagcggcggcggcggcgaggagggggtgctgggaggcgcgcggccgttcccgcggggtctccggaccccgcctccccgcccctccccgtgggggctgggccgagaccaccctgcggcccccatcccagcgcaagccgaaagcggcgctgccagacgcagagaggctcctggggcgccgttccgagagccgcgcggcggcagcagccaggggagggtgctcctcgcggccgccccgccgccgccgc

SEQ ID NO: 347745 - DNA, 285 bp, Homo sapiens
  chrX:39964630-39964915
  hyper
cgccccgagcggcctccgctggccccagggctgttccagacgagggctggccgcgcgtcacccctgatccctcctcgccccaggcgaccacccgggccctgcggtatcccggtgtaagccgagaggacccttcctgcggtccgatgagatgtccctgtccctctgctaccaccataagcacgcccccccgcaccgctcgcagctccgcagctgggaccggaggggcgcggagccgccactccggccgggcaggaacacctgctcccaggccctgcagctgggcgc

SEQ ID NO: 347746 - DNA, 1317 bp, Homo sapiens
  chrX:39965255-39966572
  hyper
cgggagtaggtcatggcggcaccggtactccacccgcccccctccacgtagggacgtagggtcggctgcggggctcggactttgccactccacctagggaagggccaatggacgctccccgtctcctccgtgtccggaggagatccggcggcggagctgacctgcaaggcttgccctgcctcacccaccccccacctccgtcccaccctccccgactctcctggcccagggcccggcccgggaaggcgttgttttgccagcgggagccgagcgagtgcacagagaaaagcctccctactctaatgagagtgcacacagcgctgcagcgaggaggatgattacccggcgggcggggggcgcgggctcgggccgcgggcggcgtgtgcggcggccccgcgggcccggagtccccgcctgtctggctgctaatcgcacgctttctgctgttacggaggcaggcgggagccggcggccgagcccagcgccgacgactcggcgggtgacacggaaacatggcgcagcgcccctcccccgcccgcgctcccgcctcccgccctccccgcgctcccgcctcccgcctcgcacttcctcccgcccgcgcggcttttgcagttttaatgctctgctttcggcctggcaccattacgctagcagccgcttctccgcggccccgcgcgtctctttcccctttgttttcggggtctatagaaaacgtttgcttttgtcccgagctctcgttaaaccaaacttgtggtggcaacggaaggcggtgcaggcggggaggggtccggggattttggcagtagccggccagagcgtggtggaaacttctctcgctgggttctccgctccctcccactccccctccccaacacagagccgccggcctcccgacgcttctcccttcgcccccgagaggccccagtgctccaggaaggtctgggccacagagactgtgaccaggggtgaagaactcagagtgcgtgtctgtgagccccgaggttttggcactcgatgaccttgctccctgcagccccgacttacctctttccctttggtcattcggggctttgtatcagtcggtgaagaaggggagggaagagaaagtgtttctttcgtgcgtgtggtttttattttaaggatttgttggaatctgtcacccccaactgcacagccccctcccgtataggatctagggcgaaagcggggaaacgtcggatttagggggaaagggtcgggtcagaaacctagccctggaggctggatcgtactctcctggcgggctcagccacacttggtcggcacgcggggcggggc

SEQ ID NO: 347747 - DNA, 621 bp, Homo sapiens; identical to SEQ ID NO: 345670
  chrX:39968299-39968920
  hyper

SEQ ID NO: 347748 - DNA, 247 bp, Homo sapiens; identical to SEQ ID NO: 345671
  chrX:39968950-39969197
  hyper

SEQ ID NO: 347749 - DNA, 990 bp, Homo sapiens
  chrX:40013475-40014465
  hyper
cgcctggcctgcccgcccctccccctcctcgccccctcccctccccaggaaccgggaagagaaaggtctgcagctgacaaatattatccattctccccatcgatcgcggagtgtacagatgtgagcgcttgatgtgcccgcggagcggcggatcctccctgctcgctcgctctcgcccaggctccgctcgccgtccccctcctccccctttgttctcctcccctttccctctctttaaatagatttcagggcgctgcctgttggagagcagctggcgatctctcccgagagagggagcgagcgaagcccgaggtgccctgtcaccagcctcccctcccccacctcggcttttctctacgtcccccccaccccacctttctccagtttccaaaatagaaaacaccgggaacacccacgtccactgcaccgcgagcccctgggagcctttggacccctcgtgctgttccttgtgtctgtgtctgtgcagaggaagggcagtgcagggaggggacccagggccgcggcagaagagccaagggtccggatctttccctggcagcagcagggacgcagcgtgggtcacgctaacagggtacagtttacccattagggaaagtcggcggagacggccctgttattcctcttttgcagatggcagattaatccggcagcacccggcctcaaagggaccggctgctcggcaaagggttaacccgtcggccggtaatcgtggacacgcgcgcacacacacacacgcacgcgcgcgcgcgtcctctccgcctgcccgagcgcccgccgcggcccgcagtgcgcccggggctgggggagtagctgcgggaggggagggggtcgggggaggggcggggcgggcttaaccaggccgctcgactgagccggggccacctcgccgtctgtcacttaaatgattgtcctccgctccgctcagtgcggtcagtacgggctgttaacaggcagttgcaatcagtttcc

SEQ ID NO: 347750 - DNA, 59 bp, Homo sapiens
  chrX:40035665-40035724
  hyper
cgcccctgggacgcaggcggggatggcggttccggtcgttccgggatttgcgtgcaaga

SEQ ID NO: 347751 - DNA, 721 bp, Homo sapiens
  chrX:40035852-40036573
  hyper
cgattcctcgtccggcccgtgccgcaccacgcggagctccgcgcgccctggctcccacaccggtccctccataactcgcgctcctccctcgctccgggctcggggagccgctcgctcccagcgcccagagtcagccggttccaccttcggctgcgagagccgccgccccgcgccacccccgcccggcccggcccttgtcccagcccggctcccccgccagctgcgccgccaccgccgcacgtgacccgcccccgtcgcggcttccgctgagctgcctgttccggggcacaaacaatttttgctctgacgcggggtctctcgggggccctggcgtcctctactccctgctccccaccccaccccaccccctaccttccgggtaggagaactcaaaacaactcgctgaccttcgggccgaccagctccgtcttccactgactccagcattccgttcaaacccagcagccacggcttctaagatttcactccgctctgggctgggggggagggggcgagttctccgggagggggtgtctcagatcgaaagagccacttcacgctctttctcctcctccgaggtgagtttttagactatttggaggccttggggaaacgcgagcagccgcgtgcaaaggagcccccccgccttctccccgcacatgcagccttgtctagtgtgacccgatttccagggtcagcagcagagggcctggccagcttc

SEQ ID NO: 347752 - DNA, 203 bp, Homo sapiens; identical to SEQ ID NO: 336721
  chrX:40595088-40595291
  hyper

SEQ ID NO: 347753 - DNA, 264 bp, Homo sapiens; identical to SEQ ID NO: 336722
  chrX:41112874-41113138
  hyper

SEQ ID NO: 347754 - DNA, 89 bp, Homo sapiens; identical to SEQ ID NO: 345674
  chrY:2655227-2655316
  hyper

SEQ ID NO: 347755 - DNA, 596 bp, Homo sapiens; identical to SEQ ID NO: 345675
  chrY:2655346-2655942
  hyper

SEQ ID NO: 347756 - DNA, 51 bp, Homo sapiens
  chrY:4869596-4869647
  hyper
cgcgtagcgataaaacggctcttttttttttcgaggaaagtaatgtacctt

SEQ ID NO: 347757 - DNA, 49 bp, Homo sapiens
  chrY:4869714-4869763
  hyper
gactttagaagagcggagcggcagtccgcccgggttgcggctgggactc

SEQ ID NO: 347758 - DNA, 246 bp, Homo sapiens; identical to SEQ ID NO: 345676
  chrY:7140850-7141096
  hyper

SEQ ID NO: 347759 - DNA, 240 bp, Homo sapiens
  chrY:14533316-14533556
  hyper
cgatcccctgcaccccgctgcagcccccgcacctcttccggcgccctggctgcctctgcccaaagccggcgctgggggcccggagggcagcgattggcctctgtcctgaagcccggccccgcctccgcccagccctggtaggcgcgggtcagctcctcagccctgcagcccctgcccgcaagcccgcgcgcctcctggtgtccagccccagctaccaaggagagagacccaggaaccgcc

SEQ ID NO: 347760 - DNA, 41 bp, Homo sapiens
  chrY:14533613-14533654
  hyper
ttggcggtttctaggtttggacatttaacctttaattggcc

SEQ ID NO: 347761 - DNA, 461 bp, Homo sapiens; identical to SEQ ID NO: 345677
  chrY:15863654-15864115
  hyper

SEQ ID NO: 347762 - DNA, 73 bp, Homo sapiens; identical to SEQ ID NO: 295805
  chrY:16635744-16635817
  hyper

SEQ ID NO: 347763 - DNA, 1082 bp, Homo sapiens; identical to SEQ ID NO: 345679
  chrY:16636060-16637142
  hyper

SEQ ID NO: 347764 - DNA, 111 bp, Homo sapiens; identical to SEQ ID NO: 336746
  JH636052.4:789300-789411
  hyper

SEQ ID NO: 347765 - DNA, 75 bp, Homo sapiens; identical to SEQ ID NO: 345681
  chr1:1168275-1168350
  hypo

SEQ ID NO: 347766 - DNA, 462 bp, Homo sapiens; identical to SEQ ID NO: 345682
  chr1:1168984-1169446
  hypo

SEQ ID NO: 347767 - DNA, 575 bp, Homo sapiens; identical to SEQ ID NO: 345683
  chr1:1562211-1562786
  hypo

SEQ ID NO: 347768 - DNA, 431 bp, Homo sapiens; identical to SEQ ID NO: 344930
  chr1:1713574-1714005
  hypo

SEQ ID NO: 347769 - DNA, 232 bp, Homo sapiens; identical to SEQ ID NO: 344931
  chr1:1714067-1714299
  hypo

SEQ ID NO: 347770 - DNA, 80 bp, Homo sapiens; identical to SEQ ID NO: 336777
  chr1:1717283-1717363
  hypo

SEQ ID NO: 347771 - DNA, 47 bp, Homo sapiens; identical to SEQ ID NO: 345686
  chr1:2331316-2331363
  hypo

SEQ ID NO: 347772 - DNA, 183 bp, Homo sapiens; identical to SEQ ID NO: 345687
  chr1:2331437-2331620
  hypo

SEQ ID NO: 347773 - DNA, 443 bp, Homo sapiens; identical to SEQ ID NO: 344934
  chr1:2461988-2462431
  hypo

SEQ ID NO: 347774 - DNA, 303 bp, Homo sapiens; identical to SEQ ID NO: 345689
  chr1:3052594-3052897
  hypo

SEQ ID NO: 347775 - DNA, 40 bp, Homo sapiens; identical to SEQ ID NO: 345690
  chr1:3052927-3052967
  hypo

SEQ ID NO: 347776 - DNA, 119 bp, Homo sapiens
  chr1:3111118-3111237
  hypo
cggcaactggccactgtctccccaccacacgccaccgtctccccaccacacgccaccgtctccccaccacacgccaccgtctccccgccacacgccaccgtctccccgccacatgccac

SEQ ID NO: 347777 - DNA, 326 bp, Homo sapiens
  chr1:3111463-3111789
  hypo
gcctggctctgggcacctctgctgctccactctgcgtggagagttctgcgtgaggccaggaagctttgccgcgcttccccactcaggagcttctggatgtttctatggaggcctcacgtctaaaaccgtgagcgcaccggccagtggatgctctgaggagtgttcccgtggagccagcaccgggcagctcggcgaggcacacagcgtcgggatttggagagagacggggccctgtgggatggtgcggagcctgaggccaccgtggggacagggatgcagagaaacccatgggcctcggcgttgctccgggagaagccggcagtgcc

SEQ ID NO: 347778 - DNA, 178 bp, Homo sapiens; identical to SEQ ID NO: 346305
  chr1:3663338-3663516
  hypo

SEQ ID NO: 347779 - DNA, 101 bp, Homo sapiens; identical to SEQ ID NO: 346306
  chr1:3663983-3664084
  hypo

SEQ ID NO: 347780 - DNA, 125 bp, Homo sapiens; identical to SEQ ID NO: 336862
  chr1:3697578-3697703
  hypo

SEQ ID NO: 347781 - DNA, 339 bp, Homo sapiens; identical to SEQ ID NO: 336867
  chr1:4673912-4674251
  hypo

SEQ ID NO: 347782 - DNA, 67 bp, Homo sapiens
  chr1:6171947-6172014
  hypo
gaaacaagccaaggtgagcagggtgagaagtgccccagctctcacgcacaggcaggcttggagagcc

SEQ ID NO: 347783 - DNA, 35 bp, Homo sapiens; identical to SEQ ID NO: 336888
  chr1:6707164-6707199
  hypo

SEQ ID NO: 347784 - DNA, 106 bp, Homo sapiens; identical to SEQ ID NO: 345693
  chr1:6713808-6713914
  hypo

SEQ ID NO: 347785 - DNA, 307 bp, Homo sapiens; identical to SEQ ID NO: 206600
  chr1:6714041-6714348
  hypo

SEQ ID NO: 347786 - DNA, 108 bp, Homo sapiens; identical to SEQ ID NO: 330679
  chr1:7843510-7843618
  hypo

SEQ ID NO: 347787 - DNA, 425 bp, Homo sapiens; identical to SEQ ID NO: 344939
  chr1:9711649-9712074
  hypo

SEQ ID NO: 347788 - DNA, 367 bp, Homo sapiens; identical to SEQ ID NO: 336905
  chr1:10495109-10495476
  hypo

SEQ ID NO: 347789 - DNA, 1313 bp, Homo sapiens; identical to SEQ ID NO: 336913
  chr1:10719300-10720613
  hypo

SEQ ID NO: 347790 - DNA, 52 bp, Homo sapiens; identical to SEQ ID NO: 197314
  chr1:11538821-11538873
  hypo

SEQ ID NO: 347791 - DNA, 64 bp, Homo sapiens; identical to SEQ ID NO: 346318
  chr1:12123950-12124014
  hypo

SEQ ID NO: 347792 - DNA, 93 bp, Homo sapiens
  chr1:12251958-12252051
  hypo
ggcttcggcgtggccagaccaggtacggggtggggctcaggtccttggggacgcccatgggcctctcctttgtagacatccttgcagtgtcac

SEQ ID NO: 347793 - DNA, 152 bp, Homo sapiens; identical to SEQ ID NO: 345697
  chr1:12460147-12460299
  hypo

SEQ ID NO: 347794 - DNA, 174 bp, Homo sapiens; identical to SEQ ID NO: 336931
  chr1:12573235-12573409
  hypo

SEQ ID NO: 347795 - DNA, 169 bp, Homo sapiens
  chr1:16474862-16475031
  hypo
cgtcactcaccctggcaggcatcctccaccttctcgtagcctgcctggcacaggcactgcccaatgggcaccagccactcgccatccactgcacagtgcatacggggctcttcaccccccggtggcaccacggcatggtccacacaggtgccggccacagtggccaggg

SEQ ID NO: 347796 - DNA, 75 bp, Homo sapiens
  chr1:16475432-16475507
  hypo
cggtacacccagttggtgcggagccagttgtcctggtcgccagacatcacgttgcacacggagtacatgtagatc

SEQ ID NO: 347797 - DNA, 333 bp, Homo sapiens
  chr1:19676386-19676719
  hypo
cggctcggtggcaataccaacccaccaaaaacagaaccatttgtgcactgcatatattattacatccttataaaagtggctgccggaaggaaaacattttcatgtgttgtggctgcagatgttccacgaggtggttccaatggcgtctgaagccggagcctggcccgtgtgtccccagcaggcgcctctcctcctccccatggccctaacacaggcaagtgtttggaagctggcagcctttcccccagaggggatgtattacacctcccactgccacgtggcatcttctagcgcgacccgcagggcgtggccctaaggcatgggccccactca

SEQ ID NO: 347798 - DNA, 51 bp, Homo sapiens
  chr1:19676822-19676873
  hypo
aatgtacacaaaaggcctagagcgggacttgccagaatggcagctctcacc

SEQ ID NO: 347799 - DNA, 234 bp, Homo sapiens; identical to SEQ ID NO: 206784
  chr1:21573434-21573668
  hypo

SEQ ID NO: 347800 - DNA, 189 bp, Homo sapiens; identical to SEQ ID NO: 336973
  chr1:22023693-22023882
  hypo

SEQ ID NO: 347801 - DNA, 32 bp, Homo sapiens; identical to SEQ ID NO: 344944
  chr1:25255579-25255611
  hypo

SEQ ID NO: 347802 - DNA, 807 bp, Homo sapiens; identical to SEQ ID NO: 330733
  chr1:26662538-26663345
  hypo

SEQ ID NO: 347803 - DNA, 88 bp, Homo sapiens; identical to SEQ ID NO: 336990
  chr1:27058003-27058091
  hypo

SEQ ID NO: 347804 - DNA, 80 bp, Homo sapiens
  chr1:31863055-31863135
  hypo
gcacgcagcgggcctcatttatgacttagttcaacattacaaaccttcgggagccccaccctccttctctgagagttgcc

SEQ ID NO: 347805 - DNA, 120 bp, Homo sapiens; identical to SEQ ID NO: 346332
  chr1:35394922-35395042
  hypo

SEQ ID NO: 347806 - DNA, 383 bp, Homo sapiens; identical to SEQ ID NO: 344952
  chr1:39956953-39957336
  hypo

SEQ ID NO: 347807 - DNA, 99 bp, Homo sapiens; identical to SEQ ID NO: 345702
  chr1:41485949-41486048
  hypo

SEQ ID NO: 347808 - DNA, 91 bp, Homo sapiens; identical to SEQ ID NO: 345703
  chr1:41486164-41486255
  hypo

SEQ ID NO: 347809 - DNA, 462 bp, Homo sapiens; identical to SEQ ID NO: 330784
  chr1:41832027-41832489
  hypo

SEQ ID NO: 347810 - DNA, 37 bp, Homo sapiens
  chr1:43842627-43842664
  hypo
cgtagagtatgccatgacaaaacaaagtctgaaggac

SEQ ID NO: 347811 - DNA, 59 bp, Homo sapiens
  chr1:44351032-44351091
  hypo
cgtctcctccttccccgggtccttctcacgcactcacacacaccctgctgaaacctgat

SEQ ID NO: 347812 - DNA, 105 bp, Homo sapiens
  chr1:44726788-44726893
  hypo
cgacaggcctcgacttgaaaagggtgctaaaagcaatgatgtctccaagtgtgatgggagatatttgtgtctgctttacccttggctttttgctccggttcaggt

SEQ ID NO: 347813 - DNA, 209 bp, Homo sapiens; identical to SEQ ID NO: 337062
  chr1:46963465-46963674
  hypo

SEQ ID NO: 347814 - DNA, 430 bp, Homo sapiens; identical to SEQ ID NO: 345705
  chr1:47685395-47685825
  hypo

SEQ ID NO: 347815 - DNA, 196 bp, Homo sapiens; identical to SEQ ID NO: 345706
  chr1:51763389-51763585
  hypo

SEQ ID NO: 347816 - DNA, 322 bp, Homo sapiens; identical to SEQ ID NO: 197534
  chr1:52194968-52195290
  hypo

SEQ ID NO: 347817 - DNA, 52 bp, Homo sapiens; identical to SEQ ID NO: 337079
  chr1:52879577-52879629
  hypo

SEQ ID NO: 347818 - DNA, 535 bp, Homo sapiens; identical to SEQ ID NO: 344959
  chr1:85462747-85463282
  hypo

SEQ ID NO: 347819 - DNA, 437 bp, Homo sapiens; identical to SEQ ID NO: 344960
  chr1:90308855-90309292
  hypo

SEQ ID NO: 347820 - DNA, 37 bp, Homo sapiens; identical to SEQ ID NO: 337119
  chr1:94354617-94354654
  hypo

SEQ ID NO: 347821 - DNA, 501 bp, Homo sapiens; identical to SEQ ID NO: 346354
  chr1:94702434-94702935
  hypo

SEQ ID NO: 347822 - DNA, 88 bp, Homo sapiens; identical to SEQ ID NO: 197650
  chr1:94702990-94703078
  hypo

SEQ ID NO: 347823 - DNA, 95 bp, Homo sapiens; identical to SEQ ID NO: 346356
  chr1:94703103-94703198
  hypo

SEQ ID NO: 347824 - DNA, 442 bp, Homo sapiens; identical to SEQ ID NO: 344964
  chr1:99127189-99127631
  hypo

SEQ ID NO: 347825 - DNA, 325 bp, Homo sapiens; identical to SEQ ID NO: 344965
  chr1:99127671-99127996
  hypo

SEQ ID NO: 347826 - DNA, 229 bp, Homo sapiens; identical to SEQ ID NO: 337133
  chr1:110170726-110170955
  hypo

SEQ ID NO: 347827 - DNA, 243 bp, Homo sapiens; identical to SEQ ID NO: 337139
  chr1:110771992-110772235
  hypo

SEQ ID NO: 347828 - DNA, 795 bp, Homo sapiens; identical to SEQ ID NO: 346366
  chr1:116184428-116185223
  hypo

SEQ ID NO: 347829 - DNA, 204 bp, Homo sapiens; identical to SEQ ID NO: 337155
  chr1:118163688-118163892
  hypo

SEQ ID NO: 347830 - DNA, 298 bp, Homo sapiens; identical to SEQ ID NO: 337168
  chr1:152733117-152733415
  hypo

SEQ ID NO: 347831 - DNA, 253 bp, Homo sapiens
  chr1:153540242-153540495
  hypo
cctgttctgtcctgtacaaagcgccccttttgcccttttcgtgtgtacttagagaattctgattttgactgaatcacctgtgtacttgttttctctcagcctcacccccacatggtgagctcaccggtcttactcatttctgcatgaggtaagggtctcgcccacaccaggtgccaaccagtgcttacggctaccacatggcaacaggggtcactggaggagtgcttaggagcaagggagtccttctcacccc

SEQ ID NO: 347832 - DNA, 447 bp, Homo sapiens; identical to SEQ ID NO: 346369
  chr1:154297543-154297990
  hypo

SEQ ID NO: 347833 - DNA, 72 bp, Homo sapiens; identical to SEQ ID NO: 278861
  chr1:154298038-154298110
  hypo

SEQ ID NO: 347834 - DNA, 223 bp, Homo sapiens; identical to SEQ ID NO: 337176
  chr1:154931252-154931475
  hypo

SEQ ID NO: 347835 - DNA, 158 bp, Homo sapiens; identical to SEQ ID NO: 337206
  chr1:161367435-161367593
  hypo

SEQ ID NO: 347836 - DNA, 293 bp, Homo sapiens; identical to SEQ ID NO: 344978
  chr1:161369566-161369859
  hypo

SEQ ID NO: 347837 - DNA, 299 bp, Homo sapiens; identical to SEQ ID NO: 344979
  chr1:161369945-161370244
  hypo

SEQ ID NO: 347838 - DNA, 69 bp, Homo sapiens
  chr1:171554936-171555005
  hypo
cggttgagggttgagtgtctcttaccgaaatgcttgggaccagaaatgtctcggatttcagattggttt

SEQ ID NO: 347839 - DNA, 122 bp, Homo sapiens
  chr1:171555061-171555183
  hypo
aacatgaaattcctttgtttcatacatactttatacatataacctgaaggtaattttaagcaacattttaaataactttgtgcatgaaacagaagttctgacctcacttcgactgatccgtc

SEQ ID NO: 347840 - DNA, 180 bp, Homo sapiens
  chr1:175372314-175372494
  hypo
cgcagagcccctcctcacattgtcctcgcccactgcaggcattcagacactgccgctggccgcagtcctcaccaacgtagccctcctcgcataaacaggtaccgttggcacatctccccttccccgaacagtccccagggcacctcagttccctgcagtcctcgccagtgtagggctctt

SEQ ID NO: 347841 - DNA, 145 bp, Homo sapiens
  chr1:175372572-175372717
  hypo
cgctgtactcgctgtcacagatgcactggccatccacacacaccccccggctggagcaacccagcgggcagtagggctccgagcaattcttgccaaaccagccttcgttgcagatgcagccacaggactcaaagctaaagttgcc

SEQ ID NO: 347842 - DNA, 152 bp, Homo sapiens
  chr1:175375048-175375200
  hypo
cgatgaaccattacctgactcatccccccaaaatcaggttaatgtatttcaaactggctatgcagtgtagaaaatccctgaactgaatccctcggggaagaactgcatttagatcttagagacatattaaccggcagctacagactaggaca

SEQ ID NO: 347843 - DNA, 67 bp, Homo sapiens; identical to SEQ ID NO: 337250
  chr1:180478120-180478187
  hypo

SEQ ID NO: 347844 - DNA, 249 bp, Homo sapiens; identical to SEQ ID NO: 344982
  chr1:182583799-182584048
  hypo

SEQ ID NO: 347845 - DNA, 40 bp, Homo sapiens; identical to SEQ ID NO: 344983
  chr1:182584613-182584653
  hypo

SEQ ID NO: 347846 - DNA, 44 bp, Homo sapiens; identical to SEQ ID NO: 337271
  chr1:202009839-202009883
  hypo

SEQ ID NO: 347847 - DNA, 370 bp, Homo sapiens; identical to SEQ ID NO: 337281
  chr1:204197954-204198324
  hypo

SEQ ID NO: 347848 - DNA, 383 bp, Homo sapiens; identical to SEQ ID NO: 337283
  chr1:204226544-204226927
  hypo

SEQ ID NO: 347849 - DNA, 279 bp, Homo sapiens; identical to SEQ ID NO: 345722
  chr1:204530924-204531203
  hypo

SEQ ID NO: 347850 - DNA, 79 bp, Homo sapiens; identical to SEQ ID NO: 345723
  chr1:204531757-204531836
  hypo

SEQ ID NO: 347851 - DNA, 315 bp, Homo sapiens; identical to SEQ ID NO: 345724
  chr1:204955352-204955667
  hypo

SEQ ID NO: 347852 - DNA, 55 bp, Homo sapiens; identical to SEQ ID NO: 344990
  chr1:219347516-219347571
  hypo

SEQ ID NO: 347853 - DNA, 99 bp, Homo sapiens; identical to SEQ ID NO: 197977
  chr1:225117651-225117750
  hypo

SEQ ID NO: 347854 - DNA, 66 bp, Homo sapiens; identical to SEQ ID NO: 346403
  chr1:225117751-225117817
  hypo

SEQ ID NO: 347855 - DNA, 1206 bp, Homo sapiens; identical to SEQ ID NO: 197984
  chr1:226925659-226926865
  hypo

SEQ ID NO: 347856 - DNA, 49 bp, Homo sapiens; identical to SEQ ID NO: 344995
  chr1:226926951-226927000
  hypo

SEQ ID NO: 347857 - DNA, 358 bp, Homo sapiens
  chr1:228528433-228528791
  hypo
cgcaacaaggcgcggaacagacagaactgcgcgctgctggagcaggcctatgccgtggtgtctgccctgccacagcgcgctgagaacaagctgcacgtgtccctcatggagaactacccaggcaccctgcaggccctgggcgagcccatccgccaggttggggagggccaggggccggggccgggagatgcatgtgatgtgggtgggtattggggtgctgggggcttgtatctggggctgccaggaggtggcggtgtgtgcatgagttgggcagagcactgggtacctgggtggctgtggggcctgcaccgctgggcaatctggcccaccacaggctgaccgcagcccacaccctccc

SEQ ID NO: 347858 - DNA, 50 bp, Homo sapiens
  chr1:228529382-228529432
  hypo
aggtccctgcctgggtgggtgtgaggggtgggctcgttcctgggacagac

SEQ ID NO: 347859 - DNA, 328 bp, Homo sapiens; identical to SEQ ID NO: 198004
  chr1:228870899-228871227
  hypo

SEQ ID NO: 347860 - DNA, 273 bp, Homo sapiens; identical to SEQ ID NO: 337366
  chr1:230256241-230256514
  hypo

SEQ ID NO: 347861 - DNA, 262 bp, Homo sapiens; identical to SEQ ID NO: 337367
  chr1:230266303-230266565
  hypo

SEQ ID NO: 347862 - DNA, 138 bp, Homo sapiens
  chr1:234795508-234795646
  hypo
ctgcttaagcagaggtaaaggtccagctttgtaatagccggagtgtgaggatccctcgcactgatctgcccacaatgggccgccggcaggcccagagaccctcaagtctcatcctcagtggtctaccgagctgtgcac

SEQ ID NO: 347863 - DNA, 317 bp, Homo sapiens; identical to SEQ ID NO: 207644
  chr1:245032200-245032517
  hypo

SEQ ID NO: 347864 - DNA, 69 bp, Homo sapiens
  chr1:245032603-245032672
  hypo
cactgaggcgctgggcttcttagcttccagaactgcgaccaataagtgtctgttgtttataagctactc

SEQ ID NO: 347865 - DNA, 331 bp, Homo sapiens
  chr1:248099374-248099705
  hypo
cggggtgcagaagagtctcagccagagtgatgtgctgggcagcgtccaattttaccaccctccgcatcaggtcaaacagctgcacgtgctccagagagtcttggagcatgtcactcttcagacgtttgcagttcttcacatatgggctgtcagagctgttctcatcccaaactaggccccatttgtagaaatatttctgcttcttggtacaggagatcacgcgtaatgggatgagccgtagggtcttcaacatcaccaggcgctcttggttttcacaggtctggaagagtgtgaaacctggtagtacttaaagagaaggtagcccatgccc

SEQ ID NO: 347866 - DNA, 425 bp, Homo sapiens; identical to SEQ ID NO: 337456
  chr2:319186-319611
  hypo

SEQ ID NO: 347867 - DNA, 122 bp, Homo sapiens
  chr2:1688962-1689084
  hypo
cggacacctgcagccggagggcccccaaacgcagaccatccctgccccttgccccgggacaggtctgtgctcagcactccgcgcacgaatgggaaacgtgagggaaggaaaaactggagcag

SEQ ID NO: 347868 - DNA, 86 bp, Homo sapiens
  chr2:1689123-1689209
  hypo
ggcacctgacgcgcgggtcccgaggaaggccgaacccgacagaatccctggagcctcgtctctgccaggcagtgtgctgacagggc

SEQ ID NO: 347869 - DNA, 42 bp, Homo sapiens; identical to SEQ ID NO: 337491
  chr2:3349551-3349593
  hypo

SEQ ID NO: 347870 - DNA, 488 bp, Homo sapiens; identical to SEQ ID NO: 345732
  chr2:3418350-3418838
  hypo

SEQ ID NO: 347871 - DNA, 291 bp, Homo sapiens; identical to SEQ ID NO: 344998
  chr2:7057762-7058053
  hypo

SEQ ID NO: 347872 - DNA, 41 bp, Homo sapiens; identical to SEQ ID NO: 344999
  chr2:7058391-7058432
  hypo

SEQ ID NO: 347873 - DNA, 247 bp, Homo sapiens; identical to SEQ ID NO: 337500
  chr2:7073094-7073341
  hypo

SEQ ID NO: 347874 - DNA, 146 bp, Homo sapiens; identical to SEQ ID NO: 345735
  chr2:8870193-8870339
  hypo

SEQ ID NO: 347875 - DNA, 57 bp, Homo sapiens; identical to SEQ ID NO: 207777
  chr2:8978298-8978355
  hypo

SEQ ID NO: 347876 - DNA, 348 bp, Homo sapiens; identical to SEQ ID NO: 337515
  chr2:9078588-9078936
  hypo

SEQ ID NO: 347877 - DNA, 372 bp, Homo sapiens; identical to SEQ ID NO: 337522
  chr2:9609477-9609849
  hypo

SEQ ID NO: 347878 - DNA, 614 bp, Homo sapiens; identical to SEQ ID NO: 337537
  chr2:10334473-10335087
  hypo

SEQ ID NO: 347879 - DNA, 178 bp, Homo sapiens; identical to SEQ ID NO: 345000
  chr2:10588876-10589054
  hypo

SEQ ID NO: 347880 - DNA, 117 bp, Homo sapiens; identical to SEQ ID NO: 198078
  chr2:10589055-10589172
  hypo

SEQ ID NO: 347881 - DNA, 55 bp, Homo sapiens
  chr2:10600813-10600868
  hypo
gaatgacatccacagccgagacagcagcaatgagggcacatgggaaggatagggc

SEQ ID NO: 347882 - DNA, 115 bp, Homo sapiens; identical to SEQ ID NO: 345738
  chr2:27433190-27433305
  hypo

SEQ ID NO: 347883 - DNA, 58 bp, Homo sapiens; identical to SEQ ID NO: 346425
  chr2:27938267-27938325
  hypo

SEQ ID NO: 347884 - DNA, 37 bp, Homo sapiens; identical to SEQ ID NO: 345005
  chr2:30453530-30453567
  hypo

SEQ ID NO: 347885 - DNA, 68 bp, Homo sapiens; identical to SEQ ID NO: 198154
  chr2:31361021-31361089
  hypo

SEQ ID NO: 347886 - DNA, 178 bp, Homo sapiens; identical to SEQ ID NO: 198155
  chr2:31361118-31361296
  hypo

SEQ ID NO: 347887 - DNA, 70 bp, Homo sapiens; identical to SEQ ID NO: 346429
  chr2:31361690-31361760
  hypo

SEQ ID NO: 347888 - DNA, 226 bp, Homo sapiens; identical to SEQ ID NO: 345742
  chr2:39186687-39186913
  hypo

SEQ ID NO: 347889 - DNA, 395 bp, Homo sapiens; identical to SEQ ID NO: 345010
  chr2:43452443-43452838
  hypo

SEQ ID NO: 347890 - DNA, 41 bp, Homo sapiens; identical to SEQ ID NO: 345744
  chr2:55289053-55289094
  hypo

SEQ ID NO: 347891 - DNA, 77 bp, Homo sapiens; identical to SEQ ID NO: 346438
  chr2:60784505-60784582
  hypo

SEQ ID NO: 347892 - DNA, 317 bp, Homo sapiens; identical to SEQ ID NO: 346441
  chr2:70351179-70351496
  hypo

SEQ ID NO: 347893 - DNA, 280 bp, Homo sapiens; identical to SEQ ID NO: 331330
  chr2:70369049-70369329
  hypo

SEQ ID NO: 347894 - DNA, 127 bp, Homo sapiens; identical to SEQ ID NO: 345014
  chr2:72374248-72374375
  hypo

SEQ ID NO: 347895 - DNA, 259 bp, Homo sapiens; identical to SEQ ID NO: 345015
  chr2:72374932-72375191
  hypo

SEQ ID NO: 347896 - DNA, 218 bp, Homo sapiens; identical to SEQ ID NO: 337654
  chr2:74327579-74327797
  hypo

SEQ ID NO: 347897 - DNA, 275 bp, Homo sapiens; identical to SEQ ID NO: 345016
  chr2:74425444-74425719
  hypo

SEQ ID NO: 347898 - DNA, 395 bp, Homo sapiens; identical to SEQ ID NO: 198298
  chr2:74425790-74426185
  hypo

SEQ ID NO: 347899 - DNA, 228 bp, Homo sapiens; identical to SEQ ID NO: 345018
  chr2:74426214-74426442
  hypo

SEQ ID NO: 347900 - DNA, 235 bp, Homo sapiens; identical to SEQ ID NO: 345022
  chr2:74781700-74781935
  hypo

SEQ ID NO: 347901 - DNA, 1432 bp, Homo sapiens; identical to SEQ ID NO: 345024
  chr2:75060920-75062352
  hypo

SEQ ID NO: 347902 - DNA, 61 bp, Homo sapiens
  chr2:85280346-85280407
  hypo
caagagctccttctgtccactttagtgcgtgaagagagctcatcctcagatgaggatgatc

SEQ ID NO: 347903 - DNA, 104 bp, Homo sapiens; identical to SEQ ID NO: 337662
  chr2:85356682-85356786
  hypo

SEQ ID NO: 347904 - DNA, 104 bp, Homo sapiens; identical to SEQ ID NO: 337664
  chr2:85776352-85776456
  hypo

SEQ ID NO: 347905 - DNA, 578 bp, Homo sapiens; identical to SEQ ID NO: 280006
  chr2:96011863-96012441
  hypo

SEQ ID NO: 347906 - DNA, 48 bp, Homo sapiens; identical to SEQ ID NO: 346460
  chr2:96012683-96012731
  hypo

SEQ ID NO: 347907 - DNA, 42 bp, Homo sapiens; identical to SEQ ID NO: 346464
  chr2:97203334-97203376
  hypo

SEQ ID NO: 347908 - DNA, 39 bp, Homo sapiens; identical to SEQ ID NO: 346465
  chr2:97203545-97203584
  hypo

SEQ ID NO: 347909 - DNA, 146 bp, Homo sapiens; identical to SEQ ID NO: 345030
  chr2:101033445-101033591
  hypo

SEQ ID NO: 347910 - DNA, 144 bp, Homo sapiens; identical to SEQ ID NO: 345031
  chr2:105471069-105471213
  hypo

SEQ ID NO: 347911 - DNA, 156 bp, Homo sapiens; identical to SEQ ID NO: 337713
  chr2:108085842-108085998
  hypo

SEQ ID NO: 347912 - DNA, 452 bp, Homo sapiens; identical to SEQ ID NO: 337722
  chr2:110021654-110022106
  hypo

SEQ ID NO: 347913 - DNA, 124 bp, Homo sapiens; identical to SEQ ID NO: 337724
  chr2:110028510-110028634
  hypo

SEQ ID NO: 347914 - DNA, 682 bp, Homo sapiens; identical to SEQ ID NO: 337730
  chr2:114736479-114737161
  hypo

SEQ ID NO: 347915 - DNA, 143 bp, Homo sapiens; identical to SEQ ID NO: 345757
  chr2:120005222-120005365
  hypo

SEQ ID NO: 347916 - DNA, 184 bp, Homo sapiens; identical to SEQ ID NO: 346478
  chr2:135476396-135476580
  hypo

SEQ ID NO: 347917 - DNA, 912 bp, Homo sapiens; identical to SEQ ID NO: 198448
  chr2:136874020-136874932
  hypo

SEQ ID NO: 347918 - DNA, 482 bp, Homo sapiens; identical to SEQ ID NO: 198449
  chr2:136875399-136875881
  hypo

SEQ ID NO: 347919 - DNA, 50 bp, Homo sapiens; identical to SEQ ID NO: 345044
  chr2:149632592-149632642
  hypo

SEQ ID NO: 347920 - DNA, 1811 bp, Homo sapiens; identical to SEQ ID NO: 331475
  chr2:159313069-159314880
  hypo

SEQ ID NO: 347921 - DNA, 125 bp, Homo sapiens; identical to SEQ ID NO: 337792
  chr2:159528162-159528287
  hypo

SEQ ID NO: 347922 - DNA, 37 bp, Homo sapiens; identical to SEQ ID NO: 198509
  chr2:166650106-166650143
  hypo

SEQ ID NO: 347923 - DNA, 723 bp, Homo sapiens; identical to SEQ ID NO: 345049
  chr2:166650508-166651231
  hypo

SEQ ID NO: 347924 - DNA, 133 bp, Homo sapiens; identical to SEQ ID NO: 337806
  chr2:171730981-171731114
  hypo

SEQ ID NO: 347925 - DNA, 794 bp, Homo sapiens; identical to SEQ ID NO: 331546
  chr2:178257227-178258021
  hypo

SEQ ID NO: 347926 - DNA, 90 bp, Homo sapiens; identical to SEQ ID NO: 345055
  chr2:183902312-183902402
  hypo

SEQ ID NO: 347927 - DNA, 568 bp, Homo sapiens; identical to SEQ ID NO: 198600
  chr2:183902442-183903010
  hypo

SEQ ID NO: 347928 - DNA, 587 bp, Homo sapiens; identical to SEQ ID NO: 346507
  chr2:183903037-183903624
  hypo

SEQ ID NO: 347929 - DNA, 86 bp, Homo sapiens; identical to SEQ ID NO: 345058
  chr2:191044988-191045074
  hypo

SEQ ID NO: 347930 - DNA, 513 bp, Homo sapiens; identical to SEQ ID NO: 345059
  chr2:191045505-191046018
  hypo

SEQ ID NO: 347931 - DNA, 447 bp, Homo sapiens; identical to SEQ ID NO: 345060
  chr2:192109730-192110177
  hypo

SEQ ID NO: 347932 - DNA, 253 bp, Homo sapiens; identical to SEQ ID NO: 198625
  chr2:192110303-192110556
  hypo

SEQ ID NO: 347933 - DNA, 439 bp, Homo sapiens; identical to SEQ ID NO: 345062
  chr2:192110584-192111023
  hypo

SEQ ID NO: 347934 - DNA, 86 bp, Homo sapiens; identical to SEQ ID NO: 337831
  chr2:198276053-198276139
  hypo

SEQ ID NO: 347935 - DNA, 239 bp, Homo sapiens; identical to SEQ ID NO: 198669
  chr2:207308960-207309199
  hypo

SEQ ID NO: 347936 - DNA, 93 bp, Homo sapiens; identical to SEQ ID NO: 337852
  chr2:218678441-218678534
  hypo

SEQ ID NO: 347937 - DNA, 839 bp, Homo sapiens; identical to SEQ ID NO: 337853
  chr2:218682490-218683329
  hypo

SEQ ID NO: 347938 - DNA, 138 bp, Homo sapiens; identical to SEQ ID NO: 337854
  chr2:218686231-218686369
  hypo

SEQ ID NO: 347939 - DNA, 267 bp, Homo sapiens; identical to SEQ ID NO: 337855
  chr2:218694781-218695048
  hypo

SEQ ID NO: 347940 - DNA, 771 bp, Homo sapiens; identical to SEQ ID NO: 345777
  chr2:218712965-218713736
  hypo

SEQ ID NO: 347941 - DNA, 302 bp, Homo sapiens; identical to SEQ ID NO: 337861
  chr2:219145053-219145355
  hypo

SEQ ID NO: 347942 - DNA, 594 bp, Homo sapiens; identical to SEQ ID NO: 346517
  chr2:219757371-219757965
  hypo

SEQ ID NO: 347943 - DNA, 406 bp, Homo sapiens; identical to SEQ ID NO: 198725
  chr2:222436961-222437367
  hypo

SEQ ID NO: 347944 - DNA, 806 bp, Homo sapiens; identical to SEQ ID NO: 346522
  chr2:222437421-222438227
  hypo

SEQ ID NO: 347945 - DNA, 236 bp, Homo sapiens; identical to SEQ ID NO: 198740
  chr2:225906168-225906404
  hypo

SEQ ID NO: 347946 - DNA, 623 bp, Homo sapiens; identical to SEQ ID NO: 346527
  chr2:232790030-232790653
  hypo

SEQ ID NO: 347947 - DNA, 438 bp, Homo sapiens; identical to SEQ ID NO: 346528
  chr2:235860308-235860746
  hypo

SEQ ID NO: 347948 - DNA, 297 bp, Homo sapiens; identical to SEQ ID NO: 198767
  chr2:236402404-236402701
  hypo

SEQ ID NO: 347949 - DNA, 640 bp, Homo sapiens; identical to SEQ ID NO: 337914
  chr2:236648390-236649030
  hypo

SEQ ID NO: 347950 - DNA, 66 bp, Homo sapiens
  chr2:238280432-238280498
  hypo
cgtgatgggcgtcagcagtttctgctccaggctgggcagctcccggaaggtgctcaccgagaacac

SEQ ID NO: 347951 - DNA, 235 bp, Homo sapiens
  chr2:238280812-238281047
  hypo
ccaccttggggtcatcgctgaactggatgacagccacccgggtggtgtcaaagcccacgtccaggtagtcaaccagcctctctatgagggtgcgaacgtactggaactcaggcccggcactttgggacccatcgatgagaaagaccacgtccctcttgccaccaacacctgcgaaacaaatgtgagcatggcttcaccttcatcgtcaccaaattcttagcgttcatgagccacc

SEQ ID NO: 347952 - DNA, 34 bp, Homo sapiens; identical to SEQ ID NO: 337934
  chr2:238934785-238934819
  hypo

SEQ ID NO: 347953 - DNA, 270 bp, Homo sapiens; identical to SEQ ID NO: 345782
  chr2:239074309-239074579
  hypo

SEQ ID NO: 347954 - DNA, 67 bp, Homo sapiens
  chr2:239082208-239082275
  hypo
cgggcacagaggtgacaccgcagcgcttgtactgcccgtccccaatggagcgtgacacctctagcac

SEQ ID NO: 347955 - DNA, 42 bp, Homo sapiens; identical to SEQ ID NO: 345783
  chr2:239083093-239083135
  hypo

SEQ ID NO: 347956 - DNA, 287 bp, Homo sapiens
  chr2:240226690-240226977
  hypo
cgcgctttcttccagccggcctggggcatgtcaggaggcagggcctgtactgcaggctctgtgttcttagacagcctttgcagggggcagaggtgcccactgccacatgggcacacacaggaggctcaccacgtttcttcaaatgcagatgacaaagcagcttgagtaacacaaatacggccacactcatctgaggattgctgctgtgttttctaactgcatggccatgaccaagcagtcggttttcatccaggttggtagtcaggtttctgaaagcgatggcagtc

SEQ ID NO: 347957 - DNA, 154 bp, Homo sapiens
  chr2:240227007-240227161
  hypo
gcacaccttcaccctcgttacattttctggacaatggtagggaacattccttactccgctggcctgtcagcttggctaagcctggtgcaagtggctcgctgtgggtccgcggctccattacgggggagtctgggtcatctgtgagcccaacagc

SEQ ID NO: 347958 - DNA, 80 bp, Homo sapiens; identical to SEQ ID NO: 337957
  chr2:240319796-240319876
  hypo

SEQ ID NO: 347959 - DNA, 360 bp, Homo sapiens
  chr2:241542357-241542717
  hypo
agccacagcagttgtggcatctctaccctgcccagcaaaagtggaagtgttgcctgtgccgctaggaacctccaggtttgctccacctccaggggccttgccagggtgtcaaacctgtgtctcgggacactgctgttaggtctccagcttccctatcaggcgcctcagcacccagtcctaccagtgctcccgcctcccgtccccagctggctgggcctgcagccccctcctgtgccccgagctggccgggcccgcagcccactccctggtcactggatgttgctgacacttcactcggtcagagccctagcacccaaggggggccagggcctgacgggggtggagcgaggggtgggccgc

SEQ ID NO: 347960 - DNA, 462 bp, Homo sapiens; identical to SEQ ID NO: 345784
  chr2:242004407-242004869
  hypo

SEQ ID NO: 347961 - DNA, 339 bp, Homo sapiens; identical to SEQ ID NO: 337986
  chr2:242169887-242170226
  hypo

SEQ ID NO: 347962 - DNA, 241 bp, Homo sapiens; identical to SEQ ID NO: 345785
  chr2:242436503-242436744
  hypo

SEQ ID NO: 347963 - DNA, 326 bp, Homo sapiens; identical to SEQ ID NO: 337992
  chr2:242440848-242441174
  hypo

SEQ ID NO: 347964 - DNA, 46 bp, Homo sapiens
  chr2:242554503-242554549
  hypo
cgcgaaaagaaagaagccagacaaaaacgtatatattctatgattc

SEQ ID NO: 347965 - DNA, 54 bp, Homo sapiens
  chr2:242554624-242554678
  hypo
aggggagtgcaaaggagaacctggaccgctggacgtgggtgtggctgcacaagc

SEQ ID NO: 347966 - DNA, 130 bp, Homo sapiens
  chr2:242617764-242617894
  hypo
cggaaacggcagcagctttgctgacacaactgtgccagccaccacggtgtcatcctgagccacttctccacgcttcctagtgtgcaattctgggattctcaccttccagttcaaagtcgtgtctttcatg

SEQ ID NO: 347967 - DNA, 531 bp, Homo sapiens
  chr2:242617924-242618455
  hypo
tggaaagccccgttctcatagcgctcatggccaaacgctccccgcttggcagcatccgccagctgtaactggaggaacaggaccaggtcgggtttgggaaggcccacgtctggctgtttacaccaatctagggaaaaattctgccaagaaagaacccaacagttaaagcttagtgtagtctaggtttttgtttcgaaagtcgtaaaaacaggaaaaaatgaggggacatttggtgaggtaccaagatgtgagactgtttatattgtggctcgtttaatttttagaacctcaaacgtgtcggtttctccagtgtcacctttgtttttcctttgtaaacagacaagtggacagaaaagtaggtagatagaacggctgccagtccccgccacccacagcccaggccccatggaggccctcccagcacagctacaggcctgctggccaggagcaaacagtctatgtacagaacccctggagacccccggcctagaacgcctgcagcacagagcagctgggtccggacacaggcac

SEQ ID NO: 347968 - DNA, 231 bp, Homo sapiens; identical to SEQ ID NO: 345076
  chr3:5018754-5018985
  hypo

SEQ ID NO: 347969 - DNA, 143 bp, Homo sapiens; identical to SEQ ID NO: 345077
  chr3:5019132-5019275
  hypo

SEQ ID NO: 347970 - DNA, 58 bp, Homo sapiens; identical to SEQ ID NO: 338018
  chr3:5165843-5165901
  hypo

SEQ ID NO: 347971 - DNA, 546 bp, Homo sapiens; identical to SEQ ID NO: 338029
  chr3:11655438-11655984
  hypo

SEQ ID NO: 347972 - DNA, 78 bp, Homo sapiens; identical to SEQ ID NO: 345789
  chr3:15123770-15123848
  hypo

SEQ ID NO: 347973 - DNA, 42 bp, Homo sapiens; identical to SEQ ID NO: 345790
  chr3:15123992-15124034
  hypo

SEQ ID NO: 347974 - DNA, 78 bp, Homo sapiens; identical to SEQ ID NO: 345081
  chr3:16555426-16555504
  hypo

SEQ ID NO: 347975 - DNA, 989 bp, Homo sapiens; identical to SEQ ID NO: 331712
  chr3:24536360-24537349
  hypo

SEQ ID NO: 347976 - DNA, 558 bp, Homo sapiens; identical to SEQ ID NO: 345084
  chr3:32433054-32433612
  hypo

SEQ ID NO: 347977 - DNA, 200 bp, Homo sapiens; identical to SEQ ID NO: 198867
  chr3:32433665-32433865
  hypo

SEQ ID NO: 347978 - DNA, 81 bp, Homo sapiens; identical to SEQ ID NO: 345086
  chr3:32434068-32434149
  hypo

SEQ ID NO: 347979 - DNA, 1420 bp, Homo sapiens; identical to SEQ ID NO: 331732
  chr3:37033979-37035399
  hypo

SEQ ID NO: 347980 - DNA, 243 bp, Homo sapiens; identical to SEQ ID NO: 345088
  chr3:43147038-43147281
  hypo

SEQ ID NO: 347981 - DNA, 105 bp, Homo sapiens; identical to SEQ ID NO: 345089
  chr3:43147607-43147712
  hypo

SEQ ID NO: 347982 - DNA, 149 bp, Homo sapiens; identical to SEQ ID NO: 345798
  chr3:43655492-43655641
  hypo

SEQ ID NO: 347983 - DNA, 557 bp, Homo sapiens
  chr3:49720262-49720819
  hypo
cggtgtcttgcaggtgcgtggtggaggctggctttcctttcagcagtgactgcctgccagacctcagcgtgtgggctgagatgctggacaaatcgcccatcagatacatccctcaggtatgcagccccctccttgccctgtgtgctgcccatccatccagaatccagggcccagctcaacacagctccccactcttccccaaacacccaggtgaagacaccactgttactgatgttgggccaggaggaccggcgtgtgcccttcaagcagggcatggagtattaccgtgccctcaagacccggaatgtgcctgttcggtgagtgcagcatgaaggccctggcagctggtgggcaggtgagcacaggaggaccctccaaccttaaatgttgctgactaatccctacaggctcctgctctatcccaaaagcacccacgcattatcagaggtggaggtggagtcagacagcttcatgaatgctgtgctctggctacgcacacacttgggcagctgaagccctgccattctgcatgagctgatcagcctgtgccacacttc

SEQ ID NO: 347984 - DNA, 356 bp, Homo sapiens; identical to SEQ ID NO: 346562
  chr3:50374299-50374655
  hypo

SEQ ID NO: 347985 - DNA, 62 bp, Homo sapiens; identical to SEQ ID NO: 338107
  chr3:51623983-51624045
  hypo

SEQ ID NO: 347986 - DNA, 329 bp, Homo sapiens; identical to SEQ ID NO: 208908
  chr3:53032404-53032733
  hypo

SEQ ID NO: 347987 - DNA, 148 bp, Homo sapiens; identical to SEQ ID NO: 345800
  chr3:56718095-56718243
  hypo

SEQ ID NO: 347988 - DNA, 170 bp, Homo sapiens; identical to SEQ ID NO: 345801
  chr3:56718281-56718451
  hypo

SEQ ID NO: 347989 - DNA, 261 bp, Homo sapiens; identical to SEQ ID NO: 338120
  chr3:57679351-57679612
  hypo

SEQ ID NO: 347990 - DNA, 970 bp, Homo sapiens; identical to SEQ ID NO: 346569
  chr3:66024122-66025092
  hypo

SEQ ID NO: 347991 - DNA, 1570 bp, Homo sapiens; identical to SEQ ID NO: 331800
  chr3:66550318-66551888
  hypo

SEQ ID NO: 347992 - DNA, 264 bp, Homo sapiens; identical to SEQ ID NO: 338134
  chr3:71036199-71036463
  hypo

SEQ ID NO: 347993 - DNA, 1332 bp, Homo sapiens; identical to SEQ ID NO: 346571
  chr3:71113488-71114820
  hypo

SEQ ID NO: 347994 - DNA, 913 bp, Homo sapiens; identical to SEQ ID NO: 345094
  chr3:71630573-71631486
  hypo

SEQ ID NO: 347995 - DNA, 280 bp, Homo sapiens; identical to SEQ ID NO: 345095
  chr3:98619774-98620054
  hypo

SEQ ID NO: 347996 - DNA, 58 bp, Homo sapiens; identical to SEQ ID NO: 345096
  chr3:98621126-98621184
  hypo

SEQ ID NO: 347997 - DNA, 101 bp, Homo sapiens; identical to SEQ ID NO: 346575
  chr3:99594790-99594891
  hypo

SEQ ID NO: 347998 - DNA, 459 bp, Homo sapiens; identical to SEQ ID NO: 346577
  chr3:105088087-105088546
  hypo

SEQ ID NO: 347999 - DNA, 1176 bp, Homo sapiens; identical to SEQ ID NO: 331832
  chr3:113251180-113252356
  hypo

SEQ ID NO: 348000 - DNA, 84 bp, Homo sapiens; identical to SEQ ID NO: 345809
  chr3:121500635-121500719
  hypo

SEQ ID NO: 348001 - DNA, 731 bp, Homo sapiens; identical to SEQ ID NO: 346580
  chr3:123751654-123752385
  hypo

SEQ ID NO: 348002 - DNA, 438 bp, Homo sapiens; identical to SEQ ID NO: 345099
  chr3:124773932-124774370
  hypo

SEQ ID NO: 348003 - DNA, 174 bp, Homo sapiens; identical to SEQ ID NO: 338175
  chr3:127326124-127326298
  hypo

SEQ ID NO: 348004 - DNA, 122 bp, Homo sapiens; identical to SEQ ID NO: 345100
  chr3:127794271-127794393
  hypo

SEQ ID NO: 348005 - DNA, 61 bp, Homo sapiens; identical to SEQ ID NO: 338182
  chr3:128004552-128004613
  hypo

SEQ ID NO: 348006 - DNA, 130 bp, Homo sapiens; identical to SEQ ID NO: 338188
  chr3:129231161-129231291
  hypo

SEQ ID NO: 348007 - DNA, 196 bp, Homo sapiens; identical to SEQ ID NO: 346590
  chr3:132756116-132756312
  hypo

SEQ ID NO: 348008 - DNA, 39 bp, Homo sapiens; identical to SEQ ID NO: 346591
  chr3:132756477-132756516
  hypo

SEQ ID NO: 348009 - DNA, 295 bp, Homo sapiens; identical to SEQ ID NO: 345106
  chr3:135684609-135684904
  hypo

SEQ ID NO: 348010 - DNA, 703 bp, Homo sapiens; identical to SEQ ID NO: 199114
  chr3:138067014-138067717
  hypo

SEQ ID NO: 348011 - DNA, 106 bp, Homo sapiens; identical to SEQ ID NO: 346595
  chr3:138067747-138067853
  hypo

SEQ ID NO: 348012 - DNA, 986 bp, Homo sapiens; identical to SEQ ID NO: 346597
  chr3:140660747-140661733
  hypo

SEQ ID NO: 348013 - DNA, 147 bp, Homo sapiens; identical to SEQ ID NO: 338213
  chr3:141622422-141622569
  hypo

SEQ ID NO: 348014 - DNA, 77 bp, Homo sapiens; identical to SEQ ID NO: 338228
  chr3:150187009-150187086
  hypo

SEQ ID NO: 348015 - DNA, 241 bp, Homo sapiens; identical to SEQ ID NO: 199188
  chr3:169482439-169482680
  hypo

SEQ ID NO: 348016 - DNA, 54 bp, Homo sapiens; identical to SEQ ID NO: 345815
  chr3:169540679-169540733
  hypo

SEQ ID NO: 348017 - DNA, 282 bp, Homo sapiens; identical to SEQ ID NO: 281698
  chr3:170626174-170626456
  hypo

SEQ ID NO: 348018 - DNA, 206 bp, Homo sapiens; identical to SEQ ID NO: 346614
  chr3:180397104-180397310
  hypo

SEQ ID NO: 348019 - DNA, 809 bp, Homo sapiens; identical to SEQ ID NO: 345120
  chr3:183165024-183165833
  hypo

SEQ ID NO: 348020 - DNA, 217 bp, Homo sapiens; identical to SEQ ID NO: 338261
  chr3:183217407-183217624
  hypo

SEQ ID NO: 348021 - DNA, 52 bp, Homo sapiens; identical to SEQ ID NO: 338270
  chr3:184042674-184042726
  hypo

SEQ ID NO: 348022 - DNA, 98 bp, Homo sapiens; identical to SEQ ID NO: 338286
  chr3:185441721-185441819
  hypo

SEQ ID NO: 348023 - DNA, 196 bp, Homo sapiens; identical to SEQ ID NO: 345819
  chr3:185445861-185446057
  hypo

SEQ ID NO: 348024 - DNA, 290 bp, Homo sapiens; identical to SEQ ID NO: 199253
  chr3:186079331-186079621
  hypo

SEQ ID NO: 348025 - DNA, 45 bp, Homo sapiens; identical to SEQ ID NO: 345123
  chr3:187455297-187455342
  hypo

SEQ ID NO: 348026 - DNA, 446 bp, Homo sapiens; identical to SEQ ID NO: 199256
  chr3:187456666-187457112
  hypo

SEQ ID NO: 348027 - DNA, 134 bp, Homo sapiens; identical to SEQ ID NO: 338297
  chr3:193391768-193391902
  hypo

SEQ ID NO: 348028 - DNA, 61 bp, Homo sapiens; identical to SEQ ID NO: 209288
  chr3:193419641-193419702
  hypo

SEQ ID NO: 348029 - DNA, 275 bp, Homo sapiens; identical to SEQ ID NO: 345825
  chr3:193419732-193420007
  hypo

SEQ ID NO: 348030 - DNA, 296 bp, Homo sapiens; identical to SEQ ID NO: 338306
  chr3:193969977-193970273
  hypo

SEQ ID NO: 348031 - DNA, 582 bp, Homo sapiens; identical to SEQ ID NO: 345130
  chr3:195599104-195599686
  hypo

SEQ ID NO: 348032 - DNA, 246 bp, Homo sapiens; identical to SEQ ID NO: 209343
  chr3:195599840-195600086
  hypo

SEQ ID NO: 348033 - DNA, 49 bp, Homo sapiens; identical to SEQ ID NO: 345828
  chr3:195601363-195601412
  hypo

SEQ ID NO: 348034 - DNA, 43 bp, Homo sapiens; identical to SEQ ID NO: 209400
  chr4:628787-628830
  hypo

SEQ ID NO: 348035 - DNA, 420 bp, Homo sapiens; identical to SEQ ID NO: 302690
  chr4:628950-629370
  hypo

SEQ ID NO: 348036 - DNA, 188 bp, Homo sapiens; identical to SEQ ID NO: 345829
  chr4:905682-905870
  hypo

SEQ ID NO: 348037 - DNA, 372 bp, Homo sapiens; identical to SEQ ID NO: 209459
  chr4:1331896-1332268
  hypo

SEQ ID NO: 348038 - DNA, 136 bp, Homo sapiens; identical to SEQ ID NO: 345830
  chr4:1336902-1337038
  hypo

SEQ ID NO: 348039 - DNA, 329 bp, Homo sapiens; identical to SEQ ID NO: 338384
  chr4:1738699-1739028
  hypo

SEQ ID NO: 348040 - DNA, 56 bp, Homo sapiens
  chr4:1993659-1993715
  hypo
cggcatccggtgccctcccagcagcctcccacctcccagcagcacccagtccactg

SEQ ID NO: 348041 - DNA, 197 bp, Homo sapiens
  chr4:1994335-1994532
  hypo
agccccaggccttcctgacacccactccctgcgtcaggcgccagagacccgtcctacgagggctgcggccatcacgtccccgcgagcgccgcctcctggtggcctctgagtgggaggaccttccagcgcttccctcactgtcctcatgggcttcctgccctgagggaagttggctcgaagggcagagatcagaggtc

SEQ ID NO: 348042 - DNA, 102 bp, Homo sapiens; identical to SEQ ID NO: 345831
  chr4:3217005-3217107
  hypo

SEQ ID NO: 348043 - DNA, 56 bp, Homo sapiens; identical to SEQ ID NO: 345832
  chr4:3217154-3217210
  hypo

SEQ ID NO: 348044 - DNA, 609 bp, Homo sapiens; identical to SEQ ID NO: 332064
  chr4:25863681-25864290
  hypo

SEQ ID NO: 348045 - DNA, 1067 bp, Homo sapiens; identical to SEQ ID NO: 346638
  chr4:42657902-42658969
  hypo

SEQ ID NO: 348046 - DNA, 145 bp, Homo sapiens; identical to SEQ ID NO: 338485
  chr4:48572780-48572925
  hypo

SEQ ID NO: 348047 - DNA, 93 bp, Homo sapiens; identical to SEQ ID NO: 346642
  chr4:57687545-57687638
  hypo

SEQ ID NO: 348048 - DNA, 108 bp, Homo sapiens; identical to SEQ ID NO: 338503
  chr4:71857989-71858097
  hypo

SEQ ID NO: 348049 - DNA, 1017 bp, Homo sapiens; identical to SEQ ID NO: 338521
  chr4:100573606-100574623
  hypo

SEQ ID NO: 348050 - DNA, 258 bp, Homo sapiens; identical to SEQ ID NO: 345138
  chr4:100867945-100868203
  hypo

SEQ ID NO: 348051 - DNA, 168 bp, Homo sapiens; identical to SEQ ID NO: 338523
  chr4:103421142-103421310
  hypo

SEQ ID NO: 348052 - DNA, 242 bp, Homo sapiens; identical to SEQ ID NO: 199560
  chr4:113436585-113436827
  hypo

SEQ ID NO: 348053 - DNA, 761 bp, Homo sapiens; identical to SEQ ID NO: 346652
  chr4:124317751-124318512
  hypo

SEQ ID NO: 348054 - DNA, 923 bp, Homo sapiens
  chr4:141564347-141565270
  hypo
cgagccaccagggcccgctccgcacctcccaccttcttgctcctcctctccagctccagctctgcgatctcgctcagcagggtgatgccgtgcagaaagctctgctccaagacaaggctctcggcagcttcctgcttctccaaggcctggactccagtagcacctggggagggcagaggcctggcctggggcagctccatggccacctccatgccagccagtgggtcttccaggccgggcaggaactgctcagagcttgcctcttccaggtagcaggtgctgccgggcacaggcacggcctcccggggctccagtctcgggcactctccctccccggcgggcacgtcacagtctgacatttctaggctgggctggggctcgctcagggccgcctgggccaggccttcctccggcgctgcctctgccgcaggaaccgccacaggcacctccactggctcctccttggcctccactagcgtctcgggtgtcagctgcacccccaggtccaatgcggccgtgcagggttctgtccggcccggggaatccacgcatgcttcaggcccctccgcaaagtctgggcactcagagggctcggtgcagccctgcccggtggcactcagcgcctgggcctccaacgggccacctctgcatccgcctgcagggctcggggtagccatggtttccatggcgggcagtggcagcggcaactccagaggcggcagctctgcggggcgctcgtccacatcctccacctccaccttcgcctcctgttcagccagcggctcttcctccgggtcctcccgcagcggctctgggatcttggagggggacaggaggatgagcttgtcttcgggcgagagtgtcaggcgcttggtcccatcagctgggagcagcacatcaggggccaggccatccgcatcggc

SEQ ID NO: 348055 - DNA, 223 bp, Homo sapiens; identical to SEQ ID NO: 346657
  chr4:149364661-149364884
  hypo

SEQ ID NO: 348056 - DNA, 111 bp, Homo sapiens; identical to SEQ ID NO: 338557
  chr4:154421947-154422058
  hypo

SEQ ID NO: 348057 - DNA, 206 bp, Homo sapiens; identical to SEQ ID NO: 199699
  chr4:184019900-184020106
  hypo

SEQ ID NO: 348058 - DNA, 829 bp, Homo sapiens; identical to SEQ ID NO: 346671
  chr5:472600-473429
  hypo

SEQ ID NO: 348059 - DNA, 263 bp, Homo sapiens; identical to SEQ ID NO: 338615
  chr5:1051312-1051575
  hypo

SEQ ID NO: 348060 - DNA, 1232 bp, Homo sapiens; identical to SEQ ID NO: 338616
  chr5:1051905-1053137
  hypo

SEQ ID NO: 348061 - DNA, 1297 bp, Homo sapiens
  chr5:1053723-1055020
  hypo
cggattctctgaccctgaaggatgcagaagtggcggctccgagcgaaaggcgctgactgcagccagggcgggcgttcagcagcgggatgctttggcctccagggacctagaactcagcccactaaggctgccaagcttctaagggctacagtcacacaacacaaaccgcaagcgctttcctaactacatctacatctgcaaagcaggcagaacagtggaagccgtctgggtggcccatgtgcctgacgccttcaaggctgacacgcttctcttgacatctacatcatcgcccctaaaccccacgtcagacactgccaaacacagacccgtcaggctgggcacacatggcctcctctccgagggtcctgatacaactgggtccaaggggccggaagctcaggaaggaaaggcccagagtcccccacaccggcctgtgcagccgttgctgctgaagctcccaggcctgacaaggacagggtatgccgaggactcagctggaggcacaggccctcagtggccactactgggtcccctcctacggcccaccctgcccctgtctggccaagggctaaaggacaagcacttccaccgtgtggccgtccagcccccgccttccgtcctcacaacgcagctctgctccacgaccctccctgtctgctctctgaagctgctgtggccggtccatgtctcaaagcgtccctggcggcctgggcccggccacagccccacaggaggctccccaaccaagtaggtttggggacactgcagaatcatgctgtgaggtgctcaggcccttgcgggacagagcttatctccctcctctaccccacggtcccctcctaggcaggcccctaaactgcagcagaactggcgttccaggaggccacctggggaaacgctgggcggaggggagcacttgcgtttctgtgttggaaaaacccggcccgtgtgtggacttgaaagtcggagcgggtctcaggccagctgcagccgtgcggtcgtgactgtggccccctgggggaggtcaccagcgccctggacgcagaggggcggcggcggacagacagaggccgcccatgcagggtcatggagaggccccacggacgctatccaggctcacgccctttgatccgcttgacgcttaagccacataaacgtgatcataaccaccaatttccaggaggaacacagggagagaccttctatcttctctccagcctggtctaattacagatggggtctctgtccacagcacagtcaaggggctttcgtgccaggaacttggaactttgaattc

SEQ ID NO: 348062 - DNA, 904 bp, Homo sapiens; identical to SEQ ID NO: 345840
  chr5:1057027-1057931
  hypo

SEQ ID NO: 348063 - DNA, 327 bp, Homo sapiens; identical to SEQ ID NO: 345841
  chr5:1058847-1059174
  hypo

SEQ ID NO: 348064 - DNA, 98 bp, Homo sapiens; identical to SEQ ID NO: 209967
  chr5:1059425-1059523
  hypo

SEQ ID NO: 348065 - DNA, 317 bp, Homo sapiens; identical to SEQ ID NO: 345843
  chr5:1059556-1059873
  hypo

SEQ ID NO: 348066 - DNA, 811 bp, Homo sapiens; identical to SEQ ID NO: 338625
  chr5:1062902-1063713
  hypo

SEQ ID NO: 348067 - DNA, 860 bp, Homo sapiens; identical to SEQ ID NO: 332282
  chr5:1064412-1065272
  hypo

SEQ ID NO: 348068 - DNA, 890 bp, Homo sapiens; identical to SEQ ID NO: 338627
  chr5:1065329-1066219
  hypo

SEQ ID NO: 348069 - DNA, 1417 bp, Homo sapiens; identical to SEQ ID NO: 345846
  chr5:1068627-1070044
  hypo

SEQ ID NO: 348070 - DNA, 708 bp, Homo sapiens; identical to SEQ ID NO: 338635
  chr5:1083641-1084349
  hypo

SEQ ID NO: 348071 - DNA, 822 bp, Homo sapiens
  chr5:1085196-1086018
  hypo
cgagcccacgggggttcccgccacggtcacacccagcccaccccttgcggggagctcggcgtcaaggatgatggacgagaggcgggcagagcccatgggacctggccccagccccacacccacccacggctcagaggccccgagactcacgggatgtccggggggtcgaaggcagacttgatgacgccggcatagatggccaggatggacagcacgacgcaggccaggaagaccagcgccagcttgttgacatacttgacgcccacgaagaccaccagggccatgagcacgagcgtgcacgtgccgtacacacgcatgttgtgcagcatggcggccgcctcgccacctgcagcctccgcctggaagatggccgcacccggggagatgtacgtctgtgggaacaaggccggtcgggaggccgtccccggacacaactccccagtgcccgtccctcccgcaagcccccagcgccacacaggggcctcctcccaacaggtgccggggccatcgggacgcatccgtgctggacggagcccgcgggggtcagcgcacaggcaagggacggagcccgcgggggtcagcgcacaggcgagggacggagcccgcgggggtcagcgcacaggcgagggacggagcccgcgggggtcagcgcacaggccatggacagccaggggcctgaacgtttcccaggaaccacccgggagccttagagtaaagcaacttcaggacccggggcatccgcatgtccgcactcaaaagaaacaccttctgctaagaggaatgtgactgctgcccagagagctcggcccaccccggctggac

SEQ ID NO: 348072 - DNA, 1323 bp, Homo sapiens
  chr5:1087952-1089275
  hypo
cgtattgtaattaacttattactaattaatatcatctcggttcactagttatttagttattatgtattgtaattaacttattactaattaacaaggtcagggcagtgttttgtcttcaccttccctcgtgagatacaggttccaagaactcagcctatggcacacgctgggctacaggagccactggaatcgcccgtgcctccccctccccagcccgctgcctggtgggcactgcctaccctggcaagagacggtcaccacgcagcaaaatggggaagaaaaccaaacagccgtgacctcacggctcaaacgccagaggagccagtggagaacacgcagaaggcccggctgagacccccaggcagcccccggcccggcctcgccaagcggcctcctcgcggttgccgtgcggcaaaacacagactcctctaacaggactcagggccgcggctggcgggcaccccttacctgggaccacaccgttggtagcgatcgcactcatggaaatggcggtcagcattgtctgcaaaaagacaggcagccatctgaggagagttttccaacagcctgccggcatcgcaacactcccaagtcagggtctatgacccggctcccgccgaatgccagcccccaactccagggctctccatctcaatggagtggctaggaaacaggacctggaggctcccgggcaccaggcatgcgtgtcctggttcccaccccttcccctatgacagcgacccctgaaagtgcccaaggtccttccaaactggaggtgatgtcatcaaaacacagggtgtcccttcccttggaagcctcagcccccgggtgccgccccatgacacccaccactggctgagatgcctgtccgcagacacgggtaaatgaggtgccagcacgccagtcaacacgccagcactaaccccggacagtgtggcatctcatccccgcagctgcccggctctcgtggaggagacggcgctgaacgacgtctacacgggcgtctggggagggccctactgtccggctgccaccgcccgaaggcacaaccacagcggccaggggagacggcatctggggagagccctactgtccagctgccaccgcccgaaggcacagccacacctggccgggggagactcacacatgtgcagcacatggccacgatgaggaaggactccaggacaccagccacccccacgatccacgtcaggcgcaggaagaggatgacgcccaggatgttctgcaggcacggcaggtagacgccgatgaaggtgcccatgcgcggagcctgcgacagagcatagcgtgtcccaggggctc

SEQ ID NO: 348073 - DNA, 134 bp, Homo sapiens
  chr5:1094049-1094183
  hypo
ccaggaaggagcccagaaggcaccagccgaggagcacgtcccagctcaagtgcgggactgggcccccgccacagccttcaggacagggaggccccagttccttccacgtggtgtccagtcctgtgggaggcccc

SEQ ID NO: 348074 - DNA, 277 bp, Homo sapiens; identical to SEQ ID NO: 338660
  chr5:1702104-1702381
  hypo

SEQ ID NO: 348075 - DNA, 185 bp, Homo sapiens; identical to SEQ ID NO: 338665
  chr5:1808331-1808516
  hypo

SEQ ID NO: 348076 - DNA, 297 bp, Homo sapiens; identical to SEQ ID NO: 304031
  chr5:2261313-2261610
  hypo

SEQ ID NO: 348077 - DNA, 51 bp, Homo sapiens
  chr5:3324702-3324753
  hypo
cggcgcggtggggctgggtcccaggctggctccccgccctccctcctactg

SEQ ID NO: 348078 - DNA, 283 bp, Homo sapiens
  chr5:3325333-3325616
  hypo
gccctagctgttcggcgtgtgtgtgtgtgtgtgtgagcgcgcgcgtgcgtggggttaagtgtttccataattgcatctctcttgaaaatcaaaacagaacaaaccgtgctttatgtacgagtaagagtcatgattcaacaatggggcctgcctgaaggagctgcctatttagtcacataccacagcaacctactggcttgtcattttatgatctggcacggagccgacggcgcacacggtgtcttgggcagccttgggagcccgtgacagtgctgtgaccagc

SEQ ID NO: 348079 - DNA, 170 bp, Homo sapiens; identical to SEQ ID NO: 345154
  chr5:10564301-10564471
  hypo

SEQ ID NO: 348080 - DNA, 453 bp, Homo sapiens; identical to SEQ ID NO: 338705
  chr5:14328256-14328709
  hypo

SEQ ID NO: 348081 - DNA, 478 bp, Homo sapiens; identical to SEQ ID NO: 346679
  chr5:31854462-31854940
  hypo

SEQ ID NO: 348082 - DNA, 328 bp, Homo sapiens; identical to SEQ ID NO: 332354
  chr5:43557434-43557762
  hypo

SEQ ID NO: 348083 - DNA, 50 bp, Homo sapiens; identical to SEQ ID NO: 345162
  chr5:49737299-49737349
  hypo

SEQ ID NO: 348084 - DNA, 111 bp, Homo sapiens; identical to SEQ ID NO: 345853
  chr5:67590957-67591068
  hypo

SEQ ID NO: 348085 - DNA, 114 bp, Homo sapiens; identical to SEQ ID NO: 304477
  chr5:67591157-67591271
  hypo

SEQ ID NO: 348086 - DNA, 62 bp, Homo sapiens; identical to SEQ ID NO: 338743
  chr5:74753672-74753734
  hypo

SEQ ID NO: 348087 - DNA, 50 bp, Homo sapiens; identical to SEQ ID NO: 283051
  chr5:75698194-75698244
  hypo

SEQ ID NO: 348088 - DNA, 1185 bp, Homo sapiens; identical to SEQ ID NO: 199902
  chr5:75698274-75699459
  hypo

SEQ ID NO: 348089 - DNA, 37 bp, Homo sapiens; identical to SEQ ID NO: 346704
  chr5:77268330-77268367
  hypo

SEQ ID NO: 348090 - DNA, 735 bp, Homo sapiens; identical to SEQ ID NO: 345179
  chr5:87436769-87437504
  hypo

SEQ ID NO: 348091 - DNA, 132 bp, Homo sapiens; identical to SEQ ID NO: 338767
  chr5:96121466-96121598
  hypo

SEQ ID NO: 348092 - DNA, 137 bp, Homo sapiens; identical to SEQ ID NO: 346722
  chr5:107005846-107005983
  hypo

SEQ ID NO: 348093 - DNA, 449 bp, Homo sapiens; identical to SEQ ID NO: 199970
  chr5:107006260-107006709
  hypo

SEQ ID NO: 348094 - DNA, 37 bp, Homo sapiens; identical to SEQ ID NO: 346733
  chr5:124084158-124084195
  hypo

SEQ ID NO: 348095 - DNA, 60 bp, Homo sapiens; identical to SEQ ID NO: 346734
  chr5:124084302-124084362
  hypo

SEQ ID NO: 348096 - DNA, 111 bp, Homo sapiens; identical to SEQ ID NO: 345192
  chr5:124084660-124084771
  hypo

SEQ ID NO: 348097 - DNA, 64 bp, Homo sapiens; identical to SEQ ID NO: 345193
  chr5:124084977-124085041
  hypo

SEQ ID NO: 348098 - DNA, 269 bp, Homo sapiens; identical to SEQ ID NO: 338783
  chr5:126250520-126250789
  hypo

SEQ ID NO: 348099 - DNA, 34 bp, Homo sapiens; identical to SEQ ID NO: 200020
  chr5:129240901-129240935
  hypo

SEQ ID NO: 348100 - DNA, 805 bp, Homo sapiens; identical to SEQ ID NO: 332483
  chr5:132386973-132387778
  hypo

SEQ ID NO: 348101 - DNA, 127 bp, Homo sapiens; identical to SEQ ID NO: 338810
  chr5:140905588-140905715
  hypo

SEQ ID NO: 348102 - DNA, 624 bp, Homo sapiens; identical to SEQ ID NO: 283411
  chr5:142781875-142782499
  hypo

SEQ ID NO: 348103 - DNA, 124 bp, Homo sapiens; identical to SEQ ID NO: 283412
  chr5:142782625-142782749
  hypo

SEQ ID NO: 348104 - DNA, 410 bp, Homo sapiens; identical to SEQ ID NO: 345197
  chr5:142782794-142783204
  hypo

SEQ ID NO: 348105 - DNA, 717 bp, Homo sapiens; identical to SEQ ID NO: 345198
  chr5:142783958-142784675
  hypo

SEQ ID NO: 348106 - DNA, 252 bp, Homo sapiens; identical to SEQ ID NO: 346754
  chr5:148650971-148651223
  hypo

SEQ ID NO: 348107 - DNA, 87 bp, Homo sapiens; identical to SEQ ID NO: 332540
  chr5:148724812-148724899
  hypo

SEQ ID NO: 348108 - DNA, 293 bp, Homo sapiens; identical to SEQ ID NO: 200114
  chr5:151150270-151150563
  hypo

SEQ ID NO: 348109 - DNA, 229 bp, Homo sapiens; identical to SEQ ID NO: 346758
  chr5:151150681-151150910
  hypo

SEQ ID NO: 348110 - DNA, 290 bp, Homo sapiens; identical to SEQ ID NO: 346761
  chr5:157002817-157003107
  hypo

SEQ ID NO: 348111 - DNA, 196 bp, Homo sapiens; identical to SEQ ID NO: 338845
  chr5:168112681-168112877
  hypo

SEQ ID NO: 348112 - DNA, 214 bp, Homo sapiens; identical to SEQ ID NO: 338846
  chr5:168189525-168189739
  hypo

SEQ ID NO: 348113 - DNA, 129 bp, Homo sapiens
  chr5:168195266-168195395
  hypo
aaggtcaggaagcagcgtcagagagaggacaggagcgctcagaggaagcagcgtggagaagcggaagccggagcaggcccccactgagcgtgattagtatcaggagtggggttccactggaacacttcc

SEQ ID NO: 348114 - DNA, 173 bp, Homo sapiens
  chr5:171533446-171533619
  hypo
cgaagggcccgggggggctcagaaacgcctgaagacccccaggccccaacctctcctttggagctagcagcaccaggagaacgctaccactgcacctccccagccccgtccaccacatattccagccctaatcccggcgcaggcaccccggcaggtggccctgcccctgcccc

SEQ ID NO: 348115 - DNA, 108 bp, Homo sapiens; identical to SEQ ID NO: 338860
  chr5:172191069-172191177
  hypo

SEQ ID NO: 348116 - DNA, 258 bp, Homo sapiens
  chr5:172353785-172354043
  hypo
cggggcacagcagacgcacgcacgcagtggataccagctattaccattattgttgctctcatcacagccacatcatcatccttagttgaactaattacctaagatcccacagggagctatggcagaaccaggatctgttctgcctccaggtcgcaccgtgagaacaggtctgtgggtggcccagtcagctgtgaccacatggctgcctcccccacacctcactctcctcctgctcagactcctcccatcgatagtggc

SEQ ID NO: 348117 - DNA, 84 bp, Homo sapiens
  chr5:172354118-172354202
  hypo
gcagacaggagagcacgcatacctttcgtgcacaccaacacacatgagctcacatggccccagacacgtgcacagaatgggccc

SEQ ID NO: 348118 - DNA, 211 bp, Homo sapiens; identical to SEQ ID NO: 338871
  chr5:175777496-175777707
  hypo

SEQ ID NO: 348119 - DNA, 194 bp, Homo sapiens; identical to SEQ ID NO: 345870
  chr5:176558657-176558851
  hypo

SEQ ID NO: 348120 - DNA, 144 bp, Homo sapiens; identical to SEQ ID NO: 345871
  chr5:176558908-176559052
  hypo

SEQ ID NO: 348121 - DNA, 248 bp, Homo sapiens; identical to SEQ ID NO: 283604
  chr5:176560001-176560249
  hypo

SEQ ID NO: 348122 - DNA, 290 bp, Homo sapiens; identical to SEQ ID NO: 345203
  chr5:176560318-176560608
  hypo

SEQ ID NO: 348123 - DNA, 192 bp, Homo sapiens; identical to SEQ ID NO: 345874
  chr5:176764238-176764430
  hypo

SEQ ID NO: 348124 - DNA, 76 bp, Homo sapiens; identical to SEQ ID NO: 210489
  chr5:176795049-176795125
  hypo

SEQ ID NO: 348125 - DNA, 238 bp, Homo sapiens
  chr5:176795288-176795526
  hypo
acaagatgctctatgggctagagtcactactcaggcccatttacgtggtggccctcattccaagttgctgtccttactgcgtctcccagcttgctctgcgtagccaacccttcagcctccttacttgtctcactacattggtccccatatatgtcatgggtacacatcctcagttggcaaatgtgtgcacatgtgcagcacccaggtgtgtatacacagcacgtgtgtgggaatcagc

SEQ ID NO: 348126 - DNA, 121 bp, Homo sapiens; identical to SEQ ID NO: 338907
  chr5:179023553-179023674
  hypo

SEQ ID NO: 348127 - DNA, 596 bp, Homo sapiens; identical to SEQ ID NO: 338922
  chr5:180218508-180219104
  hypo

SEQ ID NO: 348128 - DNA, 96 bp, Homo sapiens; identical to SEQ ID NO: 346764
  chr5:180480142-180480238
  hypo

SEQ ID NO: 348129 - DNA, 829 bp, Homo sapiens; identical to SEQ ID NO: 346765
  chr5:180480302-180481131
  hypo

SEQ ID NO: 348130 - DNA, 55 bp, Homo sapiens; identical to SEQ ID NO: 346767
  chr6:393764-393819
  hypo

SEQ ID NO: 348131 - DNA, 393 bp, Homo sapiens; identical to SEQ ID NO: 346768
  chr6:710660-711053
  hypo

SEQ ID NO: 348132 - DNA, 266 bp, Homo sapiens; identical to SEQ ID NO: 345875
  chr6:3285535-3285801
  hypo

SEQ ID NO: 348133 - DNA, 307 bp, Homo sapiens; identical to SEQ ID NO: 338948
  chr6:3724319-3724626
  hypo

SEQ ID NO: 348134 - DNA, 37 bp, Homo sapiens; identical to SEQ ID NO: 345876
  chr6:4910947-4910984
  hypo

SEQ ID NO: 348135 - DNA, 327 bp, Homo sapiens; identical to SEQ ID NO: 338973
  chr6:7887548-7887875
  hypo

SEQ ID NO: 348136 - DNA, 242 bp, Homo sapiens; identical to SEQ ID NO: 338978
  chr6:7893721-7893963
  hypo

SEQ ID NO: 348137 - DNA, 77 bp, Homo sapiens; identical to SEQ ID NO: 346777
  chr6:11043624-11043701
  hypo

SEQ ID NO: 348138 - DNA, 394 bp, Homo sapiens; identical to SEQ ID NO: 345879
  chr6:15513386-15513780
  hypo

SEQ ID NO: 348139 - DNA, 48 bp, Homo sapiens; identical to SEQ ID NO: 345880
  chr6:15513981-15514029
  hypo

SEQ ID NO: 348140 - DNA, 120 bp, Homo sapiens; identical to SEQ ID NO: 338991
  chr6:16322061-16322181
  hypo

SEQ ID NO: 348141 - DNA, 213 bp, Homo sapiens; identical to SEQ ID NO: 200330
  chr6:26198924-26199137
  hypo

SEQ ID NO: 348142 - DNA, 313 bp, Homo sapiens
  chr6:37023826-37024139
  hypo
cggccacatcttctgagctgcggggtggaggcctggctgcccacctgcattccttactctgcgtacccatgatctcatcccggccctcagccacccacagggcaggaggctttgccccattgtgcagatgagacagccatgccctgccctgggatggtcatttggcctgggctcagggcactctagtgggccccaggctccggcggggtgagtggaatgtggtcacggaggccaccccacgctgtcttgttgggtttaatgagccccattggtctgtccataccctgaataagctctggtctaccgaccctcc

SEQ ID NO: 348143 - DNA, 369 bp, Homo sapiens; identical to SEQ ID NO: 345232
  chr6:37666475-37666844
  hypo

SEQ ID NO: 348144 - DNA, 218 bp, Homo sapiens; identical to SEQ ID NO: 345233
  chr6:37666866-37667084
  hypo

SEQ ID NO: 348145 - DNA, 171 bp, Homo sapiens; identical to SEQ ID NO: 339051
  chr6:41827211-41827382
  hypo

SEQ ID NO: 348146 - DNA, 173 bp, Homo sapiens; identical to SEQ ID NO: 345885
  chr6:43748290-43748463
  hypo

SEQ ID NO: 348147 - DNA, 176 bp, Homo sapiens; identical to SEQ ID NO: 346816
  chr6:44044201-44044377
  hypo

SEQ ID NO: 348148 - DNA, 97 bp, Homo sapiens; identical to SEQ ID NO: 346817
  chr6:44044450-44044547
  hypo

SEQ ID NO: 348149 - DNA, 372 bp, Homo sapiens; identical to SEQ ID NO: 345236
  chr6:46097250-46097622
  hypo

SEQ ID NO: 348150 - DNA, 521 bp, Homo sapiens; identical to SEQ ID NO: 345237
  chr6:46097694-46098215
  hypo

SEQ ID NO: 348151 - DNA, 636 bp, Homo sapiens; identical to SEQ ID NO: 346822
  chr6:52227115-52227751
  hypo

SEQ ID NO: 348152 - DNA, 72 bp, Homo sapiens
  chr6:52344303-52344375
  hypo
cgtttaaagaaagctcattagtttctgtcataaatgcatacctgtgaatttatcattggagggttaatacta

SEQ ID NO: 348153 - DNA, 159 bp, Homo sapiens
  chr6:52344405-52344564
  hypo
ccaagctaagtgtgttgctaccttctctccagtgtttggtcaccggttcatcatccttgatacagacgagtatgttttgaaatacatggagagcaacgctgcccagtattcaccagaagcactcgcgtcaattcagaaccatgtccgaaagcgagaagc

SEQ ID NO: 348154 - DNA, 294 bp, Homo sapiens; identical to SEQ ID NO: 200490
  chr6:69344649-69344943
  hypo

SEQ ID NO: 348155 - DNA, 40 bp, Homo sapiens; identical to SEQ ID NO: 346834
  chr6:74019373-74019413
  hypo

SEQ ID NO: 348156 - DNA, 102 bp, Homo sapiens; identical to SEQ ID NO: 346835
  chr6:74020094-74020196
  hypo

SEQ ID NO: 348157 - DNA, 255 bp, Homo sapiens; identical to SEQ ID NO: 346839
  chr6:90142647-90142902
  hypo

SEQ ID NO: 348158 - DNA, 372 bp, Homo sapiens; identical to SEQ ID NO: 346840
  chr6:91005702-91006074
  hypo

SEQ ID NO: 348159 - DNA, 352 bp, Homo sapiens; identical to SEQ ID NO: 346842
  chr6:106533693-106534045
  hypo

SEQ ID NO: 348160 - DNA, 155 bp, Homo sapiens; identical to SEQ ID NO: 345249
  chr6:106961023-106961178
  hypo

SEQ ID NO: 348161 - DNA, 314 bp, Homo sapiens; identical to SEQ ID NO: 200609
  chr6:107810308-107810622
  hypo

SEQ ID NO: 348162 - DNA, 128 bp, Homo sapiens; identical to SEQ ID NO: 346850
  chr6:107810665-107810793
  hypo

SEQ ID NO: 348163 - DNA, 114 bp, Homo sapiens; identical to SEQ ID NO: 339115
  chr6:109059982-109060096
  hypo

SEQ ID NO: 348164 - DNA, 264 bp, Homo sapiens; identical to SEQ ID NO: 346851
  chr6:111409052-111409316
  hypo

SEQ ID NO: 348165 - DNA, 273 bp, Homo sapiens; identical to SEQ ID NO: 200623
  chr6:111409368-111409641
  hypo

SEQ ID NO: 348166 - DNA, 135 bp, Homo sapiens; identical to SEQ ID NO: 339121
  chr6:111766152-111766287
  hypo

SEQ ID NO: 348167 - DNA, 428 bp, Homo sapiens
  chr6:128901277-128901705
  hypo
cgatgtcgacactctgcacatgctcctcaaacttggtgatctcctcctccagcaagtctgtccccactttgtcgtcctccaccacacactgaatctgcatcttccggataccatagcccacggacgccagcttggaggccccgctcactagcccatccagctggatagagcgcacacatgcctccagctgggtcatgtccgtcttattgtcccaaggcttgatgtccagcaggatggaggacttggccaccagcgagggattcttggccttcttggcgtacagccgcagccgctcctcccgcagccgccttgcctccttgtcttcctccttattgtcgctgccaacagatcaatgtcatcgtcctcgttatcctctgcttcttggccggggtcgtagtaaggggggcgaggggaggggcgctccactt

SEQ ID NO: 348168 - DNA, 103 bp, Homo sapiens
  chr6:131455849-131455952
  hypo
agcctttacgccagctgttgtggctgtgtaggggtcttcttttcttccatccctattctacgatgcattcaacataagcgaagtgttattattcacgaaaggc

SEQ ID NO: 348169 - DNA, 132 bp, Homo sapiens
  chr6:136556331-136556463
  hypo
tcctagatcttaagcaaccgggtgatcgtgttgccatttgctaatatgcaaaagacgtgggaaagaacaggttttcaaggtggcggaaaagaacaggtaggaaggaaaagtcctgttttggacctgtgaaac

SEQ ID NO: 348170 - DNA, 528 bp, Homo sapiens; identical to SEQ ID NO: 346860
  chr6:146136035-146136563
  hypo

SEQ ID NO: 348171 - DNA, 232 bp, Homo sapiens; identical to SEQ ID NO: 346861
  chr6:146136564-146136796
  hypo

SEQ ID NO: 348172 - DNA, 63 bp, Homo sapiens; identical to SEQ ID NO: 339159
  chr6:157159632-157159695
  hypo

SEQ ID NO: 348173 - DNA, 210 bp, Homo sapiens; identical to SEQ ID NO: 339161
  chr6:157351875-157352085
  hypo

SEQ ID NO: 348174 - DNA, 138 bp, Homo sapiens
  chr6:158093637-158093775
  hypo
cggtttctctcttctcgcaccccaccctccccgcccgtgccctgtccccatccctgtccctccccacctctgccccctcctctccaccttctctttgctggcgcctcccgctctccagtgcgaccaagaccagtgcat

SEQ ID NO: 348175 - DNA, 172 bp, Homo sapiens
  chr6:158094082-158094254
  hypo
ctgggcctggccagccaggactccctgcatgaggactctgtgcgcggcctggtgaagctcagctccgtgtgacccacatggccccaggccgggggacaccagaggctcctccatgggcagcaggagtgagcggaggggtgtgtcccacagcgactttcccagccaatgccac

SEQ ID NO: 348176 - DNA, 520 bp, Homo sapiens; identical to SEQ ID NO: 346865
  chr6:158402113-158402633
  hypo

SEQ ID NO: 348177 - DNA, 41 bp, Homo sapiens; identical to SEQ ID NO: 346866
  chr6:159591277-159591318
  hypo

SEQ ID NO: 348178 - DNA, 238 bp, Homo sapiens; identical to SEQ ID NO: 200741
  chr6:163837231-163837469
  hypo

SEQ ID NO: 348179 - DNA, 506 bp, Homo sapiens; identical to SEQ ID NO: 345259
  chr6:170124879-170125385
  hypo

SEQ ID NO: 348180 - DNA, 550 bp, Homo sapiens
  chr7:287728-288278
  hypo
cgagccgtctgacaggtggagggggagggtgctccacgcagaggcgtggtcgggccttgggtcccgggtcggccctggcagacggcccacgtccctccacacctggtcacctcgcctcacaggacaatcaccacgtcctccgtcagcaagaaaagctctcgccctgcattctccatttaattaagcgagtgggagcctgtggtgtggttcagaaggagttccattaaaagtggctcctttaatttaattttgttttaaatttagccctggaatgagggcaggctttagctatgcaggcagttggtgctgtgtgcccatcagtgaggcatcgccagccccagtccctcaggggcctctcccacccccatcaccgtggggccaggcagagccaccggacctagggctgggtttattcggaggcagggacacagaggcccgctgagccgcacagagcacagaccctcccctgccccgttcttatttggaggcagggacacagaggcccgctgagccgcacagagcacagaccattccccgcccgtttcttgcc

SEQ ID NO: 348181 - DNA, 468 bp, Homo sapiens
  chr7:288328-288796
  hypo
catgaccaaggagatccgggacgtcacacgggacaagaagctctggaggaccttcttcatctctccaggtagcctggcacgggggcccgcattcatctctccaggtagcctggcacgggggcccgcattcatctctccaggtagcctggcacggggagcccacattcatctcgccaggtagcctggcacgggggcccacattcacctctccaggtagcctggcacggggggccgcattcatctcttcaggtagcctggcacggggagcccacattcatctcgccaggtagcctggcacgggggcccacattcacctctccaggtagcctggcacgggggcccgcattcatctctccaggtagcctggcatggggagcccacattcacctccccaggtagcctggcacggggagaccacattcatctcgccaggtagcctggcacaggggcccgcattcatctctccac

SEQ ID NO: 348182 - DNA, 176 bp, Homo sapiens
  chr7:920980-921156
  hypo
cccaccccaccccatccccggcacccgtgcatctgcgggctgcacttaggtgaggtggtgtttcctggagttttacgtatgtggaatcacagtgcgcactttctgtctaaccgcttgaattcattcaccacggaggctgggagactcctcctggagcgtccgcagttccttttatc

SEQ ID NO: 348183 - DNA, 594 bp, Homo sapiens; identical to SEQ ID NO: 339268
  chr7:943355-943949
  hypo

SEQ ID NO: 348184 - DNA, 139 bp, Homo sapiens; identical to SEQ ID NO: 211166
  chr7:1315705-1315844
  hypo

SEQ ID NO: 348185 - DNA, 95 bp, Homo sapiens; identical to SEQ ID NO: 346873
  chr7:1705153-1705248
  hypo

SEQ ID NO: 348186 - DNA, 206 bp, Homo sapiens
  chr7:1931663-1931869
  hypo
cgccagccctgcgagctccgttcacggtgagcaccctacgcaggtgcaccgtcttccacccttcatacatcatgtttatggcaccttttccatatttaaacacgtacagacacgcagatgcttagcactgcgccacggtggtctactgcattcagcacagtcacgcactgcacacttttgcagcttggcagcagccggctaaacca

SEQ ID NO: 348187 - DNA, 45 bp, Homo sapiens
  chr7:1970797-1970842
  hypo
cgcacggtcacaggagcgagggcgcgtcgtggggtccacgtcaag

SEQ ID NO: 348188 - DNA, 88 bp, Homo sapiens
  chr7:1970921-1971009
  hypo
acgtcaagggtctgctgacactgcgggcacacccttgctcctcatctggagaatggggaggggacagccctctctggcagcaagcggc

SEQ ID NO: 348189 - DNA, 253 bp, Homo sapiens
  chr7:2071776-2072029
  hypo
cgggacgcccggccccagtccctgtccagtgcctggaacagaacaggtgctcaggaactgtgtgttcaattaaaaaatgaacgagtgaaaccatcagccaatcagtcctcggaaccacctcctgaggcaggctggagtcctccctttcagatgaggacaaggctccaggggaaggcgcgcgccccaggtctccagcctccgtgaagccgagcctgggctcttggccatcatgctaacgggcaggtgggaaagc

SEQ ID NO: 348190 - DNA, 326 bp, Homo sapiens; identical to SEQ ID NO: 345891
  chr7:2208344-2208670
  hypo

SEQ ID NO: 348191 - DNA, 91 bp, Homo sapiens; identical to SEQ ID NO: 345892
  chr7:2208844-2208935
  hypo

SEQ ID NO: 348192 - DNA, 236 bp, Homo sapiens; identical to SEQ ID NO: 211252
  chr7:2233056-2233292
  hypo

SEQ ID NO: 348193 - DNA, 136 bp, Homo sapiens; identical to SEQ ID NO: 345894
  chr7:2237982-2238118
  hypo

SEQ ID NO: 348194 - DNA, 242 bp, Homo sapiens; identical to SEQ ID NO: 339340
  chr7:2448743-2448985
  hypo

SEQ ID NO: 348195 - DNA, 468 bp, Homo sapiens
  chr7:2472811-2473279
  hypo
cgcgtgatgatcgtgctgagcggaagcctgctgcaccgcggtgcgccctaccgcgacccgctgcgcatcccgcgcgagcacgtgcacaacgccagcgcgcacctgaccttcaacaagttctggcgccgctacgggaagctctcccgccacctcatgaaggtcaagctcaagaagtacaccaagttcctcttcgtgcgcgaccccttcgtgcgcctgatctccgccttccgcagcaagttcgagctggagaacgaggagttctaccgcaagttcgccgtgcccatgctgcggctgtacgccaaccacaccagcctgcccgcctcggcgcgcgaggccttccgcgctggcctcaaggtgtccttcgccaacttcatccagtacctgctggacccgcacacggagaagctggcgcccttcaacgagcactggcggcaggtgtaccgcctctgccacccgtgccagatcgac

SEQ ID NO: 348196 - DNA, 328 bp, Homo sapiens; identical to SEQ ID NO: 345896
  chr7:2473779-2474107
  hypo

SEQ ID NO: 348197 - DNA, 145 bp, Homo sapiens; identical to SEQ ID NO: 339351
  chr7:2804422-2804567
  hypo

SEQ ID NO: 348198 - DNA, 224 bp, Homo sapiens; identical to SEQ ID NO: 345897
  chr7:4856619-4856843
  hypo

SEQ ID NO: 348199 - DNA, 100 bp, Homo sapiens; identical to SEQ ID NO: 345898
  chr7:4857296-4857396
  hypo

SEQ ID NO: 348200 - DNA, 237 bp, Homo sapiens; identical to SEQ ID NO: 339373
  chr7:5230941-5231178
  hypo

SEQ ID NO: 348201 - DNA, 635 bp, Homo sapiens; identical to SEQ ID NO: 346875
  chr7:5632268-5632903
  hypo

SEQ ID NO: 348202 - DNA, 107 bp, Homo sapiens; identical to SEQ ID NO: 211378
  chr7:6443719-6443826
  hypo

SEQ ID NO: 348203 - DNA, 100 bp, Homo sapiens; identical to SEQ ID NO: 211379
  chr7:6443856-6443956
  hypo

SEQ ID NO: 348204 - DNA, 60 bp, Homo sapiens; identical to SEQ ID NO: 211380
  chr7:6443990-6444050
  hypo

SEQ ID NO: 348205 - DNA, 162 bp, Homo sapiens; identical to SEQ ID NO: 339401
  chr7:6694972-6695134
  hypo

SEQ ID NO: 348206 - DNA, 209 bp, Homo sapiens; identical to SEQ ID NO: 211394
  chr7:7605822-7606031
  hypo

SEQ ID NO: 348207 - DNA, 76 bp, Homo sapiens; identical to SEQ ID NO: 339406
  chr7:7612745-7612821
  hypo

SEQ ID NO: 348208 - DNA, 104 bp, Homo sapiens; identical to SEQ ID NO: 346877
  chr7:18125868-18125972
  hypo

SEQ ID NO: 348209 - DNA, 218 bp, Homo sapiens; identical to SEQ ID NO: 200838
  chr7:18126225-18126443
  hypo

SEQ ID NO: 348210 - DNA, 59 bp, Homo sapiens; identical to SEQ ID NO: 200840
  chr7:19156644-19156703
  hypo

SEQ ID NO: 348211 - DNA, 140 bp, Homo sapiens; identical to SEQ ID NO: 345262
  chr7:22893437-22893577
  hypo

SEQ ID NO: 348212 - DNA, 1088 bp, Homo sapiens; identical to SEQ ID NO: 345263
  chr7:22893607-22894695
  hypo

SEQ ID NO: 348213 - DNA, 209 bp, Homo sapiens; identical to SEQ ID NO: 346882
  chr7:23052818-23053027
  hypo

SEQ ID NO: 348214 - DNA, 595 bp, Homo sapiens; identical to SEQ ID NO: 346883
  chr7:23053080-23053675
  hypo

SEQ ID NO: 348215 - DNA, 228 bp, Homo sapiens; identical to SEQ ID NO: 346885
  chr7:23513246-23513474
  hypo

SEQ ID NO: 348216 - DNA, 221 bp, Homo sapiens; identical to SEQ ID NO: 333064
  chr7:23570157-23570378
  hypo

SEQ ID NO: 348217 - DNA, 164 bp, Homo sapiens
  chr7:26283815-26283979
  hypo
ccgaaaatccaacgttggtccaagaaggctctggtgtgtgccaggcactcactgatcatctggtcttacggagacgcctctaagccatttgatcccgttccgggaacgaaaatggcagcggtgacggttgctccttttatggtctccctccggctgtccaggac

SEQ ID NO: 348218 - DNA, 142 bp, Homo sapiens; identical to SEQ ID NO: 345270
  chr7:27136790-27136932
  hypo

SEQ ID NO: 348219 - DNA, 126 bp, Homo sapiens; identical to SEQ ID NO: 339438
  chr7:27831654-27831780
  hypo

SEQ ID NO: 348220 - DNA, 189 bp, Homo sapiens
  chr7:27907637-27907826
  hypo
cgcttggtgactcaggcaagacattcaattccatttgccattttcttctcttgctacagagcccacttcagaggattcaatgagtgaatacgacaacggtgcttggatcagtgcctgccatactgtcagcactagtcgttactattttcactggttgaacagacacgtgagttcacacatgacaccatc

SEQ ID NO: 348221 - DNA, 70 bp, Homo sapiens
  chr7:27908068-27908138
  hypo
cgcctcacgggggtttctcaccatccactctgaacaaggcgtggagttgcttgctccagcctggctggtc

SEQ ID NO: 348222 - DNA, 496 bp, Homo sapiens; identical to SEQ ID NO: 200916
  chr7:29234008-29234504
  hypo

SEQ ID NO: 348223 - DNA, 159 bp, Homo sapiens; identical to SEQ ID NO: 345272
  chr7:29234886-29235045
  hypo

SEQ ID NO: 348224 - DNA, 254 bp, Homo sapiens; identical to SEQ ID NO: 339463
  chr7:36124398-36124652
  hypo

SEQ ID NO: 348225 - DNA, 168 bp, Homo sapiens; identical to SEQ ID NO: 345273
  chr7:37960958-37961126
  hypo

SEQ ID NO: 348226 - DNA, 408 bp, Homo sapiens; identical to SEQ ID NO: 200954
  chr7:42276904-42277312
  hypo

SEQ ID NO: 348227 - DNA, 369 bp, Homo sapiens; identical to SEQ ID NO: 346904
  chr7:44365258-44365627
  hypo

SEQ ID NO: 348228 - DNA, 51 bp, Homo sapiens
  chr7:44740672-44740723
  hypo
ctgccctgggataccgcgggggtgggagtatggggtggaggcttgcagctc

SEQ ID NO: 348229 - DNA, 102 bp, Homo sapiens; identical to SEQ ID NO: 345274
  chr7:50344738-50344840
  hypo

SEQ ID NO: 348230 - DNA, 56 bp, Homo sapiens; identical to SEQ ID NO: 345910
  chr7:50560501-50560557
  hypo

SEQ ID NO: 348231 - DNA, 220 bp, Homo sapiens; identical to SEQ ID NO: 345911
  chr7:50560663-50560883
  hypo

SEQ ID NO: 348232 - DNA, 60 bp, Homo sapiens; identical to SEQ ID NO: 200992
  chr7:64974448-64974508
  hypo

SEQ ID NO: 348233 - DNA, 51 bp, Homo sapiens; identical to SEQ ID NO: 346909
  chr7:65037711-65037762
  hypo

SEQ ID NO: 348234 - DNA, 45 bp, Homo sapiens; identical to SEQ ID NO: 346914
  chr7:87258398-87258443
  hypo

SEQ ID NO: 348235 - DNA, 77 bp, Homo sapiens; identical to SEQ ID NO: 201060
  chr7:98971600-98971677
  hypo

SEQ ID NO: 348236 - DNA, 396 bp, Homo sapiens; identical to SEQ ID NO: 346916
  chr7:98971810-98972206
  hypo

SEQ ID NO: 348237 - DNA, 215 bp, Homo sapiens; identical to SEQ ID NO: 201064
  chr7:99156600-99156815
  hypo

SEQ ID NO: 348238 - DNA, 77 bp, Homo sapiens; identical to SEQ ID NO: 345277
  chr7:99156982-99157059
  hypo

SEQ ID NO: 348239 - DNA, 87 bp, Homo sapiens; identical to SEQ ID NO: 339569
  chr7:100030648-100030735
  hypo

SEQ ID NO: 348240 - DNA, 236 bp, Homo sapiens; identical to SEQ ID NO: 339571
  chr7:100064586-100064822
  hypo

SEQ ID NO: 348241 - DNA, 196 bp, Homo sapiens; identical to SEQ ID NO: 345915
  chr7:101603073-101603269
  hypo

SEQ ID NO: 348242 - DNA, 242 bp, Homo sapiens; identical to SEQ ID NO: 345916
  chr7:101603308-101603550
  hypo

SEQ ID NO: 348243 - DNA, 429 bp, Homo sapiens; identical to SEQ ID NO: 339587
  chr7:101649223-101649652
  hypo

SEQ ID NO: 348244 - DNA, 311 bp, Homo sapiens
  chr7:101652279-101652590
  hypo
cggccccgcgtgctccagcaggtctgcatgattaacctgaattgcagtgttcagaggctcggcctgccagccacagcggttccagatgaaatgcagcttagaaggcagcatggtgtagtagctttggcgccagccgcacccagagtttggattgtagccagatggcctcaggtgcaatgtataacctctgggaattccagatttcctatttacacgacagggatgattccatacctgaagggctgtttggaagcatctagaagcaagcacagtggagtggctgtcatgacgctgaccgcacaaatgatggt

SEQ ID NO: 348245 - DNA, 75 bp, Homo sapiens; identical to SEQ ID NO: 339595
  chr7:105280248-105280323
  hypo

SEQ ID NO: 348246 - DNA, 251 bp, Homo sapiens; identical to SEQ ID NO: 201131
  chr7:106684920-106685171
  hypo

SEQ ID NO: 348247 - DNA, 118 bp, Homo sapiens; identical to SEQ ID NO: 345917
  chr7:107483576-107483694
  hypo

SEQ ID NO: 348248 - DNA, 46 bp, Homo sapiens
  chr7:129330248-129330294
  hypo
cgtaagtacaagagcatgatcctggaagacctggagtctgctctgg

SEQ ID NO: 348249 - DNA, 89 bp, Homo sapiens
  chr7:129330351-129330440
  hypo
acggaattccagtctctgtggacaaaatgacccaggtgaggggtgggaggtgaggaggagactcaaagacaagtggcacaggtgtgggc

SEQ ID NO: 348250 - DNA, 194 bp, Homo sapiens; identical to SEQ ID NO: 339621
  chr7:129470923-129471117
  hypo

SEQ ID NO: 348251 - DNA, 177 bp, Homo sapiens
  chr7:129483449-129483626
  hypo
taaatccatggatcagagatgatcaccctcctccccaaagaatccctcacaagtgcaaagaagcatgctaagcaaaggacgttcagatgtttctgtggctattcacagagacggtgtgcttgttttcatgcagctccaccgcaggaggtaacccgcagacacctgcacacagcgaac

SEQ ID NO: 348252 - DNA, 31 bp, Homo sapiens; identical to SEQ ID NO: 345918
  chr7:131041484-131041515
  hypo

SEQ ID NO: 348253 - DNA, 61 bp, Homo sapiens; identical to SEQ ID NO: 345919
  chr7:132418888-132418949
  hypo

SEQ ID NO: 348254 - DNA, 42 bp, Homo sapiens; identical to SEQ ID NO: 345920
  chr7:132419066-132419108
  hypo

SEQ ID NO: 348255 - DNA, 157 bp, Homo sapiens
  chr7:134880754-134880911
  hypo
cgactcccatgactctactgccatgactgtggccctcgtccaagcccccattctccgccatctcctgctggccacacctccacgtgtactgcctgaaaatctgagcttcccagggtttccttggccccaggcccaacccacctgcagtgcatgatgg

SEQ ID NO: 348256 - DNA, 211 bp, Homo sapiens
  chr7:134880941-134881152
  hypo
ccagcacaataaagggctgctcggggcggactcctccaccctcagggcctgccgaggatgcccgagtcagtggctccactggctccgtgtggagctctgggcagggctcagcctctgggccactggcttctggtttcttctctgcacactgtcacaagcagggtggggacaagtcagccaggaaagggtcccccacaccagggtgtacacc

SEQ ID NO: 348257 - DNA, 85 bp, Homo sapiens; identical to SEQ ID NO: 345921
  chr7:134918319-134918404
  hypo

SEQ ID NO: 348258 - DNA, 132 bp, Homo sapiens; identical to SEQ ID NO: 345922
  chr7:134918661-134918793
  hypo

SEQ ID NO: 348259 - DNA, 176 bp, Homo sapiens; identical to SEQ ID NO: 339647
  chr7:139717431-139717607
  hypo

SEQ ID NO: 348260 - DNA, 362 bp, Homo sapiens; identical to SEQ ID NO: 345285
  chr7:139930346-139930708
  hypo

SEQ ID NO: 348261 - DNA, 31 bp, Homo sapiens; identical to SEQ ID NO: 345924
  chr7:140156493-140156524
  hypo

SEQ ID NO: 348262 - DNA, 503 bp, Homo sapiens; identical to SEQ ID NO: 339660
  chr7:148480954-148481457
  hypo

SEQ ID NO: 348263 - DNA, 163 bp, Homo sapiens; identical to SEQ ID NO: 345926
  chr7:148851234-148851397
  hypo

SEQ ID NO: 348264 - DNA, 117 bp, Homo sapiens; identical to SEQ ID NO: 339668
  chr7:150006604-150006721
  hypo

SEQ ID NO: 348265 - DNA, 846 bp, Homo sapiens; identical to SEQ ID NO: 333298
  chr7:150671471-150672317
  hypo

SEQ ID NO: 348266 - DNA, 112 bp, Homo sapiens; identical to SEQ ID NO: 346943
  chr7:150714968-150715080
  hypo

SEQ ID NO: 348267 - DNA, 295 bp, Homo sapiens; identical to SEQ ID NO: 285522
  chr7:150715323-150715618
  hypo

SEQ ID NO: 348268 - DNA, 340 bp, Homo sapiens; identical to SEQ ID NO: 345927
  chr7:150758626-150758966
  hypo

SEQ ID NO: 348269 - DNA, 148 bp, Homo sapiens
  chr7:150774065-150774213
  hypo
ccggccgtcccggcagaaatgccagcgttcccgcaacaccagcaccaccctgcagggggagggacgtggctcagggcatggcgggcaaggtggccagggctcccccaccctgcctcctttacctctgggcagggtctcgagtagtggc

SEQ ID NO: 348270 - DNA, 346 bp, Homo sapiens; identical to SEQ ID NO: 308623
  chr7:150774358-150774704
  hypo

SEQ ID NO: 348271 - DNA, 370 bp, Homo sapiens; identical to SEQ ID NO: 333305
  chr7:151038589-151038959
  hypo

SEQ ID NO: 348272 - DNA, 697 bp, Homo sapiens; identical to SEQ ID NO: 346946
  chr7:151722447-151723144
  hypo

SEQ ID NO: 348273 - DNA, 34 bp, Homo sapiens; identical to SEQ ID NO: 346947
  chr7:151723206-151723240
  hypo

SEQ ID NO: 348274 - DNA, 39 bp, Homo sapiens; identical to SEQ ID NO: 345928
  chr7:155581980-155582019
  hypo

SEQ ID NO: 348275 - DNA, 288 bp, Homo sapiens; identical to SEQ ID NO: 339712
  chr7:155916075-155916363
  hypo

SEQ ID NO: 348276 - DNA, 458 bp, Homo sapiens; identical to SEQ ID NO: 339722
  chr7:157052694-157053152
  hypo

SEQ ID NO: 348277 - DNA, 650 bp, Homo sapiens
  chr7:157202474-157203124
  hypo
cgctgtgcctgcaggtgtggccgacgacgatgccctcgctgaggagcgcatgcggagaggccagaacgccctgccagcccagcctgccggcctccgcccgccgaagccgccccggcctgcctcgctgctgagacacgcgcctcactgtctctctgaggaggagggcgagcaggaccgacctcgggcacccgggccctgggaccccctcgcgtccgcagcaggtgtgcaaagggaggcagccgtggagcaggcgcagagtgagacttctctgggtgccagaggacagcgaggacacaaaccgcgcctgggctgctgtgttctgacctgagcgggcgtgggcggtcgggcggggcgggaggaggtagcctcgctctgctcctctcccgctcgcggcgccccacgccacggtggctccgggccccccaccgttaaaacggggtccgcgtgtcctgtacgcagcgtgttgctccgcaaaggatgacagagctgccacggcagtgcgaggtgctgcttttaccgtagacgtgccttttcgtagctttcagcgtagagcttgaggcctgtggcttaggccgggtggtctcgtgctggtggggtctgcgtttgcccctgcccctccgtcagcttcaccttctcgtgccttcttctgc

SEQ ID NO: 348278 - DNA, 296 bp, Homo sapiens
  chr7:157445780-157446076
  hypo
cgctcttggtgctgagcctgccccccagacggtgcagccggcctctcccacctgctggggctcctcacatctagcttggcctccagacatcaccaacctctgctgtttatttcatcggatcgtggggttcagatgccacgttttgtccaacgtgccccaggagtggctgcatgtcaggaacatgtcgctgggaatctctgtggcttatctgaccatcctgccatcctcaggtgaggggcactgaggtggccggttgggtgtctggcggaaacgaggctttgcgcacagagggctgg

SEQ ID NO: 348279 - DNA, 69 bp, Homo sapiens; identical to SEQ ID NO: 339741
  chr7:157446148-157446217
  hypo

SEQ ID NO: 348280 - DNA, 332 bp, Homo sapiens; identical to SEQ ID NO: 339756
  chr7:157621949-157622281
  hypo

SEQ ID NO: 348281 - DNA, 203 bp, Homo sapiens; identical to SEQ ID NO: 339758
  chr7:157642963-157643166
  hypo

SEQ ID NO: 348282 - DNA, 145 bp, Homo sapiens; identical to SEQ ID NO: 339765
  chr7:157744287-157744432
  hypo

SEQ ID NO: 348283 - DNA, 410 bp, Homo sapiens; identical to SEQ ID NO: 339766
  chr7:157853839-157854249
  hypo

SEQ ID NO: 348284 - DNA, 38 bp, Homo sapiens
  chr7:157934555-157934593
  hypo
cggacagagtcctttaaagtcaatctgtacacgaaatg

SEQ ID NO: 348285 - DNA, 92 bp, Homo sapiens
  chr7:157934659-157934751
  hypo
gggtggccgagtgccccgctctggccgacgttgaggcctctgaattgttcggcagacagtggcggcttctttaccttcgggttgaagtgtcc

SEQ ID NO: 348286 - DNA, 264 bp, Homo sapiens; identical to SEQ ID NO: 339776
  chr7:157936035-157936299
  hypo

SEQ ID NO: 348287 - DNA, 224 bp, Homo sapiens; identical to SEQ ID NO: 339777
  chr7:157949173-157949397
  hypo

SEQ ID NO: 348288 - DNA, 470 bp, Homo sapiens
  chr7:158066479-158066949
  hypo
cggggagccgcagacacagggggagccgcaggcatgggggagccgcagacacagggggagccgcagacacaggaggagacacacgaggagccgcagacgcaggaggagccgcagacagacgcgggaggagccgcagacacagggggagccgcagacacagggggagctgcagacagacatgggaggagccgcagacacagggagccgcagacacagggagccgcagacacagggggagccgcagacacaggaggagacacacgaggagccgcaggcacagggggagccgcagacacagggggagctgcagacagacatgggaggagccgcagacacggggagccgcagacacagggagccgcagacacagggggagccgcagacacaggaggagacacacgaggagccgcagacacagggggagccgcagacagacatgggaggagccacagacacgggagccgcagaca

SEQ ID NO: 348289 - DNA, 219 bp, Homo sapiens
  chr7:158067069-158067288
  hypo
ggggagccgcaggcacagggggagccacaggcacagggggagccgcagacagacatgggaggagccgcagacacggggagccgcagacacaggaggagacacacgaggagccgcaggcacagggggagccacaggcacgggggagccgcaggcacagggggagccacagacaccctcacactccgggatctagcgtgtgtggacgagcccgaggcgctc

SEQ ID NO: 348290 - DNA, 140 bp, Homo sapiens; identical to SEQ ID NO: 339798
  chr7:158556274-158556414
  hypo

SEQ ID NO: 348291 - DNA, 207 bp, Homo sapiens
  chr7:158570568-158570775
  hypo
cgagaattgccgaaacatgacacagagccatgaagtgagcacatgctgttcgcttcacagcacggacaggcttatttttcacagggctgccataaactttcaactagtaaaaacacagtatctacgaagcgcaataaagcaaagcacaataaagcgaggtgtgcctatgaacactttcatcttaaatgtcgcattcatattttatac

SEQ ID NO: 348292 - DNA, 767 bp, Homo sapiens; identical to SEQ ID NO: 346965
  chr8:18870226-18870993
  hypo

SEQ ID NO: 348293 - DNA, 878 bp, Homo sapiens; identical to SEQ ID NO: 346966
  chr8:22436855-22437733
  hypo

SEQ ID NO: 348294 - DNA, 127 bp, Homo sapiens; identical to SEQ ID NO: 345299
  chr8:23021590-23021717
  hypo

SEQ ID NO: 348295 - DNA, 196 bp, Homo sapiens; identical to SEQ ID NO: 345934
  chr8:23423722-23423918
  hypo

SEQ ID NO: 348296 - DNA, 226 bp, Homo sapiens; identical to SEQ ID NO: 201396
  chr8:38326050-38326276
  hypo

SEQ ID NO: 348297 - DNA, 172 bp, Homo sapiens
  chr8:42750012-42750184
  hypo
taaaggtttctctgcccttggtgtagggaagaatgtttgaaaaaaagaccattgagaatacttcaggtaagtttttttttttttacacttacaaaatgctaaatgatcaggggtcaactatcaagtggtactctgtaaggcaaccttaaaaactcactgctgacccaggctc

SEQ ID NO: 348298 - DNA, 68 bp, Homo sapiens; identical to SEQ ID NO: 345936
  chr8:49334914-49334982
  hypo

SEQ ID NO: 348299 - DNA, 116 bp, Homo sapiens; identical to SEQ ID NO: 201413
  chr8:56014011-56014127
  hypo

SEQ ID NO: 348300 - DNA, 199 bp, Homo sapiens; identical to SEQ ID NO: 346982
  chr8:60030947-60031146
  hypo

SEQ ID NO: 348301 - DNA, 115 bp, Homo sapiens; identical to SEQ ID NO: 346983
  chr8:60031791-60031906
  hypo

SEQ ID NO: 348302 - DNA, 292 bp, Homo sapiens; identical to SEQ ID NO: 201424
  chr8:61193765-61194057
  hypo

SEQ ID NO: 348303 - DNA, 144 bp, Homo sapiens; identical to SEQ ID NO: 201426
  chr8:61822883-61823027
  hypo

SEQ ID NO: 348304 - DNA, 55 bp, Homo sapiens; identical to SEQ ID NO: 346990
  chr8:72756949-72757004
  hypo

SEQ ID NO: 348305 - DNA, 90 bp, Homo sapiens
  chr8:74674345-74674435
  hypo
cggcggcaaaggtaaaaggccgacgacaacggacttggtccaggtgaacccacctgacaggcgcacgaaaacttcccttgccctccccgg

SEQ ID NO: 348306 - DNA, 208 bp, Homo sapiens; identical to SEQ ID NO: 201482
  chr8:80803900-80804108
  hypo

SEQ ID NO: 348307 - DNA, 99 bp, Homo sapiens; identical to SEQ ID NO: 345308
  chr8:82193698-82193797
  hypo

SEQ ID NO: 348308 - DNA, 248 bp, Homo sapiens; identical to SEQ ID NO: 286033
  chr8:94712881-94713129
  hypo

SEQ ID NO: 348309 - DNA, 826 bp, Homo sapiens; identical to SEQ ID NO: 346999
  chr8:99956460-99957286
  hypo

SEQ ID NO: 348310 - DNA, 429 bp, Homo sapiens; identical to SEQ ID NO: 201548
  chr8:104511554-104511983
  hypo

SEQ ID NO: 348311 - DNA, 622 bp, Homo sapiens; identical to SEQ ID NO: 347003
  chr8:107669381-107670003
  hypo

SEQ ID NO: 348312 - DNA, 221 bp, Homo sapiens; identical to SEQ ID NO: 340002
  chr8:118531602-118531823
  hypo

SEQ ID NO: 348313 - DNA, 540 bp, Homo sapiens; identical to SEQ ID NO: 347007
  chr8:121823361-121823901
  hypo

SEQ ID NO: 348314 - DNA, 211 bp, Homo sapiens; identical to SEQ ID NO: 347008
  chr8:121824481-121824692
  hypo

SEQ ID NO: 348315 - DNA, 43 bp, Homo sapiens
  chr8:126044399-126044442
  hypo
cgataagaggaatttggtaatgtgaggtttaagttaggttttg

SEQ ID NO: 348316 - DNA, 630 bp, Homo sapiens; identical to SEQ ID NO: 345945
  chr8:128871653-128872283
  hypo

SEQ ID NO: 348317 - DNA, 191 bp, Homo sapiens; identical to SEQ ID NO: 345946
  chr8:128872459-128872650
  hypo

SEQ ID NO: 348318 - DNA, 61 bp, Homo sapiens; identical to SEQ ID NO: 345947
  chr8:128888848-128888909
  hypo

SEQ ID NO: 348319 - DNA, 43 bp, Homo sapiens; identical to SEQ ID NO: 345948
  chr8:128889422-128889465
  hypo

SEQ ID NO: 348320 - DNA, 159 bp, Homo sapiens; identical to SEQ ID NO: 340032
  chr8:131064030-131064189
  hypo

SEQ ID NO: 348321 - DNA, 320 bp, Homo sapiens
  chr8:140971025-140971345
  hypo
cgccccgaggcaggacagggtgtgcagtcagcttccttagacatgtaaggagtgccttttcctttccacaaggaaaaggggagttgtgtagacaccatgagatgtgaccactgccctcgggaacacatgccagagatgacagcctgacacagagcactgcattccgagtcacacagaggagcactgcattccgagtcacacaggggagccctgcattccgagtcacacaggggagcactgcattccgagtcacacgggggagcactgcattccgagtcacacgggggagcactgcattccgagtcacacgggggaggcct

SEQ ID NO: 348322 - DNA, 148 bp, Homo sapiens
  chr8:140971375-140971523
  hypo
ttccgagtcacacgggggagccctgcattccgagtcacacgggggagccctgcattccgagtcacacgggggagccctgcattccgagtcacacgggggagccctgcattccgagtcacacgggggagccctgcattccgagtcacac

SEQ ID NO: 348323 - DNA, 392 bp, Homo sapiens; identical to SEQ ID NO: 340057
  chr8:141147354-141147746
  hypo

SEQ ID NO: 348324 - DNA, 107 bp, Homo sapiens; identical to SEQ ID NO: 345951
  chr8:141534525-141534632
  hypo

SEQ ID NO: 348325 - DNA, 296 bp, Homo sapiens; identical to SEQ ID NO: 345952
  chr8:141599879-141600175
  hypo

SEQ ID NO: 348326 - DNA, 50 bp, Homo sapiens; identical to SEQ ID NO: 345953
  chr8:141600284-141600334
  hypo

SEQ ID NO: 348327 - DNA, 934 bp, Homo sapiens; identical to SEQ ID NO: 340073
  chr8:142235190-142236124
  hypo

SEQ ID NO: 348328 - DNA, 593 bp, Homo sapiens; identical to SEQ ID NO: 340079
  chr8:142262690-142263283
  hypo

SEQ ID NO: 348329 - DNA, 449 bp, Homo sapiens; identical to SEQ ID NO: 345316
  chr8:142317706-142318155
  hypo

SEQ ID NO: 348330 - DNA, 415 bp, Homo sapiens; identical to SEQ ID NO: 345317
  chr8:142318184-142318599
  hypo

SEQ ID NO: 348331 - DNA, 192 bp, Homo sapiens; identical to SEQ ID NO: 345956
  chr8:142367176-142367368
  hypo

SEQ ID NO: 348332 - DNA, 287 bp, Homo sapiens; identical to SEQ ID NO: 212577
  chr8:142367824-142368111
  hypo

SEQ ID NO: 348333 - DNA, 120 bp, Homo sapiens; identical to SEQ ID NO: 347012
  chr8:143531858-143531978
  hypo

SEQ ID NO: 348334 - DNA, 68 bp, Homo sapiens; identical to SEQ ID NO: 345958
  chr8:143558643-143558711
  hypo

SEQ ID NO: 348335 - DNA, 283 bp, Homo sapiens; identical to SEQ ID NO: 345959
  chr8:144359694-144359977
  hypo

SEQ ID NO: 348336 - DNA, 91 bp, Homo sapiens; identical to SEQ ID NO: 345960
  chr8:144360545-144360636
  hypo

SEQ ID NO: 348337 - DNA, 207 bp, Homo sapiens
  chr8:144414283-144414490
  hypo
ctaactctccaggccagtcatcatctatccattgaggcaagcccaagcctgccctgaaccagcactgcgctgggtcctgcggatgcagatcaccaaaacccatacgaagggctcaactgaacctagattctgagatgggcctgggagaagaggagcgagatggggcgtggctggcaggcagtgggcaggctcggtcagcagggctgc

SEQ ID NO: 348338 - DNA, 88 bp, Homo sapiens; identical to SEQ ID NO: 345961
  chr8:144676118-144676206
  hypo

SEQ ID NO: 348339 - DNA, 270 bp, Homo sapiens; identical to SEQ ID NO: 340143
  chr8:145226085-145226355
  hypo

SEQ ID NO: 348340 - DNA, 167 bp, Homo sapiens; identical to SEQ ID NO: 340170
  chr9:4864421-4864588
  hypo

SEQ ID NO: 348341 - DNA, 229 bp, Homo sapiens; identical to SEQ ID NO: 340174
  chr9:7028698-7028927
  hypo

SEQ ID NO: 348342 - DNA, 1853 bp, Homo sapiens; identical to SEQ ID NO: 347015
  chr9:14313943-14315796
  hypo

SEQ ID NO: 348343 - DNA, 568 bp, Homo sapiens; identical to SEQ ID NO: 345323
  chr9:27528536-27529104
  hypo

SEQ ID NO: 348344 - DNA, 182 bp, Homo sapiens; identical to SEQ ID NO: 201692
  chr9:27529157-27529339
  hypo

SEQ ID NO: 348345 - DNA, 567 bp, Homo sapiens; identical to SEQ ID NO: 345325
  chr9:27529340-27529907
  hypo

SEQ ID NO: 348346 - DNA, 241 bp, Homo sapiens; identical to SEQ ID NO: 286422
  chr9:37035886-37036127
  hypo

SEQ ID NO: 348347 - DNA, 472 bp, Homo sapiens; identical to SEQ ID NO: 201742
  chr9:79630544-79631016
  hypo

SEQ ID NO: 348348 - DNA, 96 bp, Homo sapiens; identical to SEQ ID NO: 340216
  chr9:80007524-80007620
  hypo

SEQ ID NO: 348349 - DNA, 419 bp, Homo sapiens; identical to SEQ ID NO: 347028
  chr9:80645902-80646321
  hypo

SEQ ID NO: 348350 - DNA, 340 bp, Homo sapiens; identical to SEQ ID NO: 347029
  chr9:80646831-80647171
  hypo

SEQ ID NO: 348351 - DNA, 260 bp, Homo sapiens; identical to SEQ ID NO: 286495
  chr9:82185383-82185643
  hypo

SEQ ID NO: 348352 - DNA, 469 bp, Homo sapiens; identical to SEQ ID NO: 347033
  chr9:82185703-82186172
  hypo

SEQ ID NO: 348353 - DNA, 431 bp, Homo sapiens; identical to SEQ ID NO: 201763
  chr9:89561318-89561749
  hypo

SEQ ID NO: 348354 - DNA, 62 bp, Homo sapiens
  chr9:91996203-91996265
  hypo
aggccagcggggcctggaccacgcccgagttagagccagcatagacaaacctgttgccctgc

SEQ ID NO: 348355 - DNA, 544 bp, Homo sapiens; identical to SEQ ID NO: 347038
  chr9:93955385-93955929
  hypo

SEQ ID NO: 348356 - DNA, 267 bp, Homo sapiens; identical to SEQ ID NO: 201780
  chr9:93956177-93956444
  hypo

SEQ ID NO: 348357 - DNA, 174 bp, Homo sapiens; identical to SEQ ID NO: 201793
  chr9:96717633-96717807
  hypo

SEQ ID NO: 348358 - DNA, 429 bp, Homo sapiens; identical to SEQ ID NO: 347043
  chr9:97767434-97767863
  hypo

SEQ ID NO: 348359 - DNA, 182 bp, Homo sapiens
  chr9:97865087-97865269
  hypo
gcagcgtggggacgcagagctaagagtaaacgacgtggtgtggaccatgacgttcgctctcctcggccccccctggcagcacacagggcctgcagccggcctgcaacgagcccgccagggtcagtgcagccagcacgggggctccggctgtagcccaggcacgtgccagtgtgtccctgggc

SEQ ID NO: 348360 - DNA, 148 bp, Homo sapiens; identical to SEQ ID NO: 201823
  chr9:104248697-104248845
  hypo

SEQ ID NO: 348361 - DNA, 186 bp, Homo sapiens; identical to SEQ ID NO: 347048
  chr9:104248975-104249161
  hypo

SEQ ID NO: 348362 - DNA, 273 bp, Homo sapiens; identical to SEQ ID NO: 345966
  chr9:116059825-116060098
  hypo

SEQ ID NO: 348363 - DNA, 631 bp, Homo sapiens; identical to SEQ ID NO: 345967
  chr9:116060128-116060759
  hypo

SEQ ID NO: 348364 - DNA, 395 bp, Homo sapiens; identical to SEQ ID NO: 333758
  chr9:116111663-116112058
  hypo

SEQ ID NO: 348365 - DNA, 280 bp, Homo sapiens; identical to SEQ ID NO: 340286
  chr9:116750660-116750940
  hypo

SEQ ID NO: 348366 - DNA, 299 bp, Homo sapiens; identical to SEQ ID NO: 340289
  chr9:116790949-116791248
  hypo

SEQ ID NO: 348367 - DNA, 113 bp, Homo sapiens; identical to SEQ ID NO: 340290
  chr9:116796590-116796703
  hypo

SEQ ID NO: 348368 - DNA, 1421 bp, Homo sapiens; identical to SEQ ID NO: 340292
  chr9:116810967-116812388
  hypo

SEQ ID NO: 348369 - DNA, 390 bp, Homo sapiens; identical to SEQ ID NO: 340293
  chr9:116813618-116814008
  hypo

SEQ ID NO: 348370 - DNA, 82 bp, Homo sapiens; identical to SEQ ID NO: 345328
  chr9:124990438-124990520
  hypo

SEQ ID NO: 348371 - DNA, 142 bp, Homo sapiens; identical to SEQ ID NO: 345329
  chr9:124991012-124991154
  hypo

SEQ ID NO: 348372 - DNA, 445 bp, Homo sapiens; identical to SEQ ID NO: 340323
  chr9:128200066-128200511
  hypo

SEQ ID NO: 348373 - DNA, 277 bp, Homo sapiens; identical to SEQ ID NO: 340350
  chr9:132633604-132633881
  hypo

SEQ ID NO: 348374 - DNA, 112 bp, Homo sapiens; identical to SEQ ID NO: 345331
  chr9:132804293-132804405
  hypo

SEQ ID NO: 348375 - DNA, 207 bp, Homo sapiens; identical to SEQ ID NO: 201905
  chr9:132804455-132804662
  hypo

SEQ ID NO: 348376 - DNA, 292 bp, Homo sapiens; identical to SEQ ID NO: 201908
  chr9:132805445-132805737
  hypo

SEQ ID NO: 348377 - DNA, 477 bp, Homo sapiens; identical to SEQ ID NO: 340353
  chr9:132874127-132874604
  hypo

SEQ ID NO: 348378 - DNA, 343 bp, Homo sapiens
  chr9:132881052-132881395
  hypo
cgatgattctgttgctcacccccattaagaaccattgctataaaggaattctcctccacatgaggaggtcgatgcctggagacagaggcagcaggccaagggcaggcacacccagctgagatggggcagggctggaaggcaggcctcctggatcctgcctggggccttgtctctctccccacactcattctttcaccgtatttgctgctcctcatggtgaggtcagaaatagcccgcccagccttggtgagccttcgctcccacaggagcccaacacccagcccgccacagtccggtgagcagcaggctgtcggtgttcctaagtcagggaaatctttggaag

SEQ ID NO: 348379 - DNA, 35 bp, Homo sapiens
  chr9:132881495-132881530
  hypo
ctcggcatcctgactcatcctatgcatatggcagc

SEQ ID NO: 348380 - DNA, 1351 bp, Homo sapiens; identical to SEQ ID NO: 333814
  chr9:133710055-133711406
  hypo

SEQ ID NO: 348381 - DNA, 630 bp, Homo sapiens; identical to SEQ ID NO: 345338
  chr9:135286324-135286954
  hypo

SEQ ID NO: 348382 - DNA, 33 bp, Homo sapiens
  chr9:135865230-135865263
  hypo
cagttctgcggcaagcgtttccaccagaagtcc

SEQ ID NO: 348383 - DNA, 381 bp, Homo sapiens; identical to SEQ ID NO: 340393
  chr9:136372653-136373034
  hypo

SEQ ID NO: 348384 - DNA, 115 bp, Homo sapiens; identical to SEQ ID NO: 345980
  chr9:136384021-136384136
  hypo

SEQ ID NO: 348385 - DNA, 106 bp, Homo sapiens
  chr9:136698796-136698902
  hypo
cggtcccgatggggccctggtgctgtggccaggcttgggcagcgcctgggtggagcagaggcctctcagagagaggaatgaggtggacacggagaagagcagaggc

SEQ ID NO: 348386 - DNA, 50 bp, Homo sapiens; identical to SEQ ID NO: 345981
  chr9:137623301-137623351
  hypo

SEQ ID NO: 348387 - DNA, 153 bp, Homo sapiens; identical to SEQ ID NO: 345982
  chr9:137623543-137623696
  hypo

SEQ ID NO: 348388 - DNA, 335 bp, Homo sapiens; identical to SEQ ID NO: 340413
  chr9:138143914-138144249
  hypo

SEQ ID NO: 348389 - DNA, 185 bp, Homo sapiens; identical to SEQ ID NO: 340424
  chr9:138719269-138719454
  hypo

SEQ ID NO: 348390 - DNA, 538 bp, Homo sapiens; identical to SEQ ID NO: 340430
  chr9:138877542-138878080
  hypo

SEQ ID NO: 348391 - DNA, 264 bp, Homo sapiens; identical to SEQ ID NO: 345984
  chr9:139110897-139111161
  hypo

SEQ ID NO: 348392 - DNA, 81 bp, Homo sapiens; identical to SEQ ID NO: 345985
  chr9:139111384-139111465
  hypo

SEQ ID NO: 348393 - DNA, 144 bp, Homo sapiens; identical to SEQ ID NO: 213214
  chr9:139317510-139317654
  hypo

SEQ ID NO: 348394 - DNA, 380 bp, Homo sapiens; identical to SEQ ID NO: 345987
  chr9:139317866-139318246
  hypo

SEQ ID NO: 348395 - DNA, 205 bp, Homo sapiens; identical to SEQ ID NO: 345988
  chr9:139698453-139698658
  hypo

SEQ ID NO: 348396 - DNA, 1485 bp, Homo sapiens
  chr9:139835276-139836761
  hypo
cgtaactgctataagcatctccacctctcccgctcgggaaaaagccacagagcctggcgatgtcctcaaggggtcccggtggctccagtgcacccagcacacctcagcgcctctggctggcaagccaggagaagaaggtgcgaggccgtgggcgaggtgcctggaggacgcgcatggtgcgtggggagcgccaggctttgatggtggcgtcgtcgctggccgtgagcagcagctcctgctcctggggactgaagaccactgagttgaccacatcctcgtgccgcagcctggccagacagatgttgtagtggcggtcccagatgtagccgtgccggtcctccgccccgctgcagaacagcgcctgggtgagccggccgcccgcccgctgctgcccacacccgccctgcaccacgccgcgccctgcacctggccacgaagtccctgctgacgtccaggaagatgaagaagcactcgtcgttgggcgtgtaggcgcggtgcgcacgcagagcccgcctcacctcccgcatggtcttgaggtcgaacaccagcaggtcaatctcctccgcgattggtggcggctgcatggggtcggccaccaccgcaccgttgggccaggcgcggctgttcacgtacaggtacctgggcgaggggcactgtgctaggtgtgggccgcctgcgggcaccccgcctgggacactggcaagaggcccacctgttgtcgggcgacaggcccatgccgatgatgtgtccgtgtatgtctatgacgtggtccagcgcgtcgaagaaggcatcggagccccggccctcacccagcacgggccctgccgtggtcatctggtgtggcaggatctgcttgatgcctgcagggagggctacggtgagggtccctgtccaatgccccaaggacatcactccagggcagcttcctacctcagtggtgtctctggggctgtgagcaccacagaggtccgtgggcactgcctgctccgggggccccagacctgaatcaggcccgtcggttgcttgctggccagcggccctgcctgcgtttgttttcactgctcatcccacaggccccaggtctgggcttgtgaccccaggggcgagtgaacgatcccagctttgcctgtggacttgcttgctgtctgcccctcaggacccctgcccggcctcccccaagctcctaggaccgaggcgggcagcatggcggcaggggtgtaccgatctggtgtggggagtaggtgaggcagccagtggtgaagatgaggtacttgctcttggcgcctgtggcactgcgctcgggtggcttggtgtggccctgggccagcagctcggccaccttggtctctagcatgcgctccgacagctgtggctgcgcccgcccctccagcacgcggtccagaaagtgccgcaagccctccttggcgtgggcgggggccgggccagccaccacctcctcgttgtcgctgcccaggtcaaagatgc

SEQ ID NO: 348397 - DNA, 33 bp, Homo sapiens
  chr9:139889104-139889137
  hypo
tattgggcgacagacgcggggtggggcgctagc

SEQ ID NO: 348398 - DNA, 83 bp, Homo sapiens
  chr9:140107955-140108038
  hypo
cgaggccgcctgctcccacccacacaggctcattctctgcgagcagaggacctgctgcttggcaccctggcagctgccctggt

SEQ ID NO: 348399 - DNA, 180 bp, Homo sapiens
  chr9:140108461-140108641
  hypo
agggttctggggctgtacccgccgcctccgggcctcactgagatccctcccggagtcccgtgagtgtgggccccgggtcacccacaggcgcagcagacccaacctggcctggggacctcgccctgggtccctcccgtgtgggtgggcggcccctggggagtgggtcctggtctgaccagc

SEQ ID NO: 348400 - DNA, 636 bp, Homo sapiens; identical to SEQ ID NO: 347066
  chr9:140196486-140197122
  hypo

SEQ ID NO: 348401 - DNA, 155 bp, Homo sapiens; identical to SEQ ID NO: 347067
  chr9:140197263-140197418
  hypo

SEQ ID NO: 348402 - DNA, 373 bp, Homo sapiens
  chr9:140265361-140265734
  hypo
cgctgccctcgacatgaaatatcgcagcacattgagtcgtgagtcccagctaatccgagcggacaggcctgaatgcggcctctttcggccgggcgcggcggtgagcagtggagcatgcatcgcctgccgggcggccccgctcggggacaatggctttcttcgcagaaggggcctgtgcgggacaagaccccctttgtgtggggattcctgcctcggagcgcgagggaggcgcattcagccggccccagacagtctttgaaaggctctgtaacagaagacggcccgaaacactagcctgccttctgcctccctgcactctccgcaggcacggccgccattcagcgtcgcgccacatgagggggaccctccatcc

SEQ ID NO: 348403 - DNA, 183 bp, Homo sapiens
  chr9:140265902-140266085
  hypo
ggttccaatgcacctcctcacggtgaggggtcttgctgggaagaggaacccagggtgccatcgggacggcgtctcagcagcagggtcccacgtgggcaggcagcggggtggtggccttcacgctcggccctgaagtaagggggccctaatggggcggggagtggaccagtgcccctgagtgcc

SEQ ID NO: 348404 - DNA, 249 bp, Homo sapiens
  chr9:140582119-140582368
  hypo
cgtcacgcgaggacacggcaagaagatggcaggccatgagcccggaaatgagagcctggccacacgctgaatttgccagcaccttgatcttggatttccgagcctccagaacttaaacaaataaatttctgttgggtctgtgccacccacatgaaggcagtttgttataatagcctgaaaggataaagtcagagcacgtcatcgtgtcaccgtcttcacggtgtggtctctgatccttcaacatggggc

SEQ ID NO: 348405 - DNA, 233 bp, Homo sapiens; identical to SEQ ID NO: 340488
  chr9:140623363-140623596
  hypo

SEQ ID NO: 348406 - DNA, 232 bp, Homo sapiens; identical to SEQ ID NO: 340489
  chr9:140645189-140645421
  hypo

SEQ ID NO: 348407 - DNA, 188 bp, Homo sapiens; identical to SEQ ID NO: 345339
  chr9:140703858-140704046
  hypo

SEQ ID NO: 348408 - DNA, 327 bp, Homo sapiens; identical to SEQ ID NO: 345340
  chr9:140704131-140704458
  hypo

SEQ ID NO: 348409 - DNA, 479 bp, Homo sapiens; identical to SEQ ID NO: 345993
  chr9:140708213-140708692
  hypo

SEQ ID NO: 348410 - DNA, 215 bp, Homo sapiens; identical to SEQ ID NO: 213315
  chr9:140708771-140708986
  hypo

SEQ ID NO: 348411 - DNA, 101 bp, Homo sapiens
  chr10:524407-524508
  hypo
cgggcatgccgggggtgcagatgcacccaaattcccatcttattctcactcatccagtgtccaggcatgctgggggtgtagacacatccaaattcctgtct

SEQ ID NO: 348412 - DNA, 83 bp, Homo sapiens; identical to SEQ ID NO: 213327
  chr10:524671-524754
  hypo

SEQ ID NO: 348413 - DNA, 69 bp, Homo sapiens
  chr10:5538706-5538775
  hypo
cgggcaagaaggaacaggtcgcaatgagtgaccgcaagagatcatggtgactcctgaaaacgcccaggc

SEQ ID NO: 348414 - DNA, 192 bp, Homo sapiens
  chr10:5538938-5539130
  hypo
aggccagggccgccacctccccaaagcccgatttcacccaatgctaccataagttggcctgggctgctcctgtacccacctggggcttcagtttccacatctgccaagcaaggtgcctgggtccgaccatctgagacccaggacaaagggagccctgggaacgccaggctgtgatgagcgagcctgggtctc

SEQ ID NO: 348415 - DNA, 380 bp, Homo sapiens
  chr10:5540271-5540651
  hypo
cgcatacagacacacagacacacacacagatgcacacacagacgtacacgtatattatttgcagccgaagagaggcaggctgcgtgcagaggctggcagctgggctccgtctgtccatgcgaggcgcccgctcctgtttgtgcgggacacgtgcccaggtcctcaccagcagctcaggcagaacctggagccacagacaccgcccagcaccatcctcacacatcctctgcccacctgccctctgctccgcgtcaggggaggcaggagctgcccctggggcctgctccaggcagttctgccaccgcaggtgagaggggtgggctggaaggaaccctggaagcaggtgggggccctcggaggcagccgccccacaaacacca

SEQ ID NO: 348416 - DNA, 198 bp, Homo sapiens
  chr10:5541528-5541726
  hypo
gttctgccttggcatgggaaccccctccttttctgcaatcggaacaaagggaggagggaggctccccaccctccaaatgccctggggtgagagcctcctcccagggagggccagatcagctgcagacaggaaatgcaggaatgggagttgggagagctgtcaggtgccaggtgggaactgccatggggtcggggtatc

SEQ ID NO: 348417 - DNA, 60 bp, Homo sapiens; identical to SEQ ID NO: 201967
  chr10:7453036-7453096
  hypo

SEQ ID NO: 348418 - DNA, 165 bp, Homo sapiens; identical to SEQ ID NO: 345343
  chr10:12391705-12391870
  hypo

SEQ ID NO: 348419 - DNA, 324 bp, Homo sapiens; identical to SEQ ID NO: 345344
  chr10:12392327-12392651
  hypo

SEQ ID NO: 348420 - DNA, 411 bp, Homo sapiens; identical to SEQ ID NO: 340577
  chr10:14816098-14816509
  hypo

SEQ ID NO: 348421 - DNA, 208 bp, Homo sapiens; identical to SEQ ID NO: 201993
  chr10:17270445-17270653
  hypo

SEQ ID NO: 348422 - DNA, 873 bp, Homo sapiens; identical to SEQ ID NO: 347076
  chr10:21815648-21816521
  hypo

SEQ ID NO: 348423 - DNA, 277 bp, Homo sapiens; identical to SEQ ID NO: 340595
  chr10:22042735-22043012
  hypo

SEQ ID NO: 348424 - DNA, 734 bp, Homo sapiens; identical to SEQ ID NO: 202032
  chr10:30024793-30025527
  hypo

SEQ ID NO: 348425 - DNA, 790 bp, Homo sapiens; identical to SEQ ID NO: 345352
  chr10:31607954-31608744
  hypo

SEQ ID NO: 348426 - DNA, 252 bp, Homo sapiens; identical to SEQ ID NO: 202037
  chr10:31609416-31609668
  hypo

SEQ ID NO: 348427 - DNA, 544 bp, Homo sapiens; identical to SEQ ID NO: 202046
  chr10:35103534-35104078
  hypo

SEQ ID NO: 348428 - DNA, 398 bp, Homo sapiens; identical to SEQ ID NO: 340646
  chr10:70184294-70184692
  hypo

SEQ ID NO: 348429 - DNA, 323 bp, Homo sapiens; identical to SEQ ID NO: 347095
  chr10:72238261-72238584
  hypo

SEQ ID NO: 348430 - DNA, 238 bp, Homo sapiens; identical to SEQ ID NO: 340659
  chr10:73514960-73515198
  hypo

SEQ ID NO: 348431 - DNA, 412 bp, Homo sapiens; identical to SEQ ID NO: 345356
  chr10:74079281-74079693
  hypo

SEQ ID NO: 348432 - DNA, 179 bp, Homo sapiens; identical to SEQ ID NO: 345357
  chr10:74079752-74079931
  hypo

SEQ ID NO: 348433 - DNA, 73 bp, Homo sapiens; identical to SEQ ID NO: 340671
  chr10:76966489-76966562
  hypo

SEQ ID NO: 348434 - DNA, 253 bp, Homo sapiens; identical to SEQ ID NO: 340683
  chr10:80921761-80922014
  hypo

SEQ ID NO: 348435 - DNA, 635 bp, Homo sapiens
  chr10:88441134-88441769
  hypo
cgcgtgtggcctctaaccgctctcttctctctcccctgcatggcctgccctgtgccaggaccccgctctggacacgaacggcagcctggtggcacccagccccagccctgaggcgagggccagcccaggcaccccaggcaccccggagctcaggcccacctttagccctgccttctcccggccctccgccttctcctcactcgccgaggcctctgaccctggccctccgcgggccagcctgagggccaagaccagcccagagggggcccgggacctactcggcccaaaagccctgccgggctcgagccagccgaggcaatataacaaccccattggcctgtactcggcagagaccctgagggagatggctcagatgtaccagatgagcctccgagggaaggcctcgggtgtcggactcccaggagggtaggtaacggacatacagctctccacaggtggcctgggccacctgggtcctcggtgctcggcagagacctggtcaggtggtcagagcgaggcactggccccaatccagccagccccgagcccatgaggtcagcagtgatcctgcggcatttgccatgagccgggcatgctagcgatttatacaaccaaccacgctggggtgacatgtc

SEQ ID NO: 348436 - DNA, 57 bp, Homo sapiens; identical to SEQ ID NO: 345362
  chr10:93647662-93647719
  hypo

SEQ ID NO: 348437 - DNA, 384 bp, Homo sapiens; identical to SEQ ID NO: 287332
  chr10:94833649-94834033
  hypo

SEQ ID NO: 348438 - DNA, 32 bp, Homo sapiens; identical to SEQ ID NO: 340711
  chr10:98983004-98983036
  hypo

SEQ ID NO: 348439 - DNA, 107 bp, Homo sapiens; identical to SEQ ID NO: 340716
  chr10:100171106-100171213
  hypo

SEQ ID NO: 348440 - DNA, 737 bp, Homo sapiens; identical to SEQ ID NO: 334066
  chr10:111767130-111767867
  hypo

SEQ ID NO: 348441 - DNA, 164 bp, Homo sapiens; identical to SEQ ID NO: 340740
  chr10:114200406-114200570
  hypo

SEQ ID NO: 348442 - DNA, 65 bp, Homo sapiens; identical to SEQ ID NO: 340741
  chr10:114252654-114252719
  hypo

SEQ ID NO: 348443 - DNA, 131 bp, Homo sapiens; identical to SEQ ID NO: 347121
  chr10:121301363-121301494
  hypo

SEQ ID NO: 348444 - DNA, 760 bp, Homo sapiens; identical to SEQ ID NO: 345370
  chr10:121301911-121302671
  hypo

SEQ ID NO: 348445 - DNA, 1193 bp, Homo sapiens; identical to SEQ ID NO: 334112
  chr10:126106668-126107861
  hypo

SEQ ID NO: 348446 - DNA, 392 bp, Homo sapiens; identical to SEQ ID NO: 340780
  chr10:126819324-126819716
  hypo

SEQ ID NO: 348447 - DNA, 141 bp, Homo sapiens; identical to SEQ ID NO: 346009
  chr10:127451818-127451959
  hypo

SEQ ID NO: 348448 - DNA, 38 bp, Homo sapiens; identical to SEQ ID NO: 346010
  chr10:127452067-127452105
  hypo

SEQ ID NO: 348449 - DNA, 252 bp, Homo sapiens
  chr10:134562467-134562719
  hypo
cgccccagggactggtttgagcctgttaacaccacaaagcaggcgtgtgacctcagccatccctcccacgtcagcttcacccagatgagcctgttgagacggttcccggtcaagccgcctgcagcccttgcccgttgtcacagtcgaacagctctcgagggagttcagggacgggagagagcgagcgggaggaggccggccatgtgcccccgcaggcaccctctttgctgttctcagtgctgctgtgccttc

SEQ ID NO: 348450 - DNA, 324 bp, Homo sapiens; identical to SEQ ID NO: 313431
  chr10:134562783-134563107
  hypo

SEQ ID NO: 348451 - DNA, 50 bp, Homo sapiens; identical to SEQ ID NO: 346011
  chr10:134793882-134793932
  hypo

SEQ ID NO: 348452 - DNA, 144 bp, Homo sapiens; identical to SEQ ID NO: 346012
  chr10:134793968-134794112
  hypo

SEQ ID NO: 348453 - DNA, 202 bp, Homo sapiens
  chr10:134794144-134794346
  hypo
cgagtgcccggcgaatgcccagtgagtgcccagtgagtgcccagcaagtgcccggcgaatgcccagcgagtgcccagcgagtgcccggtgaatgcccagcgagtgcccagcgagtgcccggtgagtgcctgcaagtgcccagcgagtgcctggtgaatgcccagtgagtgcccagcgagtgcccggtgaatgcccagcgagt

SEQ ID NO: 348454 - DNA, 514 bp, Homo sapiens; identical to SEQ ID NO: 340870
  chr10:135120335-135120849
  hypo

SEQ ID NO: 348455 - DNA, 70 bp, Homo sapiens; identical to SEQ ID NO: 340872
  chr10:135125649-135125719
  hypo

SEQ ID NO: 348456 - DNA, 234 bp, Homo sapiens
  chr10:135153722-135153956
  hypo
cgtcccctccgcctttgtgctgggtcagacccagctgggtttggctctcactcaccctgaggatggccctggcgcccgcatggtgcccagcacacagaaggcgctccataggcatttgcctgagtgcggctcccagctgtgggtggtcagcaatgacaggagcatgcgttggtgatgccttcgttttcattgctaaaccgtaacccattgttcccgctgttaactcatggacat

SEQ ID NO: 348457 - DNA, 34 bp, Homo sapiens
  chr10:135154001-135154035
  hypo
ctttttgttttgttttgttttgtttttttgagac

SEQ ID NO: 348458 - DNA, 150 bp, Homo sapiens; identical to SEQ ID NO: 346014
  chr11:233062-233212
  hypo

SEQ ID NO: 348459 - DNA, 91 bp, Homo sapiens
  chr11:487212-487303
  hypo
cgtctggatggtgctcatggtgggcagggggcccctgctctctaggctgtcgtggacgtggtctccacaggccacggcagcacctgtgagt

SEQ ID NO: 348460 - DNA, 279 bp, Homo sapiens; identical to SEQ ID NO: 313597
  chr11:487548-487827
  hypo

SEQ ID NO: 348461 - DNA, 169 bp, Homo sapiens
  chr11:487857-488026
  hypo
tgccttgtttgctgacagtcgtacatcgaggctgctggaggggcagccacccaccccacgctcaccctgagacctcactgggggccctgccagtgctgtcgactccaagaatgctgccagccggggtgggggctgcacgcacccgtgggcagggccgggcgtggcctgc

SEQ ID NO: 348462 - DNA, 37 bp, Homo sapiens
  chr11:562209-562246
  hypo
cgcacagggcccagcctagctgggaggccctcctcag

SEQ ID NO: 348463 - DNA, 244 bp, Homo sapiens
  chr11:562884-563128
  hypo
ctgtcactcccccacccctgacgtgggcagatatgggggtcacagggtctgactcgggaggcaggtgagcccgcggacctgatcccctgtcactcccccacccctgacgtgggcagatacgggggtcacagggtcccactcgggaggcaggtgagcccggggacctgatcccctgtcactccccaacccctgacgtgggcagatatgggggtcacagggcccgaccagggaaagtgctccctcc

SEQ ID NO: 348464 - DNA, 171 bp, Homo sapiens; identical to SEQ ID NO: 340889
  chr11:591108-591279
  hypo

SEQ ID NO: 348465 - DNA, 731 bp, Homo sapiens; identical to SEQ ID NO: 347133
  chr11:1410711-1411442
  hypo

SEQ ID NO: 348466 - DNA, 380 bp, Homo sapiens
  chr11:2337172-2337552
  hypo
cgtgtggcccaacatggacgctcaggacagctgggagacggcaccggccgggcccagggcagtgccagagtgcccacagaggccagccctgtcccactgggcttcacctgctcgtgctgcctttccctagagccctgggggcttcctaggaatgtgccgcacccgccgccctgctgccctggcattggcctaggtgggcgctgcagctccatggccccacagaggccgcttgtccaggcagggagggccgctcagggcgggtaccatgcctgctgccctctcacaggactgccttcagggcatccggagcttcctgaggacacaccagcaggtcgcctccagcctgaccagcatcggcctggccctcacggtaccctctc

SEQ ID NO: 348467 - DNA, 558 bp, Homo sapiens; identical to SEQ ID NO: 340950
  chr11:2412921-2413479
  hypo

SEQ ID NO: 348468 - DNA, 55 bp, Homo sapiens; identical to SEQ ID NO: 340955
  chr11:2987095-2987150
  hypo

SEQ ID NO: 348469 - DNA, 716 bp, Homo sapiens; identical to SEQ ID NO: 340964
  chr11:3243313-3244029
  hypo

SEQ ID NO: 348470 - DNA, 103 bp, Homo sapiens
  chr11:3697491-3697594
  hypo
gccaagaggcgcaaagggactcgctgagggtctggtgttgagtcggaggttctatcaggaggatgatgcagactcagcaccacgcgcagcaggttggctacac

SEQ ID NO: 348471 - DNA, 121 bp, Homo sapiens
  chr11:9405271-9405392
  hypo
cgcgcctggcaggaaggtgtattttaatagggattatgcttttactctgcattaagaggtgatttatatgaagtcccaactaaaatttggatactcaataaaaagccatgatttcagtatt

SEQ ID NO: 348472 - DNA, 68 bp, Homo sapiens; identical to SEQ ID NO: 340978
  chr11:9548334-9548402
  hypo

SEQ ID NO: 348473 - DNA, 287 bp, Homo sapiens; identical to SEQ ID NO: 202443
  chr11:12132212-12132499
  hypo

SEQ ID NO: 348474 - DNA, 78 bp, Homo sapiens; identical to SEQ ID NO: 340990
  chr11:12225829-12225907
  hypo

SEQ ID NO: 348475 - DNA, 352 bp, Homo sapiens; identical to SEQ ID NO: 340997
  chr11:12278228-12278580
  hypo

SEQ ID NO: 348476 - DNA, 301 bp, Homo sapiens; identical to SEQ ID NO: 340999
  chr11:12281112-12281413
  hypo

SEQ ID NO: 348477 - DNA, 434 bp, Homo sapiens; identical to SEQ ID NO: 341000
  chr11:12283321-12283755
  hypo

SEQ ID NO: 348478 - DNA, 798 bp, Homo sapiens; identical to SEQ ID NO: 347138
  chr11:17034991-17035789
  hypo

SEQ ID NO: 348479 - DNA, 796 bp, Homo sapiens; identical to SEQ ID NO: 345378
  chr11:17035791-17036587
  hypo

SEQ ID NO: 348480 - DNA, 200 bp, Homo sapiens; identical to SEQ ID NO: 341010
  chr11:19256446-19256646
  hypo

SEQ ID NO: 348481 - DNA, 982 bp, Homo sapiens; identical to SEQ ID NO: 345379
  chr11:19733991-19734973
  hypo

SEQ ID NO: 348482 - DNA, 338 bp, Homo sapiens; identical to SEQ ID NO: 202485
  chr11:19735066-19735404
  hypo

SEQ ID NO: 348483 - DNA, 929 bp, Homo sapiens; identical to SEQ ID NO: 345384
  chr11:32915113-32916042
  hypo

SEQ ID NO: 348484 - DNA, 142 bp, Homo sapiens; identical to SEQ ID NO: 341039
  chr11:44608911-44609053
  hypo

SEQ ID NO: 348485 - DNA, 151 bp, Homo sapiens; identical to SEQ ID NO: 341040
  chr11:44621715-44621866
  hypo

SEQ ID NO: 348486 - DNA, 457 bp, Homo sapiens; identical to SEQ ID NO: 341042
  chr11:44639755-44640212
  hypo

SEQ ID NO: 348487 - DNA, 495 bp, Homo sapiens; identical to SEQ ID NO: 341043
  chr11:44640545-44641040
  hypo

SEQ ID NO: 348488 - DNA, 606 bp, Homo sapiens; identical to SEQ ID NO: 341048
  chr11:46391523-46392129
  hypo

SEQ ID NO: 348489 - DNA, 117 bp, Homo sapiens
  chr11:46920042-46920159
  hypo
ggcctctttggctccacaagccttctccttagttcaagcccaacctaattccatttccccactcactgcagttgcgctcatcagactggtcatcacagtccgcgtcaccatcgcagc

SEQ ID NO: 348490 - DNA, 106 bp, Homo sapiens
  chr11:47359237-47359343
  hypo
cacccaggatgggctgcccgccatcgtaggcaggcggctcccactgtactgtgcaggagtcctctcccacgttgctgatcttgggggccgcaggtgcgtctggcac

SEQ ID NO: 348491 - DNA, 101 bp, Homo sapiens
  chr11:61036547-61036648
  hypo
cgccctgcaaaagaaacagcaacgctgcaaactggccaaggcttgccctgaaaggcaacatgacgcggctggaagatggcaggtctcccctaaagaggatc

SEQ ID NO: 348492 - DNA, 315 bp, Homo sapiens; identical to SEQ ID NO: 202562
  chr11:61276101-61276416
  hypo

SEQ ID NO: 348493 - DNA, 604 bp, Homo sapiens; identical to SEQ ID NO: 347160
  chr11:61347974-61348578
  hypo

SEQ ID NO: 348494 - DNA, 139 bp, Homo sapiens; identical to SEQ ID NO: 341076
  chr11:61662946-61663085
  hypo

SEQ ID NO: 348495 - DNA, 200 bp, Homo sapiens; identical to SEQ ID NO: 341078
  chr11:61668820-61669020
  hypo

SEQ ID NO: 348496 - DNA, 214 bp, Homo sapiens; identical to SEQ ID NO: 341079
  chr11:61672924-61673138
  hypo

SEQ ID NO: 348497 - DNA, 96 bp, Homo sapiens
  chr11:61674760-61674856
  hypo
cgggccaggtgagcgtccactcgggcagcaaagctcagtgctcgctgagccgggaggcagggggggtgcctgggctggcctgggcaggcggggatg

SEQ ID NO: 348498 - DNA, 85 bp, Homo sapiens
  chr11:61675100-61675185
  hypo
cgctcacattcctcgtcctttagcttcagctcctggaggaaaagaggcaggcacttgagcacctcagcatccccaggcctggcac

SEQ ID NO: 348499 - DNA, 119 bp, Homo sapiens; identical to SEQ ID NO: 341084
  chr11:63431997-63432116
  hypo

SEQ ID NO: 348500 - DNA, 203 bp, Homo sapiens; identical to SEQ ID NO: 334283
  chr11:64015094-64015297
  hypo

SEQ ID NO: 348501 - DNA, 549 bp, Homo sapiens; identical to SEQ ID NO: 345393
  chr11:64512349-64512898
  hypo

SEQ ID NO: 348502 - DNA, 297 bp, Homo sapiens
  chr11:64977165-64977462
  hypo
cggctgtgggctgactgtacatggcttttgctgcttctcctcacccagccccaagtcgacttgccggctcggcggccatctccccttctgcacagttgcccactctcccatgactggtctaagtgatggaatttccttcttaacggccacccagcgtgatggcaatgggaagctgggcctggtggagttcaacatcctgtggaaccgcatccggaattacctggtaggttgtccccactcacctcagtcatgcaggtgcgggccgggcaggtgggaagggccgggtgactcagcctg

SEQ ID NO: 348503 - DNA, 52 bp, Homo sapiens
  chr11:64977534-64977586
  hypo
cctacgagatgcggatggccattgagtcggcaggtgagactccaaggctgac

SEQ ID NO: 348504 - DNA, 35 bp, Homo sapiens; identical to SEQ ID NO: 347164
  chr11:65553778-65553813
  hypo

SEQ ID NO: 348505 - DNA, 227 bp, Homo sapiens; identical to SEQ ID NO: 202605
  chr11:65554410-65554637
  hypo

SEQ ID NO: 348506 - DNA, 39 bp, Homo sapiens; identical to SEQ ID NO: 347166
  chr11:65554723-65554762
  hypo

SEQ ID NO: 348507 - DNA, 167 bp, Homo sapiens; identical to SEQ ID NO: 346030
  chr11:65685172-65685339
  hypo

SEQ ID NO: 348508 - DNA, 1101 bp, Homo sapiens; identical to SEQ ID NO: 347167
  chr11:66079395-66080496
  hypo

SEQ ID NO: 348509 - DNA, 141 bp, Homo sapiens
  chr11:66513646-66513787
  hypo
ttcttgttaactggtacaaatgaggatcttagttcccagatctccctgcctttaaaaagggggtaataattttccttgtgttgcctccctgtaaaagtgagaatctgtttgcatgaataataatgggagttggccgggcgc

SEQ ID NO: 348510 - DNA, 338 bp, Homo sapiens; identical to SEQ ID NO: 314614
  chr11:66626187-66626525
  hypo

SEQ ID NO: 348511 - DNA, 284 bp, Homo sapiens
  chr11:66633455-66633739
  hypo
cgcccagcagtctcttcccctgggaggcgccgcccctcctctgggcactgcctgcctccgtgtactctatgtccacttcagagcccacatgcgggtcctccctaactgccgggctgtggcaacttggcactgcagccccaggcaccaggcagaacctgtgcacaggtgagctggcatctccctctgctcgagctccgcccacctcaatgcggccggtgtccggctggaagctgcgcgcggggtcctcggtggtgacccggcactggatggcacacccgttgatg

SEQ ID NO: 348512 - DNA, 185 bp, Homo sapiens
  chr11:66633833-66634018
  hypo
gggggaggggggaaaggacgggagaaagggggaaacatgaggcgggggatagacgaggggcaccgcagccagtggggcgtccacacacagtgcgactcctgcccataggctctgggccagcctgaacagccggttcctcccaaccagtggctccaccagcccctgccctgctcccgccgggagcc

SEQ ID NO: 348513 - DNA, 112 bp, Homo sapiens
  chr11:67781084-67781196
  hypo
cgtgatgtcatttaatcctcacaatgacaccaggtgccattagcatccccatttcacagatgaggaaaccgaggcagagaaggtgagtgatttgcccaaggtcccacaacca

SEQ ID NO: 348514 - DNA, 267 bp, Homo sapiens; identical to SEQ ID NO: 341156
  chr11:69931095-69931362
  hypo

SEQ ID NO: 348515 - DNA, 521 bp, Homo sapiens
  chr11:71192127-71192648
  hypo
cgtgctgtgaccttgggccccaaggtgctgtccgtccattctgtggttcagtgtccccattttaaaatgaggacgatgataatacccacgtcctgggtctgtcttcagaatcacatgtgtcccttctcacgaggtgcctaaagcagagacgggcgtcctgagagcccagcgttgactctggcactgcagcctcctggggcctgcttgggtgggttgttgggtgctgtgggcaggggccaccgcctccgggctccatgttctgattgccctgcagccttggacctgcctgctggctctgggattttttaagacgaagtcaacaggtaagacttccagtttctagtgagcccactttgcttgttctgctggttggtctggttttattctggggcagggtagggatttttttttttttttttagtgcaaacaacaaaaagcatttcatcactctgcctccatggggagcttagtctgtgctagccagaggcaaggtgggcacagtggctggtgggtcagctcca

SEQ ID NO: 348516 - DNA, 169 bp, Homo sapiens
  chr11:71192889-71193058
  hypo
tatgggtggagcttggctgatccatgggcatgctgcttctccgaggctctgctcacgctgtctgattggtccattccaggcagggtttttgctgcccttgagtggcggggtggacagcgcagccaccgcctgcctcatctactccatgtgctgccaggtctgcgaggcc

SEQ ID NO: 348517 - DNA, 751 bp, Homo sapiens; identical to SEQ ID NO: 341175
  chr11:71724337-71725088
  hypo

SEQ ID NO: 348518 - DNA, 284 bp, Homo sapiens
  chr11:73685845-73686129
  hypo
tgtcaaatgtcaactccaccagcactgagacaatgagtagatgagaatgtagaaagagggaaggtggtaggtaaaggagcggaaggaagaggtggggaaagagggaaggagagaagggaaggagggaagagaaagaaggaagaaaaggaaagcatggcccggctagagacaaagccagaggtgatcaggtcagcagcaggagaggctcagaagggagcctctcgggaagtgcaggcagccatgagggctcgtttcagctgctcataggtgacgaacatcaccac

SEQ ID NO: 348519 - DNA, 133 bp, Homo sapiens
  chr11:75858240-75858373
  hypo
agaggacaggagcacttgggaaggaagcggtctggggggcctaactgagcagcaccctgcctcacaggagagcaagtcacagacgtttcagccccaacgctgccgctcactggctatgtgaccccggcgaggc

SEQ ID NO: 348520 - DNA, 509 bp, Homo sapiens; identical to SEQ ID NO: 345399
  chr11:76381512-76382021
  hypo

SEQ ID NO: 348521 - DNA, 675 bp, Homo sapiens; identical to SEQ ID NO: 288384
  chr11:92930674-92931349
  hypo

SEQ ID NO: 348522 - DNA, 131 bp, Homo sapiens; identical to SEQ ID NO: 347179
  chr11:106889091-106889222
  hypo

SEQ ID NO: 348523 - DNA, 67 bp, Homo sapiens; identical to SEQ ID NO: 341222
  chr11:107931221-107931288
  hypo

SEQ ID NO: 348524 - DNA, 398 bp, Homo sapiens; identical to SEQ ID NO: 202729
  chr11:115375434-115375832
  hypo

SEQ ID NO: 348525 - DNA, 320 bp, Homo sapiens; identical to SEQ ID NO: 341237
  chr11:117073762-117074082
  hypo

SEQ ID NO: 348526 - DNA, 261 bp, Homo sapiens; identical to SEQ ID NO: 341246
  chr11:119506104-119506365
  hypo

SEQ ID NO: 348527 - DNA, 750 bp, Homo sapiens; identical to SEQ ID NO: 341248
  chr11:119535401-119536151
  hypo

SEQ ID NO: 348528 - DNA, 135 bp, Homo sapiens; identical to SEQ ID NO: 345403
  chr11:128391758-128391893
  hypo

SEQ ID NO: 348529 - DNA, 623 bp, Homo sapiens; identical to SEQ ID NO: 345404
  chr11:128392116-128392739
  hypo

SEQ ID NO: 348530 - DNA, 543 bp, Homo sapiens; identical to SEQ ID NO: 345405
  chr11:129148497-129149040
  hypo

SEQ ID NO: 348531 - DNA, 820 bp, Homo sapiens; identical to SEQ ID NO: 345406
  chr11:129149096-129149916
  hypo

SEQ ID NO: 348532 - DNA, 123 bp, Homo sapiens; identical to SEQ ID NO: 346038
  chr11:130781427-130781550
  hypo

SEQ ID NO: 348533 - DNA, 161 bp, Homo sapiens; identical to SEQ ID NO: 345407
  chr11:133939437-133939598
  hypo

SEQ ID NO: 348534 - DNA, 209 bp, Homo sapiens; identical to SEQ ID NO: 341308
  chr12:939108-939317
  hypo

SEQ ID NO: 348535 - DNA, 94 bp, Homo sapiens; identical to SEQ ID NO: 346040
  chr12:2017667-2017761
  hypo

SEQ ID NO: 348536 - DNA, 213 bp, Homo sapiens; identical to SEQ ID NO: 214702
  chr12:2017874-2018087
  hypo

SEQ ID NO: 348537 - DNA, 248 bp, Homo sapiens; identical to SEQ ID NO: 341322
  chr12:2788614-2788862
  hypo

SEQ ID NO: 348538 - DNA, 198 bp, Homo sapiens; identical to SEQ ID NO: 347198
  chr12:3600534-3600732
  hypo

SEQ ID NO: 348539 - DNA, 396 bp, Homo sapiens; identical to SEQ ID NO: 288660
  chr12:3601625-3602021
  hypo

SEQ ID NO: 348540 - DNA, 85 bp, Homo sapiens; identical to SEQ ID NO: 345410
  chr12:4377809-4377894
  hypo

SEQ ID NO: 348541 - DNA, 244 bp, Homo sapiens; identical to SEQ ID NO: 202837
  chr12:4378558-4378802
  hypo

SEQ ID NO: 348542 - DNA, 55 bp, Homo sapiens; identical to SEQ ID NO: 345416
  chr12:8123528-8123583
  hypo

SEQ ID NO: 348543 - DNA, 73 bp, Homo sapiens; identical to SEQ ID NO: 345418
  chr12:19282260-19282333
  hypo

SEQ ID NO: 348544 - DNA, 840 bp, Homo sapiens; identical to SEQ ID NO: 202900
  chr12:19282363-19283203
  hypo

SEQ ID NO: 348545 - DNA, 144 bp, Homo sapiens; identical to SEQ ID NO: 347219
  chr12:19283425-19283569
  hypo

SEQ ID NO: 348546 - DNA, 117 bp, Homo sapiens; identical to SEQ ID NO: 347220
  chr12:21681020-21681137
  hypo

SEQ ID NO: 348547 - DNA, 118 bp, Homo sapiens; identical to SEQ ID NO: 347221
  chr12:22488705-22488823
  hypo

SEQ ID NO: 348548 - DNA, 252 bp, Homo sapiens; identical to SEQ ID NO: 202912
  chr12:24715505-24715757
  hypo

SEQ ID NO: 348549 - DNA, 83 bp, Homo sapiens; identical to SEQ ID NO: 346049
  chr12:29373882-29373965
  hypo

SEQ ID NO: 348550 - DNA, 263 bp, Homo sapiens; identical to SEQ ID NO: 341382
  chr12:31255691-31255954
  hypo

SEQ ID NO: 348551 - DNA, 34 bp, Homo sapiens; identical to SEQ ID NO: 214842
  chr12:32831540-32831574
  hypo

SEQ ID NO: 348552 - DNA, 237 bp, Homo sapiens; identical to SEQ ID NO: 214866
  chr12:47628809-47629046
  hypo

SEQ ID NO: 348553 - DNA, 141 bp, Homo sapiens; identical to SEQ ID NO: 214867
  chr12:47629208-47629349
  hypo

SEQ ID NO: 348554 - DNA, 111 bp, Homo sapiens; identical to SEQ ID NO: 214868
  chr12:47629379-47629490
  hypo

SEQ ID NO: 348555 - DNA, 243 bp, Homo sapiens
  chr12:47629544-47629787
  hypo
tggacgtgtgcaccgctgcctctcccagctgctgctggcccacgtggccgacgcctggggtgtggagctgccccaccgccaccccgtgggcgagtggatcaagaagaaaaaacctggcccgagagtcgaagggccgccccaggccaacagaaatcacccggccttacctctgtccccacccttaccttcccccacataccgccccctgcttgggttcccaccccagcgcttgccgctgctccc

SEQ ID NO: 348556 - DNA, 493 bp, Homo sapiens; identical to SEQ ID NO: 202958
  chr12:48576976-48577469
  hypo

SEQ ID NO: 348557 - DNA, 37 bp, Homo sapiens
  chr12:51421646-51421683
  hypo
gaaaaatccaaataaagtgcgaagtaaaaacaaactc

SEQ ID NO: 348558 - DNA, 144 bp, Homo sapiens; identical to SEQ ID NO: 341417
  chr12:53007462-53007606
  hypo

SEQ ID NO: 348559 - DNA, 278 bp, Homo sapiens; identical to SEQ ID NO: 347234
  chr12:54427358-54427636
  hypo

SEQ ID NO: 348560 - DNA, 136 bp, Homo sapiens; identical to SEQ ID NO: 341435
  chr12:56183329-56183465
  hypo

SEQ ID NO: 348561 - DNA, 359 bp, Homo sapiens; identical to SEQ ID NO: 346055
  chr12:56558022-56558381
  hypo

SEQ ID NO: 348562 - DNA, 264 bp, Homo sapiens; identical to SEQ ID NO: 347242
  chr12:93966037-93966301
  hypo

SEQ ID NO: 348563 - DNA, 850 bp, Homo sapiens; identical to SEQ ID NO: 347243
  chr12:94542238-94543088
  hypo

SEQ ID NO: 348564 - DNA, 86 bp, Homo sapiens; identical to SEQ ID NO: 345430
  chr12:94544052-94544138
  hypo

SEQ ID NO: 348565 - DNA, 348 bp, Homo sapiens; identical to SEQ ID NO: 203159
  chr12:104851545-104851893
  hypo

SEQ ID NO: 348566 - DNA, 83 bp, Homo sapiens; identical to SEQ ID NO: 345434
  chr12:113495127-113495210
  hypo

SEQ ID NO: 348567 - DNA, 218 bp, Homo sapiens; identical to SEQ ID NO: 341538
  chr12:117466159-117466377
  hypo

SEQ ID NO: 348568 - DNA, 396 bp, Homo sapiens
  chr12:120147746-120148142
  hypo
cggtggtttcgttgcaatcaggacaaagggtttggctttagatagtcttcgaggcttagcactcttcacttggcctaacagtgggatgttctttgggaatgtcagactgtgctaaactggatactggaagggaactgaatctggacagagggggtccattagctgaggcttgggcatctatggggacacagagataagagctacaacggctcctctctactattttgtgttttacgagcatgaaacgtggcttcaacatattggctcccttgaaagtaaagaaaaaacaccatgtccttggcctcacacctgctatcatgagtagcttctccaggtccttgataatataaatttggaagactgctccaattcctgggacatgggttagggagtttt

SEQ ID NO: 348569 - DNA, 208 bp, Homo sapiens
  chr12:120148396-120148604
  hypo
agtttcagcagggagtttccaagcagtttcttttcataggtgaaagaaaagaaaaacagaagacatcgtgaggctgatctgtttatgaccaaaccatccagagaaaccaagagaaggttaaggccaagttattcctggaaatgctcagaaacgcacatatgctcttagctcagcccgtattttgatctgagctccaaatgcaaaatgc

SEQ ID NO: 348570 - DNA, 64 bp, Homo sapiens; identical to SEQ ID NO: 346059
  chr12:120172992-120173056
  hypo

SEQ ID NO: 348571 - DNA, 136 bp, Homo sapiens; identical to SEQ ID NO: 346060
  chr12:120173137-120173273
  hypo

SEQ ID NO: 348572 - DNA, 200 bp, Homo sapiens; identical to SEQ ID NO: 341558
  chr12:121205162-121205362
  hypo

SEQ ID NO: 348573 - DNA, 703 bp, Homo sapiens
  chr12:121687598-121688301
  hypo
cggcaccacgatcctcgactcggggttcttgtccagcatacgggtgatcaggtccttcaagtcctcagctatgtcgggcctggggatggagaggcgtcagggtggcagacacgggaccgccaagaactcggacaggagagatgcgggacggcgggagatactcactggtctggaaattccagggcctgactcttgatcttactgtgtaaacacatgatccgctcgtccatgaatgggcactgcaaagaggccagggacagagtggcagtcaatggcggccacatctgcccttcgagggccacctgtgctgtgccactccacataggatacagcagagaaatcaacaattgcggcccaggctagggggcaagcagttcccattctccccgagaatggccaagacacaggggtgtggggcctggccgacgcagggcagagccaggaatggccctctcgaagggctagagcctttcccaagcacactgcaggctccctctgtagctgggcctcagtttacctacttacaccaaagcaaacactgctcgtcacctacttgccaggtgaacaacaggaacaacaagaataacacaaaagactttgtgttatttgtggcagcagcagtgattttcaagggcttagcctggatcgcgccacgccctgccctgaggttttcattcactgttccccgtccctggaatgttct

SEQ ID NO: 348574 - DNA, 239 bp, Homo sapiens
  chr12:121688331-121688570
  hypo
cccaccatgcaggtgtctgactaaagctcaccttctcagggaggacttcctgaagccctgtctaaaacagacaacccccaatgccgccaccgcccacatcactcctcatcgtagcacttatccctgacgttatcgtacagatttgtttattgtttaacccctcccacgggaacgttagctccaagaaggcagggatttctggctgtcttgctcactgcggactctccgtgcctaggagc

SEQ ID NO: 348575 - DNA, 124 bp, Homo sapiens; identical to SEQ ID NO: 341563
  chr12:121756071-121756195
  hypo

SEQ ID NO: 348576 - DNA, 39 bp, Homo sapiens; identical to SEQ ID NO: 346061
  chr12:122192684-122192723
  hypo

SEQ ID NO: 348577 - DNA, 116 bp, Homo sapiens; identical to SEQ ID NO: 215161
  chr12:122192843-122192959
  hypo

SEQ ID NO: 348578 - DNA, 45 bp, Homo sapiens; identical to SEQ ID NO: 346063
  chr12:122192989-122193034
  hypo

SEQ ID NO: 348579 - DNA, 407 bp, Homo sapiens; identical to SEQ ID NO: 341577
  chr12:122480960-122481367
  hypo

SEQ ID NO: 348580 - DNA, 123 bp, Homo sapiens; identical to SEQ ID NO: 341584
  chr12:122970391-122970514
  hypo

SEQ ID NO: 348581 - DNA, 473 bp, Homo sapiens; identical to SEQ ID NO: 334688
  chr12:123380333-123380806
  hypo

SEQ ID NO: 348582 - DNA, 78 bp, Homo sapiens
  chr12:131159367-131159445
  hypo
cgcctgctcgggacgggtcgtatacgtgggatcctgtaacacgtggccttccgggtccggcctcttccacacagcgtg

SEQ ID NO: 348583 - DNA, 260 bp, Homo sapiens; identical to SEQ ID NO: 215290
  chr12:131159530-131159790
  hypo

SEQ ID NO: 348584 - DNA, 236 bp, Homo sapiens; identical to SEQ ID NO: 346066
  chr12:131271740-131271976
  hypo

SEQ ID NO: 348585 - DNA, 298 bp, Homo sapiens; identical to SEQ ID NO: 316760
  chr12:131272032-131272330
  hypo

SEQ ID NO: 348586 - DNA, 714 bp, Homo sapiens; identical to SEQ ID NO: 346068
  chr12:131272367-131273081
  hypo

SEQ ID NO: 348587 - DNA, 129 bp, Homo sapiens
  chr12:132222124-132222253
  hypo
taacatctttcccccgtagagacttgcatacccagtactgctgtgtctcgtgggaggctgctgggtcactaagcttttctggctttcatacgctgggtatttaataatcaccttaggatatactcagtc

SEQ ID NO: 348588 - DNA, 109 bp, Homo sapiens; identical to SEQ ID NO: 346069
  chr12:132378083-132378192
  hypo

SEQ ID NO: 348589 - DNA, 99 bp, Homo sapiens; identical to SEQ ID NO: 341656
  chr12:132411621-132411720
  hypo

SEQ ID NO: 348590 - DNA, 816 bp, Homo sapiens; identical to SEQ ID NO: 341659
  chr12:132536813-132537629
  hypo

SEQ ID NO: 348591 - DNA, 136 bp, Homo sapiens; identical to SEQ ID NO: 341669
  chr12:133097814-133097950
  hypo

SEQ ID NO: 348592 - DNA, 358 bp, Homo sapiens; identical to SEQ ID NO: 341680
  chr12:133435596-133435954
  hypo

SEQ ID NO: 348593 - DNA, 167 bp, Homo sapiens; identical to SEQ ID NO: 345438
  chr13:20735265-20735432
  hypo

SEQ ID NO: 348594 - DNA, 190 bp, Homo sapiens; identical to SEQ ID NO: 341693
  chr13:25026495-25026685
  hypo

SEQ ID NO: 348595 - DNA, 40 bp, Homo sapiens; identical to SEQ ID NO: 341698
  chr13:28152529-28152569
  hypo

SEQ ID NO: 348596 - DNA, 123 bp, Homo sapiens; identical to SEQ ID NO: 341702
  chr13:28745545-28745668
  hypo

SEQ ID NO: 348597 - DNA, 200 bp, Homo sapiens; identical to SEQ ID NO: 345441
  chr13:29292491-29292691
  hypo

SEQ ID NO: 348598 - DNA, 242 bp, Homo sapiens; identical to SEQ ID NO: 345442
  chr13:29293342-29293584
  hypo

SEQ ID NO: 348599 - DNA, 100 bp, Homo sapiens; identical to SEQ ID NO: 346075
  chr13:30123381-30123481
  hypo

SEQ ID NO: 348600 - DNA, 116 bp, Homo sapiens; identical to SEQ ID NO: 341718
  chr13:32983242-32983358
  hypo

SEQ ID NO: 348601 - DNA, 85 bp, Homo sapiens
  chr13:37643604-37643689
  hypo
cggctgcagtggggaggtgcgaggggtggcagcaggaacggctgtgggagcagcagtggcggtggtgggtcccctgtgccccacg

SEQ ID NO: 348602 - DNA, 479 bp, Homo sapiens; identical to SEQ ID NO: 347264
  chr13:42032017-42032496
  hypo

SEQ ID NO: 348603 - DNA, 109 bp, Homo sapiens; identical to SEQ ID NO: 347265
  chr13:42032649-42032758
  hypo

SEQ ID NO: 348604 - DNA, 141 bp, Homo sapiens; identical to SEQ ID NO: 341739
  chr13:52335934-52336075
  hypo

SEQ ID NO: 348605 - DNA, 718 bp, Homo sapiens; identical to SEQ ID NO: 347268
  chr13:77459628-77460346
  hypo

SEQ ID NO: 348606 - DNA, 287 bp, Homo sapiens; identical to SEQ ID NO: 203409
  chr13:95201339-95201626
  hypo

SEQ ID NO: 348607 - DNA, 229 bp, Homo sapiens; identical to SEQ ID NO: 203410
  chr13:95201662-95201891
  hypo

SEQ ID NO: 348608 - DNA, 438 bp, Homo sapiens; identical to SEQ ID NO: 341762
  chr13:96085837-96086275
  hypo

SEQ ID NO: 348609 - DNA, 351 bp, Homo sapiens
  chr13:98869699-98870050
  hypo
cgtctacgaccgtcgtcgcaggaaatgatccttgtaactttctcgtgttgctgtcttgtcactgctgtactcgagcttttgtagctcctgagacttaagtagcattcatcctttgcctgaggatcaagtgtgggcttcgtagctcggggagcctgggagagagcaatgagcctccatggaggggccctgtacaccgggaggtgcctgggcaactcccatggctcatctcaaccacagtcctcggcggtttgttttctgcattagcttctcatgccagaacaccctcttatttgtttacctgcttagtgttggcctcttgcaggtagagtggccactccttggagggcaagg

SEQ ID NO: 348610 - DNA, 220 bp, Homo sapiens
  chr13:98870098-98870318
  hypo
gcatgaaactgactggtgacagttctgctcggtcgtttaactatacgagagttggtgctgtcctagcataacaagggaaagagcaagtgggaagagcttctgagtcccttcctcgtgttttcacagcgtgaaggtggggctgggattggagtccggcccgccagaccctcaacttacccatcttctgggcactaagagccgcctcctttgtgagattcgc

SEQ ID NO: 348611 - DNA, 82 bp, Homo sapiens; identical to SEQ ID NO: 341769
  chr13:99115936-99116018
  hypo

SEQ ID NO: 348612 - DNA, 535 bp, Homo sapiens; identical to SEQ ID NO: 341819
  chr13:113497181-113497716
  hypo

SEQ ID NO: 348613 - DNA, 177 bp, Homo sapiens
  chr13:113797753-113797930
  hypo
cgcacacgcccagcacttgggttctcctgttggcatcctccggccagatgcattcatcccatttcgcccggcccgtttgtctctgtccatccgtcaagctttcttgacttcttggtgcattttcaggcaaaccgcagacgccaacactcccctcgctgcctgggttgctgcctggcg

SEQ ID NO: 348614 - DNA, 112 bp, Homo sapiens
  chr13:113797960-113798072
  hypo
aggccaacgctcggacagctgcgctcacctgcagatccgacccctgccgacgacgtggggcctcgccctgcaagcccgctgcccctccgggtgcccctgcgctctgcctccc

SEQ ID NO: 348615 - DNA, 38 bp, Homo sapiens; identical to SEQ ID NO: 346080
  chr13:114188365-114188403
  hypo

SEQ ID NO: 348616 - DNA, 46 bp, Homo sapiens
  chr13:114189691-114189737
  hypo
cgcacctgggcaccgtcaccattgtcccaacagtgcacctgtgcac

SEQ ID NO: 348617 - DNA, 303 bp, Homo sapiens; identical to SEQ ID NO: 215680
  chr13:114189809-114190112
  hypo

SEQ ID NO: 348618 - DNA, 278 bp, Homo sapiens
  chr13:114190142-114190420
  hypo
ggcacctgagtgggggtctggggaggggatggggatggcattcgctgtgtttgctgtgtctatatcggcacctgagtcggggtctggggagggactggggatggatggcactcgctgtctttgctgtgtccgtatcagcacctgagtgggatcttgtgctgtaatttggcaagatgttaccattggggaaactaaagggtaatgaggactttgtattactcttaaaactgcaggttaatatataattatctcaaaataaaaagtttccggctgggcgc

SEQ ID NO: 348619 - DNA, 161 bp, Homo sapiens; identical to SEQ ID NO: 346081
  chr13:114271763-114271924
  hypo

SEQ ID NO: 348620 - DNA, 206 bp, Homo sapiens
  chr13:114302352-114302558
  hypo
gccgcagctgtgtttccacctcatctccagcttgagtggcagccagcggcgccacctgcacacgagccccctccattcgagaagcacagactatgagtgtggccacgcgtcccatgacgtgaactcacgtctgcgccgagacctttgccggcggttttttactgacggagtaagcactggagatgcttggtacagcgtcttccatc

SEQ ID NO: 348621 - DNA, 302 bp, Homo sapiens; identical to SEQ ID NO: 347277
  chr13:114565969-114566271
  hypo

SEQ ID NO: 348622 - DNA, 114 bp, Homo sapiens; identical to SEQ ID NO: 347278
  chr13:114566409-114566523
  hypo

SEQ ID NO: 348623 - DNA, 138 bp, Homo sapiens
  chr13:114748186-114748324
  hypo
cgaacctcgaaagtggaacagggaggccgcctcccatggctgcctggatggcaggcacagtgggagagtaatgctctgaacctcccaatgtgatgaagccgaaagccgaggcggggccagcaggcctcccgggcacag

SEQ ID NO: 348624 - DNA, 92 bp, Homo sapiens; identical to SEQ ID NO: 346082
  chr13:114807847-114807939
  hypo

SEQ ID NO: 348625 - DNA, 91 bp, Homo sapiens; identical to SEQ ID NO: 341885
  chr14:21969884-21969975
  hypo

SEQ ID NO: 348626 - DNA, 270 bp, Homo sapiens; identical to SEQ ID NO: 347285
  chr14:36003004-36003274
  hypo

SEQ ID NO: 348627 - DNA, 36 bp, Homo sapiens
  chr14:50287178-50287214
  hypo
aagtattgtatcaagagctaataatcggctgggcgc

SEQ ID NO: 348628 - DNA, 223 bp, Homo sapiens; identical to SEQ ID NO: 203572
  chr14:51562012-51562235
  hypo

SEQ ID NO: 348629 - DNA, 296 bp, Homo sapiens; identical to SEQ ID NO: 215787
  chr14:55765714-55766010
  hypo

SEQ ID NO: 348630 - DNA, 55 bp, Homo sapiens; identical to SEQ ID NO: 346085
  chr14:55766084-55766139
  hypo

SEQ ID NO: 348631 - DNA, 79 bp, Homo sapiens; identical to SEQ ID NO: 347299
  chr14:60097114-60097193
  hypo

SEQ ID NO: 348632 - DNA, 138 bp, Homo sapiens
  chr14:73146636-73146774
  hypo
cgacgtgccttccctgcagaatcaggagcaagcctcagctggaggccactgccacagcctgctacctcggcctagcctttaatgagggctgcgggaggagggagaggcgggctggggagacaaggcgcctgcgaggag

SEQ ID NO: 348633 - DNA, 99 bp, Homo sapiens
  chr14:73147150-73147249
  hypo
cggggaagcagacagtagggcccgctccccacaggaccctccaatcgtcagagccctcgacggcagagaactcgctctccccacaggccatcttgccac

SEQ ID NO: 348634 - DNA, 464 bp, Homo sapiens; identical to SEQ ID NO: 334962
  chr14:73359779-73360243
  hypo

SEQ ID NO: 348635 - DNA, 182 bp, Homo sapiens; identical to SEQ ID NO: 345461
  chr14:94406037-94406219
  hypo

SEQ ID NO: 348636 - DNA, 208 bp, Homo sapiens; identical to SEQ ID NO: 342027
  chr14:100748335-100748543
  hypo

SEQ ID NO: 348637 - DNA, 279 bp, Homo sapiens; identical to SEQ ID NO: 342063
  chr14:103423623-103423902
  hypo

SEQ ID NO: 348638 - DNA, 598 bp, Homo sapiens; identical to SEQ ID NO: 346088
  chr14:104048314-104048912
  hypo

SEQ ID NO: 348639 - DNA, 127 bp, Homo sapiens; identical to SEQ ID NO: 346089
  chr14:104048982-104049109
  hypo

SEQ ID NO: 348640 - DNA, 335 bp, Homo sapiens
  chr14:104202370-104202705
  hypo
cggtctccaaggcgagcccaccaccactcagtctcgctttcgtccttgcgcctcaggatggtgagggcgtccccttcgtggaaggacagctcgtcactgttctgggcctcgtagtcccacagagcatacgccacacctttgttcatcacacccagcttttcctgcacccctggagccagagagcaatggtcaggcctcagcagagggtggcctgcagcaagggaccctgctcgaggaacaggacacagtcgtgctgctgccgaggctgctctcagcaggccccacagaggccagcgagggagatgagacactattgaagactagggcccccaccc

SEQ ID NO: 348641 - DNA, 236 bp, Homo sapiens; identical to SEQ ID NO: 216079
  chr14:104618440-104618676
  hypo

SEQ ID NO: 348642 - DNA, 100 bp, Homo sapiens
  chr14:104623761-104623861
  hypo
gtttgatgggggagaggcggaaagtctggcttctggaccaccatctgcctccctctctgcctccaaggagtcctgctggggcagaccgcccacacacccc

SEQ ID NO: 348643 - DNA, 139 bp, Homo sapiens; identical to SEQ ID NO: 346091
  chr14:104641166-104641305
  hypo

SEQ ID NO: 348644 - DNA, 163 bp, Homo sapiens; identical to SEQ ID NO: 346092
  chr14:104645553-104645716
  hypo

SEQ ID NO: 348645 - DNA, 198 bp, Homo sapiens; identical to SEQ ID NO: 345462
  chr14:105189960-105190158
  hypo

SEQ ID NO: 348646 - DNA, 167 bp, Homo sapiens
  chr14:105240770-105240937
  hypo
cgagacccaccctcccgccttccaccacaggcgactgtgcttttaaagcaaaggccccatctgcaggagaatcgtccccaaacacagtgacctggaactaaccaagtggctggaccctggcccccttcacagtaaatacctcctgggccaagtccccagaacaggtt

SEQ ID NO: 348647 - DNA, 132 bp, Homo sapiens; identical to SEQ ID NO: 318662
  chr14:105241177-105241309
  hypo

SEQ ID NO: 348648 - DNA, 227 bp, Homo sapiens
  chr14:105241428-105241655
  hypo
tccttcttgaggatcttcatggcgtagtagcggcctgtggccttctccttcaccaggatcaccttgccgaaagtgcccttgcccagcagcttcaggtactcaaactcgttcatggtctatgggcaggcaccagggtcagcaagcggcgctgccaacagtgcccagctggtcggcatgcgtggggtggcatgaggggccccagagtcggaggcagagccaggagaggc

SEQ ID NO: 348649 - DNA, 640 bp, Homo sapiens; identical to SEQ ID NO: 342110
  chr14:105687735-105688375
  hypo

SEQ ID NO: 348650 - DNA, 421 bp, Homo sapiens; identical to SEQ ID NO: 342111
  chr14:105689523-105689944
  hypo

SEQ ID NO: 348651 - DNA, 115 bp, Homo sapiens; identical to SEQ ID NO: 346095
  chr15:28516961-28517076
  hypo

SEQ ID NO: 348652 - DNA, 177 bp, Homo sapiens; identical to SEQ ID NO: 346096
  chr15:28517198-28517375
  hypo

SEQ ID NO: 348653 - DNA, 53 bp, Homo sapiens; identical to SEQ ID NO: 347321
  chr15:29130654-29130707
  hypo

SEQ ID NO: 348654 - DNA, 386 bp, Homo sapiens; identical to SEQ ID NO: 347324
  chr15:30114394-30114780
  hypo

SEQ ID NO: 348655 - DNA, 375 bp, Homo sapiens; identical to SEQ ID NO: 290655
  chr15:30114810-30115185
  hypo

SEQ ID NO: 348656 - DNA, 100 bp, Homo sapiens; identical to SEQ ID NO: 342131
  chr15:31188921-31189021
  hypo

SEQ ID NO: 348657 - DNA, 250 bp, Homo sapiens; identical to SEQ ID NO: 342134
  chr15:31561317-31561567
  hypo

SEQ ID NO: 348658 - DNA, 209 bp, Homo sapiens; identical to SEQ ID NO: 290663
  chr15:32162282-32162491
  hypo

SEQ ID NO: 348659 - DNA, 761 bp, Homo sapiens; identical to SEQ ID NO: 345467
  chr15:32162523-32163284
  hypo

SEQ ID NO: 348660 - DNA, 375 bp, Homo sapiens
  chr15:34635788-34636163
  hypo
cgtaaagcgaaagagcgtaaagttattttatgaaactggtgaagcatgtttcagcggtcgaaccaagatttaaagttaggtccctaccgcaaattcagcgctctttcttatggtggtgagtagctaataataacgtaataaagtgcaccttctaggagtttttacaatttttaaaagaatatagaagttctccttataagactctcgtttaaagaaatgaaaatgagaaccaaaatatcattacaaagatcatcgttacgccattatttacaatgacaaaagcattggaatatatattaactgtgtaaccagaaaaacctgcacttttttttttttttttttaagaatatggtttggcggggcgcggtggctcac

SEQ ID NO: 348661 - DNA, 226 bp, Homo sapiens; identical to SEQ ID NO: 347334
  chr15:45670236-45670462
  hypo

SEQ ID NO: 348662 - DNA, 339 bp, Homo sapiens; identical to SEQ ID NO: 345471
  chr15:45722599-45722938
  hypo

SEQ ID NO: 348663 - DNA, 77 bp, Homo sapiens; identical to SEQ ID NO: 345475
  chr15:48936649-48936726
  hypo

SEQ ID NO: 348664 - DNA, 153 bp, Homo sapiens; identical to SEQ ID NO: 342203
  chr15:63066085-63066238
  hypo

SEQ ID NO: 348665 - DNA, 76 bp, Homo sapiens; identical to SEQ ID NO: 342212
  chr15:63695768-63695844
  hypo

SEQ ID NO: 348666 - DNA, 350 bp, Homo sapiens; identical to SEQ ID NO: 203920
  chr15:63795501-63795851
  hypo

SEQ ID NO: 348667 - DNA, 338 bp, Homo sapiens; identical to SEQ ID NO: 347348
  chr15:63795894-63796232
  hypo

SEQ ID NO: 348668 - DNA, 218 bp, Homo sapiens; identical to SEQ ID NO: 342214
  chr15:63889834-63890052
  hypo

SEQ ID NO: 348669 - DNA, 421 bp, Homo sapiens; identical to SEQ ID NO: 342221
  chr15:66946036-66946457
  hypo

SEQ ID NO: 348670 - DNA, 99 bp, Homo sapiens; identical to SEQ ID NO: 342225
  chr15:68893753-68893852
  hypo

SEQ ID NO: 348671 - DNA, 587 bp, Homo sapiens; identical to SEQ ID NO: 345477
  chr15:71407569-71408156
  hypo

SEQ ID NO: 348672 - DNA, 847 bp, Homo sapiens; identical to SEQ ID NO: 347352
  chr15:80215312-80216159
  hypo

SEQ ID NO: 348673 - DNA, 196 bp, Homo sapiens; identical to SEQ ID NO: 347353
  chr15:81294105-81294301
  hypo

SEQ ID NO: 348674 - DNA, 194 bp, Homo sapiens; identical to SEQ ID NO: 345478
  chr15:82339684-82339878
  hypo

SEQ ID NO: 348675 - DNA, 364 bp, Homo sapiens
  chr15:90903993-90904357
  hypo
cgaacccacacgggagaacggcccttcaaatgcccggagtgcgggaagggcttcagagatagttctcattttgtagctcacatgagcactcattcaggagagaggcctttcagttgtcctgactgccacaaaagcttcagtcagagctcacatttggtcacgcaccaaagaacacacacaggtgagagaccttttaagtgcgaaaactgtgggaaaggattcgccgacagctccgccctcattaagcaccaacgaatccacaccggagaaagaccctacaaatgtggagagtgtgggaagagcttcaatcagagctcccactttattacccatcagcgaatccacttaggagacaggccctatc

SEQ ID NO: 348676 - DNA, 297 bp, Homo sapiens
  chr15:91840031-91840328
  hypo
cgctccttctgcccgatcgctgggctcacgctccttctgcccgatcttgggcgcacgctccttctgcccgatcgttgggcgcacgctccttctgcccgatcgttgggcgcatgctccttctgcccgatcgttgggagcacgctcattctgcccgattgttgggagcacgctccttctgcccgatcgttgggcgcacgctccttctgcccgatcgttgggcgcacgcttcttctgcctgatcgttgggcgcacgctccttctgcctgatcgttgggcgcacgctccttctgcctgatc

SEQ ID NO: 348677 - DNA, 103 bp, Homo sapiens; identical to SEQ ID NO: 347360
  chr15:92459227-92459330
  hypo

SEQ ID NO: 348678 - DNA, 85 bp, Homo sapiens; identical to SEQ ID NO: 346105
  chr15:99506062-99506147
  hypo

SEQ ID NO: 348679 - DNA, 468 bp, Homo sapiens; identical to SEQ ID NO: 345483
  chr15:100882092-100882560
  hypo

SEQ ID NO: 348680 - DNA, 247 bp, Homo sapiens; identical to SEQ ID NO: 342318
  chr15:101938625-101938872
  hypo

SEQ ID NO: 348681 - DNA, 179 bp, Homo sapiens
  chr16:142447-142626
  hypo
cgtagcacttgcacggcaagcccccaaaaccaaggagaagcaggtggcagtgctgagggctctcagatcagaaccaacagccaggcaggtagtgcctatccactacacacctgccactctgggctccttgagcttctgtgactcacctcctgcacagcgggggccaggggattcctaaa

SEQ ID NO: 348682 - DNA, 100 bp, Homo sapiens; identical to SEQ ID NO: 346108
  chr16:410895-410995
  hypo

SEQ ID NO: 348683 - DNA, 111 bp, Homo sapiens; identical to SEQ ID NO: 346109
  chr16:411606-411717
  hypo

SEQ ID NO: 348684 - DNA, 72 bp, Homo sapiens; identical to SEQ ID NO: 342335
  chr16:440413-440485
  hypo

SEQ ID NO: 348685 - DNA, 77 bp, Homo sapiens; identical to SEQ ID NO: 216551
  chr16:667407-667484
  hypo

SEQ ID NO: 348686 - DNA, 200 bp, Homo sapiens; identical to SEQ ID NO: 346112
  chr16:668074-668274
  hypo

SEQ ID NO: 348687 - DNA, 70 bp, Homo sapiens
  chr16:677367-677437
  hypo
cgggccatcgtctcctgcacccccgtgcacctcatcgacaagcttccactgcccgtcaccatcaagagcc

SEQ ID NO: 348688 - DNA, 34 bp, Homo sapiens
  chr16:677803-677837
  hypo
cgggaggagggggcgcggctgggctgctggtgct

SEQ ID NO: 348689 - DNA, 63 bp, Homo sapiens; identical to SEQ ID NO: 216557
  chr16:677909-677972
  hypo

SEQ ID NO: 348690 - DNA, 106 bp, Homo sapiens
  chr16:678084-678190
  hypo
ctgtgaattcatgcgctgcgagtggcggggctgcccagaggccgggggagcagacagggccggtgctccctctggaagcttgggtgaccggggccctggctcccac

SEQ ID NO: 348691 - DNA, 472 bp, Homo sapiens
  chr16:1424928-1425400
  hypo
cgctgccctagccgcacatgagatttgtcgggaacacagctgtggggcacgtggcctgcacctcacccctctgcccaggcctccgcttctcctccctggaagcagctggcaccagtcagcgccacggggaccatgggagcaaccacagggtggcgggtggcccctcgcccgaggcctggcgctcggcggtcacaccccccgagccccccagggcagccggagtatcctcgtgccgcggtggtggccccagcggagcacaggcagaggctggcgtggacgtggcgcagctggcaggtccgggcctctgaacttcaccccgaatctggccgcgctcagcagccacactgtgtggagaccgtgctccaccacccagagcggcaggcgggagagaagcctggctcgggagtggacggtggactccagaggccgcaaggcagaggccacccccaccccactccaccgcacagcacga

SEQ ID NO: 348692 - DNA, 407 bp, Homo sapiens; identical to SEQ ID NO: 346114
  chr16:1425684-1426091
  hypo

SEQ ID NO: 348693 - DNA, 301 bp, Homo sapiens; identical to SEQ ID NO: 342389
  chr16:1652282-1652583
  hypo

SEQ ID NO: 348694 - DNA, 90 bp, Homo sapiens; identical to SEQ ID NO: 342390
  chr16:1677046-1677136
  hypo

SEQ ID NO: 348695 - DNA, 194 bp, Homo sapiens; identical to SEQ ID NO: 346115
  chr16:1730112-1730306
  hypo

SEQ ID NO: 348696 - DNA, 105 bp, Homo sapiens; identical to SEQ ID NO: 346116
  chr16:1730761-1730866
  hypo

SEQ ID NO: 348697 - DNA, 183 bp, Homo sapiens; identical to SEQ ID NO: 346117
  chr16:1813299-1813482
  hypo

SEQ ID NO: 348698 - DNA, 90 bp, Homo sapiens; identical to SEQ ID NO: 346118
  chr16:1814037-1814127
  hypo

SEQ ID NO: 348699 - DNA, 48 bp, Homo sapiens; identical to SEQ ID NO: 345484
  chr16:2042503-2042551
  hypo

SEQ ID NO: 348700 - DNA, 228 bp, Homo sapiens
  chr16:2042997-2043225
  hypo
cgagacctaccagagcccgcccttcaccgagaccctggacaccagccccaaagggtaccaggtgcccgcctactagcggctggcaggcacagaccagggctccaaggccaccccaccaacgcaggccccagggtctccgggacctcccttgggtccttccagctcagtgccgcggacagagtaggtggccgctttgcgccatccggggccaagagggggtggacccgc

SEQ ID NO: 348701 - DNA, 74 bp, Homo sapiens
  chr16:2104688-2104762
  hypo
cgaacacctctgcaacggcaggagctgggcgagttctgtcactgggaggtggtgctgctgacttggtctcaacc

SEQ ID NO: 348702 - DNA, 187 bp, Homo sapiens
  chr16:2105384-2105571
  hypo
ccgccgcttctcccccagctgactttgtcctgcagtggatggatgttggcttgtcctcggaattccttctggtgctggtgaacttggtcaaattcaatagctgttacctcgacgagtacatcgcaaggatggttcagtaagaaaagaattgagatcctgttctgataatggtcctaagttcagctcc

SEQ ID NO: 348703 - DNA, 67 bp, Homo sapiens; identical to SEQ ID NO: 346120
  chr16:2106533-2106600
  hypo

SEQ ID NO: 348704 - DNA, 62 bp, Homo sapiens; identical to SEQ ID NO: 216652
  chr16:2106641-2106703
  hypo

SEQ ID NO: 348705 - DNA, 426 bp, Homo sapiens; identical to SEQ ID NO: 346122
  chr16:2107057-2107483
  hypo

SEQ ID NO: 348706 - DNA, 75 bp, Homo sapiens; identical to SEQ ID NO: 346123
  chr16:2229615-2229690
  hypo

SEQ ID NO: 348707 - DNA, 265 bp, Homo sapiens; identical to SEQ ID NO: 216670
  chr16:2230223-2230488
  hypo

SEQ ID NO: 348708 - DNA, 72 bp, Homo sapiens; identical to SEQ ID NO: 346125
  chr16:2278311-2278383
  hypo

SEQ ID NO: 348709 - DNA, 388 bp, Homo sapiens; identical to SEQ ID NO: 346126
  chr16:2280815-2281203
  hypo

SEQ ID NO: 348710 - DNA, 237 bp, Homo sapiens; identical to SEQ ID NO: 216674
  chr16:2281402-2281639
  hypo

SEQ ID NO: 348711 - DNA, 61 bp, Homo sapiens; identical to SEQ ID NO: 346128
  chr16:2281702-2281763
  hypo

SEQ ID NO: 348712 - DNA, 810 bp, Homo sapiens; identical to SEQ ID NO: 346129
  chr16:2282326-2283136
  hypo

SEQ ID NO: 348713 - DNA, 512 bp, Homo sapiens; identical to SEQ ID NO: 342425
  chr16:2358246-2358758
  hypo

SEQ ID NO: 348714 - DNA, 394 bp, Homo sapiens; identical to SEQ ID NO: 346130
  chr16:2540434-2540828
  hypo

SEQ ID NO: 348715 - DNA, 60 bp, Homo sapiens; identical to SEQ ID NO: 346131
  chr16:2540933-2540993
  hypo

SEQ ID NO: 348716 - DNA, 135 bp, Homo sapiens; identical to SEQ ID NO: 342431
  chr16:2544830-2544965
  hypo

SEQ ID NO: 348717 - DNA, 49 bp, Homo sapiens; identical to SEQ ID NO: 346132
  chr16:2770043-2770092
  hypo

SEQ ID NO: 348718 - DNA, 173 bp, Homo sapiens; identical to SEQ ID NO: 346133
  chr16:2806405-2806578
  hypo

SEQ ID NO: 348719 - DNA, 173 bp, Homo sapiens
  chr16:2974650-2974823
  hypo
gtgggtcacgcaacccccccaggctagtcaaggttcaggcaggtggagacaaagcccggttgctgaggggcctgtggactttaacgggcggagtggcggtgggtcagcatctaccatccaagagcctgaacgggcaagagtgggaacgggtcctcagccttccacaagccggc

SEQ ID NO: 348720 - DNA, 326 bp, Homo sapiens; identical to SEQ ID NO: 346134
  chr16:3021581-3021907
  hypo

SEQ ID NO: 348721 - DNA, 52 bp, Homo sapiens
  chr16:3139033-3139085
  hypo
cgctgtggaggaccccgggtaggtggcgcagggcgcggctggcggaaggcgg

SEQ ID NO: 348722 - DNA, 608 bp, Homo sapiens
  chr16:3139367-3139975
  hypo
gggccgctcgcccgtgtggctgcggcgatggcgggccaggttggagctattgcggaaacggtggccgcaggtgtcgcaggcgtggggcttctcccctgtgtggatgcgctggtggcgcgccaggtgggcgctctggctgaagccctcaccgcactcgctgcagcggcagggcttctcgcccgtgtggctgcgctggtggcgggccagatcctgggtctggccgaaactcttcccgcactgggtgcagtggtggggccgagggccaccgtgggtcagcaggtggcgggcaaggctggcccggcgcacaaagcgcttcccgcactgcggacaggcgtagggcttctcgcccgtgtgcacccgttggtggctgaccagctgcgagctctgcgtgaagctgcggccgcaagcctggcaggagaagggccgctcgcccgtgtgcaccctccggtgggccaccaggtgctcgctgcgccggaaggccttgccgcagtcgctgcacacgaagggcctccggtcggagtcccggcggcggctgccggagccttcggaggaccggcggtccttgtccctggcgtggatccgcaggtggcgcttgaggctggagcggc

SEQ ID NO: 348723 - DNA, 203 bp, Homo sapiens
  chr16:3696491-3696694
  hypo
cgggtgtaggggttgggtggggagaggatgtcctctgaaaaggtgacatttaagctgaaactggaatgacaagaaggccccagctctgcaggcagagcggaaggctcagagcttagaatcacgtaggtcatggaaagcattggatttcgtgttagggacaatgagaaactggtgacagattttaagtaggggaataaagagat

SEQ ID NO: 348724 - DNA, 62 bp, Homo sapiens
  chr16:3696802-3696864
  hypo
ctgcagaatctggaggacgtgcaggctcagggtgcatggtgcgggcggggctgagggggagc

SEQ ID NO: 348725 - DNA, 193 bp, Homo sapiens
  chr16:4203995-4204188
  hypo
atcgtgaacactggagattcaaacagcagagagaccacctcacaccattctgtcaacccgtgccaagtgcccaggcctgtgccaacgcttggcacacaatgattcaacagaggcagcctcatgcttcacggcccgatgctcgcttgttgtctatggccgtaggctaacctgcaaataaagaactggactgcac

SEQ ID NO: 348726 - DNA, 543 bp, Homo sapiens; identical to SEQ ID NO: 345486
  chr16:4233245-4233788
  hypo

SEQ ID NO: 348727 - DNA, 118 bp, Homo sapiens
  chr16:4920116-4920234
  hypo
cgttggctcctagctttcctctccacgtacggtgagctgatgaagacaggagttgcagtgagctgcagccggtggtgactgtgttttgttcttcagcatagaggcgcagactcgggag

SEQ ID NO: 348728 - DNA, 200 bp, Homo sapiens; identical to SEQ ID NO: 216748
  chr16:4920289-4920489
  hypo

SEQ ID NO: 348729 - DNA, 314 bp, Homo sapiens
  chr16:4920526-4920840
  hypo
tgaaggagcctctccagaagctcaaggaagccattggcagggcgatgccagagcagatggccaagtaccaggacgaatgccaggcacacacgcaggcaaaggttgccaagtaagtttgtcctggcgcttgcaggtgcaaccctcccgtcttgcctcttcccctcccgtttctcggtgtgtactgccgtttcccaaggagcctcttggctcttctttggccttttctccttctctgtgaagtcccagtagtgcagagtgaggggagaggcggtgggcaggagcaccttggggccccatgtaattctattcacccc

SEQ ID NO: 348730 - DNA, 298 bp, Homo sapiens; identical to SEQ ID NO: 335285
  chr16:9186882-9187180
  hypo

SEQ ID NO: 348731 - DNA, 74 bp, Homo sapiens; identical to SEQ ID NO: 342490
  chr16:11974709-11974783
  hypo

SEQ ID NO: 348732 - DNA, 150 bp, Homo sapiens
  chr16:12210622-12210772
  hypo
cgtggaaacaggcttagtcaatacctgcttcaacgcggacgaaccgtggaaacaggcttagtcaatacgtgcttcaacgaggacgaaccatggaaacaggcttagtcaatacctgcttcaacgcggacgaaccgtggaaacaggcacggt

SEQ ID NO: 348733 - DNA, 91 bp, Homo sapiens
  chr16:12210896-12210987
  hypo
ggcgtgttcaatacgtgcttcaatgcggacgaaccatggaaacaggcgtggtcaatacgtgcttcagtgcggacgaaccatggaaacaggc

SEQ ID NO: 348734 - DNA, 429 bp, Homo sapiens; identical to SEQ ID NO: 345490
  chr16:12897365-12897794
  hypo

SEQ ID NO: 348735 - DNA, 108 bp, Homo sapiens; identical to SEQ ID NO: 342503
  chr16:15129362-15129470
  hypo

SEQ ID NO: 348736 - DNA, 41 bp, Homo sapiens; identical to SEQ ID NO: 342516
  chr16:21515452-21515493
  hypo

SEQ ID NO: 348737 - DNA, 106 bp, Homo sapiens; identical to SEQ ID NO: 342525
  chr16:23497832-23497938
  hypo

SEQ ID NO: 348738 - DNA, 713 bp, Homo sapiens; identical to SEQ ID NO: 342529
  chr16:24837143-24837856
  hypo

SEQ ID NO: 348739 - DNA, 533 bp, Homo sapiens; identical to SEQ ID NO: 347376
  chr16:29624651-29625184
  hypo

SEQ ID NO: 348740 - DNA, 549 bp, Homo sapiens; identical to SEQ ID NO: 347378
  chr16:30959765-30960314
  hypo

SEQ ID NO: 348741 - DNA, 284 bp, Homo sapiens; identical to SEQ ID NO: 342562
  chr16:31131573-31131857
  hypo

SEQ ID NO: 348742 - DNA, 304 bp, Homo sapiens; identical to SEQ ID NO: 345492
  chr16:47176468-47176772
  hypo

SEQ ID NO: 348743 - DNA, 1300 bp, Homo sapiens; identical to SEQ ID NO: 342595
  chr16:58030214-58031514
  hypo

SEQ ID NO: 348744 - DNA, 130 bp, Homo sapiens; identical to SEQ ID NO: 345493
  chr16:67189038-67189168
  hypo

SEQ ID NO: 348745 - DNA, 377 bp, Homo sapiens; identical to SEQ ID NO: 345494
  chr16:67189259-67189636
  hypo

SEQ ID NO: 348746 - DNA, 93 bp, Homo sapiens
  chr16:67313759-67313852
  hypo
cgttattccctcttcccaggcctgaattgcagttcctgtgccctggcactaagactggcacctcctgcggcccatgcccttcgcctgcattgc

SEQ ID NO: 348747 - DNA, 115 bp, Homo sapiens
  chr16:67313958-67314073
  hypo
cctggagaatggggatgagtccccagactctcagggccatgccaccgactggagatttgctgtgtgcagtttcagggatgcctgggaagaggaggaacctgcttcccagatgcac

SEQ ID NO: 348748 - DNA, 134 bp, Homo sapiens; identical to SEQ ID NO: 345495
  chr16:68118915-68119049
  hypo

SEQ ID NO: 348749 - DNA, 65 bp, Homo sapiens; identical to SEQ ID NO: 347385
  chr16:68269820-68269885
  hypo

SEQ ID NO: 348750 - DNA, 112 bp, Homo sapiens; identical to SEQ ID NO: 204263
  chr16:68269896-68270008
  hypo

SEQ ID NO: 348751 - DNA, 105 bp, Homo sapiens; identical to SEQ ID NO: 204264
  chr16:68270022-68270127
  hypo

SEQ ID NO: 348752 - DNA, 125 bp, Homo sapiens; identical to SEQ ID NO: 347388
  chr16:68270157-68270282
  hypo

SEQ ID NO: 348753 - DNA, 637 bp, Homo sapiens; identical to SEQ ID NO: 347389
  chr16:68270868-68271505
  hypo

SEQ ID NO: 348754 - DNA, 352 bp, Homo sapiens; identical to SEQ ID NO: 342633
  chr16:70808012-70808364
  hypo

SEQ ID NO: 348755 - DNA, 78 bp, Homo sapiens
  chr16:71715666-71715744
  hypo
cgaggcctccgggtctttctaactgcatgaagttgtgtcgcaagttgaggtaggtaatatcttgactatagaagagat

SEQ ID NO: 348756 - DNA, 116 bp, Homo sapiens; identical to SEQ ID NO: 342637
  chr16:71754757-71754873
  hypo

SEQ ID NO: 348757 - DNA, 86 bp, Homo sapiens; identical to SEQ ID NO: 342644
  chr16:74984568-74984654
  hypo

SEQ ID NO: 348758 - DNA, 60 bp, Homo sapiens
  chr16:75148493-75148553
  hypo
cgttgtcccgcatggtgccgtagcggaccgcgttggtccccgacgccccggtggccgcca

SEQ ID NO: 348759 - DNA, 136 bp, Homo sapiens
  chr16:75149151-75149287
  hypo
gcacaccttggcgatagcacagggctgccagccggctgacctgctccacgttctggggccacaccacagcatcaggaggttcgcacctagaaccagaccctcagcgatttagcggggcgtgacaccctctggtccc

SEQ ID NO: 348760 - DNA, 82 bp, Homo sapiens; identical to SEQ ID NO: 204296
  chr16:77246930-77247012
  hypo

SEQ ID NO: 348761 - DNA, 204 bp, Homo sapiens; identical to SEQ ID NO: 204297
  chr16:77247511-77247715
  hypo

SEQ ID NO: 348762 - DNA, 606 bp, Homo sapiens; identical to SEQ ID NO: 342667
  chr16:81565589-81566195
  hypo

SEQ ID NO: 348763 - DNA, 811 bp, Homo sapiens; identical to SEQ ID NO: 347395
  chr16:84650982-84651793
  hypo

SEQ ID NO: 348764 - DNA, 346 bp, Homo sapiens; identical to SEQ ID NO: 342684
  chr16:84813536-84813882
  hypo

SEQ ID NO: 348765 - DNA, 208 bp, Homo sapiens
  chr16:85699437-85699645
  hypo
cggttacttaaatgttccccgggtcttggttctttgcgctaggtctttgttaagtgtaagctctagagaccaggatctgcgtgctggacactcagcctgttaacttgcatttcttaatattttccttcactttgtctctaaaagaaccagccacgcagcaagcctctctggatgtggagaagccggttggtgttgctgcttccttgtc

SEQ ID NO: 348766 - DNA, 177 bp, Homo sapiens; identical to SEQ ID NO: 345500
  chr16:85932121-85932298
  hypo

SEQ ID NO: 348767 - DNA, 802 bp, Homo sapiens; identical to SEQ ID NO: 345501
  chr16:87525701-87526503
  hypo

SEQ ID NO: 348768 - DNA, 505 bp, Homo sapiens; identical to SEQ ID NO: 335410
  chr16:87526565-87527070
  hypo

SEQ ID NO: 348769 - DNA, 170 bp, Homo sapiens; identical to SEQ ID NO: 346150
  chr16:88106152-88106322
  hypo

SEQ ID NO: 348770 - DNA, 96 bp, Homo sapiens; identical to SEQ ID NO: 346151
  chr16:88106398-88106494
  hypo

SEQ ID NO: 348771 - DNA, 517 bp, Homo sapiens
  chr16:88792758-88793275
  hypo
cgcggcgctgcagcagcaggaagaagaagcagacgctgtcccagatgatgccagcctcctccacaggcagcaggcagtcctggtctctgtccatcatctccttggctgcaaggcaggcaccggcaagggtcaggcccagggcccaggagcagggggcttccccacgccctcccccgccaccgtcctggccactcacggtcatagtagcccttgacggtgcatacaaggctgaagagctggatgacccagcagaagccggtctgcatctgctccacgaagacgcaggccaggagctgggggagagcagggtcagcggggccagcggggccccagggcggtgggtgcgggggggccggaggctcaccgacagcatgttcttggagatgatgacggtgacgttgtacagaatgaggcagtcccacagcacgaggcgggcccgtgtgtccctctgcagcagggccgtgccgaagagcagcaggtagaagcaggccagcaggtagcccagcccgaagatgct

SEQ ID NO: 348772 - DNA, 279 bp, Homo sapiens
  chr16:88946079-88946358
  hypo
tgcctgtgcagacaagtgcatgcaaataaacacaggcatcccaggcatgtgtgtgcaaagctgggtcacgtggtgtcacaagtcaaagcttgcactctaccgcagcggctccccaggcactgcacccctgcagggcaagggcgaggcccaccccagggcctggtcagccaggggcgcacccggaatctgcattcctaacgcgagccgggggagctgctgctgacctgaagcacttggataactctgccgttccgccttcacctctggccccacccagac

SEQ ID NO: 348773 - DNA, 83 bp, Homo sapiens; identical to SEQ ID NO: 347399
  chr16:89007225-89007308
  hypo

SEQ ID NO: 348774 - DNA, 91 bp, Homo sapiens; identical to SEQ ID NO: 204343
  chr16:89007789-89007880
  hypo

SEQ ID NO: 348775 - DNA, 211 bp, Homo sapiens; identical to SEQ ID NO: 347401
  chr16:89007995-89008206
  hypo

SEQ ID NO: 348776 - DNA, 259 bp, Homo sapiens; identical to SEQ ID NO: 347402
  chr16:89189500-89189759
  hypo

SEQ ID NO: 348777 - DNA, 225 bp, Homo sapiens; identical to SEQ ID NO: 217355
  chr16:89219372-89219597
  hypo

SEQ ID NO: 348778 - DNA, 737 bp, Homo sapiens; identical to SEQ ID NO: 321648
  chr16:89900815-89901552
  hypo

SEQ ID NO: 348779 - DNA, 81 bp, Homo sapiens
  chr16:89901590-89901671
  hypo
cccgtgtgaatctgtgaacctgcctgcgctcgcggttggccgtcttagaagcgtggataagcatagcccgtgtgatttttc

SEQ ID NO: 348780 - DNA, 270 bp, Homo sapiens; identical to SEQ ID NO: 342821
  chr17:1407895-1408165
  hypo

SEQ ID NO: 348781 - DNA, 141 bp, Homo sapiens; identical to SEQ ID NO: 346153
  chr17:1412249-1412390
  hypo

SEQ ID NO: 348782 - DNA, 84 bp, Homo sapiens; identical to SEQ ID NO: 346154
  chr17:1412463-1412547
  hypo

SEQ ID NO: 348783 - DNA, 194 bp, Homo sapiens; identical to SEQ ID NO: 342825
  chr17:1462644-1462838
  hypo

SEQ ID NO: 348784 - DNA, 402 bp, Homo sapiens; identical to SEQ ID NO: 217450
  chr17:1783887-1784289
  hypo

SEQ ID NO: 348785 - DNA, 34 bp, Homo sapiens; identical to SEQ ID NO: 345503
  chr17:4981985-4982019
  hypo

SEQ ID NO: 348786 - DNA, 1345 bp, Homo sapiens; identical to SEQ ID NO: 345504
  chr17:7254483-7255828
  hypo

SEQ ID NO: 348787 - DNA, 156 bp, Homo sapiens; identical to SEQ ID NO: 346157
  chr17:7369222-7369378
  hypo

SEQ ID NO: 348788 - DNA, 272 bp, Homo sapiens; identical to SEQ ID NO: 217545
  chr17:8104639-8104911
  hypo

SEQ ID NO: 348789 - DNA, 143 bp, Homo sapiens
  chr17:8384370-8384513
  hypo
cgttggcgcaccccacggctcccccctgcggtgtgcagggctcagcaggactggcacgggtgcagtgcccgttagtgcacaccacggctcccacctgcggtgtgcagggctcggcaggactggcacggggtaccatggctgag

SEQ ID NO: 348790 - DNA, 196 bp, Homo sapiens; identical to SEQ ID NO: 342886
  chr17:9631380-9631576
  hypo

SEQ ID NO: 348791 - DNA, 674 bp, Homo sapiens; identical to SEQ ID NO: 204447
  chr17:16283956-16284630
  hypo

SEQ ID NO: 348792 - DNA, 39 bp, Homo sapiens; identical to SEQ ID NO: 347411
  chr17:16285065-16285104
  hypo

SEQ ID NO: 348793 - DNA, 210 bp, Homo sapiens; identical to SEQ ID NO: 342903
  chr17:17104713-17104923
  hypo

SEQ ID NO: 348794 - DNA, 208 bp, Homo sapiens; identical to SEQ ID NO: 342905
  chr17:17224346-17224554
  hypo

SEQ ID NO: 348795 - DNA, 112 bp, Homo sapiens; identical to SEQ ID NO: 342918
  chr17:19513145-19513257
  hypo

SEQ ID NO: 348796 - DNA, 64 bp, Homo sapiens; identical to SEQ ID NO: 342922
  chr17:19842333-19842397
  hypo

SEQ ID NO: 348797 - DNA, 62 bp, Homo sapiens
  chr17:25931759-25931821
  hypo
ggtgacacacacgtgtccacagatggccccccctcttttttcccttccccatctcagaatgc

SEQ ID NO: 348798 - DNA, 48 bp, Homo sapiens
  chr17:26961722-26961770
  hypo
cggcgcatgggtgtgttgccatagagacgacgggaacgctggatgtag

SEQ ID NO: 348799 - DNA, 32 bp, Homo sapiens; identical to SEQ ID NO: 347419
  chr17:29718746-29718778
  hypo

SEQ ID NO: 348800 - DNA, 126 bp, Homo sapiens; identical to SEQ ID NO: 342952
  chr17:30804383-30804509
  hypo

SEQ ID NO: 348801 - DNA, 261 bp, Homo sapiens; identical to SEQ ID NO: 346160
  chr17:33344328-33344589
  hypo

SEQ ID NO: 348802 - DNA, 226 bp, Homo sapiens; identical to SEQ ID NO: 347425
  chr17:36886750-36886976
  hypo

SEQ ID NO: 348803 - DNA, 36 bp, Homo sapiens; identical to SEQ ID NO: 347428
  chr17:40332770-40332806
  hypo

SEQ ID NO: 348804 - DNA, 649 bp, Homo sapiens
  chr17:40371760-40372409
  hypo
cgctgcaaccaggcctccagagacacctgcttctgctggagggccgtctcccggctcagacgctcctgggggctcagctgggccagcgggccaaactgagctagaggaggggagaggaaaccatgaccatcacctcccagtgtccaacaggaggcccagagaagcccactcacccgttctggagcgagaccctcctgggctcagatactgcattaagggcaagtcggggttcctgacagccaggggggccaagatgaatgggtgccccaggaggcgcctctgggccctgctcgccagcctcctgactctgagccgtcccctctgggggcacacgggtgctggggcagctggggaggaggcctgcctgcctcctgcccgcctgcctcacagggctgccagccctcttctcgcggcccagcatgggtccaggctgtctggggtgtaagtgtgcccatgcccttgactgcaggtgaacctgggcaaatcgctttcctttcctgtgccttggcttccccacgtgtaaaacgggagattctcggcacctgcctcagtggggtgcattaagattaaatacatgaggacatggaagatgccagaaagctgcctgacatgggtgagctctgtgtgaggttcgtgcttcttggttaac

SEQ ID NO: 348805 - DNA, 170 bp, Homo sapiens; identical to SEQ ID NO: 345520
  chr17:42092357-42092527
  hypo

SEQ ID NO: 348806 - DNA, 62 bp, Homo sapiens; identical to SEQ ID NO: 204629
  chr17:42402710-42402772
  hypo

SEQ ID NO: 348807 - DNA, 192 bp, Homo sapiens; identical to SEQ ID NO: 347435
  chr17:42402917-42403109
  hypo

SEQ ID NO: 348808 - DNA, 111 bp, Homo sapiens; identical to SEQ ID NO: 343000
  chr17:43121686-43121797
  hypo

SEQ ID NO: 348809 - DNA, 425 bp, Homo sapiens
  chr17:43246865-43247290
  hypo
cgcacggtgagttccagcggaaggacttctctgagacttacgaacgcttccacaccgagagcctgcagggccgcagcaagcaggagctggtgcgagactacctggagctggagaagcggctgtcgcaggcggaggaggagactaggaggctgcagcagctgcaggcgtgcaccggccagcagtcctgccgccaggtggaggagctggctgccgaggtccagaggctccggaccgaaaaccagcggcttcgtcaggagaaccagatgtggaaccgagagggctgccgctgtgatgaggagccgggtacctaggggtgcctcccagcctggtggacccaaggagaaggtcccatttcgtgcacactcaggccagctgggtctcaaggaggcaggtggcagatgaaaaccaccgtcaacaccctgtgc

SEQ ID NO: 348810 - DNA, 38 bp, Homo sapiens; identical to SEQ ID NO: 347438
  chr17:43298587-43298625
  hypo

SEQ ID NO: 348811 - DNA, 230 bp, Homo sapiens; identical to SEQ ID NO: 347439
  chr17:43298666-43298896
  hypo

SEQ ID NO: 348812 - DNA, 298 bp, Homo sapiens; identical to SEQ ID NO: 292442
  chr17:46089283-46089581
  hypo

SEQ ID NO: 348813 - DNA, 218 bp, Homo sapiens; identical to SEQ ID NO: 345528
  chr17:46124683-46124901
  hypo

SEQ ID NO: 348814 - DNA, 164 bp, Homo sapiens; identical to SEQ ID NO: 345529
  chr17:46125148-46125312
  hypo

SEQ ID NO: 348815 - DNA, 31 bp, Homo sapiens
  chr17:46152418-46152449
  hypo
cgctccggctccaaacctcgagcaaagcctc

SEQ ID NO: 348816 - DNA, 63 bp, Homo sapiens; identical to SEQ ID NO: 345531
  chr17:46687527-46687590
  hypo

SEQ ID NO: 348817 - DNA, 297 bp, Homo sapiens; identical to SEQ ID NO: 345533
  chr17:54911482-54911779
  hypo

SEQ ID NO: 348818 - DNA, 515 bp, Homo sapiens; identical to SEQ ID NO: 345534
  chr17:54911874-54912389
  hypo

SEQ ID NO: 348819 - DNA, 136 bp, Homo sapiens
  chr17:56743008-56743144
  hypo
agttcctaagcattaaatgatagcaaggtacagctttaaacagtaagcaacggtaacaaccctgcaaccccaaagcattcttaagaaccaaaagaaacaatgaaaaaaaaaaataaggctgggcgcggtggctcac

SEQ ID NO: 348820 - DNA, 48 bp, Homo sapiens
  chr17:57297129-57297177
  hypo
tcagtcctgggtgatttatttcttttgcattgaagtgtgtggcttttc

SEQ ID NO: 348821 - DNA, 214 bp, Homo sapiens
  chr17:60754652-60754866
  hypo
gcgctggccactggcagcgccatggggctgtgggaggtgaagaactgtacctcgttccgggcccgctacatctgccggcagagcctgggcactccagtgacgccggagctgccggggccagatcccacgcccagcctcactggctcctgtccccagggctgggcctcggacaccaaactccggtattgctataaggtagggcagcctgttggcc

SEQ ID NO: 348822 - DNA, 102 bp, Homo sapiens
  chr17:60766832-60766934
  hypo
cggggtgagggaagcagagcccagcctgaaccctgaccccttccctgtagacccctccctgagcccgtccccagcagcgctgccccccgccccgggcactga

SEQ ID NO: 348823 - DNA, 224 bp, Homo sapiens
  chr17:60767107-60767331
  hypo
tggctggcgaggaggtgggctcccgacacttttgccctgggccccagccttgcccgggttcccctccctgccccttcctgcccccgccttatccgcaccctatcctgactattcccttcctcccaccccatggccccccatgcccagggctctcggcggtactcctgggtctcagaggagccgctgaactacgtgggctggcaggacggggagccgcagcagcc

SEQ ID NO: 348824 - DNA, 40 bp, Homo sapiens; identical to SEQ ID NO: 347459
  chr17:60885408-60885448
  hypo

SEQ ID NO: 348825 - DNA, 308 bp, Homo sapiens; identical to SEQ ID NO: 347460
  chr17:60885548-60885856
  hypo

SEQ ID NO: 348826 - DNA, 111 bp, Homo sapiens; identical to SEQ ID NO: 345536
  chr17:61777761-61777872
  hypo

SEQ ID NO: 348827 - DNA, 76 bp, Homo sapiens; identical to SEQ ID NO: 345537
  chr17:61778423-61778499
  hypo

SEQ ID NO: 348828 - DNA, 425 bp, Homo sapiens; identical to SEQ ID NO: 343072
  chr17:66440125-66440550
  hypo

SEQ ID NO: 348829 - DNA, 308 bp, Homo sapiens; identical to SEQ ID NO: 343084
  chr17:71548553-71548861
  hypo

SEQ ID NO: 348830 - DNA, 359 bp, Homo sapiens; identical to SEQ ID NO: 347466
  chr17:72449954-72450313
  hypo

SEQ ID NO: 348831 - DNA, 336 bp, Homo sapiens; identical to SEQ ID NO: 347467
  chr17:72450330-72450666
  hypo

SEQ ID NO: 348832 - DNA, 65 bp, Homo sapiens; identical to SEQ ID NO: 347468
  chr17:73073967-73074032
  hypo

SEQ ID NO: 348833 - DNA, 48 bp, Homo sapiens; identical to SEQ ID NO: 346169
  chr17:73215386-73215434
  hypo

SEQ ID NO: 348834 - DNA, 192 bp, Homo sapiens
  chr17:73615737-73615929
  hypo
cgagacccaccaccttcctgtagggcgagagtggcagcgacgtgcagctgttagccgtgtcccaccgtgggctgcgactgctcaaggtgacccaaggccccggcctccgccccgaccagctgaagattctctgctcatacaggtgcgctagcccacgaccctgggctagaggtgggggcaggtggcaaggtg

SEQ ID NO: 348835 - DNA, 109 bp, Homo sapiens
  chr17:73616587-73616696
  hypo
cctgccgacatagtgcagccggctgccgctcccgacttttccttctccaaggagcagaggagtggctggcacaagggtcagctgtccaacggggaaccagggctggctc

SEQ ID NO: 348836 - DNA, 118 bp, Homo sapiens
  chr17:74390245-74390363
  hypo
cgcttggctgctctcaggatcgcttggctgctctcaggatccctgctctttcttttcttactcccttccttccaggacagggccagaactggggcctcagactcagattcagagtcta

SEQ ID NO: 348837 - DNA, 182 bp, Homo sapiens
  chr17:74390459-74390641
  hypo
agcgctgcctcagtaaacatgactcagagacactaggccccgtccacgaacagaggagtgggaaaatggaatgtggtgtggccacatgctgtcatcctattttgcaggtaaaaaggaagaaactagatcattatgaatcaacacaggttggtcttaagcaaattagagatgatgtgtacgac

SEQ ID NO: 348838 - DNA, 657 bp, Homo sapiens; identical to SEQ ID NO: 346170
  chr17:75206857-75207514
  hypo

SEQ ID NO: 348839 - DNA, 209 bp, Homo sapiens; identical to SEQ ID NO: 323128
  chr17:75207630-75207839
  hypo

SEQ ID NO: 348840 - DNA, 328 bp, Homo sapiens; identical to SEQ ID NO: 346172
  chr17:75207987-75208315
  hypo

SEQ ID NO: 348841 - DNA, 148 bp, Homo sapiens; identical to SEQ ID NO: 343148
  chr17:76034983-76035131
  hypo

SEQ ID NO: 348842 - DNA, 282 bp, Homo sapiens; identical to SEQ ID NO: 343151
  chr17:76167747-76168029
  hypo

SEQ ID NO: 348843 - DNA, 330 bp, Homo sapiens
  chr17:76187077-76187407
  hypo
cgatgggttgtccgactgggagcagaggaagccttgaggacctactcacagataggaattgaaggtactagtgtgacctctccgtggccgcattgggtgtccttaagcatgtggcagtgattcagaatgctgggggttgggggggctgtgctgcaccacctgggcctcgaggggcatttcccaaacaccaggcactttataaacctccctgctcaggggcaggtgcccaggaccccttgctgcagggactactggaggcaggagaggtccgggggaggtccacggctcagtcgaccatgcctggcctttcttgctcagccatccataccc

SEQ ID NO: 348844 - DNA, 443 bp, Homo sapiens; identical to SEQ ID NO: 343159
  chr17:76818622-76819065
  hypo

SEQ ID NO: 348845 - DNA, 631 bp, Homo sapiens
  chr17:76992727-76993358
  hypo
cgtggtcttgagaacctttgaaggtgtaaaaagggcgtgttcccagaggctccgagagcagcagcggatacagccgaaaacatcttggagagattccccacgtctcccacaggcctctagcgataagctcttcctcctagaaactgctcagtgtgaagtgacagtaggctatgctcctggctaagggtaagggggccgcaggtcagagcaagagggagacgtgctccctcaccacatccctggcttctaggtgtgtgaattctttaccatgtgcctgtgtttgccagccaggccctgagctcccactccccacccacacctccataaaacctcagggtccagttacctttctccacggtgccgtcgccgtcggacagaatcacccagggcacggctttgctgccttcgatctggtagacgacccccgtccggtcatccacggagtagagtttcccattgaaaacaatcaggtcggatagctccatgcctctccccttctccgccaggtgggactccaggaccccatggtctttgtcccattccacggccaccttgtccccactgtctgacagggtcaggtagccctttttcaggtaactgaaccaggtgttttcctcttgggcccttgact

SEQ ID NO: 348846 - DNA, 142 bp, Homo sapiens
  chr17:76993419-76993561
  hypo
gggagacagggggtaggtgtcattgtaccagttggcgggcgcctggccgagcctccagttgtgtgcattgtgggtggggggcctgccgggggccgggcggtgggagcagagcagccagaggatggcagcacccacaaagaac

SEQ ID NO: 348847 - DNA, 284 bp, Homo sapiens
  chr17:76996695-76996979
  hypo
cgctcagccctcacactgtaccatctcctctgcctgccggctggctacatagacctccttctgtcccctgaccacactggccctggcagagcctgcagttccccctgcctggaacagtcgggcctgctcttcgcaccagcagctcggtctctcctacggggcatcagctccctgggaagacttgcccactcgccctccctcccatgccgctccggctctcccaccgtccctgcctggctaggtgattatttctgctcctggggcagggatctggccactgtcac

SEQ ID NO: 348848 - DNA, 530 bp, Homo sapiens; identical to SEQ ID NO: 218136
  chr17:76997041-76997571
  hypo

SEQ ID NO: 348849 - DNA, 184 bp, Homo sapiens
  chr17:77769064-77769248
  hypo
cgctctcgttccctctcacgttcccgctccctctctcgctccctctccctttctcgatcccgctcccggtccctatcccggtctcggtcccggtcccgaggggcctctgcgcggcaggtgctgctggtgctggtgctgctcgctggcggggacaaacccatgtttcgaaggccctcccgggccc

SEQ ID NO: 348850 - DNA, 105 bp, Homo sapiens; identical to SEQ ID NO: 346174
  chr17:77899559-77899664
  hypo

SEQ ID NO: 348851 - DNA, 561 bp, Homo sapiens; identical to SEQ ID NO: 218184
  chr17:78271717-78272278
  hypo

SEQ ID NO: 348852 - DNA, 77 bp, Homo sapiens
  chr17:78272313-78272390
  hypo
gatacgtaagtcgtagagttgtgcttatctacatgaatctgggaagactgactcctacattgtgcacccggagtccc

SEQ ID NO: 348853 - DNA, 522 bp, Homo sapiens; identical to SEQ ID NO: 343205
  chr17:78775515-78776037
  hypo

SEQ ID NO: 348854 - DNA, 168 bp, Homo sapiens
  chr17:79887422-79887590
  hypo
cggctcctggccagctccccacggagagcccaggacacttgtccctggacacagtggtgcagccatgcttgggccaaaccatgaggccaccagaaccgcgaaaggctactgtactgagagggatactgcgagagaggcccacaggtttccaagcatccctctcactcc

SEQ ID NO: 348855 - DNA, 56 bp, Homo sapiens
  chr17:79887849-79887905
  hypo
ccaggctgcaccttctgtgggactgagccccgcaggcacttccccggcatcctccc

SEQ ID NO: 348856 - DNA, 764 bp, Homo sapiens; identical to SEQ ID NO: 343243
  chr17:80019114-80019878
  hypo

SEQ ID NO: 348857 - DNA, 220 bp, Homo sapiens; identical to SEQ ID NO: 347472
  chr17:80186335-80186555
  hypo

SEQ ID NO: 348858 - DNA, 517 bp, Homo sapiens; identical to SEQ ID NO: 347473
  chr17:80186618-80187135
  hypo

SEQ ID NO: 348859 - DNA, 32 bp, Homo sapiens
  chr17:80797632-80797664
  hypo
cgtggtctgcatcccagccatgcacctgctgg

SEQ ID NO: 348860 - DNA, 177 bp, Homo sapiens; identical to SEQ ID NO: 343278
  chr17:80859381-80859558
  hypo

SEQ ID NO: 348861 - DNA, 269 bp, Homo sapiens
  chr17:80965953-80966222
  hypo
gaggaggcgcagggaagaggtgcgctatgcgcttaatcctgcaccgagacgtcagattctcagggcaggagcttttgtgggcaccgcacctagcacagggcctggacccagtgagcagatgtgaatgagaggcctgtgcgctggcctgagaggctggctaactttctccaggttcctagaagaagccactttcaaggctttcgagaagtgttgtgagctaattcatttgaaagcctctgtgccaacaggcggagcagaaagcgcaggcc

SEQ ID NO: 348862 - DNA, 1315 bp, Homo sapiens; identical to SEQ ID NO: 347474
  chr18:811501-812816
  hypo

SEQ ID NO: 348863 - DNA, 190 bp, Homo sapiens; identical to SEQ ID NO: 347475
  chr18:812869-813059
  hypo

SEQ ID NO: 348864 - DNA, 238 bp, Homo sapiens; identical to SEQ ID NO: 345538
  chr18:2848166-2848404
  hypo

SEQ ID NO: 348865 - DNA, 205 bp, Homo sapiens; identical to SEQ ID NO: 346176
  chr18:3214837-3215042
  hypo

SEQ ID NO: 348866 - DNA, 137 bp, Homo sapiens; identical to SEQ ID NO: 346177
  chr18:3215256-3215393
  hypo

SEQ ID NO: 348867 - DNA, 985 bp, Homo sapiens; identical to SEQ ID NO: 347477
  chr18:3449983-3450968
  hypo

SEQ ID NO: 348868 - DNA, 185 bp, Homo sapiens; identical to SEQ ID NO: 343306
  chr18:3580794-3580979
  hypo

SEQ ID NO: 348869 - DNA, 216 bp, Homo sapiens; identical to SEQ ID NO: 292892
  chr18:7566793-7567009
  hypo

SEQ ID NO: 348870 - DNA, 415 bp, Homo sapiens; identical to SEQ ID NO: 204882
  chr18:7567335-7567750
  hypo

SEQ ID NO: 348871 - DNA, 467 bp, Homo sapiens; identical to SEQ ID NO: 343324
  chr18:9478452-9478919
  hypo

SEQ ID NO: 348872 - DNA, 81 bp, Homo sapiens; identical to SEQ ID NO: 343325
  chr18:9514129-9514210
  hypo

SEQ ID NO: 348873 - DNA, 65 bp, Homo sapiens
  chr18:9547721-9547786
  hypo
cgtggcgaatgcccactgaacctcggctctcatggaagcaggaaagacaccgagattcaagcctt

SEQ ID NO: 348874 - DNA, 176 bp, Homo sapiens
  chr18:9547816-9547992
  hypo
atcttcggagattttggtactggcagggtggatgcttgcaaaatacttgacatcgctgtcacggtccatctgaagagccatgatggtctgctccacagcctcctggtggcagctggcagaggccaagaaatagtctggaaatgacatgtgcataggacagatgaaaccagtccaac

SEQ ID NO: 348875 - DNA, 275 bp, Homo sapiens; identical to SEQ ID NO: 292905
  chr18:9708063-9708338
  hypo

SEQ ID NO: 348876 - DNA, 192 bp, Homo sapiens; identical to SEQ ID NO: 343337
  chr18:11992166-11992358
  hypo

SEQ ID NO: 348877 - DNA, 46 bp, Homo sapiens
  chr18:12277197-12277243
  hypo
cgggtgctggatgacaaggaagagcggccatccctccggtcacaag

SEQ ID NO: 348878 - DNA, 111 bp, Homo sapiens
  chr18:12277273-12277384
  hypo
gcaggctgtcgccggctcttgagccaaacactgtgtttcgtttggctcaatgacgaatgttgaagatgcttttatgttctgagccacatgcacttggaggccgctggtcac

SEQ ID NO: 348879 - DNA, 165 bp, Homo sapiens; identical to SEQ ID NO: 343346
  chr18:13033480-13033645
  hypo

SEQ ID NO: 348880 - DNA, 32 bp, Homo sapiens
  chr18:13036746-13036778
  hypo
cggcagcagccttgagggcagacattagggga

SEQ ID NO: 348881 - DNA, 340 bp, Homo sapiens; identical to SEQ ID NO: 343354
  chr18:13442504-13442844
  hypo

SEQ ID NO: 348882 - DNA, 195 bp, Homo sapiens; identical to SEQ ID NO: 345545
  chr18:20512643-20512838
  hypo

SEQ ID NO: 348883 - DNA, 1232 bp, Homo sapiens; identical to SEQ ID NO: 345546
  chr18:20512902-20514134
  hypo

SEQ ID NO: 348884 - DNA, 1207 bp, Homo sapiens; identical to SEQ ID NO: 345548
  chr18:32556625-32557832
  hypo

SEQ ID NO: 348885 - DNA, 45 bp, Homo sapiens; identical to SEQ ID NO: 204955
  chr18:32557883-32557928
  hypo

SEQ ID NO: 348886 - DNA, 755 bp, Homo sapiens; identical to SEQ ID NO: 345552
  chr18:42258983-42259738
  hypo

SEQ ID NO: 348887 - DNA, 120 bp, Homo sapiens; identical to SEQ ID NO: 204967
  chr18:42259821-42259941
  hypo

SEQ ID NO: 348888 - DNA, 711 bp, Homo sapiens; identical to SEQ ID NO: 347500
  chr18:42260083-42260794
  hypo

SEQ ID NO: 348889 - DNA, 724 bp, Homo sapiens; identical to SEQ ID NO: 347502
  chr18:45936357-45937081
  hypo

SEQ ID NO: 348890 - DNA, 556 bp, Homo sapiens; identical to SEQ ID NO: 335811
  chr18:46502500-46503056
  hypo

SEQ ID NO: 348891 - DNA, 436 bp, Homo sapiens; identical to SEQ ID NO: 347511
  chr18:47720908-47721344
  hypo

SEQ ID NO: 348892 - DNA, 115 bp, Homo sapiens; identical to SEQ ID NO: 346183
  chr18:55850987-55851102
  hypo

SEQ ID NO: 348893 - DNA, 227 bp, Homo sapiens; identical to SEQ ID NO: 343416
  chr18:72764607-72764834
  hypo

SEQ ID NO: 348894 - DNA, 874 bp, Homo sapiens; identical to SEQ ID NO: 343422
  chr18:74096607-74097481
  hypo

SEQ ID NO: 348895 - DNA, 886 bp, Homo sapiens
  chr18:74736601-74737487
  hypo
cgacggagaatcggccgtcgtggcagcgccagggcctgcagtcgccagggtggggctgaggccagggccggaggtctgggcagaaccacagggaaggaccttggaggccgacctcagtcccaacactgaccagccgatgtgctccagcaagtcgctgagcccagatgtgcctgtttctgtgtttatgagatgggagcattcatttctattcttacctgaaataaccccaggctcctttccgcagcagcacactgacctgggtgacgtgtcctccccatgccaccctcccacaaacgctgccttccacccacagcacccgcagagagtggcagagagggcattcctgagcagattgcaggagttttgggaggtgcatgtgtgcattctcgtaactctccgaggcgggtggttttagtagcccttttattcataccagaaactgagacttagcaaagttaaggtgggattgatggaggagctgccgttcactcctgcctaaactccctccgtatgttctagaaacgcaggcgatcccccacctctagctgtctgacaccagcccttctccagcccaaagtggctttcactgcagccaggcttttcctctcagggtaaaattgaactgcagataatcgatggctgacgcatctgtggctagcagctgcttcacggagggctgaccaggagagacccagaggctttctgatctgtcgggagccaagagctgagccagggcccccgcctgcagccacagggacctcgagtgcactcagcggtcttggtgcaccatagccacctggacatcgatacgttaatgactgttaaacatgaacaaaagccgagtcccacactccaggacattcaacacccacccgacagtctgtcc

SEQ ID NO: 348896 - DNA, 859 bp, Homo sapiens; identical to SEQ ID NO: 346186
  chr18:74737517-74738376
  hypo

SEQ ID NO: 348897 - DNA, 817 bp, Homo sapiens; identical to SEQ ID NO: 347518
  chr18:74844285-74845102
  hypo

SEQ ID NO: 348898 - DNA, 241 bp, Homo sapiens; identical to SEQ ID NO: 343461
  chr18:75873544-75873785
  hypo

SEQ ID NO: 348899 - DNA, 236 bp, Homo sapiens
  chr18:75999434-75999670
  hypo
gtcagaaccacgggacagccacgggcattcttaaggctgccagcctgtgggtgtcacctggttcagccactttcggaggaagtcggtgggggacaagacccacttttgcagatttagaaaaggaaggcagaagtgtctgggcacgcggggaaacgcaaagacctgctgaaccagttcatttctaatcaaaaggagcgctggtgtggggtatgaagggcacgtcttcatgccgtgtc

SEQ ID NO: 348900 - DNA, 178 bp, Homo sapiens; identical to SEQ ID NO: 343473
  chr18:76552775-76552953
  hypo

SEQ ID NO: 348901 - DNA, 55 bp, Homo sapiens
  chr18:76653387-76653442
  hypo
cgcaccacatgactctatctacgggaaacacccagcagccagtcaccgaaggcta

SEQ ID NO: 348902 - DNA, 160 bp, Homo sapiens; identical to SEQ ID NO: 346187
  chr18:77508739-77508899
  hypo

SEQ ID NO: 348903 - DNA, 398 bp, Homo sapiens; identical to SEQ ID NO: 324585
  chr18:77508946-77509344
  hypo

SEQ ID NO: 348904 - DNA, 116 bp, Homo sapiens; identical to SEQ ID NO: 346189
  chr18:77509679-77509795
  hypo

SEQ ID NO: 348905 - DNA, 135 bp, Homo sapiens
  chr18:77609451-77609586
  hypo
cgtccgacctcatccggggcaaggtcgtccgcgtgcaggagccgcatctggacaggccgcacctgccttccctccccgccttgctctgcgtcagcctaggagcctcctgtcctggccgcgggttacaccaagcgc

SEQ ID NO: 348906 - DNA, 474 bp, Homo sapiens
  chr18:77609678-77610152
  hypo
tcggctggaggcagagcggaggctggggccaccggaagccttgttcttgcgtggctgggggctgatgctggctgccggccgccctgggtggcgtgggagcaggagcgcgtggaagacccagcctctctgagagccccccacgtaatcacacagtgagaggtccgctgtggtttagtgggaggaacccgagactccacccaggctgagtgggagggaggcgagaccccacctggccgtgggaggaacccgagaccccacccaggctcagtgggagggaacggagaccccacctggccgtaggaggagtgtcccgcgcacctaaagggctgacagggccgtgtgaaaacccgccggggtcgctggtcctggctctcctgaccttctgcctccccgctaccctcatccatgtacccagcacacacgtgcacacatacgtggataaatggaataaacataaacttcacccagacagcc

SEQ ID NO: 348907 - DNA, 834 bp, Homo sapiens; identical to SEQ ID NO: 343521
  chr19:581325-582159
  hypo

SEQ ID NO: 348908 - DNA, 158 bp, Homo sapiens; identical to SEQ ID NO: 346190
  chr19:883424-883582
  hypo

SEQ ID NO: 348909 - DNA, 544 bp, Homo sapiens; identical to SEQ ID NO: 346191
  chr19:884311-884855
  hypo

SEQ ID NO: 348910 - DNA, 167 bp, Homo sapiens
  chr19:901066-901233
  hypo
ctctgtccactgaggggccgctgcttgtgtcgggccctgagctgagcgcagggaagcggggaaccggggtgggcccagctgtctcggggtgggggggattgaggtgaaacactcctgcaatcgttggagggttcccaaacgtgttgggcaggtgaatccaggagctc

SEQ ID NO: 348911 - DNA, 743 bp, Homo sapiens; identical to SEQ ID NO: 335871
  chr19:941824-942567
  hypo

SEQ ID NO: 348912 - DNA, 68 bp, Homo sapiens
  chr19:956638-956706
  hypo
tggccagtctggcgctggccgggttggggcggagacaaagaccaggcagctggacctcgggcagcctc

SEQ ID NO: 348913 - DNA, 228 bp, Homo sapiens
  chr19:1004547-1004775
  hypo
cgcacgggccccgtgtgggtgacaggcagctcccaggtacacatgtctcggcactttaaggtgtggagccttcgccgggacccacggggcgccccggcctgggccacggtgggcagctggcgggacggccagctggacttggaaccgggaggtgcctctgcacggcccccgcccccacagggtgcccaggtctggcccaagctgcgtgtggtaacgctgttggaacac

SEQ ID NO: 348914 - DNA, 279 bp, Homo sapiens; identical to SEQ ID NO: 218770
  chr19:1005441-1005720
  hypo

SEQ ID NO: 348915 - DNA, 319 bp, Homo sapiens; identical to SEQ ID NO: 343553
  chr19:1128115-1128434
  hypo

SEQ ID NO: 348916 - DNA, 338 bp, Homo sapiens
  chr19:1166870-1167208
  hypo
cggcctcaggccacaaggtctccccacctggctccttggggagtgccaagcgttgccagcagccgggctatgctgatcccagacaagtggctcgaccggtcaccactgtccttgagcttaagtccagccttggtgacaaaaatgtcacaaggacctgcatccgagccctgagggcatcaggtcctggaggaggaggaagagtcccttctggcttcgggctgggcttgaggacggcagctccaagaccgcttagagcgagacttcagcgctgactgctggagctacgcaccctgtcctgacaatggccgcacagttaggcgctgctccacgcctggagg

SEQ ID NO: 348917 - DNA, 242 bp, Homo sapiens
  chr19:1911845-1912087
  hypo
cgtttttaaaaaccaatggctgtttaaactctgtgcacaccaggggttagcaggacatgagggagtgtagctctgatgcggtgacctgggccggagccctcggactagcctcagctttggtggcagcacgccctgccttgtggagccacggcctcccgggacggactccccggctctcccccagccgcccgcagccgccggatgatcctctgctcccgtctctgtctcccacagtcggcctc

SEQ ID NO: 348918 - DNA, 161 bp, Homo sapiens
  chr19:1912446-1912607
  hypo
gcggcctggggcaacccttcctggtgcccgtgcccgcccggccgcctctgaccaggggccagttcgaggaggcccgggcccactggcccacgtccttccacgaggacaagcaggtgaccagcgccctggctgggcggctcttctccacgcaggagcgcgcc

SEQ ID NO: 348919 - DNA, 232 bp, Homo sapiens; identical to SEQ ID NO: 346192
  chr19:1978023-1978255
  hypo

SEQ ID NO: 348920 - DNA, 116 bp, Homo sapiens; identical to SEQ ID NO: 345560
  chr19:1979018-1979134
  hypo

SEQ ID NO: 348921 - DNA, 72 bp, Homo sapiens; identical to SEQ ID NO: 347528
  chr19:2702445-2702517
  hypo

SEQ ID NO: 348922 - DNA, 453 bp, Homo sapiens; identical to SEQ ID NO: 347529
  chr19:2702553-2703006
  hypo

SEQ ID NO: 348923 - DNA, 205 bp, Homo sapiens; identical to SEQ ID NO: 343624
  chr19:3669713-3669918
  hypo

SEQ ID NO: 348924 - DNA, 46 bp, Homo sapiens; identical to SEQ ID NO: 347530
  chr19:3785511-3785557
  hypo

SEQ ID NO: 348925 - DNA, 638 bp, Homo sapiens; identical to SEQ ID NO: 343651
  chr19:4676079-4676717
  hypo

SEQ ID NO: 348926 - DNA, 168 bp, Homo sapiens
  chr19:5023047-5023215
  hypo
cgcgggtgggactgagtgaaggaccctgagctgggagatgaccctggatgatctggggagcccgatgtcctcaccgggtcctcatgagaggaggcaggagggtgagagtcagagagaggctggaagaggctgtgctgtggctgcggaggtggaggaagggccttgagc

SEQ ID NO: 348927 - DNA, 450 bp, Homo sapiens
  chr19:5023245-5023695
  hypo
tggagtaggacgaagcagagaacgttctcgtgccaaggttttctctttcctgcctgagggccctttatgtagatcagaccagagacaagtgaatcccggtcttgccaggggaggcatttggagctgctcgtgggacgtggtgatgcggtgccaggccacatgcccggggctggggccgagtggcgttctcgtgctgcctctgtggccaggtttcacttgggaacctggctgcatcgcgggttcctcctgggccttctggtggcttggggctcctctgtcctcggtccctgctgggaaccgtgctttggcagcaggaaccagcgagatggcagcacaggggctggaggccggctgggactcactggggccgcatggggcttcacctgatgcccagccctcctgggacagggaccagtgggagcaggaggtgggacaagaggacgagggctc

SEQ ID NO: 348928 - DNA, 438 bp, Homo sapiens; identical to SEQ ID NO: 347531
  chr19:5608081-5608519
  hypo

SEQ ID NO: 348929 - DNA, 229 bp, Homo sapiens
  chr19:5608569-5608798
  hypo
gaaacattaaccaacacctgatcgggtgacacagacctagacaaaggaacggcttctgtagccagaaaactgtgtcagacagggcccactctgcctggaatcagggcaccctccagacactaaatggtccgaaccttgtcccttggaagccactccccagaggcacccaggagaccagggcagtgccaattgcttaccagaagactcttggctaggcgcggtggctcac

SEQ ID NO: 348930 - DNA, 311 bp, Homo sapiens; identical to SEQ ID NO: 343677
  chr19:5938115-5938426
  hypo

SEQ ID NO: 348931 - DNA, 510 bp, Homo sapiens
  chr19:6024679-6025189
  hypo
cgcctcattttacacatcggccagcacagaagtcaggatggaatcacagtgaggacgggagtgaggacgggatcacggtgaggacgggagtgaggacgggatcacggtgaggacgggagtgaggacgggatcacggtgaggacgggagtgaggacgggatcacggtgaggacgggagtgaggacgggatcacggtgaggacgggagtgaggacgggatcacggtgaggacgggagtcaggacgggatcacggtgaggacgggagtcaggacgggatcacggtgaggacgggagtcaggacgggatcacggtgatgactggggtccactgaaggggacttcttctctgatgtctgaattctcaagagaatgtcagagcccagtttaagtgctagagagcaactactagaaggacattctgacttcgatggcccgtcccagtgttaagatgccgaacacatttccagctatgtgcaaaaccgaatcaagagcgtttggggagaagtgaaagc

SEQ ID NO: 348932 - DNA, 653 bp, Homo sapiens; identical to SEQ ID NO: 343692
  chr19:6045007-6045660
  hypo

SEQ ID NO: 348933 - DNA, 766 bp, Homo sapiens; identical to SEQ ID NO: 345562
  chr19:7459915-7460681
  hypo

SEQ ID NO: 348934 - DNA, 354 bp, Homo sapiens; identical to SEQ ID NO: 343708
  chr19:7991824-7992178
  hypo

SEQ ID NO: 348935 - DNA, 83 bp, Homo sapiens; identical to SEQ ID NO: 343711
  chr19:8004778-8004861
  hypo

SEQ ID NO: 348936 - DNA, 131 bp, Homo sapiens; identical to SEQ ID NO: 343715
  chr19:8526882-8527013
  hypo

SEQ ID NO: 348937 - DNA, 211 bp, Homo sapiens; identical to SEQ ID NO: 347533
  chr19:10197461-10197672
  hypo

SEQ ID NO: 348938 - DNA, 60 bp, Homo sapiens
  chr19:10370250-10370310
  hypo
cggcctgaccggccccccgccccgcccccaccccgcccccaggcctaaatgtgcacagca

SEQ ID NO: 348939 - DNA, 88 bp, Homo sapiens
  chr19:10370575-10370663
  hypo
ctggaccccttcattccacggaggaagctgaggccacagggagcggccatcgccattgggaaggggcgactccacggaaagcccagac

SEQ ID NO: 348940 - DNA, 214 bp, Homo sapiens; identical to SEQ ID NO: 205174
  chr19:10400761-10400975
  hypo

SEQ ID NO: 348941 - DNA, 189 bp, Homo sapiens; identical to SEQ ID NO: 347537
  chr19:11593453-11593642
  hypo

SEQ ID NO: 348942 - DNA, 485 bp, Homo sapiens; identical to SEQ ID NO: 347547
  chr19:12595307-12595792
  hypo

SEQ ID NO: 348943 - DNA, 73 bp, Homo sapiens; identical to SEQ ID NO: 346198
  chr19:13181444-13181517
  hypo

SEQ ID NO: 348944 - DNA, 420 bp, Homo sapiens; identical to SEQ ID NO: 343786
  chr19:13186075-13186495
  hypo

SEQ ID NO: 348945 - DNA, 34 bp, Homo sapiens
  chr19:13201116-13201150
  hypo
cgcaacgacaggcgcctcctctgccaaccggttt

SEQ ID NO: 348946 - DNA, 189 bp, Homo sapiens; identical to SEQ ID NO: 345572
  chr19:13213427-13213616
  hypo

SEQ ID NO: 348947 - DNA, 112 bp, Homo sapiens; identical to SEQ ID NO: 345573
  chr19:13213834-13213946
  hypo

SEQ ID NO: 348948 - DNA, 1257 bp, Homo sapiens; identical to SEQ ID NO: 345574
  chr19:13265772-13267029
  hypo

SEQ ID NO: 348949 - DNA, 881 bp, Homo sapiens; identical to SEQ ID NO: 347555
  chr19:14073521-14074402
  hypo

SEQ ID NO: 348950 - DNA, 178 bp, Homo sapiens
  chr19:14663747-14663925
  hypo
cgggcgagatcagcgtcgctctgggtgggccagtgctcctcggaggccctgagggcacaaccgcagggatgggtgtaggctgtgggtaccactgagaatggggggcaggcccagggctgagacccaggttctccaacttcccactgtgtttgtcttgtgccatattcatcctctatga

SEQ ID NO: 348951 - DNA, 267 bp, Homo sapiens; identical to SEQ ID NO: 346202
  chr19:14664561-14664828
  hypo

SEQ ID NO: 348952 - DNA, 324 bp, Homo sapiens; identical to SEQ ID NO: 335997
  chr19:15235629-15235953
  hypo

SEQ ID NO: 348953 - DNA, 99 bp, Homo sapiens; identical to SEQ ID NO: 343813
  chr19:15531296-15531395
  hypo

SEQ ID NO: 348954 - DNA, 102 bp, Homo sapiens; identical to SEQ ID NO: 205249
  chr19:16187000-16187102
  hypo

SEQ ID NO: 348955 - DNA, 517 bp, Homo sapiens; identical to SEQ ID NO: 205250
  chr19:16187103-16187620
  hypo

SEQ ID NO: 348956 - DNA, 634 bp, Homo sapiens; identical to SEQ ID NO: 345579
  chr19:16187640-16188274
  hypo

SEQ ID NO: 348957 - DNA, 376 bp, Homo sapiens; identical to SEQ ID NO: 343826
  chr19:17172577-17172953
  hypo

SEQ ID NO: 348958 - DNA, 825 bp, Homo sapiens; identical to SEQ ID NO: 346207
  chr19:17838219-17839044
  hypo

SEQ ID NO: 348959 - DNA, 353 bp, Homo sapiens; identical to SEQ ID NO: 347564
  chr19:18117804-18118157
  hypo

SEQ ID NO: 348960 - DNA, 270 bp, Homo sapiens; identical to SEQ ID NO: 343867
  chr19:19576172-19576442
  hypo

SEQ ID NO: 348961 - DNA, 53 bp, Homo sapiens; identical to SEQ ID NO: 347571
  chr19:20162601-20162654
  hypo

SEQ ID NO: 348962 - DNA, 60 bp, Homo sapiens; identical to SEQ ID NO: 205342
  chr19:30718934-30718994
  hypo

SEQ ID NO: 348963 - DNA, 573 bp, Homo sapiens
  chr19:31769887-31770460
  hypo
cgtcttccttcccttccatttccagcaaggagcgtttgcgaggcttggaccagcgcttggggttgttgttatcggtctcatggttgtcgtcgcggtaatgccccgtctcgttcatgtgcaccgtcaactccaccagggtgtcgtaggcagcgctgcagtccttacagcggaacttgctggcccccgtgaagatggagccatagagcttgctgctctgccggtacagctgcacggtgctgaagaggctgggctccgggagcatgcggctctgtgacacctgctgcagcgtcttagccatggcgctctggtgccagtcgaagctcccgctgccacagctgctgctgctgctactgctgctgctgctgctgccgttgttcttctccgaggagggctggtgcaggttgaggttgaggttggaccagtaggagttggagaggaagttgttgtacacggccttcatctgctccaggctatccgacacagtcgtgtcttccagtgggaccgtgacctccttggtctcctcttcgttcttgatggagccgctttcaaagtcagccattcggtcactggtct

SEQ ID NO: 348964 - DNA, 157 bp, Homo sapiens
  chr19:31770490-31770647
  hypo
ggcaggaaaactcggcggccggggagttctggtagctggggcaggccctggcgagctccttctccgggcacatgtacttggccgagggctctccatctgccgtatgctcctctgggtctaaaccttcgtccaccagggcagcagcctttaactcttc

SEQ ID NO: 348965 - DNA, 233 bp, Homo sapiens; identical to SEQ ID NO: 293818
  chr19:31841177-31841410
  hypo

SEQ ID NO: 348966 - DNA, 325 bp, Homo sapiens; identical to SEQ ID NO: 293819
  chr19:31841583-31841908
  hypo

SEQ ID NO: 348967 - DNA, 158 bp, Homo sapiens; identical to SEQ ID NO: 343905
  chr19:32850587-32850745
  hypo

SEQ ID NO: 348968 - DNA, 143 bp, Homo sapiens
  chr19:32898192-32898335
  hypo
cgacgctccctgggatagcagctgccctgattggcacacccccgcagtcatcaccactgaggcgtattcctgaagctgccagtgtgaattgttttatagaacactggtgttaaaattcaggtacctgagacaaaacaatattt

SEQ ID NO: 348969 - DNA, 219 bp, Homo sapiens
  chr19:32898490-32898709
  hypo
ggctcagggagggagaagatcagccggaactggaatgtcccaagatgttctggaagaaaagcagtggctcgtttgtgttgcttacctgtattcctgactcctggcagggcctgctgtagagcacatgcttcatgaataaatatgattgagttgaataaatatttgaattgtgttttgagtgtagctttgaaggccagcaacgatttagatggcaagatc

SEQ ID NO: 348970 - DNA, 78 bp, Homo sapiens; identical to SEQ ID NO: 346209
  chr19:34949560-34949638
  hypo

SEQ ID NO: 348971 - DNA, 295 bp, Homo sapiens; identical to SEQ ID NO: 345590
  chr19:37568994-37569289
  hypo

SEQ ID NO: 348972 - DNA, 182 bp, Homo sapiens; identical to SEQ ID NO: 345591
  chr19:37569554-37569736
  hypo

SEQ ID NO: 348973 - DNA, 389 bp, Homo sapiens; identical to SEQ ID NO: 347597
  chr19:38754883-38755272
  hypo

SEQ ID NO: 348974 - DNA, 175 bp, Homo sapiens; identical to SEQ ID NO: 347598
  chr19:38755344-38755519
  hypo

SEQ ID NO: 348975 - DNA, 324 bp, Homo sapiens
  chr19:38781936-38782260
  hypo
cgagactgcagtggggcagacactattaaatttgctggcacagctctgagtaccccctcgcttccaccctgacttcatcccgcagtagctctcagccctcccagcccctgcagggccacgtctttctctattgccggtcagcgtgtgtgtgcacaaagcccctaaggtttcatgtgtacacaccggtgctaagtgttttttacacccttgtgcatctctcggcctggggctcctgtgcaggttgccctgagagttgggtttttagttcaaaaagaaggaacacagatgactactctgctggcgacacggccactctgctggcac

SEQ ID NO: 348976 - DNA, 72 bp, Homo sapiens; identical to SEQ ID NO: 343954
  chr19:39094650-39094722
  hypo

SEQ ID NO: 348977 - DNA, 56 bp, Homo sapiens
  chr19:39329516-39329572
  hypo
cgagcctgagcacctaccagacattcagcttctgcccaaacatgaagttgttgttg

SEQ ID NO: 348978 - DNA, 301 bp, Homo sapiens; identical to SEQ ID NO: 343977
  chr19:40753417-40753718
  hypo

SEQ ID NO: 348979 - DNA, 294 bp, Homo sapiens
  chr19:40829211-40829505
  hypo
ctctacagccatccttggaggtgggtctatacagatgaggaggctgaagtacaaaggacttaagtgacatggccaaagccacgcagtcaggcccctgtgggcttcagggtgtactctgagctacacaccaggcctggggcctgtgggactgcgggccgcggcaggaagtacaggctgcatcatgggcacagtgaagagcctctgcagggcttccagtgaggggacgggccctgtcctgtgggccgcacacactgctgctgtggggataggggctggggtccatggtaactgtgc

SEQ ID NO: 348980 - DNA, 359 bp, Homo sapiens; identical to SEQ ID NO: 336145
  chr19:41190162-41190521
  hypo

SEQ ID NO: 348981 - DNA, 71 bp, Homo sapiens
  chr19:42906796-42906867
  hypo
cgggtgccagcagcggcgacatgaaggggttcttgactatgggtgaggagtagaggggcatctgtgtggca

SEQ ID NO: 348982 - DNA, 157 bp, Homo sapiens
  chr19:42906913-42907070
  hypo
ggacgcccaggcctctgtccatggggctcagctcatttttggcctcagcctcttcccctgcatcctcaggtggtaataagaagttgacatcggagggtgtggaggggctaagtgtctcagctgacagcgacatctcgggggtgtccgacgacgtctc

SEQ ID NO: 348983 - DNA, 330 bp, Homo sapiens
  chr19:44222791-44223121
  hypo
cgcacagcctttgagtcgggtgacctcccccaggccgcctctcacctccaggagctgctggcctccacggaaagcatccgcctggaggtgggcgtcacgggcgagtcgggcgcgggcaagtcctccctcatcaatgccctgcgtggcctggaggccgaggaccctggcgcggctctcacgggcgtcatggagaccacgatgcaaccgtcgccctatccacacccacagttccctgacgtgaccctctgggacctgccaggagccggctctccaggctgcccggctgacaagtacctaaagcaggtagacttcagccgctatgacttcttc

SEQ ID NO: 348984 - DNA, 344 bp, Homo sapiens; identical to SEQ ID NO: 219534
  chr19:44223175-44223519
  hypo

SEQ ID NO: 348985 - DNA, 132 bp, Homo sapiens; identical to SEQ ID NO: 346212
  chr19:45603745-45603877
  hypo

SEQ ID NO: 348986 - DNA, 334 bp, Homo sapiens; identical to SEQ ID NO: 346213
  chr19:45603910-45604244
  hypo

SEQ ID NO: 348987 - DNA, 802 bp, Homo sapiens; identical to SEQ ID NO: 347608
  chr19:45648009-45648811
  hypo

SEQ ID NO: 348988 - DNA, 139 bp, Homo sapiens; identical to SEQ ID NO: 345597
  chr19:46931914-46932053
  hypo

SEQ ID NO: 348989 - DNA, 64 bp, Homo sapiens
  chr19:47881711-47881775
  hypo
cgagggacagaggattggcgaccagccgggccgcaggaagcggaacagacctgctacctgaggc

SEQ ID NO: 348990 - DNA, 214 bp, Homo sapiens; identical to SEQ ID NO: 219597
  chr19:48003714-48003928
  hypo

SEQ ID NO: 348991 - DNA, 311 bp, Homo sapiens; identical to SEQ ID NO: 347612
  chr19:48901504-48901815
  hypo

SEQ ID NO: 348992 - DNA, 550 bp, Homo sapiens; identical to SEQ ID NO: 336209
  chr19:49467064-49467614
  hypo

SEQ ID NO: 348993 - DNA, 224 bp, Homo sapiens; identical to SEQ ID NO: 344049
  chr19:49600463-49600687
  hypo

SEQ ID NO: 348994 - DNA, 67 bp, Homo sapiens
  chr19:50365162-50365229
  hypo
agatcggcagacccagggggagagaagaccccgagcggggacggggaggcaatgatggaggaaagcc

SEQ ID NO: 348995 - DNA, 218 bp, Homo sapiens; identical to SEQ ID NO: 347617
  chr19:50553779-50553997
  hypo

SEQ ID NO: 348996 - DNA, 176 bp, Homo sapiens; identical to SEQ ID NO: 346217
  chr19:50919593-50919769
  hypo

SEQ ID NO: 348997 - DNA, 73 bp, Homo sapiens; identical to SEQ ID NO: 345605
  chr19:51228809-51228882
  hypo

SEQ ID NO: 348998 - DNA, 36 bp, Homo sapiens
  chr19:52058332-52058368
  hypo
ttggtcactggaggacgccatcttcaaaagatggtc

SEQ ID NO: 348999 - DNA, 74 bp, Homo sapiens; identical to SEQ ID NO: 205557
  chr19:52531285-52531359
  hypo

SEQ ID NO: 349000 - DNA, 208 bp, Homo sapiens; identical to SEQ ID NO: 345609
  chr19:52531884-52532092
  hypo

SEQ ID NO: 349001 - DNA, 139 bp, Homo sapiens; identical to SEQ ID NO: 347631
  chr19:53606073-53606212
  hypo

SEQ ID NO: 349002 - DNA, 221 bp, Homo sapiens; identical to SEQ ID NO: 205580
  chr19:53606354-53606575
  hypo

SEQ ID NO: 349003 - DNA, 84 bp, Homo sapiens; identical to SEQ ID NO: 347635
  chr19:54412564-54412648
  hypo

SEQ ID NO: 349004 - DNA, 149 bp, Homo sapiens; identical to SEQ ID NO: 346221
  chr19:56201494-56201643
  hypo

SEQ ID NO: 349005 - DNA, 495 bp, Homo sapiens
  chr19:56538418-56538913
  hypo
cggtggggcttccggcctcgcacggtggttctgcacggaaagtcaggaattgggaaatcggctctagccagaaggatcgtgctgtgctgggcgcaaggtggactctaccagggaatgttctcctacgtcttcttcctccccgttagagagatgcagcggaagaaggagagcagtgtcacagagttcatctccagggagtggccagactcccaggctccggtgacggagatcatgtcccgaccagaaaggctgttgttcatcattgacggtttcgatgacctgggctctgtcctcaacaatgacacaaagctctgcaaagactgggctgagaagcagcctccgttcaccctcatacgcagtctgctgaggaaggtcctgctccctgagtccttcctgatcgtcaccgtcagagacgtgggcacagagaagctcaagtcagaggtcgtgtctccccgttacctgttagttagaggaatctccggggaacaaagaatc

SEQ ID NO: 349006 - DNA, 74 bp, Homo sapiens
  chr19:56539122-56539196
  hypo
tcagctcacccctcgaggcgtggtccggcgctgtctcaatctggaggaaagagttgtcctgaagcgcttctgcc

SEQ ID NO: 349007 - DNA, 171 bp, Homo sapiens; identical to SEQ ID NO: 344121
  chr19:56807013-56807184
  hypo

SEQ ID NO: 349008 - DNA, 53 bp, Homo sapiens
  chr19:58964127-58964180
  hypo
cgtgcggagttacagcttgagggtaaagaaaaccggctggggtgcctgaggct

SEQ ID NO: 349009 - DNA, 236 bp, Homo sapiens; identical to SEQ ID NO: 344146
  chr20:371973-372209
  hypo

SEQ ID NO: 349010 - DNA, 139 bp, Homo sapiens; identical to SEQ ID NO: 219814
  chr20:2820587-2820726
  hypo

SEQ ID NO: 349011 - DNA, 143 bp, Homo sapiens; identical to SEQ ID NO: 294514
  chr20:2820861-2821004
  hypo

SEQ ID NO: 349012 - DNA, 414 bp, Homo sapiens; identical to SEQ ID NO: 347652
  chr20:4804008-4804422
  hypo

SEQ ID NO: 349013 - DNA, 225 bp, Homo sapiens
  chr20:20376606-20376831
  hypo
cgccttccgcctgtgagcctgggaggtggtgcagcccaggccacacgggacagggttttcagacagccttgccaaggcggctgccatccatcagagcgctctgggcagggcctggaccccagacccaggacagaaaggcaggctggggaggtcacacctgccatggccagcctatcctctgggtcctagaccgcagcccattcctaggtctccaccctctgcgct

SEQ ID NO: 349014 - DNA, 218 bp, Homo sapiens; identical to SEQ ID NO: 219867
  chr20:20376973-20377191
  hypo

SEQ ID NO: 349015 - DNA, 923 bp, Homo sapiens; identical to SEQ ID NO: 347661
  chr20:22564324-22565247
  hypo

SEQ ID NO: 349016 - DNA, 1002 bp, Homo sapiens; identical to SEQ ID NO: 345628
  chr20:30192854-30193856
  hypo

SEQ ID NO: 349017 - DNA, 189 bp, Homo sapiens; identical to SEQ ID NO: 345629
  chr20:30193992-30194181
  hypo

SEQ ID NO: 349018 - DNA, 237 bp, Homo sapiens; identical to SEQ ID NO: 344211
  chr20:32436267-32436504
  hypo

SEQ ID NO: 349019 - DNA, 435 bp, Homo sapiens; identical to SEQ ID NO: 346229
  chr20:35443740-35444175
  hypo

SEQ ID NO: 349020 - DNA, 381 bp, Homo sapiens; identical to SEQ ID NO: 346230
  chr20:35444205-35444586
  hypo

SEQ ID NO: 349021 - DNA, 116 bp, Homo sapiens
  chr20:36764040-36764156
  hypo
cggactctcggggcctggatgagcagcgagggccgggtcctttctacaccaccgaggtgtcagggacacaggaacccccgagcccagggctgacaccactgcctgggacagaaggt

SEQ ID NO: 349022 - DNA, 124 bp, Homo sapiens
  chr20:36764186-36764310
  hypo
cccacgcctcttagcactcgcactcagggaggagtgagggccccaccgtgtgctggtgctgctgtgccctttccagatacctcctgagcacgcatcctctccctcagtcctcacggctgcgggc

SEQ ID NO: 349023 - DNA, 62 bp, Homo sapiens; identical to SEQ ID NO: 345634
  chr20:37274639-37274701
  hypo

SEQ ID NO: 349024 - DNA, 546 bp, Homo sapiens; identical to SEQ ID NO: 205802
  chr20:37274731-37275277
  hypo

SEQ ID NO: 349025 - DNA, 389 bp, Homo sapiens; identical to SEQ ID NO: 345636
  chr20:37433723-37434112
  hypo

SEQ ID NO: 349026 - DNA, 172 bp, Homo sapiens; identical to SEQ ID NO: 346234
  chr20:42088459-42088631
  hypo

SEQ ID NO: 349027 - DNA, 215 bp, Homo sapiens; identical to SEQ ID NO: 347677
  chr20:43976984-43977199
  hypo

SEQ ID NO: 349028 - DNA, 36 bp, Homo sapiens
  chr20:47837206-47837242
  hypo
tcagcccgctgcgtgggaggtcatgggccagtcccc

SEQ ID NO: 349029 - DNA, 522 bp, Homo sapiens; identical to SEQ ID NO: 346235
  chr20:48498752-48499274
  hypo

SEQ ID NO: 349030 - DNA, 982 bp, Homo sapiens; identical to SEQ ID NO: 336464
  chr20:48598700-48599682
  hypo

SEQ ID NO: 349031 - DNA, 164 bp, Homo sapiens; identical to SEQ ID NO: 345639
  chr20:48771177-48771341
  hypo

SEQ ID NO: 349032 - DNA, 62 bp, Homo sapiens
  chr20:49218808-49218870
  hypo
agccctgtggcaggctggggctctcccctcctaagttcctccagccaggctgctctgcaaac

SEQ ID NO: 349033 - DNA, 581 bp, Homo sapiens; identical to SEQ ID NO: 347682
  chr20:49224897-49225478
  hypo

SEQ ID NO: 349034 - DNA, 570 bp, Homo sapiens; identical to SEQ ID NO: 345641
  chr20:50383675-50384245
  hypo

SEQ ID NO: 349035 - DNA, 243 bp, Homo sapiens; identical to SEQ ID NO: 205849
  chr20:50384928-50385171
  hypo

SEQ ID NO: 349036 - DNA, 174 bp, Homo sapiens; identical to SEQ ID NO: 344302
  chr20:52374073-52374247
  hypo

SEQ ID NO: 349037 - DNA, 113 bp, Homo sapiens; identical to SEQ ID NO: 345643
  chr20:57225466-57225579
  hypo

SEQ ID NO: 349038 - DNA, 164 bp, Homo sapiens; identical to SEQ ID NO: 346239
  chr20:57268976-57269140
  hypo

SEQ ID NO: 349039 - DNA, 233 bp, Homo sapiens; identical to SEQ ID NO: 347690
  chr20:57978841-57979074
  hypo

SEQ ID NO: 349040 - DNA, 56 bp, Homo sapiens; identical to SEQ ID NO: 346240
  chr20:58514041-58514097
  hypo

SEQ ID NO: 349041 - DNA, 115 bp, Homo sapiens; identical to SEQ ID NO: 345644
  chr20:58514400-58514515
  hypo

SEQ ID NO: 349042 - DNA, 347 bp, Homo sapiens
  chr20:60352702-60353049
  hypo
cgcacacacgtgcatacaaagacacacacccatacgcgcacacacgtgcatacaaaaacacacacccacatgcgtgcacacgtgcatacaaaaacacacacccacatgcgcacacacgtgcatacaaaaacacacatccacatgcgcacacacgtgcatacaaaaacacacatccacatgcgcacgcacttgcatacaaaaacacatccacatgcgcacgcacgtgcatactatacacacatgcacacacgtgcatgcaatacacacatccacatgtgcatacacgtgcatactatacacacatgcacacacgtgcatactatacacacatccacatgcacacacac

SEQ ID NO: 349043 - DNA, 83 bp, Homo sapiens; identical to SEQ ID NO: 346242
  chr20:60544922-60545005
  hypo

SEQ ID NO: 349044 - DNA, 208 bp, Homo sapiens; identical to SEQ ID NO: 220146
  chr20:60545058-60545266
  hypo

SEQ ID NO: 349045 - DNA, 265 bp, Homo sapiens; identical to SEQ ID NO: 220147
  chr20:60545296-60545561
  hypo

SEQ ID NO: 349046 - DNA, 373 bp, Homo sapiens
  chr20:60773878-60774251
  hypo
gagctcaagacggtggcccacgccggaatggtaggtgtccccactgccaacagcatctgcacacactcagctctagaaaatccacttttctcaatggggatttgccagtggcctggaagagaacagctttgcgactcacctttttcccatcagtacactgctgacttggtcgtgagcatgagcccttgtgactcccccagccctgaaatcctccctccaatcccagttagttacagactctgcgctaacaaaggtgctgccgcgggccgtgccaccgtcttccctctttcccccaggtgggattccccaacgccgggaagtcctcactgctccgggccatttcaaacgccagacccgccgtggcttcctaccc

SEQ ID NO: 349047 - DNA, 123 bp, Homo sapiens; identical to SEQ ID NO: 346245
  chr20:61838301-61838424
  hypo

SEQ ID NO: 349048 - DNA, 390 bp, Homo sapiens; identical to SEQ ID NO: 347694
  chr20:62273399-62273789
  hypo

SEQ ID NO: 349049 - DNA, 103 bp, Homo sapiens; identical to SEQ ID NO: 344414
  chr20:62310122-62310225
  hypo

SEQ ID NO: 349050 - DNA, 345 bp, Homo sapiens; identical to SEQ ID NO: 345646
  chr20:62495236-62495581
  hypo

SEQ ID NO: 349051 - DNA, 122 bp, Homo sapiens; identical to SEQ ID NO: 205931
  chr21:27011487-27011609
  hypo

SEQ ID NO: 349052 - DNA, 133 bp, Homo sapiens; identical to SEQ ID NO: 205932
  chr21:27011639-27011772
  hypo

SEQ ID NO: 349053 - DNA, 55 bp, Homo sapiens; identical to SEQ ID NO: 344444
  chr21:30294975-30295030
  hypo

SEQ ID NO: 349054 - DNA, 53 bp, Homo sapiens; identical to SEQ ID NO: 344452
  chr21:34033597-34033650
  hypo

SEQ ID NO: 349055 - DNA, 42 bp, Homo sapiens
  chr21:37775172-37775214
  hypo
aaaggaatgatggccgagtggggatgtctgctcccgttttac

SEQ ID NO: 349056 - DNA, 749 bp, Homo sapiens; identical to SEQ ID NO: 344480
  chr21:40316188-40316937
  hypo

SEQ ID NO: 349057 - DNA, 151 bp, Homo sapiens; identical to SEQ ID NO: 344488
  chr21:42593821-42593972
  hypo

SEQ ID NO: 349058 - DNA, 146 bp, Homo sapiens; identical to SEQ ID NO: 346249
  chr21:42617817-42617963
  hypo

SEQ ID NO: 349059 - DNA, 92 bp, Homo sapiens; identical to SEQ ID NO: 346250
  chr21:42617995-42618087
  hypo

SEQ ID NO: 349060 - DNA, 375 bp, Homo sapiens; identical to SEQ ID NO: 346251
  chr21:43239707-43240082
  hypo

SEQ ID NO: 349061 - DNA, 243 bp, Homo sapiens; identical to SEQ ID NO: 346252
  chr21:43240112-43240355
  hypo

SEQ ID NO: 349062 - DNA, 516 bp, Homo sapiens; identical to SEQ ID NO: 344507
  chr21:43791392-43791908
  hypo

SEQ ID NO: 349063 - DNA, 119 bp, Homo sapiens; identical to SEQ ID NO: 346254
  chr21:44338552-44338671
  hypo

SEQ ID NO: 349064 - DNA, 209 bp, Homo sapiens; identical to SEQ ID NO: 344516
  chr21:44444714-44444923
  hypo

SEQ ID NO: 349065 - DNA, 703 bp, Homo sapiens; identical to SEQ ID NO: 344535
  chr21:45345807-45346510
  hypo

SEQ ID NO: 349066 - DNA, 642 bp, Homo sapiens
  chr21:45400182-45400824
  hypo
cgagagagttgatggtgcccttcactacttcccaagcatcctagagtcccacgggctgccccgcccacgggcagtggctgcggagtgtctgctctatcaggcatggtgatttcctgccagcctgtgcctttgacattcccaccagaggcagaaccttctgcaggtggccctggccaggctcctctctcctcccagctcctcattagcctcctttgccaggctaggaaaccgaggtatgcgaggttaaggaactttccttgggccgtgcagctgagagtgcgctttgcagggatttgcatccaggccgcgggactcacacaggccacacctgccacccccactgcctctggctcgtgggaggtgtgggatgtggcgggtggccggggcagtgctgggcaggcaggtgttggtattcacaacgttgctttcttgaccgattattttcctgggagacttcctcagtcaaagggttgatatgcttgcgagctctcgatgcacgctatcagattctccaaaaacgtacagccagcttcgcctgcacctgcagcttctgtgatttgtgctcttaattgacgtggcgctttttttaggttgagtcgtttttcattgccaacaatcttctcctgcattgaaataatagct

SEQ ID NO: 349067 - DNA, 278 bp, Homo sapiens
  chr21:45400854-45401132
  hypo
tgttgactcttctaggacgcgctccaggagatatataatcagaagggcatgtttccaggggagcagtttaagcctgcccggaggccgtggaccctcctgaacttcctgtcctgggccaccattctcctgtctcccctcttcagttttgtcttgggcgtctttgccagcggatcacctctcctgatcctgactttcttggggtttgtgggagcaggtaatggacactgtcgctaacagctcacactctgacgggcctcacagtatcagccacagggtcc

SEQ ID NO: 349068 - DNA, 162 bp, Homo sapiens; identical to SEQ ID NO: 344541
  chr21:45513811-45513973
  hypo

SEQ ID NO: 349069 - DNA, 98 bp, Homo sapiens; identical to SEQ ID NO: 344545
  chr21:45617247-45617345
  hypo

SEQ ID NO: 349070 - DNA, 468 bp, Homo sapiens; identical to SEQ ID NO: 344553
  chr21:45941802-45942270
  hypo

SEQ ID NO: 349071 - DNA, 177 bp, Homo sapiens; identical to SEQ ID NO: 344584
  chr21:46802668-46802845
  hypo

SEQ ID NO: 349072 - DNA, 333 bp, Homo sapiens; identical to SEQ ID NO: 346256
  chr21:46811998-46812331
  hypo

SEQ ID NO: 349073 - DNA, 81 bp, Homo sapiens; identical to SEQ ID NO: 346257
  chr21:46812995-46813076
  hypo

SEQ ID NO: 349074 - DNA, 192 bp, Homo sapiens; identical to SEQ ID NO: 346258
  chr21:46813106-46813298
  hypo

SEQ ID NO: 349075 - DNA, 499 bp, Homo sapiens; identical to SEQ ID NO: 344592
  chr21:46835379-46835878
  hypo

SEQ ID NO: 349076 - DNA, 261 bp, Homo sapiens; identical to SEQ ID NO: 346259
  chr21:46839249-46839510
  hypo

SEQ ID NO: 349077 - DNA, 324 bp, Homo sapiens
  chr21:46844304-46844628
  hypo
cgcctggagcgcagctctgctgtgggttagccgtgggtctctgggcgagggttcccgggatacagacacctgccccaaggtgccccacagaggatgacccccagggcagccgtgcctgagcctgcgtggtcacctcccacagtgccaaggcgctcccccaaggcccctgcggcccacctgaccagtggagaactcgcgagcactcggccagtggtgcctccaatttgcagcctccaatccctggtcagaggtgtgacctgaccctggaccagagcgctgggccaggtcctggtggcttctgcccttcagcttggaagctcctga

SEQ ID NO: 349078 - DNA, 448 bp, Homo sapiens; identical to SEQ ID NO: 220526
  chr21:46844763-46845211
  hypo

SEQ ID NO: 349079 - DNA, 786 bp, Homo sapiens; identical to SEQ ID NO: 344603
  chr21:46861383-46862169
  hypo

SEQ ID NO: 349080 - DNA, 54 bp, Homo sapiens; identical to SEQ ID NO: 346261
  chr21:46864076-46864130
  hypo

SEQ ID NO: 349081 - DNA, 297 bp, Homo sapiens; identical to SEQ ID NO: 344607
  chr21:46870768-46871065
  hypo

SEQ ID NO: 349082 - DNA, 222 bp, Homo sapiens; identical to SEQ ID NO: 344610
  chr21:46893658-46893880
  hypo

SEQ ID NO: 349083 - DNA, 277 bp, Homo sapiens; identical to SEQ ID NO: 346263
  chr21:46894494-46894771
  hypo

SEQ ID NO: 349084 - DNA, 257 bp, Homo sapiens; identical to SEQ ID NO: 220538
  chr21:46894910-46895167
  hypo

SEQ ID NO: 349085 - DNA, 215 bp, Homo sapiens; identical to SEQ ID NO: 220539
  chr21:46895491-46895706
  hypo

SEQ ID NO: 349086 - DNA, 575 bp, Homo sapiens; identical to SEQ ID NO: 346266
  chr21:46895736-46896311
  hypo

SEQ ID NO: 349087 - DNA, 866 bp, Homo sapiens; identical to SEQ ID NO: 344612
  chr21:46900291-46901157
  hypo

SEQ ID NO: 349088 - DNA, 1234 bp, Homo sapiens; identical to SEQ ID NO: 344614
  chr21:46906455-46907689
  hypo

SEQ ID NO: 349089 - DNA, 616 bp, Homo sapiens; identical to SEQ ID NO: 344616
  chr21:46911022-46911638
  hypo

SEQ ID NO: 349090 - DNA, 755 bp, Homo sapiens; identical to SEQ ID NO: 220545
  chr21:46912528-46913283
  hypo

SEQ ID NO: 349091 - DNA, 319 bp, Homo sapiens; identical to SEQ ID NO: 346270
  chr21:46913360-46913679
  hypo

SEQ ID NO: 349092 - DNA, 395 bp, Homo sapiens; identical to SEQ ID NO: 344619
  chr21:46918218-46918613
  hypo

SEQ ID NO: 349093 - DNA, 390 bp, Homo sapiens; identical to SEQ ID NO: 346272
  chr21:46935349-46935739
  hypo

SEQ ID NO: 349094 - DNA, 142 bp, Homo sapiens; identical to SEQ ID NO: 345651
  chr21:47063290-47063432
  hypo

SEQ ID NO: 349095 - DNA, 384 bp, Homo sapiens
  chr21:47602705-47603089
  hypo
tcatcagctcgccgccttcagccatggcgggtgcgtccctccttgtccctcacggctcctgcagccccatggaggtgggagcccagagcccgcaggcaccacagaaacagcccaggcacggagttccgtagccaccaccgccttccacgccttgtgatgtcactgccctagtgatgaggtgcccagcaccctgcctgcccccgcgatggctcatggccccgttgaggcagtgaagctggaggcccgtggcgtgcacaggcagccactcccacattatgaccagggcccgagaatgccaaggacattaggcagctacgggatgtagcgactgtactccaagaggggcgtccaagccactccccattgagcggcccagccagggtc

SEQ ID NO: 349096 - DNA, 67 bp, Homo sapiens; identical to SEQ ID NO: 346274
  chr21:47689571-47689638
  hypo

SEQ ID NO: 349097 - DNA, 129 bp, Homo sapiens; identical to SEQ ID NO: 346275
  chr21:47689700-47689829
  hypo

SEQ ID NO: 349098 - DNA, 106 bp, Homo sapiens; identical to SEQ ID NO: 344655
  chr22:18084157-18084263
  hypo

SEQ ID NO: 349099 - DNA, 88 bp, Homo sapiens; identical to SEQ ID NO: 344669
  chr22:19924393-19924481
  hypo

SEQ ID NO: 349100 - DNA, 136 bp, Homo sapiens; identical to SEQ ID NO: 345653
  chr22:22862472-22862608
  hypo

SEQ ID NO: 349101 - DNA, 134 bp, Homo sapiens
  chr22:22899978-22900112
  hypo
agttcaccacaccgcgaagttgctggaaggaaagaacgagacaatggctcagctaagcgccctagccgctgcgtggggcggggggggcggcggtgggggccggggggctgggcagcctggtctgaccaatcccc

SEQ ID NO: 349102 - DNA, 187 bp, Homo sapiens; identical to SEQ ID NO: 295268
  chr22:24552924-24553111
  hypo

SEQ ID NO: 349103 - DNA, 240 bp, Homo sapiens; identical to SEQ ID NO: 345654
  chr22:25348202-25348442
  hypo

SEQ ID NO: 349104 - DNA, 787 bp, Homo sapiens; identical to SEQ ID NO: 206075
  chr22:25348485-25349272
  hypo

SEQ ID NO: 349105 - DNA, 125 bp, Homo sapiens; identical to SEQ ID NO: 345656
  chr22:25349348-25349473
  hypo

SEQ ID NO: 349106 - DNA, 251 bp, Homo sapiens
  chr22:27007869-27008120
  hypo
agaacaattcctccctcttcagtttgatatgaggattggacataatgtatgtgccaggagtacgaacggccgcaggcacagagcagatgctggagaaatggcagctactgttgtgtggtcattttactgtggcagagagtgtgcccctccgccgcccagtactcacggtcccgcggagacaatgatgctgcgcacacggtcgaagccacggtctgccagatttgagcactcccccgagaattctgctcgac

SEQ ID NO: 349107 - DNA, 63 bp, Homo sapiens; identical to SEQ ID NO: 295312
  chr22:29075343-29075406
  hypo

SEQ ID NO: 349108 - DNA, 67 bp, Homo sapiens; identical to SEQ ID NO: 344712
  chr22:29076607-29076674
  hypo

SEQ ID NO: 349109 - DNA, 86 bp, Homo sapiens; identical to SEQ ID NO: 344714
  chr22:29587127-29587213
  hypo

SEQ ID NO: 349110 - DNA, 254 bp, Homo sapiens; identical to SEQ ID NO: 344724
  chr22:30190745-30190999
  hypo

SEQ ID NO: 349111 - DNA, 96 bp, Homo sapiens; identical to SEQ ID NO: 346280
  chr22:36902565-36902661
  hypo

SEQ ID NO: 349112 - DNA, 31 bp, Homo sapiens; identical to SEQ ID NO: 295456
  chr22:39853626-39853657
  hypo

SEQ ID NO: 349113 - DNA, 209 bp, Homo sapiens; identical to SEQ ID NO: 295457
  chr22:39853690-39853899
  hypo

SEQ ID NO: 349114 - DNA, 130 bp, Homo sapiens; identical to SEQ ID NO: 345661
  chr22:39853934-39854064
  hypo

SEQ ID NO: 349115 - DNA, 192 bp, Homo sapiens; identical to SEQ ID NO: 344782
  chr22:40812801-40812993
  hypo

SEQ ID NO: 349116 - DNA, 106 bp, Homo sapiens
  chr22:41634855-41634961
  hypo
gcaaattgccctgcaggtccagccgctgggtcagctggggacagcgaggagaaagtggggctgagccaggcagggaccccgcctttgcaagtgctgcttcttcccc

SEQ ID NO: 349117 - DNA, 69 bp, Homo sapiens; identical to SEQ ID NO: 344787
  chr22:41658279-41658348
  hypo

SEQ ID NO: 349118 - DNA, 553 bp, Homo sapiens; identical to SEQ ID NO: 345662
  chr22:45097777-45098330
  hypo

SEQ ID NO: 349119 - DNA, 470 bp, Homo sapiens; identical to SEQ ID NO: 206166
  chr22:45098381-45098851
  hypo

SEQ ID NO: 349120 - DNA, 403 bp, Homo sapiens; identical to SEQ ID NO: 346287
  chr22:45593240-45593643
  hypo

SEQ ID NO: 349121 - DNA, 258 bp, Homo sapiens; identical to SEQ ID NO: 346288
  chr22:45593715-45593973
  hypo

SEQ ID NO: 349122 - DNA, 567 bp, Homo sapiens; identical to SEQ ID NO: 344821
  chr22:45808579-45809146
  hypo

SEQ ID NO: 349123 - DNA, 281 bp, Homo sapiens
  chr22:46931438-46931719
  hypo
cgggggccggcccccatcctgggccttaatgctcagcgagtatttctggacatcctcgaaatccaaggggttgatcacatccaggatcccgctcagcgagtgcaggtagaactggccggccacgttcccgctgaggatgctgtagtgaatggccgcgttctggccctggtcccggtccgtggcctgcactcgcagcacagccgtgttgagccccacgtcctcgggcacctggaccacgtagttctgctcgctgaactgggggtagttgtcgttctcgtcct

SEQ ID NO: 349124 - DNA, 68 bp, Homo sapiens
  chr22:46932128-46932196
  hypo
gcggtccagtacgctgtccgtgctcacggcgcccgtggcagagtcgattcggaagtagccccgggagc

SEQ ID NO: 349125 - DNA, 263 bp, Homo sapiens; identical to SEQ ID NO: 344836
  chr22:47054031-47054294
  hypo

SEQ ID NO: 349126 - DNA, 850 bp, Homo sapiens; identical to SEQ ID NO: 344838
  chr22:47197347-47198197
  hypo

SEQ ID NO: 349127 - DNA, 210 bp, Homo sapiens; identical to SEQ ID NO: 220970
  chr22:50008973-50009183
  hypo

SEQ ID NO: 349128 - DNA, 289 bp, Homo sapiens; identical to SEQ ID NO: 220971
  chr22:50009330-50009619
  hypo

SEQ ID NO: 349129 - DNA, 48 bp, Homo sapiens; identical to SEQ ID NO: 346291
  chr22:50009663-50009711
  hypo

SEQ ID NO: 349130 - DNA, 225 bp, Homo sapiens; identical to SEQ ID NO: 346292
  chr22:50191356-50191581
  hypo

SEQ ID NO: 349131 - DNA, 81 bp, Homo sapiens; identical to SEQ ID NO: 346293
  chr22:50191626-50191707
  hypo

SEQ ID NO: 349132 - DNA, 154 bp, Homo sapiens; identical to SEQ ID NO: 346294
  chr22:50954823-50954977
  hypo

SEQ ID NO: 349133 - DNA, 295 bp, Homo sapiens; identical to SEQ ID NO: 347736
  chrX:9433131-9433426
  hypo

SEQ ID NO: 349134 - DNA, 241 bp, Homo sapiens; identical to SEQ ID NO: 206206
  chrX:9433471-9433712
  hypo

SEQ ID NO: 349135 - DNA, 224 bp, Homo sapiens; identical to SEQ ID NO: 206224
  chrX:16730628-16730852
  hypo

SEQ ID NO: 349136 - DNA, 35 bp, Homo sapiens; identical to SEQ ID NO: 345669
  chrX:16730902-16730937
  hypo

SEQ ID NO: 349137 - DNA, 721 bp, Homo sapiens; identical to SEQ ID NO: 347751
  chrX:40035852-40036573
  hypo

SEQ ID NO: 349138 - DNA, 264 bp, Homo sapiens; identical to SEQ ID NO: 336722
  chrX:41112874-41113138
  hypo

SEQ ID NO: 349139 - DNA, 431 bp, Homo sapiens; identical to SEQ ID NO: 344915
  chrY:14776368-14776799
  hypo

SEQ ID NO: 349140 - DNA, 1082 bp, Homo sapiens; identical to SEQ ID NO: 345679
  chrY:16636060-16637142
  hypo

SEQ ID NO: 349141 - DNA, 122 bp, Homo sapiens; identical to SEQ ID NO: 346299
  chrY:22918582-22918704
  hypo

SEQ ID NO: 349142 - DNA, 97 bp, Homo sapiens
  chr1:1566979-1567076
  hyper
cacgcaccccctccccgcctccccctccaccgccccatactcactgccacgtccccatccggccatcccctcccagctctcggggacactgtcaggc

SEQ ID NO: 349143 - DNA, 431 bp, Homo sapiens; identical to SEQ ID NO: 344930
  chr1:1713574-1714005
  hyper

SEQ ID NO: 349144 - DNA, 232 bp, Homo sapiens; identical to SEQ ID NO: 344931
  chr1:1714067-1714299
  hyper

SEQ ID NO: 349145 - DNA, 194 bp, Homo sapiens; identical to SEQ ID NO: 344932
  chr1:2460612-2460806
  hyper

SEQ ID NO: 349146 - DNA, 413 bp, Homo sapiens; identical to SEQ ID NO: 197254
  chr1:2460898-2461311
  hyper

SEQ ID NO: 349147 - DNA, 443 bp, Homo sapiens; identical to SEQ ID NO: 344934
  chr1:2461988-2462431
  hyper

SEQ ID NO: 349148 - DNA, 42 bp, Homo sapiens
  chr1:3325196-3325238
  hyper
cgtgagctggtgcctgtgttggcatgtgtgagagtgtgtgag

SEQ ID NO: 349149 - DNA, 178 bp, Homo sapiens; identical to SEQ ID NO: 346305
  chr1:3663338-3663516
  hyper

SEQ ID NO: 349150 - DNA, 101 bp, Homo sapiens; identical to SEQ ID NO: 346306
  chr1:3663983-3664084
  hyper

SEQ ID NO: 349151 - DNA, 35 bp, Homo sapiens
  chr1:6086224-6086259
  hyper
cgctgctcatccaggaaggtcggagatgtcgggcc

SEQ ID NO: 349152 - DNA, 88 bp, Homo sapiens
  chr1:6086291-6086379
  hyper
agagcaaaggccacgccccgacaccccacggggccctggcgcgccaggcttctcagccctgcggcggcagtgcatagctctggcacgc

SEQ ID NO: 349153 - DNA, 165 bp, Homo sapiens; identical to SEQ ID NO: 330668
  chr1:6265347-6265512
  hyper

SEQ ID NO: 349154 - DNA, 695 bp, Homo sapiens; identical to SEQ ID NO: 197277
  chr1:6265789-6266484
  hyper

SEQ ID NO: 349155 - DNA, 64 bp, Homo sapiens; identical to SEQ ID NO: 344936
  chr1:6266713-6266777
  hyper

SEQ ID NO: 349156 - DNA, 227 bp, Homo sapiens; identical to SEQ ID NO: 330672
  chr1:6474528-6474755
  hyper

SEQ ID NO: 349157 - DNA, 219 bp, Homo sapiens; identical to SEQ ID NO: 346310
  chr1:6479997-6480216
  hyper

SEQ ID NO: 349158 - DNA, 53 bp, Homo sapiens; identical to SEQ ID NO: 344938
  chr1:6507073-6507126
  hyper

SEQ ID NO: 349159 - DNA, 108 bp, Homo sapiens; identical to SEQ ID NO: 197284
  chr1:6545271-6545379
  hyper

SEQ ID NO: 349160 - DNA, 246 bp, Homo sapiens; identical to SEQ ID NO: 197285
  chr1:6545639-6545885
  hyper

SEQ ID NO: 349161 - DNA, 222 bp, Homo sapiens
  chr1:6545931-6546153
  hyper
tctgactccctcctcaacaccaatgccgggctcagagggctcctcagaacttgctctttctcctggggagctccttgaatgctggaggcagggggcgctggtgacacccccccccaccttggagactgtggagcccctcccctgggtgactcgatccccgcccagccctgggggtgcccactctgctgtggtccccacctcaccctcagcgccaacacgcac

SEQ ID NO: 349162 - DNA, 344 bp, Homo sapiens; identical to SEQ ID NO: 330677
  chr1:6546495-6546839
  hyper

SEQ ID NO: 349163 - DNA, 199 bp, Homo sapiens
  chr1:7764988-7765187
  hyper
cgcgtgcggtcgagggcggcggccggcgggggcgcgcgcggggcgggggcggggccggggcgtggggacacgcgtgctcgcgggccgggggcgtggtgcgcggccacgcgtgtttctggcgcgagtgtgcggggccaggccgggagggcgtgcgcggaccgggcgtgtttacgcgcggcagggaggggccacgagggtg

SEQ ID NO: 349164 - DNA, 108 bp, Homo sapiens; identical to SEQ ID NO: 330679
  chr1:7843510-7843618
  hyper

SEQ ID NO: 349165 - DNA, 179 bp, Homo sapiens
  chr1:7844224-7844403
  hyper
cgggcgcaccggctcgcgccccgccccagggccaatggaggcctgcggagtcggccccgacgaccaatcgcacggcccgggggcgggaccggtcacgcggcggcagggggcgcggcgccggctgctgaccggcacgcggcgagcctcgagactgcgcgagggcggccccgggggcgagc

SEQ ID NO: 349166 - DNA, 163 bp, Homo sapiens
  chr1:8085929-8086092
  hyper
cgtggagaaggcggcgggcgccggcacttcgcggcgtccccaggcccgggctgcgccgccggggagggtcccgctctccacacctcaatggggagaagcccgcgagcgaccggccggcctctccctccatcccagagactccgcgtcgcggcgaccctccccg

SEQ ID NO: 349167 - DNA, 401 bp, Homo sapiens
  chr1:8086401-8086802
  hyper
cataggccgccgggccgtgaggtcgccgcgtcccgccccgcctcctcccgcagccaatcagggcgcgcgccgcttaaaggggcgatgccgtggccgaggcgttgcgccgggcccaccgtggcgtatcgcggcgctgcagggagccggctttgtctcccggagaggcgtctccgggctgaccgcggccgcagctccgctcctctgcctgagccgtgcggcagccctgggagcctctcaacgccgagctttcctcagaagcccgcggcgacccgggcctcggccgctgttcctgcccgaactgagggcacatcgcgcttcgcgcgggatttcccataaattcaggctccgggcaagattgtgtgttttttcctctccgcgggccgccgctggccgtgtgggcc

SEQ ID NO: 349168 - DNA, 425 bp, Homo sapiens; identical to SEQ ID NO: 344939
  chr1:9711649-9712074
  hyper

SEQ ID NO: 349169 - DNA, 125 bp, Homo sapiens; identical to SEQ ID NO: 330686
  chr1:9747572-9747697
  hyper

SEQ ID NO: 349170 - DNA, 122 bp, Homo sapiens; identical to SEQ ID NO: 330687
  chr1:9749342-9749464
  hyper

SEQ ID NO: 349171 - DNA, 139 bp, Homo sapiens; identical to SEQ ID NO: 277949
  chr1:10854235-10854374
  hyper

SEQ ID NO: 349172 - DNA, 386 bp, Homo sapiens
  chr1:10854661-10855047
  hyper
aagctggggcagaggaacttgtgtggaggaagagggggtcccctgcctccctcagcgctccactagcctcccccaactccggacccgggtcggggatgacttggaagaagaatctgcgcccaccccttagagaaaaatctattattattatcttaatctacgcccccaaagtgtccctccagccgtgattgacggcgcatacacctgttcccttcgcggaggagcttccagcgccggggacagacattcgcccaaacgctccgcagcggcccagcaaccgcccgcccgcccgcgcccggccagcccccgccagcggccccagcgcgcctctgcccgcacctcgccaccccggcggccgccccctccccttccagacccggctgccc

SEQ ID NO: 349173 - DNA, 52 bp, Homo sapiens; identical to SEQ ID NO: 197314
  chr1:11538821-11538873
  hyper

SEQ ID NO: 349174 - DNA, 64 bp, Homo sapiens; identical to SEQ ID NO: 346318
  chr1:12123950-12124014
  hyper

SEQ ID NO: 349175 - DNA, 516 bp, Homo sapiens
  chr1:12226892-12227408
  hyper
cgctggaggtatcggcccagcgatgctggagtggtcgggtcggaggcccagcagcgtctggggaggggcgtgggggaggcgtgtccaaggccggctggccccgccccgccccgccgcctggcctctggcccgctggggcgcgggctttcgctttcagtcgagggctagcgagcgcagcggagcctggagagaaggcgctgggctgcgagggcgcgagggcgcgagggcagggggcaaccggaccccgcccgcacccatggcgcccgtcgccgtctgggccgcgctggccgtcggactggagctctgggctgcggcgcacgccttgcccgcccaggtgggtgactcgcgcggcccacgggggacagccgccccgcatgtccacccggctggtgcgcagccttcgggtgcccgggccgcgctctcccggggcgctgtcacgggctgggaggctgggagtcccagtcgccgccccccatccgcatcagacacgcgcgcctctggggacccgctggggac

SEQ ID NO: 349176 - DNA, 206 bp, Homo sapiens; identical to SEQ ID NO: 197324
  chr1:12227438-12227644
  hyper

SEQ ID NO: 349177 - DNA, 1749 bp, Homo sapiens; identical to SEQ ID NO: 330694
  chr1:12677012-12678761
  hyper

SEQ ID NO: 349178 - DNA, 87 bp, Homo sapiens
  chr1:13910927-13911014
  hyper
gtggctggggtttccttcccatagagcggtgtgttggaggaatacgcacgcctcgggagaagctggcctcgtagaatcaggagggac

SEQ ID NO: 349179 - DNA, 169 bp, Homo sapiens
  chr1:14926204-14926373
  hyper
ttggctcagttgcatctggactttattttcttctcatttgaggtctctcaggcattggaatctatagatgcaacagtagatgctcagctcagcagggagtttaaatttccgcaaatataaacaccgagagcactttccagggggatactgtagacctcaaaggttgagc

SEQ ID NO: 349180 - DNA, 135 bp, Homo sapiens
  chr1:16085153-16085288
  hyper
cgcggggcgggaatcccgcgccccctccccccgagcctcaccttttatggtaaagcggcgcggggcggcggggcggagggagccgagggggcggggagggcggacgggcggaggggacgggaggcccagcggctc

SEQ ID NO: 349181 - DNA, 204 bp, Homo sapiens
  chr1:18434105-18434309
  hyper
cggcttagcggacgagagccgaacagcccagaaaggattaaagaaaagtctgtataatacgcggagagcgcggcgaggggagggcaaggagggcgggggggcggggagagggggagggacggagggagggcgagaggaggggggtgctcgcgccgccgggagaggcgagcgcgaggcagagagcgcgattcggctccaaactcc

SEQ ID NO: 349182 - DNA, 37 bp, Homo sapiens
  chr1:18434816-18434853
  hyper
tctgtggagctggttggctcgatgagggagggaggac

SEQ ID NO: 349183 - DNA, 209 bp, Homo sapiens; identical to SEQ ID NO: 278034
  chr1:19043143-19043352
  hyper

SEQ ID NO: 349184 - DNA, 201 bp, Homo sapiens; identical to SEQ ID NO: 344942
  chr1:20512799-20513000
  hyper

SEQ ID NO: 349185 - DNA, 258 bp, Homo sapiens
  chr1:20810336-20810594
  hyper
cgcggtgaaacagctccatcctccgtccctgccaggggtcccttccctgctttcctctgaaccacccaccaccctctatcctccagcctgcgtcccagctccattctgagaaaaggaaacagagggcgccaacccagccgctcctgctgcagccagggcgcgcactggcccgcgtcctccccgcaccaggcgcactaatttagacagaaatgtctggagctgggataggagagggagccaaagtctttgggtctcggg

SEQ ID NO: 349186 - DNA, 259 bp, Homo sapiens; identical to SEQ ID NO: 197367
  chr1:20810930-20811189
  hyper

SEQ ID NO: 349187 - DNA, 67 bp, Homo sapiens; identical to SEQ ID NO: 197368
  chr1:20811219-20811286
  hyper

SEQ ID NO: 349188 - DNA, 81 bp, Homo sapiens
  chr1:21835652-21835733
  hyper
cggaggcagagagaccgagagtgcggggcgggcgagggacgccagggccgcgtcaccccagcccgttcctagctccgctcc

SEQ ID NO: 349189 - DNA, 150 bp, Homo sapiens; identical to SEQ ID NO: 278069
  chr1:21835765-21835915
  hyper

SEQ ID NO: 349190 - DNA, 385 bp, Homo sapiens
  chr1:24126326-24126711
  hyper
cgtggacttggccaggtgcgcacctccaccctgaacaaactctgcgggtagtacggggaggaagccccagacactgaggcctttcattcccagcgaccgggcccgctgccgccttcctccacgctgcctctatccccttctgggctcacgcagctccaacccacttgaccaagagccctctgcgtgccaggctccgtaccaggcacttttgcatgattttcctgaattcccccagcatctcggtgagacaggtgttatcactggcactttacagatacagatactagggccagagaggtgaaacagttgcccttcggtcccacagctggcgacagcgggctggaatctggatcgccaggctcgcagcccggccctctccccaggc

SEQ ID NO: 349191 - DNA, 490 bp, Homo sapiens; identical to SEQ ID NO: 197394
  chr1:24648342-24648832
  hyper

SEQ ID NO: 349192 - DNA, 795 bp, Homo sapiens; identical to SEQ ID NO: 346322
  chr1:24882115-24882910
  hyper

SEQ ID NO: 349193 - DNA, 320 bp, Homo sapiens
  chr1:25255291-25255611
  hyper
cggcctcagcttccagccacctcgggcagcaccacccccagccgccggcccttcctgccctgcccttttctcacggcagctgtgagaggtttaggggaaaaccgaggcgttttcgtttcatctcgctgcccccttaaaaaaatgaaaatgaaacagtcgcctactccctggcataaagaaaaaggtcctctaaatggctgggggctgccagggttaggggtcccccaatctcaactcgccattcgggacgcataatatccccgagcaaacgtctggagagcagtgccccgatcccggcctagcgccgtccggtaaaattt

SEQ ID NO: 349194 - DNA, 807 bp, Homo sapiens; identical to SEQ ID NO: 330733
  chr1:26662538-26663345
  hyper

SEQ ID NO: 349195 - DNA, 308 bp, Homo sapiens
  chr1:27332673-27332981
  hyper
gcagtgtcaccaggcaggcgtaacggcgggctgcatctgccccaccgaagtgggcctccaggtagcgctctagggtgcgccgctgctccaccaggtctggaaagtcgatgaagaagcgggagcacatgtagcgctgcagggcgcgcacatcggtgctgggccggggccggaagccccgcaccaggaggtggcagtacttgaggaggccaccacctcggatctcctcgggactgcgcgtggcgatgacacggtgccgcaggtgctccagggcctcggtgaagtccccgtacaggctttcgcctgtgacc

SEQ ID NO: 349196 - DNA, 698 bp, Homo sapiens; identical to SEQ ID NO: 330736
  chr1:27901989-27902687
  hyper

SEQ ID NO: 349197 - DNA, 134 bp, Homo sapiens
  chr1:28198925-28199059
  hyper
cggggggcggggcttcggcggggcggggctgcagggctcccgcgggctggcggggcggcttcggcgtgcggggcggggcatcggcggggcggggctgcagggctcccggggaccgcccgcccgcccctcagtct

SEQ ID NO: 349198 - DNA, 738 bp, Homo sapiens; identical to SEQ ID NO: 330739
  chr1:28286184-28286922
  hyper

SEQ ID NO: 349199 - DNA, 148 bp, Homo sapiens; identical to SEQ ID NO: 344946
  chr1:29585852-29586000
  hyper

SEQ ID NO: 349200 - DNA, 81 bp, Homo sapiens; identical to SEQ ID NO: 197427
  chr1:31157913-31157994
  hyper

SEQ ID NO: 349201 - DNA, 226 bp, Homo sapiens
  chr1:31158226-31158452
  hyper
gtcacccacagcccccgacaccgccccctcccccggccctgggcttccagtccctgacagtccctgggacgccgccccacaacgcccgccctctctggaccctaggacggccccgggcacctgcatatgatgtgtggccacgcccccgccacagctaattggaccggggtggacacctgaacccagtcggaccaatcaactcctgggttgccccgagacccggacc

SEQ ID NO: 349202 - DNA, 261 bp, Homo sapiens; identical to SEQ ID NO: 197432
  chr1:32180427-32180688
  hyper

SEQ ID NO: 349203 - DNA, 129 bp, Homo sapiens; identical to SEQ ID NO: 278204
  chr1:32410105-32410234
  hyper

SEQ ID NO: 349204 - DNA, 299 bp, Homo sapiens; identical to SEQ ID NO: 278215
  chr1:32930159-32930458
  hyper

SEQ ID NO: 349205 - DNA, 61 bp, Homo sapiens; identical to SEQ ID NO: 197440
  chr1:32930558-32930619
  hyper

SEQ ID NO: 349206 - DNA, 178 bp, Homo sapiens; identical to SEQ ID NO: 344949
  chr1:33219389-33219567
  hyper

SEQ ID NO: 349207 - DNA, 307 bp, Homo sapiens; identical to SEQ ID NO: 344950
  chr1:33219596-33219903
  hyper

SEQ ID NO: 349208 - DNA, 33 bp, Homo sapiens
  chr1:33438467-33438500
  hyper
cgtgcgtttcacactgcggaacgagcacggctc

SEQ ID NO: 349209 - DNA, 57 bp, Homo sapiens
  chr1:33438921-33438978
  hyper
gcagtcctcccagccgttcccaccgcctttgccactcatccggcggcagccgtcctc

SEQ ID NO: 349210 - DNA, 91 bp, Homo sapiens
  chr1:33772615-33772706
  hyper
gaacaccgccgcgtggttatagaagtcgccctggccccacgccatcgcggcggccgaatgcgcgtcgcgttcgaagggcagcagccacgac

SEQ ID NO: 349211 - DNA, 393 bp, Homo sapiens; identical to SEQ ID NO: 330757
  chr1:33937934-33938327
  hyper

SEQ ID NO: 349212 - DNA, 224 bp, Homo sapiens; identical to SEQ ID NO: 197453
  chr1:34629913-34630137
  hyper

SEQ ID NO: 349213 - DNA, 252 bp, Homo sapiens; identical to SEQ ID NO: 278242
  chr1:35394790-35395042
  hyper

SEQ ID NO: 349214 - DNA, 113 bp, Homo sapiens; identical to SEQ ID NO: 346333
  chr1:35396131-35396244
  hyper

SEQ ID NO: 349215 - DNA, 209 bp, Homo sapiens
  chr1:36916114-36916323
  hyper
ggaggtgccctgaagacgggagctaattggtctgggtggtggaccgtcccggggggattggtccgagccagaggccggcgcggcgttgggcgcggctggggagctgtgcttctgagagtaggtttccctcgaaagggcgagggccgggccagggctgggggtggtctcgacacagccagcccggcgcttgggaccccggccgctggcgc

SEQ ID NO: 349216 - DNA, 47 bp, Homo sapiens
  chr1:38230859-38230906
  hyper
atgggaaccaatcactaggcaccgccgcgggatgccaaccaatcccc

SEQ ID NO: 349217 - DNA, 423 bp, Homo sapiens
  chr1:38512641-38513064
  hyper
cgtcgctcccggggtcccgcgcgccggccgtgctgattggccgctggggcttcattcacggcccccctaccgtccgcgtacacactcacgccccgggggcgcggccgccacgtggggagtggcgcgggggtggccctgggaccgcaccccctctcgtcctggctgtgtgggccccgctttcccccagcgctggagactccgagcccggccggtcccacattccacgcgagctgaattcccgcccgcatcccgcccgggcagcagggattgccggctccgggaggcgctcgggctccgagaagcggctcagccccgcgcccctccctcctcagtaccgctgccggcggaccaggattcccgcgggtcctggcggctgcgagcgcgaggcggcgcggattcgcggctcggttccggcgcgactgc

SEQ ID NO: 349218 - DNA, 90 bp, Homo sapiens; identical to SEQ ID NO: 278275
  chr1:38513154-38513244
  hyper

SEQ ID NO: 349219 - DNA, 696 bp, Homo sapiens
  chr1:39956640-39957336
  hyper
cggagcctcctccgcaaagctggatcagtaccggggacgcagggcgcacagctagggctggcgggggcggcccgactggggcgctgcctgggctcacgcgggagccaggtgggggacgcagggagaagcagccgagcaggtgccgagaaggaggcgcccgcagaagcgcatgcaggggccacggggaaggcgccaggaggcggtgaggggccgcggtggccggaacccgggccggctgctgcgggcagaggaacaggccccacccgcggggcttggctggcaccgcccggctctccagacggggctacggccgcgtgtcgggcccggtggcgaccacggcacaccacggcgaggcagccgggtggcaccactggcgggaccgggacggcgccgcggccttaggatctctgcgccgaggcccgcggcgggagccacgacggccctgaccacgctgacgcccaggctgcgggctcctcgcccggaccaaccgccagccacgccgaggtcgcacctcggggtcgccccacccgcaacacctgccgccgcccggggctcctagcgggcgcggcctccgcgcccaggccccgcccccgcgcccccattggtcagtcccgggggtgggcgggcggcacagacggctgagccggggcaaggactcgcgggaatcgcgccgcccgggtcgctgccggagctcgc

SEQ ID NO: 349220 - DNA, 101 bp, Homo sapiens; identical to SEQ ID NO: 346335
  chr1:40781107-40781208
  hyper

SEQ ID NO: 349221 - DNA, 351 bp, Homo sapiens
  chr1:40782323-40782674
  hyper
cgcgcgcccgcagcccccggcggccctcggaagggagacgtgggtaggcgggcagggccgagaggccgcctcggggcgacagcggcgtctggttggagccggcgccccctgggaggcggcgggggcggaggctgcgcagcgggtgaatgagcaccattgtatgccccgccacctgggctccccgggctgccaggaccgggcgccagctcctgccccacgctgcctgtcccgggccgggccgcgcgtctggggacgggtcccgtttgactctccggctcagccacctccattcacggtgccgcgatgggcaccatgtatgcacccaccgaggggacctgcccgcggcgctgt

SEQ ID NO: 349222 - DNA, 52 bp, Homo sapiens
  chr1:40782908-40782960
  hyper
gcacgcaccgacggcagagtctcccggcgctcctccagcgctggctgttcgc

SEQ ID NO: 349223 - DNA, 237 bp, Homo sapiens
  chr1:41268046-41268283
  hyper
atttggaaacggaaaaagtagccggccgggcgggggaggccgcggggaggtaatcggagccgcagcaccgccccggcccctcccgctctcggggcctggcattggcaaagccccgcccctcccagggacgcaagagccccgcccaccattccccgcccccggcatgccccgcccatttccgtaagccccgccctcgccgaggcgggctgggggcacctgggagtgccgagcagtggc

SEQ ID NO: 349224 - DNA, 462 bp, Homo sapiens; identical to SEQ ID NO: 330784
  chr1:41832027-41832489
  hyper

SEQ ID NO: 349225 - DNA, 913 bp, Homo sapiens
  chr1:43389625-43390538
  hyper
cggtacagcgtggagagcgctttgatggaggaaatacaagccgatgtagtgttcccgggaaaacctgatccagaaggcttccagggagaggagattttgcgcctaagatttcaaatgaaagatctcataacactgtcagtgaaacaactaagcactgctgggaaaagatggtggcctggagaacagtcccgttatctatttaccccttttcgtcagaaaccgtagacgtcaccttacgcgggataggaacccgggtgagctacgtccccagggatgcccagcgatacacaagtcaccgtcaccccctccagagtaaaccgcatcgcctggcaagcaggcgcccaggtcgtccccaagggccagcgcctggaaccgccagggtgtgattggtggagtcttggagcccgcccctcgtcgggcccaacaatgcgcctctgattggtggagaaaccacctggccccgcccatccccaatcgtgtccgtgcgccgccggtggcccggcttaggggaccgctgtgaggtctggagaggatgcgccatcgaccccggcagtaggcggccgaaccttggccccaaatcttctaccccggggtggattgcggcccctagaggaaaggcgtcaggggaccgaccggcagctgtgccgtcgcggcactctggaccacgctgagggcgggccggcttccctgcgcctgcgctgacattttgcagtttgggaaatggcggtgctcggggacgtcgatactgacccagggcgggaggcagctgcgagtggattgtcgggccttttcagaccggggtctgaacctctgggccggggcggggctcgggtgctgcctggctctgccaacgttctgggccctcgagtgtgaatgagctccgcccgccatccgccttgtagtcctcgcgtcc

SEQ ID NO: 349226 - DNA, 87 bp, Homo sapiens; identical to SEQ ID NO: 401
  chr1:45097717-45097804
  hyper

SEQ ID NO: 349227 - DNA, 114 bp, Homo sapiens; identical to SEQ ID NO: 403
  chr1:45098213-45098327
  hyper

SEQ ID NO: 349228 - DNA, 784 bp, Homo sapiens; identical to SEQ ID NO: 330796
  chr1:45285419-45286203
  hyper

SEQ ID NO: 349229 - DNA, 1865 bp, Homo sapiens; identical to SEQ ID NO: 330798
  chr1:46767970-46769835
  hyper

SEQ ID NO: 349230 - DNA, 188 bp, Homo sapiens
  chr1:46954676-46954864
  hyper
cgagcctctgcctgattgagagccggccccagaacgtcctcttcctatgagccggttcccgcctggagggagcagagcgctggtaagagcaggaccatctcaggcccaggattttcccgaagtggaccggtcgccgagtgtgtttgttcccccagtcccggcgacaggtgcctgtgctgtgtgtgaag

SEQ ID NO: 349231 - DNA, 392 bp, Homo sapiens
  chr1:46954904-46955296
  hyper
catccaggtgctagacaggtgagcggctgctaggagcgcaaaccagcgcacccgcggggtgtgtgggcggcgagttcagagtactggctgtggcgctgcatggtggcgcgggggtggcagtgttgttgcaggtggtgtggaactgatgggaagaggtatgtgtgcgcgcgtgtgtgtgcgcacaaccttgaagggacagtggggacgggagtccgtcggggctcccccaggtcacctctacggactccagctgccaagcgtcggggtgggaccggcgagggggaggtttctcaagacctttcaacaccccagggatcggcctgcggcttccgcggacccaagagaggcagagatccctggaccgggagccagagctcgaggagcagagattc

SEQ ID NO: 349232 - DNA, 255 bp, Homo sapiens; identical to SEQ ID NO: 346339
  chr1:46957171-46957426
  hyper

SEQ ID NO: 349233 - DNA, 159 bp, Homo sapiens
  chr1:48190715-48190874
  hyper
cggttcccctgggccaagccgagtcctccccagcacaacagcgcggcccctcggcctccgcttaacctgggcgcgcgggctggctgggccggggccattatgcgggcgcatggccggccgcgccggggcgcagagcaaacttaaccttcatttgggagc

SEQ ID NO: 349234 - DNA, 48 bp, Homo sapiens
  chr1:48191178-48191226
  hyper
gtctcccaggacccgacctggagtctcaggcctccttcctgtctcggc

SEQ ID NO: 349235 - DNA, 108 bp, Homo sapiens
  chr1:49242191-49242299
  hyper
cggtcccctccgcccgggcccccggcccctcccggggtcccagcccccgcccgggtcccaccgtccctccccgcccgcttgctcacctgccagcgccaggatctgggc

SEQ ID NO: 349236 - DNA, 107 bp, Homo sapiens
  chr1:49243013-49243120
  hyper
ggcaatcttgattgaatctcaaagtgtaaacttggaagccagcagaagtttggagtgttttaaatgtagccaccctacccgcgcccccagccccgcaccctccccgc

SEQ ID NO: 349237 - DNA, 114 bp, Homo sapiens; identical to SEQ ID NO: 344955
  chr1:50893877-50893991
  hyper

SEQ ID NO: 349238 - DNA, 189 bp, Homo sapiens; identical to SEQ ID NO: 330827
  chr1:52081941-52082130
  hyper

SEQ ID NO: 349239 - DNA, 31 bp, Homo sapiens; identical to SEQ ID NO: 344956
  chr1:52194847-52194878
  hyper

SEQ ID NO: 349240 - DNA, 322 bp, Homo sapiens; identical to SEQ ID NO: 197534
  chr1:52194968-52195290
  hyper

SEQ ID NO: 349241 - DNA, 778 bp, Homo sapiens; identical to SEQ ID NO: 344958
  chr1:52195348-52196126
  hyper

SEQ ID NO: 349242 - DNA, 949 bp, Homo sapiens
  chr1:53017742-53018691
  hyper
cggtatctaagatctcacgcaaaattcatctaagacttcgaaatcttctgaaaagaaaatgtgtaatcaacgttgttaatacaacagtaattcatcccattcaagtacgactagaaatcccgctgatgtgcttctttcaggtctaaacatctcattctttcgcaatccagataccaacaggagtctgaaacccttcgcagaggcgtgcaacacactaggagagcgctatctgtttacaaatacgaatctcagttacccacgtcaaaaccgcgcattaccacctttcgactggggggcgggggagagagaaggcgggcgagcaagaaacaaaatccacacagacacctctgccttctccctacaaggacgagcccggggaaacattcagtatgtattatatgcgtgtatacatttatatacattatgtagtcacctatgtctaagcaagggtgaaagaaaaaggtacacatgacagggaatcgtaactggacccaacagaaatgttcaaaccaatcccgttaactcaaaatccgccccgctggtctacaacaggtttcggtccgggaccgggagccccagccacagtgtggagttcgtccccaaagcgccccaatgccctcctcaggccgcccaggccgccgtccccacctcccttatctcagccttcccctgggacacccgaagcccgttccaggaaagaaagaagtgtcaggcccccagggggcggctgagacgctctcaggccaggcccccgacacctgcgaagcgcggcacctggggagggcgaaccgggggccgcccggccttcccgagcacaccccctcggtacccgacgctgccccgcggccggaacctcgtacctgcgaggcccgcgagctacaggcgcgcgcgacgcctcctcatctcagtggctcctgctctccctccgcctcctgctgccgccgccgtc

SEQ ID NO: 349243 - DNA, 136 bp, Homo sapiens
  chr1:53168691-53168827
  hyper
cgttggtaaaggagccgccccgtgagagagaccggaccaatcacgtttgctgtgaggtcactttggaggcctgagattggtgctcgtgtctaaacggacccgatctttctgagtggctggtgcagctgagggaggt

SEQ ID NO: 349244 - DNA, 605 bp, Homo sapiens
  chr1:54204704-54205309
  hyper
gccgggacgccagcctcggatctcgggccccgcacacgcccctccctcggccgcgggccgcgccccctctcacctcgcagcggcagctgcagatcgctgggcgcccggctcggcgcgcctccactggcgcagcagcccccgcagccgccgcagccgccgccgccgccgccgcgtcctgcggggcggttccccgggggacgggggcgggcccgcgtctgcccaacagccgctccagccactggctggccgcggccgcccggctcaggccaatcgcggcgcgagggcggggcatccccccctgggggtctgggcggggcccgacgcggggctgagcagagggtttgacaggcggcggccggctggatccccgcgctgcccgctgttctcagacggccgagccgggcaggacggcggggcggcgccgcggcgagagaggctgggctcgggggtcggcggagtgcgctgggcgtgaggagtgccgggctgaacccggctccctgcccgcctctccactagccccgggcaggatcctcccttctcccggtcggttttcccctccgtcagatgggaacgacgctgtctgctaacgcgaagcggacagatgc

SEQ ID NO: 349245 - DNA, 354 bp, Homo sapiens; identical to SEQ ID NO: 197546
  chr1:55505162-55505516
  hyper

SEQ ID NO: 349246 - DNA, 50 bp, Homo sapiens; identical to SEQ ID NO: 278445
  chr1:55505559-55505609
  hyper

SEQ ID NO: 349247 - DNA, 145 bp, Homo sapiens
  chr1:59042557-59042702
  hyper
gcaccagcgtgcgggcgttcttgggggcgctcatgcgcgccttgagcagcagacacttggaggtcagcgtggagcagtcgaccgccatgcccgagcccagcgcgcggcactggcagcggccgccggggccgtcggggctgcacac

SEQ ID NO: 349248 - DNA, 435 bp, Homo sapiens; identical to SEQ ID NO: 346344
  chr1:59281487-59281922
  hyper

SEQ ID NO: 349249 - DNA, 63 bp, Homo sapiens
  chr1:59612305-59612368
  hyper
cggagaaacttcagagcggcaggtgccttcgtttcccgttacctgctgagtctagtcccttcc

SEQ ID NO: 349250 - DNA, 216 bp, Homo sapiens
  chr1:60539399-60539615
  hyper
cgcggtccgtgcttctccccaggaagctgacactctcagacccggggacgggacggggcgtggggaccgagcccaggaatccggccaatcacagggcccgcatcgcgggcggcgcctgttccgccctggtcgctaaggacgctgaaggctgtttctgggcggggaccaggtttttctccactgcctaggcaatggacccaggctctggctgccaac

SEQ ID NO: 349251 - DNA, 266 bp, Homo sapiens; identical to SEQ ID NO: 197569
  chr1:63793072-63793338
  hyper

SEQ ID NO: 349252 - DNA, 293 bp, Homo sapiens; identical to SEQ ID NO: 330855
  chr1:65431047-65431340
  hyper

SEQ ID NO: 349253 - DNA, 40 bp, Homo sapiens
  chr1:65468262-65468302
  hyper
cgctcagtaacgcagcgctgaggagtaggccaccccggag

SEQ ID NO: 349254 - DNA, 155 bp, Homo sapiens; identical to SEQ ID NO: 197574
  chr1:65468660-65468815
  hyper

SEQ ID NO: 349255 - DNA, 180 bp, Homo sapiens; identical to SEQ ID NO: 278491
  chr1:65468816-65468996
  hyper

SEQ ID NO: 349256 - DNA, 393 bp, Homo sapiens; identical to SEQ ID NO: 278499
  chr1:65774903-65775296
  hyper

SEQ ID NO: 349257 - DNA, 446 bp, Homo sapiens
  chr1:65775326-65775772
  hyper
ttaatttttttttttttttaattccttcttcagccctttccaccttccatctcccttttcgcttcccaggttgattattttctcttttctccgggcttgcccatgagcctcctcgggagctaccggaaaaagaccagcaacgatggttatgaatctttgcagctggtggacagtaacggggacttaagtgcgggaagcggcggggttggcggcaagcagagagtgaacgccggggcagcggcgcggagtcccgcccgacagcctccggaccgcgccagcaccatggacagctcaggtagcgctgcccgaggggagtgcagcgctgagccccgcgcggcctccggagcctcccagtcgcccggcccgaggcccccccgtggtcccccagccccggtttgcgagagagccgggctggaggcgaaggcttctaataccacctgggtgtc

SEQ ID NO: 349258 - DNA, 60 bp, Homo sapiens; identical to SEQ ID NO: 197583
  chr1:66999412-66999472
  hyper

SEQ ID NO: 349259 - DNA, 36 bp, Homo sapiens
  chr1:66999673-66999709
  hyper
ggaatggggacgggaaataggttctgtgtgctctcc

SEQ ID NO: 349260 - DNA, 47 bp, Homo sapiens
  chr1:67773780-67773827
  hyper
tatatatatatgtatatatatatttttaaagtcttccaatacgatcc

SEQ ID NO: 349261 - DNA, 132 bp, Homo sapiens
  chr1:70032839-70032971
  hyper
cgcaaccccagaatgaggagaggacttaagagcaggcacaaggttcgctgccatgactgatgtgaagcgacctgacgcacaagcggagacttttctccttggcagccaacaacctgcagcaggcaaggcggg

SEQ ID NO: 349262 - DNA, 231 bp, Homo sapiens; identical to SEQ ID NO: 197592
  chr1:70033272-70033503
  hyper

SEQ ID NO: 349263 - DNA, 100 bp, Homo sapiens
  chr1:72750578-72750678
  hyper
ggaaataattgtgaaatgacagactctcactaatatcgatgccaaatacctaagtaacactgtcatcttgttaactgcatttttctatcttgcgtggcac

SEQ ID NO: 349264 - DNA, 47 bp, Homo sapiens
  chr1:75603159-75603206
  hyper
aatgtgtgacacatcctggtctggacgcgccggatgtgtgtggatgc

SEQ ID NO: 349265 - DNA, 126 bp, Homo sapiens
  chr1:76080152-76080278
  hyper
cgctttccagtaagtgctttgagtactccggagcaattaaaaagcaagctgacgcgccaagataaagttgtgtccccctagtgacctctagagcggagctaagctcccacaagccagacttgggag

SEQ ID NO: 349266 - DNA, 184 bp, Homo sapiens; identical to SEQ ID NO: 197604
  chr1:77333579-77333763
  hyper

SEQ ID NO: 349267 - DNA, 223 bp, Homo sapiens
  chr1:78956569-78956792
  hyper
cgagcacggtgccctcttctctcccagtactgctctgtgcccatggaaaagggggcggaggcgagagagaagaggaagaggcggaggtcactcgcgcgccccatccctcccaggctgccagcgcagctaggtgcagagggatcccaggagccgcgcgcgccccgcagtttccgcgctaagggaacgagtgcgcggaggggacgagcggctggaccacagccgg

SEQ ID NO: 349268 - DNA, 49 bp, Homo sapiens
  chr1:84326267-84326316
  hyper
cggccactcgccgtctcagcgccccctcgcggcccttctctacccacct

SEQ ID NO: 349269 - DNA, 385 bp, Homo sapiens
  chr1:84326357-84326742
  hyper
cgtcccagatcccgccagggcccactcgggctccagccgctgcctgggacagccaaaggccggcccgggcggttcttccccaggtggtccggggcgtcccgggccgcactggcctggcccatgggccccgaagaaggcgctcacccaaggaccactgtccgagcggcttcccccggcccggcctggtgccgcgtccccaccagcccggggtggcaggttctactcgggaagcctgttttatgtcttctttcacgcccatatcacaccgacaagggtgaagctgtggaacttatacctcggctgggccccgccgccaactcctagggcacgggaactgcgcacaggccggggttccgcgaggggcggagcttcccgctctgccctc

SEQ ID NO: 349270 - DNA, 228 bp, Homo sapiens
  chr1:84543146-84543374
  hyper
cgaggacaacgtggtgggctgagcgaatacctcaatgtgcgagagaacgaaaagctcgaaccacgaccgtgcctagggaccaggcttttcctgtggccgatgcggggcagatgcagacccagaggccacccttgcgcgcgatctccaacccgacggtgcggctcctctcggacctggagctgtggggagaaggcagccttttagtgaggagccgccgcgtggcgggac

SEQ ID NO: 349271 - DNA, 659 bp, Homo sapiens
  chr1:84543409-84544068
  hyper
cgcgactgcactccagggcaccgggaccgccagggtgaggagggactctgcgttctgcaaagctagcggttcccactccacctcccactatctcagcgatgggcacgcgagcgccagcccgggcgaccgcgggggaagaagcggtccacgccacctcaggcccccgccccaggctctgccagctgggggtccaccgcccgcccccggggtcccgggcctgcgcgtcacttccggcgcgcgcgcccgcctgcgaagatacagtcgggccagggcctggcctgggcgcgcggctgcccgggggcgcgcagagagggcggaccgcgcgaagggggagtgtctgcccgccgccgccactgctgctgccaccgccgtcgccgccgccgccgccgccgccgctgctgctgccggtgctaaggagttcgctggagccctttcctcagacccggcccggtcttcgcgcccggactcctggcgccagcgctaggcgcactcaccgctctgacgggtgcagacgcgggagttgtcccagactgtggagtggcgggcacggccccagccccccttcccttccctgaccccttcttgccatcgccccagacatggggaacgcggcgaccgccaagaaaggcagcgaggtggagagcggtgagttgaaggcc

SEQ ID NO: 349272 - DNA, 535 bp, Homo sapiens; identical to SEQ ID NO: 344959
  chr1:85462747-85463282
  hyper

SEQ ID NO: 349273 - DNA, 77 bp, Homo sapiens; identical to SEQ ID NO: 346346
  chr1:85773944-85774021
  hyper

SEQ ID NO: 349274 - DNA, 112 bp, Homo sapiens; identical to SEQ ID NO: 346347
  chr1:85774083-85774195
  hyper

SEQ ID NO: 349275 - DNA, 437 bp, Homo sapiens; identical to SEQ ID NO: 344960
  chr1:90308855-90309292
  hyper

SEQ ID NO: 349276 - DNA, 115 bp, Homo sapiens; identical to SEQ ID NO: 344961
  chr1:90309490-90309605
  hyper

SEQ ID NO: 349277 - DNA, 60 bp, Homo sapiens; identical to SEQ ID NO: 278617
  chr1:91185065-91185125
  hyper

SEQ ID NO: 349278 - DNA, 284 bp, Homo sapiens
  chr1:92495420-92495704
  hyper
cggcctggcccgccgcaccccgcaggcccggctctcccctgcgcgctccgggctgggcgcggcgcgtgtgcggagccgccgcggtgacacggaacgccggccgccccgggccgggggaggcgcgcgtcgagaggcgacggcgggctggcctggcgcgctgcggcgctcgctcacccgctcccgaggaagggcagtgggccccgccgccgcctcccaatggcgaggctgcgggattgcctgccccgcctgatgctcacgctccggtccctgctcttctggtccct

SEQ ID NO: 349279 - DNA, 64 bp, Homo sapiens
  chr1:92495832-92495896
  hyper
cctccttgggcacccactgctacgtgcggatcaaggtgaagggccgcgcgggcctggcgggagc

SEQ ID NO: 349280 - DNA, 170 bp, Homo sapiens; identical to SEQ ID NO: 346351
  chr1:92948154-92948324
  hyper

SEQ ID NO: 349281 - DNA, 225 bp, Homo sapiens; identical to SEQ ID NO: 197641
  chr1:92949466-92949691
  hyper

SEQ ID NO: 349282 - DNA, 227 bp, Homo sapiens; identical to SEQ ID NO: 197642
  chr1:92950207-92950434
  hyper

SEQ ID NO: 349283 - DNA, 119 bp, Homo sapiens; identical to SEQ ID NO: 330906
  chr1:94374262-94374381
  hyper

SEQ ID NO: 349284 - DNA, 501 bp, Homo sapiens; identical to SEQ ID NO: 346354
  chr1:94702434-94702935
  hyper

SEQ ID NO: 349285 - DNA, 88 bp, Homo sapiens; identical to SEQ ID NO: 197650
  chr1:94702990-94703078
  hyper

SEQ ID NO: 349286 - DNA, 95 bp, Homo sapiens; identical to SEQ ID NO: 346356
  chr1:94703103-94703198
  hyper

SEQ ID NO: 349287 - DNA, 283 bp, Homo sapiens
  chr1:94713022-94713305
  hyper
cggaccctggacggcaactagccggcgcccgcgcgggcgaccccagcccggagccaccaccgccgcggccgaagcgagcgccacctcctcacactcaccacggcgctccatcccgcgtcccggacgcggacggccgccccacacctacggccgccgccaccgccgagggctggagctcgccgcccccatcccccacggcccgcagacgcccggccaagtggcagccgcagccacagacaccaccaccaccaccaccacagcggccgccgcctttgcagctacc

SEQ ID NO: 349288 - DNA, 148 bp, Homo sapiens
  chr1:95428574-95428722
  hyper
actgaactgcagcaaacccaggggatccaaggctacgttgaaaagcctttgaccacagtgcagggagcagaagacattaatgacgtgatgtcgacacagcccgcactcaggatcctccaggaaaagaacacagagataaccccggatc

SEQ ID NO: 349289 - DNA, 759 bp, Homo sapiens
  chr1:99126872-99127631
  hyper
cgggtgccttccagcctcgctgtggatcccgcgaagtggacggttcgcttcgtggcttcttcccagaccccgccactgcggaaaccgtcactcggtggcccccgactgggtcaatgcgaggacgcccacctcctacctttgagtctctcctcttctccagggtacagccaaccctttctccaacgtagccggagtccgagagtcccagttccgcccctccagcccgccccaggccaggtggggatgcgcccggcccgggccagcgctggtcccggcagttccgcgtctgcgcagcgggcgaggggctggagcggggccggccggggaggtgcaggagacgtgggagccaatgggcacgctcgggggagccgggctggcggcggcggtggcggccggctgggcgcgcactctcgggatggagggcgagcgccgggcatcgcaggcgccctcctcgggcctcccggccgggggcgccaacggggagagcccggggggcggcgccccctttccgggcagcagtggctcttccgccctgctgcaggcggaggtgctggatctggacgaggacgaggacgacctggaggtgttcagcaaggtgagggcggcggcggcgagtcccgggaaacttccaaggcaactccgggcgttgccagcattgcgccgacggctgcctctggcgcgcttgccctcccggggcggtggctctgagctggggacgagtgaggtcccccgggctgctggaccccgcctgccagctct

SEQ ID NO: 349290 - DNA, 325 bp, Homo sapiens; identical to SEQ ID NO: 344965
  chr1:99127671-99127996
  hyper

SEQ ID NO: 349291 - DNA, 288 bp, Homo sapiens; identical to SEQ ID NO: 278688
  chr1:101702081-101702369
  hyper

SEQ ID NO: 349292 - DNA, 392 bp, Homo sapiens; identical to SEQ ID NO: 278689
  chr1:101702796-101703188
  hyper

SEQ ID NO: 349293 - DNA, 244 bp, Homo sapiens; identical to SEQ ID NO: 346359
  chr1:103574168-103574412
  hyper

SEQ ID NO: 349294 - DNA, 49 bp, Homo sapiens
  chr1:107684495-107684544
  hyper
tttggggaaaagcaaacaaaaaaaacaaaaaaacacttgccctattgcc

SEQ ID NO: 349295 - DNA, 305 bp, Homo sapiens
  chr1:108506290-108506595
  hyper
cgtcatagaggattagtgctgaaatgtgtcagggagagggctctgtcctctcccttttaagttgaaagcagtttggttttttgttttgttttaacattctgaaagagaaagaggctctgaaccgagtttaacatccttctgtacaaaaattttccgacaggacaaataaactactcttccactgaactgtgacttttgagctgactctagggtgcacccaaccttccagaggtgtctggcttaaccctcaaagaggcagctccagccccaggagccgaccggcaccacagcacctgagcagggca

SEQ ID NO: 349296 - DNA, 113 bp, Homo sapiens
  chr1:109204221-109204334
  hyper
tcagcctccgctttcatcccagagcagtccacgggggccttaaaggaatgtaggctgggtgaagttggcccagtgacacctgcgttcagaaaaacgttctttccgctcccaac

SEQ ID NO: 349297 - DNA, 119 bp, Homo sapiens; identical to SEQ ID NO: 278710
  chr1:109656101-109656220
  hyper

SEQ ID NO: 349298 - DNA, 203 bp, Homo sapiens; identical to SEQ ID NO: 197688
  chr1:109656291-109656494
  hyper

SEQ ID NO: 349299 - DNA, 116 bp, Homo sapiens; identical to SEQ ID NO: 344968
  chr1:109657070-109657186
  hyper

SEQ ID NO: 349300 - DNA, 143 bp, Homo sapiens
  chr1:110186004-110186147
  hyper
cgtgccccttgcaggtgggtagcgctgagagcagagcagcgcccgcgggactggcctgaggatcccgcaggcaggagggaccccgcgggcctttccctacctgggaggtgcacggttggccaccagggcgcgctgctggactc

SEQ ID NO: 349301 - DNA, 35 bp, Homo sapiens
  chr1:110186177-110186212
  hyper
cagagtcacttaaacttgtaaccctaccggtagcc

SEQ ID NO: 349302 - DNA, 65 bp, Homo sapiens; identical to SEQ ID NO: 344969
  chr1:110672768-110672833
  hyper

SEQ ID NO: 349303 - DNA, 364 bp, Homo sapiens
  chr1:110753530-110753894
  hyper
cgccgccgccgcctcgtgttgaccgcaagcagcccgggcccacggagctccggctgccgtgagagtgtcggcctggccccggcagccgctcggaggacttgttgctgctgcgctgccgccgctgcggggaagccggctattccggggcttggtgcggtcttggagccggagggtggcccgtgtgagcgcgagcgccccggaccttcgcggtgcgcgtggactgtgcgcttcctcgtctttggtcggggtgaaggcgggggcgtgtccccggcccagagcgtttgtgtgtcccgtcgtagcgggggaccgcgtgtgtgcttgcttctacttccccgggtcctccctctctgcgcctccctctctc

SEQ ID NO: 349304 - DNA, 46 bp, Homo sapiens; identical to SEQ ID NO: 197698
  chr1:110753957-110754003
  hyper

SEQ ID NO: 349305 - DNA, 360 bp, Homo sapiens; identical to SEQ ID NO: 344970
  chr1:111506646-111507006
  hyper

SEQ ID NO: 349306 - DNA, 736 bp, Homo sapiens; identical to SEQ ID NO: 344971
  chr1:111746588-111747324
  hyper

SEQ ID NO: 349307 - DNA, 818 bp, Homo sapiens; identical to SEQ ID NO: 330937
  chr1:113498720-113499538
  hyper

SEQ ID NO: 349308 - DNA, 699 bp, Homo sapiens
  chr1:113932580-113933279
  hyper
cggaacctcggccggctcaggactccgcacgttgtcttccaatctaagcacaccggcccctctctgcgccccgcacaggctcagaggctccgcccgcgtctccgcctaactcgccggccacgcccccacttcggggagctcggtccctctcggattcgagttttcctcggctccagccgccgcgcagagggcctctcccggccctgcgacctacagccccttccactcccctgcccctcctctgcgccctccctcactctccaaacttcttttttccaccctctctaaacttcagtcattctagtgcccgcctcctccactcgcaccgaccaaccagtggtccccattctcgttggcggtccgcctcctgcccgccgggggccaatccctggcgcgagagtccagggccggggctcgttcccaagcgcccagcctgtgacggcagcgcgccgggcgccgcgcggcgggagggggcggggctctggatgagggatgggcgagggccgggggaagggaaaagggaggaggaggaggttgcggctggtttgaaagcggcagtttcctggcagcttgggcaggcgttggtctccgcgctacagctccgcagcggccacgatcgatcccgcgacgggtctacgcgcgcttctgcgcgccccccacggatttttcccgttcccggctcttcccccttcacctccc

SEQ ID NO: 349309 - DNA, 264 bp, Homo sapiens
  chr1:113933305-113933569
  hyper
cgctcgggcgctgagcccagggaccagccggcggcagtgaccccgcccgaagccccttctggaacctcctggggacaattcccttttcctttcttcagcctaacccgcggtggccctcgcggagtccggtcagccccggggagcgcagccgggaggggcgtccaaggggcgtctcgcgtctgggaacggccgggcccccagcgggctgtggtcgcggggtgggggccggagcggcgaggccccccttaccgggctgcgcgggcc

SEQ ID NO: 349310 - DNA, 612 bp, Homo sapiens; identical to SEQ ID NO: 330940
  chr1:115212647-115213259
  hyper

SEQ ID NO: 349311 - DNA, 35 bp, Homo sapiens
  chr1:115632692-115632727
  hyper
cgccctgagtcctgtgggctgccctcaacccagcc

SEQ ID NO: 349312 - DNA, 1132 bp, Homo sapiens; identical to SEQ ID NO: 330944
  chr1:116184428-116185560
  hyper

SEQ ID NO: 349313 - DNA, 47 bp, Homo sapiens
  chr1:116711292-116711339
  hyper
ggcggcattggtttcactatttccttcctggagctgtggttgaggcc

SEQ ID NO: 349314 - DNA, 200 bp, Homo sapiens
  chr1:117452644-117452844
  hyper
cggagccaggggcgcacgtacgccccagcgctgggatttatcggctcgcgaggagagcggagcaggcgcgcggcccaggcggaggagcgccgactctggagcagccggagctggaagaggaggaggaggagaggcggcggggaaggaggaggagggggagagtcgctcccgccgggcgagcatggggcgcctggcctcga

SEQ ID NO: 349315 - DNA, 219 bp, Homo sapiens
  chr1:117453203-117453422
  hyper
tcaccttgaactcccggcccggaaggtgctgcggtcccggcccgggtcctcggctcgagagcggaaatgtgagcctttgatatgccccgccatagccgccgccggccgggtcgctcttcacccaacccgcgcggagttgcctttccagggaagcgagagaatcctccaacttccttccacgaaggtcacagggtggcccggagcgttacaatggaaatc

SEQ ID NO: 349316 - DNA, 84 bp, Homo sapiens; identical to SEQ ID NO: 330956
  chr1:150586185-150586269
  hyper

SEQ ID NO: 349317 - DNA, 430 bp, Homo sapiens; identical to SEQ ID NO: 330957
  chr1:150669495-150669925
  hyper

SEQ ID NO: 349318 - DNA, 154 bp, Homo sapiens; identical to SEQ ID NO: 330960
  chr1:151566699-151566853
  hyper

SEQ ID NO: 349319 - DNA, 79 bp, Homo sapiens; identical to SEQ ID NO: 197752
  chr1:151694406-151694485
  hyper

SEQ ID NO: 349320 - DNA, 137 bp, Homo sapiens; identical to SEQ ID NO: 278839
  chr1:151801436-151801573
  hyper

SEQ ID NO: 349321 - DNA, 321 bp, Homo sapiens; identical to SEQ ID NO: 278843
  chr1:152080641-152080962
  hyper

SEQ ID NO: 349322 - DNA, 447 bp, Homo sapiens; identical to SEQ ID NO: 346369
  chr1:154297543-154297990
  hyper

SEQ ID NO: 349323 - DNA, 72 bp, Homo sapiens; identical to SEQ ID NO: 278861
  chr1:154298038-154298110
  hyper

SEQ ID NO: 349324 - DNA, 244 bp, Homo sapiens
  chr1:154474305-154474549
  hyper
cgcaatttgccgccgccgcccccgggcttggcccgctccgacacggtcttcaggttcagggggaactccttgaaccacttggccgccatgagggggccccggccggctcggcccaggagcgtcggggccgtggagcaggcgagcgaggaagcccagcccagacacgcagaggcgccaggggtcggggaccactgcattccccgtgactggggcgctggaggccgcggcgaggccccgcgacggc

SEQ ID NO: 349325 - DNA, 155 bp, Homo sapiens; identical to SEQ ID NO: 344973
  chr1:155043706-155043861
  hyper

SEQ ID NO: 349326 - DNA, 96 bp, Homo sapiens
  chr1:156215233-156215329
  hyper
cgatgcctccagtgctgttcgagagcagtgaggtgtgtcctctcctgtgcctccgccttccccgtccccactggaggggcctgggaacccaccggg

SEQ ID NO: 349327 - DNA, 229 bp, Homo sapiens; identical to SEQ ID NO: 330977
  chr1:156326789-156327018
  hyper

SEQ ID NO: 349328 - DNA, 42 bp, Homo sapiens; identical to SEQ ID NO: 346372
  chr1:156390054-156390096
  hyper

SEQ ID NO: 349329 - DNA, 103 bp, Homo sapiens; identical to SEQ ID NO: 344974
  chr1:158083079-158083182
  hyper

SEQ ID NO: 349330 - DNA, 396 bp, Homo sapiens; identical to SEQ ID NO: 330996
  chr1:160983499-160983895
  hyper

SEQ ID NO: 349331 - DNA, 935 bp, Homo sapiens; identical to SEQ ID NO: 344975
  chr1:160990384-160991319
  hyper

SEQ ID NO: 349332 - DNA, 367 bp, Homo sapiens; identical to SEQ ID NO: 330998
  chr1:161195526-161195893
  hyper

SEQ ID NO: 349333 - DNA, 187 bp, Homo sapiens; identical to SEQ ID NO: 330999
  chr1:161196150-161196337
  hyper

SEQ ID NO: 349334 - DNA, 93 bp, Homo sapiens; identical to SEQ ID NO: 346376
  chr1:161276123-161276216
  hyper

SEQ ID NO: 349335 - DNA, 64 bp, Homo sapiens; identical to SEQ ID NO: 344976
  chr1:161368929-161368993
  hyper

SEQ ID NO: 349336 - DNA, 95 bp, Homo sapiens; identical to SEQ ID NO: 344977
  chr1:161369405-161369500
  hyper

SEQ ID NO: 349337 - DNA, 293 bp, Homo sapiens; identical to SEQ ID NO: 344978
  chr1:161369566-161369859
  hyper

SEQ ID NO: 349338 - DNA, 299 bp, Homo sapiens; identical to SEQ ID NO: 344979
  chr1:161369945-161370244
  hyper

SEQ ID NO: 349339 - DNA, 712 bp, Homo sapiens
  chr1:161409991-161410703
  hyper
tgcttggaaggcaactatgctcaccactataccaccaacgccgcacggcgcgggcagccccgccgcgccggcccggggctcccaccagcgcgccgccgacgcccggggcaggccggccccgacgcccggtccgtccgcccgcccgcagctccgcgctgccgcggcctctccaaaggccgccccgcgccccaccggtgcaaggccagcgcggctgacccgttacgcccgcctgcctctgggggcgctctcgctcactcgccgcctcgggcccccagagcccttccccaacaggtgcccgggggggaaacggccggcgccggcagggtccccactcctacgcttcccaccgggcgcagggccccgtgtgtcgcagaaagcctcttccgacaaccactttgagccggcagctcgttgggcgccgtgcagggccagaggaggcctcccggctgccgctaccaagccgcggacgagaagaaaagacaggaggccaaggaggcccagaaggccaaagggccaggcaggccaggcccgagatggcaccctgcgactagctggagggcggaggaaggagaaggagggcccacaggctgggtccgaggcggcggcccaaaaagcacggctgcctccccgtcggggaatcgaaccccggtctcccgcgtgacaggcggggatactcaccactatactaacgaggacgacggcgacggtcgcc

SEQ ID NO: 349340 - DNA, 108 bp, Homo sapiens; identical to SEQ ID NO: 197819
  chr1:161591364-161591472
  hyper

SEQ ID NO: 349341 - DNA, 82 bp, Homo sapiens; identical to SEQ ID NO: 197820
  chr1:161591546-161591628
  hyper

SEQ ID NO: 349342 - DNA, 903 bp, Homo sapiens; identical to SEQ ID NO: 331011
  chr1:162039148-162040051
  hyper

SEQ ID NO: 349343 - DNA, 60 bp, Homo sapiens; identical to SEQ ID NO: 346381
  chr1:162792553-162792613
  hyper

SEQ ID NO: 349344 - DNA, 204 bp, Homo sapiens
  chr1:165086756-165086960
  hyper
cgccggccgttctctccgcaggtgcccggcccctgcctccgagtgcgcctcgcggagcgcaaagcgctgtcacgactcggtggccgaggtgattaattagcggcgtggccgtgcgggggacgcgtgctggcctccacatctgccccgtgccagcaggggtcaatatgcggtgtcactgctttccctctcactccctccaaagcc

SEQ ID NO: 349345 - DNA, 60 bp, Homo sapiens
  chr1:165087027-165087087
  hyper
aggctgagggcaggttgacgggcctgtggagaatgtgtgctgcttcctgcaggcgaccac

SEQ ID NO: 349346 - DNA, 103 bp, Homo sapiens; identical to SEQ ID NO: 278995
  chr1:165204594-165204697
  hyper

SEQ ID NO: 349347 - DNA, 93 bp, Homo sapiens; identical to SEQ ID NO: 278996
  chr1:165204732-165204825
  hyper

SEQ ID NO: 349348 - DNA, 87 bp, Homo sapiens
  chr1:165205366-165205453
  hyper
ctggcaggggtgtaattcaaactgttgtgagcagacggcaggagggagttgccaaggtaacgggtgattcccacccgccgccctttc

SEQ ID NO: 349349 - DNA, 138 bp, Homo sapiens
  chr1:165414053-165414191
  hyper
cgcagtgaagcccaagggagatacttacctccatagcctgcgggaaacttcatgaagtgagaataatttccatacatgtttactcgtcagttcatgttcctctcctgtgcagcttctaaatattaccgcctctctcgg

SEQ ID NO: 349350 - DNA, 805 bp, Homo sapiens; identical to SEQ ID NO: 331017
  chr1:165737832-165738637
  hyper

SEQ ID NO: 349351 - DNA, 263 bp, Homo sapiens; identical to SEQ ID NO: 331021
  chr1:168311912-168312175
  hyper

SEQ ID NO: 349352 - DNA, 328 bp, Homo sapiens; identical to SEQ ID NO: 331022
  chr1:169074766-169075094
  hyper

SEQ ID NO: 349353 - DNA, 255 bp, Homo sapiens; identical to SEQ ID NO: 197848
  chr1:170633637-170633892
  hyper

SEQ ID NO: 349354 - DNA, 135 bp, Homo sapiens
  chr1:171811643-171811778
  hyper
acagcttcaggcaattgtgagagagcccgaggcacagacttggcagggggtggacgtggacttatgttgtccaggtgccatgtcattcctgcatcatctcggaactgaccagcatctttctcgcactctctctgc

SEQ ID NO: 349355 - DNA, 301 bp, Homo sapiens
  chr1:175048508-175048809
  hyper
ggagacctgcagctgccactgcgaagagggcagggagggccccgcctgcgagcggctggcctgccccggggcgtgcagcggccacgggcgttgcgtggacgggcgctgcctgtgccatgagccctacgtgggtgccgactgcggctacccggcctgccctgagaactgcagcggacacggcgagtgcgtgcgcggcgtgtgccagtgccacgaagacttcatgtcggaggactgcagcgagaagcgctgtcccggcgactgcagcggccacggcttctgtgacacgggcgagtgctactgc

SEQ ID NO: 349356 - DNA, 227 bp, Homo sapiens; identical to SEQ ID NO: 331035
  chr1:175161560-175161787
  hyper

SEQ ID NO: 349357 - DNA, 116 bp, Homo sapiens
  chr1:177133329-177133445
  hyper
cggatttggggagaagtcaggtgcacagaggcgctagtatgcaagtgggtgtggagaatggtccgggagtggggcggatccgggaggtaggagtgggggaggggaggtcgtcggcg

SEQ ID NO: 349358 - DNA, 177 bp, Homo sapiens
  chr1:177134163-177134340
  hyper
tctcctccgttgcatcctccaacacgagcaaggctcttggctatgaactacctgcacggcatttttaatacattgatctttgcaatgtaaaatcttccctctcgcatcatcatccagaaggcttgagagaggcacacacagacatacaccttaaagggcgcttctgcaaagctgcgc

SEQ ID NO: 349359 - DNA, 31 bp, Homo sapiens
  chr1:177150742-177150773
  hyper
cgcagtgaggactgtgggggcagctaatgtc

SEQ ID NO: 349360 - DNA, 1278 bp, Homo sapiens
  chr1:180199369-180200647
  hyper
cgggcgggggagggaagaggaaaaaagccagagctgcagcaacagcgtctcaacctgggatgtgcaccaaccccggagagcgagatcaaagggactggaaacagactggggactggcggggggagggggccggccagcctgtggagtcctccctgagaagcggagggcccggcttccaccgtgactccagcggcctgcttggggttttaattattattttgaaatttctgaatcgagctagagcgagagagcgagagatctccgtagactgcgactcgctggctttcgctccgagatgatgcagagtgcgactgtccccgcggaaggggctgtcaaggggctcccggagatgctaggtgtgccgatgcaacgtaagacacccccctttctcgctgatttaattctaacaagacagctagcagcctcagccgctgcggggcgggccggacgccgctcaggggccgggaggggctggcggccggggcgcagaggcggtcacagggcaggggcaccagccagagtgcgtttgagggggccaggctcttggctgtttggggccgaatgtgaacgcctcctggatcatgcttgaggcgagccgagtaccgaaccccgcatctccagcccaaggcttttcttggaacgctggggagagtgctgtttggggacacccaggggtacgagctgtaggccaggcctgagggcgagggtggtccccacaaatcttctttcgccggcgtgacggtcagcgcttgcaggaccgctagtgcaacttcaccccagctggcgggaagttggagagcgcgtctctcgcccctggggctggcggcggagaagccccggccacactcttagtccctgcggcccgcgccccgggcgtgcgtgccgggtgagtccccagccgctactgcccgcggcgcccgccgcgtgcgccgcgggaaactgactgctccttgtgagggaatctgctcgcgcattccagctagcctaggaatgcaggggagggagaagcgaccgcaagttgtgaattccgggttcagcctttgcgcacgcgagggcaggtgctcagggtggctcgggtttggaggggtagagacgggggtgtgtgggagctttgctagcctgcccgcccgctttcttcccgcgcccgaaattagcgagacagccggagctcgcggcgtgtttatccccaagtctctctctgtgtgtatgggtgtgcgcgcgcagagattttcccgaagggaatccgtctctgtgcttcactcctgagcgagagtcccc

SEQ ID NO: 349361 - DNA, 249 bp, Homo sapiens; identical to SEQ ID NO: 344982
  chr1:182583799-182584048
  hyper

SEQ ID NO: 349362 - DNA, 40 bp, Homo sapiens; identical to SEQ ID NO: 344983
  chr1:182584613-182584653
  hyper

SEQ ID NO: 349363 - DNA, 77 bp, Homo sapiens
  chr1:182911469-182911546
  hyper
cgccccgatctcctgttgggctcttccttggcggccccttcggcggagctgaccttcctcttgggtatcctggcggc

SEQ ID NO: 349364 - DNA, 151 bp, Homo sapiens; identical to SEQ ID NO: 331054
  chr1:184722819-184722970
  hyper

SEQ ID NO: 349365 - DNA, 121 bp, Homo sapiens; identical to SEQ ID NO: 331056
  chr1:185014263-185014384
  hyper

SEQ ID NO: 349366 - DNA, 50 bp, Homo sapiens
  chr1:197882002-197882052
  hyper
cgcgctcctgaccctccggggagctgctgggggtgtctctttcttggaag

SEQ ID NO: 349367 - DNA, 219 bp, Homo sapiens; identical to SEQ ID NO: 197892
  chr1:197882208-197882427
  hyper

SEQ ID NO: 349368 - DNA, 261 bp, Homo sapiens; identical to SEQ ID NO: 279146
  chr1:197882611-197882872
  hyper

SEQ ID NO: 349369 - DNA, 217 bp, Homo sapiens
  chr1:200008298-200008515
  hyper
cggagaggaggggagagagaagggaggcgagagaaagaggagagagacccctgccgatcctgagccagagggcggtggagggaggggaaggagtcgcccgagccgtccgggagcagtggcagcggcacagccggggcggcaatagcagccccgcggtcgcctccgctgcccgccgggagctcggcggttcacggctccgcgccccgggcagctgcgt

SEQ ID NO: 349370 - DNA, 355 bp, Homo sapiens
  chr1:200008691-200009046
  hyper
acgctccggcgaggcgagagggttgggttagcaggcatcccggtcgccccttccttcttttcgccggagttgaatctgtgctgcccgtgtccaggtgctgggcttccggaccgacacggatcccccatccccgcccgcggtcgccttgtcatgctgcccaaagtggagacggaagccctgggactggctcgatcgcatggggaacagggccagatgccggaaaacatgcaaggtaaggaggcgccgcgcggcgctccggctcccgctgcttccccacccccgggctcgccctgcaggcttcagcctcccgccccgcgcgggcgcgggagtagccccgctgggcgctcgcagccgc

SEQ ID NO: 349371 - DNA, 93 bp, Homo sapiens
  chr1:200012227-200012320
  hyper
ttttccttctttttattttcacagattttcaaacgtaaggagatgaaagtatccagaatagaaaagtactgtcaatacggaactgaatgtttc

SEQ ID NO: 349372 - DNA, 137 bp, Homo sapiens; identical to SEQ ID NO: 344984
  chr1:200271204-200271341
  hyper

SEQ ID NO: 349373 - DNA, 528 bp, Homo sapiens; identical to SEQ ID NO: 344985
  chr1:200271373-200271901
  hyper

SEQ ID NO: 349374 - DNA, 255 bp, Homo sapiens; identical to SEQ ID NO: 331068
  chr1:200379717-200379972
  hyper

SEQ ID NO: 349375 - DNA, 206 bp, Homo sapiens
  chr1:201368376-201368582
  hyper
cggctccctccggcgctcacctggacagcgcggaccagtccttcctgctgacagccatgctgcaggagccccgcgtggccgcccgcgccccgccggccgccgcctcacctggcgcccctccccttccagcccaggtgggatcacatggccgcttatctcacccccgcgcgccccggccgcgctccgatttgccgacccgggaatgg

SEQ ID NO: 349376 - DNA, 121 bp, Homo sapiens; identical to SEQ ID NO: 197902
  chr1:201368727-201368848
  hyper

SEQ ID NO: 349377 - DNA, 578 bp, Homo sapiens; identical to SEQ ID NO: 344986
  chr1:201449645-201450223
  hyper

SEQ ID NO: 349378 - DNA, 160 bp, Homo sapiens; identical to SEQ ID NO: 331074
  chr1:202112280-202112440
  hyper

SEQ ID NO: 349379 - DNA, 80 bp, Homo sapiens
  chr1:202613545-202613625
  hyper
cactcctgtgcctcagtgtcacccttgggcctcaccctcaacccccaacctcacccgataagacctcggggccacagctc

SEQ ID NO: 349380 - DNA, 252 bp, Homo sapiens; identical to SEQ ID NO: 331077
  chr1:202936089-202936341
  hyper

SEQ ID NO: 349381 - DNA, 58 bp, Homo sapiens; identical to SEQ ID NO: 331079
  chr1:203242491-203242549
  hyper

SEQ ID NO: 349382 - DNA, 374 bp, Homo sapiens
  chr1:204042250-204042624
  hyper
cgcagcagcgagccgcgagcgcccttctccagtcccggcttggaactgaactgtgtgagcacgggtcctggaacccgggcccagaaccggcgagcccaggtctgagcccagagctcagcggtcagcctcgtaggccctgactcggaatcgagccgaggcgctgaggttggagccggagagcgtgagagccgaagagcagggagggcgggccggctgcgcgtccgacgagtcgcagagcaggaccgcggaaggcagggagacggccgcaagcccagggcagagggcagagggcagagagcggcctggctcggcggagagggcgccgcccggccggaaccaagctcgccgcccgggacggcgggccccgtggggcg

SEQ ID NO: 349383 - DNA, 244 bp, Homo sapiens; identical to SEQ ID NO: 197916
  chr1:204042692-204042936
  hyper

SEQ ID NO: 349384 - DNA, 75 bp, Homo sapiens
  chr1:204042966-204043041
  hyper
tgcaaagtttttcgaggagagacggaccctcacctacccccaacaacgctgggcagtggcggctcctccctggcc

SEQ ID NO: 349385 - DNA, 357 bp, Homo sapiens; identical to SEQ ID NO: 279201
  chr1:204654218-204654575
  hyper

SEQ ID NO: 349386 - DNA, 73 bp, Homo sapiens
  chr1:204654769-204654842
  hyper
caggccctcgcggcgcccggcaccccctccacgcgcgcccctcttcccggcttcgcgctcgccctcctcactc

SEQ ID NO: 349387 - DNA, 63 bp, Homo sapiens
  chr1:205400134-205400197
  hyper
ccctaaaatgcagcaggaggaagagacttgtcctagagagcccagcgagcttgggggtggggc

SEQ ID NO: 349388 - DNA, 179 bp, Homo sapiens; identical to SEQ ID NO: 331096
  chr1:212838662-212838841
  hyper

SEQ ID NO: 349389 - DNA, 116 bp, Homo sapiens; identical to SEQ ID NO: 346393
  chr1:214156950-214157066
  hyper

SEQ ID NO: 349390 - DNA, 155 bp, Homo sapiens
  chr1:214161233-214161388
  hyper
cgtcagatagactgtgacgtgcagtcttcctgtttccttcagctgtgtcttaaagtaaatcttgttgtggagcggagccctcagctgagggagcgctctgaaataatacaccattgcagccggggaaagcagagcggcgcaaaagagctctcgcc

SEQ ID NO: 349391 - DNA, 70 bp, Homo sapiens
  chr1:214387777-214387847
  hyper
tcagtgctgaccaagtcaccctggcctcctccccggcccctttttctactgcaggaaaggctggagcttc

SEQ ID NO: 349392 - DNA, 233 bp, Homo sapiens; identical to SEQ ID NO: 346394
  chr1:214724215-214724448
  hyper

SEQ ID NO: 349393 - DNA, 44 bp, Homo sapiens; identical to SEQ ID NO: 197950
  chr1:214724487-214724531
  hyper

SEQ ID NO: 349394 - DNA, 182 bp, Homo sapiens; identical to SEQ ID NO: 197951
  chr1:214724561-214724743
  hyper

SEQ ID NO: 349395 - DNA, 207 bp, Homo sapiens; identical to SEQ ID NO: 346397
  chr1:214724786-214724993
  hyper

SEQ ID NO: 349396 - DNA, 198 bp, Homo sapiens
  chr1:214725015-214725213
  hyper
cgtgcgagtgggaggggacggagcaggcgccggcggccacggctcccccaccccagagccgggctccgcggccctgggggccgggaggcggagggagcgctgggcgcgcggccgggggcggggaggaatgcggcccgggagggcgcgcgccgggggcgccgcgggcgcgcgctgaaacgtggagccccagctcccgag

SEQ ID NO: 349397 - DNA, 239 bp, Homo sapiens
  chr1:214725561-214725800
  hyper
atagtccaccttatattggggaaccctccaagcaggacgtttcatgcagccaccccacaggggaaaacagaccaggagaaagtaaggtggcctcaccaagtaggcaatctcagagatctctccctagaatctctgggtactggacccggtgtcttagccttctctccctgccccctcccgccccgtaggaatgataaaaagcagcctgtgtgctgagagttggaaaatgtcgttttccc

SEQ ID NO: 349398 - DNA, 456 bp, Homo sapiens
  chr1:218519313-218519769
  hyper
cggcacccgaccgagtaccgagcgccctgcgaagcgcaccctcctccccgcggtgcgctgggctcgcccccagcgcgcgcacacgcacacacacacacacacacacacacgcacgcacacacgtgtgcgcttctctgctccggagctgctgctgctcctgctctcagcgccgcagtggaaggcaggaccgaaccgctccttctttaaatatataaatttcagcccaggtcagcctcggcggcccccctcaccgcgctcccggcgcccctcccgtcagttcgccagctgccagccccgggaccttttcatctcttcccttttggccggaggagccgagttcagatccgccactccgcacccgagactgacacactgaactccacttcctcctcttaaatttatttctacttaatagccactcgtctctttttttccccatctcattgctccaagaat

SEQ ID NO: 349399 - DNA, 151 bp, Homo sapiens; identical to SEQ ID NO: 197959
  chr1:219347035-219347186
  hyper

SEQ ID NO: 349400 - DNA, 55 bp, Homo sapiens; identical to SEQ ID NO: 344990
  chr1:219347516-219347571
  hyper

SEQ ID NO: 349401 - DNA, 197 bp, Homo sapiens
  chr1:220700617-220700814
  hyper
cgcgggtgcctacaggatgtcttgaggcaggtgggtggaagtgtgaggaagccacctggaagagggaggacagggcccaaatcagacacagctctccatcctccctaaacaggctcgcctaagtgacacttccttgtgtcccaggaagtgacgatcagccagtgtagatgttgtgactcgcgggtctcacccactcc

SEQ ID NO: 349402 - DNA, 133 bp, Homo sapiens; identical to SEQ ID NO: 346400
  chr1:220863507-220863640
  hyper

SEQ ID NO: 349403 - DNA, 198 bp, Homo sapiens
  chr1:220921368-220921566
  hyper
cgacctgccagaaaaagtcgttcccaaatgtttgtaaatcctccgttgggcaacccgccttcacgttctgcggtgatcttgtcgagcgactaagcgtgcagtattagcagagaagggggtggcagagtgctggcgctgaaggtcatgttgcatgggtaactgtcgtgttgtaggggcggggaagagggaggagacact

SEQ ID NO: 349404 - DNA, 115 bp, Homo sapiens
  chr1:220922060-220922175
  hyper
acccggtgaaatcctgcaaaggggtgccggtgagcgaggctgagtgcacggccatggggctgcgcagcggcaacctgcgggacaggtacagcacagcgcgggcgcggggcagcgc

SEQ ID NO: 349405 - DNA, 42 bp, Homo sapiens; identical to SEQ ID NO: 331120
  chr1:220950193-220950235
  hyper

SEQ ID NO: 349406 - DNA, 83 bp, Homo sapiens
  chr1:221051890-221051973
  hyper
cgaaccccacgtgatccggagatgtggtggaggggtgaggctaacatttcctacaacctcctgcaaaggatggaagcgcgtgc

SEQ ID NO: 349407 - DNA, 37 bp, Homo sapiens; identical to SEQ ID NO: 331122
  chr1:223936543-223936580
  hyper

SEQ ID NO: 349408 - DNA, 234 bp, Homo sapiens; identical to SEQ ID NO: 279312
  chr1:224803483-224803717
  hyper

SEQ ID NO: 349409 - DNA, 99 bp, Homo sapiens; identical to SEQ ID NO: 197977
  chr1:225117651-225117750
  hyper

SEQ ID NO: 349410 - DNA, 66 bp, Homo sapiens; identical to SEQ ID NO: 346403
  chr1:225117751-225117817
  hyper

SEQ ID NO: 349411 - DNA, 44 bp, Homo sapiens
  chr1:226736488-226736532
  hyper
cggcggccgcctgagctcggcgcggagcccggagcccgcagccg

SEQ ID NO: 349412 - DNA, 67 bp, Homo sapiens
  chr1:226814279-226814346
  hyper
cgctgagctcctgacccgtcttccttttcttcgggcaccttgtaatgcacccgaccgtccagaaggg

SEQ ID NO: 349413 - DNA, 34 bp, Homo sapiens; identical to SEQ ID NO: 344992
  chr1:226924738-226924772
  hyper

SEQ ID NO: 349414 - DNA, 1206 bp, Homo sapiens; identical to SEQ ID NO: 197984
  chr1:226925659-226926865
  hyper

SEQ ID NO: 349415 - DNA, 49 bp, Homo sapiens; identical to SEQ ID NO: 344995
  chr1:226926951-226927000
  hyper

SEQ ID NO: 349416 - DNA, 260 bp, Homo sapiens
  chr1:227505256-227505516
  hyper
cgtgcaacgtaatcctgaaacgaatccggttgcatcattaatgaataaagtccgatttgcatcagcaattcacttcccgggaagaagaaaaacagaaaagggaggaaaaaaacagaatgcatagaagggggagggaaaaccaaaaatgttgctgcaaatcctcccaaccaccacttggataatgcatcagcggcaatttctccagcgggaaagggagggggcgaggtccctgaagcagcccctcggctcggagcacgcca

SEQ ID NO: 349417 - DNA, 153 bp, Homo sapiens; identical to SEQ ID NO: 197988
  chr1:227505859-227506012
  hyper

SEQ ID NO: 349418 - DNA, 212 bp, Homo sapiens
  chr1:227506042-227506254
  hyper
cggcagcccggctcccaaccactcccttcctctcccttccagccctcccccgccttccctctcctctcgcgctcgcgccctgggctcagcgaggctcctccagtcccgccgcacagaggcggaggcttgcggacgagtctggatccaatatggcggcctggccccccggccccggcacacgcgcgcgcacacgccctccactccccgccccc

SEQ ID NO: 349419 - DNA, 253 bp, Homo sapiens; identical to SEQ ID NO: 279361
  chr1:228646941-228647194
  hyper

SEQ ID NO: 349420 - DNA, 117 bp, Homo sapiens; identical to SEQ ID NO: 279362
  chr1:228647317-228647434
  hyper

SEQ ID NO: 349421 - DNA, 97 bp, Homo sapiens; identical to SEQ ID NO: 346407
  chr1:228870708-228870805
  hyper

SEQ ID NO: 349422 - DNA, 328 bp, Homo sapiens; identical to SEQ ID NO: 198004
  chr1:228870899-228871227
  hyper

SEQ ID NO: 349423 - DNA, 269 bp, Homo sapiens; identical to SEQ ID NO: 198005
  chr1:228871596-228871865
  hyper

SEQ ID NO: 349424 - DNA, 252 bp, Homo sapiens
  chr1:228872003-228872255
  hyper
tgccaaaaaaaaaaaaaaaaaaaatctcacaatttaagcaacagataagtaggagtgaaacaggttgagttcagggtgcccggtcagtttgttgcatagagcaaagtttcctgagggcgacgtcgctggcgccgctgcagagtttcaatcagaaggtgacgcgcaggtgcctttacctgagcgtcgctcctttgcttttaggcggctcagctcacaaggggcgtctccgctttaaagagccgcggagacgcc

SEQ ID NO: 349425 - DNA, 103 bp, Homo sapiens
  chr1:229543603-229543706
  hyper
gttcaaaccaaggtaagagctatcagatccagccagatctgcttcctaagcctggccagggccctaagcacccccacccacacgctcagaggcgggcgacgcc

SEQ ID NO: 349426 - DNA, 165 bp, Homo sapiens; identical to SEQ ID NO: 346410
  chr1:230561973-230562138
  hyper

SEQ ID NO: 349427 - DNA, 587 bp, Homo sapiens
  chr1:231175062-231175649
  hyper
cgcggggctgagggacccggccgcctccctcgcccggggtgcgcgtctgctttcgcagccatctgtgcgccggggccatcccgcggtaatcggatcacggacgcgcggcctggggcgccggaaagggggccgggctgttccaatctgctgtctacactggcggcggacaaaagttgtcctcttcgtggtaggaaaacgcaatcgcgttaatccgttgggccgctgtgaaagcctttcccccaccgggaaggtctgtttcactcggggagaggtgacaaggccgcccccgcccccaggccaggcacgaaccccgcacagcgcttccgggcgcccaggtttccgagccagcggggccggactgagggcgccgggcataagaaagccgccctctgcgcgcggggctctcccgcgggggttccaatcgtgggcacggagcacgcgagaaaaatgggggtcgttgggaggacggcgccggcgcctggggcggaggagcccgaaagggcgggtgggcgcggggacttccggacagagcgcggtccccgcgaactttcccgggacggcgagcccggccgggaagagccccagct

SEQ ID NO: 349428 - DNA, 709 bp, Homo sapiens
  chr1:231175692-231176401
  hyper
cggcgtccaggttgggaggcttggcgggcagcgctgccgcccgggccccgccgccgcccgggcccccgcggctcagctcgtcctggatgcgcgacttctgcgcgtacagccgctccaggtgccgccagcccccagacgcgccgccgcccgacgccgagtgcagcagcccgctcaagctctttggcagcgggggcagcccgtccacccgcagcccccggaccgcgccgttgcccgcggccccgggcgccgcccgggccccactcatcgcgccgcggcccggccacgcgcctgccccgctgcagcgaaccaaggctttcccccggcccgcccccttcccggcggtgccccgcccacttcccctcccgcgccacgcccccccggccccgccccctctcctcgaggcccctgcgcgggccccgggtccgggtggcgtccgcgtccagcagccgggctcgcctccacccgggtctcctcctccctcgcgcccctccagcgccctaattcatctccaactccgcgtgactaccctctaaccccccgactcacctccagccccgtcacgaacccttctgtgccactccctagctccgaacctactaagccccccgcgacccgcagcttcccggttcacccccatctctgtccccacctcctctgaaccacctcccagcttcccggctcacccctagctccgaaccctctcacccgc

SEQ ID NO: 349429 - DNA, 58 bp, Homo sapiens
  chr1:231297569-231297627
  hyper
ggggtgtggaactggagtggcccagggagacgatggcaggggcggggcggggcaggtc

SEQ ID NO: 349430 - DNA, 155 bp, Homo sapiens
  chr1:232765040-232765195
  hyper
cgggaagacccggagaggcccaggagctggcaaagtgggaagaaaggtcgcggtgagtgagaagagcgctcgccggaggctcccggtcttacaaagagggatccgtcccggtgagggcgcgcgctccgggcgcaccccctctagaaggggaatta

SEQ ID NO: 349431 - DNA, 162 bp, Homo sapiens; identical to SEQ ID NO: 198015
  chr1:232765375-232765537
  hyper

SEQ ID NO: 349432 - DNA, 411 bp, Homo sapiens
  chr1:232765595-232766006
  hyper
cggattccccgacacgaaccttcgcaacgccgtccgccggaacctgctacagcctgtgcgcgccgggcggcgcgtacccgggctgccgcctcgccgcccgccgctgcccggggctgcccatcggcccggactctccccgcgccgggctccggcggaggcggcccggacccgctggctgcggctggagctctcggcctgcgctcgggcggccggcgggggcgcggtgctcctcctccgtcctcctcctcctctcgctccgccagctcctcccgggctcccagtctgccgcgccggctcccgatgccaccgcccgcccgcccagcggcaccgccccccgcccgctctgcgggctcccattggtcgctgcctgcaggccccctcggccccgccccacgattgggcgcggacgcc

SEQ ID NO: 349433 - DNA, 281 bp, Homo sapiens
  chr1:233749801-233750082
  hyper
cgggcggcgggcgggagccaggcccgggcgggggcgggggcggcggggccagaagaggcggcgggccgcgctccggccggtctgcggcgttggccttggcggcggcggtggagaagatgctgcagtccctggccggcagctcgtgcgtgcgcctggtggagcggcaccgctcggcctggtgcttcggcttcctggtgctgggctacttgctctacctggtcttcggcgcagtggtcttctcctcggtggagctgccctatgaggacctgctgcgccaggag

SEQ ID NO: 349434 - DNA, 181 bp, Homo sapiens
  chr1:233750511-233750692
  hyper
gagaggtgactccagacgtgacttggttgttgccgtccgtaactctggggaagtggtccctaacttcggcctgggtggctgcaggtgcttcctccccttgagttcttttttcgcaacccactaagccaaactgtcgggtttgaatgtgtagcagcacctggccgccgtgcggcaaggcagc

SEQ ID NO: 349435 - DNA, 174 bp, Homo sapiens
  chr1:234736252-234736426
  hyper
cgatacaaagtgaaaaaataaattttttaaaaaagaaagggaaaaactacaatttgaccattctgaccagcctccttgttccaactggcctcttgatttgtataaagataatggggtccggcggcccccttgatgcatgaattgcacgctgggcataatgaacttattgtgcga

SEQ ID NO: 349436 - DNA, 162 bp, Homo sapiens; identical to SEQ ID NO: 331158
  chr1:234812061-234812223
  hyper

SEQ ID NO: 349437 - DNA, 184 bp, Homo sapiens; identical to SEQ ID NO: 279411
  chr1:235813161-235813345
  hyper

SEQ ID NO: 349438 - DNA, 98 bp, Homo sapiens
  chr1:236850212-236850310
  hyper
ctgtgctgtcctgtgccctcgcagccccgggggccccttaggaaagaggacacgtccggggacaggcaggacactgggcgtcgtgtgtgtgcgcgcgc

SEQ ID NO: 349439 - DNA, 420 bp, Homo sapiens
  chr1:241519651-241520071
  hyper
cgggtctcccacacagagccggagtatatgcttcgcctactttcacctgcctgcgctgccagccaccggctgctctcctttctccccacttcgcttcggaagtccggaggtaatcctgcctaatttttgcaagaagacaccagaatatgtcccggcaacaagaactagtgggaggtcaagccttcaggccattttacccgggtcaccgtgggtaaaagcctaactgcagaagcctccagagcaaccagccaaagaggagaaaacaggcaagcccctgctccccttgctcgctctcacggcagcagcaaatggcaggcgagcctgtgccccgcgccgcggcggccgccggagccgggcagcagtttcagcaccgtggaccgcggggtgcgcgcggcgcccgtagcccagccccggcgcggg

SEQ ID NO: 349440 - DNA, 50 bp, Homo sapiens; identical to SEQ ID NO: 198037
  chr1:241520533-241520583
  hyper

SEQ ID NO: 349441 - DNA, 147 bp, Homo sapiens; identical to SEQ ID NO: 198038
  chr1:241520612-241520759
  hyper

SEQ ID NO: 349442 - DNA, 91 bp, Homo sapiens
  chr1:241520789-241520880
  hyper
ggaaagggaggaaggctgtgcgatgggtgggtgggtggtaggtgggtgggtggtctagtgaatggatggacagatggacggacggatgcac

SEQ ID NO: 349443 - DNA, 499 bp, Homo sapiens
  chr1:244013722-244014221
  hyper
cgctcgggcgggggccgggtcacgccggcggggcggcggctctgggccccggggcgcgcccggcgcggggaggggttctgcggcctcctcccgggctgcgcctcgctgaggggaccccccgccgcctccccgccccctccttcctcccgctcggggccgccgccgatcggttctcgccgtcgccgcggggcttgttgttgactttgaggaaaactcctgacgtcaggggctggctctcggcgactggcgggagcggcttccccgcgtccccggccctgcccgccgcctctgctcccctccctgcccggccctcgtcctcaggcttccccgcgcccccaaaccagcggtgccccgcgccccctctcctctcgcgagaacatccccctagccagccagagccgggagcgggggcagtcgctcccgggcgggaagttctgggtttccccctcgcccgcgtggcccttggcgggcacccgaggcccgggagcggaggctcctc

SEQ ID NO: 349444 - DNA, 137 bp, Homo sapiens
  chr1:247170868-247171005
  hyper
cgggagtcgggactctcccgacaacccctccgtcatcacagcacaatccagggaagacgcggcgctgcgggcgcggggctgccccgggagggctctgggccgtgccgaagtcaccaggcagagaccggacagtcacc

SEQ ID NO: 349445 - DNA, 307 bp, Homo sapiens; identical to SEQ ID NO: 331178
  chr1:247241973-247242280
  hyper

SEQ ID NO: 349446 - DNA, 819 bp, Homo sapiens; identical to SEQ ID NO: 331179
  chr1:247267064-247267883
  hyper

SEQ ID NO: 349447 - DNA, 128 bp, Homo sapiens; identical to SEQ ID NO: 331190
  chr2:3307454-3307582
  hyper

SEQ ID NO: 349448 - DNA, 728 bp, Homo sapiens
  chr2:7005469-7006197
  hyper
ggcagtagcagagcagcctgagcagctggcaccgctggaaggggccgcggcgcagctggtgcagcaggcgctggtgcagccgcgccgcccggacccgggccccgcagccggcgtccggggtcacgggcacgcacagcgagtagctgcgctccgggggccccagcagcgccgccaggcgggggtcgggggcgtctgcgtcgccgggggcgtcggcgcctagggcgaagtgagccagggtgcagtcgggaagctccaggacgaagcggcgcggcggagccatggccccagcgcagaccccgcgccgcccgagcagcggccccgacagtggcccgcgcaggagccggcgggcgaaggccatgggcgcctcagcgacgccgccctcggccccgcctcggaaacgaaacctggcgggagccaggcgccggcgggaaacgaaacccggagggagccaggcgccagcgggaaacgaaagcgaagcgttgcggggaaacgaaagccggaggcccaggcggggcaggagccctggggctggggcgcccttccggcctctcctcctcgccgcgagatgtgcgcgataaacggccggcgctcgggagcagacgcttggccccggggccccaggtgcgcggctccgcgggcctgcgcggtccccaggcgccggctcccggggctgacaccgaatgaggccccgcgccgtcggccccaaggtagctccgtgtgcgttctgc

SEQ ID NO: 349449 - DNA, 291 bp, Homo sapiens; identical to SEQ ID NO: 344998
  chr2:7057762-7058053
  hyper

SEQ ID NO: 349450 - DNA, 41 bp, Homo sapiens; identical to SEQ ID NO: 344999
  chr2:7058391-7058432
  hyper

SEQ ID NO: 349451 - DNA, 166 bp, Homo sapiens; identical to SEQ ID NO: 331200
  chr2:10152421-10152587
  hyper

SEQ ID NO: 349452 - DNA, 178 bp, Homo sapiens; identical to SEQ ID NO: 345000
  chr2:10588876-10589054
  hyper

SEQ ID NO: 349453 - DNA, 117 bp, Homo sapiens; identical to SEQ ID NO: 198078
  chr2:10589055-10589172
  hyper

SEQ ID NO: 349454 - DNA, 197 bp, Homo sapiens; identical to SEQ ID NO: 345002
  chr2:10589298-10589495
  hyper

SEQ ID NO: 349455 - DNA, 70 bp, Homo sapiens; identical to SEQ ID NO: 346417
  chr2:12856411-12856481
  hyper

SEQ ID NO: 349456 - DNA, 849 bp, Homo sapiens; identical to SEQ ID NO: 346418
  chr2:12856549-12857398
  hyper

SEQ ID NO: 349457 - DNA, 255 bp, Homo sapiens; identical to SEQ ID NO: 198088
  chr2:14774684-14774939
  hyper

SEQ ID NO: 349458 - DNA, 31 bp, Homo sapiens
  chr2:14775287-14775318
  hyper
ggctgaggggagaaaggacatggccttcccc

SEQ ID NO: 349459 - DNA, 460 bp, Homo sapiens; identical to SEQ ID NO: 331212
  chr2:17699502-17699962
  hyper

SEQ ID NO: 349460 - DNA, 159 bp, Homo sapiens
  chr2:17721363-17721522
  hyper
cggctcccagtactcctagcagaagaccctctgatgaaatggcccatgacaaaatgaccaccataaccgttccttcagtaagccaggtagacgtgctcacagcttgctgggaagtcttctttcggagatttctgcagttttctccttcaccttacagcc

SEQ ID NO: 349461 - DNA, 241 bp, Homo sapiens
  chr2:17721867-17722108
  hyper
ggaagagaggaaaggggagggggtgcctggagaggcggaggctcgcgcgcctgcgcatccagctccagggaccctaggttttctatgggattcccaatctgcagcagagatttacccgagcgtgttgcggcagcggctgggcttgcaaggcgcgatccaagagggatttaagcagcccagagctccagagaaaaagagagcgagagagaaccacacacagagacggcttaagcgtttaccc

SEQ ID NO: 349462 - DNA, 137 bp, Homo sapiens; identical to SEQ ID NO: 198097
  chr2:19550409-19550546
  hyper

SEQ ID NO: 349463 - DNA, 274 bp, Homo sapiens; identical to SEQ ID NO: 346421
  chr2:19550611-19550885
  hyper

SEQ ID NO: 349464 - DNA, 297 bp, Homo sapiens
  chr2:19551656-19551953
  hyper
aagcttatatggtcaaagacaaaaataaaaaagaaaacgtataaaataacaatagaaaaagtaatacttctgggagaggcgccgctgcggctccgcggagctttcgttctttttttaatgcagtttcccttccgccacgtgagtaccgccttttggccaagagtttagccgcgtcctaggggagcagcagggacggtcggggtcgcggccccgggcggggctctgaagtgccgcgtgcgccagggacccaggggacaatgttggagaggtggaaggtcccgagcgagcgcctctccc

SEQ ID NO: 349465 - DNA, 431 bp, Homo sapiens; identical to SEQ ID NO: 345003
  chr2:20425309-20425740
  hyper

SEQ ID NO: 349466 - DNA, 174 bp, Homo sapiens; identical to SEQ ID NO: 346423
  chr2:20865462-20865636
  hyper

SEQ ID NO: 349467 - DNA, 449 bp, Homo sapiens; identical to SEQ ID NO: 198111
  chr2:20866660-20867109
  hyper

SEQ ID NO: 349468 - DNA, 155 bp, Homo sapiens
  chr2:20867313-20867468
  hyper
cggggcagccgctgtctccgcctcgggccatggtcgcgcggacacgatcaccggcttcacagaccaggcgacccaaggtacttacgcctcttctgtgcccgcccatcccgtcaggtcctgggctgagaccagccccggagccgtgccgcagctcc

SEQ ID NO: 349469 - DNA, 508 bp, Homo sapiens; identical to SEQ ID NO: 198113
  chr2:21022199-21022707
  hyper

SEQ ID NO: 349470 - DNA, 249 bp, Homo sapiens; identical to SEQ ID NO: 198115
  chr2:23609647-23609896
  hyper

SEQ ID NO: 349471 - DNA, 206 bp, Homo sapiens
  chr2:23610070-23610276
  hyper
gctgctgctgcctgcgaaacttccacttcggcagctcagcggcatcccggcccgctgctgcaggttccagcctctctccagtccagcaacgctgggattcggactcctcttgcaatgacagatctgtcctggttacggctgtatttatactagtttcagtctctttaaagtcatctgtctagtcactacagagtttcttcctcgcc

SEQ ID NO: 349472 - DNA, 513 bp, Homo sapiens
  chr2:24272450-24272963
  hyper
cgtcaggcggggccaggctcgctaacagccgggcggggtcccttcccccgggccccgccccggccgaccccacctttccgcgcggctccgccccgccgcccccttgccagtggcccctccccgcgcaggtcccgactccagccgcacctcctccggctctgcagtggcggcgaggaggcgagccggagcgacggcggggctggggccggagccgagccggggtcgggcagcagcagggaccccccagaggcggggcctgtgggaccgctatgggcgtggagatcgagaccatctcccccggagacggtaccgggctccctccggagccaggggaggggaggggtcccggggcggagcccggagggcgggggtctgattcggaggtggcgtggagggtgctgaagggtcggggggctggatggggaaggcaggcggagacgccggacgggattcttgggggtctaggagaccatcctccgccatcctcttccgcgctcacctaggggaatgtag

SEQ ID NO: 349473 - DNA, 206 bp, Homo sapiens
  chr2:25142479-25142685
  hyper
cgatccggcccccttcccacgctcggggcgctgtcttcccccccggaagcctggccctgcccctgcgtttacctgtgcgggaactcggccaccgcgtgctccgggacggtccccgcgcgggctggggcgggagagctcggcgcgcccgagggctgctccccgcagagccgcgccgccccggcagcgcctcggggcccggccggagc

SEQ ID NO: 349474 - DNA, 93 bp, Homo sapiens; identical to SEQ ID NO: 331235
  chr2:25464444-25464537
  hyper

SEQ ID NO: 349475 - DNA, 79 bp, Homo sapiens; identical to SEQ ID NO: 198137
  chr2:26521880-26521959
  hyper

SEQ ID NO: 349476 - DNA, 374 bp, Homo sapiens
  chr2:26522127-26522501
  hyper
taggacccagtctggtggacccgagagtaaaagtgagagtgaaagtgcgccgcaagggaggaaatgggaggaaaagcgtcgaaaccaactcctttggagtgcatgataaaaaaatttttaaaaaggatttagaggtgattatgggatgaaactggatgctcaaaatttaaggacatactgtgaattagaatagccctcttttagtgttggacgactggccgaaggcactacagagaaattggccgtgtgttttaaggtggtgactagggttggaggaccaccagggcattcagacctagtctttgtattgattcatggctaaatgaatgcagccctgcctagcagtttattgtagaacgctcgcagctcatggc

SEQ ID NO: 349477 - DNA, 250 bp, Homo sapiens; identical to SEQ ID NO: 198140
  chr2:27308893-27309143
  hyper

SEQ ID NO: 349478 - DNA, 111 bp, Homo sapiens; identical to SEQ ID NO: 1396
  chr2:27309206-27309317
  hyper

SEQ ID NO: 349479 - DNA, 88 bp, Homo sapiens
  chr2:27473102-27473190
  hyper
cggaggggaaaagggtcttcccgtcctgaccccagtcctgagactccctgcaaagacttccggctgcctctgccgctgcggtggcgta

SEQ ID NO: 349480 - DNA, 58 bp, Homo sapiens; identical to SEQ ID NO: 346425
  chr2:27938267-27938325
  hyper

SEQ ID NO: 349481 - DNA, 51 bp, Homo sapiens
  chr2:29033285-29033336
  hyper
cgtattcacacgttgtgcttttctcagttcaagcggcctcttccttttgag

SEQ ID NO: 349482 - DNA, 37 bp, Homo sapiens; identical to SEQ ID NO: 345005
  chr2:30453530-30453567
  hyper

SEQ ID NO: 349483 - DNA, 68 bp, Homo sapiens; identical to SEQ ID NO: 198154
  chr2:31361021-31361089
  hyper

SEQ ID NO: 349484 - DNA, 178 bp, Homo sapiens; identical to SEQ ID NO: 198155
  chr2:31361118-31361296
  hyper

SEQ ID NO: 349485 - DNA, 70 bp, Homo sapiens; identical to SEQ ID NO: 346429
  chr2:31361690-31361760
  hyper

SEQ ID NO: 349486 - DNA, 105 bp, Homo sapiens; identical to SEQ ID NO: 198157
  chr2:31457427-31457532
  hyper

SEQ ID NO: 349487 - DNA, 408 bp, Homo sapiens
  chr2:32852661-32853069
  hyper
tagagcagtgtcaaaaccagatcctttccttacacgctcattcgccgaaagacccatgctatgctgacggggttccaacctgggcttcaccgactccacgtcagagggtctgtgattccctgagagggtacccttaggctgagagcaagggcccacctgcactctgcgcgaaggactgtggttttcatcgggttgtcgagagcgttctaacccaaaatgctttaagaatcacaactctagcccttctaatcaaactgctttggccaagacgtccgttttgagttgcatttgaaccctagccctcggtgggaggcacactcacttccacgttcacagttcttggaagcggtcccactgggggcggggctgagcgcgaccgcgccctcaactccccctattgcccgcccc

SEQ ID NO: 349488 - DNA, 134 bp, Homo sapiens; identical to SEQ ID NO: 331260
  chr2:38342446-38342580
  hyper

SEQ ID NO: 349489 - DNA, 63 bp, Homo sapiens; identical to SEQ ID NO: 345009
  chr2:43019535-43019598
  hyper

SEQ ID NO: 349490 - DNA, 70 bp, Homo sapiens; identical to SEQ ID NO: 346432
  chr2:43020503-43020573
  hyper

SEQ ID NO: 349491 - DNA, 395 bp, Homo sapiens; identical to SEQ ID NO: 345010
  chr2:43452443-43452838
  hyper

SEQ ID NO: 349492 - DNA, 367 bp, Homo sapiens; identical to SEQ ID NO: 279710
  chr2:43864730-43865097
  hyper

SEQ ID NO: 349493 - DNA, 47 bp, Homo sapiens
  chr2:45164561-45164608
  hyper
cggcggggctcattaggcagagcagggtgccgagaggtgcgcgtcgc

SEQ ID NO: 349494 - DNA, 314 bp, Homo sapiens; identical to SEQ ID NO: 279718
  chr2:45165156-45165470
  hyper

SEQ ID NO: 349495 - DNA, 537 bp, Homo sapiens; identical to SEQ ID NO: 331290
  chr2:47142873-47143410
  hyper

SEQ ID NO: 349496 - DNA, 462 bp, Homo sapiens; identical to SEQ ID NO: 345011
  chr2:47499350-47499812
  hyper

SEQ ID NO: 349497 - DNA, 73 bp, Homo sapiens; identical to SEQ ID NO: 331292
  chr2:47656947-47657020
  hyper

SEQ ID NO: 349498 - DNA, 448 bp, Homo sapiens; identical to SEQ ID NO: 198207
  chr2:54784958-54785406
  hyper

SEQ ID NO: 349499 - DNA, 716 bp, Homo sapiens; identical to SEQ ID NO: 346436
  chr2:54785407-54786123
  hyper

SEQ ID NO: 349500 - DNA, 60 bp, Homo sapiens
  chr2:56149749-56149809
  hyper
cggtagccaacgaacgaggcagcaaagacgtaaaaactgctgtagaattgcatttcacgt

SEQ ID NO: 349501 - DNA, 89 bp, Homo sapiens; identical to SEQ ID NO: 198215
  chr2:56150447-56150536
  hyper

SEQ ID NO: 349502 - DNA, 541 bp, Homo sapiens; identical to SEQ ID NO: 346437
  chr2:60783811-60784352
  hyper

SEQ ID NO: 349503 - DNA, 373 bp, Homo sapiens
  chr2:60784505-60784878
  hyper
agtcctagtttatgctttataatgtgttgacaagttttctaacagactttctgaaataatgcacatatattcacgtcggttagaaacccaccgtatttttagagttgagtagatctataccctaatgcagtgagagagtgtaaatcatacaggatttcatagtcctttcagtagttttcggtatgaagtatgagccgcgtggcctccagacgtaaccttttagaaaaaaaaaaagacagtgcttttattttatggtgtaaagtgcttttagctcaagggctctgaacgtgaatgtggtcaacaaacagctcgaagagggagacttaatacagtcccagccctcggaccgaggatcgcctggcgcgaggaactc

SEQ ID NO: 349504 - DNA, 362 bp, Homo sapiens; identical to SEQ ID NO: 331309
  chr2:61109154-61109516
  hyper

SEQ ID NO: 349505 - DNA, 109 bp, Homo sapiens; identical to SEQ ID NO: 331310
  chr2:61110127-61110236
  hyper

SEQ ID NO: 349506 - DNA, 203 bp, Homo sapiens
  chr2:63278430-63278633
  hyper
cggccccggcagctgagggcaggtaaggagaaagccgcggggccaccccggactccgggagcgcgttggttacccttatctccccctcctcaaatggatcccggcttccccggtccccagcaggtggtcggggctgtgggagcggcctggctcccctcttggtgagccgaggaccccggggcgctgtcgcggcccgcagcccc

SEQ ID NO: 349507 - DNA, 282 bp, Homo sapiens
  chr2:63279141-63279423
  hyper
cgcgacttgctgccctccggcttcacaaatccccgagaccctttgaggtgctaggccagtcacccttcaccccctgctgggaccctgcggtccgcagcccagactgggcagagagaaggccgggtgcgcgctggcaacgaaggacgctggccgcagctgaggcgctcccgacctcaggccgcatcttggggtcgcccccctctacagtggccccttcggcgtcctctggccctctgcgaagcctgggcccgttactgcggttgaggtgcggtgggatttcgc

SEQ ID NO: 349508 - DNA, 54 bp, Homo sapiens; identical to SEQ ID NO: 346439
  chr2:63287368-63287422
  hyper

SEQ ID NO: 349509 - DNA, 354 bp, Homo sapiens; identical to SEQ ID NO: 331320
  chr2:64994400-64994754
  hyper

SEQ ID NO: 349510 - DNA, 213 bp, Homo sapiens; identical to SEQ ID NO: 331326
  chr2:67624288-67624501
  hyper

SEQ ID NO: 349511 - DNA, 79 bp, Homo sapiens; identical to SEQ ID NO: 346440
  chr2:68547270-68547349
  hyper

SEQ ID NO: 349512 - DNA, 317 bp, Homo sapiens; identical to SEQ ID NO: 346441
  chr2:70351179-70351496
  hyper

SEQ ID NO: 349513 - DNA, 236 bp, Homo sapiens; identical to SEQ ID NO: 346442
  chr2:70351563-70351799
  hyper

SEQ ID NO: 349514 - DNA, 280 bp, Homo sapiens; identical to SEQ ID NO: 331330
  chr2:70369049-70369329
  hyper

SEQ ID NO: 349515 - DNA, 442 bp, Homo sapiens
  chr2:71453505-71453947
  hyper
cgaacgtctcccaggcaaatgaggcatgaagaatgagggctggagtcaagggggagatggagcaagtataaaaaggcagaggacgcgcaggggccgcgaataggggaagggcacgacgcgcaatccctcccgctccagcccggggagaggggcgggggatgccgcgcgggtcaatttgcctagcattgttgcacctgggtagaaatgggactcaggccaagaattcggttcgagtgttaggaggacgctgaggggagtcaggaacttgggtgggagtcggggggaaacagagcacctgtgcgggggggaaagggacgaaaaccccctattgctcccgaggggcaggggctgaccccagcggacgccccttttcgccgatggccgcgacgtgggaccccgcgcgctttccctccctacaggagctcgggcaggcgcgtgccgc

SEQ ID NO: 349516 - DNA, 228 bp, Homo sapiens
  chr2:71454386-71454614
  hyper
aagtttcagcttctgattggttttaatgtctgtcttttctcttccttcattttttttttcctgtggtggaacacctccttgagggagatgccggctctgattggctgaaaggacgctacgctagcctgggataggcattgggccaaggatgcgcccggcccactcgtgggggaggagaccaaggcgccgcactctgggtttgtttacacaggctcttgctcccgcttc

SEQ ID NO: 349517 - DNA, 89 bp, Homo sapiens
  chr2:72371941-72372030
  hyper
cggagacggactttggttgccgccctggagtttggaacccgagcgcggggcggggcgggaccgggcagggcgacccgcgcaggtaacca

SEQ ID NO: 349518 - DNA, 354 bp, Homo sapiens; identical to SEQ ID NO: 198272
  chr2:72372237-72372591
  hyper

SEQ ID NO: 349519 - DNA, 154 bp, Homo sapiens
  chr2:72372758-72372912
  hyper
tcttttcctctgtttttcttttctttcaacacaaaagttgggttgtgaattttccgaggtcgccgccgcctcgcccccaccccccgcctctgatctgcctaactataattaaagtgcgttttttgtggcattaataaagagttatttgtccgcc

SEQ ID NO: 349520 - DNA, 127 bp, Homo sapiens; identical to SEQ ID NO: 345014
  chr2:72374248-72374375
  hyper

SEQ ID NO: 349521 - DNA, 259 bp, Homo sapiens; identical to SEQ ID NO: 345015
  chr2:72374932-72375191
  hyper

SEQ ID NO: 349522 - DNA, 120 bp, Homo sapiens; identical to SEQ ID NO: 346446
  chr2:73147029-73147149
  hyper

SEQ ID NO: 349523 - DNA, 189 bp, Homo sapiens; identical to SEQ ID NO: 346447
  chr2:73150996-73151185
  hyper

SEQ ID NO: 349524 - DNA, 35 bp, Homo sapiens; identical to SEQ ID NO: 198289
  chr2:73151849-73151884
  hyper

SEQ ID NO: 349525 - DNA, 285 bp, Homo sapiens; identical to SEQ ID NO: 198290
  chr2:73151946-73152231
  hyper

SEQ ID NO: 349526 - DNA, 46 bp, Homo sapiens
  chr2:73152264-73152310
  hyper
cgcgcagagcatctgagtggcctgggcctggtgggaaatagacccc

SEQ ID NO: 349527 - DNA, 135 bp, Homo sapiens
  chr2:73520107-73520242
  hyper
cgctccgataaccgcacaggttcctgcggaggcgctggcggcccagtgtgggtgggaatgggggtgcgcaccccaggactcctaagcttcccatcgcccctattctcatagctccaatgtcccagtccctcctgg

SEQ ID NO: 349528 - DNA, 275 bp, Homo sapiens; identical to SEQ ID NO: 345016
  chr2:74425444-74425719
  hyper

SEQ ID NO: 349529 - DNA, 395 bp, Homo sapiens; identical to SEQ ID NO: 198298
  chr2:74425790-74426185
  hyper

SEQ ID NO: 349530 - DNA, 228 bp, Homo sapiens; identical to SEQ ID NO: 345018
  chr2:74426214-74426442
  hyper

SEQ ID NO: 349531 - DNA, 412 bp, Homo sapiens; identical to SEQ ID NO: 345019
  chr2:74729488-74729900
  hyper

SEQ ID NO: 349532 - DNA, 238 bp, Homo sapiens; identical to SEQ ID NO: 198302
  chr2:74729933-74730171
  hyper

SEQ ID NO: 349533 - DNA, 79 bp, Homo sapiens; identical to SEQ ID NO: 345021
  chr2:74730644-74730723
  hyper

SEQ ID NO: 349534 - DNA, 235 bp, Homo sapiens; identical to SEQ ID NO: 345022
  chr2:74781700-74781935
  hyper

SEQ ID NO: 349535 - DNA, 122 bp, Homo sapiens; identical to SEQ ID NO: 198308
  chr2:74782349-74782471
  hyper

SEQ ID NO: 349536 - DNA, 1432 bp, Homo sapiens; identical to SEQ ID NO: 345024
  chr2:75060920-75062352
  hyper

SEQ ID NO: 349537 - DNA, 47 bp, Homo sapiens; identical to SEQ ID NO: 198309
  chr2:75147056-75147103
  hyper

SEQ ID NO: 349538 - DNA, 163 bp, Homo sapiens
  chr2:87018396-87018559
  hyper
caccttgggactttttattggcaaaatgggcactgagggctgaaaaggaagaggaactagcgacctgcccgcttctgaggaactcgctagagcagccccagttttcaccgaggaaggaccctctcccttcccccaggagatttccatgagagcggcagcagcc

SEQ ID NO: 349539 - DNA, 895 bp, Homo sapiens; identical to SEQ ID NO: 331365
  chr2:88315911-88316806
  hyper

SEQ ID NO: 349540 - DNA, 144 bp, Homo sapiens
  chr2:88752878-88753022
  hyper
tcttcaaaaacataaaggtgaatgttttcaaagacatttaaataagtaccttcggaattagcattttaaacccgaaagtttcaaagttttaagtaatttaaactgtgcaagaagcgctcatttacaaaaacagcctcatctaac

SEQ ID NO: 349541 - DNA, 578 bp, Homo sapiens; identical to SEQ ID NO: 280006
  chr2:96011863-96012441
  hyper

SEQ ID NO: 349542 - DNA, 48 bp, Homo sapiens; identical to SEQ ID NO: 346460
  chr2:96012683-96012731
  hyper

SEQ ID NO: 349543 - DNA, 250 bp, Homo sapiens; identical to SEQ ID NO: 346461
  chr2:96192254-96192504
  hyper

SEQ ID NO: 349544 - DNA, 193 bp, Homo sapiens; identical to SEQ ID NO: 346462
  chr2:96192624-96192817
  hyper

SEQ ID NO: 349545 - DNA, 59 bp, Homo sapiens; identical to SEQ ID NO: 345026
  chr2:96991316-96991375
  hyper

SEQ ID NO: 349546 - DNA, 42 bp, Homo sapiens; identical to SEQ ID NO: 346464
  chr2:97203334-97203376
  hyper

SEQ ID NO: 349547 - DNA, 39 bp, Homo sapiens; identical to SEQ ID NO: 346465
  chr2:97203545-97203584
  hyper

SEQ ID NO: 349548 - DNA, 212 bp, Homo sapiens; identical to SEQ ID NO: 345027
  chr2:98703022-98703234
  hyper

SEQ ID NO: 349549 - DNA, 200 bp, Homo sapiens; identical to SEQ ID NO: 198335
  chr2:98703475-98703675
  hyper

SEQ ID NO: 349550 - DNA, 77 bp, Homo sapiens; identical to SEQ ID NO: 345029
  chr2:98703736-98703813
  hyper

SEQ ID NO: 349551 - DNA, 146 bp, Homo sapiens; identical to SEQ ID NO: 345030
  chr2:101033445-101033591
  hyper

SEQ ID NO: 349552 - DNA, 761 bp, Homo sapiens
  chr2:101436867-101437628
  hyper
cgctccgaggtaaggggccgcgcctaggggcgcgggggacccagggtgggtagtacgtgcgcgcggggtcgcaggactcggtcacctgctcgccagcgtggaggacgcgcgggggcggaggggcgctcaggcgcgaggctgcgcggcaccggggaccccggacgcgggggcgcggagaggtgggttcccctccacagtcaggccgctgggggcttcgcgtcctgcaggaggtagcaatcgctgggccggtgggctccgggcgcgtctcgacgcagaagacagaggactgggcatccgagcctcggaatttgggggtcctcggggtgtccgacagggtggagaaggatcgtgccccagggcaacagctttggggattgcccgtggttgtcttcgagacccatcgcgctaccctccgaaacgtcgggcgtcctggacccccggagagtgcggcgtgcgcgccctgggcccgcggtctctcggagtccctgggtcggaattggttccgggccggattgggtgcggaatcggtgcccccaacccccgtgtgcgcagacagcgtgcagcctggctcctcacgtcgctgccgcccccccaccccaactccggagctccccaggttggatgtatgcgtatggttttgttgggagatgtgcccctttcccagccgaggagggacgcacctttgacctttctgaagagctgggcaggtcggtaaccagggaagggacaggcaccacccggctaaattcagaaccagtccc

SEQ ID NO: 349553 - DNA, 519 bp, Homo sapiens; identical to SEQ ID NO: 331387
  chr2:102758965-102759484
  hyper

SEQ ID NO: 349554 - DNA, 173 bp, Homo sapiens
  chr2:103235763-103235936
  hyper
cgcccgttgcggcgattccacccacagttcgctggctctgggggtggcgggtcttggcgcgcggtgcctgcgcgaagggagggcagccatcgcccccgcggtcactggggccccgcgttccccgcgggctcgggcaggtgcgcggtgtgccggccaggtccccttgtcctcct

SEQ ID NO: 349555 - DNA, 346 bp, Homo sapiens
  chr2:103236292-103236638
  hyper
caaccggcggcacccatggaaccactgggcaactggaggagcctgcgggcgccactgcctccgatgctgttgctgctgctcctgcaggtggcggggcccgtgggcgccctggcggagaccttgctgaacgcgccgagggccatgggcaccagttccagcccgcctagccctgcgagcgtggtggctcccggaacgacgctgttcgaggagagccggctgcctgtgtttacgctggattacccccacgtgcagatccccttcgagatcaccctttggatcctgctggcctccctggccaagattggtgagcgaactggacttgtggggaatgggagggggcgatctc

SEQ ID NO: 349556 - DNA, 96 bp, Homo sapiens
  chr2:105468467-105468563
  hyper
cggcaggaaaggaaaacacggggtgctggcaccgactattcaaacgtctgcacctggagatctcagattgattcaatgaaatctgtgttccatctt

SEQ ID NO: 349557 - DNA, 144 bp, Homo sapiens; identical to SEQ ID NO: 345031
  chr2:105471069-105471213
  hyper

SEQ ID NO: 349558 - DNA, 155 bp, Homo sapiens
  chr2:105473814-105473969
  hyper
gggcgatcatgagatctcgttcatactgtggtggtgtttcgtttttgtttttgtttttaaagaagggtgaagatgcctgacgcacgaaaactgcactcgtgaggtttttccaccctgagatgacctacacggcagcggtggacagcacctgcctc

SEQ ID NO: 349559 - DNA, 337 bp, Homo sapiens; identical to SEQ ID NO: 198369
  chr2:105489278-105489615
  hyper

SEQ ID NO: 349560 - DNA, 112 bp, Homo sapiens; identical to SEQ ID NO: 345033
  chr2:105490035-105490147
  hyper

SEQ ID NO: 349561 - DNA, 65 bp, Homo sapiens
  chr2:109647974-109648039
  hyper
cggctctgcccgcctcgccgggctgcaccgagtccgcgggtctctagcgcacggcctggccccac

SEQ ID NO: 349562 - DNA, 71 bp, Homo sapiens
  chr2:109648464-109648535
  hyper
aagttcttggtgttcaaaccccctacggttacgtaaacagaactctgcagttatcttctttccctttcttc

SEQ ID NO: 349563 - DNA, 224 bp, Homo sapiens
  chr2:110370717-110370941
  hyper
cgaccttggtactattaacgaaaatagttgtaaccacacttggaaaaccgctggcttactaacaagcgagataaatctacaaaagtaactggaaaggttcaaaacagtgaacaaacgcgttcttttagagtacaaaagagtcaaggcgggaaaaaaacggtttaaaatcccaatggaggaaaacttggacgaccacaccatcggataaaacgggagagcttttg

SEQ ID NO: 349564 - DNA, 266 bp, Homo sapiens
  chr2:110371219-110371485
  hyper
gccgccgcggaagccggggagcactgggcgggcggggccggagggggcgcgggtcacaatcccgggccggaccagggggccggtgggtcgagggcgggaagtcccgcgggggccggggagcgcggggctggggccccggcgtcggcgggactcaccaggtgccgcgccacctcggaggaggccatggtcgcgggcaggggcacggtgaagcggctgtatcagcccggccccgagcggctggtcccggcgacggcggcgggaaggcc

SEQ ID NO: 349565 - DNA, 264 bp, Homo sapiens; identical to SEQ ID NO: 345034
  chr2:111874622-111874886
  hyper

SEQ ID NO: 349566 - DNA, 204 bp, Homo sapiens; identical to SEQ ID NO: 198386
  chr2:111874987-111875191
  hyper

SEQ ID NO: 349567 - DNA, 138 bp, Homo sapiens; identical to SEQ ID NO: 345036
  chr2:111875611-111875749
  hyper

SEQ ID NO: 349568 - DNA, 699 bp, Homo sapiens; identical to SEQ ID NO: 331404
  chr2:111877567-111878266
  hyper

SEQ ID NO: 349569 - DNA, 70 bp, Homo sapiens
  chr2:112656507-112656577
  hyper
cggtgccagaggagggggcgtaggcgaacctaccgtccactgaccgcggcgcctcaagcgtcccgagggc

SEQ ID NO: 349570 - DNA, 32 bp, Homo sapiens; identical to SEQ ID NO: 280126
  chr2:112657092-112657124
  hyper

SEQ ID NO: 349571 - DNA, 554 bp, Homo sapiens; identical to SEQ ID NO: 345037
  chr2:113341898-113342452
  hyper

SEQ ID NO: 349572 - DNA, 33 bp, Homo sapiens; identical to SEQ ID NO: 198390
  chr2:114035443-114035476
  hyper

SEQ ID NO: 349573 - DNA, 636 bp, Homo sapiens; identical to SEQ ID NO: 331421
  chr2:120301702-120302338
  hyper

SEQ ID NO: 349574 - DNA, 260 bp, Homo sapiens; identical to SEQ ID NO: 280178
  chr2:121200130-121200390
  hyper

SEQ ID NO: 349575 - DNA, 241 bp, Homo sapiens; identical to SEQ ID NO: 198417
  chr2:121200454-121200695
  hyper

SEQ ID NO: 349576 - DNA, 56 bp, Homo sapiens
  chr2:121200731-121200787
  hyper
caggtagcgcgcgcaggcgaaccgcaggcccgggcttctggggcctcacgctgcgc

SEQ ID NO: 349577 - DNA, 269 bp, Homo sapiens
  chr2:121499186-121499455
  hyper
cgcctcctccccgcccccgccgtctggaccttcctctccctccgcgccggcttttccgccacgcggagcgctggctggcgaggccgcgtgtccgagcggcgccgaccgtgccgcggccgggggacattccgtgccccgagcgccccgggcccgcggctgcggccctcccacctgcgcgccggcctggtttgcagctcccaaacaatggccacattgtcgcagccgcacaccggccgccgccggcgagtggcgggaggccggactctgct

SEQ ID NO: 349578 - DNA, 47 bp, Homo sapiens
  chr2:121499643-121499690
  hyper
cgaagtgaatgagagcactccacgggagccgggaagagagaggcccc

SEQ ID NO: 349579 - DNA, 154 bp, Homo sapiens; identical to SEQ ID NO: 331428
  chr2:121834588-121834742
  hyper

SEQ ID NO: 349580 - DNA, 381 bp, Homo sapiens; identical to SEQ ID NO: 280195
  chr2:127413347-127413728
  hyper

SEQ ID NO: 349581 - DNA, 255 bp, Homo sapiens
  chr2:127414108-127414363
  hyper
gcagcctccacgcgctccgagctggagaagccgccagcccgccctcccagggcgtgtcgcccgctttctgtttctttgtgcggggcatgtgaaatgtgtggggccagaattgtctccctaaagaacagttaggtgagagttcacatcacaagttgcttctgtgctgctccccagccagggtccgaccggccaggctccggtgaactccaggcaactccagccttgcccagggacttgctcgctccgctgggcgcc

SEQ ID NO: 349582 - DNA, 48 bp, Homo sapiens; identical to SEQ ID NO: 345038
  chr2:127782995-127783043
  hyper

SEQ ID NO: 349583 - DNA, 209 bp, Homo sapiens; identical to SEQ ID NO: 198440
  chr2:133427262-133427471
  hyper

SEQ ID NO: 349584 - DNA, 233 bp, Homo sapiens; identical to SEQ ID NO: 280229
  chr2:133427652-133427885
  hyper

SEQ ID NO: 349585 - DNA, 191 bp, Homo sapiens
  chr2:133428106-133428297
  hyper
acataggaaggcagcctccccactccacgtcctctgcgccttccaggactggtcggtaccccagcgactgggtccagcccacacaactgaggctgtcccgctgcgggccgcgggagcctggcgccccgggaggctgacaggaagggcgcgcgttcccgtgcgcctggcaaagttccacgcccgcaggctcc

SEQ ID NO: 349586 - DNA, 146 bp, Homo sapiens
  chr2:134325872-134326018
  hyper
cgcggttggttatcctctgtttatttttgaagcattcaaaggccacgctaacagaacagactcggttttcctgaacatccacagcggctgggaagtcctgccgtgaatgcggagcaagtttgcggagacttgctccctgggctgcg

SEQ ID NO: 349587 - DNA, 353 bp, Homo sapiens; identical to SEQ ID NO: 198445
  chr2:135476396-135476749
  hyper

SEQ ID NO: 349588 - DNA, 128 bp, Homo sapiens; identical to SEQ ID NO: 345039
  chr2:136873862-136873990
  hyper

SEQ ID NO: 349589 - DNA, 912 bp, Homo sapiens; identical to SEQ ID NO: 198448
  chr2:136874020-136874932
  hyper

SEQ ID NO: 349590 - DNA, 482 bp, Homo sapiens; identical to SEQ ID NO: 198449
  chr2:136875399-136875881
  hyper

SEQ ID NO: 349591 - DNA, 217 bp, Homo sapiens; identical to SEQ ID NO: 198450
  chr2:136876145-136876362
  hyper

SEQ ID NO: 349592 - DNA, 131 bp, Homo sapiens
  chr2:142887740-142887871
  hyper
cggcgctttcgccgctccacggacctcgaatgcagcaggtaaggaagttaacctgggagctaagttgagggcggacacgcttaacgcggagaacctggagctcgcaaaagctcgcagttgagggccatcgc

SEQ ID NO: 349593 - DNA, 32 bp, Homo sapiens
  chr2:142888566-142888598
  hyper
ttcaatgcagggtacgtctgatcttacatcac

SEQ ID NO: 349594 - DNA, 35 bp, Homo sapiens
  chr2:145275891-145275926
  hyper
gttgaaactgtcaaaacttggagaagggggacctc

SEQ ID NO: 349595 - DNA, 50 bp, Homo sapiens; identical to SEQ ID NO: 345044
  chr2:149632592-149632642
  hyper

SEQ ID NO: 349596 - DNA, 238 bp, Homo sapiens; identical to SEQ ID NO: 345045
  chr2:149634146-149634384
  hyper

SEQ ID NO: 349597 - DNA, 114 bp, Homo sapiens
  chr2:149645382-149645496
  hyper
cgccctccccacgctagtagtacgcttcggttactttgcacttctccgtagctgctttacatgtttgcgttttgaatgttgttgaggaaagatgcgaaaaagaatgtgtgctgg

SEQ ID NO: 349598 - DNA, 64 bp, Homo sapiens
  chr2:149645987-149646051
  hyper
cctgtggtgggaggcggccactccgcttggcgccgtgagggaaaccaaggaaaccgtctttgtc

SEQ ID NO: 349599 - DNA, 135 bp, Homo sapiens
  chr2:151342572-151342707
  hyper
cggtacaggtgggcaccgaggcaccgcgggcggccggcagcgcgaagaggaggttcagctgctgcccggcccctgcgccaccagcgcattcctgggtgtaggcgtcacgggcgccgcggctgcctgcgctcagtt

SEQ ID NO: 349600 - DNA, 166 bp, Homo sapiens; identical to SEQ ID NO: 198470
  chr2:151342737-151342903
  hyper

SEQ ID NO: 349601 - DNA, 266 bp, Homo sapiens
  chr2:151343277-151343543
  hyper
cactgtaggaacgtaattctggatagacaaaatgggcaaaagaggaaggaaagagggcaaagaggttacgtttaaacgcacgacacccattgaacacccttcccctccccgctccccagttaagaaagaaaaccttcacacatcagaccacacactaagcacatggaccctttccgaaacccctgtcctactccccactcaccccacccggctctcacagatctgctgacccgaatctcccaaccccaggttatgcacacaggaac

SEQ ID NO: 349602 - DNA, 147 bp, Homo sapiens
  chr2:152954365-152954512
  hyper
cggagcttgacgatctctcccaagatccagacagataagagtattcaaattaggacaaaacagaagaaaccactaaatctcaactcgaatcaaaccaggtccccggccccgaggggtctggttactctaggtcgagttatacgaatt

SEQ ID NO: 349603 - DNA, 461 bp, Homo sapiens
  chr2:157292161-157292622
  hyper
cgccgggggagccgggcgagggttctgggctctgacggcggggtcgcagggtcgcccgcctcctggacacgtctgtaggcctagggaagcctgccggccgggaggtacagagtaggagaagccagatcccagggcggacaacgagaagtcgtcaggtaagccagccccgccagcgtgccggcggacgagtgtctcctctcccgcaggcagatggccagggcggcccgcatgggcgagggcacaggaaatcggacaccgccaccgtcttccccagcctggcctagctcaggctttccagtccgccagcccgctggcaaggcggggcggaggtctggagtccggcatcgccgaggcacaaagcaggaactgcagccaggggcgagggcccttgcgtgtggcgctgcgcgaccccacccggcggcaggacccgcgtccccgtctagtcacgttcattgggccac

SEQ ID NO: 349604 - DNA, 1811 bp, Homo sapiens; identical to SEQ ID NO: 331475
  chr2:159313069-159314880
  hyper

SEQ ID NO: 349605 - DNA, 97 bp, Homo sapiens
  chr2:162094194-162094291
  hyper
cgggagggcccccccggtgcagctttccccggaggctgaggctgctgccagcggggacatctgctttcttacactccagcctggctcaccccgcccc

SEQ ID NO: 349606 - DNA, 258 bp, Homo sapiens; identical to SEQ ID NO: 280315
  chr2:162094357-162094615
  hyper

SEQ ID NO: 349607 - DNA, 94 bp, Homo sapiens
  chr2:162930102-162930196
  hyper
cgttagaagagggagaccgcgggctgggggtgggggtggcgtctggagtgcgccagttggagttctctaaggcgggtgcccttgaacttgtgcc

SEQ ID NO: 349608 - DNA, 262 bp, Homo sapiens; identical to SEQ ID NO: 198502
  chr2:162930659-162930921
  hyper

SEQ ID NO: 349609 - DNA, 137 bp, Homo sapiens; identical to SEQ ID NO: 345047
  chr2:166649931-166650068
  hyper

SEQ ID NO: 349610 - DNA, 37 bp, Homo sapiens; identical to SEQ ID NO: 198509
  chr2:166650106-166650143
  hyper

SEQ ID NO: 349611 - DNA, 723 bp, Homo sapiens; identical to SEQ ID NO: 345049
  chr2:166650508-166651231
  hyper

SEQ ID NO: 349612 - DNA, 100 bp, Homo sapiens
  chr2:168148871-168148971
  hyper
cgtttatttggagggaagacggggaaggtccactctgcctacaactccgacatttctccgtgtgcctctttgctagctggggacacttcgtggctgatta

SEQ ID NO: 349613 - DNA, 239 bp, Homo sapiens; identical to SEQ ID NO: 198512
  chr2:168149264-168149503
  hyper

SEQ ID NO: 349614 - DNA, 220 bp, Homo sapiens; identical to SEQ ID NO: 198513
  chr2:168149556-168149776
  hyper

SEQ ID NO: 349615 - DNA, 401 bp, Homo sapiens
  chr2:169312417-169312818
  hyper
cgcctccgggcgcacgggaagaggactgagagccctgaaaccccagcggggcaggagccagcattctgagcatgtgcgagccagccagggggctagggcggatttggggggtcgactttaggtcgtcgccctaagcgcaaagcgaaagagcggtgagagcaggggcgggcgacactccccggagcggtgcccctgcgcccagggcgcagcgactgcgccctgccctgcgggtgtgggcgagttggccgcgtgtgtgcctcgctgtttgacgcgaagacgagccaatcagggcgggcggcccgagctgccatgtgacgggcaaggcggcccctttccccagcgcggccagagggaggagagaaccggggctcgccgcgagccttcgagagcagcggccgcgg

SEQ ID NO: 349616 - DNA, 904 bp, Homo sapiens
  chr2:169312881-169313785
  hyper
gcgcatccccgggcgccctgcgcggtggagagcttggcgggctgcgggtgccgcaggacaggagtggacaaagcaagatggcagggatcttagcctggttctggaacgagaggttttggctcccgcacaatgtcacctgggcggacctgaagaacacggaggaggccaccttcccgcaggctgaggacctctatctcgcttttcccctggccttctgtatcttcatggtgcggctcatcttcgagaggtaagaagggctgaagcccctcctcccctccccctgcgcacacacacgcgcgcacacactcgcgcgctctctggcgcacgcccccgcgcccccaacgctcgcgttcacgcctcccaacctttgtgttcggggaggggttgctgacccccctgccccgctggctttctgggagccagaaagggtctggcttgccacggatttcctcccgggcgccggggaggagccgcggagcgttagggtcgccccctgccctcctcctgggccctgctctcctcccggcaagggcaggcgaacaaaggtgagcggtggtcgggctcaggacccgccgcattccgcggggctcgcccctctccgccggcgcgccacgcaaggctgccaggcagggcttcccgccggggcccgcgccacccacctgacagccaggaacgttccggacgcgcggcccggagggaggaggaaccgcgcacacttcaatctttatgctccggcacacggattgtaggggttgtgcttcaaaagaattcgccagggacttcctggcttctggtcgctgtttggtttttatccgtgaaactatcaggcccacagtcctggcaaataggggataatagcatttcaggttatcagcggtttctttaaaagaggatgtgacaggac

SEQ ID NO: 349617 - DNA, 361 bp, Homo sapiens
  chr2:171567970-171568331
  hyper
cgattcagtgccgcattagcaccggggaaattctgtccccaccctcccagaacctttagtatagcaacgatttaactaggcagatatgggcaactgcaaaattgagtctccttggcaaggagtggggagatccagccgattaagcaacatcttactgtgaaaggccaaagcattaagaatttgctgaaatgatctaaataatatctagatttttaaaaaatctagcttgagaggggtgactctctggttggatttatgccagaggcatgcgtcccttctagctgcaagaaaatgcccgaggcgaggtaccaagcttgggctggaagtagcaacccctgacttaatcccagagcgcgcagag

SEQ ID NO: 349618 - DNA, 273 bp, Homo sapiens
  chr2:171568711-171568984
  hyper
actgacccccgcccccgcagcccccgcgctgtctggggcgcgcctggccctcccgggcttactctctcccccacagctgcgcacttttgcagcgcgctcggtctttgatgtctctttacattatggcagagcagccacacgctcttcccgggcgcggggctttgtgtaatggaactgacatttggccttgatacctgtatctcttggtgattacaacaaatttctaaaataaatattgtactttgatctcccagcattgcatttttaatggac

SEQ ID NO: 349619 - DNA, 243 bp, Homo sapiens; identical to SEQ ID NO: 198523
  chr2:171570957-171571200
  hyper

SEQ ID NO: 349620 - DNA, 161 bp, Homo sapiens; identical to SEQ ID NO: 198524
  chr2:171571315-171571476
  hyper

SEQ ID NO: 349621 - DNA, 277 bp, Homo sapiens
  chr2:171571520-171571797
  hyper
cgggtctccaggcggcaaggccccctttgatcaggaaaatccaattatttgtgtatatacatttcccacatagtgattacttcattaattgtcccgcctttatctcctcccttcccatcccccctaataatcagttcttttatccagaccaacaaacacaccataggagctttgtggattcaaaggatttgctttcgcttctgaaagagccgctattctttgatgattgggtagcggcaaacttcaaagccataaatcttccctctgactggctggc

SEQ ID NO: 349622 - DNA, 178 bp, Homo sapiens
  chr2:171671978-171672156
  hyper
cccttatggaactctcggtaatttataatatttttgtgtgtgtttccattgtgttgtggtgaaaggcgataaggcattcaaagaaaacggacgggcctccgctgaaccagtgaggccccagacgtgcgcataaataacccctgcgtgctgcaccacctggggagagggggaggaccac

SEQ ID NO: 349623 - DNA, 230 bp, Homo sapiens; identical to SEQ ID NO: 198538
  chr2:172950233-172950463
  hyper

SEQ ID NO: 349624 - DNA, 233 bp, Homo sapiens
  chr2:172950493-172950726
  hyper
tgtctccttctcccatgtcccacgggcactactccatgcactgtttacactcggcgggccattcgcagcccgacggcgcctacagctcagcctcgtccttctcccgaccgctgggctacccctacgtcaactcggtcagcagccacgcatccagcccctacatcagttcggtgcagtcctacccgggcagcgccagcctcgcccagagccgcctggaggacccaggtacgtgc

SEQ ID NO: 349625 - DNA, 112 bp, Homo sapiens; identical to SEQ ID NO: 346490
  chr2:172955255-172955367
  hyper

SEQ ID NO: 349626 - DNA, 57 bp, Homo sapiens; identical to SEQ ID NO: 346491
  chr2:172955887-172955944
  hyper

SEQ ID NO: 349627 - DNA, 163 bp, Homo sapiens; identical to SEQ ID NO: 346492
  chr2:172967062-172967225
  hyper

SEQ ID NO: 349628 - DNA, 85 bp, Homo sapiens; identical to SEQ ID NO: 345050
  chr2:173099596-173099681
  hyper

SEQ ID NO: 349629 - DNA, 1041 bp, Homo sapiens; identical to SEQ ID NO: 345051
  chr2:174219326-174220367
  hyper

SEQ ID NO: 349630 - DNA, 41 bp, Homo sapiens
  chr2:175190730-175190771
  hyper
cgtccgacttgtccgggaatggagcagagaaagaggaacca

SEQ ID NO: 349631 - DNA, 522 bp, Homo sapiens
  chr2:175197393-175197915
  hyper
cgtttctcctcctcggctgcacagggtgagtaggaaacgcctcgctgccacttaacaatccctctattagtaaatctacgcggagactctatgggaagccgagaaccagtgtcttcttccagggcagaagtcacctgttgggaacggcccccgggtccccctgctgggctttccggctcttctaggcggcctgatttctcctcagccctccacccagcgtccctcagggacttttcacacctccccacccccatttccactacagtctcccagggcacagcacttcattgacagccacacgagccttctcgttctcttctcctctgttccttctctttctcttctcctctgttccttctctttctctgtcataatttccttggtgctttcgccaccttaaacaaaaaagagaaaaaaataaaataaaaaaaacccattctgagccaaagtattttaagatgaatccaagaaagcgacccacatagccctccccacccacggagtgcgccaagacgcacccag

SEQ ID NO: 349632 - DNA, 454 bp, Homo sapiens; identical to SEQ ID NO: 198557
  chr2:175198064-175198518
  hyper

SEQ ID NO: 349633 - DNA, 297 bp, Homo sapiens; identical to SEQ ID NO: 346496
  chr2:175199018-175199315
  hyper

SEQ ID NO: 349634 - DNA, 205 bp, Homo sapiens; identical to SEQ ID NO: 198560
  chr2:175199935-175200140
  hyper

SEQ ID NO: 349635 - DNA, 75 bp, Homo sapiens; identical to SEQ ID NO: 345052
  chr2:175546713-175546788
  hyper

SEQ ID NO: 349636 - DNA, 173 bp, Homo sapiens
  chr2:176969908-176970081
  hyper
tgggcctgggatggagatggggaggcagataagtgtgctgggggtctgggttgaggagaagaatgtcagctggaatctgggcgggggtgccagctgcggggagggagcacacaagatgggcagttctagttgggggaggctcgatgccctccagtcgccacagacctatttgc

SEQ ID NO: 349637 - DNA, 84 bp, Homo sapiens; identical to SEQ ID NO: 346499
  chr2:176975945-176976029
  hyper

SEQ ID NO: 349638 - DNA, 125 bp, Homo sapiens; identical to SEQ ID NO: 198576
  chr2:176993339-176993464
  hyper

SEQ ID NO: 349639 - DNA, 61 bp, Homo sapiens
  chr2:176995668-176995729
  hyper
aaggttgggatgcattttttttttaagaagggagagggggagaaatctgctttcatctcac

SEQ ID NO: 349640 - DNA, 40 bp, Homo sapiens; identical to SEQ ID NO: 346500
  chr2:177005679-177005719
  hyper

SEQ ID NO: 349641 - DNA, 794 bp, Homo sapiens; identical to SEQ ID NO: 331546
  chr2:178257227-178258021
  hyper

SEQ ID NO: 349642 - DNA, 353 bp, Homo sapiens; identical to SEQ ID NO: 331547
  chr2:178483339-178483692
  hyper

SEQ ID NO: 349643 - DNA, 486 bp, Homo sapiens; identical to SEQ ID NO: 331549
  chr2:179343487-179343973
  hyper

SEQ ID NO: 349644 - DNA, 33 bp, Homo sapiens
  chr2:180725139-180725172
  hyper
cgcacataacagtggcgaaacagatggtcctcc

SEQ ID NO: 349645 - DNA, 34 bp, Homo sapiens; identical to SEQ ID NO: 345053
  chr2:182323095-182323129
  hyper

SEQ ID NO: 349646 - DNA, 193 bp, Homo sapiens
  chr2:182756176-182756369
  hyper
cgactctttcaagtgtatgtttcagggtgcccaagcagacacttgttttctcgcgggggatgttttgtgagacttggcctccccacttacgttctatttttaggtgagggaggaggaggaggagaggaggaaagattattaacaaactaatcttgcccattccgcgggcagtagtcgggggctggcctgctcc

SEQ ID NO: 349647 - DNA, 71 bp, Homo sapiens; identical to SEQ ID NO: 345054
  chr2:182818959-182819030
  hyper

SEQ ID NO: 349648 - DNA, 90 bp, Homo sapiens; identical to SEQ ID NO: 345055
  chr2:183902312-183902402
  hyper

SEQ ID NO: 349649 - DNA, 568 bp, Homo sapiens; identical to SEQ ID NO: 198600
  chr2:183902442-183903010
  hyper

SEQ ID NO: 349650 - DNA, 587 bp, Homo sapiens; identical to SEQ ID NO: 346507
  chr2:183903037-183903624
  hyper

SEQ ID NO: 349651 - DNA, 352 bp, Homo sapiens
  chr2:185462268-185462620
  hyper
cgggctgatggctgccttggacccttgaaaaccaaccagaaagtctgtctccagggaatgctgcagacccggttccctactttccgtgacaaacccattagttcgtgtgcagatttttccattcaggtcgcttctagggcgaacgcttttgttcgctaccactctgtagtgcgagaggaactagagaggcatgtaaagcaagcttgaggcagcagcgcctttgccgcaaagcatccctttcccctcagctttagcaatttaggaagaactgaggttctcaggggaggtggggtgagaggattgccaggaggagggacatataaatcaggagtccctgcttttaccctctact

SEQ ID NO: 349652 - DNA, 107 bp, Homo sapiens
  chr2:190445073-190445180
  hyper
cgtgtagagttgcttgtctccaaagccccacctgggtttccaccatatgctttcggtcaacgacactcaccacagcatcctctctggcggttgtgatctcccgccct

SEQ ID NO: 349653 - DNA, 819 bp, Homo sapiens; identical to SEQ ID NO: 198610
  chr2:190445255-190446074
  hyper

SEQ ID NO: 349654 - DNA, 279 bp, Homo sapiens
  chr2:190446109-190446388
  hyper
atgcctttccttccccggactgcatagcagggcttccctcaaagaaccagaatcaaagggcaggaagggggcgcaaagatcagagtccatccctcttgagaggagcaaacggaggcttgcaaaggtgaagtcccgcagcgagttacagacctacccgtatccccaaactggggcctccaaatccgtcctggagacagaatgaggatgctgcagccccagcaaacccttcaccatcattccttctccctctgtaccctctcaccccgcccccacgcgcgc

SEQ ID NO: 349655 - DNA, 86 bp, Homo sapiens; identical to SEQ ID NO: 345058
  chr2:191044988-191045074
  hyper

SEQ ID NO: 349656 - DNA, 513 bp, Homo sapiens; identical to SEQ ID NO: 345059
  chr2:191045505-191046018
  hyper

SEQ ID NO: 349657 - DNA, 171 bp, Homo sapiens
  chr2:191208170-191208341
  hyper
cgcagtcccctatgagagtacagatgaatggaggaggaagatttaaaagtgaattcgtgggcggcgacaaggaaacagcagccgtggccaagctgaccccagagcccttcccttcctggccctccctctgaatcatcgcgctccacttgtgacgtcgcggacgcccggctc

SEQ ID NO: 349658 - DNA, 361 bp, Homo sapiens; identical to SEQ ID NO: 331567
  chr2:191514839-191515200
  hyper

SEQ ID NO: 349659 - DNA, 447 bp, Homo sapiens; identical to SEQ ID NO: 345060
  chr2:192109730-192110177
  hyper

SEQ ID NO: 349660 - DNA, 253 bp, Homo sapiens; identical to SEQ ID NO: 198625
  chr2:192110303-192110556
  hyper

SEQ ID NO: 349661 - DNA, 439 bp, Homo sapiens; identical to SEQ ID NO: 345062
  chr2:192110584-192111023
  hyper

SEQ ID NO: 349662 - DNA, 518 bp, Homo sapiens
  chr2:198174828-198175346
  hyper
agcccggccacacaagagccgcattctgggcaggactcctgctaggtttggggaggggtcccagtctgcgatcctttctccctcttcgtgcagcgtcctcctccccggggcccgggccggcggcgcccacgcaacgcggcgcggtgcgagtcccgagagcacctcgagcccccggccccctccccagccccgccgggcccgcggccgccgcactcccgcacgccggctgcccagcgcccacgggccctgccccagactcgggcgcgcagttccgacggcccagggcggggacggcgcggcggaggggagctgccgccgcgggctctcggaggcaccggcggccgcacacagtcctccccttcgccgcgagtaaacagctcgcgggcgcgctccagccgcgcccccatccccccgccgggctccgcgccgccccgcgcccgcgcgtcccgcccgccggcgccgccgcccgctacctggtcggtgagtttgagcactgccattcttccgctccttcgcgc

SEQ ID NO: 349663 - DNA, 897 bp, Homo sapiens; identical to SEQ ID NO: 331573
  chr2:200320451-200321348
  hyper

SEQ ID NO: 349664 - DNA, 133 bp, Homo sapiens; identical to SEQ ID NO: 280540
  chr2:200326735-200326868
  hyper

SEQ ID NO: 349665 - DNA, 279 bp, Homo sapiens; identical to SEQ ID NO: 280541
  chr2:200326960-200327239
  hyper

SEQ ID NO: 349666 - DNA, 280 bp, Homo sapiens
  chr2:200327794-200328074
  hyper
tggtgtcccttcggcggccgcgggccgggggaccggggaagacggagggtcctgcggcctggagcaccaccctaccacaccaggcaacgccccccggggcgcccttcattcttttgcagagcccagaacttaataggtgggtccccttctgcaaccacgctgcgagagaatgactgccctgctaatctagtttacttgtagaaatcgactgtaaaccgggacaacaaggcaagggtgggggaagaaaaggaagcgccgaaggagccgccgctgcgtcccc

SEQ ID NO: 349667 - DNA, 173 bp, Homo sapiens; identical to SEQ ID NO: 331583
  chr2:206750391-206750564
  hyper

SEQ ID NO: 349668 - DNA, 239 bp, Homo sapiens; identical to SEQ ID NO: 198669
  chr2:207308960-207309199
  hyper

SEQ ID NO: 349669 - DNA, 1168 bp, Homo sapiens
  chr2:208030665-208031833
  hyper
cgctgttcgctcctaatgcaatctttgctctttattttgggaggttgcatttttttctctcgcgatcgcttctcttccccccccttcccttccctccccaccccccaccccatccttgctagtttgtagtcttccccctcccttttctcctcctcctgctcttccccctccccaaactccctccctccgttcggttctccgcgcagccgtgggatctcgaggagggcgtccattaggccgcgtgtgaccatgtaaggtaaacagggggctcatgaagtcactgaggaccaatggggagcccggagcagagcctggggcggggcttggccctggcggcgggcgcggattggcacgctgcggatctccctgctgccttacaaggcggtgcgaggcgagctatttttagagggctatataagggggctgaggcggccgcccggcggccgggcagcgcgagcgcaagggacagggagggtcgtggcgacactcgcgccagctcccgggacggctgggctcgggctggtcgccgacctccgaccctccactagatgcctggcagagcccggcgcgtccggagcccgcgcccctcagagggaaggggtcgcgcgtcgccgcggcggccctgaggctgacggtcgggaggtgaaaggccggagtgcggggtcaggacgcctcctggagggggcgcggcgcagggggccgcggggaagccgccgagggcgcggagcgggaaggaaggacagtggccaccccgcctccgcctgggcacggggcagggacccgcgcgaggcggtgccggggaggtcctcacgtactcaaaaacaagcagaaaaggcatccagggccccttcccgaactccccacgggctgccagggtgcagagaagaagcgcctgaggaggaagtgccacacaatgggagagaacaaaggggagcggagcgagaccgcggcctgcgcccgccccccgcttgcgcacagtccccgccccgccccgcgggcgccgccgccgccgccctccctcccgcgcctccttctgaccccgagcgagagacctggtcgggagtccggcggctagagttgattgcaaggggcctgttgctcgactgtgcgttaaagaggctagagggagcctaggtagacgtggggcgcaagctggagccggcagctt

SEQ ID NO: 349670 - DNA, 56 bp, Homo sapiens
  chr2:208031939-208031995
  hyper
ggatgtagacatagagagatctgttacatctgagatgaaaaccctgcacaattcac

SEQ ID NO: 349671 - DNA, 426 bp, Homo sapiens; identical to SEQ ID NO: 331594
  chr2:216946200-216946626
  hyper

SEQ ID NO: 349672 - DNA, 87 bp, Homo sapiens
  chr2:217498487-217498574
  hyper
agccgggctgcggctgctgctcggtgtgcgcccggctggagggcgaggcgtgcggcgtctacaccccgcgctgcggccaggggctgc

SEQ ID NO: 349673 - DNA, 160 bp, Homo sapiens
  chr2:217556802-217556962
  hyper
cgcccagtggttgtccggctaaaacgccctttccaggagcgcccactcccatcccatctgttcgggaagaagatgtcggcaccagcagcggtggagcgccgccaacccgcaacagcagccggccgggcacctgccttcggcggggtggagtcggagagga

SEQ ID NO: 349674 - DNA, 239 bp, Homo sapiens; identical to SEQ ID NO: 198687
  chr2:217557011-217557250
  hyper

SEQ ID NO: 349675 - DNA, 454 bp, Homo sapiens
  chr2:217557321-217557775
  hyper
tgttttccttctccgctaggcttttccaaatccacatcccccaagatgaaggcgggcaggaccgcctttgaaaagtggatcttaataaaaataatctcacaagccggtctctggggttcccagagcctgcacatcctccccttttcctctttttgcaggctgcaacctgcaaaaagatcgactttttgcaggtttggagatcgactacctcttgcaaagctagaggggctggcccctgcgccactcaaaccctgcagggtttgcggggactgaggctgaacacaggaagctctccggcctcctggcaagcgcggacgcactcctctcctgcactatagtgactgaaatttgcacttcagaaaactcatgttagggtgctcgtgagtaacggaaagggacagggagggagaaggggattgcccccgtaactaaactgtctccgtaactaaactac

SEQ ID NO: 349676 - DNA, 32 bp, Homo sapiens
  chr2:217558872-217558904
  hyper
cgaataagagctcagaatcagtattcggacag

SEQ ID NO: 349677 - DNA, 410 bp, Homo sapiens; identical to SEQ ID NO: 280629
  chr2:217559556-217559966
  hyper

SEQ ID NO: 349678 - DNA, 128 bp, Homo sapiens
  chr2:219735657-219735785
  hyper
cgctgcgggctgagtggggctggtcctcctcccttccaccccaagcccttttttgggttacacccctgacctgctattctctgctttccagggctgtgggcagccccttggttatggaccctaccagc

SEQ ID NO: 349679 - DNA, 594 bp, Homo sapiens; identical to SEQ ID NO: 346517
  chr2:219757371-219757965
  hyper

SEQ ID NO: 349680 - DNA, 64 bp, Homo sapiens; identical to SEQ ID NO: 346518
  chr2:219758014-219758078
  hyper

SEQ ID NO: 349681 - DNA, 443 bp, Homo sapiens
  chr2:219845954-219846397
  hyper
cgtgagaggcctccacgtgctgaggtgggagcagttccttggggaagagcaaaagtgggaaaagatttggcactcgttaaagagtagtgatattgaatggggcttctaggagccaggcggaaatgcactggagtggtggggagacaagagaggtccacaaatcccctccgggacctggagacctagaagaaaaaaagtgaaagagggcgcacatcgccctcctcaggggactgcggggtgggacaggagcaaatctagtaccagacaaggattgagggagcttcggtcccgtccccctgctaagtgcggcaggtggagtaaactctggattagaggacggttgacggaggctcccgggccctccccgggatgccgatgggatcgggcgagactctaggcgtgcgggcgaggccgcaggcacccgaccgccccgtctagtggta

SEQ ID NO: 349682 - DNA, 197 bp, Homo sapiens
  chr2:219847616-219847813
  hyper
cgaacagtggccccctatacgtgacaggaggggcaagctctcatgggctcactatcctagccaccttcgggtgcgcaggcctctgcgctggccctgagaatttggcctcttattttcggaacaggcgggattccctgcctacgaaggtgccatagttctcggggcctgatgaacaactctgaggaggggaacggacc

SEQ ID NO: 349683 - DNA, 528 bp, Homo sapiens
  chr2:219866613-219867141
  hyper
agccaccctccgcccggctttcctggcccctccgcccggcccagcctagcttggcttcgtccccagcccacgccttggagcttgtcccggagcccgggctccgtgtgctcttatactgcctgttcagtccccgcccccagacacacacactcacacctgtccaggcgcccgtttgctcggggcaaatattgactcatggaggcggagcgctcccccctcccccgcccgggctctgagaccggagcttctccgaggccttggtggcgggggcggaggggagggtgctggggaccctgggcgcctctggaacaacaccagatgtcacttttccacccacctgcctctgggagggaggagccgagaagcagaggacagaagctcccgggcgggggttaggaggaaccgagaggtgggtatccatcctcgtctgaggactgattcacagtgggagtcgcttagcagggtctgtggcccgaaatccagtggtgacctcgacccgccccagcctagttcctggccctccgcggc

SEQ ID NO: 349684 - DNA, 369 bp, Homo sapiens; identical to SEQ ID NO: 345064
  chr2:219922768-219923137
  hyper

SEQ ID NO: 349685 - DNA, 393 bp, Homo sapiens; identical to SEQ ID NO: 346520
  chr2:220348591-220348984
  hyper

SEQ ID NO: 349686 - DNA, 182 bp, Homo sapiens; identical to SEQ ID NO: 198715
  chr2:220361644-220361826
  hyper

SEQ ID NO: 349687 - DNA, 59 bp, Homo sapiens
  chr2:220417712-220417771
  hyper
ggagccgcgggctaggcgtaagcgcgttcccgtcctaggggcgggagttgcagagggtc

SEQ ID NO: 349688 - DNA, 406 bp, Homo sapiens; identical to SEQ ID NO: 198725
  chr2:222436961-222437367
  hyper

SEQ ID NO: 349689 - DNA, 806 bp, Homo sapiens; identical to SEQ ID NO: 346522
  chr2:222437421-222438227
  hyper

SEQ ID NO: 349690 - DNA, 304 bp, Homo sapiens; identical to SEQ ID NO: 198729
  chr2:223166850-223167154
  hyper

SEQ ID NO: 349691 - DNA, 94 bp, Homo sapiens
  chr2:223185036-223185130
  hyper
cggccttctcaacgcagctttcccagcagcttaggatatcggtttttgttggacttgaaattgggagttgagggcggcctggaggcgctcggga

SEQ ID NO: 349692 - DNA, 913 bp, Homo sapiens
  chr2:223289375-223290288
  hyper
cgccgctgcgggctcttccccgctccggatgaaggcccccgggagaacggcgcggaccccacggagcgcgcggcgcgggtccccggggtcgagcatctccccgcagccaacggcaagggcggcgaggctccggccaacgggctgcgcagagccgcggcgccggaggtaaccatgggcaggtgttcgccgggtacggggagggggcggctgcggacgtgcgggtccctgcgactccgccacgcggggccggccgggccgagagggcgccgtccccggcagtgacccggctcccgccgctgcgagcggacggggaggcctggccttccagtaaccaggatgccaccctccaacgctgccaggggcaaccgggtctattgagatatccccagacgctttcaatgcagtccatttagagacttcccactttcaaaagtagttaaattcacgtagatgccagcaaatatgtaagagttacgtaatggaacggaggagcggggatgtccttggcacttccccggggagacgttcttagactcccccccacccccgtattcttgcatttccgcccatcccccttccctgatgcgcacaaatgcgggtgcagccgggctcagcgcgctcctcaccgcgctgcaccgccagctctgggcacagaacttggggctcacacagctcctagagagatttacaacctccctgcactacccccggcgatgatgtcttaacagcaactctcgcttgccctcccccagagtctgggggtccctcctgcctggtgggtcttttatggaccgacaccagtgacttctaacagatgcttctgggagggaagctcgctacgctcccgctaggtgttcaaagcgtggttatacaacccactgcggcttggggggaaccagcgtgcgtcgtcgtc

SEQ ID NO: 349693 - DNA, 163 bp, Homo sapiens; identical to SEQ ID NO: 331637
  chr2:224702626-224702789
  hyper

SEQ ID NO: 349694 - DNA, 236 bp, Homo sapiens; identical to SEQ ID NO: 198740
  chr2:225906168-225906404
  hyper

SEQ ID NO: 349695 - DNA, 210 bp, Homo sapiens; identical to SEQ ID NO: 331640
  chr2:227700369-227700579
  hyper

SEQ ID NO: 349696 - DNA, 352 bp, Homo sapiens; identical to SEQ ID NO: 345069
  chr2:230932495-230932847
  hyper

SEQ ID NO: 349697 - DNA, 146 bp, Homo sapiens; identical to SEQ ID NO: 280732
  chr2:230933064-230933210
  hyper

SEQ ID NO: 349698 - DNA, 167 bp, Homo sapiens
  chr2:232260775-232260942
  hyper
cggccccgcggccctggacaccgctccaggaccctggcggctgggaccccaggtcttgccggcagctgggtcccctctcccttccagacccctgagggccccctgcgtccgggccactctcctcctctcggggcttccttccgcgggacctcggaccgccgcccgcc

SEQ ID NO: 349699 - DNA, 41 bp, Homo sapiens
  chr2:232260984-232261025
  hyper
cggacccggcaggtggagcgcccgcagcccagggcctcgcc

SEQ ID NO: 349700 - DNA, 104 bp, Homo sapiens; identical to SEQ ID NO: 280744
  chr2:232479181-232479285
  hyper

SEQ ID NO: 349701 - DNA, 227 bp, Homo sapiens
  chr2:232479454-232479681
  hyper
cttcacgttttcaccaaggggcagatggggcagtaggggccctgggaggcctggtccaccaaggagggggaacccgcgcgcgcgcgcgcacgcacgtggcccggcgcgcccgggagacctccgtgtgatcaccgcgcgcagcagctcccgggcggaaacacctcccccctccacgggaaagtgggctcaaccgggggcggaaagcgacacggctgggggacgactac

SEQ ID NO: 349702 - DNA, 623 bp, Homo sapiens; identical to SEQ ID NO: 346527
  chr2:232790030-232790653
  hyper

SEQ ID NO: 349703 - DNA, 217 bp, Homo sapiens
  chr2:232790830-232791047
  hyper
cgcctctcccaggctcggcgtccccacgacagcacccaccttcggcggcgccccgggcttggcttcggagggccggagggagagcagcgtgagcagcagggcgcaggccagcagctgggagagatgcatggtgccgctggggtcgaggggcgcacacgggcggcagcgagggcgcgcaggtcggcgggcagaccagcagggggatgcggagcaggct

SEQ ID NO: 349704 - DNA, 390 bp, Homo sapiens; identical to SEQ ID NO: 280755
  chr2:232791140-232791530
  hyper

SEQ ID NO: 349705 - DNA, 220 bp, Homo sapiens
  chr2:233740556-233740776
  hyper
cgctaccggcaacttgcttaacctagaggtggggggtgacgtccctgtcggccccgtcacctggggccccagcacctctccttggctttgcagacgatgttccacaggagcccgtgcccacgctgtggaacgagccggccgagctgccgtcgggagaaggccccgtggagagcaccagccccggccgggagcccgtggacaccggtcccccagcccccac

SEQ ID NO: 349706 - DNA, 359 bp, Homo sapiens
  chr2:234474820-234475179
  hyper
cggagggcggggaagactgccactaaaattatcaagcctaaaggccttccagtatgtatccactaatcccatcgttagccctgggggcctaggtgacttccccaaggtttcacatcgagtgtggcggagggtcacttggagatgagaaacgtaaagcgcctagcataggtaccaaatgacaggaagcgctgaaatgcaattatttttcttttcctcagaagaaaactaaaaaaacacaactcgagagtctagcctcgagctcgttgtctgcattcctgaattcccaactcctacggccggccgaggccctccaagccaccacaggcccaggggcgcaaaaaggcagaggtccccgtggc

SEQ ID NO: 349707 - DNA, 102 bp, Homo sapiens
  chr2:234475503-234475605
  hyper
aatgtaactcttctgctccaagagtttgggaactggagcgggagcgggagcgggcaaggtgagctcgcttacaagtccgctggtgagttcgcgggtccactc

SEQ ID NO: 349708 - DNA, 592 bp, Homo sapiens; identical to SEQ ID NO: 198764
  chr2:235860154-235860746
  hyper

SEQ ID NO: 349709 - DNA, 84 bp, Homo sapiens; identical to SEQ ID NO: 198765
  chr2:235860808-235860892
  hyper

SEQ ID NO: 349710 - DNA, 356 bp, Homo sapiens; identical to SEQ ID NO: 346530
  chr2:235860951-235861307
  hyper

SEQ ID NO: 349711 - DNA, 297 bp, Homo sapiens; identical to SEQ ID NO: 198767
  chr2:236402404-236402701
  hyper

SEQ ID NO: 349712 - DNA, 138 bp, Homo sapiens; identical to SEQ ID NO: 198768
  chr2:236403013-236403151
  hyper

SEQ ID NO: 349713 - DNA, 68 bp, Homo sapiens; identical to SEQ ID NO: 346533
  chr2:236403736-236403804
  hyper

SEQ ID NO: 349714 - DNA, 307 bp, Homo sapiens; identical to SEQ ID NO: 198771
  chr2:236578055-236578362
  hyper

SEQ ID NO: 349715 - DNA, 44 bp, Homo sapiens; identical to SEQ ID NO: 346535
  chr2:236578677-236578721
  hyper

SEQ ID NO: 349716 - DNA, 374 bp, Homo sapiens; identical to SEQ ID NO: 345073
  chr2:237087637-237088011
  hyper

SEQ ID NO: 349717 - DNA, 223 bp, Homo sapiens; identical to SEQ ID NO: 345074
  chr2:237088239-237088462
  hyper

SEQ ID NO: 349718 - DNA, 205 bp, Homo sapiens; identical to SEQ ID NO: 198794
  chr2:241771771-241771976
  hyper

SEQ ID NO: 349719 - DNA, 246 bp, Homo sapiens
  chr2:242498020-242498266
  hyper
cgctccggcctggtcgccttctccgggcgcatccagggaactcgctcggtcctccttaagcggggaagctcggaaagcgtctccccgactccgcccccagggttgcctttcccttagaaggccaagccccaagcccagcctctcgccagctgggagtcgcgcgctgcccacctcgctgcccaggcccccgacgccgcggcaggagccccccaagagcgcgggaagccccgtggacctggcgctccc

SEQ ID NO: 349720 - DNA, 235 bp, Homo sapiens; identical to SEQ ID NO: 280841
  chr2:242498800-242499035
  hyper

SEQ ID NO: 349721 - DNA, 109 bp, Homo sapiens
  chr3:2139600-2139709
  hyper
cggttaccccgaggtgtggagttgcggcgaagggagccacttctgcaaggaaacagtagattcataatgtagaatgaccgtggcaacgtcgttcaaagcacattctttc

SEQ ID NO: 349722 - DNA, 54 bp, Homo sapiens; identical to SEQ ID NO: 198804
  chr3:2141396-2141450
  hyper

SEQ ID NO: 349723 - DNA, 244 bp, Homo sapiens
  chr3:2141539-2141783
  hyper
cgtgcattttctctcttgtgcttcgtgtatatgttttactatttatgaagggtgtggaggtgagggtaggaggacgtgggctcctgaatccctctgaaccagccagagagtcggctgcatggaaacatttcgcagcgaagctcctgcgaggaggcggcttcgcgcgtcgggaagatcaggcggttgcttgctggccagggtctgcagattcggtgcgaagaagctggcggaggttgtgtagggc

SEQ ID NO: 349724 - DNA, 81 bp, Homo sapiens
  chr3:3840349-3840430
  hyper
cgcaggttcacgcgcagtttccgaagacctattccgtccccaccctcctccccttcctcggagacacctccacttaacact

SEQ ID NO: 349725 - DNA, 326 bp, Homo sapiens
  chr3:4909962-4910288
  hyper
cgcggcctttgaggggaaagggccagggcctagacgttcccctcccgcgtggttttcccgtcagcagctttcgtctgcaagggaaagcggcggccccacccgcagacagctgcgaggcaccgcgccaagcgtatgcgcctgttcccaggcactccctcctccgccttcacccttttgccacctccgccctccacccagccccgccgtgcgcctgcgcgccccggcccgtgggccagcgggcagtctactcacgtgggcctccgcatggcccagcgccgccaagggcaaggcggagcctcgcgatcgccccgccccctccgtgcccc

SEQ ID NO: 349726 - DNA, 210 bp, Homo sapiens
  chr3:4910550-4910760
  hyper
atcacaagatactgctccagattttcccattttatggctaaatccaaatgactcggaccccctgccccatcacatcaggaacttcagcagttccttccaccaaagctcaactattgctgcaagcgctttggtaatcacgagcattatctatgaagctactgctgtggtcagggccccagtcgtcctgctgagtagcagactttgaaagac

SEQ ID NO: 349727 - DNA, 231 bp, Homo sapiens; identical to SEQ ID NO: 345076
  chr3:5018754-5018985
  hyper

SEQ ID NO: 349728 - DNA, 143 bp, Homo sapiens; identical to SEQ ID NO: 345077
  chr3:5019132-5019275
  hyper

SEQ ID NO: 349729 - DNA, 205 bp, Homo sapiens; identical to SEQ ID NO: 345078
  chr3:5137574-5137779
  hyper

SEQ ID NO: 349730 - DNA, 412 bp, Homo sapiens; identical to SEQ ID NO: 345079
  chr3:10206343-10206755
  hyper

SEQ ID NO: 349731 - DNA, 427 bp, Homo sapiens; identical to SEQ ID NO: 346543
  chr3:12329055-12329482
  hyper

SEQ ID NO: 349732 - DNA, 205 bp, Homo sapiens; identical to SEQ ID NO: 198821
  chr3:12330025-12330230
  hyper

SEQ ID NO: 349733 - DNA, 80 bp, Homo sapiens
  chr3:12330283-12330363
  hyper
cgcagccaggacccccagccgcaccccggggggctggaaaggcgaagtcgctgctttgtgggctcctgcaagtgccaggc

SEQ ID NO: 349734 - DNA, 98 bp, Homo sapiens
  chr3:13009355-13009453
  hyper
cgtggccacacggcgccgcggaagaagcacagggggcggggggtcaggggcggggcgtcaggggcggggctacgcgcaggggcggggccgagccgagg

SEQ ID NO: 349735 - DNA, 50 bp, Homo sapiens; identical to SEQ ID NO: 280911
  chr3:13009475-13009525
  hyper

SEQ ID NO: 349736 - DNA, 896 bp, Homo sapiens
  chr3:13461404-13462300
  hyper
cgcgcacccgccgctccgagtgctgcagcctagcgcccagcgagagcgcgccgcgcacctgccggctctgccggcctcccggcgcccgcccagcctctcagcgcgaaggcccagcccggcccacggcgcccgcccggcccggccgcgcgcctcaccagcggtagcagccctccgaggcctccagcgtgaagttaacgcgcgtggcccgcgtgaagggcagcagcactttggggatgttgagcttggccgcagcggcggaggggcccgccgccaacagcaccgacagcgtcagcagcagcagcccccggccccgcgccgccatcctcgccgcgcgtcacctcccgcgaccctgcgcccggccgcccgcgccgccccgttgccctccgctcccgcccgcgcgcgcgccaggccagcaggtgatgagcgcgggggcggggcgagggccgtcggcggccgccgcttcctgggcctgagcgcgggaactctgggggccgagctcgcggcgaccccacccccagcccggccctcgcgcagggacgcggggctgggggatgggcgcgcgcccgggcccccggagctgagggagaaggcttggggcgcgcccgcggggacccctggaccctagaagtcccaagggggagcccccggggcgccccgcagcacgcatcccgccctggtatttgcccctggcggtggagccaagccgccggctttggaccttgcgctctggcccggacccacggtcagcaaggaagggacacatgccccaggacatttgggatgcagaaaaccggcgcctgccttgtcccagcccatgcttcccagaagagggaccccgggctcgcaaagggaagccacctgctgaagcgctgaaggcccggggcccgctccccctc

SEQ ID NO: 349737 - DNA, 201 bp, Homo sapiens; identical to SEQ ID NO: 198829
  chr3:13920779-13920980
  hyper

SEQ ID NO: 349738 - DNA, 478 bp, Homo sapiens
  chr3:13936742-13937220
  hyper
cgacgcaacccgctgtgggccgaaacgggagctaagccagatggaacaaacgacccccaacccgagcccggcggggcgaacaggacatcccgcgttgttccacctgccaaagagggcgagcgcgcgggccgatcggagcagagcgagagggcggggccaagcggagcggatggggccaagtggacgagccgagggagtggggcgcagccgaaagtagccgagtgaagccgaacagagacgaggcgcgggtcgggtggtgccaagcggaaatgagtggggccgagcggggcagggtggagccgagcggagccgggtggagccgagcggagccgagcgagtgagaagccggaggccgagagggccgggccgacttgaagaggtggggattgctgagggctggtctgtcggctctggaaatcctgtcatactgtcacttttggattccgccgtttccgtcccaacggaaaactggggctcc

SEQ ID NO: 349739 - DNA, 124 bp, Homo sapiens
  chr3:13937250-13937374
  hyper
gacgagaatctttttcactggcggcctcggcgtcggcattttataaaatgagagcggggagggcggccgaagacgagtgtgcggagccttaggccccccgctcgggtccgcttttcgtatattc

SEQ ID NO: 349740 - DNA, 92 bp, Homo sapiens; identical to SEQ ID NO: 331702
  chr3:14443834-14443926
  hyper

SEQ ID NO: 349741 - DNA, 578 bp, Homo sapiens; identical to SEQ ID NO: 331703
  chr3:14443998-14444576
  hyper

SEQ ID NO: 349742 - DNA, 369 bp, Homo sapiens; identical to SEQ ID NO: 345080
  chr3:16553609-16553978
  hyper

SEQ ID NO: 349743 - DNA, 78 bp, Homo sapiens; identical to SEQ ID NO: 345081
  chr3:16555426-16555504
  hyper

SEQ ID NO: 349744 - DNA, 340 bp, Homo sapiens
  chr3:16926663-16927003
  hyper
cgtccacgggcgggcgcgctatgacagcggcggggtttccaacggagactgcagcctcggcgtgtccggggacgaagcccgggctagccctaccaggggaccccgcggcgttgcgctcgccccgacccccagcgcggtcgtctgtaccctcccccgggagagcaagccgggcggcctgccccgccggagcagcatcatcaaggtaggtgggagaagggcgctcatcgcccaccctcagccgtccttggattctattttctccctgggggagtggtggtggaaggaggaagcccactgctaacaggaaccactggagcatgggtgcttggggtggttgagc

SEQ ID NO: 349745 - DNA, 989 bp, Homo sapiens; identical to SEQ ID NO: 331712
  chr3:24536360-24537349
  hyper

SEQ ID NO: 349746 - DNA, 221 bp, Homo sapiens; identical to SEQ ID NO: 198852
  chr3:25469458-25469679
  hyper

SEQ ID NO: 349747 - DNA, 130 bp, Homo sapiens; identical to SEQ ID NO: 345083
  chr3:25469874-25470004
  hyper

SEQ ID NO: 349748 - DNA, 214 bp, Homo sapiens; identical to SEQ ID NO: 346549
  chr3:27410391-27410605
  hyper

SEQ ID NO: 349749 - DNA, 61 bp, Homo sapiens; identical to SEQ ID NO: 346550
  chr3:27411079-27411140
  hyper

SEQ ID NO: 349750 - DNA, 558 bp, Homo sapiens; identical to SEQ ID NO: 345084
  chr3:32433054-32433612
  hyper

SEQ ID NO: 349751 - DNA, 200 bp, Homo sapiens; identical to SEQ ID NO: 198867
  chr3:32433665-32433865
  hyper

SEQ ID NO: 349752 - DNA, 81 bp, Homo sapiens; identical to SEQ ID NO: 345086
  chr3:32434068-32434149
  hyper

SEQ ID NO: 349753 - DNA, 64 bp, Homo sapiens
  chr3:35681641-35681705
  hyper
cacagctgtgtgggatcccagccgacactgcagaaagctccttttactagcagttaaataaatc

SEQ ID NO: 349754 - DNA, 1420 bp, Homo sapiens; identical to SEQ ID NO: 331732
  chr3:37033979-37035399
  hyper

SEQ ID NO: 349755 - DNA, 41 bp, Homo sapiens
  chr3:38070629-38070670
  hyper
cgttcttggatgctgtttccttccttcgccgcccctccgtg

SEQ ID NO: 349756 - DNA, 50 bp, Homo sapiens; identical to SEQ ID NO: 331738
  chr3:39250115-39250165
  hyper

SEQ ID NO: 349757 - DNA, 493 bp, Homo sapiens; identical to SEQ ID NO: 346555
  chr3:39850742-39851235
  hyper

SEQ ID NO: 349758 - DNA, 243 bp, Homo sapiens; identical to SEQ ID NO: 345088
  chr3:43147038-43147281
  hyper

SEQ ID NO: 349759 - DNA, 105 bp, Homo sapiens; identical to SEQ ID NO: 345089
  chr3:43147607-43147712
  hyper

SEQ ID NO: 349760 - DNA, 131 bp, Homo sapiens
  chr3:43935666-43935797
  hyper
cgtccggaaattgaagctaataagagcactgacttccctgggcggcggttgaaggctacctgtgtggatctgggcacagcgaagagcggagccttaacagggtgagcacgccggttgcgcgctctccagag

SEQ ID NO: 349761 - DNA, 426 bp, Homo sapiens; identical to SEQ ID NO: 198906
  chr3:44038922-44039348
  hyper

SEQ ID NO: 349762 - DNA, 41 bp, Homo sapiens; identical to SEQ ID NO: 345091
  chr3:44063232-44063273
  hyper

SEQ ID NO: 349763 - DNA, 71 bp, Homo sapiens; identical to SEQ ID NO: 346560
  chr3:44597031-44597102
  hyper

SEQ ID NO: 349764 - DNA, 550 bp, Homo sapiens; identical to SEQ ID NO: 331751
  chr3:44666348-44666898
  hyper

SEQ ID NO: 349765 - DNA, 365 bp, Homo sapiens
  chr3:45186931-45187296
  hyper
cgtgttggtcccttcccccaaccgaaacaactcgaaattcacacatatccccggaacaacagcctcctgccctcaaagtccactgccaaaaagtgcgaggggcgcgggaatgtccagtctctgcggtggcgcagatgcctggcggctttctctgggaccccctaaaagaaatccgggcgctttcatttttgcaccaacgctcttcaactttaggagagggggaatgcagcgtgcggacgggaaaaaggggatctagtgggaaatgcggacgtgaaagcactttttttgcaccttctctctggaccaggcgaggaggtagagggcgagcctggagaggaaagatctcttcccacaccctgcctggg

SEQ ID NO: 349766 - DNA, 395 bp, Homo sapiens; identical to SEQ ID NO: 346561
  chr3:49027805-49028200
  hyper

SEQ ID NO: 349767 - DNA, 233 bp, Homo sapiens
  chr3:49906737-49906970
  hyper
cgcggcagccccgcccagccccctccgggttgtcgcccataaagaactctccgttgtcatggaaattagtgactgctaagcgggagggaaggggcccggggacagttgggaggggctggaggcggctctgggaacggggagggacggctcagctctcggcccctatcctcacgggggaccacgaatcttcgagggttaatcttttcacaattccgagccgcagaagcttcccc

SEQ ID NO: 349768 - DNA, 49 bp, Homo sapiens
  chr3:49907379-49907428
  hyper
gggcgggctgggggcggggcctcccaaccggccccgccccgaccctggc

SEQ ID NO: 349769 - DNA, 356 bp, Homo sapiens; identical to SEQ ID NO: 346562
  chr3:50374299-50374655
  hyper

SEQ ID NO: 349770 - DNA, 233 bp, Homo sapiens; identical to SEQ ID NO: 281171
  chr3:50374684-50374917
  hyper

SEQ ID NO: 349771 - DNA, 34 bp, Homo sapiens; identical to SEQ ID NO: 346564
  chr3:50374946-50374980
  hyper

SEQ ID NO: 349772 - DNA, 81 bp, Homo sapiens; identical to SEQ ID NO: 346565
  chr3:50377892-50377973
  hyper

SEQ ID NO: 349773 - DNA, 167 bp, Homo sapiens; identical to SEQ ID NO: 346566
  chr3:50378002-50378169
  hyper

SEQ ID NO: 349774 - DNA, 199 bp, Homo sapiens; identical to SEQ ID NO: 331773
  chr3:53195788-53195987
  hyper

SEQ ID NO: 349775 - DNA, 247 bp, Homo sapiens; identical to SEQ ID NO: 198957
  chr3:53879786-53880033
  hyper

SEQ ID NO: 349776 - DNA, 201 bp, Homo sapiens; identical to SEQ ID NO: 198959
  chr3:54156155-54156356
  hyper

SEQ ID NO: 349777 - DNA, 346 bp, Homo sapiens; identical to SEQ ID NO: 198961
  chr3:55521390-55521736
  hyper

SEQ ID NO: 349778 - DNA, 165 bp, Homo sapiens
  chr3:57198384-57198549
  hyper
cgcgcccatcgcccagacagtgtcaaaggagcgctcggttccacgaagacggctcaatgcacacggcgaaagtctgggcacctctccagtctcgtctcaggcacctcacccagatgacacccacgcggccctttggcggaaaaatatccgcaactcgaagcaggg

SEQ ID NO: 349779 - DNA, 568 bp, Homo sapiens
  chr3:57198581-57199149
  hyper
acgaagggctgaaccgggaggcgaagtttctcaggaggtcccggagtcagaggaggggtaggagtggggtgacggccccaggcgaggaggaacaaagctactagaagagcggggcgcatccctccccggtgctccaagtcccctctccggccgcccgggccttagcagggttgtggactgaaagtccgggagaatacccccttccctctccaaagcgcaacccggtccgggtggctcgggggatcccagcccgggacacgcagccctgggacgaaggaggtcccgggccaagaacaaagggtggggcgcccggcccagccccgccgcccctcacgcccgccctctgaatgggaccccggccggcggccgcacctcattagcaacacaaagccggggtcgggcagccgctttcatctcggccagggccggaggacacgcgtccggggagggaaaccaggaggatgcgcgggaggagtgagacccaggccggccgcggaccccgcgaagagcagacaggttggcgcgggctcgcctccccgcgagcacctgtgcgcgctgcgtcccccgc

SEQ ID NO: 349780 - DNA, 446 bp, Homo sapiens
  chr3:62859445-62859891
  hyper
cgagccagaaggtggcggcgaagtcaccttgggaagaggagaatagggtcaaagacaggacggcggaggggctgacccggacggaaggaccagagggcgtgcccctgctctggggtcagtgaggaagggtcagggggactggtgagaactccagccataaggaagcagtgcccgaggacactttggcgacgctagtcggtgatcagctgacccgggcagggagaggagggtgcccttcgcagagtcacgggaagcttcgccttctgggcttgctttctcccgcctgcccctgcggttgctctctgccccagcgagcggagcgctgctccaagacgctcttctccctccacctcggcgcccccacctgccgttgcccccgcccgccgaacgcacgcccaggagggcgggcccggagttgagcgcagccgcccgccgctggagagcgc

SEQ ID NO: 349781 - DNA, 205 bp, Homo sapiens; identical to SEQ ID NO: 198979
  chr3:62859964-62860169
  hyper

SEQ ID NO: 349782 - DNA, 389 bp, Homo sapiens
  chr3:64430905-64431294
  hyper
cacaggtgcgcagccgcggggcgcagtggggctgcgcgcgggcgctcgcggccggctggaggtgcccggcgatcggccccgctcgagcgggggacactcaccgagcggctggagagtcttttccgggagctccggctgaacatggccggacgcctcctgctcgcagcgccgtccgtcggtccgtccgcgccgcggccgggagggcgggtagcctgggcgggcaccctcggcggccgctggcctggctgtctccgccttgcagtccccggctcgctccggagcgcacgcctacccctcctcccttccctctgcctctccctccacgcccgcaggtccctccctctctcccggcatccccccgccctcccgggttcgccccgcggtccacc

SEQ ID NO: 349783 - DNA, 1318 bp, Homo sapiens; identical to SEQ ID NO: 281269
  chr3:66024122-66025440
  hyper

SEQ ID NO: 349784 - DNA, 56 bp, Homo sapiens
  chr3:66025506-66025562
  hyper
actcggaattcgcagcccgggggtagctgcggcctccggaggtcgcccgggggtgc

SEQ ID NO: 349785 - DNA, 1570 bp, Homo sapiens; identical to SEQ ID NO: 331800
  chr3:66550318-66551888
  hyper

SEQ ID NO: 349786 - DNA, 1076 bp, Homo sapiens; identical to SEQ ID NO: 331801
  chr3:67048291-67049367
  hyper

SEQ ID NO: 349787 - DNA, 221 bp, Homo sapiens
  chr3:69434926-69435147
  hyper
cgagtgcccggcatcctgctggggccctcgggtgccgcgcgctccagctcacctggtacacgtcctgcagcccgcaccacgtccgcagcacctggtggcaagcccgcagcctctccgtgtaccatctccgcagcgtggacacggtcaagttccatacgaagcggctgccgctgaacagcaggtcctccacgccacacatgaacaccgaagccatgcctcct

SEQ ID NO: 349788 - DNA, 1710 bp, Homo sapiens; identical to SEQ ID NO: 331806
  chr3:71113110-71114820
  hyper

SEQ ID NO: 349789 - DNA, 1327 bp, Homo sapiens
  chr3:71630573-71631900
  hyper
cgctcccggtgccttatcgctaggctcgcgccaccccggctggctctttggggacggagaacccctagtgccgcctggggctctccggtgtccctggaccccgcgcccgcggccgcctcgacttacccgcggagtccggggagggagtaggagcgccgccttcacgcccgcggaggaggcgccggcagcaccatggtccccggcgccgctgccgctgcccccggcccgctcgctcgctcgccgcgcgctctcttcctcttacaaactttcgggttctgcagtcgacaagaaaccggggcgaccctcagcaagtcttccccgtgcaggctggggggaactgaaggggacgggacgggtgagtaggccgaggggccaggacagagagggcagcgggctccgaggacccgcgagtgcgcgtggagggaagagaggatgcggctcagggaatccctgcaaggatccagagaccgggaaatcggcccgagccaaagtctcagcaccttccccaggatctcacaaagttgcaacaacaaaaaggaggggggaggaatagggagaagggggtgggatggggatacgatcacgggcgcaaggtttggagttacaactgtttatttagtccttattctcacagggggcgggagctgcgcgggaatggggggctgcaggcagcgatttcgaagcaaacacatgggaggggggcatgcgactttgtttccgggagcggagctccccagagcccgtgtgtgtcactgccagtctcccgggaccaaggcggagctcacaacaggtggggaggggggctcgtcgagggccaaaaagaagaaggaatctaagtttccgagcgcgacgttgtctgaaaaggagggaggcgggaggcgggggcgagggaaggcggaggcagcaaatgaccgcgaccccgcggcaactggcaaactcctcggctcccggcgccgccgccaccgccgtggtccccactcgaagcgcacgccgcctcggctcgctggctccagggagtcgtctcggcgggacaggaatagagcgcagggagctcgggaggaaggctgcgcgcaagcgagggacggagagccatcggccgccaggacagggccggagggacgaggcgacacgcgcgcgacgcaggacaaatcggagcttgggaaatctccccgtcccccaagcttcagaggggggtaaaatcagaaaatgtgtgtgatggtgggagagagatccgggcgcggcgactcctcgcagcgcatccggctcccgcacccacccgtggatctggccacggctgttgcggactcgtctcgggaaagcggaggcc

SEQ ID NO: 349790 - DNA, 60 bp, Homo sapiens; identical to SEQ ID NO: 198999
  chr3:71802788-71802848
  hyper

SEQ ID NO: 349791 - DNA, 152 bp, Homo sapiens
  chr3:72149806-72149958
  hyper
cgggtaagagaataataaatcggtcacttcactatccaattagcagctgttgctccccgctggaggaagaaaacaaacaggaagaccctgccctgttttgtttaggatcaaactcgcctctgtaccacctaccggagggactctggggtttg

SEQ ID NO: 349792 - DNA, 96 bp, Homo sapiens
  chr3:72150077-72150173
  hyper
gaaactccgtgcaggggcaaagctgagttttgcaaccagtgagcgggagcccggggggcgtggccaggctgaggggatgcgttgtcctggtaaccc

SEQ ID NO: 349793 - DNA, 280 bp, Homo sapiens; identical to SEQ ID NO: 345095
  chr3:98619774-98620054
  hyper

SEQ ID NO: 349794 - DNA, 58 bp, Homo sapiens; identical to SEQ ID NO: 345096
  chr3:98621126-98621184
  hyper

SEQ ID NO: 349795 - DNA, 101 bp, Homo sapiens; identical to SEQ ID NO: 346575
  chr3:99594790-99594891
  hyper

SEQ ID NO: 349796 - DNA, 299 bp, Homo sapiens
  chr3:101497996-101498295
  hyper
caacgccctcggcccgcccccgccgaagctccaccaatcgtagccgggggtcggaggtgaggagacgtcgccgggtgaggaagcggggggctagcggcctggcgctgcggcgaccgaccggggcgtcaggatccctggcccccggagagcgaagggcgggcgggtcccggaggtgagtgctggatgtggtctgtgtgcggacgtcgggaggggccgctgcgggcggagcgacccattgcccggctctgccagcgcgctcctagactgcgaagcccctccctccgcgcgcatctgctccc

SEQ ID NO: 349797 - DNA, 98 bp, Homo sapiens
  chr3:101498512-101498610
  hyper
cggcaacgccacagctcggtacagttcggacctccacgccgcagcgaaagacttctgtcctccaggcaccttcactaacccggtgcggagcacttggc

SEQ ID NO: 349798 - DNA, 566 bp, Homo sapiens; identical to SEQ ID NO: 346576
  chr3:105087465-105088031
  hyper

SEQ ID NO: 349799 - DNA, 459 bp, Homo sapiens; identical to SEQ ID NO: 346577
  chr3:105088087-105088546
  hyper

SEQ ID NO: 349800 - DNA, 882 bp, Homo sapiens
  chr3:110789759-110790641
  hyper
cgcccggcgcggaaagtggacagcccagcggccagtgagaagcaagagcaagaaagcaaaccttctgaagacccctctcctcgcccagctccgccgaccattctaccaagctgccctcccagaaaaaagagcaggaaaaatgcctgtgcaaacgtgccttggcgagcggggaataagtgggctgggaagaagggaaggattcggagagcacagctgtcccggggaacaggaaggaggagaaagtctctccctcccttcagtgccccgcgccccagcgaggaggaagattactagtccagcaggctgcgtccagcttcctacacaggaacctttagcatgggcaacggaagggcagccccctcctgccttcccctccccaccccaccccctcgtcccaggtccccgccacagggagagcgccgcccgggagaggagaaggccgagcgtgattgtcccgcagccctcgcctcagtcggcgccggggcccccgtggacccgcgaggggtggagtgggcgagaccattggaaaggcagggaaggggggaaaccaggcaggaacgaggggcggggccgactaacctattccagattttcctgtcccttttaaatctctgctgtgggagaaaccccgttatcaaagtggatgaaaagaatatttttttttgaaaggggaggagcatgtgtaggagggcggggtgggaggagacagggcttgcgcccggggatcagacgggaggtggagttgcgcggggagggcgggcgagtcgggcgcccgctctgagagtcggtttcttttccccctcttgcgtggggcggggtggtgcgttccgagttcccaggagttcgacgcgggcgggtgccgaggggaggggagtggcggcg

SEQ ID NO: 349801 - DNA, 573 bp, Homo sapiens
  chr3:110790671-110791244
  hyper
agtggcgtcggcgacggcggtgtcgaggcagccgccagcgttcggccaagtgtcagccggcagcgacggcgctagagctgggagctggggacgcgcgcgccggaccttccacagcctccgcccagagcctgaggcgccggggccgggggagccggggggcgggcgggcgagcgggccggggggagggtgggggatggcgcggaccctgcggccgtccccgctgtgtcctggaggcggcaaagcacaactttcctccgcttctctcctcggagccgggctcctgctgcagcccccgacgccacctccgctgctgctgctgctcttcccgctgctgctcttctccaggctctgtggtaggtgaacctcggcggccggcgtgggctgagggagccgccactgagggtgcgggcgccgcggccggctctgccagccgttctctggagcagcgaggcggttggttgtgcgagcgagtgccgaggactttggctggaaacttttcgccgcgcccggggcgaggccctggaagggccaggccagcgaatgctgagccggcggcccgctgccctcccccgc

SEQ ID NO: 349802 - DNA, 1176 bp, Homo sapiens; identical to SEQ ID NO: 331832
  chr3:113251180-113252356
  hyper

SEQ ID NO: 349803 - DNA, 48 bp, Homo sapiens; identical to SEQ ID NO: 345098
  chr3:115231437-115231485
  hyper

SEQ ID NO: 349804 - DNA, 302 bp, Homo sapiens
  chr3:116163989-116164291
  hyper
ctttgccagtttatggtcctttccactttgcctctctctttccctcgctcagtctcttttccctctaagacttaacaaagccctcataaaacccaagcagaagggtgaaaagtaaaagcaacacaatttcaaaagagagagtgcaaatagcaagccctctggaagagctgaagaggaagccaaaggaaagggttcttgtttggtctctctgtgactggatgctcctctgccagtgtctgagctgagctccttcgctctgtaacccactttcccaggctggcgggcgggcgggcgagggagcc

SEQ ID NO: 349805 - DNA, 253 bp, Homo sapiens; identical to SEQ ID NO: 331842
  chr3:121741110-121741363
  hyper

SEQ ID NO: 349806 - DNA, 731 bp, Homo sapiens; identical to SEQ ID NO: 346580
  chr3:123751654-123752385
  hyper

SEQ ID NO: 349807 - DNA, 102 bp, Homo sapiens
  chr3:124606483-124606585
  hyper
cgctcccgttgcttagccgcccgtcgccacgggaaaggggcggggcacgctgtattaggcgagccgagattacttgggccaaaggcggttgctagactgcga

SEQ ID NO: 349808 - DNA, 438 bp, Homo sapiens; identical to SEQ ID NO: 345099
  chr3:124773932-124774370
  hyper

SEQ ID NO: 349809 - DNA, 48 bp, Homo sapiens; identical to SEQ ID NO: 199076
  chr3:126373704-126373752
  hyper

SEQ ID NO: 349810 - DNA, 317 bp, Homo sapiens
  chr3:126373824-126374141
  hyper
ccgctccagagtctcgctctcgctcctggcccggccgggcctgctcacaaaccgaaacgcaggcggctgcggcgccgggacggggcctgaggggcggcgaacgctgccctcgctggccactctcaccacccgcgcgaatccgcgaggcagccgctcgccccgccccccaacaccgccccgcgcatgcgaaattgggtcccccgcccgcccgcagcctaggtgtcacctgcccttcgcaaaggggcgggtaccaagcgcgagcctctttatctccaggttgtgcctgcgtccggagaccacccaatcttggcgatggc

SEQ ID NO: 349811 - DNA, 99 bp, Homo sapiens
  chr3:127634312-127634411
  hyper
ggcccatattgggcagtggcctcagtcaggcccgctggccgccctgccacacggtagcgtccaagccaggtcgtggcccagcgagtggggacgcgcccc

SEQ ID NO: 349812 - DNA, 122 bp, Homo sapiens; identical to SEQ ID NO: 345100
  chr3:127794271-127794393
  hyper

SEQ ID NO: 349813 - DNA, 288 bp, Homo sapiens; identical to SEQ ID NO: 199083
  chr3:127794860-127795148
  hyper

SEQ ID NO: 349814 - DNA, 44 bp, Homo sapiens; identical to SEQ ID NO: 345102
  chr3:127795229-127795273
  hyper

SEQ ID NO: 349815 - DNA, 333 bp, Homo sapiens; identical to SEQ ID NO: 345103
  chr3:128216313-128216646
  hyper

SEQ ID NO: 349816 - DNA, 378 bp, Homo sapiens; identical to SEQ ID NO: 345104
  chr3:128216713-128217091
  hyper

SEQ ID NO: 349817 - DNA, 601 bp, Homo sapiens; identical to SEQ ID NO: 331858
  chr3:128336511-128337112
  hyper

SEQ ID NO: 349818 - DNA, 57 bp, Homo sapiens; identical to SEQ ID NO: 346587
  chr3:128713000-128713057
  hyper

SEQ ID NO: 349819 - DNA, 562 bp, Homo sapiens; identical to SEQ ID NO: 199092
  chr3:129345876-129346438
  hyper

SEQ ID NO: 349820 - DNA, 93 bp, Homo sapiens
  chr3:129346564-129346657
  hyper
ccagacttgaggggagtggctggagttgagactcaaatccaagaaggaaacggtggggcttggaccacttgcctactgagaaaaatggaagtc

SEQ ID NO: 349821 - DNA, 48 bp, Homo sapiens; identical to SEQ ID NO: 199094
  chr3:129694299-129694347
  hyper

SEQ ID NO: 349822 - DNA, 816 bp, Homo sapiens; identical to SEQ ID NO: 199096
  chr3:131753156-131753972
  hyper

SEQ ID NO: 349823 - DNA, 196 bp, Homo sapiens; identical to SEQ ID NO: 346590
  chr3:132756116-132756312
  hyper

SEQ ID NO: 349824 - DNA, 39 bp, Homo sapiens; identical to SEQ ID NO: 346591
  chr3:132756477-132756516
  hyper

SEQ ID NO: 349825 - DNA, 295 bp, Homo sapiens; identical to SEQ ID NO: 345106
  chr3:135684609-135684904
  hyper

SEQ ID NO: 349826 - DNA, 35 bp, Homo sapiens; identical to SEQ ID NO: 346593
  chr3:136751341-136751376
  hyper

SEQ ID NO: 349827 - DNA, 356 bp, Homo sapiens; identical to SEQ ID NO: 281523
  chr3:137480764-137481120
  hyper

SEQ ID NO: 349828 - DNA, 703 bp, Homo sapiens; identical to SEQ ID NO: 199114
  chr3:138067014-138067717
  hyper

SEQ ID NO: 349829 - DNA, 106 bp, Homo sapiens; identical to SEQ ID NO: 346595
  chr3:138067747-138067853
  hyper

SEQ ID NO: 349830 - DNA, 267 bp, Homo sapiens
  chr3:139258672-139258939
  hyper
ccctacaaaggaagaggagaccggagacgggacgtttgctttgttggccgaactcttcggctgctggggatttccttcaaacgccattaacttctcacactcagcagccactcgggagttgggaaacaatctcctggggtttgtgctggcgtgattaaggaaagaggccacttacaggcctttgtctaaagcctcgcgccggtggtggctggggtcaggaaagctgggaggttcaactacgggcgagaaaattggggcactttccac

SEQ ID NO: 349831 - DNA, 79 bp, Homo sapiens; identical to SEQ ID NO: 346596
  chr3:139655101-139655180
  hyper

SEQ ID NO: 349832 - DNA, 986 bp, Homo sapiens; identical to SEQ ID NO: 346597
  chr3:140660747-140661733
  hyper

SEQ ID NO: 349833 - DNA, 59 bp, Homo sapiens
  chr3:145878430-145878489
  hyper
cgggcacgctgagttcaccgagaactccaaggagtcaacgagggcgggtgcccctacac

SEQ ID NO: 349834 - DNA, 112 bp, Homo sapiens; identical to SEQ ID NO: 199124
  chr3:145878553-145878665
  hyper

SEQ ID NO: 349835 - DNA, 173 bp, Homo sapiens; identical to SEQ ID NO: 281571
  chr3:145878695-145878868
  hyper

SEQ ID NO: 349836 - DNA, 349 bp, Homo sapiens
  chr3:145878937-145879286
  hyper
ctgagtgaggtcgtcggtggaggcacggagcagcaggcgcccggggcgctgcggaggccttataggctccccgaggggaggcgacggggcgggccgcgccctggctattggccgccggctgacccgccgccgctgcgcgcccggtgcggtcgcctcagctcgccctcctgggccccacgtctggactgtttgctcagcgcggacgctatttaaggagctgcctgcggctacgtgtggaggctcacgcagcgcttctggctggaacggggaagcctgcacttagctttgggagtgggtttgggagagggaggaggagccgccgggagtctggcgggagggcggtgttccc

SEQ ID NO: 349837 - DNA, 604 bp, Homo sapiens; identical to SEQ ID NO: 346598
  chr3:145968403-145969007
  hyper

SEQ ID NO: 349838 - DNA, 130 bp, Homo sapiens
  chr3:147075091-147075221
  hyper
ttgccatcggatttgtcctcggcaaatgtctcaccaagctgtagatggatgaatggatagatacatgataggtagatcgatcgatagatagttagagaggtagacagacggatagatccccgaagcttgc

SEQ ID NO: 349839 - DNA, 379 bp, Homo sapiens
  chr3:147086665-147087044
  hyper
cggtagcatgctctcttgtcaagaccgattgtgttttaggcaaacatttgcgcaaacataaaggcaaaggtcaaggactgttcagtcccagtatgtgctaattcacctagcgaaccaatggggcaaaagttgcattttatatgctcgcccccgccagacccaaagcaggagtcgctcctgctaatgaacaaaatcgcctctgatcagctcccttgtcaatttctcttcggctctctgatccatttctctgggcttcctcagaaatacaactggtaaagacgtgtttgccaacatctggatcagctccgcccaatttctggggcagcacatgtttattccacgtttctggtagcagaaagctaataataataaataaaat

SEQ ID NO: 349840 - DNA, 590 bp, Homo sapiens; identical to SEQ ID NO: 199134
  chr3:149375406-149375996
  hyper

SEQ ID NO: 349841 - DNA, 85 bp, Homo sapiens
  chr3:150802802-150802887
  hyper
cgtgggttcaaattccgactcgtttcgtggctttcggcaagtgagtggtcctctctgagctggctcaatttctccatccataaaa

SEQ ID NO: 349842 - DNA, 98 bp, Homo sapiens
  chr3:152553725-152553823
  hyper
actacctgccggctgtctacatcttggtattcatcatcggcttcctgggcaacagcgtggccatctggatgttcgtcttccacatgaagccctggagc

SEQ ID NO: 349843 - DNA, 31 bp, Homo sapiens
  chr3:153838787-153838818
  hyper
cgttagaactctgcgctactgcccacgcatc

SEQ ID NO: 349844 - DNA, 58 bp, Homo sapiens; identical to SEQ ID NO: 199144
  chr3:153839460-153839518
  hyper

SEQ ID NO: 349845 - DNA, 84 bp, Homo sapiens
  chr3:153840393-153840477
  hyper
gggccccagaaaagttcttcggaacaaaaactccccctccaaaggctgccctcccaggagaacgagctcctcgagaatccttcc

SEQ ID NO: 349846 - DNA, 63 bp, Homo sapiens
  chr3:154797121-154797184
  hyper
cggtccacaggggagagatggagccccctcaggactagagaatcccgaagagcccgtgtattg

SEQ ID NO: 349847 - DNA, 120 bp, Homo sapiens; identical to SEQ ID NO: 199148
  chr3:154797214-154797334
  hyper

SEQ ID NO: 349848 - DNA, 122 bp, Homo sapiens; identical to SEQ ID NO: 345108
  chr3:156533976-156534098
  hyper

SEQ ID NO: 349849 - DNA, 142 bp, Homo sapiens; identical to SEQ ID NO: 345109
  chr3:156534539-156534681
  hyper

SEQ ID NO: 349850 - DNA, 523 bp, Homo sapiens; identical to SEQ ID NO: 345110
  chr3:157217201-157217724
  hyper

SEQ ID NO: 349851 - DNA, 184 bp, Homo sapiens
  chr3:157260928-157261112
  hyper
cgaggcggggtgggggaggtcgtgtcccagggttctgacagtggagccaggacgtccgggagctgacaatctaaacgcgacctgggaaggggcggtagcgggagtggctgcttcctgggaggtggtgctcgcaaacctggcagctgactgggtggggcgtgccttccctggcagtcgcggaggg

SEQ ID NO: 349852 - DNA, 258 bp, Homo sapiens; identical to SEQ ID NO: 345111
  chr3:157815399-157815657
  hyper

SEQ ID NO: 349853 - DNA, 67 bp, Homo sapiens; identical to SEQ ID NO: 199159
  chr3:157815822-157815889
  hyper

SEQ ID NO: 349854 - DNA, 568 bp, Homo sapiens; identical to SEQ ID NO: 345113
  chr3:157815923-157816491
  hyper

SEQ ID NO: 349855 - DNA, 193 bp, Homo sapiens; identical to SEQ ID NO: 199161
  chr3:157821711-157821904
  hyper

SEQ ID NO: 349856 - DNA, 32 bp, Homo sapiens; identical to SEQ ID NO: 346606
  chr3:157824101-157824133
  hyper

SEQ ID NO: 349857 - DNA, 140 bp, Homo sapiens
  chr3:157825408-157825548
  hyper
ccctctaatttcatttattacggagagctaaaaaagagacgctcgccaggagtaaaggtctctctgcctaccccccccaccaccccgcttacgatttaaaattctatttctgggctattttcatcggaacggtttgttac

SEQ ID NO: 349858 - DNA, 173 bp, Homo sapiens
  chr3:158289012-158289185
  hyper
ctcttgtcgcggccgcggcgagttaacatcgtttttccaatctgtccgcggctgccgccacccaagacagagccagaatgttcaggatgctgaacagcagttttgaggatgaccccttcttctcgtgagttacgggagccaggagtccggggtcgcgcgggaattaaggtatc

SEQ ID NO: 349859 - DNA, 79 bp, Homo sapiens; identical to SEQ ID NO: 345114
  chr3:159480852-159480931
  hyper

SEQ ID NO: 349860 - DNA, 943 bp, Homo sapiens; identical to SEQ ID NO: 346608
  chr3:159480975-159481918
  hyper

SEQ ID NO: 349861 - DNA, 80 bp, Homo sapiens; identical to SEQ ID NO: 345116
  chr3:167098187-167098267
  hyper

SEQ ID NO: 349862 - DNA, 271 bp, Homo sapiens
  chr3:169379645-169379916
  hyper
gcgttccgtaaacaacacaattagagagttttgttttcggcgagtgcgagtgtgggagagagaaccgcggcctgtccactcccgaggcagctccagccccgcctattgacacctcaaggaagagcgctcccagccgctccggggctcagtgtccctgagtccccttcaactcgaagtagaagcatttggacaaacgcagtcctgtcgtctacagtcctggcggagcatcacaccgtgtgggaaagtgtgggccccgccggcaaagccaggc

SEQ ID NO: 349863 - DNA, 227 bp, Homo sapiens; identical to SEQ ID NO: 345117
  chr3:169482182-169482409
  hyper

SEQ ID NO: 349864 - DNA, 241 bp, Homo sapiens; identical to SEQ ID NO: 199188
  chr3:169482439-169482680
  hyper

SEQ ID NO: 349865 - DNA, 282 bp, Homo sapiens; identical to SEQ ID NO: 281698
  chr3:170626174-170626456
  hyper

SEQ ID NO: 349866 - DNA, 138 bp, Homo sapiens; identical to SEQ ID NO: 345119
  chr3:179169640-179169778
  hyper

SEQ ID NO: 349867 - DNA, 86 bp, Homo sapiens
  chr3:179754092-179754178
  hyper
cgattccttgatcctgtttaaagaaacaggctcagggaatgcacagaaaacaaacttccccaatcgaagttctgaggtcttccctc

SEQ ID NO: 349868 - DNA, 134 bp, Homo sapiens; identical to SEQ ID NO: 281734
  chr3:180319921-180320055
  hyper

SEQ ID NO: 349869 - DNA, 169 bp, Homo sapiens; identical to SEQ ID NO: 281735
  chr3:180320087-180320256
  hyper

SEQ ID NO: 349870 - DNA, 98 bp, Homo sapiens
  chr3:180320294-180320392
  hyper
aggaagtggagccgcggccgtgagcacaggacgatcgcgcgctggtgtcttgggctgggtggacggggggcgctcctgggttgtgcaatgcgggatgc

SEQ ID NO: 349871 - DNA, 206 bp, Homo sapiens; identical to SEQ ID NO: 346614
  chr3:180397104-180397310
  hyper

SEQ ID NO: 349872 - DNA, 97 bp, Homo sapiens
  chr3:181421152-181421249
  hyper
cggaaatcggcttaatttttcataaaagaatggctttttaaaatattgaatactatggctatgcaaggtttatgatacctttatgtttattcttccc

SEQ ID NO: 349873 - DNA, 336 bp, Homo sapiens; identical to SEQ ID NO: 281747
  chr3:181429718-181430054
  hyper

SEQ ID NO: 349874 - DNA, 36 bp, Homo sapiens; identical to SEQ ID NO: 199220
  chr3:181430331-181430367
  hyper

SEQ ID NO: 349875 - DNA, 252 bp, Homo sapiens; identical to SEQ ID NO: 199221
  chr3:181430443-181430695
  hyper

SEQ ID NO: 349876 - DNA, 47 bp, Homo sapiens; identical to SEQ ID NO: 199223
  chr3:181444767-181444814
  hyper

SEQ ID NO: 349877 - DNA, 49 bp, Homo sapiens
  chr3:182896562-182896611
  hyper
cgaagcaatcttggcactaacacgaacaccccatgaacgctcgcaggga

SEQ ID NO: 349878 - DNA, 809 bp, Homo sapiens; identical to SEQ ID NO: 345120
  chr3:183165024-183165833
  hyper

SEQ ID NO: 349879 - DNA, 570 bp, Homo sapiens; identical to SEQ ID NO: 345121
  chr3:183542795-183543365
  hyper

SEQ ID NO: 349880 - DNA, 213 bp, Homo sapiens; identical to SEQ ID NO: 281792
  chr3:184301275-184301488
  hyper

SEQ ID NO: 349881 - DNA, 43 bp, Homo sapiens; identical to SEQ ID NO: 331974
  chr3:185977478-185977521
  hyper

SEQ ID NO: 349882 - DNA, 290 bp, Homo sapiens; identical to SEQ ID NO: 199253
  chr3:186079331-186079621
  hyper

SEQ ID NO: 349883 - DNA, 45 bp, Homo sapiens; identical to SEQ ID NO: 345123
  chr3:187455297-187455342
  hyper

SEQ ID NO: 349884 - DNA, 446 bp, Homo sapiens; identical to SEQ ID NO: 199256
  chr3:187456666-187457112
  hyper

SEQ ID NO: 349885 - DNA, 509 bp, Homo sapiens; identical to SEQ ID NO: 345125
  chr3:187457654-187458163
  hyper

SEQ ID NO: 349886 - DNA, 777 bp, Homo sapiens
  chr3:187458583-187459360
  hyper
cgaagcgggttatttgtggtttttcttagtgcaaatagatgctcatcgctgagtgatgggcaagcagcgaggcctttctgattttcatccctcttgccaaaactttggaggttgtatgccatccccattggagggtgccctccttctgtcagtcctagcatctggtcagggtaccgccgcccgggaggtggaacggcgagcccaccgcccatggccgcgaactcgatctcagcccaccgctaggtggcaggccagcccgtccgagaatcgccgcgcggccgcagcttccacaccgatccctacccgcccctctttattttctgtctggtgggggcgagggttgggggtgtgattgcctctaaaagcaaagctagaaaacatttaatttagtgtatgtaattccgttcctcccgatgctcccgcctctagcaaccacaacgcggtatctggagctggtttcatgtatcataagttgatttctcccccagcctccgaaaagctttatgtactgggaagggaaagaaggtgcacttgtcttcaaaaggcagaatggcactcgacagtattggcagagattcttgccaaacactggtcatccagcaaagaaagtcgggaataaactcctgatcttctcggaggaaaggggcgctgggggccgagtgctggatcccactcaggctcactgcgcctggcaaagcgggggagtggggagtcgggtatggtcttttggtgaagttgtgggtctcggagtggacatcgggagggttgggaggggcc

SEQ ID NO: 349887 - DNA, 40 bp, Homo sapiens
  chr3:190529763-190529803
  hyper
attatcaccaggagatggcgctgtgcattagtaaacatcc

SEQ ID NO: 349888 - DNA, 56 bp, Homo sapiens
  chr3:192128140-192128196
  hyper
gatgagaaattctcagaggcagagcgagggaactgcagcttgggtctgctccgtcc

SEQ ID NO: 349889 - DNA, 111 bp, Homo sapiens; identical to SEQ ID NO: 345126
  chr3:193775965-193776076
  hyper

SEQ ID NO: 349890 - DNA, 146 bp, Homo sapiens; identical to SEQ ID NO: 345127
  chr3:194407289-194407435
  hyper

SEQ ID NO: 349891 - DNA, 153 bp, Homo sapiens; identical to SEQ ID NO: 199276
  chr3:194407836-194407989
  hyper

SEQ ID NO: 349892 - DNA, 101 bp, Homo sapiens; identical to SEQ ID NO: 199277
  chr3:194408028-194408129
  hyper

SEQ ID NO: 349893 - DNA, 582 bp, Homo sapiens; identical to SEQ ID NO: 345130
  chr3:195599104-195599686
  hyper

SEQ ID NO: 349894 - DNA, 968 bp, Homo sapiens
  chr3:195622064-195623032
  hyper
cgaaggggtctggggcccaggtatctggctatcccctagccttccccattacctgcggtccctcctcgcccccagccaggcgctggtaagcagatctctcccccatggagccccaaatcccagcggctgcggtcagggagagaagcagcgcccgcagcccccgccccgcagcggcaccggcagcgtcactgccctgcgtcctggggggccgggcctcgagcatcctccagaagtgcagggccgctactgcgtctcagcccccatagcctcatccgccatcggccggcggccgggtggtcgcgcccctcctcctgccggcctgcggccattccctcctgcagcccgtcccagctccgttcctcctctccggggcgcggctcccaccctctcccagtgagccagctgtgccagccccgggctgacccccaccgagagccggggctctgccttcgccggccgcggaaccgggctccactcagccctcagcccgcctccagggccccagagccaccaactggggccttggggattcacgagtcccccgtattcacggtaaggggccatccgagaagcccacagcagaggggcctccgtccgactccatctgagaccccctcctccgaggcatcccggggctgcagcccaccccgcccccagcctgccccggcggccactctgctcccagaacgccgggcgcccacctgccccgcagctcggccctgcgctcagccggctccgcgccgcctcccagcgcccgcctcccgcgcaggccacgcccccgccccgaggcccccgcggccggttccccgcgcgccactcccgcaacgccgcacgcgctgtgcgctgggcacgcactgacctccttgacttcagagcggtgacacgagggcccggactcctgctcaaaagccgcccaacacaggcccacgcgggggtgccgcgcccagcactggcgcgaggccatcgcc

SEQ ID NO: 349895 - DNA, 94 bp, Homo sapiens; identical to SEQ ID NO: 281876
  chr3:196755864-196755958
  hyper

SEQ ID NO: 349896 - DNA, 341 bp, Homo sapiens
  chr3:196756044-196756385
  hyper
aggggacccggcctccgtctccacctccatccctgcatgtgccagaaacccccgggcggactcccgcgcctgccggtcagtccctctgaatcttctcccgcgggggctcgggagaaagagctgctccgagcccccaaagtcttcctgagttcctgcgcccgtcgggaggggccgccctccgggagctcctctccacaccccgaggcctccccaccacgcctcagcccgcgcttctccttggagcgtcggaagcctcgggtgttcgaggccgcctcctccaagaagccttccagacttccccgtctgcgcttcagtgctagttccctccgccgtcctcactc

SEQ ID NO: 349897 - DNA, 643 bp, Homo sapiens; identical to SEQ ID NO: 331998
  chr3:197025639-197026282
  hyper

SEQ ID NO: 349898 - DNA, 210 bp, Homo sapiens; identical to SEQ ID NO: 199287
  chr4:331352-331562
  hyper

SEQ ID NO: 349899 - DNA, 69 bp, Homo sapiens
  chr4:1036539-1036608
  hyper
cccacacacccaccccacacaccaacacacacccacccatccccgcacaccgacacacaacccaccccc

SEQ ID NO: 349900 - DNA, 218 bp, Homo sapiens; identical to SEQ ID NO: 199294
  chr4:1332660-1332878
  hyper

SEQ ID NO: 349901 - DNA, 137 bp, Homo sapiens
  chr4:3767158-3767295
  hyper
cggggagcgccgatccaggatctggtccggaccctgagctcggcaggacctgtgcgcacgcaggtagcgtcgcgtcctcccccaggctgcgagaggttgctctgccatcaggccatggaccccgagccgcccgtgct

SEQ ID NO: 349902 - DNA, 275 bp, Homo sapiens
  chr4:3768207-3768482
  hyper
gcggtccccggcgggcgcgcccgagcagcaggcggcgatgcgggcgccgaccccggctggggggcgcccgagctgccgcggctgcgccccggctccaggagggacggcgtagctcgcgggaggaccatggcgtccccggcgctggcggcggcgctggcggtggcggcagcggcgggccccaatgcgagcggcgcgggcgagaggggcagcggcggggttgccaatgcctcgggggcttcctgggggccgccgcgcggccagtactcggcgggcgc

SEQ ID NO: 349903 - DNA, 174 bp, Homo sapiens
  chr4:3882250-3882424
  hyper
cccccaaggagctgttctgcccagatgctgagctgggagccgtccctcccccggccacacgcctgcaggtgacccccctgccccgccccgccaccaggcctgggcaccccaacctccacccctgccagaggcgcctgcaccgggttcctcctgcagatctgcaaactcacgccc

SEQ ID NO: 349904 - DNA, 978 bp, Homo sapiens
  chr4:4873696-4874674
  hyper
cgctcggcgtgcatggtgccccttaatcctcacaaaagtcgagcgacttagggaggaatattatcccattgcacacacgagcacactgctgcgcagaggcacgaaggtacctgcccagggtctcagctagtcccatttccaacccaggaaggcaagggagcaacccgggaagcaaaatgtaaggagacactttcagggttgtgcaagtgtggggtgggcacccggggagaagggaggagggatgaactatccagagaggaaggcacgcccggccccgacttatcggaataattgtctccattccgcttcggcggtgtctgttgtgtccattgaacagaagcagaacgtgagtccgtatctgcccctcgccaccgccaccagcacctgggatttgactcacacttcaattcctgccctaggaattgatgccagcgcccagtatggccccgcgtggggaatcgagcgccccatccctcggtgagggcttactctgagcctgagtctgtggcaggcccccccatagctactgtctgccttaatccacgccaaggcctctaaaggaaaacattgccttggttctttttcacagacgtgtcaactgtggaccagagatgtcaagccacgtgcccaaggtcaccaagcagtttctgggtgagccctcagggaatcctaaatcccgacccaaacccgggatttcccctcgccctcggggcctccaaggggagctgcgagaggcggggacgcaaggaggcgctgggaccagtttgctctgagtgctcctgctccggactgctccttggagaggcggggccttgggcagcagaatcccaagctcctcccggtgggaaatccggcagctcccgtctgagggtagggccagcagaccacctggcccagtaaactccaccggcttcgggggtggggagttggggcaggtgcgccccaggggctcggtatacaaagccatgcctgagccac

SEQ ID NO: 349905 - DNA, 145 bp, Homo sapiens
  chr4:5890606-5890751
  hyper
ggaacgttcttgtccctccaggatcgcgcccaaggaccgctcccctcttgcctctccttccatagcctccgtttatccttcccgagtgcctctccctgaatgcaccaagcactttttccatctcggaccccaagcctttattcac

SEQ ID NO: 349906 - DNA, 206 bp, Homo sapiens; identical to SEQ ID NO: 199329
  chr4:6201673-6201879
  hyper

SEQ ID NO: 349907 - DNA, 65 bp, Homo sapiens; identical to SEQ ID NO: 346630
  chr4:6202658-6202723
  hyper

SEQ ID NO: 349908 - DNA, 164 bp, Homo sapiens
  chr4:6473630-6473794
  hyper
cggagggcggcgcggaggagggcgctgccctgtgccggcgctgggcagcggaggccggtaccctcgggctccctccctcctgggccccgggcagggtgggatgggatggggtggggtggggtgggatggggtggggtggggtggggcggggggacacgacacac

SEQ ID NO: 349909 - DNA, 46 bp, Homo sapiens
  chr4:6474487-6474533
  hyper
tgctgggtgcgccacgggggagggaggaaggagaccgccagcttgc

SEQ ID NO: 349910 - DNA, 214 bp, Homo sapiens; identical to SEQ ID NO: 281997
  chr4:7194882-7195096
  hyper

SEQ ID NO: 349911 - DNA, 204 bp, Homo sapiens; identical to SEQ ID NO: 346631
  chr4:7940888-7941092
  hyper

SEQ ID NO: 349912 - DNA, 32 bp, Homo sapiens; identical to SEQ ID NO: 199335
  chr4:7941129-7941161
  hyper

SEQ ID NO: 349913 - DNA, 522 bp, Homo sapiens; identical to SEQ ID NO: 199336
  chr4:7941191-7941713
  hyper

SEQ ID NO: 349914 - DNA, 88 bp, Homo sapiens; identical to SEQ ID NO: 199339
  chr4:8201024-8201112
  hyper

SEQ ID NO: 349915 - DNA, 38 bp, Homo sapiens; identical to SEQ ID NO: 282004
  chr4:8201450-8201488
  hyper

SEQ ID NO: 349916 - DNA, 115 bp, Homo sapiens; identical to SEQ ID NO: 332040
  chr4:8609457-8609572
  hyper

SEQ ID NO: 349917 - DNA, 310 bp, Homo sapiens; identical to SEQ ID NO: 199344
  chr4:8894331-8894641
  hyper

SEQ ID NO: 349918 - DNA, 43 bp, Homo sapiens; identical to SEQ ID NO: 345134
  chr4:10458329-10458372
  hyper

SEQ ID NO: 349919 - DNA, 353 bp, Homo sapiens
  chr4:15780742-15781095
  hyper
cttaagtggtttgcaaagcctgtggtaggggaggagggtgtagaagggccaaaccacggaacttagttttattcatttatataaagcagcactccgattctttttgcgcggcctgaaatgcatgtgaccagagaagtaattaacaaaacaatgtcaacttctaaaaccgagacattacttagatgataaggcgcagcaactcggtgaatctgtacaaaccttggaaaaaaaacacattagtctatgggaccttccagttttctcatgctcctttccagctactaacctctcctaaagggaacaaccactttttggatttgattcccaggcctcgctttcaccgggaaattatc

SEQ ID NO: 349920 - DNA, 609 bp, Homo sapiens; identical to SEQ ID NO: 332064
  chr4:25863681-25864290
  hyper

SEQ ID NO: 349921 - DNA, 283 bp, Homo sapiens
  chr4:30720964-30721247
  hyper
cgtcgtctgagagggagggagaaggagaaacctatcctgacaccagctccgaaagctctcacgcgtgaactgggcattagtcaagggaggaggaaatttaccagcccgagggagggaaaacaagtcccccagagaagacggcggtactcgctagggagggggactgggctttggcttaaagaggactggctgggattgggcacactttgagcggcccctggagctgaggctgggctttcccgagcgcggcggctggctgacgctccctcccgcctccttatcc

SEQ ID NO: 349922 - DNA, 304 bp, Homo sapiens
  chr4:30721470-30721774
  hyper
ggcggcgggagcgcccgcaccagactctcccagacgcgaaaagggacgagacaactgcggaattcaccagccgtgccagggcacttccgaggccacaaccgactgacactttttctccccttggcaaactggatttttttttttaagctacttggcagctgtctctgactccacctccccctccacccccgcccgaaagcctttggcttttcttcggaaatccagacagaattgggcatctttgttaattgccgttggggacgcccggccgtgcgctttcgccggctaacgtcgcctgtgctcc

SEQ ID NO: 349923 - DNA, 201 bp, Homo sapiens; identical to SEQ ID NO: 282083
  chr4:30723862-30724063
  hyper

SEQ ID NO: 349924 - DNA, 90 bp, Homo sapiens; identical to SEQ ID NO: 282084
  chr4:30724126-30724216
  hyper

SEQ ID NO: 349925 - DNA, 785 bp, Homo sapiens
  chr4:36245423-36246208
  hyper
cggggcagcacagacacccgggcaaattcatgatctctaccgagtaaataacttggtgcctgaaactcactacagcttcttcttatttaaaggtaggggagaggaatggagggagtgtccagctgtctatccggatcctcaccctcccgggtcaaatcccagaagtggagttcttggatcacttaccggcttctggtttcctttcagacgcccacacgcgggagcgaaatccaaggggcggacaccagagccgagcactttgcgctgaggaaatttacccggtgaagtgtcgaaaagccccagcccctccagacagggtcctcccacccccgcgtgggccatcccggcccagccttcccgaggccccgggtactcgccttgcgctcgggtcgcggagttcgaaaagcgaggtgaggcggcgctgggaagctcagcgccggcgtctctcccagccttgggcgctcggtcctcgcccctctgccggaggcgccaggcctcctctttcccggtccccgccggctgtccgcagtcgcctctgctgcctggcggcggccgcgcgggcggcgctgttagtggggccggcgtgtcgcggccgccgcacctggaggcggggagcgcgggccgcggacccgcgctcagctccggaaacgccgagcccggcgcccgcgccttgctcaggtgctcccgcgcctcgcctcggccgccgcttcctctccgcccgcgggggcggggagcaggcgccccgcgcgggggaagccggagctcaacggcgggggcggcccagc

SEQ ID NO: 349926 - DNA, 131 bp, Homo sapiens
  chr4:36246257-36246388
  hyper
cgacttggccgcgcctggcaccctcgccacctggcgcacctcggcccggaggcgtcagaccccgctggggaagctgcgggggcgcgccctggagcccagagcgacaggggcattacccaccttcccgggac

SEQ ID NO: 349927 - DNA, 184 bp, Homo sapiens; identical to SEQ ID NO: 332074
  chr4:37978665-37978849
  hyper

SEQ ID NO: 349928 - DNA, 322 bp, Homo sapiens
  chr4:40632148-40632470
  hyper
cggccttgatggcagagattgggggacttgaccagacggacttctctccccgccccaaaagtcacatgcctttcagacacccagaagtggcacctgctccacctgggggcatctgtccgagtcagacgctcggcccccttcgggctgctccgagaaacccagccagaaccacgttggagaaattaggaacctgctgctgaatttcaagccgatcggaaccgccccgctccccttcttccccccataaacaagtcgctggacgaggtgggatctctgcgacccccgcgtgcccggggagagctcccggggcgagctcccgggg

SEQ ID NO: 349929 - DNA, 58 bp, Homo sapiens
  chr4:41746763-41746821
  hyper
cgtggactgcaattgaccccaatccaaagcagtgccaaaaagttcagtaaaagctggt

SEQ ID NO: 349930 - DNA, 1067 bp, Homo sapiens; identical to SEQ ID NO: 346638
  chr4:42657902-42658969
  hyper

SEQ ID NO: 349931 - DNA, 34 bp, Homo sapiens; identical to SEQ ID NO: 199402
  chr4:44449403-44449437
  hyper

SEQ ID NO: 349932 - DNA, 260 bp, Homo sapiens; identical to SEQ ID NO: 346640
  chr4:48271822-48272082
  hyper

SEQ ID NO: 349933 - DNA, 190 bp, Homo sapiens; identical to SEQ ID NO: 346641
  chr4:48272083-48272273
  hyper

SEQ ID NO: 349934 - DNA, 93 bp, Homo sapiens; identical to SEQ ID NO: 346642
  chr4:57687545-57687638
  hyper

SEQ ID NO: 349935 - DNA, 205 bp, Homo sapiens; identical to SEQ ID NO: 346643
  chr4:57687887-57688092
  hyper

SEQ ID NO: 349936 - DNA, 427 bp, Homo sapiens; identical to SEQ ID NO: 346644
  chr4:58029764-58030191
  hyper

SEQ ID NO: 349937 - DNA, 229 bp, Homo sapiens
  chr4:73433670-73433899
  hyper
cgggcttcaccttgagcctccaaagggttgggggcagggccgaaaagaaacagagctgcactcaacttagctttaaaaagaggaggagttgtgcagagggggaggggagaaggcggccggcgcctgcagcctctgcccaggaaaacggagggcaggaaacgtctccagcccccctccccaactgtcaaatcctagcccggccgtggtactcccaggacacgtgtctact

SEQ ID NO: 349938 - DNA, 125 bp, Homo sapiens
  chr4:73434163-73434288
  hyper
ggtgaagccctaggtgtgacaagactgggctcccggagtgggagtcgtaacctcccgtgcaactcaaccctctacccccaaaagcccgcacgctgcgcccagccctcaaaacaccgtttctgaac

SEQ ID NO: 349939 - DNA, 133 bp, Homo sapiens; identical to SEQ ID NO: 199452
  chr4:76555905-76556038
  hyper

SEQ ID NO: 349940 - DNA, 448 bp, Homo sapiens; identical to SEQ ID NO: 332121
  chr4:77610260-77610708
  hyper

SEQ ID NO: 349941 - DNA, 275 bp, Homo sapiens
  chr4:77818885-77819160
  hyper
cgcgtcggggtctcggagaaagctcttgaagtggctcagcaaggcagcgttggtcacgcggcccccagcctggcacagaaagtccagtagtgcctcctggctcagctctcgggccatcgctgccttgtcctccgccccagaggtgtctgagtctcgccctcccggggctctccccagccagaggaaaccctggccgggcgagtgtcacctgcgcccggggcggcactagccgcccccatcagccgcggaggccagcgctgcccgcagcccgtgag

SEQ ID NO: 349942 - DNA, 267 bp, Homo sapiens; identical to SEQ ID NO: 199462
  chr4:77819271-77819538
  hyper

SEQ ID NO: 349943 - DNA, 142 bp, Homo sapiens
  chr4:77819573-77819715
  hyper
cgatagaaggtccgttcctgtcctccggtgctttgatgagttcaggctgaagccgatgggggaggaggagaagctgcaagttaacaggcaatctgagttatctttctttattaacgctgtagaggagtacttcagatttctc

SEQ ID NO: 349944 - DNA, 780 bp, Homo sapiens; identical to SEQ ID NO: 332123
  chr4:80993254-80994034
  hyper

SEQ ID NO: 349945 - DNA, 233 bp, Homo sapiens
  chr4:82965099-82965332
  hyper
cggaagacccccaggcccgccaggggtccctgaggggacacaccctccacctacctcaaacatgggagaggcgcccttgctcggcaacgtgcagcccaggagctcggcgagaaactttgccatatacaagcggtgaggcagggtccctcccgatgcgccgtttctgtcctttccccttgccagagcccgagcgccaggatcctgcccgcagcccgcccgccagccggggccgt

SEQ ID NO: 349946 - DNA, 215 bp, Homo sapiens; identical to SEQ ID NO: 346647
  chr4:84457821-84458036
  hyper

SEQ ID NO: 349947 - DNA, 296 bp, Homo sapiens
  chr4:85419891-85420187
  hyper
actgggatgctctgctctttcggtcgcgcggctgattcgcattcgacgctcactgtgcccggggagaaagcgcatccagcccgcgggagatctagcctctgtgcgggcttcctccgcccacgctgccccgggctgctgcgccagaaagggcagtgccacggatccccgcggctcccaggtcctcacctccacccgccttgccctctggcccacggggcactggagttgcaatattgaaaagaaaaagggggaggaaaaacacagaaaaacaaaagactaagtgtgaaaagtctgac

SEQ ID NO: 349948 - DNA, 340 bp, Homo sapiens; identical to SEQ ID NO: 199484
  chr4:87813080-87813420
  hyper

SEQ ID NO: 349949 - DNA, 313 bp, Homo sapiens
  chr4:87813512-87813825
  hyper
acacgcctcggggccgcgccgcaggcacacgcctccttcccgctcgccgcgggcgccgagtctggggctcctcgcgtcacacgggagcctcaacaaagggctttgtggggccctccccacccgccagggaggggacgccgggcccgggagacgcgccccgcggggtccgctctctggtaaccgggccggggcaggccgcgctctcggaatccagccaaccagccagagagggctgtaagccagacctttcctgggaaggacgctttccaatgtagggggctgcatccaagcgatctggacttcgtttgcgggc

SEQ ID NO: 349950 - DNA, 47 bp, Homo sapiens
  chr4:94753232-94753279
  hyper
cgccaaaaagaaaaggaaagcgccacaaactgggtttgcagaaagag

SEQ ID NO: 349951 - DNA, 33 bp, Homo sapiens
  chr4:94753547-94753580
  hyper
atcaagcgattgcttctaacacatttccatttc

SEQ ID NO: 349952 - DNA, 60 bp, Homo sapiens; identical to SEQ ID NO: 199502
  chr4:95678999-95679059
  hyper

SEQ ID NO: 349953 - DNA, 314 bp, Homo sapiens; identical to SEQ ID NO: 282348
  chr4:95679325-95679639
  hyper

SEQ ID NO: 349954 - DNA, 63 bp, Homo sapiens
  chr4:95679745-95679808
  hyper
acccagccttgccgtgggggaaagtgcgcagcgggctggtcccggcgccttggactgggctcc

SEQ ID NO: 349955 - DNA, 134 bp, Homo sapiens; identical to SEQ ID NO: 345137
  chr4:100729543-100729677
  hyper

SEQ ID NO: 349956 - DNA, 258 bp, Homo sapiens; identical to SEQ ID NO: 345138
  chr4:100867945-100868203
  hyper

SEQ ID NO: 349957 - DNA, 692 bp, Homo sapiens
  chr4:103997179-103997871
  hyper
cgccaacaccttacaacagtaaacagacacgcgcccgtcaccgggtgtacaaacagaaaaggctgggcccctcgctcgcgtctccggtccagcaggcctacagggtacccgccgctggcgctgggtttatttttacccttagtgtctctggggcctctcacctggcagtctccggcgaagtcgaccaggctccgtctgaacgattaggaaaggggctgtgggggaggcggcggagcccggtctagccaccgcgctctggggttcccgattcgcgcatcttcccaggctgagccgggaggctgcgttgactgcagataaacggtctcagggcgcggcaccgcgtgtagtcggccccgcctttcgcacgaacccgctgggcgacaccgcgcagggaggtccgacccgtcggcgccggtacaggctccggagtaagcatgggttggtccggggcccgcagcggcagccccgtgtgccctccgccgggtttcaggtccggcggcgcgggtgcagagccgcgtgcgatgcctggtgcgcgtggcttcccccggaaaggtggcgccaggccgaccatgggcccacgtcccggggcctcggagcggcaccgcgcggtctttcagctgcttatcctccctgggcgggtccgcaggcttctggggccaggaccagcgagctcccgggaaagcttcccggaa

SEQ ID NO: 349958 - DNA, 269 bp, Homo sapiens
  chr4:106067220-106067489
  hyper
gatagagacgcgggcctctgagggtaaggtgggcgcaagcggaggtgtggtgcggggagaggtgccagtgggtggaggcgggggccagagcgagggcacgtgcgggtacactccggaggaggtgggtgcgcgcgggggcgtgtgcgcgggacctcgaagtggtggtggagtgcagaccagcaaaaagtttcaaagggaaatcttagatgtcacgtctttgtccaggcacccgtgccatcccaacctcccacctcgcccccaaccttcgc

SEQ ID NO: 349959 - DNA, 501 bp, Homo sapiens; identical to SEQ ID NO: 332165
  chr4:110481822-110482323
  hyper

SEQ ID NO: 349960 - DNA, 232 bp, Homo sapiens; identical to SEQ ID NO: 199554
  chr4:111543735-111543967
  hyper

SEQ ID NO: 349961 - DNA, 47 bp, Homo sapiens
  chr4:113432609-113432656
  hyper
gcaacactgagagtctgtgtctgtcaccggaagaaaatctccacagc

SEQ ID NO: 349962 - DNA, 299 bp, Homo sapiens; identical to SEQ ID NO: 199559
  chr4:113435475-113435774
  hyper

SEQ ID NO: 349963 - DNA, 242 bp, Homo sapiens; identical to SEQ ID NO: 199560
  chr4:113436585-113436827
  hyper

SEQ ID NO: 349964 - DNA, 228 bp, Homo sapiens; identical to SEQ ID NO: 199561
  chr4:113438278-113438506
  hyper

SEQ ID NO: 349965 - DNA, 157 bp, Homo sapiens
  chr4:113442552-113442709
  hyper
cctcttctttcccacgaaggaaagaaattaccgtaggagattttgccaatccatgccagctttctgattgttttcttcaggtaaggggaaaagaacagccagcgcgtgaatggagagctgagggcccactagggagagaacctcttccccacccttc

SEQ ID NO: 349966 - DNA, 80 bp, Homo sapiens
  chr4:113444864-113444944
  hyper
cgaggtgtcagcagtaatttaaagaaggtattcagtccgccagcgtctcttttctccgtttcccccttccacccctccca

SEQ ID NO: 349967 - DNA, 115 bp, Homo sapiens
  chr4:113445444-113445559
  hyper
caaaacacctcccctagggttctgatagttgccaagtttaagaacaaccggatttaagccccacgggtttcgttttcttttgttttgaggatttagcaaatcagctagaagtgac

SEQ ID NO: 349968 - DNA, 105 bp, Homo sapiens; identical to SEQ ID NO: 282450
  chr4:113627471-113627576
  hyper

SEQ ID NO: 349969 - DNA, 215 bp, Homo sapiens
  chr4:115520945-115521160
  hyper
tgtgtgttttggatttgaaggaggcaaaccgcatcggagagtgcaagtagatgcagtgcgtcggggcaaaaggacaatctgaggaggtgggcggggtacccaatctctatatacaagctttctggtttaattgagggtttataaaattgagtacggtaaacctgccattgtgcagcacttccttaggaaaggaatagcctctgtacctgtaccgc

SEQ ID NO: 349970 - DNA, 108 bp, Homo sapiens
  chr4:119273336-119273444
  hyper
cgtccggagtttccgcggccgccccgaggccactaaccgtgtctgcagtcgcagtagccccagtccaccttgccacgggcgtctccgtagaaacaccagggtctgccc

SEQ ID NO: 349971 - DNA, 222 bp, Homo sapiens; identical to SEQ ID NO: 199571
  chr4:119273515-119273737
  hyper

SEQ ID NO: 349972 - DNA, 201 bp, Homo sapiens; identical to SEQ ID NO: 199572
  chr4:119273903-119274104
  hyper

SEQ ID NO: 349973 - DNA, 234 bp, Homo sapiens
  chr4:121992978-121993212
  hyper
cggatagggcgcccttgagaagcttcttgggccttgaagatttgggggcgcgtgcctcgagcccccatctcggatgacccttcgggcgtgaacgctccttgtgctaggtctcagggtggcgggctaaggcgtcgggtctctggggcattgctttcctctccccacttaccttaaaaagatctgtttttcgtagggaaaatagaaaaaaatccctccccgtggtgtggtgtgcga

SEQ ID NO: 349974 - DNA, 114 bp, Homo sapiens
  chr4:121993736-121993850
  hyper
tcccagccctaacccctcccgcctcaccgctgcccgcccgccccctccctcctctgcccgttgcctccccctccgtccctccttctctccctcccgctgcgcgccagcgcgcac

SEQ ID NO: 349975 - DNA, 70 bp, Homo sapiens
  chr4:123747655-123747725
  hyper
cgtggtttgggtggtgcgggggttgggcgggggtgacttttgggggataaggggcggtggagcccaggga

SEQ ID NO: 349976 - DNA, 761 bp, Homo sapiens; identical to SEQ ID NO: 346652
  chr4:124317751-124318512
  hyper

SEQ ID NO: 349977 - DNA, 149 bp, Homo sapiens
  chr4:129210000-129210149
  hyper
cgcactcaactcgtttgacgaactcgtttgacgtgttctctcttgccctttgttgtctgttgtcttgagtctcatagaataggtttgaacctttcactgtcggttttgtaggagtcactgaggatattgacgaggcaagtgacagggtc

SEQ ID NO: 349978 - DNA, 136 bp, Homo sapiens
  chr4:140970253-140970389
  hyper
cgcatctgctgctctgtgattgcacaagagaagctaccactccttttcttcacaaagaaaaaaaaatggcatttatcgcaagtacagcaaggcatattaggattcacctcccccattctttcttccctcttcctcc

SEQ ID NO: 349979 - DNA, 212 bp, Homo sapiens
  chr4:140970419-140970631
  hyper
ttggaaaagaaaaggtgggagggagaggaggacccaccggtcacagacaacgctgtgggattctctttcttcagcttttaccagcctatgggggtcaggatgctattggttcagctttatgtgtgatatggtgcctctcacttagcaacagcgagcaggagaggcaggaagcaacgccacctggctcagcaagtgtgcggatggtttaaaac

SEQ ID NO: 349980 - DNA, 352 bp, Homo sapiens; identical to SEQ ID NO: 345141
  chr4:141293964-141294316
  hyper

SEQ ID NO: 349981 - DNA, 103 bp, Homo sapiens; identical to SEQ ID NO: 199607
  chr4:141294418-141294521
  hyper

SEQ ID NO: 349982 - DNA, 88 bp, Homo sapiens; identical to SEQ ID NO: 199608
  chr4:141294545-141294633
  hyper

SEQ ID NO: 349983 - DNA, 40 bp, Homo sapiens; identical to SEQ ID NO: 345144
  chr4:141295287-141295327
  hyper

SEQ ID NO: 349984 - DNA, 88 bp, Homo sapiens
  chr4:141489128-141489216
  hyper
gacctggaaataagaaaggtgcagaacagaagggagcgaaattgagttcactcttaagccaagatttccccctgtgttcctattttcc

SEQ ID NO: 349985 - DNA, 824 bp, Homo sapiens; identical to SEQ ID NO: 332200
  chr4:142557243-142558067
  hyper

SEQ ID NO: 349986 - DNA, 192 bp, Homo sapiens; identical to SEQ ID NO: 199617
  chr4:143767433-143767625
  hyper

SEQ ID NO: 349987 - DNA, 194 bp, Homo sapiens; identical to SEQ ID NO: 332204
  chr4:146098925-146099119
  hyper

SEQ ID NO: 349988 - DNA, 270 bp, Homo sapiens; identical to SEQ ID NO: 199627
  chr4:147560617-147560887
  hyper

SEQ ID NO: 349989 - DNA, 260 bp, Homo sapiens; identical to SEQ ID NO: 332209
  chr4:149362760-149363020
  hyper

SEQ ID NO: 349990 - DNA, 223 bp, Homo sapiens; identical to SEQ ID NO: 346657
  chr4:149364661-149364884
  hyper

SEQ ID NO: 349991 - DNA, 438 bp, Homo sapiens; identical to SEQ ID NO: 282569
  chr4:149365430-149365868
  hyper

SEQ ID NO: 349992 - DNA, 42 bp, Homo sapiens; identical to SEQ ID NO: 346659
  chr4:149365911-149365953
  hyper

SEQ ID NO: 349993 - DNA, 410 bp, Homo sapiens; identical to SEQ ID NO: 346660
  chr4:150999731-151000141
  hyper

SEQ ID NO: 349994 - DNA, 124 bp, Homo sapiens; identical to SEQ ID NO: 346661
  chr4:151000581-151000705
  hyper

SEQ ID NO: 349995 - DNA, 113 bp, Homo sapiens
  chr4:152246019-152246132
  hyper
cggcgcaggcaaacccctcggaaggtgtcgttgtccaccgagacggccattgacctctgactcatccagagataagtcatcaaccaggccacaagtcccaagccagcagctcc

SEQ ID NO: 349996 - DNA, 178 bp, Homo sapiens; identical to SEQ ID NO: 199640
  chr4:152246314-152246492
  hyper

SEQ ID NO: 349997 - DNA, 469 bp, Homo sapiens
  chr4:152246542-152247011
  hyper
gctgcggccccggcgccccagaacgcctgcacccggcgccccacgccaccgccctcgggccggggggaaggcggctcccggagaggaggcgtcggcggcggctgtggaaatggccacctccgcgaactccacctgcagccggccgggcagcggcagggcgcgggccgagccgattccccgcctccttgcggcgtcccggcggcctcttaatccctggcctttcccactcccactcccgctctcttcccccttcctctttgccttccccgccccgtagagctccaccgcggatcgggcgggttcggggctggcctcgcctcctcagggaggggttatcggcccctaaggccgccccacagccacacacgctggaaacaccagctcgacccaaacaaacgtgtgcaaaataaataaacgggataggaagaggggaaagaggaggtggcctggcctcttcctgccttttcac

SEQ ID NO: 349998 - DNA, 190 bp, Homo sapiens
  chr4:153600941-153601131
  hyper
cggcagagttctgtagcctcgggcaccctaccagcttttgcgatcctccttcccaggagtaggaagtggaggcggcttaccccggccgacgggaacgagcgcgatcaccagggcgaagactagggctgcgcggggagcctgcatgtccgctcgcctcggcagaggcgcgctcaggatgctgcgccgggct

SEQ ID NO: 349999 - DNA, 261 bp, Homo sapiens
  chr4:153601161-153601422
  hyper
tttcctgcttgtttgggtcggtgctgacttgaaggagaggtgtgtgcctgttttttaggaagtgatgtaattctgcaggagcctgtcagaccagcaaggattgcaaaagagaagttgctgttgaagcactggttctattatcacgcctctccagccctttggagtcccggcctccagcttttgaaaccgtccccggggcaacagagtcccttgctcagatgtcgttcggtatctgggactgggaggggtcctggaccacac

SEQ ID NO: 350000 - DNA, 177 bp, Homo sapiens; identical to SEQ ID NO: 332215
  chr4:153856957-153857134
  hyper

SEQ ID NO: 350001 - DNA, 45 bp, Homo sapiens; identical to SEQ ID NO: 345146
  chr4:154143770-154143815
  hyper

SEQ ID NO: 350002 - DNA, 213 bp, Homo sapiens; identical to SEQ ID NO: 199648
  chr4:154144184-154144397
  hyper

SEQ ID NO: 350003 - DNA, 192 bp, Homo sapiens
  chr4:154714010-154714202
  hyper
tgcccctcatcttaggaagagtctagtctgagaacaaacagtttgccaactcctaccccgagctcttgcgcgtatctccttaaatatttcaagggtctgggccccagatgggtgctcggaaagcaaacgaagggtccagggaggccgaggccaacgcggagctcagcgcccccttcttgcctgaaggggcgc

SEQ ID NO: 350004 - DNA, 40 bp, Homo sapiens
  chr4:156298073-156298113
  hyper
gctcttcggcccaacgtgtcgctggggcaaccacccagac

SEQ ID NO: 350005 - DNA, 42 bp, Homo sapiens; identical to SEQ ID NO: 282611
  chr4:158141450-158141492
  hyper

SEQ ID NO: 350006 - DNA, 155 bp, Homo sapiens
  chr4:165304258-165304413
  hyper
cgtctctctgcctcgactggtcactccacttcctggagctccagaaactccctcagcacctggataactgcgacactcacccgtgagcgcaggaccctcctggcgtcttaagtcccagctctcagtcccgctggccgcaggaacacaatgacatc

SEQ ID NO: 350007 - DNA, 677 bp, Homo sapiens
  chr4:169752829-169753506
  hyper
cgctgccctggagtcgcgtttattggacactctttagtctgtaaaggaaaaaaacacaaacaccggaggagaatcatcctaacaagccgacaacatatctatgggcctaaaaaacttaaattctttcccgttattagcacttctcgatcgttccaggaaagcccgatttgtagcttggctgccccaggaaggggcctgcgaccagaaagatgcaaagggcgggacaaggttacgagtgggtgcggggaagcctccctaacctgggggccgcgtcccagagctgcgagccacgcctcctctctcccgcccgccgcgccgccggactcttattttgaagggcggcgggtgaaggctcggagcctcctgagtcacccggcgggcgaggtataaagcccgatacctgccccgcgcccggtccgcggagcccgctgcagctcccgctcgctccggacgcggaatcgggcagcagcgggaggcggcccggagagccgaggtaggcgcggggaatcggccctgaggctggtggaagaaatgtgtgaattaaagggagtgcagcgtgcagggtgggccgcgagtcgggagtgcagggctcgggacagggtgggggcggggaggacaagagactcgtcagcgcactttccacccggccggttccttcccgagccctctccctcccc

SEQ ID NO: 350008 - DNA, 439 bp, Homo sapiens; identical to SEQ ID NO: 282635
  chr4:169753535-169753974
  hyper

SEQ ID NO: 350009 - DNA, 102 bp, Homo sapiens; identical to SEQ ID NO: 199680
  chr4:170947173-170947275
  hyper

SEQ ID NO: 350010 - DNA, 171 bp, Homo sapiens; identical to SEQ ID NO: 199681
  chr4:170947867-170948038
  hyper

SEQ ID NO: 350011 - DNA, 426 bp, Homo sapiens; identical to SEQ ID NO: 199682
  chr4:170948089-170948515
  hyper

SEQ ID NO: 350012 - DNA, 999 bp, Homo sapiens
  chr4:174090080-174091079
  hyper
cggacgacccaagcccgctgagcaggatgagggtgagtgacccgcccggccccctccggcggcagcgaccggcaacttgttttgtttgcccgcgtgtggagggagcaggggcggcggggtcgcggcacggcgtgggcaccgcagctccgcaggtggtgctggcgcagcgcgggccgagggggtgccgagccccgcgcactccgacctccctggccgccgccggcccgccccctcgccgccccttcctccgctcttccccgccccgggctccgtcgccgacacccgcgctgccgcggcagcggctcgggcggccgctctccgcgccgggactgcgggcggagcgggcggagagccgggtccggggggctgcggccgcccggcgtcccgctctggggggccgggaccgcagcgctcacggcccggggacgcggggttggtccaggctgcggcctgtggcgcgtgcaggcctgaaggaggcgagatgccgatgccgccaccgctggtccggtggaccaggccccttggtccagcctcccctcccgcagccgcccgtctgggggtgttcgcagccccgggctcccccggcccgcccgccggggagtgggagggcgatggcgccccgcctccggctcttacggagagcgcgcctccccctcaactccggcggcggggagccggggtgcgatgcgcggccgaggcctcgcccggaccgccggtccccctcgcgtccctgggcgagggaggggcggttggccggagatggcggaggggcgtccccgccccgcctgcccgccgcccccagccctcagcgcctggggaagcccctgctgtggcagtgctcgggcgctatccgggggaagaggagcagttcctcttccttggctgcggcagggctgcttgggccggaaaactaacttgtgtcggcgcccggccgccccgcgccggctgccggctagctcaggccgacgccgaggggagcggcggcgcggagctcgcggc

SEQ ID NO: 350013 - DNA, 126 bp, Homo sapiens
  chr4:174443425-174443551
  hyper
cgccgattacacccaactcggctgggatggctccgagccgtctgccctgacgtcagcgaggctccggccccgccgcggcaagataggcgagcgcggccgggcgcgggtgcggcactaatcactccc

SEQ ID NO: 350014 - DNA, 126 bp, Homo sapiens
  chr4:174458996-174459122
  hyper
cgactctaggcaccccacgattagctgagtgatctagggcaaggacctaggcgtctctaagtcttagtttccccatctgaacaatgtggataatgacacgtacctggggtgggcaggctagagtaa

SEQ ID NO: 350015 - DNA, 71 bp, Homo sapiens
  chr4:175750738-175750809
  hyper
agcagtaaacccagaccctggcggagggctggggaagagaagacaatgtggtgcgtgaacgcccgtggaac

SEQ ID NO: 350016 - DNA, 68 bp, Homo sapiens
  chr4:176922585-176922653
  hyper
cgctcttcgaggtgactcgtgggaccctgcgtcctagtgctgggtgtgaatcggctatttcacaccca

SEQ ID NO: 350017 - DNA, 42 bp, Homo sapiens; identical to SEQ ID NO: 345148
  chr4:176986744-176986786
  hyper

SEQ ID NO: 350018 - DNA, 268 bp, Homo sapiens; identical to SEQ ID NO: 332264
  chr4:183839058-183839326
  hyper

SEQ ID NO: 350019 - DNA, 206 bp, Homo sapiens; identical to SEQ ID NO: 199699
  chr4:184019900-184020106
  hyper

SEQ ID NO: 350020 - DNA, 365 bp, Homo sapiens; identical to SEQ ID NO: 199701
  chr4:184718835-184719200
  hyper

SEQ ID NO: 350021 - DNA, 157 bp, Homo sapiens
  chr4:184719413-184719570
  hyper
gtcccattcccggtgcgccgcccccgcctgcccgcgggagcctccccggtggcgggcggtgcctgaggccggccaggtgggcgccgcggctcggcgggcggctcggagggcgcggcgctcggggcgcgtgagtgtccccctcccggcactgctccgc

SEQ ID NO: 350022 - DNA, 182 bp, Homo sapiens; identical to SEQ ID NO: 199719
  chr4:187647457-187647639
  hyper

SEQ ID NO: 350023 - DNA, 393 bp, Homo sapiens; identical to SEQ ID NO: 199720
  chr4:187647669-187648062
  hyper

SEQ ID NO: 350024 - DNA, 239 bp, Homo sapiens
  chr4:187648119-187648358
  hyper
gcgcctggagccgcctggagccccgctgcgcgcacttccccggctcgcggagcccctccggcggcgtttcccacgccgcggactgcaggtgatgctcttcctcttctgcagccgaaattcgtcgcgatgtgtcgcctgccagatttttgctgggcggaagcatgaacagtctctgcagactggcctggacgacttgtactttgtggccctccaacttctggatgtgaattttttttcac

SEQ ID NO: 350025 - DNA, 1300 bp, Homo sapiens
  chr5:472600-473900
  hyper
cgggcgacctccgcgccaggtgcgacagctcaggccggagacctcgtctgtggggacgggccgtgtccggggccgccaccctgagaccgggcgcgggcaggacggaacctgggggggaaacggggcaggtactggctttaggagtctaaatccccaaacgctgagcagacggaagacgttcctgccactttacctgcagttcaaagacctggcgagggcctggaaacggcgctcggcccaggccgcttgcgggcgctgggcctgcagccgctgcaggtcgggccctgagtcctggcgctcgggaggtccctgagtcggtccccgagtcagtccccgggcgcggggctcggttgggggggcccggaaccttgggctggtttcacgcaaatccgtttggggcgagcctcggtttcccggcagcggtgggaaagggcgcgagcggccagccatggcgcgcggacccttcccgccggcggcgtcacagcggcgtctcctcctgctccagcgcgtgcggcggtgcgtggcacgagggcggcagcgacgccagcttcagcagcgcggggcggcggcgcgcgcgaggccgctggaacgagcgccggctgtgcacgcggcgcgccgccgccgaacgcgcgtgcgcactcggcagccctcggcgctccggccccgcccccggcgcaggccccgcccccggctcgccctcgggcggctctgcgggcgcaggcgcggcactctcggagttctgcgcaggcgctggcgtgggcgaggcggggctcggggctcgcggtcgctgtagccgcgcggggatctggggtttctctgggacagcggcggcggcggtgggcggaccgtggcgcggggacgagcggccggttagcggcgtgtcggagccggtgtcacctgcgggagaggaaggcgtgagcggcgcgcggagcccgggcgctggggcgggaggggcgtccccgggggcctcagctgtccccgagcccggcggctctcgcctcccctcccgcggcgcaccccaggctcggcgtccgctggggcctcctcccaggacccgggttcgcggggcagaggcggaagcagcaacagcgaagccccagcccggccccgccacgtccccccgccgggggtcccgggacagcggcctcctcggcgcaggaaggtcccgccccaggccctgcagcgcgggaggtcaaggtccccaaggggacctgcttcctccatctcaaaccgccctggcgtcccccgggtgcctcccaggcccccagagggagctcagaaagcccagaccccacggccc

SEQ ID NO: 350026 - DNA, 74 bp, Homo sapiens
  chr5:523704-523778
  hyper
cgaccgggattttctaaaaaaaaaaaaaaaaaaggaggcccgccaatgggaacgctgcgcctgtagggaggatt

SEQ ID NO: 350027 - DNA, 258 bp, Homo sapiens
  chr5:676510-676768
  hyper
cgctggcgccgcagaggtgggccccacagccttccacacaggggcatctgacccacggcccggccccttgcaaagccaaggccgcagagggggaaggtgcaggagctctgagatgaaagaggtgatgagtttgcggcaatgtaggaatgaaatacatcggccacaggaggacgcaggtgcaaaccaccgaaataaagccattgccacacaggcggacaggacggggctcagggagaaccgctgcttttctcgggtgcg

SEQ ID NO: 350028 - DNA, 356 bp, Homo sapiens
  chr5:676926-677282
  hyper
acacatgcacacatgcgcacacgtgcacacacgacacagaaacgcgcacacacgacgcagaaacatgcacacacgacgcagaaacgcgcacgcgcgcatacacgacgcagaaacgcacgcgcgcacacgacgcagaaacgcgcacacgtgcacacagaaacgcacacacgacgcagaaacgcgcacacgtgcacacgcagaaacgcgcacacgtgcacacacgacgcggaaacgcacacacgtgcacacagaaacgcgcacacgtgcacacgacgcagaaaaagcaaacggcacgatgcggtttcaaggtggtggccggagccgcctccttggtgccctttgccattttgccgccc

SEQ ID NO: 350029 - DNA, 116 bp, Homo sapiens
  chr5:1009142-1009258
  hyper
cgcggggcccggcggggcgtggcggcggcgatggggaaactgcagtcgaagcacggtgagccgcgggccggtagggcgggagggcgggcgggcgggcgtggggccgcctctcactg

SEQ ID NO: 350030 - DNA, 151 bp, Homo sapiens
  chr5:1009625-1009776
  hyper
gcggccgcaaaggcgcggaggaagcggagcggcgcgcgcgggacaagcaggtaggcggcggggcggaggctggggtcgcgctgcgcacccgcccgggggcggggagcggtgtcagagctgttcctggtgcccgcccgcggacaggcgagac

SEQ ID NO: 350031 - DNA, 860 bp, Homo sapiens; identical to SEQ ID NO: 332282
  chr5:1064412-1065272
  hyper

SEQ ID NO: 350032 - DNA, 315 bp, Homo sapiens; identical to SEQ ID NO: 345152
  chr5:1645162-1645477
  hyper

SEQ ID NO: 350033 - DNA, 286 bp, Homo sapiens; identical to SEQ ID NO: 345153
  chr5:1874606-1874892
  hyper

SEQ ID NO: 350034 - DNA, 70 bp, Homo sapiens
  chr5:1877239-1877309
  hyper
agaaagtttaaaatctaatcaaagaaatccctattttttcaaacttctagagttgggtgatgggaagtac

SEQ ID NO: 350035 - DNA, 39 bp, Homo sapiens
  chr5:2743466-2743505
  hyper
cgggcgcgggaggcagcgcccgcgccggccgccgggcaa

SEQ ID NO: 350036 - DNA, 96 bp, Homo sapiens; identical to SEQ ID NO: 346675
  chr5:3121996-3122092
  hyper

SEQ ID NO: 350037 - DNA, 83 bp, Homo sapiens; identical to SEQ ID NO: 346676
  chr5:3122204-3122287
  hyper

SEQ ID NO: 350038 - DNA, 32 bp, Homo sapiens
  chr5:6583144-6583176
  hyper
cgcttctcgggcgtcggggctcgccgcagtca

SEQ ID NO: 350039 - DNA, 468 bp, Homo sapiens; identical to SEQ ID NO: 332309
  chr5:10354870-10355338
  hyper

SEQ ID NO: 350040 - DNA, 170 bp, Homo sapiens; identical to SEQ ID NO: 345154
  chr5:10564301-10564471
  hyper

SEQ ID NO: 350041 - DNA, 147 bp, Homo sapiens
  chr5:11385588-11385735
  hyper
acctgtgtttgcttacatgtagatgttatttcggaaatagcagaagcatcgcattagtcacataaagatttttaaagccccaccccgacagggcaatcatgatctccctggtcgcaatcacaatctgtttgttttaatgagaaattc

SEQ ID NO: 350042 - DNA, 73 bp, Homo sapiens
  chr5:11903295-11903368
  hyper
cggcgctttctggagcctggctgtctattgtcagcacgcagaagcccccgaaacctgtgaagccggctgcaaa

SEQ ID NO: 350043 - DNA, 125 bp, Homo sapiens; identical to SEQ ID NO: 332315
  chr5:14205146-14205271
  hyper

SEQ ID NO: 350044 - DNA, 252 bp, Homo sapiens
  chr5:16934300-16934552
  hyper
cgctgtagcgcgttatcctgatgttccccccacttgcactagggggcagagttctccccaagggggagccacggacccctgtggtgctcagacaggctacaggaggagtgagatccgtgcaaactgaatacaaatttctatattttcatcagattttctaagggacccagaacacaaaaacaacaaagttaagaatcattgccctaggggcagggcctccgttttcttacagatgcaagcaattaaacaccg

SEQ ID NO: 350045 - DNA, 43 bp, Homo sapiens
  chr5:16934582-16934625
  hyper
actggacaacgtgcaactcttgcagaaagttctggtgcctttc

SEQ ID NO: 350046 - DNA, 91 bp, Homo sapiens
  chr5:16935792-16935883
  hyper
cgccttccagggcttaggaaaaagtacccagggcgcgcggcgtggtgggcagacgcctctctccctgggctccggaggccaggtcggactg

SEQ ID NO: 350047 - DNA, 33 bp, Homo sapiens; identical to SEQ ID NO: 199774
  chr5:16936321-16936354
  hyper

SEQ ID NO: 350048 - DNA, 70 bp, Homo sapiens; identical to SEQ ID NO: 199775
  chr5:16936514-16936584
  hyper

SEQ ID NO: 350049 - DNA, 235 bp, Homo sapiens
  chr5:16936833-16937068
  hyper
tgccggggctgcggggccagatcaaagcggaagacggaggctaatcagaatttctggaagctgcattcccgtgttgactttctgtcctgcagtcgggtttgcttaagacgtttgcgtaacagcggggaaatgtagttttgaaactggaaggggacgtggccaatatcacctttaaaaatgtaacccttttctagacctcaaggaagcagagatggcagatggcactgagatggac

SEQ ID NO: 350050 - DNA, 52 bp, Homo sapiens
  chr5:17217629-17217681
  hyper
cgggaggagggaggctgggcgggcggacgcgcggggggagggcactgggcag

SEQ ID NO: 350051 - DNA, 187 bp, Homo sapiens; identical to SEQ ID NO: 282827
  chr5:22853256-22853443
  hyper

SEQ ID NO: 350052 - DNA, 100 bp, Homo sapiens
  chr5:22853569-22853669
  hyper
tcattgagtagtgaaaagtaattgaatcctatatttgaaatgtattttgtttgttctttttcccccctagcgttcattgtagaatgctttgaatgaatcc

SEQ ID NO: 350053 - DNA, 478 bp, Homo sapiens; identical to SEQ ID NO: 346679
  chr5:31854462-31854940
  hyper

SEQ ID NO: 350054 - DNA, 131 bp, Homo sapiens
  chr5:34655742-34655873
  hyper
cgttcccatgcgcaatctcgcctgtcagttcaggctgtaggtttctcctttctaactcctgagcagaacaacactgaacggtggtagtcttgccttgccacccaatgagtgctagaaaacagtcacttcaa

SEQ ID NO: 350055 - DNA, 441 bp, Homo sapiens; identical to SEQ ID NO: 199790
  chr5:34655910-34656351
  hyper

SEQ ID NO: 350056 - DNA, 221 bp, Homo sapiens; identical to SEQ ID NO: 199791
  chr5:34656421-34656642
  hyper

SEQ ID NO: 350057 - DNA, 46 bp, Homo sapiens
  chr5:34657034-34657080
  hyper
caatccgcctcccggctgaacttggaggaggtggggagggaggtgc

SEQ ID NO: 350058 - DNA, 747 bp, Homo sapiens
  chr5:36744888-36745635
  hyper
cgtcccggcagctggcccctgggcacggcccccagcccggcgtcccagttccagccgcgctgcaggggcgcgagggtgcccggctcgcaggtgtccgcgcgcaccgcagggctgcccgagtgcggctggcggaatccctccccagctggggaggaaggcagttgttttcttcctggtggaacgttccacttgaaactgttccacaagggctgttctcgcctccgactccgggaggaactgtaattaacacagcaacaaacgcccacgacgctaactggcaaagggagtgtaacacgagccgctgctacaaccgaactgggccaattgctttcccttcttgcctcccatttggtctgttttggttccgcagtcatccaactgtagcgtttcttaaaacatgtcagtggctggtgtttgtgttttgggttgaacagtttcacacacgtcgctggagcccgtgctcgaccagctgctgtgctggggatttgctttctgcggctttgggagtgtcaggtagcaaaacgaagagagtagtcgactagaacggtggcggggaggaggaggagggattgtctgcagtggagtcgggagcctcctccggaccaggacaggtaaaaccggtctgccaggtctcagggggagcgggtggagacgtcccacctcacctggctgcgctccgactcaggctcagccggcaggttctggggcaatgggggaagggagaggggccgggcccttgtgggtccc

SEQ ID NO: 350059 - DNA, 100 bp, Homo sapiens
  chr5:38556107-38556207
  hyper
cgaaatcacctggcaggtcacctctccgaaggaaaaacatttcaagctccctcccatcccccaggtaacctctggcctcagaactcactgccctgcgtgg

SEQ ID NO: 350060 - DNA, 85 bp, Homo sapiens; identical to SEQ ID NO: 199802
  chr5:38556985-38557070
  hyper

SEQ ID NO: 350061 - DNA, 336 bp, Homo sapiens; identical to SEQ ID NO: 199807
  chr5:40680627-40680963
  hyper

SEQ ID NO: 350062 - DNA, 462 bp, Homo sapiens
  chr5:41510373-41510835
  hyper
cggcacgcgctcgcctggcctgagacccaccctggaagacgagtttccctcccgcgggcatcgtggcaagttaccacttagtggcagataaagcagggcggggcaggtggagcgggcgccgagcgcctagcccgcagcccctgcgcgcctacctggaatggctaaattggtgagggggatgctgtgcatgctctccggcagagttgccatccagtcggctaatttcagctcgtttttcccctgagacgaggccatcgtgccagtcggcgtgcagcgcgctggtcccagcactcctcgggcaggctggcaggctgctgccgctaatccaatgtttgctctagccccgctagagtttacactcctctctgcgccacacccacaggatggcgcagacacatgctaattttaataattattcaaaacaccccgtgctcccttagtgcctccgccagactccgctgg

SEQ ID NO: 350063 - DNA, 799 bp, Homo sapiens
  chr5:41870076-41870875
  hyper
cgagcgccaaagggctcgggagcgctgccaggagtcctcccgccccttctcagcctctccgcgcgcttctttatcgcgtctcgctccatcagggaagcgactgcagaaccaagcaaaggcggtcatccgaggggccggcgaggccaggaacgcgtcgccgcgtgtccgtgaccagggcaccgcgccacggatgccagatcccaggctggagagagcgggtaggggcagagaagaaaacgcgggcaccactcagggtttggtccacgttcttcctgcccatggccttcctcttcccccgcactttaccttgtaccaggttgccccagatccgcgggcagaggcgcagagccgaagcccggaggagaggagtttgagagccgccatcttcgggcggtgaggcaggaggaggctgcgggttggagcgcgcgtttgagcgtcggtgcgcgactgcgaaggaaacccgggcgggctggaggctcgacagcgcgtcgatgacgtcctcccggcctttcgagccgcacgccaccggcgcgctgctggctgctgcttttaaaagaagtgaggctgggcggggccccggcggggagaagaggctctgtgcagccggggcggatcgcggggaagttcctctcagcgcctcaggtgtctgggcgtgtgcagctgtgttggcgcacacttgccgctacagcccttctgtcagccctttagcttcgatggggcgctggtggccgcctccccctaggttgtggatgagtcttggcctagggttcagggccctccggccgcgggaggatctccc

SEQ ID NO: 350064 - DNA, 98 bp, Homo sapiens; identical to SEQ ID NO: 345157
  chr5:42950747-42950845
  hyper

SEQ ID NO: 350065 - DNA, 175 bp, Homo sapiens; identical to SEQ ID NO: 346682
  chr5:42995428-42995603
  hyper

SEQ ID NO: 350066 - DNA, 337 bp, Homo sapiens; identical to SEQ ID NO: 345158
  chr5:43007481-43007818
  hyper

SEQ ID NO: 350067 - DNA, 387 bp, Homo sapiens; identical to SEQ ID NO: 199819
  chr5:43017314-43017701
  hyper

SEQ ID NO: 350068 - DNA, 303 bp, Homo sapiens; identical to SEQ ID NO: 199820
  chr5:43019347-43019650
  hyper

SEQ ID NO: 350069 - DNA, 259 bp, Homo sapiens; identical to SEQ ID NO: 199821
  chr5:43019887-43020146
  hyper

SEQ ID NO: 350070 - DNA, 328 bp, Homo sapiens; identical to SEQ ID NO: 332354
  chr5:43557434-43557762
  hyper

SEQ ID NO: 350071 - DNA, 214 bp, Homo sapiens
  chr5:43603571-43603785
  hyper
cgcaggccgcaggcttaggtggggaagaagcaccgtgcctcttggtgtccctttctcgtctcctgctggggcgatgtcgaagggagtgggctggtggatttgggaactgggtccccgaagagggcagggaatgaggcggcagctgtgcaggtgcagatatttgcagctttgggggacagcgagagtcgtacggggtcatttcggccctcaagat

SEQ ID NO: 350072 - DNA, 50 bp, Homo sapiens; identical to SEQ ID NO: 345162
  chr5:49737299-49737349
  hyper

SEQ ID NO: 350073 - DNA, 104 bp, Homo sapiens
  chr5:50263380-50263484
  hyper
cgccagtcaaccagagtcagtcgctctctctctctccctttcttccctcctctcccccactcttcctcgtctcccgcccccgccccccatctttctccagctag

SEQ ID NO: 350074 - DNA, 75 bp, Homo sapiens; identical to SEQ ID NO: 345163
  chr5:54518558-54518633
  hyper

SEQ ID NO: 350075 - DNA, 209 bp, Homo sapiens; identical to SEQ ID NO: 345164
  chr5:54526958-54527167
  hyper

SEQ ID NO: 350076 - DNA, 308 bp, Homo sapiens; identical to SEQ ID NO: 332365
  chr5:56110226-56110534
  hyper

SEQ ID NO: 350077 - DNA, 37 bp, Homo sapiens; identical to SEQ ID NO: 199857
  chr5:57878673-57878710
  hyper

SEQ ID NO: 350078 - DNA, 158 bp, Homo sapiens; identical to SEQ ID NO: 199858
  chr5:57878752-57878910
  hyper

SEQ ID NO: 350079 - DNA, 227 bp, Homo sapiens; identical to SEQ ID NO: 345168
  chr5:57879190-57879417
  hyper

SEQ ID NO: 350080 - DNA, 128 bp, Homo sapiens; identical to SEQ ID NO: 345169
  chr5:58334886-58335014
  hyper

SEQ ID NO: 350081 - DNA, 210 bp, Homo sapiens; identical to SEQ ID NO: 199861
  chr5:58335353-58335563
  hyper

SEQ ID NO: 350082 - DNA, 73 bp, Homo sapiens; identical to SEQ ID NO: 345171
  chr5:58335881-58335954
  hyper

SEQ ID NO: 350083 - DNA, 348 bp, Homo sapiens; identical to SEQ ID NO: 346698
  chr5:65220847-65221195
  hyper

SEQ ID NO: 350084 - DNA, 1043 bp, Homo sapiens; identical to SEQ ID NO: 332373
  chr5:66299591-66300634
  hyper

SEQ ID NO: 350085 - DNA, 97 bp, Homo sapiens
  chr5:66511687-66511784
  hyper
cgtgcccttgccctgcttcagccccacagccccgcctgggttgctggtctgacccggctgggcagggtggctgtgagctgccggtgtggccccaggc

SEQ ID NO: 350086 - DNA, 114 bp, Homo sapiens
  chr5:72497779-72497893
  hyper
cgtctgcagaagttcgccctttgctggcccctgtccaggctctcctctcgctggcccacgtgatcctttcctgccagtctcccctggctccagcttcctccacgcccagggctc

SEQ ID NO: 350087 - DNA, 316 bp, Homo sapiens; identical to SEQ ID NO: 199885
  chr5:72733185-72733501
  hyper

SEQ ID NO: 350088 - DNA, 177 bp, Homo sapiens
  chr5:72733588-72733765
  hyper
ttcaagggctgacgcctggaaaacaccgccaggcccctggccgaaggaggtaactaaccgagtcgaaacggcgatcagaaattaattcagtgccctgctcaggagcaaaaccgtcaaaaccccatcgagatgttggcgcaagcggattcacacacaaaggaaaacaataaaagtctc

SEQ ID NO: 350089 - DNA, 85 bp, Homo sapiens
  chr5:72742484-72742569
  hyper
cgtcaagggagcctctagtgcctggacagggcggactcccttccccggcaccctcttcctccctaccccaggtcgggggttgggg

SEQ ID NO: 350090 - DNA, 300 bp, Homo sapiens; identical to SEQ ID NO: 199889
  chr5:72747520-72747820
  hyper

SEQ ID NO: 350091 - DNA, 127 bp, Homo sapiens
  chr5:72747850-72747977
  hyper
ctgtcactgtgagccctgaaaagagacagaagaaaacgcgagtgcctggcctgagggtgctccgtcccgtgggtagccaggtaggtagttattctgcccgatgatgaggtcctcctgacgcccccgc

SEQ ID NO: 350092 - DNA, 164 bp, Homo sapiens; identical to SEQ ID NO: 332389
  chr5:73843900-73844064
  hyper

SEQ ID NO: 350093 - DNA, 291 bp, Homo sapiens; identical to SEQ ID NO: 199900
  chr5:75378714-75379005
  hyper

SEQ ID NO: 350094 - DNA, 50 bp, Homo sapiens; identical to SEQ ID NO: 283051
  chr5:75698194-75698244
  hyper

SEQ ID NO: 350095 - DNA, 1185 bp, Homo sapiens; identical to SEQ ID NO: 199902
  chr5:75698274-75699459
  hyper

SEQ ID NO: 350096 - DNA, 110 bp, Homo sapiens
  chr5:76011064-76011174
  hyper
cgttcaagaacgtgtgaaggacacttggaaagttaccaggccatttctctcctgggcgcccgcggccctagaacgccggcctcaccggcagacgcgcgccctcctcccag

SEQ ID NO: 350097 - DNA, 188 bp, Homo sapiens
  chr5:76011754-76011942
  hyper
gccagggccccccagtagggcagggcggggcggggcggggcgcacagagccagaggggcttgcgagcggcggctgagggaccgcggggagggggcgccgagcggctccagcgcagagactctcactgcacgccggagggcgcccttcctcgctcgcgcccgcgcgaccgcgcgccccagtcccgcccc

SEQ ID NO: 350098 - DNA, 345 bp, Homo sapiens; identical to SEQ ID NO: 345175
  chr5:76926856-76927201
  hyper

SEQ ID NO: 350099 - DNA, 191 bp, Homo sapiens; identical to SEQ ID NO: 199915
  chr5:77148195-77148386
  hyper

SEQ ID NO: 350100 - DNA, 37 bp, Homo sapiens; identical to SEQ ID NO: 346704
  chr5:77268330-77268367
  hyper

SEQ ID NO: 350101 - DNA, 180 bp, Homo sapiens; identical to SEQ ID NO: 332410
  chr5:78531507-78531687
  hyper

SEQ ID NO: 350102 - DNA, 1266 bp, Homo sapiens
  chr5:78531956-78533222
  hyper
cgaatggcaacattgtggcgatgctgaggcgcagagtttaggagacgggttcatcagtcaggccggctccgggctttctgcagcagcaccaggggcgggggcggggatcttgacctgggcgagcgaccgggacgcatacagcgccggcctgaccccgcgggacccgcgcctcaccaccggagcgccgcagacgcagctccacggcctcgcgcggggggcggcgggcggccgcgaggcgctgcggcagcgcggagcttgtaaacagatccggccgcaggtgaccatgtgaactacctgctcccgggacgcttattgtccttctctcgatccgcgccacaaaggagctcggcggtcggggcgcggagggacaggcgaacgagccgggagagccggccggcgcactaagatggctgaaggcgcccggcgagggtgagcggggggcgcggcgcagccagcggggagtcctcgggcgggccgggccggcggcccttccccgcggcgagaagccggagccaccatgtcgttcgcgctggaggagacgctcgagtcggactgggtggctgtgcggccccatgtgttcgacgagcgcgagaaacacaaattcgtctttattgtggcctggaacgagattgagggcaagtttgccataacctgccacaaccggacggcccagaggcagaggagcggctcccgggagcaagcgggggcgcgagggggcgccgaggccggcggagctgcgtccgacgggagccgcgggcccggcagcccggcgggcaggggtcggcccgaggccactgcctctgcaactctggttaggagccccgggccccggcggagctcggcctgggcggagggcggctctcctcggagcactcgcagccttctgggggacccgcggctgcggagtcctggcagcaaaggggcggagagtcgtcttaggagcccagtgcgggccaaacccatcccgggtcagaaaacatctgaagccgacgatgcggcgggggcagccgctgcagcagcccggccggcgcccagagaggcccaggtgtcctctgtacggatagtgagcgcctctgggacggtctccgaggagatagaggtgctggaaatggtgaaggaggacgaggcacctctggcgctctcggacgcggagcagccgccgcccgccaccgagctggagtctccggccgaagagtgcagctgggccggactgttttctttccaggacctgcgcgccgtgcaccagcagctgtgctcggtgaactc

SEQ ID NO: 350103 - DNA, 418 bp, Homo sapiens
  chr5:79551984-79552402
  hyper
cggcggagcaggctcgacccgggctcgcacttccgctggcgtcaggcgggtgggctgctgcgatcacttcccggttggggcgccgagctccggagtcggccgccagcctttgggccccacgctccgggtctggtgcgcggtctggccgcgctcgggccctcgccaaatgagagcgcagcgcctctccgccttcggatccagagaaagagcttgttgctgcctctaaaaggttggagccttagtaagcggttcctgcctttcctgcacagaccagaccgccgggtgctggtctgcgctctgccgcgcgccgactgggacagcccacccacgagatccttgttcctgaaatccctttccttccctcatctgccaagaaaactttcaacttttgggctctccgcgcctcccaagcttcctc

SEQ ID NO: 350104 - DNA, 69 bp, Homo sapiens
  chr5:80256566-80256635
  hyper
agcgtgcgctacaacgaggggcacgccctgtacctggcctttctggcgcgcaaggagggcaccaagcgc

SEQ ID NO: 350105 - DNA, 158 bp, Homo sapiens
  chr5:82767810-82767968
  hyper
tccccccaaactgcaataagccgccttccaaggtaatcacgtttcttttgttccccccttaaaaaacaaaaacaaaaaacttatagaaaaaaacccgcgagcttagaaaaaagaagcaattggtagaaggctttaattaaggcaaagagctgtaaggc

SEQ ID NO: 350106 - DNA, 541 bp, Homo sapiens; identical to SEQ ID NO: 283098
  chr5:82769369-82769910
  hyper

SEQ ID NO: 350107 - DNA, 245 bp, Homo sapiens; identical to SEQ ID NO: 283099
  chr5:82770318-82770563
  hyper

SEQ ID NO: 350108 - DNA, 45 bp, Homo sapiens; identical to SEQ ID NO: 345178
  chr5:87436549-87436594
  hyper

SEQ ID NO: 350109 - DNA, 735 bp, Homo sapiens; identical to SEQ ID NO: 345179
  chr5:87436769-87437504
  hyper

SEQ ID NO: 350110 - DNA, 80 bp, Homo sapiens; identical to SEQ ID NO: 283113
  chr5:87955380-87955460
  hyper

SEQ ID NO: 350111 - DNA, 80 bp, Homo sapiens; identical to SEQ ID NO: 345180
  chr5:87957200-87957280
  hyper

SEQ ID NO: 350112 - DNA, 49 bp, Homo sapiens; identical to SEQ ID NO: 199934
  chr5:87962917-87962966
  hyper

SEQ ID NO: 350113 - DNA, 388 bp, Homo sapiens; identical to SEQ ID NO: 283116
  chr5:87963002-87963390
  hyper

SEQ ID NO: 350114 - DNA, 191 bp, Homo sapiens
  chr5:87963511-87963702
  hyper
atgatgatgtcatgagaaatctcaagtacatggttattgatatgcatcagtgatcagccaactgccccacgcctgctgcccgagcagcggcagcgacagcagcagtagcggcagcattgcaacaatccctattttctcaatcaacatctcttccgctagcactaccgactgctcctggaaaagcaacccgc

SEQ ID NO: 350115 - DNA, 156 bp, Homo sapiens; identical to SEQ ID NO: 345181
  chr5:87969885-87970041
  hyper

SEQ ID NO: 350116 - DNA, 599 bp, Homo sapiens; identical to SEQ ID NO: 199937
  chr5:87970918-87971517
  hyper

SEQ ID NO: 350117 - DNA, 37 bp, Homo sapiens; identical to SEQ ID NO: 345183
  chr5:87975991-87976028
  hyper

SEQ ID NO: 350118 - DNA, 243 bp, Homo sapiens; identical to SEQ ID NO: 345184
  chr5:87976663-87976906
  hyper

SEQ ID NO: 350119 - DNA, 325 bp, Homo sapiens
  chr5:87979367-87979692
  hyper
cgaggctctagctttcccctcctcctttcttgatctcggcaaacaaaaccattctaccacttgagccatctgccgcaggtgtaatggatggcagggggccgacctaaccacactccagtctcttctaggtcgtcaccgctctgcaccaaacaaatgagtcctgtttcaccactagggtgccgaggtggatggtggatgctggcccccgcccctggcagcgctcagcccttagaaaccagagccagctgacaacacgcgaaacacacaggcacagcgaaaacgccgagccgacgctcattccctctgccccctccctctgctctct

SEQ ID NO: 350120 - DNA, 157 bp, Homo sapiens; identical to SEQ ID NO: 283123
  chr5:87979985-87980142
  hyper

SEQ ID NO: 350121 - DNA, 147 bp, Homo sapiens; identical to SEQ ID NO: 283124
  chr5:87980250-87980397
  hyper

SEQ ID NO: 350122 - DNA, 108 bp, Homo sapiens; identical to SEQ ID NO: 332430
  chr5:87984851-87984959
  hyper

SEQ ID NO: 350123 - DNA, 262 bp, Homo sapiens; identical to SEQ ID NO: 283129
  chr5:87986873-87987135
  hyper

SEQ ID NO: 350124 - DNA, 139 bp, Homo sapiens; identical to SEQ ID NO: 346715
  chr5:87987165-87987304
  hyper

SEQ ID NO: 350125 - DNA, 453 bp, Homo sapiens; identical to SEQ ID NO: 346716
  chr5:88178399-88178852
  hyper

SEQ ID NO: 350126 - DNA, 422 bp, Homo sapiens; identical to SEQ ID NO: 283136
  chr5:88179429-88179851
  hyper

SEQ ID NO: 350127 - DNA, 42 bp, Homo sapiens; identical to SEQ ID NO: 345186
  chr5:88180346-88180388
  hyper

SEQ ID NO: 350128 - DNA, 286 bp, Homo sapiens
  chr5:89854237-89854523
  hyper
cgaagggggcaactagaaagtttagccaaaggagacgattagaaagcactgaccgcgcacttacattgggacgcccaggcagaggcaagactcgcgcgctcctaagccgaggcaggtcagcctaggcgcctggctgctggaagagtccattagggatggccaaggcagggtgttcccgacgccagagcgcggacctggctgcccgctgcggagagcagagtgcgcagcccggggcggccacccccgctccgctggtcaggtgagcgctgccccgggagccatgggt

SEQ ID NO: 350129 - DNA, 866 bp, Homo sapiens
  chr5:94619403-94620269
  hyper
cgagatgttttctttcgactgtttcatctacttagaattaatagcatttctcctcccgcctcccggcccccgccccccgctccccgggtggtgaacgcctgaagagggaggcgtggtcccgcgcaccttgtctccggccgcgccaccggcactcacctggctgctgccgtgctcctcgcccgtctccggggcccgagactccgcgggactccgcgccggctctgcgggaggaggcggcggctccagcagctgctccaggcaggcggtgcccggcagagaggagctcttctggtggcacaagtgcgccccggggccctgacgccgtgcaccctcatctcgggcgcggtcccccctcgggggaggctggggcgaggaggacagggaggatgaggcggaggaagaggaaggagctgagtcgggggagcgtccgccaggaggcgtccctcccgctgctcccgaggccgccgcgggcccctttacggcggggagcaaatgctcgcggatccggcggcgtagcgtggacccctgctcggctctgccggcgccgccgggctccaggggctccggcgacgagcagcacaggttgggctgcgaggaggagaagactcggtccagcacttgcttccgcttcttgaagccgctccacctgctgcctgcaccactccccctggccggtgcattccctgtgcccaccgggggtggcggggagggcgacggggtgtccgcagtgcggcgctctggacccccagcgcgcccgcccccgccgcccttgctcctgcccacccccagctgcaggttcttccagagccgggcctggaaggaggaggacgccgccggcggctctggctcgcccgccgcggcagccc

SEQ ID NO: 350130 - DNA, 114 bp, Homo sapiens; identical to SEQ ID NO: 345187
  chr5:100236036-100236150
  hyper

SEQ ID NO: 350131 - DNA, 86 bp, Homo sapiens; identical to SEQ ID NO: 346720
  chr5:100238197-100238283
  hyper

SEQ ID NO: 350132 - DNA, 344 bp, Homo sapiens; identical to SEQ ID NO: 199962
  chr5:100239724-100240068
  hyper

SEQ ID NO: 350133 - DNA, 399 bp, Homo sapiens; identical to SEQ ID NO: 199964
  chr5:101631635-101632034
  hyper

SEQ ID NO: 350134 - DNA, 221 bp, Homo sapiens; identical to SEQ ID NO: 199965
  chr5:101632074-101632295
  hyper

SEQ ID NO: 350135 - DNA, 137 bp, Homo sapiens; identical to SEQ ID NO: 346722
  chr5:107005846-107005983
  hyper

SEQ ID NO: 350136 - DNA, 449 bp, Homo sapiens; identical to SEQ ID NO: 199970
  chr5:107006260-107006709
  hyper

SEQ ID NO: 350137 - DNA, 281 bp, Homo sapiens
  chr5:109024730-109025011
  hyper
cgaagagaatgtgcaagccctcttctcttgcatttcctccagcccgtcaccaagtactcttccaggcacgccaggcccgagtgtcctaggataggaaacctgagcaacaaagggaagtggggtgtaagctcaacccctgttggacgtgggggtgctggcgcctgaacgcccccgaaggcctcaactcccagaaagctgcctgccaggtcacaagagccctgtgaggtcttcctatcgccgggacactgggaggcaggcgcggggcgggtccgccgggcgac

SEQ ID NO: 350138 - DNA, 469 bp, Homo sapiens; identical to SEQ ID NO: 199981
  chr5:112629778-112630247
  hyper

SEQ ID NO: 350139 - DNA, 113 bp, Homo sapiens; identical to SEQ ID NO: 345190
  chr5:112630698-112630811
  hyper

SEQ ID NO: 350140 - DNA, 252 bp, Homo sapiens; identical to SEQ ID NO: 283209
  chr5:112823814-112824066
  hyper

SEQ ID NO: 350141 - DNA, 218 bp, Homo sapiens; identical to SEQ ID NO: 199985
  chr5:113696733-113696951
  hyper

SEQ ID NO: 350142 - DNA, 97 bp, Homo sapiens; identical to SEQ ID NO: 199986
  chr5:113698167-113698264
  hyper

SEQ ID NO: 350143 - DNA, 213 bp, Homo sapiens
  chr5:114506308-114506521
  hyper
cgagcagtcatatcccgctttctgcttctatacccccaagtcgcgatgtcaccgcacgttcttgcccagtagcgcggggaccgcctgcagggtggagattcctctcccggatgctggccagggactgaagttaaaaggccgcggcaagggagagaccccccgccacccgggcctacgctttccttcctgagggccaggacagagggtcctgag

SEQ ID NO: 350144 - DNA, 57 bp, Homo sapiens; identical to SEQ ID NO: 199990
  chr5:114515671-114515728
  hyper

SEQ ID NO: 350145 - DNA, 131 bp, Homo sapiens; identical to SEQ ID NO: 199991
  chr5:114515769-114515900
  hyper

SEQ ID NO: 350146 - DNA, 44 bp, Homo sapiens; identical to SEQ ID NO: 346728
  chr5:114516274-114516318
  hyper

SEQ ID NO: 350147 - DNA, 51 bp, Homo sapiens
  chr5:115911175-115911226
  hyper
tgaagtaagcaaataaactacagtgcagagaatggcgtttttaacgacggc

SEQ ID NO: 350148 - DNA, 105 bp, Homo sapiens; identical to SEQ ID NO: 346729
  chr5:115911590-115911695
  hyper

SEQ ID NO: 350149 - DNA, 35 bp, Homo sapiens; identical to SEQ ID NO: 346730
  chr5:119799821-119799856
  hyper

SEQ ID NO: 350150 - DNA, 94 bp, Homo sapiens; identical to SEQ ID NO: 346731
  chr5:124082318-124082412
  hyper

SEQ ID NO: 350151 - DNA, 924 bp, Homo sapiens; identical to SEQ ID NO: 283263
  chr5:124082442-124083366
  hyper

SEQ ID NO: 350152 - DNA, 37 bp, Homo sapiens; identical to SEQ ID NO: 346733
  chr5:124084158-124084195
  hyper

SEQ ID NO: 350153 - DNA, 60 bp, Homo sapiens; identical to SEQ ID NO: 346734
  chr5:124084302-124084362
  hyper

SEQ ID NO: 350154 - DNA, 111 bp, Homo sapiens; identical to SEQ ID NO: 345192
  chr5:124084660-124084771
  hyper

SEQ ID NO: 350155 - DNA, 64 bp, Homo sapiens; identical to SEQ ID NO: 345193
  chr5:124084977-124085041
  hyper

SEQ ID NO: 350156 - DNA, 94 bp, Homo sapiens
  chr5:125930492-125930586
  hyper
cgtcgattctgcatagcacacaaggacctaaaatctaagtttttgttttaaaggcaccctacacgagaaaacttttactgtggagcttcaaaat

SEQ ID NO: 350157 - DNA, 170 bp, Homo sapiens
  chr5:125931062-125931232
  hyper
tggaacaatgggagtgctacagggaggagtgggctgctgccatctggtgaaagactccgggagccacagttccagctgggaattcttttcagcaaaatattggcgctgaagtacagtaggctatagcaggggttctgaaactgtaaaatgcgtgtaatgacctggtcgtc

SEQ ID NO: 350158 - DNA, 82 bp, Homo sapiens
  chr5:127537002-127537084
  hyper
cgataagagggaagcgaagaaaaaagcacgtgacttgaaaatgtttttctctttttaaagccacatctttctgcttcatttt

SEQ ID NO: 350159 - DNA, 65 bp, Homo sapiens
  chr5:127537230-127537295
  hyper
ggtagtgatgcgaataacatgctttgagaagtcagaaggctggcgtctcttcctccggagctcac

SEQ ID NO: 350160 - DNA, 55 bp, Homo sapiens; identical to SEQ ID NO: 346737
  chr5:129239969-129240024
  hyper

SEQ ID NO: 350161 - DNA, 34 bp, Homo sapiens; identical to SEQ ID NO: 200020
  chr5:129240901-129240935
  hyper

SEQ ID NO: 350162 - DNA, 143 bp, Homo sapiens; identical to SEQ ID NO: 200021
  chr5:129240962-129241105
  hyper

SEQ ID NO: 350163 - DNA, 273 bp, Homo sapiens; identical to SEQ ID NO: 200022
  chr5:129241140-129241413
  hyper

SEQ ID NO: 350164 - DNA, 217 bp, Homo sapiens
  chr5:132082800-132083017
  hyper
cgggagtcctggcccaaggcgggcgcagtctccagccgccccacccctggctgggggctctgctcagggagcacggccggcaggggggaggaggcgtgcgctaggcagcagcggggatggagggaagggagggggtccgccacccgcctgtgcgcgcccagtcctgccgcatcctgggtgcgcgccgcccacccgcggggcgagtgcccaggaggcg

SEQ ID NO: 350165 - DNA, 805 bp, Homo sapiens; identical to SEQ ID NO: 332483
  chr5:132386973-132387778
  hyper

SEQ ID NO: 350166 - DNA, 873 bp, Homo sapiens; identical to SEQ ID NO: 332486
  chr5:133862738-133863611
  hyper

SEQ ID NO: 350167 - DNA, 36 bp, Homo sapiens
  chr5:134364991-134365027
  hyper
cgccggttcttgaaccagacctgggggaggggacgg

SEQ ID NO: 350168 - DNA, 169 bp, Homo sapiens; identical to SEQ ID NO: 200034
  chr5:134365094-134365263
  hyper

SEQ ID NO: 350169 - DNA, 185 bp, Homo sapiens; identical to SEQ ID NO: 346740
  chr5:134366533-134366718
  hyper

SEQ ID NO: 350170 - DNA, 124 bp, Homo sapiens; identical to SEQ ID NO: 200036
  chr5:134367305-134367429
  hyper

SEQ ID NO: 350171 - DNA, 84 bp, Homo sapiens
  chr5:134375851-134375935
  hyper
gagattggacctttcttctttctgctcagcctgcgggagggagctggtcttgcgtgttggcagggagagtccgctgcccagagc

SEQ ID NO: 350172 - DNA, 219 bp, Homo sapiens
  chr5:134527185-134527404
  hyper
cgcgggcctcaggtgcgcgctccccgaagctctcctgccacctgttggccgccggtggtgctgacgctacggggagaagccacgcttcagtggcttgcctggaattcatgacttgtgcgctccacgtcctgggctggccgacctgctgagggtatctctgagagcaggagccaggccgtcccgggctctcctgcgacagtgcggtgggagagccttagc

SEQ ID NO: 350173 - DNA, 70 bp, Homo sapiens; identical to SEQ ID NO: 346742
  chr5:134802366-134802436
  hyper

SEQ ID NO: 350174 - DNA, 226 bp, Homo sapiens; identical to SEQ ID NO: 346743
  chr5:134824599-134824825
  hyper

SEQ ID NO: 350175 - DNA, 45 bp, Homo sapiens
  chr5:134827217-134827262
  hyper
cgagcttctttcttctccaaccccacccccacccgcagctctgga

SEQ ID NO: 350176 - DNA, 73 bp, Homo sapiens; identical to SEQ ID NO: 345194
  chr5:134880614-134880687
  hyper

SEQ ID NO: 350177 - DNA, 201 bp, Homo sapiens
  chr5:139047738-139047939
  hyper
cgcctcccagacctctggggccatgaatcatttatgaggcaaaaatgaaaccaattaaggacaaactttgaaagcctctaattgctgcgcctggtggcaccgtggaatgaggggaggccagccttctcggtgcggaatctccttggcccaggccttcccaggctgcccgtcccgccgcggctcagggcgcctcccggctcc

SEQ ID NO: 350178 - DNA, 335 bp, Homo sapiens
  chr5:139135589-139135924
  hyper
cgctagtgtccccgcggctgccgtccgccctcccgcgccccgccaggtgagcgcagcccccacccccagtcacgctgctctgggctgagcctcggtaatttccgagtcggcggcggctttgtgtgcaccggccgcggtctgggggcggggagggaagggagggttatttctcccccctcttcctttttattgggtcattaacaacggctcggactgccgctgcgccccccctttcatgtctgccgcgcctcccgccattatctgcctccgccgcgcggcgtaattcgatgccaatcaggttggggcgcagaggcagccggatcaaagccggggcc

SEQ ID NO: 350179 - DNA, 63 bp, Homo sapiens; identical to SEQ ID NO: 200064
  chr5:139227938-139228001
  hyper

SEQ ID NO: 350180 - DNA, 601 bp, Homo sapiens; identical to SEQ ID NO: 332514
  chr5:139487921-139488522
  hyper

SEQ ID NO: 350181 - DNA, 192 bp, Homo sapiens
  chr5:140011830-140012022
  hyper
cgccgccagtgcggcgcacacgcctgtgggcgtctccattcctgtgttgcgcagcgctagattctggatggccgggaacttgtggggacagagagccgccatcagtccgcgttcgcccagtccaggattgtcagacaggtctaggctggtaagggccgggaaggcgcgaacctgttcgcaggaaaaggcagg

SEQ ID NO: 350182 - DNA, 111 bp, Homo sapiens
  chr5:140012520-140012631
  hyper
gtgcaccagcggcagcagcagcagcaacaagcaggacgcgcgctcctggggagagagcagaggtctaggaggccccatccaacccctgtggctcccgagtggcacgcgttc

SEQ ID NO: 350183 - DNA, 275 bp, Homo sapiens
  chr5:140346034-140346309
  hyper
tccccctctgtcttcccttctgtttccttttccctccccctggagctgtagcggcagcagcagcaggaagccgagccgggttgagcgactcggaggcgagcggaggagctggaatatggggagtcagcgaggacggtggggccaggagcccttgggagggcctacggagggagcggccccaggcgctttctagagcgtgagcggtgggggagcaggcgcagggtggcacgagcggaggcggggcccgggcgtggggcacggctggggaagctgcc

SEQ ID NO: 350184 - DNA, 155 bp, Homo sapiens; identical to SEQ ID NO: 346746
  chr5:141931151-141931306
  hyper

SEQ ID NO: 350185 - DNA, 624 bp, Homo sapiens; identical to SEQ ID NO: 283411
  chr5:142781875-142782499
  hyper

SEQ ID NO: 350186 - DNA, 124 bp, Homo sapiens; identical to SEQ ID NO: 283412
  chr5:142782625-142782749
  hyper

SEQ ID NO: 350187 - DNA, 410 bp, Homo sapiens; identical to SEQ ID NO: 345197
  chr5:142782794-142783204
  hyper

SEQ ID NO: 350188 - DNA, 1069 bp, Homo sapiens
  chr5:142783606-142784675
  hyper
cgctacctccttcccgcccccgcccagctccgcggctccagacccactcgggagctcgctctgccccttggcggcaagcgccgccagtgcccctgcgggtgacagcgggcgggccacaagagccggggcgcctcccgcggctgagctgcgtgagtggcccgcgccgccgccgccgggccgagttgcgtgaagtgtgtcacttcgaaaggggctacggggttgcacggaaacggtgccgcagcgtctcggccgcgctcggggccgggcggcctgacacgccctctggggaggcttcagggaagggacgggatagcgggggtcggcgcatacgtactttgggcccggggggagtcgcgtgccggcaggtcccccaccaccgcatcatctgggcggccgggtcttcagctgccgccgccgcgctctcgcactgggagagaagttgcaaagcagaacccaccctcccccgcgccccgaccgtcccccaccctcttccccgagtctgcgaggcggcggcggcggcagaaggaggcgccgcctgccaagttcaacccccacccctcccgcccaatgtgctcacactcgaaggaagttgcacgccaaatgcaaaacctccagcgagctggatttctttgcactttttttttattattatgattaaggaaagcagggggcggcaggcttaaaagcaagttgcaggcgaaatagtaagttgctggcgaaatatagccccccttccgaaactcctgacctcttcttccaccccggccagggcccgcgtccaagttcccggtgcaggccccacccccgaatcttgacatttgctgccctcgactctgtgcgttgctcaccctatcacgttcataggacccctgcccctacaaataaaacaaaatacaggcagctttaaaatgccagcgttcaactccctacagatgttcctgttaggagcttccccctcagtccaaggggaagggaactcgtggtccgtcctgagaaaggagagggccgtggggcgaggggtgcccgtgcgggaagcccccgccccagctcccttccccagctcgccgcg

SEQ ID NO: 350189 - DNA, 32 bp, Homo sapiens; identical to SEQ ID NO: 345199
  chr5:142785272-142785304
  hyper

SEQ ID NO: 350190 - DNA, 110 bp, Homo sapiens
  chr5:148206075-148206185
  hyper
cgccccttcgcggctgccggcgtgccattggccgaaagttcccgtacgtcacggcgagggcagttcccctaaagtcctgtgcacataacgggcagaacgcactgcgaagc

SEQ ID NO: 350191 - DNA, 36 bp, Homo sapiens
  chr5:148206432-148206468
  hyper
acccaatggaagccatgcgccggaccacgacgtcac

SEQ ID NO: 350192 - DNA, 126 bp, Homo sapiens; identical to SEQ ID NO: 346752
  chr5:148520933-148521059
  hyper

SEQ ID NO: 350193 - DNA, 45 bp, Homo sapiens; identical to SEQ ID NO: 346753
  chr5:148521331-148521376
  hyper

SEQ ID NO: 350194 - DNA, 252 bp, Homo sapiens; identical to SEQ ID NO: 346754
  chr5:148650971-148651223
  hyper

SEQ ID NO: 350195 - DNA, 87 bp, Homo sapiens; identical to SEQ ID NO: 332540
  chr5:148724812-148724899
  hyper

SEQ ID NO: 350196 - DNA, 434 bp, Homo sapiens; identical to SEQ ID NO: 332544
  chr5:150004280-150004714
  hyper

SEQ ID NO: 350197 - DNA, 98 bp, Homo sapiens
  chr5:151066500-151066598
  hyper
gtttagagacaggcaacaggaaaccactcagagctctgggctgggtctatctcccctccaccccgtggtccctcctcctcctgtctcctccttccccc

SEQ ID NO: 350198 - DNA, 293 bp, Homo sapiens; identical to SEQ ID NO: 200114
  chr5:151150270-151150563
  hyper

SEQ ID NO: 350199 - DNA, 229 bp, Homo sapiens; identical to SEQ ID NO: 346758
  chr5:151150681-151150910
  hyper

SEQ ID NO: 350200 - DNA, 173 bp, Homo sapiens
  chr5:152870319-152870492
  hyper
aagcaagcaaggaaggaactgcaggaggaaaagaacaggcagaacagcgagaagaataaagggaaagggggggaaacaccaaatctatgattggacctgggcttctttttcgccaatgcaaaaaggaatatgcagcacatttttgccttcttctgcaccggtttcctaggcgc

SEQ ID NO: 350201 - DNA, 94 bp, Homo sapiens; identical to SEQ ID NO: 345201
  chr5:153862577-153862671
  hyper

SEQ ID NO: 350202 - DNA, 159 bp, Homo sapiens
  chr5:153900641-153900800
  hyper
cgagggcgctgagctcccggtatcctctaggtggcgcacaattctctggggaaaaggagaattccaggtgaactaattccacgggaagaagggttggtttgggaggggctaagccctgcctacgggctcctgtaggggaatcagctccccatccccctg

SEQ ID NO: 350203 - DNA, 255 bp, Homo sapiens; identical to SEQ ID NO: 200123
  chr5:155108849-155109104
  hyper

SEQ ID NO: 350204 - DNA, 240 bp, Homo sapiens; identical to SEQ ID NO: 200124
  chr5:157001858-157002098
  hyper

SEQ ID NO: 350205 - DNA, 243 bp, Homo sapiens; identical to SEQ ID NO: 200125
  chr5:157002204-157002447
  hyper

SEQ ID NO: 350206 - DNA, 290 bp, Homo sapiens; identical to SEQ ID NO: 346761
  chr5:157002817-157003107
  hyper

SEQ ID NO: 350207 - DNA, 239 bp, Homo sapiens; identical to SEQ ID NO: 283484
  chr5:157098032-157098271
  hyper

SEQ ID NO: 350208 - DNA, 1199 bp, Homo sapiens
  chr5:158634816-158636015
  hyper
cgcaaagacagggagtctactctgaatacaaaggccatctttcaacttaaggaacagagagaggaaataaaactgctacctctgccatcggccgctcagcctgggtcacgactgcagcaccgacagctcattcttttgggcatgattcaagattcagtaaaactgcacactccgtattttaaaaaataaaaagacacacagtcctctccttccctttcagactagtttcctctttactgcagactgcgacgcaaggccatccactaatctttgatgcctgctcactgcacaggccccttcctctctccccgcacctcctcccacaacgcctgcagatctcagatgcgtttgaactacagtaaccccaacccagctcgcggcaagcaggcagcgcagcagcagtagcagcagcaaccgggccgccgccgccgcggggctaagagattacgttcagcaaaaactcttccaggaaagaggctcgagagctcccctcctatctcgccaagggtgctgactctgtcgcgccacgccacgtaccaaaaggctcgcgaagaaaaacgcgggcgaagttcagcatccccgaacagaaagggaactcattccagaaagggggttcacgggtctgagggtccttgggtggggaaagcagtattggagggagaagacagaagggatggcaagacagaggaaaccacggggacaaaaaggaagggatgaggagccctcttactataaaagggactgacggacgggatgcagagcaatgggcccccctcgaaaaatggactggcaggcccttccgcacccccaaacaacctcgcaccacctgaaagcggggagcttgagtttggggctgcgtagatcaaagcagggtaagacgaagggaaagagggaggggagcttggaagcaaagtgaacaaagaggcaaaagaggcaaagttggaaatggaaacgagaaagggagctggaaaggggccgctctggaagggtcttgaaaaaggcctagaaatgggatgctggggaggcaaagggggacagccccgaggaagggcatctcaggaatgtaagggagcgctccaggccctgggaagaggaagggatgggagggcggggaggcagccgaggcccgggagctggaacagagggggctttgcgcggggcccaggaggggagagcagggtcggagggaggcgaccacc

SEQ ID NO: 350209 - DNA, 172 bp, Homo sapiens
  chr5:159343215-159343387
  hyper
cggaagagtgactagcggggaaaataaccccagcgggccgcctaggggtgggtgacccgcgatctccacgcccaggtcccgccctcgcggcccctgcccccgccccgccccccgcagagggcgcgccctgggagcggcgggggacgcggctggcttcccggcttgcggggtg

SEQ ID NO: 350210 - DNA, 152 bp, Homo sapiens
  chr5:159343648-159343800
  hyper
gcgcctgacgtggaccattaaacttggagctgccgcctcgtcccctctcctcctcctcctccctctgacaggcgagcgagcgactcggtgcaggcaggagacgtgctgccgggctgggctgcccgggggagatgactcctcgccaggagggc

SEQ ID NO: 350211 - DNA, 42 bp, Homo sapiens
  chr5:159399024-159399066
  hyper
cgggtgccagtgccgcggccgcggccgccgccgacgccgccg

SEQ ID NO: 350212 - DNA, 335 bp, Homo sapiens
  chr5:160973804-160974139
  hyper
gtttaaaaaaaaaaaaaaaaattaaaagggaaaaaggaaaaacatgtatatgtataatacatacatatttgaataatatagaaaagtcaccccacagcagcatccagaataaaatttttgttgttatcctttcgttaagacaaaataactacagcgtctggtaagtttcggtagttgcaagaggcagttttgcaccgagcgggttgtgggtttttggtgtgtgtgtgtgtccttttaaatatgcaaaaccagattagaaaattagaggagagcaggtgtggcgtgccagcggaagataggtgccggtaagcccacttctggtctcagccggacac

SEQ ID NO: 350213 - DNA, 243 bp, Homo sapiens; identical to SEQ ID NO: 283532
  chr5:170171140-170171383
  hyper

SEQ ID NO: 350214 - DNA, 388 bp, Homo sapiens
  chr5:170171413-170171801
  hyper
tgcgagggaccgtgggaacttcaaggaaccgcaccgccctcctggaccacccgagaaaacaggggaagtgggcgaatgagtagaccaaagtactcatgacagggcaggagcaagtgagagaccctggaggaccatggagagaacgtggtaaccgatggagagggatgaaaaccgagccgcgggtgtgagtctgaggcgcccccaggcccaccagcgtgtgagcggcaggtgctgttcgccatcagccgctagatggagccggcgcctcgccgaatgcgccgggatccgtcgcgtggatgtcaggtccgggccagggagccaaagcggcggctccgcggggaccctccacagttccggactccagcccagcgccggcttcagggcgtgc

SEQ ID NO: 350215 - DNA, 181 bp, Homo sapiens
  chr5:172660254-172660435
  hyper
gcttgacctacggagcgcggccgcacagtaatggtaagggatcctcgtggaggccactgtgtcctgcctggagcgcccagctggctgcggctcactctgccaagtgcactgggagccaccgacacgtctcactcagcatttgtagaaagtcaggctggctcaaggcgctggagaacaaaac

SEQ ID NO: 350216 - DNA, 342 bp, Homo sapiens; identical to SEQ ID NO: 283559
  chr5:172663868-172664210
  hyper

SEQ ID NO: 350217 - DNA, 40 bp, Homo sapiens
  chr5:174119947-174119987
  hyper
cgggtttcgaaacagaaagggcctccttcccctttatcga

SEQ ID NO: 350218 - DNA, 233 bp, Homo sapiens; identical to SEQ ID NO: 200172
  chr5:174120134-174120367
  hyper

SEQ ID NO: 350219 - DNA, 175 bp, Homo sapiens
  chr5:174120406-174120581
  hyper
ctctgacttaaaggggggtgtcgggggctggggcagggaatggggaggggttcggtttatttactcaagcacctactgtgtgctgctgatggggaacttcctaggcaagtcattgtcgcatttcatccctacaaacagtcccaggaggtaaatattatttatccctgtgatgtgc

SEQ ID NO: 350220 - DNA, 414 bp, Homo sapiens
  chr5:174150711-174151125
  hyper
cgaggcaaacactggcattcaaacacgcacgacaaacacaggctcaaacaaactcatgaatgcacacttgcactgtcttgagaaaaaggtcggatccggatcgcgctcagaaaggaggttcaggagacaagtacagagatttcaactttctaaaagtgcgctggatttgctttctagtgagagagatggggacaactgatttaaattcttcactccgaaccatttgggagagaggcactcctgaccacttctcgggctccttccggcccctcttttccaggggaaagagttgtaataataacagtgggcgcttttgagcgctggctagtggcgagttactcttctaagtgcatacatttctttcacagggatactggcctgtgagtttcagcaccgactttctggaactgtaaa

SEQ ID NO: 350221 - DNA, 246 bp, Homo sapiens; identical to SEQ ID NO: 283578
  chr5:174151197-174151443
  hyper

SEQ ID NO: 350222 - DNA, 92 bp, Homo sapiens; identical to SEQ ID NO: 200177
  chr5:174162402-174162494
  hyper

SEQ ID NO: 350223 - DNA, 87 bp, Homo sapiens
  chr5:174162904-174162991
  hyper
gccgagcagataataacagccccctgtaactgagcgcttcccaagtgccagacactgttgctcggcgatttacaccaatcaactcac

SEQ ID NO: 350224 - DNA, 65 bp, Homo sapiens
  chr5:174178103-174178168
  hyper
cgaatcacagactccccgcagtcagagatggcgaagcctccaccgggtcacctcggccggccccc

SEQ ID NO: 350225 - DNA, 383 bp, Homo sapiens; identical to SEQ ID NO: 283585
  chr5:174178248-174178631
  hyper

SEQ ID NO: 350226 - DNA, 248 bp, Homo sapiens; identical to SEQ ID NO: 283604
  chr5:176560001-176560249
  hyper

SEQ ID NO: 350227 - DNA, 290 bp, Homo sapiens; identical to SEQ ID NO: 345203
  chr5:176560318-176560608
  hyper

SEQ ID NO: 350228 - DNA, 116 bp, Homo sapiens
  chr5:178016455-178016571
  hyper
cgccgtgaccaccgcctctccaggtgtaccagcgttggttaggaacagtaggtgctactggtcacagtcaccagatacttcccacgagcctcatctttatccccgactctggccgc

SEQ ID NO: 350229 - DNA, 288 bp, Homo sapiens
  chr5:178770455-178770743
  hyper
cggacccacccccggatgcaagccagagacctgttcaggcaggcaaaagagagaggcgcacgctcctgcctgctgagccttttggagacccgggcgctccccatgcataaatggccccctgctcagaccagtcaaaacaacctgctttccagccaagcccttcagttggagcacgaggctcactaaagcacgggaagggcgcggaaagtcctcagcgcaggccttgccctcccaagggactcccaggtaacccttttccaaaacccaggcgagagcagcggagagaaa

SEQ ID NO: 350230 - DNA, 727 bp, Homo sapiens; identical to SEQ ID NO: 332613
  chr5:179245848-179246575
  hyper

SEQ ID NO: 350231 - DNA, 243 bp, Homo sapiens
  chr5:179498011-179498254
  hyper
cggcacgtttttatattagaaaagggccgcatccttccagatctagcgcagccttaagtccgtgatttgaggaacctgccgcttccaaaatacaggctgagacgtcctccccatgaagtagttttgcgctcttgcaccacctcctttgtctacgctgtccctgcaaactcctagctcaatgccctccagcaaacgagctgcctgaacgcaaagatgaccgttccaagtcttttttaaaagaag

SEQ ID NO: 350232 - DNA, 504 bp, Homo sapiens; identical to SEQ ID NO: 200203
  chr5:179498363-179498867
  hyper

SEQ ID NO: 350233 - DNA, 329 bp, Homo sapiens; identical to SEQ ID NO: 200204
  chr5:179498897-179499226
  hyper

SEQ ID NO: 350234 - DNA, 81 bp, Homo sapiens
  chr5:179499256-179499337
  hyper
ccgggtcagccgctggtgctggttgtttctctgtcaggcgtgatagccgcagggcgtggagcccgggagatttgcgaggac

SEQ ID NO: 350235 - DNA, 127 bp, Homo sapiens
  chr5:180018679-180018806
  hyper
tcctcttggcaggcgctggggccctctgagagcaggcaggcccggcctttgtctccgcgaggcccaccccggcccgcaccttcgctttgcggtctgaccccacgcgcccccctgcagggctgggccc

SEQ ID NO: 350236 - DNA, 561 bp, Homo sapiens; identical to SEQ ID NO: 332620
  chr5:180257880-180258441
  hyper

SEQ ID NO: 350237 - DNA, 457 bp, Homo sapiens; identical to SEQ ID NO: 332621
  chr5:180258503-180258960
  hyper

SEQ ID NO: 350238 - DNA, 594 bp, Homo sapiens
  chr5:180479644-180480238
  hyper
cggcgctgcccccggccacgtcctgcctgcgggcgggtcctccctggggagccgggagggacgtgggagctgcgaggccgcgcgcacgtggttcggttctcacttcttccaaaagcgtggtaagaaccgagggagaagccggatgtttgcaaacaagcgaggagacgacttgcggaccagacggcgcgggtgcgagcaggagctccccggacatccgccgccagccaagcccctgggaccctcccgcctgcggacgcggggcgagggcgggaagacgcggggcgagggcggcgctgcggccgcagaagcctcgagccgggctggggcgcggttccctcccgcacgccccgcggcgcgcccccgccccctccgccgcgcgcgcccccgccccctccgccgcgcgcgctcccgctccacgcccgtttcccaggcggctgcggtggcgcccggagaaggtcccgcgggaggtttcccggcacgcggcgggcaggccggtctcgcctctcggtgctcagcggcgcctggaccgacacggcccccgcgggtgttttccagacgtgttcgtacccggagcctctgcgtggaagagcgcgt

SEQ ID NO: 350239 - DNA, 829 bp, Homo sapiens; identical to SEQ ID NO: 346765
  chr5:180480302-180481131
  hyper

SEQ ID NO: 350240 - DNA, 60 bp, Homo sapiens; identical to SEQ ID NO: 345204
  chr6:391113-391173
  hyper

SEQ ID NO: 350241 - DNA, 55 bp, Homo sapiens; identical to SEQ ID NO: 346767
  chr6:393764-393819
  hyper

SEQ ID NO: 350242 - DNA, 393 bp, Homo sapiens; identical to SEQ ID NO: 346768
  chr6:710660-711053
  hyper

SEQ ID NO: 350243 - DNA, 141 bp, Homo sapiens; identical to SEQ ID NO: 346769
  chr6:711310-711451
  hyper

SEQ ID NO: 350244 - DNA, 274 bp, Homo sapiens
  chr6:1311068-1311342
  hyper
cggctccgtcgctttttgtgcaacaaaggcaggaaaaaggaggaaactcggcgtggcagggcagcgggctggaagtgcaccttcccggggccgaggcgcccgctccctggactaatgacgccgcgtggggatcacgccccgggcgccctggggtgaggaacggtcccccctttcgagattgtccgacactggtgccagtgaggtcacagcaaaagtcccaaaggaatattggaaagaaatggccgtgaaccggtttgttcttgcccccgccccc

SEQ ID NO: 350245 - DNA, 428 bp, Homo sapiens; identical to SEQ ID NO: 200222
  chr6:1311343-1311771
  hyper

SEQ ID NO: 350246 - DNA, 223 bp, Homo sapiens; identical to SEQ ID NO: 200223
  chr6:1312096-1312319
  hyper

SEQ ID NO: 350247 - DNA, 46 bp, Homo sapiens; identical to SEQ ID NO: 200224
  chr6:1312708-1312754
  hyper

SEQ ID NO: 350248 - DNA, 483 bp, Homo sapiens; identical to SEQ ID NO: 200225
  chr6:1312784-1313267
  hyper

SEQ ID NO: 350249 - DNA, 602 bp, Homo sapiens; identical to SEQ ID NO: 200226
  chr6:1313302-1313904
  hyper

SEQ ID NO: 350250 - DNA, 85 bp, Homo sapiens
  chr6:1381781-1381866
  hyper
cgggcgggtgggatgatttgttgatttgcttgttttccaccaaaccgcagggcacctccaggagctccgggacaacttacaaatg

SEQ ID NO: 350251 - DNA, 61 bp, Homo sapiens
  chr6:1382651-1382712
  hyper
agagggcgagggggcccccgtaaatcatcctgagggatttttggcccaagtccctgtttcc

SEQ ID NO: 350252 - DNA, 65 bp, Homo sapiens
  chr6:1524429-1524494
  hyper
gcgggccgagggggcggagtcatggaaacacgtgccacggcctggatgaacctgcagggccgaac

SEQ ID NO: 350253 - DNA, 165 bp, Homo sapiens; identical to SEQ ID NO: 200236
  chr6:1624812-1624977
  hyper

SEQ ID NO: 350254 - DNA, 51 bp, Homo sapiens; identical to SEQ ID NO: 200237
  chr6:1625068-1625119
  hyper

SEQ ID NO: 350255 - DNA, 123 bp, Homo sapiens; identical to SEQ ID NO: 345205
  chr6:2841503-2841626
  hyper

SEQ ID NO: 350256 - DNA, 732 bp, Homo sapiens; identical to SEQ ID NO: 345206
  chr6:2841627-2842359
  hyper

SEQ ID NO: 350257 - DNA, 156 bp, Homo sapiens; identical to SEQ ID NO: 200240
  chr6:2903557-2903713
  hyper

SEQ ID NO: 350258 - DNA, 72 bp, Homo sapiens; identical to SEQ ID NO: 200244
  chr6:3231938-3232010
  hyper

SEQ ID NO: 350259 - DNA, 70 bp, Homo sapiens
  chr6:3232260-3232330
  hyper
cgctgtggctgcgggaccctcacccggcgctgaaaaccctccacatcagctcctgctcggaaatgtctcc

SEQ ID NO: 350260 - DNA, 684 bp, Homo sapiens; identical to SEQ ID NO: 332639
  chr6:3457545-3458229
  hyper

SEQ ID NO: 350261 - DNA, 95 bp, Homo sapiens; identical to SEQ ID NO: 200248
  chr6:4775543-4775638
  hyper

SEQ ID NO: 350262 - DNA, 306 bp, Homo sapiens
  chr6:4775639-4775945
  hyper
cgggccagccctcgctgttctgagcgagggcctgtcgtgtagtccacaccgttccgcgaaaggaaccaccattgacagcctcgttcgattagaacccggacctccctggaatccagactcggtcccttcccagctgcgcttcggaggaggcggacgctccgagaggaacccagaggcctggcgtggggggagctgcgggcagagcggaggcagccgcgccctcgcgccgccctccgccgcgcccggctcccgccccccggatcccacccccggcctgccgcggagccagcgtgccagccggagctc

SEQ ID NO: 350263 - DNA, 465 bp, Homo sapiens; identical to SEQ ID NO: 332643
  chr6:4948996-4949461
  hyper

SEQ ID NO: 350264 - DNA, 229 bp, Homo sapiens; identical to SEQ ID NO: 346774
  chr6:5084683-5084912
  hyper

SEQ ID NO: 350265 - DNA, 695 bp, Homo sapiens; identical to SEQ ID NO: 283724
  chr6:5084942-5085637
  hyper

SEQ ID NO: 350266 - DNA, 115 bp, Homo sapiens; identical to SEQ ID NO: 200254
  chr6:5997274-5997389
  hyper

SEQ ID NO: 350267 - DNA, 112 bp, Homo sapiens; identical to SEQ ID NO: 200255
  chr6:5997401-5997513
  hyper

SEQ ID NO: 350268 - DNA, 80 bp, Homo sapiens
  chr6:6009552-6009632
  hyper
ggacgtggctgcgcctcaccgccctaccccgggagggaacccccgctgactttttcctctcttcattttcctccccaggc

SEQ ID NO: 350269 - DNA, 119 bp, Homo sapiens
  chr6:6546401-6546520
  hyper
cgggtccttaacagctcccgccccagaagctgccttcggatgaacagccgggtgaatcgccatgaaaaattaatcagcctccgcctgtccgcggcctagatgggcgcaaagcagatgac

SEQ ID NO: 350270 - DNA, 90 bp, Homo sapiens
  chr6:6547222-6547312
  hyper
cagcgccggctccccagtttctctgcattgtgaagtcattttcttaaactcgggctttaaataaccaccgatgacttgcctacgggccac

SEQ ID NO: 350271 - DNA, 189 bp, Homo sapiens
  chr6:7726066-7726255
  hyper
cggggtattggtcagatcattcttactagcgatgacctcttcgcctttggcacctcgcggctcttcgcatgcctccaagaattcccgggtcttgaaacctacgcgcggcggaggcgacgcctctcgggagagggagggtgaaagaaggggcggggctatttaaatagcccgcgagcttcgcgtccccat

SEQ ID NO: 350272 - DNA, 143 bp, Homo sapiens
  chr6:10383584-10383727
  hyper
cgcccgacggagcgtcccctcgcacctccccagagttgcctaactcctaggccctgaaagtgccagaacaaaggccgactcccccggcgcctccctcggggactgagcaccctgggccctgctgacgaagcaaaccccagact

SEQ ID NO: 350273 - DNA, 85 bp, Homo sapiens
  chr6:10384074-10384159
  hyper
gcccaaatataccacactgtggcgttcctcgtgccgaccgtgggtctctaacctagccaccttctcccgttgaaatatgcacatc

SEQ ID NO: 350274 - DNA, 60 bp, Homo sapiens; identical to SEQ ID NO: 200271
  chr6:10415329-10415389
  hyper

SEQ ID NO: 350275 - DNA, 282 bp, Homo sapiens; identical to SEQ ID NO: 283756
  chr6:10415836-10416118
  hyper

SEQ ID NO: 350276 - DNA, 227 bp, Homo sapiens; identical to SEQ ID NO: 345207
  chr6:10417842-10418069
  hyper

SEQ ID NO: 350277 - DNA, 137 bp, Homo sapiens
  chr6:10418940-10419077
  hyper
cgttggttttggcaaattcaccacccccctgcctcctcacccaccattctcacactccctcatccgtagcccaggcggcaaaaacccatttcaggaagtggagtgagttgctagctaaacttcgggcaaactttgta

SEQ ID NO: 350278 - DNA, 94 bp, Homo sapiens
  chr6:10420268-10420362
  hyper
gggcacggctggccttagcggatctgactctgccaaccccggggccacttcagcgttagattccacatgaaactgttgctcaataggtgaagac

SEQ ID NO: 350279 - DNA, 142 bp, Homo sapiens
  chr6:10423471-10423613
  hyper
cgctttcaactgacagcagtgggtacaggcccgaggtgtgcagcaagctgggaagcccagaggccgagaagctaaagatgccctggagactggaggagcgcatcaccggtcagtgcgccccctccaggagcggcctcccggc

SEQ ID NO: 350280 - DNA, 214 bp, Homo sapiens; identical to SEQ ID NO: 200278
  chr6:10423704-10423918
  hyper

SEQ ID NO: 350281 - DNA, 318 bp, Homo sapiens
  chr6:10424087-10424405
  hyper
tttcctagcgccttcgaagatactcccaagggcccccaaaatagatcagcaaaaagtgttgggggtggggggagtgaaaaagccagttcttgaagactgtaaggtcccctttcgcatctcagcatctggagtgtgcagggaattcctgaccagtggttttgctccctccaatcccttgcctcccccctcccatgttatgcacttgttcttggagagatggacgttaaagaagcgtcaagcagttctcactgcaaataaatggtgcagaaataagagagagaggatgaaagcctaggaagttataagtgatcctgaccc

SEQ ID NO: 350282 - DNA, 77 bp, Homo sapiens; identical to SEQ ID NO: 346777
  chr6:11043624-11043701
  hyper

SEQ ID NO: 350283 - DNA, 66 bp, Homo sapiens
  chr6:13013504-13013570
  hyper
cgggtcggagaatttctatgggaggtgaaaacatcaattatgttgtaacaggttgtctgctccagt

SEQ ID NO: 350284 - DNA, 391 bp, Homo sapiens
  chr6:13014076-13014467
  hyper
gggggccggagcagcgcccggccccgggcgcccgggggccggatggcggagcccacgcgctcagcgaagccggggaggtttgcgctccgttcgccgcgctgcagggagggcgcggtgccaggcgcgagcgccgagaaacccaaaaagaaagctttttatttgctgaggatgaagcccctgaaggagcccgcccccaacaacaacaacaacgtgtcctttgtgatccactgtcaactaggcaaggagatcaaacacatttgcagcaactgcagtcggggggaggacgcccgggacggtgagtgccggggcccgtcggggcggcggcggcgagcgcgggaggcggggaggtggctcgggctgtctcagtttgggggcaccgccggcgtctgtc

SEQ ID NO: 350285 - DNA, 564 bp, Homo sapiens; identical to SEQ ID NO: 200295
  chr6:17281534-17282098
  hyper

SEQ ID NO: 350286 - DNA, 181 bp, Homo sapiens
  chr6:17282217-17282398
  hyper
aggggtgaaaggagagacctgtaatgacggcgggatttggggtgcggagggttgcgagggaggggccgcaaccctgaacaattgcattcccgggctggatgccggttgttaagcgcgctgttgctttgtaaaaatgcgtgtgttctggtgttttggctggggcagggaggggacaccccac

SEQ ID NO: 350287 - DNA, 956 bp, Homo sapiens
  chr6:18264270-18265226
  hyper
cgcaggcaggaccgggcggccaccctgaatgatgctacccttcccgcgggacacctgccctgaaagttgcctcctcccatagccgggaccgcagcgctcagtccccaggggcggcttccctcccgctccgccgccgccgtccagggattcccgaggcgggaaaccgcgcccgctgccccgcgtgcgcgcgcgcccgcccggcctgcgctgttcccggcccggcccgagctgccggccctccacgtcccctcccccgccccaggccgccgtccaaatggccgcgtccctcccccgtcggccgcggcaggggcgaccgggcctccggcgtcccgaagcagcccttaccgcggatttcggccgccgcgggcctggcacgcgagggcacgaggaggttctgggaggcggcggcggccgacgccgaggagaaggcgcgcgggccgctgtctggcgtgacgctcgcgccgcgcgctcggctccccagaatcaacaagattttcaaaatggcggttcgggaaggagagcgggaatgcggcgaccaatcagggccgcgagctgggagttggcgggcgcggggcgggggaggcggggcggccgggtgcctccgcgggaagctcgggcgggcgggaccgcgaggggtcgcctcggccgcgggcggagggatgcgcgcgcggggctctccccggctgcgcctggagtgtggtcggcgctcgggccccggagtgcgggcgggctgtgtcccgcggggcgggcgggagcgggaggcgaggcggcctggcagcgcggaacggaaggacgctagggggcctgcgtgtttattgtttccacggtcgcttcctggaaaagatgatgagcagtcccgggccgcggaggggcgcggcgggcgcggtaaagaagtttagagatctccgaagtcgctatcgacagtgttactctgaggcggaggagaattaatcagc

SEQ ID NO: 350288 - DNA, 615 bp, Homo sapiens; identical to SEQ ID NO: 332675
  chr6:19804685-19805300
  hyper

SEQ ID NO: 350289 - DNA, 431 bp, Homo sapiens; identical to SEQ ID NO: 200311
  chr6:21665191-21665622
  hyper

SEQ ID NO: 350290 - DNA, 268 bp, Homo sapiens; identical to SEQ ID NO: 200312
  chr6:21666189-21666457
  hyper

SEQ ID NO: 350291 - DNA, 351 bp, Homo sapiens; identical to SEQ ID NO: 200313
  chr6:21666588-21666939
  hyper

SEQ ID NO: 350292 - DNA, 873 bp, Homo sapiens; identical to SEQ ID NO: 345210
  chr6:24910930-24911803
  hyper

SEQ ID NO: 350293 - DNA, 201 bp, Homo sapiens; identical to SEQ ID NO: 200321
  chr6:26087985-26088186
  hyper

SEQ ID NO: 350294 - DNA, 327 bp, Homo sapiens
  chr6:26197520-26197847
  hyper
ctagcctttcgtacccgtatatataaagacacccctgttctgattggacaaggcagcctttcccctgcagctcgattggtggagacgcccactccctgacagaacatctcctgcatgtagaccaaatattaaaactttcctccgtccatctttaactgctggtgttttcaaccctttcccctctgtgccatgtttctagcttttatttaaaacgtactttggttttccttggcaaaattgtgtctagctactaggatgacgtgtcttaatttttttttaaatgttggcgctgaaactggctttgatcaacgttttaaaaagacgcgc

SEQ ID NO: 350295 - DNA, 86 bp, Homo sapiens
  chr6:26198488-26198574
  hyper
cgagccgctgcattgatcgatttaaattacatgtgacataaagtctctttgcattttaattagtttgcttttttgggtttttgttt

SEQ ID NO: 350296 - DNA, 213 bp, Homo sapiens; identical to SEQ ID NO: 200330
  chr6:26198924-26199137
  hyper

SEQ ID NO: 350297 - DNA, 367 bp, Homo sapiens; identical to SEQ ID NO: 283855
  chr6:26204318-26204685
  hyper

SEQ ID NO: 350298 - DNA, 204 bp, Homo sapiens; identical to SEQ ID NO: 200332
  chr6:26205298-26205502
  hyper

SEQ ID NO: 350299 - DNA, 55 bp, Homo sapiens; identical to SEQ ID NO: 345214
  chr6:26205712-26205767
  hyper

SEQ ID NO: 350300 - DNA, 42 bp, Homo sapiens; identical to SEQ ID NO: 332688
  chr6:26206006-26206048
  hyper

SEQ ID NO: 350301 - DNA, 171 bp, Homo sapiens
  chr6:26215876-26216047
  hyper
cgtattcacatgttcctgcagtctctagcccgagagtttaagctatcctaccacctcagcctaccgagtaaatgatagtacagacgcaagccgtcacacctggttagcttcatttttttgcagagacgagttctatgttgcccaggcaaatctgttaactcctgagctgaa

SEQ ID NO: 350302 - DNA, 223 bp, Homo sapiens; identical to SEQ ID NO: 200335
  chr6:26216853-26217076
  hyper

SEQ ID NO: 350303 - DNA, 209 bp, Homo sapiens; identical to SEQ ID NO: 200336
  chr6:26217156-26217365
  hyper

SEQ ID NO: 350304 - DNA, 312 bp, Homo sapiens; identical to SEQ ID NO: 345216
  chr6:26217578-26217890
  hyper

SEQ ID NO: 350305 - DNA, 114 bp, Homo sapiens; identical to SEQ ID NO: 345217
  chr6:26233864-26233978
  hyper

SEQ ID NO: 350306 - DNA, 125 bp, Homo sapiens; identical to SEQ ID NO: 283866
  chr6:26241269-26241394
  hyper

SEQ ID NO: 350307 - DNA, 113 bp, Homo sapiens; identical to SEQ ID NO: 346790
  chr6:26250001-26250114
  hyper

SEQ ID NO: 350308 - DNA, 129 bp, Homo sapiens; identical to SEQ ID NO: 345218
  chr6:26271217-26271346
  hyper

SEQ ID NO: 350309 - DNA, 326 bp, Homo sapiens; identical to SEQ ID NO: 283871
  chr6:26272105-26272431
  hyper

SEQ ID NO: 350310 - DNA, 227 bp, Homo sapiens; identical to SEQ ID NO: 200345
  chr6:26272853-26273080
  hyper

SEQ ID NO: 350311 - DNA, 352 bp, Homo sapiens
  chr6:26313163-26313515
  hyper
cgaaactggctgaaagctctccacacctaattagtaggattacagatattgaagcctacaaatgcgcatttccaccaggataccttgtggattcttacacgggtcaggtccgctgacgtttagcacgcctactttaaaacctcttttctgtagggtcctagtcttcaagtaaaatatatgcggccatatagcagaggatggtttcgatccatcgacctctgggttatgggcccagcacgcttccgctgcgccactctgctgtctcgacagtccgctccgccactctgctgtttcaacattactcttgtcaagtatgtattagaggctacaattttcggcatcttcctaattt

SEQ ID NO: 350312 - DNA, 345 bp, Homo sapiens
  chr6:26313545-26313890
  hyper
cctggagaatgagaagtgcacactggccatccatatggggctgcacgccacttccaaacaccagcggtttagaattcttcctcgataaattcgaatcagctgaggttgaagttctctaaaacggaagcatgtttcgagttatgggaaaacaaagtgcaggctaattggcataatttataaaggtgaaattataaatgcttgggcaaatttcagccattcctggataccggagggagtcgttattacttccaaacattttttacttgagattttcatcgaaaatgttcacaggaaaaaaaaaattacagttgcagcgaggaggcaacagaacctagaactccgcgc

SEQ ID NO: 350313 - DNA, 205 bp, Homo sapiens; identical to SEQ ID NO: 200346
  chr6:26322363-26322568
  hyper

SEQ ID NO: 350314 - DNA, 124 bp, Homo sapiens; identical to SEQ ID NO: 332704
  chr6:26330521-26330645
  hyper

SEQ ID NO: 350315 - DNA, 70 bp, Homo sapiens; identical to SEQ ID NO: 345220
  chr6:26331633-26331703
  hyper

SEQ ID NO: 350316 - DNA, 323 bp, Homo sapiens; identical to SEQ ID NO: 200349
  chr6:26331811-26332134
  hyper

SEQ ID NO: 350317 - DNA, 243 bp, Homo sapiens; identical to SEQ ID NO: 345222
  chr6:26332283-26332526
  hyper

SEQ ID NO: 350318 - DNA, 278 bp, Homo sapiens; identical to SEQ ID NO: 345223
  chr6:26522013-26522291
  hyper

SEQ ID NO: 350319 - DNA, 247 bp, Homo sapiens; identical to SEQ ID NO: 200355
  chr6:26577475-26577722
  hyper

SEQ ID NO: 350320 - DNA, 188 bp, Homo sapiens
  chr6:26987779-26987967
  hyper
cggaaccagcgcagcagcgggacgctagcccgcccacacggcggccacttgaaggtcctccagggaacacctgaggcagtgggagcgtctgccctttcctaagtctccttggaaagaagtattcgctttcgtttccgcaaacaaagcatgctccgcgctttcaggaccggtggctcccgtggagaccg

SEQ ID NO: 350321 - DNA, 139 bp, Homo sapiens
  chr6:27059547-27059686
  hyper
cgcttcgggtgtgagaggtcccgggttcaaatcccggacgagcccacttcattttcgcccaataaggtttaaggatatttaaagtatttccccaaatagtcatacccaaaaatatgtactttcaccacatcaacagtag

SEQ ID NO: 350322 - DNA, 43 bp, Homo sapiens
  chr6:27059899-27059942
  hyper
tataggaaggaggattttaatttacacttttaactccagcttc

SEQ ID NO: 350323 - DNA, 60 bp, Homo sapiens; identical to SEQ ID NO: 200363
  chr6:27100389-27100449
  hyper

SEQ ID NO: 350324 - DNA, 60 bp, Homo sapiens; identical to SEQ ID NO: 200364
  chr6:27101049-27101109
  hyper

SEQ ID NO: 350325 - DNA, 87 bp, Homo sapiens; identical to SEQ ID NO: 345226
  chr6:27101206-27101293
  hyper

SEQ ID NO: 350326 - DNA, 139 bp, Homo sapiens
  chr6:27125333-27125472
  hyper
cgagcgccgccggacatttcctgacggctcaggtgggcaggctgagtgcgcgagcgcctcactggcttctcataggtacctgggtcaggacgaagccacatagttcctcgtgatgagaaactcacttctggcacctgtc

SEQ ID NO: 350327 - DNA, 84 bp, Homo sapiens
  chr6:27125473-27125557
  hyper
agatgccagattccatgccaagcccccgaagattctgactagtttggcaaaaaatgggatctggcaggtccacttcaaagcagc

SEQ ID NO: 350328 - DNA, 140 bp, Homo sapiens
  chr6:27356293-27356433
  hyper
cgctatttaaaactctgtgaaccaccggtctaggctatactttgcagtgtattaaggtggtcttcggcacctctcgcagacccccttcctcttgcctctagcgccaacctctcagcctctcgcataccaggggaggggct

SEQ ID NO: 350329 - DNA, 222 bp, Homo sapiens; identical to SEQ ID NO: 283916
  chr6:27356463-27356685
  hyper

SEQ ID NO: 350330 - DNA, 540 bp, Homo sapiens
  chr6:27470822-27471362
  hyper
cgtggccgagtggttaaggcgatggactagaaatccattggggtctccccgcgcaggttcgaatcctgccgactacgagttcgaggttttagataattaacaacagaaaatttagaagaaagaaatttaagccaactcacgtgttgcgaactgaatttgtttggtacttccccgatcctgaaaccccacaacaatggagggtggaagttactgaatacctactattttcataagattatgggtaccttaattagcagatacctagtcattttcccgttagcggtacctttgtacggttcttggggacgcctctcgtttccctgccttccaaaccctcctgaagcctatacctgttacaagtcttgatagtgctttcctcttcatggaaatttagtcctagtcagaggtccaagtctttggtcaattatcagtttctgtggaatcaatggttcaactgctttggtcacccggtctcgctggttgcaaatgactagaaacactgtcagagatctcgacaccaccacaatcgaaagaccaggc

SEQ ID NO: 350331 - DNA, 204 bp, Homo sapiens; identical to SEQ ID NO: 346801
  chr6:27560506-27560710
  hyper

SEQ ID NO: 350332 - DNA, 90 bp, Homo sapiens; identical to SEQ ID NO: 200378
  chr6:27636531-27636621
  hyper

SEQ ID NO: 350333 - DNA, 1073 bp, Homo sapiens; identical to SEQ ID NO: 332740
  chr6:27655169-27656242
  hyper

SEQ ID NO: 350334 - DNA, 67 bp, Homo sapiens
  chr6:27777648-27777715
  hyper
cgaaaatagaaaataaaatatggagaccatgaactgctaagtctgtcagaggaataggtgaacaaca

SEQ ID NO: 350335 - DNA, 402 bp, Homo sapiens
  chr6:27778156-27778558
  hyper
ggggctctttgaggacaccaacctgtgcgccatccacgccaagcgggtgactatcatgcccaaggacatccagctcgcacgtcgtatccgcggcgagagggcttgagtctcaaggactcactgattacatacccaaaggctcttttcagagccacccacatgcgcgctgaaaagatctgtttctctcaggaattcttcctggtacttgttttgcctgtagtagatagggcccatttccagacgttatacaatctgtttcgtaagactcagcctatccctttttgaatgctaattttgggagtcttaacatctaataatgtccggcatttttccgtaagcattgagtgtagccaaaagttccttcgtgtattgctctcccatctccgcagcccggttttgacc

SEQ ID NO: 350336 - DNA, 71 bp, Homo sapiens
  chr6:27782642-27782713
  hyper
tagaccaataggactcgagtatgcaggatacctattttgattgggcaaaactggcatctgacgtcatccac

SEQ ID NO: 350337 - DNA, 351 bp, Homo sapiens; identical to SEQ ID NO: 346802
  chr6:27798705-27799056
  hyper

SEQ ID NO: 350338 - DNA, 48 bp, Homo sapiens; identical to SEQ ID NO: 200397
  chr6:27858740-27858788
  hyper

SEQ ID NO: 350339 - DNA, 304 bp, Homo sapiens; identical to SEQ ID NO: 346803
  chr6:28249105-28249409
  hyper

SEQ ID NO: 350340 - DNA, 125 bp, Homo sapiens; identical to SEQ ID NO: 346804
  chr6:28249579-28249704
  hyper

SEQ ID NO: 350341 - DNA, 190 bp, Homo sapiens; identical to SEQ ID NO: 345227
  chr6:28303261-28303451
  hyper

SEQ ID NO: 350342 - DNA, 73 bp, Homo sapiens; identical to SEQ ID NO: 200404
  chr6:28303489-28303562
  hyper

SEQ ID NO: 350343 - DNA, 208 bp, Homo sapiens; identical to SEQ ID NO: 200405
  chr6:28303607-28303815
  hyper

SEQ ID NO: 350344 - DNA, 150 bp, Homo sapiens; identical to SEQ ID NO: 345230
  chr6:28304301-28304451
  hyper

SEQ ID NO: 350345 - DNA, 143 bp, Homo sapiens
  chr6:28458192-28458335
  hyper
gccaggtcgtccatgggggttttcaagcgttttctcgatgactgatttttctagaagcgaatggattttattctcccaggtgtaaaggctacctcctgcttcacacccgggtaacataaaagacagcgctgggaccgaaactc

SEQ ID NO: 350346 - DNA, 248 bp, Homo sapiens; identical to SEQ ID NO: 332760
  chr6:33538968-33539216
  hyper

SEQ ID NO: 350347 - DNA, 1248 bp, Homo sapiens; identical to SEQ ID NO: 332764
  chr6:35655519-35656767
  hyper

SEQ ID NO: 350348 - DNA, 463 bp, Homo sapiens; identical to SEQ ID NO: 345231
  chr6:36098070-36098533
  hyper

SEQ ID NO: 350349 - DNA, 577 bp, Homo sapiens
  chr6:36354750-36355327
  hyper
cgccagccacggagctgctgaggatcagactcctgggtttcagcatggaggccagggaagggtctgataatgggtatgggtcctggcgagaggggagtggagaaaggccttggagtgggacggggcgccagctctgggggcagtctcgaggcacctagaaaaccggcgagtggggagaggctgctaaagaggggctccctgcgagaatgcgttcaccagctgtgaggacctggctggcgcacgaacttccaaagacctcacatctggttggtgtaggggcgaccagtggtaagggggctgcggaaagggcccgcaggggctgtgcgtgatgccttcagagctgtgtatgacaccgagagagtcaggggcggtgacccgcgtctggaggtggaaggggaagtgagtgagggatggatgtgaggtttaggaatgtgttggaaagagagattcccgccaggtaaaaggtctgataaaataggtttggaaatctaggtggtgaggaaaggatgcgggagcaggtggctctgcgtgcgcgctgcgtgttcagccgccaggctcttacctgcattacaggtgg

SEQ ID NO: 350350 - DNA, 407 bp, Homo sapiens
  chr6:36355357-36355764
  hyper
agcgctcccctggctgtggctgctggggccctaggcccgcgccccgcagtcctcctccgccaaacccctaacctggctccgagaactggaaggtcgcgtgggaggaaatctctttcgagaagcgccaaggcgtgtgcgcccgggtcctccgcaggcgggcaggcgcgcgaggcgctccggtaatcgctatccttccgggaaacgaaaacgaaagagcgggatgcggttccacttgcgccgctgcgggctaggagcagggcagggcagggcaggggccggccccgtgggagcgcagcaccggggcgctgcccgctcgctagcctgggaggcgtgggtcctgcacacagcctccagccggcggacagtccctctggcgacctggccttggctcccactggggcagagcc

SEQ ID NO: 350351 - DNA, 369 bp, Homo sapiens; identical to SEQ ID NO: 345232
  chr6:37666475-37666844
  hyper

SEQ ID NO: 350352 - DNA, 218 bp, Homo sapiens; identical to SEQ ID NO: 345233
  chr6:37666866-37667084
  hyper

SEQ ID NO: 350353 - DNA, 208 bp, Homo sapiens
  chr6:39196876-39197084
  hyper
cggtccaccatggctcccgagcggccgcctcctagagaaagcctctcctagccccagctgctaccagtccgcccgccctccagcctctgaaaacagctgtttgaatttggagctccgcatgcgcagtgcccggtactcaccccccgcaagcaccgctccccggacagagttgcttggccaagttggcccacggagtgcggggagctgc

SEQ ID NO: 350354 - DNA, 146 bp, Homo sapiens
  chr6:39197391-39197537
  hyper
gaggtgagcgctagaagaggcttggcgctccccgcgctcccagggtcagccgccaggggaggctgcgccgcccgcccagacctgcacgccctgcggtgcccgaggggttgcggtctcagggactcgtgtttgttattaggactggc

SEQ ID NO: 350355 - DNA, 151 bp, Homo sapiens; identical to SEQ ID NO: 200432
  chr6:41339070-41339221
  hyper

SEQ ID NO: 350356 - DNA, 85 bp, Homo sapiens; identical to SEQ ID NO: 346813
  chr6:41605681-41605766
  hyper

SEQ ID NO: 350357 - DNA, 308 bp, Homo sapiens
  chr6:42109904-42110212
  hyper
cggcggctgctctcggccagtccgcaggttccaacgtgtccctcccctccgcgcctccaggagacagcaccgccggccctgccccagcgccctccgtccccgccccagcgccctccgtccccggagtactcaccgaagcccccggtcccctcctccggggcctcctgggtgaagatccagggcggattggtggcgtagagggaggtgctgggggtcgtggtgtgcttcttcccgaagagtttgctgaaggtgccctgcaccgtctgcttctttttcatgctgccgcagcccgcgcgggcgccagggaa

SEQ ID NO: 350358 - DNA, 324 bp, Homo sapiens
  chr6:42110273-42110597
  hyper
actctaccaggccatgtcccccgccgtcctccccgcccgcgcaccgggcaacaggtgctgcgggcgccgccgcttgccgggaaatgcgagctacctggccaggtaaaaggcagccgcttggccgggccccgccccgccgccgcccagctccccaggccgcattccttcccgcctccttctacaacaggccattgttggcacggcccggtgggctggggacctcgcccggcccacgcccagcctgggagacgggccaccccctcccccaggttcctccctgcacgcctccttcaccccacttccccctagtccgggaaaggaggc

SEQ ID NO: 350359 - DNA, 34 bp, Homo sapiens
  chr6:42145871-42145905
  hyper
cgctgcatctccgagggtccgggtctcccctcag

SEQ ID NO: 350360 - DNA, 45 bp, Homo sapiens
  chr6:42145975-42146020
  hyper
cggggcccggatgggctcacggcggccgcgcccctcgcccaggac

SEQ ID NO: 350361 - DNA, 62 bp, Homo sapiens; identical to SEQ ID NO: 345234
  chr6:42928259-42928321
  hyper

SEQ ID NO: 350362 - DNA, 76 bp, Homo sapiens; identical to SEQ ID NO: 345235
  chr6:42928454-42928530
  hyper

SEQ ID NO: 350363 - DNA, 466 bp, Homo sapiens
  chr6:43969986-43970452
  hyper
cgccttctcccccgccgcccgcgcccacgccctcccccgcggggccgtggcagtgccaccaagggcctctttaagcccctttgaagccgcggagccccgcgccgcaggaggccccgccgctatgccagctatgccagctatgtccctgctgccgccggccgccaccgctcccccattaatgctggctaatctggctaataaataaactcccctcccagccccagccccgcgccgactcctccccgcccccgcagaatcgatgtcagggctcgactagagcaagcgcccgcactccaccccactccctcgagatgtagctgacgttttttcttatggctgccctaggtctgtagcccgtcggggattctcggggagacgtgggatttgggaggtctccgcctagccactgcgtttgccttcctcttttccagtccacctgcgcaccaggggcaggacacgtggctgg

SEQ ID NO: 350364 - DNA, 176 bp, Homo sapiens; identical to SEQ ID NO: 346816
  chr6:44044201-44044377
  hyper

SEQ ID NO: 350365 - DNA, 97 bp, Homo sapiens; identical to SEQ ID NO: 346817
  chr6:44044450-44044547
  hyper

SEQ ID NO: 350366 - DNA, 37 bp, Homo sapiens; identical to SEQ ID NO: 332792
  chr6:44094355-44094392
  hyper

SEQ ID NO: 350367 - DNA, 45 bp, Homo sapiens
  chr6:44187030-44187075
  hyper
cggggctttctgcctgccacacgccgtccctgctcactaccccat

SEQ ID NO: 350368 - DNA, 468 bp, Homo sapiens
  chr6:44187131-44187599
  hyper
cgacccagggggaggggcagagagaagggggtccgagcccttgggcccctaaccccgtccctttccggagcctcgggtgcccaaaggcgccggccgccagtcccaggcccgaagggcccctcccactgagtcggctctggtctccccgcccctgagccgcgaggactggacgcagctggctgcggagctctgggcgggcgctggggtcgcctgttgcagcctctcttccgcccggcggcccacaccggtcaggcccggcgcgggctgcgctctccagctgtggctatggccccagccccgagatgaggagggagagaactaggggcccgcaggcctgggaatttccgtcccccaccaagtccggatgctcactccaaagtctcagcaggtgcgcggggcggggccggggggcctggcggggcggggtggggtgggggcgaggtctgcgccgttctcacgctgccgggc

SEQ ID NO: 350369 - DNA, 253 bp, Homo sapiens
  chr6:45387325-45387578
  hyper
cgaaagcctggcttcccttcccggatcggccgcctgtgggactcgagagacctgtgcacgcaggggacgcggcggtgcccggggttagagctctcccctgtgaccgaaaagataattaaaaatcgcacgcgcaggagccagctcagctcctggctgcgcttccagttggtccggtctggctaaatgggttctcgcaccctggcggcgcccgggctgggaggccagtaggccgggcgcgaagagtaggttgggg

SEQ ID NO: 350370 - DNA, 261 bp, Homo sapiens; identical to SEQ ID NO: 200456
  chr6:45388098-45388359
  hyper

SEQ ID NO: 350371 - DNA, 186 bp, Homo sapiens
  chr6:45388397-45388583
  hyper
gaaggctttaaagagtttggtaataagcaagaaacgtagtagtacacaacgccgagggtaaaacggccctgtgcccccttcttggggtgtaatagcctcaagcggatttcccggcttctgcgggcgcagcacattgttttatttgttttgaaggctcagagtttgaggctggtcgtagacacccac

SEQ ID NO: 350372 - DNA, 38 bp, Homo sapiens
  chr6:45631098-45631136
  hyper
cgccccgcgtctggtcgactggctccccggttgccctt

SEQ ID NO: 350373 - DNA, 372 bp, Homo sapiens; identical to SEQ ID NO: 345236
  chr6:46097250-46097622
  hyper

SEQ ID NO: 350374 - DNA, 521 bp, Homo sapiens; identical to SEQ ID NO: 345237
  chr6:46097694-46098215
  hyper

SEQ ID NO: 350375 - DNA, 333 bp, Homo sapiens
  chr6:46138265-46138598
  hyper
cggggcaccgattaaacggaagagggaaagtgcagaaggagtaggtttgtgtagctcgggtagacgtcaagggcgggggtgtccatcttctccaccaggattccatcctagccacccagaatggtcgcggcgtaggttatgttcccaattcccagtcatcccgcccaccgaggcctgggcttcttagatgtgcagtggcaaggaggggacgttgctttagggacccagaggagcagtgtgggttcccgggagggaagccacccacgcccctggactcaccctcgcagcgatccgttcagtccgtattagtttggagcaacgggagggagggtc

SEQ ID NO: 350376 - DNA, 162 bp, Homo sapiens
  chr6:46138801-46138963
  hyper
caggagtagctgcacggcctgtcaatcagcgggggcaggggcgggcgctgcctgggtttggagggtggagggggaggggactcccgggggcagggacccatctggtagggcgaaggcgtgggatggccaattgcttggtcacacacaaaaccttccggcaac

SEQ ID NO: 350377 - DNA, 99 bp, Homo sapiens; identical to SEQ ID NO: 332801
  chr6:47382546-47382645
  hyper

SEQ ID NO: 350378 - DNA, 105 bp, Homo sapiens
  chr6:49518471-49518576
  hyper
cgcttgctgcttgaaccggtcaaagaaggaacgaatgaatgacccttttgccaggatggagacccgggggcctcagggagctgcgaatcccatggactcctcccg

SEQ ID NO: 350379 - DNA, 278 bp, Homo sapiens
  chr6:49519000-49519278
  hyper
caggtaacacaagaagtgttgcagacctcctgggccaagggtcgcatgaccacgaggactgaggagcacttcgtgaccgcgctcacttttcgcagcagtagagagggacagcctggggaacgctggggccctgctgaatcccgggctctccaggcacgaacaggggcatcccgcgtccacgccgcggggaggagggtttcaccgtctccagggacttggctcgaggaaattaaactctaatgagtagctcgagaaatgttccgggatggtggatgagc

SEQ ID NO: 350380 - DNA, 368 bp, Homo sapiens; identical to SEQ ID NO: 284097
  chr6:50690697-50691065
  hyper

SEQ ID NO: 350381 - DNA, 84 bp, Homo sapiens
  chr6:50691095-50691179
  hyper
cgtggattctttcagcagctcctgaaggagtacaattggaggagcgtgggaagccttgctcttcttcctttgtcagtactcttc

SEQ ID NO: 350382 - DNA, 43 bp, Homo sapiens; identical to SEQ ID NO: 346821
  chr6:50805695-50805738
  hyper

SEQ ID NO: 350383 - DNA, 211 bp, Homo sapiens; identical to SEQ ID NO: 200472
  chr6:50811605-50811816
  hyper

SEQ ID NO: 350384 - DNA, 636 bp, Homo sapiens; identical to SEQ ID NO: 346822
  chr6:52227115-52227751
  hyper

SEQ ID NO: 350385 - DNA, 132 bp, Homo sapiens; identical to SEQ ID NO: 200475
  chr6:52227876-52228008
  hyper

SEQ ID NO: 350386 - DNA, 119 bp, Homo sapiens; identical to SEQ ID NO: 345238
  chr6:53212372-53212491
  hyper

SEQ ID NO: 350387 - DNA, 215 bp, Homo sapiens; identical to SEQ ID NO: 200479
  chr6:53213970-53214185
  hyper

SEQ ID NO: 350388 - DNA, 189 bp, Homo sapiens; identical to SEQ ID NO: 346826
  chr6:56716695-56716884
  hyper

SEQ ID NO: 350389 - DNA, 248 bp, Homo sapiens; identical to SEQ ID NO: 345240
  chr6:56818408-56818656
  hyper

SEQ ID NO: 350390 - DNA, 207 bp, Homo sapiens
  chr6:69344116-69344323
  hyper
cgtcagccaactgtccaggaggcaaaatgactatctatgatgatagatagacagacagatagatagttagattaaaaggtggggaaacatcccttttccctttttcctttctatataatctggttttttctcttcaccccttttctcgcttcttcccaccccgtccccaaacctgttactagggaaacttgaaaaagaatcagatac

SEQ ID NO: 350391 - DNA, 294 bp, Homo sapiens; identical to SEQ ID NO: 200490
  chr6:69344649-69344943
  hyper

SEQ ID NO: 350392 - DNA, 72 bp, Homo sapiens
  chr6:69346042-69346114
  hyper
acttaaacgccgcagttgaaaagttagagaagtctggttttcaagagatgtgctgggtcagaaggaataagc

SEQ ID NO: 350393 - DNA, 115 bp, Homo sapiens
  chr6:69942728-69942843
  hyper
cgcattttaaaagccagcatttatggtccaaaatatgggacgggaatcagagctggtagaaaaatatgaaaagcctctttacaccctgagtatttgaaacaatccgatgagcata

SEQ ID NO: 350394 - DNA, 574 bp, Homo sapiens
  chr6:70576385-70576959
  hyper
cgcggagtgggagggtcacactgggagagactaataagggcagagatgcgtcccccttccccactcgcagggagctcactcctcggcggtgccgcagccctgtccggactccactgcgcctctgaggggctcaaatacgaattcaaggtaagctgcgcggctttgcgaccggctctgcacttgccctctcacacatgcccgggctatgtcatctgctcgtgttcctagttatctgtgtgcatctgcttttcaagaaaatgtaaaaactgtgctacacatggaaatatgtttaggtggataaataatgcacacctgcatacgtttccataggggccttaaggatgggaccaaaaacgtttggcaggagacggccactctcatgtggtacataccatgtagttcgtgttcctatgttcacatgatgcaggcttcatgcgttacacctaagttctaggtggtttttctggctatgtgtgtctgtgaagcggaactatggagcactgctgatgcgggtagggacagacatcaaatacattacaaaaaaaatggggggttaaaggagtaaaacaaactc

SEQ ID NO: 350395 - DNA, 298 bp, Homo sapiens; identical to SEQ ID NO: 200494
  chr6:70576997-70577295
  hyper

SEQ ID NO: 350396 - DNA, 570 bp, Homo sapiens
  chr6:71123134-71123704
  hyper
cggccggggacctgttgatcgcaggtatagccggctggcccgggctccctcgggactggggcgactgcgcatgctcgctggccgcgctgggccagtagccgagccgcggtgacgaaccggctccgcggttgcggtgtttgcggttgctgtgatggcgatgtgagggggcccggggcgggatggtgctgacccgggtcgggccgtcttcttgcagctggacaacgagctcctccgttcgacaggcgggggaagaggccgagccgggcgagaggtaacccccttactgtcccctctggctcccccggctcccgacacccacgacccctccctccgtccctcttgcccaggggccaggaaggaagcggcctcctcttcgtccgccgttcgcccgccgcggcccctcacccgactgctggcggtcggagcctggccccggccccgttgaaggtcggtggggacggcggtgcggagcgctctgagggaggcgaggggccgcggcgcgctgctctcccggtgcccgcggccgcccctgcccctgcgcgcgtccctcgacccgttcttcctgaacct

SEQ ID NO: 350397 - DNA, 289 bp, Homo sapiens
  chr6:71123746-71124035
  hyper
cgctctgtccctcctttacccgctttcgtggttctgctttttcatcccgcgcctcccacgtgtctttttgcccgggtggtccctccttgggaagcagcgtatctctgtgcttccatcccttgcctggctcttccctgtccggagctccttaccctggccgaccaggtttctcactcttgttacctccataatttcttccttggttttattttcctctcatccacctcctttcggtacttcctcctggttccctttttgttagttgccgattgtgttttgctttagcatc

SEQ ID NO: 350398 - DNA, 140 bp, Homo sapiens
  chr6:71665805-71665945
  hyper
cgccacctggcggaacgtgttggccaggcgggtcagctccgctttctgcaccgggcggctgtaggtgggcgtgatggcatagatggtgggcagctgcggctccggctgtggctgcggccgagactggttgcgcttttggg

SEQ ID NO: 350399 - DNA, 155 bp, Homo sapiens
  chr6:72129577-72129732
  hyper
cgcgccggcacccgaagagttcccacggatacggttcccaagtcagtggcatgtcagtgcccttcaagctaccgcaattttatttgttctccccgccagctccataaagtattaaaggctctctccacgacttcttcccaagcccaggtgcccta

SEQ ID NO: 350400 - DNA, 61 bp, Homo sapiens
  chr6:72130646-72130707
  hyper
cggaaagcccagccagtccccgggagtgtagccaatagaaggcgactccggcaacacaccc

SEQ ID NO: 350401 - DNA, 226 bp, Homo sapiens; identical to SEQ ID NO: 200502
  chr6:72596315-72596541
  hyper

SEQ ID NO: 350402 - DNA, 163 bp, Homo sapiens; identical to SEQ ID NO: 346832
  chr6:73329621-73329784
  hyper

SEQ ID NO: 350403 - DNA, 82 bp, Homo sapiens; identical to SEQ ID NO: 346833
  chr6:73330126-73330208
  hyper

SEQ ID NO: 350404 - DNA, 40 bp, Homo sapiens; identical to SEQ ID NO: 346834
  chr6:74019373-74019413
  hyper

SEQ ID NO: 350405 - DNA, 102 bp, Homo sapiens; identical to SEQ ID NO: 346835
  chr6:74020094-74020196
  hyper

SEQ ID NO: 350406 - DNA, 130 bp, Homo sapiens
  chr6:74161047-74161177
  hyper
cggttggttgtctgatcgttggatgtgtagatgaataaacgaacggtttgtcgttttacttagactaggctaccgaaaaacatgcaaaagtctaagttacttccgaagggaagtgaggggcgcgacccgg

SEQ ID NO: 350407 - DNA, 178 bp, Homo sapiens; identical to SEQ ID NO: 200507
  chr6:74161321-74161499
  hyper

SEQ ID NO: 350408 - DNA, 390 bp, Homo sapiens; identical to SEQ ID NO: 332846
  chr6:80487617-80488007
  hyper

SEQ ID NO: 350409 - DNA, 83 bp, Homo sapiens
  chr6:80657600-80657683
  hyper
aaacaggacacgggaagaatgggtgttctgtgggcaaagatgaggtaggcgtggtgctttggtccttacctgacactcacctc

SEQ ID NO: 350410 - DNA, 164 bp, Homo sapiens
  chr6:83073044-83073208
  hyper
cggcctcaagtaccactttgatggggagagcttctgaagcttccatacaacctgccgtgcctttgctgctgccgcagtagattttcagctcatttctttctgctgctgcttcgcgctgctctgtcatgcctaaatctatctcgtcactgccaaaggtgcctgaa

SEQ ID NO: 350411 - DNA, 268 bp, Homo sapiens; identical to SEQ ID NO: 284199
  chr6:83073251-83073519
  hyper

SEQ ID NO: 350412 - DNA, 213 bp, Homo sapiens; identical to SEQ ID NO: 284200
  chr6:83073590-83073803
  hyper

SEQ ID NO: 350413 - DNA, 129 bp, Homo sapiens
  chr6:83073835-83073964
  hyper
cagttgtagctccacttcctgctaatgcgagaaggtacaaaaagagatcaaaaagtcctgtaacctgaaacttccctcgcatcctaaccgggacctggtggagaggtctgggcgggggcggagacaccc

SEQ ID NO: 350414 - DNA, 547 bp, Homo sapiens
  chr6:83073970-83074517
  hyper
cgaccttccgccgaggcggtgcaggaaggaacgggagagggagaagtttggtagggaaggaattggggattaagcggtaagttagacgcgggagacgagtctcctcgggaaaggcggagggcgggaggccggtcgggtttatttagtgtgggccagggaagaaggaagactttgcggtctgggtgtcggatgcgcgtccccctccggagtaaaagtgaccggaggggttggggaggcgaggccggggcgggcttttggaaggaggtctctgggacagactggagacgactagactcgaaaaggccggtttttgcactccggaagccgcggcagccaccgctgttcacgcctctctcctgcttgtcccaggtccctcagaggatccagcgaggggcgccaacaagaggcgaagaggtggcaccagggcggcggcaggaagaggagcgggagcaggagcgcggagcggagcgtcccgacccgccgtgcgtactttctggagggaaggggcgggggaatcggcccctgagggaagcgcccggtggcgagg

SEQ ID NO: 350415 - DNA, 66 bp, Homo sapiens
  chr6:83074829-83074895
  hyper
ccgtgtccgcccagcccccgctgccggaccagtgccccgcgctgtgcgagtgctccgaggcagcgc

SEQ ID NO: 350416 - DNA, 353 bp, Homo sapiens
  chr6:86159095-86159448
  hyper
cgcgcgtcgcctctgttttatcactaaggttttaattgtgaataaacaaggaactggattcgaatgatttcttagtttctgagatttttttgtctaagcatcgtagacttcgtgcgttctcaacccaacaggaagcgtcacatctcagtgagcttcggctctcacagcccgaaactgcaaggagctcctctgcccggcctctctttactcctcctctctgcccctcagctcgctcatctttcttcccgccccctctcttttccttctttggttctttgaagtgatgagctagcgcaaccacaaaccatacattccttttgtagaaaaacccgtgcctcgaatgaggcgagact

SEQ ID NO: 350417 - DNA, 269 bp, Homo sapiens; identical to SEQ ID NO: 200542
  chr6:86159509-86159778
  hyper

SEQ ID NO: 350418 - DNA, 243 bp, Homo sapiens; identical to SEQ ID NO: 200543
  chr6:86159903-86160146
  hyper

SEQ ID NO: 350419 - DNA, 123 bp, Homo sapiens
  chr6:87646737-87646860
  hyper
cgcgtagagaaagcgtgcaaacccgtcaactgctcccgccgttcctctccctcctcaacccaggctcgctacagaagaagggagtagggtctgcccccttgttgtatctattttccccttctc

SEQ ID NO: 350420 - DNA, 170 bp, Homo sapiens; identical to SEQ ID NO: 200546
  chr6:87646944-87647114
  hyper

SEQ ID NO: 350421 - DNA, 74 bp, Homo sapiens; identical to SEQ ID NO: 200547
  chr6:87647143-87647217
  hyper

SEQ ID NO: 350422 - DNA, 280 bp, Homo sapiens; identical to SEQ ID NO: 332855
  chr6:88678327-88678607
  hyper

SEQ ID NO: 350423 - DNA, 304 bp, Homo sapiens; identical to SEQ ID NO: 200552
  chr6:90121293-90121597
  hyper

SEQ ID NO: 350424 - DNA, 709 bp, Homo sapiens; identical to SEQ ID NO: 284243
  chr6:90121684-90122393
  hyper

SEQ ID NO: 350425 - DNA, 74 bp, Homo sapiens; identical to SEQ ID NO: 345243
  chr6:90122423-90122497
  hyper

SEQ ID NO: 350426 - DNA, 255 bp, Homo sapiens; identical to SEQ ID NO: 346839
  chr6:90142647-90142902
  hyper

SEQ ID NO: 350427 - DNA, 372 bp, Homo sapiens; identical to SEQ ID NO: 346840
  chr6:91005702-91006074
  hyper

SEQ ID NO: 350428 - DNA, 41 bp, Homo sapiens
  chr6:91320244-91320285
  hyper
cgtgtttgtgtagtaagccgagttctttcttgactgtctgt

SEQ ID NO: 350429 - DNA, 217 bp, Homo sapiens; identical to SEQ ID NO: 284267
  chr6:99272867-99273084
  hyper

SEQ ID NO: 350430 - DNA, 208 bp, Homo sapiens; identical to SEQ ID NO: 200570
  chr6:99273114-99273322
  hyper

SEQ ID NO: 350431 - DNA, 101 bp, Homo sapiens
  chr6:99276279-99276380
  hyper
cgaactgagctccgtgcctattcattattctctccctctgacctagggcgttaatatgatcaggcctatgactcggccgtgttctgttttcctattttgca

SEQ ID NO: 350432 - DNA, 274 bp, Homo sapiens; identical to SEQ ID NO: 200576
  chr6:99276430-99276704
  hyper

SEQ ID NO: 350433 - DNA, 234 bp, Homo sapiens
  chr6:99276781-99277015
  hyper
gtgcacttgtacacttcagaaggatttgcattcgtgctgtgtgcaggcagaataagagaactgaagtccaacttcaaccaaatacgcctgtttatcccagggctggagcaacagccctagcccttgaaaatggcttcagtgaaatagctgagtacaccctcctcccacttccccagtccgcctctgtgcgcaggtgtatgttagtgcactcgtccctagcttgccttcctcttc

SEQ ID NO: 350434 - DNA, 60 bp, Homo sapiens
  chr6:99292143-99292203
  hyper
cgctgacccaaatgcagtgaactgcacggcccttgtggggccccaactttgatgtgggcc

SEQ ID NO: 350435 - DNA, 109 bp, Homo sapiens
  chr6:99292521-99292630
  hyper
attaaaaccttaatcctgtttgagactttcttctctctctaaattcctttttcttatgaaaggggtgcaaagttcactacaaaaagtactataacagggagattaattc

SEQ ID NO: 350436 - DNA, 61 bp, Homo sapiens; identical to SEQ ID NO: 345244
  chr6:106443120-106443181
  hyper

SEQ ID NO: 350437 - DNA, 352 bp, Homo sapiens; identical to SEQ ID NO: 346842
  chr6:106533693-106534045
  hyper

SEQ ID NO: 350438 - DNA, 388 bp, Homo sapiens; identical to SEQ ID NO: 346843
  chr6:106534075-106534463
  hyper

SEQ ID NO: 350439 - DNA, 104 bp, Homo sapiens; identical to SEQ ID NO: 345245
  chr6:106958136-106958240
  hyper

SEQ ID NO: 350440 - DNA, 404 bp, Homo sapiens; identical to SEQ ID NO: 345246
  chr6:106958337-106958741
  hyper

SEQ ID NO: 350441 - DNA, 333 bp, Homo sapiens; identical to SEQ ID NO: 200605
  chr6:106959606-106959939
  hyper

SEQ ID NO: 350442 - DNA, 262 bp, Homo sapiens; identical to SEQ ID NO: 200606
  chr6:106960046-106960308
  hyper

SEQ ID NO: 350443 - DNA, 155 bp, Homo sapiens; identical to SEQ ID NO: 345249
  chr6:106961023-106961178
  hyper

SEQ ID NO: 350444 - DNA, 314 bp, Homo sapiens; identical to SEQ ID NO: 200609
  chr6:107810308-107810622
  hyper

SEQ ID NO: 350445 - DNA, 430 bp, Homo sapiens
  chr6:107810665-107811095
  hyper
gggcggggcgcggggacctctccaaggggtctccagcctccgcgcactctgcggtggcccccggagggggaaactattctggcagctcagtggggggaagctcgtccgggctgtggtttcctttccccgagaccccagcgttgcacccccgaggcggcaggctcagtcaaccctccccgggggacggcggccctctagccaggcgacctcaggtctcgcgacctcccgccgcccaaccttctcctttcacccccattcatttttcctcagcggctcctaggacgggctcaaaaaccaactccacacgcaacccagcccacctcgcggagctgagaagcagggctgggttccgagcgggcgccggcgcccctggcgtgtggcggggaggtggcggccgcggggggcgccgcgagccgcccgtgcccgccgc

SEQ ID NO: 350446 - DNA, 39 bp, Homo sapiens
  chr6:108478767-108478806
  hyper
cgaagccccccatgcggcaagagcgagtcgcaggaacaa

SEQ ID NO: 350447 - DNA, 159 bp, Homo sapiens; identical to SEQ ID NO: 200614
  chr6:108496966-108497125
  hyper

SEQ ID NO: 350448 - DNA, 72 bp, Homo sapiens
  chr6:108882975-108883047
  hyper
cgttgcgtgccctacttcaaggataagggcgacagcaacagctctgccggctggaaggtgcgtacccacccc

SEQ ID NO: 350449 - DNA, 264 bp, Homo sapiens; identical to SEQ ID NO: 346851
  chr6:111409052-111409316
  hyper

SEQ ID NO: 350450 - DNA, 273 bp, Homo sapiens; identical to SEQ ID NO: 200623
  chr6:111409368-111409641
  hyper

SEQ ID NO: 350451 - DNA, 945 bp, Homo sapiens; identical to SEQ ID NO: 346853
  chr6:112193858-112194803
  hyper

SEQ ID NO: 350452 - DNA, 72 bp, Homo sapiens; identical to SEQ ID NO: 332906
  chr6:116691827-116691899
  hyper

SEQ ID NO: 350453 - DNA, 69 bp, Homo sapiens
  chr6:119030678-119030747
  hyper
cagtaacaacaattggcgtgtgtgtgtgtgtgtgtgtgtgtgagagagagagagagagagagagagagc

SEQ ID NO: 350454 - DNA, 547 bp, Homo sapiens
  chr6:122931206-122931753
  hyper
gaattgaaattcccgcagtcacgtcacagaaatcttagcagaacctcatcatcgcccaagggaactgggagtggcgggcggggaggacgcgggttgtgtgacgatcaccgataattagttggtggttaacgcacaagtaggataaaagagctcgccccaggctgccagcagaaaaaagctaccgtggcacgtgccccggggagtgatgcggtggcccggtttgcacggagagcgggacaccgcctggggagccgcgctcgtagcctgggggcgggacgcggcggccgctccctccgcccccgagtagctgccaccgcctggctgcgccccagcccagtagctcagacgcggccgcatcccggtggactgtagaggcggcagcgagctagagcccgagtcgcagctccgggccgcagagcgctgggcgagcgcgagcgccagggcaccggcagggcaggcagctgcgcgcggctggtacgtacctggtggagcgggcgcgtgagtgggtgtccctatgcgaggagggaggagtgggacttgggaagtc

SEQ ID NO: 350455 - DNA, 58 bp, Homo sapiens; identical to SEQ ID NO: 346854
  chr6:126068722-126068780
  hyper

SEQ ID NO: 350456 - DNA, 155 bp, Homo sapiens; identical to SEQ ID NO: 345250
  chr6:126069942-126070097
  hyper

SEQ ID NO: 350457 - DNA, 439 bp, Homo sapiens; identical to SEQ ID NO: 284440
  chr6:127836226-127836665
  hyper

SEQ ID NO: 350458 - DNA, 31 bp, Homo sapiens
  chr6:127837749-127837780
  hyper
gctgactcatggctatgaacctaccagatgc

SEQ ID NO: 350459 - DNA, 291 bp, Homo sapiens
  chr6:130088466-130088757
  hyper
ctgtcatttcggcttattcatccagcagctgccggaaggaccgggctgaagcgtggccacgaggagggggatacccgtgcgagcgctgagccggcagagcggctgcagcccacgggctcctcggacccccgctgctgcgccgctgcagctgaccgtgcgaaagccgcatgttattgggtagagatcagctttccaggaacaggcatcagctgtgcacgagcccggcagcatctcgagacaagtgctagccggtgttggtgcaaaccaaagcttgctatgtgctcagaaagc

SEQ ID NO: 350460 - DNA, 365 bp, Homo sapiens; identical to SEQ ID NO: 332922
  chr6:131383375-131383740
  hyper

SEQ ID NO: 350461 - DNA, 96 bp, Homo sapiens
  chr6:134499457-134499553
  hyper
cggatacgtgatgggtggagcaggcgccccctgttctgtcccagcaacctactaagacttccgaacaggaaggtgacacacggcggaggggtgctt

SEQ ID NO: 350462 - DNA, 160 bp, Homo sapiens; identical to SEQ ID NO: 346856
  chr6:134639003-134639163
  hyper

SEQ ID NO: 350463 - DNA, 330 bp, Homo sapiens; identical to SEQ ID NO: 345251
  chr6:137112609-137112939
  hyper

SEQ ID NO: 350464 - DNA, 61 bp, Homo sapiens; identical to SEQ ID NO: 345252
  chr6:137112940-137113001
  hyper

SEQ ID NO: 350465 - DNA, 48 bp, Homo sapiens; identical to SEQ ID NO: 200668
  chr6:137243410-137243458
  hyper

SEQ ID NO: 350466 - DNA, 259 bp, Homo sapiens; identical to SEQ ID NO: 332933
  chr6:137365631-137365890
  hyper

SEQ ID NO: 350467 - DNA, 46 bp, Homo sapiens
  chr6:137808706-137808752
  hyper
cggagtagacggaagggaggcgagatggtgggaggctgaataacca

SEQ ID NO: 350468 - DNA, 120 bp, Homo sapiens; identical to SEQ ID NO: 332939
  chr6:138132663-138132783
  hyper

SEQ ID NO: 350469 - DNA, 368 bp, Homo sapiens; identical to SEQ ID NO: 200679
  chr6:143247975-143248343
  hyper

SEQ ID NO: 350470 - DNA, 208 bp, Homo sapiens
  chr6:143248451-143248659
  hyper
gatgactcttttttccactaggattatttccaagtcatcaaaagtgaaaaatcacgtaagtgttgttgcagttgttttcccctcgttttctatctcctttccaattgtgaattccgtaaataactgtcagacataaaacaggaaaaggaacatttcttcactgcagagctccagtaaggtgaaagtaggcaagaaggccccctgagac

SEQ ID NO: 350471 - DNA, 528 bp, Homo sapiens; identical to SEQ ID NO: 346860
  chr6:146136035-146136563
  hyper

SEQ ID NO: 350472 - DNA, 232 bp, Homo sapiens; identical to SEQ ID NO: 346861
  chr6:146136564-146136796
  hyper

SEQ ID NO: 350473 - DNA, 56 bp, Homo sapiens
  chr6:146349455-146349511
  hyper
cgggtcagggaattgcaactcactggtcaaagcgtcccttgcaggccctgccaggg

SEQ ID NO: 350474 - DNA, 258 bp, Homo sapiens; identical to SEQ ID NO: 200697
  chr6:149068930-149069188
  hyper

SEQ ID NO: 350475 - DNA, 223 bp, Homo sapiens; identical to SEQ ID NO: 284543
  chr6:149069508-149069731
  hyper

SEQ ID NO: 350476 - DNA, 59 bp, Homo sapiens
  chr6:149069769-149069828
  hyper
cgttcgagccaagggaggatgcagatccctcccaagtctgtggccagaagaggtcgtgc

SEQ ID NO: 350477 - DNA, 86 bp, Homo sapiens; identical to SEQ ID NO: 200703
  chr6:150284581-150284667
  hyper

SEQ ID NO: 350478 - DNA, 42 bp, Homo sapiens; identical to SEQ ID NO: 332956
  chr6:150962790-150962832
  hyper

SEQ ID NO: 350479 - DNA, 234 bp, Homo sapiens; identical to SEQ ID NO: 200709
  chr6:151815611-151815845
  hyper

SEQ ID NO: 350480 - DNA, 80 bp, Homo sapiens
  chr6:151815879-151815959
  hyper
gaacatgcgcgcatacacagacgctcgtgcacacacgcgaacaggcacatacgcgaacaaacacgggcgcgcacacacac

SEQ ID NO: 350481 - DNA, 181 bp, Homo sapiens; identical to SEQ ID NO: 345254
  chr6:152622733-152622914
  hyper

SEQ ID NO: 350482 - DNA, 520 bp, Homo sapiens; identical to SEQ ID NO: 346865
  chr6:158402113-158402633
  hyper

SEQ ID NO: 350483 - DNA, 41 bp, Homo sapiens; identical to SEQ ID NO: 346866
  chr6:159591277-159591318
  hyper

SEQ ID NO: 350484 - DNA, 240 bp, Homo sapiens
  chr6:159654657-159654897
  hyper
cgggcggccccgccccacgtcgcagggccgctcccactcctcctcggacccttacacggcgagctccagagggatgctccccacggccctccagaaccaggacgaggatgcccagggcagctacgacgacgacagcacagaagtcgaggcccaggatgtgcgggcccccgcgcacgccgcgcgcgccaaggaggcagctgcgtcccttcccaagcaccagcaggtggagtctcccacagg

SEQ ID NO: 350485 - DNA, 62 bp, Homo sapiens; identical to SEQ ID NO: 200729
  chr6:159655003-159655065
  hyper

SEQ ID NO: 350486 - DNA, 257 bp, Homo sapiens
  chr6:159655082-159655339
  hyper
acgaggaggaggacgcgggattttttaaaggcgggaaagaagaccttctgtcttcctctgtgccaaagtggccctcttcctccactcccaggggcggcaaagacgccgatgggagcctcgccaaggaagagagggagcctgccatcgcgcttgcccctcgcggagggagcctggctcctgtgaagcgacctctccccccacctccaggcagctcccccagggcctcccacgtcccttcccgactgccgcctcgcagc

SEQ ID NO: 350487 - DNA, 108 bp, Homo sapiens; identical to SEQ ID NO: 346867
  chr6:163834157-163834265
  hyper

SEQ ID NO: 350488 - DNA, 96 bp, Homo sapiens; identical to SEQ ID NO: 200737
  chr6:163834987-163835083
  hyper

SEQ ID NO: 350489 - DNA, 666 bp, Homo sapiens; identical to SEQ ID NO: 284617
  chr6:163835131-163835797
  hyper

SEQ ID NO: 350490 - DNA, 291 bp, Homo sapiens; identical to SEQ ID NO: 200740
  chr6:163835906-163836197
  hyper

SEQ ID NO: 350491 - DNA, 238 bp, Homo sapiens; identical to SEQ ID NO: 200741
  chr6:163837231-163837469
  hyper

SEQ ID NO: 350492 - DNA, 88 bp, Homo sapiens
  chr6:166076007-166076095
  hyper
cgcgggccgcgacccagccgcagccgccgccgcgcgcagagagggcgccggggcccccagcggggctggggcggcctgcggaggagag

SEQ ID NO: 350493 - DNA, 55 bp, Homo sapiens
  chr6:166268182-166268237
  hyper
cgagcccgcagaagccccagaggcctggcctgagcccgggagggacgcggggtcc

SEQ ID NO: 350494 - DNA, 140 bp, Homo sapiens
  chr6:166298522-166298662
  hyper
ttaccgccaggtggcagcgtagaccaagtaaggaagccggcccacccagagctgggaactacaggggtgtgctttgtggctttcagactcacaaagattccagatgaacatgatgtctctttttaaaatcgatttgaaac

SEQ ID NO: 350495 - DNA, 228 bp, Homo sapiens; identical to SEQ ID NO: 284635
  chr6:166667296-166667524
  hyper

SEQ ID NO: 350496 - DNA, 506 bp, Homo sapiens; identical to SEQ ID NO: 345259
  chr6:170124879-170125385
  hyper

SEQ ID NO: 350497 - DNA, 86 bp, Homo sapiens
  chr7:149024-149110
  hyper
cgggagaacacggtcaggcccgcaggagacgccgcggcacctgccagaaagagagccgcaggccaagaccaggagacgcgagagag

SEQ ID NO: 350498 - DNA, 575 bp, Homo sapiens
  chr7:149220-149795
  hyper
tgcgccggcgccggggcttcctccacaccgcgcctgcgccgatgacaacccgcctctacaggacgcctgcgcaacgccatagtcacctcatcagctccgtgcacttacgagtctctctctgatcgaccacgtgttcctgtcggctcacagaggccgcctcagggtcctcccccattgtcttcctcgcaccctccactgttcccggcccttcactctgcgcttgcgcaggagtcgctcgctcctctctgcgcctgcgcagaggccacctcctccccgcccgtccgctcccttggcgtcgtcttgggccgcgccccgaccccttctgtttacgcatgcgcaggagccgccctgcgcgggtggggggctgagcccctgtggcttcaggtttaaaggcgcgagcgccacccacgcaggcacaagggctcctagtcgttttatttttagcgtaaggttttcctctttaacaaggaagtaaaaaaaaaagttgtgcaataaatattaatcgtccttatatgtactcgggaacgttcgtcctttaggttttctcctggcgcatgggcgccgccaatcatttc

SEQ ID NO: 350499 - DNA, 238 bp, Homo sapiens; identical to SEQ ID NO: 332992
  chr7:822395-822633
  hyper

SEQ ID NO: 350500 - DNA, 333 bp, Homo sapiens; identical to SEQ ID NO: 332995
  chr7:1001822-1002155
  hyper

SEQ ID NO: 350501 - DNA, 114 bp, Homo sapiens
  chr7:1280235-1280349
  hyper
cggttagatgcagactggtttaattttgttgataaatcggttcgttgggggtggggacggggcgggggctgtggggagtggggagtgaggagagaagggtgttgtttctttgct

SEQ ID NO: 350502 - DNA, 95 bp, Homo sapiens; identical to SEQ ID NO: 346873
  chr7:1705153-1705248
  hyper

SEQ ID NO: 350503 - DNA, 290 bp, Homo sapiens; identical to SEQ ID NO: 333006
  chr7:2517249-2517539
  hyper

SEQ ID NO: 350504 - DNA, 395 bp, Homo sapiens
  chr7:3082731-3083126
  hyper
cgcggggggctgtcctctcccatctcccagctccacacccacttttggtgcggctgcccttcctccctgagccaggccccaccttcccaggagcctctgagtcaggctgggctgtggtctgcaaacttccgggcctttcaggtgtcagaaaagtttctcttcctccctctggggcaggtgcaccaaggggctgcagcctcctgacccccgattttttcctgtccagtaggaggaggtgggggctttgctgggcggtgatactcagagacgctcaaagagacacggaggagaggcacacgaggtggaaagtgagggagaaaaagggttggaagggaaaaaggggagaggagagtgagagagagaaggggggcagggggacagagatggagagggaa

SEQ ID NO: 350505 - DNA, 84 bp, Homo sapiens
  chr7:3083602-3083686
  hyper
agataaggaagagagggagggggcggagtcggtgcttcgggaggagggcggcaaggaggtgggggtgggagtggggacagggcc

SEQ ID NO: 350506 - DNA, 132 bp, Homo sapiens; identical to SEQ ID NO: 284748
  chr7:4784755-4784887
  hyper

SEQ ID NO: 350507 - DNA, 436 bp, Homo sapiens
  chr7:5458503-5458939
  hyper
cgggcttggctctgggcgttggcctggggtccgaggtctccttgcggctactcgaagtgggggagggggacagccagaaccagcaccggcccccacctttccctcccgggtgagcacggggttcaagggggcggcagctgtcctcctgctgtttcctccccgacctcagcctcggcgtgcagaagtcaggcagctcccagcgagcgcagaaggtgcgcagaggcagggctccgaggctacctcccgctgggcttccgaggctggtggcttggccttccctccacctcagcctcaccatccagcaaatgggcattaggccgtctgactgctgcgtcagattaggcgcggccctggcactgtgcatgcatgcatgagtagtagcttgttttcaccgcttcgcattagggcactttgccttgccaggccggagccagat

SEQ ID NO: 350508 - DNA, 128 bp, Homo sapiens
  chr7:5467061-5467189
  hyper
cgcctcccgactgacaaaattctccgtctttgttttaaaaccaaaggacaggccaaccttgagcccggccgtcacccctgtcgcgcttttgttggcgcaggctcggccccctacaccgggctggtgca

SEQ ID NO: 350509 - DNA, 107 bp, Homo sapiens
  chr7:5467905-5468012
  hyper
gctgctcacgccggggtgctccgggccggtctcgtgtcccgggccacgccgcgcaccctgctcaccccatcacggcctggggacccggagactgcgcagggaaccac

SEQ ID NO: 350510 - DNA, 635 bp, Homo sapiens; identical to SEQ ID NO: 346875
  chr7:5632268-5632903
  hyper

SEQ ID NO: 350511 - DNA, 123 bp, Homo sapiens
  chr7:5633472-5633595
  hyper
ccgccctttctcgctcgcggcgccgctgcggtccggagcactgcccattgcgcccccgctaggcacgcgggctaccccgcctggagggggcgaggagtggggctttgcccatcctcgggtgcc

SEQ ID NO: 350512 - DNA, 322 bp, Homo sapiens; identical to SEQ ID NO: 345260
  chr7:8476750-8477072
  hyper

SEQ ID NO: 350513 - DNA, 66 bp, Homo sapiens; identical to SEQ ID NO: 333032
  chr7:11870605-11870671
  hyper

SEQ ID NO: 350514 - DNA, 373 bp, Homo sapiens; identical to SEQ ID NO: 284815
  chr7:16460517-16460890
  hyper

SEQ ID NO: 350515 - DNA, 271 bp, Homo sapiens
  chr7:16793071-16793342
  hyper
cgtcatctgccagggccaagaatccagaggtgctgtcatatttctccttgccagcgtggatctcctccgagccccgccctccctcctcacctgctcctggggaaactacaccaaggccgccgctctggcctggggctccctcccacacggccttggccctctccccctcgccccgggaccgctccgcccctcccggatcccggtcggcggagcgcatttatttgcatatttctacctttgttccctgccagcggccaatcagcgcgcgggg

SEQ ID NO: 350516 - DNA, 182 bp, Homo sapiens; identical to SEQ ID NO: 114656
  chr7:16793380-16793562
  hyper

SEQ ID NO: 350517 - DNA, 215 bp, Homo sapiens
  chr7:17339346-17339561
  hyper
cggtcttaattctcattcttcgtagagtttggtaaggcgagatgttttaaagagctaaacacatgctgacttttacgaaggggctgagtgcctctaaaggtactttttggtccccaccaactggctttgtgttgcgctcatatttacttatttggcagcaattttgtagcgctcatcgtgaccatatcggtaaagtggatagaagtggtagcagg

SEQ ID NO: 350518 - DNA, 260 bp, Homo sapiens
  chr7:17339591-17339851
  hyper
ggaggatttgtattcttcagacatctttttcggaagcttgcttatcacttttggggtggctttagggtctgtaaaataaaagatttagaactgcatttgagagaggttttcattcttaacatctacctctaattcttttccccttcaaagttttcttctagttgagtgagtacaaacttgcttttgtcgttgtcggttgattttggtggaatatttgtgtgagatggccaattttttgtgtgtgtcagaaaaaactatcc

SEQ ID NO: 350519 - DNA, 104 bp, Homo sapiens; identical to SEQ ID NO: 346877
  chr7:18125868-18125972
  hyper

SEQ ID NO: 350520 - DNA, 218 bp, Homo sapiens; identical to SEQ ID NO: 200838
  chr7:18126225-18126443
  hyper

SEQ ID NO: 350521 - DNA, 76 bp, Homo sapiens
  chr7:19146849-19146925
  hyper
cgctgtaaatttcctatacaaatctcaaaatttttcttagcattgtcaactaccttcttggagacaggctacagcg

SEQ ID NO: 350522 - DNA, 59 bp, Homo sapiens; identical to SEQ ID NO: 200840
  chr7:19156644-19156703
  hyper

SEQ ID NO: 350523 - DNA, 127 bp, Homo sapiens
  chr7:19183520-19183647
  hyper
cggtggctggtggcgaagctgcagggcgcccaaggccccctgcggcccaggagtgacccgagtgcactcgccccttactctggcctggggcctgaagaaggcactggaacacggaagctgatgctgc

SEQ ID NO: 350524 - DNA, 312 bp, Homo sapiens; identical to SEQ ID NO: 284827
  chr7:19183746-19184058
  hyper

SEQ ID NO: 350525 - DNA, 1116 bp, Homo sapiens
  chr7:21984770-21985886
  hyper
cgagttaggcccttaacgcgtaattggggtcgtgctgtgcatatgatttgggatcttgcagcttgtttaactcggcccaatgacgttaccatttcccccaaatggttactaattccttgaaaacgtttacaaaagttctagaataaacactaaagttattatttttaaactccattatccaagttggactggtctggcgatcgactgttaaaaaaaaaaaattacaactttcttaagcttcctgatctctgtgccaattcccggagaaagtgtggggagtgcacaaaaaaagcccctcccccgtctcacgagggctgcaaacgcaggcgctgcgccccgctagctccccgcctgcacccccggcggccacccgagactgagcagagcgccaggctgagcgcggttgtgtgctggggcgaccggcctctgtggtccgcgtagcacaaacgtgacccactgcgcacacctgcagggcgcgcccactccggcactcaaccggctgggcgcgccagatccccagtgccgcagccaagggccacgtttccagcccaaggccagcaggaccgggtggcaaagggaagtcaaactgtgggtgcgtccggacggcggcgggcggccggaccctcacctggtagcgagtcgccaactccattcttcctaaccgggctccagtctcctcccagcacgcggccacgggagcccggactcaccacggcccggcgcaccaagaacgccccgcgcccgagcagctagcgcgctccgcccggagcacaggcgggccccgggaggggcgcacttgacgccctggacagggggagcgcgttgcgctgccccctcggtgccgcctcactgggcctcgtggctccgatcacgttccaacttcgcggccactgaccttgtcttcgcaggcggcgcgagagggggctgcagttgggcgcggcaagagcaattaccagtgttagggcgccgggctcccccctgcagcagagggagggagtggagccgtccggcggggtttagcgcgggagaaatgagggggctgtcccggcgcagcctccagctggcacgcgcgctggatacttggcagggtttattccaggtcatgccctggggcgc

SEQ ID NO: 350526 - DNA, 140 bp, Homo sapiens; identical to SEQ ID NO: 345262
  chr7:22893437-22893577
  hyper

SEQ ID NO: 350527 - DNA, 1088 bp, Homo sapiens; identical to SEQ ID NO: 345263
  chr7:22893607-22894695
  hyper

SEQ ID NO: 350528 - DNA, 209 bp, Homo sapiens; identical to SEQ ID NO: 346882
  chr7:23052818-23053027
  hyper

SEQ ID NO: 350529 - DNA, 713 bp, Homo sapiens; identical to SEQ ID NO: 284856
  chr7:23053080-23053793
  hyper

SEQ ID NO: 350530 - DNA, 246 bp, Homo sapiens
  chr7:23053819-23054065
  hyper
cgtcctccggggcgggatcagaacaacttctccaccaatgagaatcttcttctgctgggcctggggcggagccatgaggcgccttgagtgggcgtggtctgagcaatgggcgtgatccgggcgtccgagggaagttgattgactgtaaggtttgcggtggccgctaggcgatgacaatcagcgaaggtctcttagattctgagccgttagggcttatggccttctcagaaaaaaataaaccttacc

SEQ ID NO: 350531 - DNA, 107 bp, Homo sapiens; identical to SEQ ID NO: 346884
  chr7:23287654-23287761
  hyper

SEQ ID NO: 350532 - DNA, 522 bp, Homo sapiens
  chr7:23507580-23508102
  hyper
cgtttacgcacgcgttccaatacccctggcgagctcacagggcagaggcaaattcctctccactcggccgcgcccacggcctcccaaccccggacagagaaggaaaggagggacccccgcgtgtccgcagctgctttcgcctctcctgctcctggaggggtgggggaatcatccgctgcttcccaagccctgcaaaccccccaaactgcttgttgggacccatttcccgtaggagcaatttgacccgctcggaccgaggacattcagctgtgagctttcgagagattttgtaaccaataaccataatcccgcggcagaggccacagaaaagctttcaattcctgcccagcatcatcaacacacacacccccgccataaacttaaaagcaaggattaaagaccggaacaccacgccacacggcagggggtaagcaccagaggacaagaagttctcagctgagtctctccacccaataacggagtgagaacagaatcggggcaaacagaagcagcagctcacct

SEQ ID NO: 350533 - DNA, 760 bp, Homo sapiens
  chr7:23510081-23510841
  hyper
cggccagcggactgtgaaaatatcacactacgtgaggcaggcgccgcctccccataaaaaacccagaagggtgactggcaggagggaggggagaggaggaggaggaggagggaggaaggcgcaggaggcggaaaaaatccgctccgagtgtccggctttttgaatgagccacgtgttcaaactacaaatcaacgtctcacgtgaggaatcccagagcctcaattagagtgggtttcggagaaaaaagcgagcgagaggaagagggggaggggaaacgagattgggagagggactctgagaagggggaggaggaagaaggaaaatgctaaaggaaccgcagccggcaccaagcggggcgctgacggtcacaactcgagtttgtaaagggttatctggtctgggcggatcctgggagggagggctggaatattgatttttttttttttaatgaggaaatgggcagaggtactaacaggcagttcctcagcgctagttaccgtagttttaatcattcgatttttcaaaataggttattaacaacaaaaccagagtcacaatcccgaactcgcctggtggctttaatggcattagaagtgtaaccccagcaaagccgcaggcacgtttctaaggctggcatggacggaaatgctgcgaggaggggtgggggagtgggtgaggggggcagggggtgggggcaagacaggcgggcgacgcgccccaccccgtgcgcccttctcgggccctgggcaccgcgcgagtg

SEQ ID NO: 350534 - DNA, 228 bp, Homo sapiens; identical to SEQ ID NO: 346885
  chr7:23513246-23513474
  hyper

SEQ ID NO: 350535 - DNA, 241 bp, Homo sapiens; identical to SEQ ID NO: 284862
  chr7:23514425-23514666
  hyper

SEQ ID NO: 350536 - DNA, 221 bp, Homo sapiens; identical to SEQ ID NO: 333064
  chr7:23570157-23570378
  hyper

SEQ ID NO: 350537 - DNA, 868 bp, Homo sapiens; identical to SEQ ID NO: 333067
  chr7:24613119-24613987
  hyper

SEQ ID NO: 350538 - DNA, 338 bp, Homo sapiens; identical to SEQ ID NO: 333071
  chr7:25894678-25895016
  hyper

SEQ ID NO: 350539 - DNA, 195 bp, Homo sapiens; identical to SEQ ID NO: 284882
  chr7:25896938-25897133
  hyper

SEQ ID NO: 350540 - DNA, 109 bp, Homo sapiens; identical to SEQ ID NO: 345266
  chr7:25897246-25897355
  hyper

SEQ ID NO: 350541 - DNA, 295 bp, Homo sapiens; identical to SEQ ID NO: 346890
  chr7:25901811-25902106
  hyper

SEQ ID NO: 350542 - DNA, 207 bp, Homo sapiens; identical to SEQ ID NO: 200882
  chr7:25902138-25902345
  hyper

SEQ ID NO: 350543 - DNA, 224 bp, Homo sapiens; identical to SEQ ID NO: 345267
  chr7:26192423-26192647
  hyper

SEQ ID NO: 350544 - DNA, 111 bp, Homo sapiens; identical to SEQ ID NO: 200885
  chr7:26192748-26192859
  hyper

SEQ ID NO: 350545 - DNA, 90 bp, Homo sapiens; identical to SEQ ID NO: 345269
  chr7:27135176-27135266
  hyper

SEQ ID NO: 350546 - DNA, 142 bp, Homo sapiens; identical to SEQ ID NO: 345270
  chr7:27136790-27136932
  hyper

SEQ ID NO: 350547 - DNA, 103 bp, Homo sapiens
  chr7:27204281-27204384
  hyper
cgcctcctctcccgtagccctgcgggccgctcttcactgctctccagacttggggccctatctgaggcgtcccaaacaccaacttctggctcctggccccaac

SEQ ID NO: 350548 - DNA, 243 bp, Homo sapiens
  chr7:27223331-27223574
  hyper
cgaagctgcgggcaggctctacttgctccccctttaaaaaaaaaaaaaaaaaaaaaaaaaagacccacaagacaaaaaaaaaatcgcttttgacagattgaataacaattgtgaataacatgcagttgggcagaaggaggcacgtaattgccaccacgccagaggaaaatggcttcctttggacaaaaaggccaactttgggttaatttgttcttttaatatattgctagagctaagcgggct

SEQ ID NO: 350549 - DNA, 59 bp, Homo sapiens
  chr7:27233098-27233157
  hyper
gcagaaatgaaatcaactgtggcaaggccttggctgctttcacggaggagtttttctgc

SEQ ID NO: 350550 - DNA, 157 bp, Homo sapiens
  chr7:27238984-27239141
  hyper
cggctgcgtagccctggtggtagaaggcgaactccttagcgcgggagctgaactcctcggcagctgggccggcggtatccatgtacttgtccgcgaaggcggcggcggcggcggccgaggcgggctgcgcgcacgacttgatggcgttggggtgcgg

SEQ ID NO: 350551 - DNA, 71 bp, Homo sapiens
  chr7:27245310-27245381
  hyper
caggaccccttcaagtacacactgaggtgtgatcagagttttatgggcactttatatgctgtaatcataac

SEQ ID NO: 350552 - DNA, 37 bp, Homo sapiens
  chr7:27278957-27278994
  hyper
cgacaagccagctcctggcccccggctcaggactcct

SEQ ID NO: 350553 - DNA, 136 bp, Homo sapiens
  chr7:27279659-27279795
  hyper
aacagtgttcttatccagtcctctctttttttgtcttctttcctttaaaaacccaaccgctcttaatgtgaggttgatgaaaggatgcttttggaagaagtgacatttggttaaaacgttttccccctaatgcgcc

SEQ ID NO: 350554 - DNA, 77 bp, Homo sapiens
  chr7:27281871-27281948
  hyper
cgtagcttgtaaaaagacttttcagccagtttgaggttagctgccaggggcagacagttgtaataatgccgacagaa

SEQ ID NO: 350555 - DNA, 371 bp, Homo sapiens; identical to SEQ ID NO: 284934
  chr7:28450240-28450611
  hyper

SEQ ID NO: 350556 - DNA, 185 bp, Homo sapiens
  chr7:28995382-28995567
  hyper
cgagaagtcggcggacacgccggtgcccatggagcgcaggggccgtcgggtggagtacatgtgccgaacgtggaccggggccccgcccttccgcctagcccgcagtttcctacgcagccagcgagacgcccaggccgccaaggccaggagcaccagcagcgcgttgaccgtcagcagggccaagg

SEQ ID NO: 350557 - DNA, 332 bp, Homo sapiens; identical to SEQ ID NO: 200912
  chr7:28995992-28996324
  hyper

SEQ ID NO: 350558 - DNA, 161 bp, Homo sapiens
  chr7:29185654-29185815
  hyper
cgcgttgagggagtaagggaaagtgtcctgcacccgccaccctcccgcgctaagagcggcagaggaccccacagcttcgtacttccccggaggagctcctggagtaggagacggcttctagcctggaagaaccccgggtgcgacagttgtgccaggaaact

SEQ ID NO: 350559 - DNA, 37 bp, Homo sapiens; identical to SEQ ID NO: 200915
  chr7:29186197-29186234
  hyper

SEQ ID NO: 350560 - DNA, 496 bp, Homo sapiens; identical to SEQ ID NO: 200916
  chr7:29234008-29234504
  hyper

SEQ ID NO: 350561 - DNA, 159 bp, Homo sapiens; identical to SEQ ID NO: 345272
  chr7:29234886-29235045
  hyper

SEQ ID NO: 350562 - DNA, 292 bp, Homo sapiens; identical to SEQ ID NO: 346899
  chr7:29602717-29603009
  hyper

SEQ ID NO: 350563 - DNA, 66 bp, Homo sapiens
  chr7:29604726-29604792
  hyper
gcacagaaagtgggctgggagtctcgcttgctgtacccgcacctaagtgctcagaagcggcctttc

SEQ ID NO: 350564 - DNA, 31 bp, Homo sapiens
  chr7:31528326-31528357
  hyper
cgaaccgtgaaaggatgtgggctggacatac

SEQ ID NO: 350565 - DNA, 308 bp, Homo sapiens; identical to SEQ ID NO: 333118
  chr7:35576961-35577269
  hyper

SEQ ID NO: 350566 - DNA, 168 bp, Homo sapiens; identical to SEQ ID NO: 345273
  chr7:37960958-37961126
  hyper

SEQ ID NO: 350567 - DNA, 46 bp, Homo sapiens
  chr7:39454304-39454350
  hyper
taccccgcccccccaccacatttctgaaatgaaagagttatcaatc

SEQ ID NO: 350568 - DNA, 62 bp, Homo sapiens
  chr7:42267546-42267608
  hyper
cgctctttctctgcgctttcctgtcgagttcccttcaggttctggtttcctccgacggtggc

SEQ ID NO: 350569 - DNA, 139 bp, Homo sapiens
  chr7:42267822-42267961
  hyper
gccagcaaacagaacatgctggattgctcagagacggctctgggtgtctgggggcagaaggggtgctcccaggcccggctttgatccgcatttctgaagctggctttgggagacaatgcatctccgccagccaggccgc

SEQ ID NO: 350570 - DNA, 408 bp, Homo sapiens; identical to SEQ ID NO: 200954
  chr7:42276904-42277312
  hyper

SEQ ID NO: 350571 - DNA, 51 bp, Homo sapiens; identical to SEQ ID NO: 346902
  chr7:42927739-42927790
  hyper

SEQ ID NO: 350572 - DNA, 412 bp, Homo sapiens; identical to SEQ ID NO: 346903
  chr7:42928175-42928587
  hyper

SEQ ID NO: 350573 - DNA, 38 bp, Homo sapiens
  chr7:44364447-44364485
  hyper
cgcggatggggccacgcgcaggagcaggcgcaagcagg

SEQ ID NO: 350574 - DNA, 369 bp, Homo sapiens; identical to SEQ ID NO: 346904
  chr7:44365258-44365627
  hyper

SEQ ID NO: 350575 - DNA, 211 bp, Homo sapiens; identical to SEQ ID NO: 333131
  chr7:44788907-44789118
  hyper

SEQ ID NO: 350576 - DNA, 160 bp, Homo sapiens
  chr7:44924093-44924253
  hyper
cgttcctggatttctttcatctcatccgcataccggcaaaaggcgcctccgaacttgccccaggctttgaagggtacggtgatggcattgcggtaggacggcttcacctcgctcactcgcagaaacaccccgtatttgttgcagcccacatcgaagaaga

SEQ ID NO: 350577 - DNA, 309 bp, Homo sapiens; identical to SEQ ID NO: 200961
  chr7:44924469-44924778
  hyper

SEQ ID NO: 350578 - DNA, 102 bp, Homo sapiens; identical to SEQ ID NO: 345274
  chr7:50344738-50344840
  hyper

SEQ ID NO: 350579 - DNA, 208 bp, Homo sapiens; identical to SEQ ID NO: 200972
  chr7:50861127-50861335
  hyper

SEQ ID NO: 350580 - DNA, 106 bp, Homo sapiens
  chr7:50861531-50861637
  hyper
aagcgaactgtttgaaacgcacaaagtattaactgcgcagtccagatcctttatcctgggcgcagcaggacgggacggaagagctggggctgccccgtactctgtc

SEQ ID NO: 350581 - DNA, 294 bp, Homo sapiens; identical to SEQ ID NO: 200980
  chr7:55086689-55086983
  hyper

SEQ ID NO: 350582 - DNA, 65 bp, Homo sapiens; identical to SEQ ID NO: 333144
  chr7:63767198-63767263
  hyper

SEQ ID NO: 350583 - DNA, 110 bp, Homo sapiens; identical to SEQ ID NO: 333146
  chr7:64254700-64254810
  hyper

SEQ ID NO: 350584 - DNA, 56 bp, Homo sapiens; identical to SEQ ID NO: 346907
  chr7:64734140-64734196
  hyper

SEQ ID NO: 350585 - DNA, 60 bp, Homo sapiens; identical to SEQ ID NO: 200992
  chr7:64974448-64974508
  hyper

SEQ ID NO: 350586 - DNA, 51 bp, Homo sapiens; identical to SEQ ID NO: 346909
  chr7:65037711-65037762
  hyper

SEQ ID NO: 350587 - DNA, 156 bp, Homo sapiens
  chr7:69062203-69062359
  hyper
cgcacagctattttacccagagaggctggtcgcttttgttgatcgattctcggctgcagtcagctctttaatacaactttttatgagcatcagccacattgcggcgggaggaggggctgtggtggaaaaagcagggaaaccgccccccactcccaa

SEQ ID NO: 350588 - DNA, 421 bp, Homo sapiens; identical to SEQ ID NO: 201000
  chr7:69063038-69063459
  hyper

SEQ ID NO: 350589 - DNA, 318 bp, Homo sapiens; identical to SEQ ID NO: 201001
  chr7:69063552-69063870
  hyper

SEQ ID NO: 350590 - DNA, 282 bp, Homo sapiens; identical to SEQ ID NO: 201002
  chr7:69063900-69064182
  hyper

SEQ ID NO: 350591 - DNA, 200 bp, Homo sapiens
  chr7:69065161-69065361
  hyper
ttcctcgctcgcctttcccctgcgccccctccctgcaccccctccacagcagatgggcagaaagaaaggggttcgggcatcacaacaatgcgccccctctccacagagagctctgcccccactccttcctcctctccctccccaatcatggcttcttggctggtggaagtctctttgctgggtttggggcgcctgtggac

SEQ ID NO: 350592 - DNA, 181 bp, Homo sapiens; identical to SEQ ID NO: 346910
  chr7:70060834-70061015
  hyper

SEQ ID NO: 350593 - DNA, 238 bp, Homo sapiens; identical to SEQ ID NO: 346911
  chr7:70061149-70061387
  hyper

SEQ ID NO: 350594 - DNA, 58 bp, Homo sapiens
  chr7:76145303-76145361
  hyper
cgtcaccccagtaggctctccaggacccaggagcctccatcacctggaaggaccctct

SEQ ID NO: 350595 - DNA, 106 bp, Homo sapiens; identical to SEQ ID NO: 346912
  chr7:76751570-76751676
  hyper

SEQ ID NO: 350596 - DNA, 230 bp, Homo sapiens; identical to SEQ ID NO: 346913
  chr7:76751716-76751946
  hyper

SEQ ID NO: 350597 - DNA, 131 bp, Homo sapiens; identical to SEQ ID NO: 285105
  chr7:79081892-79082023
  hyper

SEQ ID NO: 350598 - DNA, 223 bp, Homo sapiens
  chr7:79082579-79082802
  hyper
gacactctcatggactttgctagtccagtggcttttctttttcaagcttttggacatggcagtggggcgagtcgcctcagttcctgggctccttggggttaggggggctggtggtgagagaatgaggatggaggagcaagggggcccagggggaagaacagcagactttgccttcgcccccctctattcggtgctttccctcttctttggatggagtgtggac

SEQ ID NO: 350599 - DNA, 194 bp, Homo sapiens
  chr7:79082826-79083020
  hyper
cggctgggcagaggtaggagagcttggatgaggttgtgctgtcccttgaatgacactcaaggctgtggccccgcagcagaggaagcagtggtggtggcgtcggcggcggcggcggcggcagccggagcgagcagtagccgagctggtgagcgggtgtggtgggggtggggaaggagggtagggatgccgggggc

SEQ ID NO: 350600 - DNA, 258 bp, Homo sapiens; identical to SEQ ID NO: 201015
  chr7:79764213-79764471
  hyper

SEQ ID NO: 350601 - DNA, 216 bp, Homo sapiens; identical to SEQ ID NO: 201016
  chr7:79764712-79764928
  hyper

SEQ ID NO: 350602 - DNA, 351 bp, Homo sapiens; identical to SEQ ID NO: 201017
  chr7:82072703-82073054
  hyper

SEQ ID NO: 350603 - DNA, 79 bp, Homo sapiens
  chr7:83277846-83277925
  hyper
cgcggatgccatgctgccgtgttcaccgtccaagccctcgctcctcactttaaggagggtctgagttttacttaggact

SEQ ID NO: 350604 - DNA, 258 bp, Homo sapiens; identical to SEQ ID NO: 201022
  chr7:83277959-83278217
  hyper

SEQ ID NO: 350605 - DNA, 45 bp, Homo sapiens; identical to SEQ ID NO: 346914
  chr7:87258398-87258443
  hyper

SEQ ID NO: 350606 - DNA, 190 bp, Homo sapiens
  chr7:87563639-87563829
  hyper
cgccacggccgccgcagcaccggccggggctgggtggaggtggccgcggggaccccgggggcgcggagcgagggaaacggactcggcggcgccggcatgaggagctgagcgtctcgggcgaggcgggctgacggcagcaccatgcaggcggcagtggctgtgtccgtgcccttcttgctgctctgtgtcc

SEQ ID NO: 350607 - DNA, 439 bp, Homo sapiens; identical to SEQ ID NO: 285134
  chr7:87563890-87564329
  hyper

SEQ ID NO: 350608 - DNA, 207 bp, Homo sapiens
  chr7:87564359-87564566
  hyper
gctagagaagaggaaggaaaaccgcttcgtggagcgccagagcatcgtgccactgcgcctcatctaccgctcgggcggcgaagacgaaagtcggcacgacgcgctcgacacgcgggtgcggggcgacctcggtggcccgcaggtgagaggctcggtccgggaggtggtcctccgcgcctcccggcccacccgagaccccacgattgc

SEQ ID NO: 350609 - DNA, 106 bp, Homo sapiens
  chr7:87936014-87936120
  hyper
cgatgggctggggagtggggtcctagcagcagggactggaggtgagctgaagcagataagggacgggagccttgtggcgaaaagtgacccacctgagggagaggcg

SEQ ID NO: 350610 - DNA, 188 bp, Homo sapiens
  chr7:87936226-87936414
  hyper
ctgctataagaagccagagaagggcgggacggtctgctggatttcgcaagagaagcggaaaagaacttgtttcctggaagagttcaagctgagaatcccagcagctggaaggaccggaacttctatactgcggtgctgctgatggtgccgctgacccccgggaagcggggattttaagggttacaccc

SEQ ID NO: 350611 - DNA, 295 bp, Homo sapiens
  chr7:90225450-90225745
  hyper
cggttccgcgccgcggctccttctgcgctgcgcccgcaactctgggctgagaacttctcccgccggcccactcgccctcgccccgcgcactcggcgccaggcgactcccgcaccttgtacccggcccgccccgcctcctccttcggccgcaccactccccctgccggccgcgcttctctccgttacaaaggagggaaaatgagccgggcggcggcggcgcggcgcggggccaccacggcggcggcgagcgcggccgcccccggcaccacgtaaaccgcccccgcccgcccagctg

SEQ ID NO: 350612 - DNA, 211 bp, Homo sapiens; identical to SEQ ID NO: 201040
  chr7:90226057-90226268
  hyper

SEQ ID NO: 350613 - DNA, 139 bp, Homo sapiens
  chr7:94285147-94285286
  hyper
cagggtgtactgaaggaggggtacggtggggtccgggacagaaagagaggctggtgcccaaagggcgcgctcaggcgcccggaacccgagcgggggagggggaggcggcggcctgttggccccgggacctccacgtcgc

SEQ ID NO: 350614 - DNA, 38 bp, Homo sapiens
  chr7:94536809-94536847
  hyper
cggagccaacacccgaacaggaaggggccttgccccag

SEQ ID NO: 350615 - DNA, 279 bp, Homo sapiens; identical to SEQ ID NO: 201051
  chr7:94537598-94537877
  hyper

SEQ ID NO: 350616 - DNA, 472 bp, Homo sapiens
  chr7:95025593-95026065
  hyper
cgccaggaacatctccccgactaaggacaggccgacccccagcaggaccagcgccacgagcttccccatggtctcggggtgcccagcggcgactgcgcggcgccgagagctctcgggggcgcggcgggcggttcctgcctcgcgtacggattggggcccgctcggccccgcccgcacacgcctcctacttacctgagcggcccgggtgccgcagcagggcgctgacgagtcccgccgagccccgccgcccgggttcaaggccgccttcacgcccacgattccttgttttttgggcagaggtcaaggctcaacggagagggagcccgggaccgagttgtggtgggagtttgctcctaacacccgcgaaatcctacctcaattcctcagatggcctgagggagaaaccggagggcccgggaatggcggggagctccagttcagagccggaactccggacttctgcaaggccaga

SEQ ID NO: 350617 - DNA, 77 bp, Homo sapiens; identical to SEQ ID NO: 201060
  chr7:98971600-98971677
  hyper

SEQ ID NO: 350618 - DNA, 396 bp, Homo sapiens; identical to SEQ ID NO: 346916
  chr7:98971810-98972206
  hyper

SEQ ID NO: 350619 - DNA, 79 bp, Homo sapiens; identical to SEQ ID NO: 345275
  chr7:99155672-99155751
  hyper

SEQ ID NO: 350620 - DNA, 215 bp, Homo sapiens; identical to SEQ ID NO: 201064
  chr7:99156600-99156815
  hyper

SEQ ID NO: 350621 - DNA, 77 bp, Homo sapiens; identical to SEQ ID NO: 345277
  chr7:99156982-99157059
  hyper

SEQ ID NO: 350622 - DNA, 154 bp, Homo sapiens; identical to SEQ ID NO: 333194
  chr7:99680237-99680391
  hyper

SEQ ID NO: 350623 - DNA, 243 bp, Homo sapiens; identical to SEQ ID NO: 345279
  chr7:100167136-100167379
  hyper

SEQ ID NO: 350624 - DNA, 239 bp, Homo sapiens; identical to SEQ ID NO: 285218
  chr7:100167621-100167860
  hyper

SEQ ID NO: 350625 - DNA, 145 bp, Homo sapiens
  chr7:100168054-100168199
  hyper
tgccggtgaggcccgagccccgggcttccgggggcctcgggggcttctggctgtggtttctccgtggctcgcccctcccccaggtcgccgaaagttcaaacattaaaggggcaggtttagagttctccgggcacaggcccggccc

SEQ ID NO: 350626 - DNA, 1057 bp, Homo sapiens
  chr7:100806337-100807394
  hyper
cggcgctcctccgcctccgcctcctcctgcgcgcgccgcgcctgggcctcccggccgggatagtggcgcgaaggcggcaaggcgtggtggtagtggcggcggcgcaaggccgagggcggctgcagtgtccgcggccggatgtagttggggaaagggtggtacggccctggcgggtacacctcgtcctcctcccgatcccagggcgggagcacctcgttccagtccggcagctcgtctcgtgcgggagcgggggcggggggcgggggctgcggggagcggacgtgggtgggggcgggggcggcacgggggggcggcacgggctcgggaggggcgttcttcttccgcttccgcttctcctccacctcctcgatgatgctgaccacgtcgtccgctggcaggtggagtttggtggacagctcaatgaggctgtcgatcgtctgcggatccatctcctcgtcgtcctcctcctccccgccctcctctgtcccctcggcctccttccgccggtggcccggcgtctcctcctgggagcgcttgtcctcggcgccggcttccccgtcctcctcctccgcgaacaggagcgcgttctgccgcgccctctccgcctcctccgcctctgcctccgcctcggccgcctcctcatcctcttcccccaccctctcctccccgccgcgtctctcctgctccgcctcctcctcctcccttgcactctctcgctcctccgccgcctcctgcagcccccgacccccgaggccgcgctgccgggccccgccctgcagcaaatactggagcagcaggtccgaggcgaggtcggccagccgctcttcctgcgccgcggcctgccgcgtggcctccgcctgccgccgcccggcctccacctgcgccagcccttgctggagaaggcgctcgcccgcctcggagccgcccaggagtgcgctctccggccggcgcgccttggggaacggggcggccacgccttggtacgccttggacaggggtgccaatgcctcgcctaggtgtgttttgggggaggacactccttccccgaacttgtggg

SEQ ID NO: 350627 - DNA, 168 bp, Homo sapiens; identical to SEQ ID NO: 346924
  chr7:100815484-100815652
  hyper

SEQ ID NO: 350628 - DNA, 101 bp, Homo sapiens; identical to SEQ ID NO: 346925
  chr7:100815930-100816031
  hyper

SEQ ID NO: 350629 - DNA, 257 bp, Homo sapiens
  chr7:100816655-100816912
  hyper
cccgggtgctgtctcttgaccagctgcgagcagaagcgctgcagcagcccggccacgcccttcccgcgctcccagggcgccacgcgcagcccctccaccagcaccgtctccccggcgtcgatcacgttcaccgactccagcgcgatctgcggaccgaggccgttagcgcggggccctccccgcctgcgcccctgccagggctgtcggttcactgggctctcctcttcccacacgctgagcactccgcgtcaccaccc

SEQ ID NO: 350630 - DNA, 487 bp, Homo sapiens
  chr7:101460542-101461029
  hyper
cggcccccggtgacctgcggcgccgggtcccttccttgcgtcccctcggggcttctgccctctctgcagggcccgccatggagcgcgcggcgggtgcgctcggagatgccttctcgggccgggttctcgaaagcagagccccgggggcccgttgggaccgtggcatgccgggcggtggtccgcgcgcggagtccccggcgccgcggggggaccgtgccggggctccccggcccgcgcccgagtcgccgccgtgcccaaggggcgagtgcctgcctgccaccccccgcccggaggagcggcgcacccttagggtccgccccgcacgtgccagctcggcgcccgcggcgccgggacagccccgggactctgccaggtggatgttgtgcgtagccggagccaggttgaaggtgagcggcgtgtgggccagaagtcccgaggttgcaggcgcggagggaaccggggatgtcggggggtgcccgggtcccgc

SEQ ID NO: 350631 - DNA, 251 bp, Homo sapiens; identical to SEQ ID NO: 201131
  chr7:106684920-106685171
  hyper

SEQ ID NO: 350632 - DNA, 221 bp, Homo sapiens; identical to SEQ ID NO: 346927
  chr7:106685920-106686141
  hyper

SEQ ID NO: 350633 - DNA, 182 bp, Homo sapiens; identical to SEQ ID NO: 201140
  chr7:112430003-112430185
  hyper

SEQ ID NO: 350634 - DNA, 142 bp, Homo sapiens; identical to SEQ ID NO: 201141
  chr7:112430224-112430366
  hyper

SEQ ID NO: 350635 - DNA, 152 bp, Homo sapiens
  chr7:113724594-113724746
  hyper
cggtgtgtttaccgacgtgggtgccagggctgcttcctccctgggagagccgcgggttctgaaggaaagggttggtgccaagtgtgtgtgtgagctcgcgactgccctttagagaaagggcgcgctgctctttcaggaaaggaaagattcaa

SEQ ID NO: 350636 - DNA, 229 bp, Homo sapiens; identical to SEQ ID NO: 201145
  chr7:113725472-113725701
  hyper

SEQ ID NO: 350637 - DNA, 229 bp, Homo sapiens; identical to SEQ ID NO: 201146
  chr7:113725858-113726087
  hyper

SEQ ID NO: 350638 - DNA, 482 bp, Homo sapiens; identical to SEQ ID NO: 285340
  chr7:113726887-113727369
  hyper

SEQ ID NO: 350639 - DNA, 114 bp, Homo sapiens
  chr7:115117321-115117435
  hyper
cgagccgccagacgtgagctaaagaaggtgctggggggcagaacgggtactggggcgcctggaggagagttgaggggcctgaaagactctgggggcccagctcggtcggtgggt

SEQ ID NO: 350640 - DNA, 90 bp, Homo sapiens; identical to SEQ ID NO: 333226
  chr7:116759594-116759684
  hyper

SEQ ID NO: 350641 - DNA, 750 bp, Homo sapiens
  chr7:120496826-120497576
  hyper
cgtaagggagaagccccatcctttcaccacatcctactcccaagggcaaaacggcagcgatctgcagggggcgggggagagagaacacgggacatctcaccatcacgcttcccacagcctgcccgtccctcctccacccgccctcagcagggtccagagggtcccgaggcccagtgcattcgagacatcgcctcatcaaaaatcatttgttaaaatcataatggtaactaaactcccaaaagttccaaaccggcttcagataacacctgctgggaaaagaaaagagcaactatccggatgaatgaagtcgcacagtaaactcgcgttctcaggggacacgcggcggagccctgtgcattctgatgagacgctcttgaaaacctccctcactccacgcccctcctcgaggacagctgtgctcggcactgtcctgaaggtgagaaaccacactgccccctaccccggacacgtcagaggcgccaccggcaagcccgagagaatgagcgcccttctagttaggacagttcctgggcactccaactccgcacccctctaccccgtcccgcagctcgggtgtgaatgcaagggactggggcggcggggcgggggcgggggcgggggcgagggggcagcgcggagttgagattccgcccggctactagggtttctctgggagaacgtgagaaatgatgttttcggccccagaatgatggattagcctgggacagtgggcggggggcggggggcgcc

SEQ ID NO: 350642 - DNA, 119 bp, Homo sapiens
  chr7:121942391-121942510
  hyper
tgtggtttttgtaattccctgaaacacacaaatgacaggaatatggttctgaaaaaaaaaatagcttaaaaagggaggagcagacacgtggaaggtagcgccaggcaagcagaagagcc

SEQ ID NO: 350643 - DNA, 226 bp, Homo sapiens; identical to SEQ ID NO: 201166
  chr7:121946146-121946372
  hyper

SEQ ID NO: 350644 - DNA, 54 bp, Homo sapiens
  chr7:124404307-124404361
  hyper
cgtgctgtttccccggcggggacccccaggctcatggattccttcacccaagga

SEQ ID NO: 350645 - DNA, 51 bp, Homo sapiens
  chr7:126891155-126891206
  hyper
cggggtgggacttgcttaggggacttaagggtttctgcaaccggcgagggg

SEQ ID NO: 350646 - DNA, 204 bp, Homo sapiens; identical to SEQ ID NO: 201176
  chr7:126893238-126893442
  hyper

SEQ ID NO: 350647 - DNA, 37 bp, Homo sapiens; identical to SEQ ID NO: 285393
  chr7:126988120-126988157
  hyper

SEQ ID NO: 350648 - DNA, 56 bp, Homo sapiens
  chr7:126988206-126988262
  hyper
cccacgggcagtgcggtgccactttcgcccaacagggtgccaagagagaaaactgc

SEQ ID NO: 350649 - DNA, 277 bp, Homo sapiens; identical to SEQ ID NO: 333248
  chr7:127291492-127291769
  hyper

SEQ ID NO: 350650 - DNA, 264 bp, Homo sapiens; identical to SEQ ID NO: 285416
  chr7:128828640-128828904
  hyper

SEQ ID NO: 350651 - DNA, 81 bp, Homo sapiens; identical to SEQ ID NO: 345282
  chr7:129421203-129421284
  hyper

SEQ ID NO: 350652 - DNA, 281 bp, Homo sapiens; identical to SEQ ID NO: 201185
  chr7:129421349-129421630
  hyper

SEQ ID NO: 350653 - DNA, 169 bp, Homo sapiens; identical to SEQ ID NO: 346933
  chr7:129424378-129424547
  hyper

SEQ ID NO: 350654 - DNA, 122 bp, Homo sapiens
  chr7:131242600-131242722
  hyper
cgtaaactgagtttatccggtgaaagaacaaagaagttcctttcccctcccccgctcccctccttttttccacccccaaagctgcctgggagacgcagaccccaggcccgcctgaagaggag

SEQ ID NO: 350655 - DNA, 73 bp, Homo sapiens
  chr7:134832843-134832916
  hyper
cgactgcgaaggcaagggggcaccagctcaggactgcatctgcctgccatttcccttccactcctcctttctg

SEQ ID NO: 350656 - DNA, 269 bp, Homo sapiens
  chr7:139168725-139168994
  hyper
tcttctttgtctctgacctcacccattttcccctccagccctatgccggggtgttggttttgagagttacagtttgggcggggaaggattggccaagcctgtctggatcctgggacctcagagaaatcagaatccaaaggaattggggcgacctgtggaaaagtagcccagttggttgtcctgacaatccagcagggtttcgaaaggactctccatcatacttgggaggactcccccactgagtaacgctaagagaaaagaaacagggc

SEQ ID NO: 350657 - DNA, 197 bp, Homo sapiens; identical to SEQ ID NO: 345284
  chr7:139929854-139930051
  hyper

SEQ ID NO: 350658 - DNA, 362 bp, Homo sapiens; identical to SEQ ID NO: 345285
  chr7:139930346-139930708
  hyper

SEQ ID NO: 350659 - DNA, 209 bp, Homo sapiens; identical to SEQ ID NO: 333277
  chr7:140103670-140103879
  hyper

SEQ ID NO: 350660 - DNA, 82 bp, Homo sapiens; identical to SEQ ID NO: 345286
  chr7:140771242-140771324
  hyper

SEQ ID NO: 350661 - DNA, 219 bp, Homo sapiens; identical to SEQ ID NO: 285467
  chr7:140771550-140771769
  hyper

SEQ ID NO: 350662 - DNA, 203 bp, Homo sapiens; identical to SEQ ID NO: 345288
  chr7:140771841-140772044
  hyper

SEQ ID NO: 350663 - DNA, 93 bp, Homo sapiens; identical to SEQ ID NO: 345289
  chr7:143105734-143105827
  hyper

SEQ ID NO: 350664 - DNA, 454 bp, Homo sapiens; identical to SEQ ID NO: 345290
  chr7:143105844-143106298
  hyper

SEQ ID NO: 350665 - DNA, 107 bp, Homo sapiens
  chr7:145814199-145814306
  hyper
gcagccactgcagtagacaaactcgaaacccagcgtttctgttttggaagagacagggttgtgacgctggtgatgtttctggaaagttgttcctggtcttggtgatc

SEQ ID NO: 350666 - DNA, 298 bp, Homo sapiens; identical to SEQ ID NO: 333287
  chr7:148394984-148395282
  hyper

SEQ ID NO: 350667 - DNA, 32 bp, Homo sapiens
  chr7:149112425-149112457
  hyper
ttaccgtcacactccaacgcactttcttcccc

SEQ ID NO: 350668 - DNA, 199 bp, Homo sapiens
  chr7:149119398-149119597
  hyper
cggggctgcggccgggcggctcccgcactgcgactaagggccagccggctggcaggcggggctggggctcggatgtcgggactagcgggtctctggcgcgaggcggccgccaccaccgagaaggccgcgcgcattcctagagcggccgccagcggccaggtgagggcgccgcggcctccggggcctcctcgcctctggc

SEQ ID NO: 350669 - DNA, 207 bp, Homo sapiens; identical to SEQ ID NO: 285506
  chr7:149119682-149119889
  hyper

SEQ ID NO: 350670 - DNA, 51 bp, Homo sapiens; identical to SEQ ID NO: 285507
  chr7:149120073-149120124
  hyper

SEQ ID NO: 350671 - DNA, 1023 bp, Homo sapiens
  chr7:149570406-149571429
  hyper
tcccgccgggtccctgaacgccggcccggccggtccaacctcattccgcttcccgccatcgaaacgcgaagcccccgccttcccccaaacgtctcagcgccgctggggcctttctggctgcgccgcctccgaccccaggccccggtccgcgcccgccgctcgctagtcctgggagtgaggagaacgcgtgctgaggacccggccagagggacagcggggaccgccctcccgctgcgtctctgaaagcgaggccgttcctcccgcgtccgacccccgcggggccgtcaggttcggggcggcccaggctgcgggtccgcagggcgcttcgggccgagccggcgcggcgcgtgaagggcaggggacgccccgaaagaccgctggggtgggaccccaagctccaggggtctttggaaataagaatgcggcgtgacgttggctgtgcgggcgcggggctgacgcggaccctataacccatcgccgaaaccgggcggccgcgcccctattcctcggcatttctctctgtccgcggccctgctcagccaatcagcgagtgggctcctaggcaggtcctgagtgacagcgcggcgggctggatcaggagatgcgcgtgcgcggcccggcccggctgatcgcttcgggtgctcgactcctgttgcgcatgctcagcgcgctgcccggctggggacccgcgcacctgcagcgcccgctgctcggccctgcatcctgcctgggcatcctgcgcccggccatgacggcgcactcattcgccctcccggtcatcatcttcaccacgttctggggcctcgtcggcatcgccgggccctggttcgtgccgaagggacccaaccgcgggtaaggaaagcgcgcaggccctgcagacctctccaccccggccccctggcccggctcgcccctccgccccggggcggcggcttcctgctctgcagcgagcgtccgcaggagggacgccaggaccccggacgccacctctgaggtctctctgcacctgggtctctgacagcc

SEQ ID NO: 350672 - DNA, 35 bp, Homo sapiens; identical to SEQ ID NO: 333296
  chr7:150102887-150102922
  hyper

SEQ ID NO: 350673 - DNA, 846 bp, Homo sapiens; identical to SEQ ID NO: 333298
  chr7:150671471-150672317
  hyper

SEQ ID NO: 350674 - DNA, 112 bp, Homo sapiens; identical to SEQ ID NO: 346943
  chr7:150714968-150715080
  hyper

SEQ ID NO: 350675 - DNA, 295 bp, Homo sapiens; identical to SEQ ID NO: 285522
  chr7:150715323-150715618
  hyper

SEQ ID NO: 350676 - DNA, 253 bp, Homo sapiens
  chr7:150863966-150864219
  hyper
cgcgcgatctaaaggtctgggacttcaaggctccaggcaggtgccgaggtgccgaggttccgagcaggttcctgtctggaatttccaggtgaaccggcctcccgccagccctggtcggccctagcacttaccgggcagacttggaaaagtctctgagaagtgcggaggcggaggtggtgggggctctgccactttctcccgggccggcagcagctcatcagcttccagcccaccctctgggcgtcggccgcct

SEQ ID NO: 350677 - DNA, 370 bp, Homo sapiens; identical to SEQ ID NO: 333305
  chr7:151038589-151038959
  hyper

SEQ ID NO: 350678 - DNA, 697 bp, Homo sapiens; identical to SEQ ID NO: 346946
  chr7:151722447-151723144
  hyper

SEQ ID NO: 350679 - DNA, 34 bp, Homo sapiens; identical to SEQ ID NO: 346947
  chr7:151723206-151723240
  hyper

SEQ ID NO: 350680 - DNA, 104 bp, Homo sapiens
  chr7:155246271-155246375
  hyper
cgcccccctccccgggcgagcctgggctaagtatcaagtcaggacagaagggcggtccccagtcggctcctggcccactctgcttccccaacacctagggagct

SEQ ID NO: 350681 - DNA, 39 bp, Homo sapiens
  chr7:155301671-155301710
  hyper
cgaatctcttgaaagttctctccttcgtcacagggtctt

SEQ ID NO: 350682 - DNA, 345 bp, Homo sapiens; identical to SEQ ID NO: 201261
  chr7:156433175-156433520
  hyper

SEQ ID NO: 350683 - DNA, 459 bp, Homo sapiens; identical to SEQ ID NO: 201262
  chr7:156433521-156433980
  hyper

SEQ ID NO: 350684 - DNA, 41 bp, Homo sapiens
  chr7:156796104-156796145
  hyper
ccctggctgcccagtgttggtgagggcgctgaggctgggcc

SEQ ID NO: 350685 - DNA, 63 bp, Homo sapiens; identical to SEQ ID NO: 346950
  chr7:156796431-156796494
  hyper

SEQ ID NO: 350686 - DNA, 96 bp, Homo sapiens; identical to SEQ ID NO: 346951
  chr7:156799510-156799606
  hyper

SEQ ID NO: 350687 - DNA, 210 bp, Homo sapiens
  chr7:157361395-157361605
  hyper
cggcacgcagaggcaggtaacaaacgaccagcctcagaagcagatgtgcttgctgcaaaccaccttcctacggcccagcagaggcacaacaagcagcgaattttttccagggcctcccgtgaacacggcaccctacgttgccatagcgacgccatcccagctctgagccgcaacaaagcggcagtgtctgtgtctcacctttggccatct

SEQ ID NO: 350688 - DNA, 53 bp, Homo sapiens
  chr7:157361751-157361804
  hyper
cgggggccggcgagaggaaaggatggcggatgtgagagggggaggaaggacgc

SEQ ID NO: 350689 - DNA, 216 bp, Homo sapiens; identical to SEQ ID NO: 285596
  chr7:157476655-157476871
  hyper

SEQ ID NO: 350690 - DNA, 107 bp, Homo sapiens
  chr7:158379699-158379806
  hyper
gacagagaggcgcgcgacccgtggccgggggcttgagacccagagcctgggggtgtcgcgctggaaccccgagacccccggagcccccgacccgctcgccaaggcgc

SEQ ID NO: 350691 - DNA, 93 bp, Homo sapiens; identical to SEQ ID NO: 285601
  chr7:158380396-158380489
  hyper

SEQ ID NO: 350692 - DNA, 126 bp, Homo sapiens; identical to SEQ ID NO: 346954
  chr7:158380510-158380636
  hyper

SEQ ID NO: 350693 - DNA, 42 bp, Homo sapiens
  chr8:495481-495523
  hyper
cgtggccacgtccgctcgggtcaccaaggcaacggccgggag

SEQ ID NO: 350694 - DNA, 68 bp, Homo sapiens; identical to SEQ ID NO: 201278
  chr8:495635-495703
  hyper

SEQ ID NO: 350695 - DNA, 335 bp, Homo sapiens; identical to SEQ ID NO: 345293
  chr8:4851007-4851342
  hyper

SEQ ID NO: 350696 - DNA, 117 bp, Homo sapiens; identical to SEQ ID NO: 201281
  chr8:4851375-4851492
  hyper

SEQ ID NO: 350697 - DNA, 73 bp, Homo sapiens; identical to SEQ ID NO: 201282
  chr8:4851508-4851581
  hyper

SEQ ID NO: 350698 - DNA, 125 bp, Homo sapiens; identical to SEQ ID NO: 201283
  chr8:4851611-4851736
  hyper

SEQ ID NO: 350699 - DNA, 34 bp, Homo sapiens; identical to SEQ ID NO: 201284
  chr8:4851780-4851814
  hyper

SEQ ID NO: 350700 - DNA, 66 bp, Homo sapiens
  chr8:4852588-4852654
  hyper
ggagacttgttgggcgctcgggtgggggaagctcacgccgcacaccggggaggaacaatgtaatcc

SEQ ID NO: 350701 - DNA, 108 bp, Homo sapiens; identical to SEQ ID NO: 333357
  chr8:6673921-6674029
  hyper

SEQ ID NO: 350702 - DNA, 202 bp, Homo sapiens; identical to SEQ ID NO: 346961
  chr8:6691849-6692051
  hyper

SEQ ID NO: 350703 - DNA, 224 bp, Homo sapiens; identical to SEQ ID NO: 201288
  chr8:6692462-6692686
  hyper

SEQ ID NO: 350704 - DNA, 209 bp, Homo sapiens
  chr8:6693170-6693379
  hyper
gggagggagggaggatgcttggggtttctggcttccagggtgggtggggacgaggtggtggagtccagctcaggtccgggctcctgataagggcagaagcgggttctgcgctgcccccaaccctgtaaccgccaggaaagcgcttggtgagcgtcgggactgcgcaggttcctcgggaggtggctaaactggccaccgcctctggggcc

SEQ ID NO: 350705 - DNA, 106 bp, Homo sapiens
  chr8:8639980-8640086
  hyper
tcaactagtaagggaagaacacctcaagtgagcatgcgcacaactccagtaatacactgcgcatgcgccccctcccaagcgctggcaggcctctgcgtatgtggac

SEQ ID NO: 350706 - DNA, 240 bp, Homo sapiens; identical to SEQ ID NO: 201296
  chr8:10873649-10873889
  hyper

SEQ ID NO: 350707 - DNA, 258 bp, Homo sapiens
  chr8:10874042-10874300
  hyper
catccctgcctggctgccacccggaagtccccgtccgcgccccgacagcgccgccctccggctggctgcagcgcgggccctcggtagggggcgttccaaggccccgcctcctcgtcactgccacggatgacgacgccccaggcccccggccccgcctccgcctctgcctccgcggccagcactggggagcgtcctggcctgcgcttgctccccaacccctccttgccccgctctgagccggcgcgtccttgctccccc

SEQ ID NO: 350708 - DNA, 376 bp, Homo sapiens; identical to SEQ ID NO: 285647
  chr8:11058799-11059175
  hyper

SEQ ID NO: 350709 - DNA, 158 bp, Homo sapiens
  chr8:11059210-11059368
  hyper
cgtttcagaatccggctggcccgagtgaggcggtccaaagtgatccctggagggggcagtgccagacgttttggggtccccttcctcagcgtcgcagctcacagctttcctcctggagaaacgccccctaacaccctcccggctgctggtggaggggc

SEQ ID NO: 350710 - DNA, 251 bp, Homo sapiens; identical to SEQ ID NO: 285656
  chr8:11550368-11550619
  hyper

SEQ ID NO: 350711 - DNA, 154 bp, Homo sapiens
  chr8:11554731-11554885
  hyper
cggagagcccctgtccttctgtcaaacacacgcacaggactaacgagggggatgagtggaaaccagccgcaaagaaatggagtgggaggttcttctttaaaatccattccgttcagaacacagtgaacaccctttgacagaacaaggactatct

SEQ ID NO: 350712 - DNA, 54 bp, Homo sapiens; identical to SEQ ID NO: 201306
  chr8:11554915-11554969
  hyper

SEQ ID NO: 350713 - DNA, 141 bp, Homo sapiens
  chr8:11555521-11555662
  hyper
aggagccctggactctgggttgacctcgtcccggtcgggttctctctcctcccacccaggcccggccgctttctggcgtccgtcctctcccaggaggtcctggcctctctctgcgtcgccaagtctcttgactcccagctc

SEQ ID NO: 350714 - DNA, 150 bp, Homo sapiens; identical to SEQ ID NO: 285667
  chr8:12808911-12809061
  hyper

SEQ ID NO: 350715 - DNA, 185 bp, Homo sapiens; identical to SEQ ID NO: 285668
  chr8:12809462-12809647
  hyper

SEQ ID NO: 350716 - DNA, 62 bp, Homo sapiens; identical to SEQ ID NO: 346964
  chr8:12809799-12809861
  hyper

SEQ ID NO: 350717 - DNA, 767 bp, Homo sapiens; identical to SEQ ID NO: 346965
  chr8:18870226-18870993
  hyper

SEQ ID NO: 350718 - DNA, 878 bp, Homo sapiens; identical to SEQ ID NO: 346966
  chr8:22436855-22437733
  hyper

SEQ ID NO: 350719 - DNA, 127 bp, Homo sapiens; identical to SEQ ID NO: 345299
  chr8:23021590-23021717
  hyper

SEQ ID NO: 350720 - DNA, 672 bp, Homo sapiens
  chr8:24771632-24772304
  hyper
cgaccgctttgccggctacatagagaaggtgcactacctggagcagcagaataaggagattgaggcggagatccaggcgctgcggcagaagcaggcctcgcacgcccagctgggcgacgcgtacgaccaggagatccgcgagctgcgcgccaccctggagatggtgaaccacgagaaggctcaggtgcagctggactcggaccacctggaggaagacatccaccggctcaaggagcgctttgaggaggaggcgcggttgcgcgacgacactgaggcggccatccgcgcgctgcgcaaagacatcgaggaggcgtcgctggtcaaggtggagctggacaagaaggtgcagtcgctgcaggatgaggtggccttcctgcggagcaaccacgaggaggaggtggccgaccttctggcccagatccaggcatcgcacatcacggtggagcgcaaagactacctgaagacagacatctcgacggcgctgaaggaaatccgctcccagctcgaaagccactcagaccagaatatgcaccaggccgaagagtggttcaaatgccgctacgccaagctcaccgaggcggccgagcagaacaaggaggccatccgctccgccaaggaagagatcgccgagtaccggcgccagctgcagtccaagagcatcgagctagagtc

SEQ ID NO: 350721 - DNA, 304 bp, Homo sapiens; identical to SEQ ID NO: 201345
  chr8:24812836-24813140
  hyper

SEQ ID NO: 350722 - DNA, 259 bp, Homo sapiens
  chr8:24814801-24815060
  hyper
cgtgaaactgcggcactactgcaggtattggtttagcatttttaaacctttacagcagttaatccgcctgttagtgtttctagattttcacatttcttaactgagaatgaagccgcagatggctttaacgtgttgcagtgtgtgggtggtggagggcagagaaagagttggaaacacagagactgacttgctgaggcagccgcgcgctccgcagccgggagcttcaagctgcctggatcctcaccaagctaaattcctg

SEQ ID NO: 350723 - DNA, 39 bp, Homo sapiens
  chr8:24815435-24815474
  hyper
gtcccccaggtttcatggagggattgcagagatttacac

SEQ ID NO: 350724 - DNA, 302 bp, Homo sapiens; identical to SEQ ID NO: 201346
  chr8:25041946-25042248
  hyper

SEQ ID NO: 350725 - DNA, 250 bp, Homo sapiens; identical to SEQ ID NO: 201347
  chr8:25042284-25042534
  hyper

SEQ ID NO: 350726 - DNA, 63 bp, Homo sapiens; identical to SEQ ID NO: 201348
  chr8:25042567-25042630
  hyper

SEQ ID NO: 350727 - DNA, 106 bp, Homo sapiens; identical to SEQ ID NO: 201349
  chr8:25042631-25042737
  hyper

SEQ ID NO: 350728 - DNA, 73 bp, Homo sapiens; identical to SEQ ID NO: 346972
  chr8:25042833-25042906
  hyper

SEQ ID NO: 350729 - DNA, 88 bp, Homo sapiens
  chr8:25904367-25904455
  hyper
ggtccgaactgcggagattcgcttgaaaacggatagggggttagggagtttgcggggcgggtgcacggaccgtctctgcacaggcccc

SEQ ID NO: 350730 - DNA, 41 bp, Homo sapiens; identical to SEQ ID NO: 333406
  chr8:25910878-25910919
  hyper

SEQ ID NO: 350731 - DNA, 311 bp, Homo sapiens
  chr8:26148757-26149068
  hyper
cgccccagagccccggcgctagtgctcgaggctgggacactgctaggtgcacacagccgcggcctggcgcaggcggtgcggacagagggtatgccatggcgagacgctggcgcggcgcaggccctgccggccgggacacggagggcggggcacaggcgcagcaggaagggggcgtggccaagagccgcccggccgctcccccgcccctccccctccgctctccgccccagcccggcggctccgccccctaggtgacgtcactggccaggccagccggcgccattttgaaagtggagtcgcctgcccctgcc

SEQ ID NO: 350732 - DNA, 372 bp, Homo sapiens; identical to SEQ ID NO: 346973
  chr8:28347825-28348197
  hyper

SEQ ID NO: 350733 - DNA, 1886 bp, Homo sapiens; identical to SEQ ID NO: 333411
  chr8:29205985-29207871
  hyper

SEQ ID NO: 350734 - DNA, 795 bp, Homo sapiens
  chr8:37553381-37554176
  hyper
cgcagctcccgctgcaccgcgatcgacgctgcggagcgagcccacccgccccgggagctcgcctccccggtgctcccccgccctccccgcccccccagcggcgctgcctcctccaaatgagcgattcgcccgctggatctaacccaaggacacccgaaagcagcggcagcggcagcggcggcggcgggaagaggccggcggtgccggcagcggtgtccctcttgccaccggcggaccccctgcgccaggcgaaccggctcccgatcagggtcctgaagatgctgagcgctcacaccggtcacctcctgcacccggagtacctgcagccgctgtcctccactcccgtcagccccattgaggtcagtccccggccgctgcccccgggcgccggccccattcctcccaccgcgaccgggaccctgacccagctcccagcgccccggggctcggtgcgacacccaagtctggtcacgctggcgggctgagtgaggaggggaagaaaaccgagggatcagagcccaccagggcttccccaggcttccccgtggaagggtctccttccacgctcgcccttcggagctccgtgttttctctcggattggatttgctcctggagtcccctctgggtcctttacttttcctctgatccccagtttccagccaggagttggtctctgctgggtcttccccgccccccacgccgggctgttttctttgaagccctggctgcccgggtcccacttcgcctctgtcccatccggtgagggcgcacggcgccctggcgctcccgatccc

SEQ ID NO: 350735 - DNA, 134 bp, Homo sapiens
  chr8:37595183-37595317
  hyper
cggctgtatccggagccagtgcttcctcagtgcggtgggggctctaattttacagttaaagaaaggggaacgttgactgagaacgaggaggaagcgagttgtagatctagccttgtgttcacacgacaccaggc

SEQ ID NO: 350736 - DNA, 217 bp, Homo sapiens
  chr8:37756358-37756575
  hyper
cgccccagatacggccccttcttccaagaagacccaaagctggcagagctgggcgggacagccgcagaaggggaagccaggtgagaacaccagcaccggccgagggctccgtcccgaaaggccttccccgctgctgcccggcttactctcgaagggtccagcgcccagaccgccctgccggaggggtccgcgcccccaggccgggccctcccctccc

SEQ ID NO: 350737 - DNA, 355 bp, Homo sapiens; identical to SEQ ID NO: 201389
  chr8:37756610-37756965
  hyper

SEQ ID NO: 350738 - DNA, 372 bp, Homo sapiens
  chr8:37756966-37757338
  hyper
ataacactccagaagcgaggagaagatcgccgcgactggcggcctccacggcccgccccggcgaccaggccactttaaggcttccggccacacccccgccaggccacgcccctcatggccaaggccacgcccctgcccgagccgcctgctccacctgctgcgccgcgccccgccccgccccgccccgccccgccggcctcagcagcgcgggcagctccgggcacccgggcgccggaggcggggctggcgcggccaggcaggcaggggatcacgtgcgcaggggcgggcgcatcgagaatctaatctgagaggtggtaggtgacggatggggtccccagctgccaaaggtcgcacggcgggaaggagctggcc

SEQ ID NO: 350739 - DNA, 153 bp, Homo sapiens; identical to SEQ ID NO: 201395
  chr8:38324508-38324661
  hyper

SEQ ID NO: 350740 - DNA, 215 bp, Homo sapiens; identical to SEQ ID NO: 285835
  chr8:38324861-38325076
  hyper

SEQ ID NO: 350741 - DNA, 226 bp, Homo sapiens; identical to SEQ ID NO: 201396
  chr8:38326050-38326276
  hyper

SEQ ID NO: 350742 - DNA, 539 bp, Homo sapiens; identical to SEQ ID NO: 346977
  chr8:41685769-41686308
  hyper

SEQ ID NO: 350743 - DNA, 111 bp, Homo sapiens; identical to SEQ ID NO: 201404
  chr8:49309646-49309757
  hyper

SEQ ID NO: 350744 - DNA, 164 bp, Homo sapiens
  chr8:49309797-49309961
  hyper
cggtgcagactccatttctctgccctccgccctccaccggggcgccccctctgcacaggccttatggcagctgcgatctttcctgccgttgcaggaaaggagctatttctggcaactctgtccctccacccagggcactcagcctgatctaatggagatttacc

SEQ ID NO: 350745 - DNA, 112 bp, Homo sapiens; identical to SEQ ID NO: 346978
  chr8:49834207-49834319
  hyper

SEQ ID NO: 350746 - DNA, 231 bp, Homo sapiens
  chr8:54570292-54570523
  hyper
cgcagctcccacccggcctcccctccgcagagctgggaccgtccccccaccccccatccttgctctgtgggcgccgcctgcactctctgaagcgcgaggctctgcacggtgtggggctggggcctttcgctccccttggctggctctctcctcctttgtcatttgcctttgtttgctgtgtgtgtctggttcaaagggcacgcctaccgagctggatagagtaaaggaaga

SEQ ID NO: 350747 - DNA, 61 bp, Homo sapiens
  chr8:54570562-54570623
  hyper
cacagactcaaaacaggacaaagcaattagagaaaattatcacgggcggaaggggcggatc

SEQ ID NO: 350748 - DNA, 151 bp, Homo sapiens
  chr8:55379013-55379164
  hyper
cgctagaggtcaccggagcgcgctcccctcgccagggacctacactcttcccgctgctacattaggccgcattaacaaggatctggattcactttaatttaaaaggtaaaagatcttaggtctgatgggggagtgcggcgaggagagctcg

SEQ ID NO: 350749 - DNA, 116 bp, Homo sapiens; identical to SEQ ID NO: 201413
  chr8:56014011-56014127
  hyper

SEQ ID NO: 350750 - DNA, 935 bp, Homo sapiens
  chr8:56792306-56793241
  hyper
cggtcacttccccgccctccgggctcaatatgcaaatccgagcaccaggaagtagctgggacctctcggccgagcccagagacagccagttcctctcccgccgcgccgggccgcgctgccgctcgctccccggccgtggcgcctccgggccagacgcgctgcagcctccagcccgcggcaagcggggcggccgcgccacccccggccccgcgccagcagcccctcgccgcgcgtccagcgttcccggccagcagcctccccatacgcaggtcctgctgggccgccccgtcgcgccccccactctgaactcaagtcaccgtggagctccgccgccccgaaactttcaccgcgagcgggtgagtcctctgcgcgagcccaggggtgggcgcgggcacgcgggcagtgggtgcaggggccgcggctgtgccaccagccggagtcccgggcgcagggtagactcggggccgggggcatcggcgcggcccgcggcggcttcctggccgcaccgcctctgggctccggcggcgaaggctcttagatgtcttcagccgacgggtgaccgggcccgggggagccagggcgcggggactgaggctccgcaggtgtccgccgcggagccgcgcaggggagcggtgggaggtgcgggcgcgggggcgggctcaccgcgtgtccttcccggtgagggcccgagggccggctgctgtccctgctccggccgcttctcgcacacagtggggaagccgctgcccttgcggagcgggcgcgcggcggggatactggagaggactcctcggattgtgcaatctgatctcccctctggaccctgggtctcctggcagtgggagatggggctcggccggcgccctctcgaggcccgcggacagttgccctccctggtggccccgggcaggagcgtgacgtcgaggggctgcagc

SEQ ID NO: 350751 - DNA, 148 bp, Homo sapiens; identical to SEQ ID NO: 345301
  chr8:58906804-58906952
  hyper

SEQ ID NO: 350752 - DNA, 102 bp, Homo sapiens; identical to SEQ ID NO: 346981
  chr8:60030067-60030169
  hyper

SEQ ID NO: 350753 - DNA, 238 bp, Homo sapiens; identical to SEQ ID NO: 201421
  chr8:60030908-60031146
  hyper

SEQ ID NO: 350754 - DNA, 349 bp, Homo sapiens; identical to SEQ ID NO: 201422
  chr8:60031791-60032140
  hyper

SEQ ID NO: 350755 - DNA, 202 bp, Homo sapiens; identical to SEQ ID NO: 285892
  chr8:60032288-60032490
  hyper

SEQ ID NO: 350756 - DNA, 292 bp, Homo sapiens; identical to SEQ ID NO: 201424
  chr8:61193765-61194057
  hyper

SEQ ID NO: 350757 - DNA, 119 bp, Homo sapiens; identical to SEQ ID NO: 345303
  chr8:61822259-61822378
  hyper

SEQ ID NO: 350758 - DNA, 144 bp, Homo sapiens; identical to SEQ ID NO: 201426
  chr8:61822883-61823027
  hyper

SEQ ID NO: 350759 - DNA, 260 bp, Homo sapiens; identical to SEQ ID NO: 201435
  chr8:65492407-65492667
  hyper

SEQ ID NO: 350760 - DNA, 267 bp, Homo sapiens
  chr8:65494311-65494578
  hyper
ccagctcggcggctgcagcggcagcagctgctgccctgcacccggcgctcggcgcctacgagcaggcagccggctacccgttcagcgccggactgcccccggctgcctcctgcccggagaagtgcgccctgtttaacagcgtctcctccagcctctgcaaacagtgcacggagaagccttaaacacacccccgaaaaacacaagaccgacccaaaatctagaggaaagcgaaaagctgctccccaccccctttattttggtcctctc

SEQ ID NO: 350761 - DNA, 84 bp, Homo sapiens
  chr8:65499649-65499733
  hyper
cgaggagagtgtttgtgctgggacctggcaggactggaggaggaaaggagccgccttccagcaggtccagcatccctaggttgc

SEQ ID NO: 350762 - DNA, 104 bp, Homo sapiens
  chr8:65710834-65710938
  hyper
cgcgtatgtgtgggaaaaagacagaagaagcctttgttattacaaagtcccaaaggaagccagtaccccgcagcaagttctgactgtctgcactggaaatcatg

SEQ ID NO: 350763 - DNA, 280 bp, Homo sapiens; identical to SEQ ID NO: 201437
  chr8:67025640-67025920
  hyper

SEQ ID NO: 350764 - DNA, 234 bp, Homo sapiens; identical to SEQ ID NO: 201438
  chr8:67026578-67026812
  hyper

SEQ ID NO: 350765 - DNA, 42 bp, Homo sapiens
  chr8:69242761-69242803
  hyper
cgctagagtaggcagggcagaaggtgctgaggagaggctcag

SEQ ID NO: 350766 - DNA, 56 bp, Homo sapiens; identical to SEQ ID NO: 201448
  chr8:69243011-69243067
  hyper

SEQ ID NO: 350767 - DNA, 1459 bp, Homo sapiens
  chr8:70745324-70746783
  hyper
agcatcccacctcgctgcgccaggggtaccgggtgttcgccgcctgggctcgcggcaccctcgggagtgaagctgccgacctgcaaagcagaaagagggcggtcagcgaagagcggctgcggcttggggctagcgtcccagcgccccggggaccagggttaggtgaccccgaaccgtccctagagggacggaggagctagtcaggagcggagccccggaggactaggcagcagccggctgcagtctccagtcccggaacaataagcagcaggcggtcggcggagactctccctcattgtctgccgcggacctgcccccgtcccgccccttctgccttaaacattgcgtttgcttttatatgttaataattatcaacctggcagctctgactcagaggcagtgtcttttaatcgagtgaactaactgcagcctttccgtactcctactccattactcaaaatagaaaatgcccaaaagaacaaaggaaactttttcacagacacacaatgtattccctgtcccaatttttctaaaaggaaaaaagaaggtgggggtaaactacgtgtgtagaaatgtgtgtgcacactggtgtgcgttggcacgtgtgcgcgactagatttgaatctgtctgctccaccagagacacacattcaaagccgaaggcagcagcaaaaaggtcaacatgcttgcctctttattcccaacaccaaaaataaccccctgaccgaaagaactcttcaattacaaataccaggggcattcgaggctgtggcccgcactaagtcccagagcgcggtatcaaacgaaaccgaaaatccgtctgctttgccgagagctagggaagccacaaccaaacaaagagatcccggcacgctgtcagagagcgcgcgaggagcccacggagccggctgggcgcacgcgggccggcggggaggtgtgctattgactgagcgcaccccgctagcgtgggcctggggagcgtgtgcgcgtgcgcggccacacacacacacacacacacacacacacacacacacacacaccggcgtactggaacctctctcgcgatcccgcacccagcttgaattcagcaagaatcgaaaacaggtgtgcccccgtggtaagaccccgcccctaatcttggggacccccactccactcctccagcctggggcaaggacggggggcggaatatgcaccaggtgggagacagccgagcttcactacactgggtttcattttgcagcgcgcctttgtgatgctgctgagaaaagaaaggaggaagggcaagggagaaaggcagagaggctgggcggccaagggtggccgctccggcatctccctcggctgtgctgggccaaacccgctcccagattcccggcctgccagccactcacaatcccgggcttccccgccgctgccttacccaggcgccttcccggggaaccccaccagccgctgc

SEQ ID NO: 350768 - DNA, 55 bp, Homo sapiens; identical to SEQ ID NO: 346990
  chr8:72756949-72757004
  hyper

SEQ ID NO: 350769 - DNA, 77 bp, Homo sapiens; identical to SEQ ID NO: 346991
  chr8:75897394-75897471
  hyper

SEQ ID NO: 350770 - DNA, 194 bp, Homo sapiens
  chr8:77589904-77590098
  hyper
cgccgaagaaaaagtctagaagtggaaattaccttttgtctcaatgttaattactccttgcctccaacactcaacacctaaccacctggtagtcctttttggttctcccctaactcggtgctcaatgtcagggtccgagtgctctgcagtggatgtggctgggctggggttgccctgtaaagtgttgaagagga

SEQ ID NO: 350771 - DNA, 135 bp, Homo sapiens
  chr8:80524710-80524845
  hyper
cgcgaaatttccgttttgtgggtcagacagtgccaaatatcggcaatttcataagctcagagagacaagacagtggagacacaggatgaccggaaaagattctggattcagggccttcatccgcaattggtcttg

SEQ ID NO: 350772 - DNA, 112 bp, Homo sapiens; identical to SEQ ID NO: 201479
  chr8:80695946-80696058
  hyper

SEQ ID NO: 350773 - DNA, 132 bp, Homo sapiens; identical to SEQ ID NO: 201480
  chr8:80696101-80696233
  hyper

SEQ ID NO: 350774 - DNA, 307 bp, Homo sapiens
  chr8:80696263-80696570
  hyper
gtgtgcagacccccacagggcggaggcgagcggcgcgacccactggacggacgcggcccggagctccaggcgcccggacctggcgggccctccctgggcgggcgggtggcgcgtcgcccgccgccgatccgggcggggtgaggggggcgctgtaattgcagcgcagctcgggttcccacgctcctattgttggcgactttgtttccaattcccatcacgtgtgctaattagttagcgctgctggctggctgggaggcgtgtggctggcctaaaagcagaaagatcacttcctgtagggagccgggcc

SEQ ID NO: 350775 - DNA, 208 bp, Homo sapiens; identical to SEQ ID NO: 201482
  chr8:80803900-80804108
  hyper

SEQ ID NO: 350776 - DNA, 134 bp, Homo sapiens
  chr8:81399496-81399630
  hyper
ggcatttcaatgggcgagggccggcgactgtggatctggagctggacgcgctggaggggaaggagttgatgcaggacggcgcgtccctgagcgacagcaccgaggacgaggaggagggggcgagcctgggcgac

SEQ ID NO: 350777 - DNA, 917 bp, Homo sapiens
  chr8:81785915-81786832
  hyper
cgtcatcctcctcctccgcgccccctcggggcttctcctccacacgcccgagccccctccgccgcctgctcccgccctcctcgtcctcgtcttcctcccctagaagcagcagcaccggcgacgaggcggcggcggcggccccggtggcccgaggggggccggtcccggcgctgcgcggcggcggcggcagcggcggcctccagctctccggggcgggcgccggggccgggcccgggacagggggcgggagcccgggtagggcggcttccttggcgggcgcgggcgccggcccggcaggctgcagcgcggcgcccccccggcggctgcccaggctggagcgcttggctagacgccgcgcctgcatgcctgagcgcggggttgcgggccgcggcgcggggccggagagtttgtcacctcctcttcctcctctgcctccgccggtggccgcagggccggggactcgcggccgcaaggggctgcaggagccgccggccaggacccgcggctgccactggctgcagaggcgcgggcgccgccttcgctggaccggccggcggggacgccggcggccggcggctacggcggggcggcgcggcggccgcgggcgggggtgggtgtgagcgagcggcgcgctgccgcctccgccgccgccgccgccgcccgggagccgcgggccgcgctgcgctccatgcggccggcggccgagcccgcgcgcgcctctcccggccggctgcgcccgcgcgctccgggcctaccgctgccgtgcctcggcgcgagctgtttgtgttgtatgttttccaccaccgcccccctcttcgcgagccattcctcacaaccctccggtccccccgctcagacaaaacccggactggattttttttttctcttacccacagtctccgaaagtctggcgcttc

SEQ ID NO: 350778 - DNA, 196 bp, Homo sapiens
  chr8:82192428-82192624
  hyper
cggcggtggatatgttgtcaaacggaggggtgcaggagaggcggggccaggcctccaggtgacccctctggcttcctgggcctgcagaggcgccgaaacgtgcaggcgccggcgtccatgaggcgtggggcgcgccgggcgagtccctgcttgcaggaggcgcccgagaggccgtcgcgtaccctggcaagaggag

SEQ ID NO: 350779 - DNA, 99 bp, Homo sapiens; identical to SEQ ID NO: 345308
  chr8:82193698-82193797
  hyper

SEQ ID NO: 350780 - DNA, 243 bp, Homo sapiens
  chr8:91657148-91657391
  hyper
cgaggctccgcgttaggtatgttttatgtgtaggacagacttcccaggctgcgatggaaagtaatcgtaactcctgccgtcaatgtcacttctctgctggtatttatctgatagagcgccctcctagggccgccacaagaccgctcaaaaacagacttggagagggataggccagcgggaccccacttaccgaaaacactgcattctgaagcccaaaaggtatgggtgtcagtctggccagcg

SEQ ID NO: 350781 - DNA, 245 bp, Homo sapiens
  chr8:91657421-91657666
  hyper
ctacgcgaataaccgcgctcagcttctcgctgctctggatcctggcggccacccaggcggtgaggagccgcttgcagaccacatgggcgatgaaggtgccgatgaggacgcccaccatcatcagacccatgcccagcacgaagccgtacaggtagccagcggccacgttgagcacgatgtagccccagccgcaggggaaagagaccacgatgaagcccacgacgaagagcaggacccccagcagc

SEQ ID NO: 350782 - DNA, 65 bp, Homo sapiens
  chr8:91996920-91996985
  hyper
cgtagctttgactaaaacaccagcaatgaaaaccttgtgccaccgggtggagggggcaaatcgtc

SEQ ID NO: 350783 - DNA, 52 bp, Homo sapiens
  chr8:94712366-94712418
  hyper
cggacgcgtctggtacgagactacaagtcgcacaggcggagagggggccccc

SEQ ID NO: 350784 - DNA, 248 bp, Homo sapiens; identical to SEQ ID NO: 286033
  chr8:94712881-94713129
  hyper

SEQ ID NO: 350785 - DNA, 71 bp, Homo sapiens; identical to SEQ ID NO: 201508
  chr8:95651655-95651726
  hyper

SEQ ID NO: 350786 - DNA, 176 bp, Homo sapiens; identical to SEQ ID NO: 346996
  chr8:95651845-95652021
  hyper

SEQ ID NO: 350787 - DNA, 223 bp, Homo sapiens; identical to SEQ ID NO: 201510
  chr8:95652591-95652814
  hyper

SEQ ID NO: 350788 - DNA, 377 bp, Homo sapiens; identical to SEQ ID NO: 201511
  chr8:95652863-95653240
  hyper

SEQ ID NO: 350789 - DNA, 54 bp, Homo sapiens; identical to SEQ ID NO: 346997
  chr8:97156910-97156964
  hyper

SEQ ID NO: 350790 - DNA, 77 bp, Homo sapiens
  chr8:97166796-97166873
  hyper
cggcattccacacctcgagggctcggctcgattcagtcccctggtccaaagagtgtcgtttgacccgggttattcaa

SEQ ID NO: 350791 - DNA, 275 bp, Homo sapiens; identical to SEQ ID NO: 201518
  chr8:97166903-97167178
  hyper

SEQ ID NO: 350792 - DNA, 214 bp, Homo sapiens
  chr8:97167223-97167437
  hyper
tcaagtcctgattcaattggggggtggggagggtggagaagagggattcgccaggcctgtcgtgatctgtggtctgagtgacttttttcttttaatgcgcagaaaccacaaggatgtttgagcacgtttttagatcccctcccccatcggcaactccaccgcgcgaactcccagaggcccgagagcctcccgcgttgaggaaaacgctatgtcc

SEQ ID NO: 350793 - DNA, 80 bp, Homo sapiens
  chr8:97507728-97507808
  hyper
tgccctctggggtctcagggagtgcggctgtttctggcccttctggttccccacgtcctctccctttgccatttaataac

SEQ ID NO: 350794 - DNA, 177 bp, Homo sapiens
  chr8:98787803-98787980
  hyper
taaaagaatctcgacccttgaatggagttacacgaacggccagatgaaagaaggaaggcccggacctccactcagggccgactaggggactggcggagggtgcacgctgatggatttactcaccgggtgcttggagctccagcagctggctggagcccgcgatgacgtcacggactc

SEQ ID NO: 350795 - DNA, 355 bp, Homo sapiens; identical to SEQ ID NO: 201523
  chr8:98788437-98788792
  hyper

SEQ ID NO: 350796 - DNA, 59 bp, Homo sapiens
  chr8:99953137-99953196
  hyper
agcttattggccctgagaataggcccaggccctctccacaggacccctaccgcacacgc

SEQ ID NO: 350797 - DNA, 826 bp, Homo sapiens; identical to SEQ ID NO: 346999
  chr8:99956460-99957286
  hyper

SEQ ID NO: 350798 - DNA, 51 bp, Homo sapiens; identical to SEQ ID NO: 345310
  chr8:99957709-99957760
  hyper

SEQ ID NO: 350799 - DNA, 244 bp, Homo sapiens
  chr8:101661596-101661840
  hyper
cgtccctggtgagccgagggataagtgagcattgccaccggccccctccctgcccaccctgaccccagccctgggcgcaccacgtagcggccccccagcgcgtcggaccgctgctgggacaccgggatacagaaatgcatcttcatggctgagcggtgtcttgggagtagcgctgggaacccgacctgcggcggcgggcggtgcgcggctctgaactcggcagcggtggacgcagcgcggcctg

SEQ ID NO: 350800 - DNA, 62 bp, Homo sapiens
  chr8:101661991-101662053
  hyper
gcatccacggccacccccaccccggacatcggccactgttggcattttctccaagaaggccc

SEQ ID NO: 350801 - DNA, 169 bp, Homo sapiens
  chr8:101920213-101920382
  hyper
cggagtgagaagctcttatccgcaggcaggtcatcctgacatctctctgcgagtctagctgagtctgggacttctacgggttttgaagggaggaagtgtgtgctgattggtccatgggtggccatcggcggggctggaaaaaacaccaaaagttctcactcccgcggtg

SEQ ID NO: 350802 - DNA, 62 bp, Homo sapiens
  chr8:101920468-101920530
  hyper
gggaacctatctgcctcctgctgccattgacaggtttgtccaccgcaatgccctggctatcc

SEQ ID NO: 350803 - DNA, 48 bp, Homo sapiens
  chr8:102092936-102092984
  hyper
cgggaggcttccctgcccgcctcggcctcgcttacaccgcaggtgctg

SEQ ID NO: 350804 - DNA, 141 bp, Homo sapiens
  chr8:102093137-102093278
  hyper
ggcaggaggcctccgcccggcttctcgctccctcttccctctccccgaccccctcccgggctgtcagccgactgccaccgtcaccatggctacgcggctcccgctcagttccacagtcagcaggagtcgagcaggggaggc

SEQ ID NO: 350805 - DNA, 32 bp, Homo sapiens; identical to SEQ ID NO: 201542
  chr8:102504696-102504728
  hyper

SEQ ID NO: 350806 - DNA, 143 bp, Homo sapiens
  chr8:102504760-102504903
  hyper
tccgagctcgggccccatgtgaggggcccccccttatcccacctttccggctaggtgagggcgcgagcgggcgagcgagcgagagtggtgaggggggacggaaaagcagaattacctgtagctcttgttctgccatctcgggc

SEQ ID NO: 350807 - DNA, 429 bp, Homo sapiens; identical to SEQ ID NO: 201548
  chr8:104511554-104511983
  hyper

SEQ ID NO: 350808 - DNA, 48 bp, Homo sapiens; identical to SEQ ID NO: 347002
  chr8:105236123-105236171
  hyper

SEQ ID NO: 350809 - DNA, 37 bp, Homo sapiens
  chr8:105600489-105600526
  hyper
cgcccggattcggcagagcccttgcccccgaggtgga

SEQ ID NO: 350810 - DNA, 329 bp, Homo sapiens; identical to SEQ ID NO: 201550
  chr8:105600681-105601010
  hyper

SEQ ID NO: 350811 - DNA, 148 bp, Homo sapiens
  chr8:105601687-105601835
  hyper
agcacggtcgctgtccgagggctgggctctggcccagcgggtggggggagggggggtgggataccagctgggaggctgaaggtggttccgtgttgggggaggcgtggatggtctgaagctgacaacttgggagttccttcctctatcc

SEQ ID NO: 350812 - DNA, 622 bp, Homo sapiens; identical to SEQ ID NO: 347003
  chr8:107669381-107670003
  hyper

SEQ ID NO: 350813 - DNA, 633 bp, Homo sapiens; identical to SEQ ID NO: 201557
  chr8:107670289-107670922
  hyper

SEQ ID NO: 350814 - DNA, 105 bp, Homo sapiens; identical to SEQ ID NO: 345314
  chr8:107670978-107671083
  hyper

SEQ ID NO: 350815 - DNA, 225 bp, Homo sapiens
  chr8:109799189-109799414
  hyper
cgatttcctttgcagctccctaatccggggtttccattctcagtggagaatggataatcccaggggaccagctaaagactcttttcttccgtcctctccctctttttcctctgatctgcttaaaagcccagttaacgacattgcaccttaaagcgaggggacacgcactttccctcgtccatctgtcatcaattaaaagcattaatatttgctttaaactgacac

SEQ ID NO: 350816 - DNA, 42 bp, Homo sapiens
  chr8:109799903-109799945
  hyper
aggggcggtccctgcatccctcctgtctctgtctcctcccac

SEQ ID NO: 350817 - DNA, 99 bp, Homo sapiens
  chr8:110986113-110986212
  hyper
cgcgcccgcctccccgcccagccgccgcgtgcctccggggtacctgtccctgcagcaggaatcgatgctgagctcatcgatgccccagtactggatctc

SEQ ID NO: 350818 - DNA, 174 bp, Homo sapiens
  chr8:110987222-110987396
  hyper
ttgagaatttatattcctcccttttcttttactgctgcttcataggcctcccccggggtgttcgctgggggtgtgagcaggtgggggagggttctctgggtgagggggccgcaccattttctcccaattcactctcattctagtctgatgatcactgacgctccattttcttcc

SEQ ID NO: 350819 - DNA, 65 bp, Homo sapiens
  chr8:110987616-110987681
  hyper
cggagctctcattttagaaggaaaggcaaaaagacaaggaatagaacaagcgtgggctggggcag

SEQ ID NO: 350820 - DNA, 300 bp, Homo sapiens
  chr8:110987956-110988256
  hyper
ggaaactgtgttccagctgagctctacccagcgcctgctgccttgccttgccccgcctccacctccctccgggctcctggcccctgcgcttacgctaagcgtgtccgccccgcccgctctagctctgagagccactcgcccagtgcttccagcaccagcagaggggagtggcaggatctaagggagggaggtgagacggcgggggtggaggcggggggtagtgaggtgcccggtgacactcaatattacattcatcctgaatacacttgcagaattactgcatttgattcccgtttcccc

SEQ ID NO: 350821 - DNA, 341 bp, Homo sapiens; identical to SEQ ID NO: 286136
  chr8:114447448-114447789
  hyper

SEQ ID NO: 350822 - DNA, 818 bp, Homo sapiens; identical to SEQ ID NO: 345315
  chr8:114449602-114450420
  hyper

SEQ ID NO: 350823 - DNA, 194 bp, Homo sapiens
  chr8:119123513-119123707
  hyper
cgggagagagcggggctgaatatctcgcacccagggcgggcgagcagcggactgtaattttcttgcatgcaacaagacggaggaaaagaaagagagaggggagaaaaaaaaagctcccgatacccaatcaatggcaagacgaagtgattgccttgcctctcggattcctctcggcagcgtggaaaatgagcccc

SEQ ID NO: 350824 - DNA, 60 bp, Homo sapiens
  chr8:120220368-120220428
  hyper
cgatcaggggtatgggggtgcgcatggagacgcccgcggagcgctggcgctggccagcgg

SEQ ID NO: 350825 - DNA, 326 bp, Homo sapiens
  chr8:120220895-120221221
  hyper
ggcatccttgtcccccgggctgtcttcctctgcgtccgcccccggcctccttcccttcgacgtggctttgtcctgcgctccctcccggggtcctctcggtgccccgcgccgccgcccgggccctccctcctagcacctgttacgcgggcacctgctcccccgcgggcgacggaaattgcctggggagggcgagtaggcggcccggcagggccgaacattggggacgtggaggaaagaaaggtgttggggctcagaggcgcctttagaaacccagggcatggccaggggccgcgcttggccggagcgagctcctggctctcggcctc

SEQ ID NO: 350826 - DNA, 540 bp, Homo sapiens; identical to SEQ ID NO: 347007
  chr8:121823361-121823901
  hyper

SEQ ID NO: 350827 - DNA, 211 bp, Homo sapiens; identical to SEQ ID NO: 347008
  chr8:121824481-121824692
  hyper

SEQ ID NO: 350828 - DNA, 79 bp, Homo sapiens; identical to SEQ ID NO: 333566
  chr8:124778505-124778584
  hyper

SEQ ID NO: 350829 - DNA, 72 bp, Homo sapiens
  chr8:131456212-131456284
  hyper
gggtgggatttatccacagaaaaccctggacgcggaaggtgcctttctaaggccgggacagcggcaaaggac

SEQ ID NO: 350830 - DNA, 310 bp, Homo sapiens; identical to SEQ ID NO: 286199
  chr8:133493185-133493495
  hyper

SEQ ID NO: 350831 - DNA, 150 bp, Homo sapiens
  chr8:140643192-140643342
  hyper
cgaatggtccgctaggacggagagcctgtgcctcaggggctccgctccctgcaagaggggctctgcgcagcgccggccaccggagaggcaacggcgccctctggcgggcactcgggcgactgcagggacacggccccgggtgcggggtcg

SEQ ID NO: 350832 - DNA, 1631 bp, Homo sapiens; identical to SEQ ID NO: 333579
  chr8:142138208-142139839
  hyper

SEQ ID NO: 350833 - DNA, 449 bp, Homo sapiens; identical to SEQ ID NO: 345316
  chr8:142317706-142318155
  hyper

SEQ ID NO: 350834 - DNA, 415 bp, Homo sapiens; identical to SEQ ID NO: 345317
  chr8:142318184-142318599
  hyper

SEQ ID NO: 350835 - DNA, 106 bp, Homo sapiens
  chr8:142427489-142427595
  hyper
cgggcggtggggctggtgggctgggcagggggtctgaactggagggactcgggcgccctcctcctcagggtgcaggacagcacctgcacggcggggccgcatttcc

SEQ ID NO: 350836 - DNA, 327 bp, Homo sapiens; identical to SEQ ID NO: 286229
  chr8:142427700-142428027
  hyper

SEQ ID NO: 350837 - DNA, 69 bp, Homo sapiens; identical to SEQ ID NO: 333583
  chr8:143483659-143483728
  hyper

SEQ ID NO: 350838 - DNA, 120 bp, Homo sapiens; identical to SEQ ID NO: 347012
  chr8:143531858-143531978
  hyper

SEQ ID NO: 350839 - DNA, 296 bp, Homo sapiens; identical to SEQ ID NO: 117271
  chr8:143556722-143557018
  hyper

SEQ ID NO: 350840 - DNA, 219 bp, Homo sapiens
  chr8:144240980-144241199
  hyper
cgcgggccccctactcaccgggcgccgagcacagcaggacggccagcagcgccaggccgaggcccttcatggctgcaggcagcatgctccgggtgggcctgggggcggcgcgggggcttggggcgcgggtcctctggggcgcaagcctggaggggagaagcatcggtcaggagaccccaaagaccctctcctttcccagcctcaggatgcaaccttctc

SEQ ID NO: 350841 - DNA, 104 bp, Homo sapiens; identical to SEQ ID NO: 333591
  chr8:144417159-144417263
  hyper

SEQ ID NO: 350842 - DNA, 394 bp, Homo sapiens
  chr8:144640377-144640771
  hyper
cgccaagccaaggttcctccggacgcgcgaggctggtgctccaggcgggctggcgggaagagggggcaggaagggggccggggcgggctctccgggacggttccgggagggcgtcctgggcgggccctgcgtcaggttgcagtttcacttttagctctgggcacctccagctcctgctcgccggacggctcccagggagagcagacgcgccagacgcgccaccctcggggcgccgacggtcacggtgagctgcgccccgccccctcccccggcctggctggagctcccgagtggggccggccgctggctcccgggtgggggatgctggccctgctgccccagcgttcgcccagaaggccccgcgccgcacacgggggcggaagctccaggcttc

SEQ ID NO: 350843 - DNA, 93 bp, Homo sapiens; identical to SEQ ID NO: 333596
  chr8:145692498-145692591
  hyper

SEQ ID NO: 350844 - DNA, 77 bp, Homo sapiens; identical to SEQ ID NO: 345318
  chr8:145698674-145698751
  hyper

SEQ ID NO: 350845 - DNA, 526 bp, Homo sapiens; identical to SEQ ID NO: 333600
  chr8:145910996-145911522
  hyper

SEQ ID NO: 350846 - DNA, 37 bp, Homo sapiens
  chr9:118139-118176
  hyper
cgcaggggatgtggcggccggatcacctggccccggc

SEQ ID NO: 350847 - DNA, 878 bp, Homo sapiens; identical to SEQ ID NO: 333605
  chr9:503936-504814
  hyper

SEQ ID NO: 350848 - DNA, 375 bp, Homo sapiens; identical to SEQ ID NO: 333616
  chr9:4297365-4297740
  hyper

SEQ ID NO: 350849 - DNA, 315 bp, Homo sapiens; identical to SEQ ID NO: 286313
  chr9:6644554-6644869
  hyper

SEQ ID NO: 350850 - DNA, 49 bp, Homo sapiens; identical to SEQ ID NO: 201665
  chr9:10612635-10612684
  hyper

SEQ ID NO: 350851 - DNA, 143 bp, Homo sapiens
  chr9:10613299-10613442
  hyper
gattccagggatccagggtaaagcggttcgcgcgggaacaggaggatatgtcaggcacaggctattccccatcactatagccacagaggactggtccagatgcggatcccgatctgtgcttcttcaggtgttcgcgtgctttc

SEQ ID NO: 350852 - DNA, 2011 bp, Homo sapiens
  chr9:14313785-14315796
  hyper
cgccgccgccgccggtgttggctgcttttcgcctgggtttggggatttgttttctattttgcagttgttgttgttgttggggtgtagggggtgcgcgaaggttcggtgtgggttggattggggtggtggttggtggtaaaatgctttttcaaaaaaggcggggaggggggcgcgggagggcgcaggagggcgagcgggcgggcgggagggagagcggggagaatgtgtcaccgcgctgggaaagttcaaggttacagccccaagcactgcggcaggatcccggagtggtgatcgcaggcgaaactttgccgcgagccgaccatgtgtgtgcgcgaggggcagcgtgagcgagtgcgcgcgggtggcggggcgcgcgcgggagagggccggggtgggggcggggtgggatgggggagaagggagaggccggggtgagggagggggcgcgagcgctgatctctggggcggaagaggctcgcggcgcgtggtccccggcagcagcagccgccgccgcccgcgccgggtcttcggcgcccggccgcccgcccgcccgcctcgccccgcgtctgacccggccgagcgtggaggctgctgttgccgccgctgcccagagcccaggggtatcaaaacgatctcctgaaaaattccaaacgataaatcccgctctcccgctcggctccaaactcctctcttttctgctctaggctcttttttttccctccctctcttgctttctttcgttgcaaaacttggaagttgaaaaattcaccggttccaccctctggaccccgctcgagctctctccaaatcagacttaaggattgttttattatttaattacacaatcatcgctttactcctcctcctgcaaacgcgcattccttttgcaccagcctctccacaccccccgcccccccaccttcctcctcctcctccttctccttctctccccccacctctccctcatttgttaaaggtatcctaccggtgctacagaaccatgactttttttttttttccaaaatagctcttctttccgctgccctccccacaccagcacacacatacacacccccgaaaacccgccctggaagaggtatttcggtgctcgctgcggactcttttaagccgcgggaacatccgagtgggagaagcaccgaaaccgtctgagcccgagaaaggaacgagtggaaaattccctcacacccaggccgcccccaggccggggctggggcgcggacactcgcacccggggcgggctcagtccgcggagcctgcggctgccgggaaaagggggaggccgagcaggcggggacctgagcgaacttgggctcaagtagttggggcgcgccggcgtggaccaggggggtgcggcgcccagcccccgacggccccgcccggagcccgggttcgcggatagggagggggtgcgggttcgtcccgggtctgcccaccaggggcccgcacccgaggcagtcgcggcgcgcggcgcttcgccgcggtttgccgccctccccgggggtgccccgtgcacgtggcctcgctctgagcgggaggaccgggccgagccgccgccgccgcctcttgctccctccacctcctccccgcgcccggcttcgctctcctcctcctcctcctgcagccccgctggctggctcccaatccccaccccccggggcccggggcgccggcggaaagcgtctccctacccgcccgggtgcaggcggggcggggccgcggcgcgcccggggctgcggggcgggccggcgggcgcgcgcgcgccgctgcagccctccagaggctgcgggccctgagccgctcggcgcccgcgccggctccccaccgcggcgctgccccgcccccaccccgtcgcccgtgcaggctccgagtgaatgaacttgattccagggattttgaagaaggcggttcgccttgcaccctttctgcaccccccgcccacatacacacaccgccccccaaatccagttttctgcttggggtggatggggac

SEQ ID NO: 350853 - DNA, 96 bp, Homo sapiens; identical to SEQ ID NO: 345320
  chr9:19127135-19127231
  hyper

SEQ ID NO: 350854 - DNA, 341 bp, Homo sapiens
  chr9:20620372-20620713
  hyper
cgcggctaaccccagaggactggtgagggctggcttgggatgaataaacactcgacacctgacggtcctttctctgcggtgactttcaccaagccgaagtggcgcgcgcgcgggcaggcgggagccgggacctggcccgcgcggcgccgcgcacccggatcccgaggctacgccggcgagcgcggcgcggggggcggggagcgggacagcgggaccgcccgggccaagcgattgtttcaaagacattttttatcaagacccttttgtattcgagccctacctctttttggcctaggaaagctttcgtgcaagtggaagacgactttctccacaaagtgctg

SEQ ID NO: 350855 - DNA, 591 bp, Homo sapiens
  chr9:20620754-20621345
  hyper
cgtgggtgaagccctccacggtgggttttttcctcacctgggcgcggtgccccagctccagcttcacctgcacggcacactgcgggcagggggaggagagacagccgtgaataacaggaaggcgaggtttcggcagtgaacgttgcgcctgacatttttttcctccttcttgaaacgcacataaaaggaaacggcggtgccctctgcatccacgtttcacgcgcgtgggcgcgcacactccacacccccaaatatacccgcccgcccggcccggcttggccccaggcgccccgggccccgcatctacatcggacaggattgtaacggaatgttatccccagtcgggaagggggtcggggaaaagagggagaacacactcagccacgacaagcacgacaacaaatgcatcggaaacaaatcagaaggcgatgccggggcggtttcccggcgtgggaggggaggtggctgggacccagggggaccgaagggctcctggcgagccccctccccgaaagtaccgcggcgacaggcacacgccgaggaagtctttgtgtacgtgtgtgtgcgtgcgtgtggagcgctgtgccaggc

SEQ ID NO: 350856 - DNA, 71 bp, Homo sapiens; identical to SEQ ID NO: 345321
  chr9:21395928-21395999
  hyper

SEQ ID NO: 350857 - DNA, 36 bp, Homo sapiens; identical to SEQ ID NO: 345322
  chr9:21396327-21396363
  hyper

SEQ ID NO: 350858 - DNA, 568 bp, Homo sapiens; identical to SEQ ID NO: 345323
  chr9:27528536-27529104
  hyper

SEQ ID NO: 350859 - DNA, 182 bp, Homo sapiens; identical to SEQ ID NO: 201692
  chr9:27529157-27529339
  hyper

SEQ ID NO: 350860 - DNA, 567 bp, Homo sapiens; identical to SEQ ID NO: 345325
  chr9:27529340-27529907
  hyper

SEQ ID NO: 350861 - DNA, 299 bp, Homo sapiens; identical to SEQ ID NO: 286381
  chr9:29212828-29213127
  hyper

SEQ ID NO: 350862 - DNA, 194 bp, Homo sapiens; identical to SEQ ID NO: 333648
  chr9:34379701-34379895
  hyper

SEQ ID NO: 350863 - DNA, 337 bp, Homo sapiens
  chr9:34380737-34381074
  hyper
cgagggcgggacacggcagggcctcgagagcgtgcagcgcggggctagagcaggctgggggcctgcacggaagctggccgggctggaagggggcggggttctggggcggggcttgtgtggggtggagcccggctgaggcgggcggagccctgcgaaccttacagtcggttgctcccggcaccaaggccgcaggcggcggtcggtgcagggcgccccgctggcgtagtagtccatcccgcgcagacagtagtggcggcccgagcaagcactttcgtaaccatggaagggcaggcggccgggcagcgggtccacgcacccgcatcggggcgtgatccgc

SEQ ID NO: 350864 - DNA, 282 bp, Homo sapiens
  chr9:35161771-35162053
  hyper
cgcgtcacacaactgagggtcaaccccttgctccctgcagtaagcctgattagtgggcggagcttccttcaggatcgcaagaaagaaaggaggaaggggaccccgcctcctacgtgctcgcgggggggggcggggtcggtggactgggcgtgagttaattggctggggggcggggcaccacgggttggctccgcccaggcgctcgcgcggatcccgggtggaatgacgggagggagtcccggcagctcctacctcccagcgatggcgtcgctgtgccgcgcc

SEQ ID NO: 350865 - DNA, 253 bp, Homo sapiens
  chr9:35162422-35162675
  hyper
tattattttggcaatcacttaacaatcacttgagttctttccactttcttgttttcccccaagctcctgcaagggacgattagctctccattctggtagccatgtgacaatgttgttggactgcaggctcagatcctattaaacagtgactggggttctctagtgagagtggacgagttagaagaccgcggatggttggtgcctgtgaatggtgggcagcctctcattcttttcctcctcctcgcaccgtaac

SEQ ID NO: 350866 - DNA, 894 bp, Homo sapiens; identical to SEQ ID NO: 333655
  chr9:35756575-35757469
  hyper

SEQ ID NO: 350867 - DNA, 62 bp, Homo sapiens; identical to SEQ ID NO: 345326
  chr9:37034135-37034197
  hyper

SEQ ID NO: 350868 - DNA, 241 bp, Homo sapiens; identical to SEQ ID NO: 286422
  chr9:37035886-37036127
  hyper

SEQ ID NO: 350869 - DNA, 349 bp, Homo sapiens; identical to SEQ ID NO: 333667
  chr9:71320587-71320936
  hyper

SEQ ID NO: 350870 - DNA, 465 bp, Homo sapiens
  chr9:71735786-71736251
  hyper
cgggggaggggaacggaagcgggtcgtaaaagttaactttacactaaaatcattaacttttctcacaccccccaataaaagcagtcacctcccccccccaagagccccccacgcacccacagtggcccacaaccatgcttcccgggggctttgaagggtagaggagctgacatcctccttgcccagaccctggaaaggattaggaagcggacctgggcacgaatagagaaagaagcccagcaaattcctcttgcaccagctctgggaggaagctcagctgcagttctacgtagaagaaaagaggcggcaaagtaggcgcgcgggctccagtgacaaaggtctcccaggcagccgcggcccctgccccaccgctgagtggcgtgcgtgcaggcccaccctctccgcctttcccgacaccccaaagtagcgctgcgagcagctgcgtctccctcccggggctcgcgc

SEQ ID NO: 350871 - DNA, 380 bp, Homo sapiens
  chr9:71788570-71788950
  hyper
cgtgtatgtgttggttagccgggcaggcctctagacaggacctaaaactttgaggttttcccagttcgactcttcgtaggagaactgaagctgcctgtgtgaggccctgcgaacctcgccaaaaagtcttcctacaggatgcccccgcgacctcaccggggaaacaccgcggacagtcgggccagcagcgcccggagctcactccaggtctccaaacttgcagcacttcccagagcgcgcgcgctcggagcgggacctgcttgctccagtgcacgccgcggagcgaaccatcgggctggcgggggtggaggggtgcaggcgtgggggctgcgggccgctcgggccttgggcttctcctgccgccgccgccgcctcccgcc

SEQ ID NO: 350872 - DNA, 45 bp, Homo sapiens
  chr9:71789757-71789802
  hyper
aaactcatcacagagcagaatcccttttccctttcaatcagctgc

SEQ ID NO: 350873 - DNA, 163 bp, Homo sapiens; identical to SEQ ID NO: 333671
  chr9:74640002-74640165
  hyper

SEQ ID NO: 350874 - DNA, 101 bp, Homo sapiens
  chr9:77111662-77111763
  hyper
cggacgtttttaaaggaaggggacagctacttccatgggactgcattttagttgtgctaaaagtgatgaaagtgggtttgcattattctaccaccaacacc

SEQ ID NO: 350875 - DNA, 127 bp, Homo sapiens
  chr9:78505461-78505588
  hyper
cgtcagcgcctggctgcggccgctttcaagagggcggaggagggagaggaggagggcgatgtgggaaaggaggggtgttaaggggggcgggggaagtcatttatgcagagcaggagctgctgccatt

SEQ ID NO: 350876 - DNA, 717 bp, Homo sapiens; identical to SEQ ID NO: 286474
  chr9:78505622-78506339
  hyper

SEQ ID NO: 350877 - DNA, 247 bp, Homo sapiens; identical to SEQ ID NO: 333677
  chr9:79319779-79320026
  hyper

SEQ ID NO: 350878 - DNA, 183 bp, Homo sapiens
  chr9:79629667-79629850
  hyper
cgcacagccagtaggtggcgaagctggagctcgagtatcgtctcctaaattcaaggccagtgctttttttctccaagaaataaatgcccctgacctcaggcttttcccttctgccctccaccctcgggcattccgaaaagtcaaatcgagcttatgcactcaaatccaagtagggcggagcca

SEQ ID NO: 350879 - DNA, 54 bp, Homo sapiens; identical to SEQ ID NO: 201741
  chr9:79630437-79630491
  hyper

SEQ ID NO: 350880 - DNA, 472 bp, Homo sapiens; identical to SEQ ID NO: 201742
  chr9:79630544-79631016
  hyper

SEQ ID NO: 350881 - DNA, 171 bp, Homo sapiens
  chr9:79632239-79632410
  hyper
aagccagaagctgaaaacacccgatctggtgtcaccaaggttgctagttagggggcagccccccaagcagctgggccgatggctttcttccaggttaggcgtgggaaaaccgagggagccatagtgtccaaatgctcctttctcctcaaatcgcctaacgggaaaggaccc

SEQ ID NO: 350882 - DNA, 291 bp, Homo sapiens; identical to SEQ ID NO: 286485
  chr9:79632921-79633212
  hyper

SEQ ID NO: 350883 - DNA, 321 bp, Homo sapiens; identical to SEQ ID NO: 286488
  chr9:80645546-80645867
  hyper

SEQ ID NO: 350884 - DNA, 421 bp, Homo sapiens; identical to SEQ ID NO: 201747
  chr9:80645902-80646323
  hyper

SEQ ID NO: 350885 - DNA, 662 bp, Homo sapiens; identical to SEQ ID NO: 201748
  chr9:80646509-80647171
  hyper

SEQ ID NO: 350886 - DNA, 382 bp, Homo sapiens; identical to SEQ ID NO: 347030
  chr9:80647247-80647629
  hyper

SEQ ID NO: 350887 - DNA, 166 bp, Homo sapiens; identical to SEQ ID NO: 286494
  chr9:82185179-82185345
  hyper

SEQ ID NO: 350888 - DNA, 260 bp, Homo sapiens; identical to SEQ ID NO: 286495
  chr9:82185383-82185643
  hyper

SEQ ID NO: 350889 - DNA, 469 bp, Homo sapiens; identical to SEQ ID NO: 347033
  chr9:82185703-82186172
  hyper

SEQ ID NO: 350890 - DNA, 243 bp, Homo sapiens; identical to SEQ ID NO: 201759
  chr9:87283766-87284009
  hyper

SEQ ID NO: 350891 - DNA, 92 bp, Homo sapiens
  chr9:89517563-89517655
  hyper
cgtgaatgcggcccttccccaccacacacaggctctctcccaccccctgccagctatccctgctctgacctccccgggcctccctaagggga

SEQ ID NO: 350892 - DNA, 182 bp, Homo sapiens; identical to SEQ ID NO: 286516
  chr9:89517860-89518042
  hyper

SEQ ID NO: 350893 - DNA, 431 bp, Homo sapiens; identical to SEQ ID NO: 201763
  chr9:89561318-89561749
  hyper

SEQ ID NO: 350894 - DNA, 494 bp, Homo sapiens
  chr9:89561779-89562273
  hyper
tccaagtcctgcccacttcttgcatgagtgtcttcataaatccatgcgcgccgctggctgatgccccgctggtggcagaaggtcccctttcgctctggctgcggtggcttcctggaaatgaacagctgtcgagatctggtcccgctctcccacccgagagccctccgctcggcccccggtggtggcgggagaggctcactgtcgccccgggggggtgcgggccgcggggccgtggcggggctgcaggaccgcgcggcgcggcgggtgcattttgctccgcgcctgcagatccgttgtgcggccggctgtccccgtgccggctgctcgcgctgcggccgcggcggctccttcctcctgggctcagtgcctcgccgccgccaccgccgccgcggtctctcgcatcgcgccgcttcctggcccggcgtccgcgcgctgcccgccttcccgcggcccggccgccccgcgtcccctccccctccgcccgcggcaacccc

SEQ ID NO: 350895 - DNA, 276 bp, Homo sapiens
  chr9:90112514-90112790
  hyper
cgcccgcgttccgggcggacgcactggctccccggccggcgtgggtgtggggcgagtgggtgtgtgcggggtgtgcgcggtagagcgcgccagcgagcccggagcgcggagctgggaggagcagcgagcgccgcgcagaacccgcagcgccggcctggcagggcagctcggaggtgggtgggccgcgccgccagcccgcttgcagggtccccattggccgcctgccggccgccctccgcccaaaaggcggcaaggagccgagaggctgcttcggag

SEQ ID NO: 350896 - DNA, 270 bp, Homo sapiens; identical to SEQ ID NO: 201767
  chr9:90112856-90113126
  hyper

SEQ ID NO: 350897 - DNA, 115 bp, Homo sapiens
  chr9:90113156-90113271
  hyper
cttcggggagaagtgcgatcgcagccgggaggcttccccagccccgcgggccgggtgagaacaggtggcgccggcccgaccaggcgctttgtgtcggggcgcgaggatctggagc

SEQ ID NO: 350898 - DNA, 202 bp, Homo sapiens
  chr9:90340643-90340845
  hyper
cggctctgcggaccaaaaattccaggactaaggaatagcaaggttaggctgaaacagtccacacagggcttgcggtaaacgtcttttcaggagccactcgcccagtgcagtaagtcgtgtacttagttgactcgagcgctccagggagacgcccgaccctactctgcgccgccccggggcaccagctctgcttcctccaggt

SEQ ID NO: 350899 - DNA, 321 bp, Homo sapiens; identical to SEQ ID NO: 201770
  chr9:90340943-90341264
  hyper

SEQ ID NO: 350900 - DNA, 198 bp, Homo sapiens
  chr9:90341343-90341541
  hyper
cagggcctggcccggccagacagggaagctcagtccccgcacgccagacagcggtactcctgctggcgtcaccgcaaacatcctctgaccgctacagccagtgtgtggcgcaggcgtcatgtccccggccctgccacgcctggagccctggaagctggctgcagggcgctggcttcccgcgtgcggccatatgacccc

SEQ ID NO: 350901 - DNA, 77 bp, Homo sapiens; identical to SEQ ID NO: 347035
  chr9:91149647-91149724
  hyper

SEQ ID NO: 350902 - DNA, 222 bp, Homo sapiens; identical to SEQ ID NO: 286534
  chr9:91149754-91149976
  hyper

SEQ ID NO: 350903 - DNA, 236 bp, Homo sapiens; identical to SEQ ID NO: 201776
  chr9:91150385-91150621
  hyper

SEQ ID NO: 350904 - DNA, 544 bp, Homo sapiens; identical to SEQ ID NO: 347038
  chr9:93955385-93955929
  hyper

SEQ ID NO: 350905 - DNA, 267 bp, Homo sapiens; identical to SEQ ID NO: 201780
  chr9:93956177-93956444
  hyper

SEQ ID NO: 350906 - DNA, 218 bp, Homo sapiens; identical to SEQ ID NO: 347040
  chr9:95820744-95820962
  hyper

SEQ ID NO: 350907 - DNA, 214 bp, Homo sapiens; identical to SEQ ID NO: 286552
  chr9:95821006-95821220
  hyper

SEQ ID NO: 350908 - DNA, 174 bp, Homo sapiens; identical to SEQ ID NO: 201793
  chr9:96717633-96717807
  hyper

SEQ ID NO: 350909 - DNA, 429 bp, Homo sapiens; identical to SEQ ID NO: 347043
  chr9:97767434-97767863
  hyper

SEQ ID NO: 350910 - DNA, 864 bp, Homo sapiens
  chr9:98272643-98273507
  hyper
cgcggatcgcgaggattcgtcccgacaccgcgtccagtgtcaccaaggcatcccggggattcgcttcccgcggagggggaaaacacgcgaccctttgaggtggattctggagccagacacgtctacacaactaggctttttatttaaaaaaatttttgttttcggaaagtggaatgtgtttttcttacgtttccaagttattacgttcctccctgcggtaggaacccgacccgcaaacccttgatttgcttcactttatttttttttttaaacggggttgaactgcagagggactggcagtagcgagaagtctagtgaagtcgtgaaatggggcggtgtggctttaagatgcgcacggtgtatgttcattgaaaaaaaaagaagaaagaaaggaaaggaaagaaagaaacccagatggagggaaagggggaggagcagggagaaggcggagctccggtggccacgtgaccccgcgccaggaggcccggtgcgcgcgcgcgcccggctcccggactccccgcgcccgcgcggccggggcagagtaggtagggaggcggatgcgccgggccggctccgggcctccagcgcggtctcccgagagcccaggcgaggcgcgcgcccagccggcgcggacggacgtgccggacgcgccgtagtacattcctgaaggcggaccggcccccttacgctgcccaatgcccgcgccgcctccccgcgaccggccaatggtcgcgctcacgagtccctgcccattcagcggccccgcgctggctgcccgggcgcgctgggggctgcggcggggcgcgccggccaccggggcggtccacgcggctcccgcagggggcccgtccgccggctctcccc

SEQ ID NO: 350911 - DNA, 178 bp, Homo sapiens
  chr9:99637706-99637884
  hyper
cgagaaacctcttacccggttcccgccctcgccccccgcttacaggtaataaagctggaatttatgcagctctttcggtctccacagctcggggtcttgccacagacacagcgcccacgagttctggcactttggtcaacgtttataaacgggctctcctctgccgccgcgggcatgc

SEQ ID NO: 350912 - DNA, 316 bp, Homo sapiens; identical to SEQ ID NO: 333725
  chr9:99638097-99638413
  hyper

SEQ ID NO: 350913 - DNA, 99 bp, Homo sapiens; identical to SEQ ID NO: 333730
  chr9:100263437-100263536
  hyper

SEQ ID NO: 350914 - DNA, 93 bp, Homo sapiens
  chr9:100503340-100503433
  hyper
cgtttccggttctgatgcgctggatcttgaagctcttctccaccactagcgccctgcttgtaaccttagcacacgcaactctgaacaggaata

SEQ ID NO: 350915 - DNA, 201 bp, Homo sapiens; identical to SEQ ID NO: 201812
  chr9:100610480-100610681
  hyper

SEQ ID NO: 350916 - DNA, 703 bp, Homo sapiens; identical to SEQ ID NO: 333740
  chr9:101569830-101570533
  hyper

SEQ ID NO: 350917 - DNA, 441 bp, Homo sapiens
  chr9:102586203-102586644
  hyper
cgcagaggagccccggtcacaatggtgcgtttcacggtttcctccacacacttcaccaccgggaggggaacacgggggtgttcctttcgtctgcccacgagaaagaaaggggctttgacagaggtagttatttcttcctaatttacaaccccaaggctctgtgctcccggccccggcggccgcaagcaggagcggcggaacgtgtttccaggcactgaggctttgcctaggtaaccggccgcttgtggggtggagagagcggcggggcgctgggctgggctggaggaaaggctgtgtgggtccctcccgcgaacgctgggcgctcgaggggaactccttcgttggggagaggcggtccccgcccacccgagttctgaggcctcctctcagagaacgactccgcttgaaaggccctcagggaatgcgggacgggaatgcggg

SEQ ID NO: 350918 - DNA, 227 bp, Homo sapiens; identical to SEQ ID NO: 347046
  chr9:102586985-102587212
  hyper

SEQ ID NO: 350919 - DNA, 148 bp, Homo sapiens; identical to SEQ ID NO: 201823
  chr9:104248697-104248845
  hyper

SEQ ID NO: 350920 - DNA, 499 bp, Homo sapiens; identical to SEQ ID NO: 201824
  chr9:104248975-104249474
  hyper

SEQ ID NO: 350921 - DNA, 220 bp, Homo sapiens; identical to SEQ ID NO: 201833
  chr9:110252078-110252298
  hyper

SEQ ID NO: 350922 - DNA, 118 bp, Homo sapiens; identical to SEQ ID NO: 201834
  chr9:110252515-110252633
  hyper

SEQ ID NO: 350923 - DNA, 81 bp, Homo sapiens
  chr9:110252700-110252781
  hyper
gaggaggcagtgcccagcactgtgcagcgtgaactgggagcctcaagagaaggccagaggagtgttccgccgggaacaggc

SEQ ID NO: 350924 - DNA, 60 bp, Homo sapiens
  chr9:112081274-112081334
  hyper
cgggaaggcctatatacttccttggaagtccgggtatgttatttcttcccttgacatcct

SEQ ID NO: 350925 - DNA, 130 bp, Homo sapiens; identical to SEQ ID NO: 201836
  chr9:112081563-112081693
  hyper

SEQ ID NO: 350926 - DNA, 860 bp, Homo sapiens
  chr9:112081773-112082633
  hyper
ctcccaagtcaccctacccgctgcgaggaggctgcggggcagatggggctcagggaatgggaatggggtgtatccagaagggatcagcagagagcagaaatggtctaacccccgcctcccaaacttggggcgcctgccgagcagcaagcgaggggatctcctctctgctgtctcatcaaggcctgatggcgagtttgaggggggacaagctggacaccccaggacggcctcacattgatttgagattttctacccaataacccagtatcaggaagacccctgctggaagctagggacggaaggggagcgccggccacccacaccagggggggcggggtctcgggacttggggaccgtgtgtactggggagggggcgaggccccaaggactaggtgggcgccagagaaatcgcaaccccgcggcgcaatgtgccaaggagggggcacgggccaaaggtggggccccggaagagaccgggacggggtggcccaagaagaaaaagggttgaggagtgctcggagaagaggatgggggaggggatccccagggaggtgcaagggaagcgcccccgatgcaagcactgggggagggggagctgcctccaggggcgcgaggtgccagtgccccagactggccccgtcactcaccggcaggtccacgctcacttcggtcccgtcgagcaggaagacgcggcagtagagggtggccttggcggcgccggcggcggagatgtgcacggccgcgccgccggtgagcaggggcccgccgcccgccgggaacacgctgcccccgggcgcggcgggcagcgccgaggaggaggcggcggcggccgggcccccccgtggccccccatcgcgctc

SEQ ID NO: 350927 - DNA, 216 bp, Homo sapiens; identical to SEQ ID NO: 201839
  chr9:112260252-112260468
  hyper

SEQ ID NO: 350928 - DNA, 162 bp, Homo sapiens; identical to SEQ ID NO: 347050
  chr9:112260523-112260685
  hyper

SEQ ID NO: 350929 - DNA, 395 bp, Homo sapiens; identical to SEQ ID NO: 333758
  chr9:116111663-116112058
  hyper

SEQ ID NO: 350930 - DNA, 167 bp, Homo sapiens
  chr9:117267296-117267463
  hyper
tggaatccgggggacgcggagacgtcggcgggttcctgagagacacaagagttggctgctggagcccggaggtggcggagactgctgctggagtccggggggcgcggggtcagcagctacattctggagggcacggagacgacgggtggctggagtttgggggcgcc

SEQ ID NO: 350931 - DNA, 131 bp, Homo sapiens; identical to SEQ ID NO: 345327
  chr9:117880425-117880556
  hyper

SEQ ID NO: 350932 - DNA, 392 bp, Homo sapiens
  chr9:122318421-122318813
  hyper
cggctgtggccaacacgcgtctccaggcccacaggctctgaggcggaaaccacagttccaggtccccaggctccagccgccaatgcggctaccgaccagcagagggcagctgcgggaagccgtccaaaggcggcctccacccccattagtgccaattaagccgcgagatgcaagaggcgagcgcgtggtgaaagaaaacacatctacttctgggttgagctaggctgggtgatctgctgggagggacgttgacctgcttccaaaaagccggctggatggtgccgtggtggctgcctgcaaaggaacaccggcctatgggaaccagaccctggggcttcccgcgagcttctcttcctccagccagcaaaacaggaaaagcctggcccagggac

SEQ ID NO: 350933 - DNA, 268 bp, Homo sapiens; identical to SEQ ID NO: 333769
  chr9:124857529-124857797
  hyper

SEQ ID NO: 350934 - DNA, 82 bp, Homo sapiens; identical to SEQ ID NO: 345328
  chr9:124990438-124990520
  hyper

SEQ ID NO: 350935 - DNA, 142 bp, Homo sapiens; identical to SEQ ID NO: 345329
  chr9:124991012-124991154
  hyper

SEQ ID NO: 350936 - DNA, 215 bp, Homo sapiens; identical to SEQ ID NO: 333771
  chr9:126759147-126759362
  hyper

SEQ ID NO: 350937 - DNA, 60 bp, Homo sapiens; identical to SEQ ID NO: 201866
  chr9:126773978-126774038
  hyper

SEQ ID NO: 350938 - DNA, 249 bp, Homo sapiens; identical to SEQ ID NO: 201867
  chr9:126780315-126780564
  hyper

SEQ ID NO: 350939 - DNA, 32 bp, Homo sapiens
  chr9:126783540-126783572
  hyper
gcagctcgcgcaaaagacgggcctcaccaagc

SEQ ID NO: 350940 - DNA, 192 bp, Homo sapiens
  chr9:129373418-129373610
  hyper
cggggaaggcatgcagaggggcccaaggggtgtggactcagcagccccaccccagaccagagaaggcagccaggctctggcgtccaccgagccagcgcccctatctgggcgcgggccgcatggcggcagaccaccctatatccgccttggtggcgtgggatatgactggcaggagcgcggaagaggcgctga

SEQ ID NO: 350941 - DNA, 62 bp, Homo sapiens
  chr9:129373640-129373702
  hyper
cggcacggagggggtacttcccacaagtcctcctgccttgagaccaggccttcgagtggtcc

SEQ ID NO: 350942 - DNA, 231 bp, Homo sapiens; identical to SEQ ID NO: 333788
  chr9:129393170-129393401
  hyper

SEQ ID NO: 350943 - DNA, 135 bp, Homo sapiens; identical to SEQ ID NO: 345330
  chr9:129400713-129400848
  hyper

SEQ ID NO: 350944 - DNA, 167 bp, Homo sapiens; identical to SEQ ID NO: 347056
  chr9:129485513-129485680
  hyper

SEQ ID NO: 350945 - DNA, 120 bp, Homo sapiens; identical to SEQ ID NO: 333794
  chr9:130661066-130661186
  hyper

SEQ ID NO: 350946 - DNA, 42 bp, Homo sapiens
  chr9:130689378-130689420
  hyper
cgggccgcgagtttcggctgggatgggggcccaaacctgctt

SEQ ID NO: 350947 - DNA, 418 bp, Homo sapiens; identical to SEQ ID NO: 286760
  chr9:130689749-130690167
  hyper

SEQ ID NO: 350948 - DNA, 88 bp, Homo sapiens
  chr9:131842789-131842877
  hyper
cgcctgctctgtgtgacttgccctttcgccggccagtatggggcagagggaaataagccccctctgctctctggtctcagtttactcg

SEQ ID NO: 350949 - DNA, 704 bp, Homo sapiens
  chr9:131842946-131843650
  hyper
ggacgcgcaggtccccaagaccgcggatcggcagggggtaccagggaagccttcattcagggcgcaggtcccagccgaaccaaagctcccaccaaagttcaacacgcccccaaagccagcgcctgattggcccgccctgcccacaagctgaggcagcctcaccttctgattggctgttatgctccctgttcggtgctggaaccctccccttctctgattggccagatgcctacctgcgctcgccccagattgggcgccagctggggcggctcgttggctcccaggggccccgctctctgattcgccgctcgggccagcccccacggcctgcacgctgaatggctgcgccgctacctatattggcctccgattgggtgcacggcgcctccccggcgtgataggtcaggaccaccgcccccctggctccccattggctgctcgaagaagcccggtctccgggtaagatggcagcggacggacagtgctcgctccccgcttcatggcggccggtgaccctcacccacgtcgaatatcctgcaggtaaaaggcggtcccggctccaaggacgccttcccagggacggcctctcagtcccgggcgctccggcctgctcgagcccgcggagggggcgccgggggaccggggtgggaactgtcaaatagtgaaccacggaggggctcggccggcgcgcgcgccgcgcaggc

SEQ ID NO: 350950 - DNA, 258 bp, Homo sapiens
  chr9:132020659-132020917
  hyper
cgcggtaagacgtcagcccggtgagcatcctccgcactgcggaccgcccggggtcggggtcacccgggccccgccccgagcttgctgtcgtatcggccccgccccacccacgccctcccggcccctcctgctccgggcgcgctcggctccgcccccacgggcaacacggcctcccattggccgcggtttccatggttacgcgggccggcggagctgcgggctcccagacacgtgtccccgggagccgcccagaatttg

SEQ ID NO: 350951 - DNA, 73 bp, Homo sapiens
  chr9:132021110-132021183
  hyper
gagaggaacccagtcaatttcacctgctccccttcctccaggaagaatcgggtacgcgggcatctgagaaccc

SEQ ID NO: 350952 - DNA, 280 bp, Homo sapiens; identical to SEQ ID NO: 333801
  chr9:132145475-132145755
  hyper

SEQ ID NO: 350953 - DNA, 166 bp, Homo sapiens; identical to SEQ ID NO: 333802
  chr9:132176641-132176807
  hyper

SEQ ID NO: 350954 - DNA, 187 bp, Homo sapiens
  chr9:132244512-132244699
  hyper
cgcgctcctcccggaccccaccccgaggcagctttctcacaacgggatcctccccgggcggcgtggggacgcctcccgaccccgaggcccggcaggagagccgccaccgcggccgggtggtctccgcgtcgcatggcccctgccggcccccccgcccatggcagctacataattaattcgcccataa

SEQ ID NO: 350955 - DNA, 543 bp, Homo sapiens
  chr9:132244741-132245284
  hyper
tgggatccccgttagggttaggggcgtggggggtcgggggccgcggggctgtgcgtgccggggcgcacggttttgctccgcgggcctctctcgctccctcgcgccggctttttccctttttctctttcctttttttctttcctggagcggagcccggcgccaggagtctggaaccagcttgacaggcttttgagttatggaggggggagggggagaggcgggcggcggggagggggaagggagggcgccgccgcggcgtgggggcggggccggctccccggtttggagactcgccccgactttggggtccgccagcggcggccgggcggagggcgggggaccgcaatcgtggggggagtcaccccgcggggcccggcgggcgaaacgggccgggcttcagagccgcagtaaatgaggcccggggcgggcgggggtggacacggcctcggggccacggcctcccccgccgagcaaggcattcctttccgctgaactgggcgcccgggcccgcgccgcgccctgcacgcctcgcgcccggcgatc

SEQ ID NO: 350956 - DNA, 690 bp, Homo sapiens; identical to SEQ ID NO: 333804
  chr9:132258226-132258916
  hyper

SEQ ID NO: 350957 - DNA, 112 bp, Homo sapiens; identical to SEQ ID NO: 345331
  chr9:132804293-132804405
  hyper

SEQ ID NO: 350958 - DNA, 207 bp, Homo sapiens; identical to SEQ ID NO: 201905
  chr9:132804455-132804662
  hyper

SEQ ID NO: 350959 - DNA, 103 bp, Homo sapiens; identical to SEQ ID NO: 201906
  chr9:132804693-132804796
  hyper

SEQ ID NO: 350960 - DNA, 290 bp, Homo sapiens; identical to SEQ ID NO: 201907
  chr9:132805028-132805318
  hyper

SEQ ID NO: 350961 - DNA, 292 bp, Homo sapiens; identical to SEQ ID NO: 201908
  chr9:132805445-132805737
  hyper

SEQ ID NO: 350962 - DNA, 55 bp, Homo sapiens; identical to SEQ ID NO: 201909
  chr9:132805893-132805948
  hyper

SEQ ID NO: 350963 - DNA, 1351 bp, Homo sapiens; identical to SEQ ID NO: 333814
  chr9:133710055-133711406
  hyper

SEQ ID NO: 350964 - DNA, 101 bp, Homo sapiens; identical to SEQ ID NO: 286815
  chr9:134131797-134131898
  hyper

SEQ ID NO: 350965 - DNA, 630 bp, Homo sapiens; identical to SEQ ID NO: 345338
  chr9:135286324-135286954
  hyper

SEQ ID NO: 350966 - DNA, 356 bp, Homo sapiens
  chr9:137533140-137533496
  hyper
cgccctgatctggctggatgggaagtttagtctccacccagaagaggagctctgaactcctccacgttaaagaaaaagttaggcggggtaaactgcaactttctttttaacccgaagtgatcaaacctcggggcccctctgcactggttcttggagcatggccaggtgcgggcacctggggtgggaacagtggggggaccagggtgggcccctgggctccgaggccgccccaggcccgcccgcctaccggctctcagagaaagaacagggggccgcgcccgccccacgtccgctccgccccgggccagccccttcctcgctgcgactcgcccgctgtccccaccccctcgcccgcg

SEQ ID NO: 350967 - DNA, 357 bp, Homo sapiens; identical to SEQ ID NO: 333839
  chr9:139401232-139401589
  hyper

SEQ ID NO: 350968 - DNA, 520 bp, Homo sapiens
  chr9:139948370-139948890
  hyper
cgcacagcagtaggaggccggcgaggcccgcggcggccagcagcagcggcggcagcagtgaccgcaccttcccggccatgggcgggcgggcgcgcgggaggacgatgcgtggacccggagagtgcggggagccggaggcggaggcgggcggggccgcgggaccgcggggtaggggccccggggcgggacgaggggcgggaggccgggcgggcccgcccatcaccggccacgcccacgggcggacaggtttcgcctccgctcccaagcttccgccgtccggcccgcgcaggtgagagacgcgggcgcggctgagtcaccagcaccgccccccggctcccgggtctgagcccgggcgccccgcggctatggcccaccttccccttcccgcccactcagcaaggggatcccccggccgtggaggcaggagacctggcgtgggggtgggcgggcgaggctggctcggagggtcctgtgctggagagccgcgcttttcccgggcccgggaaaggaggccagactc

SEQ ID NO: 350969 - DNA, 375 bp, Homo sapiens
  chr9:140024237-140024612
  hyper
cgcctgcactgagagctcacggcttgcggcgcctgcgtctaccccgcgcgcagtcgccacggcaacagggcgggccttggttctgcttcgggcgtggtcggtgcatggtcctccagcactgttcgccccgcgggtctggtcctgggttcctttcgcctcctgtcgtcggacggcaccggctttgcccacggcctcgcggggagacgcagacacccgggacccggggaggcgcccgggcgccgccgccatgttgtcagggagcgcccgctcccagctcttcggttccgggacccgcggcgcggggatggggctgggccgcccttggtagccgtcctgggctgggggccaccctggccgcgtggtcaccggcaagaa

SEQ ID NO: 350970 - DNA, 636 bp, Homo sapiens; identical to SEQ ID NO: 347066
  chr9:140196486-140197122
  hyper

SEQ ID NO: 350971 - DNA, 155 bp, Homo sapiens; identical to SEQ ID NO: 347067
  chr9:140197263-140197418
  hyper

SEQ ID NO: 350972 - DNA, 188 bp, Homo sapiens; identical to SEQ ID NO: 345339
  chr9:140703858-140704046
  hyper

SEQ ID NO: 350973 - DNA, 327 bp, Homo sapiens; identical to SEQ ID NO: 345340
  chr9:140704131-140704458
  hyper

SEQ ID NO: 350974 - DNA, 884 bp, Homo sapiens
  chr10:735245-736129
  hyper
cgcggcctcacaaacgtccctagggcgcggggtctgggggtccgggggacgcgcacgctccgggctggggtcgcacctccccctccgggcccggcccccgccccgccgcaggccccgcgcccccagccctccgcgcgcggccctccccggtgacagcgcggcccggcccggggcgggggcccggttaccttccgacagctccagctccagctcggccaggcgcgcccgcacctccaggggcagcgccatgccctccaggctgcggtccgccatgctccgcgggcgccgcgccccgcacggcctcctctttgttcgcaggcggaggtctcggcggctcctcgcgcccggcggaaccgcaccgaggaggaggcggcggcgcgggcgcgggaggcgggcggcgggcgcgcagggacctccctcccctcggcgcctcctcagcgcggccccgccacggccgcctcgcgcgcccccgcgccccacggtccccggcccgccccgcgcgcgctcggcccctccccgcaggcgctgcggacccggacccggccctgctgctctcggccccggcccggcgggagcgtctctgcgcgcgcgcgtcacggggccgcgggggcagggcgcgcgcgcgcggggcgcgaggacgcgcaggagcgggagcgcgcgggggggcgcgcggccgcgtcggcgaagcgcgcgctcccgggggcgcgctcgggggcgggttgggggctcggggcccgcggggcggggcggggcggggcggtcttgtctgtcctgggctctgcgcgtccagcggagcctgcgggcccggccccagagcctggtccacccggctccctgcgaaaatcacgtcctggagccgcagcttgacgtctgcgcgaaaactc

SEQ ID NO: 350975 - DNA, 96 bp, Homo sapiens; identical to SEQ ID NO: 345341
  chr10:1780056-1780152
  hyper

SEQ ID NO: 350976 - DNA, 910 bp, Homo sapiens
  chr10:3109459-3110369
  hyper
ggccccactagcagggacccgcccacctgtggcgctacccctgcctctgccgcctcccgcaccgctagcgcggcccccacctacgacgacccccgcgtagatgctcctgcccacacccgccccagccccggcccctgcccctagccgcgcccgcgccccctcccccgcagcccctcccatacgctcgggccccgcccgtcaccgcccattggcgctggggccgggcgggggcgcgggcggggcggcggttccgagtcaggcgcgcgcgggcagggtccccattgcctgctgcgcacccggacgtgcggctcccctcggcctcctcgccatggacgcggacgactcccgggcccccaagggctccttgcggaagttcctggagcacctctccggggccggcaaggccatcggcgtgctgaccagcggcggggatgctcaaggtgcgcgcccccctcccggcggcgagggagggacggacggacggagctggggagaaccgggcgaaggcgatggggtgaccggagagaagaggggggaagcgatgggggggacccggggaaaggtggcgaagcgatggggagaaccggggagaagagcggggaagcgatggggagaaccgggaagaagcccgcgcccggaagcggcaggggtacctgcggggcggcatgagccggcgaggcagccccggggtccttgcccggtggggcgggggaggaagggacatggcggtaggaacctccatccggaagatcagtgagttttccaccttcggttttgttttaaatggaacctggcagagggagtcgcctgaagcgccctcgggggtcgttctgcctctgagctgtaggacggggccgggcgtcccctccgaagcgtgggtacagcgcgatcacttcctaagtgccccccc

SEQ ID NO: 350977 - DNA, 298 bp, Homo sapiens
  chr10:6018666-6018964
  hyper
gcgacccgctttcttctcgaatacaccaagcgatcacagatctcttccccctttttctgcgagtgtagactccaggctggcccccactccccacccccatccggtcccgaccgcctctgctggtttcctgatcgcttaagaattggaagttgtttccaggtccccaggtgtgcaacttgcccgacgcgtttccccctgggacacagctcctccccaccctcccagctcccactgacataatttacttttgcctgggagtcgggaggagtagtttctcccggacccctccgaggaccgc

SEQ ID NO: 350978 - DNA, 666 bp, Homo sapiens
  chr10:6621854-6622520
  hyper
cgcaggccccctttcgttcaggtgagaaggaaaagggagaagaaaggaggaagcgcccccaggccggcggcccccacccggctaaggtcgccagcatcccgcatcccgtgcgacctgcgtcccagaaacccagcggggaaattcttcccggtgcgctcttgcgcccgcttggttccatttcctactccgcctgctcacccggcagccctcaccccttcccggaggctctccgaggggcccgggtagcccttctcgccacgggtctcggcccctccagcccgctccctcccggcggcggcgcggggcgcggggccctacctggagcgagcacggcgccgctgctgcccggtggcgctgggactgcgcggggactgcgcggggactgcgcggggactggcggggctggcggggctggcggggctggcggggctggcgggcccggcgcactgcgggtgcgcctagaaggcggtgcccgccagggggcgctcgccagcctccccgccagcccggcctcccgggacccggcacctctagccagggacgcgcgctcggtcccccgccgtgcgcccccggtcccgcgcccaggctcccgcccctggcctccttaccagccacttgtcgcccagctgcgaactggagcgggaggcggcggccggagggcccagg

SEQ ID NO: 350979 - DNA, 87 bp, Homo sapiens
  chr10:6622706-6622793
  hyper
gtaaacattgttccttttaaaatgacctaccccaggcatttgtttgggcacacttctgtcctggggtcatcgttcctaggtggcttc

SEQ ID NO: 350980 - DNA, 56 bp, Homo sapiens; identical to SEQ ID NO: 201966
  chr10:7449898-7449954
  hyper

SEQ ID NO: 350981 - DNA, 60 bp, Homo sapiens; identical to SEQ ID NO: 201967
  chr10:7453036-7453096
  hyper

SEQ ID NO: 350982 - DNA, 117 bp, Homo sapiens
  chr10:8075813-8075930
  hyper
cgccggcttcctttccctcccaactcccctgctctaggccactgcctctggggtggggcgccgagaaggaggccctggggacctacccccggctcttctgagccaagtgagttccca

SEQ ID NO: 350983 - DNA, 124 bp, Homo sapiens
  chr10:8086048-8086172
  hyper
tccacctctgtccacaccccagttctcccgactccagggaccaagtgcctcggcctccccgccacgaaatggccacccccaagccctttgccccatgaaaatagcaacttcttcctacccaacc

SEQ ID NO: 350984 - DNA, 162 bp, Homo sapiens
  chr10:8092284-8092446
  hyper
cggcaaagctctggcccccggcctgcgacgtgcagaccgcggggccgcggacccggctggtgcggggtactggcgccggcctcgacacctttggcctccacttcctccccagactcacagcgacagcggccgcttcacaccgtttttattgaccgatcgcag

SEQ ID NO: 350985 - DNA, 602 bp, Homo sapiens
  chr10:8092535-8093137
  hyper
ggcctttggtgtcgctccccgccccccagccccgcagattcccggcttcttttctgtctgcgcggccgggaccgcccaggcaggcgccggggctccggggctccggggggagggactcggcggctcggctcggctccgcttctttcttctgcctgcaaatatttgctgcctcgctggaaatccgacgatttcgcgcgcgctctgcttgcaaagtctttaagtaaacacgctcaaatgaccgccccgggcggcccgaggcacgctctctccccctccgcgggattagtaactttaggacttcgaccccggggctccgctttgcctgttacccaggtcgggcagcgcgcgggcgcccggggccgcttctcccggcacctcggccccgcggagctcgcctggaagcgccggttgcctggctctggtgggtggcccggccgcgagcatctccgcgccctgggtctgtagccctagggctgagccccagaaagccgcgcctccgctctgcgccatggcctctgctttctgtacccgactgggtttccccacttccactgggacagggtctcttcgcccctgggagggcgggtgggagggacttgcac

SEQ ID NO: 350986 - DNA, 102 bp, Homo sapiens; identical to SEQ ID NO: 201975
  chr10:8094141-8094243
  hyper

SEQ ID NO: 350987 - DNA, 83 bp, Homo sapiens; identical to SEQ ID NO: 286932
  chr10:8094348-8094431
  hyper

SEQ ID NO: 350988 - DNA, 111 bp, Homo sapiens
  chr10:8094540-8094651
  hyper
tggcgcatccacccctcgattgacgcgcggagaagcatttttcattttttctttcagcttgtatccttaaatcttaatcccgggcttcttagcaaaaatgcgtgtgcattc

SEQ ID NO: 350989 - DNA, 51 bp, Homo sapiens; identical to SEQ ID NO: 286936
  chr10:8097537-8097588
  hyper

SEQ ID NO: 350990 - DNA, 42 bp, Homo sapiens
  chr10:11060746-11060788
  hyper
tctggtggccggggggaaagagctcttcttaccaaattaccc

SEQ ID NO: 350991 - DNA, 100 bp, Homo sapiens; identical to SEQ ID NO: 201979
  chr10:11207330-11207430
  hyper

SEQ ID NO: 350992 - DNA, 155 bp, Homo sapiens; identical to SEQ ID NO: 286940
  chr10:11207724-11207879
  hyper

SEQ ID NO: 350993 - DNA, 124 bp, Homo sapiens
  chr10:12390701-12390825
  hyper
cgaggggactgcggggcagacgatcacttctttccactgagtctctgggaggagacagggagatgccagaaggggccaagcgtgagccagggcaaccaggccggccaggcccgccggccgctcc

SEQ ID NO: 350994 - DNA, 875 bp, Homo sapiens; identical to SEQ ID NO: 201983
  chr10:12390995-12391870
  hyper

SEQ ID NO: 350995 - DNA, 324 bp, Homo sapiens; identical to SEQ ID NO: 345344
  chr10:12392327-12392651
  hyper

SEQ ID NO: 350996 - DNA, 99 bp, Homo sapiens; identical to SEQ ID NO: 286955
  chr10:13933035-13933134
  hyper

SEQ ID NO: 350997 - DNA, 190 bp, Homo sapiens; identical to SEQ ID NO: 201987
  chr10:13933246-13933436
  hyper

SEQ ID NO: 350998 - DNA, 208 bp, Homo sapiens; identical to SEQ ID NO: 201993
  chr10:17270445-17270653
  hyper

SEQ ID NO: 350999 - DNA, 368 bp, Homo sapiens; identical to SEQ ID NO: 286970
  chr10:17272233-17272601
  hyper

SEQ ID NO: 351000 - DNA, 259 bp, Homo sapiens
  chr10:17495133-17495392
  hyper
cgcaaaacaaacctgaatcttaacaccggtgccctttaaagcatagaaaagaaaaagcaaaccaaccaaatccctccataaagacaggctgagctgcttctctccaaaggtggcggggtcgggggcgggggtgctttcaacacaccattgtcgagaggaaaactcagcacccgtttttcaaatgcagctgctggaggatcccccttgattcaaagaccattcacatccaggcttagagggttgagggagtgtgaagggt

SEQ ID NO: 351001 - DNA, 322 bp, Homo sapiens; identical to SEQ ID NO: 201996
  chr10:17495680-17496002
  hyper

SEQ ID NO: 351002 - DNA, 116 bp, Homo sapiens
  chr10:18429033-18429149
  hyper
cgtcgtccttcccctccaaagttaagagatctgctctaagggttcctgaggggtggtctggggccatgggaacaggatcaaggccccctgagcgccgggcctggcttctgtggctt

SEQ ID NO: 351003 - DNA, 49 bp, Homo sapiens
  chr10:18430247-18430296
  hyper
gatggggtgcaggtgggcaggaggggagcgaatatgggggtgccctgcc

SEQ ID NO: 351004 - DNA, 873 bp, Homo sapiens; identical to SEQ ID NO: 347076
  chr10:21815648-21816521
  hyper

SEQ ID NO: 351005 - DNA, 102 bp, Homo sapiens; identical to SEQ ID NO: 345347
  chr10:22517909-22518011
  hyper

SEQ ID NO: 351006 - DNA, 60 bp, Homo sapiens; identical to SEQ ID NO: 345348
  chr10:22518450-22518510
  hyper

SEQ ID NO: 351007 - DNA, 62 bp, Homo sapiens
  chr10:22540645-22540707
  hyper
cgccacagcaacgaatcactgcaaaagcaaggttctaacttaaaacaaaaagagaaagtatt

SEQ ID NO: 351008 - DNA, 32 bp, Homo sapiens; identical to SEQ ID NO: 345349
  chr10:22626103-22626135
  hyper

SEQ ID NO: 351009 - DNA, 214 bp, Homo sapiens; identical to SEQ ID NO: 287005
  chr10:23001984-23002198
  hyper

SEQ ID NO: 351010 - DNA, 286 bp, Homo sapiens
  chr10:23002228-23002514
  hyper
gcgttctccagcctttcccacaccccccacagcgggtgcggccaactcgggaccccctccgcccgcgcccgccgggacccccgcctgctgtccccgccccggccgcccttccgcagtcggtgacttctgcctgactccccaaagtggggggaggcgacgaagggaggaagactccccgccaagggctctccagcccgcacagcggcagggcgatgcgggagaagcgcagggatgccgcccgacgccagagccatatttacatcggctgctgctttgccaaaaagcc

SEQ ID NO: 351011 - DNA, 193 bp, Homo sapiens
  chr10:24497856-24498049
  hyper
cgcgcctgaggacggacggacggacggacggacagacctagggacggagggccaggggcaggggagatccaagaggccccgcgctggaatgcagttttctcgggcgagggagactttgcaccggagtggaaaatagtttggggtggggtttcgcaccgtcccctcctccccagccccgggccccctcccaggc

SEQ ID NO: 351012 - DNA, 46 bp, Homo sapiens
  chr10:26222946-26222992
  hyper
cggccggagtcccgggaagcccctcggcagccagccaagggccctg

SEQ ID NO: 351013 - DNA, 65 bp, Homo sapiens
  chr10:26728108-26728173
  hyper
aacccttgcacgtccagcaggtcagcaggtcagcaggtcagcaggtccgggagccccagtctccc

SEQ ID NO: 351014 - DNA, 45 bp, Homo sapiens
  chr10:28032907-28032952
  hyper
cgtatccacaagaccccccagctcatgagtcccaggccataccgg

SEQ ID NO: 351015 - DNA, 273 bp, Homo sapiens; identical to SEQ ID NO: 333909
  chr10:28968999-28969272
  hyper

SEQ ID NO: 351016 - DNA, 78 bp, Homo sapiens; identical to SEQ ID NO: 345350
  chr10:30024003-30024081
  hyper

SEQ ID NO: 351017 - DNA, 734 bp, Homo sapiens; identical to SEQ ID NO: 202032
  chr10:30024793-30025527
  hyper

SEQ ID NO: 351018 - DNA, 157 bp, Homo sapiens; identical to SEQ ID NO: 333915
  chr10:31607149-31607306
  hyper

SEQ ID NO: 351019 - DNA, 790 bp, Homo sapiens; identical to SEQ ID NO: 345352
  chr10:31607954-31608744
  hyper

SEQ ID NO: 351020 - DNA, 252 bp, Homo sapiens; identical to SEQ ID NO: 202037
  chr10:31609416-31609668
  hyper

SEQ ID NO: 351021 - DNA, 45 bp, Homo sapiens; identical to SEQ ID NO: 202040
  chr10:33624447-33624492
  hyper

SEQ ID NO: 351022 - DNA, 138 bp, Homo sapiens; identical to SEQ ID NO: 202041
  chr10:33624560-33624698
  hyper

SEQ ID NO: 351023 - DNA, 447 bp, Homo sapiens; identical to SEQ ID NO: 202042
  chr10:33624841-33625288
  hyper

SEQ ID NO: 351024 - DNA, 62 bp, Homo sapiens
  chr10:35102985-35103047
  hyper
cggccccgcagcccagccacatggaaccagcccgggataggtaggagctgaggtcctcgcag

SEQ ID NO: 351025 - DNA, 403 bp, Homo sapiens; identical to SEQ ID NO: 202045
  chr10:35103079-35103482
  hyper

SEQ ID NO: 351026 - DNA, 544 bp, Homo sapiens; identical to SEQ ID NO: 202046
  chr10:35103534-35104078
  hyper

SEQ ID NO: 351027 - DNA, 649 bp, Homo sapiens; identical to SEQ ID NO: 347086
  chr10:35104117-35104766
  hyper

SEQ ID NO: 351028 - DNA, 251 bp, Homo sapiens; identical to SEQ ID NO: 287083
  chr10:43572998-43573249
  hyper

SEQ ID NO: 351029 - DNA, 135 bp, Homo sapiens
  chr10:43697752-43697887
  hyper
cgtctgccccctgtggttgaaagggcgacagcgctgaaaggggtgtgaccccgaggggaggcgacgcgctcccgcgccctagtccacaggcatgcacgaccccacccagcacagggcctagggcatggggactgg

SEQ ID NO: 351030 - DNA, 124 bp, Homo sapiens; identical to SEQ ID NO: 202055
  chr10:43698155-43698279
  hyper

SEQ ID NO: 351031 - DNA, 55 bp, Homo sapiens
  chr10:43818322-43818377
  hyper
cggtttaccgtcaccatggcaacagcgcgtcctgggctggggcggggccagactg

SEQ ID NO: 351032 - DNA, 129 bp, Homo sapiens; identical to SEQ ID NO: 202057
  chr10:43818407-43818536
  hyper

SEQ ID NO: 351033 - DNA, 700 bp, Homo sapiens
  chr10:43892074-43892774
  hyper
cgcaaggtgggaggcccgggcgcgcggtaaacgtgttttggcgggaagcagcgccgaggccccgagacaaggtgacggcgacgttcccgcggcctgctcacggcactccagcagcctcggaccgcccggcccggcaggaaggtcggccccagggcctgcgcgggctcgggcgggagcttccgggcggggggcggagcgagcggcgcagcggggagagtgggggcagggacgggagggttcccggagggaagggcgcctcgcgggagggggaggggaggggaggggaggggagggggcccctggcgggcttccggggccctgagggcgagagcgagggcgacggcaaggtggggtgggggctgctccccggcccgccaagctagcgctgcctaggcgggagctcggggacccgcgggccgagcgcggctgaagggagggaagggaagaggcgctcgtaggtctgcgtccgtctccgagcgaccggggcggcggaaagggacctggggggggcggccgggactggagtggcggggccggggcgcccgcgcggcggctcaccacgccagggactggcccgtcggccccgaggaggcgcggggtccggagtccgggaagcggaggcctcgtgatccaagaccggcagccggacgtgggtcacggggtgcagaggaggaagtgccattgccgggcccgccaagat

SEQ ID NO: 351034 - DNA, 171 bp, Homo sapiens; identical to SEQ ID NO: 347088
  chr10:43892970-43893141
  hyper

SEQ ID NO: 351035 - DNA, 216 bp, Homo sapiens; identical to SEQ ID NO: 347089
  chr10:44185124-44185340
  hyper

SEQ ID NO: 351036 - DNA, 78 bp, Homo sapiens; identical to SEQ ID NO: 347090
  chr10:44186043-44186121
  hyper

SEQ ID NO: 351037 - DNA, 107 bp, Homo sapiens; identical to SEQ ID NO: 345354
  chr10:44806674-44806781
  hyper

SEQ ID NO: 351038 - DNA, 173 bp, Homo sapiens
  chr10:44879650-44879823
  hyper
cgtgtgaggctcggagggtccctgggcctctctcaggtgaacccgagaagagacaggaagacagcggctggacgcgcgcccaggtccgcgtcgctgcggaccgcggagctgtgcagaagcgcggcctggcgggtggcacaagcccgacagctgcgccgcgcagcccgcccgcg

SEQ ID NO: 351039 - DNA, 197 bp, Homo sapiens; identical to SEQ ID NO: 345355
  chr10:44882100-44882297
  hyper

SEQ ID NO: 351040 - DNA, 94 bp, Homo sapiens
  chr10:50606762-50606856
  hyper
taaaaaagggcgttagtaacgaaaaggttatttttccttaatttttgtgcggtaaaatgtattttccaattaaccaaattcgccgatctgtctc

SEQ ID NO: 351041 - DNA, 122 bp, Homo sapiens
  chr10:54073737-54073859
  hyper
ttactgccaggcaagggcacccaagttcccagagttcctgctgccgcctgcatttattaaagtcgtctgctataacgctcgctggtagccttcaccccgaaggtgagccgggccagccgagc

SEQ ID NO: 351042 - DNA, 313 bp, Homo sapiens; identical to SEQ ID NO: 287136
  chr10:60935996-60936309
  hyper

SEQ ID NO: 351043 - DNA, 256 bp, Homo sapiens
  chr10:62492589-62492845
  hyper
cgtgtccttaggaaaggttcagcctggcacggagttggaggggcgagccaagagcagagaagccccaagacgagagaccgaggtgagggcgtcctgagcccggggcccgcttttctttttccagacgaatgtttccaagcagaagccccaagtcctcgggcccccctctctcctggggatgctccagcactgggaccgagttcgagctctcgcctctgtcccgggccgcaacttccaggcgcaactggactcccac

SEQ ID NO: 351044 - DNA, 295 bp, Homo sapiens
  chr10:62761026-62761321
  hyper
cgcgtccccatgagcctgcggatgtggggactgcgggtgggcagagagaccccccataatcccgcccaccctggcgcggctcctcccgggcgcgctcccgccccgccacgccccgcgacgcccgcgctacctggggacgctggaagctcccgcggcggctctgggtcccgccgggcggccgaggctggcgcgggctttgtaaagccgccgggacagcgccgaccccgccccgccccgccgaccccgccctctcccacctcggccgcctcccccgcctgcatcccgggccacagtc

SEQ ID NO: 351045 - DNA, 76 bp, Homo sapiens; identical to SEQ ID NO: 287148
  chr10:62761372-62761448
  hyper

SEQ ID NO: 351046 - DNA, 194 bp, Homo sapiens
  chr10:63656701-63656895
  hyper
cgagttccctgtgtctctcttggctccggctccaagttcatgagaaatctgtccccatacccatccttctgaagcttccagcctttaccacctggacctgggctggagtcccacccccaccacagctcttgagacaggcgacgaatagacccaaatttgagatgtagctcaacctttgaccactagaggtctcc

SEQ ID NO: 351047 - DNA, 73 bp, Homo sapiens; identical to SEQ ID NO: 347093
  chr10:64578688-64578761
  hyper

SEQ ID NO: 351048 - DNA, 42 bp, Homo sapiens; identical to SEQ ID NO: 333957
  chr10:68685841-68685883
  hyper

SEQ ID NO: 351049 - DNA, 1236 bp, Homo sapiens; identical to SEQ ID NO: 333960
  chr10:71078140-71079376
  hyper

SEQ ID NO: 351050 - DNA, 198 bp, Homo sapiens; identical to SEQ ID NO: 202107
  chr10:71389862-71390060
  hyper

SEQ ID NO: 351051 - DNA, 140 bp, Homo sapiens
  chr10:71390109-71390249
  hyper
agcccgggccgggacttggagccggtgtcgggctccagaggctggggctggcggccggggcagcgtccctcccgcccccggcccggaatgtcaggtgcgccgcgggccgggcgcgcgggtggcccaccgggcgggggcgc

SEQ ID NO: 351052 - DNA, 643 bp, Homo sapiens
  chr10:71892158-71892801
  hyper
cgtgttccctcttccccggttcgcccttcccggcctaagcccatcttccttaggaaaacttagcagggatttaggggccaaaccaggagggtggagttttctttgccctcggccaggagcacatctccctgttgcgttttttgggggagacagagaggggcgggcctgagtcgagtatccctctcctcgcagcgccacaactgcgcgcaccgacctccccacgccagacgcggcgtgagccaggcctctaatccgctcgcccctcttccgggtcccggtcccgcccggggcgcccggggtctcgagagcccgcctggcggcgcgatctcacctgtcggccgcgcccgcgcgctctcgctccggctcccgctcccgctcccgctcccgcttggtcgtcttcccgagttactgacccgaggcgctcccgggcggggcgtgactcagcactcgtgctggtccccgaccccgcggcaacgccccggccaggccccggaaacggtcctggcacgctggggctggtctccgaacggcccgccggactaaccttgaccctgagcgaacggccttgaactttgaaacaaatgctcccatggccagatgtcgcctctccggctcctgccagcacccgcgccccagtcctgcc

SEQ ID NO: 351053 - DNA, 85 bp, Homo sapiens; identical to SEQ ID NO: 347094
  chr10:72015065-72015150
  hyper

SEQ ID NO: 351054 - DNA, 323 bp, Homo sapiens; identical to SEQ ID NO: 347095
  chr10:72238261-72238584
  hyper

SEQ ID NO: 351055 - DNA, 146 bp, Homo sapiens
  chr10:73846836-73846982
  hyper
cggcgtcgcctctggcgcatccgggcccatcccccacagcacccccaacgatctcggggtccagccacaccctccgcccgccctgcctcacccctgcttccccagcccccaacccggcccggccgagaggaaggagccagccccgc

SEQ ID NO: 351056 - DNA, 164 bp, Homo sapiens
  chr10:73847427-73847591
  hyper
gatgccaccctcactgccggccccacccagacctgccggtgctgcagtgccccgtatgtgcagcctgcagcatcccagcggctggggcaggcccgggggcggctcgcacaacgcagctggggaccgggtcggggtccagcggcagccggggtccgggtcccccc

SEQ ID NO: 351057 - DNA, 249 bp, Homo sapiens; identical to SEQ ID NO: 347096
  chr10:74057413-74057662
  hyper

SEQ ID NO: 351058 - DNA, 295 bp, Homo sapiens; identical to SEQ ID NO: 347097
  chr10:74057707-74058002
  hyper

SEQ ID NO: 351059 - DNA, 412 bp, Homo sapiens; identical to SEQ ID NO: 345356
  chr10:74079281-74079693
  hyper

SEQ ID NO: 351060 - DNA, 179 bp, Homo sapiens; identical to SEQ ID NO: 345357
  chr10:74079752-74079931
  hyper

SEQ ID NO: 351061 - DNA, 345 bp, Homo sapiens
  chr10:77159582-77159927
  hyper
cgccgccgcagctaatccggccgtgtgccagccccgtgggtcccccttcggccgaggcgcccccggtgcccttgccaccgccgcccacgtcggtgtctttcttgtcgtccttgccctccggggcacccccggccgaggacagcatacctcccggcgagcaggccgaggcgctggagctcgggctgcctgtcctgggcgtgaatggctggcaggtggcgctcggtacccggaatcccgacttctccgacgaaacacccccgccgccgcccccgccaccgccaccgcctccaccgccgcctcccggctccttcttatccgagccgggtttggagtacggcttgaaac

SEQ ID NO: 351062 - DNA, 918 bp, Homo sapiens
  chr10:77160017-77160935
  hyper
cgccgcccccgttggaggcaaccgaggagagtttggaggagggcgaggggtcgggcttcccgatctgcgaacatgtttgcgccaacagcgccagcgggctcttcttggcatcgagctgcggggtcagacgatggggggggagcgtcacacagagaaagaagtggaaaccctttagaatcctggcttctggggttcaaatgcctctccgcaacagcccacgaagatcctcccagccccaaggcgcaattctaggcggcaccccctcttcaacacccactcacaaacattctcgccgttgggaaaggcagcagattgctccccccgcccaaccaccacccccagcagcatctttcctgccctctctgagcgctaactagatttttaaagagcaaaatgttttggttttcggttcctagacccagaactgtaccccctccccacaaacactccttaattcttcagagtaagggctcgggcggctggcgcctcagaggctgtgtgcacacactggcttctgcggatacgaaggacggcgactttggaaccgtatttcagacctccgcctgccttcggtgccgagtgaaggggcctgggtcggggtaggggctttcatatcgaaaggagaaacaagtattggcagccttgctccctagcatgcacgccccattccacttcctcccccttttccgccctagttttgaggtacggaagcagtagcctcttcccccattcgggagctgaatcactccgacccccccacctccgcccagatcccgagaaaaagaaagccctagggtggcagccagggtagtggtcccagtgcgatccagagagagggtccttacctcgatggggctgaccggcgtggaaggcaggggctgcaggtactcggggtgcaaaatgtggccagttcgtgcc

SEQ ID NO: 351063 - DNA, 67 bp, Homo sapiens
  chr10:77160965-77161032
  hyper
cggttggcctggcgcagggggtcagaggggggcacggcgtgcacaaaaggcttggtgctgccggccg

SEQ ID NO: 351064 - DNA, 217 bp, Homo sapiens; identical to SEQ ID NO: 202139
  chr10:77161406-77161623
  hyper

SEQ ID NO: 351065 - DNA, 1015 bp, Homo sapiens; identical to SEQ ID NO: 202140
  chr10:77161691-77162706
  hyper

SEQ ID NO: 351066 - DNA, 95 bp, Homo sapiens
  chr10:77163338-77163433
  hyper
ggatgcccagtgtgtatgcatgcctgtggcgctgcgtgagttatcggggctctgatagcgtccggagcgggttcgagggtctcctccaggaactc

SEQ ID NO: 351067 - DNA, 310 bp, Homo sapiens
  chr10:77168785-77169095
  hyper
cgcgctcgggaggggaggctgtcaaaacccagtcatcgcggggactggatgggggacaattctccgacgccgcggcctggacccgcccccacccaaccggcgcaccacctcccaggcaccacggagcctgcgcaagctgcggggccgtaaaggaaccggcccccaatctccggggcttcagtcccgcccctctctccccccagtgccctgcagcgctcccagggtccgtgtctgccctccccaagcccccactgtcaatacaatccctgttaaaaaaaaaaaatctttttagagccaggcacgtgccgtc

SEQ ID NO: 351068 - DNA, 364 bp, Homo sapiens
  chr10:77169218-77169582
  hyper
agggctggggagtgagaaggacagagagcaccgcccgacacaaccagacgcgcggacccggggcctcctctctggaccggtgctggggccctggtagaaccagctccgggagccgaaattgagccatgaagagtgggccgagggaggggcgaggggaacgggcctcaggagggaggggcgggcccggcggcacttccgttgggggtggggctgcgggctgccgcgccggtcccgcccctccgccgcgcgggcccgcccgctccaggccaggctccgcccccaccgactcggagctggatctcaggccacggcgcccccccagtcgcgcccccaaccccggaggcctcgggctgaaccgggtttc

SEQ ID NO: 351069 - DNA, 84 bp, Homo sapiens
  chr10:79396547-79396631
  hyper
cgaactcatctccccaacaggttcctaaagtatgggcggatgtgctccctctcgcccaccgccaggagccgagccccggcaggt

SEQ ID NO: 351070 - DNA, 90 bp, Homo sapiens
  chr10:85954199-85954289
  hyper
cgccggcaaagggggcgtggcgggcggggagtcctcttgtcacgccctcctgcccccgcccgcggctgggagcctgtcgctccgctctgc

SEQ ID NO: 351071 - DNA, 41 bp, Homo sapiens
  chr10:88731062-88731103
  hyper
cgctgccgcccggcggggtcccgccccgccactccccgggg

SEQ ID NO: 351072 - DNA, 177 bp, Homo sapiens
  chr10:88731133-88731310
  hyper
gagaacgaagcacggttgtggggggggcatgcacgtgcgcgctcgcgtgcgggagacccctcccttccacaccacttcctttcgggacaaaccggtaacctccggccctggaaggttttgtctagtgggttccggatggactggtgttcccagcacccccccggcacgtgtccacgc

SEQ ID NO: 351073 - DNA, 417 bp, Homo sapiens; identical to SEQ ID NO: 345358
  chr10:89621342-89621759
  hyper

SEQ ID NO: 351074 - DNA, 148 bp, Homo sapiens; identical to SEQ ID NO: 202167
  chr10:89621836-89621984
  hyper

SEQ ID NO: 351075 - DNA, 853 bp, Homo sapiens; identical to SEQ ID NO: 345360
  chr10:89621985-89622838
  hyper

SEQ ID NO: 351076 - DNA, 53 bp, Homo sapiens; identical to SEQ ID NO: 345361
  chr10:90342577-90342630
  hyper

SEQ ID NO: 351077 - DNA, 57 bp, Homo sapiens; identical to SEQ ID NO: 345362
  chr10:93647662-93647719
  hyper

SEQ ID NO: 351078 - DNA, 79 bp, Homo sapiens; identical to SEQ ID NO: 287325
  chr10:94449318-94449397
  hyper

SEQ ID NO: 351079 - DNA, 643 bp, Homo sapiens; identical to SEQ ID NO: 287326
  chr10:94450726-94451369
  hyper

SEQ ID NO: 351080 - DNA, 314 bp, Homo sapiens; identical to SEQ ID NO: 334000
  chr10:94607767-94608081
  hyper

SEQ ID NO: 351081 - DNA, 384 bp, Homo sapiens; identical to SEQ ID NO: 287332
  chr10:94833649-94834033
  hyper

SEQ ID NO: 351082 - DNA, 230 bp, Homo sapiens
  chr10:98272415-98272645
  hyper
cgtgagcgtgagcacccctctgtccgtgctggaactgccccacactcatcagcttgctggaacatgcgcttggcccttcggaggctaacgcttcaacgactccagctcggaagccgctcccctcaggactcacgagccgatcagtggccccgaggaagcgggagctgcagcgcccgggcggcgattgcgcccgaaaggcccgtacgtcctggggcgccgcttcctggagg

SEQ ID NO: 351083 - DNA, 715 bp, Homo sapiens
  chr10:98272768-98273483
  hyper
tgcccgctgtgacgcttttctttttaaaatctcccaagagtaaccacagatcttgggaaactttgcgcgaaacttaaaaatgctgtgaaatcggagccaggaactccatctgagcctcggagcgccgcgcccagtccagctcttctgctccggcccggagcgtctggcggtggccagtgctgcccactcgctgtcaggcggccctggcacccaccccggcccctgggcgccctctcggcctctggcacccgctctgattcgctttgggaacgcgccagctgtcgccccccggtgcgcaccgcaaacctggggccgggacatcccagcctcggagtggtttttaagcaattcctcggaggcattgtcttccgggggagccggggatctcaggggaggggaggggagacccgccccatagacggtagtgcaggcttgcccaccacctcatttgcatttcaaaggcaaacttctgcgggacttccccagcggcggcacctaccggctttgcaagggtcgtggtaatgctccagctgctgctccgtgccctcctcgccgtccagctctgagtagtctgcggtggcgtccgggcgctccccgagtcccccggcgccgcgaggcagcggcagcagcagcagcagtgacaccagggccccaagtgcagtcgcccggggcatggtggcgcggggccggctggggcagagggagttgcgtgcac

SEQ ID NO: 351084 - DNA, 761 bp, Homo sapiens; identical to SEQ ID NO: 345363
  chr10:98479725-98480486
  hyper

SEQ ID NO: 351085 - DNA, 59 bp, Homo sapiens
  chr10:100992740-100992799
  hyper
cccacaaacctccgtgcaggaggtgaaacctgccttgtttctctcagaccaggcccggc

SEQ ID NO: 351086 - DNA, 124 bp, Homo sapiens; identical to SEQ ID NO: 345364
  chr10:100994695-100994819
  hyper

SEQ ID NO: 351087 - DNA, 312 bp, Homo sapiens
  chr10:101279860-101280172
  hyper
cggggccaatcagcagccataaatcttagagaaccttcaccgttttacaagggagttcgcaggggctgcccttctccctcacgcggtctatttacaacgccgaaatctccgtgttaatggacctaggataatggtgtttactttaccgcgataaagcgctgggcttcctgggggagcggctgtaaaatgtcctggaggtagggatggaacgggcgccgtaaaagcgggcgctggaagggcgggggcaccaggttctccttcaggccggcgcccccgccctccaccctctaggccaggctgagcagcccaggc

SEQ ID NO: 351088 - DNA, 115 bp, Homo sapiens
  chr10:102501611-102501726
  hyper
cgcgctgtggggagcatttcctggggagatgcatttaatttcggaatttctaatcccctccctcagaccccggtcctagctcccctagccgctccccgggaagtggaaggaggaa

SEQ ID NO: 351089 - DNA, 257 bp, Homo sapiens; identical to SEQ ID NO: 202223
  chr10:102585797-102586054
  hyper

SEQ ID NO: 351090 - DNA, 109 bp, Homo sapiens; identical to SEQ ID NO: 202224
  chr10:102587493-102587602
  hyper

SEQ ID NO: 351091 - DNA, 163 bp, Homo sapiens; identical to SEQ ID NO: 202225
  chr10:102587906-102588069
  hyper

SEQ ID NO: 351092 - DNA, 77 bp, Homo sapiens; identical to SEQ ID NO: 202226
  chr10:102588175-102588252
  hyper

SEQ ID NO: 351093 - DNA, 160 bp, Homo sapiens; identical to SEQ ID NO: 202227
  chr10:102588941-102589101
  hyper

SEQ ID NO: 351094 - DNA, 653 bp, Homo sapiens; identical to SEQ ID NO: 347115
  chr10:102791390-102792043
  hyper

SEQ ID NO: 351095 - DNA, 114 bp, Homo sapiens; identical to SEQ ID NO: 347116
  chr10:102792044-102792158
  hyper

SEQ ID NO: 351096 - DNA, 139 bp, Homo sapiens; identical to SEQ ID NO: 334040
  chr10:102978324-102978463
  hyper

SEQ ID NO: 351097 - DNA, 33 bp, Homo sapiens; identical to SEQ ID NO: 345367
  chr10:102995986-102996019
  hyper

SEQ ID NO: 351098 - DNA, 578 bp, Homo sapiens
  chr10:105253250-105253828
  hyper
cgcatccggggagctcggcgttctcgcggccctgctccccttgttttcaagtgcaagttccatgtttccgtgctgggaataaggccagccccgggtgccaccatactcgcctgatgtcttaccccgacccgcgccgccgagagcttgcggctacgggaacgcggcgcgccccggggccacatctggcctagcgggcgcgcgcgtgtcactaagacgctcattcaccggcgcagctgtcaccataacaaccggagcgagggaatcctggagactgccggggcggggggcgggggcggcggtcgcaggagggacccggcgcgggcgggaccgcggcggtcgggggacaccagctgcgtcggagcgcccagaacgccccgcgctccgccgagccccgctccacgcagacccgcgggcgggagggagccacgcacatcgccgccgcggccgtctccgcggggcggtaaccgagcctgcctcggagccgccgaacgcccacgccagcgaccctgactctatggccccgggggagcgcgccggagccgccgcgccgcccacccccagccggaaccctagcgtcc

SEQ ID NO: 351099 - DNA, 236 bp, Homo sapiens
  chr10:105253853-105254089
  hyper
cgtccccggccccggcccagggccctgcttgtggcccccgctcccgccacggggcatgggaggcaggtagcccagcctgcgccaggacacccgtggcgggcggaacccgccaaggaccgcgaagtccagagaaaggaagctgaggagctgcccgcccgcccccggctgcagccccagcagggccctcccccggtggcgcgcacccgcgcgcgcacactcgcacaccgcacctcagc

SEQ ID NO: 351100 - DNA, 722 bp, Homo sapiens
  chr10:106097237-106097959
  hyper
cggtggctttttttttctttttctttttctttttttaagagaaagcgttttggatggggagtcccgccccgggagtcttcaccaggcggccagaatggcaaagtcacagggatggggttgagggtggggttaggggtgaaggggcagagagttatttgcagcccaagagcaagtctgcacagcgtgaggtctggcccactaatagtcccgaaagaggaagcggcggggattttatccggcctgaagcagccccataacttcactaccatgaaccgagaaaaaaaaacttcacgcctattcctcccttacaggaagggagggaaggggaaggggaaaagggggcagcaaatgagcagggcgaaccggcttttctttcttcggtagcgctctgctcagatgtgagaagtaacgggtcacctggccactaggaacaaaaatgtggtcccgctctgggctccgaggctgcgcgcgcctcgaggaggagctgcccgcagccctggctggagcgagcgcccgggacgcatcccccgacgcggcgggaacaggatgcgggaccgcgaggagacaatacgcccgcctgggcacgcgcgctttaagggaagggggtctccaaagtcagcccccacccgggaggagcaggcgcccgcgctccccacaccctcctgcgccccctctgtcggcagccatctccgacacagctcctccgagctcgcgctctccat

SEQ ID NO: 351101 - DNA, 165 bp, Homo sapiens
  chr10:106098025-106098190
  hyper
cggtccccgccgcgggaggacggctccagcacaggctttgcgcgcaggtcgagggccgaggcgccgctgcttgcaggcggctgcggtggagcttgcggcccggcacttagaggggcgcgggcggcgatgcccccgctggctcccaccttctggcctgcagcggcc

SEQ ID NO: 351102 - DNA, 737 bp, Homo sapiens; identical to SEQ ID NO: 334066
  chr10:111767130-111767867
  hyper

SEQ ID NO: 351103 - DNA, 567 bp, Homo sapiens; identical to SEQ ID NO: 287502
  chr10:112257242-112257809
  hyper

SEQ ID NO: 351104 - DNA, 353 bp, Homo sapiens; identical to SEQ ID NO: 202259
  chr10:112257978-112258331
  hyper

SEQ ID NO: 351105 - DNA, 184 bp, Homo sapiens
  chr10:112258408-112258592
  hyper
tgcaaatgtcagcactcagagctccccctcttccccacccgcgttcctcgaaagcgcccggcagcgggtctgcccggtggtctgggtggagttggttatgctgcgggggctgctgctgtttagcagtttgggggccgtcggctcgtgccgggcacgagccccctttccagacgcgagcttcgcc

SEQ ID NO: 351106 - DNA, 37 bp, Homo sapiens
  chr10:112431835-112431872
  hyper
cgatgacggctctcggaggctcctggttttgatgtct

SEQ ID NO: 351107 - DNA, 235 bp, Homo sapiens; identical to SEQ ID NO: 202288
  chr10:112432125-112432360
  hyper

SEQ ID NO: 351108 - DNA, 46 bp, Homo sapiens
  chr10:115998990-115999036
  hyper
cgtggaggagtcagctgacggcacagtgttcgcggctgcaccgctc

SEQ ID NO: 351109 - DNA, 411 bp, Homo sapiens
  chr10:115999183-115999594
  hyper
caggagagacaaacaggtgtcccacgtggcagccgcgccccgggcgcccctcctgtgatcccgtagcgccccctggcccgagccgcgcccgggtctgtgagtagagccgcccgggcaccgagcgctggtcgccgctctccttccggtgagtcccagccccgagttggctctggcgcccgggtacccgccagtgccggctgccgatgaccgattcacgctcccggtactggggccccctctgcccagccacccctacccagagcacccgggctgcgcggccccgccgagggtgcgggctttgttcgcattgtctgcgcgcacctgagcgcggccttcctggcacggcggcgtcgggggaagagcgcacctggcgcgcgcctccctcgtggccactcgcggtccgtcccgggc

SEQ ID NO: 351110 - DNA, 587 bp, Homo sapiens; identical to SEQ ID NO: 287577
  chr10:118608718-118609305
  hyper

SEQ ID NO: 351111 - DNA, 239 bp, Homo sapiens; identical to SEQ ID NO: 202308
  chr10:118891774-118892013
  hyper

SEQ ID NO: 351112 - DNA, 482 bp, Homo sapiens
  chr10:119293799-119294281
  hyper
cgagaaggggaacctcaacatcaagtgtctggcagatgggagtgtgtgttaagcgagggctgttttcgttgggaacgcacagcacagctcccttcctcagagccacctccagacccctcggccctcccacgacccccagttcccgggtccgaggttctgggcgccagcggcggccaccgcgccgcgcgagcagcttttattcgcactctctttaactcgccctttctggttctcttcccttcgagcgccctgcagcggagtgttagacaagccctgttgtctgtgggctctcacctcagagtcaatattatctcagatgggcacaatagactggaatgaaaagctaatattgaatcaatgctgtccctgtccgcgccgctgcgatgccaccctttgttgcgcacgccgcccccggcaagctgctggcggccggggctaagcggagggcggccgcggtcgggcctctccgggtccacgccagg

SEQ ID NO: 351113 - DNA, 116 bp, Homo sapiens; identical to SEQ ID NO: 202319
  chr10:119296211-119296327
  hyper

SEQ ID NO: 351114 - DNA, 52 bp, Homo sapiens; identical to SEQ ID NO: 202320
  chr10:119296362-119296414
  hyper

SEQ ID NO: 351115 - DNA, 62 bp, Homo sapiens; identical to SEQ ID NO: 202321
  chr10:119296567-119296629
  hyper

SEQ ID NO: 351116 - DNA, 131 bp, Homo sapiens; identical to SEQ ID NO: 347121
  chr10:121301363-121301494
  hyper

SEQ ID NO: 351117 - DNA, 760 bp, Homo sapiens; identical to SEQ ID NO: 345370
  chr10:121301911-121302671
  hyper

SEQ ID NO: 351118 - DNA, 138 bp, Homo sapiens; identical to SEQ ID NO: 345371
  chr10:122708760-122708898
  hyper

SEQ ID NO: 351119 - DNA, 74 bp, Homo sapiens
  chr10:122739316-122739390
  hyper
cgcgcgcttaactctgcctgcccgcccgccccgccccgcccggccgttcctgcgcagccctgggtcggcctcgc

SEQ ID NO: 351120 - DNA, 209 bp, Homo sapiens
  chr10:123356997-123357206
  hyper
cggccccaccccagcggccccctcccgaaaaaggggtctccgcagggcctggatggtacggaagttcccaggacacacggatggggcacctcggagatgaccccgggaaccggcctgcggggctgtgccacgggcaggcgaaccttccgcccgtctgctctggggtcggagaaacgcgcccagtcagcgggaatgcgcccgccagggtt

SEQ ID NO: 351121 - DNA, 372 bp, Homo sapiens; identical to SEQ ID NO: 202339
  chr10:123357242-123357614
  hyper

SEQ ID NO: 351122 - DNA, 106 bp, Homo sapiens; identical to SEQ ID NO: 202340
  chr10:123357660-123357766
  hyper

SEQ ID NO: 351123 - DNA, 375 bp, Homo sapiens; identical to SEQ ID NO: 202341
  chr10:123357893-123358268
  hyper

SEQ ID NO: 351124 - DNA, 629 bp, Homo sapiens; identical to SEQ ID NO: 202348
  chr10:124221086-124221715
  hyper

SEQ ID NO: 351125 - DNA, 318 bp, Homo sapiens
  chr10:124221921-124222239
  hyper
ctgagggcaaccacacagcgcggggaccccaggacaaataagaggaatgggggcataaaggaaggagagaagttcaggactgggaattggcgcctcgcagagcggcttcaggaccacaagaagtcatttcggttgctttttcttctatttacgtcctccgtcccctttaaaattcactgctttgatcacgggaccgctcagtgaaaactgtatgtaactcttttggaaaggaacagtgtttgccggcccgccccggagtttctccaaaaagtctaccccgagcagggaacggtttggcaccgctctcgtttcggcggc

SEQ ID NO: 351126 - DNA, 367 bp, Homo sapiens; identical to SEQ ID NO: 202351
  chr10:124899187-124899554
  hyper

SEQ ID NO: 351127 - DNA, 203 bp, Homo sapiens; identical to SEQ ID NO: 202353
  chr10:125851929-125852132
  hyper

SEQ ID NO: 351128 - DNA, 96 bp, Homo sapiens; identical to SEQ ID NO: 287649
  chr10:125853277-125853373
  hyper

SEQ ID NO: 351129 - DNA, 1193 bp, Homo sapiens; identical to SEQ ID NO: 334112
  chr10:126106668-126107861
  hyper

SEQ ID NO: 351130 - DNA, 206 bp, Homo sapiens; identical to SEQ ID NO: 202379
  chr10:134600998-134601204
  hyper

SEQ ID NO: 351131 - DNA, 66 bp, Homo sapiens; identical to SEQ ID NO: 347130
  chr10:134676272-134676338
  hyper

SEQ ID NO: 351132 - DNA, 41 bp, Homo sapiens; identical to SEQ ID NO: 347131
  chr10:134676653-134676694
  hyper

SEQ ID NO: 351133 - DNA, 451 bp, Homo sapiens
  chr10:134973438-134973889
  hyper
cggcccagcgaccgccccgccccccaccccgggccccgccccccaccccgggccccgcccggccctgcccaacgccgctgcagaggccaccccgggactgcggcagccccgcccggcagcagcgggggtgggacgggggcggcgggagccggcgagggggtctgcccgtccgagctttcctgggcgccggctccgcccctcgacccttggggcccaggtggggcgcagaccccgtggctccccgcggaggccacacgcctggctccgcccccggtgcctcccccaggaaggagcgacgttccctaggcgccgggtccggacagcgccgcgcagcccccgcgcaccccgcgccccccgcgccccccgggcccgccccgtatccctgaccgcgtcccctggagacactgcggcagcggcgggcgggcgggggcgggcgagggccgggcgcgtc

SEQ ID NO: 351134 - DNA, 123 bp, Homo sapiens; identical to SEQ ID NO: 347132
  chr10:135075001-135075124
  hyper

SEQ ID NO: 351135 - DNA, 127 bp, Homo sapiens
  chr10:135090197-135090324
  hyper
cggggtccgcgtcgcgtcctgcggggagagccaccctgccccgcgctgcgcccgggacggttccctggaaccactcaccaggcagcatcatcgcgcccagcagccagagcccgaggccgcgcatggc

SEQ ID NO: 351136 - DNA, 99 bp, Homo sapiens
  chr10:135090391-135090490
  hyper
cgaggctcttttccgcgcgccccgccccggcgccccgcagccaatgggcccctcggccggtgggaggggcggggcgcgcggcacctgggggcggggtcc

SEQ ID NO: 351137 - DNA, 60 bp, Homo sapiens; identical to SEQ ID NO: 202385
  chr11:308266-308326
  hyper

SEQ ID NO: 351138 - DNA, 93 bp, Homo sapiens
  chr11:308362-308455
  hyper
ggtctggtccctgttcaacaccctcttcatgaacacctgctgcctgggcttcatagcattcgcgtactccgtgaaggtgcgtatggccctggc

SEQ ID NO: 351139 - DNA, 117 bp, Homo sapiens; identical to SEQ ID NO: 334148
  chr11:441960-442077
  hyper

SEQ ID NO: 351140 - DNA, 394 bp, Homo sapiens
  chr11:537174-537568
  hyper
gaccgcctttacccgccccgcgtgggaagcgccaggatcgcgaggaaacgcgacacgtgcatcgcgacggcccaggcacggagccgcaggaagctggcacctgacgcgcctgcgcccacccaactcgagttggtggcgcgtcaccttcccctgggatcgcccgcagcaggggcgcccacgcacgtgccagtccacgtggccccgccctagcgaccgttgctaaggggcgtggctcagccgcacggaacccgagcccccggcgacttataaatatttgcgtattcaaatgaggcctggctcccgttgctatggcgcccaggccgcaaccccgcggcggccggaagaacagcctggagtaggagacagcgcctggaggtggagggcgcccagggcc

SEQ ID NO: 351141 - DNA, 93 bp, Homo sapiens; identical to SEQ ID NO: 287738
  chr11:829438-829531
  hyper

SEQ ID NO: 351142 - DNA, 731 bp, Homo sapiens; identical to SEQ ID NO: 347133
  chr11:1410711-1411442
  hyper

SEQ ID NO: 351143 - DNA, 93 bp, Homo sapiens; identical to SEQ ID NO: 347134
  chr11:2290844-2290937
  hyper

SEQ ID NO: 351144 - DNA, 285 bp, Homo sapiens
  chr11:2399038-2399323
  hyper
cgagccgagtttcggggcctctgtgctcgggggcccacctctgcggccgggccggggcttctgggggccgccgggcagttcccgctgtggtggtgatgggtgcggtggtcgcgggtcgggacccgagtacccggccgcccctcagctaaggaggggcctgcgcgggtccctggccgcggattccggactgctgcttcgcggggacgaggggggggctcgcgggcgggactcctggcgccccgcccccatgagctcatcaagagccgccgcccctggatggtgggg

SEQ ID NO: 351145 - DNA, 401 bp, Homo sapiens
  chr11:2399399-2399800
  hyper
cggtcaccacccgagaccttcctgggggtcgcgcctaaaaggagcgcagactcccgccgggatggcccagaagctggggtgcgcgcaccctggccgtccctgcctgggagccgatctccctctcctcacccagacacgttccagcggaggcctcctcccagaagggctctggaggcctcgcaggagtggggatcccgcggttctgagttggcacaaggaagagagtggcaccaggggcctggagtggatggcagggtccgggagtggggccgctgctttgcaagaggggcccccacgctgggcatctttgggtgccagcgtgggtggaggagggtcttttgctgagaatggctttctcctgaccgcagtctttgctgctgggaagtgactgatgggctttc

SEQ ID NO: 351146 - DNA, 127 bp, Homo sapiens
  chr11:2465520-2465647
  hyper
ctcacccaggacatccctttcctccccccaaccccaactccggagtggctcagagggagggaaagtagatgccggcaccctaccccgcccctcctgcccccgctgtgccgttctcggtcgtggtatc

SEQ ID NO: 351147 - DNA, 157 bp, Homo sapiens
  chr11:2466019-2466176
  hyper
cggaggcagggccaggccggtccgtggggagagggcgggccaagccggtgggcgcgggcagggacgccctgtgcgcgccggaccggcgggggcggggcgtgcaggcgggggcggggcacgccgtcccatgggaccggccctcggccactgccccctc

SEQ ID NO: 351148 - DNA, 250 bp, Homo sapiens; identical to SEQ ID NO: 287760
  chr11:2466191-2466441
  hyper

SEQ ID NO: 351149 - DNA, 129 bp, Homo sapiens
  chr11:8615887-8616016
  hyper
cgccttagagaaggacctaaaaccccgtctggggcacagaggagcagccacgtgttacgtaaaataaagctttgtagcaggaatatcacagtactgaggtgattgatgctcaggccactcttctcactc

SEQ ID NO: 351150 - DNA, 60 bp, Homo sapiens; identical to SEQ ID NO: 287811
  chr11:9112971-9113031
  hyper

SEQ ID NO: 351151 - DNA, 124 bp, Homo sapiens; identical to SEQ ID NO: 345376
  chr11:12131738-12131862
  hyper

SEQ ID NO: 351152 - DNA, 287 bp, Homo sapiens; identical to SEQ ID NO: 202443
  chr11:12132212-12132499
  hyper

SEQ ID NO: 351153 - DNA, 234 bp, Homo sapiens; identical to SEQ ID NO: 347137
  chr11:12696746-12696980
  hyper

SEQ ID NO: 351154 - DNA, 202 bp, Homo sapiens
  chr11:13300232-13300434
  hyper
cgggcaggtgcgcgtcggcctggggatgtcgcccggagcccgggtgcgggccggccttggagtcccagagctccgcggagggcgcagcgagcctggctccagctccgggtttgacagatgtcagggaagaaaaggttcccgctcggctattgccgggcgttgacatcccagagagcttcccgtttgcttggaagaagacgag

SEQ ID NO: 351155 - DNA, 346 bp, Homo sapiens; identical to SEQ ID NO: 202453
  chr11:14665271-14665617
  hyper

SEQ ID NO: 351156 - DNA, 298 bp, Homo sapiens; identical to SEQ ID NO: 202454
  chr11:14665651-14665949
  hyper

SEQ ID NO: 351157 - DNA, 79 bp, Homo sapiens
  chr11:16634452-16634531
  hyper
acgcaccctgccaaagtcctgtaaccatctacttcttccatctgcctaagagaaactgtaaacgggatttcccccccac

SEQ ID NO: 351158 - DNA, 1596 bp, Homo sapiens; identical to SEQ ID NO: 334182
  chr11:17034991-17036587
  hyper

SEQ ID NO: 351159 - DNA, 107 bp, Homo sapiens
  chr11:17373019-17373126
  hyper
cgcgccaacggtaagatgtcgctctggacgcgtgcacctgctctcgcaatcaccgactgcggtcagcatcttccttagagcagcgccccgggccacttggatcccgg

SEQ ID NO: 351160 - DNA, 166 bp, Homo sapiens; identical to SEQ ID NO: 202465
  chr11:17373405-17373571
  hyper

SEQ ID NO: 351161 - DNA, 116 bp, Homo sapiens; identical to SEQ ID NO: 7948
  chr11:17373642-17373758
  hyper

SEQ ID NO: 351162 - DNA, 402 bp, Homo sapiens; identical to SEQ ID NO: 287888
  chr11:17742811-17743213
  hyper

SEQ ID NO: 351163 - DNA, 37 bp, Homo sapiens
  chr11:17743245-17743282
  hyper
agcacccttctcggagacccattgcgatggccgctcc

SEQ ID NO: 351164 - DNA, 982 bp, Homo sapiens; identical to SEQ ID NO: 345379
  chr11:19733991-19734973
  hyper

SEQ ID NO: 351165 - DNA, 338 bp, Homo sapiens; identical to SEQ ID NO: 202485
  chr11:19735066-19735404
  hyper

SEQ ID NO: 351166 - DNA, 917 bp, Homo sapiens; identical to SEQ ID NO: 345381
  chr11:19798519-19799436
  hyper

SEQ ID NO: 351167 - DNA, 66 bp, Homo sapiens; identical to SEQ ID NO: 287911
  chr11:20153468-20153534
  hyper

SEQ ID NO: 351168 - DNA, 86 bp, Homo sapiens
  chr11:20230312-20230398
  hyper
cgcattcccactccagacgccgcagttttgaggcgcaatggggcctttggcctgatcatactcaggaatccttttaggccctttgg

SEQ ID NO: 351169 - DNA, 53 bp, Homo sapiens
  chr11:20230510-20230563
  hyper
tttcagcacaaaaggtttgaggtgcattgctttctttggcgtaaagcccttgc

SEQ ID NO: 351170 - DNA, 38 bp, Homo sapiens
  chr11:20619974-20620012
  hyper
tcctcatccccgaggccaggggttccccgagctagacc

SEQ ID NO: 351171 - DNA, 100 bp, Homo sapiens; identical to SEQ ID NO: 334203
  chr11:22647396-22647496
  hyper

SEQ ID NO: 351172 - DNA, 473 bp, Homo sapiens
  chr11:31818829-31819302
  hyper
cgaagaaccccgccgatagcatgctctgctctcatttgcctctttgacattttcttaattttaaaacatggagattcacattcttatccatgttctgtctcacacaaacatacacacgggtttacacaggcagcacgcgatcgccgccaggccctgtgctgcctccagaactgacacttaagagagaaaagtcagcagggacagtagagctcaattttaaatctggaaaaaaaaaaaaaaaaaaaaaagatgggaagcggggattggaattccacagcaaaaagaaacctgtcgctgcaggatcccttctctaccccgcggggagagcggcacggagacagttcattactttagaagtggcaactgtttgcagccaggcggtgacctagcggctgctcttacataaaatgggtacatttccccccactttagtggatttgccttccactcttaaagcttttaacaaaataaaa

SEQ ID NO: 351173 - DNA, 224 bp, Homo sapiens; identical to SEQ ID NO: 202495
  chr11:31821778-31822002
  hyper

SEQ ID NO: 351174 - DNA, 43 bp, Homo sapiens
  chr11:31823122-31823165
  hyper
cgttggtacagaccccctcggacagtaatctgtctcggatttc

SEQ ID NO: 351175 - DNA, 100 bp, Homo sapiens
  chr11:31842276-31842376
  hyper
agtaggggaagtagtggagagagagaaagatagagaaatcggctcttggcttgaactgttgttcttgtcgaaggtatgttttcccctcccggcctctgtc

SEQ ID NO: 351176 - DNA, 76 bp, Homo sapiens; identical to SEQ ID NO: 345383
  chr11:32449104-32449180
  hyper

SEQ ID NO: 351177 - DNA, 214 bp, Homo sapiens; identical to SEQ ID NO: 287961
  chr11:32455062-32455276
  hyper

SEQ ID NO: 351178 - DNA, 384 bp, Homo sapiens; identical to SEQ ID NO: 334231
  chr11:32851566-32851950
  hyper

SEQ ID NO: 351179 - DNA, 929 bp, Homo sapiens; identical to SEQ ID NO: 345384
  chr11:32915113-32916042
  hyper

SEQ ID NO: 351180 - DNA, 250 bp, Homo sapiens; identical to SEQ ID NO: 347147
  chr11:33891709-33891959
  hyper

SEQ ID NO: 351181 - DNA, 119 bp, Homo sapiens; identical to SEQ ID NO: 347148
  chr11:33892127-33892246
  hyper

SEQ ID NO: 351182 - DNA, 742 bp, Homo sapiens
  chr11:35160331-35161073
  hyper
ggaaaggagaggccaaaggctgaacccaatggtgcaaggttttacggttcggtcatcctctgtcctgacgccgcggggccagcgggagaagaaagccagtgcgtctctgggcgcaggggccagtggggctcggaggcacaggcaccccgcgacactccaggttccccgacccacgtccctggcagccccgattatttacagcctcagcagagcacggggcgggggcagaggggcccgcccgggagggctgctacttcttaaaacctctgcgggctgcttagtcacagccccccttgcttgggtgtgtccttcgctcgctccctccctccgtcttaggtcactgttttcaacctcgaataaaaactgcagccaacttccgaggcagcctcattgcccagcggaccccagcctctgccaggttcggtccgccatcctcgtcccgtcctccgccggcccctgccccgcgcccagggatcctccagctcctttcgcccgcgccctccgttcgctccggacaccatggacaagttttggtggcacgcagcctggggactctgcctcgtgccgctgagcctggcgcagatcggtgagtgcccgccgcagcctgggcagcaagatgggtgcggggtgctcagcgcggacccggcggcagcccctccggctgagtcggccctgggggactggagtcaagtgagctgtctgcgaagtgcattgggctccggaaagcagggctgggatttgc

SEQ ID NO: 351183 - DNA, 202 bp, Homo sapiens; identical to SEQ ID NO: 287979
  chr11:35439896-35440098
  hyper

SEQ ID NO: 351184 - DNA, 238 bp, Homo sapiens; identical to SEQ ID NO: 202513
  chr11:35440137-35440375
  hyper

SEQ ID NO: 351185 - DNA, 56 bp, Homo sapiens; identical to SEQ ID NO: 345385
  chr11:35547041-35547097
  hyper

SEQ ID NO: 351186 - DNA, 208 bp, Homo sapiens; identical to SEQ ID NO: 202515
  chr11:35547127-35547335
  hyper

SEQ ID NO: 351187 - DNA, 55 bp, Homo sapiens; identical to SEQ ID NO: 347151
  chr11:43599961-43600016
  hyper

SEQ ID NO: 351188 - DNA, 238 bp, Homo sapiens; identical to SEQ ID NO: 202528
  chr11:43600215-43600453
  hyper

SEQ ID NO: 351189 - DNA, 230 bp, Homo sapiens; identical to SEQ ID NO: 288003
  chr11:43964015-43964245
  hyper

SEQ ID NO: 351190 - DNA, 174 bp, Homo sapiens
  chr11:44087366-44087540
  hyper
cgatgaaaggccataaggatgctcacacccgaatctaaaaagccctttgtgtgggccgcagccaagcatactttggcaagaaatttctgtggctctaacctcctttgaaaactggagaaccaaggccaggaggcagaaggaggtggcagacccggcccggcggcggcccagcac

SEQ ID NO: 351191 - DNA, 51 bp, Homo sapiens; identical to SEQ ID NO: 345388
  chr11:44337578-44337629
  hyper

SEQ ID NO: 351192 - DNA, 278 bp, Homo sapiens
  chr11:44748906-44749184
  hyper
cgcgcgccgccccgggggtgctgctggacgcggcggggaattggggtggagtagggatcccaggacggaagcccggcaaccaagttccactcaaactagcacgcgggggctggggggccggggacggtctccaccccgtgcctgcccggagtccgctgagggccgggggctgcgcccaggacaggtgcagagccggtgggctcccagtgctccgggtggaggagtgggggcttctggagaacggcgcggggtggcaggtgtggttacaaggttcgggg

SEQ ID NO: 351193 - DNA, 516 bp, Homo sapiens
  chr11:44749218-44749734
  hyper
cgccacgccacccggtaagacagtgagggaccagggactgggagcggcgatcggggccgggagggctgtggggcccggcagctgcatggagggcgggctgcctttggggtccctggcagcggggcggggcggggcggaggcgccactcgttcctccaggaccccccttattccttaggtgtgtgcggtttggggaagtggagactccatggagtgctgggtgggtgggaggctcgggcacgtccagatttagggggcagtgggagccagttgggacggtgctcggctcgggtgggatcgcgccggctccgggtcctgctggagtgaggtgactgggctcccgccagggggcgcactgccccggccctcgccagcaggaagcgcgttctggctcctgcgaggcaaccgcgccgacatccaggacgcagggaccacagacacccaacttacgcggggtcccgccccgaggagcccgccctacactagccagacgggggagcgggaccaagagtgaggc

SEQ ID NO: 351194 - DNA, 86 bp, Homo sapiens; identical to SEQ ID NO: 345389
  chr11:47208495-47208581
  hyper

SEQ ID NO: 351195 - DNA, 77 bp, Homo sapiens
  chr11:57194101-57194178
  hyper
cgctcgaattctgaataccgtcccctaaaataatgacagcaactcaaccaggtgcagaggcagggagatttcataca

SEQ ID NO: 351196 - DNA, 50 bp, Homo sapiens; identical to SEQ ID NO: 334262
  chr11:57334786-57334836
  hyper

SEQ ID NO: 351197 - DNA, 188 bp, Homo sapiens; identical to SEQ ID NO: 345390
  chr11:58940419-58940607
  hyper

SEQ ID NO: 351198 - DNA, 200 bp, Homo sapiens; identical to SEQ ID NO: 202554
  chr11:58940666-58940866
  hyper

SEQ ID NO: 351199 - DNA, 55 bp, Homo sapiens; identical to SEQ ID NO: 345392
  chr11:58940867-58940922
  hyper

SEQ ID NO: 351200 - DNA, 190 bp, Homo sapiens; identical to SEQ ID NO: 347158
  chr11:59333673-59333863
  hyper

SEQ ID NO: 351201 - DNA, 230 bp, Homo sapiens
  chr11:61062458-61062688
  hyper
cggcagcaggagcgcgacacaggcggcccgaaggagcagtccggcccacatgaccggcggcggcgggtcccccgggctgggctcggctcctgcgccgcgcgcgggagagggggctgccggccctcgcccctcctcctggcgccgtggggagcgaaccagcgatccccgaaatggcacgcagagctgagcaggggggcttgggacgccgagaggaggggccgagggccgcg

SEQ ID NO: 351202 - DNA, 236 bp, Homo sapiens
  chr11:61275825-61276061
  hyper
cggccgcacgccgctggacgtgaatggctcgcagtgaccgcgcccctcagcccctccttgtgagcctctagtccagagtctttgatccaccgccagcgtttccttcgccttcttggacccgcggctctggggcgcacacaaccgcacaccaaacagcgtcgggcgtcgggtctcagtgccaggcttggccggggcggggaatctctcggcttgtgcttgctccgcggtgggctgga

SEQ ID NO: 351203 - DNA, 315 bp, Homo sapiens; identical to SEQ ID NO: 202562
  chr11:61276101-61276416
  hyper

SEQ ID NO: 351204 - DNA, 604 bp, Homo sapiens; identical to SEQ ID NO: 347160
  chr11:61347974-61348578
  hyper

SEQ ID NO: 351205 - DNA, 259 bp, Homo sapiens; identical to SEQ ID NO: 202565
  chr11:61595492-61595751
  hyper

SEQ ID NO: 351206 - DNA, 176 bp, Homo sapiens; identical to SEQ ID NO: 334274
  chr11:61659371-61659547
  hyper

SEQ ID NO: 351207 - DNA, 213 bp, Homo sapiens
  chr11:62369471-62369684
  hyper
cgggcttaactctgtcctcgctggagccctgcagctcctcctcgcgccccaaagactcgcgcgccttagcgcttcgccaggttatttgcaagcggctttgcctgtcatttgcataaatggtctacgctcccttaccctttccgcacgcctcttttccttcgtccccaccccacagagccccggaggcgcccggcagcgccccacaaaagcacc

SEQ ID NO: 351208 - DNA, 428 bp, Homo sapiens; identical to SEQ ID NO: 334279
  chr11:62389464-62389892
  hyper

SEQ ID NO: 351209 - DNA, 231 bp, Homo sapiens; identical to SEQ ID NO: 334280
  chr11:63705659-63705890
  hyper

SEQ ID NO: 351210 - DNA, 203 bp, Homo sapiens; identical to SEQ ID NO: 334283
  chr11:64015094-64015297
  hyper

SEQ ID NO: 351211 - DNA, 103 bp, Homo sapiens
  chr11:64039104-64039207
  hyper
cgtcactcatcctccggagctcgcggccatagcgctgtgctgcccagaggttggggggcgccgagcgcgagcggccccgaaaggggctgggctcctcccccat

SEQ ID NO: 351212 - DNA, 82 bp, Homo sapiens
  chr11:64064539-64064621
  hyper
cggaggggtcccaggtggcccctagacttcctgcatcgcccctctgcccaggctatggcaatgtggccctgcgcacagatgc

SEQ ID NO: 351213 - DNA, 369 bp, Homo sapiens
  chr11:64064662-64065031
  hyper
cgctgtttgggatcctactggcaggggtcggggaccggctgggctcctccctgcgccatggcatcggtcacattgaagccatcttcttggtgagctgctccatgccctgcctgcccttgtgctgggctccggctacccttccccatgtccctggcacatgagcgcgcccccaaagaccataagcctctcccacaggctcctgggggcgggagtggggagtatgggagtggggattgttggtgtctcctgggtcctgcctactgccccatcccgcagaagtggcacgtgccaccggagctagtaagagtgctgtcggcgatgcttttcctgctgatcggctgcctgctctttgtcctcacgcccacgttc

SEQ ID NO: 351214 - DNA, 86 bp, Homo sapiens
  chr11:64509676-64509762
  hyper
cgggtgcacgctcgaccccgcccacctcctgcttgcccaggactccgagagcaggaggcaaattagagaggaaaggtgtggtgggc

SEQ ID NO: 351215 - DNA, 502 bp, Homo sapiens
  chr11:64509801-64510303
  hyper
cccgagccgcccatcgtccggaggggaaccagctggggcggaaggagcctgggttccccggggtcaagaatccagaggtcatttcctgagcgcttggggggaaggggcaccccttcaccagataagccgccccccattagccggaaacagctcccaggccggagatagcgagttcctccggattccccgggagacagataatgcccctcaagtgtcagagtccgggacccggccctcccttcgccgccgctggggaaggctagagaagggaaacctcatctgtctgaagggcgtgcatctctctgccctgcgttgcggaggaggctttcgttaaagagactgcacgctgcggagcagggtgggtccgggtcagggctgtgccctggactgtgcctgggaggcagggacccgggctcagactcggggctaggctcaggctccgtgtgccctcccgagccactcaccgaaggcttcgatgcacccgcggagcagctcctccacc

SEQ ID NO: 351216 - DNA, 549 bp, Homo sapiens; identical to SEQ ID NO: 345393
  chr11:64512349-64512898
  hyper

SEQ ID NO: 351217 - DNA, 61 bp, Homo sapiens; identical to SEQ ID NO: 345394
  chr11:64513748-64513809
  hyper

SEQ ID NO: 351218 - DNA, 198 bp, Homo sapiens
  chr11:65185728-65185926
  hyper
agtgagaagccccctcctgagggtcctcccctgcctcgccttcctggtgggcggcctgctttccagcacatgtggtggaccagcccacattaggtcaaagtgttaaaaatagccggagggctcagtatgtttgggggtggggggggaatgggaggtgctgagggagggcccaggacagttgggaaggaggaagggccc

SEQ ID NO: 351219 - DNA, 35 bp, Homo sapiens; identical to SEQ ID NO: 347164
  chr11:65553778-65553813
  hyper

SEQ ID NO: 351220 - DNA, 227 bp, Homo sapiens; identical to SEQ ID NO: 202605
  chr11:65554410-65554637
  hyper

SEQ ID NO: 351221 - DNA, 1028 bp, Homo sapiens
  chr11:65554723-65555751
  hyper
ccttagcgactccttccctgttgtgcccccgttcccggcgttcagcccggccccgcaaaggtgggacggctcccggcttcagttacggaagcggcccgtgtccagcgacgagggttcgaaaatgccccgcgcgttcctggtgaagaagccgtgcgtctccacgtgcaagaggaactggagcgagctccccgacgaggagcgcggcgagatctacgtgccaggtgaggctccaaccgccctccggcctggggcacccgcggcggcgtcgaggctgcgggcgggcgggcgggcgcaggtccgcggagccaggcggcaggcgcggtgtgggcgccggggctgaatgcggccgcggcctgggctgggtgggcccgcggctctcgacccgggactcggggggcgggggcggggccggcggaagagcgctggtcggggcgggggctgcatggtggaaggggagccgctcccagggccagggggcgcggaaccgcctacccccaccccctgaaccgcggcacagaggaggcagcggggtgtgtcaccgctcaggcgaccctcggctccgacgtcgtaaatccagaaaaccgggactcgcatgaggcgggagaaggcactggagcgatgccactttggggggcggggagcgggctggagtttcggccgagatttgtgttaaaagctcagagcttcagccgctcgcacaggtccttcctcctcccccacaacactggtggccgggtcggagtgagggtcgggccggtggggggcgtgggcccccaaattttcgttgggctccggctgctagtcccgcgcagtgagccgagacggtgggacaggcgcccgctgcgccccgcttgcccttaaagcagaggtgggatcgggtctcacctctgctagaaacgcacttccttcaccttgcggagggcacaattgcatggaaagcagctgcagggagcccaccccacagcggagggccaggcccggggaagctggtgtacccagttatttttggcagacgcctagacagcgtc

SEQ ID NO: 351222 - DNA, 48 bp, Homo sapiens
  chr11:65779604-65779652
  hyper
gcaggagcgcatggtcggagaactccgggacctgtcgcccgacgaccc

SEQ ID NO: 351223 - DNA, 288 bp, Homo sapiens
  chr11:66045216-66045504
  hyper
cgccgccaactcccgcggggcacacggcagaggtgtggggtcgcgcagccgctgagagggcccccactgcacctggcccaacctccttcagcgccccccaaaaccccactgctcccattcagcccctgtcctggcgtcattgtgtgtcccagccaggtgcttctgccgtctccgacagtgacaagtgcctcgcacttcagcctttgccctgagcgcccgcccgagggggccgagtgcggctgtgccggtggctggagtgccgaggggtgcggggtgccgggggcggcc

SEQ ID NO: 351224 - DNA, 1101 bp, Homo sapiens; identical to SEQ ID NO: 347167
  chr11:66079395-66080496
  hyper

SEQ ID NO: 351225 - DNA, 329 bp, Homo sapiens; identical to SEQ ID NO: 202615
  chr11:66187467-66187796
  hyper

SEQ ID NO: 351226 - DNA, 269 bp, Homo sapiens; identical to SEQ ID NO: 202616
  chr11:66187826-66188095
  hyper

SEQ ID NO: 351227 - DNA, 162 bp, Homo sapiens
  chr11:66189149-66189311
  hyper
atggagctgcctgagcctaggggaacatagctactgtccgcggtgctgaaagggatctcctgtcgccttcggggcgctgcccatggtgctgacggctgcgccggccgtgtatggctctgtccatggttctgaacccacagtcggcttcggagctctgtccgc

SEQ ID NO: 351228 - DNA, 223 bp, Homo sapiens; identical to SEQ ID NO: 347170
  chr11:66725377-66725600
  hyper

SEQ ID NO: 351229 - DNA, 308 bp, Homo sapiens; identical to SEQ ID NO: 288243
  chr11:66725637-66725945
  hyper

SEQ ID NO: 351230 - DNA, 112 bp, Homo sapiens
  chr11:66886029-66886141
  hyper
gccctgggcaggcctgagccgggagcccaggtcccgcgggcccagcccggcggcttgaccccgggagaccctgctttgaggcgggtatcggttgccctggcccaggcctccc

SEQ ID NO: 351231 - DNA, 119 bp, Homo sapiens; identical to SEQ ID NO: 202630
  chr11:67232283-67232402
  hyper

SEQ ID NO: 351232 - DNA, 127 bp, Homo sapiens; identical to SEQ ID NO: 345397
  chr11:67232464-67232591
  hyper

SEQ ID NO: 351233 - DNA, 269 bp, Homo sapiens
  chr11:68095765-68096034
  hyper
cgatgataaatttggcatgtctttattattattattttttcaacacttaaagaaaataaaagctggtacaaaggtatgtttgtttctgaaatgtgtttccttccccagatgttcttttctgccagttctaaaatgcgttctgagctcggtcctccagtttcctccctgtgaggaagaacaatgagacctttgtaaccacacaggggaaacggccgcttccctctgcagtgggcatgggggaggggctgggacgtcccacctcctcccac

SEQ ID NO: 351234 - DNA, 156 bp, Homo sapiens
  chr11:68611259-68611415
  hyper
cgcgcggctgcaccccacgagcccgggcggctctcgcgcgtgaggctctccttgcacgtgggccttcgcggtttgcactacggaagctggactgtcattctcaccgcaaatgcccttccctcctttccctggaacctcagccaccgacaggtcccc

SEQ ID NO: 351235 - DNA, 844 bp, Homo sapiens; identical to SEQ ID NO: 345398
  chr11:73693765-73694609
  hyper

SEQ ID NO: 351236 - DNA, 324 bp, Homo sapiens; identical to SEQ ID NO: 202663
  chr11:74951799-74952123
  hyper

SEQ ID NO: 351237 - DNA, 75 bp, Homo sapiens; identical to SEQ ID NO: 288337
  chr11:76033216-76033291
  hyper

SEQ ID NO: 351238 - DNA, 509 bp, Homo sapiens; identical to SEQ ID NO: 345399
  chr11:76381512-76382021
  hyper

SEQ ID NO: 351239 - DNA, 48 bp, Homo sapiens
  chr11:86085693-86085741
  hyper
cgctgcctcgagcttctgaatcgcctgggcaacctggaagccgcccat

SEQ ID NO: 351240 - DNA, 239 bp, Homo sapiens
  chr11:86382607-86382846
  hyper
cgcctctctccacgcataaaagggagaggagggacaagaaagccaaaccaagtcacaacaagcccctgcaaggcaaaaacagaaaaaccgctggaagggcgcccgggaggatcctttctgggtccagggggcggggcgcaattttccggcagccacgggatcgcaacgcgggccgtcctgccctctggcccattaccttgttgagatgagggttcctggtgacatcgtatccgcgcttc

SEQ ID NO: 351241 - DNA, 62 bp, Homo sapiens; identical to SEQ ID NO: 202679
  chr11:86383105-86383167
  hyper

SEQ ID NO: 351242 - DNA, 675 bp, Homo sapiens; identical to SEQ ID NO: 288384
  chr11:92930674-92931349
  hyper

SEQ ID NO: 351243 - DNA, 47 bp, Homo sapiens; identical to SEQ ID NO: 347178
  chr11:92931379-92931426
  hyper

SEQ ID NO: 351244 - DNA, 772 bp, Homo sapiens; identical to SEQ ID NO: 334350
  chr11:94963753-94964525
  hyper

SEQ ID NO: 351245 - DNA, 886 bp, Homo sapiens; identical to SEQ ID NO: 334351
  chr11:96122370-96123256
  hyper

SEQ ID NO: 351246 - DNA, 161 bp, Homo sapiens; identical to SEQ ID NO: 202702
  chr11:100999159-100999320
  hyper

SEQ ID NO: 351247 - DNA, 241 bp, Homo sapiens; identical to SEQ ID NO: 202703
  chr11:100999360-100999601
  hyper

SEQ ID NO: 351248 - DNA, 803 bp, Homo sapiens
  chr11:101980831-101981634
  hyper
cgcccgcgttctccgcagacaccacagttcggacccggattggacccatcgtttgcggttcgcggggcagaatacggggcacgcttcgggcccctgcccggctgagcgcgggcgaagggcggaccgggccagggcgagcgggtcacgtgcggccgggagaggcgccgcgggccgggagtgtgcaggaatgtagcaacttgcagcgaaaagtttccctgcgctgccggccgggccgcggtgcgggcgggcgcgcagaggaaggaagagccgagaggaggcggggccgcggcggcgcgggcgggcgcttctcctaactttagttttggcgtttgaggcgagtttctgtctcagtcgggcgcagccgccgccagggaaaagaaagggaggaaggaaggaacaagaaaaggaaataaagagaaaggggaggcggggaaaggcaacgagctgtccggcctccgtcaagggagttggagggaaaaagttctcaggcgccgcaggtccgagtgcctcgcagcccctcccgaggcgcagccgccagaccagtggagccggggcgcagggcgggggcggaggcgccggggcgggggatgcggggccgcggcgcagccccccggccctgagagcgaggacagcgccgcccggcccgcagccgtcgccgcttctccacctcggcccgtggagccggggcgtccgggcgtagccctcgctcgcctgggtcagggggtgcgcgtcgggggaggcagaagccatggatcccgggcagcagccgccgcctcaaccggccccccagggccaagggcagc

SEQ ID NO: 351249 - DNA, 612 bp, Homo sapiens
  chr11:101981964-101982576
  hyper
gagccgcggccgccagctctggtcaggggaggggggttgcgggaactctagctggggtgggggtcccgaggcgaagtggaactggagtcgtccactccgccgcggtgaccagctccccactcctcccagagtccggggctgagatttgtttttcccttctgagtttctctctgcggttgcagccccggggggcgtgctttccctccttcttcctttctttcttcccggggttcccgagaggttggcgggagtggaggaggggtggggaggaaggaagggggtggggaaaagtcgggcctgggccgcggtgggcttgcacaatgcgcgcgcctccgcgcgctccgcaccttcgctcccgccgggccgggctgggaaagggggaggggggcctctggcatttgtgtgtgggtgtgttgccagcggcggccgagtttgtgaagttgagccctgggcccctttcctttgcggcctctcggtccacttcagtctcctgggggagtcaaataattgttctcttgttttccagtgttgattagaggtgggggtagaaccggtccatttagttttttgctctttctttccttcccccctcccgtttcccctccccctccc

SEQ ID NO: 351250 - DNA, 747 bp, Homo sapiens
  chr11:102962175-102962922
  hyper
cgatacgggagtaggggatcgagggtcggttgtggggtgggggtgggggtggggggaagcgcaatttacatatgcatctgttccccaccctgcagggcacgtagactcttaacgtgggcggctcttctagtctctccataaacgccagcgtgcacacactcgaacacgaggtcgggtcgggcgcggagactcgcggtgttcggcacctacagcctagctcgatcaaaggggcctcacctgtctccagccccagcccggcaggccgggcccgactccttttcctccagttgtccagcaaaggagggaggagggaagcttgaagggtggggggagatggtacctggagattttacactttttgaggcctccgtcttccgctactgctgctgccaccccaggggattttctcttcttcttcaccggcatcttccgccctccccggcagggtgggcaggggagccggggaagggggtccctgtccgctggaagcccctcagcgctggcacccagttcccagagacagcagcaagcggaggagcagagtcgccagcccgcaccggcgcggcccagcccggccgccgcccgctcccaggtatcctcgtcgtctttctctgaccgggacagggctggctcctcgccggtggacactgcggttcgttctcaccgggaggagataacgcggacagcgcggcagctccaccagtcacagcaagcaagaggctcagcctaacccggaggcgaatcgct

SEQ ID NO: 351251 - DNA, 99 bp, Homo sapiens
  chr11:102963062-102963161
  hyper
ctgtccagggtatcctgacctttctcatgaagcttctaccgcgctctgatgctggcagtcaccgccaaaaagtgaaactactaatactttgcagttgac

SEQ ID NO: 351252 - DNA, 226 bp, Homo sapiens; identical to SEQ ID NO: 288422
  chr11:106889091-106889317
  hyper

SEQ ID NO: 351253 - DNA, 168 bp, Homo sapiens
  chr11:107462735-107462903
  hyper
ggacagccgagtggggagtgacagctgacagctgacggggctgttaaaagcagagcagtggagtgtggtggtggggtgagctgttgtgggtgcttttttttgttttccaagtgtgggtacgggctgttctgactcagtgtttatgctcaacctctaagcggcgagttc

SEQ ID NO: 351254 - DNA, 823 bp, Homo sapiens
  chr11:110166935-110167758
  hyper
caggcacgttcgggccgcggctcagccacgactcgggcagggcctcgcggcccctaccagccccgggaggagcctggccggccgggccgttaccacagtggcgcctcggccagctgggcgcgagcggaggcgcgccaagccctggcggcggcgccacggccgggcagcacgggccccgcaacttcgcgccgccaccttagcgtctccggaggaaccgggagcggggagtgggggaagggagggcgccgcgccttacccggagagcgggcggcttctgcccgccggcgtgtggctggggcgctgcgcggcggcgcggctgcgacagggagggagaagcggtggtgcgagcgctggcccgcgggagacgagaggcgccgccgccaccgcagacagctccgcaatatggccgctcggcgcctccgcgggaaaaggcggggctgcccggcgcccccccgcctccccctgccggccggccgtcctcgcgccgcggactgagcgccaacgccgccgctgggggccgcccccgccccgcccctcccgcaggctcgcagccgcaggcctggctccgggcgtggccgggggtcgcggtctggggccggccaacgcgaggtgggtggctgcgggctcgggagcgcccagggaaatagggcgaatgcgccggagggtcgagcccttccagagagcgctgggctccagctaaacctgcggtcgagggaagcggagccgcccagcccaaagctcggagtgtgcccgccgcctccccaacgagtggaaacttgaaactcccgctggtgccagcaaactcactgagggcgttgccgtc

SEQ ID NO: 351255 - DNA, 121 bp, Homo sapiens
  chr11:115374870-115374991
  hyper
cgcttcggatgtaggaagtggggggaggttgtcatggaaacgtttcccccctctgtggccaaggctactggggtgccttcggagatttaggggccaaccggtcggtgcccacacctacctg

SEQ ID NO: 351256 - DNA, 398 bp, Homo sapiens; identical to SEQ ID NO: 202729
  chr11:115375434-115375832
  hyper

SEQ ID NO: 351257 - DNA, 301 bp, Homo sapiens; identical to SEQ ID NO: 347181
  chr11:115375894-115376195
  hyper

SEQ ID NO: 351258 - DNA, 87 bp, Homo sapiens
  chr11:119293218-119293305
  hyper
cggcgggcctcatccttaatccatttccgtattccaatcctctcctttcccaaatgagtcccccttccccctctctcatccttttcc

SEQ ID NO: 351259 - DNA, 62 bp, Homo sapiens; identical to SEQ ID NO: 202750
  chr11:119294072-119294134
  hyper

SEQ ID NO: 351260 - DNA, 283 bp, Homo sapiens; identical to SEQ ID NO: 334379
  chr11:119587853-119588136
  hyper

SEQ ID NO: 351261 - DNA, 223 bp, Homo sapiens
  chr11:120110626-120110849
  hyper
cgccactccgggcgcggtgaggaggtgctgccaggctgggttggagcaggcaggtgttccgcgggatcgagacccgccccggcagcacccccggccccctccccaggtccccagctccatgtatgcaaatcactgctttgcatgggcctggggccaggcgcggggctcctgccagggggcgtggccggcggcccccgccccgcgccgcgtgctcacctgggga

SEQ ID NO: 351262 - DNA, 155 bp, Homo sapiens
  chr11:120110967-120111122
  hyper
ggagaccctggcttcgcaggggccccggctggggcagaggcgaggggcctgggggggcgctggctttggccccgcctggggcaggatggtgaatctggagtccatgcacacaggtgaggggcggagggaatgagctctgacaggtgtcactgcgc

SEQ ID NO: 351263 - DNA, 159 bp, Homo sapiens
  chr11:120435049-120435208
  hyper
cgctcgcggggagggggctcgggaatccgggcccgggcaaccggcgccgcatgctaatcagggggcgcccgcccccgctttgcccgtggccctcctttcccgattccccgacgtttcgggaggagtggggtcggagcgcagggctgggaagggtcttag

SEQ ID NO: 351264 - DNA, 166 bp, Homo sapiens; identical to SEQ ID NO: 345400
  chr11:120894634-120894800
  hyper

SEQ ID NO: 351265 - DNA, 85 bp, Homo sapiens; identical to SEQ ID NO: 345401
  chr11:120895026-120895111
  hyper

SEQ ID NO: 351266 - DNA, 35 bp, Homo sapiens; identical to SEQ ID NO: 202770
  chr11:123173029-123173064
  hyper

SEQ ID NO: 351267 - DNA, 191 bp, Homo sapiens; identical to SEQ ID NO: 334392
  chr11:124616924-124617115
  hyper

SEQ ID NO: 351268 - DNA, 71 bp, Homo sapiens
  chr11:124631910-124631981
  hyper
agttctccctcagggtcgaactcaccccatcccgcatcccaagtcccctccaggtccgggtttcactcacc

SEQ ID NO: 351269 - DNA, 135 bp, Homo sapiens; identical to SEQ ID NO: 345403
  chr11:128391758-128391893
  hyper

SEQ ID NO: 351270 - DNA, 623 bp, Homo sapiens; identical to SEQ ID NO: 345404
  chr11:128392116-128392739
  hyper

SEQ ID NO: 351271 - DNA, 128 bp, Homo sapiens
  chr11:128562635-128562763
  hyper
cgtcggactcttaaataaaagtgagcaagtccaaagcgtggtccggagagcgtggacaaggtaacctgttttggatgtccgggagaagggagtccggccgaaagggcccagcccctcgaggctgctcc

SEQ ID NO: 351272 - DNA, 543 bp, Homo sapiens; identical to SEQ ID NO: 345405
  chr11:129148497-129149040
  hyper

SEQ ID NO: 351273 - DNA, 820 bp, Homo sapiens; identical to SEQ ID NO: 345406
  chr11:129149096-129149916
  hyper

SEQ ID NO: 351274 - DNA, 245 bp, Homo sapiens; identical to SEQ ID NO: 334409
  chr11:130183478-130183723
  hyper

SEQ ID NO: 351275 - DNA, 237 bp, Homo sapiens; identical to SEQ ID NO: 288599
  chr11:131781335-131781572
  hyper

SEQ ID NO: 351276 - DNA, 217 bp, Homo sapiens; identical to SEQ ID NO: 334418
  chr11:133920473-133920690
  hyper

SEQ ID NO: 351277 - DNA, 161 bp, Homo sapiens; identical to SEQ ID NO: 345407
  chr11:133939437-133939598
  hyper

SEQ ID NO: 351278 - DNA, 241 bp, Homo sapiens; identical to SEQ ID NO: 202804
  chr11:134201549-134201790
  hyper

SEQ ID NO: 351279 - DNA, 236 bp, Homo sapiens; identical to SEQ ID NO: 345409
  chr11:134202154-134202390
  hyper

SEQ ID NO: 351280 - DNA, 73 bp, Homo sapiens
  chr11:134281810-134281883
  hyper
ccccggggactgtcgggctccgggcccccgggggccacttcatagccgcggggtccgcgcgcccgcccgcccc

SEQ ID NO: 351281 - DNA, 133 bp, Homo sapiens
  chr12:708894-709027
  hyper
cggaggccctcccagccccacgactgcgcttggcctactgcctctcctcctcagcttggttggacctgcaccccagcacgcccggggggctcacattcctccccgagatgccgccactgattcaccatggtgc

SEQ ID NO: 351282 - DNA, 182 bp, Homo sapiens
  chr12:709062-709244
  hyper
ccgtgcactcaggatacctctgatgccaaggtttgagcagctctggcccagcccgcctccttctgcccagctgccagggccccgatactcagccctcccctgcctggtttctgagtctgaggaatgtgcccagaagcaaattggcgctgagattcacatttactcctttactccttccgaac

SEQ ID NO: 351283 - DNA, 235 bp, Homo sapiens
  chr12:1639655-1639890
  hyper
gcctccctccggatcggccgcaggctgcgcgcccccgaccgtccccgcccgctgagttcgggggtccccggcgcggagcagggagccctccgggcggcaggagggcgcgcagactccgagcgccggggctgcctggccgggctccggtggacacctcggaggctgccccagcatcggggggggggcccgagacgcctcggcgggaccccgggagccgagcacgcccgcccgcgcc

SEQ ID NO: 351284 - DNA, 344 bp, Homo sapiens; identical to SEQ ID NO: 288628
  chr12:1639977-1640321
  hyper

SEQ ID NO: 351285 - DNA, 273 bp, Homo sapiens
  chr12:1640476-1640749
  hyper
ccccatctgggttactttacccgccggacgcgggtgggagcctgcgtttctgcccggaccgcgcaggtagagcccgagcgccgctcggctttgtgcttctccggtcgctccggcgctccacgtccccgccgtgggagaggcgggacgagacctcctccttcactttcttggagcctcggtggacgcgtagcccgcgctccagtcggagccgaacccccgggtatttgctgcagaccgctgggagaggcagttcggtttgcggggagcctgccc

SEQ ID NO: 351286 - DNA, 64 bp, Homo sapiens
  chr12:1762097-1762161
  hyper
cggccttaggtcggagcaaatgatcagcctggaacccactccagactggtctgcagttctgcat

SEQ ID NO: 351287 - DNA, 145 bp, Homo sapiens; identical to SEQ ID NO: 347192
  chr12:1905625-1905770
  hyper

SEQ ID NO: 351288 - DNA, 204 bp, Homo sapiens; identical to SEQ ID NO: 202815
  chr12:1905826-1906030
  hyper

SEQ ID NO: 351289 - DNA, 114 bp, Homo sapiens; identical to SEQ ID NO: 202816
  chr12:1906322-1906436
  hyper

SEQ ID NO: 351290 - DNA, 99 bp, Homo sapiens; identical to SEQ ID NO: 347195
  chr12:1906476-1906575
  hyper

SEQ ID NO: 351291 - DNA, 254 bp, Homo sapiens; identical to SEQ ID NO: 334433
  chr12:2692239-2692493
  hyper

SEQ ID NO: 351292 - DNA, 238 bp, Homo sapiens; identical to SEQ ID NO: 202823
  chr12:2800603-2800841
  hyper

SEQ ID NO: 351293 - DNA, 245 bp, Homo sapiens; identical to SEQ ID NO: 347197
  chr12:2801019-2801264
  hyper

SEQ ID NO: 351294 - DNA, 142 bp, Homo sapiens; identical to SEQ ID NO: 334436
  chr12:3053936-3054078
  hyper

SEQ ID NO: 351295 - DNA, 773 bp, Homo sapiens
  chr12:3186287-3187060
  hyper
cggggcggggagggaggcttccggaaccccgagagagcacccgtgcctcgcgggccccgtgccccgtccccgggctccccttcctctaacgcaggggacccagcccggggcagtgccgggcactggcgctggcgccccgctcagccctgcgatccttctccgccccgcccctccccgctccgccccgcccctccccgctccgcccccgggccgccccgccccgcaggctcgccattcccgggcaggccccgccccctgtttccgctggcggcggcggcggcggcggtgccggagcgcgagcagagcggagacccccaggtcctgcgggcgcggtgagtgcggcccgggcggcgggcggcgaggcgggtctcgagagcgtgcggagtcgcgcggccttgagccggcgccgggcgggctgggcacccccaggccgagacccgagaagggggagcggccgggggcgcccacgggaggcagtgtgggcagggcggcggtgggacgagaggacgaggaacagagtaggcgccgtgcgggaagcgggccgggaaggggagggtgggtgcggggcccgggcaccgagcgaagtggggtcctccaggggatggctccgaggaagaccgtttcagaaagggagtaacccggggccggcaagggtttccgactgtgtgaccccgtgcaccgcttgggacagtccatacaaggaccccagagagggccagggggccttcgggcagggctgggatatggcctgcagccccccggcacccgcgacc

SEQ ID NO: 351296 - DNA, 198 bp, Homo sapiens; identical to SEQ ID NO: 347198
  chr12:3600534-3600732
  hyper

SEQ ID NO: 351297 - DNA, 396 bp, Homo sapiens; identical to SEQ ID NO: 288660
  chr12:3601625-3602021
  hyper

SEQ ID NO: 351298 - DNA, 41 bp, Homo sapiens
  chr12:3602961-3603002
  hyper
caaacaaacaaaaaaccacgtcgcgtgcggggcaccaaggc

SEQ ID NO: 351299 - DNA, 125 bp, Homo sapiens; identical to SEQ ID NO: 347200
  chr12:4273746-4273871
  hyper

SEQ ID NO: 351300 - DNA, 85 bp, Homo sapiens; identical to SEQ ID NO: 345410
  chr12:4377809-4377894
  hyper

SEQ ID NO: 351301 - DNA, 244 bp, Homo sapiens; identical to SEQ ID NO: 202837
  chr12:4378558-4378802
  hyper

SEQ ID NO: 351302 - DNA, 246 bp, Homo sapiens; identical to SEQ ID NO: 202838
  chr12:4379920-4380166
  hyper

SEQ ID NO: 351303 - DNA, 284 bp, Homo sapiens; identical to SEQ ID NO: 202839
  chr12:4380196-4380480
  hyper

SEQ ID NO: 351304 - DNA, 201 bp, Homo sapiens; identical to SEQ ID NO: 345412
  chr12:4381232-4381433
  hyper

SEQ ID NO: 351305 - DNA, 167 bp, Homo sapiens; identical to SEQ ID NO: 347205
  chr12:4382439-4382606
  hyper

SEQ ID NO: 351306 - DNA, 50 bp, Homo sapiens; identical to SEQ ID NO: 345413
  chr12:4382915-4382965
  hyper

SEQ ID NO: 351307 - DNA, 209 bp, Homo sapiens; identical to SEQ ID NO: 202843
  chr12:4382999-4383208
  hyper

SEQ ID NO: 351308 - DNA, 254 bp, Homo sapiens; identical to SEQ ID NO: 202844
  chr12:4384059-4384313
  hyper

SEQ ID NO: 351309 - DNA, 79 bp, Homo sapiens
  chr12:4384533-4384612
  hyper
tctaggatatttcctcgatttttaattattttttgaaaccatccccccctgctccgactccagctgccgaggctgcggc

SEQ ID NO: 351310 - DNA, 95 bp, Homo sapiens; identical to SEQ ID NO: 347209
  chr12:6445038-6445133
  hyper

SEQ ID NO: 351311 - DNA, 241 bp, Homo sapiens; identical to SEQ ID NO: 202859
  chr12:6472613-6472854
  hyper

SEQ ID NO: 351312 - DNA, 94 bp, Homo sapiens; identical to SEQ ID NO: 202860
  chr12:6472900-6472994
  hyper

SEQ ID NO: 351313 - DNA, 499 bp, Homo sapiens; identical to SEQ ID NO: 334454
  chr12:7282303-7282802
  hyper

SEQ ID NO: 351314 - DNA, 104 bp, Homo sapiens; identical to SEQ ID NO: 334456
  chr12:8113465-8113569
  hyper

SEQ ID NO: 351315 - DNA, 55 bp, Homo sapiens; identical to SEQ ID NO: 345416
  chr12:8123528-8123583
  hyper

SEQ ID NO: 351316 - DNA, 751 bp, Homo sapiens
  chr12:8849750-8850501
  hyper
cgtagcaactaacttgtccaaggtttacgccggtttctagggggcagagctggcgctatccaccccgcctgtatctccaaacccgcttcagccaggaaatttatcatgtggttttaaatttgcctctcaatatacagaggtactgtctttactccagtcccggataaagaccttctaggtatgaatgatctttgtctccatatctttgcctaccggagggaggaaccaccgtaagcggagactccgggcggcggccggcggaagggctgggcgggaggcgtcgggatgccggcaggaccctgcgcccgagggggtagggggctcgtgtcggggttccaggcgcagattgatggggcctaagcagggaatgtgagggcggggagggcgtacaacggaagggactaatctcgcggtttcgagttgggagcaaacctcgccccccaccccccccatccgtttccctttctcagtgaagacggtttgggggcgggtggggaggcgcgtcctcggagcgccctcgcgctcccttttcgctccccgcgcgcgatccatcgcctctcttcccccgaggccagcgatggctcgggtgcgggcgaggagctgggagggcggctctcgacgcaggtgtcagatccgctcggcagtgctcggcgcgctggcccggcccccagctcctccggccgccgccccccgcccgccgcgccgcggcgccaggagggcggggccggggcgcgcgccgctcctcagcaag

SEQ ID NO: 351317 - DNA, 310 bp, Homo sapiens; identical to SEQ ID NO: 202867
  chr12:8850744-8851054
  hyper

SEQ ID NO: 351318 - DNA, 113 bp, Homo sapiens; identical to SEQ ID NO: 347213
  chr12:8851275-8851388
  hyper

SEQ ID NO: 351319 - DNA, 107 bp, Homo sapiens; identical to SEQ ID NO: 345417
  chr12:14928211-14928318
  hyper

SEQ ID NO: 351320 - DNA, 93 bp, Homo sapiens
  chr12:15374050-15374143
  hyper
cgagcgcgctcagggctcggaatgggtctgcaggaagtcgtcccgaaagagctgcctggacacgtgcgtgacactcacctgttcacactctcc

SEQ ID NO: 351321 - DNA, 804 bp, Homo sapiens
  chr12:15941918-15942722
  hyper
cgcagcgccctaccgcacctggctgccaacaccagttgaaagcagtcaaagtgaagggaggcggacgcggctcctggcaccgctccgattccagcacacaaaggcggatttttaaaatcgagaaagtcaaagccgccggaccccgggaccggcgcctttcgccaaggggctcttacctcggatccgccctcggggccacggctttccccggagacgccgcgagcccagacgaggtgggaggggaccgggagaaagccccccaatctgattcgcgcccagccagtcgtccgcgagccgcggagccgccttctgcacccagctaaagagcagcgatctccgaggcgagcacagcgccggcctcgcgccgggcgagaccgcctcgctagctgctgcctgtgaagtctggagccgcccgcccgctcgcagccagtgccaaccgcgcgccgcgcatgcccagtgcccgcgcgaggaacgagcgagcgggcgggcgggcgagtgcgcgccccgcagccaggagcgaaatccgctatccgggtcttgccggcagccgagccgcagagttctggtcgactccagcgcttgaggcgaagtggccggtgaggccgggtgggcgggagagggaccggaggaaaggagacggggcgctgcgccaagttatcaaggccgcgatcaaagtcggaccaaggcagcgagtcgacagcaggtttccagaagtgccctaacaggactgactagcagccaggaggcgcaggaaggggcaaagagcgtgtggagagcttcgcccccggcgaggatggacgcccc

SEQ ID NO: 351322 - DNA, 81 bp, Homo sapiens; identical to SEQ ID NO: 347215
  chr12:16500402-16500483
  hyper

SEQ ID NO: 351323 - DNA, 393 bp, Homo sapiens; identical to SEQ ID NO: 347216
  chr12:16500621-16501014
  hyper

SEQ ID NO: 351324 - DNA, 73 bp, Homo sapiens; identical to SEQ ID NO: 345418
  chr12:19282260-19282333
  hyper

SEQ ID NO: 351325 - DNA, 840 bp, Homo sapiens; identical to SEQ ID NO: 202900
  chr12:19282363-19283203
  hyper

SEQ ID NO: 351326 - DNA, 249 bp, Homo sapiens; identical to SEQ ID NO: 202901
  chr12:19283425-19283674
  hyper

SEQ ID NO: 351327 - DNA, 226 bp, Homo sapiens
  chr12:19283783-19284009
  hyper
cgccagccgcacggaggttgcacagactgccaggaggcggtgggcgtgcgagggggtgtcccgtatgggggcacccgggccctgtttggagggagtccgtggggaagcggctctctcgggtggctttgggagcttgtttgaatgctaagtgtgagtggagctggaaaaggctcctcgtagtttctgtactggtctgggtttcttttatcattctttgtttacattc

SEQ ID NO: 351328 - DNA, 117 bp, Homo sapiens; identical to SEQ ID NO: 347220
  chr12:21681020-21681137
  hyper

SEQ ID NO: 351329 - DNA, 118 bp, Homo sapiens; identical to SEQ ID NO: 347221
  chr12:22488705-22488823
  hyper

SEQ ID NO: 351330 - DNA, 233 bp, Homo sapiens; identical to SEQ ID NO: 334476
  chr12:22778949-22779182
  hyper

SEQ ID NO: 351331 - DNA, 252 bp, Homo sapiens; identical to SEQ ID NO: 202912
  chr12:24715505-24715757
  hyper

SEQ ID NO: 351332 - DNA, 191 bp, Homo sapiens
  chr12:33049135-33049326
  hyper
cgcaccagtgaggggcgcggaccggcggagtagaaaaagaaaggggtgaaatcttgaagtgagttagttaacattgatagatatgtacaatatttaatatacataggtacctatatgacaaagctgagtaataggttatggaaaagagtgctttccacaagcaagtcggtcataccgaagacggcgagcaa

SEQ ID NO: 351333 - DNA, 234 bp, Homo sapiens; identical to SEQ ID NO: 202933
  chr12:33049390-33049624
  hyper

SEQ ID NO: 351334 - DNA, 316 bp, Homo sapiens
  chr12:33049652-33049968
  hyper
cgggggctgccatggggccggtgggggcgaccgagctgctcgcctgcctctggactcgcgggcgaagccgccacggagctgggggcgctggcgcgagccccgccccgctcgagtccggccccgcccctggcccgccccccgcgccggtgagaggcccgggccgggggggagctcggcctcgtgggccggacgcccggccttccctgaggagggggcgcggctccggccgggcacgcgcagtcgggcccgggggcgggggcgggggcgggccggacccgctgagcgcgcggacacctggagacttgtacccgcccgc

SEQ ID NO: 351335 - DNA, 76 bp, Homo sapiens
  chr12:40618264-40618340
  hyper
cggtgtcctcttttcccagcgccctgatttctattcttagatctggagataggcggctttcatttttcctgctccc

SEQ ID NO: 351336 - DNA, 35 bp, Homo sapiens
  chr12:40619048-40619083
  hyper
tggaggatctgctggtgttcacgtactccgagcgc

SEQ ID NO: 351337 - DNA, 292 bp, Homo sapiens; identical to SEQ ID NO: 288859
  chr12:45270086-45270378
  hyper

SEQ ID NO: 351338 - DNA, 334 bp, Homo sapiens; identical to SEQ ID NO: 345422
  chr12:46766939-46767273
  hyper

SEQ ID NO: 351339 - DNA, 181 bp, Homo sapiens
  chr12:48299205-48299386
  hyper
cgtcgtccgcgggacgctggggggcgcctgccgactggcaccggcggctagctccgcacgaatgggaaatcccgggctccgctcgccaacctgttactgctgcagaacgccaggaagctcagcctgatcccacagattagggtaaaatatcccggggggccgaagtggaaaccggagttgc

SEQ ID NO: 351340 - DNA, 32 bp, Homo sapiens; identical to SEQ ID NO: 288870
  chr12:48299387-48299419
  hyper

SEQ ID NO: 351341 - DNA, 42 bp, Homo sapiens
  chr12:48299465-48299507
  hyper
ggagctgagtctcagcttccctggtccctggtcccgagttcc

SEQ ID NO: 351342 - DNA, 176 bp, Homo sapiens
  chr12:48398744-48398920
  hyper
acagggaggagcccacagagattcagagtcctaaatcttggagacaggctagctgagccagatctgaagggttaccccgacctatcttttagcccttccctgcagtacctggtccccagactcccacctggacgttcacagcgactgccctccacccctcccccatccagctctgc

SEQ ID NO: 351343 - DNA, 239 bp, Homo sapiens; identical to SEQ ID NO: 334503
  chr12:48551355-48551594
  hyper

SEQ ID NO: 351344 - DNA, 493 bp, Homo sapiens; identical to SEQ ID NO: 202958
  chr12:48576976-48577469
  hyper

SEQ ID NO: 351345 - DNA, 60 bp, Homo sapiens; identical to SEQ ID NO: 202964
  chr12:49364178-49364238
  hyper

SEQ ID NO: 351346 - DNA, 60 bp, Homo sapiens; identical to SEQ ID NO: 202967
  chr12:49392537-49392597
  hyper

SEQ ID NO: 351347 - DNA, 295 bp, Homo sapiens
  chr12:49392636-49392931
  hyper
cacactttaacagcgtctgccccatctcacctcctgccctttctcacacccacttctgttcccccaaacaacgggatgagtcaggccccagccctcgggagcgggcagaggtggaaggcgtgggaaagagaagggggaccagcagtgctcgctggtgcctgcggggaggtccggaccccactccccgccccaccactctcttcccctcacccctgcttcactcacgtgcggttctggaacccgcgagcccagtggctggcctggaagtccatgggctgtcgagaaggggcgcggc

SEQ ID NO: 351348 - DNA, 155 bp, Homo sapiens
  chr12:49485561-49485716
  hyper
cgccccaggcaccggctcccctccctccgcctgattcatcttttgtttcattgccttccctggcaccgggcatcgcttccttccttccttcctcctcctcctttgggcccttagcattaaccccttcgtgctctgggtgccccccagagaggtgc

SEQ ID NO: 351349 - DNA, 272 bp, Homo sapiens; identical to SEQ ID NO: 288895
  chr12:49485914-49486186
  hyper

SEQ ID NO: 351350 - DNA, 144 bp, Homo sapiens; identical to SEQ ID NO: 202973
  chr12:49735822-49735966
  hyper

SEQ ID NO: 351351 - DNA, 709 bp, Homo sapiens; identical to SEQ ID NO: 288909
  chr12:49736083-49736792
  hyper

SEQ ID NO: 351352 - DNA, 336 bp, Homo sapiens; identical to SEQ ID NO: 345425
  chr12:49736828-49737164
  hyper

SEQ ID NO: 351353 - DNA, 1388 bp, Homo sapiens; identical to SEQ ID NO: 347229
  chr12:49738834-49740222
  hyper

SEQ ID NO: 351354 - DNA, 300 bp, Homo sapiens; identical to SEQ ID NO: 334520
  chr12:50339307-50339607
  hyper

SEQ ID NO: 351355 - DNA, 660 bp, Homo sapiens; identical to SEQ ID NO: 334522
  chr12:51785160-51785820
  hyper

SEQ ID NO: 351356 - DNA, 54 bp, Homo sapiens; identical to SEQ ID NO: 347231
  chr12:52401605-52401659
  hyper

SEQ ID NO: 351357 - DNA, 71 bp, Homo sapiens; identical to SEQ ID NO: 202986
  chr12:52627438-52627509
  hyper

SEQ ID NO: 351358 - DNA, 125 bp, Homo sapiens
  chr12:52672849-52672974
  hyper
cggacagtcgtcctccgttcagccgggctccgcctgcctgctccagccccgagcaggctccggcgccctggagacgagcgcccctggcggcggctacgcgctctgcggctctcccggctgtgtcc

SEQ ID NO: 351359 - DNA, 311 bp, Homo sapiens; identical to SEQ ID NO: 334529
  chr12:53267978-53268289
  hyper

SEQ ID NO: 351360 - DNA, 725 bp, Homo sapiens
  chr12:53613775-53614500
  hyper
cggcgaaacaggagccgccggtggctctgcgcagcaagccggccccgggcccggccgccccgtacagccgtcgcggacccggggcaaacgtttccatacagtcgtacatcgcgacccggcttgaagggaaactgggtgctggaaacaccaaggacccgcagccgattccccctcctcccccggcggcgccccgctccagcagggggggagggggagggctagcatagggcgctgggctgcatgcgggtaaggggtgggcggggaagaggggggatccccagcaggggaaagggactgggcggggcgcgaagctggggctgccgctttagcctccgtccagctcttatctgggtgcttcggcagctagcactggggagaccttttttaaaagcgaagcctggaggggtggggggtggggcttggagagcgaagggggccgggcaccgagatgagcaaagctgagagtggagcgcacacatacacatacgtacactcgctccgcggcgcgcgcgcttgcttagacacacatccgtgcatgcatttatcttatcaggcaccaagaatttgcaaatatgcaagagtgaacatacatgtgagcacgcatataaaatcataggtgcacacacgtttgtgcaaacacaccttgctcgggagaatgcttgcaggcatactctccacagctcataggctttgcatgcatttgcactgaggcgcgtgcccaggtc

SEQ ID NO: 351361 - DNA, 193 bp, Homo sapiens
  chr12:53719360-53719553
  hyper
cgggggcgggagtggcgtcagggtggggagggggctcgtaacccgagcccccccaggatcgccggccccctcccacccgtagcagcccctcttgcgacccgtgcggtggacagtccgacgcggggcgcagctgggagtcgggcccaggccggggggagcggcctgtgagccccctcagcccagcggggtaacc

SEQ ID NO: 351362 - DNA, 121 bp, Homo sapiens; identical to SEQ ID NO: 288978
  chr12:54088960-54089081
  hyper

SEQ ID NO: 351363 - DNA, 57 bp, Homo sapiens
  chr12:54144782-54144839
  hyper
cgcgcagactgtccctgtggaggagaaaggcacatgagcagccaaagggacggacac

SEQ ID NO: 351364 - DNA, 194 bp, Homo sapiens; identical to SEQ ID NO: 345427
  chr12:54150983-54151177
  hyper

SEQ ID NO: 351365 - DNA, 333 bp, Homo sapiens; identical to SEQ ID NO: 334550
  chr12:54371976-54372309
  hyper

SEQ ID NO: 351366 - DNA, 326 bp, Homo sapiens
  chr12:54377527-54377853
  hyper
cgctgggctccagtcctttccccgccaaactccagcccttcggaaagtctgaaccctaggctctgtccaaggaaaaatgtggggcgacaggaaagacaagttgttctccagattccgtttcctgaggaaggggtggagagtttagttcgctttggaagaaggcgatggagaaacggaaataactgtttgaaacatacggttccccttatttcttccttttatttaaaaacaaccacaaaaatagactggtctgtcttctttcaaacatgctcccagcccgtgcgctctgtaaaggacgcttctctgggtcgggttttgttgcgtct

SEQ ID NO: 351367 - DNA, 180 bp, Homo sapiens
  chr12:54378327-54378507
  hyper
tttagtcctgtttggtattccttaactttttttcccctttctctgctcatcagatccccccaaacccccccccccacaaacctcaccccactcccatccccaaggtaagaagtgggagtcgggtccggggatatggaaaggggagatgaagagtggggagaagtacctgattcgtgtctc

SEQ ID NO: 351368 - DNA, 103 bp, Homo sapiens
  chr12:54393256-54393359
  hyper
cgctccccttccctccttccctccctgtatctcagcttccccagtcccctcccaccctccctccctcaccgcccctgctgctcctgaaagaaatacatacata

SEQ ID NO: 351369 - DNA, 60 bp, Homo sapiens; identical to SEQ ID NO: 289023
  chr12:54402812-54402872
  hyper

SEQ ID NO: 351370 - DNA, 205 bp, Homo sapiens; identical to SEQ ID NO: 203018
  chr12:54422141-54422346
  hyper

SEQ ID NO: 351371 - DNA, 55 bp, Homo sapiens; identical to SEQ ID NO: 203019
  chr12:54422376-54422431
  hyper

SEQ ID NO: 351372 - DNA, 404 bp, Homo sapiens
  chr12:54422525-54422929
  hyper
ctaattccttttaccaggagaaagacatgctctcaaactgcagacaaaacaccttaggacataacacacagacctcaatcgctcaggattttagttctgagcagggcaggactgcgccccaggaccagaaagccagtatccagatttacccctggatgcagcgaatgaattcgcacagtggtgagttttacagctccgagatataaattaaataaactgaactggctttatgaccggcttccctagaagaacgggcggagagagttttttatggccccataaaaacaatcacgctcgtctcctcaccgagacagggccccctcttctgccccctcagctcgcctctcgctcgcttgcaggggcctggcccccttggcccctgacggattggagggccccaaggc

SEQ ID NO: 351373 - DNA, 278 bp, Homo sapiens; identical to SEQ ID NO: 347234
  chr12:54427358-54427636
  hyper

SEQ ID NO: 351374 - DNA, 91 bp, Homo sapiens; identical to SEQ ID NO: 203023
  chr12:54427974-54428065
  hyper

SEQ ID NO: 351375 - DNA, 56 bp, Homo sapiens; identical to SEQ ID NO: 203024
  chr12:54428083-54428139
  hyper

SEQ ID NO: 351376 - DNA, 43 bp, Homo sapiens; identical to SEQ ID NO: 289037
  chr12:54428224-54428267
  hyper

SEQ ID NO: 351377 - DNA, 129 bp, Homo sapiens
  chr12:54519801-54519930
  hyper
cgtggtccctcgtaccaatcgatcgaattctagtcgcaattctctgtctgtccctcggctctggggagaaagggggggctgtggcgtgggggctgaggaggggctaaggcgggaggggcgcctcatccc

SEQ ID NO: 351378 - DNA, 189 bp, Homo sapiens
  chr12:57619157-57619346
  hyper
gcttcctgggctggggcccccgctggggatggcagcagcagcggcggggcccgggcttgggggctccctcgggggcgcactggcggggccgcttgggggcgcgttgggagtgcctggggccaaagagtcacgcgctttcaattgccacgtggagtatgagaagacaaaccgcgcgcgcaagcaccgacc

SEQ ID NO: 351379 - DNA, 207 bp, Homo sapiens
  chr12:57635256-57635463
  hyper
cgcgcgcgcgcgcgctgagtagagtgggcagtggaggaggttggggtgccggttgtcttgtaccccagtaccggcccttcctcggatctgttttcaattcagtctgctccttggcccagacttatgacctttgcagcatgcggcagtatcatccatcacccaggcgccgtttagggggatggagggcgctgggagctcacatagggt

SEQ ID NO: 351380 - DNA, 212 bp, Homo sapiens; identical to SEQ ID NO: 289104
  chr12:58015267-58015479
  hyper

SEQ ID NO: 351381 - DNA, 189 bp, Homo sapiens
  chr12:58015548-58015737
  hyper
tgctcgtgccggtcaaggaattgaacgtgagattccgagaccggctacccacgccgatcccgggggaagtcgtcttggtgaggatggccgtgcgcgccggccccctgcccgcgcagaccctgcggtcctgtgggaactggccgctgccgccccctggtggagtgcagagaggccacggaacagagggcc

SEQ ID NO: 351382 - DNA, 300 bp, Homo sapiens; identical to SEQ ID NO: 347238
  chr12:58026315-58026615
  hyper

SEQ ID NO: 351383 - DNA, 184 bp, Homo sapiens; identical to SEQ ID NO: 345428
  chr12:63026256-63026440
  hyper

SEQ ID NO: 351384 - DNA, 73 bp, Homo sapiens
  chr12:63327114-63327187
  hyper
cgggaaccaagcctgccccggggtatccgggccaccagaacagggtcagcatcaaggcgcccaggcattggaa

SEQ ID NO: 351385 - DNA, 1078 bp, Homo sapiens
  chr12:63327326-63328404
  hyper
tccctggttcattaataaccttgaattctattctaaatgtctcctagttttcccgtttcgtacagctgaggtagtagatagaagggaaaacgttacttatcttaccattcataagatggttattaatagtcagtggaaaagtggccatggagctgggggaagggcaataaaatcctccacctctcctttcccgattccactctgggtcgtcaacctaactcagtcggttcctgaaatagctgatcagtcaaacgcaagcttaatcaccaaagcggattaccaaaatgttatattagacagttggaataagtttccccctccccaagggctgagggaaatagtactggcatttaccgaaagcgcagcattttactacctgctaaaggagaagcggaggaactcgcgggctgaaagtgagagaaactgagaccttcggaaatgtacaaccacgcactcggacacggccacctcccggaatcggacacaagctcccaggcgcagtgacatctcctccaagcctccacccccataaactcttcatcacgcgggggcgtcaactatattttgggagggtgggggtacagatagcagattttccttatgtgtttcaaacttcagagcttttctgcccgttttttttccccaagtgacagagaccccggattcacagacctgtctcaccttagctttcccacgctccagcgctgccacccacccctccaccacccataccggggctggagacgccgcgtccttgggctgggggaagagggagtggggagaagagggaaatggccagtgtaagtaaagagctccccgccgaggcctggacgccggcagctagtgagagccctgaggccgagaagcagggagagaagagggctggaaccgtgcggggaagggccgcgaggagagcaggggcgccgccggtgtcgctgcactcactctgcgtagccagtggcccagggcagccgccgagtctccttgaggatgaggatggggcgggcgatgtggtcggcgctgcactccacctcgtcctgagacagccccaggaactctggccgcccgtaggggaaac

SEQ ID NO: 351386 - DNA, 203 bp, Homo sapiens; identical to SEQ ID NO: 203080
  chr12:66122570-66122773
  hyper

SEQ ID NO: 351387 - DNA, 41 bp, Homo sapiens
  chr12:66136243-66136284
  hyper
gcggggggaggccgggccagggcgcgtctggggccggctcc

SEQ ID NO: 351388 - DNA, 499 bp, Homo sapiens; identical to SEQ ID NO: 334595
  chr12:68041644-68042143
  hyper

SEQ ID NO: 351389 - DNA, 126 bp, Homo sapiens; identical to SEQ ID NO: 345429
  chr12:69326527-69326653
  hyper

SEQ ID NO: 351390 - DNA, 478 bp, Homo sapiens
  chr12:70760478-70760956
  hyper
cggggggagcacgccagccgccgagagtggggggcgatggcgaagctccgggtggcttacgagtacacggaagccgaggacaagagcatccggctcggcttgtttctcatcatctccggcgtcgtgtcgctcttcatcttcggcttctgctggctgagtcccgcgctgcaggatctgcaagccacggaggccaattgcacggtgctgtcggtgcagcagatcggcgaggtgttcgagtgcaccttcacctgtggcgccgactgcaggggcacctcgcagtacccctgcgtccaggtctacgtgaacaactctgagtccaactctagggcgctgctgcacagcgacgagcaccagctcctgaccaaccccaaggtaagaacgccccgcgcacccaggggctccccgcgagggaggtttggaggcagcgtcggtgttagactccgcgcggggagggttcggcgtgtgctcgcattgctag

SEQ ID NO: 351391 - DNA, 82 bp, Homo sapiens
  chr12:70761129-70761211
  hyper
cctgcgcctaccggactgggtttggagaagtgcaaggagccaagaaagttaacttttcctccatttaaagccagtggttagc

SEQ ID NO: 351392 - DNA, 385 bp, Homo sapiens; identical to SEQ ID NO: 203112
  chr12:81330352-81330737
  hyper

SEQ ID NO: 351393 - DNA, 225 bp, Homo sapiens
  chr12:81331319-81331544
  hyper
cctgcctgagcgcgtcccatgtcccgttgggaattggcaggcggggaagggaggaggggagaggggacgcggtggcctggcgagcgagccgctcccttacctctgtccagggtgagcggctggaccactgtcaatgtcgccatgtctgccgtgggagccgaagtgacgctcggcttcagcatcagcaaccgctcgtagtgagaaaaaaaggaggagattgggggc

SEQ ID NO: 351394 - DNA, 393 bp, Homo sapiens; identical to SEQ ID NO: 334614
  chr12:90101352-90101745
  hyper

SEQ ID NO: 351395 - DNA, 264 bp, Homo sapiens; identical to SEQ ID NO: 347242
  chr12:93966037-93966301
  hyper

SEQ ID NO: 351396 - DNA, 66 bp, Homo sapiens
  chr12:93967274-93967340
  hyper
cgagggcggctgcccgggcgtcgagagtaggctgcgaagcccccgccgagcgcggcttccatggtc

SEQ ID NO: 351397 - DNA, 104 bp, Homo sapiens
  chr12:94541793-94541897
  hyper
cgacccggggaaacccacaccctgtcacaggggcgccttggtccccggagtctccggctcggccatgtctcccgcgcgcctccccggggcctccctctcgccgc

SEQ ID NO: 351398 - DNA, 1131 bp, Homo sapiens; identical to SEQ ID NO: 289236
  chr12:94541957-94543088
  hyper

SEQ ID NO: 351399 - DNA, 86 bp, Homo sapiens; identical to SEQ ID NO: 345430
  chr12:94544052-94544138
  hyper

SEQ ID NO: 351400 - DNA, 646 bp, Homo sapiens; identical to SEQ ID NO: 203143
  chr12:99287504-99288150
  hyper

SEQ ID NO: 351401 - DNA, 267 bp, Homo sapiens; identical to SEQ ID NO: 347245
  chr12:103351149-103351416
  hyper

SEQ ID NO: 351402 - DNA, 686 bp, Homo sapiens; identical to SEQ ID NO: 334637
  chr12:104682348-104683034
  hyper

SEQ ID NO: 351403 - DNA, 105 bp, Homo sapiens; identical to SEQ ID NO: 347246
  chr12:104850139-104850244
  hyper

SEQ ID NO: 351404 - DNA, 348 bp, Homo sapiens; identical to SEQ ID NO: 203159
  chr12:104851545-104851893
  hyper

SEQ ID NO: 351405 - DNA, 79 bp, Homo sapiens
  chr12:106975167-106975246
  hyper
cgggctctgtccagccggtaccgcgcgccgccttcttcctcccgcaccgtgaccttaactcggcacgtgctggcccctc

SEQ ID NO: 351406 - DNA, 71 bp, Homo sapiens
  chr12:107486379-107486450
  hyper
cgagtgtttcaggtcgtcagtactctttggccagagaagtattaagtcaattctatttaatacttagggca

SEQ ID NO: 351407 - DNA, 522 bp, Homo sapiens; identical to SEQ ID NO: 203167
  chr12:107486672-107487194
  hyper

SEQ ID NO: 351408 - DNA, 229 bp, Homo sapiens
  chr12:107711721-107711950
  hyper
cggctgaaagagggccgcactaattggtttgcgtacccgaagtgggaatagagagggaggaaaaccatgtttcaggtgttacggggggaaaaaagtgaaatgcgaaccgcaggggagagagcgaccgtcaggcagacaccttgtgaaccgcggtggagagcacacctaggtggggaggtcaccggcccaacccaccaccctccgggagaatgcgggcagggacagcagc

SEQ ID NO: 351409 - DNA, 220 bp, Homo sapiens
  chr12:107712337-107712557
  hyper
tctcagtcccacgaacaccgtggccggcgcccggtggctactgcgcccagcggggctcagggaagagcggtctagacactttttattttggaagaaaggggcaagccccggcgggagcttccttcccggcctggctcgctccccattgcgcccagctccggcccggactctggaagatgactccagggtctgctctgtatattccagcggcggcagttcc

SEQ ID NO: 351410 - DNA, 96 bp, Homo sapiens
  chr12:111284508-111284604
  hyper
cgattgcatggcgttggccgagggaggggctaagactgttgattgactcaagaagtcacttagcgtcatgagggtccgggtagtctggtaaggggt

SEQ ID NO: 351411 - DNA, 320 bp, Homo sapiens
  chr12:111844290-111844610
  hyper
cgtgttagggagagcgttggggtaactgaggccgtgggatgggggagagggcatcgctgacgcccccagcccaccctacggtagcctcgccggttgggggcggccctcccctcaacttgtgcctggggaggagcggtcaggggtcacccattgctaccctgaaagtgaaagtagtcaaactgaggctgtgagcacagatgagcccttgggtgtgggggcagcgggggaggatgcgccggcccctccccactccccattccgggccatgtggctaagagggtagcgccctgattcaggaagcccctctccccagttcctgc

SEQ ID NO: 351412 - DNA, 99 bp, Homo sapiens
  chr12:111844690-111844789
  hyper
tttctggtattgatcctctcacacctcttgcctggggttccctgggaatcccccgaccaaaaaacgtctggagtgggtgttggtcttctagatccgcac

SEQ ID NO: 351413 - DNA, 507 bp, Homo sapiens; identical to SEQ ID NO: 289355
  chr12:112204412-112204919
  hyper

SEQ ID NO: 351414 - DNA, 186 bp, Homo sapiens; identical to SEQ ID NO: 345433
  chr12:112204992-112205178
  hyper

SEQ ID NO: 351415 - DNA, 83 bp, Homo sapiens; identical to SEQ ID NO: 345434
  chr12:113495127-113495210
  hyper

SEQ ID NO: 351416 - DNA, 615 bp, Homo sapiens; identical to SEQ ID NO: 334652
  chr12:113796265-113796880
  hyper

SEQ ID NO: 351417 - DNA, 804 bp, Homo sapiens
  chr12:115120701-115121505
  hyper
cgtcctccacctcttcttcgggctccatggtcttcaaaggcctcagatgcgcctggggccccagggaggagaacgggatgccggtctcggccgcccccaccaattgatccatgatcggcttggccagggcgcccggcagcgagagcgccgccgcgccgttgggaggcagcgtcagcgcggggaagaacggcggctggtgacccagcaccgcgctcatggcgaagtccggcgcccggtgaggtaggaacggatggtaggccatgcttgtcccaggaatgaccggatctctcatggagaggctcatccactccaggcggggcgctgggctccagccggggacaagtccgcagctgctgtgttttgttgtttttttgttgttgtttaacagcagcacataattcaaaaggggggaaaaagcaaaacaaaaaagaaagaaaaaagaaaaggaggcagaaatcacaactaatgcacttcaaagggaggaggggaagtgtcttttggagaatgggaggccgcttttaaagagggcaaggcgaaaaatcagcaaacatagtcgcgcgggtgaccgtccttgtgccttgcgtttttaaaaagccgctcctgaacgtcggtttcagaagcgagaggagcgagcagggtctcgactcgcgcccgagccctgccgctgagctcgaaatagacactccagccctgcgtcccaggaatctctctccagcccctaggtcttttgttgcaaatgtgaaaggttctcctagaagactttttacctttctttttcttcttcccccgccccctatctgtctt

SEQ ID NO: 351418 - DNA, 311 bp, Homo sapiens
  chr12:115121574-115121885
  hyper
cggaaaaagtctctctcctttaaaaaaaaaaaaatctgatttaaacccccttctaccagcgctatcaaaacttgaattgcaaactggcttccgttcgccgccctcctcctccttcctctgctccgagcctccggagggtgtctcggtttcaatccaaatcttgctgggctcttctcccgtgcctctctctcttccttgtcctaaaacgtgagcgaattcgcttcctaaatctgtgtccaggcgcgcagggcagggaggatttagagggggaaaaaatggaacagagggaaagagagggaggggagagagag

SEQ ID NO: 351419 - DNA, 221 bp, Homo sapiens; identical to SEQ ID NO: 203215
  chr12:115122015-115122236
  hyper

SEQ ID NO: 351420 - DNA, 43 bp, Homo sapiens
  chr12:115122524-115122567
  hyper
ctctccttcttctccccgccccgggcgagccgggcgggtggcc

SEQ ID NO: 351421 - DNA, 58 bp, Homo sapiens; identical to SEQ ID NO: 345435
  chr12:116946548-116946606
  hyper

SEQ ID NO: 351422 - DNA, 31 bp, Homo sapiens; identical to SEQ ID NO: 289422
  chr12:117317225-117317256
  hyper

SEQ ID NO: 351423 - DNA, 482 bp, Homo sapiens
  chr12:117317288-117317770
  hyper
gttcttcctgtccctgggattgggcagcctcagcctggcccctttcagtcgcgggagcccctggcctctccaacaggagagagagaaggtagggagaagtggatgggacccccggcgcccgggagccgggcagagagcgccccgaagcgcgcatttctcttcgccagcgcccgggctgcgcgggcccacgcgacatctgtcgcctgcggtcccggctcacaccccgcgcacccccgcagctccctgggcgctgccaccccccacgctccggctgccgcctttccccgcgggcgcagacgctcgggcctcgccttcaggcgccgctccaacttcccagggtgtctgcggcgcgcggcggggctcgggggcggggacctaagggcggctggctatgtcaccttcgagcttcaccttccggccctagacccatctatggtgggctcagcctgattctctctccctcattctctgcagcgctcctc

SEQ ID NO: 351424 - DNA, 1016 bp, Homo sapiens; identical to SEQ ID NO: 347252
  chr12:117536372-117537388
  hyper

SEQ ID NO: 351425 - DNA, 344 bp, Homo sapiens
  chr12:120031912-120032256
  hyper
cgcgctctctgcggctcccttcctcacggcccggcccgcgctaggtgttctttgtcctcgcacctcctcctcacctttctcgggctctcagagctctccccgcaatcatcagcacctcctctgcactcctcgtggtactcagagccctgatcaagcttcccccaggctagctttcctcttctttccagctcccagggtgcgtttcctctccaacccggggaagttcttccgtggactttgctgactcctctgaccttcctaggcacttgcccggggcttctcaaccctcttttctagagccccagtgcgcgccaccctagcgagcgcagtaagctcataccccg

SEQ ID NO: 351426 - DNA, 62 bp, Homo sapiens
  chr12:122237462-122237524
  hyper
cgccgaagaacacacaactgggaaatacttgcaagtggatcctctcgtatgctgctatattc

SEQ ID NO: 351427 - DNA, 64 bp, Homo sapiens
  chr12:122688584-122688648
  hyper
cgggcgcggtagaccccgccagcctgggccgcccgcgcccgacgcgcagcgctgctgccaaccc

SEQ ID NO: 351428 - DNA, 551 bp, Homo sapiens; identical to SEQ ID NO: 334686
  chr12:123258823-123259374
  hyper

SEQ ID NO: 351429 - DNA, 473 bp, Homo sapiens; identical to SEQ ID NO: 334688
  chr12:123380333-123380806
  hyper

SEQ ID NO: 351430 - DNA, 345 bp, Homo sapiens
  chr12:123874193-123874538
  hyper
cggccgggccgcttcctttgctgccgcctggctgggagtggcgcccacacggctccgccatgagcctggcggtgtttgacctcggaaaagtttgactgcgccttcgtggcgtctccgcagcccaagaccctacttccccggaggtggccgcggtcccaggctgtgcggggcctgcgcgggcccctcggagaggtcacgggtctcaccgcctcggtgttgaatggtccccgaggcggcgagggcccggcgttgcttctggggacgccctcctccgtctgtacttactcagaggaggggccccacgcccagaggcgcccgcagtgacctgaaccgccccaccgcccc

SEQ ID NO: 351431 - DNA, 173 bp, Homo sapiens; identical to SEQ ID NO: 334693
  chr12:125093646-125093819
  hyper

SEQ ID NO: 351432 - DNA, 133 bp, Homo sapiens; identical to SEQ ID NO: 334694
  chr12:125477548-125477681
  hyper

SEQ ID NO: 351433 - DNA, 435 bp, Homo sapiens; identical to SEQ ID NO: 334695
  chr12:125815555-125815990
  hyper

SEQ ID NO: 351434 - DNA, 131 bp, Homo sapiens
  chr12:128850403-128850534
  hyper
cgttgattgtgtgccgaggagccctccccgggaaggctgtgatttatacgcgcaggcttgtcacggggtgaaaggaagggccactttttcattttgatccaatgttaggtttgaaagccacccactgctgt

SEQ ID NO: 351435 - DNA, 263 bp, Homo sapiens
  chr12:130645806-130646069
  hyper
cccgtcacagacccgccccaatccgaggggggatgagctcagaggacctgcccaggacgctccttctccactttccaggaaaaccgagcggcgtgcgcgcctccgtgtcctcgcgggagctgggggtccccgggcaggcgctgacgcgctcctcccacgacccactccatcccaccctactccgggtcctcctgcggggctgcagccaaggagggcgctggccgggcacatcactcgccaaatcacataaataccccacgagc

SEQ ID NO: 351436 - DNA, 54 bp, Homo sapiens
  chr12:131400919-131400973
  hyper
ctcacgctccacgctgtggccacactcttacgcgcctttgttcaaatggtccgc

SEQ ID NO: 351437 - DNA, 107 bp, Homo sapiens
  chr12:132312451-132312558
  hyper
cgcagggaccgcagagcctccgccgaggaccccagcccccccaacacccgccctcgccctccagtcccccgcgccccccaagccccaccctccctctcccgcggtcc

SEQ ID NO: 351438 - DNA, 246 bp, Homo sapiens
  chr12:132313659-132313905
  hyper
ccgaaagccttgagcccccgagtttgctcggttgagggtgttgggggcacagggatgctggcccccagctccccactggacaaggacctggccctcagcctccttcccctccaccccaggtcggccaggctggccctgccttgccctggtacagtgctgagccgggggcgcggggagagccttcctcactccacacccagtagctgtccccagctcagcttagaaaccctgcctgggggcagcgac

SEQ ID NO: 351439 - DNA, 479 bp, Homo sapiens; identical to SEQ ID NO: 334707
  chr12:133286733-133287212
  hyper

SEQ ID NO: 351440 - DNA, 102 bp, Homo sapiens
  chr12:133464006-133464108
  hyper
cggcccggccgcccgcgcccacgcagccccgcagcccggcctggacgccggcgggcgccccctcccacggccgcaaccaggtcccccttcgccgcccgccgc

SEQ ID NO: 351441 - DNA, 237 bp, Homo sapiens; identical to SEQ ID NO: 203265
  chr12:133464166-133464403
  hyper

SEQ ID NO: 351442 - DNA, 218 bp, Homo sapiens; identical to SEQ ID NO: 203266
  chr12:133464555-133464773
  hyper

SEQ ID NO: 351443 - DNA, 261 bp, Homo sapiens
  chr13:20702234-20702495
  hyper
cggggtggccaggccttgtttagagtagctccagcgtttgaatcgcgcaggcacaagaaggccgtctcctcaccgcgggccagcggggccggccagggcccgggcggagggggagcccgggttccgcggtcgggttgtggggccggcgctgacctcaccgcatgggcccctgcggccgccgtggcttctcacgcggcctgactttggactcgagtgcaggctcttagctgaatctctgtgtagacagggtgggtgggactc

SEQ ID NO: 351444 - DNA, 253 bp, Homo sapiens; identical to SEQ ID NO: 289542
  chr13:20702531-20702784
  hyper

SEQ ID NO: 351445 - DNA, 208 bp, Homo sapiens
  chr13:20702913-20703121
  hyper
ccaggtggcgccgattccggacgcccagaactctgtgggaatgcagctgtactgtgcggcgtgtaaaccaccgcatctgtgggattttgttaaagcagccacgggaccactccaccccctccagctgtggtcctttacccggcggcggccacctggcagcagcccggttccccatcctgcggggttcctcccgcccgcagaccggctc

SEQ ID NO: 351446 - DNA, 167 bp, Homo sapiens; identical to SEQ ID NO: 345438
  chr13:20735265-20735432
  hyper

SEQ ID NO: 351447 - DNA, 674 bp, Homo sapiens
  chr13:20767087-20767761
  hyper
cgccgtggcgccttttaaccgcaccccacaccccgcctcttccctcggagactgggaaagttacggagggggcggcgccgcgggcggagcgcgcccggcctctgggtcctcagagcttcccgggtccgcgaacccccgaccgcccccgaaagccccgaaccccccaagtccccttcgaggtcccgatctcctagttcctttgagcccccatgagttccccaagtgcccccagcgccctgagtctcccccggttaccccgagcgccgcctcccccagccccttggcggcccgggtgaagcgggggcggctgagagtcgggaccccccaggaagcggcgccccagaccccggctccggcgctgtgccgtgggcggggttcagggatggctgtggtcgttgtcctctgtactccgcatagtgcgagaggacttggcatttatgagcgcttctttaattttttattgttagagaaacaggcattcctccaaggactgaagatctgttcgagtcgcggaggctgcgcgggcccgcgaggctctcgcagggggacctaggctgggtggcggggcagtgccctctggaatgggggttaacggtggccgaggagggggcgccgctggtgccggcgaagtccccgcttctttctcccctcaaaatctcaccaatccgaacgaa

SEQ ID NO: 351448 - DNA, 81 bp, Homo sapiens
  chr13:20767827-20767908
  hyper
cggtgggagagacaagcctcgtttttgccatggccggcaggggggtcccgccatctgcggagggtgccccccgcggccccc

SEQ ID NO: 351449 - DNA, 142 bp, Homo sapiens
  chr13:22243864-22244006
  hyper
gttgcacgccccgcagtgtggagctgcgctcaagtctcggcaactttcaccatcttgacccgagagtcgggccgtttctaagacaatgtgaacaaagaggagcagggggagggaaggggggccccgcgggagggctgtgggc

SEQ ID NO: 351450 - DNA, 81 bp, Homo sapiens; identical to SEQ ID NO: 203288
  chr13:25746000-25746081
  hyper

SEQ ID NO: 351451 - DNA, 203 bp, Homo sapiens
  chr13:26624995-26625198
  hyper
cgtggcagtactcgccgctggccctcgcccccgccgccagcagcgcagccagcagcagctgcaggagcgaagcggcgttccaggatgaggagacggacgagcggcgagcgccccacatggcaccaccctgggcgcggacagcgcgtctccagagagcgcaggacggtctccgagaagtcgtggccccggcgacccccgggcct

SEQ ID NO: 351452 - DNA, 70 bp, Homo sapiens; identical to SEQ ID NO: 345439
  chr13:27131483-27131553
  hyper

SEQ ID NO: 351453 - DNA, 127 bp, Homo sapiens
  chr13:28491488-28491615
  hyper
cgggaaggtgctcgcctaatggctcggtatcgctgccgggcctgttgtgggcgaggcggcttggagggggcgcaggcgtcagcggggattcagagcggaaacgcatttcgcctgtaatggactcggc

SEQ ID NO: 351454 - DNA, 177 bp, Homo sapiens; identical to SEQ ID NO: 203300
  chr13:28491616-28491793
  hyper

SEQ ID NO: 351455 - DNA, 37 bp, Homo sapiens
  chr13:28527202-28527239
  hyper
cgcggcttctgtgtggcagctactgagtgcacgctcg

SEQ ID NO: 351456 - DNA, 461 bp, Homo sapiens; identical to SEQ ID NO: 203304
  chr13:28527384-28527845
  hyper

SEQ ID NO: 351457 - DNA, 37 bp, Homo sapiens; identical to SEQ ID NO: 345440
  chr13:29069851-29069888
  hyper

SEQ ID NO: 351458 - DNA, 200 bp, Homo sapiens; identical to SEQ ID NO: 345441
  chr13:29292491-29292691
  hyper

SEQ ID NO: 351459 - DNA, 242 bp, Homo sapiens; identical to SEQ ID NO: 345442
  chr13:29293342-29293584
  hyper

SEQ ID NO: 351460 - DNA, 97 bp, Homo sapiens; identical to SEQ ID NO: 347263
  chr13:29393559-29393656
  hyper

SEQ ID NO: 351461 - DNA, 177 bp, Homo sapiens
  chr13:33000891-33001068
  hyper
cgtgccagacaatgtgcttggcagggtaagacatggctcctaccttcaagaaacttacagaaggataagaaaaaccatgtgcaaaaaagtaagcacagtcacgtaggtataaacaggaagccaaggagcccagaagaggggcatatactggcggggtgggatagctgcccggtctta

SEQ ID NO: 351462 - DNA, 204 bp, Homo sapiens
  chr13:33001228-33001432
  hyper
aggtggccacaggcacaagcccgcgtaattcccagaggttgggtaccggagggccgcttacgcaattcgcaagtgaacgaatttgggcgcccatggcgaggctctgtcagtgacggtcggtggtggcgccgccagccagccccccgcccccgtgcacctgtgcgccttcgcagctgccaaagcaaacgcaggctccccgacttc

SEQ ID NO: 351463 - DNA, 371 bp, Homo sapiens
  chr13:35516633-35517004
  hyper
cgggagagggagagagcagaggcagcggcggcggcagcggcagcggcagcggcacacctgctgggcgggcacagccgcttgcccggcagcggttagcggtaccgccaccgccgagaataagcctgcggatcccccgccgcctccgcgggggagagcgccggagcgggccgggctgaggcgcaggcggggagcgggcccggcgccgcggcgctggtggatgctggggctccgaggcgacggccggggggcgggggccgaggcaggtataacggtaccggcggcggcagcgccgctgctcttcccttctcctcaggaggggggccaatggctagcgagaagccgggcccgggcccggggctcgagcctcagcc

SEQ ID NO: 351464 - DNA, 80 bp, Homo sapiens; identical to SEQ ID NO: 203325
  chr13:35517052-35517132
  hyper

SEQ ID NO: 351465 - DNA, 200 bp, Homo sapiens; identical to SEQ ID NO: 203326
  chr13:35517173-35517373
  hyper

SEQ ID NO: 351466 - DNA, 73 bp, Homo sapiens; identical to SEQ ID NO: 334754
  chr13:39610527-39610600
  hyper

SEQ ID NO: 351467 - DNA, 334 bp, Homo sapiens
  chr13:39610814-39611148
  hyper
cggccaattcctaagaacgtgactttaaacttaatgccacacttaccatcaggacacgaattttgcatggccaacgcaacaaatatactctaccttatgcttagatttgaaaaccccatcataataactaccataaaagaaactttctgcgtattacctctcgttttcagtcactcttgtgttactgaaagatgaggcaataaactcaaaaatattaaaccccttacccaaaaagtacagagctattacggatttgtaaagccggctttggaaccgagggctttacaaatgtaattcccacgacaccgtgctgagtctcaaatttggcgttaac

SEQ ID NO: 351468 - DNA, 479 bp, Homo sapiens; identical to SEQ ID NO: 347264
  chr13:42032017-42032496
  hyper

SEQ ID NO: 351469 - DNA, 109 bp, Homo sapiens; identical to SEQ ID NO: 347265
  chr13:42032649-42032758
  hyper

SEQ ID NO: 351470 - DNA, 318 bp, Homo sapiens; identical to SEQ ID NO: 203348
  chr13:44361226-44361544
  hyper

SEQ ID NO: 351471 - DNA, 62 bp, Homo sapiens
  chr13:44361578-44361640
  hyper
ccaggctggagcgggcgtgttacaggattgtgggcttggggtagacggtggaattgggccgc

SEQ ID NO: 351472 - DNA, 284 bp, Homo sapiens; identical to SEQ ID NO: 334760
  chr13:44544261-44544545
  hyper

SEQ ID NO: 351473 - DNA, 107 bp, Homo sapiens
  chr13:45149906-45150013
  hyper
cgcctggcgcaagaggctgtgcctgcagctgagcctgcgaaaggaggttcaggctttgtggaggcggaggctgtggtcccgacgtagaagatgctgcagggggcggc

SEQ ID NO: 351474 - DNA, 141 bp, Homo sapiens
  chr13:45150276-45150417
  hyper
ggagacgccggagaggaaaacgggacctgacgctccgcctggcgcgattcctccttctcctcctcctcagccaaaggcgccggtcgctcctgccttcgagagcgagcttcggaaaggaggatgaacgagggtgaacagggc

SEQ ID NO: 351475 - DNA, 132 bp, Homo sapiens; identical to SEQ ID NO: 345443
  chr13:46960952-46961084
  hyper

SEQ ID NO: 351476 - DNA, 135 bp, Homo sapiens; identical to SEQ ID NO: 345444
  chr13:46961683-46961818
  hyper

SEQ ID NO: 351477 - DNA, 80 bp, Homo sapiens
  chr13:53422554-53422634
  hyper
cgcctcacaggactcatgcctccagcctcaagtgcgatccgaaaggctaaggaagtcttctctggtttccaggtcgggcg

SEQ ID NO: 351478 - DNA, 231 bp, Homo sapiens; identical to SEQ ID NO: 203374
  chr13:53422885-53423116
  hyper

SEQ ID NO: 351479 - DNA, 64 bp, Homo sapiens
  chr13:53423198-53423262
  hyper
gcagccccctacccacagacttgctctgctgaatgaggctctgctttccttctctcctagctac

SEQ ID NO: 351480 - DNA, 82 bp, Homo sapiens
  chr13:53424677-53424759
  hyper
cgcagccctttcttccgctgtcttccatctcccaagtgcgatttagtatgtagccctcccaccgtccccgcccaagagatat

SEQ ID NO: 351481 - DNA, 154 bp, Homo sapiens; identical to SEQ ID NO: 289787
  chr13:67804074-67804228
  hyper

SEQ ID NO: 351482 - DNA, 196 bp, Homo sapiens
  chr13:67805438-67805634
  hyper
tcactgcgaactttgcttccgaggggctggaaggagtcccaggcagctgtttcccaagctgtggaacacttcctttcccctaggcactttctgctgattccaactttctttcctgtgattttcgtcttttcccgtgcatttcatttctccgactccagctctgtactaaatcctcacaagtttctcgttttcatac

SEQ ID NO: 351483 - DNA, 173 bp, Homo sapiens
  chr13:72438297-72438470
  hyper
cgcgcgcgcgcacatacacacacacacacacacacacacacacacacacaacatttaccccaaaatagtcgaaggttcaaagcccaaacacacccaagtcccatggaaggaagaatacctaaacacggaaaagaatttctggctaggtcaggataggacatttgctggactgg

SEQ ID NO: 351484 - DNA, 206 bp, Homo sapiens; identical to SEQ ID NO: 289790
  chr13:72438563-72438769
  hyper

SEQ ID NO: 351485 - DNA, 138 bp, Homo sapiens
  chr13:74707123-74707261
  hyper
cggctctgcgggttcccggcccgggtggacgtacaaagttgccccttgtcaactccggccaggtcccccgtaattgaaaataacagccaccggccagcccctggctacttgcatggaccaggcactgtagcaagtgac

SEQ ID NO: 351486 - DNA, 211 bp, Homo sapiens; identical to SEQ ID NO: 203386
  chr13:74707414-74707625
  hyper

SEQ ID NO: 351487 - DNA, 915 bp, Homo sapiens
  chr13:74707668-74708583
  hyper
aacagcatcgcccttccccggccccctcccgcttcccagcactttccccctttaagaacacagaccaaccaaaatgatttaacttgagcagatgacagaaggaaaataaaacacgttaagagaatacggtctgatttgggatggcaaaaaaaaaaaaaaaagaggagggggttgtttattttgataagaaacggaatcggcacagacctgaacagaagctgcagagcaggagaaattgttttctttccctcacacagagtccccctctctctctccctttctctctctcacacgcgcgcgcgcacacacacacacacactcgcacacacacggcgtcacccgcgcacacgcacacgcagagcctctcagcggctctctgcagttctcaggaaatgaatggggggcaacccggggaactgttgtacttgcaaatgacttacccggatcacatgatgcgctaaatgtagggtgggccggtgggtggaggctgccgagttgcgagccccggtctagtgtggggagcctcgccaggcccgcatcgaattaccccggggcccagccgagggggttgcaggacgccgcttctcctccctcgcagcccgcagctcaggaaaccggagaggcgcttggggtggggtggggtggggtgctgtgagggggggggccgaaaacaagaaacccccaaacaaaagagctccgggtcctcctccccagaaacaaagccccgccgctgccggcgagccccggggtggggccgagggcgggggcggcggcggggaggggctcgctcagcaggcgctaagtcgctttattgccataaaatggggcccccgagccgctccgcccgaggattaggaggcgggctctgagtgtgatggttgaaatcccctgtgggaaactaacccctccccgctc

SEQ ID NO: 351488 - DNA, 718 bp, Homo sapiens; identical to SEQ ID NO: 347268
  chr13:77459628-77460346
  hyper

SEQ ID NO: 351489 - DNA, 161 bp, Homo sapiens; identical to SEQ ID NO: 203406
  chr13:92050814-92050975
  hyper

SEQ ID NO: 351490 - DNA, 147 bp, Homo sapiens; identical to SEQ ID NO: 345446
  chr13:95201113-95201260
  hyper

SEQ ID NO: 351491 - DNA, 287 bp, Homo sapiens; identical to SEQ ID NO: 203409
  chr13:95201339-95201626
  hyper

SEQ ID NO: 351492 - DNA, 229 bp, Homo sapiens; identical to SEQ ID NO: 203410
  chr13:95201662-95201891
  hyper

SEQ ID NO: 351493 - DNA, 301 bp, Homo sapiens; identical to SEQ ID NO: 203411
  chr13:95202013-95202314
  hyper

SEQ ID NO: 351494 - DNA, 267 bp, Homo sapiens; identical to SEQ ID NO: 345450
  chr13:95202344-95202611
  hyper

SEQ ID NO: 351495 - DNA, 601 bp, Homo sapiens; identical to SEQ ID NO: 334802
  chr13:96705328-96705929
  hyper

SEQ ID NO: 351496 - DNA, 492 bp, Homo sapiens; identical to SEQ ID NO: 289877
  chr13:100631937-100632429
  hyper

SEQ ID NO: 351497 - DNA, 367 bp, Homo sapiens
  chr13:100632514-100632881
  hyper
caggcgacccagctgttagccacctctcgagcggcctggagtgctcgggccaggcgtccccggggttttcggtgtccgctgggagctgctcagatcccggggaagtcggtggcctacgcagaaagactggagcgctgggttgcctcccattcctgacccggctgagggcgccctgaccccgcggcccgggcccgcgtccgagccacgctggacgcccggctcccgggagcgccgcggtcggccaggactagaagccgcggcgccgaggtctcgggagaagcgcggcaggatggcaggccgggcccacgggcacgttcggcggctgcctgagccggcagcagctcagggagcgcgaggactgaggggc

SEQ ID NO: 351498 - DNA, 128 bp, Homo sapiens; identical to SEQ ID NO: 203434
  chr13:100634617-100634745
  hyper

SEQ ID NO: 351499 - DNA, 126 bp, Homo sapiens
  chr13:103046539-103046665
  hyper
cgccagctcccttccctttccttcagatgggtctcgggtccagagctggcgcccgctagcgggaggccagaccgggagggccaaggcagccacctgtggctttcccatccctcaggtccagcagtg

SEQ ID NO: 351500 - DNA, 206 bp, Homo sapiens
  chr13:108518148-108518354
  hyper
cgacgcactgcctgcaagtggtcatctcgccgccttccttgagcaccacatccagactgcagttcaaagtgttgggactggacaaccccgagaacaactcccaaagtgtgtaggaattacaaaacgaaaggtaaaaatccgacaagttccagagcggagtgggatgcttgctcctcacctcctgcccgtcccccccggccgccccc

SEQ ID NO: 351501 - DNA, 42 bp, Homo sapiens
  chr13:108519212-108519254
  hyper
cgaccccatcctctgtagagtgggaaacaataatggagagag

SEQ ID NO: 351502 - DNA, 58 bp, Homo sapiens; identical to SEQ ID NO: 203450
  chr13:108519564-108519622
  hyper

SEQ ID NO: 351503 - DNA, 165 bp, Homo sapiens; identical to SEQ ID NO: 203451
  chr13:108519932-108520097
  hyper

SEQ ID NO: 351504 - DNA, 67 bp, Homo sapiens; identical to SEQ ID NO: 203452
  chr13:108520309-108520376
  hyper

SEQ ID NO: 351505 - DNA, 268 bp, Homo sapiens; identical to SEQ ID NO: 289922
  chr13:111766945-111767213
  hyper

SEQ ID NO: 351506 - DNA, 33 bp, Homo sapiens; identical to SEQ ID NO: 289923
  chr13:111768508-111768541
  hyper

SEQ ID NO: 351507 - DNA, 351 bp, Homo sapiens; identical to SEQ ID NO: 289930
  chr13:112760444-112760795
  hyper

SEQ ID NO: 351508 - DNA, 129 bp, Homo sapiens
  chr13:113547249-113547378
  hyper
agaaattctgcagccaggcttggtccacgcaccgtcctcccggcccacacaccctcctcccggacctcagtctgtctctgtgtatcacatgcctgttcccagtgttctgacctcaggtgggcacggcgc

SEQ ID NO: 351509 - DNA, 403 bp, Homo sapiens; identical to SEQ ID NO: 345451
  chr13:113622881-113623284
  hyper

SEQ ID NO: 351510 - DNA, 634 bp, Homo sapiens; identical to SEQ ID NO: 345452
  chr13:113623348-113623982
  hyper

SEQ ID NO: 351511 - DNA, 302 bp, Homo sapiens; identical to SEQ ID NO: 347277
  chr13:114565969-114566271
  hyper

SEQ ID NO: 351512 - DNA, 114 bp, Homo sapiens; identical to SEQ ID NO: 347278
  chr13:114566409-114566523
  hyper

SEQ ID NO: 351513 - DNA, 246 bp, Homo sapiens
  chr14:21098618-21098864
  hyper
cgtagttggaaattcttagagtcctccgctctaccaggtgagctatcggaaagtgtctgtgacattcgttagcgtagatttttgtgcattgagtagcggctggtgagactcctgacttctttgcatttgggctcagattactgttcaagaagttccagagagccaggtctatagttaactgagtcccgggagcagccttgaggcagtaggaagtgagatctgagtcggaggtagtgagaatggaaa

SEQ ID NO: 351514 - DNA, 196 bp, Homo sapiens
  chr14:21099147-21099343
  hyper
tttcccagtatcgttcataggatcccgacgctgtactttttcgtctcaaatccaggatctggctttcatggaaagatcataaaatgcttcctttcttcactagtttgtttcagcgttgaaaaggctaaaaagctcctgctcttttgcttgggaaaagtattcctacagccgaggccccagcgagatttgaactcgc

SEQ ID NO: 351515 - DNA, 686 bp, Homo sapiens; identical to SEQ ID NO: 334837
  chr14:21099793-21100479
  hyper

SEQ ID NO: 351516 - DNA, 113 bp, Homo sapiens; identical to SEQ ID NO: 345453
  chr14:21101056-21101169
  hyper

SEQ ID NO: 351517 - DNA, 111 bp, Homo sapiens; identical to SEQ ID NO: 345454
  chr14:21439074-21439185
  hyper

SEQ ID NO: 351518 - DNA, 590 bp, Homo sapiens; identical to SEQ ID NO: 345455
  chr14:21439317-21439907
  hyper

SEQ ID NO: 351519 - DNA, 619 bp, Homo sapiens
  chr14:21539350-21539969
  hyper
cgctggacgctggagggtacgctaaggagaagcccacaccaacaggagtgaacactgccctgggaactttcactgcagagtactctgaagcaccgctgcgagagtgggcactgccagagagagcgcccactgcaaagagggcgggggcatggccaaggggccgctcgctgcagagtggaggagggggagaggccttgccagggggagctcaccgcagggagtggaggaggggcaggggcactactggggccgcccctctacggagggaagggcaccctctggcagggaggctggaggaaaaagaaagaggaactgggccagggagagctgactcagtctctctggtctcctctctggtccccgccggcaggaggctgggtctccgtgctcccgcccgccgcctccctccccagacccctcctcccctcctgccgcggccgtttcctgtggctgagactctcgctcagccatgagctcaccgcccctaatgggttgcagctgcctcgctgctcaagccctagctccgcactccctgccttggagcagacggccccactctgcctcacccccgcccatctccaccttccccccacccacgcgcactgcgtccgcctggtcc

SEQ ID NO: 351520 - DNA, 377 bp, Homo sapiens; identical to SEQ ID NO: 347283
  chr14:23291965-23292342
  hyper

SEQ ID NO: 351521 - DNA, 38 bp, Homo sapiens
  chr14:23355352-23355390
  hyper
cgggctgggaggccgcaccacgacctacccgttatcct

SEQ ID NO: 351522 - DNA, 53 bp, Homo sapiens
  chr14:23355484-23355537
  hyper
gctctcccttccaagtcacctcttctccctaaggcctttttaccatcgcggac

SEQ ID NO: 351523 - DNA, 78 bp, Homo sapiens
  chr14:23835314-23835392
  hyper
cgggtcctgtggactcgcctgggctgggagtggggacactgagagggctgcgaaggctccgggggtcgcgcgtggccc

SEQ ID NO: 351524 - DNA, 76 bp, Homo sapiens
  chr14:24808635-24808711
  hyper
cggctggggtcaaccggggtcactcacgagtttacgatcttgaccgccacatcgtagccccacttcctatgttgcg

SEQ ID NO: 351525 - DNA, 84 bp, Homo sapiens
  chr14:24808863-24808947
  hyper
ccctgtgactcggcgttctcactgcaatccccagcctccctcgccggcccccaccgtccccggactcaaagacgttctctgagc

SEQ ID NO: 351526 - DNA, 207 bp, Homo sapiens
  chr14:25148242-25148449
  hyper
cgaactcctgaattgccgcctttcagttcctgcggctgctctgactgtctgcattgcgccctctagtgtccagactgagttcttttactgtctagactggggagtccagagcagattcttttacccgccacgtgagggagcaattcagggaaagtaaaactattagtaaaagacattattttattttcaaataatcgtaattttacc

SEQ ID NO: 351527 - DNA, 270 bp, Homo sapiens; identical to SEQ ID NO: 334851
  chr14:25601990-25602260
  hyper

SEQ ID NO: 351528 - DNA, 265 bp, Homo sapiens; identical to SEQ ID NO: 203510
  chr14:29225768-29226033
  hyper

SEQ ID NO: 351529 - DNA, 60 bp, Homo sapiens; identical to SEQ ID NO: 203511
  chr14:29236194-29236254
  hyper

SEQ ID NO: 351530 - DNA, 87 bp, Homo sapiens
  chr14:30739859-30739946
  hyper
cggaacacaagcgttttgcttggtcactaagcctagacaaatgtaagtttccccgccccagctcccctcagcctgtcacacaaaagc

SEQ ID NO: 351531 - DNA, 69 bp, Homo sapiens
  chr14:30740003-30740072
  hyper
tgggaaagctttagcttctcaagccaattgcactgcattgtcagtaggggtgtccgtgagctccccctc

SEQ ID NO: 351532 - DNA, 163 bp, Homo sapiens; identical to SEQ ID NO: 347284
  chr14:36002437-36002600
  hyper

SEQ ID NO: 351533 - DNA, 438 bp, Homo sapiens; identical to SEQ ID NO: 290092
  chr14:36003004-36003442
  hyper

SEQ ID NO: 351534 - DNA, 403 bp, Homo sapiens; identical to SEQ ID NO: 290108
  chr14:37051196-37051599
  hyper

SEQ ID NO: 351535 - DNA, 119 bp, Homo sapiens; identical to SEQ ID NO: 347286
  chr14:37130817-37130936
  hyper

SEQ ID NO: 351536 - DNA, 65 bp, Homo sapiens
  chr14:37131997-37132062
  hyper
cgggtgcgttcgcccagtccccggatgcgtagggaggcccagtggcaggcagctgtcccaagcag

SEQ ID NO: 351537 - DNA, 202 bp, Homo sapiens; identical to SEQ ID NO: 347287
  chr14:37135434-37135636
  hyper

SEQ ID NO: 351538 - DNA, 225 bp, Homo sapiens; identical to SEQ ID NO: 347288
  chr14:38052540-38052765
  hyper

SEQ ID NO: 351539 - DNA, 175 bp, Homo sapiens; identical to SEQ ID NO: 347289
  chr14:38053203-38053378
  hyper

SEQ ID NO: 351540 - DNA, 104 bp, Homo sapiens
  chr14:38057019-38057123
  hyper
cggtagcgttggtgggtccgagcgccaccggagctgtacacttgggtcaggaggaaggctttccctcctcgcccctcttcgccccctccctcccctccccgggg

SEQ ID NO: 351541 - DNA, 299 bp, Homo sapiens; identical to SEQ ID NO: 203542
  chr14:38057503-38057802
  hyper

SEQ ID NO: 351542 - DNA, 155 bp, Homo sapiens
  chr14:38057832-38057987
  hyper
cgagagctaaggccaacttaagcttggtggggtgaaggcaaggcgctgatgtttctaatacgttgaaaaggagaaagggaacatcacagagaggacagcacagaagttaaacatcttagattcagtgggggcgggattccgaggcccaagcccac

SEQ ID NO: 351543 - DNA, 81 bp, Homo sapiens
  chr14:38060563-38060644
  hyper
cgggagctaggaagtgtttaggacgggtctggaatacacaccttggtagtacgccggctccagggctgagggctcgatggg

SEQ ID NO: 351544 - DNA, 599 bp, Homo sapiens; identical to SEQ ID NO: 203547
  chr14:38061332-38061931
  hyper

SEQ ID NO: 351545 - DNA, 209 bp, Homo sapiens
  chr14:38062091-38062300
  hyper
tgcacggcagggggaaaatcctagcgcggcaggcatgaaagataaacgctcacagaaaatatgaccccaggaagatgtgtaatcgccttacacgccaggctcaggggctggcttccagggccccctcatcgcctcctccatccacgccaggcggtatcccaagtctccaccccaaccagcctcggcaaagcgccctttggggggaaatc

SEQ ID NO: 351546 - DNA, 54 bp, Homo sapiens; identical to SEQ ID NO: 347290
  chr14:38072497-38072551
  hyper

SEQ ID NO: 351547 - DNA, 52 bp, Homo sapiens; identical to SEQ ID NO: 203558
  chr14:38725469-38725521
  hyper

SEQ ID NO: 351548 - DNA, 201 bp, Homo sapiens
  chr14:45431382-45431583
  hyper
cggtttggtcacgtggtgcccttggttacgcccggtggcagctgtggggtctagggctcagacgggggccattttgccagaggctgcctcccggagttgggggcggcctggcggcaggctgaagctgttcttttgcctcttctgcagcttggggcttggagaggatctggaagtctgggctccatcgagccctttggagac

SEQ ID NO: 351549 - DNA, 586 bp, Homo sapiens; identical to SEQ ID NO: 334893
  chr14:50469917-50470503
  hyper

SEQ ID NO: 351550 - DNA, 77 bp, Homo sapiens; identical to SEQ ID NO: 334894
  chr14:50511831-50511908
  hyper

SEQ ID NO: 351551 - DNA, 223 bp, Homo sapiens; identical to SEQ ID NO: 203572
  chr14:51562012-51562235
  hyper

SEQ ID NO: 351552 - DNA, 260 bp, Homo sapiens; identical to SEQ ID NO: 334898
  chr14:52327346-52327606
  hyper

SEQ ID NO: 351553 - DNA, 314 bp, Homo sapiens; identical to SEQ ID NO: 347295
  chr14:52781114-52781428
  hyper

SEQ ID NO: 351554 - DNA, 79 bp, Homo sapiens; identical to SEQ ID NO: 203582
  chr14:52782046-52782125
  hyper

SEQ ID NO: 351555 - DNA, 228 bp, Homo sapiens
  chr14:53417820-53418048
  hyper
ccgccccctctgtccgagcctggctgggctgggcgcgctggctccctccttcgccgcccgcagagctgccctgagcgggtccggccggcctcgcctctgcccccgccctcccggcgccgcgctcgggggagggggctgcgggtcccgggcggggcggggcggcgtggggcggggcggcgcgggggtggcggggggcgcggcggggcggcaatctcggccccgcggagc

SEQ ID NO: 351556 - DNA, 128 bp, Homo sapiens; identical to SEQ ID NO: 203595
  chr14:55595810-55595938
  hyper

SEQ ID NO: 351557 - DNA, 133 bp, Homo sapiens; identical to SEQ ID NO: 203596
  chr14:55595968-55596101
  hyper

SEQ ID NO: 351558 - DNA, 437 bp, Homo sapiens; identical to SEQ ID NO: 347298
  chr14:55596153-55596590
  hyper

SEQ ID NO: 351559 - DNA, 113 bp, Homo sapiens; identical to SEQ ID NO: 290221
  chr14:58332405-58332518
  hyper

SEQ ID NO: 351560 - DNA, 47 bp, Homo sapiens; identical to SEQ ID NO: 290222
  chr14:58332593-58332640
  hyper

SEQ ID NO: 351561 - DNA, 164 bp, Homo sapiens
  chr14:58332908-58333072
  hyper
cgaaaactagacaccccaaccccacctgatgaaagggatgtttggtcagtggggcgcgagaggagaaggcgacggtggccaggggctcagagaagggtgttgggagtgggagaaacccaagagggactcatagctgttaatgcgaggcattaactctgtcgctc

SEQ ID NO: 351562 - DNA, 173 bp, Homo sapiens
  chr14:60043607-60043780
  hyper
taccctcctggttctctaattttatccacgataattaagcagtctgggaagaatgactctctctttagctaatttttcccctttcaatttccattgcgttagttcaggcctgtatcttttttgtgggccactggaatcataataatgatcacttttgagcgcatctttgtgcc

SEQ ID NO: 351563 - DNA, 79 bp, Homo sapiens; identical to SEQ ID NO: 347299
  chr14:60097114-60097193
  hyper

SEQ ID NO: 351564 - DNA, 44 bp, Homo sapiens
  chr14:60385935-60385979
  hyper
cgtaccttacagcacatgtcaatttggacaagccacatttcaag

SEQ ID NO: 351565 - DNA, 61 bp, Homo sapiens; identical to SEQ ID NO: 345458
  chr14:60794412-60794473
  hyper

SEQ ID NO: 351566 - DNA, 276 bp, Homo sapiens; identical to SEQ ID NO: 290237
  chr14:60974092-60974368
  hyper

SEQ ID NO: 351567 - DNA, 110 bp, Homo sapiens
  chr14:60974415-60974525
  hyper
tctgtgctatctatctgccttctgatttaccagatctgtacaagccgcatacaaattgtacttgatactaaagaaaagacagtcgggtccagtccagttcggctgtgaac

SEQ ID NO: 351568 - DNA, 134 bp, Homo sapiens
  chr14:60982999-60983133
  hyper
ctgctaccctgtcattccacaaagcctaccccacctccactaagttttccgtgagccagtgagctccacacagataatgtgccaccaccttttttaatgctcccaccgcaccttatctaaacgtctgttttagc

SEQ ID NO: 351569 - DNA, 167 bp, Homo sapiens; identical to SEQ ID NO: 345459
  chr14:61104864-61105031
  hyper

SEQ ID NO: 351570 - DNA, 181 bp, Homo sapiens; identical to SEQ ID NO: 347302
  chr14:61113933-61114114
  hyper

SEQ ID NO: 351571 - DNA, 33 bp, Homo sapiens; identical to SEQ ID NO: 347303
  chr14:61114722-61114755
  hyper

SEQ ID NO: 351572 - DNA, 132 bp, Homo sapiens
  chr14:61116736-61116868
  hyper
cgcgcatgcagcctctggaagagtggcttcgggttggcttcagctcgaggagtccaaccctatttcctcctccctccccccaccaactaccactgtcctccccccactgctgcacaccaccctccaaagggc

SEQ ID NO: 351573 - DNA, 186 bp, Homo sapiens
  chr14:61117028-61117214
  hyper
ggttcctgaagcttctggactcaatttccccatctgtgcggttgtgttttgcagtgccacctctgctactgaggaatgccgagaggctttacttgctattagcaaaaatgctttgggaacctcgtacgaaaggcgctggatgtggtgtaaattaaataaaactgtgcccggctccaataaccgtcc

SEQ ID NO: 351574 - DNA, 354 bp, Homo sapiens
  chr14:61123186-61123540
  hyper
cggtgcatacccaagccgtgggatctgtttttgcattctcacacgagcatattgctcgggttctaaaggatccagattttcgcagacagaagctcgaccgcctctgttcccaaaagggccgagcggcgtttgtctgaatcaccagtcctctgagcagtgggaaaagagatactgggtagagggtgctgggaaggtgcccactcatccatgcccctctgcgcgtctcgcccactcgcttaggcttggactttgcaacaaggtttccaacaccgctgcagtgcttgacaaagccctcctggaagccagcagggtgaggctgccagcaagcaggcgggctgcgagggacgcttttag

SEQ ID NO: 351575 - DNA, 623 bp, Homo sapiens; identical to SEQ ID NO: 290253
  chr14:61123681-61124304
  hyper

SEQ ID NO: 351576 - DNA, 655 bp, Homo sapiens; identical to SEQ ID NO: 345460
  chr14:61188627-61189282
  hyper

SEQ ID NO: 351577 - DNA, 64 bp, Homo sapiens; identical to SEQ ID NO: 203621
  chr14:61748033-61748097
  hyper

SEQ ID NO: 351578 - DNA, 130 bp, Homo sapiens; identical to SEQ ID NO: 334940
  chr14:61943723-61943853
  hyper

SEQ ID NO: 351579 - DNA, 114 bp, Homo sapiens; identical to SEQ ID NO: 347307
  chr14:62584399-62584513
  hyper

SEQ ID NO: 351580 - DNA, 167 bp, Homo sapiens; identical to SEQ ID NO: 334946
  chr14:64805585-64805752
  hyper

SEQ ID NO: 351581 - DNA, 92 bp, Homo sapiens; identical to SEQ ID NO: 347308
  chr14:65016816-65016908
  hyper

SEQ ID NO: 351582 - DNA, 213 bp, Homo sapiens; identical to SEQ ID NO: 334953
  chr14:69259278-69259491
  hyper

SEQ ID NO: 351583 - DNA, 219 bp, Homo sapiens; identical to SEQ ID NO: 347309
  chr14:69261392-69261611
  hyper

SEQ ID NO: 351584 - DNA, 105 bp, Homo sapiens
  chr14:72399486-72399591
  hyper
aggctgtggggagcggcgcggagacggactagacttcccctccgcccccaagaggctgccggtccccggttccctgggcttctccagctttatcatgaacctggc

SEQ ID NO: 351585 - DNA, 464 bp, Homo sapiens; identical to SEQ ID NO: 334962
  chr14:73359779-73360243
  hyper

SEQ ID NO: 351586 - DNA, 227 bp, Homo sapiens; identical to SEQ ID NO: 334963
  chr14:73360763-73360990
  hyper

SEQ ID NO: 351587 - DNA, 618 bp, Homo sapiens; identical to SEQ ID NO: 347312
  chr14:73957523-73958141
  hyper

SEQ ID NO: 351588 - DNA, 149 bp, Homo sapiens; identical to SEQ ID NO: 290345
  chr14:73958379-73958528
  hyper

SEQ ID NO: 351589 - DNA, 98 bp, Homo sapiens; identical to SEQ ID NO: 334967
  chr14:74238704-74238802
  hyper

SEQ ID NO: 351590 - DNA, 129 bp, Homo sapiens
  chr14:75894282-75894411
  hyper
cgtgaaggggcttttgacttttcccccggctccggcctctcgcgtctctctcctagggctgcggctgctgctgcctggcgggcacaagccgggcggcggtgcgcggggggtgcgcttacataaccgctc

SEQ ID NO: 351591 - DNA, 168 bp, Homo sapiens; identical to SEQ ID NO: 347313
  chr14:76597725-76597893
  hyper

SEQ ID NO: 351592 - DNA, 37 bp, Homo sapiens
  chr14:76819100-76819137
  hyper
cggccccggttgctctgagctagctgattggaaagcc

SEQ ID NO: 351593 - DNA, 333 bp, Homo sapiens; identical to SEQ ID NO: 334977
  chr14:77428133-77428466
  hyper

SEQ ID NO: 351594 - DNA, 82 bp, Homo sapiens; identical to SEQ ID NO: 290405
  chr14:77965137-77965219
  hyper

SEQ ID NO: 351595 - DNA, 180 bp, Homo sapiens; identical to SEQ ID NO: 290406
  chr14:77965244-77965424
  hyper

SEQ ID NO: 351596 - DNA, 163 bp, Homo sapiens; identical to SEQ ID NO: 290421
  chr14:88458964-88459127
  hyper

SEQ ID NO: 351597 - DNA, 239 bp, Homo sapiens; identical to SEQ ID NO: 290422
  chr14:88459170-88459409
  hyper

SEQ ID NO: 351598 - DNA, 57 bp, Homo sapiens
  chr14:88459631-88459688
  hyper
tgacgcagctggcggagtgttgagaaaagaagcagcgagctttttcttatcgctcgc

SEQ ID NO: 351599 - DNA, 197 bp, Homo sapiens
  chr14:88789765-88789962
  hyper
cgaccctccccgcggcgcgccccagacgccgcgccccggcaagagggagcagggcgagcagcggaccgaggctcccagctgggaaggcgcgctgagcccccggcacccggctcggggcagcgggaggcggtcgcggacttgcccgcggggcggcgggaggcggtgggcggtggcggggaagccgcggaggggcgggg

SEQ ID NO: 351600 - DNA, 67 bp, Homo sapiens
  chr14:89818034-89818101
  hyper
tgtttgataaggtcatttgtaaatatttactgatttgcagagaaaagaagttaaattacataaaccc

SEQ ID NO: 351601 - DNA, 216 bp, Homo sapiens; identical to SEQ ID NO: 334989
  chr14:89884061-89884277
  hyper

SEQ ID NO: 351602 - DNA, 485 bp, Homo sapiens
  chr14:90085312-90085797
  hyper
cgtgacaatgctaaacccgagcagattaggaggcaggaaatgagccccattttcgttaccttcgatcgcctgcccccccgctgcttctcgcggccgcattggggggctgcggcgacgctggactcgcgggtggccccgccgccgggtcgcgccgtctcccggccgagctgcagcagatcgcggccggaaccccggctcctgcgcccggcgcccgcccggggtcggcggcgcggctcccaccccggcctggagccctgctgggtcctagtgcgcgccgcgcgcccgcctcgcggcccggtctgcagcccgcaccgagggcaggcagctcccagcgccgcgagtctccgggcgaggccgccaccctctcggtcccttgcgaaagcggccgcggggtgtgcggatgaactggagcttaatgtcaaatcctggcacaagatgttcaaaagaaagacattggctccaactgaactcttagaaggcagatg

SEQ ID NO: 351603 - DNA, 39 bp, Homo sapiens
  chr14:90849401-90849440
  hyper
cgacccgccgtagaggaaaaggaaaccccaaacaaaact

SEQ ID NO: 351604 - DNA, 382 bp, Homo sapiens; identical to SEQ ID NO: 203714
  chr14:90849476-90849858
  hyper

SEQ ID NO: 351605 - DNA, 53 bp, Homo sapiens; identical to SEQ ID NO: 203715
  chr14:90849897-90849950
  hyper

SEQ ID NO: 351606 - DNA, 67 bp, Homo sapiens
  chr14:90850476-90850543
  hyper
tcccatgggccacatccgctgccatggtctgtgtcgtgccagaaggtacctctcagccctcagtgcc

SEQ ID NO: 351607 - DNA, 479 bp, Homo sapiens; identical to SEQ ID NO: 334996
  chr14:91581063-91581542
  hyper

SEQ ID NO: 351608 - DNA, 118 bp, Homo sapiens; identical to SEQ ID NO: 290458
  chr14:91883379-91883497
  hyper

SEQ ID NO: 351609 - DNA, 405 bp, Homo sapiens
  chr14:91883530-91883935
  hyper
cgccccccattccccacccgtcaccgccatccaccggctggtctcagggattcagaaaaactacatgagatatttggttgggaagaatggggtccttttcgggagtggctaaaccccagggacaggagtgaccactgggacccggtccgccccgaggcagccagcctagagccccagcgggaacaggtgtacccgcccggctcctggcccggccgaaagcgcggcggggtcccgcgccggacgcacaacgggggcgccggctccagagttacaaagctccggactccaggacgcggccccaaccccggccgggagccacttgctgcgtccctcgcgccccggagccacccggggccccggccgtgtcgggtctgcggcgtcccgtcgccgggctagagagaagcc

SEQ ID NO: 351610 - DNA, 551 bp, Homo sapiens; identical to SEQ ID NO: 335000
  chr14:92302201-92302752
  hyper

SEQ ID NO: 351611 - DNA, 187 bp, Homo sapiens; identical to SEQ ID NO: 203723
  chr14:92980770-92980957
  hyper

SEQ ID NO: 351612 - DNA, 182 bp, Homo sapiens; identical to SEQ ID NO: 345461
  chr14:94406037-94406219
  hyper

SEQ ID NO: 351613 - DNA, 102 bp, Homo sapiens; identical to SEQ ID NO: 347317
  chr14:94889915-94890017
  hyper

SEQ ID NO: 351614 - DNA, 209 bp, Homo sapiens; identical to SEQ ID NO: 290501
  chr14:96505691-96505900
  hyper

SEQ ID NO: 351615 - DNA, 290 bp, Homo sapiens; identical to SEQ ID NO: 290502
  chr14:96506053-96506343
  hyper

SEQ ID NO: 351616 - DNA, 75 bp, Homo sapiens
  chr14:99736040-99736115
  hyper
cggctctcggccgcccggcagccagtcctctgcggtgactgggcgcgcagccctctcgagctccgcgcgggcagc

SEQ ID NO: 351617 - DNA, 60 bp, Homo sapiens; identical to SEQ ID NO: 203743
  chr14:99736213-99736273
  hyper

SEQ ID NO: 351618 - DNA, 128 bp, Homo sapiens
  chr14:99736431-99736559
  hyper
ttcccctctgctaaataaacccaacagggacggtggaagctgctgcttgtcttgccccgctgcctgactttgcccgcccagccacatgcttgaaatcgacacgatttcagccggtggatttccactgc

SEQ ID NO: 351619 - DNA, 220 bp, Homo sapiens
  chr14:99737178-99737398
  hyper
cgagcgtccagccgggctcggcgcgcacacacacacactcctccagcctgcatgccccctccccggcccggagccggctccgcaggcccccgagcccgaggcgcgtccggctgctcggcgccccaactccccgggctgcaaagaaactttcctatggcccccgccccccgccatgctccaggccgacgccgtagactctgccagccagcgggcggccccg

SEQ ID NO: 351620 - DNA, 544 bp, Homo sapiens
  chr14:99737462-99738006
  hyper
ctccggcccctcgcgcgcactccgcagacacttacgggtgatgagctccctctgggacaagtgctgcgggttgccctgtttgcggcgggacattgccccggcatctattctggcatcgcccggagagctgcactgatggggggagccgggggagggggtccgagccgccgccgcgccgctgccgccgctgccgccgccgccgccgccgccgcacctcctcctctgcccgggttggtgttttttttcccttcctctctttccctctcttcctcctcttcttcttctttattttgctctttcttctatgctgttttttgttttgtttgcaaaaagaaaaaaaagggaagaaaagcaagaaaaacctctcgatctaaaataagaaaaagaggcaaaaaaaaaaaaaactgctgttgctttccgcggactggctggtttctttaaaaatatattctttcgaaggaaaaaaaatctcttacacttcttcaaactgcttggcctcttgcacttgcaaatgtcttcttgaacttaaactgggttttgcacc

SEQ ID NO: 351621 - DNA, 279 bp, Homo sapiens; identical to SEQ ID NO: 203753
  chr14:100259401-100259680
  hyper

SEQ ID NO: 351622 - DNA, 41 bp, Homo sapiens
  chr14:100438971-100439012
  hyper
aggcccccaaatgtaccgctcgttgatgtatcacccagctc

SEQ ID NO: 351623 - DNA, 377 bp, Homo sapiens
  chr14:102975682-102976059
  hyper
cgccacctcctacccgtcccctcccggcctgcacggccagacgtcgggcggcggagggtcgcggggccgagcggggcgtccgcgcgcaggtggccggcgcagcgagggctgcacctgcgtgcgcgtgtgccggaggaggagggggcggcggccgcgggcgcggcgcgggggacggggactcaccatggggggcgcgggggccacaggccgggcgtccccgcccctgccgcggaccggagcgcgcgctgtcccccgcgggcgagcgggcaaaggtcccacgacggacgcacgggagggagccaccgccgcccgcgcccgccgcagccgcgctctgagccgccgcggccggatcgcagggcggcggtgccgtcgccggc

SEQ ID NO: 351624 - DNA, 212 bp, Homo sapiens
  chr14:103010929-103011141
  hyper
cgctgcccggaacgccccgcgggagaacatctgcgccaggggccgggggccgggggccgcggcgggcgaaatccgagaggcccgggctcctcctgctgcgcggccggggaggggggcgcctgccgggtcggggctggaggacctgcgcgcggccccgggaggccccgcctcgccttccagtctgtgaaatggggcgacggcctgggcgtggc

SEQ ID NO: 351625 - DNA, 99 bp, Homo sapiens
  chr14:103011360-103011459
  hyper
ggacgggcctcagtggcttccccgcccctccccaccgcgtcccggctccccgggcggggggtggggggggtcgcgtgcggacggttccccaccccgcgc

SEQ ID NO: 351626 - DNA, 142 bp, Homo sapiens; identical to SEQ ID NO: 335034
  chr14:103430237-103430379
  hyper

SEQ ID NO: 351627 - DNA, 85 bp, Homo sapiens; identical to SEQ ID NO: 203776
  chr14:103745819-103745904
  hyper

SEQ ID NO: 351628 - DNA, 217 bp, Homo sapiens
  chr14:104582815-104583032
  hyper
cgtgagggggtagggcgtccctccccccgcgtgggaaatgaggaggcaggtacggggctacccctgtgggctgcggggtgggggttcagggtctgagaagcagaaacctccctccctccagtttcactttctctttacccctccccttccccctcccacgaagttccctttgaagtgagaggggctggggtgggtgtgtccagcccagcccccacac

SEQ ID NO: 351629 - DNA, 988 bp, Homo sapiens
  chr14:104583110-104584098
  hyper
cggccaaggtggagccccgggccctccgtgcgcccgagcacccccggcccagacgagacggttcgggcgtggcccggcggggacccagaacccgggaggccaggtgcgcccaggccaggcgctggaggctggggcgccggatggggcggggcggccgctgagtcagggccacccccgcgcgggcgcgcggagcaggtccccgggccgtggaggatcagtcgcgggacctatgggcccgggagccgccccgcccggaaaaaccggtcgggccagcgcggcgcgggcacattccggcgccgggaagggcggctgcgccgcataaaaggcgccgccgcgctggccaccgccgctcggagctcagccgccctgccacgcggggcccgcgggacgaggggacgccggggccagcgaggacgcggcggggctgggcttggcggctgggatcccccagcgccaggcgagggcgtctaaggcgtccggtacggcgtcggggccgggtggctgcagcagggcagggggtgcgcgaccagcggggatctgggcgcaggggccggtccccgggatccgcaggcgacgcgggcggtcccaagggcgtcgggggctcctctctccgcagctcggcgaaccgacggtgttggggactcgcgcgctgggtccagtggttcttaacagttcaacagttctgtagcgcaattgtgaaatgtttaggaccactagacccggcgggcgcggcgacagcgacggagcgtcccacgcgcggcctggagtcagagtcacagtcaggggtgcgccggcgaccaatccaggggagcccacggaccggctccgcgctccaggtcggccgccccatgcgccgcgccccgcagtccccagggcctggctggctccacctgctgccagggaagaccctcggccggagagccaagtgctgctgggaggtggccgggcgtggccgggctgtgctgtgggaaccgctgggtgggggcgc

SEQ ID NO: 351630 - DNA, 82 bp, Homo sapiens
  chr14:104603633-104603715
  hyper
cgactgcaggcttacggatctcagaaagagtggagagcccctgccactttattccatacccccttgcgttttcgaaccccta

SEQ ID NO: 351631 - DNA, 352 bp, Homo sapiens; identical to SEQ ID NO: 290594
  chr14:104603753-104604105
  hyper

SEQ ID NO: 351632 - DNA, 198 bp, Homo sapiens; identical to SEQ ID NO: 345462
  chr14:105189960-105190158
  hyper

SEQ ID NO: 351633 - DNA, 151 bp, Homo sapiens
  chr14:105196121-105196272
  hyper
cggcgtcgtggggaggagcgtggcgtcggcgtcgtggggaggagcgtggcgtcggcgtcgtggggaggagcgtggcgtcggcgtcgtggggaggagcgtggcgtcggcatggtggggaggagctgtggggtggcaacccagaggcaaggag

SEQ ID NO: 351634 - DNA, 667 bp, Homo sapiens
  chr14:105293560-105294227
  hyper
cgggtccagctcaaaaacgccaggcccgcccccgccccgcaggtccgcgggaaggaaggaaaaggcgttggggatgcgtaggaggcagaggccttggtggtcgatccggtgtggagtggggcaggggctgcgaggagggcgcccaggactggtatcagtgaacagtgacggtggggcagggcggtgaccttagcaccagcgcttcggtgggggggaggaagcacctgagccgcggagaaaggcctgcgtgaggtgggcacaggctggcgttgaagccctggggtggactcacgtccaggggagggcggtgcttcacacgtcccaggcactgtcttgtgtggccccaagtgctgtctgaatctctcctgcgtcttgggccccagcaccaacagccgtcgccctggagccaggcagcagccttaagcttccctgggaggctgactggctgggagcagggaggtcccatcggggaagtaggggcgtgcagggggcttggcgcctgcagtcctggaggggcagggcagatgataaggctaagtacctcctgtcctttgctcagccagccactaggaggaggccgcagagaagaagccgccaggggctgggggaggccagggacggggcagggaggaggggctgggctgaatgcaggtgccccaggagctgc

SEQ ID NO: 351635 - DNA, 464 bp, Homo sapiens
  chr14:105330476-105330940
  hyper
cgccatactcaagggcgcctcttgactccctctgaactcgcaatcccgccccagggtccggcacaagggctctgctggggctgagatccgtgaaggcagatgcggagaggcgccgctggattgcgagcaggcccaggtgcggggccaggtgggcgttgtcgcagccgggaacgcccagccgctccagctgcccacaggacaaagcccagggttccccggccgggcgcacgccttccacattctccctcacctccacgccttcgctcactgcgttccccaacacctggaatgcagcaatgcccttcgggcacgctgccccgcccccacgttgatcccgtcccctagcttggctccagggacaccggatacgcctattgtagcacccggcaaggagcgagcagtccgcgggaacttacccaggaaccccgagcgcctccgtagttcccaaccccacccccacccct

SEQ ID NO: 351636 - DNA, 455 bp, Homo sapiens
  chr14:105330980-105331435
  hyper
cgtcgatgcccaccaccatcgcccccagctcagcccagagcgcccggggtcagaggtggagatgtcggacatacgcccagtctggccaggctcgggagggaaaatctgggagcggcctctggaactcaccctgactccttcaccgtccgctcctctttttggcttccggggccaaaggttggggactcgaggcgcggctggagcctacagctcctggagcgtagttaagcgttaacccgctggccctgggccagggcgcggggctgctgtgcgcacccggttccgcccgtcgagctggggccggaccgggaggcgaagcggggggcgctgccgagacgggagggcatggggtctgcgccgggtgcgagatgagccggggaggccagcggggcctgggcggtgggggaaggtgggcctggggcaggggcgggatggcggctcgccaagcctctgcc

SEQ ID NO: 351637 - DNA, 78 bp, Homo sapiens; identical to SEQ ID NO: 345463
  chr14:105512395-105512473
  hyper

SEQ ID NO: 351638 - DNA, 37 bp, Homo sapiens; identical to SEQ ID NO: 345464
  chr14:105715538-105715575
  hyper

SEQ ID NO: 351639 - DNA, 409 bp, Homo sapiens; identical to SEQ ID NO: 335057
  chr15:26178877-26179286
  hyper

SEQ ID NO: 351640 - DNA, 275 bp, Homo sapiens; identical to SEQ ID NO: 203799
  chr15:28340034-28340309
  hyper

SEQ ID NO: 351641 - DNA, 77 bp, Homo sapiens
  chr15:28351681-28351758
  hyper
cgttgtccccaagggtctctccaccctccgggccccggcctccggccccgcctggcatgaggagcggggagcgcaca

SEQ ID NO: 351642 - DNA, 53 bp, Homo sapiens; identical to SEQ ID NO: 347321
  chr15:29130654-29130707
  hyper

SEQ ID NO: 351643 - DNA, 60 bp, Homo sapiens; identical to SEQ ID NO: 290645
  chr15:29561185-29561245
  hyper

SEQ ID NO: 351644 - DNA, 1045 bp, Homo sapiens
  chr15:29561316-29562361
  hyper
gcttcagtttccttgatggtgttgcccttcataaagatgagccctaagacgatcatcaggaggcccgtagtgggcgtgccttggtcacccctcatctcggcatcctcctccacaggctccagggtgttgatgaggatgtaagtgttgctcttgggttcaagttccaccagcttatacccgaagacgtactggaggcgctcggcggcccgtttgaagaggtcggggaagatgtccttgtagtccccgatgacgtgcttcagtatgtcggcccgcttgatcggaatcttcttctggtctttaatcagcaagaactgcaccagctcggacactttcagctccagctgcttctggctcctgggccccacggcgggggcggcctgggcccggcgggcgccctgaggcgaggggccctgcgacccctgcgagccgcccggcccgcgggacgtgctcggggcctcctcggcaaagccgtctctgagaacccgggcgtcttccccggcccgcgaagccccggggtttccgctatggctccagtctctgtccctctcggcctggccgccagagcggccccggttcctcggtttttgcaacatgtctccggcggcaggtgccggcgcacactccggtaggcaagcagccgcggcggggattgcgggtcggcgacccgctaacgccggtgcctggaggcgcgcgcagtgtcggctgagactgcgtgctgcgtcatgaagcctgcgccttgcgtcagggcggctgggcggtgcgcctgcgcggctgcggcgggtaccaaaaggaacagcgttttccgtgcagccctgcaggtccgggcgatgatttttagtatagtgaagtgttgttaccaaaccatgcaaacagagagcgagaaccgaaactcctaaacaagtgtgtcgctaaattcagaccacacaggctcaggcaagttttacagacagtattatgagtttctaaatcgggagcatttgtaaacggaaagaattcagaggatgaacgtgtgagaaaaaaaaaaggtgaagaggaagggccgacc

SEQ ID NO: 351645 - DNA, 63 bp, Homo sapiens; identical to SEQ ID NO: 203804
  chr15:29862439-29862502
  hyper

SEQ ID NO: 351646 - DNA, 288 bp, Homo sapiens; identical to SEQ ID NO: 290648
  chr15:29862582-29862870
  hyper

SEQ ID NO: 351647 - DNA, 67 bp, Homo sapiens
  chr15:29863222-29863289
  hyper
cgcgagccgccgccgctgctgccgtaccgggcgcgagccgctgccgtccccgggcgcgagccccgcc

SEQ ID NO: 351648 - DNA, 329 bp, Homo sapiens
  chr15:30113537-30113866
  hyper
cgtaggaatactttgtattacttgtgaaagtttaattcaagttaaattattaaatgttaaagaggttattttcaaagttaccttaaataagtaatacagcatgaaagaaaacccgacctactacgcctcacaggctgagtggagtgttttgcagtctcaaagccttatcgctggcgtgcgcataccgcagggagtgacatcagatcgaaactacagggtttcgccggggaccaaccactcctccaaagacagcagctcccggccagcaggaggtggcaccccaagccccgacccgctgagagccggcttccagcccccgaaccctcact

SEQ ID NO: 351649 - DNA, 319 bp, Homo sapiens; identical to SEQ ID NO: 203810
  chr15:30113984-30114303
  hyper

SEQ ID NO: 351650 - DNA, 431 bp, Homo sapiens; identical to SEQ ID NO: 203811
  chr15:30114349-30114780
  hyper

SEQ ID NO: 351651 - DNA, 375 bp, Homo sapiens; identical to SEQ ID NO: 290655
  chr15:30114810-30115185
  hyper

SEQ ID NO: 351652 - DNA, 339 bp, Homo sapiens; identical to SEQ ID NO: 345465
  chr15:31621317-31621656
  hyper

SEQ ID NO: 351653 - DNA, 507 bp, Homo sapiens
  chr15:31774606-31775113
  hyper
cgcccaggggcccgccagcgacagtccactgtggaagtgccttcaaaggagaaatgtgagcagcctgtcctatctgctcctctatgagcaaatccaaattgtgagatgggaaccctgctttttggaccctaggtgtctttggaaagctcctgtcacctgaactgcccggcactgggagccatcgctgtacctcacggcgcccgcgagacgggtggtccagtgccctttccacggccgcccgcggcttggatggcagtgtgaatggtgcttgagccggggctgggggaggaggttttgcttatgaaatggagctgtgtgtttctaaagggccacagtgaccaccagggcgtcagctggcggccaggtacccgccttctcctaggcctcgggatgggaggcaggtagagctcacagaggagcctccaccgcagccccgggtgcgcgctcgctctaagccctgggtactaccaaccgcgcacaagggaccgctacctggaagaggtcatc

SEQ ID NO: 351654 - DNA, 209 bp, Homo sapiens; identical to SEQ ID NO: 290663
  chr15:32162282-32162491
  hyper

SEQ ID NO: 351655 - DNA, 761 bp, Homo sapiens; identical to SEQ ID NO: 345467
  chr15:32162523-32163284
  hyper

SEQ ID NO: 351656 - DNA, 155 bp, Homo sapiens
  chr15:32322773-32322928
  hyper
ctcgctgcagctccgggactcaacatgcgctgctcgccgggaggcgtctggctggcgctggccgcgtcgctcctgcacggtaaagccactgcctccccgccctccactcctccgtgggatcccgggcacatcccgggcgcctctgtgcgccccgc

SEQ ID NO: 351657 - DNA, 46 bp, Homo sapiens
  chr15:34729898-34729944
  hyper
cgccgccgtcctcgccgcgccgctgccgggtctctcccgggggctg

SEQ ID NO: 351658 - DNA, 72 bp, Homo sapiens
  chr15:34730043-34730115
  hyper
ccgcagggccgcgccacatggcgcacgcgcactgagctgcatacctaggtgacaaacgtgcacgttttgcac

SEQ ID NO: 351659 - DNA, 133 bp, Homo sapiens
  chr15:37403336-37403469
  hyper
gtggtttcatttacattttaaaaatcatttttgcgttcttcagcgtggatctcagcactttccctgtgtctcaggccgactaactttgcataaacaaagcaacaaccgaagctcatagtgggtgaaatcttgc

SEQ ID NO: 351660 - DNA, 111 bp, Homo sapiens; identical to SEQ ID NO: 335080
  chr15:38857279-38857390
  hyper

SEQ ID NO: 351661 - DNA, 300 bp, Homo sapiens
  chr15:39872823-39873123
  hyper
cgccccgtcggcccatttttctttttacaaaacgggcccagtctctagtatccacctctcgccatcaaccaggcattccgggagatcagctcgcccgaaagcccctgcgccaccccgcgggccctcctaggtggtctccccagccccgtcccttttcgggatgcttgctgatcaccccgagcccgcgtggcgcaagagtacgagcgccgagcccgtgcgcgccaaggctgcgtgggcgggcaccgacttttctgagaagttctagtgctcccaagccccgacccccgcccccttcacttt

SEQ ID NO: 351662 - DNA, 247 bp, Homo sapiens; identical to SEQ ID NO: 335084
  chr15:40762832-40763079
  hyper

SEQ ID NO: 351663 - DNA, 384 bp, Homo sapiens; identical to SEQ ID NO: 345468
  chr15:41786420-41786804
  hyper

SEQ ID NO: 351664 - DNA, 43 bp, Homo sapiens
  chr15:41788242-41788285
  hyper
gcttccaggccttccccacccccaggcccgccggggcctcccc

SEQ ID NO: 351665 - DNA, 205 bp, Homo sapiens; identical to SEQ ID NO: 290725
  chr15:41805869-41806074
  hyper

SEQ ID NO: 351666 - DNA, 135 bp, Homo sapiens; identical to SEQ ID NO: 345469
  chr15:41953174-41953309
  hyper

SEQ ID NO: 351667 - DNA, 41 bp, Homo sapiens; identical to SEQ ID NO: 347332
  chr15:43415157-43415198
  hyper

SEQ ID NO: 351668 - DNA, 279 bp, Homo sapiens; identical to SEQ ID NO: 347333
  chr15:43415273-43415552
  hyper

SEQ ID NO: 351669 - DNA, 537 bp, Homo sapiens
  chr15:45492672-45493209
  hyper
cgatcacggcgagctactagggacacaggacctcggcttgtcgcctgaactcttctctgttgaaagccccgcccccttgcaatgtcattgatttgtcattgtttgttctagcctatctccaccctcgcagccatctgagggcacgcaagagcattaatctctgctttctcgattttggtccacacttgcctgcgcaccagacacggtggccgatttctccaccgtggaggctgctcttggggttccccttacctcgcgcctcaaggaagttgtatggtggtgggtcagaactgattttccttcttgtaaaatttaagagctccagtcccagccaaagtcgttcagatagcatgatagtcagggcatggtgagcgtcagagagactttgggccaccattcgggcgtcctcaggggcttcacatcattgcaggcccggcctcataggaatcctttggttgcaaagcactttcatgtcccttcttttgcggtccgtgcgtacagccaagaggagacttcgggctagggagtccacagcgc

SEQ ID NO: 351670 - DNA, 159 bp, Homo sapiens
  chr15:45493371-45493530
  hyper
actctgcgttgtggccgcagcaacctcggttcgaatccgagtcacggcattgtggaaacaatggtacggcaagggcctctttttagacttagaaagccacacattcttctgggaagctaactctaaaagctgttacctggccagggctgaaattataac

SEQ ID NO: 351671 - DNA, 210 bp, Homo sapiens
  chr15:45669920-45670130
  hyper
cggagcgattccagtactagaagcatgggagggtctgctgccagggcagccgagggcggggagcgcagaaactctgcttacaggctgcactcgccccgactcctctccagacgtgggatcccatgttatacttggagtgaatctggtcgctcgctccccgtccccgattcccactttgcttgcctcttctccccatccatctaccccaca

SEQ ID NO: 351672 - DNA, 274 bp, Homo sapiens; identical to SEQ ID NO: 203861
  chr15:45670188-45670462
  hyper

SEQ ID NO: 351673 - DNA, 124 bp, Homo sapiens; identical to SEQ ID NO: 345470
  chr15:45722474-45722598
  hyper

SEQ ID NO: 351674 - DNA, 339 bp, Homo sapiens; identical to SEQ ID NO: 345471
  chr15:45722599-45722938
  hyper

SEQ ID NO: 351675 - DNA, 143 bp, Homo sapiens
  chr15:48009738-48009881
  hyper
cgagtttcaggattctatcaaggaagccaagacctaaggagacagagggatatctatttttacaatatttttctttattttctttcttccttgcgcgtggcaagcttttttttttctttttcttttttcttaccagcctcccc

SEQ ID NO: 351676 - DNA, 120 bp, Homo sapiens; identical to SEQ ID NO: 290783
  chr15:48009969-48010089
  hyper

SEQ ID NO: 351677 - DNA, 208 bp, Homo sapiens
  chr15:48010897-48011105
  hyper
gctcggtgctgagatgtgttacgttctcatctccccatcaattatggatggaaacaaataaggaagagtcaattttgctgagccccttctccggcaacgagaggcgttctgcagccgggagggagccgccgctcgcgccggcagccgctggcaggggcatggtgaggaggaaggtagggaaacttttatttcccgtcttgacagcggc

SEQ ID NO: 351678 - DNA, 118 bp, Homo sapiens; identical to SEQ ID NO: 345472
  chr15:48469946-48470064
  hyper

SEQ ID NO: 351679 - DNA, 52 bp, Homo sapiens; identical to SEQ ID NO: 203870
  chr15:48470094-48470146
  hyper

SEQ ID NO: 351680 - DNA, 158 bp, Homo sapiens; identical to SEQ ID NO: 203871
  chr15:48470215-48470373
  hyper

SEQ ID NO: 351681 - DNA, 77 bp, Homo sapiens; identical to SEQ ID NO: 345475
  chr15:48936649-48936726
  hyper

SEQ ID NO: 351682 - DNA, 350 bp, Homo sapiens; identical to SEQ ID NO: 335110
  chr15:50474768-50475118
  hyper

SEQ ID NO: 351683 - DNA, 227 bp, Homo sapiens; identical to SEQ ID NO: 203880
  chr15:53078992-53079219
  hyper

SEQ ID NO: 351684 - DNA, 159 bp, Homo sapiens; identical to SEQ ID NO: 203882
  chr15:53082144-53082303
  hyper

SEQ ID NO: 351685 - DNA, 102 bp, Homo sapiens; identical to SEQ ID NO: 203896
  chr15:59729554-59729656
  hyper

SEQ ID NO: 351686 - DNA, 91 bp, Homo sapiens; identical to SEQ ID NO: 347343
  chr15:59729815-59729906
  hyper

SEQ ID NO: 351687 - DNA, 75 bp, Homo sapiens
  chr15:60289235-60289310
  hyper
cgtcggtaagtccttggggcaacctggttttcccctgctgacaagctgtgtcagttaactgcaacccaccaagag

SEQ ID NO: 351688 - DNA, 782 bp, Homo sapiens
  chr15:60884567-60885349
  hyper
cggggcgcccgggctcacctttcatcgctgcgatcacaaaatacatcatttaagccgcggtgcggagagcgcagggagagcggatggtccgaccccggagccccctctgccgccgccgcgccgccgccgcccgagccacagcagcagctgccgcagctgcccgcccgccgagagccatcccgagccataagaggctccatgtgaccggctgacatcacggccgccgctctgtttacaccgcgcccctccgcttcctcccggggcgggaggcgggaggcgggaggcgggaggcaggcgcgccccagcgccgcgccccgccccgcccccgcgggcaggtgagtagcagcggcggctctgctggcccaccccggccgggcctgccctcccgcgccccgggccctcgcccgggcgcccgccttcccctcgccttcgggatcacctgtggccgccggtcgcttttctgcacgcagcgccccgcggaacgcgcctctgaccactttctgcccccactcggtggggcaagaggctcgcaacccgacgccactctcccgctggcttgccggagcactcgggggcgataaatgcgccagctcgttggtggaaaagacaggtttggtctggggagctacggtcacccgcatttcctagagtgccccagctctaatcggaaggtacggcccacttctgggccgtggagaacgaagccactgggaccgtccggggagtggagtaagctcctccgaagtctttctggagagactcggcctgggcgggggaactcc

SEQ ID NO: 351689 - DNA, 376 bp, Homo sapiens
  chr15:61519485-61519861
  hyper
cgctcgcattccaaatccaccgtctcagggtctaaatatactctttgcagccaaaagctccccgcacacaaactcaccgagctagcggcaggtccaggcccccagccctcatccccttcccttttgtcccagccctcgccgcccccctcccgctgaaaccgcggttcgccgcggtcaccctttggaaatcgcctttaattaaatgtttttcgcgtgtgtcatcctgatggcttttactgtactcgaattccgtgaatgggaaagcgcctggacagggggtgtggctaaggtggggggggggatactgtaaaacagccagcacatgatcagccatattcctacctccaactacaacatcgagaggaagggagcagtt

SEQ ID NO: 351690 - DNA, 97 bp, Homo sapiens
  chr15:62359006-62359103
  hyper
cggagagagaaagaactgggtctccaaaccttgctcagcaaatccagccacgtggcagagggacagggaagagcctggcgtcaggttaccaggcagc

SEQ ID NO: 351691 - DNA, 381 bp, Homo sapiens
  chr15:62359104-62359485
  hyper
cccctctgctcggcccactggcaagcgctcccagcggcaggtataaaagctcaggctggcagtccttgaacactggtgctgaaccccgccgcgcgcgctttgaatttcccagccgctaagcgcctctcctggtcggtgtcccaggcagaaaggtgcagagacccatctgacgcaggactccaggtattttaggagggacccatcggcttgcttaattccctgggggattcgtctgaggctctttgcctctgcaaggggagaaccagccacagtttcccggaaggaataacaattactttaattctagctgaggactagactgctatggtccaaagagtcaggaaacgattgcaaggcaatcgttggcacagagaacagagc

SEQ ID NO: 351692 - DNA, 114 bp, Homo sapiens; identical to SEQ ID NO: 347344
  chr15:62359741-62359855
  hyper

SEQ ID NO: 351693 - DNA, 87 bp, Homo sapiens
  chr15:62456599-62456686
  hyper
cggcgactccttccagcccgcagcgcgcgactcagcagcccgtcggggacgcgcaggaggcggcagcggcggggccccgcagcgagc

SEQ ID NO: 351694 - DNA, 130 bp, Homo sapiens; identical to SEQ ID NO: 203914
  chr15:62457008-62457138
  hyper

SEQ ID NO: 351695 - DNA, 257 bp, Homo sapiens
  chr15:62457296-62457553
  hyper
cccagaccctgtaaacgtcccccacgtgtttaagaccccagaccagttccagccttcctctcccctgcacccacaacaaatcagccccgcttcagacctttctctcttcttcagtgtctctggatctggttgcaagctcagtgccagtggcctctagcccgctgccgaggcgccaccttcagtactgcggccaggagagtggcgctcccctcttataccgtaggctgagtcccgcccagccgccagcggcccaaccc

SEQ ID NO: 351696 - DNA, 38 bp, Homo sapiens
  chr15:62684313-62684351
  hyper
ccgcggctgcgtgttctgctctcgcagctcgtagaggc

SEQ ID NO: 351697 - DNA, 34 bp, Homo sapiens; identical to SEQ ID NO: 347345
  chr15:63779725-63779759
  hyper

SEQ ID NO: 351698 - DNA, 71 bp, Homo sapiens; identical to SEQ ID NO: 347346
  chr15:63795400-63795471
  hyper

SEQ ID NO: 351699 - DNA, 350 bp, Homo sapiens; identical to SEQ ID NO: 203920
  chr15:63795501-63795851
  hyper

SEQ ID NO: 351700 - DNA, 338 bp, Homo sapiens; identical to SEQ ID NO: 347348
  chr15:63795894-63796232
  hyper

SEQ ID NO: 351701 - DNA, 137 bp, Homo sapiens
  chr15:64443636-64443773
  hyper
cgtccttggtaggcgcttaactcaggttgggtgacattttcgctcgccagttcctggcatcagtgagtgctccgtcaatgtttgacaaacggttgactccactgccccgcgctgtgggcgcactagacttcgggggc

SEQ ID NO: 351702 - DNA, 194 bp, Homo sapiens
  chr15:67357339-67357533
  hyper
cgcacacgttcccgaggctctcggccggtgtgatctcaccgactagagaataaaaacagcccaggggcgccggcgccggccaagggccttgacggggatcagcaagcgcgaggccaagtgcgggccccaacttcctgggcccgggccttccgcgcgccccctctcgggctcgggtcctctccagggtgcactcg

SEQ ID NO: 351703 - DNA, 189 bp, Homo sapiens
  chr15:67357544-67357733
  hyper
cgcttacttgctgcgagtccaaccctctccggcccgcaactccaaccgagccgcccgagtgtggactccgagagcggacgccacgggccgcgctcagccctcccgcccgaggcccctctcgccgtgtttcccaggacttcctccccgcgcccgcccgacttcaggtcggggccgcgcagggtcccgcgc

SEQ ID NO: 351704 - DNA, 40 bp, Homo sapiens
  chr15:68125183-68125223
  hyper
cgagcccagcaaacggcttgcaggcatcattacatggagt

SEQ ID NO: 351705 - DNA, 240 bp, Homo sapiens
  chr15:68127252-68127492
  hyper
cggggaagttacctccggggcgctcacagacagggcgccctgccgggaatcccaggttcaaccagaattgtccctttagatggcgcgggcaccgccggcctggcctggcctgggagcgctgcggcagggcggaggtctcagggagtaaggtggtctccgccgggcaggcttggaaaggaaggcgggacttggagagctcggtcacagacggcctcccgtctgccccgccgctacccgaaa

SEQ ID NO: 351706 - DNA, 92 bp, Homo sapiens; identical to SEQ ID NO: 203939
  chr15:68128502-68128594
  hyper

SEQ ID NO: 351707 - DNA, 287 bp, Homo sapiens; identical to SEQ ID NO: 335155
  chr15:68347714-68348001
  hyper

SEQ ID NO: 351708 - DNA, 52 bp, Homo sapiens
  chr15:68723471-68723523
  hyper
cggggagcccggtgtgggacggccggggccagggtaccctagggcggagagc

SEQ ID NO: 351709 - DNA, 109 bp, Homo sapiens; identical to SEQ ID NO: 290942
  chr15:68724333-68724442
  hyper

SEQ ID NO: 351710 - DNA, 188 bp, Homo sapiens
  chr15:68724480-68724668
  hyper
cgcggcgcctgcagcctgcactgcgcggggcgccgggctccctgacagctgcggctcattcagaggaagtgggagggctcgagcggaggggaggggcgccggacaccactccggctcgggctctgggccagtctcggccgctctgccacctgggcaggcggcgcgctgcctcgacgcgcctgtgcagc

SEQ ID NO: 351711 - DNA, 234 bp, Homo sapiens; identical to SEQ ID NO: 335158
  chr15:69109452-69109686
  hyper

SEQ ID NO: 351712 - DNA, 263 bp, Homo sapiens; identical to SEQ ID NO: 335159
  chr15:69114222-69114485
  hyper

SEQ ID NO: 351713 - DNA, 162 bp, Homo sapiens
  chr15:69366376-69366538
  hyper
cggagatgggctgtggagggggacgttgggaactgcccgaccccattctcgccttttcccgctggatgtgcagctttcggaacgtgcaggggcgggagtgtctacaacctaagaaaagggccgcggtggggagcccggagcagggctgggtgcagggagcgc

SEQ ID NO: 351714 - DNA, 65 bp, Homo sapiens
  chr15:69366730-69366795
  hyper
tcggggcaggaaagcaggctcctgtctctccaggatccagcctcccgatcaccgcgctagtcctc

SEQ ID NO: 351715 - DNA, 193 bp, Homo sapiens
  chr15:71184276-71184469
  hyper
cgcgtgtccaggcggcctgcttggtctccctcctctcccctcttaggtgccggggcgggcacccggtgcagggtgggcacggcgcctgccaccagcctcaggcgctgggagaagcgcaggttcttctggataaccgaagagacgtcaaaacaggctggggcaaagtggtcagagcagatgaccgagcggtcat

SEQ ID NO: 351716 - DNA, 766 bp, Homo sapiens; identical to SEQ ID NO: 290974
  chr15:71184499-71185265
  hyper

SEQ ID NO: 351717 - DNA, 127 bp, Homo sapiens
  chr15:71185295-71185422
  hyper
ctactttctctttcttcccactggtactctttctgactggcgtctttgtcctaggagatgggctgtattattaggaccggcaccgctgggtctactcaagctattgtctgaccagggtttgaggttc

SEQ ID NO: 351718 - DNA, 587 bp, Homo sapiens; identical to SEQ ID NO: 345477
  chr15:71407569-71408156
  hyper

SEQ ID NO: 351719 - DNA, 79 bp, Homo sapiens; identical to SEQ ID NO: 347351
  chr15:72612906-72612985
  hyper

SEQ ID NO: 351720 - DNA, 448 bp, Homo sapiens
  chr15:73660925-73661373
  hyper
cgcccccgcggggaacaatgggcgccggccggagaggctctgcggccgcggcgctcagggaaccgctccggagtgcagagcgcacggcccgcgcgggtcccgggcgtgcgtcccgcgggagggctggctgtccgtctgtctcgccgcccgggctttgtggctggccacccgcgagctcgcctcgcctcctctgccccggcccgtccggcccgtcccggggctcccgccgcaaccgagcggagcccagcgacccgccgggcttacatcagcggccgcctcccccgaagcgccctccggcagcgctcgggctcccgcgccccggaatattcatgaagccgccgcagctcgcgggttgccataggagcggctccagcagccgggcctgcctacctgggcttcttaaaggggcagcggcgcacgggccgggggctggaaaggggcggggggc

SEQ ID NO: 351721 - DNA, 264 bp, Homo sapiens
  chr15:74988539-74988803
  hyper
cgtcttggctggaatcggggctctacccacgactccccagcctcgatgcctgggcccccctcttgcaggctcgatgaaaagcacccgcttcccctcctgttaccccagcgccaatcgcagagctggagcggaggactttcagggaggcctggtgacgtgacagcccctccgtgctaaactgcagctgtgggacttaataagtgcgacaaccccctgatggattaaagaaaacaagatattcctgccgtggtcgatcttcaaagc

SEQ ID NO: 351722 - DNA, 49 bp, Homo sapiens
  chr15:75250996-75251045
  hyper
cggccctcggtccctgctgttcagaaccgggatttaccctcttaccact

SEQ ID NO: 351723 - DNA, 86 bp, Homo sapiens
  chr15:75251811-75251897
  hyper
gtgagggaggaaggatggggtgctgtgaattagggtaatgtggcaggcctggaggaagctggagtgggagagagcgggcagcgagc

SEQ ID NO: 351724 - DNA, 191 bp, Homo sapiens; identical to SEQ ID NO: 335181
  chr15:75976190-75976381
  hyper

SEQ ID NO: 351725 - DNA, 134 bp, Homo sapiens; identical to SEQ ID NO: 203983
  chr15:76629531-76629665
  hyper

SEQ ID NO: 351726 - DNA, 67 bp, Homo sapiens
  chr15:76638250-76638317
  hyper
cggttccccgttgggaaagagcgtgtttaagttaaggcgtggtttgagagtagctaaccagagatca

SEQ ID NO: 351727 - DNA, 86 bp, Homo sapiens
  chr15:76639126-76639212
  hyper
cccgagccgcgcaggctcccggctgggtggggcctgggtttgcttcttacgcctcctcctctccgggacgagggggcaatgagacc

SEQ ID NO: 351728 - DNA, 46 bp, Homo sapiens
  chr15:78236702-78236748
  hyper
cggccggcctgcgctgtcttacccgccccgtacccccgcccctgtc

SEQ ID NO: 351729 - DNA, 60 bp, Homo sapiens; identical to SEQ ID NO: 203990
  chr15:79383268-79383328
  hyper

SEQ ID NO: 351730 - DNA, 62 bp, Homo sapiens
  chr15:79384146-79384208
  hyper
gcgcagccctgtgaaggaaagacaccatctttccgcacggaaactgcgtatacccctccccc

SEQ ID NO: 351731 - DNA, 1218 bp, Homo sapiens; identical to SEQ ID NO: 335194
  chr15:80215312-80216530
  hyper

SEQ ID NO: 351732 - DNA, 128 bp, Homo sapiens; identical to SEQ ID NO: 335195
  chr15:80352864-80352992
  hyper

SEQ ID NO: 351733 - DNA, 196 bp, Homo sapiens; identical to SEQ ID NO: 347353
  chr15:81294105-81294301
  hyper

SEQ ID NO: 351734 - DNA, 194 bp, Homo sapiens; identical to SEQ ID NO: 345478
  chr15:82339684-82339878
  hyper

SEQ ID NO: 351735 - DNA, 59 bp, Homo sapiens; identical to SEQ ID NO: 347355
  chr15:83951722-83951781
  hyper

SEQ ID NO: 351736 - DNA, 227 bp, Homo sapiens; identical to SEQ ID NO: 204012
  chr15:83952822-83953049
  hyper

SEQ ID NO: 351737 - DNA, 99 bp, Homo sapiens
  chr15:88801240-88801339
  hyper
gaagaaagggttaggggagtccgagcaggcagacacactacagcattcacacgcagaagaaagcagggttctccttcccgagcttggaggagggcaggc

SEQ ID NO: 351738 - DNA, 493 bp, Homo sapiens; identical to SEQ ID NO: 291111
  chr15:89437837-89438330
  hyper

SEQ ID NO: 351739 - DNA, 250 bp, Homo sapiens; identical to SEQ ID NO: 204020
  chr15:89438421-89438671
  hyper

SEQ ID NO: 351740 - DNA, 107 bp, Homo sapiens; identical to SEQ ID NO: 204021
  chr15:89438672-89438779
  hyper

SEQ ID NO: 351741 - DNA, 101 bp, Homo sapiens; identical to SEQ ID NO: 345482
  chr15:89438863-89438964
  hyper

SEQ ID NO: 351742 - DNA, 34 bp, Homo sapiens
  chr15:89942592-89942626
  hyper
cgggcccacgaccccaaatgaaacatctttcact

SEQ ID NO: 351743 - DNA, 109 bp, Homo sapiens
  chr15:91427360-91427469
  hyper
cgcggacaccctgggcttccctgggcccagcatctgcctggggcctcgccctgggctccccctcctgacccccaccttgcgccccttcccggtgttcccggggcgctgc

SEQ ID NO: 351744 - DNA, 77 bp, Homo sapiens
  chr15:91427979-91428056
  hyper
gggtgtccctgtaaggggtggtgggtggaagggcctggggagggaggctccaggttggctcctgttcccgaacgtgc

SEQ ID NO: 351745 - DNA, 103 bp, Homo sapiens; identical to SEQ ID NO: 347360
  chr15:92459227-92459330
  hyper

SEQ ID NO: 351746 - DNA, 200 bp, Homo sapiens; identical to SEQ ID NO: 347361
  chr15:93199039-93199239
  hyper

SEQ ID NO: 351747 - DNA, 460 bp, Homo sapiens
  chr15:96873798-96874258
  hyper
cgcgcgcgcgcctggccaggccaaccccggctgctgccttataaggcgcgccgtcgccatggcaacgtgcgctaagttgcagcagtcgtgtcaaagttcactatatagagagctcagtgagctgatcgcggagaagccacttctgccagccccggcgcctataaatcgcattccctcccgcgcccccctttttagcatatttgatcactttgattctctgttcttttctctccgcggtgtgtgtgtgcgtgcgcgcgtgtgtgttttcttcttctcctcctcctctccccgagttgcctcctttctccgggtgccgtactgccttttttcccctctttcattctttctctccgtctttttctcccccctctgcgcacgaaggatgtgcttctaggtggtgatctgccctcctctctctcttttatcatttctcccccgccgccggcgagttgactctttc

SEQ ID NO: 351748 - DNA, 159 bp, Homo sapiens
  chr15:96874514-96874673
  hyper
gcggcggcggcggcccagcgccaggacgacgccgcgcagcgcccgacgcggaccactttcatgctgattcccccggacccgggcagcgctccggccactccgcgggccgccggcctccgccccggcctgcctggctccctgggcgcgcccgcacccggc

SEQ ID NO: 351749 - DNA, 134 bp, Homo sapiens
  chr15:96960242-96960376
  hyper
cgtactatttgagtggcaggcgacgcctttccccactctcggtatttatgttgcaccgacggcacttaggagagcttagttttagatgcggcattaatcttcacttgttaagagatagtctgtcagcctttacc

SEQ ID NO: 351750 - DNA, 99 bp, Homo sapiens; identical to SEQ ID NO: 291180
  chr15:96960409-96960508
  hyper

SEQ ID NO: 351751 - DNA, 289 bp, Homo sapiens
  chr15:96960826-96961115
  hyper
ctcccttttaaattatttcctgcccagttatttttcccccaattaatccagaatagttttctcatctgctccagatgcacgcaaactgcagagctgaaatgaactgaactaagagcggaattgaaatacaccaggggtttccctgcaggaattgttccaacgaggtatccacgggtttcaagatccgttgaaatgcttcaggtgtggtttgcattctcaccgaccctcgggccagttccctcgcccccaaccgccgttatttgttccccccacctacttcaatagttgc

SEQ ID NO: 351752 - DNA, 324 bp, Homo sapiens
  chr15:99090794-99091118
  hyper
cgtcatattcagccctgtttaattcccactgtcttgggtctagaatttaggcttttgagaaatctttattgaattaatgaaaactcaaagaccacgattctgcattcccccaaatcctgaagtgcagtaggagcccatgcagggcttgggacgggctttttgcctcagcagccaggacagcctctgcatccgtgaccacctccccgcccccctcgcattcccccccatcccctggtgatatccttctagcgcaggctcgtgctctggaggcggggtggggccgggattctgcagctgtaaccaactcccccgctgggggcatgg

SEQ ID NO: 351753 - DNA, 236 bp, Homo sapiens; identical to SEQ ID NO: 204059
  chr15:99091372-99091608
  hyper

SEQ ID NO: 351754 - DNA, 97 bp, Homo sapiens; identical to SEQ ID NO: 204070
  chr15:100881161-100881258
  hyper

SEQ ID NO: 351755 - DNA, 468 bp, Homo sapiens; identical to SEQ ID NO: 345483
  chr15:100882092-100882560
  hyper

SEQ ID NO: 351756 - DNA, 547 bp, Homo sapiens; identical to SEQ ID NO: 335243
  chr15:100889946-100890493
  hyper

SEQ ID NO: 351757 - DNA, 497 bp, Homo sapiens; identical to SEQ ID NO: 335245
  chr15:101458286-101458783
  hyper

SEQ ID NO: 351758 - DNA, 693 bp, Homo sapiens; identical to SEQ ID NO: 291211
  chr15:101459313-101460006
  hyper

SEQ ID NO: 351759 - DNA, 50 bp, Homo sapiens
  chr15:101460335-101460385
  hyper
ggaaggccggggtcagcgaggagacgctggtggagaatctgagaaccccc

SEQ ID NO: 351760 - DNA, 143 bp, Homo sapiens; identical to SEQ ID NO: 291213
  chr15:101513869-101514012
  hyper

SEQ ID NO: 351761 - DNA, 61 bp, Homo sapiens
  chr15:102028780-102028841
  hyper
cgacaacccagcggtgtagacattgccactgactgcaaaggagcttgtcaggggagcgact

SEQ ID NO: 351762 - DNA, 502 bp, Homo sapiens; identical to SEQ ID NO: 291217
  chr15:102028992-102029494
  hyper

SEQ ID NO: 351763 - DNA, 142 bp, Homo sapiens
  chr15:102030030-102030172
  hyper
ggcgcgttcccgcccccgggcccgcgctcctgcgaccgggctccggggccgagagccgtccgggaggcccgaaacgccccccaccgggggaacttccccgccgacttctggggctctcgggacgcggtgccgccccagaggc

SEQ ID NO: 351764 - DNA, 62 bp, Homo sapiens
  chr16:745060-745122
  hyper
cgtgatgcgtacacacctgtggttgcaccagaggggacccccaccttcaaatcacctggccc

SEQ ID NO: 351765 - DNA, 97 bp, Homo sapiens; identical to SEQ ID NO: 291235
  chr16:745316-745413
  hyper

SEQ ID NO: 351766 - DNA, 48 bp, Homo sapiens; identical to SEQ ID NO: 345484
  chr16:2042503-2042551
  hyper

SEQ ID NO: 351767 - DNA, 208 bp, Homo sapiens; identical to SEQ ID NO: 335262
  chr16:2301873-2302081
  hyper

SEQ ID NO: 351768 - DNA, 274 bp, Homo sapiens; identical to SEQ ID NO: 291274
  chr16:2391769-2392043
  hyper

SEQ ID NO: 351769 - DNA, 102 bp, Homo sapiens; identical to SEQ ID NO: 204091
  chr16:3078252-3078354
  hyper

SEQ ID NO: 351770 - DNA, 335 bp, Homo sapiens
  chr16:3078384-3078719
  hyper
ctggcggatggcgcgcagcagctcccgagacagggagtctcgctccagcgagacgcggttgagctgcagggacagctccagggccctaggcgggcaggagcagaagacgcgtttgagggcgctagggcctcagggagccggggtggcgggggacttctgtacccgggcgggaggagggctgcaaacacctagatcaaggaggtcagggggcccctgggtgggagtggggatcattataacccgtatcagaagaggaatcaggagcccaggagggcccagagggcgctggggcggtggtcaatggcttgaggcttacttgttcacggcctcgtccc

SEQ ID NO: 351771 - DNA, 304 bp, Homo sapiens
  chr16:3208795-3209099
  hyper
cgggacccgggcggggaggggtaggggtggagtgaaggcggggtctgggggggtgcgcgtggacggggagagtggaaccgcgggtgtggacctccaagtacagacgtcagagaacgtttgtcgtcctggctcgttggtctaggggtatgattctcgctttgggtgcgagaggtcccgggttcaaatcccggacgagcccgcttttttttttttttctgaacaccatcattttctcgcggtgaagattgaggagcttcacggagtctcggccgcagggaacttggtctctccgtggcagctgcag

SEQ ID NO: 351772 - DNA, 212 bp, Homo sapiens; identical to SEQ ID NO: 345485
  chr16:3222239-3222451
  hyper

SEQ ID NO: 351773 - DNA, 48 bp, Homo sapiens; identical to SEQ ID NO: 204097
  chr16:3238043-3238091
  hyper

SEQ ID NO: 351774 - DNA, 282 bp, Homo sapiens
  chr16:4165534-4165816
  hyper
cgcctagaggcccgggacctgctcctgtcctaaggggcggctccagcacgcgacctggacaggcaccatctgttcctgtggttcccggctcagcggtgctcccaccgcccccaccgcccccaccttcgaggcgcacgagaaccgctcgggacggacctagaacgcccgggggtccccgccgcgtggccgccgtggctccgggaccgctttgctcgctcgccttccgcgcctctcgccccgagggtggcctccgcgccgcgcggcttctcctcctcgcgcgct

SEQ ID NO: 351775 - DNA, 1114 bp, Homo sapiens
  chr16:4165852-4166966
  hyper
accttgagcgctcccagccccgcgagccgcctgcgcacaaacaactccgctggcggcgcggagccctccatcctgcaggagccgcgctccgatgcgtcaaaggcggcgcgcggccggccccgggcccggaccccgacccggagcagcgagcttcggcgggcgcccccggctcgcgctccccggccgccccccgcgctccgggccggccctgcccgcggcggcgggcgctgggggtgggggcgccccgggctgcgagtgcgcggagcccgtcggcgcggcccgtctagtggggcctgcttccccccgagtgcgccgccgctcccgccgcggccgcagctgtcccgggaccgagcgcgtggaaccacggacgcgggcccctcgccgggcggcggtgcagacgctgccgcagagccgggctcccgcgacgccggccgggacgcccgcccgcccgcgcccacgccgggggccgcctccccgagctagagatgcggccgccgccgcgcccgccgccgtgtcccccgcggccgctgcctcatgtcggaagagctgccgccgccaccatctccggcccctgccccgcccgctgtcactgacagacgcgcgcccgcgccgcccctcgcccagccgcagcgcgcacgcgcggcccgcgctcgccgccaccgcctcctggccccggacacgcgcacgggccgcgcgccgccccgccttggtgcgcgcgctgggctggggctgcggggcggggcggggcggggcggggcgcgcgctcggctccgccccccgccccgggcggcgccgcttctaggcggcgggctgtggccgctgtccgcgctccgggcgctgtgggcccgccctccctcggcgtcccagaggccgcgcgccgcccggggtcccgaccctgcggagagacctgaaggcgcctgccgtggaagaagccgctggccgcaacgtttgggaaatcaaaatgttgccttcccactcggcacgcctttgggataaatcgaagtttccaaccgttggatttccctcccgggaggctccccttgctctgtaagcaatgaatgcgggccccggggcactcggcctgccctggacctgctcacggggcgaccttcac

SEQ ID NO: 351776 - DNA, 543 bp, Homo sapiens; identical to SEQ ID NO: 345486
  chr16:4233245-4233788
  hyper

SEQ ID NO: 351777 - DNA, 187 bp, Homo sapiens; identical to SEQ ID NO: 335276
  chr16:4234090-4234277
  hyper

SEQ ID NO: 351778 - DNA, 48 bp, Homo sapiens; identical to SEQ ID NO: 345487
  chr16:4363872-4363920
  hyper

SEQ ID NO: 351779 - DNA, 158 bp, Homo sapiens; identical to SEQ ID NO: 345488
  chr16:4364080-4364238
  hyper

SEQ ID NO: 351780 - DNA, 341 bp, Homo sapiens; identical to SEQ ID NO: 291310
  chr16:4377552-4377893
  hyper

SEQ ID NO: 351781 - DNA, 890 bp, Homo sapiens; identical to SEQ ID NO: 345489
  chr16:4986642-4987532
  hyper

SEQ ID NO: 351782 - DNA, 814 bp, Homo sapiens; identical to SEQ ID NO: 335283
  chr16:8767901-8768715
  hyper

SEQ ID NO: 351783 - DNA, 298 bp, Homo sapiens; identical to SEQ ID NO: 335285
  chr16:9186882-9187180
  hyper

SEQ ID NO: 351784 - DNA, 429 bp, Homo sapiens; identical to SEQ ID NO: 345490
  chr16:12897365-12897794
  hyper

SEQ ID NO: 351785 - DNA, 450 bp, Homo sapiens
  chr16:19566591-19567041
  hyper
cgtcttcgctccgccgccttctggagtcctttctgcccctagaggacgcaggtgagctaagcagcagtcatgccctttaccatcatgacgcccgcaggcgggaccacccggcactgtagacagctgccctttacaatcatgactcatagaaactacggcactctggccgtggccgacgttgctcctccgaagcatggcgccggcgggagttgtaacccgggctgtccggagcggggagctgcccctcacaagcatggcgtcagctgaaaatgaagcctgtgctgtgcggagcgtcgcctgcccctcacaagcatggcgtctgcagaaggtgctgtgcggccgctgcggggcggccagctgcccttcacaaacatggcggccgaggggtgcggggagtggcggggtaaggatgggaagccgagcagacggccccagaacaagcggtcatgt

SEQ ID NO: 351786 - DNA, 33 bp, Homo sapiens
  chr16:20085432-20085465
  hyper
gctatccccaatctccaaccccgagggaggggc

SEQ ID NO: 351787 - DNA, 56 bp, Homo sapiens; identical to SEQ ID NO: 335300
  chr16:21964488-21964544
  hyper

SEQ ID NO: 351788 - DNA, 400 bp, Homo sapiens; identical to SEQ ID NO: 335306
  chr16:25078047-25078447
  hyper

SEQ ID NO: 351789 - DNA, 443 bp, Homo sapiens; identical to SEQ ID NO: 291420
  chr16:28891072-28891515
  hyper

SEQ ID NO: 351790 - DNA, 88 bp, Homo sapiens; identical to SEQ ID NO: 335311
  chr16:29607025-29607113
  hyper

SEQ ID NO: 351791 - DNA, 533 bp, Homo sapiens; identical to SEQ ID NO: 347376
  chr16:29624651-29625184
  hyper

SEQ ID NO: 351792 - DNA, 188 bp, Homo sapiens; identical to SEQ ID NO: 204162
  chr16:30620879-30621067
  hyper

SEQ ID NO: 351793 - DNA, 891 bp, Homo sapiens
  chr16:30621123-30622014
  hyper
cgcgccccgcggcagcggatggggccggcctcaccgagcgcgcccaggtgaccgtaggtctcccgcatcacgtcccggtacagggccctctgcgcgggccgcaggcagccccactcctccggggagaagtacacggccacgtccacgaacttcagagccctcggcctcctgccccttttccgactgggtctggcctttcctggtccctgcgcagggagcggagccgaaggtggcgccatgggacccgagaagccggcgccacggccttccgtgtccaggcctcggccctcgggcgctggcggcccctgggatcgaggagcccctgccggaccagggctgagcgtggccggggaggcccggagggaatcggaattggtcgcccgcggggctaacggaaaccttttgctgttattcaggaaactcctgcccgaacttgggtgaaaggcaccggaagatgccttcggggaaaatggcggcgctgctaccgcaccgcctttgcctggaacacaggcagcttccagctatcgattttattgaccggagcgccatgccggcttcctaacctctttgccctcaagtgtaatggcgctgcgattgggcttcacgccgtcttttttcccctccccaatacgcgcgttcattggacgagagccgaagatcgagcgttctgattgggtgctagcaaaggcggtccgtttgaacgaagccaagagctgcataagggcaggaagctggactgctaggatcaggcgactacaaggagttgtgaagcgacttgcaccgacctgggggcagcaagaggccccggggctgctttccgctgttcgactctggcaggctcagccaatcactgaaggagggaacgatttgagcgatggagccactctggcc

SEQ ID NO: 351794 - DNA, 549 bp, Homo sapiens; identical to SEQ ID NO: 347378
  chr16:30959765-30960314
  hyper

SEQ ID NO: 351795 - DNA, 464 bp, Homo sapiens
  chr16:31213480-31213944
  hyper
cgactgaggaggggcctggatcccagctggcgcggctccagagcctggaaggatatgggccaagtgatccccttcccttcccttcccgccgtggggccggggtcccgttggtcggtaggccaagcgtggggagcctcctttccggtagagcagctttgtttaggggtaggaggaacagaaagcggaagagcccgcggggtaagcgctggtgtgggtggaggggaaagacggggtggaggggaacgggggcggctcaccctggtgcgtggccgcctgcagctgcccggccatctcctgcaggcccatgtcgcgcagcacgttagcggtgagctcggcgccgtaggtctccaggtagaagctgaccagcttgtcggtgaggtccaaggcgtccatggacagcagcgcgccccgcgggatgcgcccgtagccctcgcgcagcggcaccgacagcagcttcagcttga

SEQ ID NO: 351796 - DNA, 397 bp, Homo sapiens
  chr16:31712178-31712575
  hyper
cggcagctgggaccccgggcgcctcgtcccgtccctgcgcgacgaccttggtcctgccttgagccctctctgggcagtttcgcgcccgcagccccgtgtctccccgcgttgtgcggtgatgacgggaggggccgtaggggagaaccccggctcggggttcgggcgtgggaggagctgtggtccgtggggtccgtagtcctttctttcttttgttaaaaattaaactgaggtttggttaaaacgttaaagattttatctgagcaaataacgacccgtgaatcaggaagccacaaccatggattgtggtttggggtccaccggaggggcttgaaggaaagggtttaataagatgcatgaggaagcaaagccaattcagtaattgattggctacaattac

SEQ ID NO: 351797 - DNA, 304 bp, Homo sapiens; identical to SEQ ID NO: 345492
  chr16:47176468-47176772
  hyper

SEQ ID NO: 351798 - DNA, 65 bp, Homo sapiens; identical to SEQ ID NO: 204185
  chr16:49316711-49316776
  hyper

SEQ ID NO: 351799 - DNA, 156 bp, Homo sapiens
  chr16:49316844-49317000
  hyper
cgatttttcgagaataatttttaccctaagtggattttcgtgccacgcatggacttggaactacacacacgtagtccaaaacgtgaaagtcaaaatgcagctttgccaagtggcagggagaaaggagagctgagaagatgaggagaggaagggcgc

SEQ ID NO: 351800 - DNA, 727 bp, Homo sapiens
  chr16:54319649-54320376
  hyper
gcgccccagcgccaacccctccttccctggctccgcgggctcttaccagctgcgggaagatgggcagctccgcggcgtagggcaggaaggcgccgtagccttgggcggcggcggccgcagcggccgcggcgtagggcgccccgtacacggacgagagcacgttggacagggaccccgaggcgttcagctccgaggctccggcacccaggccgccccgggcccccgcgctgccgccgctgccgccagcggcccccgggcgctcggacgggtaaagcgggcggatgtattggtatcccagctgggggaaggacatggtggcccgcggggcacggacggagaggggggccgacccccgggccgcccagctcagcgccgcccgcgggctccggcgcgcatcgggggctgggccgggcttggggccgcgctgccgcccgcgctgcgctgtgctccgcgttcgcctattgatctgctccgcggcggcgacggcggcggcgagggcggcggcgaggagccaggtcaggtccgaacagattggcggagattcccggggctccgggctctgattgacatttctacggggcgcaagcccctcctctctgcgccgcgctccctcctctcggccgccggagctgcctctgcccgctcctcgctcctcactgccctcctctccccagcagtgtcgcgcctcgcttccttcgccctcctctagttttcactccccctcctc

SEQ ID NO: 351801 - DNA, 206 bp, Homo sapiens; identical to SEQ ID NO: 204201
  chr16:54321080-54321286
  hyper

SEQ ID NO: 351802 - DNA, 229 bp, Homo sapiens
  chr16:54962422-54962651
  hyper
cggaaagccgtgtcccggacgagagccgcggcgacgaagggaacaggcgtggacagaggagccacgcccacgcgcgcccgccccgaaccccgacacccggagaggctcgaccggcgccgacgcggcccgaggcccaggccctagcccacgggacgtctggtcgggcgcggggcaccgccgcgtccgttcggcccacgaggggacacgactagaggggcggacggcgcgg

SEQ ID NO: 351803 - DNA, 367 bp, Homo sapiens
  chr16:54962936-54963303
  hyper
ggcgaggccgccactggccggctgcgcgctcccccaggctcgggccgcctgggccgctccgcctcgcttagacattggccggctggcagccacctcggccccacggtccccgccgccgctgcagccagcttcccgtctccatgacaatagcgcgatcgagaccccgcccctccccgcccctctggcgccgagactcggaggaaagcggggttacgtcaccagggggcggagcccagggaggccagcgcccaatcataggtgaaggaggtgtcaggcactgggctgggcggacccaggggctctcggagaatgtagtctgaaccgctcaggcctcttggtgggcggtgtctgggggaggggagcagac

SEQ ID NO: 351804 - DNA, 106 bp, Homo sapiens; identical to SEQ ID NO: 204205
  chr16:54966659-54966765
  hyper

SEQ ID NO: 351805 - DNA, 114 bp, Homo sapiens
  chr16:55359125-55359239
  hyper
atcctcctcttgtgttctgggggaagccagaaggagcaaggaccagggtaatgtgtcacagcctcctctgacatccccagtccctaaatgagaacgtttcaccccggagtgcac

SEQ ID NO: 351806 - DNA, 116 bp, Homo sapiens
  chr16:55513960-55514076
  hyper
cgtctaggtaagcctttggcaaacagctacaggggtcgtttttgctaatgtaggactttgggaacggtgctctggcacacaatttgggtaaacttatgcgcgcataaggatgggag

SEQ ID NO: 351807 - DNA, 85 bp, Homo sapiens
  chr16:56228284-56228369
  hyper
cgaggggggacgttttaaaacttcagaagtctgtaatcagcagtggcggactcggagcccagtagaagccccagccacctgagct

SEQ ID NO: 351808 - DNA, 57 bp, Homo sapiens
  chr16:56228591-56228648
  hyper
cgcaggaggggaaggaggagggggagaggccagagtctgcaaattaactttgcatcc

SEQ ID NO: 351809 - DNA, 573 bp, Homo sapiens; identical to SEQ ID NO: 335343
  chr16:56390323-56390896
  hyper

SEQ ID NO: 351810 - DNA, 164 bp, Homo sapiens
  chr16:56671950-56672114
  hyper
cgagagtgagaggccgacccgtgttcccgtgttactgtgtacggagtagtgggtccgagggacctaggtgtggacagggacaggcaaggcgacagcgaggagaaacgaaaatcacatcggtggcggttgctctgcacacaactcgctcgctaccgcacgctcca

SEQ ID NO: 351811 - DNA, 122 bp, Homo sapiens; identical to SEQ ID NO: 204219
  chr16:56703438-56703560
  hyper

SEQ ID NO: 351812 - DNA, 216 bp, Homo sapiens
  chr16:56703621-56703837
  hyper
cgcgggcggctcggactcagtgggtcgggtgcaagggtggggcagggtctctgcacccggctccctcccctgactagaaaaggagctgccaactgttgcgctccaccacgccctccacgtgttccactgcctcttctcttctcgcttgggaactccagtctcacctcggcttgcaatggaccccaactgctcctgcgaggctggtaaggaacgccc

SEQ ID NO: 351813 - DNA, 60 bp, Homo sapiens
  chr16:56709754-56709814
  hyper
cgcgaccacctgggaatgggaaatggccctcagggtggcaggggcggcgcgtacctctgg

SEQ ID NO: 351814 - DNA, 45 bp, Homo sapiens
  chr16:66638030-66638075
  hyper
cgcgcgcgcgcgcgtgtgtgtgtgtctgtgtgtgtgcctggagct

SEQ ID NO: 351815 - DNA, 566 bp, Homo sapiens
  chr16:66638452-66639018
  hyper
aagaaggtggagtctgcggaggccccaggccggggagggggcgggtcgggcccagcatcccccgcagccggggtccgagggggaggggcgggctggaggagcgggtgggggcggggcggggcgtggcggcgggggatgcgcccctgcgcgagccagtgtcgcctgccctccttccgcacagcccgggtttccgcttccctccgggcgcgagaagaggggagccaggccgagccccggccctaccgccgccgccgccatgtggcccccagaccccgaccccgacccggaccccgagcctgccggcggctcccgtcccggccccgcggtccccgggctccgcgccctgctgccggcgcgggctttcctctgctctctcaaaggccgcctcctgctggccgagtcggtgagtgcggcgggaccctcggccgccccgctaggactgcgcggctcctttcggaggaggacgtcggggcgcgggtggggtccgggggcggccgccgtgctccgataccccctctccgcgccgcctcggccgacttctctcgggcgcctggcgaagttgggtc

SEQ ID NO: 351816 - DNA, 130 bp, Homo sapiens; identical to SEQ ID NO: 345493
  chr16:67189038-67189168
  hyper

SEQ ID NO: 351817 - DNA, 377 bp, Homo sapiens; identical to SEQ ID NO: 345494
  chr16:67189259-67189636
  hyper

SEQ ID NO: 351818 - DNA, 299 bp, Homo sapiens
  chr16:67197294-67197593
  hyper
cgcgcgtccccgctgcccaacgaagcctgggtcgcgttgcgccgccgccaccctgggctggcagtggagctggagctggagcccgcgctgcccgctgagagcgtgacgcgcgtcctgcagccagccgtccccgtggctgcgctgcgcctcaacctctcaggcgacaccgtaggcccagtgcgcttcgcagcacaccactacgccgcaaccctgtgcgcgctcgaggtgcgcgcagccgcttcggccgagctgaacgccgcgctggaggagctggcggcgcgctgcgcggccctgcgcga

SEQ ID NO: 351819 - DNA, 270 bp, Homo sapiens; identical to SEQ ID NO: 204245
  chr16:67198282-67198552
  hyper

SEQ ID NO: 351820 - DNA, 292 bp, Homo sapiens; identical to SEQ ID NO: 347382
  chr16:67204024-67204316
  hyper

SEQ ID NO: 351821 - DNA, 490 bp, Homo sapiens; identical to SEQ ID NO: 347383
  chr16:67204317-67204807
  hyper

SEQ ID NO: 351822 - DNA, 81 bp, Homo sapiens
  chr16:67433472-67433553
  hyper
agccccgagcgaggcgacgaggagcgcgcgcgccctctgcaggcgctgcggggtgggtcccctggaggaggcagcgctccc

SEQ ID NO: 351823 - DNA, 255 bp, Homo sapiens; identical to SEQ ID NO: 291637
  chr16:67678786-67679041
  hyper

SEQ ID NO: 351824 - DNA, 134 bp, Homo sapiens; identical to SEQ ID NO: 345495
  chr16:68118915-68119049
  hyper

SEQ ID NO: 351825 - DNA, 65 bp, Homo sapiens; identical to SEQ ID NO: 347385
  chr16:68269820-68269885
  hyper

SEQ ID NO: 351826 - DNA, 112 bp, Homo sapiens; identical to SEQ ID NO: 204263
  chr16:68269896-68270008
  hyper

SEQ ID NO: 351827 - DNA, 105 bp, Homo sapiens; identical to SEQ ID NO: 204264
  chr16:68270022-68270127
  hyper

SEQ ID NO: 351828 - DNA, 125 bp, Homo sapiens; identical to SEQ ID NO: 347388
  chr16:68270157-68270282
  hyper

SEQ ID NO: 351829 - DNA, 637 bp, Homo sapiens; identical to SEQ ID NO: 347389
  chr16:68270868-68271505
  hyper

SEQ ID NO: 351830 - DNA, 102 bp, Homo sapiens; identical to SEQ ID NO: 345496
  chr16:68504292-68504394
  hyper

SEQ ID NO: 351831 - DNA, 50 bp, Homo sapiens
  chr16:73100590-73100640
  hyper
ctggaaaggagagggcgcggcgaggggcgcacctcgcgcccagggcccac

SEQ ID NO: 351832 - DNA, 174 bp, Homo sapiens; identical to SEQ ID NO: 335377
  chr16:74659437-74659611
  hyper

SEQ ID NO: 351833 - DNA, 82 bp, Homo sapiens; identical to SEQ ID NO: 204296
  chr16:77246930-77247012
  hyper

SEQ ID NO: 351834 - DNA, 204 bp, Homo sapiens; identical to SEQ ID NO: 204297
  chr16:77247511-77247715
  hyper

SEQ ID NO: 351835 - DNA, 729 bp, Homo sapiens; identical to SEQ ID NO: 335384
  chr16:77756212-77756941
  hyper

SEQ ID NO: 351836 - DNA, 48 bp, Homo sapiens
  chr16:77822069-77822117
  hyper
cgacccaatttcccgactatcccgcccagcctcgaagatgggagggag

SEQ ID NO: 351837 - DNA, 385 bp, Homo sapiens
  chr16:79633949-79634334
  hyper
cgagcgcgctcacacacacacccccccgccctgcccgcgccccccgcgcccgccctccctcccccctgctcacgccaatgtgctccctcgctcgccccggcccctccttgctcgctcgcctccttgcgcgccgagccggcggcttcaggctcgggaagatcctccgcgagctgcggtggcggcggtggtggctgcggcggcgaagctggaggagcccggcccggtgcgcggcgtcccccgctcgccgctccgctgcgcgctttgcataaggaagggctcgcctcgccggcccgggctgcaggcagggcgcgcgcggcgtccgctcggggctggaggcgcggcgggcgtctgtccgggcggcgcgggccttggcacgggggagtta

SEQ ID NO: 351838 - DNA, 394 bp, Homo sapiens; identical to SEQ ID NO: 291732
  chr16:79634364-79634758
  hyper

SEQ ID NO: 351839 - DNA, 85 bp, Homo sapiens
  chr16:79804157-79804242
  hyper
cgtgtgtgcgtgtgtgcgtgtgttcaagggctgggggctcaattgtgagaggtggcccaggggccggttagagactgggaaggac

SEQ ID NO: 351840 - DNA, 101 bp, Homo sapiens; identical to SEQ ID NO: 291736
  chr16:79804457-79804558
  hyper

SEQ ID NO: 351841 - DNA, 97 bp, Homo sapiens
  chr16:79804596-79804693
  hyper
cgccattggtccatccgcctagcaacagccgcggccggaccaatgggagccgcgaagcggccggccccgctccagaaacttggctgcggagaagttc

SEQ ID NO: 351842 - DNA, 67 bp, Homo sapiens; identical to SEQ ID NO: 345498
  chr16:80574541-80574608
  hyper

SEQ ID NO: 351843 - DNA, 72 bp, Homo sapiens; identical to SEQ ID NO: 345499
  chr16:80575052-80575124
  hyper

SEQ ID NO: 351844 - DNA, 322 bp, Homo sapiens
  chr16:80837640-80837962
  hyper
cgcattcccagcacgtccggcgccgacttttacctgtactttctgtactcgaggcggctcgtcgggcgagaaacacctccccgggaccgctacctcccccgccccggctccgcccggcttcctccttcccctccaaggccgcaaagtagatggagtaagagagtgtgtgtgcgagagaaagagaaagagggagcgggcgcgggcgccgcgggaggcggcgggcggcgggcggcgggcgggaggcgcgcccggcccccgccaccctccggccgccgccgccgccgccgcgggctcggcaactccggattgcgcccggccccgg

SEQ ID NO: 351845 - DNA, 762 bp, Homo sapiens
  chr16:80838193-80838955
  hyper
tgttgagtaaactgtgtttttgcagaatgacaggcttgggggctgcctatgcgcagaatcagagcgggcggcggcggggctggcgtaaccggcagcagcggcggcggcggcggcggcggcacgagcgcgggcagcagcgacggccgcgcagcgcgcccgggaggcacggacgcggcccgagcgccgcggcccccgcgacccggcgacccggcggcggtggctgcagccggcaacggctcgccccggcgccgcctgcaggaagccgcccggcgcccgccgccggcccggacgctgctgccactgggcgagtccccgccccccgggagcccggcccggcccccggggcggggaggcgggggctgctgcccggccgcgccccgggggaccggtcccagagtcgactagcgctcgggcccgccccgccaccccgggccggcttcgggagcagctggcggggcccccggggggcggcgggccaggtgcccgccgggtgcgcccgatctggggccgcgaaggggcggccggggagccaggtagagggctgcggctgcagacctcagggaaggggccccagccgagccccgccggcccggggtccccacctacctcctccaccctcgaggggagtggacgccgcctgggagacctggcccctcggggctgcgcggcccctccctccaggctgggttgtaagatgtggaggccacagggaggaaggatgaaatggcccatccagaggcaccatggggatccaggacaggc

SEQ ID NO: 351846 - DNA, 60 bp, Homo sapiens
  chr16:81779788-81779848
  hyper
cggcctgctggataaagggaggtagaaacgctttcagccctccccggtgcttcccggttt

SEQ ID NO: 351847 - DNA, 123 bp, Homo sapiens
  chr16:81780013-81780136
  hyper
gaaatgtagtcgaaacggccgctggggcagagtgagcacccacagtggtgccttctggggagggtcgttttcacgtagtccaagagccaggggtgggaaccgcggggctctcaccccagcgcc

SEQ ID NO: 351848 - DNA, 811 bp, Homo sapiens; identical to SEQ ID NO: 347395
  chr16:84650982-84651793
  hyper

SEQ ID NO: 351849 - DNA, 816 bp, Homo sapiens
  chr16:85202563-85203379
  hyper
cgcgcgcggctccggctggacacaaaatagatagaggagccggccgctattgtgcgcagtttgggacgcggggggaggcggcggcgggcgggagggaggcaggcttggaggaggagggcggggggagggagcgcgcggggagggattcccccgcccgccgcgcgcccgccctccgcccctccccgcccctcccgcccgccgccgccccgccccctcctccccaattaaatgaccccacgccttggcaggcgccggagctcgcacatgcggctgccgctccagccgcccgggccccgccgccgccgccgccgccgccgccgccgccgccgcgttccgggcgcgctcgccgcggcgccgcctcggcccgcgccgccgccggggggtgctcggcaggcccgggggggcgccgctgcgaggggccgtgcgcccgcgcccgcgccggccgcccgccgccaaactttgcggcgcgcacacatgctccaagttgggcgcggcggcggcggcctgggcgggagctgagggcggcccggggcgcgcgggggcccgggcgggcggcgcggcgcggccatgagcgggcggccggccccggtctcccgcaagcagcggctcatggcagccgtgggcgagcgggctgcgggcggcgcgccgctctcctgcttcatctgcggcggcggcatcgggcgcggcaaggagctgaagctgcaggtgaagcagccggcggcgggcgcggggaccccggcgcagcccttcttcccgttcctgcagcagcaggagccggcgcccggcgcgcgcgagctgtccccggccgacggctgc

SEQ ID NO: 351850 - DNA, 177 bp, Homo sapiens; identical to SEQ ID NO: 345500
  chr16:85932121-85932298
  hyper

SEQ ID NO: 351851 - DNA, 245 bp, Homo sapiens
  chr16:86531701-86531946
  hyper
cggcccgcacccgaccaaattttaaaaattgggagggttttggggactgcaatggaaaatcagctggccccggccccagactccgtctacactggcacagacaggtggagtacaaagccggcttcctggatgattcaggccccaaatcgtaggtagaaatgtgcaagtaatggaccttcgatctgctttccctcccttagcacataatccgtagtattcgctgtttcccgttgcccctatagaca

SEQ ID NO: 351852 - DNA, 389 bp, Homo sapiens; identical to SEQ ID NO: 335407
  chr16:86609636-86610025
  hyper

SEQ ID NO: 351853 - DNA, 464 bp, Homo sapiens
  chr16:87417704-87418168
  hyper
cggcgaccacttcgcgccgcggcttttgtggagataggggtcgcccctcgcgcccgtgcgtcccgcttccggcgcccgaaactgtgccgcgccggccggtgagtagaaagatgcgccttacagcctccaaatacagaggcagcagccagaaccccaaagggcgcctagaagcccttttgtccattgaaacaacgcgcgttccatcgtctccgccttatggtaaccaaaaggcccgagctgcggagctctgcagggaccttcggggatcccgagctccctgcggaagccccggggagggcttggaggggcggcggccggcgcggcccaagagatccggggatgcgcgcccggtctggaaagggaggccctgccatgcggcgccgcccaaagggcgcctgttcctgcagctgctgggagccgcgcacgcctgctccagctgggctccgccgaggccgctgagcggg

SEQ ID NO: 351854 - DNA, 50 bp, Homo sapiens
  chr16:87418200-87418250
  hyper
aaggcgtcctctcacctgagcagccgcgcacgtcgccgtgggctcgcctc

SEQ ID NO: 351855 - DNA, 802 bp, Homo sapiens; identical to SEQ ID NO: 345501
  chr16:87525701-87526503
  hyper

SEQ ID NO: 351856 - DNA, 505 bp, Homo sapiens; identical to SEQ ID NO: 335410
  chr16:87526565-87527070
  hyper

SEQ ID NO: 351857 - DNA, 59 bp, Homo sapiens
  chr16:87635912-87635971
  hyper
cggggagcgcggggctgggggcgcggagggcggggcgcccggggtccccgcccgcgcgc

SEQ ID NO: 351858 - DNA, 189 bp, Homo sapiens; identical to SEQ ID NO: 291796
  chr16:87636008-87636197
  hyper

SEQ ID NO: 351859 - DNA, 399 bp, Homo sapiens; identical to SEQ ID NO: 291816
  chr16:89006909-89007308
  hyper

SEQ ID NO: 351860 - DNA, 91 bp, Homo sapiens; identical to SEQ ID NO: 204343
  chr16:89007789-89007880
  hyper

SEQ ID NO: 351861 - DNA, 373 bp, Homo sapiens; identical to SEQ ID NO: 204344
  chr16:89007995-89008368
  hyper

SEQ ID NO: 351862 - DNA, 259 bp, Homo sapiens; identical to SEQ ID NO: 347402
  chr16:89189500-89189759
  hyper

SEQ ID NO: 351863 - DNA, 98 bp, Homo sapiens
  chr16:89641257-89641355
  hyper
cgccggcggggccctgagcctcctcgccctgtcggcggcggtcccctctgaccgcagggtcttcttctagagtcctgatcgccgaggctgagcggagg

SEQ ID NO: 351864 - DNA, 123 bp, Homo sapiens
  chr16:89641704-89641827
  hyper
agccccagacgagcgcggcgcctgcacacaacaggcgcccactaaatgcttgttgatggaggtggcgagtacccgaaaccagcggagcctggaaatgggatcctagagatccgggaagggcgc

SEQ ID NO: 351865 - DNA, 93 bp, Homo sapiens
  chr16:89992765-89992858
  hyper
cgggcgggaaccgcattcgggtcctggaggggcttggaggccccagtctcgcagccccttcatcggggacccccgctcccacctgccttggcc

SEQ ID NO: 351866 - DNA, 307 bp, Homo sapiens; identical to SEQ ID NO: 335424
  chr17:523549-523856
  hyper

SEQ ID NO: 351867 - DNA, 198 bp, Homo sapiens
  chr17:1011791-1011989
  hyper
cggagacaccaagtccctgtctcctggctgggaagagggtggcccctctcttgcggttgccgtggaaacgggggattcctgcccacccgctccagggaggcggcgaggctcgggctgacaggcgcgccaggtgactcctggcacagccgccggagccctgagctgggctggcctggagggggcggccaccactgcccc

SEQ ID NO: 351868 - DNA, 158 bp, Homo sapiens
  chr17:1901335-1901493
  hyper
cgcctccgccccaggccgcgatcgatcccggcctctcccggcctcattaccgagggagagctgccggggctggcaggggagccagacggcggcggagggggcggggaggcctccttggctccctggcccggattaaatatttactatgttttgtttgg

SEQ ID NO: 351869 - DNA, 100 bp, Homo sapiens
  chr17:1901970-1902070
  hyper
ctgcccaagctggcgctgccggagcgcccgggccccgctcccctcacgggcctcgcagcacagacggggacaggggcggcctcgcgcgcacggggacccc

SEQ ID NO: 351870 - DNA, 459 bp, Homo sapiens
  chr17:3867210-3867669
  hyper
aagtccgggaggaccgcgcagagggtgccaggcgtccggtctccccagctggaacccgctcccagcccccagcccccagccccggcgccggcgaaggtggccgcgcagccccgccgggtgccccaggagcatccgaagaggtttccggagccctcgcttcctgcccgcccagagccgggtggggaggcaggaggggaaactgagactgcggcgcgcgcggcccccgctccccggcccggcccggcccgcgcgctcaccgttggggccgtagcgctcccgcgcgccggtcacctgcgccgggctcaggccgccctcggctgtcaccgagaagtggcgcagcacgtcggcggccgggagcagatgcgccgcctccatgccgcccgcccggccgtctgcgccgtccgcaccgtcgaggccgcctctccgccggggggctacaaagcggggcgcgggggactc

SEQ ID NO: 351871 - DNA, 70 bp, Homo sapiens
  chr17:3908060-3908130
  hyper
cgccgggacgcggcggctctggctcggcagcgccacccggtggccggagacagaggcggccgggccgagc

SEQ ID NO: 351872 - DNA, 341 bp, Homo sapiens; identical to SEQ ID NO: 335442
  chr17:4890368-4890709
  hyper

SEQ ID NO: 351873 - DNA, 34 bp, Homo sapiens; identical to SEQ ID NO: 345503
  chr17:4981985-4982019
  hyper

SEQ ID NO: 351874 - DNA, 409 bp, Homo sapiens; identical to SEQ ID NO: 335445
  chr17:6939640-6940049
  hyper

SEQ ID NO: 351875 - DNA, 563 bp, Homo sapiens
  chr17:7165743-7166306
  hyper
cgaggctgcggtgcgcagcagaggtggctcggaggtgagccagcaggtgcgggcggacaggtggggcgcacctgagtatatgtagggcgtcgggggcgcggcccgcgcgccccgggagcgcgggagggggaggcgggaccggaggggcggccgaggatgacctgacgtcaccgaagggacactcacctgaaccggaagtcgtggcccccacccctccttgcccaggtgaggaggaagaaacctgagcaccagggtcacgccccttcgcttgcccggttttgaccgccgctggggaggaggcggtggctccccaggagtcccaagctccgagtcagcccctccggactggatttccctcgaacaccgggaagccccttcctttcttcccaacaggtgcgcctgggacgctgcggggcgcccctgacaagcctcggcgccgccctttccccgccgggttctgtccaaagtgctctctcctcggccctgctttcgcccccacccgctgctctccttttttttcctgtctcctaccctggtcgatcccaccttcgggggccctggct

SEQ ID NO: 351876 - DNA, 355 bp, Homo sapiens
  chr17:7166376-7166731
  hyper
cggcttagcgtggctccccaacagccccaccttcctgtgcccccattccaacccaacatgacttacagcctgaaccctttgcactcaacctccccacctaccactgtcccctccggcatcaaggctcctaactggaggaagaaaccactgggacctaaagccggccgagggtggggagcagggtgagggctaggtcagagtcttggccacacccatcgttcccctcccttagagtcttttcagacctatcctccacctttcccacccctcccccacactcgcccgtttctctttccctcccgggcctgggcttggactgccaattgctgtgcactctgtcacgcctcactgttcc

SEQ ID NO: 351877 - DNA, 70 bp, Homo sapiens; identical to SEQ ID NO: 335447
  chr17:7198346-7198416
  hyper

SEQ ID NO: 351878 - DNA, 1345 bp, Homo sapiens; identical to SEQ ID NO: 345504
  chr17:7254483-7255828
  hyper

SEQ ID NO: 351879 - DNA, 656 bp, Homo sapiens
  chr17:7760506-7761162
  hyper
cgtccgaatcctgcgcggggtgtaacaagcgctcagaccgcgcagcccaggctgcccgcccgcggaaccacagctcccggcagcccgcggggcactcacacaaagcccagaggctgccgggagctgcagttccccaccccctccatcttgctgcttgactgcccctcagtcccagaaccagagcccgtgctaaccccagcactggagctgctctgacgccgactgcaacagccattctcttctcgtagcagcatggtcggtccagctccggccatttgcccggaggcctcctctgggcctttcaacttcctaagcacctttcaggttgggtggtccgagatctcgcgagcgctcccgacctctttcctttcgcgagatcccctctcctccccctcctagtctcctcggcaacggcacagatctcgcgagcttctcctacttctctagcgctgtggctcactgaagcgtactacgccggatgtcttaagatatcgcgagacctttacctctggtttcttacacatcctttagaaactggaatttagcgagaatacattctttcatactgcctcctcccttgtttttctgtctcagagagatagtctgtcctaaatatcccatgtagcccaggccactgaattaaaacggagcgtatt

SEQ ID NO: 351880 - DNA, 392 bp, Homo sapiens
  chr17:7761197-7761589
  hyper
cgcaactcaattacttgatccttatatgccccacgcgggactcatactacgtttcccgtgaacacgtgcagtccaaaccccgcccctgatatttatctcagtggacggtggccggaaaaggacaatggtttccatgtcagcggataaacgctctcccctcggctcccggacgcgacggaggtcgtagtagtagtgagtacgtgctgaggagcaaaggagtaaccaagagatccagtgaccgacagagcaagagccatgccgcgccggggcctggtggctgggccagacttggagtattttcagcgtcgctatttcacgccggcggaggtggcccaacataacaggcccgaagacctctgggtatcttacctgggacgcgtgtacgacctaac

SEQ ID NO: 351881 - DNA, 69 bp, Homo sapiens; identical to SEQ ID NO: 345505
  chr17:8055823-8055892
  hyper

SEQ ID NO: 351882 - DNA, 631 bp, Homo sapiens; identical to SEQ ID NO: 291995
  chr17:8533862-8534493
  hyper

SEQ ID NO: 351883 - DNA, 350 bp, Homo sapiens
  chr17:8534582-8534932
  hyper
cccctgtgcttgcggcagccggcatgtaccgcagcgggacggggttccaccgcggagtcgcgggccctcagcgttgcctgcaggggcggggcggagcgcggtccagagtcctgacgtcacccccggggctgcgcggggttggggccgcggcgctgcgactcacctgcagtgggggaaggaacgcgggggagggcgctgctccgcccatgcgcacagggtttggcccgggacccggctgcgctccacgctgcggccactgtcccgaccccggccccaggcggactctgccgggatcggccgagcgccaggcgcaggacacggtcctccaaggtcgcagttttggtgttagc

SEQ ID NO: 351884 - DNA, 107 bp, Homo sapiens; identical to SEQ ID NO: 335458
  chr17:8901441-8901548
  hyper

SEQ ID NO: 351885 - DNA, 56 bp, Homo sapiens
  chr17:9143010-9143066
  hyper
cggtgaacatcatctccgtgtataagcagggcacgagccgcatccgccgcggtgac

SEQ ID NO: 351886 - DNA, 186 bp, Homo sapiens; identical to SEQ ID NO: 292005
  chr17:9143110-9143296
  hyper

SEQ ID NO: 351887 - DNA, 89 bp, Homo sapiens; identical to SEQ ID NO: 292006
  chr17:9143376-9143465
  hyper

SEQ ID NO: 351888 - DNA, 33 bp, Homo sapiens; identical to SEQ ID NO: 292007
  chr17:9143504-9143537
  hyper

SEQ ID NO: 351889 - DNA, 183 bp, Homo sapiens; identical to SEQ ID NO: 292008
  chr17:9143607-9143790
  hyper

SEQ ID NO: 351890 - DNA, 173 bp, Homo sapiens
  chr17:10632714-10632887
  hyper
cgactaaaaagtttaatgatgctataaagggttttggtcggcttcgtctcctaggccctgagatatgttcagtgtcgtccgcgggccggacgttaacgcaggagccagggccgcttcttctgaggtcccctgggaagttccacgcgcggaaccagccccttccagggtgtgag

SEQ ID NO: 351891 - DNA, 245 bp, Homo sapiens
  chr17:10633350-10633595
  hyper
tagcccccactcagcgacccattcagcccgccccgaacgccgcggggtgtaggcggcgccgtcctggtttcgcggatgggaaagcgagtccctcagggagcgcaggtctcggtggtggacggaagtcgaatttgaacccgtataggttcaactccaaaccctgttttcactaaagctaccttcctcacaaaaaaaaaaaaaaagaagaaagaaaaaaaagaaggaaaaaaggaaggaaggcaggc

SEQ ID NO: 351892 - DNA, 199 bp, Homo sapiens
  chr17:12568526-12568725
  hyper
cgccgtgtcacatttgtccccccaaaaagcatatcctagaaaatgaaagcctttccatttccccgtggaaatgcatctaagtccagtattggagctgcgagatacagaatcgtctctgccagtgccctgagcccctcaaaccgaggggaatgcgtgggcttcggtccgtcggaagcttttcttctcaggggtccagctt

SEQ ID NO: 351893 - DNA, 381 bp, Homo sapiens; identical to SEQ ID NO: 292017
  chr17:12568791-12569172
  hyper

SEQ ID NO: 351894 - DNA, 35 bp, Homo sapiens
  chr17:12569402-12569437
  hyper
attctgggttgttagctgcggtcagctgggctccc

SEQ ID NO: 351895 - DNA, 531 bp, Homo sapiens; identical to SEQ ID NO: 345506
  chr17:12692672-12693203
  hyper

SEQ ID NO: 351896 - DNA, 126 bp, Homo sapiens; identical to SEQ ID NO: 345507
  chr17:12693500-12693626
  hyper

SEQ ID NO: 351897 - DNA, 75 bp, Homo sapiens
  chr17:14212398-14212473
  hyper
cgacgttgccacgtgtccgctcctttcgggagctaggggggcgttggcttggacatcccgttctggaagggtggc

SEQ ID NO: 351898 - DNA, 266 bp, Homo sapiens; identical to SEQ ID NO: 204441
  chr17:15244586-15244852
  hyper

SEQ ID NO: 351899 - DNA, 48 bp, Homo sapiens; identical to SEQ ID NO: 345508
  chr17:16283879-16283927
  hyper

SEQ ID NO: 351900 - DNA, 674 bp, Homo sapiens; identical to SEQ ID NO: 204447
  chr17:16283956-16284630
  hyper

SEQ ID NO: 351901 - DNA, 39 bp, Homo sapiens; identical to SEQ ID NO: 347411
  chr17:16285065-16285104
  hyper

SEQ ID NO: 351902 - DNA, 360 bp, Homo sapiens; identical to SEQ ID NO: 335472
  chr17:16290077-16290437
  hyper

SEQ ID NO: 351903 - DNA, 1754 bp, Homo sapiens; identical to SEQ ID NO: 345510
  chr17:17685255-17687009
  hyper

SEQ ID NO: 351904 - DNA, 367 bp, Homo sapiens; identical to SEQ ID NO: 345511
  chr17:17687055-17687422
  hyper

SEQ ID NO: 351905 - DNA, 811 bp, Homo sapiens; identical to SEQ ID NO: 335480
  chr17:18907431-18908242
  hyper

SEQ ID NO: 351906 - DNA, 355 bp, Homo sapiens; identical to SEQ ID NO: 345513
  chr17:27038294-27038649
  hyper

SEQ ID NO: 351907 - DNA, 71 bp, Homo sapiens
  chr17:27044882-27044953
  hyper
ctgtaacacgatccccggaaattcctggagaagggccgccccccgcccctctcctggcggctccaggcctc

SEQ ID NO: 351908 - DNA, 59 bp, Homo sapiens
  chr17:27332307-27332366
  hyper
cgaggtcccaaccccgggtccggccgccatccggccccgtctcccctcagtaagaacac

SEQ ID NO: 351909 - DNA, 122 bp, Homo sapiens
  chr17:27332733-27332855
  hyper
gggcagccagatgcccgaagctgggcaccgggtctcccttcccacccctggggccccgctcccgcccccgtcctgccgccggatgccggggtcccttaccgtgagccaggagcgccagcagc

SEQ ID NO: 351910 - DNA, 53 bp, Homo sapiens; identical to SEQ ID NO: 347416
  chr17:27940911-27940964
  hyper

SEQ ID NO: 351911 - DNA, 73 bp, Homo sapiens; identical to SEQ ID NO: 204479
  chr17:28088056-28088129
  hyper

SEQ ID NO: 351912 - DNA, 337 bp, Homo sapiens
  chr17:29248950-29249287
  hyper
cgccgcggccgggtccctctccacctgccgggcggagcgcacgggccatgggctgagccccgctgagcccgccgggccggccatgggcgatcgcgagcgcaacaagaagcggctgctggagctgctgcgggcgccggacacaggcaacgcgcactgcgccgactgcggggcggcaggtaagggcgcggcggcgcgggcagcgcgagacccccggccggaccccaggcccacccgactcctcccctcggccccaccgggtcccgccctcggccccctggacccagacgtggcacctgcgggccccgacccctcccacccacaccgtgaacctctcacc

SEQ ID NO: 351913 - DNA, 255 bp, Homo sapiens; identical to SEQ ID NO: 345514
  chr17:29297825-29298080
  hyper

SEQ ID NO: 351914 - DNA, 32 bp, Homo sapiens; identical to SEQ ID NO: 347419
  chr17:29718746-29718778
  hyper

SEQ ID NO: 351915 - DNA, 69 bp, Homo sapiens
  chr17:30846659-30846728
  hyper
ccgccgacagcccctcccagcccgcctgcccgccctccttccggctgtttttgtttgtctgtctttccc

SEQ ID NO: 351916 - DNA, 307 bp, Homo sapiens; identical to SEQ ID NO: 204552
  chr17:33700165-33700472
  hyper

SEQ ID NO: 351917 - DNA, 206 bp, Homo sapiens; identical to SEQ ID NO: 204553
  chr17:33701376-33701582
  hyper

SEQ ID NO: 351918 - DNA, 168 bp, Homo sapiens; identical to SEQ ID NO: 345516
  chr17:33701612-33701780
  hyper

SEQ ID NO: 351919 - DNA, 33 bp, Homo sapiens; identical to SEQ ID NO: 347423
  chr17:33775294-33775327
  hyper

SEQ ID NO: 351920 - DNA, 122 bp, Homo sapiens
  chr17:35078956-35079078
  hyper
ctccctcgccagcccgccagctccctaaggttttgtggttttttgtcaccaccacacctcagtgttgagctaagtgaggacgtccccccagcaaatgtattggacggaaggaaacggtgtgc

SEQ ID NO: 351921 - DNA, 211 bp, Homo sapiens; identical to SEQ ID NO: 292225
  chr17:35291109-35291320
  hyper

SEQ ID NO: 351922 - DNA, 85 bp, Homo sapiens
  chr17:36101946-36102031
  hyper
cgtgtgttcaccgggaagagccgggagagctggttatttttgtttgtttgtttgaaaacacagctcaggttcagaggttccctaa

SEQ ID NO: 351923 - DNA, 202 bp, Homo sapiens; identical to SEQ ID NO: 204562
  chr17:36102080-36102282
  hyper

SEQ ID NO: 351924 - DNA, 145 bp, Homo sapiens
  chr17:36714786-36714931
  hyper
cgaaggggtgggatggcgaagggcaggggcgggatggcgaagggcaggggcagagggctaagttctggggaagaacagaggcaggaggagaacggatggggatcgtggagaggggagcgttaaaatgggccatgcaaagggggag

SEQ ID NO: 351925 - DNA, 415 bp, Homo sapiens
  chr17:36715092-36715507
  hyper
tccatcatcccggaatggggacgggactggaatgaaggactcaagcgctggcatttgatagagcttctatggctgggacaggaagactaagttgatgatcgatccaaccctgttccaagcctgaatggcgggggtgggcaagatcttacccgttgcccagatggcaattctctgccccctccccagcctgtctctgctaattatcctcacctgacggcccctgggcctgcttgaggagcggactcggcgatgccaagctcctgacaggtgggaccatctgccaagcagggccggggagactgttggggctcaggagggaggagctgagaggacttgggggaagggctctcgctgactcagggaaagggatgcagggcaggaaggaactggaactgccccgagggatactgacgac

SEQ ID NO: 351926 - DNA, 77 bp, Homo sapiens
  chr17:36729187-36729264
  hyper
gcgcggccccgccggcgcagccccgcagaggagcggcggaggctggtggctgcgtcgccgcggtcacccgatacgcc

SEQ ID NO: 351927 - DNA, 159 bp, Homo sapiens
  chr17:36829818-36829977
  hyper
cgtggtggggagcgtcggtgcagggcggcggggctgcgcggtgcgcggagggggcgccggcagccggcgtttcttggcggctccccgagccggccctttcgcaggcggccgctctggcccccggcgcaaactcggagtgtccaaggcgaagcccttcgc

SEQ ID NO: 351928 - DNA, 303 bp, Homo sapiens
  chr17:36830051-36830354
  hyper
ccgggctggccgtcgaggggctggccgctggagcctcgggggcggccggcggggggtttccatcgacttcggcaggctggccgggcaggaacggccgcggcgccgtcccgggacccgcgggctcggtggagaggcccgcaggtggcgacggaggccgggaactgggttcctgaggcgggctggcggctgggccacgctgaggctcgagacccggggccgggcgaggcggggccgaggcgaagctggtcgtagattcccgagggtgcgggggcgcagggcagcggcccggaggtgcacaggagc

SEQ ID NO: 351929 - DNA, 226 bp, Homo sapiens; identical to SEQ ID NO: 347425
  chr17:36886750-36886976
  hyper

SEQ ID NO: 351930 - DNA, 90 bp, Homo sapiens
  chr17:37183607-37183697
  hyper
ttggcaactactgtggctactagtccaggaggctcagcctctggagtgggtccaggaccggctccagccgacttccgaccctctggggcc

SEQ ID NO: 351931 - DNA, 54 bp, Homo sapiens; identical to SEQ ID NO: 347426
  chr17:37365986-37366040
  hyper

SEQ ID NO: 351932 - DNA, 585 bp, Homo sapiens
  chr17:37757285-37757870
  hyper
aagggacaggaatggagctcaacagtgaagggacagggagtaactgctttccttccctttcccgccagatgggcaaatggcctggactcggagatacctctttttctctgtcatcttccaaatgctggacttggaatggggtctggaaaatcaagaggaagatgtcctcctgattgaacttggatccagccgtcgggttcagcggcccaggggttgagctgagccggctggtggacgcttggagagcctgccgctgaggctagggcaagaagggcgtcctctctgtgccttctccccaggccaggcacagcgctggcccctttcctcctccctcccctgcttctgttcttggagcatctctgggtgtgtgtgcgcaggcgggagagcaagcaagagaaagagacctgcgaggggacgtttggggccgcttgtccgcgcacatcttcttctcctgctcatcacaccatctcgccagggaagttgagcactggggaggagggtgatgagaggctagagccagccagagtgcagggaatgtggggggaagggtcagaaatcgggaaaggggcgactggtgtggatgcc

SEQ ID NO: 351933 - DNA, 121 bp, Homo sapiens
  chr17:37760007-37760128
  hyper
cgtgagaaaccggtccggctttgcatctcatttacataaatatttattaatcgtcattaaactgaacagaaacacgcaatgcacttcgggtgtccgacgggagtttcatcttcgctacaag

SEQ ID NO: 351934 - DNA, 297 bp, Homo sapiens; identical to SEQ ID NO: 335537
  chr17:38020387-38020684
  hyper

SEQ ID NO: 351935 - DNA, 129 bp, Homo sapiens; identical to SEQ ID NO: 347427
  chr17:38478466-38478595
  hyper

SEQ ID NO: 351936 - DNA, 36 bp, Homo sapiens; identical to SEQ ID NO: 347428
  chr17:40332770-40332806
  hyper

SEQ ID NO: 351937 - DNA, 84 bp, Homo sapiens; identical to SEQ ID NO: 345517
  chr17:40558083-40558167
  hyper

SEQ ID NO: 351938 - DNA, 47 bp, Homo sapiens; identical to SEQ ID NO: 345518
  chr17:40558226-40558273
  hyper

SEQ ID NO: 351939 - DNA, 212 bp, Homo sapiens; identical to SEQ ID NO: 204606
  chr17:40573874-40574086
  hyper

SEQ ID NO: 351940 - DNA, 841 bp, Homo sapiens; identical to SEQ ID NO: 335546
  chr17:41245464-41246305
  hyper

SEQ ID NO: 351941 - DNA, 187 bp, Homo sapiens
  chr17:42061046-42061233
  hyper
cgctccccggggccgggtcttaggcgcacattggctcgcggtgcacgtccactctcctgtaggctcgtgcccttgacatatccggggctgtcacagtcccatgccccgaccccgaccccgcgcgagtctgcttgatgacgtcgctgtcgcaccccaccggcctccccgggtcctccccaggcgcgcg

SEQ ID NO: 351942 - DNA, 149 bp, Homo sapiens
  chr17:42061420-42061569
  hyper
aggcccttatcgcccgcgtttatcgggccatcgctgataagaaaccgagggggcggcggggcggcccctctccttggatccaagaagcgatggggtcgctgttagggggggcgccagccccggggatgcggggagccttcgcagcctcc

SEQ ID NO: 351943 - DNA, 230 bp, Homo sapiens
  chr17:42081919-42082149
  hyper
cggaccccgccccgaccaggtccagccccgcccaacggcaagttaagagccccccagtgccagacgctccagacagactgccactcttggggggcaagagttggttgtcgtcatggcgacggcgctgatggctgtggttctgcgggcagctgctgtagccccgaggctgagaggccggggaggcactgggggcgcccgaaggctgagctgtggcgcgcggcggcgggcgg

SEQ ID NO: 351944 - DNA, 321 bp, Homo sapiens; identical to SEQ ID NO: 347431
  chr17:42083719-42084040
  hyper

SEQ ID NO: 351945 - DNA, 267 bp, Homo sapiens; identical to SEQ ID NO: 204625
  chr17:42091861-42092128
  hyper

SEQ ID NO: 351946 - DNA, 170 bp, Homo sapiens; identical to SEQ ID NO: 345520
  chr17:42092357-42092527
  hyper

SEQ ID NO: 351947 - DNA, 62 bp, Homo sapiens; identical to SEQ ID NO: 204629
  chr17:42402710-42402772
  hyper

SEQ ID NO: 351948 - DNA, 192 bp, Homo sapiens; identical to SEQ ID NO: 347435
  chr17:42402917-42403109
  hyper

SEQ ID NO: 351949 - DNA, 197 bp, Homo sapiens; identical to SEQ ID NO: 204637
  chr17:42988798-42988995
  hyper

SEQ ID NO: 351950 - DNA, 89 bp, Homo sapiens; identical to SEQ ID NO: 345522
  chr17:42989016-42989105
  hyper

SEQ ID NO: 351951 - DNA, 38 bp, Homo sapiens; identical to SEQ ID NO: 347438
  chr17:43298587-43298625
  hyper

SEQ ID NO: 351952 - DNA, 230 bp, Homo sapiens; identical to SEQ ID NO: 347439
  chr17:43298666-43298896
  hyper

SEQ ID NO: 351953 - DNA, 879 bp, Homo sapiens
  chr17:43324795-43325674
  hyper
cggggagaagggctgcttcttcactagagttggcggcgagggagcccgcttcgagggggcggaggctttcgtggctggcccagtatccctgcgggaggccggagggggcgagcgggcagctggggttagacacgccgggccagccccgcagcagttctccttccggctgccccgccccatttgcgccagtcctgcctcccacccgggcatctggccccttttcctttcgccctacccagtacttagtgacgccataagtgacctcgccttacatctccgcgcgtgccgcctccgtcaccgcctgccgggtccccatttcttccgggcctgcccccgctcctcgcctgcccctcccctccaccagccagtgtcgccccatctgtctgtcctccgggcacttgtcccgcccctcactgcgtgtccctcccccgcccgccggctctcacctaggccgagacacgccccgggctgggcgggatcttggggcggccgggctagtagggctggatcaggcggaagccggggcccggggctgggcttcgtgtcctgcgttccgggagcgccaacccctccaggttaggaatctgagagtacgggctgcgcgcacctggggcgggtgcctgggaggaggtggaggaggagacggtcctcagaacgggtcctgggggtcggaggcgagggcgggggttgtaagtggccgggagaggtccctcccgcgggtcccggcgccccccgccccgtcggggacgcacctacttcgtgcagtttgtgcagcgagcgcgccagctcctagttggagaggtcgctgatgcgcgccgcgtggcagaaggcgagccccgcgtgggagcgccccccaacccccgcagcctgggctgagcc

SEQ ID NO: 351954 - DNA, 117 bp, Homo sapiens; identical to SEQ ID NO: 345523
  chr17:44849684-44849801
  hyper

SEQ ID NO: 351955 - DNA, 80 bp, Homo sapiens; identical to SEQ ID NO: 345524
  chr17:44849831-44849911
  hyper

SEQ ID NO: 351956 - DNA, 63 bp, Homo sapiens; identical to SEQ ID NO: 345525
  chr17:45330951-45331014
  hyper

SEQ ID NO: 351957 - DNA, 119 bp, Homo sapiens; identical to SEQ ID NO: 204649
  chr17:45331313-45331432
  hyper

SEQ ID NO: 351958 - DNA, 90 bp, Homo sapiens; identical to SEQ ID NO: 345527
  chr17:45331675-45331765
  hyper

SEQ ID NO: 351959 - DNA, 38 bp, Homo sapiens
  chr17:45500788-45500826
  hyper
cgtcggctgcgcccgcggcccggggcggagttggccac

SEQ ID NO: 351960 - DNA, 379 bp, Homo sapiens; identical to SEQ ID NO: 292433
  chr17:45500865-45501244
  hyper

SEQ ID NO: 351961 - DNA, 298 bp, Homo sapiens; identical to SEQ ID NO: 292442
  chr17:46089283-46089581
  hyper

SEQ ID NO: 351962 - DNA, 218 bp, Homo sapiens; identical to SEQ ID NO: 345528
  chr17:46124683-46124901
  hyper

SEQ ID NO: 351963 - DNA, 164 bp, Homo sapiens; identical to SEQ ID NO: 345529
  chr17:46125148-46125312
  hyper

SEQ ID NO: 351964 - DNA, 53 bp, Homo sapiens; identical to SEQ ID NO: 347448
  chr17:46620299-46620352
  hyper

SEQ ID NO: 351965 - DNA, 321 bp, Homo sapiens; identical to SEQ ID NO: 204659
  chr17:46621458-46621779
  hyper

SEQ ID NO: 351966 - DNA, 181 bp, Homo sapiens
  chr17:46659093-46659274
  hyper
cggcagagccaccgcgggtttgggtatccttgatcctggcgcccaagagcagagatttttctcctctgcgccctggaagtcaccacctgccaatcccaccaaggcgccgcacccccctcacccctccagccgcctgagatggagaacagggtttatgggcgactcccaggacgggtttcac

SEQ ID NO: 351967 - DNA, 45 bp, Homo sapiens; identical to SEQ ID NO: 204661
  chr17:46659384-46659429
  hyper

SEQ ID NO: 351968 - DNA, 97 bp, Homo sapiens
  chr17:46670752-46670849
  hyper
cgggcgaggacagggagcagctcgaagccgcttgcctgaagcggggctcctgggcgggcgcggggaaggcgcgcgagctctcgcccaccgccccaaa

SEQ ID NO: 351969 - DNA, 89 bp, Homo sapiens
  chr17:46675757-46675846
  hyper
caaacctatcaacctttttttttttcctccttctccttcgcctttctcctctctccccccaacaacacaacgcgtcctgttccacctac

SEQ ID NO: 351970 - DNA, 63 bp, Homo sapiens; identical to SEQ ID NO: 345531
  chr17:46687527-46687590
  hyper

SEQ ID NO: 351971 - DNA, 321 bp, Homo sapiens
  chr17:46688806-46689127
  hyper
gggaagttggtccggttctcccaagacgaggaatgaggcgagcctggctcacgactctgtctctcttggtgccccagatatgcgggcggagatggagcaagtcttcctaggtgctcctagggcacaggatccagcccacgggccttggacgctgccgtttctggtggcaaaaaaaaaaagaaagaaagaaagaaaaagaaaaaaaaaggtttgaaagtaaaagaaaaagggggttgggagggtggggagagaaaggaagggtggaggttggcccgggcgcgctgctctcccggttcccggaggcggatgcctcagtggagc

SEQ ID NO: 351972 - DNA, 149 bp, Homo sapiens; identical to SEQ ID NO: 347451
  chr17:46690905-46691054
  hyper

SEQ ID NO: 351973 - DNA, 170 bp, Homo sapiens
  chr17:46724200-46724370
  hyper
ggcgaggacagggtccgggagggggataggcgagagcgcttcctgcctccgcccgggcggggctcggccgtctcacctgcccccacccacggcgccgtcggatcccagagcggctggtgaggagatgggcctggcgcgccgcggggaggccagaggcgcggaggagcagc

SEQ ID NO: 351974 - DNA, 171 bp, Homo sapiens
  chr17:46801836-46802007
  hyper
cgagatggctcgtaccgaacctccttgccttcttcctgggtctctcgggggctggaccaatacatctgccgatgccctggccgaatggcaggcgacatcgggtcctggacccccacacgcagctcagtacccacgaggccccaggccgctggaagcctgtagctccgcgga

SEQ ID NO: 351975 - DNA, 324 bp, Homo sapiens; identical to SEQ ID NO: 292478
  chr17:46829655-46829979
  hyper

SEQ ID NO: 351976 - DNA, 45 bp, Homo sapiens
  chr17:46830655-46830700
  hyper
ggcacagcttccagattccagtttgttaagaatcacctgaaggac

SEQ ID NO: 351977 - DNA, 131 bp, Homo sapiens
  chr17:46831595-46831726
  hyper
cgtggcacatgaaaaattcaggatgaacgccctggctgaaagctcttcctgggtttgggacatcagaagaccttcccgggatgggctcttgtctctgcagtagctatgacctgcacataaacctgtttcct

SEQ ID NO: 351978 - DNA, 55 bp, Homo sapiens
  chr17:46832887-46832942
  hyper
gagcccaataaacggttcctctttccttctccggtcctttcccttccaacagagc

SEQ ID NO: 351979 - DNA, 348 bp, Homo sapiens; identical to SEQ ID NO: 292486
  chr17:47073560-47073908
  hyper

SEQ ID NO: 351980 - DNA, 200 bp, Homo sapiens; identical to SEQ ID NO: 335605
  chr17:47647459-47647659
  hyper

SEQ ID NO: 351981 - DNA, 65 bp, Homo sapiens
  chr17:47653244-47653309
  hyper
cgagagcggcgccgctggagccgaggggggcgccgagcgcagatctggagcagcagagccacggc

SEQ ID NO: 351982 - DNA, 715 bp, Homo sapiens
  chr17:47653373-47654088
  hyper
gcgcagctggaccaggggaggggggcggcggctgcacagctggaccgaagggggcggggtcggccctgggcgacccgctgaggggagggccgcgggccgccggggactggagcatgggacggcgcgcctgaaggagcaggaaggggaaggaggcctgggaccccgaaaagagaaggggagagcgaggggacgagagcggaggaggaagatgcaactgactcgctgctgcttcgtgttcctggtgcagggtagcctctatctggtgagtggtccgaggggagctgcgcagaggggcgggggcccggaggatcgggggagagcgcgggaagcttgcgagccctgaaactttctcccttcccccgacatcccggggatggcggggaagactggaggctgggggagagggcgggtccgaggccggagactggacagatagggttaataggggcggggagagggtgcttggctggcccacccactccgcagcgggtggctggaggtgcgaccagcgctcggaaaaaggcctggagccgggtcgccagggttaccctaccccttcccagagcctcaggaccgctgaagccgggggcgagtggggcgcgggtcgtggagctggtgacctgcaggcttttcccctgacctctgggactcagagagcctcgggttctgggtcccccagagcacagagccggtccaggcggggggcggcccccgc

SEQ ID NO: 351983 - DNA, 197 bp, Homo sapiens; identical to SEQ ID NO: 345532
  chr17:48619736-48619933
  hyper

SEQ ID NO: 351984 - DNA, 528 bp, Homo sapiens
  chr17:49021815-49022343
  hyper
cccgcagagggcagggaagccctggacctggtctgaccttgcgcgctagccccagaggtcgccgtgctctgctgtcggcgttcaggtgcccgcggtcgggccggggagggcagtaatcaagccggcccggcggctggcgaggggcgcgggtccagcgcgctgccctcggccgccgccctgagcggttatttataaccgcgggtcgcgttacctcctgaccttaagctggggcgggcgatccgcagcgattagcatctatctcctccccgccgcccgctgcgaacaaacacccctctgtgcgccctcccccgcccgccccgcgggaggccctgcaggaagcaggatgttgacccggagcctccctgcgctcctgcggcggccccgccacatgtgagtggcgggcggtggagtgcgggtgggggggaagcggggagcaggagctactcgtgtttgatggcttcccgagttgccaatgtcctggtctattctgagtgaccgccttatttacaatatagggctccccagccc

SEQ ID NO: 351985 - DNA, 169 bp, Homo sapiens; identical to SEQ ID NO: 292548
  chr17:53341536-53341705
  hyper

SEQ ID NO: 351986 - DNA, 61 bp, Homo sapiens; identical to SEQ ID NO: 292554
  chr17:54756198-54756259
  hyper

SEQ ID NO: 351987 - DNA, 297 bp, Homo sapiens; identical to SEQ ID NO: 345533
  chr17:54911482-54911779
  hyper

SEQ ID NO: 351988 - DNA, 515 bp, Homo sapiens; identical to SEQ ID NO: 345534
  chr17:54911874-54912389
  hyper

SEQ ID NO: 351989 - DNA, 215 bp, Homo sapiens; identical to SEQ ID NO: 292571
  chr17:56327007-56327222
  hyper

SEQ ID NO: 351990 - DNA, 85 bp, Homo sapiens; identical to SEQ ID NO: 347456
  chr17:58228397-58228482
  hyper

SEQ ID NO: 351991 - DNA, 79 bp, Homo sapiens; identical to SEQ ID NO: 345535
  chr17:58498618-58498697
  hyper

SEQ ID NO: 351992 - DNA, 81 bp, Homo sapiens; identical to SEQ ID NO: 292594
  chr17:59475276-59475357
  hyper

SEQ ID NO: 351993 - DNA, 38 bp, Homo sapiens; identical to SEQ ID NO: 347458
  chr17:59478678-59478716
  hyper

SEQ ID NO: 351994 - DNA, 131 bp, Homo sapiens; identical to SEQ ID NO: 292597
  chr17:59532387-59532518
  hyper

SEQ ID NO: 351995 - DNA, 48 bp, Homo sapiens
  chr17:59539943-59539991
  hyper
ctggctggggcggacccagaggtagagcgcagagtgcccgggacaggc

SEQ ID NO: 351996 - DNA, 40 bp, Homo sapiens; identical to SEQ ID NO: 347459
  chr17:60885408-60885448
  hyper

SEQ ID NO: 351997 - DNA, 308 bp, Homo sapiens; identical to SEQ ID NO: 347460
  chr17:60885548-60885856
  hyper

SEQ ID NO: 351998 - DNA, 111 bp, Homo sapiens; identical to SEQ ID NO: 345536
  chr17:61777761-61777872
  hyper

SEQ ID NO: 351999 - DNA, 76 bp, Homo sapiens; identical to SEQ ID NO: 345537
  chr17:61778423-61778499
  hyper

SEQ ID NO: 352000 - DNA, 848 bp, Homo sapiens; identical to SEQ ID NO: 335648
  chr17:63555681-63556529
  hyper

SEQ ID NO: 352001 - DNA, 669 bp, Homo sapiens; identical to SEQ ID NO: 335649
  chr17:64187889-64188558
  hyper

SEQ ID NO: 352002 - DNA, 675 bp, Homo sapiens
  chr17:64298985-64299660
  hyper
cgggcaacgactccacggcgtctcaggacgtggccaaccgcttcgcccgcaaaggggcgctgaggcagaagaacgtgcacgaggtgaaggaccacaaattcatcgcgcgcttcttcaagcagcccaccttctgcagccactgcaccgacttcatctggtaggtgccgggccgggcactcctgccccgctcctccccgcctccgggtcccggcacccggcgctccggcgcgtccgccccggggctggctcactccgataacttggaaccggcgggagtccgaactcttcgcccggagtgacacgcgcgcccggccctgacaccggcgggcaggactcccgggacgtcgccgtcccgccacacacaccccctggcgcgagagggaggctggccccgtacggtggcgaaggggatccctctccgggccgggcccctcacctccccgggcgcgcccacccgcacgcacccagcggagcggccgcttgccggggtgtgagcccaggggacaggggaggaggagaggccctaagggggcaaaggttcccggagaaacgcgccccggagtaacgggggagcggcggcgattgcactgcgcgcggtccaagttgctggcgagccaggctgggcgcgttcggggtgggggggttgtgtttgtgcttcccatcgggctggactgc

SEQ ID NO: 352003 - DNA, 60 bp, Homo sapiens; identical to SEQ ID NO: 204756
  chr17:64961305-64961365
  hyper

SEQ ID NO: 352004 - DNA, 202 bp, Homo sapiens; identical to SEQ ID NO: 292637
  chr17:64961625-64961827
  hyper

SEQ ID NO: 352005 - DNA, 83 bp, Homo sapiens; identical to SEQ ID NO: 347465
  chr17:64962141-64962224
  hyper

SEQ ID NO: 352006 - DNA, 406 bp, Homo sapiens; identical to SEQ ID NO: 335653
  chr17:65822956-65823362
  hyper

SEQ ID NO: 352007 - DNA, 49 bp, Homo sapiens
  chr17:68164458-68164507
  hyper
cgactgcgccgtccacaataccagctagtttgctgaattagttcagcga

SEQ ID NO: 352008 - DNA, 196 bp, Homo sapiens; identical to SEQ ID NO: 292648
  chr17:68164537-68164733
  hyper

SEQ ID NO: 352009 - DNA, 204 bp, Homo sapiens; identical to SEQ ID NO: 204763
  chr17:68164928-68165132
  hyper

SEQ ID NO: 352010 - DNA, 45 bp, Homo sapiens
  chr17:71897934-71897979
  hyper
cgagtggagggaatgaggagggcctttcaagggaggcgggattgc

SEQ ID NO: 352011 - DNA, 62 bp, Homo sapiens
  chr17:72427030-72427092
  hyper
cgcgggcgctcagggttgagcaaacactccgggccgcccgccccgccaccagctggctccga

SEQ ID NO: 352012 - DNA, 219 bp, Homo sapiens; identical to SEQ ID NO: 204774
  chr17:72427594-72427813
  hyper

SEQ ID NO: 352013 - DNA, 332 bp, Homo sapiens; identical to SEQ ID NO: 204775
  chr17:72427999-72428331
  hyper

SEQ ID NO: 352014 - DNA, 340 bp, Homo sapiens; identical to SEQ ID NO: 204776
  chr17:72428489-72428829
  hyper

SEQ ID NO: 352015 - DNA, 69 bp, Homo sapiens
  chr17:72428872-72428941
  hyper
ggaaaccactccataatcggggtctccaagaggagcccctccaccgcctgcctctcggtgggagtccgc

SEQ ID NO: 352016 - DNA, 359 bp, Homo sapiens; identical to SEQ ID NO: 347466
  chr17:72449954-72450313
  hyper

SEQ ID NO: 352017 - DNA, 336 bp, Homo sapiens; identical to SEQ ID NO: 347467
  chr17:72450330-72450666
  hyper

SEQ ID NO: 352018 - DNA, 952 bp, Homo sapiens
  chr17:73029792-73030744
  hyper
cgtcccagtgccgggggctgggggctggtgctcgctaagtaaggatgggggcaggtccctgcgcaccgcggtatcttcccgcccgctcaccaaaagtgcgcgcggcagggacggacccactccatggatcgcgcctctgtcaggccttctctaggaaaaggggacactcgcttatgaggggaagggatggcacggccacgtgccccaagccccagtggcctaatggataaggcactggcctcctaagccagggattgtgggttcgagtcccacctggggtagaggtgaaagttccttttacggaattttttatttcttttctcttcccttctcagggatgctggaatcgaccttggtctctagttcgactcccgtgcaacgtgttgaggaggagccacctcctccaagcgcctaaagccggtaagctcgggtcttgccaagcccttgaatgaacagctttcgtccgggtagggccccacaatttcgaagctggggaaactcgtaagaataaagttgcccaaagggttcccaggacaccccagctccacctggcggggcagccccggagaaccagaggtaaatgaccaccgcgactgcaaacagagggtcctgcaagagaaggcgaggggcgcaaacagggcagaggcaagcaggtagcgggcaggtggtggtggattctgaggtctctggctgccggcaccaaaagaaaccttgcgagcacagcccctctcgacaccccaggtgggactcgaacccacaatccctggcttaggaggccagtgccttatccattaggccactggggcgcggtaagacgctaaacccacgtgctccttgataggtgttcaaccatagtgcccaaacacggccctgctgtgggtcaccgcgctccaagcctgagaagccatggggacgacaggatgaaccgctggctgggcgcggcgtccccacc

SEQ ID NO: 352019 - DNA, 65 bp, Homo sapiens; identical to SEQ ID NO: 347468
  chr17:73073967-73074032
  hyper

SEQ ID NO: 352020 - DNA, 80 bp, Homo sapiens; identical to SEQ ID NO: 292709
  chr17:73584287-73584367
  hyper

SEQ ID NO: 352021 - DNA, 170 bp, Homo sapiens
  chr17:73584951-73585121
  hyper
actgggccggccaaggacgcgagcgacaaccgggcgcagcggggcgccgagccagaaacaatgcaggcctcgacggcccgggctccgcgccaccaggtcggaaaggcggtggggcaggtgccagcggcggcaggcgagggcgaagcgggagccgcagcaggagcggggcc

SEQ ID NO: 352022 - DNA, 136 bp, Homo sapiens; identical to SEQ ID NO: 335681
  chr17:74620111-74620247
  hyper

SEQ ID NO: 352023 - DNA, 91 bp, Homo sapiens; identical to SEQ ID NO: 347469
  chr17:74965156-74965247
  hyper

SEQ ID NO: 352024 - DNA, 93 bp, Homo sapiens
  chr17:75447727-75447820
  hyper
ccctgggccccggcccgaggccggcaggaccgagcggggtccccaggagaggggtggcggggagctcgatctccacgcggggaccagattttc

SEQ ID NO: 352025 - DNA, 51 bp, Homo sapiens
  chr17:76123746-76123797
  hyper
cgagtcctgccggcctctgccctggactcctcctgcgctcaccctcaggaa

SEQ ID NO: 352026 - DNA, 342 bp, Homo sapiens
  chr17:76123831-76124173
  hyper
tttcctcggacaggcaaagcccgggggcgccccgacagagcagctccttgcaggggtgccagtcacaggaccggacggcgccctccctcagtgtcctgggtgccatcttcgggcccaggccccacaccaccccctccctccagcaggagcaaagacgtgggaaaaccagcccagagctgggtccgaggcggccccacccagcctaacacgggacagctgccgaaagaggggctgaggacgccccacccagtccctagagctggaatcccttcctccagacaggcccttctaagctcagggaacccggggactcgggcacccagcgccccagcactccgcccc

SEQ ID NO: 352027 - DNA, 170 bp, Homo sapiens
  chr17:76337740-76337910
  hyper
cggcctgggaggaaggtgcggcgctggggagggaggggagccctgccctggtgtgccctcggtcccgcgccgcacaccctgccgggaagcccggggccgcagctgctcgggcggcccggcccagaatagcctcccttccgggcagggctgccccggcccgcagcgccagc

SEQ ID NO: 352028 - DNA, 192 bp, Homo sapiens; identical to SEQ ID NO: 335693
  chr17:76355660-76355852
  hyper

SEQ ID NO: 352029 - DNA, 360 bp, Homo sapiens; identical to SEQ ID NO: 335694
  chr17:76588327-76588687
  hyper

SEQ ID NO: 352030 - DNA, 124 bp, Homo sapiens
  chr17:77778310-77778434
  hyper
cgatcggtttccccgcccttctgtaggaaatcaaattcagggaacatggtaccgtatttacccgcacaacttcctcccttgacattttgcactctcgaagttggggcagaagtaattatgcaaa

SEQ ID NO: 352031 - DNA, 179 bp, Homo sapiens
  chr17:77786288-77786467
  hyper
cggccggcccggcccgctggggcctgggttcctttgggttggggaagtgggggtacgaacccacgcggctgtgccaaggggtcccaactccggagtccaaccccacccaccagtcctctgtgcgcacttttcgtttatttctcagcagtctcagtcctggagctcctggggcgatttcg

SEQ ID NO: 352032 - DNA, 61 bp, Homo sapiens
  chr17:77786805-77786866
  hyper
tatttgttatttttttaatttttctgcggggagcatcggggctagcccgcccagctccaac

SEQ ID NO: 352033 - DNA, 257 bp, Homo sapiens; identical to SEQ ID NO: 204828
  chr17:77814493-77814750
  hyper

SEQ ID NO: 352034 - DNA, 221 bp, Homo sapiens; identical to SEQ ID NO: 204829
  chr17:77814929-77815150
  hyper

SEQ ID NO: 352035 - DNA, 50 bp, Homo sapiens; identical to SEQ ID NO: 204830
  chr17:77815935-77815985
  hyper

SEQ ID NO: 352036 - DNA, 187 bp, Homo sapiens; identical to SEQ ID NO: 54699
  chr17:77816033-77816220
  hyper

SEQ ID NO: 352037 - DNA, 735 bp, Homo sapiens
  chr17:79007528-79008263
  hyper
cgtctcccccaggggcctgactcgttgaaggaatgaatgaatgaatgattttgcagggatgggaggctgggagactgagaggtttcattaaacggaaacgctcagatctggtgtttcacaacgtaaaacaaataattcctctatgttagcctaatttatgtaaatatttctccacgggaattgtaccgggagacctgtgtgccaactcggccagcttccccggcagaatctccccttgggaggacccttaagcaggacccttcctaaaaattggaggcagctctgactcctccattcctcctacaaggttcccccaccccctagggctttccaccgcatgagagtcctccgggcccctcgtttcctactgccctcgacccttccttcccgagacctctctctctcagtaaactgcctccaacgagaatcttctgacggcaggagggtcctccccgtccctaagggtcgccctgtccccaggccttccagcaggacactcccctgtcccctctccagatcctccttcccagggccctcctccaagatcctcttccccaaccctcctctcccagggtcctcccctctccagaatcccggccccaagcccccaagcgctgtctgcctgtctggggtcctccccagagttcaccttctgcaggatcctccctccaagtcctctcctcacgatgctcccccgaaatcctccttctccaagtcgtcccccactccagggcc

SEQ ID NO: 352038 - DNA, 753 bp, Homo sapiens
  chr17:79008842-79009595
  hyper
cgggggcggtgatgcgggcgcaacgggggcgggacgcaggggcggggactgccgcggggcggggcctgaggcggctataaaggtggccgccgccggacgccgggctctgtggttcgggtccgctttcgtctccgtcctgctgccgttaccgccgctgctgccgccgcttgcgtcccccgctccggtctgtggtgcagccgggacccaggaccatgtctctgtctcgctcagaggagatgcaccggctcacggaaaatgtctataaggtgagcgccccccggcgccgagctgagcccgctccgtgtgcgcctgggtcgcgcgccgcccgcgcgcccgagcccgaccagggcggccccggggccgcgcgccgggccaggaggctgggactttgggggtcttcccggcgcggccacccgggacccgggctgctggggtggtgagcccggcgccggccgctcacaggtggccacccccgcccgggcccccccatcccatgcgcgccgcggcccggtcagtccccagccccaggcccggggagcactccccgctccgacggccctgctcggcccccgcgcgctcgccttggcgtcggcgggaacggagccgcgcgccgggccccggaagccctcggaccggtcggggtcgtagcacacccgggcagggccggggcggcgggggcggcgggcccaggggttgcggcggccaggacggcatgggggctgtctgaaggccgcggtcggcgcggtggcaccg

SEQ ID NO: 352039 - DNA, 43 bp, Homo sapiens
  chr17:79009691-79009734
  hyper
ctaaggtgggaggtcggagcgcgggcaggctggatgggtggac

SEQ ID NO: 352040 - DNA, 111 bp, Homo sapiens
  chr17:79988364-79988475
  hyper
cgccgcccactggtgggacgtgaggccagccagagagcggggctggccaggtctcccgtgctgaggccgtgccacggtgcgctggggctgcgtccgctcactgcgctcctt

SEQ ID NO: 352041 - DNA, 522 bp, Homo sapiens
  chr17:79989097-79989619
  hyper
ccagccctgcagggagggcctgccggggtgcggctgttcgcccctcctcgccgctgccttgaagggacgggagggccgcgggggctgtccgtctgggggttcgggcggctgcagaccccggagttcccagctggctcccggcggcagggggcgggtccccgagaaagcgcagcgcgcggagccctccccgccgggtccaggtcgctgggctctctccggcctgcgctgcgccccgagggacccgtaggagacccccgggccggggtcgcgctggaggcgggggcgccgcagctcgcgcagctctgcccgggttcgggcggccccgccccgccagccgcgcggccgggcgccccccgcccgcccccgcccccgccccccgccccccgccggccgcgctcggctgtctccgcgcccggcgctcggcggcgctcggctgtctccggccgatcgctcggcgctcgggtccgcggccgctgcggcgccgggcatttctccgcagctcggctcgcggccgcgcccgcc

SEQ ID NO: 352042 - DNA, 220 bp, Homo sapiens; identical to SEQ ID NO: 347472
  chr17:80186335-80186555
  hyper

SEQ ID NO: 352043 - DNA, 517 bp, Homo sapiens; identical to SEQ ID NO: 347473
  chr17:80186618-80187135
  hyper

SEQ ID NO: 352044 - DNA, 277 bp, Homo sapiens
  chr17:81038567-81038844
  hyper
cgcgaagcccagggcgccgagggcaccgcggccgaacccgccctgcgcgagcctcgcagtcgccagttccggggttcgcagatgcgcggggacccgagtgacgcgcgcctcccggagagccgtggccgggctggcccgggcctgggtcccgcttcccctcggcgcggcccccgcccccgcccccgcccccgccgcgggccgagtcacgcggtgatgtcgagcgaagctgttttccgagaaggtcggggcagagccggtgcggggcgggtggtgtccg

SEQ ID NO: 352045 - DNA, 508 bp, Homo sapiens
  chr17:81038865-81039373
  hyper
cgcagccgcagcctccgttccgggtccccgcgaagccacagtcgccccccagcgcccccggcggagcctccccgggggaaggggcgtggcgctggggggcagagtcgccccgagggccgtgggcggtgcccggctgtcccgggagcggccgcctcccttctcggccgagcggggccgcgggcggatggaggtctggggggggtcggccgggaacgccggcgccgggagcctccgaggccgacggctcttctggggccgcccctgcccccgcggagtgattcagccccggctcgctgcctctgcccggcgggtcggtgcatccccgaaccgaggcccggggcgttccgctccagcagaccgaagccagaaacgccgcccccgccacccaggccgagtgtgtcgagaaggggccggcgcccttttcagggtgtcaggggactgtgtgcccggtaggagggggcgcctcccggagcccgaagggagggcgcggtaggcagccgagggtggc

SEQ ID NO: 352046 - DNA, 1315 bp, Homo sapiens; identical to SEQ ID NO: 347474
  chr18:811501-812816
  hyper

SEQ ID NO: 352047 - DNA, 190 bp, Homo sapiens; identical to SEQ ID NO: 347475
  chr18:812869-813059
  hyper

SEQ ID NO: 352048 - DNA, 117 bp, Homo sapiens
  chr18:907197-907314
  hyper
cgcacgccccacgcatcctctcctttgctttctgggcctccccattcgggtcttcgcgtgggtcagcgcccggtctcccagggcctttctcgtccccgcccgttgctgctttgggga

SEQ ID NO: 352049 - DNA, 238 bp, Homo sapiens; identical to SEQ ID NO: 345538
  chr18:2848166-2848404
  hyper

SEQ ID NO: 352050 - DNA, 160 bp, Homo sapiens
  chr18:3012406-3012566
  hyper
cgctggcgttagaagtggacagagaggctctcagtacaaactgtatctgaacgtgttcctcacaaattaagatctgcaccgggggctggggggctttgagaaaactaaccacatttgaatccggtccacacagcttgaaggcggaggtacggggcaaagc

SEQ ID NO: 352051 - DNA, 2276 bp, Homo sapiens; identical to SEQ ID NO: 335731
  chr18:3449180-3451456
  hyper

SEQ ID NO: 352052 - DNA, 51 bp, Homo sapiens
  chr18:3498992-3499043
  hyper
cgggtacgggaagtggggggctgaggggggcccggggggcggctcctgcga

SEQ ID NO: 352053 - DNA, 995 bp, Homo sapiens; identical to SEQ ID NO: 335733
  chr18:3879130-3880125
  hyper

SEQ ID NO: 352054 - DNA, 584 bp, Homo sapiens; identical to SEQ ID NO: 345539
  chr18:5237294-5237878
  hyper

SEQ ID NO: 352055 - DNA, 537 bp, Homo sapiens; identical to SEQ ID NO: 345540
  chr18:5238247-5238784
  hyper

SEQ ID NO: 352056 - DNA, 216 bp, Homo sapiens; identical to SEQ ID NO: 292892
  chr18:7566793-7567009
  hyper

SEQ ID NO: 352057 - DNA, 415 bp, Homo sapiens; identical to SEQ ID NO: 204882
  chr18:7567335-7567750
  hyper

SEQ ID NO: 352058 - DNA, 70 bp, Homo sapiens
  chr18:7568821-7568891
  hyper
cccggcacgctgtcacaggggtttacaaccaggatgacctttattacctgggtgacacaggtggatagac

SEQ ID NO: 352059 - DNA, 59 bp, Homo sapiens; identical to SEQ ID NO: 347482
  chr18:9707859-9707918
  hyper

SEQ ID NO: 352060 - DNA, 275 bp, Homo sapiens; identical to SEQ ID NO: 292905
  chr18:9708063-9708338
  hyper

SEQ ID NO: 352061 - DNA, 202 bp, Homo sapiens
  chr18:9709406-9709608
  hyper
gctggtctcatgaaaaccatttcctaaaaaagggcagcgaaagggtcgcattcttgtgcgaactgatctgtcaagatgggggtacaagaactgtagaaagaggaaatgatttcggtgaggactgaattgtgccagcgtctctaggcttcctctaggctcttgtggaacctccggcaggctcccatcatcggctcccatcacc

SEQ ID NO: 352062 - DNA, 293 bp, Homo sapiens
  chr18:10455170-10455463
  hyper
ccccgcgcctgccgtctcagccctgggagagggggctctgcccactttccgaggcttgggaccgctctcccccagggcgcccggagctctttgctgcgggactgttctttttggaagggtggaagctctcccacgcagacaccttttatgtccagaatccgttgcatccagtccgagggaaactttcgtccgctctgctggattttccaactgtacactgccatgaaatcgccggctctgcgagcctttttccaaaatgccagaatgcagcaggctcttgatgtgttccaagc

SEQ ID NO: 352063 - DNA, 200 bp, Homo sapiens; identical to SEQ ID NO: 204892
  chr18:11149298-11149498
  hyper

SEQ ID NO: 352064 - DNA, 563 bp, Homo sapiens; identical to SEQ ID NO: 345541
  chr18:11947488-11948051
  hyper

SEQ ID NO: 352065 - DNA, 435 bp, Homo sapiens; identical to SEQ ID NO: 347485
  chr18:12658128-12658563
  hyper

SEQ ID NO: 352066 - DNA, 40 bp, Homo sapiens
  chr18:18821658-18821698
  hyper
cgagttcacgcttggggctcttcagccgccgtccagtgaa

SEQ ID NO: 352067 - DNA, 48 bp, Homo sapiens; identical to SEQ ID NO: 335763
  chr18:19577719-19577767
  hyper

SEQ ID NO: 352068 - DNA, 362 bp, Homo sapiens
  chr18:19749047-19749409
  hyper
cgtgccaaggctccctccccctccctcgtgtgggtgtgtgtgtgcgactgcgggagcgggagggtgcaccgccgctggatgggtgcgggtcgctagccaggtcaggcgttctgtggcctccgcccctcccccggggtccctgggctcggtgccccccgggtggactcgcccccactccggggacagggcttgcggctcagcccacgcccgcaggcagcgcggctctcattgtctgcctgggcggcgcgctcccctcccccctcgccgtcccctccccaccctcttttctctcctcccctcgatccctcctcctcctcttcacctccagcgcccagctgctcgctgagcgcagttccgaccca

SEQ ID NO: 352069 - DNA, 418 bp, Homo sapiens; identical to SEQ ID NO: 204909
  chr18:19749446-19749864
  hyper

SEQ ID NO: 352070 - DNA, 384 bp, Homo sapiens; identical to SEQ ID NO: 204910
  chr18:19749924-19750308
  hyper

SEQ ID NO: 352071 - DNA, 349 bp, Homo sapiens; identical to SEQ ID NO: 204911
  chr18:19750390-19750739
  hyper

SEQ ID NO: 352072 - DNA, 224 bp, Homo sapiens; identical to SEQ ID NO: 345544
  chr18:19750806-19751030
  hyper

SEQ ID NO: 352073 - DNA, 195 bp, Homo sapiens; identical to SEQ ID NO: 345545
  chr18:20512643-20512838
  hyper

SEQ ID NO: 352074 - DNA, 1232 bp, Homo sapiens; identical to SEQ ID NO: 345546
  chr18:20512902-20514134
  hyper

SEQ ID NO: 352075 - DNA, 1113 bp, Homo sapiens
  chr18:23806188-23807301
  hyper
cggatgccgcagttttccaagtgcagcttgcccctcccacgtgataggtttctggcatcgcccctccttgctggcgattctggggaagattttaacgctccctggagccgtccccagtgacgtcacgggcgcggctccgctccttggccaatcacgcggccggatcccggggaaacccggggcggtggcggcggcctgggcgcgtgcgcgaggtctccgcgtggctatataaacatggctggcgtggccgcgcggcggggccgtgccaatcgcgcgtagggggctgtgggcactcggggttcgtagttttgaaatttctggcgggggagcagctgcgcagttaggctcgaggtgtgagcgacgaccttccgggagccgcaagtccaggctcccccgcagcgggacccgagcctgaggcgcagggctgaggcagcgcacgtgtgagcgccgctgaggaagctgcgagaggtcgggcgggtgtcgctccgggggcagcccaggctcgcgcggacgagaggaaggtccgggacgcgcgtgtcctgccgtgcagcgggcgcccgtcactgacttcgctgctgcggcccccgcgcctctccccagcgatgctgtggaacccgaaccgcaccggagtcggctgccgcgcgccaagcctcccctcacctctgctcccggaaccgcagcgccaaagctgccgctgagcccctgggggatgcccgccggcctcaccgaacccgccggcgccgctcccccggctgctgtgagcgcctcggggaccgtgaccatggccccggccggggcgctgccggtgcgggtggagagcactccggtggccctgggcgccgtgactaaggctcctgtcagcgtctgcgtggagcccacggcgtcccagcccctgcggtcccccgtggggaccctggtgaccaaagtggctccggtcagcgcccctcctaaagtcagcagcggccctaggctgcctgctcctcagatagtcgccgtgaaagcccccaacaccacgacaatccagtttcctgctaatttgcagcttcctccaggtatgttgataaccctttccagccttgtctgtcggtccagctggcggcgacgggaaaattc

SEQ ID NO: 352076 - DNA, 121 bp, Homo sapiens; identical to SEQ ID NO: 347492
  chr18:24130266-24130387
  hyper

SEQ ID NO: 352077 - DNA, 455 bp, Homo sapiens; identical to SEQ ID NO: 204931
  chr18:25756040-25756495
  hyper

SEQ ID NO: 352078 - DNA, 105 bp, Homo sapiens
  chr18:25756986-25757091
  hyper
ggaggcggagaggggccgagcgaagagccggaggaggcggcggcggcggcggcggcggcggaggaggaggaggcagcggcagcaccaacagcggcgcggagaaac

SEQ ID NO: 352079 - DNA, 290 bp, Homo sapiens; identical to SEQ ID NO: 292990
  chr18:28622129-28622419
  hyper

SEQ ID NO: 352080 - DNA, 281 bp, Homo sapiens; identical to SEQ ID NO: 293004
  chr18:30349781-30350062
  hyper

SEQ ID NO: 352081 - DNA, 287 bp, Homo sapiens; identical to SEQ ID NO: 345547
  chr18:31804522-31804809
  hyper

SEQ ID NO: 352082 - DNA, 1207 bp, Homo sapiens; identical to SEQ ID NO: 345548
  chr18:32556625-32557832
  hyper

SEQ ID NO: 352083 - DNA, 45 bp, Homo sapiens; identical to SEQ ID NO: 204955
  chr18:32557883-32557928
  hyper

SEQ ID NO: 352084 - DNA, 445 bp, Homo sapiens; identical to SEQ ID NO: 345550
  chr18:32558003-32558448
  hyper

SEQ ID NO: 352085 - DNA, 593 bp, Homo sapiens; identical to SEQ ID NO: 335791
  chr18:32621215-32621808
  hyper

SEQ ID NO: 352086 - DNA, 32 bp, Homo sapiens; identical to SEQ ID NO: 293036
  chr18:34823862-34823894
  hyper

SEQ ID NO: 352087 - DNA, 755 bp, Homo sapiens; identical to SEQ ID NO: 345552
  chr18:42258983-42259738
  hyper

SEQ ID NO: 352088 - DNA, 120 bp, Homo sapiens; identical to SEQ ID NO: 204967
  chr18:42259821-42259941
  hyper

SEQ ID NO: 352089 - DNA, 1164 bp, Homo sapiens
  chr18:42260083-42261247
  hyper
tgatatctctctccataaatcggtggcgcggcggaggcggcagagtcgggcgggaagcgcggggccggccggggcgcccgccgctcgccgccgcctccgcgcgcccgggggccccggcgccccccgagctagggcggccagctcgcggctcgccgtttgacagatgctcatcgccatggagttgccgcagcagcacctttgggggctcgggcgagcgacgggagccgggatctgagcgagcgccggggccagcggagccggagccgccgggacatgggtgagcacgcgcggcgaccttggcccgggagcccgggcgcccagcctccctccgcgccgcgggcccccgcactcccggaaccgggggcgacgtgtgtgccctgcatgcaaaagttcacgtcgccttgctgggtctttgactttgcacccggcgggaagggggagaccgggccgagggggcgggatgccggtccgggcgaggttgcaggagatgggcgcgattccggcgggccggcgggtgggcggcgatgctggctcaattggagtggctcgttggtggcggcgatggtggaagctttgggctggagggctgggagcttattgagtttcgcctaatctgatctaccccccctccgccccccgccttttgcaccctccctcggtcctgcagccggctggcggggctggcgggtttggcgttggtggagtggactcgggagggggagggggtaaggaaaggggtgggaaggcaggattttttttttctctctttgtaacttgcaggttaagtggagctagagagctacattgtaacctagttggatttttttggggggggaatgtatcagaatctaacgtgtcgttaatagaaagaagaacaggcaagaagtggtccagccggcgaaggttggtgtgtgcttgtgttgtgcctgtgtgttagtctttttcttaaaaatcttaatcaatggatttgagtctctttcttgtgctctctggttttgggactctgaaaagataggaattcccttaaaagcagacgaatgcctttttgaaagcacgcattgtgtgcgtttctagaggagccgtgggcttgggaatgaacggcaggcttccccgttcggtggtttccagtgggaaatcactccggaaagggaacccttcggtatc

SEQ ID NO: 352090 - DNA, 79 bp, Homo sapiens; identical to SEQ ID NO: 345553
  chr18:44335955-44336034
  hyper

SEQ ID NO: 352091 - DNA, 796 bp, Homo sapiens; identical to SEQ ID NO: 335809
  chr18:45687770-45688566
  hyper

SEQ ID NO: 352092 - DNA, 154 bp, Homo sapiens
  chr18:45934877-45935031
  hyper
cgacttgacagcagcaaggatctttgagtcctgcatgagcgacacctcgggcaaggactgtactctgctcagatctcatcgagaggtgctggatcccagcctttccagctcattttccaattttcaagaaaagacagcgcgaagtgagactgca

SEQ ID NO: 352093 - DNA, 660 bp, Homo sapiens
  chr18:45935196-45935856
  hyper
ccagccccgcgcgccacttcgctccgggccgcggtgccagccaggaggcgcggcgcccgctcgctggctcgctctccgctggctctcccctccctccttccctccctccctcctcccgcctcctccgttgcatggctgccgcacggagcccctgaatagccaccgcagccccccgcctcctgcccaccgcgcggagggcgcccctgctccagccggcgccccaaggcgcgcggaccgccggcctcctagcaacggcccccgcaatcgctttccggcgcagcccaagcaaagccacccgcccgccgccccgcgacctcccgaactgcctcggctgccgaggtgctgtggagatcgcgaccccggcagccggcgcccgagcccggcgcgcgaagccgctcacctccgcgcgccgccggccctgcgcgcctcccgcacttggctccgggacgcagtcctggcgtcctccttcgccgccggtgtccgccggtccctgcgcgcccgagcctcgccggccgcgccgctgtcagagtctcgtggcggggctgcgccggcgggtatggagctgagcggcggcagcgggcgagcgggcagctcctccctccccgcgccgcgcctccgccctccccgcgccccgcctcccgcgccgcggctgtcagcccc

SEQ ID NO: 352094 - DNA, 1224 bp, Homo sapiens
  chr18:45935857-45937081
  hyper
cgccccgcgccccgcgcccgcgccgccggctcggggggcgcacagggctaaagggcccggatgtgtgcggtcgcctgtcgctcgcgcccgccccctccccgccgcgcggcacatgcacttgctgcgccgcagcccccgcccggctccgctaatttctattttgacagtaactgtggcgagtgggcggcgcggcggggggcgcccgggactggcggaggctgcgggcgggagtcaggacccgacgcggaggcggagtgggggggccgggcaccgccaccaaccgctcggggctccgcgtcttttctctttctttccttttttctctctgcctcctccaggatttaaagggacagccccggcagaggcgagggggccaggcggccgccgtttctccggtctcctgacgccctctgcggcccggccggacccgcccgcacccccagcgcaggcttgggaccgccgggtatttttaggtccacacccgacccggggcagcggtgcggcagagatgggctctgccgacccggggcagcggtgcggcagagatgggctctgccgccccggcgcacggctatttttacagagtccgatgggggaggaaataaaacaactcggcaactgcttttctacccgaaagtcgggagcaaggagtgggggcgagaagttaagtttcccaaatgctctcggcactccagcgagcgcaccaagacgcctagccagcacctgaaaccgcaagcttgccgcaccccggggcgccgaatctcagcgggcaatcgcgctcggcggcgctgcggcccggagtccccacccctctggagccttgggccccgcactccgcaccccacacgccggggagcagccgctggccgcccgtcactccccgggtcggcctggaaggcggccttccgaagcgtccaatcaccgcgcaacaatgccaacgggcgggcccggggagggcttgtccccgccccgtcccgccgggccccgccccctcggagtctgtcggggcaggagaatctcgctgggacgccgagtgctcagcggtgctggaagccacgaagggccagtgcgaggggaggaggaagggtcctggccctggagagggcgtgagcgttctcgggcgaggcgacacttgggcagatgttccctccagctacgggccggggaaactcgagctggctttgcctcctacctttttgcagtccacccctctgcgctccagac

SEQ ID NO: 352095 - DNA, 75 bp, Homo sapiens; identical to SEQ ID NO: 347503
  chr18:45937111-45937186
  hyper

SEQ ID NO: 352096 - DNA, 556 bp, Homo sapiens; identical to SEQ ID NO: 335811
  chr18:46502500-46503056
  hyper

SEQ ID NO: 352097 - DNA, 357 bp, Homo sapiens; identical to SEQ ID NO: 204988
  chr18:47087704-47088061
  hyper

SEQ ID NO: 352098 - DNA, 242 bp, Homo sapiens; identical to SEQ ID NO: 347506
  chr18:47088502-47088744
  hyper

SEQ ID NO: 352099 - DNA, 195 bp, Homo sapiens; identical to SEQ ID NO: 345554
  chr18:47339411-47339606
  hyper

SEQ ID NO: 352100 - DNA, 400 bp, Homo sapiens; identical to SEQ ID NO: 204991
  chr18:47339758-47340158
  hyper

SEQ ID NO: 352101 - DNA, 101 bp, Homo sapiens; identical to SEQ ID NO: 347509
  chr18:47720391-47720492
  hyper

SEQ ID NO: 352102 - DNA, 279 bp, Homo sapiens; identical to SEQ ID NO: 293092
  chr18:47720522-47720801
  hyper

SEQ ID NO: 352103 - DNA, 436 bp, Homo sapiens; identical to SEQ ID NO: 347511
  chr18:47720908-47721344
  hyper

SEQ ID NO: 352104 - DNA, 53 bp, Homo sapiens
  chr18:53257322-53257375
  hyper
acacaaaagtgtagtttcggcacaaatttacaaattaaactccacagacttcc

SEQ ID NO: 352105 - DNA, 44 bp, Homo sapiens
  chr18:53446783-53446827
  hyper
cgacttaacgtttcaggaatatgaattctatgttcagaaaattt

SEQ ID NO: 352106 - DNA, 34 bp, Homo sapiens; identical to SEQ ID NO: 347512
  chr18:54789287-54789321
  hyper

SEQ ID NO: 352107 - DNA, 118 bp, Homo sapiens
  chr18:55021430-55021548
  hyper
tgcagatggggttccctagttttctttttttctctcgggtgtgtgtgggagcagagggtggaccaaatgagaggggctccgggacggaacggagcccgcacgcgtaccagccgccctc

SEQ ID NO: 352108 - DNA, 49 bp, Homo sapiens
  chr18:55104759-55104808
  hyper
cgcggggaaccggcggccaggatacaacagcgctcctggagcccatctc

SEQ ID NO: 352109 - DNA, 279 bp, Homo sapiens; identical to SEQ ID NO: 205011
  chr18:55105185-55105464
  hyper

SEQ ID NO: 352110 - DNA, 57 bp, Homo sapiens; identical to SEQ ID NO: 347514
  chr18:55106090-55106147
  hyper

SEQ ID NO: 352111 - DNA, 100 bp, Homo sapiens; identical to SEQ ID NO: 347515
  chr18:60985398-60985498
  hyper

SEQ ID NO: 352112 - DNA, 75 bp, Homo sapiens; identical to SEQ ID NO: 347516
  chr18:60985973-60986048
  hyper

SEQ ID NO: 352113 - DNA, 81 bp, Homo sapiens
  chr18:61603403-61603484
  hyper
cgagcgcaatgcagcgcgcgttcctcctcctgggcgcccatcctcggctgctgcctcttcctttcgggccccgggacctga

SEQ ID NO: 352114 - DNA, 200 bp, Homo sapiens; identical to SEQ ID NO: 293162
  chr18:61603701-61603901
  hyper

SEQ ID NO: 352115 - DNA, 208 bp, Homo sapiens
  chr18:61603985-61604193
  hyper
ggcgggcgagttcccgcaaggccagcgcggaagggaagaacacggtgtggggaggcaggggctcaggagggcgccatcagctggtgctcagagcccggaggaaggaactccccccggagttggggggggtggccctagggatgcctcaccggccccatctctccacggagctacgggtagcatcgcccatcgctcctacaccccacgc

SEQ ID NO: 352116 - DNA, 65 bp, Homo sapiens
  chr18:70211724-70211789
  hyper
cccgggcctccctgccgcaggctgcggaccggcggactccgacagaagacgggggagtcctggcc

SEQ ID NO: 352117 - DNA, 122 bp, Homo sapiens; identical to SEQ ID NO: 335849
  chr18:74163260-74163382
  hyper

SEQ ID NO: 352118 - DNA, 817 bp, Homo sapiens; identical to SEQ ID NO: 347518
  chr18:74844285-74845102
  hyper

SEQ ID NO: 352119 - DNA, 583 bp, Homo sapiens; identical to SEQ ID NO: 293194
  chr18:77160022-77160605
  hyper

SEQ ID NO: 352120 - DNA, 67 bp, Homo sapiens
  chr18:77160661-77160728
  hyper
cgagcgctcgcggcggggtcctgggggaagagcgcagcccggacacgggcgtggacgaagtggtccc

SEQ ID NO: 352121 - DNA, 251 bp, Homo sapiens; identical to SEQ ID NO: 205052
  chr18:78004742-78004993
  hyper

SEQ ID NO: 352122 - DNA, 33 bp, Homo sapiens; identical to SEQ ID NO: 205053
  chr18:78005051-78005084
  hyper

SEQ ID NO: 352123 - DNA, 405 bp, Homo sapiens; identical to SEQ ID NO: 205054
  chr18:78005162-78005567
  hyper

SEQ ID NO: 352124 - DNA, 179 bp, Homo sapiens
  chr19:460121-460300
  hyper
aaacaccccttcccgcacccccaccgcaggccagcgtctcgggccccgtctgtcattcgtgaacagctgtccggggggctccggtggcagagacgccccggccgctcgccgctctcggcctcgcccgcccagtccgagtggggggcggtgcacctgcgcatgcgcgcccctcccccgcc

SEQ ID NO: 352125 - DNA, 146 bp, Homo sapiens
  chr19:460529-460675
  hyper
cgcacgacgtaggagaccccgggccccaggaccctggcgtcggggtgtagccagccgtgcgcgggtttgtggatgaagctgcccttccggatccactcggcggcggcggcggcgtccccggaccccgccgccccccgcccgccccg

SEQ ID NO: 352126 - DNA, 405 bp, Homo sapiens; identical to SEQ ID NO: 293214
  chr19:460726-461131
  hyper

SEQ ID NO: 352127 - DNA, 141 bp, Homo sapiens
  chr19:461187-461328
  hyper
actgaggccctccgaggacaccgggcgctggcctggaacccgcagccaaggcgggacggggctttgaacccagaaccccgtcagcgaccctccccgctgcgccccccacccccgcccgccgcccaagttcgcagaaggacc

SEQ ID NO: 352128 - DNA, 405 bp, Homo sapiens
  chr19:603411-603816
  hyper
cgcaggctcctcggaggaggcactggctcgaggtgtgggcgcccctcgtcccccaaggaagagtgcccggggctggtcccgcaggtgccccggggaggcaccggcctgaggtgtgggcaccctcgcccccaggttctactgggacttcaccatgctgctgttcatggtgggaaacctcatcatcatcccagtgggcatcaccttcttcaaggatgagaccactgccccgtggatcgtgttcaacgtggtctcggacaccttcttcctcatggacctggtgttgaacttccgcaccggcattgtgatcgaggacaacacggagatcatcctggaccccgagaagatcaagaagaagtatctgcgcacgtggttcgtggtggacttcgtgtcctccatccccgtgga

SEQ ID NO: 352129 - DNA, 159 bp, Homo sapiens
  chr19:603846-604005
  hyper
tgactccgaggtctacaagacggcacgcgccctgcgcatcgtgcgcttcaccaagatcctcagcctcctgcggctgctgcgcctctcacgcctgatccgctacatccatcagtgggaggaggtgaggtggggcgggggcggggccaaggcagcaggggc

SEQ ID NO: 352130 - DNA, 155 bp, Homo sapiens
  chr19:661431-661586
  hyper
cgagacccctgggagacagaggagtaaggcaaggctcagtctcagctccccaaccttcgccccacacccgagatttcactttatttgttcctcctgctggggaggggaagccctgtggcttcagtagagaggaaaccacacctctctctttccac

SEQ ID NO: 352131 - DNA, 296 bp, Homo sapiens
  chr19:661720-662016
  hyper
cttctggggggcttggacttctcttacgggtcaaagcgtagcaacagccgggcggctacgtacacagcacagtaaatcctcaatgcctgcagcctcttcccctgggcacagggtggggagtccagacccctccacctcctgcggctgctcccctcaagctggccaagcggctcccgactgagccggctctgccactttcccgctgagccaccacgcgcctcagtttccccatctataaagcacgggtggctcgactaaatcaccactttgcacgtcagcctggcgaagggcaacac

SEQ ID NO: 352132 - DNA, 287 bp, Homo sapiens; identical to SEQ ID NO: 293229
  chr19:813409-813696
  hyper

SEQ ID NO: 352133 - DNA, 322 bp, Homo sapiens
  chr19:813830-814152
  hyper
gcgggggccggggccgcgggcttctctgcaggtggggcctggaagttgcccaccgcgtggcaggcctgtcggggagaggggtctgggggtgaggcctggggctcagagggctcctcccctgtgatcgttggacttgccgcggggggctctggaccgggggtgggggctggcaagctcttgtccagtgggaccggttcccaccccaaggttgctgacccagcacatcgggcaggtctgagcccacgggattctgactccagcattccaagggcgagacacttcagcacccatgccttccccctaagaccccttcgggacccac

SEQ ID NO: 352134 - DNA, 743 bp, Homo sapiens; identical to SEQ ID NO: 335871
  chr19:941824-942567
  hyper

SEQ ID NO: 352135 - DNA, 152 bp, Homo sapiens
  chr19:1444961-1445113
  hyper
cggcgcttctcacatccccgcggcctcccccctggacggcagtttacactgaactcggcgccctcccctgacttctgaaggaggagtcctgggtggccccgaagcctccccggcagccgcacggctccgtccccgctccagggttcagctga

SEQ ID NO: 352136 - DNA, 191 bp, Homo sapiens
  chr19:1675929-1676120
  hyper
cgccgcctcggggttatcgatcgcagccttggaaacgcgattagattatcccggctgggaacggcagcctggcgggggccgcgcgggggaagcgcgccgcttcttgtaaacggttccccgaagggcgctgggccaggggcctgggagggggctcgttcccggtggggggggcgtcccggtgcggcgcggcc

SEQ ID NO: 352137 - DNA, 98 bp, Homo sapiens; identical to SEQ ID NO: 345556
  chr19:1725428-1725526
  hyper

SEQ ID NO: 352138 - DNA, 280 bp, Homo sapiens; identical to SEQ ID NO: 205085
  chr19:1748599-1748879
  hyper

SEQ ID NO: 352139 - DNA, 349 bp, Homo sapiens; identical to SEQ ID NO: 293279
  chr19:1748939-1749288
  hyper

SEQ ID NO: 352140 - DNA, 70 bp, Homo sapiens
  chr19:1749318-1749388
  hyper
ccttcccctcgggcaccctcggacgcccccgccccagcgtgttactttctagatggggaaactgaggcgc

SEQ ID NO: 352141 - DNA, 217 bp, Homo sapiens
  chr19:1751192-1751409
  hyper
cggagtccctgaccctcgtcttctctttcaaaatggatgctttccctgctagaaaagccacacacgcttgctattaaaatgaacacgatcatcaagctgtaaaaaatatatttaaaaggaagcctgcaaaatcccagctccctaggagctcccccacattggcatttgggggaacttccttccaccttgttatcctcccacccgtagagacccccag

SEQ ID NO: 352142 - DNA, 112 bp, Homo sapiens
  chr19:1751497-1751609
  hyper
atctgtgattgttggagggtgagaatgaggagcgcaggctggggctctgtgcagccacatcccccccgccgagattcagcatctgcacggggagtggggtacgcgactgttc

SEQ ID NO: 352143 - DNA, 286 bp, Homo sapiens
  chr19:1753216-1753502
  hyper
cgcgaaatcggagactctgggtcgaggcccccagccccacctgggcagagtctgtcctcggacccccgcccgctgtcccccgggtacggcctgccccagcgggcgcgggcgggcgcagtggccagggacgccgaagccccaagtctggccgacttcggcctgcttggtgctcgagtggggccggggcgggcggagagcgaggctgcgggaggcagcggtggcaggagcgggtgggcgggggcgctgacgtcagacccgggcccgggcgccggcggccgctcccctg

SEQ ID NO: 352144 - DNA, 74 bp, Homo sapiens; identical to SEQ ID NO: 347521
  chr19:1761779-1761853
  hyper

SEQ ID NO: 352145 - DNA, 189 bp, Homo sapiens; identical to SEQ ID NO: 205090
  chr19:1761983-1762172
  hyper

SEQ ID NO: 352146 - DNA, 47 bp, Homo sapiens; identical to SEQ ID NO: 345558
  chr19:1762820-1762867
  hyper

SEQ ID NO: 352147 - DNA, 108 bp, Homo sapiens
  chr19:1765525-1765633
  hyper
cgccgcttcacgctgtcctgtgactgtgagtggaggccagctcctggagctgcctctctctggcctcacgcagcagctgctccctgaatggtgaatggatgagtcggt

SEQ ID NO: 352148 - DNA, 339 bp, Homo sapiens
  chr19:1766024-1766363
  hyper
cgcccgtccaaggccccacaagctgatgccggttttcccgcccagaactggaacagctttcctaacggtcacaggtttcttagcttctcacttgggtggggtttggatgtgcaaggctgccgacccccatcgtggttgagcgcccgtgcaggcgccacccacccacccacagcacctcgctcagacttcgccctccaccccgccgggacatttgggaagcctcaggcagccccacgcgggcacacccgatggtggacggaggctggcaccctcagcccgcacgcggccaacgtcaggcgcgcgcagaggcacccacgggcccgccttcaggggcgaggc

SEQ ID NO: 352149 - DNA, 68 bp, Homo sapiens
  chr19:1769669-1769737
  hyper
cggcccccctactccaactcacacctctgtcagcggctgtgggggatgggagcaatgacaaagctgct

SEQ ID NO: 352150 - DNA, 306 bp, Homo sapiens
  chr19:1775741-1776047
  hyper
cgcccagagggcctcgagaaaaaccagggctcactgtgttgtcccctaaagcgggtcaagaagcacatactagaaatataaaccgggtatttaaaaatggaattttaaagaataacccctcctccgtcagatcccctgccccaccgagggaggtagtagaaaacttccttcctccccacccgccccggccccctccccagggacctcagccctttccaaagtcgccaaaaacccacatcaagccggatccttacggtcccccaccctctccaaaaccaaccccacccgctggcaggacggcccctg

SEQ ID NO: 352151 - DNA, 223 bp, Homo sapiens; identical to SEQ ID NO: 205095
  chr19:1776743-1776966
  hyper

SEQ ID NO: 352152 - DNA, 109 bp, Homo sapiens; identical to SEQ ID NO: 345559
  chr19:1857456-1857565
  hyper

SEQ ID NO: 352153 - DNA, 116 bp, Homo sapiens; identical to SEQ ID NO: 345560
  chr19:1979018-1979134
  hyper

SEQ ID NO: 352154 - DNA, 601 bp, Homo sapiens; identical to SEQ ID NO: 335900
  chr19:2461998-2462599
  hyper

SEQ ID NO: 352155 - DNA, 598 bp, Homo sapiens; identical to SEQ ID NO: 347527
  chr19:2579147-2579745
  hyper

SEQ ID NO: 352156 - DNA, 72 bp, Homo sapiens; identical to SEQ ID NO: 347528
  chr19:2702445-2702517
  hyper

SEQ ID NO: 352157 - DNA, 453 bp, Homo sapiens; identical to SEQ ID NO: 347529
  chr19:2702553-2703006
  hyper

SEQ ID NO: 352158 - DNA, 229 bp, Homo sapiens
  chr19:3360723-3360952
  hyper
cgactgtgcgcgcgtccctgcgggacggtgttgtgaaactatggctgggctgcgtgtccgcggagccgcgtgtccctgggtgaccgtggggtgtccccgtgtgggtgtgtggcggttggggggggtcgccagggagtggagaactgtcgagtggccgcgttccaggggacagttgggtgccgcttgctgtgtgcgagtgactggcgctgagcctccccctagggaaggg

SEQ ID NO: 352159 - DNA, 46 bp, Homo sapiens; identical to SEQ ID NO: 347530
  chr19:3785511-3785557
  hyper

SEQ ID NO: 352160 - DNA, 265 bp, Homo sapiens; identical to SEQ ID NO: 205120
  chr19:4054040-4054305
  hyper

SEQ ID NO: 352161 - DNA, 55 bp, Homo sapiens; identical to SEQ ID NO: 205121
  chr19:4054380-4054435
  hyper

SEQ ID NO: 352162 - DNA, 170 bp, Homo sapiens; identical to SEQ ID NO: 205122
  chr19:4054471-4054641
  hyper

SEQ ID NO: 352163 - DNA, 520 bp, Homo sapiens
  chr19:4054917-4055437
  hyper
ccacgttggctgtgctgacggtgagcgtggccgtgtaggcgaagtccatgagcgcggtgagcgcctcggcgctgacgaagtcgatctcgtacacgttctgctggtccaccacggcgcccgacgtgaacagcttcttgaagtactggctgcaggcggccagcaccgagcggtgcgtggggaactcgcggccctccaccaggatcaccacgtcgcacagcaggccctgcgtccgctgctcgttcagcccactcaggatgtcgctgctgtggtcggggaacgggatcccgatggggccgtccacgccgccggccatcttccgcgccgagacctgcagcagtggggaaggagagggcgctcgtgagtgggggtgcgggggttcctgtgcccactgacaagggcccgaggcccttgagaagcagcgttccaccctgctcccccagcctcacattcccacctgcacgtgaaggcggtcagatgtcgcgcctttccagccccagcttccccagctgtgcaccaaagc

SEQ ID NO: 352164 - DNA, 36 bp, Homo sapiens; identical to SEQ ID NO: 335909
  chr19:4064382-4064418
  hyper

SEQ ID NO: 352165 - DNA, 97 bp, Homo sapiens; identical to SEQ ID NO: 205124
  chr19:4064872-4064969
  hyper

SEQ ID NO: 352166 - DNA, 107 bp, Homo sapiens; identical to SEQ ID NO: 335912
  chr19:4432865-4432972
  hyper

SEQ ID NO: 352167 - DNA, 242 bp, Homo sapiens
  chr19:4523777-4524019
  hyper
cgctccacaaggatgggcgcgaagggtcccaccagccagggcagcggcacggcctgcaccaccagctccagcagctcgtccacgcaggcgtgcgcgtgggccacgcgaccccggccctcggccagcgcggccgctggcacgtccctgaagcagcgggcatcagcgaaggcggtctgcagggcatccacactgcgccgcacctcagccaccttctcctgggcgccggcgggcaggccccgcac

SEQ ID NO: 352168 - DNA, 438 bp, Homo sapiens; identical to SEQ ID NO: 347531
  chr19:5608081-5608519
  hyper

SEQ ID NO: 352169 - DNA, 290 bp, Homo sapiens
  chr19:5961947-5962237
  hyper
cgcgtggttccccttgttttccatggccagtgcttactcctgcacagacaccatctccttcaggaagctcccactgtgagaggcgtgcctgccctgctgcactccctcccgagcaggccttatatcctgccacggggcacgcggagaccacggccacagcagctgaaacagcctatcacccagcgtacaccgcatcaacaccctgcaatgagtgtttgaactaggccctctctctgtcattcatctacacaacaccagctgctacgtactcacaaatatttactaagccc

SEQ ID NO: 352170 - DNA, 45 bp, Homo sapiens
  chr19:5962455-5962500
  hyper
tctcagtgccaaacacagagcctcacacttaacaggcactcaacc

SEQ ID NO: 352171 - DNA, 1037 bp, Homo sapiens; identical to SEQ ID NO: 335924
  chr19:7459644-7460681
  hyper

SEQ ID NO: 352172 - DNA, 685 bp, Homo sapiens; identical to SEQ ID NO: 335930
  chr19:8274278-8274963
  hyper

SEQ ID NO: 352173 - DNA, 689 bp, Homo sapiens; identical to SEQ ID NO: 335931
  chr19:8372877-8373566
  hyper

SEQ ID NO: 352174 - DNA, 322 bp, Homo sapiens
  chr19:10024009-10024331
  hyper
cgtcccctacccaggcgtgccgggcagggtcgtgggaagcacaggggtagagggggacaggtgggggccccgggggctgcggcggcggcagcggctgtggcgcgggtaccacgccccccgggagcgccccccgcgcggcggccactcacgattttctcagaggcgcccgcacgggacacggtgccgttgagccccacgagcgagggcagcgtctgcgacatccagttggtgaccatggccatggtgctcagcacggccccgatcttgagcagcggcaccgacatcgcgcctccgcctcatgccccgcggccgcccgccgcgc

SEQ ID NO: 352175 - DNA, 211 bp, Homo sapiens; identical to SEQ ID NO: 347533
  chr19:10197461-10197672
  hyper

SEQ ID NO: 352176 - DNA, 169 bp, Homo sapiens; identical to SEQ ID NO: 335936
  chr19:10207022-10207191
  hyper

SEQ ID NO: 352177 - DNA, 992 bp, Homo sapiens; identical to SEQ ID NO: 335937
  chr19:10381056-10382048
  hyper

SEQ ID NO: 352178 - DNA, 214 bp, Homo sapiens; identical to SEQ ID NO: 205174
  chr19:10400761-10400975
  hyper

SEQ ID NO: 352179 - DNA, 278 bp, Homo sapiens; identical to SEQ ID NO: 293499
  chr19:10401208-10401486
  hyper

SEQ ID NO: 352180 - DNA, 290 bp, Homo sapiens; identical to SEQ ID NO: 293500
  chr19:10402604-10402894
  hyper

SEQ ID NO: 352181 - DNA, 340 bp, Homo sapiens; identical to SEQ ID NO: 293501
  chr19:10402960-10403300
  hyper

SEQ ID NO: 352182 - DNA, 131 bp, Homo sapiens
  chr19:10403330-10403461
  hyper
cgaggggcagatggtgacagtaacctgcgcagctggggcccaagctctggtcacactggagggagttccagccgcggtcccggggcagcccgcccagcttcagctaaatgccaccgagaacgacgacagac

SEQ ID NO: 352183 - DNA, 484 bp, Homo sapiens
  chr19:10529649-10530133
  hyper
cggtttttgctcggcgttcgcccacgccgggagccccctctggcggggagaaaagtggctgtgggggttgaagaccggcagtcttttttttttttttttttttttttcaaataaggagaagggcgcggggggagggcggtggcaaacggcatcgcgtgccctggggagcccgtgacagggggcgcacgggggcaggggtctggtccccgggtcccgcagcagagcagtttcgcgttcgagctcttatcggcgtggggggggggggcggtgggacacgcgggcgcgtgcactccccccgcccagcagccatccttgggggggttgagggggatgggggcgcactcggatcccgctcgctctctgcttgctcgctcggcgcggcgctgggggaggcgggagcgtgagtcacggcgactcccgatttaggtgccggaaggggggctctgctggcgggggccgcagggaggaggctcgcctgtttact

SEQ ID NO: 352184 - DNA, 111 bp, Homo sapiens
  chr19:10530526-10530637
  hyper
cctccaaataggtagcacatgtgcgcacacatccttcacccacagacacacacagttatacacacagccaaatccagagaaacgggcagacaacagcagccaaccacgtgc

SEQ ID NO: 352185 - DNA, 630 bp, Homo sapiens
  chr19:10530654-10531284
  hyper
cgacactgaaaacacagacaaccctcggaagaggccacgtgcgcgcacatcccgccccgggcccgcaccatcactatcctccgacgcacagacaggagatcccacacactctgccgccgcccgctgcaggtaccgcgccggtggcactaggaccactcctcaaaaactgccccccgccaggggtagcggcgaggacacgccaacaccggactccgccctcgccatgatggaccgactgactgacactctggcaaccagtccggtgtctgcttccagatcggattaaccgtttaactccttcgtgcctgtgcgcgccgcggccaagcagggtgctttgaagacagacgagttccagcgccccctcccagcccggagcggggatctgcgtgggcgggaagggcccccctccttaggtagctgccccccgctggcccggacggaggaggaggggggcggcgctgacagccgcggcgggcggggggcggggaggggcgggacggggcggaggagccggggctggcgccgagcgggccgcggaacgcggagcgcggagcgcggagagcgccgccgggcactgagcagagctccaggcgccgaaaggaagctgcagagcccggcccgggggcgatt

SEQ ID NO: 352186 - DNA, 115 bp, Homo sapiens
  chr19:10691764-10691879
  hyper
cgctcaatcatgaaacagcctttgcagtcagccaatggctgcaatactggccgtgatcagcagatggtgagcgagcgcttatttcaaaacgggctgcgattctcttaagtcccca

SEQ ID NO: 352187 - DNA, 177 bp, Homo sapiens; identical to SEQ ID NO: 335952
  chr19:11199850-11200027
  hyper

SEQ ID NO: 352188 - DNA, 146 bp, Homo sapiens; identical to SEQ ID NO: 335953
  chr19:11466008-11466154
  hyper

SEQ ID NO: 352189 - DNA, 597 bp, Homo sapiens
  chr19:11491655-11492252
  hyper
cggggaggaggtcagggcggtgggcttgccccgtgattcgccctggctcctcctacacccccgcctggggcctcaccgctaggcgtcagcagcgacacaggctccgaccaggcgctccagaagccgccgaagctcggctcagccatacgcgcgcggacggcgaaggtgtagcgcgtccggccccgcaggttgctcagcacacactcggtgcggccctccaggatctccacctgggggcggaatcagggcgagggacgcgtagcagacaaaaatagatgacgtgggggcgggccctggtggaactgagccaatcaggggaaaggaaaacggtgccctagaattgcaatgggaccaataagagtagggggaggagcccaagaaagctcagggccaatcagagagagagtctctggtacgaaagggcgggacccgggcaatttaatatctgggctagcactcgtagagggacccgggcgctaaaggggtctagggttacgggccggagggagaagaagttggggttcaacaggcttgcgaggacattaggaaagggggtgtgtctgtgggcgtggaacggtcttcagcaccagggtaatg

SEQ ID NO: 352190 - DNA, 134 bp, Homo sapiens; identical to SEQ ID NO: 205186
  chr19:11492528-11492662
  hyper

SEQ ID NO: 352191 - DNA, 163 bp, Homo sapiens
  chr19:11529251-11529414
  hyper
cgcccactgcacctggcggcctgtgctcggctctccagctccgccctcaactggtcgcttccggccccgcgccacccaccaaaccccctcctcacctggctgcccccggggccctccgccgggctcctgcgctgactgcgctgccgccgcagggagacactgt

SEQ ID NO: 352192 - DNA, 50 bp, Homo sapiens
  chr19:11531278-11531328
  hyper
cggtaacatttattgcgcaactctgaggccggggcggacccagctgggga

SEQ ID NO: 352193 - DNA, 37 bp, Homo sapiens; identical to SEQ ID NO: 293533
  chr19:11531888-11531925
  hyper

SEQ ID NO: 352194 - DNA, 284 bp, Homo sapiens
  chr19:11532739-11533023
  hyper
cgagggaggccattgtgggatggcctcctgaagaaatggccctctgctgcgggcaggataggtcttctgtctcgggctgctccagaactgcagataggtctccgagcttttcggggacagggtgggacttctttcccttggaggcggagcttgagacgggacagggtctctgacgtcttgggcttccttggggagtgagagcttccccagggaggtggggcggggactctgaggaatggggtggggcttcccctgtgggcggggcctctgacgtccgggacaga

SEQ ID NO: 352195 - DNA, 67 bp, Homo sapiens
  chr19:11592604-11592671
  hyper
cgtgattggtcctcctgactgtggagtcatgctcgctctctgctagggggaacctggcctctctcta

SEQ ID NO: 352196 - DNA, 189 bp, Homo sapiens; identical to SEQ ID NO: 347537
  chr19:11593453-11593642
  hyper

SEQ ID NO: 352197 - DNA, 165 bp, Homo sapiens; identical to SEQ ID NO: 347538
  chr19:11805261-11805426
  hyper

SEQ ID NO: 352198 - DNA, 369 bp, Homo sapiens; identical to SEQ ID NO: 347539
  chr19:11805597-11805966
  hyper

SEQ ID NO: 352199 - DNA, 160 bp, Homo sapiens; identical to SEQ ID NO: 345564
  chr19:11909173-11909333
  hyper

SEQ ID NO: 352200 - DNA, 60 bp, Homo sapiens; identical to SEQ ID NO: 205194
  chr19:11909732-11909792
  hyper

SEQ ID NO: 352201 - DNA, 49 bp, Homo sapiens; identical to SEQ ID NO: 345566
  chr19:11959378-11959427
  hyper

SEQ ID NO: 352202 - DNA, 172 bp, Homo sapiens
  chr19:11999219-11999391
  hyper
catttgagcaaacagcgattcacgaatgagacacacccagtcctggcttgtggtttgtcaacggaaaaagccaaactatgtaaaataaagaagtttattcggagccgaataggagagaccttggccgagggaaaaacaaccccaagaagcctggagtaagtggtcccgaggc

SEQ ID NO: 352203 - DNA, 254 bp, Homo sapiens; identical to SEQ ID NO: 205198
  chr19:12075818-12076072
  hyper

SEQ ID NO: 352204 - DNA, 332 bp, Homo sapiens; identical to SEQ ID NO: 347544
  chr19:12098300-12098632
  hyper

SEQ ID NO: 352205 - DNA, 514 bp, Homo sapiens
  chr19:12146030-12146544
  hyper
cgaggcgggatccccccatgaccctcgcgtagtccccgcacaatgtggggagacgcggggcagcgggcgcggagctgcccagagagggctctgggaactgggtgacagtcaccgcgcagggacaggacgagacgcccgggtcccggcggccggcccagccccactgtggggccaaggggaccaagggccgagctgtcccacgggaaatcgggtcccagaccccggagtcgccgcggggaggcccgggtcccaccacagccggttccggccggttccaaccagctcctcccccgcctcgggacccctggcccgcacgctcaccatttcttgcctttcaggtgactcccacgaccagtgcgggtcacagcacaggcgacagaagctatggcagaggcacctgaaccctctcggaggggaaagccaggctcccaacctcagctcgccgcctggagccgggaaccgaggagagcagggccttcgccctccccgatggacactcggcaggccccgccca

SEQ ID NO: 352206 - DNA, 117 bp, Homo sapiens; identical to SEQ ID NO: 205202
  chr19:12163331-12163448
  hyper

SEQ ID NO: 352207 - DNA, 443 bp, Homo sapiens
  chr19:12250823-12251266
  hyper
cggcccagccgcaccctgcggccgaggggacgcagggacgagctgagacagagggattcgggtcccagatccaggaggcgcggcgaggaggcccagatcccaccacagccgcttccggccggttccacccagcccctcccccgtctggggactccggccccatacactcaccatttcccggcttctgggtgtcccggtgtcctctctagggctcccgtgaatagtgcgggtcacggtgcaggcggcagagcgacagaagttgtggcagagggacccggggcctctcggagtaggaaatctggtatcccgacaacaacctgcatagcaacaaaagtagaagctggaatgggcctcctccttccggacggaccgttggccgggctccgccccggcgcttctgattggacaaggtacaaggccccgccccctcagaactgagtgac

SEQ ID NO: 352208 - DNA, 226 bp, Homo sapiens
  chr19:12551198-12551424
  hyper
cgccaaccaggttgaagaccccacgagggagccctctcagcagaatgcggtttcttcacctcctgtcccaggattcacccctcacttccccaccaaccaaggacgctacacccagccgcccccgtccagaccccaaatccctcagggaggcggatctggggtgtcctcccctctcctcctgttaaaccgtttctgctgcagccctcggcgtctcggtgcagtgagt

SEQ ID NO: 352209 - DNA, 391 bp, Homo sapiens
  chr19:12551485-12551876
  hyper
cggagctgcccagagagggcgccggggccgcagtcgccgcgcaggaacgggacaggacgcccggggtcccggctgcatgcccagccccaccctgcggccgagggccgacctacgccagggggacccgggtccgtagatcccgaagtcgcccttggggaggcccgggtccagccacagccgattacggccggttccacctaacccctcccccgcctcgggacgccggcccagcacacgcaccatttcccgacttccgcggtgtcccaggtcctaccgacagctcccgctgccaatgcgtgttccagccagacaaaggctgcctcagaacttccaggtcgtctctcagctacagaacccagagccgagcgcaggtgggtggagcagacgccgc

SEQ ID NO: 352210 - DNA, 96 bp, Homo sapiens; identical to SEQ ID NO: 347546
  chr19:12595013-12595109
  hyper

SEQ ID NO: 352211 - DNA, 538 bp, Homo sapiens; identical to SEQ ID NO: 205207
  chr19:12595307-12595845
  hyper

SEQ ID NO: 352212 - DNA, 198 bp, Homo sapiens
  chr19:12595896-12596094
  hyper
gctcagtttccagaaaaaggctctttgtccacagcgaaaaaggacgcccgggccatgccagactagaacggaagggtcagacgctcccagacttagcataaggctgcgaggccattcatggatttctgactcttgtttacaaatacagacacttagagtgacagagtgacctcatcatacctaacaaagagtgactac

SEQ ID NO: 352213 - DNA, 159 bp, Homo sapiens
  chr19:12946904-12947063
  hyper
cgaatgccctgtctgcagtgtcaactattaatcctgtgcgggagaagcggaatccacttggccgagcggctctgcagctgagattggaggtggcgtctgtttacactgacgccaaagacccgaacttccgccgctccagtttgaccctttcttcgtccc

SEQ ID NO: 352214 - DNA, 259 bp, Homo sapiens
  chr19:12947127-12947386
  hyper
agccctccaggggcttaccctccaaggccggttacccggatctggacaccctgggctctgtggccagaaaatccaggtcttgatttcgcttgggccattgcagacacgcagccaggtcgactggtcctcattcactccggtcatgcaaagacagagggaaaacctggtttggattatcggtcacccgtggctcgggagggcagggctgccctttggccccgcctatatgtttgtccgttgtacaacggggtgggaggac

SEQ ID NO: 352215 - DNA, 199 bp, Homo sapiens
  chr19:12951477-12951676
  hyper
cggggccatgcttgtgtgggtgtggtcagtcgcagagggacggtcattggggggcggagactcaggtgggcggagactcaggtgggacggacagaaaggaggagtcgtacctgaggggcggggccatcccagatgaagccagaatcgtcttggaaggggccaggctgactcggcaacgaaaaaatttagagaggcgggg

SEQ ID NO: 352216 - DNA, 60 bp, Homo sapiens; identical to SEQ ID NO: 345568
  chr19:13208370-13208430
  hyper

SEQ ID NO: 352217 - DNA, 205 bp, Homo sapiens; identical to SEQ ID NO: 293612
  chr19:13208478-13208683
  hyper

SEQ ID NO: 352218 - DNA, 284 bp, Homo sapiens; identical to SEQ ID NO: 205227
  chr19:13208945-13209229
  hyper

SEQ ID NO: 352219 - DNA, 446 bp, Homo sapiens; identical to SEQ ID NO: 293614
  chr19:13209259-13209705
  hyper

SEQ ID NO: 352220 - DNA, 189 bp, Homo sapiens; identical to SEQ ID NO: 345572
  chr19:13213427-13213616
  hyper

SEQ ID NO: 352221 - DNA, 112 bp, Homo sapiens; identical to SEQ ID NO: 345573
  chr19:13213834-13213946
  hyper

SEQ ID NO: 352222 - DNA, 1257 bp, Homo sapiens; identical to SEQ ID NO: 345574
  chr19:13265772-13267029
  hyper

SEQ ID NO: 352223 - DNA, 223 bp, Homo sapiens
  chr19:13983612-13983835
  hyper
cgagagagggcgccccactccagctccagacagaggggtgggaacgtgaccccgacccggggcgggtgagagggcgggctctggggaaagggctctagaaggtgccgggaggcgggaggggggcttcgggagggcgagttagccgggatcgggcttgaggggccctacgaaattcggtttgggggcgtgcccggtcggggcggaccttagtggggggttgggc

SEQ ID NO: 352224 - DNA, 433 bp, Homo sapiens; identical to SEQ ID NO: 293628
  chr19:13983865-13984298
  hyper

SEQ ID NO: 352225 - DNA, 1302 bp, Homo sapiens; identical to SEQ ID NO: 335994
  chr19:14073521-14074823
  hyper

SEQ ID NO: 352226 - DNA, 32 bp, Homo sapiens; identical to SEQ ID NO: 205238
  chr19:14584167-14584199
  hyper

SEQ ID NO: 352227 - DNA, 324 bp, Homo sapiens; identical to SEQ ID NO: 335997
  chr19:15235629-15235953
  hyper

SEQ ID NO: 352228 - DNA, 106 bp, Homo sapiens
  chr19:15695669-15695775
  hyper
atccagggcctggcgaggggaaggcggagtatttctgagccaagaccctgacagcctctctggttgagcacagtggccccgtgctgagggcgggttgtcccagagc

SEQ ID NO: 352229 - DNA, 161 bp, Homo sapiens; identical to SEQ ID NO: 345576
  chr19:16186802-16186963
  hyper

SEQ ID NO: 352230 - DNA, 102 bp, Homo sapiens; identical to SEQ ID NO: 205249
  chr19:16187000-16187102
  hyper

SEQ ID NO: 352231 - DNA, 517 bp, Homo sapiens; identical to SEQ ID NO: 205250
  chr19:16187103-16187620
  hyper

SEQ ID NO: 352232 - DNA, 634 bp, Homo sapiens; identical to SEQ ID NO: 345579
  chr19:16187640-16188274
  hyper

SEQ ID NO: 352233 - DNA, 661 bp, Homo sapiens
  chr19:16772102-16772763
  hyper
cgacctcagttacttcatcgtctccatcctctacctcaagtatgagccaggtgagccggggcggggggctggaggggaccggcagcgggtggcgcgggccggggcagctcgggggtcgcagagaggggaagcccgtgcgtggtggagggagcgagggacaggttcaaggattgcatcgtgggagtaggcaggcgctagaatcgtggggttctctcacgccggggtgagcccgggggagaagcccccaggacgatgaagctgggggaggggaaggagaggcgtgcgcgggtttagaggagggggaacaggtgcttggggtcggggctcctggttgggtcagagctgcaggaacttgggcaaggggcgccggctgtggcgagggtgcaggtgggggtcggtgcatctgttctggccgcgcgcaggtgtgacctccctccttgaccttggcacgcggattgagagcgccagcggagtgtctataagggccactgcgctgggggctgcggtcaggttcagcgaaagtgacaccggttctcctccccactgcaactgcccagcaccctccactcccctcccttcccccacggtgctgaatctccgagcccccacgggaattcttccagccctggctccagatcctttccacttacggagcagaacc

SEQ ID NO: 352234 - DNA, 214 bp, Homo sapiens; identical to SEQ ID NO: 345580
  chr19:17008145-17008359
  hyper

SEQ ID NO: 352235 - DNA, 31 bp, Homo sapiens; identical to SEQ ID NO: 55797
  chr19:17008820-17008851
  hyper

SEQ ID NO: 352236 - DNA, 239 bp, Homo sapiens; identical to SEQ ID NO: 205266
  chr19:17716539-17716778
  hyper

SEQ ID NO: 352237 - DNA, 129 bp, Homo sapiens; identical to SEQ ID NO: 205270
  chr19:17958346-17958475
  hyper

SEQ ID NO: 352238 - DNA, 161 bp, Homo sapiens
  chr19:17984912-17985073
  hyper
gactgtccaggtgacctcgagtccctccttgcagtacctggagatgcgcttcagccgcgcagtgcggctctgcgggactttgcagtacattgtagccacggtgagtggcctcggccccgccctccgctcagggccccgagagcgtcagccttcactagccc

SEQ ID NO: 352239 - DNA, 353 bp, Homo sapiens; identical to SEQ ID NO: 347564
  chr19:18117804-18118157
  hyper

SEQ ID NO: 352240 - DNA, 262 bp, Homo sapiens; identical to SEQ ID NO: 347565
  chr19:18335414-18335676
  hyper

SEQ ID NO: 352241 - DNA, 90 bp, Homo sapiens
  chr19:18714365-18714455
  hyper
cggctggaagaagggactgcaggaggcaggggcagcccagcttcgcagagatggcagccaaggacagggtgatcctggcccccagggagg

SEQ ID NO: 352242 - DNA, 68 bp, Homo sapiens; identical to SEQ ID NO: 336022
  chr19:18715135-18715203
  hyper

SEQ ID NO: 352243 - DNA, 90 bp, Homo sapiens
  chr19:19729161-19729251
  hyper
cgttccgtttgaaccccatacatcccttcgtcctcgggacccccctccagccctcctcaagcgcccctcgtcagtctggcctccacgccc

SEQ ID NO: 352244 - DNA, 135 bp, Homo sapiens; identical to SEQ ID NO: 205291
  chr19:19729395-19729530
  hyper

SEQ ID NO: 352245 - DNA, 147 bp, Homo sapiens
  chr19:19729585-19729732
  hyper
cgtgtattgcaccgcctacagacacgccccttcatctccgtcagccaaccggcgccacgcaccgcccccgggactcgccccgaacttccccctctccgggcttggactgggtttggggttgccgaggcaacggcacttctcataagc

SEQ ID NO: 352246 - DNA, 50 bp, Homo sapiens; identical to SEQ ID NO: 205293
  chr19:19738572-19738622
  hyper

SEQ ID NO: 352247 - DNA, 504 bp, Homo sapiens; identical to SEQ ID NO: 293751
  chr19:19738668-19739172
  hyper

SEQ ID NO: 352248 - DNA, 247 bp, Homo sapiens; identical to SEQ ID NO: 205295
  chr19:19739428-19739675
  hyper

SEQ ID NO: 352249 - DNA, 261 bp, Homo sapiens; identical to SEQ ID NO: 205296
  chr19:19843330-19843591
  hyper

SEQ ID NO: 352250 - DNA, 47 bp, Homo sapiens
  chr19:19844044-19844091
  hyper
ctggcttcagtccggcttgtccccgccaggacgtttgcgtttaaacc

SEQ ID NO: 352251 - DNA, 74 bp, Homo sapiens; identical to SEQ ID NO: 347566
  chr19:19932106-19932180
  hyper

SEQ ID NO: 352252 - DNA, 693 bp, Homo sapiens; identical to SEQ ID NO: 345583
  chr19:19976556-19977249
  hyper

SEQ ID NO: 352253 - DNA, 35 bp, Homo sapiens; identical to SEQ ID NO: 345584
  chr19:19977294-19977329
  hyper

SEQ ID NO: 352254 - DNA, 69 bp, Homo sapiens; identical to SEQ ID NO: 347569
  chr19:20011652-20011721
  hyper

SEQ ID NO: 352255 - DNA, 48 bp, Homo sapiens; identical to SEQ ID NO: 347570
  chr19:20011722-20011770
  hyper

SEQ ID NO: 352256 - DNA, 53 bp, Homo sapiens; identical to SEQ ID NO: 347571
  chr19:20162601-20162654
  hyper

SEQ ID NO: 352257 - DNA, 76 bp, Homo sapiens; identical to SEQ ID NO: 336043
  chr19:21512126-21512202
  hyper

SEQ ID NO: 352258 - DNA, 117 bp, Homo sapiens; identical to SEQ ID NO: 336044
  chr19:21541712-21541829
  hyper

SEQ ID NO: 352259 - DNA, 171 bp, Homo sapiens; identical to SEQ ID NO: 336045
  chr19:21542078-21542249
  hyper

SEQ ID NO: 352260 - DNA, 309 bp, Homo sapiens; identical to SEQ ID NO: 336046
  chr19:21579832-21580141
  hyper

SEQ ID NO: 352261 - DNA, 159 bp, Homo sapiens; identical to SEQ ID NO: 336048
  chr19:21688303-21688462
  hyper

SEQ ID NO: 352262 - DNA, 73 bp, Homo sapiens; identical to SEQ ID NO: 293780
  chr19:21688741-21688814
  hyper

SEQ ID NO: 352263 - DNA, 60 bp, Homo sapiens; identical to SEQ ID NO: 205321
  chr19:22019028-22019088
  hyper

SEQ ID NO: 352264 - DNA, 102 bp, Homo sapiens; identical to SEQ ID NO: 336054
  chr19:23432614-23432716
  hyper

SEQ ID NO: 352265 - DNA, 129 bp, Homo sapiens; identical to SEQ ID NO: 347575
  chr19:23432833-23432962
  hyper

SEQ ID NO: 352266 - DNA, 120 bp, Homo sapiens; identical to SEQ ID NO: 205325
  chr19:23433023-23433143
  hyper

SEQ ID NO: 352267 - DNA, 118 bp, Homo sapiens; identical to SEQ ID NO: 347577
  chr19:23433296-23433414
  hyper

SEQ ID NO: 352268 - DNA, 105 bp, Homo sapiens; identical to SEQ ID NO: 347578
  chr19:23456510-23456615
  hyper

SEQ ID NO: 352269 - DNA, 216 bp, Homo sapiens; identical to SEQ ID NO: 347579
  chr19:23456881-23457097
  hyper

SEQ ID NO: 352270 - DNA, 68 bp, Homo sapiens; identical to SEQ ID NO: 336059
  chr19:23578240-23578308
  hyper

SEQ ID NO: 352271 - DNA, 68 bp, Homo sapiens; identical to SEQ ID NO: 347581
  chr19:23598868-23598936
  hyper

SEQ ID NO: 352272 - DNA, 701 bp, Homo sapiens; identical to SEQ ID NO: 12224
  chr19:24216103-24216804
  hyper

SEQ ID NO: 352273 - DNA, 770 bp, Homo sapiens; identical to SEQ ID NO: 336063
  chr19:28284358-28285128
  hyper

SEQ ID NO: 352274 - DNA, 259 bp, Homo sapiens; identical to SEQ ID NO: 336066
  chr19:30165123-30165382
  hyper

SEQ ID NO: 352275 - DNA, 60 bp, Homo sapiens; identical to SEQ ID NO: 205342
  chr19:30718934-30718994
  hyper

SEQ ID NO: 352276 - DNA, 58 bp, Homo sapiens
  chr19:31839508-31839566
  hyper
cgccagcatctaacatggacttgacagtcatctgacaatacccagaccctgtgcgctc

SEQ ID NO: 352277 - DNA, 233 bp, Homo sapiens; identical to SEQ ID NO: 293818
  chr19:31841177-31841410
  hyper

SEQ ID NO: 352278 - DNA, 325 bp, Homo sapiens; identical to SEQ ID NO: 293819
  chr19:31841583-31841908
  hyper

SEQ ID NO: 352279 - DNA, 1246 bp, Homo sapiens; identical to SEQ ID NO: 205356
  chr19:33792630-33793876
  hyper

SEQ ID NO: 352280 - DNA, 369 bp, Homo sapiens
  chr19:33793960-33794329
  hyper
gagaggtcctgagcgcggtggctctgcgtctcctagctctgatctccaggctacccctgtgattccgcgcagaggtacctctcggaggacgccggggtcccatgggcggcgccgcgcagggcgctaggaccccgcggggagcggaggcggcctcggcccgggagcctggaggacctggccggtcgatccgcccgggctggaaaactttctttataattacttctccaggtcggagcgcgcggcttgctaggcgcgcggggccggcgctgttacccggcgtggagtcgccgattttttttcctgcgggaccgcggggccccccagactagcggagctggacgccggggcgagcacggggaggggcgcacc

SEQ ID NO: 352281 - DNA, 49 bp, Homo sapiens
  chr19:34114303-34114352
  hyper
ccatctgcttggcgcgatctggcgcagcagcagagcacgtgggagaggc

SEQ ID NO: 352282 - DNA, 556 bp, Homo sapiens
  chr19:34310910-34311466
  hyper
cggttcagggcccccgaggaagctgcggtttggggcgagccgattgcaccagcagggccgggctgctgctcccggggctgacgcgggccacgccctcctggacgcggacacacccccatttccccgggcccacagagccacgcctggccctgcagccaaacagcgggaaggcagattggtacgagtaggtacaaggccctggaattctcgcccggttgccacacactgcacggagcataattgggggaggttgtgcaactgcccgggaagccggggctcgcaacgagggctctctccaagtccccatcacaggcctccggggagcctcgggacagagcctgacgccaccttcgggtgacatcgatggcctcgctctggcagaggagtagtgtggctctgccgagaactggggagcccgggtccccgcagggccaaggggagggagggctggcggaaggggccgcgcccacagccccaggtggcagcagcggcggtggcggtcccgactggcagagcctaacgagaacagggcctatccccaggggccccgggctgg

SEQ ID NO: 352283 - DNA, 66 bp, Homo sapiens
  chr19:34311498-34311564
  hyper
aggcgcccgccagaggccggaggctgacagtgcctttcctatcctatgggtctattgtgggcccgc

SEQ ID NO: 352284 - DNA, 478 bp, Homo sapiens
  chr19:35454533-35455011
  hyper
ctgcgcggggtcccgcagcgccgccgctgccatcggagtctgtggtcagagcagggccccacggtgcgggaaaccacggggcgggggtagggggtctcgcaggctgaggctaccacccacctggccgtgccccagacgaggtgtgaccccgggctgagggtcgcactcctagcctcagtctcccccgtgcaaaatgcgcaaggggcccggggcgcaggctccgggggcgccgagagcgcgcagctccgctgggtacccccgttgcaaggggtcacggctggtgcaaaggcgcggagggggtcccggcctcactgtccccctcgcggtccgggaaagccggcggggcagcttcacgggcgtagccccagccgccccgcccccaactcggggtccccagctcctggggactcagcctccccgccgggaaatgacctgcgaggctgcagtgcaggaagttccggcccccaccgtggcggcc

SEQ ID NO: 352285 - DNA, 63 bp, Homo sapiens
  chr19:36478303-36478366
  hyper
ccctgcggcccccgcccccgcgctccgcccctgtgctctcccttgctggcccgcaccattccc

SEQ ID NO: 352286 - DNA, 159 bp, Homo sapiens; identical to SEQ ID NO: 347586
  chr19:36822892-36823051
  hyper

SEQ ID NO: 352287 - DNA, 209 bp, Homo sapiens; identical to SEQ ID NO: 345589
  chr19:36980725-36980934
  hyper

SEQ ID NO: 352288 - DNA, 31 bp, Homo sapiens; identical to SEQ ID NO: 347588
  chr19:37095634-37095665
  hyper

SEQ ID NO: 352289 - DNA, 105 bp, Homo sapiens; identical to SEQ ID NO: 347589
  chr19:37096594-37096699
  hyper

SEQ ID NO: 352290 - DNA, 156 bp, Homo sapiens
  chr19:37329462-37329618
  hyper
cacatctgctgccgagagcttccagaattccaggccgcgtttaggaagcttcagcggaggcatgcaggctgccctacctctgcaaaaggctcccagccctgggaacaggacagtaagcccaggccatcttaggctggaagtaaccttggtcccgac

SEQ ID NO: 352291 - DNA, 142 bp, Homo sapiens; identical to SEQ ID NO: 347590
  chr19:37342189-37342331
  hyper

SEQ ID NO: 352292 - DNA, 41 bp, Homo sapiens
  chr19:37463952-37463993
  hyper
cggcttcactggaggcggggaactggacatgactgtgagcg

SEQ ID NO: 352293 - DNA, 295 bp, Homo sapiens; identical to SEQ ID NO: 345590
  chr19:37568994-37569289
  hyper

SEQ ID NO: 352294 - DNA, 182 bp, Homo sapiens; identical to SEQ ID NO: 345591
  chr19:37569554-37569736
  hyper

SEQ ID NO: 352295 - DNA, 187 bp, Homo sapiens; identical to SEQ ID NO: 336109
  chr19:37708883-37709070
  hyper

SEQ ID NO: 352296 - DNA, 83 bp, Homo sapiens; identical to SEQ ID NO: 345592
  chr19:37957588-37957671
  hyper

SEQ ID NO: 352297 - DNA, 92 bp, Homo sapiens
  chr19:38085148-38085240
  hyper
cgcacgattctcagctggcttaatgatgtccgtgtcacacgaggagtactgcggcccgggaggggccaagcgctaggagcattaacaggcgg

SEQ ID NO: 352298 - DNA, 424 bp, Homo sapiens; identical to SEQ ID NO: 205389
  chr19:38145586-38146010
  hyper

SEQ ID NO: 352299 - DNA, 37 bp, Homo sapiens; identical to SEQ ID NO: 345593
  chr19:38182720-38182757
  hyper

SEQ ID NO: 352300 - DNA, 188 bp, Homo sapiens
  chr19:38210751-38210939
  hyper
taggaggcgagtctgagtagaaactgatccaggtagcctcggaagggatcacctgctggatgggtgtgagctcctcagggtggggcgccgaaaccctcatggctcctgaggtagagccggcctccttggtaacacatgggactgggacttttaataccacccgacaggcccagcttgtctcgtcaagc

SEQ ID NO: 352301 - DNA, 104 bp, Homo sapiens; identical to SEQ ID NO: 336118
  chr19:38270338-38270442
  hyper

SEQ ID NO: 352302 - DNA, 295 bp, Homo sapiens; identical to SEQ ID NO: 293923
  chr19:38701255-38701550
  hyper

SEQ ID NO: 352303 - DNA, 31 bp, Homo sapiens
  chr19:38702212-38702243
  hyper
aaattggggttggggcgcccggcggggggcc

SEQ ID NO: 352304 - DNA, 85 bp, Homo sapiens; identical to SEQ ID NO: 293926
  chr19:38719834-38719919
  hyper

SEQ ID NO: 352305 - DNA, 263 bp, Homo sapiens; identical to SEQ ID NO: 293927
  chr19:38719956-38720219
  hyper

SEQ ID NO: 352306 - DNA, 187 bp, Homo sapiens
  chr19:38720439-38720626
  hyper
cgcgcggcggcgcccgagggcgcccctgcccggactacacgtcccagggggcgtcaggaggaccgcgctcccattggctgctggggatacagggaggggcggggctccccccagagcatctttcctccctccctgggagtgctcggtctccaactcgggatctccaccctccaggcaccgcgggcgc

SEQ ID NO: 352307 - DNA, 389 bp, Homo sapiens; identical to SEQ ID NO: 347597
  chr19:38754883-38755272
  hyper

SEQ ID NO: 352308 - DNA, 175 bp, Homo sapiens; identical to SEQ ID NO: 347598
  chr19:38755344-38755519
  hyper

SEQ ID NO: 352309 - DNA, 32 bp, Homo sapiens; identical to SEQ ID NO: 205405
  chr19:39754842-39754874
  hyper

SEQ ID NO: 352310 - DNA, 67 bp, Homo sapiens
  chr19:39997621-39997688
  hyper
cgggcaggtgggtccccggctcccggactgcgccctctgatgctcccttccccacaggcggactctg

SEQ ID NO: 352311 - DNA, 258 bp, Homo sapiens
  chr19:40323996-40324254
  hyper
cggcgctgaaaaggcgaccgcctgtctctggcccggccggccccgcggcggggagggcaagcgggacaggaggcccggtgggtgacaacagcagccgccactgccaccgggggcggggagaggaggggacaagggtcagcccagggcacgcgggggaagagtagagcaggtggacgggggaggggcgacacgccccaccctgagtgaccaccagcccctagggacccggcgtcccgccccccacccaggaggccctcc

SEQ ID NO: 352312 - DNA, 32 bp, Homo sapiens; identical to SEQ ID NO: 205421
  chr19:41060353-41060385
  hyper

SEQ ID NO: 352313 - DNA, 48 bp, Homo sapiens; identical to SEQ ID NO: 347600
  chr19:41105938-41105986
  hyper

SEQ ID NO: 352314 - DNA, 86 bp, Homo sapiens; identical to SEQ ID NO: 347601
  chr19:41106420-41106506
  hyper

SEQ ID NO: 352315 - DNA, 69 bp, Homo sapiens; identical to SEQ ID NO: 345594
  chr19:41115811-41115880
  hyper

SEQ ID NO: 352316 - DNA, 57 bp, Homo sapiens
  chr19:41119120-41119177
  hyper
cgccagagagtctgggagtagggcctgggttccagggcaaagccggctggaaaggtg

SEQ ID NO: 352317 - DNA, 67 bp, Homo sapiens; identical to SEQ ID NO: 293998
  chr19:41119735-41119802
  hyper

SEQ ID NO: 352318 - DNA, 359 bp, Homo sapiens; identical to SEQ ID NO: 336145
  chr19:41190162-41190521
  hyper

SEQ ID NO: 352319 - DNA, 121 bp, Homo sapiens
  chr19:42498155-42498276
  hyper
cgcacacccaatgtcaccggccccacaatgtcacacggaagcggcgcccagccggctcagcacctacccccatcttggcggctccgcggcgagagagccaggcgggcggggcggggacctc

SEQ ID NO: 352320 - DNA, 246 bp, Homo sapiens
  chr19:43967263-43967509
  hyper
cggggctccctcacctgccgtcaaggtgacgttgccgtcgaagcagcccttgtagacatgatcgctggcgttgtagcagctcacgaccggcggcgatgtaccctggcacgcctcccggctcaggcccacacagctgtagcactccacgccgttgggcgggtatgcactctcattacctgcgaggggagccgagaggaagaaaaggtgtcgaaagggttcgggaaccgcagctcgtcctctagcccc

SEQ ID NO: 352321 - DNA, 91 bp, Homo sapiens
  chr19:44405817-44405908
  hyper
cgccccgttcacgccctgggtcttctggtcttcagcgcctctcatcctcaccgccggttccattccaaccagggactgtggaagcctccgc

SEQ ID NO: 352322 - DNA, 48 bp, Homo sapiens
  chr19:44406123-44406171
  hyper
tctattaagggctatgatttcaggtcgtcctgcgtgtttagaggaggc

SEQ ID NO: 352323 - DNA, 269 bp, Homo sapiens; identical to SEQ ID NO: 294061
  chr19:44529438-44529707
  hyper

SEQ ID NO: 352324 - DNA, 48 bp, Homo sapiens; identical to SEQ ID NO: 347605
  chr19:44529774-44529822
  hyper

SEQ ID NO: 352325 - DNA, 68 bp, Homo sapiens; identical to SEQ ID NO: 345595
  chr19:44711963-44712031
  hyper

SEQ ID NO: 352326 - DNA, 150 bp, Homo sapiens
  chr19:45146966-45147116
  hyper
cggcaaccgcgagccgttagtaagttgctgaatctctccgtgtgcctccgtttcctcacctggaatgtgggcgacctcacacaggaagccgcctcttctagtgggcaccgacggagcgagcgcgcgtctgcagcgggactgagcgccggg

SEQ ID NO: 352327 - DNA, 332 bp, Homo sapiens; identical to SEQ ID NO: 205468
  chr19:45147367-45147699
  hyper

SEQ ID NO: 352328 - DNA, 95 bp, Homo sapiens
  chr19:45147734-45147829
  hyper
cctctgggcccctcggaaaggggatggagttgggtgaggaaatttcccaaaaaggcaagtgaatcccggaaaatcagcagatggtgacgcatgcc

SEQ ID NO: 352329 - DNA, 1002 bp, Homo sapiens
  chr19:45349502-45350504
  hyper
cggggccggagccagggtcggcttgactcgggggagcagcgggtggatcctgtgacgtcagcgggttcgaaccgccggagctgagcgagaggccgggggtgccgagccgggcggggagagctgggccgggagagcagaacagggaggctagagcgcagcgggaaccggcccggagccggagccggagccccacaggcacctactaaaccgcccagccgatcggcccccacagagtggcccgcgggcctccggccgggcccagtcccctcccgggccctccatggcccgggccgctgccctcctgccgtcgagatcgccgccgacgccgctgctgtggccgctgctgctgctgctgctcctggaaaccggtgagacgagcggacggccccctgccctcgcgcggaccccctccaaccttaccttccgagctggggaagccgagcaccttccccgcccacccccggctccccgagccccctctcgcgtgcccccttcctggctggccccacagactccgaccccctacacgtccgattctctcgaggagactctgacccctcctttctgcatctctctcaccaccacccccatccttcttaatccaattgcccatcctacgcctgcttgtctgtccccctccccatttctcggattcccgcgccgaaagggttaaatcccaggaaggcctggtgccccctccccaccccgcgccgagtagttcacccggatctgggtctctgtctcctctacccctctcaggaatgtggggaatgttccccccacctaccgcagtaaggtctcgaggaagaggcgagaccacctccctcccctatttttccttcttcccggcttgggcgtctgaggcccggagagaactgaggacaagcggacctgattcgggtcccttggagggctaaggataagagttctggcgacttagggggaagggcctgagctcggagctccaaccccgaacctcagggagttgggggttctgactcc

SEQ ID NO: 352330 - DNA, 555 bp, Homo sapiens; identical to SEQ ID NO: 336165
  chr19:45579321-45579876
  hyper

SEQ ID NO: 352331 - DNA, 802 bp, Homo sapiens; identical to SEQ ID NO: 347608
  chr19:45648009-45648811
  hyper

SEQ ID NO: 352332 - DNA, 200 bp, Homo sapiens; identical to SEQ ID NO: 205477
  chr19:45656461-45656661
  hyper

SEQ ID NO: 352333 - DNA, 37 bp, Homo sapiens
  chr19:45931075-45931112
  hyper
cggggcctctctgctccgccagaacccagcgggggca

SEQ ID NO: 352334 - DNA, 183 bp, Homo sapiens
  chr19:46002502-46002685
  hyper
ccgcactggcacgccaggctgaggacgagttcatgctcctggcctctgatggcgtctgggacactgtgtctggtgctgccctggcgggactggtggcttcacgcctccgcttgggcctggccccagagcttctctgcgcgcagctgttggacacgtgtctgtgcaaggtcctgggggcgtggc

SEQ ID NO: 352335 - DNA, 843 bp, Homo sapiens
  chr19:46144663-46145506
  hyper
cgtccagcttctaaaaactctggccacgcccctcaatattgactccgccctcccagaccttccactgttaccgtgccacctcaagattggtccctccaaggctctggcaccgtccccgcttttgaactagctggccccactctaggttacgacctcgtggcctggggcatgactacatttctcgaccatttcctccctatctctttctgcggcttgacgccgccccagtccttacccttcctttttggcgctacagttgctgctggaggatgtggtccggctgcgggggtcctcacggcgcaccgaggcgaggcgctctggtgacaagtagcggcggacactgctaaaagagagcacacaggtgggggcagagccttctaggccagcaggcgagtgccgtgagcaagcgagattctccctgcaccctctgctgctggagctcaggcaaacaaaccacctctgtctcccacgaggtcttggaagaggctgggggtcccggccttgtgccttacctgcgcccggaggtcgcctccttcttgggagaggatggggacgtggcatagccacccacgcgccgcgggggtcccgagccattaaggggcgtcctggtgggaaggcctttcaagagctgacacactggagggatggggttaggggacagaagagggtgagtataaggaccaggccccggtcctccccatcccacccctccagtctaacggggatacccgaggcagtggtgcctaagcgcggaggcgcccggcccttgggggtgccccgcgcgcgtagcgccgctccctgttcttcgcatgcccgcaggcgacgcagagcatccgccagcgc

SEQ ID NO: 352336 - DNA, 73 bp, Homo sapiens
  chr19:46145557-46145630
  hyper
cgccgacacgcggtcgtccacttccataccgctcgtgcccgacaaattgtcatctggaagacgggggagtgcc

SEQ ID NO: 352337 - DNA, 172 bp, Homo sapiens
  chr19:46180187-46180359
  hyper
cggtctggcccctccctaggccctcgctgcctgccgcacggcccagatcgtgacccagtactgcgtgggtgccaactacacgtggctgctggtggagggcgtctacctgcacagtctcctggtgctcgtgggaggctccgaggagggccacttccgctactacctgctcctc

SEQ ID NO: 352338 - DNA, 79 bp, Homo sapiens
  chr19:46180559-46180638
  hyper
gcggggtcggggtctgcacaggggcccccgcgcttttcgtcattccctgggtgatcgtcaggtacctgtacgagaacac

SEQ ID NO: 352339 - DNA, 88 bp, Homo sapiens
  chr19:46519167-46519255
  hyper
cgagagggtcatgggcccaggagtgcacgtctaggagttgatggggtaggcctgagggttcggagaaggtgcggtcggggaggagtct

SEQ ID NO: 352340 - DNA, 421 bp, Homo sapiens
  chr19:46519582-46520003
  hyper
cgcgctccgcttcgaccccacggcctttgtgaaagccaaggaaaggaagcagagagagatccagatgaagtcagtgccccttcctccctcacctgcccctgtccctggcccgtgcccgctcccgggctctcatctctccacgccaccatcagtctccatcccctgccacctgctcgcttctcgccggataccccgcctgctctcccttccgtccgtcctacctcctcgtctgtgtttctgcgtgctttccgctcgtaggcctgtcacctcaggctttcgctggcgtggctgtgacctttaggggcgcagtgacccccttgcctgcaggagttgggcgtacagaccggcgtctcctttcttttttcccaggcagcagcagcggaaccgcttaggcagtgggggaagcggggacggtccgtcc

SEQ ID NO: 352341 - DNA, 69 bp, Homo sapiens
  chr19:46907118-46907187
  hyper
cgtgaggattggaggagccacgtggaaaatgctgctgcccggagcccaggtggctgcgctggccaggga

SEQ ID NO: 352342 - DNA, 249 bp, Homo sapiens; identical to SEQ ID NO: 294133
  chr19:46907822-46908071
  hyper

SEQ ID NO: 352343 - DNA, 56 bp, Homo sapiens; identical to SEQ ID NO: 347610
  chr19:46929939-46929995
  hyper

SEQ ID NO: 352344 - DNA, 139 bp, Homo sapiens; identical to SEQ ID NO: 345597
  chr19:46931914-46932053
  hyper

SEQ ID NO: 352345 - DNA, 54 bp, Homo sapiens
  chr19:46974960-46975014
  hyper
cctgttcaggtcgcagagcaagcgggtctggatacactccggtggcgcctccac

SEQ ID NO: 352346 - DNA, 71 bp, Homo sapiens
  chr19:46996430-46996501
  hyper
cgcaggccccgagagcgccacgaagagccctgctcgcctctgcaggtgcccggcgtccacacacacacccc

SEQ ID NO: 352347 - DNA, 35 bp, Homo sapiens
  chr19:46997221-46997256
  hyper
cgttggaccccatgttctcccgggcggccaggagc

SEQ ID NO: 352348 - DNA, 259 bp, Homo sapiens
  chr19:47523724-47523983
  hyper
ctggggggatccctgggcaggacacaggatgggggtccctgccctctgccccctgcctccttagcccagccgggaaaacagggtgcagatccggggagtcagacaccggggatgggcttggggggcgggtcctcggggcagagggctccgggggctggggcgtgcgtgcctggcccgggaggcgcccgccccccgcccggcttgggcatgcttggcacgcagcgcgcgggccggttcgatccgtatgcgcgccgcgtgc

SEQ ID NO: 352349 - DNA, 287 bp, Homo sapiens; identical to SEQ ID NO: 336192
  chr19:47731303-47731590
  hyper

SEQ ID NO: 352350 - DNA, 147 bp, Homo sapiens
  chr19:47922898-47923045
  hyper
cggtgggagtcggggaggggcaggctgtggggggaggagaggaagagaccgcggccctggtgcccccaggcccctcctctcctacccagggctggggttcctgctccgggtttctcagtctccctctttcccagtctctctctcctt

SEQ ID NO: 352351 - DNA, 260 bp, Homo sapiens; identical to SEQ ID NO: 294167
  chr19:47923084-47923344
  hyper

SEQ ID NO: 352352 - DNA, 311 bp, Homo sapiens; identical to SEQ ID NO: 347612
  chr19:48901504-48901815
  hyper

SEQ ID NO: 352353 - DNA, 196 bp, Homo sapiens
  chr19:49014625-49014821
  hyper
cgggccctgctgggctgcgggaagacgcgcaccaggtgacggggcaggacccgcagacagacccctgggcagacagcgaggccgccgcgggggtgggggccaccggacagactgatggcccgacagactcaccggggtgggccggggacgccaggcagccggaggcggagacggccgcaaggaggatgagggcgcc

SEQ ID NO: 352354 - DNA, 93 bp, Homo sapiens; identical to SEQ ID NO: 345598
  chr19:49127280-49127373
  hyper

SEQ ID NO: 352355 - DNA, 480 bp, Homo sapiens; identical to SEQ ID NO: 336204
  chr19:49199703-49200183
  hyper

SEQ ID NO: 352356 - DNA, 484 bp, Homo sapiens; identical to SEQ ID NO: 345599
  chr19:49217005-49217489
  hyper

SEQ ID NO: 352357 - DNA, 43 bp, Homo sapiens; identical to SEQ ID NO: 345600
  chr19:49217526-49217569
  hyper

SEQ ID NO: 352358 - DNA, 56 bp, Homo sapiens
  chr19:49244884-49244940
  hyper
cggggccagaggccacgcccccggcaggaagccacaccccgtgccccgaaaccaca

SEQ ID NO: 352359 - DNA, 550 bp, Homo sapiens; identical to SEQ ID NO: 336209
  chr19:49467064-49467614
  hyper

SEQ ID NO: 352360 - DNA, 781 bp, Homo sapiens
  chr19:49652265-49653046
  hyper
caatgagcgggtcatgggttgggtgtccgggctgggcctgaaggaatttgccacgaacctcacggagagcggggtacacggggcactgctcgccctggacgagaccttcgactactccgacctggccttgctcctgcagatccccacgcagaatgcacaggtgagctgccgctgggcccggagcatgctgggcgtccccacctcgcagactgcacgctccaaccgccccctccacctcctctttccaggcccggcagcttctggagaaggaattcagcaaccttatctccttaggcacagacaggcggctggacgaggtgggcgcggcaacagctcagagggctctgctcccagcggctcctcgagaggctgagctgagggggcggggcctgactattaatggtcacggttggaggcggggccaggagaggggcggggttaaaggagaggtgagacccggagaggggtggagtcaaaggaaggggcggagtcagacaaggcaggagtccctcaccggctgtccggctcctatacctaggacagcgccaagtctttcagccgctccccatcctggcggaagatgttccgggagaaggacctccgaggcgtaactcccgactcagctgagatgttgccccccaactttcgttcggctgcagcgggagccctgggctctccggggctccctctccgcaagctgcagccagaaggtggggggctcccaaatgcgacagcccttcctcgcttccctagggtggggcatggaccacctcagtagtcc

SEQ ID NO: 352361 - DNA, 435 bp, Homo sapiens; identical to SEQ ID NO: 336213
  chr19:49660929-49661364
  hyper

SEQ ID NO: 352362 - DNA, 218 bp, Homo sapiens; identical to SEQ ID NO: 347617
  chr19:50553779-50553997
  hyper

SEQ ID NO: 352363 - DNA, 347 bp, Homo sapiens
  chr19:50706517-50706864
  hyper
cggtcggcccccccacgccggcccttacaaaggcccccattcatgccttgcgcacaaagcggcccattcaccctggccccttgggcctcccgcccccggccgccccccgcgcctcgctattggtggcgccccgtgcccatcaggcctcggcttccacccccgaccgcgccgcctagctccgcgcccgggccgcgttcttttcccacggctggcacccttcgacaacttctgattggcccagcccgccagccgctctttttgattggcggctcccgtcccccaggggcggggccgtagcttgccgcagcgggcgccgattggcctctgctgctctcttgggggcgggg

SEQ ID NO: 352364 - DNA, 188 bp, Homo sapiens; identical to SEQ ID NO: 294243
  chr19:50706894-50707082
  hyper

SEQ ID NO: 352365 - DNA, 91 bp, Homo sapiens
  chr19:50707093-50707184
  hyper
cgagggaggtgggggggcgggacgtctacactcccccaactccagttgccgccgtgtgcgaggcccggtcggggtcctcgttgtcagcccc

SEQ ID NO: 352366 - DNA, 378 bp, Homo sapiens; identical to SEQ ID NO: 336220
  chr19:50708476-50708854
  hyper

SEQ ID NO: 352367 - DNA, 380 bp, Homo sapiens; identical to SEQ ID NO: 294246
  chr19:50816051-50816431
  hyper

SEQ ID NO: 352368 - DNA, 446 bp, Homo sapiens
  chr19:50833970-50834416
  hyper
aatataggcaggaccgataaaaaatggggtgggctaggagtctcagaggtcgggttctggggaagaatggagtgaggggcggggccagaaaaaggggaccgcctcggagcgggccgtccccgccccctgggcggtcgtaggctccgagaggcagagcgcaggctcagggggctggggcggggccagcggctgcggctggggctgcggagggaggaggcggcgcctgcgggagcgaagggggcgggtcagggggctgcgggcgccctcgggcagcacagtttctggcccgccgcttcctgctgcaggtgcggcggctgattcgtatcgcctcccaaccccatcccacccccgctcccgtttctgggtttcttggcgtctctttttctcccttcttgagtatttgtgccgccgtctctgttcccacccctctgagtctccgacccctc

SEQ ID NO: 352369 - DNA, 88 bp, Homo sapiens; identical to SEQ ID NO: 345602
  chr19:50836203-50836291
  hyper

SEQ ID NO: 352370 - DNA, 588 bp, Homo sapiens; identical to SEQ ID NO: 205542
  chr19:50836451-50837039
  hyper

SEQ ID NO: 352371 - DNA, 88 bp, Homo sapiens; identical to SEQ ID NO: 345604
  chr19:50837389-50837477
  hyper

SEQ ID NO: 352372 - DNA, 153 bp, Homo sapiens
  chr19:50979533-50979686
  hyper
cgtcatgatgcggagcgggctttatgacgtcacacaagagcgggctcctgatttgtgatgacgtccctggagggggcggctcctggagatcaggccaaaggggcggccccatcctgctgacgtcaggccccaggtgcggacgggtgccagtgc

SEQ ID NO: 352373 - DNA, 77 bp, Homo sapiens; identical to SEQ ID NO: 336229
  chr19:51111319-51111396
  hyper

SEQ ID NO: 352374 - DNA, 70 bp, Homo sapiens; identical to SEQ ID NO: 347621
  chr19:51161615-51161685
  hyper

SEQ ID NO: 352375 - DNA, 51 bp, Homo sapiens
  chr19:51198271-51198322
  hyper
cgccgccgaccgcagacaaagccatcgccgccgcggccccagccccggccc

SEQ ID NO: 352376 - DNA, 73 bp, Homo sapiens; identical to SEQ ID NO: 345605
  chr19:51228809-51228882
  hyper

SEQ ID NO: 352377 - DNA, 186 bp, Homo sapiens; identical to SEQ ID NO: 336235
  chr19:51324279-51324465
  hyper

SEQ ID NO: 352378 - DNA, 96 bp, Homo sapiens; identical to SEQ ID NO: 345606
  chr19:51416002-51416098
  hyper

SEQ ID NO: 352379 - DNA, 242 bp, Homo sapiens; identical to SEQ ID NO: 345607
  chr19:51416099-51416341
  hyper

SEQ ID NO: 352380 - DNA, 241 bp, Homo sapiens; identical to SEQ ID NO: 205551
  chr19:51522935-51523176
  hyper

SEQ ID NO: 352381 - DNA, 88 bp, Homo sapiens
  chr19:51925272-51925360
  hyper
gtctttgtgtcctttgagctccggacctggtcctgggttcctcccacctcgggctgtgctgcagttcaggacgccgcccccagggggc

SEQ ID NO: 352382 - DNA, 80 bp, Homo sapiens
  chr19:52511228-52511308
  hyper
cgataggaatcggacccacgctaagctcctgaaagaattccactggcgtcgccaaacgctggcgccgacagataccagtc

SEQ ID NO: 352383 - DNA, 394 bp, Homo sapiens
  chr19:52511384-52511778
  hyper
tgaacttacttcccagaacttggtgggctccggcctcatctctcggcctcctcagtgcctgacggcgactatccagggtcggaggcgttcccagcgtttgcgcagatgcaagatggccgcgccctcgtcgccttggctccatgggggccgccatctttgagtatctgacgtacacaaggcaaagggcgcgttttggcgctggtgaccgggggtgaccgggggtgaccggggatggccgggaagatgaaagagcactgaaactgtcccatttcctggcacctcaacccttcataaatacgggtccatatacagaggctccagtttacacaagacaaaaatggcgtggaggtaaatccctttcagcagctgaatagaaggctaagatggccgcgac

SEQ ID NO: 352384 - DNA, 74 bp, Homo sapiens; identical to SEQ ID NO: 205557
  chr19:52531285-52531359
  hyper

SEQ ID NO: 352385 - DNA, 208 bp, Homo sapiens; identical to SEQ ID NO: 345609
  chr19:52531884-52532092
  hyper

SEQ ID NO: 352386 - DNA, 273 bp, Homo sapiens
  chr19:52551831-52552104
  hyper
cgcccccgcctcccccaacccccgcgctacctccaccatatagcgccaccaacaacgcagacgccctcagaaagctccctcccaccacgtttccacgccctgacccacacactgacctgactctccttggaatcgccgcgacctcttaaaagctgaacttacttccctaaacttcttccacttctgggcccctcgcccaactccctccccctctaaacctccagagacggtcagccgcgtttccatggagagcggaatgcggccttccggctt

SEQ ID NO: 352387 - DNA, 465 bp, Homo sapiens
  chr19:52552233-52552698
  hyper
gatttccagacacctcagccctggcagaaaatggagagcttatcagaggcttgagttcacacaggcagacacggcgtgggggtaaagtcctctgaacagacacggaacagaaataagttagtcttctcctcgcaggggacagtgaacggcgcaaacttctcaaaggccagaacccattattaccacaaaggcgcggcatcccttcttagcggttatgatggctgtgacgtctcagctcaatggaaaattaaagtcacctctgggcacctcagtcactattgtaaatgcgaagcgttttagaagccgtataaaaactgaagcaagagagactagaacaaaaaataagcgagcggtgcgttgcaggtaacggagccagagcccttaggggagagcatcatgggggcggccatcttaggggacgttcggtgtccgtacggcagaacatattctctctgagaagcttgc

SEQ ID NO: 352388 - DNA, 119 bp, Homo sapiens; identical to SEQ ID NO: 336251
  chr19:52715152-52715271
  hyper

SEQ ID NO: 352389 - DNA, 105 bp, Homo sapiens; identical to SEQ ID NO: 347627
  chr19:52800214-52800319
  hyper

SEQ ID NO: 352390 - DNA, 313 bp, Homo sapiens; identical to SEQ ID NO: 294314
  chr19:52800380-52800693
  hyper

SEQ ID NO: 352391 - DNA, 89 bp, Homo sapiens
  chr19:52800915-52801004
  hyper
gatccagaccctacctttaccctccttgatacggggccccgctactccccaggcctcctcttcccagacaccgcttctcctaaccctgc

SEQ ID NO: 352392 - DNA, 263 bp, Homo sapiens; identical to SEQ ID NO: 345610
  chr19:53104083-53104346
  hyper

SEQ ID NO: 352393 - DNA, 62 bp, Homo sapiens
  chr19:53105086-53105148
  hyper
tgctccccaggtctcctctccgccgtcaccgcttcccctgagcccgcgttgggaaggtgtcc

SEQ ID NO: 352394 - DNA, 60 bp, Homo sapiens; identical to SEQ ID NO: 205570
  chr19:53141353-53141413
  hyper

SEQ ID NO: 352395 - DNA, 56 bp, Homo sapiens; identical to SEQ ID NO: 347630
  chr19:53193139-53193195
  hyper

SEQ ID NO: 352396 - DNA, 818 bp, Homo sapiens
  chr19:53237625-53238443
  hyper
cggaggagcgcattttccacgccctggagctccgcaggcaagaataccccgtgccgcaggacaggcccctgggacctccccagtgcaggttcaatgaaagcggtgactgcggaggggagacctggggagcagcaggccccggcatgaggaggaaggtgcggggcggggggggggggcgcgacggcgccttaggaccaggatggggtctgcaggatcccaggacctggcagaggactcggcctccccgggactggggctgcggcgcggcgctcccggggctgaggagggggaggctgggaggcgccctgggcaagaatccacatcgcgggtgaagactttaaaaagcgcggggcgcgaggagtcagaacaaggttttcagcaggaaaactacgcaacagaaagtgtatacattgacctatagcagaaagaccggggacgagaccagcctcaggacgactttaaacccaaaaggaagcgaccctcgggctctcacggggatgtctcaatttgctctgggcaaaggaagacgccggagaatttccaggtctgtggggaccccacgtcccagggacagaagccctgggaacctagttagcgcagacttaatacaacacagagcaaaactcaccgcggcgatatgacctacactccacccgatccgcttccgggtttgcgttaatctgcgcgcgcaggacaaaagccaggcctgggcgggaagtgggaggtaggcggggcctgggcgaggtaggggcggggcgcgaggcggagagaccttgccttttagaaccggcagagggcagggccggggcgggatctgc

SEQ ID NO: 352397 - DNA, 273 bp, Homo sapiens
  chr19:53400792-53401065
  hyper
tgggttgagaaagaggggccgcaatttccaggtctgtggggactcaacgtccccggtatagcagcaccacaggactgggaagcacacataaaacagagcgaaactcacgcgctgtggtgtgaccttcagtccctgccatccgcttccgggtctatgccaatcagcgcaggacagaggccaggcctgggcgggacccccgagaaggtaggcggggcctggactaggccgggatgagacgcgaagaggtgggcggggcctgaacaaggccggggc

SEQ ID NO: 352398 - DNA, 351 bp, Homo sapiens
  chr19:53445359-53445710
  hyper
cgcgggctcaggagaaacggtgattacggagggaagacctggggagcataagggcccggcacgaggagggaggtggggggcgacggcgccttaagacaagactgggaggcgcccagggcgggaatccgcctcgcggtaaggactttaaaaagtgcgggttgggaggagtcagaaaaaagttttgagcaggaaaactacgcgatgggaagtgtatacgttaccctatagcagaaagattcgggacgggaccggtctatggtgactttaaacccaaaaggaagcgacccccagactctcacggggacttctcaatttgctctgggtaaagaaagacggaggagaacttccagg

SEQ ID NO: 352399 - DNA, 231 bp, Homo sapiens
  chr19:53445822-53446053
  hyper
cccgcttccgggtttgtgcgaatctgctctctggggacagaagccaggcctgggcgggacccgcggggaggtaggcggggcctgagcgaggtaggggcggggcgcgaggcggagagaccttgcccttcagaacagacagagggcggggcgggggcggggccggggcgggacctgtgcgtctctcagcctggctcccagagcctcaatttttcgggttttggaggcgagacc

SEQ ID NO: 352400 - DNA, 148 bp, Homo sapiens
  chr19:53465713-53465861
  hyper
cggccaccctggggctgcggggctgcaacgctgcgctccaggggccgactagagcgaggctgggaagcgctcttgcccagggcaagaatccagctccgggtgaggacttgaaacagcgcgaggcgggaggacgcgtcagaaagggttt

SEQ ID NO: 352401 - DNA, 263 bp, Homo sapiens
  chr19:53466513-53466776
  hyper
ctagaatgcgaaatgcaaagccttgcctgagcgaaaggtacaatttcatgctgacggtccacagaacagaatagaaatcctctccctttcaattctccattcactggagtgggagagtccacactgtgctcagctcctgagacttccctagggccaccgtctggggtgcggagcagaggagtgtgcttaaacacagcagggatgcgggcggggtggcaggagtctggggtccccgctactcaggaagcaggggcgagaggatc

SEQ ID NO: 352402 - DNA, 104 bp, Homo sapiens; identical to SEQ ID NO: 294336
  chr19:53496055-53496159
  hyper

SEQ ID NO: 352403 - DNA, 35 bp, Homo sapiens
  chr19:53496405-53496440
  hyper
caccgggacgtcaaattttgctctggggattagcc

SEQ ID NO: 352404 - DNA, 139 bp, Homo sapiens; identical to SEQ ID NO: 347631
  chr19:53606073-53606212
  hyper

SEQ ID NO: 352405 - DNA, 221 bp, Homo sapiens; identical to SEQ ID NO: 205580
  chr19:53606354-53606575
  hyper

SEQ ID NO: 352406 - DNA, 427 bp, Homo sapiens; identical to SEQ ID NO: 205581
  chr19:53606605-53607032
  hyper

SEQ ID NO: 352407 - DNA, 111 bp, Homo sapiens; identical to SEQ ID NO: 347634
  chr19:53607111-53607222
  hyper

SEQ ID NO: 352408 - DNA, 90 bp, Homo sapiens; identical to SEQ ID NO: 336275
  chr19:53934944-53935034
  hyper

SEQ ID NO: 352409 - DNA, 113 bp, Homo sapiens; identical to SEQ ID NO: 205589
  chr19:53970643-53970756
  hyper

SEQ ID NO: 352410 - DNA, 84 bp, Homo sapiens; identical to SEQ ID NO: 347635
  chr19:54412564-54412648
  hyper

SEQ ID NO: 352411 - DNA, 546 bp, Homo sapiens; identical to SEQ ID NO: 336285
  chr19:55677520-55678066
  hyper

SEQ ID NO: 352412 - DNA, 182 bp, Homo sapiens; identical to SEQ ID NO: 347636
  chr19:55691158-55691340
  hyper

SEQ ID NO: 352413 - DNA, 132 bp, Homo sapiens; identical to SEQ ID NO: 345612
  chr19:55952964-55953096
  hyper

SEQ ID NO: 352414 - DNA, 134 bp, Homo sapiens; identical to SEQ ID NO: 336290
  chr19:56112791-56112925
  hyper

SEQ ID NO: 352415 - DNA, 396 bp, Homo sapiens; identical to SEQ ID NO: 336291
  chr19:56151971-56152367
  hyper

SEQ ID NO: 352416 - DNA, 245 bp, Homo sapiens; identical to SEQ ID NO: 294401
  chr19:56159669-56159914
  hyper

SEQ ID NO: 352417 - DNA, 68 bp, Homo sapiens
  chr19:56159950-56160018
  hyper
cctaccctgggaagttggggcagtttccccctgcacctgcctcttccttaggcctggcagtggcccgc

SEQ ID NO: 352418 - DNA, 139 bp, Homo sapiens; identical to SEQ ID NO: 347638
  chr19:57049638-57049777
  hyper

SEQ ID NO: 352419 - DNA, 34 bp, Homo sapiens; identical to SEQ ID NO: 205611
  chr19:57049807-57049841
  hyper

SEQ ID NO: 352420 - DNA, 56 bp, Homo sapiens
  chr19:57702696-57702752
  hyper
cgccgtgaagcgttcctcccgttgttgaacacatgaggaaaactacactacttaga

SEQ ID NO: 352421 - DNA, 39 bp, Homo sapiens
  chr19:57703385-57703424
  hyper
cccaggtatcccctggatttgtcttcgcagtcgtcgttc

SEQ ID NO: 352422 - DNA, 70 bp, Homo sapiens; identical to SEQ ID NO: 345613
  chr19:57831543-57831613
  hyper

SEQ ID NO: 352423 - DNA, 460 bp, Homo sapiens; identical to SEQ ID NO: 345614
  chr19:57874412-57874872
  hyper

SEQ ID NO: 352424 - DNA, 217 bp, Homo sapiens; identical to SEQ ID NO: 205623
  chr19:57875005-57875222
  hyper

SEQ ID NO: 352425 - DNA, 43 bp, Homo sapiens; identical to SEQ ID NO: 345616
  chr19:57875252-57875295
  hyper

SEQ ID NO: 352426 - DNA, 62 bp, Homo sapiens
  chr19:57998890-57998952
  hyper
cgttatctccatctccatcatcatctccatctccgtctccatctccatcatcatctatcatc

SEQ ID NO: 352427 - DNA, 81 bp, Homo sapiens; identical to SEQ ID NO: 336313
  chr19:58090396-58090477
  hyper

SEQ ID NO: 352428 - DNA, 169 bp, Homo sapiens; identical to SEQ ID NO: 345617
  chr19:58144201-58144370
  hyper

SEQ ID NO: 352429 - DNA, 209 bp, Homo sapiens; identical to SEQ ID NO: 205633
  chr19:58144745-58144954
  hyper

SEQ ID NO: 352430 - DNA, 294 bp, Homo sapiens
  chr19:58193143-58193437
  hyper
cgaagtcgccatttccctgcacggggcacagcacctcagaatacaagttcgcagaggtcaaagcagtggacacactccgaagagctccgtggagttttggaaactacattatccagagtgcagagcgcaaaacggcggcggagttgagccaatgacagcccaggatagcaacacttccgcgcacgcgcagcgcgacgggccggaacttccggcgtcctcctcgtggcggtcattttggcctctgtcctgtttgtccagcccgccagtttctgcagtggaggtcgcgactgaggg

SEQ ID NO: 352431 - DNA, 345 bp, Homo sapiens
  chr19:58193585-58193930
  hyper
gcagtcgcgctgagggactcggctcaggtgagttgtgcgtcctccgggtctcgcctacctcccccagcagaagccttaaggcccagtgagggatgcctgctcacagccctgcagcccaggccccagtaccctggacaagaaggcgcttgtggattggacccgtttgtgacgcccagtgtgtacggaaatgtgacgggcagttgactggcgcgtgcagaacttggagctgcgactaagctgggggggattcaggagcctggggtccgtctcgggtctgcaggaacatagagtgaggcagagttgcacctgacgaatttgacgattctgaggacactggcagccttc

SEQ ID NO: 352432 - DNA, 627 bp, Homo sapiens; identical to SEQ ID NO: 336321
  chr19:58258088-58258715
  hyper

SEQ ID NO: 352433 - DNA, 145 bp, Homo sapiens
  chr19:58280766-58280911
  hyper
cgtatggcctcttctaagatgggagaccctcctccgcatctggacctggagtcgccatttcctagcgcccctcgcagtggagcttgcccctttcttcggaaagtcggaagaaagccaccttaagcgctgcccatgtctgggaact

SEQ ID NO: 352434 - DNA, 176 bp, Homo sapiens
  chr19:58281371-58281547
  hyper
gggtgggatccctgtttccgacacccagttgatgcggtcggcagagcgagactggcggagggcaaaggcctgcaggcgcgactgaggcaggaggatgcggaacacggggacatcgtgtgtctactgggaaagaagtgtgatacggagttatttctttttttttttttttttgagac

SEQ ID NO: 352435 - DNA, 130 bp, Homo sapiens; identical to SEQ ID NO: 345620
  chr19:58610001-58610131
  hyper

SEQ ID NO: 352436 - DNA, 343 bp, Homo sapiens
  chr19:58694209-58694552
  hyper
cgcgacttccgtcttccagtccccctccttccccaaaagttgcgtggactctagccccgcctcctacattctccccgccctccctgtccccgcccctccacccagatggacggccagttaggcccgccccctgcacttccggccctacccgcccttcctcttcccaagggacgtcataattaatcccgcccccaccgccacccaaccaagcatcacccattccagcacttccggcctgacccctgtccagcgcctttcctttctccagcttctgctctgccccaagagtggtcgccttcgtggcagggcacgactctctcccagctcgggtcgccgcccacat

SEQ ID NO: 352437 - DNA, 43 bp, Homo sapiens
  chr19:58739694-58739737
  hyper
cgactgagcgatcacctaggacgaatcgcctccagttagcgtg

SEQ ID NO: 352438 - DNA, 538 bp, Homo sapiens
  chr19:59049765-59050303
  hyper
gggctggagggggcgggccggctagcgaggcgtggccctatgaaggggcaggctgggcgtggaggcggtgactatgccgcggatggggtgggcccagatctggggggccgcgcgcccgggctggaacaaaggcagaggcggggacaaagccccgcggcccccagtccccatcaggaacaaaggccacacccggcccagcggtcgacgcgcccgtgctgcagccacgtgcggacacctgggagcggggcccggggaggcagtgccccgttaccctcacgccccgcccggctagccacctttacctgtgcgcgccttgggagtggcgaatgggtttcatggttgttcgcgccagtcctcgcggcctccaaacatcctccggaagctgccacctaccccgcccccagccgttgtcacctggaccggagacctcacgaccccaggggcaccgcacagggggctgaggcccacccccccggggccagcctcaatgcacccacccaccacgttttcaacgcgctgatagtccctaggcgggttc

SEQ ID NO: 352439 - DNA, 210 bp, Homo sapiens
  chr20:657125-657335
  hyper
agagtaagtctcccctcccccctgctcgggctcccactggagccccctgttgggtttggggttcaactttcttcttccagaactggtggggggagcaagtcccccacgccgatgcctggccttgctcggttggtcctgttccggtgcctagctcaggcgggcgctgcaagaggaagtgaaaatcgtccagtaattaattttcctgctgcc

SEQ ID NO: 352440 - DNA, 120 bp, Homo sapiens; identical to SEQ ID NO: 347648
  chr20:2731109-2731229
  hyper

SEQ ID NO: 352441 - DNA, 225 bp, Homo sapiens; identical to SEQ ID NO: 205669
  chr20:2731391-2731616
  hyper

SEQ ID NO: 352442 - DNA, 744 bp, Homo sapiens; identical to SEQ ID NO: 345622
  chr20:2731675-2732419
  hyper

SEQ ID NO: 352443 - DNA, 143 bp, Homo sapiens; identical to SEQ ID NO: 294514
  chr20:2820861-2821004
  hyper

SEQ ID NO: 352444 - DNA, 67 bp, Homo sapiens
  chr20:3052452-3052519
  hyper
cggggagggagggacccgcagccacaggggcgcgccccgctccggcctcgcctgagaactccaggag

SEQ ID NO: 352445 - DNA, 283 bp, Homo sapiens
  chr20:3220266-3220549
  hyper
cggggacctccgcagggccacgcccgctggctgccccgcctcctgcatttatcccggtagctccggccgcaagtccttctcctcctcctccaggaagcgcgccccgactgactagacggacctccgtgcattccccgggctacgccctcgcccgctgagacggcgctctccgagctcggctgctttgggttttcgctgcgagcctcgccaacttatctgccagcctcttcacgtcctcggccttctatgaggtcaaggtcatggttcgccccctttttccttc

SEQ ID NO: 352446 - DNA, 125 bp, Homo sapiens
  chr20:3229128-3229253
  hyper
cggaggctacaccctttcccccgggccagcttccacatctgcccagtggggcatttccccttgtcccacccagcgactggttgacaggaagcagggtgtctatggactggcggcgggcgcccctt

SEQ ID NO: 352447 - DNA, 154 bp, Homo sapiens; identical to SEQ ID NO: 205676
  chr20:3229326-3229480
  hyper

SEQ ID NO: 352448 - DNA, 31 bp, Homo sapiens; identical to SEQ ID NO: 205677
  chr20:3229526-3229557
  hyper

SEQ ID NO: 352449 - DNA, 144 bp, Homo sapiens
  chr20:3229659-3229803
  hyper
cgggtgggccgggagagccccgttcccatagccggcttccttgagcccctccccaagttctgggactccccaagttcccaccccgcaagccagtgtggtttcttcagatgaattttattcttactctccacgggctgctccggc

SEQ ID NO: 352450 - DNA, 450 bp, Homo sapiens
  chr20:3653532-3653982
  hyper
cggaaacgggtgcctaccggcacggggagggcattgggcatggagggacagtcccccaacccccgcgcttctctgatccccacccctgggcttggctacagccgccagacgcgcagagcccagagaggggaagtaacccgcgcaaagtcacacaacaagcgggacaggggacgatgcggccccaatagtgagcagcccgggacccaaggtggaatcgcgacccgacggtgctcctcccggtgtaggagtaacctcgccaggttactcggaaaataatcttcataccgttgagaatccactttgcctgagcttcttccctttaagcctcataaaccaccctgaagcggacactatgatcattatccccattttacagaagaggaaactgagggacgaccaaagaaacgcagcggaggaagtccccaggactagccgccccgccgcagcccc

SEQ ID NO: 352451 - DNA, 414 bp, Homo sapiens; identical to SEQ ID NO: 347652
  chr20:4804008-4804422
  hyper

SEQ ID NO: 352452 - DNA, 1116 bp, Homo sapiens; identical to SEQ ID NO: 347653
  chr20:4981401-4982517
  hyper

SEQ ID NO: 352453 - DNA, 427 bp, Homo sapiens
  chr20:6747996-6748423
  hyper
cgggcccagcggggaaataagaggccagaccctgaccctgcatttgtcctggatttcgcctccagagtccccgcgagggtccggcgcgccagctgatctctcctttgagagcagggagtggaggcgcgagcgccccccttggcggccgcgcgcccccgccctccgccccaccccgccgcggctgcccgggcgcgccgtccacacccctgcgcgcagctcccgcccgctcggggatccccggcgagccgcgccgcgaagggggaggtgttcggccgcggccgggagggagccggcaggcggcgtcccctttaaaagccgcgagcgccgcgccacggcgccgccgccgccgtcgccgccgccggagtcctcgccccgccgcgctgcgcccggctcgcgctgcgctagtcgctccgcttcccacaccccg

SEQ ID NO: 352454 - DNA, 293 bp, Homo sapiens; identical to SEQ ID NO: 294559
  chr20:6748470-6748763
  hyper

SEQ ID NO: 352455 - DNA, 210 bp, Homo sapiens; identical to SEQ ID NO: 205693
  chr20:9489214-9489424
  hyper

SEQ ID NO: 352456 - DNA, 66 bp, Homo sapiens
  chr20:9489716-9489782
  hyper
atactgagccatgagcaaccaggcccacctaccgccgcgccatccaaaggtaacaccacagaccac

SEQ ID NO: 352457 - DNA, 736 bp, Homo sapiens; identical to SEQ ID NO: 347654
  chr20:10415352-10416088
  hyper

SEQ ID NO: 352458 - DNA, 95 bp, Homo sapiens; identical to SEQ ID NO: 347655
  chr20:17919868-17919963
  hyper

SEQ ID NO: 352459 - DNA, 267 bp, Homo sapiens; identical to SEQ ID NO: 294620
  chr20:19193616-19193883
  hyper

SEQ ID NO: 352460 - DNA, 78 bp, Homo sapiens; identical to SEQ ID NO: 336375
  chr20:19673407-19673485
  hyper

SEQ ID NO: 352461 - DNA, 148 bp, Homo sapiens; identical to SEQ ID NO: 336377
  chr20:20343543-20343691
  hyper

SEQ ID NO: 352462 - DNA, 62 bp, Homo sapiens
  chr20:20344267-20344329
  hyper
cgggagaagagggaaaggcggaggagagaggaacggcggtggggggggaggagcacccgcca

SEQ ID NO: 352463 - DNA, 79 bp, Homo sapiens; identical to SEQ ID NO: 345625
  chr20:20350750-20350829
  hyper

SEQ ID NO: 352464 - DNA, 205 bp, Homo sapiens; identical to SEQ ID NO: 345626
  chr20:21080357-21080562
  hyper

SEQ ID NO: 352465 - DNA, 184 bp, Homo sapiens; identical to SEQ ID NO: 294634
  chr20:21086682-21086866
  hyper

SEQ ID NO: 352466 - DNA, 923 bp, Homo sapiens; identical to SEQ ID NO: 347661
  chr20:22564324-22565247
  hyper

SEQ ID NO: 352467 - DNA, 66 bp, Homo sapiens; identical to SEQ ID NO: 294666
  chr20:22567768-22567834
  hyper

SEQ ID NO: 352468 - DNA, 264 bp, Homo sapiens
  chr20:23617984-23618248
  hyper
cgcgctgcggcgcagctcgagctggctcctggaagctgatcttaggcgccgggcgcggacctgacgtgtccgtgcggttccaggccaggccagactcagggcattcccggacacgcccgccaagggctcgggggtgacagcgaagaccgggaacagggtccgggtgagaagcccaggcgccggagaggagcagcacggggtccgggagcagcgcggggggaggctgggacggcggggccggggcttcggaccctgcggggggcg

SEQ ID NO: 352469 - DNA, 68 bp, Homo sapiens
  chr20:23618645-23618713
  hyper
caccccaccgcggcctgcactcccttttccggaacgcctcgtccctcccacctcccttctccctcccc

SEQ ID NO: 352470 - DNA, 205 bp, Homo sapiens
  chr20:25065526-25065731
  hyper
atctgtcttcatcagccaggattacccgggatttaactaatgaataaaggttcctcagctcattattttctaaggaagatttccagcccctctgtcgccgaccgcgaatgtgccttggcagcgccaggctgaggttggacctgctgtgagtggctcagcaggcacccctcttgggcttctcagagccgcggctggccaggctggc

SEQ ID NO: 352471 - DNA, 150 bp, Homo sapiens; identical to SEQ ID NO: 294676
  chr20:25566244-25566394
  hyper

SEQ ID NO: 352472 - DNA, 59 bp, Homo sapiens
  chr20:25566411-25566470
  hyper
cggagcttggcggttcgcagctctcggggtagcatcttctggaaacaagcccggaggcc

SEQ ID NO: 352473 - DNA, 1002 bp, Homo sapiens; identical to SEQ ID NO: 345628
  chr20:30192854-30193856
  hyper

SEQ ID NO: 352474 - DNA, 189 bp, Homo sapiens; identical to SEQ ID NO: 345629
  chr20:30193992-30194181
  hyper

SEQ ID NO: 352475 - DNA, 262 bp, Homo sapiens; identical to SEQ ID NO: 336415
  chr20:30196349-30196611
  hyper

SEQ ID NO: 352476 - DNA, 482 bp, Homo sapiens
  chr20:30555404-30555886
  hyper
cgaagacaataagaaaaggggacccctcaagatcaaaggaggggatggaacaatatgtgagcactcaggaaactggaaatgagcgttagcatggagtgactgctaaagggttactggggggcccgcccaagtcccccagctcctttcttccaagtcccccacccacccccccgtcagacccaggccactggaggtgaacacaggagaaaaacgaagtggagagaatgggaagggggaggcgataaacaaaaaagaaggaagtgcagtccgaggggagatgagagacagaaagcatggggttggagccccgcgcctccgaggaaggagggagagggtgacctggggtgcgccccgcctcccctgcttccgcattcccgggggctgcccccccttcggccgcagctcaggcgggtgggggcggggcggggcggcgccgaggagaatgaataattgaagtggaggggaggaggaagaagaggaga

SEQ ID NO: 352477 - DNA, 248 bp, Homo sapiens
  chr20:30556403-30556651
  hyper
ggacagcgccggcgccttccggaccaaagaaggcagccccgagccgggtccccagcctgcgccctcctcggccagcgcctaccgccgccgctgctgccgcctctgcatctggctgctgcagaccctcgtccacctcctgcagctcggccaggtctggaggtaggagaagcgcaggtggagggacctgagcccgaggagtgggggtggcgaagggctacctgacgtcccagccctgatctgacctttcc

SEQ ID NO: 352478 - DNA, 61 bp, Homo sapiens; identical to SEQ ID NO: 347665
  chr20:30639044-30639105
  hyper

SEQ ID NO: 352479 - DNA, 138 bp, Homo sapiens; identical to SEQ ID NO: 294696
  chr20:30639494-30639632
  hyper

SEQ ID NO: 352480 - DNA, 109 bp, Homo sapiens; identical to SEQ ID NO: 345631
  chr20:32899337-32899446
  hyper

SEQ ID NO: 352481 - DNA, 339 bp, Homo sapiens; identical to SEQ ID NO: 294726
  chr20:32899515-32899854
  hyper

SEQ ID NO: 352482 - DNA, 59 bp, Homo sapiens; identical to SEQ ID NO: 205789
  chr20:34190072-34190131
  hyper

SEQ ID NO: 352483 - DNA, 534 bp, Homo sapiens; identical to SEQ ID NO: 336423
  chr20:34652354-34652888
  hyper

SEQ ID NO: 352484 - DNA, 141 bp, Homo sapiens; identical to SEQ ID NO: 347670
  chr20:35201323-35201464
  hyper

SEQ ID NO: 352485 - DNA, 37 bp, Homo sapiens; identical to SEQ ID NO: 205795
  chr20:35201548-35201585
  hyper

SEQ ID NO: 352486 - DNA, 120 bp, Homo sapiens; identical to SEQ ID NO: 347672
  chr20:35201647-35201767
  hyper

SEQ ID NO: 352487 - DNA, 62 bp, Homo sapiens; identical to SEQ ID NO: 345634
  chr20:37274639-37274701
  hyper

SEQ ID NO: 352488 - DNA, 546 bp, Homo sapiens; identical to SEQ ID NO: 205802
  chr20:37274731-37275277
  hyper

SEQ ID NO: 352489 - DNA, 100 bp, Homo sapiens
  chr20:37303401-37303501
  hyper
cctgtttccctgggtgggagtgggaagggagttttaaactgaattgtgctcagactcccagcccagtcttcccggagccatccgttccttcatccaatgc

SEQ ID NO: 352490 - DNA, 37 bp, Homo sapiens; identical to SEQ ID NO: 347675
  chr20:37358242-37358279
  hyper

SEQ ID NO: 352491 - DNA, 389 bp, Homo sapiens; identical to SEQ ID NO: 345636
  chr20:37433723-37434112
  hyper

SEQ ID NO: 352492 - DNA, 220 bp, Homo sapiens; identical to SEQ ID NO: 294785
  chr20:42876305-42876525
  hyper

SEQ ID NO: 352493 - DNA, 47 bp, Homo sapiens
  chr20:43729515-43729562
  hyper
cgggaccgtcccggagccacgtccctccccaaaggaggccccttacc

SEQ ID NO: 352494 - DNA, 215 bp, Homo sapiens; identical to SEQ ID NO: 347677
  chr20:43976984-43977199
  hyper

SEQ ID NO: 352495 - DNA, 71 bp, Homo sapiens; identical to SEQ ID NO: 345637
  chr20:44453063-44453134
  hyper

SEQ ID NO: 352496 - DNA, 171 bp, Homo sapiens
  chr20:44642198-44642369
  hyper
cgggagggggctttgcggaggggctgcccgtcccttcccgcccactggccctgtgtccaaggcttagagcccgtcctttccctcctcgctttctcaggaagtactggcgattctctgagggcagggggagccggccgcagggccccttccttatcgccgacaagtggcccg

SEQ ID NO: 352497 - DNA, 578 bp, Homo sapiens
  chr20:44642532-44643110
  hyper
agaaaaatacgccccctggcggacgcagtttagcaaacgtaggggcggctgagtttctgccccctcctctccacgccctcgcgtcgctctacccagcgcctctgcccctgggttgcagggactgcgggcacgcgggctaggaaaggcctcgccggaatctccctcctcgcgttctaggagtacgtgctccctctgcgcccccaaaccgacgtgaccctcctcccctgcagggcgccaggtgtgggtgtacacaggcgcgtcggtgctgggcccgaggcgtctggacaagctgggcctgggagccgacgtggcccaggtgaccggggccctccggagtggcagggggaagatgctgctgttcagcgggcggcgcctctggaggtgagcgccgccgcggccgccggcagggggagcccgggcgccgtcggtccgtccgctagccggctcagcacctgtctcctccgcgcctgcccgcaggttcgacgtgaaggcgcagatggtggatccccggagcgccagcgaggtggaccggatgttccccggggtgcctttggacacgcacgacgtcttccagtacc

SEQ ID NO: 352498 - DNA, 32 bp, Homo sapiens; identical to SEQ ID NO: 345638
  chr20:44879699-44879731
  hyper

SEQ ID NO: 352499 - DNA, 66 bp, Homo sapiens
  chr20:44937643-44937709
  hyper
aaaggcaccttgcacagaccagatctgccagttcagaaacagtcactgtgcattgaggtggacacc

SEQ ID NO: 352500 - DNA, 50 bp, Homo sapiens
  chr20:47934774-47934824
  hyper
cgaggaggggtcgggtctgggagcctccgcccccaactcaaggcaggcta

SEQ ID NO: 352501 - DNA, 982 bp, Homo sapiens; identical to SEQ ID NO: 336464
  chr20:48598700-48599682
  hyper

SEQ ID NO: 352502 - DNA, 164 bp, Homo sapiens; identical to SEQ ID NO: 345639
  chr20:48771177-48771341
  hyper

SEQ ID NO: 352503 - DNA, 581 bp, Homo sapiens; identical to SEQ ID NO: 347682
  chr20:49224897-49225478
  hyper

SEQ ID NO: 352504 - DNA, 305 bp, Homo sapiens; identical to SEQ ID NO: 336468
  chr20:49225991-49226296
  hyper

SEQ ID NO: 352505 - DNA, 315 bp, Homo sapiens; identical to SEQ ID NO: 294860
  chr20:50158039-50158354
  hyper

SEQ ID NO: 352506 - DNA, 952 bp, Homo sapiens; identical to SEQ ID NO: 336473
  chr20:50158723-50159675
  hyper

SEQ ID NO: 352507 - DNA, 570 bp, Homo sapiens; identical to SEQ ID NO: 345641
  chr20:50383675-50384245
  hyper

SEQ ID NO: 352508 - DNA, 249 bp, Homo sapiens; identical to SEQ ID NO: 205848
  chr20:50384400-50384649
  hyper

SEQ ID NO: 352509 - DNA, 243 bp, Homo sapiens; identical to SEQ ID NO: 205849
  chr20:50384928-50385171
  hyper

SEQ ID NO: 352510 - DNA, 87 bp, Homo sapiens; identical to SEQ ID NO: 347688
  chr20:50385230-50385317
  hyper

SEQ ID NO: 352511 - DNA, 372 bp, Homo sapiens; identical to SEQ ID NO: 336479
  chr20:52259577-52259949
  hyper

SEQ ID NO: 352512 - DNA, 160 bp, Homo sapiens
  chr20:55203944-55204104
  hyper
cggttgttgagtcgctccccaaatgcgcagtttcttaactccaggtgacatccgtcttttggaggaacgagtgaaggccgtttaggcgaaagaggggtgggtttcagtatttggatcccttcccccagctctgccaatctcaggtgtgtttacggtggag

SEQ ID NO: 352513 - DNA, 216 bp, Homo sapiens; identical to SEQ ID NO: 205863
  chr20:55205088-55205304
  hyper

SEQ ID NO: 352514 - DNA, 135 bp, Homo sapiens; identical to SEQ ID NO: 205864
  chr20:55206463-55206598
  hyper

SEQ ID NO: 352515 - DNA, 95 bp, Homo sapiens
  chr20:55206774-55206869
  hyper
cctgttcaccctacggccttctgcccccaccccgcactcctctaggctcccccgaacttaagggaattttgtcctctctcccccagaatgtcgac

SEQ ID NO: 352516 - DNA, 535 bp, Homo sapiens
  chr20:55964187-55964722
  hyper
cgtggagacatggggccgccggagggggggagggattggtgatccagatacccaagggggcccgggggcggggggcgaaggagtgcgactggacccgcacctgggcaaccgcgtctccagcctccacggccctgtcccgcccccttccgggcaggcagaggccccggggctgccctgccgcctgggcccggcccccgcggcagcagccgagcggccgcacccctttgtggggctgtcgtgccgggaggggcgcgggcgaggcgggcccgggcggcgctgggacttgtaggccgggagcccgggcgcctccgggctgaagcccgtggccacgccaccgacgcggctccagcctgcccaggcaacgcgacggctggggacagccttggaaaaactgaaggggaaaccgaggcctggtgaagggatccagctggcgcaaaagcacgcggccgcgcagtggccgcctcccccggcctctagggggcaagtgaaggtcacacttaaatgaaagttttcaaagtcgcttcgaagggcctcc

SEQ ID NO: 352517 - DNA, 117 bp, Homo sapiens
  chr20:56725940-56726057
  hyper
ctggcaaccggtctcccaggagacgcgagacgctgagcccagggccagagcttgcggggcgcacagagcccccaggcctcatggcgcagaaacctctcagcaccgcggcggctgaac

SEQ ID NO: 352518 - DNA, 113 bp, Homo sapiens; identical to SEQ ID NO: 345643
  chr20:57225466-57225579
  hyper

SEQ ID NO: 352519 - DNA, 327 bp, Homo sapiens; identical to SEQ ID NO: 336499
  chr20:57797949-57798276
  hyper

SEQ ID NO: 352520 - DNA, 176 bp, Homo sapiens; identical to SEQ ID NO: 205885
  chr20:57875365-57875541
  hyper

SEQ ID NO: 352521 - DNA, 220 bp, Homo sapiens
  chr20:57875889-57876109
  hyper
ttttcgggctcacagtgacctccgccgcaggtaagcgcacggggcggcgcgcctctcctggcgcgagcgcacacaaaaggacccagggcgggggacccgaggcgcggagaagatgtgcgtcgcggggagcaaactcttgcctgggctctgcactcgtgaagacgcctgggggagggctggggagcagaagcggcgcgcaacgactacccgcacgggctcc

SEQ ID NO: 352522 - DNA, 233 bp, Homo sapiens; identical to SEQ ID NO: 347690
  chr20:57978841-57979074
  hyper

SEQ ID NO: 352523 - DNA, 115 bp, Homo sapiens; identical to SEQ ID NO: 345644
  chr20:58514400-58514515
  hyper

SEQ ID NO: 352524 - DNA, 33 bp, Homo sapiens; identical to SEQ ID NO: 336506
  chr20:60639846-60639879
  hyper

SEQ ID NO: 352525 - DNA, 84 bp, Homo sapiens; identical to SEQ ID NO: 347693
  chr20:61664570-61664654
  hyper

SEQ ID NO: 352526 - DNA, 192 bp, Homo sapiens
  chr20:61806216-61806408
  hyper
cgcggcctttcctctttctggaggaatgacaggcctcccgcagaggaggagcgggtggtgacgagggagaaggagcggaaagggaggggttctccacgggttctgttgatttgtttaatcccacgctattcggaggctttcacggatggcggacaagagggagggggagggggtgggggtctcggcccgtgt

SEQ ID NO: 352527 - DNA, 271 bp, Homo sapiens
  chr20:62185051-62185322
  hyper
cggggccttgctgggcagagcccgcggcgggggaagccgcccctctcctctgtccaggcgctgggtggtccatccgcctggtcaccggccactgcctctctcccaaattcctccgagggattcccgaggagtgcgctcggactggggggttgagcaggaactccctcccagtcacccgaggctcctgcgccccgcccgaagccgggggtgcgtggggagtggtgcgcccgcggaagggctccgggacgggaaccccccttggagcctggct

SEQ ID NO: 352528 - DNA, 390 bp, Homo sapiens; identical to SEQ ID NO: 347694
  chr20:62273399-62273789
  hyper

SEQ ID NO: 352529 - DNA, 290 bp, Homo sapiens; identical to SEQ ID NO: 347695
  chr20:62368779-62369069
  hyper

SEQ ID NO: 352530 - DNA, 144 bp, Homo sapiens; identical to SEQ ID NO: 336520
  chr20:62371942-62372086
  hyper

SEQ ID NO: 352531 - DNA, 43 bp, Homo sapiens
  chr20:62461248-62461291
  hyper
cgatacaattaaaatgcccgtgagttctcggcgcacaggtgtc

SEQ ID NO: 352532 - DNA, 264 bp, Homo sapiens
  chr20:62461639-62461903
  hyper
ttgagttgtcagacaccggctcgcgctcccccgcgaaactgacatgtctatttacagagaaacaaagacgcggctcgcagcggaccccgcttcctccgcgcgccccgtccgccccgcgcgccccgagccctccgcgccccgagccgccccgccccgaggcccctgcgccccggttcggccggcgattaagatggagaccaggccggcgcccggcgtccggggagacaatgaccccccggcctcagggcgccgggacccgcccgc

SEQ ID NO: 352533 - DNA, 345 bp, Homo sapiens; identical to SEQ ID NO: 345646
  chr20:62495236-62495581
  hyper

SEQ ID NO: 352534 - DNA, 58 bp, Homo sapiens
  chr20:62694227-62694285
  hyper
cgcgggacagcaaggcccgaagcaggaggagagaagggagcagattcctgggcctcct

SEQ ID NO: 352535 - DNA, 251 bp, Homo sapiens; identical to SEQ ID NO: 205918
  chr20:62694767-62695018
  hyper

SEQ ID NO: 352536 - DNA, 197 bp, Homo sapiens
  chr20:62695048-62695245
  hyper
cccttaactccagacccccagcctggcccgtcgactccttccttggccctgtcccgcctctcggagcccccggggtgttcgggcctcctctgcgggccgcgccagccccttgccttcctccatcccggcctgggcatcctcacaggccgagccccgccccccaactcagccctctcccacgctccgtctcttacagc

SEQ ID NO: 352537 - DNA, 67 bp, Homo sapiens
  chr21:22370943-22371010
  hyper
tgtggcgctttattgcatttactttccctcccccttccacccggccaagagaggcaaagagggaggc

SEQ ID NO: 352538 - DNA, 122 bp, Homo sapiens; identical to SEQ ID NO: 205931
  chr21:27011487-27011609
  hyper

SEQ ID NO: 352539 - DNA, 133 bp, Homo sapiens; identical to SEQ ID NO: 205932
  chr21:27011639-27011772
  hyper

SEQ ID NO: 352540 - DNA, 153 bp, Homo sapiens; identical to SEQ ID NO: 345649
  chr21:27012725-27012878
  hyper

SEQ ID NO: 352541 - DNA, 466 bp, Homo sapiens; identical to SEQ ID NO: 347700
  chr21:30374936-30375402
  hyper

SEQ ID NO: 352542 - DNA, 180 bp, Homo sapiens
  chr21:33244741-33244921
  hyper
cgaagagaggcgagcgccggtccacctcctgcaatcacaggcatcatttcaatggaaggcaaagaaggtgtaagctacaagcagaggcagcaaacgccctggttcctacattgctgctgctactattactgctgtggctgcgcctcctccaacacagccaaccaggctgcgtgcgagccc

SEQ ID NO: 352543 - DNA, 290 bp, Homo sapiens; identical to SEQ ID NO: 205955
  chr21:33245047-33245337
  hyper

SEQ ID NO: 352544 - DNA, 194 bp, Homo sapiens; identical to SEQ ID NO: 205956
  chr21:33245489-33245683
  hyper

SEQ ID NO: 352545 - DNA, 75 bp, Homo sapiens; identical to SEQ ID NO: 205957
  chr21:33245718-33245793
  hyper

SEQ ID NO: 352546 - DNA, 132 bp, Homo sapiens; identical to SEQ ID NO: 205958
  chr21:33245877-33246009
  hyper

SEQ ID NO: 352547 - DNA, 129 bp, Homo sapiens
  chr21:33246414-33246543
  hyper
agcctttcccgaaggcggcctgcggtccgctgcccgggggttgggggcttgggaggggacggccttgccccgggaagcgtcccgcgcggccgttctgctcgtggaagggcgccgcctggcgacactagc

SEQ ID NO: 352548 - DNA, 300 bp, Homo sapiens
  chr21:34602438-34602738
  hyper
cgcgagcgtcgggtcccagagccgggcgcggctggggcccgaggctagcatctctcgggagccgcaaggcgagagctgcaaaggtaacgcagcgtggcggggtcgcgggagcggagcgcgtggccagctgactggagggaaaacgccgcctccctgcagcggttcccggaatcccctccggttccctctcgctctccccgactcctcctcctcctcctgccctccctctgcgtcttgagtatgcggctagtgcgcccttcctctctcccggggccgcacctgcgaccccaggacccctcc

SEQ ID NO: 352549 - DNA, 613 bp, Homo sapiens
  chr21:34602763-34603376
  hyper
cgtcgcccctgctgggagtccgctttcgttgcacccctccgcgtcccaccccaccccaccaaggatgcccaggataccgggcatttgccactgcaagatgtgagtcgttgctaagtttgagggtcacattcctccaggtccaccccgccttgcaaaaccggctcaccagctgggtgctcaggttcgggatctccagcccgcccccttgaggtcccctgggattagcccccctcgacctgcgtcagggtcacagactgcagccggggctggagcggcctacacccctccggatccgctgcgtggaggcaggagggggaaggggcgaggggacgtggccgcggagacagaagggtgcaccctcccagggtcggagaggggagatactgggaagatactccgcgaatatggagaggcgatcggcacttgcatttcaaccctgagcaaatcaatccgttacacgcagtagcgagttgactccatcagcccgtttatttggttagcgatggttatattgactctgagtattcccacctcctttcttttaacatttttttttttatttccttgttttgtttagcaagaagtcttagaaacgaatatagcatgcttgggc

SEQ ID NO: 352550 - DNA, 237 bp, Homo sapiens; identical to SEQ ID NO: 336554
  chr21:37757666-37757903
  hyper

SEQ ID NO: 352551 - DNA, 156 bp, Homo sapiens
  chr21:38064301-38064457
  hyper
cggcgctcctcccacggcgacacctccgtgctctttttgcttgtatttattcaaaaattagatttgtcaataacgcagggcctggcaaataggaggacctctccaaaattaaatgcaagattgaacataggtctctcacatcataataaagcggtt

SEQ ID NO: 352552 - DNA, 283 bp, Homo sapiens; identical to SEQ ID NO: 205987
  chr21:38064683-38064966
  hyper

SEQ ID NO: 352553 - DNA, 111 bp, Homo sapiens; identical to SEQ ID NO: 295100
  chr21:38071905-38072016
  hyper

SEQ ID NO: 352554 - DNA, 146 bp, Homo sapiens
  chr21:38080753-38080899
  hyper
atgtgacaggagaccctttccagttcggcctgtggcccatccctctctcaccgccggcagattggagtctgctctcggggagcccccaggtaaacccctcacagggagaaggtttcggattggaaggaggaccgcgctcgtggggc

SEQ ID NO: 352555 - DNA, 293 bp, Homo sapiens; identical to SEQ ID NO: 336563
  chr21:38382182-38382475
  hyper

SEQ ID NO: 352556 - DNA, 140 bp, Homo sapiens; identical to SEQ ID NO: 347703
  chr21:38936049-38936189
  hyper

SEQ ID NO: 352557 - DNA, 144 bp, Homo sapiens; identical to SEQ ID NO: 347704
  chr21:38936266-38936410
  hyper

SEQ ID NO: 352558 - DNA, 44 bp, Homo sapiens; identical to SEQ ID NO: 347705
  chr21:39047626-39047670
  hyper

SEQ ID NO: 352559 - DNA, 289 bp, Homo sapiens
  chr21:39288415-39288704
  hyper
cgcgggtctccacccctccgcccgcccagcctctccagccaggtgcggccgtctccggactggctccctctggccgagcgcggagagcagggctgggcgctggggccaagggaggggcggaggggcgcgcgtttgggcagggacgggggagggagactgggtggaatgaagtggggaaagataagagtggcagaagaaaaaaaaaatccccggttaggagaaaagtggtggaccacgcagagagacgtcatgaaatccgcagattcaatgaatgctactcaattccagc

SEQ ID NO: 352560 - DNA, 279 bp, Homo sapiens; identical to SEQ ID NO: 206001
  chr21:39288901-39289180
  hyper

SEQ ID NO: 352561 - DNA, 75 bp, Homo sapiens
  chr21:40105869-40105944
  hyper
cgaaaatatctgtcatcgtcactttacagaaaatggaaaaggatgaggattgcacaaaaactagaaattccatcc

SEQ ID NO: 352562 - DNA, 341 bp, Homo sapiens; identical to SEQ ID NO: 206009
  chr21:40105997-40106338
  hyper

SEQ ID NO: 352563 - DNA, 60 bp, Homo sapiens
  chr21:42688559-42688619
  hyper
cgccagcgacctcagagctcccgggcacagcccggggcacagccccgcgcacctgccccg

SEQ ID NO: 352564 - DNA, 113 bp, Homo sapiens
  chr21:43186321-43186434
  hyper
cggcgaggaagcgctgggcggacggatcaacaccccgggccccgtgccggaccccactgccaggcccgagccccggagctccaccgcgcaagcgccgggcgcccgggaagcct

SEQ ID NO: 352565 - DNA, 106 bp, Homo sapiens; identical to SEQ ID NO: 206022
  chr21:43186592-43186698
  hyper

SEQ ID NO: 352566 - DNA, 493 bp, Homo sapiens; identical to SEQ ID NO: 347707
  chr21:43186889-43187382
  hyper

SEQ ID NO: 352567 - DNA, 285 bp, Homo sapiens
  chr21:43188170-43188455
  hyper
cgcaacggtgagtgaaggcttatttttggccacaggagattaataatgaagacaggagggcggagctaaaggagagggtattttaacgacattaactgtgtttttgtgttagtaactcggaaagagagaggctgccccaagtcagcgcattgaaagccgcagacctagtgtctccaggctcccccttccaaacgggcgcggaccttctttcatagcctgtagcggggagccgcgtctccccactgcctccccactcccatccggccgctctttggagggaactca

SEQ ID NO: 352568 - DNA, 603 bp, Homo sapiens; identical to SEQ ID NO: 336575
  chr21:43188777-43189380
  hyper

SEQ ID NO: 352569 - DNA, 33 bp, Homo sapiens
  chr21:44847478-44847511
  hyper
cgcggcctgcgttcgtccagactcagagcctcg

SEQ ID NO: 352570 - DNA, 56 bp, Homo sapiens
  chr21:44847864-44847920
  hyper
cgggggcgcgggaccacttgcttgcccgtggccgatgcctcatccgaacggaaaac

SEQ ID NO: 352571 - DNA, 196 bp, Homo sapiens
  chr21:46294041-46294237
  hyper
cgggcgtcccggacggcggtcccaagcgctgctcacgctgctcttaagtgagccctggacgaggcgcggtgggccctcatagtccgcgccggcgccctcgctccacaccgcggcgtccggccctgggctcccgccgatgtccgcgtgggacttttaggggatttgtttatttttgtacgttaaccacactagaaac

SEQ ID NO: 352572 - DNA, 34 bp, Homo sapiens
  chr21:46351619-46351653
  hyper
cgcccagccggggcgatcctttggtcggacagtg

SEQ ID NO: 352573 - DNA, 323 bp, Homo sapiens
  chr21:46352279-46352602
  hyper
cgctccgagcctggccgcctccctggggcgcgtgaagggagctttccttccccgggaaaggccggggccagagacccgcactcggaccaggcgggggctgcggggccagagtgggctggggagggctgggagggcgtctggggccggctcctccaggctgggggccgccagctccgggaaggcagtcctggcctgcggatggggccgcgcgtggggcccggcggggcggcctcgggaggcgtccaggctgcgggagcgggaggagcggccgtgcgggcgccagcgccgtgggtggaggtcgccgtccctcctgaggggcagcc

SEQ ID NO: 352574 - DNA, 94 bp, Homo sapiens; identical to SEQ ID NO: 295190
  chr21:46825731-46825825
  hyper

SEQ ID NO: 352575 - DNA, 55 bp, Homo sapiens
  chr21:47062898-47062953
  hyper
tccccgcccaccgcggatccgccccgtccaccaaggtctcgctcaccaacggccc

SEQ ID NO: 352576 - DNA, 142 bp, Homo sapiens; identical to SEQ ID NO: 345651
  chr21:47063290-47063432
  hyper

SEQ ID NO: 352577 - DNA, 237 bp, Homo sapiens; identical to SEQ ID NO: 206052
  chr22:17849877-17850114
  hyper

SEQ ID NO: 352578 - DNA, 129 bp, Homo sapiens
  chr22:19706042-19706171
  hyper
cgcccagtcagggggatggctcggtcggcctcgggggtcgacgatcccccgggtaggcgacgtgccctgtccaggcctcacttcccgcgtccgcaaaacggggtggacaacgcagcctaaggcagagcc

SEQ ID NO: 352579 - DNA, 390 bp, Homo sapiens; identical to SEQ ID NO: 206060
  chr22:21319195-21319585
  hyper

SEQ ID NO: 352580 - DNA, 166 bp, Homo sapiens; identical to SEQ ID NO: 345652
  chr22:22006759-22006925
  hyper

SEQ ID NO: 352581 - DNA, 328 bp, Homo sapiens
  chr22:22012017-22012345
  hyper
cggcgcgccgagaccctcgggagccccgcccagacgcctgctccgcttccaggccacccgggctctccagccgcgctcgctcgtagagatcctagacaagttcgacagcgaggtcccgcagagcaagacctgccagcagatctccgaggaggacttggagaggcaggcggacacctacactgggcgcgcgctgcgcctcctcttccgcagccccgtccgcaacccgtcgctggcggagagggtggtacaattggaacagcgcgggctctcttttttccggatgcggccgcggggcatgggaccggctgggcgggaactgtcactaccc

SEQ ID NO: 352582 - DNA, 136 bp, Homo sapiens; identical to SEQ ID NO: 345653
  chr22:22862472-22862608
  hyper

SEQ ID NO: 352583 - DNA, 60 bp, Homo sapiens
  chr22:24181727-24181787
  hyper
acctccccaaacgtccagggccccactcaaatgtgccggccgctgtcggggttcttcccc

SEQ ID NO: 352584 - DNA, 187 bp, Homo sapiens; identical to SEQ ID NO: 295268
  chr22:24552924-24553111
  hyper

SEQ ID NO: 352585 - DNA, 173 bp, Homo sapiens; identical to SEQ ID NO: 295271
  chr22:24819901-24820074
  hyper

SEQ ID NO: 352586 - DNA, 61 bp, Homo sapiens; identical to SEQ ID NO: 295272
  chr22:24820486-24820547
  hyper

SEQ ID NO: 352587 - DNA, 240 bp, Homo sapiens; identical to SEQ ID NO: 345654
  chr22:25348202-25348442
  hyper

SEQ ID NO: 352588 - DNA, 787 bp, Homo sapiens; identical to SEQ ID NO: 206075
  chr22:25348485-25349272
  hyper

SEQ ID NO: 352589 - DNA, 395 bp, Homo sapiens
  chr22:25349348-25349743
  hyper
gtcgaggggagcccggaggacagcgcggtggttcggggggcgtgagaggggcggcgcgcggggcccctcggacgcggaggctccggacacgtcctctcggcctggcctgcgccccccctccgctcgtcttcccagggcggaggcgccctgatgggattaagcctcagtccccctgttaccaggcaggcccgcgtggtccccgccccgatggcggcgcggcccacccgggctcacgggtggggccctcgggatgggaagcggctcgttgacccccacccgagcctgaccttttcacaccctgctggcacaaactcgcctgggagtggggacgccgcgccttaaaaccctgctgtttgtccagtcccggagcaggcgtgtgacctccaccgcgcgac

SEQ ID NO: 352590 - DNA, 730 bp, Homo sapiens
  chr22:25959837-25960567
  hyper
cgagaccgaagatcaggaagctggaaattccccccagcttcggtgtttgggctgtatctcgcttttccacttccctaaatcaccctcgtggtgcgagtgtgctcgcagcagatgctccctaattgtctcttgtattgaccgtaaaaccctaacgacaggaatactctctctccttctatttctcaacaccatttcaacacccaaactaaaacctctcacctgagtgtaagggagtggtgaccttcttaagcggagagctcttccatcagagggctccctaagggcatctctgttcctagccggggagccgtcaccccactttgttctgcttagcctaagacacgcaactttttccagcttttactcttcgctgaattctcacggtggggttggggggatgttcaggctcaggagcgaggttgggggcccggcccgctgggcgctgttcaccggtagcccggaccagagcaggagtttcatcattacctgctgggataggtgggacacatgtatttccggggccaccccagacctcccggaggatgctgattgacactgtccagtttgagaactactgtgtccagggagcagaggcctccccataaccccttgggttgtggacgtctggcccagggcttctctgggtgagcggggcgggcatcagagcgcgtggaacctggggcgggaggtcggggcagtgaaggaggaggagaaggaggaggcggagacc

SEQ ID NO: 352591 - DNA, 473 bp, Homo sapiens
  chr22:25960608-25961081
  hyper
cgtggccaccccgaggggagggcgaccgtagagacttggtcgggaggcgccggcccagcgaggccgctgggactgtgcactgaggggcgctgaccgttggacgcgcgctccccgcagaccctcgctgaaggagcagggggcggcgcgcgtgcgcggggcgccgggcggcgcgcgagggggcggagcggggaggcgtgctgcgaccccggccggctacagcctgcggcgcgcgcagagcgctagtggggcgcgcggcgcgcgcgcggggcgggggcgcgcggaggggggggctgccccggggcggcccccccaggtcggggcgcggcgggcggcggcggcgggcgcgcgtcccgtccaggtccggagtaaccgccgccgccgccgccaaagctcgccaacatggcggacctggaggctgtgctggccgatgtcagttacctgatggccatggagaagagcaaggcgaccccggc

SEQ ID NO: 352592 - DNA, 248 bp, Homo sapiens; identical to SEQ ID NO: 57883
  chr22:25961110-25961358
  hyper

SEQ ID NO: 352593 - DNA, 96 bp, Homo sapiens
  chr22:27053098-27053194
  hyper
cgcccctggtccgcggtcgcgcgcagcccccgcgcctctccagccctgagctctctgcggcctaatgtggacgggcaagcgttgccatgacagcgc

SEQ ID NO: 352594 - DNA, 267 bp, Homo sapiens; identical to SEQ ID NO: 206085
  chr22:27053250-27053517
  hyper

SEQ ID NO: 352595 - DNA, 230 bp, Homo sapiens
  chr22:27054028-27054258
  hyper
ggtctcggaactggaggtgggggtggggcggtggggcagggtccttgagctccccttccctcatactcagcccgcccccgacccaaccccccgagcctgccattccttcacttcccagatgtccggcgtcaaatttggctccaaaaggatggagagggctggtaggtaacccaccctcgttgaaaacaacagtgacatcagtttatggagaggttactctacgcagggac

SEQ ID NO: 352596 - DNA, 299 bp, Homo sapiens
  chr22:27068622-27068921
  hyper
cgaggggggcgtatcccacgaggaaggcaggagggggcgtgcccctcaccggaaattagcagaggggcgtgtcccacaccggaagtcagaaagcggagcctttcttacaccggaagtcaatgaagcgggtctttcctacgctaaaaaccactgagtggagtatttagtacacaggaagtcggccagagaaacatttctcatatttgaaggccggaaagagggacatttctgacaccggaagtcagtgagaggactctttcccacacaggaagtcagctagagagccgtctcccctctct

SEQ ID NO: 352597 - DNA, 123 bp, Homo sapiens; identical to SEQ ID NO: 347716
  chr22:28838056-28838179
  hyper

SEQ ID NO: 352598 - DNA, 60 bp, Homo sapiens; identical to SEQ ID NO: 206092
  chr22:28838449-28838509
  hyper

SEQ ID NO: 352599 - DNA, 243 bp, Homo sapiens; identical to SEQ ID NO: 206093
  chr22:28838551-28838794
  hyper

SEQ ID NO: 352600 - DNA, 278 bp, Homo sapiens; identical to SEQ ID NO: 295309
  chr22:28838844-28839122
  hyper

SEQ ID NO: 352601 - DNA, 129 bp, Homo sapiens; identical to SEQ ID NO: 347720
  chr22:28839263-28839392
  hyper

SEQ ID NO: 352602 - DNA, 63 bp, Homo sapiens; identical to SEQ ID NO: 295312
  chr22:29075343-29075406
  hyper

SEQ ID NO: 352603 - DNA, 306 bp, Homo sapiens
  chr22:29467406-29467712
  hyper
cgcgggctctgggagtggataagggggtggcgcccgggggttgagggggcccaggggcgagtgtacccaaggcgtgccggtcccgcccagccgcgctctgggtgcggcgagtctgcacactggtgcagatgttcccgccgccgcgccgggcgcaggtctgcacttgcaagcccgggaccagggacttgaaagcgcccggcgcgccgcctggacctgccccgccgggcgtcaccgctgcgctttaggcgggaactgtaggaaaatcccctctgcctggcgggagggcgggggaggaggacggcccac

SEQ ID NO: 352604 - DNA, 149 bp, Homo sapiens
  chr22:29467742-29467891
  hyper
ttgccggggtcggggcggggggaggcgggcaaagggcctaccacgctggggccgaaagtttaagcaagccgcgcgctctctgatccctaacatcccaggctgtaggataagcagtactgtctcatccatttctggacgttgcgttgggc

SEQ ID NO: 352605 - DNA, 170 bp, Homo sapiens; identical to SEQ ID NO: 347722
  chr22:29550509-29550679
  hyper

SEQ ID NO: 352606 - DNA, 134 bp, Homo sapiens; identical to SEQ ID NO: 295369
  chr22:35420072-35420206
  hyper

SEQ ID NO: 352607 - DNA, 73 bp, Homo sapiens
  chr22:35420315-35420388
  hyper
ttaaattgttttaattaatcacagattgagcagtaaatgaaccactaagtggagagagcgcgcgggagcaagc

SEQ ID NO: 352608 - DNA, 171 bp, Homo sapiens
  chr22:36847902-36848073
  hyper
cgtcgtaagcctttgttccccaacagggggaagtgaaccagcacacaaggcccttccgtcctgcggagctcactgccttcctcagctcctggcccgcacttccgaccacacactggggacacaccctcgggggggccccaccccagcagctgcccatgttcacacctcttc

SEQ ID NO: 352609 - DNA, 320 bp, Homo sapiens
  chr22:39549067-39549387
  hyper
cgaggcgcagcccctcgagttgcaggagagccgggacccaaaaggcttcccaccgtgtccggacgtcgcagggccgaggtctccctaatccggccttctccgcggcgcagtttggccagtgtctccacgtccgtccacccacccctccatccgcccttccatttgtccatccacccgaccctcggtggtcggtgcccagacgcacgggtcagacgcgggcgctgcctcgagggctcccgggccgggccctcgttcgcggcaggagcggccgcggtggagctgaggtcccccggggacggattttgccgccgcgctgcccc

SEQ ID NO: 352610 - DNA, 137 bp, Homo sapiens
  chr22:39549472-39549609
  hyper
ccaccccccttcctttttcgctaacgcgcctccattcctcactgggagcccggcgtcgtccctgctccttcctgtactgaccccaacttctgtcgctccggcatcccctcggggactcgggtctgcctgccctcacc

SEQ ID NO: 352611 - DNA, 148 bp, Homo sapiens; identical to SEQ ID NO: 345657
  chr22:39852943-39853091
  hyper

SEQ ID NO: 352612 - DNA, 225 bp, Homo sapiens; identical to SEQ ID NO: 295455
  chr22:39853157-39853382
  hyper

SEQ ID NO: 352613 - DNA, 31 bp, Homo sapiens; identical to SEQ ID NO: 295456
  chr22:39853626-39853657
  hyper

SEQ ID NO: 352614 - DNA, 209 bp, Homo sapiens; identical to SEQ ID NO: 295457
  chr22:39853690-39853899
  hyper

SEQ ID NO: 352615 - DNA, 130 bp, Homo sapiens; identical to SEQ ID NO: 345661
  chr22:39853934-39854064
  hyper

SEQ ID NO: 352616 - DNA, 332 bp, Homo sapiens; identical to SEQ ID NO: 336651
  chr22:41418641-41418973
  hyper

SEQ ID NO: 352617 - DNA, 53 bp, Homo sapiens
  chr22:42896458-42896511
  hyper
cggcggccctcgggatgggtcctgccagggcgcagagatggcggtggaaaggc

SEQ ID NO: 352618 - DNA, 209 bp, Homo sapiens
  chr22:43115852-43116061
  hyper
cgcggaacaatcactcgacgttggcggaggggaggaagccgcagagagggtgtcgtgagggaaaggtgggtgcaggggaaatggcgctttaacccactcagggccagaggctcagccgagactatccaggtgggaacttgtccctccggatgacaggtgatgaaactgagggaaggggactcgccctggcagtgaaacgggatgggcgc

SEQ ID NO: 352619 - DNA, 107 bp, Homo sapiens
  chr22:43116269-43116376
  hyper
ccaaatcctcaccctccctaaggccggcgccgacgctgccagcccggcagagccccctcctgccggccgctctccatccccgtccccggtcgcatccgctccggggc

SEQ ID NO: 352620 - DNA, 470 bp, Homo sapiens
  chr22:43659642-43660112
  hyper
ggtatgcagcaacacagaatagatttaagaacacaaacaccctgctagttgtaataaagacaaaaacgtctaaagttaaaaatcaaacaaacaaatggaaatgaggaagcctgcattttgcccggcactgtaactcctggtttcacctgattttgcgactcatatttcctcaccttgattttctcactaatcaatcaaattgttggaatgacgcagagtctaactaagcaacgagttagcacggaaagcgctttcatgctgctgccctgcacagaagctgcaagttcacacggaaagaccctttccgctggctcgattccaaaacagcatcagcgcctgagtcacacagatagtggcgtgcggtcaacgcttaacagccggcaggggtggaggctgatttgcagtatttaccaatttacgtgggataaatacgccagccacggctaatttcaaggtaccagggagatgtc

SEQ ID NO: 352621 - DNA, 202 bp, Homo sapiens; identical to SEQ ID NO: 295517
  chr22:44258078-44258280
  hyper

SEQ ID NO: 352622 - DNA, 41 bp, Homo sapiens
  chr22:44258533-44258574
  hyper
tcacccacccgctgccggggctgacagagaccctggcccgc

SEQ ID NO: 352623 - DNA, 559 bp, Homo sapiens; identical to SEQ ID NO: 295522
  chr22:44419919-44420478
  hyper

SEQ ID NO: 352624 - DNA, 109 bp, Homo sapiens
  chr22:44420680-44420789
  hyper
ttccatgagcagtgacgctcacgtgtgcagggcactctgggcagacacggcctgggggacccactactgggtgttgcgcgggcgccctgcagggtgcggggctcagggc

SEQ ID NO: 352625 - DNA, 649 bp, Homo sapiens
  chr22:44893737-44894386
  hyper
cgggcaggagggtgaggggcggcgtggagggcccgcgcgtgggtggcgaggctgcacaaagccccgcggcgcccgccccgcgcccgcccgggggagaacaaagggggctgctccttggcggccgcgggcctgggggccaccacagtggcggggcccggccgggcagggggccgggggcacgcgtacctggggtctcgcggttcctccgcggctctgtccgccgccggccgtgaccaagatggcccgcgcgggggacgcggccaggccgatgaatcaccgcgcggaccgccgagaactgcttcccggtcagcgcagccaagcgacggcgctggcgatggcggcgggcggcctccggcaggtgcagggaccgggccaggccggggccggggcaggggcggggccggggtcgcggcagagggcgggtcaccgcgcggcctttgtgcgggcggggccggcgcggtggcggtggcgggcgggccttaggctggccccgctggttgccatggataccgaccgctcccgcgcgtgcggagacgaccgctgccccgcccccggaagtgatgcacaaagtcccacccccccccaccccccaactcgggctgctgccaatcggggaagactgtagttgctgcggcgtcttcatcagggc

SEQ ID NO: 352626 - DNA, 34 bp, Homo sapiens; identical to SEQ ID NO: 295527
  chr22:45064203-45064237
  hyper

SEQ ID NO: 352627 - DNA, 389 bp, Homo sapiens; identical to SEQ ID NO: 295528
  chr22:45064286-45064675
  hyper

SEQ ID NO: 352628 - DNA, 147 bp, Homo sapiens
  chr22:45064918-45065065
  hyper
aaggtccagcctctcccaccccagcctcccgggacctcccgagctcgttctctcccagcctctctcgctcgccccccgccccgcccccttccctctatctctgagtttgtccgcgtctctgtgggtgggtctccgtccagccgcccc

SEQ ID NO: 352629 - DNA, 553 bp, Homo sapiens; identical to SEQ ID NO: 345662
  chr22:45097777-45098330
  hyper

SEQ ID NO: 352630 - DNA, 470 bp, Homo sapiens; identical to SEQ ID NO: 206166
  chr22:45098381-45098851
  hyper

SEQ ID NO: 352631 - DNA, 97 bp, Homo sapiens; identical to SEQ ID NO: 345664
  chr22:45098900-45098997
  hyper

SEQ ID NO: 352632 - DNA, 444 bp, Homo sapiens
  chr22:45148213-45148657
  hyper
cgtgcgggacggggacgcggcccagccgggaatcggggtgcccagggtgcgatgtgcgaggggctcctgagcgcgtgtgctccgcccgaccccgccctgtccccccgacacacaggtggacccagggtcagctcgtgcacctgggaaatggctcccgccgggtagcaggggcggaggggcggggctgggcggaggggcgggggggcggggcctgcccgggagccacgtccggggaggggccaggtgagcggcagacccggcacgcaggtgggggccggcggggtccgtggccaggtaaggcgggcggcggcgggagggagcgcgcagggaggaggccgtgctcggggtgggggggtgcgccgcgggggctcccagggcgtgtacggggacaaggggccgctggccgggtagggacgcccaggcgggcgcgacgccacgtgcggc

SEQ ID NO: 352633 - DNA, 155 bp, Homo sapiens
  chr22:45148870-45149025
  hyper
tgttccttttttgcttccgtcctggggtctcaggttaggtcgggtcagcgcctgggggaggcacctcccccgcccccacacaccccaaacctacaaggtgggtgaggtcattcccgtttcatagatgagaaaacggaggccggggcaggtgctgc

SEQ ID NO: 352634 - DNA, 289 bp, Homo sapiens; identical to SEQ ID NO: 295536
  chr22:45403189-45403478
  hyper

SEQ ID NO: 352635 - DNA, 236 bp, Homo sapiens; identical to SEQ ID NO: 206176
  chr22:46367124-46367360
  hyper

SEQ ID NO: 352636 - DNA, 120 bp, Homo sapiens; identical to SEQ ID NO: 295551
  chr22:46367867-46367987
  hyper

SEQ ID NO: 352637 - DNA, 767 bp, Homo sapiens
  chr22:46933993-46934760
  hyper
cgcacggaggctaaaatgcttcaccccgactaaaactccctggactttgaagcccaataggcagctaccggatctgcgtcccacttggtttaaagcgcaacttttaaatgaaagaagaaaaccccggttgacataagggatttggagaggacggcggaggcgcgctcatctcccgcgtgcggcccgacccgagcgttcgcggacgcatcgcggaatccccgagcgtccggctcctcccgaagcgggttgcggggaaggcggggggctgcgggtcctggaagctgcctggggcaagcaagcacccgcagggatttagagctgtgccacagcccctgcccagcctcctacggaggacagcggggggcggggggcagagaccttagagctttcagaaaagtgacacacacccccgcctcctgcggggaaccacggggggccgggggcagctttaggtttgcgtgacgggtacacctgcctccggatggggcacagggataaagggggtggaggcttaggacttggcgaccccccgcatgggcggggctttgggactgtgccaccagcggctgggaagggcgcgcactcccttggtggcgctcggggcgccggagtccagtgcagcccttaggcctcccagtggtcggggacggtaggtgggggtcgcctcttctctcctagaagggcttctcctggggccggtcggagcggtgggggtgggagtaatgcgcagtcacccctagaacgggtctttttggcaagggagggtc

SEQ ID NO: 352638 - DNA, 221 bp, Homo sapiens; identical to SEQ ID NO: 345667
  chr22:47199299-47199520
  hyper

SEQ ID NO: 352639 - DNA, 58 bp, Homo sapiens
  chr22:50170525-50170583
  hyper
cggtgtgtgatgaacccttccccgggaggttggccagggtggggctccacacagggca

SEQ ID NO: 352640 - DNA, 217 bp, Homo sapiens
  chr22:50453240-50453457
  hyper
cgcgcccgcgctgggcaccagatgggaggaaacggggtgcggagaccctgggcggcgccgagactcgtcggacgaacgcgggaaggaacgaaccagcgtccgcccgggacccgggctggagccttccccagagcggctcggagggtccggagcgggtgcgggggtgctgggcacgaggttcccaagaaaaccacggcgaggacgcgggttcaccaca

SEQ ID NO: 352641 - DNA, 98 bp, Homo sapiens
  chr22:50453539-50453637
  hyper
gccggtcccgactcacggggtccgcgggctgcagctccgcccgccgagccgcacgaaggacgcgccctgcaggaccgcggcgcagaacgagcggcagc

SEQ ID NO: 352642 - DNA, 166 bp, Homo sapiens; identical to SEQ ID NO: 347735
  chr22:50982557-50982723
  hyper

SEQ ID NO: 352643 - DNA, 622 bp, Homo sapiens; identical to SEQ ID NO: 336684
  chrX:2815904-2816526
  hyper

SEQ ID NO: 352644 - DNA, 596 bp, Homo sapiens
  chrX:9432830-9433426
  hyper
cgtgggggagcggggcgggcttggtagggacgctggtcccccgaccgtgggacaggggctgggttgggacgcgggtccccactaggagccgcgggggaggggcagggccggagtccctaccctcgtaggggaggggctggttcgggacgcggctcccccggggcgcaggggcggggccgggtggtacgccgggtcccctcccacggccgtgagggaggggccggcggcgggggcggacccctggcggtcctcctggctggggtccgcgcgctcgcggcagctccccgtggaggtcactgtccgtgccagtccctcccgctgtcccgccctctcccgctgccgccgccgccgccgccgcgcccgcctcagcgcccccactccgcgcttgggagcgaggagccgccagcgcccccgccccgccgccgccgcagcgccctcaggccgccattcgccaccgaaactttccagcgcccgcgctctctccgggactcggcggcggcggggcgggggcggcccgggggcggcgcgcggctgctccggggcgccgggccctcttcggccgccgcacggccgggactcggaggctgccggctgga

SEQ ID NO: 352645 - DNA, 241 bp, Homo sapiens; identical to SEQ ID NO: 206206
  chrX:9433471-9433712
  hyper

SEQ ID NO: 352646 - DNA, 284 bp, Homo sapiens; identical to SEQ ID NO: 347738
  chrX:9433838-9434122
  hyper

SEQ ID NO: 352647 - DNA, 304 bp, Homo sapiens
  chrX:13706949-13707253
  hyper
cgtttgactagtcgtttttatcattgtaatcacgacatcctgtgactgtgctcatgaggtctgtttatttccactttacgtaaacttttcaaaatgacagttatttcgtactcgctgtcgcccgaacgcagacgggaggacacttcaggagcaatcgacccgaaggaaaagcacgatccaggccccgcctgcctcggctccaccttccccgcgcccgtcccccagggtctcggccgcgggaccccgccttccaggccccgccccgctttttccctggccccgccccggcccgtcgccatgttgt

SEQ ID NO: 352648 - DNA, 562 bp, Homo sapiens; identical to SEQ ID NO: 347739
  chrX:13707434-13707996
  hyper

SEQ ID NO: 352649 - DNA, 958 bp, Homo sapiens; identical to SEQ ID NO: 336691
  chrX:13752377-13753335
  hyper

SEQ ID NO: 352650 - DNA, 97 bp, Homo sapiens
  chrX:14048211-14048308
  hyper
tgcaccgggcggggcactgggactgtggcgggcacccgcgccgggggtcggacggtgcttctgcaccggcgagataagggtcgcttctgcaccgccc

SEQ ID NO: 352651 - DNA, 131 bp, Homo sapiens; identical to SEQ ID NO: 347740
  chrX:15511311-15511442
  hyper

SEQ ID NO: 352652 - DNA, 140 bp, Homo sapiens; identical to SEQ ID NO: 347741
  chrX:15511544-15511684
  hyper

SEQ ID NO: 352653 - DNA, 116 bp, Homo sapiens
  chrX:15755988-15756104
  hyper
cgagggaaagtcactttttagataaggctctgaagccccaggtctagtttcaatccactaatgcggccagcggcgagcaggaggagggaggattggtccggcgggggcggggccag

SEQ ID NO: 352654 - DNA, 300 bp, Homo sapiens
  chrX:15756366-15756666
  hyper
tggggcgtaacagggcacgagggggcgtagcttcgatggccggacgtgcaggctgcggatccccgtaggcgagcgagcggctaggttcgtgatctggagagacgctcaggtaaggacgggtggccgagaggagtggggggcgaccagggacaggccgatccagacagggccgtgattcttcccacgactctccgctctggcgcaccgggttccggagctaggagagctgttgatcctgcgagtattgtctgggtcccggcagggcgcccgggagtactgagtggggcctaatggggtgtc

SEQ ID NO: 352655 - DNA, 224 bp, Homo sapiens; identical to SEQ ID NO: 206224
  chrX:16730628-16730852
  hyper

SEQ ID NO: 352656 - DNA, 35 bp, Homo sapiens; identical to SEQ ID NO: 345669
  chrX:16730902-16730937
  hyper

SEQ ID NO: 352657 - DNA, 327 bp, Homo sapiens; identical to SEQ ID NO: 206226
  chrX:16888225-16888552
  hyper

SEQ ID NO: 352658 - DNA, 507 bp, Homo sapiens; identical to SEQ ID NO: 336702
  chrX:39873113-39873620
  hyper

SEQ ID NO: 352659 - DNA, 223 bp, Homo sapiens; identical to SEQ ID NO: 336704
  chrX:39921413-39921636
  hyper

SEQ ID NO: 352660 - DNA, 928 bp, Homo sapiens
  chrX:39953710-39954638
  hyper
cgggtcctctccagctccggccccccgcgctcccaccagcccggctgccggggcacagtcacagctccgcgcgctgggcagtcctatttttatcttgtctaatcctaaactgggcggggagcacaggcgtcgtgcttagagaacaagagataggcgcgggaggcggggaggagcagccaggcagcgacgcgagcgggagcgagttaaagacacagtggaggcgaccgcgggcaggaagaaagagcgggctgcgcgggcctcgaggcgccgcacgcaacgcgccgccccgcgaagttacactcgcttccccgccgtccctcgctaccggcccctccccacttcccagcggcgctccccgcagcctggacagcgaggccccggcctgtgtgggaggcggaggccaggacggccctgcaaagggctggagagaatcgctaatgagctgtgcagcccattgatccggagaacacttcctaattaactctcagtcacctactggtgacagcgcctcaaaggacagcgctggggccagccgagccccagccgcgacttgccggccgggcgcctgctgcccaaaacccgcgcgctcccctaaacaccccaaggcaattggtgtgcgtggcggtgtatacccgcacactgaaggccagcctcggattaaacctggatggcatattaatcatcgccttccccccccactccgctctacgcgctgaaaccctgcccaaaataaacacgaaaaccaacactgcaaaacccacaccagataacaggtcgagagaggagtgggcagggtcaaggaacgagcgtattccctaagtgtccacgtacaggaatctttgaggctgacaattaaaatgccttccacgcaagcaattctgttggcaaaaccgaacccaacacttcgtaaggattgatttcggcccgc

SEQ ID NO: 352661 - DNA, 1938 bp, Homo sapiens
  chrX:39954918-39956856
  hyper
cgcgttggtttctttttaaggtttgtttctaaatacacataaccctcctccttccttcttcgctcttccattccccccacccccaccctccagacgccggcggcgcgcgccctggcgcgcgggcactcacagcctctagctggagatcgcggactttctggaaaagattcattaacagcaaattacgcctcgcccggccacggcctacacgctgccagactcgtccgtctccgggaccccgggaagggcccactcgagcgtgcgagcggcgggaagcccgccgggaccacgcgtgacttcggccgccctactccacacacggtgccccaaggctctctccgtaaacagcaggcgctcgtcaccgccgccgcgagcccccgagttggcggaggctctgcggcgcagccgcccgccggctccgagcgcgggccccgcggcgcctcgccctccccgccttggccgaggatcttgccccggtgcgcaagttcctcttcgcctacagcctccttgccacacgccctccgagtgggaccaacttcctccggccgcagactttcacacgcccatcagggctacccaccagactccccattgcccagcggagggcccaggtctcgcccgcccccgccctccctccacgacgctgcccccgcacaagcacattctacacccacccctgggggctcataacttaaaacctacgctgaacatcggggagggagaggagggggaaagcgggagggggatcgcagattataatcttaaaagaacatttacaaaacaaagcgtctgacctggctggcgggcgggccaagtcggaaccccttgctctgctcgatttcttagtagtttttttttttaatccacgtgattcgtgctttggggcaagccaagaaaaaacgggactcccctcccgagttgcgcggcagcggcggcaggtcgagctcggctcggcccgaggcactcgccacacaccctcgcgcacgcacacgccgacgttccacttggaggaacgaccggcccccggagaggcgagacgaggcggcggtggcggcggctgggggtttttacagttctttcccgagtcgaaaaagaaagcagacggcaacccgctgccctccccttcctgctcgcgagctaacgccgaacccagcttcccagcttccagcccacctcccccccctccgcccgactcgcggcgctcagcggcgaccgcgctcccgcgcacagacacacacaggctgcaaacttccactctgcgaactccctgctctcctcctggcccaccgggaggcgccaggcccccagccgcgccccctccctccctggtgcccacgcggggccgcttaggttggctgcattttaaataacatagctatgaaataaaaacgaaagcgagccaagcagccaaagggaagcgcgaggcaaaagcttcgcggggtacgctgcgggagggggccccgggagagggggccgactgcagccctcagcgcgcccgcccgcccacccgtccgcggtctcccgggggaaaggtgttccgggcactgacctgaaatccccggtgggggagtaggcagggagcctgcgatccggctctttgaagttttcccccaagcggactcgaggcggcgagaaggagcggggggcggttgggtgggtggagagagatatgaggggtggggggggttggcgacgttaacgagcggagaaggagccgggccggagaagcgcggcgagcagcaaagtttgcggtccccggctgcccgcagcccgctcgcggcgccgcgctcactcgactccctcgccgtctgctggcagccggctgccctcggggtcggccccgccgaggggtgggctctgggccgggtgggggcggggcggggcgggctcggggcctccgggcaggtggcgacagccccgtgcgatcctccgggctcc

SEQ ID NO: 352662 - DNA, 211 bp, Homo sapiens
  chrX:39957026-39957237
  hyper
cgcggcttgggctctccgcccggcggctcgcgggctccccctccgccgccgccgcccgcctagctcccgctctcggtcgcggtctgggctcctgcgcgtctcccccgcagccgccgagctcggcccgcgttcagcgaggagcgcagctctgcctcaccttgccgctgggagcccaggctccgtctgccgccgcacgccgcgatcccaacgc

SEQ ID NO: 352663 - DNA, 623 bp, Homo sapiens
  chrX:39957281-39957904
  hyper
cgcccgtcctccctcccgcccgccctacctccctccctcccaacagccgcctcccctccccccgcaggcgcagcgctcgggcgacagccgcccgcccgccgccgcctccagctctcgcaagtttgagctccgccagtctccgctcaccctccgctgcggcgcctccgcggcggggtttcgggaggggtgattccccaggaaaggtttgcccgagtttccccggccgtcatcgatgcacggcccggcacgttttggcctctctggatccgaaccccggaccacttgggtggcgccccccctcctcgtcccccggcctcccctccccagctcgggccgagttggctgcgcacgcccgacccgggcgcacgtcctgggcgagccggagaccgacttgggcggcggcggcggcgagggctgccggcagagccagagccgaagggatgggggcggcgggggcggctctcccagccgcgcgccgagactcccctcgctacccagaaggccagtggaggaccgcaattaccataaagcgcctcgcactccgctcagccaaagctgtcaaaccccagcggcagcagccgctgccgccgcctcttgccaccagcgctgcgctctcccggcct

SEQ ID NO: 352664 - DNA, 151 bp, Homo sapiens
  chrX:39958064-39958215
  hyper
cgcccgagttccccggacgtttcaattgtgtgggaattgtttggaggtgggggaaggggggagcagcccgtggaggcaccgggaggcgtgtggggggcggtcggcgagcggagatccgcctgtatttctcccggttctcgagcattttcac

SEQ ID NO: 352665 - DNA, 633 bp, Homo sapiens; identical to SEQ ID NO: 347744
  chrX:39963967-39964600
  hyper

SEQ ID NO: 352666 - DNA, 285 bp, Homo sapiens; identical to SEQ ID NO: 347745
  chrX:39964630-39964915
  hyper

SEQ ID NO: 352667 - DNA, 1317 bp, Homo sapiens; identical to SEQ ID NO: 347746
  chrX:39965255-39966572
  hyper

SEQ ID NO: 352668 - DNA, 621 bp, Homo sapiens; identical to SEQ ID NO: 345670
  chrX:39968299-39968920
  hyper

SEQ ID NO: 352669 - DNA, 247 bp, Homo sapiens; identical to SEQ ID NO: 345671
  chrX:39968950-39969197
  hyper

SEQ ID NO: 352670 - DNA, 983 bp, Homo sapiens
  chrX:40012483-40013466
  hyper
cggacccccggtctgtgaggcgtcggctttggccttccaaccttggggtgcgcgaggaagcaaagacccagggggcacccccaccctcgcccaaggcccgagggtgggggacagctgaaatgtctttggtcttgtttgatgaccgcttggcggatctgctcccatccgggttctgccgttccgagagtgccgggtcagtgatacccaggccggtctgagcaggcatgtggatgagcaaaagcaaatctgtcgctcctccgaccgccacccctcacttaacctttcctgcatccaaggaaggggagggcacccagactctgccccaccccccgcggggcgctccctctgcctcggaagctgagactaagagcgagggttttccccctttcccctgggctcgctgggtttctaacttcctctaaacctccctcctcgctccgaaaagccccgaggagaggagctgagaggaagcacgccgctagtgtgcaaaatgaagaccatgtgtgaggacggcggcatcagagtgcagccgcgggggttagggggtggcaaaggcccccgcgcggccggaggctcggggccgcagcagccagtgcctctgctctgcgttggggactcggagccgcagcgagaggcagtggagaggcagggctggcctcgtggcgggaggcgaggagggggtgcgagggctgccgcgccgtggggggcagggggcggggacgcagccccggcttcctgggccgcagctgcgaccgagggcgcaagagcagatcgtgctctgcggcggtggcggctcgggcccgccgctctagcagctgagaatcaacaaagggaggcggcgggggaggggcgccaccgagcgttcgctggctgctctggaataataaaaaataattaataatgataataagagaaaaatcccccggctttcatggctctgggtttccgtgtggctgcagcgggaagcgcgctgtccttgaggc

SEQ ID NO: 352671 - DNA, 1062 bp, Homo sapiens
  chrX:40013475-40014537
  hyper
cgcctggcctgcccgcccctccccctcctcgccccctcccctccccaggaaccgggaagagaaaggtctgcagctgacaaatattatccattctccccatcgatcgcggagtgtacagatgtgagcgcttgatgtgcccgcggagcggcggatcctccctgctcgctcgctctcgcccaggctccgctcgccgtccccctcctccccctttgttctcctcccctttccctctctttaaatagatttcagggcgctgcctgttggagagcagctggcgatctctcccgagagagggagcgagcgaagcccgaggtgccctgtcaccagcctcccctcccccacctcggcttttctctacgtcccccccaccccacctttctccagtttccaaaatagaaaacaccgggaacacccacgtccactgcaccgcgagcccctgggagcctttggacccctcgtgctgttccttgtgtctgtgtctgtgcagaggaagggcagtgcagggaggggacccagggccgcggcagaagagccaagggtccggatctttccctggcagcagcagggacgcagcgtgggtcacgctaacagggtacagtttacccattagggaaagtcggcggagacggccctgttattcctcttttgcagatggcagattaatccggcagcacccggcctcaaagggaccggctgctcggcaaagggttaacccgtcggccggtaatcgtggacacgcgcgcacacacacacacgcacgcgcgcgcgcgtcctctccgcctgcccgagcgcccgccgcggcccgcagtgcgcccggggctgggggagtagctgcgggaggggagggggtcgggggaggggcggggcgggcttaaccaggccgctcgactgagccggggccacctcgccgtctgtcacttaaatgattgtcctccgctccgctcagtgcggtcagtacgggctgttaacaggcagttgcaatcagtttccgaaaggtcagccaaggtcctccggctctcgcagacggaaggcattacgaaaccgcttttgtatctgcaggca

SEQ ID NO: 352672 - DNA, 621 bp, Homo sapiens
  chrX:40014669-40015290
  hyper
cggagtgacccagggcctccgggtttcggtggggaagcaggaagggggtggggagcaggcggcaagggaaggaggagtgggaggaagtgggagaggcgtcctggctcctctcctcacccagccaacagcccacacccggacccagacgggagcgggcggccttggacgcgaggagaccccactcggactctcaggccctcctggcgcctggaagtagggagggggtgtgggggggggaaagaccctcgccgagcgagcgagtcccagcgcggtgtctgaagacgctgctgccgccgccgctagaagtcgtccatcagcaaccagtccaacctgccagtgataatgtgcgatcaacaccaaatcacccccgccaggcgcgatccatcatcgcagcgcgccgcgggcccgcgtgaggctgactcgcggctggggtggggagggggggcgcgcggagcaggaggcggtcgcccagcacacccggactctccgcgcacctcgctgcccctcctggaggcctgcacccaggcgctcataactctccaagttccccagctacagagcgaaaacccagtggctccgagttctgggcacagctcacttaggaatccgcgcgtcctccgc

SEQ ID NO: 352673 - DNA, 144 bp, Homo sapiens
  chrX:40017447-40017591
  hyper
cgaagtggcaggactggccctcggggtccccgtgggtaaaggaggagcggcttcgcgccctgggacagcgcgcgccccggctgacacggggctgtcgccgcttctcccccggacgcgggcggctgcgcaccggccgccatcttg

SEQ ID NO: 352674 - DNA, 32 bp, Homo sapiens
  chrX:40017968-40018000
  hyper
gttgaggccagagaggatttgagagttaccac

SEQ ID NO: 352675 - DNA, 226 bp, Homo sapiens
  chrX:40030835-40031061
  hyper
cggatggaaaccgaggcacgcagccctcgaccccggccaggcgtggagtaggggagcagggggtgccccgcgtgggcgcaccctaagaaaccagtgcggacatggcgagcgagaccagagcgcagttgtgtgtggtttttccccaggtttttattcttccagccctgtggaaaggaggagagccgcaacccggagagggagccggaaagaaacacttaatcaccgg

SEQ ID NO: 352676 - DNA, 215 bp, Homo sapiens; identical to SEQ ID NO: 206256
  chrX:40031175-40031390
  hyper

SEQ ID NO: 352677 - DNA, 662 bp, Homo sapiens
  chrX:40031434-40032096
  hyper
actactagcggtggccggaggctcagccaccttcgcgggagaggggatttaccgccaccctcatccacgcgcaggccccaccgcccggtcctctcctctgatccccgggccattgcgaaacacggagcgaacaggtcctcgccagcagccgtcatttcccgggaagatgggaacccacaagcctgactgtgcttcctaaggatactagcgtgcgcgcagaccttggggggaaagagggcagcgcggtctccccgacccggactcttccctggcgcagcacacaaccgccacgggcttccgaagcgcccgagcggggaggaggaaggaaaagcggaggcccgggaggcgggctgcgcgcttggaagccgtgtgtgtttatgtgtctgcgcgcgcgccctggccggacgggtgttgaggggagagtgatcgtgagcaacccggaaccagcagtcccaacctggactgacgaactgggctctccagtcctgggccgtggggctccatgcctcgggctggcgggacaagcggcggggagcccggagcttcggagccgccgccgggcatctagccagctccgcgggagaagcccgggggcgcgtcgggagccaggggactggtgtgaactagccgcccccgcaggcggacgtttagctccggcaccc

SEQ ID NO: 352678 - DNA, 186 bp, Homo sapiens
  chrX:40034239-40034425
  hyper
cgttttctagcccgagaaggggcaggcggccctcatggcgcctccttcggcggtttcctggcgaagcgcccatcctccccaagcaccaggaacggaggccgtccatattaatactcgcgggcagcctgttctgacctatactgtcattttttccatcggtcgggatcgggctgggggtggggtggg

SEQ ID NO: 352679 - DNA, 667 bp, Homo sapiens; identical to SEQ ID NO: 295697
  chrX:40035057-40035724
  hyper

SEQ ID NO: 352680 - DNA, 721 bp, Homo sapiens; identical to SEQ ID NO: 347751
  chrX:40035852-40036573
  hyper

SEQ ID NO: 352681 - DNA, 203 bp, Homo sapiens; identical to SEQ ID NO: 336721
  chrX:40595088-40595291
  hyper

SEQ ID NO: 352682 - DNA, 264 bp, Homo sapiens; identical to SEQ ID NO: 336722
  chrX:41112874-41113138
  hyper

SEQ ID NO: 352683 - DNA, 75 bp, Homo sapiens
  chrX:68758240-68758315
  hyper
cgacaccggccgctgggtggcgctgtggctcctcctacccaggctggaggcaccagggaggcggaggcgcagccg

SEQ ID NO: 352684 - DNA, 103 bp, Homo sapiens
  chrX:71525740-71525843
  hyper
cggtgctctgcgaagcagggactcggcgcgcggctcgccagcccgcgtttatagggagaggggtgtgcgcgtgggtgtgtgtgtgtgggcgtgtgtcggggga

SEQ ID NO: 352685 - DNA, 711 bp, Homo sapiens
  chrX:71525998-71526709
  hyper
cagatgcggtccgggagattagcaaagtcggtggaagccaagctggagaaagcgcgggcgcagggagaaaaggtgctgccgtctccccgggagaagcgggcacccggccccgctggccggcaggggggcgcgctggcaagcgaacccgagcgctggcgggcgggcgggcgggcggcccctcgcccccagcagagcagctttccaacagaaagcaagtctccccagaaccctccggcccgcctggcggccgcccactccccatacccgctccacgggagtcctcggccccgccgcccagcccggcgcccagcccggcggcccggcttacctctgagaagccgcctgccctggagagagggaagcgcggagctcggtgagccgcaagagaggcggcggagcccccagcccctggcacgcacgccgccgccaccgctaccgcgaaccggtcgcgctcagcgcccgcggccgcgccgttggccacccgaccccggggcgcctgggaaaagcccgcaccgcgccgcgccgccgctgcaccgcacagtgccgcgccaagcagcccctgaccgagctggtgcccgcccgcccgcccgcagcttcggcgccggactccggggcggtggcggtggcggccaccgcgctcccttcccggcgctggggacccggctctcaagcccccattgccgcccggagagccctgacgcacacgcacac

SEQ ID NO: 352686 - DNA, 244 bp, Homo sapiens
  chrX:95940048-95940292
  hyper
cggagaaagatggagcagcccggggcggcggcgtcgggagcgggaggcggcagcgaggaacccggtgggggccggagcaacaagcggagcgcggggaaccgggccgccaatgaagaggaaacgaaaaacaaacccaaattggtgagtgctcccgcagcccccgccggccttagggacagggagagccccgggatcctcctgccattgaacacgggggcacccggggccccctcccaaggatgac

SEQ ID NO: 352687 - DNA, 393 bp, Homo sapiens; identical to SEQ ID NO: 336727
  chrX:102862914-102863307
  hyper

SEQ ID NO: 352688 - DNA, 83 bp, Homo sapiens
  chrX:110924337-110924420
  hyper
cggccattacggatttccgcctccctcacagaaggcagtcactgcaacgtgcgtggcctcagttgcgtcatatccggcccttg

SEQ ID NO: 352689 - DNA, 157 bp, Homo sapiens
  chrX:110924466-110924623
  hyper
cgtagggaccaccagctttgacgacctcattgcgtgtgtgtcggcgcccgacagtctgcaagtgagtgagggaggcgagcaggcggcggcttggctcgccacccgccatctccggccatactgccagccgcgttagccttgcctgaccgtcgcgctc

SEQ ID NO: 352690 - DNA, 856 bp, Homo sapiens; identical to SEQ ID NO: 336731
  chrX:129146935-129147791
  hyper

SEQ ID NO: 352691 - DNA, 89 bp, Homo sapiens; identical to SEQ ID NO: 345674
  chrY:2655227-2655316
  hyper

SEQ ID NO: 352692 - DNA, 596 bp, Homo sapiens; identical to SEQ ID NO: 345675
  chrY:2655346-2655942
  hyper

SEQ ID NO: 352693 - DNA, 51 bp, Homo sapiens; identical to SEQ ID NO: 347756
  chrY:4869596-4869647
  hyper

SEQ ID NO: 352694 - DNA, 49 bp, Homo sapiens; identical to SEQ ID NO: 347757
  chrY:4869714-4869763
  hyper

SEQ ID NO: 352695 - DNA, 246 bp, Homo sapiens; identical to SEQ ID NO: 345676
  chrY:7140850-7141096
  hyper

SEQ ID NO: 352696 - DNA, 237 bp, Homo sapiens; identical to SEQ ID NO: 336737
  chrY:14532909-14533146
  hyper

SEQ ID NO: 352697 - DNA, 240 bp, Homo sapiens; identical to SEQ ID NO: 347759
  chrY:14533316-14533556
  hyper

SEQ ID NO: 352698 - DNA, 41 bp, Homo sapiens; identical to SEQ ID NO: 347760
  chrY:14533613-14533654
  hyper

SEQ ID NO: 352699 - DNA, 218 bp, Homo sapiens
  chrY:15863192-15863410
  hyper
cgccttaggaaacaaagcgtgtggaactaaaggaaggtaggacgcccctggcggtcctgaggcctctttggtcctgctaaagagagcacccctgctggcaggcgtgggcctgctcacacctggacggagaggggaggtaggaggggcaggaagcggttggtgcggacggggaggcgactgcgtggggtcttccgacatcacccttcagctgagtgtcc

SEQ ID NO: 352700 - DNA, 461 bp, Homo sapiens; identical to SEQ ID NO: 345677
  chrY:15863654-15864115
  hyper

SEQ ID NO: 352701 - DNA, 73 bp, Homo sapiens; identical to SEQ ID NO: 295805
  chrY:16635744-16635817
  hyper

SEQ ID NO: 352702 - DNA, 1082 bp, Homo sapiens; identical to SEQ ID NO: 345679
  chrY:16636060-16637142
  hyper

SEQ ID NO: 352703 - DNA, 584 bp, Homo sapiens; identical to SEQ ID NO: 336742
  AC211344.3_7702-13588:3943-4527
  hyper

SEQ ID NO: 352704 - DNA, 111 bp, Homo sapiens; identical to SEQ ID NO: 336746
  JH636052.4:789300-789411
  hyper

SEQ ID NO: 352705 - DNA, 409 bp, Homo sapiens
  chr1:898245-898654
  hypo
cgcacacgtccccggcgctgcgagggggccgggcctgtgctttttgctgtgggtatggccccccgcccgtttccctcttgccctgtgccttctactccccaccagcacaagcccaccccacctgtgccggtcaggtcctgacctgcccctccgcccctccattcaggggcctctccaggagcctggggtgtggcccagcagtgggatccactcacgagtcccgtctccacctgccctccccaggcggcgggagcctgtttgccatccacggagactgtgaggcctacgacacgcgcaccgaccgctggcacgtggtggcctccatgtccacgcgccgggcccgggtgggagtggctgcggtggggaaccggctctatgctgtgggcgggtaagcctggaggctggactt

SEQ ID NO: 352706 - DNA, 38 bp, Homo sapiens; identical to SEQ ID NO: 206360
  chr1:898690-898728
  hypo

SEQ ID NO: 352707 - DNA, 88 bp, Homo sapiens
  chr1:898776-898864
  hypo
gcagccggaggtgtccatgggcacaaggcgaagctgcctgggtgtggccgccttgcatggactcctgtactcggccggcggctatgac

SEQ ID NO: 352708 - DNA, 514 bp, Homo sapiens
  chr1:1047017-1047531
  hypo
cggctggggcagtgggtagaccacacccacgctcaccgtaactccagccgcccaggcagcagtaactgaaaaggggaggcgggagggtccactggcgggtttctcacgctgctgaacctcggtaaacacagccccgagggctggctggagcttccactgcatccgtgtagctaatgctggtcatcttcgtagcaagcaaaggaagccaacgtgaaacgtagctttaagggcccaataagaactgtctggggcctctctacctaaagatccctctcgtgctttgatagaaaacaaataccgcaaaccccttgatggggtgtaaaggagacatccccctttgttgacatgcatggtagtcgctgcccacctacccgtgggctcagcacaccggagtcgggcggttgccgtaggtggctcagcagacgtgagcagggcaggatcgggcccatccccccaccgggaatgtcaggccaccatcaggtgatggtcaggtggctgttaactgtctaaaaga

SEQ ID NO: 352709 - DNA, 584 bp, Homo sapiens
  chr1:1047619-1048203
  hypo
ctcaggaactgggcgagttggctcaagcgtgtgcactgagaggcaaaatggcggcgtgtaaccgttctatgaccttctagggacgtttgacaggtaacggaagaacgcctcaggtgagcatgggcactactccagtgaacacacggcgcacggtccctccctccagtgaacacaacgcacacgctccctccctccagtgaacacacagcgcatgctccctccttccagtgaacacacggcacatgctacctccctccagtgaacacacggcacatgctccctccctccagtgaacacaacgcgcacgctccctccctccagtgaacacacagcgcatgctccctccccccagtgaatacacggggcatgctccctccctccagtgaacacaccgggcatgctccctccctccagggaacacatggcgcatgctcccgcccaagtactagcaagatgctgcatgggtggacagcccaccctgaagaaggatcaggggagaaggggtgcaagaccccagaagcctgccaggctataaaaccccaagtcaaaaggtgaaaccgcacacctgatctctcacatcgccc

SEQ ID NO: 352710 - DNA, 360 bp, Homo sapiens; identical to SEQ ID NO: 336758
  chr1:1152902-1153262
  hypo

SEQ ID NO: 352711 - DNA, 75 bp, Homo sapiens; identical to SEQ ID NO: 345681
  chr1:1168275-1168350
  hypo

SEQ ID NO: 352712 - DNA, 462 bp, Homo sapiens; identical to SEQ ID NO: 345682
  chr1:1168984-1169446
  hypo

SEQ ID NO: 352713 - DNA, 189 bp, Homo sapiens; identical to SEQ ID NO: 336763
  chr1:1200473-1200662
  hypo

SEQ ID NO: 352714 - DNA, 607 bp, Homo sapiens; identical to SEQ ID NO: 336768
  chr1:1247740-1248347
  hypo

SEQ ID NO: 352715 - DNA, 137 bp, Homo sapiens; identical to SEQ ID NO: 336773
  chr1:1492373-1492510
  hypo

SEQ ID NO: 352716 - DNA, 109 bp, Homo sapiens
  chr1:1502406-1502515
  hypo
cgccctacggacatacacgtgcctctgcaacatggctgcctgcaggatgcccactgccggccttccacagccacaaaagaacagacaagtagaataatccatccatggg

SEQ ID NO: 352717 - DNA, 130 bp, Homo sapiens
  chr1:1502555-1502685
  hypo
gagtagaggaagcaaaagagcccaagggcaccctgctgcgccaccacacacgtcacccacacacacagagaagatgtgctcatctagtgtacgtgaaacacctgagtcccctgaggctgatgacagctgc

SEQ ID NO: 352718 - DNA, 575 bp, Homo sapiens; identical to SEQ ID NO: 345683
  chr1:1562211-1562786
  hypo

SEQ ID NO: 352719 - DNA, 431 bp, Homo sapiens; identical to SEQ ID NO: 344930
  chr1:1713574-1714005
  hypo

SEQ ID NO: 352720 - DNA, 232 bp, Homo sapiens; identical to SEQ ID NO: 344931
  chr1:1714067-1714299
  hypo

SEQ ID NO: 352721 - DNA, 80 bp, Homo sapiens; identical to SEQ ID NO: 336777
  chr1:1717283-1717363
  hypo

SEQ ID NO: 352722 - DNA, 139 bp, Homo sapiens
  chr1:1910184-1910323
  hypo
cgcgtcctgctgagctgttaggtttgtggatttgtcactgcagcgatgggatacgggtgcagtcagggaagcctcagagcaggccgggacacagcaccagcgccctgccgtgggtcccatgtggccaagcggggtgcac

SEQ ID NO: 352723 - DNA, 48 bp, Homo sapiens; identical to SEQ ID NO: 295971
  chr1:1910367-1910415
  hypo

SEQ ID NO: 352724 - DNA, 102 bp, Homo sapiens
  chr1:2141684-2141786
  hypo
gtgagcctcgaaaccaccttctttctgtatcgtttctgggagtggcgatgtcggccagtgggacacctgctgagggtcctcttttcccatccgggtgctggc

SEQ ID NO: 352725 - DNA, 221 bp, Homo sapiens; identical to SEQ ID NO: 336787
  chr1:2142332-2142553
  hypo

SEQ ID NO: 352726 - DNA, 574 bp, Homo sapiens; identical to SEQ ID NO: 336789
  chr1:2239631-2240205
  hypo

SEQ ID NO: 352727 - DNA, 821 bp, Homo sapiens
  chr1:2276200-2277021
  hypo
gcctgcagagcctgggggcagggctgaagctggccatggaggaccttgggggccacctccaccttccagcagcaaatgccaagtccccgaatgcagaattctgccagagggagcatgaccgtctctctgttggcacaaagcgagagcatcaaagacagcgtcagcccccgcgagggtccacgcatgctcacactctgcgctcatggatggccacacacaccctgaaaacggcgtcagcctccgggagggtccacgcgtgctcacagcactcatagatgaccatatgtgccccgaagacagtgtcagcctccaggagggtccacgcgtgctcacgctctacgctcatggatggccacatgtgccccgaagacaacgtcagcccccgcgagggtccacgtgtgctcacctgcgctcatggatggccacatgtgcccgcaccctcgcacaggcatgggcggtccccaggctgccacactcagggtctgtctgtgccccggcacctccaagccattccttccaccaggccagggccaggcctggacacctgccacctaccacccgctggggcagcagccacgcactcccccactgctccctgttggcggccaggcatgggccggccttgttgggggacacaggacaattcggggcacttgtcttgcctccgtcctccttggagagcctcgggctcaccctacgtggctctgaacaacaagggccaggctctgcaccgggggaccccctgccctgccagccggaccctcaggccgctcagagggccagtcccagcacctgcccctcgccagtggacacaggctgcc

SEQ ID NO: 352728 - DNA, 490 bp, Homo sapiens
  chr1:2303837-2304327
  hypo
cgtccgcatcttcactgcttaagaacctgctgcctgtttctcttttggaaacgttaggtcatctccccctggagatgcttactcttggcaatttccccgtggtcctgcagcagctgaacgttcaccgagaagggagacccttgggccacttccatcacctccggacccaagatcacgatcctcgtagcttgttctgggagaggacagagtgtggctttagcggtgactggcatggtcccccacccaccccatggctgagtcagcagtgggcaccccaggaaccgaccagagcccagtgtggcagctggaacacaagcacatgcgggggccgaccctccgcaaaccaccttgcagagcagcgacctgggcagtcgtccacactcagaccgtgaggctcggctctgctggcctggagcactgtggaatcgaaccaagtggaccaccggggccacggagcatgcaagagacacaagtgggcggtgtggggctg

SEQ ID NO: 352729 - DNA, 63 bp, Homo sapiens
  chr1:2304481-2304544
  hypo
tcctggcagccagggccgcccctgctccaccggggcctgcagggcatcgctgtgggtggtgtc

SEQ ID NO: 352730 - DNA, 93 bp, Homo sapiens; identical to SEQ ID NO: 336796
  chr1:2330473-2330566
  hypo

SEQ ID NO: 352731 - DNA, 47 bp, Homo sapiens; identical to SEQ ID NO: 345686
  chr1:2331316-2331363
  hypo

SEQ ID NO: 352732 - DNA, 183 bp, Homo sapiens; identical to SEQ ID NO: 345687
  chr1:2331437-2331620
  hypo

SEQ ID NO: 352733 - DNA, 443 bp, Homo sapiens; identical to SEQ ID NO: 344934
  chr1:2461988-2462431
  hypo

SEQ ID NO: 352734 - DNA, 55 bp, Homo sapiens
  chr1:2483785-2483840
  hypo
cgcttagtattgtcctggaacctgcctccgaaaaggccgtgcgctcccgcctggg

SEQ ID NO: 352735 - DNA, 74 bp, Homo sapiens
  chr1:2483873-2483947
  hypo
cgctccgctgcctctctgggctggctcagccgttgcatgttcctgcgtgtgcactgagacgtccaccctggcac

SEQ ID NO: 352736 - DNA, 37 bp, Homo sapiens; identical to SEQ ID NO: 296084
  chr1:2520987-2521024
  hypo

SEQ ID NO: 352737 - DNA, 39 bp, Homo sapiens
  chr1:2521063-2521102
  hypo
ccacagcccccgccttgctcactgttgggccctcagggc

SEQ ID NO: 352738 - DNA, 43 bp, Homo sapiens
  chr1:2846750-2846793
  hypo
cgtgcacacacatacatgcaaacacatgtgcacacacacacgt

SEQ ID NO: 352739 - DNA, 547 bp, Homo sapiens
  chr1:2846823-2847370
  hypo
gtgggcttcttccgtgggcaggcacagaggtcgggtgtcggcccagaggttcatggaggcgctaatgagcggctccgggcccgcaggagatgcggctcacacaggtcagatttcggatggatgatgaaggaaatgagggccaggccagcctctggttacagtttaggaaaaacacgaggcgcccttctctagttcaaaaggcagagagaggcagacccaggagctaggggggccggacgggattccagtccggtttcatctccggatgccctgggaacccgcctggcgtagaccgggtgggggcggtgcagacaggaccctggagaacagggctgcggtgcgcagcagggggtggccccggtcacacagtgtcccccatggaggggcctcgatggccgggctgcgcatggcacgtgtcgtgtgtggatccacagcagggccgctgcccccacccagcgccagccgggaggttgggaagtgttagcgccaggagcagctttcagctgaaaaatccccagtttattaactttgctccagaagccagggc

SEQ ID NO: 352740 - DNA, 449 bp, Homo sapiens
  chr1:2850546-2850995
  hypo
cggccagccgggctctaacatgtcctcaactttcaggaaaccagagcctccgagtaagtatcagatgagttgctaatgttggaaaaaaagcgagaaacatgcttgggggctctgttttacggctgcacttgaagtcggaatctgcgatcgtaacccaatgctggcctcgccaacgtgttttcggtattgtcgggataattgaaagtccagacaaatttggctatcagggctccaggcagcggaatcccatggtggcccctggtgtgatgagctcgccgaggccgtctcaggtcctgcgcccaccacggtcttcgggagcagctgtcggctttgcaaaagccccaggactttccgggtggacatggggggcttggctttgtcaccgggacctcttgaaaggcagccggtcctgggcctctcatctggccccgcacccttcttggccaccg

SEQ ID NO: 352741 - DNA, 32 bp, Homo sapiens
  chr1:2851025-2851057
  hypo
gcagggccatccgtgcctcggggtctgccctc

SEQ ID NO: 352742 - DNA, 32 bp, Homo sapiens
  chr1:2999791-2999823
  hypo
cgcaggggtcgggtctcctggctgcgccccac

SEQ ID NO: 352743 - DNA, 83 bp, Homo sapiens
  chr1:2999864-2999947
  hypo
ctccccatcatagccctgtcctggactgggcggcgcgctcatttcaaggcagtgcggccatctgggctgggcctggcgctggc

SEQ ID NO: 352744 - DNA, 145 bp, Homo sapiens; identical to SEQ ID NO: 336823
  chr1:3050813-3050958
  hypo

SEQ ID NO: 352745 - DNA, 303 bp, Homo sapiens; identical to SEQ ID NO: 345689
  chr1:3052594-3052897
  hypo

SEQ ID NO: 352746 - DNA, 40 bp, Homo sapiens; identical to SEQ ID NO: 345690
  chr1:3052927-3052967
  hypo

SEQ ID NO: 352747 - DNA, 119 bp, Homo sapiens; identical to SEQ ID NO: 347776
  chr1:3111118-3111237
  hypo

SEQ ID NO: 352748 - DNA, 326 bp, Homo sapiens; identical to SEQ ID NO: 347777
  chr1:3111463-3111789
  hypo

SEQ ID NO: 352749 - DNA, 188 bp, Homo sapiens
  chr1:3125905-3126093
  hypo
cgcagctccgacgtggccggtcccgactggcacacctgccccgagtcacctgggacggactgcagccagccagctctcccttcttcctggggaggcctgtgaaggtcgcgtgaatgcctgtgtcccccgggacagccagggaggcaggaggccaggcctgggtgtggaataggcctcgctgggaggcc

SEQ ID NO: 352750 - DNA, 473 bp, Homo sapiens; identical to SEQ ID NO: 336832
  chr1:3195292-3195765
  hypo

SEQ ID NO: 352751 - DNA, 859 bp, Homo sapiens
  chr1:3321132-3321991
  hypo
cggccacggcagagaggaggtgggcagggagacaccagcatgtgctctgatccctcggcagcgtggtgggggctccgaaggggcactgggaacaagctgtatggttggggtcccctcccgggcagagggcaggtagtcgggccccgcagtgagcctcgtcctctgcgcagcctggagcagcacatggtcatccacacggaggagcgcgagtacaaatgcgaccagtgtcccaaggccttcaactggaagtccaacctcatccgccaccagatgtcccacgacagcggcaaacgcttcgaatgtgaaaactgcgtgaaggtaacctgcggggcggccccgtctcagccccggggcagcaggaggctgcagacgggcgcccgcccccgtgctccctacaccccctggtccaaatgtagatggagtgcggcagagtgggtaggaggcccctgcggtggctcgggcccttccgtgtgactaggaaggaaaggaagtctcagggaagaccgtgtcccccaggtcagaaggatcagggccgagaccagaacccaggcccctccagagcgcggctcctgtcctcccgccggtgtggaaggaagaggctggcggggctgagccgagcctccaccccgagcccgccagggtctcagcaccacagctgaaaacgctttctgcagccctgtctcacgcagcctcagttcaggaattgttcttgaggaaagcagccggggaggctctgcggctcacttaaggccctgcagcgggtccttgctacacagagacctgtcccggcctgcttggtgcagactgcaacgtggcaagagagacaggcagggccctgccccccacagccggttggtcc

SEQ ID NO: 352752 - DNA, 42 bp, Homo sapiens; identical to SEQ ID NO: 349148
  chr1:3325196-3325238
  hypo

SEQ ID NO: 352753 - DNA, 214 bp, Homo sapiens; identical to SEQ ID NO: 296175
  chr1:3328319-3328533
  hypo

SEQ ID NO: 352754 - DNA, 371 bp, Homo sapiens
  chr1:3328625-3328996
  hypo
gctcggacctggacagcgacgtggacagcgaccctgacaaggacaagggcaagggcaagtccgccgagggccagcccaagtttgggggcggcttggcgcccccgggggccccgaacagcgtggccgaggtgcctgtcttctattcccagcactcattcttcccgccacccgacgagcagctgctgactgcaacgggcgccgccggggactccatcaaggccatcgcatccattgccgagaagtactttggccccggcttcatggggatgcaggagaagaagctgggctcgctcccctaccactcggcgttccccttccagttcctgcccaacttcccccactccctttaccccttcacggaccgagccctc

SEQ ID NO: 352755 - DNA, 561 bp, Homo sapiens; identical to SEQ ID NO: 336844
  chr1:3351144-3351705
  hypo

SEQ ID NO: 352756 - DNA, 38 bp, Homo sapiens
  chr1:3659512-3659550
  hypo
cgagggaagctactggcgagaagcattggagggttctg

SEQ ID NO: 352757 - DNA, 178 bp, Homo sapiens; identical to SEQ ID NO: 346305
  chr1:3663338-3663516
  hypo

SEQ ID NO: 352758 - DNA, 101 bp, Homo sapiens; identical to SEQ ID NO: 346306
  chr1:3663983-3664084
  hypo

SEQ ID NO: 352759 - DNA, 204 bp, Homo sapiens; identical to SEQ ID NO: 206546
  chr1:3680100-3680304
  hypo

SEQ ID NO: 352760 - DNA, 129 bp, Homo sapiens
  chr1:3680359-3680488
  hypo
tccgagagcggaggcagcagctacaagccatgaccgacaaggtggccgtgcgctcagtaccggcctccgctccatgagcatgggccccaggcttcattaacccccggcagctcggggcaggcgctgccc

SEQ ID NO: 352761 - DNA, 125 bp, Homo sapiens; identical to SEQ ID NO: 336862
  chr1:3697578-3697703
  hypo

SEQ ID NO: 352762 - DNA, 339 bp, Homo sapiens; identical to SEQ ID NO: 336867
  chr1:4673912-4674251
  hypo

SEQ ID NO: 352763 - DNA, 707 bp, Homo sapiens
  chr1:5918390-5919097
  hypo
cggcatcgccgccccccacgaggactgggctccatgctgacggagggccgggatcagggccggagaactcacgggacatggcacctgtccactccagcccaccagctcctcccctggcccactcgaccccctgccctggcacagccctgcaggcccctcgccagcctcccctgccccgctgcccctttgcagggcccctgccactccattctctctcagctgcctcctacgcagagaggcccgatctccaaactaaagtccctcttcacaccatccccctgctcccctcagaccctcagcgccgcccgacagaccgtgacgggtccccatgtgatcatctgggcccccaagaaagccaggtactgggcgggcagcatccatctcccccggccagggggacctctgtctacactcgggttgaattgagggcgtgaggagcacgtggcaaatagagcttcgctggctgatggcgtctctcttgccaaaggccaggccgctttctcctcgtgggcttgagggatgcccctgtgtcctccagcccacaggctagcctggtcccgtccagaagggcacacgctgcctgctcctcgagcctgggcggcacctcctgcatctgatgctgtggttccctcctgtgccgtgggggtgacaacgcagacgtgagagcccggtaggctggggtggtggccacgttaccaaagcacctc

SEQ ID NO: 352764 - DNA, 121 bp, Homo sapiens
  chr1:6046277-6046398
  hypo
aggctggcgcgctctctgtgggtggggagggacaagcacgttttgggtgaagatcctgtgccagtcgttcatcctgcccgcctgagggtcccgtgggcttcccggatgatctgtgccagtc

SEQ ID NO: 352765 - DNA, 56 bp, Homo sapiens
  chr1:6131658-6131714
  hypo
cgtgggaatcgatgtcacgacaagcaaggcgcctgctgcgtagggcacctgccgct

SEQ ID NO: 352766 - DNA, 67 bp, Homo sapiens; identical to SEQ ID NO: 347782
  chr1:6171947-6172014
  hypo

SEQ ID NO: 352767 - DNA, 100 bp, Homo sapiens
  chr1:6281676-6281776
  hypo
cggctaacgcagcttcctggtttaggaacattttccccggtcgtatcaatcccccaggttggtaaatgaacagaagggatgaataaagcctactttttag

SEQ ID NO: 352768 - DNA, 75 bp, Homo sapiens
  chr1:6281825-6281900
  hypo
ttctgtcctgctaagaggctcaccccgcgacctcttctgtaaactgccactcagcagcggcctgcaagccctcac

SEQ ID NO: 352769 - DNA, 32 bp, Homo sapiens
  chr1:6284796-6284828
  hypo
cgagtcctggttatcctttacttacactctgg

SEQ ID NO: 352770 - DNA, 280 bp, Homo sapiens
  chr1:6284858-6285138
  hypo
ctccccaggtaactctggagggcgctgtggaatattgctgtgatttgccccttactcgtctttcacccatgttccgccttgattcggcataaggacagactgctccagtggggccttgggtcctcaggccttctgaccgcttggtcttgagtgacattccagaagagtgactaatgacataaaacgattaagaaaatccatgtggcagcggccaaccggaaacagttttgtcccaggctgcacagggtcggaggccccaaggtcaccggggccactgccc

SEQ ID NO: 352771 - DNA, 501 bp, Homo sapiens
  chr1:6331654-6332155
  hypo
cggagcctgtccgccatccgctgtggcctctccgccatccgctgtggcctctcccagcagctgcaggcctgggttaattacctcctcctccacacccacccaggactgcaccagcctccagcagaaagcagccggaagtctcaaataatgagatcattgtggagagtcataaacaccctcaccaggggctcccctcacccagcagcaccggctcagactccgaaagaactgcccccaagtggggccaagaaaggaggcgtaaaggccaacgggaggctgctggcggaggcagggagatcgtcaccacaaaggggagaaaaggcattgggacttgggcctgggtggtggcctctcaggagcccctcctgcaggcacggagtgccgtggtcccgggacgctcggctcacagctcttgtgccggagtgtggacatggcggtccccaccctacaacaccaataatgatcatagctgtcacctgctgagtgcccactgtgggctag

SEQ ID NO: 352772 - DNA, 35 bp, Homo sapiens; identical to SEQ ID NO: 336888
  chr1:6707164-6707199
  hypo

SEQ ID NO: 352773 - DNA, 318 bp, Homo sapiens; identical to SEQ ID NO: 336889
  chr1:6711983-6712301
  hypo

SEQ ID NO: 352774 - DNA, 106 bp, Homo sapiens; identical to SEQ ID NO: 345693
  chr1:6713808-6713914
  hypo

SEQ ID NO: 352775 - DNA, 307 bp, Homo sapiens; identical to SEQ ID NO: 206600
  chr1:6714041-6714348
  hypo

SEQ ID NO: 352776 - DNA, 105 bp, Homo sapiens; identical to SEQ ID NO: 336891
  chr1:6738127-6738232
  hypo

SEQ ID NO: 352777 - DNA, 115 bp, Homo sapiens
  chr1:6750362-6750477
  hypo
cggcattcatttgacagtcgcatatccactgctatgtcaagcatttccatgcactcccacttcattcccacaaaagctctacgacagtaaaactgtctggattttctggatgaac

SEQ ID NO: 352778 - DNA, 199 bp, Homo sapiens; identical to SEQ ID NO: 349163
  chr1:7764988-7765187
  hypo

SEQ ID NO: 352779 - DNA, 108 bp, Homo sapiens; identical to SEQ ID NO: 330679
  chr1:7843510-7843618
  hypo

SEQ ID NO: 352780 - DNA, 179 bp, Homo sapiens; identical to SEQ ID NO: 349165
  chr1:7844224-7844403
  hypo

SEQ ID NO: 352781 - DNA, 163 bp, Homo sapiens; identical to SEQ ID NO: 349166
  chr1:8085929-8086092
  hypo

SEQ ID NO: 352782 - DNA, 39 bp, Homo sapiens; identical to SEQ ID NO: 336900
  chr1:9654089-9654128
  hypo

SEQ ID NO: 352783 - DNA, 425 bp, Homo sapiens; identical to SEQ ID NO: 344939
  chr1:9711649-9712074
  hypo

SEQ ID NO: 352784 - DNA, 70 bp, Homo sapiens
  chr1:9795925-9795995
  hypo
cgagcgctcggtgttacctgcacgcctctgccactgtcttcgaggacctgcaggtccagcccctccttgc

SEQ ID NO: 352785 - DNA, 367 bp, Homo sapiens; identical to SEQ ID NO: 336905
  chr1:10495109-10495476
  hypo

SEQ ID NO: 352786 - DNA, 350 bp, Homo sapiens; identical to SEQ ID NO: 336907
  chr1:10676484-10676834
  hypo

SEQ ID NO: 352787 - DNA, 378 bp, Homo sapiens; identical to SEQ ID NO: 336908
  chr1:10680904-10681282
  hypo

SEQ ID NO: 352788 - DNA, 182 bp, Homo sapiens
  chr1:10692798-10692980
  hypo
cgggggacagctgccctgacctcaccccggaccagctccctcggtccccggggtctgtcccggctcctccggtaactcgctggttctgccttgggcaggggcatctactttgggaaggacaggggacctcccttggtgtttgcgactcgcaggacaggccaggaggcgggggagttgccttc

SEQ ID NO: 352789 - DNA, 1313 bp, Homo sapiens; identical to SEQ ID NO: 336913
  chr1:10719300-10720613
  hypo

SEQ ID NO: 352790 - DNA, 386 bp, Homo sapiens; identical to SEQ ID NO: 349172
  chr1:10854661-10855047
  hypo

SEQ ID NO: 352791 - DNA, 259 bp, Homo sapiens; identical to SEQ ID NO: 336915
  chr1:11020521-11020780
  hypo

SEQ ID NO: 352792 - DNA, 119 bp, Homo sapiens
  chr1:11091195-11091314
  hypo
cgtccatgtggaggaagaggtgtgctgcctttcctagagaaagggaatttgaaaccacccagagctccttagcaccctcatgtcaaatataagaaagatctgcggccgggcgcgatggc

SEQ ID NO: 352793 - DNA, 247 bp, Homo sapiens
  chr1:11141000-11141247
  hypo
cgggaatcaaaattgtgccctgggctctggaaaatgtttggctcttttcatgaatgtaaggagcaaacctaagaactagaacctggccagacacagagcccaagtgtcgcggtctgtgtgactgcggctgaggtgtaccttgaggcagatgtccctgctccgttgccacaccacctgcagctgcaccggctgcccgttgccgcgctcccacatctccagcctcattttgtcatagatatatagcagg

SEQ ID NO: 352794 - DNA, 52 bp, Homo sapiens; identical to SEQ ID NO: 197314
  chr1:11538821-11538873
  hypo

SEQ ID NO: 352795 - DNA, 102 bp, Homo sapiens
  chr1:11596382-11596484
  hypo
cgcccgaacgcagcgccagtggcgtacgctggaggccgtgcggcacgtgggcgtggccatcgtctccagtgccctcaccacggtcatcgccacagtgcccct

SEQ ID NO: 352796 - DNA, 367 bp, Homo sapiens
  chr1:11596583-11596950
  hypo
gctgggcatcatggcgcccagctctttcactcggacccggacttccttcctcaaggccctgggtgccgtgctgctggcaggggccctggggctgggtgcctgcctcgtgctcctgcagagcggctataagattcccctgcccgcaggggcctccctatagcccgggacgggctctggacacttgcacctttggtcccatgggtgggggacaggagctgcttcccagctcgacttcagctagctgtgtccccaggcctgggcccagggcgccctgcgggccagcgtggaggctgacacccacacagatggtgtggaccatgctgccttgtggagctgggagttggagacagccgccaccccacaggcc

SEQ ID NO: 352797 - DNA, 217 bp, Homo sapiens; identical to SEQ ID NO: 336922
  chr1:11856166-11856383
  hypo

SEQ ID NO: 352798 - DNA, 64 bp, Homo sapiens; identical to SEQ ID NO: 346318
  chr1:12123950-12124014
  hypo

SEQ ID NO: 352799 - DNA, 516 bp, Homo sapiens; identical to SEQ ID NO: 349175
  chr1:12226892-12227408
  hypo

SEQ ID NO: 352800 - DNA, 206 bp, Homo sapiens; identical to SEQ ID NO: 197324
  chr1:12227438-12227644
  hypo

SEQ ID NO: 352801 - DNA, 93 bp, Homo sapiens; identical to SEQ ID NO: 347792
  chr1:12251958-12252051
  hypo

SEQ ID NO: 352802 - DNA, 152 bp, Homo sapiens; identical to SEQ ID NO: 345697
  chr1:12460147-12460299
  hypo

SEQ ID NO: 352803 - DNA, 174 bp, Homo sapiens; identical to SEQ ID NO: 336931
  chr1:12573235-12573409
  hypo

SEQ ID NO: 352804 - DNA, 186 bp, Homo sapiens; identical to SEQ ID NO: 336932
  chr1:12630214-12630400
  hypo

SEQ ID NO: 352805 - DNA, 121 bp, Homo sapiens; identical to SEQ ID NO: 336936
  chr1:14114676-14114797
  hypo

SEQ ID NO: 352806 - DNA, 76 bp, Homo sapiens
  chr1:14125492-14125568
  hypo
cgtggtgagtcagagctgctgggtaatgtgacttagtcagctggatcaaagggtaacaaacacaagcactccaggc

SEQ ID NO: 352807 - DNA, 54 bp, Homo sapiens
  chr1:14125622-14125676
  hypo
tgcctaaggaagaacagagaattaagaattgtgaggccgggcgcggtggctcac

SEQ ID NO: 352808 - DNA, 167 bp, Homo sapiens; identical to SEQ ID NO: 336940
  chr1:15178306-15178473
  hypo

SEQ ID NO: 352809 - DNA, 128 bp, Homo sapiens
  chr1:16058899-16059027
  hypo
cggatgaccgcctctttacgtgccatgaggattgccagaccagcttcttccgctctttgggcacagccaagctgggcgacatcagcgccgtctccaccgagccgggcaaggagtactgcgtcttggtg

SEQ ID NO: 352810 - DNA, 169 bp, Homo sapiens; identical to SEQ ID NO: 347795
  chr1:16474862-16475031
  hypo

SEQ ID NO: 352811 - DNA, 75 bp, Homo sapiens; identical to SEQ ID NO: 347796
  chr1:16475432-16475507
  hypo

SEQ ID NO: 352812 - DNA, 310 bp, Homo sapiens; identical to SEQ ID NO: 336953
  chr1:18023481-18023791
  hypo

SEQ ID NO: 352813 - DNA, 204 bp, Homo sapiens; identical to SEQ ID NO: 349181
  chr1:18434105-18434309
  hypo

SEQ ID NO: 352814 - DNA, 37 bp, Homo sapiens; identical to SEQ ID NO: 349182
  chr1:18434816-18434853
  hypo

SEQ ID NO: 352815 - DNA, 132 bp, Homo sapiens; identical to SEQ ID NO: 336957
  chr1:19436878-19437010
  hypo

SEQ ID NO: 352816 - DNA, 34 bp, Homo sapiens; identical to SEQ ID NO: 336958
  chr1:19518000-19518034
  hypo

SEQ ID NO: 352817 - DNA, 215 bp, Homo sapiens; identical to SEQ ID NO: 336959
  chr1:19659439-19659654
  hypo

SEQ ID NO: 352818 - DNA, 333 bp, Homo sapiens; identical to SEQ ID NO: 347797
  chr1:19676386-19676719
  hypo

SEQ ID NO: 352819 - DNA, 51 bp, Homo sapiens; identical to SEQ ID NO: 347798
  chr1:19676822-19676873
  hypo

SEQ ID NO: 352820 - DNA, 83 bp, Homo sapiens
  chr1:21568244-21568327
  hypo
cggctccaatgtcttccttcaaagaggccacgctctctgcctacaggtcacgaagtcctggaagtactacaggatggtgagaa

SEQ ID NO: 352821 - DNA, 234 bp, Homo sapiens; identical to SEQ ID NO: 206784
  chr1:21573434-21573668
  hypo

SEQ ID NO: 352822 - DNA, 189 bp, Homo sapiens; identical to SEQ ID NO: 336973
  chr1:22023693-22023882
  hypo

SEQ ID NO: 352823 - DNA, 160 bp, Homo sapiens; identical to SEQ ID NO: 336977
  chr1:23411446-23411606
  hypo

SEQ ID NO: 352824 - DNA, 385 bp, Homo sapiens; identical to SEQ ID NO: 349190
  chr1:24126326-24126711
  hypo

SEQ ID NO: 352825 - DNA, 320 bp, Homo sapiens; identical to SEQ ID NO: 349193
  chr1:25255291-25255611
  hypo

SEQ ID NO: 352826 - DNA, 164 bp, Homo sapiens; identical to SEQ ID NO: 336985
  chr1:25854484-25854648
  hypo

SEQ ID NO: 352827 - DNA, 807 bp, Homo sapiens; identical to SEQ ID NO: 330733
  chr1:26662538-26663345
  hypo

SEQ ID NO: 352828 - DNA, 88 bp, Homo sapiens; identical to SEQ ID NO: 336990
  chr1:27058003-27058091
  hypo

SEQ ID NO: 352829 - DNA, 247 bp, Homo sapiens; identical to SEQ ID NO: 336991
  chr1:27183370-27183617
  hypo

SEQ ID NO: 352830 - DNA, 233 bp, Homo sapiens
  chr1:27189675-27189908
  hypo
cgccgcccgcctgtgtgtccccagagccatggagagagccagtctgatccagaaggccaagctggcagagcaggccgaacgctatgaggacatggcagccttcatgaaaggcgccgtggagaagggcgaggagctctcctgcgaagagcgaaacctgctctcagtagcctataagaacgtggtgggcggccagagggctgcctggagggtgctgtccagtattgagcagaaaa

SEQ ID NO: 352831 - DNA, 256 bp, Homo sapiens; identical to SEQ ID NO: 336993
  chr1:27220862-27221118
  hypo

SEQ ID NO: 352832 - DNA, 308 bp, Homo sapiens; identical to SEQ ID NO: 349195
  chr1:27332673-27332981
  hypo

SEQ ID NO: 352833 - DNA, 140 bp, Homo sapiens
  chr1:27628429-27628569
  hypo
ctccaccacctgactgtgtggccttgaagaaagcacagcctctctacctacctgcacaaagagcacgaagccctgcccagctcccctcagtgtgctggagaatgaactgggccatcggagtgtggtctgtaaacgtgaac

SEQ ID NO: 352834 - DNA, 195 bp, Homo sapiens
  chr1:27844793-27844988
  hypo
cgtcgactggactctggccaagggcagggactgtgtggcactgctcactgctgtatccacaaggccctaaggcataatgcctggagcctcaatccatgatcggtagggaacgaatgaatggctaagcctgttggggcaggtgtgatagtttgagtgaaagtgacagggtctgcggtggcagcgaggagagaagag

SEQ ID NO: 352835 - DNA, 237 bp, Homo sapiens
  chr1:27875852-27876089
  hypo
cgtcctggtgggaaggtctggcgcgcggacaggacaggctgaaaggaggggtccgccccagccccgctgctacccactgccactgggctggccttggctccccggctagggaaggtggccaggccccgctgggcaggcagggcactggtgggtggccctgcataggtgcccgatgccttccgggactctgggcgagaggctgagagggcaaagtccaagagatcggaggagtcatcc

SEQ ID NO: 352836 - DNA, 111 bp, Homo sapiens; identical to SEQ ID NO: 296950
  chr1:27876333-27876444
  hypo

SEQ ID NO: 352837 - DNA, 698 bp, Homo sapiens; identical to SEQ ID NO: 330736
  chr1:27901989-27902687
  hypo

SEQ ID NO: 352838 - DNA, 202 bp, Homo sapiens; identical to SEQ ID NO: 337000
  chr1:27921349-27921551
  hypo

SEQ ID NO: 352839 - DNA, 80 bp, Homo sapiens; identical to SEQ ID NO: 347804
  chr1:31863055-31863135
  hypo

SEQ ID NO: 352840 - DNA, 317 bp, Homo sapiens
  chr1:32826720-32827037
  hypo
cgagaggagtgaagtggcgtaggttgaaaggcggaagggcgggcccctaaggctgggtccaaacgaggaggctgcggaagggaaagtgttattggactgggcagagcagctggtgggcccgacggatagacatacactgccagcccggagtggaaagaacagtttgtgctgtgctttattaaaatgtgcatcattcttttattttaaaatgtgcatcattgtctcgtgctcggcgcatgcgacctcagcgtggtggcccgctgggggcctcgttcccgcccagctcccgcggagccgcagggagcaggcgcactcac

SEQ ID NO: 352841 - DNA, 33 bp, Homo sapiens; identical to SEQ ID NO: 349208
  chr1:33438467-33438500
  hypo

SEQ ID NO: 352842 - DNA, 289 bp, Homo sapiens
  chr1:33441642-33441931
  hypo
tagatccttcataactaagactcaccttcaccctcaccagtcccaccgcctccttgcacgggagaccccatccctctggacccggggcccttccagggatagccatcacttgcatacttgcgactgctcttgctgtagggtcccctttccccctttgtgaacctagcgaattcctagaccctacttaattataataaagcaacagagggtagaaactggcactaaaatgccgcttagcaaaggtcacaaaggtgaaagcctgcagaagtcaagcaggagagagaaatac

SEQ ID NO: 352843 - DNA, 224 bp, Homo sapiens; identical to SEQ ID NO: 197453
  chr1:34629913-34630137
  hypo

SEQ ID NO: 352844 - DNA, 252 bp, Homo sapiens; identical to SEQ ID NO: 278242
  chr1:35394790-35395042
  hypo

SEQ ID NO: 352845 - DNA, 423 bp, Homo sapiens; identical to SEQ ID NO: 349217
  chr1:38512641-38513064
  hypo

SEQ ID NO: 352846 - DNA, 696 bp, Homo sapiens; identical to SEQ ID NO: 349219
  chr1:39956640-39957336
  hypo

SEQ ID NO: 352847 - DNA, 334 bp, Homo sapiens; identical to SEQ ID NO: 337032
  chr1:41281568-41281902
  hypo

SEQ ID NO: 352848 - DNA, 99 bp, Homo sapiens; identical to SEQ ID NO: 345702
  chr1:41485949-41486048
  hypo

SEQ ID NO: 352849 - DNA, 91 bp, Homo sapiens; identical to SEQ ID NO: 345703
  chr1:41486164-41486255
  hypo

SEQ ID NO: 352850 - DNA, 462 bp, Homo sapiens; identical to SEQ ID NO: 330784
  chr1:41832027-41832489
  hypo

SEQ ID NO: 352851 - DNA, 132 bp, Homo sapiens
  chr1:42633144-42633276
  hypo
cgtgtgtgtatacactgaggtgcgtgtgtgctgaagtgtgtgtatacactgaggtgtgcgtgagtgctgacgtgtgtgtatacactgaggtgtgtgtgagtgctgacgtgtgtgtgtgcactgacgtgtgtg

SEQ ID NO: 352852 - DNA, 37 bp, Homo sapiens; identical to SEQ ID NO: 347810
  chr1:43842627-43842664
  hypo

SEQ ID NO: 352853 - DNA, 148 bp, Homo sapiens; identical to SEQ ID NO: 337042
  chr1:44132677-44132825
  hypo

SEQ ID NO: 352854 - DNA, 59 bp, Homo sapiens; identical to SEQ ID NO: 347811
  chr1:44351032-44351091
  hypo

SEQ ID NO: 352855 - DNA, 140 bp, Homo sapiens
  chr1:44717932-44718072
  hypo
cgcacacacgcttcccttcccctgggctgctgcaatttccatgcacagggaagcaggtgccgagctgctcccggctggctctcccctctcgtggctctgcccgccttggctgctgccccattagcttagtggccagccat

SEQ ID NO: 352856 - DNA, 138 bp, Homo sapiens
  chr1:44718164-44718302
  hypo
gacacctcagcgcagcctgctattacatgcaaacactgatcgccctgtgaaattacattgctgggcccgcgaaatggaatcgtgtataatcagcctcctccatgcactgtcagtcccatcacaaacacggcgcccggc

SEQ ID NO: 352857 - DNA, 105 bp, Homo sapiens; identical to SEQ ID NO: 347812
  chr1:44726788-44726893
  hypo

SEQ ID NO: 352858 - DNA, 335 bp, Homo sapiens; identical to SEQ ID NO: 337051
  chr1:45087586-45087921
  hypo

SEQ ID NO: 352859 - DNA, 267 bp, Homo sapiens; identical to SEQ ID NO: 337057
  chr1:46500322-46500589
  hypo

SEQ ID NO: 352860 - DNA, 209 bp, Homo sapiens; identical to SEQ ID NO: 337062
  chr1:46963465-46963674
  hypo

SEQ ID NO: 352861 - DNA, 97 bp, Homo sapiens
  chr1:47035276-47035373
  hypo
cgattcccgactagaaggcaaaagcctggcccaggccacgggaggcacttcactaaagaagaaaaacctgagctccagcaagctcagtaacttcatc

SEQ ID NO: 352862 - DNA, 233 bp, Homo sapiens
  chr1:47035403-47035636
  hypo
actcagtccaggctgcacaaattgagtagcactgctctgcagctcgctgcactaaaagtggaagatattttccattacagcaagtgctcccacagaaggatcacgagccacacacggagccttactctccaaataggcgcccatggcccagtcgtcccttagcctaagaactcagagagccaggctgtaataatggggctgccgtgtgagcacagcagccatcgagctgctcc

SEQ ID NO: 352863 - DNA, 232 bp, Homo sapiens
  chr1:47041011-47041243
  hypo
cgactggaagcaattgcggctaataacactgaatactaggtgtgtgtcctggaggcaagcagcaaataattacttgccctccctcttgcccataaatcacggggcagtatttacattgcctggagaaaatggaaacatctgtcaaatggacttggggcctaacatgggcaccgctagaccctaactgctaagcgctgcttaatgaaacggccgcgttcctggccactgtagc

SEQ ID NO: 352864 - DNA, 37 bp, Homo sapiens
  chr1:47041273-47041310
  hypo
gtctgcccgagtatttcagtgctctgccaacaaggtc

SEQ ID NO: 352865 - DNA, 430 bp, Homo sapiens; identical to SEQ ID NO: 345705
  chr1:47685395-47685825
  hypo

SEQ ID NO: 352866 - DNA, 159 bp, Homo sapiens; identical to SEQ ID NO: 349233
  chr1:48190715-48190874
  hypo

SEQ ID NO: 352867 - DNA, 428 bp, Homo sapiens; identical to SEQ ID NO: 337069
  chr1:48459812-48460240
  hypo

SEQ ID NO: 352868 - DNA, 196 bp, Homo sapiens; identical to SEQ ID NO: 345706
  chr1:51763389-51763585
  hypo

SEQ ID NO: 352869 - DNA, 189 bp, Homo sapiens; identical to SEQ ID NO: 330827
  chr1:52081941-52082130
  hypo

SEQ ID NO: 352870 - DNA, 322 bp, Homo sapiens; identical to SEQ ID NO: 197534
  chr1:52194968-52195290
  hypo

SEQ ID NO: 352871 - DNA, 108 bp, Homo sapiens; identical to SEQ ID NO: 337078
  chr1:52659468-52659576
  hypo

SEQ ID NO: 352872 - DNA, 52 bp, Homo sapiens; identical to SEQ ID NO: 337079
  chr1:52879577-52879629
  hypo

SEQ ID NO: 352873 - DNA, 153 bp, Homo sapiens; identical to SEQ ID NO: 337082
  chr1:53238160-53238313
  hypo

SEQ ID NO: 352874 - DNA, 605 bp, Homo sapiens; identical to SEQ ID NO: 349244
  chr1:54204704-54205309
  hypo

SEQ ID NO: 352875 - DNA, 206 bp, Homo sapiens; identical to SEQ ID NO: 337087
  chr1:54474577-54474783
  hypo

SEQ ID NO: 352876 - DNA, 122 bp, Homo sapiens
  chr1:54694091-54694213
  hypo
cgccgccagggagaccgagtgcacactcacttttggaagtccgtctatgtcgcctgaccctggaaagaaaaaataatccaattcagtttcttgcttgctcttccacggaggggtctcccctc

SEQ ID NO: 352877 - DNA, 148 bp, Homo sapiens; identical to SEQ ID NO: 337089
  chr1:55066953-55067101
  hypo

SEQ ID NO: 352878 - DNA, 164 bp, Homo sapiens; identical to SEQ ID NO: 337091
  chr1:55620065-55620229
  hypo

SEQ ID NO: 352879 - DNA, 47 bp, Homo sapiens; identical to SEQ ID NO: 349260
  chr1:67773780-67773827
  hypo

SEQ ID NO: 352880 - DNA, 59 bp, Homo sapiens; identical to SEQ ID NO: 337104
  chr1:78463740-78463799
  hypo

SEQ ID NO: 352881 - DNA, 535 bp, Homo sapiens; identical to SEQ ID NO: 344959
  chr1:85462747-85463282
  hypo

SEQ ID NO: 352882 - DNA, 437 bp, Homo sapiens; identical to SEQ ID NO: 344960
  chr1:90308855-90309292
  hypo

SEQ ID NO: 352883 - DNA, 37 bp, Homo sapiens; identical to SEQ ID NO: 337119
  chr1:94354617-94354654
  hypo

SEQ ID NO: 352884 - DNA, 501 bp, Homo sapiens; identical to SEQ ID NO: 346354
  chr1:94702434-94702935
  hypo

SEQ ID NO: 352885 - DNA, 88 bp, Homo sapiens; identical to SEQ ID NO: 197650
  chr1:94702990-94703078
  hypo

SEQ ID NO: 352886 - DNA, 95 bp, Homo sapiens; identical to SEQ ID NO: 346356
  chr1:94703103-94703198
  hypo

SEQ ID NO: 352887 - DNA, 759 bp, Homo sapiens; identical to SEQ ID NO: 349289
  chr1:99126872-99127631
  hypo

SEQ ID NO: 352888 - DNA, 325 bp, Homo sapiens; identical to SEQ ID NO: 344965
  chr1:99127671-99127996
  hypo

SEQ ID NO: 352889 - DNA, 288 bp, Homo sapiens; identical to SEQ ID NO: 278688
  chr1:101702081-101702369
  hypo

SEQ ID NO: 352890 - DNA, 392 bp, Homo sapiens; identical to SEQ ID NO: 278689
  chr1:101702796-101703188
  hypo

SEQ ID NO: 352891 - DNA, 49 bp, Homo sapiens; identical to SEQ ID NO: 349294
  chr1:107684495-107684544
  hypo

SEQ ID NO: 352892 - DNA, 113 bp, Homo sapiens; identical to SEQ ID NO: 349296
  chr1:109204221-109204334
  hypo

SEQ ID NO: 352893 - DNA, 229 bp, Homo sapiens; identical to SEQ ID NO: 337133
  chr1:110170726-110170955
  hypo

SEQ ID NO: 352894 - DNA, 364 bp, Homo sapiens; identical to SEQ ID NO: 349303
  chr1:110753530-110753894
  hypo

SEQ ID NO: 352895 - DNA, 46 bp, Homo sapiens; identical to SEQ ID NO: 197698
  chr1:110753957-110754003
  hypo

SEQ ID NO: 352896 - DNA, 243 bp, Homo sapiens; identical to SEQ ID NO: 337139
  chr1:110771992-110772235
  hypo

SEQ ID NO: 352897 - DNA, 818 bp, Homo sapiens; identical to SEQ ID NO: 330937
  chr1:113498720-113499538
  hypo

SEQ ID NO: 352898 - DNA, 699 bp, Homo sapiens; identical to SEQ ID NO: 349308
  chr1:113932580-113933279
  hypo

SEQ ID NO: 352899 - DNA, 264 bp, Homo sapiens; identical to SEQ ID NO: 349309
  chr1:113933305-113933569
  hypo

SEQ ID NO: 352900 - DNA, 1132 bp, Homo sapiens; identical to SEQ ID NO: 330944
  chr1:116184428-116185560
  hypo

SEQ ID NO: 352901 - DNA, 51 bp, Homo sapiens; identical to SEQ ID NO: 207134
  chr1:116214053-116214104
  hypo

SEQ ID NO: 352902 - DNA, 200 bp, Homo sapiens; identical to SEQ ID NO: 337153
  chr1:117630364-117630564
  hypo

SEQ ID NO: 352903 - DNA, 144 bp, Homo sapiens; identical to SEQ ID NO: 337154
  chr1:117918966-117919110
  hypo

SEQ ID NO: 352904 - DNA, 204 bp, Homo sapiens; identical to SEQ ID NO: 337155
  chr1:118163688-118163892
  hypo

SEQ ID NO: 352905 - DNA, 49 bp, Homo sapiens; identical to SEQ ID NO: 337160
  chr1:150935078-150935127
  hypo

SEQ ID NO: 352906 - DNA, 77 bp, Homo sapiens; identical to SEQ ID NO: 337164
  chr1:151597643-151597720
  hypo

SEQ ID NO: 352907 - DNA, 298 bp, Homo sapiens; identical to SEQ ID NO: 337168
  chr1:152733117-152733415
  hypo

SEQ ID NO: 352908 - DNA, 253 bp, Homo sapiens; identical to SEQ ID NO: 347831
  chr1:153540242-153540495
  hypo

SEQ ID NO: 352909 - DNA, 193 bp, Homo sapiens; identical to SEQ ID NO: 337172
  chr1:154179803-154179996
  hypo

SEQ ID NO: 352910 - DNA, 447 bp, Homo sapiens; identical to SEQ ID NO: 346369
  chr1:154297543-154297990
  hypo

SEQ ID NO: 352911 - DNA, 72 bp, Homo sapiens; identical to SEQ ID NO: 278861
  chr1:154298038-154298110
  hypo

SEQ ID NO: 352912 - DNA, 244 bp, Homo sapiens; identical to SEQ ID NO: 349324
  chr1:154474305-154474549
  hypo

SEQ ID NO: 352913 - DNA, 223 bp, Homo sapiens; identical to SEQ ID NO: 337176
  chr1:154931252-154931475
  hypo

SEQ ID NO: 352914 - DNA, 140 bp, Homo sapiens
  chr1:154954433-154954573
  hypo
tctttttttcaattgagagaactcaagcaatcctccctcctcagactcccaaagtgctgcgcccgaccaagggttttgaagagtaaaatttggcaaggtgtggtttaccagtcctacaaagaatgaattcggcccggcgc

SEQ ID NO: 352915 - DNA, 58 bp, Homo sapiens
  chr1:155311726-155311784
  hypo
cgagaaatcttttttgggagtgagcttcttggggaagtgatcaaaagcatagggtttg

SEQ ID NO: 352916 - DNA, 353 bp, Homo sapiens
  chr1:155911571-155911924
  hypo
gagtgctgatgatgctccgatgcctgtcaaattcctagccctgaggctcatggttgccctggcctatgggcttgtgggggccattggcttgctgggaaatttggcggtgctgtgggtactgagtaactgtgcccggagagcccctggcccaccttcagacaccttcgtcttcaacctggctctggcggacctgggactggcactcactctccccttttgggcagccgagtcggcactggactttcactggcccttcggaggtgccctctgcaagatggttctgacggccactgtcctcaacgtctatgccagcatcttcctcatcacagcgctgagcgttgctcgctactggg

SEQ ID NO: 352917 - DNA, 83 bp, Homo sapiens
  chr1:155911954-155912037
  hypo
acctctcactcttctgggcccgaatagccaccctggcagtgtgggcggcggctgccctggtgacggtgcccacagctgtcttc

SEQ ID NO: 352918 - DNA, 91 bp, Homo sapiens
  chr1:156432033-156432124
  hypo
cggcattttgcagatgaggaaacccaaggcatgaagcctgactcctgtgtgctcccacaactaaggctagcacccacagccttaaccatgc

SEQ ID NO: 352919 - DNA, 47 bp, Homo sapiens
  chr1:158669657-158669704
  hypo
cgtaggtacatgagagtcacactgccaaagaagagcgaaaagacaat

SEQ ID NO: 352920 - DNA, 158 bp, Homo sapiens; identical to SEQ ID NO: 337206
  chr1:161367435-161367593
  hypo

SEQ ID NO: 352921 - DNA, 293 bp, Homo sapiens; identical to SEQ ID NO: 344978
  chr1:161369566-161369859
  hypo

SEQ ID NO: 352922 - DNA, 299 bp, Homo sapiens; identical to SEQ ID NO: 344979
  chr1:161369945-161370244
  hypo

SEQ ID NO: 352923 - DNA, 712 bp, Homo sapiens; identical to SEQ ID NO: 349339
  chr1:161409991-161410703
  hypo

SEQ ID NO: 352924 - DNA, 903 bp, Homo sapiens; identical to SEQ ID NO: 331011
  chr1:162039148-162040051
  hypo

SEQ ID NO: 352925 - DNA, 132 bp, Homo sapiens; identical to SEQ ID NO: 337214
  chr1:164604732-164604864
  hypo

SEQ ID NO: 352926 - DNA, 103 bp, Homo sapiens; identical to SEQ ID NO: 278995
  chr1:165204594-165204697
  hypo

SEQ ID NO: 352927 - DNA, 93 bp, Homo sapiens; identical to SEQ ID NO: 278996
  chr1:165204732-165204825
  hypo

SEQ ID NO: 352928 - DNA, 81 bp, Homo sapiens; identical to SEQ ID NO: 337222
  chr1:167221039-167221120
  hypo

SEQ ID NO: 352929 - DNA, 31 bp, Homo sapiens
  chr1:167393552-167393583
  hypo
cggggaaagaaagacttccagcttcttacct

SEQ ID NO: 352930 - DNA, 187 bp, Homo sapiens
  chr1:167393613-167393800
  hypo
gtccgcaggaggtctcactccgcaggaaacgctctcctcccgcataagtctgtacttccatcccctcatctgtggtagtagtgaaggctaggtgagtaagcgtgggctgttctacccaccagaagtccaggagctgttgtatacctcatttctaactcgtgaccgagtgacttgctttaactttctc

SEQ ID NO: 352931 - DNA, 200 bp, Homo sapiens; identical to SEQ ID NO: 337225
  chr1:167486836-167487036
  hypo

SEQ ID NO: 352932 - DNA, 160 bp, Homo sapiens
  chr1:168150817-168150977
  hypo
aaaccgcaattacttttgcaccaacataatacaatatataattatattatatataaagcagtcagcttcaaactggggcccccatgtaatttacttacagattctctaagcgatggctgtatacatggagagttttaagggaataaaattccatatctac

SEQ ID NO: 352933 - DNA, 69 bp, Homo sapiens; identical to SEQ ID NO: 347838
  chr1:171554936-171555005
  hypo

SEQ ID NO: 352934 - DNA, 122 bp, Homo sapiens; identical to SEQ ID NO: 347839
  chr1:171555061-171555183
  hypo

SEQ ID NO: 352935 - DNA, 181 bp, Homo sapiens; identical to SEQ ID NO: 337233
  chr1:171570080-171570261
  hypo

SEQ ID NO: 352936 - DNA, 301 bp, Homo sapiens; identical to SEQ ID NO: 349355
  chr1:175048508-175048809
  hypo

SEQ ID NO: 352937 - DNA, 180 bp, Homo sapiens; identical to SEQ ID NO: 347840
  chr1:175372314-175372494
  hypo

SEQ ID NO: 352938 - DNA, 145 bp, Homo sapiens; identical to SEQ ID NO: 347841
  chr1:175372572-175372717
  hypo

SEQ ID NO: 352939 - DNA, 152 bp, Homo sapiens; identical to SEQ ID NO: 347842
  chr1:175375048-175375200
  hypo

SEQ ID NO: 352940 - DNA, 111 bp, Homo sapiens; identical to SEQ ID NO: 337242
  chr1:175957595-175957706
  hypo

SEQ ID NO: 352941 - DNA, 62 bp, Homo sapiens; identical to SEQ ID NO: 337246
  chr1:179333937-179333999
  hypo

SEQ ID NO: 352942 - DNA, 43 bp, Homo sapiens; identical to SEQ ID NO: 337247
  chr1:179835828-179835871
  hypo

SEQ ID NO: 352943 - DNA, 67 bp, Homo sapiens; identical to SEQ ID NO: 337250
  chr1:180478120-180478187
  hypo

SEQ ID NO: 352944 - DNA, 75 bp, Homo sapiens; identical to SEQ ID NO: 337251
  chr1:180892057-180892132
  hypo

SEQ ID NO: 352945 - DNA, 128 bp, Homo sapiens
  chr1:180919554-180919682
  hypo
cgaggtgaacggggccaaggtggcagggctgggcttggctcacattaaggagctcctggcccactcagagagcttgtcaatccgtgtcctgaggcagagacctgtcccacggtgacccagaagtgccg

SEQ ID NO: 352946 - DNA, 47 bp, Homo sapiens
  chr1:180919718-180919765
  hypo
actcagggtggttggcaggaacgtgctgcacagagctgctctgtggc

SEQ ID NO: 352947 - DNA, 202 bp, Homo sapiens
  chr1:181767556-181767758
  hypo
cgacacgcgggcagcatctctccacctgctgatggaagcgaggagggctccccgctgacctcccaagctctggagagcaacaatgcttgcctgaccgagtcttccaactctccgcacccccagcagagccaacatgcctccccacagcgctacatctccgagccctacttggccctgcacgaagactcccacgcctcagact

SEQ ID NO: 352948 - DNA, 85 bp, Homo sapiens
  chr1:181767807-181767892
  hypo
gggccgttccaacaccatcggctcagccccacccctgcggcatagctggcagatgcccaacgggcactatcggcggcggaggcgc

SEQ ID NO: 352949 - DNA, 249 bp, Homo sapiens; identical to SEQ ID NO: 344982
  chr1:182583799-182584048
  hypo

SEQ ID NO: 352950 - DNA, 40 bp, Homo sapiens; identical to SEQ ID NO: 344983
  chr1:182584613-182584653
  hypo

SEQ ID NO: 352951 - DNA, 151 bp, Homo sapiens; identical to SEQ ID NO: 331054
  chr1:184722819-184722970
  hypo

SEQ ID NO: 352952 - DNA, 388 bp, Homo sapiens; identical to SEQ ID NO: 337262
  chr1:193149436-193149824
  hypo

SEQ ID NO: 352953 - DNA, 255 bp, Homo sapiens; identical to SEQ ID NO: 331068
  chr1:200379717-200379972
  hypo

SEQ ID NO: 352954 - DNA, 44 bp, Homo sapiens; identical to SEQ ID NO: 337271
  chr1:202009839-202009883
  hypo

SEQ ID NO: 352955 - DNA, 370 bp, Homo sapiens; identical to SEQ ID NO: 337281
  chr1:204197954-204198324
  hypo

SEQ ID NO: 352956 - DNA, 154 bp, Homo sapiens; identical to SEQ ID NO: 337282
  chr1:204199556-204199710
  hypo

SEQ ID NO: 352957 - DNA, 383 bp, Homo sapiens; identical to SEQ ID NO: 337283
  chr1:204226544-204226927
  hypo

SEQ ID NO: 352958 - DNA, 279 bp, Homo sapiens; identical to SEQ ID NO: 345722
  chr1:204530924-204531203
  hypo

SEQ ID NO: 352959 - DNA, 79 bp, Homo sapiens; identical to SEQ ID NO: 345723
  chr1:204531757-204531836
  hypo

SEQ ID NO: 352960 - DNA, 137 bp, Homo sapiens; identical to SEQ ID NO: 337288
  chr1:204537877-204538014
  hypo

SEQ ID NO: 352961 - DNA, 315 bp, Homo sapiens; identical to SEQ ID NO: 345724
  chr1:204955352-204955667
  hypo

SEQ ID NO: 352962 - DNA, 292 bp, Homo sapiens; identical to SEQ ID NO: 337295
  chr1:205273331-205273623
  hypo

SEQ ID NO: 352963 - DNA, 817 bp, Homo sapiens; identical to SEQ ID NO: 337301
  chr1:205631783-205632600
  hypo

SEQ ID NO: 352964 - DNA, 256 bp, Homo sapiens; identical to SEQ ID NO: 337302
  chr1:207195396-207195652
  hypo

SEQ ID NO: 352965 - DNA, 204 bp, Homo sapiens
  chr1:214637813-214638017
  hypo
cgtgctaagaataacaggattcttataaacacatcgtcgcttaggccaaaaaacacaacagatgccaaaaaacagatggctggtcccttcggtgagttctccttcacatacccaacacgcatgcacgcgcacatgcgcacacagacacacccctcttacctctcgcagctccagcctctgggccacagcctccaggcattcttg

SEQ ID NO: 352966 - DNA, 34 bp, Homo sapiens
  chr1:214638090-214638124
  hypo
ttcttgctcaggacgttgtagcgccgtgtccggc

SEQ ID NO: 352967 - DNA, 55 bp, Homo sapiens; identical to SEQ ID NO: 344990
  chr1:219347516-219347571
  hypo

SEQ ID NO: 352968 - DNA, 198 bp, Homo sapiens; identical to SEQ ID NO: 349403
  chr1:220921368-220921566
  hypo

SEQ ID NO: 352969 - DNA, 234 bp, Homo sapiens; identical to SEQ ID NO: 337326
  chr1:224345162-224345396
  hypo

SEQ ID NO: 352970 - DNA, 64 bp, Homo sapiens; identical to SEQ ID NO: 337327
  chr1:224368640-224368704
  hypo

SEQ ID NO: 352971 - DNA, 99 bp, Homo sapiens; identical to SEQ ID NO: 197977
  chr1:225117651-225117750
  hypo

SEQ ID NO: 352972 - DNA, 66 bp, Homo sapiens; identical to SEQ ID NO: 346403
  chr1:225117751-225117817
  hypo

SEQ ID NO: 352973 - DNA, 380 bp, Homo sapiens; identical to SEQ ID NO: 337330
  chr1:225597858-225598238
  hypo

SEQ ID NO: 352974 - DNA, 84 bp, Homo sapiens
  chr1:226062794-226062878
  hypo
cggtcagttttttcctctgagtttgattcccctgaaggcaggccccgcaggccctgcaatcccccagcagagagcatgcatgca

SEQ ID NO: 352975 - DNA, 135 bp, Homo sapiens
  chr1:226163215-226163350
  hypo
acagaagtaataatgttatgggatattcagcaagactaaatgatttattcaccacctgtacagtgaaaactgaagctaaatctgagaattaaggaatcagaaagaacagggcgccgggcgcggtggctcacgtcc

SEQ ID NO: 352976 - DNA, 311 bp, Homo sapiens; identical to SEQ ID NO: 337339
  chr1:226827405-226827716
  hypo

SEQ ID NO: 352977 - DNA, 1206 bp, Homo sapiens; identical to SEQ ID NO: 197984
  chr1:226925659-226926865
  hypo

SEQ ID NO: 352978 - DNA, 49 bp, Homo sapiens; identical to SEQ ID NO: 344995
  chr1:226926951-226927000
  hypo

SEQ ID NO: 352979 - DNA, 269 bp, Homo sapiens
  chr1:228081860-228082129
  hypo
cgcaggagaaggggagcaagtggggcggagtgactgcatcctttgggtactggcatgggacaaggtgggtgcccgagagccctggagcacagatgtctgtgcacggctctgtgcaccagcccaggtgcagggtgtccacagtgcaagagcccacaagcacacaaccacaataggtgttcgcacacgagcccaggatgtgtggtgcctgcaggcatgtgcccaggacccaaggtgtccacaaacgtacccatgcccttcacatggactca

SEQ ID NO: 352980 - DNA, 46 bp, Homo sapiens
  chr1:228083620-228083666
  hypo
gaggggctctgggtgagtgctggccctgtaggtccctcggcctgtc

SEQ ID NO: 352981 - DNA, 199 bp, Homo sapiens
  chr1:228473703-228473902
  hypo
cgtctgtcctggggagcactgctggccaagcctgcccaggacggtggggcccctgagcagtctgtgcctttgcaggccggagagtgcacatcatcgaggacctggaggatgtggatgtgcaggagggctcctcggccaccttccgttgccggatctccccggccaactacgagcctgtgcactggttcctggacaagac

SEQ ID NO: 352982 - DNA, 110 bp, Homo sapiens
  chr1:228473932-228474042
  hypo
cgatgcccagcccgggggctaccacgtgctgaccctgcggcagctggcgctcaaggactcgggcaccatctactttgaggcgggtgaccagcgggcctcggccgccctgc

SEQ ID NO: 352983 - DNA, 69 bp, Homo sapiens
  chr1:228504692-228504761
  hypo
gtgggcgagcttttccctcccctgcaggtcgggtctggggcgcgccccgcctccagagcttgcgagtgc

SEQ ID NO: 352984 - DNA, 358 bp, Homo sapiens; identical to SEQ ID NO: 347857
  chr1:228528433-228528791
  hypo

SEQ ID NO: 352985 - DNA, 50 bp, Homo sapiens; identical to SEQ ID NO: 347858
  chr1:228529382-228529432
  hypo

SEQ ID NO: 352986 - DNA, 253 bp, Homo sapiens; identical to SEQ ID NO: 279361
  chr1:228646941-228647194
  hypo

SEQ ID NO: 352987 - DNA, 117 bp, Homo sapiens; identical to SEQ ID NO: 279362
  chr1:228647317-228647434
  hypo

SEQ ID NO: 352988 - DNA, 328 bp, Homo sapiens; identical to SEQ ID NO: 198004
  chr1:228870899-228871227
  hypo

SEQ ID NO: 352989 - DNA, 129 bp, Homo sapiens; identical to SEQ ID NO: 337364
  chr1:229160222-229160351
  hypo

SEQ ID NO: 352990 - DNA, 273 bp, Homo sapiens; identical to SEQ ID NO: 337366
  chr1:230256241-230256514
  hypo

SEQ ID NO: 352991 - DNA, 262 bp, Homo sapiens; identical to SEQ ID NO: 337367
  chr1:230266303-230266565
  hypo

SEQ ID NO: 352992 - DNA, 85 bp, Homo sapiens; identical to SEQ ID NO: 337368
  chr1:230272610-230272695
  hypo

SEQ ID NO: 352993 - DNA, 248 bp, Homo sapiens; identical to SEQ ID NO: 337370
  chr1:230346868-230347116
  hypo

SEQ ID NO: 352994 - DNA, 193 bp, Homo sapiens
  chr1:230404024-230404217
  hypo
cgtgtagggttgggtgaagcttacctctggtctgtggatgacaaaacggacgaggtgcccacccaggttccgtactgtctgggtgttgggcctcttgtgatccctggccagcctcacctccgtgtttaatctctggagttcccactgtcactctgcagtgttctgatgatttatggaaggttggagaggtcac

SEQ ID NO: 352995 - DNA, 196 bp, Homo sapiens
  chr1:230404365-230404561
  hypo
ctggctcaccccccgccagcattgcaccttaattaccgcacagctagtaacacgagacagagtctgggccctgtggaggtggcaggtctacgggaaccaaagactttgtctgtgtagctgctgcctgtgaccctcctcacctgccctcaggaggacagcctgtgtcccgccttcagggctgtggccctcacccccc

SEQ ID NO: 352996 - DNA, 173 bp, Homo sapiens; identical to SEQ ID NO: 337378
  chr1:231122207-231122380
  hypo

SEQ ID NO: 352997 - DNA, 587 bp, Homo sapiens; identical to SEQ ID NO: 349427
  chr1:231175062-231175649
  hypo

SEQ ID NO: 352998 - DNA, 709 bp, Homo sapiens; identical to SEQ ID NO: 349428
  chr1:231175692-231176401
  hypo

SEQ ID NO: 352999 - DNA, 411 bp, Homo sapiens; identical to SEQ ID NO: 349432
  chr1:232765595-232766006
  hypo

SEQ ID NO: 353000 - DNA, 175 bp, Homo sapiens; identical to SEQ ID NO: 337383
  chr1:233085208-233085383
  hypo

SEQ ID NO: 353001 - DNA, 281 bp, Homo sapiens; identical to SEQ ID NO: 349433
  chr1:233749801-233750082
  hypo

SEQ ID NO: 353002 - DNA, 215 bp, Homo sapiens
  chr1:234724591-234724806
  hypo
cggttatgaggattaaatgacccgacagaggcaaaacagctttgtaaaccataaatcattttgttcggagtcaacaggatgactttttcccctcacacaatttagaattatgtacctgttgaggtagcaacgccctcgtttaatcccagccatgtttggtccccaaatgcctctctcactcgcccagagtgatactgaggccacaaaaagctctg

SEQ ID NO: 353003 - DNA, 209 bp, Homo sapiens
  chr1:234724836-234725045
  hypo
ttccaacgtggtacacaggtacctggcgtgtgtctgctcagacagtggatggcccttgttcaaagactgatgggaacacctagtgtacgaggtggcgccggggccgcccacaccaacaggccgtgtgctcccatctcactgtgcacgaggaaccggtgtgcttttcggccaggctgcatcaccctccctcccttggctttctgtgtgac

SEQ ID NO: 353004 - DNA, 174 bp, Homo sapiens; identical to SEQ ID NO: 349435
  chr1:234736252-234736426
  hypo

SEQ ID NO: 353005 - DNA, 138 bp, Homo sapiens; identical to SEQ ID NO: 347862
  chr1:234795508-234795646
  hypo

SEQ ID NO: 353006 - DNA, 184 bp, Homo sapiens; identical to SEQ ID NO: 279411
  chr1:235813161-235813345
  hypo

SEQ ID NO: 353007 - DNA, 32 bp, Homo sapiens
  chr1:235872558-235872590
  hypo
gttgacgtgattaacccgttcaccattctgac

SEQ ID NO: 353008 - DNA, 499 bp, Homo sapiens; identical to SEQ ID NO: 337400
  chr1:236156658-236157157
  hypo

SEQ ID NO: 353009 - DNA, 71 bp, Homo sapiens; identical to SEQ ID NO: 337401
  chr1:236187380-236187451
  hypo

SEQ ID NO: 353010 - DNA, 98 bp, Homo sapiens; identical to SEQ ID NO: 349438
  chr1:236850212-236850310
  hypo

SEQ ID NO: 353011 - DNA, 50 bp, Homo sapiens; identical to SEQ ID NO: 198037
  chr1:241520533-241520583
  hypo

SEQ ID NO: 353012 - DNA, 147 bp, Homo sapiens; identical to SEQ ID NO: 198038
  chr1:241520612-241520759
  hypo

SEQ ID NO: 353013 - DNA, 91 bp, Homo sapiens; identical to SEQ ID NO: 349442
  chr1:241520789-241520880
  hypo

SEQ ID NO: 353014 - DNA, 307 bp, Homo sapiens; identical to SEQ ID NO: 337415
  chr1:243652455-243652762
  hypo

SEQ ID NO: 353015 - DNA, 45 bp, Homo sapiens; identical to SEQ ID NO: 337419
  chr1:244815271-244815316
  hypo

SEQ ID NO: 353016 - DNA, 317 bp, Homo sapiens; identical to SEQ ID NO: 207644
  chr1:245032200-245032517
  hypo

SEQ ID NO: 353017 - DNA, 69 bp, Homo sapiens; identical to SEQ ID NO: 347864
  chr1:245032603-245032672
  hypo

SEQ ID NO: 353018 - DNA, 253 bp, Homo sapiens
  chr1:245254446-245254699
  hypo
gggcggagacggaggaggaaaggagtgtggtgatcctcggaacatcagcagacaggctgttgatgataggaacacattgcagcggggaaggaggatggctgagatatgaaatacccttcaaggtggacgcatacccaggggcatgtcattcggtggcaggggccagcacggacatgcagcactgaggcgtgtgctagcgcccagtgcgtcgacccaggcacggacttgtttggagcatacaggacagctctgc

SEQ ID NO: 353019 - DNA, 442 bp, Homo sapiens
  chr1:245499151-245499593
  hypo
cgaagggaaaggagggtcccacgaagggaaaggagggtcccacgcagggaaagaagagtcccacgcggggagagccccatgcagggaaagagggtcccacgcagggaaaggagagtcccacgcagggaaaggagggtcccacgcagggaaaggagagtcccacgcagggagagtcccacgcagggaaaggagggtcccacgcagggaaaggagagtcccacgcagggaaaggagggtcccacgcagggaaaggagggtcccacgcagggaaagaagagtcccacgcagggagagtcccatgcagggaaagaaggtcccacgcagggaaaggagagtcccacgcagggattgctgttccactctgcatagccgctgggctttctgctgcacggatgccatctagaagaagcaccatccactgttctcagaaagaagagagagg

SEQ ID NO: 353020 - DNA, 129 bp, Homo sapiens
  chr1:245499775-245499904
  hypo
ctgctctggggagggatgctgttttgcctttcttcacgcacgtggaatcaggactagctggactggcaggaaaaggttctctctggaataatggtttgcttctctgcaggctcgtgcggcggctcgtgc

SEQ ID NO: 353021 - DNA, 105 bp, Homo sapiens; identical to SEQ ID NO: 337431
  chr1:246160284-246160389
  hypo

SEQ ID NO: 353022 - DNA, 298 bp, Homo sapiens; identical to SEQ ID NO: 337438
  chr1:246930862-246931160
  hypo

SEQ ID NO: 353023 - DNA, 137 bp, Homo sapiens; identical to SEQ ID NO: 349444
  chr1:247170868-247171005
  hypo

SEQ ID NO: 353024 - DNA, 248 bp, Homo sapiens; identical to SEQ ID NO: 337443
  chr1:247614695-247614943
  hypo

SEQ ID NO: 353025 - DNA, 124 bp, Homo sapiens
  chr1:248074927-248075051
  hypo
atacaattcccactatcgaagggggtgtacccccctgttgtattgttcctgatatccagggcgtgaggaaatgatatcactcttaatatcgcagggtgtgtacaccctcacgttgataatgttc

SEQ ID NO: 353026 - DNA, 331 bp, Homo sapiens; identical to SEQ ID NO: 347865
  chr1:248099374-248099705
  hypo

SEQ ID NO: 353027 - DNA, 130 bp, Homo sapiens
  chr2:314855-314985
  hypo
cgggccccgccgcagggctgtgaggccgccgtgggactggttccaccgacactggaggccaggcgtgggccctccgtaaagtcccccgtgtgggattacgggacaggcggcggaaccccagtttaaccct

SEQ ID NO: 353028 - DNA, 189 bp, Homo sapiens
  chr2:315015-315204
  hypo
tagaaggacctgagatggattcggttcgcggggaacggaggtgccctagctcccgttcacgaccgcatcttaaaaagcaaagtgagccagtttttcgcaaagatgatttcactggatttccgcgtttagcgtcacgatatgggggcctccgagcgcctctctgggcttccacacaatgggccacatcac

SEQ ID NO: 353029 - DNA, 425 bp, Homo sapiens; identical to SEQ ID NO: 337456
  chr2:319186-319611
  hypo

SEQ ID NO: 353030 - DNA, 184 bp, Homo sapiens
  chr2:502892-503076
  hypo
cggtgggcaggaggcccttgccactgtggcgccaggagactgggtaaggcgcccaccacagggctggggatctcaggggcgtctgaagaggaagagctggctcggggcgctcggggtagcacagccacacatccaaccacggcgcgagaatcaaggtgccagaatcacaggacgcgggaatcac

SEQ ID NO: 353031 - DNA, 96 bp, Homo sapiens
  chr2:503145-503241
  hypo
gcgggaatcacgggacgcgggaatcacagggtgccggaatcaagggacgccagaatcacggggcgcgggaatcaagcttctccataaatgactgac

SEQ ID NO: 353032 - DNA, 70 bp, Homo sapiens
  chr2:875867-875937
  hypo
cgaggccggtttcccgtcgggctgcaaacggcagagcacgcggccctgtcccgggcaggctcggctccag

SEQ ID NO: 353033 - DNA, 147 bp, Homo sapiens; identical to SEQ ID NO: 337463
  chr2:1282750-1282897
  hypo

SEQ ID NO: 353034 - DNA, 230 bp, Homo sapiens; identical to SEQ ID NO: 337465
  chr2:1488408-1488638
  hypo

SEQ ID NO: 353035 - DNA, 237 bp, Homo sapiens; identical to SEQ ID NO: 337467
  chr2:1543326-1543563
  hypo

SEQ ID NO: 353036 - DNA, 122 bp, Homo sapiens; identical to SEQ ID NO: 347867
  chr2:1688962-1689084
  hypo

SEQ ID NO: 353037 - DNA, 86 bp, Homo sapiens; identical to SEQ ID NO: 347868
  chr2:1689123-1689209
  hypo

SEQ ID NO: 353038 - DNA, 279 bp, Homo sapiens; identical to SEQ ID NO: 337473
  chr2:1771840-1772119
  hypo

SEQ ID NO: 353039 - DNA, 559 bp, Homo sapiens; identical to SEQ ID NO: 337474
  chr2:1846385-1846944
  hypo

SEQ ID NO: 353040 - DNA, 617 bp, Homo sapiens
  chr2:2189479-2190096
  hypo
cgagtcccgcgttccttacgtgaggcggacgcagccgggcctcccagacgcccgcgttccttacgtgagggggacgcagccgggccttccgggccttccgggccttcccgagtcccgcgttccttctgtgagggggacgcagccgggcctcccagacgcccgcgttccttacgtgagggggacgcagccgggccttccgggccttcccaagtcccgcgttccttctgtgaggcggacgcagccgggcctcccagacgtccgcgttccttccttgagggggacgcagccaggccttccgggccttcccgagtcccgcgttccttccgtgaggcggacgcagccgggcctcccagacgcccgcgttccttccgtgagggggacgcagccaggccttccgggccttccggagtcccgcgttccttccgtgagggggacgcagccgggcctcccagacgcccgcgttccttacgtgagggggacgcagccaggccttccgggccttcccgagtcccgcgttccttacgtgagggggacgcagccaggccttccgggccttcccgagtcccgcgttcctttcgtgagggggacgtagccgggcctccccgagttccgcggtc

SEQ ID NO: 353041 - DNA, 33 bp, Homo sapiens
  chr2:2190245-2190278
  hypo
agggagaatctcatgcacccatcctggaattac

SEQ ID NO: 353042 - DNA, 116 bp, Homo sapiens
  chr2:2193566-2193682
  hypo
cgttctcaggaccgcacggggagaagcagggttctcaggacggcacggggagaagcagcgttctcaggaccgcacggggagaagctcgttctcaggaccgcacggggagaaggagc

SEQ ID NO: 353043 - DNA, 321 bp, Homo sapiens
  chr2:2575361-2575682
  hypo
cggcagatggcggggccagcacctgagatatcccgttcccctgctatgctggagagggccatggtatgaagtggggggcttcacactgcccccggccctgatctgggaggcccttccaggcgaaggcggctcccggcttccccttcctgctgcccctcttcctccccatgcccgcctctccccccacgcctgcctcctccctcccgctcctcgctgcctcctcgcctccaggccacagtttctgtagctgggtcttcagacttcagaagtgtccttttattgtaaagacttcagtggtttcctagaaagcgccggattttc

SEQ ID NO: 353044 - DNA, 57 bp, Homo sapiens
  chr2:2575769-2575826
  hypo
ccttcgcaggtgtcgaaccaggagtcacctccgcatctgcgcagcagcgggcccggc

SEQ ID NO: 353045 - DNA, 97 bp, Homo sapiens
  chr2:2854244-2854341
  hypo
cggggaagccttcctcagggtttctgcagaagccctgcccactgccccctgcagagagccatcctgccacagagatgcgccccagatgcgtcctgga

SEQ ID NO: 353046 - DNA, 160 bp, Homo sapiens
  chr2:2854463-2854623
  hypo
acatgaggccgcctgtgtcagccatcagggtacccaccggcgctgctcatccacctgccacccccacctgccacttactcctagcacaagcaggtgccccatgaatcccgcggaatgagttatttcaggatccgcggaacacacgtaaccagaccccccc

SEQ ID NO: 353047 - DNA, 94 bp, Homo sapiens
  chr2:3294552-3294646
  hypo
cgtcggtcatctgggtctttcgcgaatcaaccagcactaattgccatcagattgcatgtgtcagcacacacagacagcgcttccatcacggccc

SEQ ID NO: 353048 - DNA, 42 bp, Homo sapiens; identical to SEQ ID NO: 337491
  chr2:3349551-3349593
  hypo

SEQ ID NO: 353049 - DNA, 93 bp, Homo sapiens; identical to SEQ ID NO: 337493
  chr2:3372645-3372738
  hypo

SEQ ID NO: 353050 - DNA, 488 bp, Homo sapiens; identical to SEQ ID NO: 345732
  chr2:3418350-3418838
  hypo

SEQ ID NO: 353051 - DNA, 728 bp, Homo sapiens; identical to SEQ ID NO: 349448
  chr2:7005469-7006197
  hypo

SEQ ID NO: 353052 - DNA, 291 bp, Homo sapiens; identical to SEQ ID NO: 344998
  chr2:7057762-7058053
  hypo

SEQ ID NO: 353053 - DNA, 41 bp, Homo sapiens; identical to SEQ ID NO: 344999
  chr2:7058391-7058432
  hypo

SEQ ID NO: 353054 - DNA, 247 bp, Homo sapiens; identical to SEQ ID NO: 337500
  chr2:7073094-7073341
  hypo

SEQ ID NO: 353055 - DNA, 84 bp, Homo sapiens; identical to SEQ ID NO: 337504
  chr2:8647920-8648004
  hypo

SEQ ID NO: 353056 - DNA, 100 bp, Homo sapiens
  chr2:8736064-8736164
  hypo
tgcactagactccctacaggctcacagacacacaccagtgcacacactgcgcgttcctctctgctgacatctgagcgaggcaggttcacaagcagccagc

SEQ ID NO: 353057 - DNA, 210 bp, Homo sapiens; identical to SEQ ID NO: 337511
  chr2:8860527-8860737
  hypo

SEQ ID NO: 353058 - DNA, 146 bp, Homo sapiens; identical to SEQ ID NO: 345735
  chr2:8870193-8870339
  hypo

SEQ ID NO: 353059 - DNA, 57 bp, Homo sapiens; identical to SEQ ID NO: 207777
  chr2:8978298-8978355
  hypo

SEQ ID NO: 353060 - DNA, 348 bp, Homo sapiens; identical to SEQ ID NO: 337515
  chr2:9078588-9078936
  hypo

SEQ ID NO: 353061 - DNA, 90 bp, Homo sapiens; identical to SEQ ID NO: 337516
  chr2:9135660-9135750
  hypo

SEQ ID NO: 353062 - DNA, 783 bp, Homo sapiens
  chr2:9236530-9237313
  hypo
cggcccgcagagaggcagggttttcccttggtggcacaggcagacacatacccggccccacagtggtctcctccatctggggtcccatcagagccatcgctccctcctggagttccgctcagtggcctgccccagggggcccccgcacagccacagggctgtgggaagggaatggtccaggcaggccggtcaggccggctcccccagatcccttggctccccccaggagctggcttctcactcctcacagacaacaagggcgctatgagatgtcatcagagatgccaccaaacaccacaggcaagggacccgtcactcagcccgggctgctgaacgtgctgaggcggctctgatatgcccagaaagtgcccaagcaggtgacacttgggccaggacaggcacacggagatgacctcccactgcctccccaaggatgaccctgctactctgactgagagggtcttcaggtcaagggcggggagggtggcaacagacaccaaagccgagggctctgagcaggctcagaagccgggtgtggagcgggagggtgggggcgcagtggcaggggctgctgcagggccagctgtgccagcaggggtgggggcaggggctcagcggagccggagtgccaggagctaaagaccacccacgccctcttctcggagggcgagcaggccagggagagcgacttaagccacatgaactttcccattatccctgaaggagcggggttcttgttggtattctacctgcacagctgcgtgagacgcagatatggaaaac

SEQ ID NO: 353063 - DNA, 234 bp, Homo sapiens; identical to SEQ ID NO: 337519
  chr2:9245045-9245279
  hypo

SEQ ID NO: 353064 - DNA, 372 bp, Homo sapiens; identical to SEQ ID NO: 337522
  chr2:9609477-9609849
  hypo

SEQ ID NO: 353065 - DNA, 123 bp, Homo sapiens; identical to SEQ ID NO: 337524
  chr2:10047588-10047711
  hypo

SEQ ID NO: 353066 - DNA, 300 bp, Homo sapiens; identical to SEQ ID NO: 207797
  chr2:10150735-10151035
  hypo

SEQ ID NO: 353067 - DNA, 166 bp, Homo sapiens; identical to SEQ ID NO: 331200
  chr2:10152421-10152587
  hypo

SEQ ID NO: 353068 - DNA, 90 bp, Homo sapiens
  chr2:10152958-10153048
  hypo
cgtgtgtatgggcaggtcaggtggacaggactgaatatgggggggtcaggtgggcaggcgtgcgtatggtcgggtcatgtgggcaggcgt

SEQ ID NO: 353069 - DNA, 326 bp, Homo sapiens
  chr2:10153562-10153888
  hypo
cgtttgtatgggcgggtcaggtgggcaggagttcttatggtcgggtcaggtgggcaggcgtgcatatggtcggtttaggtggacaggcgtgtgtatgggtgtgcgtatggacgagtcaggtgggcaggcatcctacaggcgggtcaggtgggcaggcgtttgtatgggtgggtcaggtgggcaggtgttcttatggtcgggtcaggtgggcagacgtgcatatggtcgggtcaggtggacaggcatgtgtatgggtgtgcgtatggacgagtcaggtggacaggcgtgcgtatgggagagtcaggtggacaggcatgtgtatgggc

SEQ ID NO: 353070 - DNA, 89 bp, Homo sapiens; identical to SEQ ID NO: 207804
  chr2:10155175-10155264
  hypo

SEQ ID NO: 353071 - DNA, 58 bp, Homo sapiens; identical to SEQ ID NO: 207806
  chr2:10156255-10156313
  hypo

SEQ ID NO: 353072 - DNA, 614 bp, Homo sapiens; identical to SEQ ID NO: 337537
  chr2:10334473-10335087
  hypo

SEQ ID NO: 353073 - DNA, 178 bp, Homo sapiens; identical to SEQ ID NO: 345000
  chr2:10588876-10589054
  hypo

SEQ ID NO: 353074 - DNA, 117 bp, Homo sapiens; identical to SEQ ID NO: 198078
  chr2:10589055-10589172
  hypo

SEQ ID NO: 353075 - DNA, 55 bp, Homo sapiens; identical to SEQ ID NO: 347881
  chr2:10600813-10600868
  hypo

SEQ ID NO: 353076 - DNA, 291 bp, Homo sapiens; identical to SEQ ID NO: 337546
  chr2:10666473-10666764
  hypo

SEQ ID NO: 353077 - DNA, 200 bp, Homo sapiens
  chr2:10742503-10742703
  hypo
cgactgtcgaccatttcccatgatccaaacagagcctaagatacggccaaaggtcagtaaggaatagggattagcaaagcccggatactccaaaaatggaaaacccatttaaaaatgctatcaggtttctagtggaggtgacaatatcaatcattctagcattatgtcccacagtacaattaccgcagaggtcataatgc

SEQ ID NO: 353078 - DNA, 255 bp, Homo sapiens; identical to SEQ ID NO: 198088
  chr2:14774684-14774939
  hypo

SEQ ID NO: 353079 - DNA, 426 bp, Homo sapiens; identical to SEQ ID NO: 337553
  chr2:15307089-15307515
  hypo

SEQ ID NO: 353080 - DNA, 101 bp, Homo sapiens
  chr2:15783084-15783185
  hypo
cgtctttctgcccgtcccccgcctcccgactctcacctccttggaggcttacggggctctgtataagtttcccacaaaaaatccgtgctgctgggtggaac

SEQ ID NO: 353081 - DNA, 252 bp, Homo sapiens; identical to SEQ ID NO: 337569
  chr2:25075413-25075665
  hypo

SEQ ID NO: 353082 - DNA, 93 bp, Homo sapiens; identical to SEQ ID NO: 331235
  chr2:25464444-25464537
  hypo

SEQ ID NO: 353083 - DNA, 116 bp, Homo sapiens; identical to SEQ ID NO: 337575
  chr2:26524687-26524803
  hypo

SEQ ID NO: 353084 - DNA, 35 bp, Homo sapiens; identical to SEQ ID NO: 337576
  chr2:26688538-26688573
  hypo

SEQ ID NO: 353085 - DNA, 446 bp, Homo sapiens; identical to SEQ ID NO: 337577
  chr2:26986225-26986671
  hypo

SEQ ID NO: 353086 - DNA, 250 bp, Homo sapiens; identical to SEQ ID NO: 198140
  chr2:27308893-27309143
  hypo

SEQ ID NO: 353087 - DNA, 111 bp, Homo sapiens; identical to SEQ ID NO: 1396
  chr2:27309206-27309317
  hypo

SEQ ID NO: 353088 - DNA, 115 bp, Homo sapiens; identical to SEQ ID NO: 345738
  chr2:27433190-27433305
  hypo

SEQ ID NO: 353089 - DNA, 58 bp, Homo sapiens; identical to SEQ ID NO: 346425
  chr2:27938267-27938325
  hypo

SEQ ID NO: 353090 - DNA, 51 bp, Homo sapiens; identical to SEQ ID NO: 349481
  chr2:29033285-29033336
  hypo

SEQ ID NO: 353091 - DNA, 37 bp, Homo sapiens; identical to SEQ ID NO: 345005
  chr2:30453530-30453567
  hypo

SEQ ID NO: 353092 - DNA, 68 bp, Homo sapiens; identical to SEQ ID NO: 198154
  chr2:31361021-31361089
  hypo

SEQ ID NO: 353093 - DNA, 178 bp, Homo sapiens; identical to SEQ ID NO: 198155
  chr2:31361118-31361296
  hypo

SEQ ID NO: 353094 - DNA, 70 bp, Homo sapiens; identical to SEQ ID NO: 346429
  chr2:31361690-31361760
  hypo

SEQ ID NO: 353095 - DNA, 75 bp, Homo sapiens; identical to SEQ ID NO: 337592
  chr2:31550134-31550209
  hypo

SEQ ID NO: 353096 - DNA, 34 bp, Homo sapiens; identical to SEQ ID NO: 337593
  chr2:32367753-32367787
  hypo

SEQ ID NO: 353097 - DNA, 204 bp, Homo sapiens
  chr2:38742658-38742862
  hypo
cgcaggcgcacacctccacttgttatataaactgtttgtgtaagttcatacttgacttggagccacagttgtctgtaaaaggtataactgccctgttaacactgcgcaccagacacatggctctggggctcggctcgcctgaaatggcttgtcatggtaggcgcgcaggcgcccagagaaagagcgagcgagtcagagctgtcc

SEQ ID NO: 353098 - DNA, 226 bp, Homo sapiens; identical to SEQ ID NO: 345742
  chr2:39186687-39186913
  hypo

SEQ ID NO: 353099 - DNA, 395 bp, Homo sapiens; identical to SEQ ID NO: 345010
  chr2:43452443-43452838
  hypo

SEQ ID NO: 353100 - DNA, 686 bp, Homo sapiens; identical to SEQ ID NO: 337611
  chr2:44553759-44554445
  hypo

SEQ ID NO: 353101 - DNA, 73 bp, Homo sapiens; identical to SEQ ID NO: 331292
  chr2:47656947-47657020
  hypo

SEQ ID NO: 353102 - DNA, 41 bp, Homo sapiens; identical to SEQ ID NO: 345744
  chr2:55289053-55289094
  hypo

SEQ ID NO: 353103 - DNA, 373 bp, Homo sapiens; identical to SEQ ID NO: 349503
  chr2:60784505-60784878
  hypo

SEQ ID NO: 353104 - DNA, 128 bp, Homo sapiens; identical to SEQ ID NO: 337625
  chr2:61074853-61074981
  hypo

SEQ ID NO: 353105 - DNA, 66 bp, Homo sapiens; identical to SEQ ID NO: 337628
  chr2:62116634-62116700
  hypo

SEQ ID NO: 353106 - DNA, 43 bp, Homo sapiens
  chr2:62497692-62497735
  hypo
gacagagcgagactccgtctcaaaaaaaaaaagaaaagaaata

SEQ ID NO: 353107 - DNA, 311 bp, Homo sapiens
  chr2:68672378-68672689
  hypo
cgaaaacccacaccaaaatcatcaccagcgtgcacatctgttcccttgttgagatttaatcactgaagagcaggtggaagccgtcctgaacgaattaccccatgtacctagaagcctcttcccaaatcaagcagtgatcacctcactcataaacagagcacgcacccaaaggttttgcttgatgtattttgagactagtttcacgtgttgctgctaaacgtttccagggagttgcaaaagttaatccttatggatcggtgattgaaatacagtgacatccctgctgctctgcagtgtgcgcaaaggtcaaa

SEQ ID NO: 353108 - DNA, 122 bp, Homo sapiens; identical to SEQ ID NO: 337639
  chr2:69928507-69928629
  hypo

SEQ ID NO: 353109 - DNA, 205 bp, Homo sapiens; identical to SEQ ID NO: 337640
  chr2:70165952-70166157
  hypo

SEQ ID NO: 353110 - DNA, 224 bp, Homo sapiens; identical to SEQ ID NO: 337641
  chr2:70224820-70225044
  hypo

SEQ ID NO: 353111 - DNA, 317 bp, Homo sapiens; identical to SEQ ID NO: 346441
  chr2:70351179-70351496
  hypo

SEQ ID NO: 353112 - DNA, 280 bp, Homo sapiens; identical to SEQ ID NO: 331330
  chr2:70369049-70369329
  hypo

SEQ ID NO: 353113 - DNA, 125 bp, Homo sapiens; identical to SEQ ID NO: 337645
  chr2:72310184-72310309
  hypo

SEQ ID NO: 353114 - DNA, 127 bp, Homo sapiens; identical to SEQ ID NO: 345014
  chr2:72374248-72374375
  hypo

SEQ ID NO: 353115 - DNA, 259 bp, Homo sapiens; identical to SEQ ID NO: 345015
  chr2:72374932-72375191
  hypo

SEQ ID NO: 353116 - DNA, 135 bp, Homo sapiens; identical to SEQ ID NO: 349527
  chr2:73520107-73520242
  hypo

SEQ ID NO: 353117 - DNA, 218 bp, Homo sapiens; identical to SEQ ID NO: 337654
  chr2:74327579-74327797
  hypo

SEQ ID NO: 353118 - DNA, 275 bp, Homo sapiens; identical to SEQ ID NO: 345016
  chr2:74425444-74425719
  hypo

SEQ ID NO: 353119 - DNA, 395 bp, Homo sapiens; identical to SEQ ID NO: 198298
  chr2:74425790-74426185
  hypo

SEQ ID NO: 353120 - DNA, 228 bp, Homo sapiens; identical to SEQ ID NO: 345018
  chr2:74426214-74426442
  hypo

SEQ ID NO: 353121 - DNA, 235 bp, Homo sapiens; identical to SEQ ID NO: 345022
  chr2:74781700-74781935
  hypo

SEQ ID NO: 353122 - DNA, 1432 bp, Homo sapiens; identical to SEQ ID NO: 345024
  chr2:75060920-75062352
  hypo

SEQ ID NO: 353123 - DNA, 61 bp, Homo sapiens; identical to SEQ ID NO: 347902
  chr2:85280346-85280407
  hypo

SEQ ID NO: 353124 - DNA, 104 bp, Homo sapiens; identical to SEQ ID NO: 337662
  chr2:85356682-85356786
  hypo

SEQ ID NO: 353125 - DNA, 104 bp, Homo sapiens; identical to SEQ ID NO: 337664
  chr2:85776352-85776456
  hypo

SEQ ID NO: 353126 - DNA, 74 bp, Homo sapiens; identical to SEQ ID NO: 337665
  chr2:85819578-85819652
  hypo

SEQ ID NO: 353127 - DNA, 342 bp, Homo sapiens
  chr2:85890530-85890872
  hypo
cgctgctgttcccggcctgggtggtcacggacatgcagaggtggcactcagagtctcgcggcagccattctcctgtcggcgaccctggagatgtgagcattagggggaaagcaggcaaggccaccctacagaggtgtttggtttctgtcctccttggtgcattgcagtgggaccacagagggagagggtcatgcagtggcagggtagggggaggaggagagcaggcattgggctaaggagtgggcagtgggctcacttgggccagcgctgtcatccatggagcaccggaggacgaggcggcagaccagctggggcagcatgcggcccagcagcgtgtcgagc

SEQ ID NO: 353128 - DNA, 81 bp, Homo sapiens
  chr2:85890902-85890983
  hypo
tggcagatgccgcccgccaccagaggtaccacgcggcacacctgggccactgccacagctagcgcaccctggggcgggggc

SEQ ID NO: 353129 - DNA, 163 bp, Homo sapiens; identical to SEQ ID NO: 349538
  chr2:87018396-87018559
  hypo

SEQ ID NO: 353130 - DNA, 86 bp, Homo sapiens; identical to SEQ ID NO: 337671
  chr2:88591078-88591164
  hypo

SEQ ID NO: 353131 - DNA, 58 bp, Homo sapiens
  chr2:95941852-95941910
  hypo
tcctgctgctgaccaccctcttgctgctgtaaggcgctgcccagggcccgggtagggc

SEQ ID NO: 353132 - DNA, 578 bp, Homo sapiens; identical to SEQ ID NO: 280006
  chr2:96011863-96012441
  hypo

SEQ ID NO: 353133 - DNA, 48 bp, Homo sapiens; identical to SEQ ID NO: 346460
  chr2:96012683-96012731
  hypo

SEQ ID NO: 353134 - DNA, 42 bp, Homo sapiens; identical to SEQ ID NO: 346464
  chr2:97203334-97203376
  hypo

SEQ ID NO: 353135 - DNA, 39 bp, Homo sapiens; identical to SEQ ID NO: 346465
  chr2:97203545-97203584
  hypo

SEQ ID NO: 353136 - DNA, 262 bp, Homo sapiens
  chr2:97435378-97435640
  hypo
cgactccttgatggagacgaagagaaccaagggggcacgctattcgggagcctccttggagggtcagatggggtgaagaccatgcacagactgtgggatgggaccttaggctgtggggtgcccagcgagagcagcctcggacaagtggtgcccgaaggcagctttgcaccggttctccgtcagccctgcctggtaatagcctcaatatggtgatttgatctcaagaagctgcctgggggcaggtgtatctgagagtgacagg

SEQ ID NO: 353137 - DNA, 436 bp, Homo sapiens
  chr2:97544651-97545087
  hypo
cgccttgctgacccgaggaggcagatggagagatgggagccgaaggttttggctgagcgtctgcacatctcgcctccatcctcattcctgccaactgcacactctcagcagtgaaaacaggacgcaggcctgctccatctggcccgagaacaatttgatcttgaggcacccctggactcttggtacccattcacttatgggatacgtgcttgctgtttagagaaaccgagccatggggagcatcccagggcgtgaggctccagaagggatgcagcctgccctggattcccaactgctgcccgcaggtgcgcccctccactcagagggccctgctgccttgtcctctcggctctctcttcatgtctaggatcaggaggtggcagatgaccagccccgaggacgagtaggggtgggagaggcgggctctagaaatgcc

SEQ ID NO: 353138 - DNA, 200 bp, Homo sapiens; identical to SEQ ID NO: 337684
  chr2:97545395-97545595
  hypo

SEQ ID NO: 353139 - DNA, 305 bp, Homo sapiens; identical to SEQ ID NO: 337685
  chr2:97576055-97576360
  hypo

SEQ ID NO: 353140 - DNA, 316 bp, Homo sapiens
  chr2:98377004-98377320
  hypo
cgacttgagaagccttccgtctttctagcggttagtggtggtctaccgtacctgtctgagccatcgctgtcaacaggagcgtgtgaaatgccaaggctgctggagaaacctgttttgtttgaagaaactttagcaaagccattcccacctgtaacaatggacgttcaatcaatggaaggcacattaggacagaggtcattccaccaggcctggcgcctggcgtggcaggtctctgaagcaaaggcactgacctgggctcttgtcgtagccagccgtgactgcagcaaaagtggggttgccgttcttgcccgggagc

SEQ ID NO: 353141 - DNA, 572 bp, Homo sapiens; identical to SEQ ID NO: 337691
  chr2:98408820-98409392
  hypo

SEQ ID NO: 353142 - DNA, 163 bp, Homo sapiens; identical to SEQ ID NO: 337692
  chr2:99097200-99097363
  hypo

SEQ ID NO: 353143 - DNA, 146 bp, Homo sapiens; identical to SEQ ID NO: 345030
  chr2:101033445-101033591
  hypo

SEQ ID NO: 353144 - DNA, 134 bp, Homo sapiens; identical to SEQ ID NO: 337696
  chr2:101696603-101696737
  hypo

SEQ ID NO: 353145 - DNA, 143 bp, Homo sapiens; identical to SEQ ID NO: 337698
  chr2:102683385-102683528
  hypo

SEQ ID NO: 353146 - DNA, 519 bp, Homo sapiens; identical to SEQ ID NO: 331387
  chr2:102758965-102759484
  hypo

SEQ ID NO: 353147 - DNA, 96 bp, Homo sapiens; identical to SEQ ID NO: 349556
  chr2:105468467-105468563
  hypo

SEQ ID NO: 353148 - DNA, 144 bp, Homo sapiens; identical to SEQ ID NO: 345031
  chr2:105471069-105471213
  hypo

SEQ ID NO: 353149 - DNA, 85 bp, Homo sapiens
  chr2:106730126-106730211
  hypo
cgtatctaatgtttgatccactgcagaacaaacgtgcactttctgggcacctgagggcagggagcctggggcgtgaggacctggg

SEQ ID NO: 353150 - DNA, 160 bp, Homo sapiens
  chr2:106730256-106730416
  hypo
gctcactgcccaggcctgccactgactcggtcgcagcaagactgggaaagaagcagtactcacctgaccgcctcagtgttctaagactgaagcacaggcccagtggctgtatttggtgccagttatcactaccagctgaaacagttcttttttcaatttc

SEQ ID NO: 353151 - DNA, 59 bp, Homo sapiens
  chr2:106959841-106959900
  hypo
cgtggtccccacggaagcggtgagaacgcacctggccggctcagccacacggcacggtg

SEQ ID NO: 353152 - DNA, 156 bp, Homo sapiens; identical to SEQ ID NO: 337713
  chr2:108085842-108085998
  hypo

SEQ ID NO: 353153 - DNA, 73 bp, Homo sapiens
  chr2:109260013-109260086
  hypo
cggcctttagggcagacaccgagctagccagttttttttttcataccccagtggtagcgtttgagtttttttc

SEQ ID NO: 353154 - DNA, 65 bp, Homo sapiens; identical to SEQ ID NO: 349561
  chr2:109647974-109648039
  hypo

SEQ ID NO: 353155 - DNA, 205 bp, Homo sapiens; identical to SEQ ID NO: 337718
  chr2:110011299-110011504
  hypo

SEQ ID NO: 353156 - DNA, 186 bp, Homo sapiens
  chr2:110015134-110015320
  hypo
cggcgctgtggccagcgtggccccaagtcccactttaagcagctcaggggcggtcagtgcctttcagcggcgtgtggatggcaagaagaacaccaagaaacgccactccttcaccgcgctcagtgtgacgcacagatcctcccaggctgccagccacaggcattccatggaaattagtgctccagt

SEQ ID NO: 353157 - DNA, 112 bp, Homo sapiens
  chr2:110015364-110015476
  hypo
accttgctcatctgtcgtgcgctgctcccacccaggtaacatcccgcgggccagggcaggcatccctgggttctctggggttctatcctcagctccgtgttcagtgtccccc

SEQ ID NO: 353158 - DNA, 452 bp, Homo sapiens; identical to SEQ ID NO: 337722
  chr2:110021654-110022106
  hypo

SEQ ID NO: 353159 - DNA, 73 bp, Homo sapiens; identical to SEQ ID NO: 337723
  chr2:110022456-110022529
  hypo

SEQ ID NO: 353160 - DNA, 124 bp, Homo sapiens; identical to SEQ ID NO: 337724
  chr2:110028510-110028634
  hypo

SEQ ID NO: 353161 - DNA, 70 bp, Homo sapiens; identical to SEQ ID NO: 349569
  chr2:112656507-112656577
  hypo

SEQ ID NO: 353162 - DNA, 32 bp, Homo sapiens; identical to SEQ ID NO: 280126
  chr2:112657092-112657124
  hypo

SEQ ID NO: 353163 - DNA, 208 bp, Homo sapiens
  chr2:113103038-113103246
  hypo
cgcccgttttcgaatccatttggcacctccttcgcctaagaatttgcttttccaggcgtcccctttctgttccgtctctgtactgcactaacttcacctatacacaggtctgtatcctcctgttaaaaccactgaccaggactgccgcttctgggtgcgatacagtaacaggcattggattcctcctcttccctcaaacaactagaaa

SEQ ID NO: 353164 - DNA, 89 bp, Homo sapiens
  chr2:113103431-113103520
  hypo
aaatggagcagaggtggagatgagaggagcaagggcagctgcgtgggagcactgccgaggagagcgctggcaggcacagaactccagac

SEQ ID NO: 353165 - DNA, 682 bp, Homo sapiens; identical to SEQ ID NO: 337730
  chr2:114736479-114737161
  hypo

SEQ ID NO: 353166 - DNA, 143 bp, Homo sapiens; identical to SEQ ID NO: 345757
  chr2:120005222-120005365
  hypo

SEQ ID NO: 353167 - DNA, 330 bp, Homo sapiens
  chr2:120974105-120974435
  hypo
ccgcctagcacctgcgcaggtgcagtctccacctcaagccagctgggccttatgatagtcaaaattggtattaatcagccacacctagcattccttcacatctgcatccacgccttttaaaaagctatattatttatatgttcaggctccattatccataacctcaatgatgaacaagatatccgtaaaataggaggactattcaagactttacccttcacttcctcttcccttattattggcagccttgcacctacagatatgcctttcctcacaggcttttactctaaagaccttatcatcgaaaccgcaaatacatcatacaccaac

SEQ ID NO: 353168 - DNA, 223 bp, Homo sapiens; identical to SEQ ID NO: 337741
  chr2:121108610-121108833
  hypo

SEQ ID NO: 353169 - DNA, 248 bp, Homo sapiens; identical to SEQ ID NO: 337747
  chr2:122094622-122094870
  hypo

SEQ ID NO: 353170 - DNA, 381 bp, Homo sapiens; identical to SEQ ID NO: 280195
  chr2:127413347-127413728
  hypo

SEQ ID NO: 353171 - DNA, 255 bp, Homo sapiens; identical to SEQ ID NO: 349581
  chr2:127414108-127414363
  hypo

SEQ ID NO: 353172 - DNA, 97 bp, Homo sapiens
  chr2:127428888-127428985
  hypo
cggagggagagccagagcaggtgcaagcatgcgaggcaggcttccctgagcccgacagccagggacaaccagctaacacccaagttcagaaaacagt

SEQ ID NO: 353173 - DNA, 244 bp, Homo sapiens
  chr2:127435291-127435535
  hypo
cacgagggtccgggaggggtgcttggagttgggacccagagcaccaggacttactgtcaaatctctctggcaccaaaacgcatgctccctatgccacctatcaggatgcacccttaaagcacttttaagatgctttttggaaagagccatttgttggtgtgcatttgtcttcaccactgccccaaacatagctgtccaatattcaggtgaaaatgtcccccatcggccgggtgcagcggctcac

SEQ ID NO: 353174 - DNA, 107 bp, Homo sapiens; identical to SEQ ID NO: 300156
  chr2:127438526-127438633
  hypo

SEQ ID NO: 353175 - DNA, 197 bp, Homo sapiens; identical to SEQ ID NO: 337762
  chr2:128583666-128583863
  hypo

SEQ ID NO: 353176 - DNA, 110 bp, Homo sapiens
  chr2:131487004-131487114
  hypo
tctcagacctggcctacattctcctccacatgctcatctcctccagcagcctgggtggctgggagctgggccgcatggcctgtggcattctcactgatgctgtcttcgcc

SEQ ID NO: 353177 - DNA, 174 bp, Homo sapiens; identical to SEQ ID NO: 337769
  chr2:132269055-132269229
  hypo

SEQ ID NO: 353178 - DNA, 268 bp, Homo sapiens; identical to SEQ ID NO: 337770
  chr2:132270135-132270403
  hypo

SEQ ID NO: 353179 - DNA, 295 bp, Homo sapiens; identical to SEQ ID NO: 337771
  chr2:132301071-132301366
  hypo

SEQ ID NO: 353180 - DNA, 74 bp, Homo sapiens; identical to SEQ ID NO: 337773
  chr2:135293582-135293656
  hypo

SEQ ID NO: 353181 - DNA, 353 bp, Homo sapiens; identical to SEQ ID NO: 198445
  chr2:135476396-135476749
  hypo

SEQ ID NO: 353182 - DNA, 912 bp, Homo sapiens; identical to SEQ ID NO: 198448
  chr2:136874020-136874932
  hypo

SEQ ID NO: 353183 - DNA, 482 bp, Homo sapiens; identical to SEQ ID NO: 198449
  chr2:136875399-136875881
  hypo

SEQ ID NO: 353184 - DNA, 50 bp, Homo sapiens; identical to SEQ ID NO: 345044
  chr2:149632592-149632642
  hypo

SEQ ID NO: 353185 - DNA, 170 bp, Homo sapiens; identical to SEQ ID NO: 337786
  chr2:152295736-152295906
  hypo

SEQ ID NO: 353186 - DNA, 461 bp, Homo sapiens; identical to SEQ ID NO: 349603
  chr2:157292161-157292622
  hypo

SEQ ID NO: 353187 - DNA, 1811 bp, Homo sapiens; identical to SEQ ID NO: 331475
  chr2:159313069-159314880
  hypo

SEQ ID NO: 353188 - DNA, 125 bp, Homo sapiens; identical to SEQ ID NO: 337792
  chr2:159528162-159528287
  hypo

SEQ ID NO: 353189 - DNA, 262 bp, Homo sapiens; identical to SEQ ID NO: 198502
  chr2:162930659-162930921
  hypo

SEQ ID NO: 353190 - DNA, 37 bp, Homo sapiens; identical to SEQ ID NO: 198509
  chr2:166650106-166650143
  hypo

SEQ ID NO: 353191 - DNA, 723 bp, Homo sapiens; identical to SEQ ID NO: 345049
  chr2:166650508-166651231
  hypo

SEQ ID NO: 353192 - DNA, 100 bp, Homo sapiens; identical to SEQ ID NO: 349612
  chr2:168148871-168148971
  hypo

SEQ ID NO: 353193 - DNA, 239 bp, Homo sapiens; identical to SEQ ID NO: 198512
  chr2:168149264-168149503
  hypo

SEQ ID NO: 353194 - DNA, 220 bp, Homo sapiens; identical to SEQ ID NO: 198513
  chr2:168149556-168149776
  hypo

SEQ ID NO: 353195 - DNA, 401 bp, Homo sapiens; identical to SEQ ID NO: 349615
  chr2:169312417-169312818
  hypo

SEQ ID NO: 353196 - DNA, 904 bp, Homo sapiens; identical to SEQ ID NO: 349616
  chr2:169312881-169313785
  hypo

SEQ ID NO: 353197 - DNA, 82 bp, Homo sapiens
  chr2:170282893-170282975
  hypo
cgaacctgaagttgccagtgtgaagcccgtgagtgtgcagtgaaccgcagagaaagcttcttggtgagttgagtttgtggag

SEQ ID NO: 353198 - DNA, 127 bp, Homo sapiens; identical to SEQ ID NO: 337805
  chr2:170569589-170569716
  hypo

SEQ ID NO: 353199 - DNA, 133 bp, Homo sapiens; identical to SEQ ID NO: 337806
  chr2:171730981-171731114
  hypo

SEQ ID NO: 353200 - DNA, 98 bp, Homo sapiens; identical to SEQ ID NO: 337807
  chr2:171815760-171815858
  hypo

SEQ ID NO: 353201 - DNA, 632 bp, Homo sapiens
  chr2:171822567-171823199
  hypo
cggcgactccaccccagtcagcgagaagcctgtttctgcggctgtggatgccaatgcttctgagtcaccttaactttgaaccattctttggaattggcgtggtatatttaaccacgggagcgtgtctggaaacgcaaactatcattaatttcatactagtttgtaccgtatctgtaggcatcctgtaaataattccaaggggaaaactaaacgaggacgtgggttgtatcctgccaggttgagtggggctcacacgctagggtgagatgtcagaaagcgcttgtattttaaacaaccaaaaagaattgtaagggtggcttgctgccaggcttgcactgccgttcctgggggtgtgcatcttcgggaaaggtggtggcggggcgtccactaggtttcctgtcccctgctgctccttccgtaagaaaatgaaatattctatgcctaatactcacacgcaacatttcttgtactttgtaagtcgtttgcgagaatgcagaccacctcactaaactgtaaacggtaaagagatttttacttttggtctccgtgagtcgcatctctactaaggtttacacaggaattccacctgaagacttgtgttaaagttctacagcgcgcactgttaactgaac

SEQ ID NO: 353202 - DNA, 794 bp, Homo sapiens; identical to SEQ ID NO: 331546
  chr2:178257227-178258021
  hypo

SEQ ID NO: 353203 - DNA, 90 bp, Homo sapiens; identical to SEQ ID NO: 345055
  chr2:183902312-183902402
  hypo

SEQ ID NO: 353204 - DNA, 568 bp, Homo sapiens; identical to SEQ ID NO: 198600
  chr2:183902442-183903010
  hypo

SEQ ID NO: 353205 - DNA, 587 bp, Homo sapiens; identical to SEQ ID NO: 346507
  chr2:183903037-183903624
  hypo

SEQ ID NO: 353206 - DNA, 86 bp, Homo sapiens; identical to SEQ ID NO: 345058
  chr2:191044988-191045074
  hypo

SEQ ID NO: 353207 - DNA, 513 bp, Homo sapiens; identical to SEQ ID NO: 345059
  chr2:191045505-191046018
  hypo

SEQ ID NO: 353208 - DNA, 204 bp, Homo sapiens
  chr2:191796737-191796941
  hypo
cgttttaatatttgttcgtcctaaattgaagtttaacttcttgcatactgtgtagatggatatgtaaatggaaaaggattatcatattagtgagagaccgtatgaagcctcaaaagttttataagtcactgtagatgaaatatttttttccaccgtgtttaatgcaatattcctaataatcttacggtcctatttgtttgttac

SEQ ID NO: 353209 - DNA, 447 bp, Homo sapiens; identical to SEQ ID NO: 345060
  chr2:192109730-192110177
  hypo

SEQ ID NO: 353210 - DNA, 253 bp, Homo sapiens; identical to SEQ ID NO: 198625
  chr2:192110303-192110556
  hypo

SEQ ID NO: 353211 - DNA, 439 bp, Homo sapiens; identical to SEQ ID NO: 345062
  chr2:192110584-192111023
  hypo

SEQ ID NO: 353212 - DNA, 86 bp, Homo sapiens; identical to SEQ ID NO: 337831
  chr2:198276053-198276139
  hypo

SEQ ID NO: 353213 - DNA, 897 bp, Homo sapiens; identical to SEQ ID NO: 331573
  chr2:200320451-200321348
  hypo

SEQ ID NO: 353214 - DNA, 239 bp, Homo sapiens; identical to SEQ ID NO: 198669
  chr2:207308960-207309199
  hypo

SEQ ID NO: 353215 - DNA, 187 bp, Homo sapiens
  chr2:209224972-209225159
  hypo
cgccccacttgttctcccgccttctgcgtgagcagcccctacggggtctcctactggtccctaggaactttcgccacacccggagcggcggcctccccgagcccctcggggccccttccctggcagctgggatgagggcagcgtgctcctcgcaggttacttggtcctgaggtcctccctcaggcgc

SEQ ID NO: 353216 - DNA, 479 bp, Homo sapiens
  chr2:209225393-209225872
  hypo
ggctgccttctgtggtgaaggtgggggccagggttgcaaggccctcctcttgttggcatcagccaggcacgcagtgctgtcgtggctgacccaggccgtgaggcacccgctgactgagaagccaacctgagcacccagccgcacctaccgctggcctcagacatcagcaccccaaagggtatgttggagtcccatggtggaggtgccggccgctcctccacgcacttgatgtataccgaggatcccatgcttgacgtcgcagggggcattagccaggagcacgttgctgggatgccagtccaggctgaggatggtggagccaatgggcttcttgatgtacttgcacacccaccagttattctcccgctggaaataacagatggcgatgacacacagctgccgcccacagcaaacttgtcctgtgggcccagcacacacagcaggcagtgggtgcgggcttaccctcctggcccgtcagc

SEQ ID NO: 353217 - DNA, 410 bp, Homo sapiens; identical to SEQ ID NO: 280629
  chr2:217559556-217559966
  hypo

SEQ ID NO: 353218 - DNA, 180 bp, Homo sapiens; identical to SEQ ID NO: 337849
  chr2:217674486-217674666
  hypo

SEQ ID NO: 353219 - DNA, 84 bp, Homo sapiens
  chr2:217674965-217675049
  hypo
cgacgctctggtgtgggcagcccgagaggtgatggggtttcagtaaatcatggcggggagttcaggccaccgccggagtccagt

SEQ ID NO: 353220 - DNA, 93 bp, Homo sapiens; identical to SEQ ID NO: 337852
  chr2:218678441-218678534
  hypo

SEQ ID NO: 353221 - DNA, 839 bp, Homo sapiens; identical to SEQ ID NO: 337853
  chr2:218682490-218683329
  hypo

SEQ ID NO: 353222 - DNA, 138 bp, Homo sapiens; identical to SEQ ID NO: 337854
  chr2:218686231-218686369
  hypo

SEQ ID NO: 353223 - DNA, 267 bp, Homo sapiens; identical to SEQ ID NO: 337855
  chr2:218694781-218695048
  hypo

SEQ ID NO: 353224 - DNA, 771 bp, Homo sapiens; identical to SEQ ID NO: 345777
  chr2:218712965-218713736
  hypo

SEQ ID NO: 353225 - DNA, 302 bp, Homo sapiens; identical to SEQ ID NO: 337861
  chr2:219145053-219145355
  hypo

SEQ ID NO: 353226 - DNA, 594 bp, Homo sapiens; identical to SEQ ID NO: 346517
  chr2:219757371-219757965
  hypo

SEQ ID NO: 353227 - DNA, 443 bp, Homo sapiens; identical to SEQ ID NO: 349681
  chr2:219845954-219846397
  hypo

SEQ ID NO: 353228 - DNA, 360 bp, Homo sapiens; identical to SEQ ID NO: 337877
  chr2:220427099-220427459
  hypo

SEQ ID NO: 353229 - DNA, 406 bp, Homo sapiens; identical to SEQ ID NO: 198725
  chr2:222436961-222437367
  hypo

SEQ ID NO: 353230 - DNA, 806 bp, Homo sapiens; identical to SEQ ID NO: 346522
  chr2:222437421-222438227
  hypo

SEQ ID NO: 353231 - DNA, 94 bp, Homo sapiens; identical to SEQ ID NO: 349691
  chr2:223185036-223185130
  hypo

SEQ ID NO: 353232 - DNA, 236 bp, Homo sapiens; identical to SEQ ID NO: 198740
  chr2:225906168-225906404
  hypo

SEQ ID NO: 353233 - DNA, 337 bp, Homo sapiens; identical to SEQ ID NO: 337887
  chr2:227841945-227842282
  hypo

SEQ ID NO: 353234 - DNA, 131 bp, Homo sapiens; identical to SEQ ID NO: 337890
  chr2:231676894-231677025
  hypo

SEQ ID NO: 353235 - DNA, 54 bp, Homo sapiens; identical to SEQ ID NO: 337892
  chr2:231977489-231977543
  hypo

SEQ ID NO: 353236 - DNA, 104 bp, Homo sapiens; identical to SEQ ID NO: 280744
  chr2:232479181-232479285
  hypo

SEQ ID NO: 353237 - DNA, 227 bp, Homo sapiens; identical to SEQ ID NO: 349701
  chr2:232479454-232479681
  hypo

SEQ ID NO: 353238 - DNA, 623 bp, Homo sapiens; identical to SEQ ID NO: 346527
  chr2:232790030-232790653
  hypo

SEQ ID NO: 353239 - DNA, 98 bp, Homo sapiens
  chr2:233198455-233198553
  hypo
cgctgccgacggtgaggctgtgggtggtgccagccttccaggcctggctgggcagctctgggcttgtcaggctctgacccatcccgtcccgcagatgg

SEQ ID NO: 353240 - DNA, 129 bp, Homo sapiens
  chr2:233198583-233198712
  hypo
acccagcgcagttccggcactacgcgctcaatgtgcccctgtacacacacttcacctcgcccatccgccgctttgccgacgtcctggtgcaccgcctcctggctgccgcgttaggtgaggggtgcagtc

SEQ ID NO: 353241 - DNA, 626 bp, Homo sapiens
  chr2:234372729-234373355
  hypo
cggacctcacccccctgggcctcgcgctgatcagcagtgcacactctccatttctctctccctccctccgcctggagcagcagctggatccgcctcagaaggagcagctggggagtgctcttgccgagatggaccgacagctcaggaggctggcagacaccccgtggctctgccagtccgcagagcccggcgacgaagaggtatgtggctcatagggctgtgcctgggtctcccggacatggtggctctcgcctgaagtgcctgtgttccttgtgacccgtgtggctctgggatcaagatcgtgtcgctccggcagcccctgaggggccttctccagacttcgctattaaaatgctctttaaggcagggagggacagcaggtaggaaggagttctgggctgggattaagagtgccccttgaggaccagggacctgttgtcctctgaaacagaactgcagggcttcctggacagtgggtagaaggaaggctgagcccagccccacagcctcccccgagggtggagatgtatcatgggataaatggcagccttttgggatcccgctgtggacagggcgcagttggtgtgcgccactccccactcacactctcttcctgtgtgaacaga

SEQ ID NO: 353242 - DNA, 339 bp, Homo sapiens
  chr2:234373385-234373724
  hypo
gacccgaggacgcagggcatagcggaccctggggtggagtcacattcttctgcagggagtgctggctgaaggagccctggagagggccgtgtctggacaaggacaaaccccagcctgtctcttggcttccctgcttcagagatagaacacagaggggccctgaggaaagctcatcttgggcagtacagttgcagaaggcaaataactgcaagacgccaaacctgggcacccctgcccagtggggtttgtgagacctgtgggcagcagtaaggcgaggggacagaggtgggcagctgcacaacagcaccctctttccggggccctggggcgttttttgac

SEQ ID NO: 353243 - DNA, 592 bp, Homo sapiens; identical to SEQ ID NO: 198764
  chr2:235860154-235860746
  hypo

SEQ ID NO: 353244 - DNA, 297 bp, Homo sapiens; identical to SEQ ID NO: 198767
  chr2:236402404-236402701
  hypo

SEQ ID NO: 353245 - DNA, 216 bp, Homo sapiens; identical to SEQ ID NO: 337911
  chr2:236452983-236453199
  hypo

SEQ ID NO: 353246 - DNA, 640 bp, Homo sapiens; identical to SEQ ID NO: 337914
  chr2:236648390-236649030
  hypo

SEQ ID NO: 353247 - DNA, 366 bp, Homo sapiens; identical to SEQ ID NO: 337917
  chr2:236685979-236686345
  hypo

SEQ ID NO: 353248 - DNA, 66 bp, Homo sapiens; identical to SEQ ID NO: 347950
  chr2:238280432-238280498
  hypo

SEQ ID NO: 353249 - DNA, 235 bp, Homo sapiens; identical to SEQ ID NO: 347951
  chr2:238280812-238281047
  hypo

SEQ ID NO: 353250 - DNA, 34 bp, Homo sapiens; identical to SEQ ID NO: 337934
  chr2:238934785-238934819
  hypo

SEQ ID NO: 353251 - DNA, 270 bp, Homo sapiens; identical to SEQ ID NO: 345782
  chr2:239074309-239074579
  hypo

SEQ ID NO: 353252 - DNA, 147 bp, Homo sapiens
  chr2:239079151-239079298
  hypo
cgtgctcctggccgcgcgccacccctcagtgccctatccgcaccaccatcacagtgacgttgtcggccgagccccgctgcaccgccttgttggccagcctgttgcaggctgcttcgtagcgggcgtcggctgcggacttcccttccc

SEQ ID NO: 353253 - DNA, 67 bp, Homo sapiens; identical to SEQ ID NO: 347954
  chr2:239082208-239082275
  hypo

SEQ ID NO: 353254 - DNA, 42 bp, Homo sapiens; identical to SEQ ID NO: 345783
  chr2:239083093-239083135
  hypo

SEQ ID NO: 353255 - DNA, 811 bp, Homo sapiens; identical to SEQ ID NO: 337948
  chr2:239973912-239974723
  hypo

SEQ ID NO: 353256 - DNA, 120 bp, Homo sapiens
  chr2:240167455-240167575
  hypo
cgagcctgcccccaccttctattcaatatgtctttcctgagcatctgctgggtgatctacctaacttgttccttcacgaatatcccaacagtcttcagttcatccccagcccctatgtgt

SEQ ID NO: 353257 - DNA, 310 bp, Homo sapiens
  chr2:240167605-240167915
  hypo
tcagcgagcaggccctgagcgtctgggaacgtgagagtgagcaacgcagaggcctggccccggcccagcagaaccggcaacccacactggctgcctgcgtccagtcccgccatggggtctgcctggtgccagcacctgcccagacacagggcagaggagactgcaggggggtgtccagctgctctcacgtgccaggccaggcttgctaacacctgtggcttagtcgggtgatagggacaaaacgtgcaaactgagcccgctggacacgcagactcagcaggcaggcagagcccggtggggaggcaaacgc

SEQ ID NO: 353258 - DNA, 141 bp, Homo sapiens
  chr2:240213554-240213695
  hypo
cgggagccgccgattacatttgcatgaaaatagaacctttgtttgcaagagttcccgctccagtggatccctcctttgtctgcagcacagcaactgatggggcaggatgctggtgtgtgcacacagcccagctcaggacag

SEQ ID NO: 353259 - DNA, 31 bp, Homo sapiens
  chr2:240213811-240213842
  hypo
ttgcccatcgtggcaaggcaggcaaggggac

SEQ ID NO: 353260 - DNA, 287 bp, Homo sapiens; identical to SEQ ID NO: 347956
  chr2:240226690-240226977
  hypo

SEQ ID NO: 353261 - DNA, 154 bp, Homo sapiens; identical to SEQ ID NO: 347957
  chr2:240227007-240227161
  hypo

SEQ ID NO: 353262 - DNA, 95 bp, Homo sapiens
  chr2:240316126-240316221
  hypo
cgcctcctcacacgccggggccctgggcgaagcggctggagaacaagctgcacacacctgccttggccttggcacaacagtcgcatttgccactc

SEQ ID NO: 353263 - DNA, 80 bp, Homo sapiens; identical to SEQ ID NO: 337957
  chr2:240319796-240319876
  hypo

SEQ ID NO: 353264 - DNA, 100 bp, Homo sapiens; identical to SEQ ID NO: 337966
  chr2:240928864-240928964
  hypo

SEQ ID NO: 353265 - DNA, 209 bp, Homo sapiens
  chr2:241157300-241157509
  hypo
gctgtagtccaaccacacgggcactgggcggtggccttgatctcagtccccgttgctcacggggtctcagatcccacctgtgaggggctgtgctgacccgaggccccttccaggacccgcggggttcacaattcaagtgactcaggccctagaaggcttgtaccatacaagtgcaggttgacgccccatagcagggctcacagctttgc

SEQ ID NO: 353266 - DNA, 360 bp, Homo sapiens; identical to SEQ ID NO: 347959
  chr2:241542357-241542717
  hypo

SEQ ID NO: 353267 - DNA, 196 bp, Homo sapiens
  chr2:241989264-241989460
  hypo
cttcaacggaggctcctgcgatgcccatgacgactcctacacctgcgagtgcccgcgcgggttccacggcaagcactgcgagaaaggtatggcgggcaggggcgtccgggccggcgtcagcaccctggagagcgcccgcggtccgccgtcctgcttctctgctgtctctctccttgtttcgcgaattgctgacctc

SEQ ID NO: 353268 - DNA, 462 bp, Homo sapiens; identical to SEQ ID NO: 345784
  chr2:242004407-242004869
  hypo

SEQ ID NO: 353269 - DNA, 339 bp, Homo sapiens; identical to SEQ ID NO: 337986
  chr2:242169887-242170226
  hypo

SEQ ID NO: 353270 - DNA, 131 bp, Homo sapiens; identical to SEQ ID NO: 337987
  chr2:242190665-242190796
  hypo

SEQ ID NO: 353271 - DNA, 241 bp, Homo sapiens; identical to SEQ ID NO: 345785
  chr2:242436503-242436744
  hypo

SEQ ID NO: 353272 - DNA, 326 bp, Homo sapiens; identical to SEQ ID NO: 337992
  chr2:242440848-242441174
  hypo

SEQ ID NO: 353273 - DNA, 145 bp, Homo sapiens
  chr2:242523762-242523907
  hypo
cgctttggaaaacaaacatcagcagataaaaaaaaaatgtacagcctacgcaagtgataatattcaaaatcctcagccataaaaataaaggccttttatttggtttttctatgccagtacagaaacatctggacaacactcttga

SEQ ID NO: 353274 - DNA, 222 bp, Homo sapiens; identical to SEQ ID NO: 208696
  chr2:242524147-242524369
  hypo

SEQ ID NO: 353275 - DNA, 46 bp, Homo sapiens; identical to SEQ ID NO: 347964
  chr2:242554503-242554549
  hypo

SEQ ID NO: 353276 - DNA, 54 bp, Homo sapiens; identical to SEQ ID NO: 347965
  chr2:242554624-242554678
  hypo

SEQ ID NO: 353277 - DNA, 276 bp, Homo sapiens; identical to SEQ ID NO: 337996
  chr2:242566832-242567108
  hypo

SEQ ID NO: 353278 - DNA, 567 bp, Homo sapiens; identical to SEQ ID NO: 338000
  chr2:242616820-242617387
  hypo

SEQ ID NO: 353279 - DNA, 130 bp, Homo sapiens; identical to SEQ ID NO: 347966
  chr2:242617764-242617894
  hypo

SEQ ID NO: 353280 - DNA, 531 bp, Homo sapiens; identical to SEQ ID NO: 347967
  chr2:242617924-242618455
  hypo

SEQ ID NO: 353281 - DNA, 75 bp, Homo sapiens
  chr2:242735082-242735157
  hypo
cgcagaagtggcccaatggcagagcaggagctccgctctcagtgtggggcctcgtttgggtttgggaaaacatgt

SEQ ID NO: 353282 - DNA, 268 bp, Homo sapiens
  chr2:242735246-242735514
  hypo
tcctctctgtgcctgggaattctagtgtttactgggccttggccgctgggagcctcttcaaggtggttccattttgacgtaaggactggaggggtgcattgaagaattgtagagtgcaggtgaagggagggcctggaagctcctgtcccgtctcctagaagcgtggctgtggtggcactggcattggagtctgaggtgccgcgtgtgccgtgaggatgaagtgtgagaaattttgggaggtcctagttctaccatccccagtgtcttc

SEQ ID NO: 353283 - DNA, 113 bp, Homo sapiens
  chr2:242815156-242815269
  hypo
cgcaagggcggtggccacgttgcctacggcccccagggcaatggctgcttctcccaaggctattaccagaagaggcagctgaggtccaggttccacaaggcccgctgtgggtg

SEQ ID NO: 353284 - DNA, 180 bp, Homo sapiens
  chr2:242925676-242925856
  hypo
ggaaactgtaggagctggaaatatttcatatcttatttggggtgttgtttacaggggaacttgacaaactcatctaatggtacaatcgagacatctgtgtaaataaagtgtcaaaaatcatcctgctgacatccatgctccccgccccacggcacttcccggccctcagccctcccgtgc

SEQ ID NO: 353285 - DNA, 212 bp, Homo sapiens
  chr2:242933459-242933671
  hypo
tggaatctccagcgttgaaggcggggcctggtgggaggtgattggatcacggccggcgttcccacaaatggcttcgcaccgtcgcctccgtgacgccctcgtgacactgagtgagcaagttattgtgagacctggtcgtttgaaactgagttggggcccagctcagcgggcacgaccctgctctgggccacgcttacgcgcttgttcctaac

SEQ ID NO: 353286 - DNA, 326 bp, Homo sapiens; identical to SEQ ID NO: 349725
  chr3:4909962-4910288
  hypo

SEQ ID NO: 353287 - DNA, 210 bp, Homo sapiens; identical to SEQ ID NO: 349726
  chr3:4910550-4910760
  hypo

SEQ ID NO: 353288 - DNA, 231 bp, Homo sapiens; identical to SEQ ID NO: 345076
  chr3:5018754-5018985
  hypo

SEQ ID NO: 353289 - DNA, 143 bp, Homo sapiens; identical to SEQ ID NO: 345077
  chr3:5019132-5019275
  hypo

SEQ ID NO: 353290 - DNA, 58 bp, Homo sapiens; identical to SEQ ID NO: 338018
  chr3:5165843-5165901
  hypo

SEQ ID NO: 353291 - DNA, 58 bp, Homo sapiens; identical to SEQ ID NO: 338023
  chr3:10011425-10011483
  hypo

SEQ ID NO: 353292 - DNA, 165 bp, Homo sapiens
  chr3:11581157-11581322
  hypo
cgtcttaagctatattcgttttctcttatgaatttaaaaaataaaatctattgatgcgcatacaatcaaatatatgtaaaagtgcacatttctgagctttgagaaacgtactcgcttgtggaaccagcacagttcggcgacatcgagcaggtctgtctggcctgt

SEQ ID NO: 353293 - DNA, 546 bp, Homo sapiens; identical to SEQ ID NO: 338029
  chr3:11655438-11655984
  hypo

SEQ ID NO: 353294 - DNA, 79 bp, Homo sapiens; identical to SEQ ID NO: 338032
  chr3:12605281-12605360
  hypo

SEQ ID NO: 353295 - DNA, 94 bp, Homo sapiens; identical to SEQ ID NO: 338033
  chr3:12626586-12626680
  hypo

SEQ ID NO: 353296 - DNA, 33 bp, Homo sapiens; identical to SEQ ID NO: 338034
  chr3:12743274-12743307
  hypo

SEQ ID NO: 353297 - DNA, 79 bp, Homo sapiens
  chr3:12976966-12977045
  hypo
cgatgcggtagtgcctcttgcggatgacatcgttgctaaaggcaggcgagtcccagctgttgcgggcctccttgtggta

SEQ ID NO: 353298 - DNA, 192 bp, Homo sapiens
  chr3:12977144-12977336
  hypo
gtcattgtcaccgtctgagtagtccgactcagacttgctctgccggttggctgagccattgatggccaagtggctgtccaggggcctggggggccggggccgcaactcaggctcctcccgggggaggctcttgggggcgccgctgtggggaccatgcttgggactgccctgctgcccgccaaggctgcgctc

SEQ ID NO: 353299 - DNA, 478 bp, Homo sapiens; identical to SEQ ID NO: 349738
  chr3:13936742-13937220
  hypo

SEQ ID NO: 353300 - DNA, 124 bp, Homo sapiens; identical to SEQ ID NO: 349739
  chr3:13937250-13937374
  hypo

SEQ ID NO: 353301 - DNA, 92 bp, Homo sapiens; identical to SEQ ID NO: 331702
  chr3:14443834-14443926
  hypo

SEQ ID NO: 353302 - DNA, 578 bp, Homo sapiens; identical to SEQ ID NO: 331703
  chr3:14443998-14444576
  hypo

SEQ ID NO: 353303 - DNA, 53 bp, Homo sapiens; identical to SEQ ID NO: 338047
  chr3:15079942-15079995
  hypo

SEQ ID NO: 353304 - DNA, 78 bp, Homo sapiens; identical to SEQ ID NO: 345789
  chr3:15123770-15123848
  hypo

SEQ ID NO: 353305 - DNA, 42 bp, Homo sapiens; identical to SEQ ID NO: 345790
  chr3:15123992-15124034
  hypo

SEQ ID NO: 353306 - DNA, 78 bp, Homo sapiens; identical to SEQ ID NO: 345081
  chr3:16555426-16555504
  hypo

SEQ ID NO: 353307 - DNA, 340 bp, Homo sapiens; identical to SEQ ID NO: 349744
  chr3:16926663-16927003
  hypo

SEQ ID NO: 353308 - DNA, 102 bp, Homo sapiens; identical to SEQ ID NO: 338052
  chr3:18462342-18462444
  hypo

SEQ ID NO: 353309 - DNA, 989 bp, Homo sapiens; identical to SEQ ID NO: 331712
  chr3:24536360-24537349
  hypo

SEQ ID NO: 353310 - DNA, 558 bp, Homo sapiens; identical to SEQ ID NO: 345084
  chr3:32433054-32433612
  hypo

SEQ ID NO: 353311 - DNA, 200 bp, Homo sapiens; identical to SEQ ID NO: 198867
  chr3:32433665-32433865
  hypo

SEQ ID NO: 353312 - DNA, 81 bp, Homo sapiens; identical to SEQ ID NO: 345086
  chr3:32434068-32434149
  hypo

SEQ ID NO: 353313 - DNA, 92 bp, Homo sapiens; identical to SEQ ID NO: 338065
  chr3:33437677-33437769
  hypo

SEQ ID NO: 353314 - DNA, 173 bp, Homo sapiens; identical to SEQ ID NO: 338067
  chr3:33818924-33819097
  hypo

SEQ ID NO: 353315 - DNA, 118 bp, Homo sapiens
  chr3:36984260-36984378
  hypo
cggtctcctcatactctgggagagcggcggaaacagaacctgcagttgccccataaagctggtcagtcggtcataaagtgaagttaacaatttatgacccgctttaaaaaaaaaaaaa

SEQ ID NO: 353316 - DNA, 1420 bp, Homo sapiens; identical to SEQ ID NO: 331732
  chr3:37033979-37035399
  hypo

SEQ ID NO: 353317 - DNA, 243 bp, Homo sapiens; identical to SEQ ID NO: 345088
  chr3:43147038-43147281
  hypo

SEQ ID NO: 353318 - DNA, 105 bp, Homo sapiens; identical to SEQ ID NO: 345089
  chr3:43147607-43147712
  hypo

SEQ ID NO: 353319 - DNA, 149 bp, Homo sapiens; identical to SEQ ID NO: 345798
  chr3:43655492-43655641
  hypo

SEQ ID NO: 353320 - DNA, 219 bp, Homo sapiens; identical to SEQ ID NO: 338086
  chr3:44945281-44945500
  hypo

SEQ ID NO: 353321 - DNA, 255 bp, Homo sapiens; identical to SEQ ID NO: 338088
  chr3:45719334-45719589
  hypo

SEQ ID NO: 353322 - DNA, 396 bp, Homo sapiens
  chr3:46009350-46009746
  hypo
cgcctcaactctgctagctcctcctcccaggagctcgtgtgggccagcaactcctgcagccgtcgccagagctggtctgcctcctgtcccttcccagacaactcctcctggagtggggccatctccttcaccaggcgctccaggctggcccgggcatcctctttcagctgaagctccttgaccagctgttccagttgggcactctgctgtctgttgacctcctcgaccttggttctctccctttctagggcttgaagcttctcccctagctcctgcatctcctgggccgcatcactgggaataggttcttgccggccctttgtgtctgatgccgtatctgccttctgctgagccatggctagccagcctgggaagctggctaaatgctggtttttc

SEQ ID NO: 353323 - DNA, 316 bp, Homo sapiens
  chr3:46009776-46010092
  hypo
tcctgtgccaagggctgcagcatggactccagccgccgcagggctgtgtggtagtcctcctccttctctgctgctcctagctccaggccctgcaggcatgtctgcagctccttcacagtgttctgggtggcctgggtgacctcccactgcttctggagctcagctaccaagcaagtgaggcgaacgttgtcctccgctgcagtgcgccccctctccctctctgtctgcagttgctccccttgctggctgacagctgccctcagctcctggttctctctgtccagctgctgcatgcgctcccgtagctgcttctccc

SEQ ID NO: 353324 - DNA, 557 bp, Homo sapiens; identical to SEQ ID NO: 347983
  chr3:49720262-49720819
  hypo

SEQ ID NO: 353325 - DNA, 233 bp, Homo sapiens; identical to SEQ ID NO: 349767
  chr3:49906737-49906970
  hypo

SEQ ID NO: 353326 - DNA, 49 bp, Homo sapiens; identical to SEQ ID NO: 349768
  chr3:49907379-49907428
  hypo

SEQ ID NO: 353327 - DNA, 143 bp, Homo sapiens; identical to SEQ ID NO: 338103
  chr3:50144939-50145082
  hypo

SEQ ID NO: 353328 - DNA, 356 bp, Homo sapiens; identical to SEQ ID NO: 346562
  chr3:50374299-50374655
  hypo

SEQ ID NO: 353329 - DNA, 62 bp, Homo sapiens; identical to SEQ ID NO: 338107
  chr3:51623983-51624045
  hypo

SEQ ID NO: 353330 - DNA, 329 bp, Homo sapiens; identical to SEQ ID NO: 208908
  chr3:53032404-53032733
  hypo

SEQ ID NO: 353331 - DNA, 199 bp, Homo sapiens; identical to SEQ ID NO: 331773
  chr3:53195788-53195987
  hypo

SEQ ID NO: 353332 - DNA, 506 bp, Homo sapiens; identical to SEQ ID NO: 338117
  chr3:54660189-54660695
  hypo

SEQ ID NO: 353333 - DNA, 148 bp, Homo sapiens; identical to SEQ ID NO: 345800
  chr3:56718095-56718243
  hypo

SEQ ID NO: 353334 - DNA, 170 bp, Homo sapiens; identical to SEQ ID NO: 345801
  chr3:56718281-56718451
  hypo

SEQ ID NO: 353335 - DNA, 261 bp, Homo sapiens; identical to SEQ ID NO: 338120
  chr3:57679351-57679612
  hypo

SEQ ID NO: 353336 - DNA, 1318 bp, Homo sapiens; identical to SEQ ID NO: 281269
  chr3:66024122-66025440
  hypo

SEQ ID NO: 353337 - DNA, 56 bp, Homo sapiens; identical to SEQ ID NO: 349784
  chr3:66025506-66025562
  hypo

SEQ ID NO: 353338 - DNA, 1570 bp, Homo sapiens; identical to SEQ ID NO: 331800
  chr3:66550318-66551888
  hypo

SEQ ID NO: 353339 - DNA, 1076 bp, Homo sapiens; identical to SEQ ID NO: 331801
  chr3:67048291-67049367
  hypo

SEQ ID NO: 353340 - DNA, 221 bp, Homo sapiens; identical to SEQ ID NO: 349787
  chr3:69434926-69435147
  hypo

SEQ ID NO: 353341 - DNA, 264 bp, Homo sapiens; identical to SEQ ID NO: 338134
  chr3:71036199-71036463
  hypo

SEQ ID NO: 353342 - DNA, 1710 bp, Homo sapiens; identical to SEQ ID NO: 331806
  chr3:71113110-71114820
  hypo

SEQ ID NO: 353343 - DNA, 76 bp, Homo sapiens
  chr3:71187313-71187389
  hypo
cgcagaatggtgacgctgtctggagaacacacgtggaggaagaagcgaatgcttctaattgcctcaaaatgggatt

SEQ ID NO: 353344 - DNA, 123 bp, Homo sapiens
  chr3:71187419-71187542
  hypo
aaataagaacacttccaacatcctttataaataagcctttacaaaatattgttagctgttaataatacatcattatcaaaaatggaaagtcatgaatacagtgcatgtaacctttgtattcac

SEQ ID NO: 353345 - DNA, 1327 bp, Homo sapiens; identical to SEQ ID NO: 349789
  chr3:71630573-71631900
  hypo

SEQ ID NO: 353346 - DNA, 45 bp, Homo sapiens; identical to SEQ ID NO: 338139
  chr3:72420279-72420324
  hypo

SEQ ID NO: 353347 - DNA, 69 bp, Homo sapiens; identical to SEQ ID NO: 338144
  chr3:87297469-87297538
  hypo

SEQ ID NO: 353348 - DNA, 280 bp, Homo sapiens; identical to SEQ ID NO: 345095
  chr3:98619774-98620054
  hypo

SEQ ID NO: 353349 - DNA, 58 bp, Homo sapiens; identical to SEQ ID NO: 345096
  chr3:98621126-98621184
  hypo

SEQ ID NO: 353350 - DNA, 101 bp, Homo sapiens; identical to SEQ ID NO: 346575
  chr3:99594790-99594891
  hypo

SEQ ID NO: 353351 - DNA, 299 bp, Homo sapiens; identical to SEQ ID NO: 349796
  chr3:101497996-101498295
  hypo

SEQ ID NO: 353352 - DNA, 98 bp, Homo sapiens; identical to SEQ ID NO: 349797
  chr3:101498512-101498610
  hypo

SEQ ID NO: 353353 - DNA, 459 bp, Homo sapiens; identical to SEQ ID NO: 346577
  chr3:105088087-105088546
  hypo

SEQ ID NO: 353354 - DNA, 196 bp, Homo sapiens; identical to SEQ ID NO: 338151
  chr3:106362774-106362970
  hypo

SEQ ID NO: 353355 - DNA, 92 bp, Homo sapiens
  chr3:107530307-107530399
  hypo
cgccacttgggtgaacgcttctggggtgcgcttctgggactagtgatcagaacacaccatctttccctgaactgggacaaaactgtggaagc

SEQ ID NO: 353356 - DNA, 1176 bp, Homo sapiens; identical to SEQ ID NO: 331832
  chr3:113251180-113252356
  hypo

SEQ ID NO: 353357 - DNA, 137 bp, Homo sapiens; identical to SEQ ID NO: 338158
  chr3:119535947-119536084
  hypo

SEQ ID NO: 353358 - DNA, 84 bp, Homo sapiens; identical to SEQ ID NO: 345809
  chr3:121500635-121500719
  hypo

SEQ ID NO: 353359 - DNA, 731 bp, Homo sapiens; identical to SEQ ID NO: 346580
  chr3:123751654-123752385
  hypo

SEQ ID NO: 353360 - DNA, 360 bp, Homo sapiens; identical to SEQ ID NO: 338169
  chr3:124515276-124515636
  hypo

SEQ ID NO: 353361 - DNA, 438 bp, Homo sapiens; identical to SEQ ID NO: 345099
  chr3:124773932-124774370
  hypo

SEQ ID NO: 353362 - DNA, 174 bp, Homo sapiens; identical to SEQ ID NO: 338175
  chr3:127326124-127326298
  hypo

SEQ ID NO: 353363 - DNA, 70 bp, Homo sapiens
  chr3:127534744-127534814
  hypo
cgcccaaggaccatgtagacgtcaataaggaagtatttgctgaatgaatcgctgctttggatcctgggag

SEQ ID NO: 353364 - DNA, 67 bp, Homo sapiens; identical to SEQ ID NO: 209038
  chr3:127534897-127534964
  hypo

SEQ ID NO: 353365 - DNA, 122 bp, Homo sapiens; identical to SEQ ID NO: 345100
  chr3:127794271-127794393
  hypo

SEQ ID NO: 353366 - DNA, 61 bp, Homo sapiens; identical to SEQ ID NO: 338182
  chr3:128004552-128004613
  hypo

SEQ ID NO: 353367 - DNA, 185 bp, Homo sapiens; identical to SEQ ID NO: 338187
  chr3:128737561-128737746
  hypo

SEQ ID NO: 353368 - DNA, 130 bp, Homo sapiens; identical to SEQ ID NO: 338188
  chr3:129231161-129231291
  hypo

SEQ ID NO: 353369 - DNA, 334 bp, Homo sapiens; identical to SEQ ID NO: 338189
  chr3:129290351-129290685
  hypo

SEQ ID NO: 353370 - DNA, 216 bp, Homo sapiens; identical to SEQ ID NO: 338193
  chr3:130424529-130424745
  hypo

SEQ ID NO: 353371 - DNA, 196 bp, Homo sapiens; identical to SEQ ID NO: 346590
  chr3:132756116-132756312
  hypo

SEQ ID NO: 353372 - DNA, 39 bp, Homo sapiens; identical to SEQ ID NO: 346591
  chr3:132756477-132756516
  hypo

SEQ ID NO: 353373 - DNA, 295 bp, Homo sapiens; identical to SEQ ID NO: 345106
  chr3:135684609-135684904
  hypo

SEQ ID NO: 353374 - DNA, 703 bp, Homo sapiens; identical to SEQ ID NO: 199114
  chr3:138067014-138067717
  hypo

SEQ ID NO: 353375 - DNA, 106 bp, Homo sapiens; identical to SEQ ID NO: 346595
  chr3:138067747-138067853
  hypo

SEQ ID NO: 353376 - DNA, 267 bp, Homo sapiens; identical to SEQ ID NO: 349830
  chr3:139258672-139258939
  hypo

SEQ ID NO: 353377 - DNA, 79 bp, Homo sapiens; identical to SEQ ID NO: 338207
  chr3:139352994-139353073
  hypo

SEQ ID NO: 353378 - DNA, 986 bp, Homo sapiens; identical to SEQ ID NO: 346597
  chr3:140660747-140661733
  hypo

SEQ ID NO: 353379 - DNA, 123 bp, Homo sapiens
  chr3:141174173-141174296
  hypo
cgtgctcgacatctgcgtgagtgtggtgagtggaagagcatcaggccatgtcccaggtctttccaaatcagactccattatttctgacattcctcttcctaaagaccagaggtaggaattcag

SEQ ID NO: 353380 - DNA, 147 bp, Homo sapiens; identical to SEQ ID NO: 338213
  chr3:141622422-141622569
  hypo

SEQ ID NO: 353381 - DNA, 203 bp, Homo sapiens
  chr3:141656829-141657032
  hypo
cggtgcgggcccagcaggcaggtgacagccgcccttgcgggagtcatccttaaccaagcagtttcagaaatgtttcttgagaaactgtttccggaagtcccggagcctgtgttgcccattgacaagccttgtcggtctcagaagacagactccgggggtctacatccagagacccggctgaggactgaagcccggggtttcca

SEQ ID NO: 353382 - DNA, 106 bp, Homo sapiens
  chr3:141657079-141657185
  hypo
ggctaagggagcaaggaacccccgccatgctgtgtcccctccccccattccccgaatgcccgtctgttcaaagagggtgagaggaggggggaataccaactgctcc

SEQ ID NO: 353383 - DNA, 68 bp, Homo sapiens; identical to SEQ ID NO: 338217
  chr3:142103585-142103653
  hypo

SEQ ID NO: 353384 - DNA, 43 bp, Homo sapiens; identical to SEQ ID NO: 338220
  chr3:142683691-142683734
  hypo

SEQ ID NO: 353385 - DNA, 307 bp, Homo sapiens
  chr3:142895557-142895864
  hypo
cgagaaagggggcggctcagcagcagcagctgcagccgctgcagcctctggtggtggcgtgtcccctgacaactccatcgaacactcggactatcgcagcaaacttgcccagatccgtcacatataccactcggaactggagaagtatgagcaggcatgtaatgagttcacgacccatgtcatgaacctgctgagggagcagagccgcaccaggcccgtggcccccaaagagatggaacgcatggtgagcatcatccatcgaaagttcagcgccatccagatgcagctgaagcagagcacctgcgag

SEQ ID NO: 353386 - DNA, 173 bp, Homo sapiens; identical to SEQ ID NO: 281571
  chr3:145878695-145878868
  hypo

SEQ ID NO: 353387 - DNA, 349 bp, Homo sapiens; identical to SEQ ID NO: 349836
  chr3:145878937-145879286
  hypo

SEQ ID NO: 353388 - DNA, 216 bp, Homo sapiens; identical to SEQ ID NO: 338226
  chr3:148804777-148804993
  hypo

SEQ ID NO: 353389 - DNA, 106 bp, Homo sapiens; identical to SEQ ID NO: 338227
  chr3:149360184-149360290
  hypo

SEQ ID NO: 353390 - DNA, 77 bp, Homo sapiens; identical to SEQ ID NO: 338228
  chr3:150187009-150187086
  hypo

SEQ ID NO: 353391 - DNA, 85 bp, Homo sapiens; identical to SEQ ID NO: 349841
  chr3:150802802-150802887
  hypo

SEQ ID NO: 353392 - DNA, 109 bp, Homo sapiens
  chr3:156543195-156543304
  hypo
tcatttaatcacttctctaaatctataggttcaattaattttctttgtatttacttaatcttattttattcaatagcaaaccagtctctttgcctgctacagagccatc

SEQ ID NO: 353393 - DNA, 241 bp, Homo sapiens; identical to SEQ ID NO: 199188
  chr3:169482439-169482680
  hypo

SEQ ID NO: 353394 - DNA, 54 bp, Homo sapiens; identical to SEQ ID NO: 345815
  chr3:169540679-169540733
  hypo

SEQ ID NO: 353395 - DNA, 282 bp, Homo sapiens; identical to SEQ ID NO: 281698
  chr3:170626174-170626456
  hypo

SEQ ID NO: 353396 - DNA, 97 bp, Homo sapiens; identical to SEQ ID NO: 338249
  chr3:179377859-179377956
  hypo

SEQ ID NO: 353397 - DNA, 206 bp, Homo sapiens; identical to SEQ ID NO: 346614
  chr3:180397104-180397310
  hypo

SEQ ID NO: 353398 - DNA, 36 bp, Homo sapiens; identical to SEQ ID NO: 199220
  chr3:181430331-181430367
  hypo

SEQ ID NO: 353399 - DNA, 252 bp, Homo sapiens; identical to SEQ ID NO: 199221
  chr3:181430443-181430695
  hypo

SEQ ID NO: 353400 - DNA, 809 bp, Homo sapiens; identical to SEQ ID NO: 345120
  chr3:183165024-183165833
  hypo

SEQ ID NO: 353401 - DNA, 237 bp, Homo sapiens; identical to SEQ ID NO: 338260
  chr3:183209981-183210218
  hypo

SEQ ID NO: 353402 - DNA, 217 bp, Homo sapiens; identical to SEQ ID NO: 338261
  chr3:183217407-183217624
  hypo

SEQ ID NO: 353403 - DNA, 140 bp, Homo sapiens; identical to SEQ ID NO: 338263
  chr3:183419820-183419960
  hypo

SEQ ID NO: 353404 - DNA, 195 bp, Homo sapiens; identical to SEQ ID NO: 338266
  chr3:183703570-183703765
  hypo

SEQ ID NO: 353405 - DNA, 52 bp, Homo sapiens; identical to SEQ ID NO: 338270
  chr3:184042674-184042726
  hypo

SEQ ID NO: 353406 - DNA, 177 bp, Homo sapiens; identical to SEQ ID NO: 338273
  chr3:184225995-184226172
  hypo

SEQ ID NO: 353407 - DNA, 393 bp, Homo sapiens; identical to SEQ ID NO: 338281
  chr3:185360808-185361201
  hypo

SEQ ID NO: 353408 - DNA, 34 bp, Homo sapiens
  chr3:185363305-185363339
  hypo
gcctgtgggagcctcacttgctgcgctgtgaggc

SEQ ID NO: 353409 - DNA, 129 bp, Homo sapiens; identical to SEQ ID NO: 338283
  chr3:185365800-185365929
  hypo

SEQ ID NO: 353410 - DNA, 98 bp, Homo sapiens; identical to SEQ ID NO: 338286
  chr3:185441721-185441819
  hypo

SEQ ID NO: 353411 - DNA, 196 bp, Homo sapiens; identical to SEQ ID NO: 345819
  chr3:185445861-185446057
  hypo

SEQ ID NO: 353412 - DNA, 290 bp, Homo sapiens; identical to SEQ ID NO: 199253
  chr3:186079331-186079621
  hypo

SEQ ID NO: 353413 - DNA, 334 bp, Homo sapiens; identical to SEQ ID NO: 338292
  chr3:187443068-187443402
  hypo

SEQ ID NO: 353414 - DNA, 45 bp, Homo sapiens; identical to SEQ ID NO: 345123
  chr3:187455297-187455342
  hypo

SEQ ID NO: 353415 - DNA, 446 bp, Homo sapiens; identical to SEQ ID NO: 199256
  chr3:187456666-187457112
  hypo

SEQ ID NO: 353416 - DNA, 134 bp, Homo sapiens; identical to SEQ ID NO: 338297
  chr3:193391768-193391902
  hypo

SEQ ID NO: 353417 - DNA, 61 bp, Homo sapiens; identical to SEQ ID NO: 209288
  chr3:193419641-193419702
  hypo

SEQ ID NO: 353418 - DNA, 275 bp, Homo sapiens; identical to SEQ ID NO: 345825
  chr3:193419732-193420007
  hypo

SEQ ID NO: 353419 - DNA, 153 bp, Homo sapiens
  chr3:193922622-193922775
  hypo
cgaaactcgcctggacaagtccaacttcattcttttcagtacgactagctcctgtgcgctgcagaagactcgggctgatctgaaagcgcctctcctattcgagactctcaggttttaagtaggtcttccgcacctgcagatgaaaaaagatgt

SEQ ID NO: 353420 - DNA, 296 bp, Homo sapiens; identical to SEQ ID NO: 338306
  chr3:193969977-193970273
  hypo

SEQ ID NO: 353421 - DNA, 296 bp, Homo sapiens; identical to SEQ ID NO: 338312
  chr3:194786359-194786655
  hypo

SEQ ID NO: 353422 - DNA, 393 bp, Homo sapiens; identical to SEQ ID NO: 338318
  chr3:195597835-195598228
  hypo

SEQ ID NO: 353423 - DNA, 582 bp, Homo sapiens; identical to SEQ ID NO: 345130
  chr3:195599104-195599686
  hypo

SEQ ID NO: 353424 - DNA, 246 bp, Homo sapiens; identical to SEQ ID NO: 209343
  chr3:195599840-195600086
  hypo

SEQ ID NO: 353425 - DNA, 49 bp, Homo sapiens; identical to SEQ ID NO: 345828
  chr3:195601363-195601412
  hypo

SEQ ID NO: 353426 - DNA, 666 bp, Homo sapiens
  chr3:195602576-195603242
  hypo
gccagggctgctacccggccgtgactgaagcaggggcggatgaggacttcctgggggagcaggaaaagggcccaacacctccgcatgaaccttctacctcctgctgcccccgggcctctggtcaacatctctggggtagacaagatggaaaacagaggccggtgctgagaactgcctaaggctgccccagctctggaaatctcagcaccacgttcccgtccgggccgaaggtagtccagaaatggctcaactaatgccggacattctgttcaaaacgcccgcccgctcttctccctaggggtcccaggcgcccaggcctggagggataacccggatgcctggctcccacccaccacaggaagccgaggctccagggccagaccaggccaaggacccgcaatggattccaacacccgctctgtatgcggaacaaaagtgctgccagccaccccttcctccaaacgagcccctgggaaagaccagtcatcatttgtgtctccaaatctagacacagcacgaaacatctaggtgtctcccctctgcccacagcctggtaccctgagaaggactgagcctagactcagtcagagctgcggcaggtggcctcccagactccgcaccaggaaacaaatactggacacagcttcgcaagtgggaagccacggc

SEQ ID NO: 353427 - DNA, 83 bp, Homo sapiens
  chr3:195637425-195637508
  hypo
tcagacacatcggaaactgtgtagggctggctctttctgcgctcacactgtccagcaatgggccccagggacttggccagagc

SEQ ID NO: 353428 - DNA, 32 bp, Homo sapiens
  chr3:195709683-195709715
  hypo
cgcagaaagggaggcgccagacagcgctgccc

SEQ ID NO: 353429 - DNA, 106 bp, Homo sapiens; identical to SEQ ID NO: 338328
  chr3:196263362-196263468
  hypo

SEQ ID NO: 353430 - DNA, 284 bp, Homo sapiens
  chr3:196728448-196728732
  hypo
agccagagaaccagtccaggtcgaagaagggcgcggggggcctcactgactagaggatgagagtggtccctgactggctcttggagaatggaatctgcccttctcggtggagcaggtaggcctttgagtgcctaacaaaacgaaagaaatcggcagcagaagtttctatcagggtccaagcctctgcatgtgctggcttgtttggctttattttagaaaccaaccaacatgtttcattagcactgacacagcaggggtcccctgctgccacctgacaatccagc

SEQ ID NO: 353431 - DNA, 80 bp, Homo sapiens
  chr3:197330147-197330227
  hypo
atgtgtgagataataatagaagatattcctgagagttttgtgtatttttgtgtattttccttgcttgtggatggaagcgc

SEQ ID NO: 353432 - DNA, 307 bp, Homo sapiens; identical to SEQ ID NO: 338336
  chr3:197582093-197582400
  hypo

SEQ ID NO: 353433 - DNA, 409 bp, Homo sapiens
  chr4:512569-512978
  hypo
cggcccattgtctacaccgtcggggatcctttttcctaaaacaaaatggggtatgtgttctgacactgaaatacgttttagaacccacagccaggcccgtgcagtccctcggtggcgtccagtctgttggaggctttgtgcccacccggctctctcagtgtagtgggaccggctttttctcacctctggacttttgcacatgctgttcccatcagcttgatgctcttcctgcagttttttgcctggcgaattcctgggtaccgtttacatttcagcgtaaacatcagaccttcctggtccagcgcccactcccaatccaaaatcagttcctccccattaccaaaaatccctcattgataccctctacttttccttcctgggaaacttgtaattacagctgtaatgcagt

SEQ ID NO: 353434 - DNA, 696 bp, Homo sapiens; identical to SEQ ID NO: 209394
  chr4:513008-513704
  hypo

SEQ ID NO: 353435 - DNA, 221 bp, Homo sapiens
  chr4:513734-513955
  hypo
ttagggacttggtgcctgcagcagtcgggtgtgcttgcaggcgtgtgggttcacgctcagggacctggtgccggcagcagtggggcgggcctgcaggcgtatgagttcatgctcagggacttgtgccacagcaccctggacctcagtggcttgagcgcctgtggcagctctttcactgctgtgatagcaggcctggggcatgcagagccacagggtggggc

SEQ ID NO: 353436 - DNA, 76 bp, Homo sapiens; identical to SEQ ID NO: 338340
  chr4:529368-529444
  hypo

SEQ ID NO: 353437 - DNA, 32 bp, Homo sapiens
  chr4:619879-619911
  hypo
cgaggtgggtctgtgcggagcctcagggaggc

SEQ ID NO: 353438 - DNA, 43 bp, Homo sapiens; identical to SEQ ID NO: 209400
  chr4:628787-628830
  hypo

SEQ ID NO: 353439 - DNA, 420 bp, Homo sapiens; identical to SEQ ID NO: 302690
  chr4:628950-629370
  hypo

SEQ ID NO: 353440 - DNA, 151 bp, Homo sapiens
  chr4:717901-718052
  hypo
cggcagaaagactcagggcagatggtggttgtcagccgggagggggcacggagccctgggggtggtcaggcccacgtggccttgggacgagagcgaagaggtgggatcggctgcgggagacagggaagtgggtgacaaggaggctcagggg

SEQ ID NO: 353441 - DNA, 49 bp, Homo sapiens; identical to SEQ ID NO: 302701
  chr4:718112-718161
  hypo

SEQ ID NO: 353442 - DNA, 188 bp, Homo sapiens; identical to SEQ ID NO: 345829
  chr4:905682-905870
  hypo

SEQ ID NO: 353443 - DNA, 69 bp, Homo sapiens; identical to SEQ ID NO: 349899
  chr4:1036539-1036608
  hypo

SEQ ID NO: 353444 - DNA, 493 bp, Homo sapiens; identical to SEQ ID NO: 338362
  chr4:1204224-1204717
  hypo

SEQ ID NO: 353445 - DNA, 129 bp, Homo sapiens
  chr4:1205845-1205974
  hypo
cgcccacaggacggacgacgacaagcgacacgaggcccagcgctgccccctcccgcctcctgacagcccggaccagtctctgcagtgccagggccaccacacagatgcctcctccacacactctggtcc

SEQ ID NO: 353446 - DNA, 269 bp, Homo sapiens
  chr4:1206025-1206294
  hypo
ggctacaactggtcactggcgtggtctctatccgcctcgggcttgacggtttggccaggagaaggggcgtggggcgggtgggccacagggggcaggccgtgggacagggacatggcgctggggacgataccttccacagcagctgggatgccagtgggggccacgcccaccacgcccggagggtacctgctgggagagggtccatccgtgaggcccacctgtaggcggcctggccaggccccacctgccctcctagcatcggcagcacc

SEQ ID NO: 353447 - DNA, 73 bp, Homo sapiens
  chr4:1214821-1214894
  hypo
cggcctgagatattcgtaaacaagaaaaaacaaaaattttgaaattatgaaaatatccacaatgcatgtcgat

SEQ ID NO: 353448 - DNA, 253 bp, Homo sapiens; identical to SEQ ID NO: 209439
  chr4:1215162-1215415
  hypo

SEQ ID NO: 353449 - DNA, 73 bp, Homo sapiens
  chr4:1215451-1215524
  hypo
gcacagctggggaaggccctctgctctaggaagcgggacccgggtcctcgcagggtcgtcgcggggccgccac

SEQ ID NO: 353450 - DNA, 464 bp, Homo sapiens; identical to SEQ ID NO: 338366
  chr4:1225310-1225774
  hypo

SEQ ID NO: 353451 - DNA, 70 bp, Homo sapiens
  chr4:1282403-1282473
  hypo
cggagagtggcagacacgatgcgaaccgtgaaaggacgcaaagagtacagagtgcatgcttccatctcta

SEQ ID NO: 353452 - DNA, 129 bp, Homo sapiens; identical to SEQ ID NO: 338373
  chr4:1326104-1326233
  hypo

SEQ ID NO: 353453 - DNA, 167 bp, Homo sapiens; identical to SEQ ID NO: 338374
  chr4:1326509-1326676
  hypo

SEQ ID NO: 353454 - DNA, 372 bp, Homo sapiens; identical to SEQ ID NO: 209459
  chr4:1331896-1332268
  hypo

SEQ ID NO: 353455 - DNA, 218 bp, Homo sapiens; identical to SEQ ID NO: 199294
  chr4:1332660-1332878
  hypo

SEQ ID NO: 353456 - DNA, 520 bp, Homo sapiens
  chr4:1333183-1333703
  hypo
gcttctgaaaagtactttcaacttgcgaaggaaactcttctttaaagactgacctaaacaccgagggaaacttaagaacgtttaaaatataggagtccgtgatttccctgtgttttcagtttctttccttctgtgaacgatgagacttggagaacgggctggtccttcaccacttcctgttggccctggcctggccggggaaggtggcagcggcaccggactgacctgcagtgacccgcgatgccgcgccacgagggacacttatggcttcattcgagagctgctgccaaaacgcctggcgccgccaccgtcgggggctggcttcgaggacgcccgcctgcctcgcgggtcgtgtccgcgggactgtgttcgtacgtgcatagtttcgatatcacatcgcggggctgtgttcgtagctgcgtcgtttcgatatcacaccctctgtgtgccgccttacttcctgcttcgagaatgtataacgtggaaatccacgggaccaaatttctgcagaggccttgcc

SEQ ID NO: 353457 - DNA, 136 bp, Homo sapiens; identical to SEQ ID NO: 345830
  chr4:1336902-1337038
  hypo

SEQ ID NO: 353458 - DNA, 53 bp, Homo sapiens
  chr4:1338812-1338865
  hypo
tgccctgggatgggagccgtcggaggattttgtgtagaggaatcctgtgatcc

SEQ ID NO: 353459 - DNA, 276 bp, Homo sapiens; identical to SEQ ID NO: 338380
  chr4:1541591-1541867
  hypo

SEQ ID NO: 353460 - DNA, 329 bp, Homo sapiens; identical to SEQ ID NO: 338384
  chr4:1738699-1739028
  hypo

SEQ ID NO: 353461 - DNA, 390 bp, Homo sapiens; identical to SEQ ID NO: 338396
  chr4:1986329-1986719
  hypo

SEQ ID NO: 353462 - DNA, 56 bp, Homo sapiens; identical to SEQ ID NO: 348040
  chr4:1993659-1993715
  hypo

SEQ ID NO: 353463 - DNA, 410 bp, Homo sapiens; identical to SEQ ID NO: 209497
  chr4:1994335-1994745
  hypo

SEQ ID NO: 353464 - DNA, 206 bp, Homo sapiens
  chr4:1994830-1995036
  hypo
agccccagggaaaccctacgcctgccaagaggcaagcgcgcggcattttataaaaatggtaaggataaaaaaagtcggggatgttaatttaaaacaaaaaggaccactgttgtggagtcaatgttttctctccagaacgcgcatgttgaagcctggctcgctctactggggcttcttgtaggaaaacgcttggctttcccgggcgc

SEQ ID NO: 353465 - DNA, 120 bp, Homo sapiens; identical to SEQ ID NO: 253463
  chr4:2524746-2524866
  hypo

SEQ ID NO: 353466 - DNA, 72 bp, Homo sapiens; identical to SEQ ID NO: 338407
  chr4:2638080-2638152
  hypo

SEQ ID NO: 353467 - DNA, 211 bp, Homo sapiens; identical to SEQ ID NO: 338408
  chr4:2639936-2640147
  hypo

SEQ ID NO: 353468 - DNA, 118 bp, Homo sapiens; identical to SEQ ID NO: 338409
  chr4:2640614-2640732
  hypo

SEQ ID NO: 353469 - DNA, 81 bp, Homo sapiens; identical to SEQ ID NO: 338410
  chr4:2672891-2672972
  hypo

SEQ ID NO: 353470 - DNA, 55 bp, Homo sapiens
  chr4:2926396-2926451
  hypo
aatttgagttgctgaattgtttttcagtgtcacaccgctatttactattcaggcc

SEQ ID NO: 353471 - DNA, 102 bp, Homo sapiens; identical to SEQ ID NO: 345831
  chr4:3217005-3217107
  hypo

SEQ ID NO: 353472 - DNA, 56 bp, Homo sapiens; identical to SEQ ID NO: 345832
  chr4:3217154-3217210
  hypo

SEQ ID NO: 353473 - DNA, 242 bp, Homo sapiens; identical to SEQ ID NO: 338418
  chr4:3245192-3245434
  hypo

SEQ ID NO: 353474 - DNA, 526 bp, Homo sapiens
  chr4:3252217-3252743
  hypo
cggtgagggtcttgcagggtgtgaaggtcataggtgtgcggtgaaggtcacaggtgtggggtgatggttttgggtgtggggagggtcttgcacggagcgagggtggcagcaagagctggaagctgcagggggagaatggcagcagagagcacccggccctgtgggcggcctggacagggctgggcctggggctgccggagagcctgtcagcttccaggatgggagtggcctcactcagctgctccacctccgggtcaggcaggtgagcctggggcagagaggctgagagcacctgagccacttgtgggagaggccacccccactgcccccctcaggcgaggagccggcctccagcacagcagaagggaacccccagtccccagccctagtgggagtggggaagaggcccagcaaggccccggacagaccgccagcctgtgaggtctccgctttcagttgcgttgatttgattttttctgagccttgaaggaggggtccggggcctggccctgcccaaaggccccta

SEQ ID NO: 353475 - DNA, 201 bp, Homo sapiens
  chr4:3252797-3252998
  hypo
agcggctggcttgcgacgtgagggctgaggtgtgagcctgggtatcttcagaggttcggtggacacaggcagctgcccgcggccccactgttcccgtggcctcctagtcctgctcaggcacctggtgaggaagggacgcagagggcagtgggaggtggccacgactgttccagcaggctcccctctgactcaggaattcac

SEQ ID NO: 353476 - DNA, 221 bp, Homo sapiens; identical to SEQ ID NO: 209533
  chr4:3446222-3446443
  hypo

SEQ ID NO: 353477 - DNA, 68 bp, Homo sapiens
  chr4:3447170-3447238
  hypo
tgcatctctgacaaatggggaaactggagctcacgggatcaggctggtccaaggtcacgcagtgggtc

SEQ ID NO: 353478 - DNA, 275 bp, Homo sapiens; identical to SEQ ID NO: 349902
  chr4:3768207-3768482
  hypo

SEQ ID NO: 353479 - DNA, 77 bp, Homo sapiens
  chr4:4417408-4417485
  hypo
cgtttctgagccatctcgtatgccagccctgagcggggccgccactccacaggtgttggccgcatcaggtcttgcag

SEQ ID NO: 353480 - DNA, 145 bp, Homo sapiens; identical to SEQ ID NO: 349905
  chr4:5890606-5890751
  hypo

SEQ ID NO: 353481 - DNA, 199 bp, Homo sapiens
  chr4:7047283-7047482
  hypo
ctacctagagtgctctccctgtaaatcatggcccaggattgagctttccacttaaatatcagtgcctcagagggcccttcccttcaccatcccagcacttacctctacgttagctgctaaggaggcgcagagccttggtggcatatctgtgcgtatctcaggacattttcccgacagcccttggcagttggctttggac

SEQ ID NO: 353482 - DNA, 273 bp, Homo sapiens; identical to SEQ ID NO: 338444
  chr4:8070965-8071238
  hypo

SEQ ID NO: 353483 - DNA, 115 bp, Homo sapiens; identical to SEQ ID NO: 332040
  chr4:8609457-8609572
  hypo

SEQ ID NO: 353484 - DNA, 173 bp, Homo sapiens
  chr4:8615920-8616093
  hypo
ctcacctgcctgctgggcacttggctgacaccccgacgtcccggctgtctctgcgcggctgacaccccggcgtcccggctgtctctgtgcggctgacacccctgacgtcccggctgtctctgtgcggctgacacccctgacgtccccgctgtctctgtgccacaggcatgtcc

SEQ ID NO: 353485 - DNA, 342 bp, Homo sapiens
  chr4:10087759-10088101
  hypo
cgaagccttactcacccgtgtacaatttctcaccatcccacttggaggcccactggagcatggtctcgacaagagccctcagctcccccaggcaacaacctcctcggccccatgctgtgcgtgccttcctttttatactcatcaccctgggctgtgagcccagcaaggaggcgctcccgattcccctctatcctcgaggccacgtctagtgaacctttatggttcagccttccccctctcagcagtgctgctgcccccactgccccggcacaaaggaaccgtgactctatgcatgagcgttgaggtgacctggtccgtaggagtcacacacacaacgttaac

SEQ ID NO: 353486 - DNA, 413 bp, Homo sapiens; identical to SEQ ID NO: 338460
  chr4:10120458-10120871
  hypo

SEQ ID NO: 353487 - DNA, 64 bp, Homo sapiens
  chr4:25013897-25013961
  hypo
cgcgggcttgccgcaatgctgaaattagttcaacacatctgatcaaagccacaacacacctgta

SEQ ID NO: 353488 - DNA, 609 bp, Homo sapiens; identical to SEQ ID NO: 332064
  chr4:25863681-25864290
  hypo

SEQ ID NO: 353489 - DNA, 785 bp, Homo sapiens; identical to SEQ ID NO: 349925
  chr4:36245423-36246208
  hypo

SEQ ID NO: 353490 - DNA, 131 bp, Homo sapiens; identical to SEQ ID NO: 349926
  chr4:36246257-36246388
  hypo

SEQ ID NO: 353491 - DNA, 308 bp, Homo sapiens
  chr4:39447953-39448261
  hypo
cgagtctgtggcttcgtccccacagttcagcgatcctcatctgtacgtgtggaacgccactggcaacagactgttgcaccgagtggaaggggtgaggctgaaaacacgacccgctcaatgcacagattttgtaaacatcaaaaaacaacttgagatgttggcaagaatgaaagtcacccactaccggtttgctctggattgggcctcggtccttcccactggcaacctgtccgcggtgaaccgacaggccctgaggtactacaggtgcgtggtcagtgaggggctgaagcttggcatctccgcgatgg

SEQ ID NO: 353492 - DNA, 96 bp, Homo sapiens
  chr4:42317342-42317438
  hypo
cccagcaggcgcccaccggccgcaccgactgcggggcccacttagcccgtgcccacctggaacctgcgccggcccacaagggccgtgtgcagcccc

SEQ ID NO: 353493 - DNA, 1067 bp, Homo sapiens; identical to SEQ ID NO: 346638
  chr4:42657902-42658969
  hypo

SEQ ID NO: 353494 - DNA, 145 bp, Homo sapiens; identical to SEQ ID NO: 338485
  chr4:48572780-48572925
  hypo

SEQ ID NO: 353495 - DNA, 297 bp, Homo sapiens
  chr4:57181886-57182183
  hypo
cggaagctgaaagcatacgaaaaagacccatgctgggacccagcgaagagacagccccccagcctcctcctgctggtgttcgcgagctcgggaagggtccggagaagtcggagatgcaccgggagcccgcagacaccaccgagggatgcaaatttgccaaagacctcccgtctttccttgtcccaagccttccttaccctccgcagaaagtggtggcccacacagagttcacgacctcgtcggacagcgagactgcaaacgggatagcaaagccagaccctgtgatgccaggtggag

SEQ ID NO: 353496 - DNA, 510 bp, Homo sapiens
  chr4:57182262-57182772
  hypo
acagaagaagaagaagaggcacagcagcaccggagacagcgcggatgcagggccgcctgcagcggggagcgctcgtggagagaaagagatggagggtgtggccctcaagcatggtccatccctcccccaagagcggaagcaagccccttccacccggagggactccgctgaaccttccagcagccgctctgttcctgtggcccaccctgggcctccaccggccagcagccagaccccggctccggagcacgacaaggcagcaaacaaaatgccactggcacaaaagccagcactggctcccaagcccaccagtcagaccccaccagcatccccactttccaaactgagcaggccctacttggtagagctgctgtctcgccgagcggggaggccggacccagagccaagtgagccgtccaaggaggaccaggagagcagtgaccgccggccaccctcgcccccaggccccgaggaaaggaagggacagaagagggacgaggaggaagaggc

SEQ ID NO: 353497 - DNA, 93 bp, Homo sapiens; identical to SEQ ID NO: 346642
  chr4:57687545-57687638
  hypo

SEQ ID NO: 353498 - DNA, 115 bp, Homo sapiens; identical to SEQ ID NO: 338502
  chr4:71706531-71706646
  hypo

SEQ ID NO: 353499 - DNA, 108 bp, Homo sapiens; identical to SEQ ID NO: 338503
  chr4:71857989-71858097
  hypo

SEQ ID NO: 353500 - DNA, 90 bp, Homo sapiens; identical to SEQ ID NO: 338515
  chr4:87993079-87993169
  hypo

SEQ ID NO: 353501 - DNA, 57 bp, Homo sapiens; identical to SEQ ID NO: 338519
  chr4:99936215-99936272
  hypo

SEQ ID NO: 353502 - DNA, 1017 bp, Homo sapiens; identical to SEQ ID NO: 338521
  chr4:100573606-100574623
  hypo

SEQ ID NO: 353503 - DNA, 258 bp, Homo sapiens; identical to SEQ ID NO: 345138
  chr4:100867945-100868203
  hypo

SEQ ID NO: 353504 - DNA, 168 bp, Homo sapiens; identical to SEQ ID NO: 338523
  chr4:103421142-103421310
  hypo

SEQ ID NO: 353505 - DNA, 692 bp, Homo sapiens; identical to SEQ ID NO: 349957
  chr4:103997179-103997871
  hypo

SEQ ID NO: 353506 - DNA, 269 bp, Homo sapiens; identical to SEQ ID NO: 349958
  chr4:106067220-106067489
  hypo

SEQ ID NO: 353507 - DNA, 185 bp, Homo sapiens; identical to SEQ ID NO: 338528
  chr4:106335558-106335743
  hypo

SEQ ID NO: 353508 - DNA, 232 bp, Homo sapiens; identical to SEQ ID NO: 199554
  chr4:111543735-111543967
  hypo

SEQ ID NO: 353509 - DNA, 242 bp, Homo sapiens; identical to SEQ ID NO: 199560
  chr4:113436585-113436827
  hypo

SEQ ID NO: 353510 - DNA, 228 bp, Homo sapiens; identical to SEQ ID NO: 199561
  chr4:113438278-113438506
  hypo

SEQ ID NO: 353511 - DNA, 215 bp, Homo sapiens; identical to SEQ ID NO: 349969
  chr4:115520945-115521160
  hypo

SEQ ID NO: 353512 - DNA, 761 bp, Homo sapiens; identical to SEQ ID NO: 346652
  chr4:124317751-124318512
  hypo

SEQ ID NO: 353513 - DNA, 923 bp, Homo sapiens; identical to SEQ ID NO: 348054
  chr4:141564347-141565270
  hypo

SEQ ID NO: 353514 - DNA, 824 bp, Homo sapiens; identical to SEQ ID NO: 332200
  chr4:142557243-142558067
  hypo

SEQ ID NO: 353515 - DNA, 223 bp, Homo sapiens; identical to SEQ ID NO: 346657
  chr4:149364661-149364884
  hypo

SEQ ID NO: 353516 - DNA, 116 bp, Homo sapiens; identical to SEQ ID NO: 338551
  chr4:152591291-152591407
  hypo

SEQ ID NO: 353517 - DNA, 352 bp, Homo sapiens; identical to SEQ ID NO: 209824
  chr4:154216898-154217250
  hypo

SEQ ID NO: 353518 - DNA, 111 bp, Homo sapiens; identical to SEQ ID NO: 338557
  chr4:154421947-154422058
  hypo

SEQ ID NO: 353519 - DNA, 192 bp, Homo sapiens; identical to SEQ ID NO: 350003
  chr4:154714010-154714202
  hypo

SEQ ID NO: 353520 - DNA, 40 bp, Homo sapiens; identical to SEQ ID NO: 350004
  chr4:156298073-156298113
  hypo

SEQ ID NO: 353521 - DNA, 999 bp, Homo sapiens; identical to SEQ ID NO: 350012
  chr4:174090080-174091079
  hypo

SEQ ID NO: 353522 - DNA, 206 bp, Homo sapiens; identical to SEQ ID NO: 199699
  chr4:184019900-184020106
  hypo

SEQ ID NO: 353523 - DNA, 125 bp, Homo sapiens
  chr4:184667665-184667790
  hypo
agttgtgcgggaacccactgcagggcgggagcgagctcgggcatggcaggctgcaggtcccgagctcttccccatgcagaggccgctgagaccgggtgagaattcaagcatggcacgggcccgcc

SEQ ID NO: 353524 - DNA, 393 bp, Homo sapiens; identical to SEQ ID NO: 199720
  chr4:187647669-187648062
  hypo

SEQ ID NO: 353525 - DNA, 239 bp, Homo sapiens; identical to SEQ ID NO: 350024
  chr4:187648119-187648358
  hypo

SEQ ID NO: 353526 - DNA, 346 bp, Homo sapiens; identical to SEQ ID NO: 338579
  chr4:188427955-188428301
  hypo

SEQ ID NO: 353527 - DNA, 482 bp, Homo sapiens; identical to SEQ ID NO: 338580
  chr4:189552385-189552867
  hypo

SEQ ID NO: 353528 - DNA, 702 bp, Homo sapiens; identical to SEQ ID NO: 338583
  chr4:190462487-190463189
  hypo

SEQ ID NO: 353529 - DNA, 240 bp, Homo sapiens; identical to SEQ ID NO: 338584
  chr5:110225-110465
  hypo

SEQ ID NO: 353530 - DNA, 49 bp, Homo sapiens
  chr5:139637-139686
  hypo
cgctgtgcgcccatgagaaggtggtggtgcagctggcgtccctgcacgg

SEQ ID NO: 353531 - DNA, 248 bp, Homo sapiens; identical to SEQ ID NO: 209893
  chr5:139745-139993
  hypo

SEQ ID NO: 353532 - DNA, 111 bp, Homo sapiens
  chr5:140023-140134
  hypo
ccctcagaggccccagtccccacccaagccacagcaggcccccatttccagggaagcgcctcttgccccgacaccctgacctcaccctgccgccgagggcatacgggcagc

SEQ ID NO: 353533 - DNA, 331 bp, Homo sapiens; identical to SEQ ID NO: 338589
  chr5:453948-454279
  hypo

SEQ ID NO: 353534 - DNA, 758 bp, Homo sapiens
  chr5:465064-465822
  hypo
cgctcctcctctgcggtgagatgccagagccgtggcggagcgaggaggagtgggctcagagcctccggggagccaccgggagccccagcctgggtttcaatgagggtgctcctggccgccagagccgtggagcctgccgctgaccgcgcgtgtctccccagaggatgacggccgaggcgcaccggcgcgtggtggtggagtacctgcgggcggtcatgcagaagcgcatttccttccggagcccggaggagcgcaaggagggtgccgagaagatggttagggaggcagagcagctgcgcttcctgttccggaagctggcgtccgtgagtgtcgcgcaggtccgggctggagaaggcctgtcgctccgcggccctgttcagcctccaccccgggactcgggccagtagatgggagtgtgtcgtgtgtttgtcaggcggggggagcctgggtccaggtcctgcctgaccttgtggttggacacgaatgtccacagaggtagacgcgccggccccgccggcttcccgaggccgcccacagctccctgacggacgcttcccagtctgtcctgcgctgcgaggtgctggctgcctcccacggtctcgccctcaccccagacccctggccctgtcactgagctttcagagtagatcctgaggagtcaggtgaagagggaggttcccagtcaggaaggggctcagccagaatccagctgctcccagcgccgcgggacagccgagggcggctcctcacattgctgc

SEQ ID NO: 353535 - DNA, 258 bp, Homo sapiens
  chr5:465852-466110
  hypo
cggatactgcgacaccatcgtggctgtggccgaagtgatcaagctgacagacccttctctgctctacctggaggtctccactctggtcagcaagtatccagacatcaggtaagggatgcacgtcttagaatcctgccttagaatcctggagtggagcggcaggtccctccttctgtctggggcgggtggggctcctggttcgcaagttcagccctgcagcacggcaagggttcaggtgcggcacagcggggcccaggc

SEQ ID NO: 353536 - DNA, 1300 bp, Homo sapiens; identical to SEQ ID NO: 350025
  chr5:472600-473900
  hypo

SEQ ID NO: 353537 - DNA, 201 bp, Homo sapiens
  chr5:520018-520219
  hypo
cctacggctgcgcgaggcactgcagactccagatacccgtctcgctcctgcctgcccttccagccagggttcaccaagatgtggggcggcctgggcctccgccatcacatccctcagcaacacaagctccacttcgagagcctgcccccaccgcccccacccagccccactgtcctggtttccccgtgggcagtcactgcc

SEQ ID NO: 353538 - DNA, 160 bp, Homo sapiens
  chr5:600977-601137
  hypo
cgcccaccatggcgttagggccacagcctcctgccccatgtgccaggcccggctctgcccagctccctgcagctgcgccagtgtgtgctgtgactcgtgctcctggtttgtcatctgcctctcagtagacaccacggccttcaagctttctccgctccgt

SEQ ID NO: 353539 - DNA, 263 bp, Homo sapiens
  chr5:601222-601485
  hypo
agaagtgaacggcgcggccctccctgagttccggcctggctctggataccaaggagcaaggtggtcaggggtcaggggctggagtggggagattgcctgggagggggctggagggtgtggtggaactgcaggttctctccttgacatgcctgtgggggagcctttcccggccctctctccgctggttttcaccctttctccggtgcagccacactgggcatcccaccccagggatccaggaagggggcgtgtcggccgagtgc

SEQ ID NO: 353540 - DNA, 258 bp, Homo sapiens; identical to SEQ ID NO: 350027
  chr5:676510-676768
  hypo

SEQ ID NO: 353541 - DNA, 356 bp, Homo sapiens; identical to SEQ ID NO: 350028
  chr5:676926-677282
  hypo

SEQ ID NO: 353542 - DNA, 432 bp, Homo sapiens; identical to SEQ ID NO: 338606
  chr5:883821-884253
  hypo

SEQ ID NO: 353543 - DNA, 187 bp, Homo sapiens; identical to SEQ ID NO: 338607
  chr5:913200-913387
  hypo

SEQ ID NO: 353544 - DNA, 338 bp, Homo sapiens
  chr5:1033274-1033612
  hypo
cgtgggctggtgagaggagggcacacccggctgtggctggccgggatagggcctccctcccctccgcaggggtcccaagatcgggctctcagctcaggcccgtctggacaggatcatggtgtggtgaggggagagcagcgagggtccccaatggcgggccacatcctccatgtgccctctgccagccccttcgcctcctcttgtccccctagtggcactccccgctgagaaagctgagggccgcgagcacccgggacaactcctcagcgcagatgacggagagagggcagcaaaccgcgagggcccgcgaggaccgggcgggcagcgcctcaacattg

SEQ ID NO: 353545 - DNA, 40 bp, Homo sapiens
  chr5:1033674-1033714
  hypo
aggcatgtgttgccctaaactgggcatctgtggacacggc

SEQ ID NO: 353546 - DNA, 143 bp, Homo sapiens
  chr5:1037852-1037995
  hypo
cgtttctgaggagatgggaacctgagcctgcactcccagggcctcacactctgacctgtgtccgcagggtcccctcctgtgcaagcaaagcaggagccccagggcagggcctcgcacctccaggcccggtcccgctcccagga

SEQ ID NO: 353547 - DNA, 454 bp, Homo sapiens
  chr5:1038035-1038489
  hypo
ctggtggaacacgtcgtgccagcctcggagcctgctgcccgggccctggacacgcagccccggccgaaggggccggagaagcagttcctcaagtcccccaagggctccgggaagccgcctggggtgccagccagcagcaagtccgggaaagccttcagctactacctgccggccgtcctgccgccccaggcccctcaggacggccaccacctcccgcagcccccaccgccaccctacggccacaagcggtaccgccaaaagggcagggagggccactcgccactcaaggccccacacgctcagcctgccacagtggagcacgaggtggtgcgggacctgccgcccacgccagcaggagagggctacgcggtgccagtgatccagcggcacgagcaccaccaccaccacgagcaccaccaccaccaccaccaccaccacttccacccgtcctagc

SEQ ID NO: 353548 - DNA, 318 bp, Homo sapiens
  chr5:1039295-1039613
  hypo
cggtcccaacactcacggggcgacttctgtgacatgtcagctttggagaaaggtgtgtcctgcaagggtcaggagacggttgcaggccagaaggacgtcccagtgacgtttcggagtcttgcagcctgcaggggtccatgtggttacccggaacaggaaccgtgggggtgctttccgggacccagggggcccgtgccaatgtttctgagtcttggagcctgcaggggtccacgtgtttaccctgaacaggaacatgcgggtgttttccggaatctggcgaggccgcgcggcagttttgcatttacattccttgttttg

SEQ ID NO: 353549 - DNA, 132 bp, Homo sapiens
  chr5:1039683-1039815
  hypo
gaatggcttggatgtttgtcgcctccgagtctcatgctgagacgtgatccgtggtgctgggtggggtctgtgggaggggtttgagccatggcggaagatccctggtgaatggcttggatgtttgtcgcctcc

SEQ ID NO: 353550 - DNA, 236 bp, Homo sapiens; identical to SEQ ID NO: 338614
  chr5:1049758-1049994
  hypo

SEQ ID NO: 353551 - DNA, 263 bp, Homo sapiens; identical to SEQ ID NO: 338615
  chr5:1051312-1051575
  hypo

SEQ ID NO: 353552 - DNA, 1232 bp, Homo sapiens; identical to SEQ ID NO: 338616
  chr5:1051905-1053137
  hypo

SEQ ID NO: 353553 - DNA, 1614 bp, Homo sapiens; identical to SEQ ID NO: 338617
  chr5:1053406-1055020
  hypo

SEQ ID NO: 353554 - DNA, 123 bp, Homo sapiens
  chr5:1055426-1055549
  hypo
cgtacgtggacgtgcacacaggcaggtacacgtccaccggcaggtgcgctgacaggtacatgcgagcacgcacacaaacagacatccgttaagtgtgctcccggggacgtcacagtaagccac

SEQ ID NO: 353555 - DNA, 1823 bp, Homo sapiens; identical to SEQ ID NO: 338620
  chr5:1056108-1057931
  hypo

SEQ ID NO: 353556 - DNA, 327 bp, Homo sapiens; identical to SEQ ID NO: 345841
  chr5:1058847-1059174
  hypo

SEQ ID NO: 353557 - DNA, 98 bp, Homo sapiens; identical to SEQ ID NO: 209967
  chr5:1059425-1059523
  hypo

SEQ ID NO: 353558 - DNA, 317 bp, Homo sapiens; identical to SEQ ID NO: 345843
  chr5:1059556-1059873
  hypo

SEQ ID NO: 353559 - DNA, 97 bp, Homo sapiens; identical to SEQ ID NO: 338622
  chr5:1060676-1060773
  hypo

SEQ ID NO: 353560 - DNA, 342 bp, Homo sapiens; identical to SEQ ID NO: 338623
  chr5:1060864-1061206
  hypo

SEQ ID NO: 353561 - DNA, 811 bp, Homo sapiens; identical to SEQ ID NO: 338625
  chr5:1062902-1063713
  hypo

SEQ ID NO: 353562 - DNA, 860 bp, Homo sapiens; identical to SEQ ID NO: 332282
  chr5:1064412-1065272
  hypo

SEQ ID NO: 353563 - DNA, 890 bp, Homo sapiens; identical to SEQ ID NO: 338627
  chr5:1065329-1066219
  hypo

SEQ ID NO: 353564 - DNA, 1417 bp, Homo sapiens; identical to SEQ ID NO: 345846
  chr5:1068627-1070044
  hypo

SEQ ID NO: 353565 - DNA, 806 bp, Homo sapiens
  chr5:1074389-1075195
  hypo
cagaggcttcccaaagatggcctttgcttcagcaggagccaccctctcccaccccaagcccagggctgtgctggcagaggggccggctccccacacccccaccctgcagcagggacacccccggcccccagctgcgccatccgctctgcaccaggcagtgttcacaccccagaccttgcctgagcggctgaaggtgagaggcccctgagactcaaaggtccccactcaaaggccgacctcagaaacagctcttctgtgcgtctgaggaccacggggcatgggcggtgctcacctccagttcttggtgtgggggggaccgtgctccacgcgcagcagggcgtagcgggcggcgttcagggataggccacggatgccatcgccccactccttctcggccctgtgggaaaggaagtcggggtttgtccagccgcgtacctggaggctcctctcccacctgggaaaggggacttctgggggcaggtgagttggggcaaacaggacccccaggaaaagtccctggatgaggagggaggcctccatgcccacccttgccctgaagggagcccgtcctaggagccaccgggtcagagggtgctgtggctgtggagggaacgaggtctacgtccagcatgcgtgaggtgccttcctcacaggacgggggacaggaggcccatgacagggaagtggctggaccccgggcacgaggcgggtgcaggtggagggagggtgggtgctggggcacggggaaggacgcctgtggctgccgagtgagtacagacacaacctggggacacctcgcgagacac

SEQ ID NO: 353566 - DNA, 1935 bp, Homo sapiens
  chr5:1075478-1077413
  hypo
cgcttacccgcggtactcgatgtacttgtagatgcagccagcgatgagcatggcggacagcgcgtagtaccaggagcagatgaacatcagcgccaggcacaggctcatacccagaaaggacagggtcctgggggcggggcaagtggctcggggcggcccaacgccatgcagcccccacacctcagccaccaccacacggacactgcccctccctcagtaaaactctctgttaacactaggaaaacagtcactgacgcctgacgaccatggctgtactcaaccacctctgaggggtgacgtggctccctgggcccctgtgggagctgtcactccaaaacccagtacatagctccagctcccagcgtgcacacagcacctcggctgtgcatgcaacaaggggctgaagcgtccacccagcgcctgattcctggggaggggagttaagaagacccacagccctgatgggctacgccccaagcctgggaaggctgggctgaccacgggaggtacaaggcacatgcagacacctgggcatcctcgtaaccagaggccttcctcaggtgcagtctcatcagctgcgcaggggcttactccgcaaaggaacagtcaaggacgcgctggggtcttcaggcccagagcagctggccttgtagaggcacccagtgtcccagcctgtggggctcctgacgcctgtgctgagcggcctcaccagtggcagaggcacccagtgtcccagcctgtggggctcctcacgcccgtgctgagtggcctcaccagtggtagaacttgaagcgtggacgccagttgggggtacgtagcagggtctgcacggcgcaggccaggttcacgaacaggtagcacatgaggaagaacctgcagggacggccggccactgatacgggcccactgggcccccctgagcccccagtcactgccacctgggagaccacccttgtcactgtccctcccacctgcgccttgtctccccatgtctgtctctgcacgtgagctgactcagactgattccgaatcaggccccctcaggttccagccatcctgtgaccacctggtccatcaagagatgggccatcgtcccttccccagcagccgtctgtccagccacactgtccctggctgaccccagcgggcggctgcctggaggcctgtgtacttgtcttccccggcgcaactcccttcccggcaggatcctgactgcccacagctggccatgcctgtctactgcttgtcctgagcaggacctcccatccacactgccccacgctccaggcccatacacccatccccaggtccccgtcctgtgggggctcacatggagaggatcggggccacgctgtccagagaggcgatgaggatgccagtctcgcagatgaggactgtcagcagcagcgcccacgtgggctccccgttggccttcccgtggccaaacacctgcagggagaagggcaggaagatggggcagatgacaccacccttttaggagagaagctgcaggctggtcaggtctagcccagatgaatcttaaagacacagaccagcagaaacgcctttcacagtaggtccccgggacatcacgcggctggcctgggaagaagccctgacaaagggctgcagcccaggaggcttcagagctgtgcctacgcccggcttgcctgcaacctgtgtggccccagcctgcccccccgcctcagtttccccgaccacacaacacaggaccagcgtctccagggcactcgcggttccccagaccctgtggtgacctttctcatcaggccaccctcacctcccagaagctgaggcccacggggcctgtgtgcctgtccccttcctggacaccatgccctaggcccggctgggactgaagatgcaaccacacaaaggccctgcgggtcggcaccctgccgagggaccagcgac

SEQ ID NO: 353567 - DNA, 1489 bp, Homo sapiens
  chr5:1077437-1078926
  hypo
cgaccttcccacagctgcccctgggcccaggtagcaggaggagccacaatcggcagctctgggcacagcacacggacaggacccatgcgggcgtccgtgcaatcctcagagcagccacacacactggctgcaggtggctggtgacgccacctcccacgggctgaagagctcagccacacagagaaagatgtggcaggcaggcagagggcttctgaccagacaacagaccaggcacctctggacacgtggctgtgggccctcacagccgctcctgacacacccggggccgagctcggagggacctgcaggcaggagggctagaattgcctctgcccaccacccacctcccaccactcccatgctctgtgcagtggccaggggcagaatgaccaccatggggtccaagccgcgggcatgcgtcccacacacggcactgtgaggatcccgcaggggaggagagcccccgaccctgaccttccagggtccccccgacgagggtgcgggactcacctgcaggaaggggacgatgccgtcacgggcaatggcctgcagtaggcgcggtgcccccgtgaggctctgcaggccggcaccgcaggtggagaagaaggagccgatgacgatgacccagggggagggccaggccagcatgccgatgaccaggttcccctgcagggcctccccgaacctgcaggcaggcgggcaggcgggcgggcggctttcagaagtgagcctgagtcagacaaaatgtcttctcccacccagagcgaggggcccagtgcagtgggggcgactccttggaaagctgaggcccggcctccagtccccgttggctgaaacctccaccaggctctgcccagcatggccagaatgctctggagggtcttcagcgggggagggggtcctgctcacctcagggtcgctcttgggagcagggaagacccagcctggcatcagcttcagtcagggaccacccaggacccccggggccttggggctgccagacacgcacaccccatgaggatgcagggtcagtgatgacctgcctgggaccccactacttctccacttgccagcagggctgagggatctcccagggccaagcctcacccgtccacacccctgtggcctccccaggaagggcctgcgcccccagccgcatcagggcttggagttggctctgaacggttccccaggccctaggctccagcggaagagacgacacatcagaccaagggatcccaaccctgggaccaggacgccttcagctctgcacgcggacatgaagtcctagggcgatgtaatttcaaagccgaattcatcctcaggaaaacccttgaagactacaggctttgcacgaaaactgcaggtggaaacgtacttatctcgtaagaccacgccttcaatgcaggccccaaacagcacaatgcaggagagatccacagccctcgtcaaggaaaggcaggtccgtgggtgcagggtcctcaggtac

SEQ ID NO: 353568 - DNA, 1407 bp, Homo sapiens
  chr5:1078976-1080383
  hypo
cgggccgcaggatccaggtgggcggggaccgttctgcatcccatcccatcccgggcacgtcctgtcccccgtgtcctcagcgcaccctcctggggctctgtccagcgccacagaacggggccctggggtggtggacacacacctggcctggtgcttgaccgccagggattggcaggggaccatgctgaggggacaatgctcggctggaaagaggcagccttgggattgagaagccagaggccccgcgggcccagcctgccggcggcacaccccacacaccgctgcgcatcactgtccacacgcggcagggtgactgcttctgttttctctacgatcgcatcacacagtggtgaagaagccagggtcctgacagcagcccttgccccgtctcccagggaggatgacgtggtgagagcacagcctaacctgggaagtcacatgctggtggccgagggtatgatgctgagccggggagggcatgggggcctccccccaggcagaggctggaaccctcgcctgcacccctccaaggatacagatgaaagacgtcgtcactatggccaggatggtccccgtggggatggacttctgtgcatccttgaggtccccggaccggtttgaacccgccatgatacctgtgaacatggaaaatgctgcaaagacccatctgaggagtcagtgccatgtgatggcagcccctgcccagaaagctggaaaggcggtctctggggagaccccgagcgtgagctgcagccgaggctgcagtccaagctccgccagcccacgctgcaatactgcggctgaggggatgcgggcccaggcacgcggatgagcacccacgtctactgctcccctggatccgaggacgagaaccgaccccgtcactgacccccacgccccccacacccagggcttctctggagcctgtgttaatcccatggccaagggtcagcccagagacggtgctgagcaatggctcacaggcccccaggacctaaggactttgggaatgagatcctagaacgactcagcccagccagccaggccagcagacgctgcgacccctcccgctgtggcaccaccttgctctagggagccacggccggggatgtttccacacaatcggctcctacaaagctctgggaagccgggtcggtgggggccacttcacgcctggctcggtcccatccaaggcgcagcctgaagcacccattgctcggggtggcctgggaggcagcagagcccacaatccagtgccgcggagacacccggagccacgcagaggctctgcccccacgccctccacccgcggctcagagacacccggagccacgcagaggctctacccccacgccctccacccgcggcgcggagacaccaggagccacgcagaggctctgcccccac

SEQ ID NO: 353569 - DNA, 708 bp, Homo sapiens; identical to SEQ ID NO: 338635
  chr5:1083641-1084349
  hypo

SEQ ID NO: 353570 - DNA, 545 bp, Homo sapiens
  chr5:1084386-1084931
  hypo
cgtgctaaatgaagcgttctagacgtaaacaattcacacgttttccaccgcgcggtgccgagtagtgaggtggaacccagcaacctccccccgcgccagcacagccacgctgcagccgctccctccccgaggccctcggcggcgtcctggccgggtcagctgtcacaatctcagtgtctgagttcaagccaccctcgtgccacgtgccaacggccaagagcacaggagtgccgcccccgacgtataagccaggcctgtacgtggaaaacagtctacacagggccgtagcgtcaagcatcggcagggggtctcaggacgggtccccgagggggagggcagctgtgcttccctaaaacgggcttgtggggttgcagctgttctgcctccctctgttttgaggcctctatgaggctgttccttcaggggctccctccacgcagagacggcaaaaccgcgggagcctcaaggggcttggctgctggccctttctggacctgctccctgcgggctctggtggccactcccatgttccaggaccctgggcc

SEQ ID NO: 353571 - DNA, 1302 bp, Homo sapiens
  chr5:1085196-1086498
  hypo
cgagcccacgggggttcccgccacggtcacacccagcccaccccttgcggggagctcggcgtcaaggatgatggacgagaggcgggcagagcccatgggacctggccccagccccacacccacccacggctcagaggccccgagactcacgggatgtccggggggtcgaaggcagacttgatgacgccggcatagatggccaggatggacagcacgacgcaggccaggaagaccagcgccagcttgttgacatacttgacgcccacgaagaccaccagggccatgagcacgagcgtgcacgtgccgtacacacgcatgttgtgcagcatggcggccgcctcgccacctgcagcctccgcctggaagatggccgcacccggggagatgtacgtctgtgggaacaaggccggtcgggaggccgtccccggacacaactccccagtgcccgtccctcccgcaagcccccagcgccacacaggggcctcctcccaacaggtgccggggccatcgggacgcatccgtgctggacggagcccgcgggggtcagcgcacaggcaagggacggagcccgcgggggtcagcgcacaggcgagggacggagcccgcgggggtcagcgcacaggcgagggacggagcccgcgggggtcagcgcacaggccatggacagccaggggcctgaacgtttcccaggaaccacccgggagccttagagtaaagcaacttcaggacccggggcatccgcatgtccgcactcaaaagaaacaccttctgctaagaggaatgtgactgctgcccagagagctcggcccaccccggctggacgtcctggacacacacagggtctgaccacgccggcggggggcaacctctgttctgcccagattcaagggaagggacggagacgtgagacagtgctgctcagctccctcaagaccaggacaggactggggtgcagcaggcatggagggcatggcacccacccccaccaaaggggatcctgggagtgcggcagccacggcacccggggcaggtggaaagatggagggacatggccaggggactcgggttgggacgggtgtgggtgcgaccccactgaaaggtttcagaaccttcttggccatgtggctctcttcaggaacccaggaggccaggaaccaggtctggcagcagagggaggggcagaaagactggggacaggggctcaggtgagcgtctctgaagccctgcagggacagcgggtttcagaacctcagcaggaaggacagcacccgtcggccagagaagggcggttcccgtccccac

SEQ ID NO: 353572 - DNA, 1829 bp, Homo sapiens
  chr5:1087446-1089275
  hypo
cgcgtacatcagtggcagccccagcccccacttccactaagttttgcttatgaaaaaggcaaaagagaaactaggatgttcaggagtcgtctcgtgtactgtgaaccacgcacgctatcactggcgggaaagccgggcgcaaccccagggctgcctggagaacacagctctccctgctctgagcagtgcgtgtggcatgtggaaggggtcctaatggacgcggccatcgtgaagcagagactggtcccttggctgcggagggagacccctggtgaaggccctcgtgctctcctgaggccggggaagtccgctgagcaccaagcgatgcccccgtggggatggggaccagctgcgtgaggacctggtgctgagcaagcccagccgttaacacgcgcagcacacatgcactcagaagcagacgtggcagcgtctccgttcactagttatttcgtatcgtaattcgtttattactaattaacagtatcatctcagtttactagttattacgtattgtaattaacttattactaattaatatcatctcggttcactagttatttagttattatgtattgtaattaacttattactaattaacaaggtcagggcagtgttttgtcttcaccttccctcgtgagatacaggttccaagaactcagcctatggcacacgctgggctacaggagccactggaatcgcccgtgcctccccctccccagcccgctgcctggtgggcactgcctaccctggcaagagacggtcaccacgcagcaaaatggggaagaaaaccaaacagccgtgacctcacggctcaaacgccagaggagccagtggagaacacgcagaaggcccggctgagacccccaggcagcccccggcccggcctcgccaagcggcctcctcgcggttgccgtgcggcaaaacacagactcctctaacaggactcagggccgcggctggcgggcaccccttacctgggaccacaccgttggtagcgatcgcactcatggaaatggcggtcagcattgtctgcaaaaagacaggcagccatctgaggagagttttccaacagcctgccggcatcgcaacactcccaagtcagggtctatgacccggctcccgccgaatgccagcccccaactccagggctctccatctcaatggagtggctaggaaacaggacctggaggctcccgggcaccaggcatgcgtgtcctggttcccaccccttcccctatgacagcgacccctgaaagtgcccaaggtccttccaaactggaggtgatgtcatcaaaacacagggtgtcccttcccttggaagcctcagcccccgggtgccgccccatgacacccaccactggctgagatgcctgtccgcagacacgggtaaatgaggtgccagcacgccagtcaacacgccagcactaaccccggacagtgtggcatctcatccccgcagctgcccggctctcgtggaggagacggcgctgaacgacgtctacacgggcgtctggggagggccctactgtccggctgccaccgcccgaaggcacaaccacagcggccaggggagacggcatctggggagagccctactgtccagctgccaccgcccgaaggcacagccacacctggccgggggagactcacacatgtgcagcacatggccacgatgaggaaggactccaggacaccagccacccccacgatccacgtcaggcgcaggaagaggatgacgcccaggatgttctgcaggcacggcaggtagacgccgatgaaggtgcccatgcgcggagcctgcgacagagcatagcgtgtcccaggggctc

SEQ ID NO: 353573 - DNA, 212 bp, Homo sapiens; identical to SEQ ID NO: 338639
  chr5:1090437-1090649
  hypo

SEQ ID NO: 353574 - DNA, 134 bp, Homo sapiens; identical to SEQ ID NO: 348073
  chr5:1094049-1094183
  hypo

SEQ ID NO: 353575 - DNA, 390 bp, Homo sapiens; identical to SEQ ID NO: 338643
  chr5:1095619-1096009
  hypo

SEQ ID NO: 353576 - DNA, 239 bp, Homo sapiens; identical to SEQ ID NO: 338645
  chr5:1114657-1114896
  hypo

SEQ ID NO: 353577 - DNA, 635 bp, Homo sapiens; identical to SEQ ID NO: 338646
  chr5:1115157-1115792
  hypo

SEQ ID NO: 353578 - DNA, 191 bp, Homo sapiens
  chr5:1120359-1120550
  hypo
cgctctcaagggcaggggagcaagcccgggtgcagctgggtgggcacctgccgtccacagggcccccccaccggcagtgtccggatcacacgaagacggcttacagaccagcaaggaaacgctgaacccggaggacaagagggcaaagacttgaactaacatggaggagcacgtggagatgccacctcgcc

SEQ ID NO: 353579 - DNA, 178 bp, Homo sapiens; identical to SEQ ID NO: 338650
  chr5:1122647-1122825
  hypo

SEQ ID NO: 353580 - DNA, 277 bp, Homo sapiens; identical to SEQ ID NO: 338660
  chr5:1702104-1702381
  hypo

SEQ ID NO: 353581 - DNA, 185 bp, Homo sapiens; identical to SEQ ID NO: 338665
  chr5:1808331-1808516
  hypo

SEQ ID NO: 353582 - DNA, 625 bp, Homo sapiens
  chr5:1809065-1809690
  hypo
cggtattctacagtgtcgatgatccagctggtggacttttcccttctgcgttggttttgatgctgtgtcacagaatcacatattttatgttttatctttaatagatgtaatctcagtttgacacaataggactttgactcctaaagatttaaacctacatatctttatgcccaatcatttgatcatcaagaggtcaatggaaagagtgtttcctattttttacattagtgacgggcgagggactcattttacagaggttggacacttcactgtgtatgatgtgccgtgtgcttaacaagagatggcgtgcgggctgctgtgacggttctcccttgattccctcgtgaagtgcagcagcgctcttcagtttttctcacctttccccaggtgaaagcaggtgagaatggagccttgagtctgaacccagagcggggctttgtgttgtggctgggtgtgttcactgccggagcttggccgtgtgaacccggagccgggctctgtgtcgtggctgggtgtgttcactgctggttctttgtattcctgcggttgcactgagctcctggagccagacgtttgctggtgatgggcggtcagggtcacccttgagctgcgcacactaaatgac

SEQ ID NO: 353583 - DNA, 194 bp, Homo sapiens
  chr5:2007541-2007735
  hypo
cgaggaatgacaatgaatgttggagagcctctcccgcagatgggtggcacggcctcagcctgagggaaacgtgttcccatcccgctccgggggcaagtccccgccggctcggaccccagggaggtggaggcaggcaccgtccccttgtccgggtgaccctgtgtggcctccctgctaagcccgcagcctgggct

SEQ ID NO: 353584 - DNA, 36 bp, Homo sapiens
  chr5:2007797-2007833
  hypo
gcaggcggggtcctccagtgacagctgatgtgtcgc

SEQ ID NO: 353585 - DNA, 61 bp, Homo sapiens
  chr5:2225378-2225439
  hypo
cgcaggtgcacagcaagggagccgagtttcctccagcgcttgaaaaaaaagtgtttacttt

SEQ ID NO: 353586 - DNA, 133 bp, Homo sapiens
  chr5:2225469-2225602
  hypo
acggcctggaagcgcacttgtgatctcagcaaactgctgaaatctgtactgattgaggaaaagtatccctgttaaaggacgcgtgttcatgtatgaaagaagtggcttgaaatggaagatcgttcttgttccc

SEQ ID NO: 353587 - DNA, 297 bp, Homo sapiens; identical to SEQ ID NO: 304031
  chr5:2261313-2261610
  hypo

SEQ ID NO: 353588 - DNA, 418 bp, Homo sapiens; identical to SEQ ID NO: 338677
  chr5:2371462-2371880
  hypo

SEQ ID NO: 353589 - DNA, 36 bp, Homo sapiens
  chr5:3221011-3221047
  hypo
cggcgcactgtgctcctggtcctggcgcgagcatct

SEQ ID NO: 353590 - DNA, 142 bp, Homo sapiens
  chr5:3221181-3221323
  hypo
ttccagatgtcacttccaatgccagcccttccgcatgatagctctgtcaccaggagcgctcgggcgccttcactctgcttgcgcctctaaagcacacctgccccgcccacctggatctgctgtcaatagctgtcgggcgtgc

SEQ ID NO: 353591 - DNA, 51 bp, Homo sapiens; identical to SEQ ID NO: 348077
  chr5:3324702-3324753
  hypo

SEQ ID NO: 353592 - DNA, 283 bp, Homo sapiens; identical to SEQ ID NO: 348078
  chr5:3325333-3325616
  hypo

SEQ ID NO: 353593 - DNA, 130 bp, Homo sapiens; identical to SEQ ID NO: 338685
  chr5:3326328-3326458
  hypo

SEQ ID NO: 353594 - DNA, 113 bp, Homo sapiens; identical to SEQ ID NO: 304098
  chr5:3740590-3740703
  hypo

SEQ ID NO: 353595 - DNA, 327 bp, Homo sapiens; identical to SEQ ID NO: 304099
  chr5:3761240-3761567
  hypo
